United States Patent Application Publication US 2005/0244851 A1 - sequence listing, part 134

SEQ ID NO: 5230631 - DNA, 25 bp, Homo sapien
tgctctcgggtatttactccactgt

SEQ ID NO: 5230632 - DNA, 25 bp, Homo sapien
cctctctaaatttagccactgtcat

SEQ ID NO: 5230633 - DNA, 25 bp, Homo sapien
ccctctctaaatttagccactgtca

SEQ ID NO: 5230634 - DNA, 25 bp, Homo sapien
tgaaatctgcttatctgagaaccca

SEQ ID NO: 5230635 - DNA, 25 bp, Homo sapien
tgagaacccaatctcctttgccctt

SEQ ID NO: 5230636 - DNA, 25 bp, Homo sapien
tgagcccaaggcattttgaaatctg

SEQ ID NO: 5230637 - DNA, 25 bp, Homo sapien
gctcccttgtctgggcctcagtgag

SEQ ID NO: 5230638 - DNA, 25 bp, Homo sapien
gttactgatgggtattctgcagcca

SEQ ID NO: 5230639 - DNA, 25 bp, Homo sapien
catagagatagtttgttactgatgg

SEQ ID NO: 5230640 - DNA, 25 bp, Homo sapien
ctgaccattgtaggtaacatagaga

SEQ ID NO: 5230641 - DNA, 25 bp, Homo sapien
ccattgtaggtaacatagagatagt

SEQ ID NO: 5230642 - DNA, 25 bp, Homo sapien
ttccatggtcatcaaaattgacatc

SEQ ID NO: 5230643 - DNA, 25 bp, Homo sapien
ggtcatcaaaattgacatcatgctc

SEQ ID NO: 5230644 - DNA, 25 bp, Homo sapien
gcctagcaccatcattccatggtca

SEQ ID NO: 5230645 - DNA, 25 bp, Homo sapien
caatgtgatatggaccacagcctag

SEQ ID NO: 5230646 - DNA, 25 bp, Homo sapien
tggactaagacaatgactaaggtgg

SEQ ID NO: 5230647 - DNA, 25 bp, Homo sapien
aagcagagacctatgtctcaccaga

SEQ ID NO: 5230648 - DNA, 25 bp, Homo sapien
ggtttaaggcgccatcttagaagca

SEQ ID NO: 5230649 - DNA, 25 bp, Homo sapien
gcattccttccttataggaggcaca

SEQ ID NO: 5230650 - DNA, 25 bp, Homo sapien
ttcttgccaagttgacgcagtgtgc

SEQ ID NO: 5230651 - DNA, 25 bp, Homo sapien
cagtgtgcggatactagagacagca

SEQ ID NO: 5230652 - DNA, 25 bp, Homo sapien
gagacagcacaccaatcaaattcca

SEQ ID NO: 5230653 - DNA, 25 bp, Homo sapien
caggattgcaattcaccaccaccgt

SEQ ID NO: 5230654 - DNA, 25 bp, Homo sapien
tgatggtagatgtctaggattctct

SEQ ID NO: 5230655 - DNA, 25 bp, Homo sapien
ctcctgatggtagatgtctaggatt

SEQ ID NO: 5230656 - DNA, 25 bp, Homo sapien
tcctgatggtagatgtctaggattc

SEQ ID NO: 5230657 - DNA, 25 bp, Homo sapien
cctgatggtagatgtctaggattct

SEQ ID NO: 5230658 - DNA, 25 bp, Homo sapien
cagctgagaagatggagcgatcctc

SEQ ID NO: 5230659 - DNA, 25 bp, Homo sapien
gcttgtgcccatgatcttgacacca

SEQ ID NO: 5230660 - DNA, 25 bp, Homo sapien
tctggcctccaactgatatgatgca

SEQ ID NO: 5230661 - DNA, 25 bp, Homo sapien
gaactgccaggttgtttggaatctg

SEQ ID NO: 5230662 - DNA, 25 bp, Homo sapien
caacaagcaggggtagtccacagac

SEQ ID NO: 5230663 - DNA, 25 bp, Homo sapien
cataggaaggcctcaacaagcaggg

SEQ ID NO: 5230664 - DNA, 25 bp, Homo sapien
ctcaaaacataggaaggcctcaaca

SEQ ID NO: 5230665 - DNA, 25 bp, Homo sapien
caggggtagtccacagactttgcaa

SEQ ID NO: 5230666 - DNA, 25 bp, Homo sapien
tagacttgactggttctcagaacag

SEQ ID NO: 5230667 - DNA, 25 bp, Homo sapien
ccaaagggaatcctggtagctctag

SEQ ID NO: 5230668 - DNA, 25 bp, Homo sapien
taaaactgacgaagctgaggatgga

SEQ ID NO: 5230669 - DNA, 25 bp, Homo sapien
taagccttaacaggattcagcccag

SEQ ID NO: 5230670 - DNA, 25 bp, Homo sapien
aactctagtcgcctcttctaggaat

SEQ ID NO: 5230671 - DNA, 25 bp, Homo sapien
tgagaaactctagtcgcctcttcta

SEQ ID NO: 5230672 - DNA, 25 bp, Homo sapien
gaataccacattcatagcagaccca

SEQ ID NO: 5230673 - DNA, 25 bp, Homo sapien
agagaataccacattcatagcagac

SEQ ID NO: 5230674 - DNA, 25 bp, Homo sapien
agcgtccatttctacttctcgggcc

SEQ ID NO: 5230675 - DNA, 25 bp, Homo sapien
ccatctttgccaacagcgtccattt

SEQ ID NO: 5230676 - DNA, 25 bp, Homo sapien
tctttgccaacagcgtccatttcta

SEQ ID NO: 5230677 - DNA, 25 bp, Homo sapien
catttctacttctcgggccccttca

SEQ ID NO: 5230678 - DNA, 25 bp, Homo sapien
tttcaatggccccttggctgatggt

SEQ ID NO: 5230679 - DNA, 25 bp, Homo sapien
gcatcagagtggcatctcccgagtg

SEQ ID NO: 5230680 - DNA, 25 bp, Homo sapien
gtggcatctcccgagtggacacctg

SEQ ID NO: 5230681 - DNA, 25 bp, Homo sapien
gctgatggtttgtgtgggcagcatc

SEQ ID NO: 5230682 - DNA, 25 bp, Homo sapien
tagtgtgctaaagagcatatcttag

SEQ ID NO: 5230683 - DNA, 25 bp, Homo sapien
agagcatatcttagtttttgaaaac

SEQ ID NO: 5230684 - DNA, 25 bp, Homo sapien
gcataatcgtatagtgtgctaaaga

SEQ ID NO: 5230685 - DNA, 25 bp, Homo sapien
taaaaagcataatcgtatagtgtgc

SEQ ID NO: 5230686 - DNA, 25 bp, Homo sapien
ctttgcaatcttccgggtagcatcc

SEQ ID NO: 5230687 - DNA, 25 bp, Homo sapien
gacaagaaattggacgttgaatgga

SEQ ID NO: 5230688 - DNA, 25 bp, Homo sapien
gcctttgcaatcttccgggtagcat

SEQ ID NO: 5230689 - DNA, 25 bp, Homo sapien
aaattggacgttgaatggaccagag

SEQ ID NO: 5230690 - DNA, 25 bp, Homo sapien
caacatgacgtaacacagtggtggt

SEQ ID NO: 5230691 - DNA, 25 bp, Homo sapien
tagcctgggccttcaaataaggtag

SEQ ID NO: 5230692 - DNA, 25 bp, Homo sapien
cagagagatgcaaaccaacatgacg

SEQ ID NO: 5230693 - DNA, 25 bp, Homo sapien
taggtggcatacagtgaccttccca

SEQ ID NO: 5230694 - DNA, 25 bp, Homo sapien
caaaacagactaaggcagttaccga

SEQ ID NO: 5230695 - DNA, 25 bp, Homo sapien
agaatcataagccaagtaaacccct

SEQ ID NO: 5230696 - DNA, 25 bp, Homo sapien
caatgctggttactactatggtctg

SEQ ID NO: 5230697 - DNA, 25 bp, Homo sapien
tgcgagtaggaggtaaatcaatgct

SEQ ID NO: 5230698 - DNA, 25 bp, Homo sapien
gtcagcaggaattatgggatggtcc

SEQ ID NO: 5230699 - DNA, 25 bp, Homo sapien
cttaattgcaacatagtcagcagga

SEQ ID NO: 5230700 - DNA, 25 bp, Homo sapien
atcaatgaagtcaaccccaagagtc

SEQ ID NO: 5230701 - DNA, 25 bp, Homo sapien
aggatcgagaagctctcaagttaca

SEQ ID NO: 5230702 - DNA, 25 bp, Homo sapien
tctcacatctcagaatggggtcagc

SEQ ID NO: 5230703 - DNA, 25 bp, Homo sapien
catctcacatctcagaatggggtca

SEQ ID NO: 5230704 - DNA, 25 bp, Homo sapien
acatctcagaatggggtcagcatcc

SEQ ID NO: 5230705 - DNA, 25 bp, Homo sapien
ggggtcagcatccctcaaccggggc

SEQ ID NO: 5230706 - DNA, 25 bp, Homo sapien
tggggtatcttaaatcctgtggaaa

SEQ ID NO: 5230707 - DNA, 25 bp, Homo sapien
gtatgaataccttcaccaaagcaag

SEQ ID NO: 5230708 - DNA, 25 bp, Homo sapien
ctggatgcctatcaggatgcctttc

SEQ ID NO: 5230709 - DNA, 25 bp, Homo sapien
atgaataccttcaccaaagcaagcc

SEQ ID NO: 5230710 - DNA, 25 bp, Homo sapien
tggaacattacattgtgaccctctg

SEQ ID NO: 5230711 - DNA, 25 bp, Homo sapien
catcgctcaagtagagtggttctca

SEQ ID NO: 5230712 - DNA, 25 bp, Homo sapien
tgacagtatcgacagttcccagcca

SEQ ID NO: 5230713 - DNA, 25 bp, Homo sapien
gacaccaggcagaacctcattatgg

SEQ ID NO: 5230714 - DNA, 25 bp, Homo sapien
tggattcctgaccattgccatcagg

SEQ ID NO: 5230715 - DNA, 25 bp, Homo sapien
ttcctgaccattgccatcaggagtt

SEQ ID NO: 5230716 - DNA, 25 bp, Homo sapien
gattcctgaccattgccatcaggag

SEQ ID NO: 5230717 - DNA, 25 bp, Homo sapien
cctggattcctgaccattgccatca

SEQ ID NO: 5230718 - DNA, 25 bp, Homo sapien
ttaggagccagtaccgagtcaggct

SEQ ID NO: 5230719 - DNA, 25 bp, Homo sapien
gacaatgttacatgttgccggatgc

SEQ ID NO: 5230720 - DNA, 25 bp, Homo sapien
gtactgctcttcaataactaggcca

SEQ ID NO: 5230721 - DNA, 25 bp, Homo sapien
tcagatccacttcggttctacaagg

SEQ ID NO: 5230722 - DNA, 25 bp, Homo sapien
ccaaggaatcttggccggaatgatt

SEQ ID NO: 5230723 - DNA, 25 bp, Homo sapien
cttgaaaccttcattgtgtaattgt

SEQ ID NO: 5230724 - DNA, 25 bp, Homo sapien
aaaccttcattgtgtaattgttcag

SEQ ID NO: 5230725 - DNA, 25 bp, Homo sapien
aattgttcagccacaccaaggaatc

SEQ ID NO: 5230726 - DNA, 25 bp, Homo sapien
gacattgttggcgttgagccagtct

SEQ ID NO: 5230727 - DNA, 25 bp, Homo sapien
agggacattgttggcgttgagccag

SEQ ID NO: 5230728 - DNA, 25 bp, Homo sapien
tgttggcgttgagccagtctgatgt

SEQ ID NO: 5230729 - DNA, 25 bp, Homo sapien
cattgttggcgttgagccagtctga

SEQ ID NO: 5230730 - DNA, 25 bp, Homo sapien
taattatcatggacaaatttagtgt

SEQ ID NO: 5230731 - DNA, 25 bp, Homo sapien
caacagctgtcctccgaatcacata

SEQ ID NO: 5230732 - DNA, 25 bp, Homo sapien
tgaggagagggattccactatcaac

SEQ ID NO: 5230733 - DNA, 25 bp, Homo sapien
taatcactaggtcaatgctgccatc

SEQ ID NO: 5230734 - DNA, 25 bp, Homo sapien
actgtactgcctgtagtggaaaaga

SEQ ID NO: 5230735 - DNA, 25 bp, Homo sapien
gaaaagactcttggagtccaccttg

SEQ ID NO: 5230736 - DNA, 25 bp, Homo sapien
cagcactgtactgcctgtagtggaa

SEQ ID NO: 5230737 - DNA, 25 bp, Homo sapien
tccaccttgcgagatttctgcacag

SEQ ID NO: 5230738 - DNA, 25 bp, Homo sapien
aggttgatttaataatggggctggg

SEQ ID NO: 5230739 - DNA, 25 bp, Homo sapien
ttagataacatgtggctcaggttga

SEQ ID NO: 5230740 - DNA, 25 bp, Homo sapien
caggttgatttaataatggggctgg

SEQ ID NO: 5230741 - DNA, 25 bp, Homo sapien
gataacatgtggctcaggttgattt

SEQ ID NO: 5230742 - DNA, 25 bp, Homo sapien
tgcaaaagacacagaatattaaggc

SEQ ID NO: 5230743 - DNA, 25 bp, Homo sapien
caaaagacacagaatattaaggcat

SEQ ID NO: 5230744 - DNA, 25 bp, Homo sapien
attgcaaaagacacagaatattaag

SEQ ID NO: 5230745 - DNA, 25 bp, Homo sapien
aagacacagaatattaaggcataac

SEQ ID NO: 5230746 - DNA, 25 bp, Homo sapien
tattctgccctgttaaagtgtcctg

SEQ ID NO: 5230747 - DNA, 25 bp, Homo sapien
gcctagtccaccaaaaatacagtat

SEQ ID NO: 5230748 - DNA, 25 bp, Homo sapien
catgaagagtaacttaggaaggact

SEQ ID NO: 5230749 - DNA, 25 bp, Homo sapien
tacacataagcacataggcaagcct

SEQ ID NO: 5230750 - DNA, 25 bp, Homo sapien
tcaacagaatccatcgtcttaaggg

SEQ ID NO: 5230751 - DNA, 25 bp, Homo sapien
aatggtgtccttgcccttacagtgg

SEQ ID NO: 5230752 - DNA, 25 bp, Homo sapien
aattaatagtgcagtgtgggacccc

SEQ ID NO: 5230753 - DNA, 25 bp, Homo sapien
tcactcgggccaagttaaaatccaa

SEQ ID NO: 5230754 - DNA, 25 bp, Homo sapien
tcagcaataaacatgagcaactgtc

SEQ ID NO: 5230755 - DNA, 25 bp, Homo sapien
ctgtctgcatgattcctcttttgat

SEQ ID NO: 5230756 - DNA, 25 bp, Homo sapien
gagtccagctaactctacattccct

SEQ ID NO: 5230757 - DNA, 25 bp, Homo sapien
ggaatagtttgagtccagctaactc

SEQ ID NO: 5230758 - DNA, 25 bp, Homo sapien
ggatttatcatcagacatgctaacg

SEQ ID NO: 5230759 - DNA, 25 bp, Homo sapien
taagtggagcttatcaaagttgagt

SEQ ID NO: 5230760 - DNA, 25 bp, Homo sapien
tgtctattctagaaccatcatcctg

SEQ ID NO: 5230761 - DNA, 25 bp, Homo sapien
ctctaccctgatttgagatcctggg

SEQ ID NO: 5230762 - DNA, 25 bp, Homo sapien
cctcagcttcatcttccttagccat

SEQ ID NO: 5230763 - DNA, 25 bp, Homo sapien
taatccatgatctcggataagtgcc

SEQ ID NO: 5230764 - DNA, 25 bp, Homo sapien
gcatcacataatccatgatctcgga

SEQ ID NO: 5230765 - DNA, 25 bp, Homo sapien
catgatctcggataagtgcctccat

SEQ ID NO: 5230766 - DNA, 25 bp, Homo sapien
caaagcatcacataatccatgatct

SEQ ID NO: 5230767 - DNA, 25 bp, Homo sapien
tcatgctgatagttaggaattttct

SEQ ID NO: 5230768 - DNA, 25 bp, Homo sapien
cctgagcacccattagagtcaattt

SEQ ID NO: 5230769 - DNA, 25 bp, Homo sapien
tgtctgcagctacgtaataacaata

SEQ ID NO: 5230770 - DNA, 25 bp, Homo sapien
ttctgcttgcttaggaagaccatca

SEQ ID NO: 5230771 - DNA, 25 bp, Homo sapien
tctcaagatgtacatcagctgttcc

SEQ ID NO: 5230772 - DNA, 25 bp, Homo sapien
ctgggtagccaaaaagataatgaca

SEQ ID NO: 5230773 - DNA, 25 bp, Homo sapien
aagataatgacaatcataaacctcc

SEQ ID NO: 5230774 - DNA, 25 bp, Homo sapien
atgacaatcataaacctccttcctg

SEQ ID NO: 5230775 - DNA, 25 bp, Homo sapien
ggtagccaaaaagataatgacaatc

SEQ ID NO: 5230776 - DNA, 25 bp, Homo sapien
ctctgatattcttgccagacctcat

SEQ ID NO: 5230777 - DNA, 25 bp, Homo sapien
gagatgagccatacttattgtagca

SEQ ID NO: 5230778 - DNA, 25 bp, Homo sapien
tccaagagatgagccatacttattg

SEQ ID NO: 5230779 - DNA, 25 bp, Homo sapien
gagccatacttattgtagcaatgac

SEQ ID NO: 5230780 - DNA, 25 bp, Homo sapien
cttattgtagcaatgactcatttca

SEQ ID NO: 5230781 - DNA, 25 bp, Homo sapien
cagttcctactggaataaagtcttc

SEQ ID NO: 5230782 - DNA, 25 bp, Homo sapien
ccttaaagtggccagttcacatgat

SEQ ID NO: 5230783 - DNA, 25 bp, Homo sapien
gctgcctgccgggtcatttttccac

SEQ ID NO: 5230784 - DNA, 25 bp, Homo sapien
caccagaatggtagtccttaaagtg

SEQ ID NO: 5230785 - DNA, 25 bp, Homo sapien
atgtagattagagtagttgagcggg

SEQ ID NO: 5230786 - DNA, 25 bp, Homo sapien
agttgagcggggttttagaatccat

SEQ ID NO: 5230787 - DNA, 25 bp, Homo sapien
tagttgagcggggttttagaatcca

SEQ ID NO: 5230788 - DNA, 25 bp, Homo sapien
aagatgtagattagagtagttgagc

SEQ ID NO: 5230789 - DNA, 25 bp, Homo sapien
gatgtgctctcttatttcaatctgc

SEQ ID NO: 5230790 - DNA, 25 bp, Homo sapien
tgtgctctcttatttcaatctgcag

SEQ ID NO: 5230791 - DNA, 25 bp, Homo sapien
gagatgtgctctcttatttcaatct

SEQ ID NO: 5230792 - DNA, 25 bp, Homo sapien
atgtgctctcttatttcaatctgca

SEQ ID NO: 5230793 - DNA, 25 bp, Homo sapien
tgagcaaacatcagggttgctttca

SEQ ID NO: 5230794 - DNA, 25 bp, Homo sapien
ccctccagacatgcatcatttttag

SEQ ID NO: 5230795 - DNA, 25 bp, Homo sapien
catcatttttaggaaggcaggaaga

SEQ ID NO: 5230796 - DNA, 25 bp, Homo sapien
gaagaatctgcacaccgaggagcac

SEQ ID NO: 5230797 - DNA, 25 bp, Homo sapien
tgtgtccaatctccagaggacatca

SEQ ID NO: 5230798 - DNA, 25 bp, Homo sapien
agtgtccaatcctgggactacccca

SEQ ID NO: 5230799 - DNA, 25 bp, Homo sapien
gcatcacatggctaggttgcctaca

SEQ ID NO: 5230800 - DNA, 25 bp, Homo sapien
ggcagccacatactgagtctggctc

SEQ ID NO: 5230801 - DNA, 25 bp, Homo sapien
aatattccaggttgcagggttccaa

SEQ ID NO: 5230802 - DNA, 25 bp, Homo sapien
tgcagggttgagtattcagtctctc

SEQ ID NO: 5230803 - DNA, 25 bp, Homo sapien
tcttgtcttgggtataaaactgcag

SEQ ID NO: 5230804 - DNA, 25 bp, Homo sapien
agaatctcccctctagctgtagcag

SEQ ID NO: 5230805 - DNA, 25 bp, Homo sapien
tgtcagcacaattaattgccaggaa

SEQ ID NO: 5230806 - DNA, 25 bp, Homo sapien
tgtctgagcagtgtatttcattctg

SEQ ID NO: 5230807 - DNA, 25 bp, Homo sapien
ggttttactcatcaaaagctcagca

SEQ ID NO: 5230808 - DNA, 25 bp, Homo sapien
gctttattaagtgtagggcactaac

SEQ ID NO: 5230809 - DNA, 25 bp, Homo sapien
atttggctttcctgtaacttcacca

SEQ ID NO: 5230810 - DNA, 25 bp, Homo sapien
catttggctttcctgtaacttcacc

SEQ ID NO: 5230811 - DNA, 25 bp, Homo sapien
tttggctttcctgtaacttcaccac

SEQ ID NO: 5230812 - DNA, 25 bp, Homo sapien
tgagataactatcgtttccattgat

SEQ ID NO: 5230813 - DNA, 25 bp, Homo sapien
gaagttgttgagataactatcgttt

SEQ ID NO: 5230814 - DNA, 25 bp, Homo sapien
tatcgtttccattgatttgcaaggc

SEQ ID NO: 5230815 - DNA, 25 bp, Homo sapien
ctttgttttagatgaagttgttgag

SEQ ID NO: 5230816 - DNA, 25 bp, Homo sapien
cttgtgctcaaatggaacaatgctg

SEQ ID NO: 5230817 - DNA, 25 bp, Homo sapien
cagtatagatgtatcctgtgttccc

SEQ ID NO: 5230818 - DNA, 25 bp, Homo sapien
gcactgacaggaaaatgcccttgat

SEQ ID NO: 5230819 - DNA, 25 bp, Homo sapien
tgcccttgattgcaaaattgcccac

SEQ ID NO: 5230820 - DNA, 25 bp, Homo sapien
aggatacagaaatgtttggttgcac

SEQ ID NO: 5230821 - DNA, 25 bp, Homo sapien
caggatacagaaatgtttggttgca

SEQ ID NO: 5230822 - DNA, 25 bp, Homo sapien
tcaggatacagaaatgtttggttgc

SEQ ID NO: 5230823 - DNA, 25 bp, Homo sapien
tatggtctaacatagtagacaggca

SEQ ID NO: 5230824 - DNA, 25 bp, Homo sapien
taggcattgtgataagtgttggaat

SEQ ID NO: 5230825 - DNA, 25 bp, Homo sapien
gctagctggctcattcatggctgga

SEQ ID NO: 5230826 - DNA, 25 bp, Homo sapien
tggctggagtaaatggtagaccaag

SEQ ID NO: 5230827 - DNA, 25 bp, Homo sapien
tagaagccctgatttgcacaatctc

SEQ ID NO: 5230828 - DNA, 25 bp, Homo sapien
tgtcataggaagtgtgtaagtgtgt

SEQ ID NO: 5230829 - DNA, 25 bp, Homo sapien
gcacaatctcttggttggctaccag

SEQ ID NO: 5230830 - DNA, 25 bp, Homo sapien
tgtagtctcctgcatgacaatagaa

SEQ ID NO: 5230831 - DNA, 25 bp, Homo sapien
aagctgtagtatttcctctagcggt

SEQ ID NO: 5230832 - DNA, 25 bp, Homo sapien
gcctttccagatactatttgctgca

SEQ ID NO: 5230833 - DNA, 25 bp, Homo sapien
tgtagtatttcctctagcggtgcct

SEQ ID NO: 5230834 - DNA, 25 bp, Homo sapien
tcctctagcggtgcctttccagata

SEQ ID NO: 5230835 - DNA, 25 bp, Homo sapien
gagccagcatttggacgtacgccag

SEQ ID NO: 5230836 - DNA, 25 bp, Homo sapien
cgtacgccagcatttggaacactga

SEQ ID NO: 5230837 - DNA, 25 bp, Homo sapien
caaagtacaacagaatcagccatgg

SEQ ID NO: 5230838 - DNA, 25 bp, Homo sapien
cacaacgggtaagtctttgaagaag

SEQ ID NO: 5230839 - DNA, 25 bp, Homo sapien
tgtgagatccaccagtacaggaggc

SEQ ID NO: 5230840 - DNA, 25 bp, Homo sapien
gagagataaccaaggtgtatttatt

SEQ ID NO: 5230841 - DNA, 25 bp, Homo sapien
gagatccaccagtacaggaggcttt

SEQ ID NO: 5230842 - DNA, 25 bp, Homo sapien
aggcttttgagagataaccaaggtg

SEQ ID NO: 5230843 - DNA, 25 bp, Homo sapien
gatgataaccaaatttgcagagctg

SEQ ID NO: 5230844 - DNA, 25 bp, Homo sapien
cttttccaggcaggtgatgcggtcc

SEQ ID NO: 5230845 - DNA, 25 bp, Homo sapien
tgcagagctggtgccaatgagagcc

SEQ ID NO: 5230846 - DNA, 25 bp, Homo sapien
gaagctgagagcactgccatgatga

SEQ ID NO: 5230847 - DNA, 25 bp, Homo sapien
ctgcaaggacaggtagtgaagatag

SEQ ID NO: 5230848 - DNA, 25 bp, Homo sapien
ttgaggcccctggtactgcaaggac

SEQ ID NO: 5230849 - DNA, 25 bp, Homo sapien
gaagatagagggtcaagtctacatg

SEQ ID NO: 5230850 - DNA, 25 bp, Homo sapien
gggcatcttcattaagctggtgtag

SEQ ID NO: 5230851 - DNA, 25 bp, Homo sapien
gagagtgggacttacagacatgaga

SEQ ID NO: 5230852 - DNA, 25 bp, Homo sapien
caagaagactctctaggacctagcc

SEQ ID NO: 5230853 - DNA, 25 bp, Homo sapien
aaaagttaaagccaccgaggctcag

SEQ ID NO: 5230854 - DNA, 25 bp, Homo sapien
gggcaggcactcaacatttttgggt

SEQ ID NO: 5230855 - DNA, 25 bp, Homo sapien
tgtctccttttagctttttagattc

SEQ ID NO: 5230856 - DNA, 25 bp, Homo sapien
ttctttcatatttgtctccttttag

SEQ ID NO: 5230857 - DNA, 25 bp, Homo sapien
ttctgtagataagttttttctttca

SEQ ID NO: 5230858 - DNA, 25 bp, Homo sapien
ttcatatttgtctccttttagcttt

SEQ ID NO: 5230859 - DNA, 25 bp, Homo sapien
ggcatagtatcctcaaattttcttg

SEQ ID NO: 5230860 - DNA, 25 bp, Homo sapien
tgacagagcccttgttcattgtacc

SEQ ID NO: 5230861 - DNA, 25 bp, Homo sapien
tcattgtacctattttcaaccacct

SEQ ID NO: 5230862 - DNA, 25 bp, Homo sapien
tcttcagttagtataaatcttttga

SEQ ID NO: 5230863 - DNA, 25 bp, Homo sapien
gcccattctcagatctccagctgcg

SEQ ID NO: 5230864 - DNA, 25 bp, Homo sapien
ctttggacgaggagaggtgctctgg

SEQ ID NO: 5230865 - DNA, 25 bp, Homo sapien
tttggacgaggagaggtgctctggt

SEQ ID NO: 5230866 - DNA, 25 bp, Homo sapien
tctgcccattctcagatctccagct

SEQ ID NO: 5230867 - DNA, 25 bp, Homo sapien
tctccatggggatctatgtcatgac

SEQ ID NO: 5230868 - DNA, 25 bp, Homo sapien
ctccatggggatctatgtcatgaca

SEQ ID NO: 5230869 - DNA, 25 bp, Homo sapien
tctgtccctgttccctactgctctt

SEQ ID NO: 5230870 - DNA, 25 bp, Homo sapien
tactgctcttttacaacagctccca

SEQ ID NO: 5230871 - DNA, 25 bp, Homo sapien
gttccctactgctcttttacaacag

SEQ ID NO: 5230872 - DNA, 25 bp, Homo sapien
gtccctgttccctactgctctttta

SEQ ID NO: 5230873 - DNA, 25 bp, Homo sapien
ctctcagattctaggaagctaatgt

SEQ ID NO: 5230874 - DNA, 25 bp, Homo sapien
tctctcagattctaggaagctaatg

SEQ ID NO: 5230875 - DNA, 25 bp, Homo sapien
tgtttttccgactatgtttcagttc

SEQ ID NO: 5230876 - DNA, 25 bp, Homo sapien
cctgaatgtttttccgactatgttt

SEQ ID NO: 5230877 - DNA, 25 bp, Homo sapien
aaatccagatgagccattggaaagg

SEQ ID NO: 5230878 - DNA, 25 bp, Homo sapien
ggaaaggctcatcaggcctctactc

SEQ ID NO: 5230879 - DNA, 25 bp, Homo sapien
atgagaagggtcaggcttctctgcc

SEQ ID NO: 5230880 - DNA, 25 bp, Homo sapien
ggcctctactcccatgagaagggtc

SEQ ID NO: 5230881 - DNA, 25 bp, Homo sapien
gaagaactttgctatatctgagatc

SEQ ID NO: 5230882 - DNA, 25 bp, Homo sapien
tgcacaatattgatcagcgtacttg

SEQ ID NO: 5230883 - DNA, 25 bp, Homo sapien
agcatttggctttgagtctactaca

SEQ ID NO: 5230884 - DNA, 25 bp, Homo sapien
attttgaacattgcacgaggctggc

SEQ ID NO: 5230885 - DNA, 25 bp, Homo sapien
cactgaggcttaatcgcagagattt

SEQ ID NO: 5230886 - DNA, 25 bp, Homo sapien
tctgcagacccaaaatgtggaccat

SEQ ID NO: 5230887 - DNA, 25 bp, Homo sapien
tgcacacatctatggagctcagctt

SEQ ID NO: 5230888 - DNA, 25 bp, Homo sapien
catatttgcagatatagtttagcac

SEQ ID NO: 5230889 - DNA, 25 bp, Homo sapien
tcagtgctagtgctatgccggccaa

SEQ ID NO: 5230890 - DNA, 25 bp, Homo sapien
taacggaatgcctttcatgagcagc

SEQ ID NO: 5230891 - DNA, 25 bp, Homo sapien
tcatgatgcctacaggtagctgtca

SEQ ID NO: 5230892 - DNA, 25 bp, Homo sapien
gatactgtaggctccaaatgccagc

SEQ ID NO: 5230893 - DNA, 25 bp, Homo sapien
ctagatgcgttgaacttctctatac

SEQ ID NO: 5230894 - DNA, 25 bp, Homo sapien
ttgtgtaaccataaggatactaatt

SEQ ID NO: 5230895 - DNA, 25 bp, Homo sapien
ccatggaaacaggagttccctcgta

SEQ ID NO: 5230896 - DNA, 25 bp, Homo sapien
cgaatgtagttgtcaccatggaaac

SEQ ID NO: 5230897 - DNA, 25 bp, Homo sapien
tcttcttggaagacgtaatacgaat

SEQ ID NO: 5230898 - DNA, 25 bp, Homo sapien
tcgtaatctcttaattcctcccgaa

SEQ ID NO: 5230899 - DNA, 25 bp, Homo sapien
catttggtctaatgcacattccgct

SEQ ID NO: 5230900 - DNA, 25 bp, Homo sapien
ctaatgcacattccgctctcatatg

SEQ ID NO: 5230901 - DNA, 25 bp, Homo sapien
ggtctaatgcacattccgctctcat

SEQ ID NO: 5230902 - DNA, 25 bp, Homo sapien
ctgaccatttggtctaatgcacatt

SEQ ID NO: 5230903 - DNA, 25 bp, Homo sapien
gatttgtatataagtaattggcctg

SEQ ID NO: 5230904 - DNA, 25 bp, Homo sapien
taagtaattggcctgtgattgtttc

SEQ ID NO: 5230905 - DNA, 25 bp, Homo sapien
gcttgttaaagacatggctagttgc

SEQ ID NO: 5230906 - DNA, 25 bp, Homo sapien
gtaaataagtataatgttgctttga

SEQ ID NO: 5230907 - DNA, 25 bp, Homo sapien
ctgtatatttctggatctctcaggg

SEQ ID NO: 5230908 - DNA, 25 bp, Homo sapien
ccttaatgtgagagtcattttcctg

SEQ ID NO: 5230909 - DNA, 25 bp, Homo sapien
ttttcctgtatatttctggatctct

SEQ ID NO: 5230910 - DNA, 25 bp, Homo sapien
tgtccttttcccttaatgtgagagt

SEQ ID NO: 5230911 - DNA, 25 bp, Homo sapien
ttacactacaccaggtatacggttc

SEQ ID NO: 5230912 - DNA, 25 bp, Homo sapien
ccttcaaagtcctgcagttgtaatg

SEQ ID NO: 5230913 - DNA, 25 bp, Homo sapien
tgtaatgttaactgcccacagcatt

SEQ ID NO: 5230914 - DNA, 25 bp, Homo sapien
ttttgacctgtgtgatttatgtgtc

SEQ ID NO: 5230915 - DNA, 25 bp, Homo sapien
ttcacccagatccacgatcttaact

SEQ ID NO: 5230916 - DNA, 25 bp, Homo sapien
catctctgtgaaagatttcacccag

SEQ ID NO: 5230917 - DNA, 25 bp, Homo sapien
tcgtacatattctgacagccttcat

SEQ ID NO: 5230918 - DNA, 25 bp, Homo sapien
actatcgtacatattctgacagcct

SEQ ID NO: 5230919 - DNA, 25 bp, Homo sapien
gaaattaaaggtgacttgtgtgagt

SEQ ID NO: 5230920 - DNA, 25 bp, Homo sapien
gaagctaggcttcgaattttctcct

SEQ ID NO: 5230921 - DNA, 25 bp, Homo sapien
tgcaatctggtagtagagaaaagaa

SEQ ID NO: 5230922 - DNA, 25 bp, Homo sapien
gaaacgcacatataacaattaataa

SEQ ID NO: 5230923 - DNA, 25 bp, Homo sapien
actgtaataccaggttgaagcattg

SEQ ID NO: 5230924 - DNA, 25 bp, Homo sapien
ctgtaataccaggttgaagcattgc

SEQ ID NO: 5230925 - DNA, 25 bp, Homo sapien
tgtaataccaggttgaagcattgct

SEQ ID NO: 5230926 - DNA, 25 bp, Homo sapien
ctagctgtctaatataaactgtaat

SEQ ID NO: 5230927 - DNA, 25 bp, Homo sapien
tacgctaaacaacaatgccggcctg

SEQ ID NO: 5230928 - DNA, 25 bp, Homo sapien
gaatggtaacaaagtgccctggtga

SEQ ID NO: 5230929 - DNA, 25 bp, Homo sapien
gaaagtgaaggctattacgctaaac

SEQ ID NO: 5230930 - DNA, 25 bp, Homo sapien
tcagagctctttccgagttgagaac

SEQ ID NO: 5230931 - DNA, 25 bp, Homo sapien
cattcattaattgtcttttttgcac

SEQ ID NO: 5230932 - DNA, 25 bp, Homo sapien
tagcattcattaattgtcttttttg

SEQ ID NO: 5230933 - DNA, 25 bp, Homo sapien
taatagcattcattaattgtctttt

SEQ ID NO: 5230934 - DNA, 25 bp, Homo sapien
ttaatagcattcattaattgtcttt

SEQ ID NO: 5230935 - DNA, 25 bp, Homo sapien
tccatacctgccagcaagtggatct

SEQ ID NO: 5230936 - DNA, 25 bp, Homo sapien
tacctgccagcaagtggatctcctt

SEQ ID NO: 5230937 - DNA, 25 bp, Homo sapien
tgccagcaagtggatctccttccag

SEQ ID NO: 5230938 - DNA, 25 bp, Homo sapien
gccagcaagtggatctccttccagc

SEQ ID NO: 5230939 - DNA, 25 bp, Homo sapien
taagcatattctcagaacttgtgag

SEQ ID NO: 5230940 - DNA, 25 bp, Homo sapien
tgattaatttctacccgacatcttt

SEQ ID NO: 5230941 - DNA, 25 bp, Homo sapien
tgtgaggtaactatggcaatggaca

SEQ ID NO: 5230942 - DNA, 25 bp, Homo sapien
tcaatgattaatttctacccgacat

SEQ ID NO: 5230943 - DNA, 25 bp, Homo sapien
gattcagctctgctaaatcatccaa

SEQ ID NO: 5230944 - DNA, 25 bp, Homo sapien
tgatgggcaagaccccctcacaatt

SEQ ID NO: 5230945 - DNA, 25 bp, Homo sapien
aattgtctccatattaaagcccaaa

SEQ ID NO: 5230946 - DNA, 25 bp, Homo sapien
ttgtctccatattaaagcccaaatt

SEQ ID NO: 5230947 - DNA, 25 bp, Homo sapien
tcagacgagatcgggtgcattcggg

SEQ ID NO: 5230948 - DNA, 25 bp, Homo sapien
acgagatcgggtgcattcggggtgg

SEQ ID NO: 5230949 - DNA, 25 bp, Homo sapien
tgaccctgcttagtttccgagatca

SEQ ID NO: 5230950 - DNA, 25 bp, Homo sapien
agacgagatcgggtgcattcggggt

SEQ ID NO: 5230951 - DNA, 25 bp, Homo sapien
ctggctgtccttgatatttcctatt

SEQ ID NO: 5230952 - DNA, 25 bp, Homo sapien
tcccacactgcccaatcattcgctc

SEQ ID NO: 5230953 - DNA, 25 bp, Homo sapien
tcccttttctttgggatattctctc

SEQ ID NO: 5230954 - DNA, 25 bp, Homo sapien
actgcccaatcattcgctcaggcat

SEQ ID NO: 5230955 - DNA, 25 bp, Homo sapien
atatgttacacgagcagagccttca

SEQ ID NO: 5230956 - DNA, 25 bp, Homo sapien
tctccagtagtaactatgggtgaca

SEQ ID NO: 5230957 - DNA, 25 bp, Homo sapien
ggcttgaatatgttacacgagcaga

SEQ ID NO: 5230958 - DNA, 25 bp, Homo sapien
gtaactatgggtgacaagaaactta

SEQ ID NO: 5230959 - DNA, 25 bp, Homo sapien
cccactcctgttaccgctgactgat

SEQ ID NO: 5230960 - DNA, 25 bp, Homo sapien
gaggtcccactcctgttaccgctga

SEQ ID NO: 5230961 - DNA, 25 bp, Homo sapien
tcctgttaccgctgactgataccat

SEQ ID NO: 5230962 - DNA, 25 bp, Homo sapien
agaggtcccactcctgttaccgctg

SEQ ID NO: 5230963 - DNA, 25 bp, Homo sapien
tcattgtggccgtcattatcttctt

SEQ ID NO: 5230964 - DNA, 25 bp, Homo sapien
ctttgtgttcttcatcactagcact

SEQ ID NO: 5230965 - DNA, 25 bp, Homo sapien
tgttcttcatcactagcactctcac

SEQ ID NO: 5230966 - DNA, 25 bp, Homo sapien
tcttcatcactagcactctcactat

SEQ ID NO: 5230967 - DNA, 25 bp, Homo sapien
cctgcagctgcagcttttttccaga

SEQ ID NO: 5230968 - DNA, 25 bp, Homo sapien
gcagcttttttccagattcagtcat

SEQ ID NO: 5230969 - DNA, 25 bp, Homo sapien
tgcagctgcagcttttttccagatt

SEQ ID NO: 5230970 - DNA, 25 bp, Homo sapien
ctgcagcttttttccagattcagtc

SEQ ID NO: 5230971 - DNA, 25 bp, Homo sapien
tttcttgttccatcgtcagtaactt

SEQ ID NO: 5230972 - DNA, 25 bp, Homo sapien
ccattgactttctgctagagtcacc

SEQ ID NO: 5230973 - DNA, 25 bp, Homo sapien
gttccatcgtcagtaactttaacta

SEQ ID NO: 5230974 - DNA, 25 bp, Homo sapien
atctgcttttttgccccattgactt

SEQ ID NO: 5230975 - DNA, 25 bp, Homo sapien
cagagtccaagcacctgcactggaa

SEQ ID NO: 5230976 - DNA, 25 bp, Homo sapien
taagcatcctctggattgcaggctg

SEQ ID NO: 5230977 - DNA, 25 bp, Homo sapien
tggtagagcccaagcaaagtacgcc

SEQ ID NO: 5230978 - DNA, 25 bp, Homo sapien
ggtgaacaagtgatcagcagctgct

SEQ ID NO: 5230979 - DNA, 25 bp, Homo sapien
gataggtacttggtgtgcttgcttc

SEQ ID NO: 5230980 - DNA, 25 bp, Homo sapien
tgcatcggcctgatggataggtact

SEQ ID NO: 5230981 - DNA, 25 bp, Homo sapien
tcaagtattgaagactgcatcggcc

SEQ ID NO: 5230982 - DNA, 25 bp, Homo sapien
tccatgtgtgagcactggtgcatgt

SEQ ID NO: 5230983 - DNA, 25 bp, Homo sapien
tgaagcatgctatcactttctccct

SEQ ID NO: 5230984 - DNA, 25 bp, Homo sapien
caaacactgttacatctgaagcatg

SEQ ID NO: 5230985 - DNA, 25 bp, Homo sapien
ctccaaaagtcagcacgtcagtagg

SEQ ID NO: 5230986 - DNA, 25 bp, Homo sapien
tcttcagtgcaatagggataaaatg

SEQ ID NO: 5230987 - DNA, 25 bp, Homo sapien
tctagggttgccttcacctcatgag

SEQ ID NO: 5230988 - DNA, 25 bp, Homo sapien
agaccaatgtctgtcgtgtcgccgc

SEQ ID NO: 5230989 - DNA, 25 bp, Homo sapien
ccgcttcagtagaggaaggatctgc

SEQ ID NO: 5230990 - DNA, 25 bp, Homo sapien
agagtcttgtaacctctatgatggg

SEQ ID NO: 5230991 - DNA, 25 bp, Homo sapien
cttggccttttgttctatgctatgt

SEQ ID NO: 5230992 - DNA, 25 bp, Homo sapien
gaaaatgatcaaccaatcttcactt

SEQ ID NO: 5230993 - DNA, 25 bp, Homo sapien
tcttggtgctgatcgaaaatttctt

SEQ ID NO: 5230994 - DNA, 25 bp, Homo sapien
tctatgctatgtggagatacttcct

SEQ ID NO: 5230995 - DNA, 25 bp, Homo sapien
gaaattaagtgtcatttacttacta

SEQ ID NO: 5230996 - DNA, 25 bp, Homo sapien
taagtgtcatttacttactaagggc

SEQ ID NO: 5230997 - DNA, 25 bp, Homo sapien
attaagtgtcatttacttactaagg

SEQ ID NO: 5230998 - DNA, 25 bp, Homo sapien
cagaaattaagtgtcatttacttac

SEQ ID NO: 5230999 - DNA, 25 bp, Homo sapien
taactctgacaaagttgtgtaacaa

SEQ ID NO: 5231000 - DNA, 25 bp, Homo sapien
actctgacaaagttgtgtaacaatt

SEQ ID NO: 5231001 - DNA, 25 bp, Homo sapien
aactctgacaaagttgtgtaacaat

SEQ ID NO: 5231002 - DNA, 25 bp, Homo sapien
ttctctctcaatgcttctaacagag

SEQ ID NO: 5231003 - DNA, 25 bp, Homo sapien
cagaggctcactctggatcctacct

SEQ ID NO: 5231004 - DNA, 25 bp, Homo sapien
tcaatgcttctaacagaggctcact

SEQ ID NO: 5231005 - DNA, 25 bp, Homo sapien
tctggatcctacctccaagccctct

SEQ ID NO: 5231006 - DNA, 25 bp, Homo sapien
tcactctagtatggagagagcactg

SEQ ID NO: 5231007 - DNA, 25 bp, Homo sapien
gagtggagatacagagaagattcat

SEQ ID NO: 5231008 - DNA, 25 bp, Homo sapien
ctgccataaggttatcactctagta

SEQ ID NO: 5231009 - DNA, 25 bp, Homo sapien
ttttgcagatcaagagtgttgagag

SEQ ID NO: 5231010 - DNA, 25 bp, Homo sapien
agccatgaagctgaattgtgcaaca

SEQ ID NO: 5231011 - DNA, 25 bp, Homo sapien
tccctagatgcactctaaagctggc

SEQ ID NO: 5231012 - DNA, 25 bp, Homo sapien
tcttcacctgcctaaagatgtgcac

SEQ ID NO: 5231013 - DNA, 25 bp, Homo sapien
gatgtgcacataattggctcctcct

SEQ ID NO: 5231014 - DNA, 25 bp, Homo sapien
atttacttcaattaccagtggacat

SEQ ID NO: 5231015 - DNA, 25 bp, Homo sapien
ctcctaacataagttgtagctctga

SEQ ID NO: 5231016 - DNA, 25 bp, Homo sapien
tacttcaattaccagtggacatagg

SEQ ID NO: 5231017 - DNA, 25 bp, Homo sapien
ttcaattaccagtggacatagggaa

SEQ ID NO: 5231018 - DNA, 25 bp, Homo sapien
tcatcttcaatccagccactggctt

SEQ ID NO: 5231019 - DNA, 25 bp, Homo sapien
gctagaatcatcttcaatccagcca

SEQ ID NO: 5231020 - DNA, 25 bp, Homo sapien
gaatcatcttcaatccagccactgg

SEQ ID NO: 5231021 - DNA, 25 bp, Homo sapien
taagctagaatcatcttcaatccag

SEQ ID NO: 5231022 - DNA, 25 bp, Homo sapien
taaatcagctccatttgtattccca

SEQ ID NO: 5231023 - DNA, 25 bp, Homo sapien
tgtattcccatctatttgaagagtg

SEQ ID NO: 5231024 - DNA, 25 bp, Homo sapien
ttcccatctatttgaagagtgatat

SEQ ID NO: 5231025 - DNA, 25 bp, Homo sapien
tctcatgtgctaaatcagctccatt

SEQ ID NO: 5231026 - DNA, 25 bp, Homo sapien
ggcttctccataggacaatggttgt

SEQ ID NO: 5231027 - DNA, 25 bp, Homo sapien
tggtgttcacgttgccggcttctcc

SEQ ID NO: 5231028 - DNA, 25 bp, Homo sapien
gcctggcatttgataacagtgaaca

SEQ ID NO: 5231029 - DNA, 25 bp, Homo sapien
acagtgaacaaacaggtgcagtcct

SEQ ID NO: 5231030 - DNA, 25 bp, Homo sapien
cacggacttcatagccttttcttta

SEQ ID NO: 5231031 - DNA, 25 bp, Homo sapien
taattgggcacggacttcatagcct

SEQ ID NO: 5231032 - DNA, 25 bp, Homo sapien
tgggcacggacttcatagccttttc

SEQ ID NO: 5231033 - DNA, 25 bp, Homo sapien
attgggcacggacttcatagccttt

SEQ ID NO: 5231034 - DNA, 25 bp, Homo sapien
tgtttctgcgtattcggatagattc

SEQ ID NO: 5231035 - DNA, 25 bp, Homo sapien
cgtattcggatagattcctgttgtt

SEQ ID NO: 5231036 - DNA, 25 bp, Homo sapien
tctgcgtattcggatagattcctgt

SEQ ID NO: 5231037 - DNA, 25 bp, Homo sapien
atttgtttctgcgtattcggataga

SEQ ID NO: 5231038 - DNA, 25 bp, Homo sapien
cagggagcaattctgcagtctcttt

SEQ ID NO: 5231039 - DNA, 25 bp, Homo sapien
aagtcaggggcattagatgttgtac

SEQ ID NO: 5231040 - DNA, 25 bp, Homo sapien
gggcattagatgttgtacctgagat

SEQ ID NO: 5231041 - DNA, 25 bp, Homo sapien
ttaagatggtgtggagaagtcaggg

SEQ ID NO: 5231042 - DNA, 25 bp, Homo sapien
ttagatgttgtacctgagatacaag

SEQ ID NO: 5231043 - DNA, 25 bp, Homo sapien
gatgctccacgagcaacaaggaggc

SEQ ID NO: 5231044 - DNA, 25 bp, Homo sapien
taacactgtcttgggcaatccatgg

SEQ ID NO: 5231045 - DNA, 25 bp, Homo sapien
catggtcaaaaaacgaggctggaaa

SEQ ID NO: 5231046 - DNA, 25 bp, Homo sapien
tcttcaagagagtcatagtctagtg

SEQ ID NO: 5231047 - DNA, 25 bp, Homo sapien
tcaaaggtgcataatcttcttcgga

SEQ ID NO: 5231048 - DNA, 25 bp, Homo sapien
gatgctctagggaagaaaccttgcc

SEQ ID NO: 5231049 - DNA, 25 bp, Homo sapien
tgaactttgagggaatgctatccaa

SEQ ID NO: 5231050 - DNA, 25 bp, Homo sapien
tctggagctagactaatcatccctg

SEQ ID NO: 5231051 - DNA, 25 bp, Homo sapien
tataaacttatcaagaagcatgtcc

SEQ ID NO: 5231052 - DNA, 25 bp, Homo sapien
ataaacttatcaagaagcatgtcca

SEQ ID NO: 5231053 - DNA, 25 bp, Homo sapien
taaacttatcaagaagcatgtccat

SEQ ID NO: 5231054 - DNA, 25 bp, Homo sapien
ctataaacttatcaagaagcatgtc

SEQ ID NO: 5231055 - DNA, 25 bp, Homo sapien
tctctaacatagcagggctccatgc

SEQ ID NO: 5231056 - DNA, 25 bp, Homo sapien
gctaagcctcctgttacatctgtga

SEQ ID NO: 5231057 - DNA, 25 bp, Homo sapien
gacacaaaaggtctaggctaagtgc

SEQ ID NO: 5231058 - DNA, 25 bp, Homo sapien
gggaactttagacgcacaatgagaa

SEQ ID NO: 5231059 - DNA, 25 bp, Homo sapien
taataggtatagattgaagcatatg

SEQ ID NO: 5231060 - DNA, 25 bp, Homo sapien
ttgatgcagtaattataagtaagag

SEQ ID NO: 5231061 - DNA, 25 bp, Homo sapien
aagtgttgatgcagtaattataagt

SEQ ID NO: 5231062 - DNA, 25 bp, Homo sapien
taatgtgtcttcatcatgacaatgt

SEQ ID NO: 5231063 - DNA, 25 bp, Homo sapien
gctttcattgagcagtatactgtca

SEQ ID NO: 5231064 - DNA, 25 bp, Homo sapien
agtatactgtcatatttagctacac

SEQ ID NO: 5231065 - DNA, 25 bp, Homo sapien
catatttagctacacaatcgtgcat

SEQ ID NO: 5231066 - DNA, 25 bp, Homo sapien
tggttgctttcattgagcagtatac

SEQ ID NO: 5231067 - DNA, 25 bp, Homo sapien
tctgtagacgccacggcctcaaaat

SEQ ID NO: 5231068 - DNA, 25 bp, Homo sapien
acagctttttctgtagacgccacgg

SEQ ID NO: 5231069 - DNA, 25 bp, Homo sapien
ctttttctgtagacgccacggcctc

SEQ ID NO: 5231070 - DNA, 25 bp, Homo sapien
gccacggcctcaaaatcctgatttt

SEQ ID NO: 5231071 - DNA, 25 bp, Homo sapien
gccagttgatagcaattccaaccgt

SEQ ID NO: 5231072 - DNA, 25 bp, Homo sapien
cttgagttaactgaagccagttgat

SEQ ID NO: 5231073 - DNA, 25 bp, Homo sapien
tgatagcaattccaaccgtaaccat

SEQ ID NO: 5231074 - DNA, 25 bp, Homo sapien
actgaagccagttgatagcaattcc

SEQ ID NO: 5231075 - DNA, 25 bp, Homo sapien
ttcatttcagaaaaggaggttgagt

SEQ ID NO: 5231076 - DNA, 25 bp, Homo sapien
atttcagaaaaggaggttgagtcac

SEQ ID NO: 5231077 - DNA, 25 bp, Homo sapien
cagtttctgccccataattcatttc

SEQ ID NO: 5231078 - DNA, 25 bp, Homo sapien
aattcatttcagaaaaggaggttga

SEQ ID NO: 5231079 - DNA, 25 bp, Homo sapien
ctccagggagctttagaggatatta

SEQ ID NO: 5231080 - DNA, 25 bp, Homo sapien
tgacaatcactagacctccagggag

SEQ ID NO: 5231081 - DNA, 25 bp, Homo sapien
ggcacagggaccaagttccaagact

SEQ ID NO: 5231082 - DNA, 25 bp, Homo sapien
gactagatgcttctataggatagac

SEQ ID NO: 5231083 - DNA, 25 bp, Homo sapien
attcatgtccaaacctgagcttttc

SEQ ID NO: 5231084 - DNA, 25 bp, Homo sapien
ttcttcaattcatgtccaaacctga

SEQ ID NO: 5231085 - DNA, 25 bp, Homo sapien
aacaaattatccagttctgttttgc

SEQ ID NO: 5231086 - DNA, 25 bp, Homo sapien
aaacaaattatccagttctgttttg

SEQ ID NO: 5231087 - DNA, 25 bp, Homo sapien
aaattatccagttctgttttgcatt

SEQ ID NO: 5231088 - DNA, 25 bp, Homo sapien
ctttaaacaaattatccagttctgt

SEQ ID NO: 5231089 - DNA, 25 bp, Homo sapien
ctatttcagtgaggcggtagcagca

SEQ ID NO: 5231090 - DNA, 25 bp, Homo sapien
gactgctttattactccatgtgaaa

SEQ ID NO: 5231091 - DNA, 25 bp, Homo sapien
gctgctggaaaagtgtcaaagccca

SEQ ID NO: 5231092 - DNA, 25 bp, Homo sapien
cagcagtgactgctttattactcca

SEQ ID NO: 5231093 - DNA, 25 bp, Homo sapien
agggaagagacaggcggcatatcaa

SEQ ID NO: 5231094 - DNA, 25 bp, Homo sapien
cactcaacagtaactagcctagaca

SEQ ID NO: 5231095 - DNA, 25 bp, Homo sapien
gacaggcggcatatcaaggacggtt

SEQ ID NO: 5231096 - DNA, 25 bp, Homo sapien
cggtttgcagtgagtaaatccacac

SEQ ID NO: 5231097 - DNA, 25 bp, Homo sapien
ttttaatcattatatctgcatcaac

SEQ ID NO: 5231098 - DNA, 25 bp, Homo sapien
tgtgatatatgaactacttcggaag

SEQ ID NO: 5231099 - DNA, 25 bp, Homo sapien
ctgtgatatatgaactacttcggaa

SEQ ID NO: 5231100 - DNA, 25 bp, Homo sapien
gtgatatatgaactacttcggaagt

SEQ ID NO: 5231101 - DNA, 25 bp, Homo sapien
cagcaaattcagttatggagagttc

SEQ ID NO: 5231102 - DNA, 25 bp, Homo sapien
gcagcaaattcagttatggagagtt

SEQ ID NO: 5231103 - DNA, 25 bp, Homo sapien
tggagagttcatctaagttggacat

SEQ ID NO: 5231104 - DNA, 25 bp, Homo sapien
ttatggagagttcatctaagttgga

SEQ ID NO: 5231105 - DNA, 25 bp, Homo sapien
gtccttttagccagaggctaaatga

SEQ ID NO: 5231106 - DNA, 25 bp, Homo sapien
gtatgtccttttagccagaggctaa

SEQ ID NO: 5231107 - DNA, 25 bp, Homo sapien
tgacttttctacctattctatctcc

SEQ ID NO: 5231108 - DNA, 25 bp, Homo sapien
gacttttctacctattctatctcca

SEQ ID NO: 5231109 - DNA, 25 bp, Homo sapien
taattgcaaccttgaaagctgagtc

SEQ ID NO: 5231110 - DNA, 25 bp, Homo sapien
tatgtgtgcgatgtgtcttcacgca

SEQ ID NO: 5231111 - DNA, 25 bp, Homo sapien
cacaggtgctatgtaggatgttatc

SEQ ID NO: 5231112 - DNA, 25 bp, Homo sapien
gactacatgtctaactcagagctaa

SEQ ID NO: 5231113 - DNA, 25 bp, Homo sapien
gaagagctcgtcatatatccccttt

SEQ ID NO: 5231114 - DNA, 25 bp, Homo sapien
tattgctgcttattgctgcttgtaa

SEQ ID NO: 5231115 - DNA, 25 bp, Homo sapien
tcatatatccccttttctgaacaaa

SEQ ID NO: 5231116 - DNA, 25 bp, Homo sapien
tgaatatagaagagctcgtcatata

SEQ ID NO: 5231117 - DNA, 25 bp, Homo sapien
catagaatattgaaacagggatatc

SEQ ID NO: 5231118 - DNA, 25 bp, Homo sapien
gccctttaagctcagcttgattggc

SEQ ID NO: 5231119 - DNA, 25 bp, Homo sapien
cacaatgccaaagcatgctgtcgca

SEQ ID NO: 5231120 - DNA, 25 bp, Homo sapien
tgatctgaacattgcgacatgccct

SEQ ID NO: 5231121 - DNA, 25 bp, Homo sapien
tacgagtatcagtacaagatttcac

SEQ ID NO: 5231122 - DNA, 25 bp, Homo sapien
caataagcacctcagaatgactcag

SEQ ID NO: 5231123 - DNA, 25 bp, Homo sapien
caaatagatcaaataagacgcattt

SEQ ID NO: 5231124 - DNA, 25 bp, Homo sapien
taagacgcatttaatttgctacgag

SEQ ID NO: 5231125 - DNA, 25 bp, Homo sapien
aggctggtctcgtgatacgcccatc

SEQ ID NO: 5231126 - DNA, 25 bp, Homo sapien
ggctggtctcgtgatacgcccatct

SEQ ID NO: 5231127 - DNA, 25 bp, Homo sapien
acagcttccaaattgtagtgccaca

SEQ ID NO: 5231128 - DNA, 25 bp, Homo sapien
gctgccatatcctcttaggtgagat

SEQ ID NO: 5231129 - DNA, 25 bp, Homo sapien
gtcttggagtaacaagctgcacagc

SEQ ID NO: 5231130 - DNA, 25 bp, Homo sapien
taatgcaatcagaccacagtgtgga

SEQ ID NO: 5231131 - DNA, 25 bp, Homo sapien
gaccacctctaccacagcggtctcc

SEQ ID NO: 5231132 - DNA, 25 bp, Homo sapien
tggtcttctaggaatatacatattg

SEQ ID NO: 5231133 - DNA, 25 bp, Homo sapien
tttagttagatacatttaggtacac

SEQ ID NO: 5231134 - DNA, 25 bp, Homo sapien
tgtggcataataacagtcaatgact

SEQ ID NO: 5231135 - DNA, 25 bp, Homo sapien
gaaatgcatgttcacaaagcagctc

SEQ ID NO: 5231136 - DNA, 25 bp, Homo sapien
cccatttgattaaggcttgttgagc

SEQ ID NO: 5231137 - DNA, 25 bp, Homo sapien
aaagcagctcttcaatttaactttt

SEQ ID NO: 5231138 - DNA, 25 bp, Homo sapien
gcttgttgagcaagaggcaactgaa

SEQ ID NO: 5231139 - DNA, 25 bp, Homo sapien
gactctctgtagtatgagctgagac

SEQ ID NO: 5231140 - DNA, 25 bp, Homo sapien
aatacagtggtaagtctttttgatg

SEQ ID NO: 5231141 - DNA, 25 bp, Homo sapien
ggctaggagactctctgtagtatga

SEQ ID NO: 5231142 - DNA, 25 bp, Homo sapien
cagtggtaagtctttttgatgaggt

SEQ ID NO: 5231143 - DNA, 25 bp, Homo sapien
cattgtcccgtgtgcctcgcggtat

SEQ ID NO: 5231144 - DNA, 25 bp, Homo sapien
tgtcccgtgtgcctcgcggtattag

SEQ ID NO: 5231145 - DNA, 25 bp, Homo sapien
attgtcccgtgtgcctcgcggtatt

SEQ ID NO: 5231146 - DNA, 25 bp, Homo sapien
tcccgtgtgcctcgcggtattagca

SEQ ID NO: 5231147 - DNA, 25 bp, Homo sapien
gggcaaaggggcaaaagagtgtcca

SEQ ID NO: 5231148 - DNA, 25 bp, Homo sapien
atggaaatcagctatggatgaaaat

SEQ ID NO: 5231149 - DNA, 25 bp, Homo sapien
taaatggaaatcagctatggatgaa

SEQ ID NO: 5231150 - DNA, 25 bp, Homo sapien
aatgcaatttcattgcttggtattc

SEQ ID NO: 5231151 - DNA, 25 bp, Homo sapien
ttgctggtgtacaccacttgaacct

SEQ ID NO: 5231152 - DNA, 25 bp, Homo sapien
aaaatttgcatcaagttgtaatctg

SEQ ID NO: 5231153 - DNA, 25 bp, Homo sapien
aagtggtgggatgcgtgactttttt

SEQ ID NO: 5231154 - DNA, 25 bp, Homo sapien
gggatgcgtgacttttttaatgaga

SEQ ID NO: 5231155 - DNA, 25 bp, Homo sapien
cccataaccagtaaacctccatcaa

SEQ ID NO: 5231156 - DNA, 25 bp, Homo sapien
acaatattttttcgcatgatggttg

SEQ ID NO: 5231157 - DNA, 25 bp, Homo sapien
ttttcgcatgatggttgttggtgtt

SEQ ID NO: 5231158 - DNA, 25 bp, Homo sapien
tattttttcgcatgatggttgttgg

SEQ ID NO: 5231159 - DNA, 25 bp, Homo sapien
agcagctagaactcttaagcgcctt

SEQ ID NO: 5231160 - DNA, 25 bp, Homo sapien
cagctagaactcttaagcgccttgt

SEQ ID NO: 5231161 - DNA, 25 bp, Homo sapien
tagaactcttaagcgccttgtctct

SEQ ID NO: 5231162 - DNA, 25 bp, Homo sapien
gctagaactcttaagcgccttgtct

SEQ ID NO: 5231163 - DNA, 25 bp, Homo sapien
gcttgtaaaggctgcccagttgcat

SEQ ID NO: 5231164 - DNA, 25 bp, Homo sapien
attgttgtcagtctttttattccct

SEQ ID NO: 5231165 - DNA, 25 bp, Homo sapien
ttgttttgcttgtaaaggctgccca

SEQ ID NO: 5231166 - DNA, 25 bp, Homo sapien
ttttgcttgtaaaggctgcccagtt

SEQ ID NO: 5231167 - DNA, 25 bp, Homo sapien
tatgatgtttcgcttggaggaagga

SEQ ID NO: 5231168 - DNA, 25 bp, Homo sapien
aacagtactctcataacctttagga

SEQ ID NO: 5231169 - DNA, 25 bp, Homo sapien
ccactgggtctggaatgtattaaca

SEQ ID NO: 5231170 - DNA, 25 bp, Homo sapien
gcttctgtgcttattaagagtttgt

SEQ ID NO: 5231171 - DNA, 25 bp, Homo sapien
tcccatttcactaagcaagcattgg

SEQ ID NO: 5231172 - DNA, 25 bp, Homo sapien
aatgcactcacgtttccccacaagc

SEQ ID NO: 5231173 - DNA, 25 bp, Homo sapien
gtttccccacaagctctcacattcc

SEQ ID NO: 5231174 - DNA, 25 bp, Homo sapien
gcattggcctgctgctaatgcactc

SEQ ID NO: 5231175 - DNA, 25 bp, Homo sapien
ggtagatgttatctgaattatgagc

SEQ ID NO: 5231176 - DNA, 25 bp, Homo sapien
gtagatgttatctgaattatgagca

SEQ ID NO: 5231177 - DNA, 25 bp, Homo sapien
ctggtagatgttatctgaattatga

SEQ ID NO: 5231178 - DNA, 25 bp, Homo sapien
tagatgttatctgaattatgagcac

SEQ ID NO: 5231179 - DNA, 25 bp, Homo sapien
gctttctctggtgatgcaaccttca

SEQ ID NO: 5231180 - DNA, 25 bp, Homo sapien
tacatgctttctctggtgatgcaac

SEQ ID NO: 5231181 - DNA, 25 bp, Homo sapien
ctgttgttctattgtgctacatgct

SEQ ID NO: 5231182 - DNA, 25 bp, Homo sapien
catgcaatgtaggaaagaggtgcct

SEQ ID NO: 5231183 - DNA, 25 bp, Homo sapien
caattgctagatatagcttgggtgc

SEQ ID NO: 5231184 - DNA, 25 bp, Homo sapien
gagtacaattgctagatatagcttg

SEQ ID NO: 5231185 - DNA, 25 bp, Homo sapien
gtacaattgctagatatagcttggg

SEQ ID NO: 5231186 - DNA, 25 bp, Homo sapien
aattgctagatatagcttgggtgca

SEQ ID NO: 5231187 - DNA, 25 bp, Homo sapien
cgtaatcttatagctttcctgttcc

SEQ ID NO: 5231188 - DNA, 25 bp, Homo sapien
tctggttttactgttaatgaaatcg

SEQ ID NO: 5231189 - DNA, 25 bp, Homo sapien
gctgctactaaaatggtcgctgttt

SEQ ID NO: 5231190 - DNA, 25 bp, Homo sapien
tatttcctggaactccggtgactgg

SEQ ID NO: 5231191 - DNA, 25 bp, Homo sapien
aaaagatactctgtttgccgaaggt

SEQ ID NO: 5231192 - DNA, 25 bp, Homo sapien
tcactttaggccatacttctcagaa

SEQ ID NO: 5231193 - DNA, 25 bp, Homo sapien
catacttctcagaaaggtattgggc

SEQ ID NO: 5231194 - DNA, 25 bp, Homo sapien
tgtgagaaggcaagaaatgaggagg

SEQ ID NO: 5231195 - DNA, 25 bp, Homo sapien
aaggtattgggctttgttgtgagaa

SEQ ID NO: 5231196 - DNA, 25 bp, Homo sapien
catccatgcagaaataactgaactc

SEQ ID NO: 5231197 - DNA, 25 bp, Homo sapien
ttgcatccatgcagaaataactgaa

SEQ ID NO: 5231198 - DNA, 25 bp, Homo sapien
catgcagaaataactgaactctatt

SEQ ID NO: 5231199 - DNA, 25 bp, Homo sapien
cagaaataactgaactctatttcca

SEQ ID NO: 5231200 - DNA, 25 bp, Homo sapien
aggaatatgcaagatccagtttctg

SEQ ID NO: 5231201 - DNA, 25 bp, Homo sapien
gaagcgtactaaacaccaataggaa

SEQ ID NO: 5231202 - DNA, 25 bp, Homo sapien
ataggaatatgcaagatccagtttc

SEQ ID NO: 5231203 - DNA, 25 bp, Homo sapien
tgtaggggttactgaagcgtactaa

SEQ ID NO: 5231204 - DNA, 25 bp, Homo sapien
gccattccattgctcagatttattc

SEQ ID NO: 5231205 - DNA, 25 bp, Homo sapien
tcacaagccattccattgctcagat

SEQ ID NO: 5231206 - DNA, 25 bp, Homo sapien
tggccagacaatcacaagccattcc

SEQ ID NO: 5231207 - DNA, 25 bp, Homo sapien
ctggttggccagacaatcacaagcc

SEQ ID NO: 5231208 - DNA, 25 bp, Homo sapien
tccgagttgagctatgccgaaaagc

SEQ ID NO: 5231209 - DNA, 25 bp, Homo sapien
ttggtattaactgtgcggctccgag

SEQ ID NO: 5231210 - DNA, 25 bp, Homo sapien
ccgagtccgcagcaatttggtatta

SEQ ID NO: 5231211 - DNA, 25 bp, Homo sapien
aattgtcagacccacaagtgagccc

SEQ ID NO: 5231212 - DNA, 25 bp, Homo sapien
ggttcagcctctgccactgggggac

SEQ ID NO: 5231213 - DNA, 25 bp, Homo sapien
tggttcagcctctgccactggggga

SEQ ID NO: 5231214 - DNA, 25 bp, Homo sapien
tgggggctgtctggttcagcctctg

SEQ ID NO: 5231215 - DNA, 25 bp, Homo sapien
gctgtctggttcagcctctgccact

SEQ ID NO: 5231216 - DNA, 25 bp, Homo sapien
gttgattatgcacattgacccattc

SEQ ID NO: 5231217 - DNA, 25 bp, Homo sapien
catgcaggcttagccgagaggaatt

SEQ ID NO: 5231218 - DNA, 25 bp, Homo sapien
atgggttgattatgcacattgaccc

SEQ ID NO: 5231219 - DNA, 25 bp, Homo sapien
ttcaaaggcattggcgaccgacatg

SEQ ID NO: 5231220 - DNA, 25 bp, Homo sapien
cacatgtgaggcgtttgtgctggcc

SEQ ID NO: 5231221 - DNA, 25 bp, Homo sapien
caattactccgaaattcttcacgca

SEQ ID NO: 5231222 - DNA, 25 bp, Homo sapien
cggaatcacaccaacacggacttga

SEQ ID NO: 5231223 - DNA, 25 bp, Homo sapien
caaaatgaccttcgaatggcacatg

SEQ ID NO: 5231224 - DNA, 25 bp, Homo sapien
ggagctcaaagtttctgacactaga

SEQ ID NO: 5231225 - DNA, 25 bp, Homo sapien
ccgccacggcttgcaggactaatga

SEQ ID NO: 5231226 - DNA, 25 bp, Homo sapien
aagggctaattgaccccgagaggca

SEQ ID NO: 5231227 - DNA, 25 bp, Homo sapien
tgcagtgcaatggagctcaaagttt

SEQ ID NO: 5231228 - DNA, 25 bp, Homo sapien
gcggcgatgggtgcgcggccactgc

SEQ ID NO: 5231229 - DNA, 25 bp, Homo sapien
ggcagcggcgatgggtgcgcggcca

SEQ ID NO: 5231230 - DNA, 25 bp, Homo sapien
aggcgaaagcggcagcggcgatggg

SEQ ID NO: 5231231 - DNA, 25 bp, Homo sapien
tgggtgcgcggccactgcttgctgg

SEQ ID NO: 5231232 - DNA, 25 bp, Homo sapien
ctgccgagcctgcgggtcactggat

SEQ ID NO: 5231233 - DNA, 25 bp, Homo sapien
cgagcctgcgggtcactggatccac

SEQ ID NO: 5231234 - DNA, 25 bp, Homo sapien
tgccgagcctgcgggtcactggatc

SEQ ID NO: 5231235 - DNA, 25 bp, Homo sapien
ccgagcctgcgggtcactggatcca

SEQ ID NO: 5231236 - DNA, 25 bp, Homo sapien
gggctgcctcgagtggctcccctgc

SEQ ID NO: 5231237 - DNA, 25 bp, Homo sapien
aggcgtggagggaccgcttgaccgg

SEQ ID NO: 5231238 - DNA, 25 bp, Homo sapien
gggttccttctggcactccggtcgc

SEQ ID NO: 5231239 - DNA, 25 bp, Homo sapien
actccggtcgccgaacctgcagccg

SEQ ID NO: 5231240 - DNA, 25 bp, Homo sapien
gacgctcggagctttaattaccgca

SEQ ID NO: 5231241 - DNA, 25 bp, Homo sapien
ccgcggagcgctggaaatgacgctc

SEQ ID NO: 5231242 - DNA, 25 bp, Homo sapien
tttaattaccgcagccgccggacaa

SEQ ID NO: 5231243 - DNA, 25 bp, Homo sapien
ctggagtcttattaatttctctgtg

SEQ ID NO: 5231244 - DNA, 25 bp, Homo sapien
gcttctggtaaaaccgcacgctcag

SEQ ID NO: 5231245 - DNA, 25 bp, Homo sapien
tcatggagcctgttatttgctgtgg

SEQ ID NO: 5231246 - DNA, 25 bp, Homo sapien
ggcttcaggcatctgtacctcctat

SEQ ID NO: 5231247 - DNA, 25 bp, Homo sapien
cacgctcagcttgttgggcgtcttc

SEQ ID NO: 5231248 - DNA, 25 bp, Homo sapien
tccaagcttcctaataaggtgccag

SEQ ID NO: 5231249 - DNA, 25 bp, Homo sapien
tatgccacacatggctatggcacat

SEQ ID NO: 5231250 - DNA, 25 bp, Homo sapien
tgctgtccagggtactttatagccc

SEQ ID NO: 5231251 - DNA, 25 bp, Homo sapien
tcatcctacatgatcaagtccaagc

SEQ ID NO: 5231252 - DNA, 25 bp, Homo sapien
ctaaaggaacatccagcattctctc

SEQ ID NO: 5231253 - DNA, 25 bp, Homo sapien
tctaaaggaacatccagcattctct

SEQ ID NO: 5231254 - DNA, 25 bp, Homo sapien
tctgtgcagatgtcagggtatgggc

SEQ ID NO: 5231255 - DNA, 25 bp, Homo sapien
gactataagccggatactcatttct

SEQ ID NO: 5231256 - DNA, 25 bp, Homo sapien
tagcactactaagactataagccgg

SEQ ID NO: 5231257 - DNA, 25 bp, Homo sapien
gtatgggctggcgatgatagcacta

SEQ ID NO: 5231258 - DNA, 25 bp, Homo sapien
catatgtagttccaaccagatttcc

SEQ ID NO: 5231259 - DNA, 25 bp, Homo sapien
ttccaaccagatttcccttgaagtc

SEQ ID NO: 5231260 - DNA, 25 bp, Homo sapien
tgtagttccaaccagatttcccttg

SEQ ID NO: 5231261 - DNA, 25 bp, Homo sapien
tccaaccagatttcccttgaagtcc

SEQ ID NO: 5231262 - DNA, 25 bp, Homo sapien
ttcttcagaataatagtaagctaac

SEQ ID NO: 5231263 - DNA, 25 bp, Homo sapien
tcttcagaataatagtaagctaaca

SEQ ID NO: 5231264 - DNA, 25 bp, Homo sapien
tttcttcagaataatagtaagctaa

SEQ ID NO: 5231265 - DNA, 25 bp, Homo sapien
ctttcttcagaataatagtaagcta

SEQ ID NO: 5231266 - DNA, 25 bp, Homo sapien
tcatttagctcctgcaatacaggcc

SEQ ID NO: 5231267 - DNA, 25 bp, Homo sapien
ccttaatgatcagattgattcctag

SEQ ID NO: 5231268 - DNA, 25 bp, Homo sapien
ttatccaccttaatgatcagattga

SEQ ID NO: 5231269 - DNA, 25 bp, Homo sapien
ccttcttttatccaccttaatgatc

SEQ ID NO: 5231270 - DNA, 25 bp, Homo sapien
agattgattcctagaatattattcc

SEQ ID NO: 5231271 - DNA, 25 bp, Homo sapien
tttcctttagcaaatctattgcttc

SEQ ID NO: 5231272 - DNA, 25 bp, Homo sapien
tcctttagcaaatctattgcttctt

SEQ ID NO: 5231273 - DNA, 25 bp, Homo sapien
ttttcctttagcaaatctattgctt

SEQ ID NO: 5231274 - DNA, 25 bp, Homo sapien
ctttagcaaatctattgcttcttcc

SEQ ID NO: 5231275 - DNA, 25 bp, Homo sapien
gtcaaccacccaatatgtgctggct

SEQ ID NO: 5231276 - DNA, 25 bp, Homo sapien
gtcacgctgatttttgtgacacagc

SEQ ID NO: 5231277 - DNA, 25 bp, Homo sapien
tgctggctgccacaaggtcaatatc

SEQ ID NO: 5231278 - DNA, 25 bp, Homo sapien
aatatccttgcttaaccctatgtag

SEQ ID NO: 5231279 - DNA, 25 bp, Homo sapien
ctggatgtacttgtacaacgaccac

SEQ ID NO: 5231280 - DNA, 25 bp, Homo sapien
gtatggtgtaataaagtactttcca

SEQ ID NO: 5231281 - DNA, 25 bp, Homo sapien
tgtacaacgaccacagaacaggcac

SEQ ID NO: 5231282 - DNA, 25 bp, Homo sapien
taggattgacaagagagttttcgta

SEQ ID NO: 5231283 - DNA, 25 bp, Homo sapien
tcactggcaacatcgtttgacagat

SEQ ID NO: 5231284 - DNA, 25 bp, Homo sapien
ctggcaacatcgtttgacagatatc

SEQ ID NO: 5231285 - DNA, 25 bp, Homo sapien
aatgtcactggcaacatcgtttgac

SEQ ID NO: 5231286 - DNA, 25 bp, Homo sapien
gcaacatcgtttgacagatatcaga

SEQ ID NO: 5231287 - DNA, 25 bp, Homo sapien
ctctctgaacaagagggatatcatg

SEQ ID NO: 5231288 - DNA, 25 bp, Homo sapien
tagtaagtctgccttgccaataagt

SEQ ID NO: 5231289 - DNA, 25 bp, Homo sapien
cagtgcttgaattcttaaacatgtc

SEQ ID NO: 5231290 - DNA, 25 bp, Homo sapien
tatcatgtatttgtgtgaaaccaca

SEQ ID NO: 5231291 - DNA, 25 bp, Homo sapien
ctttccttctctgcaccttgtattc

SEQ ID NO: 5231292 - DNA, 25 bp, Homo sapien
ttgtattccaggcacacagagcttt

SEQ ID NO: 5231293 - DNA, 25 bp, Homo sapien
ccttgtattccaggcacacagagct

SEQ ID NO: 5231294 - DNA, 25 bp, Homo sapien
aggcacacagagcttttggcgacat

SEQ ID NO: 5231295 - DNA, 25 bp, Homo sapien
aggaaacaagttgggcttcgatatc

SEQ ID NO: 5231296 - DNA, 25 bp, Homo sapien
ctgaacacacactgatacgtgctct

SEQ ID NO: 5231297 - DNA, 25 bp, Homo sapien
gggcttcgatatcttgtggtatttt

SEQ ID NO: 5231298 - DNA, 25 bp, Homo sapien
acacacactgatacgtgctctggaa

SEQ ID NO: 5231299 - DNA, 25 bp, Homo sapien
acctgtttctcaaagttcagctcca

SEQ ID NO: 5231300 - DNA, 25 bp, Homo sapien
ctctctgttccacctgtttctcaaa

SEQ ID NO: 5231301 - DNA, 25 bp, Homo sapien
ccacctgtttctcaaagttcagctc

SEQ ID NO: 5231302 - DNA, 25 bp, Homo sapien
gttccacctgtttctcaaagttcag

SEQ ID NO: 5231303 - DNA, 25 bp, Homo sapien
gaggaattaaggtacagaggcacat

SEQ ID NO: 5231304 - DNA, 25 bp, Homo sapien
aggaattaaggtacagaggcacatg

SEQ ID NO: 5231305 - DNA, 25 bp, Homo sapien
tactttggaggaattaaggtacaga

SEQ ID NO: 5231306 - DNA, 25 bp, Homo sapien
tgtaaatagtactttggaggaatta

SEQ ID NO: 5231307 - DNA, 25 bp, Homo sapien
catcctgaattatctcatagtcaac

SEQ ID NO: 5231308 - DNA, 25 bp, Homo sapien
ggtcatcctgaattatctcatagtc

SEQ ID NO: 5231309 - DNA, 25 bp, Homo sapien
cattcagggactagttttgcatctg

SEQ ID NO: 5231310 - DNA, 25 bp, Homo sapien
ggactagttttgcatctgtgatctc

SEQ ID NO: 5231311 - DNA, 25 bp, Homo sapien
aataaacttaaggccagtacttgct

SEQ ID NO: 5231312 - DNA, 25 bp, Homo sapien
gctttaagatggaccttggttttga

SEQ ID NO: 5231313 - DNA, 25 bp, Homo sapien
tggtctggtcaaagtccccatggct

SEQ ID NO: 5231314 - DNA, 25 bp, Homo sapien
catggctgctgtaatcaatctgaga

SEQ ID NO: 5231315 - DNA, 25 bp, Homo sapien
tctcacataaagaggcagaattgtt

SEQ ID NO: 5231316 - DNA, 25 bp, Homo sapien
gccatctcacataaagaggcagaat

SEQ ID NO: 5231317 - DNA, 25 bp, Homo sapien
caccaagccatctcacataaagagg

SEQ ID NO: 5231318 - DNA, 25 bp, Homo sapien
aaccaccaagccatctcacataaag

SEQ ID NO: 5231319 - DNA, 25 bp, Homo sapien
gcctctggagctgttaggaccacga

SEQ ID NO: 5231320 - DNA, 25 bp, Homo sapien
ggaccacgattaccatttcatatgc

SEQ ID NO: 5231321 - DNA, 25 bp, Homo sapien
tggagcctctggagctgttaggacc

SEQ ID NO: 5231322 - DNA, 25 bp, Homo sapien
gagctgttaggaccacgattaccat

SEQ ID NO: 5231323 - DNA, 25 bp, Homo sapien
gcaaggatttcatctactgccatat

SEQ ID NO: 5231324 - DNA, 25 bp, Homo sapien
caacaaattattggcatcatagtga

SEQ ID NO: 5231325 - DNA, 25 bp, Homo sapien
gagagagatttagcaataaaagcag

SEQ ID NO: 5231326 - DNA, 25 bp, Homo sapien
ccataatttcgcttagaggtagcct

SEQ ID NO: 5231327 - DNA, 25 bp, Homo sapien
gtaaggatttcttgacacagtcaaa

SEQ ID NO: 5231328 - DNA, 25 bp, Homo sapien
gctaacacattaggcactcttggtg

SEQ ID NO: 5231329 - DNA, 25 bp, Homo sapien
tgaaatggtatagggatagtcactg

SEQ ID NO: 5231330 - DNA, 25 bp, Homo sapien
gaaagaatcacacatatagttgcta

SEQ ID NO: 5231331 - DNA, 25 bp, Homo sapien
tggggagaagacctccaatctgttc

SEQ ID NO: 5231332 - DNA, 25 bp, Homo sapien
tgtggggagaagacctccaatctgt

SEQ ID NO: 5231333 - DNA, 25 bp, Homo sapien
tgttgtcattttgtattgttgttgc

SEQ ID NO: 5231334 - DNA, 25 bp, Homo sapien
gctgtggggagaagacctccaatct

SEQ ID NO: 5231335 - DNA, 25 bp, Homo sapien
ctgtagaaatgccttaacgcgtaat

SEQ ID NO: 5231336 - DNA, 25 bp, Homo sapien
tgccttaacgcgtaataaggtgtta

SEQ ID NO: 5231337 - DNA, 25 bp, Homo sapien
gtgttaattgcattcaggtgacaca

SEQ ID NO: 5231338 - DNA, 25 bp, Homo sapien
aacgcgtaataaggtgttaattgca

SEQ ID NO: 5231339 - DNA, 25 bp, Homo sapien
taacgcagttcaattaagccaatct

SEQ ID NO: 5231340 - DNA, 25 bp, Homo sapien
cgatgagcgcagcatgtcattctat

SEQ ID NO: 5231341 - DNA, 25 bp, Homo sapien
tattcctggttagcttatatcactg

SEQ ID NO: 5231342 - DNA, 25 bp, Homo sapien
ttgaaccttcaagtacgatgagcgc

SEQ ID NO: 5231343 - DNA, 25 bp, Homo sapien
cagtcgattgcctcggttactaagg

SEQ ID NO: 5231344 - DNA, 25 bp, Homo sapien
attattctagttatccctgcatcta

SEQ ID NO: 5231345 - DNA, 25 bp, Homo sapien
ttccagtcgattgcctcggttacta

SEQ ID NO: 5231346 - DNA, 25 bp, Homo sapien
cgattgcctcggttactaaggcttg

SEQ ID NO: 5231347 - DNA, 25 bp, Homo sapien
gtttgtcttagtgccgtccaattct

SEQ ID NO: 5231348 - DNA, 25 bp, Homo sapien
ttgtcttagtgccgtccaattcttc

SEQ ID NO: 5231349 - DNA, 25 bp, Homo sapien
gagtttgtcttagtgccgtccaatt

SEQ ID NO: 5231350 - DNA, 25 bp, Homo sapien
tgagtttgtcttagtgccgtccaat

SEQ ID NO: 5231351 - DNA, 25 bp, Homo sapien
cttatttcagtagaattcttttctt

SEQ ID NO: 5231352 - DNA, 25 bp, Homo sapien
tatttcagtagaattcttttcttga

SEQ ID NO: 5231353 - DNA, 25 bp, Homo sapien
atttcagtagaattcttttcttgac

SEQ ID NO: 5231354 - DNA, 25 bp, Homo sapien
ttcagtagaattcttttcttgactg

SEQ ID NO: 5231355 - DNA, 25 bp, Homo sapien
tgtgctaaggtttgaacaatctgcc

SEQ ID NO: 5231356 - DNA, 25 bp, Homo sapien
ctttcatggttgctggatgagtcca

SEQ ID NO: 5231357 - DNA, 25 bp, Homo sapien
gatgagtccatttgccaggtattcc

SEQ ID NO: 5231358 - DNA, 25 bp, Homo sapien
caaaggtaggcaattctgggtacca

SEQ ID NO: 5231359 - DNA, 25 bp, Homo sapien
agttctagatctttttgttgttgtt

SEQ ID NO: 5231360 - DNA, 25 bp, Homo sapien
cagttctagatctttttgttgttgt

SEQ ID NO: 5231361 - DNA, 25 bp, Homo sapien
tgtcttgccccaacatatagaacaa

SEQ ID NO: 5231362 - DNA, 25 bp, Homo sapien
caaacctatcaggatataggaatgc

SEQ ID NO: 5231363 - DNA, 25 bp, Homo sapien
tgtagtgcaagagcagtcacctgat

SEQ ID NO: 5231364 - DNA, 25 bp, Homo sapien
acctgattaatgtcttgccccaaca

SEQ ID NO: 5231365 - DNA, 25 bp, Homo sapien
tagttctcccttcacaggaagctga

SEQ ID NO: 5231366 - DNA, 25 bp, Homo sapien
cacaggaagctgatgaccaggtgta

SEQ ID NO: 5231367 - DNA, 25 bp, Homo sapien
aggtgtactgtccagtttgcccttg

SEQ ID NO: 5231368 - DNA, 25 bp, Homo sapien
tgccatcatctttcatggccaccca

SEQ ID NO: 5231369 - DNA, 25 bp, Homo sapien
cttcccacatcagataatttgctag

SEQ ID NO: 5231370 - DNA, 25 bp, Homo sapien
tcccacatcagataatttgctagct

SEQ ID NO: 5231371 - DNA, 25 bp, Homo sapien
cccacatcagataatttgctagctg

SEQ ID NO: 5231372 - DNA, 25 bp, Homo sapien
ttcccacatcagataatttgctagc

SEQ ID NO: 5231373 - DNA, 25 bp, Homo sapien
cactgtttagctttgtgttcatctc

SEQ ID NO: 5231374 - DNA, 25 bp, Homo sapien
tggctggatgccatttccaggtgtt

SEQ ID NO: 5231375 - DNA, 25 bp, Homo sapien
tctctggctggatgccatttccagg

SEQ ID NO: 5231376 - DNA, 25 bp, Homo sapien
actgtttagctttgtgttcatctct

SEQ ID NO: 5231377 - DNA, 25 bp, Homo sapien
tttcaacaaacttggcatctgacat

SEQ ID NO: 5231378 - DNA, 25 bp, Homo sapien
ttggtgtctggaacaggacagatac

SEQ ID NO: 5231379 - DNA, 25 bp, Homo sapien
ggtgtctggaacaggacagatacaa

SEQ ID NO: 5231380 - DNA, 25 bp, Homo sapien
ggaacaggacagatacaactaagaa

SEQ ID NO: 5231381 - DNA, 25 bp, Homo sapien
gtctggaacaggacagatacaacta

SEQ ID NO: 5231382 - DNA, 25 bp, Homo sapien
agattgagaactgtcacatgaaatg

SEQ ID NO: 5231383 - DNA, 25 bp, Homo sapien
gtgccactttcccaatcacgaagag

SEQ ID NO: 5231384 - DNA, 25 bp, Homo sapien
aagagattgagaactgtcacatgaa

SEQ ID NO: 5231385 - DNA, 25 bp, Homo sapien
actttcccaatcacgaagagattga

SEQ ID NO: 5231386 - DNA, 25 bp, Homo sapien
ctctgtacaagtcagttatcttgtt

SEQ ID NO: 5231387 - DNA, 25 bp, Homo sapien
aagtcagttatcttgttagactctc

SEQ ID NO: 5231388 - DNA, 25 bp, Homo sapien
agactctcccgtttctttatttatg

SEQ ID NO: 5231389 - DNA, 25 bp, Homo sapien
acaagtcagttatcttgttagactc

SEQ ID NO: 5231390 - DNA, 25 bp, Homo sapien
ctgtagtcccggtgactccagaggc

SEQ ID NO: 5231391 - DNA, 25 bp, Homo sapien
cttgatcccaggaggtagaggctga

SEQ ID NO: 5231392 - DNA, 25 bp, Homo sapien
gtgagccatgattgcatcactgcac

SEQ ID NO: 5231393 - DNA, 25 bp, Homo sapien
tgaggtgggaggattgcttgatccc

SEQ ID NO: 5231394 - DNA, 25 bp, Homo sapien
gaaatccaatttgtctttcttctgc

SEQ ID NO: 5231395 - DNA, 25 bp, Homo sapien
ttgaaatgaaatccaatttgtcttt

SEQ ID NO: 5231396 - DNA, 25 bp, Homo sapien
accagtatgaagaattttattttca

SEQ ID NO: 5231397 - DNA, 25 bp, Homo sapien
tcaattttcttgaaatgaaatccaa

SEQ ID NO: 5231398 - DNA, 25 bp, Homo sapien
ggcgcactcaacatacagacccttt

SEQ ID NO: 5231399 - DNA, 25 bp, Homo sapien
tggacagctgtagtacctcggcgca

SEQ ID NO: 5231400 - DNA, 25 bp, Homo sapien
cccaccggtggcatcttggacagct

SEQ ID NO: 5231401 - DNA, 25 bp, Homo sapien
tctgcacaaggatgcctcccattgt

SEQ ID NO: 5231402 - DNA, 25 bp, Homo sapien
tctgttggcagaatactcaggtcaa

SEQ ID NO: 5231403 - DNA, 25 bp, Homo sapien
gacctgctaggtcagtctgttggca

SEQ ID NO: 5231404 - DNA, 25 bp, Homo sapien
tcttggcgttcctgtgtccagcgga

SEQ ID NO: 5231405 - DNA, 25 bp, Homo sapien
gagaatgtcttcatcgccggcttgg

SEQ ID NO: 5231406 - DNA, 25 bp, Homo sapien
tagtgcgaatacacgcgcgtgagga

SEQ ID NO: 5231407 - DNA, 25 bp, Homo sapien
ggtcgtagtgcatgcggccactgct

SEQ ID NO: 5231408 - DNA, 25 bp, Homo sapien
gcatgtcgcgctcgaagctcagttc

SEQ ID NO: 5231409 - DNA, 25 bp, Homo sapien
ttggccttcagctgactggaggaca

SEQ ID NO: 5231410 - DNA, 25 bp, Homo sapien
ggcagcttcccgagatggtctcggc

SEQ ID NO: 5231411 - DNA, 25 bp, Homo sapien
ctggcgcgcgcatgggaggcagctt

SEQ ID NO: 5231412 - DNA, 25 bp, Homo sapien
cagcttcccgagatggtctcggcca

SEQ ID NO: 5231413 - DNA, 25 bp, Homo sapien
tggcgcgcgcatgggaggcagcttc

SEQ ID NO: 5231414 - DNA, 25 bp, Homo sapien
gctgtagaagttggcctccatcacg

SEQ ID NO: 5231415 - DNA, 25 bp, Homo sapien
agctgggaaaggtggcggtgcgcgc

SEQ ID NO: 5231416 - DNA, 25 bp, Homo sapien
ggaaatgcaggtccagcacgtcaaa

SEQ ID NO: 5231417 - DNA, 25 bp, Homo sapien
ccggtgccgcgtggcgtggcggaag

SEQ ID NO: 5231418 - DNA, 25 bp, Homo sapien
cagaggacagaaaggcgacctgacg

SEQ ID NO: 5231419 - DNA, 25 bp, Homo sapien
tctcggcgcagagcagagcttgtgc

SEQ ID NO: 5231420 - DNA, 25 bp, Homo sapien
tcgagcccagaagaacgaagcgagc

SEQ ID NO: 5231421 - DNA, 25 bp, Homo sapien
tgcacgtctgttggcgtggtcatgc

SEQ ID NO: 5231422 - DNA, 25 bp, Homo sapien
cgtgtgatagtggtcaggcagccca

SEQ ID NO: 5231423 - DNA, 25 bp, Homo sapien
aaggccaggcccgtgtgatagtggt

SEQ ID NO: 5231424 - DNA, 25 bp, Homo sapien
tgatagtggtcaggcagcccattga

SEQ ID NO: 5231425 - DNA, 25 bp, Homo sapien
cccgtgtgatagtggtcaggcagcc

SEQ ID NO: 5231426 - DNA, 25 bp, Homo sapien
taacccctacataagtgatagagca

SEQ ID NO: 5231427 - DNA, 25 bp, Homo sapien
cgtgcactcaaaggctgttagactc

SEQ ID NO: 5231428 - DNA, 25 bp, Homo sapien
ccagaaagatcaatataacccctac

SEQ ID NO: 5231429 - DNA, 25 bp, Homo sapien
tgttagactcttcgataaagaacgg

SEQ ID NO: 5231430 - DNA, 25 bp, Homo sapien
agttctggaattcaagcaatttagc

SEQ ID NO: 5231431 - DNA, 25 bp, Homo sapien
tgtttgtccctgatataccttcggg

SEQ ID NO: 5231432 - DNA, 25 bp, Homo sapien
gagcatctgaggaaacatgttcctt

SEQ ID NO: 5231433 - DNA, 25 bp, Homo sapien
ggcaccagcctactttagcaaattg

SEQ ID NO: 5231434 - DNA, 25 bp, Homo sapien
ctgccttacaggtaatgcattcttt

SEQ ID NO: 5231435 - DNA, 25 bp, Homo sapien
ttgtctaccccaaacacaagctgct

SEQ ID NO: 5231436 - DNA, 25 bp, Homo sapien
ccttacaggtaatgcattctttgtc

SEQ ID NO: 5231437 - DNA, 25 bp, Homo sapien
ggtaatgcattctttgtctacccca

SEQ ID NO: 5231438 - DNA, 25 bp, Homo sapien
gcaacagtgaccattttgattagag

SEQ ID NO: 5231439 - DNA, 25 bp, Homo sapien
tcagaccacaaacacatcagttaag

SEQ ID NO: 5231440 - DNA, 25 bp, Homo sapien
gattagagtagtccacttatgagca

SEQ ID NO: 5231441 - DNA, 25 bp, Homo sapien
taggcaaggcccaattgttgaaggg

SEQ ID NO: 5231442 - DNA, 25 bp, Homo sapien
gatatagagcacatatgctccatca

SEQ ID NO: 5231443 - DNA, 25 bp, Homo sapien
tatgctccatcatgagttgctgtca

SEQ ID NO: 5231444 - DNA, 25 bp, Homo sapien
acatatgctccatcatgagttgctg

SEQ ID NO: 5231445 - DNA, 25 bp, Homo sapien
gaaaaacaaaaggatatagagcaca

SEQ ID NO: 5231446 - DNA, 25 bp, Homo sapien
taatttcttgggagcagaaaatcgt

SEQ ID NO: 5231447 - DNA, 25 bp, Homo sapien
tctgacattgtacaagttaactgaa

SEQ ID NO: 5231448 - DNA, 25 bp, Homo sapien
tccgcagacttagagcagttaattt

SEQ ID NO: 5231449 - DNA, 25 bp, Homo sapien
aataaaaaattaccgcattccgcag

SEQ ID NO: 5231450 - DNA, 25 bp, Homo sapien
cttttggatcacacattgtgtagat

SEQ ID NO: 5231451 - DNA, 25 bp, Homo sapien
tagtcgagtgtactagcactggagc

SEQ ID NO: 5231452 - DNA, 25 bp, Homo sapien
tagatgatgatagaatgtagtcgag

SEQ ID NO: 5231453 - DNA, 25 bp, Homo sapien
cacacattgtgtagatgatgataga

SEQ ID NO: 5231454 - DNA, 25 bp, Homo sapien
aatgaggaagctgcttgcccacaaa

SEQ ID NO: 5231455 - DNA, 25 bp, Homo sapien
agtttctgacattagtctactctga

SEQ ID NO: 5231456 - DNA, 25 bp, Homo sapien
aaataccttatgcttgctcaccacc

SEQ ID NO: 5231457 - DNA, 25 bp, Homo sapien
taaaataggtctctgctaataggga

SEQ ID NO: 5231458 - DNA, 25 bp, Homo sapien
tccatcttgccggttctcaacggag

SEQ ID NO: 5231459 - DNA, 25 bp, Homo sapien
agtgctgtggcctcttggcgcctct

SEQ ID NO: 5231460 - DNA, 25 bp, Homo sapien
tcctcaagagtccagaaaaacctcc

SEQ ID NO: 5231461 - DNA, 25 bp, Homo sapien
tgttcttgtattctgctcagtggac

SEQ ID NO: 5231462 - DNA, 25 bp, Homo sapien
gtgtgcaatcggctagatccttcct

SEQ ID NO: 5231463 - DNA, 25 bp, Homo sapien
tccttctccgcttttcgtgagggaa

SEQ ID NO: 5231464 - DNA, 25 bp, Homo sapien
ggaatgaacaggcacatacccctca

SEQ ID NO: 5231465 - DNA, 25 bp, Homo sapien
ccaagttatctttagtgtgcaatcg

SEQ ID NO: 5231466 - DNA, 25 bp, Homo sapien
ccttcccgctgatgatgactgacgt

SEQ ID NO: 5231467 - DNA, 25 bp, Homo sapien
gaattaagtagctagcttgctctgc

SEQ ID NO: 5231468 - DNA, 25 bp, Homo sapien
aaccacggctgtgcccggttcttca

SEQ ID NO: 5231469 - DNA, 25 bp, Homo sapien
gactttccgccaccagacatggaga

SEQ ID NO: 5231470 - DNA, 25 bp, Homo sapien
taggaaagggcctaattagcgaatc

SEQ ID NO: 5231471 - DNA, 25 bp, Homo sapien
ggcctaattagcgaatccaacaaat

SEQ ID NO: 5231472 - DNA, 25 bp, Homo sapien
ctgttaggaaagggcctaattagcg

SEQ ID NO: 5231473 - DNA, 25 bp, Homo sapien
gaaagggcctaattagcgaatccaa

SEQ ID NO: 5231474 - DNA, 25 bp, Homo sapien
ataagtctcttagtcacagccacag

SEQ ID NO: 5231475 - DNA, 25 bp, Homo sapien
actgtgaaagctggagttagtctaa

SEQ ID NO: 5231476 - DNA, 25 bp, Homo sapien
catgcaggtaacttggcttgttggc

SEQ ID NO: 5231477 - DNA, 25 bp, Homo sapien
tacttcttggcagaacctcatgcag

SEQ ID NO: 5231478 - DNA, 25 bp, Homo sapien
ttatggtaagaatgaggaatatggg

SEQ ID NO: 5231479 - DNA, 25 bp, Homo sapien
ttaccaccacgtgtgggataaggct

SEQ ID NO: 5231480 - DNA, 25 bp, Homo sapien
caccacgtgtgggataaggctcaag

SEQ ID NO: 5231481 - DNA, 25 bp, Homo sapien
tgggataaggctcaagtccattcca

SEQ ID NO: 5231482 - DNA, 25 bp, Homo sapien
tgcattcctcattaaccaatcaggg

SEQ ID NO: 5231483 - DNA, 25 bp, Homo sapien
ttaacaagtgacaaatagccagggc

SEQ ID NO: 5231484 - DNA, 25 bp, Homo sapien
caatcagggccatttggtaactggg

SEQ ID NO: 5231485 - DNA, 25 bp, Homo sapien
tgcatggcatctgataaggaggcca

SEQ ID NO: 5231486 - DNA, 25 bp, Homo sapien
ttttaagtcaggtgtcacaaatttc

SEQ ID NO: 5231487 - DNA, 25 bp, Homo sapien
taagtcaggtgtcacaaatttccca

SEQ ID NO: 5231488 - DNA, 25 bp, Homo sapien
ttaagtcaggtgtcacaaatttccc

SEQ ID NO: 5231489 - DNA, 25 bp, Homo sapien
aagtcaggtgtcacaaatttcccac

SEQ ID NO: 5231490 - DNA, 25 bp, Homo sapien
ttagtcaatctgcatgatgtcgtac

SEQ ID NO: 5231491 - DNA, 25 bp, Homo sapien
cgtactgacatgaatcaactttttc

SEQ ID NO: 5231492 - DNA, 25 bp, Homo sapien
caatctgcatgatgtcgtactgaca

SEQ ID NO: 5231493 - DNA, 25 bp, Homo sapien
gcatgatgtcgtactgacatgaatc

SEQ ID NO: 5231494 - DNA, 25 bp, Homo sapien
gaaacaaggacagctccatcattgg

SEQ ID NO: 5231495 - DNA, 25 bp, Homo sapien
tccagactattatggcagaactcca

SEQ ID NO: 5231496 - DNA, 25 bp, Homo sapien
ccatagttgggagaattggcccagt

SEQ ID NO: 5231497 - DNA, 25 bp, Homo sapien
caagcaggcctgatttatgtgtagc

SEQ ID NO: 5231498 - DNA, 25 bp, Homo sapien
aatttagggaatctcaggaacaagc

SEQ ID NO: 5231499 - DNA, 25 bp, Homo sapien
tactgtctgagtgcacagctactgg

SEQ ID NO: 5231500 - DNA, 25 bp, Homo sapien
gatttggagacctccgctaaatagt

SEQ ID NO: 5231501 - DNA, 25 bp, Homo sapien
tgtgtgtacaactaaagaagctgca

SEQ ID NO: 5231502 - DNA, 25 bp, Homo sapien
tgaaaaatgtgtcctaaagttgaac

SEQ ID NO: 5231503 - DNA, 25 bp, Homo sapien
ggagcagtcctgttttcatacaaat

SEQ ID NO: 5231504 - DNA, 25 bp, Homo sapien
gaaaccactagtctgatctcatggt

SEQ ID NO: 5231505 - DNA, 25 bp, Homo sapien
gaatcttcttagaccctcgcccaat

SEQ ID NO: 5231506 - DNA, 25 bp, Homo sapien
tctagttcattggtaatttaatctt

SEQ ID NO: 5231507 - DNA, 25 bp, Homo sapien
aattttttacagtcaagcattctga

SEQ ID NO: 5231508 - DNA, 25 bp, Homo sapien
aaagtttgaagattaggtcaactct

SEQ ID NO: 5231509 - DNA, 25 bp, Homo sapien
ttctgtgtaacaaaggtctctctgt

SEQ ID NO: 5231510 - DNA, 25 bp, Homo sapien
aacagaaagaggtggatatggctca

SEQ ID NO: 5231511 - DNA, 25 bp, Homo sapien
cagttgtatgcccagtttgtttagg

SEQ ID NO: 5231512 - DNA, 25 bp, Homo sapien
gaaatacgcaaggttgtagcatcta

SEQ ID NO: 5231513 - DNA, 25 bp, Homo sapien
ctctggatggttatatgtgcatgcc

SEQ ID NO: 5231514 - DNA, 25 bp, Homo sapien
catacctgactcttagtgactacac

SEQ ID NO: 5231515 - DNA, 25 bp, Homo sapien
taaataggttttgctacagtcatac

SEQ ID NO: 5231516 - DNA, 25 bp, Homo sapien
caactgctagaagtatactcggacg

SEQ ID NO: 5231517 - DNA, 25 bp, Homo sapien
aaataattatagcaggtaaactggc

SEQ ID NO: 5231518 - DNA, 25 bp, Homo sapien
tctcgaagcatgaatttacacactg

SEQ ID NO: 5231519 - DNA, 25 bp, Homo sapien
tgacttacgccttaaaaacactgac

SEQ ID NO: 5231520 - DNA, 25 bp, Homo sapien
cagcaatagattgtgtctggacata

SEQ ID NO: 5231521 - DNA, 25 bp, Homo sapien
cactgactcgaatgtagtatttgga

SEQ ID NO: 5231522 - DNA, 25 bp, Homo sapien
ctgggggcgacgcggccgggcgcgc

SEQ ID NO: 5231523 - DNA, 25 bp, Homo sapien
tgggggcgacgcggccgggcgcgcg

SEQ ID NO: 5231524 - DNA, 25 bp, Homo sapien
gacgcggccgggcgcgcgggtgggc

SEQ ID NO: 5231525 - DNA, 25 bp, Homo sapien
ggcgacgcggccgggcgcgcgggtg

SEQ ID NO: 5231526 - DNA, 25 bp, Homo sapien
tggcacactcggaagcgggttacct

SEQ ID NO: 5231527 - DNA, 25 bp, Homo sapien
gcctccagccggcagaaaacgtgag

SEQ ID NO: 5231528 - DNA, 25 bp, Homo sapien
ccgtggcacactcggaagcgggtta

SEQ ID NO: 5231529 - DNA, 25 bp, Homo sapien
aacgtgagatttattatgacacggg

SEQ ID NO: 5231530 - DNA, 25 bp, Homo sapien
gcggccgaaatgaacgtcacctcac

SEQ ID NO: 5231531 - DNA, 25 bp, Homo sapien
cacgcggccgaaatgaacgtcacct

SEQ ID NO: 5231532 - DNA, 25 bp, Homo sapien
tcacgcggccgaaatgaacgtcacc

SEQ ID NO: 5231533 - DNA, 25 bp, Homo sapien
acgcggccgaaatgaacgtcacctc

SEQ ID NO: 5231534 - DNA, 25 bp, Homo sapien
ggactccgcgcagggcgccaagatc

SEQ ID NO: 5231535 - DNA, 25 bp, Homo sapien
gccgcagagttgccggcggagacca

SEQ ID NO: 5231536 - DNA, 25 bp, Homo sapien
tgccggcggagaccagtaggtggga

SEQ ID NO: 5231537 - DNA, 25 bp, Homo sapien
cgactcggccgggacgcggctcccg

SEQ ID NO: 5231538 - DNA, 25 bp, Homo sapien
aggacccctcttatcccgcttcagg

SEQ ID NO: 5231539 - DNA, 25 bp, Homo sapien
ccaggacccctcttatcccgcttca

SEQ ID NO: 5231540 - DNA, 25 bp, Homo sapien
caggacccctcttatcccgcttcag

SEQ ID NO: 5231541 - DNA, 25 bp, Homo sapien
tcgcaaatgtggtcaggaaagatac

SEQ ID NO: 5231542 - DNA, 25 bp, Homo sapien
ggaacaccgtttggcagtcctgata

SEQ ID NO: 5231543 - DNA, 25 bp, Homo sapien
taatgttattgcaagcctgagccca

SEQ ID NO: 5231544 - DNA, 25 bp, Homo sapien
taagagtacggtgcctgttccgact

SEQ ID NO: 5231545 - DNA, 25 bp, Homo sapien
cagtggccaaagaacatggtactcc

SEQ ID NO: 5231546 - DNA, 25 bp, Homo sapien
tacatgaaagccagctgagtacatc

SEQ ID NO: 5231547 - DNA, 25 bp, Homo sapien
tgacttatgagccaagatctgacca

SEQ ID NO: 5231548 - DNA, 25 bp, Homo sapien
ggatgagaaagaaccagctacgtga

SEQ ID NO: 5231549 - DNA, 25 bp, Homo sapien
aattccgtgtgtttgttacctctat

SEQ ID NO: 5231550 - DNA, 25 bp, Homo sapien
catactcaggtccaagatcacatat

SEQ ID NO: 5231551 - DNA, 25 bp, Homo sapien
tgttacctctatcaccgatattggc

SEQ ID NO: 5231552 - DNA, 25 bp, Homo sapien
caccgatattggcttcatactcagg

SEQ ID NO: 5231553 - DNA, 25 bp, Homo sapien
ccatcaagctgaagaagaaacagga

SEQ ID NO: 5231554 - DNA, 25 bp, Homo sapien
ctgccatcaagctgaagaagaaaca

SEQ ID NO: 5231555 - DNA, 25 bp, Homo sapien
gccatcaagctgaagaagaaacagg

SEQ ID NO: 5231556 - DNA, 25 bp, Homo sapien
tgccatcaagctgaagaagaaacag

SEQ ID NO: 5231557 - DNA, 25 bp, Homo sapien
cgggacataaagcacagcgtgactg

SEQ ID NO: 5231558 - DNA, 25 bp, Homo sapien
actgtccttggtcaggtgtctgtcc

SEQ ID NO: 5231559 - DNA, 25 bp, Homo sapien
tttttctgccgggacataaagcaca

SEQ ID NO: 5231560 - DNA, 25 bp, Homo sapien
cacagcgtgactgtccttggtcagg

SEQ ID NO: 5231561 - DNA, 25 bp, Homo sapien
agaaagaaaggcttaagcctcaagg

SEQ ID NO: 5231562 - DNA, 25 bp, Homo sapien
gaaagaaaggcttaagcctcaaggc

SEQ ID NO: 5231563 - DNA, 25 bp, Homo sapien
gacccgagaaagctttagtcgctta

SEQ ID NO: 5231564 - DNA, 25 bp, Homo sapien
cactgattctcaatagctgcaaacg

SEQ ID NO: 5231565 - DNA, 25 bp, Homo sapien
ttagtcgcttagcaacaaatgggac

SEQ ID NO: 5231566 - DNA, 25 bp, Homo sapien
aacaaatgggactagctcctcccct

SEQ ID NO: 5231567 - DNA, 25 bp, Homo sapien
tctccattgactcaaagacattaga

SEQ ID NO: 5231568 - DNA, 25 bp, Homo sapien
ggcacctatgattaacctctttccc

SEQ ID NO: 5231569 - DNA, 25 bp, Homo sapien
tatttcagacactttgtgacaatca

SEQ ID NO: 5231570 - DNA, 25 bp, Homo sapien
gacaatcaatactgcaaaagctctg

SEQ ID NO: 5231571 - DNA, 25 bp, Homo sapien
gaactagtggttacctgaatcatac

SEQ ID NO: 5231572 - DNA, 25 bp, Homo sapien
atatctctcatcttccttgaactag

SEQ ID NO: 5231573 - DNA, 25 bp, Homo sapien
catggctggactgaacattgggtcc

SEQ ID NO: 5231574 - DNA, 25 bp, Homo sapien
aaactctgcaatgggtccaggtctg

SEQ ID NO: 5231575 - DNA, 25 bp, Homo sapien
tcttgcatgagaccatgatcctggt

SEQ ID NO: 5231576 - DNA, 25 bp, Homo sapien
tatactcaagaagaattgattttag

SEQ ID NO: 5231577 - DNA, 25 bp, Homo sapien
tgtttatgtgaaacctagctagtag

SEQ ID NO: 5231578 - DNA, 25 bp, Homo sapien
tccatatggttagcactagggtaag

SEQ ID NO: 5231579 - DNA, 25 bp, Homo sapien
ctttctcgtgaactccagcatccac

SEQ ID NO: 5231580 - DNA, 25 bp, Homo sapien
cagtgttttgtagggtctccacgtc

SEQ ID NO: 5231581 - DNA, 25 bp, Homo sapien
gaatctctcctcatcatacagccag

SEQ ID NO: 5231582 - DNA, 25 bp, Homo sapien
tacagccagtgttttgtagggtctc

SEQ ID NO: 5231583 - DNA, 25 bp, Homo sapien
tctcctcatcatacagccagtgttt

SEQ ID NO: 5231584 - DNA, 25 bp, Homo sapien
ctaagggcaacagcgaagacgctac

SEQ ID NO: 5231585 - DNA, 25 bp, Homo sapien
gggcaacagcgaagacgctacccaa

SEQ ID NO: 5231586 - DNA, 25 bp, Homo sapien
caacagcgaagacgctacccaacgg

SEQ ID NO: 5231587 - DNA, 25 bp, Homo sapien
aagggcaacagcgaagacgctaccc

SEQ ID NO: 5231588 - DNA, 25 bp, Homo sapien
ccacccccagcaggcccacagccgt

SEQ ID NO: 5231589 - DNA, 25 bp, Homo sapien
acccccagcaggcccacagccgtcc

SEQ ID NO: 5231590 - DNA, 25 bp, Homo sapien
gcgcttcgggcccccacccccagca

SEQ ID NO: 5231591 - DNA, 25 bp, Homo sapien
ccccacccccagcaggcccacagcc

SEQ ID NO: 5231592 - DNA, 25 bp, Homo sapien
catgcccaacgcctcttccaggacc

SEQ ID NO: 5231593 - DNA, 25 bp, Homo sapien
ggctgccgtcaaacccatgcccaac

SEQ ID NO: 5231594 - DNA, 25 bp, Homo sapien
ttccaggaccctcacggcggagctg

SEQ ID NO: 5231595 - DNA, 25 bp, Homo sapien
gttccaggtagtaggcgccctcagc

SEQ ID NO: 5231596 - DNA, 25 bp, Homo sapien
agcgggccgcgcctccacgggaagg

SEQ ID NO: 5231597 - DNA, 25 bp, Homo sapien
cgggccgcgcctccacgggaaggat

SEQ ID NO: 5231598 - DNA, 25 bp, Homo sapien
gccagcgcagcgggccgcgcctcca

SEQ ID NO: 5231599 - DNA, 25 bp, Homo sapien
ggccgcgcctccacgggaaggatac

SEQ ID NO: 5231600 - DNA, 25 bp, Homo sapien
gtggccccaaggctcaaaaggcgcc

SEQ ID NO: 5231601 - DNA, 25 bp, Homo sapien
aacagaggctcctccggagtggccc

SEQ ID NO: 5231602 - DNA, 25 bp, Homo sapien
caaggctcaaaaggcgccgccagtg

SEQ ID NO: 5231603 - DNA, 25 bp, Homo sapien
cagtgggaggccctcgccttcgtcc

SEQ ID NO: 5231604 - DNA, 25 bp, Homo sapien
gctctcaggaagactgtggtggcaa

SEQ ID NO: 5231605 - DNA, 25 bp, Homo sapien
tcaggaagactgtggtggcaaaaac

SEQ ID NO: 5231606 - DNA, 25 bp, Homo sapien
tcagtgagtggctctcaggaagact

SEQ ID NO: 5231607 - DNA, 25 bp, Homo sapien
gaagactgtggtggcaaaaacagca

SEQ ID NO: 5231608 - DNA, 25 bp, Homo sapien
cattcagtagcaagggcactggata

SEQ ID NO: 5231609 - DNA, 25 bp, Homo sapien
tccttagaagagaaataggtggcac

SEQ ID NO: 5231610 - DNA, 25 bp, Homo sapien
aaagcaatgatattctgggttcctt

SEQ ID NO: 5231611 - DNA, 25 bp, Homo sapien
gatattctgggttccttagaagaga

SEQ ID NO: 5231612 - DNA, 25 bp, Homo sapien
gaagagaaataggtggcactgttac

SEQ ID NO: 5231613 - DNA, 25 bp, Homo sapien
cttttgttcagcatgtaagactcag

SEQ ID NO: 5231614 - DNA, 25 bp, Homo sapien
tgttcagcatgtaagactcagtgct

SEQ ID NO: 5231615 - DNA, 25 bp, Homo sapien
tcagcatgtaagactcagtgctcat

SEQ ID NO: 5231616 - DNA, 25 bp, Homo sapien
taacttttgttcagcatgtaagact

SEQ ID NO: 5231617 - DNA, 25 bp, Homo sapien
gcagtagcagcatctttatgaagaa

SEQ ID NO: 5231618 - DNA, 25 bp, Homo sapien
catttgtaggtagtgtttactgcca

SEQ ID NO: 5231619 - DNA, 25 bp, Homo sapien
tgtaggtagtgtttactgccagcag

SEQ ID NO: 5231620 - DNA, 25 bp, Homo sapien
ccactgctgcatttgtaggtagtgt

SEQ ID NO: 5231621 - DNA, 25 bp, Homo sapien
tctggttctactttcacggagcaac

SEQ ID NO: 5231622 - DNA, 25 bp, Homo sapien
gaaataataagctagcattctggcc

SEQ ID NO: 5231623 - DNA, 25 bp, Homo sapien
gactctaagcttcccagtaaccagg

SEQ ID NO: 5231624 - DNA, 25 bp, Homo sapien
gtgtagagatatcaatccccttggc

SEQ ID NO: 5231625 - DNA, 25 bp, Homo sapien
caggaagttggtaaatatatataat

SEQ ID NO: 5231626 - DNA, 25 bp, Homo sapien
gaagttggtaaatatatataattta

SEQ ID NO: 5231627 - DNA, 25 bp, Homo sapien
aggaagttggtaaatatatataatt

SEQ ID NO: 5231628 - DNA, 25 bp, Homo sapien
tcagatgcttcagttatggtgacct

SEQ ID NO: 5231629 - DNA, 25 bp, Homo sapien
cagaactactagcaactgaaaatct

SEQ ID NO: 5231630 - DNA, 25 bp, Homo sapien
taaggctatctaaatatcaccattc

SEQ ID NO: 5231631 - DNA, 25 bp, Homo sapien
cactttttcagaactactagcaact

SEQ ID NO: 5231632 - DNA, 25 bp, Homo sapien
ttcttgccccatctcaagtgctttc

SEQ ID NO: 5231633 - DNA, 25 bp, Homo sapien
taaatgtcaataaacgtcacttcta

SEQ ID NO: 5231634 - DNA, 25 bp, Homo sapien
attcaggattagtttgtgggcaact

SEQ ID NO: 5231635 - DNA, 25 bp, Homo sapien
gtcaataaacgtcacttctaataaa

SEQ ID NO: 5231636 - DNA, 25 bp, Homo sapien
tcaggattagtttgtgggcaactgc

SEQ ID NO: 5231637 - DNA, 25 bp, Homo sapien
gatcaaagaaatactttatgtaaaa

SEQ ID NO: 5231638 - DNA, 25 bp, Homo sapien
aggatcaaagaaatactttatgtaa

SEQ ID NO: 5231639 - DNA, 25 bp, Homo sapien
ggatcaaagaaatactttatgtaaa

SEQ ID NO: 5231640 - DNA, 25 bp, Homo sapien
tcaaagaaatactttatgtaaaata

SEQ ID NO: 5231641 - DNA, 25 bp, Homo sapien
tgggatgctaaaattgtcatctggt

SEQ ID NO: 5231642 - DNA, 25 bp, Homo sapien
ttcaccttctgggatgctaaaattg

SEQ ID NO: 5231643 - DNA, 25 bp, Homo sapien
tgttcttgggccatctgaattgctt

SEQ ID NO: 5231644 - DNA, 25 bp, Homo sapien
tcagtatctgtagcctgttcttggg

SEQ ID NO: 5231645 - DNA, 25 bp, Homo sapien
gaagcatatcaagaaggcaaaggca

SEQ ID NO: 5231646 - DNA, 25 bp, Homo sapien
tccattaaggctcagggtcttacgg

SEQ ID NO: 5231647 - DNA, 25 bp, Homo sapien
gcagcatgctgtagctcagatgaga

SEQ ID NO: 5231648 - DNA, 25 bp, Homo sapien
tagaaggaagcatagtaccagcagc

SEQ ID NO: 5231649 - DNA, 25 bp, Homo sapien
gtcttctattacttcaggtactgca

SEQ ID NO: 5231650 - DNA, 25 bp, Homo sapien
agtcttctattacttcaggtactgc

SEQ ID NO: 5231651 - DNA, 25 bp, Homo sapien
gactgaaagcaatcaagagttctgg

SEQ ID NO: 5231652 - DNA, 25 bp, Homo sapien
agactgaaagcaatcaagagttctg

SEQ ID NO: 5231653 - DNA, 25 bp, Homo sapien
tgtacaaaccgaggatgtcagaatc

SEQ ID NO: 5231654 - DNA, 25 bp, Homo sapien
tggtggcacccaaggcataggatgt

SEQ ID NO: 5231655 - DNA, 25 bp, Homo sapien
tatcgcgactatcacttagaaccag

SEQ ID NO: 5231656 - DNA, 25 bp, Homo sapien
aagcatttaagacccactgccataa

SEQ ID NO: 5231657 - DNA, 25 bp, Homo sapien
caaattggcttaatttatgtacaat

SEQ ID NO: 5231658 - DNA, 25 bp, Homo sapien
caaaaagttaagtctcagggagtgt

SEQ ID NO: 5231659 - DNA, 25 bp, Homo sapien
gggagtgttatagtaattagttgca

SEQ ID NO: 5231660 - DNA, 25 bp, Homo sapien
taagttaaaatgtccaacagtcata

SEQ ID NO: 5231661 - DNA, 25 bp, Homo sapien
taatctgggtgtagacatctggaac

SEQ ID NO: 5231662 - DNA, 25 bp, Homo sapien
caacagttctaagttcagtcactcc

SEQ ID NO: 5231663 - DNA, 25 bp, Homo sapien
tcagctgcttgtttgtagtgcttca

SEQ ID NO: 5231664 - DNA, 25 bp, Homo sapien
catctggaacattcccaacagttct

SEQ ID NO: 5231665 - DNA, 25 bp, Homo sapien
agcttcactcaactcttttatttag

SEQ ID NO: 5231666 - DNA, 25 bp, Homo sapien
gcttcactcaactcttttatttagt

SEQ ID NO: 5231667 - DNA, 25 bp, Homo sapien
tcactcaactcttttatttagtcca

SEQ ID NO: 5231668 - DNA, 25 bp, Homo sapien
tcagcttcactcaactcttttattt

SEQ ID NO: 5231669 - DNA, 25 bp, Homo sapien
catttgttaacaactgacgaaccta

SEQ ID NO: 5231670 - DNA, 25 bp, Homo sapien
ggtacagagatgtcccatacacctc

SEQ ID NO: 5231671 - DNA, 25 bp, Homo sapien
gaataaactagcaatttcctctcgg

SEQ ID NO: 5231672 - DNA, 25 bp, Homo sapien
gaaattagcctatctttacaggaga

SEQ ID NO: 5231673 - DNA, 25 bp, Homo sapien
tgtcactggagctaaacttatggca

SEQ ID NO: 5231674 - DNA, 25 bp, Homo sapien
tacaaaatcatagtgagcaacaggg

SEQ ID NO: 5231675 - DNA, 25 bp, Homo sapien
gcactgtgagaaatatgctatacca

SEQ ID NO: 5231676 - DNA, 25 bp, Homo sapien
tgattctttaagtgagaaaggccct

SEQ ID NO: 5231677 - DNA, 25 bp, Homo sapien
caaattactgatacaggcaaaaata

SEQ ID NO: 5231678 - DNA, 25 bp, Homo sapien
cattgtacagactttatgctgagta

SEQ ID NO: 5231679 - DNA, 25 bp, Homo sapien
gataaaaatgttctaccttgagatg

SEQ ID NO: 5231680 - DNA, 25 bp, Homo sapien
tatctttaataaccaactgttggaa

SEQ ID NO: 5231681 - DNA, 25 bp, Homo sapien
aatcatggaaaatagagcatccatc

SEQ ID NO: 5231682 - DNA, 25 bp, Homo sapien
tcatggaaaatagagcatccatccc

SEQ ID NO: 5231683 - DNA, 25 bp, Homo sapien
attaagttatgactacagtgaccct

SEQ ID NO: 5231684 - DNA, 25 bp, Homo sapien
ttatgactacagtgaccctattgtg

SEQ ID NO: 5231685 - DNA, 25 bp, Homo sapien
ggactattcgcttatgatgcattcg

SEQ ID NO: 5231686 - DNA, 25 bp, Homo sapien
ttcctggactattcgcttatgatgc

SEQ ID NO: 5231687 - DNA, 25 bp, Homo sapien
ttcgcttatgatgcattcgatgaaa

SEQ ID NO: 5231688 - DNA, 25 bp, Homo sapien
gatgcattcgatgaaaatcacgttc

SEQ ID NO: 5231689 - DNA, 25 bp, Homo sapien
ccttatagtcggttcataagatgca

SEQ ID NO: 5231690 - DNA, 25 bp, Homo sapien
ttgtctctttccaaggaggtcagca

SEQ ID NO: 5231691 - DNA, 25 bp, Homo sapien
tgtggtgtttctcatgtaacaccct

SEQ ID NO: 5231692 - DNA, 25 bp, Homo sapien
cataagatgcataatgtaacttcaa

SEQ ID NO: 5231693 - DNA, 25 bp, Homo sapien
gcagtttcttcaatgtttcttgaag

SEQ ID NO: 5231694 - DNA, 25 bp, Homo sapien
catggtaactatgtcctctttgcag

SEQ ID NO: 5231695 - DNA, 25 bp, Homo sapien
tttgaggaccatggtaactatgtcc

SEQ ID NO: 5231696 - DNA, 25 bp, Homo sapien
ctttaatttgaggaccatggtaact

SEQ ID NO: 5231697 - DNA, 25 bp, Homo sapien
taatcactgataaggttgagaaatc

SEQ ID NO: 5231698 - DNA, 25 bp, Homo sapien
acttactcacctttaaatatctcta

SEQ ID NO: 5231699 - DNA, 25 bp, Homo sapien
cactgataaggttgagaaatcacca

SEQ ID NO: 5231700 - DNA, 25 bp, Homo sapien
ttgtgaaatagccaccacttactca

SEQ ID NO: 5231701 - DNA, 25 bp, Homo sapien
caaaagctgtgaactagggtctctg

SEQ ID NO: 5231702 - DNA, 25 bp, Homo sapien
tattgcagcctcagctaaggactca

SEQ ID NO: 5231703 - DNA, 25 bp, Homo sapien
gagaaggctagtctggtaccaggta

SEQ ID NO: 5231704 - DNA, 25 bp, Homo sapien
tatgcttcgttagggtggatccatg

SEQ ID NO: 5231705 - DNA, 25 bp, Homo sapien
atatgttaaataggcaagttttcct

SEQ ID NO: 5231706 - DNA, 25 bp, Homo sapien
tatatgttaaataggcaagttttcc

SEQ ID NO: 5231707 - DNA, 25 bp, Homo sapien
ccgagcttgcctgcatcttaaaatg

SEQ ID NO: 5231708 - DNA, 25 bp, Homo sapien
tcaagattttctcgcgcagtatggc

SEQ ID NO: 5231709 - DNA, 25 bp, Homo sapien
gataggcttgcaaaaaatctccgag

SEQ ID NO: 5231710 - DNA, 25 bp, Homo sapien
tttcctatgagaaatcagcctgtat

SEQ ID NO: 5231711 - DNA, 25 bp, Homo sapien
tggtctcctacttctcatggacata

SEQ ID NO: 5231712 - DNA, 25 bp, Homo sapien
attggtctcctacttctcatggaca

SEQ ID NO: 5231713 - DNA, 25 bp, Homo sapien
acataatgagcagtcttaatggaat

SEQ ID NO: 5231714 - DNA, 25 bp, Homo sapien
cataatgagcagtcttaatggaatc

SEQ ID NO: 5231715 - DNA, 25 bp, Homo sapien
ttttctttttcacgactatgatcaa

SEQ ID NO: 5231716 - DNA, 25 bp, Homo sapien
tttctgagtaggaccttctggtgca

SEQ ID NO: 5231717 - DNA, 25 bp, Homo sapien
tgttttgttccctggcttcacgaag

SEQ ID NO: 5231718 - DNA, 25 bp, Homo sapien
tggcttcacgaagacctttctgagt

SEQ ID NO: 5231719 - DNA, 25 bp, Homo sapien
gaagaatacgatttaagacaaggcc

SEQ ID NO: 5231720 - DNA, 25 bp, Homo sapien
tggaaaaaaggcatcaatgggagtt

SEQ ID NO: 5231721 - DNA, 25 bp, Homo sapien
tgtagatactattagaagacatttc

SEQ ID NO: 5231722 - DNA, 25 bp, Homo sapien
tttaaagatatcagcaaagaagtga

SEQ ID NO: 5231723 - DNA, 25 bp, Homo sapien
ttgcaggacaggatgctttttgccc

SEQ ID NO: 5231724 - DNA, 25 bp, Homo sapien
gcaaggtactcctggaatttgtgtg

SEQ ID NO: 5231725 - DNA, 25 bp, Homo sapien
gctgaaggtaggtgctgatatacta

SEQ ID NO: 5231726 - DNA, 25 bp, Homo sapien
atttactgtccaatccttcctgtgg

SEQ ID NO: 5231727 - DNA, 25 bp, Homo sapien
gggctgttctcgcactgagctcata

SEQ ID NO: 5231728 - DNA, 25 bp, Homo sapien
catggagttagacagagggctgttc

SEQ ID NO: 5231729 - DNA, 25 bp, Homo sapien
cgcactgagctcataagctttctct

SEQ ID NO: 5231730 - DNA, 25 bp, Homo sapien
tgatggaggcatggagttagacaga

SEQ ID NO: 5231731 - DNA, 25 bp, Homo sapien
tcaagtgcaagagcctcaaggtggg

SEQ ID NO: 5231732 - DNA, 25 bp, Homo sapien
cacctagggagtgaagacaaccaac

SEQ ID NO: 5231733 - DNA, 25 bp, Homo sapien
aatagtgtcctgcagaggtacggtc

SEQ ID NO: 5231734 - DNA, 25 bp, Homo sapien
tgattaactggaagtcctggactcc

SEQ ID NO: 5231735 - DNA, 25 bp, Homo sapien
taggtccagtgttatgtaactcaaa

SEQ ID NO: 5231736 - DNA, 25 bp, Homo sapien
tagaagtaagcatcctatgaaaaaa

SEQ ID NO: 5231737 - DNA, 25 bp, Homo sapien
aaatgattaactaggtccagtgtta

SEQ ID NO: 5231738 - DNA, 25 bp, Homo sapien
ttttattcataaactagaagtaagc

SEQ ID NO: 5231739 - DNA, 25 bp, Homo sapien
taaggaataggtcttccagggtata

SEQ ID NO: 5231740 - DNA, 25 bp, Homo sapien
tataaaaagacagtgactgaacagg

SEQ ID NO: 5231741 - DNA, 25 bp, Homo sapien
tagaagaaaggaactattccacaac

SEQ ID NO: 5231742 - DNA, 25 bp, Homo sapien
gaaatggtcatattcatgtaagcat

SEQ ID NO: 5231743 - DNA, 25 bp, Homo sapien
caataatcaggaaacagctgggtgc

SEQ ID NO: 5231744 - DNA, 25 bp, Homo sapien
ggccaagctctacatcaataatcag

SEQ ID NO: 5231745 - DNA, 25 bp, Homo sapien
tatatcaagcttctgtagagtcagg

SEQ ID NO: 5231746 - DNA, 25 bp, Homo sapien
ttatcaagggaaatggccgcattct

SEQ ID NO: 5231747 - DNA, 25 bp, Homo sapien
tcagccataagctttggaagcataa

SEQ ID NO: 5231748 - DNA, 25 bp, Homo sapien
agccataagctttggaagcataatc

SEQ ID NO: 5231749 - DNA, 25 bp, Homo sapien
cagccataagctttggaagcataat

SEQ ID NO: 5231750 - DNA, 25 bp, Homo sapien
tgctgaacctaaggcaacctcactt

SEQ ID NO: 5231751 - DNA, 25 bp, Homo sapien
tattagagctaaaaaagttggcctc

SEQ ID NO: 5231752 - DNA, 25 bp, Homo sapien
tttgccactatcagcttaaagatgc

SEQ ID NO: 5231753 - DNA, 25 bp, Homo sapien
tacagtaattgaccattgcctttgc

SEQ ID NO: 5231754 - DNA, 25 bp, Homo sapien
caccttggctctcaattagtatata

SEQ ID NO: 5231755 - DNA, 25 bp, Homo sapien
gaacaatggtgagcacaccgcttag

SEQ ID NO: 5231756 - DNA, 25 bp, Homo sapien
tttgatctggcgtgtgaaatcctga

SEQ ID NO: 5231757 - DNA, 25 bp, Homo sapien
tcctttatcctaatagagggaatta

SEQ ID NO: 5231758 - DNA, 25 bp, Homo sapien
gacatcctgctcatcaggttatcac

SEQ ID NO: 5231759 - DNA, 25 bp, Homo sapien
tgtatgtgacatcctgctcatcagg

SEQ ID NO: 5231760 - DNA, 25 bp, Homo sapien
gctcatcaggttatcactcacaatg

SEQ ID NO: 5231761 - DNA, 25 bp, Homo sapien
tatcactcacaatgtgtgtcccttc

SEQ ID NO: 5231762 - DNA, 25 bp, Homo sapien
gagcttctggcattgattccttctt

SEQ ID NO: 5231763 - DNA, 25 bp, Homo sapien
gcttctggcattgattccttcttac

SEQ ID NO: 5231764 - DNA, 25 bp, Homo sapien
tcagccaagagcttctggcattgat

SEQ ID NO: 5231765 - DNA, 25 bp, Homo sapien
aagagcttctggcattgattccttc

SEQ ID NO: 5231766 - DNA, 25 bp, Homo sapien
cattagagtcattaaggtagcagaa

SEQ ID NO: 5231767 - DNA, 25 bp, Homo sapien
cattaaggtagcagaaaattaacat

SEQ ID NO: 5231768 - DNA, 25 bp, Homo sapien
tattttttatgccattagagtcatt

SEQ ID NO: 5231769 - DNA, 25 bp, Homo sapien
tatgccattagagtcattaaggtag

SEQ ID NO: 5231770 - DNA, 25 bp, Homo sapien
ttttctatcaggtcccaagtactgg

SEQ ID NO: 5231771 - DNA, 25 bp, Homo sapien
tcacagcctggattgtacggctccc

SEQ ID NO: 5231772 - DNA, 25 bp, Homo sapien
ccccagtggaaatgtggattgcaga

SEQ ID NO: 5231773 - DNA, 25 bp, Homo sapien
gcttcttcagagttggtgaggcact

SEQ ID NO: 5231774 - DNA, 25 bp, Homo sapien
cactgggtctcccttacttaagtgg

SEQ ID NO: 5231775 - DNA, 25 bp, Homo sapien
ccactgggtctcccttacttaagtg

SEQ ID NO: 5231776 - DNA, 25 bp, Homo sapien
tggaaaagaggaatgctagcaaagc

SEQ ID NO: 5231777 - DNA, 25 bp, Homo sapien
gacacccatgatgttaaaagccaca

SEQ ID NO: 5231778 - DNA, 25 bp, Homo sapien
tctggtctggcttgaataatacaca

SEQ ID NO: 5231779 - DNA, 25 bp, Homo sapien
tcaacagaaagagtaagtccatcct

SEQ ID NO: 5231780 - DNA, 25 bp, Homo sapien
gaatctttggctgctgccagacaat

SEQ ID NO: 5231781 - DNA, 25 bp, Homo sapien
tcttctgaatctttggctgctgcca

SEQ ID NO: 5231782 - DNA, 25 bp, Homo sapien
aatctttggctgctgccagacaatt

SEQ ID NO: 5231783 - DNA, 25 bp, Homo sapien
attttcttctgaatctttggctgct

SEQ ID NO: 5231784 - DNA, 25 bp, Homo sapien
aaattgctgaattgaatggcttgtc

SEQ ID NO: 5231785 - DNA, 25 bp, Homo sapien
caactagaaattgctgaattgaatg

SEQ ID NO: 5231786 - DNA, 25 bp, Homo sapien
tagaaattgctgaattgaatggctt

SEQ ID NO: 5231787 - DNA, 25 bp, Homo sapien
attgctgaattgaatggcttgtcat

SEQ ID NO: 5231788 - DNA, 25 bp, Homo sapien
ggcttgattgagctaattgacattc

SEQ ID NO: 5231789 - DNA, 25 bp, Homo sapien
cttgattgagctaattgacattcac

SEQ ID NO: 5231790 - DNA, 25 bp, Homo sapien
gcttgattgagctaattgacattca

SEQ ID NO: 5231791 - DNA, 25 bp, Homo sapien
atcactacctaggagtgactgacag

SEQ ID NO: 5231792 - DNA, 25 bp, Homo sapien
tggttgcatatctatgggaaattct

SEQ ID NO: 5231793 - DNA, 25 bp, Homo sapien
cactggaagttcatggagtctaaaa

SEQ ID NO: 5231794 - DNA, 25 bp, Homo sapien
caggtttggatttggttgcatatct

SEQ ID NO: 5231795 - DNA, 25 bp, Homo sapien
ttcagcttgtagtcaaattttgctg

SEQ ID NO: 5231796 - DNA, 25 bp, Homo sapien
tgtactgccaccaagtgcttaaacc

SEQ ID NO: 5231797 - DNA, 25 bp, Homo sapien
tatagttcacaaaattacagtcctc

SEQ ID NO: 5231798 - DNA, 25 bp, Homo sapien
aatagtgcacttagtctgtactgcc

SEQ ID NO: 5231799 - DNA, 25 bp, Homo sapien
tgaaatgtatagttgctgagatcct

SEQ ID NO: 5231800 - DNA, 25 bp, Homo sapien
tatctcaggatggtgtatgcactta

SEQ ID NO: 5231801 - DNA, 25 bp, Homo sapien
gatttttgccatagaccaggtaata

SEQ ID NO: 5231802 - DNA, 25 bp, Homo sapien
gacatgatttccgtctctagaagtt

SEQ ID NO: 5231803 - DNA, 25 bp, Homo sapien
gtgacattattcaactcagacatga

SEQ ID NO: 5231804 - DNA, 25 bp, Homo sapien
acagaactatcttgtatagtgaata

SEQ ID NO: 5231805 - DNA, 25 bp, Homo sapien
ggaccaaaagtattataccatctga

SEQ ID NO: 5231806 - DNA, 25 bp, Homo sapien
gaggctcattgtaccattccacttt

SEQ ID NO: 5231807 - DNA, 25 bp, Homo sapien
gagtatggtacatggaggctcattg

SEQ ID NO: 5231808 - DNA, 25 bp, Homo sapien
taacctaacccgaggaagtcataga

SEQ ID NO: 5231809 - DNA, 25 bp, Homo sapien
gtcatagatcacatccacacaagag

SEQ ID NO: 5231810 - DNA, 25 bp, Homo sapien
taatagagtgggcacacatactgcc

SEQ ID NO: 5231811 - DNA, 25 bp, Homo sapien
gacctacatcaagagaaatgcagtg

SEQ ID NO: 5231812 - DNA, 25 bp, Homo sapien
cagtgagcgcgaagaaggaacaaag

SEQ ID NO: 5231813 - DNA, 25 bp, Homo sapien
aagtggagcagtgagcgcgaagaag

SEQ ID NO: 5231814 - DNA, 25 bp, Homo sapien
gagcagtgagcgcgaagaaggaaca

SEQ ID NO: 5231815 - DNA, 25 bp, Homo sapien
tcaagtggagcagtgagcgcgaaga

SEQ ID NO: 5231816 - DNA, 25 bp, Homo sapien
gaaaagctatgtttggactactcag

SEQ ID NO: 5231817 - DNA, 25 bp, Homo sapien
ggcgagcatccatccagactgagct

SEQ ID NO: 5231818 - DNA, 25 bp, Homo sapien
gactgagctacaatagcctgaacag

SEQ ID NO: 5231819 - DNA, 25 bp, Homo sapien
cattacacacgggaccaacacatga

SEQ ID NO: 5231820 - DNA, 25 bp, Homo sapien
taatagactagggagtgatcaggca

SEQ ID NO: 5231821 - DNA, 25 bp, Homo sapien
aatatcataatagactagggagtga

SEQ ID NO: 5231822 - DNA, 25 bp, Homo sapien
tatcataatagactagggagtgatc

SEQ ID NO: 5231823 - DNA, 25 bp, Homo sapien
cataatagactagggagtgatcagg

SEQ ID NO: 5231824 - DNA, 25 bp, Homo sapien
cacgattctgtttaaggcataggat

SEQ ID NO: 5231825 - DNA, 25 bp, Homo sapien
catggagtgttttaaggtctagcaa

SEQ ID NO: 5231826 - DNA, 25 bp, Homo sapien
ggtctagcaacctaatccaccttgt

SEQ ID NO: 5231827 - DNA, 25 bp, Homo sapien
taatgaatgagccaactatctaacc

SEQ ID NO: 5231828 - DNA, 25 bp, Homo sapien
ctattcatacgctttgcccgttttt

SEQ ID NO: 5231829 - DNA, 25 bp, Homo sapien
ggttcagtgctatatatatcttcat

SEQ ID NO: 5231830 - DNA, 25 bp, Homo sapien
gtattttgagggtaggttcagtgct

SEQ ID NO: 5231831 - DNA, 25 bp, Homo sapien
aataggccattcaccttgatttttc

SEQ ID NO: 5231832 - DNA, 25 bp, Homo sapien
atatcttcatttttagcatctacca

SEQ ID NO: 5231833 - DNA, 25 bp, Homo sapien
cattttggctttgggaatgaaccac

SEQ ID NO: 5231834 - DNA, 25 bp, Homo sapien
taatctaaaatcactacccagaggc

SEQ ID NO: 5231835 - DNA, 25 bp, Homo sapien
tccagcagattccattaagtgaagt

SEQ ID NO: 5231836 - DNA, 25 bp, Homo sapien
gccatgctgttctagacaactgaga

SEQ ID NO: 5231837 - DNA, 25 bp, Homo sapien
gctcacgtcaaagttctatccctca

SEQ ID NO: 5231838 - DNA, 25 bp, Homo sapien
taaatgaagtgtccctgctcacgtc

SEQ ID NO: 5231839 - DNA, 25 bp, Homo sapien
tagattcaatctagggcttccttgt

SEQ ID NO: 5231840 - DNA, 25 bp, Homo sapien
aatactctgcaactccactgcactg

SEQ ID NO: 5231841 - DNA, 25 bp, Homo sapien
aataaatattcctacattttaggca

SEQ ID NO: 5231842 - DNA, 25 bp, Homo sapien
tctgtttgggtttataaagagatat

SEQ ID NO: 5231843 - DNA, 25 bp, Homo sapien
ctgagtgagagtcaagatagtctct

SEQ ID NO: 5231844 - DNA, 25 bp, Homo sapien
ggaaccaaaccccagtatcagtata

SEQ ID NO: 5231845 - DNA, 25 bp, Homo sapien
gaagcaaagctcttcctgtgttccc

SEQ ID NO: 5231846 - DNA, 25 bp, Homo sapien
ctgtcatcagtggaagatttgctag

SEQ ID NO: 5231847 - DNA, 25 bp, Homo sapien
cagggatccaagatcactctctctt

SEQ ID NO: 5231848 - DNA, 25 bp, Homo sapien
tagcttgggtcgctggaagcaaagc

SEQ ID NO: 5231849 - DNA, 25 bp, Homo sapien
taggagttaatagcagataatggat

SEQ ID NO: 5231850 - DNA, 25 bp, Homo sapien
ttttgtaatctgtatcttgcaaaaa

SEQ ID NO: 5231851 - DNA, 25 bp, Homo sapien
gataatggatgtaagatgtctaaca

SEQ ID NO: 5231852 - DNA, 25 bp, Homo sapien
tactatgtattgctacatctgtgtc

SEQ ID NO: 5231853 - DNA, 25 bp, Homo sapien
ctctttttggtagtgagcagctgtt

SEQ ID NO: 5231854 - DNA, 25 bp, Homo sapien
tctttttggtagtgagcagctgttc

SEQ ID NO: 5231855 - DNA, 25 bp, Homo sapien
gctgttccagtgcagcactttgaca

SEQ ID NO: 5231856 - DNA, 25 bp, Homo sapien
gagctgttccagtgcagcactttga

SEQ ID NO: 5231857 - DNA, 25 bp, Homo sapien
agagctgttccagtgcagcactttg

SEQ ID NO: 5231858 - DNA, 25 bp, Homo sapien
taagagctgttccagtgcagcactt

SEQ ID NO: 5231859 - DNA, 25 bp, Homo sapien
gcttctgagatagtcaagatctggc

SEQ ID NO: 5231860 - DNA, 25 bp, Homo sapien
ctgagatagtcaagatctggcatgt

SEQ ID NO: 5231861 - DNA, 25 bp, Homo sapien
cttctgagatagtcaagatctggca

SEQ ID NO: 5231862 - DNA, 25 bp, Homo sapien
ttctgagatagtcaagatctggcat

SEQ ID NO: 5231863 - DNA, 25 bp, Homo sapien
cactgttccaaatcggaatggtctt

SEQ ID NO: 5231864 - DNA, 25 bp, Homo sapien
ggcttcaccaggagcctattcactg

SEQ ID NO: 5231865 - DNA, 25 bp, Homo sapien
tcacagtagtcctggcttcaccagg

SEQ ID NO: 5231866 - DNA, 25 bp, Homo sapien
gagcctattcactgttccaaatcgg

SEQ ID NO: 5231867 - DNA, 25 bp, Homo sapien
gacaactacattcactgtaagttca

SEQ ID NO: 5231868 - DNA, 25 bp, Homo sapien
cacaggtggaatactgacaactaca

SEQ ID NO: 5231869 - DNA, 25 bp, Homo sapien
tttattacagtaatattgggcttca

SEQ ID NO: 5231870 - DNA, 25 bp, Homo sapien
tacagtaatattgggcttcacaggt

SEQ ID NO: 5231871 - DNA, 25 bp, Homo sapien
acaatccagacaagacgtagagctt

SEQ ID NO: 5231872 - DNA, 25 bp, Homo sapien
cagcaacttgctacaatccagacaa

SEQ ID NO: 5231873 - DNA, 25 bp, Homo sapien
taaacagcaacttgctacaatccag

SEQ ID NO: 5231874 - DNA, 25 bp, Homo sapien
cacagagggagcatctaaacagcaa

SEQ ID NO: 5231875 - DNA, 25 bp, Homo sapien
ttatacatcaagttgtcagaggaca

SEQ ID NO: 5231876 - DNA, 25 bp, Homo sapien
tatacatcaagttgtcagaggacat

SEQ ID NO: 5231877 - DNA, 25 bp, Homo sapien
gtgctaatagtagaagtccggtatt

SEQ ID NO: 5231878 - DNA, 25 bp, Homo sapien
gaagtccggtattatacatcaagtt

SEQ ID NO: 5231879 - DNA, 25 bp, Homo sapien
gtcggtcctcgccacaggagactag

SEQ ID NO: 5231880 - DNA, 25 bp, Homo sapien
tcgccacaggagactaggatgtctt

SEQ ID NO: 5231881 - DNA, 25 bp, Homo sapien
caaatcccgtgagaagcacattgca

SEQ ID NO: 5231882 - DNA, 25 bp, Homo sapien
caacaccttccagagtcggtcctcg

SEQ ID NO: 5231883 - DNA, 25 bp, Homo sapien
atggaagcagcagtctgaaagccag

SEQ ID NO: 5231884 - DNA, 25 bp, Homo sapien
gatggaagcagcagtctgaaagcca

SEQ ID NO: 5231885 - DNA, 25 bp, Homo sapien
ctgggatggaagcagcagtctgaaa

SEQ ID NO: 5231886 - DNA, 25 bp, Homo sapien
gggatggaagcagcagtctgaaagc

SEQ ID NO: 5231887 - DNA, 25 bp, Homo sapien
ccaaaatccattcccctaatcaatt

SEQ ID NO: 5231888 - DNA, 25 bp, Homo sapien
cttattaagagttttagctgttcca

SEQ ID NO: 5231889 - DNA, 25 bp, Homo sapien
cacctggcagatcttattaagagtt

SEQ ID NO: 5231890 - DNA, 25 bp, Homo sapien
ggcatccaggtttgacattcacctg

SEQ ID NO: 5231891 - DNA, 25 bp, Homo sapien
tcagtaaagtgttagctatgggctt

SEQ ID NO: 5231892 - DNA, 25 bp, Homo sapien
caagtgcttttatgggcacctatta

SEQ ID NO: 5231893 - DNA, 25 bp, Homo sapien
tccttgcactcctgagatgaatccc

SEQ ID NO: 5231894 - DNA, 25 bp, Homo sapien
ctgcgccaggccgtctttaggtttt

SEQ ID NO: 5231895 - DNA, 25 bp, Homo sapien
ctttgaatcccttgtatgttccaga

SEQ ID NO: 5231896 - DNA, 25 bp, Homo sapien
ttagtttgatatagacccatctgtc

SEQ ID NO: 5231897 - DNA, 25 bp, Homo sapien
gcttgtaggttttgtcattgccgtt

SEQ ID NO: 5231898 - DNA, 25 bp, Homo sapien
tgcgctttttaagtcttacccacaa

SEQ ID NO: 5231899 - DNA, 25 bp, Homo sapien
tcttggatggatgcattgtgtagag

SEQ ID NO: 5231900 - DNA, 25 bp, Homo sapien
cttggatggatgcattgtgtagagc

SEQ ID NO: 5231901 - DNA, 25 bp, Homo sapien
ttcttggatggatgcattgtgtaga

SEQ ID NO: 5231902 - DNA, 25 bp, Homo sapien
atgtgcaggaccacactgcgcggct

SEQ ID NO: 5231903 - DNA, 25 bp, Homo sapien
cataatttaactgtagtgtcaccac

SEQ ID NO: 5231904 - DNA, 25 bp, Homo sapien
ggaagccacaaaattgccgcaggag

SEQ ID NO: 5231905 - DNA, 25 bp, Homo sapien
gcaatcgcctttacatagatcccat

SEQ ID NO: 5231906 - DNA, 25 bp, Homo sapien
aagagtcaacgggatttaaggatag

SEQ ID NO: 5231907 - DNA, 25 bp, Homo sapien
gtcaacgggatttaaggataggctc

SEQ ID NO: 5231908 - DNA, 25 bp, Homo sapien
tgtttgaagagtcaacgggatttaa

SEQ ID NO: 5231909 - DNA, 25 bp, Homo sapien
caacgggatttaaggataggctcat

SEQ ID NO: 5231910 - DNA, 25 bp, Homo sapien
ttgtagcttctggcttagttccact

SEQ ID NO: 5231911 - DNA, 25 bp, Homo sapien
tattgagattggtgctatggtctct

SEQ ID NO: 5231912 - DNA, 25 bp, Homo sapien
gttcattatcctctgtggccatatt

SEQ ID NO: 5231913 - DNA, 25 bp, Homo sapien
gcttagttccactgtaggttccttc

SEQ ID NO: 5231914 - DNA, 25 bp, Homo sapien
ctaggcaggcatcatgaggaacttt

SEQ ID NO: 5231915 - DNA, 25 bp, Homo sapien
gaaagttccttgattggaccatggc

SEQ ID NO: 5231916 - DNA, 25 bp, Homo sapien
ccttgattggaccatggctgtcccc

SEQ ID NO: 5231917 - DNA, 25 bp, Homo sapien
tgccgtggtactgaagaaagttcct

SEQ ID NO: 5231918 - DNA, 25 bp, Homo sapien
tcttagccctccatccacggttaga

SEQ ID NO: 5231919 - DNA, 25 bp, Homo sapien
tgtgtgttggcccagtgaagactct

SEQ ID NO: 5231920 - DNA, 25 bp, Homo sapien
cacggttagaatgggttccatgatc

SEQ ID NO: 5231921 - DNA, 25 bp, Homo sapien
tcattctggtaaagacttgacaccc

SEQ ID NO: 5231922 - DNA, 25 bp, Homo sapien
gattaatgccactcagttccacttc

SEQ ID NO: 5231923 - DNA, 25 bp, Homo sapien
tactgagattaatgccactcagttc

SEQ ID NO: 5231924 - DNA, 25 bp, Homo sapien
aatctctcaatactgagattaatgc

SEQ ID NO: 5231925 - DNA, 25 bp, Homo sapien
tcaatactgagattaatgccactca

SEQ ID NO: 5231926 - DNA, 25 bp, Homo sapien
ttagtttcacgctgagcatactctt

SEQ ID NO: 5231927 - DNA, 25 bp, Homo sapien
ctgcagggtgtcattctctgtaagc

SEQ ID NO: 5231928 - DNA, 25 bp, Homo sapien
tgtaagctgtctcttagtttcacgc

SEQ ID NO: 5231929 - DNA, 25 bp, Homo sapien
gggtgtcattctctgtaagctgtct

SEQ ID NO: 5231930 - DNA, 25 bp, Homo sapien
gtcacattgctgagtgattctcttg

SEQ ID NO: 5231931 - DNA, 25 bp, Homo sapien
gtgaaatgtcacattgctgagtgat

SEQ ID NO: 5231932 - DNA, 25 bp, Homo sapien
ttataaaggacagtaagagctaaaa

SEQ ID NO: 5231933 - DNA, 25 bp, Homo sapien
tataaaggacagtaagagctaaaag

SEQ ID NO: 5231934 - DNA, 25 bp, Homo sapien
ctggaacacgggcaggatcttgggt

SEQ ID NO: 5231935 - DNA, 25 bp, Homo sapien
gttcacagaatctgtatgtccatac

SEQ ID NO: 5231936 - DNA, 25 bp, Homo sapien
gcttgtgagaagagtattggagaaa

SEQ ID NO: 5231937 - DNA, 25 bp, Homo sapien
ttgtctgcagagcttgtgagaagag

SEQ ID NO: 5231938 - DNA, 25 bp, Homo sapien
cagagcttgtgagaagagtattgga

SEQ ID NO: 5231939 - DNA, 25 bp, Homo sapien
ccacagcagaatgccggaaacactt

SEQ ID NO: 5231940 - DNA, 25 bp, Homo sapien
agcagaatgccggaaacacttgcca

SEQ ID NO: 5231941 - DNA, 25 bp, Homo sapien
gaatgccggaaacacttgccacaaa

SEQ ID NO: 5231942 - DNA, 25 bp, Homo sapien
ccggaaacacttgccacaaatgttg

SEQ ID NO: 5231943 - DNA, 25 bp, Homo sapien
cagccccgctggtccccagctctgc

SEQ ID NO: 5231944 - DNA, 25 bp, Homo sapien
aatggctgtggggcagccccgctgg

SEQ ID NO: 5231945 - DNA, 25 bp, Homo sapien
tggctgtggggcagccccgctggtc

SEQ ID NO: 5231946 - DNA, 25 bp, Homo sapien
gggcagccccgctggtccccagctc

SEQ ID NO: 5231947 - DNA, 25 bp, Homo sapien
tatgacctctaatgggaccacacca

SEQ ID NO: 5231948 - DNA, 25 bp, Homo sapien
caccagccgtgttgattgtctccaa

SEQ ID NO: 5231949 - DNA, 25 bp, Homo sapien
tctccaaaggtgtagaaatcaagac

SEQ ID NO: 5231950 - DNA, 25 bp, Homo sapien
ccactaagaggagctcactcatggg

SEQ ID NO: 5231951 - DNA, 25 bp, Homo sapien
gctggtgcaggcaagtcagagtttt

SEQ ID NO: 5231952 - DNA, 25 bp, Homo sapien
tgcaatcaacagtggagtctgtggc

SEQ ID NO: 5231953 - DNA, 25 bp, Homo sapien
cagataatttagctgcaacactgca

SEQ ID NO: 5231954 - DNA, 25 bp, Homo sapien
tgtgctgcgctctgagttaaaccag

SEQ ID NO: 5231955 - DNA, 25 bp, Homo sapien
tcattgatagaatgcatgtgaccat

SEQ ID NO: 5231956 - DNA, 25 bp, Homo sapien
cattgatagaatgcatgtgaccata

SEQ ID NO: 5231957 - DNA, 25 bp, Homo sapien
gcatggcaccatcatttcatgaagg

SEQ ID NO: 5231958 - DNA, 25 bp, Homo sapien
tggcaccatcatttcatgaaggcct

SEQ ID NO: 5231959 - DNA, 25 bp, Homo sapien
catcatttcatgaaggcctttgtgc

SEQ ID NO: 5231960 - DNA, 25 bp, Homo sapien
gcaccatcatttcatgaaggccttt

SEQ ID NO: 5231961 - DNA, 25 bp, Homo sapien
actaccggcacacaagaccacacct

SEQ ID NO: 5231962 - DNA, 25 bp, Homo sapien
tgggactaccggcacacaagaccac

SEQ ID NO: 5231963 - DNA, 25 bp, Homo sapien
ctgggactaccggcacacaagacca

SEQ ID NO: 5231964 - DNA, 25 bp, Homo sapien
ggactaccggcacacaagaccacac

SEQ ID NO: 5231965 - DNA, 25 bp, Homo sapien
ctcagctgagggaggctagtgccaa

SEQ ID NO: 5231966 - DNA, 25 bp, Homo sapien
ggatctagccaagccctttgggaaa

SEQ ID NO: 5231967 - DNA, 25 bp, Homo sapien
tacctgaatcctgaaactcctgctg

SEQ ID NO: 5231968 - DNA, 25 bp, Homo sapien
taatcagcagatcagctacgtgggt

SEQ ID NO: 5231969 - DNA, 25 bp, Homo sapien
gaagagtttcagtgaactttttgat

SEQ ID NO: 5231970 - DNA, 25 bp, Homo sapien
ttactcattgggtacaacaatacag

SEQ ID NO: 5231971 - DNA, 25 bp, Homo sapien
tacagagctcaagaagagtttcagt

SEQ ID NO: 5231972 - DNA, 25 bp, Homo sapien
tggaattcatattggaatagttgag

SEQ ID NO: 5231973 - DNA, 25 bp, Homo sapien
caacttcccgaagcaactaggacca

SEQ ID NO: 5231974 - DNA, 25 bp, Homo sapien
ttgaatctcccacgacacctagcat

SEQ ID NO: 5231975 - DNA, 25 bp, Homo sapien
gactgttgtcaaactctcagaagtt

SEQ ID NO: 5231976 - DNA, 25 bp, Homo sapien
tctcagaagtttgagctaccacacc

SEQ ID NO: 5231977 - DNA, 25 bp, Homo sapien
gcttccgaaagtcccacagctttgt

SEQ ID NO: 5231978 - DNA, 25 bp, Homo sapien
ggacttggacctatatcgatggaca

SEQ ID NO: 5231979 - DNA, 25 bp, Homo sapien
tttgtaaccccacaggcatcacagg

SEQ ID NO: 5231980 - DNA, 25 bp, Homo sapien
gacacaattggtaacagcttccgaa

SEQ ID NO: 5231981 - DNA, 25 bp, Homo sapien
aagcacaagtagcagaaggatccac

SEQ ID NO: 5231982 - DNA, 25 bp, Homo sapien
ccactgttacaaccaaatttggata

SEQ ID NO: 5231983 - DNA, 25 bp, Homo sapien
gcacaagtagcagaaggatccactg

SEQ ID NO: 5231984 - DNA, 25 bp, Homo sapien
agcacaagtagcagaaggatccact

SEQ ID NO: 5231985 - DNA, 25 bp, Homo sapien
tttagaataaagaccagcgttggtg

SEQ ID NO: 5231986 - DNA, 25 bp, Homo sapien
tgcatgtgttggtctcttggcaaga

SEQ ID NO: 5231987 - DNA, 25 bp, Homo sapien
ttggtgccacagtcaagaccatcca

SEQ ID NO: 5231988 - DNA, 25 bp, Homo sapien
tcttagcagtgtccggagcatttaa

SEQ ID NO: 5231989 - DNA, 25 bp, Homo sapien
tagactttcattctagccttggcaa

SEQ ID NO: 5231990 - DNA, 25 bp, Homo sapien
ggcaaatgaatctcacatggtcaag

SEQ ID NO: 5231991 - DNA, 25 bp, Homo sapien
taactagtcctttattggcaatgcc

SEQ ID NO: 5231992 - DNA, 25 bp, Homo sapien
tgagagactgtatgcaataagacaa

SEQ ID NO: 5231993 - DNA, 25 bp, Homo sapien
gcttacaggagtctcacaatcattt

SEQ ID NO: 5231994 - DNA, 25 bp, Homo sapien
tttgatgactaaaggcctggtggcc

SEQ ID NO: 5231995 - DNA, 25 bp, Homo sapien
tattattccacattagttccatttg

SEQ ID NO: 5231996 - DNA, 25 bp, Homo sapien
gatgttgtgagtctgtcattcgcca

SEQ ID NO: 5231997 - DNA, 25 bp, Homo sapien
ccatagtaagcctgatttggcagac

SEQ ID NO: 5231998 - DNA, 25 bp, Homo sapien
gaagagtctagcaagggaaccaaag

SEQ ID NO: 5231999 - DNA, 25 bp, Homo sapien
tgaggtaggcttttctgacccatag

SEQ ID NO: 5232000 - DNA, 25 bp, Homo sapien
tgcttctgctaggtggtctctgtcc

SEQ ID NO: 5232001 - DNA, 25 bp, Homo sapien
gaggataatttacctctgccccgat

SEQ ID NO: 5232002 - DNA, 25 bp, Homo sapien
taatttacctctgccccgatggtga

SEQ ID NO: 5232003 - DNA, 25 bp, Homo sapien
tcttgaggataatttacctctgccc

SEQ ID NO: 5232004 - DNA, 25 bp, Homo sapien
ctttcttgaggataatttacctctg

SEQ ID NO: 5232005 - DNA, 25 bp, Homo sapien
gaaaatcgagacaaatggcaagcat

SEQ ID NO: 5232006 - DNA, 25 bp, Homo sapien
gcctcggatattagacagtcaagaa

SEQ ID NO: 5232007 - DNA, 25 bp, Homo sapien
taatatctatgacattcagtgggac

SEQ ID NO: 5232008 - DNA, 25 bp, Homo sapien
cagtgggacatcttactttaaccgc

SEQ ID NO: 5232009 - DNA, 25 bp, Homo sapien
tgatagtgaggtcaatgtattcttt

SEQ ID NO: 5232010 - DNA, 25 bp, Homo sapien
ttgatagtgaggtcaatgtattctt

SEQ ID NO: 5232011 - DNA, 25 bp, Homo sapien
tgcaaaaagaatttgtgcacagcca

SEQ ID NO: 5232012 - DNA, 25 bp, Homo sapien
gagctgcagctaacattgacattac

SEQ ID NO: 5232013 - DNA, 25 bp, Homo sapien
cttgttgcaaaaagaatttgtgcac

SEQ ID NO: 5232014 - DNA, 25 bp, Homo sapien
gccagagctgcagctaacattgaca

SEQ ID NO: 5232015 - DNA, 25 bp, Homo sapien
caccagcatgtgcatagaggtgcat

SEQ ID NO: 5232016 - DNA, 25 bp, Homo sapien
ttagaactagcctgtactttgtgcc

SEQ ID NO: 5232017 - DNA, 25 bp, Homo sapien
tctctcttggctatcagacaccaaa

SEQ ID NO: 5232018 - DNA, 25 bp, Homo sapien
actttgtgcctccttttggaaattg

SEQ ID NO: 5232019 - DNA, 25 bp, Homo sapien
ctcctcattgcctccccattcatca

SEQ ID NO: 5232020 - DNA, 25 bp, Homo sapien
ctatttctgtaatgacccctcctca

SEQ ID NO: 5232021 - DNA, 25 bp, Homo sapien
tcctcattgcctccccattcatcac

SEQ ID NO: 5232022 - DNA, 25 bp, Homo sapien
tttctgtaatgacccctcctcattg

SEQ ID NO: 5232023 - DNA, 25 bp, Homo sapien
tcatgggttgtctcagttcactctg

SEQ ID NO: 5232024 - DNA, 25 bp, Homo sapien
ctaaatcatgggttgtctcagttca

SEQ ID NO: 5232025 - DNA, 25 bp, Homo sapien
aatactacttcatatctgacatagt

SEQ ID NO: 5232026 - DNA, 25 bp, Homo sapien
cactctgaagtcgaataaatactac

SEQ ID NO: 5232027 - DNA, 25 bp, Homo sapien
tctacaacttcttccttaactatga

SEQ ID NO: 5232028 - DNA, 25 bp, Homo sapien
ttctacaacttcttccttaactatg

SEQ ID NO: 5232029 - DNA, 25 bp, Homo sapien
tgatgaaaggacatagaccctgccc

SEQ ID NO: 5232030 - DNA, 25 bp, Homo sapien
caaagagtttacattcctaagagaa

SEQ ID NO: 5232031 - DNA, 25 bp, Homo sapien
catatgctagacaatgataaagcct

SEQ ID NO: 5232032 - DNA, 25 bp, Homo sapien
tcttctgaagacagttttgtgctgc

SEQ ID NO: 5232033 - DNA, 25 bp, Homo sapien
tgcatgtaagggttatgacaacaca

SEQ ID NO: 5232034 - DNA, 25 bp, Homo sapien
ccttgtcttatactcagggaagatg

SEQ ID NO: 5232035 - DNA, 25 bp, Homo sapien
taatgatgttggactagctgacaac

SEQ ID NO: 5232036 - DNA, 25 bp, Homo sapien
ggatgagcaccttcaaataatagtg

SEQ ID NO: 5232037 - DNA, 25 bp, Homo sapien
tcttcttgtgacaccgatagtccag

SEQ ID NO: 5232038 - DNA, 25 bp, Homo sapien
tatgggaatgagtaggtgcctgacc

SEQ ID NO: 5232039 - DNA, 25 bp, Homo sapien
gcccacactgaagtatgttccagag

SEQ ID NO: 5232040 - DNA, 25 bp, Homo sapien
gctgatgtttgaagtaaagtccctc

SEQ ID NO: 5232041 - DNA, 25 bp, Homo sapien
cacctgttctcccaaacctactgaa

SEQ ID NO: 5232042 - DNA, 25 bp, Homo sapien
tctacaacataagtgcaatgaacaa

SEQ ID NO: 5232043 - DNA, 25 bp, Homo sapien
taagtgcaatgaacaaatttcttga

SEQ ID NO: 5232044 - DNA, 25 bp, Homo sapien
cacatgccaggaaattctacaacat

SEQ ID NO: 5232045 - DNA, 25 bp, Homo sapien
ggaattttgatagttattacattga

SEQ ID NO: 5232046 - DNA, 25 bp, Homo sapien
ttcagtatacagatatttcacttcc

SEQ ID NO: 5232047 - DNA, 25 bp, Homo sapien
taattctttcaattcacaaacatgg

SEQ ID NO: 5232048 - DNA, 25 bp, Homo sapien
tccatttatttgtgacaccttttat

SEQ ID NO: 5232049 - DNA, 25 bp, Homo sapien
gaagagtactacaatcaacatggga

SEQ ID NO: 5232050 - DNA, 25 bp, Homo sapien
tcatgttggttcttctttcagcccc

SEQ ID NO: 5232051 - DNA, 25 bp, Homo sapien
gattcctggatctcacaataaagga

SEQ ID NO: 5232052 - DNA, 25 bp, Homo sapien
taatttgcaataccacctacagtgt

SEQ ID NO: 5232053 - DNA, 25 bp, Homo sapien
tttagggtacatgagaattttcgca

SEQ ID NO: 5232054 - DNA, 25 bp, Homo sapien
tagcagtgaatccatccgctcctgg

SEQ ID NO: 5232055 - DNA, 25 bp, Homo sapien
tctgtgttcatcagtgacacactgg

SEQ ID NO: 5232056 - DNA, 25 bp, Homo sapien
ggatccctgcactaaaacccgtgtg

SEQ ID NO: 5232057 - DNA, 25 bp, Homo sapien
gattcttccaagtatcgcatatcag

SEQ ID NO: 5232058 - DNA, 25 bp, Homo sapien
cctccttctgtgagtagaataatga

SEQ ID NO: 5232059 - DNA, 25 bp, Homo sapien
tcttccaagtatcgcatatcagtca

SEQ ID NO: 5232060 - DNA, 25 bp, Homo sapien
atgattcttccaagtatcgcatatc

SEQ ID NO: 5232061 - DNA, 25 bp, Homo sapien
cataggttttctagtcacggaagga

SEQ ID NO: 5232062 - DNA, 25 bp, Homo sapien
ttgtccagcttagcctgcaacaggc

SEQ ID NO: 5232063 - DNA, 25 bp, Homo sapien
cactgtatgggagaggagctcactc

SEQ ID NO: 5232064 - DNA, 25 bp, Homo sapien
caactttaggttatgctcagaggaa

SEQ ID NO: 5232065 - DNA, 25 bp, Homo sapien
tctactggtagaagctctatacctg

SEQ ID NO: 5232066 - DNA, 25 bp, Homo sapien
tatacctgctacgaccatagtcaca

SEQ ID NO: 5232067 - DNA, 25 bp, Homo sapien
cgaccatagtcacagtatcagtcat

SEQ ID NO: 5232068 - DNA, 25 bp, Homo sapien
tggaaaagtctactggtagaagctc

SEQ ID NO: 5232069 - DNA, 25 bp, Homo sapien
gtccatgttcagcatactgctgctg

SEQ ID NO: 5232070 - DNA, 25 bp, Homo sapien
agtgatgcaaacagtggtgtccatg

SEQ ID NO: 5232071 - DNA, 25 bp, Homo sapien
tggtgtccatgttcagcatactgct

SEQ ID NO: 5232072 - DNA, 25 bp, Homo sapien
tgatgcaaacagtggtgtccatgtt

SEQ ID NO: 5232073 - DNA, 25 bp, Homo sapien
ctgagctattgttgctgagagagga

SEQ ID NO: 5232074 - DNA, 25 bp, Homo sapien
ttgatggatactcaataactgagct

SEQ ID NO: 5232075 - DNA, 25 bp, Homo sapien
ggatactcaataactgagctattgt

SEQ ID NO: 5232076 - DNA, 25 bp, Homo sapien
tgagctattgttgctgagagaggat

SEQ ID NO: 5232077 - DNA, 25 bp, Homo sapien
gaggtggttattataaaaggcagat

SEQ ID NO: 5232078 - DNA, 25 bp, Homo sapien
tgtgcttgttgtcagccaactcaaa

SEQ ID NO: 5232079 - DNA, 25 bp, Homo sapien
gatcccgaaaaagagaccatgtgaa

SEQ ID NO: 5232080 - DNA, 25 bp, Homo sapien
agtcgttttatgaggtggttattat

SEQ ID NO: 5232081 - DNA, 25 bp, Homo sapien
tagatgtgtgcaaccatgccaggct

SEQ ID NO: 5232082 - DNA, 25 bp, Homo sapien
gggactatagatgtgtgcaaccatg

SEQ ID NO: 5232083 - DNA, 25 bp, Homo sapien
actatagatgtgtgcaaccatgcca

SEQ ID NO: 5232084 - DNA, 25 bp, Homo sapien
tatagatgtgtgcaaccatgccagg

SEQ ID NO: 5232085 - DNA, 25 bp, Homo sapien
ctctgacttaattctgtcttgatga

SEQ ID NO: 5232086 - DNA, 25 bp, Homo sapien
taattctgtcttgatgaaggtgatt

SEQ ID NO: 5232087 - DNA, 25 bp, Homo sapien
gacttaattctgtcttgatgaaggt

SEQ ID NO: 5232088 - DNA, 25 bp, Homo sapien
cttaattctgtcttgatgaaggtga

SEQ ID NO: 5232089 - DNA, 25 bp, Homo sapien
tatttcttaaagactctacctccca

SEQ ID NO: 5232090 - DNA, 25 bp, Homo sapien
gagtacagggataagattctgaggc

SEQ ID NO: 5232091 - DNA, 25 bp, Homo sapien
aagggtgagtacagggataagattc

SEQ ID NO: 5232092 - DNA, 25 bp, Homo sapien
tctacctcccaaacaagggcttgct

SEQ ID NO: 5232093 - DNA, 25 bp, Homo sapien
cacgaagtttcattcccagcaatac

SEQ ID NO: 5232094 - DNA, 25 bp, Homo sapien
tctcttaggcgtttgggtccctgct

SEQ ID NO: 5232095 - DNA, 25 bp, Homo sapien
gttacccactataaactgtctgaga

SEQ ID NO: 5232096 - DNA, 25 bp, Homo sapien
gatagatgggacatggcaagacaaa

SEQ ID NO: 5232097 - DNA, 25 bp, Homo sapien
ccagaaattcctaaactatagcatg

SEQ ID NO: 5232098 - DNA, 25 bp, Homo sapien
tctgcagctacatggggccaactat

SEQ ID NO: 5232099 - DNA, 25 bp, Homo sapien
ctaaactatagcatgtgaatatatc

SEQ ID NO: 5232100 - DNA, 25 bp, Homo sapien
gattggttcaatctgtgattgcaaa

SEQ ID NO: 5232101 - DNA, 25 bp, Homo sapien
tttgtaatggagcaccctatgttag

SEQ ID NO: 5232102 - DNA, 25 bp, Homo sapien
ggagcaccctatgttagttatgaaa

SEQ ID NO: 5232103 - DNA, 25 bp, Homo sapien
taatggagcaccctatgttagttat

SEQ ID NO: 5232104 - DNA, 25 bp, Homo sapien
tggagcaccctatgttagttatgaa

SEQ ID NO: 5232105 - DNA, 25 bp, Homo sapien
gtggtggtgtattaactggccaaat

SEQ ID NO: 5232106 - DNA, 25 bp, Homo sapien
ggtgtattaactggccaaatgatgt

SEQ ID NO: 5232107 - DNA, 25 bp, Homo sapien
ggagaccatccaatgtacccagtgc

SEQ ID NO: 5232108 - DNA, 25 bp, Homo sapien
tacccagtgccttagtgggcagaaa

SEQ ID NO: 5232109 - DNA, 25 bp, Homo sapien
ctgagaggcatgaaacttgttaata

SEQ ID NO: 5232110 - DNA, 25 bp, Homo sapien
tggacctcggttgtcaatatgaaaa

SEQ ID NO: 5232111 - DNA, 25 bp, Homo sapien
aaaatgcacgtgtggcagttgcaga

SEQ ID NO: 5232112 - DNA, 25 bp, Homo sapien
gacactaggaccactgaaatgattc

SEQ ID NO: 5232113 - DNA, 25 bp, Homo sapien
cagaacaatgatcgcagtagcagca

SEQ ID NO: 5232114 - DNA, 25 bp, Homo sapien
tgcagaatatggctgaaatcagatc

SEQ ID NO: 5232115 - DNA, 25 bp, Homo sapien
taacaccattgccacttgcctgagc

SEQ ID NO: 5232116 - DNA, 25 bp, Homo sapien
ccatcaatttgtgaatctccccaga

SEQ ID NO: 5232117 - DNA, 25 bp, Homo sapien
cgtcgtgagaaaacacaaccgtgtg

SEQ ID NO: 5232118 - DNA, 25 bp, Homo sapien
gaaaagagaatctccccgtcgtgag

SEQ ID NO: 5232119 - DNA, 25 bp, Homo sapien
cagtatgagcactaaaatatatgtc

SEQ ID NO: 5232120 - DNA, 25 bp, Homo sapien
ttcaagccttaaagggaatgccctc

SEQ ID NO: 5232121 - DNA, 25 bp, Homo sapien
catgttttaaagcagactgtaaatg

SEQ ID NO: 5232122 - DNA, 25 bp, Homo sapien
gactgtaaatgttacctgctggcac

SEQ ID NO: 5232123 - DNA, 25 bp, Homo sapien
tagagtgctctccaagcagtcgcac

SEQ ID NO: 5232124 - DNA, 25 bp, Homo sapien
tgctttagacgaggctagagtgctc

SEQ ID NO: 5232125 - DNA, 25 bp, Homo sapien
cacggacagcgccaacaactggctt

SEQ ID NO: 5232126 - DNA, 25 bp, Homo sapien
tgagcccagctctgtcgaaatccca

SEQ ID NO: 5232127 - DNA, 25 bp, Homo sapien
tagctgggtttctgcatcagtaaga

SEQ ID NO: 5232128 - DNA, 25 bp, Homo sapien
catcagtaagagcagtttgcagatt

SEQ ID NO: 5232129 - DNA, 25 bp, Homo sapien
atcagtaagagcagtttgcagattg

SEQ ID NO: 5232130 - DNA, 25 bp, Homo sapien
cacagtgtgttgcttgaatcccctc

SEQ ID NO: 5232131 - DNA, 25 bp, Homo sapien
ctaggctctgaggatcacaaacagc

SEQ ID NO: 5232132 - DNA, 25 bp, Homo sapien
ttaaagcccactccgctggcaatac

SEQ ID NO: 5232133 - DNA, 25 bp, Homo sapien
ctacggcagtagaggtgatttggct

SEQ ID NO: 5232134 - DNA, 25 bp, Homo sapien
gggtcacagcccaaaatgaactaaa

SEQ ID NO: 5232135 - DNA, 25 bp, Homo sapien
caaaacacagtaaagaagcagtctc

SEQ ID NO: 5232136 - DNA, 25 bp, Homo sapien
attctctctacctcccatttcaaaa

SEQ ID NO: 5232137 - DNA, 25 bp, Homo sapien
taggcatgaattaaaggcaatccat

SEQ ID NO: 5232138 - DNA, 25 bp, Homo sapien
cttccatgggaatacaagaggggta

SEQ ID NO: 5232139 - DNA, 25 bp, Homo sapien
ccttccatgggaatacaagaggggt

SEQ ID NO: 5232140 - DNA, 25 bp, Homo sapien
tccatgggaatacaagaggggtagg

SEQ ID NO: 5232141 - DNA, 25 bp, Homo sapien
tattaaatatactcagctccttcca

SEQ ID NO: 5232142 - DNA, 25 bp, Homo sapien
tcttcatgactgatagcagcagagg

SEQ ID NO: 5232143 - DNA, 25 bp, Homo sapien
ttcatcagcaggatagtcttcatga

SEQ ID NO: 5232144 - DNA, 25 bp, Homo sapien
caatccagggatgaccaacagaagt

SEQ ID NO: 5232145 - DNA, 25 bp, Homo sapien
cagaagtatgcaagcttcatgaata

SEQ ID NO: 5232146 - DNA, 25 bp, Homo sapien
caaagatcagattgtcattactgga

SEQ ID NO: 5232147 - DNA, 25 bp, Homo sapien
gaatgcccagggaaaaatcgttctc

SEQ ID NO: 5232148 - DNA, 25 bp, Homo sapien
gacacatggacagttggaatgccca

SEQ ID NO: 5232149 - DNA, 25 bp, Homo sapien
tacaaagccgctgtcatcgacacac

SEQ ID NO: 5232150 - DNA, 25 bp, Homo sapien
gacagcatccattgtgttccacttt

SEQ ID NO: 5232151 - DNA, 25 bp, Homo sapien
tctggttggtcgcaaacaggtccat

SEQ ID NO: 5232152 - DNA, 25 bp, Homo sapien
tagggcattctggttggtcgcaaac

SEQ ID NO: 5232153 - DNA, 25 bp, Homo sapien
gtaatttttcccgtgatattcacag

SEQ ID NO: 5232154 - DNA, 25 bp, Homo sapien
aataaatatggagggtaacgcatac

SEQ ID NO: 5232155 - DNA, 25 bp, Homo sapien
tcaataaatatggagggtaacgcat

SEQ ID NO: 5232156 - DNA, 25 bp, Homo sapien
caataaatatggagggtaacgcata

SEQ ID NO: 5232157 - DNA, 25 bp, Homo sapien
ttcgaatatagaattcagagacctg

SEQ ID NO: 5232158 - DNA, 25 bp, Homo sapien
aaatcctgaattagggacactggga

SEQ ID NO: 5232159 - DNA, 25 bp, Homo sapien
ctgtctttggcccatagtgggaaaa

SEQ ID NO: 5232160 - DNA, 25 bp, Homo sapien
agagacctggtccactgtctttggc

SEQ ID NO: 5232161 - DNA, 25 bp, Homo sapien
cactaacagtgacaagctccgcaaa

SEQ ID NO: 5232162 - DNA, 25 bp, Homo sapien
aatcaacgccgatctcccaatgtgc

SEQ ID NO: 5232163 - DNA, 25 bp, Homo sapien
tgtgcacacggcacagaagcccagt

SEQ ID NO: 5232164 - DNA, 25 bp, Homo sapien
gaagcccagtcacaaatctcggtag

SEQ ID NO: 5232165 - DNA, 25 bp, Homo sapien
tacttgtaactctgtgttgtcatgg

SEQ ID NO: 5232166 - DNA, 25 bp, Homo sapien
tttattgttcttgtctacttgtaac

SEQ ID NO: 5232167 - DNA, 25 bp, Homo sapien
caaagactgatttttgatgtgccag

SEQ ID NO: 5232168 - DNA, 25 bp, Homo sapien
catggtgataggtcctgatatcaca

SEQ ID NO: 5232169 - DNA, 25 bp, Homo sapien
tctatattttggtatagcccacaag

SEQ ID NO: 5232170 - DNA, 25 bp, Homo sapien
tattttggtatagcccacaagatct

SEQ ID NO: 5232171 - DNA, 25 bp, Homo sapien
tctgtcttctatattttggtatagc

SEQ ID NO: 5232172 - DNA, 25 bp, Homo sapien
tcttctatattttggtatagcccac

SEQ ID NO: 5232173 - DNA, 25 bp, Homo sapien
tccggcactattgttgtcctcttgc

SEQ ID NO: 5232174 - DNA, 25 bp, Homo sapien
aaaagatactgcttgaacagcaata

SEQ ID NO: 5232175 - DNA, 25 bp, Homo sapien
aataagttactaggagtgtgcagca

SEQ ID NO: 5232176 - DNA, 25 bp, Homo sapien
aattccggcactattgttgtcctct

SEQ ID NO: 5232177 - DNA, 25 bp, Homo sapien
cggccgagagtgtttagaattttct

SEQ ID NO: 5232178 - DNA, 25 bp, Homo sapien
attgctgggctcacagcgacaccat

SEQ ID NO: 5232179 - DNA, 25 bp, Homo sapien
tcattgctgggctcacagcgacacc

SEQ ID NO: 5232180 - DNA, 25 bp, Homo sapien
ttcattgctgggctcacagcgacac

SEQ ID NO: 5232181 - DNA, 25 bp, Homo sapien
cattgctgggctcacagcgacacca

SEQ ID NO: 5232182 - DNA, 25 bp, Homo sapien
tgttctggttcatagactgggttga

SEQ ID NO: 5232183 - DNA, 25 bp, Homo sapien
gacaggacaacattgttctggttca

SEQ ID NO: 5232184 - DNA, 25 bp, Homo sapien
ggacaacattgttctggttcataga

SEQ ID NO: 5232185 - DNA, 25 bp, Homo sapien
tttgcagacaggacaacattgttct

SEQ ID NO: 5232186 - DNA, 25 bp, Homo sapien
tgagactgaggagttgtattgcacc

SEQ ID NO: 5232187 - DNA, 25 bp, Homo sapien
gagactcaccactcctgagactgag

SEQ ID NO: 5232188 - DNA, 25 bp, Homo sapien
tattcatgaatcttggcaacagcga

SEQ ID NO: 5232189 - DNA, 25 bp, Homo sapien
gaaactatatccaactcccaaggtg

SEQ ID NO: 5232190 - DNA, 25 bp, Homo sapien
acatctaatccaaagacatcaataa

SEQ ID NO: 5232191 - DNA, 25 bp, Homo sapien
cacatctaatccaaagacatcaata

SEQ ID NO: 5232192 - DNA, 25 bp, Homo sapien
gttctggcttgaaaggctcacgtgc

SEQ ID NO: 5232193 - DNA, 25 bp, Homo sapien
tctttccccattcgcaaaggagtca

SEQ ID NO: 5232194 - DNA, 25 bp, Homo sapien
gcctgcaggagttctggcttgaaag

SEQ ID NO: 5232195 - DNA, 25 bp, Homo sapien
aatgtagattttgccgtcagcctgc

SEQ ID NO: 5232196 - DNA, 25 bp, Homo sapien
tgtggtccataagcctcatactgag

SEQ ID NO: 5232197 - DNA, 25 bp, Homo sapien
tacatcagagtatggaaagccgggt

SEQ ID NO: 5232198 - DNA, 25 bp, Homo sapien
tgtggaaagaacacctcagcatcag

SEQ ID NO: 5232199 - DNA, 25 bp, Homo sapien
gaggccagcttcaggttttaatcac

SEQ ID NO: 5232200 - DNA, 25 bp, Homo sapien
ttctgtggcagaaccacgacagctg

SEQ ID NO: 5232201 - DNA, 25 bp, Homo sapien
gctttggggtgttcctcaaggcaag

SEQ ID NO: 5232202 - DNA, 25 bp, Homo sapien
gattgagtatttaaggcacagctgt

SEQ ID NO: 5232203 - DNA, 25 bp, Homo sapien
caagtaaatggcagatgggctcttt

SEQ ID NO: 5232204 - DNA, 25 bp, Homo sapien
aatgagagacataaattgtaacaga

SEQ ID NO: 5232205 - DNA, 25 bp, Homo sapien
tcttgaccaggttgaattctctatc

SEQ ID NO: 5232206 - DNA, 25 bp, Homo sapien
tcataggaagtttggatgtgagcta

SEQ ID NO: 5232207 - DNA, 25 bp, Homo sapien
tgtgtacaccactacggctggctaa

SEQ ID NO: 5232208 - DNA, 25 bp, Homo sapien
ctcccttcccatctatatgcttcaa

SEQ ID NO: 5232209 - DNA, 25 bp, Homo sapien
atcttgagcttgatcattctctccc

SEQ ID NO: 5232210 - DNA, 25 bp, Homo sapien
tcttgagcttgatcattctctccct

SEQ ID NO: 5232211 - DNA, 25 bp, Homo sapien
tctcccttcccatctatatgcttca

SEQ ID NO: 5232212 - DNA, 25 bp, Homo sapien
tcttctcctggcacttgtaaagtgg

SEQ ID NO: 5232213 - DNA, 25 bp, Homo sapien
ttcctggacatcacatacagttgag

SEQ ID NO: 5232214 - DNA, 25 bp, Homo sapien
ggcttcagttaccatactcactcta

SEQ ID NO: 5232215 - DNA, 25 bp, Homo sapien
tatttggttgcctgatcagtccttc

SEQ ID NO: 5232216 - DNA, 25 bp, Homo sapien
atcctagatatagtctcttctccat

SEQ ID NO: 5232217 - DNA, 25 bp, Homo sapien
caatcctagatatagtctcttctcc

SEQ ID NO: 5232218 - DNA, 25 bp, Homo sapien
tcctagatatagtctcttctccatt

SEQ ID NO: 5232219 - DNA, 25 bp, Homo sapien
aatcctagatatagtctcttctcca

SEQ ID NO: 5232220 - DNA, 25 bp, Homo sapien
tctaaacttgatggcagtttttcaa

SEQ ID NO: 5232221 - DNA, 25 bp, Homo sapien
tggtggtatctaaacttgatggcag

SEQ ID NO: 5232222 - DNA, 25 bp, Homo sapien
tggtatctaaacttgatggcagttt

SEQ ID NO: 5232223 - DNA, 25 bp, Homo sapien
tatctaaacttgatggcagtttttc

SEQ ID NO: 5232224 - DNA, 25 bp, Homo sapien
ctccaaagaccacttctagcagctg

SEQ ID NO: 5232225 - DNA, 25 bp, Homo sapien
tgccactggcagagggcaatatggc

SEQ ID NO: 5232226 - DNA, 25 bp, Homo sapien
gatgtcctttcaacttgttgactga

SEQ ID NO: 5232227 - DNA, 25 bp, Homo sapien
gactgaactgaggatgccatgccac

SEQ ID NO: 5232228 - DNA, 25 bp, Homo sapien
acatatgatattcccaacgaggctg

SEQ ID NO: 5232229 - DNA, 25 bp, Homo sapien
tgtctttagtagcttgcccatgctg

SEQ ID NO: 5232230 - DNA, 25 bp, Homo sapien
tatcactgtggcctttgagatttct

SEQ ID NO: 5232231 - DNA, 25 bp, Homo sapien
cagcagggatgttcgaggttgttca

SEQ ID NO: 5232232 - DNA, 25 bp, Homo sapien
gctgtccctttaaggctcttgagag

SEQ ID NO: 5232233 - DNA, 25 bp, Homo sapien
ttctttggaccctgattgggaaatg

SEQ ID NO: 5232234 - DNA, 25 bp, Homo sapien
ctgtccctttaaggctcttgagagt

SEQ ID NO: 5232235 - DNA, 25 bp, Homo sapien
tgtccctttaaggctcttgagagta

SEQ ID NO: 5232236 - DNA, 25 bp, Homo sapien
cattgtggtcttgaaggagcctcat

SEQ ID NO: 5232237 - DNA, 25 bp, Homo sapien
cagaaacagttgattcacaagattc

SEQ ID NO: 5232238 - DNA, 25 bp, Homo sapien
aacagttgattcacaagattcattg

SEQ ID NO: 5232239 - DNA, 25 bp, Homo sapien
cacaagattcattgtggtcttgaag

SEQ ID NO: 5232240 - DNA, 25 bp, Homo sapien
gaatgcaccaactgaatgtgcacct

SEQ ID NO: 5232241 - DNA, 25 bp, Homo sapien
ctagggggagtcagtttgggtgcaa

SEQ ID NO: 5232242 - DNA, 25 bp, Homo sapien
gggagtcagtttgggtgcaagtgaa

SEQ ID NO: 5232243 - DNA, 25 bp, Homo sapien
atgcaccaactgaatgtgcaccttc

SEQ ID NO: 5232244 - DNA, 25 bp, Homo sapien
tgccaggcctgaggttcattgcttt

SEQ ID NO: 5232245 - DNA, 25 bp, Homo sapien
ttgggaatgaactacttgtgtgcaa

SEQ ID NO: 5232246 - DNA, 25 bp, Homo sapien
ctgccaggcctgaggttcattgctt

SEQ ID NO: 5232247 - DNA, 25 bp, Homo sapien
gccaggcctgaggttcattgctttc

SEQ ID NO: 5232248 - DNA, 25 bp, Homo sapien
gggaatcaagcagcgctagggttct

SEQ ID NO: 5232249 - DNA, 25 bp, Homo sapien
gaatcaagcagcgctagggttctga

SEQ ID NO: 5232250 - DNA, 25 bp, Homo sapien
atcaagcagcgctagggttctgaag

SEQ ID NO: 5232251 - DNA, 25 bp, Homo sapien
aagggaatcaagcagcgctagggtt

SEQ ID NO: 5232252 - DNA, 25 bp, Homo sapien
tgaatcggagggtccaatttggccc

SEQ ID NO: 5232253 - DNA, 25 bp, Homo sapien
catctcagagatacccggtgtgaat

SEQ ID NO: 5232254 - DNA, 25 bp, Homo sapien
ggcccttgattccagccaccaatat

SEQ ID NO: 5232255 - DNA, 25 bp, Homo sapien
ggccctatgtatgtcccttctgtga

SEQ ID NO: 5232256 - DNA, 25 bp, Homo sapien
tggtaaatcacgctaggaatcttga

SEQ ID NO: 5232257 - DNA, 25 bp, Homo sapien
tcaagcctttggtaaatcacgctag

SEQ ID NO: 5232258 - DNA, 25 bp, Homo sapien
gctagggcatgagtttgcagaataa

SEQ ID NO: 5232259 - DNA, 25 bp, Homo sapien
gatagtgatagttgctattgggaag

SEQ ID NO: 5232260 - DNA, 25 bp, Homo sapien
agtgcaatattactcctactgtggc

SEQ ID NO: 5232261 - DNA, 25 bp, Homo sapien
gaagtgcaatattactcctactgtg

SEQ ID NO: 5232262 - DNA, 25 bp, Homo sapien
aagtgcaatattactcctactgtgg

SEQ ID NO: 5232263 - DNA, 25 bp, Homo sapien
tagaagtgcaatattactcctactg

SEQ ID NO: 5232264 - DNA, 25 bp, Homo sapien
tacagacattgatttcattaactgc

SEQ ID NO: 5232265 - DNA, 25 bp, Homo sapien
cagacattgatttcattaactgcac

SEQ ID NO: 5232266 - DNA, 25 bp, Homo sapien
atacagacattgatttcattaactg

SEQ ID NO: 5232267 - DNA, 25 bp, Homo sapien
gacattgatttcattaactgcacca

SEQ ID NO: 5232268 - DNA, 25 bp, Homo sapien
gcttgccttggcattcacgtttcga

SEQ ID NO: 5232269 - DNA, 25 bp, Homo sapien
cagtccccgttgtgacaatgacaga

SEQ ID NO: 5232270 - DNA, 25 bp, Homo sapien
cacgtttcgaacactgagcaggctt

SEQ ID NO: 5232271 - DNA, 25 bp, Homo sapien
gccagctggaattatcgtcgttcct

SEQ ID NO: 5232272 - DNA, 25 bp, Homo sapien
aaatatgtttcctgagggtgggcct

SEQ ID NO: 5232273 - DNA, 25 bp, Homo sapien
tactagcagcattaccagggcaacc

SEQ ID NO: 5232274 - DNA, 25 bp, Homo sapien
tatggagaagactgaccccttggaa

SEQ ID NO: 5232275 - DNA, 25 bp, Homo sapien
gaatcgaggtggcatcagataccct

SEQ ID NO: 5232276 - DNA, 25 bp, Homo sapien
agggaaggtggcttgatgctcttcc

SEQ ID NO: 5232277 - DNA, 25 bp, Homo sapien
ctcttcctcgggatggtgccggcat

SEQ ID NO: 5232278 - DNA, 25 bp, Homo sapien
gctcttcctcgggatggtgccggca

SEQ ID NO: 5232279 - DNA, 25 bp, Homo sapien
gactctcgctgtgccaatgctttga

SEQ ID NO: 5232280 - DNA, 25 bp, Homo sapien
agagagatccttaatggatgtccca

SEQ ID NO: 5232281 - DNA, 25 bp, Homo sapien
ggatgtcccattcaattctagtaaa

SEQ ID NO: 5232282 - DNA, 25 bp, Homo sapien
tccctctctctagctggttatcaga

SEQ ID NO: 5232283 - DNA, 25 bp, Homo sapien
tcttctgcgttctggtcatcagcaa

SEQ ID NO: 5232284 - DNA, 25 bp, Homo sapien
ttggaggtcagttggtagaaagcct

SEQ ID NO: 5232285 - DNA, 25 bp, Homo sapien
tggtagaaagcctcttgccctgctg

SEQ ID NO: 5232286 - DNA, 25 bp, Homo sapien
cagggctctttgacccttggaggtc

SEQ ID NO: 5232287 - DNA, 25 bp, Homo sapien
ccagctggtctgtttgagtctttcc

SEQ ID NO: 5232288 - DNA, 25 bp, Homo sapien
taattcttgagctcccgtttgatcc

SEQ ID NO: 5232289 - DNA, 25 bp, Homo sapien
tagcgtcaatgtcttaatcacctgg

SEQ ID NO: 5232290 - DNA, 25 bp, Homo sapien
ctaggtaaagcgtaagttgcatatt

SEQ ID NO: 5232291 - DNA, 25 bp, Homo sapien
tgctgccaggatgagctctcacata

SEQ ID NO: 5232292 - DNA, 25 bp, Homo sapien
tgtgaggcatgtgggctagtaaaac

SEQ ID NO: 5232293 - DNA, 25 bp, Homo sapien
gatcaatgcagggatcaccggaggt

SEQ ID NO: 5232294 - DNA, 25 bp, Homo sapien
taagtatgaatgttgttcagcaagc

SEQ ID NO: 5232295 - DNA, 25 bp, Homo sapien
acagtaatgaacatctctccaaggc

SEQ ID NO: 5232296 - DNA, 25 bp, Homo sapien
gaatcattgtctttttgtcccacct

SEQ ID NO: 5232297 - DNA, 25 bp, Homo sapien
atcattgtctttttgtcccacctcc

SEQ ID NO: 5232298 - DNA, 25 bp, Homo sapien
cacagtaatgaacatctctccaagg

SEQ ID NO: 5232299 - DNA, 25 bp, Homo sapien
ccataactgagctaagatgtgtagc

SEQ ID NO: 5232300 - DNA, 25 bp, Homo sapien
cataactgagctaagatgtgtagct

SEQ ID NO: 5232301 - DNA, 25 bp, Homo sapien
taactgagctaagatgtgtagctct

SEQ ID NO: 5232302 - DNA, 25 bp, Homo sapien
taccataactgagctaagatgtgta

SEQ ID NO: 5232303 - DNA, 25 bp, Homo sapien
gggtttgagaacatctacttggagg

SEQ ID NO: 5232304 - DNA, 25 bp, Homo sapien
ctgacttgagtttctgagaatgagc

SEQ ID NO: 5232305 - DNA, 25 bp, Homo sapien
aaactgacttgagtttctgagaatg

SEQ ID NO: 5232306 - DNA, 25 bp, Homo sapien
ggagggattgacatttgttccctgt

SEQ ID NO: 5232307 - DNA, 25 bp, Homo sapien
gaagaagcagaacagctgtagccca

SEQ ID NO: 5232308 - DNA, 25 bp, Homo sapien
agtcgttggtgcctgagagcctttc

SEQ ID NO: 5232309 - DNA, 25 bp, Homo sapien
gcagaacagctgtagcccagtcgtt

SEQ ID NO: 5232310 - DNA, 25 bp, Homo sapien
gctgtagcccagtcgttggtgcctg

SEQ ID NO: 5232311 - DNA, 25 bp, Homo sapien
tagggcatgagaagcatttagaacg

SEQ ID NO: 5232312 - DNA, 25 bp, Homo sapien
tgattctgtatatgcggcttggagt

SEQ ID NO: 5232313 - DNA, 25 bp, Homo sapien
gaaagaggtgaataggctttgattc

SEQ ID NO: 5232314 - DNA, 25 bp, Homo sapien
tagaacggatacagcagaagatcgg

SEQ ID NO: 5232315 - DNA, 25 bp, Homo sapien
taaaggacttctccggcctctattc

SEQ ID NO: 5232316 - DNA, 25 bp, Homo sapien
ctctctctgtgctgttaaaggactt

SEQ ID NO: 5232317 - DNA, 25 bp, Homo sapien
tgtgctgttaaaggacttctccggc

SEQ ID NO: 5232318 - DNA, 25 bp, Homo sapien
catgacggtgcccatagttttgtct

SEQ ID NO: 5232319 - DNA, 25 bp, Homo sapien
ctggaatggaaaattgggtactgga

SEQ ID NO: 5232320 - DNA, 25 bp, Homo sapien
aattgggtactggaaaaatgaagca

SEQ ID NO: 5232321 - DNA, 25 bp, Homo sapien
tggaatggaaaattgggtactggaa

SEQ ID NO: 5232322 - DNA, 25 bp, Homo sapien
tgggtactggaaaaatgaagcaaga

SEQ ID NO: 5232323 - DNA, 25 bp, Homo sapien
cctgtggtgtgttaggcccttcatt

SEQ ID NO: 5232324 - DNA, 25 bp, Homo sapien
ttcctcatcagtacttgacttagcc

SEQ ID NO: 5232325 - DNA, 25 bp, Homo sapien
tatacatcgcaaagtcttattttca

SEQ ID NO: 5232326 - DNA, 25 bp, Homo sapien
gacttagcctgtggtgtgttaggcc

SEQ ID NO: 5232327 - DNA, 25 bp, Homo sapien
tagagagtccagattgagttataac

SEQ ID NO: 5232328 - DNA, 25 bp, Homo sapien
tattcttcctttacgcagacgtaga

SEQ ID NO: 5232329 - DNA, 25 bp, Homo sapien
gagttataactgctcctgtcgccac

SEQ ID NO: 5232330 - DNA, 25 bp, Homo sapien
tcccatcatctaaaaagcctatcgg

SEQ ID NO: 5232331 - DNA, 25 bp, Homo sapien
ttgtggctacaatgagttatctctg

SEQ ID NO: 5232332 - DNA, 25 bp, Homo sapien
agtcttgtgctgatagaattgtggc

SEQ ID NO: 5232333 - DNA, 25 bp, Homo sapien
tcattaagttgtcttgggacacccc

SEQ ID NO: 5232334 - DNA, 25 bp, Homo sapien
ccaacagagagaactattgttcaca

SEQ ID NO: 5232335 - DNA, 25 bp, Homo sapien
aaacttggatcttgattgacatagg

SEQ ID NO: 5232336 - DNA, 25 bp, Homo sapien
tttggaaacttggatcttgattgac

SEQ ID NO: 5232337 - DNA, 25 bp, Homo sapien
tgcatttggaaacttggatcttgat

SEQ ID NO: 5232338 - DNA, 25 bp, Homo sapien
cttgcatttggaaacttggatcttg

SEQ ID NO: 5232339 - DNA, 25 bp, Homo sapien
ttaactgacagagacgggcaatgac

SEQ ID NO: 5232340 - DNA, 25 bp, Homo sapien
ggcatccaagcagttcgtctccagg

SEQ ID NO: 5232341 - DNA, 25 bp, Homo sapien
cgtctccagggaaagttacacattt

SEQ ID NO: 5232342 - DNA, 25 bp, Homo sapien
ggcaatgacaggataccaggcagct

SEQ ID NO: 5232343 - DNA, 25 bp, Homo sapien
aatgtgctatttcagtgctacttac

SEQ ID NO: 5232344 - DNA, 25 bp, Homo sapien
acaatgtgctatttcagtgctactt

SEQ ID NO: 5232345 - DNA, 25 bp, Homo sapien
cagctgtctaagtggacaatgtgct

SEQ ID NO: 5232346 - DNA, 25 bp, Homo sapien
gctgtctaagtggacaatgtgctat

SEQ ID NO: 5232347 - DNA, 25 bp, Homo sapien
tgaccttttggggtcaattatcctc

SEQ ID NO: 5232348 - DNA, 25 bp, Homo sapien
tctgaccttttggggtcaattatcc

SEQ ID NO: 5232349 - DNA, 25 bp, Homo sapien
catctgaccttttggggtcaattat

SEQ ID NO: 5232350 - DNA, 25 bp, Homo sapien
acatctgaccttttggggtcaatta

SEQ ID NO: 5232351 - DNA, 25 bp, Homo sapien
gatgtggtaggactgagtctctggg

SEQ ID NO: 5232352 - DNA, 25 bp, Homo sapien
ctgggatgtggtaggactgagtctc

SEQ ID NO: 5232353 - DNA, 25 bp, Homo sapien
gcataggagggcccatatagtccac

SEQ ID NO: 5232354 - DNA, 25 bp, Homo sapien
gggcataggagggcccatatagtcc

SEQ ID NO: 5232355 - DNA, 25 bp, Homo sapien
tatcctgcatcttcgtttctccttg

SEQ ID NO: 5232356 - DNA, 25 bp, Homo sapien
gtgataaccaaggactttctgtggg

SEQ ID NO: 5232357 - DNA, 25 bp, Homo sapien
cctccgggctcttgtcctaggctta

SEQ ID NO: 5232358 - DNA, 25 bp, Homo sapien
aggtatttggactttagctttggct

SEQ ID NO: 5232359 - DNA, 25 bp, Homo sapien
taagagtcattactgcccttggagg

SEQ ID NO: 5232360 - DNA, 25 bp, Homo sapien
cccttggaggaagataggcatttgt

SEQ ID NO: 5232361 - DNA, 25 bp, Homo sapien
agagctgacgcaatcatgcagaggc

SEQ ID NO: 5232362 - DNA, 25 bp, Homo sapien
cagttaacagttgagccagtttcac

SEQ ID NO: 5232363 - DNA, 25 bp, Homo sapien
aaacaggaaacgcagtttgctgaaa

SEQ ID NO: 5232364 - DNA, 25 bp, Homo sapien
tatgaagtcagatgtagtctttaga

SEQ ID NO: 5232365 - DNA, 25 bp, Homo sapien
tgccgtccgtatttaatttgctaag

SEQ ID NO: 5232366 - DNA, 25 bp, Homo sapien
gcagtttgctgaaaccatgaatggg

SEQ ID NO: 5232367 - DNA, 25 bp, Homo sapien
ccttgctgggtgaattagctctgaa

SEQ ID NO: 5232368 - DNA, 25 bp, Homo sapien
aaccttttgaccctgaccttgctgg

SEQ ID NO: 5232369 - DNA, 25 bp, Homo sapien
tgctctcattcatgaatcgacaagg

SEQ ID NO: 5232370 - DNA, 25 bp, Homo sapien
gacactgagagacttgccagtttgg

SEQ ID NO: 5232371 - DNA, 25 bp, Homo sapien
taaaaggtctgaccagtctagcaaa

SEQ ID NO: 5232372 - DNA, 25 bp, Homo sapien
aaatcaacactaggctcatggtaca

SEQ ID NO: 5232373 - DNA, 25 bp, Homo sapien
tctagcaaattgtcagtccaacgtc

SEQ ID NO: 5232374 - DNA, 25 bp, Homo sapien
ggtgttaaattctcctatctgcaat

SEQ ID NO: 5232375 - DNA, 25 bp, Homo sapien
taagtcagaccttgcaggtgctggt

SEQ ID NO: 5232376 - DNA, 25 bp, Homo sapien
tgagcttctaaatacttgaacagat

SEQ ID NO: 5232377 - DNA, 25 bp, Homo sapien
tgtactttaaagaggagattgtcaa

SEQ ID NO: 5232378 - DNA, 25 bp, Homo sapien
gaagaacttgtcaaatcatggacat

SEQ ID NO: 5232379 - DNA, 25 bp, Homo sapien
ccacataccctgccaattaattttt

SEQ ID NO: 5232380 - DNA, 25 bp, Homo sapien
cacataccctgccaattaatttttt

SEQ ID NO: 5232381 - DNA, 25 bp, Homo sapien
taacccaggtaattgagtctacagg

SEQ ID NO: 5232382 - DNA, 25 bp, Homo sapien
taatcaggctaagtaaagtctcttc

SEQ ID NO: 5232383 - DNA, 25 bp, Homo sapien
tttaaagccttgagatactagtccc

SEQ ID NO: 5232384 - DNA, 25 bp, Homo sapien
gaaaaagttaggatgcacgactact

SEQ ID NO: 5232385 - DNA, 25 bp, Homo sapien
ggtggattggtacataaccgggcat

SEQ ID NO: 5232386 - DNA, 25 bp, Homo sapien
tggtgagggtggattggtacataac

SEQ ID NO: 5232387 - DNA, 25 bp, Homo sapien
gctgacatctgccttgtgttgcaca

SEQ ID NO: 5232388 - DNA, 25 bp, Homo sapien
gttgcacatggatctgttttgcagc

SEQ ID NO: 5232389 - DNA, 25 bp, Homo sapien
cctgaatccaactgaaacggtagtt

SEQ ID NO: 5232390 - DNA, 25 bp, Homo sapien
ccttgccctgaatccaactgaaacg

SEQ ID NO: 5232391 - DNA, 25 bp, Homo sapien
gtttttgaacttcagcgggctgaag

SEQ ID NO: 5232392 - DNA, 25 bp, Homo sapien
gaagaaccgtctggaggtgtggcta

SEQ ID NO: 5232393 - DNA, 25 bp, Homo sapien
cgagggcacgggtcgcacagtttct

SEQ ID NO: 5232394 - DNA, 25 bp, Homo sapien
agagcttggccggtttcgagtcgct

SEQ ID NO: 5232395 - DNA, 25 bp, Homo sapien
cctttcatccgaaggcgggacgatg

SEQ ID NO: 5232396 - DNA, 25 bp, Homo sapien
cgctgctcgcgttggtaaagacgga

SEQ ID NO: 5232397 - DNA, 25 bp, Homo sapien
tttggcaagtttcagccgtccggcc

SEQ ID NO: 5232398 - DNA, 25 bp, Homo sapien
tttggcaagtttcagcctccagccc

SEQ ID NO: 5232399 - DNA, 25 bp, Homo sapien
cctattttgggagcattgcggccgc

SEQ ID NO: 5232400 - DNA, 25 bp, Homo sapien
tgtgccctgcgagtccctattttgg

SEQ ID NO: 5232401 - DNA, 25 bp, Homo sapien
cgccccttcggtcaagcggcgtgct

SEQ ID NO: 5232402 - DNA, 25 bp, Homo sapien
tcaagcggcgtgctctcactgcacg

SEQ ID NO: 5232403 - DNA, 25 bp, Homo sapien
cggtcaagcggcgtgctctcactgc

SEQ ID NO: 5232404 - DNA, 25 bp, Homo sapien
agcggcgtgctctcactgcacggcg

SEQ ID NO: 5232405 - DNA, 25 bp, Homo sapien
tgagggtccctggagtcgtagctcc

SEQ ID NO: 5232406 - DNA, 25 bp, Homo sapien
ggcaaagcttttccaagtccaacag

SEQ ID NO: 5232407 - DNA, 25 bp, Homo sapien
tgattgttccaacggttaagctcgg

SEQ ID NO: 5232408 - DNA, 25 bp, Homo sapien
taacactcagctaaaagtttctggg

SEQ ID NO: 5232409 - DNA, 25 bp, Homo sapien
gggacctggatagacacttggatat

SEQ ID NO: 5232410 - DNA, 25 bp, Homo sapien
gttttaggcggccacaccgcagtct

SEQ ID NO: 5232411 - DNA, 25 bp, Homo sapien
cttggatatcagctagaaagctacg

SEQ ID NO: 5232412 - DNA, 25 bp, Homo sapien
ggaagtgccacgatgagttttgtgt

SEQ ID NO: 5232413 - DNA, 25 bp, Homo sapien
tgaagcagtcggggggatgagggtt

SEQ ID NO: 5232414 - DNA, 25 bp, Homo sapien
ggtaactgaagcagtcggggggatg

SEQ ID NO: 5232415 - DNA, 25 bp, Homo sapien
taactgaagcagtcggggggatgag

SEQ ID NO: 5232416 - DNA, 25 bp, Homo sapien
cagagggtaactgaagcagtcgggg

SEQ ID NO: 5232417 - DNA, 25 bp, Homo sapien
gacataataggtagatgcactgaca

SEQ ID NO: 5232418 - DNA, 25 bp, Homo sapien
aagtctggatcccatgttgtgccaa

SEQ ID NO: 5232419 - DNA, 25 bp, Homo sapien
taggcagggtagacacaactggaca

SEQ ID NO: 5232420 - DNA, 25 bp, Homo sapien
cagcctgagatttccacacggtggt

SEQ ID NO: 5232421 - DNA, 25 bp, Homo sapien
gcatgcatttcacaggctggctggg

SEQ ID NO: 5232422 - DNA, 25 bp, Homo sapien
tcacttgtacaaaagaggcctggtg

SEQ ID NO: 5232423 - DNA, 25 bp, Homo sapien
gaagccttcacccagtcttactgag

SEQ ID NO: 5232424 - DNA, 25 bp, Homo sapien
tagaaacctgaaacacctcgtacca

SEQ ID NO: 5232425 - DNA, 25 bp, Homo sapien
tactggttcttgtgaatctcttttc

SEQ ID NO: 5232426 - DNA, 25 bp, Homo sapien
taagctttcctgttactggttcttg

SEQ ID NO: 5232427 - DNA, 25 bp, Homo sapien
tgaagtcatcacataattttgaaaa

SEQ ID NO: 5232428 - DNA, 25 bp, Homo sapien
taattttgaaaagtaggcagctaat

SEQ ID NO: 5232429 - DNA, 25 bp, Homo sapien
atggaaaatgttgcctaatcagtgt

SEQ ID NO: 5232430 - DNA, 25 bp, Homo sapien
aaatgttgcctaatcagtgtttgca

SEQ ID NO: 5232431 - DNA, 25 bp, Homo sapien
ttcatccactatccttcccttgcca

SEQ ID NO: 5232432 - DNA, 25 bp, Homo sapien
ggaaaatgttgcctaatcagtgttt

SEQ ID NO: 5232433 - DNA, 25 bp, Homo sapien
ccattgcacactgggcccccacaag

SEQ ID NO: 5232434 - DNA, 25 bp, Homo sapien
gcacactgggcccccacaaggaaag

SEQ ID NO: 5232435 - DNA, 25 bp, Homo sapien
ctcagttggcttaattggctgcaga

SEQ ID NO: 5232436 - DNA, 25 bp, Homo sapien
acaaggaaaggaactcagttggctt

SEQ ID NO: 5232437 - DNA, 25 bp, Homo sapien
tgtctccaaggtccctcagagcaac

SEQ ID NO: 5232438 - DNA, 25 bp, Homo sapien
tctccaaggtccctcagagcaaccc

SEQ ID NO: 5232439 - DNA, 25 bp, Homo sapien
gcctgtctccaaggtccctcagagc

SEQ ID NO: 5232440 - DNA, 25 bp, Homo sapien
tccaaggtccctcagagcaacccat

SEQ ID NO: 5232441 - DNA, 25 bp, Homo sapien
ttggggtagcgcaaggtcagaaaca

SEQ ID NO: 5232442 - DNA, 25 bp, Homo sapien
tacattggggtagcgcaaggtcaga

SEQ ID NO: 5232443 - DNA, 25 bp, Homo sapien
ctacattggggtagcgcaaggtcag

SEQ ID NO: 5232444 - DNA, 25 bp, Homo sapien
cattggggtagcgcaaggtcagaaa

SEQ ID NO: 5232445 - DNA, 25 bp, Homo sapien
tgcggatggacatgataacttggcc

SEQ ID NO: 5232446 - DNA, 25 bp, Homo sapien
tgccctggggcattccaaaggcacc

SEQ ID NO: 5232447 - DNA, 25 bp, Homo sapien
gggcattccaaaggcacctcgcatg

SEQ ID NO: 5232448 - DNA, 25 bp, Homo sapien
ctggggcattccaaaggcacctcgc

SEQ ID NO: 5232449 - DNA, 25 bp, Homo sapien
cttctggtggccaggaagcttgaac

SEQ ID NO: 5232450 - DNA, 25 bp, Homo sapien
gccacgattggggatgtacttgacc

SEQ ID NO: 5232451 - DNA, 25 bp, Homo sapien
caaattcatcagcattgaacttggt

SEQ ID NO: 5232452 - DNA, 25 bp, Homo sapien
attcatcagcattgaacttggtgaa

SEQ ID NO: 5232453 - DNA, 25 bp, Homo sapien
tgtccagagggccacgattggggat

SEQ ID NO: 5232454 - DNA, 25 bp, Homo sapien
caggaagtagaatttattggtgagt

SEQ ID NO: 5232455 - DNA, 25 bp, Homo sapien
gtgagtattaagaggggggcagcac

SEQ ID NO: 5232456 - DNA, 25 bp, Homo sapien
agtattaagaggggggcagcacatt

SEQ ID NO: 5232457 - DNA, 25 bp, Homo sapien
ttggtgagtattaagaggggggcag

SEQ ID NO: 5232458 - DNA, 25 bp, Homo sapien
gaaaatttagggtacattagtgaca

SEQ ID NO: 5232459 - DNA, 25 bp, Homo sapien
ccaaggccaagaaacgaattatagc

SEQ ID NO: 5232460 - DNA, 25 bp, Homo sapien
taaagttcgactttcagagtccaag

SEQ ID NO: 5232461 - DNA, 25 bp, Homo sapien
gcaagagcaggtaagaactggctcc

SEQ ID NO: 5232462 - DNA, 25 bp, Homo sapien
gcatttgatgagcaatcttccaccc

SEQ ID NO: 5232463 - DNA, 25 bp, Homo sapien
tccggtcaaaggctacagaccttcc

SEQ ID NO: 5232464 - DNA, 25 bp, Homo sapien
tactcttactaccatgtaatacaaa

SEQ ID NO: 5232465 - DNA, 25 bp, Homo sapien
tgccatccggtcaaaggctacagac

SEQ ID NO: 5232466 - DNA, 25 bp, Homo sapien
cttttttgccatccggtcaaaggct

SEQ ID NO: 5232467 - DNA, 25 bp, Homo sapien
gaagctggtagcttttcctgtcacc

SEQ ID NO: 5232468 - DNA, 25 bp, Homo sapien
cacagcacggacttgctacaaagcc

SEQ ID NO: 5232469 - DNA, 25 bp, Homo sapien
tcctgtcacctagtatgcgagttgg

SEQ ID NO: 5232470 - DNA, 25 bp, Homo sapien
tggagcagtattctcagctgtggaa

SEQ ID NO: 5232471 - DNA, 25 bp, Homo sapien
atacaatagggaatccaaggttgta

SEQ ID NO: 5232472 - DNA, 25 bp, Homo sapien
tctaatacaatagggaatccaaggt

SEQ ID NO: 5232473 - DNA, 25 bp, Homo sapien
aatccaaggttgtatggccaaagag

SEQ ID NO: 5232474 - DNA, 25 bp, Homo sapien
taatacaatagggaatccaaggttg

SEQ ID NO: 5232475 - DNA, 25 bp, Homo sapien
tcttcaccataagttccagaagcag

SEQ ID NO: 5232476 - DNA, 25 bp, Homo sapien
ataagttccagaagcagttcctcca

SEQ ID NO: 5232477 - DNA, 25 bp, Homo sapien
tccaggattccatgggcatcttttc

SEQ ID NO: 5232478 - DNA, 25 bp, Homo sapien
tcatatccacttcttcaccataagt

SEQ ID NO: 5232479 - DNA, 25 bp, Homo sapien
tgtggtgcgatctccgcccactaca

SEQ ID NO: 5232480 - DNA, 25 bp, Homo sapien
gctgtggtgcgatctccgcccacta

SEQ ID NO: 5232481 - DNA, 25 bp, Homo sapien
gtgcgatctccgcccactacaagct

SEQ ID NO: 5232482 - DNA, 25 bp, Homo sapien
tggtgcgatctccgcccactacaag

SEQ ID NO: 5232483 - DNA, 25 bp, Homo sapien
agacagtgccaacaccagatgttga

SEQ ID NO: 5232484 - DNA, 25 bp, Homo sapien
ttagccaaccaggatgggggagata

SEQ ID NO: 5232485 - DNA, 25 bp, Homo sapien
ataggcagtggaacagtatctacac

SEQ ID NO: 5232486 - DNA, 25 bp, Homo sapien
caaatgtagggtcaacacttggcca

SEQ ID NO: 5232487 - DNA, 25 bp, Homo sapien
taagggagagtttccacaatgtcag

SEQ ID NO: 5232488 - DNA, 25 bp, Homo sapien
gaaatggtgtctattctcttaccaa

SEQ ID NO: 5232489 - DNA, 25 bp, Homo sapien
tacaaattccccatgataaccagtt

SEQ ID NO: 5232490 - DNA, 25 bp, Homo sapien
catggtattgataattcagctgagg

SEQ ID NO: 5232491 - DNA, 25 bp, Homo sapien
tactgtaccatcttgtgcaggatcg

SEQ ID NO: 5232492 - DNA, 25 bp, Homo sapien
tttcccataggcacataagctcaca

SEQ ID NO: 5232493 - DNA, 25 bp, Homo sapien
tcaccagagtgggatccatgacaga

SEQ ID NO: 5232494 - DNA, 25 bp, Homo sapien
tgaaggtgaccaatccggaacccaa

SEQ ID NO: 5232495 - DNA, 25 bp, Homo sapien
acaaacacggaccaccatgcccatc

SEQ ID NO: 5232496 - DNA, 25 bp, Homo sapien
tgggattacaaacacggaccaccat

SEQ ID NO: 5232497 - DNA, 25 bp, Homo sapien
tgacctcaaatccagctcctgacct

SEQ ID NO: 5232498 - DNA, 25 bp, Homo sapien
cctgacctcaaatccagctcctgac

SEQ ID NO: 5232499 - DNA, 25 bp, Homo sapien
catgctgtggatggtccctgttacc

SEQ ID NO: 5232500 - DNA, 25 bp, Homo sapien
tgaaagaggtgcagtacagtgacag

SEQ ID NO: 5232501 - DNA, 25 bp, Homo sapien
cctgttaccactgaatcttcgttga

SEQ ID NO: 5232502 - DNA, 25 bp, Homo sapien
tgaagtcagacacgcttacaaatgc

SEQ ID NO: 5232503 - DNA, 25 bp, Homo sapien
gctgcagggtggaacaagaaatcac

SEQ ID NO: 5232504 - DNA, 25 bp, Homo sapien
gaatccatgtgctactggcaggcaa

SEQ ID NO: 5232505 - DNA, 25 bp, Homo sapien
catgccttgccaatagtaagctgca

SEQ ID NO: 5232506 - DNA, 25 bp, Homo sapien
ccctggtggtacacggaacctagat

SEQ ID NO: 5232507 - DNA, 25 bp, Homo sapien
gtgaactgctaagggccaaatgaac

SEQ ID NO: 5232508 - DNA, 25 bp, Homo sapien
tgtatgtcactttcggtacctgtga

SEQ ID NO: 5232509 - DNA, 25 bp, Homo sapien
catgaatcggctgtgatgtgtgaac

SEQ ID NO: 5232510 - DNA, 25 bp, Homo sapien
gccaaatgaacgtttgcagagcagt

SEQ ID NO: 5232511 - DNA, 25 bp, Homo sapien
cagtgagaatcctgtcttgtgaatt

SEQ ID NO: 5232512 - DNA, 25 bp, Homo sapien
cgcaggggtaacagtcagtgagaat

SEQ ID NO: 5232513 - DNA, 25 bp, Homo sapien
tagagaatcttgtggtaatgcagca

SEQ ID NO: 5232514 - DNA, 25 bp, Homo sapien
tcagctctattaagccttactagag

SEQ ID NO: 5232515 - DNA, 25 bp, Homo sapien
aaaactggttccacaggattttgca

SEQ ID NO: 5232516 - DNA, 25 bp, Homo sapien
tatgatacaggtccccaactgtgac

SEQ ID NO: 5232517 - DNA, 25 bp, Homo sapien
gctggatgctgtagaacctacagag

SEQ ID NO: 5232518 - DNA, 25 bp, Homo sapien
tactttggacatcatgctggatgct

SEQ ID NO: 5232519 - DNA, 25 bp, Homo sapien
tacaagattgatagtcattagatct

SEQ ID NO: 5232520 - DNA, 25 bp, Homo sapien
tagtcattagatctagagcatcaat

SEQ ID NO: 5232521 - DNA, 25 bp, Homo sapien
ttgggtctagtgtaaccggtgtgaa

SEQ ID NO: 5232522 - DNA, 25 bp, Homo sapien
aatgatgactaaagtgaattgggtc

SEQ ID NO: 5232523 - DNA, 25 bp, Homo sapien
cagttgagtttcacaagaggctttc

SEQ ID NO: 5232524 - DNA, 25 bp, Homo sapien
tggactcagccatgcctacttcagt

SEQ ID NO: 5232525 - DNA, 25 bp, Homo sapien
ccagcaacaggatcttgaggagtct

SEQ ID NO: 5232526 - DNA, 25 bp, Homo sapien
ctgtagaagtagaccgaagagtcca

SEQ ID NO: 5232527 - DNA, 25 bp, Homo sapien
gaattgacaagacccaacttgccct

SEQ ID NO: 5232528 - DNA, 25 bp, Homo sapien
tgtgcttgtacttaagccacccaag

SEQ ID NO: 5232529 - DNA, 25 bp, Homo sapien
gatgacagtcacaagattattctag

SEQ ID NO: 5232530 - DNA, 25 bp, Homo sapien
agttggtagaccttcaattgctgcc

SEQ ID NO: 5232531 - DNA, 25 bp, Homo sapien
cataattgatgctctgtataccaga

SEQ ID NO: 5232532 - DNA, 25 bp, Homo sapien
gaaaaattagcaacaaacatgagac

SEQ ID NO: 5232533 - DNA, 25 bp, Homo sapien
taaacgtgtgtataaagaactgcaa

SEQ ID NO: 5232534 - DNA, 25 bp, Homo sapien
taacaatgaggtcactttgcataat

SEQ ID NO: 5232535 - DNA, 25 bp, Homo sapien
aacttgttcactctgtttaattgga

SEQ ID NO: 5232536 - DNA, 25 bp, Homo sapien
acagaaaagcatactaattaactga

SEQ ID NO: 5232537 - DNA, 25 bp, Homo sapien
ttgatacacctgtaagtcatccaca

SEQ ID NO: 5232538 - DNA, 25 bp, Homo sapien
taagtatgtgcctctgcatgtgtct

SEQ ID NO: 5232539 - DNA, 25 bp, Homo sapien
tactggagttgacccatgttctcgc

SEQ ID NO: 5232540 - DNA, 25 bp, Homo sapien
gctctcattggtggatcaagggtag

SEQ ID NO: 5232541 - DNA, 25 bp, Homo sapien
tgttctcgccgaagtatatgggatg

SEQ ID NO: 5232542 - DNA, 25 bp, Homo sapien
taagagagttggaacactgtcagga

SEQ ID NO: 5232543 - DNA, 25 bp, Homo sapien
gctggaaatggcattagtcatccgt

SEQ ID NO: 5232544 - DNA, 25 bp, Homo sapien
caggcagtggagaattcagtcacag

SEQ ID NO: 5232545 - DNA, 25 bp, Homo sapien
gagaagggctctacatgaagctttg

SEQ ID NO: 5232546 - DNA, 25 bp, Homo sapien
taaacctgaacttttactcgtgata

SEQ ID NO: 5232547 - DNA, 25 bp, Homo sapien
tctccttgccggaacattctgctct

SEQ ID NO: 5232548 - DNA, 25 bp, Homo sapien
tcctgattagggagctatgcataaa

SEQ ID NO: 5232549 - DNA, 25 bp, Homo sapien
tattcatgatattcctaagatagtg

SEQ ID NO: 5232550 - DNA, 25 bp, Homo sapien
tagtggtgaaccctggcattcattg

SEQ ID NO: 5232551 - DNA, 25 bp, Homo sapien
gatagaggcgtgaacttgaaagaca

SEQ ID NO: 5232552 - DNA, 25 bp, Homo sapien
ccatgtgataggcagaaaacagggc

SEQ ID NO: 5232553 - DNA, 25 bp, Homo sapien
tgagcctagatcctgacttccttgt

SEQ ID NO: 5232554 - DNA, 25 bp, Homo sapien
tctgtgcatggaggcgggatatcta

SEQ ID NO: 5232555 - DNA, 25 bp, Homo sapien
gaaatgcaaacagttgcttatggta

SEQ ID NO: 5232556 - DNA, 25 bp, Homo sapien
taatgtaagcagatcctgaagtaac

SEQ ID NO: 5232557 - DNA, 25 bp, Homo sapien
gcttatggtagttaattgacgcaaa

SEQ ID NO: 5232558 - DNA, 25 bp, Homo sapien
ctgtgataattatggtaagaaatgc

SEQ ID NO: 5232559 - DNA, 25 bp, Homo sapien
tgcagaccctactctgtgacacaga

SEQ ID NO: 5232560 - DNA, 25 bp, Homo sapien
cacctcgaaaccttcctagtactgg

SEQ ID NO: 5232561 - DNA, 25 bp, Homo sapien
gtgacacagactctaaatgcaaaga

SEQ ID NO: 5232562 - DNA, 25 bp, Homo sapien
ctttccattcctgcagaccctactc

SEQ ID NO: 5232563 - DNA, 25 bp, Homo sapien
ttcagtactgcctgactcagccacg

SEQ ID NO: 5232564 - DNA, 25 bp, Homo sapien
ccctctctttgtattgcaatatggc

SEQ ID NO: 5232565 - DNA, 25 bp, Homo sapien
ccatcatgctgataagtggcataga

SEQ ID NO: 5232566 - DNA, 25 bp, Homo sapien
taatttggatgtcaccgaaagctct

SEQ ID NO: 5232567 - DNA, 25 bp, Homo sapien
tctgcctccccagaattcaagcaat

SEQ ID NO: 5232568 - DNA, 25 bp, Homo sapien
caggcgtgcaccaccatgccttgct

SEQ ID NO: 5232569 - DNA, 25 bp, Homo sapien
tgatctcaggtgatcggactgcctc

SEQ ID NO: 5232570 - DNA, 25 bp, Homo sapien
tctcctgcctcagcacccagagtag

SEQ ID NO: 5232571 - DNA, 25 bp, Homo sapien
catgagttagcttcaatttcccaac

SEQ ID NO: 5232572 - DNA, 25 bp, Homo sapien
gcttcaatttcccaacttgttgcac

SEQ ID NO: 5232573 - DNA, 25 bp, Homo sapien
gttgcacatttccacctaggttaaa

SEQ ID NO: 5232574 - DNA, 25 bp, Homo sapien
tttccacctaggttaaatgtgtgca

SEQ ID NO: 5232575 - DNA, 25 bp, Homo sapien
tcagcagaaacgagaggaatttaat

SEQ ID NO: 5232576 - DNA, 25 bp, Homo sapien
cagcagaaacgagaggaatttaatt

SEQ ID NO: 5232577 - DNA, 25 bp, Homo sapien
cagctttggaacgagtgactttttc

SEQ ID NO: 5232578 - DNA, 25 bp, Homo sapien
tgtctcacagctgaatccagttctg

SEQ ID NO: 5232579 - DNA, 25 bp, Homo sapien
ttagaataatgccacgttggaggcc

SEQ ID NO: 5232580 - DNA, 25 bp, Homo sapien
aatgccacgttggaggccacagcat

SEQ ID NO: 5232581 - DNA, 25 bp, Homo sapien
tcatcctttctgagaactaataatg

SEQ ID NO: 5232582 - DNA, 25 bp, Homo sapien
tctgagaactaataatgactttttt

SEQ ID NO: 5232583 - DNA, 25 bp, Homo sapien
atcctttctgagaactaataatgac

SEQ ID NO: 5232584 - DNA, 25 bp, Homo sapien
cctttctgagaactaataatgactt

SEQ ID NO: 5232585 - DNA, 25 bp, Homo sapien
atttcgctgttgttctagacgccat

SEQ ID NO: 5232586 - DNA, 25 bp, Homo sapien
ggatatgtgactgtcaggctctgac

SEQ ID NO: 5232587 - DNA, 25 bp, Homo sapien
tgagtatggccatccaggatatgtg

SEQ ID NO: 5232588 - DNA, 25 bp, Homo sapien
ggtgctggttgctagacgttgtagg

SEQ ID NO: 5232589 - DNA, 25 bp, Homo sapien
tagttgtaagtgtggtgctggttgc

SEQ ID NO: 5232590 - DNA, 25 bp, Homo sapien
tcttcgtgaaaataattgatactct

SEQ ID NO: 5232591 - DNA, 25 bp, Homo sapien
tccgggcacaactgaaatagtaatc

SEQ ID NO: 5232592 - DNA, 25 bp, Homo sapien
cagtttttagtggtaattcttcgtg

SEQ ID NO: 5232593 - DNA, 25 bp, Homo sapien
ccatcacatacttgtgctttccggg

SEQ ID NO: 5232594 - DNA, 25 bp, Homo sapien
tgctgtttgtctttggctgagaatc

SEQ ID NO: 5232595 - DNA, 25 bp, Homo sapien
gctgagaatctgattaggtaatgga

SEQ ID NO: 5232596 - DNA, 25 bp, Homo sapien
tcacctgcaactccccttgagtagg

SEQ ID NO: 5232597 - DNA, 25 bp, Homo sapien
aggtaatggaatgaggctgacttcc

SEQ ID NO: 5232598 - DNA, 25 bp, Homo sapien
ctccagcctgggtgacagagcaaga

SEQ ID NO: 5232599 - DNA, 25 bp, Homo sapien
aactccagcctgggtgacagagcaa

SEQ ID NO: 5232600 - DNA, 25 bp, Homo sapien
ccagcctgggtgacagagcaagacc

SEQ ID NO: 5232601 - DNA, 25 bp, Homo sapien
gccatgatcatgccagtgaactcca

SEQ ID NO: 5232602 - DNA, 25 bp, Homo sapien
gccaaggtgacagataacttgagtc

SEQ ID NO: 5232603 - DNA, 25 bp, Homo sapien
aagaataagcaaggtgctgtggctc

SEQ ID NO: 5232604 - DNA, 25 bp, Homo sapien
atctaatatccccacttaagagaag

SEQ ID NO: 5232605 - DNA, 25 bp, Homo sapien
tacagttagtaagtggaacagttgg

SEQ ID NO: 5232606 - DNA, 25 bp, Homo sapien
ggtgtgagccagcattcctgatcta

SEQ ID NO: 5232607 - DNA, 25 bp, Homo sapien
tggaaatacagttagtaagtggaac

SEQ ID NO: 5232608 - DNA, 25 bp, Homo sapien
taacactgaaggatctggatgaact

SEQ ID NO: 5232609 - DNA, 25 bp, Homo sapien
catctgcccttggtcagtacccttt

SEQ ID NO: 5232610 - DNA, 25 bp, Homo sapien
gcctttttcaagcactgttgagcca

SEQ ID NO: 5232611 - DNA, 25 bp, Homo sapien
caagcactgttgagccatctgccct

SEQ ID NO: 5232612 - DNA, 25 bp, Homo sapien
aaaagaggcttcccatgattggatg

SEQ ID NO: 5232613 - DNA, 25 bp, Homo sapien
aaagaggcttcccatgattggatgc

SEQ ID NO: 5232614 - DNA, 25 bp, Homo sapien
aagaggcttcccatgattggatgca

SEQ ID NO: 5232615 - DNA, 25 bp, Homo sapien
gaatgtgaccaacgtgtgaactttg

SEQ ID NO: 5232616 - DNA, 25 bp, Homo sapien
tcattggttatcatcagctccaggt

SEQ ID NO: 5232617 - DNA, 25 bp, Homo sapien
gtttaacatgtttccgtagctgccg

SEQ ID NO: 5232618 - DNA, 25 bp, Homo sapien
ccgtaccatgataaagaatgtgacc

SEQ ID NO: 5232619 - DNA, 25 bp, Homo sapien
cctcttctagtatccaagcagctaa

SEQ ID NO: 5232620 - DNA, 25 bp, Homo sapien
ctcaacatgctttggtggagaggat

SEQ ID NO: 5232621 - DNA, 25 bp, Homo sapien
gcagctaaatacaaaaggattctca

SEQ ID NO: 5232622 - DNA, 25 bp, Homo sapien
gagaggatgcagaactaggttcctg

SEQ ID NO: 5232623 - DNA, 25 bp, Homo sapien
gatgatattgaaggaagagctagga

SEQ ID NO: 5232624 - DNA, 25 bp, Homo sapien
tattgaaggaagagctaggaaaaga

SEQ ID NO: 5232625 - DNA, 25 bp, Homo sapien
tgttgaatccgctttgatgatattg

SEQ ID NO: 5232626 - DNA, 25 bp, Homo sapien
tccgctttgatgatattgaaggaag

SEQ ID NO: 5232627 - DNA, 25 bp, Homo sapien
acttcatgcttatgaactgcaaaag

SEQ ID NO: 5232628 - DNA, 25 bp, Homo sapien
cagggtttgaggaaggtatttctca

SEQ ID NO: 5232629 - DNA, 25 bp, Homo sapien
tatttctcacagatgcatgtgaaaa

SEQ ID NO: 5232630 - DNA, 25 bp, Homo sapien
tgagccaccattgtaacagggtttg

SEQ ID NO: 5232631 - DNA, 25 bp, Homo sapien
ctctgtctctaaaggctttcttgat

SEQ ID NO: 5232632 - DNA, 25 bp, Homo sapien
gtctctaaaggctttcttgattgct

SEQ ID NO: 5232633 - DNA, 25 bp, Homo sapien
ctgtctctaaaggctttcttgattg

SEQ ID NO: 5232634 - DNA, 25 bp, Homo sapien
ctctaaaggctttcttgattgctgt

SEQ ID NO: 5232635 - DNA, 25 bp, Homo sapien
gaatagttcatatagcggcaaagct

SEQ ID NO: 5232636 - DNA, 25 bp, Homo sapien
gcgatctcggctatgtcacgtgcaa

SEQ ID NO: 5232637 - DNA, 25 bp, Homo sapien
aaagtacgtaaaagtgccagaagct

SEQ ID NO: 5232638 - DNA, 25 bp, Homo sapien
tgttattctaggcagccggtcccca

SEQ ID NO: 5232639 - DNA, 25 bp, Homo sapien
cagtttcagatgcaagatccgcgcc

SEQ ID NO: 5232640 - DNA, 25 bp, Homo sapien
tgtttccgggcttatcacgtggccc

SEQ ID NO: 5232641 - DNA, 25 bp, Homo sapien
atcccgaagtccaggcgtgggagcc

SEQ ID NO: 5232642 - DNA, 25 bp, Homo sapien
gggatcctgcctgcgatcccgaagt

SEQ ID NO: 5232643 - DNA, 25 bp, Homo sapien
ggcactgggttcagggcgagcggga

SEQ ID NO: 5232644 - DNA, 25 bp, Homo sapien
gcactgggttcagggcgagcgggag

SEQ ID NO: 5232645 - DNA, 25 bp, Homo sapien
gcggcaccacgtgcgcaggtaggag

SEQ ID NO: 5232646 - DNA, 25 bp, Homo sapien
agcggcggcaccacgtgcgcaggta

SEQ ID NO: 5232647 - DNA, 25 bp, Homo sapien
agcggggacgctggctttcaatccc

SEQ ID NO: 5232648 - DNA, 25 bp, Homo sapien
agaccgcgccgctccgctagggcct

SEQ ID NO: 5232649 - DNA, 25 bp, Homo sapien
gagctgctctaaggcgggccccacg

SEQ ID NO: 5232650 - DNA, 25 bp, Homo sapien
gacgctggctttcaatcccgcagcg

SEQ ID NO: 5232651 - DNA, 25 bp, Homo sapien
tggaccctgcgttcgcaggcctggt

SEQ ID NO: 5232652 - DNA, 25 bp, Homo sapien
ctggaccctgcgttcgcaggcctgg

SEQ ID NO: 5232653 - DNA, 25 bp, Homo sapien
ttttctcatgattcgcagcacattg

SEQ ID NO: 5232654 - DNA, 25 bp, Homo sapien
ggaggagattctcgaatcgcaaggc

SEQ ID NO: 5232655 - DNA, 25 bp, Homo sapien
gattcgcagcacattgcactgtgtt

SEQ ID NO: 5232656 - DNA, 25 bp, Homo sapien
agattctcgaatcgcaaggccagca

SEQ ID NO: 5232657 - DNA, 25 bp, Homo sapien
ttttgcagtccctccggaagcgacc

SEQ ID NO: 5232658 - DNA, 25 bp, Homo sapien
cggaagcgaccagattcaaaccaag

SEQ ID NO: 5232659 - DNA, 25 bp, Homo sapien
accaagagcggtcaggtttcttgca

SEQ ID NO: 5232660 - DNA, 25 bp, Homo sapien
tgcaaattccacaaggccggttttg

SEQ ID NO: 5232661 - DNA, 25 bp, Homo sapien
tgccactccttgacatcagcaatgg

SEQ ID NO: 5232662 - DNA, 25 bp, Homo sapien
tggttaatcatttctaagtcccttc

SEQ ID NO: 5232663 - DNA, 25 bp, Homo sapien
tcctggttaatcatttctaagtccc

SEQ ID NO: 5232664 - DNA, 25 bp, Homo sapien
aatgccactccttgacatcagcaat

SEQ ID NO: 5232665 - DNA, 25 bp, Homo sapien
tgaagataagtgaggagtgggtata

SEQ ID NO: 5232666 - DNA, 25 bp, Homo sapien
gataagtacctaaagtgggtgacag

SEQ ID NO: 5232667 - DNA, 25 bp, Homo sapien
taggtacagaaacaagactaatcag

SEQ ID NO: 5232668 - DNA, 25 bp, Homo sapien
caagactaatcagttgataagtacc

SEQ ID NO: 5232669 - DNA, 25 bp, Homo sapien
tattaatccatatcacaaagcagac

SEQ ID NO: 5232670 - DNA, 25 bp, Homo sapien
caaaagattgagagttctgattaca

SEQ ID NO: 5232671 - DNA, 25 bp, Homo sapien
cacaatgtgacaaagggtcaagtga

SEQ ID NO: 5232672 - DNA, 25 bp, Homo sapien
caaagcagacccctagaaagtcgta

SEQ ID NO: 5232673 - DNA, 25 bp, Homo sapien
cacacgtccccccaacatttcagga

SEQ ID NO: 5232674 - DNA, 25 bp, Homo sapien
catttcaggaaatcccgtcaactca

SEQ ID NO: 5232675 - DNA, 25 bp, Homo sapien
ggaaatcccgtcaactcagagacat

SEQ ID NO: 5232676 - DNA, 25 bp, Homo sapien
tggactgcaggatgcaaagttttca

SEQ ID NO: 5232677 - DNA, 25 bp, Homo sapien
tctggaatattacgagctaggattc

SEQ ID NO: 5232678 - DNA, 25 bp, Homo sapien
tcttctggaatattacgagctagga

SEQ ID NO: 5232679 - DNA, 25 bp, Homo sapien
ttatcttctggaatattacgagcta

SEQ ID NO: 5232680 - DNA, 25 bp, Homo sapien
aagtctggccatgtcagcattatct

SEQ ID NO: 5232681 - DNA, 25 bp, Homo sapien
taaaacaaagacgaatctggctgtc

SEQ ID NO: 5232682 - DNA, 25 bp, Homo sapien
tctggctgtcattaaaaagtccact

SEQ ID NO: 5232683 - DNA, 25 bp, Homo sapien
acaaagacgaatctggctgtcatta

SEQ ID NO: 5232684 - DNA, 25 bp, Homo sapien
ctataaaacaaagacgaatctggct

SEQ ID NO: 5232685 - DNA, 25 bp, Homo sapien
gtctttacaaagggatagagattgc

SEQ ID NO: 5232686 - DNA, 25 bp, Homo sapien
tctttacaaagggatagagattgca

SEQ ID NO: 5232687 - DNA, 25 bp, Homo sapien
ccacagcctcctcaacagttacacc

SEQ ID NO: 5232688 - DNA, 25 bp, Homo sapien
cacagcctcctcaacagttacacct

SEQ ID NO: 5232689 - DNA, 25 bp, Homo sapien
gctgcagctctcagtaaggttactc

SEQ ID NO: 5232690 - DNA, 25 bp, Homo sapien
tcactcgagcgtggtttttggctgc

SEQ ID NO: 5232691 - DNA, 25 bp, Homo sapien
ggtgtccttactctcggagctctgc

SEQ ID NO: 5232692 - DNA, 25 bp, Homo sapien
gctaactggcgtctagtctccaagg

SEQ ID NO: 5232693 - DNA, 25 bp, Homo sapien
ttacaggcgtaccacaccacaccac

SEQ ID NO: 5232694 - DNA, 25 bp, Homo sapien
gcgtaccacaccacaccacactcgg

SEQ ID NO: 5232695 - DNA, 25 bp, Homo sapien
gtaccacaccacaccacactcggct

SEQ ID NO: 5232696 - DNA, 25 bp, Homo sapien
aggcgtaccacaccacaccacactc

SEQ ID NO: 5232697 - DNA, 25 bp, Homo sapien
ctcaagggcatctgagatacgcctt

SEQ ID NO: 5232698 - DNA, 25 bp, Homo sapien
catattgtgccgtatgagtgaatgc

SEQ ID NO: 5232699 - DNA, 25 bp, Homo sapien
tgagatacgcctttgctgtactgtt

SEQ ID NO: 5232700 - DNA, 25 bp, Homo sapien
tgtgggttcattccatatctcaagg

SEQ ID NO: 5232701 - DNA, 25 bp, Homo sapien
tggaatacctaaagcctccttgagt

SEQ ID NO: 5232702 - DNA, 25 bp, Homo sapien
acatgtttgaaagaggcagcggctg

SEQ ID NO: 5232703 - DNA, 25 bp, Homo sapien
gcagcggctggaatacctaaagcct

SEQ ID NO: 5232704 - DNA, 25 bp, Homo sapien
tgccaggcgttcaaagcatcgcaca

SEQ ID NO: 5232705 - DNA, 25 bp, Homo sapien
ttgctcttgcatatgccgctgagat

SEQ ID NO: 5232706 - DNA, 25 bp, Homo sapien
tagagatcataaaccatgcagactt

SEQ ID NO: 5232707 - DNA, 25 bp, Homo sapien
gttttatagagatcataaaccatgc

SEQ ID NO: 5232708 - DNA, 25 bp, Homo sapien
ttgcatatgccgctgagatgggtgt

SEQ ID NO: 5232709 - DNA, 25 bp, Homo sapien
gtacatcacaaacatcggacaatgc

SEQ ID NO: 5232710 - DNA, 25 bp, Homo sapien
ccaaatgaagacatcctatcagccc

SEQ ID NO: 5232711 - DNA, 25 bp, Homo sapien
tcacaaacatcggacaatgcaacaa

SEQ ID NO: 5232712 - DNA, 25 bp, Homo sapien
caaacatcggacaatgcaacaaaat

SEQ ID NO: 5232713 - DNA, 25 bp, Homo sapien
ctggggcaattataccatcagatac

SEQ ID NO: 5232714 - DNA, 25 bp, Homo sapien
gaaagtattgtcaaggcttcttctt

SEQ ID NO: 5232715 - DNA, 25 bp, Homo sapien
aaagtattgtcaaggcttcttcttc

SEQ ID NO: 5232716 - DNA, 25 bp, Homo sapien
caacattgctaaataatgacttgtc

SEQ ID NO: 5232717 - DNA, 25 bp, Homo sapien
agagagttcgaacttcattttcatc

SEQ ID NO: 5232718 - DNA, 25 bp, Homo sapien
tgaagaccaaagagagttcgaactt

SEQ ID NO: 5232719 - DNA, 25 bp, Homo sapien
acttgtcgacgacaccattatttct

SEQ ID NO: 5232720 - DNA, 25 bp, Homo sapien
tagccgtgtgcatacagaccagttc

SEQ ID NO: 5232721 - DNA, 25 bp, Homo sapien
aactcaaagataagctagctagccg

SEQ ID NO: 5232722 - DNA, 25 bp, Homo sapien
tagcagtcagttcagatacttccca

SEQ ID NO: 5232723 - DNA, 25 bp, Homo sapien
cagaccaatggaagttactagcagt

SEQ ID NO: 5232724 - DNA, 25 bp, Homo sapien
ttatctctagtgtgtacatatgcac

SEQ ID NO: 5232725 - DNA, 25 bp, Homo sapien
acatatgcacagaagcttctaacat

SEQ ID NO: 5232726 - DNA, 25 bp, Homo sapien
catatgcacagaagcttctaacatg

SEQ ID NO: 5232727 - DNA, 25 bp, Homo sapien
tatacacaattaaagctacttatct

SEQ ID NO: 5232728 - DNA, 25 bp, Homo sapien
acacatttgtagcctagcacatgga

SEQ ID NO: 5232729 - DNA, 25 bp, Homo sapien
aacacatttgtagcctagcacatgg

SEQ ID NO: 5232730 - DNA, 25 bp, Homo sapien
aaacacatttgtagcctagcacatg

SEQ ID NO: 5232731 - DNA, 25 bp, Homo sapien
ggttacatgggaactcttacaactg

SEQ ID NO: 5232732 - DNA, 25 bp, Homo sapien
gccatatcaagtgagcccggctaca

SEQ ID NO: 5232733 - DNA, 25 bp, Homo sapien
tcactgcagtgttggaaatgccctg

SEQ ID NO: 5232734 - DNA, 25 bp, Homo sapien
gctacagaagaacatgagggatcac

SEQ ID NO: 5232735 - DNA, 25 bp, Homo sapien
ggtctcggagggcagactctggcaa

SEQ ID NO: 5232736 - DNA, 25 bp, Homo sapien
gactgagtgtacttgacagcaatgg

SEQ ID NO: 5232737 - DNA, 25 bp, Homo sapien
ccgttcttggcgtagcacacagagt

SEQ ID NO: 5232738 - DNA, 25 bp, Homo sapien
caatggtggctacgatgaggtctcg

SEQ ID NO: 5232739 - DNA, 25 bp, Homo sapien
caaaatgtgccaacctattcaaggc

SEQ ID NO: 5232740 - DNA, 25 bp, Homo sapien
tcttgcttaacgtcacacagtgaga

SEQ ID NO: 5232741 - DNA, 25 bp, Homo sapien
catcttgtattctgaggctcgggac

SEQ ID NO: 5232742 - DNA, 25 bp, Homo sapien
cattagttttaacagcccaccaggg

SEQ ID NO: 5232743 - DNA, 25 bp, Homo sapien
aatggttccagtcacatattgatcg

SEQ ID NO: 5232744 - DNA, 25 bp, Homo sapien
ccttatctcctgcaaggcgagtgca

SEQ ID NO: 5232745 - DNA, 25 bp, Homo sapien
tgctgtcctgctccaatgccgataa

SEQ ID NO: 5232746 - DNA, 25 bp, Homo sapien
taaacttcatcgaaagcacttgtgg

SEQ ID NO: 5232747 - DNA, 25 bp, Homo sapien
gttgaatacagacccatcggacagc

SEQ ID NO: 5232748 - DNA, 25 bp, Homo sapien
catccagcattttgttaggcacgca

SEQ ID NO: 5232749 - DNA, 25 bp, Homo sapien
cctcgacgtaggtgaaaagcagtcc

SEQ ID NO: 5232750 - DNA, 25 bp, Homo sapien
gacagcaagcaccatgcatgacgtg

SEQ ID NO: 5232751 - DNA, 25 bp, Homo sapien
tattgtgtcatagtggcacagacag

SEQ ID NO: 5232752 - DNA, 25 bp, Homo sapien
gactctttcaggactagtagcaggg

SEQ ID NO: 5232753 - DNA, 25 bp, Homo sapien
ggacttcagttacattctgcagcct

SEQ ID NO: 5232754 - DNA, 25 bp, Homo sapien
ggaagtatgccccttctgtgaagta

SEQ ID NO: 5232755 - DNA, 25 bp, Homo sapien
cacatatctagaatctctttgatgc

SEQ ID NO: 5232756 - DNA, 25 bp, Homo sapien
tcacatatctagaatctctttgatg

SEQ ID NO: 5232757 - DNA, 25 bp, Homo sapien
acatatctagaatctctttgatgct

SEQ ID NO: 5232758 - DNA, 25 bp, Homo sapien
tacctgggaccacaagtgcacacca

SEQ ID NO: 5232759 - DNA, 25 bp, Homo sapien
acaccaccacacccagctaattttt

SEQ ID NO: 5232760 - DNA, 25 bp, Homo sapien
caagtacctgggaccacaagtgcac

SEQ ID NO: 5232761 - DNA, 25 bp, Homo sapien
gtatttttggagacagagtttcacc

SEQ ID NO: 5232762 - DNA, 25 bp, Homo sapien
atcaccatgccagaaagcacctggg

SEQ ID NO: 5232763 - DNA, 25 bp, Homo sapien
tttagttctatgtggtgcaaatcac

SEQ ID NO: 5232764 - DNA, 25 bp, Homo sapien
gaagcttggtctgacatcgtcttta

SEQ ID NO: 5232765 - DNA, 25 bp, Homo sapien
aaatcaccatgccagaaagcacctg

SEQ ID NO: 5232766 - DNA, 25 bp, Homo sapien
tctacgttatctcggaaagggaaga

SEQ ID NO: 5232767 - DNA, 25 bp, Homo sapien
gcatcagagctgatagaaacttcag

SEQ ID NO: 5232768 - DNA, 25 bp, Homo sapien
tagctctgtctacgttatctcggaa

SEQ ID NO: 5232769 - DNA, 25 bp, Homo sapien
ctctgcctcagtgagtaactcaggg

SEQ ID NO: 5232770 - DNA, 25 bp, Homo sapien
cgcaggcctcaatcacaactttgtc

SEQ ID NO: 5232771 - DNA, 25 bp, Homo sapien
agagccgaaggttcgtatgagcgag

SEQ ID NO: 5232772 - DNA, 25 bp, Homo sapien
ggatgattcccagttcgtcgcaggc

SEQ ID NO: 5232773 - DNA, 25 bp, Homo sapien
ggagggagccgcaatgtacgccaca

SEQ ID NO: 5232774 - DNA, 25 bp, Homo sapien
cctcaaagtttcaggcgtgactgtt

SEQ ID NO: 5232775 - DNA, 25 bp, Homo sapien
tcaggcgtgactgttcacctacaca

SEQ ID NO: 5232776 - DNA, 25 bp, Homo sapien
gactgttcacctacacataagcaag

SEQ ID NO: 5232777 - DNA, 25 bp, Homo sapien
tgttcacctacacataagcaagcca

SEQ ID NO: 5232778 - DNA, 25 bp, Homo sapien
tcatttatgtgttatgtgtcatgtg

SEQ ID NO: 5232779 - DNA, 25 bp, Homo sapien
agttcaaagagcctgcatctttaac

SEQ ID NO: 5232780 - DNA, 25 bp, Homo sapien
tgtttatgtttcacacgggcagtgc

SEQ ID NO: 5232781 - DNA, 25 bp, Homo sapien
cgtttggttcctgctaatgtttatg

SEQ ID NO: 5232782 - DNA, 25 bp, Homo sapien
gaaagtagacaaccaagcttctcag

SEQ ID NO: 5232783 - DNA, 25 bp, Homo sapien
cccactgtagtgattaagcctgtaa

SEQ ID NO: 5232784 - DNA, 25 bp, Homo sapien
tgcacgggaatggtcaggagcacac

SEQ ID NO: 5232785 - DNA, 25 bp, Homo sapien
tagttgaacacaggtgcaatgcacg

SEQ ID NO: 5232786 - DNA, 25 bp, Homo sapien
taaataaatgtgacattcagaatag

SEQ ID NO: 5232787 - DNA, 25 bp, Homo sapien
aataaataaatgtgacattcagaat

SEQ ID NO: 5232788 - DNA, 25 bp, Homo sapien
aaataaatgtgacattcagaatagt

SEQ ID NO: 5232789 - DNA, 25 bp, Homo sapien
aaataaataaatgtgacattcagaa

SEQ ID NO: 5232790 - DNA, 25 bp, Homo sapien
cagtgggcgtctttggtcccggcta

SEQ ID NO: 5232791 - DNA, 25 bp, Homo sapien
tgatgttagcagacccagcttagag

SEQ ID NO: 5232792 - DNA, 25 bp, Homo sapien
gatcaataggaaagcatatgcagcc

SEQ ID NO: 5232793 - DNA, 25 bp, Homo sapien
tgtctggcccgcaatactgtaggaa

SEQ ID NO: 5232794 - DNA, 25 bp, Homo sapien
cataaatgagggctgcacattgcct

SEQ ID NO: 5232795 - DNA, 25 bp, Homo sapien
cagtaaaaacttcaggcaggagcct

SEQ ID NO: 5232796 - DNA, 25 bp, Homo sapien
tgatgactgacctccatgagcttgc

SEQ ID NO: 5232797 - DNA, 25 bp, Homo sapien
gctaccatgtcactgcctagggaag

SEQ ID NO: 5232798 - DNA, 25 bp, Homo sapien
cctgccagcttaagaacagtagtga

SEQ ID NO: 5232799 - DNA, 25 bp, Homo sapien
gctgcacatgtcttgggaacggaaa

SEQ ID NO: 5232800 - DNA, 25 bp, Homo sapien
ggagaaaatggccagatgatgagct

SEQ ID NO: 5232801 - DNA, 25 bp, Homo sapien
aagtgggaccgtcagggagaaaatg

SEQ ID NO: 5232802 - DNA, 25 bp, Homo sapien
tacaagattggagagaagtgggacc

SEQ ID NO: 5232803 - DNA, 25 bp, Homo sapien
ggtattaaatagctggcccaaggtc

SEQ ID NO: 5232804 - DNA, 25 bp, Homo sapien
ggatgactcgtgctttgacccctac

SEQ ID NO: 5232805 - DNA, 25 bp, Homo sapien
aaagatgggcttcctgtcgggtgcc

SEQ ID NO: 5232806 - DNA, 25 bp, Homo sapien
ggcttgaaccaacctacggatgact

SEQ ID NO: 5232807 - DNA, 25 bp, Homo sapien
tccacaccaacagagagtgctaagt

SEQ ID NO: 5232808 - DNA, 25 bp, Homo sapien
gctaagtcctgtctatgccaagtga

SEQ ID NO: 5232809 - DNA, 25 bp, Homo sapien
tgaatccccaatcttccaacaggag

SEQ ID NO: 5232810 - DNA, 25 bp, Homo sapien
cctcatctgatagaagactgtgcta

SEQ ID NO: 5232811 - DNA, 25 bp, Homo sapien
ccagcagaggcataaggttcgggaa

SEQ ID NO: 5232812 - DNA, 25 bp, Homo sapien
ggaacttctaccagtgccactctga

SEQ ID NO: 5232813 - DNA, 25 bp, Homo sapien
tacaacgtcatagtggaggcactga

SEQ ID NO: 5232814 - DNA, 25 bp, Homo sapien
agaggtgccacctacaacgtcatag

SEQ ID NO: 5232815 - DNA, 25 bp, Homo sapien
ctacctttacgatttgtccttgaag

SEQ ID NO: 5232816 - DNA, 25 bp, Homo sapien
gaaagatattctacctgaatttcca

SEQ ID NO: 5232817 - DNA, 25 bp, Homo sapien
acctgaatttccatttgtgtgcaga

SEQ ID NO: 5232818 - DNA, 25 bp, Homo sapien
cctttttgagtaagatagatgattc

SEQ ID NO: 5232819 - DNA, 25 bp, Homo sapien
cattccaggacacttctgagtacat

SEQ ID NO: 5232820 - DNA, 25 bp, Homo sapien
gccccattccaggacacttctgagt

SEQ ID NO: 5232821 - DNA, 25 bp, Homo sapien
gggccccattccaggacacttctga

SEQ ID NO: 5232822 - DNA, 25 bp, Homo sapien
cccattccaggacacttctgagtac

SEQ ID NO: 5232823 - DNA, 25 bp, Homo sapien
tacagccactcaatataaagccttg

SEQ ID NO: 5232824 - DNA, 25 bp, Homo sapien
cattaggtctaatttgagcagaggc

SEQ ID NO: 5232825 - DNA, 25 bp, Homo sapien
gattagtctggattctacttcctac

SEQ ID NO: 5232826 - DNA, 25 bp, Homo sapien
aaaaggttctccatgttttgatgca

SEQ ID NO: 5232827 - DNA, 25 bp, Homo sapien
gagagaacgtcaaatttagcagcca

SEQ ID NO: 5232828 - DNA, 25 bp, Homo sapien
tcttacgccgcattacagagagaac

SEQ ID NO: 5232829 - DNA, 25 bp, Homo sapien
tagtgacagcataaaccctagaggt

SEQ ID NO: 5232830 - DNA, 25 bp, Homo sapien
taagccgggagcactgattgaggcc

SEQ ID NO: 5232831 - DNA, 25 bp, Homo sapien
tatgctgtcactggccgtggagaca

SEQ ID NO: 5232832 - DNA, 25 bp, Homo sapien
tcagcggccttaaacctggagttga

SEQ ID NO: 5232833 - DNA, 25 bp, Homo sapien
caagatagcgctctttaaaagggaa

SEQ ID NO: 5232834 - DNA, 25 bp, Homo sapien
gcaagtctacagctaccatcagcgg

SEQ ID NO: 5232835 - DNA, 25 bp, Homo sapien
tacaggatcacttacggagagacag

SEQ ID NO: 5232836 - DNA, 25 bp, Homo sapien
gacctggaagttgttgctgcgaccc

SEQ ID NO: 5232837 - DNA, 25 bp, Homo sapien
gcaatcctgggttgagggcttacct

SEQ ID NO: 5232838 - DNA, 25 bp, Homo sapien
ctagtttctgatgttccgagggacc

SEQ ID NO: 5232839 - DNA, 25 bp, Homo sapien
tagaatatggtaaagaagcccgggc

SEQ ID NO: 5232840 - DNA, 25 bp, Homo sapien
gcagagaggaaagtcccttattgat

SEQ ID NO: 5232841 - DNA, 25 bp, Homo sapien
tacccagttggtagattctgtaaag

SEQ ID NO: 5232842 - DNA, 25 bp, Homo sapien
cagagtatgtggtcagcatcgttgc

SEQ ID NO: 5232843 - DNA, 25 bp, Homo sapien
gcgagaaatatccagctgttgcagc

SEQ ID NO: 5232844 - DNA, 25 bp, Homo sapien
catactctcaggtggatgcgagaaa

SEQ ID NO: 5232845 - DNA, 25 bp, Homo sapien
gaatgcggtgatggtctcccaagtc

SEQ ID NO: 5232846 - DNA, 25 bp, Homo sapien
catcagttcaaatagtcctgggcgt

SEQ ID NO: 5232847 - DNA, 25 bp, Homo sapien
ctgagaaccaatttgcatgaacatg

SEQ ID NO: 5232848 - DNA, 25 bp, Homo sapien
aaggttctctgctgtgcatgggaaa

SEQ ID NO: 5232849 - DNA, 25 bp, Homo sapien
tgctgtcactaggtaaagaaacacc

SEQ ID NO: 5232850 - DNA, 25 bp, Homo sapien
aattcactgaatggaactgtagctc

SEQ ID NO: 5232851 - DNA, 25 bp, Homo sapien
tagttttgtccctgtatgtgagcac

SEQ ID NO: 5232852 - DNA, 25 bp, Homo sapien
aagaagtaaaagtcacaccttcagg

SEQ ID NO: 5232853 - DNA, 25 bp, Homo sapien
agcatttggttgacacatctagttt

SEQ ID NO: 5232854 - DNA, 25 bp, Homo sapien
tccatatcaatttccaacagctgcc

SEQ ID NO: 5232855 - DNA, 25 bp, Homo sapien
taacaggataccgactgaccgtggg

SEQ ID NO: 5232856 - DNA, 25 bp, Homo sapien
ggagtctttaccacacgtaagctga

SEQ ID NO: 5232857 - DNA, 25 bp, Homo sapien
gatcacagtcaagcaaaatggttcc

SEQ ID NO: 5232858 - DNA, 25 bp, Homo sapien
tctgagtacaccgtatccctcgtgg

SEQ ID NO: 5232859 - DNA, 25 bp, Homo sapien
tgtcattttaggaggcatatccctt

SEQ ID NO: 5232860 - DNA, 25 bp, Homo sapien
tgattctgatagtgcaaactcacca

SEQ ID NO: 5232861 - DNA, 25 bp, Homo sapien
ccatgaatctgaggatacgttatca

SEQ ID NO: 5232862 - DNA, 25 bp, Homo sapien
ggctcagagctaactgtgaacttca

SEQ ID NO: 5232863 - DNA, 25 bp, Homo sapien
tgagtaacatttttgtaaacgtggc

SEQ ID NO: 5232864 - DNA, 25 bp, Homo sapien
ttttaacttctcacacctgtggtta

SEQ ID NO: 5232865 - DNA, 25 bp, Homo sapien
tctcacacctgtggttaatgagtaa

SEQ ID NO: 5232866 - DNA, 25 bp, Homo sapien
agggctgcccgcagggaagtttatt

SEQ ID NO: 5232867 - DNA, 25 bp, Homo sapien
agaggagaggatgatagtgcttacc

SEQ ID NO: 5232868 - DNA, 25 bp, Homo sapien
gacttcgtgactacttaaatgtgca

SEQ ID NO: 5232869 - DNA, 25 bp, Homo sapien
tgaaacacttagtactggatctggt

SEQ ID NO: 5232870 - DNA, 25 bp, Homo sapien
gtgcatgcatgtaagcagtgcctta

SEQ ID NO: 5232871 - DNA, 25 bp, Homo sapien
gccccgcagttcacagggtcaggcc

SEQ ID NO: 5232872 - DNA, 25 bp, Homo sapien
actgaagccagaacaaggagggagt

SEQ ID NO: 5232873 - DNA, 25 bp, Homo sapien
agccccgcagttcacagggtcaggc

SEQ ID NO: 5232874 - DNA, 25 bp, Homo sapien
aagccagaacaaggagggagtgggc

SEQ ID NO: 5232875 - DNA, 25 bp, Homo sapien
acccaaagccatcagtgccactgtc

SEQ ID NO: 5232876 - DNA, 25 bp, Homo sapien
agccatcagtgccactgtcaagcat

SEQ ID NO: 5232877 - DNA, 25 bp, Homo sapien
caaagccatcagtgccactgtcaag

SEQ ID NO: 5232878 - DNA, 25 bp, Homo sapien
ccaaagccatcagtgccactgtcaa

SEQ ID NO: 5232879 - DNA, 25 bp, Homo sapien
ttggtgtttgccaacaggcagaata

SEQ ID NO: 5232880 - DNA, 25 bp, Homo sapien
ggtctcggtctggttcactgctaca

SEQ ID NO: 5232881 - DNA, 25 bp, Homo sapien
aattcttctaggagaccttcgccac

SEQ ID NO: 5232882 - DNA, 25 bp, Homo sapien
caccaggaagtgagctccaatccag

SEQ ID NO: 5232883 - DNA, 25 bp, Homo sapien
tatacccagcggatcagggtctcgg

SEQ ID NO: 5232884 - DNA, 25 bp, Homo sapien
tcaacatactcccagcagggatgca

SEQ ID NO: 5232885 - DNA, 25 bp, Homo sapien
gcagtatagtaaattctgttcattt

SEQ ID NO: 5232886 - DNA, 25 bp, Homo sapien
tactcatgtaacaaattaaatcttg

SEQ ID NO: 5232887 - DNA, 25 bp, Homo sapien
caaaggccttccaggccagatagct

SEQ ID NO: 5232888 - DNA, 25 bp, Homo sapien
tgcagaaaaccattggtcgtcttgc

SEQ ID NO: 5232889 - DNA, 25 bp, Homo sapien
ttgtgcagaaaaccattggtcgtct

SEQ ID NO: 5232890 - DNA, 25 bp, Homo sapien
cagaaaaccattggtcgtcttgccc

SEQ ID NO: 5232891 - DNA, 25 bp, Homo sapien
gaaaaccattggtcgtcttgcccat

SEQ ID NO: 5232892 - DNA, 25 bp, Homo sapien
ctggcataactgcctcgttaggatt

SEQ ID NO: 5232893 - DNA, 25 bp, Homo sapien
gcataactgcctcgttaggattcag

SEQ ID NO: 5232894 - DNA, 25 bp, Homo sapien
cataactgcctcgttaggattcagc

SEQ ID NO: 5232895 - DNA, 25 bp, Homo sapien
ggcataactgcctcgttaggattca

SEQ ID NO: 5232896 - DNA, 25 bp, Homo sapien
ggctggagttctccccgaggcaata

SEQ ID NO: 5232897 - DNA, 25 bp, Homo sapien
ggagttctccccgaggcaatacagt

SEQ ID NO: 5232898 - DNA, 25 bp, Homo sapien
ttctccccgaggcaatacagtgtct

SEQ ID NO: 5232899 - DNA, 25 bp, Homo sapien
tccccgaggcaatacagtgtctgtc

SEQ ID NO: 5232900 - DNA, 25 bp, Homo sapien
catcattcatcaaagcttcagactg

SEQ ID NO: 5232901 - DNA, 25 bp, Homo sapien
cttcagactgagagggaatttgtac

SEQ ID NO: 5232902 - DNA, 25 bp, Homo sapien
ttcaaagtgagtaataccgcatcct

SEQ ID NO: 5232903 - DNA, 25 bp, Homo sapien
aagtgagtaataccgcatcctcttc

SEQ ID NO: 5232904 - DNA, 25 bp, Homo sapien
caaccattaaacaggaaacccaatg

SEQ ID NO: 5232905 - DNA, 25 bp, Homo sapien
atggcaagggagccttacctatttt

SEQ ID NO: 5232906 - DNA, 25 bp, Homo sapien
attaaacaggaaacccaatggcaag

SEQ ID NO: 5232907 - DNA, 25 bp, Homo sapien
ggcaagggagccttacctattttca

SEQ ID NO: 5232908 - DNA, 25 bp, Homo sapien
tctgaagctccgacttcctgcaggg

SEQ ID NO: 5232909 - DNA, 25 bp, Homo sapien
ggaacaaagccaatcctcagcgact

SEQ ID NO: 5232910 - DNA, 25 bp, Homo sapien
ggaaagaatagacccagatggcagg

SEQ ID NO: 5232911 - DNA, 25 bp, Homo sapien
tgggataacaaacaccgtgaccttg

SEQ ID NO: 5232912 - DNA, 25 bp, Homo sapien
tcagcaatttagatggagttcggtg

SEQ ID NO: 5232913 - DNA, 25 bp, Homo sapien
tgtcagccttgcaattagctagggc

SEQ ID NO: 5232914 - DNA, 25 bp, Homo sapien
tttgctctacttgacatcagctggg

SEQ ID NO: 5232915 - DNA, 25 bp, Homo sapien
caaaaatgatagttgctgctggctg

SEQ ID NO: 5232916 - DNA, 25 bp, Homo sapien
tggattttatattgtcttggccacc

SEQ ID NO: 5232917 - DNA, 25 bp, Homo sapien
aatggattttatattgtcttggcca

SEQ ID NO: 5232918 - DNA, 25 bp, Homo sapien
gaaatggattttatattgtcttggc

SEQ ID NO: 5232919 - DNA, 25 bp, Homo sapien
aaatggattttatattgtcttggcc

SEQ ID NO: 5232920 - DNA, 25 bp, Homo sapien
aaaatgcgatgtttccaatgtagga

SEQ ID NO: 5232921 - DNA, 25 bp, Homo sapien
attcacagccaacctgcttggcaaa

SEQ ID NO: 5232922 - DNA, 25 bp, Homo sapien
ggcaaattggcgtttgaaaatgcga

SEQ ID NO: 5232923 - DNA, 25 bp, Homo sapien
gagtcagcctcacatcgacaagcag

SEQ ID NO: 5232924 - DNA, 25 bp, Homo sapien
gcctccatgagatatgctcctttca

SEQ ID NO: 5232925 - DNA, 25 bp, Homo sapien
tatgctcctttcaaggaaggtgttt

SEQ ID NO: 5232926 - DNA, 25 bp, Homo sapien
gatgctgcctccatgagatatgctc

SEQ ID NO: 5232927 - DNA, 25 bp, Homo sapien
tgctcctttcaaggaaggtgtttcc

SEQ ID NO: 5232928 - DNA, 25 bp, Homo sapien
gagctgagtcaaaaggatgtccatg

SEQ ID NO: 5232929 - DNA, 25 bp, Homo sapien
caggtattgaagcttgagctgagtc

SEQ ID NO: 5232930 - DNA, 25 bp, Homo sapien
tgtccatgcagtagttggcccaata

SEQ ID NO: 5232931 - DNA, 25 bp, Homo sapien
catgcagtagttggcccaatatggg

SEQ ID NO: 5232932 - DNA, 25 bp, Homo sapien
tgacatttttcttggggaatgatgg

SEQ ID NO: 5232933 - DNA, 25 bp, Homo sapien
cctgacatttttcttggggaatgat

SEQ ID NO: 5232934 - DNA, 25 bp, Homo sapien
gacatttttcttggggaatgatggc

SEQ ID NO: 5232935 - DNA, 25 bp, Homo sapien
gcctgacatttttcttggggaatga

SEQ ID NO: 5232936 - DNA, 25 bp, Homo sapien
tagtgggtgatgagcacgtacagcc

SEQ ID NO: 5232937 - DNA, 25 bp, Homo sapien
cctggatgggataaggagcacctgt

SEQ ID NO: 5232938 - DNA, 25 bp, Homo sapien
cagccgctcactgtgggtaatgaac

SEQ ID NO: 5232939 - DNA, 25 bp, Homo sapien
ccacggcgggtgacatacatgcaca

SEQ ID NO: 5232940 - DNA, 25 bp, Homo sapien
gaatgactttcatgtcggatgtcac

SEQ ID NO: 5232941 - DNA, 25 bp, Homo sapien
taaggtattattcccctgctgctcc

SEQ ID NO: 5232942 - DNA, 25 bp, Homo sapien
cggatgtcactcttcttgtcctcaa

SEQ ID NO: 5232943 - DNA, 25 bp, Homo sapien
caaagtgcggttcccatgtgccgca

SEQ ID NO: 5232944 - DNA, 25 bp, Homo sapien
tgggactgagatcgtacggtatgaa

SEQ ID NO: 5232945 - DNA, 25 bp, Homo sapien
tttatgggactgagatcgtacggta

SEQ ID NO: 5232946 - DNA, 25 bp, Homo sapien
gatcgtacggtatgaatcatgattt

SEQ ID NO: 5232947 - DNA, 25 bp, Homo sapien
gactgagatcgtacggtatgaatca

SEQ ID NO: 5232948 - DNA, 25 bp, Homo sapien
gaggatggattgaatggcaaagagg

SEQ ID NO: 5232949 - DNA, 25 bp, Homo sapien
ggtagaggatggattgaatggcaaa

SEQ ID NO: 5232950 - DNA, 25 bp, Homo sapien
aggtagaggatggattgaatggcaa

SEQ ID NO: 5232951 - DNA, 25 bp, Homo sapien
gcaacaccttgtctgtttgagggga

SEQ ID NO: 5232952 - DNA, 25 bp, Homo sapien
aatgggctgctagtgcttctacatc

SEQ ID NO: 5232953 - DNA, 25 bp, Homo sapien
gctgctagtgcttctacatctggaa

SEQ ID NO: 5232954 - DNA, 25 bp, Homo sapien
gaaaatgggctgctagtgcttctac

SEQ ID NO: 5232955 - DNA, 25 bp, Homo sapien
gggtgcacaacaagatttgtaatta

SEQ ID NO: 5232956 - DNA, 25 bp, Homo sapien
caaacctctgtaaggggtgcacaac

SEQ ID NO: 5232957 - DNA, 25 bp, Homo sapien
tgccatccccagagtttggtgaaga

SEQ ID NO: 5232958 - DNA, 25 bp, Homo sapien
taattacgactttgccatccccaga

SEQ ID NO: 5232959 - DNA, 25 bp, Homo sapien
gttctccggttcttgtagacatgtg

SEQ ID NO: 5232960 - DNA, 25 bp, Homo sapien
catgcttcacaaggatactcaggcc

SEQ ID NO: 5232961 - DNA, 25 bp, Homo sapien
tgtgtgagggtcagacaacttcttt

SEQ ID NO: 5232962 - DNA, 25 bp, Homo sapien
cacaaggatacagcggcatgcttca

SEQ ID NO: 5232963 - DNA, 25 bp, Homo sapien
gacactactatttgagcacaagttg

SEQ ID NO: 5232964 - DNA, 25 bp, Homo sapien
ctactatttgagcacaagttgcaag

SEQ ID NO: 5232965 - DNA, 25 bp, Homo sapien
atgacactactatttgagcacaagt

SEQ ID NO: 5232966 - DNA, 25 bp, Homo sapien
cactactatttgagcacaagttgca

SEQ ID NO: 5232967 - DNA, 25 bp, Homo sapien
caatattgaagaagagtcactgcct

SEQ ID NO: 5232968 - DNA, 25 bp, Homo sapien
tgagtaagggctaatcggaccaaga

SEQ ID NO: 5232969 - DNA, 25 bp, Homo sapien
gaagtttcgccaagtgtcagatgcc

SEQ ID NO: 5232970 - DNA, 25 bp, Homo sapien
tagtaccaacattgtccaccgggcg

SEQ ID NO: 5232971 - DNA, 25 bp, Homo sapien
tttagttcctaagcctctgcctagg

SEQ ID NO: 5232972 - DNA, 25 bp, Homo sapien
ccaaggcacgggaaggagtgtactc

SEQ ID NO: 5232973 - DNA, 25 bp, Homo sapien
tatagctctcttattgaggaactcc

SEQ ID NO: 5232974 - DNA, 25 bp, Homo sapien
tctgcctaggaaacaaggtcacagg

SEQ ID NO: 5232975 - DNA, 25 bp, Homo sapien
tgaccgtaatagagccagactctgg

SEQ ID NO: 5232976 - DNA, 25 bp, Homo sapien
caagatcaattgtggatgaccgtaa

SEQ ID NO: 5232977 - DNA, 25 bp, Homo sapien
aaaacatattctccaaggcttccag

SEQ ID NO: 5232978 - DNA, 25 bp, Homo sapien
tccttttaatcagaaggtgcacgag

SEQ ID NO: 5232979 - DNA, 25 bp, Homo sapien
cctccaaatgaggttagcattctgg

SEQ ID NO: 5232980 - DNA, 25 bp, Homo sapien
cattctgggctgatactatctaaga

SEQ ID NO: 5232981 - DNA, 25 bp, Homo sapien
gagaaaaacagacctacttacaagc

SEQ ID NO: 5232982 - DNA, 25 bp, Homo sapien
gagagatcaataaacaaccctgagc

SEQ ID NO: 5232983 - DNA, 25 bp, Homo sapien
ttgatgttacttgtggctcacagca

SEQ ID NO: 5232984 - DNA, 25 bp, Homo sapien
cacttaaagttccttaggatgtctc

SEQ ID NO: 5232985 - DNA, 25 bp, Homo sapien
tccttaggatgtctcaaattcttga

SEQ ID NO: 5232986 - DNA, 25 bp, Homo sapien
taagtgcggttcttcatccctgtct

SEQ ID NO: 5232987 - DNA, 25 bp, Homo sapien
catatattttttagctgaccaattt

SEQ ID NO: 5232988 - DNA, 25 bp, Homo sapien
tcatatatctccatgctgggtttaa

SEQ ID NO: 5232989 - DNA, 25 bp, Homo sapien
tatatctccatgctgggtttaatct

SEQ ID NO: 5232990 - DNA, 25 bp, Homo sapien
attcatatatctccatgctgggttt

SEQ ID NO: 5232991 - DNA, 25 bp, Homo sapien
tataaatccttcactcggtgcaagc

SEQ ID NO: 5232992 - DNA, 25 bp, Homo sapien
tagctttgtgttatctcctataatc

SEQ ID NO: 5232993 - DNA, 25 bp, Homo sapien
taatctttataaatccttcactcgg

SEQ ID NO: 5232994 - DNA, 25 bp, Homo sapien
tcggtgcaagcttcctgccgaatct

SEQ ID NO: 5232995 - DNA, 25 bp, Homo sapien
tgtggtgtgggtcctccatgacagc

SEQ ID NO: 5232996 - DNA, 25 bp, Homo sapien
tctggtagatgaatggttcccaagc

SEQ ID NO: 5232997 - DNA, 25 bp, Homo sapien
gaagtcatgtgaccctctggtagat

SEQ ID NO: 5232998 - DNA, 25 bp, Homo sapien
caggtggcccctagaagagtcattt

SEQ ID NO: 5232999 - DNA, 25 bp, Homo sapien
tcagggtgtacctggcgaaggctac

SEQ ID NO: 5233000 - DNA, 25 bp, Homo sapien
gttctgagattgtcagggtgtacct

SEQ ID NO: 5233001 - DNA, 25 bp, Homo sapien
gctacaggatttcccacaaagctgg

SEQ ID NO: 5233002 - DNA, 25 bp, Homo sapien
gaacttgtcttctatccacacgtga

SEQ ID NO: 5233003 - DNA, 25 bp, Homo sapien
cacaaagtaattagatgtcaggata

SEQ ID NO: 5233004 - DNA, 25 bp, Homo sapien
tgccattacaatcattcacaaagta

SEQ ID NO: 5233005 - DNA, 25 bp, Homo sapien
gtggcgtgggtatctcacatggaac

SEQ ID NO: 5233006 - DNA, 25 bp, Homo sapien
ttttaaagtggcgtgggtatctcac

SEQ ID NO: 5233007 - DNA, 25 bp, Homo sapien
cagagccttcctaatatccagtggc

SEQ ID NO: 5233008 - DNA, 25 bp, Homo sapien
acccagagccttcctaatatccagt

SEQ ID NO: 5233009 - DNA, 25 bp, Homo sapien
gccttcctaatatccagtggctgtg

SEQ ID NO: 5233010 - DNA, 25 bp, Homo sapien
gagccttcctaatatccagtggctg

SEQ ID NO: 5233011 - DNA, 25 bp, Homo sapien
gaagatgtctaagctgaggacccac

SEQ ID NO: 5233012 - DNA, 25 bp, Homo sapien
gagtagccagtcttctaagtttcca

SEQ ID NO: 5233013 - DNA, 25 bp, Homo sapien
cacagtgatcactcaaaagtttgac

SEQ ID NO: 5233014 - DNA, 25 bp, Homo sapien
gcaatcatacacaaggagtagccag

SEQ ID NO: 5233015 - DNA, 25 bp, Homo sapien
tcctttggagcgaagtgctgagcta

SEQ ID NO: 5233016 - DNA, 25 bp, Homo sapien
gtctgaagtcccctttcggatcctg

SEQ ID NO: 5233017 - DNA, 25 bp, Homo sapien
tgaagtctccaaagagctgctggtg

SEQ ID NO: 5233018 - DNA, 25 bp, Homo sapien
tgggaggaaggaacattgaagtctc

SEQ ID NO: 5233019 - DNA, 25 bp, Homo sapien
gaaatggctgccctttagaacttgg

SEQ ID NO: 5233020 - DNA, 25 bp, Homo sapien
aattgattgggcttggacacagacc

SEQ ID NO: 5233021 - DNA, 25 bp, Homo sapien
cacagaccctagcacttgagtacct

SEQ ID NO: 5233022 - DNA, 25 bp, Homo sapien
catcatgtaaggtggcagtctgcta

SEQ ID NO: 5233023 - DNA, 25 bp, Homo sapien
taacagcagtgtacacccggtggaa

SEQ ID NO: 5233024 - DNA, 25 bp, Homo sapien
gaaaactcctattcatggcatggca

SEQ ID NO: 5233025 - DNA, 25 bp, Homo sapien
gacagtatctatgggtgcagtacca

SEQ ID NO: 5233026 - DNA, 25 bp, Homo sapien
catctggcattgtgttgggacgtcc

SEQ ID NO: 5233027 - DNA, 25 bp, Homo sapien
tgccgtggctgtgacataacttgac

SEQ ID NO: 5233028 - DNA, 25 bp, Homo sapien
tctaaccctgcatagtcaattatgg

SEQ ID NO: 5233029 - DNA, 25 bp, Homo sapien
tggtatgcatatgaggctccactgt

SEQ ID NO: 5233030 - DNA, 25 bp, Homo sapien
tgtgcaggcgggtcaagcacctctt

SEQ ID NO: 5233031 - DNA, 25 bp, Homo sapien
gcttttgacaccttgaagacaccaa

SEQ ID NO: 5233032 - DNA, 25 bp, Homo sapien
ttgcagtatatgctctccaaagcta

SEQ ID NO: 5233033 - DNA, 25 bp, Homo sapien
agtccctgatttagctgaaggttgc

SEQ ID NO: 5233034 - DNA, 25 bp, Homo sapien
gtaagacaacttctgtgccatagag

SEQ ID NO: 5233035 - DNA, 25 bp, Homo sapien
tacatagcccagggggctttctttg

SEQ ID NO: 5233036 - DNA, 25 bp, Homo sapien
ctacatagcccagggggctttcttt

SEQ ID NO: 5233037 - DNA, 25 bp, Homo sapien
catagcccagggggctttctttgtt

SEQ ID NO: 5233038 - DNA, 25 bp, Homo sapien
acatagcccagggggctttctttgt

SEQ ID NO: 5233039 - DNA, 25 bp, Homo sapien
ttaaacaataggtctgatgccagct

SEQ ID NO: 5233040 - DNA, 25 bp, Homo sapien
tctgagcacacgctgaaatgtccat

SEQ ID NO: 5233041 - DNA, 25 bp, Homo sapien
taagtcaattgtggaaactccccac

SEQ ID NO: 5233042 - DNA, 25 bp, Homo sapien
catggatctagcacagcccaaaagc

SEQ ID NO: 5233043 - DNA, 25 bp, Homo sapien
tcctgtggtgtgaggtctgagcaca

SEQ ID NO: 5233044 - DNA, 25 bp, Homo sapien
aaggccctctaagcacaggaggatg

SEQ ID NO: 5233045 - DNA, 25 bp, Homo sapien
caaattccaaccttgctttatccca

SEQ ID NO: 5233046 - DNA, 25 bp, Homo sapien
cctctaagcacaggaggatggcctg

SEQ ID NO: 5233047 - DNA, 25 bp, Homo sapien
gcaggcaaattccaaccttgcttta

SEQ ID NO: 5233048 - DNA, 25 bp, Homo sapien
tatggtggggagttgtgagccaaag

SEQ ID NO: 5233049 - DNA, 25 bp, Homo sapien
tgtacaggtggtgcctgtatggtgg

SEQ ID NO: 5233050 - DNA, 25 bp, Homo sapien
agttgtgagccaaagggagaagaca

SEQ ID NO: 5233051 - DNA, 25 bp, Homo sapien
gaagacaaagtgacacaggtgacag

SEQ ID NO: 5233052 - DNA, 25 bp, Homo sapien
tcttgccagaacagttgagctgctg

SEQ ID NO: 5233053 - DNA, 25 bp, Homo sapien
ctcttgccagaacagttgagctgct

SEQ ID NO: 5233054 - DNA, 25 bp, Homo sapien
gctcttgccagaacagttgagctgc

SEQ ID NO: 5233055 - DNA, 25 bp, Homo sapien
accaaattgagctttggaagacaga

SEQ ID NO: 5233056 - DNA, 25 bp, Homo sapien
gccattagagcaatagccatgagaa

SEQ ID NO: 5233057 - DNA, 25 bp, Homo sapien
actgccagaaatgagcgggtgacaa

SEQ ID NO: 5233058 - DNA, 25 bp, Homo sapien
aatcacttttgagccttcctcgagg

SEQ ID NO: 5233059 - DNA, 25 bp, Homo sapien
agggcttttgtcttggcaccactgc

SEQ ID NO: 5233060 - DNA, 25 bp, Homo sapien
aaagtcagatctttcccatggttgg

SEQ ID NO: 5233061 - DNA, 25 bp, Homo sapien
tgaacaccgggagacaggaatcaca

SEQ ID NO: 5233062 - DNA, 25 bp, Homo sapien
tgtggaaagggtctaaaccaggctg

SEQ ID NO: 5233063 - DNA, 25 bp, Homo sapien
cactttggagactggctactaggca

SEQ ID NO: 5233064 - DNA, 25 bp, Homo sapien
catctgggttgcatcatctgaagcc

SEQ ID NO: 5233065 - DNA, 25 bp, Homo sapien
cacatggctgttgacgggaagtctc

SEQ ID NO: 5233066 - DNA, 25 bp, Homo sapien
tcctcaagtcatggtagctggcttc

SEQ ID NO: 5233067 - DNA, 25 bp, Homo sapien
gaatctaggcgtggtttcactgggt

SEQ ID NO: 5233068 - DNA, 25 bp, Homo sapien
caggaggcctgcttgtagagttgtt

SEQ ID NO: 5233069 - DNA, 25 bp, Homo sapien
tttagaccttgagtatgaataattc

SEQ ID NO: 5233070 - DNA, 25 bp, Homo sapien
atgaataattctgcatagcctgagg

SEQ ID NO: 5233071 - DNA, 25 bp, Homo sapien
ttttccttcgtgctgatgttcctct

SEQ ID NO: 5233072 - DNA, 25 bp, Homo sapien
cttgttctggctgccttgggtgaat

SEQ ID NO: 5233073 - DNA, 25 bp, Homo sapien
tgttctggctgccttgggtgaatat

SEQ ID NO: 5233074 - DNA, 25 bp, Homo sapien
ttctggctgccttgggtgaatatgc

SEQ ID NO: 5233075 - DNA, 25 bp, Homo sapien
ctggctgccttgggtgaatatgcat

SEQ ID NO: 5233076 - DNA, 25 bp, Homo sapien
ctcatctggtttggggtgaaggccc

SEQ ID NO: 5233077 - DNA, 25 bp, Homo sapien
catctggtttggggtgaaggcccat

SEQ ID NO: 5233078 - DNA, 25 bp, Homo sapien
aaggctcatctggtttggggtgaag

SEQ ID NO: 5233079 - DNA, 25 bp, Homo sapien
ggctcatctggtttggggtgaaggc

SEQ ID NO: 5233080 - DNA, 25 bp, Homo sapien
gaaagactcgagcccagtgggtgca

SEQ ID NO: 5233081 - DNA, 25 bp, Homo sapien
gactcgagcccagtgggtgcaaaat

SEQ ID NO: 5233082 - DNA, 25 bp, Homo sapien
agtgggtgcaaaataccgactatcc

SEQ ID NO: 5233083 - DNA, 25 bp, Homo sapien
gggtgcaaaataccgactatccata

SEQ ID NO: 5233084 - DNA, 25 bp, Homo sapien
tctgcaaggacgatcagagcagagc

SEQ ID NO: 5233085 - DNA, 25 bp, Homo sapien
gcagcttctttccagcgtctttgag

SEQ ID NO: 5233086 - DNA, 25 bp, Homo sapien
gactgccacttggtgccctgtatgg

SEQ ID NO: 5233087 - DNA, 25 bp, Homo sapien
gaaaatttttatgtcgcacgatctg

SEQ ID NO: 5233088 - DNA, 25 bp, Homo sapien
gtggtatggagggagaatgggcgat

SEQ ID NO: 5233089 - DNA, 25 bp, Homo sapien
gaggcctgacattcctgccttctta

SEQ ID NO: 5233090 - DNA, 25 bp, Homo sapien
atctgggcgtatatacgtgcaagtc

SEQ ID NO: 5233091 - DNA, 25 bp, Homo sapien
gccatctgggcgtatatacgtgcaa

SEQ ID NO: 5233092 - DNA, 25 bp, Homo sapien
tataatctgagatatgccggatagc

SEQ ID NO: 5233093 - DNA, 25 bp, Homo sapien
tatgccggatagctgcctctactgc

SEQ ID NO: 5233094 - DNA, 25 bp, Homo sapien
ctctactgcattccaggttgctagt

SEQ ID NO: 5233095 - DNA, 25 bp, Homo sapien
actgcattccaggttgctagtgtca

SEQ ID NO: 5233096 - DNA, 25 bp, Homo sapien
gttctgtagcatgccaaattgtgtt

SEQ ID NO: 5233097 - DNA, 25 bp, Homo sapien
tctagttctgtagcatgccaaattg

SEQ ID NO: 5233098 - DNA, 25 bp, Homo sapien
tagttctgtagcatgccaaattgtg

SEQ ID NO: 5233099 - DNA, 25 bp, Homo sapien
ttctctagttctgtagcatgccaaa

SEQ ID NO: 5233100 - DNA, 25 bp, Homo sapien
gtaaaccttcagatttttgctggca

SEQ ID NO: 5233101 - DNA, 25 bp, Homo sapien
cagtaaaccttcagatttttgctgg

SEQ ID NO: 5233102 - DNA, 25 bp, Homo sapien
taaaccttcagatttttgctggcac

SEQ ID NO: 5233103 - DNA, 25 bp, Homo sapien
aaaccttcagatttttgctggcact

SEQ ID NO: 5233104 - DNA, 25 bp, Homo sapien
acttgtcaagagatcatggttcatg

SEQ ID NO: 5233105 - DNA, 25 bp, Homo sapien
aatgagctttttggtagcgtccaca

SEQ ID NO: 5233106 - DNA, 25 bp, Homo sapien
tatttcataggcgagatccgtgttc

SEQ ID NO: 5233107 - DNA, 25 bp, Homo sapien
gccacttaagcaaggaacttgtcaa

SEQ ID NO: 5233108 - DNA, 25 bp, Homo sapien
actccctttaggtcaatgaatggat

SEQ ID NO: 5233109 - DNA, 25 bp, Homo sapien
ctactccctttaggtcaatgaatgg

SEQ ID NO: 5233110 - DNA, 25 bp, Homo sapien
ccctactccctttaggtcaatgaat

SEQ ID NO: 5233111 - DNA, 25 bp, Homo sapien
caatgaatggatcacagccctgctg

SEQ ID NO: 5233112 - DNA, 25 bp, Homo sapien
ctagagagagggcaaatgctgacat

SEQ ID NO: 5233113 - DNA, 25 bp, Homo sapien
gaaactagagagagggcaaatgctg

SEQ ID NO: 5233114 - DNA, 25 bp, Homo sapien
aactagagagagggcaaatgctgac

SEQ ID NO: 5233115 - DNA, 25 bp, Homo sapien
ggaaactagagagagggcaaatgct

SEQ ID NO: 5233116 - DNA, 25 bp, Homo sapien
gttttgaagtgatggttggggaata

SEQ ID NO: 5233117 - DNA, 25 bp, Homo sapien
tgaagtgatggttggggaataaaaa

SEQ ID NO: 5233118 - DNA, 25 bp, Homo sapien
ctgttttgaagtgatggttggggaa

SEQ ID NO: 5233119 - DNA, 25 bp, Homo sapien
tttgaagtgatggttggggaataaa

SEQ ID NO: 5233120 - DNA, 25 bp, Homo sapien
ttctcccagctacagtaagttgaga

SEQ ID NO: 5233121 - DNA, 25 bp, Homo sapien
cttctcccagctacagtaagttgag

SEQ ID NO: 5233122 - DNA, 25 bp, Homo sapien
atcatctgagaaatactgccagagg

SEQ ID NO: 5233123 - DNA, 25 bp, Homo sapien
tctgagaaatactgccagaggcttg

SEQ ID NO: 5233124 - DNA, 25 bp, Homo sapien
ttggagttggagcagcctcatcatc

SEQ ID NO: 5233125 - DNA, 25 bp, Homo sapien
tggtctttcccacgttggagttgga

SEQ ID NO: 5233126 - DNA, 25 bp, Homo sapien
tttctaaataggccagttcagtgct

SEQ ID NO: 5233127 - DNA, 25 bp, Homo sapien
catttcctgcgtattgtgcttgtga

SEQ ID NO: 5233128 - DNA, 25 bp, Homo sapien
cctgcgtattgtgcttgtgatggtc

SEQ ID NO: 5233129 - DNA, 25 bp, Homo sapien
ttcctgcgtattgtgcttgtgatgg

SEQ ID NO: 5233130 - DNA, 25 bp, Homo sapien
cgtattgtgcttgtgatggtcaaaa

SEQ ID NO: 5233131 - DNA, 25 bp, Homo sapien
gaaccttgctgtcacagcaacgcat

SEQ ID NO: 5233132 - DNA, 25 bp, Homo sapien
caagttggggccctccaggagaaag

SEQ ID NO: 5233133 - DNA, 25 bp, Homo sapien
ccatatccagaaccttgctgtcaca

SEQ ID NO: 5233134 - DNA, 25 bp, Homo sapien
ataggaaggatggacaacaagttgg

SEQ ID NO: 5233135 - DNA, 25 bp, Homo sapien
aatagctgacagcttcgtactgatc

SEQ ID NO: 5233136 - DNA, 25 bp, Homo sapien
taacctccaaattgctcaataaaaa

SEQ ID NO: 5233137 - DNA, 25 bp, Homo sapien
gctgacagcttcgtactgatcagtt

SEQ ID NO: 5233138 - DNA, 25 bp, Homo sapien
aaaaaatagctgacagcttcgtact

SEQ ID NO: 5233139 - DNA, 25 bp, Homo sapien
aaatcctgttgataatgttgcagtt

SEQ ID NO: 5233140 - DNA, 25 bp, Homo sapien
cctgttgataatgttgcagttcaca

SEQ ID NO: 5233141 - DNA, 25 bp, Homo sapien
gcactacttttagtctgaccccacg

SEQ ID NO: 5233142 - DNA, 25 bp, Homo sapien
caccagcactacttttagtctgacc

SEQ ID NO: 5233143 - DNA, 25 bp, Homo sapien
atgggctgctgtcacccgctctctg

SEQ ID NO: 5233144 - DNA, 25 bp, Homo sapien
caccatgggctgctgtcacccgctc

SEQ ID NO: 5233145 - DNA, 25 bp, Homo sapien
tgctgtcacccgctctctgatgctg

SEQ ID NO: 5233146 - DNA, 25 bp, Homo sapien
gggctgctgtcacccgctctctgat

SEQ ID NO: 5233147 - DNA, 25 bp, Homo sapien
gaaagcttgcaattactgaataaga

SEQ ID NO: 5233148 - DNA, 25 bp, Homo sapien
aggaggctgcttcgtagccacgagc

SEQ ID NO: 5233149 - DNA, 25 bp, Homo sapien
agcttgcaattactgaataagaaca

SEQ ID NO: 5233150 - DNA, 25 bp, Homo sapien
ttcgtagccacgagcaggtcagatc

SEQ ID NO: 5233151 - DNA, 25 bp, Homo sapien
gaagtcagctgtccaaaattcacaa

SEQ ID NO: 5233152 - DNA, 25 bp, Homo sapien
ggagggaagctctttataagaagtc

SEQ ID NO: 5233153 - DNA, 25 bp, Homo sapien
tgggctttaggcccaacgcgtagga

SEQ ID NO: 5233154 - DNA, 25 bp, Homo sapien
ccagaggtgcatgagtgctgtccca

SEQ ID NO: 5233155 - DNA, 25 bp, Homo sapien
gattgggcagattggcacacctcat

SEQ ID NO: 5233156 - DNA, 25 bp, Homo sapien
gattcccattgcaaggctggtgctt

SEQ ID NO: 5233157 - DNA, 25 bp, Homo sapien
tgcagtttgcaaagccggtagctcc

SEQ ID NO: 5233158 - DNA, 25 bp, Homo sapien
tactgaaggaaagtgccctggctgg

SEQ ID NO: 5233159 - DNA, 25 bp, Homo sapien
ggcccagatggcctgacttttttcc

SEQ ID NO: 5233160 - DNA, 25 bp, Homo sapien
cagatggcctgacttttttcccagc

SEQ ID NO: 5233161 - DNA, 25 bp, Homo sapien
cagaccggggcccagatggcctgac

SEQ ID NO: 5233162 - DNA, 25 bp, Homo sapien
cggggcccagatggcctgacttttt

SEQ ID NO: 5233163 - DNA, 25 bp, Homo sapien
ccttggttccttatgggatgttttg

SEQ ID NO: 5233164 - DNA, 25 bp, Homo sapien
agtgccaagaattcgggtgtcctac

SEQ ID NO: 5233165 - DNA, 25 bp, Homo sapien
caaatcttcggagacacctgagacc

SEQ ID NO: 5233166 - DNA, 25 bp, Homo sapien
ttttgccgaaaagcacaaatcttcg

SEQ ID NO: 5233167 - DNA, 25 bp, Homo sapien
ctggacgctggcgcggtggccgcgc

SEQ ID NO: 5233168 - DNA, 25 bp, Homo sapien
gcgccccagcctcgatcgctcgccg

SEQ ID NO: 5233169 - DNA, 25 bp, Homo sapien
gccgcggcgactcggccccaggctt

SEQ ID NO: 5233170 - DNA, 25 bp, Homo sapien
gctgagggactggctgagaaccgtg

SEQ ID NO: 5233171 - DNA, 25 bp, Homo sapien
cagcaaaatattcctataccaccgt

SEQ ID NO: 5233172 - DNA, 25 bp, Homo sapien
caccaaacaccaaatgtattacagc

SEQ ID NO: 5233173 - DNA, 25 bp, Homo sapien
tggtggtggcacagcattatctgtt

SEQ ID NO: 5233174 - DNA, 25 bp, Homo sapien
gagagcttcgaactctactgggtaa

SEQ ID NO: 5233175 - DNA, 25 bp, Homo sapien
caataggaaatatcttgaaatcccc

SEQ ID NO: 5233176 - DNA, 25 bp, Homo sapien
ccttcttgactgaggccaccctttg

SEQ ID NO: 5233177 - DNA, 25 bp, Homo sapien
tgctgaggttactgacctttctgct

SEQ ID NO: 5233178 - DNA, 25 bp, Homo sapien
gaggtcttcagttccgcaataggaa

SEQ ID NO: 5233179 - DNA, 25 bp, Homo sapien
tcagcattcacattgccttacagag

SEQ ID NO: 5233180 - DNA, 25 bp, Homo sapien
tccccactccaagataggtaggccc

SEQ ID NO: 5233181 - DNA, 25 bp, Homo sapien
cctccccactccaagataggtaggc

SEQ ID NO: 5233182 - DNA, 25 bp, Homo sapien
ccccactccaagataggtaggccca

SEQ ID NO: 5233183 - DNA, 25 bp, Homo sapien
ggttagtttcagctttcaagcagcc

SEQ ID NO: 5233184 - DNA, 25 bp, Homo sapien
cagccgtggctcagtctagtgagag

SEQ ID NO: 5233185 - DNA, 25 bp, Homo sapien
ttatcctggacaacactatttctga

SEQ ID NO: 5233186 - DNA, 25 bp, Homo sapien
tctagtgagaggcagtcctgcgttc

SEQ ID NO: 5233187 - DNA, 25 bp, Homo sapien
gatttccagtgctgctattctcctt

SEQ ID NO: 5233188 - DNA, 25 bp, Homo sapien
aggatttccagtgctgctattctcc

SEQ ID NO: 5233189 - DNA, 25 bp, Homo sapien
caggatttccagtgctgctattctc

SEQ ID NO: 5233190 - DNA, 25 bp, Homo sapien
ggatttccagtgctgctattctcct

SEQ ID NO: 5233191 - DNA, 25 bp, Homo sapien
tataaaggataaggccatgatgtcc

SEQ ID NO: 5233192 - DNA, 25 bp, Homo sapien
aaggataaggccatgatgtccacgg

SEQ ID NO: 5233193 - DNA, 25 bp, Homo sapien
ctataaaggataaggccatgatgtc

SEQ ID NO: 5233194 - DNA, 25 bp, Homo sapien
taaaggataaggccatgatgtccac

SEQ ID NO: 5233195 - DNA, 25 bp, Homo sapien
ccatttttgattcttgcccgattca

SEQ ID NO: 5233196 - DNA, 25 bp, Homo sapien
tcagtttcagaattggaagatgcaa

SEQ ID NO: 5233197 - DNA, 25 bp, Homo sapien
cagtttcagaattggaagatgcaaa

SEQ ID NO: 5233198 - DNA, 25 bp, Homo sapien
gattcttgcccgattcagtttcaga

SEQ ID NO: 5233199 - DNA, 25 bp, Homo sapien
ggctcaatcgattcttccacctcct

SEQ ID NO: 5233200 - DNA, 25 bp, Homo sapien
ttagatacttttggtaagatcaatt

SEQ ID NO: 5233201 - DNA, 25 bp, Homo sapien
caatttcttggtgaacaatggagga

SEQ ID NO: 5233202 - DNA, 25 bp, Homo sapien
tggtcaaatctaccttagatacttt

SEQ ID NO: 5233203 - DNA, 25 bp, Homo sapien
tggcacgctgtgcttgagaccaacc

SEQ ID NO: 5233204 - DNA, 25 bp, Homo sapien
ccgtaagttggagagattgaagtct

SEQ ID NO: 5233205 - DNA, 25 bp, Homo sapien
tacaatgcaacatccggaatgagga

SEQ ID NO: 5233206 - DNA, 25 bp, Homo sapien
tgcggcagatgaactgcaggccaac

SEQ ID NO: 5233207 - DNA, 25 bp, Homo sapien
agcaggcacgagtcattcccataca

SEQ ID NO: 5233208 - DNA, 25 bp, Homo sapien
ccaagtggccatcgtcaccggcggg

SEQ ID NO: 5233209 - DNA, 25 bp, Homo sapien
ctacctggcgcctggtttgctgcag

SEQ ID NO: 5233210 - DNA, 25 bp, Homo sapien
gcaggagctacctggcgcctggttt

SEQ ID NO: 5233211 - DNA, 25 bp, Homo sapien
gggccaagtggccatcgtcaccggc

SEQ ID NO: 5233212 - DNA, 25 bp, Homo sapien
acagccggcggggagcggttctgct

SEQ ID NO: 5233213 - DNA, 25 bp, Homo sapien
acctgcccagggaccgacgctggcg

SEQ ID NO: 5233214 - DNA, 25 bp, Homo sapien
gacgctggcggaggttgcggacagc

SEQ ID NO: 5233215 - DNA, 25 bp, Homo sapien
agggaccgacgctggcggaggttgc

SEQ ID NO: 5233216 - DNA, 25 bp, Homo sapien
tttttgaaatagagcacaccctgct

SEQ ID NO: 5233217 - DNA, 25 bp, Homo sapien
gtgaagtctcagtaggccagtccag

SEQ ID NO: 5233218 - DNA, 25 bp, Homo sapien
tactgggcaccataacacagacgag

SEQ ID NO: 5233219 - DNA, 25 bp, Homo sapien
ttctgtggaaaactgcaaccgcatc

SEQ ID NO: 5233220 - DNA, 25 bp, Homo sapien
aactatctagcaaatggtaaccagg

SEQ ID NO: 5233221 - DNA, 25 bp, Homo sapien
taagaatctataggtccagaccagg

SEQ ID NO: 5233222 - DNA, 25 bp, Homo sapien
ccagaccagggcataaatcatgtta

SEQ ID NO: 5233223 - DNA, 25 bp, Homo sapien
gtcattgggatcaaaccaagaggag

SEQ ID NO: 5233224 - DNA, 25 bp, Homo sapien
cttataaagagttggacttgtttga

SEQ ID NO: 5233225 - DNA, 25 bp, Homo sapien
gacgtctacctatgtcttataaaga

SEQ ID NO: 5233226 - DNA, 25 bp, Homo sapien
gagtaaactcacagttcacacatca

SEQ ID NO: 5233227 - DNA, 25 bp, Homo sapien
tatgcaaagatgtcccaaggatgca

SEQ ID NO: 5233228 - DNA, 25 bp, Homo sapien
tggattctgggcgtgactctttcct

SEQ ID NO: 5233229 - DNA, 25 bp, Homo sapien
gctggacctggccttctactgctgt

SEQ ID NO: 5233230 - DNA, 25 bp, Homo sapien
ggatagtctaggaaatcatctccct

SEQ ID NO: 5233231 - DNA, 25 bp, Homo sapien
ctcattgtctgagcggtagatgatg

SEQ ID NO: 5233232 - DNA, 25 bp, Homo sapien
cgaggcaagggcaatacgagatctt

SEQ ID NO: 5233233 - DNA, 25 bp, Homo sapien
tcccagttaaggtgacgtagcggct

SEQ ID NO: 5233234 - DNA, 25 bp, Homo sapien
gatcagcgtccagaggaccacatgg

SEQ ID NO: 5233235 - DNA, 25 bp, Homo sapien
tagtgccgtagtagaaagagacaac

SEQ ID NO: 5233236 - DNA, 25 bp, Homo sapien
tggagctcagcaccatacatcaggc

SEQ ID NO: 5233237 - DNA, 25 bp, Homo sapien
tacaggccaggtagacacaagtttc

SEQ ID NO: 5233238 - DNA, 25 bp, Homo sapien
gctactgatcgctgttggaggaaac

SEQ ID NO: 5233239 - DNA, 25 bp, Homo sapien
tcttgccaattagcgtgaacccagt

SEQ ID NO: 5233240 - DNA, 25 bp, Homo sapien
tataggacagccatcatgctcaccc

SEQ ID NO: 5233241 - DNA, 25 bp, Homo sapien
agccatcatgctcaccctttttctg

SEQ ID NO: 5233242 - DNA, 25 bp, Homo sapien
tttctgcaaaccatagcattcaaag

SEQ ID NO: 5233243 - DNA, 25 bp, Homo sapien
aatcattacatacatataggacagc

SEQ ID NO: 5233244 - DNA, 25 bp, Homo sapien
cactccttggtcacgttgctatccg

SEQ ID NO: 5233245 - DNA, 25 bp, Homo sapien
ggtcacgttgctatccgtgtcaaaa

SEQ ID NO: 5233246 - DNA, 25 bp, Homo sapien
cttggtcacgttgctatccgtgtca

SEQ ID NO: 5233247 - DNA, 25 bp, Homo sapien
cgttgctatccgtgtcaaaattgtg

SEQ ID NO: 5233248 - DNA, 25 bp, Homo sapien
aaggaaagaaacagacagggtgtcg

SEQ ID NO: 5233249 - DNA, 25 bp, Homo sapien
catatcttgtcagtggtccttgtct

SEQ ID NO: 5233250 - DNA, 25 bp, Homo sapien
tgtcagtggtccttgtctcccttct

SEQ ID NO: 5233251 - DNA, 25 bp, Homo sapien
tcttgtcagtggtccttgtctccct

SEQ ID NO: 5233252 - DNA, 25 bp, Homo sapien
gtctcccttcttgtacgatccagag

SEQ ID NO: 5233253 - DNA, 25 bp, Homo sapien
tccagcaaaggtggaaacgaagccc

SEQ ID NO: 5233254 - DNA, 25 bp, Homo sapien
gtcagctaaatctcctccagcaaag

SEQ ID NO: 5233255 - DNA, 25 bp, Homo sapien
tccaagagaaagatcagctcggcag

SEQ ID NO: 5233256 - DNA, 25 bp, Homo sapien
gaggcagcaggacagcataaatttt

SEQ ID NO: 5233257 - DNA, 25 bp, Homo sapien
ctcgcgcagattccggccgagcatg

SEQ ID NO: 5233258 - DNA, 25 bp, Homo sapien
tgcgcagattcccgccgagcttgcg

SEQ ID NO: 5233259 - DNA, 25 bp, Homo sapien
attctctccattccgccgtagtcgg

SEQ ID NO: 5233260 - DNA, 25 bp, Homo sapien
cgtgtggtgtttgagccgcctgaaa

SEQ ID NO: 5233261 - DNA, 25 bp, Homo sapien
cgggaacctgccgtgtcgcaactcg

SEQ ID NO: 5233262 - DNA, 25 bp, Homo sapien
tcgcaactcgcttccggtggacaag

SEQ ID NO: 5233263 - DNA, 25 bp, Homo sapien
aaagagccgcttcgtttcctgctag

SEQ ID NO: 5233264 - DNA, 25 bp, Homo sapien
caagcggcagatagcggaaagagcc

SEQ ID NO: 5233265 - DNA, 25 bp, Homo sapien
gttagaattttacttccagttcatc

SEQ ID NO: 5233266 - DNA, 25 bp, Homo sapien
acaaacagctcctccactagagcta

SEQ ID NO: 5233267 - DNA, 25 bp, Homo sapien
cactagagctacaaagttttcagca

SEQ ID NO: 5233268 - DNA, 25 bp, Homo sapien
cgaagcaatacaggctgttagaatt

SEQ ID NO: 5233269 - DNA, 25 bp, Homo sapien
gaatggagttactcatggtaaagcc

SEQ ID NO: 5233270 - DNA, 25 bp, Homo sapien
ctgtcgctgtacaaacatggttatc

SEQ ID NO: 5233271 - DNA, 25 bp, Homo sapien
tcaaatggggattctataccaggaa

SEQ ID NO: 5233272 - DNA, 25 bp, Homo sapien
gtaaagcccacgtccatacacagca

SEQ ID NO: 5233273 - DNA, 25 bp, Homo sapien
gctcagtagcggcaactcggcatta

SEQ ID NO: 5233274 - DNA, 25 bp, Homo sapien
tgcgcatgctcgaaaccttaaggat

SEQ ID NO: 5233275 - DNA, 25 bp, Homo sapien
cgtgaaaaatcaagtgccctgcgcc

SEQ ID NO: 5233276 - DNA, 25 bp, Homo sapien
tcatcacttcagagggacggatttc

SEQ ID NO: 5233277 - DNA, 25 bp, Homo sapien
tctgatactgatccccaccagaaag

SEQ ID NO: 5233278 - DNA, 25 bp, Homo sapien
gggattgtcagtgccatctgtacca

SEQ ID NO: 5233279 - DNA, 25 bp, Homo sapien
cagatgtctgtgcactgtgatgttc

SEQ ID NO: 5233280 - DNA, 25 bp, Homo sapien
tcaaaatctggtagcatcagatgtc

SEQ ID NO: 5233281 - DNA, 25 bp, Homo sapien
tcaaactgctgtacgattcccagaa

SEQ ID NO: 5233282 - DNA, 25 bp, Homo sapien
caccgtgctggaaattgtggacact

SEQ ID NO: 5233283 - DNA, 25 bp, Homo sapien
cagtatcacccatgcagagaacagg

SEQ ID NO: 5233284 - DNA, 25 bp, Homo sapien
ggatagggatatcaccaaacagtct

SEQ ID NO: 5233285 - DNA, 25 bp, Homo sapien
tctttccaatgaagtccaccgtgct

SEQ ID NO: 5233286 - DNA, 25 bp, Homo sapien
ttgtttcatgttgaatcacatccat

SEQ ID NO: 5233287 - DNA, 25 bp, Homo sapien
attgtttcatgttgaatcacatcca

SEQ ID NO: 5233288 - DNA, 25 bp, Homo sapien
ttataatatccagctgacttttgct

SEQ ID NO: 5233289 - DNA, 25 bp, Homo sapien
ctgacttttgctgaatcggctgctg

SEQ ID NO: 5233290 - DNA, 25 bp, Homo sapien
aattataatatccagctgacttttg

SEQ ID NO: 5233291 - DNA, 25 bp, Homo sapien
acttttgctgaatcggctgctgagg

SEQ ID NO: 5233292 - DNA, 25 bp, Homo sapien
tataggacacagttctctagagctg

SEQ ID NO: 5233293 - DNA, 25 bp, Homo sapien
ccttggagcagaaagcgaaaattcc

SEQ ID NO: 5233294 - DNA, 25 bp, Homo sapien
tttgtcacgaccactcagaacagtt

SEQ ID NO: 5233295 - DNA, 25 bp, Homo sapien
taaacaatgatctgccactaagctc

SEQ ID NO: 5233296 - DNA, 25 bp, Homo sapien
aggaaggcccatggccacctaagcg

SEQ ID NO: 5233297 - DNA, 25 bp, Homo sapien
aaggcccatggccacctaagcgaaa

SEQ ID NO: 5233298 - DNA, 25 bp, Homo sapien
gcccatggccacctaagcgaaaggg

SEQ ID NO: 5233299 - DNA, 25 bp, Homo sapien
cacctaagcgaaaggggccatctcc

SEQ ID NO: 5233300 - DNA, 25 bp, Homo sapien
attttcactatctcaagaccttctt

SEQ ID NO: 5233301 - DNA, 25 bp, Homo sapien
ttttcactatctcaagaccttcttt

SEQ ID NO: 5233302 - DNA, 25 bp, Homo sapien
catggtatctatatattcctgaact

SEQ ID NO: 5233303 - DNA, 25 bp, Homo sapien
catttgggagacctctaatcaaaag

SEQ ID NO: 5233304 - DNA, 25 bp, Homo sapien
caatgactaattagagagtggccca

SEQ ID NO: 5233305 - DNA, 25 bp, Homo sapien
gatactgactatctcagatctgaga

SEQ ID NO: 5233306 - DNA, 25 bp, Homo sapien
ggtgcaaacagtgttgtggagtgct

SEQ ID NO: 5233307 - DNA, 25 bp, Homo sapien
catattttcatctggcccataatca

SEQ ID NO: 5233308 - DNA, 25 bp, Homo sapien
caacagggaagatgataggagatag

SEQ ID NO: 5233309 - DNA, 25 bp, Homo sapien
tggcccataatcaaacacaacaggg

SEQ ID NO: 5233310 - DNA, 25 bp, Homo sapien
cgatttataggctgcaatccttata

SEQ ID NO: 5233311 - DNA, 25 bp, Homo sapien
tagacaaattggagccaatggtcag

SEQ ID NO: 5233312 - DNA, 25 bp, Homo sapien
tggtcagtcggcagggccagtgaat

SEQ ID NO: 5233313 - DNA, 25 bp, Homo sapien
agtgaatggaatgcctctcaatttt

SEQ ID NO: 5233314 - DNA, 25 bp, Homo sapien
tgcatccacaactgtccaagtcttt

SEQ ID NO: 5233315 - DNA, 25 bp, Homo sapien
tttttgcatccacaactgtccaagt

SEQ ID NO: 5233316 - DNA, 25 bp, Homo sapien
tttgcatccacaactgtccaagtct

SEQ ID NO: 5233317 - DNA, 25 bp, Homo sapien
ttttgcatccacaactgtccaagtc

SEQ ID NO: 5233318 - DNA, 25 bp, Homo sapien
gaataatacaaaccccagcctgcat

SEQ ID NO: 5233319 - DNA, 25 bp, Homo sapien
caaatgagctaaaggacctagggtc

SEQ ID NO: 5233320 - DNA, 25 bp, Homo sapien
tgtactcctgagaagcaacctgcct

SEQ ID NO: 5233321 - DNA, 25 bp, Homo sapien
ctgcctaagacccaacaaatgagct

SEQ ID NO: 5233322 - DNA, 25 bp, Homo sapien
catacattaacaacacacgcacacg

SEQ ID NO: 5233323 - DNA, 25 bp, Homo sapien
gggcctcattttctacaagctgaaa

SEQ ID NO: 5233324 - DNA, 25 bp, Homo sapien
gaagagcatctgttaagcatatggg

SEQ ID NO: 5233325 - DNA, 25 bp, Homo sapien
tgatcaatggtgaaaaagcagcagc

SEQ ID NO: 5233326 - DNA, 25 bp, Homo sapien
agagaagcacttcccctccgattta

SEQ ID NO: 5233327 - DNA, 25 bp, Homo sapien
gaagcacttcccctccgatttatat

SEQ ID NO: 5233328 - DNA, 25 bp, Homo sapien
cacttcccctccgatttatatttca

SEQ ID NO: 5233329 - DNA, 25 bp, Homo sapien
aaacagagaagcacttcccctccga

SEQ ID NO: 5233330 - DNA, 25 bp, Homo sapien
atagatttacttaacggctctgaac

SEQ ID NO: 5233331 - DNA, 25 bp, Homo sapien
taaaatgaccaatcaaaagcatacc

SEQ ID NO: 5233332 - DNA, 25 bp, Homo sapien
tggcaacattaacccccagactaca

SEQ ID NO: 5233333 - DNA, 25 bp, Homo sapien
tcaaataacagctaggaaaaagctc

SEQ ID NO: 5233334 - DNA, 25 bp, Homo sapien
acttgatttcccatgaagaatcttc

SEQ ID NO: 5233335 - DNA, 25 bp, Homo sapien
ctcttgctgcaaagacctttagaac

SEQ ID NO: 5233336 - DNA, 25 bp, Homo sapien
cttgctgcaaagacctttagaactt

SEQ ID NO: 5233337 - DNA, 25 bp, Homo sapien
ttgatttcccatgaagaatcttctc

SEQ ID NO: 5233338 - DNA, 25 bp, Homo sapien
taagcatatcgaactatggccacca

SEQ ID NO: 5233339 - DNA, 25 bp, Homo sapien
aatcagggaggaaagtgcaactgca

SEQ ID NO: 5233340 - DNA, 25 bp, Homo sapien
aagtcatccaaagcatgaatcaggg

SEQ ID NO: 5233341 - DNA, 25 bp, Homo sapien
aaagccacgccgacttgaggattag

SEQ ID NO: 5233342 - DNA, 25 bp, Homo sapien
tgtattgccgcaagtcttccatgaa

SEQ ID NO: 5233343 - DNA, 25 bp, Homo sapien
aaggcagctgcacatacactaaaca

SEQ ID NO: 5233344 - DNA, 25 bp, Homo sapien
tttcaaggatgaaaacatgtattgc

SEQ ID NO: 5233345 - DNA, 25 bp, Homo sapien
tgaaaacatgtattgccgcaagtct

SEQ ID NO: 5233346 - DNA, 25 bp, Homo sapien
cttgagccagaattggctgtgtccc

SEQ ID NO: 5233347 - DNA, 25 bp, Homo sapien
tgaataagtctatagatttattcac

SEQ ID NO: 5233348 - DNA, 25 bp, Homo sapien
ttgcttgagccagaattggctgtgt

SEQ ID NO: 5233349 - DNA, 25 bp, Homo sapien
gtaaatgaatcagaggggctggtct

SEQ ID NO: 5233350 - DNA, 25 bp, Homo sapien
tatcagagtacagcaccttaacagg

SEQ ID NO: 5233351 - DNA, 25 bp, Homo sapien
ggtacagcccaaagcaatatggacg

SEQ ID NO: 5233352 - DNA, 25 bp, Homo sapien
aatatggacgaaaggcaattctccc

SEQ ID NO: 5233353 - DNA, 25 bp, Homo sapien
cacaatctactgaggctgaataagc

SEQ ID NO: 5233354 - DNA, 25 bp, Homo sapien
tgctttctacgtagagatatccacg

SEQ ID NO: 5233355 - DNA, 25 bp, Homo sapien
tctacgtagagatatccacggcaat

SEQ ID NO: 5233356 - DNA, 25 bp, Homo sapien
aaacaaatgctttctacgtagagat

SEQ ID NO: 5233357 - DNA, 25 bp, Homo sapien
caaatgctttctacgtagagatatc

SEQ ID NO: 5233358 - DNA, 25 bp, Homo sapien
tcttcaagggtgtctgtcttctcat

SEQ ID NO: 5233359 - DNA, 25 bp, Homo sapien
gagtcaatcaaagcatcaacagcat

SEQ ID NO: 5233360 - DNA, 25 bp, Homo sapien
taatctctgaaatcgaggatttggg

SEQ ID NO: 5233361 - DNA, 25 bp, Homo sapien
tggagtcaatcaaagcatcaacagc

SEQ ID NO: 5233362 - DNA, 25 bp, Homo sapien
aagaaatatgacttgttcatccttc

SEQ ID NO: 5233363 - DNA, 25 bp, Homo sapien
ttgcacttagctctctttcatttaa

SEQ ID NO: 5233364 - DNA, 25 bp, Homo sapien
gacatttatttaggactggccaatt

SEQ ID NO: 5233365 - DNA, 25 bp, Homo sapien
caattaccgcaactttgcacttagc

SEQ ID NO: 5233366 - DNA, 25 bp, Homo sapien
ccaacctgcagaaaagggccctcta

SEQ ID NO: 5233367 - DNA, 25 bp, Homo sapien
tcagagaagcctatgtcctgctgtc

SEQ ID NO: 5233368 - DNA, 25 bp, Homo sapien
ggtttataggcgtgtatccccatca

SEQ ID NO: 5233369 - DNA, 25 bp, Homo sapien
tgcagctcccaagggtagacaacct

SEQ ID NO: 5233370 - DNA, 25 bp, Homo sapien
tccagggctctagttgttgacagcg

SEQ ID NO: 5233371 - DNA, 25 bp, Homo sapien
taataagcacctggccgataacagc

SEQ ID NO: 5233372 - DNA, 25 bp, Homo sapien
tgcccatgtgagtgaagttctacac

SEQ ID NO: 5233373 - DNA, 25 bp, Homo sapien
gaaatactatctccgcagagaggcc

SEQ ID NO: 5233374 - DNA, 25 bp, Homo sapien
tagaaccacctttgttggcaggata

SEQ ID NO: 5233375 - DNA, 25 bp, Homo sapien
gattctaagacctgataatctggga

SEQ ID NO: 5233376 - DNA, 25 bp, Homo sapien
tcaagaggattcacctagaaccacc

SEQ ID NO: 5233377 - DNA, 25 bp, Homo sapien
tagatccaagcctagcaacagtatc

SEQ ID NO: 5233378 - DNA, 25 bp, Homo sapien
gaggctcccggggatgtaaagctct

SEQ ID NO: 5233379 - DNA, 25 bp, Homo sapien
tcccggggatgtaaagctctgtgca

SEQ ID NO: 5233380 - DNA, 25 bp, Homo sapien
ctcagcgggaggattcagcatattc

SEQ ID NO: 5233381 - DNA, 25 bp, Homo sapien
tgttgtcacctcagcgggaggattc

SEQ ID NO: 5233382 - DNA, 25 bp, Homo sapien
tatacactcgatcttgcctgctgcc

SEQ ID NO: 5233383 - DNA, 25 bp, Homo sapien
tgccacataagatgcacctttgctt

SEQ ID NO: 5233384 - DNA, 25 bp, Homo sapien
aggtagtttcttctgtgctgatata

SEQ ID NO: 5233385 - DNA, 25 bp, Homo sapien
tgtgctgatatacactcgatcttgc

SEQ ID NO: 5233386 - DNA, 25 bp, Homo sapien
ccactgagccgagccccaaatctca

SEQ ID NO: 5233387 - DNA, 25 bp, Homo sapien
actgagccgagccccaaatctcatt

SEQ ID NO: 5233388 - DNA, 25 bp, Homo sapien
tgagccgagccccaaatctcatttt

SEQ ID NO: 5233389 - DNA, 25 bp, Homo sapien
agccactgagccgagccccaaatct

SEQ ID NO: 5233390 - DNA, 25 bp, Homo sapien
gcctaaggtaccagatgaagcagaa

SEQ ID NO: 5233391 - DNA, 25 bp, Homo sapien
caggtagtaattagagggaagaagc

SEQ ID NO: 5233392 - DNA, 25 bp, Homo sapien
acttagccggcgtgagttactcagg

SEQ ID NO: 5233393 - DNA, 25 bp, Homo sapien
gctgagaaaggttgcagaatagact

SEQ ID NO: 5233394 - DNA, 25 bp, Homo sapien
ggattatgaatagatgcctcttttc

SEQ ID NO: 5233395 - DNA, 25 bp, Homo sapien
tagttggattatgaatagatgcctc

SEQ ID NO: 5233396 - DNA, 25 bp, Homo sapien
ttctgcttatctggattctcttatc

SEQ ID NO: 5233397 - DNA, 25 bp, Homo sapien
agatagttggattatgaatagatgc

SEQ ID NO: 5233398 - DNA, 25 bp, Homo sapien
accgggaagccagtgttgaagtgat

SEQ ID NO: 5233399 - DNA, 25 bp, Homo sapien
tttgctgtgattgaatgcgtcagca

SEQ ID NO: 5233400 - DNA, 25 bp, Homo sapien
cgatgaggcttatgtagatctgacc

SEQ ID NO: 5233401 - DNA, 25 bp, Homo sapien
caagtaccgggaagccagtgttgaa

SEQ ID NO: 5233402 - DNA, 25 bp, Homo sapien
gacaggattgtgtggttactctcat

SEQ ID NO: 5233403 - DNA, 25 bp, Homo sapien
ggattgtgtggttactctcatggac

SEQ ID NO: 5233404 - DNA, 25 bp, Homo sapien
ggacatagactttgttccaatggag

SEQ ID NO: 5233405 - DNA, 25 bp, Homo sapien
ttgttccaatggagcagcggcaaaa

SEQ ID NO: 5233406 - DNA, 25 bp, Homo sapien
taattttttagctgtaggtccatct

SEQ ID NO: 5233407 - DNA, 25 bp, Homo sapien
ctggagacgctgaagtgggctcccc

SEQ ID NO: 5233408 - DNA, 25 bp, Homo sapien
cagccagactggagacgctgaagtg

SEQ ID NO: 5233409 - DNA, 25 bp, Homo sapien
tttagctgtaggtccatcttcatgg

SEQ ID NO: 5233410 - DNA, 25 bp, Homo sapien
tttcactagaacacggaagttttca

SEQ ID NO: 5233411 - DNA, 25 bp, Homo sapien
cactagaacacggaagttttcagca

SEQ ID NO: 5233412 - DNA, 25 bp, Homo sapien
tagaacacggaagttttcagcagga

SEQ ID NO: 5233413 - DNA, 25 bp, Homo sapien
ctagaacacggaagttttcagcagg

SEQ ID NO: 5233414 - DNA, 25 bp, Homo sapien
cagcttctcctaaatgcaaagtcaa

SEQ ID NO: 5233415 - DNA, 25 bp, Homo sapien
gcttctcctaaatgcaaagtcaacc

SEQ ID NO: 5233416 - DNA, 25 bp, Homo sapien
aaacagcttctcctaaatgcaaagt

SEQ ID NO: 5233417 - DNA, 25 bp, Homo sapien
ctaaacagcttctcctaaatgcaaa

SEQ ID NO: 5233418 - DNA, 25 bp, Homo sapien
ttgacttgtcacagcagcatctccg

SEQ ID NO: 5233419 - DNA, 25 bp, Homo sapien
tgacttgtcacagcagcatctccgc

SEQ ID NO: 5233420 - DNA, 25 bp, Homo sapien
tcattgacttgtcacagcagcatct

SEQ ID NO: 5233421 - DNA, 25 bp, Homo sapien
agcatctccgccactttccgagcac

SEQ ID NO: 5233422 - DNA, 25 bp, Homo sapien
cattatacccctcctttttgcaatt

SEQ ID NO: 5233423 - DNA, 25 bp, Homo sapien
catttcattatacccctcctttttg

SEQ ID NO: 5233424 - DNA, 25 bp, Homo sapien
cgcccggccaggtgcatttcattat

SEQ ID NO: 5233425 - DNA, 25 bp, Homo sapien
cccggccaggtgcatttcattatac

SEQ ID NO: 5233426 - DNA, 25 bp, Homo sapien
tagaagttccagagacaatccaggt

SEQ ID NO: 5233427 - DNA, 25 bp, Homo sapien
tatagaatgttccaccaccgggtta

SEQ ID NO: 5233428 - DNA, 25 bp, Homo sapien
tcagaacaagtcatgtaggccagca

SEQ ID NO: 5233429 - DNA, 25 bp, Homo sapien
taatttacaactcgtcaggcccaag

SEQ ID NO: 5233430 - DNA, 25 bp, Homo sapien
gttttatggctttctcttgtgttga

SEQ ID NO: 5233431 - DNA, 25 bp, Homo sapien
tggtgcccacctaacagtgaagaac

SEQ ID NO: 5233432 - DNA, 25 bp, Homo sapien
tgcttgaccacacaaggttgatggg

SEQ ID NO: 5233433 - DNA, 25 bp, Homo sapien
gattgtgtggtaatgacagaacccc

SEQ ID NO: 5233434 - DNA, 25 bp, Homo sapien
tggccgttgtcattgccactgccgc

SEQ ID NO: 5233435 - DNA, 25 bp, Homo sapien
ccactgccgccaagaggaggaaggc

SEQ ID NO: 5233436 - DNA, 25 bp, Homo sapien
gccactgccgccaagaggaggaagg

SEQ ID NO: 5233437 - DNA, 25 bp, Homo sapien
ttgtcattgccactgccgccaagag

SEQ ID NO: 5233438 - DNA, 25 bp, Homo sapien
taagcctttacctagactgaccaag

SEQ ID NO: 5233439 - DNA, 25 bp, Homo sapien
tatggtgtgaagctaaaaaactgct

SEQ ID NO: 5233440 - DNA, 25 bp, Homo sapien
gcacacttgtcctagtaacaggtga

SEQ ID NO: 5233441 - DNA, 25 bp, Homo sapien
gaataaattcagacggactgaagcc

SEQ ID NO: 5233442 - DNA, 25 bp, Homo sapien
gatgtacttgatatacctgctgcca

SEQ ID NO: 5233443 - DNA, 25 bp, Homo sapien
ttaatcgcctttctgctccaacaag

SEQ ID NO: 5233444 - DNA, 25 bp, Homo sapien
tccacctcagaataattagacacag

SEQ ID NO: 5233445 - DNA, 25 bp, Homo sapien
taaagagcagtggtgaaaaaggccc

SEQ ID NO: 5233446 - DNA, 25 bp, Homo sapien
tttaatggaagcctaagaagcaagt

SEQ ID NO: 5233447 - DNA, 25 bp, Homo sapien
cagtagggatgaacagggttattcc

SEQ ID NO: 5233448 - DNA, 25 bp, Homo sapien
gacaataaagaaggagatgtccact

SEQ ID NO: 5233449 - DNA, 25 bp, Homo sapien
cacaatacagggcatcagtagggat

SEQ ID NO: 5233450 - DNA, 25 bp, Homo sapien
cagatcaaaaatcggacctcttctt

SEQ ID NO: 5233451 - DNA, 25 bp, Homo sapien
cacgtggattaacgccgaagccttc

SEQ ID NO: 5233452 - DNA, 25 bp, Homo sapien
taaaaccagatcattcgctacttca

SEQ ID NO: 5233453 - DNA, 25 bp, Homo sapien
gaagccttctaactcatctgcctac

SEQ ID NO: 5233454 - DNA, 25 bp, Homo sapien
aaaaactgataaataatgccttggt

SEQ ID NO: 5233455 - DNA, 25 bp, Homo sapien
aataatgccttggtttatacggtat

SEQ ID NO: 5233456 - DNA, 25 bp, Homo sapien
agaccacattctatgtgataactcc

SEQ ID NO: 5233457 - DNA, 25 bp, Homo sapien
acattctatgtgataactccttcta

SEQ ID NO: 5233458 - DNA, 25 bp, Homo sapien
gaaacaggcagccattgttgaatgt

SEQ ID NO: 5233459 - DNA, 25 bp, Homo sapien
agagaaacaggcagccattgttgaa

SEQ ID NO: 5233460 - DNA, 25 bp, Homo sapien
caaggagagaaacaggcagccattg

SEQ ID NO: 5233461 - DNA, 25 bp, Homo sapien
aaacaggcagccattgttgaatgtg

SEQ ID NO: 5233462 - DNA, 25 bp, Homo sapien
taattgaatggaactgaaacgcagg

SEQ ID NO: 5233463 - DNA, 25 bp, Homo sapien
catatcccataaagcctgaaggtca

SEQ ID NO: 5233464 - DNA, 25 bp, Homo sapien
gtatatgaccagatctgttcccagg

SEQ ID NO: 5233465 - DNA, 25 bp, Homo sapien
aaatcaatctggcaatgggatccaa

SEQ ID NO: 5233466 - DNA, 25 bp, Homo sapien
actgttcgatgtgatttatgagctg

SEQ ID NO: 5233467 - DNA, 25 bp, Homo sapien
aaaactgttcgatgtgatttatgag

SEQ ID NO: 5233468 - DNA, 25 bp, Homo sapien
ggctcggatgcagtctatgctcttc

SEQ ID NO: 5233469 - DNA, 25 bp, Homo sapien
aaggctcggatgcagtctatgctct

SEQ ID NO: 5233470 - DNA, 25 bp, Homo sapien
tttacaatagtgagtgggccaccag

SEQ ID NO: 5233471 - DNA, 25 bp, Homo sapien
tataagacactccacctagcctggg

SEQ ID NO: 5233472 - DNA, 25 bp, Homo sapien
tctttccctgtgatagtcgccaact

SEQ ID NO: 5233473 - DNA, 25 bp, Homo sapien
taaggacactgggtggcaaccatgc

SEQ ID NO: 5233474 - DNA, 25 bp, Homo sapien
ggaagttgttaaagcgctgctcttc

SEQ ID NO: 5233475 - DNA, 25 bp, Homo sapien
taaaggccgcatgtcaaatgccacg

SEQ ID NO: 5233476 - DNA, 25 bp, Homo sapien
tattaagggagagtttgagttcacc

SEQ ID NO: 5233477 - DNA, 25 bp, Homo sapien
ctgtgtaataagcaataaaggccgc

SEQ ID NO: 5233478 - DNA, 25 bp, Homo sapien
caagacatccggtgcccaatatgga

SEQ ID NO: 5233479 - DNA, 25 bp, Homo sapien
cctcagctgtgacagaacttccaga

SEQ ID NO: 5233480 - DNA, 25 bp, Homo sapien
ctcagctgtgacagaacttccagag

SEQ ID NO: 5233481 - DNA, 25 bp, Homo sapien
tcctcagctgtgacagaacttccag

SEQ ID NO: 5233482 - DNA, 25 bp, Homo sapien
tacacaccaaacaaggaggcctagg

SEQ ID NO: 5233483 - DNA, 25 bp, Homo sapien
caggtgccagcagaactacatcagt

SEQ ID NO: 5233484 - DNA, 25 bp, Homo sapien
cagggccgaggctaagtttgcgcac

SEQ ID NO: 5233485 - DNA, 25 bp, Homo sapien
tttcatagcctttaccagggccgag

SEQ ID NO: 5233486 - DNA, 25 bp, Homo sapien
tattctgggttaacttagctggaac

SEQ ID NO: 5233487 - DNA, 25 bp, Homo sapien
ctttggttaagatgtgctgctggca

SEQ ID NO: 5233488 - DNA, 25 bp, Homo sapien
tctcaggagagttgtcttaaactac

SEQ ID NO: 5233489 - DNA, 25 bp, Homo sapien
tttgcattacagaacaagccttgca

SEQ ID NO: 5233490 - DNA, 25 bp, Homo sapien
tataacacagcgtacactgaaggtg

SEQ ID NO: 5233491 - DNA, 25 bp, Homo sapien
caaaattacagggtctactctatga

SEQ ID NO: 5233492 - DNA, 25 bp, Homo sapien
ggctctaggccagaaagtcatttgt

SEQ ID NO: 5233493 - DNA, 25 bp, Homo sapien
tcaggcatgatacagtgacaggtgg

SEQ ID NO: 5233494 - DNA, 25 bp, Homo sapien
gaatgtctgtgatactaaggtggaa

SEQ ID NO: 5233495 - DNA, 25 bp, Homo sapien
catggtgtggtgataaggcgactac

SEQ ID NO: 5233496 - DNA, 25 bp, Homo sapien
tctgctggccactagcttgctgtga

SEQ ID NO: 5233497 - DNA, 25 bp, Homo sapien
ggagcatgagcatcctttctctagg

SEQ ID NO: 5233498 - DNA, 25 bp, Homo sapien
gcaagagggaaatcctgcagcctag

SEQ ID NO: 5233499 - DNA, 25 bp, Homo sapien
tgcagcctagtgtggagaacacaac

SEQ ID NO: 5233500 - DNA, 25 bp, Homo sapien
tccaccaagtggtatgtacaagaat

SEQ ID NO: 5233501 - DNA, 25 bp, Homo sapien
aggaaccttacgcaagccacctgac

SEQ ID NO: 5233502 - DNA, 25 bp, Homo sapien
taattctagcccatgcagtgacagg

SEQ ID NO: 5233503 - DNA, 25 bp, Homo sapien
gatatcaggactatatggctacagg

SEQ ID NO: 5233504 - DNA, 25 bp, Homo sapien
cagagaactcaatgactggcctgct

SEQ ID NO: 5233505 - DNA, 25 bp, Homo sapien
tctctgtagggccacaaatgactgg

SEQ ID NO: 5233506 - DNA, 25 bp, Homo sapien
cagcaaaacctaaggcagcctgctt

SEQ ID NO: 5233507 - DNA, 25 bp, Homo sapien
gaaacatcatcctggcatacgctac

SEQ ID NO: 5233508 - DNA, 25 bp, Homo sapien
gagggaacaatctgctagcattgcc

SEQ ID NO: 5233509 - DNA, 25 bp, Homo sapien
gagaggcccagttttgaggttcaag

SEQ ID NO: 5233510 - DNA, 25 bp, Homo sapien
taaatcgtccacatcaccaccttct

SEQ ID NO: 5233511 - DNA, 25 bp, Homo sapien
atcaccaccttcttcaaatacagct

SEQ ID NO: 5233512 - DNA, 25 bp, Homo sapien
gctgctgtgtctccacttggtttgt

SEQ ID NO: 5233513 - DNA, 25 bp, Homo sapien
ccaccttcttcaaatacagctgctg

SEQ ID NO: 5233514 - DNA, 25 bp, Homo sapien
atagaacaccaggtgcatattaaaa

SEQ ID NO: 5233515 - DNA, 25 bp, Homo sapien
tcatagaacaccaggtgcatattaa

SEQ ID NO: 5233516 - DNA, 25 bp, Homo sapien
catagaacaccaggtgcatattaaa

SEQ ID NO: 5233517 - DNA, 25 bp, Homo sapien
atcatagaacaccaggtgcatatta

SEQ ID NO: 5233518 - DNA, 25 bp, Homo sapien
ggagttaaacattcaagtatccact

SEQ ID NO: 5233519 - DNA, 25 bp, Homo sapien
tgctcatttattcaccgctcattat

SEQ ID NO: 5233520 - DNA, 25 bp, Homo sapien
tcaggccaatttcataccactgctt

SEQ ID NO: 5233521 - DNA, 25 bp, Homo sapien
cattggaaggcatgcatgtacttgc

SEQ ID NO: 5233522 - DNA, 25 bp, Homo sapien
gaatggccgcatccaacttgttttg

SEQ ID NO: 5233523 - DNA, 25 bp, Homo sapien
gagattttggctccccttgaatggc

SEQ ID NO: 5233524 - DNA, 25 bp, Homo sapien
gaattagatgatccgcctccaggta

SEQ ID NO: 5233525 - DNA, 25 bp, Homo sapien
ttagaactcccagcatcacagcgat

SEQ ID NO: 5233526 - DNA, 25 bp, Homo sapien
cacaagttgtgacagctgttggagg

SEQ ID NO: 5233527 - DNA, 25 bp, Homo sapien
aaatgctactgcttgctcaacacaa

SEQ ID NO: 5233528 - DNA, 25 bp, Homo sapien
gttggaggatcaggcaaaggaggac

SEQ ID NO: 5233529 - DNA, 25 bp, Homo sapien
tgctcaacacaagttgtgacagctg

SEQ ID NO: 5233530 - DNA, 25 bp, Homo sapien
ggcctcaactaaaaagagaagtgag

SEQ ID NO: 5233531 - DNA, 25 bp, Homo sapien
acagaggcagagtaatgtggtaact

SEQ ID NO: 5233532 - DNA, 25 bp, Homo sapien
tacagaggcagagtaatgtggtaac

SEQ ID NO: 5233533 - DNA, 25 bp, Homo sapien
ggagtatgaagggaaattgtgctcc

SEQ ID NO: 5233534 - DNA, 25 bp, Homo sapien
agtatgaagggaaattgtgctcccc

SEQ ID NO: 5233535 - DNA, 25 bp, Homo sapien
tgcttaaaaggagtatgaagggaaa

SEQ ID NO: 5233536 - DNA, 25 bp, Homo sapien
tgaagggaaattgtgctccccttcc

SEQ ID NO: 5233537 - DNA, 25 bp, Homo sapien
tatttagtaaaggagacaccatcca

SEQ ID NO: 5233538 - DNA, 25 bp, Homo sapien
tctttgaggcttgcaagtagagaac

SEQ ID NO: 5233539 - DNA, 25 bp, Homo sapien
caaagatgaaagctgacttaggtag

SEQ ID NO: 5233540 - DNA, 25 bp, Homo sapien
cagagattgggccaaaaggtctttt

SEQ ID NO: 5233541 - DNA, 25 bp, Homo sapien
gtgtattagtgacgacttatgaggg

SEQ ID NO: 5233542 - DNA, 25 bp, Homo sapien
caagaagtctgtacaccaaagagga

SEQ ID NO: 5233543 - DNA, 25 bp, Homo sapien
agaggtgactgggtaccaagaagtc

SEQ ID NO: 5233544 - DNA, 25 bp, Homo sapien
cgacttatgagggtgctgaagacag

SEQ ID NO: 5233545 - DNA, 25 bp, Homo sapien
gatgtcctagaagcccaaagtaaag

SEQ ID NO: 5233546 - DNA, 25 bp, Homo sapien
tgtccaagtcacaaacaacccctgg

SEQ ID NO: 5233547 - DNA, 25 bp, Homo sapien
gataagggtgttcaattctcagcag

SEQ ID NO: 5233548 - DNA, 25 bp, Homo sapien
tcctggcatgacaaaaagactgacg

SEQ ID NO: 5233549 - DNA, 25 bp, Homo sapien
aagtccagtatctgggttagcccag

SEQ ID NO: 5233550 - DNA, 25 bp, Homo sapien
tttagcaccatgacagaagctgtgc

SEQ ID NO: 5233551 - DNA, 25 bp, Homo sapien
tctgcatgggccacaagcttgtgtc

SEQ ID NO: 5233552 - DNA, 25 bp, Homo sapien
gtgtttcctcccgtacccatgctgt

SEQ ID NO: 5233553 - DNA, 25 bp, Homo sapien
cgttcgcatattcaagcagctcctg

SEQ ID NO: 5233554 - DNA, 25 bp, Homo sapien
tattcaagcagctcctgtgagttcc

SEQ ID NO: 5233555 - DNA, 25 bp, Homo sapien
agcagtacccgttcgcatattcaag

SEQ ID NO: 5233556 - DNA, 25 bp, Homo sapien
actccaagcagtacccgttcgcata

SEQ ID NO: 5233557 - DNA, 25 bp, Homo sapien
caaacaacaaaagcgatgtggccac

SEQ ID NO: 5233558 - DNA, 25 bp, Homo sapien
tgctctgcaagtggagatctctccc

SEQ ID NO: 5233559 - DNA, 25 bp, Homo sapien
cacaaactgctaagaaagggaacct

SEQ ID NO: 5233560 - DNA, 25 bp, Homo sapien
gaggagatccctcagccaaggagaa

SEQ ID NO: 5233561 - DNA, 25 bp, Homo sapien
ttaagaagcccaccgaccatggact

SEQ ID NO: 5233562 - DNA, 25 bp, Homo sapien
tccgggcttatggagaggcattcag

SEQ ID NO: 5233563 - DNA, 25 bp, Homo sapien
taggcccatggactatcacagaagg

SEQ ID NO: 5233564 - DNA, 25 bp, Homo sapien
ccatctgtggaactccggaggagac

SEQ ID NO: 5233565 - DNA, 25 bp, Homo sapien
aatagaccttttgatgtatagggcc

SEQ ID NO: 5233566 - DNA, 25 bp, Homo sapien
gatgctgactaactgaactccacca

SEQ ID NO: 5233567 - DNA, 25 bp, Homo sapien
gaccatgactggttctagcgggttt

SEQ ID NO: 5233568 - DNA, 25 bp, Homo sapien
caaacaagggttaagtcatgcagcc

SEQ ID NO: 5233569 - DNA, 25 bp, Homo sapien
tggacaacatatccgcatggcccgg

SEQ ID NO: 5233570 - DNA, 25 bp, Homo sapien
ggtgggctccttatacgactggtgt

SEQ ID NO: 5233571 - DNA, 25 bp, Homo sapien
tttccctaatgagcgacacctggca

SEQ ID NO: 5233572 - DNA, 25 bp, Homo sapien
tctgtggaagagacccagcatgcct

SEQ ID NO: 5233573 - DNA, 25 bp, Homo sapien
ctgctaggcatgattttgggtaaga

SEQ ID NO: 5233574 - DNA, 25 bp, Homo sapien
tcctgctaggcatgattttgggtaa

SEQ ID NO: 5233575 - DNA, 25 bp, Homo sapien
cctgctaggcatgattttgggtaag

SEQ ID NO: 5233576 - DNA, 25 bp, Homo sapien
tgcaaagaatgggaggtagcaaact

SEQ ID NO: 5233577 - DNA, 25 bp, Homo sapien
aagaatgggaggtagcaaactgcaa

SEQ ID NO: 5233578 - DNA, 25 bp, Homo sapien
gaatgggaggtagcaaactgcaagc

SEQ ID NO: 5233579 - DNA, 25 bp, Homo sapien
caaagaatgggaggtagcaaactgc

SEQ ID NO: 5233580 - DNA, 25 bp, Homo sapien
cttctccatagggcacacaggcaaa

SEQ ID NO: 5233581 - DNA, 25 bp, Homo sapien
tccttctccatagggcacacaggca

SEQ ID NO: 5233582 - DNA, 25 bp, Homo sapien
ccttctccatagggcacacaggcaa

SEQ ID NO: 5233583 - DNA, 25 bp, Homo sapien
ttctccatagggcacacaggcaaag

SEQ ID NO: 5233584 - DNA, 25 bp, Homo sapien
tcagtgctccttgagtgcatgaagg

SEQ ID NO: 5233585 - DNA, 25 bp, Homo sapien
gcagccctgggaagacagcgcttac

SEQ ID NO: 5233586 - DNA, 25 bp, Homo sapien
tcagtcagtgctccttgagtgcatg

SEQ ID NO: 5233587 - DNA, 25 bp, Homo sapien
aaggtgggggccagcacgcctgcag

SEQ ID NO: 5233588 - DNA, 25 bp, Homo sapien
ggtgccacagcaggttttggcaccc

SEQ ID NO: 5233589 - DNA, 25 bp, Homo sapien
tgccacagcaggttttggcacccat

SEQ ID NO: 5233590 - DNA, 25 bp, Homo sapien
gtgccacagcaggttttggcaccca

SEQ ID NO: 5233591 - DNA, 25 bp, Homo sapien
tgaagatccacctttgcaaaggcat

SEQ ID NO: 5233592 - DNA, 25 bp, Homo sapien
agctgttggtttacactgaagttga

SEQ ID NO: 5233593 - DNA, 25 bp, Homo sapien
gctaaagctgttggtttacactgaa

SEQ ID NO: 5233594 - DNA, 25 bp, Homo sapien
cccagctaaagctgttggtttacac

SEQ ID NO: 5233595 - DNA, 25 bp, Homo sapien
tccatgaccacctgccactgttcct

SEQ ID NO: 5233596 - DNA, 25 bp, Homo sapien
tgaggtacgtagtaatgttgccata

SEQ ID NO: 5233597 - DNA, 25 bp, Homo sapien
tactaattgtacatattagtgaggt

SEQ ID NO: 5233598 - DNA, 25 bp, Homo sapien
gggcatgtagctcaagtgagaagac

SEQ ID NO: 5233599 - DNA, 25 bp, Homo sapien
tcccaagtgttgtgaaaggaaccca

SEQ ID NO: 5233600 - DNA, 25 bp, Homo sapien
gaccacttgctcagccttactctga

SEQ ID NO: 5233601 - DNA, 25 bp, Homo sapien
ttactctgagagtttccatctgcct

SEQ ID NO: 5233602 - DNA, 25 bp, Homo sapien
attgtgtgactgctacccttgtgac

SEQ ID NO: 5233603 - DNA, 25 bp, Homo sapien
ctgcctttatgaagacatgtttata

SEQ ID NO: 5233604 - DNA, 25 bp, Homo sapien
ggcctgtcaccatcgtgcacttgag

SEQ ID NO: 5233605 - DNA, 25 bp, Homo sapien
gctgtgagtttcaggccaccacttg

SEQ ID NO: 5233606 - DNA, 25 bp, Homo sapien
gactgtcagaccctcaagaatgaga

SEQ ID NO: 5233607 - DNA, 25 bp, Homo sapien
aaagaatgggaatgaagcctcctcc

SEQ ID NO: 5233608 - DNA, 25 bp, Homo sapien
ggtggaagttttcagggagctggcc

SEQ ID NO: 5233609 - DNA, 25 bp, Homo sapien
tggccaaacctagttcccacagctc

SEQ ID NO: 5233610 - DNA, 25 bp, Homo sapien
ggtgcggagggagctctgagaaaaa

SEQ ID NO: 5233611 - DNA, 25 bp, Homo sapien
ggctctgggaaaacacggtgcggag

SEQ ID NO: 5233612 - DNA, 25 bp, Homo sapien
gaggatattcgctgaaggtttctgc

SEQ ID NO: 5233613 - DNA, 25 bp, Homo sapien
tgactgaggatattcgctgaaggtt

SEQ ID NO: 5233614 - DNA, 25 bp, Homo sapien
gaagcctcacagacatcagtcctgg

SEQ ID NO: 5233615 - DNA, 25 bp, Homo sapien
gcttgtccagccaaatgcctgaagc

SEQ ID NO: 5233616 - DNA, 25 bp, Homo sapien
tcaccactaggcatataccctaaag

SEQ ID NO: 5233617 - DNA, 25 bp, Homo sapien
caccactaggcatataccctaaaga

SEQ ID NO: 5233618 - DNA, 25 bp, Homo sapien
ccactaggcatataccctaaagaaa

SEQ ID NO: 5233619 - DNA, 25 bp, Homo sapien
atcaccactaggcatataccctaaa

SEQ ID NO: 5233620 - DNA, 25 bp, Homo sapien
gagactgtggtctcctggccgtgac

SEQ ID NO: 5233621 - DNA, 25 bp, Homo sapien
tttaaacggtggcaggctgtcaacc

SEQ ID NO: 5233622 - DNA, 25 bp, Homo sapien
catccatgaaggaccctcggtgtac

SEQ ID NO: 5233623 - DNA, 25 bp, Homo sapien
cttgcatagattcagagagactgtg

SEQ ID NO: 5233624 - DNA, 25 bp, Homo sapien
taggaatgcatattctcaggcctca

SEQ ID NO: 5233625 - DNA, 25 bp, Homo sapien
taaaaaccatgtcctagcctagcag

SEQ ID NO: 5233626 - DNA, 25 bp, Homo sapien
gaatctgtcttaacaagctctttgg

SEQ ID NO: 5233627 - DNA, 25 bp, Homo sapien
gtaggcctccaagattgcagcctgg

SEQ ID NO: 5233628 - DNA, 25 bp, Homo sapien
gacacaagctgcctcgacagacaaa

SEQ ID NO: 5233629 - DNA, 25 bp, Homo sapien
accagagggttgtacaattactgac

SEQ ID NO: 5233630 - DNA, 25 bp, Homo sapien
gatgtctttagacttggttatacca

SEQ ID NO: 5233631 - DNA, 25 bp, Homo sapien
agttccagagttgaggatgatgtct

SEQ ID NO: 5233632 - DNA, 25 bp, Homo sapien
ctgcttgctgcccatggagctgctt

SEQ ID NO: 5233633 - DNA, 25 bp, Homo sapien
aggatgctgtgcaggacactgcctg

SEQ ID NO: 5233634 - DNA, 25 bp, Homo sapien
tgctgcccatggagctgcttcaacc

SEQ ID NO: 5233635 - DNA, 25 bp, Homo sapien
tgtgcaggacactgcctgcttgctg

SEQ ID NO: 5233636 - DNA, 25 bp, Homo sapien
tgtgctgagggacagctcatgaaag

SEQ ID NO: 5233637 - DNA, 25 bp, Homo sapien
caaggagaagcttcacgaaagccaa

SEQ ID NO: 5233638 - DNA, 25 bp, Homo sapien
ttcacgaaagccaactgcagctctg

SEQ ID NO: 5233639 - DNA, 25 bp, Homo sapien
ctttccttttggagcggtgtgctga

SEQ ID NO: 5233640 - DNA, 25 bp, Homo sapien
tcaaaacctgataggttagtttgct

SEQ ID NO: 5233641 - DNA, 25 bp, Homo sapien
aacctgataggttagtttgcttcca

SEQ ID NO: 5233642 - DNA, 25 bp, Homo sapien
cctgataggttagtttgcttccatg

SEQ ID NO: 5233643 - DNA, 25 bp, Homo sapien
tgataggttagtttgcttccatgaa

SEQ ID NO: 5233644 - DNA, 25 bp, Homo sapien
tcccacagcagagtagaagtctcag

SEQ ID NO: 5233645 - DNA, 25 bp, Homo sapien
tttcagagcatgactgcgggggcaa

SEQ ID NO: 5233646 - DNA, 25 bp, Homo sapien
taagaacctataccatttcagagca

SEQ ID NO: 5233647 - DNA, 25 bp, Homo sapien
ggcatttgtcttaggctgactccca

SEQ ID NO: 5233648 - DNA, 25 bp, Homo sapien
cagccctgacctattacagaaccag

SEQ ID NO: 5233649 - DNA, 25 bp, Homo sapien
taagaaagattaagcacaggagcct

SEQ ID NO: 5233650 - DNA, 25 bp, Homo sapien
ctgggcacccaagcatgatctgagg

SEQ ID NO: 5233651 - DNA, 25 bp, Homo sapien
caagcactgatgatccagttaagaa

SEQ ID NO: 5233652 - DNA, 25 bp, Homo sapien
accagcattggcttctgtaactgca

SEQ ID NO: 5233653 - DNA, 25 bp, Homo sapien
tgtaactgcactcccagtcaagtgg

SEQ ID NO: 5233654 - DNA, 25 bp, Homo sapien
actttgggcattgcgctctctgcag

SEQ ID NO: 5233655 - DNA, 25 bp, Homo sapien
cctttacaccatcagagatgcaccc

SEQ ID NO: 5233656 - DNA, 25 bp, Homo sapien
tggcctacctcacctttaagcaatt

SEQ ID NO: 5233657 - DNA, 25 bp, Homo sapien
tcagactagtagagatgatttatcc

SEQ ID NO: 5233658 - DNA, 25 bp, Homo sapien
gaactcctgcttctatgcctttggc

SEQ ID NO: 5233659 - DNA, 25 bp, Homo sapien
ttaaccaacgagaaaaacagcagct

SEQ ID NO: 5233660 - DNA, 25 bp, Homo sapien
gctcttggccatagagtctgagtct

SEQ ID NO: 5233661 - DNA, 25 bp, Homo sapien
tgataaaaaccagtctgattagtgg

SEQ ID NO: 5233662 - DNA, 25 bp, Homo sapien
tgcccacccattctgctactttgag

SEQ ID NO: 5233663 - DNA, 25 bp, Homo sapien
gtggaaggccaaaaacatggattca

SEQ ID NO: 5233664 - DNA, 25 bp, Homo sapien
tatgaccaggatgatgcaagttgct

SEQ ID NO: 5233665 - DNA, 25 bp, Homo sapien
tcattcctccgacgggctgagtaca

SEQ ID NO: 5233666 - DNA, 25 bp, Homo sapien
ggcaaggacaatcagcccttgattt

SEQ ID NO: 5233667 - DNA, 25 bp, Homo sapien
gagacggttggcaaggacaatcagc

SEQ ID NO: 5233668 - DNA, 25 bp, Homo sapien
gcctctttatgtttgaggatttatg

SEQ ID NO: 5233669 - DNA, 25 bp, Homo sapien
caaggcaagatgtgtgccgtcctta

SEQ ID NO: 5233670 - DNA, 25 bp, Homo sapien
gattagatatgtgggatgccaaggc

SEQ ID NO: 5233671 - DNA, 25 bp, Homo sapien
gatgtgtgccgtccttatgcctctt

SEQ ID NO: 5233672 - DNA, 25 bp, Homo sapien
ttacaatcaggcctagggaagccat

SEQ ID NO: 5233673 - DNA, 25 bp, Homo sapien
taggtacgggagctttacaatcagg

SEQ ID NO: 5233674 - DNA, 25 bp, Homo sapien
gagctttacaatcaggcctagggaa

SEQ ID NO: 5233675 - DNA, 25 bp, Homo sapien
ctgtgaagtaggtacgggagcttta

SEQ ID NO: 5233676 - DNA, 25 bp, Homo sapien
caaccaggcgatgaatcagagcagc

SEQ ID NO: 5233677 - DNA, 25 bp, Homo sapien
gcgatgaatcagagcagcaaagggc

SEQ ID NO: 5233678 - DNA, 25 bp, Homo sapien
ggcctccaaccaggcgatgaatcag

SEQ ID NO: 5233679 - DNA, 25 bp, Homo sapien
caggcgatgaatcagagcagcaaag

SEQ ID NO: 5233680 - DNA, 25 bp, Homo sapien
taaagacgccaatgaaagagtatgg

SEQ ID NO: 5233681 - DNA, 25 bp, Homo sapien
gccataagataattgtccagcaatg

SEQ ID NO: 5233682 - DNA, 25 bp, Homo sapien
actaccaaccaatggctctgccata

SEQ ID NO: 5233683 - DNA, 25 bp, Homo sapien
ggtcctctataaagacgccaatgaa

SEQ ID NO: 5233684 - DNA, 25 bp, Homo sapien
accttgagagtaaagacatgaaggc

SEQ ID NO: 5233685 - DNA, 25 bp, Homo sapien
gctggtgacttgaatcgagcttcct

SEQ ID NO: 5233686 - DNA, 25 bp, Homo sapien
agaaccttgagagtaaagacatgaa

SEQ ID NO: 5233687 - DNA, 25 bp, Homo sapien
gcaactctgttttctgctggtgact

SEQ ID NO: 5233688 - DNA, 25 bp, Homo sapien
gcatgtcaaggaccagccaggcagc

SEQ ID NO: 5233689 - DNA, 25 bp, Homo sapien
aggagcatgtcaaggaccagccagg

SEQ ID NO: 5233690 - DNA, 25 bp, Homo sapien
attggaggagcatgtcaaggaccag

SEQ ID NO: 5233691 - DNA, 25 bp, Homo sapien
agattggaggagcatgtcaaggacc

SEQ ID NO: 5233692 - DNA, 25 bp, Homo sapien
agattcaggtttccgctatggcaag

SEQ ID NO: 5233693 - DNA, 25 bp, Homo sapien
gaaggatccattgcctgtattgccc

SEQ ID NO: 5233694 - DNA, 25 bp, Homo sapien
ttggaagaaggagacctgaaggatc

SEQ ID NO: 5233695 - DNA, 25 bp, Homo sapien
gaaagtgttcccagggctacatttg

SEQ ID NO: 5233696 - DNA, 25 bp, Homo sapien
tgcctcctccgaatagttccagtga

SEQ ID NO: 5233697 - DNA, 25 bp, Homo sapien
cctcctccgaatagttccagtgact

SEQ ID NO: 5233698 - DNA, 25 bp, Homo sapien
tcactgcctcctccgaatagttcca

SEQ ID NO: 5233699 - DNA, 25 bp, Homo sapien
tcctccgaatagttccagtgactgc

SEQ ID NO: 5233700 - DNA, 25 bp, Homo sapien
ccttctgtgctggttggtgagcagc

SEQ ID NO: 5233701 - DNA, 25 bp, Homo sapien
cctctgggcatatggctgatattta

SEQ ID NO: 5233702 - DNA, 25 bp, Homo sapien
tctcatctgaccctctgggcatatg

SEQ ID NO: 5233703 - DNA, 25 bp, Homo sapien
agtccttctgtgctggttggtgagc

SEQ ID NO: 5233704 - DNA, 25 bp, Homo sapien
gaagcacttgttcatgattggttga

SEQ ID NO: 5233705 - DNA, 25 bp, Homo sapien
tcatgattggttgataggtgcctgt

SEQ ID NO: 5233706 - DNA, 25 bp, Homo sapien
tactgagtgtctgcttgctgagatg

SEQ ID NO: 5233707 - DNA, 25 bp, Homo sapien
ttaagcccgagagacaacactcaaa

SEQ ID NO: 5233708 - DNA, 25 bp, Homo sapien
tgttttacagggtcattcataggct

SEQ ID NO: 5233709 - DNA, 25 bp, Homo sapien
gaacttctttcaggttcaaaggagc

SEQ ID NO: 5233710 - DNA, 25 bp, Homo sapien
actaccacgagagcagcaccaaagg

SEQ ID NO: 5233711 - DNA, 25 bp, Homo sapien
gcacatccttacatagccagaacag

SEQ ID NO: 5233712 - DNA, 25 bp, Homo sapien
gaaatttgtaactggttgtggtcag

SEQ ID NO: 5233713 - DNA, 25 bp, Homo sapien
ttgtaactggttgtggtcagttatt

SEQ ID NO: 5233714 - DNA, 25 bp, Homo sapien
ggttgtggtcagttatttgtaaata

SEQ ID NO: 5233715 - DNA, 25 bp, Homo sapien
tcaagtgaaggagtgggggtggaaa

SEQ ID NO: 5233716 - DNA, 25 bp, Homo sapien
agtttcccttgacttgggagctcca

SEQ ID NO: 5233717 - DNA, 25 bp, Homo sapien
gtagagttgtgtcgacctccctgga

SEQ ID NO: 5233718 - DNA, 25 bp, Homo sapien
ctgagtttcccttgacttgggagct

SEQ ID NO: 5233719 - DNA, 25 bp, Homo sapien
gagtttcccttgacttgggagctcc

SEQ ID NO: 5233720 - DNA, 25 bp, Homo sapien
gtctggaagaaactttgtgggttca

SEQ ID NO: 5233721 - DNA, 25 bp, Homo sapien
gcttccttatcttccaacacatgca

SEQ ID NO: 5233722 - DNA, 25 bp, Homo sapien
ggaacagtaactccacaaagccatc

SEQ ID NO: 5233723 - DNA, 25 bp, Homo sapien
ctttgtgggttcagaagcttcctta

SEQ ID NO: 5233724 - DNA, 25 bp, Homo sapien
cagacattctgtgcaatacttgctg

SEQ ID NO: 5233725 - DNA, 25 bp, Homo sapien
caggggttggcccatttggctgctc

SEQ ID NO: 5233726 - DNA, 25 bp, Homo sapien
gcactccaggggttggcccatttgg

SEQ ID NO: 5233727 - DNA, 25 bp, Homo sapien
tctgtgcaatacttgctgccttatt

SEQ ID NO: 5233728 - DNA, 25 bp, Homo sapien
gccggcctcgcctctggttgcatgg

SEQ ID NO: 5233729 - DNA, 25 bp, Homo sapien
gaaccgaattattccactagtatta

SEQ ID NO: 5233730 - DNA, 25 bp, Homo sapien
gcctgagaaccgaattattccacta

SEQ ID NO: 5233731 - DNA, 25 bp, Homo sapien
ggaggatcatgaaggccggagtcgc

SEQ ID NO: 5233732 - DNA, 25 bp, Homo sapien
tgcctggccggacatcatccatttc

SEQ ID NO: 5233733 - DNA, 25 bp, Homo sapien
tgcacaacacacttggagctagaat

SEQ ID NO: 5233734 - DNA, 25 bp, Homo sapien
ggagaaatatggtagcttcactgaa

SEQ ID NO: 5233735 - DNA, 25 bp, Homo sapien
gaatttaatgagcacaaaaccctaa

SEQ ID NO: 5233736 - DNA, 25 bp, Homo sapien
ctgctccaatctgctcactcattaa

SEQ ID NO: 5233737 - DNA, 25 bp, Homo sapien
ctgctcactcattaattcacatatg

SEQ ID NO: 5233738 - DNA, 25 bp, Homo sapien
gctccaatctgctcactcattaatt

SEQ ID NO: 5233739 - DNA, 25 bp, Homo sapien
atctgctcactcattaattcacata

SEQ ID NO: 5233740 - DNA, 25 bp, Homo sapien
tcttccgagtggacggttaggccac

SEQ ID NO: 5233741 - DNA, 25 bp, Homo sapien
tattcaagcgctgcgagttcgccag

SEQ ID NO: 5233742 - DNA, 25 bp, Homo sapien
agccttattgtagcggccaggcctg

SEQ ID NO: 5233743 - DNA, 25 bp, Homo sapien
agagcctcccgagcgggaccggtct

SEQ ID NO: 5233744 - DNA, 25 bp, Homo sapien
gaggcctagaacgcgagccacattc

SEQ ID NO: 5233745 - DNA, 25 bp, Homo sapien
cagggaggcctagaacgcgagccac

SEQ ID NO: 5233746 - DNA, 25 bp, Homo sapien
cctagaacgcgagccacattcgccc

SEQ ID NO: 5233747 - DNA, 25 bp, Homo sapien
ccagggaggcctagaacgcgagcca

SEQ ID NO: 5233748 - DNA, 25 bp, Homo sapien
gcctcaaggtaagcgggcgccacgc

SEQ ID NO: 5233749 - DNA, 25 bp, Homo sapien
ggtaagcgggcgccacgccccactc

SEQ ID NO: 5233750 - DNA, 25 bp, Homo sapien
ccagcctcaaggtaagcgggcgcca

SEQ ID NO: 5233751 - DNA, 25 bp, Homo sapien
aggtaagcgggcgccacgccccact

SEQ ID NO: 5233752 - DNA, 25 bp, Homo sapien
taaccagagagactcggccataaga

SEQ ID NO: 5233753 - DNA, 25 bp, Homo sapien
caggcctggtaagctgtctccacta

SEQ ID NO: 5233754 - DNA, 25 bp, Homo sapien
ataagacccactgatcagccccaaa

SEQ ID NO: 5233755 - DNA, 25 bp, Homo sapien
aaccataaatccattccgccacatg

SEQ ID NO: 5233756 - DNA, 25 bp, Homo sapien
cacttgctaacatagtctttttcca

SEQ ID NO: 5233757 - DNA, 25 bp, Homo sapien
catggcgtgacacttgctaacatag

SEQ ID NO: 5233758 - DNA, 25 bp, Homo sapien
cgtgacacttgctaacatagtcttt

SEQ ID NO: 5233759 - DNA, 25 bp, Homo sapien
tggcgtgacacttgctaacatagtc

SEQ ID NO: 5233760 - DNA, 25 bp, Homo sapien
gcttatgcaggaatgtcaaccttta

SEQ ID NO: 5233761 - DNA, 25 bp, Homo sapien
aatgcttatgcaggaatgtcaacct

SEQ ID NO: 5233762 - DNA, 25 bp, Homo sapien
tatgcaggaatgtcaacctttaatt

SEQ ID NO: 5233763 - DNA, 25 bp, Homo sapien
caggaatgtcaacctttaattggaa

SEQ ID NO: 5233764 - DNA, 25 bp, Homo sapien
cctttttggactgaggaccctgact

SEQ ID NO: 5233765 - DNA, 25 bp, Homo sapien
tgtaagaaatgttctgccccgaagg

SEQ ID NO: 5233766 - DNA, 25 bp, Homo sapien
aatcaacacctggaaacgatcgccg

SEQ ID NO: 5233767 - DNA, 25 bp, Homo sapien
tctaacttagcatccctgggaggct

SEQ ID NO: 5233768 - DNA, 25 bp, Homo sapien
tgaagttccacgtcttggtgtcagg

SEQ ID NO: 5233769 - DNA, 25 bp, Homo sapien
aagttccacgtcttggtgtcaggat

SEQ ID NO: 5233770 - DNA, 25 bp, Homo sapien
tcatgctgaagttccacgtcttggt

SEQ ID NO: 5233771 - DNA, 25 bp, Homo sapien
gctgaagttccacgtcttggtgtca

SEQ ID NO: 5233772 - DNA, 25 bp, Homo sapien
tagataatttctggcacggtgtcgg

SEQ ID NO: 5233773 - DNA, 25 bp, Homo sapien
gaggaagctcgccaggatgaataaa

SEQ ID NO: 5233774 - DNA, 25 bp, Homo sapien
ccaccacatgcggttagttttcgta

SEQ ID NO: 5233775 - DNA, 25 bp, Homo sapien
agctcaaaccatctacgcaccttag

SEQ ID NO: 5233776 - DNA, 25 bp, Homo sapien
gtggggaggctctgggctgctttca

SEQ ID NO: 5233777 - DNA, 25 bp, Homo sapien
cgtggggaggctctgggctgctttc

SEQ ID NO: 5233778 - DNA, 25 bp, Homo sapien
gctgctgccataggcccattccaga

SEQ ID NO: 5233779 - DNA, 25 bp, Homo sapien
tggagggtgactcgctgctgccata

SEQ ID NO: 5233780 - DNA, 25 bp, Homo sapien
agggtgactcgctgctgccataggc

SEQ ID NO: 5233781 - DNA, 25 bp, Homo sapien
tgactcgctgctgccataggcccat

SEQ ID NO: 5233782 - DNA, 25 bp, Homo sapien
gagatgagcatgcatcgccctttga

SEQ ID NO: 5233783 - DNA, 25 bp, Homo sapien
tttgacaaatgaaagggatggagct

SEQ ID NO: 5233784 - DNA, 25 bp, Homo sapien
aaaaagcgcaataaggtcctgtgaa

SEQ ID NO: 5233785 - DNA, 25 bp, Homo sapien
cctgtgaataactgatgtctgcctc

SEQ ID NO: 5233786 - DNA, 25 bp, Homo sapien
tccatctaaggatgatgacgtagca

SEQ ID NO: 5233787 - DNA, 25 bp, Homo sapien
gatgaaagctcttgttaagcaagca

SEQ ID NO: 5233788 - DNA, 25 bp, Homo sapien
tgacgtagcaaccagcatcagcctc

SEQ ID NO: 5233789 - DNA, 25 bp, Homo sapien
taagcaagcaattctagaggcttct

SEQ ID NO: 5233790 - DNA, 25 bp, Homo sapien
gatacagaaattaggagagtacttt

SEQ ID NO: 5233791 - DNA, 25 bp, Homo sapien
atacagaaattaggagagtactttc

SEQ ID NO: 5233792 - DNA, 25 bp, Homo sapien
tacagaaattaggagagtactttcc

SEQ ID NO: 5233793 - DNA, 25 bp, Homo sapien
ggatacagaaattaggagagtactt

SEQ ID NO: 5233794 - DNA, 25 bp, Homo sapien
tcttccaagagaaagctccacttcc

SEQ ID NO: 5233795 - DNA, 25 bp, Homo sapien
ttagtttactgtgctcttccaagag

SEQ ID NO: 5233796 - DNA, 25 bp, Homo sapien
ttccaagagaaagctccacttcctg

SEQ ID NO: 5233797 - DNA, 25 bp, Homo sapien
tgctcttccaagagaaagctccact

SEQ ID NO: 5233798 - DNA, 25 bp, Homo sapien
gtaaaatagctctttgccagaatgc

SEQ ID NO: 5233799 - DNA, 25 bp, Homo sapien
tgtaagcgttatgttccttcggcca

SEQ ID NO: 5233800 - DNA, 25 bp, Homo sapien
gacagacgtgttgtcggcttcgtga

SEQ ID NO: 5233801 - DNA, 25 bp, Homo sapien
ctactagccacatagcagagatgct

SEQ ID NO: 5233802 - DNA, 25 bp, Homo sapien
aaatactgatgtgaacgtgcagggc

SEQ ID NO: 5233803 - DNA, 25 bp, Homo sapien
tcaatatatttaagtccatttctct

SEQ ID NO: 5233804 - DNA, 25 bp, Homo sapien
cagggctgagccatctactgctacc

SEQ ID NO: 5233805 - DNA, 25 bp, Homo sapien
tgctacctccaattgctttgtattt

SEQ ID NO: 5233806 - DNA, 25 bp, Homo sapien
tcagagtaacccaccaaaaggctaa

SEQ ID NO: 5233807 - DNA, 25 bp, Homo sapien
ctgggagtcagagtaacccaccaaa

SEQ ID NO: 5233808 - DNA, 25 bp, Homo sapien
aatcgtcctccggtatccagtaaag

SEQ ID NO: 5233809 - DNA, 25 bp, Homo sapien
caccaaaaggctaatcgtcctccgg

SEQ ID NO: 5233810 - DNA, 25 bp, Homo sapien
ctatcactttcaggatgttcttccc

SEQ ID NO: 5233811 - DNA, 25 bp, Homo sapien
caggctatcactttcaggatgttct

SEQ ID NO: 5233812 - DNA, 25 bp, Homo sapien
ctgtcctgcaggctatcactttcag

SEQ ID NO: 5233813 - DNA, 25 bp, Homo sapien
tgcaggctatcactttcaggatgtt

SEQ ID NO: 5233814 - DNA, 25 bp, Homo sapien
gcatcagattagacacgagcttggg

SEQ ID NO: 5233815 - DNA, 25 bp, Homo sapien
tggcgtgagactgagagatgtcttc

SEQ ID NO: 5233816 - DNA, 25 bp, Homo sapien
tccagctctctgaaagggcatcaga

SEQ ID NO: 5233817 - DNA, 25 bp, Homo sapien
tgcctctgggacatctggcgtgaga

SEQ ID NO: 5233818 - DNA, 25 bp, Homo sapien
aacacgtgggcccaaggatggctaa

SEQ ID NO: 5233819 - DNA, 25 bp, Homo sapien
agcacccaacacgtgggcccaagga

SEQ ID NO: 5233820 - DNA, 25 bp, Homo sapien
taacagtgccacgaagaacttggat

SEQ ID NO: 5233821 - DNA, 25 bp, Homo sapien
caaggatggctaacagtgccacgaa

SEQ ID NO: 5233822 - DNA, 25 bp, Homo sapien
tccggtaaaaggctgcgatgcagat

SEQ ID NO: 5233823 - DNA, 25 bp, Homo sapien
gcggcctcctttggctatggcaaaa

SEQ ID NO: 5233824 - DNA, 25 bp, Homo sapien
aggcccatgtcgtcagcgagcagca

SEQ ID NO: 5233825 - DNA, 25 bp, Homo sapien
gcagatggcttggatggtcttcccc

SEQ ID NO: 5233826 - DNA, 25 bp, Homo sapien
gaaaactgcaatttgaagaccatta

SEQ ID NO: 5233827 - DNA, 25 bp, Homo sapien
aaactgcaatttgaagaccattaac

SEQ ID NO: 5233828 - DNA, 25 bp, Homo sapien
gtgaaaactgcaatttgaagaccat

SEQ ID NO: 5233829 - DNA, 25 bp, Homo sapien
cttctctgtgaaaactgcaatttga

SEQ ID NO: 5233830 - DNA, 25 bp, Homo sapien
ggcaatctgagcatctctagccaaa

SEQ ID NO: 5233831 - DNA, 25 bp, Homo sapien
ctgttcaatacagggagggctggcc

SEQ ID NO: 5233832 - DNA, 25 bp, Homo sapien
tttatgaacgatgtagcagagcctg

SEQ ID NO: 5233833 - DNA, 25 bp, Homo sapien
catttattgatgatgacgagactac

SEQ ID NO: 5233834 - DNA, 25 bp, Homo sapien
tcaccacgacgttgatgcaatctgg

SEQ ID NO: 5233835 - DNA, 25 bp, Homo sapien
ctgacaatgttgatcaggccagctg

SEQ ID NO: 5233836 - DNA, 25 bp, Homo sapien
agctgtcaggcggtccttcccagtc

SEQ ID NO: 5233837 - DNA, 25 bp, Homo sapien
ttttccaacttgctaagaaggtcaa

SEQ ID NO: 5233838 - DNA, 25 bp, Homo sapien
ccacataagtgtacaagatccaatc

SEQ ID NO: 5233839 - DNA, 25 bp, Homo sapien
gaagtagccacataagtgtacaaga

SEQ ID NO: 5233840 - DNA, 25 bp, Homo sapien
tagccacataagtgtacaagatcca

SEQ ID NO: 5233841 - DNA, 25 bp, Homo sapien
agtagccacataagtgtacaagatc

SEQ ID NO: 5233842 - DNA, 25 bp, Homo sapien
ctcgacagcgggcagtcctactgtt

SEQ ID NO: 5233843 - DNA, 25 bp, Homo sapien
gcatagctgctcgacagcgggcagt

SEQ ID NO: 5233844 - DNA, 25 bp, Homo sapien
ctttaggaccggcatagctgctcga

SEQ ID NO: 5233845 - DNA, 25 bp, Homo sapien
cagtcctactgtttttgaggaagtg

SEQ ID NO: 5233846 - DNA, 25 bp, Homo sapien
tacttgcaacccctgctggactagg

SEQ ID NO: 5233847 - DNA, 25 bp, Homo sapien
aaattggtaccacagccctaaggag

SEQ ID NO: 5233848 - DNA, 25 bp, Homo sapien
catggcccacaggtctatacttgca

SEQ ID NO: 5233849 - DNA, 25 bp, Homo sapien
tggactaggacgacatgcaagcctg

SEQ ID NO: 5233850 - DNA, 25 bp, Homo sapien
tactcagtaaccctgatgtggcagg

SEQ ID NO: 5233851 - DNA, 25 bp, Homo sapien
ggatcacagtcactatacaaggagc

SEQ ID NO: 5233852 - DNA, 25 bp, Homo sapien
gcatagcttgaggacaagtgaccaa

SEQ ID NO: 5233853 - DNA, 25 bp, Homo sapien
gagacacctgtagttaaatcgaaag

SEQ ID NO: 5233854 - DNA, 25 bp, Homo sapien
gcatatgcctgacgccaagtaacca

SEQ ID NO: 5233855 - DNA, 25 bp, Homo sapien
tgtagcatatgcctgacgccaagta

SEQ ID NO: 5233856 - DNA, 25 bp, Homo sapien
tttctgtagcatatgcctgacgcca

SEQ ID NO: 5233857 - DNA, 25 bp, Homo sapien
tattttctgtagcatatgcctgacg

SEQ ID NO: 5233858 - DNA, 25 bp, Homo sapien
acatggctggtgtgcccgacaacag

SEQ ID NO: 5233859 - DNA, 25 bp, Homo sapien
actgcgatgatctgcgtgtagagct

SEQ ID NO: 5233860 - DNA, 25 bp, Homo sapien
gcgaagtccaaaggcatgaaactgg

SEQ ID NO: 5233861 - DNA, 25 bp, Homo sapien
gtttggcatcacagtagcgaagtcc

SEQ ID NO: 5233862 - DNA, 25 bp, Homo sapien
gcagctgggaaaggacgtcggactt

SEQ ID NO: 5233863 - DNA, 25 bp, Homo sapien
cgtcggacttgaggcgccgcagcat

SEQ ID NO: 5233864 - DNA, 25 bp, Homo sapien
ggtcctggcattgatccgtcctggg

SEQ ID NO: 5233865 - DNA, 25 bp, Homo sapien
cactatcttgcgctgcttggcaggc

SEQ ID NO: 5233866 - DNA, 25 bp, Homo sapien
tccaaatctgtctccagccctggac

SEQ ID NO: 5233867 - DNA, 25 bp, Homo sapien
aatctgtctccagccctggactcac

SEQ ID NO: 5233868 - DNA, 25 bp, Homo sapien
aaatctgtctccagccctggactca

SEQ ID NO: 5233869 - DNA, 25 bp, Homo sapien
tgcttccaaatctgtctccagccct

SEQ ID NO: 5233870 - DNA, 25 bp, Homo sapien
cagggcaggcttacatgtgatgacc

SEQ ID NO: 5233871 - DNA, 25 bp, Homo sapien
gatgatgcagcaaaacgtaccaacc

SEQ ID NO: 5233872 - DNA, 25 bp, Homo sapien
tactcgtgtccttcagagagagcct

SEQ ID NO: 5233873 - DNA, 25 bp, Homo sapien
gatgacctcactcgcagcatgtgtg

SEQ ID NO: 5233874 - DNA, 25 bp, Homo sapien
atgacagatgggattttagcttcag

SEQ ID NO: 5233875 - DNA, 25 bp, Homo sapien
cagatgggattttagcttcagctgt

SEQ ID NO: 5233876 - DNA, 25 bp, Homo sapien
cttcagctgttctgttgaagaagag

SEQ ID NO: 5233877 - DNA, 25 bp, Homo sapien
cagctgttctgttgaagaagagaat

SEQ ID NO: 5233878 - DNA, 25 bp, Homo sapien
caagctcttgcgtaattgcgtccag

SEQ ID NO: 5233879 - DNA, 25 bp, Homo sapien
ttccagtaggtccaagatatattca

SEQ ID NO: 5233880 - DNA, 25 bp, Homo sapien
ttgcgtaattgcgtccaggaccacc

SEQ ID NO: 5233881 - DNA, 25 bp, Homo sapien
ccaggaccaccttatggtgtgcaaa

SEQ ID NO: 5233882 - DNA, 25 bp, Homo sapien
ggcttcagtgagcagcattcgtgcc

SEQ ID NO: 5233883 - DNA, 25 bp, Homo sapien
cagcggtgatggacagcacggccac

SEQ ID NO: 5233884 - DNA, 25 bp, Homo sapien
aaggtgaggcccatattggcagcgg

SEQ ID NO: 5233885 - DNA, 25 bp, Homo sapien
acagcatgcctctccgacagttgga

SEQ ID NO: 5233886 - DNA, 25 bp, Homo sapien
gttggaactgctggcacaggtcctc

SEQ ID NO: 5233887 - DNA, 25 bp, Homo sapien
tatctgagtcttctgcgtctcttac

SEQ ID NO: 5233888 - DNA, 25 bp, Homo sapien
gtatctgagtcttctgcgtctctta

SEQ ID NO: 5233889 - DNA, 25 bp, Homo sapien
gtgtccaggaattgagacaggcagg

SEQ ID NO: 5233890 - DNA, 25 bp, Homo sapien
tccaggaattgagacaggcaggtaa

SEQ ID NO: 5233891 - DNA, 25 bp, Homo sapien
tgtccaggaattgagacaggcaggt

SEQ ID NO: 5233892 - DNA, 25 bp, Homo sapien
caggaattgagacaggcaggtaaag

SEQ ID NO: 5233893 - DNA, 25 bp, Homo sapien
cgaggtagtgaatgcccacggagct

SEQ ID NO: 5233894 - DNA, 25 bp, Homo sapien
cacggagctggtctgtccaatgcgg

SEQ ID NO: 5233895 - DNA, 25 bp, Homo sapien
aggtagtcatcagctgtgccctttg

SEQ ID NO: 5233896 - DNA, 25 bp, Homo sapien
caatgcggtgcacgcggtcctcagc

SEQ ID NO: 5233897 - DNA, 25 bp, Homo sapien
tctgaaaaattggtctcagaaagcc

SEQ ID NO: 5233898 - DNA, 25 bp, Homo sapien
actttaatcttctcttgaatcaggg

SEQ ID NO: 5233899 - DNA, 25 bp, Homo sapien
cttgtagaggtaatcagtggattct

SEQ ID NO: 5233900 - DNA, 25 bp, Homo sapien
cagaaagcccggcttctgccagaac

SEQ ID NO: 5233901 - DNA, 25 bp, Homo sapien
ccatttaccattcagctgaactgga

SEQ ID NO: 5233902 - DNA, 25 bp, Homo sapien
tcagctgaactggagagttctttaa

SEQ ID NO: 5233903 - DNA, 25 bp, Homo sapien
aaaggcttgtaataacctaggctct

SEQ ID NO: 5233904 - DNA, 25 bp, Homo sapien
acctaggctctgttaccatttacca

SEQ ID NO: 5233905 - DNA, 25 bp, Homo sapien
tggatacaaccacaacacacgatca

SEQ ID NO: 5233906 - DNA, 25 bp, Homo sapien
tgacaatggtgtagtgttaaaacca

SEQ ID NO: 5233907 - DNA, 25 bp, Homo sapien
tccaaatctctgtgttcagccatgg

SEQ ID NO: 5233908 - DNA, 25 bp, Homo sapien
caaatgatcttttggctgggctcag

SEQ ID NO: 5233909 - DNA, 25 bp, Homo sapien
aaggtataattcaacttctaaatct

SEQ ID NO: 5233910 - DNA, 25 bp, Homo sapien
aggtataattcaacttctaaatctc

SEQ ID NO: 5233911 - DNA, 25 bp, Homo sapien
taaagcagcctcactgttttagtgt

SEQ ID NO: 5233912 - DNA, 25 bp, Homo sapien
cacatttcatggtgtcagggagcta

SEQ ID NO: 5233913 - DNA, 25 bp, Homo sapien
aagataaaaggaagagcccaggctc

SEQ ID NO: 5233914 - DNA, 25 bp, Homo sapien
ccactagggctgatgagagaatata

SEQ ID NO: 5233915 - DNA, 25 bp, Homo sapien
gaataggtcgtagatcttctgctgc

SEQ ID NO: 5233916 - DNA, 25 bp, Homo sapien
agggtgtctcccatgttctgggaac

SEQ ID NO: 5233917 - DNA, 25 bp, Homo sapien
ccatgttctgggaactacttccaga

SEQ ID NO: 5233918 - DNA, 25 bp, Homo sapien
gggagacgtaaagctgtcccagtta

SEQ ID NO: 5233919 - DNA, 25 bp, Homo sapien
tagaccgggccttctgggagagatc

SEQ ID NO: 5233920 - DNA, 25 bp, Homo sapien
tgatgccacttagatgcttagaccg

SEQ ID NO: 5233921 - DNA, 25 bp, Homo sapien
gctgggagaagcaactgatgccact

SEQ ID NO: 5233922 - DNA, 25 bp, Homo sapien
agcagccggcagcttgacacagtga

SEQ ID NO: 5233923 - DNA, 25 bp, Homo sapien
gtggaaagcagactcaacggttaac

SEQ ID NO: 5233924 - DNA, 25 bp, Homo sapien
tggaaagcagactcaacggttaacc

SEQ ID NO: 5233925 - DNA, 25 bp, Homo sapien
gaaagcagactcaacggttaaccca

SEQ ID NO: 5233926 - DNA, 25 bp, Homo sapien
ctgacttcttgcagtatcatgaggg

SEQ ID NO: 5233927 - DNA, 25 bp, Homo sapien
acttcttgcagtatcatgagggcca

SEQ ID NO: 5233928 - DNA, 25 bp, Homo sapien
tgcagtatcatgagggccattctgt

SEQ ID NO: 5233929 - DNA, 25 bp, Homo sapien
gcagtatcatgagggccattctgtg

SEQ ID NO: 5233930 - DNA, 25 bp, Homo sapien
tttcagttgacgcttccagaaaaca

SEQ ID NO: 5233931 - DNA, 25 bp, Homo sapien
ttcagttgacgcttccagaaaacac

SEQ ID NO: 5233932 - DNA, 25 bp, Homo sapien
tcatttcagttgacgcttccagaaa

SEQ ID NO: 5233933 - DNA, 25 bp, Homo sapien
catttcagttgacgcttccagaaaa

SEQ ID NO: 5233934 - DNA, 25 bp, Homo sapien
caagtacatcatgtgaagtgagtca

SEQ ID NO: 5233935 - DNA, 25 bp, Homo sapien
gtatgcatagagataaattacaaat

SEQ ID NO: 5233936 - DNA, 25 bp, Homo sapien
gggaggagaatgcaggactcttatt

SEQ ID NO: 5233937 - DNA, 25 bp, Homo sapien
gggtagatcaatatgaaacaatggc

SEQ ID NO: 5233938 - DNA, 25 bp, Homo sapien
tgcacacataaagactggagtagtt

SEQ ID NO: 5233939 - DNA, 25 bp, Homo sapien
gacccgtcacagagcatttacacag

SEQ ID NO: 5233940 - DNA, 25 bp, Homo sapien
gatgccccgaaagaataagagtgtg

SEQ ID NO: 5233941 - DNA, 25 bp, Homo sapien
ggaaattgactcaggcaacccctct

SEQ ID NO: 5233942 - DNA, 25 bp, Homo sapien
ctgcacagcattgttgagagtcccg

SEQ ID NO: 5233943 - DNA, 25 bp, Homo sapien
tgcacagcattgttgagagtcccgt

SEQ ID NO: 5233944 - DNA, 25 bp, Homo sapien
ctgaggtgcaagcatcattccaaat

SEQ ID NO: 5233945 - DNA, 25 bp, Homo sapien
tgcaagcatcattccaaattcatct

SEQ ID NO: 5233946 - DNA, 25 bp, Homo sapien
gaggtgcaagcatcattccaaattc

SEQ ID NO: 5233947 - DNA, 25 bp, Homo sapien
tctgaggtgcaagcatcattccaaa

SEQ ID NO: 5233948 - DNA, 25 bp, Homo sapien
cgctgcagagcctcctacgtctctg

SEQ ID NO: 5233949 - DNA, 25 bp, Homo sapien
gctgcagagcctcctacgtctctgg

SEQ ID NO: 5233950 - DNA, 25 bp, Homo sapien
cagagcctcctacgtctctggcctt

SEQ ID NO: 5233951 - DNA, 25 bp, Homo sapien
tgcagagcctcctacgtctctggcc

SEQ ID NO: 5233952 - DNA, 25 bp, Homo sapien
gaaaggacgatggttctgctcgcga

SEQ ID NO: 5233953 - DNA, 25 bp, Homo sapien
caaccatagcagaagcatgtccgga

SEQ ID NO: 5233954 - DNA, 25 bp, Homo sapien
caggccagctgcaaacgatcatata

SEQ ID NO: 5233955 - DNA, 25 bp, Homo sapien
ggtacgagttcctccattcgatgca

SEQ ID NO: 5233956 - DNA, 25 bp, Homo sapien
gccgcgacctaggtccgagcccaga

SEQ ID NO: 5233957 - DNA, 25 bp, Homo sapien
gtcgccgcgacctaggtccgagccc

SEQ ID NO: 5233958 - DNA, 25 bp, Homo sapien
cgcgacctaggtccgagcccagaaa

SEQ ID NO: 5233959 - DNA, 25 bp, Homo sapien
tcgccgcgacctaggtccgagccca

SEQ ID NO: 5233960 - DNA, 25 bp, Homo sapien
cagatgcaggcagatagagttctag

SEQ ID NO: 5233961 - DNA, 25 bp, Homo sapien
cactgacgtgtgaccgacatgtgaa

SEQ ID NO: 5233962 - DNA, 25 bp, Homo sapien
agttctaggccgcacagagacccac

SEQ ID NO: 5233963 - DNA, 25 bp, Homo sapien
tccgacaatggtgtctcctgcaaag

SEQ ID NO: 5233964 - DNA, 25 bp, Homo sapien
ctgtttagagtgaagggagaaacca

SEQ ID NO: 5233965 - DNA, 25 bp, Homo sapien
tagagtgaagggagaaaccagtgat

SEQ ID NO: 5233966 - DNA, 25 bp, Homo sapien
agagtgaagggagaaaccagtgata

SEQ ID NO: 5233967 - DNA, 25 bp, Homo sapien
gtgaagggagaaaccagtgatagac

SEQ ID NO: 5233968 - DNA, 25 bp, Homo sapien
cgacgatcccgactttcttggtacg

SEQ ID NO: 5233969 - DNA, 25 bp, Homo sapien
tgccacagaaagagcaagtgtactt

SEQ ID NO: 5233970 - DNA, 25 bp, Homo sapien
tgtacttggcgtgctggctgatttc

SEQ ID NO: 5233971 - DNA, 25 bp, Homo sapien
ggcgtgctggctgatttcaattttc

SEQ ID NO: 5233972 - DNA, 25 bp, Homo sapien
cctctcctctcaccagagactttgc

SEQ ID NO: 5233973 - DNA, 25 bp, Homo sapien
ccctctcctctcaccagagactttg

SEQ ID NO: 5233974 - DNA, 25 bp, Homo sapien
tcctctcaccagagactttgcctta

SEQ ID NO: 5233975 - DNA, 25 bp, Homo sapien
tctcctctcaccagagactttgcct

SEQ ID NO: 5233976 - DNA, 25 bp, Homo sapien
cagacatcttgggagttggtgcaga

SEQ ID NO: 5233977 - DNA, 25 bp, Homo sapien
ggtatgagtaattccaactgcccac

SEQ ID NO: 5233978 - DNA, 25 bp, Homo sapien
aatccctcgcagaacaagtagaatg

SEQ ID NO: 5233979 - DNA, 25 bp, Homo sapien
taaaataccttgaagtcaggcctca

SEQ ID NO: 5233980 - DNA, 25 bp, Homo sapien
agatccccacagctcgtctcttcat

SEQ ID NO: 5233981 - DNA, 25 bp, Homo sapien
tgtacgtccaggcaccgccagccac

SEQ ID NO: 5233982 - DNA, 25 bp, Homo sapien
tcatgcaggaaccacagtgccagat

SEQ ID NO: 5233983 - DNA, 25 bp, Homo sapien
cgccagccactgtcttcatgcagga

SEQ ID NO: 5233984 - DNA, 25 bp, Homo sapien
tgtttgtagtatcgccctgtcaggt

SEQ ID NO: 5233985 - DNA, 25 bp, Homo sapien
tcaacgttcagtagattcagcccca

SEQ ID NO: 5233986 - DNA, 25 bp, Homo sapien
ggacctgcacagtatcatgacaatg

SEQ ID NO: 5233987 - DNA, 25 bp, Homo sapien
cgaaactgtggtggtcctgatggcc

SEQ ID NO: 5233988 - DNA, 25 bp, Homo sapien
ccttcagtcttctgatggcggactt

SEQ ID NO: 5233989 - DNA, 25 bp, Homo sapien
ctactggtctttcaactccttcagt

SEQ ID NO: 5233990 - DNA, 25 bp, Homo sapien
tcagtcttctgatggcggactttac

SEQ ID NO: 5233991 - DNA, 25 bp, Homo sapien
tactggtctttcaactccttcagtc

SEQ ID NO: 5233992 - DNA, 25 bp, Homo sapien
tattataggccagtgatgtctcaaa

SEQ ID NO: 5233993 - DNA, 25 bp, Homo sapien
catttattataggccagtgatgtct

SEQ ID NO: 5233994 - DNA, 25 bp, Homo sapien
tttattataggccagtgatgtctca

SEQ ID NO: 5233995 - DNA, 25 bp, Homo sapien
ttataggccagtgatgtctcaaaga

SEQ ID NO: 5233996 - DNA, 25 bp, Homo sapien
ggccaagactggtatactgcactcc

SEQ ID NO: 5233997 - DNA, 25 bp, Homo sapien
tacaataatccatcttggcatgctt

SEQ ID NO: 5233998 - DNA, 25 bp, Homo sapien
tgtatctcaaagtcaaactggcagg

SEQ ID NO: 5233999 - DNA, 25 bp, Homo sapien
ggaagacttatattcttatgctgca

SEQ ID NO: 5234000 - DNA, 25 bp, Homo sapien
acccagcctagacacattataaaaa

SEQ ID NO: 5234001 - DNA, 25 bp, Homo sapien
cgtttgcaacatttaatgtgaaatt

SEQ ID NO: 5234002 - DNA, 25 bp, Homo sapien
agacagagtgttgtcctggctaaat

SEQ ID NO: 5234003 - DNA, 25 bp, Homo sapien
tcaaatgaaacatcatagaagaggc

SEQ ID NO: 5234004 - DNA, 25 bp, Homo sapien
ctgatggtgtaggtcaaatgaaaca

SEQ ID NO: 5234005 - DNA, 25 bp, Homo sapien
cataaaagtgtcaaaggcaggccta

SEQ ID NO: 5234006 - DNA, 25 bp, Homo sapien
tccttaaaggactactgactctggg

SEQ ID NO: 5234007 - DNA, 25 bp, Homo sapien
ccacagatggttgaggagttagact

SEQ ID NO: 5234008 - DNA, 25 bp, Homo sapien
gaagggagacatccgtgcaaaggcc

SEQ ID NO: 5234009 - DNA, 25 bp, Homo sapien
taagttggtgttcttaaccgcagca

SEQ ID NO: 5234010 - DNA, 25 bp, Homo sapien
cactcacctggagatcctatggaga

SEQ ID NO: 5234011 - DNA, 25 bp, Homo sapien
caagtcacccaactatctaggcagt

SEQ ID NO: 5234012 - DNA, 25 bp, Homo sapien
gcttacatgaaatcctggtcactca

SEQ ID NO: 5234013 - DNA, 25 bp, Homo sapien
gaatactgagcccataaaatagaag

SEQ ID NO: 5234014 - DNA, 25 bp, Homo sapien
ataacaaaacgaaggtgggccatct

SEQ ID NO: 5234015 - DNA, 25 bp, Homo sapien
tgggccatctttagcatgggaagag

SEQ ID NO: 5234016 - DNA, 25 bp, Homo sapien
gactggtacagcagaaaatcacaga

SEQ ID NO: 5234017 - DNA, 25 bp, Homo sapien
aagtgaacccataaaaatacctgtg

SEQ ID NO: 5234018 - DNA, 25 bp, Homo sapien
ctgcagggagtggtcaacaaaggct

SEQ ID NO: 5234019 - DNA, 25 bp, Homo sapien
taaccattatgctggagacagttct

SEQ ID NO: 5234020 - DNA, 25 bp, Homo sapien
tacttcaggaggaaataacactttc

SEQ ID NO: 5234021 - DNA, 25 bp, Homo sapien
cttcagcttactctggtctagtggg

SEQ ID NO: 5234022 - DNA, 25 bp, Homo sapien
tagtgggtgtagacaataaaccatg

SEQ ID NO: 5234023 - DNA, 25 bp, Homo sapien
cccaaacttcagcttactctggtct

SEQ ID NO: 5234024 - DNA, 25 bp, Homo sapien
gtagatccatgtggtcagtctccta

SEQ ID NO: 5234025 - DNA, 25 bp, Homo sapien
gctgcttctcaatcagagactggta

SEQ ID NO: 5234026 - DNA, 25 bp, Homo sapien
caatcagagactggtaatgactatc

SEQ ID NO: 5234027 - DNA, 25 bp, Homo sapien
ctgcttctcaatcagagactggtaa

SEQ ID NO: 5234028 - DNA, 25 bp, Homo sapien
tctcaatcagagactggtaatgact

SEQ ID NO: 5234029 - DNA, 25 bp, Homo sapien
ccaaattcccaattagctaccatac

SEQ ID NO: 5234030 - DNA, 25 bp, Homo sapien
ccaaagatgcccctaagtatcacat

SEQ ID NO: 5234031 - DNA, 25 bp, Homo sapien
caaaaaagcattcatcccttcacta

SEQ ID NO: 5234032 - DNA, 25 bp, Homo sapien
cctaagtatcacatgtggaaccaaa

SEQ ID NO: 5234033 - DNA, 25 bp, Homo sapien
tgggaccgccaactaaggtgccaag

SEQ ID NO: 5234034 - DNA, 25 bp, Homo sapien
tatctgtagtcttggtgggaccgcc

SEQ ID NO: 5234035 - DNA, 25 bp, Homo sapien
taaatggtaattcaagcttgatgtg

SEQ ID NO: 5234036 - DNA, 25 bp, Homo sapien
gcttgatgtgaagaacatttgccct

SEQ ID NO: 5234037 - DNA, 25 bp, Homo sapien
tcttgtacacgtatttgttcttttc

SEQ ID NO: 5234038 - DNA, 25 bp, Homo sapien
ctatgtcttgtacacgtatttgttc

SEQ ID NO: 5234039 - DNA, 25 bp, Homo sapien
tgtcttgtacacgtatttgttcttt

SEQ ID NO: 5234040 - DNA, 25 bp, Homo sapien
tcttttgatatggcaaggtatctga

SEQ ID NO: 5234041 - DNA, 25 bp, Homo sapien
ccgggcataacacacagtagcttct

SEQ ID NO: 5234042 - DNA, 25 bp, Homo sapien
gtagcttctggcctagctactcggg

SEQ ID NO: 5234043 - DNA, 25 bp, Homo sapien
caataagccgggcataacacacagt

SEQ ID NO: 5234044 - DNA, 25 bp, Homo sapien
aagatccaatctctactactattac

SEQ ID NO: 5234045 - DNA, 25 bp, Homo sapien
gtgttggttcttgtacagtgtgaaa

SEQ ID NO: 5234046 - DNA, 25 bp, Homo sapien
catcaatgtttaatgccagctcagg

SEQ ID NO: 5234047 - DNA, 25 bp, Homo sapien
atcaatgtttaatgccagctcagga

SEQ ID NO: 5234048 - DNA, 25 bp, Homo sapien
cacaaaggtgttggttcttgtacag

SEQ ID NO: 5234049 - DNA, 25 bp, Homo sapien
aaaactcatcaagggctccctctgc

SEQ ID NO: 5234050 - DNA, 25 bp, Homo sapien
ccctctgctgtccattctctgcact

SEQ ID NO: 5234051 - DNA, 25 bp, Homo sapien
gatggtcaaaactcatcaagggctc

SEQ ID NO: 5234052 - DNA, 25 bp, Homo sapien
ttgatggtcaaaactcatcaagggc

SEQ ID NO: 5234053 - DNA, 25 bp, Homo sapien
ttttcctcgtcttccattagcagag

SEQ ID NO: 5234054 - DNA, 25 bp, Homo sapien
cctcgtcttccattagcagagttca

SEQ ID NO: 5234055 - DNA, 25 bp, Homo sapien
cagagttcatggagatttggttcca

SEQ ID NO: 5234056 - DNA, 25 bp, Homo sapien
gcagagttcatggagatttggttcc

SEQ ID NO: 5234057 - DNA, 25 bp, Homo sapien
tcctcctgtccacactactagtgtg

SEQ ID NO: 5234058 - DNA, 25 bp, Homo sapien
tcctgtccacactactagtgtgtac

SEQ ID NO: 5234059 - DNA, 25 bp, Homo sapien
tgtccacactactagtgtgtacaac

SEQ ID NO: 5234060 - DNA, 25 bp, Homo sapien
cctcctgtccacactactagtgtgt

SEQ ID NO: 5234061 - DNA, 25 bp, Homo sapien
gacagggtgggcctttctatagcca

SEQ ID NO: 5234062 - DNA, 25 bp, Homo sapien
caaggtcactgcacgtgtttggtgg

SEQ ID NO: 5234063 - DNA, 25 bp, Homo sapien
gggatgctagcccagctttctaaag

SEQ ID NO: 5234064 - DNA, 25 bp, Homo sapien
ctatggtcagaatgtttgtggccct

SEQ ID NO: 5234065 - DNA, 25 bp, Homo sapien
tatctcccaatagagtcatactggg

SEQ ID NO: 5234066 - DNA, 25 bp, Homo sapien
gttaaggcttcagcgtatttgatgg

SEQ ID NO: 5234067 - DNA, 25 bp, Homo sapien
tgggtcagggcctcaccattatgcc

SEQ ID NO: 5234068 - DNA, 25 bp, Homo sapien
gatgtgcaggttaaagcaactccat

SEQ ID NO: 5234069 - DNA, 25 bp, Homo sapien
taaagtgggtatccctttcattcag

SEQ ID NO: 5234070 - DNA, 25 bp, Homo sapien
tcattcagtaattcggcaacaccta

SEQ ID NO: 5234071 - DNA, 25 bp, Homo sapien
tgcactactgtatactgctgaaggg

SEQ ID NO: 5234072 - DNA, 25 bp, Homo sapien
gaagctgtgggtaaacatgcactac

SEQ ID NO: 5234073 - DNA, 25 bp, Homo sapien
ggcaggttttacaggcagaaggtaa

SEQ ID NO: 5234074 - DNA, 25 bp, Homo sapien
tcagcgttgcatttggtccatttgg

SEQ ID NO: 5234075 - DNA, 25 bp, Homo sapien
taactggatcttgccatgggatgat

SEQ ID NO: 5234076 - DNA, 25 bp, Homo sapien
gagaaagacaggagcctggctcaaa

SEQ ID NO: 5234077 - DNA, 25 bp, Homo sapien
tccttcacactgcacaaacaccttt

SEQ ID NO: 5234078 - DNA, 25 bp, Homo sapien
gcacaaacaccttttgcccctccat

SEQ ID NO: 5234079 - DNA, 25 bp, Homo sapien
tccagctcgcaatatgatgtgaaat

SEQ ID NO: 5234080 - DNA, 25 bp, Homo sapien
caccagactctgccgggcagagaca

SEQ ID NO: 5234081 - DNA, 25 bp, Homo sapien
tgctgagccgccttggttcttgctt

SEQ ID NO: 5234082 - DNA, 25 bp, Homo sapien
ttgcctttatgcgtgctgagccgcc

SEQ ID NO: 5234083 - DNA, 25 bp, Homo sapien
cagaagtatagaggagtgacggctc

SEQ ID NO: 5234084 - DNA, 25 bp, Homo sapien
actgcagagacccaagttgccttgg

SEQ ID NO: 5234085 - DNA, 25 bp, Homo sapien
ccttggaatctgcaatcaatgcgga

SEQ ID NO: 5234086 - DNA, 25 bp, Homo sapien
gagggtttcaagaattccaatcggc

SEQ ID NO: 5234087 - DNA, 25 bp, Homo sapien
tacactggcactttctcaaaacctc

SEQ ID NO: 5234088 - DNA, 25 bp, Homo sapien
ctggcacattccttgtgtctcggca

SEQ ID NO: 5234089 - DNA, 25 bp, Homo sapien
cacattccttgtgtctcggcaggac

SEQ ID NO: 5234090 - DNA, 25 bp, Homo sapien
gagtcccatgccagagccttgaaag

SEQ ID NO: 5234091 - DNA, 25 bp, Homo sapien
tcctcctggacttctgggaatgcca

SEQ ID NO: 5234092 - DNA, 25 bp, Homo sapien
tttcaggcatagacactgcatctcc

SEQ ID NO: 5234093 - DNA, 25 bp, Homo sapien
tgcatctccacgtctgtcctgctgc

SEQ ID NO: 5234094 - DNA, 25 bp, Homo sapien
cctggtcattttcaggcatagacac

SEQ ID NO: 5234095 - DNA, 25 bp, Homo sapien
catattgcccaactggattaggcca

SEQ ID NO: 5234096 - DNA, 25 bp, Homo sapien
acatttaccgtaagcaacctggact

SEQ ID NO: 5234097 - DNA, 25 bp, Homo sapien
gatgtttcctgaggtccagaccgca

SEQ ID NO: 5234098 - DNA, 25 bp, Homo sapien
taaacacatcgggttgttcacagtc

SEQ ID NO: 5234099 - DNA, 25 bp, Homo sapien
ctgaatccagaaaccgatattaggc

SEQ ID NO: 5234100 - DNA, 25 bp, Homo sapien
gaggaagaaggacctgttgccacgt

SEQ ID NO: 5234101 - DNA, 25 bp, Homo sapien
gaaaccgatattaggctctgtaatg

SEQ ID NO: 5234102 - DNA, 25 bp, Homo sapien
atattaggctctgtaatggacatgc

SEQ ID NO: 5234103 - DNA, 25 bp, Homo sapien
tggcgatgctgcaaagtagatcagc

SEQ ID NO: 5234104 - DNA, 25 bp, Homo sapien
ccagacaagtcctcctccaatgttg

SEQ ID NO: 5234105 - DNA, 25 bp, Homo sapien
tgttgtttgctgttattccattctg

SEQ ID NO: 5234106 - DNA, 25 bp, Homo sapien
cagctgcgactgtttgtgacttaat

SEQ ID NO: 5234107 - DNA, 25 bp, Homo sapien
tctccagatggcaactacaaatatc

SEQ ID NO: 5234108 - DNA, 25 bp, Homo sapien
tggcttctcataatcctgcagggag

SEQ ID NO: 5234109 - DNA, 25 bp, Homo sapien
gaacagatttggttgcctagagctc

SEQ ID NO: 5234110 - DNA, 25 bp, Homo sapien
tacaaatatctctttaccatcttgg

SEQ ID NO: 5234111 - DNA, 25 bp, Homo sapien
tagacccggtttactggaattgctc

SEQ ID NO: 5234112 - DNA, 25 bp, Homo sapien
agatggtgaccacggacttccagga

SEQ ID NO: 5234113 - DNA, 25 bp, Homo sapien
tgtacatcggtctggccgggcttgc

SEQ ID NO: 5234114 - DNA, 25 bp, Homo sapien
tattatgtcctataacggaggagcc

SEQ ID NO: 5234115 - DNA, 25 bp, Homo sapien
gaactcattattgtgcgctgtggac

SEQ ID NO: 5234116 - DNA, 25 bp, Homo sapien
tgatcaagaaacgttcagcaaatcc

SEQ ID NO: 5234117 - DNA, 25 bp, Homo sapien
gagatcctttgtatcctccacttga

SEQ ID NO: 5234118 - DNA, 25 bp, Homo sapien
cagttgagcccttattgttatcccg

SEQ ID NO: 5234119 - DNA, 25 bp, Homo sapien
agtagtacagatactgagtgagatt

SEQ ID NO: 5234120 - DNA, 25 bp, Homo sapien
aagtagtacagatactgagtgagat

SEQ ID NO: 5234121 - DNA, 25 bp, Homo sapien
gtagtacagatactgagtgagattt

SEQ ID NO: 5234122 - DNA, 25 bp, Homo sapien
tagtacagatactgagtgagatttt

SEQ ID NO: 5234123 - DNA, 25 bp, Homo sapien
tactcgggataccatgagaggccac

SEQ ID NO: 5234124 - DNA, 25 bp, Homo sapien
caaaccaaaagtgatgaggccatgc

SEQ ID NO: 5234125 - DNA, 25 bp, Homo sapien
aagtggcccataggagagtacccca

SEQ ID NO: 5234126 - DNA, 25 bp, Homo sapien
gacagaggcgacaaacatggtttca

SEQ ID NO: 5234127 - DNA, 25 bp, Homo sapien
ctgtggtgtcccacagtgcccagca

SEQ ID NO: 5234128 - DNA, 25 bp, Homo sapien
gtgtcccacagtgcccagcacccac

SEQ ID NO: 5234129 - DNA, 25 bp, Homo sapien
tgtggtgtcccacagtgcccagcac

SEQ ID NO: 5234130 - DNA, 25 bp, Homo sapien
tggtgtcccacagtgcccagcaccc

SEQ ID NO: 5234131 - DNA, 25 bp, Homo sapien
tgctggaaacgacttttctggaggc

SEQ ID NO: 5234132 - DNA, 25 bp, Homo sapien
aggtgcctgctggaaacgacttttc

SEQ ID NO: 5234133 - DNA, 25 bp, Homo sapien
cccttgggcttcagccgtggacaaa

SEQ ID NO: 5234134 - DNA, 25 bp, Homo sapien
tccccttgggcttcagccgtggaca

SEQ ID NO: 5234135 - DNA, 25 bp, Homo sapien
cccaagttaagaaagatgagacaat

SEQ ID NO: 5234136 - DNA, 25 bp, Homo sapien
gaaatgtagtattgatggccatcta

SEQ ID NO: 5234137 - DNA, 25 bp, Homo sapien
tatagatggtaaccataaaacacaa

SEQ ID NO: 5234138 - DNA, 25 bp, Homo sapien
ttcaagttaagtcaaacccaagctg

SEQ ID NO: 5234139 - DNA, 25 bp, Homo sapien
gtggcacggccctgcgagcgcggga

SEQ ID NO: 5234140 - DNA, 25 bp, Homo sapien
acggccctgcgagcgcgggagccgc

SEQ ID NO: 5234141 - DNA, 25 bp, Homo sapien
gcgggcgggcaggtggcacggccct

SEQ ID NO: 5234142 - DNA, 25 bp, Homo sapien
cgggcgggcaggtggcacggccctg

SEQ ID NO: 5234143 - DNA, 25 bp, Homo sapien
acgagctccgcgcatggcatgcggg

SEQ ID NO: 5234144 - DNA, 25 bp, Homo sapien
caggcgctcgggtgtgcagggcggg

SEQ ID NO: 5234145 - DNA, 25 bp, Homo sapien
tccgggctggcgccatactcggcgt

SEQ ID NO: 5234146 - DNA, 25 bp, Homo sapien
ggcgtcccggcgcttctcacaagtg

SEQ ID NO: 5234147 - DNA, 25 bp, Homo sapien
aacttgctctgtactccagagcaaa

SEQ ID NO: 5234148 - DNA, 25 bp, Homo sapien
ctaacttgctctgtactccagagca

SEQ ID NO: 5234149 - DNA, 25 bp, Homo sapien
taacttgctctgtactccagagcaa

SEQ ID NO: 5234150 - DNA, 25 bp, Homo sapien
acttgctctgtactccagagcaaaa

SEQ ID NO: 5234151 - DNA, 25 bp, Homo sapien
ggccatctatacagagaggaccttc

SEQ ID NO: 5234152 - DNA, 25 bp, Homo sapien
cccagagatgtagcctcagggattc

SEQ ID NO: 5234153 - DNA, 25 bp, Homo sapien
gatccttgcagacttcccctggagg

SEQ ID NO: 5234154 - DNA, 25 bp, Homo sapien
ggaactcaaccctgtgttacctgct

SEQ ID NO: 5234155 - DNA, 25 bp, Homo sapien
gagaatccaacagccccttgcaaaa

SEQ ID NO: 5234156 - DNA, 25 bp, Homo sapien
ggatcaagttcagtgcattctggca

SEQ ID NO: 5234157 - DNA, 25 bp, Homo sapien
gaaagtcttcggcatcattgtgcac

SEQ ID NO: 5234158 - DNA, 25 bp, Homo sapien
gaatcagacattaggtagagcccca

SEQ ID NO: 5234159 - DNA, 25 bp, Homo sapien
gtttctggagacctcgacaccgcat

SEQ ID NO: 5234160 - DNA, 25 bp, Homo sapien
ggtttctggagacctcgacaccgca

SEQ ID NO: 5234161 - DNA, 25 bp, Homo sapien
gggtttctggagacctcgacaccgc

SEQ ID NO: 5234162 - DNA, 25 bp, Homo sapien
cgcaccctacccagctttgtgccca

SEQ ID NO: 5234163 - DNA, 25 bp, Homo sapien
gatgtctgtccaacaagcgtccatt

SEQ ID NO: 5234164 - DNA, 25 bp, Homo sapien
ccttttgtatgcacagcctaggtga

SEQ ID NO: 5234165 - DNA, 25 bp, Homo sapien
cagggcatgaagcttcgtgatgtct

SEQ ID NO: 5234166 - DNA, 25 bp, Homo sapien
caagcgtccattaagtctccttata

SEQ ID NO: 5234167 - DNA, 25 bp, Homo sapien
catggtgctgtccacgtggttctcc

SEQ ID NO: 5234168 - DNA, 25 bp, Homo sapien
tcctccaggccaaggtgatgcttgc

SEQ ID NO: 5234169 - DNA, 25 bp, Homo sapien
cagctccttcatacccgacttgagg

SEQ ID NO: 5234170 - DNA, 25 bp, Homo sapien
gcctccttctgagtggtcatcgcca

SEQ ID NO: 5234171 - DNA, 25 bp, Homo sapien
ccgctcatccggaaggcgcatggtg

SEQ ID NO: 5234172 - DNA, 25 bp, Homo sapien
ggacctggtccagttcctgttggca

SEQ ID NO: 5234173 - DNA, 25 bp, Homo sapien
gcatggtggagatccgctccaggac

SEQ ID NO: 5234174 - DNA, 25 bp, Homo sapien
ggagtagaggtgctccagagggccc

SEQ ID NO: 5234175 - DNA, 25 bp, Homo sapien
cacgctgcccgttcagagacatctt

SEQ ID NO: 5234176 - DNA, 25 bp, Homo sapien
acgctgcccgttcagagacatcttg

SEQ ID NO: 5234177 - DNA, 25 bp, Homo sapien
cccacgctgcccgttcagagacatc

SEQ ID NO: 5234178 - DNA, 25 bp, Homo sapien
ctccccacgctgcccgttcagagac

SEQ ID NO: 5234179 - DNA, 25 bp, Homo sapien
tagaagagatgacactcggggtccc

SEQ ID NO: 5234180 - DNA, 25 bp, Homo sapien
ctactgcatccgctgggtgtgcacc

SEQ ID NO: 5234181 - DNA, 25 bp, Homo sapien
cctggatcagcttcccggtgttggg

SEQ ID NO: 5234182 - DNA, 25 bp, Homo sapien
atccgctgggtgtgcaccccgcgag

SEQ ID NO: 5234183 - DNA, 25 bp, Homo sapien
cggtgctggtctctttccaaatata

SEQ ID NO: 5234184 - DNA, 25 bp, Homo sapien
caagcactctccgttttctgccggt

SEQ ID NO: 5234185 - DNA, 25 bp, Homo sapien
taaatacgtgtgtcagaactggaaa

SEQ ID NO: 5234186 - DNA, 25 bp, Homo sapien
taatcttatgcaaaagggacacagg

SEQ ID NO: 5234187 - DNA, 25 bp, Homo sapien
gattccttcagattccgagttgcct

SEQ ID NO: 5234188 - DNA, 25 bp, Homo sapien
caccggttagtgagacagggctgcc

SEQ ID NO: 5234189 - DNA, 25 bp, Homo sapien
tagcccacatggatagcacagttgt

SEQ ID NO: 5234190 - DNA, 25 bp, Homo sapien
aaaggaggctccgttttgcaaagtg

SEQ ID NO: 5234191 - DNA, 25 bp, Homo sapien
tccatggctccgaatctaagtgctg

SEQ ID NO: 5234192 - DNA, 25 bp, Homo sapien
cgactgccaggagatagggaagccc

SEQ ID NO: 5234193 - DNA, 25 bp, Homo sapien
ccagagaccttggactccggactat

SEQ ID NO: 5234194 - DNA, 25 bp, Homo sapien
tggaacctttctttgacagccaggc

SEQ ID NO: 5234195 - DNA, 25 bp, Homo sapien
tgtaagtgcgccagactcttccggt

SEQ ID NO: 5234196 - DNA, 25 bp, Homo sapien
ccagcctggacctaattcttgagag

SEQ ID NO: 5234197 - DNA, 25 bp, Homo sapien
cggtttccaaagttcgtgcctgcga

SEQ ID NO: 5234198 - DNA, 25 bp, Homo sapien
tcatggacacatggaactaagcctc

SEQ ID NO: 5234199 - DNA, 25 bp, Homo sapien
gacttcctcaaccaatgggtggcct

SEQ ID NO: 5234200 - DNA, 25 bp, Homo sapien
aaagctgggacaagcagggaacgca

SEQ ID NO: 5234201 - DNA, 25 bp, Homo sapien
ccatgctttggaagggacaagacta

SEQ ID NO: 5234202 - DNA, 25 bp, Homo sapien
aaggagaccccttcgtgctgtggac

SEQ ID NO: 5234203 - DNA, 25 bp, Homo sapien
tacaacccgtaatagcatttttgcc

SEQ ID NO: 5234204 - DNA, 25 bp, Homo sapien
tgcctcgaggcagagtttcccgtga

SEQ ID NO: 5234205 - DNA, 25 bp, Homo sapien
tttgacagtgattccccacgtgtgt

SEQ ID NO: 5234206 - DNA, 25 bp, Homo sapien
tcaggaagtcacagtctccggacac

SEQ ID NO: 5234207 - DNA, 25 bp, Homo sapien
tctttttgaggcaagttggatgaac

SEQ ID NO: 5234208 - DNA, 25 bp, Homo sapien
tgaggacctcggaatctctagcaag

SEQ ID NO: 5234209 - DNA, 25 bp, Homo sapien
ggcagagtgttgtctctccccaaat

SEQ ID NO: 5234210 - DNA, 25 bp, Homo sapien
caagggctcaacttcgaaaatggca

SEQ ID NO: 5234211 - DNA, 25 bp, Homo sapien
cctaagatgcctctgggtctgtagc

SEQ ID NO: 5234212 - DNA, 25 bp, Homo sapien
taagatgcctctgggtctgtagcag

SEQ ID NO: 5234213 - DNA, 25 bp, Homo sapien
ctctgggtctgtagcagctgggctt

SEQ ID NO: 5234214 - DNA, 25 bp, Homo sapien
gatgcctctgggtctgtagcagctg

SEQ ID NO: 5234215 - DNA, 25 bp, Homo sapien
tcagctgggtacacctatagccctc

SEQ ID NO: 5234216 - DNA, 25 bp, Homo sapien
acagctgaaggtttagggtggcaca

SEQ ID NO: 5234217 - DNA, 25 bp, Homo sapien
caaagctgcatcaaggtttactgag

SEQ ID NO: 5234218 - DNA, 25 bp, Homo sapien
tagagatatattcccagcttggcca

SEQ ID NO: 5234219 - DNA, 25 bp, Homo sapien
ggtgccgacatcttcttcccgaaca

SEQ ID NO: 5234220 - DNA, 25 bp, Homo sapien
tccccaaaaagttggagatggtgta

SEQ ID NO: 5234221 - DNA, 25 bp, Homo sapien
tagccggacaaccactgggcgggtc

SEQ ID NO: 5234222 - DNA, 25 bp, Homo sapien
gcgctcctggaaagggcgttttagc

SEQ ID NO: 5234223 - DNA, 25 bp, Homo sapien
cttctgagtgcctttgggccaaccc

SEQ ID NO: 5234224 - DNA, 25 bp, Homo sapien
ggccaacccgaagccgcctcttcta

SEQ ID NO: 5234225 - DNA, 25 bp, Homo sapien
ctgagtgcctttgggccaacccgaa

SEQ ID NO: 5234226 - DNA, 25 bp, Homo sapien
tgggccaacccgaagccgcctcttc

SEQ ID NO: 5234227 - DNA, 25 bp, Homo sapien
tccaaacctgcaaaaagtcgatctt

SEQ ID NO: 5234228 - DNA, 25 bp, Homo sapien
ctagctttgcaagaggtagtcgatc

SEQ ID NO: 5234229 - DNA, 25 bp, Homo sapien
ggtagtcgatctccaaacctgcaaa

SEQ ID NO: 5234230 - DNA, 25 bp, Homo sapien
aagtcgatctttttgcaggttgcag

SEQ ID NO: 5234231 - DNA, 25 bp, Homo sapien
gaggagaagccgctgcacgccctgc

SEQ ID NO: 5234232 - DNA, 25 bp, Homo sapien
gagccctgcgacgagaaagccctct

SEQ ID NO: 5234233 - DNA, 25 bp, Homo sapien
tgcgagctggtcaaggagccgggct

SEQ ID NO: 5234234 - DNA, 25 bp, Homo sapien
gcctgggctccttcgtgcactgcga

SEQ ID NO: 5234235 - DNA, 25 bp, Homo sapien
ccccaacctgttgcaaggctttaat

SEQ ID NO: 5234236 - DNA, 25 bp, Homo sapien
tccggacttcgcgtagaacctgcga

SEQ ID NO: 5234237 - DNA, 25 bp, Homo sapien
aattcttgcaactgggacctgctcg

SEQ ID NO: 5234238 - DNA, 25 bp, Homo sapien
caccgctggcagctgagggttagaa

SEQ ID NO: 5234239 - DNA, 25 bp, Homo sapien
tttcctggttaatctcattttccaa

SEQ ID NO: 5234240 - DNA, 25 bp, Homo sapien
ttgaaacagcttctgagcggtccat

SEQ ID NO: 5234241 - DNA, 25 bp, Homo sapien
caaaattgaaacagcttctgagcgg

SEQ ID NO: 5234242 - DNA, 25 bp, Homo sapien
ttcctggttaatctcattttccaaa

SEQ ID NO: 5234243 - DNA, 25 bp, Homo sapien
taggaaatcacacacgagagtcagc

SEQ ID NO: 5234244 - DNA, 25 bp, Homo sapien
tagattgacccagctgggaacacgg

SEQ ID NO: 5234245 - DNA, 25 bp, Homo sapien
taacaagatatacacggactgcctc

SEQ ID NO: 5234246 - DNA, 25 bp, Homo sapien
tgtacgacacagcaagaaccccgtt

SEQ ID NO: 5234247 - DNA, 25 bp, Homo sapien
acatgatgacaagctcttgacttcc

SEQ ID NO: 5234248 - DNA, 25 bp, Homo sapien
catgatgacaagctcttgacttcct

SEQ ID NO: 5234249 - DNA, 25 bp, Homo sapien
agaaaagagatggaagctttactca

SEQ ID NO: 5234250 - DNA, 25 bp, Homo sapien
tagaaaagagatggaagctttactc

SEQ ID NO: 5234251 - DNA, 25 bp, Homo sapien
gaaaagagatggaagctttactcat

SEQ ID NO: 5234252 - DNA, 25 bp, Homo sapien
ctagaaaagagatggaagctttact

SEQ ID NO: 5234253 - DNA, 25 bp, Homo sapien
ctgtggcagagccccatccgtgtaa

SEQ ID NO: 5234254 - DNA, 25 bp, Homo sapien
gtggcagagccccatccgtgtaagt

SEQ ID NO: 5234255 - DNA, 25 bp, Homo sapien
tcttatagccaatgcctgtggcaga

SEQ ID NO: 5234256 - DNA, 25 bp, Homo sapien
cttcttatagccaatgcctgtggca

SEQ ID NO: 5234257 - DNA, 25 bp, Homo sapien
gattccgataggatcaggtgtcctg

SEQ ID NO: 5234258 - DNA, 25 bp, Homo sapien
agcaggaggcgttcaaagcactgag

SEQ ID NO: 5234259 - DNA, 25 bp, Homo sapien
ccgtgggtggattccgataggatca

SEQ ID NO: 5234260 - DNA, 25 bp, Homo sapien
atggagcaggaggcgttcaaagcac

SEQ ID NO: 5234261 - DNA, 25 bp, Homo sapien
gcagatgtgcgtgcacaccagctcc

SEQ ID NO: 5234262 - DNA, 25 bp, Homo sapien
tgcagatgtgcgtgcacaccagctc

SEQ ID NO: 5234263 - DNA, 25 bp, Homo sapien
cagatgtgcgtgcacaccagctcca

SEQ ID NO: 5234264 - DNA, 25 bp, Homo sapien
ccaaatttccctgcccaatttatct

SEQ ID NO: 5234265 - DNA, 25 bp, Homo sapien
caaagctcgagagccttttcatggc

SEQ ID NO: 5234266 - DNA, 25 bp, Homo sapien
ctaattttcaaagctcgagagcctt

SEQ ID NO: 5234267 - DNA, 25 bp, Homo sapien
ttttcaaagctcgagagccttttca

SEQ ID NO: 5234268 - DNA, 25 bp, Homo sapien
tctgggcttgtccaggtgataaact

SEQ ID NO: 5234269 - DNA, 25 bp, Homo sapien
cctgagcacctgttgttacaacaaa

SEQ ID NO: 5234270 - DNA, 25 bp, Homo sapien
tgtccaggtgataaactgaggccat

SEQ ID NO: 5234271 - DNA, 25 bp, Homo sapien
aagctcagggttgaagtttctgggc

SEQ ID NO: 5234272 - DNA, 25 bp, Homo sapien
agttgaatagttgcagccaagacca

SEQ ID NO: 5234273 - DNA, 25 bp, Homo sapien
caggctaaagctctacacaccaggg

SEQ ID NO: 5234274 - DNA, 25 bp, Homo sapien
tatagctgcttctgtgctaccgcag

SEQ ID NO: 5234275 - DNA, 25 bp, Homo sapien
taccatctggtagggaaaagcagag

SEQ ID NO: 5234276 - DNA, 25 bp, Homo sapien
tgaggaagccataaatataacgcga

SEQ ID NO: 5234277 - DNA, 25 bp, Homo sapien
tctaatgggtttggcaagagagcca

SEQ ID NO: 5234278 - DNA, 25 bp, Homo sapien
tactgttgaggcaggattactaacg

SEQ ID NO: 5234279 - DNA, 25 bp, Homo sapien
cctgatggaggtgtatagcagcacc

SEQ ID NO: 5234280 - DNA, 25 bp, Homo sapien
tccaatgactcattaagtacaataa

SEQ ID NO: 5234281 - DNA, 25 bp, Homo sapien
ggcagtagaagtctgctcaaataat

SEQ ID NO: 5234282 - DNA, 25 bp, Homo sapien
tacaacaattaccatcacttctgtt

SEQ ID NO: 5234283 - DNA, 25 bp, Homo sapien
ttaccatcacttctgttgccttcat

SEQ ID NO: 5234284 - DNA, 25 bp, Homo sapien
gcctgctagagtacttcttgggtgt

SEQ ID NO: 5234285 - DNA, 25 bp, Homo sapien
ttgggtgttgtctgttcggcaaaca

SEQ ID NO: 5234286 - DNA, 25 bp, Homo sapien
gttcggcaaacattcccatcgtctt

SEQ ID NO: 5234287 - DNA, 25 bp, Homo sapien
tgcttaggttttaggcctgctagag

SEQ ID NO: 5234288 - DNA, 25 bp, Homo sapien
gatagcgaggtaccataaaatagta

SEQ ID NO: 5234289 - DNA, 25 bp, Homo sapien
cttacaaagtggatagcgaggtacc

SEQ ID NO: 5234290 - DNA, 25 bp, Homo sapien
cataaaatagtagctgccacctaat

SEQ ID NO: 5234291 - DNA, 25 bp, Homo sapien
gtagctgccacctaattcacactct

SEQ ID NO: 5234292 - DNA, 25 bp, Homo sapien
tcaaactcatgaccatgcactctgt

SEQ ID NO: 5234293 - DNA, 25 bp, Homo sapien
aagcacctggtctcctctatgatga

SEQ ID NO: 5234294 - DNA, 25 bp, Homo sapien
taaggctggctttcgaaaactctgg

SEQ ID NO: 5234295 - DNA, 25 bp, Homo sapien
ctggactctgagtctgctgtcactc

SEQ ID NO: 5234296 - DNA, 25 bp, Homo sapien
tcaacttgaaagtggcagagtcctg

SEQ ID NO: 5234297 - DNA, 25 bp, Homo sapien
caactgtcatgtgcgaggtgtcagg

SEQ ID NO: 5234298 - DNA, 25 bp, Homo sapien
gacctacctggaacactcaacttga

SEQ ID NO: 5234299 - DNA, 25 bp, Homo sapien
ggagggacctaccatgatgaaccaa

SEQ ID NO: 5234300 - DNA, 25 bp, Homo sapien
gaaacactctggatgtgaacccatg

SEQ ID NO: 5234301 - DNA, 25 bp, Homo sapien
taacaaggcagacgacccagtagtg

SEQ ID NO: 5234302 - DNA, 25 bp, Homo sapien
tcaaacagattgactcaggttggct

SEQ ID NO: 5234303 - DNA, 25 bp, Homo sapien
tgaacccatggagacctaggctgca

SEQ ID NO: 5234304 - DNA, 25 bp, Homo sapien
tcggggaacatctgcagatcagtgg

SEQ ID NO: 5234305 - DNA, 25 bp, Homo sapien
gggaacatctgcagatcagtggttg

SEQ ID NO: 5234306 - DNA, 25 bp, Homo sapien
tgttgcaatgggtctctgccatgcc

SEQ ID NO: 5234307 - DNA, 25 bp, Homo sapien
ttgcaatgggtctctgccatgcccc

SEQ ID NO: 5234308 - DNA, 25 bp, Homo sapien
ctctttcctgtatcctgatggtact

SEQ ID NO: 5234309 - DNA, 25 bp, Homo sapien
gatggtactgcagcatactaccgag

SEQ ID NO: 5234310 - DNA, 25 bp, Homo sapien
cctctcctaatggtctctgagtttc

SEQ ID NO: 5234311 - DNA, 25 bp, Homo sapien
tgcagcatactaccgagatggcctg

SEQ ID NO: 5234312 - DNA, 25 bp, Homo sapien
atccatgcagcccagcgtaataatg

SEQ ID NO: 5234313 - DNA, 25 bp, Homo sapien
aaccatccatgcagcccagcgtaat

SEQ ID NO: 5234314 - DNA, 25 bp, Homo sapien
ccatgcagcccagcgtaataatgag

SEQ ID NO: 5234315 - DNA, 25 bp, Homo sapien
gcagcccagcgtaataatgagcagg

SEQ ID NO: 5234316 - DNA, 25 bp, Homo sapien
ctggtgctttctccagaacatctgg

SEQ ID NO: 5234317 - DNA, 25 bp, Homo sapien
tggtgctttctccagaacatctggt

SEQ ID NO: 5234318 - DNA, 25 bp, Homo sapien
gggccgaatagctgtagaacaaaac

SEQ ID NO: 5234319 - DNA, 25 bp, Homo sapien
gcaccctgacttatcaaactgatgg

SEQ ID NO: 5234320 - DNA, 25 bp, Homo sapien
cctctactgttcaggagtgtgggct

SEQ ID NO: 5234321 - DNA, 25 bp, Homo sapien
cagcttctaagaagatggctcctgc

SEQ ID NO: 5234322 - DNA, 25 bp, Homo sapien
tgtctgtggagtaaaagccccttac

SEQ ID NO: 5234323 - DNA, 25 bp, Homo sapien
ggtgagcagggcatcaagatccaca

SEQ ID NO: 5234324 - DNA, 25 bp, Homo sapien
gttatatgcctctaaggtgagcagg

SEQ ID NO: 5234325 - DNA, 25 bp, Homo sapien
gatccacacgaaagagacaggtttt

SEQ ID NO: 5234326 - DNA, 25 bp, Homo sapien
agagaaggagcaacctacacaccgg

SEQ ID NO: 5234327 - DNA, 25 bp, Homo sapien
caaatgggtctatcatggaggacag

SEQ ID NO: 5234328 - DNA, 25 bp, Homo sapien
tcctgggtacttgataaacatcagc

SEQ ID NO: 5234329 - DNA, 25 bp, Homo sapien
gtaggtctacagagttgccccagga

SEQ ID NO: 5234330 - DNA, 25 bp, Homo sapien
tacccgcaaaaccagactacgtcat

SEQ ID NO: 5234331 - DNA, 25 bp, Homo sapien
tacgtcattgtctgaagtgaacggg

SEQ ID NO: 5234332 - DNA, 25 bp, Homo sapien
tgaacgggagttttgatagcagacc

SEQ ID NO: 5234333 - DNA, 25 bp, Homo sapien
gagacagggccagttgattcaaacc

SEQ ID NO: 5234334 - DNA, 25 bp, Homo sapien
tctcatcacagtcccatgaagtaga

SEQ ID NO: 5234335 - DNA, 25 bp, Homo sapien
gagaaatgtttccaaggtcacaggg

SEQ ID NO: 5234336 - DNA, 25 bp, Homo sapien
ttgggaaagatgcactcaacatggc

SEQ ID NO: 5234337 - DNA, 25 bp, Homo sapien
gacagcaatactcgtaaaacaccta

SEQ ID NO: 5234338 - DNA, 25 bp, Homo sapien
catttggttgagatcagcagaaaca

SEQ ID NO: 5234339 - DNA, 25 bp, Homo sapien
cagattccaggtcacttagaagtgg

SEQ ID NO: 5234340 - DNA, 25 bp, Homo sapien
tcccctatgctgcagatcatgagcc

SEQ ID NO: 5234341 - DNA, 25 bp, Homo sapien
aacctgctgcccgaaatgtgcattc

SEQ ID NO: 5234342 - DNA, 25 bp, Homo sapien
cggtgtctattacaattgctctctg

SEQ ID NO: 5234343 - DNA, 25 bp, Homo sapien
cagctcacttcttgtggattgccaa

SEQ ID NO: 5234344 - DNA, 25 bp, Homo sapien
cttcctgctatgactgtgtgtcatg

SEQ ID NO: 5234345 - DNA, 25 bp, Homo sapien
agatgacctctcccataggacaaag

SEQ ID NO: 5234346 - DNA, 25 bp, Homo sapien
caagatgtttattagaggtcagtac

SEQ ID NO: 5234347 - DNA, 25 bp, Homo sapien
cttttaaacttagcctcataggttg

SEQ ID NO: 5234348 - DNA, 25 bp, Homo sapien
ctcataggttgggttctcagggagt

SEQ ID NO: 5234349 - DNA, 25 bp, Homo sapien
gagatggagcttgaatgcaagatgt

SEQ ID NO: 5234350 - DNA, 25 bp, Homo sapien
caaataatcctatatgtgtccgtag

SEQ ID NO: 5234351 - DNA, 25 bp, Homo sapien
tagtgtcactgaacgaagctctaac

SEQ ID NO: 5234352 - DNA, 25 bp, Homo sapien
tagaagtttgcacacatatctgatc

SEQ ID NO: 5234353 - DNA, 25 bp, Homo sapien
gcttctctaaccaaactcagattag

SEQ ID NO: 5234354 - DNA, 25 bp, Homo sapien
aaggacctcaaaactgagggcagcc

SEQ ID NO: 5234355 - DNA, 25 bp, Homo sapien
ggacctcaaaactgagggcagccct

SEQ ID NO: 5234356 - DNA, 25 bp, Homo sapien
aggacctcaaaactgagggcagccc

SEQ ID NO: 5234357 - DNA, 25 bp, Homo sapien
gatctcctgcatacaagatgctcag

SEQ ID NO: 5234358 - DNA, 25 bp, Homo sapien
agtgggacttgaactactttcgctc

SEQ ID NO: 5234359 - DNA, 25 bp, Homo sapien
cttttgctaaggatctcctgcatac

SEQ ID NO: 5234360 - DNA, 25 bp, Homo sapien
tttcgctcttctattcaaccaactt

SEQ ID NO: 5234361 - DNA, 25 bp, Homo sapien
gtggcaggactgatgaactcccagg

SEQ ID NO: 5234362 - DNA, 25 bp, Homo sapien
gtagtgagcccaatttctcaattcc

SEQ ID NO: 5234363 - DNA, 25 bp, Homo sapien
tgtggcaggactgatgaactcccag

SEQ ID NO: 5234364 - DNA, 25 bp, Homo sapien
cccagggaatattcagtagtgagcc

SEQ ID NO: 5234365 - DNA, 25 bp, Homo sapien
tggcagcagttagagcatacgcact

SEQ ID NO: 5234366 - DNA, 25 bp, Homo sapien
tctgagccagtaaggaggtgatctc

SEQ ID NO: 5234367 - DNA, 25 bp, Homo sapien
taagtcaaagatatcaccctctggg

SEQ ID NO: 5234368 - DNA, 25 bp, Homo sapien
taagataacaggattgccattaagc

SEQ ID NO: 5234369 - DNA, 25 bp, Homo sapien
ttctaactcttctctgattgtcagg

SEQ ID NO: 5234370 - DNA, 25 bp, Homo sapien
gatgctgagcttaatgtattctaac

SEQ ID NO: 5234371 - DNA, 25 bp, Homo sapien
tgtattcaaactacatatgtgatgc

SEQ ID NO: 5234372 - DNA, 25 bp, Homo sapien
ttgtcaggtgctctgcaggagtcac

SEQ ID NO: 5234373 - DNA, 25 bp, Homo sapien
gtttgtgaaacaattcgtattacat

SEQ ID NO: 5234374 - DNA, 25 bp, Homo sapien
acaattcgtattacatttataacca

SEQ ID NO: 5234375 - DNA, 25 bp, Homo sapien
tgtgaaacaattcgtattacattta

SEQ ID NO: 5234376 - DNA, 25 bp, Homo sapien
caattcgtattacatttataaccaa

SEQ ID NO: 5234377 - DNA, 25 bp, Homo sapien
ttgaaacagcaagatctgcctgctc

SEQ ID NO: 5234378 - DNA, 25 bp, Homo sapien
gcctgctcctactgttgtccctctc

SEQ ID NO: 5234379 - DNA, 25 bp, Homo sapien
ttggttgaaacagcaagatctgcct

SEQ ID NO: 5234380 - DNA, 25 bp, Homo sapien
tctctcctaccgcaggtccatttgt

SEQ ID NO: 5234381 - DNA, 25 bp, Homo sapien
ccattccttttcagagataatttcc

SEQ ID NO: 5234382 - DNA, 25 bp, Homo sapien
ttcagatgacatgctgaacacctat

SEQ ID NO: 5234383 - DNA, 25 bp, Homo sapien
gctgaacacctatacctgcaggcct

SEQ ID NO: 5234384 - DNA, 25 bp, Homo sapien
gatgacatgctgaacacctatacct

SEQ ID NO: 5234385 - DNA, 25 bp, Homo sapien
gatctctctttactgcatggacaag

SEQ ID NO: 5234386 - DNA, 25 bp, Homo sapien
ttgagagtaccacctcaaagaggta

SEQ ID NO: 5234387 - DNA, 25 bp, Homo sapien
gatgtacactccaagaacccacgtg

SEQ ID NO: 5234388 - DNA, 25 bp, Homo sapien
tgtttttcatatagggaccttccca

SEQ ID NO: 5234389 - DNA, 25 bp, Homo sapien
caagcagcttcttcaaccaaaacat

SEQ ID NO: 5234390 - DNA, 25 bp, Homo sapien
tcttcaaccaaaacattgacatatt

SEQ ID NO: 5234391 - DNA, 25 bp, Homo sapien
taatcaatgatgattatggtggtct

SEQ ID NO: 5234392 - DNA, 25 bp, Homo sapien
tgatgattatggtggtcttgggcct

SEQ ID NO: 5234393 - DNA, 25 bp, Homo sapien
actgagtaaggccaaatgtgaccac

SEQ ID NO: 5234394 - DNA, 25 bp, Homo sapien
gaagctcatcaacatctaggaaata

SEQ ID NO: 5234395 - DNA, 25 bp, Homo sapien
tgaggccccaaccttacagattagc

SEQ ID NO: 5234396 - DNA, 25 bp, Homo sapien
tctagagtatactaccaggagaagc

SEQ ID NO: 5234397 - DNA, 25 bp, Homo sapien
tcaggaccctgattacctcgatgct

SEQ ID NO: 5234398 - DNA, 25 bp, Homo sapien
cacaatctgtagtgcagggcctgac

SEQ ID NO: 5234399 - DNA, 25 bp, Homo sapien
tattgaacgccctagacagaagatt

SEQ ID NO: 5234400 - DNA, 25 bp, Homo sapien
tccagcaaagttaacaagccagagc

SEQ ID NO: 5234401 - DNA, 25 bp, Homo sapien
gagataattccaaggtgcattccac

SEQ ID NO: 5234402 - DNA, 25 bp, Homo sapien
tgtctccgttttggctgaggcccta

SEQ ID NO: 5234403 - DNA, 25 bp, Homo sapien
tccacagtttcttagagggtctcca

SEQ ID NO: 5234404 - DNA, 25 bp, Homo sapien
gatggaaatccattacatgtcccag

SEQ ID NO: 5234405 - DNA, 25 bp, Homo sapien
taaggcaagacaaggaagcttcacc

SEQ ID NO: 5234406 - DNA, 25 bp, Homo sapien
tcacctgttcctacctctatgatag

SEQ ID NO: 5234407 - DNA, 25 bp, Homo sapien
gcctacattggcgtgcaaaacacca

SEQ ID NO: 5234408 - DNA, 25 bp, Homo sapien
cctgtgccttttgatgttgtgcaac

SEQ ID NO: 5234409 - DNA, 25 bp, Homo sapien
gcaatgtccagtgaccatcaggtga

SEQ ID NO: 5234410 - DNA, 25 bp, Homo sapien
agccagtgtagggatgttagagcaa

SEQ ID NO: 5234411 - DNA, 25 bp, Homo sapien
ttgtcaggcagttgctacactgtct

SEQ ID NO: 5234412 - DNA, 25 bp, Homo sapien
caagtagtcaggcagatacaagcag

SEQ ID NO: 5234413 - DNA, 25 bp, Homo sapien
gatgggctgtagtgcttgtcaaact

SEQ ID NO: 5234414 - DNA, 25 bp, Homo sapien
tgctcatggccgtcaggagtcacca

SEQ ID NO: 5234415 - DNA, 25 bp, Homo sapien
caaacttgcttcacggatggaagaa

SEQ ID NO: 5234416 - DNA, 25 bp, Homo sapien
atggccgtcaggagtcaccagcagg

SEQ ID NO: 5234417 - DNA, 25 bp, Homo sapien
agtacggctaagcaaagaaaaccag

SEQ ID NO: 5234418 - DNA, 25 bp, Homo sapien
aagaaaagtcaagtacggctaagca

SEQ ID NO: 5234419 - DNA, 25 bp, Homo sapien
ctaatcgccaggaatgttaaacagg

SEQ ID NO: 5234420 - DNA, 25 bp, Homo sapien
gatgtggagcctaatcgccaggaat

SEQ ID NO: 5234421 - DNA, 25 bp, Homo sapien
gagaaccaggaaagttaacagggca

SEQ ID NO: 5234422 - DNA, 25 bp, Homo sapien
tgagaaccaggaaagttaacagggc

SEQ ID NO: 5234423 - DNA, 25 bp, Homo sapien
catgagaaccaggaaagttaacagg

SEQ ID NO: 5234424 - DNA, 25 bp, Homo sapien
agaaccaggaaagttaacagggcat

SEQ ID NO: 5234425 - DNA, 25 bp, Homo sapien
ttccacttgttctccttttgccctc

SEQ ID NO: 5234426 - DNA, 25 bp, Homo sapien
ctgcccgttccacttgttctccttt

SEQ ID NO: 5234427 - DNA, 25 bp, Homo sapien
ccgcaaaccaatttcgacacctgca

SEQ ID NO: 5234428 - DNA, 25 bp, Homo sapien
aaccaatttcgacacctgcatcctt

SEQ ID NO: 5234429 - DNA, 25 bp, Homo sapien
tcccgcaaaccaatttcgacacctg

SEQ ID NO: 5234430 - DNA, 25 bp, Homo sapien
gcaaaccaatttcgacacctgcatc

SEQ ID NO: 5234431 - DNA, 25 bp, Homo sapien
tgcacttcaaaagagaaccccacgg

SEQ ID NO: 5234432 - DNA, 25 bp, Homo sapien
ttttaaaggtgggagcaagtgatcc

SEQ ID NO: 5234433 - DNA, 25 bp, Homo sapien
taactgtcactgcatctaagaaaga

SEQ ID NO: 5234434 - DNA, 25 bp, Homo sapien
tggatcactgagcttaagatggagc

SEQ ID NO: 5234435 - DNA, 25 bp, Homo sapien
cttctgcattgacccaatgcccaaa

SEQ ID NO: 5234436 - DNA, 25 bp, Homo sapien
acagaatgggtttatgcatcattcc

SEQ ID NO: 5234437 - DNA, 25 bp, Homo sapien
tgctgaagtgcacagaatgggttta

SEQ ID NO: 5234438 - DNA, 25 bp, Homo sapien
tgaagtgcacagaatgggtttatgc

SEQ ID NO: 5234439 - DNA, 25 bp, Homo sapien
ggcttattctggtattgacttgttc

SEQ ID NO: 5234440 - DNA, 25 bp, Homo sapien
tattgacttgttctatggccctttc

SEQ ID NO: 5234441 - DNA, 25 bp, Homo sapien
ccacatggcttattctggtattgac

SEQ ID NO: 5234442 - DNA, 25 bp, Homo sapien
gtattgacttgttctatggcccttt

SEQ ID NO: 5234443 - DNA, 25 bp, Homo sapien
cctggccttagcatgataacgctcg

SEQ ID NO: 5234444 - DNA, 25 bp, Homo sapien
tcccaggactttcagagcaacagcc

SEQ ID NO: 5234445 - DNA, 25 bp, Homo sapien
tctctgggcatgaagaatacctaat

SEQ ID NO: 5234446 - DNA, 25 bp, Homo sapien
tcgccccgtcataggaaggagggtc

SEQ ID NO: 5234447 - DNA, 25 bp, Homo sapien
gggctgtactgaagatattaggacc

SEQ ID NO: 5234448 - DNA, 25 bp, Homo sapien
cagtccttagatgtacacccatctc

SEQ ID NO: 5234449 - DNA, 25 bp, Homo sapien
tgaagatattaggacccacatctgc

SEQ ID NO: 5234450 - DNA, 25 bp, Homo sapien
gcccattaaacccagtccttagatg

SEQ ID NO: 5234451 - DNA, 25 bp, Homo sapien
ggccaacagcgtctggaatagaccc

SEQ ID NO: 5234452 - DNA, 25 bp, Homo sapien
caggccaacagcgtctggaatagac

SEQ ID NO: 5234453 - DNA, 25 bp, Homo sapien
ccaggccaacagcgtctggaataga

SEQ ID NO: 5234454 - DNA, 25 bp, Homo sapien
aggccaacagcgtctggaatagacc

SEQ ID NO: 5234455 - DNA, 25 bp, Homo sapien
ttgtagttacttttcacgtggaggc

SEQ ID NO: 5234456 - DNA, 25 bp, Homo sapien
tgtagttacttttcacgtggaggcc

SEQ ID NO: 5234457 - DNA, 25 bp, Homo sapien
tgatatgccaactcacttgaacagc

SEQ ID NO: 5234458 - DNA, 25 bp, Homo sapien
gcatgaagtgatatgccaactcact

SEQ ID NO: 5234459 - DNA, 25 bp, Homo sapien
ctgggtagacatcatcataggcttg

SEQ ID NO: 5234460 - DNA, 25 bp, Homo sapien
tagacatcatcataggcttgtacca

SEQ ID NO: 5234461 - DNA, 25 bp, Homo sapien
tgggtagacatcatcataggcttgt

SEQ ID NO: 5234462 - DNA, 25 bp, Homo sapien
ggtagacatcatcataggcttgtac

SEQ ID NO: 5234463 - DNA, 25 bp, Homo sapien
ttcagcccaaagtaccagattattt

SEQ ID NO: 5234464 - DNA, 25 bp, Homo sapien
cttcagcccaaagtaccagattatt

SEQ ID NO: 5234465 - DNA, 25 bp, Homo sapien
ctccatcgttaggagaatacttctt

SEQ ID NO: 5234466 - DNA, 25 bp, Homo sapien
ctgcacccgatgagcccatgcttgg

SEQ ID NO: 5234467 - DNA, 25 bp, Homo sapien
caccatgaaatcctgtgagcaggca

SEQ ID NO: 5234468 - DNA, 25 bp, Homo sapien
tggcattggttagcgactccttaaa

SEQ ID NO: 5234469 - DNA, 25 bp, Homo sapien
tcctgagttgaagtaattgcctccc

SEQ ID NO: 5234470 - DNA, 25 bp, Homo sapien
tgccctaaggaaccctgcttgctct

SEQ ID NO: 5234471 - DNA, 25 bp, Homo sapien
tggtgccctaaggaaccctgcttgc

SEQ ID NO: 5234472 - DNA, 25 bp, Homo sapien
caactggtgccctaaggaaccctgc

SEQ ID NO: 5234473 - DNA, 25 bp, Homo sapien
ctaaggaaccctgcttgctcttgat

SEQ ID NO: 5234474 - DNA, 25 bp, Homo sapien
caggccttgtgcagttaaccagaaa

SEQ ID NO: 5234475 - DNA, 25 bp, Homo sapien
ttctgctgctggtgcaagcggatga

SEQ ID NO: 5234476 - DNA, 25 bp, Homo sapien
agcggatgaggcctcttacacttac

SEQ ID NO: 5234477 - DNA, 25 bp, Homo sapien
gtgcagttaaccagaaaaccaccag

SEQ ID NO: 5234478 - DNA, 25 bp, Homo sapien
aacaatgtgttatgcaatagcctgc

SEQ ID NO: 5234479 - DNA, 25 bp, Homo sapien
ccccagtgcaagacagagtttgaga

SEQ ID NO: 5234480 - DNA, 25 bp, Homo sapien
tcacaaccaggtcaattaaacgctc

SEQ ID NO: 5234481 - DNA, 25 bp, Homo sapien
gacatgtgaccctagaaaaggtacc

SEQ ID NO: 5234482 - DNA, 25 bp, Homo sapien
agacgtcccctgttgggagtagaca

SEQ ID NO: 5234483 - DNA, 25 bp, Homo sapien
gaggtcagcctttttcctgtgagaa

SEQ ID NO: 5234484 - DNA, 25 bp, Homo sapien
atctgcccctcagtaaggcttacaa

SEQ ID NO: 5234485 - DNA, 25 bp, Homo sapien
tagacatcattggtttgtaggtggg

SEQ ID NO: 5234486 - DNA, 25 bp, Homo sapien
ctgcaggagcaaagagtatgcagtc

SEQ ID NO: 5234487 - DNA, 25 bp, Homo sapien
ccccatgggaggcttctaagttgag

SEQ ID NO: 5234488 - DNA, 25 bp, Homo sapien
gagcaaagagtatgcagtcccttct

SEQ ID NO: 5234489 - DNA, 25 bp, Homo sapien
ggaggcttctaagttgagcatcctc

SEQ ID NO: 5234490 - DNA, 25 bp, Homo sapien
catagagccttagagcctgggcgaa

SEQ ID NO: 5234491 - DNA, 25 bp, Homo sapien
tcagagttgagactaagcagttaca

SEQ ID NO: 5234492 - DNA, 25 bp, Homo sapien
gacactcaacggctataaacaccat

SEQ ID NO: 5234493 - DNA, 25 bp, Homo sapien
cccttgatgacttaatgtgtggtca

SEQ ID NO: 5234494 - DNA, 25 bp, Homo sapien
cagaataagaatcctccggcggaaa

SEQ ID NO: 5234495 - DNA, 25 bp, Homo sapien
gctcagcattgatcacagaataaga

SEQ ID NO: 5234496 - DNA, 25 bp, Homo sapien
ggtactacgttgtatgctttcacaa

SEQ ID NO: 5234497 - DNA, 25 bp, Homo sapien
tcactgtgatcacgtcagacggctg

SEQ ID NO: 5234498 - DNA, 25 bp, Homo sapien
gactcatagagatagacggccatca

SEQ ID NO: 5234499 - DNA, 25 bp, Homo sapien
gatgaaccaattagacagttgcaag

SEQ ID NO: 5234500 - DNA, 25 bp, Homo sapien
tgtccttgacatcactgccccaaag

SEQ ID NO: 5234501 - DNA, 25 bp, Homo sapien
tcatgcccagcagctattaagcagc

SEQ ID NO: 5234502 - DNA, 25 bp, Homo sapien
ccattgatttgagcctggcctgtct

SEQ ID NO: 5234503 - DNA, 25 bp, Homo sapien
attgatttgagcctggcctgtcttc

SEQ ID NO: 5234504 - DNA, 25 bp, Homo sapien
ggcctgtcttcaccgtggctgccat

SEQ ID NO: 5234505 - DNA, 25 bp, Homo sapien
cctggcctgtcttcaccgtggctgc

SEQ ID NO: 5234506 - DNA, 25 bp, Homo sapien
caatgtggagtctgagcagaagagc

SEQ ID NO: 5234507 - DNA, 25 bp, Homo sapien
ctgatttacagtcgggcatgcggga

SEQ ID NO: 5234508 - DNA, 25 bp, Homo sapien
gatagtaagtgattgtctgcgtcat

SEQ ID NO: 5234509 - DNA, 25 bp, Homo sapien
gggcaggagcatcttgatagtaagt

SEQ ID NO: 5234510 - DNA, 25 bp, Homo sapien
ttagatgtgaattaaacctttattc

SEQ ID NO: 5234511 - DNA, 25 bp, Homo sapien
tattctttgcctccaggaagtttgt

SEQ ID NO: 5234512 - DNA, 25 bp, Homo sapien
acctttattctttgcctccaggaag

SEQ ID NO: 5234513 - DNA, 25 bp, Homo sapien
ctttattctttgcctccaggaagtt

SEQ ID NO: 5234514 - DNA, 25 bp, Homo sapien
gaagccggatctccggactcttcag

SEQ ID NO: 5234515 - DNA, 25 bp, Homo sapien
gatgattgattctggcccagaagcc

SEQ ID NO: 5234516 - DNA, 25 bp, Homo sapien
tgtttatctgaataacgcagaaggt

SEQ ID NO: 5234517 - DNA, 25 bp, Homo sapien
ttatctgaataacgcagaaggttga

SEQ ID NO: 5234518 - DNA, 25 bp, Homo sapien
ggacttacaacataaggcctcagac

SEQ ID NO: 5234519 - DNA, 25 bp, Homo sapien
gagttctacttcaccaagggcttag

SEQ ID NO: 5234520 - DNA, 25 bp, Homo sapien
gatgctactcttcctgtgagatctt

SEQ ID NO: 5234521 - DNA, 25 bp, Homo sapien
catctgaggtttggagtgccaagga

SEQ ID NO: 5234522 - DNA, 25 bp, Homo sapien
agcaggaaagataggagaaggtcat

SEQ ID NO: 5234523 - DNA, 25 bp, Homo sapien
cttgctgcagcaggaaagataggag

SEQ ID NO: 5234524 - DNA, 25 bp, Homo sapien
attggttaaaccagaggttcttgct

SEQ ID NO: 5234525 - DNA, 25 bp, Homo sapien
tgcagcaggaaagataggagaaggt

SEQ ID NO: 5234526 - DNA, 25 bp, Homo sapien
ttcaggtccaaaggctgaagaccca

SEQ ID NO: 5234527 - DNA, 25 bp, Homo sapien
tccaaaggctgaagacccaatggct

SEQ ID NO: 5234528 - DNA, 25 bp, Homo sapien
cttccaccttcaggtccaaaggctg

SEQ ID NO: 5234529 - DNA, 25 bp, Homo sapien
ctgaagacccaatggcttctggttt

SEQ ID NO: 5234530 - DNA, 25 bp, Homo sapien
tatttcacaggctggtgacaatcca

SEQ ID NO: 5234531 - DNA, 25 bp, Homo sapien
atttcacaggctggtgacaatccag

SEQ ID NO: 5234532 - DNA, 25 bp, Homo sapien
gcccttctgccaagatgaagggcag

SEQ ID NO: 5234533 - DNA, 25 bp, Homo sapien
ctttctatataccaggcacagggcc

SEQ ID NO: 5234534 - DNA, 25 bp, Homo sapien
ttagaaatgcctgatcaaagctgag

SEQ ID NO: 5234535 - DNA, 25 bp, Homo sapien
tcagcttcaattgactgatcctttc

SEQ ID NO: 5234536 - DNA, 25 bp, Homo sapien
ttggagctcaggcaaagaaagcagt

SEQ ID NO: 5234537 - DNA, 25 bp, Homo sapien
tgtagtgacattctacactgtggta

SEQ ID NO: 5234538 - DNA, 25 bp, Homo sapien
aagatctgttgcagaatcaccttgc

SEQ ID NO: 5234539 - DNA, 25 bp, Homo sapien
taaaccaagcaaattaacctgtcca

SEQ ID NO: 5234540 - DNA, 25 bp, Homo sapien
tatgcatatattgtgggaaggtaaa

SEQ ID NO: 5234541 - DNA, 25 bp, Homo sapien
tgaactggcgcgtggtgcactggct

SEQ ID NO: 5234542 - DNA, 25 bp, Homo sapien
agggaagcgtggagagccgatgaac

SEQ ID NO: 5234543 - DNA, 25 bp, Homo sapien
gccccacatcagctcttcacagtat

SEQ ID NO: 5234544 - DNA, 25 bp, Homo sapien
ccacatcagctcttcacagtatttc

SEQ ID NO: 5234545 - DNA, 25 bp, Homo sapien
tttctaatcattttagcgattttga

SEQ ID NO: 5234546 - DNA, 25 bp, Homo sapien
tagagtgtctcacaatacctttgtg

SEQ ID NO: 5234547 - DNA, 25 bp, Homo sapien
tgtgttagagtgtctcacaatacct

SEQ ID NO: 5234548 - DNA, 25 bp, Homo sapien
aaactgatatttgtgttagagtgtc

SEQ ID NO: 5234549 - DNA, 25 bp, Homo sapien
ctttgaacaaggcatgcctcctact

SEQ ID NO: 5234550 - DNA, 25 bp, Homo sapien
tgaagcagtcggtctgggtaaaaaa

SEQ ID NO: 5234551 - DNA, 25 bp, Homo sapien
aacaaggcatgcctcctactcctag

SEQ ID NO: 5234552 - DNA, 25 bp, Homo sapien
cagcatgaagcagtcggtctgggta

SEQ ID NO: 5234553 - DNA, 25 bp, Homo sapien
ttttacactttgcttctggcacagc

SEQ ID NO: 5234554 - DNA, 25 bp, Homo sapien
aaatgaggtgcctgccttttcaaca

SEQ ID NO: 5234555 - DNA, 25 bp, Homo sapien
cagccttgggcatgccacttctctt

SEQ ID NO: 5234556 - DNA, 25 bp, Homo sapien
ggaggctcaggatctattttacact

SEQ ID NO: 5234557 - DNA, 25 bp, Homo sapien
ctcagatggccataggcaggaggct

SEQ ID NO: 5234558 - DNA, 25 bp, Homo sapien
tcctcagatggccataggcaggagg

SEQ ID NO: 5234559 - DNA, 25 bp, Homo sapien
atggaagcaaagagtcagaagagat

SEQ ID NO: 5234560 - DNA, 25 bp, Homo sapien
aggctgcttcctcaagacatggaag

SEQ ID NO: 5234561 - DNA, 25 bp, Homo sapien
cctgagtctcatgccagtccgtggg

SEQ ID NO: 5234562 - DNA, 25 bp, Homo sapien
tgtgacattcagttggccaggcctg

SEQ ID NO: 5234563 - DNA, 25 bp, Homo sapien
ccagttagtccaggcttatgtctca

SEQ ID NO: 5234564 - DNA, 25 bp, Homo sapien
gatggcaaattggacaccagttagt

SEQ ID NO: 5234565 - DNA, 25 bp, Homo sapien
gcctatgtgttttatcctaagccca

SEQ ID NO: 5234566 - DNA, 25 bp, Homo sapien
taggtgcttactactccctgcatct

SEQ ID NO: 5234567 - DNA, 25 bp, Homo sapien
tgctttgactcattaactaggtgct

SEQ ID NO: 5234568 - DNA, 25 bp, Homo sapien
gctatatgctatgtaccctgtgaac

SEQ ID NO: 5234569 - DNA, 25 bp, Homo sapien
tgatctacagctaggagaagcagca

SEQ ID NO: 5234570 - DNA, 25 bp, Homo sapien
cgttgtgtggaaaaagctaacctca

SEQ ID NO: 5234571 - DNA, 25 bp, Homo sapien
tacttttaggtgcatacgccagaaa

SEQ ID NO: 5234572 - DNA, 25 bp, Homo sapien
gaacactttgcggtatgtgatgcca

SEQ ID NO: 5234573 - DNA, 25 bp, Homo sapien
ggggaaaggccttgcagaagacact

SEQ ID NO: 5234574 - DNA, 25 bp, Homo sapien
tggggaaaggccttgcagaagacac

SEQ ID NO: 5234575 - DNA, 25 bp, Homo sapien
ctgtggggaaaggccttgcagaaga

SEQ ID NO: 5234576 - DNA, 25 bp, Homo sapien
gtggggaaaggccttgcagaagaca

SEQ ID NO: 5234577 - DNA, 25 bp, Homo sapien
ggcctcctgcaacagtgataaagtc

SEQ ID NO: 5234578 - DNA, 25 bp, Homo sapien
ctctggggcgaagccgctgggcctc

SEQ ID NO: 5234579 - DNA, 25 bp, Homo sapien
tgcaacagtgataaagtctccagca

SEQ ID NO: 5234580 - DNA, 25 bp, Homo sapien
tggtggcctctggggcgaagccgct

SEQ ID NO: 5234581 - DNA, 25 bp, Homo sapien
tctttgaatgacgtcttgggctcca

SEQ ID NO: 5234582 - DNA, 25 bp, Homo sapien
cactcttggtgttgcgatctttgaa

SEQ ID NO: 5234583 - DNA, 25 bp, Homo sapien
catcaaacttctcggaaagctcaaa

SEQ ID NO: 5234584 - DNA, 25 bp, Homo sapien
tcggaaagctcaaatggagagggat

SEQ ID NO: 5234585 - DNA, 25 bp, Homo sapien
tcaagtaggaatagggaaataatga

SEQ ID NO: 5234586 - DNA, 25 bp, Homo sapien
gaagacgattcaccgataatcttct

SEQ ID NO: 5234587 - DNA, 25 bp, Homo sapien
caagtaggaatagggaaataatgaa

SEQ ID NO: 5234588 - DNA, 25 bp, Homo sapien
gggaaataatgaagacgattcaccg

SEQ ID NO: 5234589 - DNA, 25 bp, Homo sapien
gctagtatccttaaccattatcctc

SEQ ID NO: 5234590 - DNA, 25 bp, Homo sapien
accaaggccccaatgatcaactcca

SEQ ID NO: 5234591 - DNA, 25 bp, Homo sapien
ataattcctcgtatttgccctggtg

SEQ ID NO: 5234592 - DNA, 25 bp, Homo sapien
gaggacaaataattcctcgtatttg

SEQ ID NO: 5234593 - DNA, 25 bp, Homo sapien
tccacagtgggtaacttggccttgt

SEQ ID NO: 5234594 - DNA, 25 bp, Homo sapien
tgacaactggagcatcatgggactg

SEQ ID NO: 5234595 - DNA, 25 bp, Homo sapien
acatacatagtgcatgaatttggcc

SEQ ID NO: 5234596 - DNA, 25 bp, Homo sapien
gaatgagcttcaacctgtgagtgag

SEQ ID NO: 5234597 - DNA, 25 bp, Homo sapien
gagctgatggtggactccgtattat

SEQ ID NO: 5234598 - DNA, 25 bp, Homo sapien
ggtcagtgctgatctctcccaaaag

SEQ ID NO: 5234599 - DNA, 25 bp, Homo sapien
gccctctggagctgatctgaccatt

SEQ ID NO: 5234600 - DNA, 25 bp, Homo sapien
gaaaaggaaaacttatggtcagtgc

SEQ ID NO: 5234601 - DNA, 25 bp, Homo sapien
gggcatgggatacagtatggtcatt

SEQ ID NO: 5234602 - DNA, 25 bp, Homo sapien
tctgagggaagcagatacagagaat

SEQ ID NO: 5234603 - DNA, 25 bp, Homo sapien
tgtccaagaaaattctggtgatttg

SEQ ID NO: 5234604 - DNA, 25 bp, Homo sapien
gagaattccagaaggctaagccctg

SEQ ID NO: 5234605 - DNA, 25 bp, Homo sapien
caggtggaaagttataagacaattt

SEQ ID NO: 5234606 - DNA, 25 bp, Homo sapien
taaacagagtgggtgttgttctcat

SEQ ID NO: 5234607 - DNA, 25 bp, Homo sapien
ctccatggctatgcagaggcagaca

SEQ ID NO: 5234608 - DNA, 25 bp, Homo sapien
cagaggcagacattcaggtggaaag

SEQ ID NO: 5234609 - DNA, 25 bp, Homo sapien
ctgtttcttccattcttcaggcccg

SEQ ID NO: 5234610 - DNA, 25 bp, Homo sapien
tcttccattcttcaggcccgttcat

SEQ ID NO: 5234611 - DNA, 25 bp, Homo sapien
tttcttccattcttcaggcccgttc

SEQ ID NO: 5234612 - DNA, 25 bp, Homo sapien
tgtttcttccattcttcaggcccgt

SEQ ID NO: 5234613 - DNA, 25 bp, Homo sapien
gtcactgtcagcctagctgtccagg

SEQ ID NO: 5234614 - DNA, 25 bp, Homo sapien
gcttgcttgtgcctgccaagttcag

SEQ ID NO: 5234615 - DNA, 25 bp, Homo sapien
cctataggcctagtccttgcacagg

SEQ ID NO: 5234616 - DNA, 25 bp, Homo sapien
tccaggcacccttctgcaattttcg

SEQ ID NO: 5234617 - DNA, 25 bp, Homo sapien
taggtttcgacatagaaacttgcgg

SEQ ID NO: 5234618 - DNA, 25 bp, Homo sapien
cccagttcatagatggtgcttctca

SEQ ID NO: 5234619 - DNA, 25 bp, Homo sapien
ccttttaatatgatcacattagtgg

SEQ ID NO: 5234620 - DNA, 25 bp, Homo sapien
cgaacactcagaccatagcaatggg

SEQ ID NO: 5234621 - DNA, 25 bp, Homo sapien
gctggctgagagtggtgatggtcat

SEQ ID NO: 5234622 - DNA, 25 bp, Homo sapien
caggctggctgagagtggtgatggt

SEQ ID NO: 5234623 - DNA, 25 bp, Homo sapien
ggctggctgagagtggtgatggtca

SEQ ID NO: 5234624 - DNA, 25 bp, Homo sapien
aggctggctgagagtggtgatggtc

SEQ ID NO: 5234625 - DNA, 25 bp, Homo sapien
tcatttgttgaactttagtgcgctt

SEQ ID NO: 5234626 - DNA, 25 bp, Homo sapien
aagatgaacttgaaatcatttgttg

SEQ ID NO: 5234627 - DNA, 25 bp, Homo sapien
tgatggatttgaaatgagcctcctc

SEQ ID NO: 5234628 - DNA, 25 bp, Homo sapien
agtgcgctttagatgactgatgatg

SEQ ID NO: 5234629 - DNA, 25 bp, Homo sapien
caagccaattaactatgagagttgc

SEQ ID NO: 5234630 - DNA, 25 bp, Homo sapien
acaagccaattaactatgagagttg

SEQ ID NO: 5234631 - DNA, 25 bp, Homo sapien
tctgctacctcttctattaatgttc

SEQ ID NO: 5234632 - DNA, 25 bp, Homo sapien
cctcttctattaatgttctagatgt

SEQ ID NO: 5234633 - DNA, 25 bp, Homo sapien
ctctgctacctcttctattaatgtt

SEQ ID NO: 5234634 - DNA, 25 bp, Homo sapien
gctacctcttctattaatgttctag

SEQ ID NO: 5234635 - DNA, 25 bp, Homo sapien
taataggggcagttgcagttaagat

SEQ ID NO: 5234636 - DNA, 25 bp, Homo sapien
tgtaatctcagttggagtaataggg

SEQ ID NO: 5234637 - DNA, 25 bp, Homo sapien
gtatttggggtacactctaaagctg

SEQ ID NO: 5234638 - DNA, 25 bp, Homo sapien
actctaaagctgtcctgtttgcagg

SEQ ID NO: 5234639 - DNA, 25 bp, Homo sapien
gtcttgctctgcatagacacacttg

SEQ ID NO: 5234640 - DNA, 25 bp, Homo sapien
ttgataaggtgtgataaggtctacc

SEQ ID NO: 5234641 - DNA, 25 bp, Homo sapien
cctggtgcttcaactcacgaaagca

SEQ ID NO: 5234642 - DNA, 25 bp, Homo sapien
tgcatagacactcttgccaggtctt

SEQ ID NO: 5234643 - DNA, 25 bp, Homo sapien
actgggtatccctgtcagctcttct

SEQ ID NO: 5234644 - DNA, 25 bp, Homo sapien
ctgaatagctgcaggctagttagta

SEQ ID NO: 5234645 - DNA, 25 bp, Homo sapien
tagtaaactgggtatccctgtcagc

SEQ ID NO: 5234646 - DNA, 25 bp, Homo sapien
caggctagttagtaaactgggtatc

SEQ ID NO: 5234647 - DNA, 25 bp, Homo sapien
gcagccaggtatgcgactcgcagtt

SEQ ID NO: 5234648 - DNA, 25 bp, Homo sapien
tccaaagtaccatttcctgaaatta

SEQ ID NO: 5234649 - DNA, 25 bp, Homo sapien
gactcgcagttgcaagcccagggag

SEQ ID NO: 5234650 - DNA, 25 bp, Homo sapien
ttggccgcagccaggtatgcgactc

SEQ ID NO: 5234651 - DNA, 25 bp, Homo sapien
cacattcgttctataatgacttcca

SEQ ID NO: 5234652 - DNA, 25 bp, Homo sapien
caagcacattcgttctataatgact

SEQ ID NO: 5234653 - DNA, 25 bp, Homo sapien
gtgcgcaagcacattcgttctataa

SEQ ID NO: 5234654 - DNA, 25 bp, Homo sapien
cttccaaggaaaactcctccgccat

SEQ ID NO: 5234655 - DNA, 25 bp, Homo sapien
tgctttccaatgaataggtgtccat

SEQ ID NO: 5234656 - DNA, 25 bp, Homo sapien
gttgctttccaatgaataggtgtcc

SEQ ID NO: 5234657 - DNA, 25 bp, Homo sapien
ttgctttccaatgaataggtgtcca

SEQ ID NO: 5234658 - DNA, 25 bp, Homo sapien
cagtgtccgcacagctcattccaca

SEQ ID NO: 5234659 - DNA, 25 bp, Homo sapien
agtgtccgcacagctcattccacat

SEQ ID NO: 5234660 - DNA, 25 bp, Homo sapien
ggctgggctggcctgtggaaagggc

SEQ ID NO: 5234661 - DNA, 25 bp, Homo sapien
tgggctggcctgtggaaagggcact

SEQ ID NO: 5234662 - DNA, 25 bp, Homo sapien
ggctggcctgtggaaagggcactat

SEQ ID NO: 5234663 - DNA, 25 bp, Homo sapien
ctggcctgtggaaagggcactattt

SEQ ID NO: 5234664 - DNA, 25 bp, Homo sapien
gctgcttcaggatgcgaatgaaagg

SEQ ID NO: 5234665 - DNA, 25 bp, Homo sapien
caggatgcgaatgaaagggagggtt

SEQ ID NO: 5234666 - DNA, 25 bp, Homo sapien
ggcgctgcttcaggatgcgaatgaa

SEQ ID NO: 5234667 - DNA, 25 bp, Homo sapien
aggtagcctgagggcgctgcttcag

SEQ ID NO: 5234668 - DNA, 25 bp, Homo sapien
ccagtattccggatgcagatgcaga

SEQ ID NO: 5234669 - DNA, 25 bp, Homo sapien
gatgcagagagatagaggatctaca

SEQ ID NO: 5234670 - DNA, 25 bp, Homo sapien
tagaggatctacaagtgacagttgg

SEQ ID NO: 5234671 - DNA, 25 bp, Homo sapien
ctgctattgttgtcgtcattgctgc

SEQ ID NO: 5234672 - DNA, 25 bp, Homo sapien
tgacaaactgaagagccgctggtta

SEQ ID NO: 5234673 - DNA, 25 bp, Homo sapien
cctttgcccctagggcagactgcag

SEQ ID NO: 5234674 - DNA, 25 bp, Homo sapien
gagaatatggtccacatatggtgac

SEQ ID NO: 5234675 - DNA, 25 bp, Homo sapien
tacctcgttgactcagtcttcttgc

SEQ ID NO: 5234676 - DNA, 25 bp, Homo sapien
cattcttgacattttctcgcctgga

SEQ ID NO: 5234677 - DNA, 25 bp, Homo sapien
tcctttctgacggagcctgctggcg

SEQ ID NO: 5234678 - DNA, 25 bp, Homo sapien
ggaagatacatggagtgcctggccc

SEQ ID NO: 5234679 - DNA, 25 bp, Homo sapien
cctgctggcgtcagtctttggaaga

SEQ ID NO: 5234680 - DNA, 25 bp, Homo sapien
atagaggatgaatgctgaaggttca

SEQ ID NO: 5234681 - DNA, 25 bp, Homo sapien
gaaggttcagagatgtggcggccac

SEQ ID NO: 5234682 - DNA, 25 bp, Homo sapien
gatgaatgctgaaggttcagagatg

SEQ ID NO: 5234683 - DNA, 25 bp, Homo sapien
ctgaaggttcagagatgtggcggcc

SEQ ID NO: 5234684 - DNA, 25 bp, Homo sapien
ttcatttctgatatgagataccacg

SEQ ID NO: 5234685 - DNA, 25 bp, Homo sapien
tctgatatgagataccacgggtatg

SEQ ID NO: 5234686 - DNA, 25 bp, Homo sapien
tatgagataccacgggtatgagtcc

SEQ ID NO: 5234687 - DNA, 25 bp, Homo sapien
ccacgggtatgagtcctgggctgcc

SEQ ID NO: 5234688 - DNA, 25 bp, Homo sapien
ttcagcttctacctgcgtcccaatc

SEQ ID NO: 5234689 - DNA, 25 bp, Homo sapien
tcttcagcttctacctgcgtcccaa

SEQ ID NO: 5234690 - DNA, 25 bp, Homo sapien
ccttcttcagcttctacctgcgtcc

SEQ ID NO: 5234691 - DNA, 25 bp, Homo sapien
ttcttcagcttctacctgcgtccca

SEQ ID NO: 5234692 - DNA, 25 bp, Homo sapien
tggttgaatattggctgatagcaca

SEQ ID NO: 5234693 - DNA, 25 bp, Homo sapien
gaataagccccttggttcgctccag

SEQ ID NO: 5234694 - DNA, 25 bp, Homo sapien
gagaagttgtacaagatgcctagta

SEQ ID NO: 5234695 - DNA, 25 bp, Homo sapien
gtatcacaaagctcatcaacaggga

SEQ ID NO: 5234696 - DNA, 25 bp, Homo sapien
ctttgaccgaattcctccagtcagc

SEQ ID NO: 5234697 - DNA, 25 bp, Homo sapien
tcctttgaccgaattcctccagtca

SEQ ID NO: 5234698 - DNA, 25 bp, Homo sapien
cctttgaccgaattcctccagtcag

SEQ ID NO: 5234699 - DNA, 25 bp, Homo sapien
ctcctttgaccgaattcctccagtc

SEQ ID NO: 5234700 - DNA, 25 bp, Homo sapien
tataactgggctcccatttttatca

SEQ ID NO: 5234701 - DNA, 25 bp, Homo sapien
gggctcccatttttatcattgatga

SEQ ID NO: 5234702 - DNA, 25 bp, Homo sapien
cccatttttatcattgatgaaggct

SEQ ID NO: 5234703 - DNA, 25 bp, Homo sapien
tgatgaaggcttcatattttaacat

SEQ ID NO: 5234704 - DNA, 25 bp, Homo sapien
tgaacaattgtggagaagttgccca

SEQ ID NO: 5234705 - DNA, 25 bp, Homo sapien
aaatgaaccattttgcttaaagact

SEQ ID NO: 5234706 - DNA, 25 bp, Homo sapien
atacccacagtaaatcctgtgttag

SEQ ID NO: 5234707 - DNA, 25 bp, Homo sapien
gggtatataccaatacccacagtaa

SEQ ID NO: 5234708 - DNA, 25 bp, Homo sapien
agggatcctgtgactccggagctca

SEQ ID NO: 5234709 - DNA, 25 bp, Homo sapien
ggagagacactctggcaggtctcca

SEQ ID NO: 5234710 - DNA, 25 bp, Homo sapien
tccccaaaaggtagtgctgcagatg

SEQ ID NO: 5234711 - DNA, 25 bp, Homo sapien
tgcctgacatttcctccaaatatag

SEQ ID NO: 5234712 - DNA, 25 bp, Homo sapien
ccactggctgaaggcgagtatttct

SEQ ID NO: 5234713 - DNA, 25 bp, Homo sapien
ccacttagataagcagcagcatgtg

SEQ ID NO: 5234714 - DNA, 25 bp, Homo sapien
ccttcctcaccacttagataagcag

SEQ ID NO: 5234715 - DNA, 25 bp, Homo sapien
tccagagcagagtgggcgagaccct

SEQ ID NO: 5234716 - DNA, 25 bp, Homo sapien
gcacctgctccatcacctctcccac

SEQ ID NO: 5234717 - DNA, 25 bp, Homo sapien
tgctccatcacctctcccacactca

SEQ ID NO: 5234718 - DNA, 25 bp, Homo sapien
ttcccctgcacctgctccatcacct

SEQ ID NO: 5234719 - DNA, 25 bp, Homo sapien
cttcccctgcacctgctccatcacc

SEQ ID NO: 5234720 - DNA, 25 bp, Homo sapien
aaaaaactgcaagatgtatctccat

SEQ ID NO: 5234721 - DNA, 25 bp, Homo sapien
gaaaaaactgcaagatgtatctcca

SEQ ID NO: 5234722 - DNA, 25 bp, Homo sapien
cagaaaaaactgcaagatgtatctc

SEQ ID NO: 5234723 - DNA, 25 bp, Homo sapien
ctgcagaaaaaactgcaagatgtat

SEQ ID NO: 5234724 - DNA, 25 bp, Homo sapien
taaaatgccttgcctgttctcatct

SEQ ID NO: 5234725 - DNA, 25 bp, Homo sapien
gtactctgaactctggttccagctg

SEQ ID NO: 5234726 - DNA, 25 bp, Homo sapien
ctggtgtactctgaactctggttcc

SEQ ID NO: 5234727 - DNA, 25 bp, Homo sapien
gaactctggttccagctgaaagcag

SEQ ID NO: 5234728 - DNA, 25 bp, Homo sapien
tgaactctggttccagctgaaagca

SEQ ID NO: 5234729 - DNA, 25 bp, Homo sapien
cacagcaggcatgctagaggccatg

SEQ ID NO: 5234730 - DNA, 25 bp, Homo sapien
gcagttggtaacatctgagatgcca

SEQ ID NO: 5234731 - DNA, 25 bp, Homo sapien
ccagtgagctagcaaatgaggtcca

SEQ ID NO: 5234732 - DNA, 25 bp, Homo sapien
cagtgttagaggataaggtgatggc

SEQ ID NO: 5234733 - DNA, 25 bp, Homo sapien
cttggaagtggactcttaaattctg

SEQ ID NO: 5234734 - DNA, 25 bp, Homo sapien
tcaagggttgagcttggttgataca

SEQ ID NO: 5234735 - DNA, 25 bp, Homo sapien
caattgagttgactggaacttggaa

SEQ ID NO: 5234736 - DNA, 25 bp, Homo sapien
tgaccacataggtccactcagtggg

SEQ ID NO: 5234737 - DNA, 25 bp, Homo sapien
aaatactttgtgtcctgccaagttg

SEQ ID NO: 5234738 - DNA, 25 bp, Homo sapien
tgtgtcctgccaagttgtcgatgga

SEQ ID NO: 5234739 - DNA, 25 bp, Homo sapien
aagttgtcgatggacaagacctcca

SEQ ID NO: 5234740 - DNA, 25 bp, Homo sapien
tgccaagttgtcgatggacaagacc

SEQ ID NO: 5234741 - DNA, 25 bp, Homo sapien
tagagggttagcagcagaaagcctt

SEQ ID NO: 5234742 - DNA, 25 bp, Homo sapien
ggcaggtagagggttagcagcagaa

SEQ ID NO: 5234743 - DNA, 25 bp, Homo sapien
tctggtacagcccttcttctttgtc

SEQ ID NO: 5234744 - DNA, 25 bp, Homo sapien
ttgtcctcggagaacctgccatttg

SEQ ID NO: 5234745 - DNA, 25 bp, Homo sapien
ctaaggggcaaaggctagatatggt

SEQ ID NO: 5234746 - DNA, 25 bp, Homo sapien
gatatggtcttttcataggagtctg

SEQ ID NO: 5234747 - DNA, 25 bp, Homo sapien
cttttcataggagtctgaatgtgtc

SEQ ID NO: 5234748 - DNA, 25 bp, Homo sapien
tgtactgaactagcttctggcccta

SEQ ID NO: 5234749 - DNA, 25 bp, Homo sapien
ggatccaggccaatatgcaagaagt

SEQ ID NO: 5234750 - DNA, 25 bp, Homo sapien
gaactgcagaatactggtcctatat

SEQ ID NO: 5234751 - DNA, 25 bp, Homo sapien
gtaggattaggatccaggccaatat

SEQ ID NO: 5234752 - DNA, 25 bp, Homo sapien
tgcagaatactggtcctatattggg

SEQ ID NO: 5234753 - DNA, 25 bp, Homo sapien
tctggttgaaatttacaagcagtcc

SEQ ID NO: 5234754 - DNA, 25 bp, Homo sapien
cagttctctagcagggaacttggct

SEQ ID NO: 5234755 - DNA, 25 bp, Homo sapien
tgcacacctctggttgaaatttaca

SEQ ID NO: 5234756 - DNA, 25 bp, Homo sapien
aacttggctgcggtgcttttcaaaa

SEQ ID NO: 5234757 - DNA, 25 bp, Homo sapien
tctcattcttcttccggttgttaat

SEQ ID NO: 5234758 - DNA, 25 bp, Homo sapien
tgttaatgagttttagcacatggaa

SEQ ID NO: 5234759 - DNA, 25 bp, Homo sapien
attcttcttccggttgttaatgagt

SEQ ID NO: 5234760 - DNA, 25 bp, Homo sapien
taatgagttttagcacatggaacat

SEQ ID NO: 5234761 - DNA, 25 bp, Homo sapien
tctcaaagagatacatcttggtttg

SEQ ID NO: 5234762 - DNA, 25 bp, Homo sapien
ttggaaagacagtagaagtcctgtt

SEQ ID NO: 5234763 - DNA, 25 bp, Homo sapien
ttctcaaagagatacatcttggttt

SEQ ID NO: 5234764 - DNA, 25 bp, Homo sapien
gttctcaaagagatacatcttggtt

SEQ ID NO: 5234765 - DNA, 25 bp, Homo sapien
atggtgccattgcctgtgttggcaa

SEQ ID NO: 5234766 - DNA, 25 bp, Homo sapien
gccattgcctgtgttggcaactgtg

SEQ ID NO: 5234767 - DNA, 25 bp, Homo sapien
tgccattgcctgtgttggcaactgt

SEQ ID NO: 5234768 - DNA, 25 bp, Homo sapien
ggtgccattgcctgtgttggcaact

SEQ ID NO: 5234769 - DNA, 25 bp, Homo sapien
gaaaaggatgcctatgaattcctgc

SEQ ID NO: 5234770 - DNA, 25 bp, Homo sapien
cctgccacaatgcaagcaaggtgct

SEQ ID NO: 5234771 - DNA, 25 bp, Homo sapien
aggatgcctatgaattcctgccaca

SEQ ID NO: 5234772 - DNA, 25 bp, Homo sapien
gccacaatgcaagcaaggtgcttga

SEQ ID NO: 5234773 - DNA, 25 bp, Homo sapien
cacaagagatcttgtagctagcgac

SEQ ID NO: 5234774 - DNA, 25 bp, Homo sapien
gcgaccagatgaaaatctttatcaa

SEQ ID NO: 5234775 - DNA, 25 bp, Homo sapien
tgtagctagcgaccagatgaaaatc

SEQ ID NO: 5234776 - DNA, 25 bp, Homo sapien
gtccttatttgcacaagagatcttg

SEQ ID NO: 5234777 - DNA, 25 bp, Homo sapien
taactgcaagtcgttgagatgccgt

SEQ ID NO: 5234778 - DNA, 25 bp, Homo sapien
ttttcctgcaaacaggtatcgcctg

SEQ ID NO: 5234779 - DNA, 25 bp, Homo sapien
tggtttccagattgacagccttgga

SEQ ID NO: 5234780 - DNA, 25 bp, Homo sapien
aacaggtatcgcctgtgagctgcag

SEQ ID NO: 5234781 - DNA, 25 bp, Homo sapien
ccacctcggagaacatctcaaatgg

SEQ ID NO: 5234782 - DNA, 25 bp, Homo sapien
ctgcagccctgctgtcctggggcag

SEQ ID NO: 5234783 - DNA, 25 bp, Homo sapien
cattgctgcagccctgctgtcctgg

SEQ ID NO: 5234784 - DNA, 25 bp, Homo sapien
caagccattgctgcagccctgctgt

SEQ ID NO: 5234785 - DNA, 25 bp, Homo sapien
gccattgctgcagccctgctgtcct

SEQ ID NO: 5234786 - DNA, 25 bp, Homo sapien
gacgctggcttgtctgttgattcag

SEQ ID NO: 5234787 - DNA, 25 bp, Homo sapien
aatatgtccagggtatggagaaacc

SEQ ID NO: 5234788 - DNA, 25 bp, Homo sapien
cagggtatggagaaaccaccttatt

SEQ ID NO: 5234789 - DNA, 25 bp, Homo sapien
tctccaaggaccaaaatatgtccag

SEQ ID NO: 5234790 - DNA, 25 bp, Homo sapien
gtttctgggtcactatagcttagag

SEQ ID NO: 5234791 - DNA, 25 bp, Homo sapien
ctactgccttcttagcttctgtttc

SEQ ID NO: 5234792 - DNA, 25 bp, Homo sapien
gctggtttgcttcagaactagcccc

SEQ ID NO: 5234793 - DNA, 25 bp, Homo sapien
cagaactagcccctgttgttgactt

SEQ ID NO: 5234794 - DNA, 25 bp, Homo sapien
catctttttcatgtcgggctgggga

SEQ ID NO: 5234795 - DNA, 25 bp, Homo sapien
aatccagcaaatcggctagctcctt

SEQ ID NO: 5234796 - DNA, 25 bp, Homo sapien
aaaatccagcaaatcggctagctcc

SEQ ID NO: 5234797 - DNA, 25 bp, Homo sapien
gaaaaatccagcaaatcggctagct

SEQ ID NO: 5234798 - DNA, 25 bp, Homo sapien
tgattcatactccaacatgtgctgg

SEQ ID NO: 5234799 - DNA, 25 bp, Homo sapien
caagttgggtcagttcaaatgcccc

SEQ ID NO: 5234800 - DNA, 25 bp, Homo sapien
cgtgcttactcctctgcaaggtcaa

SEQ ID NO: 5234801 - DNA, 25 bp, Homo sapien
tctcaacattatctccagggaggtg

SEQ ID NO: 5234802 - DNA, 25 bp, Homo sapien
tgggtgggaggggacgcctggaaga

SEQ ID NO: 5234803 - DNA, 25 bp, Homo sapien
gaggggacgcctggaagaggctttg

SEQ ID NO: 5234804 - DNA, 25 bp, Homo sapien
ccagggcctgcggagctgggtggga

SEQ ID NO: 5234805 - DNA, 25 bp, Homo sapien
gggacgcctggaagaggctttgcag

SEQ ID NO: 5234806 - DNA, 25 bp, Homo sapien
tggccgaggccaggtagggaccagt

SEQ ID NO: 5234807 - DNA, 25 bp, Homo sapien
tgggggcctgccttattgatgagat

SEQ ID NO: 5234808 - DNA, 25 bp, Homo sapien
ggggcctgccttattgatgagattc

SEQ ID NO: 5234809 - DNA, 25 bp, Homo sapien
cttgggggcctgccttattgatgag

SEQ ID NO: 5234810 - DNA, 25 bp, Homo sapien
tgtttgaaactctcctgtgtctgtg

SEQ ID NO: 5234811 - DNA, 25 bp, Homo sapien
cgctgccaccgtgtataaatcctgg

SEQ ID NO: 5234812 - DNA, 25 bp, Homo sapien
ttgtatcatcgtgcctatagccgct

SEQ ID NO: 5234813 - DNA, 25 bp, Homo sapien
gagggatgtcccaagcttgttttcc

SEQ ID NO: 5234814 - DNA, 25 bp, Homo sapien
caaccaattggtggagtctcagcga

SEQ ID NO: 5234815 - DNA, 25 bp, Homo sapien
tcctgtgagtcaaggcagacaccca

SEQ ID NO: 5234816 - DNA, 25 bp, Homo sapien
gccctggaatcctgagactcgcgtt

SEQ ID NO: 5234817 - DNA, 25 bp, Homo sapien
tcaaattcaatgtcgcccagcagtg

SEQ ID NO: 5234818 - DNA, 25 bp, Homo sapien
cagccctcctggacaagtgtgatcc

SEQ ID NO: 5234819 - DNA, 25 bp, Homo sapien
gccaggcgcttaagggacagataca

SEQ ID NO: 5234820 - DNA, 25 bp, Homo sapien
ccctataaacggctctcaggaggtt

SEQ ID NO: 5234821 - DNA, 25 bp, Homo sapien
gggaaaggcctttgacccatgtcat

SEQ ID NO: 5234822 - DNA, 25 bp, Homo sapien
gagcaagagggaaggattgggcgag

SEQ ID NO: 5234823 - DNA, 25 bp, Homo sapien
aaggattgggcgagaaaacaatgga

SEQ ID NO: 5234824 - DNA, 25 bp, Homo sapien
caagagggaaggattgggcgagaaa

SEQ ID NO: 5234825 - DNA, 25 bp, Homo sapien
gagggaaggattgggcgagaaaaca

SEQ ID NO: 5234826 - DNA, 25 bp, Homo sapien
aggttcagtcccgtgctgccaccag

SEQ ID NO: 5234827 - DNA, 25 bp, Homo sapien
agcaggttcagtcccgtgctgccac

SEQ ID NO: 5234828 - DNA, 25 bp, Homo sapien
atggacatcgcagcgacgcagaccc

SEQ ID NO: 5234829 - DNA, 25 bp, Homo sapien
tcatggacatcgcagcgacgcagac

SEQ ID NO: 5234830 - DNA, 25 bp, Homo sapien
ggagagcgctgtctggccttgaaca

SEQ ID NO: 5234831 - DNA, 25 bp, Homo sapien
ccaggagagcgctgtctggccttga

SEQ ID NO: 5234832 - DNA, 25 bp, Homo sapien
tcagccaggagagcgctgtctggcc

SEQ ID NO: 5234833 - DNA, 25 bp, Homo sapien
gcgctgtctggccttgaacatgggc

SEQ ID NO: 5234834 - DNA, 25 bp, Homo sapien
tagcaaaccccaattatcttccaag

SEQ ID NO: 5234835 - DNA, 25 bp, Homo sapien
cagtgtggacgttctgtttcaggga

SEQ ID NO: 5234836 - DNA, 25 bp, Homo sapien
gaccaaagtccctccaaagtgctct

SEQ ID NO: 5234837 - DNA, 25 bp, Homo sapien
tcttccaagataggagatatttccc

SEQ ID NO: 5234838 - DNA, 25 bp, Homo sapien
tcttaagcctatgcgagtcccctag

SEQ ID NO: 5234839 - DNA, 25 bp, Homo sapien
ggacagttgggaaaacacctgacca

SEQ ID NO: 5234840 - DNA, 25 bp, Homo sapien
tggtttccctagctgagccacgctg

SEQ ID NO: 5234841 - DNA, 25 bp, Homo sapien
gcagaaggcttgcacttgggccaaa

SEQ ID NO: 5234842 - DNA, 25 bp, Homo sapien
cctgcacgtgcaggctggaggtctc

SEQ ID NO: 5234843 - DNA, 25 bp, Homo sapien
tgtcttagaccccacagatgaatcg

SEQ ID NO: 5234844 - DNA, 25 bp, Homo sapien
tgaatcgaaagatagctccggccct

SEQ ID NO: 5234845 - DNA, 25 bp, Homo sapien
tgagtggtcacctgaaactgtaccc

SEQ ID NO: 5234846 - DNA, 25 bp, Homo sapien
gacatcagcttttgatgtcagtttc

SEQ ID NO: 5234847 - DNA, 25 bp, Homo sapien
acaaaggaccatgtgcttagtggct

SEQ ID NO: 5234848 - DNA, 25 bp, Homo sapien
aaatgacagaaatatgttctctcac

SEQ ID NO: 5234849 - DNA, 25 bp, Homo sapien
ccactgtgttcgcatggtgttcgag

SEQ ID NO: 5234850 - DNA, 25 bp, Homo sapien
agtgtccctggattctacctgctag

SEQ ID NO: 5234851 - DNA, 25 bp, Homo sapien
ctgtaggaggattagcagtgtccct

SEQ ID NO: 5234852 - DNA, 25 bp, Homo sapien
ggataattctcctggcgcagagccc

SEQ ID NO: 5234853 - DNA, 25 bp, Homo sapien
tacagccacgatttgccctctggaa

SEQ ID NO: 5234854 - DNA, 25 bp, Homo sapien
tgtgcccacactgaggtcaggcctg

SEQ ID NO: 5234855 - DNA, 25 bp, Homo sapien
caccccacaggaggtgagttgggaa

SEQ ID NO: 5234856 - DNA, 25 bp, Homo sapien
tctagcttgaggctttggaggcctg

SEQ ID NO: 5234857 - DNA, 25 bp, Homo sapien
gaaacccgggtctcagaatctggtc

SEQ ID NO: 5234858 - DNA, 25 bp, Homo sapien
aataaaggccccgtggtgcaatcaa

SEQ ID NO: 5234859 - DNA, 25 bp, Homo sapien
tgcaatcaagctcagcatcgagggt

SEQ ID NO: 5234860 - DNA, 25 bp, Homo sapien
gcatctggattatggctgccctgga

SEQ ID NO: 5234861 - DNA, 25 bp, Homo sapien
ggttttgcaaccaccaagaggaatg

SEQ ID NO: 5234862 - DNA, 25 bp, Homo sapien
cacagtagagatgtctacaagggac

SEQ ID NO: 5234863 - DNA, 25 bp, Homo sapien
tgtctacaagggacaacaggagcac

SEQ ID NO: 5234864 - DNA, 25 bp, Homo sapien
tgactgttgtcacagtagagatgtc

SEQ ID NO: 5234865 - DNA, 25 bp, Homo sapien
ggagcaccgtagaggtttacctgag

SEQ ID NO: 5234866 - DNA, 25 bp, Homo sapien
ctgggacaattgccacgggtccttc

SEQ ID NO: 5234867 - DNA, 25 bp, Homo sapien
ggctttctcctgactttggcagaga

SEQ ID NO: 5234868 - DNA, 25 bp, Homo sapien
ttggcagagattttggcagcttgac

SEQ ID NO: 5234869 - DNA, 25 bp, Homo sapien
ctctagccagggatctctgagtgcc

SEQ ID NO: 5234870 - DNA, 25 bp, Homo sapien
ttttggcagcttgactctcctctag

SEQ ID NO: 5234871 - DNA, 25 bp, Homo sapien
ctgtctgatgtggatgtgacgggcc

SEQ ID NO: 5234872 - DNA, 25 bp, Homo sapien
tgtctgatgtggatgtgacgggcct

SEQ ID NO: 5234873 - DNA, 25 bp, Homo sapien
ccaaggaagtgttctggctcctgga

SEQ ID NO: 5234874 - DNA, 25 bp, Homo sapien
ttccaagccaaggaagtgttctggc

SEQ ID NO: 5234875 - DNA, 25 bp, Homo sapien
caagccaaggaagtgttctggctcc

SEQ ID NO: 5234876 - DNA, 25 bp, Homo sapien
agccaaggaagtgttctggctcctg

SEQ ID NO: 5234877 - DNA, 25 bp, Homo sapien
tcaattggaagcatctcaggtggcc

SEQ ID NO: 5234878 - DNA, 25 bp, Homo sapien
aacttgagggccgttcacctgcctt

SEQ ID NO: 5234879 - DNA, 25 bp, Homo sapien
ttccagggcacatcaggataatggt

SEQ ID NO: 5234880 - DNA, 25 bp, Homo sapien
gaggatcaatatacctggccagaca

SEQ ID NO: 5234881 - DNA, 25 bp, Homo sapien
aagtgccctgtcttctggggatgat

SEQ ID NO: 5234882 - DNA, 25 bp, Homo sapien
tgggtaaggggctcgggcaagtgcc

SEQ ID NO: 5234883 - DNA, 25 bp, Homo sapien
tcagcccagtgctgtatccactctg

SEQ ID NO: 5234884 - DNA, 25 bp, Homo sapien
ggatgattatgatcagaggggctgg

SEQ ID NO: 5234885 - DNA, 25 bp, Homo sapien
gataaactgttctggtcccattagg

SEQ ID NO: 5234886 - DNA, 25 bp, Homo sapien
ccagtgacttaatctctggataata

SEQ ID NO: 5234887 - DNA, 25 bp, Homo sapien
gggtttcagagtggacccctagcta

SEQ ID NO: 5234888 - DNA, 25 bp, Homo sapien
cctagctaaacatgaaccagtgact

SEQ ID NO: 5234889 - DNA, 25 bp, Homo sapien
ttgaacaggttcacaagagggagga

SEQ ID NO: 5234890 - DNA, 25 bp, Homo sapien
tgactccatgttccctagctggtga

SEQ ID NO: 5234891 - DNA, 25 bp, Homo sapien
taaacaggactgctatgactccatg

SEQ ID NO: 5234892 - DNA, 25 bp, Homo sapien
ggaaggcattcagcccgatgtctgg

SEQ ID NO: 5234893 - DNA, 25 bp, Homo sapien
ggaacttcctagaagctctgttctc

SEQ ID NO: 5234894 - DNA, 25 bp, Homo sapien
tcctttcacaccagttccactagaa

SEQ ID NO: 5234895 - DNA, 25 bp, Homo sapien
aacttcctagaagctctgttctctg

SEQ ID NO: 5234896 - DNA, 25 bp, Homo sapien
tcacaccagttccactagaaccatg

SEQ ID NO: 5234897 - DNA, 25 bp, Homo sapien
tccagacctggtttcagatacgtgc

SEQ ID NO: 5234898 - DNA, 25 bp, Homo sapien
cagtgttttccgagtcagagagcca

SEQ ID NO: 5234899 - DNA, 25 bp, Homo sapien
agatacgtgcatctctgaggtctgc

SEQ ID NO: 5234900 - DNA, 25 bp, Homo sapien
tctatccgtttaaaatctctcagtg

SEQ ID NO: 5234901 - DNA, 25 bp, Homo sapien
gccttccgagtccgagctgggactg

SEQ ID NO: 5234902 - DNA, 25 bp, Homo sapien
cctgccttccacttttatgttagca

SEQ ID NO: 5234903 - DNA, 25 bp, Homo sapien
cacttttatgttagcacatgtgctg

SEQ ID NO: 5234904 - DNA, 25 bp, Homo sapien
acatgtgctgtgtgtatacagcagc

SEQ ID NO: 5234905 - DNA, 25 bp, Homo sapien
gcgatgactgcatttctgatcgtca

SEQ ID NO: 5234906 - DNA, 25 bp, Homo sapien
tttaagccattcctatcatcatgta

SEQ ID NO: 5234907 - DNA, 25 bp, Homo sapien
ccttgttagtttctgcgtgtctctg

SEQ ID NO: 5234908 - DNA, 25 bp, Homo sapien
tcagcaaagacgcatttaagccatt

SEQ ID NO: 5234909 - DNA, 25 bp, Homo sapien
taccattcagtctagacccagggaa

SEQ ID NO: 5234910 - DNA, 25 bp, Homo sapien
tcaacagaatctggttcagaagccg

SEQ ID NO: 5234911 - DNA, 25 bp, Homo sapien
gaggctttctggcagggataccgca

SEQ ID NO: 5234912 - DNA, 25 bp, Homo sapien
gaccttgtcactttcggagattcca

SEQ ID NO: 5234913 - DNA, 25 bp, Homo sapien
gacttgtgctagactcagaggacac

SEQ ID NO: 5234914 - DNA, 25 bp, Homo sapien
cagaattttagcctgcactgacgca

SEQ ID NO: 5234915 - DNA, 25 bp, Homo sapien
gcaagtactgctgtaggctcaaaga

SEQ ID NO: 5234916 - DNA, 25 bp, Homo sapien
tgtgtctgacacgtctacctggcag

SEQ ID NO: 5234917 - DNA, 25 bp, Homo sapien
ggctggagggatgagcggagggagg

SEQ ID NO: 5234918 - DNA, 25 bp, Homo sapien
ggtctccgcatgcagcgggaaggca

SEQ ID NO: 5234919 - DNA, 25 bp, Homo sapien
gggatgccagtgtagagccccagcc

SEQ ID NO: 5234920 - DNA, 25 bp, Homo sapien
atgccagtgtagagccccagccagt

SEQ ID NO: 5234921 - DNA, 25 bp, Homo sapien
tggtgacaaaggaaaggcttaacgc

SEQ ID NO: 5234922 - DNA, 25 bp, Homo sapien
gcagctgagcttgaagacctttcca

SEQ ID NO: 5234923 - DNA, 25 bp, Homo sapien
aggctgttaccgtgacccctgggca

SEQ ID NO: 5234924 - DNA, 25 bp, Homo sapien
ctgttaccgtgacccctgggcagct

SEQ ID NO: 5234925 - DNA, 25 bp, Homo sapien
cattgaacttctaggtgacccccaa

SEQ ID NO: 5234926 - DNA, 25 bp, Homo sapien
tggagtctccgatcagatgcccaag

SEQ ID NO: 5234927 - DNA, 25 bp, Homo sapien
gaggaggcccaggagtcattgacac

SEQ ID NO: 5234928 - DNA, 25 bp, Homo sapien
tggtgaaatccatccctggtgtggg

SEQ ID NO: 5234929 - DNA, 25 bp, Homo sapien
tatggttgggcagttcacccatgcg

SEQ ID NO: 5234930 - DNA, 25 bp, Homo sapien
caggaacttctgagcgttgccacca

SEQ ID NO: 5234931 - DNA, 25 bp, Homo sapien
tctgagcgttgccaccaaatcctac

SEQ ID NO: 5234932 - DNA, 25 bp, Homo sapien
tttcccaggaacttctgagcgttgc

SEQ ID NO: 5234933 - DNA, 25 bp, Homo sapien
gcgttgccaccaaatcctactttac

SEQ ID NO: 5234934 - DNA, 25 bp, Homo sapien
gtctcttccgtgtcgcttggttggg

SEQ ID NO: 5234935 - DNA, 25 bp, Homo sapien
tgtctcttccgtgtcgcttggttgg

SEQ ID NO: 5234936 - DNA, 25 bp, Homo sapien
ggtgagatgggggatgggtcctctc

SEQ ID NO: 5234937 - DNA, 25 bp, Homo sapien
atgggggatgggtcctctcaggccc

SEQ ID NO: 5234938 - DNA, 25 bp, Homo sapien
agaatggtgagatgggggatgggtc

SEQ ID NO: 5234939 - DNA, 25 bp, Homo sapien
ggcagaatggtgagatgggggatgg

SEQ ID NO: 5234940 - DNA, 25 bp, Homo sapien
tgcgcagggaagaagtggtagaggc

SEQ ID NO: 5234941 - DNA, 25 bp, Homo sapien
agtggtagaggcaggatccagggcg

SEQ ID NO: 5234942 - DNA, 25 bp, Homo sapien
ctgcgcagggaagaagtggtagagg

SEQ ID NO: 5234943 - DNA, 25 bp, Homo sapien
agaagtggtagaggcaggatccagg

SEQ ID NO: 5234944 - DNA, 25 bp, Homo sapien
ctggctggctggggcacgacagcgc

SEQ ID NO: 5234945 - DNA, 25 bp, Homo sapien
ggctggggcacgacagcgcggctct

SEQ ID NO: 5234946 - DNA, 25 bp, Homo sapien
tgctgccagagtccgtccctagtga

SEQ ID NO: 5234947 - DNA, 25 bp, Homo sapien
acgacagcgcggctctgctgccaga

SEQ ID NO: 5234948 - DNA, 25 bp, Homo sapien
agaccaaagattggactgatggtct

SEQ ID NO: 5234949 - DNA, 25 bp, Homo sapien
gattggactgatggtctcggcagcc

SEQ ID NO: 5234950 - DNA, 25 bp, Homo sapien
caaagattggactgatggtctcggc

SEQ ID NO: 5234951 - DNA, 25 bp, Homo sapien
ttggactgatggtctcggcagcccc

SEQ ID NO: 5234952 - DNA, 25 bp, Homo sapien
tgagaataacgctatactgcttgct

SEQ ID NO: 5234953 - DNA, 25 bp, Homo sapien
gctatactgcttgctcatactctta

SEQ ID NO: 5234954 - DNA, 25 bp, Homo sapien
cagtagcagtaactgagaataacgc

SEQ ID NO: 5234955 - DNA, 25 bp, Homo sapien
actgcttgctcatactcttagcttg

SEQ ID NO: 5234956 - DNA, 25 bp, Homo sapien
tccagatctcacacatgaggtccct

SEQ ID NO: 5234957 - DNA, 25 bp, Homo sapien
aattcccgcttccagatctcacaca

SEQ ID NO: 5234958 - DNA, 25 bp, Homo sapien
ccgcttccagatctcacacatgagg

SEQ ID NO: 5234959 - DNA, 25 bp, Homo sapien
tccaattcccgcttccagatctcac

SEQ ID NO: 5234960 - DNA, 25 bp, Homo sapien
caaaaggatggatgtgagaccacca

SEQ ID NO: 5234961 - DNA, 25 bp, Homo sapien
tctcgtctctgtcacttggttgggc

SEQ ID NO: 5234962 - DNA, 25 bp, Homo sapien
gagcggtccacctgagtgctggtca

SEQ ID NO: 5234963 - DNA, 25 bp, Homo sapien
tgaaatccatgaacggctccatgtg

SEQ ID NO: 5234964 - DNA, 25 bp, Homo sapien
tccaccgattgagcagtccctgggt

SEQ ID NO: 5234965 - DNA, 25 bp, Homo sapien
tgacatagcaagttacctagtaggg

SEQ ID NO: 5234966 - DNA, 25 bp, Homo sapien
gtgactaatcttgggtgacatagca

SEQ ID NO: 5234967 - DNA, 25 bp, Homo sapien
tccctgggtgacgacactgtgctaa

SEQ ID NO: 5234968 - DNA, 25 bp, Homo sapien
tgagctcaggaaggactttcggcct

SEQ ID NO: 5234969 - DNA, 25 bp, Homo sapien
ttgaggatggctccctcttctgcca

SEQ ID NO: 5234970 - DNA, 25 bp, Homo sapien
tctccttacacaaagcaggacgcag

SEQ ID NO: 5234971 - DNA, 25 bp, Homo sapien
tccttgcaacttggactgtgagctc

SEQ ID NO: 5234972 - DNA, 25 bp, Homo sapien
tgtgcagctcggcactggtgtccgt

SEQ ID NO: 5234973 - DNA, 25 bp, Homo sapien
tgcagctcggcactggtgtccgtca

SEQ ID NO: 5234974 - DNA, 25 bp, Homo sapien
cagctcggcactggtgtccgtcact

SEQ ID NO: 5234975 - DNA, 25 bp, Homo sapien
ctcggcactggtgtccgtcactggc

SEQ ID NO: 5234976 - DNA, 25 bp, Homo sapien
tgcagagaaagtcccagtaatcctt

SEQ ID NO: 5234977 - DNA, 25 bp, Homo sapien
cccgctgccgtcgtagggcagtgca

SEQ ID NO: 5234978 - DNA, 25 bp, Homo sapien
gaacggacaaagtggattggctcca

SEQ ID NO: 5234979 - DNA, 25 bp, Homo sapien
taatccttccgaggccccaggaagc

SEQ ID NO: 5234980 - DNA, 25 bp, Homo sapien
ttcaggaggcaaagctgcagggcct

SEQ ID NO: 5234981 - DNA, 25 bp, Homo sapien
gaagcggatgaaggcacggcctttc

SEQ ID NO: 5234982 - DNA, 25 bp, Homo sapien
aggcagaagcggatgaaggcacggc

SEQ ID NO: 5234983 - DNA, 25 bp, Homo sapien
tgaaggcacggcctttccccagagg

SEQ ID NO: 5234984 - DNA, 25 bp, Homo sapien
ctctcattgtaactgtccttgatag

SEQ ID NO: 5234985 - DNA, 25 bp, Homo sapien
gactctcattgtaactgtccttgat

SEQ ID NO: 5234986 - DNA, 25 bp, Homo sapien
actctcattgtaactgtccttgata

SEQ ID NO: 5234987 - DNA, 25 bp, Homo sapien
agagggctccggggtccataccatt

SEQ ID NO: 5234988 - DNA, 25 bp, Homo sapien
gagggctccggggtccataccattc

SEQ ID NO: 5234989 - DNA, 25 bp, Homo sapien
aactcgaaggccaccccattgagag

SEQ ID NO: 5234990 - DNA, 25 bp, Homo sapien
gctggaggtccaactcgaaggccac

SEQ ID NO: 5234991 - DNA, 25 bp, Homo sapien
caggctccatccaggtctggctgct

SEQ ID NO: 5234992 - DNA, 25 bp, Homo sapien
ggccaccccattgagagcatagaga

SEQ ID NO: 5234993 - DNA, 25 bp, Homo sapien
tgggtttgggtggaactggagcagc

SEQ ID NO: 5234994 - DNA, 25 bp, Homo sapien
gtggagaggacccaaaaccagtcat

SEQ ID NO: 5234995 - DNA, 25 bp, Homo sapien
tgtggagaggacccaaaaccagtca

SEQ ID NO: 5234996 - DNA, 25 bp, Homo sapien
ctgtggagaggacccaaaaccagtc

SEQ ID NO: 5234997 - DNA, 25 bp, Homo sapien
ccactgggtgcatcttgcagacaga

SEQ ID NO: 5234998 - DNA, 25 bp, Homo sapien
caggccctccatatgcggctgggat

SEQ ID NO: 5234999 - DNA, 25 bp, Homo sapien
aggaagatgcctttgttgctgggac

SEQ ID NO: 5235000 - DNA, 25 bp, Homo sapien
tccccaggaagatctcaatccatgg

SEQ ID NO: 5235001 - DNA, 25 bp, Homo sapien
tgatactgctccctctacagcccct

SEQ ID NO: 5235002 - DNA, 25 bp, Homo sapien
ctgcttcctttttgtgagtcccctc

SEQ ID NO: 5235003 - DNA, 25 bp, Homo sapien
agcctctggacgtgactccactctg

SEQ ID NO: 5235004 - DNA, 25 bp, Homo sapien
tcccccaggatgctagagccccccg

SEQ ID NO: 5235005 - DNA, 25 bp, Homo sapien
tagagtcttcctttgttgcgtgtcc

SEQ ID NO: 5235006 - DNA, 25 bp, Homo sapien
tgtttgcacttgtggattctccacg

SEQ ID NO: 5235007 - DNA, 25 bp, Homo sapien
tccacggtagagtcttcctttgttg

SEQ ID NO: 5235008 - DNA, 25 bp, Homo sapien
tgtggattctccacggtagagtctt

SEQ ID NO: 5235009 - DNA, 25 bp, Homo sapien
cagccttccggagcccaagtctgag

SEQ ID NO: 5235010 - DNA, 25 bp, Homo sapien
ctcagccttccggagcccaagtctg

SEQ ID NO: 5235011 - DNA, 25 bp, Homo sapien
tcagccttccggagcccaagtctga

SEQ ID NO: 5235012 - DNA, 25 bp, Homo sapien
agctgctcccgaagtgcctgcagct

SEQ ID NO: 5235013 - DNA, 25 bp, Homo sapien
gagctgctcccgaagtgcctgcagc

SEQ ID NO: 5235014 - DNA, 25 bp, Homo sapien
ctgctcccgaagtgcctgcagctcc

SEQ ID NO: 5235015 - DNA, 25 bp, Homo sapien
tgtgcctgcagctcggctctctctt

SEQ ID NO: 5235016 - DNA, 25 bp, Homo sapien
ggtacatggcatccctcctctcagc

SEQ ID NO: 5235017 - DNA, 25 bp, Homo sapien
cctggaccaagtcccgctgccctcc

SEQ ID NO: 5235018 - DNA, 25 bp, Homo sapien
tggatcagttccaacacccgcctct

SEQ ID NO: 5235019 - DNA, 25 bp, Homo sapien
tcttgtaaggatatttaggaagacg

SEQ ID NO: 5235020 - DNA, 25 bp, Homo sapien
cctcttgtaaggatatttaggaaga

SEQ ID NO: 5235021 - DNA, 25 bp, Homo sapien
cttgtaaggatatttaggaagacgg

SEQ ID NO: 5235022 - DNA, 25 bp, Homo sapien
tccctcttgtaaggatatttaggaa

SEQ ID NO: 5235023 - DNA, 25 bp, Homo sapien
gcctctgccacaggcggtccttctc

SEQ ID NO: 5235024 - DNA, 25 bp, Homo sapien
gataccgccgagaaaatcggccaaa

SEQ ID NO: 5235025 - DNA, 25 bp, Homo sapien
ctgcatggataccgccgagaaaatc

SEQ ID NO: 5235026 - DNA, 25 bp, Homo sapien
gagaaaatcggccaaagatcttgct

SEQ ID NO: 5235027 - DNA, 25 bp, Homo sapien
aatcggccaaagatcttgctacagg

SEQ ID NO: 5235028 - DNA, 25 bp, Homo sapien
tctcttcttgtaatccatggagcaa

SEQ ID NO: 5235029 - DNA, 25 bp, Homo sapien
aatccatggagcaagcatggcagag

SEQ ID NO: 5235030 - DNA, 25 bp, Homo sapien
tccatggagcaagcatggcagagca

SEQ ID NO: 5235031 - DNA, 25 bp, Homo sapien
agcagcggtctctcttcttgtaatc

SEQ ID NO: 5235032 - DNA, 25 bp, Homo sapien
tgaggactggacaaacaagagggct

SEQ ID NO: 5235033 - DNA, 25 bp, Homo sapien
taacattagagaagaagccctgagc

SEQ ID NO: 5235034 - DNA, 25 bp, Homo sapien
cacctggctcgttgtggtagttgca

SEQ ID NO: 5235035 - DNA, 25 bp, Homo sapien
gctgactccagacaggaagctgctg

SEQ ID NO: 5235036 - DNA, 25 bp, Homo sapien
tgggatgcaatctgggcggcctaac

SEQ ID NO: 5235037 - DNA, 25 bp, Homo sapien
cccaagaagccgtccagagctctgg

SEQ ID NO: 5235038 - DNA, 25 bp, Homo sapien
atctgggcggcctaaccccaagaag

SEQ ID NO: 5235039 - DNA, 25 bp, Homo sapien
gaagccgtccagagctctggtcaga

SEQ ID NO: 5235040 - DNA, 25 bp, Homo sapien
aatagcactgtacccaggaaggaga

SEQ ID NO: 5235041 - DNA, 25 bp, Homo sapien
cagaatagcactgtacccaggaagg

SEQ ID NO: 5235042 - DNA, 25 bp, Homo sapien
taggcagaatagcactgtacccagg

SEQ ID NO: 5235043 - DNA, 25 bp, Homo sapien
ggaaggagaaaacggctgcatattc

SEQ ID NO: 5235044 - DNA, 25 bp, Homo sapien
tccctctgtcctagcacccttcagc

SEQ ID NO: 5235045 - DNA, 25 bp, Homo sapien
ctagcacccttcagccaccacagct

SEQ ID NO: 5235046 - DNA, 25 bp, Homo sapien
ctctgtcctagcacccttcagccac

SEQ ID NO: 5235047 - DNA, 25 bp, Homo sapien
catgctccctctgtcctagcaccct

SEQ ID NO: 5235048 - DNA, 25 bp, Homo sapien
tggagatttgtctatccaccttctg

SEQ ID NO: 5235049 - DNA, 25 bp, Homo sapien
agatttgtctatccaccttctgtct

SEQ ID NO: 5235050 - DNA, 25 bp, Homo sapien
ggtggagatttgtctatccaccttc

SEQ ID NO: 5235051 - DNA, 25 bp, Homo sapien
ggagatttgtctatccaccttctgt

SEQ ID NO: 5235052 - DNA, 25 bp, Homo sapien
gaggtctgtcctgggactttggccc

SEQ ID NO: 5235053 - DNA, 25 bp, Homo sapien
gggaggtattcccacagaggaacaa

SEQ ID NO: 5235054 - DNA, 25 bp, Homo sapien
caaccttgacgatgaaacttctgac

SEQ ID NO: 5235055 - DNA, 25 bp, Homo sapien
gcccaggacaggtgccacttagtga

SEQ ID NO: 5235056 - DNA, 25 bp, Homo sapien
ctgctgttattggagtggccaccga

SEQ ID NO: 5235057 - DNA, 25 bp, Homo sapien
tgttattggagtggccaccgatgtc

SEQ ID NO: 5235058 - DNA, 25 bp, Homo sapien
cactgtgcctcaaggttgggtggta

SEQ ID NO: 5235059 - DNA, 25 bp, Homo sapien
ggccaccgatgtcttcactgtgcct

SEQ ID NO: 5235060 - DNA, 25 bp, Homo sapien
acacctccagaagagcagctgtgac

SEQ ID NO: 5235061 - DNA, 25 bp, Homo sapien
ggagagcatgcaagtcaggacagaa

SEQ ID NO: 5235062 - DNA, 25 bp, Homo sapien
cttcaggttccagagggagagcatg

SEQ ID NO: 5235063 - DNA, 25 bp, Homo sapien
tgtggataatccagtgctcagctgt

SEQ ID NO: 5235064 - DNA, 25 bp, Homo sapien
tcatgctcccaggcattatgggtca

SEQ ID NO: 5235065 - DNA, 25 bp, Homo sapien
ctgtaattactaagatcttcacctt

SEQ ID NO: 5235066 - DNA, 25 bp, Homo sapien
catggggcggcatctagtagaaaag

SEQ ID NO: 5235067 - DNA, 25 bp, Homo sapien
taattactaagatcttcacctttcc

SEQ ID NO: 5235068 - DNA, 25 bp, Homo sapien
ggcagggtagagctgtaactgtaat

SEQ ID NO: 5235069 - DNA, 25 bp, Homo sapien
tgctgagacatatgaatttgaccaa

SEQ ID NO: 5235070 - DNA, 25 bp, Homo sapien
caggaataccagggcatagataatg

SEQ ID NO: 5235071 - DNA, 25 bp, Homo sapien
gccagtagcaggatgccactataga

SEQ ID NO: 5235072 - DNA, 25 bp, Homo sapien
aatgaccacaaaatacttgttgatt

SEQ ID NO: 5235073 - DNA, 25 bp, Homo sapien
tccttcggaaaagtaagacaggcag

SEQ ID NO: 5235074 - DNA, 25 bp, Homo sapien
gtccttcggaaaagtaagacaggca

SEQ ID NO: 5235075 - DNA, 25 bp, Homo sapien
cagcatgatcagcagtggcacgatg

SEQ ID NO: 5235076 - DNA, 25 bp, Homo sapien
tagctagaatcttgaggagtccatg

SEQ ID NO: 5235077 - DNA, 25 bp, Homo sapien
gctgatcaagccatgtatagctaga

SEQ ID NO: 5235078 - DNA, 25 bp, Homo sapien
ggtcgatgtgattgcggcgctcaca

SEQ ID NO: 5235079 - DNA, 25 bp, Homo sapien
gagtagtggaagtgtgccctgaaga

SEQ ID NO: 5235080 - DNA, 25 bp, Homo sapien
ttagagagtagtggaagtgtgccct

SEQ ID NO: 5235081 - DNA, 25 bp, Homo sapien
tagagagtagtggaagtgtgccctg

SEQ ID NO: 5235082 - DNA, 25 bp, Homo sapien
gagagtagtggaagtgtgccctgaa

SEQ ID NO: 5235083 - DNA, 25 bp, Homo sapien
attaaaccgtcacttcccatgctcc

SEQ ID NO: 5235084 - DNA, 25 bp, Homo sapien
gccttggtttaatcagccttggtga

SEQ ID NO: 5235085 - DNA, 25 bp, Homo sapien
tacatcttcatggactgagacagag

SEQ ID NO: 5235086 - DNA, 25 bp, Homo sapien
gtggcattaagtcacattgcggtac

SEQ ID NO: 5235087 - DNA, 25 bp, Homo sapien
cttcaggtaggaagccacctctgtt

SEQ ID NO: 5235088 - DNA, 25 bp, Homo sapien
gccacctctgtttgctaggactttc

SEQ ID NO: 5235089 - DNA, 25 bp, Homo sapien
tctgtttgctaggactttctgtggg

SEQ ID NO: 5235090 - DNA, 25 bp, Homo sapien
ggaagccacctctgtttgctaggac

SEQ ID NO: 5235091 - DNA, 25 bp, Homo sapien
ctcacttgccctggtgcagtctcta

SEQ ID NO: 5235092 - DNA, 25 bp, Homo sapien
cacagagttgcccagtgcccctctg

SEQ ID NO: 5235093 - DNA, 25 bp, Homo sapien
cctctggctctcacttgccctggtg

SEQ ID NO: 5235094 - DNA, 25 bp, Homo sapien
acagagttgcccagtgcccctctgg

SEQ ID NO: 5235095 - DNA, 25 bp, Homo sapien
tttagcaatcgtggtcttccacgtc

SEQ ID NO: 5235096 - DNA, 25 bp, Homo sapien
cacgtctctgggcacttctgagaaa

SEQ ID NO: 5235097 - DNA, 25 bp, Homo sapien
ctttctctttagcaatcgtggtctt

SEQ ID NO: 5235098 - DNA, 25 bp, Homo sapien
acgtctctgggcacttctgagaaaa

SEQ ID NO: 5235099 - DNA, 25 bp, Homo sapien
ctttgatttttaggcaatactcaga

SEQ ID NO: 5235100 - DNA, 25 bp, Homo sapien
tactcagaacagaagaggaaaaagg

SEQ ID NO: 5235101 - DNA, 25 bp, Homo sapien
tcagaacagaagaggaaaaaggctg

SEQ ID NO: 5235102 - DNA, 25 bp, Homo sapien
ttgatttttaggcaatactcagaac

SEQ ID NO: 5235103 - DNA, 25 bp, Homo sapien
ttctttccaacatcaccaatggaca

SEQ ID NO: 5235104 - DNA, 25 bp, Homo sapien
tttctttccaacatcaccaatggac

SEQ ID NO: 5235105 - DNA, 25 bp, Homo sapien
tctcccagtttctttccaacatcac

SEQ ID NO: 5235106 - DNA, 25 bp, Homo sapien
ccagtttctttccaacatcaccaat

SEQ ID NO: 5235107 - DNA, 25 bp, Homo sapien
cataaaggtgcttgtcgtctgcagc

SEQ ID NO: 5235108 - DNA, 25 bp, Homo sapien
ataaaggtgcttgtcgtctgcagca

SEQ ID NO: 5235109 - DNA, 25 bp, Homo sapien
taaaggtgcttgtcgtctgcagcag

SEQ ID NO: 5235110 - DNA, 25 bp, Homo sapien
taaaataaaatcttacacagcctta

SEQ ID NO: 5235111 - DNA, 25 bp, Homo sapien
agacactgtgcagtttaaaataaaa

SEQ ID NO: 5235112 - DNA, 25 bp, Homo sapien
aactgtgctagaaccaacttattca

SEQ ID NO: 5235113 - DNA, 25 bp, Homo sapien
aaataaaatcttacacagccttaca

SEQ ID NO: 5235114 - DNA, 25 bp, Homo sapien
gctactgaaaataccaccagaatag

SEQ ID NO: 5235115 - DNA, 25 bp, Homo sapien
tactgaaaataccaccagaataggg

SEQ ID NO: 5235116 - DNA, 25 bp, Homo sapien
ctgaaaataccaccagaatagggct

SEQ ID NO: 5235117 - DNA, 25 bp, Homo sapien
tggctactgaaaataccaccagaat

SEQ ID NO: 5235118 - DNA, 25 bp, Homo sapien
ttccgctcgccgcctggacgcgcgg

SEQ ID NO: 5235119 - DNA, 25 bp, Homo sapien
tccgctcgccgcctggacgcgcggc

SEQ ID NO: 5235120 - DNA, 25 bp, Homo sapien
cccggctctagccggccacttccgc

SEQ ID NO: 5235121 - DNA, 25 bp, Homo sapien
cctgaacccgcctgccgagccgccg

SEQ ID NO: 5235122 - DNA, 25 bp, Homo sapien
ccccgaagcctgaacccgcctgccg

SEQ ID NO: 5235123 - DNA, 25 bp, Homo sapien
ccgaagcctgaacccgcctgccgag

SEQ ID NO: 5235124 - DNA, 25 bp, Homo sapien
aagcctgaacccgcctgccgagccg

SEQ ID NO: 5235125 - DNA, 25 bp, Homo sapien
gaggcaaggacggagggagcggccc

SEQ ID NO: 5235126 - DNA, 25 bp, Homo sapien
aggacggagggagcggccctgctgc

SEQ ID NO: 5235127 - DNA, 25 bp, Homo sapien
taagggaggcaaggacggagggagc

SEQ ID NO: 5235128 - DNA, 25 bp, Homo sapien
caaggacggagggagcggccctgct

SEQ ID NO: 5235129 - DNA, 25 bp, Homo sapien
ttgagcgcgagcgtctcctcgatga

SEQ ID NO: 5235130 - DNA, 25 bp, Homo sapien
agcgcgagcgtctcctcgatgatgc

SEQ ID NO: 5235131 - DNA, 25 bp, Homo sapien
gagcgtctcctcgatgatgcggttg

SEQ ID NO: 5235132 - DNA, 25 bp, Homo sapien
gcgagcgtctcctcgatgatgcggt

SEQ ID NO: 5235133 - DNA, 25 bp, Homo sapien
cgcctcccacgtctaccccgctggg

SEQ ID NO: 5235134 - DNA, 25 bp, Homo sapien
acaacattggggattagctggggtc

SEQ ID NO: 5235135 - DNA, 25 bp, Homo sapien
tctgggggactggacaacattgggg

SEQ ID NO: 5235136 - DNA, 25 bp, Homo sapien
gcgcccaatcgcctcccacgtctac

SEQ ID NO: 5235137 - DNA, 25 bp, Homo sapien
gaaacagtactgctcactacacgta

SEQ ID NO: 5235138 - DNA, 25 bp, Homo sapien
ctattactagttcccagttcaccag

SEQ ID NO: 5235139 - DNA, 25 bp, Homo sapien
gtatacagcaatcacccaaaataag

SEQ ID NO: 5235140 - DNA, 25 bp, Homo sapien
aaatctgtggccttataaaggagac

SEQ ID NO: 5235141 - DNA, 25 bp, Homo sapien
ctgcgaaagaaacgaagactaagtt

SEQ ID NO: 5235142 - DNA, 25 bp, Homo sapien
aagactaagttgctctccagggatg

SEQ ID NO: 5235143 - DNA, 25 bp, Homo sapien
gaaagaaacgaagactaagttgctc

SEQ ID NO: 5235144 - DNA, 25 bp, Homo sapien
aacgaagactaagttgctctccagg

SEQ ID NO: 5235145 - DNA, 25 bp, Homo sapien
tgttacttctactgcttccggtttg

SEQ ID NO: 5235146 - DNA, 25 bp, Homo sapien
aatgttacttctactgcttccggtt

SEQ ID NO: 5235147 - DNA, 25 bp, Homo sapien
ctgcaaatgttacttctactgcttc

SEQ ID NO: 5235148 - DNA, 25 bp, Homo sapien
caaatgttacttctactgcttccgg

SEQ ID NO: 5235149 - DNA, 25 bp, Homo sapien
atgcatgagctaccgcacccaatcc

SEQ ID NO: 5235150 - DNA, 25 bp, Homo sapien
acatgcatgagctaccgcacccaat

SEQ ID NO: 5235151 - DNA, 25 bp, Homo sapien
catgcatgagctaccgcacccaatc

SEQ ID NO: 5235152 - DNA, 25 bp, Homo sapien
tacatgcatgagctaccgcacccaa

SEQ ID NO: 5235153 - DNA, 25 bp, Homo sapien
tcatcttgtcgaggactcttgttgt

SEQ ID NO: 5235154 - DNA, 25 bp, Homo sapien
ctcttgttgtagaaagggtggttgt

SEQ ID NO: 5235155 - DNA, 25 bp, Homo sapien
gggtggttgtattcctctgagttca

SEQ ID NO: 5235156 - DNA, 25 bp, Homo sapien
ggtaacagcacttcagagctgcaaa

SEQ ID NO: 5235157 - DNA, 25 bp, Homo sapien
atatgatagaggaccccatcgaaat

SEQ ID NO: 5235158 - DNA, 25 bp, Homo sapien
ttgaaatatgatagaggaccccatc

SEQ ID NO: 5235159 - DNA, 25 bp, Homo sapien
aaatatgatagaggaccccatcgaa

SEQ ID NO: 5235160 - DNA, 25 bp, Homo sapien
tgaaatatgatagaggaccccatcg

SEQ ID NO: 5235161 - DNA, 25 bp, Homo sapien
cagcaccatgtgcctgaagttcctt

SEQ ID NO: 5235162 - DNA, 25 bp, Homo sapien
tcagcaccatgtgcctgaagttcct

SEQ ID NO: 5235163 - DNA, 25 bp, Homo sapien
agcaccatgtgcctgaagttccttg

SEQ ID NO: 5235164 - DNA, 25 bp, Homo sapien
ttataggaatcaagtcaagagcccc

SEQ ID NO: 5235165 - DNA, 25 bp, Homo sapien
caagagcccctagttaggtgagcaa

SEQ ID NO: 5235166 - DNA, 25 bp, Homo sapien
aaagacagctatttgtgcctaagcc

SEQ ID NO: 5235167 - DNA, 25 bp, Homo sapien
gcaaactgccaatgaaaggtgagga

SEQ ID NO: 5235168 - DNA, 25 bp, Homo sapien
acacttcttttcaggtagttatagc

SEQ ID NO: 5235169 - DNA, 25 bp, Homo sapien
ggcttgcacctagtgaagactgtct

SEQ ID NO: 5235170 - DNA, 25 bp, Homo sapien
tagttatagctgatccaaagcagcg

SEQ ID NO: 5235171 - DNA, 25 bp, Homo sapien
caagccaactgtgtgaagtcccaac

SEQ ID NO: 5235172 - DNA, 25 bp, Homo sapien
taaaattactcagtgcatagccagc

SEQ ID NO: 5235173 - DNA, 25 bp, Homo sapien
caaatacgttaatccaaaggccatg

SEQ ID NO: 5235174 - DNA, 25 bp, Homo sapien
gagtatctttttatgcctgggacag

SEQ ID NO: 5235175 - DNA, 25 bp, Homo sapien
tacagactgagccactaacccaggt

SEQ ID NO: 5235176 - DNA, 25 bp, Homo sapien
gattctggatttaccaagaaactcc

SEQ ID NO: 5235177 - DNA, 25 bp, Homo sapien
ctgattctggatttaccaagaaact

SEQ ID NO: 5235178 - DNA, 25 bp, Homo sapien
tgattctggatttaccaagaaactc

SEQ ID NO: 5235179 - DNA, 25 bp, Homo sapien
gattaagtaagagtcatgtggcccc

SEQ ID NO: 5235180 - DNA, 25 bp, Homo sapien
ccgagggtgggaatcaatgtttgct

SEQ ID NO: 5235181 - DNA, 25 bp, Homo sapien
tatgcagaattactaagggccgagg

SEQ ID NO: 5235182 - DNA, 25 bp, Homo sapien
gaacaaacaaatgtggccctctggc

SEQ ID NO: 5235183 - DNA, 25 bp, Homo sapien
tgaatgttgagacaacctattagaa

SEQ ID NO: 5235184 - DNA, 25 bp, Homo sapien
acatagctgttctattcaaggatga

SEQ ID NO: 5235185 - DNA, 25 bp, Homo sapien
gctaaatgcctcagaatttgagaca

SEQ ID NO: 5235186 - DNA, 25 bp, Homo sapien
gccactgaatcacagggtaaaaagg

SEQ ID NO: 5235187 - DNA, 25 bp, Homo sapien
cagggtctgcaatctggcaatgtct

SEQ ID NO: 5235188 - DNA, 25 bp, Homo sapien
tccaaacgtgcctagataaacccat

SEQ ID NO: 5235189 - DNA, 25 bp, Homo sapien
tgtgacaagcatgcccaagactttg

SEQ ID NO: 5235190 - DNA, 25 bp, Homo sapien
gattttgccaaaagcctacagtgtt

SEQ ID NO: 5235191 - DNA, 25 bp, Homo sapien
tgagcatgggctcttcgggaggatg

SEQ ID NO: 5235192 - DNA, 25 bp, Homo sapien
ctttgctctagataatgcttagcac

SEQ ID NO: 5235193 - DNA, 25 bp, Homo sapien
tttatttaatactggagaggcactc

SEQ ID NO: 5235194 - DNA, 25 bp, Homo sapien
gcgcccggctgaggtctgtgttttt

SEQ ID NO: 5235195 - DNA, 25 bp, Homo sapien
ggtcatatagcaaagagacattgta

SEQ ID NO: 5235196 - DNA, 25 bp, Homo sapien
cagcttgatgcacaatggaatcctt

SEQ ID NO: 5235197 - DNA, 25 bp, Homo sapien
tggatgccggaagattttcaaggtc

SEQ ID NO: 5235198 - DNA, 25 bp, Homo sapien
aaggtcatatagcaaagagacattg

SEQ ID NO: 5235199 - DNA, 25 bp, Homo sapien
tcatcatccctataatggataactg

SEQ ID NO: 5235200 - DNA, 25 bp, Homo sapien
taatggataactgccctgttctctc

SEQ ID NO: 5235201 - DNA, 25 bp, Homo sapien
aagacagaggcaaaacaatttcgct

SEQ ID NO: 5235202 - DNA, 25 bp, Homo sapien
ggcaaaacaatttcgcttcaacatg

SEQ ID NO: 5235203 - DNA, 25 bp, Homo sapien
ggtgtagcagccatatccaggcttc

SEQ ID NO: 5235204 - DNA, 25 bp, Homo sapien
cagtaagtgccatggtggtgtagca

SEQ ID NO: 5235205 - DNA, 25 bp, Homo sapien
taacatggacctatggtcaccctgc

SEQ ID NO: 5235206 - DNA, 25 bp, Homo sapien
tacagctgaaagtttgaccaagcca

SEQ ID NO: 5235207 - DNA, 25 bp, Homo sapien
tcgtcgtcatccttaaacactgtgc

SEQ ID NO: 5235208 - DNA, 25 bp, Homo sapien
cgtcgtcatccttaaacactgtgct

SEQ ID NO: 5235209 - DNA, 25 bp, Homo sapien
actgtgctgaagactactgtgactc

SEQ ID NO: 5235210 - DNA, 25 bp, Homo sapien
ctgtgctgaagactactgtgactct

SEQ ID NO: 5235211 - DNA, 25 bp, Homo sapien
atgggtttcccccaagatgtctgct

SEQ ID NO: 5235212 - DNA, 25 bp, Homo sapien
taagtcgccatgcatgggtttcccc

SEQ ID NO: 5235213 - DNA, 25 bp, Homo sapien
tataagtcgccatgcatgggtttcc

SEQ ID NO: 5235214 - DNA, 25 bp, Homo sapien
catgcatgggtttcccccaagatgt

SEQ ID NO: 5235215 - DNA, 25 bp, Homo sapien
cagagcctgcttgccaaatgacaaa

SEQ ID NO: 5235216 - DNA, 25 bp, Homo sapien
gacttcctgagtctagctagcactg

SEQ ID NO: 5235217 - DNA, 25 bp, Homo sapien
taggtaagtgccctaccacaggtac

SEQ ID NO: 5235218 - DNA, 25 bp, Homo sapien
tgatatgcccataccactagtgtgg

SEQ ID NO: 5235219 - DNA, 25 bp, Homo sapien
tatacgtaatcaagcaatattgcct

SEQ ID NO: 5235220 - DNA, 25 bp, Homo sapien
ttttcatgtgtcagcctcacgagta

SEQ ID NO: 5235221 - DNA, 25 bp, Homo sapien
tatcataggaagttcggaataaatc

SEQ ID NO: 5235222 - DNA, 25 bp, Homo sapien
gctaggatgtcttttgagcatcaga

SEQ ID NO: 5235223 - DNA, 25 bp, Homo sapien
tcacaggtacatgtggtattcacaa

SEQ ID NO: 5235224 - DNA, 25 bp, Homo sapien
cagaacagatacgtaactgttggca

SEQ ID NO: 5235225 - DNA, 25 bp, Homo sapien
tctccaaggctctaattcacaggta

SEQ ID NO: 5235226 - DNA, 25 bp, Homo sapien
taaaccagtggtgacttattagcac

SEQ ID NO: 5235227 - DNA, 25 bp, Homo sapien
tctatgtggtgtgacctttgtagcc

SEQ ID NO: 5235228 - DNA, 25 bp, Homo sapien
tacacttcagattcaaacgggagag

SEQ ID NO: 5235229 - DNA, 25 bp, Homo sapien
tatgacaagtgctagctgctaccac

SEQ ID NO: 5235230 - DNA, 25 bp, Homo sapien
tggcaactcaagctatagggtttgt

SEQ ID NO: 5235231 - DNA, 25 bp, Homo sapien
tcagctccagaggaggttccctgtg

SEQ ID NO: 5235232 - DNA, 25 bp, Homo sapien
gttccctgtggctaaagaggacctg

SEQ ID NO: 5235233 - DNA, 25 bp, Homo sapien
cagcaacctaaggacgtctcctact

SEQ ID NO: 5235234 - DNA, 25 bp, Homo sapien
ccagcaacctaaggacgtctcctac

SEQ ID NO: 5235235 - DNA, 25 bp, Homo sapien
gcaacctaaggacgtctcctactga

SEQ ID NO: 5235236 - DNA, 25 bp, Homo sapien
aacctaaggacgtctcctactgagg

SEQ ID NO: 5235237 - DNA, 25 bp, Homo sapien
tcaggattaggaaatgcagctgcct

SEQ ID NO: 5235238 - DNA, 25 bp, Homo sapien
tcagtattaccaggctttgtcaggg

SEQ ID NO: 5235239 - DNA, 25 bp, Homo sapien
tcaacgagcgtgaatggaggagccc

SEQ ID NO: 5235240 - DNA, 25 bp, Homo sapien
cacgatgaaaaacagggcttgaccc

SEQ ID NO: 5235241 - DNA, 25 bp, Homo sapien
tagtgcaggtagtcccggaacgtgt

SEQ ID NO: 5235242 - DNA, 25 bp, Homo sapien
tgttgtctcgagcactggcattggt

SEQ ID NO: 5235243 - DNA, 25 bp, Homo sapien
gtcccggaacgtgtggatcaggttg

SEQ ID NO: 5235244 - DNA, 25 bp, Homo sapien
gcattggtgtgacgagggaacagca

SEQ ID NO: 5235245 - DNA, 25 bp, Homo sapien
tcatcaagggcggttgggaacatac

SEQ ID NO: 5235246 - DNA, 25 bp, Homo sapien
caggtactaaagcacagtcatggtc

SEQ ID NO: 5235247 - DNA, 25 bp, Homo sapien
gaacatacaccctgggattgaccca

SEQ ID NO: 5235248 - DNA, 25 bp, Homo sapien
aaacataacaggtactaaagcacag

SEQ ID NO: 5235249 - DNA, 25 bp, Homo sapien
ggcgtgcgcggttcagcaccttgag

SEQ ID NO: 5235250 - DNA, 25 bp, Homo sapien
cccgcatacgtgtgtgaatataggc

SEQ ID NO: 5235251 - DNA, 25 bp, Homo sapien
gaagtcagacgttttcgcccgcata

SEQ ID NO: 5235252 - DNA, 25 bp, Homo sapien
ttttctcggcatctgggcgtgcgcg

SEQ ID NO: 5235253 - DNA, 25 bp, Homo sapien
tcaccaaacaagtacccggtgagaa

SEQ ID NO: 5235254 - DNA, 25 bp, Homo sapien
tgaactgcctgtctactgggccctg

SEQ ID NO: 5235255 - DNA, 25 bp, Homo sapien
caggtcaccaaacaagtacccggtg

SEQ ID NO: 5235256 - DNA, 25 bp, Homo sapien
ctactgaactgcctgtctactgggc

SEQ ID NO: 5235257 - DNA, 25 bp, Homo sapien
ttagtaacataatctggttttcagg

SEQ ID NO: 5235258 - DNA, 25 bp, Homo sapien
tcctagactagatgggatcccaaag

SEQ ID NO: 5235259 - DNA, 25 bp, Homo sapien
actggaaccacaggacatcggctaa

SEQ ID NO: 5235260 - DNA, 25 bp, Homo sapien
tcaaaaggagagataagtgcgaagg

SEQ ID NO: 5235261 - DNA, 25 bp, Homo sapien
agggctagattccttaagcagaggc

SEQ ID NO: 5235262 - DNA, 25 bp, Homo sapien
cagccttcagttgccagccgcttcc

SEQ ID NO: 5235263 - DNA, 25 bp, Homo sapien
agccttcagttgccagccgcttcct

SEQ ID NO: 5235264 - DNA, 25 bp, Homo sapien
gccttcagttgccagccgcttcctc

SEQ ID NO: 5235265 - DNA, 25 bp, Homo sapien
taattcttgggaactatgaagtctt

SEQ ID NO: 5235266 - DNA, 25 bp, Homo sapien
agaggcgcaacattaaaagctacga

SEQ ID NO: 5235267 - DNA, 25 bp, Homo sapien
gcaagcacagctcgtttctgcagat

SEQ ID NO: 5235268 - DNA, 25 bp, Homo sapien
gaatcccttaagaacctgaagaggc

SEQ ID NO: 5235269 - DNA, 25 bp, Homo sapien
tgaactcaaatacttaggagaaaac

SEQ ID NO: 5235270 - DNA, 25 bp, Homo sapien
caaagcgaaacagcttggaaaagag

SEQ ID NO: 5235271 - DNA, 25 bp, Homo sapien
gcattatcctgcaactcattaccag

SEQ ID NO: 5235272 - DNA, 25 bp, Homo sapien
cattaccagtaatatattgcaaagc

SEQ ID NO: 5235273 - DNA, 25 bp, Homo sapien
tcccagcttaggtttgcaggttcaa

SEQ ID NO: 5235274 - DNA, 25 bp, Homo sapien
ccattctctcctctagggaaggtga

SEQ ID NO: 5235275 - DNA, 25 bp, Homo sapien
tttaaatatagctcactggccagcc

SEQ ID NO: 5235276 - DNA, 25 bp, Homo sapien
tgaggatctaaacctgatgggctcc

SEQ ID NO: 5235277 - DNA, 25 bp, Homo sapien
tcaggagcttgagtacagcctcggc

SEQ ID NO: 5235278 - DNA, 25 bp, Homo sapien
gcttaaaaatgctggcgtcacacaa

SEQ ID NO: 5235279 - DNA, 25 bp, Homo sapien
gagtaccttgagctctctagcagcc

SEQ ID NO: 5235280 - DNA, 25 bp, Homo sapien
tctgatgactgaacgacctgtggtt

SEQ ID NO: 5235281 - DNA, 25 bp, Homo sapien
ctggcaaaagagtacagtgagctcc

SEQ ID NO: 5235282 - DNA, 25 bp, Homo sapien
cagaaatcggattcctactactggc

SEQ ID NO: 5235283 - DNA, 25 bp, Homo sapien
gtacagtgagctccaacattagtta

SEQ ID NO: 5235284 - DNA, 25 bp, Homo sapien
ggattcctactactggcaaaagagt

SEQ ID NO: 5235285 - DNA, 25 bp, Homo sapien
tctaagcaaccttggttctgtcacc

SEQ ID NO: 5235286 - DNA, 25 bp, Homo sapien
tggttctgtcacctacagtacttac

SEQ ID NO: 5235287 - DNA, 25 bp, Homo sapien
cctaactccatatcttctaagcaac

SEQ ID NO: 5235288 - DNA, 25 bp, Homo sapien
tgtcttggaactagttacttcctta

SEQ ID NO: 5235289 - DNA, 25 bp, Homo sapien
tagctattagatggcggcacctgga

SEQ ID NO: 5235290 - DNA, 25 bp, Homo sapien
tagatccatactaacgccaagtgtg

SEQ ID NO: 5235291 - DNA, 25 bp, Homo sapien
cgactggtcacgatgggctgcttca

SEQ ID NO: 5235292 - DNA, 25 bp, Homo sapien
gtcaatctggatacgggtttacacc

SEQ ID NO: 5235293 - DNA, 25 bp, Homo sapien
gagggctctggtgcaagccgtcttc

SEQ ID NO: 5235294 - DNA, 25 bp, Homo sapien
ccatccagctgactgtgcccggacc

SEQ ID NO: 5235295 - DNA, 25 bp, Homo sapien
tgcaagccgtcttcagacgctccat

SEQ ID NO: 5235296 - DNA, 25 bp, Homo sapien
tctcccttcagccacggagggctct

SEQ ID NO: 5235297 - DNA, 25 bp, Homo sapien
tcaagtccatcctcgagggagctgg

SEQ ID NO: 5235298 - DNA, 25 bp, Homo sapien
tggcccctctaagacagatctgctg

SEQ ID NO: 5235299 - DNA, 25 bp, Homo sapien
tgaggactcagatcaacacttggcc

SEQ ID NO: 5235300 - DNA, 25 bp, Homo sapien
gaaacacttgctggctgaagagcgc

SEQ ID NO: 5235301 - DNA, 25 bp, Homo sapien
tgtctccacccagtggggacagcgg

SEQ ID NO: 5235302 - DNA, 25 bp, Homo sapien
ctgaagagcacaagtggaccaagtg

SEQ ID NO: 5235303 - DNA, 25 bp, Homo sapien
gaccaagtgcatggtgtctccaccc

SEQ ID NO: 5235304 - DNA, 25 bp, Homo sapien
caagtggaccaagtgcatggtgtct

SEQ ID NO: 5235305 - DNA, 25 bp, Homo sapien
cctgcagcggtttggaccatgtctg

SEQ ID NO: 5235306 - DNA, 25 bp, Homo sapien
ccagccctgcagcggtttggaccat

SEQ ID NO: 5235307 - DNA, 25 bp, Homo sapien
ccttcctgagtgtcagggagttgct

SEQ ID NO: 5235308 - DNA, 25 bp, Homo sapien
gccttcctgagtgtcagggagttgc

SEQ ID NO: 5235309 - DNA, 25 bp, Homo sapien
gcaggctgtaccacctgcacacccc

SEQ ID NO: 5235310 - DNA, 25 bp, Homo sapien
ctgcacacccccgagggtctggtgg

SEQ ID NO: 5235311 - DNA, 25 bp, Homo sapien
ctgggtgtagtagcctctccaggat

SEQ ID NO: 5235312 - DNA, 25 bp, Homo sapien
tgcaggctgtaccacctgcacaccc

SEQ ID NO: 5235313 - DNA, 25 bp, Homo sapien
cctctaaatgagagaatggaccagg

SEQ ID NO: 5235314 - DNA, 25 bp, Homo sapien
tgtttagactgaaaggcgggcccat

SEQ ID NO: 5235315 - DNA, 25 bp, Homo sapien
tgtgtggtagcaaccagccggagct

SEQ ID NO: 5235316 - DNA, 25 bp, Homo sapien
gtaggacttccagcccataaacttg

SEQ ID NO: 5235317 - DNA, 25 bp, Homo sapien
ggctgcaggtcgtgtcctcctggca

SEQ ID NO: 5235318 - DNA, 25 bp, Homo sapien
catgttaatccaggggcgcagaccc

SEQ ID NO: 5235319 - DNA, 25 bp, Homo sapien
gggctgcaggtcgtgtcctcctggc

SEQ ID NO: 5235320 - DNA, 25 bp, Homo sapien
ctggcagggcagcatgttaatccag

SEQ ID NO: 5235321 - DNA, 25 bp, Homo sapien
agtcctggagcggcagccggcatgc

SEQ ID NO: 5235322 - DNA, 25 bp, Homo sapien
gagtcctggagcggcagccggcatg

SEQ ID NO: 5235323 - DNA, 25 bp, Homo sapien
ggagtcctggagcggcagccggcat

SEQ ID NO: 5235324 - DNA, 25 bp, Homo sapien
taggagcaggttcgcggtgatgatg

SEQ ID NO: 5235325 - DNA, 25 bp, Homo sapien
ctaggagcaggttcgcggtgatgat

SEQ ID NO: 5235326 - DNA, 25 bp, Homo sapien
ggagcaggttcgcggtgatgatgag

SEQ ID NO: 5235327 - DNA, 25 bp, Homo sapien
gcaggttcgcggtgatgatgaggct

SEQ ID NO: 5235328 - DNA, 25 bp, Homo sapien
gcggcggtcccagcgatgcccaggg

SEQ ID NO: 5235329 - DNA, 25 bp, Homo sapien
gcaggcggcggtcccagcgatgccc

SEQ ID NO: 5235330 - DNA, 25 bp, Homo sapien
ggcggcggtcccagcgatgcccagg

SEQ ID NO: 5235331 - DNA, 25 bp, Homo sapien
aggcggcggtcccagcgatgcccag

SEQ ID NO: 5235332 - DNA, 25 bp, Homo sapien
taaccccggcgactctggttccaca

SEQ ID NO: 5235333 - DNA, 25 bp, Homo sapien
cgaggaggcaggaccagtaaccccg

SEQ ID NO: 5235334 - DNA, 25 bp, Homo sapien
ttgggagccaagtagacgaggaggc

SEQ ID NO: 5235335 - DNA, 25 bp, Homo sapien
ggcaatgtggcaatgccagacccgt

SEQ ID NO: 5235336 - DNA, 25 bp, Homo sapien
gctgcactggcacttcctagggaga

SEQ ID NO: 5235337 - DNA, 25 bp, Homo sapien
gagggacaacagtgtcccaggcccc

SEQ ID NO: 5235338 - DNA, 25 bp, Homo sapien
ggctgtgtagcgctgatcgcccagc

SEQ ID NO: 5235339 - DNA, 25 bp, Homo sapien
gcagcaggagcccatagacttcgag

SEQ ID NO: 5235340 - DNA, 25 bp, Homo sapien
ggctgagctggacggatgctctggt

SEQ ID NO: 5235341 - DNA, 25 bp, Homo sapien
ctttattcagtcagtgcggggtcaa

SEQ ID NO: 5235342 - DNA, 25 bp, Homo sapien
gagctttattcagtcagtgcggggt

SEQ ID NO: 5235343 - DNA, 25 bp, Homo sapien
ggacggatgctctggtaggagtcag

SEQ ID NO: 5235344 - DNA, 25 bp, Homo sapien
caaatcagtttaggtgggcgtgtaa

SEQ ID NO: 5235345 - DNA, 25 bp, Homo sapien
catcagccatggacagaacgttatg

SEQ ID NO: 5235346 - DNA, 25 bp, Homo sapien
caggtaggtctttgaggcgatccac

SEQ ID NO: 5235347 - DNA, 25 bp, Homo sapien
ccgacgatagcgaggtcacctttgc

SEQ ID NO: 5235348 - DNA, 25 bp, Homo sapien
gtggtagaacttgatcccggtccgc

SEQ ID NO: 5235349 - DNA, 25 bp, Homo sapien
tatcgaggtggtagaacttgatccc

SEQ ID NO: 5235350 - DNA, 25 bp, Homo sapien
gaagagattatcgaggtggtagaac

SEQ ID NO: 5235351 - DNA, 25 bp, Homo sapien
gagattatcgaggtggtagaacttg

SEQ ID NO: 5235352 - DNA, 25 bp, Homo sapien
cgtcgtcgcgcagagctgactctgg

SEQ ID NO: 5235353 - DNA, 25 bp, Homo sapien
ctcgagttccgcgtcgtcgcgcaga

SEQ ID NO: 5235354 - DNA, 25 bp, Homo sapien
ggcccagagaagtggatccgccgct

SEQ ID NO: 5235355 - DNA, 25 bp, Homo sapien
agagaagtggatccgccgcttgcgc

SEQ ID NO: 5235356 - DNA, 25 bp, Homo sapien
cgtcctgcctacagaccagaaacta

SEQ ID NO: 5235357 - DNA, 25 bp, Homo sapien
ttccgtcctgcctacagaccagaaa

SEQ ID NO: 5235358 - DNA, 25 bp, Homo sapien
ccgtcctgcctacagaccagaaact

SEQ ID NO: 5235359 - DNA, 25 bp, Homo sapien
ccttccgtcctgcctacagaccaga

SEQ ID NO: 5235360 - DNA, 25 bp, Homo sapien
agcgccgtagcagctaccaccgccg

SEQ ID NO: 5235361 - DNA, 25 bp, Homo sapien
cggcccttcagcgccgtagcagcta

SEQ ID NO: 5235362 - DNA, 25 bp, Homo sapien
ttcagcgccgtagcagctaccaccg

SEQ ID NO: 5235363 - DNA, 25 bp, Homo sapien
cccttcagcgccgtagcagctacca

SEQ ID NO: 5235364 - DNA, 25 bp, Homo sapien
ggctggacgtgaaagaaaagggatc

SEQ ID NO: 5235365 - DNA, 25 bp, Homo sapien
ctcctgctatcgtcgggctggacgt

SEQ ID NO: 5235366 - DNA, 25 bp, Homo sapien
ctggacgtgaaagaaaagggatctt

SEQ ID NO: 5235367 - DNA, 25 bp, Homo sapien
tgctatcgtcgggctggacgtgaaa

SEQ ID NO: 5235368 - DNA, 25 bp, Homo sapien
taagacgtatgaaggaaatccggga

SEQ ID NO: 5235369 - DNA, 25 bp, Homo sapien
gttcttcctcagacgacagcatggg

SEQ ID NO: 5235370 - DNA, 25 bp, Homo sapien
catcccttgcactgtacggaagagg

SEQ ID NO: 5235371 - DNA, 25 bp, Homo sapien
cctggtgccaggacgaaaagcttcg

SEQ ID NO: 5235372 - DNA, 25 bp, Homo sapien
aaatgggaaaatcgccaccgaggtg

SEQ ID NO: 5235373 - DNA, 25 bp, Homo sapien
gcagtctgaagtaagaagtgccaag

SEQ ID NO: 5235374 - DNA, 25 bp, Homo sapien
tttggaagccacttccacgtcactg

SEQ ID NO: 5235375 - DNA, 25 bp, Homo sapien
ggtaaggaaggtcagtaagaagaga

SEQ ID NO: 5235376 - DNA, 25 bp, Homo sapien
ttagctgtggctcctgcgagaatcc

SEQ ID NO: 5235377 - DNA, 25 bp, Homo sapien
ttctgggaatgtattccagctccgg

SEQ ID NO: 5235378 - DNA, 25 bp, Homo sapien
ggataccacaagggaagccgatggc

SEQ ID NO: 5235379 - DNA, 25 bp, Homo sapien
aggataccacaagggaagccgatgg

SEQ ID NO: 5235380 - DNA, 25 bp, Homo sapien
gataccacaagggaagccgatggcc

SEQ ID NO: 5235381 - DNA, 25 bp, Homo sapien
gccaaacctgaggacttaacagtca

SEQ ID NO: 5235382 - DNA, 25 bp, Homo sapien
tcatgcgccctctggtggacctcag

SEQ ID NO: 5235383 - DNA, 25 bp, Homo sapien
agaggcacgaactggaatctgggcc

SEQ ID NO: 5235384 - DNA, 25 bp, Homo sapien
tcaatagcctaggagggtcgcagcg

SEQ ID NO: 5235385 - DNA, 25 bp, Homo sapien
tagggagataccgaagcctactgtg

SEQ ID NO: 5235386 - DNA, 25 bp, Homo sapien
cagagtcatacgtgtggccaggaag

SEQ ID NO: 5235387 - DNA, 25 bp, Homo sapien
tagaagagatctgtgcccatgggtc

SEQ ID NO: 5235388 - DNA, 25 bp, Homo sapien
tactgtggtactgaagacttctggg

SEQ ID NO: 5235389 - DNA, 25 bp, Homo sapien
caaacttagatctataatgggcaag

SEQ ID NO: 5235390 - DNA, 25 bp, Homo sapien
taatgggcaaggatagggcacagtc

SEQ ID NO: 5235391 - DNA, 25 bp, Homo sapien
ctgagagaggagcaaacttagatct

SEQ ID NO: 5235392 - DNA, 25 bp, Homo sapien
tctataatgggcaaggatagggcac

SEQ ID NO: 5235393 - DNA, 25 bp, Homo sapien
agtggcctctctgtcgcagggccta

SEQ ID NO: 5235394 - DNA, 25 bp, Homo sapien
tctgggggtgtcctcgtgttccctc

SEQ ID NO: 5235395 - DNA, 25 bp, Homo sapien
cactggtgagcggagccagggtctg

SEQ ID NO: 5235396 - DNA, 25 bp, Homo sapien
tctttcgggcacgagtggcctctct

SEQ ID NO: 5235397 - DNA, 25 bp, Homo sapien
tgatcagcccagactctctaaggat

SEQ ID NO: 5235398 - DNA, 25 bp, Homo sapien
caagtgttagggagcctaggaacca

SEQ ID NO: 5235399 - DNA, 25 bp, Homo sapien
cactagcaatagtccaggccaaggc

SEQ ID NO: 5235400 - DNA, 25 bp, Homo sapien
ggtaattccaacaagcatggctcat

SEQ ID NO: 5235401 - DNA, 25 bp, Homo sapien
cgtggctcacgcttgatgactggtg

SEQ ID NO: 5235402 - DNA, 25 bp, Homo sapien
gagacaccttcataacccgagtcgg

SEQ ID NO: 5235403 - DNA, 25 bp, Homo sapien
caggagaaccatggctaaagaaccc

SEQ ID NO: 5235404 - DNA, 25 bp, Homo sapien
gcggcaggcgcttcataatatcaga

SEQ ID NO: 5235405 - DNA, 25 bp, Homo sapien
aaagcccctgctcaatagggcccag

SEQ ID NO: 5235406 - DNA, 25 bp, Homo sapien
taacctgtatcttgagctgagtgct

SEQ ID NO: 5235407 - DNA, 25 bp, Homo sapien
gaaatgtcagactcctaaccgtatc

SEQ ID NO: 5235408 - DNA, 25 bp, Homo sapien
tggctttcaacagtggcgatttcgc

SEQ ID NO: 5235409 - DNA, 25 bp, Homo sapien
ggcggggctcggcgttgctaggcaa

SEQ ID NO: 5235410 - DNA, 25 bp, Homo sapien
gggcggggctcggcgttgctaggca

SEQ ID NO: 5235411 - DNA, 25 bp, Homo sapien
tcacaagtaggacgaggacaaggac

SEQ ID NO: 5235412 - DNA, 25 bp, Homo sapien
cggcgacccactgccacgccgcggg

SEQ ID NO: 5235413 - DNA, 25 bp, Homo sapien
gggctcacaagtaggacgaggacaa

SEQ ID NO: 5235414 - DNA, 25 bp, Homo sapien
acaagtaggacgaggacaaggacga

SEQ ID NO: 5235415 - DNA, 25 bp, Homo sapien
caggccctgtgtattttagatgcgg

SEQ ID NO: 5235416 - DNA, 25 bp, Homo sapien
aaagcagatttgttcgaccccacat

SEQ ID NO: 5235417 - DNA, 25 bp, Homo sapien
caccttcaggttggtagtgcatgtg

SEQ ID NO: 5235418 - DNA, 25 bp, Homo sapien
cccggtgagcctggtgtttccatca

SEQ ID NO: 5235419 - DNA, 25 bp, Homo sapien
gtgcatcttacctatgtgtgtgaaa

SEQ ID NO: 5235420 - DNA, 25 bp, Homo sapien
ggaggtgcatcttacctatgtgtgt

SEQ ID NO: 5235421 - DNA, 25 bp, Homo sapien
atcagacggataccgtgctgacatc

SEQ ID NO: 5235422 - DNA, 25 bp, Homo sapien
gacggataccgtgctgacatcatca

SEQ ID NO: 5235423 - DNA, 25 bp, Homo sapien
cttctgtcttcaatcccccgtccca

SEQ ID NO: 5235424 - DNA, 25 bp, Homo sapien
tggcccctggtttcttaagccatta

SEQ ID NO: 5235425 - DNA, 25 bp, Homo sapien
ttctgtcttcaatcccccgtcccac

SEQ ID NO: 5235426 - DNA, 25 bp, Homo sapien
taagccattaccagagatacggctt

SEQ ID NO: 5235427 - DNA, 25 bp, Homo sapien
atgcactgaggagggcataagatca

SEQ ID NO: 5235428 - DNA, 25 bp, Homo sapien
cctcttggtatgatgcactgaggag

SEQ ID NO: 5235429 - DNA, 25 bp, Homo sapien
ctcttggtatgatgcactgaggagg

SEQ ID NO: 5235430 - DNA, 25 bp, Homo sapien
ggagggcataagatcacttctgtgg

SEQ ID NO: 5235431 - DNA, 25 bp, Homo sapien
cagtggtggtcagactttagcatgc

SEQ ID NO: 5235432 - DNA, 25 bp, Homo sapien
agtaggaattaggaggctgaaatga

SEQ ID NO: 5235433 - DNA, 25 bp, Homo sapien
tagcatgcatcctaatcatctgaag

SEQ ID NO: 5235434 - DNA, 25 bp, Homo sapien
caacattgtgccctatagggtctct

SEQ ID NO: 5235435 - DNA, 25 bp, Homo sapien
tcggtagaagaggtacccgagccag

SEQ ID NO: 5235436 - DNA, 25 bp, Homo sapien
tttcgagtggcctttagggtagcga

SEQ ID NO: 5235437 - DNA, 25 bp, Homo sapien
gagccctgcgcagctgctgtcggta

SEQ ID NO: 5235438 - DNA, 25 bp, Homo sapien
tagggtagcgattccgagccctgcg

SEQ ID NO: 5235439 - DNA, 25 bp, Homo sapien
tagctgtagttgtccgagaggacag

SEQ ID NO: 5235440 - DNA, 25 bp, Homo sapien
tgtcgatgatgaggtagctgtagtt

SEQ ID NO: 5235441 - DNA, 25 bp, Homo sapien
ctgggcctgggtgtcgatgatgagg

SEQ ID NO: 5235442 - DNA, 25 bp, Homo sapien
acagcccgagggtctgaagggtcca

SEQ ID NO: 5235443 - DNA, 25 bp, Homo sapien
tgagtacacagaatggcgaccaagg

SEQ ID NO: 5235444 - DNA, 25 bp, Homo sapien
acacagaatggcgaccaaggtgacc

SEQ ID NO: 5235445 - DNA, 25 bp, Homo sapien
gaatggcgaccaaggtgaccccttc

SEQ ID NO: 5235446 - DNA, 25 bp, Homo sapien
cagtgcttgtgagtacacagaatgg

SEQ ID NO: 5235447 - DNA, 25 bp, Homo sapien
tatactttgatacagggctacctcc

SEQ ID NO: 5235448 - DNA, 25 bp, Homo sapien
tccaggtgacttcacgaggaaggcg

SEQ ID NO: 5235449 - DNA, 25 bp, Homo sapien
tggatctgatcacaccgtgcctggg

SEQ ID NO: 5235450 - DNA, 25 bp, Homo sapien
gtgccggcccgtactgacttcttga

SEQ ID NO: 5235451 - DNA, 25 bp, Homo sapien
tgagggctcccgtacacccgacagt

SEQ ID NO: 5235452 - DNA, 25 bp, Homo sapien
gacagtcccggtgccgccggctgag

SEQ ID NO: 5235453 - DNA, 25 bp, Homo sapien
gaggtcacggttccctccactgtgg

SEQ ID NO: 5235454 - DNA, 25 bp, Homo sapien
ccgccggctgaggtcacggttccct

SEQ ID NO: 5235455 - DNA, 25 bp, Homo sapien
ccacgctgaccacatcttgatgaca

SEQ ID NO: 5235456 - DNA, 25 bp, Homo sapien
agggcccggatctgaagccgtccca

SEQ ID NO: 5235457 - DNA, 25 bp, Homo sapien
taggtagaccagatggccttgtgtg

SEQ ID NO: 5235458 - DNA, 25 bp, Homo sapien
gggctccccatccagtaggtagacc

SEQ ID NO: 5235459 - DNA, 25 bp, Homo sapien
cacagaagggtgtcatcccctagcc

SEQ ID NO: 5235460 - DNA, 25 bp, Homo sapien
agaagggtgtcatcccctagcccca

SEQ ID NO: 5235461 - DNA, 25 bp, Homo sapien
ctcagcatggtctctgcattgccct

SEQ ID NO: 5235462 - DNA, 25 bp, Homo sapien
acagtgtccagtgagctcagcatgg

SEQ ID NO: 5235463 - DNA, 25 bp, Homo sapien
aggttctcctctgcatactcatgac

SEQ ID NO: 5235464 - DNA, 25 bp, Homo sapien
cacacctgcaaagcccaggttctcc

SEQ ID NO: 5235465 - DNA, 25 bp, Homo sapien
ctctcccgggccaggttctcgggct

SEQ ID NO: 5235466 - DNA, 25 bp, Homo sapien
gctgccgctgcacccactgcatctt

SEQ ID NO: 5235467 - DNA, 25 bp, Homo sapien
tgtagcgccaggcagtgggttctca

SEQ ID NO: 5235468 - DNA, 25 bp, Homo sapien
agctgggcccgggagtagtcatcat

SEQ ID NO: 5235469 - DNA, 25 bp, Homo sapien
gaacgggttgtaggagcgctcctct

SEQ ID NO: 5235470 - DNA, 25 bp, Homo sapien
tcttgtgcatatccttcagccggcg

SEQ ID NO: 5235471 - DNA, 25 bp, Homo sapien
cagtgggtacaaccaggccagatgt

SEQ ID NO: 5235472 - DNA, 25 bp, Homo sapien
tctcgacccaagagtagaggagcag

SEQ ID NO: 5235473 - DNA, 25 bp, Homo sapien
tacagcatcggccaaagaggaccgt

SEQ ID NO: 5235474 - DNA, 25 bp, Homo sapien
tcctgacggagaagctaacagcagc

SEQ ID NO: 5235475 - DNA, 25 bp, Homo sapien
agagatgaacttgccaggcagacaa

SEQ ID NO: 5235476 - DNA, 25 bp, Homo sapien
cattgacaaagtgcagaggtagcct

SEQ ID NO: 5235477 - DNA, 25 bp, Homo sapien
gataagtgccacaagagaagcattg

SEQ ID NO: 5235478 - DNA, 25 bp, Homo sapien
gggaaggcattccagtcggaagaaa

SEQ ID NO: 5235479 - DNA, 25 bp, Homo sapien
tacagagatgcataagatacagtcc

SEQ ID NO: 5235480 - DNA, 25 bp, Homo sapien
acagagatgcataagatacagtcca

SEQ ID NO: 5235481 - DNA, 25 bp, Homo sapien
gcgcctactgtgtgctaggcaccgt

SEQ ID NO: 5235482 - DNA, 25 bp, Homo sapien
agcgcctactgtgtgctaggcaccg

SEQ ID NO: 5235483 - DNA, 25 bp, Homo sapien
gagcgcctactgtgtgctaggcacc

SEQ ID NO: 5235484 - DNA, 25 bp, Homo sapien
gcctactgtgtgctaggcaccgtgc

SEQ ID NO: 5235485 - DNA, 25 bp, Homo sapien
ctggggtccaaccagaccttcttgc

SEQ ID NO: 5235486 - DNA, 25 bp, Homo sapien
gaccttcttgccacagcagaggaca

SEQ ID NO: 5235487 - DNA, 25 bp, Homo sapien
agaccttcttgccacagcagaggac

SEQ ID NO: 5235488 - DNA, 25 bp, Homo sapien
gggtccaaccagaccttcttgccac

SEQ ID NO: 5235489 - DNA, 25 bp, Homo sapien
catggagcctgggaatggaccatca

SEQ ID NO: 5235490 - DNA, 25 bp, Homo sapien
ctttcggatctgctgatgggagctg

SEQ ID NO: 5235491 - DNA, 25 bp, Homo sapien
ttgattagctttcggatctgctgat

SEQ ID NO: 5235492 - DNA, 25 bp, Homo sapien
gattagctttcggatctgctgatgg

SEQ ID NO: 5235493 - DNA, 25 bp, Homo sapien
ctccttatccacgtgacctctggca

SEQ ID NO: 5235494 - DNA, 25 bp, Homo sapien
acctctggcattcggacgttggctg

SEQ ID NO: 5235495 - DNA, 25 bp, Homo sapien
gtgacctctggcattcggacgttgg

SEQ ID NO: 5235496 - DNA, 25 bp, Homo sapien
tgacctctggcattcggacgttggc

SEQ ID NO: 5235497 - DNA, 25 bp, Homo sapien
tgtggatgtgttccaggataatccg

SEQ ID NO: 5235498 - DNA, 25 bp, Homo sapien
gatgtgttccaggataatccgcttg

SEQ ID NO: 5235499 - DNA, 25 bp, Homo sapien
tgttccaggataatccgcttgtttt

SEQ ID NO: 5235500 - DNA, 25 bp, Homo sapien
ttgtaggccttgtctgctttcagct

SEQ ID NO: 5235501 - DNA, 25 bp, Homo sapien
gctgtgggcctgcctctacccggtc

SEQ ID NO: 5235502 - DNA, 25 bp, Homo sapien
tgtgggcctgcctctacccggtctg

SEQ ID NO: 5235503 - DNA, 25 bp, Homo sapien
tgggcctgcctctacccggtctgtg

SEQ ID NO: 5235504 - DNA, 25 bp, Homo sapien
gtgggcctgcctctacccggtctgt

SEQ ID NO: 5235505 - DNA, 25 bp, Homo sapien
ctgtggagtaaaccttggaggacat

SEQ ID NO: 5235506 - DNA, 25 bp, Homo sapien
ctctaagactaccccgagggtggat

SEQ ID NO: 5235507 - DNA, 25 bp, Homo sapien
atcctctaagactaccccgagggtg

SEQ ID NO: 5235508 - DNA, 25 bp, Homo sapien
ctaagactaccccgagggtggattg

SEQ ID NO: 5235509 - DNA, 25 bp, Homo sapien
gggatgagaggctaagatggcagac

SEQ ID NO: 5235510 - DNA, 25 bp, Homo sapien
agagggatgagaggctaagatggca

SEQ ID NO: 5235511 - DNA, 25 bp, Homo sapien
ggatgagaggctaagatggcagacc

SEQ ID NO: 5235512 - DNA, 25 bp, Homo sapien
agggatgagaggctaagatggcaga

SEQ ID NO: 5235513 - DNA, 25 bp, Homo sapien
gaagtcgatggcttcagcattggcc

SEQ ID NO: 5235514 - DNA, 25 bp, Homo sapien
gcagacactccggacccgagggctg

SEQ ID NO: 5235515 - DNA, 25 bp, Homo sapien
gagctgaggaagtcgatggcttcag

SEQ ID NO: 5235516 - DNA, 25 bp, Homo sapien
ctgggagtggcagacactccggacc

SEQ ID NO: 5235517 - DNA, 25 bp, Homo sapien
caaccccgacactgtctgagctcac

SEQ ID NO: 5235518 - DNA, 25 bp, Homo sapien
ccaaccccgacactgtctgagctca

SEQ ID NO: 5235519 - DNA, 25 bp, Homo sapien
ccccaaccccgacactgtctgagct

SEQ ID NO: 5235520 - DNA, 25 bp, Homo sapien
cccaaccccgacactgtctgagctc

SEQ ID NO: 5235521 - DNA, 25 bp, Homo sapien
cttcctcactggcacggacaggtga

SEQ ID NO: 5235522 - DNA, 25 bp, Homo sapien
gggccccaatccaatcctctgaccc

SEQ ID NO: 5235523 - DNA, 25 bp, Homo sapien
ctggcacggacaggtgaagactcct

SEQ ID NO: 5235524 - DNA, 25 bp, Homo sapien
caacaaacaggcctcaggccttttc

SEQ ID NO: 5235525 - DNA, 25 bp, Homo sapien
ctagaggcatgcacgaagaggcagt

SEQ ID NO: 5235526 - DNA, 25 bp, Homo sapien
tcagcatgccgagtttttcctggta

SEQ ID NO: 5235527 - DNA, 25 bp, Homo sapien
gaggctccccggtgtctgagaccat

SEQ ID NO: 5235528 - DNA, 25 bp, Homo sapien
ttttgtccaagaagcctcggctaga

SEQ ID NO: 5235529 - DNA, 25 bp, Homo sapien
gggcatcaggcagtaggaacgctac

SEQ ID NO: 5235530 - DNA, 25 bp, Homo sapien
acgggcatcaggcagtaggaacgct

SEQ ID NO: 5235531 - DNA, 25 bp, Homo sapien
gagagtgacgggcatcaggcagtag

SEQ ID NO: 5235532 - DNA, 25 bp, Homo sapien
gggagagtgacgggcatcaggcagt

SEQ ID NO: 5235533 - DNA, 25 bp, Homo sapien
gggacacaggcattgacgtcacagg

SEQ ID NO: 5235534 - DNA, 25 bp, Homo sapien
ggacacaggcattgacgtcacagga

SEQ ID NO: 5235535 - DNA, 25 bp, Homo sapien
cacaggcattgacgtcacaggagat

SEQ ID NO: 5235536 - DNA, 25 bp, Homo sapien
gacacaggcattgacgtcacaggag

SEQ ID NO: 5235537 - DNA, 25 bp, Homo sapien
tgatgaagtcttggctgtgctgttc

SEQ ID NO: 5235538 - DNA, 25 bp, Homo sapien
ggctgtgctgttccatgagctccag

SEQ ID NO: 5235539 - DNA, 25 bp, Homo sapien
cttgatgaagtcttggctgtgctgt

SEQ ID NO: 5235540 - DNA, 25 bp, Homo sapien
gagctccagcttctctgagagatag

SEQ ID NO: 5235541 - DNA, 25 bp, Homo sapien
cttcagcaaactcatcttccgttcc

SEQ ID NO: 5235542 - DNA, 25 bp, Homo sapien
ttcagcaaactcatcttccgttcca

SEQ ID NO: 5235543 - DNA, 25 bp, Homo sapien
gaatgaatcgttagtctggactcct

SEQ ID NO: 5235544 - DNA, 25 bp, Homo sapien
tggtccccgctcagagttctgaaga

SEQ ID NO: 5235545 - DNA, 25 bp, Homo sapien
cgcgcccagcctaatgaatgaatcg

SEQ ID NO: 5235546 - DNA, 25 bp, Homo sapien
tggcttcatctaatctggtccccgc

SEQ ID NO: 5235547 - DNA, 25 bp, Homo sapien
aaagaagtcactccagtcttcactt

SEQ ID NO: 5235548 - DNA, 25 bp, Homo sapien
aagaagtcactccagtcttcacttc

SEQ ID NO: 5235549 - DNA, 25 bp, Homo sapien
cctcggtgtccaaggtcaggaagcg

SEQ ID NO: 5235550 - DNA, 25 bp, Homo sapien
atagcagagtttgccctcggtgtcc

SEQ ID NO: 5235551 - DNA, 25 bp, Homo sapien
caaatagcagagtttgccctcggtg

SEQ ID NO: 5235552 - DNA, 25 bp, Homo sapien
ccaaggtcaggaagcgggcattgct

SEQ ID NO: 5235553 - DNA, 25 bp, Homo sapien
ttcagcctgctgatggtctacctgg

SEQ ID NO: 5235554 - DNA, 25 bp, Homo sapien
tctgctccacgatgaagacttcagc

SEQ ID NO: 5235555 - DNA, 25 bp, Homo sapien
gatggtctacctggatggtctggaa

SEQ ID NO: 5235556 - DNA, 25 bp, Homo sapien
ccatcggagagcaggtagtactggc

SEQ ID NO: 5235557 - DNA, 25 bp, Homo sapien
ttcactcatgcacggaagaaaggcc

SEQ ID NO: 5235558 - DNA, 25 bp, Homo sapien
cctacatgacagtgccccttgagag

SEQ ID NO: 5235559 - DNA, 25 bp, Homo sapien
tggatctccaaataacgcacagggc

SEQ ID NO: 5235560 - DNA, 25 bp, Homo sapien
ttatggaatctcctgctatgcggca

SEQ ID NO: 5235561 - DNA, 25 bp, Homo sapien
cacctgtattctcttggccaggtgc

SEQ ID NO: 5235562 - DNA, 25 bp, Homo sapien
tggggagcccacctgtattctcttg

SEQ ID NO: 5235563 - DNA, 25 bp, Homo sapien
tcttccctcaagatgggcatcttgg

SEQ ID NO: 5235564 - DNA, 25 bp, Homo sapien
tcttggtgatgatgcagcaccctgg

SEQ ID NO: 5235565 - DNA, 25 bp, Homo sapien
agatcccgagaacacccaaacagaa

SEQ ID NO: 5235566 - DNA, 25 bp, Homo sapien
aaccttccttggatacacagcgaga

SEQ ID NO: 5235567 - DNA, 25 bp, Homo sapien
ggacttccagtaggaaagatcctcc

SEQ ID NO: 5235568 - DNA, 25 bp, Homo sapien
gctcaggtgaaaccccaggattctg

SEQ ID NO: 5235569 - DNA, 25 bp, Homo sapien
tccaggaacttcgaatagagctcca

SEQ ID NO: 5235570 - DNA, 25 bp, Homo sapien
cataccaggggcttcttctcaaaca

SEQ ID NO: 5235571 - DNA, 25 bp, Homo sapien
tccggtccaggaacttcgaatagag

SEQ ID NO: 5235572 - DNA, 25 bp, Homo sapien
cttcgaatagagctccatatcctcc

SEQ ID NO: 5235573 - DNA, 25 bp, Homo sapien
ggaagtcggagatgagcgcgtgggc

SEQ ID NO: 5235574 - DNA, 25 bp, Homo sapien
ccgcagatagctggcgtggccgagc

SEQ ID NO: 5235575 - DNA, 25 bp, Homo sapien
agtcggagatgagcgcgtgggcttc

SEQ ID NO: 5235576 - DNA, 25 bp, Homo sapien
cttcggggtgctgccgcagatagct

SEQ ID NO: 5235577 - DNA, 25 bp, Homo sapien
cgaagaactcggcggcgaaggtgac

SEQ ID NO: 5235578 - DNA, 25 bp, Homo sapien
ccgaagaactcggcggcgaaggtga

SEQ ID NO: 5235579 - DNA, 25 bp, Homo sapien
gccgaagaactcggcggcgaaggtg

SEQ ID NO: 5235580 - DNA, 25 bp, Homo sapien
cggctccagggagcggaaagggttg

SEQ ID NO: 5235581 - DNA, 25 bp, Homo sapien
ctccggctccagggagcggaaaggg

SEQ ID NO: 5235582 - DNA, 25 bp, Homo sapien
tgggaggagcccaaggccggtgacg

SEQ ID NO: 5235583 - DNA, 25 bp, Homo sapien
gagcccaaggccggtgacgacggac

SEQ ID NO: 5235584 - DNA, 25 bp, Homo sapien
gcgtcccgcccgcgtcccagcccga

SEQ ID NO: 5235585 - DNA, 25 bp, Homo sapien
cagagaagcgggagggccccattta

SEQ ID NO: 5235586 - DNA, 25 bp, Homo sapien
caaaaccgcagcccggaaagcgcac

SEQ ID NO: 5235587 - DNA, 25 bp, Homo sapien
tgcagagaagcgggagggccccatt

SEQ ID NO: 5235588 - DNA, 25 bp, Homo sapien
gcctgagtgctagctgcgtttgcga

SEQ ID NO: 5235589 - DNA, 25 bp, Homo sapien
tctgcgaccgtaagatctgagtgcc

SEQ ID NO: 5235590 - DNA, 25 bp, Homo sapien
taaagtttgctactgagcatccgga

SEQ ID NO: 5235591 - DNA, 25 bp, Homo sapien
tccgtgctaacctagtaagagtgtg

SEQ ID NO: 5235592 - DNA, 25 bp, Homo sapien
ctagagagcaaagcgtctctggagt

SEQ ID NO: 5235593 - DNA, 25 bp, Homo sapien
gagagcaaagcgtctctggagtctg

SEQ ID NO: 5235594 - DNA, 25 bp, Homo sapien
ccactagagagcaaagcgtctctgg

SEQ ID NO: 5235595 - DNA, 25 bp, Homo sapien
cgtccactagagagcaaagcgtctc

SEQ ID NO: 5235596 - DNA, 25 bp, Homo sapien
agctgagactacgggcacacgccac

SEQ ID NO: 5235597 - DNA, 25 bp, Homo sapien
tgagactacgggcacacgccacaac

SEQ ID NO: 5235598 - DNA, 25 bp, Homo sapien
ctgagactacgggcacacgccacaa

SEQ ID NO: 5235599 - DNA, 25 bp, Homo sapien
agactacgggcacacgccacaacgc

SEQ ID NO: 5235600 - DNA, 25 bp, Homo sapien
gattcaataggctaggtctgcacct

SEQ ID NO: 5235601 - DNA, 25 bp, Homo sapien
cactctatgatgtttacacgagggc

SEQ ID NO: 5235602 - DNA, 25 bp, Homo sapien
acacatttttaacctaggagcagtg

SEQ ID NO: 5235603 - DNA, 25 bp, Homo sapien
tgggaaaaccatccaactgaacaag

SEQ ID NO: 5235604 - DNA, 25 bp, Homo sapien
agtgccctgcctcttacatcaacat

SEQ ID NO: 5235605 - DNA, 25 bp, Homo sapien
gtgcaagtaagtgtgccagcccacg

SEQ ID NO: 5235606 - DNA, 25 bp, Homo sapien
caacattcggttcacatcggccgat

SEQ ID NO: 5235607 - DNA, 25 bp, Homo sapien
gaaatgccgacttcaggtactctgg

SEQ ID NO: 5235608 - DNA, 25 bp, Homo sapien
agctccaggggctttgatccacgga

SEQ ID NO: 5235609 - DNA, 25 bp, Homo sapien
cggcagcccagaaagctccaggggc

SEQ ID NO: 5235610 - DNA, 25 bp, Homo sapien
ctccggcagcccagaaagctccagg

SEQ ID NO: 5235611 - DNA, 25 bp, Homo sapien
gcagcccagaaagctccaggggctt

SEQ ID NO: 5235612 - DNA, 25 bp, Homo sapien
ggcccagagttaaagccgcctgatc

SEQ ID NO: 5235613 - DNA, 25 bp, Homo sapien
cccagagttaaagccgcctgatcct

SEQ ID NO: 5235614 - DNA, 25 bp, Homo sapien
tggcccagagttaaagccgcctgat

SEQ ID NO: 5235615 - DNA, 25 bp, Homo sapien
ggtggcccagagttaaagccgcctg

SEQ ID NO: 5235616 - DNA, 25 bp, Homo sapien
gctggagatggaaccatagctggac

SEQ ID NO: 5235617 - DNA, 25 bp, Homo sapien
tagctggacccgcttagcctttggg

SEQ ID NO: 5235618 - DNA, 25 bp, Homo sapien
tggtcgggctggtcgggctggagat

SEQ ID NO: 5235619 - DNA, 25 bp, Homo sapien
gggaggtgcttgctgtggccctggg

SEQ ID NO: 5235620 - DNA, 25 bp, Homo sapien
ttttgtgtctgggatggggatcttc

SEQ ID NO: 5235621 - DNA, 25 bp, Homo sapien
gtgtctgggatggggatcttctcac

SEQ ID NO: 5235622 - DNA, 25 bp, Homo sapien
cggttttgtgtctgggatggggatc

SEQ ID NO: 5235623 - DNA, 25 bp, Homo sapien
ttgtgtctgggatggggatcttctc

SEQ ID NO: 5235624 - DNA, 25 bp, Homo sapien
tggccttggccatcccctagaggag

SEQ ID NO: 5235625 - DNA, 25 bp, Homo sapien
gatctgttaagctcagcagccggct

SEQ ID NO: 5235626 - DNA, 25 bp, Homo sapien
tcctgggtctgccacccaagggatg

SEQ ID NO: 5235627 - DNA, 25 bp, Homo sapien
ccagagcatggcatattgacttaga

SEQ ID NO: 5235628 - DNA, 25 bp, Homo sapien
ccgtgaaggcccatagcttccgcag

SEQ ID NO: 5235629 - DNA, 25 bp, Homo sapien
tgaaggcccatagcttccgcaggct

SEQ ID NO: 5235630 - DNA, 25 bp, Homo sapien
ggcccatagcttccgcaggctgaag

SEQ ID NO: 5235631 - DNA, 25 bp, Homo sapien
atagcttccgcaggctgaaggtgcc

SEQ ID NO: 5235632 - DNA, 25 bp, Homo sapien
ctgggtccaggaaagcaatgctcat

SEQ ID NO: 5235633 - DNA, 25 bp, Homo sapien
gcctgaagatctgactcgatgtttc

SEQ ID NO: 5235634 - DNA, 25 bp, Homo sapien
ggcgccagcctgaagatctgactcg

SEQ ID NO: 5235635 - DNA, 25 bp, Homo sapien
tttgaatcccgccacggcgccagcc

SEQ ID NO: 5235636 - DNA, 25 bp, Homo sapien
gccacggcgccagcctgaagatctg

SEQ ID NO: 5235637 - DNA, 25 bp, Homo sapien
tcgcccaagtccttgcctgtcacca

SEQ ID NO: 5235638 - DNA, 25 bp, Homo sapien
tgtcaccacgcccagacgtgcagcc

SEQ ID NO: 5235639 - DNA, 25 bp, Homo sapien
tagagatggcagacctcgcccaagt

SEQ ID NO: 5235640 - DNA, 25 bp, Homo sapien
gcagagcaagcccaacacggtggcc

SEQ ID NO: 5235641 - DNA, 25 bp, Homo sapien
gcaccattgcactcctgactgggcg

SEQ ID NO: 5235642 - DNA, 25 bp, Homo sapien
accattgcactcctgactgggcgac

SEQ ID NO: 5235643 - DNA, 25 bp, Homo sapien
cattgcactcctgactgggcgacgg

SEQ ID NO: 5235644 - DNA, 25 bp, Homo sapien
cgcaccattgcactcctgactgggc

SEQ ID NO: 5235645 - DNA, 25 bp, Homo sapien
tcctgcatgtcggagcccacaatgg

SEQ ID NO: 5235646 - DNA, 25 bp, Homo sapien
tgagagcagattgaatgcaatggcc

SEQ ID NO: 5235647 - DNA, 25 bp, Homo sapien
tggccgtgccgatgacttcctgcat

SEQ ID NO: 5235648 - DNA, 25 bp, Homo sapien
cacaatggctagctcgatggtcagc

SEQ ID NO: 5235649 - DNA, 25 bp, Homo sapien
gcaggataaaatagactctgggagg

SEQ ID NO: 5235650 - DNA, 25 bp, Homo sapien
ggataaaatagactctgggagggac

SEQ ID NO: 5235651 - DNA, 25 bp, Homo sapien
aatagactctgggagggactggtta

SEQ ID NO: 5235652 - DNA, 25 bp, Homo sapien
taaaatagactctgggagggactgg

SEQ ID NO: 5235653 - DNA, 25 bp, Homo sapien
agtgtggcatagaacagtcgaggca

SEQ ID NO: 5235654 - DNA, 25 bp, Homo sapien
ccaaagtcctgcatgactcacatct

SEQ ID NO: 5235655 - DNA, 25 bp, Homo sapien
ctgaaaccagagtggcccgggtcag

SEQ ID NO: 5235656 - DNA, 25 bp, Homo sapien
ctaactcctacggagcctcagggct

SEQ ID NO: 5235657 - DNA, 25 bp, Homo sapien
tccacgatggtgatgaggacgccac

SEQ ID NO: 5235658 - DNA, 25 bp, Homo sapien
ggaagaagaaggtgtccacgatggt

SEQ ID NO: 5235659 - DNA, 25 bp, Homo sapien
gaggacgccaccccagagtgggatt

SEQ ID NO: 5235660 - DNA, 25 bp, Homo sapien
cgtagttatcgaggaagaggaagaa

SEQ ID NO: 5235661 - DNA, 25 bp, Homo sapien
aggccataatggttataaggagtcc

SEQ ID NO: 5235662 - DNA, 25 bp, Homo sapien
ccataatggttataaggagtccaaa

SEQ ID NO: 5235663 - DNA, 25 bp, Homo sapien
caaggccataatggttataaggagt

SEQ ID NO: 5235664 - DNA, 25 bp, Homo sapien
gtcaaggccataatggttataagga

SEQ ID NO: 5235665 - DNA, 25 bp, Homo sapien
gggccgagtgcaggtagatgttgtg

SEQ ID NO: 5235666 - DNA, 25 bp, Homo sapien
ccagggccgagtgcaggtagatgtt

SEQ ID NO: 5235667 - DNA, 25 bp, Homo sapien
tgtggggcatgatgatggcgccaac

SEQ ID NO: 5235668 - DNA, 25 bp, Homo sapien
ggaacaggccccgaagaagcgctcc

SEQ ID NO: 5235669 - DNA, 25 bp, Homo sapien
ccgcctgtccctcaattattacagg

SEQ ID NO: 5235670 - DNA, 25 bp, Homo sapien
ccgactgagtgagggggtctccttt

SEQ ID NO: 5235671 - DNA, 25 bp, Homo sapien
ggctccgcaaatcctgagggaagga

SEQ ID NO: 5235672 - DNA, 25 bp, Homo sapien
agccagcatggctccgactgagtga

SEQ ID NO: 5235673 - DNA, 25 bp, Homo sapien
ttcagagtccctttcgcaattatta

SEQ ID NO: 5235674 - DNA, 25 bp, Homo sapien
cactgttaagctgttagggacccaa

SEQ ID NO: 5235675 - DNA, 25 bp, Homo sapien
cacttgctttccctccgcttgtaat

SEQ ID NO: 5235676 - DNA, 25 bp, Homo sapien
cagggtcttgctaggctagccttga

SEQ ID NO: 5235677 - DNA, 25 bp, Homo sapien
ggcgggcccggtctatctctcgaga

SEQ ID NO: 5235678 - DNA, 25 bp, Homo sapien
ccaaagacagccatgacaaagaggt

SEQ ID NO: 5235679 - DNA, 25 bp, Homo sapien
tggtagaaggcctgcccaaagacag

SEQ ID NO: 5235680 - DNA, 25 bp, Homo sapien
ctctgatgtctgctcggcgggcccg

SEQ ID NO: 5235681 - DNA, 25 bp, Homo sapien
gttgatctccctccttgtgccaagg

SEQ ID NO: 5235682 - DNA, 25 bp, Homo sapien
tagggtcctcggcaaggcttacagg

SEQ ID NO: 5235683 - DNA, 25 bp, Homo sapien
acaggtcccagatcccagagagtca

SEQ ID NO: 5235684 - DNA, 25 bp, Homo sapien
ttaggttcgtaagagctggcatcac

SEQ ID NO: 5235685 - DNA, 25 bp, Homo sapien
cacggtggcgttgttcatggggaag

SEQ ID NO: 5235686 - DNA, 25 bp, Homo sapien
ctggtaaatgtccacggccacggtg

SEQ ID NO: 5235687 - DNA, 25 bp, Homo sapien
tcttggcgtagtcgtggaggctgct

SEQ ID NO: 5235688 - DNA, 25 bp, Homo sapien
gaagatcttggcgtagtcgtggagg

SEQ ID NO: 5235689 - DNA, 25 bp, Homo sapien
gccaggagacctatggcccagatgt

SEQ ID NO: 5235690 - DNA, 25 bp, Homo sapien
tcccgcgtaggtgcccgtcatggtg

SEQ ID NO: 5235691 - DNA, 25 bp, Homo sapien
agccgccaggagacctatggcccag

SEQ ID NO: 5235692 - DNA, 25 bp, Homo sapien
catcacgaactgtcccgcgtaggtg

SEQ ID NO: 5235693 - DNA, 25 bp, Homo sapien
ggcttctgttagtcctgggtctgca

SEQ ID NO: 5235694 - DNA, 25 bp, Homo sapien
ggcttatagtgtcgccctctgggct

SEQ ID NO: 5235695 - DNA, 25 bp, Homo sapien
ccatcccatagctggttgctgaaga

SEQ ID NO: 5235696 - DNA, 25 bp, Homo sapien
agctctgtccctaggtggcaagagg

SEQ ID NO: 5235697 - DNA, 25 bp, Homo sapien
ctccttggtgaggagtagacaggac

SEQ ID NO: 5235698 - DNA, 25 bp, Homo sapien
ccagaggagagatcctctgtagtcc

SEQ ID NO: 5235699 - DNA, 25 bp, Homo sapien
aagacagccacgagcacggtgggca

SEQ ID NO: 5235700 - DNA, 25 bp, Homo sapien
aggacacgggcgaagcgtgaccacc

SEQ ID NO: 5235701 - DNA, 25 bp, Homo sapien
tgaggcccgacaagtccctcaggtc

SEQ ID NO: 5235702 - DNA, 25 bp, Homo sapien
cagcacgttgagcagatcattgagg

SEQ ID NO: 5235703 - DNA, 25 bp, Homo sapien
ggatgggcagcacggcgaacgggag

SEQ ID NO: 5235704 - DNA, 25 bp, Homo sapien
gctggtgaacgtgaggatgggcagc

SEQ ID NO: 5235705 - DNA, 25 bp, Homo sapien
tgaggatgggcagcacggcgaacgg

SEQ ID NO: 5235706 - DNA, 25 bp, Homo sapien
gcatgctggtgaacgtgaggatggg

SEQ ID NO: 5235707 - DNA, 25 bp, Homo sapien
gcgcagactagcaccatgatggaag

SEQ ID NO: 5235708 - DNA, 25 bp, Homo sapien
ggctgggcagatagctgaccacgaa

SEQ ID NO: 5235709 - DNA, 25 bp, Homo sapien
gctgaccacgaagtagaggttgatg

SEQ ID NO: 5235710 - DNA, 25 bp, Homo sapien
gctgcaaggccgaagtaggcagggt

SEQ ID NO: 5235711 - DNA, 25 bp, Homo sapien
tcctcttcaaggagcccatacagga

SEQ ID NO: 5235712 - DNA, 25 bp, Homo sapien
tggctccgtgggcaaggcaacaggt

SEQ ID NO: 5235713 - DNA, 25 bp, Homo sapien
cgtgggcaaggcaacaggtccagac

SEQ ID NO: 5235714 - DNA, 25 bp, Homo sapien
gtcctcttcaaggagcccatacagg

SEQ ID NO: 5235715 - DNA, 25 bp, Homo sapien
atgccactcccagccaggccctggt

SEQ ID NO: 5235716 - DNA, 25 bp, Homo sapien
ctcccagccaggccctggtgtgggc

SEQ ID NO: 5235717 - DNA, 25 bp, Homo sapien
gccactcccagccaggccctggtgt

SEQ ID NO: 5235718 - DNA, 25 bp, Homo sapien
cactcccagccaggccctggtgtgg

SEQ ID NO: 5235719 - DNA, 25 bp, Homo sapien
tcaggtcacgcctgcaggtgctcaa

SEQ ID NO: 5235720 - DNA, 25 bp, Homo sapien
gagggtaatcacatggctgcgctag

SEQ ID NO: 5235721 - DNA, 25 bp, Homo sapien
tgcgctaggaaacagcaggtcccta

SEQ ID NO: 5235722 - DNA, 25 bp, Homo sapien
gcttaacctccatggcaagggtggt

SEQ ID NO: 5235723 - DNA, 25 bp, Homo sapien
ctttagagacttcgtgccttcccgg

SEQ ID NO: 5235724 - DNA, 25 bp, Homo sapien
cctgacggagaaagaagtgcgccgc

SEQ ID NO: 5235725 - DNA, 25 bp, Homo sapien
gcgccgccgttttactgtctggaaa

SEQ ID NO: 5235726 - DNA, 25 bp, Homo sapien
tgggttccttatgacctggtgcctg

SEQ ID NO: 5235727 - DNA, 25 bp, Homo sapien
tctataaagtgcagcccctgaatgg

SEQ ID NO: 5235728 - DNA, 25 bp, Homo sapien
ataaacaagcgtccggacctgagcg

SEQ ID NO: 5235729 - DNA, 25 bp, Homo sapien
gggagcctagaaacagcctagggaa

SEQ ID NO: 5235730 - DNA, 25 bp, Homo sapien
gcctagggaacgtctataaagtgca

SEQ ID NO: 5235731 - DNA, 25 bp, Homo sapien
aggtcgcaccagaccggtcccatct

SEQ ID NO: 5235732 - DNA, 25 bp, Homo sapien
gagatgcctttcttcgctaaacgtc

SEQ ID NO: 5235733 - DNA, 25 bp, Homo sapien
ttgagggacccactcgcatcgttgc

SEQ ID NO: 5235734 - DNA, 25 bp, Homo sapien
aggcgggcggccctcttgcccaggt

SEQ ID NO: 5235735 - DNA, 25 bp, Homo sapien
tccccaacttgtaacacagagcctg

SEQ ID NO: 5235736 - DNA, 25 bp, Homo sapien
ccccaacttgtaacacagagcctgg

SEQ ID NO: 5235737 - DNA, 25 bp, Homo sapien
ggactggcactcaatgccaagaggg

SEQ ID NO: 5235738 - DNA, 25 bp, Homo sapien
ctggcagaggactggcactcaatgc

SEQ ID NO: 5235739 - DNA, 25 bp, Homo sapien
gtcttcttgaccaacctgcccatta

SEQ ID NO: 5235740 - DNA, 25 bp, Homo sapien
ttggcgcgacctcatcactagccct

SEQ ID NO: 5235741 - DNA, 25 bp, Homo sapien
ttagccgggtctccgtgtcttcttg

SEQ ID NO: 5235742 - DNA, 25 bp, Homo sapien
tcatcactagccctttgcccaggtc

SEQ ID NO: 5235743 - DNA, 25 bp, Homo sapien
tcctgggtagcccacggggcggcca

SEQ ID NO: 5235744 - DNA, 25 bp, Homo sapien
tcatcaccgtgatcgccacacgctg

SEQ ID NO: 5235745 - DNA, 25 bp, Homo sapien
cattgcgcttcatcaccgtgatcgc

SEQ ID NO: 5235746 - DNA, 25 bp, Homo sapien
ggcggccaccattgcgcttcatcac

SEQ ID NO: 5235747 - DNA, 25 bp, Homo sapien
gttccacccggcctgtggcgcagtg

SEQ ID NO: 5235748 - DNA, 25 bp, Homo sapien
gaggtccctgtcttctcgctgcaag

SEQ ID NO: 5235749 - DNA, 25 bp, Homo sapien
actggactcgctgccgatcctagga

SEQ ID NO: 5235750 - DNA, 25 bp, Homo sapien
cgacggccgccctgtgattactggg

SEQ ID NO: 5235751 - DNA, 25 bp, Homo sapien
cgcgcgttcccgcctgaagttttcg

SEQ ID NO: 5235752 - DNA, 25 bp, Homo sapien
ctgtaggacgtgaaattctaactct

SEQ ID NO: 5235753 - DNA, 25 bp, Homo sapien
tgaagttttcgtacgcgctgttcct

SEQ ID NO: 5235754 - DNA, 25 bp, Homo sapien
gttcctttcgcgtagccaaattcca

SEQ ID NO: 5235755 - DNA, 25 bp, Homo sapien
gagatcacctcgcaaggacgtcaag

SEQ ID NO: 5235756 - DNA, 25 bp, Homo sapien
tctgcgttttctgaagacccgggac

SEQ ID NO: 5235757 - DNA, 25 bp, Homo sapien
ttgaggacttggagatagcactacc

SEQ ID NO: 5235758 - DNA, 25 bp, Homo sapien
acgctcttgaatgggacggtcgccg

SEQ ID NO: 5235759 - DNA, 25 bp, Homo sapien
tggagtttccttcccgcgaggcgga

SEQ ID NO: 5235760 - DNA, 25 bp, Homo sapien
gcgaggcggatgcaaacatggaacc

SEQ ID NO: 5235761 - DNA, 25 bp, Homo sapien
ggctttcgccacttctgggaccggc

SEQ ID NO: 5235762 - DNA, 25 bp, Homo sapien
gcgcggaggaaactttgttacaaca

SEQ ID NO: 5235763 - DNA, 25 bp, Homo sapien
ccgggcgcgctccgctccggccgga

SEQ ID NO: 5235764 - DNA, 25 bp, Homo sapien
gggccgggcgcgctccgctccggcc

SEQ ID NO: 5235765 - DNA, 25 bp, Homo sapien
gggcgcgctccgctccggccggact

SEQ ID NO: 5235766 - DNA, 25 bp, Homo sapien
ggccgggcgcgctccgctccggccg

SEQ ID NO: 5235767 - DNA, 25 bp, Homo sapien
tgagtaatgacggccgagctgtcca

SEQ ID NO: 5235768 - DNA, 25 bp, Homo sapien
gagtaatgacggccgagctgtccat

SEQ ID NO: 5235769 - DNA, 25 bp, Homo sapien
ctgagtaatgacggccgagctgtcc

SEQ ID NO: 5235770 - DNA, 25 bp, Homo sapien
ccccgcagcgggccccgagcctcct

SEQ ID NO: 5235771 - DNA, 25 bp, Homo sapien
ctcgagcgaacaggagcgccccaaa

SEQ ID NO: 5235772 - DNA, 25 bp, Homo sapien
gggcccagaggcaggggtgcagtcc

SEQ ID NO: 5235773 - DNA, 25 bp, Homo sapien
gcccagaggcaggggtgcagtcccg

SEQ ID NO: 5235774 - DNA, 25 bp, Homo sapien
cggctgggcccagaggcaggggtgc

SEQ ID NO: 5235775 - DNA, 25 bp, Homo sapien
ctgggcccagaggcaggggtgcagt

SEQ ID NO: 5235776 - DNA, 25 bp, Homo sapien
acaagttggaggctcggtgcacact

SEQ ID NO: 5235777 - DNA, 25 bp, Homo sapien
taggtctagcaggtattaaggcgcc

SEQ ID NO: 5235778 - DNA, 25 bp, Homo sapien
gggctccacaatcaactgcaaggct

SEQ ID NO: 5235779 - DNA, 25 bp, Homo sapien
ttaaggcgcccacatagggagtgcg

SEQ ID NO: 5235780 - DNA, 25 bp, Homo sapien
gggcttctgggaagctgctgacttc

SEQ ID NO: 5235781 - DNA, 25 bp, Homo sapien
aagagtgagtggaggatgccccggc

SEQ ID NO: 5235782 - DNA, 25 bp, Homo sapien
cccggcagacacagcagaagagtga

SEQ ID NO: 5235783 - DNA, 25 bp, Homo sapien
tgggaagctgctgacttctggtcac

SEQ ID NO: 5235784 - DNA, 25 bp, Homo sapien
tagggatggcgccattctcctccac

SEQ ID NO: 5235785 - DNA, 25 bp, Homo sapien
cttagggatggcgccattctcctcc

SEQ ID NO: 5235786 - DNA, 25 bp, Homo sapien
ttagggatggcgccattctcctcca

SEQ ID NO: 5235787 - DNA, 25 bp, Homo sapien
agggatggcgccattctcctccaca

SEQ ID NO: 5235788 - DNA, 25 bp, Homo sapien
ggcctcagggagcaggtattggact

SEQ ID NO: 5235789 - DNA, 25 bp, Homo sapien
cagggagcaggtattggactggggt

SEQ ID NO: 5235790 - DNA, 25 bp, Homo sapien
ctcagggagcaggtattggactggg

SEQ ID NO: 5235791 - DNA, 25 bp, Homo sapien
gccttggcctcagggagcaggtatt

SEQ ID NO: 5235792 - DNA, 25 bp, Homo sapien
tcgtccaggtcgatgaccacgcaga

SEQ ID NO: 5235793 - DNA, 25 bp, Homo sapien
ggtctcgtccaggtcgatgaccacg

SEQ ID NO: 5235794 - DNA, 25 bp, Homo sapien
cagggtctcgtccaggtcgatgacc

SEQ ID NO: 5235795 - DNA, 25 bp, Homo sapien
gtccaggtcgatgaccacgcagatc

SEQ ID NO: 5235796 - DNA, 25 bp, Homo sapien
tggtggaccaccccatcaatctcca

SEQ ID NO: 5235797 - DNA, 25 bp, Homo sapien
ggatgatgaagtccgcgttgttcac

SEQ ID NO: 5235798 - DNA, 25 bp, Homo sapien
cacagggatgatgaagtccgcgttg

SEQ ID NO: 5235799 - DNA, 25 bp, Homo sapien
ctccacagggatgatgaagtccgcg

SEQ ID NO: 5235800 - DNA, 25 bp, Homo sapien
ggtggggcgagggagcacagcacgg

SEQ ID NO: 5235801 - DNA, 25 bp, Homo sapien
cggtccccgagccaagtaatggaga

SEQ ID NO: 5235802 - DNA, 25 bp, Homo sapien
aacctatcctgaattacttgaactg

SEQ ID NO: 5235803 - DNA, 25 bp, Homo sapien
cacacaacctatcctgaattacttg

SEQ ID NO: 5235804 - DNA, 25 bp, Homo sapien
gagaacaggctggacagcacacaac

SEQ ID NO: 5235805 - DNA, 25 bp, Homo sapien
cttggcgaggctagcagtgaacagc

SEQ ID NO: 5235806 - DNA, 25 bp, Homo sapien
cgtgaggacgcttcaacacgtagac

SEQ ID NO: 5235807 - DNA, 25 bp, Homo sapien
aggaactcatccacgtgaggacgct

SEQ ID NO: 5235808 - DNA, 25 bp, Homo sapien
cacattcaaagagctcgcccattcg

SEQ ID NO: 5235809 - DNA, 25 bp, Homo sapien
ccccggtggaagacgcaggactctc

SEQ ID NO: 5235810 - DNA, 25 bp, Homo sapien
gactctcgaaacagccgggcccgga

SEQ ID NO: 5235811 - DNA, 25 bp, Homo sapien
gaagacataggaggcaggtgaattg

SEQ ID NO: 5235812 - DNA, 25 bp, Homo sapien
aggtctcgacccaaccggctcaggt

SEQ ID NO: 5235813 - DNA, 25 bp, Homo sapien
taaccttatctgtgcgaagcactcg

SEQ ID NO: 5235814 - DNA, 25 bp, Homo sapien
aaggtggcctgaatggactgacccc

SEQ ID NO: 5235815 - DNA, 25 bp, Homo sapien
aattctgtgggccatcagtaggtca

SEQ ID NO: 5235816 - DNA, 25 bp, Homo sapien
aagaccatatggctacagggcaggt

SEQ ID NO: 5235817 - DNA, 25 bp, Homo sapien
atgttgtcaaaccacgaggccaccg

SEQ ID NO: 5235818 - DNA, 25 bp, Homo sapien
cgtggctgcctgagcactgagtaca

SEQ ID NO: 5235819 - DNA, 25 bp, Homo sapien
cacacggctgagttgctcgaagaag

SEQ ID NO: 5235820 - DNA, 25 bp, Homo sapien
ctgagtacacgtcgtccacacggct

SEQ ID NO: 5235821 - DNA, 25 bp, Homo sapien
caaaggcctgggcagtcttcctggg

SEQ ID NO: 5235822 - DNA, 25 bp, Homo sapien
gaggaggtttgaaggcactgacacg

SEQ ID NO: 5235823 - DNA, 25 bp, Homo sapien
tggcggcggcccatgggttttccta

SEQ ID NO: 5235824 - DNA, 25 bp, Homo sapien
ctggagctcacggtcctcagtgcag

SEQ ID NO: 5235825 - DNA, 25 bp, Homo sapien
gcagcaggcagggccccccaggtcc

SEQ ID NO: 5235826 - DNA, 25 bp, Homo sapien
gacagagacagaaaaagggagcagc

SEQ ID NO: 5235827 - DNA, 25 bp, Homo sapien
gagacagaaaaagggagcagcaggc

SEQ ID NO: 5235828 - DNA, 25 bp, Homo sapien
cagagacagaaaaagggagcagcag

SEQ ID NO: 5235829 - DNA, 25 bp, Homo sapien
aggggcccaatttggcagcagagaa

SEQ ID NO: 5235830 - DNA, 25 bp, Homo sapien
caaggggcccaatttggcagcagag

SEQ ID NO: 5235831 - DNA, 25 bp, Homo sapien
ccaaggggcccaatttggcagcaga

SEQ ID NO: 5235832 - DNA, 25 bp, Homo sapien
ggcacttgatgtccaccgttcccag

SEQ ID NO: 5235833 - DNA, 25 bp, Homo sapien
cattgcttggatgatgcagggagca

SEQ ID NO: 5235834 - DNA, 25 bp, Homo sapien
ttggtaggggccctctcagtcccaa

SEQ ID NO: 5235835 - DNA, 25 bp, Homo sapien
aaggcagaagtctgaggtcattgct

SEQ ID NO: 5235836 - DNA, 25 bp, Homo sapien
gccctcagctgtcggccctggagaa

SEQ ID NO: 5235837 - DNA, 25 bp, Homo sapien
gacctccggaatcgccatgttagga

SEQ ID NO: 5235838 - DNA, 25 bp, Homo sapien
acacacttagctggtgggcctagca

SEQ ID NO: 5235839 - DNA, 25 bp, Homo sapien
ggagcacaacgacatcaccacttga

SEQ ID NO: 5235840 - DNA, 25 bp, Homo sapien
gcttggtcgggcttcctggagatcc

SEQ ID NO: 5235841 - DNA, 25 bp, Homo sapien
gaggcagctgccacctgggagatct

SEQ ID NO: 5235842 - DNA, 25 bp, Homo sapien
tgtcttggggaggcagctgccacct

SEQ ID NO: 5235843 - DNA, 25 bp, Homo sapien
cagctgccacctgggagatctcagg

SEQ ID NO: 5235844 - DNA, 25 bp, Homo sapien
aggcagctgccacctgggagatctc

SEQ ID NO: 5235845 - DNA, 25 bp, Homo sapien
tggggtgctgccacggctcctagtt

SEQ ID NO: 5235846 - DNA, 25 bp, Homo sapien
ttgagttgcggctctgttgtaagtg

SEQ ID NO: 5235847 - DNA, 25 bp, Homo sapien
acggctcctagttcccagtcgtgca

SEQ ID NO: 5235848 - DNA, 25 bp, Homo sapien
tagttcccagtcgtgcagctctgag

SEQ ID NO: 5235849 - DNA, 25 bp, Homo sapien
agcagaaccaggttgggtataaagg

SEQ ID NO: 5235850 - DNA, 25 bp, Homo sapien
aggaggagaccgttttctgtttcat

SEQ ID NO: 5235851 - DNA, 25 bp, Homo sapien
cagaaccaggttgggtataaaggag

SEQ ID NO: 5235852 - DNA, 25 bp, Homo sapien
caggattcctggtccagcagaacca

SEQ ID NO: 5235853 - DNA, 25 bp, Homo sapien
agccccggggtggtgatgttgagag

SEQ ID NO: 5235854 - DNA, 25 bp, Homo sapien
agcctttgacttgggcgctcagctt

SEQ ID NO: 5235855 - DNA, 25 bp, Homo sapien
ccccggggtggtgatgttgagagag

SEQ ID NO: 5235856 - DNA, 25 bp, Homo sapien
gagagcctttgacttgggcgctcag

SEQ ID NO: 5235857 - DNA, 25 bp, Homo sapien
gcagtcaccatcgaagaagcttcca

SEQ ID NO: 5235858 - DNA, 25 bp, Homo sapien
atcgaagaagcttccaaaggtgctg

SEQ ID NO: 5235859 - DNA, 25 bp, Homo sapien
gtagcagtcaccatcgaagaagctt

SEQ ID NO: 5235860 - DNA, 25 bp, Homo sapien
caccatcgaagaagcttccaaaggt

SEQ ID NO: 5235861 - DNA, 25 bp, Homo sapien
caatccagtagtggatgtcatagga

SEQ ID NO: 5235862 - DNA, 25 bp, Homo sapien
cagtagtggatgtcataggacaggc

SEQ ID NO: 5235863 - DNA, 25 bp, Homo sapien
tggccaatccagtagtggatgtcat

SEQ ID NO: 5235864 - DNA, 25 bp, Homo sapien
gcctcggaaggcctcgctctcgttg

SEQ ID NO: 5235865 - DNA, 25 bp, Homo sapien
gcagcctctggacgtcataggagtt

SEQ ID NO: 5235866 - DNA, 25 bp, Homo sapien
cacgtgcttcatgccagaagccacg

SEQ ID NO: 5235867 - DNA, 25 bp, Homo sapien
ttgcccttgacatgcagcagcctct

SEQ ID NO: 5235868 - DNA, 25 bp, Homo sapien
cataggagttggtctccacgtgctt

SEQ ID NO: 5235869 - DNA, 25 bp, Homo sapien
cctggccgatgctccagtggggcct

SEQ ID NO: 5235870 - DNA, 25 bp, Homo sapien
agccctggccgatgctccagtgggg

SEQ ID NO: 5235871 - DNA, 25 bp, Homo sapien
cgatgctccagtggggcctgcctac

SEQ ID NO: 5235872 - DNA, 25 bp, Homo sapien
ccgatgctccagtggggcctgccta

SEQ ID NO: 5235873 - DNA, 25 bp, Homo sapien
gctttccggtccattccactggatg

SEQ ID NO: 5235874 - DNA, 25 bp, Homo sapien
atcccctcggttgaaactcttccag

SEQ ID NO: 5235875 - DNA, 25 bp, Homo sapien
cattccactggatgataagcttccc

SEQ ID NO: 5235876 - DNA, 25 bp, Homo sapien
gataagcttcccaaggtccaggagg

SEQ ID NO: 5235877 - DNA, 25 bp, Homo sapien
ctggtgacccatcgggagtagtcgg

SEQ ID NO: 5235878 - DNA, 25 bp, Homo sapien
atcgggagtagtcggggaatgaggc

SEQ ID NO: 5235879 - DNA, 25 bp, Homo sapien
cccatcgggagtagtcggggaatga

SEQ ID NO: 5235880 - DNA, 25 bp, Homo sapien
agtagtcggggaatgaggcagtgtc

SEQ ID NO: 5235881 - DNA, 25 bp, Homo sapien
gtgtcgggcacggccgccttcagct

SEQ ID NO: 5235882 - DNA, 25 bp, Homo sapien
tgcgcttgcccagcacgtggttcat

SEQ ID NO: 5235883 - DNA, 25 bp, Homo sapien
cgtccaccacgcctacataggtgcg

SEQ ID NO: 5235884 - DNA, 25 bp, Homo sapien
tgagtgcagccttgagtgccggctc

SEQ ID NO: 5235885 - DNA, 25 bp, Homo sapien
accagattcccctcggagtcagaca

SEQ ID NO: 5235886 - DNA, 25 bp, Homo sapien
tgtcagtggccgtgtggcgacttcc

SEQ ID NO: 5235887 - DNA, 25 bp, Homo sapien
ctcgtgactgagcaggtcctgtgtc

SEQ ID NO: 5235888 - DNA, 25 bp, Homo sapien
tgactgagcaggtcctgtgtcagtg

SEQ ID NO: 5235889 - DNA, 25 bp, Homo sapien
tttccacacgtagatcttcaggccc

SEQ ID NO: 5235890 - DNA, 25 bp, Homo sapien
cacacgtagatcttcaggcccccct

SEQ ID NO: 5235891 - DNA, 25 bp, Homo sapien
tccacacgtagatcttcaggccccc

SEQ ID NO: 5235892 - DNA, 25 bp, Homo sapien
ttccacacgtagatcttcaggcccc

SEQ ID NO: 5235893 - DNA, 25 bp, Homo sapien
ccacagtgtgggttttgcctaggcc

SEQ ID NO: 5235894 - DNA, 25 bp, Homo sapien
gaggtccggttggacgctgtccact

SEQ ID NO: 5235895 - DNA, 25 bp, Homo sapien
acctgtgtgcttggtgggtactgct

SEQ ID NO: 5235896 - DNA, 25 bp, Homo sapien
gaagagctgctgaaagacggccgac

SEQ ID NO: 5235897 - DNA, 25 bp, Homo sapien
tcgttgaagatgcacgtcagggaag

SEQ ID NO: 5235898 - DNA, 25 bp, Homo sapien
cccatctgctaggacaagcccagag

SEQ ID NO: 5235899 - DNA, 25 bp, Homo sapien
tgggtggtggaccaagtggctctcc

SEQ ID NO: 5235900 - DNA, 25 bp, Homo sapien
ccagagccagcgtaaaagtcttcgt

SEQ ID NO: 5235901 - DNA, 25 bp, Homo sapien
agccctctcagctccctttttgtga

SEQ ID NO: 5235902 - DNA, 25 bp, Homo sapien
cctctcagctccctttttgtgacaa

SEQ ID NO: 5235903 - DNA, 25 bp, Homo sapien
atgcttggctaatttattagttctt

SEQ ID NO: 5235904 - DNA, 25 bp, Homo sapien
tgcttggctaatttattagttcttt

SEQ ID NO: 5235905 - DNA, 25 bp, Homo sapien
catggatgtggcatcgaacttcacc

SEQ ID NO: 5235906 - DNA, 25 bp, Homo sapien
gatgtggcatcgaacttcacctgtt

SEQ ID NO: 5235907 - DNA, 25 bp, Homo sapien
aggcttgacatgcatggatgtggca

SEQ ID NO: 5235908 - DNA, 25 bp, Homo sapien
tgacatgcatggatgtggcatcgaa

SEQ ID NO: 5235909 - DNA, 25 bp, Homo sapien
gctctaggttctcaatgcgccacac

SEQ ID NO: 5235910 - DNA, 25 bp, Homo sapien
aggtaccagctctaggttctcaatg

SEQ ID NO: 5235911 - DNA, 25 bp, Homo sapien
taccagctctaggttctcaatgcgc

SEQ ID NO: 5235912 - DNA, 25 bp, Homo sapien
cagctctaggttctcaatgcgccac

SEQ ID NO: 5235913 - DNA, 25 bp, Homo sapien
tgccaaacgtagagcaggtaatgct

SEQ ID NO: 5235914 - DNA, 25 bp, Homo sapien
ccgatgaggtaggtgtagagcagca

SEQ ID NO: 5235915 - DNA, 25 bp, Homo sapien
agcagtcgcccccatagaagtggcc

SEQ ID NO: 5235916 - DNA, 25 bp, Homo sapien
ggtaatgctgcttctcgccgatgag

SEQ ID NO: 5235917 - DNA, 25 bp, Homo sapien
accatgcgtcccttgaagatggaca

SEQ ID NO: 5235918 - DNA, 25 bp, Homo sapien
tgctgtaatttcatcttggctggcc

SEQ ID NO: 5235919 - DNA, 25 bp, Homo sapien
tctggtccaggatgacggcttgata

SEQ ID NO: 5235920 - DNA, 25 bp, Homo sapien
tgcccattgggacccggatctggac

SEQ ID NO: 5235921 - DNA, 25 bp, Homo sapien
tctcctatgaagaatgggcttcacc

SEQ ID NO: 5235922 - DNA, 25 bp, Homo sapien
gaacctccagggtagtctcctatga

SEQ ID NO: 5235923 - DNA, 25 bp, Homo sapien
tcttgccacagtggttactgccaga

SEQ ID NO: 5235924 - DNA, 25 bp, Homo sapien
taccagttccacataggtgatagaa

SEQ ID NO: 5235925 - DNA, 25 bp, Homo sapien
caagttgttagttcgggaggtgcct

SEQ ID NO: 5235926 - DNA, 25 bp, Homo sapien
cgctgggacctcaaaggccttggtg

SEQ ID NO: 5235927 - DNA, 25 bp, Homo sapien
caccatagatagcagcaagactggg

SEQ ID NO: 5235928 - DNA, 25 bp, Homo sapien
gaattgaggaaattggcccgcgctg

SEQ ID NO: 5235929 - DNA, 25 bp, Homo sapien
tccgtccgggagatggtgtcagcaa

SEQ ID NO: 5235930 - DNA, 25 bp, Homo sapien
accacttgcttctccgtccgggaga

SEQ ID NO: 5235931 - DNA, 25 bp, Homo sapien
ggccatccagaagttggctggctcc

SEQ ID NO: 5235932 - DNA, 25 bp, Homo sapien
gccatccagaagttggctggctcct

SEQ ID NO: 5235933 - DNA, 25 bp, Homo sapien
aagcgcccagtcttgttggaacact

SEQ ID NO: 5235934 - DNA, 25 bp, Homo sapien
aacactcaaagagccggggggtgat

SEQ ID NO: 5235935 - DNA, 25 bp, Homo sapien
ctggtcccagacatctagtaggaac

SEQ ID NO: 5235936 - DNA, 25 bp, Homo sapien
gattgaagtcagggatctctgtggc

SEQ ID NO: 5235937 - DNA, 25 bp, Homo sapien
cattgacacttacctaaccttaaag

SEQ ID NO: 5235938 - DNA, 25 bp, Homo sapien
caagaaaacattgacacttacctaa

SEQ ID NO: 5235939 - DNA, 25 bp, Homo sapien
tgacacttacctaaccttaaagcca

SEQ ID NO: 5235940 - DNA, 25 bp, Homo sapien
gtctcagggtcacgcccgctgggat

SEQ ID NO: 5235941 - DNA, 25 bp, Homo sapien
tccacttgaagggatcccaagccag

SEQ ID NO: 5235942 - DNA, 25 bp, Homo sapien
tgtgcagtggttgctgcggccttct

SEQ ID NO: 5235943 - DNA, 25 bp, Homo sapien
ctcgttggcatgtttcccaatccag

SEQ ID NO: 5235944 - DNA, 25 bp, Homo sapien
ccttcaggtcctcataggatttggt

SEQ ID NO: 5235945 - DNA, 25 bp, Homo sapien
tgaattctggacacattcctcagag

SEQ ID NO: 5235946 - DNA, 25 bp, Homo sapien
tctgttgattataccccagtgtgct

SEQ ID NO: 5235947 - DNA, 25 bp, Homo sapien
gtcttgttctctctataagcctgtg

SEQ ID NO: 5235948 - DNA, 25 bp, Homo sapien
gctgcaggttttgaccatctgttga

SEQ ID NO: 5235949 - DNA, 25 bp, Homo sapien
gatctagcctggatatttatgaccc

SEQ ID NO: 5235950 - DNA, 25 bp, Homo sapien
tagtggtctgttctgaccgaagtcc

SEQ ID NO: 5235951 - DNA, 25 bp, Homo sapien
tgacctatctatacatgccagtctg

SEQ ID NO: 5235952 - DNA, 25 bp, Homo sapien
caacaacatagagcttagtggtctg

SEQ ID NO: 5235953 - DNA, 25 bp, Homo sapien
tagcattgaacacgtccactttggg

SEQ ID NO: 5235954 - DNA, 25 bp, Homo sapien
aactgaggttgctgttagcattgaa

SEQ ID NO: 5235955 - DNA, 25 bp, Homo sapien
aggcttgttcactagctgctccagg

SEQ ID NO: 5235956 - DNA, 25 bp, Homo sapien
gagctcctctacaggcttgttcact

SEQ ID NO: 5235957 - DNA, 25 bp, Homo sapien
cttccatcgaggcagagcagagaag

SEQ ID NO: 5235958 - DNA, 25 bp, Homo sapien
aggcctgagtgaaatcttcaatgga

SEQ ID NO: 5235959 - DNA, 25 bp, Homo sapien
ggttttgttgcttccatcgaggcag

SEQ ID NO: 5235960 - DNA, 25 bp, Homo sapien
cctgagtgaaatcttcaatggacag

SEQ ID NO: 5235961 - DNA, 25 bp, Homo sapien
tagccccagtggaagtgctgctctc

SEQ ID NO: 5235962 - DNA, 25 bp, Homo sapien
gctgctctcactggtactgtttgga

SEQ ID NO: 5235963 - DNA, 25 bp, Homo sapien
gacaagctagggtagtgcctcagaa

SEQ ID NO: 5235964 - DNA, 25 bp, Homo sapien
tgtaaacctgcaaagtgcttcagcc

SEQ ID NO: 5235965 - DNA, 25 bp, Homo sapien
caggttccaggttggtccagtcaga

SEQ ID NO: 5235966 - DNA, 25 bp, Homo sapien
catatgcagtggttcttacagatca

SEQ ID NO: 5235967 - DNA, 25 bp, Homo sapien
gcttccgttgcaggcagtttgcaca

SEQ ID NO: 5235968 - DNA, 25 bp, Homo sapien
ttgcctaattgagccactaccaggt

SEQ ID NO: 5235969 - DNA, 25 bp, Homo sapien
tcttataaatgagtgaagcggtgat

SEQ ID NO: 5235970 - DNA, 25 bp, Homo sapien
tgcaggctgcaattaaaacatggag

SEQ ID NO: 5235971 - DNA, 25 bp, Homo sapien
aagcggtgataaaattctttggcta

SEQ ID NO: 5235972 - DNA, 25 bp, Homo sapien
tctttgcatttgagaggcactgtta

SEQ ID NO: 5235973 - DNA, 25 bp, Homo sapien
aaagattgccttaagagagctccag

SEQ ID NO: 5235974 - DNA, 25 bp, Homo sapien
aaacccaccatcacatgagagaatc

SEQ ID NO: 5235975 - DNA, 25 bp, Homo sapien
tcagaggtagggacaaaaccacatc

SEQ ID NO: 5235976 - DNA, 25 bp, Homo sapien
cagtcctactcttggaacttggatg

SEQ ID NO: 5235977 - DNA, 25 bp, Homo sapien
cattgagtatttgtctaagttgttt

SEQ ID NO: 5235978 - DNA, 25 bp, Homo sapien
ttaatggctgtactatattgcctca

SEQ ID NO: 5235979 - DNA, 25 bp, Homo sapien
gttgggaaactgtatgcttatagca

SEQ ID NO: 5235980 - DNA, 25 bp, Homo sapien
aacttttagctaacattgagtattt

SEQ ID NO: 5235981 - DNA, 25 bp, Homo sapien
tccactgcaggttcattttggccct

SEQ ID NO: 5235982 - DNA, 25 bp, Homo sapien
gctgaagctgaggaactgaaaagaa

SEQ ID NO: 5235983 - DNA, 25 bp, Homo sapien
cctttgtggatgcattgggttctga

SEQ ID NO: 5235984 - DNA, 25 bp, Homo sapien
aaggccccactttcagtgtccactg

SEQ ID NO: 5235985 - DNA, 25 bp, Homo sapien
ctttcgttacggcacatccaccagg

SEQ ID NO: 5235986 - DNA, 25 bp, Homo sapien
ggtgactttcgttacggcacatcca

SEQ ID NO: 5235987 - DNA, 25 bp, Homo sapien
tgactttcgttacggcacatccacc

SEQ ID NO: 5235988 - DNA, 25 bp, Homo sapien
caggtgactttcgttacggcacatc

SEQ ID NO: 5235989 - DNA, 25 bp, Homo sapien
agagagcggcgtgaactctgaccct

SEQ ID NO: 5235990 - DNA, 25 bp, Homo sapien
gcctagttaacagtcccagagtatg

SEQ ID NO: 5235991 - DNA, 25 bp, Homo sapien
gaaaagatggacagtcccggcaaga

SEQ ID NO: 5235992 - DNA, 25 bp, Homo sapien
cccgcaacttctggctttgagcagt

SEQ ID NO: 5235993 - DNA, 25 bp, Homo sapien
cgtagccgccatccgactccggctc

SEQ ID NO: 5235994 - DNA, 25 bp, Homo sapien
agccgccatccgactccggctcgct

SEQ ID NO: 5235995 - DNA, 25 bp, Homo sapien
cgccgtagccgccatccgactccgg

SEQ ID NO: 5235996 - DNA, 25 bp, Homo sapien
atccgactccggctcgctccgccca

SEQ ID NO: 5235997 - DNA, 25 bp, Homo sapien
tccgacccgcgtccccccttcagca

SEQ ID NO: 5235998 - DNA, 25 bp, Homo sapien
accacaaccaaagcgtgccgaggag

SEQ ID NO: 5235999 - DNA, 25 bp, Homo sapien
aactggcgccctgaaactgttggtc

SEQ ID NO: 5236000 - DNA, 25 bp, Homo sapien
gaaaggattctggttccaagcctgg

SEQ ID NO: 5236001 - DNA, 25 bp, Homo sapien
aaatcaatgaatggcctgctacggg

SEQ ID NO: 5236002 - DNA, 25 bp, Homo sapien
aaaattcgggagaagacacaatcag

SEQ ID NO: 5236003 - DNA, 25 bp, Homo sapien
aaagagtggctcagtatcgaagata

SEQ ID NO: 5236004 - DNA, 25 bp, Homo sapien
cagagctgctacgaggtccaaacat

SEQ ID NO: 5236005 - DNA, 25 bp, Homo sapien
tacgaaggaatttgtcagagctgct

SEQ ID NO: 5236006 - DNA, 25 bp, Homo sapien
aaaagaatcacaaaagcctactaca

SEQ ID NO: 5236007 - DNA, 25 bp, Homo sapien
atcacaaaagcctactacactaaac

SEQ ID NO: 5236008 - DNA, 25 bp, Homo sapien
aaagaatcacaaaagcctactacac

SEQ ID NO: 5236009 - DNA, 25 bp, Homo sapien
agaatcacaaaagcctactacacta

SEQ ID NO: 5236010 - DNA, 25 bp, Homo sapien
gctgaagtctgggaacaagtcacat

SEQ ID NO: 5236011 - DNA, 25 bp, Homo sapien
ggtgtgtgagcctttaatttgggaa

SEQ ID NO: 5236012 - DNA, 25 bp, Homo sapien
gaatctagccaaccactgagcattt

SEQ ID NO: 5236013 - DNA, 25 bp, Homo sapien
actatgtcgcctaagctgaagtgcg

SEQ ID NO: 5236014 - DNA, 25 bp, Homo sapien
catctggcagtccatgacagcttca

SEQ ID NO: 5236015 - DNA, 25 bp, Homo sapien
gatgctgctggttaggcggaaagtg

SEQ ID NO: 5236016 - DNA, 25 bp, Homo sapien
tgaataaggaaagataagttaggca

SEQ ID NO: 5236017 - DNA, 25 bp, Homo sapien
aaaggaaggcatctggcagtccatg

SEQ ID NO: 5236018 - DNA, 25 bp, Homo sapien
gtactgacagtttaagttggtcttc

SEQ ID NO: 5236019 - DNA, 25 bp, Homo sapien
caagtgtcacacagggtactgacag

SEQ ID NO: 5236020 - DNA, 25 bp, Homo sapien
tgtcacacagggtactgacagttta

SEQ ID NO: 5236021 - DNA, 25 bp, Homo sapien
tactgacagtttaagttggtcttct

SEQ ID NO: 5236022 - DNA, 25 bp, Homo sapien
agaatcgactgaacccagaaggtcg

SEQ ID NO: 5236023 - DNA, 25 bp, Homo sapien
tagcctggtgtggtgtcgtttgcct

SEQ ID NO: 5236024 - DNA, 25 bp, Homo sapien
gtgggagaatcgactgaacccagaa

SEQ ID NO: 5236025 - DNA, 25 bp, Homo sapien
atcgactgaacccagaaggtcgagg

SEQ ID NO: 5236026 - DNA, 25 bp, Homo sapien
caggaaagacctcaatttgcaagga

SEQ ID NO: 5236027 - DNA, 25 bp, Homo sapien
tgtacccaggattaagaatctgttt

SEQ ID NO: 5236028 - DNA, 25 bp, Homo sapien
ctcaatttgcaaggaactacatgtg

SEQ ID NO: 5236029 - DNA, 25 bp, Homo sapien
tggaacacacactggcgtgggagcc

SEQ ID NO: 5236030 - DNA, 25 bp, Homo sapien
tgaccccacaatccagtaaccaaag

SEQ ID NO: 5236031 - DNA, 25 bp, Homo sapien
cacagatactggtctggcaatatag

SEQ ID NO: 5236032 - DNA, 25 bp, Homo sapien
tattacatcaccttagacgctcagc

SEQ ID NO: 5236033 - DNA, 25 bp, Homo sapien
caaagtcttgtcatacagataccac

SEQ ID NO: 5236034 - DNA, 25 bp, Homo sapien
tagtctcaggactggacagctcatt

SEQ ID NO: 5236035 - DNA, 25 bp, Homo sapien
tagtaccaaatgaatgccacagcat

SEQ ID NO: 5236036 - DNA, 25 bp, Homo sapien
ccacagcatgggtgcaaggtcagga

SEQ ID NO: 5236037 - DNA, 25 bp, Homo sapien
tccacttgtgccagtgtagtaggca

SEQ ID NO: 5236038 - DNA, 25 bp, Homo sapien
aaagcgtagttcttagatcacttgc

SEQ ID NO: 5236039 - DNA, 25 bp, Homo sapien
tgtggtccttatactctactttcca

SEQ ID NO: 5236040 - DNA, 25 bp, Homo sapien
tcttacagtactcctaaagcggtgt

SEQ ID NO: 5236041 - DNA, 25 bp, Homo sapien
cccctgtcatgtagatttatcttac

SEQ ID NO: 5236042 - DNA, 25 bp, Homo sapien
tgaccattctggtttgaactgaact

SEQ ID NO: 5236043 - DNA, 25 bp, Homo sapien
tgatcatgccactacctaggtattt

SEQ ID NO: 5236044 - DNA, 25 bp, Homo sapien
caatactttaatggatgatcatgcc

SEQ ID NO: 5236045 - DNA, 25 bp, Homo sapien
catatcagttaattagccaccagtg

SEQ ID NO: 5236046 - DNA, 25 bp, Homo sapien
gcattgcaaactctgttagactggt

SEQ ID NO: 5236047 - DNA, 25 bp, Homo sapien
taatgccagagcattgcaaactctg

SEQ ID NO: 5236048 - DNA, 25 bp, Homo sapien
cattgcagtaatgccagagcattgc

SEQ ID NO: 5236049 - DNA, 25 bp, Homo sapien
atgctacacattgcagtaatgccag

SEQ ID NO: 5236050 - DNA, 25 bp, Homo sapien
attcaatgtatatctcccccaagtg

SEQ ID NO: 5236051 - DNA, 25 bp, Homo sapien
gtatatctcccccaagtgactcacc

SEQ ID NO: 5236052 - DNA, 25 bp, Homo sapien
tgtatatctcccccaagtgactcac

SEQ ID NO: 5236053 - DNA, 25 bp, Homo sapien
caatgtatatctcccccaagtgact

SEQ ID NO: 5236054 - DNA, 25 bp, Homo sapien
agtaaataagaatccggaagaccag

SEQ ID NO: 5236055 - DNA, 25 bp, Homo sapien
tgagaagtagctgtatgcctgatac

SEQ ID NO: 5236056 - DNA, 25 bp, Homo sapien
tatgcctcacagatgacatagtgtc

SEQ ID NO: 5236057 - DNA, 25 bp, Homo sapien
catagtgtcaataacaggtcaggga

SEQ ID NO: 5236058 - DNA, 25 bp, Homo sapien
tcaaagggacgtgttttgctgacag

SEQ ID NO: 5236059 - DNA, 25 bp, Homo sapien
gctgacagtgtgcaaaaaggggtac

SEQ ID NO: 5236060 - DNA, 25 bp, Homo sapien
tccaaggctggtgagccggagatac

SEQ ID NO: 5236061 - DNA, 25 bp, Homo sapien
gatgtgtgctgcgagaaacgctgac

SEQ ID NO: 5236062 - DNA, 25 bp, Homo sapien
ttcagatatacgaagcattccggta

SEQ ID NO: 5236063 - DNA, 25 bp, Homo sapien
tgcctgtgcccatggtccctattac

SEQ ID NO: 5236064 - DNA, 25 bp, Homo sapien
gacatgcatattcttagggcatttc

SEQ ID NO: 5236065 - DNA, 25 bp, Homo sapien
cattccggtattagaagtaagacaa

SEQ ID NO: 5236066 - DNA, 25 bp, Homo sapien
cttgttcatctgttttcaccagggc

SEQ ID NO: 5236067 - DNA, 25 bp, Homo sapien
ttccataattcgcaaacataaaggg

SEQ ID NO: 5236068 - DNA, 25 bp, Homo sapien
gaaagttcacttccagattccataa

SEQ ID NO: 5236069 - DNA, 25 bp, Homo sapien
aagttgattacttcttgttcatctg

SEQ ID NO: 5236070 - DNA, 25 bp, Homo sapien
gctgtgaagcttatatgtggcctca

SEQ ID NO: 5236071 - DNA, 25 bp, Homo sapien
gagatttgaacatgccacatcgctg

SEQ ID NO: 5236072 - DNA, 25 bp, Homo sapien
taatggctctcaaagatatccaggc

SEQ ID NO: 5236073 - DNA, 25 bp, Homo sapien
ttaaaagcgatgtagagaaggccag

SEQ ID NO: 5236074 - DNA, 25 bp, Homo sapien
catctaacaagatcttctggaggat

SEQ ID NO: 5236075 - DNA, 25 bp, Homo sapien
catatataagccaaaccagtgtcat

SEQ ID NO: 5236076 - DNA, 25 bp, Homo sapien
tgggagaaacgctcatacgtctgac

SEQ ID NO: 5236077 - DNA, 25 bp, Homo sapien
tacgtctgacatatataagccaaac

SEQ ID NO: 5236078 - DNA, 25 bp, Homo sapien
tcagcagacgggcagaaggctcttt

SEQ ID NO: 5236079 - DNA, 25 bp, Homo sapien
ctctttggatagctgcaggaccatc

SEQ ID NO: 5236080 - DNA, 25 bp, Homo sapien
tatctgaaagtcgaaggtaacatct

SEQ ID NO: 5236081 - DNA, 25 bp, Homo sapien
aacatctcactacatgcttcagcag

SEQ ID NO: 5236082 - DNA, 25 bp, Homo sapien
tttggaatcgcctagactctctgga

SEQ ID NO: 5236083 - DNA, 25 bp, Homo sapien
tgaccacgtagagtagcaacagaaa

SEQ ID NO: 5236084 - DNA, 25 bp, Homo sapien
tagggcttgaataaactcagtggca

SEQ ID NO: 5236085 - DNA, 25 bp, Homo sapien
taaagacacaggagctatgccatga

SEQ ID NO: 5236086 - DNA, 25 bp, Homo sapien
ccagcagaaagtcaaatctgaaaac

SEQ ID NO: 5236087 - DNA, 25 bp, Homo sapien
tgaaaagatgaccagcagaaagtca

SEQ ID NO: 5236088 - DNA, 25 bp, Homo sapien
tctttgaaaagatgaccagcagaaa

SEQ ID NO: 5236089 - DNA, 25 bp, Homo sapien
tttgaaaagatgaccagcagaaagt

SEQ ID NO: 5236090 - DNA, 25 bp, Homo sapien
ttcaaaaatcagtacattaacaagg

SEQ ID NO: 5236091 - DNA, 25 bp, Homo sapien
taacaaggatatcatcaaacttatg

SEQ ID NO: 5236092 - DNA, 25 bp, Homo sapien
aaaccttaataagagatgagcagtg

SEQ ID NO: 5236093 - DNA, 25 bp, Homo sapien
tggtagcagtattatcagatgaact

SEQ ID NO: 5236094 - DNA, 25 bp, Homo sapien
acccacattttgtggacagggaaga

SEQ ID NO: 5236095 - DNA, 25 bp, Homo sapien
tagaatactgtgaatctatggctcc

SEQ ID NO: 5236096 - DNA, 25 bp, Homo sapien
agagcccccttcttagacataaata

SEQ ID NO: 5236097 - DNA, 25 bp, Homo sapien
gggaagagcccccttcttagacata

SEQ ID NO: 5236098 - DNA, 25 bp, Homo sapien
cagggaggcactgtctgagtgcttc

SEQ ID NO: 5236099 - DNA, 25 bp, Homo sapien
ctgggcgaaggttgtgtctttcagc

SEQ ID NO: 5236100 - DNA, 25 bp, Homo sapien
ggtcagggaggcactgtctgagtgc

SEQ ID NO: 5236101 - DNA, 25 bp, Homo sapien
tgggcgaaggttgtgtctttcagct

SEQ ID NO: 5236102 - DNA, 25 bp, Homo sapien
ccagcgtttcgtggtggtgtcatct

SEQ ID NO: 5236103 - DNA, 25 bp, Homo sapien
ttcttcaccagttgtgcaagccagc

SEQ ID NO: 5236104 - DNA, 25 bp, Homo sapien
gttgtgcaagccagcgtttcgtggt

SEQ ID NO: 5236105 - DNA, 25 bp, Homo sapien
tcaccagttgtgcaagccagcgttt

SEQ ID NO: 5236106 - DNA, 25 bp, Homo sapien
tcactgagggggcagggggataccc

SEQ ID NO: 5236107 - DNA, 25 bp, Homo sapien
cagtcggtgataaaacctgagctgt

SEQ ID NO: 5236108 - DNA, 25 bp, Homo sapien
aacctgagctgtttttctcgtaggt

SEQ ID NO: 5236109 - DNA, 25 bp, Homo sapien
ccagtcggtgataaaacctgagctg

SEQ ID NO: 5236110 - DNA, 25 bp, Homo sapien
tgagctgtttttctcgtaggttccc

SEQ ID NO: 5236111 - DNA, 25 bp, Homo sapien
acatggcttggtcccaggcgttcac

SEQ ID NO: 5236112 - DNA, 25 bp, Homo sapien
acagcatttgctggtgttgacaccc

SEQ ID NO: 5236113 - DNA, 25 bp, Homo sapien
ggcagactgctgtgtcaggagccca

SEQ ID NO: 5236114 - DNA, 25 bp, Homo sapien
cagtgccagtcgacaaagttttgct

SEQ ID NO: 5236115 - DNA, 25 bp, Homo sapien
caagtccggctctctttgtgaaagt

SEQ ID NO: 5236116 - DNA, 25 bp, Homo sapien
gatgcagctattggcctgccagagg

SEQ ID NO: 5236117 - DNA, 25 bp, Homo sapien
gttaaggtcctcgtggcattccgga

SEQ ID NO: 5236118 - DNA, 25 bp, Homo sapien
gcctatggattgtgaagagccacct

SEQ ID NO: 5236119 - DNA, 25 bp, Homo sapien
gactacgggctgaatagagtcaaga

SEQ ID NO: 5236120 - DNA, 25 bp, Homo sapien
gatgtctatccagtccattctgttc

SEQ ID NO: 5236121 - DNA, 25 bp, Homo sapien
ggcttgcaattattgagggttggcc

SEQ ID NO: 5236122 - DNA, 25 bp, Homo sapien
ggttaccttaactggactctccaga

SEQ ID NO: 5236123 - DNA, 25 bp, Homo sapien
cagctgagaatagatgggacaagaa

SEQ ID NO: 5236124 - DNA, 25 bp, Homo sapien
tcctatgtgggttccaaggccagct

SEQ ID NO: 5236125 - DNA, 25 bp, Homo sapien
gacaagaattaagacactttggcac

SEQ ID NO: 5236126 - DNA, 25 bp, Homo sapien
catggccaatgcaccgaaagatgga

SEQ ID NO: 5236127 - DNA, 25 bp, Homo sapien
acagcttttgtacctcagatggagt

SEQ ID NO: 5236128 - DNA, 25 bp, Homo sapien
tctgaaggctaccaatgctgctcct

SEQ ID NO: 5236129 - DNA, 25 bp, Homo sapien
tgaccaaagtgcctagttacccata

SEQ ID NO: 5236130 - DNA, 25 bp, Homo sapien
tggccaggagtgaagttctgtccca

SEQ ID NO: 5236131 - DNA, 25 bp, Homo sapien
cagagggactttctgggaaccatgc

SEQ ID NO: 5236132 - DNA, 25 bp, Homo sapien
tagcagcagagggactttctgggaa

SEQ ID NO: 5236133 - DNA, 25 bp, Homo sapien
gggactttctgggaaccatgcccag

SEQ ID NO: 5236134 - DNA, 25 bp, Homo sapien
cagcagagggactttctgggaacca

SEQ ID NO: 5236135 - DNA, 25 bp, Homo sapien
tatagccggagggaagcagtaagaa

SEQ ID NO: 5236136 - DNA, 25 bp, Homo sapien
tcaaagtgaagggagtgtcctcagt

SEQ ID NO: 5236137 - DNA, 25 bp, Homo sapien
actggcctgctcctgtatctctgaa

SEQ ID NO: 5236138 - DNA, 25 bp, Homo sapien
cctcccgagctctgcgatgctgtgg

SEQ ID NO: 5236139 - DNA, 25 bp, Homo sapien
gagaattttgagactgtggtccaga

SEQ ID NO: 5236140 - DNA, 25 bp, Homo sapien
ttttgactccactaattcgcaatgg

SEQ ID NO: 5236141 - DNA, 25 bp, Homo sapien
gcaatggctctgagtctcatctcct

SEQ ID NO: 5236142 - DNA, 25 bp, Homo sapien
ttcagaactcagtagcatgcgtgtc

SEQ ID NO: 5236143 - DNA, 25 bp, Homo sapien
actgttccaccagctggcaccagat

SEQ ID NO: 5236144 - DNA, 25 bp, Homo sapien
gttccaccagctggcaccagatcac

SEQ ID NO: 5236145 - DNA, 25 bp, Homo sapien
cacccactgttccaccagctggcac

SEQ ID NO: 5236146 - DNA, 25 bp, Homo sapien
acccactgttccaccagctggcacc

SEQ ID NO: 5236147 - DNA, 25 bp, Homo sapien
tgcgcatcggcatgccttcctgcat

SEQ ID NO: 5236148 - DNA, 25 bp, Homo sapien
cagcagcaagtcctgatcagtggtc

SEQ ID NO: 5236149 - DNA, 25 bp, Homo sapien
agcagcaagtcctgatcagtggtca

SEQ ID NO: 5236150 - DNA, 25 bp, Homo sapien
cttgcgcatcggcatgccttcctgc

SEQ ID NO: 5236151 - DNA, 25 bp, Homo sapien
tgtcatgccgtcattctgaagtctg

SEQ ID NO: 5236152 - DNA, 25 bp, Homo sapien
ccagactgtcatgccgtcattctga

SEQ ID NO: 5236153 - DNA, 25 bp, Homo sapien
gtctgaagtatcttagcttcttcca

SEQ ID NO: 5236154 - DNA, 25 bp, Homo sapien
attctgaagtctgaagtatcttagc

SEQ ID NO: 5236155 - DNA, 25 bp, Homo sapien
agctgggcttggcactgcccctggc

SEQ ID NO: 5236156 - DNA, 25 bp, Homo sapien
ggcactgcccctggcctgccgtgca

SEQ ID NO: 5236157 - DNA, 25 bp, Homo sapien
ctgggcttggcactgcccctggcct

SEQ ID NO: 5236158 - DNA, 25 bp, Homo sapien
cactgcccctggcctgccgtgcatg

SEQ ID NO: 5236159 - DNA, 25 bp, Homo sapien
aacactgttggccatcaggtccagg

SEQ ID NO: 5236160 - DNA, 25 bp, Homo sapien
catggccattacgtattgtctccac

SEQ ID NO: 5236161 - DNA, 25 bp, Homo sapien
tggagccctcgcatccatatctggg

SEQ ID NO: 5236162 - DNA, 25 bp, Homo sapien
gcagcaactcggaatcatggccatt

SEQ ID NO: 5236163 - DNA, 25 bp, Homo sapien
ccttcagggatagcgtgatccctca

SEQ ID NO: 5236164 - DNA, 25 bp, Homo sapien
gctccttcagggatagcgtgatccc

SEQ ID NO: 5236165 - DNA, 25 bp, Homo sapien
ctggctccttcagggatagcgtgat

SEQ ID NO: 5236166 - DNA, 25 bp, Homo sapien
ctttcctaaacctgttgcatctggc

SEQ ID NO: 5236167 - DNA, 25 bp, Homo sapien
gtattttatggtgctctacacattc

SEQ ID NO: 5236168 - DNA, 25 bp, Homo sapien
gaaattatccctgaaagtgtagtct

SEQ ID NO: 5236169 - DNA, 25 bp, Homo sapien
ctagtaatgaactatagaaattatc

SEQ ID NO: 5236170 - DNA, 25 bp, Homo sapien
agagaaacttctctagtaatgaact

SEQ ID NO: 5236171 - DNA, 25 bp, Homo sapien
gggattgcagatacatgtcgccacg

SEQ ID NO: 5236172 - DNA, 25 bp, Homo sapien
gctgggattgcagatacatgtcgcc

SEQ ID NO: 5236173 - DNA, 25 bp, Homo sapien
attgcagatacatgtcgccacgccc

SEQ ID NO: 5236174 - DNA, 25 bp, Homo sapien
agctgggattgcagatacatgtcgc

SEQ ID NO: 5236175 - DNA, 25 bp, Homo sapien
tcattaggtgcaataaccgctgaac

SEQ ID NO: 5236176 - DNA, 25 bp, Homo sapien
acttcttggaaactcatcttaccat

SEQ ID NO: 5236177 - DNA, 25 bp, Homo sapien
tgcaataaccgctgaacttcttgga

SEQ ID NO: 5236178 - DNA, 25 bp, Homo sapien
ccacattcattaggtgcaataaccg

SEQ ID NO: 5236179 - DNA, 25 bp, Homo sapien
caaaggcccctaaaatgtcagaaga

SEQ ID NO: 5236180 - DNA, 25 bp, Homo sapien
taggcacctgtgaaattctggccat

SEQ ID NO: 5236181 - DNA, 25 bp, Homo sapien
gagaggtccttgaggtccaacataa

SEQ ID NO: 5236182 - DNA, 25 bp, Homo sapien
ttctggccatggacagagaggtcct

SEQ ID NO: 5236183 - DNA, 25 bp, Homo sapien
gggttccagactgggacgtgtctgc

SEQ ID NO: 5236184 - DNA, 25 bp, Homo sapien
ttccagactgggacgtgtctgctgc

SEQ ID NO: 5236185 - DNA, 25 bp, Homo sapien
ccagggttccagactgggacgtgtc

SEQ ID NO: 5236186 - DNA, 25 bp, Homo sapien
ttccagggttccagactgggacgtg

SEQ ID NO: 5236187 - DNA, 25 bp, Homo sapien
actttcaaacagttcctgcacctca

SEQ ID NO: 5236188 - DNA, 25 bp, Homo sapien
cacgtttagtcaatgccttatagaa

SEQ ID NO: 5236189 - DNA, 25 bp, Homo sapien
tgcacctcagcacgtttagtcaatg

SEQ ID NO: 5236190 - DNA, 25 bp, Homo sapien
catagcggtcaatgagttccagagc

SEQ ID NO: 5236191 - DNA, 25 bp, Homo sapien
tttccgtttccagcgagggcaaagc

SEQ ID NO: 5236192 - DNA, 25 bp, Homo sapien
ggcagcgagccagcatttaaaggaa

SEQ ID NO: 5236193 - DNA, 25 bp, Homo sapien
atcatttgcactagagaagaggcca

SEQ ID NO: 5236194 - DNA, 25 bp, Homo sapien
ggaaacccctgtcttgtctgaacag

SEQ ID NO: 5236195 - DNA, 25 bp, Homo sapien
caccctcccatattataggcatgag

SEQ ID NO: 5236196 - DNA, 25 bp, Homo sapien
tcaccctcccatattataggcatga

SEQ ID NO: 5236197 - DNA, 25 bp, Homo sapien
ttgctacaaggaggctcgcctggaa

SEQ ID NO: 5236198 - DNA, 25 bp, Homo sapien
ctacaaggaggctcgcctggaaggt

SEQ ID NO: 5236199 - DNA, 25 bp, Homo sapien
atgttgctacaaggaggctcgcctg

SEQ ID NO: 5236200 - DNA, 25 bp, Homo sapien
aggctcgcctggaaggtggaacaac

SEQ ID NO: 5236201 - DNA, 25 bp, Homo sapien
gtatatatccctcgacgctgctctg

SEQ ID NO: 5236202 - DNA, 25 bp, Homo sapien
tctccatccttagagcagaggtagc

SEQ ID NO: 5236203 - DNA, 25 bp, Homo sapien
catactcagcacatgccgcagtttg

SEQ ID NO: 5236204 - DNA, 25 bp, Homo sapien
actaggtaggtgttatgagaagagc

SEQ ID NO: 5236205 - DNA, 25 bp, Homo sapien
tctcatgagttggaccccttctcta

SEQ ID NO: 5236206 - DNA, 25 bp, Homo sapien
ctctcatgagttggaccccttctct

SEQ ID NO: 5236207 - DNA, 25 bp, Homo sapien
tcatgagttggaccccttctctacc

SEQ ID NO: 5236208 - DNA, 25 bp, Homo sapien
tccctctcatgagttggaccccttc

SEQ ID NO: 5236209 - DNA, 25 bp, Homo sapien
tccaagtgtctctggtatccagggc

SEQ ID NO: 5236210 - DNA, 25 bp, Homo sapien
ttagccccagagtaccaagtgaagg

SEQ ID NO: 5236211 - DNA, 25 bp, Homo sapien
gaataggcactgttaccatccctgt

SEQ ID NO: 5236212 - DNA, 25 bp, Homo sapien
gagaagttccattgacccatagggt

SEQ ID NO: 5236213 - DNA, 25 bp, Homo sapien
aacaggatgcgggaggtcagggtgt

SEQ ID NO: 5236214 - DNA, 25 bp, Homo sapien
tgtgtccgtggtaaacgacaggttc

SEQ ID NO: 5236215 - DNA, 25 bp, Homo sapien
tttgaacaggatgcgggaggtcagg

SEQ ID NO: 5236216 - DNA, 25 bp, Homo sapien
gtcagggtgtgtccgtggtaaacga

SEQ ID NO: 5236217 - DNA, 25 bp, Homo sapien
tggaaggcatactgtgctactgtgg

SEQ ID NO: 5236218 - DNA, 25 bp, Homo sapien
ggaaggcatactgtgctactgtggc

SEQ ID NO: 5236219 - DNA, 25 bp, Homo sapien
ggatctcagtcagatgacgggccat

SEQ ID NO: 5236220 - DNA, 25 bp, Homo sapien
ggcagcaccccatccaaggtggtgc

SEQ ID NO: 5236221 - DNA, 25 bp, Homo sapien
gcaccccatccaaggtggtgctcag

SEQ ID NO: 5236222 - DNA, 25 bp, Homo sapien
cagatgacgggccatggtctgctgc

SEQ ID NO: 5236223 - DNA, 25 bp, Homo sapien
tcaagtgttaacttcttccccttca

SEQ ID NO: 5236224 - DNA, 25 bp, Homo sapien
gtccttattctgaaggttctgctcc

SEQ ID NO: 5236225 - DNA, 25 bp, Homo sapien
gactccagcgccaattctgactctt

SEQ ID NO: 5236226 - DNA, 25 bp, Homo sapien
tttgtccttattctgaaggttctgc

SEQ ID NO: 5236227 - DNA, 25 bp, Homo sapien
aaactgggactccagcgccaattct

SEQ ID NO: 5236228 - DNA, 25 bp, Homo sapien
acagatagacggacaaaacagcggg

SEQ ID NO: 5236229 - DNA, 25 bp, Homo sapien
tagacggacaaaacagcgggcacgt

SEQ ID NO: 5236230 - DNA, 25 bp, Homo sapien
gacggacaaaacagcgggcacgtca

SEQ ID NO: 5236231 - DNA, 25 bp, Homo sapien
gatagacggacaaaacagcgggcac

SEQ ID NO: 5236232 - DNA, 25 bp, Homo sapien
actcaggcttggaaataggagcctg

SEQ ID NO: 5236233 - DNA, 25 bp, Homo sapien
ctgccgggacaagagaagggactca

SEQ ID NO: 5236234 - DNA, 25 bp, Homo sapien
aagagaagggactcaggcttggaaa

SEQ ID NO: 5236235 - DNA, 25 bp, Homo sapien
aagggactcaggcttggaaatagga

SEQ ID NO: 5236236 - DNA, 25 bp, Homo sapien
gaagataatggccatccaacctaaa

SEQ ID NO: 5236237 - DNA, 25 bp, Homo sapien
tgaaccctcagcagtctgagagaga

SEQ ID NO: 5236238 - DNA, 25 bp, Homo sapien
aatggccatccaacctaaacctctg

SEQ ID NO: 5236239 - DNA, 25 bp, Homo sapien
aaagaagatggaattgaaccctcag

SEQ ID NO: 5236240 - DNA, 25 bp, Homo sapien
gacagacttcaagtagataaccagg

SEQ ID NO: 5236241 - DNA, 25 bp, Homo sapien
ctggacacaagatgggcttggattt

SEQ ID NO: 5236242 - DNA, 25 bp, Homo sapien
gagagggctggacacaagatgggct

SEQ ID NO: 5236243 - DNA, 25 bp, Homo sapien
agacagacttcaagtagataaccag

SEQ ID NO: 5236244 - DNA, 25 bp, Homo sapien
gcgcttggccttggtttcagagaaa

SEQ ID NO: 5236245 - DNA, 25 bp, Homo sapien
tatctcgtagaagtggtagtgctcc

SEQ ID NO: 5236246 - DNA, 25 bp, Homo sapien
ggtagtgctcctttgaatgtgtgaa

SEQ ID NO: 5236247 - DNA, 25 bp, Homo sapien
ttcagagaaagatgatatctcgtag

SEQ ID NO: 5236248 - DNA, 25 bp, Homo sapien
tccagaaagtttcactgtgcctctc

SEQ ID NO: 5236249 - DNA, 25 bp, Homo sapien
gacccttgagccactattcataact

SEQ ID NO: 5236250 - DNA, 25 bp, Homo sapien
ggtggaatctcccacttccctagtc

SEQ ID NO: 5236251 - DNA, 25 bp, Homo sapien
ttttcttgggacttacctgccagtc

SEQ ID NO: 5236252 - DNA, 25 bp, Homo sapien
tcctcaggccgctgggatacacacg

SEQ ID NO: 5236253 - DNA, 25 bp, Homo sapien
gatacacacggcttaactgccaagt

SEQ ID NO: 5236254 - DNA, 25 bp, Homo sapien
actgccaagtattgtgctgcacaaa

SEQ ID NO: 5236255 - DNA, 25 bp, Homo sapien
cacggcttaactgccaagtattgtg

SEQ ID NO: 5236256 - DNA, 25 bp, Homo sapien
ttctcagggtggaaagaactctgga

SEQ ID NO: 5236257 - DNA, 25 bp, Homo sapien
gatatcacgcaggaagtctggcttc

SEQ ID NO: 5236258 - DNA, 25 bp, Homo sapien
gccacagccgccattctggcggaaa

SEQ ID NO: 5236259 - DNA, 25 bp, Homo sapien
ggcggaaatgcccatcacagatgtc

SEQ ID NO: 5236260 - DNA, 25 bp, Homo sapien
tctagtattctatctgcaatttaaa

SEQ ID NO: 5236261 - DNA, 25 bp, Homo sapien
ctagtattctatctgcaatttaaaa

SEQ ID NO: 5236262 - DNA, 25 bp, Homo sapien
tcttctagtattctatctgcaattt

SEQ ID NO: 5236263 - DNA, 25 bp, Homo sapien
gtattctatctgcaatttaaaatgc

SEQ ID NO: 5236264 - DNA, 25 bp, Homo sapien
ggtctcctgccgtgctgtgtctaga

SEQ ID NO: 5236265 - DNA, 25 bp, Homo sapien
cagtggatccacaatggacccctct

SEQ ID NO: 5236266 - DNA, 25 bp, Homo sapien
tgttctccacatagttggtctcctg

SEQ ID NO: 5236267 - DNA, 25 bp, Homo sapien
tagacgaacgccaaagatctgcact

SEQ ID NO: 5236268 - DNA, 25 bp, Homo sapien
gatttccagtcataatccattacca

SEQ ID NO: 5236269 - DNA, 25 bp, Homo sapien
tccaaggcagggtgtactgaccaat

SEQ ID NO: 5236270 - DNA, 25 bp, Homo sapien
gcagcatggcaagttcaggcaccag

SEQ ID NO: 5236271 - DNA, 25 bp, Homo sapien
caccagcacccggaaacatagtgtc

SEQ ID NO: 5236272 - DNA, 25 bp, Homo sapien
agctggggtattggccaggggccaa

SEQ ID NO: 5236273 - DNA, 25 bp, Homo sapien
aggaggacagcattaggaaggcagc

SEQ ID NO: 5236274 - DNA, 25 bp, Homo sapien
gaggacagcattaggaaggcagcca

SEQ ID NO: 5236275 - DNA, 25 bp, Homo sapien
ggcaggaggacagcattaggaaggc

SEQ ID NO: 5236276 - DNA, 25 bp, Homo sapien
gccttcctggatgcagatatacaca

SEQ ID NO: 5236277 - DNA, 25 bp, Homo sapien
tacacaaagatggaagctgggcgga

SEQ ID NO: 5236278 - DNA, 25 bp, Homo sapien
aggccttcctggatgcagatataca

SEQ ID NO: 5236279 - DNA, 25 bp, Homo sapien
ccaggccttcctggatgcagatata

SEQ ID NO: 5236280 - DNA, 25 bp, Homo sapien
tccagatgtttctccccgtctaaag

SEQ ID NO: 5236281 - DNA, 25 bp, Homo sapien
taggaatgcacaatccaaagcttga

SEQ ID NO: 5236282 - DNA, 25 bp, Homo sapien
tagatgtcggtatgggattgagcct

SEQ ID NO: 5236283 - DNA, 25 bp, Homo sapien
tgttctctcgagcatccttccagat

SEQ ID NO: 5236284 - DNA, 25 bp, Homo sapien
tctcttaagagtcgtagtacagtcc

SEQ ID NO: 5236285 - DNA, 25 bp, Homo sapien
gagagagatgtatttataccagtgg

SEQ ID NO: 5236286 - DNA, 25 bp, Homo sapien
agtctctttccctaatctttgctgg

SEQ ID NO: 5236287 - DNA, 25 bp, Homo sapien
gggatgatgcttctttaggtttctc

SEQ ID NO: 5236288 - DNA, 25 bp, Homo sapien
cagttgtatctaaccgcatgtgctg

SEQ ID NO: 5236289 - DNA, 25 bp, Homo sapien
gggaggattgctacccactaagcct

SEQ ID NO: 5236290 - DNA, 25 bp, Homo sapien
tacaagggtgactagaaccttcctg

SEQ ID NO: 5236291 - DNA, 25 bp, Homo sapien
tccttgagccatcttgacccttgac

SEQ ID NO: 5236292 - DNA, 25 bp, Homo sapien
tctgtccaagaccacgcggtgagtc

SEQ ID NO: 5236293 - DNA, 25 bp, Homo sapien
gaagcgaagcgactgtgtctgtcca

SEQ ID NO: 5236294 - DNA, 25 bp, Homo sapien
tcctgcccggaagataagcgtattt

SEQ ID NO: 5236295 - DNA, 25 bp, Homo sapien
tcctgcccgacgatgtggacactgt

SEQ ID NO: 5236296 - DNA, 25 bp, Homo sapien
ttccacatccccaatatcctagagg

SEQ ID NO: 5236297 - DNA, 25 bp, Homo sapien
ccagccgcggccgaccatagagatg

SEQ ID NO: 5236298 - DNA, 25 bp, Homo sapien
caatatcctagaggcggctgagccg

SEQ ID NO: 5236299 - DNA, 25 bp, Homo sapien
agccggaggcggtcgcacaaagcgg

SEQ ID NO: 5236300 - DNA, 25 bp, Homo sapien
tggccctccgtctcgatggtttcac

SEQ ID NO: 5236301 - DNA, 25 bp, Homo sapien
cgtctcgatggtttcaccgcgcctg

SEQ ID NO: 5236302 - DNA, 25 bp, Homo sapien
gactctctggccctccgtctcgatg

SEQ ID NO: 5236303 - DNA, 25 bp, Homo sapien
tctcgatggtttcaccgcgcctgca

SEQ ID NO: 5236304 - DNA, 25 bp, Homo sapien
tggggtaacccgtcactcagccctc

SEQ ID NO: 5236305 - DNA, 25 bp, Homo sapien
gagcaaagttgtttctagtacacct

SEQ ID NO: 5236306 - DNA, 25 bp, Homo sapien
tgagcctcagaactgggatccagaa

SEQ ID NO: 5236307 - DNA, 25 bp, Homo sapien
gaactgggatccagaattccaaaac

SEQ ID NO: 5236308 - DNA, 25 bp, Homo sapien
gctgacagcagtgacctcggctgag

SEQ ID NO: 5236309 - DNA, 25 bp, Homo sapien
cttggctcggaatgcccgttctttt

SEQ ID NO: 5236310 - DNA, 25 bp, Homo sapien
tccacggatcgtcacatcgtagaca

SEQ ID NO: 5236311 - DNA, 25 bp, Homo sapien
tcgtcacatcgtagacaataagatc

SEQ ID NO: 5236312 - DNA, 25 bp, Homo sapien
gctactttctccacggatcgtcaca

SEQ ID NO: 5236313 - DNA, 25 bp, Homo sapien
tatgcaaatacgcaacaaatatgtt

SEQ ID NO: 5236314 - DNA, 25 bp, Homo sapien
caaatacgcaacaaatatgttcaac

SEQ ID NO: 5236315 - DNA, 25 bp, Homo sapien
gcaaatacgcaacaaatatgttcaa

SEQ ID NO: 5236316 - DNA, 25 bp, Homo sapien
aaatacgcaacaaatatgttcaaca

SEQ ID NO: 5236317 - DNA, 25 bp, Homo sapien
ttcatggattagctcctaacactac

SEQ ID NO: 5236318 - DNA, 25 bp, Homo sapien
aaggctctctacaatacggcgccca

SEQ ID NO: 5236319 - DNA, 25 bp, Homo sapien
tataaactcagcctggtactcaagg

SEQ ID NO: 5236320 - DNA, 25 bp, Homo sapien
attgggtataaactcagcctggtac

SEQ ID NO: 5236321 - DNA, 25 bp, Homo sapien
tcaaggctctctacaatacggcgcc

SEQ ID NO: 5236322 - DNA, 25 bp, Homo sapien
tctacacaagggtccagatctttca

SEQ ID NO: 5236323 - DNA, 25 bp, Homo sapien
agcaccttcaatggctggctcccag

SEQ ID NO: 5236324 - DNA, 25 bp, Homo sapien
gcttcacggaacatctacacaaggg

SEQ ID NO: 5236325 - DNA, 25 bp, Homo sapien
tagggatcagctccaataccatatc

SEQ ID NO: 5236326 - DNA, 25 bp, Homo sapien
ctgtctttaaaatcgtagttcttga

SEQ ID NO: 5236327 - DNA, 25 bp, Homo sapien
aatcgtagttcttgaaatggcattt

SEQ ID NO: 5236328 - DNA, 25 bp, Homo sapien
actgtctttaaaatcgtagttcttg

SEQ ID NO: 5236329 - DNA, 25 bp, Homo sapien
ttaaaatcgtagttcttgaaatggc

SEQ ID NO: 5236330 - DNA, 25 bp, Homo sapien
gaccatgtctggagatgccttaaac

SEQ ID NO: 5236331 - DNA, 25 bp, Homo sapien
gattagaaattggacctccccagcc

SEQ ID NO: 5236332 - DNA, 25 bp, Homo sapien
gcattactgtgtgggtcaataccct

SEQ ID NO: 5236333 - DNA, 25 bp, Homo sapien
ccctgggaccagctatgataaaaag

SEQ ID NO: 5236334 - DNA, 25 bp, Homo sapien
tgatcatgtaatggcgccggaatgc

SEQ ID NO: 5236335 - DNA, 25 bp, Homo sapien
ttcaaacttagtggaaatgcggcca

SEQ ID NO: 5236336 - DNA, 25 bp, Homo sapien
tctcatgctgaaggtacgaagtctc

SEQ ID NO: 5236337 - DNA, 25 bp, Homo sapien
tagggattgtccttcagagccagaa

SEQ ID NO: 5236338 - DNA, 25 bp, Homo sapien
ctgaataagaacgatcaaaactgag

SEQ ID NO: 5236339 - DNA, 25 bp, Homo sapien
tgggtcaaacccagctcccatcatt

SEQ ID NO: 5236340 - DNA, 25 bp, Homo sapien
tgagtgagtgaatgggtcaaaccca

SEQ ID NO: 5236341 - DNA, 25 bp, Homo sapien
gaacgatcaaaactgagtgagtgaa

SEQ ID NO: 5236342 - DNA, 25 bp, Homo sapien
tcgacttcgttctacccgaatccat

SEQ ID NO: 5236343 - DNA, 25 bp, Homo sapien
tatcatctgcatctctcgacttcgt

SEQ ID NO: 5236344 - DNA, 25 bp, Homo sapien
cccagggccgtgaaggtgacagatt

SEQ ID NO: 5236345 - DNA, 25 bp, Homo sapien
cagattcccaaggagtccccgtctg

SEQ ID NO: 5236346 - DNA, 25 bp, Homo sapien
cttcctccaggatgttgaagaaaac

SEQ ID NO: 5236347 - DNA, 25 bp, Homo sapien
tcaccatggctgattcttcaattag

SEQ ID NO: 5236348 - DNA, 25 bp, Homo sapien
ttcttcaattaggtggagctgtgcc

SEQ ID NO: 5236349 - DNA, 25 bp, Homo sapien
agctgtgccaaacagcttccttctg

SEQ ID NO: 5236350 - DNA, 25 bp, Homo sapien
gtggagctgtgccaaacagcttcct

SEQ ID NO: 5236351 - DNA, 25 bp, Homo sapien
cgtggatagccaaagggacgccatt

SEQ ID NO: 5236352 - DNA, 25 bp, Homo sapien
ccacagaattcagtggtcgccggcg

SEQ ID NO: 5236353 - DNA, 25 bp, Homo sapien
ggttatcgatgaattcctggacgtc

SEQ ID NO: 5236354 - DNA, 25 bp, Homo sapien
gagcccacagctgtgtacatcacgg

SEQ ID NO: 5236355 - DNA, 25 bp, Homo sapien
aaaactgctctttccgcaaccaggg

SEQ ID NO: 5236356 - DNA, 25 bp, Homo sapien
cataaagcaggtagccacgtctgta

SEQ ID NO: 5236357 - DNA, 25 bp, Homo sapien
gggcccataaagcaggtagccacgt

SEQ ID NO: 5236358 - DNA, 25 bp, Homo sapien
ataaaactgctctttccgcaaccag

SEQ ID NO: 5236359 - DNA, 25 bp, Homo sapien
catgggatggcaggaggtagcaggc

SEQ ID NO: 5236360 - DNA, 25 bp, Homo sapien
tcaccgcctggggacatgtgtctca

SEQ ID NO: 5236361 - DNA, 25 bp, Homo sapien
tctcagaggcctgacttctacctca

SEQ ID NO: 5236362 - DNA, 25 bp, Homo sapien
tgttccacacgtttcatgtttatcc

SEQ ID NO: 5236363 - DNA, 25 bp, Homo sapien
tccacatcctccaggagtaccaggc

SEQ ID NO: 5236364 - DNA, 25 bp, Homo sapien
ttgagtcggtcatcagagaggctgg

SEQ ID NO: 5236365 - DNA, 25 bp, Homo sapien
gccaagtctcgactgagaaaagcag

SEQ ID NO: 5236366 - DNA, 25 bp, Homo sapien
gagaggctggagtccgtgaggctca

SEQ ID NO: 5236367 - DNA, 25 bp, Homo sapien
gctcttgtcactaacccaggcatct

SEQ ID NO: 5236368 - DNA, 25 bp, Homo sapien
taaaattagcatgccccactatgtt

SEQ ID NO: 5236369 - DNA, 25 bp, Homo sapien
ccatgtgtcttgtgggctcttgtca

SEQ ID NO: 5236370 - DNA, 25 bp, Homo sapien
gcatgagtagtcatagcccagcata

SEQ ID NO: 5236371 - DNA, 25 bp, Homo sapien
cacaccatccaaggcattgagcagt

SEQ ID NO: 5236372 - DNA, 25 bp, Homo sapien
gcagtccactgaaggtgaggcgacc

SEQ ID NO: 5236373 - DNA, 25 bp, Homo sapien
tgaggcgacctaggccttggtactt

SEQ ID NO: 5236374 - DNA, 25 bp, Homo sapien
tggtcatgaacacgatgcgggcctc

SEQ ID NO: 5236375 - DNA, 25 bp, Homo sapien
aggtcacactagcacccaacagaga

SEQ ID NO: 5236376 - DNA, 25 bp, Homo sapien
cagagatggcccctcgacctcctgt

SEQ ID NO: 5236377 - DNA, 25 bp, Homo sapien
cagggaaagcaggtcacactagcac

SEQ ID NO: 5236378 - DNA, 25 bp, Homo sapien
cccaacagagatggcccctcgacct

SEQ ID NO: 5236379 - DNA, 25 bp, Homo sapien
ctcgccccgggcgtatcagggcagg

SEQ ID NO: 5236380 - DNA, 25 bp, Homo sapien
ccagtgtgagcagtagcccacgtac

SEQ ID NO: 5236381 - DNA, 25 bp, Homo sapien
tggaacatctgggtcagctgccagt

SEQ ID NO: 5236382 - DNA, 25 bp, Homo sapien
aacatctgggtcagctgccagtgtg

SEQ ID NO: 5236383 - DNA, 25 bp, Homo sapien
tgccagtgtgagcagtagcccacgt

SEQ ID NO: 5236384 - DNA, 25 bp, Homo sapien
aaggacatgttctgcaaagttctca

SEQ ID NO: 5236385 - DNA, 25 bp, Homo sapien
ggcaggactgatctggtttgtagct

SEQ ID NO: 5236386 - DNA, 25 bp, Homo sapien
caaagttctcagctaaggaaggtgc

SEQ ID NO: 5236387 - DNA, 25 bp, Homo sapien
tgtagctcgaaggacatgttctgca

SEQ ID NO: 5236388 - DNA, 25 bp, Homo sapien
tcacctcctcagagactcagcattg

SEQ ID NO: 5236389 - DNA, 25 bp, Homo sapien
tttattgagctagaggaggagagct

SEQ ID NO: 5236390 - DNA, 25 bp, Homo sapien
ttattgagctagaggaggagagctg

SEQ ID NO: 5236391 - DNA, 25 bp, Homo sapien
agatgtttattgagctagaggagga

SEQ ID NO: 5236392 - DNA, 25 bp, Homo sapien
atgtttattgagctagaggaggaga

SEQ ID NO: 5236393 - DNA, 25 bp, Homo sapien
tgttaactaactccgaggctgctgg

SEQ ID NO: 5236394 - DNA, 25 bp, Homo sapien
tgtgacagacaggataacttaagct

SEQ ID NO: 5236395 - DNA, 25 bp, Homo sapien
tcacaataaccctagagagtaggtg

SEQ ID NO: 5236396 - DNA, 25 bp, Homo sapien
gagaggtcacgtcccagattgcata

SEQ ID NO: 5236397 - DNA, 25 bp, Homo sapien
gacaccttgagccatggagacagca

SEQ ID NO: 5236398 - DNA, 25 bp, Homo sapien
tgagccatggagacagcaacaatga

SEQ ID NO: 5236399 - DNA, 25 bp, Homo sapien
agacagcaacaatgagtgcagcagc

SEQ ID NO: 5236400 - DNA, 25 bp, Homo sapien
taagattcaggggagacaccttgag

SEQ ID NO: 5236401 - DNA, 25 bp, Homo sapien
cgcctccgacttccctaagggcatt

SEQ ID NO: 5236402 - DNA, 25 bp, Homo sapien
aagatatggcggcgtctgcgtctgc

SEQ ID NO: 5236403 - DNA, 25 bp, Homo sapien
ggctgcgggccggtgaagatatggc

SEQ ID NO: 5236404 - DNA, 25 bp, Homo sapien
ctaagggcatttccggttccggctg

SEQ ID NO: 5236405 - DNA, 25 bp, Homo sapien
tactcgctagaactggtgagaagtt

SEQ ID NO: 5236406 - DNA, 25 bp, Homo sapien
atggacggcggaccacacatgggca

SEQ ID NO: 5236407 - DNA, 25 bp, Homo sapien
gcacttcctgggacacatccgaact

SEQ ID NO: 5236408 - DNA, 25 bp, Homo sapien
gagaagttcagaggacaaaggcgct

SEQ ID NO: 5236409 - DNA, 25 bp, Homo sapien
ccccagcctaggagctccaagctcc

SEQ ID NO: 5236410 - DNA, 25 bp, Homo sapien
cagcctaggagctccaagctcctca

SEQ ID NO: 5236411 - DNA, 25 bp, Homo sapien
cctaggagctccaagctcctcaggc

SEQ ID NO: 5236412 - DNA, 25 bp, Homo sapien
agctccaagctcctcaggccaaggg

SEQ ID NO: 5236413 - DNA, 25 bp, Homo sapien
aagtagagacggtgaagagctatag

SEQ ID NO: 5236414 - DNA, 25 bp, Homo sapien
gacagttccacaacatctgggacgc

SEQ ID NO: 5236415 - DNA, 25 bp, Homo sapien
gacggtgaagagctatagatccagg

SEQ ID NO: 5236416 - DNA, 25 bp, Homo sapien
gctatagatccagggacagttccac

SEQ ID NO: 5236417 - DNA, 25 bp, Homo sapien
tctccaacacgtggtacttttccat

SEQ ID NO: 5236418 - DNA, 25 bp, Homo sapien
tgtattttcttcgacccttgtacac

SEQ ID NO: 5236419 - DNA, 25 bp, Homo sapien
gcactgtattttcttcgacccttgt

SEQ ID NO: 5236420 - DNA, 25 bp, Homo sapien
tccaatcatctccaacacgtggtac

SEQ ID NO: 5236421 - DNA, 25 bp, Homo sapien
cacaatgttgggatgccgcagaccc

SEQ ID NO: 5236422 - DNA, 25 bp, Homo sapien
caatctctcgttgcaaattcctcag

SEQ ID NO: 5236423 - DNA, 25 bp, Homo sapien
ccccaattttgggatgaacttcagg

SEQ ID NO: 5236424 - DNA, 25 bp, Homo sapien
caagcatatgcacaatgttgggatg

SEQ ID NO: 5236425 - DNA, 25 bp, Homo sapien
ttcaggaagttttccgtcatcttct

SEQ ID NO: 5236426 - DNA, 25 bp, Homo sapien
catcttctaggatctgaaagagctc

SEQ ID NO: 5236427 - DNA, 25 bp, Homo sapien
gatctgaaagagctctccctcagca

SEQ ID NO: 5236428 - DNA, 25 bp, Homo sapien
ggaagttttccgtcatcttctagga

SEQ ID NO: 5236429 - DNA, 25 bp, Homo sapien
ctgacaccaactgggcagcaatggc

SEQ ID NO: 5236430 - DNA, 25 bp, Homo sapien
ccacccttggcgaggaggatgttct

SEQ ID NO: 5236431 - DNA, 25 bp, Homo sapien
ggaatgcagatagtacagggctgac

SEQ ID NO: 5236432 - DNA, 25 bp, Homo sapien
tcatatctcggtgtaggatgcggtg

SEQ ID NO: 5236433 - DNA, 25 bp, Homo sapien
tccgctgtgtggtcgtatggtcgct

SEQ ID NO: 5236434 - DNA, 25 bp, Homo sapien
cacagggtccttgagaatgaggctg

SEQ ID NO: 5236435 - DNA, 25 bp, Homo sapien
gaccagctgaaagatgcttgtagca

SEQ ID NO: 5236436 - DNA, 25 bp, Homo sapien
tattggtgctcatagcccgggcaaa

SEQ ID NO: 5236437 - DNA, 25 bp, Homo sapien
catgtaagaggaccagtatcgatct

SEQ ID NO: 5236438 - DNA, 25 bp, Homo sapien
tcccagaattaagaccctgcagtag

SEQ ID NO: 5236439 - DNA, 25 bp, Homo sapien
tgacttagtcacaatgagtaggcac

SEQ ID NO: 5236440 - DNA, 25 bp, Homo sapien
ttcattgtgataaagcatagcctgg

SEQ ID NO: 5236441 - DNA, 25 bp, Homo sapien
tacctgagtatctgcccatagggag

SEQ ID NO: 5236442 - DNA, 25 bp, Homo sapien
gggaaatcctcaattgggcctcaaa

SEQ ID NO: 5236443 - DNA, 25 bp, Homo sapien
gaatatcctatgtgcaccgcttcca

SEQ ID NO: 5236444 - DNA, 25 bp, Homo sapien
tattcttgacaattattcgggcccc

SEQ ID NO: 5236445 - DNA, 25 bp, Homo sapien
aggtctggccaggacagtcgctgcc

SEQ ID NO: 5236446 - DNA, 25 bp, Homo sapien
caataaaggggtgatataagaggtc

SEQ ID NO: 5236447 - DNA, 25 bp, Homo sapien
acagtcgctgccgtgggtctttggt

SEQ ID NO: 5236448 - DNA, 25 bp, Homo sapien
gggtgatataagaggtctggccagg

SEQ ID NO: 5236449 - DNA, 25 bp, Homo sapien
ctcagccatgcgtttataggcctga

SEQ ID NO: 5236450 - DNA, 25 bp, Homo sapien
cgtcctttaggacctgaagttctgg

SEQ ID NO: 5236451 - DNA, 25 bp, Homo sapien
caaccgatgggcctgttcgtccttt

SEQ ID NO: 5236452 - DNA, 25 bp, Homo sapien
agatgcgagactgattacccttggg

SEQ ID NO: 5236453 - DNA, 25 bp, Homo sapien
tggtcttgtcctcttgctcaagggc

SEQ ID NO: 5236454 - DNA, 25 bp, Homo sapien
tgtcctcttgctcaagggcaggtcc

SEQ ID NO: 5236455 - DNA, 25 bp, Homo sapien
cttgctcaagggcaggtcctgtgtt

SEQ ID NO: 5236456 - DNA, 25 bp, Homo sapien
tgctggtcttgtcctcttgctcaag

SEQ ID NO: 5236457 - DNA, 25 bp, Homo sapien
tccagtccctgatttagcccagctg

SEQ ID NO: 5236458 - DNA, 25 bp, Homo sapien
attcctgaggagtggccccgagtct

SEQ ID NO: 5236459 - DNA, 25 bp, Homo sapien
tcccggccaggaggcttgattcctg

SEQ ID NO: 5236460 - DNA, 25 bp, Homo sapien
cttcaattctgaggctaagatcccg

SEQ ID NO: 5236461 - DNA, 25 bp, Homo sapien
tgggaatgctcgttcacaatctggg

SEQ ID NO: 5236462 - DNA, 25 bp, Homo sapien
tcctctgggaatgctcgttcacaat

SEQ ID NO: 5236463 - DNA, 25 bp, Homo sapien
gtccactacatcagtgctccgctgg

SEQ ID NO: 5236464 - DNA, 25 bp, Homo sapien
ttccaggtccactacatcagtgctc

SEQ ID NO: 5236465 - DNA, 25 bp, Homo sapien
ttcatgcagctgactctggatgcgc

SEQ ID NO: 5236466 - DNA, 25 bp, Homo sapien
tcagtggtctctagcaggtgctgcc

SEQ ID NO: 5236467 - DNA, 25 bp, Homo sapien
ttcagttgaataggcacaggctcag

SEQ ID NO: 5236468 - DNA, 25 bp, Homo sapien
tgcgctggcagaagtcaggattaca

SEQ ID NO: 5236469 - DNA, 25 bp, Homo sapien
ctgcctcccggcagaaggaatacaa

SEQ ID NO: 5236470 - DNA, 25 bp, Homo sapien
agccctgcctcccggcagaaggaat

SEQ ID NO: 5236471 - DNA, 25 bp, Homo sapien
gactgtgcctgagtagactcagcag

SEQ ID NO: 5236472 - DNA, 25 bp, Homo sapien
gagagaagactgctcaggacccgga

SEQ ID NO: 5236473 - DNA, 25 bp, Homo sapien
agaagagagtaagggcaatgtgaag

SEQ ID NO: 5236474 - DNA, 25 bp, Homo sapien
agagagtaagggcaatgtgaaggat

SEQ ID NO: 5236475 - DNA, 25 bp, Homo sapien
gaagagagtaagggcaatgtgaagg

SEQ ID NO: 5236476 - DNA, 25 bp, Homo sapien
agagtaagggcaatgtgaaggatgg

SEQ ID NO: 5236477 - DNA, 25 bp, Homo sapien
tctccagattgaaggtacaggcaaa

SEQ ID NO: 5236478 - DNA, 25 bp, Homo sapien
catcaggtcctgtaagaaggtccca

SEQ ID NO: 5236479 - DNA, 25 bp, Homo sapien
gtaagaaggtcccataccaagattg

SEQ ID NO: 5236480 - DNA, 25 bp, Homo sapien
gaaggtacaggcaaagtaggcctga

SEQ ID NO: 5236481 - DNA, 25 bp, Homo sapien
ccttaaaaggactatgagtggccac

SEQ ID NO: 5236482 - DNA, 25 bp, Homo sapien
tagaaactgtaagtcttgaggccaa

SEQ ID NO: 5236483 - DNA, 25 bp, Homo sapien
gagtggccactcagctgattcctaa

SEQ ID NO: 5236484 - DNA, 25 bp, Homo sapien
catggtgactgctgactcttagaaa

SEQ ID NO: 5236485 - DNA, 25 bp, Homo sapien
ataaggctgtccctccgcaaagtct

SEQ ID NO: 5236486 - DNA, 25 bp, Homo sapien
cataaggctgtccctccgcaaagtc

SEQ ID NO: 5236487 - DNA, 25 bp, Homo sapien
gagcccatccaagacaacctgctgt

SEQ ID NO: 5236488 - DNA, 25 bp, Homo sapien
tggaactgtcaagccatgaaggagc

SEQ ID NO: 5236489 - DNA, 25 bp, Homo sapien
ccatggcttcgcacaggacagtaaa

SEQ ID NO: 5236490 - DNA, 25 bp, Homo sapien
taaaaggctttggagatggcccggc

SEQ ID NO: 5236491 - DNA, 25 bp, Homo sapien
aggtatatcctcactctgctctcgc

SEQ ID NO: 5236492 - DNA, 25 bp, Homo sapien
tatcctcactctgctctcgcagtgg

SEQ ID NO: 5236493 - DNA, 25 bp, Homo sapien
gtatatcctcactctgctctcgcag

SEQ ID NO: 5236494 - DNA, 25 bp, Homo sapien
ttggcatcccagcagtcgggcagtc

SEQ ID NO: 5236495 - DNA, 25 bp, Homo sapien
gggctctgggattctggctatatca

SEQ ID NO: 5236496 - DNA, 25 bp, Homo sapien
gggctagcctcctcaattcctctgg

SEQ ID NO: 5236497 - DNA, 25 bp, Homo sapien
gaggaacaaccaattgtagctcgga

SEQ ID NO: 5236498 - DNA, 25 bp, Homo sapien
tatcatgttctacaaatggcccagg

SEQ ID NO: 5236499 - DNA, 25 bp, Homo sapien
gtcttcagttagctgatttgccaaa

SEQ ID NO: 5236500 - DNA, 25 bp, Homo sapien
cttgagaaggtgcaggcacaggatg

SEQ ID NO: 5236501 - DNA, 25 bp, Homo sapien
tgacaaggcagcaggagtatagaac

SEQ ID NO: 5236502 - DNA, 25 bp, Homo sapien
ctgacaaggcagcaggagtatagaa

SEQ ID NO: 5236503 - DNA, 25 bp, Homo sapien
aatcaacataaacagggattccaag

SEQ ID NO: 5236504 - DNA, 25 bp, Homo sapien
cctgccccagaagacggcacaggcc

SEQ ID NO: 5236505 - DNA, 25 bp, Homo sapien
gaatcaacataaacagggattccaa

SEQ ID NO: 5236506 - DNA, 25 bp, Homo sapien
tcctgccccagaagacggcacaggc

SEQ ID NO: 5236507 - DNA, 25 bp, Homo sapien
gactcttcccaatctactactttta

SEQ ID NO: 5236508 - DNA, 25 bp, Homo sapien
cacaaggcaggttttggagccgaaa

SEQ ID NO: 5236509 - DNA, 25 bp, Homo sapien
agtgtcacttcagtagactcttccc

SEQ ID NO: 5236510 - DNA, 25 bp, Homo sapien
ggagaggaagtagagtgtcacttca

SEQ ID NO: 5236511 - DNA, 25 bp, Homo sapien
cacaagagagacgacatgcgaatgg

SEQ ID NO: 5236512 - DNA, 25 bp, Homo sapien
cgacatgcgaatgggtaaagagagt

SEQ ID NO: 5236513 - DNA, 25 bp, Homo sapien
tagcaacgtcactgcctagcttctc

SEQ ID NO: 5236514 - DNA, 25 bp, Homo sapien
taaagagagtagcaacgtcactgcc

SEQ ID NO: 5236515 - DNA, 25 bp, Homo sapien
ggtcaccccttgctgaccaagctgt

SEQ ID NO: 5236516 - DNA, 25 bp, Homo sapien
gctgaccaagctgtcccaatagaca

SEQ ID NO: 5236517 - DNA, 25 bp, Homo sapien
caagctgtcccaatagacaggctgc

SEQ ID NO: 5236518 - DNA, 25 bp, Homo sapien
ctgtcccaatagacaggctgctgca

SEQ ID NO: 5236519 - DNA, 25 bp, Homo sapien
tcacaggatgtcagccaccttttcc

SEQ ID NO: 5236520 - DNA, 25 bp, Homo sapien
cacaggatgtcagccaccttttcca

SEQ ID NO: 5236521 - DNA, 25 bp, Homo sapien
acaggatgtcagccaccttttccat

SEQ ID NO: 5236522 - DNA, 25 bp, Homo sapien
ggataaggaggccatcatagaatcc

SEQ ID NO: 5236523 - DNA, 25 bp, Homo sapien
aatccacaactacctggtggagtca

SEQ ID NO: 5236524 - DNA, 25 bp, Homo sapien
tcatagaatccacaactacctggtg

SEQ ID NO: 5236525 - DNA, 25 bp, Homo sapien
gaggccatcatagaatccacaacta

SEQ ID NO: 5236526 - DNA, 25 bp, Homo sapien
gcggtgccacaaaacggtccacatt

SEQ ID NO: 5236527 - DNA, 25 bp, Homo sapien
cacatttctgaactggacatatccc

SEQ ID NO: 5236528 - DNA, 25 bp, Homo sapien
gacatatccctgattaggctagcct

SEQ ID NO: 5236529 - DNA, 25 bp, Homo sapien
gactggatagcgaaagctccccttc

SEQ ID NO: 5236530 - DNA, 25 bp, Homo sapien
gacatgaggatacttccatgctggg

SEQ ID NO: 5236531 - DNA, 25 bp, Homo sapien
tggacatgaggatacttccatgctg

SEQ ID NO: 5236532 - DNA, 25 bp, Homo sapien
ggacatgaggatacttccatgctgg

SEQ ID NO: 5236533 - DNA, 25 bp, Homo sapien
gatggacatgaggatacttccatgc

SEQ ID NO: 5236534 - DNA, 25 bp, Homo sapien
accacgacagggagaaactcagacc

SEQ ID NO: 5236535 - DNA, 25 bp, Homo sapien
cagacagagagcaccacgacaggga

SEQ ID NO: 5236536 - DNA, 25 bp, Homo sapien
agggagaaactcagacccatgaggc

SEQ ID NO: 5236537 - DNA, 25 bp, Homo sapien
agagagcaccacgacagggagaaac

SEQ ID NO: 5236538 - DNA, 25 bp, Homo sapien
tataaggaggtcagcatccatgtcc

SEQ ID NO: 5236539 - DNA, 25 bp, Homo sapien
caagacacctataaggaggtcagca

SEQ ID NO: 5236540 - DNA, 25 bp, Homo sapien
gcagatgggctgcaacttctgagtc

SEQ ID NO: 5236541 - DNA, 25 bp, Homo sapien
tctgagtccctgaggtcggccaaga

SEQ ID NO: 5236542 - DNA, 25 bp, Homo sapien
ttacaggggcctagaagagccctgg

SEQ ID NO: 5236543 - DNA, 25 bp, Homo sapien
tagaggatacaaggttggctatctt

SEQ ID NO: 5236544 - DNA, 25 bp, Homo sapien
tcctctcccaccttcatgctagctg

SEQ ID NO: 5236545 - DNA, 25 bp, Homo sapien
tacaaggttggctatcttcctctcc

SEQ ID NO: 5236546 - DNA, 25 bp, Homo sapien
ggagcctataagtgtgtgcccgcac

SEQ ID NO: 5236547 - DNA, 25 bp, Homo sapien
caactgagagaaacgagacgatggt

SEQ ID NO: 5236548 - DNA, 25 bp, Homo sapien
catgccatttctaggagccgctggg

SEQ ID NO: 5236549 - DNA, 25 bp, Homo sapien
tgcccagagctgatgcaacattgcg

SEQ ID NO: 5236550 - DNA, 25 bp, Homo sapien
tcatggttcataagtgctgtagggt

SEQ ID NO: 5236551 - DNA, 25 bp, Homo sapien
tcatcatggttcataagtgctgtag

SEQ ID NO: 5236552 - DNA, 25 bp, Homo sapien
cctgatcatcatggttcataagtgc

SEQ ID NO: 5236553 - DNA, 25 bp, Homo sapien
gggccctgatcatcatggttcataa

SEQ ID NO: 5236554 - DNA, 25 bp, Homo sapien
cttggagataggaatcatcaggacc

SEQ ID NO: 5236555 - DNA, 25 bp, Homo sapien
tgaaaccaaggcactaagggacaca

SEQ ID NO: 5236556 - DNA, 25 bp, Homo sapien
gggacttggaatagactgaatggca

SEQ ID NO: 5236557 - DNA, 25 bp, Homo sapien
tctttggttatagaccatgaaacca

SEQ ID NO: 5236558 - DNA, 25 bp, Homo sapien
ttctcactggcacccagggacacca

SEQ ID NO: 5236559 - DNA, 25 bp, Homo sapien
tttctcactggcacccagggacacc

SEQ ID NO: 5236560 - DNA, 25 bp, Homo sapien
gtttctcactggcacccagggacac

SEQ ID NO: 5236561 - DNA, 25 bp, Homo sapien
cacccacagataggaatgttggcta

SEQ ID NO: 5236562 - DNA, 25 bp, Homo sapien
gatggcattgatccccacagcctag

SEQ ID NO: 5236563 - DNA, 25 bp, Homo sapien
ttgagcctctcaacccttgtcctgg

SEQ ID NO: 5236564 - DNA, 25 bp, Homo sapien
gcaggtccctagagttaaaggcaca

SEQ ID NO: 5236565 - DNA, 25 bp, Homo sapien
tcttattgtagggagctgaatggtg

SEQ ID NO: 5236566 - DNA, 25 bp, Homo sapien
aaatattaccttatctggttgaggg

SEQ ID NO: 5236567 - DNA, 25 bp, Homo sapien
tgaatggtggccacccattcaaaag

SEQ ID NO: 5236568 - DNA, 25 bp, Homo sapien
gacactttggtatgttgattacttt

SEQ ID NO: 5236569 - DNA, 25 bp, Homo sapien
tccggcgagcggaattctgggagat

SEQ ID NO: 5236570 - DNA, 25 bp, Homo sapien
cacgcgcagtcccttcagtgcggtg

SEQ ID NO: 5236571 - DNA, 25 bp, Homo sapien
agtcccttcagtgcggtgggatccg

SEQ ID NO: 5236572 - DNA, 25 bp, Homo sapien
agtcccgtggttaaagctctgaaag

SEQ ID NO: 5236573 - DNA, 25 bp, Homo sapien
cgtgacaagcgcactcggccgccag

SEQ ID NO: 5236574 - DNA, 25 bp, Homo sapien
cacgcgtgacaagcgcactcggccg

SEQ ID NO: 5236575 - DNA, 25 bp, Homo sapien
cgccacgcgtgacaagcgcactcgg

SEQ ID NO: 5236576 - DNA, 25 bp, Homo sapien
cgcccccagcggacagaccgagagt

SEQ ID NO: 5236577 - DNA, 25 bp, Homo sapien
gcttcgccccggctcggcaccggct

SEQ ID NO: 5236578 - DNA, 25 bp, Homo sapien
taggggatccagcttcgccccggct

SEQ ID NO: 5236579 - DNA, 25 bp, Homo sapien
accggctccacgctacttcctccct

SEQ ID NO: 5236580 - DNA, 25 bp, Homo sapien
cagcctcaggcgcccctagcaacca

SEQ ID NO: 5236581 - DNA, 25 bp, Homo sapien
aaatgtattcatgttaagctagacg

SEQ ID NO: 5236582 - DNA, 25 bp, Homo sapien
tatcccttggaagtctacaaccctg

SEQ ID NO: 5236583 - DNA, 25 bp, Homo sapien
tacaaccctgattactccagcttga

SEQ ID NO: 5236584 - DNA, 25 bp, Homo sapien
taagctagacgtgcaagtgtatccc

SEQ ID NO: 5236585 - DNA, 25 bp, Homo sapien
ggtaagcagcctgactgatgtccct

SEQ ID NO: 5236586 - DNA, 25 bp, Homo sapien
ggatcaacaaaatggcctgaaacat

SEQ ID NO: 5236587 - DNA, 25 bp, Homo sapien
caagtgcaggactgttaaggtaagc

SEQ ID NO: 5236588 - DNA, 25 bp, Homo sapien
tgaaacatccccttctatttgcatg

SEQ ID NO: 5236589 - DNA, 25 bp, Homo sapien
agaaacgatggatatgttcaatgtg

SEQ ID NO: 5236590 - DNA, 25 bp, Homo sapien
tgacttagaaacgatggatatgttc

SEQ ID NO: 5236591 - DNA, 25 bp, Homo sapien
gacttagaaacgatggatatgttca

SEQ ID NO: 5236592 - DNA, 25 bp, Homo sapien
aaattgacttagaaacgatggatat

SEQ ID NO: 5236593 - DNA, 25 bp, Homo sapien
ccagtttggcctcctattagcaata

SEQ ID NO: 5236594 - DNA, 25 bp, Homo sapien
cccaacaactttatggaacactaag

SEQ ID NO: 5236595 - DNA, 25 bp, Homo sapien
gtgatatgccctataagcttcatga

SEQ ID NO: 5236596 - DNA, 25 bp, Homo sapien
caaatacagagccacgctggcagaa

SEQ ID NO: 5236597 - DNA, 25 bp, Homo sapien
aggaaaatatcagtgagcttgaaga

SEQ ID NO: 5236598 - DNA, 25 bp, Homo sapien
caacagcacaatggatcaagcagag

SEQ ID NO: 5236599 - DNA, 25 bp, Homo sapien
gaaaaatttactagaggctctcaac

SEQ ID NO: 5236600 - DNA, 25 bp, Homo sapien
tctcaacagcacaatggatcaagca

SEQ ID NO: 5236601 - DNA, 25 bp, Homo sapien
ctggggccaagatgccatctagtgt

SEQ ID NO: 5236602 - DNA, 25 bp, Homo sapien
ccatctagtgttgaaaaagaggtag

SEQ ID NO: 5236603 - DNA, 25 bp, Homo sapien
ccaagatgccatctagtgttgaaaa

SEQ ID NO: 5236604 - DNA, 25 bp, Homo sapien
gccatctagtgttgaaaaagaggta

SEQ ID NO: 5236605 - DNA, 25 bp, Homo sapien
aatggcagtgtagaagcaagctggc

SEQ ID NO: 5236606 - DNA, 25 bp, Homo sapien
gaccaaggacatagaaaacctgccc

SEQ ID NO: 5236607 - DNA, 25 bp, Homo sapien
aggagaccgttcctgggaccacaga

SEQ ID NO: 5236608 - DNA, 25 bp, Homo sapien
tagggacttctggttccaaaatggc

SEQ ID NO: 5236609 - DNA, 25 bp, Homo sapien
ctccggtagtagcagctgcatcctt

SEQ ID NO: 5236610 - DNA, 25 bp, Homo sapien
cacatcatggccacacggtctcatg

SEQ ID NO: 5236611 - DNA, 25 bp, Homo sapien
gaggggcccacatcatggccacacg

SEQ ID NO: 5236612 - DNA, 25 bp, Homo sapien
catcatggccacacggtctcatggc

SEQ ID NO: 5236613 - DNA, 25 bp, Homo sapien
atggccacacggtctcatggccttg

SEQ ID NO: 5236614 - DNA, 25 bp, Homo sapien
cctccgagggtttctcaggtggcgt

SEQ ID NO: 5236615 - DNA, 25 bp, Homo sapien
gagggaccactctgcttgaagctgt

SEQ ID NO: 5236616 - DNA, 25 bp, Homo sapien
gctgacagtgtctccacttgcttct

SEQ ID NO: 5236617 - DNA, 25 bp, Homo sapien
ggcttcacttgctgatgggcctgag

SEQ ID NO: 5236618 - DNA, 25 bp, Homo sapien
cgaacgcaagcagaaagactccagt

SEQ ID NO: 5236619 - DNA, 25 bp, Homo sapien
gtttttgcctatagctggagcggcg

SEQ ID NO: 5236620 - DNA, 25 bp, Homo sapien
tagcagggtgctgttgaacaagtcc

SEQ ID NO: 5236621 - DNA, 25 bp, Homo sapien
cgtggtcccagagctacataaagtg

SEQ ID NO: 5236622 - DNA, 25 bp, Homo sapien
tgatttaccgcaggaggtttccacc

SEQ ID NO: 5236623 - DNA, 25 bp, Homo sapien
tagacaaggcgatatgggcactggc

SEQ ID NO: 5236624 - DNA, 25 bp, Homo sapien
caggcagggttgtgattgagcccac

SEQ ID NO: 5236625 - DNA, 25 bp, Homo sapien
ccttatggtcaacaggctgcggtgc

SEQ ID NO: 5236626 - DNA, 25 bp, Homo sapien
cttcagaggtacagggtcggtgcca

SEQ ID NO: 5236627 - DNA, 25 bp, Homo sapien
tgcaagctatagtttcccaaccctt

SEQ ID NO: 5236628 - DNA, 25 bp, Homo sapien
tcggtgccaccccaaattatggtat

SEQ ID NO: 5236629 - DNA, 25 bp, Homo sapien
gcaggcaacaagcaagatttggtct

SEQ ID NO: 5236630 - DNA, 25 bp, Homo sapien
cattctcatcacggctacaacagtc

SEQ ID NO: 5236631 - DNA, 25 bp, Homo sapien
ccaaaccatctactagttcttcttc

SEQ ID NO: 5236632 - DNA, 25 bp, Homo sapien
gtcttccaaaccatctactagttct

SEQ ID NO: 5236633 - DNA, 25 bp, Homo sapien
tcatcacggctacaacagtcttcca

SEQ ID NO: 5236634 - DNA, 25 bp, Homo sapien
gagacagcacttaatgaggagcact

SEQ ID NO: 5236635 - DNA, 25 bp, Homo sapien
agatcatggccaccgattcgctggg

SEQ ID NO: 5236636 - DNA, 25 bp, Homo sapien
agagatcatggccaccgattcgctg

SEQ ID NO: 5236637 - DNA, 25 bp, Homo sapien
cacttaatgaggagcactctgagtc

SEQ ID NO: 5236638 - DNA, 25 bp, Homo sapien
cagctccaaaatttcccgtgacaag

SEQ ID NO: 5236639 - DNA, 25 bp, Homo sapien
aaaatttcccgtgacaagacattgg

SEQ ID NO: 5236640 - DNA, 25 bp, Homo sapien
atttcccgtgacaagacattggctg

SEQ ID NO: 5236641 - DNA, 25 bp, Homo sapien
gctccaaaatttcccgtgacaagac

SEQ ID NO: 5236642 - DNA, 25 bp, Homo sapien
taatccataaggtactaggctaacc

SEQ ID NO: 5236643 - DNA, 25 bp, Homo sapien
caacagccctgaagcgtcgttacta

SEQ ID NO: 5236644 - DNA, 25 bp, Homo sapien
cgacgtacgatttatttccaagtgc

SEQ ID NO: 5236645 - DNA, 25 bp, Homo sapien
cttgtgattctaaaaagccaggtgc

SEQ ID NO: 5236646 - DNA, 25 bp, Homo sapien
ggtttggtcagaatttccatacagc

SEQ ID NO: 5236647 - DNA, 25 bp, Homo sapien
tagatgagggctggtcggacaactt

SEQ ID NO: 5236648 - DNA, 25 bp, Homo sapien
cggacaactttctcatgattggaaa

SEQ ID NO: 5236649 - DNA, 25 bp, Homo sapien
catcccgagtgccaaaatagatggt

SEQ ID NO: 5236650 - DNA, 25 bp, Homo sapien
aacttagctagcaaccttctccccg

SEQ ID NO: 5236651 - DNA, 25 bp, Homo sapien
cctcccaacttagctagcaaccttc

SEQ ID NO: 5236652 - DNA, 25 bp, Homo sapien
cttagctagcaaccttctccccggg

SEQ ID NO: 5236653 - DNA, 25 bp, Homo sapien
cttctgggctttgacacttggccag

SEQ ID NO: 5236654 - DNA, 25 bp, Homo sapien
ggagaggagcagagagtcatgatga

SEQ ID NO: 5236655 - DNA, 25 bp, Homo sapien
aggagcagagagtcatgatgagaag

SEQ ID NO: 5236656 - DNA, 25 bp, Homo sapien
ctgggaagaatgcaaggggtgtggg

SEQ ID NO: 5236657 - DNA, 25 bp, Homo sapien
gaggagcagagagtcatgatgagaa

SEQ ID NO: 5236658 - DNA, 25 bp, Homo sapien
gtcactgtgctcatcttccatcgga

SEQ ID NO: 5236659 - DNA, 25 bp, Homo sapien
ggaccgtccaatggtctgcttgaca

SEQ ID NO: 5236660 - DNA, 25 bp, Homo sapien
ctgattttgaagtgggaccgtccaa

SEQ ID NO: 5236661 - DNA, 25 bp, Homo sapien
tccatcggagcaacttcctctgttc

SEQ ID NO: 5236662 - DNA, 25 bp, Homo sapien
gttgctatggagctgtcctacatga

SEQ ID NO: 5236663 - DNA, 25 bp, Homo sapien
tgctatggagctgtcctacatgagg

SEQ ID NO: 5236664 - DNA, 25 bp, Homo sapien
tggttttcaaagagttgctatggag

SEQ ID NO: 5236665 - DNA, 25 bp, Homo sapien
ttggttttcaaagagttgctatgga

SEQ ID NO: 5236666 - DNA, 25 bp, Homo sapien
gctctcgaatggatcggaaactagg

SEQ ID NO: 5236667 - DNA, 25 bp, Homo sapien
cgaatggatcggaaactaggagact

SEQ ID NO: 5236668 - DNA, 25 bp, Homo sapien
gatgctctcgaatggatcggaaact

SEQ ID NO: 5236669 - DNA, 25 bp, Homo sapien
aatggatcggaaactaggagacttc

SEQ ID NO: 5236670 - DNA, 25 bp, Homo sapien
tcaagtatccaactgcagagcactc

SEQ ID NO: 5236671 - DNA, 25 bp, Homo sapien
tcagcttgggagaatggaatgtgca

SEQ ID NO: 5236672 - DNA, 25 bp, Homo sapien
ttccaatgtgagaccagaagtcctc

SEQ ID NO: 5236673 - DNA, 25 bp, Homo sapien
gagatgtacgtgatccactggagtc

SEQ ID NO: 5236674 - DNA, 25 bp, Homo sapien
ggaatgagcctgggaaatggtttag

SEQ ID NO: 5236675 - DNA, 25 bp, Homo sapien
ctggaatgagcctgggaaatggttt

SEQ ID NO: 5236676 - DNA, 25 bp, Homo sapien
tggaatgagcctgggaaatggttta

SEQ ID NO: 5236677 - DNA, 25 bp, Homo sapien
ccttcttgccaaagcggctctgcat

SEQ ID NO: 5236678 - DNA, 25 bp, Homo sapien
caatccacttttggcggctgctgct

SEQ ID NO: 5236679 - DNA, 25 bp, Homo sapien
gctttgcgcaggagcttggcgtcct

SEQ ID NO: 5236680 - DNA, 25 bp, Homo sapien
ggctctgcatacgtgacaggttccg

SEQ ID NO: 5236681 - DNA, 25 bp, Homo sapien
gaccatagtctcctgcccactgtga

SEQ ID NO: 5236682 - DNA, 25 bp, Homo sapien
tagtctcctgcccactgtgattcac

SEQ ID NO: 5236683 - DNA, 25 bp, Homo sapien
ctcctgcccactgtgattcactcac

SEQ ID NO: 5236684 - DNA, 25 bp, Homo sapien
agaccatagtctcctgcccactgtg

SEQ ID NO: 5236685 - DNA, 25 bp, Homo sapien
gtccaatactctgttgttcccactc

SEQ ID NO: 5236686 - DNA, 25 bp, Homo sapien
tccaatactctgttgttcccactca

SEQ ID NO: 5236687 - DNA, 25 bp, Homo sapien
ccaatactctgttgttcccactcac

SEQ ID NO: 5236688 - DNA, 25 bp, Homo sapien
tgccaatgcctcgagctgatgctgg

SEQ ID NO: 5236689 - DNA, 25 bp, Homo sapien
gggagctgactccacttgtgaataa

SEQ ID NO: 5236690 - DNA, 25 bp, Homo sapien
ctccacttgtgaataacctggatgc

SEQ ID NO: 5236691 - DNA, 25 bp, Homo sapien
ctggatgccaatgcctcgagctgat

SEQ ID NO: 5236692 - DNA, 25 bp, Homo sapien
tgtaagaagggaacctcgaggccaa

SEQ ID NO: 5236693 - DNA, 25 bp, Homo sapien
taagggatatgtgctacaggctcac

SEQ ID NO: 5236694 - DNA, 25 bp, Homo sapien
caaagggcagaacattgtaagaagg

SEQ ID NO: 5236695 - DNA, 25 bp, Homo sapien
tgggagaacaaagggcagaacattg

SEQ ID NO: 5236696 - DNA, 25 bp, Homo sapien
gataaagaccttagaacagttggct

SEQ ID NO: 5236697 - DNA, 25 bp, Homo sapien
acagttggctaaggaagctctttgg

SEQ ID NO: 5236698 - DNA, 25 bp, Homo sapien
aaagccagctaacagtccccaagat

SEQ ID NO: 5236699 - DNA, 25 bp, Homo sapien
gggctcagtgggtaaccaagccaca

SEQ ID NO: 5236700 - DNA, 25 bp, Homo sapien
tgaaaagaggtaaatccgcagagga

SEQ ID NO: 5236701 - DNA, 25 bp, Homo sapien
ccgcagaggatcgtaggaagtgaca

SEQ ID NO: 5236702 - DNA, 25 bp, Homo sapien
gtcaaacttgctgccgctgatgagg

SEQ ID NO: 5236703 - DNA, 25 bp, Homo sapien
cataaacatagatccgcaggtcaaa

SEQ ID NO: 5236704 - DNA, 25 bp, Homo sapien
cccagatttaacgaagtagagagcc

SEQ ID NO: 5236705 - DNA, 25 bp, Homo sapien
gtagagagcctccatatttcccatt

SEQ ID NO: 5236706 - DNA, 25 bp, Homo sapien
aagtgtgtctactggcaaagttctg

SEQ ID NO: 5236707 - DNA, 25 bp, Homo sapien
ttccccaaatcctgaagaggtgtag

SEQ ID NO: 5236708 - DNA, 25 bp, Homo sapien
caggtgcatgaacttattgccaagg

SEQ ID NO: 5236709 - DNA, 25 bp, Homo sapien
ttgccaaggctcttcatggaaggcg

SEQ ID NO: 5236710 - DNA, 25 bp, Homo sapien
ctttttattgacactgtagttggtc

SEQ ID NO: 5236711 - DNA, 25 bp, Homo sapien
ggtactcggcattctttttattgac

SEQ ID NO: 5236712 - DNA, 25 bp, Homo sapien
cacatccggcctcaaatagaccaat

SEQ ID NO: 5236713 - DNA, 25 bp, Homo sapien
tgtattcctctaggccttcactgga

SEQ ID NO: 5236714 - DNA, 25 bp, Homo sapien
tatattaatcctccactcgccatgc

SEQ ID NO: 5236715 - DNA, 25 bp, Homo sapien
cttcactggactgggacactctgcc

SEQ ID NO: 5236716 - DNA, 25 bp, Homo sapien
tatcttctcccagatggcgtcgcta

SEQ ID NO: 5236717 - DNA, 25 bp, Homo sapien
tcaggtagttccacaaagccttcag

SEQ ID NO: 5236718 - DNA, 25 bp, Homo sapien
gagatgatagttttgacaacaacat

SEQ ID NO: 5236719 - DNA, 25 bp, Homo sapien
gctattgactcccttctggctcagg

SEQ ID NO: 5236720 - DNA, 25 bp, Homo sapien
tagaaattttaacacttccagtgtc

SEQ ID NO: 5236721 - DNA, 25 bp, Homo sapien
gacactggaagtgttaaaatttcta

SEQ ID NO: 5236722 - DNA, 25 bp, Homo sapien
tcatggcagctatagggccgtcgca

SEQ ID NO: 5236723 - DNA, 25 bp, Homo sapien
gagttcatggcagctatagggccgt

SEQ ID NO: 5236724 - DNA, 25 bp, Homo sapien
ctatagggccgtcgcacatacatct

SEQ ID NO: 5236725 - DNA, 25 bp, Homo sapien
gtcgcacatacatcttgagcaggct

SEQ ID NO: 5236726 - DNA, 25 bp, Homo sapien
ggtcacgaatcatctggcctttgat

SEQ ID NO: 5236727 - DNA, 25 bp, Homo sapien
tgggcaggacaaaacctgccagatt

SEQ ID NO: 5236728 - DNA, 25 bp, Homo sapien
ctggggctggaaatgatatcctctg

SEQ ID NO: 5236729 - DNA, 25 bp, Homo sapien
gattcagaaggtcacgaatcatctg

SEQ ID NO: 5236730 - DNA, 25 bp, Homo sapien
tggagccattcgacatttgtcccca

SEQ ID NO: 5236731 - DNA, 25 bp, Homo sapien
tctggagccattcgacatttgtccc

SEQ ID NO: 5236732 - DNA, 25 bp, Homo sapien
ctggagccattcgacatttgtcccc

SEQ ID NO: 5236733 - DNA, 25 bp, Homo sapien
ggagccattcgacatttgtccccag

SEQ ID NO: 5236734 - DNA, 25 bp, Homo sapien
aaattcgttcaaactgaccacggcg

SEQ ID NO: 5236735 - DNA, 25 bp, Homo sapien
catccagcacagatgcatagaagtc

SEQ ID NO: 5236736 - DNA, 25 bp, Homo sapien
taagcttgttgccatggtatttctg

SEQ ID NO: 5236737 - DNA, 25 bp, Homo sapien
cgtggctgctcaaaaaagcggagat

SEQ ID NO: 5236738 - DNA, 25 bp, Homo sapien
gtttaagaaggtagaatcaattggc

SEQ ID NO: 5236739 - DNA, 25 bp, Homo sapien
tactgggatttaatctctcactaaa

SEQ ID NO: 5236740 - DNA, 25 bp, Homo sapien
atttcttggtatactgggatttaat

SEQ ID NO: 5236741 - DNA, 25 bp, Homo sapien
ttaagaaggtagaatcaattggcca

SEQ ID NO: 5236742 - DNA, 25 bp, Homo sapien
gtagcaccaactccggagcagatct

SEQ ID NO: 5236743 - DNA, 25 bp, Homo sapien
aactcccatgtggaaccctttgtag

SEQ ID NO: 5236744 - DNA, 25 bp, Homo sapien
tgtggaaccctttgtagcaccaact

SEQ ID NO: 5236745 - DNA, 25 bp, Homo sapien
gcaccaactccggagcagatctact

SEQ ID NO: 5236746 - DNA, 25 bp, Homo sapien
gggcctgagaaggagctgtcctcca

SEQ ID NO: 5236747 - DNA, 25 bp, Homo sapien
aaggagctgtcctccacactggcag

SEQ ID NO: 5236748 - DNA, 25 bp, Homo sapien
aacccaactcctgctgcactcataa

SEQ ID NO: 5236749 - DNA, 25 bp, Homo sapien
ctgcactcataaggcagaggaggga

SEQ ID NO: 5236750 - DNA, 25 bp, Homo sapien
ccaggtgggtaaaagtctcagttct

SEQ ID NO: 5236751 - DNA, 25 bp, Homo sapien
aatcctggaggcaactattcccttg

SEQ ID NO: 5236752 - DNA, 25 bp, Homo sapien
tcaaacaagaagttgaggcctacaa

SEQ ID NO: 5236753 - DNA, 25 bp, Homo sapien
cagaagcagagcctagcggagaagt

SEQ ID NO: 5236754 - DNA, 25 bp, Homo sapien
tcagaagtgatgtcgggagagacca

SEQ ID NO: 5236755 - DNA, 25 bp, Homo sapien
gtcagaagtgatgtcgggagagacc

SEQ ID NO: 5236756 - DNA, 25 bp, Homo sapien
agtcagaagtgatgtcgggagagac

SEQ ID NO: 5236757 - DNA, 25 bp, Homo sapien
ttgctgaaggcattgagtatcacgt

SEQ ID NO: 5236758 - DNA, 25 bp, Homo sapien
gctagtctctgatttgctgaaggca

SEQ ID NO: 5236759 - DNA, 25 bp, Homo sapien
tgaaggcattgagtatcacgtcatc

SEQ ID NO: 5236760 - DNA, 25 bp, Homo sapien
ctagtctctgatttgctgaaggcat

SEQ ID NO: 5236761 - DNA, 25 bp, Homo sapien
ctgccacagtctgggaagaggggaa

SEQ ID NO: 5236762 - DNA, 25 bp, Homo sapien
aggaagaaaactctacaaactcaca

SEQ ID NO: 5236763 - DNA, 25 bp, Homo sapien
tgccacagtctgggaagaggggaag

SEQ ID NO: 5236764 - DNA, 25 bp, Homo sapien
aaactctacaaactcacagccagca

SEQ ID NO: 5236765 - DNA, 25 bp, Homo sapien
gatttgggcgtggtcccgtcttcag

SEQ ID NO: 5236766 - DNA, 25 bp, Homo sapien
cagagagtagtaggctaacctcaca

SEQ ID NO: 5236767 - DNA, 25 bp, Homo sapien
gagtagtaggctaacctcacaggag

SEQ ID NO: 5236768 - DNA, 25 bp, Homo sapien
gcttgagtcttcttggatttgggcg

SEQ ID NO: 5236769 - DNA, 25 bp, Homo sapien
aagtcttgaagtctgcccagagcac

SEQ ID NO: 5236770 - DNA, 25 bp, Homo sapien
actgattgactggaaagtggaggaa

SEQ ID NO: 5236771 - DNA, 25 bp, Homo sapien
ggaggaagcagaaagtcttgaagtc

SEQ ID NO: 5236772 - DNA, 25 bp, Homo sapien
caggtaacgtctgggtagaaaggct

SEQ ID NO: 5236773 - DNA, 25 bp, Homo sapien
gctttataaggctgcgtggccacca

SEQ ID NO: 5236774 - DNA, 25 bp, Homo sapien
cagctactgggattatctgggctcc

SEQ ID NO: 5236775 - DNA, 25 bp, Homo sapien
gagacatctagaaggctgaacgagc

SEQ ID NO: 5236776 - DNA, 25 bp, Homo sapien
ggaggcaagcagcaaccactaagtg

SEQ ID NO: 5236777 - DNA, 25 bp, Homo sapien
tccaataggagtgtcaaggacctct

SEQ ID NO: 5236778 - DNA, 25 bp, Homo sapien
tgagcagccaatgatgcccaggact

SEQ ID NO: 5236779 - DNA, 25 bp, Homo sapien
aactgtcaacatggccttaggaccg

SEQ ID NO: 5236780 - DNA, 25 bp, Homo sapien
taaagtccttactattgagcagcca

SEQ ID NO: 5236781 - DNA, 25 bp, Homo sapien
aatagattggttgtgttgtacaggg

SEQ ID NO: 5236782 - DNA, 25 bp, Homo sapien
tccctctccagttagggcaatggaa

SEQ ID NO: 5236783 - DNA, 25 bp, Homo sapien
tctcagggggcaagccaaagaactg

SEQ ID NO: 5236784 - DNA, 25 bp, Homo sapien
tcatggagtaaaccagctcaaccag

SEQ ID NO: 5236785 - DNA, 25 bp, Homo sapien
ccttcctccaaatagactaggtaag

SEQ ID NO: 5236786 - DNA, 25 bp, Homo sapien
tattgtgggcattcaatacaaaagt

SEQ ID NO: 5236787 - DNA, 25 bp, Homo sapien
gaggtaaatgtggtatgtaagtccc

SEQ ID NO: 5236788 - DNA, 25 bp, Homo sapien
tagctgaatacctcatattgtgggc

SEQ ID NO: 5236789 - DNA, 25 bp, Homo sapien
gaaggtgtgaccatgcaaagtgccc

SEQ ID NO: 5236790 - DNA, 25 bp, Homo sapien
aaaatatctcgatggcagctccacc

SEQ ID NO: 5236791 - DNA, 25 bp, Homo sapien
gagctatctagaccctgttctggca

SEQ ID NO: 5236792 - DNA, 25 bp, Homo sapien
caaagtgccctctatgtcctacgta

SEQ ID NO: 5236793 - DNA, 25 bp, Homo sapien
tatgtactttggctagggtgacagg

SEQ ID NO: 5236794 - DNA, 25 bp, Homo sapien
cttgaaaccaagagaaggtacctgt

SEQ ID NO: 5236795 - DNA, 25 bp, Homo sapien
tgacaactgccccttcgtacagctg

SEQ ID NO: 5236796 - DNA, 25 bp, Homo sapien
ccccttcgtacagctgttaggtcca

SEQ ID NO: 5236797 - DNA, 25 bp, Homo sapien
cacaggtaagccttaatcttagagg

SEQ ID NO: 5236798 - DNA, 25 bp, Homo sapien
gggattcgaacaacagtcacaggta

SEQ ID NO: 5236799 - DNA, 25 bp, Homo sapien
ccaggagaggagatccctgtctgcc

SEQ ID NO: 5236800 - DNA, 25 bp, Homo sapien
cttgggtaactaattcagctgagaa

SEQ ID NO: 5236801 - DNA, 25 bp, Homo sapien
tagatccccggatattaatgagcgg

SEQ ID NO: 5236802 - DNA, 25 bp, Homo sapien
tcactgatccaacgctggtgaaggg

SEQ ID NO: 5236803 - DNA, 25 bp, Homo sapien
tttgccgagagcaacatatgactgc

SEQ ID NO: 5236804 - DNA, 25 bp, Homo sapien
taatgagcgggcaaactctgctaca

SEQ ID NO: 5236805 - DNA, 25 bp, Homo sapien
tgacacagatgggttttagaaaacc

SEQ ID NO: 5236806 - DNA, 25 bp, Homo sapien
tagaaaaccaccacctgctattgac

SEQ ID NO: 5236807 - DNA, 25 bp, Homo sapien
gctattgacccttcttgtgttttca

SEQ ID NO: 5236808 - DNA, 25 bp, Homo sapien
ggcagtccctggcattccatgtatc

SEQ ID NO: 5236809 - DNA, 25 bp, Homo sapien
gcatcatatattatcaggcaccttg

SEQ ID NO: 5236810 - DNA, 25 bp, Homo sapien
taactattctgagtaggctttggtg

SEQ ID NO: 5236811 - DNA, 25 bp, Homo sapien
tggtgtccccagtttactaactgaa

SEQ ID NO: 5236812 - DNA, 25 bp, Homo sapien
ccatagtttggtaatattaacacgc

SEQ ID NO: 5236813 - DNA, 25 bp, Homo sapien
taattcactgattgttggacatatg

SEQ ID NO: 5236814 - DNA, 25 bp, Homo sapien
gttaattcactgattgttggacata

SEQ ID NO: 5236815 - DNA, 25 bp, Homo sapien
tctaagggtattccactgaacagag

SEQ ID NO: 5236816 - DNA, 25 bp, Homo sapien
ttatatctaagggtattccactgaa

SEQ ID NO: 5236817 - DNA, 25 bp, Homo sapien
gctgtacttcctcgctaacacttgg

SEQ ID NO: 5236818 - DNA, 25 bp, Homo sapien
tctcgcttagcttcatccatggtgt

SEQ ID NO: 5236819 - DNA, 25 bp, Homo sapien
taagtgcacaatttgacaagttccc

SEQ ID NO: 5236820 - DNA, 25 bp, Homo sapien
taagaaactgttagtggtccacagg

SEQ ID NO: 5236821 - DNA, 25 bp, Homo sapien
gatgtcaatcgaacagtctttccaa

SEQ ID NO: 5236822 - DNA, 25 bp, Homo sapien
caagtggacttggtgatgtttatct

SEQ ID NO: 5236823 - DNA, 25 bp, Homo sapien
tcatgattattccagagaggtgcac

SEQ ID NO: 5236824 - DNA, 25 bp, Homo sapien
gcatttaccaagctcatgaatcctg

SEQ ID NO: 5236825 - DNA, 25 bp, Homo sapien
tcacagttcattagacaggtcattt

SEQ ID NO: 5236826 - DNA, 25 bp, Homo sapien
acagttcattagacaggtcatttgt

SEQ ID NO: 5236827 - DNA, 25 bp, Homo sapien
cacagttcattagacaggtcatttg

SEQ ID NO: 5236828 - DNA, 25 bp, Homo sapien
cccagcccataataagaaattctta

SEQ ID NO: 5236829 - DNA, 25 bp, Homo sapien
gaaattcttaatgccaaagattctg

SEQ ID NO: 5236830 - DNA, 25 bp, Homo sapien
attcttaatgccaaagattctgatt

SEQ ID NO: 5236831 - DNA, 25 bp, Homo sapien
tgtgcccagcccataataagaaatt

SEQ ID NO: 5236832 - DNA, 25 bp, Homo sapien
tgtttgtctgttctaacctgctggg

SEQ ID NO: 5236833 - DNA, 25 bp, Homo sapien
gaaggactgaggctaggtacccatc

SEQ ID NO: 5236834 - DNA, 25 bp, Homo sapien
ggtagcagtcttgcagaaagcagcc

SEQ ID NO: 5236835 - DNA, 25 bp, Homo sapien
tattaaatcaaggaggcacaagact

SEQ ID NO: 5236836 - DNA, 25 bp, Homo sapien
tttctgttctcagattcgcaaagtc

SEQ ID NO: 5236837 - DNA, 25 bp, Homo sapien
ttctgttctcagattcgcaaagtca

SEQ ID NO: 5236838 - DNA, 25 bp, Homo sapien
cagcgagattctttcgaaatcggga

SEQ ID NO: 5236839 - DNA, 25 bp, Homo sapien
cacctttgggtcgagtgctgagtcc

SEQ ID NO: 5236840 - DNA, 25 bp, Homo sapien
gaggcctctcaaataacttttcgct

SEQ ID NO: 5236841 - DNA, 25 bp, Homo sapien
gtgctcgcgcgcctgcacctttggg

SEQ ID NO: 5236842 - DNA, 25 bp, Homo sapien
cagctgtcctagacgtggaatctcc

SEQ ID NO: 5236843 - DNA, 25 bp, Homo sapien
gaatctcctctaagctccgttgccg

SEQ ID NO: 5236844 - DNA, 25 bp, Homo sapien
agaagcgcagctgtcctagacgtgg

SEQ ID NO: 5236845 - DNA, 25 bp, Homo sapien
ggcggcagggatcgcggccttggct

SEQ ID NO: 5236846 - DNA, 25 bp, Homo sapien
tggtgcagttgcagggcatagcctt

SEQ ID NO: 5236847 - DNA, 25 bp, Homo sapien
actggtgcagttgcagggcatagcc

SEQ ID NO: 5236848 - DNA, 25 bp, Homo sapien
aactggtgcagttgcagggcatagc

SEQ ID NO: 5236849 - DNA, 25 bp, Homo sapien
gtaactggtgcagttgcagggcata

SEQ ID NO: 5236850 - DNA, 25 bp, Homo sapien
tcttaaagcaatgcgataggcatga

SEQ ID NO: 5236851 - DNA, 25 bp, Homo sapien
acaaaggttacagcagcctgcttat

SEQ ID NO: 5236852 - DNA, 25 bp, Homo sapien
gcctgcttatgtgacttgagtgcca

SEQ ID NO: 5236853 - DNA, 25 bp, Homo sapien
catgaaatctttgcgtgagaaaggt

SEQ ID NO: 5236854 - DNA, 25 bp, Homo sapien
tcacccttgaggcatttactgggtc

SEQ ID NO: 5236855 - DNA, 25 bp, Homo sapien
cccttgaggcatttactgggtctct

SEQ ID NO: 5236856 - DNA, 25 bp, Homo sapien
ttgaggcatttactgggtctctccc

SEQ ID NO: 5236857 - DNA, 25 bp, Homo sapien
tctcacccttgaggcatttactggg

SEQ ID NO: 5236858 - DNA, 25 bp, Homo sapien
catcctcaaggacaactttatagat

SEQ ID NO: 5236859 - DNA, 25 bp, Homo sapien
ttgggccatgttccctgttctgcta

SEQ ID NO: 5236860 - DNA, 25 bp, Homo sapien
actttatagatgtctaccagatggc

SEQ ID NO: 5236861 - DNA, 25 bp, Homo sapien
caaggacaactttatagatgtctac

SEQ ID NO: 5236862 - DNA, 25 bp, Homo sapien
agactttgagaccttgaaccttggg

SEQ ID NO: 5236863 - DNA, 25 bp, Homo sapien
tgaagcccttcacaatctagagccc

SEQ ID NO: 5236864 - DNA, 25 bp, Homo sapien
tctagagcccaaagagtaggtcttc

SEQ ID NO: 5236865 - DNA, 25 bp, Homo sapien
gaagggtccctccacatacttggaa

SEQ ID NO: 5236866 - DNA, 25 bp, Homo sapien
caagtttttgttaacctgccggctg

SEQ ID NO: 5236867 - DNA, 25 bp, Homo sapien
agcagctagatgaacaggaacttac

SEQ ID NO: 5236868 - DNA, 25 bp, Homo sapien
gaggcagttctttggtatggccgca

SEQ ID NO: 5236869 - DNA, 25 bp, Homo sapien
tgtgacgtttatggtagcagctaga

SEQ ID NO: 5236870 - DNA, 25 bp, Homo sapien
cagccttttccgacactgggcacaa

SEQ ID NO: 5236871 - DNA, 25 bp, Homo sapien
gtcattggggcaccgagaaataccc

SEQ ID NO: 5236872 - DNA, 25 bp, Homo sapien
gccttttccgacactgggcacaagt

SEQ ID NO: 5236873 - DNA, 25 bp, Homo sapien
cattggggcaccgagaaatacccat

SEQ ID NO: 5236874 - DNA, 25 bp, Homo sapien
gatgaacaggactagggcagaaacc

SEQ ID NO: 5236875 - DNA, 25 bp, Homo sapien
tgagccttgaagactgattgccctg

SEQ ID NO: 5236876 - DNA, 25 bp, Homo sapien
tcctcctggaacaccgaagaatggg

SEQ ID NO: 5236877 - DNA, 25 bp, Homo sapien
aaaaccccttggctgcggtctagca

SEQ ID NO: 5236878 - DNA, 25 bp, Homo sapien
aaaattagcatgtaatcgtaactca

SEQ ID NO: 5236879 - DNA, 25 bp, Homo sapien
aatatgcatacactacttctgcaag

SEQ ID NO: 5236880 - DNA, 25 bp, Homo sapien
cactacttctgcaagttatttcaat

SEQ ID NO: 5236881 - DNA, 25 bp, Homo sapien
ctattaaatgtggtatatagccaca

SEQ ID NO: 5236882 - DNA, 25 bp, Homo sapien
tcttcacatcttaacctagtctttt

SEQ ID NO: 5236883 - DNA, 25 bp, Homo sapien
tggaaaaagcatggagtaacaacgc

SEQ ID NO: 5236884 - DNA, 25 bp, Homo sapien
caacgcaagtagttctgtttcttca

SEQ ID NO: 5236885 - DNA, 25 bp, Homo sapien
taattccgattgttcttagcctagt

SEQ ID NO: 5236886 - DNA, 25 bp, Homo sapien
tttagctaagccatgccttcttcct

SEQ ID NO: 5236887 - DNA, 25 bp, Homo sapien
aaagcctctgagactacttcctggc

SEQ ID NO: 5236888 - DNA, 25 bp, Homo sapien
cttaacaaggatctacttatgtaag

SEQ ID NO: 5236889 - DNA, 25 bp, Homo sapien
catgctcctcagttagtttacttag

SEQ ID NO: 5236890 - DNA, 25 bp, Homo sapien
actggccaggttcacgtgcatctga

SEQ ID NO: 5236891 - DNA, 25 bp, Homo sapien
tggaccgtacttggccttgtaaagc

SEQ ID NO: 5236892 - DNA, 25 bp, Homo sapien
catctgaggccctaagtaggacatc

SEQ ID NO: 5236893 - DNA, 25 bp, Homo sapien
tgaacggcccataggtcaggtcgtg

SEQ ID NO: 5236894 - DNA, 25 bp, Homo sapien
gcagctggtccagtcgagtcataaa

SEQ ID NO: 5236895 - DNA, 25 bp, Homo sapien
cagctggtaccagtggtgtccttcc

SEQ ID NO: 5236896 - DNA, 25 bp, Homo sapien
agttgagccatgtccgacacctggt

SEQ ID NO: 5236897 - DNA, 25 bp, Homo sapien
cattgaaagcatccgtatagagcgc

SEQ ID NO: 5236898 - DNA, 25 bp, Homo sapien
accaggacatatggaatccaggagc

SEQ ID NO: 5236899 - DNA, 25 bp, Homo sapien
gaaccaggacatatggaatccagga

SEQ ID NO: 5236900 - DNA, 25 bp, Homo sapien
aaccaggacatatggaatccaggag

SEQ ID NO: 5236901 - DNA, 25 bp, Homo sapien
gcgtttctcgaacaggatgtagcaa

SEQ ID NO: 5236902 - DNA, 25 bp, Homo sapien
taacccgatggatctgacgaaggtc

SEQ ID NO: 5236903 - DNA, 25 bp, Homo sapien
tccaggtatcgcttccagaaaggca

SEQ ID NO: 5236904 - DNA, 25 bp, Homo sapien
tgagttctggaacattaacccgatg

SEQ ID NO: 5236905 - DNA, 25 bp, Homo sapien
tgggcctccatatcttcgagcttct

SEQ ID NO: 5236906 - DNA, 25 bp, Homo sapien
tcttcgagcttctcatcaatcagct

SEQ ID NO: 5236907 - DNA, 25 bp, Homo sapien
ctgcagttgggcctccatatcttcg

SEQ ID NO: 5236908 - DNA, 25 bp, Homo sapien
gtagccagacacctggatgccatct

SEQ ID NO: 5236909 - DNA, 25 bp, Homo sapien
agctttgagcaacggcatgtgggca

SEQ ID NO: 5236910 - DNA, 25 bp, Homo sapien
cgcagagtctccttaagcacagctt

SEQ ID NO: 5236911 - DNA, 25 bp, Homo sapien
catgtgggcaaagtccttgtgctgg

SEQ ID NO: 5236912 - DNA, 25 bp, Homo sapien
tggtacagggcccatgtcagcgtgt

SEQ ID NO: 5236913 - DNA, 25 bp, Homo sapien
ccttttctatgatccgggagtttgt

SEQ ID NO: 5236914 - DNA, 25 bp, Homo sapien
gaggaagccatcaacttcaatttcc

SEQ ID NO: 5236915 - DNA, 25 bp, Homo sapien
ggaagaggaagccatcaacttcaat

SEQ ID NO: 5236916 - DNA, 25 bp, Homo sapien
tccttttctatgatccgggagtttg

SEQ ID NO: 5236917 - DNA, 25 bp, Homo sapien
tggaagctttcaggctcagagaagg

SEQ ID NO: 5236918 - DNA, 25 bp, Homo sapien
tcccgggacaccacatagtggcaga

SEQ ID NO: 5236919 - DNA, 25 bp, Homo sapien
gcccggaccccatagccaaagggca

SEQ ID NO: 5236920 - DNA, 25 bp, Homo sapien
gctctgcaatcctgcggcccaggca

SEQ ID NO: 5236921 - DNA, 25 bp, Homo sapien
ttgggaaccaggacaatgcgggcca

SEQ ID NO: 5236922 - DNA, 25 bp, Homo sapien
aaccaggacaatgcgggccacactc

SEQ ID NO: 5236923 - DNA, 25 bp, Homo sapien
tattgggaaccaggacaatgcgggc

SEQ ID NO: 5236924 - DNA, 25 bp, Homo sapien
tttcttattgggaaccaggacaatg

SEQ ID NO: 5236925 - DNA, 25 bp, Homo sapien
gtctctgcaggaactgcaggcccac

SEQ ID NO: 5236926 - DNA, 25 bp, Homo sapien
tcagcactgtctctgcaggaactgc

SEQ ID NO: 5236927 - DNA, 25 bp, Homo sapien
cactgtctctgcaggaactgcaggc

SEQ ID NO: 5236928 - DNA, 25 bp, Homo sapien
tgtctctgcaggaactgcaggccca

SEQ ID NO: 5236929 - DNA, 25 bp, Homo sapien
ctaggacaagccccagcaaggcgga

SEQ ID NO: 5236930 - DNA, 25 bp, Homo sapien
acaagccccagcaaggcggagactc

SEQ ID NO: 5236931 - DNA, 25 bp, Homo sapien
aagccccagcaaggcggagactcag

SEQ ID NO: 5236932 - DNA, 25 bp, Homo sapien
aggacaagccccagcaaggcggaga

SEQ ID NO: 5236933 - DNA, 25 bp, Homo sapien
gctcaaaaatgatagaagtggcaaa

SEQ ID NO: 5236934 - DNA, 25 bp, Homo sapien
agttcctcccacctctcgagtctgg

SEQ ID NO: 5236935 - DNA, 25 bp, Homo sapien
ccaaggacagcaatgcgataaaggg

SEQ ID NO: 5236936 - DNA, 25 bp, Homo sapien
tagaagtggcaaaagctcagggtgt

SEQ ID NO: 5236937 - DNA, 25 bp, Homo sapien
gcgaccaattgaggcgccacctcaa

SEQ ID NO: 5236938 - DNA, 25 bp, Homo sapien
tgggcgaccaattgaggcgccacct

SEQ ID NO: 5236939 - DNA, 25 bp, Homo sapien
caaaatatacaattcggtgatattt

SEQ ID NO: 5236940 - DNA, 25 bp, Homo sapien
accctgggcgaccaattgaggcgcc

SEQ ID NO: 5236941 - DNA, 25 bp, Homo sapien
tgattatattcgtcccaatgccatg

SEQ ID NO: 5236942 - DNA, 25 bp, Homo sapien
tgtgactacacctcatcaaagggta

SEQ ID NO: 5236943 - DNA, 25 bp, Homo sapien
catgttggcgggctttctagtggca

SEQ ID NO: 5236944 - DNA, 25 bp, Homo sapien
taaacagaggtcatttcacgtacac

SEQ ID NO: 5236945 - DNA, 25 bp, Homo sapien
catgtaagactctgttcctcggcta

SEQ ID NO: 5236946 - DNA, 25 bp, Homo sapien
tggaagattctagctcctggccctg

SEQ ID NO: 5236947 - DNA, 25 bp, Homo sapien
catcagttggtcatgcaaggtctgc

SEQ ID NO: 5236948 - DNA, 25 bp, Homo sapien
attaggaaccccgtttcagcaggtg

SEQ ID NO: 5236949 - DNA, 25 bp, Homo sapien
gggcagagagaggaaagccggagca

SEQ ID NO: 5236950 - DNA, 25 bp, Homo sapien
aggggcagagagaggaaagccggag

SEQ ID NO: 5236951 - DNA, 25 bp, Homo sapien
ggcagagagaggaaagccggagcag

SEQ ID NO: 5236952 - DNA, 25 bp, Homo sapien
cagagagaggaaagccggagcagct

SEQ ID NO: 5236953 - DNA, 25 bp, Homo sapien
ctccccattggcagagtaggaacat

SEQ ID NO: 5236954 - DNA, 25 bp, Homo sapien
aacattgagggttgatggaaaacac

SEQ ID NO: 5236955 - DNA, 25 bp, Homo sapien
taataaactcagacagaaattcacc

SEQ ID NO: 5236956 - DNA, 25 bp, Homo sapien
tgttgagtgtccactccagggccag

SEQ ID NO: 5236957 - DNA, 25 bp, Homo sapien
tcctatgtagcctctggcttttcct

SEQ ID NO: 5236958 - DNA, 25 bp, Homo sapien
tgggaagctgttgtttatccaatat

SEQ ID NO: 5236959 - DNA, 25 bp, Homo sapien
ttatccaatatcctttgtcccacac

SEQ ID NO: 5236960 - DNA, 25 bp, Homo sapien
cacactggcaaacttgtgctttctg

SEQ ID NO: 5236961 - DNA, 25 bp, Homo sapien
gagttccatctgagtacggcaccca

SEQ ID NO: 5236962 - DNA, 25 bp, Homo sapien
caggtagatggacaccctatggtct

SEQ ID NO: 5236963 - DNA, 25 bp, Homo sapien
taaaacactgactcatgctgagcac

SEQ ID NO: 5236964 - DNA, 25 bp, Homo sapien
ttcaaaaggaggcaagtcagagttc

SEQ ID NO: 5236965 - DNA, 25 bp, Homo sapien
tactatctgcaaaagaagctgtgaa

SEQ ID NO: 5236966 - DNA, 25 bp, Homo sapien
ttactaacagcagaagaagggtaga

SEQ ID NO: 5236967 - DNA, 25 bp, Homo sapien
gcattttccatcgttgggttcagtt

SEQ ID NO: 5236968 - DNA, 25 bp, Homo sapien
ccggctcccatcatcgtattgtaat

SEQ ID NO: 5236969 - DNA, 25 bp, Homo sapien
atttgccctgccagacgatgagtgg

SEQ ID NO: 5236970 - DNA, 25 bp, Homo sapien
tgctgatttgccctgccagacgatg

SEQ ID NO: 5236971 - DNA, 25 bp, Homo sapien
cctgccagacgatgagtggaggcag

SEQ ID NO: 5236972 - DNA, 25 bp, Homo sapien
tcctgctgatttgccctgccagacg

SEQ ID NO: 5236973 - DNA, 25 bp, Homo sapien
gaagatgctcctgtttgcattgtgt

SEQ ID NO: 5236974 - DNA, 25 bp, Homo sapien
tccacaatgaacacagtatgttgtt

SEQ ID NO: 5236975 - DNA, 25 bp, Homo sapien
ccgtggtcagcagaaacttgaggat

SEQ ID NO: 5236976 - DNA, 25 bp, Homo sapien
ccttggggcactcttctgaggatat

SEQ ID NO: 5236977 - DNA, 25 bp, Homo sapien
caatgaacacagtatgttgttgttt

SEQ ID NO: 5236978 - DNA, 25 bp, Homo sapien
ggggtggcaggaggtaacagaccat

SEQ ID NO: 5236979 - DNA, 25 bp, Homo sapien
catcaacctttaaagctgtcctgga

SEQ ID NO: 5236980 - DNA, 25 bp, Homo sapien
catgccattcggctggcagtgggca

SEQ ID NO: 5236981 - DNA, 25 bp, Homo sapien
gacagatcgagtccctatggcagaa

SEQ ID NO: 5236982 - DNA, 25 bp, Homo sapien
aaaaatgtctttgatgcccctggcc

SEQ ID NO: 5236983 - DNA, 25 bp, Homo sapien
cgggtagaaggggtgggagagccag

SEQ ID NO: 5236984 - DNA, 25 bp, Homo sapien
aggcggagagcggacggggcagcca

SEQ ID NO: 5236985 - DNA, 25 bp, Homo sapien
gggcttcagtgcgagcgcggcgagc

SEQ ID NO: 5236986 - DNA, 25 bp, Homo sapien
gggcgaaccgcggcgcgcgagggcc

SEQ ID NO: 5236987 - DNA, 25 bp, Homo sapien
cgagggcccgggcttcagtgcgagc

SEQ ID NO: 5236988 - DNA, 25 bp, Homo sapien
acagtccgccgacgtgcgccgggca

SEQ ID NO: 5236989 - DNA, 25 bp, Homo sapien
caccacagtccgccgacgtgcgccg

SEQ ID NO: 5236990 - DNA, 25 bp, Homo sapien
ccacagtccgccgacgtgcgccggg

SEQ ID NO: 5236991 - DNA, 25 bp, Homo sapien
agtccgccgacgtgcgccgggcaca

SEQ ID NO: 5236992 - DNA, 25 bp, Homo sapien
tcctcggatatgtgtcttcccgaaa

SEQ ID NO: 5236993 - DNA, 25 bp, Homo sapien
tgtgtcttcccgaaagatctttcct

SEQ ID NO: 5236994 - DNA, 25 bp, Homo sapien
acattcttttcctcggatatgtgtc

SEQ ID NO: 5236995 - DNA, 25 bp, Homo sapien
agatctttcctacccactcgcctgt

SEQ ID NO: 5236996 - DNA, 25 bp, Homo sapien
gggaaagctgccagctgaagtgaga

SEQ ID NO: 5236997 - DNA, 25 bp, Homo sapien
tgggaaagctgccagctgaagtgag

SEQ ID NO: 5236998 - DNA, 25 bp, Homo sapien
aggcattcccttccctgacagactt

SEQ ID NO: 5236999 - DNA, 25 bp, Homo sapien
aaagggcttcctattggtcagggct

SEQ ID NO: 5237000 - DNA, 25 bp, Homo sapien
agacttcgctgtacaaaagggcttc

SEQ ID NO: 5237001 - DNA, 25 bp, Homo sapien
ttccctgacagacttcgctgtacaa

SEQ ID NO: 5237002 - DNA, 25 bp, Homo sapien
ccctcgttatgcagatgagcaagac

SEQ ID NO: 5237003 - DNA, 25 bp, Homo sapien
gtcagagggccaagaacaatgtcag

SEQ ID NO: 5237004 - DNA, 25 bp, Homo sapien
agcaagacaggaggcgactgactct

SEQ ID NO: 5237005 - DNA, 25 bp, Homo sapien
atgtcagagatcacccagttcagcc

SEQ ID NO: 5237006 - DNA, 25 bp, Homo sapien
tcctgcagatgctggtagggtccat

SEQ ID NO: 5237007 - DNA, 25 bp, Homo sapien
ctggagcaattccagcggcggaagc

SEQ ID NO: 5237008 - DNA, 25 bp, Homo sapien
ggctcagcctggcacaactcggcct

SEQ ID NO: 5237009 - DNA, 25 bp, Homo sapien
tgcaggatgcgtccaaaggccttgc

SEQ ID NO: 5237010 - DNA, 25 bp, Homo sapien
tgatggcgaacacgaaggccgtctc

SEQ ID NO: 5237011 - DNA, 25 bp, Homo sapien
cgccggccgcagtgatggcgaacac

SEQ ID NO: 5237012 - DNA, 25 bp, Homo sapien
tgcgtgacggcgtggctggcgccgg

SEQ ID NO: 5237013 - DNA, 25 bp, Homo sapien
gcccatagaacaggcctgcgtgacg

SEQ ID NO: 5237014 - DNA, 25 bp, Homo sapien
gcccgcggggcgcctggcagccgca

SEQ ID NO: 5237015 - DNA, 25 bp, Homo sapien
cccgcggggcgcctggcagccgcac

SEQ ID NO: 5237016 - DNA, 25 bp, Homo sapien
cccgcccgcggggcgcctggcagcc

SEQ ID NO: 5237017 - DNA, 25 bp, Homo sapien
gggcccgcccgcggggcgcctggca

SEQ ID NO: 5237018 - DNA, 25 bp, Homo sapien
ttgtgccgcgcgtccataaagagcc

SEQ ID NO: 5237019 - DNA, 25 bp, Homo sapien
ataaagagcctcgacttctcgtccc

SEQ ID NO: 5237020 - DNA, 25 bp, Homo sapien
ggatgtctccgcgtccccgcttgtg

SEQ ID NO: 5237021 - DNA, 25 bp, Homo sapien
gcagttgcaccaacgcgcggatgtc

SEQ ID NO: 5237022 - DNA, 25 bp, Homo sapien
gggcccagcggatggacagaaaata

SEQ ID NO: 5237023 - DNA, 25 bp, Homo sapien
gcagaggggcggacgcatgtggaca

SEQ ID NO: 5237024 - DNA, 25 bp, Homo sapien
aagggcccagcggatggacagaaaa

SEQ ID NO: 5237025 - DNA, 25 bp, Homo sapien
gcccagcggatggacagaaaataag

SEQ ID NO: 5237026 - DNA, 25 bp, Homo sapien
tggaagcggcacaggcagttctctt

SEQ ID NO: 5237027 - DNA, 25 bp, Homo sapien
cctcgcgaaatggaggcagcttctg

SEQ ID NO: 5237028 - DNA, 25 bp, Homo sapien
gacagcccgtggcatttgcactcgg

SEQ ID NO: 5237029 - DNA, 25 bp, Homo sapien
gtggcactgtactacgcagcaccag

SEQ ID NO: 5237030 - DNA, 25 bp, Homo sapien
aggcagaggctgagctccttgcgca

SEQ ID NO: 5237031 - DNA, 25 bp, Homo sapien
ggcagaggctgagctccttgcgcac

SEQ ID NO: 5237032 - DNA, 25 bp, Homo sapien
cgtgggtgggcgttcctctcaagcc

SEQ ID NO: 5237033 - DNA, 25 bp, Homo sapien
gctgcgcgaagtcagtctagcggcc

SEQ ID NO: 5237034 - DNA, 25 bp, Homo sapien
ggagcccagtatccagaggccttta

SEQ ID NO: 5237035 - DNA, 25 bp, Homo sapien
ggtgccggtgccctgaggtcccaca

SEQ ID NO: 5237036 - DNA, 25 bp, Homo sapien
aggcgtgtacgagtcccgaggccac

SEQ ID NO: 5237037 - DNA, 25 bp, Homo sapien
agggctctaccccacgtgacgtcac

SEQ ID NO: 5237038 - DNA, 25 bp, Homo sapien
agagtaagtgactgtcccggctcgg

SEQ ID NO: 5237039 - DNA, 25 bp, Homo sapien
tgtacgagtcccgaggccactgcgt

SEQ ID NO: 5237040 - DNA, 25 bp, Homo sapien
agagcgggcgaaccgggcacctcct

SEQ ID NO: 5237041 - DNA, 25 bp, Homo sapien
gggcggctgcgacacacagctccga

SEQ ID NO: 5237042 - DNA, 25 bp, Homo sapien
tccgactcgggtcagggctcccgga

SEQ ID NO: 5237043 - DNA, 25 bp, Homo sapien
gacaactcccggtgcctctcaaggg

SEQ ID NO: 5237044 - DNA, 25 bp, Homo sapien
gagcacccagagcgctggccgcggc

SEQ ID NO: 5237045 - DNA, 25 bp, Homo sapien
caggggcgagggtgggcgctgccca

SEQ ID NO: 5237046 - DNA, 25 bp, Homo sapien
aggagcacccagagcgctggccgcg

SEQ ID NO: 5237047 - DNA, 25 bp, Homo sapien
aggggcgagggtgggcgctgcccat

SEQ ID NO: 5237048 - DNA, 25 bp, Homo sapien
ggatcttgttgcgagtctccaggct

SEQ ID NO: 5237049 - DNA, 25 bp, Homo sapien
tgtgttggcattgagcacgggctcc

SEQ ID NO: 5237050 - DNA, 25 bp, Homo sapien
gatggcgatctggatgccctgtatg

SEQ ID NO: 5237051 - DNA, 25 bp, Homo sapien
acatcagggtgacgcacacacacct

SEQ ID NO: 5237052 - DNA, 25 bp, Homo sapien
ccagcgagccactcagggcacctgg

SEQ ID NO: 5237053 - DNA, 25 bp, Homo sapien
ctcagggcacctggattcactcggt

SEQ ID NO: 5237054 - DNA, 25 bp, Homo sapien
cagcgagccactcagggcacctgga

SEQ ID NO: 5237055 - DNA, 25 bp, Homo sapien
ccactcagggcacctggattcactc

SEQ ID NO: 5237056 - DNA, 25 bp, Homo sapien
ctgcgctgttctgccgctctgaact

SEQ ID NO: 5237057 - DNA, 25 bp, Homo sapien
caggcttcaaagaccccaaggtcct

SEQ ID NO: 5237058 - DNA, 25 bp, Homo sapien
ctcgagcttattaaactgcaggtga

SEQ ID NO: 5237059 - DNA, 25 bp, Homo sapien
actgcaggtgaacccgggagcgcct

SEQ ID NO: 5237060 - DNA, 25 bp, Homo sapien
gctcctgttcagggccccagtttcg

SEQ ID NO: 5237061 - DNA, 25 bp, Homo sapien
agctcctgttcagggccccagtttc

SEQ ID NO: 5237062 - DNA, 25 bp, Homo sapien
tcagggccccagtttcggttctggc

SEQ ID NO: 5237063 - DNA, 25 bp, Homo sapien
ctcctgttcagggccccagtttcgg

SEQ ID NO: 5237064 - DNA, 25 bp, Homo sapien
agggcacacgcattggacacggcgt

SEQ ID NO: 5237065 - DNA, 25 bp, Homo sapien
taggcaaaagcgctctctcggaaac

SEQ ID NO: 5237066 - DNA, 25 bp, Homo sapien
gtaagcggtgcagcttcctacggaa

SEQ ID NO: 5237067 - DNA, 25 bp, Homo sapien
agctgctgcgatggcgtaggcaaaa

SEQ ID NO: 5237068 - DNA, 25 bp, Homo sapien
ctgggtgttccgggaccccatggct

SEQ ID NO: 5237069 - DNA, 25 bp, Homo sapien
gctgggtgttccgggaccccatggc

SEQ ID NO: 5237070 - DNA, 25 bp, Homo sapien
cagaaagtccttagaaaagcgctcc

SEQ ID NO: 5237071 - DNA, 25 bp, Homo sapien
tcattctcgcgtggatgtctctgtg

SEQ ID NO: 5237072 - DNA, 25 bp, Homo sapien
tgaggctcccgggagtccagaaagt

SEQ ID NO: 5237073 - DNA, 25 bp, Homo sapien
ccaactcggttgttgtgaagcctca

SEQ ID NO: 5237074 - DNA, 25 bp, Homo sapien
ggcagggaaattccctctcctgcca

SEQ ID NO: 5237075 - DNA, 25 bp, Homo sapien
taggcagggaaattccctctcctgc

SEQ ID NO: 5237076 - DNA, 25 bp, Homo sapien
aataggcagggaaattccctctcct

SEQ ID NO: 5237077 - DNA, 25 bp, Homo sapien
gatcccaaataggcagggaaattcc

SEQ ID NO: 5237078 - DNA, 25 bp, Homo sapien
tctcctgcccgcctttccagcagct

SEQ ID NO: 5237079 - DNA, 25 bp, Homo sapien
gcagctgcagggggcccttggggct

SEQ ID NO: 5237080 - DNA, 25 bp, Homo sapien
ccctcctctcctgcccgcctttcca

SEQ ID NO: 5237081 - DNA, 25 bp, Homo sapien
cctgcccgcctttccagcagctgca

SEQ ID NO: 5237082 - DNA, 25 bp, Homo sapien
gccagcacgtcttgagctggcagct

SEQ ID NO: 5237083 - DNA, 25 bp, Homo sapien
gcagctgcctgacgtgccgtggcac

SEQ ID NO: 5237084 - DNA, 25 bp, Homo sapien
gctgcctgacgtgccgtggcacttg

SEQ ID NO: 5237085 - DNA, 25 bp, Homo sapien
ggcacttgcacttccgccgcatgtt

SEQ ID NO: 5237086 - DNA, 25 bp, Homo sapien
gctccagctggccgccgttgcggtt

SEQ ID NO: 5237087 - DNA, 25 bp, Homo sapien
agcgtggcgcggtggaagcggctgc

SEQ ID NO: 5237088 - DNA, 25 bp, Homo sapien
cttttcgaagtagaccaggtcggcg

SEQ ID NO: 5237089 - DNA, 25 bp, Homo sapien
ttgtgcggccggatgagcgtggcgc

SEQ ID NO: 5237090 - DNA, 25 bp, Homo sapien
tcggtgatgcggcactcttcgcaga

SEQ ID NO: 5237091 - DNA, 25 bp, Homo sapien
gaccacgaaacagcaccagtggaag

SEQ ID NO: 5237092 - DNA, 25 bp, Homo sapien
ttgcagacgctgacccactcggtga

SEQ ID NO: 5237093 - DNA, 25 bp, Homo sapien
tctggcgcaggatgttgtggccgcg

SEQ ID NO: 5237094 - DNA, 25 bp, Homo sapien
acagactgacgggttgcctggctga

SEQ ID NO: 5237095 - DNA, 25 bp, Homo sapien
ttgccaagaccgtaagcctcagagg

SEQ ID NO: 5237096 - DNA, 25 bp, Homo sapien
ccagagtgccgcaaagagagtgcaa

SEQ ID NO: 5237097 - DNA, 25 bp, Homo sapien
ttcccaagagccaaggcgatgctgc

SEQ ID NO: 5237098 - DNA, 25 bp, Homo sapien
cccaggctccggtaggggtaatcag

SEQ ID NO: 5237099 - DNA, 25 bp, Homo sapien
gctgctgcaattggcggcgcagacc

SEQ ID NO: 5237100 - DNA, 25 bp, Homo sapien
tgcgtgctgctgcaattggcggcgc

SEQ ID NO: 5237101 - DNA, 25 bp, Homo sapien
tccggtaggggtaatcagctgctgc

SEQ ID NO: 5237102 - DNA, 25 bp, Homo sapien
taactggggctacgcgccccaaggc

SEQ ID NO: 5237103 - DNA, 25 bp, Homo sapien
aggcccgaaagctgatgcgccgccg

SEQ ID NO: 5237104 - DNA, 25 bp, Homo sapien
gctgtgtcctcagcagttcgcggtg

SEQ ID NO: 5237105 - DNA, 25 bp, Homo sapien
gccccaaggcccgaaagctgatgcg

SEQ ID NO: 5237106 - DNA, 25 bp, Homo sapien
tggctcagtctctgtaaccccaaca

SEQ ID NO: 5237107 - DNA, 25 bp, Homo sapien
atattagctcttgtcaggaggccag

SEQ ID NO: 5237108 - DNA, 25 bp, Homo sapien
aaaaaagacggtcgtggtggcatgc

SEQ ID NO: 5237109 - DNA, 25 bp, Homo sapien
agcttaaaatacaaagcgagactcc

SEQ ID NO: 5237110 - DNA, 25 bp, Homo sapien
tcaccgtcacttgctgcctctctgc

SEQ ID NO: 5237111 - DNA, 25 bp, Homo sapien
ctcaccgtcacttgctgcctctctg

SEQ ID NO: 5237112 - DNA, 25 bp, Homo sapien
cctctctgcctgccccctggtccat

SEQ ID NO: 5237113 - DNA, 25 bp, Homo sapien
ctgcctctctgcctgccccctggtc

SEQ ID NO: 5237114 - DNA, 25 bp, Homo sapien
tcagtgagagtctgagaagaagccg

SEQ ID NO: 5237115 - DNA, 25 bp, Homo sapien
ttgctgcccacatggtcggggctgc

SEQ ID NO: 5237116 - DNA, 25 bp, Homo sapien
tggggttgctgcccacatggtcggg

SEQ ID NO: 5237117 - DNA, 25 bp, Homo sapien
ttcagtgagagtctgagaagaagcc

SEQ ID NO: 5237118 - DNA, 25 bp, Homo sapien
gtaggtcccaccgatctcgcgatag

SEQ ID NO: 5237119 - DNA, 25 bp, Homo sapien
ctgtaaacgcgtaggtcccaccgat

SEQ ID NO: 5237120 - DNA, 25 bp, Homo sapien
atagcgcgtcttctcgccgctggcg

SEQ ID NO: 5237121 - DNA, 25 bp, Homo sapien
gatctcgcgatagcgcgtcttctcg

SEQ ID NO: 5237122 - DNA, 25 bp, Homo sapien
ggttcaccagcggattctgtttctg

SEQ ID NO: 5237123 - DNA, 25 bp, Homo sapien
ccatgcatattcacgcacagccggt

SEQ ID NO: 5237124 - DNA, 25 bp, Homo sapien
ggcttgagaaataacaaagacatgt

SEQ ID NO: 5237125 - DNA, 25 bp, Homo sapien
atattcacgcacagccggttcacca

SEQ ID NO: 5237126 - DNA, 25 bp, Homo sapien
caaccacgagaaagtgagctctaga

SEQ ID NO: 5237127 - DNA, 25 bp, Homo sapien
caaaacaatgtctggaaatagcagg

SEQ ID NO: 5237128 - DNA, 25 bp, Homo sapien
tgactgggactacactggagatgac

SEQ ID NO: 5237129 - DNA, 25 bp, Homo sapien
attccaaccaaaaagcaaccacgag

SEQ ID NO: 5237130 - DNA, 25 bp, Homo sapien
tctcaacctgctggataaataaatg

SEQ ID NO: 5237131 - DNA, 25 bp, Homo sapien
tcaaggccaaataaagagcgttttg

SEQ ID NO: 5237132 - DNA, 25 bp, Homo sapien
tgtgcccaatcccaatcctacttaa

SEQ ID NO: 5237133 - DNA, 25 bp, Homo sapien
gaaaagcaggacgtgggtattctca

SEQ ID NO: 5237134 - DNA, 25 bp, Homo sapien
aaatccatgatctcagtttccaact

SEQ ID NO: 5237135 - DNA, 25 bp, Homo sapien
atacagagattagcacggtccctgc

SEQ ID NO: 5237136 - DNA, 25 bp, Homo sapien
ccatggattcaatcatgctcatttc

SEQ ID NO: 5237137 - DNA, 25 bp, Homo sapien
ttcaaaacagacaccatggattcaa

SEQ ID NO: 5237138 - DNA, 25 bp, Homo sapien
gaaacaatcatacgtcagaccaaaa

SEQ ID NO: 5237139 - DNA, 25 bp, Homo sapien
ggtcctcttgtaggtgctactgcag

SEQ ID NO: 5237140 - DNA, 25 bp, Homo sapien
gctactgcagcaaagttgaaacaat

SEQ ID NO: 5237141 - DNA, 25 bp, Homo sapien
taaatcaactcttaccaccttcagg

SEQ ID NO: 5237142 - DNA, 25 bp, Homo sapien
ctggaatctgtcctgttctcagtgc

SEQ ID NO: 5237143 - DNA, 25 bp, Homo sapien
tgggccagcgcttctacacatggta

SEQ ID NO: 5237144 - DNA, 25 bp, Homo sapien
cagtaaagcttgctgaaatgaaatc

SEQ ID NO: 5237145 - DNA, 25 bp, Homo sapien
cccacattgcatgccttaaggatag

SEQ ID NO: 5237146 - DNA, 25 bp, Homo sapien
tgatgtttcctacggttgccataac

SEQ ID NO: 5237147 - DNA, 25 bp, Homo sapien
tgttccatgccactctcctagatcc

SEQ ID NO: 5237148 - DNA, 25 bp, Homo sapien
tttggatttactgggtgatgtttcc

SEQ ID NO: 5237149 - DNA, 25 bp, Homo sapien
tatttaatttggatttactgggtga

SEQ ID NO: 5237150 - DNA, 25 bp, Homo sapien
cacacagagccgcttgttatcatca

SEQ ID NO: 5237151 - DNA, 25 bp, Homo sapien
catttgtccacaacaagtgtaatag

SEQ ID NO: 5237152 - DNA, 25 bp, Homo sapien
tatcatcagggctattagcacagtg

SEQ ID NO: 5237153 - DNA, 25 bp, Homo sapien
taataggcagctgtaggcacacaga

SEQ ID NO: 5237154 - DNA, 25 bp, Homo sapien
tgtggaccacaacccgggttctgat

SEQ ID NO: 5237155 - DNA, 25 bp, Homo sapien
catagctggtgtttggagttcatca

SEQ ID NO: 5237156 - DNA, 25 bp, Homo sapien
tgaataaatgaggaaggcagtccct

SEQ ID NO: 5237157 - DNA, 25 bp, Homo sapien
tatcctgatgaatggaacttcctgc

SEQ ID NO: 5237158 - DNA, 25 bp, Homo sapien
gggaaggtggctgctaggcggctcc

SEQ ID NO: 5237159 - DNA, 25 bp, Homo sapien
aaggtggctgctaggcggctccgct

SEQ ID NO: 5237160 - DNA, 25 bp, Homo sapien
gctgctaggcggctccgctgctcta

SEQ ID NO: 5237161 - DNA, 25 bp, Homo sapien
taggcggctccgctgctctaatcct

SEQ ID NO: 5237162 - DNA, 25 bp, Homo sapien
ccggcccttgcggagaaggttctcg

SEQ ID NO: 5237163 - DNA, 25 bp, Homo sapien
tctcgcggttgcgttgctggaccag

SEQ ID NO: 5237164 - DNA, 25 bp, Homo sapien
cgcttccaggtgagcgccgagatga

SEQ ID NO: 5237165 - DNA, 25 bp, Homo sapien
tccttgaggcgatagcagcgtcggc

SEQ ID NO: 5237166 - DNA, 25 bp, Homo sapien
agcgagcggtccacaccgcggaacc

SEQ ID NO: 5237167 - DNA, 25 bp, Homo sapien
ggtccacaccgcggaaccagcccac

SEQ ID NO: 5237168 - DNA, 25 bp, Homo sapien
gagcggtccacaccgcggaaccagc

SEQ ID NO: 5237169 - DNA, 25 bp, Homo sapien
cagcgagcggtccacaccgcggaac

SEQ ID NO: 5237170 - DNA, 25 bp, Homo sapien
gactcgcggcacagcaggtacacga

SEQ ID NO: 5237171 - DNA, 25 bp, Homo sapien
caggtacacgaacaccaggtttgca

SEQ ID NO: 5237172 - DNA, 25 bp, Homo sapien
agctcggcggccgacgccagctcgt

SEQ ID NO: 5237173 - DNA, 25 bp, Homo sapien
caggcgtaatgaaggcctggtcttg

SEQ ID NO: 5237174 - DNA, 25 bp, Homo sapien
gctccacgaggaagggcttgagtgg

SEQ ID NO: 5237175 - DNA, 25 bp, Homo sapien
ggcagcgctgccagaagcgctcctt

SEQ ID NO: 5237176 - DNA, 25 bp, Homo sapien
agcgctccttgtcgggctccacgag

SEQ ID NO: 5237177 - DNA, 25 bp, Homo sapien
ggtcggcgttgagccgcagcatctg

SEQ ID NO: 5237178 - DNA, 25 bp, Homo sapien
ggcctcgccctcgttcttgaggtct

SEQ ID NO: 5237179 - DNA, 25 bp, Homo sapien
cctcgttcttgaggtcttgaaagac

SEQ ID NO: 5237180 - DNA, 25 bp, Homo sapien
cagtgcttggttccggccgcgcagc

SEQ ID NO: 5237181 - DNA, 25 bp, Homo sapien
ctagcggtccaggttcatagtccag

SEQ ID NO: 5237182 - DNA, 25 bp, Homo sapien
actccacgcccagcaaatccaaaca

SEQ ID NO: 5237183 - DNA, 25 bp, Homo sapien
ccggggcgctgagcggcggtaacag

SEQ ID NO: 5237184 - DNA, 25 bp, Homo sapien
ccctgaggggcatgggcgtctcctc

SEQ ID NO: 5237185 - DNA, 25 bp, Homo sapien
aaacaccgcggcctctggtgtcccg

SEQ ID NO: 5237186 - DNA, 25 bp, Homo sapien
gctcccagcatgcaacacgttggaa

SEQ ID NO: 5237187 - DNA, 25 bp, Homo sapien
tgaggttggagtgcctttcccgcgc

SEQ ID NO: 5237188 - DNA, 25 bp, Homo sapien
taaggataaggaagcgggatgtccc

SEQ ID NO: 5237189 - DNA, 25 bp, Homo sapien
gatggtgacacatgacaggagcaac

SEQ ID NO: 5237190 - DNA, 25 bp, Homo sapien
tctgtctgtgacagttccattacca

SEQ ID NO: 5237191 - DNA, 25 bp, Homo sapien
caaagaaagaccggcgcaaaaccat

SEQ ID NO: 5237192 - DNA, 25 bp, Homo sapien
gattcagctttatcaccaggcctca

SEQ ID NO: 5237193 - DNA, 25 bp, Homo sapien
gttctcaggtacttgatctccccta

SEQ ID NO: 5237194 - DNA, 25 bp, Homo sapien
tgtaaaatggaagccgatggcgggg

SEQ ID NO: 5237195 - DNA, 25 bp, Homo sapien
tcagctgcctcgctttactctttac

SEQ ID NO: 5237196 - DNA, 25 bp, Homo sapien
catgattcggtctctaagtggcccg

SEQ ID NO: 5237197 - DNA, 25 bp, Homo sapien
aaagggcacaactccgctgtcccca

SEQ ID NO: 5237198 - DNA, 25 bp, Homo sapien
aactccgctgtccccatgattcggt

SEQ ID NO: 5237199 - DNA, 25 bp, Homo sapien
cggtctctaagtggcccgggcatta

SEQ ID NO: 5237200 - DNA, 25 bp, Homo sapien
cgaacccgggcctcgtcttggcagg

SEQ ID NO: 5237201 - DNA, 25 bp, Homo sapien
ccacggccagactagggtcggagcc

SEQ ID NO: 5237202 - DNA, 25 bp, Homo sapien
gatcttctcggccacggccagacta

SEQ ID NO: 5237203 - DNA, 25 bp, Homo sapien
gacagcgaacccgggcctcgtcttg

SEQ ID NO: 5237204 - DNA, 25 bp, Homo sapien
ggatcccagtaagtggagaccacag

SEQ ID NO: 5237205 - DNA, 25 bp, Homo sapien
tactgttagatgctctggttgctgg

SEQ ID NO: 5237206 - DNA, 25 bp, Homo sapien
aagctgcccatctggttgcctgggg

SEQ ID NO: 5237207 - DNA, 25 bp, Homo sapien
tgtcctcttgaatactgttagatgc

SEQ ID NO: 5237208 - DNA, 25 bp, Homo sapien
aaagtatggttcactcccctgccgt

SEQ ID NO: 5237209 - DNA, 25 bp, Homo sapien
cgaaggccccagatgttaaatgact

SEQ ID NO: 5237210 - DNA, 25 bp, Homo sapien
cacttgcagatggaattagaagccc

SEQ ID NO: 5237211 - DNA, 25 bp, Homo sapien
taacatgcgctctgtgcaactaagc

SEQ ID NO: 5237212 - DNA, 25 bp, Homo sapien
gctaagatatagaactgggaaccag

SEQ ID NO: 5237213 - DNA, 25 bp, Homo sapien
ctcagaatgcagtagatgggtatcc

SEQ ID NO: 5237214 - DNA, 25 bp, Homo sapien
ccagattatctcagctctaggagcc

SEQ ID NO: 5237215 - DNA, 25 bp, Homo sapien
tctccaagccctgagttactgtggt

SEQ ID NO: 5237216 - DNA, 25 bp, Homo sapien
cagacccttctgtgagaagcagaga

SEQ ID NO: 5237217 - DNA, 25 bp, Homo sapien
tgtcaccagagtgttcagcagaccc

SEQ ID NO: 5237218 - DNA, 25 bp, Homo sapien
tattgggacacgtggttggaagctc

SEQ ID NO: 5237219 - DNA, 25 bp, Homo sapien
ttggaagctccagtaaaacagatgt

SEQ ID NO: 5237220 - DNA, 25 bp, Homo sapien
ggtggaaagccaacaacaatatgag

SEQ ID NO: 5237221 - DNA, 25 bp, Homo sapien
gaacattgtgcacagtgttgctttc

SEQ ID NO: 5237222 - DNA, 25 bp, Homo sapien
gaagagaccaagtggaggacacaca

SEQ ID NO: 5237223 - DNA, 25 bp, Homo sapien
gacacacagtgtagtagtaggccca

SEQ ID NO: 5237224 - DNA, 25 bp, Homo sapien
caacagaagtcagagtcttggcaaa

SEQ ID NO: 5237225 - DNA, 25 bp, Homo sapien
gggtgcagcatcagagagcctcttt

SEQ ID NO: 5237226 - DNA, 25 bp, Homo sapien
taaggcctccatgaactattggttg

SEQ ID NO: 5237227 - DNA, 25 bp, Homo sapien
tatagtcctgttacacagacgccac

SEQ ID NO: 5237228 - DNA, 25 bp, Homo sapien
tggtgaaagccaccgtcctccgtga

SEQ ID NO: 5237229 - DNA, 25 bp, Homo sapien
gggaccgaagctccctcaatccttg

SEQ ID NO: 5237230 - DNA, 25 bp, Homo sapien
ggtactagatttgctcctgtcccac

SEQ ID NO: 5237231 - DNA, 25 bp, Homo sapien
gtgcatttccgcctggctcctagaa

SEQ ID NO: 5237232 - DNA, 25 bp, Homo sapien
gactgttgtgaggacccataaggga

SEQ ID NO: 5237233 - DNA, 25 bp, Homo sapien
tttggcacgggagcttcaatggaca

SEQ ID NO: 5237234 - DNA, 25 bp, Homo sapien
tgtgaccaagacactccaggtagct

SEQ ID NO: 5237235 - DNA, 25 bp, Homo sapien
tttggcttccaaaggtctgagctcg

SEQ ID NO: 5237236 - DNA, 25 bp, Homo sapien
gtcctctgcttctcggctcctccct

SEQ ID NO: 5237237 - DNA, 25 bp, Homo sapien
cgcccgggagcttctgtcctctgct

SEQ ID NO: 5237238 - DNA, 25 bp, Homo sapien
ctgtcctctgcttctcggctcctcc

SEQ ID NO: 5237239 - DNA, 25 bp, Homo sapien
ttctgtcctctgcttctcggctcct

SEQ ID NO: 5237240 - DNA, 25 bp, Homo sapien
ggtgcacagtaactgagtgccaggc

SEQ ID NO: 5237241 - DNA, 25 bp, Homo sapien
ttagggcccgggaggatgcacctct

SEQ ID NO: 5237242 - DNA, 25 bp, Homo sapien
tttgccccagcgcaccttggtgcac

SEQ ID NO: 5237243 - DNA, 25 bp, Homo sapien
gctggaccgggtctggccagtggag

SEQ ID NO: 5237244 - DNA, 25 bp, Homo sapien
tctccaagaacgaggaaattgcctt

SEQ ID NO: 5237245 - DNA, 25 bp, Homo sapien
caagaacgaggaaattgccttctcc

SEQ ID NO: 5237246 - DNA, 25 bp, Homo sapien
caacatctccaagaacgaggaaatt

SEQ ID NO: 5237247 - DNA, 25 bp, Homo sapien
aacgaggaaattgccttctcctggc

SEQ ID NO: 5237248 - DNA, 25 bp, Homo sapien
tccgtccaagaggttgagcagttcc

SEQ ID NO: 5237249 - DNA, 25 bp, Homo sapien
ttctgtttcaagagtgccagccctg

SEQ ID NO: 5237250 - DNA, 25 bp, Homo sapien
tttaccgcagtcctaggcatgtcag

SEQ ID NO: 5237251 - DNA, 25 bp, Homo sapien
cagaagggttcatggccagctcaaa

SEQ ID NO: 5237252 - DNA, 25 bp, Homo sapien
actaagctagacctacagcctcgcg

SEQ ID NO: 5237253 - DNA, 25 bp, Homo sapien
gcagaaaggttgtgaagcgccttcc

SEQ ID NO: 5237254 - DNA, 25 bp, Homo sapien
cattggccacacctttactgggtgc

SEQ ID NO: 5237255 - DNA, 25 bp, Homo sapien
tcaggatagaaatgtggatgggccc

SEQ ID NO: 5237256 - DNA, 25 bp, Homo sapien
tgcccggtctggtctcacatttctg

SEQ ID NO: 5237257 - DNA, 25 bp, Homo sapien
aatttttcaagtatgggagctaggt

SEQ ID NO: 5237258 - DNA, 25 bp, Homo sapien
gggacaataggcaagtgcctccaca

SEQ ID NO: 5237259 - DNA, 25 bp, Homo sapien
cacccagcattcctctcaaattttt

SEQ ID NO: 5237260 - DNA, 25 bp, Homo sapien
aactggggcctcactgtacttcacc

SEQ ID NO: 5237261 - DNA, 25 bp, Homo sapien
ttcacctcgttgactggtgacacct

SEQ ID NO: 5237262 - DNA, 25 bp, Homo sapien
gcctcactgtacttcacctcgttga

SEQ ID NO: 5237263 - DNA, 25 bp, Homo sapien
tgtggctgtgacttgtgcctggtgc

SEQ ID NO: 5237264 - DNA, 25 bp, Homo sapien
gcttcagttccatttgatgaccgcc

SEQ ID NO: 5237265 - DNA, 25 bp, Homo sapien
cagttccatttgatgaccgccatca

SEQ ID NO: 5237266 - DNA, 25 bp, Homo sapien
gatgaccgccatcatctttgagatt

SEQ ID NO: 5237267 - DNA, 25 bp, Homo sapien
tccatttgatgaccgccatcatctt

SEQ ID NO: 5237268 - DNA, 25 bp, Homo sapien
taaaggagcatgcagtgccacactc

SEQ ID NO: 5237269 - DNA, 25 bp, Homo sapien
cagtagttaaaggagcatgcagtgc

SEQ ID NO: 5237270 - DNA, 25 bp, Homo sapien
tgctaggattacttgtcctgctggg

SEQ ID NO: 5237271 - DNA, 25 bp, Homo sapien
cattgactcacctgggaagattgtg

SEQ ID NO: 5237272 - DNA, 25 bp, Homo sapien
tcctgagaagcgaattcctatggtg

SEQ ID NO: 5237273 - DNA, 25 bp, Homo sapien
ccccatagttagctaggacaggcat

SEQ ID NO: 5237274 - DNA, 25 bp, Homo sapien
cagccagtctcccagatcaaggagg

SEQ ID NO: 5237275 - DNA, 25 bp, Homo sapien
gagaaatagcgccacctagattgca

SEQ ID NO: 5237276 - DNA, 25 bp, Homo sapien
acttgggacctcgaggaagttcctg

SEQ ID NO: 5237277 - DNA, 25 bp, Homo sapien
cttgggacctcgaggaagttcctgc

SEQ ID NO: 5237278 - DNA, 25 bp, Homo sapien
caggacttgggacctcgaggaagtt

SEQ ID NO: 5237279 - DNA, 25 bp, Homo sapien
ttacacgagcaagccagcaaaccag

SEQ ID NO: 5237280 - DNA, 25 bp, Homo sapien
ggtcgaattctcgtggctgctccat

SEQ ID NO: 5237281 - DNA, 25 bp, Homo sapien
cgtggctgctccataaattttattc

SEQ ID NO: 5237282 - DNA, 25 bp, Homo sapien
atgcacataaaagggtcgaattctc

SEQ ID NO: 5237283 - DNA, 25 bp, Homo sapien
cataaaagggtcgaattctcgtggc

SEQ ID NO: 5237284 - DNA, 25 bp, Homo sapien
tcagaggcctcctgtaagggcgaga

SEQ ID NO: 5237285 - DNA, 25 bp, Homo sapien
tcctgatgtcaagtctcgagagaag

SEQ ID NO: 5237286 - DNA, 25 bp, Homo sapien
aattggccttccctgttcaagtgga

SEQ ID NO: 5237287 - DNA, 25 bp, Homo sapien
gaagttgatgttgacaggcccacag

SEQ ID NO: 5237288 - DNA, 25 bp, Homo sapien
gagagccagcttctagtaccactag

SEQ ID NO: 5237289 - DNA, 25 bp, Homo sapien
ccactatacttggaggacactcaag

SEQ ID NO: 5237290 - DNA, 25 bp, Homo sapien
gggccttcctgctatgactctgagg

SEQ ID NO: 5237291 - DNA, 25 bp, Homo sapien
taaaaggagattcaagtctagagac

SEQ ID NO: 5237292 - DNA, 25 bp, Homo sapien
tgacctgctctgttaacaacctgtg

SEQ ID NO: 5237293 - DNA, 25 bp, Homo sapien
gacctgctctgttaacaacctgtgt

SEQ ID NO: 5237294 - DNA, 25 bp, Homo sapien
ttgacctgctctgttaacaacctgt

SEQ ID NO: 5237295 - DNA, 25 bp, Homo sapien
acctgctctgttaacaacctgtgtt

SEQ ID NO: 5237296 - DNA, 25 bp, Homo sapien
tgccaccccagctgatgtgtgtttc

SEQ ID NO: 5237297 - DNA, 25 bp, Homo sapien
accccagctgatgtgtgtttctgtt

SEQ ID NO: 5237298 - DNA, 25 bp, Homo sapien
ccaccccagctgatgtgtgtttctg

SEQ ID NO: 5237299 - DNA, 25 bp, Homo sapien
caccccagctgatgtgtgtttctgt

SEQ ID NO: 5237300 - DNA, 25 bp, Homo sapien
gtagattagaagcttgttgaagcag

SEQ ID NO: 5237301 - DNA, 25 bp, Homo sapien
agtagattagaagcttgttgaagca

SEQ ID NO: 5237302 - DNA, 25 bp, Homo sapien
caagtagattagaagcttgttgaag

SEQ ID NO: 5237303 - DNA, 25 bp, Homo sapien
aagtagattagaagcttgttgaagc

SEQ ID NO: 5237304 - DNA, 25 bp, Homo sapien
tgatagacattgctgtttcttgctt

SEQ ID NO: 5237305 - DNA, 25 bp, Homo sapien
ttcttcctgatagacattgctgttt

SEQ ID NO: 5237306 - DNA, 25 bp, Homo sapien
cttcctgatagacattgctgtttct

SEQ ID NO: 5237307 - DNA, 25 bp, Homo sapien
cctgatagacattgctgtttcttgc

SEQ ID NO: 5237308 - DNA, 25 bp, Homo sapien
tcctgggctggacaaagctagattt

SEQ ID NO: 5237309 - DNA, 25 bp, Homo sapien
ggctggacaaagctagattttcttc

SEQ ID NO: 5237310 - DNA, 25 bp, Homo sapien
tgggctggacaaagctagattttct

SEQ ID NO: 5237311 - DNA, 25 bp, Homo sapien
ggacaaagctagattttcttcttgt

SEQ ID NO: 5237312 - DNA, 25 bp, Homo sapien
ctggaggatagtttctccattttcc

SEQ ID NO: 5237313 - DNA, 25 bp, Homo sapien
cctccccttttctattcctgtccat

SEQ ID NO: 5237314 - DNA, 25 bp, Homo sapien
tcctccccttttctattcctgtcca

SEQ ID NO: 5237315 - DNA, 25 bp, Homo sapien
gaggatagtttctccattttcctcc

SEQ ID NO: 5237316 - DNA, 25 bp, Homo sapien
tttctgtgtaagagtccccttctcg

SEQ ID NO: 5237317 - DNA, 25 bp, Homo sapien
ctgtgtaagagtccccttctcgtcc

SEQ ID NO: 5237318 - DNA, 25 bp, Homo sapien
tgtaagagtccccttctcgtccttc

SEQ ID NO: 5237319 - DNA, 25 bp, Homo sapien
agtccccttctcgtccttcttgttg

SEQ ID NO: 5237320 - DNA, 25 bp, Homo sapien
ctggtacccggtagcaatgtttcct

SEQ ID NO: 5237321 - DNA, 25 bp, Homo sapien
tatttgcctctctagggacttcaga

SEQ ID NO: 5237322 - DNA, 25 bp, Homo sapien
cttaggcctggtaagtcggcagcac

SEQ ID NO: 5237323 - DNA, 25 bp, Homo sapien
tacagtagagggatgcttcctagca

SEQ ID NO: 5237324 - DNA, 25 bp, Homo sapien
gcccaacatttcgtgaaaagaatga

SEQ ID NO: 5237325 - DNA, 25 bp, Homo sapien
agaatgaaatccattgggtgctggc

SEQ ID NO: 5237326 - DNA, 25 bp, Homo sapien
ggtctgttgtagtagggcagcccaa

SEQ ID NO: 5237327 - DNA, 25 bp, Homo sapien
ggtgctggcaggttctcttgaggag

SEQ ID NO: 5237328 - DNA, 25 bp, Homo sapien
caggaaggtatgaaccctcacttct

SEQ ID NO: 5237329 - DNA, 25 bp, Homo sapien
tcaggaaggtatgaaccctcacttc

SEQ ID NO: 5237330 - DNA, 25 bp, Homo sapien
ggaaggtatgaaccctcacttctgg

SEQ ID NO: 5237331 - DNA, 25 bp, Homo sapien
gaaggtatgaaccctcacttctggc

SEQ ID NO: 5237332 - DNA, 25 bp, Homo sapien
taatattcatgtgaccgcagaggct

SEQ ID NO: 5237333 - DNA, 25 bp, Homo sapien
aaactggtctgacaacttagtggag

SEQ ID NO: 5237334 - DNA, 25 bp, Homo sapien
tgccaagggtacagagataactaac

SEQ ID NO: 5237335 - DNA, 25 bp, Homo sapien
gctgttcccgaaagccacagggtgt

SEQ ID NO: 5237336 - DNA, 25 bp, Homo sapien
gacggactgttgtagagggagtgaa

SEQ ID NO: 5237337 - DNA, 25 bp, Homo sapien
ctgttgtagagggagtgaacagtaa

SEQ ID NO: 5237338 - DNA, 25 bp, Homo sapien
gaagaagtcagagacggactgttgt

SEQ ID NO: 5237339 - DNA, 25 bp, Homo sapien
agaagtcagagacggactgttgtag

SEQ ID NO: 5237340 - DNA, 25 bp, Homo sapien
cttctctgtaataatgtcacagccc

SEQ ID NO: 5237341 - DNA, 25 bp, Homo sapien
taaagcagcactatatttgttctgt

SEQ ID NO: 5237342 - DNA, 25 bp, Homo sapien
tgtaataatgtcacagccctcactt

SEQ ID NO: 5237343 - DNA, 25 bp, Homo sapien
taataaagcagcactatatttgttc

SEQ ID NO: 5237344 - DNA, 25 bp, Homo sapien
cagggaccacaagacaagatccctt

SEQ ID NO: 5237345 - DNA, 25 bp, Homo sapien
taaattctagccatacaggacccag

SEQ ID NO: 5237346 - DNA, 25 bp, Homo sapien
ccagatgaaaggatcgcagggacca

SEQ ID NO: 5237347 - DNA, 25 bp, Homo sapien
caggacccagacactctttgtccag

SEQ ID NO: 5237348 - DNA, 25 bp, Homo sapien
ttcatagaaacttgggctcttggac

SEQ ID NO: 5237349 - DNA, 25 bp, Homo sapien
tcttggaccgtcaggataaagagta

SEQ ID NO: 5237350 - DNA, 25 bp, Homo sapien
aacttgggctcttggaccgtcagga

SEQ ID NO: 5237351 - DNA, 25 bp, Homo sapien
tgggctcttggaccgtcaggataaa

SEQ ID NO: 5237352 - DNA, 25 bp, Homo sapien
tcttgttgaccacaccataattact

SEQ ID NO: 5237353 - DNA, 25 bp, Homo sapien
ctcttgttgaccacaccataattac

SEQ ID NO: 5237354 - DNA, 25 bp, Homo sapien
cttgttgaccacaccataattactg

SEQ ID NO: 5237355 - DNA, 25 bp, Homo sapien
ttgttgaccacaccataattactgc

SEQ ID NO: 5237356 - DNA, 25 bp, Homo sapien
gccgcgcagggcgttaaatttagcc

SEQ ID NO: 5237357 - DNA, 25 bp, Homo sapien
tgtgtggacacacggtgcccggggc

SEQ ID NO: 5237358 - DNA, 25 bp, Homo sapien
cagggcgttaaatttagccacataa

SEQ ID NO: 5237359 - DNA, 25 bp, Homo sapien
cccctggccgcgcagggcgttaaat

SEQ ID NO: 5237360 - DNA, 25 bp, Homo sapien
ggcggctgtcgaacgggtgaaggtg

SEQ ID NO: 5237361 - DNA, 25 bp, Homo sapien
ctggcggctgtcgaacgggtgaagg

SEQ ID NO: 5237362 - DNA, 25 bp, Homo sapien
cctggcggctgtcgaacgggtgaag

SEQ ID NO: 5237363 - DNA, 25 bp, Homo sapien
gccctggcggctgtcgaacgggtga

SEQ ID NO: 5237364 - DNA, 25 bp, Homo sapien
ttcggtattcggtcaggtgcatgcg

SEQ ID NO: 5237365 - DNA, 25 bp, Homo sapien
cagttctccgacctagaaaaacttg

SEQ ID NO: 5237366 - DNA, 25 bp, Homo sapien
acttgcagttaattcatcctttcgg

SEQ ID NO: 5237367 - DNA, 25 bp, Homo sapien
ttctccgacctagaaaaacttgcag

SEQ ID NO: 5237368 - DNA, 25 bp, Homo sapien
ttagttactctgcttgcccggggtc

SEQ ID NO: 5237369 - DNA, 25 bp, Homo sapien
ctctgtgatgtgctctgccttgtat

SEQ ID NO: 5237370 - DNA, 25 bp, Homo sapien
tgtgatgtgctctgccttgtattca

SEQ ID NO: 5237371 - DNA, 25 bp, Homo sapien
gtgatgtgctctgccttgtattcat

SEQ ID NO: 5237372 - DNA, 25 bp, Homo sapien
ctgtgatgtgctctgccttgtattc

SEQ ID NO: 5237373 - DNA, 25 bp, Homo sapien
gactcggtgcagataaaggttctca

SEQ ID NO: 5237374 - DNA, 25 bp, Homo sapien
gagtgaaggtactcgttggtcgcct

SEQ ID NO: 5237375 - DNA, 25 bp, Homo sapien
ctaggcctttcggtttgcgcgagcg

SEQ ID NO: 5237376 - DNA, 25 bp, Homo sapien
cctgtttggtgcgacgaagccgctg

SEQ ID NO: 5237377 - DNA, 25 bp, Homo sapien
agttccttatccctgctctggtgct

SEQ ID NO: 5237378 - DNA, 25 bp, Homo sapien
atccttagagttccttatccctgct

SEQ ID NO: 5237379 - DNA, 25 bp, Homo sapien
tagagttccttatccctgctctggt

SEQ ID NO: 5237380 - DNA, 25 bp, Homo sapien
cagaagctaccccgggccatccaga

SEQ ID NO: 5237381 - DNA, 25 bp, Homo sapien
catgtccctggtcaccaagcggaag

SEQ ID NO: 5237382 - DNA, 25 bp, Homo sapien
tctacaaaagcgtgaaaaaccctga

SEQ ID NO: 5237383 - DNA, 25 bp, Homo sapien
ccagcagtccttggctccattagac

SEQ ID NO: 5237384 - DNA, 25 bp, Homo sapien
tcagggttgaaggtcccagcagtcc

SEQ ID NO: 5237385 - DNA, 25 bp, Homo sapien
gaaaaaccctgatacaaagcagtgg

SEQ ID NO: 5237386 - DNA, 25 bp, Homo sapien
gaaacctaggagcaggacactaaga

SEQ ID NO: 5237387 - DNA, 25 bp, Homo sapien
agagcttccgcttggtgaccaggga

SEQ ID NO: 5237388 - DNA, 25 bp, Homo sapien
ggactgctgggaccttcaaccctga

SEQ ID NO: 5237389 - DNA, 25 bp, Homo sapien
agatggacatagaagcccctctctg

SEQ ID NO: 5237390 - DNA, 25 bp, Homo sapien
tgctttgtatcagggtttttcacgc

SEQ ID NO: 5237391 - DNA, 25 bp, Homo sapien
agtgatgccgccagggagagcttcc

SEQ ID NO: 5237392 - DNA, 25 bp, Homo sapien
tctaatggagccaaggactgctggg

SEQ ID NO: 5237393 - DNA, 25 bp, Homo sapien
cagccatagtagagcctccttcgga

SEQ ID NO: 5237394 - DNA, 25 bp, Homo sapien
gtagagcctccttcggatccgggca

SEQ ID NO: 5237395 - DNA, 25 bp, Homo sapien
ggatccgggcactcagcttctggtg

SEQ ID NO: 5237396 - DNA, 25 bp, Homo sapien
ttcccagtcccagccatagtagagc

SEQ ID NO: 5237397 - DNA, 25 bp, Homo sapien
tccaggctacagtcggcttcccagt

SEQ ID NO: 5237398 - DNA, 25 bp, Homo sapien
catagtagagcctccttcggatccg

SEQ ID NO: 5237399 - DNA, 25 bp, Homo sapien
gtgcccggatccgaaggaggctcta

SEQ ID NO: 5237400 - DNA, 25 bp, Homo sapien
actgggaagccgactgtagcctgga

SEQ ID NO: 5237401 - DNA, 25 bp, Homo sapien
gctctactatggctgggactgggaa

SEQ ID NO: 5237402 - DNA, 25 bp, Homo sapien
cccggatccgaaggaggctctacta

SEQ ID NO: 5237403 - DNA, 25 bp, Homo sapien
caccagaagctgagtgcccggatcc

SEQ ID NO: 5237404 - DNA, 25 bp, Homo sapien
aaggaggctctactatggctgggac

SEQ ID NO: 5237405 - DNA, 25 bp, Homo sapien
tactcaagcatgagatcggaggcgg

SEQ ID NO: 5237406 - DNA, 25 bp, Homo sapien
tacttttgggtggacgtgttgacac

SEQ ID NO: 5237407 - DNA, 25 bp, Homo sapien
aacacaaaaccttgggtagatgcag

SEQ ID NO: 5237408 - DNA, 25 bp, Homo sapien
gacacgttttgaggccttacattcg

SEQ ID NO: 5237409 - DNA, 25 bp, Homo sapien
tcttatcccacagtaggcagggcgg

SEQ ID NO: 5237410 - DNA, 25 bp, Homo sapien
cagtcgagcccgttttcttatccca

SEQ ID NO: 5237411 - DNA, 25 bp, Homo sapien
ttgcggacgagcgtcacgtgactgc

SEQ ID NO: 5237412 - DNA, 25 bp, Homo sapien
cacaggttcgttttctggttgacga

SEQ ID NO: 5237413 - DNA, 25 bp, Homo sapien
agccacagcgtcgtggccaggcgtc

SEQ ID NO: 5237414 - DNA, 25 bp, Homo sapien
cccacaccagcaaccgctgcgccgc

SEQ ID NO: 5237415 - DNA, 25 bp, Homo sapien
gccgtgaccaggctgtgcagcggct

SEQ ID NO: 5237416 - DNA, 25 bp, Homo sapien
gccgcagccacagcgtcgtggccag

SEQ ID NO: 5237417 - DNA, 25 bp, Homo sapien
ccatctcagaaggtggaaaggcgcc

SEQ ID NO: 5237418 - DNA, 25 bp, Homo sapien
taactcgcgactcacgactcagaga

SEQ ID NO: 5237419 - DNA, 25 bp, Homo sapien
gacaggctcatgcatccatctcaga

SEQ ID NO: 5237420 - DNA, 25 bp, Homo sapien
gcaattcaagcggatgtcagcctgc

SEQ ID NO: 5237421 - DNA, 25 bp, Homo sapien
ccagcagaaaataggccaaaagtga

SEQ ID NO: 5237422 - DNA, 25 bp, Homo sapien
tgagacgctgagtaggaagaagggc

SEQ ID NO: 5237423 - DNA, 25 bp, Homo sapien
agagatccagcagaaaataggccaa

SEQ ID NO: 5237424 - DNA, 25 bp, Homo sapien
acgctgagtaggaagaagggccgga

SEQ ID NO: 5237425 - DNA, 25 bp, Homo sapien
ctgaaacgtcagggagaaagcgagg

SEQ ID NO: 5237426 - DNA, 25 bp, Homo sapien
ctgtcagagtgtggctcctctgggg

SEQ ID NO: 5237427 - DNA, 25 bp, Homo sapien
agagtgtggctcctctggggatgat

SEQ ID NO: 5237428 - DNA, 25 bp, Homo sapien
gagtgtggctcctctggggatgatg

SEQ ID NO: 5237429 - DNA, 25 bp, Homo sapien
tcagagtgtggctcctctggggatg

SEQ ID NO: 5237430 - DNA, 25 bp, Homo sapien
tgagaatgccaaagatatctttagt

SEQ ID NO: 5237431 - DNA, 25 bp, Homo sapien
ctgagaatgccaaagatatctttag

SEQ ID NO: 5237432 - DNA, 25 bp, Homo sapien
ctcagataccagcttcctagacact

SEQ ID NO: 5237433 - DNA, 25 bp, Homo sapien
cctcagataccagcttcctagacac

SEQ ID NO: 5237434 - DNA, 25 bp, Homo sapien
tggaaggtgagccagctctcagcca

SEQ ID NO: 5237435 - DNA, 25 bp, Homo sapien
ctctcagccaggtatctgcacaact

SEQ ID NO: 5237436 - DNA, 25 bp, Homo sapien
ctggaaggtgagccagctctcagcc

SEQ ID NO: 5237437 - DNA, 25 bp, Homo sapien
cagctctcagccaggtatctgcaca

SEQ ID NO: 5237438 - DNA, 25 bp, Homo sapien
tctgcctcttgtactgcagcagctc

SEQ ID NO: 5237439 - DNA, 25 bp, Homo sapien
ttctgcctcttgtactgcagcagct

SEQ ID NO: 5237440 - DNA, 25 bp, Homo sapien
agccagagcagactcgaacgcagaa

SEQ ID NO: 5237441 - DNA, 25 bp, Homo sapien
acagccagagcagactcgaacgcag

SEQ ID NO: 5237442 - DNA, 25 bp, Homo sapien
cagccagagcagactcgaacgcaga

SEQ ID NO: 5237443 - DNA, 25 bp, Homo sapien
gcacagccagagcagactcgaacgc

SEQ ID NO: 5237444 - DNA, 25 bp, Homo sapien
tcctcttgtcgtgtttgtgatgcag

SEQ ID NO: 5237445 - DNA, 25 bp, Homo sapien
gatgcagggcattggcttctgcctt

SEQ ID NO: 5237446 - DNA, 25 bp, Homo sapien
gatcagctcatgataaaccaccagg

SEQ ID NO: 5237447 - DNA, 25 bp, Homo sapien
ggcgagtgtacatcctctggatcag

SEQ ID NO: 5237448 - DNA, 25 bp, Homo sapien
gggggtgcattcttcccctgacgct

SEQ ID NO: 5237449 - DNA, 25 bp, Homo sapien
ccagctctgcctcgctttcactctc

SEQ ID NO: 5237450 - DNA, 25 bp, Homo sapien
gctctgcctcgctttcactctctgt

SEQ ID NO: 5237451 - DNA, 25 bp, Homo sapien
tgggggtgcattcttcccctgacgc

SEQ ID NO: 5237452 - DNA, 25 bp, Homo sapien
agccaccactctccaagatagaagc

SEQ ID NO: 5237453 - DNA, 25 bp, Homo sapien
gatagaagcctcctcatctgacagc

SEQ ID NO: 5237454 - DNA, 25 bp, Homo sapien
tggcccgggatacggagaagccacc

SEQ ID NO: 5237455 - DNA, 25 bp, Homo sapien
tcggagacatcagtcagctgcggag

SEQ ID NO: 5237456 - DNA, 25 bp, Homo sapien
ccttgacagagcttgaggacggcct

SEQ ID NO: 5237457 - DNA, 25 bp, Homo sapien
gatgagagccgcaacaaggtttcct

SEQ ID NO: 5237458 - DNA, 25 bp, Homo sapien
tgaagtgcgtgttcacaaagtggag

SEQ ID NO: 5237459 - DNA, 25 bp, Homo sapien
ggaccctgccccattgaagtgcgtg

SEQ ID NO: 5237460 - DNA, 25 bp, Homo sapien
aggtgacagggtgccgggcagagca

SEQ ID NO: 5237461 - DNA, 25 bp, Homo sapien
gaggtgacagggtgccgggcagagc

SEQ ID NO: 5237462 - DNA, 25 bp, Homo sapien
gcagagcagtgaggccaccactcac

SEQ ID NO: 5237463 - DNA, 25 bp, Homo sapien
ggtgccgggcagagcagtgaggcca

SEQ ID NO: 5237464 - DNA, 25 bp, Homo sapien
gaacaggtgggagaatggaagggga

SEQ ID NO: 5237465 - DNA, 25 bp, Homo sapien
tggggaacaggtgggagaatggaag

SEQ ID NO: 5237466 - DNA, 25 bp, Homo sapien
ctggggaacaggtgggagaatggaa

SEQ ID NO: 5237467 - DNA, 25 bp, Homo sapien
caggtgggagaatggaaggggaggg

SEQ ID NO: 5237468 - DNA, 25 bp, Homo sapien
cagagaatggatgtcgggccccagg

SEQ ID NO: 5237469 - DNA, 25 bp, Homo sapien
ctgatccagcaactcaaagtcctca

SEQ ID NO: 5237470 - DNA, 25 bp, Homo sapien
gtcctcagtggtgagtgcctcttct

SEQ ID NO: 5237471 - DNA, 25 bp, Homo sapien
catcagggggttttggcggtgtctc

SEQ ID NO: 5237472 - DNA, 25 bp, Homo sapien
tctgccacggcctgagcttcttggt

SEQ ID NO: 5237473 - DNA, 25 bp, Homo sapien
ctctgccacggcctgagcttcttgg

SEQ ID NO: 5237474 - DNA, 25 bp, Homo sapien
caccccagagtggtaggcaaaggag

SEQ ID NO: 5237475 - DNA, 25 bp, Homo sapien
accccagagtggtaggcaaaggagg

SEQ ID NO: 5237476 - DNA, 25 bp, Homo sapien
ccaccccagagtggtaggcaaagga

SEQ ID NO: 5237477 - DNA, 25 bp, Homo sapien
aggaaacagcaacactcctagccag

SEQ ID NO: 5237478 - DNA, 25 bp, Homo sapien
ggaaggacttccctagccctgttca

SEQ ID NO: 5237479 - DNA, 25 bp, Homo sapien
gagcagcacaggtccctgaggatag

SEQ ID NO: 5237480 - DNA, 25 bp, Homo sapien
tgttcacatccactaacccaaatgg

SEQ ID NO: 5237481 - DNA, 25 bp, Homo sapien
tgcctcaactaaacaaccaagtggg

SEQ ID NO: 5237482 - DNA, 25 bp, Homo sapien
cagtgcccacgggataggaggagct

SEQ ID NO: 5237483 - DNA, 25 bp, Homo sapien
gaaggttacacagactacagtgacc

SEQ ID NO: 5237484 - DNA, 25 bp, Homo sapien
gagtgtaactactggcctgacccac

SEQ ID NO: 5237485 - DNA, 25 bp, Homo sapien
caggagcctccctaaagcttggcca

SEQ ID NO: 5237486 - DNA, 25 bp, Homo sapien
ctctcctgcatcatgaaaggccggg

SEQ ID NO: 5237487 - DNA, 25 bp, Homo sapien
ggcgccatgtactgcgggatccctg

SEQ ID NO: 5237488 - DNA, 25 bp, Homo sapien
tcctaatctcaagagagagcacatg

SEQ ID NO: 5237489 - DNA, 25 bp, Homo sapien
tacacttggatcacccagaggagca

SEQ ID NO: 5237490 - DNA, 25 bp, Homo sapien
tttcaagtcaacacctgcacagatg

SEQ ID NO: 5237491 - DNA, 25 bp, Homo sapien
tttttcaagtcaacacctgcacaga

SEQ ID NO: 5237492 - DNA, 25 bp, Homo sapien
gccaatcaacactttatttttcaag

SEQ ID NO: 5237493 - DNA, 25 bp, Homo sapien
acctgcacagatgttagtgtccact

SEQ ID NO: 5237494 - DNA, 25 bp, Homo sapien
tgcaacaaggtaataaacagccaga

SEQ ID NO: 5237495 - DNA, 25 bp, Homo sapien
aaggtaatccttgcttcggccctgt

SEQ ID NO: 5237496 - DNA, 25 bp, Homo sapien
aacagactggagtgaagcaggttaa

SEQ ID NO: 5237497 - DNA, 25 bp, Homo sapien
gaagctagggttgtcaaggtaatcc

SEQ ID NO: 5237498 - DNA, 25 bp, Homo sapien
tgaactcataaaggaggccatctgc

SEQ ID NO: 5237499 - DNA, 25 bp, Homo sapien
tccccagtaaagataaatccaggct

SEQ ID NO: 5237500 - DNA, 25 bp, Homo sapien
gaaggcttgccatgtccactctttg

SEQ ID NO: 5237501 - DNA, 25 bp, Homo sapien
cactctttgttaagccaaggcatca

SEQ ID NO: 5237502 - DNA, 25 bp, Homo sapien
gaaagacaggtagcatcgccatatg

SEQ ID NO: 5237503 - DNA, 25 bp, Homo sapien
ggtagcatcgccatatggtacctcc

SEQ ID NO: 5237504 - DNA, 25 bp, Homo sapien
gacaggtagcatcgccatatggtac

SEQ ID NO: 5237505 - DNA, 25 bp, Homo sapien
agcagaaagacaggtagcatcgcca

SEQ ID NO: 5237506 - DNA, 25 bp, Homo sapien
aagttcgagttcctttagtggcaca

SEQ ID NO: 5237507 - DNA, 25 bp, Homo sapien
tgtaaagaatagaccctcatgaggc

SEQ ID NO: 5237508 - DNA, 25 bp, Homo sapien
gataggacatgttgcagtcattgcc

SEQ ID NO: 5237509 - DNA, 25 bp, Homo sapien
tgaaccggccaagacacctgataat

SEQ ID NO: 5237510 - DNA, 25 bp, Homo sapien
cggtagtatctctcttcccaggcaa

SEQ ID NO: 5237511 - DNA, 25 bp, Homo sapien
ctctgtgctgattaccagcccaggg

SEQ ID NO: 5237512 - DNA, 25 bp, Homo sapien
tatagtcctgactaagctctctgtg

SEQ ID NO: 5237513 - DNA, 25 bp, Homo sapien
gaccccagcgaccacgataaaagtg

SEQ ID NO: 5237514 - DNA, 25 bp, Homo sapien
cgcgccagccggcccccggcgcccg

SEQ ID NO: 5237515 - DNA, 25 bp, Homo sapien
cagccggcccccggcgcccgctcct

SEQ ID NO: 5237516 - DNA, 25 bp, Homo sapien
gccagccggcccccggcgcccgctc

SEQ ID NO: 5237517 - DNA, 25 bp, Homo sapien
cgccagccggcccccggcgcccgct

SEQ ID NO: 5237518 - DNA, 25 bp, Homo sapien
ctaggagaagcgacgagtgctgagc

SEQ ID NO: 5237519 - DNA, 25 bp, Homo sapien
ttagggctcgtgctcgaagtccgca

SEQ ID NO: 5237520 - DNA, 25 bp, Homo sapien
cgagtgctgagcgtctttagggctc

SEQ ID NO: 5237521 - DNA, 25 bp, Homo sapien
gcgtctttagggctcgtgctcgaag

SEQ ID NO: 5237522 - DNA, 25 bp, Homo sapien
agctcggctccgaacagtgagcgcc

SEQ ID NO: 5237523 - DNA, 25 bp, Homo sapien
tgacagctcggctccgaacagtgag

SEQ ID NO: 5237524 - DNA, 25 bp, Homo sapien
tcggctccgaacagtgagcgccgag

SEQ ID NO: 5237525 - DNA, 25 bp, Homo sapien
tccgaacagtgagcgccgaggtccg

SEQ ID NO: 5237526 - DNA, 25 bp, Homo sapien
ctgcaaagagttggtcggattgcag

SEQ ID NO: 5237527 - DNA, 25 bp, Homo sapien
aagagttggtcggattgcaggtcca

SEQ ID NO: 5237528 - DNA, 25 bp, Homo sapien
gattgcaggtccagcgggacctcga

SEQ ID NO: 5237529 - DNA, 25 bp, Homo sapien
gcgggacctcgatgtccttctctct

SEQ ID NO: 5237530 - DNA, 25 bp, Homo sapien
ggtctgcgcagaagatgcctgagca

SEQ ID NO: 5237531 - DNA, 25 bp, Homo sapien
tctgcgcagaagatgcctgagcagg

SEQ ID NO: 5237532 - DNA, 25 bp, Homo sapien
gcgcagaagatgcctgagcaggcat

SEQ ID NO: 5237533 - DNA, 25 bp, Homo sapien
tgcgcagaagatgcctgagcaggca

SEQ ID NO: 5237534 - DNA, 25 bp, Homo sapien
tggtaagcagatccacagtgatgct

SEQ ID NO: 5237535 - DNA, 25 bp, Homo sapien
ggtaagcagatccacagtgatgctg

SEQ ID NO: 5237536 - DNA, 25 bp, Homo sapien
ttggtaagcagatccacagtgatgc

SEQ ID NO: 5237537 - DNA, 25 bp, Homo sapien
tttggtaagcagatccacagtgatg

SEQ ID NO: 5237538 - DNA, 25 bp, Homo sapien
ggcacaggcacattacagagagggc

SEQ ID NO: 5237539 - DNA, 25 bp, Homo sapien
aggcacattacagagagggcacaca

SEQ ID NO: 5237540 - DNA, 25 bp, Homo sapien
gtgctctcccacagcacggtcaggg

SEQ ID NO: 5237541 - DNA, 25 bp, Homo sapien
gtctctgtcaatgtgctctcccaca

SEQ ID NO: 5237542 - DNA, 25 bp, Homo sapien
aatgtgctctcccacagcacggtca

SEQ ID NO: 5237543 - DNA, 25 bp, Homo sapien
tgtcaatgtgctctcccacagcacg

SEQ ID NO: 5237544 - DNA, 25 bp, Homo sapien
gtttttgctgtgctggatcagagcg

SEQ ID NO: 5237545 - DNA, 25 bp, Homo sapien
tttttgctgtgctggatcagagcga

SEQ ID NO: 5237546 - DNA, 25 bp, Homo sapien
ttttgctgtgctggatcagagcgac

SEQ ID NO: 5237547 - DNA, 25 bp, Homo sapien
gcgcgttcacacttattggtgaaga

SEQ ID NO: 5237548 - DNA, 25 bp, Homo sapien
atcatttctcgctgccggcagccag

SEQ ID NO: 5237549 - DNA, 25 bp, Homo sapien
tcagtttcatcatttctcgctgccg

SEQ ID NO: 5237550 - DNA, 25 bp, Homo sapien
ggcagccagcgcgttcacacttatt

SEQ ID NO: 5237551 - DNA, 25 bp, Homo sapien
gatgccggtgcttgatgcagaagtt

SEQ ID NO: 5237552 - DNA, 25 bp, Homo sapien
caatcatggtccagtggatgccggt

SEQ ID NO: 5237553 - DNA, 25 bp, Homo sapien
tccccagagcaatcatggtccagtg

SEQ ID NO: 5237554 - DNA, 25 bp, Homo sapien
cagaagtttcggctacagcgttcac

SEQ ID NO: 5237555 - DNA, 25 bp, Homo sapien
ctagccttacccaggaagtcaggag

SEQ ID NO: 5237556 - DNA, 25 bp, Homo sapien
gaagctccccaatttataacaacag

SEQ ID NO: 5237557 - DNA, 25 bp, Homo sapien
ggagttctggaaaaacatgcacttg

SEQ ID NO: 5237558 - DNA, 25 bp, Homo sapien
gaagctaaaagactcccctagccga

SEQ ID NO: 5237559 - DNA, 25 bp, Homo sapien
tacaggaaggcatggtttgacttgg

SEQ ID NO: 5237560 - DNA, 25 bp, Homo sapien
aaggcatggtttgacttgggctggg

SEQ ID NO: 5237561 - DNA, 25 bp, Homo sapien
aggtacaggaaggcatggtttgact

SEQ ID NO: 5237562 - DNA, 25 bp, Homo sapien
gaaggcatggtttgacttgggctgg

SEQ ID NO: 5237563 - DNA, 25 bp, Homo sapien
agaggtggaggtcagaggtgtgaag

SEQ ID NO: 5237564 - DNA, 25 bp, Homo sapien
gaagaggtggaggtcagaggtgtga

SEQ ID NO: 5237565 - DNA, 25 bp, Homo sapien
aggtggaggtcagaggtgtgaaggg

SEQ ID NO: 5237566 - DNA, 25 bp, Homo sapien
aagaggtggaggtcagaggtgtgaa

SEQ ID NO: 5237567 - DNA, 25 bp, Homo sapien
aagcaatcactggaggggctgtcca

SEQ ID NO: 5237568 - DNA, 25 bp, Homo sapien
aaagcaatcactggaggggctgtcc

SEQ ID NO: 5237569 - DNA, 25 bp, Homo sapien
ccaggacggagatcgggttgtggct

SEQ ID NO: 5237570 - DNA, 25 bp, Homo sapien
gggctgtccaggacggagatcgggt

SEQ ID NO: 5237571 - DNA, 25 bp, Homo sapien
tccatccaacctctgcccaactcac

SEQ ID NO: 5237572 - DNA, 25 bp, Homo sapien
gaccagcgtccttggacttcactct

SEQ ID NO: 5237573 - DNA, 25 bp, Homo sapien
tgtccatccaacctctgcccaactc

SEQ ID NO: 5237574 - DNA, 25 bp, Homo sapien
aaagaagaccagcgtccttggactt

SEQ ID NO: 5237575 - DNA, 25 bp, Homo sapien
tggggtttggtttctgccagggaca

SEQ ID NO: 5237576 - DNA, 25 bp, Homo sapien
gggacatttccagggcccgctgcag

SEQ ID NO: 5237577 - DNA, 25 bp, Homo sapien
tggtttctgccagggacatttccag

SEQ ID NO: 5237578 - DNA, 25 bp, Homo sapien
cccgctgcagagcttcatcctcact

SEQ ID NO: 5237579 - DNA, 25 bp, Homo sapien
gctgagcactgctgaggattatctc

SEQ ID NO: 5237580 - DNA, 25 bp, Homo sapien
tgttgggcctcatggtgctgagcac

SEQ ID NO: 5237581 - DNA, 25 bp, Homo sapien
tgagaccaagttgccagcgattatc

SEQ ID NO: 5237582 - DNA, 25 bp, Homo sapien
ttcatagcaacactacaaggtgggt

SEQ ID NO: 5237583 - DNA, 25 bp, Homo sapien
gctgccgctggtattctgcctcact

SEQ ID NO: 5237584 - DNA, 25 bp, Homo sapien
tgtgctaaagctaggtcttcttcct

SEQ ID NO: 5237585 - DNA, 25 bp, Homo sapien
gcttgtgctaaagctaggtcttctt

SEQ ID NO: 5237586 - DNA, 25 bp, Homo sapien
tgctgccgctggtattctgcctcac

SEQ ID NO: 5237587 - DNA, 25 bp, Homo sapien
catgggctggagtcatactgaaaac

SEQ ID NO: 5237588 - DNA, 25 bp, Homo sapien
gaagacacagtgcaacgtcaaggaa

SEQ ID NO: 5237589 - DNA, 25 bp, Homo sapien
tgaaaaccagacgataaccaccatt

SEQ ID NO: 5237590 - DNA, 25 bp, Homo sapien
caaaactctgcaccactaggaagaa

SEQ ID NO: 5237591 - DNA, 25 bp, Homo sapien
ttggacggcttcgagctgcggctct

SEQ ID NO: 5237592 - DNA, 25 bp, Homo sapien
gctgcagttggacggcttcgagctg

SEQ ID NO: 5237593 - DNA, 25 bp, Homo sapien
agttggacggcttcgagctgcggct

SEQ ID NO: 5237594 - DNA, 25 bp, Homo sapien
gcagttggacggcttcgagctgcgg

SEQ ID NO: 5237595 - DNA, 25 bp, Homo sapien
cacagtcctcctcaggtgaacctcc

SEQ ID NO: 5237596 - DNA, 25 bp, Homo sapien
tagaggtgtgagggccacagtcctc

SEQ ID NO: 5237597 - DNA, 25 bp, Homo sapien
tcaggtgaacctccctccccaagcc

SEQ ID NO: 5237598 - DNA, 25 bp, Homo sapien
agggccacagtcctcctcaggtgaa

SEQ ID NO: 5237599 - DNA, 25 bp, Homo sapien
actagcaaggccttccagaggctcc

SEQ ID NO: 5237600 - DNA, 25 bp, Homo sapien
ttgctagccgctctcttccatgcag

SEQ ID NO: 5237601 - DNA, 25 bp, Homo sapien
ggagcactagcaaggccttccagag

SEQ ID NO: 5237602 - DNA, 25 bp, Homo sapien
ctgagggcccaaccagggaacagtt

SEQ ID NO: 5237603 - DNA, 25 bp, Homo sapien
gggagatgacatgatgaaggggcta

SEQ ID NO: 5237604 - DNA, 25 bp, Homo sapien
tgacatgatgaaggggctaagagta

SEQ ID NO: 5237605 - DNA, 25 bp, Homo sapien
agatgacatgatgaaggggctaaga

SEQ ID NO: 5237606 - DNA, 25 bp, Homo sapien
ggggcagctccagcataagggagat

SEQ ID NO: 5237607 - DNA, 25 bp, Homo sapien
tcagagagcccagtcacgataggca

SEQ ID NO: 5237608 - DNA, 25 bp, Homo sapien
accggattgaatggtgcagcctcca

SEQ ID NO: 5237609 - DNA, 25 bp, Homo sapien
cacttgccctggtgagaggagaccc

SEQ ID NO: 5237610 - DNA, 25 bp, Homo sapien
catggacactggtgacctcttggag

SEQ ID NO: 5237611 - DNA, 25 bp, Homo sapien
tatgaacacacaggagaacgctacc

SEQ ID NO: 5237612 - DNA, 25 bp, Homo sapien
gaatgacccgagtgccatgtgctgt

SEQ ID NO: 5237613 - DNA, 25 bp, Homo sapien
cttcgagacggtaacagagggcccg

SEQ ID NO: 5237614 - DNA, 25 bp, Homo sapien
tacaacgccgagagttacgaagtgg

SEQ ID NO: 5237615 - DNA, 25 bp, Homo sapien
taaaacactaccctgaaatgcctag

SEQ ID NO: 5237616 - DNA, 25 bp, Homo sapien
catgagtctttacctcagtgagtgc

SEQ ID NO: 5237617 - DNA, 25 bp, Homo sapien
tccagggactcccttggccatgagc

SEQ ID NO: 5237618 - DNA, 25 bp, Homo sapien
gcatgttcttcaacgcctggtttgg

SEQ ID NO: 5237619 - DNA, 25 bp, Homo sapien
cctgcacatgggacagaccgggctg

SEQ ID NO: 5237620 - DNA, 25 bp, Homo sapien
tgtgtgcgtcccagcaaaagagctc

SEQ ID NO: 5237621 - DNA, 25 bp, Homo sapien
tagggaccgtgtacagcttgataac

SEQ ID NO: 5237622 - DNA, 25 bp, Homo sapien
agagtggtgaattgcgctgcccgaa

SEQ ID NO: 5237623 - DNA, 25 bp, Homo sapien
tatctccccacacctaaaagagtgc

SEQ ID NO: 5237624 - DNA, 25 bp, Homo sapien
tatataagcctcacaagggctggca

SEQ ID NO: 5237625 - DNA, 25 bp, Homo sapien
cataataggtgctctgaggcaagga

SEQ ID NO: 5237626 - DNA, 25 bp, Homo sapien
tgcctggcacttagaccgtcagtca

SEQ ID NO: 5237627 - DNA, 25 bp, Homo sapien
cctggaaacgggaatggagctcatc

SEQ ID NO: 5237628 - DNA, 25 bp, Homo sapien
tgaaagaggctggtgaaatcatcgt

SEQ ID NO: 5237629 - DNA, 25 bp, Homo sapien
tctgtgtgcctgtgtccactttgtg

SEQ ID NO: 5237630 - DNA, 25 bp, Homo sapien
gatagcccacatttaccaagatctg

SEQ ID NO: 5237631 - DNA, 25 bp, Homo sapien
caggaaagactcttgaggttttgtg

SEQ ID NO: 5237632 - DNA, 25 bp, Homo sapien
gggttgaccagaaaggtcctcttca

SEQ ID NO: 5237633 - DNA, 25 bp, Homo sapien
gactcttgaggttttgtggaccctg

SEQ ID NO: 5237634 - DNA, 25 bp, Homo sapien
ctggatctttggtgctagggaagta

SEQ ID NO: 5237635 - DNA, 25 bp, Homo sapien
caagtcctcaggtcgattgccggat

SEQ ID NO: 5237636 - DNA, 25 bp, Homo sapien
gagctgagcggctcgcaagtcctca

SEQ ID NO: 5237637 - DNA, 25 bp, Homo sapien
gtcactacggagcagcgaagaggac

SEQ ID NO: 5237638 - DNA, 25 bp, Homo sapien
tgccggatttctgcaacacaacaat

SEQ ID NO: 5237639 - DNA, 25 bp, Homo sapien
ccatgcgaccagcaacaactggccc

SEQ ID NO: 5237640 - DNA, 25 bp, Homo sapien
actggcccgcgtaaactcgcccacg

SEQ ID NO: 5237641 - DNA, 25 bp, Homo sapien
accagcaacaactggcccgcgtaaa

SEQ ID NO: 5237642 - DNA, 25 bp, Homo sapien
taaactcgcccacgcccttagaaga

SEQ ID NO: 5237643 - DNA, 25 bp, Homo sapien
gaaacagggctcctgcaaacgagat

SEQ ID NO: 5237644 - DNA, 25 bp, Homo sapien
actgtgagatgaataccttggcccc

SEQ ID NO: 5237645 - DNA, 25 bp, Homo sapien
aaaaatcactgagcttgcctagccg

SEQ ID NO: 5237646 - DNA, 25 bp, Homo sapien
ataggcattcggctcccaaatcgag

SEQ ID NO: 5237647 - DNA, 25 bp, Homo sapien
agcagaaattatttagcagcagctc

SEQ ID NO: 5237648 - DNA, 25 bp, Homo sapien
tgagcagaaattatttagcagcagc

SEQ ID NO: 5237649 - DNA, 25 bp, Homo sapien
ctgagcagaaattatttagcagcag

SEQ ID NO: 5237650 - DNA, 25 bp, Homo sapien
gagcagaaattatttagcagcagct

SEQ ID NO: 5237651 - DNA, 25 bp, Homo sapien
aggccctgaaagaccggagcatccg

SEQ ID NO: 5237652 - DNA, 25 bp, Homo sapien
gggctgcatctggagccggcgacat

SEQ ID NO: 5237653 - DNA, 25 bp, Homo sapien
caaacagggagatcgacgcaggagc

SEQ ID NO: 5237654 - DNA, 25 bp, Homo sapien
catccgcgctgaggtcaaacaggga

SEQ ID NO: 5237655 - DNA, 25 bp, Homo sapien
ctgaacaggaagtacgcggagcccg

SEQ ID NO: 5237656 - DNA, 25 bp, Homo sapien
ggccagagcctccccaggcgcgtgg

SEQ ID NO: 5237657 - DNA, 25 bp, Homo sapien
gaagtacgcggagcccgggccagag

SEQ ID NO: 5237658 - DNA, 25 bp, Homo sapien
cagagcctccccaggcgcgtggctc

SEQ ID NO: 5237659 - DNA, 25 bp, Homo sapien
gagatccagcgtctgcaagtcctcc

SEQ ID NO: 5237660 - DNA, 25 bp, Homo sapien
tacagtttgtctaaggagaggtgca

SEQ ID NO: 5237661 - DNA, 25 bp, Homo sapien
gtgtgatatacaaagcagaggagga

SEQ ID NO: 5237662 - DNA, 25 bp, Homo sapien
gggcctggttaaatgtggaatacat

SEQ ID NO: 5237663 - DNA, 25 bp, Homo sapien
gaaggtctggtcacaagttgaacaa

SEQ ID NO: 5237664 - DNA, 25 bp, Homo sapien
ctctgaaatatccataggaccctgg

SEQ ID NO: 5237665 - DNA, 25 bp, Homo sapien
gaccctggagtagctttctttctgg

SEQ ID NO: 5237666 - DNA, 25 bp, Homo sapien
ctggaaggtctggtcacaagttgaa

SEQ ID NO: 5237667 - DNA, 25 bp, Homo sapien
gaggcttgtccttgagacgttgctt

SEQ ID NO: 5237668 - DNA, 25 bp, Homo sapien
taggttaaaccgatgccagtcaagc

SEQ ID NO: 5237669 - DNA, 25 bp, Homo sapien
gccagtcaagcttataatgttccct

SEQ ID NO: 5237670 - DNA, 25 bp, Homo sapien
tccttgagacgttgctttaggttaa

SEQ ID NO: 5237671 - DNA, 25 bp, Homo sapien
tgagatacacaagtttggtacccca

SEQ ID NO: 5237672 - DNA, 25 bp, Homo sapien
caaactctaaactagtgctttctta

SEQ ID NO: 5237673 - DNA, 25 bp, Homo sapien
tccatgtcctactcctacataggtc

SEQ ID NO: 5237674 - DNA, 25 bp, Homo sapien
gaagacagacaatatgagatacaca

SEQ ID NO: 5237675 - DNA, 25 bp, Homo sapien
tctgatcccgagatgctggaaagat

SEQ ID NO: 5237676 - DNA, 25 bp, Homo sapien
gacacagcggtaggcataaagaaac

SEQ ID NO: 5237677 - DNA, 25 bp, Homo sapien
gctgagtctgagtcttctgatcccg

SEQ ID NO: 5237678 - DNA, 25 bp, Homo sapien
ggtcggctcaacttctcaaatgtag

SEQ ID NO: 5237679 - DNA, 25 bp, Homo sapien
aatttgaggcttggcgaggcagtca

SEQ ID NO: 5237680 - DNA, 25 bp, Homo sapien
tgcactaggctaagggaaatctagg

SEQ ID NO: 5237681 - DNA, 25 bp, Homo sapien
aatctaggctgggtgtacaaaaggc

SEQ ID NO: 5237682 - DNA, 25 bp, Homo sapien
ctatgttgtcaagcgtgatacccac

SEQ ID NO: 5237683 - DNA, 25 bp, Homo sapien
ccttgaaatatagcaccagcaaagt

SEQ ID NO: 5237684 - DNA, 25 bp, Homo sapien
cttgaaatatagcaccagcaaagtg

SEQ ID NO: 5237685 - DNA, 25 bp, Homo sapien
gcaccacgcagtctctgggacctct

SEQ ID NO: 5237686 - DNA, 25 bp, Homo sapien
acctctactttgcaggttctgtagc

SEQ ID NO: 5237687 - DNA, 25 bp, Homo sapien
actcagtactggagaccagctggtg

SEQ ID NO: 5237688 - DNA, 25 bp, Homo sapien
gatccactccatccttacccccatg

SEQ ID NO: 5237689 - DNA, 25 bp, Homo sapien
tagacagcacagactcagtactgga

SEQ ID NO: 5237690 - DNA, 25 bp, Homo sapien
ctaacaggatccactccatccttac

SEQ ID NO: 5237691 - DNA, 25 bp, Homo sapien
tggcccgaaccgtatagcggtgaaa

SEQ ID NO: 5237692 - DNA, 25 bp, Homo sapien
cccgcttggcccgaaccgtatagcg

SEQ ID NO: 5237693 - DNA, 25 bp, Homo sapien
gcttggcccgaaccgtatagcggtg

SEQ ID NO: 5237694 - DNA, 25 bp, Homo sapien
cgcttggcccgaaccgtatagcggt

SEQ ID NO: 5237695 - DNA, 25 bp, Homo sapien
tgtagcgcctcaggttggctccagc

SEQ ID NO: 5237696 - DNA, 25 bp, Homo sapien
tagcgcctcaggttggctccagcag

SEQ ID NO: 5237697 - DNA, 25 bp, Homo sapien
gtagcgcctcaggttggctccagca

SEQ ID NO: 5237698 - DNA, 25 bp, Homo sapien
accagatctaaaaggcttaactcac

SEQ ID NO: 5237699 - DNA, 25 bp, Homo sapien
caccagatctaaaaggcttaactca

SEQ ID NO: 5237700 - DNA, 25 bp, Homo sapien
ccaccagatctaaaaggcttaactc

SEQ ID NO: 5237701 - DNA, 25 bp, Homo sapien
cctgcataccttcacttgctattta

SEQ ID NO: 5237702 - DNA, 25 bp, Homo sapien
tacctttgtctacctataatgaaaa

SEQ ID NO: 5237703 - DNA, 25 bp, Homo sapien
ctcatctacctttgtctacctataa

SEQ ID NO: 5237704 - DNA, 25 bp, Homo sapien
agtaactcagtcctgcataccttca

SEQ ID NO: 5237705 - DNA, 25 bp, Homo sapien
ggccctgccagcaggtcacgaacat

SEQ ID NO: 5237706 - DNA, 25 bp, Homo sapien
cagcctcctccagcgccttagccca

SEQ ID NO: 5237707 - DNA, 25 bp, Homo sapien
cctccagcgccttagcccagcttgg

SEQ ID NO: 5237708 - DNA, 25 bp, Homo sapien
cttggccctgccagcaggtcacgaa

SEQ ID NO: 5237709 - DNA, 25 bp, Homo sapien
gggtgctcccttgcctccaaagaac

SEQ ID NO: 5237710 - DNA, 25 bp, Homo sapien
tccaaagaacaaagaccggccagag

SEQ ID NO: 5237711 - DNA, 25 bp, Homo sapien
tagacatgcaaagtggtcagcttat

SEQ ID NO: 5237712 - DNA, 25 bp, Homo sapien
gcttatggagcacacgctgtagctc

SEQ ID NO: 5237713 - DNA, 25 bp, Homo sapien
tctcaatgcagatgtagctgggctg

SEQ ID NO: 5237714 - DNA, 25 bp, Homo sapien
agaaaatcctctggatataccaatg

SEQ ID NO: 5237715 - DNA, 25 bp, Homo sapien
gctagcgcaggtttctctcaatgca

SEQ ID NO: 5237716 - DNA, 25 bp, Homo sapien
ctgaggagaagctagcgcaggtttc

SEQ ID NO: 5237717 - DNA, 25 bp, Homo sapien
tctgaggtgagtgcagtctgactgc

SEQ ID NO: 5237718 - DNA, 25 bp, Homo sapien
gagtgcagtctgactgcttcccgag

SEQ ID NO: 5237719 - DNA, 25 bp, Homo sapien
catccctgcagatctttcttatttc

SEQ ID NO: 5237720 - DNA, 25 bp, Homo sapien
gtctgactgcttcccgagggtcttc

SEQ ID NO: 5237721 - DNA, 25 bp, Homo sapien
cagttatgagagtagggaatttgcc

SEQ ID NO: 5237722 - DNA, 25 bp, Homo sapien
tccgtatgagtagccttagggtgcc

SEQ ID NO: 5237723 - DNA, 25 bp, Homo sapien
tagggtgccgcacaatagaggaaag

SEQ ID NO: 5237724 - DNA, 25 bp, Homo sapien
taaaagtagcacatcaagagctgag

SEQ ID NO: 5237725 - DNA, 25 bp, Homo sapien
gaaaaacctgacatgtgaaatccat

SEQ ID NO: 5237726 - DNA, 25 bp, Homo sapien
cactagctccaactctacctgaaag

SEQ ID NO: 5237727 - DNA, 25 bp, Homo sapien
cctgggatgactgtgtggaaggctc

SEQ ID NO: 5237728 - DNA, 25 bp, Homo sapien
acttcagactcacaaagatccagag

SEQ ID NO: 5237729 - DNA, 25 bp, Homo sapien
tgctggagaagagtccgatgtgccc

SEQ ID NO: 5237730 - DNA, 25 bp, Homo sapien
gctagctgcagctttagcactccaa

SEQ ID NO: 5237731 - DNA, 25 bp, Homo sapien
cagagacagaactctagggtctgca

SEQ ID NO: 5237732 - DNA, 25 bp, Homo sapien
gctttggcctcatccagcaaagggc

SEQ ID NO: 5237733 - DNA, 25 bp, Homo sapien
tgcatgcaggagagtaaagccaccg

SEQ ID NO: 5237734 - DNA, 25 bp, Homo sapien
gaccaagggaatattgccaagtagc

SEQ ID NO: 5237735 - DNA, 25 bp, Homo sapien
ctctatacccaaaatgactcaggat

SEQ ID NO: 5237736 - DNA, 25 bp, Homo sapien
actcaggatggggacctttactcac

SEQ ID NO: 5237737 - DNA, 25 bp, Homo sapien
tattgccaagtagccaatgccaact

SEQ ID NO: 5237738 - DNA, 25 bp, Homo sapien
gattcttctccatgaaccttcggaa

SEQ ID NO: 5237739 - DNA, 25 bp, Homo sapien
cgcaacagtataaggtggccgggcc

SEQ ID NO: 5237740 - DNA, 25 bp, Homo sapien
accttcggaactcattacgtgttga

SEQ ID NO: 5237741 - DNA, 25 bp, Homo sapien
aatcgtaggcatctggattcttctc

SEQ ID NO: 5237742 - DNA, 25 bp, Homo sapien
aagtagaaaggatctagccaggatc

SEQ ID NO: 5237743 - DNA, 25 bp, Homo sapien
tggaggatttcaaatataagaccct

SEQ ID NO: 5237744 - DNA, 25 bp, Homo sapien
tctttggtaaaactgcaagaagtag

SEQ ID NO: 5237745 - DNA, 25 bp, Homo sapien
tataagaccctataagttatctttg

SEQ ID NO: 5237746 - DNA, 25 bp, Homo sapien
gagggcggcaaatcgccgctgctct

SEQ ID NO: 5237747 - DNA, 25 bp, Homo sapien
tcccttttccgtgtagcctgccgtg

SEQ ID NO: 5237748 - DNA, 25 bp, Homo sapien
gctgttcctcccgttgccgccgggc

SEQ ID NO: 5237749 - DNA, 25 bp, Homo sapien
gcaaatcgccgctgctcttctcgtt

SEQ ID NO: 5237750 - DNA, 25 bp, Homo sapien
cagagtcagggattggagaggtagg

SEQ ID NO: 5237751 - DNA, 25 bp, Homo sapien
ggtaggggctcccaactgggcagcg

SEQ ID NO: 5237752 - DNA, 25 bp, Homo sapien
cgagtattgacgattgcagagtcag

SEQ ID NO: 5237753 - DNA, 25 bp, Homo sapien
tgggcagcgagtcggcgctctgcag

SEQ ID NO: 5237754 - DNA, 25 bp, Homo sapien
ccaatggtccctgcaacattacagt

SEQ ID NO: 5237755 - DNA, 25 bp, Homo sapien
gaaactttccaatccacgctctccc

SEQ ID NO: 5237756 - DNA, 25 bp, Homo sapien
ccccagaaactttccaatccacgct

SEQ ID NO: 5237757 - DNA, 25 bp, Homo sapien
gccagaacatcccaaattccctcaa

SEQ ID NO: 5237758 - DNA, 25 bp, Homo sapien
aagtcgaggtagtgaaagggagtca

SEQ ID NO: 5237759 - DNA, 25 bp, Homo sapien
cagaaagagaagtcgaggtagtgaa

SEQ ID NO: 5237760 - DNA, 25 bp, Homo sapien
tggaggcaacgtgtggagcagaaag

SEQ ID NO: 5237761 - DNA, 25 bp, Homo sapien
agtcaggccttggagggatgcccca

SEQ ID NO: 5237762 - DNA, 25 bp, Homo sapien
gcctccctgcctgacggcgatgatc

SEQ ID NO: 5237763 - DNA, 25 bp, Homo sapien
tgtgaatgtgccctctcaggtccct

SEQ ID NO: 5237764 - DNA, 25 bp, Homo sapien
ggctgctgtgaatgtgccctctcag

SEQ ID NO: 5237765 - DNA, 25 bp, Homo sapien
tgccctctcaggtccctgagttggc

SEQ ID NO: 5237766 - DNA, 25 bp, Homo sapien
tggccccaggtagagctgtaagaga

SEQ ID NO: 5237767 - DNA, 25 bp, Homo sapien
ctttgccctagttcccgagtgtcct

SEQ ID NO: 5237768 - DNA, 25 bp, Homo sapien
ttaaaattccagagacagtaccagc

SEQ ID NO: 5237769 - DNA, 25 bp, Homo sapien
cacatacctctagccctgtctttgc

SEQ ID NO: 5237770 - DNA, 25 bp, Homo sapien
tccaaatcatctctggtttcacggg

SEQ ID NO: 5237771 - DNA, 25 bp, Homo sapien
caaatatacaaggtgcttagggttg

SEQ ID NO: 5237772 - DNA, 25 bp, Homo sapien
ctttagacttccttgccgcagtgga

SEQ ID NO: 5237773 - DNA, 25 bp, Homo sapien
gtggactcctggttcaaggtcttgc

SEQ ID NO: 5237774 - DNA, 25 bp, Homo sapien
atatccatggctttatcacaatggg

SEQ ID NO: 5237775 - DNA, 25 bp, Homo sapien
gccagagagaagcgccaccgaccgg

SEQ ID NO: 5237776 - DNA, 25 bp, Homo sapien
atcgcgccgcaaaagcagagcatag

SEQ ID NO: 5237777 - DNA, 25 bp, Homo sapien
tgggccatctgcactgccggactga

SEQ ID NO: 5237778 - DNA, 25 bp, Homo sapien
tagtttcagaggacgtgcgaggctc

SEQ ID NO: 5237779 - DNA, 25 bp, Homo sapien
ggtcaggcgccttacggcctcagga

SEQ ID NO: 5237780 - DNA, 25 bp, Homo sapien
ggcacaatccagacgacccatgaag

SEQ ID NO: 5237781 - DNA, 25 bp, Homo sapien
agaaaacaacggcagggtcacaggt

SEQ ID NO: 5237782 - DNA, 25 bp, Homo sapien
ccatgaagtaccaatgcggagagct

SEQ ID NO: 5237783 - DNA, 25 bp, Homo sapien
caatgcggagagctcaggcccaggt

SEQ ID NO: 5237784 - DNA, 25 bp, Homo sapien
ggtctgaggctaccgaagagctcgt

SEQ ID NO: 5237785 - DNA, 25 bp, Homo sapien
caaggacggtctgaggctaccgaag

SEQ ID NO: 5237786 - DNA, 25 bp, Homo sapien
cctcttcaaggacggtctgaggcta

SEQ ID NO: 5237787 - DNA, 25 bp, Homo sapien
ggctaccgaagagctcgtccagggt

SEQ ID NO: 5237788 - DNA, 25 bp, Homo sapien
ctggatgaagaggtagcgcttattg

SEQ ID NO: 5237789 - DNA, 25 bp, Homo sapien
gaagaggtagcgcttattgtcaatg

SEQ ID NO: 5237790 - DNA, 25 bp, Homo sapien
gaggtagcgcttattgtcaatgatg

SEQ ID NO: 5237791 - DNA, 25 bp, Homo sapien
gatgaagaggtagcgcttattgtca

SEQ ID NO: 5237792 - DNA, 25 bp, Homo sapien
caagtacttgtcaaccccgcattgg

SEQ ID NO: 5237793 - DNA, 25 bp, Homo sapien
cctcaggagcagagatatagaaatc

SEQ ID NO: 5237794 - DNA, 25 bp, Homo sapien
catggtttatcaaggtcacacgagg

SEQ ID NO: 5237795 - DNA, 25 bp, Homo sapien
ctgaagaatattacaccgtgagctc

SEQ ID NO: 5237796 - DNA, 25 bp, Homo sapien
ctgtgggccaaaggggtcaataaag

SEQ ID NO: 5237797 - DNA, 25 bp, Homo sapien
gcttggacctagagaaatttcctgg

SEQ ID NO: 5237798 - DNA, 25 bp, Homo sapien
cccacatggcttggacctagagaaa

SEQ ID NO: 5237799 - DNA, 25 bp, Homo sapien
taaagggccatggtcatctcccaca

SEQ ID NO: 5237800 - DNA, 25 bp, Homo sapien
cttcagggcgtagaagtgtccatca

SEQ ID NO: 5237801 - DNA, 25 bp, Homo sapien
catcatgtaacccttccactaggtc

SEQ ID NO: 5237802 - DNA, 25 bp, Homo sapien
aagtgtccatcatgtaacccttcca

SEQ ID NO: 5237803 - DNA, 25 bp, Homo sapien
ttccactaggtccacatagctgaac

SEQ ID NO: 5237804 - DNA, 25 bp, Homo sapien
gatgcatgtcggcttctcgctgggc

SEQ ID NO: 5237805 - DNA, 25 bp, Homo sapien
ttgaagaatggtagcagcagccagg

SEQ ID NO: 5237806 - DNA, 25 bp, Homo sapien
ctcagacagtaagccacgaggcgaa

SEQ ID NO: 5237807 - DNA, 25 bp, Homo sapien
attgaagaggcgatgcatgtcggct

SEQ ID NO: 5237808 - DNA, 25 bp, Homo sapien
ctccataaccaggagtctttctgac

SEQ ID NO: 5237809 - DNA, 25 bp, Homo sapien
ccctccataaccaggagtctttctg

SEQ ID NO: 5237810 - DNA, 25 bp, Homo sapien
cacacagcccttgagtaggtggctc

SEQ ID NO: 5237811 - DNA, 25 bp, Homo sapien
acacagcccttgagtaggtggctct

SEQ ID NO: 5237812 - DNA, 25 bp, Homo sapien
ctatctcattccacagcgtacctct

SEQ ID NO: 5237813 - DNA, 25 bp, Homo sapien
ccaaaggatttgatcctcggtcagg

SEQ ID NO: 5237814 - DNA, 25 bp, Homo sapien
caaaggatttgatcctcggtcagga

SEQ ID NO: 5237815 - DNA, 25 bp, Homo sapien
gccaaaggatttgatcctcggtcag

SEQ ID NO: 5237816 - DNA, 25 bp, Homo sapien
tgcagggtcagagcctggcgggagc

SEQ ID NO: 5237817 - DNA, 25 bp, Homo sapien
agcctggcgggagccctccacatgg

SEQ ID NO: 5237818 - DNA, 25 bp, Homo sapien
cctcatctccaagcaatatattggt

SEQ ID NO: 5237819 - DNA, 25 bp, Homo sapien
ctccacatggatgcatgcttgattc

SEQ ID NO: 5237820 - DNA, 25 bp, Homo sapien
gagctcaaaagtggggcacaggtca

SEQ ID NO: 5237821 - DNA, 25 bp, Homo sapien
aactgggacatgcaccagaaggggt

SEQ ID NO: 5237822 - DNA, 25 bp, Homo sapien
cagtgatcccagagctcaaaagtgg

SEQ ID NO: 5237823 - DNA, 25 bp, Homo sapien
caaaagtggggcacaggtcatggtc

SEQ ID NO: 5237824 - DNA, 25 bp, Homo sapien
taggagatggtgcaccgctgggctg

SEQ ID NO: 5237825 - DNA, 25 bp, Homo sapien
atggtgcaccgctgggctgcccagt

SEQ ID NO: 5237826 - DNA, 25 bp, Homo sapien
ccagacatcagtccgctcatcgatg

SEQ ID NO: 5237827 - DNA, 25 bp, Homo sapien
tcgatgacacagtgactctgcacag

SEQ ID NO: 5237828 - DNA, 25 bp, Homo sapien
actgtcacccttttggaacaccatg

SEQ ID NO: 5237829 - DNA, 25 bp, Homo sapien
aacatcatggcatatagcacgcagc

SEQ ID NO: 5237830 - DNA, 25 bp, Homo sapien
acactgtcacccttttggaacacca

SEQ ID NO: 5237831 - DNA, 25 bp, Homo sapien
ttggaacaccatgtcataagggcct

SEQ ID NO: 5237832 - DNA, 25 bp, Homo sapien
gtcatcatcgagttcaggagctgcc

SEQ ID NO: 5237833 - DNA, 25 bp, Homo sapien
caggagctgccgcaatgctgaagaa

SEQ ID NO: 5237834 - DNA, 25 bp, Homo sapien
tcagatttgggtagtatgttggcca

SEQ ID NO: 5237835 - DNA, 25 bp, Homo sapien
gaggaatgtgaggacgctgatgcgg

SEQ ID NO: 5237836 - DNA, 25 bp, Homo sapien
atggaatgggtggtgattccaatga

SEQ ID NO: 5237837 - DNA, 25 bp, Homo sapien
gaagaaaagatgcaggactgagatg

SEQ ID NO: 5237838 - DNA, 25 bp, Homo sapien
ccccaagtgtaagagaagtcctgga

SEQ ID NO: 5237839 - DNA, 25 bp, Homo sapien
agagccatgttccatatcccaccag

SEQ ID NO: 5237840 - DNA, 25 bp, Homo sapien
tatgagcttgaacgatcagggagac

SEQ ID NO: 5237841 - DNA, 25 bp, Homo sapien
tagtgggagactcctgctagggccc

SEQ ID NO: 5237842 - DNA, 25 bp, Homo sapien
ttgactaagctactcaccccaggag

SEQ ID NO: 5237843 - DNA, 25 bp, Homo sapien
catggagccacgtcataagcttggg

SEQ ID NO: 5237844 - DNA, 25 bp, Homo sapien
caaccagatggtaaagtgtgatccc

SEQ ID NO: 5237845 - DNA, 25 bp, Homo sapien
gatgtggtgcccaaggatgtcaacg

SEQ ID NO: 5237846 - DNA, 25 bp, Homo sapien
gaaaaggcataccacgagcagctgt

SEQ ID NO: 5237847 - DNA, 25 bp, Homo sapien
gggccctcaatgtggacctgacaga

SEQ ID NO: 5237848 - DNA, 25 bp, Homo sapien
caccccgcgtctgagctgagagggt

SEQ ID NO: 5237849 - DNA, 25 bp, Homo sapien
tcggcctcctgaagcgagctggccc

SEQ ID NO: 5237850 - DNA, 25 bp, Homo sapien
cgtgactcagcaccccgcgtctgag

SEQ ID NO: 5237851 - DNA, 25 bp, Homo sapien
cgaagcccgggtgcgcggatgggca

SEQ ID NO: 5237852 - DNA, 25 bp, Homo sapien
gggatagatctgtgagaggcctgca

SEQ ID NO: 5237853 - DNA, 25 bp, Homo sapien
ctgcaggatagtgagcagggataga

SEQ ID NO: 5237854 - DNA, 25 bp, Homo sapien
atagtgagcagggatagatctgtga

SEQ ID NO: 5237855 - DNA, 25 bp, Homo sapien
atagatctgtgagaggcctgcagcg

SEQ ID NO: 5237856 - DNA, 25 bp, Homo sapien
ctggctggggtcttgtctctctgtc

SEQ ID NO: 5237857 - DNA, 25 bp, Homo sapien
ggctggggtcttgtctctctgtctg

SEQ ID NO: 5237858 - DNA, 25 bp, Homo sapien
gggctggctggggtcttgtctctct

SEQ ID NO: 5237859 - DNA, 25 bp, Homo sapien
gctggctggggtcttgtctctctgt

SEQ ID NO: 5237860 - DNA, 25 bp, Homo sapien
gcaaagggcagagaacggccttcac

SEQ ID NO: 5237861 - DNA, 25 bp, Homo sapien
cagagggaaacatatcatgcctgga

SEQ ID NO: 5237862 - DNA, 25 bp, Homo sapien
agagaacggccttcacagagggaaa

SEQ ID NO: 5237863 - DNA, 25 bp, Homo sapien
agggaaacatatcatgcctggacat

SEQ ID NO: 5237864 - DNA, 25 bp, Homo sapien
cctgccccacgtggactgagatgca

SEQ ID NO: 5237865 - DNA, 25 bp, Homo sapien
gggaagctataccacagacaccatg

SEQ ID NO: 5237866 - DNA, 25 bp, Homo sapien
ggagttctaattggctgcagcacct

SEQ ID NO: 5237867 - DNA, 25 bp, Homo sapien
agtaggacttgctgtggtacccagg

SEQ ID NO: 5237868 - DNA, 25 bp, Homo sapien
tgggactgatcatcacagcgggctc

SEQ ID NO: 5237869 - DNA, 25 bp, Homo sapien
aatccagctgctggagccccagggg

SEQ ID NO: 5237870 - DNA, 25 bp, Homo sapien
tccagctgctggagccccaggggac

SEQ ID NO: 5237871 - DNA, 25 bp, Homo sapien
gcaatccagctgctggagccccagg

SEQ ID NO: 5237872 - DNA, 25 bp, Homo sapien
ctccctttgcaatccagctgctgga

SEQ ID NO: 5237873 - DNA, 25 bp, Homo sapien
ttcccaatggtgtagtggccccagg

SEQ ID NO: 5237874 - DNA, 25 bp, Homo sapien
agtagcaggtcgatgaactccttcc

SEQ ID NO: 5237875 - DNA, 25 bp, Homo sapien
cagcttccgaatccggtccagtagc

SEQ ID NO: 5237876 - DNA, 25 bp, Homo sapien
gaactccttcccaatggtgtagtgg

SEQ ID NO: 5237877 - DNA, 25 bp, Homo sapien
acaggaatccagattcattccccct

SEQ ID NO: 5237878 - DNA, 25 bp, Homo sapien
caggaatccagattcattccccctg

SEQ ID NO: 5237879 - DNA, 25 bp, Homo sapien
aggaatccagattcattccccctgc

SEQ ID NO: 5237880 - DNA, 25 bp, Homo sapien
gaatccagattcattccccctgccc

SEQ ID NO: 5237881 - DNA, 25 bp, Homo sapien
tttggctaatgaggcgattgaggtt

SEQ ID NO: 5237882 - DNA, 25 bp, Homo sapien
gacaatttggctaatgaggcgattg

SEQ ID NO: 5237883 - DNA, 25 bp, Homo sapien
ggttgggcgctcgatgtctaggttg

SEQ ID NO: 5237884 - DNA, 25 bp, Homo sapien
caatttggctaatgaggcgattgag

SEQ ID NO: 5237885 - DNA, 25 bp, Homo sapien
attgagggccccgtcaaagcgcaga

SEQ ID NO: 5237886 - DNA, 25 bp, Homo sapien
tgagggccccgtcaaagcgcagaga

SEQ ID NO: 5237887 - DNA, 25 bp, Homo sapien
tggaactctgtcaggtccacattga

SEQ ID NO: 5237888 - DNA, 25 bp, Homo sapien
agggccccgtcaaagcgcagagaag

SEQ ID NO: 5237889 - DNA, 25 bp, Homo sapien
ctggtgcataggtggccagggggaa

SEQ ID NO: 5237890 - DNA, 25 bp, Homo sapien
gccagggggaagtggatgtgaggta

SEQ ID NO: 5237891 - DNA, 25 bp, Homo sapien
agggggaagtggatgtgaggtagga

SEQ ID NO: 5237892 - DNA, 25 bp, Homo sapien
gggaagtggatgtgaggtaggacac

SEQ ID NO: 5237893 - DNA, 25 bp, Homo sapien
cattggtaatctctgccaccaacag

SEQ ID NO: 5237894 - DNA, 25 bp, Homo sapien
ggcaggctcaaagcaggcattggta

SEQ ID NO: 5237895 - DNA, 25 bp, Homo sapien
caggctcaaagcaggcattggtaat

SEQ ID NO: 5237896 - DNA, 25 bp, Homo sapien
tctgccaccaacagctgctcgtggt

SEQ ID NO: 5237897 - DNA, 25 bp, Homo sapien
tgggaggctggtgattgatatcaac

SEQ ID NO: 5237898 - DNA, 25 bp, Homo sapien
tggtgattgatatcaaccttaaagc

SEQ ID NO: 5237899 - DNA, 25 bp, Homo sapien
ggctggtgattgatatcaaccttaa

SEQ ID NO: 5237900 - DNA, 25 bp, Homo sapien
gattgatatcaaccttaaagcctgt

SEQ ID NO: 5237901 - DNA, 25 bp, Homo sapien
catagtgatggctgtcatgttgctc

SEQ ID NO: 5237902 - DNA, 25 bp, Homo sapien
agtgatggctgtcatgttgctcagc

SEQ ID NO: 5237903 - DNA, 25 bp, Homo sapien
aggcgggcccaggccatagtgatgg

SEQ ID NO: 5237904 - DNA, 25 bp, Homo sapien
ggcccaggccatagtgatggctgtc

SEQ ID NO: 5237905 - DNA, 25 bp, Homo sapien
cgccctcttggcatacatcaggtca

SEQ ID NO: 5237906 - DNA, 25 bp, Homo sapien
tcagtgcccaaacgccctcttggca

SEQ ID NO: 5237907 - DNA, 25 bp, Homo sapien
ccctcttggcatacatcaggtcaaa

SEQ ID NO: 5237908 - DNA, 25 bp, Homo sapien
agtgcccaaacgccctcttggcata

SEQ ID NO: 5237909 - DNA, 25 bp, Homo sapien
gcagtcatatcctcatgggccttgg

SEQ ID NO: 5237910 - DNA, 25 bp, Homo sapien
agtcatatcctcatgggccttggag

SEQ ID NO: 5237911 - DNA, 25 bp, Homo sapien
cagtcatatcctcatgggccttgga

SEQ ID NO: 5237912 - DNA, 25 bp, Homo sapien
cacagcactttatgtaggacagaca

SEQ ID NO: 5237913 - DNA, 25 bp, Homo sapien
acagtattcccctagtattcatccc

SEQ ID NO: 5237914 - DNA, 25 bp, Homo sapien
tgtaggacagacacacagtattccc

SEQ ID NO: 5237915 - DNA, 25 bp, Homo sapien
gacagacacacagtattcccctagt

SEQ ID NO: 5237916 - DNA, 25 bp, Homo sapien
catgcgtcagcggtgcggaaactac

SEQ ID NO: 5237917 - DNA, 25 bp, Homo sapien
cagctgtgcgcgcaggcatgcgtca

SEQ ID NO: 5237918 - DNA, 25 bp, Homo sapien
agcggtgcggaaactactagagacg

SEQ ID NO: 5237919 - DNA, 25 bp, Homo sapien
tcgcggctgctgcgtaggacgcgcc

SEQ ID NO: 5237920 - DNA, 25 bp, Homo sapien
gtcccggcctcctgcggcgccccgc

SEQ ID NO: 5237921 - DNA, 25 bp, Homo sapien
tcctccgccaggagtcccggcctcc

SEQ ID NO: 5237922 - DNA, 25 bp, Homo sapien
ctcctccgccaggagtcccggcctc

SEQ ID NO: 5237923 - DNA, 25 bp, Homo sapien
ggcctcctgcggcgccccgcccctg

SEQ ID NO: 5237924 - DNA, 25 bp, Homo sapien
gtcaggcggaaagaaccaagagccc

SEQ ID NO: 5237925 - DNA, 25 bp, Homo sapien
ttggaagcggagcacaccgggctct

SEQ ID NO: 5237926 - DNA, 25 bp, Homo sapien
tgcttgcggccggtgactaggctcc

SEQ ID NO: 5237927 - DNA, 25 bp, Homo sapien
gggccaagagctatctcgacgccca

SEQ ID NO: 5237928 - DNA, 25 bp, Homo sapien
actggtcagtcgtcaggcgggcctc

SEQ ID NO: 5237929 - DNA, 25 bp, Homo sapien
ggcaactggtcagtcgtcaggcggg

SEQ ID NO: 5237930 - DNA, 25 bp, Homo sapien
ggtcagtcgtcaggcgggcctcctt

SEQ ID NO: 5237931 - DNA, 25 bp, Homo sapien
caactggtcagtcgtcaggcgggcc

SEQ ID NO: 5237932 - DNA, 25 bp, Homo sapien
tctaggatctcgtagtaggatgcca

SEQ ID NO: 5237933 - DNA, 25 bp, Homo sapien
cttgatgtcatcagcggacgcactt

SEQ ID NO: 5237934 - DNA, 25 bp, Homo sapien
gcacttcgcggcacgtctaggatct

SEQ ID NO: 5237935 - DNA, 25 bp, Homo sapien
atgtcatcagcggacgcacttcgcg

SEQ ID NO: 5237936 - DNA, 25 bp, Homo sapien
aggtgtcactctgaagtgccccatg

SEQ ID NO: 5237937 - DNA, 25 bp, Homo sapien
ttctgttgcatacggaggcacttac

SEQ ID NO: 5237938 - DNA, 25 bp, Homo sapien
ggtcttctgttgcatacggaggcac

SEQ ID NO: 5237939 - DNA, 25 bp, Homo sapien
tcttctgttgcatacggaggcactt

SEQ ID NO: 5237940 - DNA, 25 bp, Homo sapien
ccactggagagccttgcgccgatac

SEQ ID NO: 5237941 - DNA, 25 bp, Homo sapien
cccaggctaggacgttcaaaggatt

SEQ ID NO: 5237942 - DNA, 25 bp, Homo sapien
tcataggacggctgtgagaactcat

SEQ ID NO: 5237943 - DNA, 25 bp, Homo sapien
ctaaatgtcaccttctcggagaggc

SEQ ID NO: 5237944 - DNA, 25 bp, Homo sapien
tataggtttaggcagcaactcagcc

SEQ ID NO: 5237945 - DNA, 25 bp, Homo sapien
tagcggtcgtaaatctcccgcttgt

SEQ ID NO: 5237946 - DNA, 25 bp, Homo sapien
cggtcgtaaatctcccgcttgtgct

SEQ ID NO: 5237947 - DNA, 25 bp, Homo sapien
cttcccggccatagcggtcgtaaat

SEQ ID NO: 5237948 - DNA, 25 bp, Homo sapien
ggccatagcggtcgtaaatctcccg

SEQ ID NO: 5237949 - DNA, 25 bp, Homo sapien
caaagagctctgcaaaagggtctcc

SEQ ID NO: 5237950 - DNA, 25 bp, Homo sapien
cagcttctgcccgagatgggccagt

SEQ ID NO: 5237951 - DNA, 25 bp, Homo sapien
cactgccagcttctgcccgagatgg

SEQ ID NO: 5237952 - DNA, 25 bp, Homo sapien
tctccactcccaaagaattcccgga

SEQ ID NO: 5237953 - DNA, 25 bp, Homo sapien
tgtgactctgggctattaactgtgc

SEQ ID NO: 5237954 - DNA, 25 bp, Homo sapien
agtacaggcaaatcatcatgacgcg

SEQ ID NO: 5237955 - DNA, 25 bp, Homo sapien
tcatgacgcgatgacaggcagacac

SEQ ID NO: 5237956 - DNA, 25 bp, Homo sapien
ccagctctgccatgtgttatgtgac

SEQ ID NO: 5237957 - DNA, 25 bp, Homo sapien
ctgagtgtcgggaaccccggttctg

SEQ ID NO: 5237958 - DNA, 25 bp, Homo sapien
tgagtgtcgggaaccccggttctga

SEQ ID NO: 5237959 - DNA, 25 bp, Homo sapien
acacaggagacaggcttggaaaagc

SEQ ID NO: 5237960 - DNA, 25 bp, Homo sapien
gaatcggagcttgcaaacgtgggaa

SEQ ID NO: 5237961 - DNA, 25 bp, Homo sapien
tagaagaagactgcgctgcctgttg

SEQ ID NO: 5237962 - DNA, 25 bp, Homo sapien
gggttccaggaatcggagcttgcaa

SEQ ID NO: 5237963 - DNA, 25 bp, Homo sapien
gaaggagaaagatgaggaggagaaa

SEQ ID NO: 5237964 - DNA, 25 bp, Homo sapien
ctgaaggagaaagatgaggaggaga

SEQ ID NO: 5237965 - DNA, 25 bp, Homo sapien
tgaaggagaaagatgaggaggagaa

SEQ ID NO: 5237966 - DNA, 25 bp, Homo sapien
aaggagaaagatgaggaggagaaat

SEQ ID NO: 5237967 - DNA, 25 bp, Homo sapien
ctgcgtgtggtgatgcggcgtcctt

SEQ ID NO: 5237968 - DNA, 25 bp, Homo sapien
caaaggtggtagatgtagaaacaga

SEQ ID NO: 5237969 - DNA, 25 bp, Homo sapien
tgatgcggcgtccttggacaaaggt

SEQ ID NO: 5237970 - DNA, 25 bp, Homo sapien
gatgtagaaacagagcgaaaagcac

SEQ ID NO: 5237971 - DNA, 25 bp, Homo sapien
gagccaactttctatttgaacacag

SEQ ID NO: 5237972 - DNA, 25 bp, Homo sapien
cagcacagttcaggcaacgagcagt

SEQ ID NO: 5237973 - DNA, 25 bp, Homo sapien
cagttctggccaccgcagtagagag

SEQ ID NO: 5237974 - DNA, 25 bp, Homo sapien
cagtagagagcgcagactgggccct

SEQ ID NO: 5237975 - DNA, 25 bp, Homo sapien
acttccacccgctcctgcccgttct

SEQ ID NO: 5237976 - DNA, 25 bp, Homo sapien
ttgattgtgactgacttcagctgcc

SEQ ID NO: 5237977 - DNA, 25 bp, Homo sapien
gattgtgactgacttcagctgccca

SEQ ID NO: 5237978 - DNA, 25 bp, Homo sapien
cattgattgtgactgacttcagctg

SEQ ID NO: 5237979 - DNA, 25 bp, Homo sapien
atcctcagagaggtcgctgtccaag

SEQ ID NO: 5237980 - DNA, 25 bp, Homo sapien
ccagacctggaagtgactgacggct

SEQ ID NO: 5237981 - DNA, 25 bp, Homo sapien
agtgactgacggctgctgctcgcga

SEQ ID NO: 5237982 - DNA, 25 bp, Homo sapien
tgctcgcgacggctcagctccaagc

SEQ ID NO: 5237983 - DNA, 25 bp, Homo sapien
ctcctctggggatggactgcgtttg

SEQ ID NO: 5237984 - DNA, 25 bp, Homo sapien
gttgcttcacccctcgcaccctcct

SEQ ID NO: 5237985 - DNA, 25 bp, Homo sapien
tgccgtcggtgctgtgcctcccgcc

SEQ ID NO: 5237986 - DNA, 25 bp, Homo sapien
gccgcccctgccgtcggtgctgtgc

SEQ ID NO: 5237987 - DNA, 25 bp, Homo sapien
gcagtgaaagcaagcgatgcggccc

SEQ ID NO: 5237988 - DNA, 25 bp, Homo sapien
acacaggtggcagagtaccagggca

SEQ ID NO: 5237989 - DNA, 25 bp, Homo sapien
aataaatgcaacctggctcctcggg

SEQ ID NO: 5237990 - DNA, 25 bp, Homo sapien
tctggatcagatcaggttgggcccg

SEQ ID NO: 5237991 - DNA, 25 bp, Homo sapien
cctgatttgtggtagggaagcagta

SEQ ID NO: 5237992 - DNA, 25 bp, Homo sapien
gaagcagtatgggtgcagtcccctc

SEQ ID NO: 5237993 - DNA, 25 bp, Homo sapien
tgacaggagagagcgtcagcggcaa

SEQ ID NO: 5237994 - DNA, 25 bp, Homo sapien
tcagcggcaagctgtggaggatggg

SEQ ID NO: 5237995 - DNA, 25 bp, Homo sapien
ggatctatcagaaatgaggccgggc

SEQ ID NO: 5237996 - DNA, 25 bp, Homo sapien
cccaaggaagagagtgcacaggcta

SEQ ID NO: 5237997 - DNA, 25 bp, Homo sapien
atctcacagcgagtgacaagccgac

SEQ ID NO: 5237998 - DNA, 25 bp, Homo sapien
tgtgcagcgattctggaacccggca

SEQ ID NO: 5237999 - DNA, 25 bp, Homo sapien
caagacgtgtcaggggaaccaaggc

SEQ ID NO: 5238000 - DNA, 25 bp, Homo sapien
gcaagacgtgtcaggggaaccaagg

SEQ ID NO: 5238001 - DNA, 25 bp, Homo sapien
agcaagacgtgtcaggggaaccaag

SEQ ID NO: 5238002 - DNA, 25 bp, Homo sapien
aagacgtgtcaggggaaccaaggct

SEQ ID NO: 5238003 - DNA, 25 bp, Homo sapien
gtggccttgccctcgaagctctctg

SEQ ID NO: 5238004 - DNA, 25 bp, Homo sapien
tacaagcagcggcatgcctggagct

SEQ ID NO: 5238005 - DNA, 25 bp, Homo sapien
cctggagctgccatcacatgccaag

SEQ ID NO: 5238006 - DNA, 25 bp, Homo sapien
ggaaaggtaccgctcccaggtgctg

SEQ ID NO: 5238007 - DNA, 25 bp, Homo sapien
ctgaggctcagtgttacagcgactg

SEQ ID NO: 5238008 - DNA, 25 bp, Homo sapien
agtgttacagcgactggctccacca

SEQ ID NO: 5238009 - DNA, 25 bp, Homo sapien
tcagcccagctggttttggttcgtc

SEQ ID NO: 5238010 - DNA, 25 bp, Homo sapien
ggttttggttcgtctctgaggctca

SEQ ID NO: 5238011 - DNA, 25 bp, Homo sapien
caactggcaaggcctgcacctctag

SEQ ID NO: 5238012 - DNA, 25 bp, Homo sapien
tcaactggcaaggcctgcacctcta

SEQ ID NO: 5238013 - DNA, 25 bp, Homo sapien
gcagcctggtcaaagagggcatttc

SEQ ID NO: 5238014 - DNA, 25 bp, Homo sapien
gagggcagcctggtcaaagagggca

SEQ ID NO: 5238015 - DNA, 25 bp, Homo sapien
cctggtcaaagagggcatttctgcc

SEQ ID NO: 5238016 - DNA, 25 bp, Homo sapien
cagcctggtcaaagagggcatttct

SEQ ID NO: 5238017 - DNA, 25 bp, Homo sapien
tcctagctgtgctgtggagtactag

SEQ ID NO: 5238018 - DNA, 25 bp, Homo sapien
gaacatcggctgctagggaaagcca

SEQ ID NO: 5238019 - DNA, 25 bp, Homo sapien
gcccagcctcagttaagtcttaact

SEQ ID NO: 5238020 - DNA, 25 bp, Homo sapien
tgtaggcccccaagaggtgaaagca

SEQ ID NO: 5238021 - DNA, 25 bp, Homo sapien
tggcagctgctttgtgcccttctgc

SEQ ID NO: 5238022 - DNA, 25 bp, Homo sapien
cccttctgctgccagattgaggtga

SEQ ID NO: 5238023 - DNA, 25 bp, Homo sapien
agctgctttgtgcccttctgctgcc

SEQ ID NO: 5238024 - DNA, 25 bp, Homo sapien
ttctgctgccagattgaggtgaggc

SEQ ID NO: 5238025 - DNA, 25 bp, Homo sapien
tcgagaactcctgcgcagagcgcat

SEQ ID NO: 5238026 - DNA, 25 bp, Homo sapien
agactgcgcacactcgagaactcct

SEQ ID NO: 5238027 - DNA, 25 bp, Homo sapien
gcacactcgagaactcctgcgcaga

SEQ ID NO: 5238028 - DNA, 25 bp, Homo sapien
tgccagactgcgcacactcgagaac

SEQ ID NO: 5238029 - DNA, 25 bp, Homo sapien
gggctgcagcgacactagtgcccac

SEQ ID NO: 5238030 - DNA, 25 bp, Homo sapien
ctagtgcccacggtcaggaggaacc

SEQ ID NO: 5238031 - DNA, 25 bp, Homo sapien
acactagtgcccacggtcaggagga

SEQ ID NO: 5238032 - DNA, 25 bp, Homo sapien
agcgacactagtgcccacggtcagg

SEQ ID NO: 5238033 - DNA, 25 bp, Homo sapien
ctttgttcagccgacccaaagacca

SEQ ID NO: 5238034 - DNA, 25 bp, Homo sapien
tttgttcagccgacccaaagaccaa

SEQ ID NO: 5238035 - DNA, 25 bp, Homo sapien
ttgttcagccgacccaaagaccaat

SEQ ID NO: 5238036 - DNA, 25 bp, Homo sapien
tgcaggctcagcgtccttgactagc

SEQ ID NO: 5238037 - DNA, 25 bp, Homo sapien
ggattggtcgctggagtggcatcat

SEQ ID NO: 5238038 - DNA, 25 bp, Homo sapien
gctaccaattatgcaaacaagaatc

SEQ ID NO: 5238039 - DNA, 25 bp, Homo sapien
ctggttgtcatggtgctaccaatta

SEQ ID NO: 5238040 - DNA, 25 bp, Homo sapien
gcagcctgaacctcagggggctcta

SEQ ID NO: 5238041 - DNA, 25 bp, Homo sapien
gggctctagatccttatgcttccaa

SEQ ID NO: 5238042 - DNA, 25 bp, Homo sapien
agcacctctatctggccctgcactg

SEQ ID NO: 5238043 - DNA, 25 bp, Homo sapien
tgcttccaaggaaactgcttcttga

SEQ ID NO: 5238044 - DNA, 25 bp, Homo sapien
tccttctggcccacatggtttataa

SEQ ID NO: 5238045 - DNA, 25 bp, Homo sapien
tgatatttattcagacacttgtcat

SEQ ID NO: 5238046 - DNA, 25 bp, Homo sapien
taatgtgtcaagagtatagacttct

SEQ ID NO: 5238047 - DNA, 25 bp, Homo sapien
ggatatagaatcctcagttggcagc

SEQ ID NO: 5238048 - DNA, 25 bp, Homo sapien
tcccagcacggaagaaactttttga

SEQ ID NO: 5238049 - DNA, 25 bp, Homo sapien
caactgggtgatatgggaaggtccc

SEQ ID NO: 5238050 - DNA, 25 bp, Homo sapien
tgaacgagtaattctggaacagctg

SEQ ID NO: 5238051 - DNA, 25 bp, Homo sapien
gacccttgattgtacatgcaactgg

SEQ ID NO: 5238052 - DNA, 25 bp, Homo sapien
gtatttactcttacaattggcgtac

SEQ ID NO: 5238053 - DNA, 25 bp, Homo sapien
taacagaatgtaccatgtattactt

SEQ ID NO: 5238054 - DNA, 25 bp, Homo sapien
tatgcacgtagatgtatacatgtat

SEQ ID NO: 5238055 - DNA, 25 bp, Homo sapien
tacagtgatcttctgggttgggagt

SEQ ID NO: 5238056 - DNA, 25 bp, Homo sapien
cagtctataccttatcacccttcat

SEQ ID NO: 5238057 - DNA, 25 bp, Homo sapien
aaagtcaaagtctggccgggtgcag

SEQ ID NO: 5238058 - DNA, 25 bp, Homo sapien
tctcagcagtccctggtattacttg

SEQ ID NO: 5238059 - DNA, 25 bp, Homo sapien
gattgtgaacatattatcaggaaaa

SEQ ID NO: 5238060 - DNA, 25 bp, Homo sapien
tgagcgccccatggacattagcctt

SEQ ID NO: 5238061 - DNA, 25 bp, Homo sapien
gagctttttattggcctcgaggccc

SEQ ID NO: 5238062 - DNA, 25 bp, Homo sapien
gagacagcactttgtaccgtacccg

SEQ ID NO: 5238063 - DNA, 25 bp, Homo sapien
caaagcgcatagaaaaaggtccaga

SEQ ID NO: 5238064 - DNA, 25 bp, Homo sapien
catagtcaggcttatccagttctcc

SEQ ID NO: 5238065 - DNA, 25 bp, Homo sapien
gaataccaagcttggcagcctcacg

SEQ ID NO: 5238066 - DNA, 25 bp, Homo sapien
aaggcagagctttatcccaggaagg

SEQ ID NO: 5238067 - DNA, 25 bp, Homo sapien
gagagaactcgtttgtacacatcca

SEQ ID NO: 5238068 - DNA, 25 bp, Homo sapien
ctctcacggccagctccagcctcat

SEQ ID NO: 5238069 - DNA, 25 bp, Homo sapien
cgtctccctctcacggccagctcca

SEQ ID NO: 5238070 - DNA, 25 bp, Homo sapien
tccctctcacggccagctccagcct

SEQ ID NO: 5238071 - DNA, 25 bp, Homo sapien
gtctccctctcacggccagctccag

SEQ ID NO: 5238072 - DNA, 25 bp, Homo sapien
cccagccgtcggcactatttgtatc

SEQ ID NO: 5238073 - DNA, 25 bp, Homo sapien
gcaggcggccggccggagagtggat

SEQ ID NO: 5238074 - DNA, 25 bp, Homo sapien
gctggcgggcgcacggaggaggcgg

SEQ ID NO: 5238075 - DNA, 25 bp, Homo sapien
ggcactatttgtatccctcctgaca

SEQ ID NO: 5238076 - DNA, 25 bp, Homo sapien
cgcgctggctggacgagtaggcctg

SEQ ID NO: 5238077 - DNA, 25 bp, Homo sapien
gacacgcgctggctggacgagtagg

SEQ ID NO: 5238078 - DNA, 25 bp, Homo sapien
ggctggacgagtaggcctggctcat

SEQ ID NO: 5238079 - DNA, 25 bp, Homo sapien
ctggctggacgagtaggcctggctc

SEQ ID NO: 5238080 - DNA, 25 bp, Homo sapien
tgcgcgacacctggtacacgcggga

SEQ ID NO: 5238081 - DNA, 25 bp, Homo sapien
gtacacgcgggacgtcaccgagctg

SEQ ID NO: 5238082 - DNA, 25 bp, Homo sapien
gcccgcgggaacacgggcgaactca

SEQ ID NO: 5238083 - DNA, 25 bp, Homo sapien
ctggaggagcccttagagccgaaac

SEQ ID NO: 5238084 - DNA, 25 bp, Homo sapien
ggctggcccgcagcgaccccaggcc

SEQ ID NO: 5238085 - DNA, 25 bp, Homo sapien
cggctggcccgcagcgaccccaggc

SEQ ID NO: 5238086 - DNA, 25 bp, Homo sapien
gccggctggcccgcagcgaccccag

SEQ ID NO: 5238087 - DNA, 25 bp, Homo sapien
ccggctggcccgcagcgaccccagg

SEQ ID NO: 5238088 - DNA, 25 bp, Homo sapien
ttggtgcgcgtggtcagaaactcct

SEQ ID NO: 5238089 - DNA, 25 bp, Homo sapien
agaaactcctggttcaccgcgtcgg

SEQ ID NO: 5238090 - DNA, 25 bp, Homo sapien
ttgagccggttcacttcggcggcga

SEQ ID NO: 5238091 - DNA, 25 bp, Homo sapien
accgcgtcggccagtgagaagtcca

SEQ ID NO: 5238092 - DNA, 25 bp, Homo sapien
tcgtcgagcaggttgtcgcgctcga

SEQ ID NO: 5238093 - DNA, 25 bp, Homo sapien
acgcgcgcgcgctggttagtgagca

SEQ ID NO: 5238094 - DNA, 25 bp, Homo sapien
ttgtcgcgctcgacgtcgacgcgcg

SEQ ID NO: 5238095 - DNA, 25 bp, Homo sapien
ttgagccgctgcaggtcgtcgagca

SEQ ID NO: 5238096 - DNA, 25 bp, Homo sapien
tgcactttcttaaggaacgcgatct

SEQ ID NO: 5238097 - DNA, 25 bp, Homo sapien
gagagattcaattctgcgctccagg

SEQ ID NO: 5238098 - DNA, 25 bp, Homo sapien
ccaggtcaatgcgagctagagtagc

SEQ ID NO: 5238099 - DNA, 25 bp, Homo sapien
ggaacgcgatctcctcgttgagaga

SEQ ID NO: 5238100 - DNA, 25 bp, Homo sapien
atactgagcccggatgtccctgagg

SEQ ID NO: 5238101 - DNA, 25 bp, Homo sapien
cttgtaccactcctcagcttcagaa

SEQ ID NO: 5238102 - DNA, 25 bp, Homo sapien
gatggtctcatactgagcccggatg

SEQ ID NO: 5238103 - DNA, 25 bp, Homo sapien
tcagaaatgttcttagccgcgatgg

SEQ ID NO: 5238104 - DNA, 25 bp, Homo sapien
tggctgcctgggtcaggtctgacac

SEQ ID NO: 5238105 - DNA, 25 bp, Homo sapien
cttcagggcgtcaatctcgcaggtg

SEQ ID NO: 5238106 - DNA, 25 bp, Homo sapien
tggcgcagggcgtcgttgttcttgt

SEQ ID NO: 5238107 - DNA, 25 bp, Homo sapien
caatctcgcaggtgtaggactggat

SEQ ID NO: 5238108 - DNA, 25 bp, Homo sapien
tggcaaatcggtcctccaattcccg

SEQ ID NO: 5238109 - DNA, 25 bp, Homo sapien
tcatccttgaggtgccggatttcct

SEQ ID NO: 5238110 - DNA, 25 bp, Homo sapien
cagatggcgggccatctcatccttg

SEQ ID NO: 5238111 - DNA, 25 bp, Homo sapien
gcaatgttgtcctggtagccactgg

SEQ ID NO: 5238112 - DNA, 25 bp, Homo sapien
tttaggcctaatgctgggaaaatgc

SEQ ID NO: 5238113 - DNA, 25 bp, Homo sapien
gggtgatatccattgctcatgccca

SEQ ID NO: 5238114 - DNA, 25 bp, Homo sapien
cactgaagttggtactagtagcagc

SEQ ID NO: 5238115 - DNA, 25 bp, Homo sapien
gttttgatcaatgtccacgtctgtg

SEQ ID NO: 5238116 - DNA, 25 bp, Homo sapien
agttgagggcagagtaggtctggat

SEQ ID NO: 5238117 - DNA, 25 bp, Homo sapien
ggaagttgagggcagagtaggtctg

SEQ ID NO: 5238118 - DNA, 25 bp, Homo sapien
ctcggaagttgagggcagagtaggt

SEQ ID NO: 5238119 - DNA, 25 bp, Homo sapien
tgagggcagagtaggtctggatggg

SEQ ID NO: 5238120 - DNA, 25 bp, Homo sapien
tgggcagagccctagcagaccccaa

SEQ ID NO: 5238121 - DNA, 25 bp, Homo sapien
cactcagcctgaccaagtccaggct

SEQ ID NO: 5238122 - DNA, 25 bp, Homo sapien
ctgtaacagggtccatcgcacactc

SEQ ID NO: 5238123 - DNA, 25 bp, Homo sapien
gtaacagggtccatcgcacactcag

SEQ ID NO: 5238124 - DNA, 25 bp, Homo sapien
gcacactcagcctgaccaagtccag

SEQ ID NO: 5238125 - DNA, 25 bp, Homo sapien
ccatcccgtgtctcgatggtcttga

SEQ ID NO: 5238126 - DNA, 25 bp, Homo sapien
cttggtatggacctcagaacccctt

SEQ ID NO: 5238127 - DNA, 25 bp, Homo sapien
tctcgatggtcttgatcatcaccgt

SEQ ID NO: 5238128 - DNA, 25 bp, Homo sapien
gatcatcaccgtcttcttggtatgg

SEQ ID NO: 5238129 - DNA, 25 bp, Homo sapien
gctgctgtgtggcctcactgacgac

SEQ ID NO: 5238130 - DNA, 25 bp, Homo sapien
ctgctgctgtgtggcctcactgacg

SEQ ID NO: 5238131 - DNA, 25 bp, Homo sapien
ttagagcacttcatgctgctgctgt

SEQ ID NO: 5238132 - DNA, 25 bp, Homo sapien
tgctgctgctgtgtggcctcactga

SEQ ID NO: 5238133 - DNA, 25 bp, Homo sapien
ggggtgaggacggtctctggtggca

SEQ ID NO: 5238134 - DNA, 25 bp, Homo sapien
gggtgaggacggtctctggtggcag

SEQ ID NO: 5238135 - DNA, 25 bp, Homo sapien
aggtggccggggcatgccctgtgac

SEQ ID NO: 5238136 - DNA, 25 bp, Homo sapien
gatgggctatgtcgctgttggggac

SEQ ID NO: 5238137 - DNA, 25 bp, Homo sapien
tgggctatgtcgctgttggggacca

SEQ ID NO: 5238138 - DNA, 25 bp, Homo sapien
gggatgggctatgtcgctgttgggg

SEQ ID NO: 5238139 - DNA, 25 bp, Homo sapien
aggggctagtccccctggctacctg

SEQ ID NO: 5238140 - DNA, 25 bp, Homo sapien
gtaagagaccacggggacaatttca

SEQ ID NO: 5238141 - DNA, 25 bp, Homo sapien
tccacaggggctagtccccctggct

SEQ ID NO: 5238142 - DNA, 25 bp, Homo sapien
gagaccacggggacaatttcaagcc

SEQ ID NO: 5238143 - DNA, 25 bp, Homo sapien
agcaccttcggggattccctcttgt

SEQ ID NO: 5238144 - DNA, 25 bp, Homo sapien
ctccagcaccttcggggattccctc

SEQ ID NO: 5238145 - DNA, 25 bp, Homo sapien
ccagcaccttcggggattccctctt

SEQ ID NO: 5238146 - DNA, 25 bp, Homo sapien
caccttcggggattccctcttgtag

SEQ ID NO: 5238147 - DNA, 25 bp, Homo sapien
cttctccagcatctcacccactttc

SEQ ID NO: 5238148 - DNA, 25 bp, Homo sapien
gcctgagaccgctctctgcctctct

SEQ ID NO: 5238149 - DNA, 25 bp, Homo sapien
tctgttaattatcatagccttctaa

SEQ ID NO: 5238150 - DNA, 25 bp, Homo sapien
tatcgaagcacagaacagatctttc

SEQ ID NO: 5238151 - DNA, 25 bp, Homo sapien
taattgagattgcatggcattgaaa

SEQ ID NO: 5238152 - DNA, 25 bp, Homo sapien
ttttcatacgtcttacactcccctc

SEQ ID NO: 5238153 - DNA, 25 bp, Homo sapien
ggcctgtagggttcaccctatttga

SEQ ID NO: 5238154 - DNA, 25 bp, Homo sapien
cttgaaggctgaggcctacatggat

SEQ ID NO: 5238155 - DNA, 25 bp, Homo sapien
cctgtgagggtcattgtggagtttc

SEQ ID NO: 5238156 - DNA, 25 bp, Homo sapien
gactcctttaaaggataatccctga

SEQ ID NO: 5238157 - DNA, 25 bp, Homo sapien
tagtctatacctaagcatttggtgg

SEQ ID NO: 5238158 - DNA, 25 bp, Homo sapien
gataagtgcacataactcattcagg

SEQ ID NO: 5238159 - DNA, 25 bp, Homo sapien
ggtgtttccaacacagagaagctgg

SEQ ID NO: 5238160 - DNA, 25 bp, Homo sapien
tgcacctcaaggatcattgcctggg

SEQ ID NO: 5238161 - DNA, 25 bp, Homo sapien
ggcctgccttcctgctgcccgcccg

SEQ ID NO: 5238162 - DNA, 25 bp, Homo sapien
taggagacaagtctggggggccggc

SEQ ID NO: 5238163 - DNA, 25 bp, Homo sapien
gggggccggcggcctgccttcctgc

SEQ ID NO: 5238164 - DNA, 25 bp, Homo sapien
ctaggagacaagtctggggggccgg

SEQ ID NO: 5238165 - DNA, 25 bp, Homo sapien
ggccactgagagctgggctgggggg

SEQ ID NO: 5238166 - DNA, 25 bp, Homo sapien
ctgggcggccacgggggcacccgcg

SEQ ID NO: 5238167 - DNA, 25 bp, Homo sapien
ctgggctggggggacgccggaactg

SEQ ID NO: 5238168 - DNA, 25 bp, Homo sapien
agagctgggctggggggacgccgga

SEQ ID NO: 5238169 - DNA, 25 bp, Homo sapien
ctcgcctcgcgtgccccgggctttc

SEQ ID NO: 5238170 - DNA, 25 bp, Homo sapien
gggccgcaggaagactggcgccccg

SEQ ID NO: 5238171 - DNA, 25 bp, Homo sapien
gcagccgcacgtcgctgcccgcgca

SEQ ID NO: 5238172 - DNA, 25 bp, Homo sapien
gggtgccctcgtgcccgcatcctcg

SEQ ID NO: 5238173 - DNA, 25 bp, Homo sapien
gctgcccatcccggaaccagcggag

SEQ ID NO: 5238174 - DNA, 25 bp, Homo sapien
ctgcccatcccggaaccagcggagg

SEQ ID NO: 5238175 - DNA, 25 bp, Homo sapien
ggagctgcccatcccggaaccagcg

SEQ ID NO: 5238176 - DNA, 25 bp, Homo sapien
agctgcccatcccggaaccagcgga

SEQ ID NO: 5238177 - DNA, 25 bp, Homo sapien
gcactgtgagcaccgcctcgcagga

SEQ ID NO: 5238178 - DNA, 25 bp, Homo sapien
accaaggcaggccaggagacatcca

SEQ ID NO: 5238179 - DNA, 25 bp, Homo sapien
agggaccaaggcaggccaggagaca

SEQ ID NO: 5238180 - DNA, 25 bp, Homo sapien
cactttgagggaccaaggcaggcca

SEQ ID NO: 5238181 - DNA, 25 bp, Homo sapien
actttgagggaccaaggcaggccag

SEQ ID NO: 5238182 - DNA, 25 bp, Homo sapien
gcttcttcacccacagcttcttcat

SEQ ID NO: 5238183 - DNA, 25 bp, Homo sapien
tggaaacgcttcttcacccacagct

SEQ ID NO: 5238184 - DNA, 25 bp, Homo sapien
ctggaaacgcttcttcacccacagc

SEQ ID NO: 5238185 - DNA, 25 bp, Homo sapien
aacgcttcttcacccacagcttctt

SEQ ID NO: 5238186 - DNA, 25 bp, Homo sapien
ctaaggtccctgtgcctcccatcca

SEQ ID NO: 5238187 - DNA, 25 bp, Homo sapien
aggtccctgtgcctcccatccagac

SEQ ID NO: 5238188 - DNA, 25 bp, Homo sapien
aaggtccctgtgcctcccatccaga

SEQ ID NO: 5238189 - DNA, 25 bp, Homo sapien
taaggtccctgtgcctcccatccag

SEQ ID NO: 5238190 - DNA, 25 bp, Homo sapien
cagaatgagtagttgagggggaggc

SEQ ID NO: 5238191 - DNA, 25 bp, Homo sapien
gagaaaagccagaatgagtagttga

SEQ ID NO: 5238192 - DNA, 25 bp, Homo sapien
aatgagtagttgagggggaggcttg

SEQ ID NO: 5238193 - DNA, 25 bp, Homo sapien
aaaagccagaatgagtagttgaggg

SEQ ID NO: 5238194 - DNA, 25 bp, Homo sapien
catgggtgagtcggccaaaggcccg

SEQ ID NO: 5238195 - DNA, 25 bp, Homo sapien
atgggtgagtcggccaaaggcccgg

SEQ ID NO: 5238196 - DNA, 25 bp, Homo sapien
tgggtgagtcggccaaaggcccggc

SEQ ID NO: 5238197 - DNA, 25 bp, Homo sapien
ggctagagcaaggacgcccacggtc

SEQ ID NO: 5238198 - DNA, 25 bp, Homo sapien
gaggagtaggcatgggctagagcaa

SEQ ID NO: 5238199 - DNA, 25 bp, Homo sapien
gcatgggctagagcaaggacgccca

SEQ ID NO: 5238200 - DNA, 25 bp, Homo sapien
taggcatgggctagagcaaggacgc

SEQ ID NO: 5238201 - DNA, 25 bp, Homo sapien
gagccacgtactggttgccaaagca

SEQ ID NO: 5238202 - DNA, 25 bp, Homo sapien
cattaggcctcacatggagaacagg

SEQ ID NO: 5238203 - DNA, 25 bp, Homo sapien
ggctgtcttcaggaactcgatgcct

SEQ ID NO: 5238204 - DNA, 25 bp, Homo sapien
tgttgaatcgtcctcaaaaatgccc

SEQ ID NO: 5238205 - DNA, 25 bp, Homo sapien
gagtcaggcccaccctctattacaa

SEQ ID NO: 5238206 - DNA, 25 bp, Homo sapien
gtcaggcccaccctctattacaata

SEQ ID NO: 5238207 - DNA, 25 bp, Homo sapien
aggagtcaggcccaccctctattac

SEQ ID NO: 5238208 - DNA, 25 bp, Homo sapien
ttaggagtcaggcccaccctctatt

SEQ ID NO: 5238209 - DNA, 25 bp, Homo sapien
gaaaacttcgcttccataggagcag

SEQ ID NO: 5238210 - DNA, 25 bp, Homo sapien
ctttctgcaggagcggaaaacttcg

SEQ ID NO: 5238211 - DNA, 25 bp, Homo sapien
gacagggacagactgttatcagagc

SEQ ID NO: 5238212 - DNA, 25 bp, Homo sapien
ccatacttgggcttgttattccagc

SEQ ID NO: 5238213 - DNA, 25 bp, Homo sapien
gatgtcatcctcagccgtctctgag

SEQ ID NO: 5238214 - DNA, 25 bp, Homo sapien
tgaaggccccgtcatcccgaagctc

SEQ ID NO: 5238215 - DNA, 25 bp, Homo sapien
gggtgctgaaggccccgtcatcccg

SEQ ID NO: 5238216 - DNA, 25 bp, Homo sapien
gctgggttccctgcacatcgctgat

SEQ ID NO: 5238217 - DNA, 25 bp, Homo sapien
cacggaggtcgggggtgtgtccagg

SEQ ID NO: 5238218 - DNA, 25 bp, Homo sapien
aggtgcccaccagggtgtcagaacc

SEQ ID NO: 5238219 - DNA, 25 bp, Homo sapien
gctcctctgaggtgcctgtcacgga

SEQ ID NO: 5238220 - DNA, 25 bp, Homo sapien
ttgctcctctgaggtgcctgtcacg

SEQ ID NO: 5238221 - DNA, 25 bp, Homo sapien
cctctgtacaggctgaatgcgctgc

SEQ ID NO: 5238222 - DNA, 25 bp, Homo sapien
gcgcccaccagattagctcgagatg

SEQ ID NO: 5238223 - DNA, 25 bp, Homo sapien
tcactggccacggaaaggctatcct

SEQ ID NO: 5238224 - DNA, 25 bp, Homo sapien
cgtggatagagagcgcccgtcctct

SEQ ID NO: 5238225 - DNA, 25 bp, Homo sapien
ctgccgtgtggaaaggttctgttcc

SEQ ID NO: 5238226 - DNA, 25 bp, Homo sapien
gaatgtgcagagagatgaaaaggca

SEQ ID NO: 5238227 - DNA, 25 bp, Homo sapien
ccgggagctgccgtgtggaaaggtt

SEQ ID NO: 5238228 - DNA, 25 bp, Homo sapien
aggaatgtgcagagagatgaaaagg

SEQ ID NO: 5238229 - DNA, 25 bp, Homo sapien
tgggttcctccgaagttgccatagc

SEQ ID NO: 5238230 - DNA, 25 bp, Homo sapien
gaagttgccatagcaactccaggct

SEQ ID NO: 5238231 - DNA, 25 bp, Homo sapien
tcactaaggaaatgggttcctccga

SEQ ID NO: 5238232 - DNA, 25 bp, Homo sapien
catagacatcactaaggaaatgggt

SEQ ID NO: 5238233 - DNA, 25 bp, Homo sapien
aagggccgcagagtccccagggaag

SEQ ID NO: 5238234 - DNA, 25 bp, Homo sapien
ggaagggccgcagagtccccaggga

SEQ ID NO: 5238235 - DNA, 25 bp, Homo sapien
gaagggccgcagagtccccagggaa

SEQ ID NO: 5238236 - DNA, 25 bp, Homo sapien
ctgactggggctaaaaggggtggtg

SEQ ID NO: 5238237 - DNA, 25 bp, Homo sapien
ctctgactggggctaaaaggggtgg

SEQ ID NO: 5238238 - DNA, 25 bp, Homo sapien
tgagtgcgacggtggggcgacgtgg

SEQ ID NO: 5238239 - DNA, 25 bp, Homo sapien
cggcgtggggcttcgctggccagtt

SEQ ID NO: 5238240 - DNA, 25 bp, Homo sapien
ttgaggctgaaggtcgggctcctcc

SEQ ID NO: 5238241 - DNA, 25 bp, Homo sapien
gagcagcgcggatttggaaggaggc

SEQ ID NO: 5238242 - DNA, 25 bp, Homo sapien
agcgaggccgctttctgctggaaca

SEQ ID NO: 5238243 - DNA, 25 bp, Homo sapien
cttctcttcggtggtggtgtcctcg

SEQ ID NO: 5238244 - DNA, 25 bp, Homo sapien
cgtcgctcctcgaagaactgcagct

SEQ ID NO: 5238245 - DNA, 25 bp, Homo sapien
gctctgctccgggtcagcgggaatt

SEQ ID NO: 5238246 - DNA, 25 bp, Homo sapien
caagacttaagcaataacagcggtg

SEQ ID NO: 5238247 - DNA, 25 bp, Homo sapien
atcatgtatggcgtaccaggcccca

SEQ ID NO: 5238248 - DNA, 25 bp, Homo sapien
cattctcgaaacaggtcagggcagc

SEQ ID NO: 5238249 - DNA, 25 bp, Homo sapien
ccatgttagtgtggccgttcctcaa

SEQ ID NO: 5238250 - DNA, 25 bp, Homo sapien
gggctcttctccagcggacacgtag

SEQ ID NO: 5238251 - DNA, 25 bp, Homo sapien
tccagcggacacgtaggagtcatcc

SEQ ID NO: 5238252 - DNA, 25 bp, Homo sapien
gacacgtaggagtcatccgaagact

SEQ ID NO: 5238253 - DNA, 25 bp, Homo sapien
tgatgatacacttgagcagcacatc

SEQ ID NO: 5238254 - DNA, 25 bp, Homo sapien
ccctcgctgcgcagcgctgacccat

SEQ ID NO: 5238255 - DNA, 25 bp, Homo sapien
gcggccctcgctgcgcagcgctgac

SEQ ID NO: 5238256 - DNA, 25 bp, Homo sapien
tgcgcagcgctgacccatccttgtg

SEQ ID NO: 5238257 - DNA, 25 bp, Homo sapien
cgctgcgcagcgctgacccatcctt

SEQ ID NO: 5238258 - DNA, 25 bp, Homo sapien
tctcacggtcagtgaggcggcacag

SEQ ID NO: 5238259 - DNA, 25 bp, Homo sapien
cgggtctcacggtcagtgaggcggc

SEQ ID NO: 5238260 - DNA, 25 bp, Homo sapien
ggtctcacggtcagtgaggcggcac

SEQ ID NO: 5238261 - DNA, 25 bp, Homo sapien
cccagctcgttggtggcggtggcca

SEQ ID NO: 5238262 - DNA, 25 bp, Homo sapien
gaattgagatctgtgggtcctcaaa

SEQ ID NO: 5238263 - DNA, 25 bp, Homo sapien
gggccgcattctctagttatccatt

SEQ ID NO: 5238264 - DNA, 25 bp, Homo sapien
gttatccattccctggttaccatgg

SEQ ID NO: 5238265 - DNA, 25 bp, Homo sapien
accatggctcccaaccaggaattga

SEQ ID NO: 5238266 - DNA, 25 bp, Homo sapien
aggcggactctttacaattcttttg

SEQ ID NO: 5238267 - DNA, 25 bp, Homo sapien
gcaaggcggactctttacaattctt

SEQ ID NO: 5238268 - DNA, 25 bp, Homo sapien
ggcaaggcggactctttacaattct

SEQ ID NO: 5238269 - DNA, 25 bp, Homo sapien
caaggcggactctttacaattcttt

SEQ ID NO: 5238270 - DNA, 25 bp, Homo sapien
cgccagggcacctgttggcaacttg

SEQ ID NO: 5238271 - DNA, 25 bp, Homo sapien
agggcacctgttggcaacttgcccg

SEQ ID NO: 5238272 - DNA, 25 bp, Homo sapien
acccaaaccgccagggcacctgttg

SEQ ID NO: 5238273 - DNA, 25 bp, Homo sapien
aaaccgccagggcacctgttggcaa

SEQ ID NO: 5238274 - DNA, 25 bp, Homo sapien
atccctgccatggaaggtctggcca

SEQ ID NO: 5238275 - DNA, 25 bp, Homo sapien
tcatccctgccatggaaggtctggc

SEQ ID NO: 5238276 - DNA, 25 bp, Homo sapien
cctcatccctgccatggaaggtctg

SEQ ID NO: 5238277 - DNA, 25 bp, Homo sapien
cacagggcctaagcccacatccagc

SEQ ID NO: 5238278 - DNA, 25 bp, Homo sapien
tcggagaactgtcaagatctttgcc

SEQ ID NO: 5238279 - DNA, 25 bp, Homo sapien
gaactgtcaagatctttgccctcct

SEQ ID NO: 5238280 - DNA, 25 bp, Homo sapien
gaaaatcggagaactgtcaagatct

SEQ ID NO: 5238281 - DNA, 25 bp, Homo sapien
tggccccgaaaatcggagaactgtc

SEQ ID NO: 5238282 - DNA, 25 bp, Homo sapien
agctgaggccctgcacggagaaggc

SEQ ID NO: 5238283 - DNA, 25 bp, Homo sapien
cagctgaggccctgcacggagaagg

SEQ ID NO: 5238284 - DNA, 25 bp, Homo sapien
gctgaggccctgcacggagaaggcc

SEQ ID NO: 5238285 - DNA, 25 bp, Homo sapien
ccagctgaggccctgcacggagaag

SEQ ID NO: 5238286 - DNA, 25 bp, Homo sapien
ccgaggctctgcacacagaccccag

SEQ ID NO: 5238287 - DNA, 25 bp, Homo sapien
cccagggagcaggagcccagcctgt

SEQ ID NO: 5238288 - DNA, 25 bp, Homo sapien
ctgtcctgaaggctctgccctggca

SEQ ID NO: 5238289 - DNA, 25 bp, Homo sapien
ccaccccagcgtggctccccaggga

SEQ ID NO: 5238290 - DNA, 25 bp, Homo sapien
agcttgcacccccaaacgctcgagg

SEQ ID NO: 5238291 - DNA, 25 bp, Homo sapien
gttggccacagccctacagcttgca

SEQ ID NO: 5238292 - DNA, 25 bp, Homo sapien
tgttggccacagccctacagcttgc

SEQ ID NO: 5238293 - DNA, 25 bp, Homo sapien
ccaaacgctcgagggataggaaagc

SEQ ID NO: 5238294 - DNA, 25 bp, Homo sapien
agacaagtcacatcccgacctcggt

SEQ ID NO: 5238295 - DNA, 25 bp, Homo sapien
cgcagacaagtcacatcccgacctc

SEQ ID NO: 5238296 - DNA, 25 bp, Homo sapien
caatgaggcggcactatctagcctg

SEQ ID NO: 5238297 - DNA, 25 bp, Homo sapien
agcttcctgccgtgcaaaccccagg

SEQ ID NO: 5238298 - DNA, 25 bp, Homo sapien
gaaccctggagcagcatggctagga

SEQ ID NO: 5238299 - DNA, 25 bp, Homo sapien
gacagagatagctaccagggaggaa

SEQ ID NO: 5238300 - DNA, 25 bp, Homo sapien
tcctgacatggactagagacctaaa

SEQ ID NO: 5238301 - DNA, 25 bp, Homo sapien
taggacgcccatttcttgggtgagc

SEQ ID NO: 5238302 - DNA, 25 bp, Homo sapien
ctcaggtattcctcgtcggaggtga

SEQ ID NO: 5238303 - DNA, 25 bp, Homo sapien
ggtattcctcgtcggaggtgatggg

SEQ ID NO: 5238304 - DNA, 25 bp, Homo sapien
gctcaggtattcctcgtcggaggtg

SEQ ID NO: 5238305 - DNA, 25 bp, Homo sapien
caggtattcctcgtcggaggtgatg

SEQ ID NO: 5238306 - DNA, 25 bp, Homo sapien
ccagtgtcagaagaacggcggttct

SEQ ID NO: 5238307 - DNA, 25 bp, Homo sapien
agaagaacggcggttctggctggga

SEQ ID NO: 5238308 - DNA, 25 bp, Homo sapien
agaacggcggttctggctgggactg

SEQ ID NO: 5238309 - DNA, 25 bp, Homo sapien
cagtgtcagaagaacggcggttctg

SEQ ID NO: 5238310 - DNA, 25 bp, Homo sapien
cacgcggatgctcatgatgacatct

SEQ ID NO: 5238311 - DNA, 25 bp, Homo sapien
gcggatgctcatgatgacatcttgg

SEQ ID NO: 5238312 - DNA, 25 bp, Homo sapien
cctgcacgcggatgctcatgatgac

SEQ ID NO: 5238313 - DNA, 25 bp, Homo sapien
cccctgcacgcggatgctcatgatg

SEQ ID NO: 5238314 - DNA, 25 bp, Homo sapien
gggcctcgcactgccgagcaccata

SEQ ID NO: 5238315 - DNA, 25 bp, Homo sapien
gagcaccatactcattgaccgcttt

SEQ ID NO: 5238316 - DNA, 25 bp, Homo sapien
gcaagtgtagaaaccagcatcgcca

SEQ ID NO: 5238317 - DNA, 25 bp, Homo sapien
caaagcgccgctggtctgggcgcac

SEQ ID NO: 5238318 - DNA, 25 bp, Homo sapien
aagtggcaactacaggaacggcagg

SEQ ID NO: 5238319 - DNA, 25 bp, Homo sapien
ccaggcattcatgggatcaggagca

SEQ ID NO: 5238320 - DNA, 25 bp, Homo sapien
taatacagagaagcgaggcagagcc

SEQ ID NO: 5238321 - DNA, 25 bp, Homo sapien
cagcaagcggcaggttagtgcagca

SEQ ID NO: 5238322 - DNA, 25 bp, Homo sapien
caaatgggccctaaacctgccaggg

SEQ ID NO: 5238323 - DNA, 25 bp, Homo sapien
acaggcctgtagcagcagtagcaca

SEQ ID NO: 5238324 - DNA, 25 bp, Homo sapien
aaagtgttgtgccattcgaaaccca

SEQ ID NO: 5238325 - DNA, 25 bp, Homo sapien
aaacacagcgaggtccgagaggtgc

SEQ ID NO: 5238326 - DNA, 25 bp, Homo sapien
gccacgtggtggcagagacatcggc

SEQ ID NO: 5238327 - DNA, 25 bp, Homo sapien
gccagggagggtgattcatggaggc

SEQ ID NO: 5238328 - DNA, 25 bp, Homo sapien
cctggctttgagatggcaatccaag

SEQ ID NO: 5238329 - DNA, 25 bp, Homo sapien
gagagatgcattttgttctctggag

SEQ ID NO: 5238330 - DNA, 25 bp, Homo sapien
gcggccatcgaaatgcatcttgcat

SEQ ID NO: 5238331 - DNA, 25 bp, Homo sapien
gcatttgagcagtgcaggctgcagc

SEQ ID NO: 5238332 - DNA, 25 bp, Homo sapien
atgtacagatgtaagtagcagcttg

SEQ ID NO: 5238333 - DNA, 25 bp, Homo sapien
gccactgtcgtcctcatgtacagat

SEQ ID NO: 5238334 - DNA, 25 bp, Homo sapien
cttgcagtcgaaacgggcagctcgg

SEQ ID NO: 5238335 - DNA, 25 bp, Homo sapien
agggccgcacggtcagccgggcact

SEQ ID NO: 5238336 - DNA, 25 bp, Homo sapien
tcttccagcagccgtgtgaacaggg

SEQ ID NO: 5238337 - DNA, 25 bp, Homo sapien
aaaatgagtccaggtaacaacaggg

SEQ ID NO: 5238338 - DNA, 25 bp, Homo sapien
gcaatgtgcagtgagtgcagacccc

SEQ ID NO: 5238339 - DNA, 25 bp, Homo sapien
tgccgcagccgcaagttctcactct

SEQ ID NO: 5238340 - DNA, 25 bp, Homo sapien
tgtccggggctcttctacatacagc

SEQ ID NO: 5238341 - DNA, 25 bp, Homo sapien
ctggccatgggtgttaacagcactg

SEQ ID NO: 5238342 - DNA, 25 bp, Homo sapien
ccattgtggaaccagctgatggtgg

SEQ ID NO: 5238343 - DNA, 25 bp, Homo sapien
tgcgccggtcgtcgctgctctggat

SEQ ID NO: 5238344 - DNA, 25 bp, Homo sapien
ctggcactctagcatggcctccttg

SEQ ID NO: 5238345 - DNA, 25 bp, Homo sapien
tggctcctcgggaatggatggcatc

SEQ ID NO: 5238346 - DNA, 25 bp, Homo sapien
actgggcctgagcccggaggatacc

SEQ ID NO: 5238347 - DNA, 25 bp, Homo sapien
ccttgaggggtaggcccatgccatc

SEQ ID NO: 5238348 - DNA, 25 bp, Homo sapien
gcctgagcccggaggataccttgag

SEQ ID NO: 5238349 - DNA, 25 bp, Homo sapien
aagaagtgcatccatggtgcagcaa

SEQ ID NO: 5238350 - DNA, 25 bp, Homo sapien
gcttgttggcaatgacgctcttgta

SEQ ID NO: 5238351 - DNA, 25 bp, Homo sapien
gctcttgtagacaccggcgtgctga

SEQ ID NO: 5238352 - DNA, 25 bp, Homo sapien
atacaggtgggcatagcaggcagct

SEQ ID NO: 5238353 - DNA, 25 bp, Homo sapien
tgctgaggccccacggcagggaaca

SEQ ID NO: 5238354 - DNA, 25 bp, Homo sapien
acaggatcaccgagcctcagggcag

SEQ ID NO: 5238355 - DNA, 25 bp, Homo sapien
ccacgtagtgccagaggccaggctg

SEQ ID NO: 5238356 - DNA, 25 bp, Homo sapien
tctgctgggtccaagggcccaacag

SEQ ID NO: 5238357 - DNA, 25 bp, Homo sapien
ctgaaagccgcagttcgaatgtctg

SEQ ID NO: 5238358 - DNA, 25 bp, Homo sapien
ttccatgtgagtgtgaccatcctcc

SEQ ID NO: 5238359 - DNA, 25 bp, Homo sapien
gggttccatgtgagtgtgaccatcc

SEQ ID NO: 5238360 - DNA, 25 bp, Homo sapien
cgatggccatgtccagactcctggg

SEQ ID NO: 5238361 - DNA, 25 bp, Homo sapien
tccagactcctgggggggttccatg

SEQ ID NO: 5238362 - DNA, 25 bp, Homo sapien
aggacccggaagatgtgctggaccc

SEQ ID NO: 5238363 - DNA, 25 bp, Homo sapien
gaccagtgccgtccactggtccgag

SEQ ID NO: 5238364 - DNA, 25 bp, Homo sapien
tgcactgtgtacgtcagggagtccg

SEQ ID NO: 5238365 - DNA, 25 bp, Homo sapien
gcaggcctgtgaccagtgccgtcca

SEQ ID NO: 5238366 - DNA, 25 bp, Homo sapien
tgggcttgacatcaggtcctcagca

SEQ ID NO: 5238367 - DNA, 25 bp, Homo sapien
cacttgagttccgtttttacagatg

SEQ ID NO: 5238368 - DNA, 25 bp, Homo sapien
ttaccatgtccaggccatcccttga

SEQ ID NO: 5238369 - DNA, 25 bp, Homo sapien
gatcccaaagcctgagcttcagcca

SEQ ID NO: 5238370 - DNA, 25 bp, Homo sapien
caccacatacacgatgtctggtttg

SEQ ID NO: 5238371 - DNA, 25 bp, Homo sapien
tctggtttgtccagcatggcagggg

SEQ ID NO: 5238372 - DNA, 25 bp, Homo sapien
catggttgaatgtgacggtgacgct

SEQ ID NO: 5238373 - DNA, 25 bp, Homo sapien
tgacggtgacgctggcaggctgtcc

SEQ ID NO: 5238374 - DNA, 25 bp, Homo sapien
acatgacagggaggtcacccagatc

SEQ ID NO: 5238375 - DNA, 25 bp, Homo sapien
ggaggtcacccagatcttgccccag

SEQ ID NO: 5238376 - DNA, 25 bp, Homo sapien
tgacagggaggtcacccagatcttg

SEQ ID NO: 5238377 - DNA, 25 bp, Homo sapien
acagggaggtcacccagatcttgcc

SEQ ID NO: 5238378 - DNA, 25 bp, Homo sapien
caggtctgtgtgccgtgacggtttc

SEQ ID NO: 5238379 - DNA, 25 bp, Homo sapien
gctccaatgtgaccgagcaggtctg

SEQ ID NO: 5238380 - DNA, 25 bp, Homo sapien
ctcacccggcagatccgaagacagt

SEQ ID NO: 5238381 - DNA, 25 bp, Homo sapien
ggtttcgggcggtgcaggtgagggc

SEQ ID NO: 5238382 - DNA, 25 bp, Homo sapien
tgtatagccatgacatggacaggcc

SEQ ID NO: 5238383 - DNA, 25 bp, Homo sapien
catgggtttggatctgcagcagtgt

SEQ ID NO: 5238384 - DNA, 25 bp, Homo sapien
tggacaggcctgaccagaggacatg

SEQ ID NO: 5238385 - DNA, 25 bp, Homo sapien
gccaataaatcttgttagtatgatt

SEQ ID NO: 5238386 - DNA, 25 bp, Homo sapien
ttgtaccacatgatgtccggcagtg

SEQ ID NO: 5238387 - DNA, 25 bp, Homo sapien
atgatggactcaaaccgaggggcct

SEQ ID NO: 5238388 - DNA, 25 bp, Homo sapien
accgcaaagcgagcagtttccccag

SEQ ID NO: 5238389 - DNA, 25 bp, Homo sapien
tggttttccctcgaccaccaccgca

SEQ ID NO: 5238390 - DNA, 25 bp, Homo sapien
tcacatggctgctctcggtcagcag

SEQ ID NO: 5238391 - DNA, 25 bp, Homo sapien
aagctcacatggctgctctcggtca

SEQ ID NO: 5238392 - DNA, 25 bp, Homo sapien
tctcctcgtacacgaagctcacatg

SEQ ID NO: 5238393 - DNA, 25 bp, Homo sapien
tacacgaagctcacatggctgctct

SEQ ID NO: 5238394 - DNA, 25 bp, Homo sapien
tgaatgcacagccaactctgctttg

SEQ ID NO: 5238395 - DNA, 25 bp, Homo sapien
gaatgcacagccaactctgctttgc

SEQ ID NO: 5238396 - DNA, 25 bp, Homo sapien
ctgaatgcacagccaactctgcttt

SEQ ID NO: 5238397 - DNA, 25 bp, Homo sapien
cataaaagtcgctgagtctccttcc

SEQ ID NO: 5238398 - DNA, 25 bp, Homo sapien
tcctggtggatgtcataaaagtcgc

SEQ ID NO: 5238399 - DNA, 25 bp, Homo sapien
ccctcgacctccatagctgtctgag

SEQ ID NO: 5238400 - DNA, 25 bp, Homo sapien
ctgccgatctcctggtggatgtcat

SEQ ID NO: 5238401 - DNA, 25 bp, Homo sapien
atggaagtagaggacacagtcgtgc

SEQ ID NO: 5238402 - DNA, 25 bp, Homo sapien
ccgacgcgctgatgcctttggcttg

SEQ ID NO: 5238403 - DNA, 25 bp, Homo sapien
ctatgcgccgcaagtaggagaaagc

SEQ ID NO: 5238404 - DNA, 25 bp, Homo sapien
caggccggagctacgctccactatg

SEQ ID NO: 5238405 - DNA, 25 bp, Homo sapien
catcccagatcaaggagaacagtgc

SEQ ID NO: 5238406 - DNA, 25 bp, Homo sapien
ctacatcccagatcaaggagaacag

SEQ ID NO: 5238407 - DNA, 25 bp, Homo sapien
ccagatcaaggagaacagtgcccag

SEQ ID NO: 5238408 - DNA, 25 bp, Homo sapien
atcaaggagaacagtgcccagtgcc

SEQ ID NO: 5238409 - DNA, 25 bp, Homo sapien
gactcacacacggtgggtttcctgg

SEQ ID NO: 5238410 - DNA, 25 bp, Homo sapien
gggtttcctggcgattcgctccagc

SEQ ID NO: 5238411 - DNA, 25 bp, Homo sapien
tttcctggcgattcgctccagcagc

SEQ ID NO: 5238412 - DNA, 25 bp, Homo sapien
ctcagactcacacacggtgggtttc

SEQ ID NO: 5238413 - DNA, 25 bp, Homo sapien
gcacctgccgcatataggcccggat

SEQ ID NO: 5238414 - DNA, 25 bp, Homo sapien
cttgacatcgaggtgcagcacgtgg

SEQ ID NO: 5238415 - DNA, 25 bp, Homo sapien
caggtagtgtattccctctagcacc

SEQ ID NO: 5238416 - DNA, 25 bp, Homo sapien
tctggtgcaggtagtgtattccctc

SEQ ID NO: 5238417 - DNA, 25 bp, Homo sapien
caaagtcacagatccgcacctgctg

SEQ ID NO: 5238418 - DNA, 25 bp, Homo sapien
tctgattgacaatctcgggtgctac

SEQ ID NO: 5238419 - DNA, 25 bp, Homo sapien
agatgtcagtgactccagacacggg

SEQ ID NO: 5238420 - DNA, 25 bp, Homo sapien
aggtgtgccatactggcagtactgg

SEQ ID NO: 5238421 - DNA, 25 bp, Homo sapien
cagaggaaggcaacaacacccacag

SEQ ID NO: 5238422 - DNA, 25 bp, Homo sapien
gaggaaggcaacaacacccacaggc

SEQ ID NO: 5238423 - DNA, 25 bp, Homo sapien
agaggaaggcaacaacacccacagg

SEQ ID NO: 5238424 - DNA, 25 bp, Homo sapien
caatgttgtccggtcattttcccca

SEQ ID NO: 5238425 - DNA, 25 bp, Homo sapien
gaaggccacgttgtagtttcggatg

SEQ ID NO: 5238426 - DNA, 25 bp, Homo sapien
agccggtcctgcaccaacactttga

SEQ ID NO: 5238427 - DNA, 25 bp, Homo sapien
gaatgtggtctcctcgaaggccacg

SEQ ID NO: 5238428 - DNA, 25 bp, Homo sapien
ttctagggtctcttctgcggtaggt

SEQ ID NO: 5238429 - DNA, 25 bp, Homo sapien
atgttctagggtctcttctgcggta

SEQ ID NO: 5238430 - DNA, 25 bp, Homo sapien
tagggtctcttctgcggtaggtctc

SEQ ID NO: 5238431 - DNA, 25 bp, Homo sapien
ttgaaccaaggatgttctagggtct

SEQ ID NO: 5238432 - DNA, 25 bp, Homo sapien
ctgcaaacccaggaaagagggcttg

SEQ ID NO: 5238433 - DNA, 25 bp, Homo sapien
tgcaaacccaggaaagagggcttga

SEQ ID NO: 5238434 - DNA, 25 bp, Homo sapien
caaacccaggaaagagggcttgagg

SEQ ID NO: 5238435 - DNA, 25 bp, Homo sapien
ccaggaaagagggcttgagggaaag

SEQ ID NO: 5238436 - DNA, 25 bp, Homo sapien
tccgccgggagaggaatagcttcag

SEQ ID NO: 5238437 - DNA, 25 bp, Homo sapien
cctccgccgggagaggaatagcttc

SEQ ID NO: 5238438 - DNA, 25 bp, Homo sapien
cacctccgccgggagaggaatagct

SEQ ID NO: 5238439 - DNA, 25 bp, Homo sapien
ccacctccgccgggagaggaatagc

SEQ ID NO: 5238440 - DNA, 25 bp, Homo sapien
caggtggcatttgtagctgatctgg

SEQ ID NO: 5238441 - DNA, 25 bp, Homo sapien
accaggtggcatttgtagctgatct

SEQ ID NO: 5238442 - DNA, 25 bp, Homo sapien
tcctcttcagaatccgaggaggatg

SEQ ID NO: 5238443 - DNA, 25 bp, Homo sapien
agaatccgaggaggatgagagcccc

SEQ ID NO: 5238444 - DNA, 25 bp, Homo sapien
ctcctgccagtccatgggggtggca

SEQ ID NO: 5238445 - DNA, 25 bp, Homo sapien
gccgagctgcccctgcggagctctc

SEQ ID NO: 5238446 - DNA, 25 bp, Homo sapien
cctgctcctgccagtccatgggggt

SEQ ID NO: 5238447 - DNA, 25 bp, Homo sapien
cccctgcggagctctccccgcctgg

SEQ ID NO: 5238448 - DNA, 25 bp, Homo sapien
tcgctggaggcagctcgtgccatcc

SEQ ID NO: 5238449 - DNA, 25 bp, Homo sapien
cagcctctgggcatactcgccctca

SEQ ID NO: 5238450 - DNA, 25 bp, Homo sapien
ttgcaggccccggttctcgagtggg

SEQ ID NO: 5238451 - DNA, 25 bp, Homo sapien
gctgcggcagctccacagacgccgc

SEQ ID NO: 5238452 - DNA, 25 bp, Homo sapien
caagcctggccacggggatctcgag

SEQ ID NO: 5238453 - DNA, 25 bp, Homo sapien
gccacggggatctcgaggggcgccc

SEQ ID NO: 5238454 - DNA, 25 bp, Homo sapien
actcctgtagcctacgggccccaag

SEQ ID NO: 5238455 - DNA, 25 bp, Homo sapien
cagacagggaaggagactcctgtag

SEQ ID NO: 5238456 - DNA, 25 bp, Homo sapien
tgcagacttaggggtactgggtttg

SEQ ID NO: 5238457 - DNA, 25 bp, Homo sapien
ctgcagacttaggggtactgggttt

SEQ ID NO: 5238458 - DNA, 25 bp, Homo sapien
cctgacagctggagggactgaatga

SEQ ID NO: 5238459 - DNA, 25 bp, Homo sapien
cttggaggctcggactggttctggc

SEQ ID NO: 5238460 - DNA, 25 bp, Homo sapien
tgaatgatctgagcatagggtgtga

SEQ ID NO: 5238461 - DNA, 25 bp, Homo sapien
cagcgctagggtttgcagggcctgg

SEQ ID NO: 5238462 - DNA, 25 bp, Homo sapien
ggctgggccggtatatgccatcctc

SEQ ID NO: 5238463 - DNA, 25 bp, Homo sapien
ggaactcgggctttctcggctagca

SEQ ID NO: 5238464 - DNA, 25 bp, Homo sapien
ttttcgatgctgctactgagactgc

SEQ ID NO: 5238465 - DNA, 25 bp, Homo sapien
gctgcgcttgaacttggcctcgaac

SEQ ID NO: 5238466 - DNA, 25 bp, Homo sapien
cttgtccttccgcggccgagagaag

SEQ ID NO: 5238467 - DNA, 25 bp, Homo sapien
tgcgcacgtactggtgacccaactc

SEQ ID NO: 5238468 - DNA, 25 bp, Homo sapien
ctcctggacgctggcagagaggttt

SEQ ID NO: 5238469 - DNA, 25 bp, Homo sapien
tggtggcgataaccccttgtccttc

SEQ ID NO: 5238470 - DNA, 25 bp, Homo sapien
ctttcatccaggagatgtgcggtgc

SEQ ID NO: 5238471 - DNA, 25 bp, Homo sapien
acctggtccttgagtttgatgtgga

SEQ ID NO: 5238472 - DNA, 25 bp, Homo sapien
ttcatccaggagatgtgcggtgcag

SEQ ID NO: 5238473 - DNA, 25 bp, Homo sapien
tggtccttgagtttgatgtggaaga

SEQ ID NO: 5238474 - DNA, 25 bp, Homo sapien
atagagaccggcgtgccgcttgccc

SEQ ID NO: 5238475 - DNA, 25 bp, Homo sapien
gttggtggccgagcactcatagaga

SEQ ID NO: 5238476 - DNA, 25 bp, Homo sapien
cgcccatctttgcaggacacgatga

SEQ ID NO: 5238477 - DNA, 25 bp, Homo sapien
ccacagccacggtacaggagctggt

SEQ ID NO: 5238478 - DNA, 25 bp, Homo sapien
ccctggggccctgccccaggctcac

SEQ ID NO: 5238479 - DNA, 25 bp, Homo sapien
cccctggggccctgccccaggctca

SEQ ID NO: 5238480 - DNA, 25 bp, Homo sapien
catccccatcactacccccctgggg

SEQ ID NO: 5238481 - DNA, 25 bp, Homo sapien
catcactacccccctggggccctgc

SEQ ID NO: 5238482 - DNA, 25 bp, Homo sapien
cgccgctccagcgtatacgtgcaag

SEQ ID NO: 5238483 - DNA, 25 bp, Homo sapien
ccagcgccgtgtcctggtaggtctg

SEQ ID NO: 5238484 - DNA, 25 bp, Homo sapien
ggtacctctggaggagctagctttc

SEQ ID NO: 5238485 - DNA, 25 bp, Homo sapien
cagcgtatacgtgcaaggtgcccgg

SEQ ID NO: 5238486 - DNA, 25 bp, Homo sapien
cttgagtacccctgacaaagacctt

SEQ ID NO: 5238487 - DNA, 25 bp, Homo sapien
tcacagtcacgccaactggcaggtg

SEQ ID NO: 5238488 - DNA, 25 bp, Homo sapien
gatgcctgagctcacagggtgccac

SEQ ID NO: 5238489 - DNA, 25 bp, Homo sapien
gcaggtgggtcacgttgtagtaaca

SEQ ID NO: 5238490 - DNA, 25 bp, Homo sapien
cctcttggtgggcagcagatggcac

SEQ ID NO: 5238491 - DNA, 25 bp, Homo sapien
ccttgaggtgacaggggcctcttgg

SEQ ID NO: 5238492 - DNA, 25 bp, Homo sapien
taggagagtcaggaggccgggccct

SEQ ID NO: 5238493 - DNA, 25 bp, Homo sapien
gcagcagatggcacagctgaagaat

SEQ ID NO: 5238494 - DNA, 25 bp, Homo sapien
cttgagcgaggacaaggcctggcta

SEQ ID NO: 5238495 - DNA, 25 bp, Homo sapien
cgaggacaaggcctggctaggaggt

SEQ ID NO: 5238496 - DNA, 25 bp, Homo sapien
ctgacagtgactgacgggggtgtgg

SEQ ID NO: 5238497 - DNA, 25 bp, Homo sapien
acaaggcctggctaggaggtgtggg

SEQ ID NO: 5238498 - DNA, 25 bp, Homo sapien
cctgtgtcttcgtggaggggtttgg

SEQ ID NO: 5238499 - DNA, 25 bp, Homo sapien
ctgtgtcttcgtggaggggtttggg

SEQ ID NO: 5238500 - DNA, 25 bp, Homo sapien
ccctgtgtcttcgtggaggggtttg

SEQ ID NO: 5238501 - DNA, 25 bp, Homo sapien
gtactgggtagggtgggctccgctg

SEQ ID NO: 5238502 - DNA, 25 bp, Homo sapien
tgcagacacaaaggaagtcaccaca

SEQ ID NO: 5238503 - DNA, 25 bp, Homo sapien
cactggtttaaccccttgaggagtg

SEQ ID NO: 5238504 - DNA, 25 bp, Homo sapien
aaaggaagtcaccacatacacagga

SEQ ID NO: 5238505 - DNA, 25 bp, Homo sapien
ctggtggtgcagacacaaaggaagt

SEQ ID NO: 5238506 - DNA, 25 bp, Homo sapien
acagtcaccttggtaggctcaggag

SEQ ID NO: 5238507 - DNA, 25 bp, Homo sapien
agtcaccttggtaggctcaggaggg

SEQ ID NO: 5238508 - DNA, 25 bp, Homo sapien
caccttggtaggctcaggagggggc

SEQ ID NO: 5238509 - DNA, 25 bp, Homo sapien
cacagtcaccttggtaggctcagga

SEQ ID NO: 5238510 - DNA, 25 bp, Homo sapien
gtcgaagagtggtaccctcaggcct

SEQ ID NO: 5238511 - DNA, 25 bp, Homo sapien
tttctgagggggaccctgtcgaaga

SEQ ID NO: 5238512 - DNA, 25 bp, Homo sapien
ctgtcgaagagtggtaccctcaggc

SEQ ID NO: 5238513 - DNA, 25 bp, Homo sapien
gaccctgtcgaagagtggtaccctc

SEQ ID NO: 5238514 - DNA, 25 bp, Homo sapien
tgtgctccagacatttggcccactc

SEQ ID NO: 5238515 - DNA, 25 bp, Homo sapien
gccatgtgctccagacatttggccc

SEQ ID NO: 5238516 - DNA, 25 bp, Homo sapien
tctggtcttctctccgaagccatgt

SEQ ID NO: 5238517 - DNA, 25 bp, Homo sapien
ccaggacagtctggtcttctctccg

SEQ ID NO: 5238518 - DNA, 25 bp, Homo sapien
aggagaggagggggacacttccata

SEQ ID NO: 5238519 - DNA, 25 bp, Homo sapien
gagaggagggggacacttccatagt

SEQ ID NO: 5238520 - DNA, 25 bp, Homo sapien
gagggggacacttccatagtgaggg

SEQ ID NO: 5238521 - DNA, 25 bp, Homo sapien
gaggagggggacacttccatagtga

SEQ ID NO: 5238522 - DNA, 25 bp, Homo sapien
ctgtgtgtcggggggagggacacca

SEQ ID NO: 5238523 - DNA, 25 bp, Homo sapien
tgccctcggcagcatagggcacgat

SEQ ID NO: 5238524 - DNA, 25 bp, Homo sapien
acgatcttggccacgaacgttcgcc

SEQ ID NO: 5238525 - DNA, 25 bp, Homo sapien
cacagaggagttcccggttgccaca

SEQ ID NO: 5238526 - DNA, 25 bp, Homo sapien
catgatccgctcgtggtgcagggtc

SEQ ID NO: 5238527 - DNA, 25 bp, Homo sapien
tagtccaggccttgtagcagctgca

SEQ ID NO: 5238528 - DNA, 25 bp, Homo sapien
gcagctgcaccatgtaagtggccac

SEQ ID NO: 5238529 - DNA, 25 bp, Homo sapien
tctggcttgatgtctaggtggagca

SEQ ID NO: 5238530 - DNA, 25 bp, Homo sapien
tccagcgtgcccgtgcggtggccaa

SEQ ID NO: 5238531 - DNA, 25 bp, Homo sapien
cctggctggcagctggtcccctcac

SEQ ID NO: 5238532 - DNA, 25 bp, Homo sapien
ctgacaggagacagaggccaagctg

SEQ ID NO: 5238533 - DNA, 25 bp, Homo sapien
acagaggccaagctgacccagcttc

SEQ ID NO: 5238534 - DNA, 25 bp, Homo sapien
tgacaggagacagaggccaagctga

SEQ ID NO: 5238535 - DNA, 25 bp, Homo sapien
gagacagaggccaagctgacccagc

SEQ ID NO: 5238536 - DNA, 25 bp, Homo sapien
aatgtaagtgagcacacccgctccc

SEQ ID NO: 5238537 - DNA, 25 bp, Homo sapien
ccgctccccagatgtccgtggcaga

SEQ ID NO: 5238538 - DNA, 25 bp, Homo sapien
taatgtaagtgagcacacccgctcc

SEQ ID NO: 5238539 - DNA, 25 bp, Homo sapien
tggcagagccgatgggttctccctt

SEQ ID NO: 5238540 - DNA, 25 bp, Homo sapien
ccagacccagaaggacattagtgtc

SEQ ID NO: 5238541 - DNA, 25 bp, Homo sapien
aaggacattagtgtcaggtgcacag

SEQ ID NO: 5238542 - DNA, 25 bp, Homo sapien
ggaagatagcttgattgacgtatgc

SEQ ID NO: 5238543 - DNA, 25 bp, Homo sapien
atgcagaccggaggccaacacccag

SEQ ID NO: 5238544 - DNA, 25 bp, Homo sapien
agctggaaggcatcaaagcggcccc

SEQ ID NO: 5238545 - DNA, 25 bp, Homo sapien
ctctgggatgtattggggtacagct

SEQ ID NO: 5238546 - DNA, 25 bp, Homo sapien
catagaacggggagcgtccactgag

SEQ ID NO: 5238547 - DNA, 25 bp, Homo sapien
tttcgcaagaagagggtggcgctct

SEQ ID NO: 5238548 - DNA, 25 bp, Homo sapien
agcagacttcttcctaggagcaggg

SEQ ID NO: 5238549 - DNA, 25 bp, Homo sapien
tcagttccccagtctccggaatggg

SEQ ID NO: 5238550 - DNA, 25 bp, Homo sapien
gaccatttagtagaagcagcagact

SEQ ID NO: 5238551 - DNA, 25 bp, Homo sapien
gctgcctcaggctttaaatggtggg

SEQ ID NO: 5238552 - DNA, 25 bp, Homo sapien
aggtaggcgtcctgcaaccatgggt

SEQ ID NO: 5238553 - DNA, 25 bp, Homo sapien
cgtctggcggcgcagcttcatcagg

SEQ ID NO: 5238554 - DNA, 25 bp, Homo sapien
ttggtggtgaaggtgagcgtctggc

SEQ ID NO: 5238555 - DNA, 25 bp, Homo sapien
actccttgagccggttggtggtgaa

SEQ ID NO: 5238556 - DNA, 25 bp, Homo sapien
ctaggggccgccagggtaggagcgc

SEQ ID NO: 5238557 - DNA, 25 bp, Homo sapien
taggggccgccagggtaggagcgca

SEQ ID NO: 5238558 - DNA, 25 bp, Homo sapien
ggggccgccagggtaggagcgcagc

SEQ ID NO: 5238559 - DNA, 25 bp, Homo sapien
ggccgccagggtaggagcgcagcag

SEQ ID NO: 5238560 - DNA, 25 bp, Homo sapien
gagtgtgagtgactgctggcctcca

SEQ ID NO: 5238561 - DNA, 25 bp, Homo sapien
tgggccctggaatgtcccgtggcat

SEQ ID NO: 5238562 - DNA, 25 bp, Homo sapien
ttggttctccctgagatgcactgac

SEQ ID NO: 5238563 - DNA, 25 bp, Homo sapien
cattggtgggaaccccagttgaagc

SEQ ID NO: 5238564 - DNA, 25 bp, Homo sapien
ttttatttccttgtggcagacagac

SEQ ID NO: 5238565 - DNA, 25 bp, Homo sapien
atttccttgtggcagacagacagac

SEQ ID NO: 5238566 - DNA, 25 bp, Homo sapien
gctgcttgccatttttatttccttg

SEQ ID NO: 5238567 - DNA, 25 bp, Homo sapien
catttttatttccttgtggcagaca

SEQ ID NO: 5238568 - DNA, 25 bp, Homo sapien
tcattgatgtccagggtacatccag

SEQ ID NO: 5238569 - DNA, 25 bp, Homo sapien
gcctggatacgaatggccgcactct

SEQ ID NO: 5238570 - DNA, 25 bp, Homo sapien
tggccccggtaagaggcctggatac

SEQ ID NO: 5238571 - DNA, 25 bp, Homo sapien
gatgtccagggtacatccaggagct

SEQ ID NO: 5238572 - DNA, 25 bp, Homo sapien
tcctcgaagacgtagcggtacttgg

SEQ ID NO: 5238573 - DNA, 25 bp, Homo sapien
tacttgggaccgtcacgtagctcct

SEQ ID NO: 5238574 - DNA, 25 bp, Homo sapien
tgccgtccttactccagcggatgaa

SEQ ID NO: 5238575 - DNA, 25 bp, Homo sapien
cgttgatgctgtactggcccaggtc

SEQ ID NO: 5238576 - DNA, 25 bp, Homo sapien
cggtggtgcctttgcgcgccttagt

SEQ ID NO: 5238577 - DNA, 25 bp, Homo sapien
gtcgggcgcaggctctcccaggatc

SEQ ID NO: 5238578 - DNA, 25 bp, Homo sapien
aggatctccgcagtcagcgtcacgg

SEQ ID NO: 5238579 - DNA, 25 bp, Homo sapien
gtccttggtccagcctacgtcgggc

SEQ ID NO: 5238580 - DNA, 25 bp, Homo sapien
ccgtgccgcaggtcccggccctcgc

SEQ ID NO: 5238581 - DNA, 25 bp, Homo sapien
cagccagatttctgggctcagtccc

SEQ ID NO: 5238582 - DNA, 25 bp, Homo sapien
agccagatttctgggctcagtccca

SEQ ID NO: 5238583 - DNA, 25 bp, Homo sapien
gccagatttctgggctcagtcccac

SEQ ID NO: 5238584 - DNA, 25 bp, Homo sapien
tccagccagatttctgggctcagtc

SEQ ID NO: 5238585 - DNA, 25 bp, Homo sapien
cgacgcgagcgaagctctggtccat

SEQ ID NO: 5238586 - DNA, 25 bp, Homo sapien
tggcccggcgaatggtcagcgtcgt

SEQ ID NO: 5238587 - DNA, 25 bp, Homo sapien
ggctgttctccacgtacacctcgta

SEQ ID NO: 5238588 - DNA, 25 bp, Homo sapien
acgtacacctcgtacttgccgctgt

SEQ ID NO: 5238589 - DNA, 25 bp, Homo sapien
ggctcggcgccagggcggaaggtcc

SEQ ID NO: 5238590 - DNA, 25 bp, Homo sapien
cgggctcggcgccagggcggaaggt

SEQ ID NO: 5238591 - DNA, 25 bp, Homo sapien
cccgggctcggcgccagggcggaag

SEQ ID NO: 5238592 - DNA, 25 bp, Homo sapien
cacccccgggctcggcgccagggcg

SEQ ID NO: 5238593 - DNA, 25 bp, Homo sapien
agctttattaagcaagctggtggag

SEQ ID NO: 5238594 - DNA, 25 bp, Homo sapien
gctctgccgcccgctactgcaagct

SEQ ID NO: 5238595 - DNA, 25 bp, Homo sapien
ctctgccgcccgctactgcaagctc

SEQ ID NO: 5238596 - DNA, 25 bp, Homo sapien
tcctaatacggacgactgggtctaa

SEQ ID NO: 5238597 - DNA, 25 bp, Homo sapien
actgactctgtccaataaaccctgg

SEQ ID NO: 5238598 - DNA, 25 bp, Homo sapien
gctctccgtctagagggtgtcccct

SEQ ID NO: 5238599 - DNA, 25 bp, Homo sapien
gacaggttcccttggcatctcaaac

SEQ ID NO: 5238600 - DNA, 25 bp, Homo sapien
gggcctccaatcaggatcaccgctt

SEQ ID NO: 5238601 - DNA, 25 bp, Homo sapien
gcctccaatcaggatcaccgctttg

SEQ ID NO: 5238602 - DNA, 25 bp, Homo sapien
ggcctccaatcaggatcaccgcttt

SEQ ID NO: 5238603 - DNA, 25 bp, Homo sapien
gagggcctccaatcaggatcaccgc

SEQ ID NO: 5238604 - DNA, 25 bp, Homo sapien
ctcaaaagacaaaggtctgaagcga

SEQ ID NO: 5238605 - DNA, 25 bp, Homo sapien
aaagacaaaggtctgaagcgagttc

SEQ ID NO: 5238606 - DNA, 25 bp, Homo sapien
tcaaaagacaaaggtctgaagcgag

SEQ ID NO: 5238607 - DNA, 25 bp, Homo sapien
caaaagacaaaggtctgaagcgagt

SEQ ID NO: 5238608 - DNA, 25 bp, Homo sapien
gccacaggaaacaatggtttgggca

SEQ ID NO: 5238609 - DNA, 25 bp, Homo sapien
tgccacaggaaacaatggtttgggc

SEQ ID NO: 5238610 - DNA, 25 bp, Homo sapien
ccacaggaaacaatggtttgggcac

SEQ ID NO: 5238611 - DNA, 25 bp, Homo sapien
ctgccacaggaaacaatggtttggg

SEQ ID NO: 5238612 - DNA, 25 bp, Homo sapien
aatatggtgttggatcatagggacc

SEQ ID NO: 5238613 - DNA, 25 bp, Homo sapien
ctgggcacaggcttcaatatggtgt

SEQ ID NO: 5238614 - DNA, 25 bp, Homo sapien
gggcacaggcttcaatatggtgttg

SEQ ID NO: 5238615 - DNA, 25 bp, Homo sapien
caatatggtgttggatcatagggac

SEQ ID NO: 5238616 - DNA, 25 bp, Homo sapien
cctgctgggcggcttctaggaactg

SEQ ID NO: 5238617 - DNA, 25 bp, Homo sapien
taaactcctgctgggcggcttctag

SEQ ID NO: 5238618 - DNA, 25 bp, Homo sapien
tggaaggttaaactcctgctgggcg

SEQ ID NO: 5238619 - DNA, 25 bp, Homo sapien
ctgactggaaggttaaactcctgct

SEQ ID NO: 5238620 - DNA, 25 bp, Homo sapien
ttctagtaggcgaggatgaactcca

SEQ ID NO: 5238621 - DNA, 25 bp, Homo sapien
caagaactcagaggcctagggcatc

SEQ ID NO: 5238622 - DNA, 25 bp, Homo sapien
gatgtccaaacaagaatccttctag

SEQ ID NO: 5238623 - DNA, 25 bp, Homo sapien
acccccccatatacgagtgtgtgca

SEQ ID NO: 5238624 - DNA, 25 bp, Homo sapien
ccagggacccgagagccagctcagt

SEQ ID NO: 5238625 - DNA, 25 bp, Homo sapien
caaggcccacagagaaactctatat

SEQ ID NO: 5238626 - DNA, 25 bp, Homo sapien
ccagctcagtggatcttaggaaaca

SEQ ID NO: 5238627 - DNA, 25 bp, Homo sapien
aaacagataccatgagccagggcac

SEQ ID NO: 5238628 - DNA, 25 bp, Homo sapien
atggtaaagaccaccccctgtgcct

SEQ ID NO: 5238629 - DNA, 25 bp, Homo sapien
gggcttccaacatagcactcaaggg

SEQ ID NO: 5238630 - DNA, 25 bp, Homo sapien
gcagacatcagcattgagcacgaag

SEQ ID NO: 5238631 - DNA, 25 bp, Homo sapien
ccaaggagtaagaaagggtgacgct

SEQ ID NO: 5238632 - DNA, 25 bp, Homo sapien
tcaaggggaagtcggagcagacatc

SEQ ID NO: 5238633 - DNA, 25 bp, Homo sapien
agttgagggattgcgtcctgttagc

SEQ ID NO: 5238634 - DNA, 25 bp, Homo sapien
tggattctcaacgatgcagccgtag

SEQ ID NO: 5238635 - DNA, 25 bp, Homo sapien
gtgtctgtggattctcaacgatgca

SEQ ID NO: 5238636 - DNA, 25 bp, Homo sapien
aacgatgcagccgtagttgagggat

SEQ ID NO: 5238637 - DNA, 25 bp, Homo sapien
catcctgctgattacgctggaagac

SEQ ID NO: 5238638 - DNA, 25 bp, Homo sapien
tgatgtcactgataaatgtgctggg

SEQ ID NO: 5238639 - DNA, 25 bp, Homo sapien
gacatcccgaagaggcttcaaggct

SEQ ID NO: 5238640 - DNA, 25 bp, Homo sapien
tagatgccgcagttgatgatgtcac

SEQ ID NO: 5238641 - DNA, 25 bp, Homo sapien
tctggttcggccctctctgggatgt

SEQ ID NO: 5238642 - DNA, 25 bp, Homo sapien
gctgacattagtcccccagctgagc

SEQ ID NO: 5238643 - DNA, 25 bp, Homo sapien
cagctgagccccgactgtggggcta

SEQ ID NO: 5238644 - DNA, 25 bp, Homo sapien
gatgtggctgctcacatcccaggaa

SEQ ID NO: 5238645 - DNA, 25 bp, Homo sapien
tgcccctggccacaagcctggtgag

SEQ ID NO: 5238646 - DNA, 25 bp, Homo sapien
gactccagataccatcagtgagatg

SEQ ID NO: 5238647 - DNA, 25 bp, Homo sapien
gatgcacgtatatctggccctgccc

SEQ ID NO: 5238648 - DNA, 25 bp, Homo sapien
tgctctaggcggatggtacctgccc

SEQ ID NO: 5238649 - DNA, 25 bp, Homo sapien
tgtgcttggccagccgttctgggtg

SEQ ID NO: 5238650 - DNA, 25 bp, Homo sapien
tctgggtgagtgtcctggtatcggc

SEQ ID NO: 5238651 - DNA, 25 bp, Homo sapien
tcctggtatcggctcaggtagaggc

SEQ ID NO: 5238652 - DNA, 25 bp, Homo sapien
gaggcgggaggcgtagagggctgaa

SEQ ID NO: 5238653 - DNA, 25 bp, Homo sapien
gaggctttaactctggactcgaggt

SEQ ID NO: 5238654 - DNA, 25 bp, Homo sapien
tggactcgaggtcaagaatcctggt

SEQ ID NO: 5238655 - DNA, 25 bp, Homo sapien
ggcagggattgaggctttaactctg

SEQ ID NO: 5238656 - DNA, 25 bp, Homo sapien
tatcccaaaccgaatttgatcagga

SEQ ID NO: 5238657 - DNA, 25 bp, Homo sapien
ggccaccttggcggtcgggtggatg

SEQ ID NO: 5238658 - DNA, 25 bp, Homo sapien
ccaccttggcggtcgggtggatgta

SEQ ID NO: 5238659 - DNA, 25 bp, Homo sapien
gccaccttggcggtcgggtggatgt

SEQ ID NO: 5238660 - DNA, 25 bp, Homo sapien
caccttggcggtcgggtggatgtac

SEQ ID NO: 5238661 - DNA, 25 bp, Homo sapien
gctccatggaggacgatgctctccc

SEQ ID NO: 5238662 - DNA, 25 bp, Homo sapien
gtggctccatggaggacgatgctct

SEQ ID NO: 5238663 - DNA, 25 bp, Homo sapien
ccatggaggacgatgctctcccgga

SEQ ID NO: 5238664 - DNA, 25 bp, Homo sapien
ttcccgatggagacgttggggccca

SEQ ID NO: 5238665 - DNA, 25 bp, Homo sapien
gctctcactgtccatgcgggctcgg

SEQ ID NO: 5238666 - DNA, 25 bp, Homo sapien
ccagcccacgatgctatgcagaaca

SEQ ID NO: 5238667 - DNA, 25 bp, Homo sapien
aggctctcactgtccatgcgggctc

SEQ ID NO: 5238668 - DNA, 25 bp, Homo sapien
tgctatgcagaacacacgtgtgctc

SEQ ID NO: 5238669 - DNA, 25 bp, Homo sapien
cacgcgtgcacacagaggaacgaat

SEQ ID NO: 5238670 - DNA, 25 bp, Homo sapien
aagaaacacgcgtgcacacagagga

SEQ ID NO: 5238671 - DNA, 25 bp, Homo sapien
aaagaagaaacacgcgtgcacacag

SEQ ID NO: 5238672 - DNA, 25 bp, Homo sapien
gcacacagaggaacgaatgctcccc

SEQ ID NO: 5238673 - DNA, 25 bp, Homo sapien
ctcggcagggatccggactcggcag

SEQ ID NO: 5238674 - DNA, 25 bp, Homo sapien
tcggcagggatccggactcggcagc

SEQ ID NO: 5238675 - DNA, 25 bp, Homo sapien
tccttgtgtggcagaacaatcgagt

SEQ ID NO: 5238676 - DNA, 25 bp, Homo sapien
tctggttggtgaagcttcggctcag

SEQ ID NO: 5238677 - DNA, 25 bp, Homo sapien
tgaagcttcggctcagctccttgtg

SEQ ID NO: 5238678 - DNA, 25 bp, Homo sapien
ctccttgtgtggcagaacaatcgag

SEQ ID NO: 5238679 - DNA, 25 bp, Homo sapien
cccggcatgtgacgatccagcctgg

SEQ ID NO: 5238680 - DNA, 25 bp, Homo sapien
catgtgacgatccagcctggctttc

SEQ ID NO: 5238681 - DNA, 25 bp, Homo sapien
tccccaggccatccacattgctccc

SEQ ID NO: 5238682 - DNA, 25 bp, Homo sapien
catccacattgctccccggcatgtg

SEQ ID NO: 5238683 - DNA, 25 bp, Homo sapien
taataattcaggacatgtcaacagc

SEQ ID NO: 5238684 - DNA, 25 bp, Homo sapien
agcccaggacagagatcccaagact

SEQ ID NO: 5238685 - DNA, 25 bp, Homo sapien
tcaacagcgtttcaccggcagcacg

SEQ ID NO: 5238686 - DNA, 25 bp, Homo sapien
cggagccctccccacgcttaataat

SEQ ID NO: 5238687 - DNA, 25 bp, Homo sapien
gggtttcgcatcctcctcagcaaat

SEQ ID NO: 5238688 - DNA, 25 bp, Homo sapien
gctcttctaaactcagggcaagcgg

SEQ ID NO: 5238689 - DNA, 25 bp, Homo sapien
tgtggcttcccttatcagcaccagc

SEQ ID NO: 5238690 - DNA, 25 bp, Homo sapien
gattttgcacacaatctcgatcggc

SEQ ID NO: 5238691 - DNA, 25 bp, Homo sapien
gcatcgctgagtgccgaatgccgga

SEQ ID NO: 5238692 - DNA, 25 bp, Homo sapien
tgcagctcttaagcatgtcggcgag

SEQ ID NO: 5238693 - DNA, 25 bp, Homo sapien
ccaggtggaagatgtcggcatcgct

SEQ ID NO: 5238694 - DNA, 25 bp, Homo sapien
ccagtgcggttgaggatgtctacca

SEQ ID NO: 5238695 - DNA, 25 bp, Homo sapien
ctctaccaacccttgctttggggag

SEQ ID NO: 5238696 - DNA, 25 bp, Homo sapien
ctcggggactctaccaacccttgct

SEQ ID NO: 5238697 - DNA, 25 bp, Homo sapien
aacccttgctttggggagcagtgct

SEQ ID NO: 5238698 - DNA, 25 bp, Homo sapien
taccaacccttgctttggggagcag

SEQ ID NO: 5238699 - DNA, 25 bp, Homo sapien
agccttgatcagaggatccccgttc

SEQ ID NO: 5238700 - DNA, 25 bp, Homo sapien
tcctagcctggagaccaagcagaac

SEQ ID NO: 5238701 - DNA, 25 bp, Homo sapien
gcctcctagcctggagaccaagcag

SEQ ID NO: 5238702 - DNA, 25 bp, Homo sapien
gttcctgtatcctccaggcaccgcc

SEQ ID NO: 5238703 - DNA, 25 bp, Homo sapien
aggggtcggcgcactcaatcactct

SEQ ID NO: 5238704 - DNA, 25 bp, Homo sapien
caaggggtcggcgcactcaatcact

SEQ ID NO: 5238705 - DNA, 25 bp, Homo sapien
ggcaaggggtcggcgcactcaatca

SEQ ID NO: 5238706 - DNA, 25 bp, Homo sapien
gggtcggcgcactcaatcactctct

SEQ ID NO: 5238707 - DNA, 25 bp, Homo sapien
aacacttcccatagcgagtatagac

SEQ ID NO: 5238708 - DNA, 25 bp, Homo sapien
gtaacacttcccatagcgagtatag

SEQ ID NO: 5238709 - DNA, 25 bp, Homo sapien
gcagcgagctccgcgggtccgcgtt

SEQ ID NO: 5238710 - DNA, 25 bp, Homo sapien
agctccgcgggtccgcgttgaaggt

SEQ ID NO: 5238711 - DNA, 25 bp, Homo sapien
gctgtggatctgcacccgaatacct

SEQ ID NO: 5238712 - DNA, 25 bp, Homo sapien
ccccagctggtggatgtagggcggc

SEQ ID NO: 5238713 - DNA, 25 bp, Homo sapien
cagctggtggatgtagggcggctcc

SEQ ID NO: 5238714 - DNA, 25 bp, Homo sapien
aatacctgcctcaaacgacgtctca

SEQ ID NO: 5238715 - DNA, 25 bp, Homo sapien
ttctagagggcaggtttgctccaca

SEQ ID NO: 5238716 - DNA, 25 bp, Homo sapien
tagagggcaggtttgctccacatcc

SEQ ID NO: 5238717 - DNA, 25 bp, Homo sapien
tctagagggcaggtttgctccacat

SEQ ID NO: 5238718 - DNA, 25 bp, Homo sapien
cttctagagggcaggtttgctccac

SEQ ID NO: 5238719 - DNA, 25 bp, Homo sapien
agccggcaggcagacacactgtagg

SEQ ID NO: 5238720 - DNA, 25 bp, Homo sapien
acactgtaggccgagtagccctgaa

SEQ ID NO: 5238721 - DNA, 25 bp, Homo sapien
agcgctgaagcacggcctccttttc

SEQ ID NO: 5238722 - DNA, 25 bp, Homo sapien
gagctcactctctgcgcggcagttg

SEQ ID NO: 5238723 - DNA, 25 bp, Homo sapien
tgcacctgcctgtgcacatgagcag

SEQ ID NO: 5238724 - DNA, 25 bp, Homo sapien
acactcacacgggtacagacacata

SEQ ID NO: 5238725 - DNA, 25 bp, Homo sapien
tgccggcattcccacatgcatatgt

SEQ ID NO: 5238726 - DNA, 25 bp, Homo sapien
tacgcaaccacggatataaatgagc

SEQ ID NO: 5238727 - DNA, 25 bp, Homo sapien
cactcgatgtagatatttggtgggc

SEQ ID NO: 5238728 - DNA, 25 bp, Homo sapien
gtgtgtggtctgcacactcgatgta

SEQ ID NO: 5238729 - DNA, 25 bp, Homo sapien
ggtctgcacactcgatgtagatatt

SEQ ID NO: 5238730 - DNA, 25 bp, Homo sapien
cgatgtagatatttggtgggcagat

SEQ ID NO: 5238731 - DNA, 25 bp, Homo sapien
tgaagtatgggctaaggctcaaccc

SEQ ID NO: 5238732 - DNA, 25 bp, Homo sapien
tagatggatgaactgcagatcaggc

SEQ ID NO: 5238733 - DNA, 25 bp, Homo sapien
cctctccaggagttgacgggctgtg

SEQ ID NO: 5238734 - DNA, 25 bp, Homo sapien
aaggtctggagaatgcgcgaatcga

SEQ ID NO: 5238735 - DNA, 25 bp, Homo sapien
gatctctttcccatagcgtgtcagg

SEQ ID NO: 5238736 - DNA, 25 bp, Homo sapien
tttcccatagcgtgtcaggttgcag

SEQ ID NO: 5238737 - DNA, 25 bp, Homo sapien
gcccctgttggggatcctgaccatg

SEQ ID NO: 5238738 - DNA, 25 bp, Homo sapien
tcctgaccatggagatctctttccc

SEQ ID NO: 5238739 - DNA, 25 bp, Homo sapien
tatgtaggtctcgttgcggttgtac

SEQ ID NO: 5238740 - DNA, 25 bp, Homo sapien
cgtatgtaggtctcgttgcggttgt

SEQ ID NO: 5238741 - DNA, 25 bp, Homo sapien
gtatgtaggtctcgttgcggttgta

SEQ ID NO: 5238742 - DNA, 25 bp, Homo sapien
tccatggcttcagaggtcagggcct

SEQ ID NO: 5238743 - DNA, 25 bp, Homo sapien
caaagaagacatctaggaccaggaa

SEQ ID NO: 5238744 - DNA, 25 bp, Homo sapien
aaagaagacatctaggaccaggaag

SEQ ID NO: 5238745 - DNA, 25 bp, Homo sapien
agaagacatctaggaccaggaagtt

SEQ ID NO: 5238746 - DNA, 25 bp, Homo sapien
catagatgtagtcgaggatctccag

SEQ ID NO: 5238747 - DNA, 25 bp, Homo sapien
agatgtagtcgaggatctccagcaa

SEQ ID NO: 5238748 - DNA, 25 bp, Homo sapien
ctcatagatgtagtcgaggatctcc

SEQ ID NO: 5238749 - DNA, 25 bp, Homo sapien
ggccccaatgaacaggcccatctgt

SEQ ID NO: 5238750 - DNA, 25 bp, Homo sapien
gttcagggtcggggacagcagtggg

SEQ ID NO: 5238751 - DNA, 25 bp, Homo sapien
tggggttcagggtcggggacagcag

SEQ ID NO: 5238752 - DNA, 25 bp, Homo sapien
gggttcagggtcggggacagcagtg

SEQ ID NO: 5238753 - DNA, 25 bp, Homo sapien
ttggggttcagggtcggggacagca

SEQ ID NO: 5238754 - DNA, 25 bp, Homo sapien
gggacgcctccatacccgcttcagt

SEQ ID NO: 5238755 - DNA, 25 bp, Homo sapien
atacccgcttcagtcgatcccagga

SEQ ID NO: 5238756 - DNA, 25 bp, Homo sapien
atgcccccagtggaggtccgcaggg

SEQ ID NO: 5238757 - DNA, 25 bp, Homo sapien
gtcttgggacgcctccatacccgct

SEQ ID NO: 5238758 - DNA, 25 bp, Homo sapien
aaaatcttcaaagagacctcctggg

SEQ ID NO: 5238759 - DNA, 25 bp, Homo sapien
caaaatcttcaaagagacctcctgg

SEQ ID NO: 5238760 - DNA, 25 bp, Homo sapien
aaatcttcaaagagacctcctgggg

SEQ ID NO: 5238761 - DNA, 25 bp, Homo sapien
ggcaggaagtaggaccagcccagca

SEQ ID NO: 5238762 - DNA, 25 bp, Homo sapien
tttacaaatgtacagagggctcccc

SEQ ID NO: 5238763 - DNA, 25 bp, Homo sapien
ccccggctgggatgggctctatcct

SEQ ID NO: 5238764 - DNA, 25 bp, Homo sapien
tgggtcctttcagtcacagcaccgt

SEQ ID NO: 5238765 - DNA, 25 bp, Homo sapien
cctccctatagaagggactctaggg

SEQ ID NO: 5238766 - DNA, 25 bp, Homo sapien
tttattcccaatctcgtcagcactt

SEQ ID NO: 5238767 - DNA, 25 bp, Homo sapien
aatctcgtcagcactttataaaatc

SEQ ID NO: 5238768 - DNA, 25 bp, Homo sapien
cccctccctatagaagggactctag

SEQ ID NO: 5238769 - DNA, 25 bp, Homo sapien
tatttatgcagtacagtctgcctga

SEQ ID NO: 5238770 - DNA, 25 bp, Homo sapien
gctgctgattcgggctgtggcctcc

SEQ ID NO: 5238771 - DNA, 25 bp, Homo sapien
tgtggcctccacgtatttatgcagt

SEQ ID NO: 5238772 - DNA, 25 bp, Homo sapien
gcagtacagtctgcctgacgccagc

SEQ ID NO: 5238773 - DNA, 25 bp, Homo sapien
gctgagccgcgtggagatcttgcct

SEQ ID NO: 5238774 - DNA, 25 bp, Homo sapien
ggtatggaatacacgctggacttgc

SEQ ID NO: 5238775 - DNA, 25 bp, Homo sapien
aatggctaccgacgctttgatccgg

SEQ ID NO: 5238776 - DNA, 25 bp, Homo sapien
tacaactccgactatgtggcagccc

SEQ ID NO: 5238777 - DNA, 25 bp, Homo sapien
ggctgccgcaacgacatcgtcagtg

SEQ ID NO: 5238778 - DNA, 25 bp, Homo sapien
ccacgaggtgggatgataagctatc

SEQ ID NO: 5238779 - DNA, 25 bp, Homo sapien
tgggtcgctgcattctcgatgccac

SEQ ID NO: 5238780 - DNA, 25 bp, Homo sapien
ggtctgcttttccatgccaattcgg

SEQ ID NO: 5238781 - DNA, 25 bp, Homo sapien
ccttgcagtgacacgtcggacagct

SEQ ID NO: 5238782 - DNA, 25 bp, Homo sapien
ctctccggtagcgagagcccgagac

SEQ ID NO: 5238783 - DNA, 25 bp, Homo sapien
ggcgggctgcttctgacgtcacatg

SEQ ID NO: 5238784 - DNA, 25 bp, Homo sapien
tgaggctccagtgccgagcgcaaga

SEQ ID NO: 5238785 - DNA, 25 bp, Homo sapien
gctgatggacagctccggcctctgc

SEQ ID NO: 5238786 - DNA, 25 bp, Homo sapien
gctcgggccgccccagaaccgcggc

SEQ ID NO: 5238787 - DNA, 25 bp, Homo sapien
ccgcggcgtccgggaactcgggctg

SEQ ID NO: 5238788 - DNA, 25 bp, Homo sapien
cagggaaagtccgtcgtgcgaggaa

SEQ ID NO: 5238789 - DNA, 25 bp, Homo sapien
ctgctgggccggagagaatggtgtc

SEQ ID NO: 5238790 - DNA, 25 bp, Homo sapien
gctccacgtccaacaccggctggca

SEQ ID NO: 5238791 - DNA, 25 bp, Homo sapien
gggttgcggggcgccagaggctcca

SEQ ID NO: 5238792 - DNA, 25 bp, Homo sapien
cggggcgccagaggctccaactgac

SEQ ID NO: 5238793 - DNA, 25 bp, Homo sapien
gccggggttgcggggcgccagaggc

SEQ ID NO: 5238794 - DNA, 25 bp, Homo sapien
ttgcggggcgccagaggctccaact

SEQ ID NO: 5238795 - DNA, 25 bp, Homo sapien
agagattcatctgtgggcggctcaa

SEQ ID NO: 5238796 - DNA, 25 bp, Homo sapien
aagtgcctggctagtggaggctggg

SEQ ID NO: 5238797 - DNA, 25 bp, Homo sapien
tgaagggagcgtgctgccagtgaga

SEQ ID NO: 5238798 - DNA, 25 bp, Homo sapien
caatatgggattgtccaagatttac

SEQ ID NO: 5238799 - DNA, 25 bp, Homo sapien
agttggggtcacggaggagtcctgg

SEQ ID NO: 5238800 - DNA, 25 bp, Homo sapien
gacagtggacaaaggaatagtatcc

SEQ ID NO: 5238801 - DNA, 25 bp, Homo sapien
tccacatttgtgcagctccggaagc

SEQ ID NO: 5238802 - DNA, 25 bp, Homo sapien
gagggattgggagaactcagcaagg

SEQ ID NO: 5238803 - DNA, 25 bp, Homo sapien
ggaatagaagggagtcaccctccca

SEQ ID NO: 5238804 - DNA, 25 bp, Homo sapien
atagaagggagtcaccctcccaagt

SEQ ID NO: 5238805 - DNA, 25 bp, Homo sapien
gaatagaagggagtcaccctcccaa

SEQ ID NO: 5238806 - DNA, 25 bp, Homo sapien
tgggaatagaagggagtcaccctcc

SEQ ID NO: 5238807 - DNA, 25 bp, Homo sapien
gaaccgcagtgttgccacagtcccc

SEQ ID NO: 5238808 - DNA, 25 bp, Homo sapien
ctggaaccgcagtgttgccacagtc

SEQ ID NO: 5238809 - DNA, 25 bp, Homo sapien
tggaaccgcagtgttgccacagtcc

SEQ ID NO: 5238810 - DNA, 25 bp, Homo sapien
accgcagtgttgccacagtccccgg

SEQ ID NO: 5238811 - DNA, 25 bp, Homo sapien
tccaggggctgttcacaaggtgcac

SEQ ID NO: 5238812 - DNA, 25 bp, Homo sapien
caggggctgttcacaaggtgcaccc

SEQ ID NO: 5238813 - DNA, 25 bp, Homo sapien
gggctgttcacaaggtgcaccccag

SEQ ID NO: 5238814 - DNA, 25 bp, Homo sapien
gctgttcacaaggtgcaccccagaa

SEQ ID NO: 5238815 - DNA, 25 bp, Homo sapien
cacatgatgcagacgagggccggca

SEQ ID NO: 5238816 - DNA, 25 bp, Homo sapien
tagacgactccaaacaaacagcaca

SEQ ID NO: 5238817 - DNA, 25 bp, Homo sapien
cgaagaagcagtagacgactccaaa

SEQ ID NO: 5238818 - DNA, 25 bp, Homo sapien
gcagtagacgactccaaacaaacag

SEQ ID NO: 5238819 - DNA, 25 bp, Homo sapien
gattcagagaagacttgggggccca

SEQ ID NO: 5238820 - DNA, 25 bp, Homo sapien
ggtgagggatgagatggggatctca

SEQ ID NO: 5238821 - DNA, 25 bp, Homo sapien
agagggattcagagaagacttgggg

SEQ ID NO: 5238822 - DNA, 25 bp, Homo sapien
agggattcagagaagacttgggggc

SEQ ID NO: 5238823 - DNA, 25 bp, Homo sapien
caaagaggacagagtagcagcatta

SEQ ID NO: 5238824 - DNA, 25 bp, Homo sapien
gataatggcaccactgaaaggttac

SEQ ID NO: 5238825 - DNA, 25 bp, Homo sapien
ccagaaaatgaggtatttgtaggtt

SEQ ID NO: 5238826 - DNA, 25 bp, Homo sapien
tgtaggttagggagattgacagaaa

SEQ ID NO: 5238827 - DNA, 25 bp, Homo sapien
aagatgaccaccgagccaaacagca

SEQ ID NO: 5238828 - DNA, 25 bp, Homo sapien
cagctcggcgaagtagtcagcggca

SEQ ID NO: 5238829 - DNA, 25 bp, Homo sapien
gtgtctctagcacccgctctcggta

SEQ ID NO: 5238830 - DNA, 25 bp, Homo sapien
agcaacccagtgagaaagagcactg

SEQ ID NO: 5238831 - DNA, 25 bp, Homo sapien
cactgcaccagaacgcccatcaggc

SEQ ID NO: 5238832 - DNA, 25 bp, Homo sapien
tcaccctccactgcaccagaacgcc

SEQ ID NO: 5238833 - DNA, 25 bp, Homo sapien
ccctccactgcaccagaacgcccat

SEQ ID NO: 5238834 - DNA, 25 bp, Homo sapien
tccactgcaccagaacgcccatcag

SEQ ID NO: 5238835 - DNA, 25 bp, Homo sapien
tggcctgcgccgataagcagggtct

SEQ ID NO: 5238836 - DNA, 25 bp, Homo sapien
aatccgcatcagttgcacgcgtcgg

SEQ ID NO: 5238837 - DNA, 25 bp, Homo sapien
tccttgcgatcttcctgctgccgaa

SEQ ID NO: 5238838 - DNA, 25 bp, Homo sapien
gagaggacgtctccattgaagcgtt

SEQ ID NO: 5238839 - DNA, 25 bp, Homo sapien
gttcatggacaaacaggccttctag

SEQ ID NO: 5238840 - DNA, 25 bp, Homo sapien
gatgcatggacaaacagttcatgga

SEQ ID NO: 5238841 - DNA, 25 bp, Homo sapien
agcccctggtgcatgggctccgatg

SEQ ID NO: 5238842 - DNA, 25 bp, Homo sapien
ttctagatagcaaccagcccgtggg

SEQ ID NO: 5238843 - DNA, 25 bp, Homo sapien
atagtccgcatctgtgggtgaggcc

SEQ ID NO: 5238844 - DNA, 25 bp, Homo sapien
cgggacccatactcatagtccgcat

SEQ ID NO: 5238845 - DNA, 25 bp, Homo sapien
ccggtctgccggtctcggaagctct

SEQ ID NO: 5238846 - DNA, 25 bp, Homo sapien
tgaggccatgaaggagctcagggag

SEQ ID NO: 5238847 - DNA, 25 bp, Homo sapien
tcagaaatctaaggcaagggtccca

SEQ ID NO: 5238848 - DNA, 25 bp, Homo sapien
aacccttagatgagtctggctgcga

SEQ ID NO: 5238849 - DNA, 25 bp, Homo sapien
tgacagacaccagacatgcaccgtg

SEQ ID NO: 5238850 - DNA, 25 bp, Homo sapien
tgccccatagacaaggacaagaacc

SEQ ID NO: 5238851 - DNA, 25 bp, Homo sapien
ggagggtgcccagcaattagaacca

SEQ ID NO: 5238852 - DNA, 25 bp, Homo sapien
tgaggtgaccttgatcgccgtgacc

SEQ ID NO: 5238853 - DNA, 25 bp, Homo sapien
tagggacttcatgctgccgaatggc

SEQ ID NO: 5238854 - DNA, 25 bp, Homo sapien
gatcatataccctcgcgatgaggtg

SEQ ID NO: 5238855 - DNA, 25 bp, Homo sapien
gcagaggtgcgctggaccaaggatg

SEQ ID NO: 5238856 - DNA, 25 bp, Homo sapien
gctgacctgtgagctatgccggccc

SEQ ID NO: 5238857 - DNA, 25 bp, Homo sapien
tgacctgtgagctatgccggccctg

SEQ ID NO: 5238858 - DNA, 25 bp, Homo sapien
acctgtgagctatgccggccctggg

SEQ ID NO: 5238859 - DNA, 25 bp, Homo sapien
aatgctcacagattcatcaggttgg

SEQ ID NO: 5238860 - DNA, 25 bp, Homo sapien
tcacaacgcaaaagagtacaccttc

SEQ ID NO: 5238861 - DNA, 25 bp, Homo sapien
gagtccttcctagcatgcagtcaag

SEQ ID NO: 5238862 - DNA, 25 bp, Homo sapien
gaaggtaacgctccccataatagga

SEQ ID NO: 5238863 - DNA, 25 bp, Homo sapien
caagttccgctgctacgtgatgggc

SEQ ID NO: 5238864 - DNA, 25 bp, Homo sapien
ccttctgggtgaacgagggcaagca

SEQ ID NO: 5238865 - DNA, 25 bp, Homo sapien
tctatacttagaccagtggagccag

SEQ ID NO: 5238866 - DNA, 25 bp, Homo sapien
tcaaggtgctttactgccaggccaa

SEQ ID NO: 5238867 - DNA, 25 bp, Homo sapien
cctggccctgctagtggggaactca

SEQ ID NO: 5238868 - DNA, 25 bp, Homo sapien
gctcacctggccctgctagtgggga

SEQ ID NO: 5238869 - DNA, 25 bp, Homo sapien
tttccacgccccacagtccgagttg

SEQ ID NO: 5238870 - DNA, 25 bp, Homo sapien
ctttccacgccccacagtccgagtt

SEQ ID NO: 5238871 - DNA, 25 bp, Homo sapien
agaagagcagtaggtgcagcaccat

SEQ ID NO: 5238872 - DNA, 25 bp, Homo sapien
aagaagagcagtaggtgcagcacca

SEQ ID NO: 5238873 - DNA, 25 bp, Homo sapien
ggccagaacaagttcccgggccagc

SEQ ID NO: 5238874 - DNA, 25 bp, Homo sapien
gaaaaggatggcttgggagacatcc

SEQ ID NO: 5238875 - DNA, 25 bp, Homo sapien
ctcagagcccctgtgtgtgaagccc

SEQ ID NO: 5238876 - DNA, 25 bp, Homo sapien
ggccccaaggcatccaagaacaggg

SEQ ID NO: 5238877 - DNA, 25 bp, Homo sapien
cctctctaagagaaaggtggaccag

SEQ ID NO: 5238878 - DNA, 25 bp, Homo sapien
ccactgtgctgcgaacggactgaag

SEQ ID NO: 5238879 - DNA, 25 bp, Homo sapien
gacgttcaacgactaagtggccagg

SEQ ID NO: 5238880 - DNA, 25 bp, Homo sapien
cactcgttcatggactggcaattgg

SEQ ID NO: 5238881 - DNA, 25 bp, Homo sapien
caccagatagtgtgaaacagtatcc

SEQ ID NO: 5238882 - DNA, 25 bp, Homo sapien
tagacttcaatgcttactcaccaga

SEQ ID NO: 5238883 - DNA, 25 bp, Homo sapien
tgtggccaccagtcatgagccaatg

SEQ ID NO: 5238884 - DNA, 25 bp, Homo sapien
tgagccaatgatgggctgcactctg

SEQ ID NO: 5238885 - DNA, 25 bp, Homo sapien
caagcacagtgctgcgtgagaaggt

SEQ ID NO: 5238886 - DNA, 25 bp, Homo sapien
ttgaaagagtaacctccatccgagg

SEQ ID NO: 5238887 - DNA, 25 bp, Homo sapien
gaaactgggagggtacacgatccac

SEQ ID NO: 5238888 - DNA, 25 bp, Homo sapien
agatgttcagtgctactctgtggca

SEQ ID NO: 5238889 - DNA, 25 bp, Homo sapien
ggaggagtgggagccatctatttcc

SEQ ID NO: 5238890 - DNA, 25 bp, Homo sapien
gtggggagggtagcccataggcaga

SEQ ID NO: 5238891 - DNA, 25 bp, Homo sapien
gagtgggagccatctatttcccaac

SEQ ID NO: 5238892 - DNA, 25 bp, Homo sapien
caccagccatgggattaagaaggaa

SEQ ID NO: 5238893 - DNA, 25 bp, Homo sapien
taccagctcagctgcccggcgccta

SEQ ID NO: 5238894 - DNA, 25 bp, Homo sapien
tcagctgcccggcgcctatcaatga

SEQ ID NO: 5238895 - DNA, 25 bp, Homo sapien
accagctcagctgcccggcgcctat

SEQ ID NO: 5238896 - DNA, 25 bp, Homo sapien
gctgcccggcgcctatcaatgatgg

SEQ ID NO: 5238897 - DNA, 25 bp, Homo sapien
accgaggcgtcatgcggagaaaaag

SEQ ID NO: 5238898 - DNA, 25 bp, Homo sapien
cctcaggtgggcggtagtgccaaaa

SEQ ID NO: 5238899 - DNA, 25 bp, Homo sapien
ggcgtccgcgcaaaccgaggcgtca

SEQ ID NO: 5238900 - DNA, 25 bp, Homo sapien
catgcggagaaaaaggcgagaaaga

SEQ ID NO: 5238901 - DNA, 25 bp, Homo sapien
gtcgtcatggccacgggacgctggg

SEQ ID NO: 5238902 - DNA, 25 bp, Homo sapien
gactcccgcagcaaccccgcgagct

SEQ ID NO: 5238903 - DNA, 25 bp, Homo sapien
agtccctctgagcggtcgtcatggc

SEQ ID NO: 5238904 - DNA, 25 bp, Homo sapien
cccgcgagcttccacaacagggagt

SEQ ID NO: 5238905 - DNA, 25 bp, Homo sapien
caataatgattatgaccgagatcag

SEQ ID NO: 5238906 - DNA, 25 bp, Homo sapien
gaccgagatcagtccctggtcctga

SEQ ID NO: 5238907 - DNA, 25 bp, Homo sapien
gattatgaccgagatcagtccctgg

SEQ ID NO: 5238908 - DNA, 25 bp, Homo sapien
cttgctacacaataatgattatgac

SEQ ID NO: 5238909 - DNA, 25 bp, Homo sapien
cagctacaagctaggcatgaaggaa

SEQ ID NO: 5238910 - DNA, 25 bp, Homo sapien
gagactttcatccttgagggcatct

SEQ ID NO: 5238911 - DNA, 25 bp, Homo sapien
gtacaatatcaaagtcaggacactg

SEQ ID NO: 5238912 - DNA, 25 bp, Homo sapien
ttctcagctgggcattgcgacatgc

SEQ ID NO: 5238913 - DNA, 25 bp, Homo sapien
aatacgtggttcagctgttgcagtg

SEQ ID NO: 5238914 - DNA, 25 bp, Homo sapien
ctgcagcacatcgaagagaaactga

SEQ ID NO: 5238915 - DNA, 25 bp, Homo sapien
gctcaaatacgtggttcagctgttg

SEQ ID NO: 5238916 - DNA, 25 bp, Homo sapien
gtgctacagccagacaggaccacat

SEQ ID NO: 5238917 - DNA, 25 bp, Homo sapien
tctgcacccctaccctatccccaac

SEQ ID NO: 5238918 - DNA, 25 bp, Homo sapien
ctgcacccctaccctatccccaact

SEQ ID NO: 5238919 - DNA, 25 bp, Homo sapien
cttctgcacccctaccctatcccca

SEQ ID NO: 5238920 - DNA, 25 bp, Homo sapien
ttctgcacccctaccctatccccaa

SEQ ID NO: 5238921 - DNA, 25 bp, Homo sapien
tggggccaggaccagcaacatggac

SEQ ID NO: 5238922 - DNA, 25 bp, Homo sapien
gtggggccaggaccagcaacatgga

SEQ ID NO: 5238923 - DNA, 25 bp, Homo sapien
ctgtggggccaggaccagcaacatg

SEQ ID NO: 5238924 - DNA, 25 bp, Homo sapien
gggccaggaccagcaacatggacca

SEQ ID NO: 5238925 - DNA, 25 bp, Homo sapien
tccaggtgccgaagggatttgaagg

SEQ ID NO: 5238926 - DNA, 25 bp, Homo sapien
ccaggtgccgaagggatttgaaggg

SEQ ID NO: 5238927 - DNA, 25 bp, Homo sapien
ctccaggtgccgaagggatttgaag

SEQ ID NO: 5238928 - DNA, 25 bp, Homo sapien
caggtgccgaagggatttgaagggg

SEQ ID NO: 5238929 - DNA, 25 bp, Homo sapien
tccagctgggagtagatgcctcgga

SEQ ID NO: 5238930 - DNA, 25 bp, Homo sapien
tctccagctgggagtagatgcctcg

SEQ ID NO: 5238931 - DNA, 25 bp, Homo sapien
ccagctgggagtagatgcctcggag

SEQ ID NO: 5238932 - DNA, 25 bp, Homo sapien
agctgggagtagatgcctcggaggc

SEQ ID NO: 5238933 - DNA, 25 bp, Homo sapien
ctgtctaaggcggtcagtgcattgt

SEQ ID NO: 5238934 - DNA, 25 bp, Homo sapien
cagggagctgtctaaggcggtcagt

SEQ ID NO: 5238935 - DNA, 25 bp, Homo sapien
taaggcggtcagtgcattgtagctg

SEQ ID NO: 5238936 - DNA, 25 bp, Homo sapien
gcggtcagtgcattgtagctgaagt

SEQ ID NO: 5238937 - DNA, 25 bp, Homo sapien
gtcctggacttgattgtggcttagg

SEQ ID NO: 5238938 - DNA, 25 bp, Homo sapien
tcctggacttgattgtggcttaggt

SEQ ID NO: 5238939 - DNA, 25 bp, Homo sapien
agaaacgcagagctgacaagaggcg

SEQ ID NO: 5238940 - DNA, 25 bp, Homo sapien
ctggacttgattgtggcttaggttc

SEQ ID NO: 5238941 - DNA, 25 bp, Homo sapien
ggagaaaaagattatctcgttgacc

SEQ ID NO: 5238942 - DNA, 25 bp, Homo sapien
gagaaaaagattatctcgttgacca

SEQ ID NO: 5238943 - DNA, 25 bp, Homo sapien
gcaggcgattataggagatgtccag

SEQ ID NO: 5238944 - DNA, 25 bp, Homo sapien
gcaccaaatgcaggcgattatagga

SEQ ID NO: 5238945 - DNA, 25 bp, Homo sapien
catgcaggctccgaagctcattgcc

SEQ ID NO: 5238946 - DNA, 25 bp, Homo sapien
tcattgcctcgcagtatcaggaccc

SEQ ID NO: 5238947 - DNA, 25 bp, Homo sapien
aggttgcagcagaaagaccggccag

SEQ ID NO: 5238948 - DNA, 25 bp, Homo sapien
gaagagcatgtggatgagtacacgc

SEQ ID NO: 5238949 - DNA, 25 bp, Homo sapien
cacgcaagtgagtgtggtgcatgca

SEQ ID NO: 5238950 - DNA, 25 bp, Homo sapien
ctctcaaggctctagaggcacatgg

SEQ ID NO: 5238951 - DNA, 25 bp, Homo sapien
gtggtgacagctcccggtgtccttc

SEQ ID NO: 5238952 - DNA, 25 bp, Homo sapien
agtggtgacagctcccggtgtcctt

SEQ ID NO: 5238953 - DNA, 25 bp, Homo sapien
ggtgccgcagattcctcagctgctc

SEQ ID NO: 5238954 - DNA, 25 bp, Homo sapien
ccaaatccaggtgccgcagattcct

SEQ ID NO: 5238955 - DNA, 25 bp, Homo sapien
tcggtgctcagggtggaaccaaaga

SEQ ID NO: 5238956 - DNA, 25 bp, Homo sapien
ctgctcggtgctcagggtggaacca

SEQ ID NO: 5238957 - DNA, 25 bp, Homo sapien
tggcccggggtgacaagtactgggc

SEQ ID NO: 5238958 - DNA, 25 bp, Homo sapien
tgctcagggtggaaccaaagagggt

SEQ ID NO: 5238959 - DNA, 25 bp, Homo sapien
gaacacagtaagcagggtccaggtc

SEQ ID NO: 5238960 - DNA, 25 bp, Homo sapien
gagtggacacaggacgatcactcac

SEQ ID NO: 5238961 - DNA, 25 bp, Homo sapien
acacagtaagcagggtccaggtcct

SEQ ID NO: 5238962 - DNA, 25 bp, Homo sapien
cctcacccagggatggcaagagggt

SEQ ID NO: 5238963 - DNA, 25 bp, Homo sapien
atctgtcagtgacaagaccttgcca

SEQ ID NO: 5238964 - DNA, 25 bp, Homo sapien
ctgaaaatctgtcagtgacaagacc

SEQ ID NO: 5238965 - DNA, 25 bp, Homo sapien
aaatctgtcagtgacaagaccttgc

SEQ ID NO: 5238966 - DNA, 25 bp, Homo sapien
acaagaccttgccatcgagaaggaa

SEQ ID NO: 5238967 - DNA, 25 bp, Homo sapien
cagcgccctcccttcgtgtcttccc

SEQ ID NO: 5238968 - DNA, 25 bp, Homo sapien
caagccagccaaaaggcgggaccct

SEQ ID NO: 5238969 - DNA, 25 bp, Homo sapien
ctgaggtttcaggagtactccccac

SEQ ID NO: 5238970 - DNA, 25 bp, Homo sapien
ttcaggagtactccccactggccag

SEQ ID NO: 5238971 - DNA, 25 bp, Homo sapien
ctccccactggccagggcaaaggtg

SEQ ID NO: 5238972 - DNA, 25 bp, Homo sapien
ggctgagccccaaggatgtgtgagt

SEQ ID NO: 5238973 - DNA, 25 bp, Homo sapien
ttaaccttatgaagcaggggctggg

SEQ ID NO: 5238974 - DNA, 25 bp, Homo sapien
caacaccccctgaggagaggctgtc

SEQ ID NO: 5238975 - DNA, 25 bp, Homo sapien
cttaaccttatgaagcaggggctgg

SEQ ID NO: 5238976 - DNA, 25 bp, Homo sapien
ggtcacaacaccccctgaggagagg

SEQ ID NO: 5238977 - DNA, 25 bp, Homo sapien
gctccgggtccgtatcactgggttc

SEQ ID NO: 5238978 - DNA, 25 bp, Homo sapien
cgggtccgtatcactgggttcagag

SEQ ID NO: 5238979 - DNA, 25 bp, Homo sapien
ggttcagagatgcttgcccgcctca

SEQ ID NO: 5238980 - DNA, 25 bp, Homo sapien
ttgcccgcctcacacggactcggct

SEQ ID NO: 5238981 - DNA, 25 bp, Homo sapien
taaagcgtgtcctatggaaccctgt

SEQ ID NO: 5238982 - DNA, 25 bp, Homo sapien
tgtggtcacatgcaatccaagctgc

SEQ ID NO: 5238983 - DNA, 25 bp, Homo sapien
cctccgcggcatgtactaaagcgtg

SEQ ID NO: 5238984 - DNA, 25 bp, Homo sapien
cagagactcagcatacatgatagca

SEQ ID NO: 5238985 - DNA, 25 bp, Homo sapien
aatccttcaacggtgctcctcagcg

SEQ ID NO: 5238986 - DNA, 25 bp, Homo sapien
atggccccaaatccttcaacggtgc

SEQ ID NO: 5238987 - DNA, 25 bp, Homo sapien
gggaacccagaactgagcaagcctg

SEQ ID NO: 5238988 - DNA, 25 bp, Homo sapien
ggaacccagaactgagcaagcctgc

SEQ ID NO: 5238989 - DNA, 25 bp, Homo sapien
gaaccgttcccggaagctgctcatg

SEQ ID NO: 5238990 - DNA, 25 bp, Homo sapien
cgaaccgttcccggaagctgctcat

SEQ ID NO: 5238991 - DNA, 25 bp, Homo sapien
aaccgttcccggaagctgctcatga

SEQ ID NO: 5238992 - DNA, 25 bp, Homo sapien
gccgaaccgttcccggaagctgctc

SEQ ID NO: 5238993 - DNA, 25 bp, Homo sapien
cctcctgcgggggtgaaggtctggg

SEQ ID NO: 5238994 - DNA, 25 bp, Homo sapien
gcagaagtagtgggggtggccggca

SEQ ID NO: 5238995 - DNA, 25 bp, Homo sapien
tgggtgcagtgtcggggccctggga

SEQ ID NO: 5238996 - DNA, 25 bp, Homo sapien
ggcagagggtttccggagggctcca

SEQ ID NO: 5238997 - DNA, 25 bp, Homo sapien
tcctctgacattttctgtggtgact

SEQ ID NO: 5238998 - DNA, 25 bp, Homo sapien
ctcctctgacattttctgtggtgac

SEQ ID NO: 5238999 - DNA, 25 bp, Homo sapien
cctctgacattttctgtggtgactc

SEQ ID NO: 5239000 - DNA, 25 bp, Homo sapien
cttccacttccttctggtcctgctc

SEQ ID NO: 5239001 - DNA, 25 bp, Homo sapien
ctcttctccctgttccaccatctcc

SEQ ID NO: 5239002 - DNA, 25 bp, Homo sapien
ttcctcctcctgtggctccgccctg

SEQ ID NO: 5239003 - DNA, 25 bp, Homo sapien
tcctcttctccctgttccaccatct

SEQ ID NO: 5239004 - DNA, 25 bp, Homo sapien
ctgtggagagaccaagagaaaaggc

SEQ ID NO: 5239005 - DNA, 25 bp, Homo sapien
caccaacaaggggcgacagagttcc

SEQ ID NO: 5239006 - DNA, 25 bp, Homo sapien
acaccaacaaggggcgacagagttc

SEQ ID NO: 5239007 - DNA, 25 bp, Homo sapien
accaacaaggggcgacagagttccg

SEQ ID NO: 5239008 - DNA, 25 bp, Homo sapien
tgagaaagcattccctgccccgtac

SEQ ID NO: 5239009 - DNA, 25 bp, Homo sapien
ccctgagaaagcattccctgccccg

SEQ ID NO: 5239010 - DNA, 25 bp, Homo sapien
tgaccctgagaaagcattccctgcc

SEQ ID NO: 5239011 - DNA, 25 bp, Homo sapien
gtgaccctgagaaagcattccctgc

SEQ ID NO: 5239012 - DNA, 25 bp, Homo sapien
gctctatctcagctgcctccagact

SEQ ID NO: 5239013 - DNA, 25 bp, Homo sapien
tgggcctccggctctatctcagctg

SEQ ID NO: 5239014 - DNA, 25 bp, Homo sapien
gctccagtcgctccaaggtgcgagc

SEQ ID NO: 5239015 - DNA, 25 bp, Homo sapien
tccaaggtgcgagctgcttggagtt

SEQ ID NO: 5239016 - DNA, 25 bp, Homo sapien
caggctccagcaccaaatagcgacg

SEQ ID NO: 5239017 - DNA, 25 bp, Homo sapien
caactgccggtcagggcagatgtag

SEQ ID NO: 5239018 - DNA, 25 bp, Homo sapien
gtaggagaagcgcagactgaggatg

SEQ ID NO: 5239019 - DNA, 25 bp, Homo sapien
caaatagcgacgcaactgccggtca

SEQ ID NO: 5239020 - DNA, 25 bp, Homo sapien
ttccctctggctctcttaatcccca

SEQ ID NO: 5239021 - DNA, 25 bp, Homo sapien
accccagacggacacctcccacagg

SEQ ID NO: 5239022 - DNA, 25 bp, Homo sapien
caggcggaccccagacggacacctc

SEQ ID NO: 5239023 - DNA, 25 bp, Homo sapien
tctggctctcttaatccccacagcc

SEQ ID NO: 5239024 - DNA, 25 bp, Homo sapien
caagctgttcccgagccacattggt

SEQ ID NO: 5239025 - DNA, 25 bp, Homo sapien
ctgttcccgagccacattggtgact

SEQ ID NO: 5239026 - DNA, 25 bp, Homo sapien
gcgtagacactggaatctacccagc

SEQ ID NO: 5239027 - DNA, 25 bp, Homo sapien
ggccacagcgtagacactggaatct

SEQ ID NO: 5239028 - DNA, 25 bp, Homo sapien
aacagaggcctccagccttcctcac

SEQ ID NO: 5239029 - DNA, 25 bp, Homo sapien
tgtcttttggaacagaggcctccag

SEQ ID NO: 5239030 - DNA, 25 bp, Homo sapien
tggaacagaggcctccagccttcct

SEQ ID NO: 5239031 - DNA, 25 bp, Homo sapien
ctgtcttttggaacagaggcctcca

SEQ ID NO: 5239032 - DNA, 25 bp, Homo sapien
ccactctagccccttctccctaggg

SEQ ID NO: 5239033 - DNA, 25 bp, Homo sapien
acactcccctacacagagccacttt

SEQ ID NO: 5239034 - DNA, 25 bp, Homo sapien
cagagaggtcaagggcaggacttgt

SEQ ID NO: 5239035 - DNA, 25 bp, Homo sapien
cactttccctggaacaggggaggcg

SEQ ID NO: 5239036 - DNA, 25 bp, Homo sapien
aatgtcttcttcaaagatagtgctg

SEQ ID NO: 5239037 - DNA, 25 bp, Homo sapien
tcttcttcaaagatagtgctgactg

SEQ ID NO: 5239038 - DNA, 25 bp, Homo sapien
tgtcttcttcaaagatagtgctgac

SEQ ID NO: 5239039 - DNA, 25 bp, Homo sapien
cttcttcaaagatagtgctgactgg

SEQ ID NO: 5239040 - DNA, 25 bp, Homo sapien
gccttactgtcacatttaaatagcg

SEQ ID NO: 5239041 - DNA, 25 bp, Homo sapien
gtgaaaggagaatggttggccgggc

SEQ ID NO: 5239042 - DNA, 25 bp, Homo sapien
ttaaatagcgtaacagcaccatggg

SEQ ID NO: 5239043 - DNA, 25 bp, Homo sapien
ggccctctgcttggtgccttactgt

SEQ ID NO: 5239044 - DNA, 25 bp, Homo sapien
tcttatgccctcttacagacttggg

SEQ ID NO: 5239045 - DNA, 25 bp, Homo sapien
ggagggatgagctaaccctggccca

SEQ ID NO: 5239046 - DNA, 25 bp, Homo sapien
tcagactgggccaaacacaaccagg

SEQ ID NO: 5239047 - DNA, 25 bp, Homo sapien
taatcatgggcaagtcatctaagct

SEQ ID NO: 5239048 - DNA, 25 bp, Homo sapien
gttccccgagacacagcgaggagaa

SEQ ID NO: 5239049 - DNA, 25 bp, Homo sapien
cagcgaggagaaccacgtggtcact

SEQ ID NO: 5239050 - DNA, 25 bp, Homo sapien
gagaaggagccagagactgctctcc

SEQ ID NO: 5239051 - DNA, 25 bp, Homo sapien
taccacagttaggacacacagcagg

SEQ ID NO: 5239052 - DNA, 25 bp, Homo sapien
ttcttggccctgtcaaggtggtcac

SEQ ID NO: 5239053 - DNA, 25 bp, Homo sapien
aactaccatggtcacgggtgctcgg

SEQ ID NO: 5239054 - DNA, 25 bp, Homo sapien
gggactgaggctccaactaccatgg

SEQ ID NO: 5239055 - DNA, 25 bp, Homo sapien
gtgggctgttcttggccctgtcaag

SEQ ID NO: 5239056 - DNA, 25 bp, Homo sapien
ctgggcatcgctgaacacctcaaca

SEQ ID NO: 5239057 - DNA, 25 bp, Homo sapien
tcgctgaacacctcaacatccagga

SEQ ID NO: 5239058 - DNA, 25 bp, Homo sapien
caggaagagccggagtcggtggtcc

SEQ ID NO: 5239059 - DNA, 25 bp, Homo sapien
gagccggagtcggtggtccacagag

SEQ ID NO: 5239060 - DNA, 25 bp, Homo sapien
agaggaagttggtgagaaacctgat

SEQ ID NO: 5239061 - DNA, 25 bp, Homo sapien
ggtgagaaacctgatgagaggcctg

SEQ ID NO: 5239062 - DNA, 25 bp, Homo sapien
gttggtgagaaacctgatgagaggc

SEQ ID NO: 5239063 - DNA, 25 bp, Homo sapien
aggaagttggtgagaaacctgatga

SEQ ID NO: 5239064 - DNA, 25 bp, Homo sapien
acaaccacaaggcacatgaactccc

SEQ ID NO: 5239065 - DNA, 25 bp, Homo sapien
gtacagcctgcggtcagacacaacc

SEQ ID NO: 5239066 - DNA, 25 bp, Homo sapien
aacaggtacagcctgcggtcagaca

SEQ ID NO: 5239067 - DNA, 25 bp, Homo sapien
agcctgcggtcagacacaaccacaa

SEQ ID NO: 5239068 - DNA, 25 bp, Homo sapien
tcagctgcagccagctagctggagg

SEQ ID NO: 5239069 - DNA, 25 bp, Homo sapien
cagctgcagccagctagctggaggc

SEQ ID NO: 5239070 - DNA, 25 bp, Homo sapien
ctgcagccagctagctggaggctca

SEQ ID NO: 5239071 - DNA, 25 bp, Homo sapien
agctgcagccagctagctggaggct

SEQ ID NO: 5239072 - DNA, 25 bp, Homo sapien
gcccggcaatgcctggcatctcggg

SEQ ID NO: 5239073 - DNA, 25 bp, Homo sapien
caaggagctcctctaggaaggcccg

SEQ ID NO: 5239074 - DNA, 25 bp, Homo sapien
ggcccagctctatgccactcagatc

SEQ ID NO: 5239075 - DNA, 25 bp, Homo sapien
aggcccagctctatgccactcagat

SEQ ID NO: 5239076 - DNA, 25 bp, Homo sapien
ctgtggcactgacacagttcctcca

SEQ ID NO: 5239077 - DNA, 25 bp, Homo sapien
tgtggcactgacacagttcctccag

SEQ ID NO: 5239078 - DNA, 25 bp, Homo sapien
cgagcctccaaggatgagtcttttt

SEQ ID NO: 5239079 - DNA, 25 bp, Homo sapien
ctggcgagcctccaaggatgagtct

SEQ ID NO: 5239080 - DNA, 25 bp, Homo sapien
agcctccaaggatgagtctttttcc

SEQ ID NO: 5239081 - DNA, 25 bp, Homo sapien
ggcgagcctccaaggatgagtcttt

SEQ ID NO: 5239082 - DNA, 25 bp, Homo sapien
tcaaccaggaacgcccgaaggtaga

SEQ ID NO: 5239083 - DNA, 25 bp, Homo sapien
gttactcagctatgccctcaagtga

SEQ ID NO: 5239084 - DNA, 25 bp, Homo sapien
tgtgacaaggtagggtacagagacc

SEQ ID NO: 5239085 - DNA, 25 bp, Homo sapien
caaaggctctgggtaactgaggatc

SEQ ID NO: 5239086 - DNA, 25 bp, Homo sapien
ttgctgcaagggcactgtacaggtg

SEQ ID NO: 5239087 - DNA, 25 bp, Homo sapien
gagaagaggtgtgaaccacactctg

SEQ ID NO: 5239088 - DNA, 25 bp, Homo sapien
tggaatacctctgaggcctaccgcc

SEQ ID NO: 5239089 - DNA, 25 bp, Homo sapien
cacactctgaggtgggtcacaaagc

SEQ ID NO: 5239090 - DNA, 25 bp, Homo sapien
catgaatctctactctggaatacct

SEQ ID NO: 5239091 - DNA, 25 bp, Homo sapien
tggacggagtcagcaacagggatac

SEQ ID NO: 5239092 - DNA, 25 bp, Homo sapien
tcagcaacagggatacgaggcaggt

SEQ ID NO: 5239093 - DNA, 25 bp, Homo sapien
catctaacaggaacagggtggacgg

SEQ ID NO: 5239094 - DNA, 25 bp, Homo sapien
accttctcagaggcttcgccagatg

SEQ ID NO: 5239095 - DNA, 25 bp, Homo sapien
gaagagcagccgcaagtcctcaggg

SEQ ID NO: 5239096 - DNA, 25 bp, Homo sapien
cctcaggggctgagcggtagagcag

SEQ ID NO: 5239097 - DNA, 25 bp, Homo sapien
gagcggtagagcagcacggagctca

SEQ ID NO: 5239098 - DNA, 25 bp, Homo sapien
tagaagagcagccgcaagtcctcag

SEQ ID NO: 5239099 - DNA, 25 bp, Homo sapien
tccctctcactggagatacacatac

SEQ ID NO: 5239100 - DNA, 25 bp, Homo sapien
cctccctctcactggagatacacat

SEQ ID NO: 5239101 - DNA, 25 bp, Homo sapien
tccctccctctcactggagatacac

SEQ ID NO: 5239102 - DNA, 25 bp, Homo sapien
ccctctcactggagatacacataca

SEQ ID NO: 5239103 - DNA, 25 bp, Homo sapien
gactgggcaaactggttaacatccc

SEQ ID NO: 5239104 - DNA, 25 bp, Homo sapien
gatgcgggctcaatttcagggaact

SEQ ID NO: 5239105 - DNA, 25 bp, Homo sapien
gccgacgtttactgaaagcctccag

SEQ ID NO: 5239106 - DNA, 25 bp, Homo sapien
ttgtaaacagaatccagccgacgtt

SEQ ID NO: 5239107 - DNA, 25 bp, Homo sapien
tcggtcaagggccagcgcctcttgg

SEQ ID NO: 5239108 - DNA, 25 bp, Homo sapien
tcttggatcactgtccggagtccga

SEQ ID NO: 5239109 - DNA, 25 bp, Homo sapien
tgctcctgacacaccacacggagtg

SEQ ID NO: 5239110 - DNA, 25 bp, Homo sapien
acacggagtgcccaaaagctctcca

SEQ ID NO: 5239111 - DNA, 25 bp, Homo sapien
gccagatcattctctcgcctctccc

SEQ ID NO: 5239112 - DNA, 25 bp, Homo sapien
gaaacaactttattgatacctgaga

SEQ ID NO: 5239113 - DNA, 25 bp, Homo sapien
gggtcatttgggacctcactggcca

SEQ ID NO: 5239114 - DNA, 25 bp, Homo sapien
ctcccttaagccctgggtcatttgg

SEQ ID NO: 5239115 - DNA, 25 bp, Homo sapien
gggaactgcaggccttatgagtgac

SEQ ID NO: 5239116 - DNA, 25 bp, Homo sapien
aggttaggggaactgcaggccttat

SEQ ID NO: 5239117 - DNA, 25 bp, Homo sapien
gagtgactctaagtaccacacatga

SEQ ID NO: 5239118 - DNA, 25 bp, Homo sapien
gccttatgagtgactctaagtacca

SEQ ID NO: 5239119 - DNA, 25 bp, Homo sapien
ctgggaccacagttgggttggagat

SEQ ID NO: 5239120 - DNA, 25 bp, Homo sapien
gccgggccacatgacaagtcactgc

SEQ ID NO: 5239121 - DNA, 25 bp, Homo sapien
ttggcagcaattccatgccgggcca

SEQ ID NO: 5239122 - DNA, 25 bp, Homo sapien
gctctacttgatctcccatgctggg

SEQ ID NO: 5239123 - DNA, 25 bp, Homo sapien
tacatgcactgagattttaagcaga

SEQ ID NO: 5239124 - DNA, 25 bp, Homo sapien
gggtcaggcatatgagagcaactca

SEQ ID NO: 5239125 - DNA, 25 bp, Homo sapien
cacaaaaattgggtaagaatgcttg

SEQ ID NO: 5239126 - DNA, 25 bp, Homo sapien
tatgagagcaactcactctacattc

SEQ ID NO: 5239127 - DNA, 25 bp, Homo sapien
tgtttccaagaggcctctaccccag

SEQ ID NO: 5239128 - DNA, 25 bp, Homo sapien
gccagcatttcccaactagccggtt

SEQ ID NO: 5239129 - DNA, 25 bp, Homo sapien
tagccggttccatgactcctaccat

SEQ ID NO: 5239130 - DNA, 25 bp, Homo sapien
taaaaattgagggcagttctgagca

SEQ ID NO: 5239131 - DNA, 25 bp, Homo sapien
ggcccccacgcgcgggccccgcagc

SEQ ID NO: 5239132 - DNA, 25 bp, Homo sapien
cccccacgcgcgggccccgcagcac

SEQ ID NO: 5239133 - DNA, 25 bp, Homo sapien
gcagccgcgactgccgtccggcctc

SEQ ID NO: 5239134 - DNA, 25 bp, Homo sapien
tccggcctctcgcagcgcagagccg

SEQ ID NO: 5239135 - DNA, 25 bp, Homo sapien
tgccgtccggcctctcgcagcgcag

SEQ ID NO: 5239136 - DNA, 25 bp, Homo sapien
cgcgactgccgtccggcctctcgca

SEQ ID NO: 5239137 - DNA, 25 bp, Homo sapien
tccggagcctgcgaggcccaggcgg

SEQ ID NO: 5239138 - DNA, 25 bp, Homo sapien
gcccaggcgggccgccgcgccccat

SEQ ID NO: 5239139 - DNA, 25 bp, Homo sapien
gggctccggagcctgcgaggcccag

SEQ ID NO: 5239140 - DNA, 25 bp, Homo sapien
ctcggggctccggagcctgcgaggc

SEQ ID NO: 5239141 - DNA, 25 bp, Homo sapien
aggggccactgagggggcctagcgg

SEQ ID NO: 5239142 - DNA, 25 bp, Homo sapien
aggaggggccactgagggggcctag

SEQ ID NO: 5239143 - DNA, 25 bp, Homo sapien
gaggggccactgagggggcctagcg

SEQ ID NO: 5239144 - DNA, 25 bp, Homo sapien
aggcggctggggacgctctcgctca

SEQ ID NO: 5239145 - DNA, 25 bp, Homo sapien
ggtaggcggctggggacgctctcgc

SEQ ID NO: 5239146 - DNA, 25 bp, Homo sapien
ccaggtaggcggctggggacgctct

SEQ ID NO: 5239147 - DNA, 25 bp, Homo sapien
caggtaggcggctggggacgctctc

SEQ ID NO: 5239148 - DNA, 25 bp, Homo sapien
cgggcggcgggatcactccgttggc

SEQ ID NO: 5239149 - DNA, 25 bp, Homo sapien
gcggcgggatcactccgttggccat

SEQ ID NO: 5239150 - DNA, 25 bp, Homo sapien
ggcggcgggatcactccgttggcca

SEQ ID NO: 5239151 - DNA, 25 bp, Homo sapien
cccgggcggcgggatcactccgttg

SEQ ID NO: 5239152 - DNA, 25 bp, Homo sapien
ctcctccacgtctggacttagaggg

SEQ ID NO: 5239153 - DNA, 25 bp, Homo sapien
tgctcacagccaaggtcttgcccaa

SEQ ID NO: 5239154 - DNA, 25 bp, Homo sapien
caaggtcttgcccaagtcatcgtcc

SEQ ID NO: 5239155 - DNA, 25 bp, Homo sapien
agccaaggtcttgcccaagtcatcg

SEQ ID NO: 5239156 - DNA, 25 bp, Homo sapien
gggcttgctgatgaggtccccaaac

SEQ ID NO: 5239157 - DNA, 25 bp, Homo sapien
tcccgctcgctgtagctgcggctgg

SEQ ID NO: 5239158 - DNA, 25 bp, Homo sapien
aagtcccgctcgctgtagctgcggc

SEQ ID NO: 5239159 - DNA, 25 bp, Homo sapien
tcaaagtcccgctcgctgtagctgc

SEQ ID NO: 5239160 - DNA, 25 bp, Homo sapien
ccggaggtgagcgcggtgatggtgg

SEQ ID NO: 5239161 - DNA, 25 bp, Homo sapien
cagtgtccggcacaggatggcactg

SEQ ID NO: 5239162 - DNA, 25 bp, Homo sapien
ctgggtgaccaagccggaggtgagc

SEQ ID NO: 5239163 - DNA, 25 bp, Homo sapien
ggatggcactgggtgaccaagccgg

SEQ ID NO: 5239164 - DNA, 25 bp, Homo sapien
gaggcaggatgactgaacacggcat

SEQ ID NO: 5239165 - DNA, 25 bp, Homo sapien
gcaggatgactgaacacggcatgtg

SEQ ID NO: 5239166 - DNA, 25 bp, Homo sapien
gatgactgaacacggcatgtggccc

SEQ ID NO: 5239167 - DNA, 25 bp, Homo sapien
actgaacacggcatgtggcccagca

SEQ ID NO: 5239168 - DNA, 25 bp, Homo sapien
ggaaaggcggagttggactagccga

SEQ ID NO: 5239169 - DNA, 25 bp, Homo sapien
ggggagacgtgatacagcaaggagg

SEQ ID NO: 5239170 - DNA, 25 bp, Homo sapien
aaggcggagttggactagccgaggt

SEQ ID NO: 5239171 - DNA, 25 bp, Homo sapien
ggaggggagacgtgatacagcaagg

SEQ ID NO: 5239172 - DNA, 25 bp, Homo sapien
atggacagggaaggtcatgaagggg

SEQ ID NO: 5239173 - DNA, 25 bp, Homo sapien
gatggacagggaaggtcatgaaggg

SEQ ID NO: 5239174 - DNA, 25 bp, Homo sapien
tggacagggaaggtcatgaaggggg

SEQ ID NO: 5239175 - DNA, 25 bp, Homo sapien
cagctcaaggccgcaaacaagggca

SEQ ID NO: 5239176 - DNA, 25 bp, Homo sapien
tcaaggccgcaaacaagggcaccct

SEQ ID NO: 5239177 - DNA, 25 bp, Homo sapien
aggccgcaaacaagggcaccctagt

SEQ ID NO: 5239178 - DNA, 25 bp, Homo sapien
agctcaaggccgcaaacaagggcac

SEQ ID NO: 5239179 - DNA, 25 bp, Homo sapien
cacagcagaaacaggggccctcccc

SEQ ID NO: 5239180 - DNA, 25 bp, Homo sapien
ggttgaggcccccacagcagaaaca

SEQ ID NO: 5239181 - DNA, 25 bp, Homo sapien
ggccctccccacccgagggcacaca

SEQ ID NO: 5239182 - DNA, 25 bp, Homo sapien
aggcccccacagcagaaacaggggc

SEQ ID NO: 5239183 - DNA, 25 bp, Homo sapien
cgctgagagcgggtggtgggtgtgg

SEQ ID NO: 5239184 - DNA, 25 bp, Homo sapien
gggtcccctcggagggaggagcaga

SEQ ID NO: 5239185 - DNA, 25 bp, Homo sapien
aggagcagaggttttctccttcttc

SEQ ID NO: 5239186 - DNA, 25 bp, Homo sapien
gggaggagcagaggttttctccttc

SEQ ID NO: 5239187 - DNA, 25 bp, Homo sapien
ggtccctgagtgggggggctccaca

SEQ ID NO: 5239188 - DNA, 25 bp, Homo sapien
gggctccacaggttctgcctcagat

SEQ ID NO: 5239189 - DNA, 25 bp, Homo sapien
ctttgccttctgtggggtccctgag

SEQ ID NO: 5239190 - DNA, 25 bp, Homo sapien
tgggggggctccacaggttctgcct

SEQ ID NO: 5239191 - DNA, 25 bp, Homo sapien
ctgcagacatagaatgtgccctggg

SEQ ID NO: 5239192 - DNA, 25 bp, Homo sapien
cttgtcagtgtgtgggcccaccgag

SEQ ID NO: 5239193 - DNA, 25 bp, Homo sapien
ctcttgtcagtgtgtgggcccaccg

SEQ ID NO: 5239194 - DNA, 25 bp, Homo sapien
gctcttgtcagtgtgtgggcccacc

SEQ ID NO: 5239195 - DNA, 25 bp, Homo sapien
tcttgtcagtgtgtgggcccaccga

SEQ ID NO: 5239196 - DNA, 25 bp, Homo sapien
ttggacttgacagggccaggtcggt

SEQ ID NO: 5239197 - DNA, 25 bp, Homo sapien
gtggttccatcaccgtccctcagct

SEQ ID NO: 5239198 - DNA, 25 bp, Homo sapien
acttgacagggccaggtcggtggtt

SEQ ID NO: 5239199 - DNA, 25 bp, Homo sapien
caggtcggtggttccatcaccgtcc

SEQ ID NO: 5239200 - DNA, 25 bp, Homo sapien
cagtcgctcccgcaggtcataactg

SEQ ID NO: 5239201 - DNA, 25 bp, Homo sapien
caggtcataactggccgatgggctc

SEQ ID NO: 5239202 - DNA, 25 bp, Homo sapien
ttctccccagcgagtcgggaggccc

SEQ ID NO: 5239203 - DNA, 25 bp, Homo sapien
tcccgcaggtcataactggccgatg

SEQ ID NO: 5239204 - DNA, 25 bp, Homo sapien
ccaaagccccagctattggtatccc

SEQ ID NO: 5239205 - DNA, 25 bp, Homo sapien
cttccggggccagtgagtctcgagg

SEQ ID NO: 5239206 - DNA, 25 bp, Homo sapien
agccccagctattggtatccccagg

SEQ ID NO: 5239207 - DNA, 25 bp, Homo sapien
cagtgccccattgggctcagggtcc

SEQ ID NO: 5239208 - DNA, 25 bp, Homo sapien
tggcccctgatggactcccacaggt

SEQ ID NO: 5239209 - DNA, 25 bp, Homo sapien
ccctgatggactcccacaggtcacc

SEQ ID NO: 5239210 - DNA, 25 bp, Homo sapien
agctggcccctgatggactcccaca

SEQ ID NO: 5239211 - DNA, 25 bp, Homo sapien
cccctgatggactcccacaggtcac

SEQ ID NO: 5239212 - DNA, 25 bp, Homo sapien
tcttcttcttcctgcgaaggatggg

SEQ ID NO: 5239213 - DNA, 25 bp, Homo sapien
gctttttcactaagtgtcgccgcac

SEQ ID NO: 5239214 - DNA, 25 bp, Homo sapien
tgaggcctccggtccagctttttct

SEQ ID NO: 5239215 - DNA, 25 bp, Homo sapien
aagtgtcgccgcacaccagggttgt

SEQ ID NO: 5239216 - DNA, 25 bp, Homo sapien
cctcaaacttgatccagcgggccgt

SEQ ID NO: 5239217 - DNA, 25 bp, Homo sapien
tggctgcggtccagcatcagctcgt

SEQ ID NO: 5239218 - DNA, 25 bp, Homo sapien
ctccagaaggctacggaaggagagc

SEQ ID NO: 5239219 - DNA, 25 bp, Homo sapien
gagcgaggcaacatggggcttcccc

SEQ ID NO: 5239220 - DNA, 25 bp, Homo sapien
tcagtagcagggtacgtaggacgct

SEQ ID NO: 5239221 - DNA, 25 bp, Homo sapien
tccggccggatctggtcagacacaa

SEQ ID NO: 5239222 - DNA, 25 bp, Homo sapien
ccaccacgaggtgtgcaatgcctgg

SEQ ID NO: 5239223 - DNA, 25 bp, Homo sapien
atgcctggcagggtggtttgctcca

SEQ ID NO: 5239224 - DNA, 25 bp, Homo sapien
atggtaggcaccgccccatcagggc

SEQ ID NO: 5239225 - DNA, 25 bp, Homo sapien
cagaaccgagttcatgctggagctc

SEQ ID NO: 5239226 - DNA, 25 bp, Homo sapien
agttgggtgatgattccccagaacc

SEQ ID NO: 5239227 - DNA, 25 bp, Homo sapien
tccttggcgtcagggtcatgtggcc

SEQ ID NO: 5239228 - DNA, 25 bp, Homo sapien
ctgaggacgcagaactggaataggg

SEQ ID NO: 5239229 - DNA, 25 bp, Homo sapien
acaagcacaaccgtggcctcagcat

SEQ ID NO: 5239230 - DNA, 25 bp, Homo sapien
gaccatctcccccaggcatgtggag

SEQ ID NO: 5239231 - DNA, 25 bp, Homo sapien
catcttcagggatcttctccagcag

SEQ ID NO: 5239232 - DNA, 25 bp, Homo sapien
gcagcttcaggcttttcccccggtg

SEQ ID NO: 5239233 - DNA, 25 bp, Homo sapien
ttcagacgcacgaaggctgctgcag

SEQ ID NO: 5239234 - DNA, 25 bp, Homo sapien
caatggagcgcccaagctcgtgata

SEQ ID NO: 5239235 - DNA, 25 bp, Homo sapien
caggagtacagcctcattcagacgc

SEQ ID NO: 5239236 - DNA, 25 bp, Homo sapien
ccagcatcacgaagaggaagcggac

SEQ ID NO: 5239237 - DNA, 25 bp, Homo sapien
ccttgagagccagcacgcgcccaac

SEQ ID NO: 5239238 - DNA, 25 bp, Homo sapien
gcacccttgcctctatgggcaccac

SEQ ID NO: 5239239 - DNA, 25 bp, Homo sapien
accactgtggacaatgagggacagg

SEQ ID NO: 5239240 - DNA, 25 bp, Homo sapien
tatgggcaccactgtggacaatgag

SEQ ID NO: 5239241 - DNA, 25 bp, Homo sapien
gactttggtctgttcacgctctcgc

SEQ ID NO: 5239242 - DNA, 25 bp, Homo sapien
acttaggaggtcttgccggtcatct

SEQ ID NO: 5239243 - DNA, 25 bp, Homo sapien
tctcgctggaaagcagccacggagc

SEQ ID NO: 5239244 - DNA, 25 bp, Homo sapien
caggaactcgctgatggcacttagg

SEQ ID NO: 5239245 - DNA, 25 bp, Homo sapien
ggctgcgaagtagatgaagagcaca

SEQ ID NO: 5239246 - DNA, 25 bp, Homo sapien
gccacacactgggagtgcagcgcat

SEQ ID NO: 5239247 - DNA, 25 bp, Homo sapien
gtagtgcgggtaccggcgcctcaca

SEQ ID NO: 5239248 - DNA, 25 bp, Homo sapien
gagcccgtccgcagcaaggggtcat

SEQ ID NO: 5239249 - DNA, 25 bp, Homo sapien
agagagaagaggacgccgagcacag

SEQ ID NO: 5239250 - DNA, 25 bp, Homo sapien
tcaaacacaagcagcggcccagaga

SEQ ID NO: 5239251 - DNA, 25 bp, Homo sapien
gtggacacgatcagctcggacacgc

SEQ ID NO: 5239252 - DNA, 25 bp, Homo sapien
agagaagccaaccacaagcagcggc

SEQ ID NO: 5239253 - DNA, 25 bp, Homo sapien
ggcgagatgtagcggaccaggaagc

SEQ ID NO: 5239254 - DNA, 25 bp, Homo sapien
aaaggcgagatgtagcggaccagga

SEQ ID NO: 5239255 - DNA, 25 bp, Homo sapien
aaggcgagatgtagcggaccaggaa

SEQ ID NO: 5239256 - DNA, 25 bp, Homo sapien
aggcgagatgtagcggaccaggaag

SEQ ID NO: 5239257 - DNA, 25 bp, Homo sapien
gcagggcactgccatttggctccag

SEQ ID NO: 5239258 - DNA, 25 bp, Homo sapien
agcagtgccgtattgggctggttcc

SEQ ID NO: 5239259 - DNA, 25 bp, Homo sapien
gaagcggctgttcctgaacttgcgc

SEQ ID NO: 5239260 - DNA, 25 bp, Homo sapien
gctatgaagaaggtcccgagcatga

SEQ ID NO: 5239261 - DNA, 25 bp, Homo sapien
atggagatggggatgccaaagtccc

SEQ ID NO: 5239262 - DNA, 25 bp, Homo sapien
gtgtctgtgatggagtaatccacca

SEQ ID NO: 5239263 - DNA, 25 bp, Homo sapien
caaagtccccgatgatgcgacgagc

SEQ ID NO: 5239264 - DNA, 25 bp, Homo sapien
gagatggggatgccaaagtccccga

SEQ ID NO: 5239265 - DNA, 25 bp, Homo sapien
actaagctgcgtccccagtccagga

SEQ ID NO: 5239266 - DNA, 25 bp, Homo sapien
gcccaccaagcagcccactaagctg

SEQ ID NO: 5239267 - DNA, 25 bp, Homo sapien
caagcagcccactaagctgcgtccc

SEQ ID NO: 5239268 - DNA, 25 bp, Homo sapien
agcccactaagctgcgtccccagtc

SEQ ID NO: 5239269 - DNA, 25 bp, Homo sapien
ggtgggatgaaccacgagcgcttat

SEQ ID NO: 5239270 - DNA, 25 bp, Homo sapien
accatcatccacggcgggaaaggac

SEQ ID NO: 5239271 - DNA, 25 bp, Homo sapien
tatcgggagaggtcactgagagccc

SEQ ID NO: 5239272 - DNA, 25 bp, Homo sapien
cgggaacagcggctgccaccatcat

SEQ ID NO: 5239273 - DNA, 25 bp, Homo sapien
acatgggtgacggagcggaccgtgg

SEQ ID NO: 5239274 - DNA, 25 bp, Homo sapien
actgtcaacgcattgacatgggtga

SEQ ID NO: 5239275 - DNA, 25 bp, Homo sapien
agcctccgcgccttctggctgacga

SEQ ID NO: 5239276 - DNA, 25 bp, Homo sapien
caggcgcgatggcagtacgcatcac

SEQ ID NO: 5239277 - DNA, 25 bp, Homo sapien
cagacagcccccgtgaggatggaga

SEQ ID NO: 5239278 - DNA, 25 bp, Homo sapien
gggaggcgacatggacccactggac

SEQ ID NO: 5239279 - DNA, 25 bp, Homo sapien
agacagcccccgtgaggatggacag

SEQ ID NO: 5239280 - DNA, 25 bp, Homo sapien
ggaggcgacatggacccactggacc

SEQ ID NO: 5239281 - DNA, 25 bp, Homo sapien
ccccatgtacaggaagatcccaaag

SEQ ID NO: 5239282 - DNA, 25 bp, Homo sapien
aggatgagcaacaaacgctgggaca

SEQ ID NO: 5239283 - DNA, 25 bp, Homo sapien
tgctcaggatggtgttttgccggca

SEQ ID NO: 5239284 - DNA, 25 bp, Homo sapien
tggataccagacagggacgtgaccc

SEQ ID NO: 5239285 - DNA, 25 bp, Homo sapien
agtgaggccgccgtggacttgacca

SEQ ID NO: 5239286 - DNA, 25 bp, Homo sapien
gtgaacagatgcatccgccacgtct

SEQ ID NO: 5239287 - DNA, 25 bp, Homo sapien
accacccagagcagtgcgatgcagc

SEQ ID NO: 5239288 - DNA, 25 bp, Homo sapien
ctcagaggcaccgtgagcagcagca

SEQ ID NO: 5239289 - DNA, 25 bp, Homo sapien
atcctcatcgaagtttggttcagca

SEQ ID NO: 5239290 - DNA, 25 bp, Homo sapien
attgtactcatcctggccatcctca

SEQ ID NO: 5239291 - DNA, 25 bp, Homo sapien
ttgtactcatcctggccatcctcat

SEQ ID NO: 5239292 - DNA, 25 bp, Homo sapien
tggccatcctcatcgaagtttggtt

SEQ ID NO: 5239293 - DNA, 25 bp, Homo sapien
gcctgtgccggtctggtctgtgaaa

SEQ ID NO: 5239294 - DNA, 25 bp, Homo sapien
tctagccatggcatcaggagtggtt

SEQ ID NO: 5239295 - DNA, 25 bp, Homo sapien
gaaaggtgaggcgaggtcaacaccc

SEQ ID NO: 5239296 - DNA, 25 bp, Homo sapien
tgaggcccaggtgtcaatccctaag

SEQ ID NO: 5239297 - DNA, 25 bp, Homo sapien
gatacaagaagaaatgtcacacagg

SEQ ID NO: 5239298 - DNA, 25 bp, Homo sapien
ggacacattattgccacgttctgtg

SEQ ID NO: 5239299 - DNA, 25 bp, Homo sapien
aaatgtcacacaggctgccaaatgg

SEQ ID NO: 5239300 - DNA, 25 bp, Homo sapien
cacaggctgccaaatgggacacatt

SEQ ID NO: 5239301 - DNA, 25 bp, Homo sapien
tgttttcggcaatggcttaattgcc

SEQ ID NO: 5239302 - DNA, 25 bp, Homo sapien
tattgttgttttcggcaatggctta

SEQ ID NO: 5239303 - DNA, 25 bp, Homo sapien
ttcggcaatggcttaattgccagct

SEQ ID NO: 5239304 - DNA, 25 bp, Homo sapien
tgttgttttcggcaatggcttaatt

SEQ ID NO: 5239305 - DNA, 25 bp, Homo sapien
ctgactccatattagaatctctggg

SEQ ID NO: 5239306 - DNA, 25 bp, Homo sapien
gaaataactttcaaccacagtggaa

SEQ ID NO: 5239307 - DNA, 25 bp, Homo sapien
tagaaataggcatgggtcctgccct

SEQ ID NO: 5239308 - DNA, 25 bp, Homo sapien
taagtccatgcgtttatgtgcagcc

SEQ ID NO: 5239309 - DNA, 25 bp, Homo sapien
agagggttttgattaatgcttagcc

SEQ ID NO: 5239310 - DNA, 25 bp, Homo sapien
tattaacaatcactttgagagggtt

SEQ ID NO: 5239311 - DNA, 25 bp, Homo sapien
tgcttagccccatttacacacttag

SEQ ID NO: 5239312 - DNA, 25 bp, Homo sapien
tattgtcctatttataagtctagca

SEQ ID NO: 5239313 - DNA, 25 bp, Homo sapien
agcaacagccacattgccaccggat

SEQ ID NO: 5239314 - DNA, 25 bp, Homo sapien
cagccacattgccaccggatgtttt

SEQ ID NO: 5239315 - DNA, 25 bp, Homo sapien
cattgccaccggatgttttctgtgg

SEQ ID NO: 5239316 - DNA, 25 bp, Homo sapien
acattgccaccggatgttttctgtg

SEQ ID NO: 5239317 - DNA, 25 bp, Homo sapien
caggggcgcaactgtggcatctcac

SEQ ID NO: 5239318 - DNA, 25 bp, Homo sapien
aacattcggcttgatttttggaggt

SEQ ID NO: 5239319 - DNA, 25 bp, Homo sapien
aaatgtttctcaaaaacattcggct

SEQ ID NO: 5239320 - DNA, 25 bp, Homo sapien
gtttctcaaaaacattcggcttgat

SEQ ID NO: 5239321 - DNA, 25 bp, Homo sapien
aaaacattcggcttgatttttggag

SEQ ID NO: 5239322 - DNA, 25 bp, Homo sapien
tatgattgtaaatcccagggctgct

SEQ ID NO: 5239323 - DNA, 25 bp, Homo sapien
tcaattccaagaggttatgattgta

SEQ ID NO: 5239324 - DNA, 25 bp, Homo sapien
tagcttcaacgtgcagctcaggacg

SEQ ID NO: 5239325 - DNA, 25 bp, Homo sapien
tgctggcttagcttcaacgtgcagc

SEQ ID NO: 5239326 - DNA, 25 bp, Homo sapien
tcttcaggcttcaaactaatcacat

SEQ ID NO: 5239327 - DNA, 25 bp, Homo sapien
aggcttcaaactaatcacattgttc

SEQ ID NO: 5239328 - DNA, 25 bp, Homo sapien
tcaggcttcaaactaatcacattgt

SEQ ID NO: 5239329 - DNA, 25 bp, Homo sapien
ttcaggcttcaaactaatcacattg

SEQ ID NO: 5239330 - DNA, 25 bp, Homo sapien
tatcttggcacaggcaccttgagct

SEQ ID NO: 5239331 - DNA, 25 bp, Homo sapien
gcagtatatgctaatatcttggcac

SEQ ID NO: 5239332 - DNA, 25 bp, Homo sapien
aaaacagatggagcatgccagcggt

SEQ ID NO: 5239333 - DNA, 25 bp, Homo sapien
gcatgccagcggtgtctttgcctgg

SEQ ID NO: 5239334 - DNA, 25 bp, Homo sapien
ctcttttccccagcggttcttgctt

SEQ ID NO: 5239335 - DNA, 25 bp, Homo sapien
tttccccagcggttcttgcttccca

SEQ ID NO: 5239336 - DNA, 25 bp, Homo sapien
ttccccagcggttcttgcttcccac

SEQ ID NO: 5239337 - DNA, 25 bp, Homo sapien
tcttttccccagcggttcttgcttc

SEQ ID NO: 5239338 - DNA, 25 bp, Homo sapien
gggatgggcaacttcaaattgatat

SEQ ID NO: 5239339 - DNA, 25 bp, Homo sapien
tagtgggatgggcaacttcaaattg

SEQ ID NO: 5239340 - DNA, 25 bp, Homo sapien
tgggcaacttcaaattgatatcaac

SEQ ID NO: 5239341 - DNA, 25 bp, Homo sapien
gcaacttcaaattgatatcaacttc

SEQ ID NO: 5239342 - DNA, 25 bp, Homo sapien
cccgaggaagcagaggccgagggat

SEQ ID NO: 5239343 - DNA, 25 bp, Homo sapien
tccatcttttggaagtggattttct

SEQ ID NO: 5239344 - DNA, 25 bp, Homo sapien
agggatgtggtcatttttctctgcc

SEQ ID NO: 5239345 - DNA, 25 bp, Homo sapien
cagaggccgagggatgtggtcattt

SEQ ID NO: 5239346 - DNA, 25 bp, Homo sapien
tccaggcatgcagagacatgcctca

SEQ ID NO: 5239347 - DNA, 25 bp, Homo sapien
cagggtggattaccaagaagttcca

SEQ ID NO: 5239348 - DNA, 25 bp, Homo sapien
ttaccaagaagttccaggcatgcag

SEQ ID NO: 5239349 - DNA, 25 bp, Homo sapien
agaagttccaggcatgcagagacat

SEQ ID NO: 5239350 - DNA, 25 bp, Homo sapien
tgaggctatcaaacacttggtgacg

SEQ ID NO: 5239351 - DNA, 25 bp, Homo sapien
gaattgatcgggaatcagccaaccc

SEQ ID NO: 5239352 - DNA, 25 bp, Homo sapien
cccaggccaatggtgatcttgtcaa

SEQ ID NO: 5239353 - DNA, 25 bp, Homo sapien
cacacttgtgattcagaggtcccca

SEQ ID NO: 5239354 - DNA, 25 bp, Homo sapien
aagtgaggctgagtcaagcactcgg

SEQ ID NO: 5239355 - DNA, 25 bp, Homo sapien
gccgtaacctcatctagttatgttg

SEQ ID NO: 5239356 - DNA, 25 bp, Homo sapien
gatttagtgcctgccgtaacctcat

SEQ ID NO: 5239357 - DNA, 25 bp, Homo sapien
ggggtccttgtcacatagccaggag

SEQ ID NO: 5239358 - DNA, 25 bp, Homo sapien
tggaaaccttggcatgtccctggag

SEQ ID NO: 5239359 - DNA, 25 bp, Homo sapien
ccagcaaagactggcctcctggaaa

SEQ ID NO: 5239360 - DNA, 25 bp, Homo sapien
aaaagtggtcactgagaaatttcca

SEQ ID NO: 5239361 - DNA, 25 bp, Homo sapien
ggctgctgactgcaccgtgtgccga

SEQ ID NO: 5239362 - DNA, 25 bp, Homo sapien
gatttctgcccggtctagtggcaaa

SEQ ID NO: 5239363 - DNA, 25 bp, Homo sapien
catgtatccatccaacaggaaggca

SEQ ID NO: 5239364 - DNA, 25 bp, Homo sapien
tgagctgaatcaacaacagtggaag

SEQ ID NO: 5239365 - DNA, 25 bp, Homo sapien
aatcataagacaggaagatgggcac

SEQ ID NO: 5239366 - DNA, 25 bp, Homo sapien
caccaggaaccaaccgtcagctgat

SEQ ID NO: 5239367 - DNA, 25 bp, Homo sapien
gcctgaagtctgatcagcttggttc

SEQ ID NO: 5239368 - DNA, 25 bp, Homo sapien
taatttcacgataatcatctggaag

SEQ ID NO: 5239369 - DNA, 25 bp, Homo sapien
gaaggctgaaggatacctgaataat

SEQ ID NO: 5239370 - DNA, 25 bp, Homo sapien
ttttgttctgaatatcacccatttg

SEQ ID NO: 5239371 - DNA, 25 bp, Homo sapien
gttttgttctgaatatcacccattt

SEQ ID NO: 5239372 - DNA, 25 bp, Homo sapien
gctgccagcattggacgtcagcctg

SEQ ID NO: 5239373 - DNA, 25 bp, Homo sapien
ctgccagcattggacgtcagcctgg

SEQ ID NO: 5239374 - DNA, 25 bp, Homo sapien
tacggctctccttccacacccatga

SEQ ID NO: 5239375 - DNA, 25 bp, Homo sapien
ctacggctctccttccacacccatg

SEQ ID NO: 5239376 - DNA, 25 bp, Homo sapien
acggctctccttccacacccatgac

SEQ ID NO: 5239377 - DNA, 25 bp, Homo sapien
ggctctccttccacacccatgaccc

SEQ ID NO: 5239378 - DNA, 25 bp, Homo sapien
ctaagaaactcgctccataacactt

SEQ ID NO: 5239379 - DNA, 25 bp, Homo sapien
taacacttgaagcaaccggtttctg

SEQ ID NO: 5239380 - DNA, 25 bp, Homo sapien
aagaaactcgctccataacacttga

SEQ ID NO: 5239381 - DNA, 25 bp, Homo sapien
cacttgaagcaaccggtttctgccc

SEQ ID NO: 5239382 - DNA, 25 bp, Homo sapien
tattgaagacccctttgctgttccc

SEQ ID NO: 5239383 - DNA, 25 bp, Homo sapien
tccagctaatgctattgaagacccc

SEQ ID NO: 5239384 - DNA, 25 bp, Homo sapien
gaaacccctccagctaatgctattg

SEQ ID NO: 5239385 - DNA, 25 bp, Homo sapien
aatgctattgaagacccctttgctg

SEQ ID NO: 5239386 - DNA, 25 bp, Homo sapien
gaccccacaaggcattgccaatgct

SEQ ID NO: 5239387 - DNA, 25 bp, Homo sapien
tcagcactttgtgtactcttccaag

SEQ ID NO: 5239388 - DNA, 25 bp, Homo sapien
ctttgtgtactcttccaagcccaca

SEQ ID NO: 5239389 - DNA, 25 bp, Homo sapien
tgtcagcactttgtgtactcttcca

SEQ ID NO: 5239390 - DNA, 25 bp, Homo sapien
tttccgaggcatgagcttcccaagg

SEQ ID NO: 5239391 - DNA, 25 bp, Homo sapien
ctcttgtcccatttggacctggtaa

SEQ ID NO: 5239392 - DNA, 25 bp, Homo sapien
ggttctgggcaatctacttcctgac

SEQ ID NO: 5239393 - DNA, 25 bp, Homo sapien
tgggtcccactagcttgcctcttgg

SEQ ID NO: 5239394 - DNA, 25 bp, Homo sapien
ccaaaagcaactcaaatccgaactc

SEQ ID NO: 5239395 - DNA, 25 bp, Homo sapien
tccaaaagcaactcaaatccgaact

SEQ ID NO: 5239396 - DNA, 25 bp, Homo sapien
ttccaaaagcaactcaaatccgaac

SEQ ID NO: 5239397 - DNA, 25 bp, Homo sapien
atgcgttatgctgagtgagtaaatc

SEQ ID NO: 5239398 - DNA, 25 bp, Homo sapien
cctcaaatgcgttatgctgagtgag

SEQ ID NO: 5239399 - DNA, 25 bp, Homo sapien
tgaacctcaaatgcgttatgctgag

SEQ ID NO: 5239400 - DNA, 25 bp, Homo sapien
caaatgcgttatgctgagtgagtaa

SEQ ID NO: 5239401 - DNA, 25 bp, Homo sapien
acagagaataccccaaatccaccgc

SEQ ID NO: 5239402 - DNA, 25 bp, Homo sapien
agagaataccccaaatccaccgcag

SEQ ID NO: 5239403 - DNA, 25 bp, Homo sapien
gagaataccccaaatccaccgcagt

SEQ ID NO: 5239404 - DNA, 25 bp, Homo sapien
gaataccccaaatccaccgcagtct

SEQ ID NO: 5239405 - DNA, 25 bp, Homo sapien
tatcccctgcacactgtgattgtgc

SEQ ID NO: 5239406 - DNA, 25 bp, Homo sapien
atgcactaccttatcccctgcacac

SEQ ID NO: 5239407 - DNA, 25 bp, Homo sapien
atcccctgcacactgtgattgtgcc

SEQ ID NO: 5239408 - DNA, 25 bp, Homo sapien
aatgtcatggtcatccagctgtccc

SEQ ID NO: 5239409 - DNA, 25 bp, Homo sapien
tcacgagcactactggaggtccaat

SEQ ID NO: 5239410 - DNA, 25 bp, Homo sapien
tttccaagatgcatcgcttcacgag

SEQ ID NO: 5239411 - DNA, 25 bp, Homo sapien
tactggaggtccaatgtcatggtca

SEQ ID NO: 5239412 - DNA, 25 bp, Homo sapien
tgtggactactggtaagctgctgga

SEQ ID NO: 5239413 - DNA, 25 bp, Homo sapien
tttcattggtactaagaggagcagg

SEQ ID NO: 5239414 - DNA, 25 bp, Homo sapien
caagctaccaatggtttaacaacca

SEQ ID NO: 5239415 - DNA, 25 bp, Homo sapien
caagtttgtcgctattaaaacgagg

SEQ ID NO: 5239416 - DNA, 25 bp, Homo sapien
ggcagcatccccgtcaggagtccgg

SEQ ID NO: 5239417 - DNA, 25 bp, Homo sapien
ggagtccggcaatctcctcacaaca

SEQ ID NO: 5239418 - DNA, 25 bp, Homo sapien
atccccgtcaggagtccggcaatct

SEQ ID NO: 5239419 - DNA, 25 bp, Homo sapien
acactctgacccattggttccagaa

SEQ ID NO: 5239420 - DNA, 25 bp, Homo sapien
gcagctcctgctggtatcggtgcag

SEQ ID NO: 5239421 - DNA, 25 bp, Homo sapien
ggtatcggtgcagctgtttcttttc

SEQ ID NO: 5239422 - DNA, 25 bp, Homo sapien
catgcctaaaatctgtagctgcagc

SEQ ID NO: 5239423 - DNA, 25 bp, Homo sapien
tcacccaactccatgcaggtgcatg

SEQ ID NO: 5239424 - DNA, 25 bp, Homo sapien
gacccagttgatcgaggccagtttt

SEQ ID NO: 5239425 - DNA, 25 bp, Homo sapien
gacagcctagaactgagcctacaga

SEQ ID NO: 5239426 - DNA, 25 bp, Homo sapien
ggctctgtggtagttgctgacccag

SEQ ID NO: 5239427 - DNA, 25 bp, Homo sapien
ttttctcctatccagggaccagaga

SEQ ID NO: 5239428 - DNA, 25 bp, Homo sapien
tatggcaaacaattatgtccacttg

SEQ ID NO: 5239429 - DNA, 25 bp, Homo sapien
taatccagcgtttcttgcattgcga

SEQ ID NO: 5239430 - DNA, 25 bp, Homo sapien
tgctgagtggtctgtggctcccttg

SEQ ID NO: 5239431 - DNA, 25 bp, Homo sapien
cccttgtctgaacagagacgcataa

SEQ ID NO: 5239432 - DNA, 25 bp, Homo sapien
catgcattccaaaatctccacatac

SEQ ID NO: 5239433 - DNA, 25 bp, Homo sapien
tgagatttcccatgcattccaaaat

SEQ ID NO: 5239434 - DNA, 25 bp, Homo sapien
tcattccaaatgagatttcccatgc

SEQ ID NO: 5239435 - DNA, 25 bp, Homo sapien
caaatgagatttcccatgcattcca

SEQ ID NO: 5239436 - DNA, 25 bp, Homo sapien
ttcattatcactatcactagattct

SEQ ID NO: 5239437 - DNA, 25 bp, Homo sapien
aataatcacgtcttcctgctcaaac

SEQ ID NO: 5239438 - DNA, 25 bp, Homo sapien
taaatattgcatctcgtaccacacc

SEQ ID NO: 5239439 - DNA, 25 bp, Homo sapien
tatcactatcactagattctttcta

SEQ ID NO: 5239440 - DNA, 25 bp, Homo sapien
gctaccccagaatttgacaagtcaa

SEQ ID NO: 5239441 - DNA, 25 bp, Homo sapien
tggaaactagttcagaggctcaaaa

SEQ ID NO: 5239442 - DNA, 25 bp, Homo sapien
aaagattacctcaaagtcactgggc

SEQ ID NO: 5239443 - DNA, 25 bp, Homo sapien
tattcagtgttacgggcatatgcca

SEQ ID NO: 5239444 - DNA, 25 bp, Homo sapien
ggagatagctaggaacaaagaagaa

SEQ ID NO: 5239445 - DNA, 25 bp, Homo sapien
atcaatatcagccatatggcaggtg

SEQ ID NO: 5239446 - DNA, 25 bp, Homo sapien
atatcagccatatggcaggtgccac

SEQ ID NO: 5239447 - DNA, 25 bp, Homo sapien
agacatctggagatagctaggaaca

SEQ ID NO: 5239448 - DNA, 25 bp, Homo sapien
tgaagagggtacctgaagccaatca

SEQ ID NO: 5239449 - DNA, 25 bp, Homo sapien
gagggtacctgaagccaatcacttc

SEQ ID NO: 5239450 - DNA, 25 bp, Homo sapien
ggtacctgaagccaatcacttccat

SEQ ID NO: 5239451 - DNA, 25 bp, Homo sapien
gctttgaagagggtacctgaagcca

SEQ ID NO: 5239452 - DNA, 25 bp, Homo sapien
ggcatttatcctggctatcagagac

SEQ ID NO: 5239453 - DNA, 25 bp, Homo sapien
aattgggcatttatcctggctatca

SEQ ID NO: 5239454 - DNA, 25 bp, Homo sapien
tccaaattgggcatttatcctggct

SEQ ID NO: 5239455 - DNA, 25 bp, Homo sapien
tatcctggctatcagagacactgcc

SEQ ID NO: 5239456 - DNA, 25 bp, Homo sapien
ataatagagtttcagcagcaggttc

SEQ ID NO: 5239457 - DNA, 25 bp, Homo sapien
cagcaggttctccaagacccaccat

SEQ ID NO: 5239458 - DNA, 25 bp, Homo sapien
ttgaataatagagtttcagcagcag

SEQ ID NO: 5239459 - DNA, 25 bp, Homo sapien
gaataatagagtttcagcagcaggt

SEQ ID NO: 5239460 - DNA, 25 bp, Homo sapien
tatcaggtaggaagtagggagacct

SEQ ID NO: 5239461 - DNA, 25 bp, Homo sapien
taggaagtagggagacctctgcttc

SEQ ID NO: 5239462 - DNA, 25 bp, Homo sapien
atgacgctcaaggacccaacctgca

SEQ ID NO: 5239463 - DNA, 25 bp, Homo sapien
aacgcactgcggtatcaggtaggaa

SEQ ID NO: 5239464 - DNA, 25 bp, Homo sapien
tcctaaatattgacgctggtgctgt

SEQ ID NO: 5239465 - DNA, 25 bp, Homo sapien
ttgctgtgaatattgctcctaaata

SEQ ID NO: 5239466 - DNA, 25 bp, Homo sapien
taaatttcgacagtggatgccaaga

SEQ ID NO: 5239467 - DNA, 25 bp, Homo sapien
agtggatgccaagaaaggtagactg

SEQ ID NO: 5239468 - DNA, 25 bp, Homo sapien
gttccccagatatacttgtcagagt

SEQ ID NO: 5239469 - DNA, 25 bp, Homo sapien
aatgtatggctacctccactgctca

SEQ ID NO: 5239470 - DNA, 25 bp, Homo sapien
tatcttcaggtcaattgtgggcacc

SEQ ID NO: 5239471 - DNA, 25 bp, Homo sapien
tgctgtgcatataacccacacctgg

SEQ ID NO: 5239472 - DNA, 25 bp, Homo sapien
aaccaagacaagagttagatcaagc

SEQ ID NO: 5239473 - DNA, 25 bp, Homo sapien
aaattgaaaccaagacaagagttag

SEQ ID NO: 5239474 - DNA, 25 bp, Homo sapien
cagaaagggcaggaatgttgaaaag

SEQ ID NO: 5239475 - DNA, 25 bp, Homo sapien
gacaagagttagatcaagctcagga

SEQ ID NO: 5239476 - DNA, 25 bp, Homo sapien
ttgagatcgatagagccttctttca

SEQ ID NO: 5239477 - DNA, 25 bp, Homo sapien
gccagggcacgaggggtcgggtgag

SEQ ID NO: 5239478 - DNA, 25 bp, Homo sapien
tcgggtgagttttgagatcgataga

SEQ ID NO: 5239479 - DNA, 25 bp, Homo sapien
gagttttgagatcgatagagccttc

SEQ ID NO: 5239480 - DNA, 25 bp, Homo sapien
tctgcataactcgtctacaaacacc

SEQ ID NO: 5239481 - DNA, 25 bp, Homo sapien
gtctgcataactcgtctacaaacac

SEQ ID NO: 5239482 - DNA, 25 bp, Homo sapien
cagtctgcataactcgtctacaaac

SEQ ID NO: 5239483 - DNA, 25 bp, Homo sapien
ctgcataactcgtctacaaacaccc

SEQ ID NO: 5239484 - DNA, 25 bp, Homo sapien
gctcttggagaagacccgccgggta

SEQ ID NO: 5239485 - DNA, 25 bp, Homo sapien
cgccgggtacgcagaacattcctgg

SEQ ID NO: 5239486 - DNA, 25 bp, Homo sapien
ggcctgcccgcagccactgagagtg

SEQ ID NO: 5239487 - DNA, 25 bp, Homo sapien
acattcctggaacaccggcctgccc

SEQ ID NO: 5239488 - DNA, 25 bp, Homo sapien
tacaacggggcatctcttgtcagac

SEQ ID NO: 5239489 - DNA, 25 bp, Homo sapien
tgtctctcttttgatggcccaggca

SEQ ID NO: 5239490 - DNA, 25 bp, Homo sapien
gcagaggcaaatacaacggggcatc

SEQ ID NO: 5239491 - DNA, 25 bp, Homo sapien
agacagagctgactgcccttctgtc

SEQ ID NO: 5239492 - DNA, 25 bp, Homo sapien
ggtccctgcagaacatctgctatct

SEQ ID NO: 5239493 - DNA, 25 bp, Homo sapien
gaagagtaacagtccttcctcaaat

SEQ ID NO: 5239494 - DNA, 25 bp, Homo sapien
agagtaacagtccttcctcaaatga

SEQ ID NO: 5239495 - DNA, 25 bp, Homo sapien
tggcagtcaaaccagggaatgaaga

SEQ ID NO: 5239496 - DNA, 25 bp, Homo sapien
atgaagagtaacagtccttcctcaa

SEQ ID NO: 5239497 - DNA, 25 bp, Homo sapien
aaaagccaggggagtcagctgctgg

SEQ ID NO: 5239498 - DNA, 25 bp, Homo sapien
ctggttttgtagctgggttttctgg

SEQ ID NO: 5239499 - DNA, 25 bp, Homo sapien
ctctcattcaaggcctcctcggtgt

SEQ ID NO: 5239500 - DNA, 25 bp, Homo sapien
ctcattcaaggcctcctcggtgtct

SEQ ID NO: 5239501 - DNA, 25 bp, Homo sapien
ctgggtcccctactgtcaacctcat

SEQ ID NO: 5239502 - DNA, 25 bp, Homo sapien
attcaaggcctcctcggtgtctggg

SEQ ID NO: 5239503 - DNA, 25 bp, Homo sapien
caaagagagaggtccaagcagttag

SEQ ID NO: 5239504 - DNA, 25 bp, Homo sapien
gcccctgatacgcttttaatccaaa

SEQ ID NO: 5239505 - DNA, 25 bp, Homo sapien
gaggtccaagcagttagcccctgat

SEQ ID NO: 5239506 - DNA, 25 bp, Homo sapien
gcagttagcccctgatacgctttta

SEQ ID NO: 5239507 - DNA, 25 bp, Homo sapien
atgtcacatacacggagctgcagca

SEQ ID NO: 5239508 - DNA, 25 bp, Homo sapien
attgtcaagggagagatcaggtcga

SEQ ID NO: 5239509 - DNA, 25 bp, Homo sapien
tgctgaatgtcctcatgcttggatg

SEQ ID NO: 5239510 - DNA, 25 bp, Homo sapien
cttgaaaccatgaggggcactggtc

SEQ ID NO: 5239511 - DNA, 25 bp, Homo sapien
actcctccatcaaagggcttctgtt

SEQ ID NO: 5239512 - DNA, 25 bp, Homo sapien
cactcctccatcaaagggcttctgt

SEQ ID NO: 5239513 - DNA, 25 bp, Homo sapien
atgggggagagtagccttggattac

SEQ ID NO: 5239514 - DNA, 25 bp, Homo sapien
cagaaagcagttgacacggccactt

SEQ ID NO: 5239515 - DNA, 25 bp, Homo sapien
tccagggagattcagggcccattct

SEQ ID NO: 5239516 - DNA, 25 bp, Homo sapien
tgccccaccttgtcgggaagaatga

SEQ ID NO: 5239517 - DNA, 25 bp, Homo sapien
caaggagcaggtgtttcactccagg

SEQ ID NO: 5239518 - DNA, 25 bp, Homo sapien
gcttgggtagctccacaatctggcc

SEQ ID NO: 5239519 - DNA, 25 bp, Homo sapien
gcagattgggcataaggctcttcat

SEQ ID NO: 5239520 - DNA, 25 bp, Homo sapien
ggctcttcatgtgtgactgcctctg

SEQ ID NO: 5239521 - DNA, 25 bp, Homo sapien
tgggaaatacggttgaagcccagcc

SEQ ID NO: 5239522 - DNA, 25 bp, Homo sapien
tttgatgggcaattgttggcaaata

SEQ ID NO: 5239523 - DNA, 25 bp, Homo sapien
aaccacgtgtagtgaccacatccag

SEQ ID NO: 5239524 - DNA, 25 bp, Homo sapien
ccatccagctgtaaaccacgtgtag

SEQ ID NO: 5239525 - DNA, 25 bp, Homo sapien
tcctcccctaggatctattgcccag

SEQ ID NO: 5239526 - DNA, 25 bp, Homo sapien
gaggaaccaggatctaccaacacag

SEQ ID NO: 5239527 - DNA, 25 bp, Homo sapien
gagggctgcatccacaacagtagag

SEQ ID NO: 5239528 - DNA, 25 bp, Homo sapien
tggcaggttcggtcgtctggtgagg

SEQ ID NO: 5239529 - DNA, 25 bp, Homo sapien
gggctgcatccacaacagtagagga

SEQ ID NO: 5239530 - DNA, 25 bp, Homo sapien
gcactggcaggttcggtcgtctggt

SEQ ID NO: 5239531 - DNA, 25 bp, Homo sapien
ctcagaattgaccaaggagccagag

SEQ ID NO: 5239532 - DNA, 25 bp, Homo sapien
ttctggcagccagtatcttatccac

SEQ ID NO: 5239533 - DNA, 25 bp, Homo sapien
aattgaccaaggagccagagctacc

SEQ ID NO: 5239534 - DNA, 25 bp, Homo sapien
agtatcttatccaccagccacactg

SEQ ID NO: 5239535 - DNA, 25 bp, Homo sapien
cagtgccctgaaagagtgtggtgcc

SEQ ID NO: 5239536 - DNA, 25 bp, Homo sapien
tgaagaatgagtcagcagtgccctg

SEQ ID NO: 5239537 - DNA, 25 bp, Homo sapien
ggctgaaatcggctggcttaccact

SEQ ID NO: 5239538 - DNA, 25 bp, Homo sapien
tcttggaatgaagccggttacaacc

SEQ ID NO: 5239539 - DNA, 25 bp, Homo sapien
cctatgttagtcacggccccatttt

SEQ ID NO: 5239540 - DNA, 25 bp, Homo sapien
tcatccagatccagtttgagggaca

SEQ ID NO: 5239541 - DNA, 25 bp, Homo sapien
aaattcgtcccattccctatgttag

SEQ ID NO: 5239542 - DNA, 25 bp, Homo sapien
tgagccttggttgtgtcatccagat

SEQ ID NO: 5239543 - DNA, 25 bp, Homo sapien
tgccttctccatcatcaaagggtgc

SEQ ID NO: 5239544 - DNA, 25 bp, Homo sapien
ctgccttctccatcatcaaagggtg

SEQ ID NO: 5239545 - DNA, 25 bp, Homo sapien
tgggccagtgcgtggagtgacaaca

SEQ ID NO: 5239546 - DNA, 25 bp, Homo sapien
ggtccagacaagaccctggttcact

SEQ ID NO: 5239547 - DNA, 25 bp, Homo sapien
ctcatggcttcccttactaaggcag

SEQ ID NO: 5239548 - DNA, 25 bp, Homo sapien
ctaaggcagacactcaaatgatttg

SEQ ID NO: 5239549 - DNA, 25 bp, Homo sapien
tgggattttgtcagacgctccagct

SEQ ID NO: 5239550 - DNA, 25 bp, Homo sapien
ctgggattttgtcagacgctccagc

SEQ ID NO: 5239551 - DNA, 25 bp, Homo sapien
ctttttgcacagccagttctcccca

SEQ ID NO: 5239552 - DNA, 25 bp, Homo sapien
agttctccccagtctgtggcgcccc

SEQ ID NO: 5239553 - DNA, 25 bp, Homo sapien
gccagttctccccagtctgtggcgc

SEQ ID NO: 5239554 - DNA, 25 bp, Homo sapien
tttttgcacagccagttctccccag

SEQ ID NO: 5239555 - DNA, 25 bp, Homo sapien
tccaccgtgttcagaagcttggctg

SEQ ID NO: 5239556 - DNA, 25 bp, Homo sapien
tccccttccaccgtgttcagaagct

SEQ ID NO: 5239557 - DNA, 25 bp, Homo sapien
ccttccaccgtgttcagaagcttgg

SEQ ID NO: 5239558 - DNA, 25 bp, Homo sapien
ttccaccgtgttcagaagcttggct

SEQ ID NO: 5239559 - DNA, 25 bp, Homo sapien
tccagatcaaactccaaccaagcgt

SEQ ID NO: 5239560 - DNA, 25 bp, Homo sapien
gaaactgatggccacttgactctga

SEQ ID NO: 5239561 - DNA, 25 bp, Homo sapien
ctctcccgctgaggtgaaacttcta

SEQ ID NO: 5239562 - DNA, 25 bp, Homo sapien
gaaacttctagatgcttctccagat

SEQ ID NO: 5239563 - DNA, 25 bp, Homo sapien
aagttagtgtcaatcttagaatgcg

SEQ ID NO: 5239564 - DNA, 25 bp, Homo sapien
tcttagaatgcgtttgaacatcaag

SEQ ID NO: 5239565 - DNA, 25 bp, Homo sapien
caagtatcagaagttagtgtcaatc

SEQ ID NO: 5239566 - DNA, 25 bp, Homo sapien
aagttgagcatacactgtacaagta

SEQ ID NO: 5239567 - DNA, 25 bp, Homo sapien
aaagctactttggtgcaggcaagct

SEQ ID NO: 5239568 - DNA, 25 bp, Homo sapien
agctactttggtgcaggcaagctct

SEQ ID NO: 5239569 - DNA, 25 bp, Homo sapien
cggagagtgcggaaggcaggcccca

SEQ ID NO: 5239570 - DNA, 25 bp, Homo sapien
ggcaagctctgatagtatcagctca

SEQ ID NO: 5239571 - DNA, 25 bp, Homo sapien
ccaattaggctatagacgtcttcag

SEQ ID NO: 5239572 - DNA, 25 bp, Homo sapien
atccaagcatccaattaggctatag

SEQ ID NO: 5239573 - DNA, 25 bp, Homo sapien
tgtggggagcagtactcaagttccc

SEQ ID NO: 5239574 - DNA, 25 bp, Homo sapien
ggctatagacgtcttcagaatctgc

SEQ ID NO: 5239575 - DNA, 25 bp, Homo sapien
cgagcgtcttgtaatagcataatca

SEQ ID NO: 5239576 - DNA, 25 bp, Homo sapien
tgcagttttagttaccagaggtcaa

SEQ ID NO: 5239577 - DNA, 25 bp, Homo sapien
cttctgcagttttagttaccagagg

SEQ ID NO: 5239578 - DNA, 25 bp, Homo sapien
gtctgatgttagcaatcgagcgtct

SEQ ID NO: 5239579 - DNA, 25 bp, Homo sapien
tcattcagacaacatcaaggccaga

SEQ ID NO: 5239580 - DNA, 25 bp, Homo sapien
cagagatgtcctagcaggattctgg

SEQ ID NO: 5239581 - DNA, 25 bp, Homo sapien
gccattcccagtatgccatccagcc

SEQ ID NO: 5239582 - DNA, 25 bp, Homo sapien
agacaacatcaaggccagaaatgct

SEQ ID NO: 5239583 - DNA, 25 bp, Homo sapien
cagtaaggagtctgttctgaaagac

SEQ ID NO: 5239584 - DNA, 25 bp, Homo sapien
caatagtactctcagcaagggttag

SEQ ID NO: 5239585 - DNA, 25 bp, Homo sapien
ggatacattgagttgcctaccccac

SEQ ID NO: 5239586 - DNA, 25 bp, Homo sapien
tgtctacatgactcagagaaaggca

SEQ ID NO: 5239587 - DNA, 25 bp, Homo sapien
gaccactttcccatgtcatctcgct

SEQ ID NO: 5239588 - DNA, 25 bp, Homo sapien
ctttcccatgtcatctcgcttttac

SEQ ID NO: 5239589 - DNA, 25 bp, Homo sapien
ccactttcccatgtcatctcgcttt

SEQ ID NO: 5239590 - DNA, 25 bp, Homo sapien
aaagaccactttcccatgtcatctc

SEQ ID NO: 5239591 - DNA, 25 bp, Homo sapien
gatgctattgcattcaggattcttc

SEQ ID NO: 5239592 - DNA, 25 bp, Homo sapien
catcagacagatgggtactttccct

SEQ ID NO: 5239593 - DNA, 25 bp, Homo sapien
aactgcttcccaggagtataaaaag

SEQ ID NO: 5239594 - DNA, 25 bp, Homo sapien
gaactatagcagctgcatcagacag

SEQ ID NO: 5239595 - DNA, 25 bp, Homo sapien
ttgtgcttcagtgctttcgaacctg

SEQ ID NO: 5239596 - DNA, 25 bp, Homo sapien
actcttttgtgcttcagtgctttcg

SEQ ID NO: 5239597 - DNA, 25 bp, Homo sapien
tgtgcttcagtgctttcgaacctgt

SEQ ID NO: 5239598 - DNA, 25 bp, Homo sapien
cttttgtgcttcagtgctttcgaac

SEQ ID NO: 5239599 - DNA, 25 bp, Homo sapien
tcgagaaattctccgtggaccctca

SEQ ID NO: 5239600 - DNA, 25 bp, Homo sapien
aatgacaatagcatgcaatttcagc

SEQ ID NO: 5239601 - DNA, 25 bp, Homo sapien
caatcaagttcggaagaatctgctt

SEQ ID NO: 5239602 - DNA, 25 bp, Homo sapien
agtgctttctaggaggaattggcaa

SEQ ID NO: 5239603 - DNA, 25 bp, Homo sapien
ccctgactctgttaaggaagtacat

SEQ ID NO: 5239604 - DNA, 25 bp, Homo sapien
tgtgcccgcccctgactctgttaag

SEQ ID NO: 5239605 - DNA, 25 bp, Homo sapien
acatatctgcgttctctgaaagatg

SEQ ID NO: 5239606 - DNA, 25 bp, Homo sapien
aggaagtacatatctgcgttctctg

SEQ ID NO: 5239607 - DNA, 25 bp, Homo sapien
cattgacccctaaatacattgtggc

SEQ ID NO: 5239608 - DNA, 25 bp, Homo sapien
acccctaaatacattgtggcttctg

SEQ ID NO: 5239609 - DNA, 25 bp, Homo sapien
gtccattgacccctaaatacattgt

SEQ ID NO: 5239610 - DNA, 25 bp, Homo sapien
ttgacccctaaatacattgtggctt

SEQ ID NO: 5239611 - DNA, 25 bp, Homo sapien
gagacatgttaaactactcttcagc

SEQ ID NO: 5239612 - DNA, 25 bp, Homo sapien
tcttcagctcaaacatcttacttgt

SEQ ID NO: 5239613 - DNA, 25 bp, Homo sapien
actactcttcagctcaaacatctta

SEQ ID NO: 5239614 - DNA, 25 bp, Homo sapien
aggtgagacatgttaaactactctt

SEQ ID NO: 5239615 - DNA, 25 bp, Homo sapien
cctttggttaaggatgcctgcactt

SEQ ID NO: 5239616 - DNA, 25 bp, Homo sapien
gcagtggtcaccctttccagataaa

SEQ ID NO: 5239617 - DNA, 25 bp, Homo sapien
tcacacgacggaattggcagtggtc

SEQ ID NO: 5239618 - DNA, 25 bp, Homo sapien
gagacactagatcctgtcacacgac

SEQ ID NO: 5239619 - DNA, 25 bp, Homo sapien
aactagataatgttagccacctggg

SEQ ID NO: 5239620 - DNA, 25 bp, Homo sapien
gaaggtcccaatcctccctatctga

SEQ ID NO: 5239621 - DNA, 25 bp, Homo sapien
gcaaatttatagaaggtcccaatcc

SEQ ID NO: 5239622 - DNA, 25 bp, Homo sapien
tgtcctattactaaattctaactag

SEQ ID NO: 5239623 - DNA, 25 bp, Homo sapien
agacacagataggagggtacccaga

SEQ ID NO: 5239624 - DNA, 25 bp, Homo sapien
attgcattcacaagatggggttggg

SEQ ID NO: 5239625 - DNA, 25 bp, Homo sapien
gggtacatctgtactcatttgtaaa

SEQ ID NO: 5239626 - DNA, 25 bp, Homo sapien
aggagggggaattgcattcacaaga

SEQ ID NO: 5239627 - DNA, 25 bp, Homo sapien
agcaatgctccttttcccttgacca

SEQ ID NO: 5239628 - DNA, 25 bp, Homo sapien
gcccagactctgcttcggccaagat

SEQ ID NO: 5239629 - DNA, 25 bp, Homo sapien
cctgcctctccgatgatgtgttcag

SEQ ID NO: 5239630 - DNA, 25 bp, Homo sapien
gatgtgttcagcttgaagccagttc

SEQ ID NO: 5239631 - DNA, 25 bp, Homo sapien
acagcctggtatgcccagactctgc

SEQ ID NO: 5239632 - DNA, 25 bp, Homo sapien
gttactgtctttaaaggtagctctc

SEQ ID NO: 5239633 - DNA, 25 bp, Homo sapien
aatctctccccttagagtttacatc

SEQ ID NO: 5239634 - DNA, 25 bp, Homo sapien
aagtcatctccctcgtatctgttac

SEQ ID NO: 5239635 - DNA, 25 bp, Homo sapien
aacatcctccggtggttgggcaaag

SEQ ID NO: 5239636 - DNA, 25 bp, Homo sapien
catctgcacatcattactcgaagct

SEQ ID NO: 5239637 - DNA, 25 bp, Homo sapien
catcaaatggtacaaactgagagac

SEQ ID NO: 5239638 - DNA, 25 bp, Homo sapien
caaagcccctaatgatagcaagtca

SEQ ID NO: 5239639 - DNA, 25 bp, Homo sapien
atttgcctcattgccgagcagtggc

SEQ ID NO: 5239640 - DNA, 25 bp, Homo sapien
aaaggaagctggaaggcgacgccac

SEQ ID NO: 5239641 - DNA, 25 bp, Homo sapien
taagtggctaccttgagctgcaggg

SEQ ID NO: 5239642 - DNA, 25 bp, Homo sapien
tagagacagcaagtagtataagtgg

SEQ ID NO: 5239643 - DNA, 25 bp, Homo sapien
gacgccacactactggcagtggaca

SEQ ID NO: 5239644 - DNA, 25 bp, Homo sapien
ctggctgaccttgggtcatgtgccc

SEQ ID NO: 5239645 - DNA, 25 bp, Homo sapien
cacagatgtaaatttccgggacagg

SEQ ID NO: 5239646 - DNA, 25 bp, Homo sapien
caggaaaatcgctgtgctctcactg

SEQ ID NO: 5239647 - DNA, 25 bp, Homo sapien
tccagaggagctgtgtggctaatta

SEQ ID NO: 5239648 - DNA, 25 bp, Homo sapien
tatctctttgtgcagtgacagcagg

SEQ ID NO: 5239649 - DNA, 25 bp, Homo sapien
aacatgaaagatagtgtatctctgc

SEQ ID NO: 5239650 - DNA, 25 bp, Homo sapien
gtatctctgccttaactcatgtggg

SEQ ID NO: 5239651 - DNA, 25 bp, Homo sapien
aactgtcatccggtctttcttatct

SEQ ID NO: 5239652 - DNA, 25 bp, Homo sapien
ttttactgcagagtggtagtacaca

SEQ ID NO: 5239653 - DNA, 25 bp, Homo sapien
ccatttcaagtgtaacctcagtggg

SEQ ID NO: 5239654 - DNA, 25 bp, Homo sapien
aatattttggtaggccacagagtaa

SEQ ID NO: 5239655 - DNA, 25 bp, Homo sapien
caatgtggcaattaagatgttcagc

SEQ ID NO: 5239656 - DNA, 25 bp, Homo sapien
acaaagcctgttgttagcctcctag

SEQ ID NO: 5239657 - DNA, 25 bp, Homo sapien
gacgtacatcccacaaagcctgttg

SEQ ID NO: 5239658 - DNA, 25 bp, Homo sapien
tgttagcctcctagctacatccctg

SEQ ID NO: 5239659 - DNA, 25 bp, Homo sapien
ccaatgagacgtacatcccacaaag

SEQ ID NO: 5239660 - DNA, 25 bp, Homo sapien
gaaatgcgattggaatggagtcatc

SEQ ID NO: 5239661 - DNA, 25 bp, Homo sapien
gcatcaggatcctcattaaagggaa

SEQ ID NO: 5239662 - DNA, 25 bp, Homo sapien
tcaagtgcagccattaccccggatg

SEQ ID NO: 5239663 - DNA, 25 bp, Homo sapien
gcagcatggcacttgcagaggaatg

SEQ ID NO: 5239664 - DNA, 25 bp, Homo sapien
tgaagctgcgggacccaacctgcca

SEQ ID NO: 5239665 - DNA, 25 bp, Homo sapien
ctcttttttgcttcacaatgatctc

SEQ ID NO: 5239666 - DNA, 25 bp, Homo sapien
tcagaaagctcgcttcccttcttcc

SEQ ID NO: 5239667 - DNA, 25 bp, Homo sapien
ccccaagagatctcttctcctgaag

SEQ ID NO: 5239668 - DNA, 25 bp, Homo sapien
aatttgtaacacgtaactggagagc

SEQ ID NO: 5239669 - DNA, 25 bp, Homo sapien
cagtgaatcaatcaagacccagcca

SEQ ID NO: 5239670 - DNA, 25 bp, Homo sapien
acacgtaactggagagctaagaagc

SEQ ID NO: 5239671 - DNA, 25 bp, Homo sapien
gaatcaatcaagacccagccaggaa

SEQ ID NO: 5239672 - DNA, 25 bp, Homo sapien
ctggaacagttgacaacctatgctc

SEQ ID NO: 5239673 - DNA, 25 bp, Homo sapien
gttgacaacctatgctctgactgtc

SEQ ID NO: 5239674 - DNA, 25 bp, Homo sapien
tgaccttggttaatatctggaacag

SEQ ID NO: 5239675 - DNA, 25 bp, Homo sapien
tgactgtccaagtcttactccatac

SEQ ID NO: 5239676 - DNA, 25 bp, Homo sapien
tataagagctatcataaaacagggt

SEQ ID NO: 5239677 - DNA, 25 bp, Homo sapien
ctcactcattggcatataagagcta

SEQ ID NO: 5239678 - DNA, 25 bp, Homo sapien
cattggcatataagagctatcataa

SEQ ID NO: 5239679 - DNA, 25 bp, Homo sapien
aagagctatcataaaacagggtgtc

SEQ ID NO: 5239680 - DNA, 25 bp, Homo sapien
ccaaaaagatgagcacagtcaaagg

SEQ ID NO: 5239681 - DNA, 25 bp, Homo sapien
cagtcaaaggagttagagatcccag

SEQ ID NO: 5239682 - DNA, 25 bp, Homo sapien
acaactcgcccctcatatggattga

SEQ ID NO: 5239683 - DNA, 25 bp, Homo sapien
tatggattgatatcatggctgccac

SEQ ID NO: 5239684 - DNA, 25 bp, Homo sapien
cattctgcaaagctctaccactccc

SEQ ID NO: 5239685 - DNA, 25 bp, Homo sapien
acattctgcaaagctctaccactcc

SEQ ID NO: 5239686 - DNA, 25 bp, Homo sapien
gattccaggctttccagtgtccgtg

SEQ ID NO: 5239687 - DNA, 25 bp, Homo sapien
gaatagagagcaaatcgttcacaag

SEQ ID NO: 5239688 - DNA, 25 bp, Homo sapien
gctgggttttccatactgggaatgg

SEQ ID NO: 5239689 - DNA, 25 bp, Homo sapien
ggaatggtcacagatgtacccagca

SEQ ID NO: 5239690 - DNA, 25 bp, Homo sapien
gatagtttaccctgggcttcaggag

SEQ ID NO: 5239691 - DNA, 25 bp, Homo sapien
tcgagagcttaggtactccccggga

SEQ ID NO: 5239692 - DNA, 25 bp, Homo sapien
gaaattccccacagccgagaggata

SEQ ID NO: 5239693 - DNA, 25 bp, Homo sapien
tgctgagcaggtgcaaaatgccagc

SEQ ID NO: 5239694 - DNA, 25 bp, Homo sapien
gggccaccagagtctaaatggaata

SEQ ID NO: 5239695 - DNA, 25 bp, Homo sapien
tacatgccagtatttactagtactt

SEQ ID NO: 5239696 - DNA, 25 bp, Homo sapien
gccagtatttactagtacttgtgca

SEQ ID NO: 5239697 - DNA, 25 bp, Homo sapien
accagagtctaaatggaatattttc

SEQ ID NO: 5239698 - DNA, 25 bp, Homo sapien
gagtcttgctgtcaggcaggagtac

SEQ ID NO: 5239699 - DNA, 25 bp, Homo sapien
ccacgttagtcaggctggtcttgga

SEQ ID NO: 5239700 - DNA, 25 bp, Homo sapien
agtggcatgatctcagctcactgca

SEQ ID NO: 5239701 - DNA, 25 bp, Homo sapien
acctctgcctcctgggttcaagcca

SEQ ID NO: 5239702 - DNA, 25 bp, Homo sapien
tattgggggccccaatttgccacca

SEQ ID NO: 5239703 - DNA, 25 bp, Homo sapien
cattcaaggaattggatcgacccat

SEQ ID NO: 5239704 - DNA, 25 bp, Homo sapien
gggccccaatttgccaccattcaag

SEQ ID NO: 5239705 - DNA, 25 bp, Homo sapien
gccaccattcaaggaattggatcga

SEQ ID NO: 5239706 - DNA, 25 bp, Homo sapien
cccaaggtaaaagcctctgcgagga

SEQ ID NO: 5239707 - DNA, 25 bp, Homo sapien
acagagcacgcagtttcccgcggtg

SEQ ID NO: 5239708 - DNA, 25 bp, Homo sapien
tagcatatctgcatcgggacactgg

SEQ ID NO: 5239709 - DNA, 25 bp, Homo sapien
cgcggtgctacagcggatgccagtt

SEQ ID NO: 5239710 - DNA, 25 bp, Homo sapien
ccaaacgagtggtggcttgcaacac

SEQ ID NO: 5239711 - DNA, 25 bp, Homo sapien
ggcgcagattcgcagctccagaact

SEQ ID NO: 5239712 - DNA, 25 bp, Homo sapien
aagcccacagatttcatggcgcaga

SEQ ID NO: 5239713 - DNA, 25 bp, Homo sapien
gatgacctccgtgagaaaggaagac

SEQ ID NO: 5239714 - DNA, 25 bp, Homo sapien
ttttcattgcaaccaagtctcgtat

SEQ ID NO: 5239715 - DNA, 25 bp, Homo sapien
tctcgtatttgtacagctttcactg

SEQ ID NO: 5239716 - DNA, 25 bp, Homo sapien
acagctttcactggtttataaggca

SEQ ID NO: 5239717 - DNA, 25 bp, Homo sapien
cattgcaaccaagtctcgtatttgt

SEQ ID NO: 5239718 - DNA, 25 bp, Homo sapien
ttggagttgagctttagttccaagc

SEQ ID NO: 5239719 - DNA, 25 bp, Homo sapien
tctttggagttgagctttagttcca

SEQ ID NO: 5239720 - DNA, 25 bp, Homo sapien
ttgctccacaatctttggagttgag

SEQ ID NO: 5239721 - DNA, 25 bp, Homo sapien
cacaatctttggagttgagctttag

SEQ ID NO: 5239722 - DNA, 25 bp, Homo sapien
gactgaaactttctgagtttcccca

SEQ ID NO: 5239723 - DNA, 25 bp, Homo sapien
tagtctagctctttttctgactgaa

SEQ ID NO: 5239724 - DNA, 25 bp, Homo sapien
tctgactgaaactttctgagtttcc

SEQ ID NO: 5239725 - DNA, 25 bp, Homo sapien
ttagtctagctctttttctgactga

SEQ ID NO: 5239726 - DNA, 25 bp, Homo sapien
ttcacagtggctatgtatttcacaa

SEQ ID NO: 5239727 - DNA, 25 bp, Homo sapien
gctggatggcaatttgtcaccttta

SEQ ID NO: 5239728 - DNA, 25 bp, Homo sapien
aaaccagaatgctggatggcaattt

SEQ ID NO: 5239729 - DNA, 25 bp, Homo sapien
gcacagtgcccataagttttcttaa

SEQ ID NO: 5239730 - DNA, 25 bp, Homo sapien
gaccaaaagccacaggaagctctgc

SEQ ID NO: 5239731 - DNA, 25 bp, Homo sapien
gacagaccaaaagccacaggaagct

SEQ ID NO: 5239732 - DNA, 25 bp, Homo sapien
ccaggacagaccaaaagccacagga

SEQ ID NO: 5239733 - DNA, 25 bp, Homo sapien
aagctctgcccattggagcctcgcc

SEQ ID NO: 5239734 - DNA, 25 bp, Homo sapien
taagtggttcgtaatggtcagctca

SEQ ID NO: 5239735 - DNA, 25 bp, Homo sapien
ttcctctcagtgctaagtggttcgt

SEQ ID NO: 5239736 - DNA, 25 bp, Homo sapien
cgtaatggtcagctcatttgtgtcc

SEQ ID NO: 5239737 - DNA, 25 bp, Homo sapien
tttgtgtcccatccgggacaccagg

SEQ ID NO: 5239738 - DNA, 25 bp, Homo sapien
aagaggtccaggcttgattcactgt

SEQ ID NO: 5239739 - DNA, 25 bp, Homo sapien
tttgaatgctgttggggctcgagac

SEQ ID NO: 5239740 - DNA, 25 bp, Homo sapien
cactgttggttaggcttctttccag

SEQ ID NO: 5239741 - DNA, 25 bp, Homo sapien
tgttggggctcgagactgccaccac

SEQ ID NO: 5239742 - DNA, 25 bp, Homo sapien
gaactgatcatatttggttgctggc

SEQ ID NO: 5239743 - DNA, 25 bp, Homo sapien
ggctggtagcaagtatagattcctc

SEQ ID NO: 5239744 - DNA, 25 bp, Homo sapien
ttcatggcccacagaaacggaactg

SEQ ID NO: 5239745 - DNA, 25 bp, Homo sapien
gctggccagtgttccatagaccaag

SEQ ID NO: 5239746 - DNA, 25 bp, Homo sapien
ctgcaagtgtgcagggtccctcctc

SEQ ID NO: 5239747 - DNA, 25 bp, Homo sapien
ctgaagcctggatgcattcctgtaa

SEQ ID NO: 5239748 - DNA, 25 bp, Homo sapien
catgagacttttctgcaagtgtgca

SEQ ID NO: 5239749 - DNA, 25 bp, Homo sapien
caaccagcacagtccgggaaacatg

SEQ ID NO: 5239750 - DNA, 25 bp, Homo sapien
ggtctcttcttcacaattactgcct

SEQ ID NO: 5239751 - DNA, 25 bp, Homo sapien
ccttctgcatactagatatctttgc

SEQ ID NO: 5239752 - DNA, 25 bp, Homo sapien
agttcctctttagttcagtctcctt

SEQ ID NO: 5239753 - DNA, 25 bp, Homo sapien
ttcctgaatactatggtctcttctt

SEQ ID NO: 5239754 - DNA, 25 bp, Homo sapien
cgtctgttcatcttgtgtttcaggc

SEQ ID NO: 5239755 - DNA, 25 bp, Homo sapien
atgcctatgtccttttttaatgcag

SEQ ID NO: 5239756 - DNA, 25 bp, Homo sapien
gcagaagacgtctgttcatcttgtg

SEQ ID NO: 5239757 - DNA, 25 bp, Homo sapien
ttttaatgcagaagacgtctgttca

SEQ ID NO: 5239758 - DNA, 25 bp, Homo sapien
aaagcatgttcccacagaatagggt

SEQ ID NO: 5239759 - DNA, 25 bp, Homo sapien
catcaggcaccaattcgagagacct

SEQ ID NO: 5239760 - DNA, 25 bp, Homo sapien
tcccacagaatagggttccataaga

SEQ ID NO: 5239761 - DNA, 25 bp, Homo sapien
accaattcgagagacctgagcagca

SEQ ID NO: 5239762 - DNA, 25 bp, Homo sapien
aaccttcctgaatgccctcacctcc

SEQ ID NO: 5239763 - DNA, 25 bp, Homo sapien
ttctgaaccttcctgaatgccctca

SEQ ID NO: 5239764 - DNA, 25 bp, Homo sapien
tgaaccttcctgaatgccctcacct

SEQ ID NO: 5239765 - DNA, 25 bp, Homo sapien
tcacctccttcagaatccaagttca

SEQ ID NO: 5239766 - DNA, 25 bp, Homo sapien
ttccaagtggacactagcaactgca

SEQ ID NO: 5239767 - DNA, 25 bp, Homo sapien
gcaccatcgtgatgccagttccaca

SEQ ID NO: 5239768 - DNA, 25 bp, Homo sapien
caagtcagaaactcaatgtctatca

SEQ ID NO: 5239769 - DNA, 25 bp, Homo sapien
cctccaatttcagcgtcttgttttc

SEQ ID NO: 5239770 - DNA, 25 bp, Homo sapien
caaatattggccgtaaccgtaccat

SEQ ID NO: 5239771 - DNA, 25 bp, Homo sapien
aaaagcaaggcaacacccatctggc

SEQ ID NO: 5239772 - DNA, 25 bp, Homo sapien
caaggtgttggccaaataacaaagg

SEQ ID NO: 5239773 - DNA, 25 bp, Homo sapien
cagatgcctgaagcttgaaaagtac

SEQ ID NO: 5239774 - DNA, 25 bp, Homo sapien
aaccctatcctctatatgaaagatg

SEQ ID NO: 5239775 - DNA, 25 bp, Homo sapien
tccaaccctatcctctatatgaaag

SEQ ID NO: 5239776 - DNA, 25 bp, Homo sapien
ccaaccctatcctctatatgaaaga

SEQ ID NO: 5239777 - DNA, 25 bp, Homo sapien
aatttacgaagatttctaacagcca

SEQ ID NO: 5239778 - DNA, 25 bp, Homo sapien
ctacaagccacacggctctggatgg

SEQ ID NO: 5239779 - DNA, 25 bp, Homo sapien
gttcgtgtaacaatcaggatcctac

SEQ ID NO: 5239780 - DNA, 25 bp, Homo sapien
tccactggccaacacaagtcacgtg

SEQ ID NO: 5239781 - DNA, 25 bp, Homo sapien
ggaaaatatacctgccacgagaagg

SEQ ID NO: 5239782 - DNA, 25 bp, Homo sapien
tctcctatggagaggtagccaattg

SEQ ID NO: 5239783 - DNA, 25 bp, Homo sapien
gtgacatttcctcaacacattgtgt

SEQ ID NO: 5239784 - DNA, 25 bp, Homo sapien
ctaaagcggcttgacctctatttga

SEQ ID NO: 5239785 - DNA, 25 bp, Homo sapien
aaagcaacatctggtctccaggctt

SEQ ID NO: 5239786 - DNA, 25 bp, Homo sapien
gtcatgatccatacaagaccgaatc

SEQ ID NO: 5239787 - DNA, 25 bp, Homo sapien
tgggctgtgatccaatgctaaaata

SEQ ID NO: 5239788 - DNA, 25 bp, Homo sapien
accacatgcacactagagcatttgt

SEQ ID NO: 5239789 - DNA, 25 bp, Homo sapien
catttgtgtaattttctggggcaaa

SEQ ID NO: 5239790 - DNA, 25 bp, Homo sapien
agactaacagctgatttctcagcag

SEQ ID NO: 5239791 - DNA, 25 bp, Homo sapien
attgtaaagaccatcaatgctagga

SEQ ID NO: 5239792 - DNA, 25 bp, Homo sapien
tacaagccagaagagagtggggacc

SEQ ID NO: 5239793 - DNA, 25 bp, Homo sapien
acagctgatttctcagcagaaactc

SEQ ID NO: 5239794 - DNA, 25 bp, Homo sapien
aacctttcttccaatggcctgtgca

SEQ ID NO: 5239795 - DNA, 25 bp, Homo sapien
ttcttccaatggcctgtgcatctgt

SEQ ID NO: 5239796 - DNA, 25 bp, Homo sapien
cctttcttccaatggcctgtgcatc

SEQ ID NO: 5239797 - DNA, 25 bp, Homo sapien
ctttcttccaatggcctgtgcatct

SEQ ID NO: 5239798 - DNA, 25 bp, Homo sapien
cactgttacaccaaggggctccaag

SEQ ID NO: 5239799 - DNA, 25 bp, Homo sapien
tctttttgtagggctcaagcacaga

SEQ ID NO: 5239800 - DNA, 25 bp, Homo sapien
ctgaaattgcttcggctttttccac

SEQ ID NO: 5239801 - DNA, 25 bp, Homo sapien
gactgaaattgcttcggctttttcc

SEQ ID NO: 5239802 - DNA, 25 bp, Homo sapien
tttaaccagttctgccatcccaggc

SEQ ID NO: 5239803 - DNA, 25 bp, Homo sapien
aggcacttccctaggcctttgtgga

SEQ ID NO: 5239804 - DNA, 25 bp, Homo sapien
catcccaggcacttccctaggcctt

SEQ ID NO: 5239805 - DNA, 25 bp, Homo sapien
gttctgccatcccaggcacttccct

SEQ ID NO: 5239806 - DNA, 25 bp, Homo sapien
catgagtcattagcacaaccagatg

SEQ ID NO: 5239807 - DNA, 25 bp, Homo sapien
tgacatccatgtgcaacccgaataa

SEQ ID NO: 5239808 - DNA, 25 bp, Homo sapien
ggtttgcatgtaatgtgacatccat

SEQ ID NO: 5239809 - DNA, 25 bp, Homo sapien
tatccaacgttaaacaactggtatg

SEQ ID NO: 5239810 - DNA, 25 bp, Homo sapien
agctcctaacctgagtttggatcct

SEQ ID NO: 5239811 - DNA, 25 bp, Homo sapien
gagtttggatcctccctgcacggtg

SEQ ID NO: 5239812 - DNA, 25 bp, Homo sapien
tccctgcacggtgggtggttgctct

SEQ ID NO: 5239813 - DNA, 25 bp, Homo sapien
taacctgagtttggatcctccctgc

SEQ ID NO: 5239814 - DNA, 25 bp, Homo sapien
gcattaagtccactattgtttccca

SEQ ID NO: 5239815 - DNA, 25 bp, Homo sapien
gacattaagatcacaaaggtctatg

SEQ ID NO: 5239816 - DNA, 25 bp, Homo sapien
tgtcgtaggaaatgcttgatggtct

SEQ ID NO: 5239817 - DNA, 25 bp, Homo sapien
taatagagccttatatgtcgtagga

SEQ ID NO: 5239818 - DNA, 25 bp, Homo sapien
gaaaagtaggctctccttatccaca

SEQ ID NO: 5239819 - DNA, 25 bp, Homo sapien
taaccaaggctgtcatccttgaagg

SEQ ID NO: 5239820 - DNA, 25 bp, Homo sapien
tccttatccacaggttcagcatcct

SEQ ID NO: 5239821 - DNA, 25 bp, Homo sapien
attcaaactactgcagatcaaacta

SEQ ID NO: 5239822 - DNA, 25 bp, Homo sapien
gaaaacgactgctccctgactttgg

SEQ ID NO: 5239823 - DNA, 25 bp, Homo sapien
cagccatggccgtcagtagctaaca

SEQ ID NO: 5239824 - DNA, 25 bp, Homo sapien
tgccagctggaaaatgagtccttgg

SEQ ID NO: 5239825 - DNA, 25 bp, Homo sapien
tatcccatctaagacaaggtccagg

SEQ ID NO: 5239826 - DNA, 25 bp, Homo sapien
tatatgtgaggcattcctgtcctcc

SEQ ID NO: 5239827 - DNA, 25 bp, Homo sapien
gctgcagggattgtgattccagctc

SEQ ID NO: 5239828 - DNA, 25 bp, Homo sapien
ctttatatgtgaggcattcctgtcc

SEQ ID NO: 5239829 - DNA, 25 bp, Homo sapien
ctgcagggattgtgattccagctct

SEQ ID NO: 5239830 - DNA, 25 bp, Homo sapien
tgttggaccaaataactggaggttg

SEQ ID NO: 5239831 - DNA, 25 bp, Homo sapien
ctgttggaccaaataactggaggtt

SEQ ID NO: 5239832 - DNA, 25 bp, Homo sapien
aatttcagtataactgtcagtgaca

SEQ ID NO: 5239833 - DNA, 25 bp, Homo sapien
gacagatcccttgcaggaagtagtg

SEQ ID NO: 5239834 - DNA, 25 bp, Homo sapien
taactgtcagtgacagatcccttgc

SEQ ID NO: 5239835 - DNA, 25 bp, Homo sapien
ccttgcaggaagtagtgcaggacat

SEQ ID NO: 5239836 - DNA, 25 bp, Homo sapien
aaatgtaactggcaatttcagctca

SEQ ID NO: 5239837 - DNA, 25 bp, Homo sapien
ctgaaatgtaactggcaatttcagc

SEQ ID NO: 5239838 - DNA, 25 bp, Homo sapien
aatgtaactggcaatttcagctcat

SEQ ID NO: 5239839 - DNA, 25 bp, Homo sapien
tgaaatgtaactggcaatttcagct

SEQ ID NO: 5239840 - DNA, 25 bp, Homo sapien
tcttcttttccagctggaaattgct

SEQ ID NO: 5239841 - DNA, 25 bp, Homo sapien
cttttccagctggaaattgcttttc

SEQ ID NO: 5239842 - DNA, 25 bp, Homo sapien
agctggaaattgcttttccacccat

SEQ ID NO: 5239843 - DNA, 25 bp, Homo sapien
ttccagctggaaattgcttttccac

SEQ ID NO: 5239844 - DNA, 25 bp, Homo sapien
ctgccaggcatgatattgctgcgtt

SEQ ID NO: 5239845 - DNA, 25 bp, Homo sapien
gatattgctgcgttatttttctcat

SEQ ID NO: 5239846 - DNA, 25 bp, Homo sapien
gccaggcatgatattgctgcgttat

SEQ ID NO: 5239847 - DNA, 25 bp, Homo sapien
caggcatgatattgctgcgttattt

SEQ ID NO: 5239848 - DNA, 25 bp, Homo sapien
gggtggaaaatcacattaaccgtca

SEQ ID NO: 5239849 - DNA, 25 bp, Homo sapien
cagcgcagctcatggccagaatcta

SEQ ID NO: 5239850 - DNA, 25 bp, Homo sapien
cactattatgttcctcgttgtagac

SEQ ID NO: 5239851 - DNA, 25 bp, Homo sapien
gacatatgggtaatgagtccacgag

SEQ ID NO: 5239852 - DNA, 25 bp, Homo sapien
tctgaatgtcaccaaatttatcacc

SEQ ID NO: 5239853 - DNA, 25 bp, Homo sapien
gatctctcctgagatgttagttgtt

SEQ ID NO: 5239854 - DNA, 25 bp, Homo sapien
tatccactctactggaatccgcagt

SEQ ID NO: 5239855 - DNA, 25 bp, Homo sapien
gaatccgcagtatctgggtgatgct

SEQ ID NO: 5239856 - DNA, 25 bp, Homo sapien
gccaatcttggtggcacatgctcca

SEQ ID NO: 5239857 - DNA, 25 bp, Homo sapien
actggtagcagttttatcaagctca

SEQ ID NO: 5239858 - DNA, 25 bp, Homo sapien
tatttttttcgcagatgaaggaatg

SEQ ID NO: 5239859 - DNA, 25 bp, Homo sapien
gctcatatttttttcgcagatgaag

SEQ ID NO: 5239860 - DNA, 25 bp, Homo sapien
cggcggaggaggacatagcatctcc

SEQ ID NO: 5239861 - DNA, 25 bp, Homo sapien
cccagtaagattttgggcagcatat

SEQ ID NO: 5239862 - DNA, 25 bp, Homo sapien
ggacatagcatctccaatctgctct

SEQ ID NO: 5239863 - DNA, 25 bp, Homo sapien
gtgggctgaaacgccacattttctt

SEQ ID NO: 5239864 - DNA, 25 bp, Homo sapien
cagtctgcgtctgtttgtgtgacca

SEQ ID NO: 5239865 - DNA, 25 bp, Homo sapien
caggatcaacttgtgtagctgcaat

SEQ ID NO: 5239866 - DNA, 25 bp, Homo sapien
catataacagagctgcacaggatca

SEQ ID NO: 5239867 - DNA, 25 bp, Homo sapien
tgtgcaagttgccatcaattcaggg

SEQ ID NO: 5239868 - DNA, 25 bp, Homo sapien
gcctggatagtatgtatagagctcc

SEQ ID NO: 5239869 - DNA, 25 bp, Homo sapien
catgcagactataaacctaggcgca

SEQ ID NO: 5239870 - DNA, 25 bp, Homo sapien
cctaggcgcaaggaatgtatattca

SEQ ID NO: 5239871 - DNA, 25 bp, Homo sapien
tattcactaataaagctggtcttgg

SEQ ID NO: 5239872 - DNA, 25 bp, Homo sapien
gaggcacaagacatcgttagctacc

SEQ ID NO: 5239873 - DNA, 25 bp, Homo sapien
cagaaaaggaatccatgaggcacaa

SEQ ID NO: 5239874 - DNA, 25 bp, Homo sapien
gaaagacccaggtatgacaccagga

SEQ ID NO: 5239875 - DNA, 25 bp, Homo sapien
aaaataggtaccattcagcacagag

SEQ ID NO: 5239876 - DNA, 25 bp, Homo sapien
ctgttaccaacttgagagttgcagc

SEQ ID NO: 5239877 - DNA, 25 bp, Homo sapien
tcaggtaaacctcatgtaaactgtt

SEQ ID NO: 5239878 - DNA, 25 bp, Homo sapien
gagttgcagctctagacagcttggc

SEQ ID NO: 5239879 - DNA, 25 bp, Homo sapien
acagcttggcaggttcgtctcttcc

SEQ ID NO: 5239880 - DNA, 25 bp, Homo sapien
catctgaagatcagaggttagattt

SEQ ID NO: 5239881 - DNA, 25 bp, Homo sapien
tttttgcctaatgctgcagaggtaa

SEQ ID NO: 5239882 - DNA, 25 bp, Homo sapien
cagaggttagatttttgcctaatgc

SEQ ID NO: 5239883 - DNA, 25 bp, Homo sapien
ccataagtctttggactaactgcaa

SEQ ID NO: 5239884 - DNA, 25 bp, Homo sapien
gggatccatgcagctcatttgtaag

SEQ ID NO: 5239885 - DNA, 25 bp, Homo sapien
ttcacacagcgaggtcacagcgttg

SEQ ID NO: 5239886 - DNA, 25 bp, Homo sapien
tattacggcattcaacaaagaggag

SEQ ID NO: 5239887 - DNA, 25 bp, Homo sapien
cacagcgttggtgatccgaatgctc

SEQ ID NO: 5239888 - DNA, 25 bp, Homo sapien
ggagataattgatccaagttaaaca

SEQ ID NO: 5239889 - DNA, 25 bp, Homo sapien
gaaccccagaagttgtttcatgcca

SEQ ID NO: 5239890 - DNA, 25 bp, Homo sapien
catgccaactcgtgtggtagataaa

SEQ ID NO: 5239891 - DNA, 25 bp, Homo sapien
tttgccaagacttgtatcattgttc

SEQ ID NO: 5239892 - DNA, 25 bp, Homo sapien
tggccaatgttttttcatgagggca

SEQ ID NO: 5239893 - DNA, 25 bp, Homo sapien
ccagcctttatagttgaaggcaaag

SEQ ID NO: 5239894 - DNA, 25 bp, Homo sapien
tcaaatagttcttgggttgtaggga

SEQ ID NO: 5239895 - DNA, 25 bp, Homo sapien
tgagggcagggattcatatttccca

SEQ ID NO: 5239896 - DNA, 25 bp, Homo sapien
ctggagtccattcaactgtggagaa

SEQ ID NO: 5239897 - DNA, 25 bp, Homo sapien
cagatgtcatcggagagacagggct

SEQ ID NO: 5239898 - DNA, 25 bp, Homo sapien
caggaggctcaggactatgctggac

SEQ ID NO: 5239899 - DNA, 25 bp, Homo sapien
ctgtggaacccatctccagtgagat

SEQ ID NO: 5239900 - DNA, 25 bp, Homo sapien
cactttcacaactctgcgcagttca

SEQ ID NO: 5239901 - DNA, 25 bp, Homo sapien
ggcactttcacaactctgcgcagtt

SEQ ID NO: 5239902 - DNA, 25 bp, Homo sapien
tcaggcactttcacaactctgcgca

SEQ ID NO: 5239903 - DNA, 25 bp, Homo sapien
tttcacaactctgcgcagttcatct

SEQ ID NO: 5239904 - DNA, 25 bp, Homo sapien
aaagctaatctcattgtcgtctcag

SEQ ID NO: 5239905 - DNA, 25 bp, Homo sapien
cattgtcgtctcagaacaccgttct

SEQ ID NO: 5239906 - DNA, 25 bp, Homo sapien
ttctctttgtataactgagcaaagc

SEQ ID NO: 5239907 - DNA, 25 bp, Homo sapien
tgattgaggctctcctggtaaagtg

SEQ ID NO: 5239908 - DNA, 25 bp, Homo sapien
aggaatacacctgcatttcattacc

SEQ ID NO: 5239909 - DNA, 25 bp, Homo sapien
tcaatactctgaccgaatatttgta

SEQ ID NO: 5239910 - DNA, 25 bp, Homo sapien
atttgtaaccttcccattctggctg

SEQ ID NO: 5239911 - DNA, 25 bp, Homo sapien
tacacctgcatttcattacctgacc

SEQ ID NO: 5239912 - DNA, 25 bp, Homo sapien
ccacatagcagaggtaagcattact

SEQ ID NO: 5239913 - DNA, 25 bp, Homo sapien
ttccaggaagagcaaacaacatgtg

SEQ ID NO: 5239914 - DNA, 25 bp, Homo sapien
tgtgaccttcgcatccaagggatct

SEQ ID NO: 5239915 - DNA, 25 bp, Homo sapien
gcgtgttagtaactgggccacatag

SEQ ID NO: 5239916 - DNA, 25 bp, Homo sapien
tgaaacggacataagctcaagccgc

SEQ ID NO: 5239917 - DNA, 25 bp, Homo sapien
taaaagaagtactaggaccatgacc

SEQ ID NO: 5239918 - DNA, 25 bp, Homo sapien
caattggtggctaggtttaacgaca

SEQ ID NO: 5239919 - DNA, 25 bp, Homo sapien
tttaacgacacaaggcaatcactga

SEQ ID NO: 5239920 - DNA, 25 bp, Homo sapien
gatgatccccaacaagaaaagatta

SEQ ID NO: 5239921 - DNA, 25 bp, Homo sapien
gaaaagatcacaaacaacagatact

SEQ ID NO: 5239922 - DNA, 25 bp, Homo sapien
ttaattgcttgtaatttcacaccca

SEQ ID NO: 5239923 - DNA, 25 bp, Homo sapien
taatcttatagcttcgtgttcccaa

SEQ ID NO: 5239924 - DNA, 25 bp, Homo sapien
tcccttacaggacagaagttccaac

SEQ ID NO: 5239925 - DNA, 25 bp, Homo sapien
tttctcccttacaggacagaagttc

SEQ ID NO: 5239926 - DNA, 25 bp, Homo sapien
cttacaggacagaagttccaacttc

SEQ ID NO: 5239927 - DNA, 25 bp, Homo sapien
tacaggacagaagttccaacttcct

SEQ ID NO: 5239928 - DNA, 25 bp, Homo sapien
tcgttgtccagaatgatctagtttt

SEQ ID NO: 5239929 - DNA, 25 bp, Homo sapien
tcttctccttcgttgtccagaatga

SEQ ID NO: 5239930 - DNA, 25 bp, Homo sapien
gtatatcttctccttcgttgtccag

SEQ ID NO: 5239931 - DNA, 25 bp, Homo sapien
gctttgtatatcttctccttcgttg

SEQ ID NO: 5239932 - DNA, 25 bp, Homo sapien
gctctacaagatcgctgaaactcca

SEQ ID NO: 5239933 - DNA, 25 bp, Homo sapien
tgccgatgactctacatttggccat

SEQ ID NO: 5239934 - DNA, 25 bp, Homo sapien
gaaactccatctataagtgccgatg

SEQ ID NO: 5239935 - DNA, 25 bp, Homo sapien
taaaggcgctctacaagatcgctga

SEQ ID NO: 5239936 - DNA, 25 bp, Homo sapien
tataaacaccgtatcgttcatcttt

SEQ ID NO: 5239937 - DNA, 25 bp, Homo sapien
acaccgtatcgttcatcttttaggc

SEQ ID NO: 5239938 - DNA, 25 bp, Homo sapien
gaagtataaacaccgtatcgttcat

SEQ ID NO: 5239939 - DNA, 25 bp, Homo sapien
ctagggagaagtataaacaccgtat

SEQ ID NO: 5239940 - DNA, 25 bp, Homo sapien
tggggcccaaggcctatggctcttc

SEQ ID NO: 5239941 - DNA, 25 bp, Homo sapien
cactgaggtcattgccttggaacag

SEQ ID NO: 5239942 - DNA, 25 bp, Homo sapien
aatgatgcagcagggacatgaaccc

SEQ ID NO: 5239943 - DNA, 25 bp, Homo sapien
tcaggtgcctcctagttgacaacac

SEQ ID NO: 5239944 - DNA, 25 bp, Homo sapien
caaagtcctctcgtttcatactgga

SEQ ID NO: 5239945 - DNA, 25 bp, Homo sapien
gaagagttagctggtgggttccaca

SEQ ID NO: 5239946 - DNA, 25 bp, Homo sapien
tgattctaagggaaccaggtgctct

SEQ ID NO: 5239947 - DNA, 25 bp, Homo sapien
gagagaagctctggatactgggtat

SEQ ID NO: 5239948 - DNA, 25 bp, Homo sapien
tgcagaagcctttgtagaccagagt

SEQ ID NO: 5239949 - DNA, 25 bp, Homo sapien
gatgagccacgtcacaatgtcctgc

SEQ ID NO: 5239950 - DNA, 25 bp, Homo sapien
agatgagccacgtcacaatgtcctg

SEQ ID NO: 5239951 - DNA, 25 bp, Homo sapien
ccagatgagccacgtcacaatgtcc

SEQ ID NO: 5239952 - DNA, 25 bp, Homo sapien
gtaccagatgagccacgtcacaatg

SEQ ID NO: 5239953 - DNA, 25 bp, Homo sapien
tagctgcttctctcaactacaggat

SEQ ID NO: 5239954 - DNA, 25 bp, Homo sapien
tgcttctctcaactacaggatgcag

SEQ ID NO: 5239955 - DNA, 25 bp, Homo sapien
ctctcaactacaggatgcagctcag

SEQ ID NO: 5239956 - DNA, 25 bp, Homo sapien
gatagctgcttctctcaactacagg

SEQ ID NO: 5239957 - DNA, 25 bp, Homo sapien
ttcagacgaattcagcaagtcagtc

SEQ ID NO: 5239958 - DNA, 25 bp, Homo sapien
ggatagcagtcctcctcacagacat

SEQ ID NO: 5239959 - DNA, 25 bp, Homo sapien
tgcctcctccactaaattcacactt

SEQ ID NO: 5239960 - DNA, 25 bp, Homo sapien
cttccttggatagcagtcctcctca

SEQ ID NO: 5239961 - DNA, 25 bp, Homo sapien
aattcacacttccttggatagcagt

SEQ ID NO: 5239962 - DNA, 25 bp, Homo sapien
tacagattaataaaggagtctctcc

SEQ ID NO: 5239963 - DNA, 25 bp, Homo sapien
atatcctctctgtccacgttcgttg

SEQ ID NO: 5239964 - DNA, 25 bp, Homo sapien
gctgatgttccattacagattaata

SEQ ID NO: 5239965 - DNA, 25 bp, Homo sapien
caggacattgtcttcggtggactac

SEQ ID NO: 5239966 - DNA, 25 bp, Homo sapien
cttcacagttgtgggttacttctaa

SEQ ID NO: 5239967 - DNA, 25 bp, Homo sapien
ttcttcacagttgtgggttacttct

SEQ ID NO: 5239968 - DNA, 25 bp, Homo sapien
acactctctgatcttgcccatccct

SEQ ID NO: 5239969 - DNA, 25 bp, Homo sapien
cacagttgtgggttacttctaacat

SEQ ID NO: 5239970 - DNA, 25 bp, Homo sapien
ggtccctccattgcttgcaactgtt

SEQ ID NO: 5239971 - DNA, 25 bp, Homo sapien
gctcctttacatggtttgctgtcat

SEQ ID NO: 5239972 - DNA, 25 bp, Homo sapien
cacgttgcaggtgctcttactggtc

SEQ ID NO: 5239973 - DNA, 25 bp, Homo sapien
tagtattgagtggtcctccatggtg

SEQ ID NO: 5239974 - DNA, 25 bp, Homo sapien
cagtggaaggatttagctctctttc

SEQ ID NO: 5239975 - DNA, 25 bp, Homo sapien
tcagtggaaggatttagctctcttt

SEQ ID NO: 5239976 - DNA, 25 bp, Homo sapien
catgtctgttccatccttctatgtc

SEQ ID NO: 5239977 - DNA, 25 bp, Homo sapien
tgtgccttgctagaaaatccccatg

SEQ ID NO: 5239978 - DNA, 25 bp, Homo sapien
cagagtgtaccccaaggtaagcaca

SEQ ID NO: 5239979 - DNA, 25 bp, Homo sapien
atgaaggcccagagtgtaccccaag

SEQ ID NO: 5239980 - DNA, 25 bp, Homo sapien
gatacacagcacaagctgcgtctga

SEQ ID NO: 5239981 - DNA, 25 bp, Homo sapien
tcacccacaagtctgaaggacaagc

SEQ ID NO: 5239982 - DNA, 25 bp, Homo sapien
gctctcatcatggagttcctgagcc

SEQ ID NO: 5239983 - DNA, 25 bp, Homo sapien
gccctgtggtactccaagttctggg

SEQ ID NO: 5239984 - DNA, 25 bp, Homo sapien
acagataagcctttcattatagggc

SEQ ID NO: 5239985 - DNA, 25 bp, Homo sapien
tagggcttccatggaaagcaagttt

SEQ ID NO: 5239986 - DNA, 25 bp, Homo sapien
tggcaagttcaaaggcataatccat

SEQ ID NO: 5239987 - DNA, 25 bp, Homo sapien
tttgatatttataccgggaccgtga

SEQ ID NO: 5239988 - DNA, 25 bp, Homo sapien
gtatagtcacacatctggccttctt

SEQ ID NO: 5239989 - DNA, 25 bp, Homo sapien
gctaattgctatctccaagtgtttc

SEQ ID NO: 5239990 - DNA, 25 bp, Homo sapien
tggccttctttcagattccgcttcc

SEQ ID NO: 5239991 - DNA, 25 bp, Homo sapien
cagattccgcttcctttgaagttca

SEQ ID NO: 5239992 - DNA, 25 bp, Homo sapien
tgtgaagcactgatctttgactgca

SEQ ID NO: 5239993 - DNA, 25 bp, Homo sapien
accaggcagggagtaattgtgaagc

SEQ ID NO: 5239994 - DNA, 25 bp, Homo sapien
catatgtgagatcagctgtgtgtag

SEQ ID NO: 5239995 - DNA, 25 bp, Homo sapien
ggcaatggtggctccacatgcagtt

SEQ ID NO: 5239996 - DNA, 25 bp, Homo sapien
cagtgcagaacagtcaatcattagc

SEQ ID NO: 5239997 - DNA, 25 bp, Homo sapien
ttacaggttcctgcttgctgagaag

SEQ ID NO: 5239998 - DNA, 25 bp, Homo sapien
tataaatctgtgtatgctcaatgtc

SEQ ID NO: 5239999 - DNA, 25 bp, Homo sapien
ttccatggctttctacgggagcaat

SEQ ID NO: 5240000 - DNA, 25 bp, Homo sapien
gccttgccgaatatgcccattttgg

SEQ ID NO: 5240001 - DNA, 25 bp, Homo sapien
tgcccattttgggattgccaatctc

SEQ ID NO: 5240002 - DNA, 25 bp, Homo sapien
gggattgccaatctctttgtcactt

SEQ ID NO: 5240003 - DNA, 25 bp, Homo sapien
aggtaccacctgcagccttgccgaa

SEQ ID NO: 5240004 - DNA, 25 bp, Homo sapien
tggctccagctttgagtacaaggtg

SEQ ID NO: 5240005 - DNA, 25 bp, Homo sapien
tgaattgggcgcataagtgaaccca

SEQ ID NO: 5240006 - DNA, 25 bp, Homo sapien
ggcagattttagtctccgcaaagga

SEQ ID NO: 5240007 - DNA, 25 bp, Homo sapien
caaagtcaaagcgaacatctggctc

SEQ ID NO: 5240008 - DNA, 25 bp, Homo sapien
caccgggactttaggggtgacaatg

SEQ ID NO: 5240009 - DNA, 25 bp, Homo sapien
gagcctcgattagagacaataaggg

SEQ ID NO: 5240010 - DNA, 25 bp, Homo sapien
gatgactcttggttgtgtgtcttga

SEQ ID NO: 5240011 - DNA, 25 bp, Homo sapien
tgtgtgtcttgaagggctgagcctc

SEQ ID NO: 5240012 - DNA, 25 bp, Homo sapien
tccagatctccatactctactatgc

SEQ ID NO: 5240013 - DNA, 25 bp, Homo sapien
tgagcaatagggttgacttgtgaac

SEQ ID NO: 5240014 - DNA, 25 bp, Homo sapien
tctaatccattaacagtcccttttg

SEQ ID NO: 5240015 - DNA, 25 bp, Homo sapien
cattaacagtcccttttgaactttg

SEQ ID NO: 5240016 - DNA, 25 bp, Homo sapien
cataaatctgtagtaatgacagctg

SEQ ID NO: 5240017 - DNA, 25 bp, Homo sapien
aaatctgtagtaatgacagctgttt

SEQ ID NO: 5240018 - DNA, 25 bp, Homo sapien
tcacagagacttttcaatgagcttt

SEQ ID NO: 5240019 - DNA, 25 bp, Homo sapien
caaggcatgttttataaagcctaat

SEQ ID NO: 5240020 - DNA, 25 bp, Homo sapien
ctggttgcatcagatcgcgttgttc

SEQ ID NO: 5240021 - DNA, 25 bp, Homo sapien
tcagatcgcgttgttcctgcttaag

SEQ ID NO: 5240022 - DNA, 25 bp, Homo sapien
aacccaaagtgaatcagtcacactg

SEQ ID NO: 5240023 - DNA, 25 bp, Homo sapien
cacactgagtatggcagtttcattc

SEQ ID NO: 5240024 - DNA, 25 bp, Homo sapien
ccagccagccatcattccctctgac

SEQ ID NO: 5240025 - DNA, 25 bp, Homo sapien
ctctgactccagatcgggctccagg

SEQ ID NO: 5240026 - DNA, 25 bp, Homo sapien
ggctccaggactcattggtattctc

SEQ ID NO: 5240027 - DNA, 25 bp, Homo sapien
cagccagccatcattccctctgact

SEQ ID NO: 5240028 - DNA, 25 bp, Homo sapien
gagagggatttactcacatcaaaat

SEQ ID NO: 5240029 - DNA, 25 bp, Homo sapien
tggagagggatttactcacatcaaa

SEQ ID NO: 5240030 - DNA, 25 bp, Homo sapien
ggtggagagggatttactcacatca

SEQ ID NO: 5240031 - DNA, 25 bp, Homo sapien
agggatttactcacatcaaaatgag

SEQ ID NO: 5240032 - DNA, 25 bp, Homo sapien
acacagggcaatctatcagcaatcc

SEQ ID NO: 5240033 - DNA, 25 bp, Homo sapien
gtcataggaaacacagggcaatcta

SEQ ID NO: 5240034 - DNA, 25 bp, Homo sapien
ggaaacacagggcaatctatcagca

SEQ ID NO: 5240035 - DNA, 25 bp, Homo sapien
aatctatcagcaatccccctgggct

SEQ ID NO: 5240036 - DNA, 25 bp, Homo sapien
aatcatggcaactattccaatcttc

SEQ ID NO: 5240037 - DNA, 25 bp, Homo sapien
ggttttgatggaatcatggcaacta

SEQ ID NO: 5240038 - DNA, 25 bp, Homo sapien
tgcaactgtgacttactcttagatt

SEQ ID NO: 5240039 - DNA, 25 bp, Homo sapien
caactgtgacttactcttagattct

SEQ ID NO: 5240040 - DNA, 25 bp, Homo sapien
atttgctatccctccaaacaccatg

SEQ ID NO: 5240041 - DNA, 25 bp, Homo sapien
atccctccaaacaccatgcctgcca

SEQ ID NO: 5240042 - DNA, 25 bp, Homo sapien
aaagatttgctatccctccaaacac

SEQ ID NO: 5240043 - DNA, 25 bp, Homo sapien
gatttgctatccctccaaacaccat

SEQ ID NO: 5240044 - DNA, 25 bp, Homo sapien
ctttcagtctcaaccaggtgacctt

SEQ ID NO: 5240045 - DNA, 25 bp, Homo sapien
ttctttcagtctcaaccaggtgacc

SEQ ID NO: 5240046 - DNA, 25 bp, Homo sapien
tctttcagtctcaaccaggtgacct

SEQ ID NO: 5240047 - DNA, 25 bp, Homo sapien
gattctttcagtctcaaccaggtga

SEQ ID NO: 5240048 - DNA, 25 bp, Homo sapien
gcctcaacgagtctatggtcttcca

SEQ ID NO: 5240049 - DNA, 25 bp, Homo sapien
tggccacctgcgatgggttctcaca

SEQ ID NO: 5240050 - DNA, 25 bp, Homo sapien
caccatgagcctcaacgagtctatg

SEQ ID NO: 5240051 - DNA, 25 bp, Homo sapien
tcagttaggtctgctctgccaattt

SEQ ID NO: 5240052 - DNA, 25 bp, Homo sapien
acttgtttgagtagatgggaacacc

SEQ ID NO: 5240053 - DNA, 25 bp, Homo sapien
tcaaggacttgtttgagtagatggg

SEQ ID NO: 5240054 - DNA, 25 bp, Homo sapien
aggacttgtttgagtagatgggaac

SEQ ID NO: 5240055 - DNA, 25 bp, Homo sapien
tgtttgagtagatgggaacaccatg

SEQ ID NO: 5240056 - DNA, 25 bp, Homo sapien
tgtggccgtggagctcagggctccc

SEQ ID NO: 5240057 - DNA, 25 bp, Homo sapien
ctgcagccatccatgtgcgtggctg

SEQ ID NO: 5240058 - DNA, 25 bp, Homo sapien
tgcagccatccatgtgcgtggctgc

SEQ ID NO: 5240059 - DNA, 25 bp, Homo sapien
ctgctttgggggagctgtggccgtg

SEQ ID NO: 5240060 - DNA, 25 bp, Homo sapien
attagggccatcctttgcccagcgg

SEQ ID NO: 5240061 - DNA, 25 bp, Homo sapien
gggccatcctttgcccagcggctgc

SEQ ID NO: 5240062 - DNA, 25 bp, Homo sapien
gcctcttctttcccaggttgctgac

SEQ ID NO: 5240063 - DNA, 25 bp, Homo sapien
tgcctcttctttcccaggttgctga

SEQ ID NO: 5240064 - DNA, 25 bp, Homo sapien
tcttccacgtgttcatccctactga

SEQ ID NO: 5240065 - DNA, 25 bp, Homo sapien
aggagtcactgacttggtcctagta

SEQ ID NO: 5240066 - DNA, 25 bp, Homo sapien
agtactatctctggctttatcttcc

SEQ ID NO: 5240067 - DNA, 25 bp, Homo sapien
tcatccctactgacactctttagga

SEQ ID NO: 5240068 - DNA, 25 bp, Homo sapien
tggtctggcgtcagaagtcactgac

SEQ ID NO: 5240069 - DNA, 25 bp, Homo sapien
cccaaggtggtctggcgtcagaagt

SEQ ID NO: 5240070 - DNA, 25 bp, Homo sapien
gtggtctggcgtcagaagtcactga

SEQ ID NO: 5240071 - DNA, 25 bp, Homo sapien
caaggtggtctggcgtcagaagtca

SEQ ID NO: 5240072 - DNA, 25 bp, Homo sapien
tattttgggatgcacgtaaaggaat

SEQ ID NO: 5240073 - DNA, 25 bp, Homo sapien
ctgaaatgcaaaggcccccttgtta

SEQ ID NO: 5240074 - DNA, 25 bp, Homo sapien
gatgcacgtaaaggaatacttcaca

SEQ ID NO: 5240075 - DNA, 25 bp, Homo sapien
tgggatgcacgtaaaggaatacttc

SEQ ID NO: 5240076 - DNA, 25 bp, Homo sapien
catgtccatagagggttgcatgttg

SEQ ID NO: 5240077 - DNA, 25 bp, Homo sapien
gccatgtccatagagggttgcatgt

SEQ ID NO: 5240078 - DNA, 25 bp, Homo sapien
atgtccatagagggttgcatgttga

SEQ ID NO: 5240079 - DNA, 25 bp, Homo sapien
ccatgtccatagagggttgcatgtt

SEQ ID NO: 5240080 - DNA, 25 bp, Homo sapien
tcgctaccctccagggcaattaata

SEQ ID NO: 5240081 - DNA, 25 bp, Homo sapien
cagggcaattaatacagcatcacgt

SEQ ID NO: 5240082 - DNA, 25 bp, Homo sapien
cgttcaatggtgcttgaaccaaatg

SEQ ID NO: 5240083 - DNA, 25 bp, Homo sapien
cagcatcacgttcaatggtgcttga

SEQ ID NO: 5240084 - DNA, 25 bp, Homo sapien
tatcgggacatctgagtgacttcct

SEQ ID NO: 5240085 - DNA, 25 bp, Homo sapien
tgagtgacttcctccgtagtcctgt

SEQ ID NO: 5240086 - DNA, 25 bp, Homo sapien
gaaacagctcctgtatcgggacatc

SEQ ID NO: 5240087 - DNA, 25 bp, Homo sapien
gacttcctccgtagtcctgttgcaa

SEQ ID NO: 5240088 - DNA, 25 bp, Homo sapien
gatcaactattagcgataattttcc

SEQ ID NO: 5240089 - DNA, 25 bp, Homo sapien
actattagcgataattttcctctca

SEQ ID NO: 5240090 - DNA, 25 bp, Homo sapien
tccattagatcaactattagcgata

SEQ ID NO: 5240091 - DNA, 25 bp, Homo sapien
ccattagatcaactattagcgataa

SEQ ID NO: 5240092 - DNA, 25 bp, Homo sapien
tagggctcccatgcaatattgtttt

SEQ ID NO: 5240093 - DNA, 25 bp, Homo sapien
tctggtggcttagggctcccatgca

SEQ ID NO: 5240094 - DNA, 25 bp, Homo sapien
tgcagattttactaagccaggtttc

SEQ ID NO: 5240095 - DNA, 25 bp, Homo sapien
atattgttttggttgatactgcaga

SEQ ID NO: 5240096 - DNA, 25 bp, Homo sapien
catattccatatacgtggaagccac

SEQ ID NO: 5240097 - DNA, 25 bp, Homo sapien
tattccatatacgtggaagccaccc

SEQ ID NO: 5240098 - DNA, 25 bp, Homo sapien
tccatattccatatacgtggaagcc

SEQ ID NO: 5240099 - DNA, 25 bp, Homo sapien
ccatattccatatacgtggaagcca

SEQ ID NO: 5240100 - DNA, 25 bp, Homo sapien
gagtaacagatatcagaaacactgc

SEQ ID NO: 5240101 - DNA, 25 bp, Homo sapien
agctggtcagtgctcctaagagtaa

SEQ ID NO: 5240102 - DNA, 25 bp, Homo sapien
cgctcttaatcattccaagtccctt

SEQ ID NO: 5240103 - DNA, 25 bp, Homo sapien
tgctcctaagagtaacagatatcag

SEQ ID NO: 5240104 - DNA, 25 bp, Homo sapien
cagaggggatggtgcaacctttgca

SEQ ID NO: 5240105 - DNA, 25 bp, Homo sapien
tagcatggcatgcagcctgctctga

SEQ ID NO: 5240106 - DNA, 25 bp, Homo sapien
caaagaagagaagcatttgccctgg

SEQ ID NO: 5240107 - DNA, 25 bp, Homo sapien
attagcatggcatgcagcctgctct

SEQ ID NO: 5240108 - DNA, 25 bp, Homo sapien
tctttaaacatgctttgagttccaa

SEQ ID NO: 5240109 - DNA, 25 bp, Homo sapien
ctggtaacagctggaaatccgtagt

SEQ ID NO: 5240110 - DNA, 25 bp, Homo sapien
gttatagtatgcagagtacatcctc

SEQ ID NO: 5240111 - DNA, 25 bp, Homo sapien
aagctgtgcataccaagatttctgg

SEQ ID NO: 5240112 - DNA, 25 bp, Homo sapien
caaacacagcggcacagtgttttct

SEQ ID NO: 5240113 - DNA, 25 bp, Homo sapien
ttaagagggaacagtgtgccttcag

SEQ ID NO: 5240114 - DNA, 25 bp, Homo sapien
aacagtgtgccttcaggtcaatatc

SEQ ID NO: 5240115 - DNA, 25 bp, Homo sapien
cctgcccatgggtgacctgttcttc

SEQ ID NO: 5240116 - DNA, 25 bp, Homo sapien
ctgttcttccaccaattgagatttg

SEQ ID NO: 5240117 - DNA, 25 bp, Homo sapien
cactcatttcttgaaggtggaggga

SEQ ID NO: 5240118 - DNA, 25 bp, Homo sapien
catttcttgaaggtggagggataac

SEQ ID NO: 5240119 - DNA, 25 bp, Homo sapien
tgccactcatttcttgaaggtggag

SEQ ID NO: 5240120 - DNA, 25 bp, Homo sapien
caactctgccactcatttcttgaag

SEQ ID NO: 5240121 - DNA, 25 bp, Homo sapien
tctggcattgcagcgtatttaatgc

SEQ ID NO: 5240122 - DNA, 25 bp, Homo sapien
tgcagcgtatttaatgccagtaata

SEQ ID NO: 5240123 - DNA, 25 bp, Homo sapien
tgcttctggcattgcagcgtattta

SEQ ID NO: 5240124 - DNA, 25 bp, Homo sapien
cattgcagcgtatttaatgccagta

SEQ ID NO: 5240125 - DNA, 25 bp, Homo sapien
cacatgttgatctttaccagctgat

SEQ ID NO: 5240126 - DNA, 25 bp, Homo sapien
ggtctgggcccaggattccattgat

SEQ ID NO: 5240127 - DNA, 25 bp, Homo sapien
caacagccctgcaggataggaagag

SEQ ID NO: 5240128 - DNA, 25 bp, Homo sapien
tcttttgcgcattaccatggatcca

SEQ ID NO: 5240129 - DNA, 25 bp, Homo sapien
ctgtgccagtgacaaagattgaatg

SEQ ID NO: 5240130 - DNA, 25 bp, Homo sapien
gctcacagcccacttcagcccttct

SEQ ID NO: 5240131 - DNA, 25 bp, Homo sapien
ctcacagcccacttcagcccttctc

SEQ ID NO: 5240132 - DNA, 25 bp, Homo sapien
gagtacaaaattgagttctgagttt

SEQ ID NO: 5240133 - DNA, 25 bp, Homo sapien
aagacacagctatggcagttgagta

SEQ ID NO: 5240134 - DNA, 25 bp, Homo sapien
ggcagttgagtacaaaattgagttc

SEQ ID NO: 5240135 - DNA, 25 bp, Homo sapien
caagaaattccggttgaagacacag

SEQ ID NO: 5240136 - DNA, 25 bp, Homo sapien
taccaccttgttgattggttgacct

SEQ ID NO: 5240137 - DNA, 25 bp, Homo sapien
atattacttatcaaattcaagttgg

SEQ ID NO: 5240138 - DNA, 25 bp, Homo sapien
ctgtcaaagcgagttgatgatggaa

SEQ ID NO: 5240139 - DNA, 25 bp, Homo sapien
aaagaatgatgagcttctgggtgag

SEQ ID NO: 5240140 - DNA, 25 bp, Homo sapien
acataggcaggtttcccatctccac

SEQ ID NO: 5240141 - DNA, 25 bp, Homo sapien
cacataggcaggtttcccatctcca

SEQ ID NO: 5240142 - DNA, 25 bp, Homo sapien
gggggcccgtgcacataggcaggtt

SEQ ID NO: 5240143 - DNA, 25 bp, Homo sapien
ctgggggcccgtgcacataggcagg

SEQ ID NO: 5240144 - DNA, 25 bp, Homo sapien
tgaggtgggaaatcttagttaataa

SEQ ID NO: 5240145 - DNA, 25 bp, Homo sapien
tccctgaatgacaaaggcccaatta

SEQ ID NO: 5240146 - DNA, 25 bp, Homo sapien
tgttcagtctccctgaatgacaaag

SEQ ID NO: 5240147 - DNA, 25 bp, Homo sapien
tgacaaaggcccaattaagcacatt

SEQ ID NO: 5240148 - DNA, 25 bp, Homo sapien
cttgcccactttgaaccttgacttt

SEQ ID NO: 5240149 - DNA, 25 bp, Homo sapien
cctgcatgttctgtgggtcccttaa

SEQ ID NO: 5240150 - DNA, 25 bp, Homo sapien
tcatatcccagctacccctggactc

SEQ ID NO: 5240151 - DNA, 25 bp, Homo sapien
tacccctggactcagattccactgc

SEQ ID NO: 5240152 - DNA, 25 bp, Homo sapien
gagcaaccccgtatccctggaggca

SEQ ID NO: 5240153 - DNA, 25 bp, Homo sapien
actcattcattagaataccaagccc

SEQ ID NO: 5240154 - DNA, 25 bp, Homo sapien
ctcattcattagaataccaagccca

SEQ ID NO: 5240155 - DNA, 25 bp, Homo sapien
ttatggaatcacagggctttgcagc

SEQ ID NO: 5240156 - DNA, 25 bp, Homo sapien
gggccgctggcttgccttgagttct

SEQ ID NO: 5240157 - DNA, 25 bp, Homo sapien
tttccttcatatagaacaattctct

SEQ ID NO: 5240158 - DNA, 25 bp, Homo sapien
gttctgccaactggatttccttcat

SEQ ID NO: 5240159 - DNA, 25 bp, Homo sapien
ttgaattaaagtccagctgcgccag

SEQ ID NO: 5240160 - DNA, 25 bp, Homo sapien
taaagtccagctgcgccagtgttcc

SEQ ID NO: 5240161 - DNA, 25 bp, Homo sapien
agtgttcctctcacccgttgctgct

SEQ ID NO: 5240162 - DNA, 25 bp, Homo sapien
gtgttcctctcacccgttgctgctg

SEQ ID NO: 5240163 - DNA, 25 bp, Homo sapien
ctccatagtctccacaattaacatt

SEQ ID NO: 5240164 - DNA, 25 bp, Homo sapien
cacaattaacattatactgcttggt

SEQ ID NO: 5240165 - DNA, 25 bp, Homo sapien
caattaacattatactgcttggttt

SEQ ID NO: 5240166 - DNA, 25 bp, Homo sapien
aattaacattatactgcttggtttc

SEQ ID NO: 5240167 - DNA, 25 bp, Homo sapien
tactgcagtttatgtcgggaataat

SEQ ID NO: 5240168 - DNA, 25 bp, Homo sapien
ggcaaaagtttatgaacggcagatt

SEQ ID NO: 5240169 - DNA, 25 bp, Homo sapien
tcgggaataatttgctgtagtagta

SEQ ID NO: 5240170 - DNA, 25 bp, Homo sapien
tatttgggaatttgttggttggcaa

SEQ ID NO: 5240171 - DNA, 25 bp, Homo sapien
tctttccgtatattaaatgactccc

SEQ ID NO: 5240172 - DNA, 25 bp, Homo sapien
tgcttcactttcctgcatctctgat

SEQ ID NO: 5240173 - DNA, 25 bp, Homo sapien
tctctgatctctgggcagtggttca

SEQ ID NO: 5240174 - DNA, 25 bp, Homo sapien
aatgactccccgcttcttcagatct

SEQ ID NO: 5240175 - DNA, 25 bp, Homo sapien
gcttccggatcatctgccctgctaa

SEQ ID NO: 5240176 - DNA, 25 bp, Homo sapien
aagaagtcacatggttgccctgtcc

SEQ ID NO: 5240177 - DNA, 25 bp, Homo sapien
gatccctggatggagaagaagtcac

SEQ ID NO: 5240178 - DNA, 25 bp, Homo sapien
cagtatggttgatggccgctttgct

SEQ ID NO: 5240179 - DNA, 25 bp, Homo sapien
cacccttctgtctccatttgggagt

SEQ ID NO: 5240180 - DNA, 25 bp, Homo sapien
gcccagttggggtagaatcttctat

SEQ ID NO: 5240181 - DNA, 25 bp, Homo sapien
ctattccttttgtggaccgcagagt

SEQ ID NO: 5240182 - DNA, 25 bp, Homo sapien
tggatggggaaagaagcctagatgt

SEQ ID NO: 5240183 - DNA, 25 bp, Homo sapien
aatgtcagtgacagtatttggctca

SEQ ID NO: 5240184 - DNA, 25 bp, Homo sapien
tcacaagacctctagggcaatgtca

SEQ ID NO: 5240185 - DNA, 25 bp, Homo sapien
ttggctcatgattgtgtcctccgtg

SEQ ID NO: 5240186 - DNA, 25 bp, Homo sapien
gtcctccgtgtttctcacagtagtg

SEQ ID NO: 5240187 - DNA, 25 bp, Homo sapien
ggtctattgagtttctgggggtcta

SEQ ID NO: 5240188 - DNA, 25 bp, Homo sapien
catctgaggttgagggaaatcagct

SEQ ID NO: 5240189 - DNA, 25 bp, Homo sapien
gttgatgagaactctggactgggga

SEQ ID NO: 5240190 - DNA, 25 bp, Homo sapien
gggtctattgagcatctgaggttga

SEQ ID NO: 5240191 - DNA, 25 bp, Homo sapien
gctcacttcagttggcatactagtt

SEQ ID NO: 5240192 - DNA, 25 bp, Homo sapien
tagttaatattccaccaatgacagc

SEQ ID NO: 5240193 - DNA, 25 bp, Homo sapien
tccaccttcaggtagaccattagcc

SEQ ID NO: 5240194 - DNA, 25 bp, Homo sapien
agcaagactgtccaaggatatctgc

SEQ ID NO: 5240195 - DNA, 25 bp, Homo sapien
gtggattttggtcatagtcaacagg

SEQ ID NO: 5240196 - DNA, 25 bp, Homo sapien
gattttggtcatagtcaacaggaaa

SEQ ID NO: 5240197 - DNA, 25 bp, Homo sapien
aatggaaccagtccacctatccttc

SEQ ID NO: 5240198 - DNA, 25 bp, Homo sapien
tcaaacgtagtcactcagaggagtt

SEQ ID NO: 5240199 - DNA, 25 bp, Homo sapien
gaacactaaggcatacagcaagtcc

SEQ ID NO: 5240200 - DNA, 25 bp, Homo sapien
ttcataagaattggagttagtgccc

SEQ ID NO: 5240201 - DNA, 25 bp, Homo sapien
catcctggcgtactcagtgatgagc

SEQ ID NO: 5240202 - DNA, 25 bp, Homo sapien
gctgagctagaccttaaaaccttga

SEQ ID NO: 5240203 - DNA, 25 bp, Homo sapien
caatcttacgagtgaaatgttctgg

SEQ ID NO: 5240204 - DNA, 25 bp, Homo sapien
taccccgctgcaccaaatcaagtag

SEQ ID NO: 5240205 - DNA, 25 bp, Homo sapien
tggccgagtgagctccaatgctaac

SEQ ID NO: 5240206 - DNA, 25 bp, Homo sapien
tcaccttgtgtatgcaggccccaag

SEQ ID NO: 5240207 - DNA, 25 bp, Homo sapien
gagacttggaactcgcctcggcttt

SEQ ID NO: 5240208 - DNA, 25 bp, Homo sapien
tcatgggtcccgtcctttggagagt

SEQ ID NO: 5240209 - DNA, 25 bp, Homo sapien
tactggcgagacttttccattagcc

SEQ ID NO: 5240210 - DNA, 25 bp, Homo sapien
ttacctcaatggagaagtactggcg

SEQ ID NO: 5240211 - DNA, 25 bp, Homo sapien
tttaaagaagcgaccccagatctgc

SEQ ID NO: 5240212 - DNA, 25 bp, Homo sapien
ccagatctgcaaggtaagtccaaca

SEQ ID NO: 5240213 - DNA, 25 bp, Homo sapien
tgtgctttaaacttgatctcattcg

SEQ ID NO: 5240214 - DNA, 25 bp, Homo sapien
caatctggaatagagaacgttcaca

SEQ ID NO: 5240215 - DNA, 25 bp, Homo sapien
ggcttacagaaatgactgccggtca

SEQ ID NO: 5240216 - DNA, 25 bp, Homo sapien
gctcaagccgcctggtggattccta

SEQ ID NO: 5240217 - DNA, 25 bp, Homo sapien
tcctaggagaaagcgacgtggctca

SEQ ID NO: 5240218 - DNA, 25 bp, Homo sapien
cactgagcttctgagacatccctga

SEQ ID NO: 5240219 - DNA, 25 bp, Homo sapien
tcctggtgaacagcaacttggtctg

SEQ ID NO: 5240220 - DNA, 25 bp, Homo sapien
tgtcccgagtgcttgaggatgatcc

SEQ ID NO: 5240221 - DNA, 25 bp, Homo sapien
gagtttcattgcataccggatacag

SEQ ID NO: 5240222 - DNA, 25 bp, Homo sapien
tggccgcacggaacatcctggtgaa

SEQ ID NO: 5240223 - DNA, 25 bp, Homo sapien
gccccaggtgtatgttacaaataat

SEQ ID NO: 5240224 - DNA, 25 bp, Homo sapien
gcagttgtcatccacggatggctaa

SEQ ID NO: 5240225 - DNA, 25 bp, Homo sapien
cctgggcgagtggttgccagtgacc

SEQ ID NO: 5240226 - DNA, 25 bp, Homo sapien
ggccaccgagctcaaacttcttgta

SEQ ID NO: 5240227 - DNA, 25 bp, Homo sapien
tcctgtacttgctaggagagcacgt

SEQ ID NO: 5240228 - DNA, 25 bp, Homo sapien
ctctatgaagtcgtgggctggatca

SEQ ID NO: 5240229 - DNA, 25 bp, Homo sapien
ggagagcacgtggtgatcctcttgc

SEQ ID NO: 5240230 - DNA, 25 bp, Homo sapien
gtaactaatctccagtaagagaggc

SEQ ID NO: 5240231 - DNA, 25 bp, Homo sapien
aactcctgcggctgaaagggtccat

SEQ ID NO: 5240232 - DNA, 25 bp, Homo sapien
ccaactcctgcggctgaaagggtcc

SEQ ID NO: 5240233 - DNA, 25 bp, Homo sapien
caactcctgcggctgaaagggtcca

SEQ ID NO: 5240234 - DNA, 25 bp, Homo sapien
tccaactcctgcggctgaaagggtc

SEQ ID NO: 5240235 - DNA, 25 bp, Homo sapien
tcaatggacagaaactcacgtagtg

SEQ ID NO: 5240236 - DNA, 25 bp, Homo sapien
gaagcctgagcctaaggcaagccag

SEQ ID NO: 5240237 - DNA, 25 bp, Homo sapien
caggctcacagttggtatcttgcta

SEQ ID NO: 5240238 - DNA, 25 bp, Homo sapien
catgtaagcatttagggatcgcggt

SEQ ID NO: 5240239 - DNA, 25 bp, Homo sapien
tccccaccttagagaattgagcctg

SEQ ID NO: 5240240 - DNA, 25 bp, Homo sapien
attgagcctgtcgagttacctagcg

SEQ ID NO: 5240241 - DNA, 25 bp, Homo sapien
gatagcaggatgcatcggatttcca

SEQ ID NO: 5240242 - DNA, 25 bp, Homo sapien
tagtgtcggccgtaaagctgtcatg

SEQ ID NO: 5240243 - DNA, 25 bp, Homo sapien
gctccagaggagtagtcattgatat

SEQ ID NO: 5240244 - DNA, 25 bp, Homo sapien
tcattgatatgtgccccacatctgg

SEQ ID NO: 5240245 - DNA, 25 bp, Homo sapien
gatcggcatccccatataccatcaa

SEQ ID NO: 5240246 - DNA, 25 bp, Homo sapien
taccatcaactgtttcacaagatgg

SEQ ID NO: 5240247 - DNA, 25 bp, Homo sapien
caagccagtgggagatttctagatg

SEQ ID NO: 5240248 - DNA, 25 bp, Homo sapien
tatccctctcttaagcctggactca

SEQ ID NO: 5240249 - DNA, 25 bp, Homo sapien
tagatgctttaagctgccaggtgtt

SEQ ID NO: 5240250 - DNA, 25 bp, Homo sapien
gccaggtgttacgtttatccctctc

SEQ ID NO: 5240251 - DNA, 25 bp, Homo sapien
acccctaccaaagctgctagctgta

SEQ ID NO: 5240252 - DNA, 25 bp, Homo sapien
taaggcttttgattgcgtcataaac

SEQ ID NO: 5240253 - DNA, 25 bp, Homo sapien
tgagaggtccggaaggacccagcta

SEQ ID NO: 5240254 - DNA, 25 bp, Homo sapien
cgtcataaacttggcatctgcatcc

SEQ ID NO: 5240255 - DNA, 25 bp, Homo sapien
cccgaccttcccagtgtttatgatg

SEQ ID NO: 5240256 - DNA, 25 bp, Homo sapien
tcagccggaggtaagcactgaagcc

SEQ ID NO: 5240257 - DNA, 25 bp, Homo sapien
tctggtctctgtctcgggcagtgtg

SEQ ID NO: 5240258 - DNA, 25 bp, Homo sapien
tgccttcccggatcattggagatgg

SEQ ID NO: 5240259 - DNA, 25 bp, Homo sapien
gaagtggcttttgaactaggcaaaa

SEQ ID NO: 5240260 - DNA, 25 bp, Homo sapien
gaaggaggtacattcaaaactgctg

SEQ ID NO: 5240261 - DNA, 25 bp, Homo sapien
tgaaaactgtgacccattcagaagt

SEQ ID NO: 5240262 - DNA, 25 bp, Homo sapien
tatccagcaagggtacaaggaggaa

SEQ ID NO: 5240263 - DNA, 25 bp, Homo sapien
gaaagctcagatcattcaactggaa

SEQ ID NO: 5240264 - DNA, 25 bp, Homo sapien
aaagctcagatcattcaactggaaa

SEQ ID NO: 5240265 - DNA, 25 bp, Homo sapien
gtgtggatgcatgatgtagcaacta

SEQ ID NO: 5240266 - DNA, 25 bp, Homo sapien
gatgtagcaactaaaagctgttggg

SEQ ID NO: 5240267 - DNA, 25 bp, Homo sapien
gggtggagctgactttttactttga

SEQ ID NO: 5240268 - DNA, 25 bp, Homo sapien
tgatgatgagtccagcgagggtggt

SEQ ID NO: 5240269 - DNA, 25 bp, Homo sapien
cacaaatgggtggatatctgctcat

SEQ ID NO: 5240270 - DNA, 25 bp, Homo sapien
gggcagcgcattccagtttctcaca

SEQ ID NO: 5240271 - DNA, 25 bp, Homo sapien
tttgtccgtgggaagccacgcggcc

SEQ ID NO: 5240272 - DNA, 25 bp, Homo sapien
gattgtggccgtgattttgtccgtg

SEQ ID NO: 5240273 - DNA, 25 bp, Homo sapien
ggcttttcagaggtaggaaatcatc

SEQ ID NO: 5240274 - DNA, 25 bp, Homo sapien
ggcttttgattggtcaagtttctgg

SEQ ID NO: 5240275 - DNA, 25 bp, Homo sapien
cagaggtaggaaatcatcaagcatc

SEQ ID NO: 5240276 - DNA, 25 bp, Homo sapien
taatgaacaaggcttttgattggtc

SEQ ID NO: 5240277 - DNA, 25 bp, Homo sapien
ggctgaacacatagggaagattcca

SEQ ID NO: 5240278 - DNA, 25 bp, Homo sapien
aacgggcgctgcttgttaggctgac

SEQ ID NO: 5240279 - DNA, 25 bp, Homo sapien
ttttgccatcagatgaacgggcgct

SEQ ID NO: 5240280 - DNA, 25 bp, Homo sapien
gatgctcccgttactgttctcagag

SEQ ID NO: 5240281 - DNA, 25 bp, Homo sapien
cacttgaaagggacaaataattcac

SEQ ID NO: 5240282 - DNA, 25 bp, Homo sapien
aattcacctgcaagcacttttggct

SEQ ID NO: 5240283 - DNA, 25 bp, Homo sapien
acgtcatcagggtaagtaagatgca

SEQ ID NO: 5240284 - DNA, 25 bp, Homo sapien
ttttggcttcatgccttttcccatg

SEQ ID NO: 5240285 - DNA, 25 bp, Homo sapien
caggagaaatgtaaccttaacacag

SEQ ID NO: 5240286 - DNA, 25 bp, Homo sapien
tccacttctacatagcagggaacgg

SEQ ID NO: 5240287 - DNA, 25 bp, Homo sapien
cagggaacggattcctggttgtgtt

SEQ ID NO: 5240288 - DNA, 25 bp, Homo sapien
tacatagcagggaacggattcctgg

SEQ ID NO: 5240289 - DNA, 25 bp, Homo sapien
tcttgggtttcttcatgcaccttcc

SEQ ID NO: 5240290 - DNA, 25 bp, Homo sapien
tgatattgacaatccaagactcttt

SEQ ID NO: 5240291 - DNA, 25 bp, Homo sapien
caaagaattcaaacgtgtgatattg

SEQ ID NO: 5240292 - DNA, 25 bp, Homo sapien
ccgttcttcaacgatgaatgtagca

SEQ ID NO: 5240293 - DNA, 25 bp, Homo sapien
tgtcctgtatctggagattgtgaag

SEQ ID NO: 5240294 - DNA, 25 bp, Homo sapien
cattgtcctgtatctggagattgtg

SEQ ID NO: 5240295 - DNA, 25 bp, Homo sapien
gggctgaatcattgtcctgtatctg

SEQ ID NO: 5240296 - DNA, 25 bp, Homo sapien
gaatcattgtcctgtatctggagat

SEQ ID NO: 5240297 - DNA, 25 bp, Homo sapien
tggacctccccggttgctggggctg

SEQ ID NO: 5240298 - DNA, 25 bp, Homo sapien
ttgccccattgtctgtaactgccca

SEQ ID NO: 5240299 - DNA, 25 bp, Homo sapien
tgtcgggcagaccccggtggacctc

SEQ ID NO: 5240300 - DNA, 25 bp, Homo sapien
acagacacacgctcttgccccattg

SEQ ID NO: 5240301 - DNA, 25 bp, Homo sapien
ctggaactcgttcagcgtgctgtaa

SEQ ID NO: 5240302 - DNA, 25 bp, Homo sapien
gaaattctgcttggaacatatcagc

SEQ ID NO: 5240303 - DNA, 25 bp, Homo sapien
tcacacagatgggtgtagacccatg

SEQ ID NO: 5240304 - DNA, 25 bp, Homo sapien
ttgaaactccatagactggaactcg

SEQ ID NO: 5240305 - DNA, 25 bp, Homo sapien
tcagaacaatttccctggaggaggc

SEQ ID NO: 5240306 - DNA, 25 bp, Homo sapien
aatcagaacaatttccctggaggag

SEQ ID NO: 5240307 - DNA, 25 bp, Homo sapien
tttgaaatcagaacaatttccctgg

SEQ ID NO: 5240308 - DNA, 25 bp, Homo sapien
ctggaggaggcacagcccccggtac

SEQ ID NO: 5240309 - DNA, 25 bp, Homo sapien
gggtgagaccttttctaggtgcctg

SEQ ID NO: 5240310 - DNA, 25 bp, Homo sapien
gaacttggagcacttgcaggtaatg

SEQ ID NO: 5240311 - DNA, 25 bp, Homo sapien
tctaggtgcctgtgttagaacttgg

SEQ ID NO: 5240312 - DNA, 25 bp, Homo sapien
tgagaacgcattccaatacaagaaa

SEQ ID NO: 5240313 - DNA, 25 bp, Homo sapien
tctgttttgcttgggttgagtactg

SEQ ID NO: 5240314 - DNA, 25 bp, Homo sapien
ttttgcttgggttgagtactgtcat

SEQ ID NO: 5240315 - DNA, 25 bp, Homo sapien
tgttttgcttgggttgagtactgtc

SEQ ID NO: 5240316 - DNA, 25 bp, Homo sapien
gttttgcttgggttgagtactgtca

SEQ ID NO: 5240317 - DNA, 25 bp, Homo sapien
ttgttccctcaccacaatcactggg

SEQ ID NO: 5240318 - DNA, 25 bp, Homo sapien
tcacagtctaaggtgatgggcagac

SEQ ID NO: 5240319 - DNA, 25 bp, Homo sapien
tgcctggatatatcgtgtctatgcc

SEQ ID NO: 5240320 - DNA, 25 bp, Homo sapien
tgtctatgccagtacattctgaggt

SEQ ID NO: 5240321 - DNA, 25 bp, Homo sapien
gggaagcgccataaagacaaaacag

SEQ ID NO: 5240322 - DNA, 25 bp, Homo sapien
caaccgcaggtcagcttagacttct

SEQ ID NO: 5240323 - DNA, 25 bp, Homo sapien
aaagtcattcgttcagtctctggag

SEQ ID NO: 5240324 - DNA, 25 bp, Homo sapien
gacacgtcgactctcctaaagaagc

SEQ ID NO: 5240325 - DNA, 25 bp, Homo sapien
ttgtctgtgcggctgcaagtccccg

SEQ ID NO: 5240326 - DNA, 25 bp, Homo sapien
gctaggcccggttccagggactgcc

SEQ ID NO: 5240327 - DNA, 25 bp, Homo sapien
cgggcatcgggaaaagaccacagcc

SEQ ID NO: 5240328 - DNA, 25 bp, Homo sapien
ttcgccggaccgctcttaggtggcc

SEQ ID NO: 5240329 - DNA, 25 bp, Homo sapien
gggttgcggattgcgggttgcggtc

SEQ ID NO: 5240330 - DNA, 25 bp, Homo sapien
ttgcggtctttgtccgctcgccctt

SEQ ID NO: 5240331 - DNA, 25 bp, Homo sapien
gggccgcacactcccgcatctggcc

SEQ ID NO: 5240332 - DNA, 25 bp, Homo sapien
gcaggtggcgcggttggctcacgat

SEQ ID NO: 5240333 - DNA, 25 bp, Homo sapien
tgtatctagaaaccgaaatgcccag

SEQ ID NO: 5240334 - DNA, 25 bp, Homo sapien
gagaaaacacgatctgctgcggagc

SEQ ID NO: 5240335 - DNA, 25 bp, Homo sapien
gagtttgcatgagaaaccagcgcag

SEQ ID NO: 5240336 - DNA, 25 bp, Homo sapien
gagtagccctagtgcacgagacttg

SEQ ID NO: 5240337 - DNA, 25 bp, Homo sapien
caaatgacagggaccaatattcgtc

SEQ ID NO: 5240338 - DNA, 25 bp, Homo sapien
ggcagtcagtttcccgtttcaaaca

SEQ ID NO: 5240339 - DNA, 25 bp, Homo sapien
gatagatacatgcaacactcaagat

SEQ ID NO: 5240340 - DNA, 25 bp, Homo sapien
tctcctgattatcgggctgccttgg

SEQ ID NO: 5240341 - DNA, 25 bp, Homo sapien
aaactcaaggacattcggaattttg

SEQ ID NO: 5240342 - DNA, 25 bp, Homo sapien
cagttgaccgcagctcctaccggga

SEQ ID NO: 5240343 - DNA, 25 bp, Homo sapien
tgaccgcagctcctaccgggaaact

SEQ ID NO: 5240344 - DNA, 25 bp, Homo sapien
aggacattcggaattttgcaccaga

SEQ ID NO: 5240345 - DNA, 25 bp, Homo sapien
cagtatgacttctgttgtgaaatga

SEQ ID NO: 5240346 - DNA, 25 bp, Homo sapien
tctacacgcttctttgctactggtc

SEQ ID NO: 5240347 - DNA, 25 bp, Homo sapien
tcacaagtctacacgcttctttgct

SEQ ID NO: 5240348 - DNA, 25 bp, Homo sapien
acttctgttgtgaaatgaccactgc

SEQ ID NO: 5240349 - DNA, 25 bp, Homo sapien
tcctatcatgaattgggatctggtg

SEQ ID NO: 5240350 - DNA, 25 bp, Homo sapien
tagttctccacaccgcttttcttct

SEQ ID NO: 5240351 - DNA, 25 bp, Homo sapien
atcatgaattgggatctggtgccca

SEQ ID NO: 5240352 - DNA, 25 bp, Homo sapien
cttttgttgtgatgaggtagttctc

SEQ ID NO: 5240353 - DNA, 25 bp, Homo sapien
taatttagtgactggacctaagccc

SEQ ID NO: 5240354 - DNA, 25 bp, Homo sapien
ttagtgactggacctaagcccaaac

SEQ ID NO: 5240355 - DNA, 25 bp, Homo sapien
aatttagtgactggacctaagccca

SEQ ID NO: 5240356 - DNA, 25 bp, Homo sapien
tcataatttagtgactggacctaag

SEQ ID NO: 5240357 - DNA, 25 bp, Homo sapien
tcaatcaggccactgcggttctgtg

SEQ ID NO: 5240358 - DNA, 25 bp, Homo sapien
caggccactgcggttctgtgttgct

SEQ ID NO: 5240359 - DNA, 25 bp, Homo sapien
tccctgtctccaactgctcaaatgt

SEQ ID NO: 5240360 - DNA, 25 bp, Homo sapien
gccatggtgaccgatttttgtcatg

SEQ ID NO: 5240361 - DNA, 25 bp, Homo sapien
caagccacagacttgtcttccacag

SEQ ID NO: 5240362 - DNA, 25 bp, Homo sapien
ccacagacttgtcttccacaggcat

SEQ ID NO: 5240363 - DNA, 25 bp, Homo sapien
gccacagacttgtcttccacaggca

SEQ ID NO: 5240364 - DNA, 25 bp, Homo sapien
aagccacagacttgtcttccacagg

SEQ ID NO: 5240365 - DNA, 25 bp, Homo sapien
ttgaagatgatgaaatcctccacat

SEQ ID NO: 5240366 - DNA, 25 bp, Homo sapien
gttaaagtccattgtcgtttcatca

SEQ ID NO: 5240367 - DNA, 25 bp, Homo sapien
tgttaaagtccattgtcgtttcatc

SEQ ID NO: 5240368 - DNA, 25 bp, Homo sapien
aatgttaaagtccattgtcgtttca

SEQ ID NO: 5240369 - DNA, 25 bp, Homo sapien
gagggtggtgaaccttcactgagaa

SEQ ID NO: 5240370 - DNA, 25 bp, Homo sapien
gtgagggtggtgaaccttcactgag

SEQ ID NO: 5240371 - DNA, 25 bp, Homo sapien
agtgagggtggtgaaccttcactga

SEQ ID NO: 5240372 - DNA, 25 bp, Homo sapien
tgagggtggtgaaccttcactgaga

SEQ ID NO: 5240373 - DNA, 25 bp, Homo sapien
gacaactatagctccttcactaatg

SEQ ID NO: 5240374 - DNA, 25 bp, Homo sapien
tgcttctgaagtgctctccggctgg

SEQ ID NO: 5240375 - DNA, 25 bp, Homo sapien
tggtcctcaggaccagagcacaaag

SEQ ID NO: 5240376 - DNA, 25 bp, Homo sapien
gagcacaaaggacaactatagctcc

SEQ ID NO: 5240377 - DNA, 25 bp, Homo sapien
ttgtgggctaggatggcccaccaca

SEQ ID NO: 5240378 - DNA, 25 bp, Homo sapien
acattcccatgtacagaaggtaagc

SEQ ID NO: 5240379 - DNA, 25 bp, Homo sapien
cgctgaggactggaaatctctacag

SEQ ID NO: 5240380 - DNA, 25 bp, Homo sapien
ttctaagcccttgtgggctaggatg

SEQ ID NO: 5240381 - DNA, 25 bp, Homo sapien
tcctccccacccgaacttgtgtatc

SEQ ID NO: 5240382 - DNA, 25 bp, Homo sapien
tatcctcttccgttgatcatcttct

SEQ ID NO: 5240383 - DNA, 25 bp, Homo sapien
cccgaacttgtgtatcttcatccta

SEQ ID NO: 5240384 - DNA, 25 bp, Homo sapien
tatcttcatcctatatcctcttccg

SEQ ID NO: 5240385 - DNA, 25 bp, Homo sapien
taaatgctgcgagttaatgcatgaa

SEQ ID NO: 5240386 - DNA, 25 bp, Homo sapien
ctaaatgctgcgagttaatgcatga

SEQ ID NO: 5240387 - DNA, 25 bp, Homo sapien
tcttgctgtcttgtagaatccctac

SEQ ID NO: 5240388 - DNA, 25 bp, Homo sapien
ggtcctgtaatgcattgtgcctgca

SEQ ID NO: 5240389 - DNA, 25 bp, Homo sapien
ggatttcttgggtcctgtaatgcat

SEQ ID NO: 5240390 - DNA, 25 bp, Homo sapien
tgtagaatccctactccatgcagcc

SEQ ID NO: 5240391 - DNA, 25 bp, Homo sapien
aaatctgcttaaatactcccatatc

SEQ ID NO: 5240392 - DNA, 25 bp, Homo sapien
tctgcttaaatactcccatatcagc

SEQ ID NO: 5240393 - DNA, 25 bp, Homo sapien
tgcttaaatactcccatatcagctc

SEQ ID NO: 5240394 - DNA, 25 bp, Homo sapien
ttaaatactcccatatcagctcctg

SEQ ID NO: 5240395 - DNA, 25 bp, Homo sapien
tccccaatagtcttggctgtccaca

SEQ ID NO: 5240396 - DNA, 25 bp, Homo sapien
aactgattctcaatttctggctcta

SEQ ID NO: 5240397 - DNA, 25 bp, Homo sapien
tctcatatctgttcaggtctaggtt

SEQ ID NO: 5240398 - DNA, 25 bp, Homo sapien
tctggctctatatctagatttagca

SEQ ID NO: 5240399 - DNA, 25 bp, Homo sapien
aagtatgacagtagccacccaggct

SEQ ID NO: 5240400 - DNA, 25 bp, Homo sapien
caaagaggctttggtggaggacacc

SEQ ID NO: 5240401 - DNA, 25 bp, Homo sapien
gaatcagcggcactttgagaacaga

SEQ ID NO: 5240402 - DNA, 25 bp, Homo sapien
tcatagttaaggacagcttgtgacc

SEQ ID NO: 5240403 - DNA, 25 bp, Homo sapien
tgcaagccagtttgggtctaagttg

SEQ ID NO: 5240404 - DNA, 25 bp, Homo sapien
taattagccttatccatgggacatg

SEQ ID NO: 5240405 - DNA, 25 bp, Homo sapien
tccttgttgggattctgatgtgtcc

SEQ ID NO: 5240406 - DNA, 25 bp, Homo sapien
aggacctctgtattgtgcaagccag

SEQ ID NO: 5240407 - DNA, 25 bp, Homo sapien
ctctcgagtacctgcaggtcaaaat

SEQ ID NO: 5240408 - DNA, 25 bp, Homo sapien
actcaggttgctggcaatgagggta

SEQ ID NO: 5240409 - DNA, 25 bp, Homo sapien
aactttcacaactctcgagtacctg

SEQ ID NO: 5240410 - DNA, 25 bp, Homo sapien
ttgaaaatgagacaatgactcaggt

SEQ ID NO: 5240411 - DNA, 25 bp, Homo sapien
cttcatccaactttgtttctttcat

SEQ ID NO: 5240412 - DNA, 25 bp, Homo sapien
tcaaagagggctgaattgttcttct

SEQ ID NO: 5240413 - DNA, 25 bp, Homo sapien
cattttgttgcattctacagagtca

SEQ ID NO: 5240414 - DNA, 25 bp, Homo sapien
gggtatacccaacagcttgccattt

SEQ ID NO: 5240415 - DNA, 25 bp, Homo sapien
cataaaatttctgagggtataccca

SEQ ID NO: 5240416 - DNA, 25 bp, Homo sapien
ggtctccatccaaaacacaacatct

SEQ ID NO: 5240417 - DNA, 25 bp, Homo sapien
gttaattaaagctgcataacactcc

SEQ ID NO: 5240418 - DNA, 25 bp, Homo sapien
aactgcagcataaaatgatggcgat

SEQ ID NO: 5240419 - DNA, 25 bp, Homo sapien
gatggcgattcctaaaataacctcg

SEQ ID NO: 5240420 - DNA, 25 bp, Homo sapien
taatgagtgccaaaaaggtacccga

SEQ ID NO: 5240421 - DNA, 25 bp, Homo sapien
atgagtgccaaaaaggtacccgaag

SEQ ID NO: 5240422 - DNA, 25 bp, Homo sapien
tgtaatgagtgccaaaaaggtaccc

SEQ ID NO: 5240423 - DNA, 25 bp, Homo sapien
tctctgtaatgagtgccaaaaaggt

SEQ ID NO: 5240424 - DNA, 25 bp, Homo sapien
cacgttgctgcccatgtacacttca

SEQ ID NO: 5240425 - DNA, 25 bp, Homo sapien
acttcagctcggcatctctgtcttg

SEQ ID NO: 5240426 - DNA, 25 bp, Homo sapien
ttctgaggagcgctcccacgttgct

SEQ ID NO: 5240427 - DNA, 25 bp, Homo sapien
tagtctttgtgaaaacacggctttc

SEQ ID NO: 5240428 - DNA, 25 bp, Homo sapien
tttccattaatcgggccaaaggcaa

SEQ ID NO: 5240429 - DNA, 25 bp, Homo sapien
cattaatcgggccaaaggcaacatt

SEQ ID NO: 5240430 - DNA, 25 bp, Homo sapien
atttgtgccctgaaccgctggagct

SEQ ID NO: 5240431 - DNA, 25 bp, Homo sapien
caaaggcaacatttgtgccctgaac

SEQ ID NO: 5240432 - DNA, 25 bp, Homo sapien
tcagggtaagaatacttcccttctc

SEQ ID NO: 5240433 - DNA, 25 bp, Homo sapien
tcttgtcgtttgaaaagtcctggct

SEQ ID NO: 5240434 - DNA, 25 bp, Homo sapien
agcttctttctgagcgatattttcc

SEQ ID NO: 5240435 - DNA, 25 bp, Homo sapien
ggaagaaccagttatcagggtaaga

SEQ ID NO: 5240436 - DNA, 25 bp, Homo sapien
ccttatttagatgaaacttaagagg

SEQ ID NO: 5240437 - DNA, 25 bp, Homo sapien
tattatccttatttagatgaaactt

SEQ ID NO: 5240438 - DNA, 25 bp, Homo sapien
cactgtgtccagttatgtttgctat

SEQ ID NO: 5240439 - DNA, 25 bp, Homo sapien
tatttagatgaaacttaagaggcct

SEQ ID NO: 5240440 - DNA, 25 bp, Homo sapien
caacaaacatgtggggtattccagg

SEQ ID NO: 5240441 - DNA, 25 bp, Homo sapien
tggggtattccaggtgaacaaacag

SEQ ID NO: 5240442 - DNA, 25 bp, Homo sapien
tcaactttgaatccgagttaatcgg

SEQ ID NO: 5240443 - DNA, 25 bp, Homo sapien
cagaggacagtagcccactccagaa

SEQ ID NO: 5240444 - DNA, 25 bp, Homo sapien
tctggaccccgccaattgggctgag

SEQ ID NO: 5240445 - DNA, 25 bp, Homo sapien
tatcatgtcaggtaagagctttttg

SEQ ID NO: 5240446 - DNA, 25 bp, Homo sapien
tagggaagcctgagtcttaccacat

SEQ ID NO: 5240447 - DNA, 25 bp, Homo sapien
ccactgagtcaggtgatttagggaa

SEQ ID NO: 5240448 - DNA, 25 bp, Homo sapien
acacgcgtgcgtccacacacagagc

SEQ ID NO: 5240449 - DNA, 25 bp, Homo sapien
cacgcgtgcgtccacacacagagca

SEQ ID NO: 5240450 - DNA, 25 bp, Homo sapien
cacacgcgtgcgtccacacacagag

SEQ ID NO: 5240451 - DNA, 25 bp, Homo sapien
gagtgaggccattgatcaaagtgga

SEQ ID NO: 5240452 - DNA, 25 bp, Homo sapien
tacagttcctgtcacataaaaggcc

SEQ ID NO: 5240453 - DNA, 25 bp, Homo sapien
gataactgtctgacagggtggctct

SEQ ID NO: 5240454 - DNA, 25 bp, Homo sapien
tacccaagttgagatgatagcatct

SEQ ID NO: 5240455 - DNA, 25 bp, Homo sapien
gagtacttatgtgaacgatgtcatg

SEQ ID NO: 5240456 - DNA, 25 bp, Homo sapien
gtgatgagtggatgttgagtactta

SEQ ID NO: 5240457 - DNA, 25 bp, Homo sapien
ttatgtgaacgatgtcatgctgctt

SEQ ID NO: 5240458 - DNA, 25 bp, Homo sapien
ctgctggtgatgagtggatgttgag

SEQ ID NO: 5240459 - DNA, 25 bp, Homo sapien
gactgttcctaacgtcagctctttc

SEQ ID NO: 5240460 - DNA, 25 bp, Homo sapien
tctttctgccccttgtgacttcttc

SEQ ID NO: 5240461 - DNA, 25 bp, Homo sapien
gactctctgccggactgttcctaac

SEQ ID NO: 5240462 - DNA, 25 bp, Homo sapien
cagggtggggctttagcactgtaac

SEQ ID NO: 5240463 - DNA, 25 bp, Homo sapien
ctaggctctatagcgatactcctgg

SEQ ID NO: 5240464 - DNA, 25 bp, Homo sapien
tatagcgatactcctggaacagaat

SEQ ID NO: 5240465 - DNA, 25 bp, Homo sapien
ggaacagaattgcaatgccagtgag

SEQ ID NO: 5240466 - DNA, 25 bp, Homo sapien
gaattgcaatgccagtgagtgttgg

SEQ ID NO: 5240467 - DNA, 25 bp, Homo sapien
gcaggatagcagggttaatgactcc

SEQ ID NO: 5240468 - DNA, 25 bp, Homo sapien
agcaggatagcagggttaatgactc

SEQ ID NO: 5240469 - DNA, 25 bp, Homo sapien
tctgtcttaggccaggagtcccctt

SEQ ID NO: 5240470 - DNA, 25 bp, Homo sapien
gtgcccttggagttcccctcactgt

SEQ ID NO: 5240471 - DNA, 25 bp, Homo sapien
agtccccttctcttgcctgtgccct

SEQ ID NO: 5240472 - DNA, 25 bp, Homo sapien
gttcccctcactgtttttctgacta

SEQ ID NO: 5240473 - DNA, 25 bp, Homo sapien
caccatcatagggtttgatgaccac

SEQ ID NO: 5240474 - DNA, 25 bp, Homo sapien
atcatagggtttgatgaccaccacc

SEQ ID NO: 5240475 - DNA, 25 bp, Homo sapien
accaccatcatagggtttgatgacc

SEQ ID NO: 5240476 - DNA, 25 bp, Homo sapien
atgaccaccatcatagggtttgatg

SEQ ID NO: 5240477 - DNA, 25 bp, Homo sapien
cagtcctccagcattatcttttgag

SEQ ID NO: 5240478 - DNA, 25 bp, Homo sapien
ctttgttgcaagaatttaggctggc

SEQ ID NO: 5240479 - DNA, 25 bp, Homo sapien
gctcagggcagtcctttaagctcaa

SEQ ID NO: 5240480 - DNA, 25 bp, Homo sapien
tagactcccttgcaaaggcctgaga

SEQ ID NO: 5240481 - DNA, 25 bp, Homo sapien
tcactcctaaccagaatacgggtcc

SEQ ID NO: 5240482 - DNA, 25 bp, Homo sapien
tttcttcactcctaaccagaatacg

SEQ ID NO: 5240483 - DNA, 25 bp, Homo sapien
tcctcatttcttcactcctaaccag

SEQ ID NO: 5240484 - DNA, 25 bp, Homo sapien
accagaatacgggtccccataggca

SEQ ID NO: 5240485 - DNA, 25 bp, Homo sapien
ccctgatgggaatgttgcatataaa

SEQ ID NO: 5240486 - DNA, 25 bp, Homo sapien
ttccaaggccctgatgggaatgttg

SEQ ID NO: 5240487 - DNA, 25 bp, Homo sapien
gataatttctgcagttccaaggccc

SEQ ID NO: 5240488 - DNA, 25 bp, Homo sapien
ggaatgttgcatataaaggaattca

SEQ ID NO: 5240489 - DNA, 25 bp, Homo sapien
aaaatcagccaatgcatcctgtttt

SEQ ID NO: 5240490 - DNA, 25 bp, Homo sapien
atcagccaatgcatcctgttttcct

SEQ ID NO: 5240491 - DNA, 25 bp, Homo sapien
agaaaaatcagccaatgcatcctgt

SEQ ID NO: 5240492 - DNA, 25 bp, Homo sapien
gaaaaatcagccaatgcatcctgtt

SEQ ID NO: 5240493 - DNA, 25 bp, Homo sapien
tttacctgagaaacgaacacacaca

SEQ ID NO: 5240494 - DNA, 25 bp, Homo sapien
ttacctgagaaacgaacacacacac

SEQ ID NO: 5240495 - DNA, 25 bp, Homo sapien
attttacctgagaaacgaacacaca

SEQ ID NO: 5240496 - DNA, 25 bp, Homo sapien
ttttacctgagaaacgaacacacac

SEQ ID NO: 5240497 - DNA, 25 bp, Homo sapien
cgtctagtttgagaatacttttaag

SEQ ID NO: 5240498 - DNA, 25 bp, Homo sapien
accaccacagttgctatctcttgaa

SEQ ID NO: 5240499 - DNA, 25 bp, Homo sapien
gtctagtttgagaatacttttaagc

SEQ ID NO: 5240500 - DNA, 25 bp, Homo sapien
tctagtttgagaatacttttaagcc

SEQ ID NO: 5240501 - DNA, 25 bp, Homo sapien
atccatattgggtactgtccatgct

SEQ ID NO: 5240502 - DNA, 25 bp, Homo sapien
catattgggtactgtccatgctggt

SEQ ID NO: 5240503 - DNA, 25 bp, Homo sapien
tcatccatattgggtactgtccatg

SEQ ID NO: 5240504 - DNA, 25 bp, Homo sapien
gccaaaccctttgccactttcactg

SEQ ID NO: 5240505 - DNA, 25 bp, Homo sapien
tcatctatcccatgtggcattttcc

SEQ ID NO: 5240506 - DNA, 25 bp, Homo sapien
catctatcccatgtggcattttcca

SEQ ID NO: 5240507 - DNA, 25 bp, Homo sapien
aggagttatgctgggtttgaattga

SEQ ID NO: 5240508 - DNA, 25 bp, Homo sapien
tgctgggtttgaattgaagaaaaaa

SEQ ID NO: 5240509 - DNA, 25 bp, Homo sapien
tgccttctggtactgcgtgaccagg

SEQ ID NO: 5240510 - DNA, 25 bp, Homo sapien
ccttctggtactgcgtgaccagggt

SEQ ID NO: 5240511 - DNA, 25 bp, Homo sapien
gccttctggtactgcgtgaccaggg

SEQ ID NO: 5240512 - DNA, 25 bp, Homo sapien
cggctggcacttattatggcggctg

SEQ ID NO: 5240513 - DNA, 25 bp, Homo sapien
gctggatggaggagtatgaggcagc

SEQ ID NO: 5240514 - DNA, 25 bp, Homo sapien
tggcacttattatggcggctggatg

SEQ ID NO: 5240515 - DNA, 25 bp, Homo sapien
cggctggatggaggagtatgaggca

SEQ ID NO: 5240516 - DNA, 25 bp, Homo sapien
ctaaaagcctcatgactaaggccat

SEQ ID NO: 5240517 - DNA, 25 bp, Homo sapien
gctccattgattgcttctgacgcat

SEQ ID NO: 5240518 - DNA, 25 bp, Homo sapien
gctgctccattgattgcttctgacg

SEQ ID NO: 5240519 - DNA, 25 bp, Homo sapien
accagctgctccattgattgcttct

SEQ ID NO: 5240520 - DNA, 25 bp, Homo sapien
tccattgattgcttctgacgcataa

SEQ ID NO: 5240521 - DNA, 25 bp, Homo sapien
ggatagctggacaatgagacatttg

SEQ ID NO: 5240522 - DNA, 25 bp, Homo sapien
caggatagctggacaatgagacatt

SEQ ID NO: 5240523 - DNA, 25 bp, Homo sapien
acagcctgttgcttgactggcatgc

SEQ ID NO: 5240524 - DNA, 25 bp, Homo sapien
gatagctggacaatgagacatttgg

SEQ ID NO: 5240525 - DNA, 25 bp, Homo sapien
ctccgatctgacttggagaatacag

SEQ ID NO: 5240526 - DNA, 25 bp, Homo sapien
atgggtcaactttgtattcaaatgc

SEQ ID NO: 5240527 - DNA, 25 bp, Homo sapien
gaaatgccacgttgtctttggtcaa

SEQ ID NO: 5240528 - DNA, 25 bp, Homo sapien
attgagcatgggtcaactttgtatt

SEQ ID NO: 5240529 - DNA, 25 bp, Homo sapien
ctctgaaatgccacgttgtctttgg

SEQ ID NO: 5240530 - DNA, 25 bp, Homo sapien
aaaaaaagtcctgcacagtctgttg

SEQ ID NO: 5240531 - DNA, 25 bp, Homo sapien
ccaaaaaaagtcctgcacagtctgt

SEQ ID NO: 5240532 - DNA, 25 bp, Homo sapien
caaaaaaagtcctgcacagtctgtt

SEQ ID NO: 5240533 - DNA, 25 bp, Homo sapien
agcctcatcaggattgacagcttta

SEQ ID NO: 5240534 - DNA, 25 bp, Homo sapien
gcctcatcaggattgacagctttac

SEQ ID NO: 5240535 - DNA, 25 bp, Homo sapien
cttcttggttggaatagtggtattc

SEQ ID NO: 5240536 - DNA, 25 bp, Homo sapien
tctttagctgaaacatgtatgatcc

SEQ ID NO: 5240537 - DNA, 25 bp, Homo sapien
ctgaaacatgtatgatcccattggc

SEQ ID NO: 5240538 - DNA, 25 bp, Homo sapien
ttatctttagctgaaacatgtatga

SEQ ID NO: 5240539 - DNA, 25 bp, Homo sapien
tagctgaaacatgtatgatcccatt

SEQ ID NO: 5240540 - DNA, 25 bp, Homo sapien
tccttccttcgctggtcttccttag

SEQ ID NO: 5240541 - DNA, 25 bp, Homo sapien
ttcgctggtcttccttagcatattt

SEQ ID NO: 5240542 - DNA, 25 bp, Homo sapien
tcattccttccttcgctggtcttcc

SEQ ID NO: 5240543 - DNA, 25 bp, Homo sapien
tccttcgctggtcttccttagcata

SEQ ID NO: 5240544 - DNA, 25 bp, Homo sapien
ttagctaggagctccctcactttgg

SEQ ID NO: 5240545 - DNA, 25 bp, Homo sapien
gtctttttagctaggagctccctca

SEQ ID NO: 5240546 - DNA, 25 bp, Homo sapien
tcactgtctttttagctaggagctc

SEQ ID NO: 5240547 - DNA, 25 bp, Homo sapien
tttagctaggagctccctcactttg

SEQ ID NO: 5240548 - DNA, 25 bp, Homo sapien
ttctcttgcagaccctaaggtgtgg

SEQ ID NO: 5240549 - DNA, 25 bp, Homo sapien
gagagagatggccacatgtcccatg

SEQ ID NO: 5240550 - DNA, 25 bp, Homo sapien
tattgtgacaaacagggctgagacg

SEQ ID NO: 5240551 - DNA, 25 bp, Homo sapien
gacagagacagcctaattggagagg

SEQ ID NO: 5240552 - DNA, 25 bp, Homo sapien
ttgggcagcttttggtgccattcta

SEQ ID NO: 5240553 - DNA, 25 bp, Homo sapien
cagattctgatttgggcagcttttg

SEQ ID NO: 5240554 - DNA, 25 bp, Homo sapien
gcttttggtgccattctagtgacat

SEQ ID NO: 5240555 - DNA, 25 bp, Homo sapien
atcagattctgatttgggcagcttt

SEQ ID NO: 5240556 - DNA, 25 bp, Homo sapien
tctgaagtgaaaagatggccctgga

SEQ ID NO: 5240557 - DNA, 25 bp, Homo sapien
ggtggtcctcatcaaatttacccca

SEQ ID NO: 5240558 - DNA, 25 bp, Homo sapien
tgccctaaattctttgattccaggt

SEQ ID NO: 5240559 - DNA, 25 bp, Homo sapien
caattatggaagctaaaggtatctc

SEQ ID NO: 5240560 - DNA, 25 bp, Homo sapien
gaggttaagcccacattgcaaaagg

SEQ ID NO: 5240561 - DNA, 25 bp, Homo sapien
cagcagttggaatctgaggttaagc

SEQ ID NO: 5240562 - DNA, 25 bp, Homo sapien
caccagggcaatgggtgagcgctcg

SEQ ID NO: 5240563 - DNA, 25 bp, Homo sapien
tgagcgctcggtgaggtgagagaca

SEQ ID NO: 5240564 - DNA, 25 bp, Homo sapien
agaacctgggccaacgggcaccagc

SEQ ID NO: 5240565 - DNA, 25 bp, Homo sapien
atgagagaacctgggccaacgggca

SEQ ID NO: 5240566 - DNA, 25 bp, Homo sapien
agagaacctgggccaacgggcacca

SEQ ID NO: 5240567 - DNA, 25 bp, Homo sapien
tgagagaacctgggccaacgggcac

SEQ ID NO: 5240568 - DNA, 25 bp, Homo sapien
ggagaggacatgttggcagcattct

SEQ ID NO: 5240569 - DNA, 25 bp, Homo sapien
ggggagaggacatgttggcagcatt

SEQ ID NO: 5240570 - DNA, 25 bp, Homo sapien
gggagaggacatgttggcagcattc

SEQ ID NO: 5240571 - DNA, 25 bp, Homo sapien
ccttaggggagaggacatgttggca

SEQ ID NO: 5240572 - DNA, 25 bp, Homo sapien
ctgaaccaggataagacagagccct

SEQ ID NO: 5240573 - DNA, 25 bp, Homo sapien
tgtgtttattggaagagcccatggc

SEQ ID NO: 5240574 - DNA, 25 bp, Homo sapien
taacagcagacacttgtagaccagc

SEQ ID NO: 5240575 - DNA, 25 bp, Homo sapien
gaccagctgtgtgtactgcgacaag

SEQ ID NO: 5240576 - DNA, 25 bp, Homo sapien
caatgtcagcctatctctagatttc

SEQ ID NO: 5240577 - DNA, 25 bp, Homo sapien
gcctgagggattcattttgtatcca

SEQ ID NO: 5240578 - DNA, 25 bp, Homo sapien
tgccaggatcccagccattccattg

SEQ ID NO: 5240579 - DNA, 25 bp, Homo sapien
agagatggtcttttctggacacaaa

SEQ ID NO: 5240580 - DNA, 25 bp, Homo sapien
tcacccatttggcttcccattttct

SEQ ID NO: 5240581 - DNA, 25 bp, Homo sapien
cccatttggcttcccattttctgtt

SEQ ID NO: 5240582 - DNA, 25 bp, Homo sapien
ctgccctgttctggcccatgggtgt

SEQ ID NO: 5240583 - DNA, 25 bp, Homo sapien
ccctgccctgttctggcccatgggt

SEQ ID NO: 5240584 - DNA, 25 bp, Homo sapien
tacactttgggtcacatgcggaatg

SEQ ID NO: 5240585 - DNA, 25 bp, Homo sapien
gaatttaaagtccatgaagcgggag

SEQ ID NO: 5240586 - DNA, 25 bp, Homo sapien
ccgacaactttaatagcaggatcaa

SEQ ID NO: 5240587 - DNA, 25 bp, Homo sapien
ggatcaatacctcggcaactgggag

SEQ ID NO: 5240588 - DNA, 25 bp, Homo sapien
taatctgacatgtgtcctcgtccat

SEQ ID NO: 5240589 - DNA, 25 bp, Homo sapien
ttagggaaacgccaaactgagcatt

SEQ ID NO: 5240590 - DNA, 25 bp, Homo sapien
gagaaacaaataatctgacatgtgt

SEQ ID NO: 5240591 - DNA, 25 bp, Homo sapien
attttctctgatgggctggtgctca

SEQ ID NO: 5240592 - DNA, 25 bp, Homo sapien
gaatactttcctgatggaggcgcct

SEQ ID NO: 5240593 - DNA, 25 bp, Homo sapien
caagaatactttcctgatggaggcg

SEQ ID NO: 5240594 - DNA, 25 bp, Homo sapien
gtactgccaagaatactttcctgat

SEQ ID NO: 5240595 - DNA, 25 bp, Homo sapien
agagtgtgccaaataactctgagac

SEQ ID NO: 5240596 - DNA, 25 bp, Homo sapien
gattacaatgctttggatattccca

SEQ ID NO: 5240597 - DNA, 25 bp, Homo sapien
cctgattacaatgctttggatattc

SEQ ID NO: 5240598 - DNA, 25 bp, Homo sapien
tacaatgctttggatattcccaaca

SEQ ID NO: 5240599 - DNA, 25 bp, Homo sapien
aatgctttggatattcccaacaaaa

SEQ ID NO: 5240600 - DNA, 25 bp, Homo sapien
gacattgatgtgcccgaggtcaaca

SEQ ID NO: 5240601 - DNA, 25 bp, Homo sapien
gtgacattgatgtgcccgaggtcaa

SEQ ID NO: 5240602 - DNA, 25 bp, Homo sapien
ctgtgacattgatgtgcccgaggtc

SEQ ID NO: 5240603 - DNA, 25 bp, Homo sapien
cattgatgtgcccgaggtcaacacc

SEQ ID NO: 5240604 - DNA, 25 bp, Homo sapien
caaatatccttggaggagtggcccc

SEQ ID NO: 5240605 - DNA, 25 bp, Homo sapien
tcacgttttcgctgactactgggtc

SEQ ID NO: 5240606 - DNA, 25 bp, Homo sapien
tactgggtctgccacgaagaagaca

SEQ ID NO: 5240607 - DNA, 25 bp, Homo sapien
gaaacaagcctgaccactgtgctgt

SEQ ID NO: 5240608 - DNA, 25 bp, Homo sapien
ctgtttccatagtcaactggaccat

SEQ ID NO: 5240609 - DNA, 25 bp, Homo sapien
cctctccccgtttggcagcatgtca

SEQ ID NO: 5240610 - DNA, 25 bp, Homo sapien
catcagaaaagaggaccgccctctc

SEQ ID NO: 5240611 - DNA, 25 bp, Homo sapien
acacattaaacgcatcagaaaagag

SEQ ID NO: 5240612 - DNA, 25 bp, Homo sapien
taaacgcatcagaaaagaggaccgc

SEQ ID NO: 5240613 - DNA, 25 bp, Homo sapien
caattaggagcaggactccttccaa

SEQ ID NO: 5240614 - DNA, 25 bp, Homo sapien
ttccaattaggagcaggactccttc

SEQ ID NO: 5240615 - DNA, 25 bp, Homo sapien
ctgtttccaattaggagcaggactc

SEQ ID NO: 5240616 - DNA, 25 bp, Homo sapien
tgccagggttctgaagcgtcttcat

SEQ ID NO: 5240617 - DNA, 25 bp, Homo sapien
aacaagctgcttggtgccacagctg

SEQ ID NO: 5240618 - DNA, 25 bp, Homo sapien
acggagcaggccctggtccgtgttc

SEQ ID NO: 5240619 - DNA, 25 bp, Homo sapien
tggagctggacagacaacaagctgc

SEQ ID NO: 5240620 - DNA, 25 bp, Homo sapien
tcatactatgggctgggctgctgtg

SEQ ID NO: 5240621 - DNA, 25 bp, Homo sapien
ttatcccatagcatcctcaccagaa

SEQ ID NO: 5240622 - DNA, 25 bp, Homo sapien
tttgacactggcatagatctgtgct

SEQ ID NO: 5240623 - DNA, 25 bp, Homo sapien
tgacactggcatagatctgtgcttg

SEQ ID NO: 5240624 - DNA, 25 bp, Homo sapien
gacactggcatagatctgtgcttgt

SEQ ID NO: 5240625 - DNA, 25 bp, Homo sapien
catagggttgggttgatcttggcat

SEQ ID NO: 5240626 - DNA, 25 bp, Homo sapien
aatgtttcgcatgcacatccgtgcc

SEQ ID NO: 5240627 - DNA, 25 bp, Homo sapien
gttatgacagctagtgcatccttga

SEQ ID NO: 5240628 - DNA, 25 bp, Homo sapien
taagctcttgatgattatctacagc

SEQ ID NO: 5240629 - DNA, 25 bp, Homo sapien
gcatccttgattagacccgtaatga

SEQ ID NO: 5240630 - DNA, 25 bp, Homo sapien
cctctgggtccataccggggtccat

SEQ ID NO: 5240631 - DNA, 25 bp, Homo sapien
cgtagccctgctaaaaagagaggcc

SEQ ID NO: 5240632 - DNA, 25 bp, Homo sapien
tagccctgctaaaaagagaggccat

SEQ ID NO: 5240633 - DNA, 25 bp, Homo sapien
tggcgtagccctgctaaaaagagag

SEQ ID NO: 5240634 - DNA, 25 bp, Homo sapien
ctggcgtagccctgctaaaaagaga

SEQ ID NO: 5240635 - DNA, 25 bp, Homo sapien
gctgatatgtgatccgggcagttta

SEQ ID NO: 5240636 - DNA, 25 bp, Homo sapien
ggcagtttagctaccataattggca

SEQ ID NO: 5240637 - DNA, 25 bp, Homo sapien
aaagcatgctgatatgtgatccggg

SEQ ID NO: 5240638 - DNA, 25 bp, Homo sapien
tgtgatccgggcagtttagctacca

SEQ ID NO: 5240639 - DNA, 25 bp, Homo sapien
tatgtatcccagatggcttataaac

SEQ ID NO: 5240640 - DNA, 25 bp, Homo sapien
ggttgagtggtcatggatgggcctt

SEQ ID NO: 5240641 - DNA, 25 bp, Homo sapien
gtagtattatgtatcccagatggct

SEQ ID NO: 5240642 - DNA, 25 bp, Homo sapien
ttgagtggtcatggatgggcctttt

SEQ ID NO: 5240643 - DNA, 25 bp, Homo sapien
tgataatatcatggaactttatttc

SEQ ID NO: 5240644 - DNA, 25 bp, Homo sapien
cagtcctttctgataatatcatgga

SEQ ID NO: 5240645 - DNA, 25 bp, Homo sapien
actttatttccatcagagcttgcat

SEQ ID NO: 5240646 - DNA, 25 bp, Homo sapien
gaactttatttccatcagagcttgc

SEQ ID NO: 5240647 - DNA, 25 bp, Homo sapien
gaggagggtctcctgagccagacct

SEQ ID NO: 5240648 - DNA, 25 bp, Homo sapien
gccagacctgggtagtgtgatccag

SEQ ID NO: 5240649 - DNA, 25 bp, Homo sapien
tagtgtgatccaggaaggtttggaa

SEQ ID NO: 5240650 - DNA, 25 bp, Homo sapien
ctgaagagggttggacaaagaggag

SEQ ID NO: 5240651 - DNA, 25 bp, Homo sapien
ctggttgatagggtccagaaggtct

SEQ ID NO: 5240652 - DNA, 25 bp, Homo sapien
atgaggcgcagtggggcaatttttt

SEQ ID NO: 5240653 - DNA, 25 bp, Homo sapien
gagaaatcctggttgatagggtcca

SEQ ID NO: 5240654 - DNA, 25 bp, Homo sapien
aatcctggttgatagggtccagaag

SEQ ID NO: 5240655 - DNA, 25 bp, Homo sapien
caggccctgctttcatggcctatat

SEQ ID NO: 5240656 - DNA, 25 bp, Homo sapien
tactcaaagtcaggatcaagggagc

SEQ ID NO: 5240657 - DNA, 25 bp, Homo sapien
tcaccttaggatacctgcattcctg

SEQ ID NO: 5240658 - DNA, 25 bp, Homo sapien
cctgaactcaccttaggatacctgc

SEQ ID NO: 5240659 - DNA, 25 bp, Homo sapien
tttgtggtaggtgttcatttcgagg

SEQ ID NO: 5240660 - DNA, 25 bp, Homo sapien
ggtaggtgttcatttcgaggtagta

SEQ ID NO: 5240661 - DNA, 25 bp, Homo sapien
tttcgcaagaaaccactcttggaaa

SEQ ID NO: 5240662 - DNA, 25 bp, Homo sapien
actcttggaaagtagatctcagctg

SEQ ID NO: 5240663 - DNA, 25 bp, Homo sapien
aacagtgatgttctgttggataagt

SEQ ID NO: 5240664 - DNA, 25 bp, Homo sapien
tccaggaattaagaatttccatcgc

SEQ ID NO: 5240665 - DNA, 25 bp, Homo sapien
ggataagttgtgttagttgcttccg

SEQ ID NO: 5240666 - DNA, 25 bp, Homo sapien
ttccatcgcagaatgtatcaggaag

SEQ ID NO: 5240667 - DNA, 25 bp, Homo sapien
agccacagcgagttgcatatgttac

SEQ ID NO: 5240668 - DNA, 25 bp, Homo sapien
cccgttgtgcctggttattgaaaca

SEQ ID NO: 5240669 - DNA, 25 bp, Homo sapien
aaagccctccgtggtaaccgcatag

SEQ ID NO: 5240670 - DNA, 25 bp, Homo sapien
agaggcaaccggaaagccctccgtg

SEQ ID NO: 5240671 - DNA, 25 bp, Homo sapien
tttagccatggtgaccgttcaggca

SEQ ID NO: 5240672 - DNA, 25 bp, Homo sapien
aaatgaatggcagctctttgcttca

SEQ ID NO: 5240673 - DNA, 25 bp, Homo sapien
taaaaacgtgcttatctgcaaatga

SEQ ID NO: 5240674 - DNA, 25 bp, Homo sapien
ctcttttggcactcgcattgtgacc

SEQ ID NO: 5240675 - DNA, 25 bp, Homo sapien
tctagttctacaccagatataacca

SEQ ID NO: 5240676 - DNA, 25 bp, Homo sapien
caggtctagttctacaccagatata

SEQ ID NO: 5240677 - DNA, 25 bp, Homo sapien
ttggtaaagaatccataggacatca

SEQ ID NO: 5240678 - DNA, 25 bp, Homo sapien
gattttggtaaagaatccataggac

SEQ ID NO: 5240679 - DNA, 25 bp, Homo sapien
tgtcataattaggtttattgagggc

SEQ ID NO: 5240680 - DNA, 25 bp, Homo sapien
agagaaacctggcaagggtaattga

SEQ ID NO: 5240681 - DNA, 25 bp, Homo sapien
caagggtaattgaataagcctgggt

SEQ ID NO: 5240682 - DNA, 25 bp, Homo sapien
ctgtgtcatggtgagggcagtcaac

SEQ ID NO: 5240683 - DNA, 25 bp, Homo sapien
tatacattggctttgcaggaaccac

SEQ ID NO: 5240684 - DNA, 25 bp, Homo sapien
ctccgaacaatctgtttgaggagga

SEQ ID NO: 5240685 - DNA, 25 bp, Homo sapien
ggaaagggtccttccaacaagcagc

SEQ ID NO: 5240686 - DNA, 25 bp, Homo sapien
ccactggcatgatctccgaacaatc

SEQ ID NO: 5240687 - DNA, 25 bp, Homo sapien
tctccaaaataggtcaggctggggc

SEQ ID NO: 5240688 - DNA, 25 bp, Homo sapien
gaactgataaaaattcgctggtgag

SEQ ID NO: 5240689 - DNA, 25 bp, Homo sapien
tgcggcttaggcttcgcagcaggca

SEQ ID NO: 5240690 - DNA, 25 bp, Homo sapien
cagtttatgcagctgttgcggctta

SEQ ID NO: 5240691 - DNA, 25 bp, Homo sapien
ggacaccttccaaagtagcattctt

SEQ ID NO: 5240692 - DNA, 25 bp, Homo sapien
tccctctggcgcagcttggcagtgc

SEQ ID NO: 5240693 - DNA, 25 bp, Homo sapien
cctggctagtaaggctcctaggagc

SEQ ID NO: 5240694 - DNA, 25 bp, Homo sapien
ttatccccgcatgcactggtctgac

SEQ ID NO: 5240695 - DNA, 25 bp, Homo sapien
caagaaccggctgcctttagttggg

SEQ ID NO: 5240696 - DNA, 25 bp, Homo sapien
ccaagaaccggctgcctttagttgg

SEQ ID NO: 5240697 - DNA, 25 bp, Homo sapien
cccaagaaccggctgcctttagttg

SEQ ID NO: 5240698 - DNA, 25 bp, Homo sapien
tcaaaattgctgacccaagaaccgg

SEQ ID NO: 5240699 - DNA, 25 bp, Homo sapien
ggcgatacactctcataagactttc

SEQ ID NO: 5240700 - DNA, 25 bp, Homo sapien
gggagagaggccagattgccaaatt

SEQ ID NO: 5240701 - DNA, 25 bp, Homo sapien
ttttgattggggactggcgatacac

SEQ ID NO: 5240702 - DNA, 25 bp, Homo sapien
ccagattgccaaattgatgttttga

SEQ ID NO: 5240703 - DNA, 25 bp, Homo sapien
aatttgtccattcgaaattgtctcg

SEQ ID NO: 5240704 - DNA, 25 bp, Homo sapien
gaagttgtctcgaaattgtcccggc

SEQ ID NO: 5240705 - DNA, 25 bp, Homo sapien
aaatggagcgcgctgctctctgcaa

SEQ ID NO: 5240706 - DNA, 25 bp, Homo sapien
gaagcaacttctccgcaatttgtcc

SEQ ID NO: 5240707 - DNA, 25 bp, Homo sapien
ttcctgccgctgaaatccatctcga

SEQ ID NO: 5240708 - DNA, 25 bp, Homo sapien
tctgagacccagtttgagaagcggc

SEQ ID NO: 5240709 - DNA, 25 bp, Homo sapien
ctcactgcgctggttcaggagctgg

SEQ ID NO: 5240710 - DNA, 25 bp, Homo sapien
ttttcttgctcctcgcgtcactggc

SEQ ID NO: 5240711 - DNA, 25 bp, Homo sapien
tgatcccacggtggcgagcttccag

SEQ ID NO: 5240712 - DNA, 25 bp, Homo sapien
tgtgcttttaaaactcgaggaacgc

SEQ ID NO: 5240713 - DNA, 25 bp, Homo sapien
gaacgcgggtgttggactcattcgc

SEQ ID NO: 5240714 - DNA, 25 bp, Homo sapien
gcttccaggctcagcgaggagatct

SEQ ID NO: 5240715 - DNA, 25 bp, Homo sapien
agagtacgtgtcctagggcgggcag

SEQ ID NO: 5240716 - DNA, 25 bp, Homo sapien
ttggatatctccgagaggcaggtgc

SEQ ID NO: 5240717 - DNA, 25 bp, Homo sapien
aactggccagatcgcgccgggcttg

SEQ ID NO: 5240718 - DNA, 25 bp, Homo sapien
tctgtggactgtgcgctctcaggag

SEQ ID NO: 5240719 - DNA, 25 bp, Homo sapien
tacttgtcttaacccggctgaggct

SEQ ID NO: 5240720 - DNA, 25 bp, Homo sapien
tccagctaatcaacgggtctcggtg

SEQ ID NO: 5240721 - DNA, 25 bp, Homo sapien
gaaattcaggaagcttaggcctcct

SEQ ID NO: 5240722 - DNA, 25 bp, Homo sapien
cctttcgatgggtttctgtgtcgga

SEQ ID NO: 5240723 - DNA, 25 bp, Homo sapien
gatccttgtgctcggccagggcttt

SEQ ID NO: 5240724 - DNA, 25 bp, Homo sapien
agatcaccgatccttgtgctcggcc

SEQ ID NO: 5240725 - DNA, 25 bp, Homo sapien
tccaggagcccagatcaccgatcct

SEQ ID NO: 5240726 - DNA, 25 bp, Homo sapien
gctcggccagggctttcgtcgctgc

SEQ ID NO: 5240727 - DNA, 25 bp, Homo sapien
acttcccgcagaacctcttgatcct

SEQ ID NO: 5240728 - DNA, 25 bp, Homo sapien
ggatcaagtgtacccgatcctgttc

SEQ ID NO: 5240729 - DNA, 25 bp, Homo sapien
agggcccgactcaagtctgtctcca

SEQ ID NO: 5240730 - DNA, 25 bp, Homo sapien
ggctcagggcccgactcaagtctgt

SEQ ID NO: 5240731 - DNA, 25 bp, Homo sapien
aaccgccaggccgaggcgttcttgt

SEQ ID NO: 5240732 - DNA, 25 bp, Homo sapien
tctttgactgtgaagcacttctgca

SEQ ID NO: 5240733 - DNA, 25 bp, Homo sapien
gtggttcttgtgataagtaagtacc

SEQ ID NO: 5240734 - DNA, 25 bp, Homo sapien
gataagtaagtaccgctctctttga

SEQ ID NO: 5240735 - DNA, 25 bp, Homo sapien
taagtaccgctctctttgactgtga

SEQ ID NO: 5240736 - DNA, 25 bp, Homo sapien
agtaggaatgactcagaacgcccgc

SEQ ID NO: 5240737 - DNA, 25 bp, Homo sapien
caaagacgccgcattccaaatgcag

SEQ ID NO: 5240738 - DNA, 25 bp, Homo sapien
acaatcagacttggcggtcgggaag

SEQ ID NO: 5240739 - DNA, 25 bp, Homo sapien
tctatgaagtctgtacaatcagact

SEQ ID NO: 5240740 - DNA, 25 bp, Homo sapien
agggcagaatcctgcaccctggagc

SEQ ID NO: 5240741 - DNA, 25 bp, Homo sapien
ggtggaagggcagaatcctgcaccc

SEQ ID NO: 5240742 - DNA, 25 bp, Homo sapien
ggaggctctcgggtggaagggcaga

SEQ ID NO: 5240743 - DNA, 25 bp, Homo sapien
ctctcgggtggaagggcagaatcct

SEQ ID NO: 5240744 - DNA, 25 bp, Homo sapien
tgttttaaaatactcgccaggagat

SEQ ID NO: 5240745 - DNA, 25 bp, Homo sapien
ctgttttaaaatactcgccaggaga

SEQ ID NO: 5240746 - DNA, 25 bp, Homo sapien
aaacatcgccagtgatagatgtggg

SEQ ID NO: 5240747 - DNA, 25 bp, Homo sapien
ccgacgggcgagctgatctagcgca

SEQ ID NO: 5240748 - DNA, 25 bp, Homo sapien
cagcttgtcggctggtcgctgacag

SEQ ID NO: 5240749 - DNA, 25 bp, Homo sapien
tagatgtgggtgtcatcgccagtga

SEQ ID NO: 5240750 - DNA, 25 bp, Homo sapien
tgttttatattcagcgataggaacc

SEQ ID NO: 5240751 - DNA, 25 bp, Homo sapien
cgataggaaccgctagagagactaa

SEQ ID NO: 5240752 - DNA, 25 bp, Homo sapien
gagactaaaggacatttggcctcca

SEQ ID NO: 5240753 - DNA, 25 bp, Homo sapien
gaaccgctagagagactaaaggaca

SEQ ID NO: 5240754 - DNA, 25 bp, Homo sapien
gcttcctagcggtcctggaaaggga

SEQ ID NO: 5240755 - DNA, 25 bp, Homo sapien
aatggacttgaattgcccggaggaa

SEQ ID NO: 5240756 - DNA, 25 bp, Homo sapien
catctgtggcggctgtgaatggact

SEQ ID NO: 5240757 - DNA, 25 bp, Homo sapien
ctgagcgctgagagtgacggacact

SEQ ID NO: 5240758 - DNA, 25 bp, Homo sapien
agaatgtgcggccatccctccctag

SEQ ID NO: 5240759 - DNA, 25 bp, Homo sapien
accctcgtcctcgtcagaatgtgcg

SEQ ID NO: 5240760 - DNA, 25 bp, Homo sapien
ctgtgcaaaattgacctccgcgtta

SEQ ID NO: 5240761 - DNA, 25 bp, Homo sapien
tgcctggactgtgcaaaattgacct

SEQ ID NO: 5240762 - DNA, 25 bp, Homo sapien
cactgaggagcctcggttttctgtc

SEQ ID NO: 5240763 - DNA, 25 bp, Homo sapien
ctctctcccaactcggccactgagg

SEQ ID NO: 5240764 - DNA, 25 bp, Homo sapien
tcgcccttcgcgctgggccagagag

SEQ ID NO: 5240765 - DNA, 25 bp, Homo sapien
tgtccctcgggcttctgtcgcccct

SEQ ID NO: 5240766 - DNA, 25 bp, Homo sapien
gctgcccccgggctctcctggactc

SEQ ID NO: 5240767 - DNA, 25 bp, Homo sapien
tccctgctgcccccgggctctcctg

SEQ ID NO: 5240768 - DNA, 25 bp, Homo sapien
ctgctgcccccgggctctcctggac

SEQ ID NO: 5240769 - DNA, 25 bp, Homo sapien
tgcccccgggctctcctggactcac

SEQ ID NO: 5240770 - DNA, 25 bp, Homo sapien
gggcctctggctcggtgcgctcgag

SEQ ID NO: 5240771 - DNA, 25 bp, Homo sapien
aagagggggcctctggctcggtgcg

SEQ ID NO: 5240772 - DNA, 25 bp, Homo sapien
ctctggctcggtgcgctcgagcttc

SEQ ID NO: 5240773 - DNA, 25 bp, Homo sapien
ggctcggtgcgctcgagcttctgca

SEQ ID NO: 5240774 - DNA, 25 bp, Homo sapien
ccgcgggctcgacggggggcagcgg

SEQ ID NO: 5240775 - DNA, 25 bp, Homo sapien
gcggccgcgggctcgacggggggca

SEQ ID NO: 5240776 - DNA, 25 bp, Homo sapien
cggccgcgggctcgacggggggcag

SEQ ID NO: 5240777 - DNA, 25 bp, Homo sapien
cgcgggctcgacggggggcagcggc

SEQ ID NO: 5240778 - DNA, 25 bp, Homo sapien
tctgctggctcaagtatcggcccga

SEQ ID NO: 5240779 - DNA, 25 bp, Homo sapien
gctggctcaagtatcggcccgaggg

SEQ ID NO: 5240780 - DNA, 25 bp, Homo sapien
atctgctggctcaagtatcggcccg

SEQ ID NO: 5240781 - DNA, 25 bp, Homo sapien
tgctggctcaagtatcggcccgagg

SEQ ID NO: 5240782 - DNA, 25 bp, Homo sapien
tcctggcactcttctcggtcgttgt

SEQ ID NO: 5240783 - DNA, 25 bp, Homo sapien
tggcactcttctcggtcgttgtcac

SEQ ID NO: 5240784 - DNA, 25 bp, Homo sapien
tcgccctcgcccgtggggcccatct

SEQ ID NO: 5240785 - DNA, 25 bp, Homo sapien
atcctggcactcttctcggtcgttg

SEQ ID NO: 5240786 - DNA, 25 bp, Homo sapien
cgccccctggcgaggcaccggccac

SEQ ID NO: 5240787 - DNA, 25 bp, Homo sapien
gggcgccccctggcgaggcaccggc

SEQ ID NO: 5240788 - DNA, 25 bp, Homo sapien
gcggggcgccccctggcgaggcacc

SEQ ID NO: 5240789 - DNA, 25 bp, Homo sapien
gaggcggggcgccccctggcgaggc

SEQ ID NO: 5240790 - DNA, 25 bp, Homo sapien
tgctcttcaccggcctcatcttcgt

SEQ ID NO: 5240791 - DNA, 25 bp, Homo sapien
tcaccggcctcatcttcgtcaacca

SEQ ID NO: 5240792 - DNA, 25 bp, Homo sapien
ttcaccggcctcatcttcgtcaacc

SEQ ID NO: 5240793 - DNA, 25 bp, Homo sapien
tcttcaccggcctcatcttcgtcaa

SEQ ID NO: 5240794 - DNA, 25 bp, Homo sapien
gcgcgcccaagctgctggcgtgctt

SEQ ID NO: 5240795 - DNA, 25 bp, Homo sapien
tctgctacaactacttcgacgcgga

SEQ ID NO: 5240796 - DNA, 25 bp, Homo sapien
atcatgccatggcagcgccggcgag

SEQ ID NO: 5240797 - DNA, 25 bp, Homo sapien
tccgcttgaggactacgagtgcaaa

SEQ ID NO: 5240798 - DNA, 25 bp, Homo sapien
atctttataagcagccgcaccccaa

SEQ ID NO: 5240799 - DNA, 25 bp, Homo sapien
tcaactcccaatttcaagtccaaca

SEQ ID NO: 5240800 - DNA, 25 bp, Homo sapien
aggtcgtgtcgaggaagagaaagaa

SEQ ID NO: 5240801 - DNA, 25 bp, Homo sapien
caaaaaccgatatcctaagctgctg

SEQ ID NO: 5240802 - DNA, 25 bp, Homo sapien
tgggtgggtgaaaacgaggcttcgc

SEQ ID NO: 5240803 - DNA, 25 bp, Homo sapien
gcggttgaggctgccgtttcccctc

SEQ ID NO: 5240804 - DNA, 25 bp, Homo sapien
tcacgaagagaagaaaccgccgctg

SEQ ID NO: 5240805 - DNA, 25 bp, Homo sapien
tgaaaacgaggcttcgccagggacc

SEQ ID NO: 5240806 - DNA, 25 bp, Homo sapien
aagcacaaagcgtgaatggcctggt

SEQ ID NO: 5240807 - DNA, 25 bp, Homo sapien
acaaaagcacaaagcgtgaatggcc

SEQ ID NO: 5240808 - DNA, 25 bp, Homo sapien
cctggtgatggctgttttttcgccc

SEQ ID NO: 5240809 - DNA, 25 bp, Homo sapien
cccatggacggagagatgagatcac

SEQ ID NO: 5240810 - DNA, 25 bp, Homo sapien
aaatttcctctaaatgatacaagga

SEQ ID NO: 5240811 - DNA, 25 bp, Homo sapien
tccgctgtggtcagcgtcaggaaaa

SEQ ID NO: 5240812 - DNA, 25 bp, Homo sapien
ctagatccgctgtggtcagcgtcag

SEQ ID NO: 5240813 - DNA, 25 bp, Homo sapien
ctaaatgatacaaggaaaacgccgc

SEQ ID NO: 5240814 - DNA, 25 bp, Homo sapien
tcattaaatcaagaggacctgtccc

SEQ ID NO: 5240815 - DNA, 25 bp, Homo sapien
taagccgcactttgacagtctgtga

SEQ ID NO: 5240816 - DNA, 25 bp, Homo sapien
tatttcttgctacccggtccagttg

SEQ ID NO: 5240817 - DNA, 25 bp, Homo sapien
tctgtgaacgcctgtgcaccaacga

SEQ ID NO: 5240818 - DNA, 25 bp, Homo sapien
gactttctggttaggagtatctgaa

SEQ ID NO: 5240819 - DNA, 25 bp, Homo sapien
tatctgaacaccacccctcagttgg

SEQ ID NO: 5240820 - DNA, 25 bp, Homo sapien
gttaggagtatctgaacaccacccc

SEQ ID NO: 5240821 - DNA, 25 bp, Homo sapien
gagaaatcgggggacagactttctg

SEQ ID NO: 5240822 - DNA, 25 bp, Homo sapien
aaaaaagtaggaacattcccagctg

SEQ ID NO: 5240823 - DNA, 25 bp, Homo sapien
aaaagtaggaacattcccagctgtg

SEQ ID NO: 5240824 - DNA, 25 bp, Homo sapien
aaggtgggttccctgctcatagggt

SEQ ID NO: 5240825 - DNA, 25 bp, Homo sapien
gggaaggtgggttccctgctcatag

SEQ ID NO: 5240826 - DNA, 25 bp, Homo sapien
caaacattccctggggcatcttgct

SEQ ID NO: 5240827 - DNA, 25 bp, Homo sapien
gggcatcttgctgtcttctgcagag

SEQ ID NO: 5240828 - DNA, 25 bp, Homo sapien
ggcatcttgctgtcttctgcagaga

SEQ ID NO: 5240829 - DNA, 25 bp, Homo sapien
tcacaaacattccctggggcatctt

SEQ ID NO: 5240830 - DNA, 25 bp, Homo sapien
tttcaaatgtcatagaaacaatatt

SEQ ID NO: 5240831 - DNA, 25 bp, Homo sapien
cagcttgcttcccatccagtcatcc

SEQ ID NO: 5240832 - DNA, 25 bp, Homo sapien
cctcttgtgtggtgatttactgatt

SEQ ID NO: 5240833 - DNA, 25 bp, Homo sapien
tcttgtgtggtgatttactgatttc

SEQ ID NO: 5240834 - DNA, 25 bp, Homo sapien
gttttaatgagcttcacttaaagcc

SEQ ID NO: 5240835 - DNA, 25 bp, Homo sapien
taatgagcttcacttaaagcccttc

SEQ ID NO: 5240836 - DNA, 25 bp, Homo sapien
tttaatgagcttcacttaaagccct

SEQ ID NO: 5240837 - DNA, 25 bp, Homo sapien
tgagcttcacttaaagcccttcaaa

SEQ ID NO: 5240838 - DNA, 25 bp, Homo sapien
ctaatagtggatgggaaagaaccta

SEQ ID NO: 5240839 - DNA, 25 bp, Homo sapien
ggatctgcgctttacaactgcctca

SEQ ID NO: 5240840 - DNA, 25 bp, Homo sapien
tcagtctcctgaaaaccaaatctgc

SEQ ID NO: 5240841 - DNA, 25 bp, Homo sapien
tattattaagtcagcaaatgcacag

SEQ ID NO: 5240842 - DNA, 25 bp, Homo sapien
ggtggaagagaatctgtgtattagt

SEQ ID NO: 5240843 - DNA, 25 bp, Homo sapien
tgtattagttagtagacctgcacgg

SEQ ID NO: 5240844 - DNA, 25 bp, Homo sapien
gaacagactaatagcatggatcatc

SEQ ID NO: 5240845 - DNA, 25 bp, Homo sapien
cacggttccaatccatgttgtccaa

SEQ ID NO: 5240846 - DNA, 25 bp, Homo sapien
atgctattaggaaagctgcagagcc

SEQ ID NO: 5240847 - DNA, 25 bp, Homo sapien
agctgcagagccactatgagctctt

SEQ ID NO: 5240848 - DNA, 25 bp, Homo sapien
taggaaagctgcagagccactatga

SEQ ID NO: 5240849 - DNA, 25 bp, Homo sapien
actatgagctcttctgtccaaactg

SEQ ID NO: 5240850 - DNA, 25 bp, Homo sapien
cattaaggttatgtaggagatcatc

SEQ ID NO: 5240851 - DNA, 25 bp, Homo sapien
tcttaaatgatgcaaagtgacatgt

SEQ ID NO: 5240852 - DNA, 25 bp, Homo sapien
gaactttattgggtaattatgcagg

SEQ ID NO: 5240853 - DNA, 25 bp, Homo sapien
agacagccacgcagagacaggatac

SEQ ID NO: 5240854 - DNA, 25 bp, Homo sapien
tctgggaacttggtggcttagaaca

SEQ ID NO: 5240855 - DNA, 25 bp, Homo sapien
tgaacatcagggaggaacatcgcta

SEQ ID NO: 5240856 - DNA, 25 bp, Homo sapien
tattagtgccctacaagccctgatg

SEQ ID NO: 5240857 - DNA, 25 bp, Homo sapien
tcttgacaaatgctgcggctatctt

SEQ ID NO: 5240858 - DNA, 25 bp, Homo sapien
tagactctggacagcgcatcttggg

SEQ ID NO: 5240859 - DNA, 25 bp, Homo sapien
tgctgcaaactcactatggctgtcc

SEQ ID NO: 5240860 - DNA, 25 bp, Homo sapien
tcttgggcctccagtatcaacactg

SEQ ID NO: 5240861 - DNA, 25 bp, Homo sapien
tgataccgaatgttgctgctgcaaa

SEQ ID NO: 5240862 - DNA, 25 bp, Homo sapien
aacgtctgctacaccagcagtcagg

SEQ ID NO: 5240863 - DNA, 25 bp, Homo sapien
tctgctacaccagcagtcaggtgga

SEQ ID NO: 5240864 - DNA, 25 bp, Homo sapien
aacctgaggaaacgtctgctacacc

SEQ ID NO: 5240865 - DNA, 25 bp, Homo sapien
tgaggaaacgtctgctacaccagca

SEQ ID NO: 5240866 - DNA, 25 bp, Homo sapien
taatccctgtactaaacctcttgct

SEQ ID NO: 5240867 - DNA, 25 bp, Homo sapien
cagtggattccataattaacggtcc

SEQ ID NO: 5240868 - DNA, 25 bp, Homo sapien
ctttcaaatgggtaatgagcttcta

SEQ ID NO: 5240869 - DNA, 25 bp, Homo sapien
taaacgtcagcagtggattccataa

SEQ ID NO: 5240870 - DNA, 25 bp, Homo sapien
ccagcagcttttgggtgccttgctg

SEQ ID NO: 5240871 - DNA, 25 bp, Homo sapien
atcaccacaggatcccgtgattcct

SEQ ID NO: 5240872 - DNA, 25 bp, Homo sapien
cctgtgaatcaccacaggatcccgt

SEQ ID NO: 5240873 - DNA, 25 bp, Homo sapien
agcagcttttgggtgccttgctgtg

SEQ ID NO: 5240874 - DNA, 25 bp, Homo sapien
aaaactagtcatgcgtagtagtgag

SEQ ID NO: 5240875 - DNA, 25 bp, Homo sapien
cggtgccctccgctggcaccgccac

SEQ ID NO: 5240876 - DNA, 25 bp, Homo sapien
ggtgccctccgctggcaccgccact

SEQ ID NO: 5240877 - DNA, 25 bp, Homo sapien
ggccggtgccctccgctggcaccgc

SEQ ID NO: 5240878 - DNA, 25 bp, Homo sapien
ccgggccggtgccctccgctggcac

SEQ ID NO: 5240879 - DNA, 25 bp, Homo sapien
aagcgggcgacgagctgggaatcct

SEQ ID NO: 5240880 - DNA, 25 bp, Homo sapien
ccttcatccggagcggggaagagcc

SEQ ID NO: 5240881 - DNA, 25 bp, Homo sapien
ctggaagcgggcgacgagctgggaa

SEQ ID NO: 5240882 - DNA, 25 bp, Homo sapien
gggcgacgagctgggaatcctgcag

SEQ ID NO: 5240883 - DNA, 25 bp, Homo sapien
ggagcctcgccgcccttgccgttgg

SEQ ID NO: 5240884 - DNA, 25 bp, Homo sapien
cgcccttgccgttggctgcggggag

SEQ ID NO: 5240885 - DNA, 25 bp, Homo sapien
gccgcggctctgcgcagcccgttgg

SEQ ID NO: 5240886 - DNA, 25 bp, Homo sapien
gcctcgccgcccttgccgttggctg

SEQ ID NO: 5240887 - DNA, 25 bp, Homo sapien
taggttaccggaatgtcacatggga

SEQ ID NO: 5240888 - DNA, 25 bp, Homo sapien
ttctctggagtagaacacacaacca

SEQ ID NO: 5240889 - DNA, 25 bp, Homo sapien
tctgccccgtttttaagacaaggca

SEQ ID NO: 5240890 - DNA, 25 bp, Homo sapien
cagaagccaggttcttcgtaattcc

SEQ ID NO: 5240891 - DNA, 25 bp, Homo sapien
taatctttaagctagcagcgtgtgg

SEQ ID NO: 5240892 - DNA, 25 bp, Homo sapien
ctgtgaaattcatgactactgggca

SEQ ID NO: 5240893 - DNA, 25 bp, Homo sapien
cccctgactgtgtggatatcctgga

SEQ ID NO: 5240894 - DNA, 25 bp, Homo sapien
gaacctctccctaagtcaatgtgag

SEQ ID NO: 5240895 - DNA, 25 bp, Homo sapien
ccctaaaaggtggaatagagcctat

SEQ ID NO: 5240896 - DNA, 25 bp, Homo sapien
gaaatagagagctatgcttccttcc

SEQ ID NO: 5240897 - DNA, 25 bp, Homo sapien
tcctgctgacactctgatgatatcc

SEQ ID NO: 5240898 - DNA, 25 bp, Homo sapien
taagtagaccaactatttcctgctg

SEQ ID NO: 5240899 - DNA, 25 bp, Homo sapien
cttcttgtctataggataaagtcca

SEQ ID NO: 5240900 - DNA, 25 bp, Homo sapien
cacacgggatgaaattgactgctat

SEQ ID NO: 5240901 - DNA, 25 bp, Homo sapien
gactgctatcttcttgtctatagga

SEQ ID NO: 5240902 - DNA, 25 bp, Homo sapien
cagtgctctcagttgccaattccga

SEQ ID NO: 5240903 - DNA, 25 bp, Homo sapien
caccactgggctccctccatactca

SEQ ID NO: 5240904 - DNA, 25 bp, Homo sapien
accactgggctccctccatactcac

SEQ ID NO: 5240905 - DNA, 25 bp, Homo sapien
tcaccactgggctccctccatactc

SEQ ID NO: 5240906 - DNA, 25 bp, Homo sapien
catttgtgctttttcctcgtaaatc

SEQ ID NO: 5240907 - DNA, 25 bp, Homo sapien
tttgtgctttttcctcgtaaatcat

SEQ ID NO: 5240908 - DNA, 25 bp, Homo sapien
ccatttgtgctttttcctcgtaaat

SEQ ID NO: 5240909 - DNA, 25 bp, Homo sapien
agaaaccatttgtgctttttcctcg

SEQ ID NO: 5240910 - DNA, 25 bp, Homo sapien
catgccaagccatgtcataaaatgc

SEQ ID NO: 5240911 - DNA, 25 bp, Homo sapien
ttaattggatgacgtccccatgcca

SEQ ID NO: 5240912 - DNA, 25 bp, Homo sapien
gttagtcactacacaatatgcatga

SEQ ID NO: 5240913 - DNA, 25 bp, Homo sapien
caattcgattgagtctgttagtcac

SEQ ID NO: 5240914 - DNA, 25 bp, Homo sapien
gtgagcagagggatctaacttcctc

SEQ ID NO: 5240915 - DNA, 25 bp, Homo sapien
ctggttgctccaggcatgtcaggcc

SEQ ID NO: 5240916 - DNA, 25 bp, Homo sapien
agagggatctaacttcctctcccca

SEQ ID NO: 5240917 - DNA, 25 bp, Homo sapien
ggcatgtcaggccctgagggtacac

SEQ ID NO: 5240918 - DNA, 25 bp, Homo sapien
agttcgagttctaggatgcatggga

SEQ ID NO: 5240919 - DNA, 25 bp, Homo sapien
gaaatgctttcatcagagttcgagt

SEQ ID NO: 5240920 - DNA, 25 bp, Homo sapien
ccagagagctcttggaactaaagaa

SEQ ID NO: 5240921 - DNA, 25 bp, Homo sapien
gtctttctctcaaacatggcaaagg

SEQ ID NO: 5240922 - DNA, 25 bp, Homo sapien
cagagcagagcagttcagtaatcaa

SEQ ID NO: 5240923 - DNA, 25 bp, Homo sapien
tgaagtagggtccaccaaacctcta

SEQ ID NO: 5240924 - DNA, 25 bp, Homo sapien
agagggagcatcctctcagagcaga

SEQ ID NO: 5240925 - DNA, 25 bp, Homo sapien
ccctagggcctactatataaaatga

SEQ ID NO: 5240926 - DNA, 25 bp, Homo sapien
gagtgaatggaagaaacgtgatgta

SEQ ID NO: 5240927 - DNA, 25 bp, Homo sapien
gtagaacacttcttggcccaaagca

SEQ ID NO: 5240928 - DNA, 25 bp, Homo sapien
cccatatgatgatcaatcttctgga

SEQ ID NO: 5240929 - DNA, 25 bp, Homo sapien
ggataaataagggtcaatattccag

SEQ ID NO: 5240930 - DNA, 25 bp, Homo sapien
ttgaaccagcatgccacacttcact

SEQ ID NO: 5240931 - DNA, 25 bp, Homo sapien
ctttgaaccagcatgccacacttca

SEQ ID NO: 5240932 - DNA, 25 bp, Homo sapien
accagcatgccacacttcactttag

SEQ ID NO: 5240933 - DNA, 25 bp, Homo sapien
cacttcactttagcctgggctttca

SEQ ID NO: 5240934 - DNA, 25 bp, Homo sapien
gctgcaatgaatatacgcatggaaa

SEQ ID NO: 5240935 - DNA, 25 bp, Homo sapien
tgttgttccccctcacgtgtctgtg

SEQ ID NO: 5240936 - DNA, 25 bp, Homo sapien
gaatatacgcatggaaataccattt

SEQ ID NO: 5240937 - DNA, 25 bp, Homo sapien
gcaatgaatatacgcatggaaatac

SEQ ID NO: 5240938 - DNA, 25 bp, Homo sapien
ctctgccatatcaggatgctccttg

SEQ ID NO: 5240939 - DNA, 25 bp, Homo sapien
gggtctacatgtaacttggcaatga

SEQ ID NO: 5240940 - DNA, 25 bp, Homo sapien
gatgctccttggtttggggtctaca

SEQ ID NO: 5240941 - DNA, 25 bp, Homo sapien
tgtaacttggcaatgactgtttgtt

SEQ ID NO: 5240942 - DNA, 25 bp, Homo sapien
gaggagttggaggctccttgtcact

SEQ ID NO: 5240943 - DNA, 25 bp, Homo sapien
ggagttggaggctccttgtcactca

SEQ ID NO: 5240944 - DNA, 25 bp, Homo sapien
aaatgcgacaggagagctggtgagg

SEQ ID NO: 5240945 - DNA, 25 bp, Homo sapien
tcaaatgcgacaggagagctggtga

SEQ ID NO: 5240946 - DNA, 25 bp, Homo sapien
aatggaatgctccatgaattgacat

SEQ ID NO: 5240947 - DNA, 25 bp, Homo sapien
tgaattgacatgtcatccttgctga

SEQ ID NO: 5240948 - DNA, 25 bp, Homo sapien
gaattgacatgtcatccttgctgag

SEQ ID NO: 5240949 - DNA, 25 bp, Homo sapien
tgacactgaattggaaaagcttcca

SEQ ID NO: 5240950 - DNA, 25 bp, Homo sapien
atgacactgaattggaaaagcttcc

SEQ ID NO: 5240951 - DNA, 25 bp, Homo sapien
ggaaaagcttccagcccatcatcta

SEQ ID NO: 5240952 - DNA, 25 bp, Homo sapien
attggaaaagcttccagcccatcat

SEQ ID NO: 5240953 - DNA, 25 bp, Homo sapien
cagtaagtgcagtcaattgaaatcc

SEQ ID NO: 5240954 - DNA, 25 bp, Homo sapien
tacgtgtccagaaatgattctaccc

SEQ ID NO: 5240955 - DNA, 25 bp, Homo sapien
cttgacctcagcaatagggactacg

SEQ ID NO: 5240956 - DNA, 25 bp, Homo sapien
tccaaagtggatactgtggccatca

SEQ ID NO: 5240957 - DNA, 25 bp, Homo sapien
gtggccatcagtgactccttccttg

SEQ ID NO: 5240958 - DNA, 25 bp, Homo sapien
cctagcttcttctgaatgtctgcct

SEQ ID NO: 5240959 - DNA, 25 bp, Homo sapien
attaatataagacgcttctcctcct

SEQ ID NO: 5240960 - DNA, 25 bp, Homo sapien
tctcctcctagcttcttctgaatgt

SEQ ID NO: 5240961 - DNA, 25 bp, Homo sapien
taagacgcttctcctcctagcttct

SEQ ID NO: 5240962 - DNA, 25 bp, Homo sapien
aaaagccaagccacacttccatttt

SEQ ID NO: 5240963 - DNA, 25 bp, Homo sapien
taaaaagccaagccacacttccatt

SEQ ID NO: 5240964 - DNA, 25 bp, Homo sapien
agccaagccacacttccatttttgg

SEQ ID NO: 5240965 - DNA, 25 bp, Homo sapien
ccaagccacacttccatttttggcc

SEQ ID NO: 5240966 - DNA, 25 bp, Homo sapien
tattcagcgatcagtctcttttcca

SEQ ID NO: 5240967 - DNA, 25 bp, Homo sapien
tgggtggatggcattccatattcag

SEQ ID NO: 5240968 - DNA, 25 bp, Homo sapien
gacggggccacttcaagacatcctt

SEQ ID NO: 5240969 - DNA, 25 bp, Homo sapien
cattccatattcagcgatcagtctc

SEQ ID NO: 5240970 - DNA, 25 bp, Homo sapien
ccatagtagagataaggagggtgaa

SEQ ID NO: 5240971 - DNA, 25 bp, Homo sapien
tctgtccatagtagagataaggagg

SEQ ID NO: 5240972 - DNA, 25 bp, Homo sapien
tgtccatagtagagataaggagggt

SEQ ID NO: 5240973 - DNA, 25 bp, Homo sapien
tccatagtagagataaggagggtga

SEQ ID NO: 5240974 - DNA, 25 bp, Homo sapien
cactacgtccttctagggcagctga

SEQ ID NO: 5240975 - DNA, 25 bp, Homo sapien
ttgggtacaacatggctcagcagcc

SEQ ID NO: 5240976 - DNA, 25 bp, Homo sapien
ggcaccaagatcaacccaatgggag

SEQ ID NO: 5240977 - DNA, 25 bp, Homo sapien
cagacattgtttgaccccggcatga

SEQ ID NO: 5240978 - DNA, 25 bp, Homo sapien
caggaccgtatgcatcccagtgtag

SEQ ID NO: 5240979 - DNA, 25 bp, Homo sapien
gaccgtatgcatcccagtgtagagc

SEQ ID NO: 5240980 - DNA, 25 bp, Homo sapien
caaggtggaaaacaccacggccatc

SEQ ID NO: 5240981 - DNA, 25 bp, Homo sapien
gtatgcatcccagtgtagagcctgc

SEQ ID NO: 5240982 - DNA, 25 bp, Homo sapien
cactggagacccctgatttcaggcc

SEQ ID NO: 5240983 - DNA, 25 bp, Homo sapien
cttgcaagggcactggagacccctg

SEQ ID NO: 5240984 - DNA, 25 bp, Homo sapien
gggcactggagacccctgatttcag

SEQ ID NO: 5240985 - DNA, 25 bp, Homo sapien
gagacccctgatttcaggcccctct

SEQ ID NO: 5240986 - DNA, 25 bp, Homo sapien
ggagagaacctctttgtaacacgaa

SEQ ID NO: 5240987 - DNA, 25 bp, Homo sapien
ccaccagtgtggtgtgacgtgggat

SEQ ID NO: 5240988 - DNA, 25 bp, Homo sapien
cacgaagtggcagtgtagcaaatag

SEQ ID NO: 5240989 - DNA, 25 bp, Homo sapien
tattgaagtctatgaacatatttgg

SEQ ID NO: 5240990 - DNA, 25 bp, Homo sapien
gccattctctggtcctgtagcctga

SEQ ID NO: 5240991 - DNA, 25 bp, Homo sapien
ggtcctgtagcctgactggtacctg

SEQ ID NO: 5240992 - DNA, 25 bp, Homo sapien
acctgggcctaagcctgagtcaggg

SEQ ID NO: 5240993 - DNA, 25 bp, Homo sapien
ctgggcctaagcctgagtcagggtc

SEQ ID NO: 5240994 - DNA, 25 bp, Homo sapien
ctagtccaaagccagaacacagttt

SEQ ID NO: 5240995 - DNA, 25 bp, Homo sapien
tttgtatggtctgcagataatttag

SEQ ID NO: 5240996 - DNA, 25 bp, Homo sapien
tagtccaaagccagaacacagtttt

SEQ ID NO: 5240997 - DNA, 25 bp, Homo sapien
aaaggatgcgagtggcttctggtct

SEQ ID NO: 5240998 - DNA, 25 bp, Homo sapien
ggtgcttgaccaacttctgtctttg

SEQ ID NO: 5240999 - DNA, 25 bp, Homo sapien
tgctccagccctttcgactgtggct

SEQ ID NO: 5241000 - DNA, 25 bp, Homo sapien
ccaactggtttctccactgcggcag

SEQ ID NO: 5241001 - DNA, 25 bp, Homo sapien
ttctgatcagaagcgtggcccagga

SEQ ID NO: 5241002 - DNA, 25 bp, Homo sapien
ctggcagagggacgtccaaaaggac

SEQ ID NO: 5241003 - DNA, 25 bp, Homo sapien
cacactgccctgatggttatttgaa

SEQ ID NO: 5241004 - DNA, 25 bp, Homo sapien
gaaaactcggaaatactagcataga

SEQ ID NO: 5241005 - DNA, 25 bp, Homo sapien
ttgaatgctaaacatttccatctgg

SEQ ID NO: 5241006 - DNA, 25 bp, Homo sapien
gatgtcctgtcagctcccttaaacc

SEQ ID NO: 5241007 - DNA, 25 bp, Homo sapien
ctggatgtcctgtcagctcccttaa

SEQ ID NO: 5241008 - DNA, 25 bp, Homo sapien
tgaatgctaaacatttccatctgga

SEQ ID NO: 5241009 - DNA, 25 bp, Homo sapien
gcagattctgtctttgagccttgtg

SEQ ID NO: 5241010 - DNA, 25 bp, Homo sapien
gagtttacatcgctccctggcttca

SEQ ID NO: 5241011 - DNA, 25 bp, Homo sapien
ctttctgcatcctaaacatgggcat

SEQ ID NO: 5241012 - DNA, 25 bp, Homo sapien
aactctccattccctatcagtgtgc

SEQ ID NO: 5241013 - DNA, 25 bp, Homo sapien
cctgaaatagcctggttcttctgtg

SEQ ID NO: 5241014 - DNA, 25 bp, Homo sapien
atttccccttggggatccatgaggt

SEQ ID NO: 5241015 - DNA, 25 bp, Homo sapien
tggacattcattggctgtttcttca

SEQ ID NO: 5241016 - DNA, 25 bp, Homo sapien
tccagaatcctatggtcactccagc

SEQ ID NO: 5241017 - DNA, 25 bp, Homo sapien
tccaggcagtcgatgaaggtccagg

SEQ ID NO: 5241018 - DNA, 25 bp, Homo sapien
cagggtaattgtaacacaggaagaa

SEQ ID NO: 5241019 - DNA, 25 bp, Homo sapien
cccgggttgggctgtagtaatcaga

SEQ ID NO: 5241020 - DNA, 25 bp, Homo sapien
tgggatgttctgaataacagggaga

SEQ ID NO: 5241021 - DNA, 25 bp, Homo sapien
tgttctgaataacagggagagattc

SEQ ID NO: 5241022 - DNA, 25 bp, Homo sapien
taacagggagagattcagcgggctt

SEQ ID NO: 5241023 - DNA, 25 bp, Homo sapien
tgagtggtgggatgttctgaataac

SEQ ID NO: 5241024 - DNA, 25 bp, Homo sapien
tgcagtgagagattttgtacaagct

SEQ ID NO: 5241025 - DNA, 25 bp, Homo sapien
cttgaaccatgagtataatacttgc

SEQ ID NO: 5241026 - DNA, 25 bp, Homo sapien
tgtacaagctgacgaaccaagagga

SEQ ID NO: 5241027 - DNA, 25 bp, Homo sapien
aagaggatcaacacaattcccactg

SEQ ID NO: 5241028 - DNA, 25 bp, Homo sapien
ccagaaacctgtgaagcatcggcac

SEQ ID NO: 5241029 - DNA, 25 bp, Homo sapien
cgcagatgccaacagatgtgtaggt

SEQ ID NO: 5241030 - DNA, 25 bp, Homo sapien
acttgtaaggcacttcaatctccag

SEQ ID NO: 5241031 - DNA, 25 bp, Homo sapien
cacaaaggttgtagcgcagatgcca

SEQ ID NO: 5241032 - DNA, 25 bp, Homo sapien
taactttcctatgtcttggctttca

SEQ ID NO: 5241033 - DNA, 25 bp, Homo sapien
aaataagttgtcaagatttgcctac

SEQ ID NO: 5241034 - DNA, 25 bp, Homo sapien
ttcatgtccagtgggctagtttcca

SEQ ID NO: 5241035 - DNA, 25 bp, Homo sapien
tccagtgggctagtttccaactgtt

SEQ ID NO: 5241036 - DNA, 25 bp, Homo sapien
ttatctggtagtagcaagacagccg

SEQ ID NO: 5241037 - DNA, 25 bp, Homo sapien
tatcatcccaacagtaaggccgtag

SEQ ID NO: 5241038 - DNA, 25 bp, Homo sapien
gaatgccgtttcatatggtgccacc

SEQ ID NO: 5241039 - DNA, 25 bp, Homo sapien
tgtaaaagcagtcaaacggcaggtc

SEQ ID NO: 5241040 - DNA, 25 bp, Homo sapien
taaagtagaaagcactgtctggctg

SEQ ID NO: 5241041 - DNA, 25 bp, Homo sapien
cacattggaacggattactcctgca

SEQ ID NO: 5241042 - DNA, 25 bp, Homo sapien
taaaagccccgtggagtgctggaga

SEQ ID NO: 5241043 - DNA, 25 bp, Homo sapien
tgttctgaaaggcagacgtgctcct

SEQ ID NO: 5241044 - DNA, 25 bp, Homo sapien
acgttatcaccaaatttgagctgac

SEQ ID NO: 5241045 - DNA, 25 bp, Homo sapien
taaagacttaattccttcacgccag

SEQ ID NO: 5241046 - DNA, 25 bp, Homo sapien
gattgcaggtgtacaaccactatgc

SEQ ID NO: 5241047 - DNA, 25 bp, Homo sapien
taggatgcatgctaatcaactgtga

SEQ ID NO: 5241048 - DNA, 25 bp, Homo sapien
ggcaagtcgttctgtcactaatcca

SEQ ID NO: 5241049 - DNA, 25 bp, Homo sapien
tatatacttagttatgtcagtatgg

SEQ ID NO: 5241050 - DNA, 25 bp, Homo sapien
tctaatcagttttcctatatactta

SEQ ID NO: 5241051 - DNA, 25 bp, Homo sapien
cagtgtatttagatccattacagtc

SEQ ID NO: 5241052 - DNA, 25 bp, Homo sapien
gattttagtcagtgtatttagatcc

SEQ ID NO: 5241053 - DNA, 25 bp, Homo sapien
caccggacgaaaggaagattcatgt

SEQ ID NO: 5241054 - DNA, 25 bp, Homo sapien
ccctgtggaaaatgcgtgctataac

SEQ ID NO: 5241055 - DNA, 25 bp, Homo sapien
ttcagacctcagttaaccacggaaa

SEQ ID NO: 5241056 - DNA, 25 bp, Homo sapien
tatacactgtggacacaccggacga

SEQ ID NO: 5241057 - DNA, 25 bp, Homo sapien
tgggaagatacaccacgttctttca

SEQ ID NO: 5241058 - DNA, 25 bp, Homo sapien
tctttcatagaaatacgcagcatca

SEQ ID NO: 5241059 - DNA, 25 bp, Homo sapien
aatacgcagcatcataaagatatca

SEQ ID NO: 5241060 - DNA, 25 bp, Homo sapien
gatacaccacgttctttcatagaaa

SEQ ID NO: 5241061 - DNA, 25 bp, Homo sapien
tcatagggctccagttagtgtcact

SEQ ID NO: 5241062 - DNA, 25 bp, Homo sapien
taaagcctcttgaccgttcataggg

SEQ ID NO: 5241063 - DNA, 25 bp, Homo sapien
tgacatatatctgtggagaaccctg

SEQ ID NO: 5241064 - DNA, 25 bp, Homo sapien
tagtcctggtgcaagctacatttcc

SEQ ID NO: 5241065 - DNA, 25 bp, Homo sapien
tcagcacagcacattggtggaaaag

SEQ ID NO: 5241066 - DNA, 25 bp, Homo sapien
cattggtgggagcagtacctaaact

SEQ ID NO: 5241067 - DNA, 25 bp, Homo sapien
ttcaaaagagtagagatagagtggc

SEQ ID NO: 5241068 - DNA, 25 bp, Homo sapien
agcaaggcagtctcattcagcacag

SEQ ID NO: 5241069 - DNA, 25 bp, Homo sapien
tgtactaactactgccacttcaggg

SEQ ID NO: 5241070 - DNA, 25 bp, Homo sapien
gctgtagcagatccgggagctgttt

SEQ ID NO: 5241071 - DNA, 25 bp, Homo sapien
aagttcactcagatacacagctgcg

SEQ ID NO: 5241072 - DNA, 25 bp, Homo sapien
tctgctatggctggatgtggcttca

SEQ ID NO: 5241073 - DNA, 25 bp, Homo sapien
gatacgtccttttgcggtagcagca

SEQ ID NO: 5241074 - DNA, 25 bp, Homo sapien
ggcaagaatgcagctaccttcctat

SEQ ID NO: 5241075 - DNA, 25 bp, Homo sapien
tactaaagatcgatatgacagcttc

SEQ ID NO: 5241076 - DNA, 25 bp, Homo sapien
tagcagcagttctccgtaatataaa

SEQ ID NO: 5241077 - DNA, 25 bp, Homo sapien
ggcctggccgggcgaggacggcgcc

SEQ ID NO: 5241078 - DNA, 25 bp, Homo sapien
ctggccgggcgaggacggcgccagc

SEQ ID NO: 5241079 - DNA, 25 bp, Homo sapien
gcctggccgggcgaggacggcgcca

SEQ ID NO: 5241080 - DNA, 25 bp, Homo sapien
ggccgggcgaggacggcgccagcca

SEQ ID NO: 5241081 - DNA, 25 bp, Homo sapien
tgttgagcggtgcaaactctacctt

SEQ ID NO: 5241082 - DNA, 25 bp, Homo sapien
ggacccactgcagcacggccaccgt

SEQ ID NO: 5241083 - DNA, 25 bp, Homo sapien
ctgcagcacggccaccgtctgcagc

SEQ ID NO: 5241084 - DNA, 25 bp, Homo sapien
gccgcgccagctggatgttgagcgg

SEQ ID NO: 5241085 - DNA, 25 bp, Homo sapien
tgaggttctcgtgaggaaaccagag

SEQ ID NO: 5241086 - DNA, 25 bp, Homo sapien
ttagcgatgaggttctcgtgaggaa

SEQ ID NO: 5241087 - DNA, 25 bp, Homo sapien
aggaaaccagagtccacgttagctc

SEQ ID NO: 5241088 - DNA, 25 bp, Homo sapien
gagtccacgttagctccaaatgccc

SEQ ID NO: 5241089 - DNA, 25 bp, Homo sapien
ggatgtaaaggaacaaatagttgtg

SEQ ID NO: 5241090 - DNA, 25 bp, Homo sapien
tggggtatgccagtcaaagtaaagc

SEQ ID NO: 5241091 - DNA, 25 bp, Homo sapien
agtaaagccacatcaaataagggat

SEQ ID NO: 5241092 - DNA, 25 bp, Homo sapien
gagtccaatttttgatccagctgga

SEQ ID NO: 5241093 - DNA, 25 bp, Homo sapien
atagttgtgacttggatccaaatct

SEQ ID NO: 5241094 - DNA, 25 bp, Homo sapien
tccatgggggtgaaacccaaatata

SEQ ID NO: 5241095 - DNA, 25 bp, Homo sapien
tggatccaaatcttgagttttgata

SEQ ID NO: 5241096 - DNA, 25 bp, Homo sapien
caggtccttgaagtcagaataattt

SEQ ID NO: 5241097 - DNA, 25 bp, Homo sapien
catcacatattctcgaaagacagga

SEQ ID NO: 5241098 - DNA, 25 bp, Homo sapien
tattctcgaaagacaggacaccaga

SEQ ID NO: 5241099 - DNA, 25 bp, Homo sapien
tctcgaaagacaggacaccagaacc

SEQ ID NO: 5241100 - DNA, 25 bp, Homo sapien
cacatattctcgaaagacaggacac

SEQ ID NO: 5241101 - DNA, 25 bp, Homo sapien
cctgctaccccaaagcactgtggaa

SEQ ID NO: 5241102 - DNA, 25 bp, Homo sapien
gacaccataggaagtgccagatgag

SEQ ID NO: 5241103 - DNA, 25 bp, Homo sapien
tactctaagagaccataaacacaca

SEQ ID NO: 5241104 - DNA, 25 bp, Homo sapien
tctacatctgaatacacaaactgca

SEQ ID NO: 5241105 - DNA, 25 bp, Homo sapien
cccggcctggactcttatttctgag

SEQ ID NO: 5241106 - DNA, 25 bp, Homo sapien
ttaacaaatcctttccgctggcgga

SEQ ID NO: 5241107 - DNA, 25 bp, Homo sapien
cgctggcggatgaacagagtgaact

SEQ ID NO: 5241108 - DNA, 25 bp, Homo sapien
gcatccagtgattcttttgcacccc

SEQ ID NO: 5241109 - DNA, 25 bp, Homo sapien
taccatgtaggacacacttttcttg

SEQ ID NO: 5241110 - DNA, 25 bp, Homo sapien
ggtcattaggccaaaattgtactga

SEQ ID NO: 5241111 - DNA, 25 bp, Homo sapien
aaaactcccctggcatgaaacaggg

SEQ ID NO: 5241112 - DNA, 25 bp, Homo sapien
tgtcagtttgtttaaacagttcatt

SEQ ID NO: 5241113 - DNA, 25 bp, Homo sapien
tgtggatggctttcctataggtcat

SEQ ID NO: 5241114 - DNA, 25 bp, Homo sapien
gcccagcctagagtgaatttataat

SEQ ID NO: 5241115 - DNA, 25 bp, Homo sapien
tccagagagcttaagcatgctcaca

SEQ ID NO: 5241116 - DNA, 25 bp, Homo sapien
ccctttaaactgtgagatagacata

SEQ ID NO: 5241117 - DNA, 25 bp, Homo sapien
tccagtgagagaggttaatgtaact

SEQ ID NO: 5241118 - DNA, 25 bp, Homo sapien
ttgagtcaaatgagctactgtgctg

SEQ ID NO: 5241119 - DNA, 25 bp, Homo sapien
cctcagcagacactggattgtcggg

SEQ ID NO: 5241120 - DNA, 25 bp, Homo sapien
acactggattgtcgggaccctggtg

SEQ ID NO: 5241121 - DNA, 25 bp, Homo sapien
acaccactccatctgataacaaata

SEQ ID NO: 5241122 - DNA, 25 bp, Homo sapien
catataggtctgatgtaactcctca

SEQ ID NO: 5241123 - DNA, 25 bp, Homo sapien
tcagagtctgacgaacagggatcgg

SEQ ID NO: 5241124 - DNA, 25 bp, Homo sapien
atctgctcctgggtcgggttcagag

SEQ ID NO: 5241125 - DNA, 25 bp, Homo sapien
cctaagttcctccatataggtctga

SEQ ID NO: 5241126 - DNA, 25 bp, Homo sapien
gagtctcgtgctctggaatgccata

SEQ ID NO: 5241127 - DNA, 25 bp, Homo sapien
agtctcgtgctctggaatgccatac

SEQ ID NO: 5241128 - DNA, 25 bp, Homo sapien
aagagtctcgtgctctggaatgcca

SEQ ID NO: 5241129 - DNA, 25 bp, Homo sapien
agagtctcgtgctctggaatgccat

SEQ ID NO: 5241130 - DNA, 25 bp, Homo sapien
tccttctttatgccttattacagcc

SEQ ID NO: 5241131 - DNA, 25 bp, Homo sapien
tatccttctttatgccttattacag

SEQ ID NO: 5241132 - DNA, 25 bp, Homo sapien
ttctcacaataggatggtctcttat

SEQ ID NO: 5241133 - DNA, 25 bp, Homo sapien
attctcacaataggatggtctctta

SEQ ID NO: 5241134 - DNA, 25 bp, Homo sapien
tgatggtatgttcttgggtcaccac

SEQ ID NO: 5241135 - DNA, 25 bp, Homo sapien
gtatgttcttgggtcaccacctcgt

SEQ ID NO: 5241136 - DNA, 25 bp, Homo sapien
gttgatggtatgttcttgggtcacc

SEQ ID NO: 5241137 - DNA, 25 bp, Homo sapien
aatgttgatggtatgttcttgggtc

SEQ ID NO: 5241138 - DNA, 25 bp, Homo sapien
accgcacatggattccctataggac

SEQ ID NO: 5241139 - DNA, 25 bp, Homo sapien
tagttcttgtccacattgactgtct

SEQ ID NO: 5241140 - DNA, 25 bp, Homo sapien
tcttgtccacattgactgtctgtag

SEQ ID NO: 5241141 - DNA, 25 bp, Homo sapien
tgaatcttcaccctcattacgtttt

SEQ ID NO: 5241142 - DNA, 25 bp, Homo sapien
gttcttgtccacattgactgtctgt

SEQ ID NO: 5241143 - DNA, 25 bp, Homo sapien
ttaaattgccttttcgccctagtgc

SEQ ID NO: 5241144 - DNA, 25 bp, Homo sapien
gatcacgtcatatagaggcttctac

SEQ ID NO: 5241145 - DNA, 25 bp, Homo sapien
aacaggaggatttgactccctcgca

SEQ ID NO: 5241146 - DNA, 25 bp, Homo sapien
gccctagtgcttcgacagtaatctc

SEQ ID NO: 5241147 - DNA, 25 bp, Homo sapien
agccttccgagtcaatactgcctgg

SEQ ID NO: 5241148 - DNA, 25 bp, Homo sapien
gataaaatattggtactggattcat

SEQ ID NO: 5241149 - DNA, 25 bp, Homo sapien
gtactggattcatgtgctgctcctg

SEQ ID NO: 5241150 - DNA, 25 bp, Homo sapien
acacagccttccgagtcaatactgc

SEQ ID NO: 5241151 - DNA, 25 bp, Homo sapien
tgaccccaagcttgcagctggcatt

SEQ ID NO: 5241152 - DNA, 25 bp, Homo sapien
aaggtggtccaagataggagagcat

SEQ ID NO: 5241153 - DNA, 25 bp, Homo sapien
cactagaaggtggtccaagatagga

SEQ ID NO: 5241154 - DNA, 25 bp, Homo sapien
attgttgtcaacactagaaggtggt

SEQ ID NO: 5241155 - DNA, 25 bp, Homo sapien
gaggccatctgtttgcgtttcctgg

SEQ ID NO: 5241156 - DNA, 25 bp, Homo sapien
ggccatctgtttgcgtttcctggtc

SEQ ID NO: 5241157 - DNA, 25 bp, Homo sapien
atggaggccatctgtttgcgtttcc

SEQ ID NO: 5241158 - DNA, 25 bp, Homo sapien
catctgtttgcgtttcctggtcttc

SEQ ID NO: 5241159 - DNA, 25 bp, Homo sapien
tagtcataatgagactgagttgaaa

SEQ ID NO: 5241160 - DNA, 25 bp, Homo sapien
tcaataaaggcttggaggtcagctt

SEQ ID NO: 5241161 - DNA, 25 bp, Homo sapien
gagatggacatagaggcaaagctta

SEQ ID NO: 5241162 - DNA, 25 bp, Homo sapien
gcttaaagtaagaatcgcaattagc

SEQ ID NO: 5241163 - DNA, 25 bp, Homo sapien
ccccacattcgatcggtcactaagt

SEQ ID NO: 5241164 - DNA, 25 bp, Homo sapien
tcggtcactaagtcctgttccttct

SEQ ID NO: 5241165 - DNA, 25 bp, Homo sapien
gttgtgagtccctcacatcactgcc

SEQ ID NO: 5241166 - DNA, 25 bp, Homo sapien
gctcaatcaaatctgaacctcgttg

SEQ ID NO: 5241167 - DNA, 25 bp, Homo sapien
gacactaccaaggtaccaggatggg

SEQ ID NO: 5241168 - DNA, 25 bp, Homo sapien
gttgcctttggacactaccaaggta

SEQ ID NO: 5241169 - DNA, 25 bp, Homo sapien
tggtgttgttgcctttggacactac

SEQ ID NO: 5241170 - DNA, 25 bp, Homo sapien
tgtggtcagagttggcttgagctct

SEQ ID NO: 5241171 - DNA, 25 bp, Homo sapien
tgctggtatccctggtcttgggatc

SEQ ID NO: 5241172 - DNA, 25 bp, Homo sapien
ctgtggtgctggtatccctggtctt

SEQ ID NO: 5241173 - DNA, 25 bp, Homo sapien
tatccctggtcttgggatccccatc

SEQ ID NO: 5241174 - DNA, 25 bp, Homo sapien
cccctgctggtccactgcacactca

SEQ ID NO: 5241175 - DNA, 25 bp, Homo sapien
aaatcctgtccctgagtagaagtat

SEQ ID NO: 5241176 - DNA, 25 bp, Homo sapien
tcctgtccctgagtagaagtattca

SEQ ID NO: 5241177 - DNA, 25 bp, Homo sapien
ctgaagaaagacagaggacggcccc

SEQ ID NO: 5241178 - DNA, 25 bp, Homo sapien
ccctgagtagaagtattcatgagga

SEQ ID NO: 5241179 - DNA, 25 bp, Homo sapien
gctccgtgtccctgtcagtggcagt

SEQ ID NO: 5241180 - DNA, 25 bp, Homo sapien
gctaaggcaccgagtgtcctactta

SEQ ID NO: 5241181 - DNA, 25 bp, Homo sapien
ttgttctgtacacttcagcttgaat

SEQ ID NO: 5241182 - DNA, 25 bp, Homo sapien
gaggcaaccagctaaggcaccgagt

SEQ ID NO: 5241183 - DNA, 25 bp, Homo sapien
tctctggggagacttgtgctgaatc

SEQ ID NO: 5241184 - DNA, 25 bp, Homo sapien
cattctctgctctaagacagacaga

SEQ ID NO: 5241185 - DNA, 25 bp, Homo sapien
gagagactgtgactagccggaagaa

SEQ ID NO: 5241186 - DNA, 25 bp, Homo sapien
aagaatcttccggtcaaagccaagg

SEQ ID NO: 5241187 - DNA, 25 bp, Homo sapien
acctgttacctgaggctctctgtct

SEQ ID NO: 5241188 - DNA, 25 bp, Homo sapien
gctttgtcacctcaaaggtccctgg

SEQ ID NO: 5241189 - DNA, 25 bp, Homo sapien
tgtcatgattaagcacagtgcatac

SEQ ID NO: 5241190 - DNA, 25 bp, Homo sapien
tacaaagccagtgcgacagagaagg

SEQ ID NO: 5241191 - DNA, 25 bp, Homo sapien
aaggacaggcgccttctccgctttc

SEQ ID NO: 5241192 - DNA, 25 bp, Homo sapien
aatagcaccgagtctttcattctta

SEQ ID NO: 5241193 - DNA, 25 bp, Homo sapien
gagcggtccctagaatagcaccgag

SEQ ID NO: 5241194 - DNA, 25 bp, Homo sapien
ggtccctagaatagcaccgagtctt

SEQ ID NO: 5241195 - DNA, 25 bp, Homo sapien
cctagaatagcaccgagtctttcat

SEQ ID NO: 5241196 - DNA, 25 bp, Homo sapien
tagtgttcttgggagaagccctcaa

SEQ ID NO: 5241197 - DNA, 25 bp, Homo sapien
gaaatctaccagtgaactagtcagc

SEQ ID NO: 5241198 - DNA, 25 bp, Homo sapien
ggctggactctgtaacctcttagtg

SEQ ID NO: 5241199 - DNA, 25 bp, Homo sapien
tactctgacaaggaagatgtgcttt

SEQ ID NO: 5241200 - DNA, 25 bp, Homo sapien
ggttcagctccaccaggcccagcat

SEQ ID NO: 5241201 - DNA, 25 bp, Homo sapien
tgcctgggttcagctccaccaggcc

SEQ ID NO: 5241202 - DNA, 25 bp, Homo sapien
ctctgagcacactggctctgcctgg

SEQ ID NO: 5241203 - DNA, 25 bp, Homo sapien
tgagcacactggctctgcctgggtt

SEQ ID NO: 5241204 - DNA, 25 bp, Homo sapien
gcccatctcacgcagtgtgaactgt

SEQ ID NO: 5241205 - DNA, 25 bp, Homo sapien
ttccagcccatctcacgcagtgtga

SEQ ID NO: 5241206 - DNA, 25 bp, Homo sapien
catctcacgcagtgtgaactgtagg

SEQ ID NO: 5241207 - DNA, 25 bp, Homo sapien
aacattccagcccatctcacgcagt

SEQ ID NO: 5241208 - DNA, 25 bp, Homo sapien
caggattgagtcttgttcatcaact

SEQ ID NO: 5241209 - DNA, 25 bp, Homo sapien
tcatcaactcctgagctaccttcgt

SEQ ID NO: 5241210 - DNA, 25 bp, Homo sapien
gatgacggtatggatatgaaatgga

SEQ ID NO: 5241211 - DNA, 25 bp, Homo sapien
tgagctaccttcgtggaagatgacg

SEQ ID NO: 5241212 - DNA, 25 bp, Homo sapien
gatacctgactcaggcaaactgttc

SEQ ID NO: 5241213 - DNA, 25 bp, Homo sapien
gaacctaaagggatggatacctgac

SEQ ID NO: 5241214 - DNA, 25 bp, Homo sapien
tgttgaaatcttatcaaaggataca

SEQ ID NO: 5241215 - DNA, 25 bp, Homo sapien
tgggccaagggccaatcgagaacct

SEQ ID NO: 5241216 - DNA, 25 bp, Homo sapien
aaggagtttgccattgtttctcgtt

SEQ ID NO: 5241217 - DNA, 25 bp, Homo sapien
cactcgttgcctatgcagagaggct

SEQ ID NO: 5241218 - DNA, 25 bp, Homo sapien
gcagccacagcagcgtctgttgagc

SEQ ID NO: 5241219 - DNA, 25 bp, Homo sapien
agacaactgcagtgtcgcagcccgg

SEQ ID NO: 5241220 - DNA, 25 bp, Homo sapien
tctgttgagcggaaccgcctgggac

SEQ ID NO: 5241221 - DNA, 25 bp, Homo sapien
tctgttactgtggaaggtgtcccct

SEQ ID NO: 5241222 - DNA, 25 bp, Homo sapien
taggaactctgcacaaacccttttc

SEQ ID NO: 5241223 - DNA, 25 bp, Homo sapien
tagtactccataggttacaggcctg

SEQ ID NO: 5241224 - DNA, 25 bp, Homo sapien
tgagggatgaaattaagactgagcc

SEQ ID NO: 5241225 - DNA, 25 bp, Homo sapien
ccaggctggactcatgccacattgg

SEQ ID NO: 5241226 - DNA, 25 bp, Homo sapien
gccaggctggactcatgccacattg

SEQ ID NO: 5241227 - DNA, 25 bp, Homo sapien
ggctggactcatgccacattggcca

SEQ ID NO: 5241228 - DNA, 25 bp, Homo sapien
tggtgggagcatccatcacaccgat

SEQ ID NO: 5241229 - DNA, 25 bp, Homo sapien
tcccactctatgcaccagggaaggg

SEQ ID NO: 5241230 - DNA, 25 bp, Homo sapien
ttggtgtccactagcaaagtacctg

SEQ ID NO: 5241231 - DNA, 25 bp, Homo sapien
aaatatgtaactgtcggccaggagc

SEQ ID NO: 5241232 - DNA, 25 bp, Homo sapien
ggaaccacagcacccaactcagtta

SEQ ID NO: 5241233 - DNA, 25 bp, Homo sapien
gtggcttgatcacagttttcactgc

SEQ ID NO: 5241234 - DNA, 25 bp, Homo sapien
tagagaccaagtctccctatactgc

SEQ ID NO: 5241235 - DNA, 25 bp, Homo sapien
cagcacccaactcagttagtatttt

SEQ ID NO: 5241236 - DNA, 25 bp, Homo sapien
caatggtaggaggtactaggtgctt

SEQ ID NO: 5241237 - DNA, 25 bp, Homo sapien
gtgctttgaagatatgcgcccttgt

SEQ ID NO: 5241238 - DNA, 25 bp, Homo sapien
aagatatgcgcccttgtgtcaaaac

SEQ ID NO: 5241239 - DNA, 25 bp, Homo sapien
cagttgacaatggtaggaggtacta

SEQ ID NO: 5241240 - DNA, 25 bp, Homo sapien
tcttaggcgcaagagagatacaaca

SEQ ID NO: 5241241 - DNA, 25 bp, Homo sapien
gagatgacgtgttttcctaagagaa

SEQ ID NO: 5241242 - DNA, 25 bp, Homo sapien
aaaaagtaggttgccacagggatca

SEQ ID NO: 5241243 - DNA, 25 bp, Homo sapien
cagactaacgtatcaaatggttcta

SEQ ID NO: 5241244 - DNA, 25 bp, Homo sapien
attgattcttatagagttattttcc

SEQ ID NO: 5241245 - DNA, 25 bp, Homo sapien
ctcagatatgcctccctatgttcct

SEQ ID NO: 5241246 - DNA, 25 bp, Homo sapien
tggtaagaccttcactacccacatt

SEQ ID NO: 5241247 - DNA, 25 bp, Homo sapien
tatgcctccctatgttccttactgc

SEQ ID NO: 5241248 - DNA, 25 bp, Homo sapien
cagtccttcccaacaacgaattctg

SEQ ID NO: 5241249 - DNA, 25 bp, Homo sapien
ggtggcaaatgttacagctgtttcc

SEQ ID NO: 5241250 - DNA, 25 bp, Homo sapien
agcttctgagggtggcaaatgttac

SEQ ID NO: 5241251 - DNA, 25 bp, Homo sapien
gtccttcccaacaacgaattctgta

SEQ ID NO: 5241252 - DNA, 25 bp, Homo sapien
tgtcagacttagtagacaagacagc

SEQ ID NO: 5241253 - DNA, 25 bp, Homo sapien
tacaacacaaaatcatgaggcatgc

SEQ ID NO: 5241254 - DNA, 25 bp, Homo sapien
tgtgtagtaatccaaagactggtcg

SEQ ID NO: 5241255 - DNA, 25 bp, Homo sapien
cagaaaagtatgacacacagaaaga

SEQ ID NO: 5241256 - DNA, 25 bp, Homo sapien
agagtacagtacaagattatagctc

SEQ ID NO: 5241257 - DNA, 25 bp, Homo sapien
ttcttcccaagtgacgcaagcagcc

SEQ ID NO: 5241258 - DNA, 25 bp, Homo sapien
ctccaaatccaggactacgatttct

SEQ ID NO: 5241259 - DNA, 25 bp, Homo sapien
caaaactgaagctaactagtaacta

SEQ ID NO: 5241260 - DNA, 25 bp, Homo sapien
tcagcaacaagcaactggagtttgc

SEQ ID NO: 5241261 - DNA, 25 bp, Homo sapien
ggttaaactatgacgcaagaaagca

SEQ ID NO: 5241262 - DNA, 25 bp, Homo sapien
tagatatcgttctaagcactgcgaa

SEQ ID NO: 5241263 - DNA, 25 bp, Homo sapien
gaaaatccactatgttagatatcgt

SEQ ID NO: 5241264 - DNA, 25 bp, Homo sapien
gccaaataatcaccacattccttcc

SEQ ID NO: 5241265 - DNA, 25 bp, Homo sapien
ccactgccaaataatcaccacattc

SEQ ID NO: 5241266 - DNA, 25 bp, Homo sapien
tgccaaataatcaccacattccttc

SEQ ID NO: 5241267 - DNA, 25 bp, Homo sapien
actgccaaataatcaccacattcct

SEQ ID NO: 5241268 - DNA, 25 bp, Homo sapien
aaatacaacacatccatcctctctc

SEQ ID NO: 5241269 - DNA, 25 bp, Homo sapien
caaatacaacacatccatcctctct

SEQ ID NO: 5241270 - DNA, 25 bp, Homo sapien
tttacaaatacaacacatccatcct

SEQ ID NO: 5241271 - DNA, 25 bp, Homo sapien
tacaaatacaacacatccatcctct

SEQ ID NO: 5241272 - DNA, 25 bp, Homo sapien
tcatactgtaaacaggcggctgttc

SEQ ID NO: 5241273 - DNA, 25 bp, Homo sapien
taaagaaaagttacatcggcaaatg

SEQ ID NO: 5241274 - DNA, 25 bp, Homo sapien
cacactggtcccctacaatgtcttg

SEQ ID NO: 5241275 - DNA, 25 bp, Homo sapien
gtaaaaagggagcaagtcagaaaga

SEQ ID NO: 5241276 - DNA, 25 bp, Homo sapien
agaattaacagacttcagcgagaat

SEQ ID NO: 5241277 - DNA, 25 bp, Homo sapien
tagaattaacagacttcagcgagaa

SEQ ID NO: 5241278 - DNA, 25 bp, Homo sapien
aaagtagaattaacagacttcagcg

SEQ ID NO: 5241279 - DNA, 25 bp, Homo sapien
agtagaattaacagacttcagcgag

SEQ ID NO: 5241280 - DNA, 25 bp, Homo sapien
tagatggttttgaagacacgtggtt

SEQ ID NO: 5241281 - DNA, 25 bp, Homo sapien
tatgttttagcttcatggtagatgg

SEQ ID NO: 5241282 - DNA, 25 bp, Homo sapien
tggtagatggttttgaagacacgtg

SEQ ID NO: 5241283 - DNA, 25 bp, Homo sapien
tataaaagaatagggttgatggtat

SEQ ID NO: 5241284 - DNA, 25 bp, Homo sapien
ctgtatgcagaatcaggttttgaat

SEQ ID NO: 5241285 - DNA, 25 bp, Homo sapien
ctaaagtatcacatccagggtataa

SEQ ID NO: 5241286 - DNA, 25 bp, Homo sapien
aaacttcacgtgttcccaagagtct

SEQ ID NO: 5241287 - DNA, 25 bp, Homo sapien
gccaaaccatccaaactattaacag

SEQ ID NO: 5241288 - DNA, 25 bp, Homo sapien
ccagggtataatactgaagccaaac

SEQ ID NO: 5241289 - DNA, 25 bp, Homo sapien
tgccctagacattccaaaccctggt

SEQ ID NO: 5241290 - DNA, 25 bp, Homo sapien
tgcaacccacatctaagccacattt

SEQ ID NO: 5241291 - DNA, 25 bp, Homo sapien
ggaagagctccacaccactgggttg

SEQ ID NO: 5241292 - DNA, 25 bp, Homo sapien
tctagagacagggagtatggtttca

SEQ ID NO: 5241293 - DNA, 25 bp, Homo sapien
taatcgctgttacactgcctctgag

SEQ ID NO: 5241294 - DNA, 25 bp, Homo sapien
caagattcagacctatagtctgggt

SEQ ID NO: 5241295 - DNA, 25 bp, Homo sapien
tggagtccaggctcttaatcgctgt

SEQ ID NO: 5241296 - DNA, 25 bp, Homo sapien
ggtcagaaagccagttaagtggcaa

SEQ ID NO: 5241297 - DNA, 25 bp, Homo sapien
gacatcttcataggaaagccaatta

SEQ ID NO: 5241298 - DNA, 25 bp, Homo sapien
aagccaattatactgtccaagaata

SEQ ID NO: 5241299 - DNA, 25 bp, Homo sapien
ctttggtttctgacccaacatctgt

SEQ ID NO: 5241300 - DNA, 25 bp, Homo sapien
ggtttctgacccaacatctgtaatc

SEQ ID NO: 5241301 - DNA, 25 bp, Homo sapien
gaaaattatacataaaacacgcctg

SEQ ID NO: 5241302 - DNA, 25 bp, Homo sapien
tgcagctatcatccactcggccctg

SEQ ID NO: 5241303 - DNA, 25 bp, Homo sapien
taaaacacgcctgtgcagctatcat

SEQ ID NO: 5241304 - DNA, 25 bp, Homo sapien
tgtgcagctatcatccactcggccc

SEQ ID NO: 5241305 - DNA, 25 bp, Homo sapien
acctcttcagagtaaagtatttcaa

SEQ ID NO: 5241306 - DNA, 25 bp, Homo sapien
ctggacactgggtgaaaattaacat

SEQ ID NO: 5241307 - DNA, 25 bp, Homo sapien
tctccactaactggacactgggtga

SEQ ID NO: 5241308 - DNA, 25 bp, Homo sapien
acagagttctccactaactggacac

SEQ ID NO: 5241309 - DNA, 25 bp, Homo sapien
tgacagtaacttctaaagaggattc

SEQ ID NO: 5241310 - DNA, 25 bp, Homo sapien
tgacagaacaaaattgacagtaact

SEQ ID NO: 5241311 - DNA, 25 bp, Homo sapien
gacagaacaaaattgacagtaactt

SEQ ID NO: 5241312 - DNA, 25 bp, Homo sapien
ggtgacagaacaaaattgacagtaa

SEQ ID NO: 5241313 - DNA, 25 bp, Homo sapien
tcagtatggaagtgtttcggaggtc

SEQ ID NO: 5241314 - DNA, 25 bp, Homo sapien
caccaggtttcagtatggaagtgtt

SEQ ID NO: 5241315 - DNA, 25 bp, Homo sapien
gaagtgtttcggaggtcaactgttg

SEQ ID NO: 5241316 - DNA, 25 bp, Homo sapien
gaagttcaccaggtttcagtatgga

SEQ ID NO: 5241317 - DNA, 25 bp, Homo sapien
ctctgggactaccacattgtgaagg

SEQ ID NO: 5241318 - DNA, 25 bp, Homo sapien
gagccctaaactgttaaatccacag

SEQ ID NO: 5241319 - DNA, 25 bp, Homo sapien
ctgaatgtggagatgaatcataata

SEQ ID NO: 5241320 - DNA, 25 bp, Homo sapien
taatcaacattacacctactcatcc

SEQ ID NO: 5241321 - DNA, 25 bp, Homo sapien
catttaatgcatgaacaatggctgg

SEQ ID NO: 5241322 - DNA, 25 bp, Homo sapien
ctcctagagtggcatataatgtaac

SEQ ID NO: 5241323 - DNA, 25 bp, Homo sapien
aatgatgttggtcacctctgtttca

SEQ ID NO: 5241324 - DNA, 25 bp, Homo sapien
actagtaatgatgttggtcacctct

SEQ ID NO: 5241325 - DNA, 25 bp, Homo sapien
ctcggaccaggtcggtggctttcca

SEQ ID NO: 5241326 - DNA, 25 bp, Homo sapien
catcaacagtgatgatgtgccgcag

SEQ ID NO: 5241327 - DNA, 25 bp, Homo sapien
cagccatggtatgcacaatgatgcc

SEQ ID NO: 5241328 - DNA, 25 bp, Homo sapien
gatgcccttggggaactcggaccag

SEQ ID NO: 5241329 - DNA, 25 bp, Homo sapien
gaaaactgaagcaagacaaggtgag

SEQ ID NO: 5241330 - DNA, 25 bp, Homo sapien
caaggtgagaagatgacaatagatg

SEQ ID NO: 5241331 - DNA, 25 bp, Homo sapien
gatgacaatagatgctatttggatg

SEQ ID NO: 5241332 - DNA, 25 bp, Homo sapien
aaaagcctggagaccgtctctgtag

SEQ ID NO: 5241333 - DNA, 25 bp, Homo sapien
gttactatgtgagatcatgactccc

SEQ ID NO: 5241334 - DNA, 25 bp, Homo sapien
gccatcccagttataccagcaataa

SEQ ID NO: 5241335 - DNA, 25 bp, Homo sapien
tgcaatatctgagggcaatggtttg

SEQ ID NO: 5241336 - DNA, 25 bp, Homo sapien
ccacttgtgtacatgattactgcaa

SEQ ID NO: 5241337 - DNA, 25 bp, Homo sapien
gaaagacagacaagctcagcactta

SEQ ID NO: 5241338 - DNA, 25 bp, Homo sapien
tgcggcatccgtgagaaagacagac

SEQ ID NO: 5241339 - DNA, 25 bp, Homo sapien
gtggtgaagagtaaccaatgcggca

SEQ ID NO: 5241340 - DNA, 25 bp, Homo sapien
gccagaggcaaatatccaatgtaga

SEQ ID NO: 5241341 - DNA, 25 bp, Homo sapien
caacatggatgtatcccctttgctt

SEQ ID NO: 5241342 - DNA, 25 bp, Homo sapien
aacatggatgtatcccctttgcttc

SEQ ID NO: 5241343 - DNA, 25 bp, Homo sapien
tcaacatggatgtatcccctttgct

SEQ ID NO: 5241344 - DNA, 25 bp, Homo sapien
ttcaacatggatgtatcccctttgc

SEQ ID NO: 5241345 - DNA, 25 bp, Homo sapien
tccattttgtaattataggccagaa

SEQ ID NO: 5241346 - DNA, 25 bp, Homo sapien
tgacatttttgtagatccgatccat

SEQ ID NO: 5241347 - DNA, 25 bp, Homo sapien
cagtggagtattacgtccttttgaa

SEQ ID NO: 5241348 - DNA, 25 bp, Homo sapien
aacagattacgttgaaaactactca

SEQ ID NO: 5241349 - DNA, 25 bp, Homo sapien
accgtgttcagccaggatggatttt

SEQ ID NO: 5241350 - DNA, 25 bp, Homo sapien
ccgtgttcagccaggatggattttt

SEQ ID NO: 5241351 - DNA, 25 bp, Homo sapien
aggagtgagccaccgtgttcagcca

SEQ ID NO: 5241352 - DNA, 25 bp, Homo sapien
agtgagccaccgtgttcagccagga

SEQ ID NO: 5241353 - DNA, 25 bp, Homo sapien
gatgttcatgaatcgctgcgtggtt

SEQ ID NO: 5241354 - DNA, 25 bp, Homo sapien
gagcccgtatccctgaccaacagga

SEQ ID NO: 5241355 - DNA, 25 bp, Homo sapien
tagcaagcttcgaactttccggaaa

SEQ ID NO: 5241356 - DNA, 25 bp, Homo sapien
tggttgcagaaagtggagcgccacc

SEQ ID NO: 5241357 - DNA, 25 bp, Homo sapien
gctgtatcctgtaccggaaagcaaa

SEQ ID NO: 5241358 - DNA, 25 bp, Homo sapien
gaggccctatgcgattcatctcaga

SEQ ID NO: 5241359 - DNA, 25 bp, Homo sapien
gattagttggtagatctcctcctca

SEQ ID NO: 5241360 - DNA, 25 bp, Homo sapien
ccataaaagggacgcatgaggccct

SEQ ID NO: 5241361 - DNA, 25 bp, Homo sapien
caggtacagcagaactgacggcctc

SEQ ID NO: 5241362 - DNA, 25 bp, Homo sapien
tcttattaggcctcaccgatgtgca

SEQ ID NO: 5241363 - DNA, 25 bp, Homo sapien
cacattgtcttacattagggcccac

SEQ ID NO: 5241364 - DNA, 25 bp, Homo sapien
gtgtggaatcgccagcaacaatggg

SEQ ID NO: 5241365 - DNA, 25 bp, Homo sapien
ctcccactctgccagtattgtagtc

SEQ ID NO: 5241366 - DNA, 25 bp, Homo sapien
actctgccagtattgtagtcccaca

SEQ ID NO: 5241367 - DNA, 25 bp, Homo sapien
tcccactctgccagtattgtagtcc

SEQ ID NO: 5241368 - DNA, 25 bp, Homo sapien
ccactctgccagtattgtagtccca

SEQ ID NO: 5241369 - DNA, 25 bp, Homo sapien
aatgctctgtggttaaaatagttta

SEQ ID NO: 5241370 - DNA, 25 bp, Homo sapien
catatagttcgagataaaacacgtc

SEQ ID NO: 5241371 - DNA, 25 bp, Homo sapien
ttacattctaaagcaagaaagtgaa

SEQ ID NO: 5241372 - DNA, 25 bp, Homo sapien
gagcacttatgggtgtttacattct

SEQ ID NO: 5241373 - DNA, 25 bp, Homo sapien
ctggggtgtggcttatcagtattaa

SEQ ID NO: 5241374 - DNA, 25 bp, Homo sapien
gggtgtggcttatcagtattaaagt

SEQ ID NO: 5241375 - DNA, 25 bp, Homo sapien
tgtggcttatcagtattaaagtatc

SEQ ID NO: 5241376 - DNA, 25 bp, Homo sapien
ggcttatcagtattaaagtatccac

SEQ ID NO: 5241377 - DNA, 25 bp, Homo sapien
aactctccaatatccccagtacaga

SEQ ID NO: 5241378 - DNA, 25 bp, Homo sapien
tttgtagtaccccattgtcacactt

SEQ ID NO: 5241379 - DNA, 25 bp, Homo sapien
agtaccccattgtcacactttggcc

SEQ ID NO: 5241380 - DNA, 25 bp, Homo sapien
tctttaagcatccatcgggttcaaa

SEQ ID NO: 5241381 - DNA, 25 bp, Homo sapien
ttctctaagtaatttgctatcaaat

SEQ ID NO: 5241382 - DNA, 25 bp, Homo sapien
attctctaagtaatttgctatcaaa

SEQ ID NO: 5241383 - DNA, 25 bp, Homo sapien
tctctaagtaatttgctatcaaatt

SEQ ID NO: 5241384 - DNA, 25 bp, Homo sapien
tctaagtaatttgctatcaaattat

SEQ ID NO: 5241385 - DNA, 25 bp, Homo sapien
ctgcctgtagttttacaaggtcctt

SEQ ID NO: 5241386 - DNA, 25 bp, Homo sapien
cctgcctgtagttttacaaggtcct

SEQ ID NO: 5241387 - DNA, 25 bp, Homo sapien
taacacagcttacataggagcccca

SEQ ID NO: 5241388 - DNA, 25 bp, Homo sapien
gaactctgactatgcccaacgaagg

SEQ ID NO: 5241389 - DNA, 25 bp, Homo sapien
gagaaggaggccattcccacaagta

SEQ ID NO: 5241390 - DNA, 25 bp, Homo sapien
tagagcaggagtaagtaagcagcac

SEQ ID NO: 5241391 - DNA, 25 bp, Homo sapien
ctttaagtcctttctttcgagctag

SEQ ID NO: 5241392 - DNA, 25 bp, Homo sapien
caaatccaatgacataagaatgata

SEQ ID NO: 5241393 - DNA, 25 bp, Homo sapien
cctttctttcgagctagttcagtta

SEQ ID NO: 5241394 - DNA, 25 bp, Homo sapien
ttcgagctagttcagttagttcctt

SEQ ID NO: 5241395 - DNA, 25 bp, Homo sapien
catcagtttggtgggagtggttaat

SEQ ID NO: 5241396 - DNA, 25 bp, Homo sapien
tatgggctagtgtggccagaaaact

SEQ ID NO: 5241397 - DNA, 25 bp, Homo sapien
gagttttggcctgatcactatgggc

SEQ ID NO: 5241398 - DNA, 25 bp, Homo sapien
tgacataagagaaagggtaacccag

SEQ ID NO: 5241399 - DNA, 25 bp, Homo sapien
ttcgctcaatgtccgcctggtaatg

SEQ ID NO: 5241400 - DNA, 25 bp, Homo sapien
gttttaagctctttgcgtttcagct

SEQ ID NO: 5241401 - DNA, 25 bp, Homo sapien
tccgcctggtaatgtgttttaagct

SEQ ID NO: 5241402 - DNA, 25 bp, Homo sapien
ggtccacggttcaggactcaaacga

SEQ ID NO: 5241403 - DNA, 25 bp, Homo sapien
tgagacatgcatttcaagtattttc

SEQ ID NO: 5241404 - DNA, 25 bp, Homo sapien
gagtttgccttgcagcttgagacat

SEQ ID NO: 5241405 - DNA, 25 bp, Homo sapien
gagctcactgtagcaaactgatgcc

SEQ ID NO: 5241406 - DNA, 25 bp, Homo sapien
gagaagtaatagtttaatatgagga

SEQ ID NO: 5241407 - DNA, 25 bp, Homo sapien
ttaaaatcactgcttccccaatatg

SEQ ID NO: 5241408 - DNA, 25 bp, Homo sapien
tctcaaatgcatacaagacaataat

SEQ ID NO: 5241409 - DNA, 25 bp, Homo sapien
gacaagtacagtcataggtggtaaa

SEQ ID NO: 5241410 - DNA, 25 bp, Homo sapien
gacacaagtttgctgtcttaatgtt

SEQ ID NO: 5241411 - DNA, 25 bp, Homo sapien
tacacgtcttcaggcagaaaacagc

SEQ ID NO: 5241412 - DNA, 25 bp, Homo sapien
tgtacactgtttaaaagcggatccc

SEQ ID NO: 5241413 - DNA, 25 bp, Homo sapien
tacacgcatcagtgcaaactaggaa

SEQ ID NO: 5241414 - DNA, 25 bp, Homo sapien
tctactgtggcatttgacacctggc

SEQ ID NO: 5241415 - DNA, 25 bp, Homo sapien
cattgctgggttgttagagctggat

SEQ ID NO: 5241416 - DNA, 25 bp, Homo sapien
tccaggcccccattaaaggcattag

SEQ ID NO: 5241417 - DNA, 25 bp, Homo sapien
aggcattaggacttttaagtcttca

SEQ ID NO: 5241418 - DNA, 25 bp, Homo sapien
ggatgttttatatgtgagcaccttc

SEQ ID NO: 5241419 - DNA, 25 bp, Homo sapien
aaaggctgggtagaaatcctgttgg

SEQ ID NO: 5241420 - DNA, 25 bp, Homo sapien
agaaggctgccagagatagctaagg

SEQ ID NO: 5241421 - DNA, 25 bp, Homo sapien
ggcatggcagtatgcttttgctccc

SEQ ID NO: 5241422 - DNA, 25 bp, Homo sapien
tagctaaggacatgccagaggtagc

SEQ ID NO: 5241423 - DNA, 25 bp, Homo sapien
gcctctcgacccaggagaatccctg

SEQ ID NO: 5241424 - DNA, 25 bp, Homo sapien
gaagcagcaccactgcgaccaccat

SEQ ID NO: 5241425 - DNA, 25 bp, Homo sapien
taacagctggaccaaccagcaagcc

SEQ ID NO: 5241426 - DNA, 25 bp, Homo sapien
acctcactagcaatttgataacagc

SEQ ID NO: 5241427 - DNA, 25 bp, Homo sapien
tgtttgtatgcgctcctgtaatgca

SEQ ID NO: 5241428 - DNA, 25 bp, Homo sapien
attctcctcttgtttgtatgcgctc

SEQ ID NO: 5241429 - DNA, 25 bp, Homo sapien
tatgcgctcctgtaatgcacatagc

SEQ ID NO: 5241430 - DNA, 25 bp, Homo sapien
tcctcttgtttgtatgcgctcctgt

SEQ ID NO: 5241431 - DNA, 25 bp, Homo sapien
gagtggttctcatagcccaaaggca

SEQ ID NO: 5241432 - DNA, 25 bp, Homo sapien
aggcagtcctcatgaagccatagtg

SEQ ID NO: 5241433 - DNA, 25 bp, Homo sapien
gttctcatagcccaaaggcagtcct

SEQ ID NO: 5241434 - DNA, 25 bp, Homo sapien
aaaggcagtcctcatgaagccatag

SEQ ID NO: 5241435 - DNA, 25 bp, Homo sapien
agcggccccacaggatgtgtatctg

SEQ ID NO: 5241436 - DNA, 25 bp, Homo sapien
aatttcctgtcctggagtttagaga

SEQ ID NO: 5241437 - DNA, 25 bp, Homo sapien
tgtgaagcagctccgagacaagact

SEQ ID NO: 5241438 - DNA, 25 bp, Homo sapien
ttattgctccacagcctatcttgca

SEQ ID NO: 5241439 - DNA, 25 bp, Homo sapien
gagacagataggggaaaagtaagag

SEQ ID NO: 5241440 - DNA, 25 bp, Homo sapien
agacagataggggaaaagtaagagc

SEQ ID NO: 5241441 - DNA, 25 bp, Homo sapien
tgagacagataggggaaaagtaaga

SEQ ID NO: 5241442 - DNA, 25 bp, Homo sapien
ctgagacagataggggaaaagtaag

SEQ ID NO: 5241443 - DNA, 25 bp, Homo sapien
aaggtctgcttctgatgaccccaga

SEQ ID NO: 5241444 - DNA, 25 bp, Homo sapien
cttaaggtctgcttctgatgacccc

SEQ ID NO: 5241445 - DNA, 25 bp, Homo sapien
taaggtctgcttctgatgaccccag

SEQ ID NO: 5241446 - DNA, 25 bp, Homo sapien
ttaaggtctgcttctgatgacccca

SEQ ID NO: 5241447 - DNA, 25 bp, Homo sapien
gggacagggatgtaatagcccactc

SEQ ID NO: 5241448 - DNA, 25 bp, Homo sapien
ctgcaggattcagtgggagcttcct

SEQ ID NO: 5241449 - DNA, 25 bp, Homo sapien
tcaggcccttgacccacaatggatg

SEQ ID NO: 5241450 - DNA, 25 bp, Homo sapien
tacttgtaatgcacaccctagcagg

SEQ ID NO: 5241451 - DNA, 25 bp, Homo sapien
aagaggacactaggagaagtgggca

SEQ ID NO: 5241452 - DNA, 25 bp, Homo sapien
agaggacactaggagaagtgggcat

SEQ ID NO: 5241453 - DNA, 25 bp, Homo sapien
aatgtagcaggtgtgcccggcgcct

SEQ ID NO: 5241454 - DNA, 25 bp, Homo sapien
tctttgagccagaggcattgctgct

SEQ ID NO: 5241455 - DNA, 25 bp, Homo sapien
gcctgaagggtgaggttcaccctgc

SEQ ID NO: 5241456 - DNA, 25 bp, Homo sapien
aggcagccagttgtacccaaatgca

SEQ ID NO: 5241457 - DNA, 25 bp, Homo sapien
gtccaggtaccactgtcagaatcca

SEQ ID NO: 5241458 - DNA, 25 bp, Homo sapien
gggaccctctggaacgatgttccga

SEQ ID NO: 5241459 - DNA, 25 bp, Homo sapien
tcaaggaaacttgagtatcacgtcc

SEQ ID NO: 5241460 - DNA, 25 bp, Homo sapien
tgttccgagcccttcagaaataccc

SEQ ID NO: 5241461 - DNA, 25 bp, Homo sapien
aaagaggtgtcttacatccaaatgg

SEQ ID NO: 5241462 - DNA, 25 bp, Homo sapien
cagcatgaatgtagactgccaggtc

SEQ ID NO: 5241463 - DNA, 25 bp, Homo sapien
cacatggaggaagtctgaagaaaga

SEQ ID NO: 5241464 - DNA, 25 bp, Homo sapien
atcaacatatccagtccagcagcag

SEQ ID NO: 5241465 - DNA, 25 bp, Homo sapien
acttaaatatagagcaagaggtctc

SEQ ID NO: 5241466 - DNA, 25 bp, Homo sapien
ggtctccttatgctcattcttgctg

SEQ ID NO: 5241467 - DNA, 25 bp, Homo sapien
tatagagcaagaggtctccttatgc

SEQ ID NO: 5241468 - DNA, 25 bp, Homo sapien
gcaagaggtctccttatgctcattc

SEQ ID NO: 5241469 - DNA, 25 bp, Homo sapien
gcctgggatagcctgaaagttccta

SEQ ID NO: 5241470 - DNA, 25 bp, Homo sapien
gccagagaatgtaacagtgaaggaa

SEQ ID NO: 5241471 - DNA, 25 bp, Homo sapien
aaagttcctagtctcatttccctgg

SEQ ID NO: 5241472 - DNA, 25 bp, Homo sapien
tccctggtggttctttgccagagaa

SEQ ID NO: 5241473 - DNA, 25 bp, Homo sapien
tatcaattaggtaggacatttttag

SEQ ID NO: 5241474 - DNA, 25 bp, Homo sapien
catttttagttccgttgctgactgt

SEQ ID NO: 5241475 - DNA, 25 bp, Homo sapien
gacatttttagttccgttgctgact

SEQ ID NO: 5241476 - DNA, 25 bp, Homo sapien
cttatcaattaggtaggacattttt

SEQ ID NO: 5241477 - DNA, 25 bp, Homo sapien
caggccctggacttgaattgctcat

SEQ ID NO: 5241478 - DNA, 25 bp, Homo sapien
caataatagtttcacccaataaagg

SEQ ID NO: 5241479 - DNA, 25 bp, Homo sapien
tagtccaattagcactcatcagaag

SEQ ID NO: 5241480 - DNA, 25 bp, Homo sapien
gaagtgtttcgagtaagaagcaaga

SEQ ID NO: 5241481 - DNA, 25 bp, Homo sapien
gcttctgtgactaaacaaagtctat

SEQ ID NO: 5241482 - DNA, 25 bp, Homo sapien
tagagctttgagtactttcatttcc

SEQ ID NO: 5241483 - DNA, 25 bp, Homo sapien
tcctggtaacgtcatttttaccaga

SEQ ID NO: 5241484 - DNA, 25 bp, Homo sapien
ggtaacgtcatttttaccagatgac

SEQ ID NO: 5241485 - DNA, 25 bp, Homo sapien
ccagctggcactggaggtaccaacc

SEQ ID NO: 5241486 - DNA, 25 bp, Homo sapien
cccagctggcactggaggtaccaac

SEQ ID NO: 5241487 - DNA, 25 bp, Homo sapien
taccaaccatcgaccactccagcat

SEQ ID NO: 5241488 - DNA, 25 bp, Homo sapien
ggaggtaccaaccatcgaccactcc

SEQ ID NO: 5241489 - DNA, 25 bp, Homo sapien
tacaacagagattgatcgtggcaga

SEQ ID NO: 5241490 - DNA, 25 bp, Homo sapien
gatgtgctgtgctggaaccgttacc

SEQ ID NO: 5241491 - DNA, 25 bp, Homo sapien
aaaattagctcatgcttcgcgcggc

SEQ ID NO: 5241492 - DNA, 25 bp, Homo sapien
caaagtccgcgctcactgaaaatta

SEQ ID NO: 5241493 - DNA, 25 bp, Homo sapien
tatatagtcaagaagtgcatcgtca

SEQ ID NO: 5241494 - DNA, 25 bp, Homo sapien
tgggatatatagtcaagaagtgcat

SEQ ID NO: 5241495 - DNA, 25 bp, Homo sapien
agtcaagaagtgcatcgtcacgtgc

SEQ ID NO: 5241496 - DNA, 25 bp, Homo sapien
ctgcagttgggatatatagtcaaga

SEQ ID NO: 5241497 - DNA, 25 bp, Homo sapien
tgctctgtccggctctgcgctctga

SEQ ID NO: 5241498 - DNA, 25 bp, Homo sapien
agtccaagagggttcttctgctctg

SEQ ID NO: 5241499 - DNA, 25 bp, Homo sapien
tctgtccggctctgcgctctgacaa

SEQ ID NO: 5241500 - DNA, 25 bp, Homo sapien
ttttgaattcccaaatcgtccagtc

SEQ ID NO: 5241501 - DNA, 25 bp, Homo sapien
tcctgaatggtgaggtgcacgtccg

SEQ ID NO: 5241502 - DNA, 25 bp, Homo sapien
gattccgatcaagaaaatgccgtag

SEQ ID NO: 5241503 - DNA, 25 bp, Homo sapien
gaggacccttcgctgctctcgttga

SEQ ID NO: 5241504 - DNA, 25 bp, Homo sapien
gaagtactcgttgccattgccgctg

SEQ ID NO: 5241505 - DNA, 25 bp, Homo sapien
tcagcgtgtcctaagcattcggcag

SEQ ID NO: 5241506 - DNA, 25 bp, Homo sapien
caaagtcagtgtacgcgctgcgcat

SEQ ID NO: 5241507 - DNA, 25 bp, Homo sapien
ctttaagggcctaacggatctgcga

SEQ ID NO: 5241508 - DNA, 25 bp, Homo sapien
gagcttcttgatgacatgcccggga

SEQ ID NO: 5241509 - DNA, 25 bp, Homo sapien
tccttcaggagtcatcagtcgtggg

SEQ ID NO: 5241510 - DNA, 25 bp, Homo sapien
ctgaaacctcaagctaaagctgaac

SEQ ID NO: 5241511 - DNA, 25 bp, Homo sapien
catcagtcgtgggagctctctgcac

SEQ ID NO: 5241512 - DNA, 25 bp, Homo sapien
acctcaagctaaagctgaacctcca

SEQ ID NO: 5241513 - DNA, 25 bp, Homo sapien
tactccaaagacatgggccacagct

SEQ ID NO: 5241514 - DNA, 25 bp, Homo sapien
cccaaatgtgccctagaatatctaa

SEQ ID NO: 5241515 - DNA, 25 bp, Homo sapien
ctgccctatactccaaagacatggg

SEQ ID NO: 5241516 - DNA, 25 bp, Homo sapien
tatctaaagggttggctggcacaca

SEQ ID NO: 5241517 - DNA, 25 bp, Homo sapien
cttaaagcaatgttctgagtcccga

SEQ ID NO: 5241518 - DNA, 25 bp, Homo sapien
gatgagttgctaacaacttaaagca

SEQ ID NO: 5241519 - DNA, 25 bp, Homo sapien
taaagcaatgttctgagtcccgaac

SEQ ID NO: 5241520 - DNA, 25 bp, Homo sapien
caatgtgatgagttgctaacaactt

SEQ ID NO: 5241521 - DNA, 25 bp, Homo sapien
ttatatgtgcgtaggtctgccagag

SEQ ID NO: 5241522 - DNA, 25 bp, Homo sapien
tatatgtgcgtaggtctgccagaga

SEQ ID NO: 5241523 - DNA, 25 bp, Homo sapien
atatgtgcgtaggtctgccagagag

SEQ ID NO: 5241524 - DNA, 25 bp, Homo sapien
gcttcccagggagccctgccttcat

SEQ ID NO: 5241525 - DNA, 25 bp, Homo sapien
gaagcttcccagggagccctgcctt

SEQ ID NO: 5241526 - DNA, 25 bp, Homo sapien
tgcctgaagcttcccagggagccct

SEQ ID NO: 5241527 - DNA, 25 bp, Homo sapien
ctgcctgaagcttcccagggagccc

SEQ ID NO: 5241528 - DNA, 25 bp, Homo sapien
tgtgttgtccaagttctcacttttt

SEQ ID NO: 5241529 - DNA, 25 bp, Homo sapien
aaccagaataagatgcaggcacagg

SEQ ID NO: 5241530 - DNA, 25 bp, Homo sapien
ttaagaaccagaataagatgcaggc

SEQ ID NO: 5241531 - DNA, 25 bp, Homo sapien
aagaaccagaataagatgcaggcac

SEQ ID NO: 5241532 - DNA, 25 bp, Homo sapien
cagcttagtggctgaagactgatgc

SEQ ID NO: 5241533 - DNA, 25 bp, Homo sapien
agactgatgctgcccgattgcctcg

SEQ ID NO: 5241534 - DNA, 25 bp, Homo sapien
ctgatgctgcccgattgcctcggaa

SEQ ID NO: 5241535 - DNA, 25 bp, Homo sapien
atgctgcccgattgcctcggaagcc

SEQ ID NO: 5241536 - DNA, 25 bp, Homo sapien
gcccatgcctacttccttaatggtg

SEQ ID NO: 5241537 - DNA, 25 bp, Homo sapien
tgattctggtctccaatgcttgtgc

SEQ ID NO: 5241538 - DNA, 25 bp, Homo sapien
aatgcttgtgctatcagcccacctc

SEQ ID NO: 5241539 - DNA, 25 bp, Homo sapien
gccagttttcccaactgtatggtag

SEQ ID NO: 5241540 - DNA, 25 bp, Homo sapien
ttgtagagcccttgaagaaccctga

SEQ ID NO: 5241541 - DNA, 25 bp, Homo sapien
gcacttcattagttcagccggcaag

SEQ ID NO: 5241542 - DNA, 25 bp, Homo sapien
tctcccatgtttcaagtgtcagtgc

SEQ ID NO: 5241543 - DNA, 25 bp, Homo sapien
gaactgcctcgcgaaagaaatgtca

SEQ ID NO: 5241544 - DNA, 25 bp, Homo sapien
ttgaaactactgtggattttcctca

SEQ ID NO: 5241545 - DNA, 25 bp, Homo sapien
tttgaaactactgtggattttcctc

SEQ ID NO: 5241546 - DNA, 25 bp, Homo sapien
tgaaactactgtggattttcctcat

SEQ ID NO: 5241547 - DNA, 25 bp, Homo sapien
tgccgatagattcgctagtaatctc

SEQ ID NO: 5241548 - DNA, 25 bp, Homo sapien
ctctggtggccataatttctttgtg

SEQ ID NO: 5241549 - DNA, 25 bp, Homo sapien
aataatccacccgagatgctgccga

SEQ ID NO: 5241550 - DNA, 25 bp, Homo sapien
tctgcaggggaatcactttgtctct

SEQ ID NO: 5241551 - DNA, 25 bp, Homo sapien
ttcagaggccaacccagtaaagctt

SEQ ID NO: 5241552 - DNA, 25 bp, Homo sapien
agaggtcccaaggatctgactgcca

SEQ ID NO: 5241553 - DNA, 25 bp, Homo sapien
tgactgccacgatactaaaagaact

SEQ ID NO: 5241554 - DNA, 25 bp, Homo sapien
tgatggcagaattaaaagaggtccc

SEQ ID NO: 5241555 - DNA, 25 bp, Homo sapien
ggttgggttgagacttagtgagaaa

SEQ ID NO: 5241556 - DNA, 25 bp, Homo sapien
gttgggttgagacttagtgagaaac

SEQ ID NO: 5241557 - DNA, 25 bp, Homo sapien
aaataaggagcctggcgatggacat

SEQ ID NO: 5241558 - DNA, 25 bp, Homo sapien
tgcccaagacaaataaggagcctgg

SEQ ID NO: 5241559 - DNA, 25 bp, Homo sapien
aataaagacgccatgcccaagacaa

SEQ ID NO: 5241560 - DNA, 25 bp, Homo sapien
caataaagacgccatgcccaagaca

SEQ ID NO: 5241561 - DNA, 25 bp, Homo sapien
ttaggtgtttggagatgaagcatga

SEQ ID NO: 5241562 - DNA, 25 bp, Homo sapien
ggtgtttggagatgaagcatgagcc

SEQ ID NO: 5241563 - DNA, 25 bp, Homo sapien
tgtttggagatgaagcatgagcctc

SEQ ID NO: 5241564 - DNA, 25 bp, Homo sapien
tttggagatgaagcatgagcctcac

SEQ ID NO: 5241565 - DNA, 25 bp, Homo sapien
ggctccacggtattgagaggaacat

SEQ ID NO: 5241566 - DNA, 25 bp, Homo sapien
ggggctccacggtattgagaggaac

SEQ ID NO: 5241567 - DNA, 25 bp, Homo sapien
ttccagtagaggggctccacggtat

SEQ ID NO: 5241568 - DNA, 25 bp, Homo sapien
cagtagaggggctccacggtattga

SEQ ID NO: 5241569 - DNA, 25 bp, Homo sapien
gtctttacagaactcttcaacaggg

SEQ ID NO: 5241570 - DNA, 25 bp, Homo sapien
ggaggcacaatcttcaatagttctg

SEQ ID NO: 5241571 - DNA, 25 bp, Homo sapien
gataccacaaagagcttctcctcct

SEQ ID NO: 5241572 - DNA, 25 bp, Homo sapien
ttatttatgtgataccacaaagagc

SEQ ID NO: 5241573 - DNA, 25 bp, Homo sapien
gattgcaatcctactctgtggtgaa

SEQ ID NO: 5241574 - DNA, 25 bp, Homo sapien
gcaatcctactctgtggtgaaacag

SEQ ID NO: 5241575 - DNA, 25 bp, Homo sapien
agagattgcaatcctactctgtggt

SEQ ID NO: 5241576 - DNA, 25 bp, Homo sapien
tactctgtggtgaaacagactttaa

SEQ ID NO: 5241577 - DNA, 25 bp, Homo sapien
cccagactggaaagcaatggcgcga

SEQ ID NO: 5241578 - DNA, 25 bp, Homo sapien
caccgcacctggctaatttttgtat

SEQ ID NO: 5241579 - DNA, 25 bp, Homo sapien
ccaccgcacctggctaatttttgta

SEQ ID NO: 5241580 - DNA, 25 bp, Homo sapien
ccagactggaaagcaatggcgcgat

SEQ ID NO: 5241581 - DNA, 25 bp, Homo sapien
gcagaagggcaaggatagggttcat

SEQ ID NO: 5241582 - DNA, 25 bp, Homo sapien
tacatgaatacgagggccatttcct

SEQ ID NO: 5241583 - DNA, 25 bp, Homo sapien
ccacattgcccttctctggtagcaa

SEQ ID NO: 5241584 - DNA, 25 bp, Homo sapien
ggtacatgctccagtgaaacacatc

SEQ ID NO: 5241585 - DNA, 25 bp, Homo sapien
tacatccatatctgaggctgactgg

SEQ ID NO: 5241586 - DNA, 25 bp, Homo sapien
ctttgaaaagcattactccctgaca

SEQ ID NO: 5241587 - DNA, 25 bp, Homo sapien
tgaaaagcattactccctgacaccc

SEQ ID NO: 5241588 - DNA, 25 bp, Homo sapien
cccttcttggcttgtccctttcatg

SEQ ID NO: 5241589 - DNA, 25 bp, Homo sapien
aaaagcattactccctgacacccat

SEQ ID NO: 5241590 - DNA, 25 bp, Homo sapien
tatatctcaagaagaatcagccaat

SEQ ID NO: 5241591 - DNA, 25 bp, Homo sapien
tggtatccagatttccactcattac

SEQ ID NO: 5241592 - DNA, 25 bp, Homo sapien
tgttttcagccctatgatacactgc

SEQ ID NO: 5241593 - DNA, 25 bp, Homo sapien
atccagtccagggcttgagagctgg

SEQ ID NO: 5241594 - DNA, 25 bp, Homo sapien
ggctcacagttccaccgaatgtaca

SEQ ID NO: 5241595 - DNA, 25 bp, Homo sapien
cttggctaccgaggaggcttcggga

SEQ ID NO: 5241596 - DNA, 25 bp, Homo sapien
tctgcttggctaccgaggaggcttc

SEQ ID NO: 5241597 - DNA, 25 bp, Homo sapien
acagttccaccgaatgtacaggaag

SEQ ID NO: 5241598 - DNA, 25 bp, Homo sapien
tctgagaacacttgcctttgttcag

SEQ ID NO: 5241599 - DNA, 25 bp, Homo sapien
ctcctctctaaagggcactctgaga

SEQ ID NO: 5241600 - DNA, 25 bp, Homo sapien
cttgcctttgttcagccaagcccat

SEQ ID NO: 5241601 - DNA, 25 bp, Homo sapien
agggcactctgagaacacttgcctt

SEQ ID NO: 5241602 - DNA, 25 bp, Homo sapien
ccccagtctgctatctcaaactgca

SEQ ID NO: 5241603 - DNA, 25 bp, Homo sapien
cacattagtattgctgtctccccag

SEQ ID NO: 5241604 - DNA, 25 bp, Homo sapien
gtctccccagtctgctatctcaaac

SEQ ID NO: 5241605 - DNA, 25 bp, Homo sapien
tttcaacacattagtattgctgtct

SEQ ID NO: 5241606 - DNA, 25 bp, Homo sapien
ctcatttgtatgaaccacctgaaaa

SEQ ID NO: 5241607 - DNA, 25 bp, Homo sapien
tttgtatgaaccacctgaaaatccg

SEQ ID NO: 5241608 - DNA, 25 bp, Homo sapien
tgtatgaaccacctgaaaatccggg

SEQ ID NO: 5241609 - DNA, 25 bp, Homo sapien
tgaaccacctgaaaatccgggacag

SEQ ID NO: 5241610 - DNA, 25 bp, Homo sapien
tcattctatcccagtgttgaatacg

SEQ ID NO: 5241611 - DNA, 25 bp, Homo sapien
tatcccagtgttgaatacgccattc

SEQ ID NO: 5241612 - DNA, 25 bp, Homo sapien
gaatacgccattcacattgttgaat

SEQ ID NO: 5241613 - DNA, 25 bp, Homo sapien
cccagtgttgaatacgccattcaca

SEQ ID NO: 5241614 - DNA, 25 bp, Homo sapien
tttgcaataagtatccaccatttgc

SEQ ID NO: 5241615 - DNA, 25 bp, Homo sapien
caaatttgcaataagtatccaccat

SEQ ID NO: 5241616 - DNA, 25 bp, Homo sapien
atttgcaataagtatccaccatttg

SEQ ID NO: 5241617 - DNA, 25 bp, Homo sapien
aaatttgcaataagtatccaccatt

SEQ ID NO: 5241618 - DNA, 25 bp, Homo sapien
ccataagagtccactgaaaggtgtt

SEQ ID NO: 5241619 - DNA, 25 bp, Homo sapien
cctcagagacgagggtttgacgctg

SEQ ID NO: 5241620 - DNA, 25 bp, Homo sapien
tctactttcagtactggctatagaa

SEQ ID NO: 5241621 - DNA, 25 bp, Homo sapien
cagtactggctatagaattatgtga

SEQ ID NO: 5241622 - DNA, 25 bp, Homo sapien
tccacacgcactgtcatttccacac

SEQ ID NO: 5241623 - DNA, 25 bp, Homo sapien
tttccacaccttctaactgggccat

SEQ ID NO: 5241624 - DNA, 25 bp, Homo sapien
ccacacgcactgtcatttccacacc

SEQ ID NO: 5241625 - DNA, 25 bp, Homo sapien
cacacgcactgtcatttccacacct

SEQ ID NO: 5241626 - DNA, 25 bp, Homo sapien
gccacccatcctggagatgctggca

SEQ ID NO: 5241627 - DNA, 25 bp, Homo sapien
cacccatcctggagatgctggcata

SEQ ID NO: 5241628 - DNA, 25 bp, Homo sapien
acccatcctggagatgctggcatac

SEQ ID NO: 5241629 - DNA, 25 bp, Homo sapien
cggccacccatcctggagatgctgg

SEQ ID NO: 5241630 - DNA, 25 bp, Homo sapien
tgctgtacaagatgtcctccttacc

SEQ ID NO: 5241631 - DNA, 25 bp, Homo sapien
tatggtagaccgctttcaccctcat

SEQ ID NO: 5241632 - DNA, 25 bp, Homo sapien
accgctttcaccctcattttggtca

SEQ ID NO: 5241633 - DNA, 25 bp, Homo sapien
tagaccgctttcaccctcattttgg

SEQ ID NO: 5241634 - DNA, 25 bp, Homo sapien
taggaatgatgttggctacccgtgg

SEQ ID NO: 5241635 - DNA, 25 bp, Homo sapien
tatgagggtcccagccaatttgcaa

SEQ ID NO: 5241636 - DNA, 25 bp, Homo sapien
tacccgtggtagattgcacatttgg

SEQ ID NO: 5241637 - DNA, 25 bp, Homo sapien
cccggagtctgcactggtcttgtga

SEQ ID NO: 5241638 - DNA, 25 bp, Homo sapien
cttcttctcctcctgaccataatgc

SEQ ID NO: 5241639 - DNA, 25 bp, Homo sapien
ttcttctcctcctgaccataatgca

SEQ ID NO: 5241640 - DNA, 25 bp, Homo sapien
tcttctcctcctgaccataatgcat

SEQ ID NO: 5241641 - DNA, 25 bp, Homo sapien
agatggcagtaacagcacaggtcat

SEQ ID NO: 5241642 - DNA, 25 bp, Homo sapien
taacaaagatggcagtaacagcaca

SEQ ID NO: 5241643 - DNA, 25 bp, Homo sapien
caaagatggcagtaacagcacaggt

SEQ ID NO: 5241644 - DNA, 25 bp, Homo sapien
aaagatggcagtaacagcacaggtc

SEQ ID NO: 5241645 - DNA, 25 bp, Homo sapien
gttttggctccttggggccatacca

SEQ ID NO: 5241646 - DNA, 25 bp, Homo sapien
ccttggggccataccaataggggct

SEQ ID NO: 5241647 - DNA, 25 bp, Homo sapien
cctttggttctgaagtatagaaatg

SEQ ID NO: 5241648 - DNA, 25 bp, Homo sapien
catggatcccatgaatcctttggtt

SEQ ID NO: 5241649 - DNA, 25 bp, Homo sapien
agtgcctaccttatgacagacacca

SEQ ID NO: 5241650 - DNA, 25 bp, Homo sapien
catctcaagactttgggattaagca

SEQ ID NO: 5241651 - DNA, 25 bp, Homo sapien
ccaaacatcagtgggtaggaatcct

SEQ ID NO: 5241652 - DNA, 25 bp, Homo sapien
gggatgccttcagtgcctaccttat

SEQ ID NO: 5241653 - DNA, 25 bp, Homo sapien
cagcttgcagtccttgatgggacat

SEQ ID NO: 5241654 - DNA, 25 bp, Homo sapien
atagacaatactaatgatgtcacca

SEQ ID NO: 5241655 - DNA, 25 bp, Homo sapien
aatagacaatactaatgatgtcacc

SEQ ID NO: 5241656 - DNA, 25 bp, Homo sapien
tagacaatactaatgatgtcaccac

SEQ ID NO: 5241657 - DNA, 25 bp, Homo sapien
agacaatactaatgatgtcaccacc

SEQ ID NO: 5241658 - DNA, 25 bp, Homo sapien
atttgcaaccttgggagaatataat

SEQ ID NO: 5241659 - DNA, 25 bp, Homo sapien
gagaatataatgaactttcaaaatc

SEQ ID NO: 5241660 - DNA, 25 bp, Homo sapien
ttgcaaccttgggagaatataatga

SEQ ID NO: 5241661 - DNA, 25 bp, Homo sapien
tgaatttgcaaccttgggagaatat

SEQ ID NO: 5241662 - DNA, 25 bp, Homo sapien
tcttctgttatctctacagccactt

SEQ ID NO: 5241663 - DNA, 25 bp, Homo sapien
cactgtccctgtcttggaggaatag

SEQ ID NO: 5241664 - DNA, 25 bp, Homo sapien
cttcttctgttatctctacagccac

SEQ ID NO: 5241665 - DNA, 25 bp, Homo sapien
ggaataggaagagaagactccattc

SEQ ID NO: 5241666 - DNA, 25 bp, Homo sapien
ctgaaatccatccacagtgtatata

SEQ ID NO: 5241667 - DNA, 25 bp, Homo sapien
aaatccatccacagtgtatatacat

SEQ ID NO: 5241668 - DNA, 25 bp, Homo sapien
tgaaatccatccacagtgtatatac

SEQ ID NO: 5241669 - DNA, 25 bp, Homo sapien
gaaatccatccacagtgtatataca

SEQ ID NO: 5241670 - DNA, 25 bp, Homo sapien
ccgttcctggaacgcgatggctggc

SEQ ID NO: 5241671 - DNA, 25 bp, Homo sapien
gcattttgcacctccgttcctggaa

SEQ ID NO: 5241672 - DNA, 25 bp, Homo sapien
tgatctgagcggcattttgcacctc

SEQ ID NO: 5241673 - DNA, 25 bp, Homo sapien
gagtgtgtgatctgagcggcatttt

SEQ ID NO: 5241674 - DNA, 25 bp, Homo sapien
aggcccaccagccaagtgataatta

SEQ ID NO: 5241675 - DNA, 25 bp, Homo sapien
agataaacttgacatagaagcagct

SEQ ID NO: 5241676 - DNA, 25 bp, Homo sapien
gcccaccagccaagtgataattaca

SEQ ID NO: 5241677 - DNA, 25 bp, Homo sapien
taaacttgacatagaagcagctgct

SEQ ID NO: 5241678 - DNA, 25 bp, Homo sapien
catgatggcaaaaggctggaatagc

SEQ ID NO: 5241679 - DNA, 25 bp, Homo sapien
aaatatgcgctcatcttcccgctgg

SEQ ID NO: 5241680 - DNA, 25 bp, Homo sapien
tatgccaaaaaccaagcatgatggc

SEQ ID NO: 5241681 - DNA, 25 bp, Homo sapien
tcccgctggtgttcatcgtgtttgc

SEQ ID NO: 5241682 - DNA, 25 bp, Homo sapien
tcaggtgggttgtgggcttagcacg

SEQ ID NO: 5241683 - DNA, 25 bp, Homo sapien
tgtgggcttagcacgggacctccag

SEQ ID NO: 5241684 - DNA, 25 bp, Homo sapien
tgggttgtgggcttagcacgggacc

SEQ ID NO: 5241685 - DNA, 25 bp, Homo sapien
ggcttagcacgggacctccagggca

SEQ ID NO: 5241686 - DNA, 25 bp, Homo sapien
gcctgtaattgctgataccaatatg

SEQ ID NO: 5241687 - DNA, 25 bp, Homo sapien
taccaatatgttcggcgttgctgcc

SEQ ID NO: 5241688 - DNA, 25 bp, Homo sapien
aattgtgcacgttcttggatgagtc

SEQ ID NO: 5241689 - DNA, 25 bp, Homo sapien
tgaggataaagttggccttgtttcc

SEQ ID NO: 5241690 - DNA, 25 bp, Homo sapien
tgcttctggcttggcatcaaagcgg

SEQ ID NO: 5241691 - DNA, 25 bp, Homo sapien
tgagcttgagatccattgctgatgc

SEQ ID NO: 5241692 - DNA, 25 bp, Homo sapien
ttgctgatgcggcactgcactgtgg

SEQ ID NO: 5241693 - DNA, 25 bp, Homo sapien
aatggtctgttcagcttagagtgaa

SEQ ID NO: 5241694 - DNA, 25 bp, Homo sapien
aggtttcctatcattggtgtattta

SEQ ID NO: 5241695 - DNA, 25 bp, Homo sapien
ttcactgggtgcccaggtttcctat

SEQ ID NO: 5241696 - DNA, 25 bp, Homo sapien
tcctatcattggtgtatttacccat

SEQ ID NO: 5241697 - DNA, 25 bp, Homo sapien
tcactgggtgcccaggtttcctatc

SEQ ID NO: 5241698 - DNA, 25 bp, Homo sapien
cattgcctatgaagatgtggtcggg

SEQ ID NO: 5241699 - DNA, 25 bp, Homo sapien
gaagccgaatggatcagtggaaccg

SEQ ID NO: 5241700 - DNA, 25 bp, Homo sapien
cggagcgggagcttgaccttcctgt

SEQ ID NO: 5241701 - DNA, 25 bp, Homo sapien
tcaacgatgagatgaaacgctcagg

SEQ ID NO: 5241702 - DNA, 25 bp, Homo sapien
agaaaatggcgatgaaagccacttg

SEQ ID NO: 5241703 - DNA, 25 bp, Homo sapien
gatgagaataatactcgaagctttg

SEQ ID NO: 5241704 - DNA, 25 bp, Homo sapien
ccacttgcccgagagggattcactg

SEQ ID NO: 5241705 - DNA, 25 bp, Homo sapien
ctccgacaacaagctcataaggaag

SEQ ID NO: 5241706 - DNA, 25 bp, Homo sapien
gagcagccctgtctcttatcccttt

SEQ ID NO: 5241707 - DNA, 25 bp, Homo sapien
aatgtccaaaagtttcccagtcctg

SEQ ID NO: 5241708 - DNA, 25 bp, Homo sapien
atgtccaaaagtttcccagtcctga

SEQ ID NO: 5241709 - DNA, 25 bp, Homo sapien
tggattttgcacctatagttcaaac

SEQ ID NO: 5241710 - DNA, 25 bp, Homo sapien
gattttgcacctatagttcaaactt

SEQ ID NO: 5241711 - DNA, 25 bp, Homo sapien
ttgcacctatagttcaaacttccat

SEQ ID NO: 5241712 - DNA, 25 bp, Homo sapien
ttttgcacctatagttcaaacttcc

SEQ ID NO: 5241713 - DNA, 25 bp, Homo sapien
cagtcaaggtcgactgtccctgttt

SEQ ID NO: 5241714 - DNA, 25 bp, Homo sapien
agtcaaggtcgactgtccctgtttg

SEQ ID NO: 5241715 - DNA, 25 bp, Homo sapien
aggacagtcaaggtcgactgtccct

SEQ ID NO: 5241716 - DNA, 25 bp, Homo sapien
gacagtcaaggtcgactgtccctgt

SEQ ID NO: 5241717 - DNA, 25 bp, Homo sapien
tgactgcctatgtgctggcggccag

SEQ ID NO: 5241718 - DNA, 25 bp, Homo sapien
tcagctcaggtagccatggtctcag

SEQ ID NO: 5241719 - DNA, 25 bp, Homo sapien
ttcgagtgtcactagacaggctgcc

SEQ ID NO: 5241720 - DNA, 25 bp, Homo sapien
tggcggccaggactatcccttactc

SEQ ID NO: 5241721 - DNA, 25 bp, Homo sapien
agttgtgtcatctggtctgtgactg

SEQ ID NO: 5241722 - DNA, 25 bp, Homo sapien
gccaggtctgttcccatgcaagttg

SEQ ID NO: 5241723 - DNA, 25 bp, Homo sapien
tgtgtgccaggtctgttcccatgca

SEQ ID NO: 5241724 - DNA, 25 bp, Homo sapien
gtctgttcccatgcaagttgtgtca

SEQ ID NO: 5241725 - DNA, 25 bp, Homo sapien
tggttgttgggtgaccagcatcttc

SEQ ID NO: 5241726 - DNA, 25 bp, Homo sapien
tttggttgttgggtgaccagcatct

SEQ ID NO: 5241727 - DNA, 25 bp, Homo sapien
atttggttgttgggtgaccagcatc

SEQ ID NO: 5241728 - DNA, 25 bp, Homo sapien
ttggttgttgggtgaccagcatctt

SEQ ID NO: 5241729 - DNA, 25 bp, Homo sapien
tccttaattaagtcatattgcctgc

SEQ ID NO: 5241730 - DNA, 25 bp, Homo sapien
agtcatattgcctgctggagatgga

SEQ ID NO: 5241731 - DNA, 25 bp, Homo sapien
taaagcttgtagacaaatatcctta

SEQ ID NO: 5241732 - DNA, 25 bp, Homo sapien
gcttgtagacaaatatccttaatta

SEQ ID NO: 5241733 - DNA, 25 bp, Homo sapien
tgaagttgaacgataatattttcca

SEQ ID NO: 5241734 - DNA, 25 bp, Homo sapien
taggctgagtatattcctgtgctct

SEQ ID NO: 5241735 - DNA, 25 bp, Homo sapien
cctgtgctctgatgagggtggtcat

SEQ ID NO: 5241736 - DNA, 25 bp, Homo sapien
tggaaattaaggctataggctgagt

SEQ ID NO: 5241737 - DNA, 25 bp, Homo sapien
taaggctataggctgagtatattcc

SEQ ID NO: 5241738 - DNA, 25 bp, Homo sapien
tctgcactacccagatagtaatttg

SEQ ID NO: 5241739 - DNA, 25 bp, Homo sapien
tgtgtgagctctgcactacccagat

SEQ ID NO: 5241740 - DNA, 25 bp, Homo sapien
tacccagatagtaatttgaactctc

SEQ ID NO: 5241741 - DNA, 25 bp, Homo sapien
gagctctgcactacccagatagtaa

SEQ ID NO: 5241742 - DNA, 25 bp, Homo sapien
gaaatgtaaatattttgaatttgaa

SEQ ID NO: 5241743 - DNA, 25 bp, Homo sapien
tgtaaatattttgaatttgaatgcc

SEQ ID NO: 5241744 - DNA, 25 bp, Homo sapien
ctgaaatgtaaatattttgaatttg

SEQ ID NO: 5241745 - DNA, 25 bp, Homo sapien
atgtaaatattttgaatttgaatgc

SEQ ID NO: 5241746 - DNA, 25 bp, Homo sapien
agtggaattcttagaccaagcatcc

SEQ ID NO: 5241747 - DNA, 25 bp, Homo sapien
cacttggtttgtcttcagtagtcct

SEQ ID NO: 5241748 - DNA, 25 bp, Homo sapien
ccatccaaccgtagcactggagctg

SEQ ID NO: 5241749 - DNA, 25 bp, Homo sapien
tactgcagataatttggaccactcc

SEQ ID NO: 5241750 - DNA, 25 bp, Homo sapien
ggtctgatatgaccacccacttaat

SEQ ID NO: 5241751 - DNA, 25 bp, Homo sapien
tatgaccacccacttaattcagggt

SEQ ID NO: 5241752 - DNA, 25 bp, Homo sapien
tctgatatgaccacccacttaattc

SEQ ID NO: 5241753 - DNA, 25 bp, Homo sapien
gatatgaccacccacttaattcagg

SEQ ID NO: 5241754 - DNA, 25 bp, Homo sapien
aaactgaaactctaattctgttcca

SEQ ID NO: 5241755 - DNA, 25 bp, Homo sapien
gtgacaaactgaaactctaattctg

SEQ ID NO: 5241756 - DNA, 25 bp, Homo sapien
tgtgacaaactgaaactctaattct

SEQ ID NO: 5241757 - DNA, 25 bp, Homo sapien
gacaaactgaaactctaattctgtt

SEQ ID NO: 5241758 - DNA, 25 bp, Homo sapien
ttgagccgatgtatcaacgtcctcg

SEQ ID NO: 5241759 - DNA, 25 bp, Homo sapien
gatattggctggatcttgcttgcgg

SEQ ID NO: 5241760 - DNA, 25 bp, Homo sapien
tagcccaagcttgatgacaggagcg

SEQ ID NO: 5241761 - DNA, 25 bp, Homo sapien
aacgtcctcggtgctctttgtgcca

SEQ ID NO: 5241762 - DNA, 25 bp, Homo sapien
actttgtcttcgctgctgtttccca

SEQ ID NO: 5241763 - DNA, 25 bp, Homo sapien
aggtgaagaaagactttgtcttcgc

SEQ ID NO: 5241764 - DNA, 25 bp, Homo sapien
gatgctggaaattgcaaggtgaaga

SEQ ID NO: 5241765 - DNA, 25 bp, Homo sapien
gtttcccagtgaggaagagatccaa

SEQ ID NO: 5241766 - DNA, 25 bp, Homo sapien
gcttctcgagttgctcaaggggcca

SEQ ID NO: 5241767 - DNA, 25 bp, Homo sapien
ttttaacagatgatgcaccaacaga

SEQ ID NO: 5241768 - DNA, 25 bp, Homo sapien
ttaaggctgtcacgtttttaacaga

SEQ ID NO: 5241769 - DNA, 25 bp, Homo sapien
tcttggttccatatacaattaaggc

SEQ ID NO: 5241770 - DNA, 25 bp, Homo sapien
gaagctttgtgttagccagattctg

SEQ ID NO: 5241771 - DNA, 25 bp, Homo sapien
gtccagccttaaaccgactcttcat

SEQ ID NO: 5241772 - DNA, 25 bp, Homo sapien
ttctgtccagccttaaaccgactct

SEQ ID NO: 5241773 - DNA, 25 bp, Homo sapien
tctgtccagccttaaaccgactctt

SEQ ID NO: 5241774 - DNA, 25 bp, Homo sapien
gataaaatcttgatcagtgctttta

SEQ ID NO: 5241775 - DNA, 25 bp, Homo sapien
atcagaatcaccttgtggaaatgca

SEQ ID NO: 5241776 - DNA, 25 bp, Homo sapien
ttgggcctgggggattctcattctg

SEQ ID NO: 5241777 - DNA, 25 bp, Homo sapien
gaaatgcagattccaaggctccctg

SEQ ID NO: 5241778 - DNA, 25 bp, Homo sapien
tatattcactaatgttgtctcttta

SEQ ID NO: 5241779 - DNA, 25 bp, Homo sapien
atatattcactaatgttgtctcttt

SEQ ID NO: 5241780 - DNA, 25 bp, Homo sapien
ctgggaaaggataagctctgggcca

SEQ ID NO: 5241781 - DNA, 25 bp, Homo sapien
tcattttggagaatacatcccagag

SEQ ID NO: 5241782 - DNA, 25 bp, Homo sapien
tccttctttaggacagggatgacat

SEQ ID NO: 5241783 - DNA, 25 bp, Homo sapien
tcagaacgaatccatttggaggtaa

SEQ ID NO: 5241784 - DNA, 25 bp, Homo sapien
ggacctactggaccagaaacaagcc

SEQ ID NO: 5241785 - DNA, 25 bp, Homo sapien
tacccaggggtctttgggagaggca

SEQ ID NO: 5241786 - DNA, 25 bp, Homo sapien
gaggtctgagcttttgtagctgtag

SEQ ID NO: 5241787 - DNA, 25 bp, Homo sapien
tattagctctagacactactgtccc

SEQ ID NO: 5241788 - DNA, 25 bp, Homo sapien
cccattgtgggtgctttctataaaa

SEQ ID NO: 5241789 - DNA, 25 bp, Homo sapien
ggtccttgtaggactcttggtggta

SEQ ID NO: 5241790 - DNA, 25 bp, Homo sapien
tgctcagcctcagtgtgtgctcacc

SEQ ID NO: 5241791 - DNA, 25 bp, Homo sapien
tttcgggagccaatgcaggagtcct

SEQ ID NO: 5241792 - DNA, 25 bp, Homo sapien
tcgggagccaatgcaggagtcctgc

SEQ ID NO: 5241793 - DNA, 25 bp, Homo sapien
gctttcgggagccaatgcaggagtc

SEQ ID NO: 5241794 - DNA, 25 bp, Homo sapien
tgagctttcgggagccaatgcagga

SEQ ID NO: 5241795 - DNA, 25 bp, Homo sapien
ctgtgaggtccttgcatagtgtgga

SEQ ID NO: 5241796 - DNA, 25 bp, Homo sapien
tccttgcatagtgtggacacctcct

SEQ ID NO: 5241797 - DNA, 25 bp, Homo sapien
gatctttagggctgtgaggtccttg

SEQ ID NO: 5241798 - DNA, 25 bp, Homo sapien
catgatctttagggctgtgaggtcc

SEQ ID NO: 5241799 - DNA, 25 bp, Homo sapien
atgggggttgtcctggtgtgccttc

SEQ ID NO: 5241800 - DNA, 25 bp, Homo sapien
cagggagttcgtgatacctcgaaac

SEQ ID NO: 5241801 - DNA, 25 bp, Homo sapien
ggatgccaatcacgatctcccatgg

SEQ ID NO: 5241802 - DNA, 25 bp, Homo sapien
gacagctcctagaagttggtcacag

SEQ ID NO: 5241803 - DNA, 25 bp, Homo sapien
gcagtgctcctcaatctatctgaag

SEQ ID NO: 5241804 - DNA, 25 bp, Homo sapien
gaagaatccatggtgcaaagagagg

SEQ ID NO: 5241805 - DNA, 25 bp, Homo sapien
ggctgagaagttgcccacagatgtt

SEQ ID NO: 5241806 - DNA, 25 bp, Homo sapien
gttgcccacagatgttggttgctga

SEQ ID NO: 5241807 - DNA, 25 bp, Homo sapien
cctgggctcccatgttgagcaaatc

SEQ ID NO: 5241808 - DNA, 25 bp, Homo sapien
agagtttaatgggattaatttggct

SEQ ID NO: 5241809 - DNA, 25 bp, Homo sapien
gagtttaatgggattaatttggctg

SEQ ID NO: 5241810 - DNA, 25 bp, Homo sapien
gtttaatgggattaatttggctgac

SEQ ID NO: 5241811 - DNA, 25 bp, Homo sapien
ttaatttggctgacatgttcaattt

SEQ ID NO: 5241812 - DNA, 25 bp, Homo sapien
atccacccgtgttggtcttctgaag

SEQ ID NO: 5241813 - DNA, 25 bp, Homo sapien
tcaaattacggatgtagtatagtac

SEQ ID NO: 5241814 - DNA, 25 bp, Homo sapien
tccacagccgactatgatctttaag

SEQ ID NO: 5241815 - DNA, 25 bp, Homo sapien
tatgtttcagctaaggaaaaatcct

SEQ ID NO: 5241816 - DNA, 25 bp, Homo sapien
tactaacaagtatcaattaacctga

SEQ ID NO: 5241817 - DNA, 25 bp, Homo sapien
cctgagatgatctatttacaatgta

SEQ ID NO: 5241818 - DNA, 25 bp, Homo sapien
tgttttaagcatttctcttcagggt

SEQ ID NO: 5241819 - DNA, 25 bp, Homo sapien
tacaatgtaaccattctggattaga

SEQ ID NO: 5241820 - DNA, 25 bp, Homo sapien
tggaattcagccctacacaagaact

SEQ ID NO: 5241821 - DNA, 25 bp, Homo sapien
tctgatagaaccatttaatgtggaa

SEQ ID NO: 5241822 - DNA, 25 bp, Homo sapien
cacgcattaactgaatctcagcatt

SEQ ID NO: 5241823 - DNA, 25 bp, Homo sapien
gaactttcgataagttcttcatgaa

SEQ ID NO: 5241824 - DNA, 25 bp, Homo sapien
gcctgaccttctcaggctttattag

SEQ ID NO: 5241825 - DNA, 25 bp, Homo sapien
gaggggcgttctccctgagttccca

SEQ ID NO: 5241826 - DNA, 25 bp, Homo sapien
ccttctcaggctttattagactcac

SEQ ID NO: 5241827 - DNA, 25 bp, Homo sapien
gggcgttctccctgagttcccaggc

SEQ ID NO: 5241828 - DNA, 25 bp, Homo sapien
cactttagttatggacagggcttct

SEQ ID NO: 5241829 - DNA, 25 bp, Homo sapien
gataattccatattagacactttag

SEQ ID NO: 5241830 - DNA, 25 bp, Homo sapien
tagttatggacagggcttctcagac

SEQ ID NO: 5241831 - DNA, 25 bp, Homo sapien
aaatatatctcttctgggcaaggtg

SEQ ID NO: 5241832 - DNA, 25 bp, Homo sapien
catcatagtttttccggttcttttg

SEQ ID NO: 5241833 - DNA, 25 bp, Homo sapien
tttgtcaccatatttggataaaggt

SEQ ID NO: 5241834 - DNA, 25 bp, Homo sapien
aatccatcatagtttttccggttct

SEQ ID NO: 5241835 - DNA, 25 bp, Homo sapien
aggtatctcttgaacctcattcaaa

SEQ ID NO: 5241836 - DNA, 25 bp, Homo sapien
tcttttctttcctcgcttcttgtca

SEQ ID NO: 5241837 - DNA, 25 bp, Homo sapien
caatacaattttgtaaagatggacc

SEQ ID NO: 5241838 - DNA, 25 bp, Homo sapien
tcaatacaattttgtaaagatggac

SEQ ID NO: 5241839 - DNA, 25 bp, Homo sapien
tctttcctcgcttcttgtcacccag

SEQ ID NO: 5241840 - DNA, 25 bp, Homo sapien
tagaagctgctatcttgactgaggt

SEQ ID NO: 5241841 - DNA, 25 bp, Homo sapien
gaatataagggacattccaataagg

SEQ ID NO: 5241842 - DNA, 25 bp, Homo sapien
ggtttatagagacctagagatacag

SEQ ID NO: 5241843 - DNA, 25 bp, Homo sapien
aatagtactgtaactgcaattcaca

SEQ ID NO: 5241844 - DNA, 25 bp, Homo sapien
tttgtatttttcatcgagatggggt

SEQ ID NO: 5241845 - DNA, 25 bp, Homo sapien
tgtatttttcatcgagatggggttt

SEQ ID NO: 5241846 - DNA, 25 bp, Homo sapien
atttttcatcgagatggggttttgt

SEQ ID NO: 5241847 - DNA, 25 bp, Homo sapien
ggggttttgtcatgttggccaggct

SEQ ID NO: 5241848 - DNA, 25 bp, Homo sapien
caaagagatggcgtgatagcaatac

SEQ ID NO: 5241849 - DNA, 25 bp, Homo sapien
tctctcaccaattcaaggatttggg

SEQ ID NO: 5241850 - DNA, 25 bp, Homo sapien
gatgctggtgtaggctcactctctc

SEQ ID NO: 5241851 - DNA, 25 bp, Homo sapien
tgctaaccttatagggctgctggga

SEQ ID NO: 5241852 - DNA, 25 bp, Homo sapien
ttgtcaagggataaatttgactcat

SEQ ID NO: 5241853 - DNA, 25 bp, Homo sapien
ttctgcgtactcatccttgtagaca

SEQ ID NO: 5241854 - DNA, 25 bp, Homo sapien
cttctgcgtactcatccttgtagac

SEQ ID NO: 5241855 - DNA, 25 bp, Homo sapien
ggttgtcaagggataaatttgactc

SEQ ID NO: 5241856 - DNA, 25 bp, Homo sapien
ctagtactttacacacagaaaatgg

SEQ ID NO: 5241857 - DNA, 25 bp, Homo sapien
ttgtatctggatcacactgtttgaa

SEQ ID NO: 5241858 - DNA, 25 bp, Homo sapien
gatttcatatctggtgcatgttggg

SEQ ID NO: 5241859 - DNA, 25 bp, Homo sapien
ctggatcacactgtttgaagcaact

SEQ ID NO: 5241860 - DNA, 25 bp, Homo sapien
aagttgatcaacaaagagagccggg

SEQ ID NO: 5241861 - DNA, 25 bp, Homo sapien
taaggccctgcgtttctgagtcatc

SEQ ID NO: 5241862 - DNA, 25 bp, Homo sapien
tgctcctctggacaatacctgtggt

SEQ ID NO: 5241863 - DNA, 25 bp, Homo sapien
gtttggctgcacacactagcggcat

SEQ ID NO: 5241864 - DNA, 25 bp, Homo sapien
ccacgatggtgagtgcgggggaacc

SEQ ID NO: 5241865 - DNA, 25 bp, Homo sapien
cagcgctccttgctcgcaaggcggg

SEQ ID NO: 5241866 - DNA, 25 bp, Homo sapien
cgccctcgcttctccagcgctcctt

SEQ ID NO: 5241867 - DNA, 25 bp, Homo sapien
cccagccacgatggtgagtgcgggg

SEQ ID NO: 5241868 - DNA, 25 bp, Homo sapien
tgcggaaggaatacaggacacactc

SEQ ID NO: 5241869 - DNA, 25 bp, Homo sapien
cggcagaatcgcgaaaagtccccgg

SEQ ID NO: 5241870 - DNA, 25 bp, Homo sapien
ggcactttctgcgagtgtatcggaa

SEQ ID NO: 5241871 - DNA, 25 bp, Homo sapien
taggaggcttaggataaggcagccc

SEQ ID NO: 5241872 - DNA, 25 bp, Homo sapien
agaaacccttacagcacaaggctct

SEQ ID NO: 5241873 - DNA, 25 bp, Homo sapien
aaccggaaccatgtaacacactgta

SEQ ID NO: 5241874 - DNA, 25 bp, Homo sapien
ggaaccatgtaacacactgtacttg

SEQ ID NO: 5241875 - DNA, 25 bp, Homo sapien
ctaaaagcctctttaggatctgacc

SEQ ID NO: 5241876 - DNA, 25 bp, Homo sapien
gggaactcctctttagactggtaca

SEQ ID NO: 5241877 - DNA, 25 bp, Homo sapien
agcattatgtccctatgccctgcag

SEQ ID NO: 5241878 - DNA, 25 bp, Homo sapien
atttaaagtctcacccaattgggca

SEQ ID NO: 5241879 - DNA, 25 bp, Homo sapien
ctttgaatttcacggccagatgacc

SEQ ID NO: 5241880 - DNA, 25 bp, Homo sapien
gcaataaaagccacaacctaaagga

SEQ ID NO: 5241881 - DNA, 25 bp, Homo sapien
gggaggggcctactcaaggcatcca

SEQ ID NO: 5241882 - DNA, 25 bp, Homo sapien
ttagggatctgtctggcacccacca

SEQ ID NO: 5241883 - DNA, 25 bp, Homo sapien
ccctggtgactgtaaacctgtggca

SEQ ID NO: 5241884 - DNA, 25 bp, Homo sapien
gcatctggcttgctggcttttgccc

SEQ ID NO: 5241885 - DNA, 25 bp, Homo sapien
gaactagaggcgcatgccaacactc

SEQ ID NO: 5241886 - DNA, 25 bp, Homo sapien
actagaggcgcatgccaacactcct

SEQ ID NO: 5241887 - DNA, 25 bp, Homo sapien
agaggcgcatgccaacactcctggc

SEQ ID NO: 5241888 - DNA, 25 bp, Homo sapien
ggaactagaggcgcatgccaacact

SEQ ID NO: 5241889 - DNA, 25 bp, Homo sapien
agagcctgcttctgtgtgcgatgac

SEQ ID NO: 5241890 - DNA, 25 bp, Homo sapien
gaatcctatgcatgtgaccgcacag

SEQ ID NO: 5241891 - DNA, 25 bp, Homo sapien
tgttgagtttcatgtgaaattcgag

SEQ ID NO: 5241892 - DNA, 25 bp, Homo sapien
gatgactgttctgcttgtttgttga

SEQ ID NO: 5241893 - DNA, 25 bp, Homo sapien
ttagcgcgttgcttcagtgactctc

SEQ ID NO: 5241894 - DNA, 25 bp, Homo sapien
tttgaatccgtggaaccttggccca

SEQ ID NO: 5241895 - DNA, 25 bp, Homo sapien
catccagggtggcaactccatacct

SEQ ID NO: 5241896 - DNA, 25 bp, Homo sapien
gaggcctcagcaggacttggcccat

SEQ ID NO: 5241897 - DNA, 25 bp, Homo sapien
aactgttctttgctcctatttgtgg

SEQ ID NO: 5241898 - DNA, 25 bp, Homo sapien
ccagagatgctagaaaactgttctt

SEQ ID NO: 5241899 - DNA, 25 bp, Homo sapien
catctgctcatcgtaagtgtaaggc

SEQ ID NO: 5241900 - DNA, 25 bp, Homo sapien
atgtttctataagatatggtgccct

SEQ ID NO: 5241901 - DNA, 25 bp, Homo sapien
tctctagggatatggaagtaagtgg

SEQ ID NO: 5241902 - DNA, 25 bp, Homo sapien
aaagcttttgggcactgtgtaccag

SEQ ID NO: 5241903 - DNA, 25 bp, Homo sapien
taaaaagaagttagtgacccagagc

SEQ ID NO: 5241904 - DNA, 25 bp, Homo sapien
gacccagagctataatcatccatca

SEQ ID NO: 5241905 - DNA, 25 bp, Homo sapien
tctgagagttggaagtagcaacagc

SEQ ID NO: 5241906 - DNA, 25 bp, Homo sapien
tggaagtagcaacagcctgaggaac

SEQ ID NO: 5241907 - DNA, 25 bp, Homo sapien
gcccagagatagatctgagagttgg

SEQ ID NO: 5241908 - DNA, 25 bp, Homo sapien
aggaacgcgtatcagtgctgggaaa

SEQ ID NO: 5241909 - DNA, 25 bp, Homo sapien
ttactgaagaccattatcaagtttt

SEQ ID NO: 5241910 - DNA, 25 bp, Homo sapien
tactgaagaccattatcaagttttc

SEQ ID NO: 5241911 - DNA, 25 bp, Homo sapien
tgctttcttaagaggtattccaggg

SEQ ID NO: 5241912 - DNA, 25 bp, Homo sapien
cccttgaggagggatgcatccactg

SEQ ID NO: 5241913 - DNA, 25 bp, Homo sapien
cttgaggagggatgcatccactgag

SEQ ID NO: 5241914 - DNA, 25 bp, Homo sapien
ttcccttgaggagggatgcatccac

SEQ ID NO: 5241915 - DNA, 25 bp, Homo sapien
aggagggatgcatccactgaggcaa

SEQ ID NO: 5241916 - DNA, 25 bp, Homo sapien
gtcttccgtacggttcagccactct

SEQ ID NO: 5241917 - DNA, 25 bp, Homo sapien
cttgtcttccgtacggttcagccac

SEQ ID NO: 5241918 - DNA, 25 bp, Homo sapien
ttcagccactctctgttttaagcaa

SEQ ID NO: 5241919 - DNA, 25 bp, Homo sapien
cttccgtacggttcagccactctct

SEQ ID NO: 5241920 - DNA, 25 bp, Homo sapien
gaaggtggatttagggcataacctg

SEQ ID NO: 5241921 - DNA, 25 bp, Homo sapien
gagtcataggcgctaaggttgtcag

SEQ ID NO: 5241922 - DNA, 25 bp, Homo sapien
gcataacctgagctggacgtattca

SEQ ID NO: 5241923 - DNA, 25 bp, Homo sapien
ggatttgagataaccactggtgggt

SEQ ID NO: 5241924 - DNA, 25 bp, Homo sapien
gaacgaaagtagtcgggccagtgtc

SEQ ID NO: 5241925 - DNA, 25 bp, Homo sapien
tgcacgagagaaaacgatggaagac

SEQ ID NO: 5241926 - DNA, 25 bp, Homo sapien
cgatggaagacggaacgaaagtagt

SEQ ID NO: 5241927 - DNA, 25 bp, Homo sapien
cacgagagaaaacgatggaagacgg

SEQ ID NO: 5241928 - DNA, 25 bp, Homo sapien
tgccgctctaactccttctggaagc

SEQ ID NO: 5241929 - DNA, 25 bp, Homo sapien
tgctgcagcaatcttaccagcccgg

SEQ ID NO: 5241930 - DNA, 25 bp, Homo sapien
aaggcggcgcggaatcccttcttca

SEQ ID NO: 5241931 - DNA, 25 bp, Homo sapien
cgcagaaggcgctgccgctctaact

SEQ ID NO: 5241932 - DNA, 25 bp, Homo sapien
tgtctccatcgcaaacttcctaagg

SEQ ID NO: 5241933 - DNA, 25 bp, Homo sapien
ttcagtagccaaaatcctaaatggt

SEQ ID NO: 5241934 - DNA, 25 bp, Homo sapien
cgcccgcggcacaaatccatttttt

SEQ ID NO: 5241935 - DNA, 25 bp, Homo sapien
acgccgcgggaagaagacccagtgt

SEQ ID NO: 5241936 - DNA, 25 bp, Homo sapien
cctgtaaccgatgtccaaaagcttg

SEQ ID NO: 5241937 - DNA, 25 bp, Homo sapien
gcatgtctgggtactcgtcttcaag

SEQ ID NO: 5241938 - DNA, 25 bp, Homo sapien
gccaagtttctagccacgtgacaca

SEQ ID NO: 5241939 - DNA, 25 bp, Homo sapien
gaaaagtgcagtcctctcaggtcca

SEQ ID NO: 5241940 - DNA, 25 bp, Homo sapien
tccaaggtgatatatcaaagaagtg

SEQ ID NO: 5241941 - DNA, 25 bp, Homo sapien
taatattcacttctgatgatatcca

SEQ ID NO: 5241942 - DNA, 25 bp, Homo sapien
ggaataattacagcccttccataaa

SEQ ID NO: 5241943 - DNA, 25 bp, Homo sapien
gcatgtccaattaatagttacgtac

SEQ ID NO: 5241944 - DNA, 25 bp, Homo sapien
ctatgaacaaagcctgaagtgtcag

SEQ ID NO: 5241945 - DNA, 25 bp, Homo sapien
caaagcctgaagtgtcagtaaatac

SEQ ID NO: 5241946 - DNA, 25 bp, Homo sapien
aagcctgaagtgtcagtaaatacag

SEQ ID NO: 5241947 - DNA, 25 bp, Homo sapien
tgaacaaagcctgaagtgtcagtaa

SEQ ID NO: 5241948 - DNA, 25 bp, Homo sapien
ccatctgaataatgagctgtgagta

SEQ ID NO: 5241949 - DNA, 25 bp, Homo sapien
gaataatgagctgtgagtagcatca

SEQ ID NO: 5241950 - DNA, 25 bp, Homo sapien
tgaataatgagctgtgagtagcatc

SEQ ID NO: 5241951 - DNA, 25 bp, Homo sapien
tctgaataatgagctgtgagtagca

SEQ ID NO: 5241952 - DNA, 25 bp, Homo sapien
tcagttcttctaccaatagccccat

SEQ ID NO: 5241953 - DNA, 25 bp, Homo sapien
caatagccccatgggatttattatc

SEQ ID NO: 5241954 - DNA, 25 bp, Homo sapien
tttattatcttccacatctcaaaga

SEQ ID NO: 5241955 - DNA, 25 bp, Homo sapien
tagtaagtcttgattcaggagctga

SEQ ID NO: 5241956 - DNA, 25 bp, Homo sapien
taatttattcccaagtgaggtaaca

SEQ ID NO: 5241957 - DNA, 25 bp, Homo sapien
ggtaacactcaatgttggctatgag

SEQ ID NO: 5241958 - DNA, 25 bp, Homo sapien
tattcccaagtgaggtaacactcaa

SEQ ID NO: 5241959 - DNA, 25 bp, Homo sapien
tctaatccactctaatttattccca

SEQ ID NO: 5241960 - DNA, 25 bp, Homo sapien
cggccgtctattttctgtgaatcca

SEQ ID NO: 5241961 - DNA, 25 bp, Homo sapien
tctttgggcttggaatagttccacg

SEQ ID NO: 5241962 - DNA, 25 bp, Homo sapien
tcttcttctgcaaccaatactgttt

SEQ ID NO: 5241963 - DNA, 25 bp, Homo sapien
ttttctaagggccactcgagcagcc

SEQ ID NO: 5241964 - DNA, 25 bp, Homo sapien
catttatctcactttcgctctcaag

SEQ ID NO: 5241965 - DNA, 25 bp, Homo sapien
aaatgtctggcttgaaacacctttg

SEQ ID NO: 5241966 - DNA, 25 bp, Homo sapien
ctttcgctctcaagtttcaggctgc

SEQ ID NO: 5241967 - DNA, 25 bp, Homo sapien
ggcttgaaacacctttgacatttat

SEQ ID NO: 5241968 - DNA, 25 bp, Homo sapien
gatttgatcaaaccaagatttcaga

SEQ ID NO: 5241969 - DNA, 25 bp, Homo sapien
agatttgatcaaaccaagatttcag

SEQ ID NO: 5241970 - DNA, 25 bp, Homo sapien
aaagatttgatcaaaccaagatttc

SEQ ID NO: 5241971 - DNA, 25 bp, Homo sapien
aaaaaagatttgatcaaaccaagat

SEQ ID NO: 5241972 - DNA, 25 bp, Homo sapien
atttgatctggtcgggtatagtggc

SEQ ID NO: 5241973 - DNA, 25 bp, Homo sapien
agctagacgcaaataaaatacacct

SEQ ID NO: 5241974 - DNA, 25 bp, Homo sapien
tgatacctcaaagctagacgcaaat

SEQ ID NO: 5241975 - DNA, 25 bp, Homo sapien
tggtattacagcaaaaaattcacat

SEQ ID NO: 5241976 - DNA, 25 bp, Homo sapien
gatgctggataagtggtcagaagac

SEQ ID NO: 5241977 - DNA, 25 bp, Homo sapien
cagatgctggataagtggtcagaag

SEQ ID NO: 5241978 - DNA, 25 bp, Homo sapien
atgctggataagtggtcagaagaca

SEQ ID NO: 5241979 - DNA, 25 bp, Homo sapien
tgctggataagtggtcagaagacat

SEQ ID NO: 5241980 - DNA, 25 bp, Homo sapien
tacgtctggcttcaggaactgtccc

SEQ ID NO: 5241981 - DNA, 25 bp, Homo sapien
tcccgatggacacaggattcccttg

SEQ ID NO: 5241982 - DNA, 25 bp, Homo sapien
gagctggccaccctgatgggaagac

SEQ ID NO: 5241983 - DNA, 25 bp, Homo sapien
ttaggatgaagaacgtgggcagcat

SEQ ID NO: 5241984 - DNA, 25 bp, Homo sapien
gggattcccaaactgtgccttcgac

SEQ ID NO: 5241985 - DNA, 25 bp, Homo sapien
actgagagtcggctttgggaggccc

SEQ ID NO: 5241986 - DNA, 25 bp, Homo sapien
actgtgccttcgaccatctcttaaa

SEQ ID NO: 5241987 - DNA, 25 bp, Homo sapien
ttctctggggattcccaaactgtgc

SEQ ID NO: 5241988 - DNA, 25 bp, Homo sapien
caaggttgctgttgtgcagtgtgcc

SEQ ID NO: 5241989 - DNA, 25 bp, Homo sapien
tcttaggaacagactcgatgcaagt

SEQ ID NO: 5241990 - DNA, 25 bp, Homo sapien
caacgactactttgctacgaagaaa

SEQ ID NO: 5241991 - DNA, 25 bp, Homo sapien
ggcagataaacaaaccctgaagagt

SEQ ID NO: 5241992 - DNA, 25 bp, Homo sapien
ttctaagaatattggcccgttggcc

SEQ ID NO: 5241993 - DNA, 25 bp, Homo sapien
gaggaccatcaaggtgactctggca

SEQ ID NO: 5241994 - DNA, 25 bp, Homo sapien
gactctggcaggatgttttaggaca

SEQ ID NO: 5241995 - DNA, 25 bp, Homo sapien
gacagtgccattttgaagagacccc

SEQ ID NO: 5241996 - DNA, 25 bp, Homo sapien
caagaagcagctcgccatggtgatg

SEQ ID NO: 5241997 - DNA, 25 bp, Homo sapien
tgtgcacaattgctcactggcggag

SEQ ID NO: 5241998 - DNA, 25 bp, Homo sapien
tctgtctctcgaggaactaggctcc

SEQ ID NO: 5241999 - DNA, 25 bp, Homo sapien
tcaatcagattgtgaagtcgaggcc

SEQ ID NO: 5242000 - DNA, 25 bp, Homo sapien
tgctgtgtgtcggttgtttgtcgct

SEQ ID NO: 5242001 - DNA, 25 bp, Homo sapien
ccgtgctgtgtgtcggttgtttgtc

SEQ ID NO: 5242002 - DNA, 25 bp, Homo sapien
cttgccgtgctgtgtgtcggttgtt

SEQ ID NO: 5242003 - DNA, 25 bp, Homo sapien
tgtgtcggttgtttgtcgctggcat

SEQ ID NO: 5242004 - DNA, 25 bp, Homo sapien
tgctgtttttctctacctgctgtag

SEQ ID NO: 5242005 - DNA, 25 bp, Homo sapien
ctgctgtttttctctacctgctgta

SEQ ID NO: 5242006 - DNA, 25 bp, Homo sapien
tgtttttctctacctgctgtagccc

SEQ ID NO: 5242007 - DNA, 25 bp, Homo sapien
gctgtttttctctacctgctgtagc

SEQ ID NO: 5242008 - DNA, 25 bp, Homo sapien
tcatctacatcctgttgagaagttt

SEQ ID NO: 5242009 - DNA, 25 bp, Homo sapien
atttgtcagcccaggttcatctaca

SEQ ID NO: 5242010 - DNA, 25 bp, Homo sapien
aggttcatctacatcctgttgagaa

SEQ ID NO: 5242011 - DNA, 25 bp, Homo sapien
tccaatttgtcagcccaggttcatc

SEQ ID NO: 5242012 - DNA, 25 bp, Homo sapien
ccagcaattggtgttgtcactagta

SEQ ID NO: 5242013 - DNA, 25 bp, Homo sapien
tagtcccttgacagatacgtgattg

SEQ ID NO: 5242014 - DNA, 25 bp, Homo sapien
aactgttttctagagcggctgtgcc

SEQ ID NO: 5242015 - DNA, 25 bp, Homo sapien
catctggacatatagtgacatctca

SEQ ID NO: 5242016 - DNA, 25 bp, Homo sapien
ctagagggtaaaagagagtccacaa

SEQ ID NO: 5242017 - DNA, 25 bp, Homo sapien
tcttaatgtatacaccccacacagg

SEQ ID NO: 5242018 - DNA, 25 bp, Homo sapien
tatttgggtgacgtgcagctgaaga

SEQ ID NO: 5242019 - DNA, 25 bp, Homo sapien
ccgatcctagagtcccatggctgat

SEQ ID NO: 5242020 - DNA, 25 bp, Homo sapien
agctggcacagaggagcccaaaaag

SEQ ID NO: 5242021 - DNA, 25 bp, Homo sapien
gctggcacagaggagcccaaaaagt

SEQ ID NO: 5242022 - DNA, 25 bp, Homo sapien
ctggcacagaggagcccaaaaagta

SEQ ID NO: 5242023 - DNA, 25 bp, Homo sapien
cctgcaagtggagtatcttattctt

SEQ ID NO: 5242024 - DNA, 25 bp, Homo sapien
ggaacctgcaagtggagtatcttat

SEQ ID NO: 5242025 - DNA, 25 bp, Homo sapien
gccctgttaggaacctgcaagtgga

SEQ ID NO: 5242026 - DNA, 25 bp, Homo sapien
tgttaggaacctgcaagtggagtat

SEQ ID NO: 5242027 - DNA, 25 bp, Homo sapien
gtcgcacagcctttatgtgtcagtg

SEQ ID NO: 5242028 - DNA, 25 bp, Homo sapien
cccgggtctgtagatgtgtgaaccg

SEQ ID NO: 5242029 - DNA, 25 bp, Homo sapien
cctgtgaatatgtagggtcgcacag

SEQ ID NO: 5242030 - DNA, 25 bp, Homo sapien
cctggacccgggtctgtagatgtgt

SEQ ID NO: 5242031 - DNA, 25 bp, Homo sapien
ttctcctcctgtgttcattgtctgg

SEQ ID NO: 5242032 - DNA, 25 bp, Homo sapien
cgtaaactgcactggtaccgcccag

SEQ ID NO: 5242033 - DNA, 25 bp, Homo sapien
catttgtaatgacccaacagagtca

SEQ ID NO: 5242034 - DNA, 25 bp, Homo sapien
tgctggccatttgtaatgacccaac

SEQ ID NO: 5242035 - DNA, 25 bp, Homo sapien
aaattccacaaaggtccgctctagt

SEQ ID NO: 5242036 - DNA, 25 bp, Homo sapien
ctctagtcacgctggccttgccttg

SEQ ID NO: 5242037 - DNA, 25 bp, Homo sapien
ggtgatgccaggctcccgcactgcc

SEQ ID NO: 5242038 - DNA, 25 bp, Homo sapien
acaaaggtccgctctagtcacgctg

SEQ ID NO: 5242039 - DNA, 25 bp, Homo sapien
tcaggtattatggaagatgctgttg

SEQ ID NO: 5242040 - DNA, 25 bp, Homo sapien
aaggtgttcgaaggtgtgacttcct

SEQ ID NO: 5242041 - DNA, 25 bp, Homo sapien
tggagaaatctcgaatgctgctgtc

SEQ ID NO: 5242042 - DNA, 25 bp, Homo sapien
tagcatcagcataaaaaggtgttcg

SEQ ID NO: 5242043 - DNA, 25 bp, Homo sapien
taaaatgaaagtacggtactcagaa

SEQ ID NO: 5242044 - DNA, 25 bp, Homo sapien
gtaaaatgaaagtacggtactcaga

SEQ ID NO: 5242045 - DNA, 25 bp, Homo sapien
gatttaacccgagcgagcaggtctt

SEQ ID NO: 5242046 - DNA, 25 bp, Homo sapien
tcatctgtagaaacgggagttgcga

SEQ ID NO: 5242047 - DNA, 25 bp, Homo sapien
tggcctctggcagccgatttaaccc

SEQ ID NO: 5242048 - DNA, 25 bp, Homo sapien
gcagagggaggtgacgcgcggtgtg

SEQ ID NO: 5242049 - DNA, 25 bp, Homo sapien
gttgcggccgcaccgccctccgcgg

SEQ ID NO: 5242050 - DNA, 25 bp, Homo sapien
cgccgcttggctgcgtcctccgact

SEQ ID NO: 5242051 - DNA, 25 bp, Homo sapien
gcgccgccgagaccaggctcccgct

SEQ ID NO: 5242052 - DNA, 25 bp, Homo sapien
caggctcccgctccggttgcggccg

SEQ ID NO: 5242053 - DNA, 25 bp, Homo sapien
gggtctgcgcgtctccccggcgcgt

SEQ ID NO: 5242054 - DNA, 25 bp, Homo sapien
gttccgggcgcagccccacgacacg

SEQ ID NO: 5242055 - DNA, 25 bp, Homo sapien
gggctggcgccgcacctcggggtct

SEQ ID NO: 5242056 - DNA, 25 bp, Homo sapien
ggcatccgagaagtcgcaggcggag

SEQ ID NO: 5242057 - DNA, 25 bp, Homo sapien
taatccagggctgtgtatagggaga

SEQ ID NO: 5242058 - DNA, 25 bp, Homo sapien
tactgtcattaaagttgggtccttg

SEQ ID NO: 5242059 - DNA, 25 bp, Homo sapien
tagcgacgattctacactaacggct

SEQ ID NO: 5242060 - DNA, 25 bp, Homo sapien
gggccgtctgcctgctagcgacgat

SEQ ID NO: 5242061 - DNA, 25 bp, Homo sapien
ttccaagtggctctcatcagtagct

SEQ ID NO: 5242062 - DNA, 25 bp, Homo sapien
gactgcaggctgatcttccaagtgg

SEQ ID NO: 5242063 - DNA, 25 bp, Homo sapien
ggtgactgcaggctgatcttccaag

SEQ ID NO: 5242064 - DNA, 25 bp, Homo sapien
aagtggctctcatcagtagctgtac

SEQ ID NO: 5242065 - DNA, 25 bp, Homo sapien
ccagccatgcacactcagtaacaag

SEQ ID NO: 5242066 - DNA, 25 bp, Homo sapien
tattcccagcatatcccactggcag

SEQ ID NO: 5242067 - DNA, 25 bp, Homo sapien
aacaagtatagttggtattcccagc

SEQ ID NO: 5242068 - DNA, 25 bp, Homo sapien
cctttgggagacctcatcgttggcc

SEQ ID NO: 5242069 - DNA, 25 bp, Homo sapien
gaggggaacaagtgttggtggccac

SEQ ID NO: 5242070 - DNA, 25 bp, Homo sapien
gatttccttcccaacaaaatgctgc

SEQ ID NO: 5242071 - DNA, 25 bp, Homo sapien
agaagaggtgtttccactatcaaaa

SEQ ID NO: 5242072 - DNA, 25 bp, Homo sapien
aatagaagaggtgtttccactatca

SEQ ID NO: 5242073 - DNA, 25 bp, Homo sapien
ggtcatcatggacaagccaagccag

SEQ ID NO: 5242074 - DNA, 25 bp, Homo sapien
caagccagaaagagtcaggcaagca

SEQ ID NO: 5242075 - DNA, 25 bp, Homo sapien
aatgtatctaaacgcactattccca

SEQ ID NO: 5242076 - DNA, 25 bp, Homo sapien
gaccaaatgtatctaaacgcactat

SEQ ID NO: 5242077 - DNA, 25 bp, Homo sapien
ctctataagggctcagagtccattg

SEQ ID NO: 5242078 - DNA, 25 bp, Homo sapien
tttctctataagggctcagagtcca

SEQ ID NO: 5242079 - DNA, 25 bp, Homo sapien
tctctataagggctcagagtccatt

SEQ ID NO: 5242080 - DNA, 25 bp, Homo sapien
ccattgaccgtgattggagactgaa

SEQ ID NO: 5242081 - DNA, 25 bp, Homo sapien
cttccctgaactcctccactgtttt

SEQ ID NO: 5242082 - DNA, 25 bp, Homo sapien
gaactcctccactgttttctgcttc

SEQ ID NO: 5242083 - DNA, 25 bp, Homo sapien
cctgaactcctccactgttttctgc

SEQ ID NO: 5242084 - DNA, 25 bp, Homo sapien
tccctgaactcctccactgttttct

SEQ ID NO: 5242085 - DNA, 25 bp, Homo sapien
tggagcactggccacacttggttct

SEQ ID NO: 5242086 - DNA, 25 bp, Homo sapien
gaggccaatgctgaaataggcatgc

SEQ ID NO: 5242087 - DNA, 25 bp, Homo sapien
attcctctgctgttaggagagcctg

SEQ ID NO: 5242088 - DNA, 25 bp, Homo sapien
gggaatgcacttccacactcgaggc

SEQ ID NO: 5242089 - DNA, 25 bp, Homo sapien
ttagcactacatgccaggccttcat

SEQ ID NO: 5242090 - DNA, 25 bp, Homo sapien
catttttagcactacatgccaggcc

SEQ ID NO: 5242091 - DNA, 25 bp, Homo sapien
ttttagcactacatgccaggccttc

SEQ ID NO: 5242092 - DNA, 25 bp, Homo sapien
atcagcatttttagcactacatgcc

SEQ ID NO: 5242093 - DNA, 25 bp, Homo sapien
catgggtcgggatctcttcccatgg

SEQ ID NO: 5242094 - DNA, 25 bp, Homo sapien
tcatgggtcgggatctcttcccatg

SEQ ID NO: 5242095 - DNA, 25 bp, Homo sapien
atgggtcgggatctcttcccatgga

SEQ ID NO: 5242096 - DNA, 25 bp, Homo sapien
gcagagggccccagaagaacctgcc

SEQ ID NO: 5242097 - DNA, 25 bp, Homo sapien
gctcagaagcctgatacaggaccat

SEQ ID NO: 5242098 - DNA, 25 bp, Homo sapien
ccccagaagaacctgcctttccaga

SEQ ID NO: 5242099 - DNA, 25 bp, Homo sapien
acctgctcagaagcctgatacagga

SEQ ID NO: 5242100 - DNA, 25 bp, Homo sapien
gggatagataaggtactcagttgtt

SEQ ID NO: 5242101 - DNA, 25 bp, Homo sapien
gttcagggatagataaggtactcag

SEQ ID NO: 5242102 - DNA, 25 bp, Homo sapien
ctgttcagggatagataaggtactc

SEQ ID NO: 5242103 - DNA, 25 bp, Homo sapien
tcagggatagataaggtactcagtt

SEQ ID NO: 5242104 - DNA, 25 bp, Homo sapien
tcaaaatatttgattggattcaact

SEQ ID NO: 5242105 - DNA, 25 bp, Homo sapien
atatttgattggattcaactggatc

SEQ ID NO: 5242106 - DNA, 25 bp, Homo sapien
tgattggattcaactggatctcctt

SEQ ID NO: 5242107 - DNA, 25 bp, Homo sapien
tttgattggattcaactggatctcc

SEQ ID NO: 5242108 - DNA, 25 bp, Homo sapien
ctccactaactcttggtgctcttct

SEQ ID NO: 5242109 - DNA, 25 bp, Homo sapien
tcagttcatctgggctatggccaat

SEQ ID NO: 5242110 - DNA, 25 bp, Homo sapien
ccactaactcttggtgctcttctct

SEQ ID NO: 5242111 - DNA, 25 bp, Homo sapien
catctgggctatggccaatactcct

SEQ ID NO: 5242112 - DNA, 25 bp, Homo sapien
atgctgcctcttttaagggcagtcc

SEQ ID NO: 5242113 - DNA, 25 bp, Homo sapien
taagggcagtccctttcaacttcac

SEQ ID NO: 5242114 - DNA, 25 bp, Homo sapien
ctgcctcttttaagggcagtccctt

SEQ ID NO: 5242115 - DNA, 25 bp, Homo sapien
ttaagggcagtccctttcaacttca

SEQ ID NO: 5242116 - DNA, 25 bp, Homo sapien
aattcaggttgtcgatgctggctcc

SEQ ID NO: 5242117 - DNA, 25 bp, Homo sapien
cagctctggatgctagaactagaag

SEQ ID NO: 5242118 - DNA, 25 bp, Homo sapien
ggcattggctcataacagtcttcag

SEQ ID NO: 5242119 - DNA, 25 bp, Homo sapien
ttactatctggttgggcgagtcccc

SEQ ID NO: 5242120 - DNA, 25 bp, Homo sapien
taaagtatgggactggatactccat

SEQ ID NO: 5242121 - DNA, 25 bp, Homo sapien
ctaaagtatgggactggatactcca

SEQ ID NO: 5242122 - DNA, 25 bp, Homo sapien
gggtttgaccaaattctctctggga

SEQ ID NO: 5242123 - DNA, 25 bp, Homo sapien
caactcacagtcttgtatgcgatga

SEQ ID NO: 5242124 - DNA, 25 bp, Homo sapien
tgcgatgaccaagacaagtaatggg

SEQ ID NO: 5242125 - DNA, 25 bp, Homo sapien
tctctctgggatcagagtcctgttc

SEQ ID NO: 5242126 - DNA, 25 bp, Homo sapien
taccaaagatgtgccaaggacagca

SEQ ID NO: 5242127 - DNA, 25 bp, Homo sapien
aaccccaatggagcaggagccaact

SEQ ID NO: 5242128 - DNA, 25 bp, Homo sapien
tctgaatcgctaagcccaaggcaag

SEQ ID NO: 5242129 - DNA, 25 bp, Homo sapien
aggtgattttcagggcacagcaacc

SEQ ID NO: 5242130 - DNA, 25 bp, Homo sapien
tccacttattagcttgctttgcaag

SEQ ID NO: 5242131 - DNA, 25 bp, Homo sapien
tctccagggatgcacggagtcaccg

SEQ ID NO: 5242132 - DNA, 25 bp, Homo sapien
aaagggcatccacttattagcttgc

SEQ ID NO: 5242133 - DNA, 25 bp, Homo sapien
tcaccggtatcacaaagggcatcca

SEQ ID NO: 5242134 - DNA, 25 bp, Homo sapien
aggaatgtcaggaactcttgggtat

SEQ ID NO: 5242135 - DNA, 25 bp, Homo sapien
tgtagccgctcccataaggaatgtc

SEQ ID NO: 5242136 - DNA, 25 bp, Homo sapien
gccgctcccataaggaatgtcagga

SEQ ID NO: 5242137 - DNA, 25 bp, Homo sapien
aggtgtagccgctcccataaggaat

SEQ ID NO: 5242138 - DNA, 25 bp, Homo sapien
tgttcttccagataacgcttccaca

SEQ ID NO: 5242139 - DNA, 25 bp, Homo sapien
gatccaccatcttgctgtcctcttg

SEQ ID NO: 5242140 - DNA, 25 bp, Homo sapien
ggttggcccagtcagcatcatttaa

SEQ ID NO: 5242141 - DNA, 25 bp, Homo sapien
ttagcagagcactccccttggtggg

SEQ ID NO: 5242142 - DNA, 25 bp, Homo sapien
aaacaatcccgcagagacaccttgc

SEQ ID NO: 5242143 - DNA, 25 bp, Homo sapien
tgttccttctgctggccgtgccctg

SEQ ID NO: 5242144 - DNA, 25 bp, Homo sapien
tacacattgttccttctgctggccg

SEQ ID NO: 5242145 - DNA, 25 bp, Homo sapien
tcacttctcgtaccctgctgttctc

SEQ ID NO: 5242146 - DNA, 25 bp, Homo sapien
agcctttgatctgtgtacacattgt

SEQ ID NO: 5242147 - DNA, 25 bp, Homo sapien
ggttacatcacttggtccaaaccac

SEQ ID NO: 5242148 - DNA, 25 bp, Homo sapien
accacagagctaagggagtgatgga

SEQ ID NO: 5242149 - DNA, 25 bp, Homo sapien
tccttcccgcttccaaagacatttg

SEQ ID NO: 5242150 - DNA, 25 bp, Homo sapien
tcagagacacgagggggttacatca

SEQ ID NO: 5242151 - DNA, 25 bp, Homo sapien
ctgtgtgattctgtttttgaaactt

SEQ ID NO: 5242152 - DNA, 25 bp, Homo sapien
gtcagtgagtcttaggtctctgtgt

SEQ ID NO: 5242153 - DNA, 25 bp, Homo sapien
cttccaaggtctgcagaaagtcaag

SEQ ID NO: 5242154 - DNA, 25 bp, Homo sapien
tcagaagtcagtgagtcttaggtct

SEQ ID NO: 5242155 - DNA, 25 bp, Homo sapien
ggtatttgttcgtgtcatatttatg

SEQ ID NO: 5242156 - DNA, 25 bp, Homo sapien
cccaacgagggaagtatatggtatt

SEQ ID NO: 5242157 - DNA, 25 bp, Homo sapien
agctgaaagtgacccaacgagggaa

SEQ ID NO: 5242158 - DNA, 25 bp, Homo sapien
gattgttttgtaccactttggagtc

SEQ ID NO: 5242159 - DNA, 25 bp, Homo sapien
tttccttttcggtgctgcctcttct

SEQ ID NO: 5242160 - DNA, 25 bp, Homo sapien
ccatatttccttttcggtgctgcct

SEQ ID NO: 5242161 - DNA, 25 bp, Homo sapien
tccatatcatgtaccatatttcctt

SEQ ID NO: 5242162 - DNA, 25 bp, Homo sapien
tctccatatcatgtaccatatttcc

SEQ ID NO: 5242163 - DNA, 25 bp, Homo sapien
ttctgaagaaacgtccttggtgctg

SEQ ID NO: 5242164 - DNA, 25 bp, Homo sapien
ggtccatcaggcagcatttctaaag

SEQ ID NO: 5242165 - DNA, 25 bp, Homo sapien
atcaggcagcatttctaaagcagac

SEQ ID NO: 5242166 - DNA, 25 bp, Homo sapien
tcttctgaagaaacgtccttggtgc

SEQ ID NO: 5242167 - DNA, 25 bp, Homo sapien
cccacatgaggctggtgtagagata

SEQ ID NO: 5242168 - DNA, 25 bp, Homo sapien
taaattggtctaactctagagctct

SEQ ID NO: 5242169 - DNA, 25 bp, Homo sapien
aaattgtcaggcttgaaatccaacg

SEQ ID NO: 5242170 - DNA, 25 bp, Homo sapien
agagtgaggccccaatggcccacat

SEQ ID NO: 5242171 - DNA, 25 bp, Homo sapien
aataactgtgcttattcttttcatt

SEQ ID NO: 5242172 - DNA, 25 bp, Homo sapien
aatgaaaagaataagcacagttatt

SEQ ID NO: 5242173 - DNA, 25 bp, Homo sapien
ggcaatttccatcgatgactctcag

SEQ ID NO: 5242174 - DNA, 25 bp, Homo sapien
aatttccatcgatgactctcagtgg

SEQ ID NO: 5242175 - DNA, 25 bp, Homo sapien
gcaaacactggcaatttccatcgat

SEQ ID NO: 5242176 - DNA, 25 bp, Homo sapien
gtggtttcagtggttgacttacgga

SEQ ID NO: 5242177 - DNA, 25 bp, Homo sapien
gtcaggactgttcctaccccgccca

SEQ ID NO: 5242178 - DNA, 25 bp, Homo sapien
tcaggactgttcctaccccgcccat

SEQ ID NO: 5242179 - DNA, 25 bp, Homo sapien
cagtcaggactgttcctaccccgcc

SEQ ID NO: 5242180 - DNA, 25 bp, Homo sapien
gggcttgctttccaccaccttgggc

SEQ ID NO: 5242181 - DNA, 25 bp, Homo sapien
tgctttccaccaccttgggcctggg

SEQ ID NO: 5242182 - DNA, 25 bp, Homo sapien
ctgggcttgctttccaccaccttgg

SEQ ID NO: 5242183 - DNA, 25 bp, Homo sapien
gcttgctttccaccaccttgggcct

SEQ ID NO: 5242184 - DNA, 25 bp, Homo sapien
tagaaatccatgagcatcaggctgg

SEQ ID NO: 5242185 - DNA, 25 bp, Homo sapien
ctagaaatccatgagcatcaggctg

SEQ ID NO: 5242186 - DNA, 25 bp, Homo sapien
cactagaaatccatgagcatcaggc

SEQ ID NO: 5242187 - DNA, 25 bp, Homo sapien
cttcactagaaatccatgagcatca

SEQ ID NO: 5242188 - DNA, 25 bp, Homo sapien
ttctttctccacatgattgaaatct

SEQ ID NO: 5242189 - DNA, 25 bp, Homo sapien
tctttctccacatgattgaaatctt

SEQ ID NO: 5242190 - DNA, 25 bp, Homo sapien
ttttctttctccacatgattgaaat

SEQ ID NO: 5242191 - DNA, 25 bp, Homo sapien
ctttctccacatgattgaaatcttt

SEQ ID NO: 5242192 - DNA, 25 bp, Homo sapien
atcattggtattcatcattcctgct

SEQ ID NO: 5242193 - DNA, 25 bp, Homo sapien
tatggagtcacagcatcattggtat

SEQ ID NO: 5242194 - DNA, 25 bp, Homo sapien
ggagtcacagcatcattggtattca

SEQ ID NO: 5242195 - DNA, 25 bp, Homo sapien
ctatggagtcacagcatcattggta

SEQ ID NO: 5242196 - DNA, 25 bp, Homo sapien
gagagggcagattcccaggtttccc

SEQ ID NO: 5242197 - DNA, 25 bp, Homo sapien
tctccatggactgctgagggctctt

SEQ ID NO: 5242198 - DNA, 25 bp, Homo sapien
gagccagccagggtttcctttgaac

SEQ ID NO: 5242199 - DNA, 25 bp, Homo sapien
ctcttgagtccagtgagtgggcaga

SEQ ID NO: 5242200 - DNA, 25 bp, Homo sapien
accaaatttcatgagcgtccgtgtg

SEQ ID NO: 5242201 - DNA, 25 bp, Homo sapien
gcaccaaatttcatgagcgtccgtg

SEQ ID NO: 5242202 - DNA, 25 bp, Homo sapien
aatttcatgagcgtccgtgtgaaga

SEQ ID NO: 5242203 - DNA, 25 bp, Homo sapien
caaatttcatgagcgtccgtgtgaa

SEQ ID NO: 5242204 - DNA, 25 bp, Homo sapien
gttggacagtccgatttccaatggg

SEQ ID NO: 5242205 - DNA, 25 bp, Homo sapien
ggtgagttggacagtccgatttcca

SEQ ID NO: 5242206 - DNA, 25 bp, Homo sapien
gagttggacagtccgatttccaatg

SEQ ID NO: 5242207 - DNA, 25 bp, Homo sapien
gtgagttggacagtccgatttccaa

SEQ ID NO: 5242208 - DNA, 25 bp, Homo sapien
tgtgagagttacccaaagctcagcg

SEQ ID NO: 5242209 - DNA, 25 bp, Homo sapien
acccaaagctcagcgtccgtgatgg

SEQ ID NO: 5242210 - DNA, 25 bp, Homo sapien
tacccaaagctcagcgtccgtgatg

SEQ ID NO: 5242211 - DNA, 25 bp, Homo sapien
gagttacccaaagctcagcgtccgt

SEQ ID NO: 5242212 - DNA, 25 bp, Homo sapien
gatgtgacactctagcaagctggct

SEQ ID NO: 5242213 - DNA, 25 bp, Homo sapien
tctggtgtggtgtctgaagcctgcc

SEQ ID NO: 5242214 - DNA, 25 bp, Homo sapien
cacacttggcgcacatgtcttagga

SEQ ID NO: 5242215 - DNA, 25 bp, Homo sapien
catttgcaatgtagaccggagtcag

SEQ ID NO: 5242216 - DNA, 25 bp, Homo sapien
tgttttcattgaaggtaacacagtt

SEQ ID NO: 5242217 - DNA, 25 bp, Homo sapien
ctgttttcattgaaggtaacacagt

SEQ ID NO: 5242218 - DNA, 25 bp, Homo sapien
ttaagccggaaagtaatacagagcc

SEQ ID NO: 5242219 - DNA, 25 bp, Homo sapien
gttgatctgagtgcctttctgctgg

SEQ ID NO: 5242220 - DNA, 25 bp, Homo sapien
tattgcattacctataactgggcag

SEQ ID NO: 5242221 - DNA, 25 bp, Homo sapien
gcctccgtggcttccgttaggaata

SEQ ID NO: 5242222 - DNA, 25 bp, Homo sapien
cccctgcaacagatacattaagcgc

SEQ ID NO: 5242223 - DNA, 25 bp, Homo sapien
cacccccagtatttcattggcagtg

SEQ ID NO: 5242224 - DNA, 25 bp, Homo sapien
ttaagcgcagttcacgtaccacctc

SEQ ID NO: 5242225 - DNA, 25 bp, Homo sapien
tcttctgatggctccaagtagatgc

SEQ ID NO: 5242226 - DNA, 25 bp, Homo sapien
ccatccggttatcctgtcctgcctt

SEQ ID NO: 5242227 - DNA, 25 bp, Homo sapien
tatcctgtcctgccttagcctggga

SEQ ID NO: 5242228 - DNA, 25 bp, Homo sapien
atccggttatcctgtcctgccttag

SEQ ID NO: 5242229 - DNA, 25 bp, Homo sapien
tcctgtcctgccttagcctgggaag

SEQ ID NO: 5242230 - DNA, 25 bp, Homo sapien
tcaggggcatgtcactgagtctgag

SEQ ID NO: 5242231 - DNA, 25 bp, Homo sapien
ttcaggggcatgtcactgagtctga

SEQ ID NO: 5242232 - DNA, 25 bp, Homo sapien
agtctgaggtgcctaacagaggcca

SEQ ID NO: 5242233 - DNA, 25 bp, Homo sapien
ctgaggtgcctaacagaggccatct

SEQ ID NO: 5242234 - DNA, 25 bp, Homo sapien
tgggatctcattactgccaagacat

SEQ ID NO: 5242235 - DNA, 25 bp, Homo sapien
gttggtcattagttgtctttgacgt

SEQ ID NO: 5242236 - DNA, 25 bp, Homo sapien
tcttgacctgacagttggtcattag

SEQ ID NO: 5242237 - DNA, 25 bp, Homo sapien
caagacataagaatcttgacctgac

SEQ ID NO: 5242238 - DNA, 25 bp, Homo sapien
ccactgcagatggtgtatcgaaaag

SEQ ID NO: 5242239 - DNA, 25 bp, Homo sapien
ctgcagatggtgtatcgaaaagctt

SEQ ID NO: 5242240 - DNA, 25 bp, Homo sapien
gatggtgtatcgaaaagcttgtttt

SEQ ID NO: 5242241 - DNA, 25 bp, Homo sapien
ggttccactgcagatggtgtatcga

SEQ ID NO: 5242242 - DNA, 25 bp, Homo sapien
tattgtatctgaagtttcaacctcc

SEQ ID NO: 5242243 - DNA, 25 bp, Homo sapien
tcttctctgtaagagtttttgtaaa

SEQ ID NO: 5242244 - DNA, 25 bp, Homo sapien
tgaagtttcaacctccagggtgatg

SEQ ID NO: 5242245 - DNA, 25 bp, Homo sapien
atggtcttctctgtaagagtttttg

SEQ ID NO: 5242246 - DNA, 25 bp, Homo sapien
gtcatccatcctatagtatttcagg

SEQ ID NO: 5242247 - DNA, 25 bp, Homo sapien
ttgaagcgataagtcagacaccctg

SEQ ID NO: 5242248 - DNA, 25 bp, Homo sapien
tgaaggacactcctgacggaggcta

SEQ ID NO: 5242249 - DNA, 25 bp, Homo sapien
gacaccctgtgccacaataatgtgt

SEQ ID NO: 5242250 - DNA, 25 bp, Homo sapien
ttctctggctggcagagtgggggtc

SEQ ID NO: 5242251 - DNA, 25 bp, Homo sapien
ctggctggcagagtgggggtcgcaa

SEQ ID NO: 5242252 - DNA, 25 bp, Homo sapien
gggttgttctctggctggcagagtg

SEQ ID NO: 5242253 - DNA, 25 bp, Homo sapien
gaaccggccatctggatgtgtatgt

SEQ ID NO: 5242254 - DNA, 25 bp, Homo sapien
tgttcttgaagctatgagcctgtgt

SEQ ID NO: 5242255 - DNA, 25 bp, Homo sapien
acttcagccataaaccatcccaggt

SEQ ID NO: 5242256 - DNA, 25 bp, Homo sapien
tatgagcctgtgtcagttgggtcga

SEQ ID NO: 5242257 - DNA, 25 bp, Homo sapien
catcccaggtgctttctgtaggttt

SEQ ID NO: 5242258 - DNA, 25 bp, Homo sapien
ccattggaactgtagctgtggagcc

SEQ ID NO: 5242259 - DNA, 25 bp, Homo sapien
aggcaagctccagtatgcagccagg

SEQ ID NO: 5242260 - DNA, 25 bp, Homo sapien
aggatgatgccccttaggcctgata

SEQ ID NO: 5242261 - DNA, 25 bp, Homo sapien
gccgcttcccactgtgcaagttgaa

SEQ ID NO: 5242262 - DNA, 25 bp, Homo sapien
atctagattgtcttccccagggaca

SEQ ID NO: 5242263 - DNA, 25 bp, Homo sapien
tcatctagattgtcttccccaggga

SEQ ID NO: 5242264 - DNA, 25 bp, Homo sapien
ttttcatctagattgtcttccccag

SEQ ID NO: 5242265 - DNA, 25 bp, Homo sapien
tgtcttttcatctagattgtcttcc

SEQ ID NO: 5242266 - DNA, 25 bp, Homo sapien
taggcctctggatatgtagtaagct

SEQ ID NO: 5242267 - DNA, 25 bp, Homo sapien
ataggcctctggatatgtagtaagc

SEQ ID NO: 5242268 - DNA, 25 bp, Homo sapien
tgtagtaagctacgtggtaaatgtt

SEQ ID NO: 5242269 - DNA, 25 bp, Homo sapien
tacgtggtaaatgttgacctggctg

SEQ ID NO: 5242270 - DNA, 25 bp, Homo sapien
attccttgcacaggaactctccgca

SEQ ID NO: 5242271 - DNA, 25 bp, Homo sapien
ggcattaggtctctcattccttgca

SEQ ID NO: 5242272 - DNA, 25 bp, Homo sapien
gaagagtggttgcttgctttatcag

SEQ ID NO: 5242273 - DNA, 25 bp, Homo sapien
tcttgcctctgattaaaggaagagt

SEQ ID NO: 5242274 - DNA, 25 bp, Homo sapien
ccctgagatgtttacagcactcttt

SEQ ID NO: 5242275 - DNA, 25 bp, Homo sapien
ctcatttgctgtagacaatccttta

SEQ ID NO: 5242276 - DNA, 25 bp, Homo sapien
gacaatcctttatgttccaggtccc

SEQ ID NO: 5242277 - DNA, 25 bp, Homo sapien
caatacccaaagaggagaacttcat

SEQ ID NO: 5242278 - DNA, 25 bp, Homo sapien
agagtcccaaatccaaattgtgtaa

SEQ ID NO: 5242279 - DNA, 25 bp, Homo sapien
agaggtcactgacttgtcccacgaa

SEQ ID NO: 5242280 - DNA, 25 bp, Homo sapien
catcatataatccatcatagagtcc

SEQ ID NO: 5242281 - DNA, 25 bp, Homo sapien
gaatgtttccgcacttcgcagaagc

SEQ ID NO: 5242282 - DNA, 25 bp, Homo sapien
tgtcccctgtggtgtcaagagagat

SEQ ID NO: 5242283 - DNA, 25 bp, Homo sapien
ccctgtggtgtcaagagagatgcag

SEQ ID NO: 5242284 - DNA, 25 bp, Homo sapien
ctgtggtgtcaagagagatgcaggg

SEQ ID NO: 5242285 - DNA, 25 bp, Homo sapien
tcccctgtggtgtcaagagagatgc

SEQ ID NO: 5242286 - DNA, 25 bp, Homo sapien
taacaggtaagggatggtgccagct

SEQ ID NO: 5242287 - DNA, 25 bp, Homo sapien
aatgatagtgggcaagtctggcaac

SEQ ID NO: 5242288 - DNA, 25 bp, Homo sapien
gaccaatggttccaacaaaagcttg

SEQ ID NO: 5242289 - DNA, 25 bp, Homo sapien
ctccaccgtcgacagagaaggatga

SEQ ID NO: 5242290 - DNA, 25 bp, Homo sapien
gaggccctacatcagggcggtgatg

SEQ ID NO: 5242291 - DNA, 25 bp, Homo sapien
tgcctgggaggccctacatcagggc

SEQ ID NO: 5242292 - DNA, 25 bp, Homo sapien
catcagggcggtgatggttgcagta

SEQ ID NO: 5242293 - DNA, 25 bp, Homo sapien
gatggttgcagtagaaatagcagca

SEQ ID NO: 5242294 - DNA, 25 bp, Homo sapien
tgctaggttttgttgtgttacttcc

SEQ ID NO: 5242295 - DNA, 25 bp, Homo sapien
ggttttgttgtgttacttccgcaga

SEQ ID NO: 5242296 - DNA, 25 bp, Homo sapien
ctgtgctaggttttgttgtgttact

SEQ ID NO: 5242297 - DNA, 25 bp, Homo sapien
ttgttgtgttacttccgcagaaagc

SEQ ID NO: 5242298 - DNA, 25 bp, Homo sapien
tctgggtgagtctgaatttaatgcc

SEQ ID NO: 5242299 - DNA, 25 bp, Homo sapien
ttcagtcacacccatgaaagtctgg

SEQ ID NO: 5242300 - DNA, 25 bp, Homo sapien
gggccagagtttgccttcagtcaca

SEQ ID NO: 5242301 - DNA, 25 bp, Homo sapien
aatgaggcagccgaagtcagcgtca

SEQ ID NO: 5242302 - DNA, 25 bp, Homo sapien
cttccatggctttgacagtaaggtg

SEQ ID NO: 5242303 - DNA, 25 bp, Homo sapien
ccatggctttgacagtaaggtgccc

SEQ ID NO: 5242304 - DNA, 25 bp, Homo sapien
gctttgacagtaaggtgcccagctc

SEQ ID NO: 5242305 - DNA, 25 bp, Homo sapien
ttaagaaattgatggtctggatgtt

SEQ ID NO: 5242306 - DNA, 25 bp, Homo sapien
tctggatctcctgcaatcagcacct

SEQ ID NO: 5242307 - DNA, 25 bp, Homo sapien
tggatctcctgcaatcagcacctga

SEQ ID NO: 5242308 - DNA, 25 bp, Homo sapien
tgagctagaatccacataactctcc

SEQ ID NO: 5242309 - DNA, 25 bp, Homo sapien
cagcacctgagctagaatccacata

SEQ ID NO: 5242310 - DNA, 25 bp, Homo sapien
cttgataagggtgactgcttcccaa

SEQ ID NO: 5242311 - DNA, 25 bp, Homo sapien
tccaggccaaactcacacagtgaag

SEQ ID NO: 5242312 - DNA, 25 bp, Homo sapien
ctttccttgataagggtgactgctt

SEQ ID NO: 5242313 - DNA, 25 bp, Homo sapien
caggccaaactcacacagtgaagga

SEQ ID NO: 5242314 - DNA, 25 bp, Homo sapien
tgctaccaccactccgggcttatgg

SEQ ID NO: 5242315 - DNA, 25 bp, Homo sapien
ccaaacactgctgagaccaagctgt

SEQ ID NO: 5242316 - DNA, 25 bp, Homo sapien
aacactgctgagaccaagctgtaat

SEQ ID NO: 5242317 - DNA, 25 bp, Homo sapien
cttatggaaccgtccccaaacactg

SEQ ID NO: 5242318 - DNA, 25 bp, Homo sapien
ctgcaagcgcctgcagtaccaggca

SEQ ID NO: 5242319 - DNA, 25 bp, Homo sapien
gcaagcgcctgcagtaccaggcagc

SEQ ID NO: 5242320 - DNA, 25 bp, Homo sapien
tgcaagcgcctgcagtaccaggcag

SEQ ID NO: 5242321 - DNA, 25 bp, Homo sapien
atcttgttagcctttgggtgggtgt

SEQ ID NO: 5242322 - DNA, 25 bp, Homo sapien
ctgccctggtggtctaatgaggagc

SEQ ID NO: 5242323 - DNA, 25 bp, Homo sapien
tctgtgtggtatcacactgccctgg

SEQ ID NO: 5242324 - DNA, 25 bp, Homo sapien
tggtctaatgaggagctggaccctc

SEQ ID NO: 5242325 - DNA, 25 bp, Homo sapien
taaacattgcttgtctcttaaactg

SEQ ID NO: 5242326 - DNA, 25 bp, Homo sapien
gtctcttaaactgggtactcctgga

SEQ ID NO: 5242327 - DNA, 25 bp, Homo sapien
gccctgggtgccacttaaacattgc

SEQ ID NO: 5242328 - DNA, 25 bp, Homo sapien
actctccattttgccctgggtgcca

SEQ ID NO: 5242329 - DNA, 25 bp, Homo sapien
agaatttaggaatctcaggtcctcg

SEQ ID NO: 5242330 - DNA, 25 bp, Homo sapien
tcaggtcctcgctgggtgagcagca

SEQ ID NO: 5242331 - DNA, 25 bp, Homo sapien
ctcatggcatgttccacgtgacttc

SEQ ID NO: 5242332 - DNA, 25 bp, Homo sapien
gggggaacagccagccctctgactc

SEQ ID NO: 5242333 - DNA, 25 bp, Homo sapien
ccttctagcccacccagaggagaat

SEQ ID NO: 5242334 - DNA, 25 bp, Homo sapien
cactgcatcattgcaagcagtcaga

SEQ ID NO: 5242335 - DNA, 25 bp, Homo sapien
gaggagaatccatagctggcataac

SEQ ID NO: 5242336 - DNA, 25 bp, Homo sapien
caagcagtcagaaaatgttcattga

SEQ ID NO: 5242337 - DNA, 25 bp, Homo sapien
ggctctcctcctggcgatgagttgt

SEQ ID NO: 5242338 - DNA, 25 bp, Homo sapien
catggctctcctcctggcgatgagt

SEQ ID NO: 5242339 - DNA, 25 bp, Homo sapien
tctcctcctggcgatgagttgtcat

SEQ ID NO: 5242340 - DNA, 25 bp, Homo sapien
ccatggctctcctcctggcgatgag

SEQ ID NO: 5242341 - DNA, 25 bp, Homo sapien
ggataattctcccaaccttcaccag

SEQ ID NO: 5242342 - DNA, 25 bp, Homo sapien
tccataccaagtggataattctccc

SEQ ID NO: 5242343 - DNA, 25 bp, Homo sapien
cagaaaaacaattccatccatacca

SEQ ID NO: 5242344 - DNA, 25 bp, Homo sapien
aaacaattccatccataccaagtgg

SEQ ID NO: 5242345 - DNA, 25 bp, Homo sapien
atagaacctggaagttccggtaatg

SEQ ID NO: 5242346 - DNA, 25 bp, Homo sapien
ctggaagttccggtaatgcgttatc

SEQ ID NO: 5242347 - DNA, 25 bp, Homo sapien
aagttccggtaatgcgttatcaagg

SEQ ID NO: 5242348 - DNA, 25 bp, Homo sapien
tccggtaatgcgttatcaaggatga

SEQ ID NO: 5242349 - DNA, 25 bp, Homo sapien
ggatatctgaatggcaagcccgcaa

SEQ ID NO: 5242350 - DNA, 25 bp, Homo sapien
tctcctttggatgaggtttatggca

SEQ ID NO: 5242351 - DNA, 25 bp, Homo sapien
cagcactattgttagaggaagagtc

SEQ ID NO: 5242352 - DNA, 25 bp, Homo sapien
tccccttgtggttatgactgtgtgc

SEQ ID NO: 5242353 - DNA, 25 bp, Homo sapien
ctgtggccgagaggcgaatccagcc

SEQ ID NO: 5242354 - DNA, 25 bp, Homo sapien
gtgtcgcgggttcgagtcctgcggg

SEQ ID NO: 5242355 - DNA, 25 bp, Homo sapien
ctagggcgcggcagaggtgtcgcgg

SEQ ID NO: 5242356 - DNA, 25 bp, Homo sapien
gggcaggagcagctcgtggagcgca

SEQ ID NO: 5242357 - DNA, 25 bp, Homo sapien
tcaaaccatagcattaaccaatcac

SEQ ID NO: 5242358 - DNA, 25 bp, Homo sapien
ttagagaatgtaccattgaatggga

SEQ ID NO: 5242359 - DNA, 25 bp, Homo sapien
ccacattagggatgaagcctcaata

SEQ ID NO: 5242360 - DNA, 25 bp, Homo sapien
ggatgaagcctcaatatgagttttg

SEQ ID NO: 5242361 - DNA, 25 bp, Homo sapien
tcatggtcacagatgacagtattaa

SEQ ID NO: 5242362 - DNA, 25 bp, Homo sapien
catggtcacagatgacagtattaat

SEQ ID NO: 5242363 - DNA, 25 bp, Homo sapien
cacagatgacagtattaatcacagc

SEQ ID NO: 5242364 - DNA, 25 bp, Homo sapien
ggtcacagatgacagtattaatcac

SEQ ID NO: 5242365 - DNA, 25 bp, Homo sapien
tgaataaatgcctcagcacgatgtc

SEQ ID NO: 5242366 - DNA, 25 bp, Homo sapien
gattttaataacaggacagttcaac

SEQ ID NO: 5242367 - DNA, 25 bp, Homo sapien
gcacgatgtctggtatgtagtggat

SEQ ID NO: 5242368 - DNA, 25 bp, Homo sapien
cagatgaatgtgctaaatgatcact

SEQ ID NO: 5242369 - DNA, 25 bp, Homo sapien
taattcagcccctctgaaaagcaca

SEQ ID NO: 5242370 - DNA, 25 bp, Homo sapien
tataaataccctaggtcctccctgc

SEQ ID NO: 5242371 - DNA, 25 bp, Homo sapien
tgtcagagcacaaagttggcagctg

SEQ ID NO: 5242372 - DNA, 25 bp, Homo sapien
tttagctattgtcctccaaagagtc

SEQ ID NO: 5242373 - DNA, 25 bp, Homo sapien
gaaggcgcgattcttaccaagtcca

SEQ ID NO: 5242374 - DNA, 25 bp, Homo sapien
gaatatttggcacgaacacctgagg

SEQ ID NO: 5242375 - DNA, 25 bp, Homo sapien
gactgtactcttcgcatggactggg

SEQ ID NO: 5242376 - DNA, 25 bp, Homo sapien
gatcatctttacagttcctcgggaa

SEQ ID NO: 5242377 - DNA, 25 bp, Homo sapien
tgattgtatggtagaaggcctgagc

SEQ ID NO: 5242378 - DNA, 25 bp, Homo sapien
gattagccattgtatctcctgaaac

SEQ ID NO: 5242379 - DNA, 25 bp, Homo sapien
aatgatgtgtcatagtactcaagag

SEQ ID NO: 5242380 - DNA, 25 bp, Homo sapien
caggttcctgataatctctgctgga

SEQ ID NO: 5242381 - DNA, 25 bp, Homo sapien
agtacaagggaaagtagacaactcg

SEQ ID NO: 5242382 - DNA, 25 bp, Homo sapien
caatcattagggacataacttcaca

SEQ ID NO: 5242383 - DNA, 25 bp, Homo sapien
gaaggctgtttagcgaactttgaac

SEQ ID NO: 5242384 - DNA, 25 bp, Homo sapien
tattgactaacctgagttgaaaagg

SEQ ID NO: 5242385 - DNA, 25 bp, Homo sapien
gagacaccccttgactttgcatagg

SEQ ID NO: 5242386 - DNA, 25 bp, Homo sapien
caccattgattttgcctagaaccca

SEQ ID NO: 5242387 - DNA, 25 bp, Homo sapien
tatttagcgcactttaagagacacc

SEQ ID NO: 5242388 - DNA, 25 bp, Homo sapien
tcagagttgaatgtgacccaaaggt

SEQ ID NO: 5242389 - DNA, 25 bp, Homo sapien
ctaaataaatagctactgctggcca

SEQ ID NO: 5242390 - DNA, 25 bp, Homo sapien
aactttcacagcaattcacacattg

SEQ ID NO: 5242391 - DNA, 25 bp, Homo sapien
attctcttttacagtagtagacaaa

SEQ ID NO: 5242392 - DNA, 25 bp, Homo sapien
tgattaaccagcttgacagttagct

SEQ ID NO: 5242393 - DNA, 25 bp, Homo sapien
tattgcagtttacacaactttagag

SEQ ID NO: 5242394 - DNA, 25 bp, Homo sapien
caccaggttttttgacaccatatca

SEQ ID NO: 5242395 - DNA, 25 bp, Homo sapien
ttcagacccctgagaaggattgttt

SEQ ID NO: 5242396 - DNA, 25 bp, Homo sapien
tagtagtggctaagtccaccaggtt

SEQ ID NO: 5242397 - DNA, 25 bp, Homo sapien
ccagaagataggataagaacataga

SEQ ID NO: 5242398 - DNA, 25 bp, Homo sapien
tcagaatgatgtactagaagaaaca

SEQ ID NO: 5242399 - DNA, 25 bp, Homo sapien
gacttttgggctatacctcttcaac

SEQ ID NO: 5242400 - DNA, 25 bp, Homo sapien
tgttcacaatattctaggttgcaca

SEQ ID NO: 5242401 - DNA, 25 bp, Homo sapien
tccctgacccacgtactccccactg

SEQ ID NO: 5242402 - DNA, 25 bp, Homo sapien
cctgacccacgtactccccactggc

SEQ ID NO: 5242403 - DNA, 25 bp, Homo sapien
ctgacccacgtactccccactggct

SEQ ID NO: 5242404 - DNA, 25 bp, Homo sapien
tgacccacgtactccccactggctg

SEQ ID NO: 5242405 - DNA, 25 bp, Homo sapien
ccccttaaatagaggcattcttggg

SEQ ID NO: 5242406 - DNA, 25 bp, Homo sapien
ccttatgtagcttcatgtgcctctg

SEQ ID NO: 5242407 - DNA, 25 bp, Homo sapien
cagtgttgctagtcttacagtgttc

SEQ ID NO: 5242408 - DNA, 25 bp, Homo sapien
aagaactctctttgtatgcctccta

SEQ ID NO: 5242409 - DNA, 25 bp, Homo sapien
gacgcagtgacagtggttccacgga

SEQ ID NO: 5242410 - DNA, 25 bp, Homo sapien
gcaaaccggccaattggttctccat

SEQ ID NO: 5242411 - DNA, 25 bp, Homo sapien
gattgcctcgccactcggaggaagg

SEQ ID NO: 5242412 - DNA, 25 bp, Homo sapien
ggaatgctccgtggtcataaactag

SEQ ID NO: 5242413 - DNA, 25 bp, Homo sapien
cacccagtccgaataccttgttgag

SEQ ID NO: 5242414 - DNA, 25 bp, Homo sapien
tcataacaaatggacagcaaaaccg

SEQ ID NO: 5242415 - DNA, 25 bp, Homo sapien
agaggtcccgaagcttatgcagttt

SEQ ID NO: 5242416 - DNA, 25 bp, Homo sapien
agaactcacgtattcccttgcagag

SEQ ID NO: 5242417 - DNA, 25 bp, Homo sapien
gggccctgcctatgatgtacttttc

SEQ ID NO: 5242418 - DNA, 25 bp, Homo sapien
cttcagtgcagtttgaggcctgaga

SEQ ID NO: 5242419 - DNA, 25 bp, Homo sapien
tggatgagaactattcttcagtgca

SEQ ID NO: 5242420 - DNA, 25 bp, Homo sapien
tcatcatctgagaactgttgtggat

SEQ ID NO: 5242421 - DNA, 25 bp, Homo sapien
gacgcacagtatacccatatccaaa

SEQ ID NO: 5242422 - DNA, 25 bp, Homo sapien
tatttgggtacatgcaacttgacgc

SEQ ID NO: 5242423 - DNA, 25 bp, Homo sapien
ccaagtttctctttagttggttgat

SEQ ID NO: 5242424 - DNA, 25 bp, Homo sapien
caggccagctgaaacacaccaagtt

SEQ ID NO: 5242425 - DNA, 25 bp, Homo sapien
taggactgaacacagtgcctttgga

SEQ ID NO: 5242426 - DNA, 25 bp, Homo sapien
cctgtaaggatatcataggactgaa

SEQ ID NO: 5242427 - DNA, 25 bp, Homo sapien
cattgaggttggaaaaactcttggg

SEQ ID NO: 5242428 - DNA, 25 bp, Homo sapien
tgcagaagttgagaagccccatttt

SEQ ID NO: 5242429 - DNA, 25 bp, Homo sapien
tatcctcagacattagagacaccct

SEQ ID NO: 5242430 - DNA, 25 bp, Homo sapien
tgacttgatcctagggtttacccaa

SEQ ID NO: 5242431 - DNA, 25 bp, Homo sapien
gtttccctccatggtgtatcctcag

SEQ ID NO: 5242432 - DNA, 25 bp, Homo sapien
atgcctgtctggcatttaaatgccc

SEQ ID NO: 5242433 - DNA, 25 bp, Homo sapien
tggggctctcggtttattcccaagc

SEQ ID NO: 5242434 - DNA, 25 bp, Homo sapien
ctggggctctcggtttattcccaag

SEQ ID NO: 5242435 - DNA, 25 bp, Homo sapien
gggctctcggtttattcccaagctg

SEQ ID NO: 5242436 - DNA, 25 bp, Homo sapien
tctgaaggcctttaggtgatacaca

SEQ ID NO: 5242437 - DNA, 25 bp, Homo sapien
caagcaatcactggtatggagggta

SEQ ID NO: 5242438 - DNA, 25 bp, Homo sapien
gtgatacacacttgactgcctctga

SEQ ID NO: 5242439 - DNA, 25 bp, Homo sapien
cacccatgcatggtactgcttgaag

SEQ ID NO: 5242440 - DNA, 25 bp, Homo sapien
tgttatgtaacccatagggtagact

SEQ ID NO: 5242441 - DNA, 25 bp, Homo sapien
tctctccatctctccgagagatatc

SEQ ID NO: 5242442 - DNA, 25 bp, Homo sapien
taaaagtgaattgttatgtaaccca

SEQ ID NO: 5242443 - DNA, 25 bp, Homo sapien
ccgagagatatccattgcttgcaga

SEQ ID NO: 5242444 - DNA, 25 bp, Homo sapien
ttccaagacaacagtcgtgcttttc

SEQ ID NO: 5242445 - DNA, 25 bp, Homo sapien
ctttccttggctattcttctcattg

SEQ ID NO: 5242446 - DNA, 25 bp, Homo sapien
atcttctatacagttccaagacaac

SEQ ID NO: 5242447 - DNA, 25 bp, Homo sapien
tcttctcattgtgttcactatcttc

SEQ ID NO: 5242448 - DNA, 25 bp, Homo sapien
tgtccacactgatatagtgaagtcc

SEQ ID NO: 5242449 - DNA, 25 bp, Homo sapien
gccggaacgaattgtgtccacactg

SEQ ID NO: 5242450 - DNA, 25 bp, Homo sapien
gaagtccaacaatggaaggcctgtt

SEQ ID NO: 5242451 - DNA, 25 bp, Homo sapien
ctggaatgccggaacgaattgtgtc

SEQ ID NO: 5242452 - DNA, 25 bp, Homo sapien
ttcaccaagccaagaagtcacacca

SEQ ID NO: 5242453 - DNA, 25 bp, Homo sapien
tcaccaagccaagaagtcacaccac

SEQ ID NO: 5242454 - DNA, 25 bp, Homo sapien
ctattcaccaagccaagaagtcaca

SEQ ID NO: 5242455 - DNA, 25 bp, Homo sapien
tattcaccaagccaagaagtcacac

SEQ ID NO: 5242456 - DNA, 25 bp, Homo sapien
gaagcaggtgatgaattaggcaatc

SEQ ID NO: 5242457 - DNA, 25 bp, Homo sapien
gaggagtctggtgtcttattatcca

SEQ ID NO: 5242458 - DNA, 25 bp, Homo sapien
ctgttaccaagacaccagggtttag

SEQ ID NO: 5242459 - DNA, 25 bp, Homo sapien
cattaatcaggtgatgctgccaagg

SEQ ID NO: 5242460 - DNA, 25 bp, Homo sapien
cctgctgtggttccgtaggcattta

SEQ ID NO: 5242461 - DNA, 25 bp, Homo sapien
tcatctagaccaactcccctgtttg

SEQ ID NO: 5242462 - DNA, 25 bp, Homo sapien
tgtgattttacaaccagatctcttc

SEQ ID NO: 5242463 - DNA, 25 bp, Homo sapien
gaaccatttgaaggagctcttactc

SEQ ID NO: 5242464 - DNA, 25 bp, Homo sapien
atgtcatcaggtacccttcctgagg

SEQ ID NO: 5242465 - DNA, 25 bp, Homo sapien
acccactatgtcatcaggtaccctt

SEQ ID NO: 5242466 - DNA, 25 bp, Homo sapien
gcagtgaccatttcaccatcaccca

SEQ ID NO: 5242467 - DNA, 25 bp, Homo sapien
cactatgtcatcaggtacccttcct

SEQ ID NO: 5242468 - DNA, 25 bp, Homo sapien
actgaagtatttgatactggatatg

SEQ ID NO: 5242469 - DNA, 25 bp, Homo sapien
ctgaagtatttgatactggatatgt

SEQ ID NO: 5242470 - DNA, 25 bp, Homo sapien
cagttattgtatggtcagtacccca

SEQ ID NO: 5242471 - DNA, 25 bp, Homo sapien
accctaagtttgctgtcagttattg

SEQ ID NO: 5242472 - DNA, 25 bp, Homo sapien
cagtaccccagtcctagtacacata

SEQ ID NO: 5242473 - DNA, 25 bp, Homo sapien
ccagtgaatgtgtagctcaaatgca

SEQ ID NO: 5242474 - DNA, 25 bp, Homo sapien
tctggtgtgataccaagcataggta

SEQ ID NO: 5242475 - DNA, 25 bp, Homo sapien
attggtagtataggatgctctcagc

SEQ ID NO: 5242476 - DNA, 25 bp, Homo sapien
tttgagttgtcactgaccagcaggc

SEQ ID NO: 5242477 - DNA, 25 bp, Homo sapien
cataggtatactgcacctggagtct

SEQ ID NO: 5242478 - DNA, 25 bp, Homo sapien
tacaaatggttctacaccaatttag

SEQ ID NO: 5242479 - DNA, 25 bp, Homo sapien
tacaccaatttagcatatattgcaa

SEQ ID NO: 5242480 - DNA, 25 bp, Homo sapien
taaaccactagtatatgaaaggaat

SEQ ID NO: 5242481 - DNA, 25 bp, Homo sapien
tatattgcaaataaacgaagtaaat

SEQ ID NO: 5242482 - DNA, 25 bp, Homo sapien
ctttagcaagtcttgactccaatcc

SEQ ID NO: 5242483 - DNA, 25 bp, Homo sapien
caatccaagtaccaatgagaagagc

SEQ ID NO: 5242484 - DNA, 25 bp, Homo sapien
atctcattcccatacgtgtgctgtg

SEQ ID NO: 5242485 - DNA, 25 bp, Homo sapien
tgtgctgtggcttgtgtttacagca

SEQ ID NO: 5242486 - DNA, 25 bp, Homo sapien
gaggctactaccaccgtttattgca

SEQ ID NO: 5242487 - DNA, 25 bp, Homo sapien
tacaaatgcaccaagacaggtaagc

SEQ ID NO: 5242488 - DNA, 25 bp, Homo sapien
tttattgcatggcttgaacaagggc

SEQ ID NO: 5242489 - DNA, 25 bp, Homo sapien
caaatgcaagtttggcggccaggca

SEQ ID NO: 5242490 - DNA, 25 bp, Homo sapien
gaaagtggtgtgtcccaactaggaa

SEQ ID NO: 5242491 - DNA, 25 bp, Homo sapien
caggaattgagccagtgcatagcag

SEQ ID NO: 5242492 - DNA, 25 bp, Homo sapien
ggtgggaacgcatagccaaactaca

SEQ ID NO: 5242493 - DNA, 25 bp, Homo sapien
gctagggctcatgtatcaccaaggg

SEQ ID NO: 5242494 - DNA, 25 bp, Homo sapien
tcgtttcaggcagccacagtttcct

SEQ ID NO: 5242495 - DNA, 25 bp, Homo sapien
tcttttcattgttcgtttcaggcag

SEQ ID NO: 5242496 - DNA, 25 bp, Homo sapien
tcagtgtgctggtctgctcgacact

SEQ ID NO: 5242497 - DNA, 25 bp, Homo sapien
tcgacacttctaagccggaggactc

SEQ ID NO: 5242498 - DNA, 25 bp, Homo sapien
tgtattcgatcaattcatttttgct

SEQ ID NO: 5242499 - DNA, 25 bp, Homo sapien
gttttctttgtattcgatcaattca

SEQ ID NO: 5242500 - DNA, 25 bp, Homo sapien
tttctttgtattcgatcaattcatt

SEQ ID NO: 5242501 - DNA, 25 bp, Homo sapien
tctttgtattcgatcaattcatttt

SEQ ID NO: 5242502 - DNA, 25 bp, Homo sapien
gctggcacctatacaaaacctgaga

SEQ ID NO: 5242503 - DNA, 25 bp, Homo sapien
tctttatattgttggagcacctcgt

SEQ ID NO: 5242504 - DNA, 25 bp, Homo sapien
aaaatattctatgggtaagctgcag

SEQ ID NO: 5242505 - DNA, 25 bp, Homo sapien
ccctgaaggagaaatgcgggcagcc

SEQ ID NO: 5242506 - DNA, 25 bp, Homo sapien
tactaaccactatacgatcacggcg

SEQ ID NO: 5242507 - DNA, 25 bp, Homo sapien
ctgcagccacagcacagagtactaa

SEQ ID NO: 5242508 - DNA, 25 bp, Homo sapien
agccacagcacagagtactaaccac

SEQ ID NO: 5242509 - DNA, 25 bp, Homo sapien
gtatatcgaaccaaggttgctgcag

SEQ ID NO: 5242510 - DNA, 25 bp, Homo sapien
ttcctcccactcatttcttagtccc

SEQ ID NO: 5242511 - DNA, 25 bp, Homo sapien
cctcccactcatttcttagtcccat

SEQ ID NO: 5242512 - DNA, 25 bp, Homo sapien
tcctcccactcatttcttagtccca

SEQ ID NO: 5242513 - DNA, 25 bp, Homo sapien
tccagtaaatgatctagaagccaat

SEQ ID NO: 5242514 - DNA, 25 bp, Homo sapien
aatgatctagaagccaattttccat

SEQ ID NO: 5242515 - DNA, 25 bp, Homo sapien
tttatttcgacttctcacctgtatt

SEQ ID NO: 5242516 - DNA, 25 bp, Homo sapien
ctttatttcgacttctcacctgtat

SEQ ID NO: 5242517 - DNA, 25 bp, Homo sapien
gacaagcatgaccaggtttacaaat

SEQ ID NO: 5242518 - DNA, 25 bp, Homo sapien
ctgagggacatgacaagcatgacca

SEQ ID NO: 5242519 - DNA, 25 bp, Homo sapien
gctggctttattccagggttttctc

SEQ ID NO: 5242520 - DNA, 25 bp, Homo sapien
gaccaggtttacaaattccaagcac

SEQ ID NO: 5242521 - DNA, 25 bp, Homo sapien
cccagtgtcggcttccgttttgcag

SEQ ID NO: 5242522 - DNA, 25 bp, Homo sapien
tatgtcacacccatattgactctgc

SEQ ID NO: 5242523 - DNA, 25 bp, Homo sapien
ccacaacaaggaggactgtatatgt

SEQ ID NO: 5242524 - DNA, 25 bp, Homo sapien
aaactgaacatcaggcctgttggaa

SEQ ID NO: 5242525 - DNA, 25 bp, Homo sapien
catagaagttattttgtaggctcca

SEQ ID NO: 5242526 - DNA, 25 bp, Homo sapien
gagctcaaggaagtgattggagagt

SEQ ID NO: 5242527 - DNA, 25 bp, Homo sapien
tgtagacgacgccaagaggaaccat

SEQ ID NO: 5242528 - DNA, 25 bp, Homo sapien
gctgcagctgcagtgtaggctgttt

SEQ ID NO: 5242529 - DNA, 25 bp, Homo sapien
cccagggcaccatgagattgaaagt

SEQ ID NO: 5242530 - DNA, 25 bp, Homo sapien
tacgggcatgtgttcctgagtcact

SEQ ID NO: 5242531 - DNA, 25 bp, Homo sapien
tctgagggtacagaacatcacagct

SEQ ID NO: 5242532 - DNA, 25 bp, Homo sapien
cactagaaatcgaaatacgggcatg

SEQ ID NO: 5242533 - DNA, 25 bp, Homo sapien
gaaaagccgtaagtcctttctggca

SEQ ID NO: 5242534 - DNA, 25 bp, Homo sapien
ttctggcaactactgcgacattgcc

SEQ ID NO: 5242535 - DNA, 25 bp, Homo sapien
ctgaaaagccgtaagtcctttctgg

SEQ ID NO: 5242536 - DNA, 25 bp, Homo sapien
caactactgcgacattgcctctttt

SEQ ID NO: 5242537 - DNA, 25 bp, Homo sapien
caattctatgacactgccaatagcc

SEQ ID NO: 5242538 - DNA, 25 bp, Homo sapien
actgccaatagccttgcagagctgg

SEQ ID NO: 5242539 - DNA, 25 bp, Homo sapien
gaagttcctcaattacttcaaactc

SEQ ID NO: 5242540 - DNA, 25 bp, Homo sapien
ccattgatatctctgtcctgaagtt

SEQ ID NO: 5242541 - DNA, 25 bp, Homo sapien
caacaggatccagatctaacacagt

SEQ ID NO: 5242542 - DNA, 25 bp, Homo sapien
tccagatctaacacagtttcttgct

SEQ ID NO: 5242543 - DNA, 25 bp, Homo sapien
ctagagataacctttcaccacttcc

SEQ ID NO: 5242544 - DNA, 25 bp, Homo sapien
agccagtctgatctctggtagagct

SEQ ID NO: 5242545 - DNA, 25 bp, Homo sapien
tctgatctctggtagagctatccac

SEQ ID NO: 5242546 - DNA, 25 bp, Homo sapien
tagagataacctttcaccacttccc

SEQ ID NO: 5242547 - DNA, 25 bp, Homo sapien
aagatatctgattttagcacctgga

SEQ ID NO: 5242548 - DNA, 25 bp, Homo sapien
aatgatctatgaccacatttgtatt

SEQ ID NO: 5242549 - DNA, 25 bp, Homo sapien
agatatctgattttagcacctggaa

SEQ ID NO: 5242550 - DNA, 25 bp, Homo sapien
caatgatctatgaccacatttgtat

SEQ ID NO: 5242551 - DNA, 25 bp, Homo sapien
taaattgatactctcctctgccaag

SEQ ID NO: 5242552 - DNA, 25 bp, Homo sapien
caaggtccttcatgttgatatcggc

SEQ ID NO: 5242553 - DNA, 25 bp, Homo sapien
aagtggtgtataaggcaggccttcc

SEQ ID NO: 5242554 - DNA, 25 bp, Homo sapien
gggatttccaaggagtcctgcatgg

SEQ ID NO: 5242555 - DNA, 25 bp, Homo sapien
gaaagagctaagaaaccactcacac

SEQ ID NO: 5242556 - DNA, 25 bp, Homo sapien
tgaaagagctaagaaaccactcaca

SEQ ID NO: 5242557 - DNA, 25 bp, Homo sapien
tacatctgaaatgattaaatctcca

SEQ ID NO: 5242558 - DNA, 25 bp, Homo sapien
tctgtatggacttttccttgtttaa

SEQ ID NO: 5242559 - DNA, 25 bp, Homo sapien
tctcagacacaagtctgtatggact

SEQ ID NO: 5242560 - DNA, 25 bp, Homo sapien
tagggcatgttatgaaaatagggat

SEQ ID NO: 5242561 - DNA, 25 bp, Homo sapien
taaaatgaaaatagggcatgttatg

SEQ ID NO: 5242562 - DNA, 25 bp, Homo sapien
aaatgatttggcgtcttcctgtgag

SEQ ID NO: 5242563 - DNA, 25 bp, Homo sapien
tgatttggcgtcttcctgtgagtgg

SEQ ID NO: 5242564 - DNA, 25 bp, Homo sapien
gtaaaaatgatttggcgtcttcctg

SEQ ID NO: 5242565 - DNA, 25 bp, Homo sapien
taaaaatgatttggcgtcttcctgt

SEQ ID NO: 5242566 - DNA, 25 bp, Homo sapien
ctgctctgtaggatgaagtttaaag

SEQ ID NO: 5242567 - DNA, 25 bp, Homo sapien
gagatggctaaactgctctgtagga

SEQ ID NO: 5242568 - DNA, 25 bp, Homo sapien
tgctctgtaggatgaagtttaaaga

SEQ ID NO: 5242569 - DNA, 25 bp, Homo sapien
aacaggcactgtggctatcgaaagc

SEQ ID NO: 5242570 - DNA, 25 bp, Homo sapien
cagggaacaggcactgtggctatcg

SEQ ID NO: 5242571 - DNA, 25 bp, Homo sapien
actgtggctatcgaaagcagggcct

SEQ ID NO: 5242572 - DNA, 25 bp, Homo sapien
gggaacaggcactgtggctatcgaa

SEQ ID NO: 5242573 - DNA, 25 bp, Homo sapien
tgtgcatgcgtgcacgtgtccatgc

SEQ ID NO: 5242574 - DNA, 25 bp, Homo sapien
caaaaggagaatgtgcatgtgtgca

SEQ ID NO: 5242575 - DNA, 25 bp, Homo sapien
tccacaaaatgtaacgagtgacatg

SEQ ID NO: 5242576 - DNA, 25 bp, Homo sapien
taacgagtgacatgaatccaaaagg

SEQ ID NO: 5242577 - DNA, 25 bp, Homo sapien
gaggatggttaaataatatgaaagc

SEQ ID NO: 5242578 - DNA, 25 bp, Homo sapien
tataagaggatggttaaataatatg

SEQ ID NO: 5242579 - DNA, 25 bp, Homo sapien
ttaaataatatgaaagcatgtagca

SEQ ID NO: 5242580 - DNA, 25 bp, Homo sapien
aataatatgaaagcatgtagcatac

SEQ ID NO: 5242581 - DNA, 25 bp, Homo sapien
tgtgcaaggtcttcacacttgcatg

SEQ ID NO: 5242582 - DNA, 25 bp, Homo sapien
tcacagcaggcacacattcactggg

SEQ ID NO: 5242583 - DNA, 25 bp, Homo sapien
gagagaacaatggtgattagaagaa

SEQ ID NO: 5242584 - DNA, 25 bp, Homo sapien
acttgcatgttcactcgtcacagca

SEQ ID NO: 5242585 - DNA, 25 bp, Homo sapien
gttgtcaccattccactgcacactg

SEQ ID NO: 5242586 - DNA, 25 bp, Homo sapien
ttgtcaccattccactgcacactgc

SEQ ID NO: 5242587 - DNA, 25 bp, Homo sapien
tatgcacaggtgactgttgtcacca

SEQ ID NO: 5242588 - DNA, 25 bp, Homo sapien
gcacaggtgactgttgtcaccattc

SEQ ID NO: 5242589 - DNA, 25 bp, Homo sapien
ctagtaggcaagaagaagagtcatc

SEQ ID NO: 5242590 - DNA, 25 bp, Homo sapien
gagcaattgaccctgatcagcagaa

SEQ ID NO: 5242591 - DNA, 25 bp, Homo sapien
ctcggaattctcaggtaaaccatca

SEQ ID NO: 5242592 - DNA, 25 bp, Homo sapien
aaacatatggttccagggtctcgga

SEQ ID NO: 5242593 - DNA, 25 bp, Homo sapien
ctgcaagcatgaggtatccatccta

SEQ ID NO: 5242594 - DNA, 25 bp, Homo sapien
tgcaagcatgaggtatccatcctaa

SEQ ID NO: 5242595 - DNA, 25 bp, Homo sapien
ggatttaagccctgcaagcatgagg

SEQ ID NO: 5242596 - DNA, 25 bp, Homo sapien
ctaggatttaagccctgcaagcatg

SEQ ID NO: 5242597 - DNA, 25 bp, Homo sapien
tgggggttccacctttgccattgct

SEQ ID NO: 5242598 - DNA, 25 bp, Homo sapien
cttgggggttccacctttgccattg

SEQ ID NO: 5242599 - DNA, 25 bp, Homo sapien
ttgggggttccacctttgccattgc

SEQ ID NO: 5242600 - DNA, 25 bp, Homo sapien
tatgggtggaaacgggaagacagtg

SEQ ID NO: 5242601 - DNA, 25 bp, Homo sapien
agcacatgaatcgatacaggttccc

SEQ ID NO: 5242602 - DNA, 25 bp, Homo sapien
tatagcttgcgggaaaagcacatga

SEQ ID NO: 5242603 - DNA, 25 bp, Homo sapien
cactgaggatatagcttgcgggaaa

SEQ ID NO: 5242604 - DNA, 25 bp, Homo sapien
tgatagaattgatcaccagcagaac

SEQ ID NO: 5242605 - DNA, 25 bp, Homo sapien
ggagggaaaatgacaccagtgctca

SEQ ID NO: 5242606 - DNA, 25 bp, Homo sapien
gaaccactagatatacaacagctga

SEQ ID NO: 5242607 - DNA, 25 bp, Homo sapien
caagagttccttacatagatggctg

SEQ ID NO: 5242608 - DNA, 25 bp, Homo sapien
tcaaaggccttggcattcattagca

SEQ ID NO: 5242609 - DNA, 25 bp, Homo sapien
acagacaactgtgaggcattcccag

SEQ ID NO: 5242610 - DNA, 25 bp, Homo sapien
gaacaccagaggcaatcacaggaag

SEQ ID NO: 5242611 - DNA, 25 bp, Homo sapien
ccagatggcagtgtaaggttgaaca

SEQ ID NO: 5242612 - DNA, 25 bp, Homo sapien
catctgtacaactaactgttggagg

SEQ ID NO: 5242613 - DNA, 25 bp, Homo sapien
tggcatctgtacaactaactgttgg

SEQ ID NO: 5242614 - DNA, 25 bp, Homo sapien
ggcatctgtacaactaactgttgga

SEQ ID NO: 5242615 - DNA, 25 bp, Homo sapien
gcatctgtacaactaactgttggag

SEQ ID NO: 5242616 - DNA, 25 bp, Homo sapien
cccacaggctgtgagtactgagatg

SEQ ID NO: 5242617 - DNA, 25 bp, Homo sapien
tggatccagctactgtggtaatgtc

SEQ ID NO: 5242618 - DNA, 25 bp, Homo sapien
tcaaacatagtagaacccacaggct

SEQ ID NO: 5242619 - DNA, 25 bp, Homo sapien
cagaagttggtgttgtacgtgtacc

SEQ ID NO: 5242620 - DNA, 25 bp, Homo sapien
cagaattacccaaggcaacagctcc

SEQ ID NO: 5242621 - DNA, 25 bp, Homo sapien
aattacccaaggcaacagctccttc

SEQ ID NO: 5242622 - DNA, 25 bp, Homo sapien
agaattacccaaggcaacagctcct

SEQ ID NO: 5242623 - DNA, 25 bp, Homo sapien
gaattacccaaggcaacagctcctt

SEQ ID NO: 5242624 - DNA, 25 bp, Homo sapien
tgccagggaaatgagcagaggtgaa

SEQ ID NO: 5242625 - DNA, 25 bp, Homo sapien
gaaggaattggcttcattcaggatg

SEQ ID NO: 5242626 - DNA, 25 bp, Homo sapien
ctggtgaaggaggttcccgagagat

SEQ ID NO: 5242627 - DNA, 25 bp, Homo sapien
aggttcccgagagatgcgagtgcca

SEQ ID NO: 5242628 - DNA, 25 bp, Homo sapien
tgtgctcctcttgacattcagatgc

SEQ ID NO: 5242629 - DNA, 25 bp, Homo sapien
tgtggatttccacgcttgagagtgg

SEQ ID NO: 5242630 - DNA, 25 bp, Homo sapien
ggtttggcggtccagcagctgatct

SEQ ID NO: 5242631 - DNA, 25 bp, Homo sapien
caggatagggaagtgtagtgtacca

SEQ ID NO: 5242632 - DNA, 25 bp, Homo sapien
tcctctctgtgcacaaccgatatca

SEQ ID NO: 5242633 - DNA, 25 bp, Homo sapien
gctgtagtacactgagccatgaact

SEQ ID NO: 5242634 - DNA, 25 bp, Homo sapien
tcatccataatgagaattcagtcac

SEQ ID NO: 5242635 - DNA, 25 bp, Homo sapien
tcactcggagcctcgacattgctgg

SEQ ID NO: 5242636 - DNA, 25 bp, Homo sapien
tcaagaagccggcaggttaattctt

SEQ ID NO: 5242637 - DNA, 25 bp, Homo sapien
gtgaactgttgacccctgtgaaatc

SEQ ID NO: 5242638 - DNA, 25 bp, Homo sapien
cagacaggctatcctgatgcaggtc

SEQ ID NO: 5242639 - DNA, 25 bp, Homo sapien
tgcagggtgaactgttgacccctgt

SEQ ID NO: 5242640 - DNA, 25 bp, Homo sapien
accagaggaattctgtactcccaat

SEQ ID NO: 5242641 - DNA, 25 bp, Homo sapien
caatcctaccctgcacactttgttg

SEQ ID NO: 5242642 - DNA, 25 bp, Homo sapien
aactatcaccaaggtccttctcctc

SEQ ID NO: 5242643 - DNA, 25 bp, Homo sapien
ggaattctgtactcccaatcctacc

SEQ ID NO: 5242644 - DNA, 25 bp, Homo sapien
tatccctcataaatcttctcagtcc

SEQ ID NO: 5242645 - DNA, 25 bp, Homo sapien
tgtacccatggcgtagccatcatcc

SEQ ID NO: 5242646 - DNA, 25 bp, Homo sapien
ccccaacatttgtacccatggcgta

SEQ ID NO: 5242647 - DNA, 25 bp, Homo sapien
actttctcccatatccctcataaat

SEQ ID NO: 5242648 - DNA, 25 bp, Homo sapien
tgcctataacaatgtagatgtcgac

SEQ ID NO: 5242649 - DNA, 25 bp, Homo sapien
gatgtcgacagaagttgcacatatg

SEQ ID NO: 5242650 - DNA, 25 bp, Homo sapien
tgcacatatgacttaggggtcgtgg

SEQ ID NO: 5242651 - DNA, 25 bp, Homo sapien
cagcaaatggtgatatgggtgctcc

SEQ ID NO: 5242652 - DNA, 25 bp, Homo sapien
gtctgcattgaacggcaaggctgcc

SEQ ID NO: 5242653 - DNA, 25 bp, Homo sapien
tctgaaataagcagtaatctttctt

SEQ ID NO: 5242654 - DNA, 25 bp, Homo sapien
gcgttctagcaccttggatagttcc

SEQ ID NO: 5242655 - DNA, 25 bp, Homo sapien
gccagcgttctagcaccttggatag

SEQ ID NO: 5242656 - DNA, 25 bp, Homo sapien
agcccagcttgtggcatagtccctc

SEQ ID NO: 5242657 - DNA, 25 bp, Homo sapien
gcagcccagcttgtggcatagtccc

SEQ ID NO: 5242658 - DNA, 25 bp, Homo sapien
cccagcttgtggcatagtccctccc

SEQ ID NO: 5242659 - DNA, 25 bp, Homo sapien
cagcccagcttgtggcatagtccct

SEQ ID NO: 5242660 - DNA, 25 bp, Homo sapien
accaagctggctaatgtacctcatt

SEQ ID NO: 5242661 - DNA, 25 bp, Homo sapien
gattttacccactttgctacacaga

SEQ ID NO: 5242662 - DNA, 25 bp, Homo sapien
cacagatgattacaggaccagaagc

SEQ ID NO: 5242663 - DNA, 25 bp, Homo sapien
catttgattatattctgcgaagaca

SEQ ID NO: 5242664 - DNA, 25 bp, Homo sapien
cattcggagaaaagagggcatagct

SEQ ID NO: 5242665 - DNA, 25 bp, Homo sapien
tcacggttgatctcagggcagttct

SEQ ID NO: 5242666 - DNA, 25 bp, Homo sapien
tctggatgggaaaagtgtcgactcc

SEQ ID NO: 5242667 - DNA, 25 bp, Homo sapien
gcagttctgtaggagtaatccagca

SEQ ID NO: 5242668 - DNA, 25 bp, Homo sapien
ccccagggagagctaagtgcaataa

SEQ ID NO: 5242669 - DNA, 25 bp, Homo sapien
ggagagctaagtgcaataaccagaa

SEQ ID NO: 5242670 - DNA, 25 bp, Homo sapien
agctaagtgcaataaccagaaggtg

SEQ ID NO: 5242671 - DNA, 25 bp, Homo sapien
taagtgcaataaccagaaggtgact

SEQ ID NO: 5242672 - DNA, 25 bp, Homo sapien
ctcaggattagaactcatcatcttg

SEQ ID NO: 5242673 - DNA, 25 bp, Homo sapien
ttcatccccatatcctcaatgtact

SEQ ID NO: 5242674 - DNA, 25 bp, Homo sapien
tccccatatcctcaatgtactggag

SEQ ID NO: 5242675 - DNA, 25 bp, Homo sapien
tatcctcaatgtactggagaaatgt

SEQ ID NO: 5242676 - DNA, 25 bp, Homo sapien
gtcttcggcgtttttcattcttctc

SEQ ID NO: 5242677 - DNA, 25 bp, Homo sapien
ttattgcttcttcttgtcttcggcg

SEQ ID NO: 5242678 - DNA, 25 bp, Homo sapien
caagcgatcattctctcgagcaata

SEQ ID NO: 5242679 - DNA, 25 bp, Homo sapien
tcttctctttcaaataggctaggtt

SEQ ID NO: 5242680 - DNA, 25 bp, Homo sapien
tcaaaaacatgtaggccatccgttg

SEQ ID NO: 5242681 - DNA, 25 bp, Homo sapien
caaaataacatagtcctcaacaaca

SEQ ID NO: 5242682 - DNA, 25 bp, Homo sapien
gaatcatgacaccagttaaaattgg

SEQ ID NO: 5242683 - DNA, 25 bp, Homo sapien
ggcatttatacactctagaaaagaa

SEQ ID NO: 5242684 - DNA, 25 bp, Homo sapien
catgtgtgcacctggtcagtgttcc

SEQ ID NO: 5242685 - DNA, 25 bp, Homo sapien
ctgatgggagtaattcctctgtgcc

SEQ ID NO: 5242686 - DNA, 25 bp, Homo sapien
gcatggcccgcaaatgactgtctcc

SEQ ID NO: 5242687 - DNA, 25 bp, Homo sapien
ctgcagtgcaggcatggaacaggct

SEQ ID NO: 5242688 - DNA, 25 bp, Homo sapien
ctagatcacttgagattccacagct

SEQ ID NO: 5242689 - DNA, 25 bp, Homo sapien
gatcacttgagattccacagctcta

SEQ ID NO: 5242690 - DNA, 25 bp, Homo sapien
atcacttgagattccacagctctaa

SEQ ID NO: 5242691 - DNA, 25 bp, Homo sapien
tagatcacttgagattccacagctc

SEQ ID NO: 5242692 - DNA, 25 bp, Homo sapien
tcttcgattattctctgcacaacag

SEQ ID NO: 5242693 - DNA, 25 bp, Homo sapien
tattctctgcacaacagtcgtttcc

SEQ ID NO: 5242694 - DNA, 25 bp, Homo sapien
ttctcttcgattattctctgcacaa

SEQ ID NO: 5242695 - DNA, 25 bp, Homo sapien
gattattctctgcacaacagtcgtt

SEQ ID NO: 5242696 - DNA, 25 bp, Homo sapien
tgcattagtggattgtattgtcttt

SEQ ID NO: 5242697 - DNA, 25 bp, Homo sapien
cattagtggattgtattgtctttta

SEQ ID NO: 5242698 - DNA, 25 bp, Homo sapien
gcattagtggattgtattgtctttt

SEQ ID NO: 5242699 - DNA, 25 bp, Homo sapien
attagtggattgtattgtcttttac

SEQ ID NO: 5242700 - DNA, 25 bp, Homo sapien
aactgagccctgtgtgttgagctct

SEQ ID NO: 5242701 - DNA, 25 bp, Homo sapien
tgtgttgagctctgttacgtgtgca

SEQ ID NO: 5242702 - DNA, 25 bp, Homo sapien
ttgagctctgttacgtgtgcatgtg

SEQ ID NO: 5242703 - DNA, 25 bp, Homo sapien
ccctgtgtgttgagctctgttacgt

SEQ ID NO: 5242704 - DNA, 25 bp, Homo sapien
tttaaattccaaagcgatggtctag

SEQ ID NO: 5242705 - DNA, 25 bp, Homo sapien
tcatccaacaggagtaacatgttca

SEQ ID NO: 5242706 - DNA, 25 bp, Homo sapien
gatggtctagcataggcaaacactt

SEQ ID NO: 5242707 - DNA, 25 bp, Homo sapien
tccaacaggagtaacatgttcatcc

SEQ ID NO: 5242708 - DNA, 25 bp, Homo sapien
ataacccctaatcagttgcacaatg

SEQ ID NO: 5242709 - DNA, 25 bp, Homo sapien
gcataacccctaatcagttgcacaa

SEQ ID NO: 5242710 - DNA, 25 bp, Homo sapien
aacccctaatcagttgcacaatggg

SEQ ID NO: 5242711 - DNA, 25 bp, Homo sapien
tttgcataacccctaatcagttgca

SEQ ID NO: 5242712 - DNA, 25 bp, Homo sapien
gactttttggatgcaagtggctctt

SEQ ID NO: 5242713 - DNA, 25 bp, Homo sapien
gaagcaagtggttctctccttttgc

SEQ ID NO: 5242714 - DNA, 25 bp, Homo sapien
ttggaagcaagtggttctctccttt

SEQ ID NO: 5242715 - DNA, 25 bp, Homo sapien
ggatgcaagtggctcttgacttttt

SEQ ID NO: 5242716 - DNA, 25 bp, Homo sapien
tgtctaccccttcaaattcctgctt

SEQ ID NO: 5242717 - DNA, 25 bp, Homo sapien
ggagcagattcctcttgtcctgcct

SEQ ID NO: 5242718 - DNA, 25 bp, Homo sapien
cagtggggctatgggagcagattcc

SEQ ID NO: 5242719 - DNA, 25 bp, Homo sapien
taccccttcaaattcctgcttctta

SEQ ID NO: 5242720 - DNA, 25 bp, Homo sapien
gcaatgcacttatgctatgcctcac

SEQ ID NO: 5242721 - DNA, 25 bp, Homo sapien
caaatgctgtcaggctgcaatgcac

SEQ ID NO: 5242722 - DNA, 25 bp, Homo sapien
aggctgcaatgcacttatgctatgc

SEQ ID NO: 5242723 - DNA, 25 bp, Homo sapien
ctgtaccaaatgctgtcaggctgca

SEQ ID NO: 5242724 - DNA, 25 bp, Homo sapien
gaagagttccatattccataaggtg

SEQ ID NO: 5242725 - DNA, 25 bp, Homo sapien
agagttccatattccataaggtgcc

SEQ ID NO: 5242726 - DNA, 25 bp, Homo sapien
aagagttccatattccataaggtgc

SEQ ID NO: 5242727 - DNA, 25 bp, Homo sapien
ttccataaggtgccatgttctccag

SEQ ID NO: 5242728 - DNA, 25 bp, Homo sapien
gcattagcagtaagattgcacagtt

SEQ ID NO: 5242729 - DNA, 25 bp, Homo sapien
taatggatccatgggctttgtcttc

SEQ ID NO: 5242730 - DNA, 25 bp, Homo sapien
tgtcttctctccgtataccattttc

SEQ ID NO: 5242731 - DNA, 25 bp, Homo sapien
gaagaagtcctgaacagtccacaaa

SEQ ID NO: 5242732 - DNA, 25 bp, Homo sapien
ccacctcctcttctatacctgttca

SEQ ID NO: 5242733 - DNA, 25 bp, Homo sapien
cacctcctcttctatacctgttcat

SEQ ID NO: 5242734 - DNA, 25 bp, Homo sapien
gcccacaccccttgggtcataccac

SEQ ID NO: 5242735 - DNA, 25 bp, Homo sapien
tcagcccacaccccttgggtcatac

SEQ ID NO: 5242736 - DNA, 25 bp, Homo sapien
ttaaatctcgccttataagatccag

SEQ ID NO: 5242737 - DNA, 25 bp, Homo sapien
gacagctgttttcgaaaattccctc

SEQ ID NO: 5242738 - DNA, 25 bp, Homo sapien
tccagtcgagttcaatctattctca

SEQ ID NO: 5242739 - DNA, 25 bp, Homo sapien
taagatccagagtcaatcctccagt

SEQ ID NO: 5242740 - DNA, 25 bp, Homo sapien
tagtttgtcaggcagtgaacagaac

SEQ ID NO: 5242741 - DNA, 25 bp, Homo sapien
gcagaaggccttaacttaatgccag

SEQ ID NO: 5242742 - DNA, 25 bp, Homo sapien
taagctttgaatatggtttgagaac

SEQ ID NO: 5242743 - DNA, 25 bp, Homo sapien
gagtttagctaaccatatgtggctc

SEQ ID NO: 5242744 - DNA, 25 bp, Homo sapien
gtgagctgctgaggtgagacatcat

SEQ ID NO: 5242745 - DNA, 25 bp, Homo sapien
agctgctgaggtgagacatcatctt

SEQ ID NO: 5242746 - DNA, 25 bp, Homo sapien
tcatcttcaaaagtgacaggggtgt

SEQ ID NO: 5242747 - DNA, 25 bp, Homo sapien
gacaggggtgttgcttctgcatgca

SEQ ID NO: 5242748 - DNA, 25 bp, Homo sapien
tgatgttgtgtgtttccttatgaga

SEQ ID NO: 5242749 - DNA, 25 bp, Homo sapien
tgtgtttccttatgagaactgcttc

SEQ ID NO: 5242750 - DNA, 25 bp, Homo sapien
cacagtttgttccttgtcttgctgt

SEQ ID NO: 5242751 - DNA, 25 bp, Homo sapien
tccatcagcattgatgttgtgtgtt

SEQ ID NO: 5242752 - DNA, 25 bp, Homo sapien
gcctgaactttttcccggactgaca

SEQ ID NO: 5242753 - DNA, 25 bp, Homo sapien
ctgaactttttcccggactgacaat

SEQ ID NO: 5242754 - DNA, 25 bp, Homo sapien
gagcctgaactttttcccggactga

SEQ ID NO: 5242755 - DNA, 25 bp, Homo sapien
tttcccggactgacaatttagtctg

SEQ ID NO: 5242756 - DNA, 25 bp, Homo sapien
tctctgatgaggtgctcagcttggt

SEQ ID NO: 5242757 - DNA, 25 bp, Homo sapien
ggcattgtcatgaatcccatgcgga

SEQ ID NO: 5242758 - DNA, 25 bp, Homo sapien
tggttgtctccgtgagccacagctg

SEQ ID NO: 5242759 - DNA, 25 bp, Homo sapien
ttttcccgctcttactggctgcagt

SEQ ID NO: 5242760 - DNA, 25 bp, Homo sapien
gtgacatggacatggcgtgttttac

SEQ ID NO: 5242761 - DNA, 25 bp, Homo sapien
aggcaggattatgtggcccagtgaa

SEQ ID NO: 5242762 - DNA, 25 bp, Homo sapien
ggcaggattatgtggcccagtgaag

SEQ ID NO: 5242763 - DNA, 25 bp, Homo sapien
ttctgggacttcagggtgagaggca

SEQ ID NO: 5242764 - DNA, 25 bp, Homo sapien
tctgggacttcagggtgagaggcag

SEQ ID NO: 5242765 - DNA, 25 bp, Homo sapien
gccaaggggctttcatgagggacta

SEQ ID NO: 5242766 - DNA, 25 bp, Homo sapien
gctttcatgagggactagggagccc

SEQ ID NO: 5242767 - DNA, 25 bp, Homo sapien
gactagggagcccatgtcacaatga

SEQ ID NO: 5242768 - DNA, 25 bp, Homo sapien
catgagggactagggagcccatgtc

SEQ ID NO: 5242769 - DNA, 25 bp, Homo sapien
atctgatctcatggactgcctatga

SEQ ID NO: 5242770 - DNA, 25 bp, Homo sapien
gatctcatggactgcctatgagaat

SEQ ID NO: 5242771 - DNA, 25 bp, Homo sapien
tctgatctcatggactgcctatgag

SEQ ID NO: 5242772 - DNA, 25 bp, Homo sapien
tgatctcatggactgcctatgagaa

SEQ ID NO: 5242773 - DNA, 25 bp, Homo sapien
taaaggcacctgaacaccaatgaga

SEQ ID NO: 5242774 - DNA, 25 bp, Homo sapien
aaggagagacaaagatgatgggaga

SEQ ID NO: 5242775 - DNA, 25 bp, Homo sapien
tgtttttggctaaaggcacctgaac

SEQ ID NO: 5242776 - DNA, 25 bp, Homo sapien
ggcacctgaacaccaatgagagagg

SEQ ID NO: 5242777 - DNA, 25 bp, Homo sapien
tcattgaggtcataacttggtagaa

SEQ ID NO: 5242778 - DNA, 25 bp, Homo sapien
cattgaggtcataacttggtagaag

SEQ ID NO: 5242779 - DNA, 25 bp, Homo sapien
ttgaggtcataacttggtagaagag

SEQ ID NO: 5242780 - DNA, 25 bp, Homo sapien
tatcattgaggtcataacttggtag

SEQ ID NO: 5242781 - DNA, 25 bp, Homo sapien
agaaggcttggccgactgacagcag

SEQ ID NO: 5242782 - DNA, 25 bp, Homo sapien
tggtagcgccttgggagaacaggag

SEQ ID NO: 5242783 - DNA, 25 bp, Homo sapien
gaggaagaaggcttggccgactgac

SEQ ID NO: 5242784 - DNA, 25 bp, Homo sapien
catgtggtagcgccttgggagaaca

SEQ ID NO: 5242785 - DNA, 25 bp, Homo sapien
ctttcttcctctctttctcccttgt

SEQ ID NO: 5242786 - DNA, 25 bp, Homo sapien
cttcctctctttctcccttgtacca

SEQ ID NO: 5242787 - DNA, 25 bp, Homo sapien
tttcttcctctctttctcccttgta

SEQ ID NO: 5242788 - DNA, 25 bp, Homo sapien
tcttcctctctttctcccttgtacc

SEQ ID NO: 5242789 - DNA, 25 bp, Homo sapien
aggagagtgtcctacaaaaattcat

SEQ ID NO: 5242790 - DNA, 25 bp, Homo sapien
ggagagtgtcctacaaaaattcatg

SEQ ID NO: 5242791 - DNA, 25 bp, Homo sapien
tgaggagagtgtcctacaaaaattc

SEQ ID NO: 5242792 - DNA, 25 bp, Homo sapien
gaggagagtgtcctacaaaaattca

SEQ ID NO: 5242793 - DNA, 25 bp, Homo sapien
cttctctctcaaaggctatgagctt

SEQ ID NO: 5242794 - DNA, 25 bp, Homo sapien
ttctctctcaaaggctatgagcttt

SEQ ID NO: 5242795 - DNA, 25 bp, Homo sapien
cttgattatcagcttctctctcaaa

SEQ ID NO: 5242796 - DNA, 25 bp, Homo sapien
cttgtacttgattatcagcttctct

SEQ ID NO: 5242797 - DNA, 25 bp, Homo sapien
tctttctttcttgtgaacttcctca

SEQ ID NO: 5242798 - DNA, 25 bp, Homo sapien
tttcttgtgaacttcctcattttta

SEQ ID NO: 5242799 - DNA, 25 bp, Homo sapien
ttctttcttgtgaacttcctcattt

SEQ ID NO: 5242800 - DNA, 25 bp, Homo sapien
ctctttctttcttgtgaacttcctc

SEQ ID NO: 5242801 - DNA, 25 bp, Homo sapien
tggtgtgagaatggacaaatatagt

SEQ ID NO: 5242802 - DNA, 25 bp, Homo sapien
gggatgggcccagtgagaagtaatt

SEQ ID NO: 5242803 - DNA, 25 bp, Homo sapien
atagtggtgtgagaatggacaaata

SEQ ID NO: 5242804 - DNA, 25 bp, Homo sapien
ccatgtgttatgggatgggcccagt

SEQ ID NO: 5242805 - DNA, 25 bp, Homo sapien
aagaaaaaacgtagtggaatagatg

SEQ ID NO: 5242806 - DNA, 25 bp, Homo sapien
gctgagtgttcggatttcgcttcgg

SEQ ID NO: 5242807 - DNA, 25 bp, Homo sapien
ttcttggaatattcatcgctgtggg

SEQ ID NO: 5242808 - DNA, 25 bp, Homo sapien
tggtcatcgtcctccttcctgaagt

SEQ ID NO: 5242809 - DNA, 25 bp, Homo sapien
accatctcgatgtacacgggctcct

SEQ ID NO: 5242810 - DNA, 25 bp, Homo sapien
gaacagctgtgatggtcgaagtcac

SEQ ID NO: 5242811 - DNA, 25 bp, Homo sapien
gagggatgtcgcaaagcagcccctt

SEQ ID NO: 5242812 - DNA, 25 bp, Homo sapien
gtagcacactgcgaagaacagctgt

SEQ ID NO: 5242813 - DNA, 25 bp, Homo sapien
gtcaggcaccgtgggagtagcacac

SEQ ID NO: 5242814 - DNA, 25 bp, Homo sapien
gagtgacttttagggtagccatggg

SEQ ID NO: 5242815 - DNA, 25 bp, Homo sapien
tcatgtaagacacgttttccagcac

SEQ ID NO: 5242816 - DNA, 25 bp, Homo sapien
gacgccccggctggctgtttcatgt

SEQ ID NO: 5242817 - DNA, 25 bp, Homo sapien
agactgggttcggtacagcgtagac

SEQ ID NO: 5242818 - DNA, 25 bp, Homo sapien
tgcccgaatgcacagcgtcgtaagg

SEQ ID NO: 5242819 - DNA, 25 bp, Homo sapien
tggccccatcttgcgacacgggtct

SEQ ID NO: 5242820 - DNA, 25 bp, Homo sapien
aggctctttggagcgccggccactg

SEQ ID NO: 5242821 - DNA, 25 bp, Homo sapien
ccgtaggtgttcaccgcggcgttga

SEQ ID NO: 5242822 - DNA, 25 bp, Homo sapien
ggtatcaacaggtccacaaaacctg

SEQ ID NO: 5242823 - DNA, 25 bp, Homo sapien
tccctaaggtatcaacaggtccaca

SEQ ID NO: 5242824 - DNA, 25 bp, Homo sapien
taaggtatcaacaggtccacaaaac

SEQ ID NO: 5242825 - DNA, 25 bp, Homo sapien
ctgtccctaaggtatcaacaggtcc

SEQ ID NO: 5242826 - DNA, 25 bp, Homo sapien
aataataatgacaggagttgagtgg

SEQ ID NO: 5242827 - DNA, 25 bp, Homo sapien
gttgagtgggtctgcaccttcattt

SEQ ID NO: 5242828 - DNA, 25 bp, Homo sapien
tgtaatgccaagacatcatttctct

SEQ ID NO: 5242829 - DNA, 25 bp, Homo sapien
tccaataatgtagaatacggttgag

SEQ ID NO: 5242830 - DNA, 25 bp, Homo sapien
tgggtatctggtttcttggtccaca

SEQ ID NO: 5242831 - DNA, 25 bp, Homo sapien
ctggtttcttggtccacaactgatt

SEQ ID NO: 5242832 - DNA, 25 bp, Homo sapien
gaagctagatgcatcaataaaacta

SEQ ID NO: 5242833 - DNA, 25 bp, Homo sapien
tgggagaagctagatgcatcaataa

SEQ ID NO: 5242834 - DNA, 25 bp, Homo sapien
aaggaagtggcacacactcggcaca

SEQ ID NO: 5242835 - DNA, 25 bp, Homo sapien
actgctgccagccagtcttaggttt

SEQ ID NO: 5242836 - DNA, 25 bp, Homo sapien
ctcatctggatggacttctgaggtg

SEQ ID NO: 5242837 - DNA, 25 bp, Homo sapien
tcttcctcgccttctggaccagcag

SEQ ID NO: 5242838 - DNA, 25 bp, Homo sapien
gttctgagtcacagctccatctgga

SEQ ID NO: 5242839 - DNA, 25 bp, Homo sapien
tgagtcacagctccatctggagggc

SEQ ID NO: 5242840 - DNA, 25 bp, Homo sapien
gtcacagctccatctggagggcccg

SEQ ID NO: 5242841 - DNA, 25 bp, Homo sapien
tctgagtcacagctccatctggagg

SEQ ID NO: 5242842 - DNA, 25 bp, Homo sapien
ctctcccacactgactagagagtgt

SEQ ID NO: 5242843 - DNA, 25 bp, Homo sapien
actgactagagagtgtcctctgaga

SEQ ID NO: 5242844 - DNA, 25 bp, Homo sapien
cacactgactagagagtgtcctctg

SEQ ID NO: 5242845 - DNA, 25 bp, Homo sapien
tcccacactgactagagagtgtcct

SEQ ID NO: 5242846 - DNA, 25 bp, Homo sapien
aagctccccaatgccagtcagaggt

SEQ ID NO: 5242847 - DNA, 25 bp, Homo sapien
caagggtctcaacggttgtgtaagc

SEQ ID NO: 5242848 - DNA, 25 bp, Homo sapien
ggtgggtgacaggaggaaccaggac

SEQ ID NO: 5242849 - DNA, 25 bp, Homo sapien
caacggttgtgtaagctccccaatg

SEQ ID NO: 5242850 - DNA, 25 bp, Homo sapien
ctcgacgaatctttagtaactcttc

SEQ ID NO: 5242851 - DNA, 25 bp, Homo sapien
tcgacgaatctttagtaactcttcc

SEQ ID NO: 5242852 - DNA, 25 bp, Homo sapien
tgagctttgacaggctctctggagg

SEQ ID NO: 5242853 - DNA, 25 bp, Homo sapien
caactttggtaatggctccgtgctg

SEQ ID NO: 5242854 - DNA, 25 bp, Homo sapien
tgaactgtggtttcccgctaacaag

SEQ ID NO: 5242855 - DNA, 25 bp, Homo sapien
ttcctagtcgactggtgaccacagg

SEQ ID NO: 5242856 - DNA, 25 bp, Homo sapien
tctggaagatcataatctgccttac

SEQ ID NO: 5242857 - DNA, 25 bp, Homo sapien
cttctggaagatcataatctgcctt

SEQ ID NO: 5242858 - DNA, 25 bp, Homo sapien
ttctggaagatcataatctgcctta

SEQ ID NO: 5242859 - DNA, 25 bp, Homo sapien
ttgggacttaacaccattgactccc

SEQ ID NO: 5242860 - DNA, 25 bp, Homo sapien
gatttttgactcagattgggactta

SEQ ID NO: 5242861 - DNA, 25 bp, Homo sapien
tacccagccttgtgtacccagaaac

SEQ ID NO: 5242862 - DNA, 25 bp, Homo sapien
accctcacctaggtgggtgggcatc

SEQ ID NO: 5242863 - DNA, 25 bp, Homo sapien
tattgctagcatttccttgtccagg

SEQ ID NO: 5242864 - DNA, 25 bp, Homo sapien
tgttgctattgctagcatttccttg

SEQ ID NO: 5242865 - DNA, 25 bp, Homo sapien
tgctattgctagcatttccttgtcc

SEQ ID NO: 5242866 - DNA, 25 bp, Homo sapien
cagtgttgctattgctagcatttcc

SEQ ID NO: 5242867 - DNA, 25 bp, Homo sapien
tccctacaatgggtcatgaagtccc

SEQ ID NO: 5242868 - DNA, 25 bp, Homo sapien
gtacaagactcctcttggatatgaa

SEQ ID NO: 5242869 - DNA, 25 bp, Homo sapien
tgggtcatgaagtcccagaaccgtt

SEQ ID NO: 5242870 - DNA, 25 bp, Homo sapien
gtgtgtacaagactcctcttggata

SEQ ID NO: 5242871 - DNA, 25 bp, Homo sapien
gccgaacagttacttgctaagcaac

SEQ ID NO: 5242872 - DNA, 25 bp, Homo sapien
cccaccatcagcagccgaacagtta

SEQ ID NO: 5242873 - DNA, 25 bp, Homo sapien
ccatcagcagccgaacagttacttg

SEQ ID NO: 5242874 - DNA, 25 bp, Homo sapien
cagcagccgaacagttacttgctaa

SEQ ID NO: 5242875 - DNA, 25 bp, Homo sapien
ctggtccatagaaaacacactttat

SEQ ID NO: 5242876 - DNA, 25 bp, Homo sapien
tccatagaaaacacactttatacac

SEQ ID NO: 5242877 - DNA, 25 bp, Homo sapien
ggtccatagaaaacacactttatac

SEQ ID NO: 5242878 - DNA, 25 bp, Homo sapien
catagaaaacacactttatacacat

SEQ ID NO: 5242879 - DNA, 25 bp, Homo sapien
ctggagacatcatggttgttcgctc

SEQ ID NO: 5242880 - DNA, 25 bp, Homo sapien
gaaacacgtcctgagagtcctggct

SEQ ID NO: 5242881 - DNA, 25 bp, Homo sapien
taactgggtatcctgtagggcacct

SEQ ID NO: 5242882 - DNA, 25 bp, Homo sapien
catggtctaggccacctccagagtt

SEQ ID NO: 5242883 - DNA, 25 bp, Homo sapien
gcctcctctgattggttggccatct

SEQ ID NO: 5242884 - DNA, 25 bp, Homo sapien
cctcctctgattggttggccatctc

SEQ ID NO: 5242885 - DNA, 25 bp, Homo sapien
tgatcccataactttagctaaccac

SEQ ID NO: 5242886 - DNA, 25 bp, Homo sapien
ggctgatcccataactttagctaac

SEQ ID NO: 5242887 - DNA, 25 bp, Homo sapien
taggctgatcccataactttagcta

SEQ ID NO: 5242888 - DNA, 25 bp, Homo sapien
ctaggctgatcccataactttagct

SEQ ID NO: 5242889 - DNA, 25 bp, Homo sapien
ttttgtggcttttcgcagaaacaga

SEQ ID NO: 5242890 - DNA, 25 bp, Homo sapien
tggtctaggagcaatgtcagggtgg

SEQ ID NO: 5242891 - DNA, 25 bp, Homo sapien
tcttcgtgaacactgttggtgcagc

SEQ ID NO: 5242892 - DNA, 25 bp, Homo sapien
aaacagaaagggcattcttcgtgaa

SEQ ID NO: 5242893 - DNA, 25 bp, Homo sapien
aattttcgcaacctactcatctgac

SEQ ID NO: 5242894 - DNA, 25 bp, Homo sapien
ccatcaaaaagtgggtgaaggacat

SEQ ID NO: 5242895 - DNA, 25 bp, Homo sapien
gccctcagaaataacgccgcatatc

SEQ ID NO: 5242896 - DNA, 25 bp, Homo sapien
aataacgccgcatatctacaactat

SEQ ID NO: 5242897 - DNA, 25 bp, Homo sapien
catggcagtgattccagttagaggg

SEQ ID NO: 5242898 - DNA, 25 bp, Homo sapien
cagtgattccagttagaggggatgt

SEQ ID NO: 5242899 - DNA, 25 bp, Homo sapien
gtgattccagttagaggggatgtga

SEQ ID NO: 5242900 - DNA, 25 bp, Homo sapien
attccagttagaggggatgtgaccc

SEQ ID NO: 5242901 - DNA, 25 bp, Homo sapien
cctgttataagacctagtttcaagc

SEQ ID NO: 5242902 - DNA, 25 bp, Homo sapien
tagtttcaagcctctctcgcctact

SEQ ID NO: 5242903 - DNA, 25 bp, Homo sapien
ggcaatgatgtaacaaagaacctgt

SEQ ID NO: 5242904 - DNA, 25 bp, Homo sapien
cctcaaagcaaggaggcaatgatgt

SEQ ID NO: 5242905 - DNA, 25 bp, Homo sapien
ctggctctgttgcaggtcactgctt

SEQ ID NO: 5242906 - DNA, 25 bp, Homo sapien
gctctgttgcaggtcactgctttgc

SEQ ID NO: 5242907 - DNA, 25 bp, Homo sapien
ggaggcacacctgacgtcgacgcag

SEQ ID NO: 5242908 - DNA, 25 bp, Homo sapien
acgcagaccggcctaatttgcagct

SEQ ID NO: 5242909 - DNA, 25 bp, Homo sapien
caatcacgattggctaacgatgatg

SEQ ID NO: 5242910 - DNA, 25 bp, Homo sapien
tcaatcacgattggctaacgatgat

SEQ ID NO: 5242911 - DNA, 25 bp, Homo sapien
tcagaatctctatcagcaggtaagg

SEQ ID NO: 5242912 - DNA, 25 bp, Homo sapien
taacagcatataaaggcgtcctggg

SEQ ID NO: 5242913 - DNA, 25 bp, Homo sapien
tgagatacccttgagagaagcctct

SEQ ID NO: 5242914 - DNA, 25 bp, Homo sapien
cagtcaaattgtcttaggccagtca

SEQ ID NO: 5242915 - DNA, 25 bp, Homo sapien
tgcaataagctgagatcgcatcatt

SEQ ID NO: 5242916 - DNA, 25 bp, Homo sapien
tgtaatctctgctacacaggagtct

SEQ ID NO: 5242917 - DNA, 25 bp, Homo sapien
cgcatcattgcacgccagcctaggc

SEQ ID NO: 5242918 - DNA, 25 bp, Homo sapien
agaatcagttgaacttggaggtgga

SEQ ID NO: 5242919 - DNA, 25 bp, Homo sapien
aagttgataactctgacctcggatg

SEQ ID NO: 5242920 - DNA, 25 bp, Homo sapien
ggtgaagttgataactctgacctcg

SEQ ID NO: 5242921 - DNA, 25 bp, Homo sapien
tgaagttgataactctgacctcgga

SEQ ID NO: 5242922 - DNA, 25 bp, Homo sapien
gaagttgataactctgacctcggat

SEQ ID NO: 5242923 - DNA, 25 bp, Homo sapien
aggtctagccactccacccaaagcc

SEQ ID NO: 5242924 - DNA, 25 bp, Homo sapien
tgtgcacctaacagcatcctccagg

SEQ ID NO: 5242925 - DNA, 25 bp, Homo sapien
ttgccagagcagcattagaaagtgt

SEQ ID NO: 5242926 - DNA, 25 bp, Homo sapien
gcagcattagaaagtgtgcacctaa

SEQ ID NO: 5242927 - DNA, 25 bp, Homo sapien
aagcaagcgccttgttaaccttgga

SEQ ID NO: 5242928 - DNA, 25 bp, Homo sapien
tgtgcctcattagttagcatgtgaa

SEQ ID NO: 5242929 - DNA, 25 bp, Homo sapien
taggagacagagcacgatgccaagc

SEQ ID NO: 5242930 - DNA, 25 bp, Homo sapien
gcagtgccataataaatctccataa

SEQ ID NO: 5242931 - DNA, 25 bp, Homo sapien
gcatgattcagcagaagcaacatcc

SEQ ID NO: 5242932 - DNA, 25 bp, Homo sapien
gcaacatccttggataataagtcca

SEQ ID NO: 5242933 - DNA, 25 bp, Homo sapien
cagaagcaacatccttggataataa

SEQ ID NO: 5242934 - DNA, 25 bp, Homo sapien
gatttttataccagcatgattcagc

SEQ ID NO: 5242935 - DNA, 25 bp, Homo sapien
catatggcagtatcccagaataccg

SEQ ID NO: 5242936 - DNA, 25 bp, Homo sapien
ccagctgggcaagataggcatgcta

SEQ ID NO: 5242937 - DNA, 25 bp, Homo sapien
catctcaagcattgtatggtctcca

SEQ ID NO: 5242938 - DNA, 25 bp, Homo sapien
gaataccgtttgctgtttagaatac

SEQ ID NO: 5242939 - DNA, 25 bp, Homo sapien
tatcatatgaccgagtcgacctccc

SEQ ID NO: 5242940 - DNA, 25 bp, Homo sapien
ggttagcctaaccattgccagagga

SEQ ID NO: 5242941 - DNA, 25 bp, Homo sapien
gaaatgtagagctcacaccatcctg

SEQ ID NO: 5242942 - DNA, 25 bp, Homo sapien
tatcttgaacttgccacgaataggc

SEQ ID NO: 5242943 - DNA, 25 bp, Homo sapien
gagtgcatgaaacctggccctagca

SEQ ID NO: 5242944 - DNA, 25 bp, Homo sapien
taaatccatcacatttggcgccaag

SEQ ID NO: 5242945 - DNA, 25 bp, Homo sapien
ttagtgcaagataacaagacctgtg

SEQ ID NO: 5242946 - DNA, 25 bp, Homo sapien
cacagtggacaatcgtataggcaca

SEQ ID NO: 5242947 - DNA, 25 bp, Homo sapien
cctgatcaagaatacgcacaaacat

SEQ ID NO: 5242948 - DNA, 25 bp, Homo sapien
tgcctgatcaagaatacgcacaaac

SEQ ID NO: 5242949 - DNA, 25 bp, Homo sapien
ggctgcctgatcaagaatacgcaca

SEQ ID NO: 5242950 - DNA, 25 bp, Homo sapien
gctgcctgatcaagaatacgcacaa

SEQ ID NO: 5242951 - DNA, 25 bp, Homo sapien
cgttaatgtcatccataatctcggg

SEQ ID NO: 5242952 - DNA, 25 bp, Homo sapien
cattatcatcataaccgttaatgtc

SEQ ID NO: 5242953 - DNA, 25 bp, Homo sapien
cataatctcgggcattctttccatg

SEQ ID NO: 5242954 - DNA, 25 bp, Homo sapien
tcataaccgttaatgtcatccataa

SEQ ID NO: 5242955 - DNA, 25 bp, Homo sapien
taatggcagggcatttttccagcac

SEQ ID NO: 5242956 - DNA, 25 bp, Homo sapien
tcggcaaggagctacttcaagtgct

SEQ ID NO: 5242957 - DNA, 25 bp, Homo sapien
aaagcgtatccagtgacttcaagga

SEQ ID NO: 5242958 - DNA, 25 bp, Homo sapien
tccggaaggccttgacaacattacg

SEQ ID NO: 5242959 - DNA, 25 bp, Homo sapien
tccaccactgctggttgagtcttcc

SEQ ID NO: 5242960 - DNA, 25 bp, Homo sapien
cctgctgttgggctccagctggcat

SEQ ID NO: 5242961 - DNA, 25 bp, Homo sapien
gctggttgagtcttccctgctgttg

SEQ ID NO: 5242962 - DNA, 25 bp, Homo sapien
tgcccactccaccactgctggttga

SEQ ID NO: 5242963 - DNA, 25 bp, Homo sapien
ttagcagcagagtaaactgatcagc

SEQ ID NO: 5242964 - DNA, 25 bp, Homo sapien
tcagctgagcagaccttagaaagtc

SEQ ID NO: 5242965 - DNA, 25 bp, Homo sapien
tgtgaaaagtcatgggaagcccttg

SEQ ID NO: 5242966 - DNA, 25 bp, Homo sapien
tctggaaatctggacgagggaagcc

SEQ ID NO: 5242967 - DNA, 25 bp, Homo sapien
tagtcgtcactcagtatccaggaac

SEQ ID NO: 5242968 - DNA, 25 bp, Homo sapien
gaagcactgtcacccatagtcgtca

SEQ ID NO: 5242969 - DNA, 25 bp, Homo sapien
taagcctccgtagagtcttcagggt

SEQ ID NO: 5242970 - DNA, 25 bp, Homo sapien
gactcacggttgctctatgtatcca

SEQ ID NO: 5242971 - DNA, 25 bp, Homo sapien
tgttgccaggctggctatccacagg

SEQ ID NO: 5242972 - DNA, 25 bp, Homo sapien
accaaagtaaaagaagctggttgtg

SEQ ID NO: 5242973 - DNA, 25 bp, Homo sapien
ccaaagtaaaagaagctggttgtgg

SEQ ID NO: 5242974 - DNA, 25 bp, Homo sapien
tggttgtggcttaaatccatagccc

SEQ ID NO: 5242975 - DNA, 25 bp, Homo sapien
gttgtggcttaaatccatagccctt

SEQ ID NO: 5242976 - DNA, 25 bp, Homo sapien
tcttattggcggctatcccacattc

SEQ ID NO: 5242977 - DNA, 25 bp, Homo sapien
tgtttgcgtctaccaagtattttga

SEQ ID NO: 5242978 - DNA, 25 bp, Homo sapien
caagtattttgatcgtcatctctgg

SEQ ID NO: 5242979 - DNA, 25 bp, Homo sapien
tctcagatttctggttgaataccag

SEQ ID NO: 5242980 - DNA, 25 bp, Homo sapien
tttctcagtcccgttagttacagag

SEQ ID NO: 5242981 - DNA, 25 bp, Homo sapien
tgacattttctcagtcccgttagtt

SEQ ID NO: 5242982 - DNA, 25 bp, Homo sapien
atgacattttctcagtcccgttagt

SEQ ID NO: 5242983 - DNA, 25 bp, Homo sapien
ctcagtcccgttagttacagagctt

SEQ ID NO: 5242984 - DNA, 25 bp, Homo sapien
gaaacctgttaatatccccagctga

SEQ ID NO: 5242985 - DNA, 25 bp, Homo sapien
tgttaatatccccagctgagaaata

SEQ ID NO: 5242986 - DNA, 25 bp, Homo sapien
aaacctgttaatatccccagctgag

SEQ ID NO: 5242987 - DNA, 25 bp, Homo sapien
acctgttaatatccccagctgagaa

SEQ ID NO: 5242988 - DNA, 25 bp, Homo sapien
atcaggatgtgatttgagccctggc

SEQ ID NO: 5242989 - DNA, 25 bp, Homo sapien
cttttgaacctatgatgatggatgt

SEQ ID NO: 5242990 - DNA, 25 bp, Homo sapien
ggatgtgatttgagccctggctgca

SEQ ID NO: 5242991 - DNA, 25 bp, Homo sapien
aggatgtgatttgagccctggctgc

SEQ ID NO: 5242992 - DNA, 25 bp, Homo sapien
gtaaggctgattttgcaggattcca

SEQ ID NO: 5242993 - DNA, 25 bp, Homo sapien
caaagtaaggctgattttgcaggat

SEQ ID NO: 5242994 - DNA, 25 bp, Homo sapien
aagtaaggctgattttgcaggattc

SEQ ID NO: 5242995 - DNA, 25 bp, Homo sapien
tcaaagtaaggctgattttgcagga

SEQ ID NO: 5242996 - DNA, 25 bp, Homo sapien
tctacaagcttctgcatgattggct

SEQ ID NO: 5242997 - DNA, 25 bp, Homo sapien
caagcttctgcatgattggctcttc

SEQ ID NO: 5242998 - DNA, 25 bp, Homo sapien
gcttctgcatgattggctcttcttt

SEQ ID NO: 5242999 - DNA, 25 bp, Homo sapien
tacaagcttctgcatgattggctct

SEQ ID NO: 5243000 - DNA, 25 bp, Homo sapien
ggatgtggtgctcttctttaaccag

SEQ ID NO: 5243001 - DNA, 25 bp, Homo sapien
tacttgatctggatgtggtgctctt

SEQ ID NO: 5243002 - DNA, 25 bp, Homo sapien
tgtggtgctcttctttaaccagcac

SEQ ID NO: 5243003 - DNA, 25 bp, Homo sapien
cttgatctggatgtggtgctcttct

SEQ ID NO: 5243004 - DNA, 25 bp, Homo sapien
tcacagcactgagataacgctggcc

SEQ ID NO: 5243005 - DNA, 25 bp, Homo sapien
acagcactgagataacgctggccat

SEQ ID NO: 5243006 - DNA, 25 bp, Homo sapien
cagcactgagataacgctggccatt

SEQ ID NO: 5243007 - DNA, 25 bp, Homo sapien
gttcacagcactgagataacgctgg

SEQ ID NO: 5243008 - DNA, 25 bp, Homo sapien
ttaacgctgaagtgttcctccagga

SEQ ID NO: 5243009 - DNA, 25 bp, Homo sapien
gaagcagagcctgggttgctggtaa

SEQ ID NO: 5243010 - DNA, 25 bp, Homo sapien
cagagcctgggttgctggtaataac

SEQ ID NO: 5243011 - DNA, 25 bp, Homo sapien
agcagagcctgggttgctggtaata

SEQ ID NO: 5243012 - DNA, 25 bp, Homo sapien
caatatcgcctacagagttcagcct

SEQ ID NO: 5243013 - DNA, 25 bp, Homo sapien
aagttgcacctaaccttctgatggg

SEQ ID NO: 5243014 - DNA, 25 bp, Homo sapien
ggaacagcctgatcttatgggtcct

SEQ ID NO: 5243015 - DNA, 25 bp, Homo sapien
tgtctgatacaacctgtgcgcataa

SEQ ID NO: 5243016 - DNA, 25 bp, Homo sapien
tgccttggtctaatgctccttcttc

SEQ ID NO: 5243017 - DNA, 25 bp, Homo sapien
gccttggtctaatgctccttcttcc

SEQ ID NO: 5243018 - DNA, 25 bp, Homo sapien
ccttggtctaatgctccttcttcct

SEQ ID NO: 5243019 - DNA, 25 bp, Homo sapien
ttcctcatgatcacaggggcttctt

SEQ ID NO: 5243020 - DNA, 25 bp, Homo sapien
acaggggcttctttatcaactaagt

SEQ ID NO: 5243021 - DNA, 25 bp, Homo sapien
tttatcaactaagttaatatacaac

SEQ ID NO: 5243022 - DNA, 25 bp, Homo sapien
atcaactaagttaatatacaacttt

SEQ ID NO: 5243023 - DNA, 25 bp, Homo sapien
tatgggactttcacaaaatctgacc

SEQ ID NO: 5243024 - DNA, 25 bp, Homo sapien
gacagacactggacctagactctag

SEQ ID NO: 5243025 - DNA, 25 bp, Homo sapien
cagtctctgctgtgcatagtgtaca

SEQ ID NO: 5243026 - DNA, 25 bp, Homo sapien
tacattaaactaccagtgcaccttg

SEQ ID NO: 5243027 - DNA, 25 bp, Homo sapien
ggagatgagacccatttgggatctt

SEQ ID NO: 5243028 - DNA, 25 bp, Homo sapien
tccctgtcccaagcccataaaggaa

SEQ ID NO: 5243029 - DNA, 25 bp, Homo sapien
ctgcccatgaggagatagtgatgca

SEQ ID NO: 5243030 - DNA, 25 bp, Homo sapien
taaaggaagacataaggcttggagg

SEQ ID NO: 5243031 - DNA, 25 bp, Homo sapien
tcacaatttgaacgggctcccagat

SEQ ID NO: 5243032 - DNA, 25 bp, Homo sapien
catgcatttggcgtgattgcagcac

SEQ ID NO: 5243033 - DNA, 25 bp, Homo sapien
tgttcaagaaaccaacaggtaggca

SEQ ID NO: 5243034 - DNA, 25 bp, Homo sapien
aagtaacagcatagactgccaggca

SEQ ID NO: 5243035 - DNA, 25 bp, Homo sapien
tgcattgatgttcctgaaaagacca

SEQ ID NO: 5243036 - DNA, 25 bp, Homo sapien
gcattgatgttcctgaaaagaccat

SEQ ID NO: 5243037 - DNA, 25 bp, Homo sapien
cagccagctggtttcctttgttgca

SEQ ID NO: 5243038 - DNA, 25 bp, Homo sapien
acacagccagctggtttcctttgtt

SEQ ID NO: 5243039 - DNA, 25 bp, Homo sapien
tatagaggtgaaccagtcctggctg

SEQ ID NO: 5243040 - DNA, 25 bp, Homo sapien
gaattgctgattaaggctatagagg

SEQ ID NO: 5243041 - DNA, 25 bp, Homo sapien
gcagcagaaaagtatgcttctgaga

SEQ ID NO: 5243042 - DNA, 25 bp, Homo sapien
tgatattgcacgttgtaatcccctg

SEQ ID NO: 5243043 - DNA, 25 bp, Homo sapien
tctctaaaatgagttgcttaatatt

SEQ ID NO: 5243044 - DNA, 25 bp, Homo sapien
ctctaaaatgagttgcttaatattt

SEQ ID NO: 5243045 - DNA, 25 bp, Homo sapien
tctaaaatgagttgcttaatatttg

SEQ ID NO: 5243046 - DNA, 25 bp, Homo sapien
ctgagttgaagataaacacctcctt

SEQ ID NO: 5243047 - DNA, 25 bp, Homo sapien
tttcttcccagttgagccaaagcaa

SEQ ID NO: 5243048 - DNA, 25 bp, Homo sapien
tcccagttgagccaaagcaaactga

SEQ ID NO: 5243049 - DNA, 25 bp, Homo sapien
gttgagccaaagcaaactgacagca

SEQ ID NO: 5243050 - DNA, 25 bp, Homo sapien
ggaagaaatttgcaattatcctgcc

SEQ ID NO: 5243051 - DNA, 25 bp, Homo sapien
ttatgcatcaaggaagaaatttgca

SEQ ID NO: 5243052 - DNA, 25 bp, Homo sapien
aggaagaaatttgcaattatcctgc

SEQ ID NO: 5243053 - DNA, 25 bp, Homo sapien
tgcatcaaggaagaaatttgcaatt

SEQ ID NO: 5243054 - DNA, 25 bp, Homo sapien
cattatcagcaagagagccaactgg

SEQ ID NO: 5243055 - DNA, 25 bp, Homo sapien
caggactagccaagaagacttgagt

SEQ ID NO: 5243056 - DNA, 25 bp, Homo sapien
gtttgtctgtttcagagacataggg

SEQ ID NO: 5243057 - DNA, 25 bp, Homo sapien
gtgagaataccttggacagcgaaca

SEQ ID NO: 5243058 - DNA, 25 bp, Homo sapien
tgagcttgtaagtggatcctccctg

SEQ ID NO: 5243059 - DNA, 25 bp, Homo sapien
tcccagtggaaagaccttagtggcc

SEQ ID NO: 5243060 - DNA, 25 bp, Homo sapien
tgtctatgaaagaccgtgagccacg

SEQ ID NO: 5243061 - DNA, 25 bp, Homo sapien
cataacggtgattcctaagcaaagc

SEQ ID NO: 5243062 - DNA, 25 bp, Homo sapien
gtgctcacatggttccgggatattg

SEQ ID NO: 5243063 - DNA, 25 bp, Homo sapien
tacgctggggtggacttgttcattc

SEQ ID NO: 5243064 - DNA, 25 bp, Homo sapien
catcttatttttacgctggggtgga

SEQ ID NO: 5243065 - DNA, 25 bp, Homo sapien
tcaaaaggagtaaccttcaacactg

SEQ ID NO: 5243066 - DNA, 25 bp, Homo sapien
aacctggaggtatcttcttctttgg

SEQ ID NO: 5243067 - DNA, 25 bp, Homo sapien
gaacctggaggtatcttcttctttg

SEQ ID NO: 5243068 - DNA, 25 bp, Homo sapien
gctaaaccatagtcagagctctggg

SEQ ID NO: 5243069 - DNA, 25 bp, Homo sapien
ggtgctaaaccatagtcagagctct

SEQ ID NO: 5243070 - DNA, 25 bp, Homo sapien
cccgtggaaggtgctaaaccatagt

SEQ ID NO: 5243071 - DNA, 25 bp, Homo sapien
gaaggtgctaaaccatagtcagagc

SEQ ID NO: 5243072 - DNA, 25 bp, Homo sapien
ggtgccaagagtaatgtagcattgt

SEQ ID NO: 5243073 - DNA, 25 bp, Homo sapien
ccaagagtaatgtagcattgtgtat

SEQ ID NO: 5243074 - DNA, 25 bp, Homo sapien
ctggtgccaagagtaatgtagcatt

SEQ ID NO: 5243075 - DNA, 25 bp, Homo sapien
tgccaagagtaatgtagcattgtgt

SEQ ID NO: 5243076 - DNA, 25 bp, Homo sapien
cataaccagggtgaggtgctccagc

SEQ ID NO: 5243077 - DNA, 25 bp, Homo sapien
gtagaatcagcatccactctagctg

SEQ ID NO: 5243078 - DNA, 25 bp, Homo sapien
tccactggccgaatctgaaactttg

SEQ ID NO: 5243079 - DNA, 25 bp, Homo sapien
tccagtgtgccaggtctgctctaag

SEQ ID NO: 5243080 - DNA, 25 bp, Homo sapien
tgtaagacaacagagttagcagttc

SEQ ID NO: 5243081 - DNA, 25 bp, Homo sapien
tcctgtaagacaacagagttagcag

SEQ ID NO: 5243082 - DNA, 25 bp, Homo sapien
tcacactccttgctattccatgcat

SEQ ID NO: 5243083 - DNA, 25 bp, Homo sapien
taagacaacagagttagcagttctt

SEQ ID NO: 5243084 - DNA, 25 bp, Homo sapien
gagacggtgccagtgtattccagcc

SEQ ID NO: 5243085 - DNA, 25 bp, Homo sapien
ctgagacggtgccagtgtattccag

SEQ ID NO: 5243086 - DNA, 25 bp, Homo sapien
agctgagacggtgccagtgtattcc

SEQ ID NO: 5243087 - DNA, 25 bp, Homo sapien
tgagctgagacggtgccagtgtatt

SEQ ID NO: 5243088 - DNA, 25 bp, Homo sapien
cagaagctatcaaacggtaggtttg

SEQ ID NO: 5243089 - DNA, 25 bp, Homo sapien
tacttttttgtgtactcttcctcca

SEQ ID NO: 5243090 - DNA, 25 bp, Homo sapien
tttgccacgaaaaatataggacagc

SEQ ID NO: 5243091 - DNA, 25 bp, Homo sapien
tgatggtgggtctggactgctgctg

SEQ ID NO: 5243092 - DNA, 25 bp, Homo sapien
ttccctcatcagcaaggcgtggtcc

SEQ ID NO: 5243093 - DNA, 25 bp, Homo sapien
catcctggataaaaagcaatctgct

SEQ ID NO: 5243094 - DNA, 25 bp, Homo sapien
tttacaatgctcagttcagcctggc

SEQ ID NO: 5243095 - DNA, 25 bp, Homo sapien
ggcgtggtccctagctattgaaaaa

SEQ ID NO: 5243096 - DNA, 25 bp, Homo sapien
ttctgatccaccctagcagcaggag

SEQ ID NO: 5243097 - DNA, 25 bp, Homo sapien
tcatactgagactgggttctgatcc

SEQ ID NO: 5243098 - DNA, 25 bp, Homo sapien
cagcaggagtgtggcggaactgagg

SEQ ID NO: 5243099 - DNA, 25 bp, Homo sapien
aaaggaagatatcccttgaccagca

SEQ ID NO: 5243100 - DNA, 25 bp, Homo sapien
gggcacacaagaggactaggttctg

SEQ ID NO: 5243101 - DNA, 25 bp, Homo sapien
ctgcagtctgattgccttagagaaa

SEQ ID NO: 5243102 - DNA, 25 bp, Homo sapien
tcctgtagcagggacaatcctgagt

SEQ ID NO: 5243103 - DNA, 25 bp, Homo sapien
tttctaggcttgattaatttcttcc

SEQ ID NO: 5243104 - DNA, 25 bp, Homo sapien
attccactgctcagttgattgctaa

SEQ ID NO: 5243105 - DNA, 25 bp, Homo sapien
gctcagttgattgctaatcctgata

SEQ ID NO: 5243106 - DNA, 25 bp, Homo sapien
tccactgctcagttgattgctaatc

SEQ ID NO: 5243107 - DNA, 25 bp, Homo sapien
actgctcagttgattgctaatcctg

SEQ ID NO: 5243108 - DNA, 25 bp, Homo sapien
caagtaattttatgcaccagggctg

SEQ ID NO: 5243109 - DNA, 25 bp, Homo sapien
tagacaagactagagtaatcccact

SEQ ID NO: 5243110 - DNA, 25 bp, Homo sapien
tacagcttgtttgaaacgccatagc

SEQ ID NO: 5243111 - DNA, 25 bp, Homo sapien
gactgtgcctctcagtattcactga

SEQ ID NO: 5243112 - DNA, 25 bp, Homo sapien
tggtagccaacgagtgttaagttca

SEQ ID NO: 5243113 - DNA, 25 bp, Homo sapien
cttcacttggtgatataaagtggga

SEQ ID NO: 5243114 - DNA, 25 bp, Homo sapien
gtgttaagttcacttcacttggtga

SEQ ID NO: 5243115 - DNA, 25 bp, Homo sapien
ctgacagtcagttggtagccaacga

SEQ ID NO: 5243116 - DNA, 25 bp, Homo sapien
gatacgtggagaccaagaagagaac

SEQ ID NO: 5243117 - DNA, 25 bp, Homo sapien
ggccctcagtgtacctggcttgaaa

SEQ ID NO: 5243118 - DNA, 25 bp, Homo sapien
cactgggctgagaatgatacgtgga

SEQ ID NO: 5243119 - DNA, 25 bp, Homo sapien
ggcttgaaatacacttgagaaccac

SEQ ID NO: 5243120 - DNA, 25 bp, Homo sapien
cactgaagcgcctctctaaggatct

SEQ ID NO: 5243121 - DNA, 25 bp, Homo sapien
cagcttttgcagtaaccgctgaatg

SEQ ID NO: 5243122 - DNA, 25 bp, Homo sapien
taaccgctgaatgaaaccactgaag

SEQ ID NO: 5243123 - DNA, 25 bp, Homo sapien
tgaatgaaaccactgaagcgcctct

SEQ ID NO: 5243124 - DNA, 25 bp, Homo sapien
gaaagtcagacattccacaaacagg

SEQ ID NO: 5243125 - DNA, 25 bp, Homo sapien
acatctccaagctattataacccag

SEQ ID NO: 5243126 - DNA, 25 bp, Homo sapien
tatctcaaaagtcttgtagcctgct

SEQ ID NO: 5243127 - DNA, 25 bp, Homo sapien
ccccagtggagataagcaaaacagc

SEQ ID NO: 5243128 - DNA, 25 bp, Homo sapien
tcacaaacaatgttgtggagtgagc

SEQ ID NO: 5243129 - DNA, 25 bp, Homo sapien
ttttcacaaacaatgttgtggagtg

SEQ ID NO: 5243130 - DNA, 25 bp, Homo sapien
aaacaatgttgtggagtgagcattc

SEQ ID NO: 5243131 - DNA, 25 bp, Homo sapien
gattttcacaaacaatgttgtggag

SEQ ID NO: 5243132 - DNA, 25 bp, Homo sapien
gacaccatggccagtaacagctctc

SEQ ID NO: 5243133 - DNA, 25 bp, Homo sapien
acaccatggccagtaacagctctct

SEQ ID NO: 5243134 - DNA, 25 bp, Homo sapien
aaaagttgagtcactggcagtaatc

SEQ ID NO: 5243135 - DNA, 25 bp, Homo sapien
tctaagaggttcatgaatttgctac

SEQ ID NO: 5243136 - DNA, 25 bp, Homo sapien
tggaacatagaatgtcctgtccaag

SEQ ID NO: 5243137 - DNA, 25 bp, Homo sapien
ggcagtaatctcatcatgtcctaaa

SEQ ID NO: 5243138 - DNA, 25 bp, Homo sapien
agaaaataccgccagcacacaactc

SEQ ID NO: 5243139 - DNA, 25 bp, Homo sapien
tgtccaagctgacaactgattcttt

SEQ ID NO: 5243140 - DNA, 25 bp, Homo sapien
tgaaccgaggacttcttgtgtactt

SEQ ID NO: 5243141 - DNA, 25 bp, Homo sapien
aggtgagttccttgaagccctgaac

SEQ ID NO: 5243142 - DNA, 25 bp, Homo sapien
ccataaatgcaacaccaagtctaga

SEQ ID NO: 5243143 - DNA, 25 bp, Homo sapien
agtcttgagaagctcctcgtgtgac

SEQ ID NO: 5243144 - DNA, 25 bp, Homo sapien
caagtctagatctgattttgccctc

SEQ ID NO: 5243145 - DNA, 25 bp, Homo sapien
tctgtgcttcgctcctccataaatg

SEQ ID NO: 5243146 - DNA, 25 bp, Homo sapien
tgtttttggccacggaccaagcctc

SEQ ID NO: 5243147 - DNA, 25 bp, Homo sapien
ttcaccattgtttttggccacggac

SEQ ID NO: 5243148 - DNA, 25 bp, Homo sapien
tccgggtaacatgagacgcctccat

SEQ ID NO: 5243149 - DNA, 25 bp, Homo sapien
caaggcctccgggtaacatgagacg

SEQ ID NO: 5243150 - DNA, 25 bp, Homo sapien
ctgctgaagccacagttattttgca

SEQ ID NO: 5243151 - DNA, 25 bp, Homo sapien
cactgggttggagttacattggtaa

SEQ ID NO: 5243152 - DNA, 25 bp, Homo sapien
attgggcacccaattctgctgaagc

SEQ ID NO: 5243153 - DNA, 25 bp, Homo sapien
gcaagtcagcgaggacttctccagc

SEQ ID NO: 5243154 - DNA, 25 bp, Homo sapien
ctggaagagtcatgtttgatacttt

SEQ ID NO: 5243155 - DNA, 25 bp, Homo sapien
gctgattattgccaatgcgatgttg

SEQ ID NO: 5243156 - DNA, 25 bp, Homo sapien
tgatactttcagctgattattgcca

SEQ ID NO: 5243157 - DNA, 25 bp, Homo sapien
gagtcatgtttgatactttcagctg

SEQ ID NO: 5243158 - DNA, 25 bp, Homo sapien
ccaagtaaattataccctctatctg

SEQ ID NO: 5243159 - DNA, 25 bp, Homo sapien
gtaaattataccctctatctgaaga

SEQ ID NO: 5243160 - DNA, 25 bp, Homo sapien
ctctatctgaagattcaccataggg

SEQ ID NO: 5243161 - DNA, 25 bp, Homo sapien
gattcaccatagggttcacactgac

SEQ ID NO: 5243162 - DNA, 25 bp, Homo sapien
tgagccgtctagagtctggagcgcc

SEQ ID NO: 5243163 - DNA, 25 bp, Homo sapien
cagtcattccagacagcgtaattag

SEQ ID NO: 5243164 - DNA, 25 bp, Homo sapien
catgccaaattgtatcatgtatgta

SEQ ID NO: 5243165 - DNA, 25 bp, Homo sapien
gaagctgaagctgagccgtctagag

SEQ ID NO: 5243166 - DNA, 25 bp, Homo sapien
gttatagagtgttcagtaactccgg

SEQ ID NO: 5243167 - DNA, 25 bp, Homo sapien
gagaagccctgcatgaggagcgtta

SEQ ID NO: 5243168 - DNA, 25 bp, Homo sapien
catgaggagcgttatagagtgttca

SEQ ID NO: 5243169 - DNA, 25 bp, Homo sapien
gtaactccggtaaactgcacttcat

SEQ ID NO: 5243170 - DNA, 25 bp, Homo sapien
taatgaaattggagagacatcgcca

SEQ ID NO: 5243171 - DNA, 25 bp, Homo sapien
gtggtgcttggattgtcacttcccc

SEQ ID NO: 5243172 - DNA, 25 bp, Homo sapien
gcaagcacattgtcatacatcctga

SEQ ID NO: 5243173 - DNA, 25 bp, Homo sapien
tctctcaacaaggaacaccaaatgg

SEQ ID NO: 5243174 - DNA, 25 bp, Homo sapien
tcactttttagagggatggtcctgc

SEQ ID NO: 5243175 - DNA, 25 bp, Homo sapien
gatatgggatagagaccgagtctct

SEQ ID NO: 5243176 - DNA, 25 bp, Homo sapien
tgcaaatcacctttccacttagata

SEQ ID NO: 5243177 - DNA, 25 bp, Homo sapien
tacatggtatcactttttagaggga

SEQ ID NO: 5243178 - DNA, 25 bp, Homo sapien
ttttactgcatatgatgtcactcat

SEQ ID NO: 5243179 - DNA, 25 bp, Homo sapien
attttactgcatatgatgtcactca

SEQ ID NO: 5243180 - DNA, 25 bp, Homo sapien
ttgtcctgtctattttactgcatat

SEQ ID NO: 5243181 - DNA, 25 bp, Homo sapien
tctgtgccattactatacctttaag

SEQ ID NO: 5243182 - DNA, 25 bp, Homo sapien
tgtcaacattcttgcacgatagaga

SEQ ID NO: 5243183 - DNA, 25 bp, Homo sapien
ccatatggttagtcaattgtgtcat

SEQ ID NO: 5243184 - DNA, 25 bp, Homo sapien
ggagtgaggcaggtatcagattcat

SEQ ID NO: 5243185 - DNA, 25 bp, Homo sapien
cttctttcactcttgctactcattt

SEQ ID NO: 5243186 - DNA, 25 bp, Homo sapien
attttcccttcacatgagctcttcc

SEQ ID NO: 5243187 - DNA, 25 bp, Homo sapien
tcttgctactcattttcccttcaca

SEQ ID NO: 5243188 - DNA, 25 bp, Homo sapien
actcttgctactcattttcccttca

SEQ ID NO: 5243189 - DNA, 25 bp, Homo sapien
ctggctcttgccaatccttgcaggg

SEQ ID NO: 5243190 - DNA, 25 bp, Homo sapien
gggcttgatagctgtcctctcaccc

SEQ ID NO: 5243191 - DNA, 25 bp, Homo sapien
ttgatagctgtcctctcacccttca

SEQ ID NO: 5243192 - DNA, 25 bp, Homo sapien
tccactggtgcttaaactgaggtgc

SEQ ID NO: 5243193 - DNA, 25 bp, Homo sapien
cacaatgggcaatcttttgaattcc

SEQ ID NO: 5243194 - DNA, 25 bp, Homo sapien
tgggcaatcttttgaattccattcc

SEQ ID NO: 5243195 - DNA, 25 bp, Homo sapien
caatcttttgaattccattccaaag

SEQ ID NO: 5243196 - DNA, 25 bp, Homo sapien
gcacacaatgggcaatcttttgaat

SEQ ID NO: 5243197 - DNA, 25 bp, Homo sapien
ggcacgctagcagagcaccagctag

SEQ ID NO: 5243198 - DNA, 25 bp, Homo sapien
ccagctagcggcgactggtgacctg

SEQ ID NO: 5243199 - DNA, 25 bp, Homo sapien
gatggcactcagctactgccacggg

SEQ ID NO: 5243200 - DNA, 25 bp, Homo sapien
gtgtgagctctccttgccccctgag

SEQ ID NO: 5243201 - DNA, 25 bp, Homo sapien
ccatcaagatgtgaatttccttagc

SEQ ID NO: 5243202 - DNA, 25 bp, Homo sapien
catcaagatgtgaatttccttagcc

SEQ ID NO: 5243203 - DNA, 25 bp, Homo sapien
gaccatcaagatgtgaatttcctta

SEQ ID NO: 5243204 - DNA, 25 bp, Homo sapien
ttagaccatcaagatgtgaatttcc

SEQ ID NO: 5243205 - DNA, 25 bp, Homo sapien
gggttcgagcctcattacagatatg

SEQ ID NO: 5243206 - DNA, 25 bp, Homo sapien
gcaattgcctttatcttgtgcttga

SEQ ID NO: 5243207 - DNA, 25 bp, Homo sapien
ttcgtgtttggggttcgagcctcat

SEQ ID NO: 5243208 - DNA, 25 bp, Homo sapien
gaacacttctataaagcagcaccag

SEQ ID NO: 5243209 - DNA, 25 bp, Homo sapien
tcttacatgctcaagttttcctaat

SEQ ID NO: 5243210 - DNA, 25 bp, Homo sapien
tctctgttcattcttacatgctcaa

SEQ ID NO: 5243211 - DNA, 25 bp, Homo sapien
agctccttttatgtgtctgatattt

SEQ ID NO: 5243212 - DNA, 25 bp, Homo sapien
gaaaattctggtgccttctaaccaa

SEQ ID NO: 5243213 - DNA, 25 bp, Homo sapien
tggcagttccactagaccttgtgag

SEQ ID NO: 5243214 - DNA, 25 bp, Homo sapien
gctgtgatcagagccttgtgattgg

SEQ ID NO: 5243215 - DNA, 25 bp, Homo sapien
gtgaggtagggaagttccgcacata

SEQ ID NO: 5243216 - DNA, 25 bp, Homo sapien
gttccgcacataaagatggtgttcc

SEQ ID NO: 5243217 - DNA, 25 bp, Homo sapien
tctctgtgctcttgcctgtgggctt

SEQ ID NO: 5243218 - DNA, 25 bp, Homo sapien
ctcttgcctgtgggcttcctttcag

SEQ ID NO: 5243219 - DNA, 25 bp, Homo sapien
ttgcctgtgggcttcctttcagttt

SEQ ID NO: 5243220 - DNA, 25 bp, Homo sapien
tgtgctcttgcctgtgggcttcctt

SEQ ID NO: 5243221 - DNA, 25 bp, Homo sapien
gcatggctctgaagatctggtccag

SEQ ID NO: 5243222 - DNA, 25 bp, Homo sapien
tgatccatccacacctctcaccagc

SEQ ID NO: 5243223 - DNA, 25 bp, Homo sapien
gtcctcttgtgacctgcatggctct

SEQ ID NO: 5243224 - DNA, 25 bp, Homo sapien
catccacacctctcaccagctcaca

SEQ ID NO: 5243225 - DNA, 25 bp, Homo sapien
ctgcagagaggaggactcttgtgac

SEQ ID NO: 5243226 - DNA, 25 bp, Homo sapien
tgcatcctgtggctttgacagcacc

SEQ ID NO: 5243227 - DNA, 25 bp, Homo sapien
tcctgcatcctgtggctttgacagc

SEQ ID NO: 5243228 - DNA, 25 bp, Homo sapien
taattctcctgcatcctgtggcttt

SEQ ID NO: 5243229 - DNA, 25 bp, Homo sapien
agtaattctcctgcatcctgtggct

SEQ ID NO: 5243230 - DNA, 25 bp, Homo sapien
cctgttggcttagtgttacccagag

SEQ ID NO: 5243231 - DNA, 25 bp, Homo sapien
ccacacggtatcctggtctaagcag

SEQ ID NO: 5243232 - DNA, 25 bp, Homo sapien
tagttggcggtaggttaatgtccac

SEQ ID NO: 5243233 - DNA, 25 bp, Homo sapien
taatgtccacatagtcagggcctat

SEQ ID NO: 5243234 - DNA, 25 bp, Homo sapien
tccattccactaaaaggagctcaga

SEQ ID NO: 5243235 - DNA, 25 bp, Homo sapien
ctaaaaggagctcagacttgtccat

SEQ ID NO: 5243236 - DNA, 25 bp, Homo sapien
cttctttccattccactaaaaggag

SEQ ID NO: 5243237 - DNA, 25 bp, Homo sapien
cactaaaaggagctcagacttgtcc

SEQ ID NO: 5243238 - DNA, 25 bp, Homo sapien
ctcttgactcccttctcagcagcct

SEQ ID NO: 5243239 - DNA, 25 bp, Homo sapien
tcttgactcccttctcagcagcctt

SEQ ID NO: 5243240 - DNA, 25 bp, Homo sapien
ttgactcccttctcagcagccttca

SEQ ID NO: 5243241 - DNA, 25 bp, Homo sapien
tgactcccttctcagcagccttcac

SEQ ID NO: 5243242 - DNA, 25 bp, Homo sapien
agtcaacattgaccacacgggccat

SEQ ID NO: 5243243 - DNA, 25 bp, Homo sapien
aaagtcaacattgaccacacgggcc

SEQ ID NO: 5243244 - DNA, 25 bp, Homo sapien
ttacaacgtaaacgttgacattaga

SEQ ID NO: 5243245 - DNA, 25 bp, Homo sapien
caacgtaaacgttgacattagaatt

SEQ ID NO: 5243246 - DNA, 25 bp, Homo sapien
tgaggcaatgactcaggctggtggg

SEQ ID NO: 5243247 - DNA, 25 bp, Homo sapien
gaggcaatgactcaggctggtggga

SEQ ID NO: 5243248 - DNA, 25 bp, Homo sapien
cggtatccgcggtttggctttccat

SEQ ID NO: 5243249 - DNA, 25 bp, Homo sapien
gttttggtagaagaattcacttctc

SEQ ID NO: 5243250 - DNA, 25 bp, Homo sapien
ctctctattcccttcagagtatagg

SEQ ID NO: 5243251 - DNA, 25 bp, Homo sapien
acctctctattcccttcagagtata

SEQ ID NO: 5243252 - DNA, 25 bp, Homo sapien
tttggtagaagaattcacttctcaa

SEQ ID NO: 5243253 - DNA, 25 bp, Homo sapien
tgcctgggtttaccatgtggccatc

SEQ ID NO: 5243254 - DNA, 25 bp, Homo sapien
tgggtttaccatgtggccatcccta

SEQ ID NO: 5243255 - DNA, 25 bp, Homo sapien
cttcttgggagaccgatgggcccct

SEQ ID NO: 5243256 - DNA, 25 bp, Homo sapien
cctgtgatgagcatcacctacttct

SEQ ID NO: 5243257 - DNA, 25 bp, Homo sapien
accacaaagaccctgagttctagga

SEQ ID NO: 5243258 - DNA, 25 bp, Homo sapien
gacccacggcaaatatgcaaactaa

SEQ ID NO: 5243259 - DNA, 25 bp, Homo sapien
cagggtgacccacggcaaatatgca

SEQ ID NO: 5243260 - DNA, 25 bp, Homo sapien
tagctttgtgtatcccagggtgacc

SEQ ID NO: 5243261 - DNA, 25 bp, Homo sapien
ccacactgataatcacgtgtgcttc

SEQ ID NO: 5243262 - DNA, 25 bp, Homo sapien
tccacaacaaagtccaatgtaaatg

SEQ ID NO: 5243263 - DNA, 25 bp, Homo sapien
tgggttaaccaaacaatccacaaca

SEQ ID NO: 5243264 - DNA, 25 bp, Homo sapien
caagttaagaccacactgataatca

SEQ ID NO: 5243265 - DNA, 25 bp, Homo sapien
tattcactggacagagttactctga

SEQ ID NO: 5243266 - DNA, 25 bp, Homo sapien
taggcctgctagatattcactggac

SEQ ID NO: 5243267 - DNA, 25 bp, Homo sapien
tgctagatattcactggacagagtt

SEQ ID NO: 5243268 - DNA, 25 bp, Homo sapien
gctcagctaggcctgctagatattc

SEQ ID NO: 5243269 - DNA, 25 bp, Homo sapien
tcaataactgggtgccaaaacagtt

SEQ ID NO: 5243270 - DNA, 25 bp, Homo sapien
gattgaaacagtctttcatcgacga

SEQ ID NO: 5243271 - DNA, 25 bp, Homo sapien
tgtcccactgtgaaggattccattc

SEQ ID NO: 5243272 - DNA, 25 bp, Homo sapien
gatgtcatacccagatactgtctgc

SEQ ID NO: 5243273 - DNA, 25 bp, Homo sapien
tgtttttccaattgggccaatctgc

SEQ ID NO: 5243274 - DNA, 25 bp, Homo sapien
tttccaattgggccaatctgccaga

SEQ ID NO: 5243275 - DNA, 25 bp, Homo sapien
ttaagggtgccaaatgtagccagga

SEQ ID NO: 5243276 - DNA, 25 bp, Homo sapien
gtttttccaattgggccaatctgcc

SEQ ID NO: 5243277 - DNA, 25 bp, Homo sapien
aatgccactctctctgtgaagtatt

SEQ ID NO: 5243278 - DNA, 25 bp, Homo sapien
aaatgtttccccatgtcactccatc

SEQ ID NO: 5243279 - DNA, 25 bp, Homo sapien
ggagccttccataacccaatcaatg

SEQ ID NO: 5243280 - DNA, 25 bp, Homo sapien
caatcaatggtgtagcaattggctc

SEQ ID NO: 5243281 - DNA, 25 bp, Homo sapien
tctgaacttgccaattgtttgggaa

SEQ ID NO: 5243282 - DNA, 25 bp, Homo sapien
ggtagacaagcacgcaatgtgtagt

SEQ ID NO: 5243283 - DNA, 25 bp, Homo sapien
aatgtgtagtctggttgtttcctgc

SEQ ID NO: 5243284 - DNA, 25 bp, Homo sapien
caaggttgagggatgccgtttctcc

SEQ ID NO: 5243285 - DNA, 25 bp, Homo sapien
catgtgttttattgaagagagtcgc

SEQ ID NO: 5243286 - DNA, 25 bp, Homo sapien
ttgctagattcctattgggacaaag

SEQ ID NO: 5243287 - DNA, 25 bp, Homo sapien
tagattcctattgggacaaagggag

SEQ ID NO: 5243288 - DNA, 25 bp, Homo sapien
gctagattcctattgggacaaaggg

SEQ ID NO: 5243289 - DNA, 25 bp, Homo sapien
ctagattcctattgggacaaaggga

SEQ ID NO: 5243290 - DNA, 25 bp, Homo sapien
tagtatagtgctgctgaagggagca

SEQ ID NO: 5243291 - DNA, 25 bp, Homo sapien
gtatagtgctgctgaagggagcact

SEQ ID NO: 5243292 - DNA, 25 bp, Homo sapien
agtatagtgctgctgaagggagcac

SEQ ID NO: 5243293 - DNA, 25 bp, Homo sapien
ggactggagctggtcatgactttca

SEQ ID NO: 5243294 - DNA, 25 bp, Homo sapien
tcaggctggaaataggttagggact

SEQ ID NO: 5243295 - DNA, 25 bp, Homo sapien
ggtttgtgtttgtggtccttcttca

SEQ ID NO: 5243296 - DNA, 25 bp, Homo sapien
caagcatttagatgaagattgtggg

SEQ ID NO: 5243297 - DNA, 25 bp, Homo sapien
cagggtttgaacacagatatgacat

SEQ ID NO: 5243298 - DNA, 25 bp, Homo sapien
tccaacagtgtttgcaaagggtctt

SEQ ID NO: 5243299 - DNA, 25 bp, Homo sapien
cagaataaaccacttgcaggatcca

SEQ ID NO: 5243300 - DNA, 25 bp, Homo sapien
gagactttggcctttactctgaggg

SEQ ID NO: 5243301 - DNA, 25 bp, Homo sapien
gaaggccttacaaaggaggtgagca

SEQ ID NO: 5243302 - DNA, 25 bp, Homo sapien
tattataaaccatgcactacaggga

SEQ ID NO: 5243303 - DNA, 25 bp, Homo sapien
gagtcatcatggaaaacagtggtaa

SEQ ID NO: 5243304 - DNA, 25 bp, Homo sapien
caagctagagtttttgagaggacag

SEQ ID NO: 5243305 - DNA, 25 bp, Homo sapien
aggtgagcaaaacaaggtggctttc

SEQ ID NO: 5243306 - DNA, 25 bp, Homo sapien
atttctgaaatcagtgttcttcatt

SEQ ID NO: 5243307 - DNA, 25 bp, Homo sapien
tttctgaaatcagtgttcttcattc

SEQ ID NO: 5243308 - DNA, 25 bp, Homo sapien
atgaggtgagcaaaacaaggtggct

SEQ ID NO: 5243309 - DNA, 25 bp, Homo sapien
ggctttgtatcatcttatcggggaa

SEQ ID NO: 5243310 - DNA, 25 bp, Homo sapien
tggaagtggagcatcttccctgaag

SEQ ID NO: 5243311 - DNA, 25 bp, Homo sapien
tggccaccagtattggatggaagtg

SEQ ID NO: 5243312 - DNA, 25 bp, Homo sapien
tatcggggaaaagtgacctcatggc

SEQ ID NO: 5243313 - DNA, 25 bp, Homo sapien
cagagggtttatcaatctgattgaa

SEQ ID NO: 5243314 - DNA, 25 bp, Homo sapien
aaaacaatgacagcatggtataaat

SEQ ID NO: 5243315 - DNA, 25 bp, Homo sapien
tttgctagaaatccaataaactctc

SEQ ID NO: 5243316 - DNA, 25 bp, Homo sapien
cgaagaataataagggtttgtgcca

SEQ ID NO: 5243317 - DNA, 25 bp, Homo sapien
ttaatgtttgaacatgatcacagtc

SEQ ID NO: 5243318 - DNA, 25 bp, Homo sapien
aatgtttgaacatgatcacagtcac

SEQ ID NO: 5243319 - DNA, 25 bp, Homo sapien
taatgtttgaacatgatcacagtca

SEQ ID NO: 5243320 - DNA, 25 bp, Homo sapien
tagctcctctttgggatctaaccag

SEQ ID NO: 5243321 - DNA, 25 bp, Homo sapien
ctaaaggtctggtgagggagaatct

SEQ ID NO: 5243322 - DNA, 25 bp, Homo sapien
caacagacgatatcttggaaggtcc

SEQ ID NO: 5243323 - DNA, 25 bp, Homo sapien
taggaaacatttggccggctcctca

SEQ ID NO: 5243324 - DNA, 25 bp, Homo sapien
gggacctgcagttgaccaagtggca

SEQ ID NO: 5243325 - DNA, 25 bp, Homo sapien
ttcagaggtggatgtctaccatctt

SEQ ID NO: 5243326 - DNA, 25 bp, Homo sapien
gaggtggatgtctaccatcttccat

SEQ ID NO: 5243327 - DNA, 25 bp, Homo sapien
cggagcagcacacccccataagggg

SEQ ID NO: 5243328 - DNA, 25 bp, Homo sapien
atgtctttgattgctggacatgaaa

SEQ ID NO: 5243329 - DNA, 25 bp, Homo sapien
ggtctgtattgctaccaaaacattt

SEQ ID NO: 5243330 - DNA, 25 bp, Homo sapien
ggtacttagaattgtagtgtcttca

SEQ ID NO: 5243331 - DNA, 25 bp, Homo sapien
gtaaatattagtggtccttaatgtc

SEQ ID NO: 5243332 - DNA, 25 bp, Homo sapien
gacttgccatttgtgacgtatacac

SEQ ID NO: 5243333 - DNA, 25 bp, Homo sapien
tgcttatgctgttaacgagtatgcc

SEQ ID NO: 5243334 - DNA, 25 bp, Homo sapien
cgagtatgccataggataggacaaa

SEQ ID NO: 5243335 - DNA, 25 bp, Homo sapien
tacacctcttggctacagggtgggc

SEQ ID NO: 5243336 - DNA, 25 bp, Homo sapien
tatgtagcctgttgtgtgtctccca

SEQ ID NO: 5243337 - DNA, 25 bp, Homo sapien
tgaggaaatatgaccttgccaagac

SEQ ID NO: 5243338 - DNA, 25 bp, Homo sapien
cagcttcatagtgagtagaacaccg

SEQ ID NO: 5243339 - DNA, 25 bp, Homo sapien
tagaacaccgaggataaacactggg

SEQ ID NO: 5243340 - DNA, 25 bp, Homo sapien
tccactgacaacgagagccatgaca

SEQ ID NO: 5243341 - DNA, 25 bp, Homo sapien
gaatggccctagaaccagctagaag

SEQ ID NO: 5243342 - DNA, 25 bp, Homo sapien
tgaatacaatataccacaaagtcgg

SEQ ID NO: 5243343 - DNA, 25 bp, Homo sapien
gacactgtgaattaagaccttggcg

SEQ ID NO: 5243344 - DNA, 25 bp, Homo sapien
tcagttcccattgaggagagttggc

SEQ ID NO: 5243345 - DNA, 25 bp, Homo sapien
aactggaagttgctggtactcaaac

SEQ ID NO: 5243346 - DNA, 25 bp, Homo sapien
gggtttcctttgagcaacgtcagct

SEQ ID NO: 5243347 - DNA, 25 bp, Homo sapien
catactctggcgacacgaagggttt

SEQ ID NO: 5243348 - DNA, 25 bp, Homo sapien
cagtctatccataggtcagtggtca

SEQ ID NO: 5243349 - DNA, 25 bp, Homo sapien
agctgggaacttcctttaataagcg

SEQ ID NO: 5243350 - DNA, 25 bp, Homo sapien
tgctagaaccaaggctttaagctgg

SEQ ID NO: 5243351 - DNA, 25 bp, Homo sapien
tgaccatagttaatagcgctggacc

SEQ ID NO: 5243352 - DNA, 25 bp, Homo sapien
tctgtgctccccctgatattagaaa

SEQ ID NO: 5243353 - DNA, 25 bp, Homo sapien
gaaaatgtgctgcttcgggatcttt

SEQ ID NO: 5243354 - DNA, 25 bp, Homo sapien
gtgctccccctgatattagaaaatg

SEQ ID NO: 5243355 - DNA, 25 bp, Homo sapien
ttgagtcattatgcctctgtgctcc

SEQ ID NO: 5243356 - DNA, 25 bp, Homo sapien
cagtttgttgtgtctaccactgtct

SEQ ID NO: 5243357 - DNA, 25 bp, Homo sapien
cacacccagtttgttgtgtctacca

SEQ ID NO: 5243358 - DNA, 25 bp, Homo sapien
tagtcacacccagtttgttgtgtct

SEQ ID NO: 5243359 - DNA, 25 bp, Homo sapien
cacccagtttgttgtgtctaccact

SEQ ID NO: 5243360 - DNA, 25 bp, Homo sapien
tggctaatggttcagggcatttgcc

SEQ ID NO: 5243361 - DNA, 25 bp, Homo sapien
ggctaatggttcagggcatttgcca

SEQ ID NO: 5243362 - DNA, 25 bp, Homo sapien
gcaagtgttggttttcatggaagca

SEQ ID NO: 5243363 - DNA, 25 bp, Homo sapien
aagtgttggttttcatggaagcagc

SEQ ID NO: 5243364 - DNA, 25 bp, Homo sapien
aatgcacatatgtgaatctgctgct

SEQ ID NO: 5243365 - DNA, 25 bp, Homo sapien
cctgcaagtgttggttttcatggaa

SEQ ID NO: 5243366 - DNA, 25 bp, Homo sapien
attcttggagtgtgttctgctgaag

SEQ ID NO: 5243367 - DNA, 25 bp, Homo sapien
ggcaaggctgatggccttagttgtc

SEQ ID NO: 5243368 - DNA, 25 bp, Homo sapien
gctgatggccttagttgtcttcagt

SEQ ID NO: 5243369 - DNA, 25 bp, Homo sapien
aggctgatggccttagttgtcttca

SEQ ID NO: 5243370 - DNA, 25 bp, Homo sapien
caaggctgatggccttagttgtctt

SEQ ID NO: 5243371 - DNA, 25 bp, Homo sapien
agacactccgggcagtcttgcagca

SEQ ID NO: 5243372 - DNA, 25 bp, Homo sapien
catgtgtactgcactgccagtgacc

SEQ ID NO: 5243373 - DNA, 25 bp, Homo sapien
gacagcctcgaaatggctctgtggt

SEQ ID NO: 5243374 - DNA, 25 bp, Homo sapien
aagcctcccatgaaacgcgtcggaa

SEQ ID NO: 5243375 - DNA, 25 bp, Homo sapien
ctttgtccccagtttctcataggcc

SEQ ID NO: 5243376 - DNA, 25 bp, Homo sapien
tgtccccagtttctcataggccacc

SEQ ID NO: 5243377 - DNA, 25 bp, Homo sapien
tccccagtttctcataggccaccat

SEQ ID NO: 5243378 - DNA, 25 bp, Homo sapien
tttgtccccagtttctcataggcca

SEQ ID NO: 5243379 - DNA, 25 bp, Homo sapien
tccggtctcgagatccgcgagcagg

SEQ ID NO: 5243380 - DNA, 25 bp, Homo sapien
gcaggagggagtcccgcacgtggct

SEQ ID NO: 5243381 - DNA, 25 bp, Homo sapien
cgttccttcgtcttccggtctcgag

SEQ ID NO: 5243382 - DNA, 25 bp, Homo sapien
tacgaggccacgttccttcgtcttc

SEQ ID NO: 5243383 - DNA, 25 bp, Homo sapien
caaggattccgtacctccaaggttg

SEQ ID NO: 5243384 - DNA, 25 bp, Homo sapien
cctttacctggcatcaaatttatct

SEQ ID NO: 5243385 - DNA, 25 bp, Homo sapien
gcagggcaaaaagagcctctcagac

SEQ ID NO: 5243386 - DNA, 25 bp, Homo sapien
ctcagactcggtcatagcagccctg

SEQ ID NO: 5243387 - DNA, 25 bp, Homo sapien
tgaagagaattgatgaccaactaga

SEQ ID NO: 5243388 - DNA, 25 bp, Homo sapien
gaagagaattgatgaccaactagaa

SEQ ID NO: 5243389 - DNA, 25 bp, Homo sapien
aagagaattgatgaccaactagaat

SEQ ID NO: 5243390 - DNA, 25 bp, Homo sapien
ctgaagagaattgatgaccaactag

SEQ ID NO: 5243391 - DNA, 25 bp, Homo sapien
agagcactggggtcgagatgggcag

SEQ ID NO: 5243392 - DNA, 25 bp, Homo sapien
atttgcaggcctacccgggcagtgc

SEQ ID NO: 5243393 - DNA, 25 bp, Homo sapien
ttgcaggcctacccgggcagtgccc

SEQ ID NO: 5243394 - DNA, 25 bp, Homo sapien
gcatttgcaggcctacccgggcagt

SEQ ID NO: 5243395 - DNA, 25 bp, Homo sapien
tggcccggtggctttccacagctca

SEQ ID NO: 5243396 - DNA, 25 bp, Homo sapien
tctggcccggtggctttccacagct

SEQ ID NO: 5243397 - DNA, 25 bp, Homo sapien
ttgtctggcccggtggctttccaca

SEQ ID NO: 5243398 - DNA, 25 bp, Homo sapien
tgtctggcccggtggctttccacag

SEQ ID NO: 5243399 - DNA, 25 bp, Homo sapien
tctgtcgtccagtagcaccagtggc

SEQ ID NO: 5243400 - DNA, 25 bp, Homo sapien
tgatgaacatcaggcgctgtggcca

SEQ ID NO: 5243401 - DNA, 25 bp, Homo sapien
gctgtggccactcggaaaacttctt

SEQ ID NO: 5243402 - DNA, 25 bp, Homo sapien
tctcctcggatgagtatggctccag

SEQ ID NO: 5243403 - DNA, 25 bp, Homo sapien
ggctcggcccggaatgtagagaccc

SEQ ID NO: 5243404 - DNA, 25 bp, Homo sapien
tgtagagacccgggcgggagcctcc

SEQ ID NO: 5243405 - DNA, 25 bp, Homo sapien
gcgggctcggcccggaatgtagaga

SEQ ID NO: 5243406 - DNA, 25 bp, Homo sapien
ctcggcccggaatgtagagacccgg

SEQ ID NO: 5243407 - DNA, 25 bp, Homo sapien
gactgataccgcaaggtgaccctga

SEQ ID NO: 5243408 - DNA, 25 bp, Homo sapien
gcttcaagtagacccaggctgctga

SEQ ID NO: 5243409 - DNA, 25 bp, Homo sapien
cagcaactaattccacagcgccgga

SEQ ID NO: 5243410 - DNA, 25 bp, Homo sapien
ttcggaatatgataagggacctctc

SEQ ID NO: 5243411 - DNA, 25 bp, Homo sapien
aatcagcaggcctccccgggaaact

SEQ ID NO: 5243412 - DNA, 25 bp, Homo sapien
gggaaactcgctccgcccctcagcc

SEQ ID NO: 5243413 - DNA, 25 bp, Homo sapien
tctgcagtgcaaggcttgaaaaaca

SEQ ID NO: 5243414 - DNA, 25 bp, Homo sapien
ccgcattgggccgaggcgcgctccc

SEQ ID NO: 5243415 - DNA, 25 bp, Homo sapien
ttcaacatgtgtactcaaattatag

SEQ ID NO: 5243416 - DNA, 25 bp, Homo sapien
gtactcaaattatagattaaccagg

SEQ ID NO: 5243417 - DNA, 25 bp, Homo sapien
gctgcatgacgaccgggaacaggaa

SEQ ID NO: 5243418 - DNA, 25 bp, Homo sapien
gattaaccaggtttagatgaggctg

SEQ ID NO: 5243419 - DNA, 25 bp, Homo sapien
tattaatagccttgctgtagtgggc

SEQ ID NO: 5243420 - DNA, 25 bp, Homo sapien
ccagaatttcggtcactgtgagtgc

SEQ ID NO: 5243421 - DNA, 25 bp, Homo sapien
tgtagtgggcacgtgtgcccacatc

SEQ ID NO: 5243422 - DNA, 25 bp, Homo sapien
tgtgagtgccgcctcgcttccattt

SEQ ID NO: 5243423 - DNA, 25 bp, Homo sapien
gccctttggccttatctggattaca

SEQ ID NO: 5243424 - DNA, 25 bp, Homo sapien
gtgaggtacgtgcaaataaattttc

SEQ ID NO: 5243425 - DNA, 25 bp, Homo sapien
tcttgtctagggtaaaaccaggcac

SEQ ID NO: 5243426 - DNA, 25 bp, Homo sapien
cagcgctaaacatcaaacctgtgaa

SEQ ID NO: 5243427 - DNA, 25 bp, Homo sapien
taaacagcccacaggtgaagatctt

SEQ ID NO: 5243428 - DNA, 25 bp, Homo sapien
tcaattcatattgggagactcatgc

SEQ ID NO: 5243429 - DNA, 25 bp, Homo sapien
gactgggatgaggtaagaaatctcc

SEQ ID NO: 5243430 - DNA, 25 bp, Homo sapien
actcatgcaggtttgggtcattgcc

SEQ ID NO: 5243431 - DNA, 25 bp, Homo sapien
ttgaatgaaggggaattagccctta

SEQ ID NO: 5243432 - DNA, 25 bp, Homo sapien
tgccaaatgccctccagtcaggggc

SEQ ID NO: 5243433 - DNA, 25 bp, Homo sapien
atgtgccaaatgccctccagtcagg

SEQ ID NO: 5243434 - DNA, 25 bp, Homo sapien
caaatgccctccagtcaggggctct

SEQ ID NO: 5243435 - DNA, 25 bp, Homo sapien
gatgtagccttcagtcattctaacg

SEQ ID NO: 5243436 - DNA, 25 bp, Homo sapien
gaccggatgtaagtactctagttga

SEQ ID NO: 5243437 - DNA, 25 bp, Homo sapien
taacgcaggtgccagacacatgagt

SEQ ID NO: 5243438 - DNA, 25 bp, Homo sapien
ccaagtcacatggagagaccggatg

SEQ ID NO: 5243439 - DNA, 25 bp, Homo sapien
tgtgtgtcccaccaatgacatggta

SEQ ID NO: 5243440 - DNA, 25 bp, Homo sapien
gatgaagatctttaggatgctccac

SEQ ID NO: 5243441 - DNA, 25 bp, Homo sapien
tgtgtttaagcatacagctggccct

SEQ ID NO: 5243442 - DNA, 25 bp, Homo sapien
ggagttgccactcctaatgcctgca

SEQ ID NO: 5243443 - DNA, 25 bp, Homo sapien
caagcaaccacggacagaatgaaag

SEQ ID NO: 5243444 - DNA, 25 bp, Homo sapien
gagtcctctgccattctcagttgac

SEQ ID NO: 5243445 - DNA, 25 bp, Homo sapien
tagagtccccagaaatgttaatagg

SEQ ID NO: 5243446 - DNA, 25 bp, Homo sapien
aaatatccacatgcacgagcaaggt

SEQ ID NO: 5243447 - DNA, 25 bp, Homo sapien
tgcatgactaaagtgctttggtagt

SEQ ID NO: 5243448 - DNA, 25 bp, Homo sapien
catgactaaagtgctttggtagttc

SEQ ID NO: 5243449 - DNA, 25 bp, Homo sapien
ctgcatgactaaagtgctttggtag

SEQ ID NO: 5243450 - DNA, 25 bp, Homo sapien
tgactaaagtgctttggtagttccc

SEQ ID NO: 5243451 - DNA, 25 bp, Homo sapien
gattggtgaaccctatgactgtcaa

SEQ ID NO: 5243452 - DNA, 25 bp, Homo sapien
cactggtgacttatggctactccta

SEQ ID NO: 5243453 - DNA, 25 bp, Homo sapien
cagatgagctgcaggttctaggaca

SEQ ID NO: 5243454 - DNA, 25 bp, Homo sapien
gaaagcactggtcgaatgtccagaa

SEQ ID NO: 5243455 - DNA, 25 bp, Homo sapien
caatgatggcaagtgacagagcgga

SEQ ID NO: 5243456 - DNA, 25 bp, Homo sapien
agtgaatgctgggtggacatccaac

SEQ ID NO: 5243457 - DNA, 25 bp, Homo sapien
cactgatagactgcctgcaaggaag

SEQ ID NO: 5243458 - DNA, 25 bp, Homo sapien
tagtgtacccctggcaaaagatgga

SEQ ID NO: 5243459 - DNA, 25 bp, Homo sapien
tggtcacataggcaacccagtaggt

SEQ ID NO: 5243460 - DNA, 25 bp, Homo sapien
ccatattttgccacttgctgggtgc

SEQ ID NO: 5243461 - DNA, 25 bp, Homo sapien
gtaggtcaaggtgcccatattttgc

SEQ ID NO: 5243462 - DNA, 25 bp, Homo sapien
cccagtaggtcaaggtgcccatatt

SEQ ID NO: 5243463 - DNA, 25 bp, Homo sapien
gatgaccaatgctctcaaagttacc

SEQ ID NO: 5243464 - DNA, 25 bp, Homo sapien
caaagttaccaacaattagagttca

SEQ ID NO: 5243465 - DNA, 25 bp, Homo sapien
cagatgtgcgcactttaaaagaatg

SEQ ID NO: 5243466 - DNA, 25 bp, Homo sapien
tacttggaaagtgatcagatgtgcg

SEQ ID NO: 5243467 - DNA, 25 bp, Homo sapien
ggcggcttatcgcagagtcccagag

SEQ ID NO: 5243468 - DNA, 25 bp, Homo sapien
ttcaggagctatcgcagacaaccgg

SEQ ID NO: 5243469 - DNA, 25 bp, Homo sapien
ctgggactgcaccacgcaacgtttg

SEQ ID NO: 5243470 - DNA, 25 bp, Homo sapien
gaagggtcagataccgcctgttagg

SEQ ID NO: 5243471 - DNA, 25 bp, Homo sapien
tcatcacgcacgttcccgatccggg

SEQ ID NO: 5243472 - DNA, 25 bp, Homo sapien
gtccccacgtcttcgcgcgcacgtg

SEQ ID NO: 5243473 - DNA, 25 bp, Homo sapien
gcgcacgtgcgtcatcacgcacgtt

SEQ ID NO: 5243474 - DNA, 25 bp, Homo sapien
tctacgacccgcctgcgtccccacg

SEQ ID NO: 5243475 - DNA, 25 bp, Homo sapien
ggagatgcggcaacttcgacaagac

SEQ ID NO: 5243476 - DNA, 25 bp, Homo sapien
ggaaccctttaaactcgctcagcgc

SEQ ID NO: 5243477 - DNA, 25 bp, Homo sapien
taattgaatcataactaggcaggca

SEQ ID NO: 5243478 - DNA, 25 bp, Homo sapien
tgatgctgatcctagcgtcctggga

SEQ ID NO: 5243479 - DNA, 25 bp, Homo sapien
gagttcgggaccagcttggcaaacg

SEQ ID NO: 5243480 - DNA, 25 bp, Homo sapien
ctggaggcagcggttacagtgatcc

SEQ ID NO: 5243481 - DNA, 25 bp, Homo sapien
ttggcaaacgtggtgaaaccgtctc

SEQ ID NO: 5243482 - DNA, 25 bp, Homo sapien
tggaggcagcggttacagtgatcca

SEQ ID NO: 5243483 - DNA, 25 bp, Homo sapien
agctgctttaaatcctgaatatttc

SEQ ID NO: 5243484 - DNA, 25 bp, Homo sapien
gctgctttaaatcctgaatatttct

SEQ ID NO: 5243485 - DNA, 25 bp, Homo sapien
tgctttaaatcctgaatatttcttt

SEQ ID NO: 5243486 - DNA, 25 bp, Homo sapien
aaaaatatgaggtccattgcttacg

SEQ ID NO: 5243487 - DNA, 25 bp, Homo sapien
ggtccattgcttacgtggctatgac

SEQ ID NO: 5243488 - DNA, 25 bp, Homo sapien
catttacatatacatgtacgtatct

SEQ ID NO: 5243489 - DNA, 25 bp, Homo sapien
gcttacgtggctatgactgcaacat

SEQ ID NO: 5243490 - DNA, 25 bp, Homo sapien
tacgttttaggtatagctcatgccc

SEQ ID NO: 5243491 - DNA, 25 bp, Homo sapien
tgaggatttctattccaccacagag

SEQ ID NO: 5243492 - DNA, 25 bp, Homo sapien
ggaatccgaggttccctaggcacgc

SEQ ID NO: 5243493 - DNA, 25 bp, Homo sapien
taatatcgctgccaaggaccaagag

SEQ ID NO: 5243494 - DNA, 25 bp, Homo sapien
catggctgacaaccttggaaattgt

SEQ ID NO: 5243495 - DNA, 25 bp, Homo sapien
gcatgagaagccatccatatggtga

SEQ ID NO: 5243496 - DNA, 25 bp, Homo sapien
catatggtgacatggctgacaacct

SEQ ID NO: 5243497 - DNA, 25 bp, Homo sapien
catccatatggtgacatggctgaca

SEQ ID NO: 5243498 - DNA, 25 bp, Homo sapien
gccatcacgtagatcccaaaggtct

SEQ ID NO: 5243499 - DNA, 25 bp, Homo sapien
cacacattgttagttggccatcacg

SEQ ID NO: 5243500 - DNA, 25 bp, Homo sapien
tgcataagcaagttaacacctggag

SEQ ID NO: 5243501 - DNA, 25 bp, Homo sapien
tatgttaaagcgtgcagtgcatcac

SEQ ID NO: 5243502 - DNA, 25 bp, Homo sapien
catggtcagttcaggtcattttgcc

SEQ ID NO: 5243503 - DNA, 25 bp, Homo sapien
caaagcaaggtttactctgagagag

SEQ ID NO: 5243504 - DNA, 25 bp, Homo sapien
cacagagaggcgaaaactgcttttc

SEQ ID NO: 5243505 - DNA, 25 bp, Homo sapien
gaggccttgacataggtctcaccca

SEQ ID NO: 5243506 - DNA, 25 bp, Homo sapien
gaactacatgagcattggtttcagg

SEQ ID NO: 5243507 - DNA, 25 bp, Homo sapien
ctgttgagggtaaaagatccaaagg

SEQ ID NO: 5243508 - DNA, 25 bp, Homo sapien
ggaagggaactgcagatttaggaaa

SEQ ID NO: 5243509 - DNA, 25 bp, Homo sapien
cacagagtgaaggtataagattcac

SEQ ID NO: 5243510 - DNA, 25 bp, Homo sapien
tgcctcaagaaagccgagttccaca

SEQ ID NO: 5243511 - DNA, 25 bp, Homo sapien
catgtaccagatgcctcaaatggct

SEQ ID NO: 5243512 - DNA, 25 bp, Homo sapien
ttgcgagacccctatgcctgtgagc

SEQ ID NO: 5243513 - DNA, 25 bp, Homo sapien
taggctgtgatctagaggcatgcca

SEQ ID NO: 5243514 - DNA, 25 bp, Homo sapien
taataaggaccacctcatagagttg

SEQ ID NO: 5243515 - DNA, 25 bp, Homo sapien
gcctgaaacataagtaccatataag

SEQ ID NO: 5243516 - DNA, 25 bp, Homo sapien
tcaagctattcatcccaggaatcaa

SEQ ID NO: 5243517 - DNA, 25 bp, Homo sapien
tcaacatcatctgatcaacttcaag

SEQ ID NO: 5243518 - DNA, 25 bp, Homo sapien
taaaccaacagtggccacataatgt

SEQ ID NO: 5243519 - DNA, 25 bp, Homo sapien
gaagttccatggcttactagcccgc

SEQ ID NO: 5243520 - DNA, 25 bp, Homo sapien
cacaacacagcctgaggtggtgatc

SEQ ID NO: 5243521 - DNA, 25 bp, Homo sapien
aatcctgggttgaaacacagtcctt

SEQ ID NO: 5243522 - DNA, 25 bp, Homo sapien
cagctcagcaatgggaaaacgtact

SEQ ID NO: 5243523 - DNA, 25 bp, Homo sapien
tatctggggagatatacagacggct

SEQ ID NO: 5243524 - DNA, 25 bp, Homo sapien
caggtggtcagtttcaggtatctgg

SEQ ID NO: 5243525 - DNA, 25 bp, Homo sapien
ggccagatatcagggaaacagctca

SEQ ID NO: 5243526 - DNA, 25 bp, Homo sapien
cagaaaatgcggtgataacataggc

SEQ ID NO: 5243527 - DNA, 25 bp, Homo sapien
gcaagagcaggtataccactccagt

SEQ ID NO: 5243528 - DNA, 25 bp, Homo sapien
ctaaggcaggagctatacagtggct

SEQ ID NO: 5243529 - DNA, 25 bp, Homo sapien
taacacttctccacactaaggcagg

SEQ ID NO: 5243530 - DNA, 25 bp, Homo sapien
agaggcatcgcaggacagttctcca

SEQ ID NO: 5243531 - DNA, 25 bp, Homo sapien
cagctaatctgtagactgggctcaa

SEQ ID NO: 5243532 - DNA, 25 bp, Homo sapien
gacaacgttaaaggcagtcactcct

SEQ ID NO: 5243533 - DNA, 25 bp, Homo sapien
caacagtcagcaggtggtcagaaaa

SEQ ID NO: 5243534 - DNA, 25 bp, Homo sapien
taaatgaatagccacaagttcgacc

SEQ ID NO: 5243535 - DNA, 25 bp, Homo sapien
aatctgttcggtacaggaaagccca

SEQ ID NO: 5243536 - DNA, 25 bp, Homo sapien
ttgttaagaactttcaaagcaaaca

SEQ ID NO: 5243537 - DNA, 25 bp, Homo sapien
cagggcaataatggttgttaagaac

SEQ ID NO: 5243538 - DNA, 25 bp, Homo sapien
ctcagatcagtatagcaggttctcc

SEQ ID NO: 5243539 - DNA, 25 bp, Homo sapien
gaaactgtacttcctggagctctag

SEQ ID NO: 5243540 - DNA, 25 bp, Homo sapien
tctagggttttgtggaggtgcctcc

SEQ ID NO: 5243541 - DNA, 25 bp, Homo sapien
taaaagcattagatcggccgggtgc

SEQ ID NO: 5243542 - DNA, 25 bp, Homo sapien
catttatgggccagctgccagtggc

SEQ ID NO: 5243543 - DNA, 25 bp, Homo sapien
tacaattgtaaatgagtggtactca

SEQ ID NO: 5243544 - DNA, 25 bp, Homo sapien
taggctttcttcgtggaactgtcaa

SEQ ID NO: 5243545 - DNA, 25 bp, Homo sapien
tggctgcccgtgatgggaaattagc

SEQ ID NO: 5243546 - DNA, 25 bp, Homo sapien
caccacgtgaatgagggagattgct

SEQ ID NO: 5243547 - DNA, 25 bp, Homo sapien
tcctgggccagtgtttagcgtagtc

SEQ ID NO: 5243548 - DNA, 25 bp, Homo sapien
ccaagtcacatcaagcaagtcaggg

SEQ ID NO: 5243549 - DNA, 25 bp, Homo sapien
agaattaccggtgcctccacaaaga

SEQ ID NO: 5243550 - DNA, 25 bp, Homo sapien
cctctgaagtaagtacacacagaca

SEQ ID NO: 5243551 - DNA, 25 bp, Homo sapien
tgaagcagagcaacctctgaagtaa

SEQ ID NO: 5243552 - DNA, 25 bp, Homo sapien
aaggaaaatggaaagccggatgtga

SEQ ID NO: 5243553 - DNA, 25 bp, Homo sapien
aatggaaagccggatgtgaagcaga

SEQ ID NO: 5243554 - DNA, 25 bp, Homo sapien
aatctcgctagaaggtaaaaccagg

SEQ ID NO: 5243555 - DNA, 25 bp, Homo sapien
gctcagacgagaacacacagaggtt

SEQ ID NO: 5243556 - DNA, 25 bp, Homo sapien
tcctctagtatagtcgctgagtggc

SEQ ID NO: 5243557 - DNA, 25 bp, Homo sapien
gtaatagcccattacacaggtgagg

SEQ ID NO: 5243558 - DNA, 25 bp, Homo sapien
tcctcctaggtaatggcactgtcca

SEQ ID NO: 5243559 - DNA, 25 bp, Homo sapien
gatgctgtctactatctgcctccaa

SEQ ID NO: 5243560 - DNA, 25 bp, Homo sapien
gtggaacatgggtgcagtttctccc

SEQ ID NO: 5243561 - DNA, 25 bp, Homo sapien
gagaacaccagagtagcctcacatt

SEQ ID NO: 5243562 - DNA, 25 bp, Homo sapien
ggtgctattgtcaagtaaacttagg

SEQ ID NO: 5243563 - DNA, 25 bp, Homo sapien
atccgatttccatcctgcaatgttt

SEQ ID NO: 5243564 - DNA, 25 bp, Homo sapien
cttaggaaactaattggcaaatccg

SEQ ID NO: 5243565 - DNA, 25 bp, Homo sapien
cagaatccttcacatgttcatgtgc

SEQ ID NO: 5243566 - DNA, 25 bp, Homo sapien
agtatgaatttaggggcctgattgc

SEQ ID NO: 5243567 - DNA, 25 bp, Homo sapien
gtctaaatgggttttatgatcaaaa

SEQ ID NO: 5243568 - DNA, 25 bp, Homo sapien
ttcaagagtctaaatgggttttatg

SEQ ID NO: 5243569 - DNA, 25 bp, Homo sapien
tgagaaccactagttcagagtatga

SEQ ID NO: 5243570 - DNA, 25 bp, Homo sapien
tttaatgttacagaacgtggtcagg

SEQ ID NO: 5243571 - DNA, 25 bp, Homo sapien
gcaaagagggatatccacgattacc

SEQ ID NO: 5243572 - DNA, 25 bp, Homo sapien
tacatacctgtatgaggccaaactg

SEQ ID NO: 5243573 - DNA, 25 bp, Homo sapien
gatatagctctaggagttaacacag

SEQ ID NO: 5243574 - DNA, 25 bp, Homo sapien
taaaactctcttacttgatgggtgc

SEQ ID NO: 5243575 - DNA, 25 bp, Homo sapien
agaaacgttttcttggagtcacaga

SEQ ID NO: 5243576 - DNA, 25 bp, Homo sapien
tgagttagaacccacagttgaaaac

SEQ ID NO: 5243577 - DNA, 25 bp, Homo sapien
tcaggaattcagaaggagcacacgg

SEQ ID NO: 5243578 - DNA, 25 bp, Homo sapien
tcttgtttgaatcccacactttgcc

SEQ ID NO: 5243579 - DNA, 25 bp, Homo sapien
ccagttgctcagccgcgttttcagg

SEQ ID NO: 5243580 - DNA, 25 bp, Homo sapien
gctcagccgcgttttcaggtcttct

SEQ ID NO: 5243581 - DNA, 25 bp, Homo sapien
tctacatgctccgttttcccttttc

SEQ ID NO: 5243582 - DNA, 25 bp, Homo sapien
tcctccatttggcacaggcaagtgt

SEQ ID NO: 5243583 - DNA, 25 bp, Homo sapien
ggaaaagacaccgagcaaggctctc

SEQ ID NO: 5243584 - DNA, 25 bp, Homo sapien
aatagtgctctggatgaaagtcata

SEQ ID NO: 5243585 - DNA, 25 bp, Homo sapien
tcatcaatgtggtggataagcctaa

SEQ ID NO: 5243586 - DNA, 25 bp, Homo sapien
agggaaggagaccctttgtgagtgt

SEQ ID NO: 5243587 - DNA, 25 bp, Homo sapien
gaaggagaccctttgtgagtgtttg

SEQ ID NO: 5243588 - DNA, 25 bp, Homo sapien
ctaggagggaaggagaccctttgtg

SEQ ID NO: 5243589 - DNA, 25 bp, Homo sapien
aggagggaaggagaccctttgtgag

SEQ ID NO: 5243590 - DNA, 25 bp, Homo sapien
agccagatgcccagcgaaggaagtc

SEQ ID NO: 5243591 - DNA, 25 bp, Homo sapien
tagtccaacaagaatcccagccaga

SEQ ID NO: 5243592 - DNA, 25 bp, Homo sapien
aacaagaatcccagccagatgccca

SEQ ID NO: 5243593 - DNA, 25 bp, Homo sapien
tccaacaagaatcccagccagatgc

SEQ ID NO: 5243594 - DNA, 25 bp, Homo sapien
attttcttcagaggcccttgagtgt

SEQ ID NO: 5243595 - DNA, 25 bp, Homo sapien
gattttcttcagaggcccttgagtg

SEQ ID NO: 5243596 - DNA, 25 bp, Homo sapien
tcttcagaggcccttgagtgtacat

SEQ ID NO: 5243597 - DNA, 25 bp, Homo sapien
tttcttcagaggcccttgagtgtac

SEQ ID NO: 5243598 - DNA, 25 bp, Homo sapien
agctgaaccacagggaaacttgggg

SEQ ID NO: 5243599 - DNA, 25 bp, Homo sapien
gggttgcttctgttcacattaaaat

SEQ ID NO: 5243600 - DNA, 25 bp, Homo sapien
attagggaattcttgagctgaacca

SEQ ID NO: 5243601 - DNA, 25 bp, Homo sapien
gtcatgccaaaggtgttttattctg

SEQ ID NO: 5243602 - DNA, 25 bp, Homo sapien
aagcctcggctttgatgtctctgta

SEQ ID NO: 5243603 - DNA, 25 bp, Homo sapien
ttgcctgccaaagtaccaagcctcg

SEQ ID NO: 5243604 - DNA, 25 bp, Homo sapien
tgtctactcagtcaatttggcacgg

SEQ ID NO: 5243605 - DNA, 25 bp, Homo sapien
cactctggctaaatggagaaccttc

SEQ ID NO: 5243606 - DNA, 25 bp, Homo sapien
cgtcctgggtaaccaacactggagg

SEQ ID NO: 5243607 - DNA, 25 bp, Homo sapien
tattgccgtcctgggtaaccaacac

SEQ ID NO: 5243608 - DNA, 25 bp, Homo sapien
taaagtagtattgccgtcctgggta

SEQ ID NO: 5243609 - DNA, 25 bp, Homo sapien
gaactattaaagtagtattgccgtc

SEQ ID NO: 5243610 - DNA, 25 bp, Homo sapien
gacttttccagctaaggacagccat

SEQ ID NO: 5243611 - DNA, 25 bp, Homo sapien
gatttcatggcaaaggagatcaaga

SEQ ID NO: 5243612 - DNA, 25 bp, Homo sapien
ggccttaagtagctctgcctttgaa

SEQ ID NO: 5243613 - DNA, 25 bp, Homo sapien
aaaagttccctagatgaccattagc

SEQ ID NO: 5243614 - DNA, 25 bp, Homo sapien
gagaatggtggaaacaatagctaat

SEQ ID NO: 5243615 - DNA, 25 bp, Homo sapien
tcagtgaagtcctggcttgagtcaa

SEQ ID NO: 5243616 - DNA, 25 bp, Homo sapien
gacatatggagtggattctttcagc

SEQ ID NO: 5243617 - DNA, 25 bp, Homo sapien
gctattcaatacttggagagttttc

SEQ ID NO: 5243618 - DNA, 25 bp, Homo sapien
ttcttcatagtgatctggcctgcca

SEQ ID NO: 5243619 - DNA, 25 bp, Homo sapien
cggataataatcctgatatccagag

SEQ ID NO: 5243620 - DNA, 25 bp, Homo sapien
tagtgatctggcctgccatgcggat

SEQ ID NO: 5243621 - DNA, 25 bp, Homo sapien
gcctgccatgcggataataatcctg

SEQ ID NO: 5243622 - DNA, 25 bp, Homo sapien
actcagtcctgctgtgtacgtgtca

SEQ ID NO: 5243623 - DNA, 25 bp, Homo sapien
gaggctggcttgtaatgctctctcg

SEQ ID NO: 5243624 - DNA, 25 bp, Homo sapien
taatgctctctcgagctgttcttct

SEQ ID NO: 5243625 - DNA, 25 bp, Homo sapien
tcctgctgtgtacgtgtcatagttc

SEQ ID NO: 5243626 - DNA, 25 bp, Homo sapien
ataactgaagggcgcaagactccta

SEQ ID NO: 5243627 - DNA, 25 bp, Homo sapien
taactgaagggcgcaagactcctac

SEQ ID NO: 5243628 - DNA, 25 bp, Homo sapien
tttaaaataactgaagggcgcaaga

SEQ ID NO: 5243629 - DNA, 25 bp, Homo sapien
aaaataactgaagggcgcaagactc

SEQ ID NO: 5243630 - DNA, 25 bp, Homo sapien
tgtaatcacaatctgcacacagttt

SEQ ID NO: 5243631 - DNA, 25 bp, Homo sapien
tctttgtaatcacaatctgcacaca

SEQ ID NO: 5243632 - DNA, 25 bp, Homo sapien
caccttattagcttaggttgctggg

SEQ ID NO: 5243633 - DNA, 25 bp, Homo sapien
ggaatatggcatcacaccccattct

SEQ ID NO: 5243634 - DNA, 25 bp, Homo sapien
aaatttctggccatatggtacatac

SEQ ID NO: 5243635 - DNA, 25 bp, Homo sapien
gactcttgaagtgccttatacagta

SEQ ID NO: 5243636 - DNA, 25 bp, Homo sapien
gacatttgtcaaaggccgttttcat

SEQ ID NO: 5243637 - DNA, 25 bp, Homo sapien
gatttaacccttgcacacattgttg

SEQ ID NO: 5243638 - DNA, 25 bp, Homo sapien
tatcaacaaagtgaaccaactacag

SEQ ID NO: 5243639 - DNA, 25 bp, Homo sapien
caagctgtcaacacaggccaatggc

SEQ ID NO: 5243640 - DNA, 25 bp, Homo sapien
tgcacagccattgcatatggaagtc

SEQ ID NO: 5243641 - DNA, 25 bp, Homo sapien
gcctgtcaacaatggccacttggat

SEQ ID NO: 5243642 - DNA, 25 bp, Homo sapien
tgtcgctaccaccagcaagactata

SEQ ID NO: 5243643 - DNA, 25 bp, Homo sapien
gaatagctcacgatggtcagcacgt

SEQ ID NO: 5243644 - DNA, 25 bp, Homo sapien
taaatgaatgcaagctatgaccacc

SEQ ID NO: 5243645 - DNA, 25 bp, Homo sapien
cacgtgccttactgcttcctgaaga

SEQ ID NO: 5243646 - DNA, 25 bp, Homo sapien
catggcaggtattcgatcaacagtc

SEQ ID NO: 5243647 - DNA, 25 bp, Homo sapien
ttctcttgatcatagtaggtactcc

SEQ ID NO: 5243648 - DNA, 25 bp, Homo sapien
caagggattattaaatcatgggttc

SEQ ID NO: 5243649 - DNA, 25 bp, Homo sapien
cactaaagtctatttgtatcatggg

SEQ ID NO: 5243650 - DNA, 25 bp, Homo sapien
caaagcaacttgtttgctagcggct

SEQ ID NO: 5243651 - DNA, 25 bp, Homo sapien
gcagaccagtgctcagtgcgaggta

SEQ ID NO: 5243652 - DNA, 25 bp, Homo sapien
gatactcgaatctctgacagtggaa

SEQ ID NO: 5243653 - DNA, 25 bp, Homo sapien
tagggaggacctcgaactctcaaac

SEQ ID NO: 5243654 - DNA, 25 bp, Homo sapien
caccggaggcattaggaacgacaga

SEQ ID NO: 5243655 - DNA, 25 bp, Homo sapien
tcaacacatgaatatgcttgttgaa

SEQ ID NO: 5243656 - DNA, 25 bp, Homo sapien
gtcaacacatgaatatgcttgttga

SEQ ID NO: 5243657 - DNA, 25 bp, Homo sapien
tgtcaacacatgaatatgcttgttg

SEQ ID NO: 5243658 - DNA, 25 bp, Homo sapien
gcaaatttatgaatgggtctccttt

SEQ ID NO: 5243659 - DNA, 25 bp, Homo sapien
tgagcagagtaacataattagcaaa

SEQ ID NO: 5243660 - DNA, 25 bp, Homo sapien
tcacagttctgtcagggctaattac

SEQ ID NO: 5243661 - DNA, 25 bp, Homo sapien
gatatgattaaagactagactgcga

SEQ ID NO: 5243662 - DNA, 25 bp, Homo sapien
tctcccagctagcaacaatagtagg

SEQ ID NO: 5243663 - DNA, 25 bp, Homo sapien
gcagaagtatatcctaggaggccat

SEQ ID NO: 5243664 - DNA, 25 bp, Homo sapien
gaaaggatcacatagcacagtgcag

SEQ ID NO: 5243665 - DNA, 25 bp, Homo sapien
gaagtctgtcaaacgggactcacgt

SEQ ID NO: 5243666 - DNA, 25 bp, Homo sapien
gaatggattatgacctgaaagtggc

SEQ ID NO: 5243667 - DNA, 25 bp, Homo sapien
gaaagtggctattgctgcttcatga

SEQ ID NO: 5243668 - DNA, 25 bp, Homo sapien
gcttcatgaacttatcaaaagtcaa

SEQ ID NO: 5243669 - DNA, 25 bp, Homo sapien
tgaatatttgaatgttagtagccac

SEQ ID NO: 5243670 - DNA, 25 bp, Homo sapien
tttgaagttcaatgagctcctttat

SEQ ID NO: 5243671 - DNA, 25 bp, Homo sapien
atgtgcacaatgtgtggtctcgtta

SEQ ID NO: 5243672 - DNA, 25 bp, Homo sapien
caatgtgtggtctcgttacataggt

SEQ ID NO: 5243673 - DNA, 25 bp, Homo sapien
gtgtggtctcgttacataggtatac

SEQ ID NO: 5243674 - DNA, 25 bp, Homo sapien
tagttttaatgagctcccgggtgac

SEQ ID NO: 5243675 - DNA, 25 bp, Homo sapien
tattgtctagatggcccgaaaccca

SEQ ID NO: 5243676 - DNA, 25 bp, Homo sapien
aacagatgggcgctacagaggctgc

SEQ ID NO: 5243677 - DNA, 25 bp, Homo sapien
gaaacccaggagttatttgccagca

SEQ ID NO: 5243678 - DNA, 25 bp, Homo sapien
gtctttgctcaactccactacaggg

SEQ ID NO: 5243679 - DNA, 25 bp, Homo sapien
ctcagaagctccagggccaatgtgt

SEQ ID NO: 5243680 - DNA, 25 bp, Homo sapien
tatccacctcgcaaggcctgagtct

SEQ ID NO: 5243681 - DNA, 25 bp, Homo sapien
gattccttaggtccaaactgcggcc

SEQ ID NO: 5243682 - DNA, 25 bp, Homo sapien
ctgttgtacttttctctcccctcca

SEQ ID NO: 5243683 - DNA, 25 bp, Homo sapien
tgttgtacttttctctcccctccag

SEQ ID NO: 5243684 - DNA, 25 bp, Homo sapien
tgtacttttctctcccctccagttg

SEQ ID NO: 5243685 - DNA, 25 bp, Homo sapien
caaatgttctggcagcactagcctg

SEQ ID NO: 5243686 - DNA, 25 bp, Homo sapien
ctcattgcccatgaagggaactgca

SEQ ID NO: 5243687 - DNA, 25 bp, Homo sapien
tggccttggacccatttgcagaacc

SEQ ID NO: 5243688 - DNA, 25 bp, Homo sapien
gaggttctgacacaactcattgccc

SEQ ID NO: 5243689 - DNA, 25 bp, Homo sapien
tttcttagggatgcaaacttaccaa

SEQ ID NO: 5243690 - DNA, 25 bp, Homo sapien
ccactggagcagagttaccatactg

SEQ ID NO: 5243691 - DNA, 25 bp, Homo sapien
tcccaggcatcatgagtagtaataa

SEQ ID NO: 5243692 - DNA, 25 bp, Homo sapien
tgaaacacacaagcaaccactggag

SEQ ID NO: 5243693 - DNA, 25 bp, Homo sapien
tatcgaatctgtgaagccgctgtct

SEQ ID NO: 5243694 - DNA, 25 bp, Homo sapien
catttcttctggtgagagatgaaac

SEQ ID NO: 5243695 - DNA, 25 bp, Homo sapien
tgagagatgaaacccgtagggtggt

SEQ ID NO: 5243696 - DNA, 25 bp, Homo sapien
ggtggtgggctatttctggtatttc

SEQ ID NO: 5243697 - DNA, 25 bp, Homo sapien
gccaaatgggcaataattacacgaa

SEQ ID NO: 5243698 - DNA, 25 bp, Homo sapien
gactgtcccaggtgatgtgagcgat

SEQ ID NO: 5243699 - DNA, 25 bp, Homo sapien
tgtgagcgatctggagcaataccgg

SEQ ID NO: 5243700 - DNA, 25 bp, Homo sapien
attacacgaataggccatgtcttcc

SEQ ID NO: 5243701 - DNA, 25 bp, Homo sapien
gggagcgtggaaactggtctcttca

SEQ ID NO: 5243702 - DNA, 25 bp, Homo sapien
cactccaggcagaatgagggactaa

SEQ ID NO: 5243703 - DNA, 25 bp, Homo sapien
gagggactaatcttcccgactggtg

SEQ ID NO: 5243704 - DNA, 25 bp, Homo sapien
gaaggtcacagtcttcaaaagcaga

SEQ ID NO: 5243705 - DNA, 25 bp, Homo sapien
aacattcggccaaggcagccacatc

SEQ ID NO: 5243706 - DNA, 25 bp, Homo sapien
gagagtaggacaacattcggccaag

SEQ ID NO: 5243707 - DNA, 25 bp, Homo sapien
gcagagcaataccagagcagagcga

SEQ ID NO: 5243708 - DNA, 25 bp, Homo sapien
cacagtggcaatgcgccaggaggac

SEQ ID NO: 5243709 - DNA, 25 bp, Homo sapien
tattcatggaacacaagcaccagga

SEQ ID NO: 5243710 - DNA, 25 bp, Homo sapien
taatggtgtgtgtaggagtcttccc

SEQ ID NO: 5243711 - DNA, 25 bp, Homo sapien
taggacaagtggctggtacaatggc

SEQ ID NO: 5243712 - DNA, 25 bp, Homo sapien
gaaatgccttaaacgactcagacag

SEQ ID NO: 5243713 - DNA, 25 bp, Homo sapien
aaagataacccctgctaagatttgg

SEQ ID NO: 5243714 - DNA, 25 bp, Homo sapien
tcatttccatgcaggtgtcaaggcc

SEQ ID NO: 5243715 - DNA, 25 bp, Homo sapien
gctcccaaggctccagtggttttct

SEQ ID NO: 5243716 - DNA, 25 bp, Homo sapien
gctcagatattactgggccagccag

SEQ ID NO: 5243717 - DNA, 25 bp, Homo sapien
cgtagaaggcacacctttgtgtagc

SEQ ID NO: 5243718 - DNA, 25 bp, Homo sapien
caagatgtgttatagcagaattacc

SEQ ID NO: 5243719 - DNA, 25 bp, Homo sapien
acaatccatgttcccacgtagaagg

SEQ ID NO: 5243720 - DNA, 25 bp, Homo sapien
tagtgagcccctatcgtgagccttt

SEQ ID NO: 5243721 - DNA, 25 bp, Homo sapien
cttaacagacaatcagggagctact

SEQ ID NO: 5243722 - DNA, 25 bp, Homo sapien
gacctttatcctttggcagcagaga

SEQ ID NO: 5243723 - DNA, 25 bp, Homo sapien
tgagcagtgagactagttaccagcc

SEQ ID NO: 5243724 - DNA, 25 bp, Homo sapien
tttagcttgcttactccccaggcag

SEQ ID NO: 5243725 - DNA, 25 bp, Homo sapien
tgtaccaggtcacagcattcgatgc

SEQ ID NO: 5243726 - DNA, 25 bp, Homo sapien
caagattcggtactactcacaggga

SEQ ID NO: 5243727 - DNA, 25 bp, Homo sapien
cattcgatgcagtgggacatgtctt

SEQ ID NO: 5243728 - DNA, 25 bp, Homo sapien
tcttggtcgtgtgggaatcttgagc

SEQ ID NO: 5243729 - DNA, 25 bp, Homo sapien
catctagtagaatccaaaccctcgt

SEQ ID NO: 5243730 - DNA, 25 bp, Homo sapien
cctgatagagaaataagggtactca

SEQ ID NO: 5243731 - DNA, 25 bp, Homo sapien
gaccgtctactatgtcacagcagca

SEQ ID NO: 5243732 - DNA, 25 bp, Homo sapien
gaacttcattggtatttgggccaac

SEQ ID NO: 5243733 - DNA, 25 bp, Homo sapien
cacagtcgccgtattccagagatgc

SEQ ID NO: 5243734 - DNA, 25 bp, Homo sapien
tggtaaaaccatgacgcaaagagag

SEQ ID NO: 5243735 - DNA, 25 bp, Homo sapien
tgctaatgggactgacgctacatgg

SEQ ID NO: 5243736 - DNA, 25 bp, Homo sapien
tactgaggatgatcgaagaactggc

SEQ ID NO: 5243737 - DNA, 25 bp, Homo sapien
tcctatgaagtgtcaaagaagctca

SEQ ID NO: 5243738 - DNA, 25 bp, Homo sapien
ccttggtatggatacaggatcgccc

SEQ ID NO: 5243739 - DNA, 25 bp, Homo sapien
tctccacagtcagacggaccaggag

SEQ ID NO: 5243740 - DNA, 25 bp, Homo sapien
tatagtctgttatacctggaagggc

SEQ ID NO: 5243741 - DNA, 25 bp, Homo sapien
gtgtggatggcgtccctgggtctcc

SEQ ID NO: 5243742 - DNA, 25 bp, Homo sapien
gcctcccggacgtaaaggtgacaca

SEQ ID NO: 5243743 - DNA, 25 bp, Homo sapien
ggtgacacaggagaagacggctacc

SEQ ID NO: 5243744 - DNA, 25 bp, Homo sapien
cctcccggacgtaaaggtgacacag

SEQ ID NO: 5243745 - DNA, 25 bp, Homo sapien
aattattgattggtttgctgccagc

SEQ ID NO: 5243746 - DNA, 25 bp, Homo sapien
gatcatcctaggcatacttgttggc

SEQ ID NO: 5243747 - DNA, 25 bp, Homo sapien
ggagccacaggctagcagaaaatga

SEQ ID NO: 5243748 - DNA, 25 bp, Homo sapien
agaagttaatccaacaaggccctgc

SEQ ID NO: 5243749 - DNA, 25 bp, Homo sapien
ctggaatgagaggcccctcaggacc

SEQ ID NO: 5243750 - DNA, 25 bp, Homo sapien
caattagaagttggcaaaggtggtc

SEQ ID NO: 5243751 - DNA, 25 bp, Homo sapien
ttccattttgatgtaaacaagttcc

SEQ ID NO: 5243752 - DNA, 25 bp, Homo sapien
aaggtggtctttcaacccctgagct

SEQ ID NO: 5243753 - DNA, 25 bp, Homo sapien
gttcacttaagtcaattgtgttcca

SEQ ID NO: 5243754 - DNA, 25 bp, Homo sapien
cactcacacagctgtgttttaggac

SEQ ID NO: 5243755 - DNA, 25 bp, Homo sapien
cacagctgtgttttaggacattttc

SEQ ID NO: 5243756 - DNA, 25 bp, Homo sapien
cacacagctgtgttttaggacattt

SEQ ID NO: 5243757 - DNA, 25 bp, Homo sapien
tatcactcacacagctgtgttttag

SEQ ID NO: 5243758 - DNA, 25 bp, Homo sapien
atctttttcgggttcagagccctca

SEQ ID NO: 5243759 - DNA, 25 bp, Homo sapien
ttttcgggttcagagccctcacctg

SEQ ID NO: 5243760 - DNA, 25 bp, Homo sapien
tcacctgggatgtgagaatttgtcc

SEQ ID NO: 5243761 - DNA, 25 bp, Homo sapien
tctttttcgggttcagagccctcac

SEQ ID NO: 5243762 - DNA, 25 bp, Homo sapien
ggaacggccatggttcgcaatttaa

SEQ ID NO: 5243763 - DNA, 25 bp, Homo sapien
atgtctaaagcaatcgttgacaggc

SEQ ID NO: 5243764 - DNA, 25 bp, Homo sapien
taatgcccgtagtagcagtaggtag

SEQ ID NO: 5243765 - DNA, 25 bp, Homo sapien
tagtagtaggtagtagtttcatcaa

SEQ ID NO: 5243766 - DNA, 25 bp, Homo sapien
catagcgggctattcctaagaagga

SEQ ID NO: 5243767 - DNA, 25 bp, Homo sapien
tcaagtggcatagcgggctattcct

SEQ ID NO: 5243768 - DNA, 25 bp, Homo sapien
tggcatagcgggctattcctaagaa

SEQ ID NO: 5243769 - DNA, 25 bp, Homo sapien
tagcgggctattcctaagaaggaaa

SEQ ID NO: 5243770 - DNA, 25 bp, Homo sapien
tgacatcttccagcgaggatttggg

SEQ ID NO: 5243771 - DNA, 25 bp, Homo sapien
cagtctctggatagggaaggctccc

SEQ ID NO: 5243772 - DNA, 25 bp, Homo sapien
gagcctgtggtcttcctgagatgaa

SEQ ID NO: 5243773 - DNA, 25 bp, Homo sapien
gtgtgtgccacaacagggagcctgt

SEQ ID NO: 5243774 - DNA, 25 bp, Homo sapien
ggaggaagtgagctgcttcttgtgg

SEQ ID NO: 5243775 - DNA, 25 bp, Homo sapien
ttggtgagcaaggtggacttcaaag

SEQ ID NO: 5243776 - DNA, 25 bp, Homo sapien
agcaaggtggacttcaaaggcccag

SEQ ID NO: 5243777 - DNA, 25 bp, Homo sapien
gtgagcaaggtggacttcaaaggcc

SEQ ID NO: 5243778 - DNA, 25 bp, Homo sapien
ggaagatctcagatcttgttcccaa

SEQ ID NO: 5243779 - DNA, 25 bp, Homo sapien
gatttggaagatctcagatcttgtt

SEQ ID NO: 5243780 - DNA, 25 bp, Homo sapien
ttggaagatctcagatcttgttccc

SEQ ID NO: 5243781 - DNA, 25 bp, Homo sapien
aagatctcagatcttgttcccaaac

SEQ ID NO: 5243782 - DNA, 25 bp, Homo sapien
tatttgttttcaagattgggttgct

SEQ ID NO: 5243783 - DNA, 25 bp, Homo sapien
ctttctgtgactggaagcatccaat

SEQ ID NO: 5243784 - DNA, 25 bp, Homo sapien
tctggtcccccaatcttagacattt

SEQ ID NO: 5243785 - DNA, 25 bp, Homo sapien
tcagtgttctgtttatctggtcccc

SEQ ID NO: 5243786 - DNA, 25 bp, Homo sapien
ccacattccggtggtccatggacca

SEQ ID NO: 5243787 - DNA, 25 bp, Homo sapien
tcatgacccactttgaaaaccttgg

SEQ ID NO: 5243788 - DNA, 25 bp, Homo sapien
catggaccacatagactcatgaccc

SEQ ID NO: 5243789 - DNA, 25 bp, Homo sapien
gctaaagagctcaaaccaacctaaa

SEQ ID NO: 5243790 - DNA, 25 bp, Homo sapien
gcacgtgcaacccagctggctaaat

SEQ ID NO: 5243791 - DNA, 25 bp, Homo sapien
actgtgtcacctaggttggctgcag

SEQ ID NO: 5243792 - DNA, 25 bp, Homo sapien
ggtctgcctggtgtgccctggtttt

SEQ ID NO: 5243793 - DNA, 25 bp, Homo sapien
taggtttcctatgctgactgtttgt

SEQ ID NO: 5243794 - DNA, 25 bp, Homo sapien
ttctacccgggcatcgtgcccagga

SEQ ID NO: 5243795 - DNA, 25 bp, Homo sapien
ccacccaggctttttggttgtggct

SEQ ID NO: 5243796 - DNA, 25 bp, Homo sapien
caacttaccaggcagtgtcccttct

SEQ ID NO: 5243797 - DNA, 25 bp, Homo sapien
ttgtagggctcggtcgcgcggttcg

SEQ ID NO: 5243798 - DNA, 25 bp, Homo sapien
gcctgggggcggtccgggcgctcat

SEQ ID NO: 5243799 - DNA, 25 bp, Homo sapien
gcggcagcaggagcacctgcggcct

SEQ ID NO: 5243800 - DNA, 25 bp, Homo sapien
gggcgccgccgccaggagcaccagc

SEQ ID NO: 5243801 - DNA, 25 bp, Homo sapien
ctgcggcctgggggcggtccgggcg

SEQ ID NO: 5243802 - DNA, 25 bp, Homo sapien
ggataagggctcttgggcctagctt

SEQ ID NO: 5243803 - DNA, 25 bp, Homo sapien
cacatttggctaattcacacctatc

SEQ ID NO: 5243804 - DNA, 25 bp, Homo sapien
ctcttgggcctagcttggcaatctt

SEQ ID NO: 5243805 - DNA, 25 bp, Homo sapien
gctaattcacacctatcccaatgag

SEQ ID NO: 5243806 - DNA, 25 bp, Homo sapien
tagagccatttggatcatacacagc

SEQ ID NO: 5243807 - DNA, 25 bp, Homo sapien
tggatcatacacagctcatccctgc

SEQ ID NO: 5243808 - DNA, 25 bp, Homo sapien
cttgtagagccatttggatcataca

SEQ ID NO: 5243809 - DNA, 25 bp, Homo sapien
gccatttggatcatacacagctcat

SEQ ID NO: 5243810 - DNA, 25 bp, Homo sapien
tttttcaatgacgttttgcaactgg

SEQ ID NO: 5243811 - DNA, 25 bp, Homo sapien
tggatggtataattaccgtttatac

SEQ ID NO: 5243812 - DNA, 25 bp, Homo sapien
catctgtttttcaatgacgttttgc

SEQ ID NO: 5243813 - DNA, 25 bp, Homo sapien
gacgttttgcaactggatggtataa

SEQ ID NO: 5243814 - DNA, 25 bp, Homo sapien
gacacttgcagagattgaggacttg

SEQ ID NO: 5243815 - DNA, 25 bp, Homo sapien
caagtgatctccatacaaccaccat

SEQ ID NO: 5243816 - DNA, 25 bp, Homo sapien
gggcacatgagaccgtcaagtgatc

SEQ ID NO: 5243817 - DNA, 25 bp, Homo sapien
cacactgagcaaagtcccaagggac

SEQ ID NO: 5243818 - DNA, 25 bp, Homo sapien
gtacacctatatagggcattttcca

SEQ ID NO: 5243819 - DNA, 25 bp, Homo sapien
tataaacctgtatattgtaggcaat

SEQ ID NO: 5243820 - DNA, 25 bp, Homo sapien
ggacactatcgtacactcctgtaga

SEQ ID NO: 5243821 - DNA, 25 bp, Homo sapien
tgtaggcaattataacgcaatcgtg

SEQ ID NO: 5243822 - DNA, 25 bp, Homo sapien
tcactccagttagtaaactttggat

SEQ ID NO: 5243823 - DNA, 25 bp, Homo sapien
ttcactccagttagtaaactttgga

SEQ ID NO: 5243824 - DNA, 25 bp, Homo sapien
cactccagttagtaaactttggata

SEQ ID NO: 5243825 - DNA, 25 bp, Homo sapien
gccgcatttggaaggatccagccat

SEQ ID NO: 5243826 - DNA, 25 bp, Homo sapien
cacgggccgcatttggaaggatcca

SEQ ID NO: 5243827 - DNA, 25 bp, Homo sapien
gtcacgggccgcatttggaaggatc

SEQ ID NO: 5243828 - DNA, 25 bp, Homo sapien
ctcttggtatgaggtcacgggccgc

SEQ ID NO: 5243829 - DNA, 25 bp, Homo sapien
aaggcacagataagttctcttagtt

SEQ ID NO: 5243830 - DNA, 25 bp, Homo sapien
taaggcacagataagttctcttagt

SEQ ID NO: 5243831 - DNA, 25 bp, Homo sapien
tttctaaggcacagataagttctct

SEQ ID NO: 5243832 - DNA, 25 bp, Homo sapien
tctaaggcacagataagttctctta

SEQ ID NO: 5243833 - DNA, 25 bp, Homo sapien
gttggtcactctttgctttgtcacc

SEQ ID NO: 5243834 - DNA, 25 bp, Homo sapien
ttggtcactctttgctttgtcacct

SEQ ID NO: 5243835 - DNA, 25 bp, Homo sapien
tgcactgggaaccactaaattagcc

SEQ ID NO: 5243836 - DNA, 25 bp, Homo sapien
tttggcctggtgcaaccctgcactg

SEQ ID NO: 5243837 - DNA, 25 bp, Homo sapien
ggaaccactaaattagccacaccca

SEQ ID NO: 5243838 - DNA, 25 bp, Homo sapien
tgctttggcctggtgcaaccctgca

SEQ ID NO: 5243839 - DNA, 25 bp, Homo sapien
caggccatgtatgtatggacctact

SEQ ID NO: 5243840 - DNA, 25 bp, Homo sapien
gttgagtctactcccagcattgtag

SEQ ID NO: 5243841 - DNA, 25 bp, Homo sapien
tggacctactgaatatatacggacc

SEQ ID NO: 5243842 - DNA, 25 bp, Homo sapien
tcattgtagagaatccaaaaaggtt

SEQ ID NO: 5243843 - DNA, 25 bp, Homo sapien
ccctgcctgtatgatattgcagaga

SEQ ID NO: 5243844 - DNA, 25 bp, Homo sapien
tgtatgatattgcagagaccccagc

SEQ ID NO: 5243845 - DNA, 25 bp, Homo sapien
ggtgatgacagtagctcaagactca

SEQ ID NO: 5243846 - DNA, 25 bp, Homo sapien
cacaggggcacttgaatacttttgg

SEQ ID NO: 5243847 - DNA, 25 bp, Homo sapien
attttatttcttggagtaagagtca

SEQ ID NO: 5243848 - DNA, 25 bp, Homo sapien
ggccttgagacaggcttaattttat

SEQ ID NO: 5243849 - DNA, 25 bp, Homo sapien
tttatttcttggagtaagagtcaca

SEQ ID NO: 5243850 - DNA, 25 bp, Homo sapien
gccttgagacaggcttaattttatt

SEQ ID NO: 5243851 - DNA, 25 bp, Homo sapien
gctcaagtgtgcacggaggaagccg

SEQ ID NO: 5243852 - DNA, 25 bp, Homo sapien
tgcacggaggaagccggccactgtt

SEQ ID NO: 5243853 - DNA, 25 bp, Homo sapien
ttttcaaatgggcaatgatcacctc

SEQ ID NO: 5243854 - DNA, 25 bp, Homo sapien
caacacctggattctgagcctctag

SEQ ID NO: 5243855 - DNA, 25 bp, Homo sapien
cccccagccctcacacctatgcaca

SEQ ID NO: 5243856 - DNA, 25 bp, Homo sapien
ccccagccctcacacctatgcacat

SEQ ID NO: 5243857 - DNA, 25 bp, Homo sapien
ttctcccctttggccccgtcacaga

SEQ ID NO: 5243858 - DNA, 25 bp, Homo sapien
ggcctttgtctttacagacacaacc

SEQ ID NO: 5243859 - DNA, 25 bp, Homo sapien
ccgtcacagaagcactggcctttgt

SEQ ID NO: 5243860 - DNA, 25 bp, Homo sapien
ctggcctttgtctttacagacacaa

SEQ ID NO: 5243861 - DNA, 25 bp, Homo sapien
aacatactgcggatctttctgctac

SEQ ID NO: 5243862 - DNA, 25 bp, Homo sapien
agttttgcctcaaccagtgtgctgc

SEQ ID NO: 5243863 - DNA, 25 bp, Homo sapien
aagaatgtgctagacccctctcgct

SEQ ID NO: 5243864 - DNA, 25 bp, Homo sapien
tctgctaccgatgaaagaagaaggt

SEQ ID NO: 5243865 - DNA, 25 bp, Homo sapien
atttttccatggatttgtatcttgg

SEQ ID NO: 5243866 - DNA, 25 bp, Homo sapien
tttttccatggatttgtatcttgga

SEQ ID NO: 5243867 - DNA, 25 bp, Homo sapien
aatctgttatttgtgtaggagatgc

SEQ ID NO: 5243868 - DNA, 25 bp, Homo sapien
ccaggcaggttatgagtctgagccc

SEQ ID NO: 5243869 - DNA, 25 bp, Homo sapien
ccaaaaaggtgtgagctcagtaatg

SEQ ID NO: 5243870 - DNA, 25 bp, Homo sapien
gaaagtacctagtaaaagtgagtga

SEQ ID NO: 5243871 - DNA, 25 bp, Homo sapien
ccctgcggtccaggcaagccttcag

SEQ ID NO: 5243872 - DNA, 25 bp, Homo sapien
cctgcggtccaggcaagccttcagg

SEQ ID NO: 5243873 - DNA, 25 bp, Homo sapien
ttggaacccgtgagtcctggaagtc

SEQ ID NO: 5243874 - DNA, 25 bp, Homo sapien
ctttggaacccgtgagtcctggaag

SEQ ID NO: 5243875 - DNA, 25 bp, Homo sapien
gaaccagaaaatcctggcaatccac

SEQ ID NO: 5243876 - DNA, 25 bp, Homo sapien
aaaatcctggcaatccacttattcc

SEQ ID NO: 5243877 - DNA, 25 bp, Homo sapien
ggaagtccaggagaaccagaaaatc

SEQ ID NO: 5243878 - DNA, 25 bp, Homo sapien
ccagaaaatcctggcaatccactta

SEQ ID NO: 5243879 - DNA, 25 bp, Homo sapien
actgcatcctggtacaccgacaagt

SEQ ID NO: 5243880 - DNA, 25 bp, Homo sapien
agtccgtaaggcccggtattgcctg

SEQ ID NO: 5243881 - DNA, 25 bp, Homo sapien
tggtacaccgacaagtccgtaaggc

SEQ ID NO: 5243882 - DNA, 25 bp, Homo sapien
catcctggtacaccgacaagtccgt

SEQ ID NO: 5243883 - DNA, 25 bp, Homo sapien
cgggatccctgggtagcccagtgtc

SEQ ID NO: 5243884 - DNA, 25 bp, Homo sapien
ggagtcctggaaacccctgctcacc

SEQ ID NO: 5243885 - DNA, 25 bp, Homo sapien
gggatccctgggtagcccagtgtcc

SEQ ID NO: 5243886 - DNA, 25 bp, Homo sapien
tttgtcctttcaaaccagcagcacc

SEQ ID NO: 5243887 - DNA, 25 bp, Homo sapien
ttttgtcctttcaaaccagcagcac

SEQ ID NO: 5243888 - DNA, 25 bp, Homo sapien
tggcaacccggggtcgccttttgca

SEQ ID NO: 5243889 - DNA, 25 bp, Homo sapien
tatcttcttctttagcaggagcacc

SEQ ID NO: 5243890 - DNA, 25 bp, Homo sapien
gccttttgcatcaagttctatatct

SEQ ID NO: 5243891 - DNA, 25 bp, Homo sapien
tatatcttcttctttagcaggagca

SEQ ID NO: 5243892 - DNA, 25 bp, Homo sapien
ccggaggaccaggtgggccaacagg

SEQ ID NO: 5243893 - DNA, 25 bp, Homo sapien
gaatcccggaggaccaggtgggcca

SEQ ID NO: 5243894 - DNA, 25 bp, Homo sapien
ccaggtgggccaacaggcccaggaa

SEQ ID NO: 5243895 - DNA, 25 bp, Homo sapien
caggtgggccaacaggcccaggaaa

SEQ ID NO: 5243896 - DNA, 25 bp, Homo sapien
taggtcctctaggtcccatggctcc

SEQ ID NO: 5243897 - DNA, 25 bp, Homo sapien
ttaggtcctctaggtcccatggctc

SEQ ID NO: 5243898 - DNA, 25 bp, Homo sapien
cttaggtcctctaggtcccatggct

SEQ ID NO: 5243899 - DNA, 25 bp, Homo sapien
tgagtagggtgtgctagctgttaca

SEQ ID NO: 5243900 - DNA, 25 bp, Homo sapien
ctttgagattgagtagggtgtgcta

SEQ ID NO: 5243901 - DNA, 25 bp, Homo sapien
gctagctgttacatcatatgaactg

SEQ ID NO: 5243902 - DNA, 25 bp, Homo sapien
tttggctttgagattgagtagggtg

SEQ ID NO: 5243903 - DNA, 25 bp, Homo sapien
gctctcctttatgtcctatcactct

SEQ ID NO: 5243904 - DNA, 25 bp, Homo sapien
ccgctctcctttatgtcctatcact

SEQ ID NO: 5243905 - DNA, 25 bp, Homo sapien
ctctcctttatgtcctatcactctt

SEQ ID NO: 5243906 - DNA, 25 bp, Homo sapien
cgctctcctttatgtcctatcactc

SEQ ID NO: 5243907 - DNA, 25 bp, Homo sapien
cgttctgttatctgggccagttagg

SEQ ID NO: 5243908 - DNA, 25 bp, Homo sapien
gttctgttatctgggccagttaggg

SEQ ID NO: 5243909 - DNA, 25 bp, Homo sapien
ggccagttagggtcacaataactgt

SEQ ID NO: 5243910 - DNA, 25 bp, Homo sapien
gttagggtcacaataactgttcctg

SEQ ID NO: 5243911 - DNA, 25 bp, Homo sapien
tcgcccattgctcccttgtctccct

SEQ ID NO: 5243912 - DNA, 25 bp, Homo sapien
aggaggtccaggctcgcccattgct

SEQ ID NO: 5243913 - DNA, 25 bp, Homo sapien
caggctcgcccattgctcccttgtc

SEQ ID NO: 5243914 - DNA, 25 bp, Homo sapien
ggaggtccaggctcgcccattgctc

SEQ ID NO: 5243915 - DNA, 25 bp, Homo sapien
ttttcagatccatatgattctccag

SEQ ID NO: 5243916 - DNA, 25 bp, Homo sapien
gagcacccttttcagatccatatga

SEQ ID NO: 5243917 - DNA, 25 bp, Homo sapien
gatccatatgattctccaggcagtc

SEQ ID NO: 5243918 - DNA, 25 bp, Homo sapien
aggagcacccttttcagatccatat

SEQ ID NO: 5243919 - DNA, 25 bp, Homo sapien
ggaagccaggaacaccatcttttcc

SEQ ID NO: 5243920 - DNA, 25 bp, Homo sapien
tccagggaagccaggaacaccatct

SEQ ID NO: 5243921 - DNA, 25 bp, Homo sapien
tcacttccagggaagccaggaacac

SEQ ID NO: 5243922 - DNA, 25 bp, Homo sapien
aagccaggaacaccatcttttccgg

SEQ ID NO: 5243923 - DNA, 25 bp, Homo sapien
ccatcttcacccattaacccaggga

SEQ ID NO: 5243924 - DNA, 25 bp, Homo sapien
catcttcacccattaacccagggaa

SEQ ID NO: 5243925 - DNA, 25 bp, Homo sapien
gccatcttcacccattaacccaggg

SEQ ID NO: 5243926 - DNA, 25 bp, Homo sapien
aaatcctggagggccaatgtcccct

SEQ ID NO: 5243927 - DNA, 25 bp, Homo sapien
atcctggagggccaatgtccccttt

SEQ ID NO: 5243928 - DNA, 25 bp, Homo sapien
aatcctggagggccaatgtcccctt

SEQ ID NO: 5243929 - DNA, 25 bp, Homo sapien
tgaccattcacgacagccttgcttg

SEQ ID NO: 5243930 - DNA, 25 bp, Homo sapien
tggcgcactgaatgtgagaaccact

SEQ ID NO: 5243931 - DNA, 25 bp, Homo sapien
ggagatgaatggacaccagcactca

SEQ ID NO: 5243932 - DNA, 25 bp, Homo sapien
agcactcagagtccgggtccccttt

SEQ ID NO: 5243933 - DNA, 25 bp, Homo sapien
tacagagaaaggatagctatttatg

SEQ ID NO: 5243934 - DNA, 25 bp, Homo sapien
tggcccaaagatggcttccttattt

SEQ ID NO: 5243935 - DNA, 25 bp, Homo sapien
gacagctcaccaaacatcattactt

SEQ ID NO: 5243936 - DNA, 25 bp, Homo sapien
cattttggcccaaagatggcttcct

SEQ ID NO: 5243937 - DNA, 25 bp, Homo sapien
ccttttcctggtatgtgtcataata

SEQ ID NO: 5243938 - DNA, 25 bp, Homo sapien
tcccttttcctggtatgtgtcataa

SEQ ID NO: 5243939 - DNA, 25 bp, Homo sapien
ctcccttttcctggtatgtgtcata

SEQ ID NO: 5243940 - DNA, 25 bp, Homo sapien
ttttcctggtatgtgtcataatatt

SEQ ID NO: 5243941 - DNA, 25 bp, Homo sapien
ccacgagctcctctgggccctggtg

SEQ ID NO: 5243942 - DNA, 25 bp, Homo sapien
cgagctcctctgggccctggtgggc

SEQ ID NO: 5243943 - DNA, 25 bp, Homo sapien
cttgtgggccacgagctcctctggg

SEQ ID NO: 5243944 - DNA, 25 bp, Homo sapien
ttgtgggccacgagctcctctgggc

SEQ ID NO: 5243945 - DNA, 25 bp, Homo sapien
ctcctctgaggccaggccttgatga

SEQ ID NO: 5243946 - DNA, 25 bp, Homo sapien
cctctgaggccaggccttgatgatc

SEQ ID NO: 5243947 - DNA, 25 bp, Homo sapien
ctggccatccaggggctcctctgag

SEQ ID NO: 5243948 - DNA, 25 bp, Homo sapien
gggctcctctgaggccaggccttga

SEQ ID NO: 5243949 - DNA, 25 bp, Homo sapien
ggcatcctttcctgggcggcctcgt

SEQ ID NO: 5243950 - DNA, 25 bp, Homo sapien
ctggggacccaggagtccccatggc

SEQ ID NO: 5243951 - DNA, 25 bp, Homo sapien
catggcatcctttcctgggcggcct

SEQ ID NO: 5243952 - DNA, 25 bp, Homo sapien
ggacccaggagtccccatggcatcc

SEQ ID NO: 5243953 - DNA, 25 bp, Homo sapien
tcctggaagacctggtgaaccagca

SEQ ID NO: 5243954 - DNA, 25 bp, Homo sapien
ctggaggtcccggtgatcctggaag

SEQ ID NO: 5243955 - DNA, 25 bp, Homo sapien
aggtcccggtgatcctggaagacct

SEQ ID NO: 5243956 - DNA, 25 bp, Homo sapien
tgggattcctggagaccctagatag

SEQ ID NO: 5243957 - DNA, 25 bp, Homo sapien
ggacccttgcgaaaaacgatgtcac

SEQ ID NO: 5243958 - DNA, 25 bp, Homo sapien
caggtggacccttgcgaaaaacgat

SEQ ID NO: 5243959 - DNA, 25 bp, Homo sapien
cctagatagcctggcagtccgtgat

SEQ ID NO: 5243960 - DNA, 25 bp, Homo sapien
gatataagggcactgtgtacacagg

SEQ ID NO: 5243961 - DNA, 25 bp, Homo sapien
ctgggatataagggcactgtgtaca

SEQ ID NO: 5243962 - DNA, 25 bp, Homo sapien
agggcactgtgtacacaggaggcct

SEQ ID NO: 5243963 - DNA, 25 bp, Homo sapien
taagggcactgtgtacacaggaggc

SEQ ID NO: 5243964 - DNA, 25 bp, Homo sapien
tgggattccttttacaccatgtaac

SEQ ID NO: 5243965 - DNA, 25 bp, Homo sapien
tccccagcacggaggatgttgcaat

SEQ ID NO: 5243966 - DNA, 25 bp, Homo sapien
cagttaactgctgttctcttgtagg

SEQ ID NO: 5243967 - DNA, 25 bp, Homo sapien
tgttgcacagtaacaatgggctgca

SEQ ID NO: 5243968 - DNA, 25 bp, Homo sapien
aagagcatttgcatccttaagaaga

SEQ ID NO: 5243969 - DNA, 25 bp, Homo sapien
ctttcaagccagctgcgccttgtct

SEQ ID NO: 5243970 - DNA, 25 bp, Homo sapien
tcctttcaagccagctgcgccttgt

SEQ ID NO: 5243971 - DNA, 25 bp, Homo sapien
tggaagacctgtatttcctggggac

SEQ ID NO: 5243972 - DNA, 25 bp, Homo sapien
ttcaagccagctgcgccttgtcttc

SEQ ID NO: 5243973 - DNA, 25 bp, Homo sapien
ctgggacacccacttgcccctcagg

SEQ ID NO: 5243974 - DNA, 25 bp, Homo sapien
ggctgaagtgtttcacctttttctc

SEQ ID NO: 5243975 - DNA, 25 bp, Homo sapien
acccacttgcccctcaggctgaagt

SEQ ID NO: 5243976 - DNA, 25 bp, Homo sapien
ttaagtcctgggtcaccctgggcac

SEQ ID NO: 5243977 - DNA, 25 bp, Homo sapien
aggttggcctctgagccccgggtca

SEQ ID NO: 5243978 - DNA, 25 bp, Homo sapien
tcccggagttccaggaattccatcc

SEQ ID NO: 5243979 - DNA, 25 bp, Homo sapien
cctttctcccaggttggcctctgag

SEQ ID NO: 5243980 - DNA, 25 bp, Homo sapien
tccaggaattccatccaagcccttt

SEQ ID NO: 5243981 - DNA, 25 bp, Homo sapien
cagttcgcctttaggtcctggtaat

SEQ ID NO: 5243982 - DNA, 25 bp, Homo sapien
gagccaggatcccctggaggacctt

SEQ ID NO: 5243983 - DNA, 25 bp, Homo sapien
ggagccaggatcccctggaggacct

SEQ ID NO: 5243984 - DNA, 25 bp, Homo sapien
gggagccaggatcccctggaggacc

SEQ ID NO: 5243985 - DNA, 25 bp, Homo sapien
tctccttggggtccgtagccaggtg

SEQ ID NO: 5243986 - DNA, 25 bp, Homo sapien
tccgtagccaggtggtccagctggt

SEQ ID NO: 5243987 - DNA, 25 bp, Homo sapien
tccaggaactccttgcgtgccctgg

SEQ ID NO: 5243988 - DNA, 25 bp, Homo sapien
cgtgccctggagaccaggttctcct

SEQ ID NO: 5243989 - DNA, 25 bp, Homo sapien
ggtcataagattggggtatatattg

SEQ ID NO: 5243990 - DNA, 25 bp, Homo sapien
gtcataagattggggtatatattga

SEQ ID NO: 5243991 - DNA, 25 bp, Homo sapien
tcataagattggggtatatattgaa

SEQ ID NO: 5243992 - DNA, 25 bp, Homo sapien
tggtgttgaaacactgagctctccc

SEQ ID NO: 5243993 - DNA, 25 bp, Homo sapien
aactggtgttgaaacactgagctct

SEQ ID NO: 5243994 - DNA, 25 bp, Homo sapien
ctggaactggtgttgaaacactgag

SEQ ID NO: 5243995 - DNA, 25 bp, Homo sapien
tggaactggtgttgaaacactgagc

SEQ ID NO: 5243996 - DNA, 25 bp, Homo sapien
caggtggaccttgggggccaggatg

SEQ ID NO: 5243997 - DNA, 25 bp, Homo sapien
ggccaggatggccagggggccctgg

SEQ ID NO: 5243998 - DNA, 25 bp, Homo sapien
cagggggccctggaggtcctggtgg

SEQ ID NO: 5243999 - DNA, 25 bp, Homo sapien
tggccagggggccctggaggtcctg

SEQ ID NO: 5244000 - DNA, 25 bp, Homo sapien
tggaagaccaggatctccacatttc

SEQ ID NO: 5244001 - DNA, 25 bp, Homo sapien
aggaaatccaattcctggaattcct

SEQ ID NO: 5244002 - DNA, 25 bp, Homo sapien
aagaccaggatctccacatttcccc

SEQ ID NO: 5244003 - DNA, 25 bp, Homo sapien
attcctggttcaccatcaggccctg

SEQ ID NO: 5244004 - DNA, 25 bp, Homo sapien
ttttccaggacaacccagtgatcct

SEQ ID NO: 5244005 - DNA, 25 bp, Homo sapien
atttttccaggacaacccagtgatc

SEQ ID NO: 5244006 - DNA, 25 bp, Homo sapien
tttttccaggacaacccagtgatcc

SEQ ID NO: 5244007 - DNA, 25 bp, Homo sapien
tcttctgtgatagcttgaatttttg

SEQ ID NO: 5244008 - DNA, 25 bp, Homo sapien
tctgtgatagcttgaatttttgcat

SEQ ID NO: 5244009 - DNA, 25 bp, Homo sapien
ctctcttctgtgatagcttgaattt

SEQ ID NO: 5244010 - DNA, 25 bp, Homo sapien
cctctcttctgtgatagcttgaatt

SEQ ID NO: 5244011 - DNA, 25 bp, Homo sapien
caggcatggctactgctggttctcc

SEQ ID NO: 5244012 - DNA, 25 bp, Homo sapien
ccaggcatggctactgctggttctc

SEQ ID NO: 5244013 - DNA, 25 bp, Homo sapien
tccatgttccccagaattgcctctt

SEQ ID NO: 5244014 - DNA, 25 bp, Homo sapien
ctcctggaaaacctggtgttcctgg

SEQ ID NO: 5244015 - DNA, 25 bp, Homo sapien
tcgtggtccatcaagcccttcattt

SEQ ID NO: 5244016 - DNA, 25 bp, Homo sapien
ggaagtccagggagtccaatttctc

SEQ ID NO: 5244017 - DNA, 25 bp, Homo sapien
gaaagcacaagtatatacccaggtg

SEQ ID NO: 5244018 - DNA, 25 bp, Homo sapien
cttcctgggggtccttgttctccag

SEQ ID NO: 5244019 - DNA, 25 bp, Homo sapien
tccaggtggtccaggctgccctgga

SEQ ID NO: 5244020 - DNA, 25 bp, Homo sapien
tccttgttctccaggtggtccaggc

SEQ ID NO: 5244021 - DNA, 25 bp, Homo sapien
ggtggtccaggctgccctggatctc

SEQ ID NO: 5244022 - DNA, 25 bp, Homo sapien
cttgttgccctttcaatccatttaa

SEQ ID NO: 5244023 - DNA, 25 bp, Homo sapien
ctttcaatccatttaagcctggaag

SEQ ID NO: 5244024 - DNA, 25 bp, Homo sapien
gccctttcaatccatttaagcctgg

SEQ ID NO: 5244025 - DNA, 25 bp, Homo sapien
caatccatttaagcctggaagtcct

SEQ ID NO: 5244026 - DNA, 25 bp, Homo sapien
accttgatgacctggaattcctggt

SEQ ID NO: 5244027 - DNA, 25 bp, Homo sapien
aattcccggatttcctggatatcct

SEQ ID NO: 5244028 - DNA, 25 bp, Homo sapien
cctctgccctggtgtgcctgggttc

SEQ ID NO: 5244029 - DNA, 25 bp, Homo sapien
aggaaagcccatcatcccaatcact

SEQ ID NO: 5244030 - DNA, 25 bp, Homo sapien
gagggccaatggctccaggaaagcc

SEQ ID NO: 5244031 - DNA, 25 bp, Homo sapien
atcatcccaatcactccatcttcac

SEQ ID NO: 5244032 - DNA, 25 bp, Homo sapien
tattacgtgggatatctctgaaggc

SEQ ID NO: 5244033 - DNA, 25 bp, Homo sapien
ctttgtcccctattacgtgggatat

SEQ ID NO: 5244034 - DNA, 25 bp, Homo sapien
tacgtgggatatctctgaaggcccg

SEQ ID NO: 5244035 - DNA, 25 bp, Homo sapien
cccctattacgtgggatatctctga

SEQ ID NO: 5244036 - DNA, 25 bp, Homo sapien
gtttgaattttagcctagtagccac

SEQ ID NO: 5244037 - DNA, 25 bp, Homo sapien
catttggtcaagaagactgcaaggg

SEQ ID NO: 5244038 - DNA, 25 bp, Homo sapien
cctgctatgagagtctgatctgcaa

SEQ ID NO: 5244039 - DNA, 25 bp, Homo sapien
tagtagccacatctaacaacagtct

SEQ ID NO: 5244040 - DNA, 25 bp, Homo sapien
aggccctttaaacctggcatccctg

SEQ ID NO: 5244041 - DNA, 25 bp, Homo sapien
ggcatccctggaacgcctctgtttc

SEQ ID NO: 5244042 - DNA, 25 bp, Homo sapien
tggtcctgctggtccgggtagtcct

SEQ ID NO: 5244043 - DNA, 25 bp, Homo sapien
ctgctggtccgggtagtcctttgag

SEQ ID NO: 5244044 - DNA, 25 bp, Homo sapien
catgttccccatgcttcctggtata

SEQ ID NO: 5244045 - DNA, 25 bp, Homo sapien
tggcatgcccatgttccccatgctt

SEQ ID NO: 5244046 - DNA, 25 bp, Homo sapien
cagtgctgcccaaatctcctctggg

SEQ ID NO: 5244047 - DNA, 25 bp, Homo sapien
tataccacgcagtcctggttctcca

SEQ ID NO: 5244048 - DNA, 25 bp, Homo sapien
cctgctcgacctgggaatcccaaag

SEQ ID NO: 5244049 - DNA, 25 bp, Homo sapien
tctcccttatctccctggagaccat

SEQ ID NO: 5244050 - DNA, 25 bp, Homo sapien
ttcctgctcgacctgggaatcccaa

SEQ ID NO: 5244051 - DNA, 25 bp, Homo sapien
gagaccatgaatacctgggaggcct

SEQ ID NO: 5244052 - DNA, 25 bp, Homo sapien
tggtcccggtggtcctggccttgta

SEQ ID NO: 5244053 - DNA, 25 bp, Homo sapien
tttcaaggcactcactccaccacta

SEQ ID NO: 5244054 - DNA, 25 bp, Homo sapien
gtaaatatttcagtggcctatatac

SEQ ID NO: 5244055 - DNA, 25 bp, Homo sapien
ggcactcactccaccactaaaatgt

SEQ ID NO: 5244056 - DNA, 25 bp, Homo sapien
cgaatctgggtacttgttgatattt

SEQ ID NO: 5244057 - DNA, 25 bp, Homo sapien
taactgtctgaaagtatagtaacag

SEQ ID NO: 5244058 - DNA, 25 bp, Homo sapien
ctgtctgaaagtatagtaacagttt

SEQ ID NO: 5244059 - DNA, 25 bp, Homo sapien
tgtctgaaagtatagtaacagtttc

SEQ ID NO: 5244060 - DNA, 25 bp, Homo sapien
aaataactgtctgaaagtatagtaa

SEQ ID NO: 5244061 - DNA, 25 bp, Homo sapien
tgagatgagtacagcagaaatgggc

SEQ ID NO: 5244062 - DNA, 25 bp, Homo sapien
gaaaaaacccactgtcctatctgat

SEQ ID NO: 5244063 - DNA, 25 bp, Homo sapien
tataagtctgagatgagtacagcag

SEQ ID NO: 5244064 - DNA, 25 bp, Homo sapien
tgtatgggcctgtaatcactgcctt

SEQ ID NO: 5244065 - DNA, 25 bp, Homo sapien
gacatgataaaaccagctcattttg

SEQ ID NO: 5244066 - DNA, 25 bp, Homo sapien
tattctggtggttacctgtgaaaac

SEQ ID NO: 5244067 - DNA, 25 bp, Homo sapien
ctatcagttaattgagtgtgaagtc

SEQ ID NO: 5244068 - DNA, 25 bp, Homo sapien
cccgaacatataggtttgataaaga

SEQ ID NO: 5244069 - DNA, 25 bp, Homo sapien
tgtgactgcactggtagcataccca

SEQ ID NO: 5244070 - DNA, 25 bp, Homo sapien
gctgggaataagacggccacatggt

SEQ ID NO: 5244071 - DNA, 25 bp, Homo sapien
tcatggagcttcagagaccagtaag

SEQ ID NO: 5244072 - DNA, 25 bp, Homo sapien
gcatagcgtcagaccaagtgtggag

SEQ ID NO: 5244073 - DNA, 25 bp, Homo sapien
gtccaggtgggccaggttgccccat

SEQ ID NO: 5244074 - DNA, 25 bp, Homo sapien
ccagcaggccccaaatgtccaggtg

SEQ ID NO: 5244075 - DNA, 25 bp, Homo sapien
aggggctccctcaggtccagcaggc

SEQ ID NO: 5244076 - DNA, 25 bp, Homo sapien
aaatgtccaggtgggccaggttgcc

SEQ ID NO: 5244077 - DNA, 25 bp, Homo sapien
taacatcaagtgtagtttaagccac

SEQ ID NO: 5244078 - DNA, 25 bp, Homo sapien
tggaattcactatggaagcctggac

SEQ ID NO: 5244079 - DNA, 25 bp, Homo sapien
caggagggctatactctgagtaatg

SEQ ID NO: 5244080 - DNA, 25 bp, Homo sapien
tttgtatttcagtccaaatgggctg

SEQ ID NO: 5244081 - DNA, 25 bp, Homo sapien
aatgggttcgaaaaagagtcacagc

SEQ ID NO: 5244082 - DNA, 25 bp, Homo sapien
gaagaagatagccatccacaagcca

SEQ ID NO: 5244083 - DNA, 25 bp, Homo sapien
gacagcttgatcacagactcggagc

SEQ ID NO: 5244084 - DNA, 25 bp, Homo sapien
catgctcacgctggccttaaggaag

SEQ ID NO: 5244085 - DNA, 25 bp, Homo sapien
gcccaggaggcctttgattccttta

SEQ ID NO: 5244086 - DNA, 25 bp, Homo sapien
caggaattccatcacgtccttggtc

SEQ ID NO: 5244087 - DNA, 25 bp, Homo sapien
gtccttggtcacctcttatacccat

SEQ ID NO: 5244088 - DNA, 25 bp, Homo sapien
cttttctccggctggaccaggaatt

SEQ ID NO: 5244089 - DNA, 25 bp, Homo sapien
ttggtcacctcttatacccattggt

SEQ ID NO: 5244090 - DNA, 25 bp, Homo sapien
gatcaaagataatgagcaagttgta

SEQ ID NO: 5244091 - DNA, 25 bp, Homo sapien
ggatcaaagataatgagcaagttgt

SEQ ID NO: 5244092 - DNA, 25 bp, Homo sapien
atcaaagataatgagcaagttgtac

SEQ ID NO: 5244093 - DNA, 25 bp, Homo sapien
ttgagcaccagggttccctcttggg

SEQ ID NO: 5244094 - DNA, 25 bp, Homo sapien
cttgagcaccagggttccctcttgg

SEQ ID NO: 5244095 - DNA, 25 bp, Homo sapien
tgagcaccagggttccctcttgggc

SEQ ID NO: 5244096 - DNA, 25 bp, Homo sapien
ccatatttagttatcctagagggat

SEQ ID NO: 5244097 - DNA, 25 bp, Homo sapien
taaactgtgagttaccctgggaaca

SEQ ID NO: 5244098 - DNA, 25 bp, Homo sapien
tgaggtgcataatcattcacttaca

SEQ ID NO: 5244099 - DNA, 25 bp, Homo sapien
ttcacttacataattaggctatttg

SEQ ID NO: 5244100 - DNA, 25 bp, Homo sapien
ctggggctcccctgtctcctttggc

SEQ ID NO: 5244101 - DNA, 25 bp, Homo sapien
ggggctcccctgtctcctttggctc

SEQ ID NO: 5244102 - DNA, 25 bp, Homo sapien
tggggctcccctgtctcctttggct

SEQ ID NO: 5244103 - DNA, 25 bp, Homo sapien
gaatccttctatgcctgtgggtcct

SEQ ID NO: 5244104 - DNA, 25 bp, Homo sapien
tctggccagggataattgcaccggg

SEQ ID NO: 5244105 - DNA, 25 bp, Homo sapien
ccagggataattgcaccgggcagac

SEQ ID NO: 5244106 - DNA, 25 bp, Homo sapien
ccacgatttcctgtctggccaggga

SEQ ID NO: 5244107 - DNA, 25 bp, Homo sapien
agcctggtggaccacgatttcctgt

SEQ ID NO: 5244108 - DNA, 25 bp, Homo sapien
ctggaggtccagggggaccaggcgc

SEQ ID NO: 5244109 - DNA, 25 bp, Homo sapien
tggaggtccagggggaccaggcgca

SEQ ID NO: 5244110 - DNA, 25 bp, Homo sapien
ggaggtccagggggaccaggcgcac

SEQ ID NO: 5244111 - DNA, 25 bp, Homo sapien
tcctgcagttccaggtggacctttt

SEQ ID NO: 5244112 - DNA, 25 bp, Homo sapien
cctgcagttccaggtggaccttttg

SEQ ID NO: 5244113 - DNA, 25 bp, Homo sapien
tcctgttgcagtgtgaagaggtgcc

SEQ ID NO: 5244114 - DNA, 25 bp, Homo sapien
caggcccatctgatctggcaattaa

SEQ ID NO: 5244115 - DNA, 25 bp, Homo sapien
tgtgttcccttaggcacactgcaca

SEQ ID NO: 5244116 - DNA, 25 bp, Homo sapien
gaggtgagtcccatacagaccaaag

SEQ ID NO: 5244117 - DNA, 25 bp, Homo sapien
gctagcagagccataaattacactt

SEQ ID NO: 5244118 - DNA, 25 bp, Homo sapien
caaaaccgttgttgagttacagcac

SEQ ID NO: 5244119 - DNA, 25 bp, Homo sapien
caagagagagtatttgacaggcata

SEQ ID NO: 5244120 - DNA, 25 bp, Homo sapien
gacaggcatatttgacaaggatgca

SEQ ID NO: 5244121 - DNA, 25 bp, Homo sapien
cttctaatgttggtgtatgttgttt

SEQ ID NO: 5244122 - DNA, 25 bp, Homo sapien
gattcaactggatattctgtgtcct

SEQ ID NO: 5244123 - DNA, 25 bp, Homo sapien
actggatattctgtgtcctaaatgg

SEQ ID NO: 5244124 - DNA, 25 bp, Homo sapien
ttgttttagtattggattcaactgg

SEQ ID NO: 5244125 - DNA, 25 bp, Homo sapien
ctgggtcctggaagacctggagtac

SEQ ID NO: 5244126 - DNA, 25 bp, Homo sapien
gaaacccctggaatccaggatcacc

SEQ ID NO: 5244127 - DNA, 25 bp, Homo sapien
gcctggaaacccctggaatccagga

SEQ ID NO: 5244128 - DNA, 25 bp, Homo sapien
ttcacgcctggaaacccctggaatc

SEQ ID NO: 5244129 - DNA, 25 bp, Homo sapien
ggtccaatggatcctagaaatccag

SEQ ID NO: 5244130 - DNA, 25 bp, Homo sapien
ctggaggtccaatggatcctagaaa

SEQ ID NO: 5244131 - DNA, 25 bp, Homo sapien
gatcctagaaatccaggattaccct

SEQ ID NO: 5244132 - DNA, 25 bp, Homo sapien
tccttttggcccaattggtcctgga

SEQ ID NO: 5244133 - DNA, 25 bp, Homo sapien
ggagataatcttaagtgtgccaggg

SEQ ID NO: 5244134 - DNA, 25 bp, Homo sapien
gaagggagataatcttaagtgtgcc

SEQ ID NO: 5244135 - DNA, 25 bp, Homo sapien
ctggaagggagataatcttaagtgt

SEQ ID NO: 5244136 - DNA, 25 bp, Homo sapien
agggagataatcttaagtgtgccag

SEQ ID NO: 5244137 - DNA, 25 bp, Homo sapien
ctgcatccctggttctccaggtgtg

SEQ ID NO: 5244138 - DNA, 25 bp, Homo sapien
ctaggtttccaggtggccctggtgg

SEQ ID NO: 5244139 - DNA, 25 bp, Homo sapien
catccctggttctccaggtgtgcca

SEQ ID NO: 5244140 - DNA, 25 bp, Homo sapien
tccctggttctccaggtgtgccagg

SEQ ID NO: 5244141 - DNA, 25 bp, Homo sapien
gaagcctattacgatatgctgtgca

SEQ ID NO: 5244142 - DNA, 25 bp, Homo sapien
tagagccccgagactgacagttgtc

SEQ ID NO: 5244143 - DNA, 25 bp, Homo sapien
taaaatgagctcaatcctaagactg

SEQ ID NO: 5244144 - DNA, 25 bp, Homo sapien
tagtgatccaagtcaatgctgccag

SEQ ID NO: 5244145 - DNA, 25 bp, Homo sapien
tgcctggcttacctcttggcccaca

SEQ ID NO: 5244146 - DNA, 25 bp, Homo sapien
cttgcctggcttacctcttggccca

SEQ ID NO: 5244147 - DNA, 25 bp, Homo sapien
ccttgcctggcttacctcttggccc

SEQ ID NO: 5244148 - DNA, 25 bp, Homo sapien
cctggcttacctcttggcccacagg

SEQ ID NO: 5244149 - DNA, 25 bp, Homo sapien
tggtccaggagttcctggttttcca

SEQ ID NO: 5244150 - DNA, 25 bp, Homo sapien
gctggtccaggagttcctggttttc

SEQ ID NO: 5244151 - DNA, 25 bp, Homo sapien
cgaaatagcacttcttcggtgagga

SEQ ID NO: 5244152 - DNA, 25 bp, Homo sapien
ccatctgaccagctaagaggtcgga

SEQ ID NO: 5244153 - DNA, 25 bp, Homo sapien
gaacaacataaactcaaaggcctag

SEQ ID NO: 5244154 - DNA, 25 bp, Homo sapien
tgtgcatcagtttggagcccatctg

SEQ ID NO: 5244155 - DNA, 25 bp, Homo sapien
acttgggccatggttctctagggtc

SEQ ID NO: 5244156 - DNA, 25 bp, Homo sapien
cattgaacggctattatttatggta

SEQ ID NO: 5244157 - DNA, 25 bp, Homo sapien
acggctattatttatggtattggca

SEQ ID NO: 5244158 - DNA, 25 bp, Homo sapien
ggtattggcattggctaccacttcc

SEQ ID NO: 5244159 - DNA, 25 bp, Homo sapien
gtcccctctggacatgaaggaattg

SEQ ID NO: 5244160 - DNA, 25 bp, Homo sapien
gaaggaattgctgtggtttgactgt

SEQ ID NO: 5244161 - DNA, 25 bp, Homo sapien
ctgtgtcgggtgaagacaaagcctc

SEQ ID NO: 5244162 - DNA, 25 bp, Homo sapien
aaagcctctcgttgtccaggttgca

SEQ ID NO: 5244163 - DNA, 25 bp, Homo sapien
gggctcgttgatttccttgtacaaa

SEQ ID NO: 5244164 - DNA, 25 bp, Homo sapien
ggctcgttgatttccttgtacaaaa

SEQ ID NO: 5244165 - DNA, 25 bp, Homo sapien
tgggctcgttgatttccttgtacaa

SEQ ID NO: 5244166 - DNA, 25 bp, Homo sapien
tgtggtaaatcgctgcaggcagctg

SEQ ID NO: 5244167 - DNA, 25 bp, Homo sapien
ttatataaggctcaagggctctgcc

SEQ ID NO: 5244168 - DNA, 25 bp, Homo sapien
gtgttgacagccagtatgaataatc

SEQ ID NO: 5244169 - DNA, 25 bp, Homo sapien
tctgccagtaatgggagccatgttc

SEQ ID NO: 5244170 - DNA, 25 bp, Homo sapien
gatcgcaggaccttcacaaacagtg

SEQ ID NO: 5244171 - DNA, 25 bp, Homo sapien
tcgcaggaccttcacaaacagtgca

SEQ ID NO: 5244172 - DNA, 25 bp, Homo sapien
ggcgatcgcaggaccttcacaaaca

SEQ ID NO: 5244173 - DNA, 25 bp, Homo sapien
ctatggcgatcgcaggaccttcaca

SEQ ID NO: 5244174 - DNA, 25 bp, Homo sapien
gccgtgaggacatggaggaatgtca

SEQ ID NO: 5244175 - DNA, 25 bp, Homo sapien
gagagaaatccagccgtgaggacat

SEQ ID NO: 5244176 - DNA, 25 bp, Homo sapien
gaaatccagccgtgaggacatggag

SEQ ID NO: 5244177 - DNA, 25 bp, Homo sapien
ccagagagaaatccagccgtgagga

SEQ ID NO: 5244178 - DNA, 25 bp, Homo sapien
agccagccagaaactgtaggaattt

SEQ ID NO: 5244179 - DNA, 25 bp, Homo sapien
taggaatttgaatagtagttgcacg

SEQ ID NO: 5244180 - DNA, 25 bp, Homo sapien
tagttgcacgttcctcttccatgac

SEQ ID NO: 5244181 - DNA, 25 bp, Homo sapien
aaatgggctggctcggaattcttcc

SEQ ID NO: 5244182 - DNA, 25 bp, Homo sapien
cagcgacttattattttttctaatt

SEQ ID NO: 5244183 - DNA, 25 bp, Homo sapien
gacagcgacttattattttttctaa

SEQ ID NO: 5244184 - DNA, 25 bp, Homo sapien
ctgacagcgacttattattttttct

SEQ ID NO: 5244185 - DNA, 25 bp, Homo sapien
tgacagcgacttattattttttcta

SEQ ID NO: 5244186 - DNA, 25 bp, Homo sapien
ggttttaagacatacagcggccaag

SEQ ID NO: 5244187 - DNA, 25 bp, Homo sapien
tagaagccctgagtttccctaggca

SEQ ID NO: 5244188 - DNA, 25 bp, Homo sapien
acaaatgtgggaatccagcgggcca

SEQ ID NO: 5244189 - DNA, 25 bp, Homo sapien
gaaacagcacagattagagacccag

SEQ ID NO: 5244190 - DNA, 25 bp, Homo sapien
gtcgcagtaagttacatttgataca

SEQ ID NO: 5244191 - DNA, 25 bp, Homo sapien
aatctgttattttagcacgctgtga

SEQ ID NO: 5244192 - DNA, 25 bp, Homo sapien
tgtaagttagccatcaagttcaaat

SEQ ID NO: 5244193 - DNA, 25 bp, Homo sapien
taatcttgtcaggatataacaatat

SEQ ID NO: 5244194 - DNA, 25 bp, Homo sapien
ggcgctctcagaggtggttggctga

SEQ ID NO: 5244195 - DNA, 25 bp, Homo sapien
aagagtgttcgtggtcatgtgacgc

SEQ ID NO: 5244196 - DNA, 25 bp, Homo sapien
tccacggtaagcgatgcgcagacat

SEQ ID NO: 5244197 - DNA, 25 bp, Homo sapien
cacgcactggaacggctccacggta

SEQ ID NO: 5244198 - DNA, 25 bp, Homo sapien
gcaggtcgcgggtcgggaagacgtc

SEQ ID NO: 5244199 - DNA, 25 bp, Homo sapien
gggtcgggaagacgtcaacactcac

SEQ ID NO: 5244200 - DNA, 25 bp, Homo sapien
ccctgttggccggagggtctcggcg

SEQ ID NO: 5244201 - DNA, 25 bp, Homo sapien
tcggcggcggcgataggcctggcag

SEQ ID NO: 5244202 - DNA, 25 bp, Homo sapien
gccgaaccacacaaggtgaagaggt

SEQ ID NO: 5244203 - DNA, 25 bp, Homo sapien
accacacaaggtgaagaggttcgcc

SEQ ID NO: 5244204 - DNA, 25 bp, Homo sapien
cacaaggtgaagaggttcgcccaaa

SEQ ID NO: 5244205 - DNA, 25 bp, Homo sapien
gagacgccgaaccacacaaggtgaa

SEQ ID NO: 5244206 - DNA, 25 bp, Homo sapien
aagcccggcgttcacgctcacggga

SEQ ID NO: 5244207 - DNA, 25 bp, Homo sapien
gaaggatgagtgaagacctgcaaag

SEQ ID NO: 5244208 - DNA, 25 bp, Homo sapien
ttaaggtcagcctgtaaggtgtcag

SEQ ID NO: 5244209 - DNA, 25 bp, Homo sapien
gagcagggatgctcacagacggaca

SEQ ID NO: 5244210 - DNA, 25 bp, Homo sapien
gaaagggtgctcttccctcgagaat

SEQ ID NO: 5244211 - DNA, 25 bp, Homo sapien
cctggaaggaaacccgagagcaact

SEQ ID NO: 5244212 - DNA, 25 bp, Homo sapien
cgtcctgcagaggaaggtcagaagc

SEQ ID NO: 5244213 - DNA, 25 bp, Homo sapien
tagtaatagtagcacacgtcctgca

SEQ ID NO: 5244214 - DNA, 25 bp, Homo sapien
cactaccttaaaccatggctgtaca

SEQ ID NO: 5244215 - DNA, 25 bp, Homo sapien
gagtcaagtcacatgccactagcgg

SEQ ID NO: 5244216 - DNA, 25 bp, Homo sapien
tccacgtaccgcctagagtcaagtc

SEQ ID NO: 5244217 - DNA, 25 bp, Homo sapien
caattttgggacacaatgattccag

SEQ ID NO: 5244218 - DNA, 25 bp, Homo sapien
gaatccagtaggcaaccagtacgtg

SEQ ID NO: 5244219 - DNA, 25 bp, Homo sapien
cttagaatccagtaggcaaccagta

SEQ ID NO: 5244220 - DNA, 25 bp, Homo sapien
tagaatccagtaggcaaccagtacg

SEQ ID NO: 5244221 - DNA, 25 bp, Homo sapien
tccagtaggcaaccagtacgtgatt

SEQ ID NO: 5244222 - DNA, 25 bp, Homo sapien
aaatcctctggccttcgtctcctaa

SEQ ID NO: 5244223 - DNA, 25 bp, Homo sapien
ttgaactagtaatgcatgtactcgg

SEQ ID NO: 5244224 - DNA, 25 bp, Homo sapien
caaagtacgcaagctatacagagaa

SEQ ID NO: 5244225 - DNA, 25 bp, Homo sapien
ggaagtgtcccactttcaatcctat

SEQ ID NO: 5244226 - DNA, 25 bp, Homo sapien
tactgcttgctatttggcactatct

SEQ ID NO: 5244227 - DNA, 25 bp, Homo sapien
ctatttggcactatctgcttctgtg

SEQ ID NO: 5244228 - DNA, 25 bp, Homo sapien
tgctatttggcactatctgcttctg

SEQ ID NO: 5244229 - DNA, 25 bp, Homo sapien
tgcttgctatttggcactatctgct

SEQ ID NO: 5244230 - DNA, 25 bp, Homo sapien
cagtaaatacaggtctataatagct

SEQ ID NO: 5244231 - DNA, 25 bp, Homo sapien
tactttacacaacaattcccctaca

SEQ ID NO: 5244232 - DNA, 25 bp, Homo sapien
tgtacataacaacacggacactgct

SEQ ID NO: 5244233 - DNA, 25 bp, Homo sapien
aaaatactgctaccctgcagttcag

SEQ ID NO: 5244234 - DNA, 25 bp, Homo sapien
tgatgtgtcactgcttgttccttta

SEQ ID NO: 5244235 - DNA, 25 bp, Homo sapien
cctagtgatgtgtcactgcttgttc

SEQ ID NO: 5244236 - DNA, 25 bp, Homo sapien
tgtgtcactgcttgttcctttactc

SEQ ID NO: 5244237 - DNA, 25 bp, Homo sapien
cttcctagtgatgtgtcactgcttg

SEQ ID NO: 5244238 - DNA, 25 bp, Homo sapien
catactctctgcgtaaacatgcatg

SEQ ID NO: 5244239 - DNA, 25 bp, Homo sapien
cagctgaaattgtaccttgaggata

SEQ ID NO: 5244240 - DNA, 25 bp, Homo sapien
tgttgccgccaatacaaaagctgat

SEQ ID NO: 5244241 - DNA, 25 bp, Homo sapien
taaaagagcatggttagcctacggc

SEQ ID NO: 5244242 - DNA, 25 bp, Homo sapien
ggagaaggaaatgctgccctgctca

SEQ ID NO: 5244243 - DNA, 25 bp, Homo sapien
tgggagaaggaaatgctgccctgct

SEQ ID NO: 5244244 - DNA, 25 bp, Homo sapien
agaaggaaatgctgccctgctcacc

SEQ ID NO: 5244245 - DNA, 25 bp, Homo sapien
agtgggagaaggaaatgctgccctg

SEQ ID NO: 5244246 - DNA, 25 bp, Homo sapien
cctctccggaacttgcattatcaca

SEQ ID NO: 5244247 - DNA, 25 bp, Homo sapien
tcctctccggaacttgcattatcac

SEQ ID NO: 5244248 - DNA, 25 bp, Homo sapien
cactcagcgtaagtacacgaggtgg

SEQ ID NO: 5244249 - DNA, 25 bp, Homo sapien
ctcagcgtaagtacacgaggtggtg

SEQ ID NO: 5244250 - DNA, 25 bp, Homo sapien
gtaagtacacgaggtggtgttttca

SEQ ID NO: 5244251 - DNA, 25 bp, Homo sapien
cagcgtaagtacacgaggtggtgtt

SEQ ID NO: 5244252 - DNA, 25 bp, Homo sapien
taatggcatcttgtagatagagatc

SEQ ID NO: 5244253 - DNA, 25 bp, Homo sapien
acattctacagtgcaaaaaggtggc

SEQ ID NO: 5244254 - DNA, 25 bp, Homo sapien
gatagagatcacaaatgttgcaaac

SEQ ID NO: 5244255 - DNA, 25 bp, Homo sapien
tgacttggaagacggtaatggcatc

SEQ ID NO: 5244256 - DNA, 25 bp, Homo sapien
cccactaaaatagccatggcaacat

SEQ ID NO: 5244257 - DNA, 25 bp, Homo sapien
ccccactaaaatagccatggcaaca

SEQ ID NO: 5244258 - DNA, 25 bp, Homo sapien
accccccactaaaatagccatggca

SEQ ID NO: 5244259 - DNA, 25 bp, Homo sapien
ccccccactaaaatagccatggcaa

SEQ ID NO: 5244260 - DNA, 25 bp, Homo sapien
gaccagctgtccattttggcgaaca

SEQ ID NO: 5244261 - DNA, 25 bp, Homo sapien
ctgaccagctgtccattttggcgaa

SEQ ID NO: 5244262 - DNA, 25 bp, Homo sapien
cagctgtccattttggcgaacagca

SEQ ID NO: 5244263 - DNA, 25 bp, Homo sapien
accagctgtccattttggcgaacag

SEQ ID NO: 5244264 - DNA, 25 bp, Homo sapien
cttacaaacgagataaaatgctagt

SEQ ID NO: 5244265 - DNA, 25 bp, Homo sapien
tacaaacgagataaaatgctagtgc

SEQ ID NO: 5244266 - DNA, 25 bp, Homo sapien
acaaacgagataaaatgctagtgct

SEQ ID NO: 5244267 - DNA, 25 bp, Homo sapien
caaacgagataaaatgctagtgctt

SEQ ID NO: 5244268 - DNA, 25 bp, Homo sapien
ggtgactgaaaaattctcaggacca

SEQ ID NO: 5244269 - DNA, 25 bp, Homo sapien
taaggtgactgaaaaattctcagga

SEQ ID NO: 5244270 - DNA, 25 bp, Homo sapien
ataaggtgactgaaaaattctcagg

SEQ ID NO: 5244271 - DNA, 25 bp, Homo sapien
aggtgactgaaaaattctcaggacc

SEQ ID NO: 5244272 - DNA, 25 bp, Homo sapien
cagttcaccatcttatgacaactta

SEQ ID NO: 5244273 - DNA, 25 bp, Homo sapien
accagttcaccatcttatgacaact

SEQ ID NO: 5244274 - DNA, 25 bp, Homo sapien
ccagttcaccatcttatgacaactt

SEQ ID NO: 5244275 - DNA, 25 bp, Homo sapien
gttcaccatcttatgacaacttaat

SEQ ID NO: 5244276 - DNA, 25 bp, Homo sapien
catgagtttacgaaaattggccaaa

SEQ ID NO: 5244277 - DNA, 25 bp, Homo sapien
agacgcttacatgatacttgccatc

SEQ ID NO: 5244278 - DNA, 25 bp, Homo sapien
cagtttccacagacgcttacatgat

SEQ ID NO: 5244279 - DNA, 25 bp, Homo sapien
ggttcatgagtttacgaaaattggc

SEQ ID NO: 5244280 - DNA, 25 bp, Homo sapien
tgatacagcctctttaccgtttgtg

SEQ ID NO: 5244281 - DNA, 25 bp, Homo sapien
aaatggatttcatgggcctgctgac

SEQ ID NO: 5244282 - DNA, 25 bp, Homo sapien
gcagatcaagaagccaccttagcca

SEQ ID NO: 5244283 - DNA, 25 bp, Homo sapien
tgtacccctatactctttagagagg

SEQ ID NO: 5244284 - DNA, 25 bp, Homo sapien
agaaaatcaagtattagttaacact

SEQ ID NO: 5244285 - DNA, 25 bp, Homo sapien
gaaaatcaagtattagttaacactg

SEQ ID NO: 5244286 - DNA, 25 bp, Homo sapien
cacttttgcgctaatagctgaccac

SEQ ID NO: 5244287 - DNA, 25 bp, Homo sapien
taaagtggagacaggcaaagtttca

SEQ ID NO: 5244288 - DNA, 25 bp, Homo sapien
caaagtttcatgcactatgacgcac

SEQ ID NO: 5244289 - DNA, 25 bp, Homo sapien
gaaaacaaaggctagtgctcctgct

SEQ ID NO: 5244290 - DNA, 25 bp, Homo sapien
gtgtactccggtgcagaaatcggtg

SEQ ID NO: 5244291 - DNA, 25 bp, Homo sapien
cggtgcagaaatcggtgcctggaac

SEQ ID NO: 5244292 - DNA, 25 bp, Homo sapien
tactccggtgcagaaatcggtgcct

SEQ ID NO: 5244293 - DNA, 25 bp, Homo sapien
tcttggggcagaatctgatctgtgc

SEQ ID NO: 5244294 - DNA, 25 bp, Homo sapien
catataatgacagtttgagaaatcc

SEQ ID NO: 5244295 - DNA, 25 bp, Homo sapien
tcaaaatcaaaacaactacttgtca

SEQ ID NO: 5244296 - DNA, 25 bp, Homo sapien
ttacctggtgaatagattagtatta

SEQ ID NO: 5244297 - DNA, 25 bp, Homo sapien
aagataattaggatagcatacgtca

SEQ ID NO: 5244298 - DNA, 25 bp, Homo sapien
aaaaaattgggatcactgcaccagg

SEQ ID NO: 5244299 - DNA, 25 bp, Homo sapien
ccaagcatcgttttcatctatggga

SEQ ID NO: 5244300 - DNA, 25 bp, Homo sapien
tgagaactattataccaaccaaagc

SEQ ID NO: 5244301 - DNA, 25 bp, Homo sapien
tgcaccaggtgacgttgaatctgtt

SEQ ID NO: 5244302 - DNA, 25 bp, Homo sapien
taggacagggaattctcacatacag

SEQ ID NO: 5244303 - DNA, 25 bp, Homo sapien
tgaatgtgttcaacccctcccatgg

SEQ ID NO: 5244304 - DNA, 25 bp, Homo sapien
tacgacagtggaatgagggctcaac

SEQ ID NO: 5244305 - DNA, 25 bp, Homo sapien
gggctcaacattctcaacgtcaagg

SEQ ID NO: 5244306 - DNA, 25 bp, Homo sapien
aggtaacatatggggaggacagacc

SEQ ID NO: 5244307 - DNA, 25 bp, Homo sapien
gataagcgacaaaatgccacgagca

SEQ ID NO: 5244308 - DNA, 25 bp, Homo sapien
cacgagcagaggaaagattagctcc

SEQ ID NO: 5244309 - DNA, 25 bp, Homo sapien
tggataagcgacaaaatgccacgag

SEQ ID NO: 5244310 - DNA, 25 bp, Homo sapien
tctaacactcaatccaatgggacgg

SEQ ID NO: 5244311 - DNA, 25 bp, Homo sapien
taccagaagccactagataaatgtt

SEQ ID NO: 5244312 - DNA, 25 bp, Homo sapien
caagcctagaaatccgtagctgaga

SEQ ID NO: 5244313 - DNA, 25 bp, Homo sapien
ctatgtatactctccctgacagaag

SEQ ID NO: 5244314 - DNA, 25 bp, Homo sapien
tgggcccaaatgcatagcactaggt

SEQ ID NO: 5244315 - DNA, 25 bp, Homo sapien
gtgcagctttcagtccttgggccca

SEQ ID NO: 5244316 - DNA, 25 bp, Homo sapien
cactaggtcaactctgggaaggctc

SEQ ID NO: 5244317 - DNA, 25 bp, Homo sapien
tatggtgacatacccagggcctgtg

SEQ ID NO: 5244318 - DNA, 25 bp, Homo sapien
gatatactcgcacctaataatctgg

SEQ ID NO: 5244319 - DNA, 25 bp, Homo sapien
tgtactgtgactctgccatctagct

SEQ ID NO: 5244320 - DNA, 25 bp, Homo sapien
caagttagctgatggacaataaatc

SEQ ID NO: 5244321 - DNA, 25 bp, Homo sapien
tctggtctccactaaggacttattg

SEQ ID NO: 5244322 - DNA, 25 bp, Homo sapien
caactaatgctacagatctaggaga

SEQ ID NO: 5244323 - DNA, 25 bp, Homo sapien
tacagagcaaggaacatagaagcac

SEQ ID NO: 5244324 - DNA, 25 bp, Homo sapien
tgctcaacactgagatcctaagtga

SEQ ID NO: 5244325 - DNA, 25 bp, Homo sapien
tgatgagaatctaaccctccaagct

SEQ ID NO: 5244326 - DNA, 25 bp, Homo sapien
taacaaacgctgtatccactgcaac

SEQ ID NO: 5244327 - DNA, 25 bp, Homo sapien
tcaagcccctcgtaaaaatgagagc

SEQ ID NO: 5244328 - DNA, 25 bp, Homo sapien
tattctatgcactcaaagctggtac

SEQ ID NO: 5244329 - DNA, 25 bp, Homo sapien
gaaatccaaggctaccaccaagctc

SEQ ID NO: 5244330 - DNA, 25 bp, Homo sapien
aaaggagactggagtgttggatcca

SEQ ID NO: 5244331 - DNA, 25 bp, Homo sapien
tctaagtaactgatctggttttgcc

SEQ ID NO: 5244332 - DNA, 25 bp, Homo sapien
cagtatatactttggcgctagagga

SEQ ID NO: 5244333 - DNA, 25 bp, Homo sapien
ctaagtgttcactggtcaattcccc

SEQ ID NO: 5244334 - DNA, 25 bp, Homo sapien
tatttacacgacaaaacagcaccaa

SEQ ID NO: 5244335 - DNA, 25 bp, Homo sapien
caacattactattgatcaaagaaac

SEQ ID NO: 5244336 - DNA, 25 bp, Homo sapien
gaggacaactctgcttaaaaagtgt

SEQ ID NO: 5244337 - DNA, 25 bp, Homo sapien
tatgaaatttaagacagaggacaac

SEQ ID NO: 5244338 - DNA, 25 bp, Homo sapien
agcagacccaccacgcaacacaggt

SEQ ID NO: 5244339 - DNA, 25 bp, Homo sapien
cagcagacccaccacgcaacacagg

SEQ ID NO: 5244340 - DNA, 25 bp, Homo sapien
gcggcagcagacccaccacgcaaca

SEQ ID NO: 5244341 - DNA, 25 bp, Homo sapien
cagactcactagcagggaacacaaa

SEQ ID NO: 5244342 - DNA, 25 bp, Homo sapien
gaactcagagtaaatggcacgccac

SEQ ID NO: 5244343 - DNA, 25 bp, Homo sapien
tatgtaagcccataggcacagactc

SEQ ID NO: 5244344 - DNA, 25 bp, Homo sapien
tgagagctgccacttaggatagaac

SEQ ID NO: 5244345 - DNA, 25 bp, Homo sapien
acgttccttcaatggttgtatctat

SEQ ID NO: 5244346 - DNA, 25 bp, Homo sapien
gacgttccttcaatggttgtatcta

SEQ ID NO: 5244347 - DNA, 25 bp, Homo sapien
cgttccttcaatggttgtatctata

SEQ ID NO: 5244348 - DNA, 25 bp, Homo sapien
ttctcttttagcacgttctttgttc

SEQ ID NO: 5244349 - DNA, 25 bp, Homo sapien
cctcttccagaagttgtagacgtct

SEQ ID NO: 5244350 - DNA, 25 bp, Homo sapien
tagcggcgaaaccagagccagctat

SEQ ID NO: 5244351 - DNA, 25 bp, Homo sapien
aattgaatacatgaccatttctctt

SEQ ID NO: 5244352 - DNA, 25 bp, Homo sapien
gctgttgagacagtatttttgaggg

SEQ ID NO: 5244353 - DNA, 25 bp, Homo sapien
ttgagacagtatttttgagggctga

SEQ ID NO: 5244354 - DNA, 25 bp, Homo sapien
tatttccagctgttgagacagtatt

SEQ ID NO: 5244355 - DNA, 25 bp, Homo sapien
gagacagtatttttgagggctgatg

SEQ ID NO: 5244356 - DNA, 25 bp, Homo sapien
gcaggtgttactgcagaactgctca

SEQ ID NO: 5244357 - DNA, 25 bp, Homo sapien
gaactgctcagacgtgaatacagct

SEQ ID NO: 5244358 - DNA, 25 bp, Homo sapien
cagggtgtggactataaaatggcat

SEQ ID NO: 5244359 - DNA, 25 bp, Homo sapien
ccattcagaatcagttgggtggact

SEQ ID NO: 5244360 - DNA, 25 bp, Homo sapien
gctaaatctaactctatccaaggaa

SEQ ID NO: 5244361 - DNA, 25 bp, Homo sapien
tggagaatgttgcacctaactgaat

SEQ ID NO: 5244362 - DNA, 25 bp, Homo sapien
taccttctggtatacataaatctag

SEQ ID NO: 5244363 - DNA, 25 bp, Homo sapien
tagagggataagaagcaagaacgga

SEQ ID NO: 5244364 - DNA, 25 bp, Homo sapien
agacttgggtcccatcctcaagata

SEQ ID NO: 5244365 - DNA, 25 bp, Homo sapien
acttgggtcccatcctcaagatatc

SEQ ID NO: 5244366 - DNA, 25 bp, Homo sapien
gtttagacttgggtcccatcctcaa

SEQ ID NO: 5244367 - DNA, 25 bp, Homo sapien
ttagacttgggtcccatcctcaaga

SEQ ID NO: 5244368 - DNA, 25 bp, Homo sapien
tgatagtgatggcaaaaaacccgac

SEQ ID NO: 5244369 - DNA, 25 bp, Homo sapien
gatgcccctgtgctgcttagttact

SEQ ID NO: 5244370 - DNA, 25 bp, Homo sapien
cagctggtgcagtatctggtgatgc

SEQ ID NO: 5244371 - DNA, 25 bp, Homo sapien
cacatgcgtggctgagatatcacta

SEQ ID NO: 5244372 - DNA, 25 bp, Homo sapien
cttcagagtccgtcagtaagctgga

SEQ ID NO: 5244373 - DNA, 25 bp, Homo sapien
tgttgccaacaactagaacacggtg

SEQ ID NO: 5244374 - DNA, 25 bp, Homo sapien
gaagaatgcctcgtctccacaggat

SEQ ID NO: 5244375 - DNA, 25 bp, Homo sapien
cagggcatggcacagaaggtttcca

SEQ ID NO: 5244376 - DNA, 25 bp, Homo sapien
ggtcattgcatgcctgggctcggat

SEQ ID NO: 5244377 - DNA, 25 bp, Homo sapien
attgtgtgtcctgagcatgccctgc

SEQ ID NO: 5244378 - DNA, 25 bp, Homo sapien
cattgtgtgtcctgagcatgccctg

SEQ ID NO: 5244379 - DNA, 25 bp, Homo sapien
ctgggtcattgcatgcctgggctcg

SEQ ID NO: 5244380 - DNA, 25 bp, Homo sapien
tgcccgcaaagcaaactcaaaactg

SEQ ID NO: 5244381 - DNA, 25 bp, Homo sapien
gaagaagagatagaggatttttgcc

SEQ ID NO: 5244382 - DNA, 25 bp, Homo sapien
tgtggcccaatggagcaagaggcca

SEQ ID NO: 5244383 - DNA, 25 bp, Homo sapien
caagaggccaagatacaggagacag

SEQ ID NO: 5244384 - DNA, 25 bp, Homo sapien
catgacttggcgtttcctgtgctgg

SEQ ID NO: 5244385 - DNA, 25 bp, Homo sapien
tctgctcctgagacgtggaggtgtg

SEQ ID NO: 5244386 - DNA, 25 bp, Homo sapien
cattggttccaatcctttcatgtgt

SEQ ID NO: 5244387 - DNA, 25 bp, Homo sapien
tccctggtgaggctaacagcaacca

SEQ ID NO: 5244388 - DNA, 25 bp, Homo sapien
caatagtttgtaatactctctgcag

SEQ ID NO: 5244389 - DNA, 25 bp, Homo sapien
caccataagtgtatgtgaaagtttc

SEQ ID NO: 5244390 - DNA, 25 bp, Homo sapien
aatagcaggccttgagagataatcc

SEQ ID NO: 5244391 - DNA, 25 bp, Homo sapien
cgtggaccaccattgaacaaaatct

SEQ ID NO: 5244392 - DNA, 25 bp, Homo sapien
catgacaagacgaacgacagcatcg

SEQ ID NO: 5244393 - DNA, 25 bp, Homo sapien
ggataaactctaggcccatgacaag

SEQ ID NO: 5244394 - DNA, 25 bp, Homo sapien
cgacagcatcgttgaggtgaggctt

SEQ ID NO: 5244395 - DNA, 25 bp, Homo sapien
ggtacacccagacaggataaactct

SEQ ID NO: 5244396 - DNA, 25 bp, Homo sapien
catttggcaacgtagtttccagcac

SEQ ID NO: 5244397 - DNA, 25 bp, Homo sapien
cttgtgtctacgacacatttggcaa

SEQ ID NO: 5244398 - DNA, 25 bp, Homo sapien
acacatcgccctcttgtgtctacga

SEQ ID NO: 5244399 - DNA, 25 bp, Homo sapien
tccttttcctcggtgaggttgacat

SEQ ID NO: 5244400 - DNA, 25 bp, Homo sapien
caggccctcaggatctaagcagaca

SEQ ID NO: 5244401 - DNA, 25 bp, Homo sapien
gccagaatggaataactagcacctt

SEQ ID NO: 5244402 - DNA, 25 bp, Homo sapien
tgtgccctagacttagctgcctgtc

SEQ ID NO: 5244403 - DNA, 25 bp, Homo sapien
tggtttcgcctctgcttgcctgtgg

SEQ ID NO: 5244404 - DNA, 25 bp, Homo sapien
ccaaccggcacagccgggacaaccg

SEQ ID NO: 5244405 - DNA, 25 bp, Homo sapien
gtacgcgggctgacgggccacacca

SEQ ID NO: 5244406 - DNA, 25 bp, Homo sapien
ggctgtactgggctcgacgcggccc

SEQ ID NO: 5244407 - DNA, 25 bp, Homo sapien
cggccgcagcggcttggctgtactg

SEQ ID NO: 5244408 - DNA, 25 bp, Homo sapien
gctgcgccgggggcccgcggtccca

SEQ ID NO: 5244409 - DNA, 25 bp, Homo sapien
tcgaagcactttcggttgtgcggga

SEQ ID NO: 5244410 - DNA, 25 bp, Homo sapien
cacgaaggagccgaccgtcatgtta

SEQ ID NO: 5244411 - DNA, 25 bp, Homo sapien
cgcgctggtcgcagtcgaagcactt

SEQ ID NO: 5244412 - DNA, 25 bp, Homo sapien
tgccggagcaggaggtacacacgaa

SEQ ID NO: 5244413 - DNA, 25 bp, Homo sapien
acaattgaaaaagtatctaggccag

SEQ ID NO: 5244414 - DNA, 25 bp, Homo sapien
cacatgggctagtatctggcactta

SEQ ID NO: 5244415 - DNA, 25 bp, Homo sapien
ccagcacatgggctagtatctggca

SEQ ID NO: 5244416 - DNA, 25 bp, Homo sapien
gaaaaagtatctaggccaggcgagg

SEQ ID NO: 5244417 - DNA, 25 bp, Homo sapien
gaatatttccataggagtttctcac

SEQ ID NO: 5244418 - DNA, 25 bp, Homo sapien
aacctagtcccgaatatttccatag

SEQ ID NO: 5244419 - DNA, 25 bp, Homo sapien
caagttgtatttccctagacaatca

SEQ ID NO: 5244420 - DNA, 25 bp, Homo sapien
tttccctagacaatcatcactttga

SEQ ID NO: 5244421 - DNA, 25 bp, Homo sapien
cctgtgtggtggatttaatcctcgc

SEQ ID NO: 5244422 - DNA, 25 bp, Homo sapien
gttgtgtgaatgttgtcatggagat

SEQ ID NO: 5244423 - DNA, 25 bp, Homo sapien
tagatttcaccctgtgtggtggatt

SEQ ID NO: 5244424 - DNA, 25 bp, Homo sapien
tcaccctgtgtggtggatttaatcc

SEQ ID NO: 5244425 - DNA, 25 bp, Homo sapien
tatctgttctgtcgggtcttcccaa

SEQ ID NO: 5244426 - DNA, 25 bp, Homo sapien
tgtgagccctttgtccactaagccg

SEQ ID NO: 5244427 - DNA, 25 bp, Homo sapien
cagtgacttccactaccagcttagg

SEQ ID NO: 5244428 - DNA, 25 bp, Homo sapien
tgagtggtctatcaacttgcaaacc

SEQ ID NO: 5244429 - DNA, 25 bp, Homo sapien
taaagtaactgtatgatacaaaaga

SEQ ID NO: 5244430 - DNA, 25 bp, Homo sapien
ttacaggggagctacagtgccaaga

SEQ ID NO: 5244431 - DNA, 25 bp, Homo sapien
cagtgccaagatcactacaggtttt

SEQ ID NO: 5244432 - DNA, 25 bp, Homo sapien
tgacaaaaattacttcagcaaataa

SEQ ID NO: 5244433 - DNA, 25 bp, Homo sapien
tcttcaaacatattaggaaggttaa

SEQ ID NO: 5244434 - DNA, 25 bp, Homo sapien
tgttcaccagtccaccttccgttaa

SEQ ID NO: 5244435 - DNA, 25 bp, Homo sapien
cacttggccagtagtaatgctttta

SEQ ID NO: 5244436 - DNA, 25 bp, Homo sapien
caactagaaaacataaactatacat

SEQ ID NO: 5244437 - DNA, 25 bp, Homo sapien
aagacccacggattatgatatgttc

SEQ ID NO: 5244438 - DNA, 25 bp, Homo sapien
tttagaagagccatagcaccatacc

SEQ ID NO: 5244439 - DNA, 25 bp, Homo sapien
aaaatgcttaaaaggccagacgtgc

SEQ ID NO: 5244440 - DNA, 25 bp, Homo sapien
tggttttaaacctgagatatccctc

SEQ ID NO: 5244441 - DNA, 25 bp, Homo sapien
ctctgtcaaaaaaaattaggctggg

SEQ ID NO: 5244442 - DNA, 25 bp, Homo sapien
ccagcctgagcgacaagaccaagac

SEQ ID NO: 5244443 - DNA, 25 bp, Homo sapien
agttagccaagatcacactactcca

SEQ ID NO: 5244444 - DNA, 25 bp, Homo sapien
ctgagcgacaagaccaagactctgt

SEQ ID NO: 5244445 - DNA, 25 bp, Homo sapien
aaggtgactgagtcatcaactccca

SEQ ID NO: 5244446 - DNA, 25 bp, Homo sapien
aactcccagattccaccacttggtg

SEQ ID NO: 5244447 - DNA, 25 bp, Homo sapien
tcatctcaatttgggcagctggtca

SEQ ID NO: 5244448 - DNA, 25 bp, Homo sapien
tttgggcagctggtcaaaggtgact

SEQ ID NO: 5244449 - DNA, 25 bp, Homo sapien
gatgtaggcactgagcattagctgc

SEQ ID NO: 5244450 - DNA, 25 bp, Homo sapien
gagaacagaggaacgttgacactac

SEQ ID NO: 5244451 - DNA, 25 bp, Homo sapien
tgacactacgtggatggcattagca

SEQ ID NO: 5244452 - DNA, 25 bp, Homo sapien
aaagggcgagcagtgtagatttcca

SEQ ID NO: 5244453 - DNA, 25 bp, Homo sapien
taaccaaaggtgtgttcttgcctcc

SEQ ID NO: 5244454 - DNA, 25 bp, Homo sapien
ttgtgacgcctcttaaagcaaagca

SEQ ID NO: 5244455 - DNA, 25 bp, Homo sapien
tacacctggaacaaacaaggagttg

SEQ ID NO: 5244456 - DNA, 25 bp, Homo sapien
cagaagagggctagcttgtttggtc

SEQ ID NO: 5244457 - DNA, 25 bp, Homo sapien
tgaatgatgcctgcacaaacaaaaa

SEQ ID NO: 5244458 - DNA, 25 bp, Homo sapien
agagatgggcaaaaactttcccctg

SEQ ID NO: 5244459 - DNA, 25 bp, Homo sapien
agaacttcccaacagcaaggactat

SEQ ID NO: 5244460 - DNA, 25 bp, Homo sapien
tacttgcaagtatctgcgttgtgaa

SEQ ID NO: 5244461 - DNA, 25 bp, Homo sapien
gaagctgtagatctcccttcattcc

SEQ ID NO: 5244462 - DNA, 25 bp, Homo sapien
aggaagctgtagatctcccttcatt

SEQ ID NO: 5244463 - DNA, 25 bp, Homo sapien
ggaagctgtagatctcccttcattc

SEQ ID NO: 5244464 - DNA, 25 bp, Homo sapien
agctgtagatctcccttcattcctg

SEQ ID NO: 5244465 - DNA, 25 bp, Homo sapien
gctgaagatctatcatcaaataatc

SEQ ID NO: 5244466 - DNA, 25 bp, Homo sapien
ccctgaagtctggaattgctgaaga

SEQ ID NO: 5244467 - DNA, 25 bp, Homo sapien
tatcatcaaataatcctagccaaat

SEQ ID NO: 5244468 - DNA, 25 bp, Homo sapien
cactttttgtggatccctgaagtct

SEQ ID NO: 5244469 - DNA, 25 bp, Homo sapien
taaataggtgtgctttgtgcaccag

SEQ ID NO: 5244470 - DNA, 25 bp, Homo sapien
gcaatcctgacctctaggtgtggga

SEQ ID NO: 5244471 - DNA, 25 bp, Homo sapien
catagctactctgctttgacatgga

SEQ ID NO: 5244472 - DNA, 25 bp, Homo sapien
tacacatggatgttaaccacagtcc

SEQ ID NO: 5244473 - DNA, 25 bp, Homo sapien
gactttggcttgttctggcgggaca

SEQ ID NO: 5244474 - DNA, 25 bp, Homo sapien
tgacctcaggtgtgctgcttgtgct

SEQ ID NO: 5244475 - DNA, 25 bp, Homo sapien
cctgaaatagatgcatgaactgatg

SEQ ID NO: 5244476 - DNA, 25 bp, Homo sapien
gcagtgttggtgcagaatcccctaa

SEQ ID NO: 5244477 - DNA, 25 bp, Homo sapien
aattggctgtagctgttgactgagg

SEQ ID NO: 5244478 - DNA, 25 bp, Homo sapien
catgactgttgaaatgtgcaaagtt

SEQ ID NO: 5244479 - DNA, 25 bp, Homo sapien
tgctgcccttgagaacgacctacaa

SEQ ID NO: 5244480 - DNA, 25 bp, Homo sapien
caaagatgtctgagccgagatcact

SEQ ID NO: 5244481 - DNA, 25 bp, Homo sapien
tttctgaacccaataatgaccccac

SEQ ID NO: 5244482 - DNA, 25 bp, Homo sapien
tcagcctgaatgctcacatgaagac

SEQ ID NO: 5244483 - DNA, 25 bp, Homo sapien
tactccaaggcaaaacgtcaaaaga

SEQ ID NO: 5244484 - DNA, 25 bp, Homo sapien
taatggttccatcagtcgtatcaaa

SEQ ID NO: 5244485 - DNA, 25 bp, Homo sapien
acaaatgtctcaccatggtcatata

SEQ ID NO: 5244486 - DNA, 25 bp, Homo sapien
aaatgtctcaccatggtcatatata

SEQ ID NO: 5244487 - DNA, 25 bp, Homo sapien
caaatgtctcaccatggtcatatat

SEQ ID NO: 5244488 - DNA, 25 bp, Homo sapien
tcagattttaaaccctaccagcatg

SEQ ID NO: 5244489 - DNA, 25 bp, Homo sapien
tatatgacctcaagcacagtactat

SEQ ID NO: 5244490 - DNA, 25 bp, Homo sapien
tactgagttataggaaagcagacaa

SEQ ID NO: 5244491 - DNA, 25 bp, Homo sapien
taccagcatgtaacccaattacagg

SEQ ID NO: 5244492 - DNA, 25 bp, Homo sapien
taaatggtaaggaacaacatatgtt

SEQ ID NO: 5244493 - DNA, 25 bp, Homo sapien
ctgtaaatggtaaggaacaacatat

SEQ ID NO: 5244494 - DNA, 25 bp, Homo sapien
aatggtaaggaacaacatatgttaa

SEQ ID NO: 5244495 - DNA, 25 bp, Homo sapien
tgtaaatggtaaggaacaacatatg

SEQ ID NO: 5244496 - DNA, 25 bp, Homo sapien
agtgacttgctgtggggaaacctcc

SEQ ID NO: 5244497 - DNA, 25 bp, Homo sapien
cctccaaaattactcgaaccactag

SEQ ID NO: 5244498 - DNA, 25 bp, Homo sapien
tactcgaaccactagactgtccaaa

SEQ ID NO: 5244499 - DNA, 25 bp, Homo sapien
tgtccaaatgcatcaaagtttgcaa

SEQ ID NO: 5244500 - DNA, 25 bp, Homo sapien
aagctgaagtaaattcaccaaaact

SEQ ID NO: 5244501 - DNA, 25 bp, Homo sapien
gggtatctccacactacctggtttg

SEQ ID NO: 5244502 - DNA, 25 bp, Homo sapien
ggccttggcaacaggtaaagtaaca

SEQ ID NO: 5244503 - DNA, 25 bp, Homo sapien
taagcttttcctagtaccctctcat

SEQ ID NO: 5244504 - DNA, 25 bp, Homo sapien
caatggcttttgactacaagtgacg

SEQ ID NO: 5244505 - DNA, 25 bp, Homo sapien
aattagcaagtgctgcatatttgtc

SEQ ID NO: 5244506 - DNA, 25 bp, Homo sapien
gatgctgtttgatgactctgggaag

SEQ ID NO: 5244507 - DNA, 25 bp, Homo sapien
gaaactttactaacagctgatgctg

SEQ ID NO: 5244508 - DNA, 25 bp, Homo sapien
catatttgtctgcagtctgtaaacc

SEQ ID NO: 5244509 - DNA, 25 bp, Homo sapien
ccaccaagatgttaacggaaaattg

SEQ ID NO: 5244510 - DNA, 25 bp, Homo sapien
caaatcagtccctatgtcttcagtt

SEQ ID NO: 5244511 - DNA, 25 bp, Homo sapien
taaagcacgccttctaggacaaaat

SEQ ID NO: 5244512 - DNA, 25 bp, Homo sapien
caactgagaaaagtgtagcatgttc

SEQ ID NO: 5244513 - DNA, 25 bp, Homo sapien
gaaccaacaggagctttacctgtgg

SEQ ID NO: 5244514 - DNA, 25 bp, Homo sapien
acaggagctttacctgtggtcccaa

SEQ ID NO: 5244515 - DNA, 25 bp, Homo sapien
cagaaccaacaggagctttacctgt

SEQ ID NO: 5244516 - DNA, 25 bp, Homo sapien
ccaacaggagctttacctgtggtcc

SEQ ID NO: 5244517 - DNA, 25 bp, Homo sapien
gaagatgcacttgactgactgggaa

SEQ ID NO: 5244518 - DNA, 25 bp, Homo sapien
gctgcagaactgaaaacgctgtcta

SEQ ID NO: 5244519 - DNA, 25 bp, Homo sapien
agagctgcatacttgtctgaagatg

SEQ ID NO: 5244520 - DNA, 25 bp, Homo sapien
tatacgcattactggaggtggctgc

SEQ ID NO: 5244521 - DNA, 25 bp, Homo sapien
caggcacacttgatgaagcaggctg

SEQ ID NO: 5244522 - DNA, 25 bp, Homo sapien
gaagatgccacagaaggaccagcag

SEQ ID NO: 5244523 - DNA, 25 bp, Homo sapien
tagaagatgccacagaaggaccagc

SEQ ID NO: 5244524 - DNA, 25 bp, Homo sapien
tggtctgaaatgggtttgtagaaga

SEQ ID NO: 5244525 - DNA, 25 bp, Homo sapien
tttgtagaagatgccacagaaggac

SEQ ID NO: 5244526 - DNA, 25 bp, Homo sapien
tgggcttccctacctgaaaaatgaa

SEQ ID NO: 5244527 - DNA, 25 bp, Homo sapien
taaacgttctgtggagtctcatctc

SEQ ID NO: 5244528 - DNA, 25 bp, Homo sapien
gctgacattccaagatactggcaaa

SEQ ID NO: 5244529 - DNA, 25 bp, Homo sapien
cattaagactgcatgagtgacaacc

SEQ ID NO: 5244530 - DNA, 25 bp, Homo sapien
tcacagtgttaacatgtgttttttg

SEQ ID NO: 5244531 - DNA, 25 bp, Homo sapien
ctaggatcaaagggtacctcaaaat

SEQ ID NO: 5244532 - DNA, 25 bp, Homo sapien
taggaaggactccaggtgtctgcca

SEQ ID NO: 5244533 - DNA, 25 bp, Homo sapien
gttcactgtaatttcgacctcctag

SEQ ID NO: 5244534 - DNA, 25 bp, Homo sapien
caaatttttgtgcagatctatgttt

SEQ ID NO: 5244535 - DNA, 25 bp, Homo sapien
taatagtggcactctgttaggttat

SEQ ID NO: 5244536 - DNA, 25 bp, Homo sapien
ttcattcctctttggtatattccta

SEQ ID NO: 5244537 - DNA, 25 bp, Homo sapien
cactctgttaggttatatggtaact

SEQ ID NO: 5244538 - DNA, 25 bp, Homo sapien
gacttttagccaacagtgactgtta

SEQ ID NO: 5244539 - DNA, 25 bp, Homo sapien
attcacagggatgtacaaccaccat

SEQ ID NO: 5244540 - DNA, 25 bp, Homo sapien
tggtcctgaactgctctaaactttt

SEQ ID NO: 5244541 - DNA, 25 bp, Homo sapien
tattaatcactatacctcagtctgc

SEQ ID NO: 5244542 - DNA, 25 bp, Homo sapien
aaatgagcgtgaggaaacacttgag

SEQ ID NO: 5244543 - DNA, 25 bp, Homo sapien
aaaatgagcgtgaggaaacacttga

SEQ ID NO: 5244544 - DNA, 25 bp, Homo sapien
gcagctttgtaactacagccagaga

SEQ ID NO: 5244545 - DNA, 25 bp, Homo sapien
tttaaaccgctgaagaatagttcgc

SEQ ID NO: 5244546 - DNA, 25 bp, Homo sapien
tagttagttacaggcagaccactca

SEQ ID NO: 5244547 - DNA, 25 bp, Homo sapien
gaagggctgatcagttacatacaac

SEQ ID NO: 5244548 - DNA, 25 bp, Homo sapien
cactaaagctggtgggaagactgta

SEQ ID NO: 5244549 - DNA, 25 bp, Homo sapien
caggagtgccgaatcctgtgggcat

SEQ ID NO: 5244550 - DNA, 25 bp, Homo sapien
catggatgcagtgccaaaggttgcc

SEQ ID NO: 5244551 - DNA, 25 bp, Homo sapien
gccgaatcctgtgggcatgctcatg

SEQ ID NO: 5244552 - DNA, 25 bp, Homo sapien
tcccataaattgtaacctgctcaca

SEQ ID NO: 5244553 - DNA, 25 bp, Homo sapien
gatgctctttacatagtcactgatt

SEQ ID NO: 5244554 - DNA, 25 bp, Homo sapien
tctgaggtccaaatcaccaaaggct

SEQ ID NO: 5244555 - DNA, 25 bp, Homo sapien
gaacttacagctcgccaaatgttag

SEQ ID NO: 5244556 - DNA, 25 bp, Homo sapien
gacgagcttgtgactatttggaaca

SEQ ID NO: 5244557 - DNA, 25 bp, Homo sapien
aggctgtgcagacaacacaatgatt

SEQ ID NO: 5244558 - DNA, 25 bp, Homo sapien
caatctcctggactcgactgatcca

SEQ ID NO: 5244559 - DNA, 25 bp, Homo sapien
cattcagctctttcattctaacttg

SEQ ID NO: 5244560 - DNA, 25 bp, Homo sapien
tttgtttgtccaaatgctgcaaaac

SEQ ID NO: 5244561 - DNA, 25 bp, Homo sapien
ttactactggctttgtttgtccaaa

SEQ ID NO: 5244562 - DNA, 25 bp, Homo sapien
agcagctgcaacttgaccaaaaggg

SEQ ID NO: 5244563 - DNA, 25 bp, Homo sapien
aaaggattactagatactccagcag

SEQ ID NO: 5244564 - DNA, 25 bp, Homo sapien
gatgagcttcctgttggaaattgtc

SEQ ID NO: 5244565 - DNA, 25 bp, Homo sapien
atgagcttcctgttggaaattgtcc

SEQ ID NO: 5244566 - DNA, 25 bp, Homo sapien
tattatgcagacaggtatccctcta

SEQ ID NO: 5244567 - DNA, 25 bp, Homo sapien
tatatgacagcaccttaaaagtggc

SEQ ID NO: 5244568 - DNA, 25 bp, Homo sapien
tactggagccctcggttttgcacat

SEQ ID NO: 5244569 - DNA, 25 bp, Homo sapien
gtgaccacataaaagttcgttccag

SEQ ID NO: 5244570 - DNA, 25 bp, Homo sapien
aaaactgaggtgcaataatgtcaca

SEQ ID NO: 5244571 - DNA, 25 bp, Homo sapien
ttggtaaaggcattgcagcaagaac

SEQ ID NO: 5244572 - DNA, 25 bp, Homo sapien
tggcatattcctgaatgtagcagtc

SEQ ID NO: 5244573 - DNA, 25 bp, Homo sapien
caagactgccagattacctctagat

SEQ ID NO: 5244574 - DNA, 25 bp, Homo sapien
ggtagcggtccttacactaatggcc

SEQ ID NO: 5244575 - DNA, 25 bp, Homo sapien
tggccttggacagtgtatgctctca

SEQ ID NO: 5244576 - DNA, 25 bp, Homo sapien
cacatgaatcaactgggacccgata

SEQ ID NO: 5244577 - DNA, 25 bp, Homo sapien
taaaagaagaggcatactgctcaga

SEQ ID NO: 5244578 - DNA, 25 bp, Homo sapien
gatgtgactaaaccagtaagccagg

SEQ ID NO: 5244579 - DNA, 25 bp, Homo sapien
taaggttctgaaactaaaatgctcc

SEQ ID NO: 5244580 - DNA, 25 bp, Homo sapien
tccatgttgccaattgacaggaact

SEQ ID NO: 5244581 - DNA, 25 bp, Homo sapien
ggtacagtggtaaaccagcagccag

SEQ ID NO: 5244582 - DNA, 25 bp, Homo sapien
tacagccctgtgttggacaagcaca

SEQ ID NO: 5244583 - DNA, 25 bp, Homo sapien
tgttccccagagcaaaaagctgcca

SEQ ID NO: 5244584 - DNA, 25 bp, Homo sapien
tagtggccaccttaagagtacatgc

SEQ ID NO: 5244585 - DNA, 25 bp, Homo sapien
cagattaaatacctcagtgcccagt

SEQ ID NO: 5244586 - DNA, 25 bp, Homo sapien
gatcatacctacacagctggtgagc

SEQ ID NO: 5244587 - DNA, 25 bp, Homo sapien
taaggaaaggcacgataccaacaaa

SEQ ID NO: 5244588 - DNA, 25 bp, Homo sapien
gccccaagccatgcactttttagag

SEQ ID NO: 5244589 - DNA, 25 bp, Homo sapien
tctgagctccaaaccatgaggaatc

SEQ ID NO: 5244590 - DNA, 25 bp, Homo sapien
gatagcaaaacctgtgctcttccaa

SEQ ID NO: 5244591 - DNA, 25 bp, Homo sapien
catggtgatagcaaaacctgtgctc

SEQ ID NO: 5244592 - DNA, 25 bp, Homo sapien
tgacttcatggtgatagcaaaacct

SEQ ID NO: 5244593 - DNA, 25 bp, Homo sapien
ccagtgactgacttcatggtgatag

SEQ ID NO: 5244594 - DNA, 25 bp, Homo sapien
tagttaggacagagaccatatcacc

SEQ ID NO: 5244595 - DNA, 25 bp, Homo sapien
aaaagtttgcagaccgctgtacagg

SEQ ID NO: 5244596 - DNA, 25 bp, Homo sapien
caagcatattttggtggcagagggc

SEQ ID NO: 5244597 - DNA, 25 bp, Homo sapien
tctttaatatcaggaaccactgcgg

SEQ ID NO: 5244598 - DNA, 25 bp, Homo sapien
gcctggtcagaaaggaattactcct

SEQ ID NO: 5244599 - DNA, 25 bp, Homo sapien
caagctataaagacagaacactcag

SEQ ID NO: 5244600 - DNA, 25 bp, Homo sapien
aattgagaatgagttacgggaggcc

SEQ ID NO: 5244601 - DNA, 25 bp, Homo sapien
cctgtgttcaggcaacaagctataa

SEQ ID NO: 5244602 - DNA, 25 bp, Homo sapien
ctccacaaccacagcaacccatggt

SEQ ID NO: 5244603 - DNA, 25 bp, Homo sapien
aacctccacaaccacagcaacccat

SEQ ID NO: 5244604 - DNA, 25 bp, Homo sapien
acaacctccacaaccacagcaaccc

SEQ ID NO: 5244605 - DNA, 25 bp, Homo sapien
cacaaccacagcaacccatggtgtc

SEQ ID NO: 5244606 - DNA, 25 bp, Homo sapien
ttaagcagagccttgccagcaggag

SEQ ID NO: 5244607 - DNA, 25 bp, Homo sapien
tatctggttatcaccggctgctcgg

SEQ ID NO: 5244608 - DNA, 25 bp, Homo sapien
gaaatccaggactgactatttagga

SEQ ID NO: 5244609 - DNA, 25 bp, Homo sapien
gaaggacaaagcacaaggcacatga

SEQ ID NO: 5244610 - DNA, 25 bp, Homo sapien
cagaggccgggggcccgcctagcag

SEQ ID NO: 5244611 - DNA, 25 bp, Homo sapien
agaggccgggggcccgcctagcagc

SEQ ID NO: 5244612 - DNA, 25 bp, Homo sapien
aggccgggggcccgcctagcagcag

SEQ ID NO: 5244613 - DNA, 25 bp, Homo sapien
ccagaggccgggggcccgcctagca

SEQ ID NO: 5244614 - DNA, 25 bp, Homo sapien
gctcttcatacaatatacatgagat

SEQ ID NO: 5244615 - DNA, 25 bp, Homo sapien
aacctagcctcaaaatagcagtcag

SEQ ID NO: 5244616 - DNA, 25 bp, Homo sapien
tccatggctaccactctgttctgag

SEQ ID NO: 5244617 - DNA, 25 bp, Homo sapien
catggattattgcaagaccttctaa

SEQ ID NO: 5244618 - DNA, 25 bp, Homo sapien
ttttgtatcccctgatacttcaatg

SEQ ID NO: 5244619 - DNA, 25 bp, Homo sapien
gatacttcaatgtttccgaatcctt

SEQ ID NO: 5244620 - DNA, 25 bp, Homo sapien
tatcccctgatacttcaatgtttcc

SEQ ID NO: 5244621 - DNA, 25 bp, Homo sapien
cccctgatacttcaatgtttccgaa

SEQ ID NO: 5244622 - DNA, 25 bp, Homo sapien
agttctcactttaagtaggtacttg

SEQ ID NO: 5244623 - DNA, 25 bp, Homo sapien
tctagttctcactttaagtaggtac

SEQ ID NO: 5244624 - DNA, 25 bp, Homo sapien
ctggtgtttcctctagttctcactt

SEQ ID NO: 5244625 - DNA, 25 bp, Homo sapien
ctagttctcactttaagtaggtact

SEQ ID NO: 5244626 - DNA, 25 bp, Homo sapien
ctgttcggaagtaactccaatcaat

SEQ ID NO: 5244627 - DNA, 25 bp, Homo sapien
ttcggaagtaactccaatcaatgca

SEQ ID NO: 5244628 - DNA, 25 bp, Homo sapien
gttcggaagtaactccaatcaatgc

SEQ ID NO: 5244629 - DNA, 25 bp, Homo sapien
tgttcggaagtaactccaatcaatg

SEQ ID NO: 5244630 - DNA, 25 bp, Homo sapien
tttctaccaatgcccaaaaagagca

SEQ ID NO: 5244631 - DNA, 25 bp, Homo sapien
cttttctaccaatgcccaaaaagag

SEQ ID NO: 5244632 - DNA, 25 bp, Homo sapien
ttttctaccaatgcccaaaaagagc

SEQ ID NO: 5244633 - DNA, 25 bp, Homo sapien
tatacagcgtggtcagccccgagca

SEQ ID NO: 5244634 - DNA, 25 bp, Homo sapien
atatacagcgtggtcagccccgagc

SEQ ID NO: 5244635 - DNA, 25 bp, Homo sapien
ctacatatacagcgtggtcagcccc

SEQ ID NO: 5244636 - DNA, 25 bp, Homo sapien
acatatacagcgtggtcagccccga

SEQ ID NO: 5244637 - DNA, 25 bp, Homo sapien
gattacgtccgctacaagccagtca

SEQ ID NO: 5244638 - DNA, 25 bp, Homo sapien
gaccgtgcaggttgtagagttcttc

SEQ ID NO: 5244639 - DNA, 25 bp, Homo sapien
tttggccaaggagtgaagaccgtgc

SEQ ID NO: 5244640 - DNA, 25 bp, Homo sapien
gttcttctacgggatggtcactgcc

SEQ ID NO: 5244641 - DNA, 25 bp, Homo sapien
cagataggcgccgataattggccag

SEQ ID NO: 5244642 - DNA, 25 bp, Homo sapien
ataattggccagtgccagcagttcc

SEQ ID NO: 5244643 - DNA, 25 bp, Homo sapien
taggcgccgataattggccagtgcc

SEQ ID NO: 5244644 - DNA, 25 bp, Homo sapien
ccgataattggccagtgccagcagt

SEQ ID NO: 5244645 - DNA, 25 bp, Homo sapien
ctgtacattccccttatagaaagtg

SEQ ID NO: 5244646 - DNA, 25 bp, Homo sapien
tacattccccttatagaaagtgaaa

SEQ ID NO: 5244647 - DNA, 25 bp, Homo sapien
acccactgtacattccccttataga

SEQ ID NO: 5244648 - DNA, 25 bp, Homo sapien
tcatcctccacccactgtacattcc

SEQ ID NO: 5244649 - DNA, 25 bp, Homo sapien
agggcattctcaggctcagtaaatc

SEQ ID NO: 5244650 - DNA, 25 bp, Homo sapien
aggacagggatttgagaaggtctac

SEQ ID NO: 5244651 - DNA, 25 bp, Homo sapien
tattttggtagtctagaaattcaga

SEQ ID NO: 5244652 - DNA, 25 bp, Homo sapien
aaagggcattctcaggctcagtaaa

SEQ ID NO: 5244653 - DNA, 25 bp, Homo sapien
tgacttatacgagctggatgatgac

SEQ ID NO: 5244654 - DNA, 25 bp, Homo sapien
aacttaacggtttcaggctccagca

SEQ ID NO: 5244655 - DNA, 25 bp, Homo sapien
gcgtctccacgctctgaaagatggt

SEQ ID NO: 5244656 - DNA, 25 bp, Homo sapien
ttctctcttccacggccacagaagc

SEQ ID NO: 5244657 - DNA, 25 bp, Homo sapien
gaccccgcacctcagtccagaagca

SEQ ID NO: 5244658 - DNA, 25 bp, Homo sapien
agagccaggccggccgcctagcagc

SEQ ID NO: 5244659 - DNA, 25 bp, Homo sapien
ccccgcacctcagtccagaagcaga

SEQ ID NO: 5244660 - DNA, 25 bp, Homo sapien
cagagccaggccggccgcctagcag

SEQ ID NO: 5244661 - DNA, 25 bp, Homo sapien
ttcaaagagggggttatagagtcca

SEQ ID NO: 5244662 - DNA, 25 bp, Homo sapien
gagcaagtccctggacacccaggtg

SEQ ID NO: 5244663 - DNA, 25 bp, Homo sapien
tcaaagagggggttatagagtccaa

SEQ ID NO: 5244664 - DNA, 25 bp, Homo sapien
agggaagtgccgatctcaagagatg

SEQ ID NO: 5244665 - DNA, 25 bp, Homo sapien
cattgcggtccggtcatggtgcatc

SEQ ID NO: 5244666 - DNA, 25 bp, Homo sapien
gcagccccgtgctggcattgcggtc

SEQ ID NO: 5244667 - DNA, 25 bp, Homo sapien
tgtggaaatacctgagggaagtgcc

SEQ ID NO: 5244668 - DNA, 25 bp, Homo sapien
gggcacttctttctaatatggactc

SEQ ID NO: 5244669 - DNA, 25 bp, Homo sapien
gactctaaagaatcccaaggtggcg

SEQ ID NO: 5244670 - DNA, 25 bp, Homo sapien
tatcacatggtcagagggctaaggc

SEQ ID NO: 5244671 - DNA, 25 bp, Homo sapien
tcattcatgagcacagagcccttat

SEQ ID NO: 5244672 - DNA, 25 bp, Homo sapien
tatacggaggccttgccctgatgtg

SEQ ID NO: 5244673 - DNA, 25 bp, Homo sapien
tatatgtggccagacttacaaggtt

SEQ ID NO: 5244674 - DNA, 25 bp, Homo sapien
aaagggattttcatagtggcgggca

SEQ ID NO: 5244675 - DNA, 25 bp, Homo sapien
gggtgggccccagtacataaagcca

SEQ ID NO: 5244676 - DNA, 25 bp, Homo sapien
aatagtgtgacagctgtttaccaaa

SEQ ID NO: 5244677 - DNA, 25 bp, Homo sapien
aacactgctggaaaggatacctaag

SEQ ID NO: 5244678 - DNA, 25 bp, Homo sapien
gtttaccaaatcaatgtcgctgccg

SEQ ID NO: 5244679 - DNA, 25 bp, Homo sapien
ggttgggactttcggagtgcttcaa

SEQ ID NO: 5244680 - DNA, 25 bp, Homo sapien
gctacactctgagccgcgtgaggag

SEQ ID NO: 5244681 - DNA, 25 bp, Homo sapien
catgattcccgtaaagtgccagcac

SEQ ID NO: 5244682 - DNA, 25 bp, Homo sapien
cgtgctgggattcacccaagtgggt

SEQ ID NO: 5244683 - DNA, 25 bp, Homo sapien
tcggtcttagcagtgtcgcctctct

SEQ ID NO: 5244684 - DNA, 25 bp, Homo sapien
gacactcccttctgtaggtaagaat

SEQ ID NO: 5244685 - DNA, 25 bp, Homo sapien
aagagcgcctggatccatccgacag

SEQ ID NO: 5244686 - DNA, 25 bp, Homo sapien
ggacgcccggattcgcatatgcaaa

SEQ ID NO: 5244687 - DNA, 25 bp, Homo sapien
cggcaagtgagcgatttggtgaaca

SEQ ID NO: 5244688 - DNA, 25 bp, Homo sapien
gaaattcctgtgctcgtctacacat

SEQ ID NO: 5244689 - DNA, 25 bp, Homo sapien
agtgtcactgacagaaattcctgtg

SEQ ID NO: 5244690 - DNA, 25 bp, Homo sapien
cactgacagaaattcctgtgctcgt

SEQ ID NO: 5244691 - DNA, 25 bp, Homo sapien
gacagaaattcctgtgctcgtctac

SEQ ID NO: 5244692 - DNA, 25 bp, Homo sapien
ctactgacaccatgggttgctgtgg

SEQ ID NO: 5244693 - DNA, 25 bp, Homo sapien
tctctactgacaccatgggttgctg

SEQ ID NO: 5244694 - DNA, 25 bp, Homo sapien
tctactgacaccatgggttgctgtg

SEQ ID NO: 5244695 - DNA, 25 bp, Homo sapien
tcctctctactgacaccatgggttg

SEQ ID NO: 5244696 - DNA, 25 bp, Homo sapien
cttctcttgcattctgcagacacca

SEQ ID NO: 5244697 - DNA, 25 bp, Homo sapien
ttctcttgcattctgcagacaccac

SEQ ID NO: 5244698 - DNA, 25 bp, Homo sapien
gctggagcagcagcccacccggtag

SEQ ID NO: 5244699 - DNA, 25 bp, Homo sapien
agcccccacagcagccgcggcagca

SEQ ID NO: 5244700 - DNA, 25 bp, Homo sapien
ggagcagcagcccacccggtagcac

SEQ ID NO: 5244701 - DNA, 25 bp, Homo sapien
agctggagcagcagcccacccggta

SEQ ID NO: 5244702 - DNA, 25 bp, Homo sapien
tgcggcggcagcagcagatcacagg

SEQ ID NO: 5244703 - DNA, 25 bp, Homo sapien
gcggcagcagcagatcacaggtgtg

SEQ ID NO: 5244704 - DNA, 25 bp, Homo sapien
cggcggcagcagcagatcacaggtg

SEQ ID NO: 5244705 - DNA, 25 bp, Homo sapien
gagccgcaggtgcggcggcagcagc

SEQ ID NO: 5244706 - DNA, 25 bp, Homo sapien
ggcagcagcctttctgctggcaaca

SEQ ID NO: 5244707 - DNA, 25 bp, Homo sapien
agcctttctgctggcaacagccctt

SEQ ID NO: 5244708 - DNA, 25 bp, Homo sapien
tgcttctggcagcagcctttctgct

SEQ ID NO: 5244709 - DNA, 25 bp, Homo sapien
agcagcctttctgctggcaacagcc

SEQ ID NO: 5244710 - DNA, 25 bp, Homo sapien
catcttcccagaggccgggggcccg

SEQ ID NO: 5244711 - DNA, 25 bp, Homo sapien
gcagcatcttcccagaggccggggg

SEQ ID NO: 5244712 - DNA, 25 bp, Homo sapien
ctgcagcatcttcccagaggccggg

SEQ ID NO: 5244713 - DNA, 25 bp, Homo sapien
agcatcttcccagaggccgggggcc

SEQ ID NO: 5244714 - DNA, 25 bp, Homo sapien
caacaccacggagaagtcttctgtc

SEQ ID NO: 5244715 - DNA, 25 bp, Homo sapien
tggctgccaacaccacggagaagtc

SEQ ID NO: 5244716 - DNA, 25 bp, Homo sapien
ccacggagaagtcttctgtcccttt

SEQ ID NO: 5244717 - DNA, 25 bp, Homo sapien
gccaacaccacggagaagtcttctg

SEQ ID NO: 5244718 - DNA, 25 bp, Homo sapien
tgtggacccaaaccaaaggaactgc

SEQ ID NO: 5244719 - DNA, 25 bp, Homo sapien
taacggctccatatcaacacgacag

SEQ ID NO: 5244720 - DNA, 25 bp, Homo sapien
gaatggaaacggtgtctgcctctgc

SEQ ID NO: 5244721 - DNA, 25 bp, Homo sapien
caaattggcatgaccgaatggaaac

SEQ ID NO: 5244722 - DNA, 25 bp, Homo sapien
ttccaagctggccacatgtaaggga

SEQ ID NO: 5244723 - DNA, 25 bp, Homo sapien
tgatttgcctctgtcgtgcggatct

SEQ ID NO: 5244724 - DNA, 25 bp, Homo sapien
tgtgatttcaactggcacaaaaatc

SEQ ID NO: 5244725 - DNA, 25 bp, Homo sapien
cttgagtgagtgatggtagatgaat

SEQ ID NO: 5244726 - DNA, 25 bp, Homo sapien
aggtgcccattaggagtgaacccaa

SEQ ID NO: 5244727 - DNA, 25 bp, Homo sapien
aaaaggcaccaatctgcttggagtc

SEQ ID NO: 5244728 - DNA, 25 bp, Homo sapien
ggagtgaacccaaccctagaagcag

SEQ ID NO: 5244729 - DNA, 25 bp, Homo sapien
gcccaggccaaaaggcaccaatctg

SEQ ID NO: 5244730 - DNA, 25 bp, Homo sapien
gttttggttgagattctgaggctaa

SEQ ID NO: 5244731 - DNA, 25 bp, Homo sapien
aggctaactgcactacattgaggag

SEQ ID NO: 5244732 - DNA, 25 bp, Homo sapien
tctgaggctaactgcactacattga

SEQ ID NO: 5244733 - DNA, 25 bp, Homo sapien
cctgagatggcaaatggatgccgat

SEQ ID NO: 5244734 - DNA, 25 bp, Homo sapien
ccttttttcacctactgagagttca

SEQ ID NO: 5244735 - DNA, 25 bp, Homo sapien
tttcacctactgagagttcattaca

SEQ ID NO: 5244736 - DNA, 25 bp, Homo sapien
gttcactccttttttcacctactga

SEQ ID NO: 5244737 - DNA, 25 bp, Homo sapien
cctactgagagttcattacattcat

SEQ ID NO: 5244738 - DNA, 25 bp, Homo sapien
cacgcagagggctgaaataattttc

SEQ ID NO: 5244739 - DNA, 25 bp, Homo sapien
gattcacgcagagggctgaaataat

SEQ ID NO: 5244740 - DNA, 25 bp, Homo sapien
tcacgcagagggctgaaataatttt

SEQ ID NO: 5244741 - DNA, 25 bp, Homo sapien
ctgagattcacgcagagggctgaaa

SEQ ID NO: 5244742 - DNA, 25 bp, Homo sapien
caaagaacagatctgctcagtgttg

SEQ ID NO: 5244743 - DNA, 25 bp, Homo sapien
cagtgttgagtacccagttctttgg

SEQ ID NO: 5244744 - DNA, 25 bp, Homo sapien
gatctgctcagtgttgagtacccag

SEQ ID NO: 5244745 - DNA, 25 bp, Homo sapien
gaacagatctgctcagtgttgagta

SEQ ID NO: 5244746 - DNA, 25 bp, Homo sapien
aggtggagtagcagcactgacatca

SEQ ID NO: 5244747 - DNA, 25 bp, Homo sapien
ggagcaaactcttggtacagcacat

SEQ ID NO: 5244748 - DNA, 25 bp, Homo sapien
caggagcaaactcttggtacagcac

SEQ ID NO: 5244749 - DNA, 25 bp, Homo sapien
cttctgattcgccgcagaggtggag

SEQ ID NO: 5244750 - DNA, 25 bp, Homo sapien
tgaataaacttatcctgtgattggt

SEQ ID NO: 5244751 - DNA, 25 bp, Homo sapien
aggtattggatccacatgaataaac

SEQ ID NO: 5244752 - DNA, 25 bp, Homo sapien
catgaataaacttatcctgtgattg

SEQ ID NO: 5244753 - DNA, 25 bp, Homo sapien
aaaagtgaaaggtattggatccaca

SEQ ID NO: 5244754 - DNA, 25 bp, Homo sapien
taggatgaagaatacggtctgtgta

SEQ ID NO: 5244755 - DNA, 25 bp, Homo sapien
tgtgtatccaagacagcagtcaaag

SEQ ID NO: 5244756 - DNA, 25 bp, Homo sapien
tgccgtgtgaagcccacaataaatt

SEQ ID NO: 5244757 - DNA, 25 bp, Homo sapien
tgaagaatacggtctgtgtatccaa

SEQ ID NO: 5244758 - DNA, 25 bp, Homo sapien
agcattgatgtcacagccttcattg

SEQ ID NO: 5244759 - DNA, 25 bp, Homo sapien
ggatttgcgcacacagacaactttt

SEQ ID NO: 5244760 - DNA, 25 bp, Homo sapien
gcacaatatatttcacccaagtctg

SEQ ID NO: 5244761 - DNA, 25 bp, Homo sapien
gaggagacgcacaatatatttcacc

SEQ ID NO: 5244762 - DNA, 25 bp, Homo sapien
acccaagtctgttttggatttgcgc

SEQ ID NO: 5244763 - DNA, 25 bp, Homo sapien
gctggtgttaggtgccttctgtcca

SEQ ID NO: 5244764 - DNA, 25 bp, Homo sapien
ccaagttcagtatctatggcatgct

SEQ ID NO: 5244765 - DNA, 25 bp, Homo sapien
ttgaggtttagagaggatggccctt

SEQ ID NO: 5244766 - DNA, 25 bp, Homo sapien
catctttgcaacaagaatcaggcag

SEQ ID NO: 5244767 - DNA, 25 bp, Homo sapien
aaagtgtaagtaatgacaaggtgac

SEQ ID NO: 5244768 - DNA, 25 bp, Homo sapien
aagtaatgacaaggtgactgcatgg

SEQ ID NO: 5244769 - DNA, 25 bp, Homo sapien
gaagaaaagtgtaagtaatgacaag

SEQ ID NO: 5244770 - DNA, 25 bp, Homo sapien
gtgtaagtaatgacaaggtgactgc

SEQ ID NO: 5244771 - DNA, 25 bp, Homo sapien
cactaaaccctccatgatgtgcaag

SEQ ID NO: 5244772 - DNA, 25 bp, Homo sapien
gatgtgcaagtgaaacctccaaccc

SEQ ID NO: 5244773 - DNA, 25 bp, Homo sapien
cagtgaggcacaaattagataagca

SEQ ID NO: 5244774 - DNA, 25 bp, Homo sapien
tgggctatgtccaattccattccag

SEQ ID NO: 5244775 - DNA, 25 bp, Homo sapien
cactaagaactctctgaatagtcat

SEQ ID NO: 5244776 - DNA, 25 bp, Homo sapien
gcagccactaagaactctctgaata

SEQ ID NO: 5244777 - DNA, 25 bp, Homo sapien
gctggttagcaaggcagccactaag

SEQ ID NO: 5244778 - DNA, 25 bp, Homo sapien
gggctccccgctggttagcaaggca

SEQ ID NO: 5244779 - DNA, 25 bp, Homo sapien
aatgagacaaatctgctgccccctg

SEQ ID NO: 5244780 - DNA, 25 bp, Homo sapien
atgagacaaatctgctgccccctga

SEQ ID NO: 5244781 - DNA, 25 bp, Homo sapien
caatgagacaaatctgctgccccct

SEQ ID NO: 5244782 - DNA, 25 bp, Homo sapien
agcaatgagacaaatctgctgcccc

SEQ ID NO: 5244783 - DNA, 25 bp, Homo sapien
tgaatgaatctacattcaatacttt

SEQ ID NO: 5244784 - DNA, 25 bp, Homo sapien
gaatctacattcaatactttcctca

SEQ ID NO: 5244785 - DNA, 25 bp, Homo sapien
aatgaatctacattcaatactttcc

SEQ ID NO: 5244786 - DNA, 25 bp, Homo sapien
tgaatctacattcaatactttcctc

SEQ ID NO: 5244787 - DNA, 25 bp, Homo sapien
taagcctatgaagcactaagcccat

SEQ ID NO: 5244788 - DNA, 25 bp, Homo sapien
tttcaactctcagtactaagcaggc

SEQ ID NO: 5244789 - DNA, 25 bp, Homo sapien
actaagcaggctctttcttcgctgg

SEQ ID NO: 5244790 - DNA, 25 bp, Homo sapien
cgctggatttaagcctatgaagcac

SEQ ID NO: 5244791 - DNA, 25 bp, Homo sapien
tagctattgggggtccagtctctag

SEQ ID NO: 5244792 - DNA, 25 bp, Homo sapien
tcttgatgaggctttctaatccctg

SEQ ID NO: 5244793 - DNA, 25 bp, Homo sapien
tccttcaccaacttcaagggtagca

SEQ ID NO: 5244794 - DNA, 25 bp, Homo sapien
taatccctggattgtagctattggg

SEQ ID NO: 5244795 - DNA, 25 bp, Homo sapien
cccatttcttaaaccctcacactca

SEQ ID NO: 5244796 - DNA, 25 bp, Homo sapien
ccatttcttaaaccctcacactcac

SEQ ID NO: 5244797 - DNA, 25 bp, Homo sapien
ccaactttcctatgaaatccctgat

SEQ ID NO: 5244798 - DNA, 25 bp, Homo sapien
gaaggaccgaaagcaaatcttccaa

SEQ ID NO: 5244799 - DNA, 25 bp, Homo sapien
attctgggtccagggtctttaactg

SEQ ID NO: 5244800 - DNA, 25 bp, Homo sapien
ttccttttcctctgtcgatggattc

SEQ ID NO: 5244801 - DNA, 25 bp, Homo sapien
gagaaatggctgaaaccatggggtt

SEQ ID NO: 5244802 - DNA, 25 bp, Homo sapien
gaaatggctgaaaccatggggttcc

SEQ ID NO: 5244803 - DNA, 25 bp, Homo sapien
agaaatggctgaaaccatggggttc

SEQ ID NO: 5244804 - DNA, 25 bp, Homo sapien
ctccattaactttccttctcaacaa

SEQ ID NO: 5244805 - DNA, 25 bp, Homo sapien
ggagcttctccattaactttccttc

SEQ ID NO: 5244806 - DNA, 25 bp, Homo sapien
ttccttctcaacaatcccctccaaa

SEQ ID NO: 5244807 - DNA, 25 bp, Homo sapien
gcttctccattaactttccttctca

SEQ ID NO: 5244808 - DNA, 25 bp, Homo sapien
tcacaccgaaaaacagtcttcgtcc

SEQ ID NO: 5244809 - DNA, 25 bp, Homo sapien
aaaacagtcttcgtcctctcctttg

SEQ ID NO: 5244810 - DNA, 25 bp, Homo sapien
gatgttcccaagtgcctttccacca

SEQ ID NO: 5244811 - DNA, 25 bp, Homo sapien
aaagctgactcacccttacttgcca

SEQ ID NO: 5244812 - DNA, 25 bp, Homo sapien
ttggaaacggctaaacagcagcggg

SEQ ID NO: 5244813 - DNA, 25 bp, Homo sapien
gaactaccagaggtcgcagcctaaa

SEQ ID NO: 5244814 - DNA, 25 bp, Homo sapien
tagcacactgcgtttcccaaaagga

SEQ ID NO: 5244815 - DNA, 25 bp, Homo sapien
gctaattactactctagggccccag

SEQ ID NO: 5244816 - DNA, 25 bp, Homo sapien
cgggtaataccggagcaggaggctc

SEQ ID NO: 5244817 - DNA, 25 bp, Homo sapien
tggcgggtaataccggagcaggagg

SEQ ID NO: 5244818 - DNA, 25 bp, Homo sapien
ctggcgggtaataccggagcaggag

SEQ ID NO: 5244819 - DNA, 25 bp, Homo sapien
gcgggtaataccggagcaggaggct

SEQ ID NO: 5244820 - DNA, 25 bp, Homo sapien
agtgaccacctaggtttctggcaaa

SEQ ID NO: 5244821 - DNA, 25 bp, Homo sapien
cggcgatgttgaccaagcagttgga

SEQ ID NO: 5244822 - DNA, 25 bp, Homo sapien
gatctctatgcgatacctcatcggc

SEQ ID NO: 5244823 - DNA, 25 bp, Homo sapien
aatattttggacttagagctggcag

SEQ ID NO: 5244824 - DNA, 25 bp, Homo sapien
ttgcatatgatttggctcaccaaag

SEQ ID NO: 5244825 - DNA, 25 bp, Homo sapien
ctgctattcagtagtatcttggaaa

SEQ ID NO: 5244826 - DNA, 25 bp, Homo sapien
cagtagtatcttggaaacttgcata

SEQ ID NO: 5244827 - DNA, 25 bp, Homo sapien
cttggaaacttgcatatgatttggc

SEQ ID NO: 5244828 - DNA, 25 bp, Homo sapien
tctgatcccccagtggaagcttggg

SEQ ID NO: 5244829 - DNA, 25 bp, Homo sapien
agcaggcagttggatctggctgcag

SEQ ID NO: 5244830 - DNA, 25 bp, Homo sapien
agtctgatcccccagtggaagcttg

SEQ ID NO: 5244831 - DNA, 25 bp, Homo sapien
gatcccccagtggaagcttggggct

SEQ ID NO: 5244832 - DNA, 25 bp, Homo sapien
tctatggacttagtctttaattctc

SEQ ID NO: 5244833 - DNA, 25 bp, Homo sapien
tgggaccaagatcaagcaaatctat

SEQ ID NO: 5244834 - DNA, 25 bp, Homo sapien
ccaagatcaagcaaatctatggact

SEQ ID NO: 5244835 - DNA, 25 bp, Homo sapien
tatggacttagtctttaattctcca

SEQ ID NO: 5244836 - DNA, 25 bp, Homo sapien
tgaggcactcctctagctggcaagt

SEQ ID NO: 5244837 - DNA, 25 bp, Homo sapien
agattctgttgtcccgccttcttca

SEQ ID NO: 5244838 - DNA, 25 bp, Homo sapien
ggcagagattctgttgtcccgcctt

SEQ ID NO: 5244839 - DNA, 25 bp, Homo sapien
cctgtgaggcactcctctagctggc

SEQ ID NO: 5244840 - DNA, 25 bp, Homo sapien
aacgtgtgattgctgttctggccga

SEQ ID NO: 5244841 - DNA, 25 bp, Homo sapien
tctgttcgtgaagctgtgagtagag

SEQ ID NO: 5244842 - DNA, 25 bp, Homo sapien
ggatttcttctactaacgcactgac

SEQ ID NO: 5244843 - DNA, 25 bp, Homo sapien
ttctggccgagtttctcttgcaacc

SEQ ID NO: 5244844 - DNA, 25 bp, Homo sapien
gttaagtgcaacattagtcagtggc

SEQ ID NO: 5244845 - DNA, 25 bp, Homo sapien
cccgatttgttaagtgcaacattag

SEQ ID NO: 5244846 - DNA, 25 bp, Homo sapien
attagtcagtggcaatatatgtgct

SEQ ID NO: 5244847 - DNA, 25 bp, Homo sapien
catgagcccgatttgttaagtgcaa

SEQ ID NO: 5244848 - DNA, 25 bp, Homo sapien
tgctgtttgccataccccaaatcac

SEQ ID NO: 5244849 - DNA, 25 bp, Homo sapien
gaagctgctgtttgccataccccaa

SEQ ID NO: 5244850 - DNA, 25 bp, Homo sapien
gctgctgtttgccataccccaaatc

SEQ ID NO: 5244851 - DNA, 25 bp, Homo sapien
gtttgccataccccaaatcactgac

SEQ ID NO: 5244852 - DNA, 25 bp, Homo sapien
gagcttgcacgtccgatcatagctt

SEQ ID NO: 5244853 - DNA, 25 bp, Homo sapien
gtcccagagcttgcacgtccgatca

SEQ ID NO: 5244854 - DNA, 25 bp, Homo sapien
cagagcttgcacgtccgatcatagc

SEQ ID NO: 5244855 - DNA, 25 bp, Homo sapien
ccagagcttgcacgtccgatcatag

SEQ ID NO: 5244856 - DNA, 25 bp, Homo sapien
ttgttgaatgctatggcataaacca

SEQ ID NO: 5244857 - DNA, 25 bp, Homo sapien
ccacattcctgtggccctccagcgt

SEQ ID NO: 5244858 - DNA, 25 bp, Homo sapien
gttgaatgctatggcataaaccaca

SEQ ID NO: 5244859 - DNA, 25 bp, Homo sapien
accacattcctgtggccctccagcg

SEQ ID NO: 5244860 - DNA, 25 bp, Homo sapien
tgacccctgaaggtatggtaacatt

SEQ ID NO: 5244861 - DNA, 25 bp, Homo sapien
aaaggacccagtggcgattttgtca

SEQ ID NO: 5244862 - DNA, 25 bp, Homo sapien
gctgtatgacccctgaaggtatggt

SEQ ID NO: 5244863 - DNA, 25 bp, Homo sapien
gtttccacactccagagtttacaag

SEQ ID NO: 5244864 - DNA, 25 bp, Homo sapien
acttccagtcgccaccaatgtgctt

SEQ ID NO: 5244865 - DNA, 25 bp, Homo sapien
ggtgtaaacttcctcgccattctga

SEQ ID NO: 5244866 - DNA, 25 bp, Homo sapien
tgttgtgtccatacttccagtcgcc

SEQ ID NO: 5244867 - DNA, 25 bp, Homo sapien
cattctgaatgtcccacaatttggc

SEQ ID NO: 5244868 - DNA, 25 bp, Homo sapien
tcagcgtcccacactacaacggtat

SEQ ID NO: 5244869 - DNA, 25 bp, Homo sapien
aggagatgatttcggcagaatgtcc

SEQ ID NO: 5244870 - DNA, 25 bp, Homo sapien
tctcctgaggtgttaaatgacaagg

SEQ ID NO: 5244871 - DNA, 25 bp, Homo sapien
tcaaaagaccccgtgatgattctgt

SEQ ID NO: 5244872 - DNA, 25 bp, Homo sapien
ttagagagcaatcccaattgaatga

SEQ ID NO: 5244873 - DNA, 25 bp, Homo sapien
tgaggcactgctaatctcagcacaa

SEQ ID NO: 5244874 - DNA, 25 bp, Homo sapien
aatctcagcacaatgaccaattaag

SEQ ID NO: 5244875 - DNA, 25 bp, Homo sapien
tgtccatagagccagttaatattag

SEQ ID NO: 5244876 - DNA, 25 bp, Homo sapien
gcagctgtctagtatttcatcatca

SEQ ID NO: 5244877 - DNA, 25 bp, Homo sapien
atcatcatggcctgttaaggttgcc

SEQ ID NO: 5244878 - DNA, 25 bp, Homo sapien
ccagtgtaatcaaagcagctgtcta

SEQ ID NO: 5244879 - DNA, 25 bp, Homo sapien
tcatggcctgttaaggttgccacac

SEQ ID NO: 5244880 - DNA, 25 bp, Homo sapien
gaacgtgacataactcgggcggctg

SEQ ID NO: 5244881 - DNA, 25 bp, Homo sapien
gagatgaacacaccggataacatca

SEQ ID NO: 5244882 - DNA, 25 bp, Homo sapien
gacacaggcatagtttagcatcacg

SEQ ID NO: 5244883 - DNA, 25 bp, Homo sapien
cacgtccagtgatcaaagagatgaa

SEQ ID NO: 5244884 - DNA, 25 bp, Homo sapien
cttgtggcagcactgaaaattcttg

SEQ ID NO: 5244885 - DNA, 25 bp, Homo sapien
tgtggcagcactgaaaattcttgct

SEQ ID NO: 5244886 - DNA, 25 bp, Homo sapien
caccttcatgaccttccagtttggc

SEQ ID NO: 5244887 - DNA, 25 bp, Homo sapien
catgaccttccagtttggcaatgca

SEQ ID NO: 5244888 - DNA, 25 bp, Homo sapien
gatttcatcagtgtgcccctcaaga

SEQ ID NO: 5244889 - DNA, 25 bp, Homo sapien
gatggttcccttgagggttgaaaga

SEQ ID NO: 5244890 - DNA, 25 bp, Homo sapien
gagctgccagttagaagatggttcc

SEQ ID NO: 5244891 - DNA, 25 bp, Homo sapien
gattctagccgttttgtcagagctg

SEQ ID NO: 5244892 - DNA, 25 bp, Homo sapien
caacgcaaggcacaataacaaaaat

SEQ ID NO: 5244893 - DNA, 25 bp, Homo sapien
aaagagctcaggaatgtatgtgctg

SEQ ID NO: 5244894 - DNA, 25 bp, Homo sapien
aatgtatgtgctggcaccaacgcaa

SEQ ID NO: 5244895 - DNA, 25 bp, Homo sapien
tgtgctggcaccaacgcaaggcaca

SEQ ID NO: 5244896 - DNA, 25 bp, Homo sapien
taacatcaatataagaagtgtgagt

SEQ ID NO: 5244897 - DNA, 25 bp, Homo sapien
cataacatcaatataagaagtgtga

SEQ ID NO: 5244898 - DNA, 25 bp, Homo sapien
gcacataacatcaatataagaagtg

SEQ ID NO: 5244899 - DNA, 25 bp, Homo sapien
aggcacataacatcaatataagaag

SEQ ID NO: 5244900 - DNA, 25 bp, Homo sapien
gggccattggtaattaacaacttgc

SEQ ID NO: 5244901 - DNA, 25 bp, Homo sapien
ttttttcacgataccagctagttgt

SEQ ID NO: 5244902 - DNA, 25 bp, Homo sapien
taaatgggctaggttctccgcgcct

SEQ ID NO: 5244903 - DNA, 25 bp, Homo sapien
aagttgacattttctgggccattgg

SEQ ID NO: 5244904 - DNA, 25 bp, Homo sapien
tatcctacaggtattatccttgctg

SEQ ID NO: 5244905 - DNA, 25 bp, Homo sapien
atcctacaggtattatccttgctgc

SEQ ID NO: 5244906 - DNA, 25 bp, Homo sapien
tcaacgccatatcctacaggtatta

SEQ ID NO: 5244907 - DNA, 25 bp, Homo sapien
ccatatcctacaggtattatccttg

SEQ ID NO: 5244908 - DNA, 25 bp, Homo sapien
agttccagttcttgattaccattgc

SEQ ID NO: 5244909 - DNA, 25 bp, Homo sapien
aatagttgacttgcagaaaaagaga

SEQ ID NO: 5244910 - DNA, 25 bp, Homo sapien
ttaccattgctagcaaggttgctca

SEQ ID NO: 5244911 - DNA, 25 bp, Homo sapien
aactttgtcatgtttaatggtcata

SEQ ID NO: 5244912 - DNA, 25 bp, Homo sapien
aagttgttctggtctcctttttcag

SEQ ID NO: 5244913 - DNA, 25 bp, Homo sapien
cctgccatcgccatcaaataataat

SEQ ID NO: 5244914 - DNA, 25 bp, Homo sapien
cagaaattataacaataggcttcaa

SEQ ID NO: 5244915 - DNA, 25 bp, Homo sapien
agtaaaatccaggagacacgttgtt

SEQ ID NO: 5244916 - DNA, 25 bp, Homo sapien
ggtatttacagctctcatagagcct

SEQ ID NO: 5244917 - DNA, 25 bp, Homo sapien
tggtatttacagctctcatagagcc

SEQ ID NO: 5244918 - DNA, 25 bp, Homo sapien
atggtatttacagctctcatagagc

SEQ ID NO: 5244919 - DNA, 25 bp, Homo sapien
aagtttaactgtaccacaatctgag

SEQ ID NO: 5244920 - DNA, 25 bp, Homo sapien
tgccagtgtggtcctaagtttaact

SEQ ID NO: 5244921 - DNA, 25 bp, Homo sapien
tgtcatttgccccaatctgccagtg

SEQ ID NO: 5244922 - DNA, 25 bp, Homo sapien
gtttaactgtaccacaatctgagca

SEQ ID NO: 5244923 - DNA, 25 bp, Homo sapien
ttgaccctttaggtttataatcatg

SEQ ID NO: 5244924 - DNA, 25 bp, Homo sapien
tgaccctttaggtttataatcatgt

SEQ ID NO: 5244925 - DNA, 25 bp, Homo sapien
gaccctttaggtttataatcatgta

SEQ ID NO: 5244926 - DNA, 25 bp, Homo sapien
agcaaagctgctgtacagcccacac

SEQ ID NO: 5244927 - DNA, 25 bp, Homo sapien
aaaaacatagtgctccatcacaaac

SEQ ID NO: 5244928 - DNA, 25 bp, Homo sapien
tctatgaaacattggggcagcagca

SEQ ID NO: 5244929 - DNA, 25 bp, Homo sapien
agctgctgtacagcccacacagcaa

SEQ ID NO: 5244930 - DNA, 25 bp, Homo sapien
tgacctcaggacagcctgtctttcc

SEQ ID NO: 5244931 - DNA, 25 bp, Homo sapien
ggatgcagggacagcactagccagt

SEQ ID NO: 5244932 - DNA, 25 bp, Homo sapien
cattctccagagctatgccgatctg

SEQ ID NO: 5244933 - DNA, 25 bp, Homo sapien
tccctttctagtcaagtccccattc

SEQ ID NO: 5244934 - DNA, 25 bp, Homo sapien
ccttaagtggctttcaggtgatacc

SEQ ID NO: 5244935 - DNA, 25 bp, Homo sapien
ctcaaggtgaaacaagttaagattc

SEQ ID NO: 5244936 - DNA, 25 bp, Homo sapien
gtatatcaaattcacgttgcaggag

SEQ ID NO: 5244937 - DNA, 25 bp, Homo sapien
cagaaaggccttgggtgatacgtcc

SEQ ID NO: 5244938 - DNA, 25 bp, Homo sapien
ggaaatgatgttacacagttctgat

SEQ ID NO: 5244939 - DNA, 25 bp, Homo sapien
cagtgaggtaactttttgaattcaa

SEQ ID NO: 5244940 - DNA, 25 bp, Homo sapien
gattgtggcctgcaaaaggcctgcc

SEQ ID NO: 5244941 - DNA, 25 bp, Homo sapien
ctgcaaaaggcctgccaatcttcat

SEQ ID NO: 5244942 - DNA, 25 bp, Homo sapien
tgcaagcagcttatcgctcttgtct

SEQ ID NO: 5244943 - DNA, 25 bp, Homo sapien
tcttctggtcacttgcattactaaa

SEQ ID NO: 5244944 - DNA, 25 bp, Homo sapien
tatagacttggcttttgcaagcagc

SEQ ID NO: 5244945 - DNA, 25 bp, Homo sapien
gttctatttccactggtattgggca

SEQ ID NO: 5244946 - DNA, 25 bp, Homo sapien
cagaagcgcaggttgcctgagtcat

SEQ ID NO: 5244947 - DNA, 25 bp, Homo sapien
tttgtcctgcgctgccacatgggtg

SEQ ID NO: 5244948 - DNA, 25 bp, Homo sapien
cacgttctgtccctgcatgctgcat

SEQ ID NO: 5244949 - DNA, 25 bp, Homo sapien
ggtgacacagaagcgcaggttgcct

SEQ ID NO: 5244950 - DNA, 25 bp, Homo sapien
tcattgcaggtatatagtattggag

SEQ ID NO: 5244951 - DNA, 25 bp, Homo sapien
tgcaggtatatagtattggagagtt

SEQ ID NO: 5244952 - DNA, 25 bp, Homo sapien
ccggctctccaatatatttaccaaa

SEQ ID NO: 5244953 - DNA, 25 bp, Homo sapien
ggagagttctaggctctccggctct

SEQ ID NO: 5244954 - DNA, 25 bp, Homo sapien
cttaagatatgggtgagaaatcccc

SEQ ID NO: 5244955 - DNA, 25 bp, Homo sapien
gctacctgtacagcagacatgccgc

SEQ ID NO: 5244956 - DNA, 25 bp, Homo sapien
catttataatgacagaagcagggta

SEQ ID NO: 5244957 - DNA, 25 bp, Homo sapien
gacatgccgctccagtgacatttat

SEQ ID NO: 5244958 - DNA, 25 bp, Homo sapien
gggtgatatcttccatgcagttgtc

SEQ ID NO: 5244959 - DNA, 25 bp, Homo sapien
gtcctggaaagtgggtgatatcttc

SEQ ID NO: 5244960 - DNA, 25 bp, Homo sapien
tcatcggaagtcctggaaagtgggt

SEQ ID NO: 5244961 - DNA, 25 bp, Homo sapien
ctagatgtcgtgcagctggttcatc

SEQ ID NO: 5244962 - DNA, 25 bp, Homo sapien
tacctaaggagttagagagtccttc

SEQ ID NO: 5244963 - DNA, 25 bp, Homo sapien
tggcctaaatttacacacccaatga

SEQ ID NO: 5244964 - DNA, 25 bp, Homo sapien
taggtggtcctgcatcaaagtttac

SEQ ID NO: 5244965 - DNA, 25 bp, Homo sapien
tagaactggtaccaatacccaggtg

SEQ ID NO: 5244966 - DNA, 25 bp, Homo sapien
tgagaattttgcttcttcctaagaa

SEQ ID NO: 5244967 - DNA, 25 bp, Homo sapien
ctgagaattttgcttcttcctaaga

SEQ ID NO: 5244968 - DNA, 25 bp, Homo sapien
gattggaatcaaattcactcacagc

SEQ ID NO: 5244969 - DNA, 25 bp, Homo sapien
gctgagagccctgattggaatcaaa

SEQ ID NO: 5244970 - DNA, 25 bp, Homo sapien
gagacatgcataagtgctcatttga

SEQ ID NO: 5244971 - DNA, 25 bp, Homo sapien
cagaggcccctagttatatgacaga

SEQ ID NO: 5244972 - DNA, 25 bp, Homo sapien
acctggattgtcttggatcaaagca

SEQ ID NO: 5244973 - DNA, 25 bp, Homo sapien
tcctttatcacagtcagagtgcttg

SEQ ID NO: 5244974 - DNA, 25 bp, Homo sapien
gttatcgctcttaatattctcagtg

SEQ ID NO: 5244975 - DNA, 25 bp, Homo sapien
cagtccatccttggtgatagctgac

SEQ ID NO: 5244976 - DNA, 25 bp, Homo sapien
ggtcacaaacagcaacttggagtca

SEQ ID NO: 5244977 - DNA, 25 bp, Homo sapien
gacgttttggaaccgcagcagggca

SEQ ID NO: 5244978 - DNA, 25 bp, Homo sapien
cacaaacagcaacttggagtcatca

SEQ ID NO: 5244979 - DNA, 25 bp, Homo sapien
atcacggatgtatgacgttttggaa

SEQ ID NO: 5244980 - DNA, 25 bp, Homo sapien
ttttgtcactttttccaatcacatc

SEQ ID NO: 5244981 - DNA, 25 bp, Homo sapien
tttgccgtgggatgttatctttggc

SEQ ID NO: 5244982 - DNA, 25 bp, Homo sapien
tggtgggacccatgacaactcatca

SEQ ID NO: 5244983 - DNA, 25 bp, Homo sapien
tgttatctttggctttaaggagtat

SEQ ID NO: 5244984 - DNA, 25 bp, Homo sapien
taaagccaagtcgtgatcagggcct

SEQ ID NO: 5244985 - DNA, 25 bp, Homo sapien
ggattataaagccaagtcgtgatca

SEQ ID NO: 5244986 - DNA, 25 bp, Homo sapien
aagtcgtgatcagggcctcctcttc

SEQ ID NO: 5244987 - DNA, 25 bp, Homo sapien
tccaggggattataaagccaagtcg

SEQ ID NO: 5244988 - DNA, 25 bp, Homo sapien
cctccgtaagcttccccgcaaaatg

SEQ ID NO: 5244989 - DNA, 25 bp, Homo sapien
taagcttccccgcaaaatgacacct

SEQ ID NO: 5244990 - DNA, 25 bp, Homo sapien
gctttcctccgtaagcttccccgca

SEQ ID NO: 5244991 - DNA, 25 bp, Homo sapien
cgtaagcttccccgcaaaatgacac

SEQ ID NO: 5244992 - DNA, 25 bp, Homo sapien
attttaataaacatgctgtgtaagc

SEQ ID NO: 5244993 - DNA, 25 bp, Homo sapien
taaacatgctgtgtaagcaagcaca

SEQ ID NO: 5244994 - DNA, 25 bp, Homo sapien
ttttcatgtcattcctgtgctgggc

SEQ ID NO: 5244995 - DNA, 25 bp, Homo sapien
gtcattcctgtgctgggcccatgct

SEQ ID NO: 5244996 - DNA, 25 bp, Homo sapien
ggtcaaaggaccaccgctgtctttc

SEQ ID NO: 5244997 - DNA, 25 bp, Homo sapien
gccccagcggaacagggtcaaagga

SEQ ID NO: 5244998 - DNA, 25 bp, Homo sapien
gatccctgccccagcggaacagggt

SEQ ID NO: 5244999 - DNA, 25 bp, Homo sapien
gaacagggtcaaaggaccaccgctg

SEQ ID NO: 5245000 - DNA, 25 bp, Homo sapien
aggcacttcctccttaagcgtccct

SEQ ID NO: 5245001 - DNA, 25 bp, Homo sapien
aaataacgctttctcagctccacag

SEQ ID NO: 5245002 - DNA, 25 bp, Homo sapien
tattccgcgatgaaataacgctttc

SEQ ID NO: 5245003 - DNA, 25 bp, Homo sapien
tttgtattccgcgatgaaataacgc

SEQ ID NO: 5245004 - DNA, 25 bp, Homo sapien
ataagtccggcccagcctcgctgga

SEQ ID NO: 5245005 - DNA, 25 bp, Homo sapien
gggtcactgcacttgtaaataagtc

SEQ ID NO: 5245006 - DNA, 25 bp, Homo sapien
aactgccccacagggcgcgatgctg

SEQ ID NO: 5245007 - DNA, 25 bp, Homo sapien
cccagagcgcttcggtttgcacggg

SEQ ID NO: 5245008 - DNA, 25 bp, Homo sapien
tgctctcggtaccaaggtaagaccc

SEQ ID NO: 5245009 - DNA, 25 bp, Homo sapien
gacccgcttctttctatgcccaata

SEQ ID NO: 5245010 - DNA, 25 bp, Homo sapien
aggtaagacccgcttctttctatgc

SEQ ID NO: 5245011 - DNA, 25 bp, Homo sapien
aactccctgctctcggtaccaaggt

SEQ ID NO: 5245012 - DNA, 25 bp, Homo sapien
tcccaggttctgagtgctgtcctcg

SEQ ID NO: 5245013 - DNA, 25 bp, Homo sapien
tgagatttctatgtgcgcacacggt

SEQ ID NO: 5245014 - DNA, 25 bp, Homo sapien
ggatggccgctctcataggttttga

SEQ ID NO: 5245015 - DNA, 25 bp, Homo sapien
ggaagtttgtgacagctctccctcc

SEQ ID NO: 5245016 - DNA, 25 bp, Homo sapien
tatctgaaaggaatttgcatccaga

SEQ ID NO: 5245017 - DNA, 25 bp, Homo sapien
tagagaatgaaaaggcaggccacag

SEQ ID NO: 5245018 - DNA, 25 bp, Homo sapien
ccccttcaatagtcactgtttagag

SEQ ID NO: 5245019 - DNA, 25 bp, Homo sapien
atacattttcgataccaaactttgg

SEQ ID NO: 5245020 - DNA, 25 bp, Homo sapien
taagaagcattctcccaagacatct

SEQ ID NO: 5245021 - DNA, 25 bp, Homo sapien
ttaagaagcattctcccaagacatc

SEQ ID NO: 5245022 - DNA, 25 bp, Homo sapien
gctgcagtttcttgtgatccctgaa

SEQ ID NO: 5245023 - DNA, 25 bp, Homo sapien
gagctgagatgatcagctgcagttt

SEQ ID NO: 5245024 - DNA, 25 bp, Homo sapien
ctgtttcactgttgtaggagctgag

SEQ ID NO: 5245025 - DNA, 25 bp, Homo sapien
gtttcactgttgtaggagctgagat

SEQ ID NO: 5245026 - DNA, 25 bp, Homo sapien
gtatccaactgtgatgatggcaaag

SEQ ID NO: 5245027 - DNA, 25 bp, Homo sapien
gaaatggtgattaggttttcataaa

SEQ ID NO: 5245028 - DNA, 25 bp, Homo sapien
tcagtatccaactgtgatgatggca

SEQ ID NO: 5245029 - DNA, 25 bp, Homo sapien
caagaaatggtgattaggttttcat

SEQ ID NO: 5245030 - DNA, 25 bp, Homo sapien
catggtgtctctcatttgcggcaac

SEQ ID NO: 5245031 - DNA, 25 bp, Homo sapien
gcctacactcacttccacacaggag

SEQ ID NO: 5245032 - DNA, 25 bp, Homo sapien
gcggcaactcttagcacactgtatg

SEQ ID NO: 5245033 - DNA, 25 bp, Homo sapien
cacactgtatgttcgtgagatgcct

SEQ ID NO: 5245034 - DNA, 25 bp, Homo sapien
cacaaattctgcaaggtctgatagg

SEQ ID NO: 5245035 - DNA, 25 bp, Homo sapien
tcacaaattctgcaaggtctgatag

SEQ ID NO: 5245036 - DNA, 25 bp, Homo sapien
ctctgaaatgaaaccagtaagctct

SEQ ID NO: 5245037 - DNA, 25 bp, Homo sapien
caacgtctggaatatcctggaagtc

SEQ ID NO: 5245038 - DNA, 25 bp, Homo sapien
tccaaaacaacgtctggaatatcct

SEQ ID NO: 5245039 - DNA, 25 bp, Homo sapien
ggaagtctctcatgtgtgctctgaa

SEQ ID NO: 5245040 - DNA, 25 bp, Homo sapien
cagaagtatttcgaagctcggtttt

SEQ ID NO: 5245041 - DNA, 25 bp, Homo sapien
tgtctcagtactaagtctacagctg

SEQ ID NO: 5245042 - DNA, 25 bp, Homo sapien
tgttcactttaacgtagtccggatg

SEQ ID NO: 5245043 - DNA, 25 bp, Homo sapien
ttcgaagctcggttttattgttcac

SEQ ID NO: 5245044 - DNA, 25 bp, Homo sapien
gcatcactatcacataggttgacag

SEQ ID NO: 5245045 - DNA, 25 bp, Homo sapien
agcttcagcatcactatcacatagg

SEQ ID NO: 5245046 - DNA, 25 bp, Homo sapien
atcactatcacataggttgacagcc

SEQ ID NO: 5245047 - DNA, 25 bp, Homo sapien
tcagcatcactatcacataggttga

SEQ ID NO: 5245048 - DNA, 25 bp, Homo sapien
gatgcttcagcaaccaaaggtgatt

SEQ ID NO: 5245049 - DNA, 25 bp, Homo sapien
ttccgtttcctctgagagttcttcc

SEQ ID NO: 5245050 - DNA, 25 bp, Homo sapien
ttggatgcttcagcaaccaaaggtg

SEQ ID NO: 5245051 - DNA, 25 bp, Homo sapien
aacttccgtttcctctgagagttct

SEQ ID NO: 5245052 - DNA, 25 bp, Homo sapien
caggaattttcctcctgccctctta

SEQ ID NO: 5245053 - DNA, 25 bp, Homo sapien
tcaggaattttcctcctgccctctt

SEQ ID NO: 5245054 - DNA, 25 bp, Homo sapien
cttcactcacactggagaaaaccat

SEQ ID NO: 5245055 - DNA, 25 bp, Homo sapien
ctttcttcttcactcacactggaga

SEQ ID NO: 5245056 - DNA, 25 bp, Homo sapien
tttcttcttcactcacactggagaa

SEQ ID NO: 5245057 - DNA, 25 bp, Homo sapien
cttcttcactcacactggagaaaac

SEQ ID NO: 5245058 - DNA, 25 bp, Homo sapien
agtcattgtcaatttggcaaaggca

SEQ ID NO: 5245059 - DNA, 25 bp, Homo sapien
gtgcagggacattttcagtttcatt

SEQ ID NO: 5245060 - DNA, 25 bp, Homo sapien
tatatgctatagtttagtgcaggga

SEQ ID NO: 5245061 - DNA, 25 bp, Homo sapien
ttaaatggtgcttctgagacttaag

SEQ ID NO: 5245062 - DNA, 25 bp, Homo sapien
agctctggattccatccagtagatt

SEQ ID NO: 5245063 - DNA, 25 bp, Homo sapien
tctggattccatccagtagatttcc

SEQ ID NO: 5245064 - DNA, 25 bp, Homo sapien
tccatccagtagatttccagcaggt

SEQ ID NO: 5245065 - DNA, 25 bp, Homo sapien
gattccatccagtagatttccagca

SEQ ID NO: 5245066 - DNA, 25 bp, Homo sapien
tatcgaaatcgaaactgcgctgagg

SEQ ID NO: 5245067 - DNA, 25 bp, Homo sapien
ggccagaggtagaacaaaatttctc

SEQ ID NO: 5245068 - DNA, 25 bp, Homo sapien
ggaaaacacaggtataagcacctta

SEQ ID NO: 5245069 - DNA, 25 bp, Homo sapien
cttggcaggtctttgatcagcagca

SEQ ID NO: 5245070 - DNA, 25 bp, Homo sapien
ctgagcacccttacagctgtaattc

SEQ ID NO: 5245071 - DNA, 25 bp, Homo sapien
gattcttggtcccaataagccatta

SEQ ID NO: 5245072 - DNA, 25 bp, Homo sapien
ccattatcttaaggctctgatcccc

SEQ ID NO: 5245073 - DNA, 25 bp, Homo sapien
tgtggggaatttatcaagtgctgct

SEQ ID NO: 5245074 - DNA, 25 bp, Homo sapien
gggcagaactgcacctaaactgtca

SEQ ID NO: 5245075 - DNA, 25 bp, Homo sapien
tgaatccagcttgggtttcagctcc

SEQ ID NO: 5245076 - DNA, 25 bp, Homo sapien
caagcaaggtggactcaatgtgaag

SEQ ID NO: 5245077 - DNA, 25 bp, Homo sapien
aaaccccagggagattgaaggcaca

SEQ ID NO: 5245078 - DNA, 25 bp, Homo sapien
ttccagttcccaagatgaatccagc

SEQ ID NO: 5245079 - DNA, 25 bp, Homo sapien
gatgccctttaacattggaatgtct

SEQ ID NO: 5245080 - DNA, 25 bp, Homo sapien
gaatgtctattctgcttgcttttcc

SEQ ID NO: 5245081 - DNA, 25 bp, Homo sapien
cttgatgccctttaacattggaatg

SEQ ID NO: 5245082 - DNA, 25 bp, Homo sapien
tatctcacacttaaatgatttcata

SEQ ID NO: 5245083 - DNA, 25 bp, Homo sapien
ctggatgaatttcccccactctggg

SEQ ID NO: 5245084 - DNA, 25 bp, Homo sapien
gtaggactatgagctgaataccacc

SEQ ID NO: 5245085 - DNA, 25 bp, Homo sapien
tgctttccagtcttttcaaacagca

SEQ ID NO: 5245086 - DNA, 25 bp, Homo sapien
tttgtaccccaagtgctggctgcac

SEQ ID NO: 5245087 - DNA, 25 bp, Homo sapien
cactccgggtttttgcagttgaggg

SEQ ID NO: 5245088 - DNA, 25 bp, Homo sapien
atgtgaaaatgccagtttccttttt

SEQ ID NO: 5245089 - DNA, 25 bp, Homo sapien
tgactccttgaagtgggtgggcctc

SEQ ID NO: 5245090 - DNA, 25 bp, Homo sapien
aaactgtgtgagaggtaaatcaaaa

SEQ ID NO: 5245091 - DNA, 25 bp, Homo sapien
aaggattaggtcatcggggaaactg

SEQ ID NO: 5245092 - DNA, 25 bp, Homo sapien
tcatgtgacacatggatagccacac

SEQ ID NO: 5245093 - DNA, 25 bp, Homo sapien
cagggatgatcgtccatgacttaaa

SEQ ID NO: 5245094 - DNA, 25 bp, Homo sapien
ggtgacagggatgatcgtccatgac

SEQ ID NO: 5245095 - DNA, 25 bp, Homo sapien
gacagggatgatcgtccatgactta

SEQ ID NO: 5245096 - DNA, 25 bp, Homo sapien
tgacagggatgatcgtccatgactt

SEQ ID NO: 5245097 - DNA, 25 bp, Homo sapien
tgtgtttaccccgatgcaacttaac

SEQ ID NO: 5245098 - DNA, 25 bp, Homo sapien
ggccatgtgtttaccccgatgcaac

SEQ ID NO: 5245099 - DNA, 25 bp, Homo sapien
ttaccccgatgcaacttaacaccaa

SEQ ID NO: 5245100 - DNA, 25 bp, Homo sapien
gccatgtgtttaccccgatgcaact

SEQ ID NO: 5245101 - DNA, 25 bp, Homo sapien
tttttatctgtaagtctctgtggtg

SEQ ID NO: 5245102 - DNA, 25 bp, Homo sapien
ctgtaagtctctgtggtggtaccat

SEQ ID NO: 5245103 - DNA, 25 bp, Homo sapien
tctgtaagtctctgtggtggtacca

SEQ ID NO: 5245104 - DNA, 25 bp, Homo sapien
ttatctgtaagtctctgtggtggta

SEQ ID NO: 5245105 - DNA, 25 bp, Homo sapien
agtcctgcactaaactgcagtttag

SEQ ID NO: 5245106 - DNA, 25 bp, Homo sapien
gagtcttttgcacatgggtcagtcc

SEQ ID NO: 5245107 - DNA, 25 bp, Homo sapien
actaaactgcagtttagtaactgca

SEQ ID NO: 5245108 - DNA, 25 bp, Homo sapien
catgggtcagtcctgcactaaactg

SEQ ID NO: 5245109 - DNA, 25 bp, Homo sapien
taaatcagaaggattaaaggcatcc

SEQ ID NO: 5245110 - DNA, 25 bp, Homo sapien
taggattaggtaaatcagaaggatt

SEQ ID NO: 5245111 - DNA, 25 bp, Homo sapien
cttgtaggattaggtaaatcagaag

SEQ ID NO: 5245112 - DNA, 25 bp, Homo sapien
taggtaaatcagaaggattaaaggc

SEQ ID NO: 5245113 - DNA, 25 bp, Homo sapien
tccatgagctaccatcagaaaacca

SEQ ID NO: 5245114 - DNA, 25 bp, Homo sapien
tcatcctccagtaattggccaaatg

SEQ ID NO: 5245115 - DNA, 25 bp, Homo sapien
cagtcagaatatagccataaatcag

SEQ ID NO: 5245116 - DNA, 25 bp, Homo sapien
aaatgttgaccctctatccatgagc

SEQ ID NO: 5245117 - DNA, 25 bp, Homo sapien
agaaggtcaaagtctcctttcttgg

SEQ ID NO: 5245118 - DNA, 25 bp, Homo sapien
ctggagtagcattccttgtacctga

SEQ ID NO: 5245119 - DNA, 25 bp, Homo sapien
tggagtagcattccttgtacctgag

SEQ ID NO: 5245120 - DNA, 25 bp, Homo sapien
tagaaggtcaaagtctcctttcttg

SEQ ID NO: 5245121 - DNA, 25 bp, Homo sapien
ttggacaggttggtgataagctgct

SEQ ID NO: 5245122 - DNA, 25 bp, Homo sapien
gataagctgctatgctgcatcaaac

SEQ ID NO: 5245123 - DNA, 25 bp, Homo sapien
cagcttattaccaatctgtccagga

SEQ ID NO: 5245124 - DNA, 25 bp, Homo sapien
tgctgcatcaaaccttcataatatt

SEQ ID NO: 5245125 - DNA, 25 bp, Homo sapien
tagactaggctggacacaacaacca

SEQ ID NO: 5245126 - DNA, 25 bp, Homo sapien
tattcagaaacatcgctagactagg

SEQ ID NO: 5245127 - DNA, 25 bp, Homo sapien
gctgtttgagctatattattcagaa

SEQ ID NO: 5245128 - DNA, 25 bp, Homo sapien
gatgagctgtttgagctatattatt

SEQ ID NO: 5245129 - DNA, 25 bp, Homo sapien
aagtttctataagttgagggctatt

SEQ ID NO: 5245130 - DNA, 25 bp, Homo sapien
tggcttgtccagaagacttagaaaa

SEQ ID NO: 5245131 - DNA, 25 bp, Homo sapien
ccaattgtcttctcccatgaaagtt

SEQ ID NO: 5245132 - DNA, 25 bp, Homo sapien
tttatcagtactatagatcccttgg

SEQ ID NO: 5245133 - DNA, 25 bp, Homo sapien
gggagtttctttatcagtactatag

SEQ ID NO: 5245134 - DNA, 25 bp, Homo sapien
tcattttatcactacacactgtggg

SEQ ID NO: 5245135 - DNA, 25 bp, Homo sapien
gatcccttggatgtcagaagttcca

SEQ ID NO: 5245136 - DNA, 25 bp, Homo sapien
tccttcacacctaaagggatcttct

SEQ ID NO: 5245137 - DNA, 25 bp, Homo sapien
ctcagggtctctactttccagtcca

SEQ ID NO: 5245138 - DNA, 25 bp, Homo sapien
tatgacagtcaagcgagcctcttcc

SEQ ID NO: 5245139 - DNA, 25 bp, Homo sapien
aaatgaagcttatgacagtcaagcg

SEQ ID NO: 5245140 - DNA, 25 bp, Homo sapien
ccttttctgggggacacttactgca

SEQ ID NO: 5245141 - DNA, 25 bp, Homo sapien
gcattttcccattgggagaggagag

SEQ ID NO: 5245142 - DNA, 25 bp, Homo sapien
gaataatctccccatgagggaattc

SEQ ID NO: 5245143 - DNA, 25 bp, Homo sapien
ggagggacttctccccactgaattc

SEQ ID NO: 5245144 - DNA, 25 bp, Homo sapien
ccagtggaatccaaagacgaaagga

SEQ ID NO: 5245145 - DNA, 25 bp, Homo sapien
gctgaccagattccacaatactcca

SEQ ID NO: 5245146 - DNA, 25 bp, Homo sapien
tgaccagattccacaatactccagc

SEQ ID NO: 5245147 - DNA, 25 bp, Homo sapien
gcaaagagagagccacgttgcactg

SEQ ID NO: 5245148 - DNA, 25 bp, Homo sapien
gagcaaagagagagccacgttgcac

SEQ ID NO: 5245149 - DNA, 25 bp, Homo sapien
gagttccctttcatggctccttgag

SEQ ID NO: 5245150 - DNA, 25 bp, Homo sapien
ggctccttgaggacatagattctat

SEQ ID NO: 5245151 - DNA, 25 bp, Homo sapien
gaaatcctttgagttccctttcatg

SEQ ID NO: 5245152 - DNA, 25 bp, Homo sapien
tattctagagtaatcatctaggagt

SEQ ID NO: 5245153 - DNA, 25 bp, Homo sapien
ttctgccacatttattcttactcca

SEQ ID NO: 5245154 - DNA, 25 bp, Homo sapien
tccatctctctgacataaacattct

SEQ ID NO: 5245155 - DNA, 25 bp, Homo sapien
catttattcttactccactttcaag

SEQ ID NO: 5245156 - DNA, 25 bp, Homo sapien
ccactttcaagatccaacatttttc

SEQ ID NO: 5245157 - DNA, 25 bp, Homo sapien
gatcgacctgggtttggtacttgaa

SEQ ID NO: 5245158 - DNA, 25 bp, Homo sapien
taagtaacctattcagattggcagg

SEQ ID NO: 5245159 - DNA, 25 bp, Homo sapien
ggcaagcgttctgcagtcggatcga

SEQ ID NO: 5245160 - DNA, 25 bp, Homo sapien
gcctgctagtggacaaacccatctg

SEQ ID NO: 5245161 - DNA, 25 bp, Homo sapien
ctgtgctgcttggtgaaatttccaa

SEQ ID NO: 5245162 - DNA, 25 bp, Homo sapien
aaggttctagagacaccaatcagcc

SEQ ID NO: 5245163 - DNA, 25 bp, Homo sapien
aatttccaaggttctagagacacca

SEQ ID NO: 5245164 - DNA, 25 bp, Homo sapien
gttctagagacaccaatcagccaca

SEQ ID NO: 5245165 - DNA, 25 bp, Homo sapien
aatatgttttgagaaggcctgtact

SEQ ID NO: 5245166 - DNA, 25 bp, Homo sapien
tctgtcatttcctttgtgcattgtc

SEQ ID NO: 5245167 - DNA, 25 bp, Homo sapien
catctgcacgatcagatttctgtca

SEQ ID NO: 5245168 - DNA, 25 bp, Homo sapien
tatgttttgagaaggcctgtactgt

SEQ ID NO: 5245169 - DNA, 25 bp, Homo sapien
gaacacattctgcaagtgtccgttt

SEQ ID NO: 5245170 - DNA, 25 bp, Homo sapien
cacattctgcaagtgtccgtttcat

SEQ ID NO: 5245171 - DNA, 25 bp, Homo sapien
ggaacacattctgcaagtgtccgtt

SEQ ID NO: 5245172 - DNA, 25 bp, Homo sapien
acacattctgcaagtgtccgtttca

SEQ ID NO: 5245173 - DNA, 25 bp, Homo sapien
ttcagttggctggataaagaaggat

SEQ ID NO: 5245174 - DNA, 25 bp, Homo sapien
catgatattgcctgcctgttcagtt

SEQ ID NO: 5245175 - DNA, 25 bp, Homo sapien
cagttggctggataaagaaggataa

SEQ ID NO: 5245176 - DNA, 25 bp, Homo sapien
tcacctctaacatgatattgcctgc

SEQ ID NO: 5245177 - DNA, 25 bp, Homo sapien
tctgggtgtctgcatctaaaggggt

SEQ ID NO: 5245178 - DNA, 25 bp, Homo sapien
tgggtgtctgcatctaaaggggtct

SEQ ID NO: 5245179 - DNA, 25 bp, Homo sapien
ggtgtctgcatctaaaggggtctcc

SEQ ID NO: 5245180 - DNA, 25 bp, Homo sapien
tgtctgcatctaaaggggtctccat

SEQ ID NO: 5245181 - DNA, 25 bp, Homo sapien
tttcatttcccaaatgcagactcat

SEQ ID NO: 5245182 - DNA, 25 bp, Homo sapien
agagaataatttcatttcccaaatg

SEQ ID NO: 5245183 - DNA, 25 bp, Homo sapien
gaataatttcatttcccaaatgcag

SEQ ID NO: 5245184 - DNA, 25 bp, Homo sapien
aatttcatttcccaaatgcagactc

SEQ ID NO: 5245185 - DNA, 25 bp, Homo sapien
cagttttggcatgggaataagacaa

SEQ ID NO: 5245186 - DNA, 25 bp, Homo sapien
ttcagttttggcatgggaataagac

SEQ ID NO: 5245187 - DNA, 25 bp, Homo sapien
aacatttcagttttggcatgggaat

SEQ ID NO: 5245188 - DNA, 25 bp, Homo sapien
actgtaatctcagagatgtaatgct

SEQ ID NO: 5245189 - DNA, 25 bp, Homo sapien
agctcagtaactggcccatcctcag

SEQ ID NO: 5245190 - DNA, 25 bp, Homo sapien
ggtagatgcaccaggaaacagagcc

SEQ ID NO: 5245191 - DNA, 25 bp, Homo sapien
agagccagagatcaactctgccagc

SEQ ID NO: 5245192 - DNA, 25 bp, Homo sapien
aggtagatgcaccaggaaacagagc

SEQ ID NO: 5245193 - DNA, 25 bp, Homo sapien
cagccaaggtcgcctcaatgtattc

SEQ ID NO: 5245194 - DNA, 25 bp, Homo sapien
agccaaggtcgcctcaatgtattct

SEQ ID NO: 5245195 - DNA, 25 bp, Homo sapien
actgttacagatccagccaaggtcg

SEQ ID NO: 5245196 - DNA, 25 bp, Homo sapien
gccaaggtcgcctcaatgtattctg

SEQ ID NO: 5245197 - DNA, 25 bp, Homo sapien
tacattttggtccacagattccagt

SEQ ID NO: 5245198 - DNA, 25 bp, Homo sapien
ggtccacagattccagtctttcttt

SEQ ID NO: 5245199 - DNA, 25 bp, Homo sapien
tccacagattccagtctttctttct

SEQ ID NO: 5245200 - DNA, 25 bp, Homo sapien
cacagattccagtctttctttctca

SEQ ID NO: 5245201 - DNA, 25 bp, Homo sapien
tcaagatccaaagctatgtgcctca

SEQ ID NO: 5245202 - DNA, 25 bp, Homo sapien
atccaaagctatgtgcctcaaactc

SEQ ID NO: 5245203 - DNA, 25 bp, Homo sapien
aagatccaaagctatgtgcctcaaa

SEQ ID NO: 5245204 - DNA, 25 bp, Homo sapien
gatccaaagctatgtgcctcaaact

SEQ ID NO: 5245205 - DNA, 25 bp, Homo sapien
ttttgtctaaagagtctgttccagc

SEQ ID NO: 5245206 - DNA, 25 bp, Homo sapien
tgtttttgtctaaagagtctgttcc

SEQ ID NO: 5245207 - DNA, 25 bp, Homo sapien
aagcttgtttttgtctaaagagtct

SEQ ID NO: 5245208 - DNA, 25 bp, Homo sapien
gtctaaagagtctgttccagcttgg

SEQ ID NO: 5245209 - DNA, 25 bp, Homo sapien
tcaggaatcacacgattgttataag

SEQ ID NO: 5245210 - DNA, 25 bp, Homo sapien
gaatcacacgattgttataagccac

SEQ ID NO: 5245211 - DNA, 25 bp, Homo sapien
atcacacgattgttataagccacag

SEQ ID NO: 5245212 - DNA, 25 bp, Homo sapien
cacacgattgttataagccacagca

SEQ ID NO: 5245213 - DNA, 25 bp, Homo sapien
aactgagagcccgttgtaagggtag

SEQ ID NO: 5245214 - DNA, 25 bp, Homo sapien
ccttcaaaactgagagcccgttgta

SEQ ID NO: 5245215 - DNA, 25 bp, Homo sapien
caaaactgagagcccgttgtaaggg

SEQ ID NO: 5245216 - DNA, 25 bp, Homo sapien
ttcaaaactgagagcccgttgtaag

SEQ ID NO: 5245217 - DNA, 25 bp, Homo sapien
gctggcaactgtggtaagtctggat

SEQ ID NO: 5245218 - DNA, 25 bp, Homo sapien
ctctttatgtggcaacaacacctgg

SEQ ID NO: 5245219 - DNA, 25 bp, Homo sapien
tgtggacagccttgttcatgcttct

SEQ ID NO: 5245220 - DNA, 25 bp, Homo sapien
tcttactctcaatgtttggcaggag

SEQ ID NO: 5245221 - DNA, 25 bp, Homo sapien
tcttggtcaagcgaatagtggacca

SEQ ID NO: 5245222 - DNA, 25 bp, Homo sapien
ggttttcttggtcaagcgaatagtg

SEQ ID NO: 5245223 - DNA, 25 bp, Homo sapien
tttcttggtcaagcgaatagtggac

SEQ ID NO: 5245224 - DNA, 25 bp, Homo sapien
cttggtcaagcgaatagtggaccat

SEQ ID NO: 5245225 - DNA, 25 bp, Homo sapien
catcgaaacccctaggttctgactt

SEQ ID NO: 5245226 - DNA, 25 bp, Homo sapien
tacatcgaaacccctaggttctgac

SEQ ID NO: 5245227 - DNA, 25 bp, Homo sapien
tctacatcgaaacccctaggttctg

SEQ ID NO: 5245228 - DNA, 25 bp, Homo sapien
ttctgtgccctatgtattggtttct

SEQ ID NO: 5245229 - DNA, 25 bp, Homo sapien
tggacttctaggttgggcctcaaac

SEQ ID NO: 5245230 - DNA, 25 bp, Homo sapien
tccagcagattgaggttcagctcga

SEQ ID NO: 5245231 - DNA, 25 bp, Homo sapien
tttttcacatggcattttggacttc

SEQ ID NO: 5245232 - DNA, 25 bp, Homo sapien
ggttcagctcgaatttagaggacat

SEQ ID NO: 5245233 - DNA, 25 bp, Homo sapien
tgaaggtaaaacctggcgtcacact

SEQ ID NO: 5245234 - DNA, 25 bp, Homo sapien
tcatttcccaaggtgggatcctggg

SEQ ID NO: 5245235 - DNA, 25 bp, Homo sapien
gatcctgggcagatgtctcattgat

SEQ ID NO: 5245236 - DNA, 25 bp, Homo sapien
ccctggaagtgtcgtggcagggatg

SEQ ID NO: 5245237 - DNA, 25 bp, Homo sapien
gcactgcggcacctaagaagcctta

SEQ ID NO: 5245238 - DNA, 25 bp, Homo sapien
tccaatctagagagcgatggtgtca

SEQ ID NO: 5245239 - DNA, 25 bp, Homo sapien
cacattggaggacaagagcagatga

SEQ ID NO: 5245240 - DNA, 25 bp, Homo sapien
tgatttggtatcaccgaggaaacct

SEQ ID NO: 5245241 - DNA, 25 bp, Homo sapien
gaacatctcgggagggccctctgtt

SEQ ID NO: 5245242 - DNA, 25 bp, Homo sapien
tctcagcatatgttgcaggacacca

SEQ ID NO: 5245243 - DNA, 25 bp, Homo sapien
gctcaggcaaatactctgcagctgt

SEQ ID NO: 5245244 - DNA, 25 bp, Homo sapien
ggatgggccattccgatctgcctta

SEQ ID NO: 5245245 - DNA, 25 bp, Homo sapien
tatacctcatttcaggcactaaagt

SEQ ID NO: 5245246 - DNA, 25 bp, Homo sapien
tctcatataagctacacatctgtgc

SEQ ID NO: 5245247 - DNA, 25 bp, Homo sapien
cacccggccattaacagtatttctt

SEQ ID NO: 5245248 - DNA, 25 bp, Homo sapien
aagtgtgcctttagagcaaatcagg

SEQ ID NO: 5245249 - DNA, 25 bp, Homo sapien
tttaagtcctggtagatcttctcac

SEQ ID NO: 5245250 - DNA, 25 bp, Homo sapien
tagattgccctttaagtcctggtag

SEQ ID NO: 5245251 - DNA, 25 bp, Homo sapien
tcttctcacacaagcatctcagcat

SEQ ID NO: 5245252 - DNA, 25 bp, Homo sapien
gtagatcttctcacacaagcatctc

SEQ ID NO: 5245253 - DNA, 25 bp, Homo sapien
agaggagctaactcagcaccagctc

SEQ ID NO: 5245254 - DNA, 25 bp, Homo sapien
gagaggagctaactcagcaccagct

SEQ ID NO: 5245255 - DNA, 25 bp, Homo sapien
agagaggagctaactcagcaccagc

SEQ ID NO: 5245256 - DNA, 25 bp, Homo sapien
ttctggaaggccaacggttgacagc

SEQ ID NO: 5245257 - DNA, 25 bp, Homo sapien
cgaaatgcatgagcagcggcagaca

SEQ ID NO: 5245258 - DNA, 25 bp, Homo sapien
ggatgtgatgctgctccgaaatgca

SEQ ID NO: 5245259 - DNA, 25 bp, Homo sapien
ggagccctttccagggttgattcta

SEQ ID NO: 5245260 - DNA, 25 bp, Homo sapien
ccagatggaaggatcatctcaaggg

SEQ ID NO: 5245261 - DNA, 25 bp, Homo sapien
cagatggaaggatcatctcaaggga

SEQ ID NO: 5245262 - DNA, 25 bp, Homo sapien
ggccagatggaaggatcatctcaag

SEQ ID NO: 5245263 - DNA, 25 bp, Homo sapien
gatggaaggatcatctcaagggaac

SEQ ID NO: 5245264 - DNA, 25 bp, Homo sapien
taaaattctctggagaatttgcgtt

SEQ ID NO: 5245265 - DNA, 25 bp, Homo sapien
tggagaatttgcgttaatttcctcc

SEQ ID NO: 5245266 - DNA, 25 bp, Homo sapien
tctctggagaatttgcgttaatttc

SEQ ID NO: 5245267 - DNA, 25 bp, Homo sapien
agaatttgcgttaatttcctccatg

SEQ ID NO: 5245268 - DNA, 25 bp, Homo sapien
tcaactatccaatgtcccctggata

SEQ ID NO: 5245269 - DNA, 25 bp, Homo sapien
atccaatgtcccctggataggacca

SEQ ID NO: 5245270 - DNA, 25 bp, Homo sapien
actatccaatgtcccctggatagga

SEQ ID NO: 5245271 - DNA, 25 bp, Homo sapien
aactatccaatgtcccctggatagg

SEQ ID NO: 5245272 - DNA, 25 bp, Homo sapien
ctgaagctcttttaagatgtggttt

SEQ ID NO: 5245273 - DNA, 25 bp, Homo sapien
tttccacggacttctgaagctcttt

SEQ ID NO: 5245274 - DNA, 25 bp, Homo sapien
tttttttctctgtaagcatatttca

SEQ ID NO: 5245275 - DNA, 25 bp, Homo sapien
tcttttaagatgtggttttggagct

SEQ ID NO: 5245276 - DNA, 25 bp, Homo sapien
tcagccaaggtctttcttgccgagc

SEQ ID NO: 5245277 - DNA, 25 bp, Homo sapien
tttcttgccgagcaccttgagaatg

SEQ ID NO: 5245278 - DNA, 25 bp, Homo sapien
ttgagaatgtgctgttcatctgtgc

SEQ ID NO: 5245279 - DNA, 25 bp, Homo sapien
caccttgagaatgtgctgttcatct

SEQ ID NO: 5245280 - DNA, 25 bp, Homo sapien
catcctccaggggatgggcattgag

SEQ ID NO: 5245281 - DNA, 25 bp, Homo sapien
gctatgggagtaaagagaattgtac

SEQ ID NO: 5245282 - DNA, 25 bp, Homo sapien
ttagaacagcatggccatcctccag

SEQ ID NO: 5245283 - DNA, 25 bp, Homo sapien
gtgaccagttagaacagcatggcca

SEQ ID NO: 5245284 - DNA, 25 bp, Homo sapien
ctgctgccaaatggttcttctaaaa

SEQ ID NO: 5245285 - DNA, 25 bp, Homo sapien
gccatctgcatcagcatgccattcc

SEQ ID NO: 5245286 - DNA, 25 bp, Homo sapien
gctgctgccaaatggttcttctaaa

SEQ ID NO: 5245287 - DNA, 25 bp, Homo sapien
ttggcatcatagtccatgttggagc

SEQ ID NO: 5245288 - DNA, 25 bp, Homo sapien
catcatagtccatgttggagcctcg

SEQ ID NO: 5245289 - DNA, 25 bp, Homo sapien
gtccatgttggagcctcgtcctctt

SEQ ID NO: 5245290 - DNA, 25 bp, Homo sapien
tctttttggcatcatagtccatgtt

SEQ ID NO: 5245291 - DNA, 25 bp, Homo sapien
actatttaaagggtccgattggcag

SEQ ID NO: 5245292 - DNA, 25 bp, Homo sapien
cagccagcagaatgtaactatttaa

SEQ ID NO: 5245293 - DNA, 25 bp, Homo sapien
taaagggtccgattggcagtgagct

SEQ ID NO: 5245294 - DNA, 25 bp, Homo sapien
gtgtcagccagcagaatgtaactat

SEQ ID NO: 5245295 - DNA, 25 bp, Homo sapien
tggctgtgagtctggtgaacccttt

SEQ ID NO: 5245296 - DNA, 25 bp, Homo sapien
gttagagcttgcttcacagactcca

SEQ ID NO: 5245297 - DNA, 25 bp, Homo sapien
tcttgaaaagtcttgccatcttggc

SEQ ID NO: 5245298 - DNA, 25 bp, Homo sapien
tggctgctttcgcattgcttcagag

SEQ ID NO: 5245299 - DNA, 25 bp, Homo sapien
tcttgtgaaaagcattgggaaagcc

SEQ ID NO: 5245300 - DNA, 25 bp, Homo sapien
cggcgtctagggatcaaggttattc

SEQ ID NO: 5245301 - DNA, 25 bp, Homo sapien
ctcacttgagggaaatggcggcgtc

SEQ ID NO: 5245302 - DNA, 25 bp, Homo sapien
tatcagacaagtaatagctgcaggc

SEQ ID NO: 5245303 - DNA, 25 bp, Homo sapien
tcaaacgtggtaaacaatagaggaa

SEQ ID NO: 5245304 - DNA, 25 bp, Homo sapien
gttagagctttttggcagtaacaca

SEQ ID NO: 5245305 - DNA, 25 bp, Homo sapien
tgttttactcccatcactaccctgg

SEQ ID NO: 5245306 - DNA, 25 bp, Homo sapien
cattagtgaatgttcccggttctct

SEQ ID NO: 5245307 - DNA, 25 bp, Homo sapien
tgtgttttgtatgttcccgctttgc

SEQ ID NO: 5245308 - DNA, 25 bp, Homo sapien
ccttgtcttgagatccaactgtggg

SEQ ID NO: 5245309 - DNA, 25 bp, Homo sapien
ttacaagggcacattgcagggatcc

SEQ ID NO: 5245310 - DNA, 25 bp, Homo sapien
ctttgctcttcactttcgatttgtt

SEQ ID NO: 5245311 - DNA, 25 bp, Homo sapien
aaaccctcatggaggctgtcctggg

SEQ ID NO: 5245312 - DNA, 25 bp, Homo sapien
ggctgtcctgggtgatgagccgcat

SEQ ID NO: 5245313 - DNA, 25 bp, Homo sapien
cttctccaaaccctcatggaggctg

SEQ ID NO: 5245314 - DNA, 25 bp, Homo sapien
ctgaaagacagcatcttctccaaac

SEQ ID NO: 5245315 - DNA, 25 bp, Homo sapien
tatccagacaggatgcctctgcccc

SEQ ID NO: 5245316 - DNA, 25 bp, Homo sapien
tgggtcaatatccagacaggatgcc

SEQ ID NO: 5245317 - DNA, 25 bp, Homo sapien
ggtcaatatccagacaggatgcctc

SEQ ID NO: 5245318 - DNA, 25 bp, Homo sapien
atccagacaggatgcctctgcccct

SEQ ID NO: 5245319 - DNA, 25 bp, Homo sapien
aggtgcatttctagatgtgatgttc

SEQ ID NO: 5245320 - DNA, 25 bp, Homo sapien
taggaggtgcatttctagatgtgat

SEQ ID NO: 5245321 - DNA, 25 bp, Homo sapien
gtgcatttctagatgtgatgttcac

SEQ ID NO: 5245322 - DNA, 25 bp, Homo sapien
gtttaggaggtgcatttctagatgt

SEQ ID NO: 5245323 - DNA, 25 bp, Homo sapien
aaacaagatgtcctagctggtggcc

SEQ ID NO: 5245324 - DNA, 25 bp, Homo sapien
actggaaataaaccggcaatcttgc

SEQ ID NO: 5245325 - DNA, 25 bp, Homo sapien
gctggtggccgataagtttatagcc

SEQ ID NO: 5245326 - DNA, 25 bp, Homo sapien
ggcagtttacacagcttgagtcaaa

SEQ ID NO: 5245327 - DNA, 25 bp, Homo sapien
gcttgaaggcttgtttagtaatttc

SEQ ID NO: 5245328 - DNA, 25 bp, Homo sapien
aatctcgtaaggaaaatgccctggg

SEQ ID NO: 5245329 - DNA, 25 bp, Homo sapien
acaaagggcttgtagctccatcagc

SEQ ID NO: 5245330 - DNA, 25 bp, Homo sapien
gcacacaaagggcttgtagctccat

SEQ ID NO: 5245331 - DNA, 25 bp, Homo sapien
ctctgagaagcgctgggacttgcac

SEQ ID NO: 5245332 - DNA, 25 bp, Homo sapien
tgccctgagaatgcaaggacgggtg

SEQ ID NO: 5245333 - DNA, 25 bp, Homo sapien
caggcatcactttgcgccaagcttc

SEQ ID NO: 5245334 - DNA, 25 bp, Homo sapien
gctgtctggctctccagacaactcc

SEQ ID NO: 5245335 - DNA, 25 bp, Homo sapien
caatggacattttgcctaagctatg

SEQ ID NO: 5245336 - DNA, 25 bp, Homo sapien
aacgttgcttggctgatcttcatca

SEQ ID NO: 5245337 - DNA, 25 bp, Homo sapien
tactgaaattcgtatctagtgtgaa

SEQ ID NO: 5245338 - DNA, 25 bp, Homo sapien
ctagtgtgaatatttgatgatgact

SEQ ID NO: 5245339 - DNA, 25 bp, Homo sapien
tcttatagccaattttaagccttcc

SEQ ID NO: 5245340 - DNA, 25 bp, Homo sapien
gaccccaaggagatagaacaaggct

SEQ ID NO: 5245341 - DNA, 25 bp, Homo sapien
ccagaagtgagcagtctatatacct

SEQ ID NO: 5245342 - DNA, 25 bp, Homo sapien
tcccctgagataataagtgtatcct

SEQ ID NO: 5245343 - DNA, 25 bp, Homo sapien
catgtggttcgaaaggcagttttat

SEQ ID NO: 5245344 - DNA, 25 bp, Homo sapien
ttctctgggatcgtgatagcccatc

SEQ ID NO: 5245345 - DNA, 25 bp, Homo sapien
gctgaatcatgtggttcgaaaggca

SEQ ID NO: 5245346 - DNA, 25 bp, Homo sapien
ttataatgtcgactgttttctctgg

SEQ ID NO: 5245347 - DNA, 25 bp, Homo sapien
tagtgacaccgaaagctggatctct

SEQ ID NO: 5245348 - DNA, 25 bp, Homo sapien
ccaagccggtaataagcagaaggac

SEQ ID NO: 5245349 - DNA, 25 bp, Homo sapien
tgaagttctagcaatccaagccggt

SEQ ID NO: 5245350 - DNA, 25 bp, Homo sapien
aaaagccggcagtgatagtgacacc

SEQ ID NO: 5245351 - DNA, 25 bp, Homo sapien
ctcttgacaggggttcggaagtgat

SEQ ID NO: 5245352 - DNA, 25 bp, Homo sapien
tcttgacaggggttcggaagtgatc

SEQ ID NO: 5245353 - DNA, 25 bp, Homo sapien
gctcttgacaggggttcggaagtga

SEQ ID NO: 5245354 - DNA, 25 bp, Homo sapien
agctcttgacaggggttcggaagtg

SEQ ID NO: 5245355 - DNA, 25 bp, Homo sapien
aagctctggcatgtcaccttcctga

SEQ ID NO: 5245356 - DNA, 25 bp, Homo sapien
ggctttgcgacataatgctgtccac

SEQ ID NO: 5245357 - DNA, 25 bp, Homo sapien
taaattctgtcctccatagatggct

SEQ ID NO: 5245358 - DNA, 25 bp, Homo sapien
gatgttcaatcctgcatcaaccaaa

SEQ ID NO: 5245359 - DNA, 25 bp, Homo sapien
gttcactgctggcttctagcaccat

SEQ ID NO: 5245360 - DNA, 25 bp, Homo sapien
tttttcctgaactgccaaagttcac

SEQ ID NO: 5245361 - DNA, 25 bp, Homo sapien
gtctcccctggaggggaccgctgct

SEQ ID NO: 5245362 - DNA, 25 bp, Homo sapien
caagctttccctaagcttttaggtg

SEQ ID NO: 5245363 - DNA, 25 bp, Homo sapien
agacttggcattgggagagatcagc

SEQ ID NO: 5245364 - DNA, 25 bp, Homo sapien
catattagatcatgtgggacgcccc

SEQ ID NO: 5245365 - DNA, 25 bp, Homo sapien
gaaggaaagtcctctggaactcaga

SEQ ID NO: 5245366 - DNA, 25 bp, Homo sapien
gaacagttaccgttcaaagtgctga

SEQ ID NO: 5245367 - DNA, 25 bp, Homo sapien
tgtatgggaacctgggttgtgtttc

SEQ ID NO: 5245368 - DNA, 25 bp, Homo sapien
ctgtatgggaacctgggttgtgttt

SEQ ID NO: 5245369 - DNA, 25 bp, Homo sapien
cttcttcttaaagccgagtgtctgg

SEQ ID NO: 5245370 - DNA, 25 bp, Homo sapien
aggctcccaatcacattgcctattg

SEQ ID NO: 5245371 - DNA, 25 bp, Homo sapien
gttcactggagagcatgggccgttg

SEQ ID NO: 5245372 - DNA, 25 bp, Homo sapien
tcccaatcacattgcctattggttc

SEQ ID NO: 5245373 - DNA, 25 bp, Homo sapien
gcatgggccgttggagtcctgacgt

SEQ ID NO: 5245374 - DNA, 25 bp, Homo sapien
tgtgctaataggaaacatcactgga

SEQ ID NO: 5245375 - DNA, 25 bp, Homo sapien
gatttcctcgtacacttgggtgttg

SEQ ID NO: 5245376 - DNA, 25 bp, Homo sapien
ggaatagtacagatctcaaatgtgc

SEQ ID NO: 5245377 - DNA, 25 bp, Homo sapien
tgaacatggccaagctggaatagta

SEQ ID NO: 5245378 - DNA, 25 bp, Homo sapien
agacccttcatttctatacctcttt

SEQ ID NO: 5245379 - DNA, 25 bp, Homo sapien
aagacccttcatttctatacctctt

SEQ ID NO: 5245380 - DNA, 25 bp, Homo sapien
cttcatttctatacctcttttttca

SEQ ID NO: 5245381 - DNA, 25 bp, Homo sapien
ccgccacaggggtcaaacttttgat

SEQ ID NO: 5245382 - DNA, 25 bp, Homo sapien
caggggtcaaacttttgatggcttt

SEQ ID NO: 5245383 - DNA, 25 bp, Homo sapien
cgccacaggggtcaaacttttgatg

SEQ ID NO: 5245384 - DNA, 25 bp, Homo sapien
ccacaggggtcaaacttttgatggc

SEQ ID NO: 5245385 - DNA, 25 bp, Homo sapien
tccttttctccagtggagagactca

SEQ ID NO: 5245386 - DNA, 25 bp, Homo sapien
ccttttctccagtggagagactcac

SEQ ID NO: 5245387 - DNA, 25 bp, Homo sapien
ttttccttttctccagtggagagac

SEQ ID NO: 5245388 - DNA, 25 bp, Homo sapien
ttccttttctccagtggagagactc

SEQ ID NO: 5245389 - DNA, 25 bp, Homo sapien
cagtgttggtgccagcgttccagtg

SEQ ID NO: 5245390 - DNA, 25 bp, Homo sapien
caagaacaacgataatacttgtcag

SEQ ID NO: 5245391 - DNA, 25 bp, Homo sapien
gtcagtgattgcaacagtggaggac

SEQ ID NO: 5245392 - DNA, 25 bp, Homo sapien
ggacagtgttggtgccagcgttcca

SEQ ID NO: 5245393 - DNA, 25 bp, Homo sapien
cctcaagttatgctctccacctttg

SEQ ID NO: 5245394 - DNA, 25 bp, Homo sapien
tccacctttgcatgctttcttatct

SEQ ID NO: 5245395 - DNA, 25 bp, Homo sapien
tggtgatagtcgcctgctttcttct

SEQ ID NO: 5245396 - DNA, 25 bp, Homo sapien
tcatttttcctcaagttatgctctc

SEQ ID NO: 5245397 - DNA, 25 bp, Homo sapien
ctgaagcttctgcttatggagtttt

SEQ ID NO: 5245398 - DNA, 25 bp, Homo sapien
tctgagcactgaagtggctaatgcc

SEQ ID NO: 5245399 - DNA, 25 bp, Homo sapien
tctgcttatggagttttgaagttct

SEQ ID NO: 5245400 - DNA, 25 bp, Homo sapien
ttctatttctctgagcactgaagtg

SEQ ID NO: 5245401 - DNA, 25 bp, Homo sapien
gcttggagtgttacaagaagcatca

SEQ ID NO: 5245402 - DNA, 25 bp, Homo sapien
tcatcttggccttgtttgggagtag

SEQ ID NO: 5245403 - DNA, 25 bp, Homo sapien
tgcatcttttaccaggaggcttgga

SEQ ID NO: 5245404 - DNA, 25 bp, Homo sapien
agcacttgagcttatatccaccact

SEQ ID NO: 5245405 - DNA, 25 bp, Homo sapien
tttatttgccgtagaacctttgtgc

SEQ ID NO: 5245406 - DNA, 25 bp, Homo sapien
gcgatatccccagatgctgtgaact

SEQ ID NO: 5245407 - DNA, 25 bp, Homo sapien
agatgtggaagatgcgatatcccca

SEQ ID NO: 5245408 - DNA, 25 bp, Homo sapien
ccacctctaccacaggtgctgagtt

SEQ ID NO: 5245409 - DNA, 25 bp, Homo sapien
taattcttgaccaacggatcttgga

SEQ ID NO: 5245410 - DNA, 25 bp, Homo sapien
agtaattcttgaccaacggatcttg

SEQ ID NO: 5245411 - DNA, 25 bp, Homo sapien
aattcttgaccaacggatcttggaa

SEQ ID NO: 5245412 - DNA, 25 bp, Homo sapien
ttagtaattcttgaccaacggatct

SEQ ID NO: 5245413 - DNA, 25 bp, Homo sapien
tgaagcttttaatgcctaatggtaa

SEQ ID NO: 5245414 - DNA, 25 bp, Homo sapien
acattataaatatgagcagaagcct

SEQ ID NO: 5245415 - DNA, 25 bp, Homo sapien
gacttatttcgatccaaggactgga

SEQ ID NO: 5245416 - DNA, 25 bp, Homo sapien
gaatgtctacctcagaactttagca

SEQ ID NO: 5245417 - DNA, 25 bp, Homo sapien
tactccttgacccagacaattggca

SEQ ID NO: 5245418 - DNA, 25 bp, Homo sapien
cactggaaaggatgtgtgctggcac

SEQ ID NO: 5245419 - DNA, 25 bp, Homo sapien
ggagctggcccatgagatatgtatt

SEQ ID NO: 5245420 - DNA, 25 bp, Homo sapien
tcaatgcccttgctgaacaggagct

SEQ ID NO: 5245421 - DNA, 25 bp, Homo sapien
gagccctgacgtttttctaacttga

SEQ ID NO: 5245422 - DNA, 25 bp, Homo sapien
tctttatatgggacattgtaacgca

SEQ ID NO: 5245423 - DNA, 25 bp, Homo sapien
cgcagacttgggtaatagcattagt

SEQ ID NO: 5245424 - DNA, 25 bp, Homo sapien
ggaatttatcatgtggttctttata

SEQ ID NO: 5245425 - DNA, 25 bp, Homo sapien
ttctgactcttaaaggccaaggtgg

SEQ ID NO: 5245426 - DNA, 25 bp, Homo sapien
acttgtttagcaccattcattgctc

SEQ ID NO: 5245427 - DNA, 25 bp, Homo sapien
ctctccaagtacagctctcgcagcc

SEQ ID NO: 5245428 - DNA, 25 bp, Homo sapien
aacagaaccaggtccttggtcttct

SEQ ID NO: 5245429 - DNA, 25 bp, Homo sapien
ggaatatggcaactgaaaactagac

SEQ ID NO: 5245430 - DNA, 25 bp, Homo sapien
aacttcactagtggcaactgaccct

SEQ ID NO: 5245431 - DNA, 25 bp, Homo sapien
tttcctcccgtgacagaaagcaaag

SEQ ID NO: 5245432 - DNA, 25 bp, Homo sapien
taatgtgtgtagcagacgtagggtc

SEQ ID NO: 5245433 - DNA, 25 bp, Homo sapien
gtatgtgaaatcctcattatttgcc

SEQ ID NO: 5245434 - DNA, 25 bp, Homo sapien
caaattgtgcagcttattatctgtc

SEQ ID NO: 5245435 - DNA, 25 bp, Homo sapien
gtcaactatatctatacagagctgt

SEQ ID NO: 5245436 - DNA, 25 bp, Homo sapien
gattcatgggtttatacatacattg

SEQ ID NO: 5245437 - DNA, 25 bp, Homo sapien
agatgtgatgtctagcattgcagca

SEQ ID NO: 5245438 - DNA, 25 bp, Homo sapien
cctgagcatagatgtgatgtctagc

SEQ ID NO: 5245439 - DNA, 25 bp, Homo sapien
catagatgtgatgtctagcattgca

SEQ ID NO: 5245440 - DNA, 25 bp, Homo sapien
tgctgtcctgagcatagatgtgatg

SEQ ID NO: 5245441 - DNA, 25 bp, Homo sapien
gatgccacgtggatcaataatctgg

SEQ ID NO: 5245442 - DNA, 25 bp, Homo sapien
ttactttgataagggaggctccagt

SEQ ID NO: 5245443 - DNA, 25 bp, Homo sapien
gaggtcttctttcccatgcctgatg

SEQ ID NO: 5245444 - DNA, 25 bp, Homo sapien
tcttccacttaatgctgatgccacg

SEQ ID NO: 5245445 - DNA, 25 bp, Homo sapien
aatagagatgagattacctctggcc

SEQ ID NO: 5245446 - DNA, 25 bp, Homo sapien
tagaaacgaaggaggtcaacacatc

SEQ ID NO: 5245447 - DNA, 25 bp, Homo sapien
tgattgtactgggtggatccctcag

SEQ ID NO: 5245448 - DNA, 25 bp, Homo sapien
gactgtgtcccatccataggaacaa

SEQ ID NO: 5245449 - DNA, 25 bp, Homo sapien
gctgcgctgggtaatttctcattca

SEQ ID NO: 5245450 - DNA, 25 bp, Homo sapien
aaacttctattgcatcccactcgag

SEQ ID NO: 5245451 - DNA, 25 bp, Homo sapien
ccagcacaggcaaagggacctattg

SEQ ID NO: 5245452 - DNA, 25 bp, Homo sapien
ttcagtcacacaaaccgaggcaagt

SEQ ID NO: 5245453 - DNA, 25 bp, Homo sapien
tgcctgtccgattcctcagtgagaa

SEQ ID NO: 5245454 - DNA, 25 bp, Homo sapien
catgctggataggaaacttgagaat

SEQ ID NO: 5245455 - DNA, 25 bp, Homo sapien
ccgtgatatagaaacatgcctgtcc

SEQ ID NO: 5245456 - DNA, 25 bp, Homo sapien
tggccacagagatagcagtggatat

SEQ ID NO: 5245457 - DNA, 25 bp, Homo sapien
ccgcagagggcattgcatttagcag

SEQ ID NO: 5245458 - DNA, 25 bp, Homo sapien
tttgtctaggagtcctcatacagag

SEQ ID NO: 5245459 - DNA, 25 bp, Homo sapien
ctaggagtcctcatacagaggaaca

SEQ ID NO: 5245460 - DNA, 25 bp, Homo sapien
atacagaggaacaacccgcagaggg

SEQ ID NO: 5245461 - DNA, 25 bp, Homo sapien
aacttttggcaagctaggagccaca

SEQ ID NO: 5245462 - DNA, 25 bp, Homo sapien
tattgtcaagagtcacggcagctac

SEQ ID NO: 5245463 - DNA, 25 bp, Homo sapien
tccttcagtgacacgttgggccttg

SEQ ID NO: 5245464 - DNA, 25 bp, Homo sapien
gattgccctggttgcaaggtttgag

SEQ ID NO: 5245465 - DNA, 25 bp, Homo sapien
tgcaggtaaggggcacccgggagcc

SEQ ID NO: 5245466 - DNA, 25 bp, Homo sapien
cagcgtctcctctgccaaaacccag

SEQ ID NO: 5245467 - DNA, 25 bp, Homo sapien
cccagatgtaaagcgggaccccagc

SEQ ID NO: 5245468 - DNA, 25 bp, Homo sapien
cgcggacaccgaccccagatgtaaa

SEQ ID NO: 5245469 - DNA, 25 bp, Homo sapien
gcgatcgacagtctcgccagcgtct

SEQ ID NO: 5245470 - DNA, 25 bp, Homo sapien
acatagcaaccgcagggtccagaag

SEQ ID NO: 5245471 - DNA, 25 bp, Homo sapien
gaatcgccattgtaactccccacag

SEQ ID NO: 5245472 - DNA, 25 bp, Homo sapien
tgctccccaagccttgggagatagg

SEQ ID NO: 5245473 - DNA, 25 bp, Homo sapien
cagtgtgactctgtgaaccctgtgc

SEQ ID NO: 5245474 - DNA, 25 bp, Homo sapien
aaatatacagatgcctttcatacat

SEQ ID NO: 5245475 - DNA, 25 bp, Homo sapien
gaaatatacagatgcctttcataca

SEQ ID NO: 5245476 - DNA, 25 bp, Homo sapien
gagtggagtgacgtccatggagatt

SEQ ID NO: 5245477 - DNA, 25 bp, Homo sapien
gtggagtgacgtccatggagattgg

SEQ ID NO: 5245478 - DNA, 25 bp, Homo sapien
tccatggagattggggatgtatcca

SEQ ID NO: 5245479 - DNA, 25 bp, Homo sapien
gggagtggagtgacgtccatggaga

SEQ ID NO: 5245480 - DNA, 25 bp, Homo sapien
tgtttggaatttcctcgtccacagt

SEQ ID NO: 5245481 - DNA, 25 bp, Homo sapien
agtggctgatgagtacagtcctagg

SEQ ID NO: 5245482 - DNA, 25 bp, Homo sapien
ttaatgagcatgagggtccgctgtt

SEQ ID NO: 5245483 - DNA, 25 bp, Homo sapien
gctgatgagtacagtcctaggccat

SEQ ID NO: 5245484 - DNA, 25 bp, Homo sapien
gtaatgagaagaaggtatatctccc

SEQ ID NO: 5245485 - DNA, 25 bp, Homo sapien
aggagtaatgagaagaaggtatatc

SEQ ID NO: 5245486 - DNA, 25 bp, Homo sapien
ctaaggagtaatgagaagaaggtat

SEQ ID NO: 5245487 - DNA, 25 bp, Homo sapien
aatgagaagaaggtatatctccctt

SEQ ID NO: 5245488 - DNA, 25 bp, Homo sapien
tgcctctcagaacccgaaacagtgt

SEQ ID NO: 5245489 - DNA, 25 bp, Homo sapien
ctctcagaacccgaaacagtgttga

SEQ ID NO: 5245490 - DNA, 25 bp, Homo sapien
tctgcctctcagaacccgaaacagt

SEQ ID NO: 5245491 - DNA, 25 bp, Homo sapien
tcagaacccgaaacagtgttgagaa

SEQ ID NO: 5245492 - DNA, 25 bp, Homo sapien
ctggctggtagaattgtcctttcca

SEQ ID NO: 5245493 - DNA, 25 bp, Homo sapien
tggctggtagaattgtcctttccac

SEQ ID NO: 5245494 - DNA, 25 bp, Homo sapien
tccccttaatcatcctgtgaggcat

SEQ ID NO: 5245495 - DNA, 25 bp, Homo sapien
aatacagccctgaacttctcccctt

SEQ ID NO: 5245496 - DNA, 25 bp, Homo sapien
gtcagtcctgtggtcgcttcctcca

SEQ ID NO: 5245497 - DNA, 25 bp, Homo sapien
gccagtcagtcctgtggtcgcttcc

SEQ ID NO: 5245498 - DNA, 25 bp, Homo sapien
gccaacttgcccagaaaactgctac

SEQ ID NO: 5245499 - DNA, 25 bp, Homo sapien
ggccaacttgcccagaaaactgcta

SEQ ID NO: 5245500 - DNA, 25 bp, Homo sapien
ccaacttgcccagaaaactgctacc

SEQ ID NO: 5245501 - DNA, 25 bp, Homo sapien
tgagaaacaatccatagtgaaatgc

SEQ ID NO: 5245502 - DNA, 25 bp, Homo sapien
agaaacaatccatagtgaaatgctg

SEQ ID NO: 5245503 - DNA, 25 bp, Homo sapien
ctggtgagaaacaatccatagtgaa

SEQ ID NO: 5245504 - DNA, 25 bp, Homo sapien
ggtgagaaacaatccatagtgaaat

SEQ ID NO: 5245505 - DNA, 25 bp, Homo sapien
ctgtatggtccttaattcccggatc

SEQ ID NO: 5245506 - DNA, 25 bp, Homo sapien
tgcagtcaaagacttcccctaaagc

SEQ ID NO: 5245507 - DNA, 25 bp, Homo sapien
ccccttgcagtcaaagacttcccct

SEQ ID NO: 5245508 - DNA, 25 bp, Homo sapien
gcccccttgcagtcaaagacttccc

SEQ ID NO: 5245509 - DNA, 25 bp, Homo sapien
ccttgcagtcaaagacttcccctaa

SEQ ID NO: 5245510 - DNA, 25 bp, Homo sapien
ttccataaattacaccgtgtttctg

SEQ ID NO: 5245511 - DNA, 25 bp, Homo sapien
gcaaatttggatggagggttaccca

SEQ ID NO: 5245512 - DNA, 25 bp, Homo sapien
gttgattcgaaagatgccatccacc

SEQ ID NO: 5245513 - DNA, 25 bp, Homo sapien
cctatctcagactgggcaaatttgg

SEQ ID NO: 5245514 - DNA, 25 bp, Homo sapien
tctttcagactttcggggcgccctc

SEQ ID NO: 5245515 - DNA, 25 bp, Homo sapien
tgggtttgcctctttcagactttcg

SEQ ID NO: 5245516 - DNA, 25 bp, Homo sapien
agtcaggtttgcctccagattctgc

SEQ ID NO: 5245517 - DNA, 25 bp, Homo sapien
tttggtgtgggatctgccagtcagg

SEQ ID NO: 5245518 - DNA, 25 bp, Homo sapien
gactggttggatcgcctccatcagg

SEQ ID NO: 5245519 - DNA, 25 bp, Homo sapien
gttaagctgatggttgatgtacaag

SEQ ID NO: 5245520 - DNA, 25 bp, Homo sapien
gccttattttcagggttcagcagag

SEQ ID NO: 5245521 - DNA, 25 bp, Homo sapien
aactttcttgaaaggctgcgactgg

SEQ ID NO: 5245522 - DNA, 25 bp, Homo sapien
ctggaagcacttgcagcacgtttcc

SEQ ID NO: 5245523 - DNA, 25 bp, Homo sapien
cattgttcacactcaacacataaga

SEQ ID NO: 5245524 - DNA, 25 bp, Homo sapien
tgcagcacgtttcctggcccattgt

SEQ ID NO: 5245525 - DNA, 25 bp, Homo sapien
cctggtctccattggccatgcagtg

SEQ ID NO: 5245526 - DNA, 25 bp, Homo sapien
tgagttgtttgttgctaagaggtag

SEQ ID NO: 5245527 - DNA, 25 bp, Homo sapien
aaagtcaagggttctatattgtgag

SEQ ID NO: 5245528 - DNA, 25 bp, Homo sapien
aaggcctagcgaggcaaattctgat

SEQ ID NO: 5245529 - DNA, 25 bp, Homo sapien
taggcctcaaaaacatacgtaacga

SEQ ID NO: 5245530 - DNA, 25 bp, Homo sapien
tccagatggatagattgcaaaaatt

SEQ ID NO: 5245531 - DNA, 25 bp, Homo sapien
ctttcaccaatgcttgtttttatca

SEQ ID NO: 5245532 - DNA, 25 bp, Homo sapien
atcctttcaccaatgcttgttttta

SEQ ID NO: 5245533 - DNA, 25 bp, Homo sapien
gtcttacgtgtaagtcttttatcca

SEQ ID NO: 5245534 - DNA, 25 bp, Homo sapien
ctgaaaccatagactggacataagg

SEQ ID NO: 5245535 - DNA, 25 bp, Homo sapien
tggacataaggtaaccgtacttcaa

SEQ ID NO: 5245536 - DNA, 25 bp, Homo sapien
ccatagactggacataaggtaaccg

SEQ ID NO: 5245537 - DNA, 25 bp, Homo sapien
cataaggtaaccgtacttcaacagg

SEQ ID NO: 5245538 - DNA, 25 bp, Homo sapien
cctgcgctaacgtcagctgtctgaa

SEQ ID NO: 5245539 - DNA, 25 bp, Homo sapien
cgcattgttccagagagttccgact

SEQ ID NO: 5245540 - DNA, 25 bp, Homo sapien
cactgtgaattgtacaaggatccct

SEQ ID NO: 5245541 - DNA, 25 bp, Homo sapien
gactttgctttcagaggccatggga

SEQ ID NO: 5245542 - DNA, 25 bp, Homo sapien
catgcaacctgggttagggatgaag

SEQ ID NO: 5245543 - DNA, 25 bp, Homo sapien
ttaccatgcaacctgggttagggat

SEQ ID NO: 5245544 - DNA, 25 bp, Homo sapien
ggaagttgaggaggctcgttcaagt

SEQ ID NO: 5245545 - DNA, 25 bp, Homo sapien
aagttgaggaggctcgttcaagtcc

SEQ ID NO: 5245546 - DNA, 25 bp, Homo sapien
ttaaatatgcgaagatcaggttggg

SEQ ID NO: 5245547 - DNA, 25 bp, Homo sapien
gttaaatatgcgaagatcaggttgg

SEQ ID NO: 5245548 - DNA, 25 bp, Homo sapien
agttaaatatgcgaagatcaggttg

SEQ ID NO: 5245549 - DNA, 25 bp, Homo sapien
ttagttaaatatgcgaagatcaggt

SEQ ID NO: 5245550 - DNA, 25 bp, Homo sapien
cagatagccccagtgactagcacag

SEQ ID NO: 5245551 - DNA, 25 bp, Homo sapien
gctctacagtgggttgcaatccatg

SEQ ID NO: 5245552 - DNA, 25 bp, Homo sapien
taccgtgggtcttttgcacccacag

SEQ ID NO: 5245553 - DNA, 25 bp, Homo sapien
gcaatccatgtctggaacaaatcac

SEQ ID NO: 5245554 - DNA, 25 bp, Homo sapien
catcttgtttgattgtaagttgtgg

SEQ ID NO: 5245555 - DNA, 25 bp, Homo sapien
ctttcctaagcatgcttccaaactg

SEQ ID NO: 5245556 - DNA, 25 bp, Homo sapien
tcatcttgtttgattgtaagttgtg

SEQ ID NO: 5245557 - DNA, 25 bp, Homo sapien
gcatgcttccaaactgtggccacag

SEQ ID NO: 5245558 - DNA, 25 bp, Homo sapien
caaatggaatcctgatcacccagct

SEQ ID NO: 5245559 - DNA, 25 bp, Homo sapien
ggaccccaaatggaatcctgatcac

SEQ ID NO: 5245560 - DNA, 25 bp, Homo sapien
ccaaatggaatcctgatcacccagc

SEQ ID NO: 5245561 - DNA, 25 bp, Homo sapien
ccccaaatggaatcctgatcaccca

SEQ ID NO: 5245562 - DNA, 25 bp, Homo sapien
cctgaaaatatcagtagtccgataa

SEQ ID NO: 5245563 - DNA, 25 bp, Homo sapien
gtatgtcccgaaagacacagttgac

SEQ ID NO: 5245564 - DNA, 25 bp, Homo sapien
tcagacctgaaaatatcagtagtcc

SEQ ID NO: 5245565 - DNA, 25 bp, Homo sapien
gcatttctggtctgtatgtcccgaa

SEQ ID NO: 5245566 - DNA, 25 bp, Homo sapien
gccacagtattgcttgtgttctcaa

SEQ ID NO: 5245567 - DNA, 25 bp, Homo sapien
gaacttggagctgctacaaacagga

SEQ ID NO: 5245568 - DNA, 25 bp, Homo sapien
gacagtgttaagtgataggctaccc

SEQ ID NO: 5245569 - DNA, 25 bp, Homo sapien
acatgaccggtattggaaggagtcc

SEQ ID NO: 5245570 - DNA, 25 bp, Homo sapien
ccacagttagagctggtgccacgca

SEQ ID NO: 5245571 - DNA, 25 bp, Homo sapien
tgccacagttagagctggtgccacg

SEQ ID NO: 5245572 - DNA, 25 bp, Homo sapien
tctgccacagttagagctggtgcca

SEQ ID NO: 5245573 - DNA, 25 bp, Homo sapien
tttctgccacagttagagctggtgc

SEQ ID NO: 5245574 - DNA, 25 bp, Homo sapien
agccaactgtcccatgagatttttc

SEQ ID NO: 5245575 - DNA, 25 bp, Homo sapien
ccaactgtcccatgagatttttctg

SEQ ID NO: 5245576 - DNA, 25 bp, Homo sapien
aactgtcccatgagatttttctgac

SEQ ID NO: 5245577 - DNA, 25 bp, Homo sapien
aaagccaactgtcccatgagatttt

SEQ ID NO: 5245578 - DNA, 25 bp, Homo sapien
caaggatggagatttggtgtcgttc

SEQ ID NO: 5245579 - DNA, 25 bp, Homo sapien
gcaatgttggattttgctgtcagac

SEQ ID NO: 5245580 - DNA, 25 bp, Homo sapien
gtcctataactattagaatgcaatg

SEQ ID NO: 5245581 - DNA, 25 bp, Homo sapien
ctggaaactctcatagccaaggatg

SEQ ID NO: 5245582 - DNA, 25 bp, Homo sapien
acaaagttccaaatcgggcagcccg

SEQ ID NO: 5245583 - DNA, 25 bp, Homo sapien
ggtaggcccgtagagattgaacatc

SEQ ID NO: 5245584 - DNA, 25 bp, Homo sapien
tcatagctgcgctccttcaggacac

SEQ ID NO: 5245585 - DNA, 25 bp, Homo sapien
catctgttctgggtactgtctctgt

SEQ ID NO: 5245586 - DNA, 25 bp, Homo sapien
tattcgaaggtttatcttcaatgaa

SEQ ID NO: 5245587 - DNA, 25 bp, Homo sapien
gaggctctggaattgacaagatgaa

SEQ ID NO: 5245588 - DNA, 25 bp, Homo sapien
tagagaaaatgcgaggctctggaat

SEQ ID NO: 5245589 - DNA, 25 bp, Homo sapien
cactacaaagacttttattcgaagg

SEQ ID NO: 5245590 - DNA, 25 bp, Homo sapien
gtgggggccggagtgagatggctgt

SEQ ID NO: 5245591 - DNA, 25 bp, Homo sapien
ggggccggagtgagatggctgtggc

SEQ ID NO: 5245592 - DNA, 25 bp, Homo sapien
gggccggagtgagatggctgtggcc

SEQ ID NO: 5245593 - DNA, 25 bp, Homo sapien
tatttcggagaagtgaacatcaact

SEQ ID NO: 5245594 - DNA, 25 bp, Homo sapien
gaagtgcttgggttctccaggagct

SEQ ID NO: 5245595 - DNA, 25 bp, Homo sapien
acatcaactaaagaagggcaggttc

SEQ ID NO: 5245596 - DNA, 25 bp, Homo sapien
ccatgtgatcggcagtacctcataa

SEQ ID NO: 5245597 - DNA, 25 bp, Homo sapien
tctaatttgggaaacgctcgcacca

SEQ ID NO: 5245598 - DNA, 25 bp, Homo sapien
ggactgccaactagtaactccctgg

SEQ ID NO: 5245599 - DNA, 25 bp, Homo sapien
tgatgatggtactcttgggactgcc

SEQ ID NO: 5245600 - DNA, 25 bp, Homo sapien
tgctcagtggtcctataatcccgtg

SEQ ID NO: 5245601 - DNA, 25 bp, Homo sapien
aatacgatgcttgccagaggaaacc

SEQ ID NO: 5245602 - DNA, 25 bp, Homo sapien
gcaagatgggagcaatttcacctgt

SEQ ID NO: 5245603 - DNA, 25 bp, Homo sapien
gaaaccttgccaaaacaacgcgagc

SEQ ID NO: 5245604 - DNA, 25 bp, Homo sapien
caacgcgagctgtattgatgcaaat

SEQ ID NO: 5245605 - DNA, 25 bp, Homo sapien
ctatgcagtgtaaaacatgatctca

SEQ ID NO: 5245606 - DNA, 25 bp, Homo sapien
tatctccaagattggtgaagggctg

SEQ ID NO: 5245607 - DNA, 25 bp, Homo sapien
cctggtgtccacagctgtttcagca

SEQ ID NO: 5245608 - DNA, 25 bp, Homo sapien
cagcatttgattcttccctatctcc

SEQ ID NO: 5245609 - DNA, 25 bp, Homo sapien
ctggaccaggtgcaggtgcagctcc

SEQ ID NO: 5245610 - DNA, 25 bp, Homo sapien
aggccctctcgggccattgccgtga

SEQ ID NO: 5245611 - DNA, 25 bp, Homo sapien
ttctgtgtgactgtagttcgtttcc

SEQ ID NO: 5245612 - DNA, 25 bp, Homo sapien
ctacaggccctctcgggccattgcc

SEQ ID NO: 5245613 - DNA, 25 bp, Homo sapien
tctgtgtgactgtagttcgtttcca

SEQ ID NO: 5245614 - DNA, 25 bp, Homo sapien
tcttggtggaggcatccagaattgc

SEQ ID NO: 5245615 - DNA, 25 bp, Homo sapien
gctgccgctatcattctaaaagaga

SEQ ID NO: 5245616 - DNA, 25 bp, Homo sapien
taaaagagactggtcccaacacctg

SEQ ID NO: 5245617 - DNA, 25 bp, Homo sapien
tttctcattggaaaactcccagacc

SEQ ID NO: 5245618 - DNA, 25 bp, Homo sapien
gatttctgcagcacgacacagtggg

SEQ ID NO: 5245619 - DNA, 25 bp, Homo sapien
ctgtgaggccgttgagagtgtttcc

SEQ ID NO: 5245620 - DNA, 25 bp, Homo sapien
cacagtgggccacaaatgctccctt

SEQ ID NO: 5245621 - DNA, 25 bp, Homo sapien
tctcttctaccgtgtccatgcgctg

SEQ ID NO: 5245622 - DNA, 25 bp, Homo sapien
tttctgcgcattgccaaacggagca

SEQ ID NO: 5245623 - DNA, 25 bp, Homo sapien
tgatcttccagtacactgtcggcgg

SEQ ID NO: 5245624 - DNA, 25 bp, Homo sapien
taagtatcacgaaaggaccgcagac

SEQ ID NO: 5245625 - DNA, 25 bp, Homo sapien
tgagccatcctcatgaacgtcagct

SEQ ID NO: 5245626 - DNA, 25 bp, Homo sapien
gccttccctgctgtttcattttcct

SEQ ID NO: 5245627 - DNA, 25 bp, Homo sapien
ccctgctgtttcattttcctgatgc

SEQ ID NO: 5245628 - DNA, 25 bp, Homo sapien
ctgctgtttcattttcctgatgcat

SEQ ID NO: 5245629 - DNA, 25 bp, Homo sapien
ctgccttccctgctgtttcattttc

SEQ ID NO: 5245630 - DNA, 25 bp, Homo sapien
tatgactcggtgaccgggccttcat

SEQ ID NO: 5245631 - DNA, 25 bp, Homo sapien
tttgatatgactcggtgaccgggcc

SEQ ID NO: 5245632 - DNA, 25 bp, Homo sapien
ttctggcctttgatatgactcggtg

SEQ ID NO: 5245633 - DNA, 25 bp, Homo sapien
cggtgaccgggccttcatgctccat

SEQ ID NO: 5245634 - DNA, 25 bp, Homo sapien
gcttcgcttgttaatcagacctctc

SEQ ID NO: 5245635 - DNA, 25 bp, Homo sapien
aaattgccatctataaggcttcgct

SEQ ID NO: 5245636 - DNA, 25 bp, Homo sapien
tataaggcttcgcttgttaatcaga

SEQ ID NO: 5245637 - DNA, 25 bp, Homo sapien
gcttgttaatcagacctctctttct

SEQ ID NO: 5245638 - DNA, 25 bp, Homo sapien
gcactggccctaggatcatccttca

SEQ ID NO: 5245639 - DNA, 25 bp, Homo sapien
ttagacactgcctcaggaagctggg

SEQ ID NO: 5245640 - DNA, 25 bp, Homo sapien
ggtgaggattgcaggtcctctctgt

SEQ ID NO: 5245641 - DNA, 25 bp, Homo sapien
cgttaccatggtcagtgcactggcc

SEQ ID NO: 5245642 - DNA, 25 bp, Homo sapien
tgttagaactaggttccctctggct

SEQ ID NO: 5245643 - DNA, 25 bp, Homo sapien
cagtcacactgcaagatggaaacgt

SEQ ID NO: 5245644 - DNA, 25 bp, Homo sapien
tgcagagggtaagattacgagctgt

SEQ ID NO: 5245645 - DNA, 25 bp, Homo sapien
gaaacgtcagtggtcagatcctgag

SEQ ID NO: 5245646 - DNA, 25 bp, Homo sapien
ggcactgagcaattaagttacttcc

SEQ ID NO: 5245647 - DNA, 25 bp, Homo sapien
tgagctccgtgtgccagttactttt

SEQ ID NO: 5245648 - DNA, 25 bp, Homo sapien
tggaaataattctcgctgacatttg

SEQ ID NO: 5245649 - DNA, 25 bp, Homo sapien
tagtaataagagtgaccataatgga

SEQ ID NO: 5245650 - DNA, 25 bp, Homo sapien
tgcatcctggccgatttttgctcct

SEQ ID NO: 5245651 - DNA, 25 bp, Homo sapien
ggttcttcgctgcatcctggccgat

SEQ ID NO: 5245652 - DNA, 25 bp, Homo sapien
gcccttgggttcttcgctgcatcct

SEQ ID NO: 5245653 - DNA, 25 bp, Homo sapien
tttttgctcctatcttgacttcctg

SEQ ID NO: 5245654 - DNA, 25 bp, Homo sapien
gaggtcagccagactgccctggtca

SEQ ID NO: 5245655 - DNA, 25 bp, Homo sapien
agccagaggtcagccagactgccct

SEQ ID NO: 5245656 - DNA, 25 bp, Homo sapien
agaggtcagccagactgccctggtc

SEQ ID NO: 5245657 - DNA, 25 bp, Homo sapien
gagacaacgttaggcaaccatcatc

SEQ ID NO: 5245658 - DNA, 25 bp, Homo sapien
tctttgagacaacgttaggcaacca

SEQ ID NO: 5245659 - DNA, 25 bp, Homo sapien
tcaaggttctttgagacaacgttag

SEQ ID NO: 5245660 - DNA, 25 bp, Homo sapien
cgttaggcaaccatcatctgggaag

SEQ ID NO: 5245661 - DNA, 25 bp, Homo sapien
gctgtgcaagccaatgaggcatttg

SEQ ID NO: 5245662 - DNA, 25 bp, Homo sapien
tgcttggtgcaaagcactgaagtgg

SEQ ID NO: 5245663 - DNA, 25 bp, Homo sapien
ggcatttgctgagtgtctgcttggt

SEQ ID NO: 5245664 - DNA, 25 bp, Homo sapien
gcatttgctgagtgtctgcttggtg

SEQ ID NO: 5245665 - DNA, 25 bp, Homo sapien
ctgagacccaggtgatgtcttgaga

SEQ ID NO: 5245666 - DNA, 25 bp, Homo sapien
tgagacccaggtgatgtcttgagaa

SEQ ID NO: 5245667 - DNA, 25 bp, Homo sapien
tctgagacccaggtgatgtcttgag

SEQ ID NO: 5245668 - DNA, 25 bp, Homo sapien
gagacccaggtgatgtcttgagaac

SEQ ID NO: 5245669 - DNA, 25 bp, Homo sapien
cacataagcataggcagtgcccgaa

SEQ ID NO: 5245670 - DNA, 25 bp, Homo sapien
gcgtctgtagctaagaacctcttca

SEQ ID NO: 5245671 - DNA, 25 bp, Homo sapien
cccaaattgagacttgtgtgacaca

SEQ ID NO: 5245672 - DNA, 25 bp, Homo sapien
tggaattcgggaccttctctggaaa

SEQ ID NO: 5245673 - DNA, 25 bp, Homo sapien
tcatcaatgactgccagttctgggt

SEQ ID NO: 5245674 - DNA, 25 bp, Homo sapien
ttcatcaatgactgccagttctggg

SEQ ID NO: 5245675 - DNA, 25 bp, Homo sapien
tagatatgaaactgccgggtaccct

SEQ ID NO: 5245676 - DNA, 25 bp, Homo sapien
aactgccgggtacccttgcagctgt

SEQ ID NO: 5245677 - DNA, 25 bp, Homo sapien
caagtgttcatggtgttggaatcta

SEQ ID NO: 5245678 - DNA, 25 bp, Homo sapien
tgttggaatctatattaggccccat

SEQ ID NO: 5245679 - DNA, 25 bp, Homo sapien
caaagatggtcccaagtgttcatgg

SEQ ID NO: 5245680 - DNA, 25 bp, Homo sapien
catggtgttggaatctatattaggc

SEQ ID NO: 5245681 - DNA, 25 bp, Homo sapien
gaaggcaggatgctgatgcgactct

SEQ ID NO: 5245682 - DNA, 25 bp, Homo sapien
tgaaggcaggatgctgatgcgactc

SEQ ID NO: 5245683 - DNA, 25 bp, Homo sapien
ctgaaggcaggatgctgatgcgact

SEQ ID NO: 5245684 - DNA, 25 bp, Homo sapien
tgtctggtgaggattgctgcaacag

SEQ ID NO: 5245685 - DNA, 25 bp, Homo sapien
acttgaatggtttctgagtgatgca

SEQ ID NO: 5245686 - DNA, 25 bp, Homo sapien
cacaaataaccatgatttcctgatg

SEQ ID NO: 5245687 - DNA, 25 bp, Homo sapien
catgctcgggaatctggcctggatc

SEQ ID NO: 5245688 - DNA, 25 bp, Homo sapien
gccagacttaaggtagcacaaagca

SEQ ID NO: 5245689 - DNA, 25 bp, Homo sapien
aacagtgtgcgtgggtcttcctgga

SEQ ID NO: 5245690 - DNA, 25 bp, Homo sapien
tctcaaaacgacagtggtcattggg

SEQ ID NO: 5245691 - DNA, 25 bp, Homo sapien
agagcagtgcacagggcggctctca

SEQ ID NO: 5245692 - DNA, 25 bp, Homo sapien
cattaaagggagaacttctgaactg

SEQ ID NO: 5245693 - DNA, 25 bp, Homo sapien
gtccaaaagcctgtggaaggggcca

SEQ ID NO: 5245694 - DNA, 25 bp, Homo sapien
caaaagcctgtggaaggggccacgt

SEQ ID NO: 5245695 - DNA, 25 bp, Homo sapien
ctcattaaagggagaacttctgaac

SEQ ID NO: 5245696 - DNA, 25 bp, Homo sapien
ggtgcctcggttttctttggtgcta

SEQ ID NO: 5245697 - DNA, 25 bp, Homo sapien
gctacatagctaagcactgtcctgg

SEQ ID NO: 5245698 - DNA, 25 bp, Homo sapien
tgaacagctggcattggtgcctcgg

SEQ ID NO: 5245699 - DNA, 25 bp, Homo sapien
tctgagctaaggaatgatcggccat

SEQ ID NO: 5245700 - DNA, 25 bp, Homo sapien
cagaagttctccctctaatgagtcc

SEQ ID NO: 5245701 - DNA, 25 bp, Homo sapien
gttcagaagttctccctctaatgag

SEQ ID NO: 5245702 - DNA, 25 bp, Homo sapien
tgagtcctgtgaaaccaacgcggcc

SEQ ID NO: 5245703 - DNA, 25 bp, Homo sapien
agttctccctctaatgagtcctgtg

SEQ ID NO: 5245704 - DNA, 25 bp, Homo sapien
tgtctgccagggatccacttttcct

SEQ ID NO: 5245705 - DNA, 25 bp, Homo sapien
gaaagtgacagctcagataagattc

SEQ ID NO: 5245706 - DNA, 25 bp, Homo sapien
tctggatgattagcctccagggaca

SEQ ID NO: 5245707 - DNA, 25 bp, Homo sapien
gtgctttgtgctaccttaagtccag

SEQ ID NO: 5245708 - DNA, 25 bp, Homo sapien
gtcactccactttctcatgtgagaa

SEQ ID NO: 5245709 - DNA, 25 bp, Homo sapien
aaagatgttaggacatgtggttaac

SEQ ID NO: 5245710 - DNA, 25 bp, Homo sapien
tggaattggcctcagttttggtgtg

SEQ ID NO: 5245711 - DNA, 25 bp, Homo sapien
acaccatgtccctcttgattagaag

SEQ ID NO: 5245712 - DNA, 25 bp, Homo sapien
ggcatattgatgtgtccatactcct

SEQ ID NO: 5245713 - DNA, 25 bp, Homo sapien
ctgatgcagctttacaggttaggtc

SEQ ID NO: 5245714 - DNA, 25 bp, Homo sapien
tctgagaagccatccgtgactcagt

SEQ ID NO: 5245715 - DNA, 25 bp, Homo sapien
tccatacccgggaccatatgttgag

SEQ ID NO: 5245716 - DNA, 25 bp, Homo sapien
tccatggtccaattaagagttggcc

SEQ ID NO: 5245717 - DNA, 25 bp, Homo sapien
tgataaaattagtgactccacaggc

SEQ ID NO: 5245718 - DNA, 25 bp, Homo sapien
tccagtctactggtaggaacataag

SEQ ID NO: 5245719 - DNA, 25 bp, Homo sapien
taattaccaggtacttccagtctac

SEQ ID NO: 5245720 - DNA, 25 bp, Homo sapien
caggacttaagtgttagaaccttgg

SEQ ID NO: 5245721 - DNA, 25 bp, Homo sapien
gaatgtttgagatccaggacttaag

SEQ ID NO: 5245722 - DNA, 25 bp, Homo sapien
ccttggggtggtctattgtttctca

SEQ ID NO: 5245723 - DNA, 25 bp, Homo sapien
tttggtgccagggatggaatgtttg

SEQ ID NO: 5245724 - DNA, 25 bp, Homo sapien
tggttattattaatttccaggtgca

SEQ ID NO: 5245725 - DNA, 25 bp, Homo sapien
ttattattaatttccaggtgcatcc

SEQ ID NO: 5245726 - DNA, 25 bp, Homo sapien
gttattattaatttccaggtgcatc

SEQ ID NO: 5245727 - DNA, 25 bp, Homo sapien
ggttattattaatttccaggtgcat

SEQ ID NO: 5245728 - DNA, 25 bp, Homo sapien
aaaggagtaacaccatgtctgacaa

SEQ ID NO: 5245729 - DNA, 25 bp, Homo sapien
ccttattttgagcataattggctta

SEQ ID NO: 5245730 - DNA, 25 bp, Homo sapien
caaactccttattttgagcataatt

SEQ ID NO: 5245731 - DNA, 25 bp, Homo sapien
taattggcttaaaggagtaacacca

SEQ ID NO: 5245732 - DNA, 25 bp, Homo sapien
aatgtgggtgtatttgcctgactaa

SEQ ID NO: 5245733 - DNA, 25 bp, Homo sapien
aaatgtgggtgtatttgcctgacta

SEQ ID NO: 5245734 - DNA, 25 bp, Homo sapien
gagtgcaaatgtgggtgtatttgcc

SEQ ID NO: 5245735 - DNA, 25 bp, Homo sapien
ggagtgcaaatgtgggtgtatttgc

SEQ ID NO: 5245736 - DNA, 25 bp, Homo sapien
tcccaggacagccatggtaatgatg

SEQ ID NO: 5245737 - DNA, 25 bp, Homo sapien
ggtgcaggttgactgggtggcagtg

SEQ ID NO: 5245738 - DNA, 25 bp, Homo sapien
gctgtgccagatgaacagtcagtgg

SEQ ID NO: 5245739 - DNA, 25 bp, Homo sapien
tgacggtggtagtgcgggctgggag

SEQ ID NO: 5245740 - DNA, 25 bp, Homo sapien
tacttgtgggaagtttgagtttcaa

SEQ ID NO: 5245741 - DNA, 25 bp, Homo sapien
cctgtcatgggaggagctcttaaca

SEQ ID NO: 5245742 - DNA, 25 bp, Homo sapien
gaggagctcttaacaccccgattgt

SEQ ID NO: 5245743 - DNA, 25 bp, Homo sapien
caggaaggtccgtttggtgtatcct

SEQ ID NO: 5245744 - DNA, 25 bp, Homo sapien
tgtaaactcctaatgagaaacctgg

SEQ ID NO: 5245745 - DNA, 25 bp, Homo sapien
catgggttctcctgatgaagggctg

SEQ ID NO: 5245746 - DNA, 25 bp, Homo sapien
cctggtgtaaactcctaatgagaaa

SEQ ID NO: 5245747 - DNA, 25 bp, Homo sapien
ggttctcctgatgaagggctgcttg

SEQ ID NO: 5245748 - DNA, 25 bp, Homo sapien
tcacgtgggacccacataccctgga

SEQ ID NO: 5245749 - DNA, 25 bp, Homo sapien
ctgtgggaggagtccttgggtccga

SEQ ID NO: 5245750 - DNA, 25 bp, Homo sapien
gacccacataccctggagatgccaa

SEQ ID NO: 5245751 - DNA, 25 bp, Homo sapien
gagtccttgggtccgaccattgtgg

SEQ ID NO: 5245752 - DNA, 25 bp, Homo sapien
gtccaacatgctcacttcctcgtag

SEQ ID NO: 5245753 - DNA, 25 bp, Homo sapien
tcaaagtccaacatgctcacttcct

SEQ ID NO: 5245754 - DNA, 25 bp, Homo sapien
tgctgtttcatagtctggttgaact

SEQ ID NO: 5245755 - DNA, 25 bp, Homo sapien
catagtctggttgaactcctcaaag

SEQ ID NO: 5245756 - DNA, 25 bp, Homo sapien
tacaactggtttggcccgcatgcca

SEQ ID NO: 5245757 - DNA, 25 bp, Homo sapien
ccgtctctacaactggtttggcccg

SEQ ID NO: 5245758 - DNA, 25 bp, Homo sapien
tcagcccgtctctacaactggtttg

SEQ ID NO: 5245759 - DNA, 25 bp, Homo sapien
ccgcatgccattggggctatatctg

SEQ ID NO: 5245760 - DNA, 25 bp, Homo sapien
acatttccattatgctggcctgaag

SEQ ID NO: 5245761 - DNA, 25 bp, Homo sapien
ttccattatgctggcctgaagacac

SEQ ID NO: 5245762 - DNA, 25 bp, Homo sapien
ttcctgggttccatggttaagcact

SEQ ID NO: 5245763 - DNA, 25 bp, Homo sapien
ggttaagcactgcagctcctttcaa

SEQ ID NO: 5245764 - DNA, 25 bp, Homo sapien
gaagagcactatccactagtccagg

SEQ ID NO: 5245765 - DNA, 25 bp, Homo sapien
tcagtgatttcctgcaatggccaca

SEQ ID NO: 5245766 - DNA, 25 bp, Homo sapien
tgacgacactagtaccagcagaggg

SEQ ID NO: 5245767 - DNA, 25 bp, Homo sapien
ttcaggaaagaacgcaactccaggg

SEQ ID NO: 5245768 - DNA, 25 bp, Homo sapien
tatgtaatgtgagccgaaattccca

SEQ ID NO: 5245769 - DNA, 25 bp, Homo sapien
ccagaggcaaatgcataacaacgat

SEQ ID NO: 5245770 - DNA, 25 bp, Homo sapien
caacgatttatagattttcccaagg

SEQ ID NO: 5245771 - DNA, 25 bp, Homo sapien
aaaactctagacctgcatggattgc

SEQ ID NO: 5245772 - DNA, 25 bp, Homo sapien
tccacaacatatgttccctggctgt

SEQ ID NO: 5245773 - DNA, 25 bp, Homo sapien
tgtttcccggcgttctctgttatcc

SEQ ID NO: 5245774 - DNA, 25 bp, Homo sapien
ttatccctgaaggtccagagggtct

SEQ ID NO: 5245775 - DNA, 25 bp, Homo sapien
tgtcttcttgtatctctgatccagc

SEQ ID NO: 5245776 - DNA, 25 bp, Homo sapien
ggacttaaatccaggacttactcca

SEQ ID NO: 5245777 - DNA, 25 bp, Homo sapien
tggctacctgggacttaaatccagg

SEQ ID NO: 5245778 - DNA, 25 bp, Homo sapien
ctgggacttaaatccaggacttact

SEQ ID NO: 5245779 - DNA, 25 bp, Homo sapien
tcagtggctacctgggacttaaatc

SEQ ID NO: 5245780 - DNA, 25 bp, Homo sapien
aagagacgggtctagagaattgcct

SEQ ID NO: 5245781 - DNA, 25 bp, Homo sapien
cactttctggctgggcccggtgcct

SEQ ID NO: 5245782 - DNA, 25 bp, Homo sapien
cagaagtgatcacccaccatatttg

SEQ ID NO: 5245783 - DNA, 25 bp, Homo sapien
tgaacggaacaggagctgtagagat

SEQ ID NO: 5245784 - DNA, 25 bp, Homo sapien
ctgtaatcataggtgacactttgtt

SEQ ID NO: 5245785 - DNA, 25 bp, Homo sapien
accaccagaagcagtataaactggc

SEQ ID NO: 5245786 - DNA, 25 bp, Homo sapien
caccaccagaagcagtataaactgg

SEQ ID NO: 5245787 - DNA, 25 bp, Homo sapien
cactttgttcttcgccaaaatgtcc

SEQ ID NO: 5245788 - DNA, 25 bp, Homo sapien
ctgcagctgtactctcgactcctgt

SEQ ID NO: 5245789 - DNA, 25 bp, Homo sapien
gagcaccaacttcagtatccaagaa

SEQ ID NO: 5245790 - DNA, 25 bp, Homo sapien
tccacactgaggactgtcgcgagta

SEQ ID NO: 5245791 - DNA, 25 bp, Homo sapien
tccaagaaattagatccacaactct

SEQ ID NO: 5245792 - DNA, 25 bp, Homo sapien
tgtctcgacgcagataaaagcacct

SEQ ID NO: 5245793 - DNA, 25 bp, Homo sapien
aaacagttcagcctttgtctcgacg

SEQ ID NO: 5245794 - DNA, 25 bp, Homo sapien
ccacatatctccatgattcgggtca

SEQ ID NO: 5245795 - DNA, 25 bp, Homo sapien
aaggtccaaaactaggcctgtggca

SEQ ID NO: 5245796 - DNA, 25 bp, Homo sapien
tgtgatgtctggatctctttctaga

SEQ ID NO: 5245797 - DNA, 25 bp, Homo sapien
tctttctctaaaccatggtctcaga

SEQ ID NO: 5245798 - DNA, 25 bp, Homo sapien
tctatactgtgttgatcaccatagc

SEQ ID NO: 5245799 - DNA, 25 bp, Homo sapien
ataatcaggtagtataagtcctcct

SEQ ID NO: 5245800 - DNA, 25 bp, Homo sapien
gaccagctattacttgggaaccagt

SEQ ID NO: 5245801 - DNA, 25 bp, Homo sapien
tgaggaagcttaaacaggaagacct

SEQ ID NO: 5245802 - DNA, 25 bp, Homo sapien
ttttaacgttaattcagaggccaga

SEQ ID NO: 5245803 - DNA, 25 bp, Homo sapien
gtggttcatggaatacactcaggaa

SEQ ID NO: 5245804 - DNA, 25 bp, Homo sapien
ggcccaatattgtgctcttgatata

SEQ ID NO: 5245805 - DNA, 25 bp, Homo sapien
tgtcaatataacgtggaagtagtgt

SEQ ID NO: 5245806 - DNA, 25 bp, Homo sapien
taattctgtggactactgtaaagga

SEQ ID NO: 5245807 - DNA, 25 bp, Homo sapien
tctcttttagatgtcctctggacta

SEQ ID NO: 5245808 - DNA, 25 bp, Homo sapien
gctattcttctccgtatagttccac

SEQ ID NO: 5245809 - DNA, 25 bp, Homo sapien
ctattcttctccgtatagttccact

SEQ ID NO: 5245810 - DNA, 25 bp, Homo sapien
tattatgttgcagcattcataggag

SEQ ID NO: 5245811 - DNA, 25 bp, Homo sapien
gtcttgaatcctggttaacttgtgg

SEQ ID NO: 5245812 - DNA, 25 bp, Homo sapien
tctggaagggtgttaggtattatgt

SEQ ID NO: 5245813 - DNA, 25 bp, Homo sapien
acttgtggcaggtgttgtgactatc

SEQ ID NO: 5245814 - DNA, 25 bp, Homo sapien
cgacatggttcgtttgcacagtggt

SEQ ID NO: 5245815 - DNA, 25 bp, Homo sapien
tattcctagaggatgcctagcctgt

SEQ ID NO: 5245816 - DNA, 25 bp, Homo sapien
tctcacggttactgaatggctgtca

SEQ ID NO: 5245817 - DNA, 25 bp, Homo sapien
caaggcttgaagtcattgtgtccat

SEQ ID NO: 5245818 - DNA, 25 bp, Homo sapien
ccttgtgcaggatgtggctctttgc

SEQ ID NO: 5245819 - DNA, 25 bp, Homo sapien
ttaacttgggatacttgtaatatca

SEQ ID NO: 5245820 - DNA, 25 bp, Homo sapien
tgtattaccttggagtatcttgcat

SEQ ID NO: 5245821 - DNA, 25 bp, Homo sapien
aggctcctacatggccacctctctg

SEQ ID NO: 5245822 - DNA, 25 bp, Homo sapien
gcagaagctattggcagtagtcagt

SEQ ID NO: 5245823 - DNA, 25 bp, Homo sapien
agtgcagaagctattggcagtagtc

SEQ ID NO: 5245824 - DNA, 25 bp, Homo sapien
gaagctattggcagtagtcagtttc

SEQ ID NO: 5245825 - DNA, 25 bp, Homo sapien
agctattggcagtagtcagtttcat

SEQ ID NO: 5245826 - DNA, 25 bp, Homo sapien
tcactgaaatcattccttgcaattg

SEQ ID NO: 5245827 - DNA, 25 bp, Homo sapien
attgcctgtttgacatggacttttc

SEQ ID NO: 5245828 - DNA, 25 bp, Homo sapien
cattccttgcaattgcctgtttgac

SEQ ID NO: 5245829 - DNA, 25 bp, Homo sapien
tgcctgtttgacatggacttttccc

SEQ ID NO: 5245830 - DNA, 25 bp, Homo sapien
ggtttagcctaagcatcgagtctgg

SEQ ID NO: 5245831 - DNA, 25 bp, Homo sapien
tggacgtctaactgctctcctgctg

SEQ ID NO: 5245832 - DNA, 25 bp, Homo sapien
cagtgaatccgttctaagtggacgt

SEQ ID NO: 5245833 - DNA, 25 bp, Homo sapien
cgggtacggttaatagcgcagtgaa

SEQ ID NO: 5245834 - DNA, 25 bp, Homo sapien
ctgcccagggggacggcgagggacg

SEQ ID NO: 5245835 - DNA, 25 bp, Homo sapien
ttgagggagggcgagcccggagacg

SEQ ID NO: 5245836 - DNA, 25 bp, Homo sapien
cgagcccggagacggggtctgcgcg

SEQ ID NO: 5245837 - DNA, 25 bp, Homo sapien
cgagggacggttgagggagggcgag

SEQ ID NO: 5245838 - DNA, 25 bp, Homo sapien
tccggcttcccgcaatgaggagggc

SEQ ID NO: 5245839 - DNA, 25 bp, Homo sapien
gctccagtgacaacagttgtgggaa

SEQ ID NO: 5245840 - DNA, 25 bp, Homo sapien
gcccggaaatggaaactaggaagca

SEQ ID NO: 5245841 - DNA, 25 bp, Homo sapien
gaggccagagagactttagaccgca

SEQ ID NO: 5245842 - DNA, 25 bp, Homo sapien
ccctgatccgtgaaatttccagctc

SEQ ID NO: 5245843 - DNA, 25 bp, Homo sapien
aaccctgatccgtgaaatttccagc

SEQ ID NO: 5245844 - DNA, 25 bp, Homo sapien
ggaaccctgatccgtgaaatttcca

SEQ ID NO: 5245845 - DNA, 25 bp, Homo sapien
ctgatccgtgaaatttccagctcca

SEQ ID NO: 5245846 - DNA, 25 bp, Homo sapien
tggggcgatcgtcccctcttccaag

SEQ ID NO: 5245847 - DNA, 25 bp, Homo sapien
gaaccacgcttatgagctggcagaa

SEQ ID NO: 5245848 - DNA, 25 bp, Homo sapien
gaaggatttctaacttggggcgatc

SEQ ID NO: 5245849 - DNA, 25 bp, Homo sapien
tagtttaaattgaaccacgcttatg

SEQ ID NO: 5245850 - DNA, 25 bp, Homo sapien
aggcggcgggccttgtcctacagtt

SEQ ID NO: 5245851 - DNA, 25 bp, Homo sapien
gtttcaaagagagtctccggcagcc

SEQ ID NO: 5245852 - DNA, 25 bp, Homo sapien
actggtaatagtctttgctaggcgg

SEQ ID NO: 5245853 - DNA, 25 bp, Homo sapien
tgagaccgggtgaccagtaactggt

SEQ ID NO: 5245854 - DNA, 25 bp, Homo sapien
agagagggtaaaccgcggctcgcac

SEQ ID NO: 5245855 - DNA, 25 bp, Homo sapien
gttgctcttggcctagcacagcctg

SEQ ID NO: 5245856 - DNA, 25 bp, Homo sapien
gctcttggcctagcacagcctgcgt

SEQ ID NO: 5245857 - DNA, 25 bp, Homo sapien
ctacggttgctcttggcctagcaca

SEQ ID NO: 5245858 - DNA, 25 bp, Homo sapien
tccctccttctcacgctgaggtgag

SEQ ID NO: 5245859 - DNA, 25 bp, Homo sapien
tccttgggacacttggctgagtcgt

SEQ ID NO: 5245860 - DNA, 25 bp, Homo sapien
cacgcaagccggagacgcccgtttt

SEQ ID NO: 5245861 - DNA, 25 bp, Homo sapien
cgcccgttttcctcttcgcgcggag

SEQ ID NO: 5245862 - DNA, 25 bp, Homo sapien
tcagtgacaggcgtaaactcagcca

SEQ ID NO: 5245863 - DNA, 25 bp, Homo sapien
tagaaacgtcttcccaatggaggcc

SEQ ID NO: 5245864 - DNA, 25 bp, Homo sapien
aactaagttttgatgtggccgtggc

SEQ ID NO: 5245865 - DNA, 25 bp, Homo sapien
tggaggccccgctcaagttgagaat

SEQ ID NO: 5245866 - DNA, 25 bp, Homo sapien
gcgcccggctatgcaaactcaattt

SEQ ID NO: 5245867 - DNA, 25 bp, Homo sapien
tgcgcccggctatgcaaactcaatt

SEQ ID NO: 5245868 - DNA, 25 bp, Homo sapien
gcccggctatgcaaactcaattttt

SEQ ID NO: 5245869 - DNA, 25 bp, Homo sapien
actgcgcccggctatgcaaactcaa

SEQ ID NO: 5245870 - DNA, 25 bp, Homo sapien
gatcagctacatggatcaggcttaa

SEQ ID NO: 5245871 - DNA, 25 bp, Homo sapien
cactatattccaacgattgtgggac

SEQ ID NO: 5245872 - DNA, 25 bp, Homo sapien
aatcacgactcgctgtagcctcatc

SEQ ID NO: 5245873 - DNA, 25 bp, Homo sapien
tacaaaatcgctgaaatcgaagttt

SEQ ID NO: 5245874 - DNA, 25 bp, Homo sapien
tacacgggttatacagcctacagcc

SEQ ID NO: 5245875 - DNA, 25 bp, Homo sapien
caaaatcgcggtgttactaaggcca

SEQ ID NO: 5245876 - DNA, 25 bp, Homo sapien
gatacacacctaagcattacggcag

SEQ ID NO: 5245877 - DNA, 25 bp, Homo sapien
ggtactcagcgttaggacttccaac

SEQ ID NO: 5245878 - DNA, 25 bp, Homo sapien
tcctggccagcagtttgcataaact

SEQ ID NO: 5245879 - DNA, 25 bp, Homo sapien
gaagctactccccacagctatattc

SEQ ID NO: 5245880 - DNA, 25 bp, Homo sapien
ttcagaatggccacttcgagcttcc

SEQ ID NO: 5245881 - DNA, 25 bp, Homo sapien
gagcttcctctggacctatttcagt

SEQ ID NO: 5245882 - DNA, 25 bp, Homo sapien
tgctaggcctcaagtctatgatgct

SEQ ID NO: 5245883 - DNA, 25 bp, Homo sapien
taggcctcaagtctatgatgcttgg

SEQ ID NO: 5245884 - DNA, 25 bp, Homo sapien
aagctgctaggcctcaagtctatga

SEQ ID NO: 5245885 - DNA, 25 bp, Homo sapien
tggaagctgctaggcctcaagtcta

SEQ ID NO: 5245886 - DNA, 25 bp, Homo sapien
tcagaactgagcctttggtatgggc

SEQ ID NO: 5245887 - DNA, 25 bp, Homo sapien
tccaaggatgggcaatagaccggct

SEQ ID NO: 5245888 - DNA, 25 bp, Homo sapien
gagcgtcacatcctctcgtgagagg

SEQ ID NO: 5245889 - DNA, 25 bp, Homo sapien
tagaccggcttgactgtgggaaaaa

SEQ ID NO: 5245890 - DNA, 25 bp, Homo sapien
tagcggtaatgcctagctggctgtg

SEQ ID NO: 5245891 - DNA, 25 bp, Homo sapien
agttcagggataaaggaagtgcgcc

SEQ ID NO: 5245892 - DNA, 25 bp, Homo sapien
ggcgggtggtaaaaacatcagctcc

SEQ ID NO: 5245893 - DNA, 25 bp, Homo sapien
cagggcactgtaaccacaagaagat

SEQ ID NO: 5245894 - DNA, 25 bp, Homo sapien
gcccaatattgtttaccgcttcaca

SEQ ID NO: 5245895 - DNA, 25 bp, Homo sapien
tgtggcccaatattgtttaccgctt

SEQ ID NO: 5245896 - DNA, 25 bp, Homo sapien
atctgtggcccaatattgtttaccg

SEQ ID NO: 5245897 - DNA, 25 bp, Homo sapien
cactctactcccaatctgtggccca

SEQ ID NO: 5245898 - DNA, 25 bp, Homo sapien
tatgcagctgcttactgtgcacacc

SEQ ID NO: 5245899 - DNA, 25 bp, Homo sapien
ccgtggtactttagaggatcatgac

SEQ ID NO: 5245900 - DNA, 25 bp, Homo sapien
acccagcctgacttctaaatgttga

SEQ ID NO: 5245901 - DNA, 25 bp, Homo sapien
tataacttgacattcaactccgtgg

SEQ ID NO: 5245902 - DNA, 25 bp, Homo sapien
aactaatggtttctgccacaggaag

SEQ ID NO: 5245903 - DNA, 25 bp, Homo sapien
gggacacaagtgttcctctgcctta

SEQ ID NO: 5245904 - DNA, 25 bp, Homo sapien
cactccttgggacatcacacagagg

SEQ ID NO: 5245905 - DNA, 25 bp, Homo sapien
ccaagtgttcggctaaaagtcagat

SEQ ID NO: 5245906 - DNA, 25 bp, Homo sapien
gcatctatgcccttttcagtgccta

SEQ ID NO: 5245907 - DNA, 25 bp, Homo sapien
cttcctgctgcgggatgcctgcatc

SEQ ID NO: 5245908 - DNA, 25 bp, Homo sapien
gctgcgggatgcctgcatctatgcc

SEQ ID NO: 5245909 - DNA, 25 bp, Homo sapien
gggatgcctgcatctatgccctttt

SEQ ID NO: 5245910 - DNA, 25 bp, Homo sapien
tgcgcgggggccattctaatcttcc

SEQ ID NO: 5245911 - DNA, 25 bp, Homo sapien
ctaatcttccctgtatagttctagt

SEQ ID NO: 5245912 - DNA, 25 bp, Homo sapien
tatggaacactccatgaatttccat

SEQ ID NO: 5245913 - DNA, 25 bp, Homo sapien
aatcttccctgtatagttctagttt

SEQ ID NO: 5245914 - DNA, 25 bp, Homo sapien
tgaagatgtgaattctctaggaagt

SEQ ID NO: 5245915 - DNA, 25 bp, Homo sapien
tactcactccttagagagatcttcc

SEQ ID NO: 5245916 - DNA, 25 bp, Homo sapien
gaagatgtgaattctctaggaagtc

SEQ ID NO: 5245917 - DNA, 25 bp, Homo sapien
ccaggttttgttgatcgatactcac

SEQ ID NO: 5245918 - DNA, 25 bp, Homo sapien
tgagaacttaacaggggtatataat

SEQ ID NO: 5245919 - DNA, 25 bp, Homo sapien
taacaaaatctaccactaactaatg

SEQ ID NO: 5245920 - DNA, 25 bp, Homo sapien
ggtatataatatgttccgttcctta

SEQ ID NO: 5245921 - DNA, 25 bp, Homo sapien
aaatctaccactaactaatgagaac

SEQ ID NO: 5245922 - DNA, 25 bp, Homo sapien
cacttggttgtttgccactgcccaa

SEQ ID NO: 5245923 - DNA, 25 bp, Homo sapien
tcaagcccttgccagtaaagcccaa

SEQ ID NO: 5245924 - DNA, 25 bp, Homo sapien
gactttaccagtcagaaactgccaa

SEQ ID NO: 5245925 - DNA, 25 bp, Homo sapien
cccggccaaatgctaatatgttttc

SEQ ID NO: 5245926 - DNA, 25 bp, Homo sapien
tcaggagcaaatcgtctgagagccg

SEQ ID NO: 5245927 - DNA, 25 bp, Homo sapien
caaatcgtctgagagccgttcaagg

SEQ ID NO: 5245928 - DNA, 25 bp, Homo sapien
tgagagccgttcaaggaagtcaaat

SEQ ID NO: 5245929 - DNA, 25 bp, Homo sapien
cgtctgagagccgttcaaggaagtc

SEQ ID NO: 5245930 - DNA, 25 bp, Homo sapien
ccgtggctgtgctggctacgactgt

SEQ ID NO: 5245931 - DNA, 25 bp, Homo sapien
ctgtgctggctacgactgtggacct

SEQ ID NO: 5245932 - DNA, 25 bp, Homo sapien
gctggctacgactgtggacctcatt

SEQ ID NO: 5245933 - DNA, 25 bp, Homo sapien
ggcagggcaagggccccgtggctgt

SEQ ID NO: 5245934 - DNA, 25 bp, Homo sapien
tttttgtttcctcttgcggagctgc

SEQ ID NO: 5245935 - DNA, 25 bp, Homo sapien
tcgactggactatctgttcccacag

SEQ ID NO: 5245936 - DNA, 25 bp, Homo sapien
cccacagtttatcagacatgcacag

SEQ ID NO: 5245937 - DNA, 25 bp, Homo sapien
ttgtttcctcttgcggagctgccgc

SEQ ID NO: 5245938 - DNA, 25 bp, Homo sapien
tgagctccctgctggtaggaaaatg

SEQ ID NO: 5245939 - DNA, 25 bp, Homo sapien
ctgagctccctgctggtaggaaaat

SEQ ID NO: 5245940 - DNA, 25 bp, Homo sapien
agctccctgctggtaggaaaatgtg

SEQ ID NO: 5245941 - DNA, 25 bp, Homo sapien
tccctgctggtaggaaaatgtgtgc

SEQ ID NO: 5245942 - DNA, 25 bp, Homo sapien
gacgcagacgacacaatgccaggaa

SEQ ID NO: 5245943 - DNA, 25 bp, Homo sapien
taagccatgctgtagagcccttctg

SEQ ID NO: 5245944 - DNA, 25 bp, Homo sapien
gaatgacggtgactctagcaaggca

SEQ ID NO: 5245945 - DNA, 25 bp, Homo sapien
tgtattgttcacagggccctagtgc

SEQ ID NO: 5245946 - DNA, 25 bp, Homo sapien
gattgttcttataccactaaatata

SEQ ID NO: 5245947 - DNA, 25 bp, Homo sapien
attgttaatagattgttcttatacc

SEQ ID NO: 5245948 - DNA, 25 bp, Homo sapien
tcagtattgtataattacaatggta

SEQ ID NO: 5245949 - DNA, 25 bp, Homo sapien
actaaatatataaaccattggaaat

SEQ ID NO: 5245950 - DNA, 25 bp, Homo sapien
tttgtagaaatcaaccacgaaagcc

SEQ ID NO: 5245951 - DNA, 25 bp, Homo sapien
ctagctctattattcggaagtcttt

SEQ ID NO: 5245952 - DNA, 25 bp, Homo sapien
caattcaatcttggtgggttatact

SEQ ID NO: 5245953 - DNA, 25 bp, Homo sapien
gaaatcaaccacgaaagccatctgg

SEQ ID NO: 5245954 - DNA, 25 bp, Homo sapien
tgtcttgatgtacaatctttttgtg

SEQ ID NO: 5245955 - DNA, 25 bp, Homo sapien
tgatttgtgtatgtcaaacctgctt

SEQ ID NO: 5245956 - DNA, 25 bp, Homo sapien
tttgcatgccagagataaatctcac

SEQ ID NO: 5245957 - DNA, 25 bp, Homo sapien
gtatgtcaaacctgctttgcatgcc

SEQ ID NO: 5245958 - DNA, 25 bp, Homo sapien
gtagtgccccactctgacagttaca

SEQ ID NO: 5245959 - DNA, 25 bp, Homo sapien
gacagttacacgttgcaagggcaga

SEQ ID NO: 5245960 - DNA, 25 bp, Homo sapien
ccatggatcagtggctgtaagactt

SEQ ID NO: 5245961 - DNA, 25 bp, Homo sapien
tttgaatgggcagaacatatttccc

SEQ ID NO: 5245962 - DNA, 25 bp, Homo sapien
ctggtcagattaggtccacgccata

SEQ ID NO: 5245963 - DNA, 25 bp, Homo sapien
ggtccacgccataatttgtagaccc

SEQ ID NO: 5245964 - DNA, 25 bp, Homo sapien
caggaggctggtcagattaggtcca

SEQ ID NO: 5245965 - DNA, 25 bp, Homo sapien
cagattaggtccacgccataatttg

SEQ ID NO: 5245966 - DNA, 25 bp, Homo sapien
ttatttgggtgtagtgatgtgtgcc

SEQ ID NO: 5245967 - DNA, 25 bp, Homo sapien
ccttaagacactttaggctaggtgc

SEQ ID NO: 5245968 - DNA, 25 bp, Homo sapien
tcatcctggtagctttccataagag

SEQ ID NO: 5245969 - DNA, 25 bp, Homo sapien
gctcgaagaatttaccccttgctca

SEQ ID NO: 5245970 - DNA, 25 bp, Homo sapien
ccagactgcgatcattggagggctc

SEQ ID NO: 5245971 - DNA, 25 bp, Homo sapien
cttttggagtcgcagctggtaagca

SEQ ID NO: 5245972 - DNA, 25 bp, Homo sapien
tgagtgcctatgctgcaaacgtgca

SEQ ID NO: 5245973 - DNA, 25 bp, Homo sapien
cttttccaatgctctgtgacaggcc

SEQ ID NO: 5245974 - DNA, 25 bp, Homo sapien
tggtttcaatctgggtatcctcatg

SEQ ID NO: 5245975 - DNA, 25 bp, Homo sapien
ggacatgatagcacaagcctctagg

SEQ ID NO: 5245976 - DNA, 25 bp, Homo sapien
caccagccgggatgggagtctgtat

SEQ ID NO: 5245977 - DNA, 25 bp, Homo sapien
ccatagcctgataggtctggtcaga

SEQ ID NO: 5245978 - DNA, 25 bp, Homo sapien
gataagctttcagcttcagtgacat

SEQ ID NO: 5245979 - DNA, 25 bp, Homo sapien
tcattgatcacaagataagctttca

SEQ ID NO: 5245980 - DNA, 25 bp, Homo sapien
gctttcagcttcagtgacatcagaa

SEQ ID NO: 5245981 - DNA, 25 bp, Homo sapien
tcacaagataagctttcagcttcag

SEQ ID NO: 5245982 - DNA, 25 bp, Homo sapien
tctggattcctatttaaacaaggaa

SEQ ID NO: 5245983 - DNA, 25 bp, Homo sapien
catcttactgaatattgagtactag

SEQ ID NO: 5245984 - DNA, 25 bp, Homo sapien
ttaaaatatgccatcttactgaata

SEQ ID NO: 5245985 - DNA, 25 bp, Homo sapien
tattgagtactagctcatataaatc

SEQ ID NO: 5245986 - DNA, 25 bp, Homo sapien
tctctgggctcatccactggccctt

SEQ ID NO: 5245987 - DNA, 25 bp, Homo sapien
tgcactgcgctgtaagctttggaga

SEQ ID NO: 5245988 - DNA, 25 bp, Homo sapien
tgcgctgtaagctttggagagcaag

SEQ ID NO: 5245989 - DNA, 25 bp, Homo sapien
ctctgcactgcgctgtaagctttgg

SEQ ID NO: 5245990 - DNA, 25 bp, Homo sapien
gcggagagctgagccgcaggcaccc

SEQ ID NO: 5245991 - DNA, 25 bp, Homo sapien
gagctgagccgcaggcacccgcgtc

SEQ ID NO: 5245992 - DNA, 25 bp, Homo sapien
agagctgagccgcaggcacccgcgt

SEQ ID NO: 5245993 - DNA, 25 bp, Homo sapien
ggagagctgagccgcaggcacccgc

SEQ ID NO: 5245994 - DNA, 25 bp, Homo sapien
ctggcctggcagcgagcggcggaag

SEQ ID NO: 5245995 - DNA, 25 bp, Homo sapien
ggaagagcccgggagcccctcacag

SEQ ID NO: 5245996 - DNA, 25 bp, Homo sapien
gaagagcccgggagcccctcacaga

SEQ ID NO: 5245997 - DNA, 25 bp, Homo sapien
ccacctggactgaggcgtcgagctt

SEQ ID NO: 5245998 - DNA, 25 bp, Homo sapien
tggactgaggcgtcgagctttcagc

SEQ ID NO: 5245999 - DNA, 25 bp, Homo sapien
actgaggcgtcgagctttcagctcc

SEQ ID NO: 5246000 - DNA, 25 bp, Homo sapien
cacctggactgaggcgtcgagcttt

SEQ ID NO: 5246001 - DNA, 25 bp, Homo sapien
tgagcacacttgcatttcaggcact

SEQ ID NO: 5246002 - DNA, 25 bp, Homo sapien
gggaacagggccatactgagagaca

SEQ ID NO: 5246003 - DNA, 25 bp, Homo sapien
gagacagaggatattcttggtgacc

SEQ ID NO: 5246004 - DNA, 25 bp, Homo sapien
tgatctcccacattaaactcagagg

SEQ ID NO: 5246005 - DNA, 25 bp, Homo sapien
cctggaggctggtttggcagcaggc

SEQ ID NO: 5246006 - DNA, 25 bp, Homo sapien
aagtccaaaatccctggaggctggt

SEQ ID NO: 5246007 - DNA, 25 bp, Homo sapien
aggctggtttggcagcaggccaaga

SEQ ID NO: 5246008 - DNA, 25 bp, Homo sapien
ggcagcaggccaagactgaagatac

SEQ ID NO: 5246009 - DNA, 25 bp, Homo sapien
tggatgttaggaggctcttcccaag

SEQ ID NO: 5246010 - DNA, 25 bp, Homo sapien
ggacatgcaagcatctgggcttttg

SEQ ID NO: 5246011 - DNA, 25 bp, Homo sapien
ccatcatggtattcaccttttgcct

SEQ ID NO: 5246012 - DNA, 25 bp, Homo sapien
gttcccaaattccatggatgttagg

SEQ ID NO: 5246013 - DNA, 25 bp, Homo sapien
tgggacatgtttaaagcagtgtgta

SEQ ID NO: 5246014 - DNA, 25 bp, Homo sapien
agaatctctgggacatgtttaaagc

SEQ ID NO: 5246015 - DNA, 25 bp, Homo sapien
gaatctctgggacatgtttaaagca

SEQ ID NO: 5246016 - DNA, 25 bp, Homo sapien
tctctgggacatgtttaaagcagtg

SEQ ID NO: 5246017 - DNA, 25 bp, Homo sapien
gaggaaacaagaggcatgctccact

SEQ ID NO: 5246018 - DNA, 25 bp, Homo sapien
ttttcccaggaccttgagccttcag

SEQ ID NO: 5246019 - DNA, 25 bp, Homo sapien
tcagatttgagggtcccttccgtgg

SEQ ID NO: 5246020 - DNA, 25 bp, Homo sapien
caacactcagcatctaataggagga

SEQ ID NO: 5246021 - DNA, 25 bp, Homo sapien
ccaaagtgatgtaccctgtaagcct

SEQ ID NO: 5246022 - DNA, 25 bp, Homo sapien
taccctgtaagcctttgctgccttg

SEQ ID NO: 5246023 - DNA, 25 bp, Homo sapien
tctcccccagcaaagttgattggca

SEQ ID NO: 5246024 - DNA, 25 bp, Homo sapien
ccccagcaaagttgattggcatctg

SEQ ID NO: 5246025 - DNA, 25 bp, Homo sapien
ggcggacgcgtaaagaggaagcaag

SEQ ID NO: 5246026 - DNA, 25 bp, Homo sapien
caatcatggcggacgcgtaaagagg

SEQ ID NO: 5246027 - DNA, 25 bp, Homo sapien
tacaatcatggcggacgcgtaaaga

SEQ ID NO: 5246028 - DNA, 25 bp, Homo sapien
catggcggacgcgtaaagaggaagc

SEQ ID NO: 5246029 - DNA, 25 bp, Homo sapien
tgtggtgaccataacccatccactg

SEQ ID NO: 5246030 - DNA, 25 bp, Homo sapien
tccatgtaagctagatgtattgtct

SEQ ID NO: 5246031 - DNA, 25 bp, Homo sapien
ggatttccatgtttaaaccaggtca

SEQ ID NO: 5246032 - DNA, 25 bp, Homo sapien
caggtcagtgttcttattgatgcca

SEQ ID NO: 5246033 - DNA, 25 bp, Homo sapien
cctttgacttttacaccacttagat

SEQ ID NO: 5246034 - DNA, 25 bp, Homo sapien
gaaactaccacttagcacttaatgt

SEQ ID NO: 5246035 - DNA, 25 bp, Homo sapien
ttcaacagttccctagcaagcagac

SEQ ID NO: 5246036 - DNA, 25 bp, Homo sapien
tgttaaccaaaataaagagagagct

SEQ ID NO: 5246037 - DNA, 25 bp, Homo sapien
agtgttgcagagcacccatagcccg

SEQ ID NO: 5246038 - DNA, 25 bp, Homo sapien
accaggggttccgtgccatctgcaa

SEQ ID NO: 5246039 - DNA, 25 bp, Homo sapien
cctcgatgtgctgttgtttaaatgc

SEQ ID NO: 5246040 - DNA, 25 bp, Homo sapien
tgtctggccaaggagttttgtccct

SEQ ID NO: 5246041 - DNA, 25 bp, Homo sapien
cgttgttctctcaaggaagcagtga

SEQ ID NO: 5246042 - DNA, 25 bp, Homo sapien
gggtcgttgttctctcaaggaagca

SEQ ID NO: 5246043 - DNA, 25 bp, Homo sapien
gctggggtcgttgttctctcaagga

SEQ ID NO: 5246044 - DNA, 25 bp, Homo sapien
tgactctgtgcttcgtggggaaggc

SEQ ID NO: 5246045 - DNA, 25 bp, Homo sapien
tactgctcccctggttttcaagtga

SEQ ID NO: 5246046 - DNA, 25 bp, Homo sapien
gagctgtaggtgcaggatttgccct

SEQ ID NO: 5246047 - DNA, 25 bp, Homo sapien
gatttgccctcctggtcgtttccca

SEQ ID NO: 5246048 - DNA, 25 bp, Homo sapien
tagcagtttgattgccatgacagcc

SEQ ID NO: 5246049 - DNA, 25 bp, Homo sapien
aagtaatataggtggtctgccaggc

SEQ ID NO: 5246050 - DNA, 25 bp, Homo sapien
tctttacggttttcaggctatgaag

SEQ ID NO: 5246051 - DNA, 25 bp, Homo sapien
cagatttacggttatcctacctcgg

SEQ ID NO: 5246052 - DNA, 25 bp, Homo sapien
agtggtaaccacattatctgctttc

SEQ ID NO: 5246053 - DNA, 25 bp, Homo sapien
taacactcagatcactatgaaaaac

SEQ ID NO: 5246054 - DNA, 25 bp, Homo sapien
ttaacactcagatcactatgaaaaa

SEQ ID NO: 5246055 - DNA, 25 bp, Homo sapien
tttaacactcagatcactatgaaaa

SEQ ID NO: 5246056 - DNA, 25 bp, Homo sapien
agataaagcttcttcgggctgggca

SEQ ID NO: 5246057 - DNA, 25 bp, Homo sapien
tacaggcatgtgcaagttccccact

SEQ ID NO: 5246058 - DNA, 25 bp, Homo sapien
cggagtacagtagcgtcatcttgac

SEQ ID NO: 5246059 - DNA, 25 bp, Homo sapien
tagaccttacctcttgatgcgatgg

SEQ ID NO: 5246060 - DNA, 25 bp, Homo sapien
tacgtagcatgctacaaaccattgc

SEQ ID NO: 5246061 - DNA, 25 bp, Homo sapien
tcacctgatggttttagcaatacct

SEQ ID NO: 5246062 - DNA, 25 bp, Homo sapien
tacctttattgatgcttgagttgcc

SEQ ID NO: 5246063 - DNA, 25 bp, Homo sapien
ccgtgatatcatcagaggttgcaaa

SEQ ID NO: 5246064 - DNA, 25 bp, Homo sapien
tcaggatgctgtggagttgcacctt

SEQ ID NO: 5246065 - DNA, 25 bp, Homo sapien
caggatgctgtggagttgcaccttc

SEQ ID NO: 5246066 - DNA, 25 bp, Homo sapien
gatgctgtggagttgcaccttctgc

SEQ ID NO: 5246067 - DNA, 25 bp, Homo sapien
ggatgctgtggagttgcaccttctg

SEQ ID NO: 5246068 - DNA, 25 bp, Homo sapien
aaaagagagcccacacttaacagtg

SEQ ID NO: 5246069 - DNA, 25 bp, Homo sapien
gagagcccacacttaacagtgacac

SEQ ID NO: 5246070 - DNA, 25 bp, Homo sapien
gcccgcctgccgctaccactgatgc

SEQ ID NO: 5246071 - DNA, 25 bp, Homo sapien
catgtggggatcttggacactctgg

SEQ ID NO: 5246072 - DNA, 25 bp, Homo sapien
tggtggcagaactgtcgaggtaccc

SEQ ID NO: 5246073 - DNA, 25 bp, Homo sapien
gatggagcatccctcaactgaccag

SEQ ID NO: 5246074 - DNA, 25 bp, Homo sapien
tgtagtaattcaccgagaggcacca

SEQ ID NO: 5246075 - DNA, 25 bp, Homo sapien
tactcctagagaatgtcagatgcag

SEQ ID NO: 5246076 - DNA, 25 bp, Homo sapien
tgtggtcaggagagcttcaggacac

SEQ ID NO: 5246077 - DNA, 25 bp, Homo sapien
ggacacttaatgctagttgtgacgt

SEQ ID NO: 5246078 - DNA, 25 bp, Homo sapien
tacatggattcataagtatggagtt

SEQ ID NO: 5246079 - DNA, 25 bp, Homo sapien
tggagttatccttcaatcaatggaa

SEQ ID NO: 5246080 - DNA, 25 bp, Homo sapien
gaataaatctcaagagagagttaaa

SEQ ID NO: 5246081 - DNA, 25 bp, Homo sapien
caagaataaatctcaagagagagtt

SEQ ID NO: 5246082 - DNA, 25 bp, Homo sapien
tccaagaataaatctcaagagagag

SEQ ID NO: 5246083 - DNA, 25 bp, Homo sapien
catgttgcagactttccctgtctgg

SEQ ID NO: 5246084 - DNA, 25 bp, Homo sapien
caaagaactggaaacggaatatacg

SEQ ID NO: 5246085 - DNA, 25 bp, Homo sapien
gatggaacttggttaacaccaaatg

SEQ ID NO: 5246086 - DNA, 25 bp, Homo sapien
tgaatttgaagtcgaaggaaaagga

SEQ ID NO: 5246087 - DNA, 25 bp, Homo sapien
gaatatacgttgtgaaggaatgacc

SEQ ID NO: 5246088 - DNA, 25 bp, Homo sapien
ttctcatctccgaaaccctccttta

SEQ ID NO: 5246089 - DNA, 25 bp, Homo sapien
cattcactggttgagaccatttact

SEQ ID NO: 5246090 - DNA, 25 bp, Homo sapien
tttttccattcactggttgagacca

SEQ ID NO: 5246091 - DNA, 25 bp, Homo sapien
ggctgagcttcagtcatcttccggg

SEQ ID NO: 5246092 - DNA, 25 bp, Homo sapien
ttccgggatcttcaacctgatgatt

SEQ ID NO: 5246093 - DNA, 25 bp, Homo sapien
agaacaacaagcaaaggaccaccag

SEQ ID NO: 5246094 - DNA, 25 bp, Homo sapien
cactgtggccaaatcacatgttcac

SEQ ID NO: 5246095 - DNA, 25 bp, Homo sapien
gagaggcagtaaagtcattttaggt

SEQ ID NO: 5246096 - DNA, 25 bp, Homo sapien
cattagtggaatcaccattgttgac

SEQ ID NO: 5246097 - DNA, 25 bp, Homo sapien
tcttgaggagtgatccctgtcccag

SEQ ID NO: 5246098 - DNA, 25 bp, Homo sapien
tgccttcagcttccggcttggcaaa

SEQ ID NO: 5246099 - DNA, 25 bp, Homo sapien
tgcctgctagcatctccctgtaact

SEQ ID NO: 5246100 - DNA, 25 bp, Homo sapien
cggccccttactgcgtttgtcaaag

SEQ ID NO: 5246101 - DNA, 25 bp, Homo sapien
aagctgccaactgcccctcggtgct

SEQ ID NO: 5246102 - DNA, 25 bp, Homo sapien
agcttggcctaggatcacacccgat

SEQ ID NO: 5246103 - DNA, 25 bp, Homo sapien
cctcggtgctcagtcaaagaggaaa

SEQ ID NO: 5246104 - DNA, 25 bp, Homo sapien
tcacacccgattcgattttcactgc

SEQ ID NO: 5246105 - DNA, 25 bp, Homo sapien
ctgaagttgagattgctgtctccac

SEQ ID NO: 5246106 - DNA, 25 bp, Homo sapien
gaagttgagattgctgtctccactt

SEQ ID NO: 5246107 - DNA, 25 bp, Homo sapien
gtctccacttgccatctgcccctgc

SEQ ID NO: 5246108 - DNA, 25 bp, Homo sapien
agttgagattgctgtctccacttgc

SEQ ID NO: 5246109 - DNA, 25 bp, Homo sapien
gctggactttgagctccgctggctc

SEQ ID NO: 5246110 - DNA, 25 bp, Homo sapien
aactaacaaattggatacaagatta

SEQ ID NO: 5246111 - DNA, 25 bp, Homo sapien
taaaactaacaaattggatacaaga

SEQ ID NO: 5246112 - DNA, 25 bp, Homo sapien
acaaattggatacaagattagaatt

SEQ ID NO: 5246113 - DNA, 25 bp, Homo sapien
caaattggatacaagattagaatta

SEQ ID NO: 5246114 - DNA, 25 bp, Homo sapien
ccacaagtttgcaagcccatctcat

SEQ ID NO: 5246115 - DNA, 25 bp, Homo sapien
tcagcatcttgctggtaagcatgaa

SEQ ID NO: 5246116 - DNA, 25 bp, Homo sapien
cagactacaacagaccacagcattt

SEQ ID NO: 5246117 - DNA, 25 bp, Homo sapien
cattaaatggagtttcaagtttact

SEQ ID NO: 5246118 - DNA, 25 bp, Homo sapien
tacgttctggatctctgcgaccatc

SEQ ID NO: 5246119 - DNA, 25 bp, Homo sapien
ctgcaggttctgaccctctacgttc

SEQ ID NO: 5246120 - DNA, 25 bp, Homo sapien
ccctctacgttctggatctctgcga

SEQ ID NO: 5246121 - DNA, 25 bp, Homo sapien
tcctgcaggttctgaccctctacgt

SEQ ID NO: 5246122 - DNA, 25 bp, Homo sapien
ttcatacatctgctcggagatgaag

SEQ ID NO: 5246123 - DNA, 25 bp, Homo sapien
acatctgctcggagatgaaggagcg

SEQ ID NO: 5246124 - DNA, 25 bp, Homo sapien
aaatggccttgttattgcacttgca

SEQ ID NO: 5246125 - DNA, 25 bp, Homo sapien
gtctcggaggcccataaggaaagga

SEQ ID NO: 5246126 - DNA, 25 bp, Homo sapien
cttgaagtttggcataattgagtat

SEQ ID NO: 5246127 - DNA, 25 bp, Homo sapien
tgaagtttggcataattgagtatgg

SEQ ID NO: 5246128 - DNA, 25 bp, Homo sapien
tcttgaagtttggcataattgagta

SEQ ID NO: 5246129 - DNA, 25 bp, Homo sapien
gaagtttggcataattgagtatgga

SEQ ID NO: 5246130 - DNA, 25 bp, Homo sapien
acagaatggtgaaggtccccactca

SEQ ID NO: 5246131 - DNA, 25 bp, Homo sapien
ctacagaatggtgaaggtccccact

SEQ ID NO: 5246132 - DNA, 25 bp, Homo sapien
tacagaatggtgaaggtccccactc

SEQ ID NO: 5246133 - DNA, 25 bp, Homo sapien
cagaatggtgaaggtccccactcac

SEQ ID NO: 5246134 - DNA, 25 bp, Homo sapien
gcttctgtaaatctcgtttaaatca

SEQ ID NO: 5246135 - DNA, 25 bp, Homo sapien
tcctgctgaacaatgcttccagatg

SEQ ID NO: 5246136 - DNA, 25 bp, Homo sapien
ggataggccatcaggttaatcctgc

SEQ ID NO: 5246137 - DNA, 25 bp, Homo sapien
tgaacaatgcttccagatgtgacca

SEQ ID NO: 5246138 - DNA, 25 bp, Homo sapien
cccactgtatgtaaactccataagg

SEQ ID NO: 5246139 - DNA, 25 bp, Homo sapien
cctgggcttggcatgtaatagtcac

SEQ ID NO: 5246140 - DNA, 25 bp, Homo sapien
taaactccataaggacatgggacat

SEQ ID NO: 5246141 - DNA, 25 bp, Homo sapien
tagtcactcagtcaaatatttgtca

SEQ ID NO: 5246142 - DNA, 25 bp, Homo sapien
tcctcctcagtgtaccagtatgtgc

SEQ ID NO: 5246143 - DNA, 25 bp, Homo sapien
tgtgctaggctctcttcgtgacttc

SEQ ID NO: 5246144 - DNA, 25 bp, Homo sapien
gctctcttcgtgacttctccagtct

SEQ ID NO: 5246145 - DNA, 25 bp, Homo sapien
cctcagtgtaccagtatgtgctagg

SEQ ID NO: 5246146 - DNA, 25 bp, Homo sapien
aacccccttttctgtcttcatagct

SEQ ID NO: 5246147 - DNA, 25 bp, Homo sapien
caacccccttttctgtcttcatagc

SEQ ID NO: 5246148 - DNA, 25 bp, Homo sapien
acccccttttctgtcttcatagctt

SEQ ID NO: 5246149 - DNA, 25 bp, Homo sapien
aattcaaccacatggttcggaaagg

SEQ ID NO: 5246150 - DNA, 25 bp, Homo sapien
tagcacagggtgtcaagccttccag

SEQ ID NO: 5246151 - DNA, 25 bp, Homo sapien
ccacagtctgcaattcaaccacatg

SEQ ID NO: 5246152 - DNA, 25 bp, Homo sapien
gtcaagccttccagaatccacttca

SEQ ID NO: 5246153 - DNA, 25 bp, Homo sapien
cattattcatttggagaggtgagtg

SEQ ID NO: 5246154 - DNA, 25 bp, Homo sapien
gtaatctgggtctatcttctaaatc

SEQ ID NO: 5246155 - DNA, 25 bp, Homo sapien
tgtttaccatatggtagtaatctgg

SEQ ID NO: 5246156 - DNA, 25 bp, Homo sapien
cgtttacattattcatttggagagg

SEQ ID NO: 5246157 - DNA, 25 bp, Homo sapien
atctgttggcagataagggcaggta

SEQ ID NO: 5246158 - DNA, 25 bp, Homo sapien
gttggcagataagggcaggtacatg

SEQ ID NO: 5246159 - DNA, 25 bp, Homo sapien
ggttctctcacatctgttggcagat

SEQ ID NO: 5246160 - DNA, 25 bp, Homo sapien
ctgttggcagataagggcaggtaca

SEQ ID NO: 5246161 - DNA, 25 bp, Homo sapien
tctctttcctagatgcatttctctc

SEQ ID NO: 5246162 - DNA, 25 bp, Homo sapien
ctctttcctagatgcatttctctct

SEQ ID NO: 5246163 - DNA, 25 bp, Homo sapien
ctgacctgaggattcagtccttcag

SEQ ID NO: 5246164 - DNA, 25 bp, Homo sapien
tccactgtgggggagtcttcctttc

SEQ ID NO: 5246165 - DNA, 25 bp, Homo sapien
ccttcagtaaccttcaccagaggct

SEQ ID NO: 5246166 - DNA, 25 bp, Homo sapien
tgaggattcagtccttcagtaacct

SEQ ID NO: 5246167 - DNA, 25 bp, Homo sapien
catttcatgacaggcattgctgttc

SEQ ID NO: 5246168 - DNA, 25 bp, Homo sapien
ggcactgctatatcatccatttcat

SEQ ID NO: 5246169 - DNA, 25 bp, Homo sapien
ggctcacaccttggcgaggagctca

SEQ ID NO: 5246170 - DNA, 25 bp, Homo sapien
cctgaggcactgctatatcatccat

SEQ ID NO: 5246171 - DNA, 25 bp, Homo sapien
ctgaataagagtctccttgcaccag

SEQ ID NO: 5246172 - DNA, 25 bp, Homo sapien
gcttttgctgaataagagtctcctt

SEQ ID NO: 5246173 - DNA, 25 bp, Homo sapien
tgctgaataagagtctccttgcacc

SEQ ID NO: 5246174 - DNA, 25 bp, Homo sapien
gaaatgcttttgctgaataagagtc

SEQ ID NO: 5246175 - DNA, 25 bp, Homo sapien
ttgggagagctaactgctcacaaga

SEQ ID NO: 5246176 - DNA, 25 bp, Homo sapien
caccagcctttgggagagctaactg

SEQ ID NO: 5246177 - DNA, 25 bp, Homo sapien
ccaccagcctttgggagagctaact

SEQ ID NO: 5246178 - DNA, 25 bp, Homo sapien
accagcctttgggagagctaactgc

SEQ ID NO: 5246179 - DNA, 25 bp, Homo sapien
cttagccgtcctttacctcttgcct

SEQ ID NO: 5246180 - DNA, 25 bp, Homo sapien
gccgtcctttacctcttgcctccca

SEQ ID NO: 5246181 - DNA, 25 bp, Homo sapien
ctccactaaaggacttagccgtcct

SEQ ID NO: 5246182 - DNA, 25 bp, Homo sapien
gagcccctccactaaaggacttagc

SEQ ID NO: 5246183 - DNA, 25 bp, Homo sapien
ctgtatcataaggcagtaacttggg

SEQ ID NO: 5246184 - DNA, 25 bp, Homo sapien
cttctgtatcataaggcagtaactt

SEQ ID NO: 5246185 - DNA, 25 bp, Homo sapien
tcatctatttgtatagcaagtttac

SEQ ID NO: 5246186 - DNA, 25 bp, Homo sapien
tctgtatcataaggcagtaacttgg

SEQ ID NO: 5246187 - DNA, 25 bp, Homo sapien
tctatcatcccgttgctttctagaa

SEQ ID NO: 5246188 - DNA, 25 bp, Homo sapien
tcttggtacttctccttgtcttggt

SEQ ID NO: 5246189 - DNA, 25 bp, Homo sapien
ccctctggactctcttggtacttct

SEQ ID NO: 5246190 - DNA, 25 bp, Homo sapien
tgctgtgctgtatgtccttgccgca

SEQ ID NO: 5246191 - DNA, 25 bp, Homo sapien
tcacctggtagtagacagagcccct

SEQ ID NO: 5246192 - DNA, 25 bp, Homo sapien
acctggtagtagacagagccccttc

SEQ ID NO: 5246193 - DNA, 25 bp, Homo sapien
tctccttcacctggtagtagacaga

SEQ ID NO: 5246194 - DNA, 25 bp, Homo sapien
ccttcattagtgacttggggagttt

SEQ ID NO: 5246195 - DNA, 25 bp, Homo sapien
tatgtatgcgaatgtgaagaaggga

SEQ ID NO: 5246196 - DNA, 25 bp, Homo sapien
aacagaaaattgacataattccatc

SEQ ID NO: 5246197 - DNA, 25 bp, Homo sapien
aattccatctgtatgtatgcgaatg

SEQ ID NO: 5246198 - DNA, 25 bp, Homo sapien
aaaggcacaacagaaaattgacata

SEQ ID NO: 5246199 - DNA, 25 bp, Homo sapien
gacatgtacatgagaatcattccac

SEQ ID NO: 5246200 - DNA, 25 bp, Homo sapien
ggcagggtcctgggataaatatctt

SEQ ID NO: 5246201 - DNA, 25 bp, Homo sapien
gaaagcaggtctgcatcgcagacat

SEQ ID NO: 5246202 - DNA, 25 bp, Homo sapien
tggtttcccttttggatgtgtgtag

SEQ ID NO: 5246203 - DNA, 25 bp, Homo sapien
ccccctttctcatactgggcatcag

SEQ ID NO: 5246204 - DNA, 25 bp, Homo sapien
ctttctcatactgggcatcaggaaa

SEQ ID NO: 5246205 - DNA, 25 bp, Homo sapien
ccctttctcatactgggcatcagga

SEQ ID NO: 5246206 - DNA, 25 bp, Homo sapien
cctttctcatactgggcatcaggaa

SEQ ID NO: 5246207 - DNA, 25 bp, Homo sapien
tctccatcacacatttctgaacagt

SEQ ID NO: 5246208 - DNA, 25 bp, Homo sapien
cccacatcttgctagggagctagag

SEQ ID NO: 5246209 - DNA, 25 bp, Homo sapien
ctgacccacatcttgctagggagct

SEQ ID NO: 5246210 - DNA, 25 bp, Homo sapien
cttctccatcacacatttctgaaca

SEQ ID NO: 5246211 - DNA, 25 bp, Homo sapien
ctttgcctttgcgataatatcctgc

SEQ ID NO: 5246212 - DNA, 25 bp, Homo sapien
tacattgatccctggttcactcctc

SEQ ID NO: 5246213 - DNA, 25 bp, Homo sapien
gcaggctctatttccatgctgtgtt

SEQ ID NO: 5246214 - DNA, 25 bp, Homo sapien
tagctcttattctagatccatccta

SEQ ID NO: 5246215 - DNA, 25 bp, Homo sapien
tccttcattagtgacttggggagtc

SEQ ID NO: 5246216 - DNA, 25 bp, Homo sapien
ttggggagtctttagatcaaaggtc

SEQ ID NO: 5246217 - DNA, 25 bp, Homo sapien
cacctggtagtagactgagctcctt

SEQ ID NO: 5246218 - DNA, 25 bp, Homo sapien
tctccttcacctggtagtagactga

SEQ ID NO: 5246219 - DNA, 25 bp, Homo sapien
acacatttccgaacagtcatcactg

SEQ ID NO: 5246220 - DNA, 25 bp, Homo sapien
atttccgaacagtcatcactgccct

SEQ ID NO: 5246221 - DNA, 25 bp, Homo sapien
tccatcacacatttccgaacagtca

SEQ ID NO: 5246222 - DNA, 25 bp, Homo sapien
tcacacatttccgaacagtcatcac

SEQ ID NO: 5246223 - DNA, 25 bp, Homo sapien
ctgacccacgtcttgctagggagct

SEQ ID NO: 5246224 - DNA, 25 bp, Homo sapien
ggagctagaggcttcctggcgctct

SEQ ID NO: 5246225 - DNA, 25 bp, Homo sapien
cccacgtcttgctagggagctagag

SEQ ID NO: 5246226 - DNA, 25 bp, Homo sapien
gacccacgtcttgctagggagctag

SEQ ID NO: 5246227 - DNA, 25 bp, Homo sapien
ctaaaatgactctggcttgcaatgg

SEQ ID NO: 5246228 - DNA, 25 bp, Homo sapien
tttgccaaagccataatctccccga

SEQ ID NO: 5246229 - DNA, 25 bp, Homo sapien
tgtacttttcttaataactggcaaa

SEQ ID NO: 5246230 - DNA, 25 bp, Homo sapien
gttttgtcatgtccaaagtaagtaa

SEQ ID NO: 5246231 - DNA, 25 bp, Homo sapien
tcatatagcaggctagaagcaagct

SEQ ID NO: 5246232 - DNA, 25 bp, Homo sapien
ctggtacattatcatatagcaggct

SEQ ID NO: 5246233 - DNA, 25 bp, Homo sapien
tagcaggctagaagcaagctcttct

SEQ ID NO: 5246234 - DNA, 25 bp, Homo sapien
cattatcatatagcaggctagaagc

SEQ ID NO: 5246235 - DNA, 25 bp, Homo sapien
ttttcatatgctgattgctccgctc

SEQ ID NO: 5246236 - DNA, 25 bp, Homo sapien
ctcattttcatatgctgattgctcc

SEQ ID NO: 5246237 - DNA, 25 bp, Homo sapien
cattttcatatgctgattgctccgc

SEQ ID NO: 5246238 - DNA, 25 bp, Homo sapien
tcattttcatatgctgattgctccg

SEQ ID NO: 5246239 - DNA, 25 bp, Homo sapien
ccattgtgccacacgcttgatcact

SEQ ID NO: 5246240 - DNA, 25 bp, Homo sapien
tgccacacgcttgatcactttccgt

SEQ ID NO: 5246241 - DNA, 25 bp, Homo sapien
cgcttgatcactttccgtccttgct

SEQ ID NO: 5246242 - DNA, 25 bp, Homo sapien
cacgcttgatcactttccgtccttg

SEQ ID NO: 5246243 - DNA, 25 bp, Homo sapien
tcccaaagtggagttgtttgcaata

SEQ ID NO: 5246244 - DNA, 25 bp, Homo sapien
cccaaagtggagttgtttgcaatat

SEQ ID NO: 5246245 - DNA, 25 bp, Homo sapien
gagttgtttgcaatatccacagtat

SEQ ID NO: 5246246 - DNA, 25 bp, Homo sapien
ttttcccaaagtggagttgtttgca

SEQ ID NO: 5246247 - DNA, 25 bp, Homo sapien
aaactattagatctcatgaagacat

SEQ ID NO: 5246248 - DNA, 25 bp, Homo sapien
tagtatggcttgaaattgggtagca

SEQ ID NO: 5246249 - DNA, 25 bp, Homo sapien
tccatgtgaattctaaaatcgtatt

SEQ ID NO: 5246250 - DNA, 25 bp, Homo sapien
catatcagttaatgtagccctgtag

SEQ ID NO: 5246251 - DNA, 25 bp, Homo sapien
cattctgctccagccatgccccctc

SEQ ID NO: 5246252 - DNA, 25 bp, Homo sapien
ttctgctccagccatgccccctctt

SEQ ID NO: 5246253 - DNA, 25 bp, Homo sapien
tcattctgctccagccatgccccct

SEQ ID NO: 5246254 - DNA, 25 bp, Homo sapien
ctgctccagccatgccccctctttt

SEQ ID NO: 5246255 - DNA, 25 bp, Homo sapien
attttgttggctgttttcctgcctt

SEQ ID NO: 5246256 - DNA, 25 bp, Homo sapien
ttgttggctgttttcctgccttctc

SEQ ID NO: 5246257 - DNA, 25 bp, Homo sapien
cattttgttggctgttttcctgcct

SEQ ID NO: 5246258 - DNA, 25 bp, Homo sapien
ttggctgttttcctgccttctcatt

SEQ ID NO: 5246259 - DNA, 25 bp, Homo sapien
aaggtctttcagattcacgttcgcc

SEQ ID NO: 5246260 - DNA, 25 bp, Homo sapien
gaccacctggccgtcggctttgcta

SEQ ID NO: 5246261 - DNA, 25 bp, Homo sapien
acctggccgtcggctttgctattat

SEQ ID NO: 5246262 - DNA, 25 bp, Homo sapien
ccacctggccgtcggctttgctatt

SEQ ID NO: 5246263 - DNA, 25 bp, Homo sapien
ctgtagggcaaagggaaagcggaca

SEQ ID NO: 5246264 - DNA, 25 bp, Homo sapien
tgtagggcaaagggaaagcggacaa

SEQ ID NO: 5246265 - DNA, 25 bp, Homo sapien
tcttgatcggactcttttctgtgca

SEQ ID NO: 5246266 - DNA, 25 bp, Homo sapien
ctcttgatcggactcttttctgtgc

SEQ ID NO: 5246267 - DNA, 25 bp, Homo sapien
cttgatcggactcttttctgtgcag

SEQ ID NO: 5246268 - DNA, 25 bp, Homo sapien
accacaggtcactggaagcaaagga

SEQ ID NO: 5246269 - DNA, 25 bp, Homo sapien
tggaagcaaaggagccttaaaatcc

SEQ ID NO: 5246270 - DNA, 25 bp, Homo sapien
taaaatccacagtttcatctttgtg

SEQ ID NO: 5246271 - DNA, 25 bp, Homo sapien
tcttcttatgtaaaattcccttcac

SEQ ID NO: 5246272 - DNA, 25 bp, Homo sapien
gtctgtatacacttcaccaagattc

SEQ ID NO: 5246273 - DNA, 25 bp, Homo sapien
cagtctgtatacacttcaccaagat

SEQ ID NO: 5246274 - DNA, 25 bp, Homo sapien
agtctgtatacacttcaccaagatt

SEQ ID NO: 5246275 - DNA, 25 bp, Homo sapien
tcagtctgtatacacttcaccaaga

SEQ ID NO: 5246276 - DNA, 25 bp, Homo sapien
tgtaacgtattcttggaggatcagg

SEQ ID NO: 5246277 - DNA, 25 bp, Homo sapien
cctgtaacgtattcttggaggatca

SEQ ID NO: 5246278 - DNA, 25 bp, Homo sapien
ctgtaacgtattcttggaggatcag

SEQ ID NO: 5246279 - DNA, 25 bp, Homo sapien
ctattgttttgagacttcagtattc

SEQ ID NO: 5246280 - DNA, 25 bp, Homo sapien
agggtcaactgagctattgttttga

SEQ ID NO: 5246281 - DNA, 25 bp, Homo sapien
acaagggtcaactgagctattgttt

SEQ ID NO: 5246282 - DNA, 25 bp, Homo sapien
gggtcaactgagctattgttttgag

SEQ ID NO: 5246283 - DNA, 25 bp, Homo sapien
ctgtttccctcttctccccacacat

SEQ ID NO: 5246284 - DNA, 25 bp, Homo sapien
ctttgctggaactgtttccctcttc

SEQ ID NO: 5246285 - DNA, 25 bp, Homo sapien
actgtttccctcttctccccacaca

SEQ ID NO: 5246286 - DNA, 25 bp, Homo sapien
tttgctggaactgtttccctcttct

SEQ ID NO: 5246287 - DNA, 25 bp, Homo sapien
gttgaaacttgccagtgtattttgt

SEQ ID NO: 5246288 - DNA, 25 bp, Homo sapien
acacctttatctggtgtctccttga

SEQ ID NO: 5246289 - DNA, 25 bp, Homo sapien
tcataatcctaaacttcgtggaggc

SEQ ID NO: 5246290 - DNA, 25 bp, Homo sapien
taattccagagccttgtcttcgagt

SEQ ID NO: 5246291 - DNA, 25 bp, Homo sapien
atttccatgtacgtgcctggttttg

SEQ ID NO: 5246292 - DNA, 25 bp, Homo sapien
ccatgtacgtgcctggttttgaggg

SEQ ID NO: 5246293 - DNA, 25 bp, Homo sapien
catgtacgtgcctggttttgagggt

SEQ ID NO: 5246294 - DNA, 25 bp, Homo sapien
tttaatttccatgtacgtgcctggt

SEQ ID NO: 5246295 - DNA, 25 bp, Homo sapien
cagcttccacaggcgggatgtgaca

SEQ ID NO: 5246296 - DNA, 25 bp, Homo sapien
tcagcttccacaggcgggatgtgac

SEQ ID NO: 5246297 - DNA, 25 bp, Homo sapien
atctagacacaagccggcactctgc

SEQ ID NO: 5246298 - DNA, 25 bp, Homo sapien
ccagtacccgatgaacctgctcttt

SEQ ID NO: 5246299 - DNA, 25 bp, Homo sapien
agtacccgatgaacctgctctttcc

SEQ ID NO: 5246300 - DNA, 25 bp, Homo sapien
ctttccccatctagacacaagccgg

SEQ ID NO: 5246301 - DNA, 25 bp, Homo sapien
tcctgacaacactgttggcttcccg

SEQ ID NO: 5246302 - DNA, 25 bp, Homo sapien
gttggcttcccggagactccttcat

SEQ ID NO: 5246303 - DNA, 25 bp, Homo sapien
gcagaagatgcaattccacggggtc

SEQ ID NO: 5246304 - DNA, 25 bp, Homo sapien
aacactgttggcttcccggagactc

SEQ ID NO: 5246305 - DNA, 25 bp, Homo sapien
aggacacatctgcctctccaggacc

SEQ ID NO: 5246306 - DNA, 25 bp, Homo sapien
aactgttcctcaggacacatctgcc

SEQ ID NO: 5246307 - DNA, 25 bp, Homo sapien
ctcaggacacatctgcctctccagg

SEQ ID NO: 5246308 - DNA, 25 bp, Homo sapien
caactgttcctcaggacacatctgc

SEQ ID NO: 5246309 - DNA, 25 bp, Homo sapien
cagcaatagactttcaagaggagga

SEQ ID NO: 5246310 - DNA, 25 bp, Homo sapien
cagaacagcaatagactttcaagag

SEQ ID NO: 5246311 - DNA, 25 bp, Homo sapien
gctctcagaacagcaatagactttc

SEQ ID NO: 5246312 - DNA, 25 bp, Homo sapien
gcaatagactttcaagaggaggaac

SEQ ID NO: 5246313 - DNA, 25 bp, Homo sapien
cttgccccgtgggattaagatcaca

SEQ ID NO: 5246314 - DNA, 25 bp, Homo sapien
taagatcacaaatctcacgagggcc

SEQ ID NO: 5246315 - DNA, 25 bp, Homo sapien
tcagggtcaggtaatgtcatggcag

SEQ ID NO: 5246316 - DNA, 25 bp, Homo sapien
gaaaagctaccagcatagttcagtg

SEQ ID NO: 5246317 - DNA, 25 bp, Homo sapien
ctccttcaggccttgacacgcctct

SEQ ID NO: 5246318 - DNA, 25 bp, Homo sapien
gggtaaccgtgctcattcagccttt

SEQ ID NO: 5246319 - DNA, 25 bp, Homo sapien
ggcgcatgtcttgtacaaacccctc

SEQ ID NO: 5246320 - DNA, 25 bp, Homo sapien
gaagatgaggcgcatgtcttgtaca

SEQ ID NO: 5246321 - DNA, 25 bp, Homo sapien
cacttgggggtaaccgtgctcattc

SEQ ID NO: 5246322 - DNA, 25 bp, Homo sapien
tgtcacttctactccttgctggcaa

SEQ ID NO: 5246323 - DNA, 25 bp, Homo sapien
gggatatggtctattcacatgcaaa

SEQ ID NO: 5246324 - DNA, 25 bp, Homo sapien
tttctctgtcacttctactccttgc

SEQ ID NO: 5246325 - DNA, 25 bp, Homo sapien
tgctggcaatccttgttgggatatg

SEQ ID NO: 5246326 - DNA, 25 bp, Homo sapien
cttaacaatgttgaagtgtgaaata

SEQ ID NO: 5246327 - DNA, 25 bp, Homo sapien
ctttcttattaacagggcagaaaag

SEQ ID NO: 5246328 - DNA, 25 bp, Homo sapien
cgtttcttaccagcatgatcctttc

SEQ ID NO: 5246329 - DNA, 25 bp, Homo sapien
tcatgcagctaagagtaacttccgt

SEQ ID NO: 5246330 - DNA, 25 bp, Homo sapien
gaatagcaaacacttccttgaaatt

SEQ ID NO: 5246331 - DNA, 25 bp, Homo sapien
tagcaaacacttccttgaaattctt

SEQ ID NO: 5246332 - DNA, 25 bp, Homo sapien
atagcaaacacttccttgaaattct

SEQ ID NO: 5246333 - DNA, 25 bp, Homo sapien
aatagcaaacacttccttgaaattc

SEQ ID NO: 5246334 - DNA, 25 bp, Homo sapien
tatgggatggtgtcgctgccaacat

SEQ ID NO: 5246335 - DNA, 25 bp, Homo sapien
gatgatggacactcatgcaccaccg

SEQ ID NO: 5246336 - DNA, 25 bp, Homo sapien
gtaataaatgttgtctggagcagcc

SEQ ID NO: 5246337 - DNA, 25 bp, Homo sapien
tgcaccaccgtgagctatcgaaaga

SEQ ID NO: 5246338 - DNA, 25 bp, Homo sapien
tatcaggcccatgaacatactgtca

SEQ ID NO: 5246339 - DNA, 25 bp, Homo sapien
taacacggagcaggattcacattgc

SEQ ID NO: 5246340 - DNA, 25 bp, Homo sapien
cagaaaggctatattgtaacacgga

SEQ ID NO: 5246341 - DNA, 25 bp, Homo sapien
taagatggtatacccactgcctccc

SEQ ID NO: 5246342 - DNA, 25 bp, Homo sapien
gggttcccttggtcagctgtgattt

SEQ ID NO: 5246343 - DNA, 25 bp, Homo sapien
ctggtcccatggacccaaggaactt

SEQ ID NO: 5246344 - DNA, 25 bp, Homo sapien
tggcctggaattgcccctgttcctc

SEQ ID NO: 5246345 - DNA, 25 bp, Homo sapien
tcctccatcagacagcagtggtcca

SEQ ID NO: 5246346 - DNA, 25 bp, Homo sapien
tgtcaagtggaacaagttttgggga

SEQ ID NO: 5246347 - DNA, 25 bp, Homo sapien
ggtgggctgtaaaactgtcaagtgg

SEQ ID NO: 5246348 - DNA, 25 bp, Homo sapien
agggccaggtgggctgtaaaactgt

SEQ ID NO: 5246349 - DNA, 25 bp, Homo sapien
tgggctgtaaaactgtcaagtggaa

SEQ ID NO: 5246350 - DNA, 25 bp, Homo sapien
tcgtggaccatccagatggtgtcca

SEQ ID NO: 5246351 - DNA, 25 bp, Homo sapien
ggtacctggcaaggacctcagtgtt

SEQ ID NO: 5246352 - DNA, 25 bp, Homo sapien
tcctatgaagaacagggtacctggc

SEQ ID NO: 5246353 - DNA, 25 bp, Homo sapien
ccagcacctcatgggcagcaacttt

SEQ ID NO: 5246354 - DNA, 25 bp, Homo sapien
aactaaggctgtggggtcaaacctg

SEQ ID NO: 5246355 - DNA, 25 bp, Homo sapien
gatgtaccccacaagggtggaacta

SEQ ID NO: 5246356 - DNA, 25 bp, Homo sapien
gttggatgtaccccacaagggtgga

SEQ ID NO: 5246357 - DNA, 25 bp, Homo sapien
ccccacaagggtggaactaaggctg

SEQ ID NO: 5246358 - DNA, 25 bp, Homo sapien
tatcagctatcatcggatatttgga

SEQ ID NO: 5246359 - DNA, 25 bp, Homo sapien
gtgggtccccattagcacaaatatc

SEQ ID NO: 5246360 - DNA, 25 bp, Homo sapien
tcaccagtgggtccccattagcaca

SEQ ID NO: 5246361 - DNA, 25 bp, Homo sapien
tgtgttcaccagtgggtccccatta

SEQ ID NO: 5246362 - DNA, 25 bp, Homo sapien
ggtgaaggattgtagggagtcagaa

SEQ ID NO: 5246363 - DNA, 25 bp, Homo sapien
aggattgtagggagtcagaaagaca

SEQ ID NO: 5246364 - DNA, 25 bp, Homo sapien
tgaaggattgtagggagtcagaaag

SEQ ID NO: 5246365 - DNA, 25 bp, Homo sapien
tgggtgaaggattgtagggagtcag

SEQ ID NO: 5246366 - DNA, 25 bp, Homo sapien
gaaaatgggcgaatgggaagaagta

SEQ ID NO: 5246367 - DNA, 25 bp, Homo sapien
ccaaacctgcaacactgtaagatgc

SEQ ID NO: 5246368 - DNA, 25 bp, Homo sapien
caacactgtaagatgccagtgggat

SEQ ID NO: 5246369 - DNA, 25 bp, Homo sapien
ctcagtgactgggctcccaaacctg

SEQ ID NO: 5246370 - DNA, 25 bp, Homo sapien
aggtggacatgcccttgctagggca

SEQ ID NO: 5246371 - DNA, 25 bp, Homo sapien
gcactgacatatgtaccagcttttc

SEQ ID NO: 5246372 - DNA, 25 bp, Homo sapien
tgagtggcactgacatatgtaccag

SEQ ID NO: 5246373 - DNA, 25 bp, Homo sapien
tggcactgacatatgtaccagcttt

SEQ ID NO: 5246374 - DNA, 25 bp, Homo sapien
caccctaggccctgcctgggtgtca

SEQ ID NO: 5246375 - DNA, 25 bp, Homo sapien
cgtcccaccctaggccctgcctggg

SEQ ID NO: 5246376 - DNA, 25 bp, Homo sapien
tggcctatgagctccccagtcggcc

SEQ ID NO: 5246377 - DNA, 25 bp, Homo sapien
cctgggtgtcagagcctggcctatg

SEQ ID NO: 5246378 - DNA, 25 bp, Homo sapien
ctggtgctcaggtcgctgcccccac

SEQ ID NO: 5246379 - DNA, 25 bp, Homo sapien
ctcaggtcgctgcccccacctgcca

SEQ ID NO: 5246380 - DNA, 25 bp, Homo sapien
gtgctcaggtcgctgcccccacctg

SEQ ID NO: 5246381 - DNA, 25 bp, Homo sapien
tcaggtcgctgcccccacctgccat

SEQ ID NO: 5246382 - DNA, 25 bp, Homo sapien
tgtccccgccagctgagcagtagtt

SEQ ID NO: 5246383 - DNA, 25 bp, Homo sapien
tgagtcagtcaaggaaatagcccca

SEQ ID NO: 5246384 - DNA, 25 bp, Homo sapien
catctgtgttatggcaagctggact

SEQ ID NO: 5246385 - DNA, 25 bp, Homo sapien
gaaacgactgttcagagtgtccccg

SEQ ID NO: 5246386 - DNA, 25 bp, Homo sapien
tctcatttgctacttgtgaaacacc

SEQ ID NO: 5246387 - DNA, 25 bp, Homo sapien
tacttgtgaaacacctccgttcagc

SEQ ID NO: 5246388 - DNA, 25 bp, Homo sapien
tttgctacttgtgaaacacctccgt

SEQ ID NO: 5246389 - DNA, 25 bp, Homo sapien
ttcatctcatttgctacttgtgaaa

SEQ ID NO: 5246390 - DNA, 25 bp, Homo sapien
aactgcaaggcggcagtgacgctgg

SEQ ID NO: 5246391 - DNA, 25 bp, Homo sapien
gcaaggcggcagtgacgctggggga

SEQ ID NO: 5246392 - DNA, 25 bp, Homo sapien
aaggcggcagtgacgctgggggagg

SEQ ID NO: 5246393 - DNA, 25 bp, Homo sapien
ctgcaaggcggcagtgacgctgggg

SEQ ID NO: 5246394 - DNA, 25 bp, Homo sapien
tcctacctatttctaacttgctgag

SEQ ID NO: 5246395 - DNA, 25 bp, Homo sapien
caaacgcatctaccaaggtagtcat

SEQ ID NO: 5246396 - DNA, 25 bp, Homo sapien
ttttatcaaacgcatctaccaaggt

SEQ ID NO: 5246397 - DNA, 25 bp, Homo sapien
aagaattgggatcacagctgttagc

SEQ ID NO: 5246398 - DNA, 25 bp, Homo sapien
tttgaagtgcttgaatacagtgtca

SEQ ID NO: 5246399 - DNA, 25 bp, Homo sapien
tgatatctccagcttatgtcttttg

SEQ ID NO: 5246400 - DNA, 25 bp, Homo sapien
tatctccagcttatgtcttttgaag

SEQ ID NO: 5246401 - DNA, 25 bp, Homo sapien
gaatacagtgtcatagacaagtccc

SEQ ID NO: 5246402 - DNA, 25 bp, Homo sapien
tatttgtgatgagttcccgatcgcg

SEQ ID NO: 5246403 - DNA, 25 bp, Homo sapien
ttgtgatgagttcccgatcgcggag

SEQ ID NO: 5246404 - DNA, 25 bp, Homo sapien
tttatttgtgatgagttcccgatcg

SEQ ID NO: 5246405 - DNA, 25 bp, Homo sapien
tgatgagttcccgatcgcggaggcc

SEQ ID NO: 5246406 - DNA, 25 bp, Homo sapien
gaacattgtacaccactctttgtac

SEQ ID NO: 5246407 - DNA, 25 bp, Homo sapien
ccaggtttctacaagaatcttcaga

SEQ ID NO: 5246408 - DNA, 25 bp, Homo sapien
acattgtacaccactctttgtacag

SEQ ID NO: 5246409 - DNA, 25 bp, Homo sapien
ggaccaggtttctacaagaatcttc

SEQ ID NO: 5246410 - DNA, 25 bp, Homo sapien
agggcatgtccctgtttttcttgtg

SEQ ID NO: 5246411 - DNA, 25 bp, Homo sapien
tgatttagccaaatccagtttgtcc

SEQ ID NO: 5246412 - DNA, 25 bp, Homo sapien
gcagacatgcttttactctttccag

SEQ ID NO: 5246413 - DNA, 25 bp, Homo sapien
cccatagcatccaccctcttcaggg

SEQ ID NO: 5246414 - DNA, 25 bp, Homo sapien
ctttcttttcgatcactttcttgga

SEQ ID NO: 5246415 - DNA, 25 bp, Homo sapien
gtttaagacttagtttgatgtcagg

SEQ ID NO: 5246416 - DNA, 25 bp, Homo sapien
tcttggaaagacaatttgtcttgga

SEQ ID NO: 5246417 - DNA, 25 bp, Homo sapien
cttgtttaagacttagtttgatgtc

SEQ ID NO: 5246418 - DNA, 25 bp, Homo sapien
ctcttagcggatgagaaaccgtttt

SEQ ID NO: 5246419 - DNA, 25 bp, Homo sapien
ccttttcctcttagcggatgagaaa

SEQ ID NO: 5246420 - DNA, 25 bp, Homo sapien
ttcctcttagcggatgagaaaccgt

SEQ ID NO: 5246421 - DNA, 25 bp, Homo sapien
cttttcctcttagcggatgagaaac

SEQ ID NO: 5246422 - DNA, 25 bp, Homo sapien
ttccttgcttccgggctttctggca

SEQ ID NO: 5246423 - DNA, 25 bp, Homo sapien
cttccttgcttccgggctttctggc

SEQ ID NO: 5246424 - DNA, 25 bp, Homo sapien
ttttcccaaagtagagttgtttgca

SEQ ID NO: 5246425 - DNA, 25 bp, Homo sapien
cccaaagtagagttgtttgcaatat

SEQ ID NO: 5246426 - DNA, 25 bp, Homo sapien
gagttgtttgcaatatccacagtat

SEQ ID NO: 5246427 - DNA, 25 bp, Homo sapien
tcccaaagtagagttgtttgcaata

SEQ ID NO: 5246428 - DNA, 25 bp, Homo sapien
gtgacacgggtcttactgcctaaag

SEQ ID NO: 5246429 - DNA, 25 bp, Homo sapien
taagatagcagattacaggtccagg

SEQ ID NO: 5246430 - DNA, 25 bp, Homo sapien
aagcctacaagattagattgggccc

SEQ ID NO: 5246431 - DNA, 25 bp, Homo sapien
tctttaacttgagcacttacaggcc

SEQ ID NO: 5246432 - DNA, 25 bp, Homo sapien
gtggtgcaacctctgctcagtgcaa

SEQ ID NO: 5246433 - DNA, 25 bp, Homo sapien
tgcagtggtgcaacctctgctcagt

SEQ ID NO: 5246434 - DNA, 25 bp, Homo sapien
gcagtggtgcaacctctgctcagtg

SEQ ID NO: 5246435 - DNA, 25 bp, Homo sapien
cagtggtgcaacctctgctcagtgc

SEQ ID NO: 5246436 - DNA, 25 bp, Homo sapien
ccaatatggataaagcagaatgctg

SEQ ID NO: 5246437 - DNA, 25 bp, Homo sapien
ggagtgaagccagagcctaacaaat

SEQ ID NO: 5246438 - DNA, 25 bp, Homo sapien
cactaccacagaagatacaggtcca

SEQ ID NO: 5246439 - DNA, 25 bp, Homo sapien
tttaaggcaaaagcaccaatatgga

SEQ ID NO: 5246440 - DNA, 25 bp, Homo sapien
tgtttttctgcgttctcgttcccat

SEQ ID NO: 5246441 - DNA, 25 bp, Homo sapien
ttgtttttctgcgttctcgttccca

SEQ ID NO: 5246442 - DNA, 25 bp, Homo sapien
agctggccatcggctttgctgttat

SEQ ID NO: 5246443 - DNA, 25 bp, Homo sapien
gttcgccttcttttcactcgagacc

SEQ ID NO: 5246444 - DNA, 25 bp, Homo sapien
gaccagctggccatcggctttgctg

SEQ ID NO: 5246445 - DNA, 25 bp, Homo sapien
ttcgccttcttttcactcgagacca

SEQ ID NO: 5246446 - DNA, 25 bp, Homo sapien
cctaatcttggaaaggtctttcaga

SEQ ID NO: 5246447 - DNA, 25 bp, Homo sapien
ccctaatcttggaaaggtctttcag

SEQ ID NO: 5246448 - DNA, 25 bp, Homo sapien
ctaatcttggaaaggtctttcagat

SEQ ID NO: 5246449 - DNA, 25 bp, Homo sapien
ccaatcctggatgggaccaagccaa

SEQ ID NO: 5246450 - DNA, 25 bp, Homo sapien
ctccccaatcctggatgggaccaag

SEQ ID NO: 5246451 - DNA, 25 bp, Homo sapien
atcctggatgggaccaagccaacag

SEQ ID NO: 5246452 - DNA, 25 bp, Homo sapien
cccaatcctggatgggaccaagcca

SEQ ID NO: 5246453 - DNA, 25 bp, Homo sapien
gatcggactcttttctgtggagctc

SEQ ID NO: 5246454 - DNA, 25 bp, Homo sapien
ctcttgatcggactcttttctgtgg

SEQ ID NO: 5246455 - DNA, 25 bp, Homo sapien
tcttgatcggactcttttctgtgga

SEQ ID NO: 5246456 - DNA, 25 bp, Homo sapien
ttgatcggactcttttctgtggagc

SEQ ID NO: 5246457 - DNA, 25 bp, Homo sapien
cagttaggtagccagagatgaagcc

SEQ ID NO: 5246458 - DNA, 25 bp, Homo sapien
cattggtttgatgggcgctctccag

SEQ ID NO: 5246459 - DNA, 25 bp, Homo sapien
gataacctaatggagacagcacctg

SEQ ID NO: 5246460 - DNA, 25 bp, Homo sapien
ccataatcagtctcccatttgggca

SEQ ID NO: 5246461 - DNA, 25 bp, Homo sapien
accacaggtcactggaagtaaagga

SEQ ID NO: 5246462 - DNA, 25 bp, Homo sapien
tctccttatgtaaaattcccttcac

SEQ ID NO: 5246463 - DNA, 25 bp, Homo sapien
ttctccttatgtaaaattcccttca

SEQ ID NO: 5246464 - DNA, 25 bp, Homo sapien
tccaatttctccttatgtaaaattc

SEQ ID NO: 5246465 - DNA, 25 bp, Homo sapien
cttgttccaatttctccttatgtaa

SEQ ID NO: 5246466 - DNA, 25 bp, Homo sapien
ttgaccttcacccatgaggagagtg

SEQ ID NO: 5246467 - DNA, 25 bp, Homo sapien
cctgaaagtcccctctaagtatatt

SEQ ID NO: 5246468 - DNA, 25 bp, Homo sapien
gatcaatagcaggagggtctggcct

SEQ ID NO: 5246469 - DNA, 25 bp, Homo sapien
cccaatttgtgatgaagatcaatag

SEQ ID NO: 5246470 - DNA, 25 bp, Homo sapien
agtctgtatacactttgccaaggtt

SEQ ID NO: 5246471 - DNA, 25 bp, Homo sapien
cagtctgtatacactttgccaaggt

SEQ ID NO: 5246472 - DNA, 25 bp, Homo sapien
gtctgtatacactttgccaaggttc

SEQ ID NO: 5246473 - DNA, 25 bp, Homo sapien
tcagtctgtatacactttgccaagg

SEQ ID NO: 5246474 - DNA, 25 bp, Homo sapien
tatcctgatggagcccctggtacaa

SEQ ID NO: 5246475 - DNA, 25 bp, Homo sapien
tggtacaacatcagtgtgttgcact

SEQ ID NO: 5246476 - DNA, 25 bp, Homo sapien
tggttatggatatggggtccctctc

SEQ ID NO: 5246477 - DNA, 25 bp, Homo sapien
tccaagctgctgagtctatcctgat

SEQ ID NO: 5246478 - DNA, 25 bp, Homo sapien
tgccctgcttgactatcgactctct

SEQ ID NO: 5246479 - DNA, 25 bp, Homo sapien
cagatttgaattacttagcccggca

SEQ ID NO: 5246480 - DNA, 25 bp, Homo sapien
caaccccagttgctgaattgtgcct

SEQ ID NO: 5246481 - DNA, 25 bp, Homo sapien
caaaattgtccacatgcaccctagt

SEQ ID NO: 5246482 - DNA, 25 bp, Homo sapien
ttggaggattaggtagagatccttc

SEQ ID NO: 5246483 - DNA, 25 bp, Homo sapien
atattcttggaggattaggtagaga

SEQ ID NO: 5246484 - DNA, 25 bp, Homo sapien
tcttggaggattaggtagagatcct

SEQ ID NO: 5246485 - DNA, 25 bp, Homo sapien
attcttggaggattaggtagagatc

SEQ ID NO: 5246486 - DNA, 25 bp, Homo sapien
ctattgttttgagacttcagtattc

SEQ ID NO: 5246487 - DNA, 25 bp, Homo sapien
gggtcaactgagctattgttttgag

SEQ ID NO: 5246488 - DNA, 25 bp, Homo sapien
acaagggtcaactgagctattgttt

SEQ ID NO: 5246489 - DNA, 25 bp, Homo sapien
agggtcaactgagctattgttttga

SEQ ID NO: 5246490 - DNA, 25 bp, Homo sapien
gagaatgctgttatcctctcacatt

SEQ ID NO: 5246491 - DNA, 25 bp, Homo sapien
ttctggctgatgcttaagaccatct

SEQ ID NO: 5246492 - DNA, 25 bp, Homo sapien
accttggagtgcatttttgggattt

SEQ ID NO: 5246493 - DNA, 25 bp, Homo sapien
catccataccccttacttgagaatg

SEQ ID NO: 5246494 - DNA, 25 bp, Homo sapien
tacaggactaatgacaggctccaca

SEQ ID NO: 5246495 - DNA, 25 bp, Homo sapien
tccctgagactggtgataggggctc

SEQ ID NO: 5246496 - DNA, 25 bp, Homo sapien
gacctcttgtcctgtatgtactcct

SEQ ID NO: 5246497 - DNA, 25 bp, Homo sapien
gggctctgtaaaggacctcttgtcc

SEQ ID NO: 5246498 - DNA, 25 bp, Homo sapien
tttcccacagacatctggctgtggg

SEQ ID NO: 5246499 - DNA, 25 bp, Homo sapien
ctttttcccacagacatctggctgt

SEQ ID NO: 5246500 - DNA, 25 bp, Homo sapien
ctttgctggatctgttttcctcttt

SEQ ID NO: 5246501 - DNA, 25 bp, Homo sapien
ctctttttcccacagacatctggct

SEQ ID NO: 5246502 - DNA, 25 bp, Homo sapien
ttccccagtgaggatacacgttcag

SEQ ID NO: 5246503 - DNA, 25 bp, Homo sapien
cacgctgttctgtctgagttggagg

SEQ ID NO: 5246504 - DNA, 25 bp, Homo sapien
cacagagtttgcagtggcaagccac

SEQ ID NO: 5246505 - DNA, 25 bp, Homo sapien
catgtggccctatgtggagtgccta

SEQ ID NO: 5246506 - DNA, 25 bp, Homo sapien
accatgagtacacatgaccaggtgg

SEQ ID NO: 5246507 - DNA, 25 bp, Homo sapien
gggaaggaccatgagtacacatgac

SEQ ID NO: 5246508 - DNA, 25 bp, Homo sapien
gaaggaccatgagtacacatgacca

SEQ ID NO: 5246509 - DNA, 25 bp, Homo sapien
aggaccatgagtacacatgaccagg

SEQ ID NO: 5246510 - DNA, 25 bp, Homo sapien
gaacaagtgtcgcaacagaacagct

SEQ ID NO: 5246511 - DNA, 25 bp, Homo sapien
tcttgaacaagtgtcgcaacagaac

SEQ ID NO: 5246512 - DNA, 25 bp, Homo sapien
aagactcttgaacaagtgtcgcaac

SEQ ID NO: 5246513 - DNA, 25 bp, Homo sapien
acaagtgtcgcaacagaacagctcc

SEQ ID NO: 5246514 - DNA, 25 bp, Homo sapien
aggatgaaagagaggtgcctgcatg

SEQ ID NO: 5246515 - DNA, 25 bp, Homo sapien
gatgaaagagaggtgcctgcatgtc

SEQ ID NO: 5246516 - DNA, 25 bp, Homo sapien
cttaaaggatgaaagagaggtgcct

SEQ ID NO: 5246517 - DNA, 25 bp, Homo sapien
tgaaagagaggtgcctgcatgtcac

SEQ ID NO: 5246518 - DNA, 25 bp, Homo sapien
tctagacacaagcagacattctgct

SEQ ID NO: 5246519 - DNA, 25 bp, Homo sapien
ccttccccatctagacacaagcaga

SEQ ID NO: 5246520 - DNA, 25 bp, Homo sapien
ccagtacccgatgaacctgctcctt

SEQ ID NO: 5246521 - DNA, 25 bp, Homo sapien
ccatctagacacaagcagacattct

SEQ ID NO: 5246522 - DNA, 25 bp, Homo sapien
tccctcgcatcagtggtagcagcag

SEQ ID NO: 5246523 - DNA, 25 bp, Homo sapien
ggagaccctactgcaaaacttcaag

SEQ ID NO: 5246524 - DNA, 25 bp, Homo sapien
caggaatggctgatgggctcagtca

SEQ ID NO: 5246525 - DNA, 25 bp, Homo sapien
ccagtatgtaggcaaaggtccccaa

SEQ ID NO: 5246526 - DNA, 25 bp, Homo sapien
gcagaagatgcaattccacggggtc

SEQ ID NO: 5246527 - DNA, 25 bp, Homo sapien
gttggcttcccggagactccttcat

SEQ ID NO: 5246528 - DNA, 25 bp, Homo sapien
tcctgacaacactgttggcttcccg

SEQ ID NO: 5246529 - DNA, 25 bp, Homo sapien
aacactgttggcttcccggagactc

SEQ ID NO: 5246530 - DNA, 25 bp, Homo sapien
aggacacatctgcctctccaggacc

SEQ ID NO: 5246531 - DNA, 25 bp, Homo sapien
ctcaggacacatctgcctctccagg

SEQ ID NO: 5246532 - DNA, 25 bp, Homo sapien
aactgttcctcaggacacatctgcc

SEQ ID NO: 5246533 - DNA, 25 bp, Homo sapien
caactgttcctcaggacacatctgc

SEQ ID NO: 5246534 - DNA, 25 bp, Homo sapien
tatcagtgccattgaagtgtggcgc

SEQ ID NO: 5246535 - DNA, 25 bp, Homo sapien
gcagcttggagagaatgagcccaca

SEQ ID NO: 5246536 - DNA, 25 bp, Homo sapien
tgttcatggttctcacgtgtgaggg

SEQ ID NO: 5246537 - DNA, 25 bp, Homo sapien
caagtttctctaacatgtgtggctc

SEQ ID NO: 5246538 - DNA, 25 bp, Homo sapien
gcaatagactttcaagaggaggaac

SEQ ID NO: 5246539 - DNA, 25 bp, Homo sapien
cagaacagcaatagactttcaagag

SEQ ID NO: 5246540 - DNA, 25 bp, Homo sapien
cagcaatagactttcaagaggagga

SEQ ID NO: 5246541 - DNA, 25 bp, Homo sapien
gctctcagaacagcaatagactttc

SEQ ID NO: 5246542 - DNA, 25 bp, Homo sapien
gaaaagctaccagcatagttcagtg

SEQ ID NO: 5246543 - DNA, 25 bp, Homo sapien
cttgccccgtgggattaagatcaca

SEQ ID NO: 5246544 - DNA, 25 bp, Homo sapien
tcagggtcaggtaatgtcatggcag

SEQ ID NO: 5246545 - DNA, 25 bp, Homo sapien
taagatcacaaatctcacgagggcc

SEQ ID NO: 5246546 - DNA, 25 bp, Homo sapien
ctccttcaggccttgacacgcctct

SEQ ID NO: 5246547 - DNA, 25 bp, Homo sapien
gggtaaccgtgctcattcagccttt

SEQ ID NO: 5246548 - DNA, 25 bp, Homo sapien
cacttgggggtaaccgtgctcattc

SEQ ID NO: 5246549 - DNA, 25 bp, Homo sapien
ggcgcatgtcttgtacaaacccctc

SEQ ID NO: 5246550 - DNA, 25 bp, Homo sapien
gaagatgaggcgcatgtcttgtaca

SEQ ID NO: 5246551 - DNA, 25 bp, Homo sapien
agcaaacacttccttgaaatccttc

SEQ ID NO: 5246552 - DNA, 25 bp, Homo sapien
tagcaaacacttccttgaaatcctt

SEQ ID NO: 5246553 - DNA, 25 bp, Homo sapien
gaatagcaaacacttccttgaaatc

SEQ ID NO: 5246554 - DNA, 25 bp, Homo sapien
aatagcaaacacttccttgaaatcc

SEQ ID NO: 5246555 - DNA, 25 bp, Homo sapien
gttccacgaaatatgagactccaag

SEQ ID NO: 5246556 - DNA, 25 bp, Homo sapien
gataaaaggtcttgcgagtggccag

SEQ ID NO: 5246557 - DNA, 25 bp, Homo sapien
tgagctatcgaaaagaacggcagtt

SEQ ID NO: 5246558 - DNA, 25 bp, Homo sapien
attgcattccaatcccgggtgactg

SEQ ID NO: 5246559 - DNA, 25 bp, Homo sapien
cacattagtagtgtcccctttggag

SEQ ID NO: 5246560 - DNA, 25 bp, Homo sapien
tatgtgtcttgcctagaggaacagc

SEQ ID NO: 5246561 - DNA, 25 bp, Homo sapien
ttcatggacacctacaggtcaggcc

SEQ ID NO: 5246562 - DNA, 25 bp, Homo sapien
tcaccttagttagtgtctgagacac

SEQ ID NO: 5246563 - DNA, 25 bp, Homo sapien
tcatagggctttttaacatcaccac

SEQ ID NO: 5246564 - DNA, 25 bp, Homo sapien
aattgtacaattcaaatttatgtag

SEQ ID NO: 5246565 - DNA, 25 bp, Homo sapien
atttatgtagtatgttcatagggct

SEQ ID NO: 5246566 - DNA, 25 bp, Homo sapien
tcaacctcccagcattaggcaacca

SEQ ID NO: 5246567 - DNA, 25 bp, Homo sapien
aggaacttggcatcccccagcaatt

SEQ ID NO: 5246568 - DNA, 25 bp, Homo sapien
cagtggtctaggctgtgagtgtccc

SEQ ID NO: 5246569 - DNA, 25 bp, Homo sapien
agacagcagtggtctaggctgtgag

SEQ ID NO: 5246570 - DNA, 25 bp, Homo sapien
tggcctggaattgcccctattcctc

SEQ ID NO: 5246571 - DNA, 25 bp, Homo sapien
tattagccacttgggaatggccagt

SEQ ID NO: 5246572 - DNA, 25 bp, Homo sapien
tctgcccataccatctatggtctat

SEQ ID NO: 5246573 - DNA, 25 bp, Homo sapien
ggtgttcagcccattgaatgtggag

SEQ ID NO: 5246574 - DNA, 25 bp, Homo sapien
caccctctctcatgaataattctaa

SEQ ID NO: 5246575 - DNA, 25 bp, Homo sapien
ttcatctcatctgctactgatccat

SEQ ID NO: 5246576 - DNA, 25 bp, Homo sapien
ggaataaagtgttccctgacgtaga

SEQ ID NO: 5246577 - DNA, 25 bp, Homo sapien
tctcatctgctactgatccattttc

SEQ ID NO: 5246578 - DNA, 25 bp, Homo sapien
ataaagtgttccctgacgtagatcc

SEQ ID NO: 5246579 - DNA, 25 bp, Homo sapien
cttgggataaggctctcaggggcag

SEQ ID NO: 5246580 - DNA, 25 bp, Homo sapien
gctctcaggggcaggtgggctataa

SEQ ID NO: 5246581 - DNA, 25 bp, Homo sapien
aggctctcaggggcaggtgggctat

SEQ ID NO: 5246582 - DNA, 25 bp, Homo sapien
tctcaggggcaggtgggctataaaa

SEQ ID NO: 5246583 - DNA, 25 bp, Homo sapien
tccacaggtgctcctcctggaaatg

SEQ ID NO: 5246584 - DNA, 25 bp, Homo sapien
ctcctggaaatgtgggtgggagaca

SEQ ID NO: 5246585 - DNA, 25 bp, Homo sapien
gaaggggtggagtctgcctttccac

SEQ ID NO: 5246586 - DNA, 25 bp, Homo sapien
cattgtctggcggagatgtgcaggg

SEQ ID NO: 5246587 - DNA, 25 bp, Homo sapien
tgcttctttgggcttgcaagtgggt

SEQ ID NO: 5246588 - DNA, 25 bp, Homo sapien
gcaagtgggtgcttctatgaagagg

SEQ ID NO: 5246589 - DNA, 25 bp, Homo sapien
gcttctatgaagaggagggtccctg

SEQ ID NO: 5246590 - DNA, 25 bp, Homo sapien
ctgcttctttgggcttgcaagtggg

SEQ ID NO: 5246591 - DNA, 25 bp, Homo sapien
cgcgcaacgagcaggggtcggtgat

SEQ ID NO: 5246592 - DNA, 25 bp, Homo sapien
aacgagcaggggtcggtgatcgcca

SEQ ID NO: 5246593 - DNA, 25 bp, Homo sapien
cgtgagcacgcgcaacgagcagggg

SEQ ID NO: 5246594 - DNA, 25 bp, Homo sapien
gcacgcgcaacgagcaggggtcggt

SEQ ID NO: 5246595 - DNA, 25 bp, Homo sapien
gagcccctgttgtatccgcagatga

SEQ ID NO: 5246596 - DNA, 25 bp, Homo sapien
ttcatgagaaatccggaggacgccc

SEQ ID NO: 5246597 - DNA, 25 bp, Homo sapien
tcatcacgcagggtccttcagctga

SEQ ID NO: 5246598 - DNA, 25 bp, Homo sapien
gcagatgaacatccgcagatccctg

SEQ ID NO: 5246599 - DNA, 25 bp, Homo sapien
gagacagatgagcatgcaccatgct

SEQ ID NO: 5246600 - DNA, 25 bp, Homo sapien
tatatggagaatctgtaggcctctg

SEQ ID NO: 5246601 - DNA, 25 bp, Homo sapien
ggttgaacttcacgggcagacatgc

SEQ ID NO: 5246602 - DNA, 25 bp, Homo sapien
caccatgctccgctggtatatggag

SEQ ID NO: 5246603 - DNA, 25 bp, Homo sapien
agcctgcgtgcagtgtggctgccca

SEQ ID NO: 5246604 - DNA, 25 bp, Homo sapien
gcctgcgtgcagtgtggctgcccag

SEQ ID NO: 5246605 - DNA, 25 bp, Homo sapien
tcagtcggcccagcctgcgtgcagt

SEQ ID NO: 5246606 - DNA, 25 bp, Homo sapien
ctcagtcggcccagcctgcgtgcag

SEQ ID NO: 5246607 - DNA, 25 bp, Homo sapien
ctcaggtcgccgcccccacctgcca

SEQ ID NO: 5246608 - DNA, 25 bp, Homo sapien
ctggtgctcaggtcgccgcccccac

SEQ ID NO: 5246609 - DNA, 25 bp, Homo sapien
tggtgctcaggtcgccgcccccacc

SEQ ID NO: 5246610 - DNA, 25 bp, Homo sapien
gtgctcaggtcgccgcccccacctg

SEQ ID NO: 5246611 - DNA, 25 bp, Homo sapien
gttgatggaataagaactcagaccc

SEQ ID NO: 5246612 - DNA, 25 bp, Homo sapien
cagaccctgagccagtcatgggaac

SEQ ID NO: 5246613 - DNA, 25 bp, Homo sapien
atcaaggttgatggaataagaactc

SEQ ID NO: 5246614 - DNA, 25 bp, Homo sapien
gtcatgggaacagccggcagaggcc

SEQ ID NO: 5246615 - DNA, 25 bp, Homo sapien
tctcttttctggtcagaggtatccc

SEQ ID NO: 5246616 - DNA, 25 bp, Homo sapien
tctcaactcactactagagaaaagt

SEQ ID NO: 5246617 - DNA, 25 bp, Homo sapien
aatgaaaatatttagccgtttgtca

SEQ ID NO: 5246618 - DNA, 25 bp, Homo sapien
tggtcagaggtatcccccatcttgg

SEQ ID NO: 5246619 - DNA, 25 bp, Homo sapien
atttgctactggtgaaatacattca

SEQ ID NO: 5246620 - DNA, 25 bp, Homo sapien
ttgctactggtgaaatacattcatt

SEQ ID NO: 5246621 - DNA, 25 bp, Homo sapien
tttgctactggtgaaatacattcat

SEQ ID NO: 5246622 - DNA, 25 bp, Homo sapien
ctccatctggtctctcccttaacac

SEQ ID NO: 5246623 - DNA, 25 bp, Homo sapien
aatgggtgaaattgccccatgattc

SEQ ID NO: 5246624 - DNA, 25 bp, Homo sapien
cctccatctggtctctcccttaaca

SEQ ID NO: 5246625 - DNA, 25 bp, Homo sapien
cagaatgggtgaaattgccccatga

SEQ ID NO: 5246626 - DNA, 25 bp, Homo sapien
ggaagaggcccttataccatcagat

SEQ ID NO: 5246627 - DNA, 25 bp, Homo sapien
cagtgtggctggataggcctcaaga

SEQ ID NO: 5246628 - DNA, 25 bp, Homo sapien
agttcagtgtggctggataggcctc

SEQ ID NO: 5246629 - DNA, 25 bp, Homo sapien
gtgccaggtgaaggcggaagaggcc

SEQ ID NO: 5246630 - DNA, 25 bp, Homo sapien
tggtgttactttaaatgataatgct

SEQ ID NO: 5246631 - DNA, 25 bp, Homo sapien
tttggtgttactttaaatgataatg

SEQ ID NO: 5246632 - DNA, 25 bp, Homo sapien
ttggtgttactttaaatgataatgc

SEQ ID NO: 5246633 - DNA, 25 bp, Homo sapien
gtgttactttaaatgataatgcttt

SEQ ID NO: 5246634 - DNA, 25 bp, Homo sapien
tttagaagtcatgtacatctttcat

SEQ ID NO: 5246635 - DNA, 25 bp, Homo sapien
gcttatagtttttagaagtcatgta

SEQ ID NO: 5246636 - DNA, 25 bp, Homo sapien
tttacccagcactgcttatagtttt

SEQ ID NO: 5246637 - DNA, 25 bp, Homo sapien
attttacccagcactgcttatagtt

SEQ ID NO: 5246638 - DNA, 25 bp, Homo sapien
ggatttgaattgaagctacagataa

SEQ ID NO: 5246639 - DNA, 25 bp, Homo sapien
aaagattggcttggattttctagat

SEQ ID NO: 5246640 - DNA, 25 bp, Homo sapien
cccttatgctggtaagattttgcct

SEQ ID NO: 5246641 - DNA, 25 bp, Homo sapien
gacaacaacattgagcttccaatct

SEQ ID NO: 5246642 - DNA, 25 bp, Homo sapien
tgtgaaaatggtcatcaagattctg

SEQ ID NO: 5246643 - DNA, 25 bp, Homo sapien
accatgtgaaaatggtcatcaagat

SEQ ID NO: 5246644 - DNA, 25 bp, Homo sapien
gtgaaaatggtcatcaagattctga

SEQ ID NO: 5246645 - DNA, 25 bp, Homo sapien
catgtgaaaatggtcatcaagattc

SEQ ID NO: 5246646 - DNA, 25 bp, Homo sapien
tatttgtgatgagatcacgatcacg

SEQ ID NO: 5246647 - DNA, 25 bp, Homo sapien
catagagcagcctgtcatctacacc

SEQ ID NO: 5246648 - DNA, 25 bp, Homo sapien
cacgatcacggaggccctcgaggaa

SEQ ID NO: 5246649 - DNA, 25 bp, Homo sapien
ttgaatacaatgtcatagagcagcc

SEQ ID NO: 5246650 - DNA, 25 bp, Homo sapien
gtattcctgcatgttgacatcgctg

SEQ ID NO: 5246651 - DNA, 25 bp, Homo sapien
agaacattgtacaccactctctgta

SEQ ID NO: 5246652 - DNA, 25 bp, Homo sapien
tattcctgcatgttgacatcgctga

SEQ ID NO: 5246653 - DNA, 25 bp, Homo sapien
acattgtacaccactctctgtacag

SEQ ID NO: 5246654 - DNA, 25 bp, Homo sapien
tggagaggcaatttgtcatggatta

SEQ ID NO: 5246655 - DNA, 25 bp, Homo sapien
ttggagaggcaatttgtcatggatt

SEQ ID NO: 5246656 - DNA, 25 bp, Homo sapien
ttcaagacttagttggaggccagac

SEQ ID NO: 5246657 - DNA, 25 bp, Homo sapien
cttgttcaagacttagttggaggcc

SEQ ID NO: 5246658 - DNA, 25 bp, Homo sapien
caaagtgagctgttaatgacaaggt

SEQ ID NO: 5246659 - DNA, 25 bp, Homo sapien
taaaccaaccgccacagagtagatg

SEQ ID NO: 5246660 - DNA, 25 bp, Homo sapien
ctggatagcacagggttaggaatgc

SEQ ID NO: 5246661 - DNA, 25 bp, Homo sapien
tcatctgaccctatgtaaactccat

SEQ ID NO: 5246662 - DNA, 25 bp, Homo sapien
tttatttcagaaatcgaggtatgga

SEQ ID NO: 5246663 - DNA, 25 bp, Homo sapien
tcagaaatcgaggtatggattttgc

SEQ ID NO: 5246664 - DNA, 25 bp, Homo sapien
aatcgaggtatggattttgccattc

SEQ ID NO: 5246665 - DNA, 25 bp, Homo sapien
tatttcagaaatcgaggtatggatt

SEQ ID NO: 5246666 - DNA, 25 bp, Homo sapien
gccaagtcaggcttcgaaaagagtt

SEQ ID NO: 5246667 - DNA, 25 bp, Homo sapien
ccaagtcaggcttcgaaaagagttt

SEQ ID NO: 5246668 - DNA, 25 bp, Homo sapien
acacaaagaggcaaccccacagcac

SEQ ID NO: 5246669 - DNA, 25 bp, Homo sapien
gctcaaagagtagtaaacaggaaca

SEQ ID NO: 5246670 - DNA, 25 bp, Homo sapien
cacagcacattccagaaaggggcaa

SEQ ID NO: 5246671 - DNA, 25 bp, Homo sapien
ctggacaatcattaacacaaagagg

SEQ ID NO: 5246672 - DNA, 25 bp, Homo sapien
cagcacgggccactgatggacgtaa

SEQ ID NO: 5246673 - DNA, 25 bp, Homo sapien
acagccagattcaagcagatgcagg

SEQ ID NO: 5246674 - DNA, 25 bp, Homo sapien
taggcaacctagaggataaggactt

SEQ ID NO: 5246675 - DNA, 25 bp, Homo sapien
tgggtaaaacgaccaggctcagcgg

SEQ ID NO: 5246676 - DNA, 25 bp, Homo sapien
tgtcactggttgtatcttttctctt

SEQ ID NO: 5246677 - DNA, 25 bp, Homo sapien
tgttctgtttcacaggggtgctctg

SEQ ID NO: 5246678 - DNA, 25 bp, Homo sapien
gcgaatcatctttgtcactggttgt

SEQ ID NO: 5246679 - DNA, 25 bp, Homo sapien
tttgtttgttggcttcctagcgaat

SEQ ID NO: 5246680 - DNA, 25 bp, Homo sapien
tatattgctgcgtgaaggtgttcgt

SEQ ID NO: 5246681 - DNA, 25 bp, Homo sapien
ctgagatccagtagagccttgctct

SEQ ID NO: 5246682 - DNA, 25 bp, Homo sapien
ggagataaacgagatcacagctgag

SEQ ID NO: 5246683 - DNA, 25 bp, Homo sapien
cattcatgccaacccagtcagtctt

SEQ ID NO: 5246684 - DNA, 25 bp, Homo sapien
gcatccccattattcacttggacag

SEQ ID NO: 5246685 - DNA, 25 bp, Homo sapien
ttccagcatccccattattcacttg

SEQ ID NO: 5246686 - DNA, 25 bp, Homo sapien
tcacttggacagcaatttgttcgca

SEQ ID NO: 5246687 - DNA, 25 bp, Homo sapien
tggacagcaatttgttcgcaggact

SEQ ID NO: 5246688 - DNA, 25 bp, Homo sapien
ccaaccaaccaaatgtatagcatct

SEQ ID NO: 5246689 - DNA, 25 bp, Homo sapien
aatacatccagcttttaatctggta

SEQ ID NO: 5246690 - DNA, 25 bp, Homo sapien
aataggcaaggtaagcaataattac

SEQ ID NO: 5246691 - DNA, 25 bp, Homo sapien
atgtatagcatctgaataagaaagg

SEQ ID NO: 5246692 - DNA, 25 bp, Homo sapien
tacccatggtctgaacctccaagct

SEQ ID NO: 5246693 - DNA, 25 bp, Homo sapien
aagatacaatatgcttggggaaagg

SEQ ID NO: 5246694 - DNA, 25 bp, Homo sapien
ccagactctagccagtacccatggt

SEQ ID NO: 5246695 - DNA, 25 bp, Homo sapien
tagccagtacccatggtctgaacct

SEQ ID NO: 5246696 - DNA, 25 bp, Homo sapien
caccagtcgcacagaacaggaatta

SEQ ID NO: 5246697 - DNA, 25 bp, Homo sapien
ccatggttgtgtagctctgcctctg

SEQ ID NO: 5246698 - DNA, 25 bp, Homo sapien
gggcttggcactcaacttttgaatt

SEQ ID NO: 5246699 - DNA, 25 bp, Homo sapien
tcagatgcctggttatgatgagttc

SEQ ID NO: 5246700 - DNA, 25 bp, Homo sapien
tgttccttgaatgcatgccacctgc

SEQ ID NO: 5246701 - DNA, 25 bp, Homo sapien
gaagctaagttaactcaagaccctg

SEQ ID NO: 5246702 - DNA, 25 bp, Homo sapien
gcaaaaaccattaagagtctcaggg

SEQ ID NO: 5246703 - DNA, 25 bp, Homo sapien
tctcagggtgtgaccaaggagtcca

SEQ ID NO: 5246704 - DNA, 25 bp, Homo sapien
catcaacgtcagtggatccttcaga

SEQ ID NO: 5246705 - DNA, 25 bp, Homo sapien
caggctcacttctcggtgctgagat

SEQ ID NO: 5246706 - DNA, 25 bp, Homo sapien
ttctcggtgctgagatgaagacttc

SEQ ID NO: 5246707 - DNA, 25 bp, Homo sapien
gacttctaagggctcatcaacgtca

SEQ ID NO: 5246708 - DNA, 25 bp, Homo sapien
tagtagctcttaaatcagattccca

SEQ ID NO: 5246709 - DNA, 25 bp, Homo sapien
caccagatagttggatgagatgtct

SEQ ID NO: 5246710 - DNA, 25 bp, Homo sapien
actggatccattgtacagaatgagc

SEQ ID NO: 5246711 - DNA, 25 bp, Homo sapien
ttaatgcaaagaatgggatcccagg

SEQ ID NO: 5246712 - DNA, 25 bp, Homo sapien
ccttcattgtgggttagtgatactc

SEQ ID NO: 5246713 - DNA, 25 bp, Homo sapien
gagggaatatttgccttgcttggcc

SEQ ID NO: 5246714 - DNA, 25 bp, Homo sapien
gaatccaggatgctagtcttgtctt

SEQ ID NO: 5246715 - DNA, 25 bp, Homo sapien
ttgaaaatccgtgcaagtcctcgcc

SEQ ID NO: 5246716 - DNA, 25 bp, Homo sapien
caatctggggtcgtgagcaagtggc

SEQ ID NO: 5246717 - DNA, 25 bp, Homo sapien
ctggtacaatctggggtcgtgagca

SEQ ID NO: 5246718 - DNA, 25 bp, Homo sapien
atctggggtcgtgagcaagtggctt

SEQ ID NO: 5246719 - DNA, 25 bp, Homo sapien
gtacaatctggggtcgtgagcaagt

SEQ ID NO: 5246720 - DNA, 25 bp, Homo sapien
gactgtgcttatcatgctctatcaa

SEQ ID NO: 5246721 - DNA, 25 bp, Homo sapien
gaatcaaggcataaggagaccactc

SEQ ID NO: 5246722 - DNA, 25 bp, Homo sapien
tacagtctcgggttgcaactctaat

SEQ ID NO: 5246723 - DNA, 25 bp, Homo sapien
gattgaaccaatccagttaaacaag

SEQ ID NO: 5246724 - DNA, 25 bp, Homo sapien
ccatcgtgccctgccaataacaaag

SEQ ID NO: 5246725 - DNA, 25 bp, Homo sapien
ggaggttcagggtcataatgttggg

SEQ ID NO: 5246726 - DNA, 25 bp, Homo sapien
ccttctagtgaatccagttctggag

SEQ ID NO: 5246727 - DNA, 25 bp, Homo sapien
gccctgccaataacaaagttttgat

SEQ ID NO: 5246728 - DNA, 25 bp, Homo sapien
actttctctgaatgtagataatttt

SEQ ID NO: 5246729 - DNA, 25 bp, Homo sapien
aaactttctctgaatgtagataatt

SEQ ID NO: 5246730 - DNA, 25 bp, Homo sapien
ttcttaaaactttctctgaatgtag

SEQ ID NO: 5246731 - DNA, 25 bp, Homo sapien
tcttaaaactttctctgaatgtaga

SEQ ID NO: 5246732 - DNA, 25 bp, Homo sapien
aagaatgtccgtgcctcaaacctcc

SEQ ID NO: 5246733 - DNA, 25 bp, Homo sapien
aacctccatgatctgccttttcatt

SEQ ID NO: 5246734 - DNA, 25 bp, Homo sapien
gtcttcttacaccacattatctttc

SEQ ID NO: 5246735 - DNA, 25 bp, Homo sapien
cagggcaagaatgtccgtgcctcaa

SEQ ID NO: 5246736 - DNA, 25 bp, Homo sapien
tatgataagggaaccaagtcagaat

SEQ ID NO: 5246737 - DNA, 25 bp, Homo sapien
taagggaaccaagtcagaataatat

SEQ ID NO: 5246738 - DNA, 25 bp, Homo sapien
tgataagggaaccaagtcagaataa

SEQ ID NO: 5246739 - DNA, 25 bp, Homo sapien
tgtatgataagggaaccaagtcaga

SEQ ID NO: 5246740 - DNA, 25 bp, Homo sapien
tgaaaagtcgtggtcttgtcctatc

SEQ ID NO: 5246741 - DNA, 25 bp, Homo sapien
tggattctgaaaagtcgtggtcttg

SEQ ID NO: 5246742 - DNA, 25 bp, Homo sapien
cactggattctgaaaagtcgtggtc

SEQ ID NO: 5246743 - DNA, 25 bp, Homo sapien
tcagtgccccgctcgaggcttctgc

SEQ ID NO: 5246744 - DNA, 25 bp, Homo sapien
cctggatagctgttgtgtgtgctca

SEQ ID NO: 5246745 - DNA, 25 bp, Homo sapien
agtatgtagtaaacaggccactgcc

SEQ ID NO: 5246746 - DNA, 25 bp, Homo sapien
gaggtagatgcagagaactggctcc

SEQ ID NO: 5246747 - DNA, 25 bp, Homo sapien
gcctgaatttagagtgacttctttc

SEQ ID NO: 5246748 - DNA, 25 bp, Homo sapien
tgagaatgggattcttccctggatc

SEQ ID NO: 5246749 - DNA, 25 bp, Homo sapien
gaatctggacttgagttgccatgag

SEQ ID NO: 5246750 - DNA, 25 bp, Homo sapien
ggaacaatagttatctcacccacct

SEQ ID NO: 5246751 - DNA, 25 bp, Homo sapien
tgccatgagtccgtgtaaaatctta

SEQ ID NO: 5246752 - DNA, 25 bp, Homo sapien
gagcacagacccacaatcctttagc

SEQ ID NO: 5246753 - DNA, 25 bp, Homo sapien
tgtctcttcccatctaagggaaaga

SEQ ID NO: 5246754 - DNA, 25 bp, Homo sapien
ttctatgaggatcatttctgtctct

SEQ ID NO: 5246755 - DNA, 25 bp, Homo sapien
gagattactatcaaatggagcacag

SEQ ID NO: 5246756 - DNA, 25 bp, Homo sapien
gatgtacttctagaagtcataggag

SEQ ID NO: 5246757 - DNA, 25 bp, Homo sapien
agtagatgtacttctagaagtcata

SEQ ID NO: 5246758 - DNA, 25 bp, Homo sapien
tgggtattctccaagtagatgtact

SEQ ID NO: 5246759 - DNA, 25 bp, Homo sapien
ctgggtattctccaagtagatgtac

SEQ ID NO: 5246760 - DNA, 25 bp, Homo sapien
gaagtcaacagatcagtgtggatcc

SEQ ID NO: 5246761 - DNA, 25 bp, Homo sapien
tgcaaatgtatataaccccaaagct

SEQ ID NO: 5246762 - DNA, 25 bp, Homo sapien
tggtctcccagctagtgaagtcaac

SEQ ID NO: 5246763 - DNA, 25 bp, Homo sapien
tgaatacaatcctaggacaacgttg

SEQ ID NO: 5246764 - DNA, 25 bp, Homo sapien
catctgacctgttggtcaagattgc

SEQ ID NO: 5246765 - DNA, 25 bp, Homo sapien
ttggtcaagattgctccaggagccc

SEQ ID NO: 5246766 - DNA, 25 bp, Homo sapien
gtctgagtcttaggaatcagcaggg

SEQ ID NO: 5246767 - DNA, 25 bp, Homo sapien
gagaaatagtcccaccactaggcca

SEQ ID NO: 5246768 - DNA, 25 bp, Homo sapien
gaagctcttctccattactcaggtc

SEQ ID NO: 5246769 - DNA, 25 bp, Homo sapien
gaccctcttcttagggatgagctgc

SEQ ID NO: 5246770 - DNA, 25 bp, Homo sapien
ctgaccctcttcttagggatgagct

SEQ ID NO: 5246771 - DNA, 25 bp, Homo sapien
tctgaaaagtcactactgctgaaac

SEQ ID NO: 5246772 - DNA, 25 bp, Homo sapien
gctcagaataaaaagcgtctggaaa

SEQ ID NO: 5246773 - DNA, 25 bp, Homo sapien
tacaaggtagtgaaggtgctcagaa

SEQ ID NO: 5246774 - DNA, 25 bp, Homo sapien
gaaacagcagcttttaattcacatt

SEQ ID NO: 5246775 - DNA, 25 bp, Homo sapien
tacatacatttagtcagtgaaactc

SEQ ID NO: 5246776 - DNA, 25 bp, Homo sapien
attacatagtaggaacagttgtctt

SEQ ID NO: 5246777 - DNA, 25 bp, Homo sapien
taattacatagtaggaacagttgtc

SEQ ID NO: 5246778 - DNA, 25 bp, Homo sapien
ataattacatagtaggaacagttgt

SEQ ID NO: 5246779 - DNA, 25 bp, Homo sapien
acatagtaggaacagttgtcttttg

SEQ ID NO: 5246780 - DNA, 25 bp, Homo sapien
cttctgttcataaataaccctgaga

SEQ ID NO: 5246781 - DNA, 25 bp, Homo sapien
ccccacagctaaattaagggatggg

SEQ ID NO: 5246782 - DNA, 25 bp, Homo sapien
tcccttctgttcataaataaccctg

SEQ ID NO: 5246783 - DNA, 25 bp, Homo sapien
ccaacattagtgactgcccactccc

SEQ ID NO: 5246784 - DNA, 25 bp, Homo sapien
tttggaaaacacatgacacaggagc

SEQ ID NO: 5246785 - DNA, 25 bp, Homo sapien
aaacacatgacacaggagcacttct

SEQ ID NO: 5246786 - DNA, 25 bp, Homo sapien
ttttcaggttcttgtggctgtgatc

SEQ ID NO: 5246787 - DNA, 25 bp, Homo sapien
cacaggagcacttcttattttcagg

SEQ ID NO: 5246788 - DNA, 25 bp, Homo sapien
gatgcttgactactttcagtccttg

SEQ ID NO: 5246789 - DNA, 25 bp, Homo sapien
gcttgactactttcagtccttgctt

SEQ ID NO: 5246790 - DNA, 25 bp, Homo sapien
tcagatgcttgactactttcagtcc

SEQ ID NO: 5246791 - DNA, 25 bp, Homo sapien
atgtcagatgcttgactactttcag

SEQ ID NO: 5246792 - DNA, 25 bp, Homo sapien
gaaaccgggactatgatttcagact

SEQ ID NO: 5246793 - DNA, 25 bp, Homo sapien
tttaccacctaaccaagagagccca

SEQ ID NO: 5246794 - DNA, 25 bp, Homo sapien
ttgtcacagtctgctcacagtcaag

SEQ ID NO: 5246795 - DNA, 25 bp, Homo sapien
cacttcctgttggtgatccagaggc

SEQ ID NO: 5246796 - DNA, 25 bp, Homo sapien
gtagaattgttttcaacatccatgg

SEQ ID NO: 5246797 - DNA, 25 bp, Homo sapien
ttccaaagtagaattgttttcaaca

SEQ ID NO: 5246798 - DNA, 25 bp, Homo sapien
cactgtgtttttccaaagtagaatt

SEQ ID NO: 5246799 - DNA, 25 bp, Homo sapien
tcccactgtgtttttccaaagtaga

SEQ ID NO: 5246800 - DNA, 25 bp, Homo sapien
cactgcactttcagtctgggccacg

SEQ ID NO: 5246801 - DNA, 25 bp, Homo sapien
gcactttcagtctgggccacggagc

SEQ ID NO: 5246802 - DNA, 25 bp, Homo sapien
tcagtctgggccacggagcaagact

SEQ ID NO: 5246803 - DNA, 25 bp, Homo sapien
ctgcactttcagtctgggccacgga

SEQ ID NO: 5246804 - DNA, 25 bp, Homo sapien
catttactttagatctatgccttct

SEQ ID NO: 5246805 - DNA, 25 bp, Homo sapien
ttactttagatctatgccttctctt

SEQ ID NO: 5246806 - DNA, 25 bp, Homo sapien
gagaccatttactttagatctatgc

SEQ ID NO: 5246807 - DNA, 25 bp, Homo sapien
gaccatttactttagatctatgcct

SEQ ID NO: 5246808 - DNA, 25 bp, Homo sapien
tagggcttacctaagacttcatcca

SEQ ID NO: 5246809 - DNA, 25 bp, Homo sapien
tctgcttagacttaacaaatccaag

SEQ ID NO: 5246810 - DNA, 25 bp, Homo sapien
gagatattaccgctaaaagggacta

SEQ ID NO: 5246811 - DNA, 25 bp, Homo sapien
aagggactagcatagctctagggct

SEQ ID NO: 5246812 - DNA, 25 bp, Homo sapien
tgaacttgtccaaccataaatatct

SEQ ID NO: 5246813 - DNA, 25 bp, Homo sapien
ctttctttatatggcctggccacaa

SEQ ID NO: 5246814 - DNA, 25 bp, Homo sapien
tatcttagacaaacaaagactcttt

SEQ ID NO: 5246815 - DNA, 25 bp, Homo sapien
ttctgttcatctatgtctttggtcc

SEQ ID NO: 5246816 - DNA, 25 bp, Homo sapien
tggactttgttattcagagttaaat

SEQ ID NO: 5246817 - DNA, 25 bp, Homo sapien
ttggactttgttattcagagttaaa

SEQ ID NO: 5246818 - DNA, 25 bp, Homo sapien
aattaacttgaggattctgagctgc

SEQ ID NO: 5246819 - DNA, 25 bp, Homo sapien
gaggcacagtctacaagagctctgt

SEQ ID NO: 5246820 - DNA, 25 bp, Homo sapien
aaagaacagctcatcagagttccag

SEQ ID NO: 5246821 - DNA, 25 bp, Homo sapien
ggctgtccatagtttttaccgagtc

SEQ ID NO: 5246822 - DNA, 25 bp, Homo sapien
ggaccatccagtgtcttaattccca

SEQ ID NO: 5246823 - DNA, 25 bp, Homo sapien
agaaggaccatccagtgtcttaatt

SEQ ID NO: 5246824 - DNA, 25 bp, Homo sapien
aaggaccatccagtgtcttaattcc

SEQ ID NO: 5246825 - DNA, 25 bp, Homo sapien
gaccatccagtgtcttaattcccaa

SEQ ID NO: 5246826 - DNA, 25 bp, Homo sapien
ggaacagcagtgggttgtgtatctt

SEQ ID NO: 5246827 - DNA, 25 bp, Homo sapien
agggaacagcagtgggttgtgtatc

SEQ ID NO: 5246828 - DNA, 25 bp, Homo sapien
ctgagggaacagcagtgggttgtgt

SEQ ID NO: 5246829 - DNA, 25 bp, Homo sapien
tgagggaacagcagtgggttgtgta

SEQ ID NO: 5246830 - DNA, 25 bp, Homo sapien
cagaccttgtggatgggagctgtac

SEQ ID NO: 5246831 - DNA, 25 bp, Homo sapien
gagctgtactgggtgtttttaagag

SEQ ID NO: 5246832 - DNA, 25 bp, Homo sapien
tctgagaagtgtaaaggtgaaggtc

SEQ ID NO: 5246833 - DNA, 25 bp, Homo sapien
aagaagcacgattcccatggtctgg

SEQ ID NO: 5246834 - DNA, 25 bp, Homo sapien
ttgtcttaaatccagggcttaagca

SEQ ID NO: 5246835 - DNA, 25 bp, Homo sapien
gagaaaaagcatgctctaccgcaca

SEQ ID NO: 5246836 - DNA, 25 bp, Homo sapien
tcacatgtcaagaggaatcatatcc

SEQ ID NO: 5246837 - DNA, 25 bp, Homo sapien
gcacaagatgttgcccttaggaagt

SEQ ID NO: 5246838 - DNA, 25 bp, Homo sapien
cttcttttcaaaggtctagtgttgg

SEQ ID NO: 5246839 - DNA, 25 bp, Homo sapien
caaaggtctagtgttggcttttctt

SEQ ID NO: 5246840 - DNA, 25 bp, Homo sapien
tcttttcaaaggtctagtgttggct

SEQ ID NO: 5246841 - DNA, 25 bp, Homo sapien
tcttcttcttttcaaaggtctagtg

SEQ ID NO: 5246842 - DNA, 25 bp, Homo sapien
acaggtcacaggaagttcagattgt

SEQ ID NO: 5246843 - DNA, 25 bp, Homo sapien
atatagagtgcccttcacctcacca

SEQ ID NO: 5246844 - DNA, 25 bp, Homo sapien
tattttcatctttgggaattcttgg

SEQ ID NO: 5246845 - DNA, 25 bp, Homo sapien
tgtttgaatcgctccttatatagag

SEQ ID NO: 5246846 - DNA, 25 bp, Homo sapien
ggactttcagggtatatccaccgca

SEQ ID NO: 5246847 - DNA, 25 bp, Homo sapien
agttcttggatgctccgcggtctcc

SEQ ID NO: 5246848 - DNA, 25 bp, Homo sapien
tccaccgcagcgtatacttagcttc

SEQ ID NO: 5246849 - DNA, 25 bp, Homo sapien
tcactctgtatacacttctttgagg

SEQ ID NO: 5246850 - DNA, 25 bp, Homo sapien
ttggagtctaaagacacaggttcat

SEQ ID NO: 5246851 - DNA, 25 bp, Homo sapien
ctgtgggcgtgcaacagaaagcact

SEQ ID NO: 5246852 - DNA, 25 bp, Homo sapien
gcagcaaagaccctgtgcctgcttt

SEQ ID NO: 5246853 - DNA, 25 bp, Homo sapien
catcaaggggttcatatgagaagca

SEQ ID NO: 5246854 - DNA, 25 bp, Homo sapien
tcgacaggtgcaaacctactactga

SEQ ID NO: 5246855 - DNA, 25 bp, Homo sapien
gagtgcagtgcagtgcctatcgaca

SEQ ID NO: 5246856 - DNA, 25 bp, Homo sapien
tggcatagtacactaagcccaggac

SEQ ID NO: 5246857 - DNA, 25 bp, Homo sapien
tggtggtcccctatgttgatgctga

SEQ ID NO: 5246858 - DNA, 25 bp, Homo sapien
ttttcttgtgcttggtggttctggc

SEQ ID NO: 5246859 - DNA, 25 bp, Homo sapien
ttggtggttctggcagaaatttgtt

SEQ ID NO: 5246860 - DNA, 25 bp, Homo sapien
ttttttcttgtgcttggtggttctg

SEQ ID NO: 5246861 - DNA, 25 bp, Homo sapien
gcttggtggttctggcagaaatttg

SEQ ID NO: 5246862 - DNA, 25 bp, Homo sapien
tatgatgatgggtcaatttaaagac

SEQ ID NO: 5246863 - DNA, 25 bp, Homo sapien
caacaacataatagacgagacattg

SEQ ID NO: 5246864 - DNA, 25 bp, Homo sapien
tttaaagactgtaagtccacagaga

SEQ ID NO: 5246865 - DNA, 25 bp, Homo sapien
taatagacgagacattggcagaaga

SEQ ID NO: 5246866 - DNA, 25 bp, Homo sapien
caatttcacctctagagctgtgggc

SEQ ID NO: 5246867 - DNA, 25 bp, Homo sapien
taaagaaagtatggcgccaggcatg

SEQ ID NO: 5246868 - DNA, 25 bp, Homo sapien
cataaagccagtggagcaggtagcc

SEQ ID NO: 5246869 - DNA, 25 bp, Homo sapien
aaaacccagtggatacagagcctag

SEQ ID NO: 5246870 - DNA, 25 bp, Homo sapien
aaagctggcaacaatagcagttacc

SEQ ID NO: 5246871 - DNA, 25 bp, Homo sapien
gctggcaacaatagcagttaccacg

SEQ ID NO: 5246872 - DNA, 25 bp, Homo sapien
caacaatagcagttaccacgcggtg

SEQ ID NO: 5246873 - DNA, 25 bp, Homo sapien
caggaaagctggcaacaatagcagt

SEQ ID NO: 5246874 - DNA, 25 bp, Homo sapien
cagagtcttggacaccatgcaggtg

SEQ ID NO: 5246875 - DNA, 25 bp, Homo sapien
agaagctgcaaagggaatcggccga

SEQ ID NO: 5246876 - DNA, 25 bp, Homo sapien
ggccttagacaaaccactcagtggg

SEQ ID NO: 5246877 - DNA, 25 bp, Homo sapien
tgagagcttgctttgacctagggta

SEQ ID NO: 5246878 - DNA, 25 bp, Homo sapien
cattaaccccacatttgaacagact

SEQ ID NO: 5246879 - DNA, 25 bp, Homo sapien
tatggacctgtacatctaactgaag

SEQ ID NO: 5246880 - DNA, 25 bp, Homo sapien
ttttaagggattcatgccacagccc

SEQ ID NO: 5246881 - DNA, 25 bp, Homo sapien
gacagtttggcccaatgcaagtgcc

SEQ ID NO: 5246882 - DNA, 25 bp, Homo sapien
taaggtattgttgtgagattccagt

SEQ ID NO: 5246883 - DNA, 25 bp, Homo sapien
ggtcaactaaggtattgttgtgaga

SEQ ID NO: 5246884 - DNA, 25 bp, Homo sapien
gtattgttgtgagattccagtattc

SEQ ID NO: 5246885 - DNA, 25 bp, Homo sapien
acaagggtcaactaaggtattgttg

SEQ ID NO: 5246886 - DNA, 25 bp, Homo sapien
gattaatgcataacccagtgaccct

SEQ ID NO: 5246887 - DNA, 25 bp, Homo sapien
cctgcatgttgcgatctgtatccaa

SEQ ID NO: 5246888 - DNA, 25 bp, Homo sapien
gacagctctggtgtgaggagtccct

SEQ ID NO: 5246889 - DNA, 25 bp, Homo sapien
gataaggacctgtaccaactcatgg

SEQ ID NO: 5246890 - DNA, 25 bp, Homo sapien
ttgcgccagcactatctctatggag

SEQ ID NO: 5246891 - DNA, 25 bp, Homo sapien
gccagcactatctctatggagctca

SEQ ID NO: 5246892 - DNA, 25 bp, Homo sapien
cagctctcacttgcgccagcactat

SEQ ID NO: 5246893 - DNA, 25 bp, Homo sapien
tcacttgcgccagcactatctctat

SEQ ID NO: 5246894 - DNA, 25 bp, Homo sapien
agcttcttaggatctgctttgtcca

SEQ ID NO: 5246895 - DNA, 25 bp, Homo sapien
tgcatatgataacatttcacctctc

SEQ ID NO: 5246896 - DNA, 25 bp, Homo sapien
atgataacatttcacctctcagctt

SEQ ID NO: 5246897 - DNA, 25 bp, Homo sapien
aaaatgcatatgataacatttcacc

SEQ ID NO: 5246898 - DNA, 25 bp, Homo sapien
caaaaatggtcttccatgtctctga

SEQ ID NO: 5246899 - DNA, 25 bp, Homo sapien
tttagcaaaaatggtcttccatgtc

SEQ ID NO: 5246900 - DNA, 25 bp, Homo sapien
aaatggtcttccatgtctctgagca

SEQ ID NO: 5246901 - DNA, 25 bp, Homo sapien
tagcaaaaatggtcttccatgtctc

SEQ ID NO: 5246902 - DNA, 25 bp, Homo sapien
tgcttgtcagctgcagcggtgttat

SEQ ID NO: 5246903 - DNA, 25 bp, Homo sapien
agcggtgttattccacatccctgcc

SEQ ID NO: 5246904 - DNA, 25 bp, Homo sapien
gctgcagcggtgttattccacatcc

SEQ ID NO: 5246905 - DNA, 25 bp, Homo sapien
gcttgtcagctgcagcggtgttatt

SEQ ID NO: 5246906 - DNA, 25 bp, Homo sapien
aactctcttttttgctgaattaggc

SEQ ID NO: 5246907 - DNA, 25 bp, Homo sapien
ctctcttttttgctgaattaggctt

SEQ ID NO: 5246908 - DNA, 25 bp, Homo sapien
ttcctttagctcgatatgcagcaat

SEQ ID NO: 5246909 - DNA, 25 bp, Homo sapien
ctcttttttgctgaattaggctttc

SEQ ID NO: 5246910 - DNA, 25 bp, Homo sapien
cttcattttcctcctcttgttcatc

SEQ ID NO: 5246911 - DNA, 25 bp, Homo sapien
attttcctcctcttgttcatcctct

SEQ ID NO: 5246912 - DNA, 25 bp, Homo sapien
tcattttcctcctcttgttcatcct

SEQ ID NO: 5246913 - DNA, 25 bp, Homo sapien
ttttcctcctcttgttcatcctctt

SEQ ID NO: 5246914 - DNA, 25 bp, Homo sapien
acaaatcttacacagtcttacgttg

SEQ ID NO: 5246915 - DNA, 25 bp, Homo sapien
tcttacacagtcttacgttgaagtt

SEQ ID NO: 5246916 - DNA, 25 bp, Homo sapien
tacaggcagcttaaatgctttatag

SEQ ID NO: 5246917 - DNA, 25 bp, Homo sapien
tgagttgtgtacaggcagcttaaat

SEQ ID NO: 5246918 - DNA, 25 bp, Homo sapien
caggacagattggaaacactgatta

SEQ ID NO: 5246919 - DNA, 25 bp, Homo sapien
ttaagttacttatatctgacagccc

SEQ ID NO: 5246920 - DNA, 25 bp, Homo sapien
gctttgtggagctaatagacatgga

SEQ ID NO: 5246921 - DNA, 25 bp, Homo sapien
gaagaagactgacctggtaccttgt

SEQ ID NO: 5246922 - DNA, 25 bp, Homo sapien
atagcagtgagatgctcctaaaaga

SEQ ID NO: 5246923 - DNA, 25 bp, Homo sapien
cagtgagatgctcctaaaagaaatt

SEQ ID NO: 5246924 - DNA, 25 bp, Homo sapien
ttctgatagcagtgagatgctccta

SEQ ID NO: 5246925 - DNA, 25 bp, Homo sapien
gcagtgagatgctcctaaaagaaat

SEQ ID NO: 5246926 - DNA, 25 bp, Homo sapien
attgtgttcctgaacttggatgccc

SEQ ID NO: 5246927 - DNA, 25 bp, Homo sapien
acattgtgttcctgaacttggatgc

SEQ ID NO: 5246928 - DNA, 25 bp, Homo sapien
ggtactggcaatgaacacattgtgt

SEQ ID NO: 5246929 - DNA, 25 bp, Homo sapien
caggtactggcaatgaacacattgt

SEQ ID NO: 5246930 - DNA, 25 bp, Homo sapien
tattctcctttctatgtaaccttcc

SEQ ID NO: 5246931 - DNA, 25 bp, Homo sapien
gaaatcctgagttgcctatgagata

SEQ ID NO: 5246932 - DNA, 25 bp, Homo sapien
tgaagtaaccttcagataacctctg

SEQ ID NO: 5246933 - DNA, 25 bp, Homo sapien
gaattcttgtccttagtaatgttaa

SEQ ID NO: 5246934 - DNA, 25 bp, Homo sapien
tagtttactaattcaccttcatcaa

SEQ ID NO: 5246935 - DNA, 25 bp, Homo sapien
cttagtttactaattcaccttcatc

SEQ ID NO: 5246936 - DNA, 25 bp, Homo sapien
catcttggagtgccaatgtatttct

SEQ ID NO: 5246937 - DNA, 25 bp, Homo sapien
ttcttcttcagtctcgctgggagct

SEQ ID NO: 5246938 - DNA, 25 bp, Homo sapien
tgtccattctcaggcttcaaatgcc

SEQ ID NO: 5246939 - DNA, 25 bp, Homo sapien
gaacatgaccttttagctcggagaa

SEQ ID NO: 5246940 - DNA, 25 bp, Homo sapien
ctagtttattctaattagctattcg

SEQ ID NO: 5246941 - DNA, 25 bp, Homo sapien
ccttgtggtgggttagaacatgacc

SEQ ID NO: 5246942 - DNA, 25 bp, Homo sapien
ggattgttctggctatgtgggctca

SEQ ID NO: 5246943 - DNA, 25 bp, Homo sapien
tgttttcctaaatgaatgccgttta

SEQ ID NO: 5246944 - DNA, 25 bp, Homo sapien
ttctggctatgtgggctcatttttg

SEQ ID NO: 5246945 - DNA, 25 bp, Homo sapien
ctgttttcctaaatgaatgccgttt

SEQ ID NO: 5246946 - DNA, 25 bp, Homo sapien
gccatgttggttttagcatttctcc

SEQ ID NO: 5246947 - DNA, 25 bp, Homo sapien
gttggttttagcatttctcctaatg

SEQ ID NO: 5246948 - DNA, 25 bp, Homo sapien
atgttggttttagcatttctcctaa

SEQ ID NO: 5246949 - DNA, 25 bp, Homo sapien
catgttggttttagcatttctccta

SEQ ID NO: 5246950 - DNA, 25 bp, Homo sapien
tacttttcagaacttatgtctttta

SEQ ID NO: 5246951 - DNA, 25 bp, Homo sapien
gctctctagatcgttagaagtaaga

SEQ ID NO: 5246952 - DNA, 25 bp, Homo sapien
tctaggaaccgtaaagctcttacag

SEQ ID NO: 5246953 - DNA, 25 bp, Homo sapien
attttaagtggtcggtgtcctctat

SEQ ID NO: 5246954 - DNA, 25 bp, Homo sapien
cccttttctagggagtagactcagt

SEQ ID NO: 5246955 - DNA, 25 bp, Homo sapien
catgcaagaatcatacaatcctgga

SEQ ID NO: 5246956 - DNA, 25 bp, Homo sapien
gaacttcagggaacctaatgtgcaa

SEQ ID NO: 5246957 - DNA, 25 bp, Homo sapien
aaaagaagttgaccaccacctcaga

SEQ ID NO: 5246958 - DNA, 25 bp, Homo sapien
tctacagtagaatcccctgggagca

SEQ ID NO: 5246959 - DNA, 25 bp, Homo sapien
tctgatggaccctacacaattgtgg

SEQ ID NO: 5246960 - DNA, 25 bp, Homo sapien
gctgtaagaaatggccctatgggtc

SEQ ID NO: 5246961 - DNA, 25 bp, Homo sapien
ggagccccattaccagagattttga

SEQ ID NO: 5246962 - DNA, 25 bp, Homo sapien
ccatgacttaggcatgtaaggtgtt

SEQ ID NO: 5246963 - DNA, 25 bp, Homo sapien
ggaagagtccccatgacttaggcat

SEQ ID NO: 5246964 - DNA, 25 bp, Homo sapien
ccagggagtacagggctttttgctt

SEQ ID NO: 5246965 - DNA, 25 bp, Homo sapien
gcaccagggagtacagggctttttg

SEQ ID NO: 5246966 - DNA, 25 bp, Homo sapien
tctgggatggaaaaaccgtgggcaa

SEQ ID NO: 5246967 - DNA, 25 bp, Homo sapien
ctctgggatggaaaaaccgtgggca

SEQ ID NO: 5246968 - DNA, 25 bp, Homo sapien
tgggatggaaaaaccgtgggcaaga

SEQ ID NO: 5246969 - DNA, 25 bp, Homo sapien
ggatggaaaaaccgtgggcaagatg

SEQ ID NO: 5246970 - DNA, 25 bp, Homo sapien
gttgcacacctcacatatatttgag

SEQ ID NO: 5246971 - DNA, 25 bp, Homo sapien
tgttagcttccacggatgggatgtg

SEQ ID NO: 5246972 - DNA, 25 bp, Homo sapien
tgaaaggatcttggacaagtgtcgc

SEQ ID NO: 5246973 - DNA, 25 bp, Homo sapien
gcagaacagccgtccccatttgttg

SEQ ID NO: 5246974 - DNA, 25 bp, Homo sapien
tgcagaagatgcaactccacgggtt

SEQ ID NO: 5246975 - DNA, 25 bp, Homo sapien
ctgcagaagatgcaactccacgggt

SEQ ID NO: 5246976 - DNA, 25 bp, Homo sapien
gcagaagatgcaactccacgggttc

SEQ ID NO: 5246977 - DNA, 25 bp, Homo sapien
ccatcgattcactcccgggcggtgt

SEQ ID NO: 5246978 - DNA, 25 bp, Homo sapien
acaccgcccgggagtgaatcgatgg

SEQ ID NO: 5246979 - DNA, 25 bp, Homo sapien
tgatgacctgattggctttctgggc

SEQ ID NO: 5246980 - DNA, 25 bp, Homo sapien
ctgcctcatcaggacttcagattcc

SEQ ID NO: 5246981 - DNA, 25 bp, Homo sapien
ctcaggcagcatctgcctcatcagg

SEQ ID NO: 5246982 - DNA, 25 bp, Homo sapien
tgggcatctttcctgaatagtcttt

SEQ ID NO: 5246983 - DNA, 25 bp, Homo sapien
gaatcacagtagaccttcaagagga

SEQ ID NO: 5246984 - DNA, 25 bp, Homo sapien
gaaaaagcagcttttcgaatcacag

SEQ ID NO: 5246985 - DNA, 25 bp, Homo sapien
taatacggttctgaggcgaaaaagc

SEQ ID NO: 5246986 - DNA, 25 bp, Homo sapien
cggttctgaggcgaaaaagcagctt

SEQ ID NO: 5246987 - DNA, 25 bp, Homo sapien
tgcacaaacccttctactcgggtgt

SEQ ID NO: 5246988 - DNA, 25 bp, Homo sapien
tgactttgtttaaccacatgggctt

SEQ ID NO: 5246989 - DNA, 25 bp, Homo sapien
tgaaagatgagacgcatgtcctgca

SEQ ID NO: 5246990 - DNA, 25 bp, Homo sapien
tactcgggtgtacatctgctcattc

SEQ ID NO: 5246991 - DNA, 25 bp, Homo sapien
cctgtacttgaattcccagtctggt

SEQ ID NO: 5246992 - DNA, 25 bp, Homo sapien
agatgtcctgtacttgaattcccag

SEQ ID NO: 5246993 - DNA, 25 bp, Homo sapien
acattataatgttcttgcttgtttc

SEQ ID NO: 5246994 - DNA, 25 bp, Homo sapien
tgtcctgtacttgaattcccagtct

SEQ ID NO: 5246995 - DNA, 25 bp, Homo sapien
cattgcgtagctagctgccagagga

SEQ ID NO: 5246996 - DNA, 25 bp, Homo sapien
caggcacattgcgtagctagctgcc

SEQ ID NO: 5246997 - DNA, 25 bp, Homo sapien
accacaggcacattgcgtagctagc

SEQ ID NO: 5246998 - DNA, 25 bp, Homo sapien
gcacattgcgtagctagctgccaga

SEQ ID NO: 5246999 - DNA, 25 bp, Homo sapien
cttttgcgcattccatataatgttg

SEQ ID NO: 5247000 - DNA, 25 bp, Homo sapien
ttgggatatgttcctcaatacctag

SEQ ID NO: 5247001 - DNA, 25 bp, Homo sapien
gagaattgtgatgtggagtttccac

SEQ ID NO: 5247002 - DNA, 25 bp, Homo sapien
gggaatgcttcttttgcgcattcca

SEQ ID NO: 5247003 - DNA, 25 bp, Homo sapien
ttaatgatattgactgtttctacac

SEQ ID NO: 5247004 - DNA, 25 bp, Homo sapien
attctcattgtagaactctctcacc

SEQ ID NO: 5247005 - DNA, 25 bp, Homo sapien
taggaataacattgaacctgtaaac

SEQ ID NO: 5247006 - DNA, 25 bp, Homo sapien
tggtttgataggaataacattgaac

SEQ ID NO: 5247007 - DNA, 25 bp, Homo sapien
ggtttgataggaataacattgaacc

SEQ ID NO: 5247008 - DNA, 25 bp, Homo sapien
aagtgtcttttcatccgggcatggt

SEQ ID NO: 5247009 - DNA, 25 bp, Homo sapien
aaagtgtcttttcatccgggcatgg

SEQ ID NO: 5247010 - DNA, 25 bp, Homo sapien
tcccactcacaactgagaacctgtg

SEQ ID NO: 5247011 - DNA, 25 bp, Homo sapien
tacagagtacttcatcaccaatagg

SEQ ID NO: 5247012 - DNA, 25 bp, Homo sapien
tatatagggaaactcttgtcacggg

SEQ ID NO: 5247013 - DNA, 25 bp, Homo sapien
atggcagttctgcttttagcactat

SEQ ID NO: 5247014 - DNA, 25 bp, Homo sapien
ttgatggtcttgccgatcaaggtcc

SEQ ID NO: 5247015 - DNA, 25 bp, Homo sapien
tcttgccgatcaaggtcctcatgaa

SEQ ID NO: 5247016 - DNA, 25 bp, Homo sapien
gccgatcaaggtcctcatgaacatt

SEQ ID NO: 5247017 - DNA, 25 bp, Homo sapien
ggtcttgccgatcaaggtcctcatg

SEQ ID NO: 5247018 - DNA, 25 bp, Homo sapien
tgatactgaatattgacaagtgtct

SEQ ID NO: 5247019 - DNA, 25 bp, Homo sapien
acatcctgcagcttattggcttaaa

SEQ ID NO: 5247020 - DNA, 25 bp, Homo sapien
ctggtaaggtttctaggaggtctgt

SEQ ID NO: 5247021 - DNA, 25 bp, Homo sapien
ggtctgttaggtgtacatcctgcag

SEQ ID NO: 5247022 - DNA, 25 bp, Homo sapien
tacaaatttatgtgttatcctagtg

SEQ ID NO: 5247023 - DNA, 25 bp, Homo sapien
gagtgttttacaaatttatgtgtta

SEQ ID NO: 5247024 - DNA, 25 bp, Homo sapien
tgttttacaaatttatgtgttatcc

SEQ ID NO: 5247025 - DNA, 25 bp, Homo sapien
atggagtgttttacaaatttatgtg

SEQ ID NO: 5247026 - DNA, 25 bp, Homo sapien
cagcctagaaagtagcaggaccagg

SEQ ID NO: 5247027 - DNA, 25 bp, Homo sapien
tgaacagaggatgcgtctttttctc

SEQ ID NO: 5247028 - DNA, 25 bp, Homo sapien
tgttgacggatggtgtgtcagcccc

SEQ ID NO: 5247029 - DNA, 25 bp, Homo sapien
ggagccatgttggaaagcccacatt

SEQ ID NO: 5247030 - DNA, 25 bp, Homo sapien
ctttatgatgtagagcatttcagct

SEQ ID NO: 5247031 - DNA, 25 bp, Homo sapien
acttgtccagtcaaggtcacaatgt

SEQ ID NO: 5247032 - DNA, 25 bp, Homo sapien
tgactttatgatgtagagcatttca

SEQ ID NO: 5247033 - DNA, 25 bp, Homo sapien
caaatgcttggggtctaacttgtcc

SEQ ID NO: 5247034 - DNA, 25 bp, Homo sapien
gaagatgtcctcattggcgtgctgg

SEQ ID NO: 5247035 - DNA, 25 bp, Homo sapien
tgctgggatgtgtacccaatttgtg

SEQ ID NO: 5247036 - DNA, 25 bp, Homo sapien
gcatgtgcctgtccaccggtgaaga

SEQ ID NO: 5247037 - DNA, 25 bp, Homo sapien
ggagagaaacgcaagaacgcaagcc

SEQ ID NO: 5247038 - DNA, 25 bp, Homo sapien
gaaaactccttgcatgtcatcagtg

SEQ ID NO: 5247039 - DNA, 25 bp, Homo sapien
gacagggccttgtttagagccgcag

SEQ ID NO: 5247040 - DNA, 25 bp, Homo sapien
agacagatgaccacaactggcttgg

SEQ ID NO: 5247041 - DNA, 25 bp, Homo sapien
tgaccatccatgagcgagtgaccag

SEQ ID NO: 5247042 - DNA, 25 bp, Homo sapien
tgagcagggctttggaatagttact

SEQ ID NO: 5247043 - DNA, 25 bp, Homo sapien
ctggtcccacctggatttctctttc

SEQ ID NO: 5247044 - DNA, 25 bp, Homo sapien
gaatagttacttctctggtcccacc

SEQ ID NO: 5247045 - DNA, 25 bp, Homo sapien
gctttggaatagttacttctctggt

SEQ ID NO: 5247046 - DNA, 25 bp, Homo sapien
gtgcaggccctttccaccaccgtca

SEQ ID NO: 5247047 - DNA, 25 bp, Homo sapien
tgcaggccctttccaccaccgtcat

SEQ ID NO: 5247048 - DNA, 25 bp, Homo sapien
agtgcaggccctttccaccaccgtc

SEQ ID NO: 5247049 - DNA, 25 bp, Homo sapien
aagtgcaggccctttccaccaccgt

SEQ ID NO: 5247050 - DNA, 25 bp, Homo sapien
tcagctggggcctgtcttagtccag

SEQ ID NO: 5247051 - DNA, 25 bp, Homo sapien
tcgcttttctgactctcaacctctg

SEQ ID NO: 5247052 - DNA, 25 bp, Homo sapien
tctggtctccttcgccacctgttct

SEQ ID NO: 5247053 - DNA, 25 bp, Homo sapien
gggagtggtctgatcgcttttctga

SEQ ID NO: 5247054 - DNA, 25 bp, Homo sapien
cttttcctcacttttatagcagagt

SEQ ID NO: 5247055 - DNA, 25 bp, Homo sapien
tcctcacttttatagcagagtccaa

SEQ ID NO: 5247056 - DNA, 25 bp, Homo sapien
ttggggggcctctgtgaggagtcca

SEQ ID NO: 5247057 - DNA, 25 bp, Homo sapien
ctcacttttatagcagagtccaagt

SEQ ID NO: 5247058 - DNA, 25 bp, Homo sapien
tgtgcatccccctgaccactggtcc

SEQ ID NO: 5247059 - DNA, 25 bp, Homo sapien
cactggtccactccgatgctcccat

SEQ ID NO: 5247060 - DNA, 25 bp, Homo sapien
acccacgtgtgcatccccctgacca

SEQ ID NO: 5247061 - DNA, 25 bp, Homo sapien
cccctgaccactggtccactccgat

SEQ ID NO: 5247062 - DNA, 25 bp, Homo sapien
tttggagagatgtcttcgctgtcca

SEQ ID NO: 5247063 - DNA, 25 bp, Homo sapien
tggagagatgtcttcgctgtccagg

SEQ ID NO: 5247064 - DNA, 25 bp, Homo sapien
ctccccaaaacacgggggctctgct

SEQ ID NO: 5247065 - DNA, 25 bp, Homo sapien
gagagatgtcttcgctgtccaggag

SEQ ID NO: 5247066 - DNA, 25 bp, Homo sapien
cgaagtaagtgctgttctgtggtac

SEQ ID NO: 5247067 - DNA, 25 bp, Homo sapien
caattagcgaagtaagtgctgttct

SEQ ID NO: 5247068 - DNA, 25 bp, Homo sapien
caggagacaattagcgaagtaagtg

SEQ ID NO: 5247069 - DNA, 25 bp, Homo sapien
gagacaattagcgaagtaagtgctg

SEQ ID NO: 5247070 - DNA, 25 bp, Homo sapien
ggggatggaggagagtggtagagga

SEQ ID NO: 5247071 - DNA, 25 bp, Homo sapien
ggatggaggagagtggtagaggaga

SEQ ID NO: 5247072 - DNA, 25 bp, Homo sapien
gaggggatggaggagagtggtagag

SEQ ID NO: 5247073 - DNA, 25 bp, Homo sapien
tgaggggatggaggagagtggtaga

SEQ ID NO: 5247074 - DNA, 25 bp, Homo sapien
aaagttggacagtcaggtggcacag

SEQ ID NO: 5247075 - DNA, 25 bp, Homo sapien
gaccatcttgagtgcttggagaaaa

SEQ ID NO: 5247076 - DNA, 25 bp, Homo sapien
ggagcactgagaccatcttgagtgc

SEQ ID NO: 5247077 - DNA, 25 bp, Homo sapien
ttggagaaaagttggacagtcaggt

SEQ ID NO: 5247078 - DNA, 25 bp, Homo sapien
tttgagactccgcagggcagaatta

SEQ ID NO: 5247079 - DNA, 25 bp, Homo sapien
gagactccgcagggcagaattagag

SEQ ID NO: 5247080 - DNA, 25 bp, Homo sapien
tgagactccgcagggcagaattaga

SEQ ID NO: 5247081 - DNA, 25 bp, Homo sapien
ttgagactccgcagggcagaattag

SEQ ID NO: 5247082 - DNA, 25 bp, Homo sapien
ggcacactggaaggtgcttggcata

SEQ ID NO: 5247083 - DNA, 25 bp, Homo sapien
tcgaggctgcacaaggccgtgactg

SEQ ID NO: 5247084 - DNA, 25 bp, Homo sapien
ggcatagaacgagggcagtggtgtg

SEQ ID NO: 5247085 - DNA, 25 bp, Homo sapien
agtggtgtgtcagcaggccgggcac

SEQ ID NO: 5247086 - DNA, 25 bp, Homo sapien
catcctctgggtctgatgtaccctc

SEQ ID NO: 5247087 - DNA, 25 bp, Homo sapien
gggttgccatcctctgggtctgatg

SEQ ID NO: 5247088 - DNA, 25 bp, Homo sapien
ttgccatcctctgggtctgatgtac

SEQ ID NO: 5247089 - DNA, 25 bp, Homo sapien
gccatcctctgggtctgatgtaccc

SEQ ID NO: 5247090 - DNA, 25 bp, Homo sapien
tgtacacgtgggttgggaactgcct

SEQ ID NO: 5247091 - DNA, 25 bp, Homo sapien
acattcccggagctctgcgagtcag

SEQ ID NO: 5247092 - DNA, 25 bp, Homo sapien
ctgcagaagactggcccaaggcctt

SEQ ID NO: 5247093 - DNA, 25 bp, Homo sapien
tcatgtgagctctgtttccggagtc

SEQ ID NO: 5247094 - DNA, 25 bp, Homo sapien
cattcagtttcaccgggacacccag

SEQ ID NO: 5247095 - DNA, 25 bp, Homo sapien
tcattcagtttcaccgggacaccca

SEQ ID NO: 5247096 - DNA, 25 bp, Homo sapien
cagtttcaccgggacacccagacca

SEQ ID NO: 5247097 - DNA, 25 bp, Homo sapien
ttcagtttcaccgggacacccagac

SEQ ID NO: 5247098 - DNA, 25 bp, Homo sapien
aggagagccttccttagcacacagc

SEQ ID NO: 5247099 - DNA, 25 bp, Homo sapien
ttagcccatgggctctggaatgagg

SEQ ID NO: 5247100 - DNA, 25 bp, Homo sapien
aaagcagcgatgaggagtgctcccc

SEQ ID NO: 5247101 - DNA, 25 bp, Homo sapien
cccccacttctgatcctgaggtggg

SEQ ID NO: 5247102 - DNA, 25 bp, Homo sapien
aggcattagccttctcacttgcaga

SEQ ID NO: 5247103 - DNA, 25 bp, Homo sapien
ccagaggcattagccttctcacttg

SEQ ID NO: 5247104 - DNA, 25 bp, Homo sapien
gcagaaaatcccctgatgagttaag

SEQ ID NO: 5247105 - DNA, 25 bp, Homo sapien
ccctgatgagttaagccagatgttg

SEQ ID NO: 5247106 - DNA, 25 bp, Homo sapien
gaaagagatggccagcctggtggtg

SEQ ID NO: 5247107 - DNA, 25 bp, Homo sapien
aaagagatggccagcctggtggtgc

SEQ ID NO: 5247108 - DNA, 25 bp, Homo sapien
gagctggtctgagtgggtgaggagc

SEQ ID NO: 5247109 - DNA, 25 bp, Homo sapien
tggagctggtctgagtgggtgagga

SEQ ID NO: 5247110 - DNA, 25 bp, Homo sapien
ctccaaaggtgctggagctggtctg

SEQ ID NO: 5247111 - DNA, 25 bp, Homo sapien
gctggagctggtctgagtgggtgag

SEQ ID NO: 5247112 - DNA, 25 bp, Homo sapien
gtggcttagcagagctcagctgttg

SEQ ID NO: 5247113 - DNA, 25 bp, Homo sapien
tagcagagctcagctgttggcagca

SEQ ID NO: 5247114 - DNA, 25 bp, Homo sapien
ctaagggtggcttagcagagctcag

SEQ ID NO: 5247115 - DNA, 25 bp, Homo sapien
gcagagctcagctgttggcagcatc

SEQ ID NO: 5247116 - DNA, 25 bp, Homo sapien
tgctacaatggacccctctggaagc

SEQ ID NO: 5247117 - DNA, 25 bp, Homo sapien
gcaagggtacagcaaggtgaactct

SEQ ID NO: 5247118 - DNA, 25 bp, Homo sapien
tcttggtccctatgccaaagtggca

SEQ ID NO: 5247119 - DNA, 25 bp, Homo sapien
gcgatgcttcggcagggttgcacca

SEQ ID NO: 5247120 - DNA, 25 bp, Homo sapien
tgcatatatgtctggtcccggctgg

SEQ ID NO: 5247121 - DNA, 25 bp, Homo sapien
gaaagagggccgcacaaacaaaggc

SEQ ID NO: 5247122 - DNA, 25 bp, Homo sapien
cttcgtgatacggatgcagccatga

SEQ ID NO: 5247123 - DNA, 25 bp, Homo sapien
caggtttctgcagccaatgtgccta

SEQ ID NO: 5247124 - DNA, 25 bp, Homo sapien
gcccgagcccggctttgacgtgcgc

SEQ ID NO: 5247125 - DNA, 25 bp, Homo sapien
ctttgacgtgcgcactgcgcagccg

SEQ ID NO: 5247126 - DNA, 25 bp, Homo sapien
gcccggctttgacgtgcgcactgcg

SEQ ID NO: 5247127 - DNA, 25 bp, Homo sapien
cttagtcttcgcctgtgcccccgcc

SEQ ID NO: 5247128 - DNA, 25 bp, Homo sapien
cggctgcgcgggcggacggctgccc

SEQ ID NO: 5247129 - DNA, 25 bp, Homo sapien
gctgcgcgggcggacggctgcccag

SEQ ID NO: 5247130 - DNA, 25 bp, Homo sapien
ggctgcgcgggcggacggctgccca

SEQ ID NO: 5247131 - DNA, 25 bp, Homo sapien
gacgctcggcccctccgttgtcttc

SEQ ID NO: 5247132 - DNA, 25 bp, Homo sapien
gcgtcgtcgctgtccccgtcctcgg

SEQ ID NO: 5247133 - DNA, 25 bp, Homo sapien
ctgctcgttcggtccccgcggagtg

SEQ ID NO: 5247134 - DNA, 25 bp, Homo sapien
ccgcggagtggctcggacgctcggc

SEQ ID NO: 5247135 - DNA, 25 bp, Homo sapien
caagagcgcctttaatatcccctag

SEQ ID NO: 5247136 - DNA, 25 bp, Homo sapien
tagcactccgtcgttctttcacagg

SEQ ID NO: 5247137 - DNA, 25 bp, Homo sapien
catttccgggctcatgagtcactga

SEQ ID NO: 5247138 - DNA, 25 bp, Homo sapien
tgcctcccgacaacaggaagtttac

SEQ ID NO: 5247139 - DNA, 25 bp, Homo sapien
ctagcactccctgaattttggaagc

SEQ ID NO: 5247140 - DNA, 25 bp, Homo sapien
actccctgaattttggaagctttga

SEQ ID NO: 5247141 - DNA, 25 bp, Homo sapien
tagcactccctgaattttggaagct

SEQ ID NO: 5247142 - DNA, 25 bp, Homo sapien
gcactccctgaattttggaagcttt

SEQ ID NO: 5247143 - DNA, 25 bp, Homo sapien
tttggagccacttcacacccgaatg

SEQ ID NO: 5247144 - DNA, 25 bp, Homo sapien
taggtatgcactggatatggtcaac

SEQ ID NO: 5247145 - DNA, 25 bp, Homo sapien
tattctgagtaccaagacaaaagct

SEQ ID NO: 5247146 - DNA, 25 bp, Homo sapien
ctctgcaggcttaacatcacagctg

SEQ ID NO: 5247147 - DNA, 25 bp, Homo sapien
tatcagacacgctatgcatggcatt

SEQ ID NO: 5247148 - DNA, 25 bp, Homo sapien
tatagcataaagctcggcaaccgag

SEQ ID NO: 5247149 - DNA, 25 bp, Homo sapien
tggacacttacagcacactatcaga

SEQ ID NO: 5247150 - DNA, 25 bp, Homo sapien
tactatttcagagggctgagatcac

SEQ ID NO: 5247151 - DNA, 25 bp, Homo sapien
cagagtttgcagccgagtagggact

SEQ ID NO: 5247152 - DNA, 25 bp, Homo sapien
gagtttgcagccgagtagggactcc

SEQ ID NO: 5247153 - DNA, 25 bp, Homo sapien
ccagagtttgcagccgagtagggac

SEQ ID NO: 5247154 - DNA, 25 bp, Homo sapien
accagagtttgcagccgagtaggga

SEQ ID NO: 5247155 - DNA, 25 bp, Homo sapien
ggctgaaagacacttgtggcgccag

SEQ ID NO: 5247156 - DNA, 25 bp, Homo sapien
cttcgagagtggtgcgacgccttct

SEQ ID NO: 5247157 - DNA, 25 bp, Homo sapien
cagtcccgggactgccttcgagagt

SEQ ID NO: 5247158 - DNA, 25 bp, Homo sapien
aaagacacttgtggcgccagcgcca

SEQ ID NO: 5247159 - DNA, 25 bp, Homo sapien
caccgagacttcgtggcagagccca

SEQ ID NO: 5247160 - DNA, 25 bp, Homo sapien
gagacttcgtggcagagcccatggg

SEQ ID NO: 5247161 - DNA, 25 bp, Homo sapien
aagttgcggattaagcctgatcaag

SEQ ID NO: 5247162 - DNA, 25 bp, Homo sapien
gttgcggattaagcctgatcaagat

SEQ ID NO: 5247163 - DNA, 25 bp, Homo sapien
tcaaccattgtatactactgcaggg

SEQ ID NO: 5247164 - DNA, 25 bp, Homo sapien
tttgtcagagggagataaaccttgg

SEQ ID NO: 5247165 - DNA, 25 bp, Homo sapien
tccagtgacctgctagtaacagagg

SEQ ID NO: 5247166 - DNA, 25 bp, Homo sapien
tcctctcagagtgtggtgctccaaa

SEQ ID NO: 5247167 - DNA, 25 bp, Homo sapien
gaaataagccattctagtagcatct

SEQ ID NO: 5247168 - DNA, 25 bp, Homo sapien
ttcttacaagatttattggccaggc

SEQ ID NO: 5247169 - DNA, 25 bp, Homo sapien
tcactactatccagtttgagaaagg

SEQ ID NO: 5247170 - DNA, 25 bp, Homo sapien
tggatttcctgctaggcttggaact

SEQ ID NO: 5247171 - DNA, 25 bp, Homo sapien
caatggccttaaccattaggtgaaa

SEQ ID NO: 5247172 - DNA, 25 bp, Homo sapien
gaatttcatagaggatacgcaggct

SEQ ID NO: 5247173 - DNA, 25 bp, Homo sapien
tacgcaggctaactacatggacaac

SEQ ID NO: 5247174 - DNA, 25 bp, Homo sapien
tggacaacactaatctattaggaca

SEQ ID NO: 5247175 - DNA, 25 bp, Homo sapien
aaatatgtaacatttcacaagtttg

SEQ ID NO: 5247176 - DNA, 25 bp, Homo sapien
atatgtaacatttcacaagtttgtg

SEQ ID NO: 5247177 - DNA, 25 bp, Homo sapien
cagttttagggtatgtgctgccaaa

SEQ ID NO: 5247178 - DNA, 25 bp, Homo sapien
tatcattccagttttagggtatgtg

SEQ ID NO: 5247179 - DNA, 25 bp, Homo sapien
tgaacagttacaacactgcaagctg

SEQ ID NO: 5247180 - DNA, 25 bp, Homo sapien
tgtggcaatccgtacctgctatggg

SEQ ID NO: 5247181 - DNA, 25 bp, Homo sapien
tgcaagctgaatccgcatggacatt

SEQ ID NO: 5247182 - DNA, 25 bp, Homo sapien
taaacctcagcaggattccttgggc

SEQ ID NO: 5247183 - DNA, 25 bp, Homo sapien
tattggaatggatgcggtaatcaga

SEQ ID NO: 5247184 - DNA, 25 bp, Homo sapien
atggatgcggtaatcagagaacact

SEQ ID NO: 5247185 - DNA, 25 bp, Homo sapien
ggaatggatgcggtaatcagagaac

SEQ ID NO: 5247186 - DNA, 25 bp, Homo sapien
atattggaatggatgcggtaatcag

SEQ ID NO: 5247187 - DNA, 25 bp, Homo sapien
atatgatcgctctacaagccagatg

SEQ ID NO: 5247188 - DNA, 25 bp, Homo sapien
tgcccagccataaaatccaaggatc

SEQ ID NO: 5247189 - DNA, 25 bp, Homo sapien
gggagtcactcttaactagctgtca

SEQ ID NO: 5247190 - DNA, 25 bp, Homo sapien
tgaactgacgttaggggagtcactc

SEQ ID NO: 5247191 - DNA, 25 bp, Homo sapien
gacggcagcggcaggggcctccgct

SEQ ID NO: 5247192 - DNA, 25 bp, Homo sapien
cggcagcggcaggggcctccgctgc

SEQ ID NO: 5247193 - DNA, 25 bp, Homo sapien
acggcagcggcaggggcctccgctg

SEQ ID NO: 5247194 - DNA, 25 bp, Homo sapien
ggcagcggcaggggcctccgctgca

SEQ ID NO: 5247195 - DNA, 25 bp, Homo sapien
gctggagatttgtgagacttcccaa

SEQ ID NO: 5247196 - DNA, 25 bp, Homo sapien
tgagacttcccaaacgggaacggca

SEQ ID NO: 5247197 - DNA, 25 bp, Homo sapien
gatttgtgagacttcccaaacggga

SEQ ID NO: 5247198 - DNA, 25 bp, Homo sapien
gagatttgtgagacttcccaaacgg

SEQ ID NO: 5247199 - DNA, 25 bp, Homo sapien
aagcctgtagggctatcaggactgc

SEQ ID NO: 5247200 - DNA, 25 bp, Homo sapien
caaagcctgtagggctatcaggact

SEQ ID NO: 5247201 - DNA, 25 bp, Homo sapien
aaagcctgtagggctatcaggactg

SEQ ID NO: 5247202 - DNA, 25 bp, Homo sapien
aggccagtcttgggtacctctgctc

SEQ ID NO: 5247203 - DNA, 25 bp, Homo sapien
gccagtcttgggtacctctgctctt

SEQ ID NO: 5247204 - DNA, 25 bp, Homo sapien
ccagtcttgggtacctctgctcttt

SEQ ID NO: 5247205 - DNA, 25 bp, Homo sapien
ggccagtcttgggtacctctgctct

SEQ ID NO: 5247206 - DNA, 25 bp, Homo sapien
cttcatatgggttcagcgtacttcc

SEQ ID NO: 5247207 - DNA, 25 bp, Homo sapien
gattgggatatctgttccctccaaa

SEQ ID NO: 5247208 - DNA, 25 bp, Homo sapien
tttgctgctatagtgaatgagctac

SEQ ID NO: 5247209 - DNA, 25 bp, Homo sapien
cacataaccctagtgctggaggtag

SEQ ID NO: 5247210 - DNA, 25 bp, Homo sapien
attctattgcagtcttggaacatcc

SEQ ID NO: 5247211 - DNA, 25 bp, Homo sapien
aatttaattctattgcagtcttgga

SEQ ID NO: 5247212 - DNA, 25 bp, Homo sapien
ccatgagttatctagaagtacgata

SEQ ID NO: 5247213 - DNA, 25 bp, Homo sapien
tatgtccagcctcaaactactttct

SEQ ID NO: 5247214 - DNA, 25 bp, Homo sapien
taacatagatatttagtgctagaaa

SEQ ID NO: 5247215 - DNA, 25 bp, Homo sapien
tctcagagataacatgacttagcct

SEQ ID NO: 5247216 - DNA, 25 bp, Homo sapien
gactgcataggctagaacctccaag

SEQ ID NO: 5247217 - DNA, 25 bp, Homo sapien
gaccttataacctgtgactcgctaa

SEQ ID NO: 5247218 - DNA, 25 bp, Homo sapien
aatacctttgtctgatttggcgatg

SEQ ID NO: 5247219 - DNA, 25 bp, Homo sapien
aaatggctagatcatatggttggtt

SEQ ID NO: 5247220 - DNA, 25 bp, Homo sapien
taaggccgctatgaacatttaagca

SEQ ID NO: 5247221 - DNA, 25 bp, Homo sapien
cacgtctgggccatttacaaataag

SEQ ID NO: 5247222 - DNA, 25 bp, Homo sapien
actacagttggtttatccacacgtc

SEQ ID NO: 5247223 - DNA, 25 bp, Homo sapien
agctcctccaaacactgtatccttt

SEQ ID NO: 5247224 - DNA, 25 bp, Homo sapien
gtatccttttcaagctgctgaatca

SEQ ID NO: 5247225 - DNA, 25 bp, Homo sapien
tgtatccttttcaagctgctgaatc

SEQ ID NO: 5247226 - DNA, 25 bp, Homo sapien
cctccaaacactgtatccttttcaa

SEQ ID NO: 5247227 - DNA, 25 bp, Homo sapien
cagtatcaatgctaagccgagtcta

SEQ ID NO: 5247228 - DNA, 25 bp, Homo sapien
gccttggagatctgatggtagttca

SEQ ID NO: 5247229 - DNA, 25 bp, Homo sapien
gaatgtaatttttctgggccaagag

SEQ ID NO: 5247230 - DNA, 25 bp, Homo sapien
tatgcaaattcagtaacccagaatg

SEQ ID NO: 5247231 - DNA, 25 bp, Homo sapien
gactagagtttacaacagggcagag

SEQ ID NO: 5247232 - DNA, 25 bp, Homo sapien
accagaaccttggagctcacatggg

SEQ ID NO: 5247233 - DNA, 25 bp, Homo sapien
tcaggcagtacaggacagtgatccc

SEQ ID NO: 5247234 - DNA, 25 bp, Homo sapien
tgagtactgataaccacacatgggt

SEQ ID NO: 5247235 - DNA, 25 bp, Homo sapien
tcttgagcaagttgagctactgctt

SEQ ID NO: 5247236 - DNA, 25 bp, Homo sapien
gtcaatgagctgtaaatcagctacc

SEQ ID NO: 5247237 - DNA, 25 bp, Homo sapien
aatcagctaccagggtgctaaggag

SEQ ID NO: 5247238 - DNA, 25 bp, Homo sapien
tgctaaggagcccactattatagag

SEQ ID NO: 5247239 - DNA, 25 bp, Homo sapien
tattctgttgggtgcagatgtattc

SEQ ID NO: 5247240 - DNA, 25 bp, Homo sapien
ggtgcagatgtattcaacagtagga

SEQ ID NO: 5247241 - DNA, 25 bp, Homo sapien
tcaacagtaggagttctcgtaccaa

SEQ ID NO: 5247242 - DNA, 25 bp, Homo sapien
ggagttctcgtaccaatttgtcttc

SEQ ID NO: 5247243 - DNA, 25 bp, Homo sapien
ggctgatcatacaattcatctttgc

SEQ ID NO: 5247244 - DNA, 25 bp, Homo sapien
gctgatcatacaattcatctttgct

SEQ ID NO: 5247245 - DNA, 25 bp, Homo sapien
tggctgatcatacaattcatctttg

SEQ ID NO: 5247246 - DNA, 25 bp, Homo sapien
tgcctacagcctgctaatgaaagcc

SEQ ID NO: 5247247 - DNA, 25 bp, Homo sapien
gtcttctactcaagtgtcctgacag

SEQ ID NO: 5247248 - DNA, 25 bp, Homo sapien
tgtgcacaagccctctgactggact

SEQ ID NO: 5247249 - DNA, 25 bp, Homo sapien
cacactagtgaaataacgggccagc

SEQ ID NO: 5247250 - DNA, 25 bp, Homo sapien
aaactgttccgaccacaaaatgatt

SEQ ID NO: 5247251 - DNA, 25 bp, Homo sapien
gacatatctgaagaaatcataaaac

SEQ ID NO: 5247252 - DNA, 25 bp, Homo sapien
aactgttccgaccacaaaatgattt

SEQ ID NO: 5247253 - DNA, 25 bp, Homo sapien
aaatgttgacatttcgacatatctg

SEQ ID NO: 5247254 - DNA, 25 bp, Homo sapien
ttaatcgacatgatccagtgtgagc

SEQ ID NO: 5247255 - DNA, 25 bp, Homo sapien
tgtccacaatgtgagtatctctgtc

SEQ ID NO: 5247256 - DNA, 25 bp, Homo sapien
cctcgggcctgtccacaatgtgagt

SEQ ID NO: 5247257 - DNA, 25 bp, Homo sapien
gaggtgaatccactgtttcctcggg

SEQ ID NO: 5247258 - DNA, 25 bp, Homo sapien
atcctatctttagggcattcattca

SEQ ID NO: 5247259 - DNA, 25 bp, Homo sapien
gattctcattcaaggtaaaacccta

SEQ ID NO: 5247260 - DNA, 25 bp, Homo sapien
gaggctttcaactccctctttaaga

SEQ ID NO: 5247261 - DNA, 25 bp, Homo sapien
gggagctctcatactatgacctgat

SEQ ID NO: 5247262 - DNA, 25 bp, Homo sapien
actataggcgcatgtcaccacaact

SEQ ID NO: 5247263 - DNA, 25 bp, Homo sapien
taggcgcatgtcaccacaactaatt

SEQ ID NO: 5247264 - DNA, 25 bp, Homo sapien
agactataggcgcatgtcaccacaa

SEQ ID NO: 5247265 - DNA, 25 bp, Homo sapien
tataggcgcatgtcaccacaactaa

SEQ ID NO: 5247266 - DNA, 25 bp, Homo sapien
tcccgaaagggcctctgtacaggct

SEQ ID NO: 5247267 - DNA, 25 bp, Homo sapien
tcctgattggtcaccagcacaaaag

SEQ ID NO: 5247268 - DNA, 25 bp, Homo sapien
gctttccccactgcgtggttaccta

SEQ ID NO: 5247269 - DNA, 25 bp, Homo sapien
tactgttcgtctttcggacctcaac

SEQ ID NO: 5247270 - DNA, 25 bp, Homo sapien
tctgcactgagcaatttatgtcttg

SEQ ID NO: 5247271 - DNA, 25 bp, Homo sapien
cactgagcaatttatgtcttgtaag

SEQ ID NO: 5247272 - DNA, 25 bp, Homo sapien
tgcactgagcaatttatgtcttgta

SEQ ID NO: 5247273 - DNA, 25 bp, Homo sapien
gagcaatttatgtcttgtaagtaaa

SEQ ID NO: 5247274 - DNA, 25 bp, Homo sapien
tctatcataatgctgttccaaaaat

SEQ ID NO: 5247275 - DNA, 25 bp, Homo sapien
taaaccagtacatcacaacagtgct

SEQ ID NO: 5247276 - DNA, 25 bp, Homo sapien
tcttcgacgatgtgtagttaaacca

SEQ ID NO: 5247277 - DNA, 25 bp, Homo sapien
caacagtgcttgtgggtattgtgga

SEQ ID NO: 5247278 - DNA, 25 bp, Homo sapien
gggtacctatcagaatcttcgacga

SEQ ID NO: 5247279 - DNA, 25 bp, Homo sapien
tcagggaactgcatcggagttgagc

SEQ ID NO: 5247280 - DNA, 25 bp, Homo sapien
gggttcctcaaagacttgctttcag

SEQ ID NO: 5247281 - DNA, 25 bp, Homo sapien
catctttggataagcttggttgcaa

SEQ ID NO: 5247282 - DNA, 25 bp, Homo sapien
gaaacttttcatggagaactgcctg

SEQ ID NO: 5247283 - DNA, 25 bp, Homo sapien
cagtgactgtctttttgtcacataa

SEQ ID NO: 5247284 - DNA, 25 bp, Homo sapien
tctgaatgaagtaacttctcatatt

SEQ ID NO: 5247285 - DNA, 25 bp, Homo sapien
gaagtaacttctcatattcactgaa

SEQ ID NO: 5247286 - DNA, 25 bp, Homo sapien
tctttttgtcacataattttctgaa

SEQ ID NO: 5247287 - DNA, 25 bp, Homo sapien
aagtctacgggaggcctgacgcttc

SEQ ID NO: 5247288 - DNA, 25 bp, Homo sapien
tctgcagaggatgttcaagatgccc

SEQ ID NO: 5247289 - DNA, 25 bp, Homo sapien
tggccccagtgggagactctcaaag

SEQ ID NO: 5247290 - DNA, 25 bp, Homo sapien
taggcactcaaaagaccgaagaact

SEQ ID NO: 5247291 - DNA, 25 bp, Homo sapien
aatttgaggttctcaggtttactga

SEQ ID NO: 5247292 - DNA, 25 bp, Homo sapien
aaactggatgttgcgacttttgtct

SEQ ID NO: 5247293 - DNA, 25 bp, Homo sapien
tcgcagcaggttcatcattaatttg

SEQ ID NO: 5247294 - DNA, 25 bp, Homo sapien
tatctagtagtagttcaccgagaag

SEQ ID NO: 5247295 - DNA, 25 bp, Homo sapien
cttctcgttcccagatccaaacagt

SEQ ID NO: 5247296 - DNA, 25 bp, Homo sapien
gcacaagaggtcagatgggatttta

SEQ ID NO: 5247297 - DNA, 25 bp, Homo sapien
gccctgcaacacagtgtttagtatt

SEQ ID NO: 5247298 - DNA, 25 bp, Homo sapien
cctgcaacacagtgtttagtattaa

SEQ ID NO: 5247299 - DNA, 25 bp, Homo sapien
gaggtcagatgggattttaagaatg

SEQ ID NO: 5247300 - DNA, 25 bp, Homo sapien
catcctccgtcctgtcgttctgaaa

SEQ ID NO: 5247301 - DNA, 25 bp, Homo sapien
ggtctcttcaaatccctgatctgtt

SEQ ID NO: 5247302 - DNA, 25 bp, Homo sapien
ggtcttctcgtcgttaaactgctca

SEQ ID NO: 5247303 - DNA, 25 bp, Homo sapien
tctaggatgggctgcgtcttgttag

SEQ ID NO: 5247304 - DNA, 25 bp, Homo sapien
cagatcgccaacaaagatgggtgca

SEQ ID NO: 5247305 - DNA, 25 bp, Homo sapien
tcttccttcagcgaaggtgcgcgac

SEQ ID NO: 5247306 - DNA, 25 bp, Homo sapien
gagaaagcccacatgtgccctagtg

SEQ ID NO: 5247307 - DNA, 25 bp, Homo sapien
gaactcccgtagcacagtctttgaa

SEQ ID NO: 5247308 - DNA, 25 bp, Homo sapien
aatttgcagcattaaggaacaggac

SEQ ID NO: 5247309 - DNA, 25 bp, Homo sapien
tatcgcagcttattgatggcacccc

SEQ ID NO: 5247310 - DNA, 25 bp, Homo sapien
aagacattgttctgccgtggtcaca

SEQ ID NO: 5247311 - DNA, 25 bp, Homo sapien
aacatgaatgttgtgtctgacacgc

SEQ ID NO: 5247312 - DNA, 25 bp, Homo sapien
gtcttctggaaaccagatggtcagt

SEQ ID NO: 5247313 - DNA, 25 bp, Homo sapien
tggaaaccagatggtcagtgaggac

SEQ ID NO: 5247314 - DNA, 25 bp, Homo sapien
aaaccagatggtcagtgaggacaca

SEQ ID NO: 5247315 - DNA, 25 bp, Homo sapien
catgtcttctggaaaccagatggtc

SEQ ID NO: 5247316 - DNA, 25 bp, Homo sapien
agccacagtggggacggacacttgg

SEQ ID NO: 5247317 - DNA, 25 bp, Homo sapien
gacatgagcaaggttttagaggaca

SEQ ID NO: 5247318 - DNA, 25 bp, Homo sapien
cagacatgagcaaggttttagagga

SEQ ID NO: 5247319 - DNA, 25 bp, Homo sapien
gttctcagacatgagcaaggtttta

SEQ ID NO: 5247320 - DNA, 25 bp, Homo sapien
ctccctgggattggtttgggctaga

SEQ ID NO: 5247321 - DNA, 25 bp, Homo sapien
tgaggactttaagatgatgggatat

SEQ ID NO: 5247322 - DNA, 25 bp, Homo sapien
gggtgcagtcttgcctggaaacttc

SEQ ID NO: 5247323 - DNA, 25 bp, Homo sapien
catgctgcagttcacggggaagaaa

SEQ ID NO: 5247324 - DNA, 25 bp, Homo sapien
ctctttcctcgtcggcggtcctgtg

SEQ ID NO: 5247325 - DNA, 25 bp, Homo sapien
tgggattccgggacccttggcactg

SEQ ID NO: 5247326 - DNA, 25 bp, Homo sapien
tcctgtgactgttgatcagagcaga

SEQ ID NO: 5247327 - DNA, 25 bp, Homo sapien
tcaggggacggtggcaaatcctctt

SEQ ID NO: 5247328 - DNA, 25 bp, Homo sapien
gaacagctttctggcagacggaccc

SEQ ID NO: 5247329 - DNA, 25 bp, Homo sapien
tcccgtgcttgccagggctcaagga

SEQ ID NO: 5247330 - DNA, 25 bp, Homo sapien
ctgcacaggccttcgacacagcagg

SEQ ID NO: 5247331 - DNA, 25 bp, Homo sapien
cctaggccctgcgtcagggacagtc

SEQ ID NO: 5247332 - DNA, 25 bp, Homo sapien
atagccctgtttttcaagatctgac

SEQ ID NO: 5247333 - DNA, 25 bp, Homo sapien
tatttctgggccaagtgatctgttc

SEQ ID NO: 5247334 - DNA, 25 bp, Homo sapien
tgaggctcgtccagactccagtctg

SEQ ID NO: 5247335 - DNA, 25 bp, Homo sapien
gaactgctctcacccagatgaggca

SEQ ID NO: 5247336 - DNA, 25 bp, Homo sapien
gacttccgtgactgactcccttggg

SEQ ID NO: 5247337 - DNA, 25 bp, Homo sapien
tccttggggacttccgtgactgact

SEQ ID NO: 5247338 - DNA, 25 bp, Homo sapien
tctcagtcaacttggcattttgctt

SEQ ID NO: 5247339 - DNA, 25 bp, Homo sapien
agctccaaaatctcagtcaacttgg

SEQ ID NO: 5247340 - DNA, 25 bp, Homo sapien
cccctagaaggatagaaatggcagt

SEQ ID NO: 5247341 - DNA, 25 bp, Homo sapien
catgcttcatgctgtctaaaggtac

SEQ ID NO: 5247342 - DNA, 25 bp, Homo sapien
gcctggtgtgggatctctaggacca

SEQ ID NO: 5247343 - DNA, 25 bp, Homo sapien
ggccagtctgtctctacttgcataa

SEQ ID NO: 5247344 - DNA, 25 bp, Homo sapien
tgcaggcaccggaagtttggatccc

SEQ ID NO: 5247345 - DNA, 25 bp, Homo sapien
ggaagtttggatcccgctcgcgtcc

SEQ ID NO: 5247346 - DNA, 25 bp, Homo sapien
accggaagtttggatcccgctcgcg

SEQ ID NO: 5247347 - DNA, 25 bp, Homo sapien
gcaccggaagtttggatcccgctcg

SEQ ID NO: 5247348 - DNA, 25 bp, Homo sapien
gcgccggcccgcgcgtccgccccgc

SEQ ID NO: 5247349 - DNA, 25 bp, Homo sapien
gccccgcagcctctgccggtgcagc

SEQ ID NO: 5247350 - DNA, 25 bp, Homo sapien
ctgcgccggcccgcgcgtccgcccc

SEQ ID NO: 5247351 - DNA, 25 bp, Homo sapien
ccggcccgcgcgtccgccccgcagc

SEQ ID NO: 5247352 - DNA, 25 bp, Homo sapien
cttgtcagccttgtcgcccttgatg

SEQ ID NO: 5247353 - DNA, 25 bp, Homo sapien
cgggctggaagctaatcttcaccat

SEQ ID NO: 5247354 - DNA, 25 bp, Homo sapien
gccacggcgggctggaagctaatct

SEQ ID NO: 5247355 - DNA, 25 bp, Homo sapien
ttgtcgcccttgatgccagccacgg

SEQ ID NO: 5247356 - DNA, 25 bp, Homo sapien
cggcgtcagcaggatctcggtggcc

SEQ ID NO: 5247357 - DNA, 25 bp, Homo sapien
cgtcagcaggatctcggtggccgag

SEQ ID NO: 5247358 - DNA, 25 bp, Homo sapien
tcagcaggatctcggtggccgaggc

SEQ ID NO: 5247359 - DNA, 25 bp, Homo sapien
agcaggatctcggtggccgaggccg

SEQ ID NO: 5247360 - DNA, 25 bp, Homo sapien
tcccactcttcggacttcagctttt

SEQ ID NO: 5247361 - DNA, 25 bp, Homo sapien
tttggctgccgctttagtacgggac

SEQ ID NO: 5247362 - DNA, 25 bp, Homo sapien
ggacttcagcttttggctgccgctt

SEQ ID NO: 5247363 - DNA, 25 bp, Homo sapien
tgccgctttagtacgggacttaagc

SEQ ID NO: 5247364 - DNA, 25 bp, Homo sapien
ggcgccaaatcccaggaatggacga

SEQ ID NO: 5247365 - DNA, 25 bp, Homo sapien
aagtccccacgctgccacagggaag

SEQ ID NO: 5247366 - DNA, 25 bp, Homo sapien
gacagccatgaaagtccccacgctg

SEQ ID NO: 5247367 - DNA, 25 bp, Homo sapien
cccaggaatggacgacagccatgaa

SEQ ID NO: 5247368 - DNA, 25 bp, Homo sapien
catctgtgcagatgcgctctcggct

SEQ ID NO: 5247369 - DNA, 25 bp, Homo sapien
tgaaacatgcaaggactgctgagag

SEQ ID NO: 5247370 - DNA, 25 bp, Homo sapien
actggcaatctgctgacggtcttga

SEQ ID NO: 5247371 - DNA, 25 bp, Homo sapien
tccctgatagtcaaggcatctccag

SEQ ID NO: 5247372 - DNA, 25 bp, Homo sapien
actctcctgtcctcccttccagact

SEQ ID NO: 5247373 - DNA, 25 bp, Homo sapien
ctgtcctcccttccagactgcaggc

SEQ ID NO: 5247374 - DNA, 25 bp, Homo sapien
gtcctcccttccagactgcaggccc

SEQ ID NO: 5247375 - DNA, 25 bp, Homo sapien
ctcctgtcctcccttccagactgca

SEQ ID NO: 5247376 - DNA, 25 bp, Homo sapien
aattcaccgacaaggtgaggcctgc

SEQ ID NO: 5247377 - DNA, 25 bp, Homo sapien
ttccgccttaatgctggtctgcaga

SEQ ID NO: 5247378 - DNA, 25 bp, Homo sapien
acttgagctgggtcccgtgtctccc

SEQ ID NO: 5247379 - DNA, 25 bp, Homo sapien
ctttatggcaaagggcagcctcgcc

SEQ ID NO: 5247380 - DNA, 25 bp, Homo sapien
tggctgggcccggagggagtcttgg

SEQ ID NO: 5247381 - DNA, 25 bp, Homo sapien
ctgctggctgggcccggagggagtc

SEQ ID NO: 5247382 - DNA, 25 bp, Homo sapien
ggaaagggagggaaggagatgacac

SEQ ID NO: 5247383 - DNA, 25 bp, Homo sapien
ctggctgggcccggagggagtcttg

SEQ ID NO: 5247384 - DNA, 25 bp, Homo sapien
gtggatagcaatgctgggtcagtgg

SEQ ID NO: 5247385 - DNA, 25 bp, Homo sapien
ctgtggatagcaatgctgggtcagt

SEQ ID NO: 5247386 - DNA, 25 bp, Homo sapien
tgtggatagcaatgctgggtcagtg

SEQ ID NO: 5247387 - DNA, 25 bp, Homo sapien
cacgaccatgcccatcgacaggtag

SEQ ID NO: 5247388 - DNA, 25 bp, Homo sapien
aggcgaacacgaggcccatgagcag

SEQ ID NO: 5247389 - DNA, 25 bp, Homo sapien
gccccccctcttggatcgatgttgt

SEQ ID NO: 5247390 - DNA, 25 bp, Homo sapien
atgcccatcgacaggtagcacacgc

SEQ ID NO: 5247391 - DNA, 25 bp, Homo sapien
gcccaggtcctagggtagggccaca

SEQ ID NO: 5247392 - DNA, 25 bp, Homo sapien
gattcagtgcaagttctccagggag

SEQ ID NO: 5247393 - DNA, 25 bp, Homo sapien
tgggatcggcaggattccaccgtct

SEQ ID NO: 5247394 - DNA, 25 bp, Homo sapien
tggacaccccgaatactgtcccagg

SEQ ID NO: 5247395 - DNA, 25 bp, Homo sapien
ggctcctggaggggcctgtagatac

SEQ ID NO: 5247396 - DNA, 25 bp, Homo sapien
ttctggagggggctcctggaggggc

SEQ ID NO: 5247397 - DNA, 25 bp, Homo sapien
gagggggctcctggaggggcctgta

SEQ ID NO: 5247398 - DNA, 25 bp, Homo sapien
ggggctcctggaggggcctgtagat

SEQ ID NO: 5247399 - DNA, 25 bp, Homo sapien
ctgtcctggcctgcagacctggagg

SEQ ID NO: 5247400 - DNA, 25 bp, Homo sapien
tgctgtcctggcctgcagacctgga

SEQ ID NO: 5247401 - DNA, 25 bp, Homo sapien
ctgctgtcctggcctgcagacctgg

SEQ ID NO: 5247402 - DNA, 25 bp, Homo sapien
tcctggcctgcagacctggaggggc

SEQ ID NO: 5247403 - DNA, 25 bp, Homo sapien
ctccgtgccctccacagaggtgcag

SEQ ID NO: 5247404 - DNA, 25 bp, Homo sapien
taagagttgggcacctacgcctgtg

SEQ ID NO: 5247405 - DNA, 25 bp, Homo sapien
gcctgtgcacgactgcctttcctgt

SEQ ID NO: 5247406 - DNA, 25 bp, Homo sapien
tcaaggacgaacctaagagttgggc

SEQ ID NO: 5247407 - DNA, 25 bp, Homo sapien
gttgatgcgctcgtagttctcgtcg

SEQ ID NO: 5247408 - DNA, 25 bp, Homo sapien
catctgagtccggacctgggaggac

SEQ ID NO: 5247409 - DNA, 25 bp, Homo sapien
tctcgtcgaggtagattttcacatc

SEQ ID NO: 5247410 - DNA, 25 bp, Homo sapien
acagggagtcctcatacagcacacc

SEQ ID NO: 5247411 - DNA, 25 bp, Homo sapien
agactcctcaatacctgggcgggca

SEQ ID NO: 5247412 - DNA, 25 bp, Homo sapien
gactcctcaatacctgggcgggcac

SEQ ID NO: 5247413 - DNA, 25 bp, Homo sapien
tagcacttgtccagggagatatcat

SEQ ID NO: 5247414 - DNA, 25 bp, Homo sapien
aatggtggtgttgagttcgatgaca

SEQ ID NO: 5247415 - DNA, 25 bp, Homo sapien
gagttcgatgacatagcacttgtcc

SEQ ID NO: 5247416 - DNA, 25 bp, Homo sapien
gagatatcatggtacgcagtcagac

SEQ ID NO: 5247417 - DNA, 25 bp, Homo sapien
tccttgtcactgacatgctccgtga

SEQ ID NO: 5247418 - DNA, 25 bp, Homo sapien
tctcctcctggatgatgtacgtctg

SEQ ID NO: 5247419 - DNA, 25 bp, Homo sapien
gtacgtctgcggcaggtaggtcccc

SEQ ID NO: 5247420 - DNA, 25 bp, Homo sapien
gtctttcccgttgcacaggtggtag

SEQ ID NO: 5247421 - DNA, 25 bp, Homo sapien
ccacgaaggtgttctcgaagtggcg

SEQ ID NO: 5247422 - DNA, 25 bp, Homo sapien
tgttctcgaagtggcggatggcatt

SEQ ID NO: 5247423 - DNA, 25 bp, Homo sapien
tccaccacgaaggtgttctcgaagt

SEQ ID NO: 5247424 - DNA, 25 bp, Homo sapien
ttcttggccccacgcttgttgatcc

SEQ ID NO: 5247425 - DNA, 25 bp, Homo sapien
cgtccaaagtacaagctaagcaggg

SEQ ID NO: 5247426 - DNA, 25 bp, Homo sapien
gagagcagccggaaagaagaaaaga

SEQ ID NO: 5247427 - DNA, 25 bp, Homo sapien
tagaaacgcgtccaaagtacaagct

SEQ ID NO: 5247428 - DNA, 25 bp, Homo sapien
gtcacctctatagaaacgcgtccaa

SEQ ID NO: 5247429 - DNA, 25 bp, Homo sapien
tcaagccccaggtctaggaataggg

SEQ ID NO: 5247430 - DNA, 25 bp, Homo sapien
cagtgaagaaagtgtaccctccaag

SEQ ID NO: 5247431 - DNA, 25 bp, Homo sapien
ggcaggcccagcttcaagacagtgg

SEQ ID NO: 5247432 - DNA, 25 bp, Homo sapien
gatcacagctctggtacagggaggt

SEQ ID NO: 5247433 - DNA, 25 bp, Homo sapien
cagagaacagttgtgcttgacggac

SEQ ID NO: 5247434 - DNA, 25 bp, Homo sapien
ctcagccgcccatcccactgccttg

SEQ ID NO: 5247435 - DNA, 25 bp, Homo sapien
ccccgttcctcagccgcccatccca

SEQ ID NO: 5247436 - DNA, 25 bp, Homo sapien
cttgactgaggggaccctgcttgtg

SEQ ID NO: 5247437 - DNA, 25 bp, Homo sapien
tgactgaggggaccctgcttgtgct

SEQ ID NO: 5247438 - DNA, 25 bp, Homo sapien
ggtggacaagtaccaggtggctctc

SEQ ID NO: 5247439 - DNA, 25 bp, Homo sapien
ccagagactgactgaaggcgttaca

SEQ ID NO: 5247440 - DNA, 25 bp, Homo sapien
gagaaagcaatgagctccacctact

SEQ ID NO: 5247441 - DNA, 25 bp, Homo sapien
cccgtggacgtgactgagcagtgac

SEQ ID NO: 5247442 - DNA, 25 bp, Homo sapien
agtgggtggtaactccttcaggcag

SEQ ID NO: 5247443 - DNA, 25 bp, Homo sapien
gaccagtccatcatcattccctaag

SEQ ID NO: 5247444 - DNA, 25 bp, Homo sapien
ccctaagcagttattggagctctga

SEQ ID NO: 5247445 - DNA, 25 bp, Homo sapien
gataagtaacactccagcaccagtg

SEQ ID NO: 5247446 - DNA, 25 bp, Homo sapien
ccctcagagggtgaatttggacctt

SEQ ID NO: 5247447 - DNA, 25 bp, Homo sapien
catgcagcaaggatacggagatgcc

SEQ ID NO: 5247448 - DNA, 25 bp, Homo sapien
gactgccgacccttctaggactgca

SEQ ID NO: 5247449 - DNA, 25 bp, Homo sapien
catcagtcctccgttaggcgcagag

SEQ ID NO: 5247450 - DNA, 25 bp, Homo sapien
ccttacaatggctgtgacgtcacta

SEQ ID NO: 5247451 - DNA, 25 bp, Homo sapien
cattgttgcctgaaacgtcgttatg

SEQ ID NO: 5247452 - DNA, 25 bp, Homo sapien
gatgtgttgcactctgaccttacaa

SEQ ID NO: 5247453 - DNA, 25 bp, Homo sapien
attgtaattttacgggaccactgtg

SEQ ID NO: 5247454 - DNA, 25 bp, Homo sapien
gggccggtcatcatctacctgaacg

SEQ ID NO: 5247455 - DNA, 25 bp, Homo sapien
cagaaggtcataaatccaaggagcc

SEQ ID NO: 5247456 - DNA, 25 bp, Homo sapien
tacctgaacgggaatagtcaattct

SEQ ID NO: 5247457 - DNA, 25 bp, Homo sapien
cagtctgacgggaacattgccaagg

SEQ ID NO: 5247458 - DNA, 25 bp, Homo sapien
cctccgggaagctgcacaaatgttt

SEQ ID NO: 5247459 - DNA, 25 bp, Homo sapien
tcaggtggccaggaacgatcagact

SEQ ID NO: 5247460 - DNA, 25 bp, Homo sapien
tggtgtccacgtatcagtccccagg

SEQ ID NO: 5247461 - DNA, 25 bp, Homo sapien
tgactgtggtactaagaggatcccg

SEQ ID NO: 5247462 - DNA, 25 bp, Homo sapien
ttcctgggttgctgatgaccacctc

SEQ ID NO: 5247463 - DNA, 25 bp, Homo sapien
tggaagtctcagatcgaggtctggc

SEQ ID NO: 5247464 - DNA, 25 bp, Homo sapien
ctcttcctgggttgctgatgaccac

SEQ ID NO: 5247465 - DNA, 25 bp, Homo sapien
ctggaagtctcagatcgaggtctgg

SEQ ID NO: 5247466 - DNA, 25 bp, Homo sapien
aacagcatttgaatccctgatccag

SEQ ID NO: 5247467 - DNA, 25 bp, Homo sapien
aaagcgagtctggaatgatatacac

SEQ ID NO: 5247468 - DNA, 25 bp, Homo sapien
gacagatgtccatgcacagcaggtt

SEQ ID NO: 5247469 - DNA, 25 bp, Homo sapien
gaagtcagccctaccctagttttca

SEQ ID NO: 5247470 - DNA, 25 bp, Homo sapien
tccctgctgcggatggtagaaaggc

SEQ ID NO: 5247471 - DNA, 25 bp, Homo sapien
ggaattccagagaacccactcccag

SEQ ID NO: 5247472 - DNA, 25 bp, Homo sapien
tgcctgtgacacagatcccaacatc

SEQ ID NO: 5247473 - DNA, 25 bp, Homo sapien
atcaatggcagcactgggatggctc

SEQ ID NO: 5247474 - DNA, 25 bp, Homo sapien
gcggatgagggtaccatggaccact

SEQ ID NO: 5247475 - DNA, 25 bp, Homo sapien
cacatagctgggtttcgaggtctca

SEQ ID NO: 5247476 - DNA, 25 bp, Homo sapien
ttctcagttgcaaccctccttaggg

SEQ ID NO: 5247477 - DNA, 25 bp, Homo sapien
tggaccactggcagttgcgggaatc

SEQ ID NO: 5247478 - DNA, 25 bp, Homo sapien
tctgtgcagataacagcctggcagc

SEQ ID NO: 5247479 - DNA, 25 bp, Homo sapien
tgtgcagataacagcctggcagctg

SEQ ID NO: 5247480 - DNA, 25 bp, Homo sapien
gctgcaatgctctgtgcagataaca

SEQ ID NO: 5247481 - DNA, 25 bp, Homo sapien
gctctgtgcagataacagcctggca

SEQ ID NO: 5247482 - DNA, 25 bp, Homo sapien
gataaaggtgaaagggacatggtcc

SEQ ID NO: 5247483 - DNA, 25 bp, Homo sapien
caaactgtatgtgaggctcggtgat

SEQ ID NO: 5247484 - DNA, 25 bp, Homo sapien
gccatttgttccgtcatttcttcac

SEQ ID NO: 5247485 - DNA, 25 bp, Homo sapien
ttcatgcaataagaccttcccaacg

SEQ ID NO: 5247486 - DNA, 25 bp, Homo sapien
tctggggcatgaggcaatacacggt

SEQ ID NO: 5247487 - DNA, 25 bp, Homo sapien
ctctggggcatgaggcaatacacgg

SEQ ID NO: 5247488 - DNA, 25 bp, Homo sapien
tctagcctccgtttacctctctggg

SEQ ID NO: 5247489 - DNA, 25 bp, Homo sapien
tgcgtaatttctctagcctccgttt

SEQ ID NO: 5247490 - DNA, 25 bp, Homo sapien
ccatgccgactcctaaaacaacgtt

SEQ ID NO: 5247491 - DNA, 25 bp, Homo sapien
ttaccatgccgactcctaaaacaac

SEQ ID NO: 5247492 - DNA, 25 bp, Homo sapien
catgccgactcctaaaacaacgttt

SEQ ID NO: 5247493 - DNA, 25 bp, Homo sapien
taccatgccgactcctaaaacaacg

SEQ ID NO: 5247494 - DNA, 25 bp, Homo sapien
cagtcctcagggacttggcaaaggc

SEQ ID NO: 5247495 - DNA, 25 bp, Homo sapien
gggcttcgtgtggtatagcacccag

SEQ ID NO: 5247496 - DNA, 25 bp, Homo sapien
aaaggctccaggaacgggcttcgtg

SEQ ID NO: 5247497 - DNA, 25 bp, Homo sapien
tgtcagtcctcagggacttggcaaa

SEQ ID NO: 5247498 - DNA, 25 bp, Homo sapien
gactgcagggagaagcttggtggct

SEQ ID NO: 5247499 - DNA, 25 bp, Homo sapien
gatgactgcagggagaagcttggtg

SEQ ID NO: 5247500 - DNA, 25 bp, Homo sapien
caggatgactgcagggagaagcttg

SEQ ID NO: 5247501 - DNA, 25 bp, Homo sapien
gggcaggatgactgcagggagaagc

SEQ ID NO: 5247502 - DNA, 25 bp, Homo sapien
accattgcatttgaagaccaccttt

SEQ ID NO: 5247503 - DNA, 25 bp, Homo sapien
tttcggtgataagacaaccattgca

SEQ ID NO: 5247504 - DNA, 25 bp, Homo sapien
gggcctcctctggatgccgtgggct

SEQ ID NO: 5247505 - DNA, 25 bp, Homo sapien
cctgtgctctctgtaaacttcgtag

SEQ ID NO: 5247506 - DNA, 25 bp, Homo sapien
ttaatgttcacaagacattcagtgg

SEQ ID NO: 5247507 - DNA, 25 bp, Homo sapien
acagggtgggcttccagaattctct

SEQ ID NO: 5247508 - DNA, 25 bp, Homo sapien
ttcacttggaagcatttgtttaatg

SEQ ID NO: 5247509 - DNA, 25 bp, Homo sapien
cattcagtggctccatgtgccaggg

SEQ ID NO: 5247510 - DNA, 25 bp, Homo sapien
ctgacttccaggagtggggaatgct

SEQ ID NO: 5247511 - DNA, 25 bp, Homo sapien
tgctgctcctggataagaggcaagc

SEQ ID NO: 5247512 - DNA, 25 bp, Homo sapien
tgcctcctggagacgctgacttcca

SEQ ID NO: 5247513 - DNA, 25 bp, Homo sapien
gcagcctttgccctgccaagggagc

SEQ ID NO: 5247514 - DNA, 25 bp, Homo sapien
tcacagaggtggtcatctcacattt

SEQ ID NO: 5247515 - DNA, 25 bp, Homo sapien
gtggatacttgtgctgttcacagag

SEQ ID NO: 5247516 - DNA, 25 bp, Homo sapien
ggatacttgtgctgttcacagaggt

SEQ ID NO: 5247517 - DNA, 25 bp, Homo sapien
cacagaggtggtcatctcacatttg

SEQ ID NO: 5247518 - DNA, 25 bp, Homo sapien
tgccctgtccaatgtccagtggtgg

SEQ ID NO: 5247519 - DNA, 25 bp, Homo sapien
tgtgcaggaccatagcttctgggtc

SEQ ID NO: 5247520 - DNA, 25 bp, Homo sapien
tctgggtcatcaagctcatggaagc

SEQ ID NO: 5247521 - DNA, 25 bp, Homo sapien
tgtgtaatgaatggcagaaggcatc

SEQ ID NO: 5247522 - DNA, 25 bp, Homo sapien
tccctctgaactaaccagcgatggt

SEQ ID NO: 5247523 - DNA, 25 bp, Homo sapien
gatggttactggaaaccacggctcc

SEQ ID NO: 5247524 - DNA, 25 bp, Homo sapien
tgtgccgggtgtcacagtcatctct

SEQ ID NO: 5247525 - DNA, 25 bp, Homo sapien
tctgagaattaaatcttgtgccggg

SEQ ID NO: 5247526 - DNA, 25 bp, Homo sapien
cattctgggaattgcctttcctctc

SEQ ID NO: 5247527 - DNA, 25 bp, Homo sapien
ccgcttcattctgggaattgccttt

SEQ ID NO: 5247528 - DNA, 25 bp, Homo sapien
tcaagatgggtactttcacataata

SEQ ID NO: 5247529 - DNA, 25 bp, Homo sapien
aagatgggtactttcacataatatc

SEQ ID NO: 5247530 - DNA, 25 bp, Homo sapien
gatgggtactttcacataatatctt

SEQ ID NO: 5247531 - DNA, 25 bp, Homo sapien
agatgggtactttcacataatatct

SEQ ID NO: 5247532 - DNA, 25 bp, Homo sapien
tgggtggacccgtgggcctatttga

SEQ ID NO: 5247533 - DNA, 25 bp, Homo sapien
gctctccaggtcgtgagtgggcgtg

SEQ ID NO: 5247534 - DNA, 25 bp, Homo sapien
tccaggtcgtgagtgggcgtgggtg

SEQ ID NO: 5247535 - DNA, 25 bp, Homo sapien
tgcaggctctccaggtcgtgagtgg

SEQ ID NO: 5247536 - DNA, 25 bp, Homo sapien
ccacagggtggatcaggaaagacag

SEQ ID NO: 5247537 - DNA, 25 bp, Homo sapien
gaggggccatttgtgtaagacctac

SEQ ID NO: 5247538 - DNA, 25 bp, Homo sapien
agaaatgccacagggtggatcagga

SEQ ID NO: 5247539 - DNA, 25 bp, Homo sapien
aggaggggccatttgtgtaagacct

SEQ ID NO: 5247540 - DNA, 25 bp, Homo sapien
cgagcgccgcgacttcttggtgaag

SEQ ID NO: 5247541 - DNA, 25 bp, Homo sapien
gagctgatcggctgcagtgtctcct

SEQ ID NO: 5247542 - DNA, 25 bp, Homo sapien
agacgctgtgtcctctgccgcggag

SEQ ID NO: 5247543 - DNA, 25 bp, Homo sapien
tcgcagttcatggagctgtcgcccc

SEQ ID NO: 5247544 - DNA, 25 bp, Homo sapien
acgcgcggcacaacaccaggagcag

SEQ ID NO: 5247545 - DNA, 25 bp, Homo sapien
gctgcgtgaggagcgcagacgcgcg

SEQ ID NO: 5247546 - DNA, 25 bp, Homo sapien
ggctgcaccacgatccccacgagcg

SEQ ID NO: 5247547 - DNA, 25 bp, Homo sapien
ggcgcgaggactcggctgagcaggg

SEQ ID NO: 5247548 - DNA, 25 bp, Homo sapien
tcccgatccatcagggagaccctgt

SEQ ID NO: 5247549 - DNA, 25 bp, Homo sapien
cgcgcttggaagtccagggtgccct

SEQ ID NO: 5247550 - DNA, 25 bp, Homo sapien
cgcttggaagtccagggtgccctcg

SEQ ID NO: 5247551 - DNA, 25 bp, Homo sapien
ctgtgcacttgctggcggcgcgctt

SEQ ID NO: 5247552 - DNA, 25 bp, Homo sapien
cagggctgcgtgtttgagcgttctc

SEQ ID NO: 5247553 - DNA, 25 bp, Homo sapien
gcgtgtttgagcgttctccgccccg

SEQ ID NO: 5247554 - DNA, 25 bp, Homo sapien
ggctgcgtgtttgagcgttctccgc

SEQ ID NO: 5247555 - DNA, 25 bp, Homo sapien
tccagggctgcgtgtttgagcgttc

SEQ ID NO: 5247556 - DNA, 25 bp, Homo sapien
aacagggcacagagaatgagtctct

SEQ ID NO: 5247557 - DNA, 25 bp, Homo sapien
caaacagggcacagagaatgagtct

SEQ ID NO: 5247558 - DNA, 25 bp, Homo sapien
cagggcacagagaatgagtctctgt

SEQ ID NO: 5247559 - DNA, 25 bp, Homo sapien
ttaccagaaggagccaaacagggca

SEQ ID NO: 5247560 - DNA, 25 bp, Homo sapien
tgaggtcataaaagccagggtggct

SEQ ID NO: 5247561 - DNA, 25 bp, Homo sapien
ctgtgaggtcataaaagccagggtg

SEQ ID NO: 5247562 - DNA, 25 bp, Homo sapien
ctcctgtgaggtcataaaagccagg

SEQ ID NO: 5247563 - DNA, 25 bp, Homo sapien
gaggtcataaaagccagggtggctc

SEQ ID NO: 5247564 - DNA, 25 bp, Homo sapien
gacctacatggagctgcgtaatctc

SEQ ID NO: 5247565 - DNA, 25 bp, Homo sapien
cgtggacctacatggagctgcgtaa

SEQ ID NO: 5247566 - DNA, 25 bp, Homo sapien
cccaacctaaacgtggacctacatg

SEQ ID NO: 5247567 - DNA, 25 bp, Homo sapien
cctaaacgtggacctacatggagct

SEQ ID NO: 5247568 - DNA, 25 bp, Homo sapien
ctgtggtgtggattcaggactaggc

SEQ ID NO: 5247569 - DNA, 25 bp, Homo sapien
tgtggtgtggattcaggactaggct

SEQ ID NO: 5247570 - DNA, 25 bp, Homo sapien
ctgtggtgtggattcagggctaggc

SEQ ID NO: 5247571 - DNA, 25 bp, Homo sapien
tgtggtgtggattcagggctaggct

SEQ ID NO: 5247572 - DNA, 25 bp, Homo sapien
gtggtgtggattcagggctaggctg

SEQ ID NO: 5247573 - DNA, 25 bp, Homo sapien
gccgggaggtggtttcaaggctgga

SEQ ID NO: 5247574 - DNA, 25 bp, Homo sapien
gctggctgccgggaggtggtttcaa

SEQ ID NO: 5247575 - DNA, 25 bp, Homo sapien
ggcggatttcgggtgctggaagggc

SEQ ID NO: 5247576 - DNA, 25 bp, Homo sapien
ggcagcaagaggagcggcggatttc

SEQ ID NO: 5247577 - DNA, 25 bp, Homo sapien
tttcctggattgaggggctgccttc

SEQ ID NO: 5247578 - DNA, 25 bp, Homo sapien
tgctttcctggattgaggggctgcc

SEQ ID NO: 5247579 - DNA, 25 bp, Homo sapien
tggattgaggggctgccttcacgtt

SEQ ID NO: 5247580 - DNA, 25 bp, Homo sapien
tgaggggctgccttcacgttagcat

SEQ ID NO: 5247581 - DNA, 25 bp, Homo sapien
gtagccctgcgtcttcttgacagag

SEQ ID NO: 5247582 - DNA, 25 bp, Homo sapien
tggtatggatcccagcagaatgtag

SEQ ID NO: 5247583 - DNA, 25 bp, Homo sapien
gagctgccacgttccattgatctag

SEQ ID NO: 5247584 - DNA, 25 bp, Homo sapien
cacagctctagtttccagtcccgat

SEQ ID NO: 5247585 - DNA, 25 bp, Homo sapien
ctgggagtagcaacagcgacgacaa

SEQ ID NO: 5247586 - DNA, 25 bp, Homo sapien
aacagcgacgacaacaacgatgatg

SEQ ID NO: 5247587 - DNA, 25 bp, Homo sapien
ggagtagcaacagcgacgacaacaa

SEQ ID NO: 5247588 - DNA, 25 bp, Homo sapien
tagcaacagcgacgacaacaacgat

SEQ ID NO: 5247589 - DNA, 25 bp, Homo sapien
cgccagcaagcggagctgcaggggc

SEQ ID NO: 5247590 - DNA, 25 bp, Homo sapien
tggcatagccccagacgacgccagc

SEQ ID NO: 5247591 - DNA, 25 bp, Homo sapien
gagcaggaatgcgggccggcgcgaa

SEQ ID NO: 5247592 - DNA, 25 bp, Homo sapien
aatgcgggccggcgcgaatcagagg

SEQ ID NO: 5247593 - DNA, 25 bp, Homo sapien
aggcagaaggacatcgaagatgcgg

SEQ ID NO: 5247594 - DNA, 25 bp, Homo sapien
tgattgctaataaggtctgggggca

SEQ ID NO: 5247595 - DNA, 25 bp, Homo sapien
atgattgctaataaggtctgggggc

SEQ ID NO: 5247596 - DNA, 25 bp, Homo sapien
gattgctaataaggtctgggggcag

SEQ ID NO: 5247597 - DNA, 25 bp, Homo sapien
gctttccttcggcctgggattccca

SEQ ID NO: 5247598 - DNA, 25 bp, Homo sapien
ctgggattcccaagaggaagtgata

SEQ ID NO: 5247599 - DNA, 25 bp, Homo sapien
tgggattcccaagaggaagtgatac

SEQ ID NO: 5247600 - DNA, 25 bp, Homo sapien
ccttcggcctgggattcccaagagg

SEQ ID NO: 5247601 - DNA, 25 bp, Homo sapien
gatcaggaacctaaggcccctgcct

SEQ ID NO: 5247602 - DNA, 25 bp, Homo sapien
gaggtgcatggccaaacagtgttta

SEQ ID NO: 5247603 - DNA, 25 bp, Homo sapien
ttttatcattaaattctgggcgaca

SEQ ID NO: 5247604 - DNA, 25 bp, Homo sapien
gcgacattcgtaggcagatcaggaa

SEQ ID NO: 5247605 - DNA, 25 bp, Homo sapien
tttcagaggttcctgttggagcctg

SEQ ID NO: 5247606 - DNA, 25 bp, Homo sapien
ctgttcctgttggaacctttcagag

SEQ ID NO: 5247607 - DNA, 25 bp, Homo sapien
tgctgttgacaggaacctttcagag

SEQ ID NO: 5247608 - DNA, 25 bp, Homo sapien
gttggagcctctcctagaggacaca

SEQ ID NO: 5247609 - DNA, 25 bp, Homo sapien
tgggaagctgggcttcagtgcctct

SEQ ID NO: 5247610 - DNA, 25 bp, Homo sapien
gagcaaagcagaagtgggggtggtg

SEQ ID NO: 5247611 - DNA, 25 bp, Homo sapien
ctgtagagcaaagcagaagtggggg

SEQ ID NO: 5247612 - DNA, 25 bp, Homo sapien
tggtgggaagctgggcttcagtgcc

SEQ ID NO: 5247613 - DNA, 25 bp, Homo sapien
tggaggacacgcgttacgatgactg

SEQ ID NO: 5247614 - DNA, 25 bp, Homo sapien
tagtaggcagctcctagagccccca

SEQ ID NO: 5247615 - DNA, 25 bp, Homo sapien
gcttggaggacacgcgttacgatga

SEQ ID NO: 5247616 - DNA, 25 bp, Homo sapien
acacgcgttacgatgactggagggt

SEQ ID NO: 5247617 - DNA, 25 bp, Homo sapien
acgacaggatcatccacaacacagg

SEQ ID NO: 5247618 - DNA, 25 bp, Homo sapien
acaggccacaggcaaacgacaggat

SEQ ID NO: 5247619 - DNA, 25 bp, Homo sapien
ctccctgagagcacctcctcaataa

SEQ ID NO: 5247620 - DNA, 25 bp, Homo sapien
taaacctgtccattcaaccccagtc

SEQ ID NO: 5247621 - DNA, 25 bp, Homo sapien
ggcttttgagatattctgaacatct

SEQ ID NO: 5247622 - DNA, 25 bp, Homo sapien
catcacctatcaactcctggggctg

SEQ ID NO: 5247623 - DNA, 25 bp, Homo sapien
tgagatattctgaacatcttctccc

SEQ ID NO: 5247624 - DNA, 25 bp, Homo sapien
ccagcgccatcacctatcaactcct

SEQ ID NO: 5247625 - DNA, 25 bp, Homo sapien
ctgtcgtcagatggttcttcactct

SEQ ID NO: 5247626 - DNA, 25 bp, Homo sapien
tgccaagggagaggttcaccaaact

SEQ ID NO: 5247627 - DNA, 25 bp, Homo sapien
gatgccaagggagaggttcaccaaa

SEQ ID NO: 5247628 - DNA, 25 bp, Homo sapien
actgtcgtcagatggttcttcactc

SEQ ID NO: 5247629 - DNA, 25 bp, Homo sapien
cccgtgtgacctggaatcctggtgg

SEQ ID NO: 5247630 - DNA, 25 bp, Homo sapien
cctcacaggtgaggcttcagcagct

SEQ ID NO: 5247631 - DNA, 25 bp, Homo sapien
agcagctgtgatccttccgtggaga

SEQ ID NO: 5247632 - DNA, 25 bp, Homo sapien
tcagcttagacaataccccgtgtga

SEQ ID NO: 5247633 - DNA, 25 bp, Homo sapien
agaggtccctttgatggaaactgga

SEQ ID NO: 5247634 - DNA, 25 bp, Homo sapien
gagaggtccctttgatggaaactgg

SEQ ID NO: 5247635 - DNA, 25 bp, Homo sapien
aagagaggtccctttgatggaaact

SEQ ID NO: 5247636 - DNA, 25 bp, Homo sapien
gaggtccctttgatggaaactggat

SEQ ID NO: 5247637 - DNA, 25 bp, Homo sapien
ctgtgactgcgggatggcctgggtg

SEQ ID NO: 5247638 - DNA, 25 bp, Homo sapien
tctgtgactgcgggatggcctgggt

SEQ ID NO: 5247639 - DNA, 25 bp, Homo sapien
tttatcagcacattaaaagcacctc

SEQ ID NO: 5247640 - DNA, 25 bp, Homo sapien
tgaggttggtttatcagcacattaa

SEQ ID NO: 5247641 - DNA, 25 bp, Homo sapien
ctgaggttggtttatcagcacatta

SEQ ID NO: 5247642 - DNA, 25 bp, Homo sapien
tggtttatcagcacattaaaagcac

SEQ ID NO: 5247643 - DNA, 25 bp, Homo sapien
caacagcagccttgggaatcttctg

SEQ ID NO: 5247644 - DNA, 25 bp, Homo sapien
caggtgagttgattctaaggccagc

SEQ ID NO: 5247645 - DNA, 25 bp, Homo sapien
gcctttattcgaggtgcagtcaccc

SEQ ID NO: 5247646 - DNA, 25 bp, Homo sapien
tatagcctagaccaagaaatgatcc

SEQ ID NO: 5247647 - DNA, 25 bp, Homo sapien
caccctggttaagatgtccctgaca

SEQ ID NO: 5247648 - DNA, 25 bp, Homo sapien
gccttggagcttgtgaatgaggcct

SEQ ID NO: 5247649 - DNA, 25 bp, Homo sapien
ttcagaaagctttccgtagagggcc

SEQ ID NO: 5247650 - DNA, 25 bp, Homo sapien
gaaaagaagaatccacttctgagac

SEQ ID NO: 5247651 - DNA, 25 bp, Homo sapien
gctttccgtagagggccaggccttg

SEQ ID NO: 5247652 - DNA, 25 bp, Homo sapien
cgcagtggagatctgctcctctgag

SEQ ID NO: 5247653 - DNA, 25 bp, Homo sapien
cctctgaggagagctgaacccagaa

SEQ ID NO: 5247654 - DNA, 25 bp, Homo sapien
gagctgaacccagaacctcttggtt

SEQ ID NO: 5247655 - DNA, 25 bp, Homo sapien
cagtggagatctgctcctctgagga

SEQ ID NO: 5247656 - DNA, 25 bp, Homo sapien
tggaaatcagaggagagtggcactg

SEQ ID NO: 5247657 - DNA, 25 bp, Homo sapien
ctggaaatcagaggagagtggcact

SEQ ID NO: 5247658 - DNA, 25 bp, Homo sapien
gcatgtccatgcaccatattttggg

SEQ ID NO: 5247659 - DNA, 25 bp, Homo sapien
cagatggcttgttcttaggacccca

SEQ ID NO: 5247660 - DNA, 25 bp, Homo sapien
accccaagcatggaacaagaagtgc

SEQ ID NO: 5247661 - DNA, 25 bp, Homo sapien
tctgggtcccaatagaggtaatgat

SEQ ID NO: 5247662 - DNA, 25 bp, Homo sapien
ctttggtatgtccacactttaggta

SEQ ID NO: 5247663 - DNA, 25 bp, Homo sapien
tatgtccacactttaggtagataaa

SEQ ID NO: 5247664 - DNA, 25 bp, Homo sapien
gagagagacaaacgatagagagtgg

SEQ ID NO: 5247665 - DNA, 25 bp, Homo sapien
tggtatgtccacactttaggtagat

SEQ ID NO: 5247666 - DNA, 25 bp, Homo sapien
tctgtttttgcctttagggatgacc

SEQ ID NO: 5247667 - DNA, 25 bp, Homo sapien
gacttcaagcctgaacctaatgttg

SEQ ID NO: 5247668 - DNA, 25 bp, Homo sapien
ctgaatagcatcgtcccccctggat

SEQ ID NO: 5247669 - DNA, 25 bp, Homo sapien
ctttgatggcgaaatcagggacttc

SEQ ID NO: 5247670 - DNA, 25 bp, Homo sapien
tcattgcagtcctcttctcagcacg

SEQ ID NO: 5247671 - DNA, 25 bp, Homo sapien
agtcattgcagtcctcttctcagca

SEQ ID NO: 5247672 - DNA, 25 bp, Homo sapien
gtcattgcagtcctcttctcagcac

SEQ ID NO: 5247673 - DNA, 25 bp, Homo sapien
cattgcagtcctcttctcagcacgt

SEQ ID NO: 5247674 - DNA, 25 bp, Homo sapien
tacactacgtatgtatttattctgg

SEQ ID NO: 5247675 - DNA, 25 bp, Homo sapien
ttacactacgtatgtatttattctg

SEQ ID NO: 5247676 - DNA, 25 bp, Homo sapien
actacgtatgtatttattctggtgt

SEQ ID NO: 5247677 - DNA, 25 bp, Homo sapien
cactacgtatgtatttattctggtg

SEQ ID NO: 5247678 - DNA, 25 bp, Homo sapien
caccaacgcctggaagggcggctcg

SEQ ID NO: 5247679 - DNA, 25 bp, Homo sapien
cgtgcgaagtcccgcagcagcgcgc

SEQ ID NO: 5247680 - DNA, 25 bp, Homo sapien
agcagcgcgcggctctgttcgcgct

SEQ ID NO: 5247681 - DNA, 25 bp, Homo sapien
tctgttcgcgctcccacagctcgcc

SEQ ID NO: 5247682 - DNA, 25 bp, Homo sapien
ggccgcgcacgtcccgcagcatctc

SEQ ID NO: 5247683 - DNA, 25 bp, Homo sapien
gcgcggcacagcacgaagaccagcg

SEQ ID NO: 5247684 - DNA, 25 bp, Homo sapien
tcggccaccagcaccccgaccagcg

SEQ ID NO: 5247685 - DNA, 25 bp, Homo sapien
acagcacgaagaccagcggcgagcg

SEQ ID NO: 5247686 - DNA, 25 bp, Homo sapien
aggcggccgcctggacggccaggca

SEQ ID NO: 5247687 - DNA, 25 bp, Homo sapien
cagccccggcgccaccgcgtcctct

SEQ ID NO: 5247688 - DNA, 25 bp, Homo sapien
cggccgcctggacggccaggcagga

SEQ ID NO: 5247689 - DNA, 25 bp, Homo sapien
gccgcctggacggccaggcaggagg

SEQ ID NO: 5247690 - DNA, 25 bp, Homo sapien
gcagggcttccaggacgagcctcca

SEQ ID NO: 5247691 - DNA, 25 bp, Homo sapien
tagagctcccgacgcatctctggct

SEQ ID NO: 5247692 - DNA, 25 bp, Homo sapien
ctgcgcagcgccctagaatttagct

SEQ ID NO: 5247693 - DNA, 25 bp, Homo sapien
gaatttagcttctggcaccgccaat

SEQ ID NO: 5247694 - DNA, 25 bp, Homo sapien
ttgtccttgcgatagccagatgcag

SEQ ID NO: 5247695 - DNA, 25 bp, Homo sapien
gatccaaccactagcgaaatcttag

SEQ ID NO: 5247696 - DNA, 25 bp, Homo sapien
cacgacctttagtcatttgcgagag

SEQ ID NO: 5247697 - DNA, 25 bp, Homo sapien
taagaattatcatcagacggtgagg

SEQ ID NO: 5247698 - DNA, 25 bp, Homo sapien
gataatagttctgcccactgcaaaa

SEQ ID NO: 5247699 - DNA, 25 bp, Homo sapien
agggcactgccaaaaggcaagcaac

SEQ ID NO: 5247700 - DNA, 25 bp, Homo sapien
gaactgggtaaaagggcactgccaa

SEQ ID NO: 5247701 - DNA, 25 bp, Homo sapien
aaagggcactgccaaaaggcaagca

SEQ ID NO: 5247702 - DNA, 25 bp, Homo sapien
cacgaactgggtaaaagggcactgc

SEQ ID NO: 5247703 - DNA, 25 bp, Homo sapien
tagcaaatcaagtgccccaacggtc

SEQ ID NO: 5247704 - DNA, 25 bp, Homo sapien
tactcaaagagctgcacgttccctc

SEQ ID NO: 5247705 - DNA, 25 bp, Homo sapien
atggttcccacttcacaagactgag

SEQ ID NO: 5247706 - DNA, 25 bp, Homo sapien
caagactgagagatttcgtttagca

SEQ ID NO: 5247707 - DNA, 25 bp, Homo sapien
agggaccccaggaaaagcaggctag

SEQ ID NO: 5247708 - DNA, 25 bp, Homo sapien
gaccccaggaaaagcaggctagcag

SEQ ID NO: 5247709 - DNA, 25 bp, Homo sapien
ccaggaaaagcaggctagcagtccg

SEQ ID NO: 5247710 - DNA, 25 bp, Homo sapien
ccccaggaaaagcaggctagcagtc

SEQ ID NO: 5247711 - DNA, 25 bp, Homo sapien
ggaaacaacctaactcgctgccagt

SEQ ID NO: 5247712 - DNA, 25 bp, Homo sapien
aaccttgtagttgtcctgatgttgc

SEQ ID NO: 5247713 - DNA, 25 bp, Homo sapien
atacagtagacaatacttgataata

SEQ ID NO: 5247714 - DNA, 25 bp, Homo sapien
tcctgtcacctagtaaccttgtagt

SEQ ID NO: 5247715 - DNA, 25 bp, Homo sapien
acagtctccattgggaaatatggct

SEQ ID NO: 5247716 - DNA, 25 bp, Homo sapien
tgtgtacgactccatcacaggcttt

SEQ ID NO: 5247717 - DNA, 25 bp, Homo sapien
ggctcagcaggagtgtgtacgactc

SEQ ID NO: 5247718 - DNA, 25 bp, Homo sapien
caaggtcatcacagtctccattggg

SEQ ID NO: 5247719 - DNA, 25 bp, Homo sapien
tctggagccagtgatctagagcccc

SEQ ID NO: 5247720 - DNA, 25 bp, Homo sapien
gcagggcaccgagcaaatagtaggc

SEQ ID NO: 5247721 - DNA, 25 bp, Homo sapien
catttggcactatcctggagagagc

SEQ ID NO: 5247722 - DNA, 25 bp, Homo sapien
tagtaagccccactgtctagctggt

SEQ ID NO: 5247723 - DNA, 25 bp, Homo sapien
tagaaagattagtacccgagagccc

SEQ ID NO: 5247724 - DNA, 25 bp, Homo sapien
gcaccgggcagacgtcttacatgag

SEQ ID NO: 5247725 - DNA, 25 bp, Homo sapien
caacgatgatgcttatggtggccac

SEQ ID NO: 5247726 - DNA, 25 bp, Homo sapien
tgagccgcagcagacttgagatgac

SEQ ID NO: 5247727 - DNA, 25 bp, Homo sapien
tttaatcccagctggtacggcaggg

SEQ ID NO: 5247728 - DNA, 25 bp, Homo sapien
tcttgtgcactaaggtttggagaca

SEQ ID NO: 5247729 - DNA, 25 bp, Homo sapien
tctggttaaacatgcatgtgcgtgc

SEQ ID NO: 5247730 - DNA, 25 bp, Homo sapien
gcaaggagccccttaggagaatgaa

SEQ ID NO: 5247731 - DNA, 25 bp, Homo sapien
ccacagtggcttcagcacccagccc

SEQ ID NO: 5247732 - DNA, 25 bp, Homo sapien
ggacaccagagagggttctcaccct

SEQ ID NO: 5247733 - DNA, 25 bp, Homo sapien
cccggtctgcatttgtggcaggagc

SEQ ID NO: 5247734 - DNA, 25 bp, Homo sapien
aacaggcagtccccggtctgcattt

SEQ ID NO: 5247735 - DNA, 25 bp, Homo sapien
tctggagccggtgatatacctggga

SEQ ID NO: 5247736 - DNA, 25 bp, Homo sapien
tctaagtgcagatgaggacagcaaa

SEQ ID NO: 5247737 - DNA, 25 bp, Homo sapien
gaaagctacctatgtgcctgcgtta

SEQ ID NO: 5247738 - DNA, 25 bp, Homo sapien
gctcagggctacaagacacagacta

SEQ ID NO: 5247739 - DNA, 25 bp, Homo sapien
gactgaggcacgaaaggatcggtaa

SEQ ID NO: 5247740 - DNA, 25 bp, Homo sapien
tctgggatgaccagcaagctctggg

SEQ ID NO: 5247741 - DNA, 25 bp, Homo sapien
caactgccgcaggaatcacaatgaa

SEQ ID NO: 5247742 - DNA, 25 bp, Homo sapien
tgcttggtcagagggaaacgcctca

SEQ ID NO: 5247743 - DNA, 25 bp, Homo sapien
gagtaactagcacagtattgggcac

SEQ ID NO: 5247744 - DNA, 25 bp, Homo sapien
gttttgagtctcaggcggcacctcc

SEQ ID NO: 5247745 - DNA, 25 bp, Homo sapien
tacctgctcgtgtctctgtcgtcaa

SEQ ID NO: 5247746 - DNA, 25 bp, Homo sapien
tcagatgatcggatgaacacccggt

SEQ ID NO: 5247747 - DNA, 25 bp, Homo sapien
gtgcgctgctcagtcagtcgcctcc

SEQ ID NO: 5247748 - DNA, 25 bp, Homo sapien
tcagttcaccgcgcctccttgctcc

SEQ ID NO: 5247749 - DNA, 25 bp, Homo sapien
tgcgctgctcagtcagtcgcctcct

SEQ ID NO: 5247750 - DNA, 25 bp, Homo sapien
ctcgcccgtcggctcgctcgccgtt

SEQ ID NO: 5247751 - DNA, 25 bp, Homo sapien
tccagctgcgcagtgtatctgtcag

SEQ ID NO: 5247752 - DNA, 25 bp, Homo sapien
gctcgccgttccagctgcgcagtgt

SEQ ID NO: 5247753 - DNA, 25 bp, Homo sapien
gcgcagtgtatctgtcagctcaggg

SEQ ID NO: 5247754 - DNA, 25 bp, Homo sapien
cttcatccagaagagaaataattcc

SEQ ID NO: 5247755 - DNA, 25 bp, Homo sapien
tcatccagaagagaaataattccag

SEQ ID NO: 5247756 - DNA, 25 bp, Homo sapien
gttcatcttcatccagaagagaaat

SEQ ID NO: 5247757 - DNA, 25 bp, Homo sapien
cttaagctgtggttcatcttcatcc

SEQ ID NO: 5247758 - DNA, 25 bp, Homo sapien
tcttttctgttttcaatcatcaaca

SEQ ID NO: 5247759 - DNA, 25 bp, Homo sapien
tttcttttctgttttcaatcatcaa

SEQ ID NO: 5247760 - DNA, 25 bp, Homo sapien
catttcttttctgttttcaatcatc

SEQ ID NO: 5247761 - DNA, 25 bp, Homo sapien
ctttttcttgagtttacacatttct

SEQ ID NO: 5247762 - DNA, 25 bp, Homo sapien
cattcaatttgtgtagtgcaaattc

SEQ ID NO: 5247763 - DNA, 25 bp, Homo sapien
ttgtctacggactcggaaatttctg

SEQ ID NO: 5247764 - DNA, 25 bp, Homo sapien
ctacggactcggaaatttctgccca

SEQ ID NO: 5247765 - DNA, 25 bp, Homo sapien
tgcattcaatttgtgtagtgcaaat

SEQ ID NO: 5247766 - DNA, 25 bp, Homo sapien
gttatcattgacattgaagaggtcc

SEQ ID NO: 5247767 - DNA, 25 bp, Homo sapien
cactaaggctgcaaactgccgactc

SEQ ID NO: 5247768 - DNA, 25 bp, Homo sapien
tgccgactccggaaaccttcatctt

SEQ ID NO: 5247769 - DNA, 25 bp, Homo sapien
taattcagagactcctcaaaagccc

SEQ ID NO: 5247770 - DNA, 25 bp, Homo sapien
gacgtccagtcttcgtgtctccaga

SEQ ID NO: 5247771 - DNA, 25 bp, Homo sapien
gactccagtatggtcttttcaaaga

SEQ ID NO: 5247772 - DNA, 25 bp, Homo sapien
tcatctagacatcgctggaacattt

SEQ ID NO: 5247773 - DNA, 25 bp, Homo sapien
gagcaatgccaatagcctgtttata

SEQ ID NO: 5247774 - DNA, 25 bp, Homo sapien
taaggctataagctaacattcctgg

SEQ ID NO: 5247775 - DNA, 25 bp, Homo sapien
tgcattaaagacatgcagagcttaa

SEQ ID NO: 5247776 - DNA, 25 bp, Homo sapien
taagctaacattcctgggacatcat

SEQ ID NO: 5247777 - DNA, 25 bp, Homo sapien
gacatgcagagcttaaggctataag

SEQ ID NO: 5247778 - DNA, 25 bp, Homo sapien
tccaagttcatgtagattttaacta

SEQ ID NO: 5247779 - DNA, 25 bp, Homo sapien
caagttcatgtagattttaactaga

SEQ ID NO: 5247780 - DNA, 25 bp, Homo sapien
ctccaagttcatgtagattttaact

SEQ ID NO: 5247781 - DNA, 25 bp, Homo sapien
ccaagttcatgtagattttaactag

SEQ ID NO: 5247782 - DNA, 25 bp, Homo sapien
tctctaagatatcactcacagcctg

SEQ ID NO: 5247783 - DNA, 25 bp, Homo sapien
gacaaaaactgctggctagcacttt

SEQ ID NO: 5247784 - DNA, 25 bp, Homo sapien
gatatgccatcaggaggttgtcttc

SEQ ID NO: 5247785 - DNA, 25 bp, Homo sapien
tcacagcctgaggatcatctaagaa

SEQ ID NO: 5247786 - DNA, 25 bp, Homo sapien
cacagaagcaataggggtgccaaca

SEQ ID NO: 5247787 - DNA, 25 bp, Homo sapien
tgatcccggaacagtacccgtatta

SEQ ID NO: 5247788 - DNA, 25 bp, Homo sapien
tctctgatcccggaacagtacccgt

SEQ ID NO: 5247789 - DNA, 25 bp, Homo sapien
taggggtgccaacagttcgaagatt

SEQ ID NO: 5247790 - DNA, 25 bp, Homo sapien
gtctttcctacaaatgcactgcttg

SEQ ID NO: 5247791 - DNA, 25 bp, Homo sapien
tcctacaaatgcactgcttgtcttt

SEQ ID NO: 5247792 - DNA, 25 bp, Homo sapien
gcttctggtgtctttcctacaaatg

SEQ ID NO: 5247793 - DNA, 25 bp, Homo sapien
tctggtgtctttcctacaaatgcac

SEQ ID NO: 5247794 - DNA, 25 bp, Homo sapien
gatatgatactagcttgatggaaga

SEQ ID NO: 5247795 - DNA, 25 bp, Homo sapien
cagtcctaaaccagtgaaattcagt

SEQ ID NO: 5247796 - DNA, 25 bp, Homo sapien
gaatacaattcatccccagctagct

SEQ ID NO: 5247797 - DNA, 25 bp, Homo sapien
gaataattactgataacacgcagga

SEQ ID NO: 5247798 - DNA, 25 bp, Homo sapien
attgtttcgtattaagaactgcaga

SEQ ID NO: 5247799 - DNA, 25 bp, Homo sapien
gaactgcagatgtaactcaatagcc

SEQ ID NO: 5247800 - DNA, 25 bp, Homo sapien
tcatgaggtctgtattattgtttcg

SEQ ID NO: 5247801 - DNA, 25 bp, Homo sapien
tcaaagtctggtccttaggctctgg

SEQ ID NO: 5247802 - DNA, 25 bp, Homo sapien
aaatcctctattattgatgaatttc

SEQ ID NO: 5247803 - DNA, 25 bp, Homo sapien
taaaatcctctattattgatgaatt

SEQ ID NO: 5247804 - DNA, 25 bp, Homo sapien
aatcctctattattgatgaatttct

SEQ ID NO: 5247805 - DNA, 25 bp, Homo sapien
ttaaaatcctctattattgatgaat

SEQ ID NO: 5247806 - DNA, 25 bp, Homo sapien
aaaagagtttgctataacggttgca

SEQ ID NO: 5247807 - DNA, 25 bp, Homo sapien
ttgcagtatgacatacagaattccg

SEQ ID NO: 5247808 - DNA, 25 bp, Homo sapien
gcagtatgacatacagaattccgta

SEQ ID NO: 5247809 - DNA, 25 bp, Homo sapien
tgctataacggttgcagtatgacat

SEQ ID NO: 5247810 - DNA, 25 bp, Homo sapien
tagtggctctggctaaccattccaa

SEQ ID NO: 5247811 - DNA, 25 bp, Homo sapien
taaattttgcccagttagtggctct

SEQ ID NO: 5247812 - DNA, 25 bp, Homo sapien
acccaaactggctgtagcagtaaat

SEQ ID NO: 5247813 - DNA, 25 bp, Homo sapien
ttatgaattacacccaaactggctg

SEQ ID NO: 5247814 - DNA, 25 bp, Homo sapien
tccaccttcctgataggctgatcct

SEQ ID NO: 5247815 - DNA, 25 bp, Homo sapien
catgattggcatgaataagacctag

SEQ ID NO: 5247816 - DNA, 25 bp, Homo sapien
tccttgggaaggtatgttgccatta

SEQ ID NO: 5247817 - DNA, 25 bp, Homo sapien
taagacctagtgcatagagacctcc

SEQ ID NO: 5247818 - DNA, 25 bp, Homo sapien
tgcatcatcctgataaaggtttgtt

SEQ ID NO: 5247819 - DNA, 25 bp, Homo sapien
aatcataaacatcttgacgtgcagt

SEQ ID NO: 5247820 - DNA, 25 bp, Homo sapien
aaggcccagactgccaccgtgtcta

SEQ ID NO: 5247821 - DNA, 25 bp, Homo sapien
cataaacatcttgacgtgcagttcc

SEQ ID NO: 5247822 - DNA, 25 bp, Homo sapien
tgccaactgcaagaccacgcagaat

SEQ ID NO: 5247823 - DNA, 25 bp, Homo sapien
aaccatgtcctcaatagcctgagca

SEQ ID NO: 5247824 - DNA, 25 bp, Homo sapien
gagtttcttgtgcataaccaaccat

SEQ ID NO: 5247825 - DNA, 25 bp, Homo sapien
tagcctgagcatttttagagcccaa

SEQ ID NO: 5247826 - DNA, 25 bp, Homo sapien
taagccatggctacagtatacattc

SEQ ID NO: 5247827 - DNA, 25 bp, Homo sapien
ttccagaccttcgaagaattgggtc

SEQ ID NO: 5247828 - DNA, 25 bp, Homo sapien
gttaccagagccacaataagccatg

SEQ ID NO: 5247829 - DNA, 25 bp, Homo sapien
caacatgtagcaggcgtcgaattgc

SEQ ID NO: 5247830 - DNA, 25 bp, Homo sapien
tcccaagaaaggtcagagtacttac

SEQ ID NO: 5247831 - DNA, 25 bp, Homo sapien
ctagacacttattgtccatctgcaa

SEQ ID NO: 5247832 - DNA, 25 bp, Homo sapien
tccatctgcaagcttttccgtccac

SEQ ID NO: 5247833 - DNA, 25 bp, Homo sapien
attcccaagaaaggtcagagtactt

SEQ ID NO: 5247834 - DNA, 25 bp, Homo sapien
ttcccagcaccacgatgataaaaac

SEQ ID NO: 5247835 - DNA, 25 bp, Homo sapien
tttcccagcaccacgatgataaaaa

SEQ ID NO: 5247836 - DNA, 25 bp, Homo sapien
cttttcccagcaccacgatgataaa

SEQ ID NO: 5247837 - DNA, 25 bp, Homo sapien
ttttcccagcaccacgatgataaaa

SEQ ID NO: 5247838 - DNA, 25 bp, Homo sapien
attcaggggcttagaagtcttcaca

SEQ ID NO: 5247839 - DNA, 25 bp, Homo sapien
ggcttagaagtcttcacagcttgac

SEQ ID NO: 5247840 - DNA, 25 bp, Homo sapien
aatagaatgaacccaagtgattcta

SEQ ID NO: 5247841 - DNA, 25 bp, Homo sapien
tgaatagaatgaacccaagtgattc

SEQ ID NO: 5247842 - DNA, 25 bp, Homo sapien
agaatgaacccaagtgattctactg

SEQ ID NO: 5247843 - DNA, 25 bp, Homo sapien
ctgaatagaatgaacccaagtgatt

SEQ ID NO: 5247844 - DNA, 25 bp, Homo sapien
caaacataatgatgagtaagatgat

SEQ ID NO: 5247845 - DNA, 25 bp, Homo sapien
agagcaagttagttatgtatagcag

SEQ ID NO: 5247846 - DNA, 25 bp, Homo sapien
agaactggcagttgtcatcaaacat

SEQ ID NO: 5247847 - DNA, 25 bp, Homo sapien
gcaagttagttatgtatagcagaac

SEQ ID NO: 5247848 - DNA, 25 bp, Homo sapien
tgtaccagagtccaatgaggctccg

SEQ ID NO: 5247849 - DNA, 25 bp, Homo sapien
tgcagaccatttccaacgaacagag

SEQ ID NO: 5247850 - DNA, 25 bp, Homo sapien
tatatcacctgcaattaccgggcca

SEQ ID NO: 5247851 - DNA, 25 bp, Homo sapien
tatgcgaagaacatccacaattggg

SEQ ID NO: 5247852 - DNA, 25 bp, Homo sapien
taatctgaagccattccttttgcaa

SEQ ID NO: 5247853 - DNA, 25 bp, Homo sapien
agcccaaaacccaggtgtcacagag

SEQ ID NO: 5247854 - DNA, 25 bp, Homo sapien
taagtactacgtctaaccctgagat

SEQ ID NO: 5247855 - DNA, 25 bp, Homo sapien
caaggatcttgctgctagttattgc

SEQ ID NO: 5247856 - DNA, 25 bp, Homo sapien
taaagtgaggctaacagggcttcat

SEQ ID NO: 5247857 - DNA, 25 bp, Homo sapien
aactatccaccagtgtttcacgaaa

SEQ ID NO: 5247858 - DNA, 25 bp, Homo sapien
tggtcaaattccaaagacacgtact

SEQ ID NO: 5247859 - DNA, 25 bp, Homo sapien
tcatagggttacttaaatcagcact

SEQ ID NO: 5247860 - DNA, 25 bp, Homo sapien
tcccagatttatggactgatgctaa

SEQ ID NO: 5247861 - DNA, 25 bp, Homo sapien
taaaaagctgcccaaaggttaagca

SEQ ID NO: 5247862 - DNA, 25 bp, Homo sapien
gacaaatagtgtaacctgacttccc

SEQ ID NO: 5247863 - DNA, 25 bp, Homo sapien
gcccaaaggttaagcaggtttcaga

SEQ ID NO: 5247864 - DNA, 25 bp, Homo sapien
attctggtacattaaaaaacatctg

SEQ ID NO: 5247865 - DNA, 25 bp, Homo sapien
cccaagctggtctcttctagactca

SEQ ID NO: 5247866 - DNA, 25 bp, Homo sapien
tattcctgaatagaaattctggtac

SEQ ID NO: 5247867 - DNA, 25 bp, Homo sapien
gccaccgcaccttgccttaaaatat

SEQ ID NO: 5247868 - DNA, 25 bp, Homo sapien
caaagtgtaactcacaactaagcag

SEQ ID NO: 5247869 - DNA, 25 bp, Homo sapien
taagtagctgttctaactagttacg

SEQ ID NO: 5247870 - DNA, 25 bp, Homo sapien
ggacttagaggctactttctactta

SEQ ID NO: 5247871 - DNA, 25 bp, Homo sapien
gctgagactcaactatccttttata

SEQ ID NO: 5247872 - DNA, 25 bp, Homo sapien
acacatcaaggggtcagctcatcca

SEQ ID NO: 5247873 - DNA, 25 bp, Homo sapien
ctcatccaaagtgcaatggacaaac

SEQ ID NO: 5247874 - DNA, 25 bp, Homo sapien
ttagacacatcaaggggtcagctca

SEQ ID NO: 5247875 - DNA, 25 bp, Homo sapien
tagacacatcaaggggtcagctcat

SEQ ID NO: 5247876 - DNA, 25 bp, Homo sapien
gggactcctttctcagtataagtga

SEQ ID NO: 5247877 - DNA, 25 bp, Homo sapien
tatatgtacagaaaggggactcctt

SEQ ID NO: 5247878 - DNA, 25 bp, Homo sapien
gaaatctgatcttcaatattcagag

SEQ ID NO: 5247879 - DNA, 25 bp, Homo sapien
agacagaagagttttaaccaagttg

SEQ ID NO: 5247880 - DNA, 25 bp, Homo sapien
ctgataagaaacagaaagcgaagcc

SEQ ID NO: 5247881 - DNA, 25 bp, Homo sapien
tgataagaaacagaaagcgaagcca

SEQ ID NO: 5247882 - DNA, 25 bp, Homo sapien
cgcacatgagggttgtaactctctg

SEQ ID NO: 5247883 - DNA, 25 bp, Homo sapien
cagcatatccccaaggccattgcag

SEQ ID NO: 5247884 - DNA, 25 bp, Homo sapien
gccattgcagctccgtagcgcacat

SEQ ID NO: 5247885 - DNA, 25 bp, Homo sapien
tttcctgtaccagcacagcatatcc

SEQ ID NO: 5247886 - DNA, 25 bp, Homo sapien
tcttaagcagctttgggcaatccag

SEQ ID NO: 5247887 - DNA, 25 bp, Homo sapien
ccagcatcgcagaatgagggagtac

SEQ ID NO: 5247888 - DNA, 25 bp, Homo sapien
tgttacataaattctgcggcgaggg

SEQ ID NO: 5247889 - DNA, 25 bp, Homo sapien
gtctggcgccaagaaagaactgacc

SEQ ID NO: 5247890 - DNA, 25 bp, Homo sapien
gaagctatgagtgccccttgcctca

SEQ ID NO: 5247891 - DNA, 25 bp, Homo sapien
ccttgcctcacgtagttcacggggt

SEQ ID NO: 5247892 - DNA, 25 bp, Homo sapien
tcacggggtcgtttgtcattggttc

SEQ ID NO: 5247893 - DNA, 25 bp, Homo sapien
gagctgaagctatgagtgccccttg

SEQ ID NO: 5247894 - DNA, 25 bp, Homo sapien
gctcgatgaggcataagacacaatg

SEQ ID NO: 5247895 - DNA, 25 bp, Homo sapien
gatatcaaacactaacaacctgagg

SEQ ID NO: 5247896 - DNA, 25 bp, Homo sapien
tctgaaattgttgtgtaagctacac

SEQ ID NO: 5247897 - DNA, 25 bp, Homo sapien
tacatggatactaaagtccctagct

SEQ ID NO: 5247898 - DNA, 25 bp, Homo sapien
ctcatttgcggtaccattttagaac

SEQ ID NO: 5247899 - DNA, 25 bp, Homo sapien
taccattttagaacagggaataata

SEQ ID NO: 5247900 - DNA, 25 bp, Homo sapien
taagtctactcatttgcggtaccat

SEQ ID NO: 5247901 - DNA, 25 bp, Homo sapien
agtctaagtctactcatttgcggta

SEQ ID NO: 5247902 - DNA, 25 bp, Homo sapien
cattgatgactttggaatacagctg

SEQ ID NO: 5247903 - DNA, 25 bp, Homo sapien
tgcatccagtatgccctgggccaga

SEQ ID NO: 5247904 - DNA, 25 bp, Homo sapien
gccatgacatcatcatgcttatcat

SEQ ID NO: 5247905 - DNA, 25 bp, Homo sapien
gaatagcgccaaacttggccatgac

SEQ ID NO: 5247906 - DNA, 25 bp, Homo sapien
aattagtgagttatccaggctctcc

SEQ ID NO: 5247907 - DNA, 25 bp, Homo sapien
gcagtctaatatgcagtccttggaa

SEQ ID NO: 5247908 - DNA, 25 bp, Homo sapien
tcactgttacccaagctcgggtgac

SEQ ID NO: 5247909 - DNA, 25 bp, Homo sapien
ctttttgcacaccatagcagaggca

SEQ ID NO: 5247910 - DNA, 25 bp, Homo sapien
ggtataagccaatgacaggaagtgt

SEQ ID NO: 5247911 - DNA, 25 bp, Homo sapien
gcatatgagtatgcccagtcctgga

SEQ ID NO: 5247912 - DNA, 25 bp, Homo sapien
gttaaggccaatgacacaggtaggg

SEQ ID NO: 5247913 - DNA, 25 bp, Homo sapien
tgggtaaatacaaggacgccaacca

SEQ ID NO: 5247914 - DNA, 25 bp, Homo sapien
gcttctaccaaagggtcatcctcct

SEQ ID NO: 5247915 - DNA, 25 bp, Homo sapien
cacttaacgaaggataactggctgt

SEQ ID NO: 5247916 - DNA, 25 bp, Homo sapien
gaacatttcaacagtgatgaccaga

SEQ ID NO: 5247917 - DNA, 25 bp, Homo sapien
tcatcagagtggtatataaagcctc

SEQ ID NO: 5247918 - DNA, 25 bp, Homo sapien
gaacaaaccaacctgcttcaatggg

SEQ ID NO: 5247919 - DNA, 25 bp, Homo sapien
gagaccaaagttttaatgcaggctg

SEQ ID NO: 5247920 - DNA, 25 bp, Homo sapien
ccttgtaagagtgtaacatgagcct

SEQ ID NO: 5247921 - DNA, 25 bp, Homo sapien
caggcatacggatacaaaaggagac

SEQ ID NO: 5247922 - DNA, 25 bp, Homo sapien
caaatgtggatggtttacagttcga

SEQ ID NO: 5247923 - DNA, 25 bp, Homo sapien
ggatggtttacagttcgatttatac

SEQ ID NO: 5247924 - DNA, 25 bp, Homo sapien
tgcaaatgtggatggtttacagttc

SEQ ID NO: 5247925 - DNA, 25 bp, Homo sapien
tacagttcgatttatactgaacttt

SEQ ID NO: 5247926 - DNA, 25 bp, Homo sapien
aaactaagcaggacatttactgaaa

SEQ ID NO: 5247927 - DNA, 25 bp, Homo sapien
aactaagcaggacatttactgaaat

SEQ ID NO: 5247928 - DNA, 25 bp, Homo sapien
actaagcaggacatttactgaaata

SEQ ID NO: 5247929 - DNA, 25 bp, Homo sapien
aaatgagcagggtaaactgttgtaa

SEQ ID NO: 5247930 - DNA, 25 bp, Homo sapien
gaactcagtcctacaacactattct

SEQ ID NO: 5247931 - DNA, 25 bp, Homo sapien
atttcctagctgtattacatatata

SEQ ID NO: 5247932 - DNA, 25 bp, Homo sapien
tacaaacatgcaagccctagagaac

SEQ ID NO: 5247933 - DNA, 25 bp, Homo sapien
ccttggcagttatagataatacagc

SEQ ID NO: 5247934 - DNA, 25 bp, Homo sapien
ggcagttatagataatacagcagta

SEQ ID NO: 5247935 - DNA, 25 bp, Homo sapien
ttatagataatacagcagtagaaac

SEQ ID NO: 5247936 - DNA, 25 bp, Homo sapien
tttagccttggcagttatagataat

SEQ ID NO: 5247937 - DNA, 25 bp, Homo sapien
ctggaagtttggctcaggttctttt

SEQ ID NO: 5247938 - DNA, 25 bp, Homo sapien
aagctgggcaggcataactcgggct

SEQ ID NO: 5247939 - DNA, 25 bp, Homo sapien
ccttaagctgggcaggcataactcg

SEQ ID NO: 5247940 - DNA, 25 bp, Homo sapien
gttaggaccttaagctgggcaggca

SEQ ID NO: 5247941 - DNA, 25 bp, Homo sapien
gaaaggctggtatctacaggtctcc

SEQ ID NO: 5247942 - DNA, 25 bp, Homo sapien
gtttgaaaggctggtatctacaggt

SEQ ID NO: 5247943 - DNA, 25 bp, Homo sapien
aaggctggtatctacaggtctccgg

SEQ ID NO: 5247944 - DNA, 25 bp, Homo sapien
gctggtatctacaggtctccggcat

SEQ ID NO: 5247945 - DNA, 25 bp, Homo sapien
tgtattccctgatttgtgtgtccac

SEQ ID NO: 5247946 - DNA, 25 bp, Homo sapien
ccatcctggtgggtagaatgtgata

SEQ ID NO: 5247947 - DNA, 25 bp, Homo sapien
gtgggaaccactgcacctgttatgg

SEQ ID NO: 5247948 - DNA, 25 bp, Homo sapien
cactattactctatgagggttccaa

SEQ ID NO: 5247949 - DNA, 25 bp, Homo sapien
tataaatccacgtgatgcaagccga

SEQ ID NO: 5247950 - DNA, 25 bp, Homo sapien
caaaagggaagtagactgtagcagc

SEQ ID NO: 5247951 - DNA, 25 bp, Homo sapien
aagccctctcccaaacatattacag

SEQ ID NO: 5247952 - DNA, 25 bp, Homo sapien
gagaataacacagatatcccgggtt

SEQ ID NO: 5247953 - DNA, 25 bp, Homo sapien
gaatagttatttcccagccatggcc

SEQ ID NO: 5247954 - DNA, 25 bp, Homo sapien
ttcctactcaagatatggtcctggg

SEQ ID NO: 5247955 - DNA, 25 bp, Homo sapien
tcaagcgtgctccacaatctagagt

SEQ ID NO: 5247956 - DNA, 25 bp, Homo sapien
gggcgtgcagaagcgtacactcata

SEQ ID NO: 5247957 - DNA, 25 bp, Homo sapien
cagctcctcaatgtcttcactggta

SEQ ID NO: 5247958 - DNA, 25 bp, Homo sapien
ccttcagaatgatgatgcctccaat

SEQ ID NO: 5247959 - DNA, 25 bp, Homo sapien
cagaatgatgatgcctccaatagag

SEQ ID NO: 5247960 - DNA, 25 bp, Homo sapien
ttcactggtatccttcagaatgatg

SEQ ID NO: 5247961 - DNA, 25 bp, Homo sapien
ggccagtgccagtccacaactataa

SEQ ID NO: 5247962 - DNA, 25 bp, Homo sapien
gccaaaaatactgtcgaaggagatg

SEQ ID NO: 5247963 - DNA, 25 bp, Homo sapien
tataactgatccacaacaagaagct

SEQ ID NO: 5247964 - DNA, 25 bp, Homo sapien
tactcaaaagtgtcacctatgggcc

SEQ ID NO: 5247965 - DNA, 25 bp, Homo sapien
caagggttttccatgaggtattgcc

SEQ ID NO: 5247966 - DNA, 25 bp, Homo sapien
ttgatgggagctaacgtgagtcacc

SEQ ID NO: 5247967 - DNA, 25 bp, Homo sapien
aatataccagtttgtgccacgacag

SEQ ID NO: 5247968 - DNA, 25 bp, Homo sapien
gatagcctacgctgtactgtgcaag

SEQ ID NO: 5247969 - DNA, 25 bp, Homo sapien
tcagtgcagaggcaacgatacatgc

SEQ ID NO: 5247970 - DNA, 25 bp, Homo sapien
taagcattcccaatatgagcctgga

SEQ ID NO: 5247971 - DNA, 25 bp, Homo sapien
tgaaaaccaagttctgtgaaagagc

SEQ ID NO: 5247972 - DNA, 25 bp, Homo sapien
catgcattgaatagcaggtctcggc

SEQ ID NO: 5247973 - DNA, 25 bp, Homo sapien
tggggaggattagatacatttatta

SEQ ID NO: 5247974 - DNA, 25 bp, Homo sapien
tgtggggaggattagatacatttat

SEQ ID NO: 5247975 - DNA, 25 bp, Homo sapien
tacatttattaaaaacccaggctga

SEQ ID NO: 5247976 - DNA, 25 bp, Homo sapien
ggtgtggggaggattagatacattt

SEQ ID NO: 5247977 - DNA, 25 bp, Homo sapien
cctggacataaaaactagcctgtgg

SEQ ID NO: 5247978 - DNA, 25 bp, Homo sapien
tgtagtggtcagaatatcaaccctg

SEQ ID NO: 5247979 - DNA, 25 bp, Homo sapien
tgtactagggctaatctactcagga

SEQ ID NO: 5247980 - DNA, 25 bp, Homo sapien
tgggatcagtaacctttagacctgg

SEQ ID NO: 5247981 - DNA, 25 bp, Homo sapien
ggtcatcggatgtgtattgatctcc

SEQ ID NO: 5247982 - DNA, 25 bp, Homo sapien
tgctggctcttgtggcccctgggct

SEQ ID NO: 5247983 - DNA, 25 bp, Homo sapien
cttcccaagagaagtggtgcgttct

SEQ ID NO: 5247984 - DNA, 25 bp, Homo sapien
tcataggcactgtttgcttgggtca

SEQ ID NO: 5247985 - DNA, 25 bp, Homo sapien
caccgtctggtcaggtcagtggtct

SEQ ID NO: 5247986 - DNA, 25 bp, Homo sapien
gaggtggccacttcccttaagaaga

SEQ ID NO: 5247987 - DNA, 25 bp, Homo sapien
tacccgttaccaggagtgccagtgg

SEQ ID NO: 5247988 - DNA, 25 bp, Homo sapien
tacagaagtttgagctaggtccggt

SEQ ID NO: 5247989 - DNA, 25 bp, Homo sapien
gttaaggcgggtggtcccagaggca

SEQ ID NO: 5247990 - DNA, 25 bp, Homo sapien
ctggcaggttggttaaggcgggtgg

SEQ ID NO: 5247991 - DNA, 25 bp, Homo sapien
aaggcgggtggtcccagaggcagtc

SEQ ID NO: 5247992 - DNA, 25 bp, Homo sapien
cctggcaggttggttaaggcgggtg

SEQ ID NO: 5247993 - DNA, 25 bp, Homo sapien
tgtggcctgctacacacagttcatg

SEQ ID NO: 5247994 - DNA, 25 bp, Homo sapien
tcctctgtggcctgctacacacagt

SEQ ID NO: 5247995 - DNA, 25 bp, Homo sapien
gtggcctgctacacacagttcatga

SEQ ID NO: 5247996 - DNA, 25 bp, Homo sapien
tctgtggcctgctacacacagttca

SEQ ID NO: 5247997 - DNA, 25 bp, Homo sapien
gcggacactcgcgctatcccagccc

SEQ ID NO: 5247998 - DNA, 25 bp, Homo sapien
ctgctgctcggccgcggacactcgc

SEQ ID NO: 5247999 - DNA, 25 bp, Homo sapien
ggacactcgcgctatcccagcccgg

SEQ ID NO: 5248000 - DNA, 25 bp, Homo sapien
cactcgcgctatcccagcccggccg

SEQ ID NO: 5248001 - DNA, 25 bp, Homo sapien
acaagaggtccgcagagcctcggcc

SEQ ID NO: 5248002 - DNA, 25 bp, Homo sapien
ggcccttgccgaagaaagatccctg

SEQ ID NO: 5248003 - DNA, 25 bp, Homo sapien
cgcctcggcccttgccgaagaaaga

SEQ ID NO: 5248004 - DNA, 25 bp, Homo sapien
ccgcaggcgagaagtggtagcatcc

SEQ ID NO: 5248005 - DNA, 25 bp, Homo sapien
cagctggatggcttgagggaccccc

SEQ ID NO: 5248006 - DNA, 25 bp, Homo sapien
cactgcagcaaagatcagggactac

SEQ ID NO: 5248007 - DNA, 25 bp, Homo sapien
tgagggaccccctccaagtatggcc

SEQ ID NO: 5248008 - DNA, 25 bp, Homo sapien
atggcccactgcagcaaagatcagg

SEQ ID NO: 5248009 - DNA, 25 bp, Homo sapien
tcagggggatctaaatcccggataa

SEQ ID NO: 5248010 - DNA, 25 bp, Homo sapien
aaaacagtacaaccacgatgggaca

SEQ ID NO: 5248011 - DNA, 25 bp, Homo sapien
gaacacacataaggcggctgcagag

SEQ ID NO: 5248012 - DNA, 25 bp, Homo sapien
cgatgggacactggaactaatcagg

SEQ ID NO: 5248013 - DNA, 25 bp, Homo sapien
gaatcagtctgcacagttttgcagc

SEQ ID NO: 5248014 - DNA, 25 bp, Homo sapien
gggcctacagagtgtgccactatgc

SEQ ID NO: 5248015 - DNA, 25 bp, Homo sapien
tgtgccactatgccccaagtctttt

SEQ ID NO: 5248016 - DNA, 25 bp, Homo sapien
gagtctcgctgttgttgcttgggct

SEQ ID NO: 5248017 - DNA, 25 bp, Homo sapien
cactatgccccaagtcttttgtttt

SEQ ID NO: 5248018 - DNA, 25 bp, Homo sapien
taagtggcttggacattaggctgac

SEQ ID NO: 5248019 - DNA, 25 bp, Homo sapien
gctttgttagtgcacaggcctcagg

SEQ ID NO: 5248020 - DNA, 25 bp, Homo sapien
cagtacaggctcaaaaacatggacg

SEQ ID NO: 5248021 - DNA, 25 bp, Homo sapien
caggtgggccttacagagctggtaa

SEQ ID NO: 5248022 - DNA, 25 bp, Homo sapien
cagaaatgatccagcactgcagaca

SEQ ID NO: 5248023 - DNA, 25 bp, Homo sapien
gaaagactcaacagccactgcaggc

SEQ ID NO: 5248024 - DNA, 25 bp, Homo sapien
gcataaggcaaggaatagatcctcc

SEQ ID NO: 5248025 - DNA, 25 bp, Homo sapien
gaatacgtgaggttacacggcaagg

SEQ ID NO: 5248026 - DNA, 25 bp, Homo sapien
ttactggtaattaattctcacagca

SEQ ID NO: 5248027 - DNA, 25 bp, Homo sapien
tgttactggtaattaattctcacag

SEQ ID NO: 5248028 - DNA, 25 bp, Homo sapien
gttactggtaattaattctcacagc

SEQ ID NO: 5248029 - DNA, 25 bp, Homo sapien
actgttactggtaattaattctcac

SEQ ID NO: 5248030 - DNA, 25 bp, Homo sapien
agtccaagtaattcagattcatgag

SEQ ID NO: 5248031 - DNA, 25 bp, Homo sapien
tagtccaagtaattcagattcatga

SEQ ID NO: 5248032 - DNA, 25 bp, Homo sapien
ctagtccaagtaattcagattcatg

SEQ ID NO: 5248033 - DNA, 25 bp, Homo sapien
tccaagtaattcagattcatgagcc

SEQ ID NO: 5248034 - DNA, 25 bp, Homo sapien
aaacacaagttttcaagatctgttt

SEQ ID NO: 5248035 - DNA, 25 bp, Homo sapien
ccaacataacaatagaagaaacatt

SEQ ID NO: 5248036 - DNA, 25 bp, Homo sapien
tccaacataacaatagaagaaacat

SEQ ID NO: 5248037 - DNA, 25 bp, Homo sapien
aacataacaatagaagaaacattac

SEQ ID NO: 5248038 - DNA, 25 bp, Homo sapien
ttggagtctctgaaagatccgccta

SEQ ID NO: 5248039 - DNA, 25 bp, Homo sapien
attgtcaatgatttggagtctctga

SEQ ID NO: 5248040 - DNA, 25 bp, Homo sapien
gtctctgaaagatccgcctactgtt

SEQ ID NO: 5248041 - DNA, 25 bp, Homo sapien
aaagatccgcctactgttttacaca

SEQ ID NO: 5248042 - DNA, 25 bp, Homo sapien
tatgttctgaacatatcgttctagg

SEQ ID NO: 5248043 - DNA, 25 bp, Homo sapien
ctgaacatatcgttctaggtgtggg

SEQ ID NO: 5248044 - DNA, 25 bp, Homo sapien
aagagtctgtgttgacaggaagcag

SEQ ID NO: 5248045 - DNA, 25 bp, Homo sapien
tgttctgaacatatcgttctaggtg

SEQ ID NO: 5248046 - DNA, 25 bp, Homo sapien
gactgccacaaaggtgaagggatcc

SEQ ID NO: 5248047 - DNA, 25 bp, Homo sapien
tgcatgcttgttaatgactgccaca

SEQ ID NO: 5248048 - DNA, 25 bp, Homo sapien
acctgcatgcttgttaatgactgcc

SEQ ID NO: 5248049 - DNA, 25 bp, Homo sapien
cagagacctgcatgcttgttaatga

SEQ ID NO: 5248050 - DNA, 25 bp, Homo sapien
aactgcaacagcgtttctgagattg

SEQ ID NO: 5248051 - DNA, 25 bp, Homo sapien
gcaacagcgtttctgagattggatt

SEQ ID NO: 5248052 - DNA, 25 bp, Homo sapien
attttacgctcaactgcaacagcgt

SEQ ID NO: 5248053 - DNA, 25 bp, Homo sapien
cgtttctgagattggattttctaca

SEQ ID NO: 5248054 - DNA, 25 bp, Homo sapien
cagctgcagcgacagagaaggctgg

SEQ ID NO: 5248055 - DNA, 25 bp, Homo sapien
ataaggtgactgtccacgcctgcca

SEQ ID NO: 5248056 - DNA, 25 bp, Homo sapien
ggctcagtgccgtttgaccacagag

SEQ ID NO: 5248057 - DNA, 25 bp, Homo sapien
aggagcaccggctcagtgccgtttg

SEQ ID NO: 5248058 - DNA, 25 bp, Homo sapien
caggcatggaaggttgctgacagca

SEQ ID NO: 5248059 - DNA, 25 bp, Homo sapien
aggcatggaaggttgctgacagcat

SEQ ID NO: 5248060 - DNA, 25 bp, Homo sapien
cacaggcatggaaggttgctgacag

SEQ ID NO: 5248061 - DNA, 25 bp, Homo sapien
ctcacaggcatggaaggttgctgac

SEQ ID NO: 5248062 - DNA, 25 bp, Homo sapien
catacctcgttgtaaatttcaacac

SEQ ID NO: 5248063 - DNA, 25 bp, Homo sapien
gacatcagactacatacctcgttgt

SEQ ID NO: 5248064 - DNA, 25 bp, Homo sapien
aacaccacagatctcccatatactc

SEQ ID NO: 5248065 - DNA, 25 bp, Homo sapien
ctgtggagaagacatcagactacat

SEQ ID NO: 5248066 - DNA, 25 bp, Homo sapien
ccatctcggatggaacttgaaatgt

SEQ ID NO: 5248067 - DNA, 25 bp, Homo sapien
cacagatcgaagaacaccttctggt

SEQ ID NO: 5248068 - DNA, 25 bp, Homo sapien
ttgtcaaatgcagcgacaagatcct

SEQ ID NO: 5248069 - DNA, 25 bp, Homo sapien
cagcttctgggcaaaggagtcccca

SEQ ID NO: 5248070 - DNA, 25 bp, Homo sapien
tatgaaatccatgcccatgtggaca

SEQ ID NO: 5248071 - DNA, 25 bp, Homo sapien
gagaggatgcctgtacctcgtaagc

SEQ ID NO: 5248072 - DNA, 25 bp, Homo sapien
tagaaaatcactcaccaggagagag

SEQ ID NO: 5248073 - DNA, 25 bp, Homo sapien
cctcgtaagcattatgacagcacag

SEQ ID NO: 5248074 - DNA, 25 bp, Homo sapien
gggtgcaccatagggttgggaacaa

SEQ ID NO: 5248075 - DNA, 25 bp, Homo sapien
tgcaccatagggttgggaacaaaag

SEQ ID NO: 5248076 - DNA, 25 bp, Homo sapien
tctccaggtaggttttgaagtagga

SEQ ID NO: 5248077 - DNA, 25 bp, Homo sapien
tgaggggtgcaccatagggttggga

SEQ ID NO: 5248078 - DNA, 25 bp, Homo sapien
ccatgcccgaccagagagttcttat

SEQ ID NO: 5248079 - DNA, 25 bp, Homo sapien
gataactttgtttataaggtgtgtg

SEQ ID NO: 5248080 - DNA, 25 bp, Homo sapien
tccctgatactgcatgataactttg

SEQ ID NO: 5248081 - DNA, 25 bp, Homo sapien
tcttgagtagctgggtcgagggtca

SEQ ID NO: 5248082 - DNA, 25 bp, Homo sapien
tgttaaaagctttggcgtgttgctg

SEQ ID NO: 5248083 - DNA, 25 bp, Homo sapien
ttcaactttaactctggagtccagg

SEQ ID NO: 5248084 - DNA, 25 bp, Homo sapien
gctggctttagatattaaagctaga

SEQ ID NO: 5248085 - DNA, 25 bp, Homo sapien
gctagaaactttatcaacttcaact

SEQ ID NO: 5248086 - DNA, 25 bp, Homo sapien
aggccctgcctagtctctgagtttg

SEQ ID NO: 5248087 - DNA, 25 bp, Homo sapien
ctccagtttggctaagagaattaca

SEQ ID NO: 5248088 - DNA, 25 bp, Homo sapien
caaaggctccttattccttatagga

SEQ ID NO: 5248089 - DNA, 25 bp, Homo sapien
tgtctatgccaatactctgctccag

SEQ ID NO: 5248090 - DNA, 25 bp, Homo sapien
ctgggatgaaaaagaagttcaggaa

SEQ ID NO: 5248091 - DNA, 25 bp, Homo sapien
aaacaggcattcagggaacggtact

SEQ ID NO: 5248092 - DNA, 25 bp, Homo sapien
aggaaaacaggcattcagggaacgg

SEQ ID NO: 5248093 - DNA, 25 bp, Homo sapien
caggcattcagggaacggtacttgg

SEQ ID NO: 5248094 - DNA, 25 bp, Homo sapien
ctttgttactttgtccattctcctt

SEQ ID NO: 5248095 - DNA, 25 bp, Homo sapien
tcctgcgacccttggagcagtccag

SEQ ID NO: 5248096 - DNA, 25 bp, Homo sapien
gagcagtccaggttgatcccatggg

SEQ ID NO: 5248097 - DNA, 25 bp, Homo sapien
agctccaagactcagggtgctcctg

SEQ ID NO: 5248098 - DNA, 25 bp, Homo sapien
ggttgatcccatggggccgtatctg

SEQ ID NO: 5248099 - DNA, 25 bp, Homo sapien
cctgatccaagtactgtacaatatt

SEQ ID NO: 5248100 - DNA, 25 bp, Homo sapien
tattgtcctgatccaagtactgtac

SEQ ID NO: 5248101 - DNA, 25 bp, Homo sapien
attgtcctgatccaagtactgtaca

SEQ ID NO: 5248102 - DNA, 25 bp, Homo sapien
tgtcctgatccaagtactgtacaat

SEQ ID NO: 5248103 - DNA, 25 bp, Homo sapien
catcttgccgctgactgtggcctct

SEQ ID NO: 5248104 - DNA, 25 bp, Homo sapien
tgacctacgttcagcttcaaccagc

SEQ ID NO: 5248105 - DNA, 25 bp, Homo sapien
tccaatgagattgtggtagtcggcc

SEQ ID NO: 5248106 - DNA, 25 bp, Homo sapien
tattgtaccgtttgaggtatgtcac

SEQ ID NO: 5248107 - DNA, 25 bp, Homo sapien
ggttactgaacaggcggacacagac

SEQ ID NO: 5248108 - DNA, 25 bp, Homo sapien
tgaagtccacactatgcgccaggct

SEQ ID NO: 5248109 - DNA, 25 bp, Homo sapien
acagacgctctggaggtactcaggg

SEQ ID NO: 5248110 - DNA, 25 bp, Homo sapien
ggctctgccgcatctggttactgaa

SEQ ID NO: 5248111 - DNA, 25 bp, Homo sapien
ggatagaccacgggcaccctgccct

SEQ ID NO: 5248112 - DNA, 25 bp, Homo sapien
ggggatagaccacgggcaccctgcc

SEQ ID NO: 5248113 - DNA, 25 bp, Homo sapien
gggggatagaccacgggcaccctgc

SEQ ID NO: 5248114 - DNA, 25 bp, Homo sapien
tcattccaaatctatacagctggct

SEQ ID NO: 5248115 - DNA, 25 bp, Homo sapien
cattccaaatctatacagctggctt

SEQ ID NO: 5248116 - DNA, 25 bp, Homo sapien
agactgtcatccaggaacagcctag

SEQ ID NO: 5248117 - DNA, 25 bp, Homo sapien
tagcactgcgttccctgcaaacgaa

SEQ ID NO: 5248118 - DNA, 25 bp, Homo sapien
ggtgaaaccccgacagcagactgtc

SEQ ID NO: 5248119 - DNA, 25 bp, Homo sapien
tgcaaacgaacacacccgcgtgact

SEQ ID NO: 5248120 - DNA, 25 bp, Homo sapien
catttgcgggcacaggctttggaaa

SEQ ID NO: 5248121 - DNA, 25 bp, Homo sapien
gggcagggaaatcctgcgggatggg

SEQ ID NO: 5248122 - DNA, 25 bp, Homo sapien
atgggcatttgcgggcacaggcttt

SEQ ID NO: 5248123 - DNA, 25 bp, Homo sapien
aaatcctgcgggatgggcatttgcg

SEQ ID NO: 5248124 - DNA, 25 bp, Homo sapien
tctcctgtgtactgctgtgctggga

SEQ ID NO: 5248125 - DNA, 25 bp, Homo sapien
tgtgctgggaatctcactggatggc

SEQ ID NO: 5248126 - DNA, 25 bp, Homo sapien
ggtagcagttctcccgcgggacttc

SEQ ID NO: 5248127 - DNA, 25 bp, Homo sapien
caagcttattaactcccaggctgtt

SEQ ID NO: 5248128 - DNA, 25 bp, Homo sapien
gagagccggtcctgcccaggacctt

SEQ ID NO: 5248129 - DNA, 25 bp, Homo sapien
attgcggatgatggatcggctcgtg

SEQ ID NO: 5248130 - DNA, 25 bp, Homo sapien
tcggctcgtgtcgtccatgaattcc

SEQ ID NO: 5248131 - DNA, 25 bp, Homo sapien
atgatggatcggctcgtgtcgtcca

SEQ ID NO: 5248132 - DNA, 25 bp, Homo sapien
aaagggtgagcacgtcgccctcgcg

SEQ ID NO: 5248133 - DNA, 25 bp, Homo sapien
ttctcgctctgactccaaaagggtg

SEQ ID NO: 5248134 - DNA, 25 bp, Homo sapien
aagggtgagcacgtcgccctcgcgc

SEQ ID NO: 5248135 - DNA, 25 bp, Homo sapien
cattcccatcggccaagtggtcgaa

SEQ ID NO: 5248136 - DNA, 25 bp, Homo sapien
attcccatcggccaagtggtcgaac

SEQ ID NO: 5248137 - DNA, 25 bp, Homo sapien
ttcccatcggccaagtggtcgaacc

SEQ ID NO: 5248138 - DNA, 25 bp, Homo sapien
tgccaaggaggctcgtaacatggtg

SEQ ID NO: 5248139 - DNA, 25 bp, Homo sapien
ggtgccaaggaggctcgtaacatgg

SEQ ID NO: 5248140 - DNA, 25 bp, Homo sapien
ccaaggaggctcgtaacatggtgga

SEQ ID NO: 5248141 - DNA, 25 bp, Homo sapien
caaggaggctcgtaacatggtggat

SEQ ID NO: 5248142 - DNA, 25 bp, Homo sapien
cagcgcagagcctgcaacaagaagg

SEQ ID NO: 5248143 - DNA, 25 bp, Homo sapien
cataatccaaggagggcagtaatgg

SEQ ID NO: 5248144 - DNA, 25 bp, Homo sapien
gaaggctttcaagcggtcactcccc

SEQ ID NO: 5248145 - DNA, 25 bp, Homo sapien
ttctcataatccaaggagggcagta

SEQ ID NO: 5248146 - DNA, 25 bp, Homo sapien
cactgaggttgaagcaggggcaaaa

SEQ ID NO: 5248147 - DNA, 25 bp, Homo sapien
tccgttgagttcactgaggttgaag

SEQ ID NO: 5248148 - DNA, 25 bp, Homo sapien
ccttccgttgagttcactgaggttg

SEQ ID NO: 5248149 - DNA, 25 bp, Homo sapien
actgaggttgaagcaggggcaaaaa

SEQ ID NO: 5248150 - DNA, 25 bp, Homo sapien
taggcttgcagaacggtctccctct

SEQ ID NO: 5248151 - DNA, 25 bp, Homo sapien
tataacagtccaagaggtcattgct

SEQ ID NO: 5248152 - DNA, 25 bp, Homo sapien
ctggttgtggctataacagtccaag

SEQ ID NO: 5248153 - DNA, 25 bp, Homo sapien
aggtcattgctgatgtaggcttgca

SEQ ID NO: 5248154 - DNA, 25 bp, Homo sapien
cgggtctggtagttctcttcctctg

SEQ ID NO: 5248155 - DNA, 25 bp, Homo sapien
tgagacttggcaaaaataagttagt

SEQ ID NO: 5248156 - DNA, 25 bp, Homo sapien
caaggttaagaacacggagagataa

SEQ ID NO: 5248157 - DNA, 25 bp, Homo sapien
ggagagataaacacacgcctcctct

SEQ ID NO: 5248158 - DNA, 25 bp, Homo sapien
ctggccatgtactgccgcaccacgt

SEQ ID NO: 5248159 - DNA, 25 bp, Homo sapien
accacgtcgctcgtggagtgcagca

SEQ ID NO: 5248160 - DNA, 25 bp, Homo sapien
cagtgacgcaaaagcattgatgagc

SEQ ID NO: 5248161 - DNA, 25 bp, Homo sapien
ctgccagtgacgcaaaagcattgat

SEQ ID NO: 5248162 - DNA, 25 bp, Homo sapien
ggtgatgatatccttgtcctcctcc

SEQ ID NO: 5248163 - DNA, 25 bp, Homo sapien
cctggtgatgatatccttgtcctcc

SEQ ID NO: 5248164 - DNA, 25 bp, Homo sapien
tccctggtgatgatatccttgtcct

SEQ ID NO: 5248165 - DNA, 25 bp, Homo sapien
tctccctggtgatgatatccttgtc

SEQ ID NO: 5248166 - DNA, 25 bp, Homo sapien
tcagaacatcaaccagccagaagat

SEQ ID NO: 5248167 - DNA, 25 bp, Homo sapien
tactccagcgtgtagtcagacaggc

SEQ ID NO: 5248168 - DNA, 25 bp, Homo sapien
gatgaggccgtcttgaatcatcgct

SEQ ID NO: 5248169 - DNA, 25 bp, Homo sapien
caggcagtcagggtccttcagaaca

SEQ ID NO: 5248170 - DNA, 25 bp, Homo sapien
aggactttgagcacgaggcctgcca

SEQ ID NO: 5248171 - DNA, 25 bp, Homo sapien
gaagatccgaaaggactttgagcac

SEQ ID NO: 5248172 - DNA, 25 bp, Homo sapien
tggccaagaagatccgaaaggactt

SEQ ID NO: 5248173 - DNA, 25 bp, Homo sapien
gagcacgaggcctgccaccttggca

SEQ ID NO: 5248174 - DNA, 25 bp, Homo sapien
ttcctcacgaatggatggaacagaa

SEQ ID NO: 5248175 - DNA, 25 bp, Homo sapien
gagctccattcacatacggctgtat

SEQ ID NO: 5248176 - DNA, 25 bp, Homo sapien
gctcttgcttcctcacgaatggatg

SEQ ID NO: 5248177 - DNA, 25 bp, Homo sapien
cagaaaggatgctgtacagagctcc

SEQ ID NO: 5248178 - DNA, 25 bp, Homo sapien
tagaagtattggcgaaagtaatagt

SEQ ID NO: 5248179 - DNA, 25 bp, Homo sapien
ctagaagtattggcgaaagtaatag

SEQ ID NO: 5248180 - DNA, 25 bp, Homo sapien
gaagtattggcgaaagtaatagtta

SEQ ID NO: 5248181 - DNA, 25 bp, Homo sapien
agaagtattggcgaaagtaatagtt

SEQ ID NO: 5248182 - DNA, 25 bp, Homo sapien
gctgcttgatgatgaattctatctg

SEQ ID NO: 5248183 - DNA, 25 bp, Homo sapien
tatctggcggatcatttcagcattg

SEQ ID NO: 5248184 - DNA, 25 bp, Homo sapien
agcagcgtaggatgtcttccattcc

SEQ ID NO: 5248185 - DNA, 25 bp, Homo sapien
ctttgatgaagcagcgtaggatgtc

SEQ ID NO: 5248186 - DNA, 25 bp, Homo sapien
tagatcaaagattcttgcatcaaac

SEQ ID NO: 5248187 - DNA, 25 bp, Homo sapien
tgccatgtgtctttctggcaaatgt

SEQ ID NO: 5248188 - DNA, 25 bp, Homo sapien
gatagatcaaagattcttgcatcaa

SEQ ID NO: 5248189 - DNA, 25 bp, Homo sapien
catgtgtctttctggcaaatgtgaa

SEQ ID NO: 5248190 - DNA, 25 bp, Homo sapien
ttttgatcgggagccccttggacac

SEQ ID NO: 5248191 - DNA, 25 bp, Homo sapien
gctgttccatacaacccaaagaaga

SEQ ID NO: 5248192 - DNA, 25 bp, Homo sapien
agactgtgaaccctgagctagaaga

SEQ ID NO: 5248193 - DNA, 25 bp, Homo sapien
gagagagactcagtgacaaacctgg

SEQ ID NO: 5248194 - DNA, 25 bp, Homo sapien
tggacttggacgtgtgaaaacccac

SEQ ID NO: 5248195 - DNA, 25 bp, Homo sapien
gaactgatacactagcaacaatttg

SEQ ID NO: 5248196 - DNA, 25 bp, Homo sapien
tcccgaggtacttgtgtgtctggtc

SEQ ID NO: 5248197 - DNA, 25 bp, Homo sapien
ctgttggcagctcacccggcgttgt

SEQ ID NO: 5248198 - DNA, 25 bp, Homo sapien
gaggtgcccgcactccgatatctaa

SEQ ID NO: 5248199 - DNA, 25 bp, Homo sapien
gaagtgccttgtagacctcagctcc

SEQ ID NO: 5248200 - DNA, 25 bp, Homo sapien
gaagtgctgctgtactcatcagtta

SEQ ID NO: 5248201 - DNA, 25 bp, Homo sapien
tgtctctctggtgctggttcccctc

SEQ ID NO: 5248202 - DNA, 25 bp, Homo sapien
cacgggtcgcagcactgttgtggaa

SEQ ID NO: 5248203 - DNA, 25 bp, Homo sapien
gataaacagtgggagccttggtcca

SEQ ID NO: 5248204 - DNA, 25 bp, Homo sapien
caggcagctgagattcaagccgagt

SEQ ID NO: 5248205 - DNA, 25 bp, Homo sapien
tcagggttgtcggtaggacctcaca

SEQ ID NO: 5248206 - DNA, 25 bp, Homo sapien
attcaagaacaccatctggtagctc

SEQ ID NO: 5248207 - DNA, 25 bp, Homo sapien
tctgcactgctggacaaggcaggaa

SEQ ID NO: 5248208 - DNA, 25 bp, Homo sapien
ctctgcactgctggacaaggcagga

SEQ ID NO: 5248209 - DNA, 25 bp, Homo sapien
tcctattccccccttgcagtttata

SEQ ID NO: 5248210 - DNA, 25 bp, Homo sapien
tttataatgtcagcaaagagggcgt

SEQ ID NO: 5248211 - DNA, 25 bp, Homo sapien
aaagagggcgtacatgtccacacct

SEQ ID NO: 5248212 - DNA, 25 bp, Homo sapien
tgtcagcaaagagggcgtacatgtc

SEQ ID NO: 5248213 - DNA, 25 bp, Homo sapien
ttagcacaaaccaaggcagcgatct

SEQ ID NO: 5248214 - DNA, 25 bp, Homo sapien
taaagcggatggttatcttcaggaa

SEQ ID NO: 5248215 - DNA, 25 bp, Homo sapien
gatagagtttcatttaaggctgtcc

SEQ ID NO: 5248216 - DNA, 25 bp, Homo sapien
caatgatgggtaaaaccactggtgc

SEQ ID NO: 5248217 - DNA, 25 bp, Homo sapien
gagcacacgagcagtgttgcagaaa

SEQ ID NO: 5248218 - DNA, 25 bp, Homo sapien
cagccagggtctgagagcacacgag

SEQ ID NO: 5248219 - DNA, 25 bp, Homo sapien
attgacttggttaaataatggaaag

SEQ ID NO: 5248220 - DNA, 25 bp, Homo sapien
cttgttttgagccatcggatgtcta

SEQ ID NO: 5248221 - DNA, 25 bp, Homo sapien
catctttgaataccaagtgatagtg

SEQ ID NO: 5248222 - DNA, 25 bp, Homo sapien
tattcccaaattccgtgataacagg

SEQ ID NO: 5248223 - DNA, 25 bp, Homo sapien
gataacaggaaaaactcatcactgc

SEQ ID NO: 5248224 - DNA, 25 bp, Homo sapien
catatttctagacccagacgctaag

SEQ ID NO: 5248225 - DNA, 25 bp, Homo sapien
gattctcactcctcagcctccaggg

SEQ ID NO: 5248226 - DNA, 25 bp, Homo sapien
acccaggctagagtgtagtggcacg

SEQ ID NO: 5248227 - DNA, 25 bp, Homo sapien
tttggcgatggagtcttactttgtc

SEQ ID NO: 5248228 - DNA, 25 bp, Homo sapien
atctcggctcactgagaactccacc

SEQ ID NO: 5248229 - DNA, 25 bp, Homo sapien
ttcaacatctaggtgtgagctgcag

SEQ ID NO: 5248230 - DNA, 25 bp, Homo sapien
cactcaagggcatataaggacacga

SEQ ID NO: 5248231 - DNA, 25 bp, Homo sapien
catacagcagctaagtgggtgaact

SEQ ID NO: 5248232 - DNA, 25 bp, Homo sapien
tagacagggtcttaatgagtgaggc

SEQ ID NO: 5248233 - DNA, 25 bp, Homo sapien
cctctgaatagctagggttataggc

SEQ ID NO: 5248234 - DNA, 25 bp, Homo sapien
gcctctgaatagctagggttatagg

SEQ ID NO: 5248235 - DNA, 25 bp, Homo sapien
tatttagttagttatctatttagag

SEQ ID NO: 5248236 - DNA, 25 bp, Homo sapien
agcctctgaatagctagggttatag

SEQ ID NO: 5248237 - DNA, 25 bp, Homo sapien
ctgtttcaggagacatggggtgaat

SEQ ID NO: 5248238 - DNA, 25 bp, Homo sapien
gtttcaggagacatggggtgaatgc

SEQ ID NO: 5248239 - DNA, 25 bp, Homo sapien
ttcaggagacatggggtgaatgcca

SEQ ID NO: 5248240 - DNA, 25 bp, Homo sapien
tcaggagacatggggtgaatgccat

SEQ ID NO: 5248241 - DNA, 25 bp, Homo sapien
ggctggatcagttcgtctttgtcca

SEQ ID NO: 5248242 - DNA, 25 bp, Homo sapien
tcagttcgtctttgtccagatcggc

SEQ ID NO: 5248243 - DNA, 25 bp, Homo sapien
cgtctttgtccagatcggcttccat

SEQ ID NO: 5248244 - DNA, 25 bp, Homo sapien
tggatcagttcgtctttgtccagat

SEQ ID NO: 5248245 - DNA, 25 bp, Homo sapien
tgacaacggccagcgctgctgcaag

SEQ ID NO: 5248246 - DNA, 25 bp, Homo sapien
ctgacaacggccagcgctgctgcaa

SEQ ID NO: 5248247 - DNA, 25 bp, Homo sapien
ccagcgctgctgcaaggcggcccgg

SEQ ID NO: 5248248 - DNA, 25 bp, Homo sapien
cggccagcgctgctgcaaggcggcc

SEQ ID NO: 5248249 - DNA, 25 bp, Homo sapien
aaaagatttacagggcattaccatg

SEQ ID NO: 5248250 - DNA, 25 bp, Homo sapien
taaaaagatttacagggcattacca

SEQ ID NO: 5248251 - DNA, 25 bp, Homo sapien
agatttacagggcattaccatgaac

SEQ ID NO: 5248252 - DNA, 25 bp, Homo sapien
atttacagggcattaccatgaacta

SEQ ID NO: 5248253 - DNA, 25 bp, Homo sapien
ttaataacaaaacgggtcatgcaca

SEQ ID NO: 5248254 - DNA, 25 bp, Homo sapien
atttaataacaaaacgggtcatgca

SEQ ID NO: 5248255 - DNA, 25 bp, Homo sapien
acaaaacgggtcatgcacagtggct

SEQ ID NO: 5248256 - DNA, 25 bp, Homo sapien
ataacaaaacgggtcatgcacagtg

SEQ ID NO: 5248257 - DNA, 25 bp, Homo sapien
catcatatgatcaagaggcaacagg

SEQ ID NO: 5248258 - DNA, 25 bp, Homo sapien
taatctgtagagacgggccttccta

SEQ ID NO: 5248259 - DNA, 25 bp, Homo sapien
caacaggcatgtgaatgaagacatc

SEQ ID NO: 5248260 - DNA, 25 bp, Homo sapien
tcaaggcagaattaccagagctaat

SEQ ID NO: 5248261 - DNA, 25 bp, Homo sapien
tgctaacggtttgtgtatcacacca

SEQ ID NO: 5248262 - DNA, 25 bp, Homo sapien
tagagagctgacctagaagtcaagc

SEQ ID NO: 5248263 - DNA, 25 bp, Homo sapien
aatacgaacatttccacatgcgcag

SEQ ID NO: 5248264 - DNA, 25 bp, Homo sapien
aaagcggttgatctactggaactca

SEQ ID NO: 5248265 - DNA, 25 bp, Homo sapien
cgccgggggtgacgggcctttgcag

SEQ ID NO: 5248266 - DNA, 25 bp, Homo sapien
tccactgcacattagccagcccctt

SEQ ID NO: 5248267 - DNA, 25 bp, Homo sapien
aggggctcatccccgctccactgca

SEQ ID NO: 5248268 - DNA, 25 bp, Homo sapien
cttccgccttgtcttccccgtgttg

SEQ ID NO: 5248269 - DNA, 25 bp, Homo sapien
aagcttaagaaagtcaattcccgct

SEQ ID NO: 5248270 - DNA, 25 bp, Homo sapien
tcaattcccgcttcctttagccctg

SEQ ID NO: 5248271 - DNA, 25 bp, Homo sapien
caaagcttaagaaagtcaattcccg

SEQ ID NO: 5248272 - DNA, 25 bp, Homo sapien
gcttaagaaagtcaattcccgcttc

SEQ ID NO: 5248273 - DNA, 25 bp, Homo sapien
gaagatgaataaggctcggcagcta

SEQ ID NO: 5248274 - DNA, 25 bp, Homo sapien
ggcagctaaaacagcatccagttgt

SEQ ID NO: 5248275 - DNA, 25 bp, Homo sapien
taaattgatttcgagtcttaaactg

SEQ ID NO: 5248276 - DNA, 25 bp, Homo sapien
tacgagcaaggctatggaagatgaa

SEQ ID NO: 5248277 - DNA, 25 bp, Homo sapien
gacacagttgtcacacctccttttg

SEQ ID NO: 5248278 - DNA, 25 bp, Homo sapien
tcatggccttgcgtcactcagactt

SEQ ID NO: 5248279 - DNA, 25 bp, Homo sapien
tgcttcccttcagtaaggccccttg

SEQ ID NO: 5248280 - DNA, 25 bp, Homo sapien
caagagtttacaatgggtcaacagg

SEQ ID NO: 5248281 - DNA, 25 bp, Homo sapien
tgtttaagtaagtgggaacgtgtga

SEQ ID NO: 5248282 - DNA, 25 bp, Homo sapien
cttcccggtctctagtaaccatcct

SEQ ID NO: 5248283 - DNA, 25 bp, Homo sapien
tttttggcaccattaaccttctcca

SEQ ID NO: 5248284 - DNA, 25 bp, Homo sapien
ggaacgtgtgatgtttgactttctg

SEQ ID NO: 5248285 - DNA, 25 bp, Homo sapien
gcttggctgtttgcgggcactcatg

SEQ ID NO: 5248286 - DNA, 25 bp, Homo sapien
ctgctggactctggcttggctgttt

SEQ ID NO: 5248287 - DNA, 25 bp, Homo sapien
aggaactccctgagccgtgaaggcc

SEQ ID NO: 5248288 - DNA, 25 bp, Homo sapien
gaattgtcactttgtggccgggtgc

SEQ ID NO: 5248289 - DNA, 25 bp, Homo sapien
aaatatggatgtcccctacctccct

SEQ ID NO: 5248290 - DNA, 25 bp, Homo sapien
ttgaactcagttctgccaggtgcca

SEQ ID NO: 5248291 - DNA, 25 bp, Homo sapien
tgaaaagacctgtgcgacagtagtg

SEQ ID NO: 5248292 - DNA, 25 bp, Homo sapien
tttccagcagaagtaacaccatgag

SEQ ID NO: 5248293 - DNA, 25 bp, Homo sapien
caccttcgcccagcagacaagtgct

SEQ ID NO: 5248294 - DNA, 25 bp, Homo sapien
aagctgggggagacaccttcgccca

SEQ ID NO: 5248295 - DNA, 25 bp, Homo sapien
cagtgcctaatgttggcacccaagc

SEQ ID NO: 5248296 - DNA, 25 bp, Homo sapien
tgtgcagaacagctcctttgcagtg

SEQ ID NO: 5248297 - DNA, 25 bp, Homo sapien
atgaagaggagacgcaggactccgg

SEQ ID NO: 5248298 - DNA, 25 bp, Homo sapien
ccgtttctggcgtgctgggctgtct

SEQ ID NO: 5248299 - DNA, 25 bp, Homo sapien
tccctgtagacagcctcgtgagcgg

SEQ ID NO: 5248300 - DNA, 25 bp, Homo sapien
gggaggtgtgtgttggtcttccacc

SEQ ID NO: 5248301 - DNA, 25 bp, Homo sapien
gggaatcccgtgagcctctgtgaca

SEQ ID NO: 5248302 - DNA, 25 bp, Homo sapien
ttcccaggagcagacgtgcgtctgc

SEQ ID NO: 5248303 - DNA, 25 bp, Homo sapien
tgctgttttgcgtaggttctagaca

SEQ ID NO: 5248304 - DNA, 25 bp, Homo sapien
ggctgttgctgagaccagagggctt

SEQ ID NO: 5248305 - DNA, 25 bp, Homo sapien
ttcctcctccgaaatttcacattaa

SEQ ID NO: 5248306 - DNA, 25 bp, Homo sapien
ctcctccgaaatttcacattaaagc

SEQ ID NO: 5248307 - DNA, 25 bp, Homo sapien
cctcctccgaaatttcacattaaag

SEQ ID NO: 5248308 - DNA, 25 bp, Homo sapien
tcctccgaaatttcacattaaagcc

SEQ ID NO: 5248309 - DNA, 25 bp, Homo sapien
cttaaccgcagtccccctatctgca

SEQ ID NO: 5248310 - DNA, 25 bp, Homo sapien
gcttaatggacttaaccgcagtccc

SEQ ID NO: 5248311 - DNA, 25 bp, Homo sapien
tggcttaatggacttaaccgcagtc

SEQ ID NO: 5248312 - DNA, 25 bp, Homo sapien
cctggcttaatggacttaaccgcag

SEQ ID NO: 5248313 - DNA, 25 bp, Homo sapien
aatgaagcagaaggcaacatggctc

SEQ ID NO: 5248314 - DNA, 25 bp, Homo sapien
gaatgaagcagaaggcaacatggct

SEQ ID NO: 5248315 - DNA, 25 bp, Homo sapien
caacaaattgtctccctgggccatg

SEQ ID NO: 5248316 - DNA, 25 bp, Homo sapien
gatacttgtttactcgtgcagcccg

SEQ ID NO: 5248317 - DNA, 25 bp, Homo sapien
tctggagcccctctaaggatgccct

SEQ ID NO: 5248318 - DNA, 25 bp, Homo sapien
gagagaaagttcagtccacatctgc

SEQ ID NO: 5248319 - DNA, 25 bp, Homo sapien
tctcctggcttggcgatgatggctg

SEQ ID NO: 5248320 - DNA, 25 bp, Homo sapien
ttcctggcgtcctcttgggagccac

SEQ ID NO: 5248321 - DNA, 25 bp, Homo sapien
gagtcaggttcgaggccttgtgata

SEQ ID NO: 5248322 - DNA, 25 bp, Homo sapien
ccagagctccgagagtcaggttcga

SEQ ID NO: 5248323 - DNA, 25 bp, Homo sapien
tccgagagtcaggttcgaggccttg

SEQ ID NO: 5248324 - DNA, 25 bp, Homo sapien
aggttcgaggccttgtgatatcccc

SEQ ID NO: 5248325 - DNA, 25 bp, Homo sapien
cctgcattccccgtatacccagcag

SEQ ID NO: 5248326 - DNA, 25 bp, Homo sapien
gcattccccgtatacccagcaggcc

SEQ ID NO: 5248327 - DNA, 25 bp, Homo sapien
tgcattccccgtatacccagcaggc

SEQ ID NO: 5248328 - DNA, 25 bp, Homo sapien
gccctgcattccccgtatacccagc

SEQ ID NO: 5248329 - DNA, 25 bp, Homo sapien
caggccacgtggaggtgaacttcca

SEQ ID NO: 5248330 - DNA, 25 bp, Homo sapien
tcctcaggccacgtggaggtgaact

SEQ ID NO: 5248331 - DNA, 25 bp, Homo sapien
ctcaggccacgtggaggtgaacttc

SEQ ID NO: 5248332 - DNA, 25 bp, Homo sapien
gtgaacttccaggcacaagcacccc

SEQ ID NO: 5248333 - DNA, 25 bp, Homo sapien
tgcaggtgaaggctgatgcacattc

SEQ ID NO: 5248334 - DNA, 25 bp, Homo sapien
tgcagggggcccggggcttgcaggt

SEQ ID NO: 5248335 - DNA, 25 bp, Homo sapien
gcaggtgaaggctgatgcacattcc

SEQ ID NO: 5248336 - DNA, 25 bp, Homo sapien
gcttgcaggtgaaggctgatgcaca

SEQ ID NO: 5248337 - DNA, 25 bp, Homo sapien
gaggggccagaactgacgcctttgc

SEQ ID NO: 5248338 - DNA, 25 bp, Homo sapien
ccagcctgcgagcagacacccgctt

SEQ ID NO: 5248339 - DNA, 25 bp, Homo sapien
tccatccagcctgcgagcagacacc

SEQ ID NO: 5248340 - DNA, 25 bp, Homo sapien
ttcaggcccttctggcggcccctcc

SEQ ID NO: 5248341 - DNA, 25 bp, Homo sapien
cctccatccagcctgcgagcagaca

SEQ ID NO: 5248342 - DNA, 25 bp, Homo sapien
gtaaagccctctagaaaggttcagc

SEQ ID NO: 5248343 - DNA, 25 bp, Homo sapien
tctagaaaggttcagctcagttggg

SEQ ID NO: 5248344 - DNA, 25 bp, Homo sapien
ggtggaggggctatcaattggcaga

SEQ ID NO: 5248345 - DNA, 25 bp, Homo sapien
agccctctagaaaggttcagctcag

SEQ ID NO: 5248346 - DNA, 25 bp, Homo sapien
ctggctggtcctccggcaacgtgat

SEQ ID NO: 5248347 - DNA, 25 bp, Homo sapien
ccttacttcctgtgagactggctgc

SEQ ID NO: 5248348 - DNA, 25 bp, Homo sapien
gggacatccttacttcctgtgagac

SEQ ID NO: 5248349 - DNA, 25 bp, Homo sapien
tccggcaacgtgatggggacacccg

SEQ ID NO: 5248350 - DNA, 25 bp, Homo sapien
ctcccagagtcttgtggacaactgt

SEQ ID NO: 5248351 - DNA, 25 bp, Homo sapien
agaagatctcctgcgggcaaaagcc

SEQ ID NO: 5248352 - DNA, 25 bp, Homo sapien
gggccagaagatctcctgcgggcaa

SEQ ID NO: 5248353 - DNA, 25 bp, Homo sapien
tccaggctggccctacactgtcgcc

SEQ ID NO: 5248354 - DNA, 25 bp, Homo sapien
ggccctacactgtcgccctgttggg

SEQ ID NO: 5248355 - DNA, 25 bp, Homo sapien
gaaaacaccaactttgctgctgaga

SEQ ID NO: 5248356 - DNA, 25 bp, Homo sapien
gctgctgagacgcaggcttgagaat

SEQ ID NO: 5248357 - DNA, 25 bp, Homo sapien
gaggctggaacacaccatattctca

SEQ ID NO: 5248358 - DNA, 25 bp, Homo sapien
tgagaataaaatgagcttcaccctg

SEQ ID NO: 5248359 - DNA, 25 bp, Homo sapien
tggtgaggggcgtgcgcaggcctcc

SEQ ID NO: 5248360 - DNA, 25 bp, Homo sapien
ggattctgatgacagccctggtgag

SEQ ID NO: 5248361 - DNA, 25 bp, Homo sapien
ttgctggtagagctgtttatgttta

SEQ ID NO: 5248362 - DNA, 25 bp, Homo sapien
ctcccccgcgggatgggtcactttg

SEQ ID NO: 5248363 - DNA, 25 bp, Homo sapien
gagccgctgccaagaattcacgaga

SEQ ID NO: 5248364 - DNA, 25 bp, Homo sapien
attcacgagatgaaccagggtcccg

SEQ ID NO: 5248365 - DNA, 25 bp, Homo sapien
tgtgtttgctcccaatgcctccggg

SEQ ID NO: 5248366 - DNA, 25 bp, Homo sapien
gcttgggtaacatccaggacacctg

SEQ ID NO: 5248367 - DNA, 25 bp, Homo sapien
gctcttgccagacagttccaccttg

SEQ ID NO: 5248368 - DNA, 25 bp, Homo sapien
ccttggaatgcagaggcgtgagccc

SEQ ID NO: 5248369 - DNA, 25 bp, Homo sapien
tgcagaaatgagatcaagtcccact

SEQ ID NO: 5248370 - DNA, 25 bp, Homo sapien
caggagtgtactctcccagggcgtg

SEQ ID NO: 5248371 - DNA, 25 bp, Homo sapien
ctcttttgatttgggccaaatcttt

SEQ ID NO: 5248372 - DNA, 25 bp, Homo sapien
tcctcacctattgactaatctctgg

SEQ ID NO: 5248373 - DNA, 25 bp, Homo sapien
ctcacctattgactaatctctggca

SEQ ID NO: 5248374 - DNA, 25 bp, Homo sapien
catgaaccttatttgttcaactatt

SEQ ID NO: 5248375 - DNA, 25 bp, Homo sapien
gctgggattagggttagacaagcca

SEQ ID NO: 5248376 - DNA, 25 bp, Homo sapien
caaattggtatctctggtccacgtc

SEQ ID NO: 5248377 - DNA, 25 bp, Homo sapien
agtacagggccagacttgtttttat

SEQ ID NO: 5248378 - DNA, 25 bp, Homo sapien
cacgtcccagctgcctattttgtaa

SEQ ID NO: 5248379 - DNA, 25 bp, Homo sapien
gacatagttgagttcagccaagccc

SEQ ID NO: 5248380 - DNA, 25 bp, Homo sapien
tgaacgtgatatgagacttgggctt

SEQ ID NO: 5248381 - DNA, 25 bp, Homo sapien
cagccaactaccagacatgagcgaa

SEQ ID NO: 5248382 - DNA, 25 bp, Homo sapien
tgaacaagcctaagccagaggagaa

SEQ ID NO: 5248383 - DNA, 25 bp, Homo sapien
ctatttctctagtcccccttctgag

SEQ ID NO: 5248384 - DNA, 25 bp, Homo sapien
gttccgcccgactcaccagtggtca

SEQ ID NO: 5248385 - DNA, 25 bp, Homo sapien
tctgttccgcccgactcaccagtgg

SEQ ID NO: 5248386 - DNA, 25 bp, Homo sapien
agtcccccttctgagatcccatcca

SEQ ID NO: 5248387 - DNA, 25 bp, Homo sapien
cagtcgggcagttcccatgtggacc

SEQ ID NO: 5248388 - DNA, 25 bp, Homo sapien
aaacaaccagattccaccgggcgat

SEQ ID NO: 5248389 - DNA, 25 bp, Homo sapien
gcctcttcctgaatagcggctctca

SEQ ID NO: 5248390 - DNA, 25 bp, Homo sapien
ggccgggtattgctggaaacaacca

SEQ ID NO: 5248391 - DNA, 25 bp, Homo sapien
ctgagtggagcagagagtggaagat

SEQ ID NO: 5248392 - DNA, 25 bp, Homo sapien
gagaaccctcacgattttgaaataa

SEQ ID NO: 5248393 - DNA, 25 bp, Homo sapien
tttatacacgacaccaagagaaccc

SEQ ID NO: 5248394 - DNA, 25 bp, Homo sapien
catcttacatttatacacgacacca

SEQ ID NO: 5248395 - DNA, 25 bp, Homo sapien
cagagctgagtctggacctcgagcc

SEQ ID NO: 5248396 - DNA, 25 bp, Homo sapien
tgtgctgaattccttaatcacaggc

SEQ ID NO: 5248397 - DNA, 25 bp, Homo sapien
gcccaggtatcatccaccaaaagag

SEQ ID NO: 5248398 - DNA, 25 bp, Homo sapien
aggctgtggcccaggtatcatccac

SEQ ID NO: 5248399 - DNA, 25 bp, Homo sapien
gagaccttaaaatcctcagcacgaa

SEQ ID NO: 5248400 - DNA, 25 bp, Homo sapien
cgtgaacttttcagtccagtttgct

SEQ ID NO: 5248401 - DNA, 25 bp, Homo sapien
gatggagaccttaaaatcctcagca

SEQ ID NO: 5248402 - DNA, 25 bp, Homo sapien
actacaattatgaccgtgaactttt

SEQ ID NO: 5248403 - DNA, 25 bp, Homo sapien
cgtcacccggctgccgtccaagctg

SEQ ID NO: 5248404 - DNA, 25 bp, Homo sapien
ctgtctctcgtcacccggctgccgt

SEQ ID NO: 5248405 - DNA, 25 bp, Homo sapien
ccttttcatggagcagagcctgacc

SEQ ID NO: 5248406 - DNA, 25 bp, Homo sapien
actaggcccgccagatctctctgcc

SEQ ID NO: 5248407 - DNA, 25 bp, Homo sapien
aactacgggaccacatcgccagcat

SEQ ID NO: 5248408 - DNA, 25 bp, Homo sapien
cactggctgagcaactacgggacca

SEQ ID NO: 5248409 - DNA, 25 bp, Homo sapien
gctgagcaactacgggaccacatcg

SEQ ID NO: 5248410 - DNA, 25 bp, Homo sapien
agcaactacgggaccacatcgccag

SEQ ID NO: 5248411 - DNA, 25 bp, Homo sapien
ctaagagcagggaccggcctttccg

SEQ ID NO: 5248412 - DNA, 25 bp, Homo sapien
acacggggcaccactaagagcaggg

SEQ ID NO: 5248413 - DNA, 25 bp, Homo sapien
aggcgctccctccttggctggcgtt

SEQ ID NO: 5248414 - DNA, 25 bp, Homo sapien
ggcaccactaagagcagggaccggc

SEQ ID NO: 5248415 - DNA, 25 bp, Homo sapien
gtgggtttagagcttgaggaatgga

SEQ ID NO: 5248416 - DNA, 25 bp, Homo sapien
gcagaagtgggtttagagcttgagg

SEQ ID NO: 5248417 - DNA, 25 bp, Homo sapien
ggaagcagaagtgggtttagagctt

SEQ ID NO: 5248418 - DNA, 25 bp, Homo sapien
agtgggtttagagcttgaggaatgg

SEQ ID NO: 5248419 - DNA, 25 bp, Homo sapien
tcagggccttgtgagatgacgccaa

SEQ ID NO: 5248420 - DNA, 25 bp, Homo sapien
cagagtcttgcacttcctggttgtc

SEQ ID NO: 5248421 - DNA, 25 bp, Homo sapien
agacctcaatttcctgccagctcag

SEQ ID NO: 5248422 - DNA, 25 bp, Homo sapien
gtggcttttccccttgagacctcaa

SEQ ID NO: 5248423 - DNA, 25 bp, Homo sapien
gctggatcttaagccctcgaggcca

SEQ ID NO: 5248424 - DNA, 25 bp, Homo sapien
gttcccgcagggcaccaagcatttt

SEQ ID NO: 5248425 - DNA, 25 bp, Homo sapien
taatggccctccaaaagttccagag

SEQ ID NO: 5248426 - DNA, 25 bp, Homo sapien
cagcgagcccagagttagtaagcac

SEQ ID NO: 5248427 - DNA, 25 bp, Homo sapien
tggttctcggcccatgcatgactgg

SEQ ID NO: 5248428 - DNA, 25 bp, Homo sapien
ccacagaattgaaacggaagcacgt

SEQ ID NO: 5248429 - DNA, 25 bp, Homo sapien
taacagctaacgtccactgagcagc

SEQ ID NO: 5248430 - DNA, 25 bp, Homo sapien
ctgacagagaacacggagagggctt

SEQ ID NO: 5248431 - DNA, 25 bp, Homo sapien
atgtccctctcttcacctctggggt

SEQ ID NO: 5248432 - DNA, 25 bp, Homo sapien
ctctcttcacctctggggttcctcc

SEQ ID NO: 5248433 - DNA, 25 bp, Homo sapien
tgtccctctcttcacctctggggtt

SEQ ID NO: 5248434 - DNA, 25 bp, Homo sapien
tccctctcttcacctctggggttcc

SEQ ID NO: 5248435 - DNA, 25 bp, Homo sapien
ctagtagacagtgcatggccgaggc

SEQ ID NO: 5248436 - DNA, 25 bp, Homo sapien
ccagccactagggaaagaggccgta

SEQ ID NO: 5248437 - DNA, 25 bp, Homo sapien
ttgtgcgaaacctgaacacccggtc

SEQ ID NO: 5248438 - DNA, 25 bp, Homo sapien
cagctgttgggctacctagggccag

SEQ ID NO: 5248439 - DNA, 25 bp, Homo sapien
ggcatctcctatcccgggagtcccg

SEQ ID NO: 5248440 - DNA, 25 bp, Homo sapien
cgcgcgcgggggcatctcctatccc

SEQ ID NO: 5248441 - DNA, 25 bp, Homo sapien
cccggcgcccgtctgtggccacgga

SEQ ID NO: 5248442 - DNA, 25 bp, Homo sapien
gtcccggcgcccgtctgtggccacg

SEQ ID NO: 5248443 - DNA, 25 bp, Homo sapien
ccagggtcctggagcggtgtccagg

SEQ ID NO: 5248444 - DNA, 25 bp, Homo sapien
gggtgcaccgggaaggcggcgaggc

SEQ ID NO: 5248445 - DNA, 25 bp, Homo sapien
ctgccgggtccgctccattcgtagg

SEQ ID NO: 5248446 - DNA, 25 bp, Homo sapien
ctgccagccctaggggttccaggga

SEQ ID NO: 5248447 - DNA, 25 bp, Homo sapien
cgctccattcgtagggaaagcccgg

SEQ ID NO: 5248448 - DNA, 25 bp, Homo sapien
ctggtccggttgcaggtccaggccc

SEQ ID NO: 5248449 - DNA, 25 bp, Homo sapien
tccagggccagcctagcagagagat

SEQ ID NO: 5248450 - DNA, 25 bp, Homo sapien
aggccccagggtgaatgcaggctga

SEQ ID NO: 5248451 - DNA, 25 bp, Homo sapien
gagccccatagagcgacattttccc

SEQ ID NO: 5248452 - DNA, 25 bp, Homo sapien
cagaaattagagctctctgccagga

SEQ ID NO: 5248453 - DNA, 25 bp, Homo sapien
gtgagcacctctagcatggcactgc

SEQ ID NO: 5248454 - DNA, 25 bp, Homo sapien
tgccaggagtgctggtcgtcccaag

SEQ ID NO: 5248455 - DNA, 25 bp, Homo sapien
aagagcagccctcatggttgatgga

SEQ ID NO: 5248456 - DNA, 25 bp, Homo sapien
ccacagcagtaggtatcggtatcat

SEQ ID NO: 5248457 - DNA, 25 bp, Homo sapien
tctgatcctctgtgccgcccgggag

SEQ ID NO: 5248458 - DNA, 25 bp, Homo sapien
ggtatcggtatcattaggtgactca

SEQ ID NO: 5248459 - DNA, 25 bp, Homo sapien
tccatcacatgtggggcacattgga

SEQ ID NO: 5248460 - DNA, 25 bp, Homo sapien
ttctccgggtggttcagcagcatgg

SEQ ID NO: 5248461 - DNA, 25 bp, Homo sapien
tagaggcggtcttcgtaggccagca

SEQ ID NO: 5248462 - DNA, 25 bp, Homo sapien
tgtctttcctgcgaatgggccgagc

SEQ ID NO: 5248463 - DNA, 25 bp, Homo sapien
tgggcgcagccacatctttcgggtt

SEQ ID NO: 5248464 - DNA, 25 bp, Homo sapien
gttccgggagatgccgaaagtcttg

SEQ ID NO: 5248465 - DNA, 25 bp, Homo sapien
ttgcggttccgggagatgccgaaag

SEQ ID NO: 5248466 - DNA, 25 bp, Homo sapien
gagatgccgaaagtcttgaagccct

SEQ ID NO: 5248467 - DNA, 25 bp, Homo sapien
cgggagatgccgaaagtcttgaagc

SEQ ID NO: 5248468 - DNA, 25 bp, Homo sapien
caccacgagcatggcgcggaaaaag

SEQ ID NO: 5248469 - DNA, 25 bp, Homo sapien
gcgcggaaaaagcacggctccttgt

SEQ ID NO: 5248470 - DNA, 25 bp, Homo sapien
gcacggctccttgttcatgcggctg

SEQ ID NO: 5248471 - DNA, 25 bp, Homo sapien
agcatggcgcggaaaaagcacggct

SEQ ID NO: 5248472 - DNA, 25 bp, Homo sapien
tgagcccgcacagggttgagtttct

SEQ ID NO: 5248473 - DNA, 25 bp, Homo sapien
ctgaggtagtcagagcggtcgccct

SEQ ID NO: 5248474 - DNA, 25 bp, Homo sapien
tggcctgtcctagtagcccggctgg

SEQ ID NO: 5248475 - DNA, 25 bp, Homo sapien
cctagaattatccacacagggaggt

SEQ ID NO: 5248476 - DNA, 25 bp, Homo sapien
aggaatgtccacttccagggccaaa

SEQ ID NO: 5248477 - DNA, 25 bp, Homo sapien
ggcacagggccataagctatttcag

SEQ ID NO: 5248478 - DNA, 25 bp, Homo sapien
gctctctgatgcagctgggaacagg

SEQ ID NO: 5248479 - DNA, 25 bp, Homo sapien
tctttcctaggtgactcccgctgag

SEQ ID NO: 5248480 - DNA, 25 bp, Homo sapien
ttggtcttaggctcgggaacaggca

SEQ ID NO: 5248481 - DNA, 25 bp, Homo sapien
tccttggtcttaggctcgggaacag

SEQ ID NO: 5248482 - DNA, 25 bp, Homo sapien
cagtagtccttggtcttaggctcgg

SEQ ID NO: 5248483 - DNA, 25 bp, Homo sapien
cccggccagtagtccttggtcttag

SEQ ID NO: 5248484 - DNA, 25 bp, Homo sapien
agaaccacatcctgttcctagcttg

SEQ ID NO: 5248485 - DNA, 25 bp, Homo sapien
accacatcctgttcctagcttgtta

SEQ ID NO: 5248486 - DNA, 25 bp, Homo sapien
gaaccacatcctgttcctagcttgt

SEQ ID NO: 5248487 - DNA, 25 bp, Homo sapien
ccacatcctgttcctagcttgttac

SEQ ID NO: 5248488 - DNA, 25 bp, Homo sapien
cgagctccccgagaaagaaactcct

SEQ ID NO: 5248489 - DNA, 25 bp, Homo sapien
tattatcattctaaccaccagggcc

SEQ ID NO: 5248490 - DNA, 25 bp, Homo sapien
tggaatttacggataacaccagtcg

SEQ ID NO: 5248491 - DNA, 25 bp, Homo sapien
aagttttacggtgctttctcacaca

SEQ ID NO: 5248492 - DNA, 25 bp, Homo sapien
cggagcccgaggggggcagcttcgc

SEQ ID NO: 5248493 - DNA, 25 bp, Homo sapien
gctcctggctgcccggcgacgagga

SEQ ID NO: 5248494 - DNA, 25 bp, Homo sapien
agcccgaggggggcagcttcgccat

SEQ ID NO: 5248495 - DNA, 25 bp, Homo sapien
cggcgacgaggagccgcggggggca

SEQ ID NO: 5248496 - DNA, 25 bp, Homo sapien
ccctcgacagccgaacgcgttgtcc

SEQ ID NO: 5248497 - DNA, 25 bp, Homo sapien
ggtggcgccgagatgcccacctcct

SEQ ID NO: 5248498 - DNA, 25 bp, Homo sapien
gcaggcccccgggatccatcggatg

SEQ ID NO: 5248499 - DNA, 25 bp, Homo sapien
acagcccaggcgggttccgcgaggg

SEQ ID NO: 5248500 - DNA, 25 bp, Homo sapien
tgggaaccatgtgaaagtggctgtc

SEQ ID NO: 5248501 - DNA, 25 bp, Homo sapien
tctgggaaccatgtgaaagtggctg

SEQ ID NO: 5248502 - DNA, 25 bp, Homo sapien
gggaaccatgtgaaagtggctgtca

SEQ ID NO: 5248503 - DNA, 25 bp, Homo sapien
catgtgaaagtggctgtcatgagcc

SEQ ID NO: 5248504 - DNA, 25 bp, Homo sapien
ccaggacaaaggcacaaaggccaga

SEQ ID NO: 5248505 - DNA, 25 bp, Homo sapien
tcattagggtaacggtaaaccatca

SEQ ID NO: 5248506 - DNA, 25 bp, Homo sapien
gagtcacctcattagggtaacggta

SEQ ID NO: 5248507 - DNA, 25 bp, Homo sapien
tgaggttgaactgggtctctagctt

SEQ ID NO: 5248508 - DNA, 25 bp, Homo sapien
tcatagcacagtacggccttgaact

SEQ ID NO: 5248509 - DNA, 25 bp, Homo sapien
aagatgttatcatagcacagtacgg

SEQ ID NO: 5248510 - DNA, 25 bp, Homo sapien
gagtctggtgaagcctttgaaccct

SEQ ID NO: 5248511 - DNA, 25 bp, Homo sapien
gggagtctggtgaagcctttgaacc

SEQ ID NO: 5248512 - DNA, 25 bp, Homo sapien
aagagttgagtgatagagctaaccc

SEQ ID NO: 5248513 - DNA, 25 bp, Homo sapien
catttcaagggcaataccgtgttgg

SEQ ID NO: 5248514 - DNA, 25 bp, Homo sapien
cattccaagacagtatacagtcctg

SEQ ID NO: 5248515 - DNA, 25 bp, Homo sapien
tgttacctgatcaatgacagagcct

SEQ ID NO: 5248516 - DNA, 25 bp, Homo sapien
attgaaccagcagcgatgaaagcag

SEQ ID NO: 5248517 - DNA, 25 bp, Homo sapien
cattggtagcaactcctggtaagaa

SEQ ID NO: 5248518 - DNA, 25 bp, Homo sapien
acaccaggcaaagcattggtagcaa

SEQ ID NO: 5248519 - DNA, 25 bp, Homo sapien
aattgaaccagcagcgatgaaagca

SEQ ID NO: 5248520 - DNA, 25 bp, Homo sapien
tgaagctcgcgaaggtaaacggcct

SEQ ID NO: 5248521 - DNA, 25 bp, Homo sapien
ccgttcacggttagaggctcgcgat

SEQ ID NO: 5248522 - DNA, 25 bp, Homo sapien
taaccgtggaagtcactggcggcct

SEQ ID NO: 5248523 - DNA, 25 bp, Homo sapien
ttttgcgacgcgtacgagctgggac

SEQ ID NO: 5248524 - DNA, 25 bp, Homo sapien
ggagacagggtcgcattatattacc

SEQ ID NO: 5248525 - DNA, 25 bp, Homo sapien
gtggagacagggtcgcattatatta

SEQ ID NO: 5248526 - DNA, 25 bp, Homo sapien
tggagacagggtcgcattatattac

SEQ ID NO: 5248527 - DNA, 25 bp, Homo sapien
tgactgtgcagtgtgatggtagctt

SEQ ID NO: 5248528 - DNA, 25 bp, Homo sapien
gatggtagcttcatgaagaggcatc

SEQ ID NO: 5248529 - DNA, 25 bp, Homo sapien
tgcacgacccgaatcttgcacttag

SEQ ID NO: 5248530 - DNA, 25 bp, Homo sapien
cacgacccgaatcttgcacttagtg

SEQ ID NO: 5248531 - DNA, 25 bp, Homo sapien
tgggagacctcacctacaacatcaa

SEQ ID NO: 5248532 - DNA, 25 bp, Homo sapien
gccagtttactgttggaaataccag

SEQ ID NO: 5248533 - DNA, 25 bp, Homo sapien
gcaaaagaagaggtatgggagacct

SEQ ID NO: 5248534 - DNA, 25 bp, Homo sapien
gaaataccagagacaaaacgtgcct

SEQ ID NO: 5248535 - DNA, 25 bp, Homo sapien
gcaatagctgagagggcgtcaccag

SEQ ID NO: 5248536 - DNA, 25 bp, Homo sapien
cgccttggatctggggcaatagctg

SEQ ID NO: 5248537 - DNA, 25 bp, Homo sapien
ccgtcacgcgcggtggcttgcaggg

SEQ ID NO: 5248538 - DNA, 25 bp, Homo sapien
tcggcgcctgcggttttcttcgggc

SEQ ID NO: 5248539 - DNA, 25 bp, Homo sapien
ggtgaaagagttctggacactctcc

SEQ ID NO: 5248540 - DNA, 25 bp, Homo sapien
ggacctgtatctggagcaagtgaca

SEQ ID NO: 5248541 - DNA, 25 bp, Homo sapien
tacatgatggaccaagccagctggg

SEQ ID NO: 5248542 - DNA, 25 bp, Homo sapien
ccagctgggtgacccaacgtgggac

SEQ ID NO: 5248543 - DNA, 25 bp, Homo sapien
tggcatctgggagcctatctcattt

SEQ ID NO: 5248544 - DNA, 25 bp, Homo sapien
ccaaatttctttgtagcgtgctggc

SEQ ID NO: 5248545 - DNA, 25 bp, Homo sapien
ggcatttccagatcattcctggcat

SEQ ID NO: 5248546 - DNA, 25 bp, Homo sapien
taatggatccatcaggttcttgttc

SEQ ID NO: 5248547 - DNA, 25 bp, Homo sapien
tgcccctttgtgagcaccatgtatg

SEQ ID NO: 5248548 - DNA, 25 bp, Homo sapien
gaaaacgggaatagcagatctgaac

SEQ ID NO: 5248549 - DNA, 25 bp, Homo sapien
tcactggttcccatggaaaacggga

SEQ ID NO: 5248550 - DNA, 25 bp, Homo sapien
tgaactcaccccttgagaaacaggg

SEQ ID NO: 5248551 - DNA, 25 bp, Homo sapien
agggggtccagggcaagtgcttcaa

SEQ ID NO: 5248552 - DNA, 25 bp, Homo sapien
ccacccatgcagcgagagtgcagca

SEQ ID NO: 5248553 - DNA, 25 bp, Homo sapien
caggacctgactttgtagcatcctg

SEQ ID NO: 5248554 - DNA, 25 bp, Homo sapien
gactttgtagcatcctgtctctcac

SEQ ID NO: 5248555 - DNA, 25 bp, Homo sapien
cctgactttgtagcatcctgtctct

SEQ ID NO: 5248556 - DNA, 25 bp, Homo sapien
tgaatatgccgtgcccttgatctgt

SEQ ID NO: 5248557 - DNA, 25 bp, Homo sapien
ttcccaatcttgtggtcgaaactaa

SEQ ID NO: 5248558 - DNA, 25 bp, Homo sapien
gatcacatcgagtcccacagtgggt

SEQ ID NO: 5248559 - DNA, 25 bp, Homo sapien
cagctcaatacttgctctgatgcca

SEQ ID NO: 5248560 - DNA, 25 bp, Homo sapien
cttggcacacggacacccagcacct

SEQ ID NO: 5248561 - DNA, 25 bp, Homo sapien
tggcacacggacacccagcacctcg

SEQ ID NO: 5248562 - DNA, 25 bp, Homo sapien
cacacggacacccagcacctcgcat

SEQ ID NO: 5248563 - DNA, 25 bp, Homo sapien
gctcttggcacacggacacccagca

SEQ ID NO: 5248564 - DNA, 25 bp, Homo sapien
ccatgacctcgagggccgtctcccc

SEQ ID NO: 5248565 - DNA, 25 bp, Homo sapien
ctcctccatgacctcgagggccgtc

SEQ ID NO: 5248566 - DNA, 25 bp, Homo sapien
tcctccatgacctcgagggccgtct

SEQ ID NO: 5248567 - DNA, 25 bp, Homo sapien
ctccatgacctcgagggccgtctcc

SEQ ID NO: 5248568 - DNA, 25 bp, Homo sapien
cagtcaggagcttaaaactctcgga

SEQ ID NO: 5248569 - DNA, 25 bp, Homo sapien
caggagcttaaaactctcggacagc

SEQ ID NO: 5248570 - DNA, 25 bp, Homo sapien
ggacagctgcgtgccaatgccatca

SEQ ID NO: 5248571 - DNA, 25 bp, Homo sapien
ttaaaactctcggacagctgcgtgc

SEQ ID NO: 5248572 - DNA, 25 bp, Homo sapien
cagtctaggatctgtcagtcaggaa

SEQ ID NO: 5248573 - DNA, 25 bp, Homo sapien
cctctgaatggcctcctgtagttgg

SEQ ID NO: 5248574 - DNA, 25 bp, Homo sapien
catgatctagcttactacagcccag

SEQ ID NO: 5248575 - DNA, 25 bp, Homo sapien
gttccactgagaagccacggtgatt

SEQ ID NO: 5248576 - DNA, 25 bp, Homo sapien
aaggaccaccctgcggagtgagaag

SEQ ID NO: 5248577 - DNA, 25 bp, Homo sapien
cctgtgggcgtgtccagaggaccat

SEQ ID NO: 5248578 - DNA, 25 bp, Homo sapien
caggaggtccaaactggagacgtga

SEQ ID NO: 5248579 - DNA, 25 bp, Homo sapien
aggaagacgtcaaagccgagccaga

SEQ ID NO: 5248580 - DNA, 25 bp, Homo sapien
tggcccccaatttccactcttggtg

SEQ ID NO: 5248581 - DNA, 25 bp, Homo sapien
ccactcttggtgggtttaatctcag

SEQ ID NO: 5248582 - DNA, 25 bp, Homo sapien
tcgggcggaggtggaatgtgattcc

SEQ ID NO: 5248583 - DNA, 25 bp, Homo sapien
tgtgtattggagaatccggcgtcgg

SEQ ID NO: 5248584 - DNA, 25 bp, Homo sapien
ttcctggtccgcagttggggtctgt

SEQ ID NO: 5248585 - DNA, 25 bp, Homo sapien
agaatccggcgtcgggcggaggtgg

SEQ ID NO: 5248586 - DNA, 25 bp, Homo sapien
cagtaccgttcccttggtgtccaca

SEQ ID NO: 5248587 - DNA, 25 bp, Homo sapien
tggagaacctatatcgggtacctct

SEQ ID NO: 5248588 - DNA, 25 bp, Homo sapien
tgaacagtaccgttcccttggtgtc

SEQ ID NO: 5248589 - DNA, 25 bp, Homo sapien
aggcctggagaacctatatcgggta

SEQ ID NO: 5248590 - DNA, 25 bp, Homo sapien
gcgcttcggttgaacccaggtatct

SEQ ID NO: 5248591 - DNA, 25 bp, Homo sapien
ttctcacaaagtgagcaggctggcg

SEQ ID NO: 5248592 - DNA, 25 bp, Homo sapien
ggttctcacaaagtgagcaggctgg

SEQ ID NO: 5248593 - DNA, 25 bp, Homo sapien
ctcacaaagtgagcaggctggcgct

SEQ ID NO: 5248594 - DNA, 25 bp, Homo sapien
cccctacgtgttggcttggagcagg

SEQ ID NO: 5248595 - DNA, 25 bp, Homo sapien
gcttgggggcgactgcaggacctgg

SEQ ID NO: 5248596 - DNA, 25 bp, Homo sapien
gcttttgtgtgagcgctggcttggg

SEQ ID NO: 5248597 - DNA, 25 bp, Homo sapien
ttgcttgctcaagcttttgtgtgag

SEQ ID NO: 5248598 - DNA, 25 bp, Homo sapien
gcaggggctgcggtagagcccagtt

SEQ ID NO: 5248599 - DNA, 25 bp, Homo sapien
caggggctgcggtagagcccagttg

SEQ ID NO: 5248600 - DNA, 25 bp, Homo sapien
ggcaggggctgcggtagagcccagt

SEQ ID NO: 5248601 - DNA, 25 bp, Homo sapien
gggcaggggctgcggtagagcccag

SEQ ID NO: 5248602 - DNA, 25 bp, Homo sapien
ggtggccacggggatctggacccac

SEQ ID NO: 5248603 - DNA, 25 bp, Homo sapien
tccgggtggccacggggatctggac

SEQ ID NO: 5248604 - DNA, 25 bp, Homo sapien
cacctccgggtggccacggggatct

SEQ ID NO: 5248605 - DNA, 25 bp, Homo sapien
gactgtggtccctgctctagctgct

SEQ ID NO: 5248606 - DNA, 25 bp, Homo sapien
tacctttattaagtagttctcataa

SEQ ID NO: 5248607 - DNA, 25 bp, Homo sapien
gaaattcgtctcaaataatttgcct

SEQ ID NO: 5248608 - DNA, 25 bp, Homo sapien
tctcataagaggaaattcgtctcaa

SEQ ID NO: 5248609 - DNA, 25 bp, Homo sapien
tattaagtagttctcataagaggaa

SEQ ID NO: 5248610 - DNA, 25 bp, Homo sapien
cagggatgctcttctgggaatatct

SEQ ID NO: 5248611 - DNA, 25 bp, Homo sapien
cacagtggccaagcttatttctccc

SEQ ID NO: 5248612 - DNA, 25 bp, Homo sapien
gatgataacacagtggccaagctta

SEQ ID NO: 5248613 - DNA, 25 bp, Homo sapien
gtggccaagcttatttctcccaggg

SEQ ID NO: 5248614 - DNA, 25 bp, Homo sapien
ttgtcgtctgtcttcttcgtggcca

SEQ ID NO: 5248615 - DNA, 25 bp, Homo sapien
tccacaatgaacacagtgtgttgtt

SEQ ID NO: 5248616 - DNA, 25 bp, Homo sapien
gaacacagtgtgttgttgtcgtctg

SEQ ID NO: 5248617 - DNA, 25 bp, Homo sapien
gtcgtctgtcttcttcgtggccaac

SEQ ID NO: 5248618 - DNA, 25 bp, Homo sapien
gttgaccactgccacgtcgatgtca

SEQ ID NO: 5248619 - DNA, 25 bp, Homo sapien
cactgccacgtcgatgtcatagagc

SEQ ID NO: 5248620 - DNA, 25 bp, Homo sapien
ccactgccacgtcgatgtcatagag

SEQ ID NO: 5248621 - DNA, 25 bp, Homo sapien
gaccactgccacgtcgatgtcatag

SEQ ID NO: 5248622 - DNA, 25 bp, Homo sapien
cctgtggtcatctatgccctttgct

SEQ ID NO: 5248623 - DNA, 25 bp, Homo sapien
ctgtggtcatctatgccctttgctg

SEQ ID NO: 5248624 - DNA, 25 bp, Homo sapien
tgtggtcatctatgccctttgctgc

SEQ ID NO: 5248625 - DNA, 25 bp, Homo sapien
tgtccttgcgtcttgaacctgcctg

SEQ ID NO: 5248626 - DNA, 25 bp, Homo sapien
gccgtcttgaaggaggcctgatcta

SEQ ID NO: 5248627 - DNA, 25 bp, Homo sapien
tctgaaggctcatagacacttgcag

SEQ ID NO: 5248628 - DNA, 25 bp, Homo sapien
tgtcccacgctggattctgaaggct

SEQ ID NO: 5248629 - DNA, 25 bp, Homo sapien
ctggggactcatcagatggtaaagc

SEQ ID NO: 5248630 - DNA, 25 bp, Homo sapien
tttctcctcagcagacttggtggtg

SEQ ID NO: 5248631 - DNA, 25 bp, Homo sapien
caagtctgcaggtctcctaagctgt

SEQ ID NO: 5248632 - DNA, 25 bp, Homo sapien
gtctcctaagctgtccaccacattt

SEQ ID NO: 5248633 - DNA, 25 bp, Homo sapien
tcctcactggccgtgtacaggctgg

SEQ ID NO: 5248634 - DNA, 25 bp, Homo sapien
cactggccgtgtacaggctggagtc

SEQ ID NO: 5248635 - DNA, 25 bp, Homo sapien
ctgttctcctcactggccgtgtaca

SEQ ID NO: 5248636 - DNA, 25 bp, Homo sapien
ctggccgtgtacaggctggagtcca

SEQ ID NO: 5248637 - DNA, 25 bp, Homo sapien
tgtctccagcacacgggtgatggtg

SEQ ID NO: 5248638 - DNA, 25 bp, Homo sapien
gaagcctgtggctatggccatgccc

SEQ ID NO: 5248639 - DNA, 25 bp, Homo sapien
aggagaaggccgagctgacgcttcc

SEQ ID NO: 5248640 - DNA, 25 bp, Homo sapien
tggtggtctcggaccacaccaggat

SEQ ID NO: 5248641 - DNA, 25 bp, Homo sapien
gcagggcgtgagggtcccagggatc

SEQ ID NO: 5248642 - DNA, 25 bp, Homo sapien
gaggccactgaaccagcccttcggg

SEQ ID NO: 5248643 - DNA, 25 bp, Homo sapien
ggaaccgtccagagcaagaatgggc

SEQ ID NO: 5248644 - DNA, 25 bp, Homo sapien
ccgtccagagcaagaatgggcaagg

SEQ ID NO: 5248645 - DNA, 25 bp, Homo sapien
tggtctcagtgtctagcagtgccgg

SEQ ID NO: 5248646 - DNA, 25 bp, Homo sapien
gatttcattcccgtggcctcagtga

SEQ ID NO: 5248647 - DNA, 25 bp, Homo sapien
gccgttgtgctggttgactcatctc

SEQ ID NO: 5248648 - DNA, 25 bp, Homo sapien
cagtgccgggcacatagtggatgtt

SEQ ID NO: 5248649 - DNA, 25 bp, Homo sapien
gaaaccccacaaagcagacttggtg

SEQ ID NO: 5248650 - DNA, 25 bp, Homo sapien
gaaagggcagaaagctcatcctgtc

SEQ ID NO: 5248651 - DNA, 25 bp, Homo sapien
tctctctccagtgataaggccgttc

SEQ ID NO: 5248652 - DNA, 25 bp, Homo sapien
ccagaataggttcagcgtgactccc

SEQ ID NO: 5248653 - DNA, 25 bp, Homo sapien
cttcgggaacaggtgtccaggcgct

SEQ ID NO: 5248654 - DNA, 25 bp, Homo sapien
ttattctagcattgcggcccagagg

SEQ ID NO: 5248655 - DNA, 25 bp, Homo sapien
ggcccagaggttacgtagcccatca

SEQ ID NO: 5248656 - DNA, 25 bp, Homo sapien
tcagggagtttactcaggagcacgt

SEQ ID NO: 5248657 - DNA, 25 bp, Homo sapien
tgtttctcttacaccccaggttgga

SEQ ID NO: 5248658 - DNA, 25 bp, Homo sapien
gctctcaggcccaaatttaggtccc

SEQ ID NO: 5248659 - DNA, 25 bp, Homo sapien
gaagggcctggatgtcaccctgtag

SEQ ID NO: 5248660 - DNA, 25 bp, Homo sapien
tttatcttagcacagctgatggccc

SEQ ID NO: 5248661 - DNA, 25 bp, Homo sapien
cacagggatgggcagatgcctccct

SEQ ID NO: 5248662 - DNA, 25 bp, Homo sapien
agatctggcagtggagagtccctgc

SEQ ID NO: 5248663 - DNA, 25 bp, Homo sapien
gctttttcagagatgccagatgcct

SEQ ID NO: 5248664 - DNA, 25 bp, Homo sapien
gaggagagacgctgctattcacagg

SEQ ID NO: 5248665 - DNA, 25 bp, Homo sapien
ggctcgggtgcatccttggacaagt

SEQ ID NO: 5248666 - DNA, 25 bp, Homo sapien
caggagaggacatagatctgaggct

SEQ ID NO: 5248667 - DNA, 25 bp, Homo sapien
gtcctgtagtccctgcgcatcaatg

SEQ ID NO: 5248668 - DNA, 25 bp, Homo sapien
aattttcaatttgcactgggctcca

SEQ ID NO: 5248669 - DNA, 25 bp, Homo sapien
gtgccgagttgcgtctggccgccac

SEQ ID NO: 5248670 - DNA, 25 bp, Homo sapien
acgcctgtgccgagttgcgtctggc

SEQ ID NO: 5248671 - DNA, 25 bp, Homo sapien
aggcgcggacgcctgtgccgagttg

SEQ ID NO: 5248672 - DNA, 25 bp, Homo sapien
cacagagccaggcgcggacgcctgt

SEQ ID NO: 5248673 - DNA, 25 bp, Homo sapien
gcacacccggggctgcacacggcca

SEQ ID NO: 5248674 - DNA, 25 bp, Homo sapien
cctggttgactaggggaggccggca

SEQ ID NO: 5248675 - DNA, 25 bp, Homo sapien
cccgggctggtacccgcggagcaca

SEQ ID NO: 5248676 - DNA, 25 bp, Homo sapien
gcgtgctgtcggccgcgaggggcga

SEQ ID NO: 5248677 - DNA, 25 bp, Homo sapien
cccagggaaggactcagggcgcggg

SEQ ID NO: 5248678 - DNA, 25 bp, Homo sapien
ggcccggtgaccgtcaactttgcgc

SEQ ID NO: 5248679 - DNA, 25 bp, Homo sapien
cagcgccttcgcgagatgccgaagc

SEQ ID NO: 5248680 - DNA, 25 bp, Homo sapien
accgtcaactttgcgcacaaatgtg

SEQ ID NO: 5248681 - DNA, 25 bp, Homo sapien
cagttagcatactaggtgaggagtt

SEQ ID NO: 5248682 - DNA, 25 bp, Homo sapien
tcagttagcatactaggtgaggagt

SEQ ID NO: 5248683 - DNA, 25 bp, Homo sapien
cttgaaggcctctgttgctatggcg

SEQ ID NO: 5248684 - DNA, 25 bp, Homo sapien
aggcctctgttgctatggcgttgag

SEQ ID NO: 5248685 - DNA, 25 bp, Homo sapien
agtgcagggaggtgatctcggctca

SEQ ID NO: 5248686 - DNA, 25 bp, Homo sapien
ggctggagtgcagggaggtgatctc

SEQ ID NO: 5248687 - DNA, 25 bp, Homo sapien
ctggagtgcagggaggtgatctcgg

SEQ ID NO: 5248688 - DNA, 25 bp, Homo sapien
caggctggagtgcagggaggtgatc

SEQ ID NO: 5248689 - DNA, 25 bp, Homo sapien
aattcctcttagaatcaggagccag

SEQ ID NO: 5248690 - DNA, 25 bp, Homo sapien
tgaggaggactcttgaattgcaggt

SEQ ID NO: 5248691 - DNA, 25 bp, Homo sapien
cccagctggtctttggaatgtagga

SEQ ID NO: 5248692 - DNA, 25 bp, Homo sapien
gaaggaatgacaggtcccagctggt

SEQ ID NO: 5248693 - DNA, 25 bp, Homo sapien
ctccatccatactgcggagatgccg

SEQ ID NO: 5248694 - DNA, 25 bp, Homo sapien
gactgccacgggatgttccgcatct

SEQ ID NO: 5248695 - DNA, 25 bp, Homo sapien
gccacgggatgttccgcatctccat

SEQ ID NO: 5248696 - DNA, 25 bp, Homo sapien
tgatgactgccacgggatgttccgc

SEQ ID NO: 5248697 - DNA, 25 bp, Homo sapien
tgcatctccggtaaacaagtcccag

SEQ ID NO: 5248698 - DNA, 25 bp, Homo sapien
gccgctgcaatctgcatctccggta

SEQ ID NO: 5248699 - DNA, 25 bp, Homo sapien
gctgcaatctgcatctccggtaaac

SEQ ID NO: 5248700 - DNA, 25 bp, Homo sapien
cgtggtttccaggaaccttgtcaca

SEQ ID NO: 5248701 - DNA, 25 bp, Homo sapien
tggtatggctggttgagaagggccc

SEQ ID NO: 5248702 - DNA, 25 bp, Homo sapien
cagaagtctcgtgatgtattcatgg

SEQ ID NO: 5248703 - DNA, 25 bp, Homo sapien
cctgagatgggcgtatagctccatc

SEQ ID NO: 5248704 - DNA, 25 bp, Homo sapien
tgggcgtatagctccatctttcgca

SEQ ID NO: 5248705 - DNA, 25 bp, Homo sapien
agggcacagatcttgtgggacctgc

SEQ ID NO: 5248706 - DNA, 25 bp, Homo sapien
tttcccagggcacagatcttgtggg

SEQ ID NO: 5248707 - DNA, 25 bp, Homo sapien
ccagggcacagatcttgtgggacct

SEQ ID NO: 5248708 - DNA, 25 bp, Homo sapien
gctgtcaccatggagttgggctgtc

SEQ ID NO: 5248709 - DNA, 25 bp, Homo sapien
tatgaaagctgagagctctcgttct

SEQ ID NO: 5248710 - DNA, 25 bp, Homo sapien
ttgctgtaggccagcccacaagtgc

SEQ ID NO: 5248711 - DNA, 25 bp, Homo sapien
ccagccatgtgcagagacgcagtgg

SEQ ID NO: 5248712 - DNA, 25 bp, Homo sapien
ctggatcattccagtggacagcagc

SEQ ID NO: 5248713 - DNA, 25 bp, Homo sapien
ggactttgcacctgtagcatgatga

SEQ ID NO: 5248714 - DNA, 25 bp, Homo sapien
agcatgatgatgtccccagaccctg

SEQ ID NO: 5248715 - DNA, 25 bp, Homo sapien
ttccactgagatcacatactctggg

SEQ ID NO: 5248716 - DNA, 25 bp, Homo sapien
tgcacctgtagcatgatgatgtccc

SEQ ID NO: 5248717 - DNA, 25 bp, Homo sapien
gcgcaggcgccggtgcgcgggtggg

SEQ ID NO: 5248718 - DNA, 25 bp, Homo sapien
gcgcgacacggcactggttcccttg

SEQ ID NO: 5248719 - DNA, 25 bp, Homo sapien
cggtgcgcgggtgggaccaggagcc

SEQ ID NO: 5248720 - DNA, 25 bp, Homo sapien
cgggcgcagggtggggcgcgacacg

SEQ ID NO: 5248721 - DNA, 25 bp, Homo sapien
gggtccaagtacatcctcgaggtcg

SEQ ID NO: 5248722 - DNA, 25 bp, Homo sapien
catacgaaaacatggaaacccgcgg

SEQ ID NO: 5248723 - DNA, 25 bp, Homo sapien
taagcaagggtatgcgcacacttcc

SEQ ID NO: 5248724 - DNA, 25 bp, Homo sapien
caaatgcggacattctcgggtccaa

SEQ ID NO: 5248725 - DNA, 25 bp, Homo sapien
cgcgaaggtgtcaacagtgggcaca

SEQ ID NO: 5248726 - DNA, 25 bp, Homo sapien
caggcctttcatggcagtgcagggc

SEQ ID NO: 5248727 - DNA, 25 bp, Homo sapien
ccatacagaagccacgaggagcagt

SEQ ID NO: 5248728 - DNA, 25 bp, Homo sapien
cctctcccggaaagaggcctgtgct

SEQ ID NO: 5248729 - DNA, 25 bp, Homo sapien
agaaggacatcacccaagtcctggg

SEQ ID NO: 5248730 - DNA, 25 bp, Homo sapien
gagaggaccgttgacggagaaggac

SEQ ID NO: 5248731 - DNA, 25 bp, Homo sapien
gaccgttgacggagaaggacatcac

SEQ ID NO: 5248732 - DNA, 25 bp, Homo sapien
ctgaaggagaggaccgttgacggag

SEQ ID NO: 5248733 - DNA, 25 bp, Homo sapien
tctagatccccgttgtttattcttg

SEQ ID NO: 5248734 - DNA, 25 bp, Homo sapien
tcagagactgaggacggtggcatca

SEQ ID NO: 5248735 - DNA, 25 bp, Homo sapien
gagcattgcccaccaggtgtttccc

SEQ ID NO: 5248736 - DNA, 25 bp, Homo sapien
agctccggccgcctgctcaggagtg

SEQ ID NO: 5248737 - DNA, 25 bp, Homo sapien
ggatcccggtagtttagcctgaaga

SEQ ID NO: 5248738 - DNA, 25 bp, Homo sapien
cggtagtttagcctgaagaaacgtg

SEQ ID NO: 5248739 - DNA, 25 bp, Homo sapien
cagggcggggataccgcgccaacac

SEQ ID NO: 5248740 - DNA, 25 bp, Homo sapien
actgttggcctttccggagcgagtt

SEQ ID NO: 5248741 - DNA, 25 bp, Homo sapien
gccaagtcagtcgacaagcgggcac

SEQ ID NO: 5248742 - DNA, 25 bp, Homo sapien
ggctccagccctcgagtgggacagc

SEQ ID NO: 5248743 - DNA, 25 bp, Homo sapien
tatcaagcggactcgatgcgcgatg

SEQ ID NO: 5248744 - DNA, 25 bp, Homo sapien
tagcggtcccctcattctaggtttc

SEQ ID NO: 5248745 - DNA, 25 bp, Homo sapien
gagcaaggaggcggatgaggaacaa

SEQ ID NO: 5248746 - DNA, 25 bp, Homo sapien
ggcgagcaaggaggcggatgaggaa

SEQ ID NO: 5248747 - DNA, 25 bp, Homo sapien
aaggaggcggatgaggaacaatgca

SEQ ID NO: 5248748 - DNA, 25 bp, Homo sapien
gcaaggaggcggatgaggaacaatg

SEQ ID NO: 5248749 - DNA, 25 bp, Homo sapien
ttggtggtgatttcggagctggtgt

SEQ ID NO: 5248750 - DNA, 25 bp, Homo sapien
tcggagctggtgtctacggctgcgt

SEQ ID NO: 5248751 - DNA, 25 bp, Homo sapien
tggtgatttcggagctggtgtctac

SEQ ID NO: 5248752 - DNA, 25 bp, Homo sapien
ttcggagctggtgtctacggctgcg

SEQ ID NO: 5248753 - DNA, 25 bp, Homo sapien
taccggccacagacgagtttcgagg

SEQ ID NO: 5248754 - DNA, 25 bp, Homo sapien
tcaaagttatttccgtgcgcccggc

SEQ ID NO: 5248755 - DNA, 25 bp, Homo sapien
cacacaaagagtgggctgcctgagg

SEQ ID NO: 5248756 - DNA, 25 bp, Homo sapien
gcaacagcgggcttgagacagtcca

SEQ ID NO: 5248757 - DNA, 25 bp, Homo sapien
tcgccccgagctgcggcgcacacgg

SEQ ID NO: 5248758 - DNA, 25 bp, Homo sapien
ccgtgttggcccgcgtcgccccgag

SEQ ID NO: 5248759 - DNA, 25 bp, Homo sapien
cggcgcacacggtgctcccgggcag

SEQ ID NO: 5248760 - DNA, 25 bp, Homo sapien
tcgcggccgccgtgttggcccgcgt

SEQ ID NO: 5248761 - DNA, 25 bp, Homo sapien
cacgacgggcgcggacgagggccga

SEQ ID NO: 5248762 - DNA, 25 bp, Homo sapien
cgggcgcggacgagggccgaaatat

SEQ ID NO: 5248763 - DNA, 25 bp, Homo sapien
gcggacgagggccgaaatattaaga

SEQ ID NO: 5248764 - DNA, 25 bp, Homo sapien
gggcacgacgggcgcggacgagggc

SEQ ID NO: 5248765 - DNA, 25 bp, Homo sapien
ggacacaagggttaaggagacgcca

SEQ ID NO: 5248766 - DNA, 25 bp, Homo sapien
ttaaggagacgccaaggtgactcgc

SEQ ID NO: 5248767 - DNA, 25 bp, Homo sapien
cacaagggttaaggagacgccaagg

SEQ ID NO: 5248768 - DNA, 25 bp, Homo sapien
agacgccaaggtgactcgcgccaat

SEQ ID NO: 5248769 - DNA, 25 bp, Homo sapien
cccggactgagtccagaaggggtca

SEQ ID NO: 5248770 - DNA, 25 bp, Homo sapien
cccacaaactcattcccggactgag

SEQ ID NO: 5248771 - DNA, 25 bp, Homo sapien
attcccggactgagtccagaagggg

SEQ ID NO: 5248772 - DNA, 25 bp, Homo sapien
tcccggactgagtccagaaggggtc

SEQ ID NO: 5248773 - DNA, 25 bp, Homo sapien
tcggagaaaatcgaacagccaggcc

SEQ ID NO: 5248774 - DNA, 25 bp, Homo sapien
ggtgcttcggagaaaatcgaacagc

SEQ ID NO: 5248775 - DNA, 25 bp, Homo sapien
cttttggtgcttcggagaaaatcga

SEQ ID NO: 5248776 - DNA, 25 bp, Homo sapien
gcttcggagaaaatcgaacagccag

SEQ ID NO: 5248777 - DNA, 25 bp, Homo sapien
gggctactactcatcgccctcgcgg

SEQ ID NO: 5248778 - DNA, 25 bp, Homo sapien
ggatgcgcctctcgggctactactc

SEQ ID NO: 5248779 - DNA, 25 bp, Homo sapien
tactcatcgccctcgcgggaagtca

SEQ ID NO: 5248780 - DNA, 25 bp, Homo sapien
ggggatgcgcctctcgggctactac

SEQ ID NO: 5248781 - DNA, 25 bp, Homo sapien
cccaaagtccaccgggctgcgtagg

SEQ ID NO: 5248782 - DNA, 25 bp, Homo sapien
gtcgccccaaagtccaccgggctgc

SEQ ID NO: 5248783 - DNA, 25 bp, Homo sapien
agtccaccgggctgcgtaggtccga

SEQ ID NO: 5248784 - DNA, 25 bp, Homo sapien
aagtccaccgggctgcgtaggtccg

SEQ ID NO: 5248785 - DNA, 25 bp, Homo sapien
agcttgcagtggcacgcgcgcgggt

SEQ ID NO: 5248786 - DNA, 25 bp, Homo sapien
gggctctcgactcgacgccccactg

SEQ ID NO: 5248787 - DNA, 25 bp, Homo sapien
cgcgggtcgcgcgtcggtcggccgg

SEQ ID NO: 5248788 - DNA, 25 bp, Homo sapien
cttgcagtggcacgcgcgcgggtcg

SEQ ID NO: 5248789 - DNA, 25 bp, Homo sapien
cggggccgccgagtgcgtcccttgc

SEQ ID NO: 5248790 - DNA, 25 bp, Homo sapien
tcggccgctgtccggcgagcggctc

SEQ ID NO: 5248791 - DNA, 25 bp, Homo sapien
cgagcggctccgggccacctgtcgg

SEQ ID NO: 5248792 - DNA, 25 bp, Homo sapien
gcggctccgggccacctgtcggccc

SEQ ID NO: 5248793 - DNA, 25 bp, Homo sapien
tgtcggccctctcagtccggcccgc

SEQ ID NO: 5248794 - DNA, 25 bp, Homo sapien
taactttttccacacgacacggcca

SEQ ID NO: 5248795 - DNA, 25 bp, Homo sapien
acacgacacggccaccaataccaac

SEQ ID NO: 5248796 - DNA, 25 bp, Homo sapien
actccgcccgggatccaaaaggcag

SEQ ID NO: 5248797 - DNA, 25 bp, Homo sapien
gactccgcccgggatccaaaaggca

SEQ ID NO: 5248798 - DNA, 25 bp, Homo sapien
cggcggctagggatcccgacagcac

SEQ ID NO: 5248799 - DNA, 25 bp, Homo sapien
caaatccgaccgctgttcctagagg

SEQ ID NO: 5248800 - DNA, 25 bp, Homo sapien
gctgttcctagaggccgcaaaccgc

SEQ ID NO: 5248801 - DNA, 25 bp, Homo sapien
ccgcaaaccgctgcttggcggtgcc

SEQ ID NO: 5248802 - DNA, 25 bp, Homo sapien
taagagtcgcatgttgagaaaggcc

SEQ ID NO: 5248803 - DNA, 25 bp, Homo sapien
gaaaggcggcaggttatgttccaaa

SEQ ID NO: 5248804 - DNA, 25 bp, Homo sapien
tgttctgtccgtcccaaattaagag

SEQ ID NO: 5248805 - DNA, 25 bp, Homo sapien
tactggtctgtacggctgttctgtc

SEQ ID NO: 5248806 - DNA, 25 bp, Homo sapien
cacaacttccttcttctcctttaag

SEQ ID NO: 5248807 - DNA, 25 bp, Homo sapien
agcaggggcgtctcttccattttct

SEQ ID NO: 5248808 - DNA, 25 bp, Homo sapien
tccattttctgcctcttccacaact

SEQ ID NO: 5248809 - DNA, 25 bp, Homo sapien
attttctgcctcttccacaacttcc

SEQ ID NO: 5248810 - DNA, 25 bp, Homo sapien
catatataggtatgtttaaagtaga

SEQ ID NO: 5248811 - DNA, 25 bp, Homo sapien
tatataggtatgtttaaagtagaac

SEQ ID NO: 5248812 - DNA, 25 bp, Homo sapien
ttttgtggggcggtagctgccaggg

SEQ ID NO: 5248813 - DNA, 25 bp, Homo sapien
aaattttgtggggcggtagctgcca

SEQ ID NO: 5248814 - DNA, 25 bp, Homo sapien
aatatttaactagcaataatcgcgc

SEQ ID NO: 5248815 - DNA, 25 bp, Homo sapien
aaatatttaactagcaataatcgcg

SEQ ID NO: 5248816 - DNA, 25 bp, Homo sapien
cctattcttgttcaggcgctgctcg

SEQ ID NO: 5248817 - DNA, 25 bp, Homo sapien
tgaacctattcttgttcaggcgctg

SEQ ID NO: 5248818 - DNA, 25 bp, Homo sapien
tattcttgttcaggcgctgctcgaa

SEQ ID NO: 5248819 - DNA, 25 bp, Homo sapien
tcctctgaacctattcttgttcagg

SEQ ID NO: 5248820 - DNA, 25 bp, Homo sapien
tggcggctgcatctacagcccagcc

SEQ ID NO: 5248821 - DNA, 25 bp, Homo sapien
catcatgaaacctgcacattaactg

SEQ ID NO: 5248822 - DNA, 25 bp, Homo sapien
tgcacattaactgccccaggacaag

SEQ ID NO: 5248823 - DNA, 25 bp, Homo sapien
gaaaacaggccatgtcattaccagc

SEQ ID NO: 5248824 - DNA, 25 bp, Homo sapien
tgtcagcctcctgctccccattttc

SEQ ID NO: 5248825 - DNA, 25 bp, Homo sapien
ctcattgtcagcctcctgctcccca

SEQ ID NO: 5248826 - DNA, 25 bp, Homo sapien
ttgtcagcctcctgctccccatttt

SEQ ID NO: 5248827 - DNA, 25 bp, Homo sapien
cattgtcagcctcctgctccccatt

SEQ ID NO: 5248828 - DNA, 25 bp, Homo sapien
tcagagctgcacgaaagaaactttc

SEQ ID NO: 5248829 - DNA, 25 bp, Homo sapien
cactacacaggtgggactctccaga

SEQ ID NO: 5248830 - DNA, 25 bp, Homo sapien
cccgaggaacatgtagtggactgca

SEQ ID NO: 5248831 - DNA, 25 bp, Homo sapien
aaaaggccagcccaatagatcagtg

SEQ ID NO: 5248832 - DNA, 25 bp, Homo sapien
gcccgtagctgactcagcttcctca

SEQ ID NO: 5248833 - DNA, 25 bp, Homo sapien
gcttgcccgtagctgactcagcttc

SEQ ID NO: 5248834 - DNA, 25 bp, Homo sapien
agctgcccgcttgcccgtagctgac

SEQ ID NO: 5248835 - DNA, 25 bp, Homo sapien
gcccgcttgcccgtagctgactcag

SEQ ID NO: 5248836 - DNA, 25 bp, Homo sapien
gcttgagcacctcagctaaaggcag

SEQ ID NO: 5248837 - DNA, 25 bp, Homo sapien
ctggcagagcaagaaccagggaccc

SEQ ID NO: 5248838 - DNA, 25 bp, Homo sapien
tacaaagtcagaaacagtccctccg

SEQ ID NO: 5248839 - DNA, 25 bp, Homo sapien
tggggagacccagatgccaaacccc

SEQ ID NO: 5248840 - DNA, 25 bp, Homo sapien
caggagccctatccagcccactgcc

SEQ ID NO: 5248841 - DNA, 25 bp, Homo sapien
atcctcgtcggtcttctgcttcttg

SEQ ID NO: 5248842 - DNA, 25 bp, Homo sapien
ctagtcatcctcgtcggtcttctgc

SEQ ID NO: 5248843 - DNA, 25 bp, Homo sapien
tctgcttcttggtatcgacatcgtc

SEQ ID NO: 5248844 - DNA, 25 bp, Homo sapien
gcttcttggtatcgacatcgtcatc

SEQ ID NO: 5248845 - DNA, 25 bp, Homo sapien
gttgcaaattctcatggtttgggtt

SEQ ID NO: 5248846 - DNA, 25 bp, Homo sapien
tgttgcaaattctcatggtttgggt

SEQ ID NO: 5248847 - DNA, 25 bp, Homo sapien
ttgcaaattctcatggtttgggttg

SEQ ID NO: 5248848 - DNA, 25 bp, Homo sapien
tttttaaccatctcatacaaaccaa

SEQ ID NO: 5248849 - DNA, 25 bp, Homo sapien
ggcctttttaaccatctcatacaaa

SEQ ID NO: 5248850 - DNA, 25 bp, Homo sapien
tttaaccatctcatacaaaccaact

SEQ ID NO: 5248851 - DNA, 25 bp, Homo sapien
ttggcctttttaaccatctcataca

SEQ ID NO: 5248852 - DNA, 25 bp, Homo sapien
gtaactgtacctgtcaccctccttg

SEQ ID NO: 5248853 - DNA, 25 bp, Homo sapien
ttgggccctacaggctacacatcta

SEQ ID NO: 5248854 - DNA, 25 bp, Homo sapien
ttgatttttgacacatacaccccta

SEQ ID NO: 5248855 - DNA, 25 bp, Homo sapien
aaaaattccgtgttcctgacccatg

SEQ ID NO: 5248856 - DNA, 25 bp, Homo sapien
cttagggcgaccaggacaaaaggca

SEQ ID NO: 5248857 - DNA, 25 bp, Homo sapien
tatattgtgtcctgctcgctggtcc

SEQ ID NO: 5248858 - DNA, 25 bp, Homo sapien
tctcaccatgcagtgtaaagggcac

SEQ ID NO: 5248859 - DNA, 25 bp, Homo sapien
catacagatttgactggcaaggcca

SEQ ID NO: 5248860 - DNA, 25 bp, Homo sapien
cactttgtcaagtcatggttcccca

SEQ ID NO: 5248861 - DNA, 25 bp, Homo sapien
caccttttgctcaagggtcagggat

SEQ ID NO: 5248862 - DNA, 25 bp, Homo sapien
ccctggcttcagtggaatgacttgg

SEQ ID NO: 5248863 - DNA, 25 bp, Homo sapien
taattggtctgaaaggtcaggtcca

SEQ ID NO: 5248864 - DNA, 25 bp, Homo sapien
ctgaggcatatagcaatttgttaca

SEQ ID NO: 5248865 - DNA, 25 bp, Homo sapien
tgaggcatatagcaatttgttacac

SEQ ID NO: 5248866 - DNA, 25 bp, Homo sapien
ttgttcacttaataatagatttacc

SEQ ID NO: 5248867 - DNA, 25 bp, Homo sapien
gttcacttaataatagatttaccat

SEQ ID NO: 5248868 - DNA, 25 bp, Homo sapien
tgttcacttaataatagatttacca

SEQ ID NO: 5248869 - DNA, 25 bp, Homo sapien
tttgttcacttaataatagatttac

SEQ ID NO: 5248870 - DNA, 25 bp, Homo sapien
cgtcggaaacgctgtcggagaagcc

SEQ ID NO: 5248871 - DNA, 25 bp, Homo sapien
gcgaccttgtgtgggacaaatacca

SEQ ID NO: 5248872 - DNA, 25 bp, Homo sapien
acagtgacttggagcgggcgacctt

SEQ ID NO: 5248873 - DNA, 25 bp, Homo sapien
tgatctcgaagcctagaagcctctt

SEQ ID NO: 5248874 - DNA, 25 bp, Homo sapien
tggttgagatgccaatcgccaaggc

SEQ ID NO: 5248875 - DNA, 25 bp, Homo sapien
gttgagatgccaatcgccaaggctg

SEQ ID NO: 5248876 - DNA, 25 bp, Homo sapien
tggctggttgagatgccaatcgcca

SEQ ID NO: 5248877 - DNA, 25 bp, Homo sapien
ctactggctggttgagatgccaatc

SEQ ID NO: 5248878 - DNA, 25 bp, Homo sapien
ttgacgttaacagtccccctgcgaa

SEQ ID NO: 5248879 - DNA, 25 bp, Homo sapien
gcccttcccattgacgttaacagtc

SEQ ID NO: 5248880 - DNA, 25 bp, Homo sapien
cattgacgttaacagtccccctgcg

SEQ ID NO: 5248881 - DNA, 25 bp, Homo sapien
gacgttaacagtccccctgcgaagc

SEQ ID NO: 5248882 - DNA, 25 bp, Homo sapien
tctcagacggctagtgtgctcagtg

SEQ ID NO: 5248883 - DNA, 25 bp, Homo sapien
gaagttaactctctgcgggctgtca

SEQ ID NO: 5248884 - DNA, 25 bp, Homo sapien
tccgctgggacaaactctaggcaac

SEQ ID NO: 5248885 - DNA, 25 bp, Homo sapien
tctaagttacagaggaaccgagtgc

SEQ ID NO: 5248886 - DNA, 25 bp, Homo sapien
ctctttcacggtttaatcagtgttt

SEQ ID NO: 5248887 - DNA, 25 bp, Homo sapien
ttctctttcacggtttaatcagtgt

SEQ ID NO: 5248888 - DNA, 25 bp, Homo sapien
tgttctctttcacggtttaatcagt

SEQ ID NO: 5248889 - DNA, 25 bp, Homo sapien
tttgttctctttcacggtttaatca

SEQ ID NO: 5248890 - DNA, 25 bp, Homo sapien
ctcggtcctcttagtcgctggctcg

SEQ ID NO: 5248891 - DNA, 25 bp, Homo sapien
ctgcccgcaggttgtcaagcgtcca

SEQ ID NO: 5248892 - DNA, 25 bp, Homo sapien
ttgtcaagcgtccatgatcaccccg

SEQ ID NO: 5248893 - DNA, 25 bp, Homo sapien
ggtcctcttagtcgctggctcggcc

SEQ ID NO: 5248894 - DNA, 25 bp, Homo sapien
tgatacgacattttaaccaaacgtg

SEQ ID NO: 5248895 - DNA, 25 bp, Homo sapien
tgtattcggcctcctcctgatacga

SEQ ID NO: 5248896 - DNA, 25 bp, Homo sapien
ggcctcctcctgatacgacatttta

SEQ ID NO: 5248897 - DNA, 25 bp, Homo sapien
caaacgtgacttcagaatgtgtaaa

SEQ ID NO: 5248898 - DNA, 25 bp, Homo sapien
tccaggagattacttgagggtttct

SEQ ID NO: 5248899 - DNA, 25 bp, Homo sapien
cctggcttatgagagcagtgagggc

SEQ ID NO: 5248900 - DNA, 25 bp, Homo sapien
aaactgctccaggagattacttgag

SEQ ID NO: 5248901 - DNA, 25 bp, Homo sapien
actccgggagcctctaagacctggc

SEQ ID NO: 5248902 - DNA, 25 bp, Homo sapien
tctggtccttaagaatgcatgaatc

SEQ ID NO: 5248903 - DNA, 25 bp, Homo sapien
cacaggttcacaatacttcagcact

SEQ ID NO: 5248904 - DNA, 25 bp, Homo sapien
tctgtctcacaatagggtacctcac

SEQ ID NO: 5248905 - DNA, 25 bp, Homo sapien
tccttatcgatattgcactggaggt

SEQ ID NO: 5248906 - DNA, 25 bp, Homo sapien
tccaataaactgaaggccggcaact

SEQ ID NO: 5248907 - DNA, 25 bp, Homo sapien
gctaagcaccctatggagaactcca

SEQ ID NO: 5248908 - DNA, 25 bp, Homo sapien
ttatagttcggcaagcaaggctgac

SEQ ID NO: 5248909 - DNA, 25 bp, Homo sapien
aattgggcacctgaaatggctggac

SEQ ID NO: 5248910 - DNA, 25 bp, Homo sapien
gttcaccacagaccaaactgtctac

SEQ ID NO: 5248911 - DNA, 25 bp, Homo sapien
caatcactgtagtgttcaaacagag

SEQ ID NO: 5248912 - DNA, 25 bp, Homo sapien
aaactgtctaccaatcactgtagtg

SEQ ID NO: 5248913 - DNA, 25 bp, Homo sapien
tcaaacagaggacgggtgagcatgt

SEQ ID NO: 5248914 - DNA, 25 bp, Homo sapien
taggcaaacaggttcaacaactgca

SEQ ID NO: 5248915 - DNA, 25 bp, Homo sapien
tgtcccataggcaaacaggttcaac

SEQ ID NO: 5248916 - DNA, 25 bp, Homo sapien
gggtatgtcccataggcaaacaggt

SEQ ID NO: 5248917 - DNA, 25 bp, Homo sapien
ggttcaacaactgcaaataagcagc

SEQ ID NO: 5248918 - DNA, 25 bp, Homo sapien
ggtgggtattctgcacttcacagca

SEQ ID NO: 5248919 - DNA, 25 bp, Homo sapien
tctacaggtgggtattctgcacttc

SEQ ID NO: 5248920 - DNA, 25 bp, Homo sapien
acaggtgggtattctgcacttcaca

SEQ ID NO: 5248921 - DNA, 25 bp, Homo sapien
acattctacaggtgggtattctgca

SEQ ID NO: 5248922 - DNA, 25 bp, Homo sapien
tacaggcagtctgctaacagagtct

SEQ ID NO: 5248923 - DNA, 25 bp, Homo sapien
cacacaactagtagaagtggagcca

SEQ ID NO: 5248924 - DNA, 25 bp, Homo sapien
tgttacataaaaaggcatgcgcatc

SEQ ID NO: 5248925 - DNA, 25 bp, Homo sapien
tctgaaacatctaacttcgaggagt

SEQ ID NO: 5248926 - DNA, 25 bp, Homo sapien
ccacctggaggtgtgcaacttcatg

SEQ ID NO: 5248927 - DNA, 25 bp, Homo sapien
tgtcctcggtcttacaatcagatgt

SEQ ID NO: 5248928 - DNA, 25 bp, Homo sapien
caaggatgaacaagatgggctttgc

SEQ ID NO: 5248929 - DNA, 25 bp, Homo sapien
ttccatagctacaaatccaaggcag

SEQ ID NO: 5248930 - DNA, 25 bp, Homo sapien
ctcacgatggtaagatgcttcagct

SEQ ID NO: 5248931 - DNA, 25 bp, Homo sapien
gccaagctcacgatggtaagatgct

SEQ ID NO: 5248932 - DNA, 25 bp, Homo sapien
cgatggtaagatgcttcagcttgtt

SEQ ID NO: 5248933 - DNA, 25 bp, Homo sapien
ttgatgccaagctcacgatggtaag

SEQ ID NO: 5248934 - DNA, 25 bp, Homo sapien
aaaaccatctggcaagcattagcga

SEQ ID NO: 5248935 - DNA, 25 bp, Homo sapien
aacagctgcctctaggctcgggaaa

SEQ ID NO: 5248936 - DNA, 25 bp, Homo sapien
gtattactcccatagccaacagctg

SEQ ID NO: 5248937 - DNA, 25 bp, Homo sapien
ctcgggaaacgcaggctagtggtaa

SEQ ID NO: 5248938 - DNA, 25 bp, Homo sapien
tttcagcaacacggagtaggggata

SEQ ID NO: 5248939 - DNA, 25 bp, Homo sapien
ctttcagcaacacggagtaggggat

SEQ ID NO: 5248940 - DNA, 25 bp, Homo sapien
tcagcaacacggagtaggggataca

SEQ ID NO: 5248941 - DNA, 25 bp, Homo sapien
ttcagcaacacggagtaggggatac

SEQ ID NO: 5248942 - DNA, 25 bp, Homo sapien
gataaggtcttctagttcccggaga

SEQ ID NO: 5248943 - DNA, 25 bp, Homo sapien
tgtagacagcctcaatgataaggtc

SEQ ID NO: 5248944 - DNA, 25 bp, Homo sapien
tgtcacggccaatgcagaaatccac

SEQ ID NO: 5248945 - DNA, 25 bp, Homo sapien
gatatccttctttcggatgtcacgg

SEQ ID NO: 5248946 - DNA, 25 bp, Homo sapien
tgctcgatgcccagtagaactgctt

SEQ ID NO: 5248947 - DNA, 25 bp, Homo sapien
tctttgtactggttggctctcagaa

SEQ ID NO: 5248948 - DNA, 25 bp, Homo sapien
cctgctgctgagttcggttgtggtt

SEQ ID NO: 5248949 - DNA, 25 bp, Homo sapien
tgctgctgagttcggttgtggttct

SEQ ID NO: 5248950 - DNA, 25 bp, Homo sapien
ttataagattcaggagggggacatc

SEQ ID NO: 5248951 - DNA, 25 bp, Homo sapien
aagaaagctgttgttataagattca

SEQ ID NO: 5248952 - DNA, 25 bp, Homo sapien
gttataagattcaggagggggacat

SEQ ID NO: 5248953 - DNA, 25 bp, Homo sapien
tgttataagattcaggagggggaca

SEQ ID NO: 5248954 - DNA, 25 bp, Homo sapien
taagtcctctacagtcgttaccact

SEQ ID NO: 5248955 - DNA, 25 bp, Homo sapien
tgctgacaaatctaagtcctctaca

SEQ ID NO: 5248956 - DNA, 25 bp, Homo sapien
cagtcgttaccactttgaggcaaaa

SEQ ID NO: 5248957 - DNA, 25 bp, Homo sapien
cctccaataagactgctgacaaatc

SEQ ID NO: 5248958 - DNA, 25 bp, Homo sapien
tcttcgatggcctcccacaccactg

SEQ ID NO: 5248959 - DNA, 25 bp, Homo sapien
tggtccatacaaactgccctgactg

SEQ ID NO: 5248960 - DNA, 25 bp, Homo sapien
tgatctgccacccttcaatctgtac

SEQ ID NO: 5248961 - DNA, 25 bp, Homo sapien
cttcaatctgtacttgcctggcagt

SEQ ID NO: 5248962 - DNA, 25 bp, Homo sapien
caaaaatgtgggactaatgctctcc

SEQ ID NO: 5248963 - DNA, 25 bp, Homo sapien
tgagcagaaacgagcctgggctact

SEQ ID NO: 5248964 - DNA, 25 bp, Homo sapien
tgggaatacagctccatgaaccttc

SEQ ID NO: 5248965 - DNA, 25 bp, Homo sapien
catttggcaaagaggcacatcacca

SEQ ID NO: 5248966 - DNA, 25 bp, Homo sapien
gacactcccgttcagccagctgctg

SEQ ID NO: 5248967 - DNA, 25 bp, Homo sapien
cctctgctcagcgtgagggggacac

SEQ ID NO: 5248968 - DNA, 25 bp, Homo sapien
ctgagccgaggaggatgcggtggct

SEQ ID NO: 5248969 - DNA, 25 bp, Homo sapien
aggatgcggtggctttgagtgtctt

SEQ ID NO: 5248970 - DNA, 25 bp, Homo sapien
tgaactggagctgccaacaagggat

SEQ ID NO: 5248971 - DNA, 25 bp, Homo sapien
aactaattggagatcggagctgggc

SEQ ID NO: 5248972 - DNA, 25 bp, Homo sapien
gaaagcagcgcatcttgacgcctgg

SEQ ID NO: 5248973 - DNA, 25 bp, Homo sapien
cagcctgacaaaatgacgtggagca

SEQ ID NO: 5248974 - DNA, 25 bp, Homo sapien
cattagccggcagttccagtgggca

SEQ ID NO: 5248975 - DNA, 25 bp, Homo sapien
tcttgggagagcaagcattagccgg

SEQ ID NO: 5248976 - DNA, 25 bp, Homo sapien
ctcttgccaggagaatgccatcatc

SEQ ID NO: 5248977 - DNA, 25 bp, Homo sapien
tgcagccaggaggagttaaagatct

SEQ ID NO: 5248978 - DNA, 25 bp, Homo sapien
tacaggcttcctcaacaaggaatgc

SEQ ID NO: 5248979 - DNA, 25 bp, Homo sapien
taaaatcgatgtgggtacaggcttc

SEQ ID NO: 5248980 - DNA, 25 bp, Homo sapien
ggaatgcttggacacctgagtaatg

SEQ ID NO: 5248981 - DNA, 25 bp, Homo sapien
gatttgttccacctagatattaccc

SEQ ID NO: 5248982 - DNA, 25 bp, Homo sapien
gatgggatcctgtatgacgcgtacc

SEQ ID NO: 5248983 - DNA, 25 bp, Homo sapien
gggcaaaatcaacactaacactggg

SEQ ID NO: 5248984 - DNA, 25 bp, Homo sapien
ggccctatagctgaggacccaggta

SEQ ID NO: 5248985 - DNA, 25 bp, Homo sapien
tagatgatcaatgtgtagcggcacc

SEQ ID NO: 5248986 - DNA, 25 bp, Homo sapien
tgctttgggatgactgaaccacccc

SEQ ID NO: 5248987 - DNA, 25 bp, Homo sapien
gcctttgcagatactgcactctaca

SEQ ID NO: 5248988 - DNA, 25 bp, Homo sapien
tgaataacccggcaatgcttctatg

SEQ ID NO: 5248989 - DNA, 25 bp, Homo sapien
tattgaaactaggtcactgaataac

SEQ ID NO: 5248990 - DNA, 25 bp, Homo sapien
gaagtgggtgtagctattaaagagc

SEQ ID NO: 5248991 - DNA, 25 bp, Homo sapien
tccatactgtggactactacttggc

SEQ ID NO: 5248992 - DNA, 25 bp, Homo sapien
tcccaaaggtgacatgttgtataat

SEQ ID NO: 5248993 - DNA, 25 bp, Homo sapien
tggaaacacaaacctatgtaagtgg

SEQ ID NO: 5248994 - DNA, 25 bp, Homo sapien
ggtgataaccacgtatgtctccaga

SEQ ID NO: 5248995 - DNA, 25 bp, Homo sapien
ttcaccaaagacgatacagagatga

SEQ ID NO: 5248996 - DNA, 25 bp, Homo sapien
ccagatatgataaaggactagtacc

SEQ ID NO: 5248997 - DNA, 25 bp, Homo sapien
gtgccagtggcagaactcttcccac

SEQ ID NO: 5248998 - DNA, 25 bp, Homo sapien
gggtttctggagcctgtacactgta

SEQ ID NO: 5248999 - DNA, 25 bp, Homo sapien
agggtttctggagcctgtacactgt

SEQ ID NO: 5249000 - DNA, 25 bp, Homo sapien
cagggtttctggagcctgtacactg

SEQ ID NO: 5249001 - DNA, 25 bp, Homo sapien
ggtttctggagcctgtacactgtag

SEQ ID NO: 5249002 - DNA, 25 bp, Homo sapien
cactgattgggccaatgaggttctc

SEQ ID NO: 5249003 - DNA, 25 bp, Homo sapien
ccatcgcgggaatctgacctctgag

SEQ ID NO: 5249004 - DNA, 25 bp, Homo sapien
tgattgggccaatgaggttctctct

SEQ ID NO: 5249005 - DNA, 25 bp, Homo sapien
ctactccgcagccaccgctgattgg

SEQ ID NO: 5249006 - DNA, 25 bp, Homo sapien
tttgaggacgcggaagggcacaggc

SEQ ID NO: 5249007 - DNA, 25 bp, Homo sapien
cagctgggatcctcttaggagggcc

SEQ ID NO: 5249008 - DNA, 25 bp, Homo sapien
tgtcttgaagtagaaacacctggaa

SEQ ID NO: 5249009 - DNA, 25 bp, Homo sapien
cgagctgagttttccgcgagatgag

SEQ ID NO: 5249010 - DNA, 25 bp, Homo sapien
ggaaacacctccaacgcaatgtggc

SEQ ID NO: 5249011 - DNA, 25 bp, Homo sapien
aaacacctccaacgcaatgtggctt

SEQ ID NO: 5249012 - DNA, 25 bp, Homo sapien
cacctccaacgcaatgtggctttta

SEQ ID NO: 5249013 - DNA, 25 bp, Homo sapien
acacctccaacgcaatgtggctttt

SEQ ID NO: 5249014 - DNA, 25 bp, Homo sapien
ggcgtcctcaactgcaacgactaca

SEQ ID NO: 5249015 - DNA, 25 bp, Homo sapien
actgtttttggcgtcctcaactgca

SEQ ID NO: 5249016 - DNA, 25 bp, Homo sapien
tttttggcgtcctcaactgcaacga

SEQ ID NO: 5249017 - DNA, 25 bp, Homo sapien
tatctactgtttttggcgtcctcaa

SEQ ID NO: 5249018 - DNA, 25 bp, Homo sapien
gagaatgctcttccgggtcacgggc

SEQ ID NO: 5249019 - DNA, 25 bp, Homo sapien
actgggccaggtcttgcacggcaga

SEQ ID NO: 5249020 - DNA, 25 bp, Homo sapien
tcagctgcgacaagggcgaaatggc

SEQ ID NO: 5249021 - DNA, 25 bp, Homo sapien
gctcatttattggacaactgcttgg

SEQ ID NO: 5249022 - DNA, 25 bp, Homo sapien
cggcgccgccgcagtcccgcagttg

SEQ ID NO: 5249023 - DNA, 25 bp, Homo sapien
tctccccggaggccggcgccgccgc

SEQ ID NO: 5249024 - DNA, 25 bp, Homo sapien
ctccccggaggccggcgccgccgca

SEQ ID NO: 5249025 - DNA, 25 bp, Homo sapien
ggccggcgccgccgcagtcccgcag

SEQ ID NO: 5249026 - DNA, 25 bp, Homo sapien
tacaagggccccggcgctataagcg

SEQ ID NO: 5249027 - DNA, 25 bp, Homo sapien
agcaacgccagaggcggaagacgct

SEQ ID NO: 5249028 - DNA, 25 bp, Homo sapien
gacattgagggagatgcgggacagg

SEQ ID NO: 5249029 - DNA, 25 bp, Homo sapien
gccgggtcggtcaggagcggagagt

SEQ ID NO: 5249030 - DNA, 25 bp, Homo sapien
tgcttagctcagagttcccgccttg

SEQ ID NO: 5249031 - DNA, 25 bp, Homo sapien
tagctcagagttcccgccttgagca

SEQ ID NO: 5249032 - DNA, 25 bp, Homo sapien
actgcttagctcagagttcccgcct

SEQ ID NO: 5249033 - DNA, 25 bp, Homo sapien
cttagctcagagttcccgccttgag

SEQ ID NO: 5249034 - DNA, 25 bp, Homo sapien
acaggaggcagcaatcaactctttc

SEQ ID NO: 5249035 - DNA, 25 bp, Homo sapien
aacaggaggcagcaatcaactcttt

SEQ ID NO: 5249036 - DNA, 25 bp, Homo sapien
caggaggcagcaatcaactctttcc

SEQ ID NO: 5249037 - DNA, 25 bp, Homo sapien
tggatgagtgttcctctcttcaagc

SEQ ID NO: 5249038 - DNA, 25 bp, Homo sapien
ttcttccctcgtgtggacctgttct

SEQ ID NO: 5249039 - DNA, 25 bp, Homo sapien
gcaccaatgtcatgtggaccagcca

SEQ ID NO: 5249040 - DNA, 25 bp, Homo sapien
gactttttgtcacctggcgaagcac

SEQ ID NO: 5249041 - DNA, 25 bp, Homo sapien
agagaatagccttccagtagatttt

SEQ ID NO: 5249042 - DNA, 25 bp, Homo sapien
cagagaatagccttccagtagattt

SEQ ID NO: 5249043 - DNA, 25 bp, Homo sapien
ggcctggctcaaacatgtcacttcc

SEQ ID NO: 5249044 - DNA, 25 bp, Homo sapien
aatagtggttccctcctctcaaatc

SEQ ID NO: 5249045 - DNA, 25 bp, Homo sapien
taaagcatctctagacaatcctaat

SEQ ID NO: 5249046 - DNA, 25 bp, Homo sapien
caatcctaatgggaaatagtggttc

SEQ ID NO: 5249047 - DNA, 25 bp, Homo sapien
caggccagaaggaatcacttacaaa

SEQ ID NO: 5249048 - DNA, 25 bp, Homo sapien
tgtttgagtatcagcaacgagttgc

SEQ ID NO: 5249049 - DNA, 25 bp, Homo sapien
tatcactgcagaacgctgtcctctc

SEQ ID NO: 5249050 - DNA, 25 bp, Homo sapien
cacacggtgacctcatatctggaac

SEQ ID NO: 5249051 - DNA, 25 bp, Homo sapien
tcaaaactacatgtacatgaccatg

SEQ ID NO: 5249052 - DNA, 25 bp, Homo sapien
tcaatctctcgataaaagtttcttc

SEQ ID NO: 5249053 - DNA, 25 bp, Homo sapien
tgaccatgtgttactgttattgcca

SEQ ID NO: 5249054 - DNA, 25 bp, Homo sapien
tgaaatgtcgaagtattagttaagg

SEQ ID NO: 5249055 - DNA, 25 bp, Homo sapien
agcgagggcaccagaagaggcttca

SEQ ID NO: 5249056 - DNA, 25 bp, Homo sapien
ttcagagatggtatctgacctagtc

SEQ ID NO: 5249057 - DNA, 25 bp, Homo sapien
aggcttcagagatggtatctgacct

SEQ ID NO: 5249058 - DNA, 25 bp, Homo sapien
tcacagcgagggcaccagaagaggc

SEQ ID NO: 5249059 - DNA, 25 bp, Homo sapien
ggaatgaaggcttcatgaaacttct

SEQ ID NO: 5249060 - DNA, 25 bp, Homo sapien
cttctttggattaattctcaataca

SEQ ID NO: 5249061 - DNA, 25 bp, Homo sapien
gaaggcttcatgaaacttctttgga

SEQ ID NO: 5249062 - DNA, 25 bp, Homo sapien
gggaaggaatgaaggcttcatgaaa

SEQ ID NO: 5249063 - DNA, 25 bp, Homo sapien
gatccccatttaaggctctattacg

SEQ ID NO: 5249064 - DNA, 25 bp, Homo sapien
tattacgagcaacaaccccatcaat

SEQ ID NO: 5249065 - DNA, 25 bp, Homo sapien
caataaaaatgtctcgatcaccatc

SEQ ID NO: 5249066 - DNA, 25 bp, Homo sapien
ggaagcagtttcacgaccaccagat

SEQ ID NO: 5249067 - DNA, 25 bp, Homo sapien
gaaatgcgtggggactgccactgtc

SEQ ID NO: 5249068 - DNA, 25 bp, Homo sapien
gtctccatggctttgtctttctagt

SEQ ID NO: 5249069 - DNA, 25 bp, Homo sapien
gcagaaatgcgtggggactgccact

SEQ ID NO: 5249070 - DNA, 25 bp, Homo sapien
atgcgtggggactgccactgtctcc

SEQ ID NO: 5249071 - DNA, 25 bp, Homo sapien
ggaatggcatctaggtctgtaaccc

SEQ ID NO: 5249072 - DNA, 25 bp, Homo sapien
ggatctgctgccattgagtcaggaa

SEQ ID NO: 5249073 - DNA, 25 bp, Homo sapien
tgtaacccctttgactctgccttga

SEQ ID NO: 5249074 - DNA, 25 bp, Homo sapien
tgaacagcaagctgcaactctgatg

SEQ ID NO: 5249075 - DNA, 25 bp, Homo sapien
cccaacgctggtgcatttgagatta

SEQ ID NO: 5249076 - DNA, 25 bp, Homo sapien
gcaacctggtagtacaaagaatcca

SEQ ID NO: 5249077 - DNA, 25 bp, Homo sapien
tataatccattcagtagggctctac

SEQ ID NO: 5249078 - DNA, 25 bp, Homo sapien
tcatgtggacagaaggtagaagtcg

SEQ ID NO: 5249079 - DNA, 25 bp, Homo sapien
tgcaaaagaccaatcccagcacatg

SEQ ID NO: 5249080 - DNA, 25 bp, Homo sapien
caagcagctgtaacctaagtggcct

SEQ ID NO: 5249081 - DNA, 25 bp, Homo sapien
gaagccctgaacaatgcaagcagct

SEQ ID NO: 5249082 - DNA, 25 bp, Homo sapien
gcttgatatcttgcagagtatgccc

SEQ ID NO: 5249083 - DNA, 25 bp, Homo sapien
ttttcagttattttaatcttatctg

SEQ ID NO: 5249084 - DNA, 25 bp, Homo sapien
cagttattttaatcttatctgccat

SEQ ID NO: 5249085 - DNA, 25 bp, Homo sapien
ttcagttattttaatcttatctgcc

SEQ ID NO: 5249086 - DNA, 25 bp, Homo sapien
tcagttattttaatcttatctgcca

SEQ ID NO: 5249087 - DNA, 25 bp, Homo sapien
taatggcacactcgggacaaaggat

SEQ ID NO: 5249088 - DNA, 25 bp, Homo sapien
gcaactgatatttccacagggagct

SEQ ID NO: 5249089 - DNA, 25 bp, Homo sapien
tcttgacaaggcttgccaataagct

SEQ ID NO: 5249090 - DNA, 25 bp, Homo sapien
tcaaatcccttaatggcacactcgg

SEQ ID NO: 5249091 - DNA, 25 bp, Homo sapien
ctgagcctcggattcagagctaaag

SEQ ID NO: 5249092 - DNA, 25 bp, Homo sapien
tcaggaagtccagcaaagagctgct

SEQ ID NO: 5249093 - DNA, 25 bp, Homo sapien
ctgtttgatgtgcattaggtttttc

SEQ ID NO: 5249094 - DNA, 25 bp, Homo sapien
caaaactgtttgatgtgcattaggt

SEQ ID NO: 5249095 - DNA, 25 bp, Homo sapien
gagaagaaactggtcacttcaaaac

SEQ ID NO: 5249096 - DNA, 25 bp, Homo sapien
tagagaagaaactggtcacttcaaa

SEQ ID NO: 5249097 - DNA, 25 bp, Homo sapien
cagctgactgcacttattacctgag

SEQ ID NO: 5249098 - DNA, 25 bp, Homo sapien
tcttctggtttctccatagacctgc

SEQ ID NO: 5249099 - DNA, 25 bp, Homo sapien
tctggtttctccatagacctgcaag

SEQ ID NO: 5249100 - DNA, 25 bp, Homo sapien
cctgagtgcatgctgcaaatgggat

SEQ ID NO: 5249101 - DNA, 25 bp, Homo sapien
tagtagattatcaagatgcaagagc

SEQ ID NO: 5249102 - DNA, 25 bp, Homo sapien
tatctcatctgttaagactatctgc

SEQ ID NO: 5249103 - DNA, 25 bp, Homo sapien
tatgtgggttagaaactagtagccc

SEQ ID NO: 5249104 - DNA, 25 bp, Homo sapien
ttttcaagcacaagggtatgtgggt

SEQ ID NO: 5249105 - DNA, 25 bp, Homo sapien
gacagagctgcactttgttacctac

SEQ ID NO: 5249106 - DNA, 25 bp, Homo sapien
ttaatcctgattctaaccaaccaac

SEQ ID NO: 5249107 - DNA, 25 bp, Homo sapien
gcactttgttacctacgcttgagtg

SEQ ID NO: 5249108 - DNA, 25 bp, Homo sapien
ttttaatcctgattctaaccaacca

SEQ ID NO: 5249109 - DNA, 25 bp, Homo sapien
acttggttcccagtccctgagtata

SEQ ID NO: 5249110 - DNA, 25 bp, Homo sapien
tctccaaaaagattcccgcagggcc

SEQ ID NO: 5249111 - DNA, 25 bp, Homo sapien
tgagtgaagctacagctagggcact

SEQ ID NO: 5249112 - DNA, 25 bp, Homo sapien
tagggcactgatacacaggttgaac

SEQ ID NO: 5249113 - DNA, 25 bp, Homo sapien
gactgtcattatagcttttcaggga

SEQ ID NO: 5249114 - DNA, 25 bp, Homo sapien
tgagtcgctgccatcaaactgagcc

SEQ ID NO: 5249115 - DNA, 25 bp, Homo sapien
cacattttgtgtgatgccatgtcca

SEQ ID NO: 5249116 - DNA, 25 bp, Homo sapien
gagatggtgtccacagagctcctcg

SEQ ID NO: 5249117 - DNA, 25 bp, Homo sapien
ttccaatacttaatcagtgtactta

SEQ ID NO: 5249118 - DNA, 25 bp, Homo sapien
caatacttaatcagtgtacttaaaa

SEQ ID NO: 5249119 - DNA, 25 bp, Homo sapien
aattccaatacttaatcagtgtact

SEQ ID NO: 5249120 - DNA, 25 bp, Homo sapien
ggaattccaatacttaatcagtgta

SEQ ID NO: 5249121 - DNA, 25 bp, Homo sapien
gatgtcaacgttaaccagcaacaca

SEQ ID NO: 5249122 - DNA, 25 bp, Homo sapien
gcctattaggaatgtggcaactgca

SEQ ID NO: 5249123 - DNA, 25 bp, Homo sapien
tatcgcaagagatgtcaacgttaac

SEQ ID NO: 5249124 - DNA, 25 bp, Homo sapien
taaccagcagctaaacctgtcaaag

SEQ ID NO: 5249125 - DNA, 25 bp, Homo sapien
gtgcccagccgacaaaaatacttct

SEQ ID NO: 5249126 - DNA, 25 bp, Homo sapien
atatgaattttacataccagtttaa

SEQ ID NO: 5249127 - DNA, 25 bp, Homo sapien
tgtgcccagccgacaaaaatacttc

SEQ ID NO: 5249128 - DNA, 25 bp, Homo sapien
aaaattagaaagctaggctgggtgg

SEQ ID NO: 5249129 - DNA, 25 bp, Homo sapien
caaaaattagaaagctaggctgggt

SEQ ID NO: 5249130 - DNA, 25 bp, Homo sapien
ttacaaaaattagaaagctaggctg

SEQ ID NO: 5249131 - DNA, 25 bp, Homo sapien
tacaaaaattagaaagctaggctgg

SEQ ID NO: 5249132 - DNA, 25 bp, Homo sapien
aaatactacacttggccaggcagtg

SEQ ID NO: 5249133 - DNA, 25 bp, Homo sapien
acaatgagttctaccaaatttcaag

SEQ ID NO: 5249134 - DNA, 25 bp, Homo sapien
aaaatactacacttggccaggcagt

SEQ ID NO: 5249135 - DNA, 25 bp, Homo sapien
aatgagttctaccaaatttcaaggg

SEQ ID NO: 5249136 - DNA, 25 bp, Homo sapien
gaatctgaacagaccaattagtata

SEQ ID NO: 5249137 - DNA, 25 bp, Homo sapien
tagagaatctgaacagaccaattag

SEQ ID NO: 5249138 - DNA, 25 bp, Homo sapien
actgatagagaatctgaacagacca

SEQ ID NO: 5249139 - DNA, 25 bp, Homo sapien
caagaactgatagagaatctgaaca

SEQ ID NO: 5249140 - DNA, 25 bp, Homo sapien
cataaaaatctgtagaatagagcta

SEQ ID NO: 5249141 - DNA, 25 bp, Homo sapien
taataagctaagtactcaactcaag

SEQ ID NO: 5249142 - DNA, 25 bp, Homo sapien
aaagcaacatccctggaaaataaga

SEQ ID NO: 5249143 - DNA, 25 bp, Homo sapien
cctagttacaaaagaaatcacaaag

SEQ ID NO: 5249144 - DNA, 25 bp, Homo sapien
gagagagagcaaccttgtcttatga

SEQ ID NO: 5249145 - DNA, 25 bp, Homo sapien
gagagagcaaccttgtcttatgagg

SEQ ID NO: 5249146 - DNA, 25 bp, Homo sapien
agagcaaccttgtcttatgagggtt

SEQ ID NO: 5249147 - DNA, 25 bp, Homo sapien
gagagcaaccttgtcttatgagggt

SEQ ID NO: 5249148 - DNA, 25 bp, Homo sapien
cttcctgtgggatactggataagcc

SEQ ID NO: 5249149 - DNA, 25 bp, Homo sapien
tgtgggatactggataagcccagga

SEQ ID NO: 5249150 - DNA, 25 bp, Homo sapien
ttcctgtgggatactggataagccc

SEQ ID NO: 5249151 - DNA, 25 bp, Homo sapien
cctgtgggatactggataagcccag

SEQ ID NO: 5249152 - DNA, 25 bp, Homo sapien
tgatttcccatagcttgacaagatt

SEQ ID NO: 5249153 - DNA, 25 bp, Homo sapien
tcgggtaattcaatcatagtccact

SEQ ID NO: 5249154 - DNA, 25 bp, Homo sapien
gtatcttccaggttgtgctctggta

SEQ ID NO: 5249155 - DNA, 25 bp, Homo sapien
tataggacaatgattacttcgggta

SEQ ID NO: 5249156 - DNA, 25 bp, Homo sapien
taagatctgtccttaatggcggaca

SEQ ID NO: 5249157 - DNA, 25 bp, Homo sapien
cagagccacacgacccagtttttag

SEQ ID NO: 5249158 - DNA, 25 bp, Homo sapien
cattctatagccagagtagggcagc

SEQ ID NO: 5249159 - DNA, 25 bp, Homo sapien
caataggcttggctagactcttcaa

SEQ ID NO: 5249160 - DNA, 25 bp, Homo sapien
tgtcagagccaaggggagcagccac

SEQ ID NO: 5249161 - DNA, 25 bp, Homo sapien
agtgtcagagccaaggggagcagcc

SEQ ID NO: 5249162 - DNA, 25 bp, Homo sapien
tcagagccaaggggagcagccacat

SEQ ID NO: 5249163 - DNA, 25 bp, Homo sapien
ctgaaatgagtgtcagagccaaggg

SEQ ID NO: 5249164 - DNA, 25 bp, Homo sapien
gggtgcagtagtctaaagtgcagaa

SEQ ID NO: 5249165 - DNA, 25 bp, Homo sapien
ctgcagagtcatgggtgcagtagtc

SEQ ID NO: 5249166 - DNA, 25 bp, Homo sapien
gaagaaaaggtgcaatgaggcctgg

SEQ ID NO: 5249167 - DNA, 25 bp, Homo sapien
gaagcaggtaccaaaggggctctga

SEQ ID NO: 5249168 - DNA, 25 bp, Homo sapien
gagactagcctcaaagcatgggaag

SEQ ID NO: 5249169 - DNA, 25 bp, Homo sapien
gagatgatgccctgtcacttccatg

SEQ ID NO: 5249170 - DNA, 25 bp, Homo sapien
gatcacccctacctgagtgtgggcg

SEQ ID NO: 5249171 - DNA, 25 bp, Homo sapien
gatctgataaagcatgcggccacat

SEQ ID NO: 5249172 - DNA, 25 bp, Homo sapien
tgcttttccctgagcactctctgct

SEQ ID NO: 5249173 - DNA, 25 bp, Homo sapien
atcttcaacactcttctgcttttcc

SEQ ID NO: 5249174 - DNA, 25 bp, Homo sapien
ctgagcactctctgctccaaatctt

SEQ ID NO: 5249175 - DNA, 25 bp, Homo sapien
agcactctctgctccaaatctttct

SEQ ID NO: 5249176 - DNA, 25 bp, Homo sapien
gattcctgagttggacctgagcctt

SEQ ID NO: 5249177 - DNA, 25 bp, Homo sapien
ggcctgaaagcgaatgacatcccaa

SEQ ID NO: 5249178 - DNA, 25 bp, Homo sapien
tagagaagacccactatgtgcagag

SEQ ID NO: 5249179 - DNA, 25 bp, Homo sapien
tcagaatccaaacggcattgatggg

SEQ ID NO: 5249180 - DNA, 25 bp, Homo sapien
ttgtatcgaaataaatgcaggaggg

SEQ ID NO: 5249181 - DNA, 25 bp, Homo sapien
gaaacgccaacttcattgtatcgaa

SEQ ID NO: 5249182 - DNA, 25 bp, Homo sapien
gaagggatgtgatccagaacccagg

SEQ ID NO: 5249183 - DNA, 25 bp, Homo sapien
acatggttaattgctgatgggaagg

SEQ ID NO: 5249184 - DNA, 25 bp, Homo sapien
ggagtcacaagatctaaattcaaac

SEQ ID NO: 5249185 - DNA, 25 bp, Homo sapien
gagctatgtggctccaaacaaataa

SEQ ID NO: 5249186 - DNA, 25 bp, Homo sapien
cctagatcctatgagcttgagctat

SEQ ID NO: 5249187 - DNA, 25 bp, Homo sapien
taggcatgacagatagcatgagctt

SEQ ID NO: 5249188 - DNA, 25 bp, Homo sapien
atgtattttagagctatgaatttga

SEQ ID NO: 5249189 - DNA, 25 bp, Homo sapien
tattttagagctatgaatttgatag

SEQ ID NO: 5249190 - DNA, 25 bp, Homo sapien
ttagagctatgaatttgatagaacc

SEQ ID NO: 5249191 - DNA, 25 bp, Homo sapien
ttttagagctatgaatttgatagaa

SEQ ID NO: 5249192 - DNA, 25 bp, Homo sapien
caatgtgctctgcagaacaaagtaa

SEQ ID NO: 5249193 - DNA, 25 bp, Homo sapien
attctgggcgtactctggaaacact

SEQ ID NO: 5249194 - DNA, 25 bp, Homo sapien
cattctgggcgtactctggaaacac

SEQ ID NO: 5249195 - DNA, 25 bp, Homo sapien
gagaagaggagtcatcaaccagatg

SEQ ID NO: 5249196 - DNA, 25 bp, Homo sapien
aaactagatgttaaatgctgcccca

SEQ ID NO: 5249197 - DNA, 25 bp, Homo sapien
taaatagcctgtgtgtcgaaattcc

SEQ ID NO: 5249198 - DNA, 25 bp, Homo sapien
gatgcctggataccagttaccccaa

SEQ ID NO: 5249199 - DNA, 25 bp, Homo sapien
ttgcagggatttctccgataaagct

SEQ ID NO: 5249200 - DNA, 25 bp, Homo sapien
tctccgataaagctcttgtgtcttg

SEQ ID NO: 5249201 - DNA, 25 bp, Homo sapien
tctcatcttttgtaaccggtgcatc

SEQ ID NO: 5249202 - DNA, 25 bp, Homo sapien
tttgtaaccggtgcatcaccatcct

SEQ ID NO: 5249203 - DNA, 25 bp, Homo sapien
aagccatttggacacgtggagaaaa

SEQ ID NO: 5249204 - DNA, 25 bp, Homo sapien
agccatttggacacgtggagaaaat

SEQ ID NO: 5249205 - DNA, 25 bp, Homo sapien
ccatttggacacgtggagaaaatct

SEQ ID NO: 5249206 - DNA, 25 bp, Homo sapien
gccatttggacacgtggagaaaatc

SEQ ID NO: 5249207 - DNA, 25 bp, Homo sapien
caaatacagtcctgactgaatcaca

SEQ ID NO: 5249208 - DNA, 25 bp, Homo sapien
atgaccaaatacagtcctgactgaa

SEQ ID NO: 5249209 - DNA, 25 bp, Homo sapien
gaccaaatacagtcctgactgaatc

SEQ ID NO: 5249210 - DNA, 25 bp, Homo sapien
tgaccaaatacagtcctgactgaat

SEQ ID NO: 5249211 - DNA, 25 bp, Homo sapien
gaccccttatccaaaggcaggaaga

SEQ ID NO: 5249212 - DNA, 25 bp, Homo sapien
accccttatccaaaggcaggaagat

SEQ ID NO: 5249213 - DNA, 25 bp, Homo sapien
tatgtgcacagctagaagtcagctg

SEQ ID NO: 5249214 - DNA, 25 bp, Homo sapien
tctgccactatgagctatgtgcaca

SEQ ID NO: 5249215 - DNA, 25 bp, Homo sapien
gagctatgtgcacagctagaagtca

SEQ ID NO: 5249216 - DNA, 25 bp, Homo sapien
catttctgccactatgagctatgtg

SEQ ID NO: 5249217 - DNA, 25 bp, Homo sapien
tcctcatgtcagtatgcaagagcaa

SEQ ID NO: 5249218 - DNA, 25 bp, Homo sapien
acacactgatggatgcttctgaaac

SEQ ID NO: 5249219 - DNA, 25 bp, Homo sapien
gcctggagcacagttagtactcaaa

SEQ ID NO: 5249220 - DNA, 25 bp, Homo sapien
ggtagagtaagcacactgcattccc

SEQ ID NO: 5249221 - DNA, 25 bp, Homo sapien
gaaggcagtcatacaccctgttggg

SEQ ID NO: 5249222 - DNA, 25 bp, Homo sapien
gaatccttcttgttggagccactca

SEQ ID NO: 5249223 - DNA, 25 bp, Homo sapien
tctgggtagacgagagtcgcagtcc

SEQ ID NO: 5249224 - DNA, 25 bp, Homo sapien
caagacctcagtgttggcatcagat

SEQ ID NO: 5249225 - DNA, 25 bp, Homo sapien
caaagattcagcctgcagttgagct

SEQ ID NO: 5249226 - DNA, 25 bp, Homo sapien
gatgaagattgaggccaccactcca

SEQ ID NO: 5249227 - DNA, 25 bp, Homo sapien
tgtggaatctcagcctgtctgcagg

SEQ ID NO: 5249228 - DNA, 25 bp, Homo sapien
tatctcacacaaacaacacggtagg

SEQ ID NO: 5249229 - DNA, 25 bp, Homo sapien
caagagtttgaggaagccggttgct

SEQ ID NO: 5249230 - DNA, 25 bp, Homo sapien
tccacaatgcggcagatgaacagtg

SEQ ID NO: 5249231 - DNA, 25 bp, Homo sapien
taaattctaggcactcggtggtctg

SEQ ID NO: 5249232 - DNA, 25 bp, Homo sapien
gcataatctttaggccgtgccacaa

SEQ ID NO: 5249233 - DNA, 25 bp, Homo sapien
ttcaaggaacatacaggcaatcagt

SEQ ID NO: 5249234 - DNA, 25 bp, Homo sapien
catctgcaaggagaggactggttgt

SEQ ID NO: 5249235 - DNA, 25 bp, Homo sapien
catttggtcaaacaactgggtccag

SEQ ID NO: 5249236 - DNA, 25 bp, Homo sapien
tagggtagtttttaatgccacaggc

SEQ ID NO: 5249237 - DNA, 25 bp, Homo sapien
ttttctttcaatatgaataccagtt

SEQ ID NO: 5249238 - DNA, 25 bp, Homo sapien
gcttttctttcaatatgaataccag

SEQ ID NO: 5249239 - DNA, 25 bp, Homo sapien
cttttctttcaatatgaataccagt

SEQ ID NO: 5249240 - DNA, 25 bp, Homo sapien
tgcttttctttcaatatgaatacca

SEQ ID NO: 5249241 - DNA, 25 bp, Homo sapien
ataaaccagacatcatctataataa

SEQ ID NO: 5249242 - DNA, 25 bp, Homo sapien
gcataaaccagacatcatctataat

SEQ ID NO: 5249243 - DNA, 25 bp, Homo sapien
ataataaacacttaacatagctaaa

SEQ ID NO: 5249244 - DNA, 25 bp, Homo sapien
taataaacacttaacatagctaaaa

SEQ ID NO: 5249245 - DNA, 25 bp, Homo sapien
gaaatccacgccatactctgttagt

SEQ ID NO: 5249246 - DNA, 25 bp, Homo sapien
tggaattgtccatggcaggccttga

SEQ ID NO: 5249247 - DNA, 25 bp, Homo sapien
tgaggaagacattctagaacttctg

SEQ ID NO: 5249248 - DNA, 25 bp, Homo sapien
cagcctgcccaagactcttagccag

SEQ ID NO: 5249249 - DNA, 25 bp, Homo sapien
cttcaaagaagatgttgttataaaa

SEQ ID NO: 5249250 - DNA, 25 bp, Homo sapien
tcttcaaagaagatgttgttataaa

SEQ ID NO: 5249251 - DNA, 25 bp, Homo sapien
atcccacaatgaagaaacatcttca

SEQ ID NO: 5249252 - DNA, 25 bp, Homo sapien
acatcttcaaagaagatgttgttat

SEQ ID NO: 5249253 - DNA, 25 bp, Homo sapien
tcagctgcatgaagcgagcaagtgt

SEQ ID NO: 5249254 - DNA, 25 bp, Homo sapien
cctcggagcccctgaagagataaca

SEQ ID NO: 5249255 - DNA, 25 bp, Homo sapien
tcacaaactaggtgggtaacaggca

SEQ ID NO: 5249256 - DNA, 25 bp, Homo sapien
atgttatgggcccaagacctcggag

SEQ ID NO: 5249257 - DNA, 25 bp, Homo sapien
tctattttggcagccgagaagctgc

SEQ ID NO: 5249258 - DNA, 25 bp, Homo sapien
agctgcagtttgtaattttacctcc

SEQ ID NO: 5249259 - DNA, 25 bp, Homo sapien
cagtttgtaattttacctccagctt

SEQ ID NO: 5249260 - DNA, 25 bp, Homo sapien
tttctattttggcagccgagaagct

SEQ ID NO: 5249261 - DNA, 25 bp, Homo sapien
aggcaatttaatcatattggacttc

SEQ ID NO: 5249262 - DNA, 25 bp, Homo sapien
tcttctaaaggcaatttaatcatat

SEQ ID NO: 5249263 - DNA, 25 bp, Homo sapien
tctaaaggcaatttaatcatattgg

SEQ ID NO: 5249264 - DNA, 25 bp, Homo sapien
aaaggcaatttaatcatattggact

SEQ ID NO: 5249265 - DNA, 25 bp, Homo sapien
aaggttgcaggataccagatatata

SEQ ID NO: 5249266 - DNA, 25 bp, Homo sapien
caagagattactactcagagccaca

SEQ ID NO: 5249267 - DNA, 25 bp, Homo sapien
caaacactagggtagagaagacagg

SEQ ID NO: 5249268 - DNA, 25 bp, Homo sapien
tatgaggaccgtgagttagagattc

SEQ ID NO: 5249269 - DNA, 25 bp, Homo sapien
gacattcaagattagagtagcgact

SEQ ID NO: 5249270 - DNA, 25 bp, Homo sapien
cgtggtagctgtagatagcagccat

SEQ ID NO: 5249271 - DNA, 25 bp, Homo sapien
cagtctccctttggttggatgggcc

SEQ ID NO: 5249272 - DNA, 25 bp, Homo sapien
tcagtctccctttggttggatgggc

SEQ ID NO: 5249273 - DNA, 25 bp, Homo sapien
tggatgggcccggagagcaccgtgg

SEQ ID NO: 5249274 - DNA, 25 bp, Homo sapien
cctgttattacattaaactctgcca

SEQ ID NO: 5249275 - DNA, 25 bp, Homo sapien
catctttttgttaaggcaatgtgcc

SEQ ID NO: 5249276 - DNA, 25 bp, Homo sapien
gggacctccaactatttcctagaga

SEQ ID NO: 5249277 - DNA, 25 bp, Homo sapien
gcataatgtatgctagaccctgtgc

SEQ ID NO: 5249278 - DNA, 25 bp, Homo sapien
gaaaatgctatgtctgtcctataga

SEQ ID NO: 5249279 - DNA, 25 bp, Homo sapien
ggagagtccacaacaatgaatcttt

SEQ ID NO: 5249280 - DNA, 25 bp, Homo sapien
ttttaatcctatggtcactgggagg

SEQ ID NO: 5249281 - DNA, 25 bp, Homo sapien
gataaagtggtctctttcaaaggga

SEQ ID NO: 5249282 - DNA, 25 bp, Homo sapien
ggccagaaagtctctctatccgaag

SEQ ID NO: 5249283 - DNA, 25 bp, Homo sapien
ccatgcctaagggtgcaatgagggc

SEQ ID NO: 5249284 - DNA, 25 bp, Homo sapien
caagagagtttgtatgcagggcaga

SEQ ID NO: 5249285 - DNA, 25 bp, Homo sapien
gatttatagctaggcttgctggtgt

SEQ ID NO: 5249286 - DNA, 25 bp, Homo sapien
caagtgagcctctatatccctgtgg

SEQ ID NO: 5249287 - DNA, 25 bp, Homo sapien
ggccctttcagctagcagagttaga

SEQ ID NO: 5249288 - DNA, 25 bp, Homo sapien
taagatatgctcattgcctccaggc

SEQ ID NO: 5249289 - DNA, 25 bp, Homo sapien
actatttgtggcctaaaaactggca

SEQ ID NO: 5249290 - DNA, 25 bp, Homo sapien
ggttcagggaccacttccagattag

SEQ ID NO: 5249291 - DNA, 25 bp, Homo sapien
ggtctgtctccgtgctagcaagcaa

SEQ ID NO: 5249292 - DNA, 25 bp, Homo sapien
cagattagcaaaatttatagaggcc

SEQ ID NO: 5249293 - DNA, 25 bp, Homo sapien
gcaaaatttatagaggccctcctct

SEQ ID NO: 5249294 - DNA, 25 bp, Homo sapien
tactgtagcagcagactccaagctt

SEQ ID NO: 5249295 - DNA, 25 bp, Homo sapien
gcaaaactcagagggctctcagaaa

SEQ ID NO: 5249296 - DNA, 25 bp, Homo sapien
tatttctactgtagcagcagactcc

SEQ ID NO: 5249297 - DNA, 25 bp, Homo sapien
tcagaaagtatttctactgtagcag

SEQ ID NO: 5249298 - DNA, 25 bp, Homo sapien
tagcaactttaccccaccatagtac

SEQ ID NO: 5249299 - DNA, 25 bp, Homo sapien
aactttaccccaccatagtacagct

SEQ ID NO: 5249300 - DNA, 25 bp, Homo sapien
tttaccccaccatagtacagcttta

SEQ ID NO: 5249301 - DNA, 25 bp, Homo sapien
attagcaatgccacaaataatagca

SEQ ID NO: 5249302 - DNA, 25 bp, Homo sapien
aggtctcgggcggttgatgggtcaa

SEQ ID NO: 5249303 - DNA, 25 bp, Homo sapien
tctcgggcggttgatgggtcaatgg

SEQ ID NO: 5249304 - DNA, 25 bp, Homo sapien
catcgaggtctcgggcggttgatgg

SEQ ID NO: 5249305 - DNA, 25 bp, Homo sapien
ggcggttgatgggtcaatggtgaag

SEQ ID NO: 5249306 - DNA, 25 bp, Homo sapien
atgcagactgcctgctacccaagat

SEQ ID NO: 5249307 - DNA, 25 bp, Homo sapien
agatgctatagaaatttccatccta

SEQ ID NO: 5249308 - DNA, 25 bp, Homo sapien
gcctgctacccaagatgctatagaa

SEQ ID NO: 5249309 - DNA, 25 bp, Homo sapien
gactgcctgctacccaagatgctat

SEQ ID NO: 5249310 - DNA, 25 bp, Homo sapien
tgaccaaagccaaagcagtcaccca

SEQ ID NO: 5249311 - DNA, 25 bp, Homo sapien
aggatgaccaaagccaaagcagtca

SEQ ID NO: 5249312 - DNA, 25 bp, Homo sapien
ctgaggatgaccaaagccaaagcag

SEQ ID NO: 5249313 - DNA, 25 bp, Homo sapien
agccaaagcagtcacccagaagcca

SEQ ID NO: 5249314 - DNA, 25 bp, Homo sapien
tcaaaggccatgttagtgccaaggc

SEQ ID NO: 5249315 - DNA, 25 bp, Homo sapien
tcaacgcttggtggcagactgaaac

SEQ ID NO: 5249316 - DNA, 25 bp, Homo sapien
aaactgcaagggtggatgtccacat

SEQ ID NO: 5249317 - DNA, 25 bp, Homo sapien
gatgtccacattgggcaaatgtcaa

SEQ ID NO: 5249318 - DNA, 25 bp, Homo sapien
tctcctccgcctgcaacctaattat

SEQ ID NO: 5249319 - DNA, 25 bp, Homo sapien
gatttcatgaagataggtggcaccc

SEQ ID NO: 5249320 - DNA, 25 bp, Homo sapien
tattggtagacaggtggtcactgtg

SEQ ID NO: 5249321 - DNA, 25 bp, Homo sapien
gcaacctaattatgatctattggta

SEQ ID NO: 5249322 - DNA, 25 bp, Homo sapien
tcttggcgttaagtgagcctcctat

SEQ ID NO: 5249323 - DNA, 25 bp, Homo sapien
taagccactgcagctagcactgtac

SEQ ID NO: 5249324 - DNA, 25 bp, Homo sapien
gaagacatgagttgctgtggaagcc

SEQ ID NO: 5249325 - DNA, 25 bp, Homo sapien
tgagcctcacgtgggccaattcaca

SEQ ID NO: 5249326 - DNA, 25 bp, Homo sapien
catgcatttccttatgagctgacag

SEQ ID NO: 5249327 - DNA, 25 bp, Homo sapien
caaaaataaggtttgactgagatca

SEQ ID NO: 5249328 - DNA, 25 bp, Homo sapien
ccaggttcattatcaagggccctac

SEQ ID NO: 5249329 - DNA, 25 bp, Homo sapien
gagatcaagtacttgagttgcctgg

SEQ ID NO: 5249330 - DNA, 25 bp, Homo sapien
ccccttgatgtcagggaacattgag

SEQ ID NO: 5249331 - DNA, 25 bp, Homo sapien
gccactgtggcccatgcaaatttta

SEQ ID NO: 5249332 - DNA, 25 bp, Homo sapien
caccattctaagtgccagggattat

SEQ ID NO: 5249333 - DNA, 25 bp, Homo sapien
tcctctggaatacggactgtgtccc

SEQ ID NO: 5249334 - DNA, 25 bp, Homo sapien
cttaatgatgtcttttgatgaatgg

SEQ ID NO: 5249335 - DNA, 25 bp, Homo sapien
cactgcacccttttcaacaatctta

SEQ ID NO: 5249336 - DNA, 25 bp, Homo sapien
gcctacaccaaggtcataaggttat

SEQ ID NO: 5249337 - DNA, 25 bp, Homo sapien
tgcacccttttcaacaatcttaatg

SEQ ID NO: 5249338 - DNA, 25 bp, Homo sapien
tcctggcccttatcccttaaatgac

SEQ ID NO: 5249339 - DNA, 25 bp, Homo sapien
tctatcaccacttcacaagaagctg

SEQ ID NO: 5249340 - DNA, 25 bp, Homo sapien
tcaaactaccacctaaagtcacttc

SEQ ID NO: 5249341 - DNA, 25 bp, Homo sapien
gcccttatcccttaaatgacagtta

SEQ ID NO: 5249342 - DNA, 25 bp, Homo sapien
tcctcattgtatagcaaaagatgat

SEQ ID NO: 5249343 - DNA, 25 bp, Homo sapien
tgtgacccgcactactgtcactttc

SEQ ID NO: 5249344 - DNA, 25 bp, Homo sapien
tgtatagcaaaagatgatgaaattg

SEQ ID NO: 5249345 - DNA, 25 bp, Homo sapien
tctgtgacccgcactactgtcactt

SEQ ID NO: 5249346 - DNA, 25 bp, Homo sapien
taactcacgtcagcaatgtgaactc

SEQ ID NO: 5249347 - DNA, 25 bp, Homo sapien
atgtgaactcccactttgaagttgc

SEQ ID NO: 5249348 - DNA, 25 bp, Homo sapien
gatccctccggaacaaagtaactca

SEQ ID NO: 5249349 - DNA, 25 bp, Homo sapien
gtagacgcttgtagccctctcggca

SEQ ID NO: 5249350 - DNA, 25 bp, Homo sapien
ctattgcccatgacacagttacctg

SEQ ID NO: 5249351 - DNA, 25 bp, Homo sapien
gaatttcctggctctgatcaactct

SEQ ID NO: 5249352 - DNA, 25 bp, Homo sapien
tcctctctattcactattctcactt

SEQ ID NO: 5249353 - DNA, 25 bp, Homo sapien
ccatgacacagttacctggaatggg

SEQ ID NO: 5249354 - DNA, 25 bp, Homo sapien
ttcagtgcgataacccattggccat

SEQ ID NO: 5249355 - DNA, 25 bp, Homo sapien
taacaacaaggtacactcagctagc

SEQ ID NO: 5249356 - DNA, 25 bp, Homo sapien
gctagctccctacttacacactgaa

SEQ ID NO: 5249357 - DNA, 25 bp, Homo sapien
tatctgcagtctgagaattggtgac

SEQ ID NO: 5249358 - DNA, 25 bp, Homo sapien
tcccaatagctaaggagctgaattt

SEQ ID NO: 5249359 - DNA, 25 bp, Homo sapien
cccaatagctaaggagctgaattta

SEQ ID NO: 5249360 - DNA, 25 bp, Homo sapien
cttcccaatagctaaggagctgaat

SEQ ID NO: 5249361 - DNA, 25 bp, Homo sapien
caatagctaaggagctgaatttagt

SEQ ID NO: 5249362 - DNA, 25 bp, Homo sapien
ccaacccgcttaggagaagcccagt

SEQ ID NO: 5249363 - DNA, 25 bp, Homo sapien
ttttggtgaacagcttcagcttttc

SEQ ID NO: 5249364 - DNA, 25 bp, Homo sapien
caggcccatgagcacctttctccaa

SEQ ID NO: 5249365 - DNA, 25 bp, Homo sapien
cccagtgggcagagttttggtgaac

SEQ ID NO: 5249366 - DNA, 25 bp, Homo sapien
cttgccctctggagtcagtgtccag

SEQ ID NO: 5249367 - DNA, 25 bp, Homo sapien
gtgtccagatcacagagaaggtcag

SEQ ID NO: 5249368 - DNA, 25 bp, Homo sapien
cagcttgtcggacatggggttgagg

SEQ ID NO: 5249369 - DNA, 25 bp, Homo sapien
cagagaaggtcagcttgtcggacat

SEQ ID NO: 5249370 - DNA, 25 bp, Homo sapien
ggagctccgggcttccgtatgcaaa

SEQ ID NO: 5249371 - DNA, 25 bp, Homo sapien
tcttagagctacgaaaacagggcaa

SEQ ID NO: 5249372 - DNA, 25 bp, Homo sapien
tagggccatcatcactaagcaaagc

SEQ ID NO: 5249373 - DNA, 25 bp, Homo sapien
catgcctgtggtggaaaggacgcaa

SEQ ID NO: 5249374 - DNA, 25 bp, Homo sapien
ggatggtctctaactccagacctcg

SEQ ID NO: 5249375 - DNA, 25 bp, Homo sapien
ttggagtgcagtggcacgatctggg

SEQ ID NO: 5249376 - DNA, 25 bp, Homo sapien
gctctgtcactctgtcactctgtca

SEQ ID NO: 5249377 - DNA, 25 bp, Homo sapien
accaggttggagtgcagtggcacga

SEQ ID NO: 5249378 - DNA, 25 bp, Homo sapien
tgtagagtcaattccaggtaccacc

SEQ ID NO: 5249379 - DNA, 25 bp, Homo sapien
tccactgtggcaagcaggtctgaat

SEQ ID NO: 5249380 - DNA, 25 bp, Homo sapien
tcacaagtggtctggaggttccctc

SEQ ID NO: 5249381 - DNA, 25 bp, Homo sapien
gccatgggtcaagaactgctttcaa

SEQ ID NO: 5249382 - DNA, 25 bp, Homo sapien
gggcagctctttcgcagggattttc

SEQ ID NO: 5249383 - DNA, 25 bp, Homo sapien
tgctctgtgcatgctcgtagctaag

SEQ ID NO: 5249384 - DNA, 25 bp, Homo sapien
tggtgtacctcctcgctgctatgct

SEQ ID NO: 5249385 - DNA, 25 bp, Homo sapien
ggtccggccaaaccattcatcaagg

SEQ ID NO: 5249386 - DNA, 25 bp, Homo sapien
tgatccaaacgaagtgcgccgtcca

SEQ ID NO: 5249387 - DNA, 25 bp, Homo sapien
taactgcttggcaattccgtggaga

SEQ ID NO: 5249388 - DNA, 25 bp, Homo sapien
cacaaagcgctgctggcgtaactgc

SEQ ID NO: 5249389 - DNA, 25 bp, Homo sapien
tggcaattccgtggagattcaagac

SEQ ID NO: 5249390 - DNA, 25 bp, Homo sapien
tcaatagccagtgttctacagcagg

SEQ ID NO: 5249391 - DNA, 25 bp, Homo sapien
caagcaggtttaagtgacagctacc

SEQ ID NO: 5249392 - DNA, 25 bp, Homo sapien
cattaggcctcgtgtacctgtggaa

SEQ ID NO: 5249393 - DNA, 25 bp, Homo sapien
gaatgggagttagttcctgccggcc

SEQ ID NO: 5249394 - DNA, 25 bp, Homo sapien
tagaatcacaagaggtcactcaggg

SEQ ID NO: 5249395 - DNA, 25 bp, Homo sapien
catccagttagtagttagaatcaca

SEQ ID NO: 5249396 - DNA, 25 bp, Homo sapien
tagatcccagggaatgccaacccta

SEQ ID NO: 5249397 - DNA, 25 bp, Homo sapien
gacagattttggctcgttagcatcc

SEQ ID NO: 5249398 - DNA, 25 bp, Homo sapien
cttcagcagccattggttggttatt

SEQ ID NO: 5249399 - DNA, 25 bp, Homo sapien
aaactttcctgtgatgtgcttcagc

SEQ ID NO: 5249400 - DNA, 25 bp, Homo sapien
aaacgttatgacagaaactttcctg

SEQ ID NO: 5249401 - DNA, 25 bp, Homo sapien
tgtgcttcagcagccattggttggt

SEQ ID NO: 5249402 - DNA, 25 bp, Homo sapien
gcacctagcagagaaggtcgcacaa

SEQ ID NO: 5249403 - DNA, 25 bp, Homo sapien
ccagttccagtctgatagaggacat

SEQ ID NO: 5249404 - DNA, 25 bp, Homo sapien
cctgcactggaagggcacctagcag

SEQ ID NO: 5249405 - DNA, 25 bp, Homo sapien
aagggccatccccagttccagtctg

SEQ ID NO: 5249406 - DNA, 25 bp, Homo sapien
tggagtgccccttccaccatgctcc

SEQ ID NO: 5249407 - DNA, 25 bp, Homo sapien
ctcccttcccagcatggcacactgg

SEQ ID NO: 5249408 - DNA, 25 bp, Homo sapien
tttccatgccagcaggccagcatct

SEQ ID NO: 5249409 - DNA, 25 bp, Homo sapien
tggcacactggggtctctttccctt

SEQ ID NO: 5249410 - DNA, 25 bp, Homo sapien
agggtcctagaggagccaaattctg

SEQ ID NO: 5249411 - DNA, 25 bp, Homo sapien
cctagaggagccaaattctgttcca

SEQ ID NO: 5249412 - DNA, 25 bp, Homo sapien
gcccctaacttgaaaggttcacatc

SEQ ID NO: 5249413 - DNA, 25 bp, Homo sapien
ggtcctagaggagccaaattctgtt

SEQ ID NO: 5249414 - DNA, 25 bp, Homo sapien
tctgcttagcacaggacgcctccag

SEQ ID NO: 5249415 - DNA, 25 bp, Homo sapien
ttaaaaggcgcttccaacaggcgcc

SEQ ID NO: 5249416 - DNA, 25 bp, Homo sapien
gcctccagaacagccgggtttgtgc

SEQ ID NO: 5249417 - DNA, 25 bp, Homo sapien
ttcatgtgcgcagcctcatgagaac

SEQ ID NO: 5249418 - DNA, 25 bp, Homo sapien
taaaccctattcagcatggagttcc

SEQ ID NO: 5249419 - DNA, 25 bp, Homo sapien
gacccatcaaactaaaccctattca

SEQ ID NO: 5249420 - DNA, 25 bp, Homo sapien
cccgattcattagtgttggaaagtc

SEQ ID NO: 5249421 - DNA, 25 bp, Homo sapien
ttggaaagtctatagcgaggctggc

SEQ ID NO: 5249422 - DNA, 25 bp, Homo sapien
gcagtcctgacgctcaacttcacaa

SEQ ID NO: 5249423 - DNA, 25 bp, Homo sapien
ccagtaacgtaatcatggagatttc

SEQ ID NO: 5249424 - DNA, 25 bp, Homo sapien
tggcaccttggtctttcaagaaaaa

SEQ ID NO: 5249425 - DNA, 25 bp, Homo sapien
gaacctttctccagtaacgtaatca

SEQ ID NO: 5249426 - DNA, 25 bp, Homo sapien
gctgtggactttgctttaacttggt

SEQ ID NO: 5249427 - DNA, 25 bp, Homo sapien
ggttaatgacgattctatggcaatg

SEQ ID NO: 5249428 - DNA, 25 bp, Homo sapien
tctttctcctaagtccactgaagtc

SEQ ID NO: 5249429 - DNA, 25 bp, Homo sapien
tctttttggacttggagagagcttt

SEQ ID NO: 5249430 - DNA, 25 bp, Homo sapien
cagctgaggtcaggtctatattcat

SEQ ID NO: 5249431 - DNA, 25 bp, Homo sapien
tctttgcagctgaggtcaggtctat

SEQ ID NO: 5249432 - DNA, 25 bp, Homo sapien
tctctttgcagctgaggtcaggtct

SEQ ID NO: 5249433 - DNA, 25 bp, Homo sapien
ttgcagctgaggtcaggtctatatt

SEQ ID NO: 5249434 - DNA, 25 bp, Homo sapien
tcgtggtccagagtgaaagcaagct

SEQ ID NO: 5249435 - DNA, 25 bp, Homo sapien
tccttgaggcaatccggtctcgtgg

SEQ ID NO: 5249436 - DNA, 25 bp, Homo sapien
gcggtactcatagatatgacatcct

SEQ ID NO: 5249437 - DNA, 25 bp, Homo sapien
gttgctctcgcggtactcatagata

SEQ ID NO: 5249438 - DNA, 25 bp, Homo sapien
acaaaaatgactctcgatcactcct

SEQ ID NO: 5249439 - DNA, 25 bp, Homo sapien
ctggatttagtgttaaagacaggta

SEQ ID NO: 5249440 - DNA, 25 bp, Homo sapien
ttgccctatatccagagatctccaa

SEQ ID NO: 5249441 - DNA, 25 bp, Homo sapien
tcactccttgattaactggatttag

SEQ ID NO: 5249442 - DNA, 25 bp, Homo sapien
ccacgtaagagtgagtcaatagaca

SEQ ID NO: 5249443 - DNA, 25 bp, Homo sapien
taagagtgagtcaatagacacaaga

SEQ ID NO: 5249444 - DNA, 25 bp, Homo sapien
cacagcctaagatgatcttatgata

SEQ ID NO: 5249445 - DNA, 25 bp, Homo sapien
atgaaccacgtaagagtgagtcaat

SEQ ID NO: 5249446 - DNA, 25 bp, Homo sapien
tgcaccagttggtctacaccgcctt

SEQ ID NO: 5249447 - DNA, 25 bp, Homo sapien
tctggctttgcagcacttgggtgtc

SEQ ID NO: 5249448 - DNA, 25 bp, Homo sapien
tcccgcctttggtgggacaagaaga

SEQ ID NO: 5249449 - DNA, 25 bp, Homo sapien
cgtcatctggccatgctcgtggaaa

SEQ ID NO: 5249450 - DNA, 25 bp, Homo sapien
gccaagagcatgaactcctccacga

SEQ ID NO: 5249451 - DNA, 25 bp, Homo sapien
gttggccaagagcatgaactcctcc

SEQ ID NO: 5249452 - DNA, 25 bp, Homo sapien
tggccaagagcatgaactcctccac

SEQ ID NO: 5249453 - DNA, 25 bp, Homo sapien
caagagcatgaactcctccacgagc

SEQ ID NO: 5249454 - DNA, 25 bp, Homo sapien
ggggaaggcgcggtggatcttgtgg

SEQ ID NO: 5249455 - DNA, 25 bp, Homo sapien
gaaggcgcggtggatcttgtgggcc

SEQ ID NO: 5249456 - DNA, 25 bp, Homo sapien
tcggggaaggcgcggtggatcttgt

SEQ ID NO: 5249457 - DNA, 25 bp, Homo sapien
ggaaggcgcggtggatcttgtgggc

SEQ ID NO: 5249458 - DNA, 25 bp, Homo sapien
gagctgaagtccacgggcagcccca

SEQ ID NO: 5249459 - DNA, 25 bp, Homo sapien
ctcctgcggagctgaagtccacggg

SEQ ID NO: 5249460 - DNA, 25 bp, Homo sapien
aggtcactgagcatccttgtttggg

SEQ ID NO: 5249461 - DNA, 25 bp, Homo sapien
ccatctggtcgcagaattccaccag

SEQ ID NO: 5249462 - DNA, 25 bp, Homo sapien
ctcccccgaatcctgcccaccactc

SEQ ID NO: 5249463 - DNA, 25 bp, Homo sapien
tcccccgaatcctgcccaccactca

SEQ ID NO: 5249464 - DNA, 25 bp, Homo sapien
cctcccccgaatcctgcccaccact

SEQ ID NO: 5249465 - DNA, 25 bp, Homo sapien
gagcacctccttgcgggccagtgag

SEQ ID NO: 5249466 - DNA, 25 bp, Homo sapien
ggagcacatgttggtgagcacctcc

SEQ ID NO: 5249467 - DNA, 25 bp, Homo sapien
atgggccgggagcacatgttggtga

SEQ ID NO: 5249468 - DNA, 25 bp, Homo sapien
gggccagtgagtacttgtcatctcc

SEQ ID NO: 5249469 - DNA, 25 bp, Homo sapien
tgagctccctgggaggcgagccagg

SEQ ID NO: 5249470 - DNA, 25 bp, Homo sapien
ggctctggctaactccggagcggct

SEQ ID NO: 5249471 - DNA, 25 bp, Homo sapien
cttggaggtgatggcgtcagaggca

SEQ ID NO: 5249472 - DNA, 25 bp, Homo sapien
agcggctccgatctctggagctcca

SEQ ID NO: 5249473 - DNA, 25 bp, Homo sapien
cagcgatgtgtggacagacctaatg

SEQ ID NO: 5249474 - DNA, 25 bp, Homo sapien
gctgagtgacgccagggaggactgg

SEQ ID NO: 5249475 - DNA, 25 bp, Homo sapien
tgctgagtgacgccagggaggactg

SEQ ID NO: 5249476 - DNA, 25 bp, Homo sapien
gatgtgtggacagacctaatgggct

SEQ ID NO: 5249477 - DNA, 25 bp, Homo sapien
tgcaccaggacgtcggcaaagcggc

SEQ ID NO: 5249478 - DNA, 25 bp, Homo sapien
tagtgccggaactgcgctgggtcct

SEQ ID NO: 5249479 - DNA, 25 bp, Homo sapien
tgtacaggggcacattgagcgcgta

SEQ ID NO: 5249480 - DNA, 25 bp, Homo sapien
cggtgcaccaggacgtcggcaaagc

SEQ ID NO: 5249481 - DNA, 25 bp, Homo sapien
catgcggcggtcgttacagtggtcc

SEQ ID NO: 5249482 - DNA, 25 bp, Homo sapien
tgagctcctgcacgcgcttggacgc

SEQ ID NO: 5249483 - DNA, 25 bp, Homo sapien
gactggtactgagctcctgcacgcg

SEQ ID NO: 5249484 - DNA, 25 bp, Homo sapien
acagtggtccgcctgtttctgcagg

SEQ ID NO: 5249485 - DNA, 25 bp, Homo sapien
gcagccatggcacctcctggcactg

SEQ ID NO: 5249486 - DNA, 25 bp, Homo sapien
ggacagtgctgcagccatggcacct

SEQ ID NO: 5249487 - DNA, 25 bp, Homo sapien
aggtgcccaggagggtcgggagcca

SEQ ID NO: 5249488 - DNA, 25 bp, Homo sapien
cctcgaggcctcctggtgagcaggt

SEQ ID NO: 5249489 - DNA, 25 bp, Homo sapien
tggcttctgactccagggggccact

SEQ ID NO: 5249490 - DNA, 25 bp, Homo sapien
cttctgactccagggggccactctc

SEQ ID NO: 5249491 - DNA, 25 bp, Homo sapien
gcttctgactccagggggccactct

SEQ ID NO: 5249492 - DNA, 25 bp, Homo sapien
catggcttctgactccagggggcca

SEQ ID NO: 5249493 - DNA, 25 bp, Homo sapien
gcagtagatgcgcttctgcacgccg

SEQ ID NO: 5249494 - DNA, 25 bp, Homo sapien
gttgcagtagatgcgcttctgcacg

SEQ ID NO: 5249495 - DNA, 25 bp, Homo sapien
tgcgcttctgcacgccgtagcgcag

SEQ ID NO: 5249496 - DNA, 25 bp, Homo sapien
gtagatgcgcttctgcacgccgtag

SEQ ID NO: 5249497 - DNA, 25 bp, Homo sapien
gagtcaacagtcactcagggcagga

SEQ ID NO: 5249498 - DNA, 25 bp, Homo sapien
ttcaatgcttggaggcggccctcag

SEQ ID NO: 5249499 - DNA, 25 bp, Homo sapien
acacagtttccaaagcggccacgga

SEQ ID NO: 5249500 - DNA, 25 bp, Homo sapien
tttactgcacacaacgggctggaca

SEQ ID NO: 5249501 - DNA, 25 bp, Homo sapien
cagcgtgagttccggcttcttgccc

SEQ ID NO: 5249502 - DNA, 25 bp, Homo sapien
ggctcccagaccagcgtgagttccg

SEQ ID NO: 5249503 - DNA, 25 bp, Homo sapien
aggctcccagaccagcgtgagttcc

SEQ ID NO: 5249504 - DNA, 25 bp, Homo sapien
cagcacccctgcattagcgggacag

SEQ ID NO: 5249505 - DNA, 25 bp, Homo sapien
aatttcttgggtgtaaactcatagc

SEQ ID NO: 5249506 - DNA, 25 bp, Homo sapien
ctgttggtgaaaacggttccagaca

SEQ ID NO: 5249507 - DNA, 25 bp, Homo sapien
ctctaaaggaccctagaaggccagc

SEQ ID NO: 5249508 - DNA, 25 bp, Homo sapien
ttatgaaacacaacctgagggcctg

SEQ ID NO: 5249509 - DNA, 25 bp, Homo sapien
tgagcgctcccaaggcttatgaaac

SEQ ID NO: 5249510 - DNA, 25 bp, Homo sapien
tgagggcctgggtccgcgttcaggg

SEQ ID NO: 5249511 - DNA, 25 bp, Homo sapien
gggagtcagatgcatcctgagcgct

SEQ ID NO: 5249512 - DNA, 25 bp, Homo sapien
ctggaagcctctgctcgcctgtctg

SEQ ID NO: 5249513 - DNA, 25 bp, Homo sapien
gatggcagggcctgatgtcgaggcg

SEQ ID NO: 5249514 - DNA, 25 bp, Homo sapien
gatgtcgaggcgcagctctgcctcc

SEQ ID NO: 5249515 - DNA, 25 bp, Homo sapien
cctctgctcgcctgtctgtaatggg

SEQ ID NO: 5249516 - DNA, 25 bp, Homo sapien
tgggtgcctggccgcttcaggatgg

SEQ ID NO: 5249517 - DNA, 25 bp, Homo sapien
gggctgtggactctgcctgcaggac

SEQ ID NO: 5249518 - DNA, 25 bp, Homo sapien
ccgcttcaggatggcgctgtacttg

SEQ ID NO: 5249519 - DNA, 25 bp, Homo sapien
cgctgtacttgagggctgtggactc

SEQ ID NO: 5249520 - DNA, 25 bp, Homo sapien
ctggtgcttgagtcctcgggctcac

SEQ ID NO: 5249521 - DNA, 25 bp, Homo sapien
cagctggtgcttgagtcctcgggct

SEQ ID NO: 5249522 - DNA, 25 bp, Homo sapien
tcagctggtgcttgagtcctcgggc

SEQ ID NO: 5249523 - DNA, 25 bp, Homo sapien
cagtttgtttaaaagttgagctgca

SEQ ID NO: 5249524 - DNA, 25 bp, Homo sapien
gtcctaaagccagtgtggcgggaca

SEQ ID NO: 5249525 - DNA, 25 bp, Homo sapien
ctctcccctgcagtttgtttaaaag

SEQ ID NO: 5249526 - DNA, 25 bp, Homo sapien
ccctccgtgtcaacaggtcctaaag

SEQ ID NO: 5249527 - DNA, 25 bp, Homo sapien
caggaaagttccaggtgttgacatc

SEQ ID NO: 5249528 - DNA, 25 bp, Homo sapien
tgttgacatcggctcagcagcgagg

SEQ ID NO: 5249529 - DNA, 25 bp, Homo sapien
ccagtatcaatcatctgccaggcag

SEQ ID NO: 5249530 - DNA, 25 bp, Homo sapien
tcaggcagaatgagactccagtatc

SEQ ID NO: 5249531 - DNA, 25 bp, Homo sapien
catggctttcatcctagtttctggc

SEQ ID NO: 5249532 - DNA, 25 bp, Homo sapien
aggcaggtgggatccgtgtcaccca

SEQ ID NO: 5249533 - DNA, 25 bp, Homo sapien
ggtatcacaggacccatgactccca

SEQ ID NO: 5249534 - DNA, 25 bp, Homo sapien
tctcggggacgccaagccacggagc

SEQ ID NO: 5249535 - DNA, 25 bp, Homo sapien
atgagggtcggtgcctggtcactct

SEQ ID NO: 5249536 - DNA, 25 bp, Homo sapien
actctttctgttgagtccttttagc

SEQ ID NO: 5249537 - DNA, 25 bp, Homo sapien
agggtcggtgcctggtcactctttc

SEQ ID NO: 5249538 - DNA, 25 bp, Homo sapien
ttagcgaggggccacataagaggct

SEQ ID NO: 5249539 - DNA, 25 bp, Homo sapien
catgcggtatggataggccttaaaa

SEQ ID NO: 5249540 - DNA, 25 bp, Homo sapien
tccctggctgtgcacggataggcat

SEQ ID NO: 5249541 - DNA, 25 bp, Homo sapien
tctaggaactttttggagcaacctc

SEQ ID NO: 5249542 - DNA, 25 bp, Homo sapien
cctggcccagagaccgttcattttg

SEQ ID NO: 5249543 - DNA, 25 bp, Homo sapien
tgtttttactctagtggcgctgaaa

SEQ ID NO: 5249544 - DNA, 25 bp, Homo sapien
aaatgtgtctccacggtggcaatca

SEQ ID NO: 5249545 - DNA, 25 bp, Homo sapien
tgtctgcagtgtttttactctagtg

SEQ ID NO: 5249546 - DNA, 25 bp, Homo sapien
tctagtggcgctgaaatgtgtctcc

SEQ ID NO: 5249547 - DNA, 25 bp, Homo sapien
gggacatgtatctgttgagagctca

SEQ ID NO: 5249548 - DNA, 25 bp, Homo sapien
ctgagaaggcgagggacatgtatct

SEQ ID NO: 5249549 - DNA, 25 bp, Homo sapien
aaggcgagggacatgtatctgttga

SEQ ID NO: 5249550 - DNA, 25 bp, Homo sapien
cgagggacatgtatctgttgagagc

SEQ ID NO: 5249551 - DNA, 25 bp, Homo sapien
ctgggtcctgtcactacggtttcct

SEQ ID NO: 5249552 - DNA, 25 bp, Homo sapien
tacggtttcctctttgtggcttctg

SEQ ID NO: 5249553 - DNA, 25 bp, Homo sapien
tggcttctgccctcattactgccca

SEQ ID NO: 5249554 - DNA, 25 bp, Homo sapien
cctgtcactacggtttcctctttgt

SEQ ID NO: 5249555 - DNA, 25 bp, Homo sapien
tactactaatccaacccgaggctct

SEQ ID NO: 5249556 - DNA, 25 bp, Homo sapien
gctattgccagatcgtaaactgtga

SEQ ID NO: 5249557 - DNA, 25 bp, Homo sapien
gatgactgtgtaaacgctattgcca

SEQ ID NO: 5249558 - DNA, 25 bp, Homo sapien
ccgaggctctatgcgaagtacttca

SEQ ID NO: 5249559 - DNA, 25 bp, Homo sapien
cgtctatattttgatcacaaaactg

SEQ ID NO: 5249560 - DNA, 25 bp, Homo sapien
tatattttgatcacaaaactgccat

SEQ ID NO: 5249561 - DNA, 25 bp, Homo sapien
attttgatcacaaaactgccatctg

SEQ ID NO: 5249562 - DNA, 25 bp, Homo sapien
ggcctggcttgcaggttgggggtct

SEQ ID NO: 5249563 - DNA, 25 bp, Homo sapien
taagtagaagaccatacgcagcctt

SEQ ID NO: 5249564 - DNA, 25 bp, Homo sapien
tcacacatgagcctagaggttctat

SEQ ID NO: 5249565 - DNA, 25 bp, Homo sapien
caatgaggatttgtcactgccatga

SEQ ID NO: 5249566 - DNA, 25 bp, Homo sapien
gccttctaaacgagtgggaacctga

SEQ ID NO: 5249567 - DNA, 25 bp, Homo sapien
tgaaggaaaaacagtcgtgtgtctg

SEQ ID NO: 5249568 - DNA, 25 bp, Homo sapien
atccctgtcacatatgccccgagtc

SEQ ID NO: 5249569 - DNA, 25 bp, Homo sapien
catatgccccgagtctcaggcaggc

SEQ ID NO: 5249570 - DNA, 25 bp, Homo sapien
gaaggaaaaacagtcgtgtgtctgg

SEQ ID NO: 5249571 - DNA, 25 bp, Homo sapien
tgggttgtctgctcctctactctta

SEQ ID NO: 5249572 - DNA, 25 bp, Homo sapien
tctgctcctctactcttatcgtgtt

SEQ ID NO: 5249573 - DNA, 25 bp, Homo sapien
gttgtctgctcctctactcttatcg

SEQ ID NO: 5249574 - DNA, 25 bp, Homo sapien
tgtctgctcctctactcttatcgtg

SEQ ID NO: 5249575 - DNA, 25 bp, Homo sapien
cgagctccgtaactctgacttttcc

SEQ ID NO: 5249576 - DNA, 25 bp, Homo sapien
tgcagaggcgagctccgtaactctg

SEQ ID NO: 5249577 - DNA, 25 bp, Homo sapien
gaggcgagctccgtaactctgactt

SEQ ID NO: 5249578 - DNA, 25 bp, Homo sapien
gaatgcagaggcgagctccgtaact

SEQ ID NO: 5249579 - DNA, 25 bp, Homo sapien
ttggctttcctggcatctgctgcaa

SEQ ID NO: 5249580 - DNA, 25 bp, Homo sapien
ggctttcctggcatctgctgcaaac

SEQ ID NO: 5249581 - DNA, 25 bp, Homo sapien
tggctttcctggcatctgctgcaaa

SEQ ID NO: 5249582 - DNA, 25 bp, Homo sapien
aaagctccataaagggaagctctgg

SEQ ID NO: 5249583 - DNA, 25 bp, Homo sapien
cgttatgagtagtgcacagtgcggc

SEQ ID NO: 5249584 - DNA, 25 bp, Homo sapien
tgtttcaaatacgaagcagcccctc

SEQ ID NO: 5249585 - DNA, 25 bp, Homo sapien
tacagtacaccagatgacgaggcat

SEQ ID NO: 5249586 - DNA, 25 bp, Homo sapien
gagtttagtgtctgccaggtcggca

SEQ ID NO: 5249587 - DNA, 25 bp, Homo sapien
gaccaggcttttctaacatacaaca

SEQ ID NO: 5249588 - DNA, 25 bp, Homo sapien
tgtcaggagtttcataactggaata

SEQ ID NO: 5249589 - DNA, 25 bp, Homo sapien
tacaacagattaaatctcacaaaca

SEQ ID NO: 5249590 - DNA, 25 bp, Homo sapien
tacacatacatgaagttcaaatggg

SEQ ID NO: 5249591 - DNA, 25 bp, Homo sapien
ttgctgctgcaaattggaacacatt

SEQ ID NO: 5249592 - DNA, 25 bp, Homo sapien
cagctttgctgctgcaaattggaac

SEQ ID NO: 5249593 - DNA, 25 bp, Homo sapien
gcaaattggaacacatttgttcacc

SEQ ID NO: 5249594 - DNA, 25 bp, Homo sapien
ttggaacacatttgttcacctttga

SEQ ID NO: 5249595 - DNA, 25 bp, Homo sapien
agcttccaggccgaccttaagctgc

SEQ ID NO: 5249596 - DNA, 25 bp, Homo sapien
ctttctccccatggagtcggacaat

SEQ ID NO: 5249597 - DNA, 25 bp, Homo sapien
cttccaggccgaccttaagctgcat

SEQ ID NO: 5249598 - DNA, 25 bp, Homo sapien
catggagtcggacaatcctcctggg

SEQ ID NO: 5249599 - DNA, 25 bp, Homo sapien
cagaccttctggtaactctctgcca

SEQ ID NO: 5249600 - DNA, 25 bp, Homo sapien
cgcagaccttctggtaactctctgc

SEQ ID NO: 5249601 - DNA, 25 bp, Homo sapien
gcagaccttctggtaactctctgcc

SEQ ID NO: 5249602 - DNA, 25 bp, Homo sapien
agaccttctggtaactctctgccat

SEQ ID NO: 5249603 - DNA, 25 bp, Homo sapien
acggtgatgacctgtacagagcccg

SEQ ID NO: 5249604 - DNA, 25 bp, Homo sapien
cggtgatgacctgtacagagcccgg

SEQ ID NO: 5249605 - DNA, 25 bp, Homo sapien
aagggaatagcccaactgggatgcc

SEQ ID NO: 5249606 - DNA, 25 bp, Homo sapien
agaggagctcgccttcttttagcaa

SEQ ID NO: 5249607 - DNA, 25 bp, Homo sapien
aactgggatgcccaatagaaacggg

SEQ ID NO: 5249608 - DNA, 25 bp, Homo sapien
ttagcaagggtaagggaatagccca

SEQ ID NO: 5249609 - DNA, 25 bp, Homo sapien
caggctgcccgggtttaaatcaggg

SEQ ID NO: 5249610 - DNA, 25 bp, Homo sapien
gaattctgggcatggagtatgagct

SEQ ID NO: 5249611 - DNA, 25 bp, Homo sapien
gctgcccgggtttaaatcagggaga

SEQ ID NO: 5249612 - DNA, 25 bp, Homo sapien
tggagtatgagctgcactccaggct

SEQ ID NO: 5249613 - DNA, 25 bp, Homo sapien
ccagggagagctgtagcctcaggcc

SEQ ID NO: 5249614 - DNA, 25 bp, Homo sapien
tgatgcccagggagagctgtagcct

SEQ ID NO: 5249615 - DNA, 25 bp, Homo sapien
atgcccagggagagctgtagcctca

SEQ ID NO: 5249616 - DNA, 25 bp, Homo sapien
ctgggatgatgcccagggagagctg

SEQ ID NO: 5249617 - DNA, 25 bp, Homo sapien
ttcttggcggctgtctgtgcaggct

SEQ ID NO: 5249618 - DNA, 25 bp, Homo sapien
atgatgaggttcttggcggctgtct

SEQ ID NO: 5249619 - DNA, 25 bp, Homo sapien
ctgcagcttcttggcggcacccagg

SEQ ID NO: 5249620 - DNA, 25 bp, Homo sapien
ggctgcctcgcggttccagaagtcc

SEQ ID NO: 5249621 - DNA, 25 bp, Homo sapien
ctggcagctgtcaccgtagacaccc

SEQ ID NO: 5249622 - DNA, 25 bp, Homo sapien
tggcagctgtcaccgtagacacccc

SEQ ID NO: 5249623 - DNA, 25 bp, Homo sapien
ccccgcacaggtaggccgtggctgt

SEQ ID NO: 5249624 - DNA, 25 bp, Homo sapien
cttgaccccgcacaggtaggccgtg

SEQ ID NO: 5249625 - DNA, 25 bp, Homo sapien
ttgccgcgtgtcgtgttgcactggt

SEQ ID NO: 5249626 - DNA, 25 bp, Homo sapien
actggttaaagcgggcggctgcact

SEQ ID NO: 5249627 - DNA, 25 bp, Homo sapien
gtggttaccactcccactgacttcc

SEQ ID NO: 5249628 - DNA, 25 bp, Homo sapien
ggtggttaccactcccactgacttc

SEQ ID NO: 5249629 - DNA, 25 bp, Homo sapien
tactttcggcctccacctaggatca

SEQ ID NO: 5249630 - DNA, 25 bp, Homo sapien
tgtactttcggcctccacctaggat

SEQ ID NO: 5249631 - DNA, 25 bp, Homo sapien
catgtactttcggcctccacctagg

SEQ ID NO: 5249632 - DNA, 25 bp, Homo sapien
aacatgtactttcggcctccaccta

SEQ ID NO: 5249633 - DNA, 25 bp, Homo sapien
agctcagtgcggttccacacatacc

SEQ ID NO: 5249634 - DNA, 25 bp, Homo sapien
gagctcagtgcggttccacacatac

SEQ ID NO: 5249635 - DNA, 25 bp, Homo sapien
atgagatgggtcacagacgggtcca

SEQ ID NO: 5249636 - DNA, 25 bp, Homo sapien
atgggtcacagacgggtccagggaa

SEQ ID NO: 5249637 - DNA, 25 bp, Homo sapien
ccatgagatgggtcacagacgggtc

SEQ ID NO: 5249638 - DNA, 25 bp, Homo sapien
agatgggtcacagacgggtccaggg

SEQ ID NO: 5249639 - DNA, 25 bp, Homo sapien
gagtctcggtggatctcgtatttca

SEQ ID NO: 5249640 - DNA, 25 bp, Homo sapien
gtggatctcgtatttcatgtctcca

SEQ ID NO: 5249641 - DNA, 25 bp, Homo sapien
agtctcggtggatctcgtatttcat

SEQ ID NO: 5249642 - DNA, 25 bp, Homo sapien
agtcagtgcccggtaagccctgctt

SEQ ID NO: 5249643 - DNA, 25 bp, Homo sapien
cccggtaagccctgctttcatgatg

SEQ ID NO: 5249644 - DNA, 25 bp, Homo sapien
tctcagtcagtgcccggtaagccct

SEQ ID NO: 5249645 - DNA, 25 bp, Homo sapien
agtgcccggtaagccctgctttcat

SEQ ID NO: 5249646 - DNA, 25 bp, Homo sapien
ggtagcctccgaaggagaagacgtg

SEQ ID NO: 5249647 - DNA, 25 bp, Homo sapien
gagctccctcgcagggggtagcctc

SEQ ID NO: 5249648 - DNA, 25 bp, Homo sapien
cctccgaaggagaagacgtgggagt

SEQ ID NO: 5249649 - DNA, 25 bp, Homo sapien
cgtgggagtggtcggcagtgacgag

SEQ ID NO: 5249650 - DNA, 25 bp, Homo sapien
ggccgggcgccgtccttgagcacat

SEQ ID NO: 5249651 - DNA, 25 bp, Homo sapien
tagcctggaccgtttccgtatagga

SEQ ID NO: 5249652 - DNA, 25 bp, Homo sapien
gccgtccttgagcacatagcctgga

SEQ ID NO: 5249653 - DNA, 25 bp, Homo sapien
tataggaggaccgtgtaggccttcc

SEQ ID NO: 5249654 - DNA, 25 bp, Homo sapien
cgcctgcgtgggtctcttcgtccag

SEQ ID NO: 5249655 - DNA, 25 bp, Homo sapien
gtgcgctatgaaggtctgctcctgc

SEQ ID NO: 5249656 - DNA, 25 bp, Homo sapien
aaggccatgacgtgcgctatgaagg

SEQ ID NO: 5249657 - DNA, 25 bp, Homo sapien
agcagaggaagcaacgcggggacca

SEQ ID NO: 5249658 - DNA, 25 bp, Homo sapien
aggcaggcggcgaaggccatgacgt

SEQ ID NO: 5249659 - DNA, 25 bp, Homo sapien
catggcaggacctctgtatagggac

SEQ ID NO: 5249660 - DNA, 25 bp, Homo sapien
tccaggcgtcctgaagatcccgagt

SEQ ID NO: 5249661 - DNA, 25 bp, Homo sapien
caggtttggtgtcatgggctcagtc

SEQ ID NO: 5249662 - DNA, 25 bp, Homo sapien
tcccacaggtgattcaaggactgaa

SEQ ID NO: 5249663 - DNA, 25 bp, Homo sapien
gactacaggcgcatagataaggggt

SEQ ID NO: 5249664 - DNA, 25 bp, Homo sapien
gacttatactcgttcgcctgcggcg

SEQ ID NO: 5249665 - DNA, 25 bp, Homo sapien
taaaaaagtgcagggcgtgtacagc

SEQ ID NO: 5249666 - DNA, 25 bp, Homo sapien
tatgctggtgctcaagtacctgggc

SEQ ID NO: 5249667 - DNA, 25 bp, Homo sapien
gatgggacctcaactggctgctgta

SEQ ID NO: 5249668 - DNA, 25 bp, Homo sapien
ctgcggggtaaatggcgccgaatcc

SEQ ID NO: 5249669 - DNA, 25 bp, Homo sapien
taaatggcgccgaatccctgcagcc

SEQ ID NO: 5249670 - DNA, 25 bp, Homo sapien
tgcggggtaaatggcgccgaatccc

SEQ ID NO: 5249671 - DNA, 25 bp, Homo sapien
gggtaaatggcgccgaatccctgca

SEQ ID NO: 5249672 - DNA, 25 bp, Homo sapien
agcctcagcttcccttttggagaca

SEQ ID NO: 5249673 - DNA, 25 bp, Homo sapien
cacagcctcagcttcccttttggag

SEQ ID NO: 5249674 - DNA, 25 bp, Homo sapien
acagcctcagcttcccttttggaga

SEQ ID NO: 5249675 - DNA, 25 bp, Homo sapien
ccacagcctcagcttcccttttgga

SEQ ID NO: 5249676 - DNA, 25 bp, Homo sapien
gaactgaccaaagggagggaatctg

SEQ ID NO: 5249677 - DNA, 25 bp, Homo sapien
tctggctccgctatgtgacactgca

SEQ ID NO: 5249678 - DNA, 25 bp, Homo sapien
caagatgaattcacttcggtcccac

SEQ ID NO: 5249679 - DNA, 25 bp, Homo sapien
caacactgcgttagattccaggaca

SEQ ID NO: 5249680 - DNA, 25 bp, Homo sapien
aagcagtcggagagcggcgaggcgg

SEQ ID NO: 5249681 - DNA, 25 bp, Homo sapien
gcggaaatcccaggtatggagtatg

SEQ ID NO: 5249682 - DNA, 25 bp, Homo sapien
tcggagagcggcgaggcggaaatcc

SEQ ID NO: 5249683 - DNA, 25 bp, Homo sapien
cggcgaggcggaaatcccaggtatg

SEQ ID NO: 5249684 - DNA, 25 bp, Homo sapien
ctgggatgatgcccagggagagctg

SEQ ID NO: 5249685 - DNA, 25 bp, Homo sapien
ccagggagagctgtagcctcaggcc

SEQ ID NO: 5249686 - DNA, 25 bp, Homo sapien
tgatgcccagggagagctgtagcct

SEQ ID NO: 5249687 - DNA, 25 bp, Homo sapien
atgcccagggagagctgtagcctca

SEQ ID NO: 5249688 - DNA, 25 bp, Homo sapien
gctgcctggcggttccagaagtccg

SEQ ID NO: 5249689 - DNA, 25 bp, Homo sapien
ttcttggcggctgtctgtgcaggct

SEQ ID NO: 5249690 - DNA, 25 bp, Homo sapien
atgatgaggttcttggcggctgtct

SEQ ID NO: 5249691 - DNA, 25 bp, Homo sapien
ctgcagcttcttggcggcacccagg

SEQ ID NO: 5249692 - DNA, 25 bp, Homo sapien
aggaaggtctcaggccccagtttgt

SEQ ID NO: 5249693 - DNA, 25 bp, Homo sapien
ctggcagctgtcaccgtagacaccc

SEQ ID NO: 5249694 - DNA, 25 bp, Homo sapien
ttggacagagccacgtacgggaagc

SEQ ID NO: 5249695 - DNA, 25 bp, Homo sapien
tcttctgcccttttaggatcctggc

SEQ ID NO: 5249696 - DNA, 25 bp, Homo sapien
ccccgcacaggtaggccgtggctgt

SEQ ID NO: 5249697 - DNA, 25 bp, Homo sapien
actggttaaagcgggcggctgcact

SEQ ID NO: 5249698 - DNA, 25 bp, Homo sapien
cttgaccccgcacaggtaggccgtg

SEQ ID NO: 5249699 - DNA, 25 bp, Homo sapien
ttgccgcgtgtcgtgttgcactggt

SEQ ID NO: 5249700 - DNA, 25 bp, Homo sapien
ggttcaccgtgtgggcgtaggcgcc

SEQ ID NO: 5249701 - DNA, 25 bp, Homo sapien
tcaccgtgtgggcgtaggcgccggc

SEQ ID NO: 5249702 - DNA, 25 bp, Homo sapien
tgcggttcaccgtgtgggcgtaggc

SEQ ID NO: 5249703 - DNA, 25 bp, Homo sapien
caccgtgtgggcgtaggcgccggct

SEQ ID NO: 5249704 - DNA, 25 bp, Homo sapien
aacatgtactttcggcctccaccta

SEQ ID NO: 5249705 - DNA, 25 bp, Homo sapien
catgtactttcggcctccacctagg

SEQ ID NO: 5249706 - DNA, 25 bp, Homo sapien
tactttcggcctccacctaggatca

SEQ ID NO: 5249707 - DNA, 25 bp, Homo sapien
tgtactttcggcctccacctaggat

SEQ ID NO: 5249708 - DNA, 25 bp, Homo sapien
gctcagtgcggttccacacgtaccg

SEQ ID NO: 5249709 - DNA, 25 bp, Homo sapien
tgcaggagctcagtgcggttccaca

SEQ ID NO: 5249710 - DNA, 25 bp, Homo sapien
tcagtgcggttccacacgtaccggg

SEQ ID NO: 5249711 - DNA, 25 bp, Homo sapien
gagctcagtgcggttccacacgtac

SEQ ID NO: 5249712 - DNA, 25 bp, Homo sapien
agtctcggtggatctcgtatttcat

SEQ ID NO: 5249713 - DNA, 25 bp, Homo sapien
gagtctcggtggatctcgtatttca

SEQ ID NO: 5249714 - DNA, 25 bp, Homo sapien
gtggatctcgtatttcatgtctcca

SEQ ID NO: 5249715 - DNA, 25 bp, Homo sapien
tagcctccgaaggagaagacgtggg

SEQ ID NO: 5249716 - DNA, 25 bp, Homo sapien
gacgtgggagtggtcggcagtgacg

SEQ ID NO: 5249717 - DNA, 25 bp, Homo sapien
tcgaacatgatcgtctcagtcagtg

SEQ ID NO: 5249718 - DNA, 25 bp, Homo sapien
gtcagtgcccggtaagccctgcttt

SEQ ID NO: 5249719 - DNA, 25 bp, Homo sapien
ttccgtataggaggaccgtgtaggc

SEQ ID NO: 5249720 - DNA, 25 bp, Homo sapien
taggaggaccgtgtaggccttcctg

SEQ ID NO: 5249721 - DNA, 25 bp, Homo sapien
atagcctggaccgtttccgtatagg

SEQ ID NO: 5249722 - DNA, 25 bp, Homo sapien
agcctggaccgtttccgtataggag

SEQ ID NO: 5249723 - DNA, 25 bp, Homo sapien
cgctctcgctctccgtaacatccgg

SEQ ID NO: 5249724 - DNA, 25 bp, Homo sapien
tcgctctccgtaacatccggccggg

SEQ ID NO: 5249725 - DNA, 25 bp, Homo sapien
ccggccgggcgccgtccttgagcac

SEQ ID NO: 5249726 - DNA, 25 bp, Homo sapien
tctcgctctccgtaacatccggccg

SEQ ID NO: 5249727 - DNA, 25 bp, Homo sapien
ctgctgactgctgccgatactcggg

SEQ ID NO: 5249728 - DNA, 25 bp, Homo sapien
agcagaggaagcaacgcggggacca

SEQ ID NO: 5249729 - DNA, 25 bp, Homo sapien
aaggccatgacgtgcgctatgaagg

SEQ ID NO: 5249730 - DNA, 25 bp, Homo sapien
aggcaggcggcgaaggccatgacgt

SEQ ID NO: 5249731 - DNA, 25 bp, Homo sapien
gtgcgctatgaaggtctgctcctgc

SEQ ID NO: 5249732 - DNA, 25 bp, Homo sapien
ttccatggcaggacgtctgtgtggc

SEQ ID NO: 5249733 - DNA, 25 bp, Homo sapien
ctaggtatgggtgcctcatgtcccc

SEQ ID NO: 5249734 - DNA, 25 bp, Homo sapien
caagataaagcaaagggcgtggtgt

SEQ ID NO: 5249735 - DNA, 25 bp, Homo sapien
tgtgtccctcaggtgctgccatgac

SEQ ID NO: 5249736 - DNA, 25 bp, Homo sapien
tttgtttgcgtccatccgccggctg

SEQ ID NO: 5249737 - DNA, 25 bp, Homo sapien
taggtggcgcctgagtccctgcagc

SEQ ID NO: 5249738 - DNA, 25 bp, Homo sapien
gtcaccttcgtagccgctgcgcgga

SEQ ID NO: 5249739 - DNA, 25 bp, Homo sapien
gcggccacttccgtcaccttcgtag

SEQ ID NO: 5249740 - DNA, 25 bp, Homo sapien
agaaggcaccgaggaaagatctctg

SEQ ID NO: 5249741 - DNA, 25 bp, Homo sapien
atctctgctgaatgacaggatgcct

SEQ ID NO: 5249742 - DNA, 25 bp, Homo sapien
ctgctgaatgacaggatgcctggaa

SEQ ID NO: 5249743 - DNA, 25 bp, Homo sapien
aggcaccgaggaaagatctctgctg

SEQ ID NO: 5249744 - DNA, 25 bp, Homo sapien
ctccaaatgtttgggtcaggctttt

SEQ ID NO: 5249745 - DNA, 25 bp, Homo sapien
ggaacaggagcaccgcagacctggt

SEQ ID NO: 5249746 - DNA, 25 bp, Homo sapien
gctgaggaacaggagcaccgcagac

SEQ ID NO: 5249747 - DNA, 25 bp, Homo sapien
acaggagcaccgcagacctggtaac

SEQ ID NO: 5249748 - DNA, 25 bp, Homo sapien
aggagcaccgcagacctggtaactc

SEQ ID NO: 5249749 - DNA, 25 bp, Homo sapien
gctggctgctgagcaaagccaggga

SEQ ID NO: 5249750 - DNA, 25 bp, Homo sapien
cgggctgctggctgctgagcaaagc

SEQ ID NO: 5249751 - DNA, 25 bp, Homo sapien
ggctgctggctgctgagcaaagcca

SEQ ID NO: 5249752 - DNA, 25 bp, Homo sapien
ccagggccaggaccagtgccccttt

SEQ ID NO: 5249753 - DNA, 25 bp, Homo sapien
agctttgccatcggcagccttggtg

SEQ ID NO: 5249754 - DNA, 25 bp, Homo sapien
tagtgcccgaactgtgccaggtcct

SEQ ID NO: 5249755 - DNA, 25 bp, Homo sapien
tgtacaggggcatgatgagcgcata

SEQ ID NO: 5249756 - DNA, 25 bp, Homo sapien
gcatgatgagcgcatagtgcccgaa

SEQ ID NO: 5249757 - DNA, 25 bp, Homo sapien
tgagcgcatagtgcccgaactgtgc

SEQ ID NO: 5249758 - DNA, 25 bp, Homo sapien
tcgcccgacctttggacctccacca

SEQ ID NO: 5249759 - DNA, 25 bp, Homo sapien
atggtcttgggccaccgagcaccca

SEQ ID NO: 5249760 - DNA, 25 bp, Homo sapien
acctccaccatcaccgctgaatggt

SEQ ID NO: 5249761 - DNA, 25 bp, Homo sapien
ccaccatcaccgctgaatggtcttg

SEQ ID NO: 5249762 - DNA, 25 bp, Homo sapien
atggcaaagaagagaccggtgctga

SEQ ID NO: 5249763 - DNA, 25 bp, Homo sapien
cggccgtcgttgcagtggtctgcct

SEQ ID NO: 5249764 - DNA, 25 bp, Homo sapien
aagaagagaccggtgctgagttcct

SEQ ID NO: 5249765 - DNA, 25 bp, Homo sapien
catgcggccgtcgttgcagtggtct

SEQ ID NO: 5249766 - DNA, 25 bp, Homo sapien
cttctgactccagggggccactctc

SEQ ID NO: 5249767 - DNA, 25 bp, Homo sapien
tggcttctgactccagggggccact

SEQ ID NO: 5249768 - DNA, 25 bp, Homo sapien
catggcttctgactccagggggcca

SEQ ID NO: 5249769 - DNA, 25 bp, Homo sapien
gcttctgactccagggggccactct

SEQ ID NO: 5249770 - DNA, 25 bp, Homo sapien
tgcgcttctgcacgccatagcgcag

SEQ ID NO: 5249771 - DNA, 25 bp, Homo sapien
gttgcagtagatgcgcttctgcacg

SEQ ID NO: 5249772 - DNA, 25 bp, Homo sapien
tagatgcgcttctgcacgccatagc

SEQ ID NO: 5249773 - DNA, 25 bp, Homo sapien
cagtagatgcgcttctgcacgccat

SEQ ID NO: 5249774 - DNA, 25 bp, Homo sapien
ctccaccaggctgaagatggtgatg

SEQ ID NO: 5249775 - DNA, 25 bp, Homo sapien
ctagagggccatggctgcccacagg

SEQ ID NO: 5249776 - DNA, 25 bp, Homo sapien
ccacaggaccacctccaccaggctg

SEQ ID NO: 5249777 - DNA, 25 bp, Homo sapien
agggccatggctgcccacaggacca

SEQ ID NO: 5249778 - DNA, 25 bp, Homo sapien
tggatacggtttccacttccccaga

SEQ ID NO: 5249779 - DNA, 25 bp, Homo sapien
ctgaccctcgtggatacggtttcca

SEQ ID NO: 5249780 - DNA, 25 bp, Homo sapien
tgaccctcgtggatacggtttccac

SEQ ID NO: 5249781 - DNA, 25 bp, Homo sapien
gggtcggtgtctggtcactctttct

SEQ ID NO: 5249782 - DNA, 25 bp, Homo sapien
ttagatgagggtcggtgtctggtca

SEQ ID NO: 5249783 - DNA, 25 bp, Homo sapien
ttagtgaggggccacataagaggct

SEQ ID NO: 5249784 - DNA, 25 bp, Homo sapien
gctgggcccccagcggacccatgga

SEQ ID NO: 5249785 - DNA, 25 bp, Homo sapien
gcacaggagaacttgggtcaggtac

SEQ ID NO: 5249786 - DNA, 25 bp, Homo sapien
ccaggcattcctcatgcacaggaga

SEQ ID NO: 5249787 - DNA, 25 bp, Homo sapien
tcctcatgcacaggagaacttgggt

SEQ ID NO: 5249788 - DNA, 25 bp, Homo sapien
tcatgcacaggagaacttgggtcag

SEQ ID NO: 5249789 - DNA, 25 bp, Homo sapien
gtggggacaccaggaaccggctgca

SEQ ID NO: 5249790 - DNA, 25 bp, Homo sapien
acaccaggaaccggctgcagcgcag

SEQ ID NO: 5249791 - DNA, 25 bp, Homo sapien
gggacaccaggaaccggctgcagcg

SEQ ID NO: 5249792 - DNA, 25 bp, Homo sapien
ggacaccaggaaccggctgcagcgc

SEQ ID NO: 5249793 - DNA, 25 bp, Homo sapien
acgcccagggagagctgtagcctca

SEQ ID NO: 5249794 - DNA, 25 bp, Homo sapien
ggatgacgcccagggagagctgtag

SEQ ID NO: 5249795 - DNA, 25 bp, Homo sapien
cgcccagggagagctgtagcctcag

SEQ ID NO: 5249796 - DNA, 25 bp, Homo sapien
ctgggatgacgcccagggagagctg

SEQ ID NO: 5249797 - DNA, 25 bp, Homo sapien
ctgtgtgtggaacagcttggggagc

SEQ ID NO: 5249798 - DNA, 25 bp, Homo sapien
tgtgtgtggaacagcttggggagcc

SEQ ID NO: 5249799 - DNA, 25 bp, Homo sapien
gtgtgtggaacagcttggggagcct

SEQ ID NO: 5249800 - DNA, 25 bp, Homo sapien
gaggttcttggcgaccttctggatg

SEQ ID NO: 5249801 - DNA, 25 bp, Homo sapien
ggttcttggcgaccttctggatggg

SEQ ID NO: 5249802 - DNA, 25 bp, Homo sapien
tgaggttcttggcgaccttctggat

SEQ ID NO: 5249803 - DNA, 25 bp, Homo sapien
aggttcttggcgaccttctggatgg

SEQ ID NO: 5249804 - DNA, 25 bp, Homo sapien
ccctttaggatcctggtggctgtca

SEQ ID NO: 5249805 - DNA, 25 bp, Homo sapien
tgccattcttctgcccctttaggat

SEQ ID NO: 5249806 - DNA, 25 bp, Homo sapien
ccaggtatgggaagcggtccatggc

SEQ ID NO: 5249807 - DNA, 25 bp, Homo sapien
tctcaggccccagtttgccattctt

SEQ ID NO: 5249808 - DNA, 25 bp, Homo sapien
gtggctgcgctgtctggcacctgtc

SEQ ID NO: 5249809 - DNA, 25 bp, Homo sapien
tgtggctgcgctgtctggcacctgt

SEQ ID NO: 5249810 - DNA, 25 bp, Homo sapien
ctgtggctgcgctgtctggcacctg

SEQ ID NO: 5249811 - DNA, 25 bp, Homo sapien
ggctgtggctgcgctgtctggcacc

SEQ ID NO: 5249812 - DNA, 25 bp, Homo sapien
tgctgcacccgtgtggtggtcacca

SEQ ID NO: 5249813 - DNA, 25 bp, Homo sapien
cagttgcggttcactgtgtgtgcgt

SEQ ID NO: 5249814 - DNA, 25 bp, Homo sapien
aggcatgtcagcatctgagtaccag

SEQ ID NO: 5249815 - DNA, 25 bp, Homo sapien
agctgagtggcgatgtcctggcacc

SEQ ID NO: 5249816 - DNA, 25 bp, Homo sapien
tgctgacccagatcaggcttttggt

SEQ ID NO: 5249817 - DNA, 25 bp, Homo sapien
gctgacccagatcaggcttttggtt

SEQ ID NO: 5249818 - DNA, 25 bp, Homo sapien
tgacccagatcaggcttttggttgc

SEQ ID NO: 5249819 - DNA, 25 bp, Homo sapien
cccagatcaggcttttggttgcctg

SEQ ID NO: 5249820 - DNA, 25 bp, Homo sapien
tacttgcggcctccgccaaggatca

SEQ ID NO: 5249821 - DNA, 25 bp, Homo sapien
ctggcatcagctgggtactcagggt

SEQ ID NO: 5249822 - DNA, 25 bp, Homo sapien
aacatgtacttgcggcctccgccaa

SEQ ID NO: 5249823 - DNA, 25 bp, Homo sapien
atgtacttgcggcctccgccaagga

SEQ ID NO: 5249824 - DNA, 25 bp, Homo sapien
gagctcagtgcggttccacacatac

SEQ ID NO: 5249825 - DNA, 25 bp, Homo sapien
atgagctcagtgcggttccacacat

SEQ ID NO: 5249826 - DNA, 25 bp, Homo sapien
agctcagtgcggttccacacatacc

SEQ ID NO: 5249827 - DNA, 25 bp, Homo sapien
tgagctcagtgcggttccacacata

SEQ ID NO: 5249828 - DNA, 25 bp, Homo sapien
ttcgtgtctccgggctcaaagaggc

SEQ ID NO: 5249829 - DNA, 25 bp, Homo sapien
gggtctcggtggatctcatatttcg

SEQ ID NO: 5249830 - DNA, 25 bp, Homo sapien
tctcatatttcgtgtctccgggctc

SEQ ID NO: 5249831 - DNA, 25 bp, Homo sapien
tggatctcatatttcgtgtctccgg

SEQ ID NO: 5249832 - DNA, 25 bp, Homo sapien
agaggggggtgatgcttgaacctgc

SEQ ID NO: 5249833 - DNA, 25 bp, Homo sapien
tggtcagcggtgacgagggtcagcg

SEQ ID NO: 5249834 - DNA, 25 bp, Homo sapien
tcagtgagtgcctggtaagccacac

SEQ ID NO: 5249835 - DNA, 25 bp, Homo sapien
ggagctccctcgcaaggtgtagcca

SEQ ID NO: 5249836 - DNA, 25 bp, Homo sapien
gtcgtcgaacatgaccgcctcagtg

SEQ ID NO: 5249837 - DNA, 25 bp, Homo sapien
cctcataattgatgcagcagcacct

SEQ ID NO: 5249838 - DNA, 25 bp, Homo sapien
cacctgccactctccccaggcctac

SEQ ID NO: 5249839 - DNA, 25 bp, Homo sapien
cagcacctgccactctccccaggcc

SEQ ID NO: 5249840 - DNA, 25 bp, Homo sapien
tcataattgatgcagcagcacctgc

SEQ ID NO: 5249841 - DNA, 25 bp, Homo sapien
acagctgtgggagtgcctcctatgt

SEQ ID NO: 5249842 - DNA, 25 bp, Homo sapien
gggagatgcgggtccctgtagttga

SEQ ID NO: 5249843 - DNA, 25 bp, Homo sapien
ctgtagggagatgcgggtccctgta

SEQ ID NO: 5249844 - DNA, 25 bp, Homo sapien
ctgtgggagtgcctcctatgtgcca

SEQ ID NO: 5249845 - DNA, 25 bp, Homo sapien
tacaggatggacgtgtaggctttgc

SEQ ID NO: 5249846 - DNA, 25 bp, Homo sapien
ctggtcgcacgcctgagttgaacac

SEQ ID NO: 5249847 - DNA, 25 bp, Homo sapien
agttgaacacgtagcccgggccatt

SEQ ID NO: 5249848 - DNA, 25 bp, Homo sapien
attcacgtctggtcgcacgcctgag

SEQ ID NO: 5249849 - DNA, 25 bp, Homo sapien
acgtcttcgcctccgtgggtctcgg

SEQ ID NO: 5249850 - DNA, 25 bp, Homo sapien
tgggtctcggacgacaggggcaccg

SEQ ID NO: 5249851 - DNA, 25 bp, Homo sapien
cgtgggtctcggacgacaggggcac

SEQ ID NO: 5249852 - DNA, 25 bp, Homo sapien
aaacaccgccacgtcttcgcctccg

SEQ ID NO: 5249853 - DNA, 25 bp, Homo sapien
gcagcgacgcggcaactgggtgcgc

SEQ ID NO: 5249854 - DNA, 25 bp, Homo sapien
ccagcagtggcagcgacgcggcaac

SEQ ID NO: 5249855 - DNA, 25 bp, Homo sapien
agcgacgcggcaactgggtgcgcgg

SEQ ID NO: 5249856 - DNA, 25 bp, Homo sapien
cgcggcaactgggtgcgcggcgtcg

SEQ ID NO: 5249857 - DNA, 25 bp, Homo sapien
caggcctgcttggtcttccttagga

SEQ ID NO: 5249858 - DNA, 25 bp, Homo sapien
caagcgctccttggatctggtgacc

SEQ ID NO: 5249859 - DNA, 25 bp, Homo sapien
tatctctaggaggtgaaggtccaac

SEQ ID NO: 5249860 - DNA, 25 bp, Homo sapien
caagtccttgggtctaccaggtgct

SEQ ID NO: 5249861 - DNA, 25 bp, Homo sapien
cctcatgcacctggcaaaaggttag

SEQ ID NO: 5249862 - DNA, 25 bp, Homo sapien
tcctcctcatgcacctggcaaaagg

SEQ ID NO: 5249863 - DNA, 25 bp, Homo sapien
tcatgcacctggcaaaaggttaggg

SEQ ID NO: 5249864 - DNA, 25 bp, Homo sapien
gctcctcctcatgcacctggcaaaa

SEQ ID NO: 5249865 - DNA, 25 bp, Homo sapien
tgtgtacagtgggtgcccgtgggca

SEQ ID NO: 5249866 - DNA, 25 bp, Homo sapien
cagtgggtgcccgtgggcaaaccat

SEQ ID NO: 5249867 - DNA, 25 bp, Homo sapien
gcaggcgtgtgtacagtgggtgccc

SEQ ID NO: 5249868 - DNA, 25 bp, Homo sapien
ccgtgggcaaaccatgagcttggga

SEQ ID NO: 5249869 - DNA, 25 bp, Homo sapien
gatctccatcgccactcggtttatt

SEQ ID NO: 5249870 - DNA, 25 bp, Homo sapien
ctcggcactcgtgcgatctgtgctg

SEQ ID NO: 5249871 - DNA, 25 bp, Homo sapien
ttattgcccactgggcgctcctctg

SEQ ID NO: 5249872 - DNA, 25 bp, Homo sapien
tgcgatctgtgctggatctccatcg

SEQ ID NO: 5249873 - DNA, 25 bp, Homo sapien
tggggcacggggggcagggtgggca

SEQ ID NO: 5249874 - DNA, 25 bp, Homo sapien
gtagtctaggttgcggcccaacaca

SEQ ID NO: 5249875 - DNA, 25 bp, Homo sapien
taggttgcggcccaacacagtctct

SEQ ID NO: 5249876 - DNA, 25 bp, Homo sapien
tctaggttgcggcccaacacagtct

SEQ ID NO: 5249877 - DNA, 25 bp, Homo sapien
ggttgcggcccaacacagtctctgc

SEQ ID NO: 5249878 - DNA, 25 bp, Homo sapien
caggtgggtcctggaggagagcttg

SEQ ID NO: 5249879 - DNA, 25 bp, Homo sapien
tgggtcctggaggagagcttgaggc

SEQ ID NO: 5249880 - DNA, 25 bp, Homo sapien
gtcctggaggagagcttgaggcctg

SEQ ID NO: 5249881 - DNA, 25 bp, Homo sapien
ggtgggtcctggaggagagcttgag

SEQ ID NO: 5249882 - DNA, 25 bp, Homo sapien
ccgcgtcacattggcagtgctcgga

SEQ ID NO: 5249883 - DNA, 25 bp, Homo sapien
tcacattggcagtgctcggacgcct

SEQ ID NO: 5249884 - DNA, 25 bp, Homo sapien
attggcagtgctcggacgcctctcg

SEQ ID NO: 5249885 - DNA, 25 bp, Homo sapien
ccgtgggcccgcgtcacattggcag

SEQ ID NO: 5249886 - DNA, 25 bp, Homo sapien
tgcccgccgagctgcagcctcacca

SEQ ID NO: 5249887 - DNA, 25 bp, Homo sapien
ctgcccgccgagctgcagcctcacc

SEQ ID NO: 5249888 - DNA, 25 bp, Homo sapien
ctcaccagccagggccaggccccgg

SEQ ID NO: 5249889 - DNA, 25 bp, Homo sapien
agcctcaccagccagggccaggccc

SEQ ID NO: 5249890 - DNA, 25 bp, Homo sapien
cctacaaagcagtgcgctgccgtga

SEQ ID NO: 5249891 - DNA, 25 bp, Homo sapien
cgcccgcatgccgggctttctccac

SEQ ID NO: 5249892 - DNA, 25 bp, Homo sapien
ggatgcggttcactggcacctcctc

SEQ ID NO: 5249893 - DNA, 25 bp, Homo sapien
acccctctgccagcgtcacagtcca

SEQ ID NO: 5249894 - DNA, 25 bp, Homo sapien
ggcaggatgcggttcactggcacct

SEQ ID NO: 5249895 - DNA, 25 bp, Homo sapien
agtccacagaagctcattcggggcg

SEQ ID NO: 5249896 - DNA, 25 bp, Homo sapien
aggcggcgcagggtcaaggaagcac

SEQ ID NO: 5249897 - DNA, 25 bp, Homo sapien
gcggcgcagggtcaaggaagcacgg

SEQ ID NO: 5249898 - DNA, 25 bp, Homo sapien
cggcgcagggtcaaggaagcacggg

SEQ ID NO: 5249899 - DNA, 25 bp, Homo sapien
ggcgcagggtcaaggaagcacgggt

SEQ ID NO: 5249900 - DNA, 25 bp, Homo sapien
tcgttgtggaaggtccgcgggtcaa

SEQ ID NO: 5249901 - DNA, 25 bp, Homo sapien
ccagcccgcgatggcgcaggcggtt

SEQ ID NO: 5249902 - DNA, 25 bp, Homo sapien
cgcgatggcgcaggcggttccggca

SEQ ID NO: 5249903 - DNA, 25 bp, Homo sapien
caccagggccaggtcgttgtggaag

SEQ ID NO: 5249904 - DNA, 25 bp, Homo sapien
gggaacacgggcctctctcactgct

SEQ ID NO: 5249905 - DNA, 25 bp, Homo sapien
cagggctcttcggcaggtgtcggtg

SEQ ID NO: 5249906 - DNA, 25 bp, Homo sapien
tgagcaggggaacacgggcctctct

SEQ ID NO: 5249907 - DNA, 25 bp, Homo sapien
caggtgtcggtgctgagcaggggaa

SEQ ID NO: 5249908 - DNA, 25 bp, Homo sapien
tggcacgagtcaacgccccccgcca

SEQ ID NO: 5249909 - DNA, 25 bp, Homo sapien
ctggcacgagtcaacgccccccgcc

SEQ ID NO: 5249910 - DNA, 25 bp, Homo sapien
cacgagtcaacgccccccgccaggt

SEQ ID NO: 5249911 - DNA, 25 bp, Homo sapien
aagtcgagtgacagacagacgtgga

SEQ ID NO: 5249912 - DNA, 25 bp, Homo sapien
tggaaggaaaagaggccgtagtggc

SEQ ID NO: 5249913 - DNA, 25 bp, Homo sapien
aggctcagccggccttttctcatca

SEQ ID NO: 5249914 - DNA, 25 bp, Homo sapien
gagaagtcgagtgacagacagacgt

SEQ ID NO: 5249915 - DNA, 25 bp, Homo sapien
gctcagaacaggtcagggggcctcc

SEQ ID NO: 5249916 - DNA, 25 bp, Homo sapien
cagaacaggtcagggggcctcccga

SEQ ID NO: 5249917 - DNA, 25 bp, Homo sapien
gggccaggctcagaacaggtcaggg

SEQ ID NO: 5249918 - DNA, 25 bp, Homo sapien
gggcgggggccaggctcagaacagg

SEQ ID NO: 5249919 - DNA, 25 bp, Homo sapien
cttgaacactgccacgcgggtgtag

SEQ ID NO: 5249920 - DNA, 25 bp, Homo sapien
ctccccgcagccgtccccccaggag

SEQ ID NO: 5249921 - DNA, 25 bp, Homo sapien
cccaggaggtgactccgaacaggac

SEQ ID NO: 5249922 - DNA, 25 bp, Homo sapien
ggaggtgactccgaacaggacctct

SEQ ID NO: 5249923 - DNA, 25 bp, Homo sapien
actggggacggggcattggaaagag

SEQ ID NO: 5249924 - DNA, 25 bp, Homo sapien
cactggggacggggcattggaaaga

SEQ ID NO: 5249925 - DNA, 25 bp, Homo sapien
gcactggggacggggcattggaaag

SEQ ID NO: 5249926 - DNA, 25 bp, Homo sapien
gccaggcgcgcacaggcgccctggg

SEQ ID NO: 5249927 - DNA, 25 bp, Homo sapien
gcgggcatagaaggcgcagagccgg

SEQ ID NO: 5249928 - DNA, 25 bp, Homo sapien
ccccgggcacaggcgggcatagaag

SEQ ID NO: 5249929 - DNA, 25 bp, Homo sapien
cagagccgggcggcgtctgcctgca

SEQ ID NO: 5249930 - DNA, 25 bp, Homo sapien
agaggagactccctgagcgctggag

SEQ ID NO: 5249931 - DNA, 25 bp, Homo sapien
gagactccctgagcgctggagcggg

SEQ ID NO: 5249932 - DNA, 25 bp, Homo sapien
agcgtgtgcgccagcgagcgcagct

SEQ ID NO: 5249933 - DNA, 25 bp, Homo sapien
agtcccggacgaggcccgagcagct

SEQ ID NO: 5249934 - DNA, 25 bp, Homo sapien
cgcttcgggaaccgagtgcctgcag

SEQ ID NO: 5249935 - DNA, 25 bp, Homo sapien
cagccaacttctgtcgcaggggctc

SEQ ID NO: 5249936 - DNA, 25 bp, Homo sapien
gcagccaacttctgtcgcaggggct

SEQ ID NO: 5249937 - DNA, 25 bp, Homo sapien
catgaaagttcatggccaggtgctc

SEQ ID NO: 5249938 - DNA, 25 bp, Homo sapien
ctcatgaaagttcatggccaggtgc

SEQ ID NO: 5249939 - DNA, 25 bp, Homo sapien
caggccgctgaaggccacatgccgg

SEQ ID NO: 5249940 - DNA, 25 bp, Homo sapien
aggctctgaaaagcccggtcagtgt

SEQ ID NO: 5249941 - DNA, 25 bp, Homo sapien
cggtcagtgtcttggagcccagatc

SEQ ID NO: 5249942 - DNA, 25 bp, Homo sapien
aagcccggtcagtgtcttggagccc

SEQ ID NO: 5249943 - DNA, 25 bp, Homo sapien
gttgagtgggtggtgccccttcctc

SEQ ID NO: 5249944 - DNA, 25 bp, Homo sapien
gcccgggcccctgccctacatccat

SEQ ID NO: 5249945 - DNA, 25 bp, Homo sapien
cagcccgggcccctgccctacatcc

SEQ ID NO: 5249946 - DNA, 25 bp, Homo sapien
ctgagggttgagtgggtggtgcccc

SEQ ID NO: 5249947 - DNA, 25 bp, Homo sapien
tttgtcattatgctcccgaacccct

SEQ ID NO: 5249948 - DNA, 25 bp, Homo sapien
cactggggcagcgacagtttgtcat

SEQ ID NO: 5249949 - DNA, 25 bp, Homo sapien
ctgggagcagtaggtcctccccagg

SEQ ID NO: 5249950 - DNA, 25 bp, Homo sapien
cctgggagcagtaggtcctccccag

SEQ ID NO: 5249951 - DNA, 25 bp, Homo sapien
tctctgattgtaaacctgggaagac

SEQ ID NO: 5249952 - DNA, 25 bp, Homo sapien
tgtgattctctgattgtaaacctgg

SEQ ID NO: 5249953 - DNA, 25 bp, Homo sapien
tttattaaagcagctgtgattctct

SEQ ID NO: 5249954 - DNA, 25 bp, Homo sapien
gcagctgtgattctctgattgtaaa

SEQ ID NO: 5249955 - DNA, 25 bp, Homo sapien
acacaatctgacacctcatggcggt

SEQ ID NO: 5249956 - DNA, 25 bp, Homo sapien
caatctgacacctcatggcggtggg

SEQ ID NO: 5249957 - DNA, 25 bp, Homo sapien
ggaagaggcagccggaaacacaatc

SEQ ID NO: 5249958 - DNA, 25 bp, Homo sapien
ctgacacctcatggcggtgggggac

SEQ ID NO: 5249959 - DNA, 25 bp, Homo sapien
tgactgggacgtgcatctgcccctc

SEQ ID NO: 5249960 - DNA, 25 bp, Homo sapien
cccatccctctgactgggacgtgca

SEQ ID NO: 5249961 - DNA, 25 bp, Homo sapien
tgggacgtgcatctgcccctcctgt

SEQ ID NO: 5249962 - DNA, 25 bp, Homo sapien
atccctctgactgggacgtgcatct

SEQ ID NO: 5249963 - DNA, 25 bp, Homo sapien
agccagcagccccagtgtcagcact

SEQ ID NO: 5249964 - DNA, 25 bp, Homo sapien
cacacaccgccagggcagccagcag

SEQ ID NO: 5249965 - DNA, 25 bp, Homo sapien
ccagtgtcagcactggcccctccat

SEQ ID NO: 5249966 - DNA, 25 bp, Homo sapien
agcagccccagtgtcagcactggcc

SEQ ID NO: 5249967 - DNA, 25 bp, Homo sapien
tctttgtgtgccacgggccggagct

SEQ ID NO: 5249968 - DNA, 25 bp, Homo sapien
cttgaaacaggtgccggatcagccg

SEQ ID NO: 5249969 - DNA, 25 bp, Homo sapien
ctcctctttgtgtgccacgggccgg

SEQ ID NO: 5249970 - DNA, 25 bp, Homo sapien
ggagctccttgttgtagcccttctc

SEQ ID NO: 5249971 - DNA, 25 bp, Homo sapien
ggtagtgagggtctcctcaacttct

SEQ ID NO: 5249972 - DNA, 25 bp, Homo sapien
gtgctctatccacacattggtagtg

SEQ ID NO: 5249973 - DNA, 25 bp, Homo sapien
tagtgagggtctcctcaacttcttt

SEQ ID NO: 5249974 - DNA, 25 bp, Homo sapien
tatccacacattggtagtgagggtc

SEQ ID NO: 5249975 - DNA, 25 bp, Homo sapien
ctggaatcccaaaggcatgtcacca

SEQ ID NO: 5249976 - DNA, 25 bp, Homo sapien
tcccaaaggcatgtcaccagtgcac

SEQ ID NO: 5249977 - DNA, 25 bp, Homo sapien
gaatcccaaaggcatgtcaccagtg

SEQ ID NO: 5249978 - DNA, 25 bp, Homo sapien
aaggcatgtcaccagtgcactctgc

SEQ ID NO: 5249979 - DNA, 25 bp, Homo sapien
acttcagccggttgtctgtccagcc

SEQ ID NO: 5249980 - DNA, 25 bp, Homo sapien
ggaggcgcaggacactgatgtttcc

SEQ ID NO: 5249981 - DNA, 25 bp, Homo sapien
ggcgcaggacactgatgtttccaaa

SEQ ID NO: 5249982 - DNA, 25 bp, Homo sapien
cattccacttcagccggttgtctgt

SEQ ID NO: 5249983 - DNA, 25 bp, Homo sapien
tccagcacaatctctgggagccaca

SEQ ID NO: 5249984 - DNA, 25 bp, Homo sapien
ttgttctccagcacaatctctggga

SEQ ID NO: 5249985 - DNA, 25 bp, Homo sapien
tgttctccagcacaatctctgggag

SEQ ID NO: 5249986 - DNA, 25 bp, Homo sapien
tctccagcacaatctctgggagcca

SEQ ID NO: 5249987 - DNA, 25 bp, Homo sapien
ggaggtcagggagggcttggctcaa

SEQ ID NO: 5249988 - DNA, 25 bp, Homo sapien
cttaaggaaaggaggcagggtgaca

SEQ ID NO: 5249989 - DNA, 25 bp, Homo sapien
gaggtcagggagggcttggctcaac

SEQ ID NO: 5249990 - DNA, 25 bp, Homo sapien
ggaaaggaggcagggtgacagaggg

SEQ ID NO: 5249991 - DNA, 25 bp, Homo sapien
tggccactcacgactggcagagttg

SEQ ID NO: 5249992 - DNA, 25 bp, Homo sapien
gaaccatagtgagctctggccactc

SEQ ID NO: 5249993 - DNA, 25 bp, Homo sapien
agggacaagaaccatagtgagctct

SEQ ID NO: 5249994 - DNA, 25 bp, Homo sapien
gccactcacgactggcagagttggg

SEQ ID NO: 5249995 - DNA, 25 bp, Homo sapien
ggtggcagccagtacacgaagccgt

SEQ ID NO: 5249996 - DNA, 25 bp, Homo sapien
gccagtacacgaagccgtagtggta

SEQ ID NO: 5249997 - DNA, 25 bp, Homo sapien
tgcaggagtaggagatctggaagga

SEQ ID NO: 5249998 - DNA, 25 bp, Homo sapien
tagtggtagacaagcacgttgcagg

SEQ ID NO: 5249999 - DNA, 25 bp, Homo sapien
tgatgatccactccacggggtaggt

SEQ ID NO: 5250000 - DNA, 25 bp, Homo sapien
gtaggtgcggttctccttggcatcc

SEQ ID NO: 5250001 - DNA, 25 bp, Homo sapien
ccttcaggatcaatgatgatccact

SEQ ID NO: 5250002 - DNA, 25 bp, Homo sapien
ctctttggccgtatacttgagggaa

SEQ ID NO: 5250003 - DNA, 25 bp, Homo sapien
tggccggccggtggactatctccca

SEQ ID NO: 5250004 - DNA, 25 bp, Homo sapien
accaggttgaccatgaaggagatga

SEQ ID NO: 5250005 - DNA, 25 bp, Homo sapien
tgaggtagaaggtgatgtcctggcg

SEQ ID NO: 5250006 - DNA, 25 bp, Homo sapien
tgtcagccggtaggtagaagaccag

SEQ ID NO: 5250007 - DNA, 25 bp, Homo sapien
ggccatggatgtggcaggcagacgc

SEQ ID NO: 5250008 - DNA, 25 bp, Homo sapien
ggagcaccgagatggccactgatgt

SEQ ID NO: 5250009 - DNA, 25 bp, Homo sapien
aggagcaccgagatggccactgatg

SEQ ID NO: 5250010 - DNA, 25 bp, Homo sapien
caggcagacgcttggagatgagcag

SEQ ID NO: 5250011 - DNA, 25 bp, Homo sapien
ttcggaagtggatgttgagcacgat

SEQ ID NO: 5250012 - DNA, 25 bp, Homo sapien
atcaccacaaccatggtgaccagca

SEQ ID NO: 5250013 - DNA, 25 bp, Homo sapien
tgggtgctgggtgttcggaagtgga

SEQ ID NO: 5250014 - DNA, 25 bp, Homo sapien
tgagcacgatgacacagatcaccac

SEQ ID NO: 5250015 - DNA, 25 bp, Homo sapien
acatgaggtcactgcgggacttgag

SEQ ID NO: 5250016 - DNA, 25 bp, Homo sapien
gcaggaagtactcctcggccttgga

SEQ ID NO: 5250017 - DNA, 25 bp, Homo sapien
tgccgctctgactgcttctcgaaca

SEQ ID NO: 5250018 - DNA, 25 bp, Homo sapien
ccttggagatgtatcccagggagct

SEQ ID NO: 5250019 - DNA, 25 bp, Homo sapien
ggctgaaaaccaagaccagcgggga

SEQ ID NO: 5250020 - DNA, 25 bp, Homo sapien
gctgaaaaccaagaccagcggggac

SEQ ID NO: 5250021 - DNA, 25 bp, Homo sapien
tgggctgaaaaccaagaccagcggg

SEQ ID NO: 5250022 - DNA, 25 bp, Homo sapien
tggcttcagctcattgaagagttcc

SEQ ID NO: 5250023 - DNA, 25 bp, Homo sapien
tgctgggcctgctcagagcttgctg

SEQ ID NO: 5250024 - DNA, 25 bp, Homo sapien
cttcagctcattgaagagttcctgc

SEQ ID NO: 5250025 - DNA, 25 bp, Homo sapien
ctgggcctgctcagagcttgctggg

SEQ ID NO: 5250026 - DNA, 25 bp, Homo sapien
gggccactcggttccagctgtcttt

SEQ ID NO: 5250027 - DNA, 25 bp, Homo sapien
aagcgcttgtcctgcacgttgtagg

SEQ ID NO: 5250028 - DNA, 25 bp, Homo sapien
tcaccacaaacaggcagaggcggtc

SEQ ID NO: 5250029 - DNA, 25 bp, Homo sapien
ttgtaaacgccctgcaggaagatcc

SEQ ID NO: 5250030 - DNA, 25 bp, Homo sapien
tcaggctgaccccaagtctttgtgg

SEQ ID NO: 5250031 - DNA, 25 bp, Homo sapien
caaatctgggaagtgaggtaccatc

SEQ ID NO: 5250032 - DNA, 25 bp, Homo sapien
caagggtgtgaatactgggcatcac

SEQ ID NO: 5250033 - DNA, 25 bp, Homo sapien
catagggctccttaacatgccagct

SEQ ID NO: 5250034 - DNA, 25 bp, Homo sapien
gctctgggtgtcatataacagccta

SEQ ID NO: 5250035 - DNA, 25 bp, Homo sapien
tctgggtgtcatataacagcctaca

SEQ ID NO: 5250036 - DNA, 25 bp, Homo sapien
tgtcatataacagcctacactccca

SEQ ID NO: 5250037 - DNA, 25 bp, Homo sapien
ggtgtcatataacagcctacactcc

SEQ ID NO: 5250038 - DNA, 25 bp, Homo sapien
agcaggaggagcagcggcccctggc

SEQ ID NO: 5250039 - DNA, 25 bp, Homo sapien
ggaggagcagcggcccctggccccc

SEQ ID NO: 5250040 - DNA, 25 bp, Homo sapien
agcagcggcccctggcccccatgca

SEQ ID NO: 5250041 - DNA, 25 bp, Homo sapien
gagcagcggcccctggcccccatgc

SEQ ID NO: 5250042 - DNA, 25 bp, Homo sapien
ctgcaatagacaggcgtgagcctag

SEQ ID NO: 5250043 - DNA, 25 bp, Homo sapien
atagacaggcgtgagcctagcagga

SEQ ID NO: 5250044 - DNA, 25 bp, Homo sapien
ttggaggtggaaagagcggggaggc

SEQ ID NO: 5250045 - DNA, 25 bp, Homo sapien
tggaggtggaaagagcggggaggcc

SEQ ID NO: 5250046 - DNA, 25 bp, Homo sapien
ctgacattgaccacatccgagtctc

SEQ ID NO: 5250047 - DNA, 25 bp, Homo sapien
tgagggttagcttcaggctgacatt

SEQ ID NO: 5250048 - DNA, 25 bp, Homo sapien
ggtctgcgagcaggcgctcctcctg

SEQ ID NO: 5250049 - DNA, 25 bp, Homo sapien
agtctcgttccgcgggccgcaggtt

SEQ ID NO: 5250050 - DNA, 25 bp, Homo sapien
catctctatccagacattggtggtg

SEQ ID NO: 5250051 - DNA, 25 bp, Homo sapien
tctatccagacattggtggtgaggg

SEQ ID NO: 5250052 - DNA, 25 bp, Homo sapien
tggtgagggcttcctctcgctcgtt

SEQ ID NO: 5250053 - DNA, 25 bp, Homo sapien
cagacattggtggtgagggcttcct

SEQ ID NO: 5250054 - DNA, 25 bp, Homo sapien
atatccggccgccacaccatggtgg

SEQ ID NO: 5250055 - DNA, 25 bp, Homo sapien
acaccatggtggacggcaccctcag

SEQ ID NO: 5250056 - DNA, 25 bp, Homo sapien
cgtagtctcgcggatcccagcgcag

SEQ ID NO: 5250057 - DNA, 25 bp, Homo sapien
agcgcaggcgatagtcgcaccactg

SEQ ID NO: 5250058 - DNA, 25 bp, Homo sapien
cagccagtagatacagccgtcaggg

SEQ ID NO: 5250059 - DNA, 25 bp, Homo sapien
tagagggccacctcgaagacaccgt

SEQ ID NO: 5250060 - DNA, 25 bp, Homo sapien
gggacacgagcacattgcagtagag

SEQ ID NO: 5250061 - DNA, 25 bp, Homo sapien
actgagatagagcaggcggaacgga

SEQ ID NO: 5250062 - DNA, 25 bp, Homo sapien
gcagatcaatctcattggtgctgta

SEQ ID NO: 5250063 - DNA, 25 bp, Homo sapien
gtcaatgaaaatccactcgatggtc

SEQ ID NO: 5250064 - DNA, 25 bp, Homo sapien
ctcattggtgctgtaagtctgggac

SEQ ID NO: 5250065 - DNA, 25 bp, Homo sapien
cactcgatggtctggccatcttcct

SEQ ID NO: 5250066 - DNA, 25 bp, Homo sapien
tggctggtcggtgctggatggccca

SEQ ID NO: 5250067 - DNA, 25 bp, Homo sapien
gcatcttggctggtcggtgctggat

SEQ ID NO: 5250068 - DNA, 25 bp, Homo sapien
agcatcttggctggtcggtgctgga

SEQ ID NO: 5250069 - DNA, 25 bp, Homo sapien
ggtcggtgctggatggcccactccc

SEQ ID NO: 5250070 - DNA, 25 bp, Homo sapien
acacagggggcgatgatgttgatga

SEQ ID NO: 5250071 - DNA, 25 bp, Homo sapien
gtggatgaggatggcgacagaggag

SEQ ID NO: 5250072 - DNA, 25 bp, Homo sapien
gatgaggatggcgacagaggagatg

SEQ ID NO: 5250073 - DNA, 25 bp, Homo sapien
gaggatggcgacagaggagatgagc

SEQ ID NO: 5250074 - DNA, 25 bp, Homo sapien
ctggatggctccttcccataggctc

SEQ ID NO: 5250075 - DNA, 25 bp, Homo sapien
gctccttcccataggctccaggtac

SEQ ID NO: 5250076 - DNA, 25 bp, Homo sapien
tggatggctccttcccataggctcc

SEQ ID NO: 5250077 - DNA, 25 bp, Homo sapien
atggctccttcccataggctccagg

SEQ ID NO: 5250078 - DNA, 25 bp, Homo sapien
tgctgatgagtggcaccgcctggga

SEQ ID NO: 5250079 - DNA, 25 bp, Homo sapien
tgggccaggagcacgttgatggcga

SEQ ID NO: 5250080 - DNA, 25 bp, Homo sapien
gatggcgacggtacacttctggccc

SEQ ID NO: 5250081 - DNA, 25 bp, Homo sapien
gagcacgttgatggcgacggtacac

SEQ ID NO: 5250082 - DNA, 25 bp, Homo sapien
gcacaaccacagcattcacgacaat

SEQ ID NO: 5250083 - DNA, 25 bp, Homo sapien
tgtgtgtgtggagaccgcaaggaga

SEQ ID NO: 5250084 - DNA, 25 bp, Homo sapien
tgtgtggagaccgcaaggagacatt

SEQ ID NO: 5250085 - DNA, 25 bp, Homo sapien
agcattcacgacaatgaggatggtc

SEQ ID NO: 5250086 - DNA, 25 bp, Homo sapien
gcgggcgaacgtgcatcctcagcag

SEQ ID NO: 5250087 - DNA, 25 bp, Homo sapien
tagccgggactgggtgtcctgcaca

SEQ ID NO: 5250088 - DNA, 25 bp, Homo sapien
cagttgtgatcgaccatcccgagga

SEQ ID NO: 5250089 - DNA, 25 bp, Homo sapien
ccatcccgaggagccattctgtagc

SEQ ID NO: 5250090 - DNA, 25 bp, Homo sapien
gccgccaccagcccttgccgctgcc

SEQ ID NO: 5250091 - DNA, 25 bp, Homo sapien
ccgccaccagcccttgccgctgcca

SEQ ID NO: 5250092 - DNA, 25 bp, Homo sapien
tgccgccaccagcccttgccgctgc

SEQ ID NO: 5250093 - DNA, 25 bp, Homo sapien
actggctcagccctaactccgggcc

SEQ ID NO: 5250094 - DNA, 25 bp, Homo sapien
gccgggcacaggcaatgaggttgca

SEQ ID NO: 5250095 - DNA, 25 bp, Homo sapien
gctggtgccgggcacaggcaatgag

SEQ ID NO: 5250096 - DNA, 25 bp, Homo sapien
tggctcagccctaactccgggcctt

SEQ ID NO: 5250097 - DNA, 25 bp, Homo sapien
gccaggaagcagacgcggtccagca

SEQ ID NO: 5250098 - DNA, 25 bp, Homo sapien
ccaccaggaaccactcctcattccc

SEQ ID NO: 5250099 - DNA, 25 bp, Homo sapien
cagatgaagagcgagagcatggcca

SEQ ID NO: 5250100 - DNA, 25 bp, Homo sapien
gaagcagacgcggtccagcactcgg

SEQ ID NO: 5250101 - DNA, 25 bp, Homo sapien
agggcaggtaggggcgtggatctcc

SEQ ID NO: 5250102 - DNA, 25 bp, Homo sapien
caggtaggggcgtggatctccaggg

SEQ ID NO: 5250103 - DNA, 25 bp, Homo sapien
ggtaggggcgtggatctccagggaa

SEQ ID NO: 5250104 - DNA, 25 bp, Homo sapien
gcaggtaggggcgtggatctccagg

SEQ ID NO: 5250105 - DNA, 25 bp, Homo sapien
gctttggagagagcatcggctgcta

SEQ ID NO: 5250106 - DNA, 25 bp, Homo sapien
gcttattgtacccagaaggcacggg

SEQ ID NO: 5250107 - DNA, 25 bp, Homo sapien
gataagactcagtgtgacccacgtg

SEQ ID NO: 5250108 - DNA, 25 bp, Homo sapien
gagctagccaatcccacgtgtgtgc

SEQ ID NO: 5250109 - DNA, 25 bp, Homo sapien
tacgaacttgctggtgattgaatcc

SEQ ID NO: 5250110 - DNA, 25 bp, Homo sapien
ggttgagagacttgtgccagataca

SEQ ID NO: 5250111 - DNA, 25 bp, Homo sapien
gaaatggccccactgtcatcagatt

SEQ ID NO: 5250112 - DNA, 25 bp, Homo sapien
tattgtgtacaaggagctaatcctc

SEQ ID NO: 5250113 - DNA, 25 bp, Homo sapien
gtatgcctcgacctacctccttagg

SEQ ID NO: 5250114 - DNA, 25 bp, Homo sapien
aactgaacctgcaatgtctttgagg

SEQ ID NO: 5250115 - DNA, 25 bp, Homo sapien
tccttaggttgctgtatggatccca

SEQ ID NO: 5250116 - DNA, 25 bp, Homo sapien
gcactcttgctggtctacagtatag

SEQ ID NO: 5250117 - DNA, 25 bp, Homo sapien
gagtccagcaattgtatcagcgcca

SEQ ID NO: 5250118 - DNA, 25 bp, Homo sapien
tattacgcttcgcagatagggcatt

SEQ ID NO: 5250119 - DNA, 25 bp, Homo sapien
ttggaagcggctatctcgggacgcc

SEQ ID NO: 5250120 - DNA, 25 bp, Homo sapien
tgcgggacgcactctctggtatctc

SEQ ID NO: 5250121 - DNA, 25 bp, Homo sapien
gcagggaagccggtgccgcagggtt

SEQ ID NO: 5250122 - DNA, 25 bp, Homo sapien
tgccgcagggtttgcgccgccccag

SEQ ID NO: 5250123 - DNA, 25 bp, Homo sapien
tccggccgcagccggatcccagcag

SEQ ID NO: 5250124 - DNA, 25 bp, Homo sapien
gccagtccaggccaggtccggccgc

SEQ ID NO: 5250125 - DNA, 25 bp, Homo sapien
gctcttcgccctcggttcggacggc

SEQ ID NO: 5250126 - DNA, 25 bp, Homo sapien
cagctcttcgccctcggttcggacg

SEQ ID NO: 5250127 - DNA, 25 bp, Homo sapien
agctcttcgccctcggttcggacgg

SEQ ID NO: 5250128 - DNA, 25 bp, Homo sapien
ccagctcttcgccctcggttcggac

SEQ ID NO: 5250129 - DNA, 25 bp, Homo sapien
gttaccgtccccactctgcagatga

SEQ ID NO: 5250130 - DNA, 25 bp, Homo sapien
ctccaaactctacgacaaagggtgt

SEQ ID NO: 5250131 - DNA, 25 bp, Homo sapien
caggcaatccgcatccaccagggcg

SEQ ID NO: 5250132 - DNA, 25 bp, Homo sapien
tgccagactgcggaaacacccaaac

SEQ ID NO: 5250133 - DNA, 25 bp, Homo sapien
ctgcctggagtgttggaaatccagt

SEQ ID NO: 5250134 - DNA, 25 bp, Homo sapien
tattccctgaatttgcacagtactc

SEQ ID NO: 5250135 - DNA, 25 bp, Homo sapien
gtgttggaaatccagtattccctga

SEQ ID NO: 5250136 - DNA, 25 bp, Homo sapien
tggagtgttggaaatccagtattcc

SEQ ID NO: 5250137 - DNA, 25 bp, Homo sapien
tcctttctttttagtggtttgctgc

SEQ ID NO: 5250138 - DNA, 25 bp, Homo sapien
ctttctttttagtggtttgctgctg

SEQ ID NO: 5250139 - DNA, 25 bp, Homo sapien
ctttttagtggtttgctgctgatca

SEQ ID NO: 5250140 - DNA, 25 bp, Homo sapien
tctttttagtggtttgctgctgatc

SEQ ID NO: 5250141 - DNA, 25 bp, Homo sapien
agagtgcttgtccccaagaacctag

SEQ ID NO: 5250142 - DNA, 25 bp, Homo sapien
cagagtgcttgtccccaagaaccta

SEQ ID NO: 5250143 - DNA, 25 bp, Homo sapien
gctctgattcttgtctcgttccgtt

SEQ ID NO: 5250144 - DNA, 25 bp, Homo sapien
tctcttgctactgctctgattcttg

SEQ ID NO: 5250145 - DNA, 25 bp, Homo sapien
ttctcaccatctttctgtgtgctgt

SEQ ID NO: 5250146 - DNA, 25 bp, Homo sapien
cttcattctgatcatggtccccact

SEQ ID NO: 5250147 - DNA, 25 bp, Homo sapien
cacaatactgctgagaggatcaaat

SEQ ID NO: 5250148 - DNA, 25 bp, Homo sapien
gcataaaatgctagtaacccttgga

SEQ ID NO: 5250149 - DNA, 25 bp, Homo sapien
tcagtggatatacaatgctgagcac

SEQ ID NO: 5250150 - DNA, 25 bp, Homo sapien
cagagtacgtgcacaacagatgtca

SEQ ID NO: 5250151 - DNA, 25 bp, Homo sapien
tgagattcatcactgtcaagttact

SEQ ID NO: 5250152 - DNA, 25 bp, Homo sapien
ttcatcactgtcaagttacttaacc

SEQ ID NO: 5250153 - DNA, 25 bp, Homo sapien
tctatgagattcatcactgtcaagt

SEQ ID NO: 5250154 - DNA, 25 bp, Homo sapien
gattcatcactgtcaagttacttaa

SEQ ID NO: 5250155 - DNA, 25 bp, Homo sapien
tctgtgagctcgtgggacggccggg

SEQ ID NO: 5250156 - DNA, 25 bp, Homo sapien
caaaaagtgtagttgtactgcaggg

SEQ ID NO: 5250157 - DNA, 25 bp, Homo sapien
agaggcaaaggtgccaatctgtttg

SEQ ID NO: 5250158 - DNA, 25 bp, Homo sapien
gatattctgttcatagctctgtgag

SEQ ID NO: 5250159 - DNA, 25 bp, Homo sapien
taatgctcccgttttctccaagcca

SEQ ID NO: 5250160 - DNA, 25 bp, Homo sapien
gccccaccataacttgagactttag

SEQ ID NO: 5250161 - DNA, 25 bp, Homo sapien
tgcatgccaacatggccagcctttt

SEQ ID NO: 5250162 - DNA, 25 bp, Homo sapien
gactttagatcagacacttaaccca

SEQ ID NO: 5250163 - DNA, 25 bp, Homo sapien
ttttagaagcctactagagccttga

SEQ ID NO: 5250164 - DNA, 25 bp, Homo sapien
tctcttccaaggcagtattccccaa

SEQ ID NO: 5250165 - DNA, 25 bp, Homo sapien
tatgaaccagtgcacaaggtagttt

SEQ ID NO: 5250166 - DNA, 25 bp, Homo sapien
ggcacatcttatttccccaaggaca

SEQ ID NO: 5250167 - DNA, 25 bp, Homo sapien
cagtgagcatggatgaagccttaac

SEQ ID NO: 5250168 - DNA, 25 bp, Homo sapien
gagctctgattaccaagtctagtgc

SEQ ID NO: 5250169 - DNA, 25 bp, Homo sapien
tgagttgctctaaccaagagggtca

SEQ ID NO: 5250170 - DNA, 25 bp, Homo sapien
cagaatatgaggtgccgaaaggacc

SEQ ID NO: 5250171 - DNA, 25 bp, Homo sapien
cagaactaacgccatctatagggct

SEQ ID NO: 5250172 - DNA, 25 bp, Homo sapien
tagaaccaagtacacccactagtgg

SEQ ID NO: 5250173 - DNA, 25 bp, Homo sapien
tctctagcacaagcacacgtgatgc

SEQ ID NO: 5250174 - DNA, 25 bp, Homo sapien
caaggcagtgctttatactcagcaa

SEQ ID NO: 5250175 - DNA, 25 bp, Homo sapien
gaaaccatgttaatacgcactctcc

SEQ ID NO: 5250176 - DNA, 25 bp, Homo sapien
catggaagacactatactacaggct

SEQ ID NO: 5250177 - DNA, 25 bp, Homo sapien
gccaggagctttagttggtgaaacc

SEQ ID NO: 5250178 - DNA, 25 bp, Homo sapien
cactcaagctgcagggtagtcatca

SEQ ID NO: 5250179 - DNA, 25 bp, Homo sapien
actgtggcctgtcaggtccccagga

SEQ ID NO: 5250180 - DNA, 25 bp, Homo sapien
ttctttgaagagatggaagtcactg

SEQ ID NO: 5250181 - DNA, 25 bp, Homo sapien
tgtcaggtccccaggacgtaccatg

SEQ ID NO: 5250182 - DNA, 25 bp, Homo sapien
ccccaggacgtaccatgtggctata

SEQ ID NO: 5250183 - DNA, 25 bp, Homo sapien
gcagtcagaagccattagtccttac

SEQ ID NO: 5250184 - DNA, 25 bp, Homo sapien
agcagtcagaagccattagtcctta

SEQ ID NO: 5250185 - DNA, 25 bp, Homo sapien
aagcagtcagaagccattagtcctt

SEQ ID NO: 5250186 - DNA, 25 bp, Homo sapien
cgcagccgaataatccacttgccac

SEQ ID NO: 5250187 - DNA, 25 bp, Homo sapien
ttccgcagccgaataatccacttgc

SEQ ID NO: 5250188 - DNA, 25 bp, Homo sapien
agccgaataatccacttgccaccat

SEQ ID NO: 5250189 - DNA, 25 bp, Homo sapien
agattctcccagcaacgggaggcca

SEQ ID NO: 5250190 - DNA, 25 bp, Homo sapien
tcgccgaagtgtgtcccggattcgg

SEQ ID NO: 5250191 - DNA, 25 bp, Homo sapien
cccggattcgggctgtggttgcttg

SEQ ID NO: 5250192 - DNA, 25 bp, Homo sapien
cactcgccgaagtgtgtcccggatt

SEQ ID NO: 5250193 - DNA, 25 bp, Homo sapien
taagcactcgccgaagtgtgtcccg

SEQ ID NO: 5250194 - DNA, 25 bp, Homo sapien
taagcaagcccaggtagtacaactg

SEQ ID NO: 5250195 - DNA, 25 bp, Homo sapien
ggagcctcgctgacaaagaactgca

SEQ ID NO: 5250196 - DNA, 25 bp, Homo sapien
gaactgcagcaagtagccagaagcc

SEQ ID NO: 5250197 - DNA, 25 bp, Homo sapien
tcctgtccggccatattcctctggg

SEQ ID NO: 5250198 - DNA, 25 bp, Homo sapien
tctgctgaacataattgctgggctc

SEQ ID NO: 5250199 - DNA, 25 bp, Homo sapien
tacttggccccgtaaaagcattctc

SEQ ID NO: 5250200 - DNA, 25 bp, Homo sapien
tctagcagactaaggcaaaaagccc

SEQ ID NO: 5250201 - DNA, 25 bp, Homo sapien
gataagtagtcagtatcccaggaca

SEQ ID NO: 5250202 - DNA, 25 bp, Homo sapien
tcatggcacattcaaccgcggcttc

SEQ ID NO: 5250203 - DNA, 25 bp, Homo sapien
caaccgcggcttccagaggttttga

SEQ ID NO: 5250204 - DNA, 25 bp, Homo sapien
attcaaccgcggcttccagaggttt

SEQ ID NO: 5250205 - DNA, 25 bp, Homo sapien
tggcacattcaaccgcggcttccag

SEQ ID NO: 5250206 - DNA, 25 bp, Homo sapien
caatgatggtgccatccagagaggg

SEQ ID NO: 5250207 - DNA, 25 bp, Homo sapien
cttcaatgatggtgccatccagaga

SEQ ID NO: 5250208 - DNA, 25 bp, Homo sapien
ttcaatgatggtgccatccagagag

SEQ ID NO: 5250209 - DNA, 25 bp, Homo sapien
atgatggtgccatccagagagggag

SEQ ID NO: 5250210 - DNA, 25 bp, Homo sapien
cagaacaagagactccgatgacgcc

SEQ ID NO: 5250211 - DNA, 25 bp, Homo sapien
agaacaagagactccgatgacgcca

SEQ ID NO: 5250212 - DNA, 25 bp, Homo sapien
gaacaagagactccgatgacgccag

SEQ ID NO: 5250213 - DNA, 25 bp, Homo sapien
caccatttattaagtgatctcagct

SEQ ID NO: 5250214 - DNA, 25 bp, Homo sapien
attaagtgatctcagctgttgttgt

SEQ ID NO: 5250215 - DNA, 25 bp, Homo sapien
agtgatctcagctgttgttgtagct

SEQ ID NO: 5250216 - DNA, 25 bp, Homo sapien
catttattaagtgatctcagctgtt

SEQ ID NO: 5250217 - DNA, 25 bp, Homo sapien
gaaatcactctgttctggtcatcgg

SEQ ID NO: 5250218 - DNA, 25 bp, Homo sapien
ggtgacagtcagtccgaaaggccac

SEQ ID NO: 5250219 - DNA, 25 bp, Homo sapien
gcagggatttacctccaagcaagag

SEQ ID NO: 5250220 - DNA, 25 bp, Homo sapien
ttggcaccagcgagaaaaccccatt

SEQ ID NO: 5250221 - DNA, 25 bp, Homo sapien
tcctgatgtgcagtaacaccgggcc

SEQ ID NO: 5250222 - DNA, 25 bp, Homo sapien
tacagagcaaactcacacgggatga

SEQ ID NO: 5250223 - DNA, 25 bp, Homo sapien
gggctgtaaccctgagatcttgcaa

SEQ ID NO: 5250224 - DNA, 25 bp, Homo sapien
tacggtcagatatcctacagagcaa

SEQ ID NO: 5250225 - DNA, 25 bp, Homo sapien
tgtttattatgtttttggtggtagc

SEQ ID NO: 5250226 - DNA, 25 bp, Homo sapien
tttattatgtttttggtggtagctc

SEQ ID NO: 5250227 - DNA, 25 bp, Homo sapien
caagttgtccacgtcttaggggtga

SEQ ID NO: 5250228 - DNA, 25 bp, Homo sapien
gtgaatgaactgtcagcaataaaca

SEQ ID NO: 5250229 - DNA, 25 bp, Homo sapien
gcggcaggcagtgccttgtagcaca

SEQ ID NO: 5250230 - DNA, 25 bp, Homo sapien
acccgcctgctctgtgcggcaggca

SEQ ID NO: 5250231 - DNA, 25 bp, Homo sapien
tcactgagggtaaaggccagtttcc

SEQ ID NO: 5250232 - DNA, 25 bp, Homo sapien
tacgtggcctttcgcttacagagaa

SEQ ID NO: 5250233 - DNA, 25 bp, Homo sapien
aatgtgacagaagtggtacgtggcc

SEQ ID NO: 5250234 - DNA, 25 bp, Homo sapien
tcacggcagttcaaaatttccaggg

SEQ ID NO: 5250235 - DNA, 25 bp, Homo sapien
tccaaggaggaaggctacctatgtc

SEQ ID NO: 5250236 - DNA, 25 bp, Homo sapien
gaactacggcagagattaactcctg

SEQ ID NO: 5250237 - DNA, 25 bp, Homo sapien
gaaatatccgagagccccattcaga

SEQ ID NO: 5250238 - DNA, 25 bp, Homo sapien
tcttgggagttaactgccactgtgc

SEQ ID NO: 5250239 - DNA, 25 bp, Homo sapien
tagcggaatccgtcctccaggaatg

SEQ ID NO: 5250240 - DNA, 25 bp, Homo sapien
gggacgtcccttcagtgagcaatgg

SEQ ID NO: 5250241 - DNA, 25 bp, Homo sapien
aacagctctggcatgtacacgtggc

SEQ ID NO: 5250242 - DNA, 25 bp, Homo sapien
gtgcaaaaggagagcgcacggctca

SEQ ID NO: 5250243 - DNA, 25 bp, Homo sapien
caacagtcaggtagatgcccaaagg

SEQ ID NO: 5250244 - DNA, 25 bp, Homo sapien
caactgtgcaaagtggagaccgact

SEQ ID NO: 5250245 - DNA, 25 bp, Homo sapien
cattctggtactgtgcaaagcggag

SEQ ID NO: 5250246 - DNA, 25 bp, Homo sapien
tatctgggagaacactgggcgtaag

SEQ ID NO: 5250247 - DNA, 25 bp, Homo sapien
agattgggacttatacactgtaggg

SEQ ID NO: 5250248 - DNA, 25 bp, Homo sapien
cattgagattgacattgcctggact

SEQ ID NO: 5250249 - DNA, 25 bp, Homo sapien
tatcccaagttaaggagcgttacca

SEQ ID NO: 5250250 - DNA, 25 bp, Homo sapien
tagggtagaatgagtaacagtaccc

SEQ ID NO: 5250251 - DNA, 25 bp, Homo sapien
cagcgacagaactctgcaaacatct

SEQ ID NO: 5250252 - DNA, 25 bp, Homo sapien
ctgcttttgtgataccagcgacaga

SEQ ID NO: 5250253 - DNA, 25 bp, Homo sapien
taggaagctcgtctctcagttccac

SEQ ID NO: 5250254 - DNA, 25 bp, Homo sapien
tcagttccacacccgctctttttag

SEQ ID NO: 5250255 - DNA, 25 bp, Homo sapien
ccgtgcccggctgatgtacatattc

SEQ ID NO: 5250256 - DNA, 25 bp, Homo sapien
catattcttgcttgttatgtgcaca

SEQ ID NO: 5250257 - DNA, 25 bp, Homo sapien
gtttaggtaccattctcttgttctg

SEQ ID NO: 5250258 - DNA, 25 bp, Homo sapien
ctttagtgtttaggtaccattctct

SEQ ID NO: 5250259 - DNA, 25 bp, Homo sapien
tactgactcgggtgtattaccaagg

SEQ ID NO: 5250260 - DNA, 25 bp, Homo sapien
caatgggcttgtgaccaggtaatca

SEQ ID NO: 5250261 - DNA, 25 bp, Homo sapien
aacattagagtgaaacggcctcgtg

SEQ ID NO: 5250262 - DNA, 25 bp, Homo sapien
ggaacacaagacaacagctcactga

SEQ ID NO: 5250263 - DNA, 25 bp, Homo sapien
ttctatatgtgaatttgcgtttcct

SEQ ID NO: 5250264 - DNA, 25 bp, Homo sapien
ccattgccgtttggcaaaccaggta

SEQ ID NO: 5250265 - DNA, 25 bp, Homo sapien
tccattgccgtttggcaaaccaggt

SEQ ID NO: 5250266 - DNA, 25 bp, Homo sapien
tgcatattctatatgtgaatttgcg

SEQ ID NO: 5250267 - DNA, 25 bp, Homo sapien
ccacgggcaatcacatgggatgaga

SEQ ID NO: 5250268 - DNA, 25 bp, Homo sapien
tgcaatcaagggaaagcagacctgg

SEQ ID NO: 5250269 - DNA, 25 bp, Homo sapien
gaatgtgaccatccaggtagccggg

SEQ ID NO: 5250270 - DNA, 25 bp, Homo sapien
aggacaggatttggctgaggctttc

SEQ ID NO: 5250271 - DNA, 25 bp, Homo sapien
atctccagcatgaagcccactggcc

SEQ ID NO: 5250272 - DNA, 25 bp, Homo sapien
ggcaacatctccagcatgaagccca

SEQ ID NO: 5250273 - DNA, 25 bp, Homo sapien
ccataggcaacatctccagcatgaa

SEQ ID NO: 5250274 - DNA, 25 bp, Homo sapien
aacatctccagcatgaagcccactg

SEQ ID NO: 5250275 - DNA, 25 bp, Homo sapien
tctctctgtccattcagggtcctga

SEQ ID NO: 5250276 - DNA, 25 bp, Homo sapien
cacaggggacaaggccttgatgccc

SEQ ID NO: 5250277 - DNA, 25 bp, Homo sapien
ggctcacaggggacaaggccttgat

SEQ ID NO: 5250278 - DNA, 25 bp, Homo sapien
ggacaaggccttgatgcccctctct

SEQ ID NO: 5250279 - DNA, 25 bp, Homo sapien
gaagcatcctgatgggggtcggggg

SEQ ID NO: 5250280 - DNA, 25 bp, Homo sapien
tctggaagcatcctgatgggggtcg

SEQ ID NO: 5250281 - DNA, 25 bp, Homo sapien
ggaagcatcctgatgggggtcgggg

SEQ ID NO: 5250282 - DNA, 25 bp, Homo sapien
ctgactcaggacatgcggaggggta

SEQ ID NO: 5250283 - DNA, 25 bp, Homo sapien
tgcaggctctatgctgactcaggac

SEQ ID NO: 5250284 - DNA, 25 bp, Homo sapien
caggacatgcggaggggtagatgga

SEQ ID NO: 5250285 - DNA, 25 bp, Homo sapien
gactcaggacatgcggaggggtaga

SEQ ID NO: 5250286 - DNA, 25 bp, Homo sapien
ttcccaggcatgacttctcgtctgc

SEQ ID NO: 5250287 - DNA, 25 bp, Homo sapien
accatgctgagcagcccgccctttc

SEQ ID NO: 5250288 - DNA, 25 bp, Homo sapien
caggcatgacttctcgtctgcacca

SEQ ID NO: 5250289 - DNA, 25 bp, Homo sapien
tctcgtctgcaccatgctgagcagc

SEQ ID NO: 5250290 - DNA, 25 bp, Homo sapien
aaatgagagtgagacgggtgttctc

SEQ ID NO: 5250291 - DNA, 25 bp, Homo sapien
gagagcggtggcaaaagagtggtgt

SEQ ID NO: 5250292 - DNA, 25 bp, Homo sapien
tgctgccccagagcgttcatttcag

SEQ ID NO: 5250293 - DNA, 25 bp, Homo sapien
ccacggacgatgcagaacccggcag

SEQ ID NO: 5250294 - DNA, 25 bp, Homo sapien
taacctcagcctcctgggttcaagc

SEQ ID NO: 5250295 - DNA, 25 bp, Homo sapien
tgggaccaccggcatgagccaccac

SEQ ID NO: 5250296 - DNA, 25 bp, Homo sapien
gtagctgggaccaccggcatgagcc

SEQ ID NO: 5250297 - DNA, 25 bp, Homo sapien
cgatcccggcttactgtaacctcag

SEQ ID NO: 5250298 - DNA, 25 bp, Homo sapien
ggcttcctgttggcagaatagggct

SEQ ID NO: 5250299 - DNA, 25 bp, Homo sapien
tctctcttgggcgtgggcaaaggct

SEQ ID NO: 5250300 - DNA, 25 bp, Homo sapien
cttgccttaggggtatcagatttcc

SEQ ID NO: 5250301 - DNA, 25 bp, Homo sapien
cagatttccttcgttcttggaatct

SEQ ID NO: 5250302 - DNA, 25 bp, Homo sapien
aggagcagcaaaaaacctatgagtc

SEQ ID NO: 5250303 - DNA, 25 bp, Homo sapien
cagcaaaaaacctatgagtcctaaa

SEQ ID NO: 5250304 - DNA, 25 bp, Homo sapien
gagcagcaaaaaacctatgagtcct

SEQ ID NO: 5250305 - DNA, 25 bp, Homo sapien
gcagcaaaaaacctatgagtcctaa

SEQ ID NO: 5250306 - DNA, 25 bp, Homo sapien
aaagtactatcaattgtttaccttg

SEQ ID NO: 5250307 - DNA, 25 bp, Homo sapien
tctctgaatacccaactgtgaatag

SEQ ID NO: 5250308 - DNA, 25 bp, Homo sapien
tctgaatacccaactgtgaatagcc

SEQ ID NO: 5250309 - DNA, 25 bp, Homo sapien
ctctgaatacccaactgtgaatagc

SEQ ID NO: 5250310 - DNA, 25 bp, Homo sapien
agcctcaaactcctggggttaagtg

SEQ ID NO: 5250311 - DNA, 25 bp, Homo sapien
tcattctgtcacaaaggctagagta

SEQ ID NO: 5250312 - DNA, 25 bp, Homo sapien
caatggcacaatcatagctcactgc

SEQ ID NO: 5250313 - DNA, 25 bp, Homo sapien
taagtgatcctcctacctcagcctc

SEQ ID NO: 5250314 - DNA, 25 bp, Homo sapien
ccctgcggaattgagtccatttctg

SEQ ID NO: 5250315 - DNA, 25 bp, Homo sapien
ggagatttgagtctcaaatccctgc

SEQ ID NO: 5250316 - DNA, 25 bp, Homo sapien
agatttctctttcagccccgatagg

SEQ ID NO: 5250317 - DNA, 25 bp, Homo sapien
cgataggtcagtacgggcctctgag

SEQ ID NO: 5250318 - DNA, 25 bp, Homo sapien
tgtccagtcgggcacctgacaaaga

SEQ ID NO: 5250319 - DNA, 25 bp, Homo sapien
cgttacggccacagcccaaagcctg

SEQ ID NO: 5250320 - DNA, 25 bp, Homo sapien
tcctcttttccgatgtccagtcggg

SEQ ID NO: 5250321 - DNA, 25 bp, Homo sapien
ttccgatgtccagtcgggcacctga

SEQ ID NO: 5250322 - DNA, 25 bp, Homo sapien
caggcagggaccctcggatcaactc

SEQ ID NO: 5250323 - DNA, 25 bp, Homo sapien
gatcaactccgaccttgctgcccct

SEQ ID NO: 5250324 - DNA, 25 bp, Homo sapien
ggaaaaagcgtctcgaccgttcaga

SEQ ID NO: 5250325 - DNA, 25 bp, Homo sapien
cagaagtaacccgactggaagcgct

SEQ ID NO: 5250326 - DNA, 25 bp, Homo sapien
cggctttaaggaggcgccagggctc

SEQ ID NO: 5250327 - DNA, 25 bp, Homo sapien
gccggtgtctgggtgtctgcgcgtc

SEQ ID NO: 5250328 - DNA, 25 bp, Homo sapien
tgggagggtctgaggacggactggc

SEQ ID NO: 5250329 - DNA, 25 bp, Homo sapien
tcctcgcaggctcgaggctctacaa

SEQ ID NO: 5250330 - DNA, 25 bp, Homo sapien
gctgaactccgggaactccgtgtag

SEQ ID NO: 5250331 - DNA, 25 bp, Homo sapien
taggggttgaagaccctgcagcgcc

SEQ ID NO: 5250332 - DNA, 25 bp, Homo sapien
gcgcagcgccctcgttgatgtccag

SEQ ID NO: 5250333 - DNA, 25 bp, Homo sapien
agcttgcacgccagctcctcactgg

SEQ ID NO: 5250334 - DNA, 25 bp, Homo sapien
acatccatgacatcaccgtttcaga

SEQ ID NO: 5250335 - DNA, 25 bp, Homo sapien
ttggtaacgcgggactctggcactg

SEQ ID NO: 5250336 - DNA, 25 bp, Homo sapien
tgggtttcactggtgtcttggtaac

SEQ ID NO: 5250337 - DNA, 25 bp, Homo sapien
tggtgtcttggtaacgcgggactct

SEQ ID NO: 5250338 - DNA, 25 bp, Homo sapien
gctttgaaatcaggcactttttaat

SEQ ID NO: 5250339 - DNA, 25 bp, Homo sapien
tcactatgctgcctacccaactggg

SEQ ID NO: 5250340 - DNA, 25 bp, Homo sapien
tgtgagcgccagctgcgaggcttcc

SEQ ID NO: 5250341 - DNA, 25 bp, Homo sapien
aggcttccaccgtgtcccctctgga

SEQ ID NO: 5250342 - DNA, 25 bp, Homo sapien
ggaactcaggcctcactatgctgcc

SEQ ID NO: 5250343 - DNA, 25 bp, Homo sapien
agtggctctgctggagggaaccgca

SEQ ID NO: 5250344 - DNA, 25 bp, Homo sapien
gtgggcacccgatgggcacagaccc

SEQ ID NO: 5250345 - DNA, 25 bp, Homo sapien
tgatgctgagctcagtgtgggcacc

SEQ ID NO: 5250346 - DNA, 25 bp, Homo sapien
tgggcacagaccccagaaagcccag

SEQ ID NO: 5250347 - DNA, 25 bp, Homo sapien
agaccccagaaagcccagaactctt

SEQ ID NO: 5250348 - DNA, 25 bp, Homo sapien
ttcacttatcaggtccctagagtag

SEQ ID NO: 5250349 - DNA, 25 bp, Homo sapien
tcaaaatcatcgagacagaagtaga

SEQ ID NO: 5250350 - DNA, 25 bp, Homo sapien
gccagtcgcaaaaagggcacctcat

SEQ ID NO: 5250351 - DNA, 25 bp, Homo sapien
catgctcacaggctacaacatgggt

SEQ ID NO: 5250352 - DNA, 25 bp, Homo sapien
gagaccccttgttgctcaggtatga

SEQ ID NO: 5250353 - DNA, 25 bp, Homo sapien
gaaacaacgcgggtgtctgcggaca

SEQ ID NO: 5250354 - DNA, 25 bp, Homo sapien
ttgtctccagctctgaacggccgtg

SEQ ID NO: 5250355 - DNA, 25 bp, Homo sapien
tgtgtgcggaatcatgactctggct

SEQ ID NO: 5250356 - DNA, 25 bp, Homo sapien
ttatctcctcaactaaaccataatt

SEQ ID NO: 5250357 - DNA, 25 bp, Homo sapien
tatctcctcaactaaaccataattt

SEQ ID NO: 5250358 - DNA, 25 bp, Homo sapien
tgaccgggatgaaaggacactcgtt

SEQ ID NO: 5250359 - DNA, 25 bp, Homo sapien
gaaaaatgactcaaatacctcccgc

SEQ ID NO: 5250360 - DNA, 25 bp, Homo sapien
tcccgctctgcgaggccaatgtggg

SEQ ID NO: 5250361 - DNA, 25 bp, Homo sapien
tcctcagagcgcttcagggctttgt

SEQ ID NO: 5250362 - DNA, 25 bp, Homo sapien
gaagccatcccgcccagcgtcatac

SEQ ID NO: 5250363 - DNA, 25 bp, Homo sapien
tcgatgaagccatcccgcccagcgt

SEQ ID NO: 5250364 - DNA, 25 bp, Homo sapien
cgatgaagccatcccgcccagcgtc

SEQ ID NO: 5250365 - DNA, 25 bp, Homo sapien
atgaagccatcccgcccagcgtcat

SEQ ID NO: 5250366 - DNA, 25 bp, Homo sapien
aagctgagcttgccatcgaagtcct

SEQ ID NO: 5250367 - DNA, 25 bp, Homo sapien
agctgagcttgccatcgaagtcctc

SEQ ID NO: 5250368 - DNA, 25 bp, Homo sapien
tgcaggttagatacgcaaacagcgc

SEQ ID NO: 5250369 - DNA, 25 bp, Homo sapien
cagtgggctgtacacctgaaggtcc

SEQ ID NO: 5250370 - DNA, 25 bp, Homo sapien
caaacagcgctctggagaggccaaa

SEQ ID NO: 5250371 - DNA, 25 bp, Homo sapien
ggttatactactacccatgctgctt

SEQ ID NO: 5250372 - DNA, 25 bp, Homo sapien
tcttcatagaacctggtatgtttca

SEQ ID NO: 5250373 - DNA, 25 bp, Homo sapien
aagatcttcatagaacctggtatgt

SEQ ID NO: 5250374 - DNA, 25 bp, Homo sapien
gatcttcatagaacctggtatgttt

SEQ ID NO: 5250375 - DNA, 25 bp, Homo sapien
catagaacctggtatgtttcaaata

SEQ ID NO: 5250376 - DNA, 25 bp, Homo sapien
agaaagctttgccagcgccatcagc

SEQ ID NO: 5250377 - DNA, 25 bp, Homo sapien
ttggcacctttgacaccctccaggg

SEQ ID NO: 5250378 - DNA, 25 bp, Homo sapien
cctgccgcggccttgtggaaaatga

SEQ ID NO: 5250379 - DNA, 25 bp, Homo sapien
tccagggccacatcgatctcagaaa

SEQ ID NO: 5250380 - DNA, 25 bp, Homo sapien
gataacctatgatcgcaacattttc

SEQ ID NO: 5250381 - DNA, 25 bp, Homo sapien
tattcttttatcgtgctaaagaagc

SEQ ID NO: 5250382 - DNA, 25 bp, Homo sapien
ttatcgtgctaaagaagcattgttt

SEQ ID NO: 5250383 - DNA, 25 bp, Homo sapien
tcttacagttttaacatctatctcc

SEQ ID NO: 5250384 - DNA, 25 bp, Homo sapien
ggcgcacttcacacatggacatgaa

SEQ ID NO: 5250385 - DNA, 25 bp, Homo sapien
gctgacatcttaacaggattggagg

SEQ ID NO: 5250386 - DNA, 25 bp, Homo sapien
cctagtcatcacattatgaaccgca

SEQ ID NO: 5250387 - DNA, 25 bp, Homo sapien
ggattggaggaaggcgcacttcaca

SEQ ID NO: 5250388 - DNA, 25 bp, Homo sapien
gcattttatgtcatgtttaaggagg

SEQ ID NO: 5250389 - DNA, 25 bp, Homo sapien
gatcaaccatttccgttctgccatt

SEQ ID NO: 5250390 - DNA, 25 bp, Homo sapien
taaggcatttgggacgatatacata

SEQ ID NO: 5250391 - DNA, 25 bp, Homo sapien
aatcaaattgatcaaccatttccgt

SEQ ID NO: 5250392 - DNA, 25 bp, Homo sapien
ctgagctcagccccaatttgcattt

SEQ ID NO: 5250393 - DNA, 25 bp, Homo sapien
tgagctcagccccaatttgcattta

SEQ ID NO: 5250394 - DNA, 25 bp, Homo sapien
tccatcccccaggttgaggttgaag

SEQ ID NO: 5250395 - DNA, 25 bp, Homo sapien
tagaccaaacgagtaagggagggca

SEQ ID NO: 5250396 - DNA, 25 bp, Homo sapien
tagagacaagggaatgtgggcccac

SEQ ID NO: 5250397 - DNA, 25 bp, Homo sapien
tctgttggcgcagacaccatctcta

SEQ ID NO: 5250398 - DNA, 25 bp, Homo sapien
gcaaaccaaaatgaatcccctgatg

SEQ ID NO: 5250399 - DNA, 25 bp, Homo sapien
tcccgcttccgctcatcttgctcag

SEQ ID NO: 5250400 - DNA, 25 bp, Homo sapien
ttcaaacttactggccgatgacaag

SEQ ID NO: 5250401 - DNA, 25 bp, Homo sapien
tactggccgatgacaaggcttggac

SEQ ID NO: 5250402 - DNA, 25 bp, Homo sapien
tctgcttcaaacttactggccgatg

SEQ ID NO: 5250403 - DNA, 25 bp, Homo sapien
tacaagttctggctataagaagggc

SEQ ID NO: 5250404 - DNA, 25 bp, Homo sapien
tgtcacttgggaacgtcagcggtct

SEQ ID NO: 5250405 - DNA, 25 bp, Homo sapien
gaacatctacagctggataccctga

SEQ ID NO: 5250406 - DNA, 25 bp, Homo sapien
tactatggtggcatgctgttcctcc

SEQ ID NO: 5250407 - DNA, 25 bp, Homo sapien
atttgtacaatgtaaaaagaaatag

SEQ ID NO: 5250408 - DNA, 25 bp, Homo sapien
tttgtacaatgtaaaaagaaatagc

SEQ ID NO: 5250409 - DNA, 25 bp, Homo sapien
tatttgtacaatgtaaaaagaaata

SEQ ID NO: 5250410 - DNA, 25 bp, Homo sapien
agcctctgcatcacttgcgggctgg

SEQ ID NO: 5250411 - DNA, 25 bp, Homo sapien
cacttgcgggctggttttccaaatt

SEQ ID NO: 5250412 - DNA, 25 bp, Homo sapien
ttagtccggcatttttcttcgcagt

SEQ ID NO: 5250413 - DNA, 25 bp, Homo sapien
tgtcctgtacgcccagagctctttt

SEQ ID NO: 5250414 - DNA, 25 bp, Homo sapien
gagtctcagaaccccagtcagtcct

SEQ ID NO: 5250415 - DNA, 25 bp, Homo sapien
gggagtctcagaaccccagtcagtc

SEQ ID NO: 5250416 - DNA, 25 bp, Homo sapien
gtctcagaaccccagtcagtcctca

SEQ ID NO: 5250417 - DNA, 25 bp, Homo sapien
ggagtctcagaaccccagtcagtcc

SEQ ID NO: 5250418 - DNA, 25 bp, Homo sapien
cctgacggcccaagccggccggagc

SEQ ID NO: 5250419 - DNA, 25 bp, Homo sapien
ctgtcccgtcgcctgacggcccaag

SEQ ID NO: 5250420 - DNA, 25 bp, Homo sapien
cccgtcgcctgacggcccaagccgg

SEQ ID NO: 5250421 - DNA, 25 bp, Homo sapien
cgcctgacggcccaagccggccgga

SEQ ID NO: 5250422 - DNA, 25 bp, Homo sapien
atggtggctgcacctcgcctcaggc

SEQ ID NO: 5250423 - DNA, 25 bp, Homo sapien
agacccagtactctcgccacggaag

SEQ ID NO: 5250424 - DNA, 25 bp, Homo sapien
gaaggagtctcctccgtccagatgc

SEQ ID NO: 5250425 - DNA, 25 bp, Homo sapien
agcctcggtcccaaggttccgatca

SEQ ID NO: 5250426 - DNA, 25 bp, Homo sapien
agactacgtgtgtttaagtgctttg

SEQ ID NO: 5250427 - DNA, 25 bp, Homo sapien
tacagagagactacgtgtgtttaag

SEQ ID NO: 5250428 - DNA, 25 bp, Homo sapien
tcttacagagagactacgtgtgttt

SEQ ID NO: 5250429 - DNA, 25 bp, Homo sapien
gagagactacgtgtgtttaagtgct

SEQ ID NO: 5250430 - DNA, 25 bp, Homo sapien
ctctaagagacctgggttaacacca

SEQ ID NO: 5250431 - DNA, 25 bp, Homo sapien
tgtagattcaacctaatgagactgg

SEQ ID NO: 5250432 - DNA, 25 bp, Homo sapien
cctaatgagactggtcccactataa

SEQ ID NO: 5250433 - DNA, 25 bp, Homo sapien
gggttaacaccaacataggctgtag

SEQ ID NO: 5250434 - DNA, 25 bp, Homo sapien
tctcaaattgcattcttggtggggc

SEQ ID NO: 5250435 - DNA, 25 bp, Homo sapien
tcagtgggtaaagttggatgacctt

SEQ ID NO: 5250436 - DNA, 25 bp, Homo sapien
cagaagtggatgtgactttctcaaa

SEQ ID NO: 5250437 - DNA, 25 bp, Homo sapien
ctttggacattataacatggctact

SEQ ID NO: 5250438 - DNA, 25 bp, Homo sapien
ccattatagggacttggtattaact

SEQ ID NO: 5250439 - DNA, 25 bp, Homo sapien
caaggaaggtgatcgattgagccca

SEQ ID NO: 5250440 - DNA, 25 bp, Homo sapien
taggttccctaacatctagaaagtc

SEQ ID NO: 5250441 - DNA, 25 bp, Homo sapien
gaaagtctcagtagttctacagtgg

SEQ ID NO: 5250442 - DNA, 25 bp, Homo sapien
caggagatttgagcagactttgttc

SEQ ID NO: 5250443 - DNA, 25 bp, Homo sapien
ggagatttgagcagactttgttcag

SEQ ID NO: 5250444 - DNA, 25 bp, Homo sapien
gcaggagatttgagcagactttgtt

SEQ ID NO: 5250445 - DNA, 25 bp, Homo sapien
agatttgagcagactttgttcagat

SEQ ID NO: 5250446 - DNA, 25 bp, Homo sapien
ataaaaataaaggccacacacggtg

SEQ ID NO: 5250447 - DNA, 25 bp, Homo sapien
ccattgtgctccagcctcggcagca

SEQ ID NO: 5250448 - DNA, 25 bp, Homo sapien
aaataaaggccacacacggtggctc

SEQ ID NO: 5250449 - DNA, 25 bp, Homo sapien
ccagcctcggcagcaagagtgcaac

SEQ ID NO: 5250450 - DNA, 25 bp, Homo sapien
ccaggcctaagggagcctcccaagt

SEQ ID NO: 5250451 - DNA, 25 bp, Homo sapien
tcccaggcctaagggagcctcccaa

SEQ ID NO: 5250452 - DNA, 25 bp, Homo sapien
tctcatgttcaagagattatgttct

SEQ ID NO: 5250453 - DNA, 25 bp, Homo sapien
cctctcatgttcaagagattatgtt

SEQ ID NO: 5250454 - DNA, 25 bp, Homo sapien
gaattgtctacatctacctggcccg

SEQ ID NO: 5250455 - DNA, 25 bp, Homo sapien
gttaagcaaaagataccagaccctg

SEQ ID NO: 5250456 - DNA, 25 bp, Homo sapien
taaggtcagctttacgtctaatagc

SEQ ID NO: 5250457 - DNA, 25 bp, Homo sapien
tagcccaaaactgaggacaatccaa

SEQ ID NO: 5250458 - DNA, 25 bp, Homo sapien
atcataaatgctttagcaattacaa

SEQ ID NO: 5250459 - DNA, 25 bp, Homo sapien
tcataaatgctttagcaattacaaa

SEQ ID NO: 5250460 - DNA, 25 bp, Homo sapien
aatcataaatgctttagcaattaca

SEQ ID NO: 5250461 - DNA, 25 bp, Homo sapien
tagcaattacaaatacttcaaggcc

SEQ ID NO: 5250462 - DNA, 25 bp, Homo sapien
ctccagtgagttacgatagcaccac

SEQ ID NO: 5250463 - DNA, 25 bp, Homo sapien
gatggtttgagcctagatcagggct

SEQ ID NO: 5250464 - DNA, 25 bp, Homo sapien
agggctccagtgagttacgatagca

SEQ ID NO: 5250465 - DNA, 25 bp, Homo sapien
ggtttgagcctagatcagggctcca

SEQ ID NO: 5250466 - DNA, 25 bp, Homo sapien
taaacgaagccccagattcaagcag

SEQ ID NO: 5250467 - DNA, 25 bp, Homo sapien
gtcttgaaatataaacgaagcccca

SEQ ID NO: 5250468 - DNA, 25 bp, Homo sapien
tccagggtcactattaacacaaatg

SEQ ID NO: 5250469 - DNA, 25 bp, Homo sapien
acagatggagctcctacaggcagca

SEQ ID NO: 5250470 - DNA, 25 bp, Homo sapien
taatactaaacatcctgaaggagcg

SEQ ID NO: 5250471 - DNA, 25 bp, Homo sapien
tatgtggacctacttggatgacaaa

SEQ ID NO: 5250472 - DNA, 25 bp, Homo sapien
tcaaacccgtagaggattttagagc

SEQ ID NO: 5250473 - DNA, 25 bp, Homo sapien
tcaactagagctgtagagaccacat

SEQ ID NO: 5250474 - DNA, 25 bp, Homo sapien
agcccaggaggtggagacgtggtct

SEQ ID NO: 5250475 - DNA, 25 bp, Homo sapien
gagcccaggaggtggagacgtggtc

SEQ ID NO: 5250476 - DNA, 25 bp, Homo sapien
aggccaagatgggagaatcgttgga

SEQ ID NO: 5250477 - DNA, 25 bp, Homo sapien
caagatgggagaatcgttggagccc

SEQ ID NO: 5250478 - DNA, 25 bp, Homo sapien
aatagatttttatatgtgaagaaac

SEQ ID NO: 5250479 - DNA, 25 bp, Homo sapien
tacaatagatttttatatgtgaaga

SEQ ID NO: 5250480 - DNA, 25 bp, Homo sapien
tttacaatagatttttatatgtgaa

SEQ ID NO: 5250481 - DNA, 25 bp, Homo sapien
caatagatttttatatgtgaagaaa

SEQ ID NO: 5250482 - DNA, 25 bp, Homo sapien
aagttcagtgtctgcgtttccgctg

SEQ ID NO: 5250483 - DNA, 25 bp, Homo sapien
gcccaaagttcagtgtctgcgtttc

SEQ ID NO: 5250484 - DNA, 25 bp, Homo sapien
ccaaagttcagtgtctgcgtttccg

SEQ ID NO: 5250485 - DNA, 25 bp, Homo sapien
caaagttcagtgtctgcgtttccgc

SEQ ID NO: 5250486 - DNA, 25 bp, Homo sapien
taagcatacataaaaccacctggaa

SEQ ID NO: 5250487 - DNA, 25 bp, Homo sapien
tacaggagttccatcggttcttaga

SEQ ID NO: 5250488 - DNA, 25 bp, Homo sapien
ggaagccacactacaatgtgatgga

SEQ ID NO: 5250489 - DNA, 25 bp, Homo sapien
tattgatgccactgaagagaggatc

SEQ ID NO: 5250490 - DNA, 25 bp, Homo sapien
aaaaatcaagaacagcttctatatg

SEQ ID NO: 5250491 - DNA, 25 bp, Homo sapien
tagttgaataaatgatggtacatcc

SEQ ID NO: 5250492 - DNA, 25 bp, Homo sapien
tctatatgtcacatctagaagacta

SEQ ID NO: 5250493 - DNA, 25 bp, Homo sapien
tctagaagactagttgaataaatga

SEQ ID NO: 5250494 - DNA, 25 bp, Homo sapien
aaggtaaacattatgcatcatgaag

SEQ ID NO: 5250495 - DNA, 25 bp, Homo sapien
caagccttgttaacagaagggctgc

SEQ ID NO: 5250496 - DNA, 25 bp, Homo sapien
tcttttttcactggcacacaatgac

SEQ ID NO: 5250497 - DNA, 25 bp, Homo sapien
aatgcatcctgaacgattttactag

SEQ ID NO: 5250498 - DNA, 25 bp, Homo sapien
cttcggcaatgctggagaaagagga

SEQ ID NO: 5250499 - DNA, 25 bp, Homo sapien
gaggaggggatgtaatactcccacc

SEQ ID NO: 5250500 - DNA, 25 bp, Homo sapien
taatctgctaatttatacttcggca

SEQ ID NO: 5250501 - DNA, 25 bp, Homo sapien
tctctgccgtaacgataatctgcta

SEQ ID NO: 5250502 - DNA, 25 bp, Homo sapien
tcctggaggataggcagaaattctt

SEQ ID NO: 5250503 - DNA, 25 bp, Homo sapien
tctttatccagaaggtctgaaggta

SEQ ID NO: 5250504 - DNA, 25 bp, Homo sapien
ggttcctcctggaggataggcagaa

SEQ ID NO: 5250505 - DNA, 25 bp, Homo sapien
cctcctggaggataggcagaaattc

SEQ ID NO: 5250506 - DNA, 25 bp, Homo sapien
ggttcccaatgtccttaaggatcta

SEQ ID NO: 5250507 - DNA, 25 bp, Homo sapien
gaatcactcttcctctctacttgag

SEQ ID NO: 5250508 - DNA, 25 bp, Homo sapien
taaattcgctactttccagcccaca

SEQ ID NO: 5250509 - DNA, 25 bp, Homo sapien
caccggtaagaattcaggttggcaa

SEQ ID NO: 5250510 - DNA, 25 bp, Homo sapien
ctaggatcccatgcagttgaacacc

SEQ ID NO: 5250511 - DNA, 25 bp, Homo sapien
aaatgcacccatttgtatgtgtggg

SEQ ID NO: 5250512 - DNA, 25 bp, Homo sapien
taacttaccttttagcacagagtaa

SEQ ID NO: 5250513 - DNA, 25 bp, Homo sapien
aataattgtggtcagagctaactgc

SEQ ID NO: 5250514 - DNA, 25 bp, Homo sapien
gcaactccaagtagtattcaacaga

SEQ ID NO: 5250515 - DNA, 25 bp, Homo sapien
ggacattctgcacatcaatgtgaat

SEQ ID NO: 5250516 - DNA, 25 bp, Homo sapien
caaaaggtctgatgcgagagtagga

SEQ ID NO: 5250517 - DNA, 25 bp, Homo sapien
gaatgacaggaatcataagtgaatg

SEQ ID NO: 5250518 - DNA, 25 bp, Homo sapien
ctatttacagacatggaaaagtttc

SEQ ID NO: 5250519 - DNA, 25 bp, Homo sapien
tatttacagacatggaaaagtttct

SEQ ID NO: 5250520 - DNA, 25 bp, Homo sapien
tgaagaacttcgacctctaggagcc

SEQ ID NO: 5250521 - DNA, 25 bp, Homo sapien
gaacttcgacctctaggagccccca

SEQ ID NO: 5250522 - DNA, 25 bp, Homo sapien
gaagaacttcgacctctaggagccc

SEQ ID NO: 5250523 - DNA, 25 bp, Homo sapien
tcctcctcctcctccattattactt

SEQ ID NO: 5250524 - DNA, 25 bp, Homo sapien
taaaagtaagttctctatcctcctc

SEQ ID NO: 5250525 - DNA, 25 bp, Homo sapien
aaagtaagttctctatcctcctcct

SEQ ID NO: 5250526 - DNA, 25 bp, Homo sapien
tcctcctccattattacttttttca

SEQ ID NO: 5250527 - DNA, 25 bp, Homo sapien
tcttgacgagtgcaagtatccactt

SEQ ID NO: 5250528 - DNA, 25 bp, Homo sapien
tcatttgtcaaacggaagtgagaag

SEQ ID NO: 5250529 - DNA, 25 bp, Homo sapien
tctcacagtgcacaatgacccaaag

SEQ ID NO: 5250530 - DNA, 25 bp, Homo sapien
aaacaatggataccctcttgacgag

SEQ ID NO: 5250531 - DNA, 25 bp, Homo sapien
tagaaaccacattcacctctgcctc

SEQ ID NO: 5250532 - DNA, 25 bp, Homo sapien
ttcatcaaaacttctttggtagaaa

SEQ ID NO: 5250533 - DNA, 25 bp, Homo sapien
gaaaccacattcacctctgcctctg

SEQ ID NO: 5250534 - DNA, 25 bp, Homo sapien
acttctttggtagaaaccacattca

SEQ ID NO: 5250535 - DNA, 25 bp, Homo sapien
ctgccacctcctcgaccaaaaacac

SEQ ID NO: 5250536 - DNA, 25 bp, Homo sapien
tctgcgatctatgcatttctctgcc

SEQ ID NO: 5250537 - DNA, 25 bp, Homo sapien
cccagctctgcgatctatgcatttc

SEQ ID NO: 5250538 - DNA, 25 bp, Homo sapien
gctctgcgatctatgcatttctctg

SEQ ID NO: 5250539 - DNA, 25 bp, Homo sapien
tacatcttttcgtcctggtttttca

SEQ ID NO: 5250540 - DNA, 25 bp, Homo sapien
tcctggtttttcaaaacgtctgtca

SEQ ID NO: 5250541 - DNA, 25 bp, Homo sapien
gatagagagtgaccctataagccct

SEQ ID NO: 5250542 - DNA, 25 bp, Homo sapien
catgatcatgattagtaggcaggta

SEQ ID NO: 5250543 - DNA, 25 bp, Homo sapien
caatcttgtctcctatctaaacagc

SEQ ID NO: 5250544 - DNA, 25 bp, Homo sapien
cacagttcccatcgcaaggcttcaa

SEQ ID NO: 5250545 - DNA, 25 bp, Homo sapien
ttcacattctcctatggttgttcac

SEQ ID NO: 5250546 - DNA, 25 bp, Homo sapien
cacattctcctatggttgttcacag

SEQ ID NO: 5250547 - DNA, 25 bp, Homo sapien
tggttgttcacaggggttatgcaag

SEQ ID NO: 5250548 - DNA, 25 bp, Homo sapien
cattctcctatggttgttcacaggg

SEQ ID NO: 5250549 - DNA, 25 bp, Homo sapien
ctgataaagatagcatgacagtttc

SEQ ID NO: 5250550 - DNA, 25 bp, Homo sapien
tacaagcccatactaccaagtacca

SEQ ID NO: 5250551 - DNA, 25 bp, Homo sapien
ccaagtaccagaagagtctataacc

SEQ ID NO: 5250552 - DNA, 25 bp, Homo sapien
aaactggaggcatgtcgttacctaa

SEQ ID NO: 5250553 - DNA, 25 bp, Homo sapien
ggtcatgaagtcttgcacacatgat

SEQ ID NO: 5250554 - DNA, 25 bp, Homo sapien
catgaagtcttgcacacatgatcag

SEQ ID NO: 5250555 - DNA, 25 bp, Homo sapien
caggaagactacttcggaactaact

SEQ ID NO: 5250556 - DNA, 25 bp, Homo sapien
gcacacatgatcaggaagactactt

SEQ ID NO: 5250557 - DNA, 25 bp, Homo sapien
taaaggcactacatcacttacacag

SEQ ID NO: 5250558 - DNA, 25 bp, Homo sapien
ctctcgcttgttaagtgaagctgcc

SEQ ID NO: 5250559 - DNA, 25 bp, Homo sapien
gctgcccaaggtgacataagtgaat

SEQ ID NO: 5250560 - DNA, 25 bp, Homo sapien
gaatgagtaaaacctgagatctaag

SEQ ID NO: 5250561 - DNA, 25 bp, Homo sapien
tatgcctacataagaatggctgagc

SEQ ID NO: 5250562 - DNA, 25 bp, Homo sapien
tttcaaacctagctccctgggtgga

SEQ ID NO: 5250563 - DNA, 25 bp, Homo sapien
cctgggtggaatgacgacttcacta

SEQ ID NO: 5250564 - DNA, 25 bp, Homo sapien
gctgagctaacaatacacattctgg

SEQ ID NO: 5250565 - DNA, 25 bp, Homo sapien
tttgacaagactgtccctgaatttc

SEQ ID NO: 5250566 - DNA, 25 bp, Homo sapien
gaattttgacaagactgtccctgaa

SEQ ID NO: 5250567 - DNA, 25 bp, Homo sapien
tccaaaggtgaatatcaaatcaaga

SEQ ID NO: 5250568 - DNA, 25 bp, Homo sapien
gcatctctgttgacccgaggttcca

SEQ ID NO: 5250569 - DNA, 25 bp, Homo sapien
ttttgtggcgaagattgcccggcca

SEQ ID NO: 5250570 - DNA, 25 bp, Homo sapien
cttcaacgtaatctggctgtagcca

SEQ ID NO: 5250571 - DNA, 25 bp, Homo sapien
ctgactcactgaaaggcatggcacc

SEQ ID NO: 5250572 - DNA, 25 bp, Homo sapien
taagcacaggcaggaatataggaaa

SEQ ID NO: 5250573 - DNA, 25 bp, Homo sapien
gtttccaaagcgtagagatcaggtc

SEQ ID NO: 5250574 - DNA, 25 bp, Homo sapien
gaatcctaatggacatgcgctggcg

SEQ ID NO: 5250575 - DNA, 25 bp, Homo sapien
tcaaagataccggaggatggtcacc

SEQ ID NO: 5250576 - DNA, 25 bp, Homo sapien
aataaatgcttgacacccggacttg

SEQ ID NO: 5250577 - DNA, 25 bp, Homo sapien
cattttgaaggcaaccaactatcct

SEQ ID NO: 5250578 - DNA, 25 bp, Homo sapien
gcaaccaactatcctttcattgtta

SEQ ID NO: 5250579 - DNA, 25 bp, Homo sapien
ttgaaggcaaccaactatcctttca

SEQ ID NO: 5250580 - DNA, 25 bp, Homo sapien
caactatcctttcattgttatatcc

SEQ ID NO: 5250581 - DNA, 25 bp, Homo sapien
aaaggctgacccagcaaaagaactg

SEQ ID NO: 5250582 - DNA, 25 bp, Homo sapien
taaaggctgacccagcaaaagaact

SEQ ID NO: 5250583 - DNA, 25 bp, Homo sapien
actggtgagtacatgcaataatatc

SEQ ID NO: 5250584 - DNA, 25 bp, Homo sapien
gagtacatgcaataatatccattct

SEQ ID NO: 5250585 - DNA, 25 bp, Homo sapien
tctgaacttgtgttgaagtatttgg

SEQ ID NO: 5250586 - DNA, 25 bp, Homo sapien
ttctgaaggtcagtgtttctaatgc

SEQ ID NO: 5250587 - DNA, 25 bp, Homo sapien
cagtgtttctaatgctgtgtctgaa

SEQ ID NO: 5250588 - DNA, 25 bp, Homo sapien
tgctgtgtctgaacttgtgttgaag

SEQ ID NO: 5250589 - DNA, 25 bp, Homo sapien
cgaagattcattctccttgcacagg

SEQ ID NO: 5250590 - DNA, 25 bp, Homo sapien
cattacgaagattcattctccttgc

SEQ ID NO: 5250591 - DNA, 25 bp, Homo sapien
ttacgaagattcattctccttgcac

SEQ ID NO: 5250592 - DNA, 25 bp, Homo sapien
tacgaagattcattctccttgcaca

SEQ ID NO: 5250593 - DNA, 25 bp, Homo sapien
catcaccaagtttcttataaagtct

SEQ ID NO: 5250594 - DNA, 25 bp, Homo sapien
tataaagtctttccaaacactgtcc

SEQ ID NO: 5250595 - DNA, 25 bp, Homo sapien
cttataaagtctttccaaacactgt

SEQ ID NO: 5250596 - DNA, 25 bp, Homo sapien
taaagtctttccaaacactgtccat

SEQ ID NO: 5250597 - DNA, 25 bp, Homo sapien
ctcagagtcgtactccccagaagga

SEQ ID NO: 5250598 - DNA, 25 bp, Homo sapien
cctcagagtcgtactccccagaagg

SEQ ID NO: 5250599 - DNA, 25 bp, Homo sapien
tcagagtcgtactccccagaaggaa

SEQ ID NO: 5250600 - DNA, 25 bp, Homo sapien
cagagtcgtactccccagaaggaac

SEQ ID NO: 5250601 - DNA, 25 bp, Homo sapien
cactttctgagcgtataaattcatg

SEQ ID NO: 5250602 - DNA, 25 bp, Homo sapien
tctccctactgatgttggtccacct

SEQ ID NO: 5250603 - DNA, 25 bp, Homo sapien
tgttcctctctaaagatgcgccaat

SEQ ID NO: 5250604 - DNA, 25 bp, Homo sapien
ctaaagatgcgccaattttcacttt

SEQ ID NO: 5250605 - DNA, 25 bp, Homo sapien
ctccttgatccagctagtcgccaac

SEQ ID NO: 5250606 - DNA, 25 bp, Homo sapien
caggactgtgaggtcgccacctctc

SEQ ID NO: 5250607 - DNA, 25 bp, Homo sapien
catccctccttgatccagctagtcg

SEQ ID NO: 5250608 - DNA, 25 bp, Homo sapien
ggactgtgaggtcgccacctctctc

SEQ ID NO: 5250609 - DNA, 25 bp, Homo sapien
acctccgacgtcgttccatgtgttc

SEQ ID NO: 5250610 - DNA, 25 bp, Homo sapien
tccgacgtcgttccatgtgttcccg

SEQ ID NO: 5250611 - DNA, 25 bp, Homo sapien
caaacctccgacgtcgttccatgtg

SEQ ID NO: 5250612 - DNA, 25 bp, Homo sapien
acgtcgttccatgtgttcccgccag

SEQ ID NO: 5250613 - DNA, 25 bp, Homo sapien
gcatcctctaagcaccattcgggca

SEQ ID NO: 5250614 - DNA, 25 bp, Homo sapien
ggcaagctatccctgtcatcatcta

SEQ ID NO: 5250615 - DNA, 25 bp, Homo sapien
actgccagagcgaacccttcggtaa

SEQ ID NO: 5250616 - DNA, 25 bp, Homo sapien
gaaaggaatgctccagatgagtcaa

SEQ ID NO: 5250617 - DNA, 25 bp, Homo sapien
tgtcttatcgggttctttggcctct

SEQ ID NO: 5250618 - DNA, 25 bp, Homo sapien
cttatttgtcttatcgggttctttg

SEQ ID NO: 5250619 - DNA, 25 bp, Homo sapien
tctttggcctcttcattatggctac

SEQ ID NO: 5250620 - DNA, 25 bp, Homo sapien
ttcattatggctaccctcagagtca

SEQ ID NO: 5250621 - DNA, 25 bp, Homo sapien
ctgaaggagtacctggtctagcaga

SEQ ID NO: 5250622 - DNA, 25 bp, Homo sapien
aaggagtacctggtctagcagatga

SEQ ID NO: 5250623 - DNA, 25 bp, Homo sapien
ggagtacctggtctagcagatgatg

SEQ ID NO: 5250624 - DNA, 25 bp, Homo sapien
gtacctggtctagcagatgatgatg

SEQ ID NO: 5250625 - DNA, 25 bp, Homo sapien
ttccgtttgctcagtttttggttca

SEQ ID NO: 5250626 - DNA, 25 bp, Homo sapien
ctgctgggcactttggctggtagac

SEQ ID NO: 5250627 - DNA, 25 bp, Homo sapien
catcccctctgctgggcactttggc

SEQ ID NO: 5250628 - DNA, 25 bp, Homo sapien
cctctgctgggcactttggctggta

SEQ ID NO: 5250629 - DNA, 25 bp, Homo sapien
atcccctctgctgggcactttggct

SEQ ID NO: 5250630 - DNA, 25 bp, Homo sapien
tacattatcaagtcgcacagcctgc

SEQ ID NO: 5250631 - DNA, 25 bp, Homo sapien
gccaaacagaaaacgtgagccctgt

SEQ ID NO: 5250632 - DNA, 25 bp, Homo sapien
cacagcctgctaaatgggccaaaca

SEQ ID NO: 5250633 - DNA, 25 bp, Homo sapien
cagggcttacctgtgtcaccagagc

SEQ ID NO: 5250634 - DNA, 25 bp, Homo sapien
tcaactggccggagagtaggactag

SEQ ID NO: 5250635 - DNA, 25 bp, Homo sapien
taggactaggattgggaacaggagg

SEQ ID NO: 5250636 - DNA, 25 bp, Homo sapien
tctgtggaaacactgcccataccag

SEQ ID NO: 5250637 - DNA, 25 bp, Homo sapien
taccaggagcacctacaactggtgt

SEQ ID NO: 5250638 - DNA, 25 bp, Homo sapien
gatctcatcacgttatccagactgt

SEQ ID NO: 5250639 - DNA, 25 bp, Homo sapien
gggttcaaatcaacactagtaagag

SEQ ID NO: 5250640 - DNA, 25 bp, Homo sapien
gctctggatcaaagcccagggttca

SEQ ID NO: 5250641 - DNA, 25 bp, Homo sapien
tgccatgaaacaggtactatcccca

SEQ ID NO: 5250642 - DNA, 25 bp, Homo sapien
ggaatcgacactcctttagctctgt

SEQ ID NO: 5250643 - DNA, 25 bp, Homo sapien
gtcttggagataagccaccattttc

SEQ ID NO: 5250644 - DNA, 25 bp, Homo sapien
gccaatctttcatcatctagtgcac

SEQ ID NO: 5250645 - DNA, 25 bp, Homo sapien
tgcttcatgcatcaatggaatcgac

SEQ ID NO: 5250646 - DNA, 25 bp, Homo sapien
ttgaatttctccctgaggatctttg

SEQ ID NO: 5250647 - DNA, 25 bp, Homo sapien
aatttctccctgaggatctttgtaa

SEQ ID NO: 5250648 - DNA, 25 bp, Homo sapien
ttctccctgaggatctttgtaatac

SEQ ID NO: 5250649 - DNA, 25 bp, Homo sapien
gaatttctccctgaggatctttgta

SEQ ID NO: 5250650 - DNA, 25 bp, Homo sapien
catgtaaaatgccaggtagtaataa

SEQ ID NO: 5250651 - DNA, 25 bp, Homo sapien
taaaatggaccatgaacttaaatgt

SEQ ID NO: 5250652 - DNA, 25 bp, Homo sapien
cgaagcaaacggacactcattgaga

SEQ ID NO: 5250653 - DNA, 25 bp, Homo sapien
ccattggcatctaaagctaggcaaa

SEQ ID NO: 5250654 - DNA, 25 bp, Homo sapien
aaagacattcttggtcccgaagcaa

SEQ ID NO: 5250655 - DNA, 25 bp, Homo sapien
gacatagtaaaatagcccgcctgaa

SEQ ID NO: 5250656 - DNA, 25 bp, Homo sapien
ttttcatgatatcgccaagaggttg

SEQ ID NO: 5250657 - DNA, 25 bp, Homo sapien
ggaagctttcatcacacgctctctt

SEQ ID NO: 5250658 - DNA, 25 bp, Homo sapien
aaagacatagtaaaatagcccgcct

SEQ ID NO: 5250659 - DNA, 25 bp, Homo sapien
agaaagggtccttatttcagctgcc

SEQ ID NO: 5250660 - DNA, 25 bp, Homo sapien
gcagggagccagtatgtatcttaaa

SEQ ID NO: 5250661 - DNA, 25 bp, Homo sapien
tctagtggaaacagtggtgtcaata

SEQ ID NO: 5250662 - DNA, 25 bp, Homo sapien
aaactaaacaacaccatctagtgga

SEQ ID NO: 5250663 - DNA, 25 bp, Homo sapien
tgcctggtcagtcgttcctggtcca

SEQ ID NO: 5250664 - DNA, 25 bp, Homo sapien
taaaaactgctggtactgcaggtgc

SEQ ID NO: 5250665 - DNA, 25 bp, Homo sapien
gctgtgagttcttgctgcctggtca

SEQ ID NO: 5250666 - DNA, 25 bp, Homo sapien
gtgctgcatctggtataaggctgtg

SEQ ID NO: 5250667 - DNA, 25 bp, Homo sapien
gactgaagtgccatataagccgtta

SEQ ID NO: 5250668 - DNA, 25 bp, Homo sapien
catagatggcgtgtttccgagtgaa

SEQ ID NO: 5250669 - DNA, 25 bp, Homo sapien
tggcaagacgccactagctgggtga

SEQ ID NO: 5250670 - DNA, 25 bp, Homo sapien
tacatcctacaaaccaacaggtgtg

SEQ ID NO: 5250671 - DNA, 25 bp, Homo sapien
ggccaaaacctgtgcatattgttgt

SEQ ID NO: 5250672 - DNA, 25 bp, Homo sapien
ggtctgaaactgttgaagaagaagt

SEQ ID NO: 5250673 - DNA, 25 bp, Homo sapien
gttgggccaaaacctgtgcatattg

SEQ ID NO: 5250674 - DNA, 25 bp, Homo sapien
tgctgttgggccaaaacctgtgcat

SEQ ID NO: 5250675 - DNA, 25 bp, Homo sapien
gcaccccatatgacacataatggaa

SEQ ID NO: 5250676 - DNA, 25 bp, Homo sapien
tgcaccccatatgacacataatgga

SEQ ID NO: 5250677 - DNA, 25 bp, Homo sapien
acatgcaccccatatgacacataat

SEQ ID NO: 5250678 - DNA, 25 bp, Homo sapien
cccatatgacacataatggaatgac

SEQ ID NO: 5250679 - DNA, 25 bp, Homo sapien
gagccagtatctggcacggacacag

SEQ ID NO: 5250680 - DNA, 25 bp, Homo sapien
agctgttggctgaagctcccagata

SEQ ID NO: 5250681 - DNA, 25 bp, Homo sapien
cctagttactgagggaatgatgttc

SEQ ID NO: 5250682 - DNA, 25 bp, Homo sapien
ttggctgaagctcccagatagagcc

SEQ ID NO: 5250683 - DNA, 25 bp, Homo sapien
ggaagatcccatacactaccacctt

SEQ ID NO: 5250684 - DNA, 25 bp, Homo sapien
ggcctggtgtcgtggtgtccagagg

SEQ ID NO: 5250685 - DNA, 25 bp, Homo sapien
gcctggtgtcgtggtgtccagagga

SEQ ID NO: 5250686 - DNA, 25 bp, Homo sapien
agaggaagatcccatacactaccac

SEQ ID NO: 5250687 - DNA, 25 bp, Homo sapien
gcagccagatgacaatgcactgttg

SEQ ID NO: 5250688 - DNA, 25 bp, Homo sapien
tgtacttataccagctaagcagcag

SEQ ID NO: 5250689 - DNA, 25 bp, Homo sapien
catagctagctagagagatgaataa

SEQ ID NO: 5250690 - DNA, 25 bp, Homo sapien
caatgtttatgtcctgcagccagat

SEQ ID NO: 5250691 - DNA, 25 bp, Homo sapien
tcttgtacgcctgagaacctagaaa

SEQ ID NO: 5250692 - DNA, 25 bp, Homo sapien
tcaacaccctgtaagagctctaagc

SEQ ID NO: 5250693 - DNA, 25 bp, Homo sapien
gctttttggctgctacgtctgagga

SEQ ID NO: 5250694 - DNA, 25 bp, Homo sapien
taaggagactgtcacgacctcaggg

SEQ ID NO: 5250695 - DNA, 25 bp, Homo sapien
ctgcctctcttctctcttgctctag

SEQ ID NO: 5250696 - DNA, 25 bp, Homo sapien
ttctgcctctcttctctcttgctct

SEQ ID NO: 5250697 - DNA, 25 bp, Homo sapien
tctgcctctcttctctcttgctcta

SEQ ID NO: 5250698 - DNA, 25 bp, Homo sapien
tgctgtcgccgaagaatttcctcct

SEQ ID NO: 5250699 - DNA, 25 bp, Homo sapien
tgcaatttcttgctcccgctggcga

SEQ ID NO: 5250700 - DNA, 25 bp, Homo sapien
ctgtttgcgtaacaattcttcctgc

SEQ ID NO: 5250701 - DNA, 25 bp, Homo sapien
ccttaatgcaatttcttgctcccgc

SEQ ID NO: 5250702 - DNA, 25 bp, Homo sapien
tcttgctcccgctggcgacgcagag

SEQ ID NO: 5250703 - DNA, 25 bp, Homo sapien
aaactagttagattcagcagtgggg

SEQ ID NO: 5250704 - DNA, 25 bp, Homo sapien
ttcagtgacactaataattttaata

SEQ ID NO: 5250705 - DNA, 25 bp, Homo sapien
ctagttagattcagcagtggggggt

SEQ ID NO: 5250706 - DNA, 25 bp, Homo sapien
agttagattcagcagtggggggttg

SEQ ID NO: 5250707 - DNA, 25 bp, Homo sapien
aaaccattccattgtgccctgcgga

SEQ ID NO: 5250708 - DNA, 25 bp, Homo sapien
ccattccattgtgccctgcggaact

SEQ ID NO: 5250709 - DNA, 25 bp, Homo sapien
ccattgtgccctgcggaactcattt

SEQ ID NO: 5250710 - DNA, 25 bp, Homo sapien
caaaaccattccattgtgccctgcg

SEQ ID NO: 5250711 - DNA, 25 bp, Homo sapien
ggttctcctctaatcgacgctgggc

SEQ ID NO: 5250712 - DNA, 25 bp, Homo sapien
tcttcttcccgggcccattttgcag

SEQ ID NO: 5250713 - DNA, 25 bp, Homo sapien
gcagccggttctcctctaatcgacg

SEQ ID NO: 5250714 - DNA, 25 bp, Homo sapien
tcctctaatcgacgctgggcttctt

SEQ ID NO: 5250715 - DNA, 25 bp, Homo sapien
cttcttcctcatgccggagtctggc

SEQ ID NO: 5250716 - DNA, 25 bp, Homo sapien
tcctcatgccggagtctggctgcct

SEQ ID NO: 5250717 - DNA, 25 bp, Homo sapien
ttcctcatgccggagtctggctgcc

SEQ ID NO: 5250718 - DNA, 25 bp, Homo sapien
ttcttcctcatgccggagtctggct

SEQ ID NO: 5250719 - DNA, 25 bp, Homo sapien
ctgcctctggcgcattaactccttc

SEQ ID NO: 5250720 - DNA, 25 bp, Homo sapien
gcctctggcgcattaactccttctg

SEQ ID NO: 5250721 - DNA, 25 bp, Homo sapien
tctggcgcattaactccttctgccg

SEQ ID NO: 5250722 - DNA, 25 bp, Homo sapien
cctctggcgcattaactccttctgc

SEQ ID NO: 5250723 - DNA, 25 bp, Homo sapien
cttcatctgcgccagctgttgttgc

SEQ ID NO: 5250724 - DNA, 25 bp, Homo sapien
catctgcgccagctgttgttgctgc

SEQ ID NO: 5250725 - DNA, 25 bp, Homo sapien
ttctacttgcctgtttatgtgtcta

SEQ ID NO: 5250726 - DNA, 25 bp, Homo sapien
tactgtattctacttgcctgtttat

SEQ ID NO: 5250727 - DNA, 25 bp, Homo sapien
ttgcctgtttatgtgtctaacctgt

SEQ ID NO: 5250728 - DNA, 25 bp, Homo sapien
cctgtttatgtgtctaacctgtgag

SEQ ID NO: 5250729 - DNA, 25 bp, Homo sapien
catgagatttctcatctcatgagag

SEQ ID NO: 5250730 - DNA, 25 bp, Homo sapien
gatgctggcatagttcttgatcagc

SEQ ID NO: 5250731 - DNA, 25 bp, Homo sapien
ttctcatctcatgagagatgctggc

SEQ ID NO: 5250732 - DNA, 25 bp, Homo sapien
tcatgagagatgctggcatagttct

SEQ ID NO: 5250733 - DNA, 25 bp, Homo sapien
gcattatgtatacccagaacaaatg

SEQ ID NO: 5250734 - DNA, 25 bp, Homo sapien
cagaaagttcatgaggaaatgtgga

SEQ ID NO: 5250735 - DNA, 25 bp, Homo sapien
gaagcaataatgcattatgtatacc

SEQ ID NO: 5250736 - DNA, 25 bp, Homo sapien
taatgcattatgtatacccagaaca

SEQ ID NO: 5250737 - DNA, 25 bp, Homo sapien
gacatgctgttgtattggactgctg

SEQ ID NO: 5250738 - DNA, 25 bp, Homo sapien
ttggatttcagccaacgacagcgtg

SEQ ID NO: 5250739 - DNA, 25 bp, Homo sapien
gcctgggactgacatgctgttgtat

SEQ ID NO: 5250740 - DNA, 25 bp, Homo sapien
tgctggccccacgttgaagaagaag

SEQ ID NO: 5250741 - DNA, 25 bp, Homo sapien
gacagtaattgtcctcagtaaccac

SEQ ID NO: 5250742 - DNA, 25 bp, Homo sapien
ccttcacatttgctagggtaaccaa

SEQ ID NO: 5250743 - DNA, 25 bp, Homo sapien
tggaacatcgcttgactagatccct

SEQ ID NO: 5250744 - DNA, 25 bp, Homo sapien
cataatgcatgctagatattctgga

SEQ ID NO: 5250745 - DNA, 25 bp, Homo sapien
gtcaccttttcagaggccttctcag

SEQ ID NO: 5250746 - DNA, 25 bp, Homo sapien
taacaaattgactgctctacctcaa

SEQ ID NO: 5250747 - DNA, 25 bp, Homo sapien
tggatgacttcaagcacactacctg

SEQ ID NO: 5250748 - DNA, 25 bp, Homo sapien
ggacaatccaccacaccatcattat

SEQ ID NO: 5250749 - DNA, 25 bp, Homo sapien
tcaactccctctgctggcgcctttg

SEQ ID NO: 5250750 - DNA, 25 bp, Homo sapien
tgctgctgaagagctttcatcaact

SEQ ID NO: 5250751 - DNA, 25 bp, Homo sapien
tgctgaagagctttcatcaactccc

SEQ ID NO: 5250752 - DNA, 25 bp, Homo sapien
gagctttcatcaactccctctgctg

SEQ ID NO: 5250753 - DNA, 25 bp, Homo sapien
tgaaggtttgctgacattcccccaa

SEQ ID NO: 5250754 - DNA, 25 bp, Homo sapien
ctgaaggtttgctgacattccccca

SEQ ID NO: 5250755 - DNA, 25 bp, Homo sapien
gaaggtttgctgacattcccccaac

SEQ ID NO: 5250756 - DNA, 25 bp, Homo sapien
tgttacgagctctgtttggttgctg

SEQ ID NO: 5250757 - DNA, 25 bp, Homo sapien
tacgagctctgtttggttgctggtg

SEQ ID NO: 5250758 - DNA, 25 bp, Homo sapien
cgtattgttacgagctctgtttggt

SEQ ID NO: 5250759 - DNA, 25 bp, Homo sapien
tctgtttggttgctggtgttgctgc

SEQ ID NO: 5250760 - DNA, 25 bp, Homo sapien
tatagagccccaaacagaattccca

SEQ ID NO: 5250761 - DNA, 25 bp, Homo sapien
gcatcatcccagaatcccatgttgg

SEQ ID NO: 5250762 - DNA, 25 bp, Homo sapien
gaattcccaatgctggtgtgcaggt

SEQ ID NO: 5250763 - DNA, 25 bp, Homo sapien
cagatgcccactggttaggaggacc

SEQ ID NO: 5250764 - DNA, 25 bp, Homo sapien
tatttgttgaattcctaggtcccac

SEQ ID NO: 5250765 - DNA, 25 bp, Homo sapien
ttatttgttgaattcctaggtccca

SEQ ID NO: 5250766 - DNA, 25 bp, Homo sapien
ctgagactggcgttgtttttatttt

SEQ ID NO: 5250767 - DNA, 25 bp, Homo sapien
taaagcaaaacaatagggtgatatt

SEQ ID NO: 5250768 - DNA, 25 bp, Homo sapien
agcaaaacaatagggtgatattata

SEQ ID NO: 5250769 - DNA, 25 bp, Homo sapien
ggtgatattatattcccagaaactg

SEQ ID NO: 5250770 - DNA, 25 bp, Homo sapien
tgatattatattcccagaaactgtt

SEQ ID NO: 5250771 - DNA, 25 bp, Homo sapien
ccggttagacacacctacagattta

SEQ ID NO: 5250772 - DNA, 25 bp, Homo sapien
tattctgccggttagacacacctac

SEQ ID NO: 5250773 - DNA, 25 bp, Homo sapien
ttctactttcttattctgccggtta

SEQ ID NO: 5250774 - DNA, 25 bp, Homo sapien
tactttcttattctgccggttagac

SEQ ID NO: 5250775 - DNA, 25 bp, Homo sapien
cactgcgtaaatccatcttgggctt

SEQ ID NO: 5250776 - DNA, 25 bp, Homo sapien
taagggcatgaagcatctgttcaca

SEQ ID NO: 5250777 - DNA, 25 bp, Homo sapien
ttatttgccgtattaagggcatgaa

SEQ ID NO: 5250778 - DNA, 25 bp, Homo sapien
aagttatttgccgtattaagggcat

SEQ ID NO: 5250779 - DNA, 25 bp, Homo sapien
attaagggcatgaagcatctgttca

SEQ ID NO: 5250780 - DNA, 25 bp, Homo sapien
aatcagtttccatttttaatgtatc

SEQ ID NO: 5250781 - DNA, 25 bp, Homo sapien
cagtttccatttttaatgtatcttt

SEQ ID NO: 5250782 - DNA, 25 bp, Homo sapien
aaatcagtttccatttttaatgtat

SEQ ID NO: 5250783 - DNA, 25 bp, Homo sapien
ttccatttttaatgtatctttatac

SEQ ID NO: 5250784 - DNA, 25 bp, Homo sapien
ggcgctcaaggaactgcttggcaaa

SEQ ID NO: 5250785 - DNA, 25 bp, Homo sapien
catggacctcataaggagattctac

SEQ ID NO: 5250786 - DNA, 25 bp, Homo sapien
tccttggcctcagaagtatctccta

SEQ ID NO: 5250787 - DNA, 25 bp, Homo sapien
aataggccctgatataatcatggac

SEQ ID NO: 5250788 - DNA, 25 bp, Homo sapien
tgctggttggctttctgtttggcac

SEQ ID NO: 5250789 - DNA, 25 bp, Homo sapien
gctgctggttggctttctgtttggc

SEQ ID NO: 5250790 - DNA, 25 bp, Homo sapien
ctgctggttggctttctgtttggca

SEQ ID NO: 5250791 - DNA, 25 bp, Homo sapien
ggctgctgtggcggctgctgtggcg

SEQ ID NO: 5250792 - DNA, 25 bp, Homo sapien
gctgtggcggctgctgtggcggctg

SEQ ID NO: 5250793 - DNA, 25 bp, Homo sapien
ctgctgtggcggctgctgtggcggc

SEQ ID NO: 5250794 - DNA, 25 bp, Homo sapien
ctgctgttgtggctgctgtggcggc

SEQ ID NO: 5250795 - DNA, 25 bp, Homo sapien
atgccttgtacttctctgtatcttc

SEQ ID NO: 5250796 - DNA, 25 bp, Homo sapien
gacccataatgaatactgattatct

SEQ ID NO: 5250797 - DNA, 25 bp, Homo sapien
ccagttggatgttaaatgccttgta

SEQ ID NO: 5250798 - DNA, 25 bp, Homo sapien
cacatcctcatcgtaagtgacccat

SEQ ID NO: 5250799 - DNA, 25 bp, Homo sapien
tcaatttatgcctgttagcccatta

SEQ ID NO: 5250800 - DNA, 25 bp, Homo sapien
caatttatgcctgttagcccattac

SEQ ID NO: 5250801 - DNA, 25 bp, Homo sapien
ctgaatggagtgtactgtggttcat

SEQ ID NO: 5250802 - DNA, 25 bp, Homo sapien
tgaatggagtgtactgtggttcatc

SEQ ID NO: 5250803 - DNA, 25 bp, Homo sapien
aatggagtgtactgtggttcatccc

SEQ ID NO: 5250804 - DNA, 25 bp, Homo sapien
gaatggagtgtactgtggttcatcc

SEQ ID NO: 5250805 - DNA, 25 bp, Homo sapien
ataaactgggatctgctcggaccat

SEQ ID NO: 5250806 - DNA, 25 bp, Homo sapien
tggttgttgctttgattggtctgaa

SEQ ID NO: 5250807 - DNA, 25 bp, Homo sapien
gggatctgctcggaccatcttctgc

SEQ ID NO: 5250808 - DNA, 25 bp, Homo sapien
tctgctcggaccatcttctgctttt

SEQ ID NO: 5250809 - DNA, 25 bp, Homo sapien
tagtcatccaacgtctcgatttcac

SEQ ID NO: 5250810 - DNA, 25 bp, Homo sapien
gatttcacccatgttgagtcgctcc

SEQ ID NO: 5250811 - DNA, 25 bp, Homo sapien
tcagtagtcatccaacgtctcgatt

SEQ ID NO: 5250812 - DNA, 25 bp, Homo sapien
tgagtcgctccgatgatgcattgac

SEQ ID NO: 5250813 - DNA, 25 bp, Homo sapien
caatgcaactttcagaccgggagag

SEQ ID NO: 5250814 - DNA, 25 bp, Homo sapien
gcaagctgctaatggccgatcccaa

SEQ ID NO: 5250815 - DNA, 25 bp, Homo sapien
cacacgcaatgctctgaggaccaga

SEQ ID NO: 5250816 - DNA, 25 bp, Homo sapien
caacccagtgtgagtggcaattcca

SEQ ID NO: 5250817 - DNA, 25 bp, Homo sapien
cagtgctacgtggtctggcagagaa

SEQ ID NO: 5250818 - DNA, 25 bp, Homo sapien
agaaaacggtggctctaagtgaaag

SEQ ID NO: 5250819 - DNA, 25 bp, Homo sapien
caggagctgatccacatgttagcag

SEQ ID NO: 5250820 - DNA, 25 bp, Homo sapien
gggaaattcctcagatagaagcaag

SEQ ID NO: 5250821 - DNA, 25 bp, Homo sapien
tgtaagccaatctggagggaatctg

SEQ ID NO: 5250822 - DNA, 25 bp, Homo sapien
gccattccggagacgacacacataa

SEQ ID NO: 5250823 - DNA, 25 bp, Homo sapien
taagttcaactcctctgaagctgcc

SEQ ID NO: 5250824 - DNA, 25 bp, Homo sapien
gggaatctgttatgcacagcagcca

SEQ ID NO: 5250825 - DNA, 25 bp, Homo sapien
gcagatatttcccaaaaatggctat

SEQ ID NO: 5250826 - DNA, 25 bp, Homo sapien
taaagtagggtgcaatatatatacg

SEQ ID NO: 5250827 - DNA, 25 bp, Homo sapien
aaaataaagtccttcatgtatgcat

SEQ ID NO: 5250828 - DNA, 25 bp, Homo sapien
ggtgcactggcacatagctgtagtc

SEQ ID NO: 5250829 - DNA, 25 bp, Homo sapien
tgtggtgccccactgctatggttga

SEQ ID NO: 5250830 - DNA, 25 bp, Homo sapien
aaataactatcacgcatctggctgc

SEQ ID NO: 5250831 - DNA, 25 bp, Homo sapien
cagagactgaactcacgcaggacca

SEQ ID NO: 5250832 - DNA, 25 bp, Homo sapien
taccaaaagctatacgtgtccatcg

SEQ ID NO: 5250833 - DNA, 25 bp, Homo sapien
gaaatctcagagctaggctaggctg

SEQ ID NO: 5250834 - DNA, 25 bp, Homo sapien
tctttaggtgatctgggccaaccac

SEQ ID NO: 5250835 - DNA, 25 bp, Homo sapien
tagaagtagtatttgtcgccgggcc

SEQ ID NO: 5250836 - DNA, 25 bp, Homo sapien
tagtacttacgtgcagcctcctgaa

SEQ ID NO: 5250837 - DNA, 25 bp, Homo sapien
gacagaaacaagaaccgtggcagcg

SEQ ID NO: 5250838 - DNA, 25 bp, Homo sapien
aattgaagatgaccacaacccaggg

SEQ ID NO: 5250839 - DNA, 25 bp, Homo sapien
tcagagcgctcacaaatgaaggttc

SEQ ID NO: 5250840 - DNA, 25 bp, Homo sapien
aaggttcaggccacccaacagatga

SEQ ID NO: 5250841 - DNA, 25 bp, Homo sapien
ctcaggcagctctagtctttcctaa

SEQ ID NO: 5250842 - DNA, 25 bp, Homo sapien
tgttgaagaaggacttttaaagcag

SEQ ID NO: 5250843 - DNA, 25 bp, Homo sapien
tccctagacccctgtgcacttatga

SEQ ID NO: 5250844 - DNA, 25 bp, Homo sapien
agcagttttgatccaaaccctcagg

SEQ ID NO: 5250845 - DNA, 25 bp, Homo sapien
gacgcacggaggactgcgctggtta

SEQ ID NO: 5250846 - DNA, 25 bp, Homo sapien
ggacgcacggaggactgcgctggtt

SEQ ID NO: 5250847 - DNA, 25 bp, Homo sapien
acgcacggaggactgcgctggttaa

SEQ ID NO: 5250848 - DNA, 25 bp, Homo sapien
cagcgccatgcgcagggccagacag

SEQ ID NO: 5250849 - DNA, 25 bp, Homo sapien
cgccatgcgcagggccagacaggat

SEQ ID NO: 5250850 - DNA, 25 bp, Homo sapien
agcgccatgcgcagggccagacagg

SEQ ID NO: 5250851 - DNA, 25 bp, Homo sapien
gcaggggccagaaccccggagacca

SEQ ID NO: 5250852 - DNA, 25 bp, Homo sapien
gtgggccatgaagggccttttcatc

SEQ ID NO: 5250853 - DNA, 25 bp, Homo sapien
ctttgtgtgggccatgaagggcctt

SEQ ID NO: 5250854 - DNA, 25 bp, Homo sapien
tgtgggccatgaagggccttttcat

SEQ ID NO: 5250855 - DNA, 25 bp, Homo sapien
tgtgtgggccatgaagggccttttc

SEQ ID NO: 5250856 - DNA, 25 bp, Homo sapien
gaccaccactccaaccctgggccat

SEQ ID NO: 5250857 - DNA, 25 bp, Homo sapien
agcccaccccagttgtcctcccctg

SEQ ID NO: 5250858 - DNA, 25 bp, Homo sapien
gaaacgctggaaagctcaacatggg

SEQ ID NO: 5250859 - DNA, 25 bp, Homo sapien
tccatccccggcaaccagacaggat

SEQ ID NO: 5250860 - DNA, 25 bp, Homo sapien
agcgctgcactagccctcacatttc

SEQ ID NO: 5250861 - DNA, 25 bp, Homo sapien
ggtctgggctcagcgctgcactagc

SEQ ID NO: 5250862 - DNA, 25 bp, Homo sapien
gttaagcaagttgccggtagcgctg

SEQ ID NO: 5250863 - DNA, 25 bp, Homo sapien
ccccacctctaggttaagcaagttg

SEQ ID NO: 5250864 - DNA, 25 bp, Homo sapien
cggccggctcgttccacagcgtggg

SEQ ID NO: 5250865 - DNA, 25 bp, Homo sapien
gctcggccggctcgttccacagcgt

SEQ ID NO: 5250866 - DNA, 25 bp, Homo sapien
tcggccggctcgttccacagcgtgg

SEQ ID NO: 5250867 - DNA, 25 bp, Homo sapien
tccacggggccttctcccgacggca

SEQ ID NO: 5250868 - DNA, 25 bp, Homo sapien
ggtcctggcgcgacggtgggggctg

SEQ ID NO: 5250869 - DNA, 25 bp, Homo sapien
tcctggcgcgacggtgggggctggg

SEQ ID NO: 5250870 - DNA, 25 bp, Homo sapien
ctcgggtcctggcgcgacggtgggg

SEQ ID NO: 5250871 - DNA, 25 bp, Homo sapien
ccgccctggtccagccgctcctgcg

SEQ ID NO: 5250872 - DNA, 25 bp, Homo sapien
gccgccctggtccagccgctcctgc

SEQ ID NO: 5250873 - DNA, 25 bp, Homo sapien
cgccgccctggtccagccgctcctg

SEQ ID NO: 5250874 - DNA, 25 bp, Homo sapien
cagcagggcggcgatcacgatggcc

SEQ ID NO: 5250875 - DNA, 25 bp, Homo sapien
atggccgcgatagcgccgggcccca

SEQ ID NO: 5250876 - DNA, 25 bp, Homo sapien
gaaaactttctcagcgcgacgacca

SEQ ID NO: 5250877 - DNA, 25 bp, Homo sapien
cacgagcgccagcaccacgcaggtg

SEQ ID NO: 5250878 - DNA, 25 bp, Homo sapien
tgaggcactccagccgtggtgcacg

SEQ ID NO: 5250879 - DNA, 25 bp, Homo sapien
gctctgaaccccagcggagcgggat

SEQ ID NO: 5250880 - DNA, 25 bp, Homo sapien
acatgcggcgcgctcctgaggcact

SEQ ID NO: 5250881 - DNA, 25 bp, Homo sapien
tcggacatgctgtgcgctcacgcac

SEQ ID NO: 5250882 - DNA, 25 bp, Homo sapien
cattggtccccgtgccttttgagga

SEQ ID NO: 5250883 - DNA, 25 bp, Homo sapien
cagctttggaagaccgtagaggccc

SEQ ID NO: 5250884 - DNA, 25 bp, Homo sapien
cagcatgttgggttggatcgtccgc

SEQ ID NO: 5250885 - DNA, 25 bp, Homo sapien
ggactttgtagcgtcttcccacagg

SEQ ID NO: 5250886 - DNA, 25 bp, Homo sapien
catgggaacggatttgggcctccac

SEQ ID NO: 5250887 - DNA, 25 bp, Homo sapien
tcgaggaggcatgtcccaaaggaag

SEQ ID NO: 5250888 - DNA, 25 bp, Homo sapien
agttcaaggcggtttccagagagga

SEQ ID NO: 5250889 - DNA, 25 bp, Homo sapien
cagggccttgcctcaacatgggaac

SEQ ID NO: 5250890 - DNA, 25 bp, Homo sapien
tgtcggccagaagatccgggtgatc

SEQ ID NO: 5250891 - DNA, 25 bp, Homo sapien
gatcaggacagagatgctgtcggcc

SEQ ID NO: 5250892 - DNA, 25 bp, Homo sapien
gagccagggtgtcatcccaggtgtc

SEQ ID NO: 5250893 - DNA, 25 bp, Homo sapien
catcccaggtgtctctagcaggcat

SEQ ID NO: 5250894 - DNA, 25 bp, Homo sapien
gtgaatcaccccagggcggctgcag

SEQ ID NO: 5250895 - DNA, 25 bp, Homo sapien
tgtgaatcaccccagggcggctgca

SEQ ID NO: 5250896 - DNA, 25 bp, Homo sapien
gatgtgaatcaccccagggcggctg

SEQ ID NO: 5250897 - DNA, 25 bp, Homo sapien
ggggaacagaggatgtgaatcaccc

SEQ ID NO: 5250898 - DNA, 25 bp, Homo sapien
aaagtcacttccgtgcatcctgatg

SEQ ID NO: 5250899 - DNA, 25 bp, Homo sapien
cagcaggcaccgaggcaactttgtg

SEQ ID NO: 5250900 - DNA, 25 bp, Homo sapien
gaattcactaaagactgcgctgcag

SEQ ID NO: 5250901 - DNA, 25 bp, Homo sapien
cctgatgcctgcagtgtaaatgact

SEQ ID NO: 5250902 - DNA, 25 bp, Homo sapien
caagcccccactccccacgctgctc

SEQ ID NO: 5250903 - DNA, 25 bp, Homo sapien
tcactcccccatcagacagccaagc

SEQ ID NO: 5250904 - DNA, 25 bp, Homo sapien
agccaagcccccactccccacgctg

SEQ ID NO: 5250905 - DNA, 25 bp, Homo sapien
actcccccatcagacagccaagccc

SEQ ID NO: 5250906 - DNA, 25 bp, Homo sapien
acatatgagtgtgctggtcccctgc

SEQ ID NO: 5250907 - DNA, 25 bp, Homo sapien
ggccattacctaaaacgtcagctag

SEQ ID NO: 5250908 - DNA, 25 bp, Homo sapien
caaagtagcaaagtaggcaggtagc

SEQ ID NO: 5250909 - DNA, 25 bp, Homo sapien
tttgagagggtatcgcctaattgcc

SEQ ID NO: 5250910 - DNA, 25 bp, Homo sapien
ttaagctgcaggaggtaacaggcgc

SEQ ID NO: 5250911 - DNA, 25 bp, Homo sapien
tgcttgagatcctacagcccgagga

SEQ ID NO: 5250912 - DNA, 25 bp, Homo sapien
gactctccaagaaatcgaaaccagg

SEQ ID NO: 5250913 - DNA, 25 bp, Homo sapien
tagaagacaataccaatgggtcccc

SEQ ID NO: 5250914 - DNA, 25 bp, Homo sapien
gaacaaataggtgggtgtctccgca

SEQ ID NO: 5250915 - DNA, 25 bp, Homo sapien
tgtgtttcatacgaaggactgcgtc

SEQ ID NO: 5250916 - DNA, 25 bp, Homo sapien
cgctagccagccgaggtgaatcctt

SEQ ID NO: 5250917 - DNA, 25 bp, Homo sapien
ggctctaaatggttccgcaggcaaa

SEQ ID NO: 5250918 - DNA, 25 bp, Homo sapien
aaactgatactacatgacccagaga

SEQ ID NO: 5250919 - DNA, 25 bp, Homo sapien
tgtgtgataacatgcgtggcgcacc

SEQ ID NO: 5250920 - DNA, 25 bp, Homo sapien
gagttcttattgaggcttggtcaca

SEQ ID NO: 5250921 - DNA, 25 bp, Homo sapien
tgggagtcacagatagcgctaacct

SEQ ID NO: 5250922 - DNA, 25 bp, Homo sapien
cggcctctaaggcagcccactgatt

SEQ ID NO: 5250923 - DNA, 25 bp, Homo sapien
ctttcctagcaaaaagctgaaggtg

SEQ ID NO: 5250924 - DNA, 25 bp, Homo sapien
tttcctagcaaaaagctgaaggtgc

SEQ ID NO: 5250925 - DNA, 25 bp, Homo sapien
cccactgattgcttcaagtcaggaa

SEQ ID NO: 5250926 - DNA, 25 bp, Homo sapien
gggcagtggcactggttgtcttcac

SEQ ID NO: 5250927 - DNA, 25 bp, Homo sapien
aaaatggggcagtggcactggttgt

SEQ ID NO: 5250928 - DNA, 25 bp, Homo sapien
tggggcagtggcactggttgtcttc

SEQ ID NO: 5250929 - DNA, 25 bp, Homo sapien
aaatggggcagtggcactggttgtc

SEQ ID NO: 5250930 - DNA, 25 bp, Homo sapien
gagctgttgttccggtgagtgccac

SEQ ID NO: 5250931 - DNA, 25 bp, Homo sapien
ctgggagctgttgttccggtgagtg

SEQ ID NO: 5250932 - DNA, 25 bp, Homo sapien
gttgttccggtgagtgccacactca

SEQ ID NO: 5250933 - DNA, 25 bp, Homo sapien
gctgttgttccggtgagtgccacac

SEQ ID NO: 5250934 - DNA, 25 bp, Homo sapien
tagacatcgaggtagcgcgtggcca

SEQ ID NO: 5250935 - DNA, 25 bp, Homo sapien
ctagacatcgaggtagcgcgtggcc

SEQ ID NO: 5250936 - DNA, 25 bp, Homo sapien
gacatcgaggtagcgcgtggccacc

SEQ ID NO: 5250937 - DNA, 25 bp, Homo sapien
agacatcgaggtagcgcgtggccac

SEQ ID NO: 5250938 - DNA, 25 bp, Homo sapien
catcaaatgacaggtggctcgcttt

SEQ ID NO: 5250939 - DNA, 25 bp, Homo sapien
acaggtggctcgctttacagaggga

SEQ ID NO: 5250940 - DNA, 25 bp, Homo sapien
tcgctttacagagggaggagtgata

SEQ ID NO: 5250941 - DNA, 25 bp, Homo sapien
aatgacaggtggctcgctttacaga

SEQ ID NO: 5250942 - DNA, 25 bp, Homo sapien
gaacaggcaccttgttcacacccgg

SEQ ID NO: 5250943 - DNA, 25 bp, Homo sapien
tacttggaaatctctggaatctggg

SEQ ID NO: 5250944 - DNA, 25 bp, Homo sapien
tcacacccggaaacatctagcgctg

SEQ ID NO: 5250945 - DNA, 25 bp, Homo sapien
tgaggagggcttcaatggatctact

SEQ ID NO: 5250946 - DNA, 25 bp, Homo sapien
cattcccatgggcagcgtattccca

SEQ ID NO: 5250947 - DNA, 25 bp, Homo sapien
cccatgggcagcgtattcccatatc

SEQ ID NO: 5250948 - DNA, 25 bp, Homo sapien
cagctccattcccatgggcagcgta

SEQ ID NO: 5250949 - DNA, 25 bp, Homo sapien
tgggcagcgtattcccatatctcag

SEQ ID NO: 5250950 - DNA, 25 bp, Homo sapien
agaaatcctggcctttctgccccat

SEQ ID NO: 5250951 - DNA, 25 bp, Homo sapien
catagaaatcctggcctttctgccc

SEQ ID NO: 5250952 - DNA, 25 bp, Homo sapien
ccaagccagcatagaaatcctggcc

SEQ ID NO: 5250953 - DNA, 25 bp, Homo sapien
caagccagcatagaaatcctggcct

SEQ ID NO: 5250954 - DNA, 25 bp, Homo sapien
taaatagcatacgttcacagatagc

SEQ ID NO: 5250955 - DNA, 25 bp, Homo sapien
tccaggttctctaaatagcatacgt

SEQ ID NO: 5250956 - DNA, 25 bp, Homo sapien
gagccctgcagtaagggttgggcca

SEQ ID NO: 5250957 - DNA, 25 bp, Homo sapien
cgttcacagatagcacattccaggt

SEQ ID NO: 5250958 - DNA, 25 bp, Homo sapien
ggacatcccgtctcccaagatgacg

SEQ ID NO: 5250959 - DNA, 25 bp, Homo sapien
tgtgggagaccggaagcttgtacca

SEQ ID NO: 5250960 - DNA, 25 bp, Homo sapien
gcttcccgagtaaggagtcagctct

SEQ ID NO: 5250961 - DNA, 25 bp, Homo sapien
tcagaggagaccaaacctaaccacc

SEQ ID NO: 5250962 - DNA, 25 bp, Homo sapien
caacacagcattaaagcaagccggg

SEQ ID NO: 5250963 - DNA, 25 bp, Homo sapien
tctgggaatcaggataaggactcct

SEQ ID NO: 5250964 - DNA, 25 bp, Homo sapien
gcagggccctgtgcaatataaaaat

SEQ ID NO: 5250965 - DNA, 25 bp, Homo sapien
gattccacccgagggatcctgtctg

SEQ ID NO: 5250966 - DNA, 25 bp, Homo sapien
gaggaagcccaactcctatgagctc

SEQ ID NO: 5250967 - DNA, 25 bp, Homo sapien
ggaagcccaactcctatgagctcct

SEQ ID NO: 5250968 - DNA, 25 bp, Homo sapien
taccgctaggacaggtaggaaagga

SEQ ID NO: 5250969 - DNA, 25 bp, Homo sapien
agagaaggaacagaggctaccgcta

SEQ ID NO: 5250970 - DNA, 25 bp, Homo sapien
gagtggagcgcctgtggatttagcc

SEQ ID NO: 5250971 - DNA, 25 bp, Homo sapien
aggacaggacgaagtttttggctgt

SEQ ID NO: 5250972 - DNA, 25 bp, Homo sapien
gatttagccggggacacaccatcct

SEQ ID NO: 5250973 - DNA, 25 bp, Homo sapien
ggacacaccatcctgctcgcaggtg

SEQ ID NO: 5250974 - DNA, 25 bp, Homo sapien
tgagggtctcataagtgtggcatct

SEQ ID NO: 5250975 - DNA, 25 bp, Homo sapien
ccagaagacagagcactcagcggac

SEQ ID NO: 5250976 - DNA, 25 bp, Homo sapien
gcagaaggatgagggtctcataagt

SEQ ID NO: 5250977 - DNA, 25 bp, Homo sapien
ctgatgataggttgcaggaaacagc

SEQ ID NO: 5250978 - DNA, 25 bp, Homo sapien
gagagaaagatcctgggccaagtcc

SEQ ID NO: 5250979 - DNA, 25 bp, Homo sapien
agaccaacacgcaagaaacagaggc

SEQ ID NO: 5250980 - DNA, 25 bp, Homo sapien
ggagagaaagatcctgggccaagtc

SEQ ID NO: 5250981 - DNA, 25 bp, Homo sapien
tggcaggaaagaccaacacgcaaga

SEQ ID NO: 5250982 - DNA, 25 bp, Homo sapien
aacatgaccgctggacagcccaaga

SEQ ID NO: 5250983 - DNA, 25 bp, Homo sapien
gaaccaagcggggtgcaatcccagt

SEQ ID NO: 5250984 - DNA, 25 bp, Homo sapien
cccatccaacatgaccgctggacag

SEQ ID NO: 5250985 - DNA, 25 bp, Homo sapien
ttctgcacacggtcccatccaacat

SEQ ID NO: 5250986 - DNA, 25 bp, Homo sapien
ttttgccaaacccagcccatcaatc

SEQ ID NO: 5250987 - DNA, 25 bp, Homo sapien
agtgcaggccgggtggcattcggca

SEQ ID NO: 5250988 - DNA, 25 bp, Homo sapien
gccagaaagtgacacatgggagctt

SEQ ID NO: 5250989 - DNA, 25 bp, Homo sapien
gattttcgataacctccagctgctt

SEQ ID NO: 5250990 - DNA, 25 bp, Homo sapien
cattcaccaagacaggtggtgctca

SEQ ID NO: 5250991 - DNA, 25 bp, Homo sapien
ttaattctgcctttgcctcggtgga

SEQ ID NO: 5250992 - DNA, 25 bp, Homo sapien
tttcctacatctcaagaccctgctt

SEQ ID NO: 5250993 - DNA, 25 bp, Homo sapien
gaagagaagatgtgtcacctgcagc

SEQ ID NO: 5250994 - DNA, 25 bp, Homo sapien
tgggtgcgtcgtagtctcctctgcg

SEQ ID NO: 5250995 - DNA, 25 bp, Homo sapien
ctctgcgcaggacaatcagctctgc

SEQ ID NO: 5250996 - DNA, 25 bp, Homo sapien
gacaatcagctctgcgtgctcatcc

SEQ ID NO: 5250997 - DNA, 25 bp, Homo sapien
ttgcttgcccgctgttccgcgaagg

SEQ ID NO: 5250998 - DNA, 25 bp, Homo sapien
tgcaaaggtggaccactcccggtag

SEQ ID NO: 5250999 - DNA, 25 bp, Homo sapien
tgtcgtgaagctgcaaacaatgccc

SEQ ID NO: 5251000 - DNA, 25 bp, Homo sapien
tgttgctccgtgacttgcccaggga

SEQ ID NO: 5251001 - DNA, 25 bp, Homo sapien
taatcattggcttcgtacagacacc

SEQ ID NO: 5251002 - DNA, 25 bp, Homo sapien
gaagactggaaccacgcaggaggaa

SEQ ID NO: 5251003 - DNA, 25 bp, Homo sapien
gaactagaaatttgtcaagacctac

SEQ ID NO: 5251004 - DNA, 25 bp, Homo sapien
gaaaggcaggcccttgaggtgggca

SEQ ID NO: 5251005 - DNA, 25 bp, Homo sapien
cagacaaggtgacagctgcgctgca

SEQ ID NO: 5251006 - DNA, 25 bp, Homo sapien
ccgggctccactaatccctgctgtg

SEQ ID NO: 5251007 - DNA, 25 bp, Homo sapien
ccaggtggaacgttgaacaaggctg

SEQ ID NO: 5251008 - DNA, 25 bp, Homo sapien
agtgtgtggatgaggcccgggctcc

SEQ ID NO: 5251009 - DNA, 25 bp, Homo sapien
gctgtgtctgcaccccggttgtggg

SEQ ID NO: 5251010 - DNA, 25 bp, Homo sapien
ctatagggccagttattggaaggct

SEQ ID NO: 5251011 - DNA, 25 bp, Homo sapien
aaggctggccactatttgaccatga

SEQ ID NO: 5251012 - DNA, 25 bp, Homo sapien
ggaaggctggccactatttgaccat

SEQ ID NO: 5251013 - DNA, 25 bp, Homo sapien
cagttattggaaggctggccactat

SEQ ID NO: 5251014 - DNA, 25 bp, Homo sapien
gtgcaggcagggctccacgggtgct

SEQ ID NO: 5251015 - DNA, 25 bp, Homo sapien
tagcaggcatctggctcccaatgtc

SEQ ID NO: 5251016 - DNA, 25 bp, Homo sapien
tagagacgtccatagggtgcaggca

SEQ ID NO: 5251017 - DNA, 25 bp, Homo sapien
ggatgtccctggtcctcaggaagcc

SEQ ID NO: 5251018 - DNA, 25 bp, Homo sapien
aagtctcagcaataggtgtggcaac

SEQ ID NO: 5251019 - DNA, 25 bp, Homo sapien
tgtggcaacaggcaagaacacagcc

SEQ ID NO: 5251020 - DNA, 25 bp, Homo sapien
cagcaataggtgtggcaacaggcaa

SEQ ID NO: 5251021 - DNA, 25 bp, Homo sapien
agaacacagcctgtcgctcccagca

SEQ ID NO: 5251022 - DNA, 25 bp, Homo sapien
tgtcttgttcattgcacgctgcagc

SEQ ID NO: 5251023 - DNA, 25 bp, Homo sapien
gtcttgttcattgcacgctgcagca

SEQ ID NO: 5251024 - DNA, 25 bp, Homo sapien
tcttgttcattgcacgctgcagcag

SEQ ID NO: 5251025 - DNA, 25 bp, Homo sapien
cttgttcattgcacgctgcagcagc

SEQ ID NO: 5251026 - DNA, 25 bp, Homo sapien
aggggcgatccccaaggagtccaag

SEQ ID NO: 5251027 - DNA, 25 bp, Homo sapien
cgggaacatcgctgacaggcacagg

SEQ ID NO: 5251028 - DNA, 25 bp, Homo sapien
gggtctgcgccttgtgactcccggc

SEQ ID NO: 5251029 - DNA, 25 bp, Homo sapien
ctgaacgggtccgggtctgcgcctt

SEQ ID NO: 5251030 - DNA, 25 bp, Homo sapien
tgtctggcaccaggtaggtcctcac

SEQ ID NO: 5251031 - DNA, 25 bp, Homo sapien
ttaacccaattctagaagagaactc

SEQ ID NO: 5251032 - DNA, 25 bp, Homo sapien
tcctcacgatgaggcgggtctccca

SEQ ID NO: 5251033 - DNA, 25 bp, Homo sapien
cccaattctagaagagaactcttta

SEQ ID NO: 5251034 - DNA, 25 bp, Homo sapien
aactgagctgcggagaacttcctca

SEQ ID NO: 5251035 - DNA, 25 bp, Homo sapien
tcattacagaaaccaagcaagagag

SEQ ID NO: 5251036 - DNA, 25 bp, Homo sapien
tggaatgaccggctctggagacgtc

SEQ ID NO: 5251037 - DNA, 25 bp, Homo sapien
cacttctgaagaagcatggcctagc

SEQ ID NO: 5251038 - DNA, 25 bp, Homo sapien
acgcagagcgcgtatgcccgggaga

SEQ ID NO: 5251039 - DNA, 25 bp, Homo sapien
tgatgttgccatggttccagcaggg

SEQ ID NO: 5251040 - DNA, 25 bp, Homo sapien
ctcgctggcacgcacgaggaagctc

SEQ ID NO: 5251041 - DNA, 25 bp, Homo sapien
cgtatgcccgggagatggactcgct

SEQ ID NO: 5251042 - DNA, 25 bp, Homo sapien
gaagctggggtgtaacatcaggcct

SEQ ID NO: 5251043 - DNA, 25 bp, Homo sapien
ggtgtaacatcaggcctcagagtgg

SEQ ID NO: 5251044 - DNA, 25 bp, Homo sapien
cacaaggtccatacagctcatggga

SEQ ID NO: 5251045 - DNA, 25 bp, Homo sapien
gaagccacaaggtccatacagctca

SEQ ID NO: 5251046 - DNA, 25 bp, Homo sapien
agcaggtccccactggggaagtcca

SEQ ID NO: 5251047 - DNA, 25 bp, Homo sapien
ggcagcctgggcctgcgttccttcc

SEQ ID NO: 5251048 - DNA, 25 bp, Homo sapien
gcagcctgggcctgcgttccttccc

SEQ ID NO: 5251049 - DNA, 25 bp, Homo sapien
gtccccactggggaagtccaggcag

SEQ ID NO: 5251050 - DNA, 25 bp, Homo sapien
gtggctcattagtcagccctggaga

SEQ ID NO: 5251051 - DNA, 25 bp, Homo sapien
agtgttagacttaaatgacccagca

SEQ ID NO: 5251052 - DNA, 25 bp, Homo sapien
ccagttatgaaacatccggaaaaga

SEQ ID NO: 5251053 - DNA, 25 bp, Homo sapien
ggccccaaagtccacatgttgtatg

SEQ ID NO: 5251054 - DNA, 25 bp, Homo sapien
gattaaatggacaaacctgtgacaa

SEQ ID NO: 5251055 - DNA, 25 bp, Homo sapien
caaatgcgagtgagctggacagcct

SEQ ID NO: 5251056 - DNA, 25 bp, Homo sapien
cctgtgacaaacagaatcaaggaaa

SEQ ID NO: 5251057 - DNA, 25 bp, Homo sapien
ggaaagaaacaaatgcgagtgagct

SEQ ID NO: 5251058 - DNA, 25 bp, Homo sapien
acagcttgagggtccagcgggctat

SEQ ID NO: 5251059 - DNA, 25 bp, Homo sapien
cgggctattcctcgtctgacagcta

SEQ ID NO: 5251060 - DNA, 25 bp, Homo sapien
gcaaccttgggaaacaaactgttca

SEQ ID NO: 5251061 - DNA, 25 bp, Homo sapien
gacaagcccgtggaagtaggaagaa

SEQ ID NO: 5251062 - DNA, 25 bp, Homo sapien
tccagagcctgaattgatacaatcg

SEQ ID NO: 5251063 - DNA, 25 bp, Homo sapien
catcagagatagcaaggatgaatct

SEQ ID NO: 5251064 - DNA, 25 bp, Homo sapien
ggatgaatctctagtccagtgacac

SEQ ID NO: 5251065 - DNA, 25 bp, Homo sapien
gatacaatcgtcttgcatcagagat

SEQ ID NO: 5251066 - DNA, 25 bp, Homo sapien
gcaatcgtgggctgaggcactctta

SEQ ID NO: 5251067 - DNA, 25 bp, Homo sapien
tctcggctgccaagaagatagagca

SEQ ID NO: 5251068 - DNA, 25 bp, Homo sapien
tgagtcctgacgtccagcaatcgtg

SEQ ID NO: 5251069 - DNA, 25 bp, Homo sapien
gatctgatctaaaggagtctgccac

SEQ ID NO: 5251070 - DNA, 25 bp, Homo sapien
tgtaagtgtaaacgcaattccgata

SEQ ID NO: 5251071 - DNA, 25 bp, Homo sapien
cagaattctgtaagtgtaaacgcaa

SEQ ID NO: 5251072 - DNA, 25 bp, Homo sapien
ttctgtaagtgtaaacgcaattccg

SEQ ID NO: 5251073 - DNA, 25 bp, Homo sapien
ggcagaattctgtaagtgtaaacgc

SEQ ID NO: 5251074 - DNA, 25 bp, Homo sapien
ctgaacagtgaatttatcatcttca

SEQ ID NO: 5251075 - DNA, 25 bp, Homo sapien
tatcggctgaagtcaggttcagatt

SEQ ID NO: 5251076 - DNA, 25 bp, Homo sapien
cttccttcctcatcgtttacaccct

SEQ ID NO: 5251077 - DNA, 25 bp, Homo sapien
ttcctcatcgtttacaccctttctc

SEQ ID NO: 5251078 - DNA, 25 bp, Homo sapien
tttctctgccagtatcggctgaagt

SEQ ID NO: 5251079 - DNA, 25 bp, Homo sapien
tatgacacgtgggccaactccatga

SEQ ID NO: 5251080 - DNA, 25 bp, Homo sapien
ctatgacacgtgggccaactccatg

SEQ ID NO: 5251081 - DNA, 25 bp, Homo sapien
ttctgcagtagacagaaaaaccaat

SEQ ID NO: 5251082 - DNA, 25 bp, Homo sapien
gattttgagcgaacagttggttcca

SEQ ID NO: 5251083 - DNA, 25 bp, Homo sapien
caggcttctagaaggtgagtgtcag

SEQ ID NO: 5251084 - DNA, 25 bp, Homo sapien
caaattactcttgaatgtgtagaca

SEQ ID NO: 5251085 - DNA, 25 bp, Homo sapien
gaagctgatctcgaagggcaaagtc

SEQ ID NO: 5251086 - DNA, 25 bp, Homo sapien
tctatttggcaaacccgaagtggcc

SEQ ID NO: 5251087 - DNA, 25 bp, Homo sapien
gaagtggcctcttgcaaatctgaca

SEQ ID NO: 5251088 - DNA, 25 bp, Homo sapien
tgacagacacaattagacccggaag

SEQ ID NO: 5251089 - DNA, 25 bp, Homo sapien
cccaggctgcagggcacagagccac

SEQ ID NO: 5251090 - DNA, 25 bp, Homo sapien
cctccagcccagcgccccaggctgc

SEQ ID NO: 5251091 - DNA, 25 bp, Homo sapien
ggctgcagggcacagagccacagca

SEQ ID NO: 5251092 - DNA, 25 bp, Homo sapien
caggctgcagggcacagagccacag

SEQ ID NO: 5251093 - DNA, 25 bp, Homo sapien
cactcgggcgactgagacccttgtt

SEQ ID NO: 5251094 - DNA, 25 bp, Homo sapien
cagggcagactaaagttaacctcaa

SEQ ID NO: 5251095 - DNA, 25 bp, Homo sapien
acctcaaaggttttgtgggcactga

SEQ ID NO: 5251096 - DNA, 25 bp, Homo sapien
taccaccccacaatgcgaggatgtg

SEQ ID NO: 5251097 - DNA, 25 bp, Homo sapien
tgtgtgagggcgctgagaactcttt

SEQ ID NO: 5251098 - DNA, 25 bp, Homo sapien
gtgcccgaccccaagtgactttgaa

SEQ ID NO: 5251099 - DNA, 25 bp, Homo sapien
tctgcttgttggaatgtccgttttc

SEQ ID NO: 5251100 - DNA, 25 bp, Homo sapien
taaaggctgggactatgttctcatg

SEQ ID NO: 5251101 - DNA, 25 bp, Homo sapien
cctgagacgctcttctttccagctt

SEQ ID NO: 5251102 - DNA, 25 bp, Homo sapien
ttaattacatatccctgagacgctc

SEQ ID NO: 5251103 - DNA, 25 bp, Homo sapien
tgagacgctcttctttccagcttgc

SEQ ID NO: 5251104 - DNA, 25 bp, Homo sapien
catatccctgagacgctcttctttc

SEQ ID NO: 5251105 - DNA, 25 bp, Homo sapien
tcatccagcggaaatctactaagcc

SEQ ID NO: 5251106 - DNA, 25 bp, Homo sapien
ttcatccagcggaaatctactaagc

SEQ ID NO: 5251107 - DNA, 25 bp, Homo sapien
tttcatccagcggaaatctactaag

SEQ ID NO: 5251108 - DNA, 25 bp, Homo sapien
tacctgccgggatcaagcatttctc

SEQ ID NO: 5251109 - DNA, 25 bp, Homo sapien
aaacatcgggataaaatcaatttga

SEQ ID NO: 5251110 - DNA, 25 bp, Homo sapien
acctctacctgccgggatcaagcat

SEQ ID NO: 5251111 - DNA, 25 bp, Homo sapien
taaacatcgggataaaatcaatttg

SEQ ID NO: 5251112 - DNA, 25 bp, Homo sapien
tatgggttgtcattctttgtgcagc

SEQ ID NO: 5251113 - DNA, 25 bp, Homo sapien
atgggttgtcattctttgtgcagca

SEQ ID NO: 5251114 - DNA, 25 bp, Homo sapien
gtagtgtggtcaaggcatacatggg

SEQ ID NO: 5251115 - DNA, 25 bp, Homo sapien
atggggtgttttgcagcagccagaa

SEQ ID NO: 5251116 - DNA, 25 bp, Homo sapien
taagtgcctgtcagacacctgcaca

SEQ ID NO: 5251117 - DNA, 25 bp, Homo sapien
taccggggtaagtgcctgtcagaca

SEQ ID NO: 5251118 - DNA, 25 bp, Homo sapien
gcctgtcagacacctgcacattagg

SEQ ID NO: 5251119 - DNA, 25 bp, Homo sapien
gggtaagtgcctgtcagacacctgc

SEQ ID NO: 5251120 - DNA, 25 bp, Homo sapien
aggaactgtgcccaattaaaggaca

SEQ ID NO: 5251121 - DNA, 25 bp, Homo sapien
tcatcctggattgagcctcagccca

SEQ ID NO: 5251122 - DNA, 25 bp, Homo sapien
agcctattctattgaaaaatgccaa

SEQ ID NO: 5251123 - DNA, 25 bp, Homo sapien
tattagcctattctattgaaaaatg

SEQ ID NO: 5251124 - DNA, 25 bp, Homo sapien
atccttattgtaacctggcagccac

SEQ ID NO: 5251125 - DNA, 25 bp, Homo sapien
tagtaactttacaatccttattgta

SEQ ID NO: 5251126 - DNA, 25 bp, Homo sapien
ggcagccaccagcttaaccaagtgt

SEQ ID NO: 5251127 - DNA, 25 bp, Homo sapien
tgcatcaccacgtttggctaaattt

SEQ ID NO: 5251128 - DNA, 25 bp, Homo sapien
ggccaggtccatatccacccagctg

SEQ ID NO: 5251129 - DNA, 25 bp, Homo sapien
gccaggtccatatccacccagctgt

SEQ ID NO: 5251130 - DNA, 25 bp, Homo sapien
caggtccatatccacccagctgtgt

SEQ ID NO: 5251131 - DNA, 25 bp, Homo sapien
ccaggtccatatccacccagctgtg

SEQ ID NO: 5251132 - DNA, 25 bp, Homo sapien
gtggacagtgtattgacatccacag

SEQ ID NO: 5251133 - DNA, 25 bp, Homo sapien
cttccaggtggacagtgtattgaca

SEQ ID NO: 5251134 - DNA, 25 bp, Homo sapien
gcaggagtaggtgggtcctgctggg

SEQ ID NO: 5251135 - DNA, 25 bp, Homo sapien
caggtggacagtgtattgacatcca

SEQ ID NO: 5251136 - DNA, 25 bp, Homo sapien
gggtcaggctgttggtaggtacagg

SEQ ID NO: 5251137 - DNA, 25 bp, Homo sapien
ggggtcaggctgttggtaggtacag

SEQ ID NO: 5251138 - DNA, 25 bp, Homo sapien
ttggtaggtacaggaatgagcccca

SEQ ID NO: 5251139 - DNA, 25 bp, Homo sapien
gtaggtacaggaatgagccccaaag

SEQ ID NO: 5251140 - DNA, 25 bp, Homo sapien
tcttgccaggccctgccctcagggg

SEQ ID NO: 5251141 - DNA, 25 bp, Homo sapien
tgccaggccctgccctcaggggcag

SEQ ID NO: 5251142 - DNA, 25 bp, Homo sapien
ttgccaggccctgccctcaggggca

SEQ ID NO: 5251143 - DNA, 25 bp, Homo sapien
cttcttgccaggccctgccctcagg

SEQ ID NO: 5251144 - DNA, 25 bp, Homo sapien
tcctcagggtcgtcgcctgtgtcct

SEQ ID NO: 5251145 - DNA, 25 bp, Homo sapien
cttcttgtaaaactcgatgagctgg

SEQ ID NO: 5251146 - DNA, 25 bp, Homo sapien
ttcctccagcggcacagggtattgc

SEQ ID NO: 5251147 - DNA, 25 bp, Homo sapien
agggtattgcagatgggtcaccagc

SEQ ID NO: 5251148 - DNA, 25 bp, Homo sapien
tctttagagaacaggcccttcactt

SEQ ID NO: 5251149 - DNA, 25 bp, Homo sapien
ccatcgcctttaggagaaggttcat

SEQ ID NO: 5251150 - DNA, 25 bp, Homo sapien
gaaggttcattctgtacgtacacga

SEQ ID NO: 5251151 - DNA, 25 bp, Homo sapien
cacgaatggagggtccagagctctg

SEQ ID NO: 5251152 - DNA, 25 bp, Homo sapien
ccacgttattgatctccatctgcgt

SEQ ID NO: 5251153 - DNA, 25 bp, Homo sapien
tgcgtccccgtgtccctcgctgact

SEQ ID NO: 5251154 - DNA, 25 bp, Homo sapien
ctgtgcgcacaacccggccttcacc

SEQ ID NO: 5251155 - DNA, 25 bp, Homo sapien
caggccacgacacccacgttattga

SEQ ID NO: 5251156 - DNA, 25 bp, Homo sapien
tggagagaacagcaggaaggccatt

SEQ ID NO: 5251157 - DNA, 25 bp, Homo sapien
agaacagcaggaaggccattggtga

SEQ ID NO: 5251158 - DNA, 25 bp, Homo sapien
ctggagagaacagcaggaaggccat

SEQ ID NO: 5251159 - DNA, 25 bp, Homo sapien
agcaggaaggccattggtgaggaca

SEQ ID NO: 5251160 - DNA, 25 bp, Homo sapien
tgcagtcgctggaacaatgtctcgg

SEQ ID NO: 5251161 - DNA, 25 bp, Homo sapien
gctggcagtcagcgggatgtttctt

SEQ ID NO: 5251162 - DNA, 25 bp, Homo sapien
cactggtgtccatgctttgcagtcg

SEQ ID NO: 5251163 - DNA, 25 bp, Homo sapien
aatgtctcggagaggctcggccggc

SEQ ID NO: 5251164 - DNA, 25 bp, Homo sapien
agtcctgggcgagctgagtgcttaa

SEQ ID NO: 5251165 - DNA, 25 bp, Homo sapien
atcttggatggccttaagatgctct

SEQ ID NO: 5251166 - DNA, 25 bp, Homo sapien
cttggatggccttaagatgctcttc

SEQ ID NO: 5251167 - DNA, 25 bp, Homo sapien
gagctgagtgcttaaataatcttgg

SEQ ID NO: 5251168 - DNA, 25 bp, Homo sapien
cctgcccgcccccgtgggccagcca

SEQ ID NO: 5251169 - DNA, 25 bp, Homo sapien
ctggtggccgcccccacctgcccgc

SEQ ID NO: 5251170 - DNA, 25 bp, Homo sapien
tggtggccgcccccacctgcccgcc

SEQ ID NO: 5251171 - DNA, 25 bp, Homo sapien
ccacctgcccgcccccgtgggccag

SEQ ID NO: 5251172 - DNA, 25 bp, Homo sapien
cgaatgtactgatcgtgcttttaaa

SEQ ID NO: 5251173 - DNA, 25 bp, Homo sapien
cccatgattccccaaatgcatcccc

SEQ ID NO: 5251174 - DNA, 25 bp, Homo sapien
gctttcagtgattccccatatgcat

SEQ ID NO: 5251175 - DNA, 25 bp, Homo sapien
catggctggtgactccactcagatg

SEQ ID NO: 5251176 - DNA, 25 bp, Homo sapien
tcttagcactagctccatggctggt

SEQ ID NO: 5251177 - DNA, 25 bp, Homo sapien
tattttatggcctccaatgaaacag

SEQ ID NO: 5251178 - DNA, 25 bp, Homo sapien
catatcctgccagctacaggtagca

SEQ ID NO: 5251179 - DNA, 25 bp, Homo sapien
gatatacatgtttctgacactctac

SEQ ID NO: 5251180 - DNA, 25 bp, Homo sapien
caaggactgtccatttttaccacac

SEQ ID NO: 5251181 - DNA, 25 bp, Homo sapien
agttgctcagcagagatttcttaaa

SEQ ID NO: 5251182 - DNA, 25 bp, Homo sapien
cagtttttcctgatgtatctctgtt

SEQ ID NO: 5251183 - DNA, 25 bp, Homo sapien
gttcatgaatatcgaataaatcaac

SEQ ID NO: 5251184 - DNA, 25 bp, Homo sapien
ttgcagatagttggtacacattgga

SEQ ID NO: 5251185 - DNA, 25 bp, Homo sapien
tttggagtgacctagataaagcctc

SEQ ID NO: 5251186 - DNA, 25 bp, Homo sapien
taataagtgaaatcagagatagaga

SEQ ID NO: 5251187 - DNA, 25 bp, Homo sapien
atttgctgggatgttactgaaacaa

SEQ ID NO: 5251188 - DNA, 25 bp, Homo sapien
tgttatctatgtaaatggtttccgt

SEQ ID NO: 5251189 - DNA, 25 bp, Homo sapien
ccctgcacattacactttgcaaagg

SEQ ID NO: 5251190 - DNA, 25 bp, Homo sapien
ctccctgcacattacactttgcaaa

SEQ ID NO: 5251191 - DNA, 25 bp, Homo sapien
aagggcagacagacttagaaaggcc

SEQ ID NO: 5251192 - DNA, 25 bp, Homo sapien
gatggaagggcagacagacttagaa

SEQ ID NO: 5251193 - DNA, 25 bp, Homo sapien
tgttccaggtgccgatgaagatggt

SEQ ID NO: 5251194 - DNA, 25 bp, Homo sapien
aagatggtgatcatgtcgggctccg

SEQ ID NO: 5251195 - DNA, 25 bp, Homo sapien
atgttccaggtgccgatgaagatgg

SEQ ID NO: 5251196 - DNA, 25 bp, Homo sapien
atggtgatcatgtcgggctccggct

SEQ ID NO: 5251197 - DNA, 25 bp, Homo sapien
taaatggactgtggctaaattctgc

SEQ ID NO: 5251198 - DNA, 25 bp, Homo sapien
gcccttgaaggatgagcaaactttg

SEQ ID NO: 5251199 - DNA, 25 bp, Homo sapien
caagaggctcaaagtgggtgcccga

SEQ ID NO: 5251200 - DNA, 25 bp, Homo sapien
ggttctccctacaatgcccttgaag

SEQ ID NO: 5251201 - DNA, 25 bp, Homo sapien
ggtcctcttgggtgccgatcacgta

SEQ ID NO: 5251202 - DNA, 25 bp, Homo sapien
accaggacgtgatcttcttgggagg

SEQ ID NO: 5251203 - DNA, 25 bp, Homo sapien
gtccgcagagtcgtcccgcgtcttt

SEQ ID NO: 5251204 - DNA, 25 bp, Homo sapien
ttggagagaaaccaggacgtgatct

SEQ ID NO: 5251205 - DNA, 25 bp, Homo sapien
tccggttctcgtgctcaggcttggc

SEQ ID NO: 5251206 - DNA, 25 bp, Homo sapien
tgtcttcacgttgtcagtacagatg

SEQ ID NO: 5251207 - DNA, 25 bp, Homo sapien
cagcaccacgatgcggatgttccag

SEQ ID NO: 5251208 - DNA, 25 bp, Homo sapien
tgttccagagcgtgtggatggcgac

SEQ ID NO: 5251209 - DNA, 25 bp, Homo sapien
gaaggtctcactggtaacacagtca

SEQ ID NO: 5251210 - DNA, 25 bp, Homo sapien
gggtggtacgctcacacattgactc

SEQ ID NO: 5251211 - DNA, 25 bp, Homo sapien
tcctgcaaaagttggccaatgcctc

SEQ ID NO: 5251212 - DNA, 25 bp, Homo sapien
aagtcgcctgggaacctgtcagaaa

SEQ ID NO: 5251213 - DNA, 25 bp, Homo sapien
ctgatctattctaggtcagtggttc

SEQ ID NO: 5251214 - DNA, 25 bp, Homo sapien
tctgatctattctaggtcagtggtt

SEQ ID NO: 5251215 - DNA, 25 bp, Homo sapien
tgatctattctaggtcagtggttcc

SEQ ID NO: 5251216 - DNA, 25 bp, Homo sapien
tggctgttgacgaaccctaaggagg

SEQ ID NO: 5251217 - DNA, 25 bp, Homo sapien
attgaacatgaacgacacccccacg

SEQ ID NO: 5251218 - DNA, 25 bp, Homo sapien
tcctgaagtcaagtggctgttgacg

SEQ ID NO: 5251219 - DNA, 25 bp, Homo sapien
aagtcaagtggctgttgacgaaccc

SEQ ID NO: 5251220 - DNA, 25 bp, Homo sapien
taatgcaaggaaaaagcggccatct

SEQ ID NO: 5251221 - DNA, 25 bp, Homo sapien
tagaaacagtgctagttagcggtcc

SEQ ID NO: 5251222 - DNA, 25 bp, Homo sapien
cagcttggatttgtaaggaggcccc

SEQ ID NO: 5251223 - DNA, 25 bp, Homo sapien
gaactccttagtgtgcaaatatggc

SEQ ID NO: 5251224 - DNA, 25 bp, Homo sapien
gatgttaaagggactcagcttcttg

SEQ ID NO: 5251225 - DNA, 25 bp, Homo sapien
tccacacggtagttaagatccccaa

SEQ ID NO: 5251226 - DNA, 25 bp, Homo sapien
ccagggccaggaaccggagaatgtt

SEQ ID NO: 5251227 - DNA, 25 bp, Homo sapien
caggtaggcagatccacacggtagt

SEQ ID NO: 5251228 - DNA, 25 bp, Homo sapien
tccaggcctgacaagcttcggggct

SEQ ID NO: 5251229 - DNA, 25 bp, Homo sapien
acatgcccgggcctctggtgagaag

SEQ ID NO: 5251230 - DNA, 25 bp, Homo sapien
ctggaacaagaacatgcccgggcct

SEQ ID NO: 5251231 - DNA, 25 bp, Homo sapien
tgggggcgggcagctggatgacccg

SEQ ID NO: 5251232 - DNA, 25 bp, Homo sapien
tcgtgggacaggaggtctgcgtact

SEQ ID NO: 5251233 - DNA, 25 bp, Homo sapien
ggtcgtgggacaggaggtctgcgta

SEQ ID NO: 5251234 - DNA, 25 bp, Homo sapien
tgggacaggaggtctgcgtactgct

SEQ ID NO: 5251235 - DNA, 25 bp, Homo sapien
caggaggtctgcgtactgctgctgc

SEQ ID NO: 5251236 - DNA, 25 bp, Homo sapien
caccgctcccagccggggttgctgc

SEQ ID NO: 5251237 - DNA, 25 bp, Homo sapien
gccaccgctcccagccggggttgct

SEQ ID NO: 5251238 - DNA, 25 bp, Homo sapien
gctcccagccggggttgctgctctt

SEQ ID NO: 5251239 - DNA, 25 bp, Homo sapien
tcccagccggggttgctgctcttac

SEQ ID NO: 5251240 - DNA, 25 bp, Homo sapien
tggggcaaacgtgatttcttcctcc

SEQ ID NO: 5251241 - DNA, 25 bp, Homo sapien
ctgcttggtgtaggcgtatttgtcc

SEQ ID NO: 5251242 - DNA, 25 bp, Homo sapien
taggcgtatttgtcccgagtcagtc

SEQ ID NO: 5251243 - DNA, 25 bp, Homo sapien
cagtctctcaaaacggtaggttggg

SEQ ID NO: 5251244 - DNA, 25 bp, Homo sapien
ccttttgggaacagacaccagcggg

SEQ ID NO: 5251245 - DNA, 25 bp, Homo sapien
ggagggcagggaaggtgtctatgaa

SEQ ID NO: 5251246 - DNA, 25 bp, Homo sapien
tctgttcaccttttgggaacagaca

SEQ ID NO: 5251247 - DNA, 25 bp, Homo sapien
gcagggaaggtgtctatgaagagga

SEQ ID NO: 5251248 - DNA, 25 bp, Homo sapien
agaggactcggtcacaccaggaagg

SEQ ID NO: 5251249 - DNA, 25 bp, Homo sapien
ggggataagacttccagaggactcg

SEQ ID NO: 5251250 - DNA, 25 bp, Homo sapien
ataagactgacacaccacgtgcacc

SEQ ID NO: 5251251 - DNA, 25 bp, Homo sapien
accaggggataagacttccagagga

SEQ ID NO: 5251252 - DNA, 25 bp, Homo sapien
ctcgtcatgatgtcgctggtactgc

SEQ ID NO: 5251253 - DNA, 25 bp, Homo sapien
tggtcactcgtcatgatgtcgctgg

SEQ ID NO: 5251254 - DNA, 25 bp, Homo sapien
gggctgtggtcactcgtcatgatgt

SEQ ID NO: 5251255 - DNA, 25 bp, Homo sapien
tgtggtcactcgtcatgatgtcgct

SEQ ID NO: 5251256 - DNA, 25 bp, Homo sapien
tggtcttcaatgtggcatagcacct

SEQ ID NO: 5251257 - DNA, 25 bp, Homo sapien
caatgtggcatagcacctgagaaac

SEQ ID NO: 5251258 - DNA, 25 bp, Homo sapien
agcagctcgagtggaactccaggta

SEQ ID NO: 5251259 - DNA, 25 bp, Homo sapien
tccaggtagaatttggtctgggact

SEQ ID NO: 5251260 - DNA, 25 bp, Homo sapien
gggacccctcacaataactgagtgt

SEQ ID NO: 5251261 - DNA, 25 bp, Homo sapien
ggaacctagagtgggtcacagtcca

SEQ ID NO: 5251262 - DNA, 25 bp, Homo sapien
ttggaccctgcttgccacctacaag

SEQ ID NO: 5251263 - DNA, 25 bp, Homo sapien
tgagtgtccccttgagtcatccacc

SEQ ID NO: 5251264 - DNA, 25 bp, Homo sapien
ttggaagagtctcaccaaacttcac

SEQ ID NO: 5251265 - DNA, 25 bp, Homo sapien
taggattcgtcgctgtcagaggact

SEQ ID NO: 5251266 - DNA, 25 bp, Homo sapien
cataggattcgtcgctgtcagagga

SEQ ID NO: 5251267 - DNA, 25 bp, Homo sapien
ataggattcgtcgctgtcagaggac

SEQ ID NO: 5251268 - DNA, 25 bp, Homo sapien
gtctgcagcttgatctccccctgga

SEQ ID NO: 5251269 - DNA, 25 bp, Homo sapien
ggcctgtcaactccccatggtgggt

SEQ ID NO: 5251270 - DNA, 25 bp, Homo sapien
tctccctcgtcttgccctgagaggt

SEQ ID NO: 5251271 - DNA, 25 bp, Homo sapien
cagctgcgtttctgtggcctctaac

SEQ ID NO: 5251272 - DNA, 25 bp, Homo sapien
tcatggggtcgtggctggtgaggct

SEQ ID NO: 5251273 - DNA, 25 bp, Homo sapien
tcatcacgctccgtcttcacaaagt

SEQ ID NO: 5251274 - DNA, 25 bp, Homo sapien
cactggattcatcacgctccgtctt

SEQ ID NO: 5251275 - DNA, 25 bp, Homo sapien
gacttcccactgcttcatggggtcg

SEQ ID NO: 5251276 - DNA, 25 bp, Homo sapien
gacaaggtctgcttcacgtgcaggg

SEQ ID NO: 5251277 - DNA, 25 bp, Homo sapien
agggagaccccggtttgctgttgag

SEQ ID NO: 5251278 - DNA, 25 bp, Homo sapien
aaacttcttgggtgatatgggcggc

SEQ ID NO: 5251279 - DNA, 25 bp, Homo sapien
tgggcggctggtcgtagctccaggc

SEQ ID NO: 5251280 - DNA, 25 bp, Homo sapien
cctacaggagagactaggaagctgc

SEQ ID NO: 5251281 - DNA, 25 bp, Homo sapien
ggaacctcatggtcgagaaaaaaga

SEQ ID NO: 5251282 - DNA, 25 bp, Homo sapien
gatgcccaaaggttaactagctcta

SEQ ID NO: 5251283 - DNA, 25 bp, Homo sapien
tgcgagcaggctctacatggaaact

SEQ ID NO: 5251284 - DNA, 25 bp, Homo sapien
tagagcatatctcgcatattttgag

SEQ ID NO: 5251285 - DNA, 25 bp, Homo sapien
ggcctatccgtttcttagagcatat

SEQ ID NO: 5251286 - DNA, 25 bp, Homo sapien
gagcatatctcgcatattttgagaa

SEQ ID NO: 5251287 - DNA, 25 bp, Homo sapien
gcctggcctatccgtttcttagagc

SEQ ID NO: 5251288 - DNA, 25 bp, Homo sapien
gtgtgctcgttgttatgcaccaaga

SEQ ID NO: 5251289 - DNA, 25 bp, Homo sapien
gttgttatgcaccaagatccattcg

SEQ ID NO: 5251290 - DNA, 25 bp, Homo sapien
gcccgtggatggcagcctgtctgca

SEQ ID NO: 5251291 - DNA, 25 bp, Homo sapien
ccaagctgtgtgctcgttgttatgc

SEQ ID NO: 5251292 - DNA, 25 bp, Homo sapien
caagaaattgactcctatagcaggc

SEQ ID NO: 5251293 - DNA, 25 bp, Homo sapien
gaaacactgatggtgcttggaacac

SEQ ID NO: 5251294 - DNA, 25 bp, Homo sapien
actgggacagtacttggcaaaccgg

SEQ ID NO: 5251295 - DNA, 25 bp, Homo sapien
aagagtccccttcctaattgcacag

SEQ ID NO: 5251296 - DNA, 25 bp, Homo sapien
agagcagggaagacacatgtccagg

SEQ ID NO: 5251297 - DNA, 25 bp, Homo sapien
tgtgcccagcctagcaaactgttca

SEQ ID NO: 5251298 - DNA, 25 bp, Homo sapien
attgctgggagtagcaatgcctcca

SEQ ID NO: 5251299 - DNA, 25 bp, Homo sapien
gagaacttacatggcacctcagtat

SEQ ID NO: 5251300 - DNA, 25 bp, Homo sapien
aaggaactcagggacccatacaggg

SEQ ID NO: 5251301 - DNA, 25 bp, Homo sapien
aaacatctcgggcttcgtcagcggc

SEQ ID NO: 5251302 - DNA, 25 bp, Homo sapien
tgagcacgatgctgggcgacaagat

SEQ ID NO: 5251303 - DNA, 25 bp, Homo sapien
tccgatctggaaggcttgatgggcc

SEQ ID NO: 5251304 - DNA, 25 bp, Homo sapien
catgctgtgggctaggccaggcttc

SEQ ID NO: 5251305 - DNA, 25 bp, Homo sapien
gaagggctgtcagggctcattctca

SEQ ID NO: 5251306 - DNA, 25 bp, Homo sapien
tgtgcctggcgaaactcagttgcaa

SEQ ID NO: 5251307 - DNA, 25 bp, Homo sapien
tgttgaactaagtggcccaggtccc

SEQ ID NO: 5251308 - DNA, 25 bp, Homo sapien
gctgcactatttcaagagcctggaa

SEQ ID NO: 5251309 - DNA, 25 bp, Homo sapien
gaggccagatctctccactggagaa

SEQ ID NO: 5251310 - DNA, 25 bp, Homo sapien
catgagtgttcgatccatgtggcca

SEQ ID NO: 5251311 - DNA, 25 bp, Homo sapien
tggtgctaagtctcacaggcagtga

SEQ ID NO: 5251312 - DNA, 25 bp, Homo sapien
atcatgggaatgtggggtgcattcc

SEQ ID NO: 5251313 - DNA, 25 bp, Homo sapien
tgggaatgtggggtgcattcccttc

SEQ ID NO: 5251314 - DNA, 25 bp, Homo sapien
tcatgggaatgtggggtgcattccc

SEQ ID NO: 5251315 - DNA, 25 bp, Homo sapien
gaatgtggggtgcattcccttctgc

SEQ ID NO: 5251316 - DNA, 25 bp, Homo sapien
aaaggcacaatttattggttacgca

SEQ ID NO: 5251317 - DNA, 25 bp, Homo sapien
caatttattggttacgcagacttcc

SEQ ID NO: 5251318 - DNA, 25 bp, Homo sapien
gcacaatttattggttacgcagact

SEQ ID NO: 5251319 - DNA, 25 bp, Homo sapien
ggcacaatttattggttacgcagac

SEQ ID NO: 5251320 - DNA, 25 bp, Homo sapien
gaatgtcaggaaaaacgccacacac

SEQ ID NO: 5251321 - DNA, 25 bp, Homo sapien
gatatctatggctccgaatgtcagg

SEQ ID NO: 5251322 - DNA, 25 bp, Homo sapien
tgcaggccctgccatctagaaggat

SEQ ID NO: 5251323 - DNA, 25 bp, Homo sapien
taactgcctcagttgtgccctgtgc

SEQ ID NO: 5251324 - DNA, 25 bp, Homo sapien
gcctgtgcatcggcctcttctggaa

SEQ ID NO: 5251325 - DNA, 25 bp, Homo sapien
tggcctgtgcatcggcctcttctgg

SEQ ID NO: 5251326 - DNA, 25 bp, Homo sapien
ggcctgtgcatcggcctcttctgga

SEQ ID NO: 5251327 - DNA, 25 bp, Homo sapien
cctgtgcatcggcctcttctggaag

SEQ ID NO: 5251328 - DNA, 25 bp, Homo sapien
gtccagaaacgaaggagtcaccttg

SEQ ID NO: 5251329 - DNA, 25 bp, Homo sapien
tgagaagggcttgtaaatggtaaaa

SEQ ID NO: 5251330 - DNA, 25 bp, Homo sapien
ttgagaagggcttgtaaatggtaaa

SEQ ID NO: 5251331 - DNA, 25 bp, Homo sapien
ccagaaacgaaggagtcaccttgag

SEQ ID NO: 5251332 - DNA, 25 bp, Homo sapien
cctgccgcttgtcagatctggggcc

SEQ ID NO: 5251333 - DNA, 25 bp, Homo sapien
ggccctgccgcttgtcagatctggg

SEQ ID NO: 5251334 - DNA, 25 bp, Homo sapien
ccaaggccctgccgcttgtcagatc

SEQ ID NO: 5251335 - DNA, 25 bp, Homo sapien
aaggccctgccgcttgtcagatctg

SEQ ID NO: 5251336 - DNA, 25 bp, Homo sapien
acaggtgtcacaaatggtgtggcct

SEQ ID NO: 5251337 - DNA, 25 bp, Homo sapien
ggtgtcacaaatggtgtggcctgca

SEQ ID NO: 5251338 - DNA, 25 bp, Homo sapien
tgtcacaaatggtgtggcctgcagg

SEQ ID NO: 5251339 - DNA, 25 bp, Homo sapien
tcacaaatggtgtggcctgcaggag

SEQ ID NO: 5251340 - DNA, 25 bp, Homo sapien
cggcacatgggtgctgggactgtgg

SEQ ID NO: 5251341 - DNA, 25 bp, Homo sapien
actgtggctgtgcttggtggctgtg

SEQ ID NO: 5251342 - DNA, 25 bp, Homo sapien
tgctgctgcaggtgccgtgccgctc

SEQ ID NO: 5251343 - DNA, 25 bp, Homo sapien
cacatgggtgctgggactgtggctg

SEQ ID NO: 5251344 - DNA, 25 bp, Homo sapien
atggggaatgagtgatggacctcac

SEQ ID NO: 5251345 - DNA, 25 bp, Homo sapien
cggattgtagaaggcatccgaggat

SEQ ID NO: 5251346 - DNA, 25 bp, Homo sapien
tcatcggtggtcggacaggattccg

SEQ ID NO: 5251347 - DNA, 25 bp, Homo sapien
gacaggattccggtcctgtagaccg

SEQ ID NO: 5251348 - DNA, 25 bp, Homo sapien
tagttcctccaggagttagcctgca

SEQ ID NO: 5251349 - DNA, 25 bp, Homo sapien
gagttagcctgcaagatggaggcac

SEQ ID NO: 5251350 - DNA, 25 bp, Homo sapien
caggtcccccattgctttgtgtgag

SEQ ID NO: 5251351 - DNA, 25 bp, Homo sapien
ctgcaagatggaggcacacttgtcc

SEQ ID NO: 5251352 - DNA, 25 bp, Homo sapien
tgtgtttggtgtcagaattcggatc

SEQ ID NO: 5251353 - DNA, 25 bp, Homo sapien
gtgtgtttggtgtcagaattcggat

SEQ ID NO: 5251354 - DNA, 25 bp, Homo sapien
gaactgctctgtggcagttgtccac

SEQ ID NO: 5251355 - DNA, 25 bp, Homo sapien
ggccctgaagtattattgcttgtgc

SEQ ID NO: 5251356 - DNA, 25 bp, Homo sapien
gagtgtttgccaggctcttgttctg

SEQ ID NO: 5251357 - DNA, 25 bp, Homo sapien
tggcaaagttcatcccagaagctgc

SEQ ID NO: 5251358 - DNA, 25 bp, Homo sapien
tctttgacagttgggccctgaagta

SEQ ID NO: 5251359 - DNA, 25 bp, Homo sapien
ttctaacctctcagttgttcttggt

SEQ ID NO: 5251360 - DNA, 25 bp, Homo sapien
gaggtcaaagtaactttaatctaca

SEQ ID NO: 5251361 - DNA, 25 bp, Homo sapien
ggtcagtctcctggggtccggctac

SEQ ID NO: 5251362 - DNA, 25 bp, Homo sapien
gagccctggagggcaataccaccac

SEQ ID NO: 5251363 - DNA, 25 bp, Homo sapien
ttttttgttaacaccatattgttga

SEQ ID NO: 5251364 - DNA, 25 bp, Homo sapien
ttatgcaacattatgaaccagaacc

SEQ ID NO: 5251365 - DNA, 25 bp, Homo sapien
gcaacattatgaaccagaaccaaaa

SEQ ID NO: 5251366 - DNA, 25 bp, Homo sapien
tggtatcctgccaacggcaagagag

SEQ ID NO: 5251367 - DNA, 25 bp, Homo sapien
ctctgtctcctgggttcaagcgatt

SEQ ID NO: 5251368 - DNA, 25 bp, Homo sapien
gtgcagtggtgccatcgcgtctcac

SEQ ID NO: 5251369 - DNA, 25 bp, Homo sapien
tctgtctcctgggttcaagcgattc

SEQ ID NO: 5251370 - DNA, 25 bp, Homo sapien
tggtgccatcgcgtctcactgcaac

SEQ ID NO: 5251371 - DNA, 25 bp, Homo sapien
tgaaagctcctcagtacacacaagc

SEQ ID NO: 5251372 - DNA, 25 bp, Homo sapien
tgggagaagactctgatggaccagc

SEQ ID NO: 5251373 - DNA, 25 bp, Homo sapien
ggttctcccatcctcgaggtaaaga

SEQ ID NO: 5251374 - DNA, 25 bp, Homo sapien
cagcaggtgcccgtatctaagaatc

SEQ ID NO: 5251375 - DNA, 25 bp, Homo sapien
gggatcagaaatagaagtgacttcc

SEQ ID NO: 5251376 - DNA, 25 bp, Homo sapien
tgaagatggttcactggtagtcagt

SEQ ID NO: 5251377 - DNA, 25 bp, Homo sapien
tattgagtggacctgaagtcgttgg

SEQ ID NO: 5251378 - DNA, 25 bp, Homo sapien
tcgttggaaggatccaatgggatca

SEQ ID NO: 5251379 - DNA, 25 bp, Homo sapien
ggctcatgccggaaatgattttcga

SEQ ID NO: 5251380 - DNA, 25 bp, Homo sapien
tgaagcaaccagcagaagcgggaat

SEQ ID NO: 5251381 - DNA, 25 bp, Homo sapien
gggaatgccggcaatcccggagctc

SEQ ID NO: 5251382 - DNA, 25 bp, Homo sapien
tccgggacggtcttccggctcatgc

SEQ ID NO: 5251383 - DNA, 25 bp, Homo sapien
ttccagcgggggaagtcagcggcgc

SEQ ID NO: 5251384 - DNA, 25 bp, Homo sapien
tgatctcctcgaacgcctgtctctg

SEQ ID NO: 5251385 - DNA, 25 bp, Homo sapien
gcgcctcagttgctccgagatgtgg

SEQ ID NO: 5251386 - DNA, 25 bp, Homo sapien
tgcaggatgatctcctcgaacgcct

SEQ ID NO: 5251387 - DNA, 25 bp, Homo sapien
tcccgctgacgccccgcatgcctcc

SEQ ID NO: 5251388 - DNA, 25 bp, Homo sapien
cggcgccagggactcggcctcaggt

SEQ ID NO: 5251389 - DNA, 25 bp, Homo sapien
cccgctgacgccccgcatgcctccg

SEQ ID NO: 5251390 - DNA, 25 bp, Homo sapien
gcgccagggactcggcctcaggttc

SEQ ID NO: 5251391 - DNA, 25 bp, Homo sapien
tcgtgcctgtttggtacgtcatgct

SEQ ID NO: 5251392 - DNA, 25 bp, Homo sapien
gcctgtttggtacgtcatgcttttc

SEQ ID NO: 5251393 - DNA, 25 bp, Homo sapien
cttatctcgtgcctgtttggtacgt

SEQ ID NO: 5251394 - DNA, 25 bp, Homo sapien
acgtcatgcttttcagcctgtagtt

SEQ ID NO: 5251395 - DNA, 25 bp, Homo sapien
gattgtcattccatgtgccatcatg

SEQ ID NO: 5251396 - DNA, 25 bp, Homo sapien
ggtgcttaatcctcagttgggccat

SEQ ID NO: 5251397 - DNA, 25 bp, Homo sapien
tccccacgtttcttgtgtaattcag

SEQ ID NO: 5251398 - DNA, 25 bp, Homo sapien
taattcagtcagttcctcttggtgc

SEQ ID NO: 5251399 - DNA, 25 bp, Homo sapien
tcctcttggtgcttaatcctcagtt

SEQ ID NO: 5251400 - DNA, 25 bp, Homo sapien
tcctatggaggggacttttgatgcc

SEQ ID NO: 5251401 - DNA, 25 bp, Homo sapien
acaggactctcatagagggcagaag

SEQ ID NO: 5251402 - DNA, 25 bp, Homo sapien
aggactctcatagagggcagaagac

SEQ ID NO: 5251403 - DNA, 25 bp, Homo sapien
tatggaggggacttttgatgccaca

SEQ ID NO: 5251404 - DNA, 25 bp, Homo sapien
catttggttattcaggtcaatcacc

SEQ ID NO: 5251405 - DNA, 25 bp, Homo sapien
ggttattcaggtcaatcaccagttg

SEQ ID NO: 5251406 - DNA, 25 bp, Homo sapien
cgctgcatttggttattcaggtcaa

SEQ ID NO: 5251407 - DNA, 25 bp, Homo sapien
cctgtccttccgctgcatttggtta

SEQ ID NO: 5251408 - DNA, 25 bp, Homo sapien
aaggtcacaaagcttagtgcgcagg

SEQ ID NO: 5251409 - DNA, 25 bp, Homo sapien
cagagatagtctgcaaacattctgc

SEQ ID NO: 5251410 - DNA, 25 bp, Homo sapien
tagtgcgcaggtctaggcactccgt

SEQ ID NO: 5251411 - DNA, 25 bp, Homo sapien
cattaagccgattggcttcctgggc

SEQ ID NO: 5251412 - DNA, 25 bp, Homo sapien
ctggtagaggttcctttgctgcttc

SEQ ID NO: 5251413 - DNA, 25 bp, Homo sapien
cgactggtagaggttcctttgctgc

SEQ ID NO: 5251414 - DNA, 25 bp, Homo sapien
tgttcgactggtagaggttcctttg

SEQ ID NO: 5251415 - DNA, 25 bp, Homo sapien
gttcgactggtagaggttcctttgc

SEQ ID NO: 5251416 - DNA, 25 bp, Homo sapien
tgtgtgatcagaagtttcatccaca

SEQ ID NO: 5251417 - DNA, 25 bp, Homo sapien
tgctctgctgatggctcgcacagga

SEQ ID NO: 5251418 - DNA, 25 bp, Homo sapien
ctgatggctcgcacaggagaggtct

SEQ ID NO: 5251419 - DNA, 25 bp, Homo sapien
ctgtgtgatcagaagtttcatccac

SEQ ID NO: 5251420 - DNA, 25 bp, Homo sapien
cagccaagagaaacccaacacagta

SEQ ID NO: 5251421 - DNA, 25 bp, Homo sapien
aatccccactcttgaagggcggtgc

SEQ ID NO: 5251422 - DNA, 25 bp, Homo sapien
tcccattaagcagaggtgaactgag

SEQ ID NO: 5251423 - DNA, 25 bp, Homo sapien
tagaagcatttgaagccacccgtgt

SEQ ID NO: 5251424 - DNA, 25 bp, Homo sapien
ccaaagatattagtgatagaatcca

SEQ ID NO: 5251425 - DNA, 25 bp, Homo sapien
gatattagtgatagaatccagaagg

SEQ ID NO: 5251426 - DNA, 25 bp, Homo sapien
ttagtgatagaatccagaaggcctc

SEQ ID NO: 5251427 - DNA, 25 bp, Homo sapien
caaagatattagtgatagaatccag

SEQ ID NO: 5251428 - DNA, 25 bp, Homo sapien
tgaaaagctgatattaaggcatatg

SEQ ID NO: 5251429 - DNA, 25 bp, Homo sapien
ggaaaggccagagatcagcacgcag

SEQ ID NO: 5251430 - DNA, 25 bp, Homo sapien
cacgcagcgagattaagaggaaagg

SEQ ID NO: 5251431 - DNA, 25 bp, Homo sapien
ggcatatgtatactctgcatcactg

SEQ ID NO: 5251432 - DNA, 25 bp, Homo sapien
tgatgtcccaaaaggggagactcgg

SEQ ID NO: 5251433 - DNA, 25 bp, Homo sapien
aatgatgtcccaaaaggggagactc

SEQ ID NO: 5251434 - DNA, 25 bp, Homo sapien
agaatgatgtcccaaaaggggagac

SEQ ID NO: 5251435 - DNA, 25 bp, Homo sapien
gatgtcccaaaaggggagactcgga

SEQ ID NO: 5251436 - DNA, 25 bp, Homo sapien
tactgtacaaagtgttcaacctggc

SEQ ID NO: 5251437 - DNA, 25 bp, Homo sapien
gagtctaacgcatgccaaaagaaag

SEQ ID NO: 5251438 - DNA, 25 bp, Homo sapien
cactcacatgctggactaagagagg

SEQ ID NO: 5251439 - DNA, 25 bp, Homo sapien
gcaaagcatcctcgttagcacgtga

SEQ ID NO: 5251440 - DNA, 25 bp, Homo sapien
caataagctgctgggaaactttctc

SEQ ID NO: 5251441 - DNA, 25 bp, Homo sapien
gacgaccttgcttaagcagactgcc

SEQ ID NO: 5251442 - DNA, 25 bp, Homo sapien
tgcacactaacctgtggactccaaa

SEQ ID NO: 5251443 - DNA, 25 bp, Homo sapien
tgttagaaaggactccaagacgacc

SEQ ID NO: 5251444 - DNA, 25 bp, Homo sapien
caggatgagtatccacattgtcctg

SEQ ID NO: 5251445 - DNA, 25 bp, Homo sapien
agacacacaaggcagtagctggtac

SEQ ID NO: 5251446 - DNA, 25 bp, Homo sapien
aagacacacaaggcagtagctggta

SEQ ID NO: 5251447 - DNA, 25 bp, Homo sapien
atcccaaattatcagctgctccatg

SEQ ID NO: 5251448 - DNA, 25 bp, Homo sapien
ttcagtgcaatcagaccttttacca

SEQ ID NO: 5251449 - DNA, 25 bp, Homo sapien
tgccactcgtcagtctcctgtgtaa

SEQ ID NO: 5251450 - DNA, 25 bp, Homo sapien
aaagggaccgtgacattcagtgcaa

SEQ ID NO: 5251451 - DNA, 25 bp, Homo sapien
actgaactgcacagcgttgacttcc

SEQ ID NO: 5251452 - DNA, 25 bp, Homo sapien
cacagcgttgacttccccatcatgt

SEQ ID NO: 5251453 - DNA, 25 bp, Homo sapien
aactgcacagcgttgacttccccat

SEQ ID NO: 5251454 - DNA, 25 bp, Homo sapien
ctggactgaactgcacagcgttgac

SEQ ID NO: 5251455 - DNA, 25 bp, Homo sapien
gcctccagtggccagtaaccgggaa

SEQ ID NO: 5251456 - DNA, 25 bp, Homo sapien
tcccaaagcttaaccctgcggtcca

SEQ ID NO: 5251457 - DNA, 25 bp, Homo sapien
cccaaagcttaaccctgcggtccat

SEQ ID NO: 5251458 - DNA, 25 bp, Homo sapien
ttactgccagatagggaacccttga

SEQ ID NO: 5251459 - DNA, 25 bp, Homo sapien
agcactatcaaattcaatgcttgta

SEQ ID NO: 5251460 - DNA, 25 bp, Homo sapien
cactatcaaattcaatgcttgtaat

SEQ ID NO: 5251461 - DNA, 25 bp, Homo sapien
gcactatcaaattcaatgcttgtaa

SEQ ID NO: 5251462 - DNA, 25 bp, Homo sapien
ctatcaaattcaatgcttgtaattc

SEQ ID NO: 5251463 - DNA, 25 bp, Homo sapien
tccacagtccagattcggcttgcaa

SEQ ID NO: 5251464 - DNA, 25 bp, Homo sapien
tcatccacagtccagattcggcttg

SEQ ID NO: 5251465 - DNA, 25 bp, Homo sapien
acagtccagattcggcttgcaaaat

SEQ ID NO: 5251466 - DNA, 25 bp, Homo sapien
gtccagattcggcttgcaaaatcat

SEQ ID NO: 5251467 - DNA, 25 bp, Homo sapien
ttaagttacatgcttcgccctccgc

SEQ ID NO: 5251468 - DNA, 25 bp, Homo sapien
tctgtgccattaagccaaaattgct

SEQ ID NO: 5251469 - DNA, 25 bp, Homo sapien
gtcccctaattaagcacctgccagt

SEQ ID NO: 5251470 - DNA, 25 bp, Homo sapien
gcaaatgtgagggtcccattgcaaa

SEQ ID NO: 5251471 - DNA, 25 bp, Homo sapien
tgcccggccttacattaaattctga

SEQ ID NO: 5251472 - DNA, 25 bp, Homo sapien
ttatattcactatctgtttctttct

SEQ ID NO: 5251473 - DNA, 25 bp, Homo sapien
tgcccatcgcagcacttctgaagtg

SEQ ID NO: 5251474 - DNA, 25 bp, Homo sapien
cacagaatgagggacatcacggagt

SEQ ID NO: 5251475 - DNA, 25 bp, Homo sapien
cctgagctcacggaggaacacagaa

SEQ ID NO: 5251476 - DNA, 25 bp, Homo sapien
gaacaaggcagatcatagccacaga

SEQ ID NO: 5251477 - DNA, 25 bp, Homo sapien
gcactttcccactgtgtcccgtgag

SEQ ID NO: 5251478 - DNA, 25 bp, Homo sapien
tgacttcctgagacaatccgcgcat

SEQ ID NO: 5251479 - DNA, 25 bp, Homo sapien
tccagcaggaacttagcagacagca

SEQ ID NO: 5251480 - DNA, 25 bp, Homo sapien
ccagagtttgagagtccggtcgtga

SEQ ID NO: 5251481 - DNA, 25 bp, Homo sapien
catctaagcatatacacagacagag

SEQ ID NO: 5251482 - DNA, 25 bp, Homo sapien
acctccacgctaacatctaagcata

SEQ ID NO: 5251483 - DNA, 25 bp, Homo sapien
ggctctgacgtgcaaacacacacct

SEQ ID NO: 5251484 - DNA, 25 bp, Homo sapien
aggctctgacgtgcaaacacacacc

SEQ ID NO: 5251485 - DNA, 25 bp, Homo sapien
aacgtggctgtttacataatgctgc

SEQ ID NO: 5251486 - DNA, 25 bp, Homo sapien
tcagagttactcacttaaatgaagc

SEQ ID NO: 5251487 - DNA, 25 bp, Homo sapien
ccctctaaccactgacttgtcagag

SEQ ID NO: 5251488 - DNA, 25 bp, Homo sapien
catcattaatcaagcagaggcacca

SEQ ID NO: 5251489 - DNA, 25 bp, Homo sapien
cattgcaactggatcctgcaaacac

SEQ ID NO: 5251490 - DNA, 25 bp, Homo sapien
tgtcccagaaacgaattttcttgtc

SEQ ID NO: 5251491 - DNA, 25 bp, Homo sapien
tgctctgtgcagacaatatcattgc

SEQ ID NO: 5251492 - DNA, 25 bp, Homo sapien
cgaatgtcccagaaacgaattttct

SEQ ID NO: 5251493 - DNA, 25 bp, Homo sapien
catgtacagaaccattactgtggag

SEQ ID NO: 5251494 - DNA, 25 bp, Homo sapien
cttaaaagcacaacccatgtacaga

SEQ ID NO: 5251495 - DNA, 25 bp, Homo sapien
gccatgtcctgagatcttaaaagca

SEQ ID NO: 5251496 - DNA, 25 bp, Homo sapien
tactgtggagactcttatgtgcctc

SEQ ID NO: 5251497 - DNA, 25 bp, Homo sapien
gcttgatagcatttgttcggagatc

SEQ ID NO: 5251498 - DNA, 25 bp, Homo sapien
gagctcagtcctttctgggtttaag

SEQ ID NO: 5251499 - DNA, 25 bp, Homo sapien
cggagatcaataacttttagcaagt

SEQ ID NO: 5251500 - DNA, 25 bp, Homo sapien
tcaggagctcagtcctttctgggtt

SEQ ID NO: 5251501 - DNA, 25 bp, Homo sapien
agtcagagccgcacttgaacccagg

SEQ ID NO: 5251502 - DNA, 25 bp, Homo sapien
ctgaagacaactctggtccagtcag

SEQ ID NO: 5251503 - DNA, 25 bp, Homo sapien
tctggtccagtcagagccgcacttg

SEQ ID NO: 5251504 - DNA, 25 bp, Homo sapien
caactctggtccagtcagagccgca

SEQ ID NO: 5251505 - DNA, 25 bp, Homo sapien
ggaaacataggttgggcactgaaca

SEQ ID NO: 5251506 - DNA, 25 bp, Homo sapien
tgggaaaatgcccatgcaggactct

SEQ ID NO: 5251507 - DNA, 25 bp, Homo sapien
tgcaggactctttgtgatgaaccaa

SEQ ID NO: 5251508 - DNA, 25 bp, Homo sapien
atttagctctatatccccagtggga

SEQ ID NO: 5251509 - DNA, 25 bp, Homo sapien
ccacccccaattcagcatctctgtg

SEQ ID NO: 5251510 - DNA, 25 bp, Homo sapien
agatatacagagagccctcagcaga

SEQ ID NO: 5251511 - DNA, 25 bp, Homo sapien
tgccgccacgtaactgccatcaggg

SEQ ID NO: 5251512 - DNA, 25 bp, Homo sapien
agcagagcctgccgccacgtaactg

SEQ ID NO: 5251513 - DNA, 25 bp, Homo sapien
cctgtgagcacactccagatataca

SEQ ID NO: 5251514 - DNA, 25 bp, Homo sapien
taaaccggatgacccctgagatgaa

SEQ ID NO: 5251515 - DNA, 25 bp, Homo sapien
aaggccttgctcacaacgcaacggg

SEQ ID NO: 5251516 - DNA, 25 bp, Homo sapien
gaagtcaaaggccttgctcacaacg

SEQ ID NO: 5251517 - DNA, 25 bp, Homo sapien
agcgccgactgaggtctaaaccgga

SEQ ID NO: 5251518 - DNA, 25 bp, Homo sapien
tacctggcgtactctgtagactgtg

SEQ ID NO: 5251519 - DNA, 25 bp, Homo sapien
aagcttgtgcattcagggagtccta

SEQ ID NO: 5251520 - DNA, 25 bp, Homo sapien
caacagggacttccaagggagacag

SEQ ID NO: 5251521 - DNA, 25 bp, Homo sapien
tctgggttccaactagcaggtgggc

SEQ ID NO: 5251522 - DNA, 25 bp, Homo sapien
gggcgaccacgccaccgcattgatg

SEQ ID NO: 5251523 - DNA, 25 bp, Homo sapien
aacgtgcgagccagagggcgaccac

SEQ ID NO: 5251524 - DNA, 25 bp, Homo sapien
atcctttgtccacactgacaacgtg

SEQ ID NO: 5251525 - DNA, 25 bp, Homo sapien
ccacgccaccgcattgatggatgag

SEQ ID NO: 5251526 - DNA, 25 bp, Homo sapien
cagagctagtagtgtttcccaaggc

SEQ ID NO: 5251527 - DNA, 25 bp, Homo sapien
cagaaccgactttggaaggacgaga

SEQ ID NO: 5251528 - DNA, 25 bp, Homo sapien
gcttaaagtgagttcaccgggcaaa

SEQ ID NO: 5251529 - DNA, 25 bp, Homo sapien
tgggacatgcgttaggccagaaccg

SEQ ID NO: 5251530 - DNA, 25 bp, Homo sapien
tggaaaagattttcacacatcctct

SEQ ID NO: 5251531 - DNA, 25 bp, Homo sapien
tgcagcgaacccatttccctggaaa

SEQ ID NO: 5251532 - DNA, 25 bp, Homo sapien
gaaaagattttcacacatcctctcc

SEQ ID NO: 5251533 - DNA, 25 bp, Homo sapien
ctctgcagcgaacccatttccctgg

SEQ ID NO: 5251534 - DNA, 25 bp, Homo sapien
ctgggtgtctgcagatcgatacagg

SEQ ID NO: 5251535 - DNA, 25 bp, Homo sapien
ggtgtctgcagatcgatacaggaac

SEQ ID NO: 5251536 - DNA, 25 bp, Homo sapien
gcagatcgatacaggaacacatcct

SEQ ID NO: 5251537 - DNA, 25 bp, Homo sapien
tctgcagatcgatacaggaacacat

SEQ ID NO: 5251538 - DNA, 25 bp, Homo sapien
gacaagtatgttggaggtctcgaat

SEQ ID NO: 5251539 - DNA, 25 bp, Homo sapien
aagtatgttggaggtctcgaatccc

SEQ ID NO: 5251540 - DNA, 25 bp, Homo sapien
caagtatgttggaggtctcgaatcc

SEQ ID NO: 5251541 - DNA, 25 bp, Homo sapien
tcagacaagtatgttggaggtctcg

SEQ ID NO: 5251542 - DNA, 25 bp, Homo sapien
cctgaaacggaaagatggcgctgct

SEQ ID NO: 5251543 - DNA, 25 bp, Homo sapien
actaaagcaccaagggcatcgcaca

SEQ ID NO: 5251544 - DNA, 25 bp, Homo sapien
tgagcctaggcttcttgcactaaag

SEQ ID NO: 5251545 - DNA, 25 bp, Homo sapien
ggcatcgcacacaggcttggcagag

SEQ ID NO: 5251546 - DNA, 25 bp, Homo sapien
ggtgtttcgcacacccaatgaacta

SEQ ID NO: 5251547 - DNA, 25 bp, Homo sapien
tcgcacacccaatgaactaaaactt

SEQ ID NO: 5251548 - DNA, 25 bp, Homo sapien
gtgataaaaagggtgtttcgcacac

SEQ ID NO: 5251549 - DNA, 25 bp, Homo sapien
aagggtgtttcgcacacccaatgaa

SEQ ID NO: 5251550 - DNA, 25 bp, Homo sapien
aggaccatcggtgggaaggccacct

SEQ ID NO: 5251551 - DNA, 25 bp, Homo sapien
tcaccagctctaacactcacatccc

SEQ ID NO: 5251552 - DNA, 25 bp, Homo sapien
ctctctcaccagctctaacactcac

SEQ ID NO: 5251553 - DNA, 25 bp, Homo sapien
gctctaacactcacatccccaaatg

SEQ ID NO: 5251554 - DNA, 25 bp, Homo sapien
atttcaactctccttgacttaagtt

SEQ ID NO: 5251555 - DNA, 25 bp, Homo sapien
ctctccttgacttaagttctctgaa

SEQ ID NO: 5251556 - DNA, 25 bp, Homo sapien
tcaactctccttgacttaagttctc

SEQ ID NO: 5251557 - DNA, 25 bp, Homo sapien
aactctccttgacttaagttctctg

SEQ ID NO: 5251558 - DNA, 25 bp, Homo sapien
tcaagttctgttggccaacataatg

SEQ ID NO: 5251559 - DNA, 25 bp, Homo sapien
aatcaagttctgttggccaacataa

SEQ ID NO: 5251560 - DNA, 25 bp, Homo sapien
acaatcaagttctgttggccaacat

SEQ ID NO: 5251561 - DNA, 25 bp, Homo sapien
caatcaagttctgttggccaacata

SEQ ID NO: 5251562 - DNA, 25 bp, Homo sapien
ttctactgcagctggtaatgttctg

SEQ ID NO: 5251563 - DNA, 25 bp, Homo sapien
cagagggctgaagagcaatccgtgc

SEQ ID NO: 5251564 - DNA, 25 bp, Homo sapien
tctactgcagctggtaatgttctga

SEQ ID NO: 5251565 - DNA, 25 bp, Homo sapien
gaagagcaatccgtgctgggctctt

SEQ ID NO: 5251566 - DNA, 25 bp, Homo sapien
agttaagggactggaatggagctca

SEQ ID NO: 5251567 - DNA, 25 bp, Homo sapien
ttaagggactggaatggagctcagg

SEQ ID NO: 5251568 - DNA, 25 bp, Homo sapien
cagttaagggactggaatggagctc

SEQ ID NO: 5251569 - DNA, 25 bp, Homo sapien
gcagttaagggactggaatggagct

SEQ ID NO: 5251570 - DNA, 25 bp, Homo sapien
tccgtctaggcctttccacttgcta

SEQ ID NO: 5251571 - DNA, 25 bp, Homo sapien
catttaagtctggacaatgcttgcc

SEQ ID NO: 5251572 - DNA, 25 bp, Homo sapien
tgcctgctcccaagaacactcaggg

SEQ ID NO: 5251573 - DNA, 25 bp, Homo sapien
tgcttgccaggtccggcatgctctg

SEQ ID NO: 5251574 - DNA, 25 bp, Homo sapien
ggactctgcgaccactaacacactt

SEQ ID NO: 5251575 - DNA, 25 bp, Homo sapien
tgttctgagcaagctggtaccgtct

SEQ ID NO: 5251576 - DNA, 25 bp, Homo sapien
caaggagagggtctctatgctctga

SEQ ID NO: 5251577 - DNA, 25 bp, Homo sapien
atgatgaatagccagcccctgttct

SEQ ID NO: 5251578 - DNA, 25 bp, Homo sapien
taccgtcttgccagatgagcctgaa

SEQ ID NO: 5251579 - DNA, 25 bp, Homo sapien
aggaaaacgcccatccttgctcttc

SEQ ID NO: 5251580 - DNA, 25 bp, Homo sapien
ttctgataaggttttggcctgtggt

SEQ ID NO: 5251581 - DNA, 25 bp, Homo sapien
caggtttctgataaggttttggcct

SEQ ID NO: 5251582 - DNA, 25 bp, Homo sapien
tgaaggcgggacatactgtctgcag

SEQ ID NO: 5251583 - DNA, 25 bp, Homo sapien
ccttgtaccggcttcaacatccgag

SEQ ID NO: 5251584 - DNA, 25 bp, Homo sapien
tgaaacctactcacgagatcctgtg

SEQ ID NO: 5251585 - DNA, 25 bp, Homo sapien
aagaggccatcttagcggtctagaa

SEQ ID NO: 5251586 - DNA, 25 bp, Homo sapien
catttctcagtacaccttgccaggg

SEQ ID NO: 5251587 - DNA, 25 bp, Homo sapien
tgttggtcaggtgttagagggttgg

SEQ ID NO: 5251588 - DNA, 25 bp, Homo sapien
cttggggtgttggtcaggtgttaga

SEQ ID NO: 5251589 - DNA, 25 bp, Homo sapien
tcaggtgttagagggttggagaaag

SEQ ID NO: 5251590 - DNA, 25 bp, Homo sapien
tagagggttggagaaaggtaagaca

SEQ ID NO: 5251591 - DNA, 25 bp, Homo sapien
tcttgaagataacatggttcggttc

SEQ ID NO: 5251592 - DNA, 25 bp, Homo sapien
taacatggttcggttcggacttgct

SEQ ID NO: 5251593 - DNA, 25 bp, Homo sapien
gacttgctggtcttcccgctggctg

SEQ ID NO: 5251594 - DNA, 25 bp, Homo sapien
ttcggttcggacttgctggtcttcc

SEQ ID NO: 5251595 - DNA, 25 bp, Homo sapien
ttggctgacatggtctatgtagtct

SEQ ID NO: 5251596 - DNA, 25 bp, Homo sapien
gacatggtctatgtagtctctgttc

SEQ ID NO: 5251597 - DNA, 25 bp, Homo sapien
gctgacatggtctatgtagtctctg

SEQ ID NO: 5251598 - DNA, 25 bp, Homo sapien
atggtctatgtagtctctgttcccc

SEQ ID NO: 5251599 - DNA, 25 bp, Homo sapien
ttctttcccttcacaagatcaggat

SEQ ID NO: 5251600 - DNA, 25 bp, Homo sapien
tcaggatcaaccaacacgacaccat

SEQ ID NO: 5251601 - DNA, 25 bp, Homo sapien
ttcccttcacaagatcaggatcaac

SEQ ID NO: 5251602 - DNA, 25 bp, Homo sapien
caagatcaggatcaaccaacacgac

SEQ ID NO: 5251603 - DNA, 25 bp, Homo sapien
tggttccatgtgcaagagcgctgcc

SEQ ID NO: 5251604 - DNA, 25 bp, Homo sapien
agagagcagtccactccgcccagaa

SEQ ID NO: 5251605 - DNA, 25 bp, Homo sapien
gtacaggagtgtgggtcagtgggcc

SEQ ID NO: 5251606 - DNA, 25 bp, Homo sapien
caacaggacctatgtcacgtgaatt

SEQ ID NO: 5251607 - DNA, 25 bp, Homo sapien
cattcaagctcaggactaagaaggt

SEQ ID NO: 5251608 - DNA, 25 bp, Homo sapien
gctttcggggctcaaaccagatgcc

SEQ ID NO: 5251609 - DNA, 25 bp, Homo sapien
gagaccacgtggtttgacagctgtc

SEQ ID NO: 5251610 - DNA, 25 bp, Homo sapien
agaacaggcgcccttctctggtcaa

SEQ ID NO: 5251611 - DNA, 25 bp, Homo sapien
gtcggacttggccctcggcctggca

SEQ ID NO: 5251612 - DNA, 25 bp, Homo sapien
atgggcagcgaacacgggttttcaa

SEQ ID NO: 5251613 - DNA, 25 bp, Homo sapien
gatgaaggcagggtcggacttggcc

SEQ ID NO: 5251614 - DNA, 25 bp, Homo sapien
aatgggcagcgaacacgggttttca

SEQ ID NO: 5251615 - DNA, 25 bp, Homo sapien
gtacaggtccctgcggaaggtcaag

SEQ ID NO: 5251616 - DNA, 25 bp, Homo sapien
acaggaggatacacctggacccggg

SEQ ID NO: 5251617 - DNA, 25 bp, Homo sapien
gaaggtcaagccgatcacgtcaatg

SEQ ID NO: 5251618 - DNA, 25 bp, Homo sapien
aaggcgcaggtcagagtgacataca

SEQ ID NO: 5251619 - DNA, 25 bp, Homo sapien
gaagacgttttacagaaatgggaca

SEQ ID NO: 5251620 - DNA, 25 bp, Homo sapien
ctggccacgcccaaatatgtatatg

SEQ ID NO: 5251621 - DNA, 25 bp, Homo sapien
tgtacacttaacgtagccagtcccc

SEQ ID NO: 5251622 - DNA, 25 bp, Homo sapien
tgctggctactgaagtggtctttac

SEQ ID NO: 5251623 - DNA, 25 bp, Homo sapien
tgcaacatcactgaacagggcaagt

SEQ ID NO: 5251624 - DNA, 25 bp, Homo sapien
catcactgaacagggcaagtagtca

SEQ ID NO: 5251625 - DNA, 25 bp, Homo sapien
caacatcactgaacagggcaagtag

SEQ ID NO: 5251626 - DNA, 25 bp, Homo sapien
ggctgcaacatcactgaacagggca

SEQ ID NO: 5251627 - DNA, 25 bp, Homo sapien
ggatttggaagcatactgacagtga

SEQ ID NO: 5251628 - DNA, 25 bp, Homo sapien
gccagaggtacaggcactcacaggg

SEQ ID NO: 5251629 - DNA, 25 bp, Homo sapien
tacagtagcgcaaggagtgtgccat

SEQ ID NO: 5251630 - DNA, 25 bp, Homo sapien
ttaggtgtccccaactgtgatccca

SEQ ID NO: 5251631 - DNA, 25 bp, Homo sapien
ttgacctcaaagtcaaccccacagg

SEQ ID NO: 5251632 - DNA, 25 bp, Homo sapien
catcggtgctgtctgtggcgaatgc

SEQ ID NO: 5251633 - DNA, 25 bp, Homo sapien
tctgtggcgaatgctttgacctcaa

SEQ ID NO: 5251634 - DNA, 25 bp, Homo sapien
gtcctcttcggcatcggtgctgtct

SEQ ID NO: 5251635 - DNA, 25 bp, Homo sapien
gaatagctgccatatacatgcgagc

SEQ ID NO: 5251636 - DNA, 25 bp, Homo sapien
ggaagaggtctgtcccacagagaca

SEQ ID NO: 5251637 - DNA, 25 bp, Homo sapien
cggtgaaggctacacaacattcgga

SEQ ID NO: 5251638 - DNA, 25 bp, Homo sapien
cattcggaatgtacttaagccactg

SEQ ID NO: 5251639 - DNA, 25 bp, Homo sapien
gggcatgctgtactttgcggatcag

SEQ ID NO: 5251640 - DNA, 25 bp, Homo sapien
gcggatcagtaatcgcacggagctc

SEQ ID NO: 5251641 - DNA, 25 bp, Homo sapien
ttgttgagagagaccgcaaggtgca

SEQ ID NO: 5251642 - DNA, 25 bp, Homo sapien
gacatgaagaactgccaggccgcct

SEQ ID NO: 5251643 - DNA, 25 bp, Homo sapien
atcatcacatcggaggaggccaggg

SEQ ID NO: 5251644 - DNA, 25 bp, Homo sapien
tgcaaggcacccatgtagttaaggg

SEQ ID NO: 5251645 - DNA, 25 bp, Homo sapien
tcctctaaggaccatgctgaccagc

SEQ ID NO: 5251646 - DNA, 25 bp, Homo sapien
tttgggataccacagctattgatgc

SEQ ID NO: 5251647 - DNA, 25 bp, Homo sapien
tctctgtgttattggtgacagtcac

SEQ ID NO: 5251648 - DNA, 25 bp, Homo sapien
ggatgggctccccatggaaatagat

SEQ ID NO: 5251649 - DNA, 25 bp, Homo sapien
cagtcacggtcacagggatgggctc

SEQ ID NO: 5251650 - DNA, 25 bp, Homo sapien
taatcttcttcacggtcttctctgt

SEQ ID NO: 5251651 - DNA, 25 bp, Homo sapien
caaaaaccagccgtaagtgggcagg

SEQ ID NO: 5251652 - DNA, 25 bp, Homo sapien
tacaaagcgcttccatgtgggacct

SEQ ID NO: 5251653 - DNA, 25 bp, Homo sapien
cagaagggccttatcagaccagaga

SEQ ID NO: 5251654 - DNA, 25 bp, Homo sapien
aaagtggtatatgacacctagggcc

SEQ ID NO: 5251655 - DNA, 25 bp, Homo sapien
tcgagtagagaaccacattggccac

SEQ ID NO: 5251656 - DNA, 25 bp, Homo sapien
gccacgggcttgacgtaataatcac

SEQ ID NO: 5251657 - DNA, 25 bp, Homo sapien
gcttcctccatagccacgggcttga

SEQ ID NO: 5251658 - DNA, 25 bp, Homo sapien
gacgtaataatcactcgagtagaga

SEQ ID NO: 5251659 - DNA, 25 bp, Homo sapien
gaaggctggcgagctagctgaacat

SEQ ID NO: 5251660 - DNA, 25 bp, Homo sapien
taactttctgtgcagccctcgaagg

SEQ ID NO: 5251661 - DNA, 25 bp, Homo sapien
gatgtgcgaggatcccctaaaggca

SEQ ID NO: 5251662 - DNA, 25 bp, Homo sapien
ttttccagacgggaagtgtgcccac

SEQ ID NO: 5251663 - DNA, 25 bp, Homo sapien
aatagcttgggtccaaagcagcaca

SEQ ID NO: 5251664 - DNA, 25 bp, Homo sapien
gcaacgcagggacccacaatttgtg

SEQ ID NO: 5251665 - DNA, 25 bp, Homo sapien
tgtggatcacacagaccgaatagct

SEQ ID NO: 5251666 - DNA, 25 bp, Homo sapien
tagatttctcaacatctgacagatg

SEQ ID NO: 5251667 - DNA, 25 bp, Homo sapien
tccaggccagaaagcctcttgtcac

SEQ ID NO: 5251668 - DNA, 25 bp, Homo sapien
cactataagggggtcacagtgtgac

SEQ ID NO: 5251669 - DNA, 25 bp, Homo sapien
tcttgtcaccaaaaactgtcactat

SEQ ID NO: 5251670 - DNA, 25 bp, Homo sapien
tggtgtcagcaacgagtccaggcca

SEQ ID NO: 5251671 - DNA, 25 bp, Homo sapien
atgagacaaactggctcaagagtca

SEQ ID NO: 5251672 - DNA, 25 bp, Homo sapien
gaattgctgaatttctagaatgttc

SEQ ID NO: 5251673 - DNA, 25 bp, Homo sapien
aatgttctatggagttaatgagaca

SEQ ID NO: 5251674 - DNA, 25 bp, Homo sapien
caactcagcctattctgaattgctg

SEQ ID NO: 5251675 - DNA, 25 bp, Homo sapien
cagggcaatgcctctcctttctcga

SEQ ID NO: 5251676 - DNA, 25 bp, Homo sapien
tcgattgttagccagcaagggcagc

SEQ ID NO: 5251677 - DNA, 25 bp, Homo sapien
cctttctcgattgttagccagcaag

SEQ ID NO: 5251678 - DNA, 25 bp, Homo sapien
gcagcagcgtcagcgtcttggtcaa

SEQ ID NO: 5251679 - DNA, 25 bp, Homo sapien
tgaatccttataatcactctatgag

SEQ ID NO: 5251680 - DNA, 25 bp, Homo sapien
caggccccacgcttcacatggattg

SEQ ID NO: 5251681 - DNA, 25 bp, Homo sapien
tatgagacttgaactattaccgccc

SEQ ID NO: 5251682 - DNA, 25 bp, Homo sapien
cacactagctagtgatacttctaaa

SEQ ID NO: 5251683 - DNA, 25 bp, Homo sapien
tgaactgaacatgctctgccacgtg

SEQ ID NO: 5251684 - DNA, 25 bp, Homo sapien
ttatctggacttgcggagtatggcc

SEQ ID NO: 5251685 - DNA, 25 bp, Homo sapien
ttaactctaccttgcgctgaatggg

SEQ ID NO: 5251686 - DNA, 25 bp, Homo sapien
tcaagcacgtgtttccaggaccaca

SEQ ID NO: 5251687 - DNA, 25 bp, Homo sapien
tccaagatatccagctgtgtgtccc

SEQ ID NO: 5251688 - DNA, 25 bp, Homo sapien
gggactccttgcacgcactggagga

SEQ ID NO: 5251689 - DNA, 25 bp, Homo sapien
tctgtgcttgacctctatagatgca

SEQ ID NO: 5251690 - DNA, 25 bp, Homo sapien
ctttccattcgaggcaggcatgccg

SEQ ID NO: 5251691 - DNA, 25 bp, Homo sapien
gagcttcaccttgatctggtaagac

SEQ ID NO: 5251692 - DNA, 25 bp, Homo sapien
ttcccaggacggtccggtctatgcc

SEQ ID NO: 5251693 - DNA, 25 bp, Homo sapien
gacactgtgagcttcaccttgatct

SEQ ID NO: 5251694 - DNA, 25 bp, Homo sapien
caggattcccaggacggtccggtct

SEQ ID NO: 5251695 - DNA, 25 bp, Homo sapien
cagcccgagggttggtgccgggaca

SEQ ID NO: 5251696 - DNA, 25 bp, Homo sapien
gcagcccgagggttggtgccgggac

SEQ ID NO: 5251697 - DNA, 25 bp, Homo sapien
agcagcccgagggttggtgccggga

SEQ ID NO: 5251698 - DNA, 25 bp, Homo sapien
agagcagcccgagggttggtgccgg

SEQ ID NO: 5251699 - DNA, 25 bp, Homo sapien
tcccacctgacattttatcagacag

SEQ ID NO: 5251700 - DNA, 25 bp, Homo sapien
caaagtggcgctaagaatgcacaca

SEQ ID NO: 5251701 - DNA, 25 bp, Homo sapien
tccttggtagaagctatgggccttt

SEQ ID NO: 5251702 - DNA, 25 bp, Homo sapien
aagctctacttggtaatccttggta

SEQ ID NO: 5251703 - DNA, 25 bp, Homo sapien
aggctgagggtgcatgaggcggaat

SEQ ID NO: 5251704 - DNA, 25 bp, Homo sapien
gtgcatgaggcggaatgggacctca

SEQ ID NO: 5251705 - DNA, 25 bp, Homo sapien
gaatgggacctcagtggcgacttca

SEQ ID NO: 5251706 - DNA, 25 bp, Homo sapien
aggcggaatgggacctcagtggcga

SEQ ID NO: 5251707 - DNA, 25 bp, Homo sapien
aaattacactaagcgggaccatcag

SEQ ID NO: 5251708 - DNA, 25 bp, Homo sapien
acgagattgtccctgtccaagagca

SEQ ID NO: 5251709 - DNA, 25 bp, Homo sapien
gctcagcgctgaacagatgggccct

SEQ ID NO: 5251710 - DNA, 25 bp, Homo sapien
gtctatgagggtcgctacgtacagg

SEQ ID NO: 5251711 - DNA, 25 bp, Homo sapien
cagccagttgcttcgcctttcaaag

SEQ ID NO: 5251712 - DNA, 25 bp, Homo sapien
cacatgtgttgtatccccagactaa

SEQ ID NO: 5251713 - DNA, 25 bp, Homo sapien
tgagacctgggacttgacgttcacc

SEQ ID NO: 5251714 - DNA, 25 bp, Homo sapien
cacagcggcgatttgatggtgagcc

SEQ ID NO: 5251715 - DNA, 25 bp, Homo sapien
tctatatcatagctgtacctagaaa

SEQ ID NO: 5251716 - DNA, 25 bp, Homo sapien
ctttacaatttgagagataaggcct

SEQ ID NO: 5251717 - DNA, 25 bp, Homo sapien
gataaggcctagatacatgcagttc

SEQ ID NO: 5251718 - DNA, 25 bp, Homo sapien
gatcactgcgtgtaattcctgcctc

SEQ ID NO: 5251719 - DNA, 25 bp, Homo sapien
cctttaactagcaccaatgggagaa

SEQ ID NO: 5251720 - DNA, 25 bp, Homo sapien
gatatgtgcaaagactcaaagaggg

SEQ ID NO: 5251721 - DNA, 25 bp, Homo sapien
tcattgcacgccctttgaagctgaa

SEQ ID NO: 5251722 - DNA, 25 bp, Homo sapien
gaactgatcaaggttttccccatga

SEQ ID NO: 5251723 - DNA, 25 bp, Homo sapien
tatggcgagcaaactcctcaaaaac

SEQ ID NO: 5251724 - DNA, 25 bp, Homo sapien
tctcctgcatctttcagattatggc

SEQ ID NO: 5251725 - DNA, 25 bp, Homo sapien
gcatctttcagattatggcgagcaa

SEQ ID NO: 5251726 - DNA, 25 bp, Homo sapien
cagattatggcgagcaaactcctca

SEQ ID NO: 5251727 - DNA, 25 bp, Homo sapien
catacgcagcataactccaaaggac

SEQ ID NO: 5251728 - DNA, 25 bp, Homo sapien
tgctcgttgcactggtaactacagg

SEQ ID NO: 5251729 - DNA, 25 bp, Homo sapien
aacaagctttatttctcggaagaag

SEQ ID NO: 5251730 - DNA, 25 bp, Homo sapien
gaagactcatcctttcatacgcagc

SEQ ID NO: 5251731 - DNA, 25 bp, Homo sapien
tcgggcttattaacgtccaccctga

SEQ ID NO: 5251732 - DNA, 25 bp, Homo sapien
gggtcaagcaatgcaggaaccaacg

SEQ ID NO: 5251733 - DNA, 25 bp, Homo sapien
caatgcaggaaccaacgggctggtc

SEQ ID NO: 5251734 - DNA, 25 bp, Homo sapien
tattaacgtccaccctgacttagga

SEQ ID NO: 5251735 - DNA, 25 bp, Homo sapien
gcggaggggcgcccgccgccgccgc

SEQ ID NO: 5251736 - DNA, 25 bp, Homo sapien
gcggcggcggcggaggcggttgcgg

SEQ ID NO: 5251737 - DNA, 25 bp, Homo sapien
cggcggcggcggaggcggttgcggg

SEQ ID NO: 5251738 - DNA, 25 bp, Homo sapien
ggacaccttgcggatgagcttctgt

SEQ ID NO: 5251739 - DNA, 25 bp, Homo sapien
cgtggacaccttgcggatgagcttc

SEQ ID NO: 5251740 - DNA, 25 bp, Homo sapien
tcggatctgacccgacgtggacacc

SEQ ID NO: 5251741 - DNA, 25 bp, Homo sapien
tgtcggatctgacccgacgtggaca

SEQ ID NO: 5251742 - DNA, 25 bp, Homo sapien
acagggaagtctgcagggcactcgc

SEQ ID NO: 5251743 - DNA, 25 bp, Homo sapien
ctcctgagaaacgtgcagaaccggg

SEQ ID NO: 5251744 - DNA, 25 bp, Homo sapien
gtccgagcggacttctgagggcacc

SEQ ID NO: 5251745 - DNA, 25 bp, Homo sapien
gtggcacgagcgcagtcccctgcat

SEQ ID NO: 5251746 - DNA, 25 bp, Homo sapien
catctatggttttcaacggtgctac

SEQ ID NO: 5251747 - DNA, 25 bp, Homo sapien
taggcaactataactcaacggcaag

SEQ ID NO: 5251748 - DNA, 25 bp, Homo sapien
catgacctattgctcttggactaca

SEQ ID NO: 5251749 - DNA, 25 bp, Homo sapien
gtacttaccgtaactggagcttgca

SEQ ID NO: 5251750 - DNA, 25 bp, Homo sapien
atcgggccctgaccccgtcacactg

SEQ ID NO: 5251751 - DNA, 25 bp, Homo sapien
actctcgggctcagatgaaccatcc

SEQ ID NO: 5251752 - DNA, 25 bp, Homo sapien
tcctaaaagccaacggccccagcat

SEQ ID NO: 5251753 - DNA, 25 bp, Homo sapien
ccccagcatccaatcgggccctgac

SEQ ID NO: 5251754 - DNA, 25 bp, Homo sapien
aagcaccattcatcaggggatgaga

SEQ ID NO: 5251755 - DNA, 25 bp, Homo sapien
acccactactcaggaacacacatgg

SEQ ID NO: 5251756 - DNA, 25 bp, Homo sapien
gcagcaggtgatcagcaaacaccca

SEQ ID NO: 5251757 - DNA, 25 bp, Homo sapien
catcattctataaggacaaagcacc

SEQ ID NO: 5251758 - DNA, 25 bp, Homo sapien
ggtggtcgcgggggacctttcatca

SEQ ID NO: 5251759 - DNA, 25 bp, Homo sapien
tggtggtcgcgggggacctttcatc

SEQ ID NO: 5251760 - DNA, 25 bp, Homo sapien
gtggtcgcgggggacctttcatcat

SEQ ID NO: 5251761 - DNA, 25 bp, Homo sapien
gggcaactgccgcactgcagaatcc

SEQ ID NO: 5251762 - DNA, 25 bp, Homo sapien
ttcatgacaccaacggccagcagga

SEQ ID NO: 5251763 - DNA, 25 bp, Homo sapien
caacggagtgtgtgccacatcagcg

SEQ ID NO: 5251764 - DNA, 25 bp, Homo sapien
aagctgagggagtgtgcacgcccaa

SEQ ID NO: 5251765 - DNA, 25 bp, Homo sapien
aacactccagaaactcgcataaggg

SEQ ID NO: 5251766 - DNA, 25 bp, Homo sapien
tggctcagaaatacactctggaaag

SEQ ID NO: 5251767 - DNA, 25 bp, Homo sapien
tggtggctcagaaatacactctgga

SEQ ID NO: 5251768 - DNA, 25 bp, Homo sapien
gcagaacactccagaaactcgcata

SEQ ID NO: 5251769 - DNA, 25 bp, Homo sapien
cacgcacacgcacaatctttctgag

SEQ ID NO: 5251770 - DNA, 25 bp, Homo sapien
cacacgcacaatctttctgagggcg

SEQ ID NO: 5251771 - DNA, 25 bp, Homo sapien
acacgcacacgcacaatctttctga

SEQ ID NO: 5251772 - DNA, 25 bp, Homo sapien
cgcacaatctttctgagggcggatg

SEQ ID NO: 5251773 - DNA, 25 bp, Homo sapien
ctttgtggggaaagcaatcacttcc

SEQ ID NO: 5251774 - DNA, 25 bp, Homo sapien
ggggaaagcaatcacttccatctct

SEQ ID NO: 5251775 - DNA, 25 bp, Homo sapien
tggggaaagcaatcacttccatctc

SEQ ID NO: 5251776 - DNA, 25 bp, Homo sapien
gtggggaaagcaatcacttccatct

SEQ ID NO: 5251777 - DNA, 25 bp, Homo sapien
gcactgacccagtggcacaacagca

SEQ ID NO: 5251778 - DNA, 25 bp, Homo sapien
gccaatcatggtgaactctgctttt

SEQ ID NO: 5251779 - DNA, 25 bp, Homo sapien
tccaagagcttcttgctcaccagca

SEQ ID NO: 5251780 - DNA, 25 bp, Homo sapien
accagcatgtgccaatcatggtgaa

SEQ ID NO: 5251781 - DNA, 25 bp, Homo sapien
ctttcactcttccggctgaaacgca

SEQ ID NO: 5251782 - DNA, 25 bp, Homo sapien
gccctttcactcttccggctgaaac

SEQ ID NO: 5251783 - DNA, 25 bp, Homo sapien
cactcttccggctgaaacgcagcct

SEQ ID NO: 5251784 - DNA, 25 bp, Homo sapien
gcagcctgttgcggctgaaacatat

SEQ ID NO: 5251785 - DNA, 25 bp, Homo sapien
ccgttttggcatagtaaagcgttcg

SEQ ID NO: 5251786 - DNA, 25 bp, Homo sapien
tatctcctttttgatcgctggaatg

SEQ ID NO: 5251787 - DNA, 25 bp, Homo sapien
gttctgtttggtcagcatcccctct

SEQ ID NO: 5251788 - DNA, 25 bp, Homo sapien
ttcgccctcgaagcttaaagtatct

SEQ ID NO: 5251789 - DNA, 25 bp, Homo sapien
ggtattcagaatcccagccaacaca

SEQ ID NO: 5251790 - DNA, 25 bp, Homo sapien
catccgcttaaacatggcagtaatc

SEQ ID NO: 5251791 - DNA, 25 bp, Homo sapien
gctttaaatctacctacaatagggc

SEQ ID NO: 5251792 - DNA, 25 bp, Homo sapien
tagtactgacaccaatcctgataaa

SEQ ID NO: 5251793 - DNA, 25 bp, Homo sapien
ggcatctgtcagatccacctcatca

SEQ ID NO: 5251794 - DNA, 25 bp, Homo sapien
actgttgttgacgtttttggtactg

SEQ ID NO: 5251795 - DNA, 25 bp, Homo sapien
gatccacctcatcaaatatgattga

SEQ ID NO: 5251796 - DNA, 25 bp, Homo sapien
tggtactggattcagctacgctggc

SEQ ID NO: 5251797 - DNA, 25 bp, Homo sapien
ctttttgtctacatgggatggccta

SEQ ID NO: 5251798 - DNA, 25 bp, Homo sapien
tgaaagcacctgaaactagcactaa

SEQ ID NO: 5251799 - DNA, 25 bp, Homo sapien
ttattagagtcaaaccttacacagg

SEQ ID NO: 5251800 - DNA, 25 bp, Homo sapien
ggcaggcgctaaagtcagcccgtaa

SEQ ID NO: 5251801 - DNA, 25 bp, Homo sapien
gcaaacaagcgtaggacttgaagac

SEQ ID NO: 5251802 - DNA, 25 bp, Homo sapien
aaaaagcaaacaagcgtaggacttg

SEQ ID NO: 5251803 - DNA, 25 bp, Homo sapien
caaacaagcgtaggacttgaagaca

SEQ ID NO: 5251804 - DNA, 25 bp, Homo sapien
aagcaaacaagcgtaggacttgaag

SEQ ID NO: 5251805 - DNA, 25 bp, Homo sapien
tgtcctcagttgaaccaccgcctca

SEQ ID NO: 5251806 - DNA, 25 bp, Homo sapien
gaattcctgtcctcagttgaaccac

SEQ ID NO: 5251807 - DNA, 25 bp, Homo sapien
tcagttgaaccaccgcctcagcttc

SEQ ID NO: 5251808 - DNA, 25 bp, Homo sapien
tcctgtcctcagttgaaccaccgcc

SEQ ID NO: 5251809 - DNA, 25 bp, Homo sapien
aaggtgctcgggcatggccaagttt

SEQ ID NO: 5251810 - DNA, 25 bp, Homo sapien
gaaagttccaaaaggtgctcgggca

SEQ ID NO: 5251811 - DNA, 25 bp, Homo sapien
gcatatggcagtttcctgagcacca

SEQ ID NO: 5251812 - DNA, 25 bp, Homo sapien
gagcaccatgtaaacaggaaggctt

SEQ ID NO: 5251813 - DNA, 25 bp, Homo sapien
tggaaagctttgaaaaagcacccac

SEQ ID NO: 5251814 - DNA, 25 bp, Homo sapien
ttggaaagctttgaaaaagcaccca

SEQ ID NO: 5251815 - DNA, 25 bp, Homo sapien
tccccaagctgccggccggacatga

SEQ ID NO: 5251816 - DNA, 25 bp, Homo sapien
gtccccaagctgccggccggacatg

SEQ ID NO: 5251817 - DNA, 25 bp, Homo sapien
ccccaagctgccggccggacatgag

SEQ ID NO: 5251818 - DNA, 25 bp, Homo sapien
tcctccattctctgggataaacaag

SEQ ID NO: 5251819 - DNA, 25 bp, Homo sapien
tgtcaaatgactcctccattctctg

SEQ ID NO: 5251820 - DNA, 25 bp, Homo sapien
cattctctgggataaacaagttttc

SEQ ID NO: 5251821 - DNA, 25 bp, Homo sapien
acaagttttccagctggcaaactcg

SEQ ID NO: 5251822 - DNA, 25 bp, Homo sapien
tgggttgaagcaattctccctgcct

SEQ ID NO: 5251823 - DNA, 25 bp, Homo sapien
cccaccaccacatccagctaatttt

SEQ ID NO: 5251824 - DNA, 25 bp, Homo sapien
cgcccaccaccacatccagctaatt

SEQ ID NO: 5251825 - DNA, 25 bp, Homo sapien
tccctgcctcagcctcctgagtagc

SEQ ID NO: 5251826 - DNA, 25 bp, Homo sapien
cagcattaatccatccccagagcag

SEQ ID NO: 5251827 - DNA, 25 bp, Homo sapien
gcctcatagttcgaaagtctaagag

SEQ ID NO: 5251828 - DNA, 25 bp, Homo sapien
aggaactgacccctacaataacagc

SEQ ID NO: 5251829 - DNA, 25 bp, Homo sapien
gctgcgtcaaaggtgacagtgagaa

SEQ ID NO: 5251830 - DNA, 25 bp, Homo sapien
caggtgtggaattcactgggttaac

SEQ ID NO: 5251831 - DNA, 25 bp, Homo sapien
tgtggaattcactgggttaacttcc

SEQ ID NO: 5251832 - DNA, 25 bp, Homo sapien
cttctgcacctgatcccgcaggcct

SEQ ID NO: 5251833 - DNA, 25 bp, Homo sapien
cacctgatcccgcaggcctgcactg

SEQ ID NO: 5251834 - DNA, 25 bp, Homo sapien
caatttgactcaatgcctgcttcct

SEQ ID NO: 5251835 - DNA, 25 bp, Homo sapien
caggtgctgccttcagtaaaacccc

SEQ ID NO: 5251836 - DNA, 25 bp, Homo sapien
caccaatttgactcaatgcctgctt

SEQ ID NO: 5251837 - DNA, 25 bp, Homo sapien
taaaaccccacacttagcaaacagc

SEQ ID NO: 5251838 - DNA, 25 bp, Homo sapien
tcaagatcagagataattactccca

SEQ ID NO: 5251839 - DNA, 25 bp, Homo sapien
aaagctgcaatgaaccttgatcacg

SEQ ID NO: 5251840 - DNA, 25 bp, Homo sapien
tcagtaggctaaggtgcgggaatca

SEQ ID NO: 5251841 - DNA, 25 bp, Homo sapien
tatctatgccttaatctacgcctat

SEQ ID NO: 5251842 - DNA, 25 bp, Homo sapien
cttggctttcagtagctgggctgct

SEQ ID NO: 5251843 - DNA, 25 bp, Homo sapien
ctgcgttagtgaccttggctttcag

SEQ ID NO: 5251844 - DNA, 25 bp, Homo sapien
cctgcgttagtgaccttggctttca

SEQ ID NO: 5251845 - DNA, 25 bp, Homo sapien
agtagctgggctgctggacttctcg

SEQ ID NO: 5251846 - DNA, 25 bp, Homo sapien
gaaggtgggagaagtaagaccagaa

SEQ ID NO: 5251847 - DNA, 25 bp, Homo sapien
ggaaggtgggagaagtaagaccaga

SEQ ID NO: 5251848 - DNA, 25 bp, Homo sapien
caggaaggtgggagaagtaagacca

SEQ ID NO: 5251849 - DNA, 25 bp, Homo sapien
aggaaggtgggagaagtaagaccag

SEQ ID NO: 5251850 - DNA, 25 bp, Homo sapien
tgcccgaatcctggattccccgtac

SEQ ID NO: 5251851 - DNA, 25 bp, Homo sapien
tcctgctgttccgatgctgcccgaa

SEQ ID NO: 5251852 - DNA, 25 bp, Homo sapien
ctgctgttccgatgctgcccgaatc

SEQ ID NO: 5251853 - DNA, 25 bp, Homo sapien
gaatcctggattccccgtacacaat

SEQ ID NO: 5251854 - DNA, 25 bp, Homo sapien
caaaaactgggtgttaaagtcaatg

SEQ ID NO: 5251855 - DNA, 25 bp, Homo sapien
caaaattgaagtgacccagcacaaa

SEQ ID NO: 5251856 - DNA, 25 bp, Homo sapien
gctgctccacgtgtatcaaaattga

SEQ ID NO: 5251857 - DNA, 25 bp, Homo sapien
ggtgttaaagtcaatgggcaagagc

SEQ ID NO: 5251858 - DNA, 25 bp, Homo sapien
aaaggaccaggtcctctatgtcagg

SEQ ID NO: 5251859 - DNA, 25 bp, Homo sapien
aaaaggaccaggtcctctatgtcag

SEQ ID NO: 5251860 - DNA, 25 bp, Homo sapien
aaggaccaggtcctctatgtcagga

SEQ ID NO: 5251861 - DNA, 25 bp, Homo sapien
gaaaaggaccaggtcctctatgtca

SEQ ID NO: 5251862 - DNA, 25 bp, Homo sapien
tggactctggcttacacacacatgg

SEQ ID NO: 5251863 - DNA, 25 bp, Homo sapien
aatgagctgatgtggccaggacacc

SEQ ID NO: 5251864 - DNA, 25 bp, Homo sapien
tatgggcgaggcacaaagaaggtct

SEQ ID NO: 5251865 - DNA, 25 bp, Homo sapien
tattaaaccgcagggagtgatctct

SEQ ID NO: 5251866 - DNA, 25 bp, Homo sapien
cgtggtcgggaacatgcatcaagct

SEQ ID NO: 5251867 - DNA, 25 bp, Homo sapien
tatactcatacattgggagacaagc

SEQ ID NO: 5251868 - DNA, 25 bp, Homo sapien
taaacaggcctacagtgaatacact

SEQ ID NO: 5251869 - DNA, 25 bp, Homo sapien
gaatgctgcacctcagtcaaaaagg

SEQ ID NO: 5251870 - DNA, 25 bp, Homo sapien
ctactggcaaccaaggaatggtgta

SEQ ID NO: 5251871 - DNA, 25 bp, Homo sapien
tgcagggagatgctctaaggaatac

SEQ ID NO: 5251872 - DNA, 25 bp, Homo sapien
tggactgcagccagtatcataacta

SEQ ID NO: 5251873 - DNA, 25 bp, Homo sapien
taagagcatccctatgtctggactg

SEQ ID NO: 5251874 - DNA, 25 bp, Homo sapien
ctgagggacggtcatgggagactgg

SEQ ID NO: 5251875 - DNA, 25 bp, Homo sapien
ggcaggcagataactatttcccaca

SEQ ID NO: 5251876 - DNA, 25 bp, Homo sapien
tgactcagccatgaagacgacaaag

SEQ ID NO: 5251877 - DNA, 25 bp, Homo sapien
ccatgaagacgacaaagtgggccct

SEQ ID NO: 5251878 - DNA, 25 bp, Homo sapien
cactgactcagccatgaagacgaca

SEQ ID NO: 5251879 - DNA, 25 bp, Homo sapien
ttcttttctgttatcagcacacaag

SEQ ID NO: 5251880 - DNA, 25 bp, Homo sapien
caaagtgctccctgttctgcacagt

SEQ ID NO: 5251881 - DNA, 25 bp, Homo sapien
caagatgagcttcctgcatggagtt

SEQ ID NO: 5251882 - DNA, 25 bp, Homo sapien
tatcagcacacaagatgagcttcct

SEQ ID NO: 5251883 - DNA, 25 bp, Homo sapien
tcggcctcgcgtgggaacaggcgta

SEQ ID NO: 5251884 - DNA, 25 bp, Homo sapien
agtggtccatgctgtactgggtggg

SEQ ID NO: 5251885 - DNA, 25 bp, Homo sapien
gcaggacagcccgtgcgacgtgacc

SEQ ID NO: 5251886 - DNA, 25 bp, Homo sapien
cacacattgcagtaggtcggcctcg

SEQ ID NO: 5251887 - DNA, 25 bp, Homo sapien
tgagagaaggggcacatgagcctac

SEQ ID NO: 5251888 - DNA, 25 bp, Homo sapien
gagcagtgttgtgagaaccgtccag

SEQ ID NO: 5251889 - DNA, 25 bp, Homo sapien
ttcccatgctgagcagtgttgtgag

SEQ ID NO: 5251890 - DNA, 25 bp, Homo sapien
tgagcctacaagctgtgtctgtgcc

SEQ ID NO: 5251891 - DNA, 25 bp, Homo sapien
cagtgtggtccacttgcagttattg

SEQ ID NO: 5251892 - DNA, 25 bp, Homo sapien
ttattggttgcacgcacagcacagc

SEQ ID NO: 5251893 - DNA, 25 bp, Homo sapien
cagcacagcgcttgtgggccttaaa

SEQ ID NO: 5251894 - DNA, 25 bp, Homo sapien
aatgatgtccttcccgatcgaggcc

SEQ ID NO: 5251895 - DNA, 25 bp, Homo sapien
cacaggtcttgtcgcacacagtgca

SEQ ID NO: 5251896 - DNA, 25 bp, Homo sapien
tccaaccactggtggggcattgcaa

SEQ ID NO: 5251897 - DNA, 25 bp, Homo sapien
acacagtgcacttggcgctcacagg

SEQ ID NO: 5251898 - DNA, 25 bp, Homo sapien
tcacaggtaggtttccttccaacca

SEQ ID NO: 5251899 - DNA, 25 bp, Homo sapien
catcggagtcgatgctgttgagagc

SEQ ID NO: 5251900 - DNA, 25 bp, Homo sapien
ccgtgggtgggatgactgacacttt

SEQ ID NO: 5251901 - DNA, 25 bp, Homo sapien
gtgggatgactgacactttgcacag

SEQ ID NO: 5251902 - DNA, 25 bp, Homo sapien
atcggagtcgatgctgttgagagcc

SEQ ID NO: 5251903 - DNA, 25 bp, Homo sapien
ctgcaagccagtgtgccagcatgtg

SEQ ID NO: 5251904 - DNA, 25 bp, Homo sapien
ccacattcacaagctgtccaaatgc

SEQ ID NO: 5251905 - DNA, 25 bp, Homo sapien
tccacattcacaagctgtccaaatg

SEQ ID NO: 5251906 - DNA, 25 bp, Homo sapien
ctccacattcacaagctgtccaaat

SEQ ID NO: 5251907 - DNA, 25 bp, Homo sapien
atgtcccagccagacatgagagcag

SEQ ID NO: 5251908 - DNA, 25 bp, Homo sapien
ggcttgtgcaagaaggaggacagct

SEQ ID NO: 5251909 - DNA, 25 bp, Homo sapien
caacagtgggcttgtgcaagaagga

SEQ ID NO: 5251910 - DNA, 25 bp, Homo sapien
ctttttgaattgacgaagaccaaca

SEQ ID NO: 5251911 - DNA, 25 bp, Homo sapien
gaagaccaacagtgggcttgtgcaa

SEQ ID NO: 5251912 - DNA, 25 bp, Homo sapien
ttcatgaggtcgaagacctgggcgg

SEQ ID NO: 5251913 - DNA, 25 bp, Homo sapien
gtgggcctccgttcatgaggtcgaa

SEQ ID NO: 5251914 - DNA, 25 bp, Homo sapien
tcatgaggtcgaagacctgggcggg

SEQ ID NO: 5251915 - DNA, 25 bp, Homo sapien
ccgaggtgtgggcctccgttcatga

SEQ ID NO: 5251916 - DNA, 25 bp, Homo sapien
ctgtttatgaaggttgaggctgtcg

SEQ ID NO: 5251917 - DNA, 25 bp, Homo sapien
tccggaatgtgtcaaacttctggaa

SEQ ID NO: 5251918 - DNA, 25 bp, Homo sapien
tgtcgatttcggagaggacccagcc

SEQ ID NO: 5251919 - DNA, 25 bp, Homo sapien
cgccacaaaccagaatccggaatgt

SEQ ID NO: 5251920 - DNA, 25 bp, Homo sapien
cctggctgggctccctcctgtcctg

SEQ ID NO: 5251921 - DNA, 25 bp, Homo sapien
ggctgggctccctcctgtcctggta

SEQ ID NO: 5251922 - DNA, 25 bp, Homo sapien
tggctgggctccctcctgtcctggt

SEQ ID NO: 5251923 - DNA, 25 bp, Homo sapien
ctcctggctgggctccctcctgtcc

SEQ ID NO: 5251924 - DNA, 25 bp, Homo sapien
gcttggtgtggaaattaaatgacta

SEQ ID NO: 5251925 - DNA, 25 bp, Homo sapien
aaaaaactaagtccaatgaaccatg

SEQ ID NO: 5251926 - DNA, 25 bp, Homo sapien
gcactgtgcattgtatgtactgtga

SEQ ID NO: 5251927 - DNA, 25 bp, Homo sapien
gcccgtttaaattacaagtgcactg

SEQ ID NO: 5251928 - DNA, 25 bp, Homo sapien
gaagccctgcaagtcgctgagcgtt

SEQ ID NO: 5251929 - DNA, 25 bp, Homo sapien
ccacatcaggtgtcaaagagacgca

SEQ ID NO: 5251930 - DNA, 25 bp, Homo sapien
ctctgaggacacagcgttaagggaa

SEQ ID NO: 5251931 - DNA, 25 bp, Homo sapien
caaggctcagctatcaattgaggcg

SEQ ID NO: 5251932 - DNA, 25 bp, Homo sapien
tactcgggccaagtcgttccctgtg

SEQ ID NO: 5251933 - DNA, 25 bp, Homo sapien
gtcgttccctgtgccgagcggcagc

SEQ ID NO: 5251934 - DNA, 25 bp, Homo sapien
cagcccagtactcgggccaagtcgt

SEQ ID NO: 5251935 - DNA, 25 bp, Homo sapien
gctgggtgtcgtcatcgcaggctga

SEQ ID NO: 5251936 - DNA, 25 bp, Homo sapien
ctcgctgaagtcttcggtgacggta

SEQ ID NO: 5251937 - DNA, 25 bp, Homo sapien
ttcggtgacggtagaggaggaggcc

SEQ ID NO: 5251938 - DNA, 25 bp, Homo sapien
gcctgccgggggagcttggcctcgt

SEQ ID NO: 5251939 - DNA, 25 bp, Homo sapien
ggggagcttggcctcgtatgccatg

SEQ ID NO: 5251940 - DNA, 25 bp, Homo sapien
tttgggtccgtttgcagcagaggct

SEQ ID NO: 5251941 - DNA, 25 bp, Homo sapien
tactcatcctgacagcggcatgctg

SEQ ID NO: 5251942 - DNA, 25 bp, Homo sapien
gaatctccttcagtctgcgatccca

SEQ ID NO: 5251943 - DNA, 25 bp, Homo sapien
catgctggcgggtcggctccaggtt

SEQ ID NO: 5251944 - DNA, 25 bp, Homo sapien
accccaaatggccaggactgttggt

SEQ ID NO: 5251945 - DNA, 25 bp, Homo sapien
ctgcaatcaccccaaatggccagga

SEQ ID NO: 5251946 - DNA, 25 bp, Homo sapien
ccaaatggccaggactgttggtctc

SEQ ID NO: 5251947 - DNA, 25 bp, Homo sapien
tgcaatcaccccaaatggccaggac

SEQ ID NO: 5251948 - DNA, 25 bp, Homo sapien
gagtcttcatagaagagaatctgct

SEQ ID NO: 5251949 - DNA, 25 bp, Homo sapien
ctggtccgaggtgaggattttagaa

SEQ ID NO: 5251950 - DNA, 25 bp, Homo sapien
attttagaaaggtgggctgcaaccg

SEQ ID NO: 5251951 - DNA, 25 bp, Homo sapien
ttggccgaggagatgaccaccgagt

SEQ ID NO: 5251952 - DNA, 25 bp, Homo sapien
cgtgccacgaagtccttcaccgtct

SEQ ID NO: 5251953 - DNA, 25 bp, Homo sapien
tcggtcgtcttctcataggccttcc

SEQ ID NO: 5251954 - DNA, 25 bp, Homo sapien
tccgagctctcggtcgtcttctcat

SEQ ID NO: 5251955 - DNA, 25 bp, Homo sapien
tgactcctccgagctctcggtcgtc

SEQ ID NO: 5251956 - DNA, 25 bp, Homo sapien
gagctgagtcttagtctgcatagaa

SEQ ID NO: 5251957 - DNA, 25 bp, Homo sapien
gattctgtgtctggacccttgagcc

SEQ ID NO: 5251958 - DNA, 25 bp, Homo sapien
caaccatactgattgcgagctgagt

SEQ ID NO: 5251959 - DNA, 25 bp, Homo sapien
tcagactgaatgcaagctaccactt

SEQ ID NO: 5251960 - DNA, 25 bp, Homo sapien
tcagcatgagctgttctcgaggccg

SEQ ID NO: 5251961 - DNA, 25 bp, Homo sapien
tgatgccaccaagcggtctccggtg

SEQ ID NO: 5251962 - DNA, 25 bp, Homo sapien
ggtctccggtggaaccgcagatgct

SEQ ID NO: 5251963 - DNA, 25 bp, Homo sapien
tccaaggtcttgagaagggaatcca

SEQ ID NO: 5251964 - DNA, 25 bp, Homo sapien
gagaggcccaggacgaagccctcct

SEQ ID NO: 5251965 - DNA, 25 bp, Homo sapien
agagaggcccaggacgaagccctcc

SEQ ID NO: 5251966 - DNA, 25 bp, Homo sapien
aggcccaggacgaagccctcctgct

SEQ ID NO: 5251967 - DNA, 25 bp, Homo sapien
agaggcccaggacgaagccctcctg

SEQ ID NO: 5251968 - DNA, 25 bp, Homo sapien
cagcttttcacacggagatttcgac

SEQ ID NO: 5251969 - DNA, 25 bp, Homo sapien
tggtgttgagcgcaggcaggccgtc

SEQ ID NO: 5251970 - DNA, 25 bp, Homo sapien
tgggtacaggatcttggtgttgagc

SEQ ID NO: 5251971 - DNA, 25 bp, Homo sapien
gcagaactgcctagggacagactcc

SEQ ID NO: 5251972 - DNA, 25 bp, Homo sapien
agccaccgggtaaggaaccagacat

SEQ ID NO: 5251973 - DNA, 25 bp, Homo sapien
ttaacaggcgactgatgactgagcc

SEQ ID NO: 5251974 - DNA, 25 bp, Homo sapien
ctggttcagagttgaagggatcagc

SEQ ID NO: 5251975 - DNA, 25 bp, Homo sapien
agggatcagcattaattaacaggcg

SEQ ID NO: 5251976 - DNA, 25 bp, Homo sapien
atccctggcgcctctcgtctacttt

SEQ ID NO: 5251977 - DNA, 25 bp, Homo sapien
ccacggaggcgcctcttctaggcag

SEQ ID NO: 5251978 - DNA, 25 bp, Homo sapien
agttcacaggaatgggatcatgcgg

SEQ ID NO: 5251979 - DNA, 25 bp, Homo sapien
atcatgcggtcgtgggctctgtgtc

SEQ ID NO: 5251980 - DNA, 25 bp, Homo sapien
catgacacatttctccgtgtaatac

SEQ ID NO: 5251981 - DNA, 25 bp, Homo sapien
caggccaatgccaaaatagttgttc

SEQ ID NO: 5251982 - DNA, 25 bp, Homo sapien
ggatatcttcgcatccaggccaatg

SEQ ID NO: 5251983 - DNA, 25 bp, Homo sapien
tctgggtgctcatcgcgcttgttgt

SEQ ID NO: 5251984 - DNA, 25 bp, Homo sapien
tgaatttcccttgacctggccagcc

SEQ ID NO: 5251985 - DNA, 25 bp, Homo sapien
tctcattaagagatgccgccattcc

SEQ ID NO: 5251986 - DNA, 25 bp, Homo sapien
gtgcttctgacaaggcgatctgggc

SEQ ID NO: 5251987 - DNA, 25 bp, Homo sapien
ttttctgtagtatcacggacttggg

SEQ ID NO: 5251988 - DNA, 25 bp, Homo sapien
gtaggttctgtgcagcaactctttg

SEQ ID NO: 5251989 - DNA, 25 bp, Homo sapien
agcaactctttggttccaagaactc

SEQ ID NO: 5251990 - DNA, 25 bp, Homo sapien
tcttgtaggttctgtgcagcaactc

SEQ ID NO: 5251991 - DNA, 25 bp, Homo sapien
cagcaactctttggttccaagaact

SEQ ID NO: 5251992 - DNA, 25 bp, Homo sapien
ggagtgggatgggtcgcccgtcaca

SEQ ID NO: 5251993 - DNA, 25 bp, Homo sapien
ctgggaatgttaaggacagcaattc

SEQ ID NO: 5251994 - DNA, 25 bp, Homo sapien
ccccagaagttggttcctccggcat

SEQ ID NO: 5251995 - DNA, 25 bp, Homo sapien
gaagttggttcctccggcatagctg

SEQ ID NO: 5251996 - DNA, 25 bp, Homo sapien
ctgcaagggacacgttagagctgac

SEQ ID NO: 5251997 - DNA, 25 bp, Homo sapien
tgtagcctgatgactcgagagacgg

SEQ ID NO: 5251998 - DNA, 25 bp, Homo sapien
tgcatgctgccgaacacggcgacca

SEQ ID NO: 5251999 - DNA, 25 bp, Homo sapien
gcgatccgatgatgctgtagcctga

SEQ ID NO: 5252000 - DNA, 25 bp, Homo sapien
catcgaatgatggagctgcgaaagt

SEQ ID NO: 5252001 - DNA, 25 bp, Homo sapien
gcaggggtgttgtagctcccagaag

SEQ ID NO: 5252002 - DNA, 25 bp, Homo sapien
gtcagtgcaggagaccttggtgctg

SEQ ID NO: 5252003 - DNA, 25 bp, Homo sapien
tgagcagtcagtgcaggagaccttg

SEQ ID NO: 5252004 - DNA, 25 bp, Homo sapien
actgggcccctgccacgtgaaaaca

SEQ ID NO: 5252005 - DNA, 25 bp, Homo sapien
tccgaatgtaccctggcggctggac

SEQ ID NO: 5252006 - DNA, 25 bp, Homo sapien
tctgtgcccggttcttgtggacaat

SEQ ID NO: 5252007 - DNA, 25 bp, Homo sapien
tcatccccaaggatggagatcttca

SEQ ID NO: 5252008 - DNA, 25 bp, Homo sapien
tgtggacaatccgaatgtaccctgg

SEQ ID NO: 5252009 - DNA, 25 bp, Homo sapien
gcagctcgcacttctgcttgtcttc

SEQ ID NO: 5252010 - DNA, 25 bp, Homo sapien
gggcagctcgcacttctgcttgtct

SEQ ID NO: 5252011 - DNA, 25 bp, Homo sapien
cggggcagctcgcacttctgcttgt

SEQ ID NO: 5252012 - DNA, 25 bp, Homo sapien
ggcggggcagctcgcacttctgctt

SEQ ID NO: 5252013 - DNA, 25 bp, Homo sapien
gagggactcacaggcggaacccgca

SEQ ID NO: 5252014 - DNA, 25 bp, Homo sapien
cggaacccgcacctggcgggcgagg

SEQ ID NO: 5252015 - DNA, 25 bp, Homo sapien
cgcacctggcgggcgaggagcagga

SEQ ID NO: 5252016 - DNA, 25 bp, Homo sapien
gaacccgcacctggcgggcgaggag

SEQ ID NO: 5252017 - DNA, 25 bp, Homo sapien
acggcgtgggccagttcctgctcca

SEQ ID NO: 5252018 - DNA, 25 bp, Homo sapien
gtgagactgagctatttctcggata

SEQ ID NO: 5252019 - DNA, 25 bp, Homo sapien
gcattgacggcgtgggccagttcct

SEQ ID NO: 5252020 - DNA, 25 bp, Homo sapien
ctccatgtcccggtgagactgagct

SEQ ID NO: 5252021 - DNA, 25 bp, Homo sapien
gcggcagacactgagaagaagccag

SEQ ID NO: 5252022 - DNA, 25 bp, Homo sapien
gagaagaagccaggactgaaaaggc

SEQ ID NO: 5252023 - DNA, 25 bp, Homo sapien
ggccgagggcggcagacactgagaa

SEQ ID NO: 5252024 - DNA, 25 bp, Homo sapien
ggactgaaaaggccagaatagctac

SEQ ID NO: 5252025 - DNA, 25 bp, Homo sapien
agctctgaagttattcaccatttcc

SEQ ID NO: 5252026 - DNA, 25 bp, Homo sapien
cgtctcactgcgcagagctctgaag

SEQ ID NO: 5252027 - DNA, 25 bp, Homo sapien
ccaggacgaagctgcagttgagccc

SEQ ID NO: 5252028 - DNA, 25 bp, Homo sapien
catttccaggacgaagctgcagttg

SEQ ID NO: 5252029 - DNA, 25 bp, Homo sapien
cattcacctgtgtcaagcagtggaa

SEQ ID NO: 5252030 - DNA, 25 bp, Homo sapien
ggagccattcacctgtgtcaagcag

SEQ ID NO: 5252031 - DNA, 25 bp, Homo sapien
cctctgtcagaaatggggtcggagc

SEQ ID NO: 5252032 - DNA, 25 bp, Homo sapien
gggtcggagccattcacctgtgtca

SEQ ID NO: 5252033 - DNA, 25 bp, Homo sapien
cactttctaagtagtgctggtgaga

SEQ ID NO: 5252034 - DNA, 25 bp, Homo sapien
taaaactgtccatcagtcaacgatg

SEQ ID NO: 5252035 - DNA, 25 bp, Homo sapien
gaacctcactttctaagtagtgctg

SEQ ID NO: 5252036 - DNA, 25 bp, Homo sapien
cacatagagcaaggctgacaactga

SEQ ID NO: 5252037 - DNA, 25 bp, Homo sapien
tgctctgctctgatcagggagctca

SEQ ID NO: 5252038 - DNA, 25 bp, Homo sapien
agagaaatggagagtgtgcactgct

SEQ ID NO: 5252039 - DNA, 25 bp, Homo sapien
gtgcactgctgatcagcgcgaggcc

SEQ ID NO: 5252040 - DNA, 25 bp, Homo sapien
gggtgaggtccgctccagggctctg

SEQ ID NO: 5252041 - DNA, 25 bp, Homo sapien
gtcggtccatctcggcaagagcact

SEQ ID NO: 5252042 - DNA, 25 bp, Homo sapien
tgctccttctgaggcggatccagct

SEQ ID NO: 5252043 - DNA, 25 bp, Homo sapien
tgagctgtcggtccatctcggcaag

SEQ ID NO: 5252044 - DNA, 25 bp, Homo sapien
cctcctgagctgtcggtccatctcg

SEQ ID NO: 5252045 - DNA, 25 bp, Homo sapien
ggaatttaccactgcgactgcgctt

SEQ ID NO: 5252046 - DNA, 25 bp, Homo sapien
ggtcacgaggcggaatttaccactg

SEQ ID NO: 5252047 - DNA, 25 bp, Homo sapien
gctcccaggctactgtgagcttctt

SEQ ID NO: 5252048 - DNA, 25 bp, Homo sapien
tgcgactgcgcttggcaagatccag

SEQ ID NO: 5252049 - DNA, 25 bp, Homo sapien
cagagcccagtgcaaggtaggcagc

SEQ ID NO: 5252050 - DNA, 25 bp, Homo sapien
tagctccaatttactgacccaaagg

SEQ ID NO: 5252051 - DNA, 25 bp, Homo sapien
tcctcatgattgtggccaaagccag

SEQ ID NO: 5252052 - DNA, 25 bp, Homo sapien
tcaattcacatagtcagagccacca

SEQ ID NO: 5252053 - DNA, 25 bp, Homo sapien
ccgtgtgaagatgtccttatactca

SEQ ID NO: 5252054 - DNA, 25 bp, Homo sapien
agccccggatgtcgtgccgtgtgaa

SEQ ID NO: 5252055 - DNA, 25 bp, Homo sapien
gatgtcgtgccgtgtgaagatgtcc

SEQ ID NO: 5252056 - DNA, 25 bp, Homo sapien
cgtgccgtgtgaagatgtccttata

SEQ ID NO: 5252057 - DNA, 25 bp, Homo sapien
aagcccaagtgcaggttccagggag

SEQ ID NO: 5252058 - DNA, 25 bp, Homo sapien
aagggagctgcgtgcaagcccaagt

SEQ ID NO: 5252059 - DNA, 25 bp, Homo sapien
tgaggtatacacgaaagcctgagaa

SEQ ID NO: 5252060 - DNA, 25 bp, Homo sapien
tgagaagaatcgtgatgctgggaca

SEQ ID NO: 5252061 - DNA, 25 bp, Homo sapien
tagatgagggccacagccgccccca

SEQ ID NO: 5252062 - DNA, 25 bp, Homo sapien
agatgagggccacagccgcccccac

SEQ ID NO: 5252063 - DNA, 25 bp, Homo sapien
ctagatgagggccacagccgccccc

SEQ ID NO: 5252064 - DNA, 25 bp, Homo sapien
gatgacaagtgacctcatgagagcc

SEQ ID NO: 5252065 - DNA, 25 bp, Homo sapien
tcagccagtgattcaacacccaggg

SEQ ID NO: 5252066 - DNA, 25 bp, Homo sapien
taacaaccatacagatgcctggccc

SEQ ID NO: 5252067 - DNA, 25 bp, Homo sapien
caggcctaaaagcaagtggatgaca

SEQ ID NO: 5252068 - DNA, 25 bp, Homo sapien
agaagacaccgccatggatgccgag

SEQ ID NO: 5252069 - DNA, 25 bp, Homo sapien
aacagagaagacaccgccatggatg

SEQ ID NO: 5252070 - DNA, 25 bp, Homo sapien
gccatggatgccgagaagacagcca

SEQ ID NO: 5252071 - DNA, 25 bp, Homo sapien
agcaggcctgccacaacggcccttc

SEQ ID NO: 5252072 - DNA, 25 bp, Homo sapien
atcctcttcatgtggcccaccttgg

SEQ ID NO: 5252073 - DNA, 25 bp, Homo sapien
ctaggcctcgacggcgggggcgctg

SEQ ID NO: 5252074 - DNA, 25 bp, Homo sapien
taggcctcgacggcgggggcgctgc

SEQ ID NO: 5252075 - DNA, 25 bp, Homo sapien
ggcccaccttggtcacgcccaggtc

SEQ ID NO: 5252076 - DNA, 25 bp, Homo sapien
tgttgttatgttcgagaccccagag

SEQ ID NO: 5252077 - DNA, 25 bp, Homo sapien
tctgagccatgactatcaacgggaa

SEQ ID NO: 5252078 - DNA, 25 bp, Homo sapien
caccaacagagcgtgggagagtctt

SEQ ID NO: 5252079 - DNA, 25 bp, Homo sapien
tgacgctgactaaaggacctggaca

SEQ ID NO: 5252080 - DNA, 25 bp, Homo sapien
tctgcacacgtgtctgagagcgtct

SEQ ID NO: 5252081 - DNA, 25 bp, Homo sapien
gacgtctgtgcgtttccgtgaagca

SEQ ID NO: 5252082 - DNA, 25 bp, Homo sapien
caaagacgcgtgtgggttgtgccct

SEQ ID NO: 5252083 - DNA, 25 bp, Homo sapien
gaagcctcgcggaatgtctgcaagt

SEQ ID NO: 5252084 - DNA, 25 bp, Homo sapien
tgaccggtttcctgagtagcctcaa

SEQ ID NO: 5252085 - DNA, 25 bp, Homo sapien
aactgcgatgctgaaaagtgcgagc

SEQ ID NO: 5252086 - DNA, 25 bp, Homo sapien
caagggtccagcttatcctgggtgc

SEQ ID NO: 5252087 - DNA, 25 bp, Homo sapien
gagggtgagtcgctctgctaagcaa

SEQ ID NO: 5252088 - DNA, 25 bp, Homo sapien
cagtgtgtactcagctgccccgtct

SEQ ID NO: 5252089 - DNA, 25 bp, Homo sapien
tcctttcagagacctgtgtataggg

SEQ ID NO: 5252090 - DNA, 25 bp, Homo sapien
aggtacacagcctctcctagatggg

SEQ ID NO: 5252091 - DNA, 25 bp, Homo sapien
tgtcctgatgcatgggtagaccaca

SEQ ID NO: 5252092 - DNA, 25 bp, Homo sapien
cagagcctggttaatctctcagtca

SEQ ID NO: 5252093 - DNA, 25 bp, Homo sapien
gtgatgtctagccagagccagctcc

SEQ ID NO: 5252094 - DNA, 25 bp, Homo sapien
tacttgacacgacatgttcctagca

SEQ ID NO: 5252095 - DNA, 25 bp, Homo sapien
ggcactgagaagtagccagaccctc

SEQ ID NO: 5252096 - DNA, 25 bp, Homo sapien
cttttgtgcgccctcagtatatgaa

SEQ ID NO: 5252097 - DNA, 25 bp, Homo sapien
agcagcatccgcctactgttggact

SEQ ID NO: 5252098 - DNA, 25 bp, Homo sapien
gcctactgttggactgaaatgagca

SEQ ID NO: 5252099 - DNA, 25 bp, Homo sapien
cagtatatgaaatacccttcctcaa

SEQ ID NO: 5252100 - DNA, 25 bp, Homo sapien
taaagtgactaattgtggcacatag

SEQ ID NO: 5252101 - DNA, 25 bp, Homo sapien
gaactttattgtaagccagatatct

SEQ ID NO: 5252102 - DNA, 25 bp, Homo sapien
cacagtgtctgttataaaaacacag

SEQ ID NO: 5252103 - DNA, 25 bp, Homo sapien
tactttggtgggatggagaacttta

SEQ ID NO: 5252104 - DNA, 25 bp, Homo sapien
cagccattgctaagtagggatcgaa

SEQ ID NO: 5252105 - DNA, 25 bp, Homo sapien
gatttaggccttaagcattcagtaa

SEQ ID NO: 5252106 - DNA, 25 bp, Homo sapien
gatcgaagcctaacaagagtagaga

SEQ ID NO: 5252107 - DNA, 25 bp, Homo sapien
tgaatgaattgtatcctggcctggc

SEQ ID NO: 5252108 - DNA, 25 bp, Homo sapien
cccgccctggccaaaacgcgaagcg

SEQ ID NO: 5252109 - DNA, 25 bp, Homo sapien
cgccctggccaaaacgcgaagcgaa

SEQ ID NO: 5252110 - DNA, 25 bp, Homo sapien
tggccaaaacgcgaagcgaacgaac

SEQ ID NO: 5252111 - DNA, 25 bp, Homo sapien
ccctggccaaaacgcgaagcgaacg

SEQ ID NO: 5252112 - DNA, 25 bp, Homo sapien
tctcgcctcgccctcctcagactgg

SEQ ID NO: 5252113 - DNA, 25 bp, Homo sapien
ccatactgattattagacacagtgg

SEQ ID NO: 5252114 - DNA, 25 bp, Homo sapien
aattgaggtaacaggttccaccctg

SEQ ID NO: 5252115 - DNA, 25 bp, Homo sapien
caccctgatttctgattccgcttaa

SEQ ID NO: 5252116 - DNA, 25 bp, Homo sapien
aaattggtgaattctctaggagcag

SEQ ID NO: 5252117 - DNA, 25 bp, Homo sapien
ttctgggccaagagaaaatagagct

SEQ ID NO: 5252118 - DNA, 25 bp, Homo sapien
ctcttctgggccaagagaaaataga

SEQ ID NO: 5252119 - DNA, 25 bp, Homo sapien
ccttatcttcaaacaaaccaagctc

SEQ ID NO: 5252120 - DNA, 25 bp, Homo sapien
ctttgcatcgggtttatccttatct

SEQ ID NO: 5252121 - DNA, 25 bp, Homo sapien
actggcgcactggtagatgactgtc

SEQ ID NO: 5252122 - DNA, 25 bp, Homo sapien
cccttggtgactggcgcactggtag

SEQ ID NO: 5252123 - DNA, 25 bp, Homo sapien
tgtcccttggtgactggcgcactgg

SEQ ID NO: 5252124 - DNA, 25 bp, Homo sapien
gtgactggcgcactggtagatgact

SEQ ID NO: 5252125 - DNA, 25 bp, Homo sapien
caaagccacaggtcagccgtagaca

SEQ ID NO: 5252126 - DNA, 25 bp, Homo sapien
ctcggcaaagccacaggtcagccgt

SEQ ID NO: 5252127 - DNA, 25 bp, Homo sapien
gtcagccgtagacacacatataggg

SEQ ID NO: 5252128 - DNA, 25 bp, Homo sapien
cacaggtcagccgtagacacacata

SEQ ID NO: 5252129 - DNA, 25 bp, Homo sapien
ccagtggctcccatccatgggcact

SEQ ID NO: 5252130 - DNA, 25 bp, Homo sapien
agtggctcccatccatgggcactac

SEQ ID NO: 5252131 - DNA, 25 bp, Homo sapien
atccatgggcactaccagcagcttc

SEQ ID NO: 5252132 - DNA, 25 bp, Homo sapien
catgggcactaccagcagcttccca

SEQ ID NO: 5252133 - DNA, 25 bp, Homo sapien
gttgaataagtcttcactgtgcaat

SEQ ID NO: 5252134 - DNA, 25 bp, Homo sapien
gagaatgagtttctccaccaccgac

SEQ ID NO: 5252135 - DNA, 25 bp, Homo sapien
tggcctgactacaaccacctcatgc

SEQ ID NO: 5252136 - DNA, 25 bp, Homo sapien
atcctccagggtgtataaggttgaa

SEQ ID NO: 5252137 - DNA, 25 bp, Homo sapien
gctgtagagatcatatgccatgaca

SEQ ID NO: 5252138 - DNA, 25 bp, Homo sapien
tgtggctgtagagatcatatgccat

SEQ ID NO: 5252139 - DNA, 25 bp, Homo sapien
ccaaattgatgtgtggctgtagaga

SEQ ID NO: 5252140 - DNA, 25 bp, Homo sapien
caacaaccaaattgatgtgtggctg

SEQ ID NO: 5252141 - DNA, 25 bp, Homo sapien
cacacacataggtgaagggggccgt

SEQ ID NO: 5252142 - DNA, 25 bp, Homo sapien
cacataggtgaagggggccgttcca

SEQ ID NO: 5252143 - DNA, 25 bp, Homo sapien
cacacataggtgaagggggccgttc

SEQ ID NO: 5252144 - DNA, 25 bp, Homo sapien
gacacacacataggtgaagggggcc

SEQ ID NO: 5252145 - DNA, 25 bp, Homo sapien
catggtgaaccagtggctcccatcc

SEQ ID NO: 5252146 - DNA, 25 bp, Homo sapien
gtgaaccagtggctcccatccatgg

SEQ ID NO: 5252147 - DNA, 25 bp, Homo sapien
gaaccagtggctcccatccatgggc

SEQ ID NO: 5252148 - DNA, 25 bp, Homo sapien
tggtgaaccagtggctcccatccat

SEQ ID NO: 5252149 - DNA, 25 bp, Homo sapien
tgcccctgagaatgagtttctccac

SEQ ID NO: 5252150 - DNA, 25 bp, Homo sapien
cctgagaatgagtttctccaccact

SEQ ID NO: 5252151 - DNA, 25 bp, Homo sapien
gagaatgagtttctccaccactgac

SEQ ID NO: 5252152 - DNA, 25 bp, Homo sapien
tcatgcccctgagaatgagtttctc

SEQ ID NO: 5252153 - DNA, 25 bp, Homo sapien
taccactggatgaacatgtcactag

SEQ ID NO: 5252154 - DNA, 25 bp, Homo sapien
tccagtgagaatcagcgaaaaccat

SEQ ID NO: 5252155 - DNA, 25 bp, Homo sapien
tagactttgtacttgtgatttccag

SEQ ID NO: 5252156 - DNA, 25 bp, Homo sapien
caaaagaactctcgtttgagtatcc

SEQ ID NO: 5252157 - DNA, 25 bp, Homo sapien
ctctccttgaaagtcatggcatctg

SEQ ID NO: 5252158 - DNA, 25 bp, Homo sapien
atggcatctgagaaccctaagagac

SEQ ID NO: 5252159 - DNA, 25 bp, Homo sapien
tccttgaaagtcatggcatctgaga

SEQ ID NO: 5252160 - DNA, 25 bp, Homo sapien
ggcatctgagaaccctaagagacct

SEQ ID NO: 5252161 - DNA, 25 bp, Homo sapien
taaatgttccttaaagtgcaggatg

SEQ ID NO: 5252162 - DNA, 25 bp, Homo sapien
taaagtgcaggatgtggttccgcac

SEQ ID NO: 5252163 - DNA, 25 bp, Homo sapien
tccttaaagtgcaggatgtggttcc

SEQ ID NO: 5252164 - DNA, 25 bp, Homo sapien
tgttccttaaagtgcaggatgtggt

SEQ ID NO: 5252165 - DNA, 25 bp, Homo sapien
gcagctggtaccactgatgaagact

SEQ ID NO: 5252166 - DNA, 25 bp, Homo sapien
gatggcagctggtaccactgatgaa

SEQ ID NO: 5252167 - DNA, 25 bp, Homo sapien
cctgatggcagctggtaccactgat

SEQ ID NO: 5252168 - DNA, 25 bp, Homo sapien
gctggtaccactgatgaagactgtg

SEQ ID NO: 5252169 - DNA, 25 bp, Homo sapien
agccagcagctgggattctaagctg

SEQ ID NO: 5252170 - DNA, 25 bp, Homo sapien
gagagaactgcagcccgagccagca

SEQ ID NO: 5252171 - DNA, 25 bp, Homo sapien
ccgagccagcagctgggattctaag

SEQ ID NO: 5252172 - DNA, 25 bp, Homo sapien
gcccgagccagcagctgggattcta

SEQ ID NO: 5252173 - DNA, 25 bp, Homo sapien
gtcagcagcagagaaacacataggg

SEQ ID NO: 5252174 - DNA, 25 bp, Homo sapien
aatggggctggtccaccctgtgcga

SEQ ID NO: 5252175 - DNA, 25 bp, Homo sapien
gagaaacacataggggaatggggct

SEQ ID NO: 5252176 - DNA, 25 bp, Homo sapien
ggctggtccaccctgtgcgagccat

SEQ ID NO: 5252177 - DNA, 25 bp, Homo sapien
ctgcatggtgaaccagtgactccca

SEQ ID NO: 5252178 - DNA, 25 bp, Homo sapien
aaaaccattggatgaactcagaaat

SEQ ID NO: 5252179 - DNA, 25 bp, Homo sapien
aaaccattggatgaactcagaaata

SEQ ID NO: 5252180 - DNA, 25 bp, Homo sapien
aagtgcatgatgtggttccgtactc

SEQ ID NO: 5252181 - DNA, 25 bp, Homo sapien
gaagatcatattgggcatcacgggt

SEQ ID NO: 5252182 - DNA, 25 bp, Homo sapien
catcacgggtttgggatagtccaaa

SEQ ID NO: 5252183 - DNA, 25 bp, Homo sapien
gatggcagttgataccaccaatgaa

SEQ ID NO: 5252184 - DNA, 25 bp, Homo sapien
attattcctaatgtgctaaaggaga

SEQ ID NO: 5252185 - DNA, 25 bp, Homo sapien
gagatggctgaacggtcactctttc

SEQ ID NO: 5252186 - DNA, 25 bp, Homo sapien
ggctgaacggtcactctttcaccaa

SEQ ID NO: 5252187 - DNA, 25 bp, Homo sapien
tgagatggctgaacggtcactcttt

SEQ ID NO: 5252188 - DNA, 25 bp, Homo sapien
gatggctgaacggtcactctttcac

SEQ ID NO: 5252189 - DNA, 25 bp, Homo sapien
aatcttgtttcccagcaagatgtaa

SEQ ID NO: 5252190 - DNA, 25 bp, Homo sapien
aagatgtaaccaactgcatgctttt

SEQ ID NO: 5252191 - DNA, 25 bp, Homo sapien
gatgtaaccaactgcatgcttttcc

SEQ ID NO: 5252192 - DNA, 25 bp, Homo sapien
ttgtttcccagcaagatgtaaccaa

SEQ ID NO: 5252193 - DNA, 25 bp, Homo sapien
ctgtgagaaaatatttgcaggaccc

SEQ ID NO: 5252194 - DNA, 25 bp, Homo sapien
gactgtgagaaaatatttgcaggac

SEQ ID NO: 5252195 - DNA, 25 bp, Homo sapien
tcaacggactgtgagaaaatatttg

SEQ ID NO: 5252196 - DNA, 25 bp, Homo sapien
cggactgtgagaaaatatttgcagg

SEQ ID NO: 5252197 - DNA, 25 bp, Homo sapien
cttttggtgactggggcacttgcag

SEQ ID NO: 5252198 - DNA, 25 bp, Homo sapien
ctaactggtactagacatttgctta

SEQ ID NO: 5252199 - DNA, 25 bp, Homo sapien
tttcttttggtgactggggcacttg

SEQ ID NO: 5252200 - DNA, 25 bp, Homo sapien
tcttttggtgactggggcacttgca

SEQ ID NO: 5252201 - DNA, 25 bp, Homo sapien
gtcttcttccatatccaaaccctga

SEQ ID NO: 5252202 - DNA, 25 bp, Homo sapien
catctctgcaatgcataatcattgc

SEQ ID NO: 5252203 - DNA, 25 bp, Homo sapien
caatgcataatcattgctggttgtc

SEQ ID NO: 5252204 - DNA, 25 bp, Homo sapien
taatcattgctggttgtcttcttcc

SEQ ID NO: 5252205 - DNA, 25 bp, Homo sapien
gagagaactgcagcccgagccagca

SEQ ID NO: 5252206 - DNA, 25 bp, Homo sapien
agccagcagctgggattctaagctg

SEQ ID NO: 5252207 - DNA, 25 bp, Homo sapien
ccgagccagcagctgggattctaag

SEQ ID NO: 5252208 - DNA, 25 bp, Homo sapien
gcccgagccagcagctgggattcta

SEQ ID NO: 5252209 - DNA, 25 bp, Homo sapien
cacataaaggaacggggctggtcca

SEQ ID NO: 5252210 - DNA, 25 bp, Homo sapien
gcagtagacacacacataaaggaac

SEQ ID NO: 5252211 - DNA, 25 bp, Homo sapien
ggctggtccaccctgcgcgagccat

SEQ ID NO: 5252212 - DNA, 25 bp, Homo sapien
aaagccacaggtcagcagtagacac

SEQ ID NO: 5252213 - DNA, 25 bp, Homo sapien
ctgcatggtgaaccagtgactccca

SEQ ID NO: 5252214 - DNA, 25 bp, Homo sapien
tgtgcaattcagtgatctttccagt

SEQ ID NO: 5252215 - DNA, 25 bp, Homo sapien
gtgatctttccagttgccaactcac

SEQ ID NO: 5252216 - DNA, 25 bp, Homo sapien
cagtgatctttccagttgccaactc

SEQ ID NO: 5252217 - DNA, 25 bp, Homo sapien
attcagtgatctttccagttgccaa

SEQ ID NO: 5252218 - DNA, 25 bp, Homo sapien
cgaaaaccatgaattcccggttctg

SEQ ID NO: 5252219 - DNA, 25 bp, Homo sapien
tgtgctttccattgagcatgggcga

SEQ ID NO: 5252220 - DNA, 25 bp, Homo sapien
aattcccggttctgatcttccagag

SEQ ID NO: 5252221 - DNA, 25 bp, Homo sapien
tgctttccattgagcatgggcgaaa

SEQ ID NO: 5252222 - DNA, 25 bp, Homo sapien
ccactggatgaactcattaatagag

SEQ ID NO: 5252223 - DNA, 25 bp, Homo sapien
accactggatgaactcattaataga

SEQ ID NO: 5252224 - DNA, 25 bp, Homo sapien
gaaacactgcatcaaaagaactctc

SEQ ID NO: 5252225 - DNA, 25 bp, Homo sapien
gccacaggtatcaaaaggatccaga

SEQ ID NO: 5252226 - DNA, 25 bp, Homo sapien
aagtattctactaattttcggtcat

SEQ ID NO: 5252227 - DNA, 25 bp, Homo sapien
gcactgtgcaccttcttcaagatgg

SEQ ID NO: 5252228 - DNA, 25 bp, Homo sapien
tccaaaacaaagtccgttcgcaaca

SEQ ID NO: 5252229 - DNA, 25 bp, Homo sapien
catcacgggtttgggatagtccaaa

SEQ ID NO: 5252230 - DNA, 25 bp, Homo sapien
tgaagatcatgttgggcatcacggg

SEQ ID NO: 5252231 - DNA, 25 bp, Homo sapien
agtccgttcgcaacaaccaaattga

SEQ ID NO: 5252232 - DNA, 25 bp, Homo sapien
cacagttcagtaaggaatccttttt

SEQ ID NO: 5252233 - DNA, 25 bp, Homo sapien
tcacagttcagtaaggaatcctttt

SEQ ID NO: 5252234 - DNA, 25 bp, Homo sapien
ttaatttccaaagccagattattct

SEQ ID NO: 5252235 - DNA, 25 bp, Homo sapien
ccaaagccagattattcttaatgtg

SEQ ID NO: 5252236 - DNA, 25 bp, Homo sapien
tgagatggctgaacggtcactcttt

SEQ ID NO: 5252237 - DNA, 25 bp, Homo sapien
ggctgaacggtcactctttcaccaa

SEQ ID NO: 5252238 - DNA, 25 bp, Homo sapien
gagatggctgaacggtcactctttc

SEQ ID NO: 5252239 - DNA, 25 bp, Homo sapien
gatggctgaacggtcactctttcac

SEQ ID NO: 5252240 - DNA, 25 bp, Homo sapien
tcagcgtgggttcaggaagtggcag

SEQ ID NO: 5252241 - DNA, 25 bp, Homo sapien
tggcagatcctcaactcggccgaag

SEQ ID NO: 5252242 - DNA, 25 bp, Homo sapien
aagtggcagatcctcaactcggccg

SEQ ID NO: 5252243 - DNA, 25 bp, Homo sapien
ggcagatcctcaactcggccgaagg

SEQ ID NO: 5252244 - DNA, 25 bp, Homo sapien
ccagttgccaactcacctctggcct

SEQ ID NO: 5252245 - DNA, 25 bp, Homo sapien
atcctccagggtgtataaggttgaa

SEQ ID NO: 5252246 - DNA, 25 bp, Homo sapien
cctctaagtagaagatgtggttcct

SEQ ID NO: 5252247 - DNA, 25 bp, Homo sapien
tctaagtagaagatgtggttcctta

SEQ ID NO: 5252248 - DNA, 25 bp, Homo sapien
tttcagaggctatgtttaaggcatt

SEQ ID NO: 5252249 - DNA, 25 bp, Homo sapien
gaatttcagaggctatgtttaaggc

SEQ ID NO: 5252250 - DNA, 25 bp, Homo sapien
gaagatcatattgggcatcacaggt

SEQ ID NO: 5252251 - DNA, 25 bp, Homo sapien
gattgcagttgataccaccaatgaa

SEQ ID NO: 5252252 - DNA, 25 bp, Homo sapien
tccattcgcagcaaccaaattgatg

SEQ ID NO: 5252253 - DNA, 25 bp, Homo sapien
gcatcacaggtttgggatactccaa

SEQ ID NO: 5252254 - DNA, 25 bp, Homo sapien
tcacacatagctttccgtatctcgg

SEQ ID NO: 5252255 - DNA, 25 bp, Homo sapien
catagctttccgtatctcggaagcc

SEQ ID NO: 5252256 - DNA, 25 bp, Homo sapien
cgtatctcggaagccctctgggtga

SEQ ID NO: 5252257 - DNA, 25 bp, Homo sapien
ctttccgtatctcggaagccctctg

SEQ ID NO: 5252258 - DNA, 25 bp, Homo sapien
agagcaagcagctgggaatctaagc

SEQ ID NO: 5252259 - DNA, 25 bp, Homo sapien
aagggggctggtccaccctgtgcaa

SEQ ID NO: 5252260 - DNA, 25 bp, Homo sapien
gacacacacatagaggaagggggct

SEQ ID NO: 5252261 - DNA, 25 bp, Homo sapien
ctcggcaaagccacaggtcagcagc

SEQ ID NO: 5252262 - DNA, 25 bp, Homo sapien
ggctggtccaccctgtgcaagccat

SEQ ID NO: 5252263 - DNA, 25 bp, Homo sapien
catggtgaaccagtggctcccatcc

SEQ ID NO: 5252264 - DNA, 25 bp, Homo sapien
gaaccagtggctcccatccatgggc

SEQ ID NO: 5252265 - DNA, 25 bp, Homo sapien
gtgaaccagtggctcccatccatgg

SEQ ID NO: 5252266 - DNA, 25 bp, Homo sapien
tggtgaaccagtggctcccatccat

SEQ ID NO: 5252267 - DNA, 25 bp, Homo sapien
tgagaatgagtttctccaccaccga

SEQ ID NO: 5252268 - DNA, 25 bp, Homo sapien
gagaatgagtttctccaccaccgac

SEQ ID NO: 5252269 - DNA, 25 bp, Homo sapien
tgactacaaccacctcatgccccct

SEQ ID NO: 5252270 - DNA, 25 bp, Homo sapien
ctacaaccacctcatgccccctgag

SEQ ID NO: 5252271 - DNA, 25 bp, Homo sapien
cctccagggtatatgaagttgaata

SEQ ID NO: 5252272 - DNA, 25 bp, Homo sapien
agatcctccagggtatatgaagttg

SEQ ID NO: 5252273 - DNA, 25 bp, Homo sapien
aatgtcattgtatgaacccattaat

SEQ ID NO: 5252274 - DNA, 25 bp, Homo sapien
gagaatatatacttcgtacttgtgc

SEQ ID NO: 5252275 - DNA, 25 bp, Homo sapien
tgcaccttcttcaagatagtggcaa

SEQ ID NO: 5252276 - DNA, 25 bp, Homo sapien
gcaccttcttcaagatagtggcaaa

SEQ ID NO: 5252277 - DNA, 25 bp, Homo sapien
tgtgcaccttcttcaagatagtggc

SEQ ID NO: 5252278 - DNA, 25 bp, Homo sapien
gtgcaccttcttcaagatagtggca

SEQ ID NO: 5252279 - DNA, 25 bp, Homo sapien
ctggggacataggaaagaggagcag

SEQ ID NO: 5252280 - DNA, 25 bp, Homo sapien
tggggacataggaaagaggagcagg

SEQ ID NO: 5252281 - DNA, 25 bp, Homo sapien
gggacataggaaagaggagcagggc

SEQ ID NO: 5252282 - DNA, 25 bp, Homo sapien
gacataggaaagaggagcagggcac

SEQ ID NO: 5252283 - DNA, 25 bp, Homo sapien
catgatgtggttccgtactctctcc

SEQ ID NO: 5252284 - DNA, 25 bp, Homo sapien
gtggttccgtactctctccttgaaa

SEQ ID NO: 5252285 - DNA, 25 bp, Homo sapien
gatgtggttccgtactctctccttg

SEQ ID NO: 5252286 - DNA, 25 bp, Homo sapien
aagtgcatgatgtggttccgtactc

SEQ ID NO: 5252287 - DNA, 25 bp, Homo sapien
tagagatcatactccgtaacaggtg

SEQ ID NO: 5252288 - DNA, 25 bp, Homo sapien
gctgtagagatcatactccgtaaca

SEQ ID NO: 5252289 - DNA, 25 bp, Homo sapien
gatcatactccgtaacaggtgtttg

SEQ ID NO: 5252290 - DNA, 25 bp, Homo sapien
catactccgtaacaggtgtttggag

SEQ ID NO: 5252291 - DNA, 25 bp, Homo sapien
cataggcaacggctttccctgatgg

SEQ ID NO: 5252292 - DNA, 25 bp, Homo sapien
cggctttccctgatggcagttgata

SEQ ID NO: 5252293 - DNA, 25 bp, Homo sapien
tttccctgatggcagttgataccac

SEQ ID NO: 5252294 - DNA, 25 bp, Homo sapien
gctttccctgatggcagttgatacc

SEQ ID NO: 5252295 - DNA, 25 bp, Homo sapien
gtcaaatcacagttcagtaaagaat

SEQ ID NO: 5252296 - DNA, 25 bp, Homo sapien
atgtcaaatcacagttcagtaaaga

SEQ ID NO: 5252297 - DNA, 25 bp, Homo sapien
tgtcaaatcacagttcagtaaagaa

SEQ ID NO: 5252298 - DNA, 25 bp, Homo sapien
aatgtcaaatcacagttcagtaaag

SEQ ID NO: 5252299 - DNA, 25 bp, Homo sapien
gacgagtacacgcattggcacaaaa

SEQ ID NO: 5252300 - DNA, 25 bp, Homo sapien
ctgacgagtacacgcattggcacaa

SEQ ID NO: 5252301 - DNA, 25 bp, Homo sapien
gagtacacgcattggcacaaaataa

SEQ ID NO: 5252302 - DNA, 25 bp, Homo sapien
ctactgacgagtacacgcattggca

SEQ ID NO: 5252303 - DNA, 25 bp, Homo sapien
atttcactttcccatgagttggctg

SEQ ID NO: 5252304 - DNA, 25 bp, Homo sapien
actttcccatgagttggctgaacag

SEQ ID NO: 5252305 - DNA, 25 bp, Homo sapien
tcactttcccatgagttggctgaac

SEQ ID NO: 5252306 - DNA, 25 bp, Homo sapien
ttcccatgagttggctgaacagtca

SEQ ID NO: 5252307 - DNA, 25 bp, Homo sapien
ctgtgagaaaatatttgcaggaccc

SEQ ID NO: 5252308 - DNA, 25 bp, Homo sapien
caacagactgtgagaaaatatttgc

SEQ ID NO: 5252309 - DNA, 25 bp, Homo sapien
agactgtgagaaaatatttgcagga

SEQ ID NO: 5252310 - DNA, 25 bp, Homo sapien
tcaacagactgtgagaaaatatttg

SEQ ID NO: 5252311 - DNA, 25 bp, Homo sapien
tggcatctcatgttcgacggaaaga

SEQ ID NO: 5252312 - DNA, 25 bp, Homo sapien
tgtcctctgcccagaaagaaattgg

SEQ ID NO: 5252313 - DNA, 25 bp, Homo sapien
cccagaaagaaattggcatctcatg

SEQ ID NO: 5252314 - DNA, 25 bp, Homo sapien
catgttcgacggaaagagagcaagg

SEQ ID NO: 5252315 - DNA, 25 bp, Homo sapien
gtcagcagtagacacacatataggg

SEQ ID NO: 5252316 - DNA, 25 bp, Homo sapien
aaagccacaggtcagcagtagacac

SEQ ID NO: 5252317 - DNA, 25 bp, Homo sapien
gacacacatataggggaaggaggcc

SEQ ID NO: 5252318 - DNA, 25 bp, Homo sapien
ggccagtccaccctgcacgagccat

SEQ ID NO: 5252319 - DNA, 25 bp, Homo sapien
gaaccagtggctcccatccatgggc

SEQ ID NO: 5252320 - DNA, 25 bp, Homo sapien
tgaaccagtggctcccatccatggg

SEQ ID NO: 5252321 - DNA, 25 bp, Homo sapien
gtgaaccagtggctcccatccatgg

SEQ ID NO: 5252322 - DNA, 25 bp, Homo sapien
ggtgaaccagtggctcccatccatg

SEQ ID NO: 5252323 - DNA, 25 bp, Homo sapien
cacctcatgccccctgaggatgagt

SEQ ID NO: 5252324 - DNA, 25 bp, Homo sapien
tctggcatgactacgaccacctcat

SEQ ID NO: 5252325 - DNA, 25 bp, Homo sapien
gaggatgagtttctccaccaccgac

SEQ ID NO: 5252326 - DNA, 25 bp, Homo sapien
atgagtttctccaccaccgactgca

SEQ ID NO: 5252327 - DNA, 25 bp, Homo sapien
cgagcatcggcaaaaaccatgaact

SEQ ID NO: 5252328 - DNA, 25 bp, Homo sapien
tggtgccgtccagcgagcatcggca

SEQ ID NO: 5252329 - DNA, 25 bp, Homo sapien
aatgcacttcgcaatggtgccgtcc

SEQ ID NO: 5252330 - DNA, 25 bp, Homo sapien
gaacttgttaatagagaaaatgcac

SEQ ID NO: 5252331 - DNA, 25 bp, Homo sapien
gaaagcgcttggttgcattttccca

SEQ ID NO: 5252332 - DNA, 25 bp, Homo sapien
agcgcttggttgcattttcccatga

SEQ ID NO: 5252333 - DNA, 25 bp, Homo sapien
ttagaaagcgcttggttgcattttc

SEQ ID NO: 5252334 - DNA, 25 bp, Homo sapien
aaagcgcttggttgcattttcccat

SEQ ID NO: 5252335 - DNA, 25 bp, Homo sapien
cttcatagccggtgggagggtgcag

SEQ ID NO: 5252336 - DNA, 25 bp, Homo sapien
ttcatagccggtgggagggtgcagg

SEQ ID NO: 5252337 - DNA, 25 bp, Homo sapien
agtgggatgccctttcttgttgacc

SEQ ID NO: 5252338 - DNA, 25 bp, Homo sapien
gtgggatgccctttcttgttgaccc

SEQ ID NO: 5252339 - DNA, 25 bp, Homo sapien
tgggatgccctttcttgttgacccc

SEQ ID NO: 5252340 - DNA, 25 bp, Homo sapien
caagcatgtaggaatagcgggatca

SEQ ID NO: 5252341 - DNA, 25 bp, Homo sapien
gaaaatcctgttgctcatatgtggg

SEQ ID NO: 5252342 - DNA, 25 bp, Homo sapien
gaagtccctacagaacatgagttgg

SEQ ID NO: 5252343 - DNA, 25 bp, Homo sapien
taaagagtagctccgctggagaccc

SEQ ID NO: 5252344 - DNA, 25 bp, Homo sapien
gggcggcagcatcttgctttgagtt

SEQ ID NO: 5252345 - DNA, 25 bp, Homo sapien
cttcttgagcaggcagacattaggc

SEQ ID NO: 5252346 - DNA, 25 bp, Homo sapien
taagactccaggaaggttgcaaagg

SEQ ID NO: 5252347 - DNA, 25 bp, Homo sapien
gagttcatctagatagcaataagac

SEQ ID NO: 5252348 - DNA, 25 bp, Homo sapien
cagtacgtggtgagaatcctagagc

SEQ ID NO: 5252349 - DNA, 25 bp, Homo sapien
ccacaagtttggcaccggaggtgtt

SEQ ID NO: 5252350 - DNA, 25 bp, Homo sapien
tactagaacagacttgcccagagct

SEQ ID NO: 5252351 - DNA, 25 bp, Homo sapien
tgttcaaggcatgcgaagactcagc

SEQ ID NO: 5252352 - DNA, 25 bp, Homo sapien
tagattgttgcccatcggtgatcaa

SEQ ID NO: 5252353 - DNA, 25 bp, Homo sapien
caaacaatacggatgaatagccaga

SEQ ID NO: 5252354 - DNA, 25 bp, Homo sapien
ggcaactagccctcatccttagaga

SEQ ID NO: 5252355 - DNA, 25 bp, Homo sapien
taggcttccatacatagtaggcatg

SEQ ID NO: 5252356 - DNA, 25 bp, Homo sapien
tgaggaccccctgccaattctctat

SEQ ID NO: 5252357 - DNA, 25 bp, Homo sapien
gattcctcatcattgacgttgtctg

SEQ ID NO: 5252358 - DNA, 25 bp, Homo sapien
gaaaagttatagcaacactttgaag

SEQ ID NO: 5252359 - DNA, 25 bp, Homo sapien
tctatcccgaacttgctggattcct

SEQ ID NO: 5252360 - DNA, 25 bp, Homo sapien
ggtaataaagagttttcactctcca

SEQ ID NO: 5252361 - DNA, 25 bp, Homo sapien
cacagggctcctaggtattttccct

SEQ ID NO: 5252362 - DNA, 25 bp, Homo sapien
gtaataaagagttttcactctccaa

SEQ ID NO: 5252363 - DNA, 25 bp, Homo sapien
tccctaaactaaccactgcttttca

SEQ ID NO: 5252364 - DNA, 25 bp, Homo sapien
gaaatgagcgaaggaggcaggccat

SEQ ID NO: 5252365 - DNA, 25 bp, Homo sapien
tgaaatgagcgaaggaggcaggcca

SEQ ID NO: 5252366 - DNA, 25 bp, Homo sapien
ctgaaatgagcgaaggaggcaggcc

SEQ ID NO: 5252367 - DNA, 25 bp, Homo sapien
agaagaaaacccctgcagaaattct

SEQ ID NO: 5252368 - DNA, 25 bp, Homo sapien
caaagtgctaagaagaaaacccctg

SEQ ID NO: 5252369 - DNA, 25 bp, Homo sapien
agtgctaagaagaaaacccctgcag

SEQ ID NO: 5252370 - DNA, 25 bp, Homo sapien
gctaagaagaaaacccctgcagaaa

SEQ ID NO: 5252371 - DNA, 25 bp, Homo sapien
ggtaggcccaaatactcagccagga

SEQ ID NO: 5252372 - DNA, 25 bp, Homo sapien
tcttgaggacagctgatgcgagttc

SEQ ID NO: 5252373 - DNA, 25 bp, Homo sapien
agccagtggcttccgtcctgaggga

SEQ ID NO: 5252374 - DNA, 25 bp, Homo sapien
tagcacctgggaatgtaggacacag

SEQ ID NO: 5252375 - DNA, 25 bp, Homo sapien
ctttcctcttcttacagttgatacc

SEQ ID NO: 5252376 - DNA, 25 bp, Homo sapien
tacagttgatacctccaatgaagac

SEQ ID NO: 5252377 - DNA, 25 bp, Homo sapien
ttcttacagttgatacctccaatga

SEQ ID NO: 5252378 - DNA, 25 bp, Homo sapien
tcctcttcttacagttgatacctcc

SEQ ID NO: 5252379 - DNA, 25 bp, Homo sapien
agaaacaaggcagtccaaaagaaat

SEQ ID NO: 5252380 - DNA, 25 bp, Homo sapien
gaaacaaggcagtccaaaagaaata

SEQ ID NO: 5252381 - DNA, 25 bp, Homo sapien
aaaggatgaagacctgtcatgtgca

SEQ ID NO: 5252382 - DNA, 25 bp, Homo sapien
gtatctggcagaattgcctgcttgc

SEQ ID NO: 5252383 - DNA, 25 bp, Homo sapien
cacagatagtacatatacagaatgg

SEQ ID NO: 5252384 - DNA, 25 bp, Homo sapien
catctaaagggccaataaagcacgt

SEQ ID NO: 5252385 - DNA, 25 bp, Homo sapien
tgaatgagcattccttgtaaagacc

SEQ ID NO: 5252386 - DNA, 25 bp, Homo sapien
ctgaatgagcattccttgtaaagac

SEQ ID NO: 5252387 - DNA, 25 bp, Homo sapien
gcctgaatgagcattccttgtaaag

SEQ ID NO: 5252388 - DNA, 25 bp, Homo sapien
gaatgagcattccttgtaaagaccc

SEQ ID NO: 5252389 - DNA, 25 bp, Homo sapien
ggcaggggaacctggagtcctgtgg

SEQ ID NO: 5252390 - DNA, 25 bp, Homo sapien
caggggaacctggagtcctgtggcc

SEQ ID NO: 5252391 - DNA, 25 bp, Homo sapien
gcggcaggggaacctggagtcctgt

SEQ ID NO: 5252392 - DNA, 25 bp, Homo sapien
ctgcggcaggggaacctggagtcct

SEQ ID NO: 5252393 - DNA, 25 bp, Homo sapien
ccatcagtgggcaccaccagcacct

SEQ ID NO: 5252394 - DNA, 25 bp, Homo sapien
tggacactgaggagaagcagcagtc

SEQ ID NO: 5252395 - DNA, 25 bp, Homo sapien
gcccagggctggacactgaggagaa

SEQ ID NO: 5252396 - DNA, 25 bp, Homo sapien
ggagaagcagcagtcctgtggccag

SEQ ID NO: 5252397 - DNA, 25 bp, Homo sapien
cacctggtggcctctcgcatggagg

SEQ ID NO: 5252398 - DNA, 25 bp, Homo sapien
acctggtggcctctcgcatggaggt

SEQ ID NO: 5252399 - DNA, 25 bp, Homo sapien
aaagaacgattgagtgtgacccagc

SEQ ID NO: 5252400 - DNA, 25 bp, Homo sapien
cctatgtatgatcaaagacatattg

SEQ ID NO: 5252401 - DNA, 25 bp, Homo sapien
gtttcaaagaacgattgagtgtgac

SEQ ID NO: 5252402 - DNA, 25 bp, Homo sapien
gctccacacaagacctatgtatgat

SEQ ID NO: 5252403 - DNA, 25 bp, Homo sapien
tctaaatcacatggaatgttcctca

SEQ ID NO: 5252404 - DNA, 25 bp, Homo sapien
catgtggtctgaattggtcgttagt

SEQ ID NO: 5252405 - DNA, 25 bp, Homo sapien
tgttcttgaccctttgcaggaatgt

SEQ ID NO: 5252406 - DNA, 25 bp, Homo sapien
gaatcgacaggtacttagccagcac

SEQ ID NO: 5252407 - DNA, 25 bp, Homo sapien
ccatgttgggcatgatcggcctggg

SEQ ID NO: 5252408 - DNA, 25 bp, Homo sapien
ctgagatagtggcttcccgttggca

SEQ ID NO: 5252409 - DNA, 25 bp, Homo sapien
gctgacaagatccaccactgacacc

SEQ ID NO: 5252410 - DNA, 25 bp, Homo sapien
ggtaatccatcacaaagtcccctcg

SEQ ID NO: 5252411 - DNA, 25 bp, Homo sapien
aatccacattgataacagattccac

SEQ ID NO: 5252412 - DNA, 25 bp, Homo sapien
aaatccacattgataacagattcca

SEQ ID NO: 5252413 - DNA, 25 bp, Homo sapien
gaaatccacattgataacagattcc

SEQ ID NO: 5252414 - DNA, 25 bp, Homo sapien
ctgaattcctcttctgaatgccaaa

SEQ ID NO: 5252415 - DNA, 25 bp, Homo sapien
ttctgcaagtctgcatagagactga

SEQ ID NO: 5252416 - DNA, 25 bp, Homo sapien
agagactgaagtatccattcatcca

SEQ ID NO: 5252417 - DNA, 25 bp, Homo sapien
tgcaagtctgcatagagactgaagt

SEQ ID NO: 5252418 - DNA, 25 bp, Homo sapien
gacccacggtgggttcagggagctc

SEQ ID NO: 5252419 - DNA, 25 bp, Homo sapien
ggcaggggaacctggagtcctctgg

SEQ ID NO: 5252420 - DNA, 25 bp, Homo sapien
gcggcaggggaacctggagtcctct

SEQ ID NO: 5252421 - DNA, 25 bp, Homo sapien
caggggaacctggagtcctctggcc

SEQ ID NO: 5252422 - DNA, 25 bp, Homo sapien
ggggaacctggagtcctctggccat

SEQ ID NO: 5252423 - DNA, 25 bp, Homo sapien
ctggacactgaggaggagcagcagt

SEQ ID NO: 5252424 - DNA, 25 bp, Homo sapien
tggacactgaggaggagcagcagtc

SEQ ID NO: 5252425 - DNA, 25 bp, Homo sapien
gcaccaccaacacctttccactctc

SEQ ID NO: 5252426 - DNA, 25 bp, Homo sapien
caaggcctcccgcatgctgagccag

SEQ ID NO: 5252427 - DNA, 25 bp, Homo sapien
tgaggaccaccgcctggtggcctct

SEQ ID NO: 5252428 - DNA, 25 bp, Homo sapien
ctctggggtgaggaccaccgcctgg

SEQ ID NO: 5252429 - DNA, 25 bp, Homo sapien
tctgggtccatggaacagcataggc

SEQ ID NO: 5252430 - DNA, 25 bp, Homo sapien
cctatgaagggccaaagatacattg

SEQ ID NO: 5252431 - DNA, 25 bp, Homo sapien
aagaacccttgagtgtagcccagcg

SEQ ID NO: 5252432 - DNA, 25 bp, Homo sapien
gcgtaacgcgatcaaattccttctg

SEQ ID NO: 5252433 - DNA, 25 bp, Homo sapien
ctgagatagtggcttcccgttggca

SEQ ID NO: 5252434 - DNA, 25 bp, Homo sapien
agatagtggcttcccgttggcacag

SEQ ID NO: 5252435 - DNA, 25 bp, Homo sapien
tggcttcccgttggcacagttgatg

SEQ ID NO: 5252436 - DNA, 25 bp, Homo sapien
gcccccaatgaagaccatgttgggc

SEQ ID NO: 5252437 - DNA, 25 bp, Homo sapien
aatgtagtgtccctgatcctgccga

SEQ ID NO: 5252438 - DNA, 25 bp, Homo sapien
tcctgccgagctgaaggacatgcac

SEQ ID NO: 5252439 - DNA, 25 bp, Homo sapien
tagatcccactatagaaacttggag

SEQ ID NO: 5252440 - DNA, 25 bp, Homo sapien
tcactgggcttatagattcacggtc

SEQ ID NO: 5252441 - DNA, 25 bp, Homo sapien
cccaaatagggtgctggatttttgc

SEQ ID NO: 5252442 - DNA, 25 bp, Homo sapien
caccatttcgatattgcaatggagg

SEQ ID NO: 5252443 - DNA, 25 bp, Homo sapien
tatggaagcagtgtgcaccatttcg

SEQ ID NO: 5252444 - DNA, 25 bp, Homo sapien
catatacaaagagccaccaagtgtc

SEQ ID NO: 5252445 - DNA, 25 bp, Homo sapien
gccagtggctgccatcaatgggcac

SEQ ID NO: 5252446 - DNA, 25 bp, Homo sapien
aagacctcccgcatgctgagccagt

SEQ ID NO: 5252447 - DNA, 25 bp, Homo sapien
tctggcatggagctcccgcaagacc

SEQ ID NO: 5252448 - DNA, 25 bp, Homo sapien
ggctgccatcaatgggcaccaccaa

SEQ ID NO: 5252449 - DNA, 25 bp, Homo sapien
tgttcttgaccctttgcatgaatgt

SEQ ID NO: 5252450 - DNA, 25 bp, Homo sapien
tagctccacacaagacctatgatag

SEQ ID NO: 5252451 - DNA, 25 bp, Homo sapien
caggtacttagccagcactgccgcg

SEQ ID NO: 5252452 - DNA, 25 bp, Homo sapien
gcttgcataaggagcagaaaaagca

SEQ ID NO: 5252453 - DNA, 25 bp, Homo sapien
agtccatcacaaagtcccctcggaa

SEQ ID NO: 5252454 - DNA, 25 bp, Homo sapien
gcccccaatgaagaccatgttgggc

SEQ ID NO: 5252455 - DNA, 25 bp, Homo sapien
ggaacattgattggatgaaggcacc

SEQ ID NO: 5252456 - DNA, 25 bp, Homo sapien
cattgattggatgaaggcaccaata

SEQ ID NO: 5252457 - DNA, 25 bp, Homo sapien
tgattggatgaaggcaccaatacag

SEQ ID NO: 5252458 - DNA, 25 bp, Homo sapien
attggatgaaggcaccaatacagac

SEQ ID NO: 5252459 - DNA, 25 bp, Homo sapien
ggtcccagagtaccatttcaacgaa

SEQ ID NO: 5252460 - DNA, 25 bp, Homo sapien
tcatggaagttcatacacattcggt

SEQ ID NO: 5252461 - DNA, 25 bp, Homo sapien
aagaaacaatattcaggtcccagag

SEQ ID NO: 5252462 - DNA, 25 bp, Homo sapien
gattctctcacgatgtacatggcac

SEQ ID NO: 5252463 - DNA, 25 bp, Homo sapien
tccagaagctacatgggtgatgtgt

SEQ ID NO: 5252464 - DNA, 25 bp, Homo sapien
taatcccttcagaataccaaggact

SEQ ID NO: 5252465 - DNA, 25 bp, Homo sapien
aggatgtcttcagccccagtcagac

SEQ ID NO: 5252466 - DNA, 25 bp, Homo sapien
gtaatcaagagatgactagaggctt

SEQ ID NO: 5252467 - DNA, 25 bp, Homo sapien
ctgtggccagccacagcaggggaac

SEQ ID NO: 5252468 - DNA, 25 bp, Homo sapien
tgtggccagccacagcaggggaacc

SEQ ID NO: 5252469 - DNA, 25 bp, Homo sapien
ccagccacagcaggggaacctgggg

SEQ ID NO: 5252470 - DNA, 25 bp, Homo sapien
ccacagcaggggaacctggggtcct

SEQ ID NO: 5252471 - DNA, 25 bp, Homo sapien
cagggctgggcactgagaaggagta

SEQ ID NO: 5252472 - DNA, 25 bp, Homo sapien
gggctgggcactgagaaggagtagc

SEQ ID NO: 5252473 - DNA, 25 bp, Homo sapien
tgggcactgagaaggagtagcactc

SEQ ID NO: 5252474 - DNA, 25 bp, Homo sapien
gctgggcactgagaaggagtagcac

SEQ ID NO: 5252475 - DNA, 25 bp, Homo sapien
tggggtgaggaccaccgcctggtgg

SEQ ID NO: 5252476 - DNA, 25 bp, Homo sapien
ctctggggtgaggaccaccgcctgg

SEQ ID NO: 5252477 - DNA, 25 bp, Homo sapien
gggtgaggaccaccgcctggtggcc

SEQ ID NO: 5252478 - DNA, 25 bp, Homo sapien
tgaggaccaccgcctggtggcctct

SEQ ID NO: 5252479 - DNA, 25 bp, Homo sapien
cactgccccacagaggtaaattggg

SEQ ID NO: 5252480 - DNA, 25 bp, Homo sapien
tgccccacagaggtaaattgggtct

SEQ ID NO: 5252481 - DNA, 25 bp, Homo sapien
ccacagaggtaaattgggtctatta

SEQ ID NO: 5252482 - DNA, 25 bp, Homo sapien
cagttgagtgtggcccagcacaagg

SEQ ID NO: 5252483 - DNA, 25 bp, Homo sapien
ccatgttgggcatgatcggcctggg

SEQ ID NO: 5252484 - DNA, 25 bp, Homo sapien
gcccccaatgaagaccatgttgggc

SEQ ID NO: 5252485 - DNA, 25 bp, Homo sapien
gatcggcctggggtaatccatcaca

SEQ ID NO: 5252486 - DNA, 25 bp, Homo sapien
taatccatcacaaagtcccctcgga

SEQ ID NO: 5252487 - DNA, 25 bp, Homo sapien
ttgattggatgaaggcacgaacacc

SEQ ID NO: 5252488 - DNA, 25 bp, Homo sapien
attggatgaaggcacgaacaccgac

SEQ ID NO: 5252489 - DNA, 25 bp, Homo sapien
ggaacattgattggatgaaggcacg

SEQ ID NO: 5252490 - DNA, 25 bp, Homo sapien
aacattgattggatgaaggcacgaa

SEQ ID NO: 5252491 - DNA, 25 bp, Homo sapien
ttccttttctcagactctcctttaa

SEQ ID NO: 5252492 - DNA, 25 bp, Homo sapien
ctcaataaatgcagattcatttcct

SEQ ID NO: 5252493 - DNA, 25 bp, Homo sapien
tccactttctcatcaactttctcaa

SEQ ID NO: 5252494 - DNA, 25 bp, Homo sapien
ctttctaggaatttctaattccact

SEQ ID NO: 5252495 - DNA, 25 bp, Homo sapien
tcctacggtagtgatgggacaggca

SEQ ID NO: 5252496 - DNA, 25 bp, Homo sapien
gatacaggatttcgttcctttggct

SEQ ID NO: 5252497 - DNA, 25 bp, Homo sapien
ccttctgcatgtcctacggtagtga

SEQ ID NO: 5252498 - DNA, 25 bp, Homo sapien
ggacaggcagcttcaagtccatgtc

SEQ ID NO: 5252499 - DNA, 25 bp, Homo sapien
gagaatattttggggggtcagagga

SEQ ID NO: 5252500 - DNA, 25 bp, Homo sapien
tggagaatattttggggggtcagag

SEQ ID NO: 5252501 - DNA, 25 bp, Homo sapien
ctggagaatattttggggggtcaga

SEQ ID NO: 5252502 - DNA, 25 bp, Homo sapien
catagtggactactacgaggtgctg

SEQ ID NO: 5252503 - DNA, 25 bp, Homo sapien
tatcaagaaggcgtaccgcaagctg

SEQ ID NO: 5252504 - DNA, 25 bp, Homo sapien
tcttcagggagttctttggcggccg

SEQ ID NO: 5252505 - DNA, 25 bp, Homo sapien
tatctatgaccgctatggcgaggcg

SEQ ID NO: 5252506 - DNA, 25 bp, Homo sapien
aggatgtcttcagccccggtcagac

SEQ ID NO: 5252507 - DNA, 25 bp, Homo sapien
cctgtggccgaggaaaaagactgat

SEQ ID NO: 5252508 - DNA, 25 bp, Homo sapien
gctggaacgttggagaaccgcagtc

SEQ ID NO: 5252509 - DNA, 25 bp, Homo sapien
ggtcttggagcatcacagggcctca

SEQ ID NO: 5252510 - DNA, 25 bp, Homo sapien
ccaggacaagtgggcgtccgccctg

SEQ ID NO: 5252511 - DNA, 25 bp, Homo sapien
tccactgggatcaacagtatcttcc

SEQ ID NO: 5252512 - DNA, 25 bp, Homo sapien
acaagtgggcgtccgccctgggact

SEQ ID NO: 5252513 - DNA, 25 bp, Homo sapien
ccagcatgggacaccactgggccca

SEQ ID NO: 5252514 - DNA, 25 bp, Homo sapien
caacgaggcgtcaggtgctaggaca

SEQ ID NO: 5252515 - DNA, 25 bp, Homo sapien
ggaataaaccacgtcgcacagaaag

SEQ ID NO: 5252516 - DNA, 25 bp, Homo sapien
tggacagtcacctctctctgaagga

SEQ ID NO: 5252517 - DNA, 25 bp, Homo sapien
aatggcacagggtacgtcttcaagg

SEQ ID NO: 5252518 - DNA, 25 bp, Homo sapien
tggagctttaaccagggtcacaaag

SEQ ID NO: 5252519 - DNA, 25 bp, Homo sapien
cactcattagaagagaacggactgc

SEQ ID NO: 5252520 - DNA, 25 bp, Homo sapien
gactgtctggtgattcactcattag

SEQ ID NO: 5252521 - DNA, 25 bp, Homo sapien
gcaggatttagcttcttatcagaat

SEQ ID NO: 5252522 - DNA, 25 bp, Homo sapien
ggccctcgtgagtcctctggctctt

SEQ ID NO: 5252523 - DNA, 25 bp, Homo sapien
ccctcgtgagtcctctggctcttaa

SEQ ID NO: 5252524 - DNA, 25 bp, Homo sapien
gccctcgtgagtcctctggctctta

SEQ ID NO: 5252525 - DNA, 25 bp, Homo sapien
ccagaagcattaatgtaggcttcaa

SEQ ID NO: 5252526 - DNA, 25 bp, Homo sapien
gcccaaagcatcagcaattgccata

SEQ ID NO: 5252527 - DNA, 25 bp, Homo sapien
atttctgagaccattgatcccaaag

SEQ ID NO: 5252528 - DNA, 25 bp, Homo sapien
gggattttgcccaaagcatcagcaa

SEQ ID NO: 5252529 - DNA, 25 bp, Homo sapien
aagcagatcgttttggggtagccac

SEQ ID NO: 5252530 - DNA, 25 bp, Homo sapien
gccacttaacaagtatcgtgttgtt

SEQ ID NO: 5252531 - DNA, 25 bp, Homo sapien
cgcaagattcgatggtcgggttcca

SEQ ID NO: 5252532 - DNA, 25 bp, Homo sapien
gggttccagtgtaccgccacaggac

SEQ ID NO: 5252533 - DNA, 25 bp, Homo sapien
ataaaggcacgggtcatcgggtgac

SEQ ID NO: 5252534 - DNA, 25 bp, Homo sapien
tgtccatctgatcaccaaacaaggg

SEQ ID NO: 5252535 - DNA, 25 bp, Homo sapien
caagggcatcatcaccatgggaacg

SEQ ID NO: 5252536 - DNA, 25 bp, Homo sapien
tccagaacattcagggtcactccag

SEQ ID NO: 5252537 - DNA, 25 bp, Homo sapien
catctgtcttcctgactgctgcttc

SEQ ID NO: 5252538 - DNA, 25 bp, Homo sapien
tcacatctgtcttcctgactgctgc

SEQ ID NO: 5252539 - DNA, 25 bp, Homo sapien
cacatctgtcttcctgactgctgct

SEQ ID NO: 5252540 - DNA, 25 bp, Homo sapien
tctgtcttcctgactgctgcttctt

SEQ ID NO: 5252541 - DNA, 25 bp, Homo sapien
cgtgttccgtctcctctcatctgaa

SEQ ID NO: 5252542 - DNA, 25 bp, Homo sapien
catgatgctcaggttatgtggactt

SEQ ID NO: 5252543 - DNA, 25 bp, Homo sapien
tcaaaggtgggaagtcagtcatcag

SEQ ID NO: 5252544 - DNA, 25 bp, Homo sapien
gacatcctgacattgaggtggccag

SEQ ID NO: 5252545 - DNA, 25 bp, Homo sapien
ttagaggactttcaccaagttgttc

SEQ ID NO: 5252546 - DNA, 25 bp, Homo sapien
aatgtgagcctcaagaaggagcttc

SEQ ID NO: 5252547 - DNA, 25 bp, Homo sapien
caagtagttatctataccactgaag

SEQ ID NO: 5252548 - DNA, 25 bp, Homo sapien
cagctcagagtgttggaatcatgga

SEQ ID NO: 5252549 - DNA, 25 bp, Homo sapien
caaagacagtttcgttatgcctgga

SEQ ID NO: 5252550 - DNA, 25 bp, Homo sapien
gacagtttcgttatgcctggaacac

SEQ ID NO: 5252551 - DNA, 25 bp, Homo sapien
ctaaacacaaagacagtttcgttat

SEQ ID NO: 5252552 - DNA, 25 bp, Homo sapien
aacacaaagacagtttcgttatgcc

SEQ ID NO: 5252553 - DNA, 25 bp, Homo sapien
caagaggaaaccaatcacgtccaag

SEQ ID NO: 5252554 - DNA, 25 bp, Homo sapien
gatttgtgggctttcttaactcgcc

SEQ ID NO: 5252555 - DNA, 25 bp, Homo sapien
cacgtccaaggaatggtactggtac

SEQ ID NO: 5252556 - DNA, 25 bp, Homo sapien
caagcatttccggtagccataagca

SEQ ID NO: 5252557 - DNA, 25 bp, Homo sapien
atgactagggaatggttcaaaattt

SEQ ID NO: 5252558 - DNA, 25 bp, Homo sapien
ttggaaatgactagggaatggttca

SEQ ID NO: 5252559 - DNA, 25 bp, Homo sapien
ggggctgattaatttatgcaaagta

SEQ ID NO: 5252560 - DNA, 25 bp, Homo sapien
gaaatgactagggaatggttcaaaa

SEQ ID NO: 5252561 - DNA, 25 bp, Homo sapien
gtaatctagaatgccagcctgtctg

SEQ ID NO: 5252562 - DNA, 25 bp, Homo sapien
gcaaccatctgcagaagccaaaaga

SEQ ID NO: 5252563 - DNA, 25 bp, Homo sapien
tggcacctatgaagcacgacagaga

SEQ ID NO: 5252564 - DNA, 25 bp, Homo sapien
tacactctaaaggtacaaagcttcc

SEQ ID NO: 5252565 - DNA, 25 bp, Homo sapien
cacatcaatggaaatgcaaatggaa

SEQ ID NO: 5252566 - DNA, 25 bp, Homo sapien
aatggaagaattggttatcaaagtg

SEQ ID NO: 5252567 - DNA, 25 bp, Homo sapien
ctgctcttggcccaatacacatcaa

SEQ ID NO: 5252568 - DNA, 25 bp, Homo sapien
gattaaacagatattaaccacaaga

SEQ ID NO: 5252569 - DNA, 25 bp, Homo sapien
aggccccaggtcgtctctttcctct

SEQ ID NO: 5252570 - DNA, 25 bp, Homo sapien
tctgacacctcctcacttgaggcta

SEQ ID NO: 5252571 - DNA, 25 bp, Homo sapien
gccccaggtcgtctctttcctctga

SEQ ID NO: 5252572 - DNA, 25 bp, Homo sapien
gacacctcctcacttgaggctactg

SEQ ID NO: 5252573 - DNA, 25 bp, Homo sapien
caggcagcggatgagagtgtttatc

SEQ ID NO: 5252574 - DNA, 25 bp, Homo sapien
aaggcctgcccctgttgtgtccgtc

SEQ ID NO: 5252575 - DNA, 25 bp, Homo sapien
tccatgattatcaccgaggccaggg

SEQ ID NO: 5252576 - DNA, 25 bp, Homo sapien
tgtgtccgtctttgctgactcgctg

SEQ ID NO: 5252577 - DNA, 25 bp, Homo sapien
tgttgaccttgcgctgggtggaaat

SEQ ID NO: 5252578 - DNA, 25 bp, Homo sapien
ccaccagcctctgcacgcactgctc

SEQ ID NO: 5252579 - DNA, 25 bp, Homo sapien
aaatgttgaccttgcgctgggtgga

SEQ ID NO: 5252580 - DNA, 25 bp, Homo sapien
aatgttgaccttgcgctgggtggaa

SEQ ID NO: 5252581 - DNA, 25 bp, Homo sapien
gacaaattcatcagtgaggttgagg

SEQ ID NO: 5252582 - DNA, 25 bp, Homo sapien
gtgctgcagctcgtacatgaccaag

SEQ ID NO: 5252583 - DNA, 25 bp, Homo sapien
cagagccaccagtgtgtcgctggcc

SEQ ID NO: 5252584 - DNA, 25 bp, Homo sapien
ggccagtgtgatgatgacaaattca

SEQ ID NO: 5252585 - DNA, 25 bp, Homo sapien
gcccatgtatggcatgaactcaaac

SEQ ID NO: 5252586 - DNA, 25 bp, Homo sapien
tgaatatggtagccagggtgatgcc

SEQ ID NO: 5252587 - DNA, 25 bp, Homo sapien
gatcgcctggcgtatcttggcttca

SEQ ID NO: 5252588 - DNA, 25 bp, Homo sapien
tggcaagtctcagcatggtgaatat

SEQ ID NO: 5252589 - DNA, 25 bp, Homo sapien
gcctcagccacactgtcacgaagta

SEQ ID NO: 5252590 - DNA, 25 bp, Homo sapien
ctgtcacgaagtagcgatacatggg

SEQ ID NO: 5252591 - DNA, 25 bp, Homo sapien
gcaccgtctcacagaaggtctccat

SEQ ID NO: 5252592 - DNA, 25 bp, Homo sapien
ggtgcttcagataaaactgcaccgt

SEQ ID NO: 5252593 - DNA, 25 bp, Homo sapien
cccgcaggtcatcgttgggcagaag

SEQ ID NO: 5252594 - DNA, 25 bp, Homo sapien
gcatgggcttcagggacttgatcac

SEQ ID NO: 5252595 - DNA, 25 bp, Homo sapien
gggatgtagtcgtagacctgctccc

SEQ ID NO: 5252596 - DNA, 25 bp, Homo sapien
ttcagggacttgatcacccccagct

SEQ ID NO: 5252597 - DNA, 25 bp, Homo sapien
ctggacgtgcagttctgtgaaaatg

SEQ ID NO: 5252598 - DNA, 25 bp, Homo sapien
ggtggtgactgacagttccaggatc

SEQ ID NO: 5252599 - DNA, 25 bp, Homo sapien
gtgttggtggtgactgacagttcca

SEQ ID NO: 5252600 - DNA, 25 bp, Homo sapien
tgactgacagttccaggatctgcct

SEQ ID NO: 5252601 - DNA, 25 bp, Homo sapien
caagggctacgaagcagtgcaccat

SEQ ID NO: 5252602 - DNA, 25 bp, Homo sapien
agggctacgaagcagtgcaccatct

SEQ ID NO: 5252603 - DNA, 25 bp, Homo sapien
aagggctacgaagcagtgcaccatc

SEQ ID NO: 5252604 - DNA, 25 bp, Homo sapien
cagggagcaccctgccgcagagcct

SEQ ID NO: 5252605 - DNA, 25 bp, Homo sapien
gattcagagtccccacgcggacggc

SEQ ID NO: 5252606 - DNA, 25 bp, Homo sapien
acgcggacggcctccttgtttgtct

SEQ ID NO: 5252607 - DNA, 25 bp, Homo sapien
tgcgctcactatagccctaatcaga

SEQ ID NO: 5252608 - DNA, 25 bp, Homo sapien
catctgcgctcactatagccctaat

SEQ ID NO: 5252609 - DNA, 25 bp, Homo sapien
cagagatggtgttcttgactacccg

SEQ ID NO: 5252610 - DNA, 25 bp, Homo sapien
ggtagatggccctgatactcatcct

SEQ ID NO: 5252611 - DNA, 25 bp, Homo sapien
cttggaccgggtatcagagatggtg

SEQ ID NO: 5252612 - DNA, 25 bp, Homo sapien
tacccggatagccaggtagatggcc

SEQ ID NO: 5252613 - DNA, 25 bp, Homo sapien
cagtttgtaggtggataaggtcagc

SEQ ID NO: 5252614 - DNA, 25 bp, Homo sapien
agagagccaactgcccaatgatgtg

SEQ ID NO: 5252615 - DNA, 25 bp, Homo sapien
gcacagacaggtacttcaggcccca

SEQ ID NO: 5252616 - DNA, 25 bp, Homo sapien
gtaggtggataaggtcagctgcaca

SEQ ID NO: 5252617 - DNA, 25 bp, Homo sapien
ctgataaaacttctcccggcgattt

SEQ ID NO: 5252618 - DNA, 25 bp, Homo sapien
tgataaaacttctcccggcgatttg

SEQ ID NO: 5252619 - DNA, 25 bp, Homo sapien
ggtggtcatcccactgacagaagag

SEQ ID NO: 5252620 - DNA, 25 bp, Homo sapien
tggtcatcccactgacagaagaggt

SEQ ID NO: 5252621 - DNA, 25 bp, Homo sapien
ggtcatcccactgacagaagaggta

SEQ ID NO: 5252622 - DNA, 25 bp, Homo sapien
tgacagaagaggtaatgatcttcac

SEQ ID NO: 5252623 - DNA, 25 bp, Homo sapien
agcacagcagcctcacccaaaactc

SEQ ID NO: 5252624 - DNA, 25 bp, Homo sapien
acagataggagtcaaagcttccacg

SEQ ID NO: 5252625 - DNA, 25 bp, Homo sapien
gcttccacgtagtctgtctccatga

SEQ ID NO: 5252626 - DNA, 25 bp, Homo sapien
acgctgacatccacatcctggccat

SEQ ID NO: 5252627 - DNA, 25 bp, Homo sapien
tgcccaatccaatcagctggacagg

SEQ ID NO: 5252628 - DNA, 25 bp, Homo sapien
ctgcccaatccaatcagctggacag

SEQ ID NO: 5252629 - DNA, 25 bp, Homo sapien
caatcagctggacaggaactttgcc

SEQ ID NO: 5252630 - DNA, 25 bp, Homo sapien
tcagctggacaggaactttgcccac

SEQ ID NO: 5252631 - DNA, 25 bp, Homo sapien
aggggtgggcattcccagacaagga

SEQ ID NO: 5252632 - DNA, 25 bp, Homo sapien
ggacttggatgtttccaggagaagg

SEQ ID NO: 5252633 - DNA, 25 bp, Homo sapien
gagaggggtgggcattcccagacaa

SEQ ID NO: 5252634 - DNA, 25 bp, Homo sapien
tgggcattcccagacaaggagccag

SEQ ID NO: 5252635 - DNA, 25 bp, Homo sapien
agcttctgaggtgcaggcaggtcca

SEQ ID NO: 5252636 - DNA, 25 bp, Homo sapien
acgggccagcagcttctgaggtgca

SEQ ID NO: 5252637 - DNA, 25 bp, Homo sapien
cagcagcttctgaggtgcaggcagg

SEQ ID NO: 5252638 - DNA, 25 bp, Homo sapien
agacgggccagcagcttctgaggtg

SEQ ID NO: 5252639 - DNA, 25 bp, Homo sapien
tccagtgaagtagcacctgagcacc

SEQ ID NO: 5252640 - DNA, 25 bp, Homo sapien
ggcaccaaggctccagtgaagtagc

SEQ ID NO: 5252641 - DNA, 25 bp, Homo sapien
gtcttggagctctttgtcctcattt

SEQ ID NO: 5252642 - DNA, 25 bp, Homo sapien
gagcaccttgctccttgtcttggag

SEQ ID NO: 5252643 - DNA, 25 bp, Homo sapien
catggagggtgcgatgctctggctc

SEQ ID NO: 5252644 - DNA, 25 bp, Homo sapien
gaggttgagcatggctatcccacga

SEQ ID NO: 5252645 - DNA, 25 bp, Homo sapien
aggtaccggaccagtagcgcaatct

SEQ ID NO: 5252646 - DNA, 25 bp, Homo sapien
ccccttgtaaggtgatgacatcagc

SEQ ID NO: 5252647 - DNA, 25 bp, Homo sapien
caggctttctgatcccaagtgaact

SEQ ID NO: 5252648 - DNA, 25 bp, Homo sapien
gctttctgatcccaagtgaactcag

SEQ ID NO: 5252649 - DNA, 25 bp, Homo sapien
cccaggctttctgatcccaagtgaa

SEQ ID NO: 5252650 - DNA, 25 bp, Homo sapien
ttctgatcccaagtgaactcagtat

SEQ ID NO: 5252651 - DNA, 25 bp, Homo sapien
ctctttactcaagcgcaggctccag

SEQ ID NO: 5252652 - DNA, 25 bp, Homo sapien
cgcaatctggttgttcagctcttta

SEQ ID NO: 5252653 - DNA, 25 bp, Homo sapien
gggctgtcaaagctcgcaatctggt

SEQ ID NO: 5252654 - DNA, 25 bp, Homo sapien
cagagaggggctgtcaaagctcgca

SEQ ID NO: 5252655 - DNA, 25 bp, Homo sapien
cattgctgtagtccgtcttgtacag

SEQ ID NO: 5252656 - DNA, 25 bp, Homo sapien
ctgtagtccgtcttgtacagcagct

SEQ ID NO: 5252657 - DNA, 25 bp, Homo sapien
tcaaagtcattgctgtagtccgtct

SEQ ID NO: 5252658 - DNA, 25 bp, Homo sapien
ctgtcaaagtcattgctgtagtccg

SEQ ID NO: 5252659 - DNA, 25 bp, Homo sapien
agtcatgaagcacattcagcaccgt

SEQ ID NO: 5252660 - DNA, 25 bp, Homo sapien
ggatcctctcctcgaagtcatgaag

SEQ ID NO: 5252661 - DNA, 25 bp, Homo sapien
cattcagcaccgtttttacctggcc

SEQ ID NO: 5252662 - DNA, 25 bp, Homo sapien
gggcacacaggccaaagcacataat

SEQ ID NO: 5252663 - DNA, 25 bp, Homo sapien
atcaccatgagggcacttttcactg

SEQ ID NO: 5252664 - DNA, 25 bp, Homo sapien
tcttagcggtgatggggctgtccac

SEQ ID NO: 5252665 - DNA, 25 bp, Homo sapien
cataatggtgaatgatcttagcggt

SEQ ID NO: 5252666 - DNA, 25 bp, Homo sapien
ggccacgcagctatacatcaccatg

SEQ ID NO: 5252667 - DNA, 25 bp, Homo sapien
gtccagaagacatccccccaggcag

SEQ ID NO: 5252668 - DNA, 25 bp, Homo sapien
ggtccagaagacatccccccaggca

SEQ ID NO: 5252669 - DNA, 25 bp, Homo sapien
tggtccagaagacatccccccaggc

SEQ ID NO: 5252670 - DNA, 25 bp, Homo sapien
tataatgctggtaagagtcgtcttc

SEQ ID NO: 5252671 - DNA, 25 bp, Homo sapien
ggtaagagtcgtcttctgggcaaag

SEQ ID NO: 5252672 - DNA, 25 bp, Homo sapien
cactataatgctggtaagagtcgtc

SEQ ID NO: 5252673 - DNA, 25 bp, Homo sapien
gatggccttggtaacctgcacaaca

SEQ ID NO: 5252674 - DNA, 25 bp, Homo sapien
agagggcctccatcgccaaggctcg

SEQ ID NO: 5252675 - DNA, 25 bp, Homo sapien
ttgtcagtcggttctgccttgatga

SEQ ID NO: 5252676 - DNA, 25 bp, Homo sapien
aaaccaggttgtcagtcggttctgc

SEQ ID NO: 5252677 - DNA, 25 bp, Homo sapien
ctcaggtgcgagagggcctccatcg

SEQ ID NO: 5252678 - DNA, 25 bp, Homo sapien
ctgtggagtagaaaggcttcagctt

SEQ ID NO: 5252679 - DNA, 25 bp, Homo sapien
tgtggagtagaaaggcttcagcttg

SEQ ID NO: 5252680 - DNA, 25 bp, Homo sapien
agctcagggcatttgcatacagggt

SEQ ID NO: 5252681 - DNA, 25 bp, Homo sapien
gagctcagggcatttgcatacaggg

SEQ ID NO: 5252682 - DNA, 25 bp, Homo sapien
gctgtggacataaatccacatgaga

SEQ ID NO: 5252683 - DNA, 25 bp, Homo sapien
agcagtgctgtggacataaatccac

SEQ ID NO: 5252684 - DNA, 25 bp, Homo sapien
cattctttctccgacaagatccact

SEQ ID NO: 5252685 - DNA, 25 bp, Homo sapien
tttctccgacaagatccacttttcc

SEQ ID NO: 5252686 - DNA, 25 bp, Homo sapien
caaactgccccagctttaggtggat

SEQ ID NO: 5252687 - DNA, 25 bp, Homo sapien
cattgaggccatgcgggttctttga

SEQ ID NO: 5252688 - DNA, 25 bp, Homo sapien
tttgatgggcatcacaggtgcacgg

SEQ ID NO: 5252689 - DNA, 25 bp, Homo sapien
gctggacaggacattcattgaggcc

SEQ ID NO: 5252690 - DNA, 25 bp, Homo sapien
tctggaggtcccccttacatttctc

SEQ ID NO: 5252691 - DNA, 25 bp, Homo sapien
gaggtcccccttacatttctcaagc

SEQ ID NO: 5252692 - DNA, 25 bp, Homo sapien
gtgctctggaggtcccccttacatt

SEQ ID NO: 5252693 - DNA, 25 bp, Homo sapien
tggaggtcccccttacatttctcaa

SEQ ID NO: 5252694 - DNA, 25 bp, Homo sapien
gagaccacctcatcgcagctaaact

SEQ ID NO: 5252695 - DNA, 25 bp, Homo sapien
gaggaagaaggctatccaggtgaca

SEQ ID NO: 5252696 - DNA, 25 bp, Homo sapien
tgttctcgcagagcttctggatgag

SEQ ID NO: 5252697 - DNA, 25 bp, Homo sapien
tcatgctgcaggttcatggccccag

SEQ ID NO: 5252698 - DNA, 25 bp, Homo sapien
ggctgcctcaggagcgatgtgagga

SEQ ID NO: 5252699 - DNA, 25 bp, Homo sapien
gatgccgtcaatgagaaggcgccgc

SEQ ID NO: 5252700 - DNA, 25 bp, Homo sapien
tcaggagcgatgtgaggatggtctc

SEQ ID NO: 5252701 - DNA, 25 bp, Homo sapien
aaggcgccgcacctctgggtggtcc

SEQ ID NO: 5252702 - DNA, 25 bp, Homo sapien
ctgtggagcatggtccgggcgaagg

SEQ ID NO: 5252703 - DNA, 25 bp, Homo sapien
agggcacgttctccgacactgccag

SEQ ID NO: 5252704 - DNA, 25 bp, Homo sapien
cagatgtcagccttggaggtggcac

SEQ ID NO: 5252705 - DNA, 25 bp, Homo sapien
tgactgcagccggcccatcaggctg

SEQ ID NO: 5252706 - DNA, 25 bp, Homo sapien
ctgaatgagaaggtggatggtgcac

SEQ ID NO: 5252707 - DNA, 25 bp, Homo sapien
cagaggagtggtgtggaccagcttc

SEQ ID NO: 5252708 - DNA, 25 bp, Homo sapien
gcttccacatcttcaagaccggcgg

SEQ ID NO: 5252709 - DNA, 25 bp, Homo sapien
gaagtccgggagcttgtcattctca

SEQ ID NO: 5252710 - DNA, 25 bp, Homo sapien
agtccactggcaactaaggggcagc

SEQ ID NO: 5252711 - DNA, 25 bp, Homo sapien
ggagtccactggcaactaaggggca

SEQ ID NO: 5252712 - DNA, 25 bp, Homo sapien
agcccgtggctacagccagcccagg

SEQ ID NO: 5252713 - DNA, 25 bp, Homo sapien
aaggggcagcccgtggctacagcca

SEQ ID NO: 5252714 - DNA, 25 bp, Homo sapien
atgtcccgccgtcctgcaggaggtc

SEQ ID NO: 5252715 - DNA, 25 bp, Homo sapien
gctggctcttgactctcttgaacaa

SEQ ID NO: 5252716 - DNA, 25 bp, Homo sapien
ctcttgaacaagagctgcatggact

SEQ ID NO: 5252717 - DNA, 25 bp, Homo sapien
ctcgtccagggtatgtgccaggtgc

SEQ ID NO: 5252718 - DNA, 25 bp, Homo sapien
tttccacgcagaccgctgtgctgct

SEQ ID NO: 5252719 - DNA, 25 bp, Homo sapien
tcatttccacgcagaccgctgtgct

SEQ ID NO: 5252720 - DNA, 25 bp, Homo sapien
ccacgcagaccgctgtgctgctgat

SEQ ID NO: 5252721 - DNA, 25 bp, Homo sapien
gtgcctcatttccacgcagaccgct

SEQ ID NO: 5252722 - DNA, 25 bp, Homo sapien
ccagggcgggctcatttctcagcag

SEQ ID NO: 5252723 - DNA, 25 bp, Homo sapien
ggagaggtaatgcagattggtggct

SEQ ID NO: 5252724 - DNA, 25 bp, Homo sapien
cattgggcagttatccccagggcgg

SEQ ID NO: 5252725 - DNA, 25 bp, Homo sapien
aagggaggacattgggcagttatcc

SEQ ID NO: 5252726 - DNA, 25 bp, Homo sapien
tggtacagaactgggccgctcatga

SEQ ID NO: 5252727 - DNA, 25 bp, Homo sapien
tcctggtacagaactgggccgctca

SEQ ID NO: 5252728 - DNA, 25 bp, Homo sapien
gcttctcctggtacagaactgggcc

SEQ ID NO: 5252729 - DNA, 25 bp, Homo sapien
ctggtcggcacccttctccagcagc

SEQ ID NO: 5252730 - DNA, 25 bp, Homo sapien
gatcctgcactgctcagacatggcg

SEQ ID NO: 5252731 - DNA, 25 bp, Homo sapien
gttgtcgaagaagatcctgcactgc

SEQ ID NO: 5252732 - DNA, 25 bp, Homo sapien
atggcgtcgaaagaggaccccacat

SEQ ID NO: 5252733 - DNA, 25 bp, Homo sapien
gcagtcacgctgttgctcacgggct

SEQ ID NO: 5252734 - DNA, 25 bp, Homo sapien
catgagggggatccaggccttcttc

SEQ ID NO: 5252735 - DNA, 25 bp, Homo sapien
aaatgcttcttggacatcccgacca

SEQ ID NO: 5252736 - DNA, 25 bp, Homo sapien
ggatgaaggctttcagacgcagcag

SEQ ID NO: 5252737 - DNA, 25 bp, Homo sapien
atcccgaccacccttgccagctttc

SEQ ID NO: 5252738 - DNA, 25 bp, Homo sapien
cagacccaaggacctgtttcctcgg

SEQ ID NO: 5252739 - DNA, 25 bp, Homo sapien
tcctcggggaacagcgggccccaga

SEQ ID NO: 5252740 - DNA, 25 bp, Homo sapien
gcagacccaaggacctgtttcctcg

SEQ ID NO: 5252741 - DNA, 25 bp, Homo sapien
gggtattttgagtcctaatactcaa

SEQ ID NO: 5252742 - DNA, 25 bp, Homo sapien
taatactcaaaagtgacctgccagt

SEQ ID NO: 5252743 - DNA, 25 bp, Homo sapien
aggcagtggacaagaccactttggg

SEQ ID NO: 5252744 - DNA, 25 bp, Homo sapien
tttgcaggtcatctcggatggcctc

SEQ ID NO: 5252745 - DNA, 25 bp, Homo sapien
catggttgtctggaaaacggtcatc

SEQ ID NO: 5252746 - DNA, 25 bp, Homo sapien
cacttggccctgagggatgctccag

SEQ ID NO: 5252747 - DNA, 25 bp, Homo sapien
catcttgtcatcagtagcggtatca

SEQ ID NO: 5252748 - DNA, 25 bp, Homo sapien
cacacactgaaacatggtagccata

SEQ ID NO: 5252749 - DNA, 25 bp, Homo sapien
gcagcgattctgattcttgacaagt

SEQ ID NO: 5252750 - DNA, 25 bp, Homo sapien
gcggtagagaacagccggctttttc

SEQ ID NO: 5252751 - DNA, 25 bp, Homo sapien
caagttgcaagcagcgattctgatt

SEQ ID NO: 5252752 - DNA, 25 bp, Homo sapien
aacataggccattgtttctagcaag

SEQ ID NO: 5252753 - DNA, 25 bp, Homo sapien
tgctgggaagtccagctttttcaga

SEQ ID NO: 5252754 - DNA, 25 bp, Homo sapien
tgtagacatctgcttcataataatt

SEQ ID NO: 5252755 - DNA, 25 bp, Homo sapien
cgggatccgggtccagctgtagttc

SEQ ID NO: 5252756 - DNA, 25 bp, Homo sapien
ccgggtccagctgtagttcctggag

SEQ ID NO: 5252757 - DNA, 25 bp, Homo sapien
gatccgggtccagctgtagttcctg

SEQ ID NO: 5252758 - DNA, 25 bp, Homo sapien
cccgggatccgggtccagctgtagt

SEQ ID NO: 5252759 - DNA, 25 bp, Homo sapien
gccagaaacccatgctgactacagc

SEQ ID NO: 5252760 - DNA, 25 bp, Homo sapien
cagaaacccatgctgactacagcta

SEQ ID NO: 5252761 - DNA, 25 bp, Homo sapien
aagccagaaacccatgctgactaca

SEQ ID NO: 5252762 - DNA, 25 bp, Homo sapien
aacccatgctgactacagctatcca

SEQ ID NO: 5252763 - DNA, 25 bp, Homo sapien
cagtttacgtcttatgtttggacca

SEQ ID NO: 5252764 - DNA, 25 bp, Homo sapien
ttaaaaagggcttgcatttggcact

SEQ ID NO: 5252765 - DNA, 25 bp, Homo sapien
ctaagaagacagtttacgtcttatg

SEQ ID NO: 5252766 - DNA, 25 bp, Homo sapien
ttgcatttggcactaagaagacagt

SEQ ID NO: 5252767 - DNA, 25 bp, Homo sapien
tcagcatgcgtgtggatgaactccg

SEQ ID NO: 5252768 - DNA, 25 bp, Homo sapien
agtgcctggccttaggcacgctgtc

SEQ ID NO: 5252769 - DNA, 25 bp, Homo sapien
tggatgaactccgagtgaagacaca

SEQ ID NO: 5252770 - DNA, 25 bp, Homo sapien
agacacaaagctagtttccgaccct

SEQ ID NO: 5252771 - DNA, 25 bp, Homo sapien
tctctcctgttgatgggaccccgga

SEQ ID NO: 5252772 - DNA, 25 bp, Homo sapien
ttccagagaaggctttagcacgggt

SEQ ID NO: 5252773 - DNA, 25 bp, Homo sapien
tagcacgggttggattttggacagc

SEQ ID NO: 5252774 - DNA, 25 bp, Homo sapien
cctttggcagttggactgggaacag

SEQ ID NO: 5252775 - DNA, 25 bp, Homo sapien
tgtatgaacagtgcgtgtttccttc

SEQ ID NO: 5252776 - DNA, 25 bp, Homo sapien
ccttcacttttgttggagctgcgtg

SEQ ID NO: 5252777 - DNA, 25 bp, Homo sapien
tgaacagtgcgtgtttccttcactt

SEQ ID NO: 5252778 - DNA, 25 bp, Homo sapien
aactgtatgaacagtgcgtgtttcc

SEQ ID NO: 5252779 - DNA, 25 bp, Homo sapien
taggaacgaacggatctactgggtc

SEQ ID NO: 5252780 - DNA, 25 bp, Homo sapien
ctgggtcttctttgtccaccgtccg

SEQ ID NO: 5252781 - DNA, 25 bp, Homo sapien
gatccagggaacagattagggttag

SEQ ID NO: 5252782 - DNA, 25 bp, Homo sapien
tggttgctgtgttgatccagggaac

SEQ ID NO: 5252783 - DNA, 25 bp, Homo sapien
tatttgtggaccaccgacttagtgg

SEQ ID NO: 5252784 - DNA, 25 bp, Homo sapien
gcggaaagcctgtatttgtggacca

SEQ ID NO: 5252785 - DNA, 25 bp, Homo sapien
gtgctgctgaccagcggaaagcctg

SEQ ID NO: 5252786 - DNA, 25 bp, Homo sapien
tggaccaccgacttagtggatgtac

SEQ ID NO: 5252787 - DNA, 25 bp, Homo sapien
actgggcgtagcctgagatttcagc

SEQ ID NO: 5252788 - DNA, 25 bp, Homo sapien
gtgacagtgtccagatccgccttca

SEQ ID NO: 5252789 - DNA, 25 bp, Homo sapien
tctctgacttcactgtaattgctat

SEQ ID NO: 5252790 - DNA, 25 bp, Homo sapien
agaatcttcagaccctttcttggga

SEQ ID NO: 5252791 - DNA, 25 bp, Homo sapien
gtctcttcccaatactgatagtccc

SEQ ID NO: 5252792 - DNA, 25 bp, Homo sapien
tgatagtcccccttttcgataaatg

SEQ ID NO: 5252793 - DNA, 25 bp, Homo sapien
caatactgatagtcccccttttcga

SEQ ID NO: 5252794 - DNA, 25 bp, Homo sapien
tgtctcttcccaatactgatagtcc

SEQ ID NO: 5252795 - DNA, 25 bp, Homo sapien
gttcctctctgtggtcacaggtcaa

SEQ ID NO: 5252796 - DNA, 25 bp, Homo sapien
atggttcctctctgtggtcacaggt

SEQ ID NO: 5252797 - DNA, 25 bp, Homo sapien
tcagatgccacatggttcctctctg

SEQ ID NO: 5252798 - DNA, 25 bp, Homo sapien
ctctctgtggtcacaggtcaaggaa

SEQ ID NO: 5252799 - DNA, 25 bp, Homo sapien
cattaatcggaggaaacggttagtg

SEQ ID NO: 5252800 - DNA, 25 bp, Homo sapien
cggttagtgcaacttccatgccaca

SEQ ID NO: 5252801 - DNA, 25 bp, Homo sapien
tatgccacatgccagcatgaacgtg

SEQ ID NO: 5252802 - DNA, 25 bp, Homo sapien
gaacgtgccttatatcccagcagaa

SEQ ID NO: 5252803 - DNA, 25 bp, Homo sapien
aggctccacgtcttctgtccacctg

SEQ ID NO: 5252804 - DNA, 25 bp, Homo sapien
tctgcaggctccacgtcttctgtcc

SEQ ID NO: 5252805 - DNA, 25 bp, Homo sapien
caggctccacgtcttctgtccacct

SEQ ID NO: 5252806 - DNA, 25 bp, Homo sapien
tgcaggctccacgtcttctgtccac

SEQ ID NO: 5252807 - DNA, 25 bp, Homo sapien
tttgtcaagcaggattttctttcac

SEQ ID NO: 5252808 - DNA, 25 bp, Homo sapien
cctaagtgacggtttttgtcaagca

SEQ ID NO: 5252809 - DNA, 25 bp, Homo sapien
ataactggaatcttcttagccccgc

SEQ ID NO: 5252810 - DNA, 25 bp, Homo sapien
tggaatcttcttagccccgccttct

SEQ ID NO: 5252811 - DNA, 25 bp, Homo sapien
ctgagcctggctgcccgaaaggaca

SEQ ID NO: 5252812 - DNA, 25 bp, Homo sapien
caagtctgtgctccgagacgcgctg

SEQ ID NO: 5252813 - DNA, 25 bp, Homo sapien
ccgggtgctgtccagagtgtcattc

SEQ ID NO: 5252814 - DNA, 25 bp, Homo sapien
tgctgtccagagtgtcattccttct

SEQ ID NO: 5252815 - DNA, 25 bp, Homo sapien
gctttcactgtaagacaagtctgtg

SEQ ID NO: 5252816 - DNA, 25 bp, Homo sapien
tcctgaaggcagcgtagaagctggc

SEQ ID NO: 5252817 - DNA, 25 bp, Homo sapien
ccaagaagccatgattgggcacgtc

SEQ ID NO: 5252818 - DNA, 25 bp, Homo sapien
attgggcacgtctgtgtcctgaagg

SEQ ID NO: 5252819 - DNA, 25 bp, Homo sapien
tgtcctgaaggcagcgtagaagctg

SEQ ID NO: 5252820 - DNA, 25 bp, Homo sapien
tggacaggatatgagagtgttggac

SEQ ID NO: 5252821 - DNA, 25 bp, Homo sapien
tactttccaaagctagccgctatcc

SEQ ID NO: 5252822 - DNA, 25 bp, Homo sapien
tagtccatgagaactggatgtcagg

SEQ ID NO: 5252823 - DNA, 25 bp, Homo sapien
cgctatcccgacttttaacactgta

SEQ ID NO: 5252824 - DNA, 25 bp, Homo sapien
ctccctgaggaagagtctctggtgg

SEQ ID NO: 5252825 - DNA, 25 bp, Homo sapien
ggtaaagaagacacattctcgtttc

SEQ ID NO: 5252826 - DNA, 25 bp, Homo sapien
agaagacacattctcgtttcttaaa

SEQ ID NO: 5252827 - DNA, 25 bp, Homo sapien
ctttggtaaagaagacacattctcg

SEQ ID NO: 5252828 - DNA, 25 bp, Homo sapien
gaagacacattctcgtttcttaaaa

SEQ ID NO: 5252829 - DNA, 25 bp, Homo sapien
cccagacttgagctgtaatcaagca

SEQ ID NO: 5252830 - DNA, 25 bp, Homo sapien
tgacccagacttgagctgtaatcaa

SEQ ID NO: 5252831 - DNA, 25 bp, Homo sapien
tttgacccagacttgagctgtaatc

SEQ ID NO: 5252832 - DNA, 25 bp, Homo sapien
gacccagacttgagctgtaatcaag

SEQ ID NO: 5252833 - DNA, 25 bp, Homo sapien
aactggaagaccctgaggtgttcct

SEQ ID NO: 5252834 - DNA, 25 bp, Homo sapien
ggctgcccaccacatctcccttcat

SEQ ID NO: 5252835 - DNA, 25 bp, Homo sapien
gtgttcctgtgctccgcttgtgttg

SEQ ID NO: 5252836 - DNA, 25 bp, Homo sapien
tgctccgcttgtgttgctgagggct

SEQ ID NO: 5252837 - DNA, 25 bp, Homo sapien
gatgggtaacttagattacatggag

SEQ ID NO: 5252838 - DNA, 25 bp, Homo sapien
taacttagattacatggagtgatcc

SEQ ID NO: 5252839 - DNA, 25 bp, Homo sapien
cccttgtctgatgggtaacttagat

SEQ ID NO: 5252840 - DNA, 25 bp, Homo sapien
tagattacatggagtgatcccacta

SEQ ID NO: 5252841 - DNA, 25 bp, Homo sapien
taagcacgatggtgtggacaggaag

SEQ ID NO: 5252842 - DNA, 25 bp, Homo sapien
ctgataagcacgatggtgtggacag

SEQ ID NO: 5252843 - DNA, 25 bp, Homo sapien
gcacgatggtgtggacaggaaggaa

SEQ ID NO: 5252844 - DNA, 25 bp, Homo sapien
ataagcacgatggtgtggacaggaa

SEQ ID NO: 5252845 - DNA, 25 bp, Homo sapien
ctctgggcatagccacacttgcaca

SEQ ID NO: 5252846 - DNA, 25 bp, Homo sapien
tctgggcatagccacacttgcacac

SEQ ID NO: 5252847 - DNA, 25 bp, Homo sapien
ctgggcatagccacacttgcacaca

SEQ ID NO: 5252848 - DNA, 25 bp, Homo sapien
cgtcggtaggaaattccttggtgtg

SEQ ID NO: 5252849 - DNA, 25 bp, Homo sapien
gtcagcagctcgtaaaggatttccg

SEQ ID NO: 5252850 - DNA, 25 bp, Homo sapien
ttggactgcgcgatgtagatgagcc

SEQ ID NO: 5252851 - DNA, 25 bp, Homo sapien
gatgagccggctgaagatcttgcgc

SEQ ID NO: 5252852 - DNA, 25 bp, Homo sapien
gatcttgcgcatgcgcggcttcagg

SEQ ID NO: 5252853 - DNA, 25 bp, Homo sapien
cggattctccggaattgcacacggg

SEQ ID NO: 5252854 - DNA, 25 bp, Homo sapien
cgaatggaagaacccgcggtcgctg

SEQ ID NO: 5252855 - DNA, 25 bp, Homo sapien
tccccaaacttggtgcagcccgaat

SEQ ID NO: 5252856 - DNA, 25 bp, Homo sapien
ttgcacacgggaactgccttctctg

SEQ ID NO: 5252857 - DNA, 25 bp, Homo sapien
ggtgcctcccgtgagaatccaagca

SEQ ID NO: 5252858 - DNA, 25 bp, Homo sapien
tcagcatcgcaattcctgatgaggg

SEQ ID NO: 5252859 - DNA, 25 bp, Homo sapien
tatgccaatggccacaatattctcc

SEQ ID NO: 5252860 - DNA, 25 bp, Homo sapien
tcatcaggccataatgggtgcctcc

SEQ ID NO: 5252861 - DNA, 25 bp, Homo sapien
cattcattgttaactctttcccagc

SEQ ID NO: 5252862 - DNA, 25 bp, Homo sapien
ccttgaaaggcagacttccccatga

SEQ ID NO: 5252863 - DNA, 25 bp, Homo sapien
ctttcccagcagttaattaggtacg

SEQ ID NO: 5252864 - DNA, 25 bp, Homo sapien
aggtacgtcatccttgttttcaatt

SEQ ID NO: 5252865 - DNA, 25 bp, Homo sapien
cattgtccacgagcagcaaatgtgt

SEQ ID NO: 5252866 - DNA, 25 bp, Homo sapien
cggagctttgcttcgacagtgggat

SEQ ID NO: 5252867 - DNA, 25 bp, Homo sapien
tatacttctctagctgattccggag

SEQ ID NO: 5252868 - DNA, 25 bp, Homo sapien
tgggatgtccatgacagccattgtc

SEQ ID NO: 5252869 - DNA, 25 bp, Homo sapien
gggatcttgccaccatagttggaat

SEQ ID NO: 5252870 - DNA, 25 bp, Homo sapien
ggggatcttgccaccatagttggaa

SEQ ID NO: 5252871 - DNA, 25 bp, Homo sapien
caaaacacacaatggggatcttgcc

SEQ ID NO: 5252872 - DNA, 25 bp, Homo sapien
aaacacacaatggggatcttgccac

SEQ ID NO: 5252873 - DNA, 25 bp, Homo sapien
gcagaagatgtcagggcatcctcca

SEQ ID NO: 5252874 - DNA, 25 bp, Homo sapien
tcaggcagccgggacaccgtgcggg

SEQ ID NO: 5252875 - DNA, 25 bp, Homo sapien
tccaccaggctagcgatcacatcag

SEQ ID NO: 5252876 - DNA, 25 bp, Homo sapien
tgcggggtaaaaagcgcaccagctt

SEQ ID NO: 5252877 - DNA, 25 bp, Homo sapien
taataactgttaataggtgagaaca

SEQ ID NO: 5252878 - DNA, 25 bp, Homo sapien
tttgtatagagcgtaggagatggca

SEQ ID NO: 5252879 - DNA, 25 bp, Homo sapien
ataggtgagaacattcgagaatttc

SEQ ID NO: 5252880 - DNA, 25 bp, Homo sapien
gcattgctcacaatttcatccccag

SEQ ID NO: 5252881 - DNA, 25 bp, Homo sapien
ccttgtcttgctcactggtgctgaa

SEQ ID NO: 5252882 - DNA, 25 bp, Homo sapien
cattggctaagtccagctggttcca

SEQ ID NO: 5252883 - DNA, 25 bp, Homo sapien
tcggcggtcattggtgaaaatctca

SEQ ID NO: 5252884 - DNA, 25 bp, Homo sapien
gcccattccagttatccttgtcttg

SEQ ID NO: 5252885 - DNA, 25 bp, Homo sapien
gacatcatgggtgagaaacttccgt

SEQ ID NO: 5252886 - DNA, 25 bp, Homo sapien
ccagacaaacgtgaggagggcatca

SEQ ID NO: 5252887 - DNA, 25 bp, Homo sapien
gaagttcgcaaccagtttccagaca

SEQ ID NO: 5252888 - DNA, 25 bp, Homo sapien
gatctgcagattccggtacacaagc

SEQ ID NO: 5252889 - DNA, 25 bp, Homo sapien
gagagttccttcttattctgaagaa

SEQ ID NO: 5252890 - DNA, 25 bp, Homo sapien
ggtgccgagtaataggagacacgtc

SEQ ID NO: 5252891 - DNA, 25 bp, Homo sapien
tgaagagagcttgcagggggtgccg

SEQ ID NO: 5252892 - DNA, 25 bp, Homo sapien
ctgaagaatggcccagatgaagaga

SEQ ID NO: 5252893 - DNA, 25 bp, Homo sapien
agcagcattgatgtcgttcttcact

SEQ ID NO: 5252894 - DNA, 25 bp, Homo sapien
caacagcccgggtctcgtactcatt

SEQ ID NO: 5252895 - DNA, 25 bp, Homo sapien
attgatgtcgttcttcactttggcc

SEQ ID NO: 5252896 - DNA, 25 bp, Homo sapien
tactcattagccagctcctcggact

SEQ ID NO: 5252897 - DNA, 25 bp, Homo sapien
ctatgagtgccgctggcaatgtctg

SEQ ID NO: 5252898 - DNA, 25 bp, Homo sapien
accatctggtctatgagtgccgctg

SEQ ID NO: 5252899 - DNA, 25 bp, Homo sapien
tccaccatctggtctatgagtgccg

SEQ ID NO: 5252900 - DNA, 25 bp, Homo sapien
tctggtctatgagtgccgctggcaa

SEQ ID NO: 5252901 - DNA, 25 bp, Homo sapien
aatacaaagaattagccgggtgtgg

SEQ ID NO: 5252902 - DNA, 25 bp, Homo sapien
catggcaaaaccccgtctctactaa

SEQ ID NO: 5252903 - DNA, 25 bp, Homo sapien
tcgagactagtctgcccaacatggc

SEQ ID NO: 5252904 - DNA, 25 bp, Homo sapien
tctactaaaaatacaaagaattagc

SEQ ID NO: 5252905 - DNA, 25 bp, Homo sapien
cagacagttgcttccaccccaagct

SEQ ID NO: 5252906 - DNA, 25 bp, Homo sapien
gctgggcgatgaaatgctggtctgt

SEQ ID NO: 5252907 - DNA, 25 bp, Homo sapien
cacaggaatagaccagcagctgttc

SEQ ID NO: 5252908 - DNA, 25 bp, Homo sapien
gccaagtcttcatcgctgctgtaac

SEQ ID NO: 5252909 - DNA, 25 bp, Homo sapien
acagacacaggataatcttccagtt

SEQ ID NO: 5252910 - DNA, 25 bp, Homo sapien
ccagttcttggtgtctcgggaaatc

SEQ ID NO: 5252911 - DNA, 25 bp, Homo sapien
ctccataccattgcttagaaagaaa

SEQ ID NO: 5252912 - DNA, 25 bp, Homo sapien
agggtataataaacagacacaggat

SEQ ID NO: 5252913 - DNA, 25 bp, Homo sapien
gagcacacatatgtggatgcatgta

SEQ ID NO: 5252914 - DNA, 25 bp, Homo sapien
gagagcacacatatgtggatgcatg

SEQ ID NO: 5252915 - DNA, 25 bp, Homo sapien
gcacacatatgtggatgcatgtaca

SEQ ID NO: 5252916 - DNA, 25 bp, Homo sapien
cacacatatgtggatgcatgtacac

SEQ ID NO: 5252917 - DNA, 25 bp, Homo sapien
cttgcaagcatgggacgggcacagc

SEQ ID NO: 5252918 - DNA, 25 bp, Homo sapien
aagcatgggacgggcacagccctcc

SEQ ID NO: 5252919 - DNA, 25 bp, Homo sapien
gcatgggacgggcacagccctcccc

SEQ ID NO: 5252920 - DNA, 25 bp, Homo sapien
gcaagcatgggacgggcacagccct

SEQ ID NO: 5252921 - DNA, 25 bp, Homo sapien
tggacccagagataagggcatcgtc

SEQ ID NO: 5252922 - DNA, 25 bp, Homo sapien
ctggacccagagataagggcatcgt

SEQ ID NO: 5252923 - DNA, 25 bp, Homo sapien
ggacccagagataagggcatcgtca

SEQ ID NO: 5252924 - DNA, 25 bp, Homo sapien
gaagaggacaaagaccagcgagtac

SEQ ID NO: 5252925 - DNA, 25 bp, Homo sapien
gaagaacgccacatagtaccaaagc

SEQ ID NO: 5252926 - DNA, 25 bp, Homo sapien
ggtgtggcaccgaatggaaatccat

SEQ ID NO: 5252927 - DNA, 25 bp, Homo sapien
gcgatgtagaagaccacattccagg

SEQ ID NO: 5252928 - DNA, 25 bp, Homo sapien
caacaaccatttgctcttctggtgc

SEQ ID NO: 5252929 - DNA, 25 bp, Homo sapien
actgtccgctttgctggtgctagca

SEQ ID NO: 5252930 - DNA, 25 bp, Homo sapien
acattctgcctaggctcagaaacca

SEQ ID NO: 5252931 - DNA, 25 bp, Homo sapien
aaacattctgcctaggctcagaaac

SEQ ID NO: 5252932 - DNA, 25 bp, Homo sapien
gaggccacaggaactgtccgctttg

SEQ ID NO: 5252933 - DNA, 25 bp, Homo sapien
acatcagcagcttggaaatatcaac

SEQ ID NO: 5252934 - DNA, 25 bp, Homo sapien
gggacatcagcagcttggaaatatc

SEQ ID NO: 5252935 - DNA, 25 bp, Homo sapien
gacatcagcagcttggaaatatcaa

SEQ ID NO: 5252936 - DNA, 25 bp, Homo sapien
ggacatcagcagcttggaaatatca

SEQ ID NO: 5252937 - DNA, 25 bp, Homo sapien
aaatacaattcctgctatgaagtaa

SEQ ID NO: 5252938 - DNA, 25 bp, Homo sapien
cccagcgtgtccatcacattccaca

SEQ ID NO: 5252939 - DNA, 25 bp, Homo sapien
tgaagtaaaaaagccccagcgtgtc

SEQ ID NO: 5252940 - DNA, 25 bp, Homo sapien
tcacattccacaggtcagtaaaata

SEQ ID NO: 5252941 - DNA, 25 bp, Homo sapien
tagtccagacagaaaatgactcgtc

SEQ ID NO: 5252942 - DNA, 25 bp, Homo sapien
tcgtccagaatacaaagagctttta

SEQ ID NO: 5252943 - DNA, 25 bp, Homo sapien
gtgaaaataatgtagtccagacaga

SEQ ID NO: 5252944 - DNA, 25 bp, Homo sapien
tgtggatcaatcttagagtgaaaat

SEQ ID NO: 5252945 - DNA, 25 bp, Homo sapien
cagcattataatcttgggtcctaag

SEQ ID NO: 5252946 - DNA, 25 bp, Homo sapien
tcctctgcagcattataatcttggg

SEQ ID NO: 5252947 - DNA, 25 bp, Homo sapien
gcattataatcttgggtcctaagtt

SEQ ID NO: 5252948 - DNA, 25 bp, Homo sapien
tgcagcattataatcttgggtccta

SEQ ID NO: 5252949 - DNA, 25 bp, Homo sapien
cctcagtgttggaatggagcttcca

SEQ ID NO: 5252950 - DNA, 25 bp, Homo sapien
gaacctcagtgttggaatggagctt

SEQ ID NO: 5252951 - DNA, 25 bp, Homo sapien
aagaacctcagtgttggaatggagc

SEQ ID NO: 5252952 - DNA, 25 bp, Homo sapien
atagcatgacttcatgatgactgga

SEQ ID NO: 5252953 - DNA, 25 bp, Homo sapien
aaagaggaacaggaagaagaacaca

SEQ ID NO: 5252954 - DNA, 25 bp, Homo sapien
ggaacaggaagaagaacacatcgat

SEQ ID NO: 5252955 - DNA, 25 bp, Homo sapien
cgcaaagaggaacaggaagaagaac

SEQ ID NO: 5252956 - DNA, 25 bp, Homo sapien
acaggaagaagaacacatcgatcag

SEQ ID NO: 5252957 - DNA, 25 bp, Homo sapien
aacggaatatccacctccagcgctg

SEQ ID NO: 5252958 - DNA, 25 bp, Homo sapien
tgaccgaacggaatatccacctcca

SEQ ID NO: 5252959 - DNA, 25 bp, Homo sapien
gctcgtagatgaccgaacggaatat

SEQ ID NO: 5252960 - DNA, 25 bp, Homo sapien
ggccaggtagggctcgtagatgacc

SEQ ID NO: 5252961 - DNA, 25 bp, Homo sapien
cgtgcttctgaagtgcggtctccgg

SEQ ID NO: 5252962 - DNA, 25 bp, Homo sapien
tgtttccatctgagccaagtcaggc

SEQ ID NO: 5252963 - DNA, 25 bp, Homo sapien
tgttggactccgtttcacgcgcgtg

SEQ ID NO: 5252964 - DNA, 25 bp, Homo sapien
tggttcagggagcaaatgcctcctc

SEQ ID NO: 5252965 - DNA, 25 bp, Homo sapien
catgtagatgcacaccagggggatg

SEQ ID NO: 5252966 - DNA, 25 bp, Homo sapien
cagtgggcaaagtcatacgtggtac

SEQ ID NO: 5252967 - DNA, 25 bp, Homo sapien
tccacacacagtggcttggactcat

SEQ ID NO: 5252968 - DNA, 25 bp, Homo sapien
gcttggactcattcccagtgaaggt

SEQ ID NO: 5252969 - DNA, 25 bp, Homo sapien
tttctccttgcagcaacacttgaag

SEQ ID NO: 5252970 - DNA, 25 bp, Homo sapien
tcttcaccaccatgtagaagtaagc

SEQ ID NO: 5252971 - DNA, 25 bp, Homo sapien
tagaagtaagcgaagacgatgaagg

SEQ ID NO: 5252972 - DNA, 25 bp, Homo sapien
caccaggaagtacctctggaacttc

SEQ ID NO: 5252973 - DNA, 25 bp, Homo sapien
ttctgatcccaagtacacatggata

SEQ ID NO: 5252974 - DNA, 25 bp, Homo sapien
tgatcccaagtacacatggataaac

SEQ ID NO: 5252975 - DNA, 25 bp, Homo sapien
tccctgaaattaatcgctgcttctg

SEQ ID NO: 5252976 - DNA, 25 bp, Homo sapien
ttaatcgctgcttctgatcccaagt

SEQ ID NO: 5252977 - DNA, 25 bp, Homo sapien
tgttgtctcctattctcagtgtttc

SEQ ID NO: 5252978 - DNA, 25 bp, Homo sapien
tgtttcttccgagaatataaactat

SEQ ID NO: 5252979 - DNA, 25 bp, Homo sapien
caccacccgagggtggagaaagatc

SEQ ID NO: 5252980 - DNA, 25 bp, Homo sapien
ttactgccacaccacccgagggtgg

SEQ ID NO: 5252981 - DNA, 25 bp, Homo sapien
tcctctgaggtgtcgttggcttttg

SEQ ID NO: 5252982 - DNA, 25 bp, Homo sapien
agttttccttcatgacaccctccca

SEQ ID NO: 5252983 - DNA, 25 bp, Homo sapien
ttcatgacaccctcccatgccagag

SEQ ID NO: 5252984 - DNA, 25 bp, Homo sapien
tttgtgttgatcttgacaaggtagt

SEQ ID NO: 5252985 - DNA, 25 bp, Homo sapien
tctacagagggagccttgcaaagca

SEQ ID NO: 5252986 - DNA, 25 bp, Homo sapien
tgtctacagagggagccttgcaaag

SEQ ID NO: 5252987 - DNA, 25 bp, Homo sapien
aagcagaaagggatgtctgacatac

SEQ ID NO: 5252988 - DNA, 25 bp, Homo sapien
tacagagggagccttgcaaagcaga

SEQ ID NO: 5252989 - DNA, 25 bp, Homo sapien
cagttgtctaaatcgatgcctcatt

SEQ ID NO: 5252990 - DNA, 25 bp, Homo sapien
tgtatccagttgtctaaatcgatgc

SEQ ID NO: 5252991 - DNA, 25 bp, Homo sapien
tccagttgtctaaatcgatgcctca

SEQ ID NO: 5252992 - DNA, 25 bp, Homo sapien
ctttgtatccagttgtctaaatcga

SEQ ID NO: 5252993 - DNA, 25 bp, Homo sapien
tataattgtaagcatcttcacctgc

SEQ ID NO: 5252994 - DNA, 25 bp, Homo sapien
aaaacaggcaacgaatcagagtggc

SEQ ID NO: 5252995 - DNA, 25 bp, Homo sapien
cagagtggcagcaaagactagcatc

SEQ ID NO: 5252996 - DNA, 25 bp, Homo sapien
tgagccttccttatgttccctataa

SEQ ID NO: 5252997 - DNA, 25 bp, Homo sapien
tgattttattagcaatctctttcag

SEQ ID NO: 5252998 - DNA, 25 bp, Homo sapien
tctttcagaagacccttgagatcat

SEQ ID NO: 5252999 - DNA, 25 bp, Homo sapien
tatttgattttattagcaatctctt

SEQ ID NO: 5253000 - DNA, 25 bp, Homo sapien
tctctttcagaagacccttgagatc

SEQ ID NO: 5253001 - DNA, 25 bp, Homo sapien
tttttctccattagagttcatacag

SEQ ID NO: 5253002 - DNA, 25 bp, Homo sapien
cttgctataattagatttttctcca

SEQ ID NO: 5253003 - DNA, 25 bp, Homo sapien
agatttttctccattagagttcata

SEQ ID NO: 5253004 - DNA, 25 bp, Homo sapien
tttctccattagagttcatacagtt

SEQ ID NO: 5253005 - DNA, 25 bp, Homo sapien
gaaaatctctcatttagtagtcgat

SEQ ID NO: 5253006 - DNA, 25 bp, Homo sapien
tacccaggggtctgaaaatctctca

SEQ ID NO: 5253007 - DNA, 25 bp, Homo sapien
tagtagtcgatagcaaaattgttca

SEQ ID NO: 5253008 - DNA, 25 bp, Homo sapien
tgttcatcagcattccttaatatga

SEQ ID NO: 5253009 - DNA, 25 bp, Homo sapien
ctttcaaggttgcattttgggcgac

SEQ ID NO: 5253010 - DNA, 25 bp, Homo sapien
tctcaaggtctcagcacactagggt

SEQ ID NO: 5253011 - DNA, 25 bp, Homo sapien
gaaacaggcaccattctggagaaac

SEQ ID NO: 5253012 - DNA, 25 bp, Homo sapien
tcaataggagcctggtgagtccaag

SEQ ID NO: 5253013 - DNA, 25 bp, Homo sapien
ttaatagttcaggttcatgtatctc

SEQ ID NO: 5253014 - DNA, 25 bp, Homo sapien
tgctcaagttaataattcctatttg

SEQ ID NO: 5253015 - DNA, 25 bp, Homo sapien
tttaatagttcaggttcatgtatct

SEQ ID NO: 5253016 - DNA, 25 bp, Homo sapien
atgtatctcatatcttatgctcaag

SEQ ID NO: 5253017 - DNA, 25 bp, Homo sapien
tctcagttgtgcaaaagtacacagg

SEQ ID NO: 5253018 - DNA, 25 bp, Homo sapien
taccatacacaaggacatagcacct

SEQ ID NO: 5253019 - DNA, 25 bp, Homo sapien
tcactactgcccagacaaaaggaaa

SEQ ID NO: 5253020 - DNA, 25 bp, Homo sapien
tacgaccacttccagagaaagctgg

SEQ ID NO: 5253021 - DNA, 25 bp, Homo sapien
cctgaaggcaattggcttgttttca

SEQ ID NO: 5253022 - DNA, 25 bp, Homo sapien
gctccctgaaggcaattggcttgtt

SEQ ID NO: 5253023 - DNA, 25 bp, Homo sapien
ccacaggtgcagctccctgaaggca

SEQ ID NO: 5253024 - DNA, 25 bp, Homo sapien
tccctgaaggcaattggcttgtttt

SEQ ID NO: 5253025 - DNA, 25 bp, Homo sapien
ccaaagactgcctggtgaaccaagc

SEQ ID NO: 5253026 - DNA, 25 bp, Homo sapien
aaattctctcgaatgcagccgggcg

SEQ ID NO: 5253027 - DNA, 25 bp, Homo sapien
ggttcattcccacaaccaaagactg

SEQ ID NO: 5253028 - DNA, 25 bp, Homo sapien
tctccacactcggtaaattctctcg

SEQ ID NO: 5253029 - DNA, 25 bp, Homo sapien
tactaggccacttgccatggccaca

SEQ ID NO: 5253030 - DNA, 25 bp, Homo sapien
agggacaccactataggtttggagg

SEQ ID NO: 5253031 - DNA, 25 bp, Homo sapien
gggtgataagactctcccttaggga

SEQ ID NO: 5253032 - DNA, 25 bp, Homo sapien
gagggattgggagccaaggcaaagc

SEQ ID NO: 5253033 - DNA, 25 bp, Homo sapien
gtctttatcaaacactggctgctta

SEQ ID NO: 5253034 - DNA, 25 bp, Homo sapien
taatcgagagacagagagtgtctct

SEQ ID NO: 5253035 - DNA, 25 bp, Homo sapien
gattgtaatcgagagacagagagtg

SEQ ID NO: 5253036 - DNA, 25 bp, Homo sapien
agaggagctgtctttatcaaacact

SEQ ID NO: 5253037 - DNA, 25 bp, Homo sapien
gagcaagaccagtagttcattccaa

SEQ ID NO: 5253038 - DNA, 25 bp, Homo sapien
gcaagaccagtagttcattccaaga

SEQ ID NO: 5253039 - DNA, 25 bp, Homo sapien
agcaagaccagtagttcattccaag

SEQ ID NO: 5253040 - DNA, 25 bp, Homo sapien
ctgagggcatcccttaaggaggatg

SEQ ID NO: 5253041 - DNA, 25 bp, Homo sapien
ggaattcacttttaccacagaggca

SEQ ID NO: 5253042 - DNA, 25 bp, Homo sapien
ggatcgtagtcgtacactgggaaac

SEQ ID NO: 5253043 - DNA, 25 bp, Homo sapien
tgaatgcccgaaacagatacggact

SEQ ID NO: 5253044 - DNA, 25 bp, Homo sapien
tagagttctcaacaagagggcacgg

SEQ ID NO: 5253045 - DNA, 25 bp, Homo sapien
tctgggtgactataccaagatggca

SEQ ID NO: 5253046 - DNA, 25 bp, Homo sapien
tctccacagggcagatttccacggt

SEQ ID NO: 5253047 - DNA, 25 bp, Homo sapien
gcacggtgactgtagcttgaccaat

SEQ ID NO: 5253048 - DNA, 25 bp, Homo sapien
tttcttctattagggaggttgaata

SEQ ID NO: 5253049 - DNA, 25 bp, Homo sapien
tttgtaaccccagtgctagtgatct

SEQ ID NO: 5253050 - DNA, 25 bp, Homo sapien
tctgctagggtagagagaattggta

SEQ ID NO: 5253051 - DNA, 25 bp, Homo sapien
tatttggagccatctatagggtgtt

SEQ ID NO: 5253052 - DNA, 25 bp, Homo sapien
gagagagatggaggcagcgctcttt

SEQ ID NO: 5253053 - DNA, 25 bp, Homo sapien
cattgaacgtactgcccagggagga

SEQ ID NO: 5253054 - DNA, 25 bp, Homo sapien
tgaagtcagcaacacattgaacgta

SEQ ID NO: 5253055 - DNA, 25 bp, Homo sapien
caacacattgaacgtactgcccagg

SEQ ID NO: 5253056 - DNA, 25 bp, Homo sapien
tctggaaggcacatgtagcgggatc

SEQ ID NO: 5253057 - DNA, 25 bp, Homo sapien
gatgctgaactctaaattcatgacc

SEQ ID NO: 5253058 - DNA, 25 bp, Homo sapien
gaccaagttgttctcatctaggacc

SEQ ID NO: 5253059 - DNA, 25 bp, Homo sapien
tgcatgtagtctcccggatgctgaa

SEQ ID NO: 5253060 - DNA, 25 bp, Homo sapien
gaggaccagctgcagcgagcatgca

SEQ ID NO: 5253061 - DNA, 25 bp, Homo sapien
gctgggcagataccttcacggtgct

SEQ ID NO: 5253062 - DNA, 25 bp, Homo sapien
cgctgctgtaagactcagacgtgga

SEQ ID NO: 5253063 - DNA, 25 bp, Homo sapien
agctgcagcgagcatgcacgccctg

SEQ ID NO: 5253064 - DNA, 25 bp, Homo sapien
catttatgagatcccaacatgtccc

SEQ ID NO: 5253065 - DNA, 25 bp, Homo sapien
tccatttatgagatcccaacatgtc

SEQ ID NO: 5253066 - DNA, 25 bp, Homo sapien
ttctccatttatgagatcccaacat

SEQ ID NO: 5253067 - DNA, 25 bp, Homo sapien
tctccatttatgagatcccaacatg

SEQ ID NO: 5253068 - DNA, 25 bp, Homo sapien
tctatgactttactgttaatgccac

SEQ ID NO: 5253069 - DNA, 25 bp, Homo sapien
gactttactgttaatgccacaaata

SEQ ID NO: 5253070 - DNA, 25 bp, Homo sapien
cagaatgttctatgactttactgtt

SEQ ID NO: 5253071 - DNA, 25 bp, Homo sapien
tactgttaatgccacaaatatgctt

SEQ ID NO: 5253072 - DNA, 25 bp, Homo sapien
caagtgaccgatcataaaattgttc

SEQ ID NO: 5253073 - DNA, 25 bp, Homo sapien
agtgaccgatcataaaattgttcac

SEQ ID NO: 5253074 - DNA, 25 bp, Homo sapien
cttatggactcgtctgaaatgagac

SEQ ID NO: 5253075 - DNA, 25 bp, Homo sapien
ttcacttatggactcgtctgaaatg

SEQ ID NO: 5253076 - DNA, 25 bp, Homo sapien
ttcttgctctgtgccggtggtttgg

SEQ ID NO: 5253077 - DNA, 25 bp, Homo sapien
tgctctgtgccggtggtttgggtac

SEQ ID NO: 5253078 - DNA, 25 bp, Homo sapien
cttgctctgtgccggtggtttgggt

SEQ ID NO: 5253079 - DNA, 25 bp, Homo sapien
ctctgtgccggtggtttgggtacct

SEQ ID NO: 5253080 - DNA, 25 bp, Homo sapien
attctccctgcccataacccatgat

SEQ ID NO: 5253081 - DNA, 25 bp, Homo sapien
tctccctgcccataacccatgatgt

SEQ ID NO: 5253082 - DNA, 25 bp, Homo sapien
ctccctgcccataacccatgatgtt

SEQ ID NO: 5253083 - DNA, 25 bp, Homo sapien
ctattctccctgcccataacccatg

SEQ ID NO: 5253084 - DNA, 25 bp, Homo sapien
ttcggagcaaggattagcagacctc

SEQ ID NO: 5253085 - DNA, 25 bp, Homo sapien
tcaagaaagaaggagtggtcaccca

SEQ ID NO: 5253086 - DNA, 25 bp, Homo sapien
tctgatgacagtgcacaggtgcctt

SEQ ID NO: 5253087 - DNA, 25 bp, Homo sapien
tgtggaatacccagacggaggtgtc

SEQ ID NO: 5253088 - DNA, 25 bp, Homo sapien
ggagcagatacacaaccccagaaag

SEQ ID NO: 5253089 - DNA, 25 bp, Homo sapien
gcctatgtgcaggaaacccgaggaa

SEQ ID NO: 5253090 - DNA, 25 bp, Homo sapien
tgccaattccagagacgcctatgtg

SEQ ID NO: 5253091 - DNA, 25 bp, Homo sapien
tggagatcaggatacgccatccagc

SEQ ID NO: 5253092 - DNA, 25 bp, Homo sapien
agacactagagcagctatgcaaagc

SEQ ID NO: 5253093 - DNA, 25 bp, Homo sapien
gatgataccagacactagagcagct

SEQ ID NO: 5253094 - DNA, 25 bp, Homo sapien
tcaaaaccagatccgatgataccag

SEQ ID NO: 5253095 - DNA, 25 bp, Homo sapien
agcagctccttgaacaaaccaaaag

SEQ ID NO: 5253096 - DNA, 25 bp, Homo sapien
gaccaccgtggcatgcgttcacatt

SEQ ID NO: 5253097 - DNA, 25 bp, Homo sapien
cagaccaccgtggcatgcgttcaca

SEQ ID NO: 5253098 - DNA, 25 bp, Homo sapien
caccgtggcatgcgttcacattcca

SEQ ID NO: 5253099 - DNA, 25 bp, Homo sapien
accaccgtggcatgcgttcacattc

SEQ ID NO: 5253100 - DNA, 25 bp, Homo sapien
gattccctagactgcgaaacctgga

SEQ ID NO: 5253101 - DNA, 25 bp, Homo sapien
gctcgctttgctatagattccctag

SEQ ID NO: 5253102 - DNA, 25 bp, Homo sapien
cccaggcacaaatgactgataatga

SEQ ID NO: 5253103 - DNA, 25 bp, Homo sapien
caggaacggaaccaatttggagcac

SEQ ID NO: 5253104 - DNA, 25 bp, Homo sapien
gcttcttagaatggaacgggacaca

SEQ ID NO: 5253105 - DNA, 25 bp, Homo sapien
tatagaccctcgtacaccaaaacag

SEQ ID NO: 5253106 - DNA, 25 bp, Homo sapien
tattaacactacgaaaagtcagcag

SEQ ID NO: 5253107 - DNA, 25 bp, Homo sapien
cagaagtcagcattgtccacggtga

SEQ ID NO: 5253108 - DNA, 25 bp, Homo sapien
tgcaacattgtttcactcgtccatg

SEQ ID NO: 5253109 - DNA, 25 bp, Homo sapien
tcactccagacaggttggctccggt

SEQ ID NO: 5253110 - DNA, 25 bp, Homo sapien
tattgtgccgtgatttctacagagg

SEQ ID NO: 5253111 - DNA, 25 bp, Homo sapien
cgcggtggcacccagacattttaat

SEQ ID NO: 5253112 - DNA, 25 bp, Homo sapien
aagtatgtgaccctagctctcagag

SEQ ID NO: 5253113 - DNA, 25 bp, Homo sapien
tcagccgccaagtatgtgaccctag

SEQ ID NO: 5253114 - DNA, 25 bp, Homo sapien
ggtgaagttggtcagccgccaagta

SEQ ID NO: 5253115 - DNA, 25 bp, Homo sapien
tatgtgaccctagctctcagagctc

SEQ ID NO: 5253116 - DNA, 25 bp, Homo sapien
gggctgaactgggactgtagcaact

SEQ ID NO: 5253117 - DNA, 25 bp, Homo sapien
agtccttttgcagggtgatcttggg

SEQ ID NO: 5253118 - DNA, 25 bp, Homo sapien
gtagcaactgtgagagtccagagat

SEQ ID NO: 5253119 - DNA, 25 bp, Homo sapien
gctgaactgggactgtagcaactgt

SEQ ID NO: 5253120 - DNA, 25 bp, Homo sapien
gaatgttcctaacaccaggtgtggt

SEQ ID NO: 5253121 - DNA, 25 bp, Homo sapien
aacaccaggtgtggtttggaatgga

SEQ ID NO: 5253122 - DNA, 25 bp, Homo sapien
tcttgaaaatctgagttctgccccc

SEQ ID NO: 5253123 - DNA, 25 bp, Homo sapien
gagatggcgtggtgggaagaaagga

SEQ ID NO: 5253124 - DNA, 25 bp, Homo sapien
gcctgcccatatcaaaatgctaaaa

SEQ ID NO: 5253125 - DNA, 25 bp, Homo sapien
cagttagcatgcctgcccatatcaa

SEQ ID NO: 5253126 - DNA, 25 bp, Homo sapien
gaactaactggagaactggactctc

SEQ ID NO: 5253127 - DNA, 25 bp, Homo sapien
atgttatcggccagtcacaggcagg

SEQ ID NO: 5253128 - DNA, 25 bp, Homo sapien
tgatttgccgtctagtaacctttgt

SEQ ID NO: 5253129 - DNA, 25 bp, Homo sapien
catattcagatgtgtgagcagaacc

SEQ ID NO: 5253130 - DNA, 25 bp, Homo sapien
aatgtgttggagaaccgatcaccgc

SEQ ID NO: 5253131 - DNA, 25 bp, Homo sapien
gcagaacctggagacactgagttac

SEQ ID NO: 5253132 - DNA, 25 bp, Homo sapien
gggacactgctttccaactagtagc

SEQ ID NO: 5253133 - DNA, 25 bp, Homo sapien
agtagcttaagctttaggattagcc

SEQ ID NO: 5253134 - DNA, 25 bp, Homo sapien
ctactaaatgtaggatgaaaccatc

SEQ ID NO: 5253135 - DNA, 25 bp, Homo sapien
tcctgttctcaagctattacagcaa

SEQ ID NO: 5253136 - DNA, 25 bp, Homo sapien
cgtacaacggcaaatgctcagctct

SEQ ID NO: 5253137 - DNA, 25 bp, Homo sapien
aagagaacagtagaccaaggaacgt

SEQ ID NO: 5253138 - DNA, 25 bp, Homo sapien
ggcatggatgtaagtgtttgcagca

SEQ ID NO: 5253139 - DNA, 25 bp, Homo sapien
gctcagctctcatgagtggcatgga

SEQ ID NO: 5253140 - DNA, 25 bp, Homo sapien
gatgatgcactagaactgccaaatg

SEQ ID NO: 5253141 - DNA, 25 bp, Homo sapien
tctgccctcaaaatctcccgtttgt

SEQ ID NO: 5253142 - DNA, 25 bp, Homo sapien
ggtactccttgatgatgcactagaa

SEQ ID NO: 5253143 - DNA, 25 bp, Homo sapien
cagaatgcttgccaacaggtgaggg

SEQ ID NO: 5253144 - DNA, 25 bp, Homo sapien
ccttcacctggatggacagatgact

SEQ ID NO: 5253145 - DNA, 25 bp, Homo sapien
aatgcacacaactgtcccaggagct

SEQ ID NO: 5253146 - DNA, 25 bp, Homo sapien
caaccctgatgaagtcggtggccta

SEQ ID NO: 5253147 - DNA, 25 bp, Homo sapien
ggtccctccctatgaagataaatgc

SEQ ID NO: 5253148 - DNA, 25 bp, Homo sapien
gtactccacgttacccaggaagcaa

SEQ ID NO: 5253149 - DNA, 25 bp, Homo sapien
acctgaaggcacatccagagttaat

SEQ ID NO: 5253150 - DNA, 25 bp, Homo sapien
tcttgagcacatctcacgtactcca

SEQ ID NO: 5253151 - DNA, 25 bp, Homo sapien
ccagagttaattggatgataagaat

SEQ ID NO: 5253152 - DNA, 25 bp, Homo sapien
tttttccttcactgtgcatattggg

SEQ ID NO: 5253153 - DNA, 25 bp, Homo sapien
ttttccttcactgtgcatattgggt

SEQ ID NO: 5253154 - DNA, 25 bp, Homo sapien
tttccttcactgtgcatattgggtc

SEQ ID NO: 5253155 - DNA, 25 bp, Homo sapien
gaggaactccggaaacaacagtgct

SEQ ID NO: 5253156 - DNA, 25 bp, Homo sapien
aatgttcgccctcattttcagatgg

SEQ ID NO: 5253157 - DNA, 25 bp, Homo sapien
gggttttgcagtcactcctccacac

SEQ ID NO: 5253158 - DNA, 25 bp, Homo sapien
cccatcagacctggcgggttttgca

SEQ ID NO: 5253159 - DNA, 25 bp, Homo sapien
tctcaaagaacaaaggcaggcaatt

SEQ ID NO: 5253160 - DNA, 25 bp, Homo sapien
aggcattggaggctgttctaatttc

SEQ ID NO: 5253161 - DNA, 25 bp, Homo sapien
gcaggcaatttgacagcttttgttg

SEQ ID NO: 5253162 - DNA, 25 bp, Homo sapien
actggttggaaatgtaacctgcagg

SEQ ID NO: 5253163 - DNA, 25 bp, Homo sapien
aaggagcatgaactttatccttggg

SEQ ID NO: 5253164 - DNA, 25 bp, Homo sapien
ggcttttgatgccaccaagtaaagg

SEQ ID NO: 5253165 - DNA, 25 bp, Homo sapien
tttgatgccaccaagtaaaggagca

SEQ ID NO: 5253166 - DNA, 25 bp, Homo sapien
gatgccaccaagtaaaggagcatga

SEQ ID NO: 5253167 - DNA, 25 bp, Homo sapien
ggtggtgacatcaaggagtgctgca

SEQ ID NO: 5253168 - DNA, 25 bp, Homo sapien
gtggtgacatcaaggagtgctgcaa

SEQ ID NO: 5253169 - DNA, 25 bp, Homo sapien
tggtgacatcaaggagtgctgcaaa

SEQ ID NO: 5253170 - DNA, 25 bp, Homo sapien
gggtggtgacatcaaggagtgctgc

SEQ ID NO: 5253171 - DNA, 25 bp, Homo sapien
tgtgtgctccgtatggcaaagtcac

SEQ ID NO: 5253172 - DNA, 25 bp, Homo sapien
ggattcaccgtcaattggcagcagg

SEQ ID NO: 5253173 - DNA, 25 bp, Homo sapien
cagctgctgaccaaactgtgattgg

SEQ ID NO: 5253174 - DNA, 25 bp, Homo sapien
gactgccacgggaagcaattgctgg

SEQ ID NO: 5253175 - DNA, 25 bp, Homo sapien
tgcattattgaagctcaaggaccct

SEQ ID NO: 5253176 - DNA, 25 bp, Homo sapien
atagtgacaggtggacaagtgagat

SEQ ID NO: 5253177 - DNA, 25 bp, Homo sapien
tgcagaggcatgtggacatgcatta

SEQ ID NO: 5253178 - DNA, 25 bp, Homo sapien
ctactcgtagaggtgatagtgacag

SEQ ID NO: 5253179 - DNA, 25 bp, Homo sapien
tcctgtgtagtgaagctttgttctc

SEQ ID NO: 5253180 - DNA, 25 bp, Homo sapien
tcactttgggattggtctttgtttc

SEQ ID NO: 5253181 - DNA, 25 bp, Homo sapien
gatcctctacctctctgacaattgg

SEQ ID NO: 5253182 - DNA, 25 bp, Homo sapien
tctgacacctgcattagaagtttgt

SEQ ID NO: 5253183 - DNA, 25 bp, Homo sapien
cgaggctgagaaccggaataacagg

SEQ ID NO: 5253184 - DNA, 25 bp, Homo sapien
gagcgaggctgagaaccggaataac

SEQ ID NO: 5253185 - DNA, 25 bp, Homo sapien
tgagaaccggaataacaggcacagg

SEQ ID NO: 5253186 - DNA, 25 bp, Homo sapien
ggctgagaaccggaataacaggcac

SEQ ID NO: 5253187 - DNA, 25 bp, Homo sapien
tgatgaagagtcagacctcaaagct

SEQ ID NO: 5253188 - DNA, 25 bp, Homo sapien
ccttgcactgatagaatggaccaaa

SEQ ID NO: 5253189 - DNA, 25 bp, Homo sapien
caggatggaccgcacaggagagaat

SEQ ID NO: 5253190 - DNA, 25 bp, Homo sapien
gattatctgccctgtggtttggtcc

SEQ ID NO: 5253191 - DNA, 25 bp, Homo sapien
tggaggacctgaagtctcggaaatg

SEQ ID NO: 5253192 - DNA, 25 bp, Homo sapien
cctgaagtctcggaaatgttgtcca

SEQ ID NO: 5253193 - DNA, 25 bp, Homo sapien
tgcagttggaggacctgaagtctcg

SEQ ID NO: 5253194 - DNA, 25 bp, Homo sapien
aggaagttcacctcaaagtcttgct

SEQ ID NO: 5253195 - DNA, 25 bp, Homo sapien
tcctgaagtacagactggatagtcc

SEQ ID NO: 5253196 - DNA, 25 bp, Homo sapien
gaagtacagactggatagtccctgc

SEQ ID NO: 5253197 - DNA, 25 bp, Homo sapien
gctcatttcctgaagtacagactgg

SEQ ID NO: 5253198 - DNA, 25 bp, Homo sapien
cactctcgctcatttcctgaagtac

SEQ ID NO: 5253199 - DNA, 25 bp, Homo sapien
aaatagcagtcgtttgccagcttac

SEQ ID NO: 5253200 - DNA, 25 bp, Homo sapien
aagaagagaaatagcagtcgtttgc

SEQ ID NO: 5253201 - DNA, 25 bp, Homo sapien
aagagaaatagcagtcgtttgccag

SEQ ID NO: 5253202 - DNA, 25 bp, Homo sapien
gagaaatagcagtcgtttgccagct

SEQ ID NO: 5253203 - DNA, 25 bp, Homo sapien
gaaccagaactttatatacaatcca

SEQ ID NO: 5253204 - DNA, 25 bp, Homo sapien
ggattgtagatctaagcatgaaagc

SEQ ID NO: 5253205 - DNA, 25 bp, Homo sapien
cataattaatagtgctcctttcttc

SEQ ID NO: 5253206 - DNA, 25 bp, Homo sapien
attcaagcaggattgtagatctaag

SEQ ID NO: 5253207 - DNA, 25 bp, Homo sapien
tggtccttggccctttctagcttga

SEQ ID NO: 5253208 - DNA, 25 bp, Homo sapien
tgtctggggctccttttccgtggtc

SEQ ID NO: 5253209 - DNA, 25 bp, Homo sapien
ttggccctttctagcttgatgacat

SEQ ID NO: 5253210 - DNA, 25 bp, Homo sapien
tccgtggtccttggccctttctagc

SEQ ID NO: 5253211 - DNA, 25 bp, Homo sapien
ctggagcaactgacttctcttcctc

SEQ ID NO: 5253212 - DNA, 25 bp, Homo sapien
cttataggcagtccctgacagactg

SEQ ID NO: 5253213 - DNA, 25 bp, Homo sapien
gctggacacccacagggtgtggtcc

SEQ ID NO: 5253214 - DNA, 25 bp, Homo sapien
cacccacagggtgtggtccttatag

SEQ ID NO: 5253215 - DNA, 25 bp, Homo sapien
tgtggtccttataggcagtccctga

SEQ ID NO: 5253216 - DNA, 25 bp, Homo sapien
caggttggctgggtctagaaagctt

SEQ ID NO: 5253217 - DNA, 25 bp, Homo sapien
agaaaccacccggcaggttggctgg

SEQ ID NO: 5253218 - DNA, 25 bp, Homo sapien
cttcccaggagaaaccacccggcag

SEQ ID NO: 5253219 - DNA, 25 bp, Homo sapien
caggagaaaccacccggcaggttgg

SEQ ID NO: 5253220 - DNA, 25 bp, Homo sapien
tgatgatcatgacaaggcccctggt

SEQ ID NO: 5253221 - DNA, 25 bp, Homo sapien
gggatccagccaattagccaaccga

SEQ ID NO: 5253222 - DNA, 25 bp, Homo sapien
ggctccaccagcacaagtgatatgg

SEQ ID NO: 5253223 - DNA, 25 bp, Homo sapien
ggtgcagagcaactagaaccgtcat

SEQ ID NO: 5253224 - DNA, 25 bp, Homo sapien
ctgcagttgaacttgcaccattact

SEQ ID NO: 5253225 - DNA, 25 bp, Homo sapien
ttgaacttgcaccattacttgcccc

SEQ ID NO: 5253226 - DNA, 25 bp, Homo sapien
agttgaacttgcaccattacttgcc

SEQ ID NO: 5253227 - DNA, 25 bp, Homo sapien
gcagttgaacttgcaccattacttg

SEQ ID NO: 5253228 - DNA, 25 bp, Homo sapien
tagggttggcaaaatctcagggatg

SEQ ID NO: 5253229 - DNA, 25 bp, Homo sapien
ttggccaacgtgtcaaagatgactg

SEQ ID NO: 5253230 - DNA, 25 bp, Homo sapien
gcatacaggagaggggaaatcccca

SEQ ID NO: 5253231 - DNA, 25 bp, Homo sapien
ggatggagatagcattggccaacgt

SEQ ID NO: 5253232 - DNA, 25 bp, Homo sapien
cgcacacgagctgaggaattctgaa

SEQ ID NO: 5253233 - DNA, 25 bp, Homo sapien
tgcctgtcatcaaaggaggtccgtg

SEQ ID NO: 5253234 - DNA, 25 bp, Homo sapien
ctctcagcatggtgtggttgatcat

SEQ ID NO: 5253235 - DNA, 25 bp, Homo sapien
ttgatcatgtcaggagcgcacacga

SEQ ID NO: 5253236 - DNA, 25 bp, Homo sapien
tcaggactttgattgccagtaacaa

SEQ ID NO: 5253237 - DNA, 25 bp, Homo sapien
tgaatgcaggggtatcacatcaagg

SEQ ID NO: 5253238 - DNA, 25 bp, Homo sapien
ccagtaacaaagaagcccatgaggg

SEQ ID NO: 5253239 - DNA, 25 bp, Homo sapien
tcaaggcaggcgacacccacaatct

SEQ ID NO: 5253240 - DNA, 25 bp, Homo sapien
tctggccgtgttgctccagctgcct

SEQ ID NO: 5253241 - DNA, 25 bp, Homo sapien
gattctgtgtctgcgcatccccacc

SEQ ID NO: 5253242 - DNA, 25 bp, Homo sapien
tggagctcgccaggtttctatgttc

SEQ ID NO: 5253243 - DNA, 25 bp, Homo sapien
cctctggagacatcgcagatcctca

SEQ ID NO: 5253244 - DNA, 25 bp, Homo sapien
gagatccaaattccatagcaactat

SEQ ID NO: 5253245 - DNA, 25 bp, Homo sapien
ttccatagcaactatataagcatta

SEQ ID NO: 5253246 - DNA, 25 bp, Homo sapien
acaatttccatgaggattagagatc

SEQ ID NO: 5253247 - DNA, 25 bp, Homo sapien
gattagagatccaaattccatagca

SEQ ID NO: 5253248 - DNA, 25 bp, Homo sapien
taatgagcccaaggaacaatggcct

SEQ ID NO: 5253249 - DNA, 25 bp, Homo sapien
acaaagagttcctgtgagctctggg

SEQ ID NO: 5253250 - DNA, 25 bp, Homo sapien
ccagagagttgaagcttacatatcc

SEQ ID NO: 5253251 - DNA, 25 bp, Homo sapien
tgagaggcaaaacttcactgtgaac

SEQ ID NO: 5253252 - DNA, 25 bp, Homo sapien
ggcatgggctatgcccacctccagg

SEQ ID NO: 5253253 - DNA, 25 bp, Homo sapien
ggctatgcccacctccaggaggtcc

SEQ ID NO: 5253254 - DNA, 25 bp, Homo sapien
gctatgcccacctccaggaggtcca

SEQ ID NO: 5253255 - DNA, 25 bp, Homo sapien
ctgggcatgggctatgcccacctcc

SEQ ID NO: 5253256 - DNA, 25 bp, Homo sapien
ggttcccggagagagtcacactcag

SEQ ID NO: 5253257 - DNA, 25 bp, Homo sapien
gtgtcagaacttaactggaggaccc

SEQ ID NO: 5253258 - DNA, 25 bp, Homo sapien
gttcccgaggcctgtactagtgagt

SEQ ID NO: 5253259 - DNA, 25 bp, Homo sapien
tcatgccggtgtccatgtctgggca

SEQ ID NO: 5253260 - DNA, 25 bp, Homo sapien
caggttttaaagcaggcaccagaaa

SEQ ID NO: 5253261 - DNA, 25 bp, Homo sapien
gctttgcttgcacggggctttcagg

SEQ ID NO: 5253262 - DNA, 25 bp, Homo sapien
cttggtgatgtgagtttagcatctc

SEQ ID NO: 5253263 - DNA, 25 bp, Homo sapien
caaaggttgccaggcaagttgccat

SEQ ID NO: 5253264 - DNA, 25 bp, Homo sapien
ggactcaggtctcaatatatcagca

SEQ ID NO: 5253265 - DNA, 25 bp, Homo sapien
tcaatatatcagcaggtagtgggcc

SEQ ID NO: 5253266 - DNA, 25 bp, Homo sapien
tctcagctgctagcccctgaccaca

SEQ ID NO: 5253267 - DNA, 25 bp, Homo sapien
cctgaccacactcccgctccagtgg

SEQ ID NO: 5253268 - DNA, 25 bp, Homo sapien
gaacatgttggggagaaatagtctc

SEQ ID NO: 5253269 - DNA, 25 bp, Homo sapien
ctcaatcctcctcgcctcacgcgct

SEQ ID NO: 5253270 - DNA, 25 bp, Homo sapien
tcttcttctttgtgcccaccggggc

SEQ ID NO: 5253271 - DNA, 25 bp, Homo sapien
cacgcgctgcccaacgttcttcttc

SEQ ID NO: 5253272 - DNA, 25 bp, Homo sapien
tccagagccgaatgttttggttcct

SEQ ID NO: 5253273 - DNA, 25 bp, Homo sapien
tcagggttctgggtgaactttcagc

SEQ ID NO: 5253274 - DNA, 25 bp, Homo sapien
tcagcatagatttgttcagaatgag

SEQ ID NO: 5253275 - DNA, 25 bp, Homo sapien
tgacatgtcaaagatccagagccga

SEQ ID NO: 5253276 - DNA, 25 bp, Homo sapien
ctatgggtcagtattacactctgtg

SEQ ID NO: 5253277 - DNA, 25 bp, Homo sapien
gtggccccatcgcatgtttctctct

SEQ ID NO: 5253278 - DNA, 25 bp, Homo sapien
gagagatggtgtaggagtcatcctc

SEQ ID NO: 5253279 - DNA, 25 bp, Homo sapien
acactgtgcatatccgtgcatgatg

SEQ ID NO: 5253280 - DNA, 25 bp, Homo sapien
catgcccctgagggctgcgttgatg

SEQ ID NO: 5253281 - DNA, 25 bp, Homo sapien
ccatataactccagtgacacagaag

SEQ ID NO: 5253282 - DNA, 25 bp, Homo sapien
tcatttccatataactccagtgaca

SEQ ID NO: 5253283 - DNA, 25 bp, Homo sapien
gtgacacagaagctccttgtgaagt

SEQ ID NO: 5253284 - DNA, 25 bp, Homo sapien
tgagtgagtgggcaaatgaaaacat

SEQ ID NO: 5253285 - DNA, 25 bp, Homo sapien
ctgtgaaatttgctgagtgagtgag

SEQ ID NO: 5253286 - DNA, 25 bp, Homo sapien
tgagtgagtgagtgggcaaatgaaa

SEQ ID NO: 5253287 - DNA, 25 bp, Homo sapien
agtgagtgagtgggcaaatgaaaac

SEQ ID NO: 5253288 - DNA, 25 bp, Homo sapien
tcccatgctcaaaggcgatcgacca

SEQ ID NO: 5253289 - DNA, 25 bp, Homo sapien
gacttcagacggacaacgggctttc

SEQ ID NO: 5253290 - DNA, 25 bp, Homo sapien
ccagcttgaagtggactgatgacta

SEQ ID NO: 5253291 - DNA, 25 bp, Homo sapien
taacctcttaatagacttcagacgg

SEQ ID NO: 5253292 - DNA, 25 bp, Homo sapien
actggaagattctgtaggctgtccg

SEQ ID NO: 5253293 - DNA, 25 bp, Homo sapien
tgtccgatttaggtaaatggcgctg

SEQ ID NO: 5253294 - DNA, 25 bp, Homo sapien
taattcccatggctaaaacgcttga

SEQ ID NO: 5253295 - DNA, 25 bp, Homo sapien
tatgatgctcagaagtgagagctgc

SEQ ID NO: 5253296 - DNA, 25 bp, Homo sapien
cacatataaaaacaagttttgggca

SEQ ID NO: 5253297 - DNA, 25 bp, Homo sapien
ttctcaaaacccaagcaaacatcag

SEQ ID NO: 5253298 - DNA, 25 bp, Homo sapien
tttgttctcaaaacccaagcaaaca

SEQ ID NO: 5253299 - DNA, 25 bp, Homo sapien
catataaaaacaagttttgggcagg

SEQ ID NO: 5253300 - DNA, 25 bp, Homo sapien
ctgcttcctctgtggttggtgttat

SEQ ID NO: 5253301 - DNA, 25 bp, Homo sapien
gattctgcttcctctgtggttggtg

SEQ ID NO: 5253302 - DNA, 25 bp, Homo sapien
tctgcttcctctgtggttggtgtta

SEQ ID NO: 5253303 - DNA, 25 bp, Homo sapien
ctaattagattctgcttcctctgtg

SEQ ID NO: 5253304 - DNA, 25 bp, Homo sapien
aggcggcagccaaagacctttcttc

SEQ ID NO: 5253305 - DNA, 25 bp, Homo sapien
gaggcggcagccaaagacctttctt

SEQ ID NO: 5253306 - DNA, 25 bp, Homo sapien
ggaggcggcagccaaagacctttct

SEQ ID NO: 5253307 - DNA, 25 bp, Homo sapien
aggaggcggcagccaaagacctttc

SEQ ID NO: 5253308 - DNA, 25 bp, Homo sapien
cccgtttttcatgtgcgaagtctgc

SEQ ID NO: 5253309 - DNA, 25 bp, Homo sapien
gatgctagctcactgtccaagttga

SEQ ID NO: 5253310 - DNA, 25 bp, Homo sapien
tagtgtcaatcatccagaaaatgtc

SEQ ID NO: 5253311 - DNA, 25 bp, Homo sapien
gaaactggagggagtaaatcctaca

SEQ ID NO: 5253312 - DNA, 25 bp, Homo sapien
tagtggaagcctggaaggctgtcca

SEQ ID NO: 5253313 - DNA, 25 bp, Homo sapien
ttaagttggaagattgcgtaggccc

SEQ ID NO: 5253314 - DNA, 25 bp, Homo sapien
cgtaggcccagggaatgctctccag

SEQ ID NO: 5253315 - DNA, 25 bp, Homo sapien
gaaatggcaactattgaaccctggg

SEQ ID NO: 5253316 - DNA, 25 bp, Homo sapien
agcactgtacttggtatttggagta

SEQ ID NO: 5253317 - DNA, 25 bp, Homo sapien
tgagggtccctatcaggcctgaaac

SEQ ID NO: 5253318 - DNA, 25 bp, Homo sapien
caattttaaagatctgccaccatgt

SEQ ID NO: 5253319 - DNA, 25 bp, Homo sapien
tggagtagaaggatgtaccaggaac

SEQ ID NO: 5253320 - DNA, 25 bp, Homo sapien
cccagagccgcctgctgactgggga

SEQ ID NO: 5253321 - DNA, 25 bp, Homo sapien
tgggagcagactcaacccacaccag

SEQ ID NO: 5253322 - DNA, 25 bp, Homo sapien
tcctgtgtcactttttgcctcagga

SEQ ID NO: 5253323 - DNA, 25 bp, Homo sapien
aggatgtcctccggccctgggagca

SEQ ID NO: 5253324 - DNA, 25 bp, Homo sapien
tgcactgagagtggaacaagctcca

SEQ ID NO: 5253325 - DNA, 25 bp, Homo sapien
ctggcagataggcagcgtgctgcca

SEQ ID NO: 5253326 - DNA, 25 bp, Homo sapien
cagggcgtctgtggagtgcagccat

SEQ ID NO: 5253327 - DNA, 25 bp, Homo sapien
ccagggcgtctgtggagtgcagcca

SEQ ID NO: 5253328 - DNA, 25 bp, Homo sapien
cgtgctgccagagggtgcgccggag

SEQ ID NO: 5253329 - DNA, 25 bp, Homo sapien
agcagcatggtggtcccggtgagta

SEQ ID NO: 5253330 - DNA, 25 bp, Homo sapien
gctattggccaacttggcatggatg

SEQ ID NO: 5253331 - DNA, 25 bp, Homo sapien
gcaggtgctattggccaacttggca

SEQ ID NO: 5253332 - DNA, 25 bp, Homo sapien
catcaggcaggtgctattggccaac

SEQ ID NO: 5253333 - DNA, 25 bp, Homo sapien
gccatggggcagcactgagaccagc

SEQ ID NO: 5253334 - DNA, 25 bp, Homo sapien
tcacttggggttggcagcaggactg

SEQ ID NO: 5253335 - DNA, 25 bp, Homo sapien
ctgagaccagcaggcttggaggcct

SEQ ID NO: 5253336 - DNA, 25 bp, Homo sapien
gggcagcactgagaccagcaggctt

SEQ ID NO: 5253337 - DNA, 25 bp, Homo sapien
ggagagcacctggaaaatgcgcagc

SEQ ID NO: 5253338 - DNA, 25 bp, Homo sapien
gataggctgccctcgcatgtacact

SEQ ID NO: 5253339 - DNA, 25 bp, Homo sapien
catgacgtggctattgcaacggccc

SEQ ID NO: 5253340 - DNA, 25 bp, Homo sapien
gaacccagtgtagagggtgaacgct

SEQ ID NO: 5253341 - DNA, 25 bp, Homo sapien
caatacttaagggtgcaatcaactg

SEQ ID NO: 5253342 - DNA, 25 bp, Homo sapien
taatagcccgtttcgtctctgaccc

SEQ ID NO: 5253343 - DNA, 25 bp, Homo sapien
tatttggtacccctccaatgctggt

SEQ ID NO: 5253344 - DNA, 25 bp, Homo sapien
caaatcaccttggagtggtcaccag

SEQ ID NO: 5253345 - DNA, 25 bp, Homo sapien
gtaattttcggtcacagggcaggcc

SEQ ID NO: 5253346 - DNA, 25 bp, Homo sapien
tcttgtgggaactggccttcggagc

SEQ ID NO: 5253347 - DNA, 25 bp, Homo sapien
caaaagctgacctcgttgcatggaa

SEQ ID NO: 5253348 - DNA, 25 bp, Homo sapien
tcatcagaggactgcctgggacggt

SEQ ID NO: 5253349 - DNA, 25 bp, Homo sapien
gcgaagtctgatttaccggcctact

SEQ ID NO: 5253350 - DNA, 25 bp, Homo sapien
gcatcatctacgtggtggactcggt

SEQ ID NO: 5253351 - DNA, 25 bp, Homo sapien
caccgagggcatggacaagctctat

SEQ ID NO: 5253352 - DNA, 25 bp, Homo sapien
caaggtgaccaagttcgccgagaac

SEQ ID NO: 5253353 - DNA, 25 bp, Homo sapien
aatcctggatgagtattttatgctc

SEQ ID NO: 5253354 - DNA, 25 bp, Homo sapien
catgcaaccagtaagggagctcctt

SEQ ID NO: 5253355 - DNA, 25 bp, Homo sapien
cagtaattcatgcaaccagtaaggg

SEQ ID NO: 5253356 - DNA, 25 bp, Homo sapien
gggacaggatgaacagtttagccat

SEQ ID NO: 5253357 - DNA, 25 bp, Homo sapien
tcagcagtacgcttgaaggcacctt

SEQ ID NO: 5253358 - DNA, 25 bp, Homo sapien
ctggaagggtcagcagtacgcttga

SEQ ID NO: 5253359 - DNA, 25 bp, Homo sapien
aagggtcagcagtacgcttgaaggc

SEQ ID NO: 5253360 - DNA, 25 bp, Homo sapien
gggtcagcagtacgcttgaaggcac

SEQ ID NO: 5253361 - DNA, 25 bp, Homo sapien
ctcagccagacatccttgatgctgt

SEQ ID NO: 5253362 - DNA, 25 bp, Homo sapien
cctcagccagacatccttgatgctg

SEQ ID NO: 5253363 - DNA, 25 bp, Homo sapien
acctcagccagacatccttgatgct

SEQ ID NO: 5253364 - DNA, 25 bp, Homo sapien
tcacctcagccagacatccttgatg

SEQ ID NO: 5253365 - DNA, 25 bp, Homo sapien
gtgtatacacgataatagaagaatt

SEQ ID NO: 5253366 - DNA, 25 bp, Homo sapien
tatcagctgtgtatacacgataata

SEQ ID NO: 5253367 - DNA, 25 bp, Homo sapien
ctcacagtggacatattcagggtgg

SEQ ID NO: 5253368 - DNA, 25 bp, Homo sapien
tcacagtggacatattcagggtggt

SEQ ID NO: 5253369 - DNA, 25 bp, Homo sapien
tataaacatttctctcacggataag

SEQ ID NO: 5253370 - DNA, 25 bp, Homo sapien
caggcagctcagttgtggaatctat

SEQ ID NO: 5253371 - DNA, 25 bp, Homo sapien
aagctgacctctcgtatacaccagg

SEQ ID NO: 5253372 - DNA, 25 bp, Homo sapien
catgaatttctatccaagctgacct

SEQ ID NO: 5253373 - DNA, 25 bp, Homo sapien
tcatttgcctgcaatagcaccagca

SEQ ID NO: 5253374 - DNA, 25 bp, Homo sapien
agctgctacatgcatcctcccagct

SEQ ID NO: 5253375 - DNA, 25 bp, Homo sapien
tgccaagatcccgatccgctgttgt

SEQ ID NO: 5253376 - DNA, 25 bp, Homo sapien
gcagttccaaatgccaagatcccga

SEQ ID NO: 5253377 - DNA, 25 bp, Homo sapien
cctggaactggtaagcagttccaaa

SEQ ID NO: 5253378 - DNA, 25 bp, Homo sapien
atcccgatccgctgttgtttgtctg

SEQ ID NO: 5253379 - DNA, 25 bp, Homo sapien
ctgttgccagcttcttctgctggcc

SEQ ID NO: 5253380 - DNA, 25 bp, Homo sapien
atcctctctgttgccagcttcttct

SEQ ID NO: 5253381 - DNA, 25 bp, Homo sapien
tctctgttgccagcttcttctgctg

SEQ ID NO: 5253382 - DNA, 25 bp, Homo sapien
aacatcctctctgttgccagcttct

SEQ ID NO: 5253383 - DNA, 25 bp, Homo sapien
gactttccatgcatgtcccatctgc

SEQ ID NO: 5253384 - DNA, 25 bp, Homo sapien
gagatgtaagtacccacagcctcta

SEQ ID NO: 5253385 - DNA, 25 bp, Homo sapien
tgccttccaaggtggttaaagacga

SEQ ID NO: 5253386 - DNA, 25 bp, Homo sapien
ttaaagacgaggagccaggactcca

SEQ ID NO: 5253387 - DNA, 25 bp, Homo sapien
tgtgactttcctccaggccatgagc

SEQ ID NO: 5253388 - DNA, 25 bp, Homo sapien
agcctcagactggccgctgtgactt

SEQ ID NO: 5253389 - DNA, 25 bp, Homo sapien
cttggaagaacaggtcttctccagg

SEQ ID NO: 5253390 - DNA, 25 bp, Homo sapien
gagaaatgggcagcctcagactggc

SEQ ID NO: 5253391 - DNA, 25 bp, Homo sapien
aaagctcaaggccatgggagagcct

SEQ ID NO: 5253392 - DNA, 25 bp, Homo sapien
gggtttagatgacaatcccagacca

SEQ ID NO: 5253393 - DNA, 25 bp, Homo sapien
ttagatgacaatcccagaccagctg

SEQ ID NO: 5253394 - DNA, 25 bp, Homo sapien
tcaaggccatgggagagcctctctt

SEQ ID NO: 5253395 - DNA, 25 bp, Homo sapien
tactggccgaacgtggtgtatttgg

SEQ ID NO: 5253396 - DNA, 25 bp, Homo sapien
aggcagccccggcctagaggaaaca

SEQ ID NO: 5253397 - DNA, 25 bp, Homo sapien
tgaggcagccccggcctagaggaaa

SEQ ID NO: 5253398 - DNA, 25 bp, Homo sapien
cctggggtactggccgaacgtggtg

SEQ ID NO: 5253399 - DNA, 25 bp, Homo sapien
ctatgtggaccttgattggagggct

SEQ ID NO: 5253400 - DNA, 25 bp, Homo sapien
tatggctccttggtggctatgtgga

SEQ ID NO: 5253401 - DNA, 25 bp, Homo sapien
gtcatatggctccttggtggctatg

SEQ ID NO: 5253402 - DNA, 25 bp, Homo sapien
ccttggtggctatgtggaccttgat

SEQ ID NO: 5253403 - DNA, 25 bp, Homo sapien
catccaaagcactacctacagtgct

SEQ ID NO: 5253404 - DNA, 25 bp, Homo sapien
tctctgactcggaatcctccagcag

SEQ ID NO: 5253405 - DNA, 25 bp, Homo sapien
agcactacctacagtgctgtttcca

SEQ ID NO: 5253406 - DNA, 25 bp, Homo sapien
aatcttctctgactcggaatcctcc

SEQ ID NO: 5253407 - DNA, 25 bp, Homo sapien
atccataagggatcagtgaatgcct

SEQ ID NO: 5253408 - DNA, 25 bp, Homo sapien
ctccatgtgccaactgtgtagtggg

SEQ ID NO: 5253409 - DNA, 25 bp, Homo sapien
ctctccatgtgccaactgtgtagtg

SEQ ID NO: 5253410 - DNA, 25 bp, Homo sapien
catgtgccaactgtgtagtgggggt

SEQ ID NO: 5253411 - DNA, 25 bp, Homo sapien
tgtgccaactgtgtagtgggggtag

SEQ ID NO: 5253412 - DNA, 25 bp, Homo sapien
ggcagatgggtttgttcatttcacc

SEQ ID NO: 5253413 - DNA, 25 bp, Homo sapien
tgaccttggggctatgatctggcag

SEQ ID NO: 5253414 - DNA, 25 bp, Homo sapien
ccttggggctatgatctggcagatg

SEQ ID NO: 5253415 - DNA, 25 bp, Homo sapien
cagatgggtttgttcatttcaccta

SEQ ID NO: 5253416 - DNA, 25 bp, Homo sapien
tgcaatctcaggttgctggcactct

SEQ ID NO: 5253417 - DNA, 25 bp, Homo sapien
tataaataatgtgagggttcgccta

SEQ ID NO: 5253418 - DNA, 25 bp, Homo sapien
gattaatgaatgcaatctcaggttg

SEQ ID NO: 5253419 - DNA, 25 bp, Homo sapien
gtgagggttcgcctacaacctggcc

SEQ ID NO: 5253420 - DNA, 25 bp, Homo sapien
gccagaggacagaacgactttcctg

SEQ ID NO: 5253421 - DNA, 25 bp, Homo sapien
caattttctgtaatggtatagaaga

SEQ ID NO: 5253422 - DNA, 25 bp, Homo sapien
aaagtcgctggtggccggtgaccct

SEQ ID NO: 5253423 - DNA, 25 bp, Homo sapien
cctggttttctgtcggccctgtgaa

SEQ ID NO: 5253424 - DNA, 25 bp, Homo sapien
caggatctggggtctttcagcttca

SEQ ID NO: 5253425 - DNA, 25 bp, Homo sapien
tgtccaaagggcgagggtgcctgca

SEQ ID NO: 5253426 - DNA, 25 bp, Homo sapien
attctgccaatgaatgtgggacaca

SEQ ID NO: 5253427 - DNA, 25 bp, Homo sapien
ctaagcccaggctgtacagagcagg

SEQ ID NO: 5253428 - DNA, 25 bp, Homo sapien
gttttgctgcattgaagcagatgat

SEQ ID NO: 5253429 - DNA, 25 bp, Homo sapien
ctcctgttttgctgcattgaagcag

SEQ ID NO: 5253430 - DNA, 25 bp, Homo sapien
cctgttttgctgcattgaagcagat

SEQ ID NO: 5253431 - DNA, 25 bp, Homo sapien
tttgctgcattgaagcagatgatga

SEQ ID NO: 5253432 - DNA, 25 bp, Homo sapien
tgagcctaggccttaggaagcatca

SEQ ID NO: 5253433 - DNA, 25 bp, Homo sapien
aggccttaggaagcatcatgcattt

SEQ ID NO: 5253434 - DNA, 25 bp, Homo sapien
ctaggccttaggaagcatcatgcat

SEQ ID NO: 5253435 - DNA, 25 bp, Homo sapien
gcctaggccttaggaagcatcatgc

SEQ ID NO: 5253436 - DNA, 25 bp, Homo sapien
gatagtgttggcattcttatttgga

SEQ ID NO: 5253437 - DNA, 25 bp, Homo sapien
gtgttggcattcttatttggaggct

SEQ ID NO: 5253438 - DNA, 25 bp, Homo sapien
tagtgttggcattcttatttggagg

SEQ ID NO: 5253439 - DNA, 25 bp, Homo sapien
ttcttatttggaggctatttgtgtg

SEQ ID NO: 5253440 - DNA, 25 bp, Homo sapien
taagaggcagatgcgagaagaatcc

SEQ ID NO: 5253441 - DNA, 25 bp, Homo sapien
tcttgcctaagagctagcagcgagt

SEQ ID NO: 5253442 - DNA, 25 bp, Homo sapien
tggataatagactggtggcctgctg

SEQ ID NO: 5253443 - DNA, 25 bp, Homo sapien
catgcagctgcgcaattgctttgga

SEQ ID NO: 5253444 - DNA, 25 bp, Homo sapien
tctgacttcccgttctgctcgtggc

SEQ ID NO: 5253445 - DNA, 25 bp, Homo sapien
ctgacttcccgttctgctcgtggca

SEQ ID NO: 5253446 - DNA, 25 bp, Homo sapien
ttgctctctgacttcccgttctgct

SEQ ID NO: 5253447 - DNA, 25 bp, Homo sapien
tgacttcccgttctgctcgtggcat

SEQ ID NO: 5253448 - DNA, 25 bp, Homo sapien
aatgccccgtagactgggctgagag

SEQ ID NO: 5253449 - DNA, 25 bp, Homo sapien
agctctcagcacaaatgccccgtag

SEQ ID NO: 5253450 - DNA, 25 bp, Homo sapien
gctcggagaaccgttctgcataggg

SEQ ID NO: 5253451 - DNA, 25 bp, Homo sapien
gctgagagctcggagaaccgttctg

SEQ ID NO: 5253452 - DNA, 25 bp, Homo sapien
ctgtaaatcagtgtctcagggtcta

SEQ ID NO: 5253453 - DNA, 25 bp, Homo sapien
agggtctacagacagacgaacacga

SEQ ID NO: 5253454 - DNA, 25 bp, Homo sapien
aacacgacgctctcctccaaaaact

SEQ ID NO: 5253455 - DNA, 25 bp, Homo sapien
cttgtcaccgtgagtcttgctgtaa

SEQ ID NO: 5253456 - DNA, 25 bp, Homo sapien
gctttcgaagggctgtgtaaaagga

SEQ ID NO: 5253457 - DNA, 25 bp, Homo sapien
gcctgcactgcggtgtctgcgggct

SEQ ID NO: 5253458 - DNA, 25 bp, Homo sapien
aattgatggcggtaattatgttcct

SEQ ID NO: 5253459 - DNA, 25 bp, Homo sapien
tcagccggcgggagcgtctgagtca

SEQ ID NO: 5253460 - DNA, 25 bp, Homo sapien
cttctccttcagaaacagagtccat

SEQ ID NO: 5253461 - DNA, 25 bp, Homo sapien
tccttctccttcagaaacagagtcc

SEQ ID NO: 5253462 - DNA, 25 bp, Homo sapien
ctggggtgggaacagcatctccttc

SEQ ID NO: 5253463 - DNA, 25 bp, Homo sapien
ggggtgggaacagcatctccttctc

SEQ ID NO: 5253464 - DNA, 25 bp, Homo sapien
ttccttttgtgaagctcagatgcgt

SEQ ID NO: 5253465 - DNA, 25 bp, Homo sapien
tgtaccattgggcatagagttgagc

SEQ ID NO: 5253466 - DNA, 25 bp, Homo sapien
tcagatgcgtagcatgggcaggaat

SEQ ID NO: 5253467 - DNA, 25 bp, Homo sapien
ggaattgtaccattgggcatagagt

SEQ ID NO: 5253468 - DNA, 25 bp, Homo sapien
acaaaccaagtcatgtccacagagc

SEQ ID NO: 5253469 - DNA, 25 bp, Homo sapien
tccttgattcttggggttggcctgg

SEQ ID NO: 5253470 - DNA, 25 bp, Homo sapien
cttccccggaaggattcctgtctct

SEQ ID NO: 5253471 - DNA, 25 bp, Homo sapien
tgggttctgtctgcggctccagatc

SEQ ID NO: 5253472 - DNA, 25 bp, Homo sapien
ccttggcttgaaatggccttgccca

SEQ ID NO: 5253473 - DNA, 25 bp, Homo sapien
ttcccttggcttgaaatggccttgc

SEQ ID NO: 5253474 - DNA, 25 bp, Homo sapien
gttccttatgctcttcccttggctt

SEQ ID NO: 5253475 - DNA, 25 bp, Homo sapien
tatgctcttcccttggcttgaaatg

SEQ ID NO: 5253476 - DNA, 25 bp, Homo sapien
tcttgttcgctcatccactgttact

SEQ ID NO: 5253477 - DNA, 25 bp, Homo sapien
acttaaactgtattctgtcaaactg

SEQ ID NO: 5253478 - DNA, 25 bp, Homo sapien
tactttacttaaactgtattctgtc

SEQ ID NO: 5253479 - DNA, 25 bp, Homo sapien
gcttttgccgaactctgtctcagca

SEQ ID NO: 5253480 - DNA, 25 bp, Homo sapien
tctggatcttccaattcctggacgg

SEQ ID NO: 5253481 - DNA, 25 bp, Homo sapien
tcctttggatgtgaacggagaagtt

SEQ ID NO: 5253482 - DNA, 25 bp, Homo sapien
tggcagctgattcatgagggtaacc

SEQ ID NO: 5253483 - DNA, 25 bp, Homo sapien
gggccttggttgtcgctggcagctg

SEQ ID NO: 5253484 - DNA, 25 bp, Homo sapien
ccacatgtttgggtcgaggaggcct

SEQ ID NO: 5253485 - DNA, 25 bp, Homo sapien
catccgggaaatgtgagggacaacc

SEQ ID NO: 5253486 - DNA, 25 bp, Homo sapien
gctgcctcatgatgggccactaata

SEQ ID NO: 5253487 - DNA, 25 bp, Homo sapien
cactaatagccttgcatccgggaaa

SEQ ID NO: 5253488 - DNA, 25 bp, Homo sapien
ggcagaggccaggatctaacaggaa

SEQ ID NO: 5253489 - DNA, 25 bp, Homo sapien
ggaaacagtagccataaacaatgcc

SEQ ID NO: 5253490 - DNA, 25 bp, Homo sapien
ggccaggatctaacaggaaacagta

SEQ ID NO: 5253491 - DNA, 25 bp, Homo sapien
ggatctaacaggaaacagtagccat

SEQ ID NO: 5253492 - DNA, 25 bp, Homo sapien
gctgcaagttcattcactacttgga

SEQ ID NO: 5253493 - DNA, 25 bp, Homo sapien
ggtttgctgcaagttcattcactac

SEQ ID NO: 5253494 - DNA, 25 bp, Homo sapien
cataaggttttccaaggtttgctgc

SEQ ID NO: 5253495 - DNA, 25 bp, Homo sapien
cacgagattcttgacacaggattgc

SEQ ID NO: 5253496 - DNA, 25 bp, Homo sapien
tcttggagcatgagtcatctgtcct

SEQ ID NO: 5253497 - DNA, 25 bp, Homo sapien
tctgtcctgattccacgcggcactg

SEQ ID NO: 5253498 - DNA, 25 bp, Homo sapien
tcatctgtcctgattccacgcggca

SEQ ID NO: 5253499 - DNA, 25 bp, Homo sapien
gtgaagaattcttggagcatgagtc

SEQ ID NO: 5253500 - DNA, 25 bp, Homo sapien
cagtcagtgagcagttcttcaaact

SEQ ID NO: 5253501 - DNA, 25 bp, Homo sapien
aattatctggttttcgtcggctggc

SEQ ID NO: 5253502 - DNA, 25 bp, Homo sapien
ccggcattccacgagcagttgggct

SEQ ID NO: 5253503 - DNA, 25 bp, Homo sapien
tcggctggcaaatgcctattgggca

SEQ ID NO: 5253504 - DNA, 25 bp, Homo sapien
tcaggttccgagataatactgacca

SEQ ID NO: 5253505 - DNA, 25 bp, Homo sapien
tcctgctcaggttccgagataatac

SEQ ID NO: 5253506 - DNA, 25 bp, Homo sapien
gcacagcaccggagggcttggtcct

SEQ ID NO: 5253507 - DNA, 25 bp, Homo sapien
tgctcaggttccgagataatactga

SEQ ID NO: 5253508 - DNA, 25 bp, Homo sapien
cttcgaatggattttaagatcacct

SEQ ID NO: 5253509 - DNA, 25 bp, Homo sapien
caccagttgagcctcttcgaatgga

SEQ ID NO: 5253510 - DNA, 25 bp, Homo sapien
tcacataggacccattcgagcactt

SEQ ID NO: 5253511 - DNA, 25 bp, Homo sapien
cacactagctgcatatgtggagctt

SEQ ID NO: 5253512 - DNA, 25 bp, Homo sapien
tcatctctgggttttcgatccagag

SEQ ID NO: 5253513 - DNA, 25 bp, Homo sapien
actcatctctgggttttcgatccag

SEQ ID NO: 5253514 - DNA, 25 bp, Homo sapien
gaacagaatgtcactcatctctggg

SEQ ID NO: 5253515 - DNA, 25 bp, Homo sapien
ataagaacagaatgtcactcatctc

SEQ ID NO: 5253516 - DNA, 25 bp, Homo sapien
gcatcttcttgtctctggtgaccat

SEQ ID NO: 5253517 - DNA, 25 bp, Homo sapien
tcctttggcttccagatgcatcttc

SEQ ID NO: 5253518 - DNA, 25 bp, Homo sapien
gactttcaggcccactcctttggct

SEQ ID NO: 5253519 - DNA, 25 bp, Homo sapien
gatgcatcttcttgtctctggtgac

SEQ ID NO: 5253520 - DNA, 25 bp, Homo sapien
ctggtgatgtccatcttattgcaca

SEQ ID NO: 5253521 - DNA, 25 bp, Homo sapien
ggttctcaactgaaacatcggtcgt

SEQ ID NO: 5253522 - DNA, 25 bp, Homo sapien
tctcaactgaaacatcggtcgttcc

SEQ ID NO: 5253523 - DNA, 25 bp, Homo sapien
caactgaaacatcggtcgttcctac

SEQ ID NO: 5253524 - DNA, 25 bp, Homo sapien
gttctcaactgaaacatcggtcgtt

SEQ ID NO: 5253525 - DNA, 25 bp, Homo sapien
ggaatttttagagatcagcattgag

SEQ ID NO: 5253526 - DNA, 25 bp, Homo sapien
ctgaagaatcataatggtcttcgga

SEQ ID NO: 5253527 - DNA, 25 bp, Homo sapien
gaaactgtttggattgggagtctca

SEQ ID NO: 5253528 - DNA, 25 bp, Homo sapien
tttttagagatcagcattgagggag

SEQ ID NO: 5253529 - DNA, 25 bp, Homo sapien
ccaggtgcattgacggttcgagtct

SEQ ID NO: 5253530 - DNA, 25 bp, Homo sapien
gttcgagtctcacaaataaacggga

SEQ ID NO: 5253531 - DNA, 25 bp, Homo sapien
tgtttttagctttggccacgttgag

SEQ ID NO: 5253532 - DNA, 25 bp, Homo sapien
ttgaaggaagtatgttgttgctgct

SEQ ID NO: 5253533 - DNA, 25 bp, Homo sapien
taggtttttgaaagccgcctctcac

SEQ ID NO: 5253534 - DNA, 25 bp, Homo sapien
tcagaactaggtttttgaaagccgc

SEQ ID NO: 5253535 - DNA, 25 bp, Homo sapien
ctcagaactaggtttttgaaagccg

SEQ ID NO: 5253536 - DNA, 25 bp, Homo sapien
ctaggtttttgaaagccgcctctca

SEQ ID NO: 5253537 - DNA, 25 bp, Homo sapien
tggctttcaaccacccgaacccatg

SEQ ID NO: 5253538 - DNA, 25 bp, Homo sapien
ccagcaaatggggtggctttcaacc

SEQ ID NO: 5253539 - DNA, 25 bp, Homo sapien
tcttccccttggagccagtacttgg

SEQ ID NO: 5253540 - DNA, 25 bp, Homo sapien
tttgagttgagatgcagaaggacca

SEQ ID NO: 5253541 - DNA, 25 bp, Homo sapien
gcagaaggtatccaaggctggtttc

SEQ ID NO: 5253542 - DNA, 25 bp, Homo sapien
tgaagtcgttccgaatcagctcgct

SEQ ID NO: 5253543 - DNA, 25 bp, Homo sapien
gtttccttgcccgtcctgattgaag

SEQ ID NO: 5253544 - DNA, 25 bp, Homo sapien
ccgtcctgattgaagtcgttccgaa

SEQ ID NO: 5253545 - DNA, 25 bp, Homo sapien
gactaagtttccttgcccgtcctga

SEQ ID NO: 5253546 - DNA, 25 bp, Homo sapien
cttcctgaccagcctctgcgttcag

SEQ ID NO: 5253547 - DNA, 25 bp, Homo sapien
tcctgaccagcctctgcgttcagcc

SEQ ID NO: 5253548 - DNA, 25 bp, Homo sapien
ttcctgaccagcctctgcgttcagc

SEQ ID NO: 5253549 - DNA, 25 bp, Homo sapien
ttaaaacgattcaagctgctatgtc

SEQ ID NO: 5253550 - DNA, 25 bp, Homo sapien
tatgtcctcgatggaatccttgctc

SEQ ID NO: 5253551 - DNA, 25 bp, Homo sapien
tcaagctgctatgtcctcgatggaa

SEQ ID NO: 5253552 - DNA, 25 bp, Homo sapien
tccttgctcacttgcattcgtttga

SEQ ID NO: 5253553 - DNA, 25 bp, Homo sapien
ccttttcagaggcagaagcatctga

SEQ ID NO: 5253554 - DNA, 25 bp, Homo sapien
cttttcagaggcagaagcatctgag

SEQ ID NO: 5253555 - DNA, 25 bp, Homo sapien
aagcatctgagatggtcgccagagt

SEQ ID NO: 5253556 - DNA, 25 bp, Homo sapien
agaagcatctgagatggtcgccaga

SEQ ID NO: 5253557 - DNA, 25 bp, Homo sapien
gccagataaatgacagggcacagtc

SEQ ID NO: 5253558 - DNA, 25 bp, Homo sapien
cgggtacagtgtacaccgctcaagt

SEQ ID NO: 5253559 - DNA, 25 bp, Homo sapien
ccgctcaagtgatgggtgttctcag

SEQ ID NO: 5253560 - DNA, 25 bp, Homo sapien
gaaactggctatgagtggatcaaga

SEQ ID NO: 5253561 - DNA, 25 bp, Homo sapien
cagatctctctgcatactttccagg

SEQ ID NO: 5253562 - DNA, 25 bp, Homo sapien
tcaggcaaaggcatagattgtcatc

SEQ ID NO: 5253563 - DNA, 25 bp, Homo sapien
tccaggttagcaagttccccaataa

SEQ ID NO: 5253564 - DNA, 25 bp, Homo sapien
gcaagttccccaataagcaccgagt

SEQ ID NO: 5253565 - DNA, 25 bp, Homo sapien
gagcaggtctgggtgctggcccgcg

SEQ ID NO: 5253566 - DNA, 25 bp, Homo sapien
gcaggtctgggtgctggcccgcgct

SEQ ID NO: 5253567 - DNA, 25 bp, Homo sapien
ggtctgggtgctggcccgcgctcct

SEQ ID NO: 5253568 - DNA, 25 bp, Homo sapien
tctgggtgctggcccgcgctcctgt

SEQ ID NO: 5253569 - DNA, 25 bp, Homo sapien
ctggctcgcatggcgtccccgccgg

SEQ ID NO: 5253570 - DNA, 25 bp, Homo sapien
aggctccgctcgtcggccagcggct

SEQ ID NO: 5253571 - DNA, 25 bp, Homo sapien
gcccggaccgccgagagtgccgggc

SEQ ID NO: 5253572 - DNA, 25 bp, Homo sapien
gccgagagtgccgggcgcgctgggc

SEQ ID NO: 5253573 - DNA, 25 bp, Homo sapien
gcgcgcgaggcttccccgaagccgc

SEQ ID NO: 5253574 - DNA, 25 bp, Homo sapien
gcaccagggagacccgagcgcccgg

SEQ ID NO: 5253575 - DNA, 25 bp, Homo sapien
ggtggcacgatcggcgcccgcggca

SEQ ID NO: 5253576 - DNA, 25 bp, Homo sapien
gccccgaactcaggcggcggtggca

SEQ ID NO: 5253577 - DNA, 25 bp, Homo sapien
gaagttgaaatatgcattgtcacca

SEQ ID NO: 5253578 - DNA, 25 bp, Homo sapien
tgtcaccaacaagtttaaccggaga

SEQ ID NO: 5253579 - DNA, 25 bp, Homo sapien
gccgcccgccgggaagtggccagag

SEQ ID NO: 5253580 - DNA, 25 bp, Homo sapien
cgagcgcacgcggagggctgcggct

SEQ ID NO: 5253581 - DNA, 25 bp, Homo sapien
ggtcacccgatcgccaagccagaaa

SEQ ID NO: 5253582 - DNA, 25 bp, Homo sapien
gctgctcggtcacccgatcgccaag

SEQ ID NO: 5253583 - DNA, 25 bp, Homo sapien
gatcgccaagccagaaaccggagtt

SEQ ID NO: 5253584 - DNA, 25 bp, Homo sapien
cgcggctgctcggtcacccgatcgc

SEQ ID NO: 5253585 - DNA, 25 bp, Homo sapien
gcggagcgggcttctcggtaaacat

SEQ ID NO: 5253586 - DNA, 25 bp, Homo sapien
taagcaggaatacaatctcgcacag

SEQ ID NO: 5253587 - DNA, 25 bp, Homo sapien
caatctgcctactaacttggaaaga

SEQ ID NO: 5253588 - DNA, 25 bp, Homo sapien
taaacatcgctcagagaacaacgcg

SEQ ID NO: 5253589 - DNA, 25 bp, Homo sapien
ggccacggatctcaaggaaagcccc

SEQ ID NO: 5253590 - DNA, 25 bp, Homo sapien
tttcatctgggccacggatctcaag

SEQ ID NO: 5253591 - DNA, 25 bp, Homo sapien
ggtgaggatccaggcctctcccatc

SEQ ID NO: 5253592 - DNA, 25 bp, Homo sapien
aaccaaaaccacagagggcggtgag

SEQ ID NO: 5253593 - DNA, 25 bp, Homo sapien
gatgtcaaaacgctctgcaaaccac

SEQ ID NO: 5253594 - DNA, 25 bp, Homo sapien
tccatccacggatgtcaaaacgctc

SEQ ID NO: 5253595 - DNA, 25 bp, Homo sapien
aaagtacagccgctgtccatccacg

SEQ ID NO: 5253596 - DNA, 25 bp, Homo sapien
aacgctctgcaaaccacccattaat

SEQ ID NO: 5253597 - DNA, 25 bp, Homo sapien
ggggctcctgtgtatggaggatgca

SEQ ID NO: 5253598 - DNA, 25 bp, Homo sapien
ataaaatgcaactgcccccaagcag

SEQ ID NO: 5253599 - DNA, 25 bp, Homo sapien
tgggcatggtgtctgaggggctcct

SEQ ID NO: 5253600 - DNA, 25 bp, Homo sapien
cagctctttcatgcactgggcatgg

SEQ ID NO: 5253601 - DNA, 25 bp, Homo sapien
aaatcacaaggaacaattctgaaaa

SEQ ID NO: 5253602 - DNA, 25 bp, Homo sapien
ctgccaggcgtcgatgatggatggg

SEQ ID NO: 5253603 - DNA, 25 bp, Homo sapien
caggcgtcgatgatggatgggtcac

SEQ ID NO: 5253604 - DNA, 25 bp, Homo sapien
gcgtcgatgatggatgggtcacccc

SEQ ID NO: 5253605 - DNA, 25 bp, Homo sapien
ccaggcgtcgatgatggatgggtca

SEQ ID NO: 5253606 - DNA, 25 bp, Homo sapien
gagaccgactctgctacacgtagtg

SEQ ID NO: 5253607 - DNA, 25 bp, Homo sapien
accacatgtgggtcacgggagcact

SEQ ID NO: 5253608 - DNA, 25 bp, Homo sapien
tctctctgggatgaaagaatgctgt

SEQ ID NO: 5253609 - DNA, 25 bp, Homo sapien
ttataagaatctcacagcaggccgg

SEQ ID NO: 5253610 - DNA, 25 bp, Homo sapien
tacccatcttcttgagcatgaaaaa

SEQ ID NO: 5253611 - DNA, 25 bp, Homo sapien
aggttcgctgtggaaatcactgcca

SEQ ID NO: 5253612 - DNA, 25 bp, Homo sapien
taacgatcccactcccaatttagca

SEQ ID NO: 5253613 - DNA, 25 bp, Homo sapien
gcaagcagccaatttctagacaatt

SEQ ID NO: 5253614 - DNA, 25 bp, Homo sapien
gaatagctggaaggcgacaactggc

SEQ ID NO: 5253615 - DNA, 25 bp, Homo sapien
gaagcccttggaagtctgcaggcca

SEQ ID NO: 5253616 - DNA, 25 bp, Homo sapien
caggaagaggcacgatcagatctgt

SEQ ID NO: 5253617 - DNA, 25 bp, Homo sapien
aagcggaggcttattctgtacaacc

SEQ ID NO: 5253618 - DNA, 25 bp, Homo sapien
cccggagcacttggagactggctca

SEQ ID NO: 5253619 - DNA, 25 bp, Homo sapien
tagacccggagcacttggagactgg

SEQ ID NO: 5253620 - DNA, 25 bp, Homo sapien
gacccggagcacttggagactggct

SEQ ID NO: 5253621 - DNA, 25 bp, Homo sapien
ccggagcacttggagactggctcat

SEQ ID NO: 5253622 - DNA, 25 bp, Homo sapien
gctgctgtccccgatgttactgcca

SEQ ID NO: 5253623 - DNA, 25 bp, Homo sapien
gcaccctcagtgacacgtctgtcgt

SEQ ID NO: 5253624 - DNA, 25 bp, Homo sapien
gccatttcctggaggcaagaaacca

SEQ ID NO: 5253625 - DNA, 25 bp, Homo sapien
acgtctgtcgtcctgcaactgctgc

SEQ ID NO: 5253626 - DNA, 25 bp, Homo sapien
gcaggagccgctcttcatgggtaga

SEQ ID NO: 5253627 - DNA, 25 bp, Homo sapien
tagatggggaatccgcaggagtcct

SEQ ID NO: 5253628 - DNA, 25 bp, Homo sapien
ggaatccgcaggagtcctccacagg

SEQ ID NO: 5253629 - DNA, 25 bp, Homo sapien
caggggtcactagatgaaagccagg

SEQ ID NO: 5253630 - DNA, 25 bp, Homo sapien
ccggccaggaaatggggaccctgag

SEQ ID NO: 5253631 - DNA, 25 bp, Homo sapien
gcaggaggtgcccagtgtcacctgc

SEQ ID NO: 5253632 - DNA, 25 bp, Homo sapien
ctgagcttctccccggcaggaggtg

SEQ ID NO: 5253633 - DNA, 25 bp, Homo sapien
caagcgagggtctgtaggaaaggga

SEQ ID NO: 5253634 - DNA, 25 bp, Homo sapien
gaagttgggagtcgcccagaaccac

SEQ ID NO: 5253635 - DNA, 25 bp, Homo sapien
atttgctggaagttgggagtcgccc

SEQ ID NO: 5253636 - DNA, 25 bp, Homo sapien
aacaaccacggatttgctggaagtt

SEQ ID NO: 5253637 - DNA, 25 bp, Homo sapien
tggaagttgggagtcgcccagaacc

SEQ ID NO: 5253638 - DNA, 25 bp, Homo sapien
ggacgctgcacgactcggtctctct

SEQ ID NO: 5253639 - DNA, 25 bp, Homo sapien
gaggtagagccgttcctccagaggt

SEQ ID NO: 5253640 - DNA, 25 bp, Homo sapien
ggacctcgaagcaccctactgttgg

SEQ ID NO: 5253641 - DNA, 25 bp, Homo sapien
cagcggcatgactctcggatctcac

SEQ ID NO: 5253642 - DNA, 25 bp, Homo sapien
tctcctcgccaaaccaaatgcaaaa

SEQ ID NO: 5253643 - DNA, 25 bp, Homo sapien
agcatgtccggcacccagaaatcct

SEQ ID NO: 5253644 - DNA, 25 bp, Homo sapien
gctctgaccgagaagcatgtccggc

SEQ ID NO: 5253645 - DNA, 25 bp, Homo sapien
tgctgtctctcctcgccaaaccaaa

SEQ ID NO: 5253646 - DNA, 25 bp, Homo sapien
tgtatctactcaaagttcagggacc

SEQ ID NO: 5253647 - DNA, 25 bp, Homo sapien
gagtagtggctacacaagtgttcat

SEQ ID NO: 5253648 - DNA, 25 bp, Homo sapien
tgacaactgcgaaattcaggacagg

SEQ ID NO: 5253649 - DNA, 25 bp, Homo sapien
agggactccctcaaatgcttcaggt

SEQ ID NO: 5253650 - DNA, 25 bp, Homo sapien
tgtgtaacaaatcgccccaaacaac

SEQ ID NO: 5253651 - DNA, 25 bp, Homo sapien
cttgcaagactatgtattagctacc

SEQ ID NO: 5253652 - DNA, 25 bp, Homo sapien
tgaacctcaagaacataatgctcag

SEQ ID NO: 5253653 - DNA, 25 bp, Homo sapien
tgctcagccaaaaaacgaactcttg

SEQ ID NO: 5253654 - DNA, 25 bp, Homo sapien
taattttaactttctccaggaatgc

SEQ ID NO: 5253655 - DNA, 25 bp, Homo sapien
tggcaggaaatgtagcagctttttc

SEQ ID NO: 5253656 - DNA, 25 bp, Homo sapien
attttaactttctccaggaatgcat

SEQ ID NO: 5253657 - DNA, 25 bp, Homo sapien
ctgaatggcaggaaatgtagcagct

SEQ ID NO: 5253658 - DNA, 25 bp, Homo sapien
gaatccttgtgcaaacaaacaccag

SEQ ID NO: 5253659 - DNA, 25 bp, Homo sapien
ctccatcccgaaagtcagtcgtgac

SEQ ID NO: 5253660 - DNA, 25 bp, Homo sapien
acattccgccagaaaccgactgcag

SEQ ID NO: 5253661 - DNA, 25 bp, Homo sapien
gattgttaccaaagaatccttgtgc

SEQ ID NO: 5253662 - DNA, 25 bp, Homo sapien
ctcataggtgtgcatcgagggctgc

SEQ ID NO: 5253663 - DNA, 25 bp, Homo sapien
ccttgagctcgtaggcgtgtgtcac

SEQ ID NO: 5253664 - DNA, 25 bp, Homo sapien
cccgaacatacatcaagggaggatg

SEQ ID NO: 5253665 - DNA, 25 bp, Homo sapien
agctcgtaggcgtgtgtcacaggct

SEQ ID NO: 5253666 - DNA, 25 bp, Homo sapien
cctgcacatggtccctgttctcgta

SEQ ID NO: 5253667 - DNA, 25 bp, Homo sapien
gcacatggaccctgagctcataggc

SEQ ID NO: 5253668 - DNA, 25 bp, Homo sapien
ccctgttctcgtaggtgtgtgtcga

SEQ ID NO: 5253669 - DNA, 25 bp, Homo sapien
cataggcgtgtatccagggctggtt

SEQ ID NO: 5253670 - DNA, 25 bp, Homo sapien
tctcgtagatgagtgtcagaggctg

SEQ ID NO: 5253671 - DNA, 25 bp, Homo sapien
ggtacacctgcacgtggaccctatt

SEQ ID NO: 5253672 - DNA, 25 bp, Homo sapien
tggaccctgagctcataggtttgtg

SEQ ID NO: 5253673 - DNA, 25 bp, Homo sapien
ccctgagctcataggtgtatatcaa

SEQ ID NO: 5253674 - DNA, 25 bp, Homo sapien
tgctcataggtgtgagtggagggct

SEQ ID NO: 5253675 - DNA, 25 bp, Homo sapien
taatccaaggtttcgaaaatcacca

SEQ ID NO: 5253676 - DNA, 25 bp, Homo sapien
gggccccttcatcaggcgggtccat

SEQ ID NO: 5253677 - DNA, 25 bp, Homo sapien
ccaagcccctatgccgtggtcaggg

SEQ ID NO: 5253678 - DNA, 25 bp, Homo sapien
tccatcctgaattctaggcaggcac

SEQ ID NO: 5253679 - DNA, 25 bp, Homo sapien
ctgaattctaggcaggcaccggcac

SEQ ID NO: 5253680 - DNA, 25 bp, Homo sapien
acacggcgctgacatcactacagag

SEQ ID NO: 5253681 - DNA, 25 bp, Homo sapien
tggggtctcctcctcaagtcacacg

SEQ ID NO: 5253682 - DNA, 25 bp, Homo sapien
cagagccggcgcctttgagagcaga

SEQ ID NO: 5253683 - DNA, 25 bp, Homo sapien
ctttgagagcagaaccagccaacat

SEQ ID NO: 5253684 - DNA, 25 bp, Homo sapien
cctctcgccatcagagaagtcccag

SEQ ID NO: 5253685 - DNA, 25 bp, Homo sapien
agcctctcgccatcagagaagtccc

SEQ ID NO: 5253686 - DNA, 25 bp, Homo sapien
ctctcgccatcagagaagtcccagg

SEQ ID NO: 5253687 - DNA, 25 bp, Homo sapien
gcctctcgccatcagagaagtccca

SEQ ID NO: 5253688 - DNA, 25 bp, Homo sapien
ctgaaaagagaaacacggggctgtt

SEQ ID NO: 5253689 - DNA, 25 bp, Homo sapien
ccacgggtggcaacagaaagtggat

SEQ ID NO: 5253690 - DNA, 25 bp, Homo sapien
cgttccacgggtggcaacagaaagt

SEQ ID NO: 5253691 - DNA, 25 bp, Homo sapien
gtgagaacgttccacgggtggcaac

SEQ ID NO: 5253692 - DNA, 25 bp, Homo sapien
tcttggaagagtgagaacgttccac

SEQ ID NO: 5253693 - DNA, 25 bp, Homo sapien
ggtgacctctaaccgcgggtccatc

SEQ ID NO: 5253694 - DNA, 25 bp, Homo sapien
cgcagggcgacgtgagaacaatccc

SEQ ID NO: 5253695 - DNA, 25 bp, Homo sapien
cagctgaggcttccttggaacattt

SEQ ID NO: 5253696 - DNA, 25 bp, Homo sapien
ccagcgtgtttcaaggacaaatgct

SEQ ID NO: 5253697 - DNA, 25 bp, Homo sapien
gggcccaaagagaaccatgccgcac

SEQ ID NO: 5253698 - DNA, 25 bp, Homo sapien
aaagtccagcgaggccagtccatgt

SEQ ID NO: 5253699 - DNA, 25 bp, Homo sapien
aatgcaaagtccagcgaggccagtc

SEQ ID NO: 5253700 - DNA, 25 bp, Homo sapien
tgctctggcgatgccccaaatgcaa

SEQ ID NO: 5253701 - DNA, 25 bp, Homo sapien
caccaggcaccaggataaactacct

SEQ ID NO: 5253702 - DNA, 25 bp, Homo sapien
ctgaaggacaccaggcaccaggata

SEQ ID NO: 5253703 - DNA, 25 bp, Homo sapien
gacaccaggcaccaggataaactac

SEQ ID NO: 5253704 - DNA, 25 bp, Homo sapien
aggacaccaggcaccaggataaact

SEQ ID NO: 5253705 - DNA, 25 bp, Homo sapien
actccccggaggagcaatcggccgt

SEQ ID NO: 5253706 - DNA, 25 bp, Homo sapien
agcaatcggccgtgctctgctgcag

SEQ ID NO: 5253707 - DNA, 25 bp, Homo sapien
tctcaggaactgagtcagggagcat

SEQ ID NO: 5253708 - DNA, 25 bp, Homo sapien
cctgtttcctcagtcattctggtct

SEQ ID NO: 5253709 - DNA, 25 bp, Homo sapien
ccttgtggggcctcgatctccgcac

SEQ ID NO: 5253710 - DNA, 25 bp, Homo sapien
tcagtgggacagtgggaacaaccac

SEQ ID NO: 5253711 - DNA, 25 bp, Homo sapien
ggacagtgggaacaaccacaggggc

SEQ ID NO: 5253712 - DNA, 25 bp, Homo sapien
gccttgtggggcctcgatctccgca

SEQ ID NO: 5253713 - DNA, 25 bp, Homo sapien
gctgctgcgcattgactggcagcca

SEQ ID NO: 5253714 - DNA, 25 bp, Homo sapien
agcagaggccgcgtgacagagccag

SEQ ID NO: 5253715 - DNA, 25 bp, Homo sapien
tgcaaagggctgctgcgcattgact

SEQ ID NO: 5253716 - DNA, 25 bp, Homo sapien
gctgcgcattgactggcagccactc

SEQ ID NO: 5253717 - DNA, 25 bp, Homo sapien
gtgtttaaaccaataagctgctccc

SEQ ID NO: 5253718 - DNA, 25 bp, Homo sapien
ccccgtaacattcatgagcagctgg

SEQ ID NO: 5253719 - DNA, 25 bp, Homo sapien
gggaagatgccagagtgtttaaacc

SEQ ID NO: 5253720 - DNA, 25 bp, Homo sapien
tgtcagcgccccgtaacattcatga

SEQ ID NO: 5253721 - DNA, 25 bp, Homo sapien
atgctgatgagcacaggggacccca

SEQ ID NO: 5253722 - DNA, 25 bp, Homo sapien
tgctgatgagcacaggggaccccac

SEQ ID NO: 5253723 - DNA, 25 bp, Homo sapien
tgtagggcagagacggccaaacttt

SEQ ID NO: 5253724 - DNA, 25 bp, Homo sapien
ttggcactaccaatcaccagctggg

SEQ ID NO: 5253725 - DNA, 25 bp, Homo sapien
gatatgagtcccagagcagtgtagg

SEQ ID NO: 5253726 - DNA, 25 bp, Homo sapien
gaaaggactccttagctgcaaaatg

SEQ ID NO: 5253727 - DNA, 25 bp, Homo sapien
tttccagcattgagcgcagtgccca

SEQ ID NO: 5253728 - DNA, 25 bp, Homo sapien
tactgcttttatcccaggcatcgca

SEQ ID NO: 5253729 - DNA, 25 bp, Homo sapien
gcccaagcttggattgtctcccaca

SEQ ID NO: 5253730 - DNA, 25 bp, Homo sapien
tggacacccgtcatcatctctaggc

SEQ ID NO: 5253731 - DNA, 25 bp, Homo sapien
ttctgcctcaagcaaacacgctgcg

SEQ ID NO: 5253732 - DNA, 25 bp, Homo sapien
aagcaaacacgctgcgcggcggcat

SEQ ID NO: 5253733 - DNA, 25 bp, Homo sapien
tgaagcttctgcctcaagcaaacac

SEQ ID NO: 5253734 - DNA, 25 bp, Homo sapien
ctcaagcaaacacgctgcgcggcgg

SEQ ID NO: 5253735 - DNA, 25 bp, Homo sapien
gggtaaagccgctaaggcttcatat

SEQ ID NO: 5253736 - DNA, 25 bp, Homo sapien
ccgggtaaagccgctaaggcttcat

SEQ ID NO: 5253737 - DNA, 25 bp, Homo sapien
gtaaagccgctaaggcttcatattt

SEQ ID NO: 5253738 - DNA, 25 bp, Homo sapien
cgggtaaagccgctaaggcttcata

SEQ ID NO: 5253739 - DNA, 25 bp, Homo sapien
ctgacttgcagcgagggaggccatt

SEQ ID NO: 5253740 - DNA, 25 bp, Homo sapien
aaagctcgtctctgaaaacccttcg

SEQ ID NO: 5253741 - DNA, 25 bp, Homo sapien
tcgctcaggtcaatcagggtcccct

SEQ ID NO: 5253742 - DNA, 25 bp, Homo sapien
ttgatgtcattaaagctcgtctctg

SEQ ID NO: 5253743 - DNA, 25 bp, Homo sapien
gatgctttcatgcaacgaggcagca

SEQ ID NO: 5253744 - DNA, 25 bp, Homo sapien
gacagagatggtatacggcctgcaa

SEQ ID NO: 5253745 - DNA, 25 bp, Homo sapien
aaggtttgctgacctctccccgaag

SEQ ID NO: 5253746 - DNA, 25 bp, Homo sapien
gttgtcttggaaacacgactctggc

SEQ ID NO: 5253747 - DNA, 25 bp, Homo sapien
tacagagatgcgcttagctgggagc

SEQ ID NO: 5253748 - DNA, 25 bp, Homo sapien
taaacccagactcgagtggagccct

SEQ ID NO: 5253749 - DNA, 25 bp, Homo sapien
gaatttgagaaaccgcaggtgcagg

SEQ ID NO: 5253750 - DNA, 25 bp, Homo sapien
tacagcaggcccgtctatctgggtg

SEQ ID NO: 5253751 - DNA, 25 bp, Homo sapien
ttgtctacgagcaaggcactgggag

SEQ ID NO: 5253752 - DNA, 25 bp, Homo sapien
ttattgatgaagtcccacacggtgg

SEQ ID NO: 5253753 - DNA, 25 bp, Homo sapien
tttagggccgtagagacccactgtg

SEQ ID NO: 5253754 - DNA, 25 bp, Homo sapien
tcaagccggtgaagaaactcgacga

SEQ ID NO: 5253755 - DNA, 25 bp, Homo sapien
actttggcctgctcgctggctttga

SEQ ID NO: 5253756 - DNA, 25 bp, Homo sapien
cctcgtaattcgtcatattggaaaa

SEQ ID NO: 5253757 - DNA, 25 bp, Homo sapien
gggcctggacaaaacgaactggtgc

SEQ ID NO: 5253758 - DNA, 25 bp, Homo sapien
agctggaatcctcgcaccactttgg

SEQ ID NO: 5253759 - DNA, 25 bp, Homo sapien
tgatggggaagatcaggcggctcac

SEQ ID NO: 5253760 - DNA, 25 bp, Homo sapien
ggtgatggggaagatcaggcggctc

SEQ ID NO: 5253761 - DNA, 25 bp, Homo sapien
gtgatggggaagatcaggcggctca

SEQ ID NO: 5253762 - DNA, 25 bp, Homo sapien
acgttcttggtgtgcacgaggccca

SEQ ID NO: 5253763 - DNA, 25 bp, Homo sapien
tgttctgccgcaccacagtcttgag

SEQ ID NO: 5253764 - DNA, 25 bp, Homo sapien
tagtagccgatgtaccactccttgg

SEQ ID NO: 5253765 - DNA, 25 bp, Homo sapien
gaacccgcagcgtgaagtcagagag

SEQ ID NO: 5253766 - DNA, 25 bp, Homo sapien
tcagtgttgttacagtcctccttca

SEQ ID NO: 5253767 - DNA, 25 bp, Homo sapien
tctcagtgttgttacagtcctcctt

SEQ ID NO: 5253768 - DNA, 25 bp, Homo sapien
ctcagtgttgttacagtcctccttc

SEQ ID NO: 5253769 - DNA, 25 bp, Homo sapien
ttctcagtgttgttacagtcctcct

SEQ ID NO: 5253770 - DNA, 25 bp, Homo sapien
catcacaagctccttctggaaggac

SEQ ID NO: 5253771 - DNA, 25 bp, Homo sapien
actgggaaggcggaaaggctttgct

SEQ ID NO: 5253772 - DNA, 25 bp, Homo sapien
gtgcactgggaaggcggaaaggctt

SEQ ID NO: 5253773 - DNA, 25 bp, Homo sapien
tttgctgagcagcacccctgaacgc

SEQ ID NO: 5253774 - DNA, 25 bp, Homo sapien
ggctttgctgagcagcacccctgaa

SEQ ID NO: 5253775 - DNA, 25 bp, Homo sapien
ttcaagccccacacgtatatcccag

SEQ ID NO: 5253776 - DNA, 25 bp, Homo sapien
agccccacacgtatatcccaggcag

SEQ ID NO: 5253777 - DNA, 25 bp, Homo sapien
ttcaagcacacttcaagccccacac

SEQ ID NO: 5253778 - DNA, 25 bp, Homo sapien
cacgtatatcccaggcagcgggaca

SEQ ID NO: 5253779 - DNA, 25 bp, Homo sapien
gggagggacgcaggccatcccctcc

SEQ ID NO: 5253780 - DNA, 25 bp, Homo sapien
tcggcggttattttccacagctggt

SEQ ID NO: 5253781 - DNA, 25 bp, Homo sapien
gtcaggttccacgacagcatgcaca

SEQ ID NO: 5253782 - DNA, 25 bp, Homo sapien
ggatggaggcgctttgtctgccact

SEQ ID NO: 5253783 - DNA, 25 bp, Homo sapien
cgcacagaggctctcacgggatgga

SEQ ID NO: 5253784 - DNA, 25 bp, Homo sapien
agagaaggacgtcctggagagacgg

SEQ ID NO: 5253785 - DNA, 25 bp, Homo sapien
gacagaggatgatggagtgcgcggg

SEQ ID NO: 5253786 - DNA, 25 bp, Homo sapien
gagagacggcatttgagctggcagc

SEQ ID NO: 5253787 - DNA, 25 bp, Homo sapien
aaacaaaccgcttctgattcaagaa

SEQ ID NO: 5253788 - DNA, 25 bp, Homo sapien
cccaacatgccccaaaactcgaggg

SEQ ID NO: 5253789 - DNA, 25 bp, Homo sapien
tgggtcttctcccaatccacagaga

SEQ ID NO: 5253790 - DNA, 25 bp, Homo sapien
tgcctgggaggaatccctcaggacc

SEQ ID NO: 5253791 - DNA, 25 bp, Homo sapien
aatgcgccccatgcacttgctagct

SEQ ID NO: 5253792 - DNA, 25 bp, Homo sapien
gggagactcgtaggcgtccatctgc

SEQ ID NO: 5253793 - DNA, 25 bp, Homo sapien
aaagtcctggatgagtctgaccacc

SEQ ID NO: 5253794 - DNA, 25 bp, Homo sapien
tcctgtcccggtggggagactcgta

SEQ ID NO: 5253795 - DNA, 25 bp, Homo sapien
gccacctctacagccgtggtcagga

SEQ ID NO: 5253796 - DNA, 25 bp, Homo sapien
tgacatcccggtagctgtccccgat

SEQ ID NO: 5253797 - DNA, 25 bp, Homo sapien
cctggatgacatcccggtagctgtc

SEQ ID NO: 5253798 - DNA, 25 bp, Homo sapien
gaagtcatacgcaggcttccacatg

SEQ ID NO: 5253799 - DNA, 25 bp, Homo sapien
tctgatggctccaggtgagtaagaa

SEQ ID NO: 5253800 - DNA, 25 bp, Homo sapien
tgctctcagaacgtccagggagttc

SEQ ID NO: 5253801 - DNA, 25 bp, Homo sapien
tcaaatcacgaagtcgtcctggtcc

SEQ ID NO: 5253802 - DNA, 25 bp, Homo sapien
cagagtcccagtgaggtgcttccag

SEQ ID NO: 5253803 - DNA, 25 bp, Homo sapien
ggctgaaggcggctgctctcagaac

SEQ ID NO: 5253804 - DNA, 25 bp, Homo sapien
cgaacgagcatctttccgggctgag

SEQ ID NO: 5253805 - DNA, 25 bp, Homo sapien
tacacgcagggagtgaaagaggtcc

SEQ ID NO: 5253806 - DNA, 25 bp, Homo sapien
ttggcagaaacagctcagggcacct

SEQ ID NO: 5253807 - DNA, 25 bp, Homo sapien
taaagactgtcaactcatggctgct

SEQ ID NO: 5253808 - DNA, 25 bp, Homo sapien
tatttaaagtctggttgggtacaga

SEQ ID NO: 5253809 - DNA, 25 bp, Homo sapien
gtctggttgggtacagaaaacacac

SEQ ID NO: 5253810 - DNA, 25 bp, Homo sapien
tctggttgggtacagaaaacacaca

SEQ ID NO: 5253811 - DNA, 25 bp, Homo sapien
agtctggttgggtacagaaaacaca

SEQ ID NO: 5253812 - DNA, 25 bp, Homo sapien
ggtggtctagctggctcccactcag

SEQ ID NO: 5253813 - DNA, 25 bp, Homo sapien
tctgttggtggtctagctggctccc

SEQ ID NO: 5253814 - DNA, 25 bp, Homo sapien
gccttcaagcctttcatcaaagtca

SEQ ID NO: 5253815 - DNA, 25 bp, Homo sapien
gtcgatgctgccgacacactggtcc

SEQ ID NO: 5253816 - DNA, 25 bp, Homo sapien
aatttattgagtgtgagtccagcgc

SEQ ID NO: 5253817 - DNA, 25 bp, Homo sapien
cacctaggagcgtgatttgcagagc

SEQ ID NO: 5253818 - DNA, 25 bp, Homo sapien
aaggacctttcgcagagggagcatc

SEQ ID NO: 5253819 - DNA, 25 bp, Homo sapien
gacctgggcgattcacagtagggct

SEQ ID NO: 5253820 - DNA, 25 bp, Homo sapien
gaaactttctagaacacggtctgga

SEQ ID NO: 5253821 - DNA, 25 bp, Homo sapien
tgtgcaaagaatccacgctgtccag

SEQ ID NO: 5253822 - DNA, 25 bp, Homo sapien
acttgctattctctcctacgtggga

SEQ ID NO: 5253823 - DNA, 25 bp, Homo sapien
tacgtaacattatagcgggaagacc

SEQ ID NO: 5253824 - DNA, 25 bp, Homo sapien
gaagcattgagctcgtgaacagcat

SEQ ID NO: 5253825 - DNA, 25 bp, Homo sapien
gaggaggaggaagcattgagctcgt

SEQ ID NO: 5253826 - DNA, 25 bp, Homo sapien
tgatgcacacggcaaaagagcaaac

SEQ ID NO: 5253827 - DNA, 25 bp, Homo sapien
aggaggaagcattgagctcgtgaac

SEQ ID NO: 5253828 - DNA, 25 bp, Homo sapien
aaatcccctaagtttgctgcctcag

SEQ ID NO: 5253829 - DNA, 25 bp, Homo sapien
cccaggttctggttatcgatgcaca

SEQ ID NO: 5253830 - DNA, 25 bp, Homo sapien
gctgcctcagtggtgaatgaagtcc

SEQ ID NO: 5253831 - DNA, 25 bp, Homo sapien
gattttaccagcactactccagatg

SEQ ID NO: 5253832 - DNA, 25 bp, Homo sapien
catgagaatatacagcaacggcaca

SEQ ID NO: 5253833 - DNA, 25 bp, Homo sapien
tggcagaatccagtaccacgaggct

SEQ ID NO: 5253834 - DNA, 25 bp, Homo sapien
gaggctgcagcactgaagtccctgt

SEQ ID NO: 5253835 - DNA, 25 bp, Homo sapien
ggcccttttaggacatggtagctca

SEQ ID NO: 5253836 - DNA, 25 bp, Homo sapien
atcaaatgaaccctcttccgcgtac

SEQ ID NO: 5253837 - DNA, 25 bp, Homo sapien
ttccgcgtacccaatgcagatgtca

SEQ ID NO: 5253838 - DNA, 25 bp, Homo sapien
ctcttccgcgtacccaatgcagatg

SEQ ID NO: 5253839 - DNA, 25 bp, Homo sapien
tgcagatgtcaacaccgacacacac

SEQ ID NO: 5253840 - DNA, 25 bp, Homo sapien
tggatgggagctcttagactccttg

SEQ ID NO: 5253841 - DNA, 25 bp, Homo sapien
tatgcctgaatgtcctgtagacagg

SEQ ID NO: 5253842 - DNA, 25 bp, Homo sapien
gagtttagggtcacttttgccagag

SEQ ID NO: 5253843 - DNA, 25 bp, Homo sapien
caaagatgtctgaatttagccacta

SEQ ID NO: 5253844 - DNA, 25 bp, Homo sapien
gggccatagacacctctatgaggag

SEQ ID NO: 5253845 - DNA, 25 bp, Homo sapien
catagacacctctatgaggagtgtg

SEQ ID NO: 5253846 - DNA, 25 bp, Homo sapien
ttcttcttcggggaagcaaagaaca

SEQ ID NO: 5253847 - DNA, 25 bp, Homo sapien
gccatagacacctctatgaggagtg

SEQ ID NO: 5253848 - DNA, 25 bp, Homo sapien
agcagccacgaatcacgcacaggca

SEQ ID NO: 5253849 - DNA, 25 bp, Homo sapien
aaacacatcgaaggtggcgtttcct

SEQ ID NO: 5253850 - DNA, 25 bp, Homo sapien
agtgaaagtgtgctggataaagccc

SEQ ID NO: 5253851 - DNA, 25 bp, Homo sapien
taaagcccaaaagagtctggaatca

SEQ ID NO: 5253852 - DNA, 25 bp, Homo sapien
tttcctttgcggcatagaggaggtg

SEQ ID NO: 5253853 - DNA, 25 bp, Homo sapien
gcgaagtaactgtaatgccaatcac

SEQ ID NO: 5253854 - DNA, 25 bp, Homo sapien
ccaaagcatgcgaagtaactgtaat

SEQ ID NO: 5253855 - DNA, 25 bp, Homo sapien
ggtgtcatccaaagcatgcgaagta

SEQ ID NO: 5253856 - DNA, 25 bp, Homo sapien
catgcgaagtaactgtaatgccaat

SEQ ID NO: 5253857 - DNA, 25 bp, Homo sapien
acattggttgcagggatgaacagct

SEQ ID NO: 5253858 - DNA, 25 bp, Homo sapien
cctggtggttgcgtgaacattggtt

SEQ ID NO: 5253859 - DNA, 25 bp, Homo sapien
ttgcgtgaacattggttgcagggat

SEQ ID NO: 5253860 - DNA, 25 bp, Homo sapien
cccctggtggttgcgtgaacattgg

SEQ ID NO: 5253861 - DNA, 25 bp, Homo sapien
cagggtgttggaaagaccatggagg

SEQ ID NO: 5253862 - DNA, 25 bp, Homo sapien
ggatgagagctaggcttctggtagc

SEQ ID NO: 5253863 - DNA, 25 bp, Homo sapien
tcagggtgttggaaagaccatggag

SEQ ID NO: 5253864 - DNA, 25 bp, Homo sapien
tgagagctaggcttctggtagctgt

SEQ ID NO: 5253865 - DNA, 25 bp, Homo sapien
aggcagtgcggacctaggatagtgg

SEQ ID NO: 5253866 - DNA, 25 bp, Homo sapien
caggcagtgcggacctaggatagtg

SEQ ID NO: 5253867 - DNA, 25 bp, Homo sapien
ctaggatagtgggaacaggggccaa

SEQ ID NO: 5253868 - DNA, 25 bp, Homo sapien
gatagtgggaacaggggccaaagag

SEQ ID NO: 5253869 - DNA, 25 bp, Homo sapien
aaggcacggaactggcagggatgag

SEQ ID NO: 5253870 - DNA, 25 bp, Homo sapien
tgctgtgttgaaaagcatcagaggg

SEQ ID NO: 5253871 - DNA, 25 bp, Homo sapien
gggaaggcacggaactggcagggat

SEQ ID NO: 5253872 - DNA, 25 bp, Homo sapien
ggagtgctgtgttgaaaagcatcag

SEQ ID NO: 5253873 - DNA, 25 bp, Homo sapien
tggttgcatccacacttaaacttgg

SEQ ID NO: 5253874 - DNA, 25 bp, Homo sapien
gctgtgcctcgatgacaccttttgt

SEQ ID NO: 5253875 - DNA, 25 bp, Homo sapien
gacaccttttgttctgccacactct

SEQ ID NO: 5253876 - DNA, 25 bp, Homo sapien
caacaggtgtgtagctgattcggct

SEQ ID NO: 5253877 - DNA, 25 bp, Homo sapien
gtttgggcagagtgtagggaaaaga

SEQ ID NO: 5253878 - DNA, 25 bp, Homo sapien
acaagattcacagcagtaccctggg

SEQ ID NO: 5253879 - DNA, 25 bp, Homo sapien
tgggcagagtgtagggaaaagacaa

SEQ ID NO: 5253880 - DNA, 25 bp, Homo sapien
ggcagagtgtagggaaaagacaaga

SEQ ID NO: 5253881 - DNA, 25 bp, Homo sapien
ctacttctccccgctgtccatcact

SEQ ID NO: 5253882 - DNA, 25 bp, Homo sapien
tacttctccccgctgtccatcactg

SEQ ID NO: 5253883 - DNA, 25 bp, Homo sapien
acttctccccgctgtccatcactgt

SEQ ID NO: 5253884 - DNA, 25 bp, Homo sapien
ttctccccgctgtccatcactgtcg

SEQ ID NO: 5253885 - DNA, 25 bp, Homo sapien
ttctgttcgtggtgttcccttgtcc

SEQ ID NO: 5253886 - DNA, 25 bp, Homo sapien
tcgtggtgttcccttgtccgtggaa

SEQ ID NO: 5253887 - DNA, 25 bp, Homo sapien
tgttcccttgtccgtggaaaatcca

SEQ ID NO: 5253888 - DNA, 25 bp, Homo sapien
tgttcgtggtgttcccttgtccgtg

SEQ ID NO: 5253889 - DNA, 25 bp, Homo sapien
caagcatcgggtgctgacagggtag

SEQ ID NO: 5253890 - DNA, 25 bp, Homo sapien
ctacagcgggcagggtgccaagcat

SEQ ID NO: 5253891 - DNA, 25 bp, Homo sapien
aggtctctccgcaggtagacactgt

SEQ ID NO: 5253892 - DNA, 25 bp, Homo sapien
tgacagggtagcaaggagcagccca

SEQ ID NO: 5253893 - DNA, 25 bp, Homo sapien
tgctgcaccctgagaatgcttccat

SEQ ID NO: 5253894 - DNA, 25 bp, Homo sapien
gctgtcccctcagctgactgttttc

SEQ ID NO: 5253895 - DNA, 25 bp, Homo sapien
tgtgcttgtcctttgtgtgctgcag

SEQ ID NO: 5253896 - DNA, 25 bp, Homo sapien
gactgtgcttgtcctttgtgtgctg

SEQ ID NO: 5253897 - DNA, 25 bp, Homo sapien
acagctgcagtcctggtgaaatagc

SEQ ID NO: 5253898 - DNA, 25 bp, Homo sapien
ctgaggcaatgacagctgcagtcct

SEQ ID NO: 5253899 - DNA, 25 bp, Homo sapien
gcaatgacagctgcagtcctggtga

SEQ ID NO: 5253900 - DNA, 25 bp, Homo sapien
tgaaatagctgagaaggaatttgct

SEQ ID NO: 5253901 - DNA, 25 bp, Homo sapien
cctcctggggtgctgtacggatgtt

SEQ ID NO: 5253902 - DNA, 25 bp, Homo sapien
attggcacaggcgacagggctcctt

SEQ ID NO: 5253903 - DNA, 25 bp, Homo sapien
ctgcatccgggtcagattggcacag

SEQ ID NO: 5253904 - DNA, 25 bp, Homo sapien
ggtgctgtacggatgttataatagc

SEQ ID NO: 5253905 - DNA, 25 bp, Homo sapien
cagaatgtgtcctggcataaccatt

SEQ ID NO: 5253906 - DNA, 25 bp, Homo sapien
ccagaatgtgtcctggcataaccat

SEQ ID NO: 5253907 - DNA, 25 bp, Homo sapien
agaatgtgtcctggcataaccattg

SEQ ID NO: 5253908 - DNA, 25 bp, Homo sapien
tattcaagaacaatagcagcagtct

SEQ ID NO: 5253909 - DNA, 25 bp, Homo sapien
caggataggtgcctagtactgcctc

SEQ ID NO: 5253910 - DNA, 25 bp, Homo sapien
gaaagcaggataggtgcctagtact

SEQ ID NO: 5253911 - DNA, 25 bp, Homo sapien
caagaacaatagcagcagtcttctc

SEQ ID NO: 5253912 - DNA, 25 bp, Homo sapien
tccttgttttgccagaacagacaag

SEQ ID NO: 5253913 - DNA, 25 bp, Homo sapien
tagtgcaaggctggtcagagttgac

SEQ ID NO: 5253914 - DNA, 25 bp, Homo sapien
cattgaaatgtggatgtatagtcct

SEQ ID NO: 5253915 - DNA, 25 bp, Homo sapien
tgacttcactgccttgtggacaaag

SEQ ID NO: 5253916 - DNA, 25 bp, Homo sapien
ttactgtgccactagaaagaatgct

SEQ ID NO: 5253917 - DNA, 25 bp, Homo sapien
cattatccatctgtgtgctagcaaa

SEQ ID NO: 5253918 - DNA, 25 bp, Homo sapien
gagatcttgggtgatgtcgcctgaa

SEQ ID NO: 5253919 - DNA, 25 bp, Homo sapien
tccctacttacatcggctcctggag

SEQ ID NO: 5253920 - DNA, 25 bp, Homo sapien
tttatgcaagtcgaattttatttgg

SEQ ID NO: 5253921 - DNA, 25 bp, Homo sapien
ttatgcaagtcgaattttatttggt

SEQ ID NO: 5253922 - DNA, 25 bp, Homo sapien
ttttatgcaagtcgaattttatttg

SEQ ID NO: 5253923 - DNA, 25 bp, Homo sapien
tatgcaagtcgaattttatttggta

SEQ ID NO: 5253924 - DNA, 25 bp, Homo sapien
tgcaaccccatcttttgtggagggt

SEQ ID NO: 5253925 - DNA, 25 bp, Homo sapien
gccgggaatctcagctgtgtctctt

SEQ ID NO: 5253926 - DNA, 25 bp, Homo sapien
ggttgatgaccacagccgggaatct

SEQ ID NO: 5253927 - DNA, 25 bp, Homo sapien
tgcaaatctgaattaggccacagat

SEQ ID NO: 5253928 - DNA, 25 bp, Homo sapien
cacagcaccattcacccagatgtat

SEQ ID NO: 5253929 - DNA, 25 bp, Homo sapien
gcaccattcacccagatgtatccac

SEQ ID NO: 5253930 - DNA, 25 bp, Homo sapien
agcaccattcacccagatgtatcca

SEQ ID NO: 5253931 - DNA, 25 bp, Homo sapien
acagcaccattcacccagatgtatc

SEQ ID NO: 5253932 - DNA, 25 bp, Homo sapien
gcttctcagtgacaattttgaccat

SEQ ID NO: 5253933 - DNA, 25 bp, Homo sapien
agcttctcagtgacaattttgacca

SEQ ID NO: 5253934 - DNA, 25 bp, Homo sapien
ttccctgaaggaccatgctggactt

SEQ ID NO: 5253935 - DNA, 25 bp, Homo sapien
ttttatgcacatttccgccaactcc

SEQ ID NO: 5253936 - DNA, 25 bp, Homo sapien
gaaggaccatgctggacttgcctag

SEQ ID NO: 5253937 - DNA, 25 bp, Homo sapien
ctggacttgcctagcccgtgggcag

SEQ ID NO: 5253938 - DNA, 25 bp, Homo sapien
gtcgagtgcacgcccactcaggaag

SEQ ID NO: 5253939 - DNA, 25 bp, Homo sapien
cggagtcgagtgcacgcccactcag

SEQ ID NO: 5253940 - DNA, 25 bp, Homo sapien
cgagtgcacgcccactcaggaagac

SEQ ID NO: 5253941 - DNA, 25 bp, Homo sapien
gagtcgagtgcacgcccactcagga

SEQ ID NO: 5253942 - DNA, 25 bp, Homo sapien
gaagcagggacacagaggaagaccc

SEQ ID NO: 5253943 - DNA, 25 bp, Homo sapien
cagggacacagaggaagaccccctc

SEQ ID NO: 5253944 - DNA, 25 bp, Homo sapien
ctgagcacagggaagcagggacaca

SEQ ID NO: 5253945 - DNA, 25 bp, Homo sapien
cacagaggaagaccccctcccttct

SEQ ID NO: 5253946 - DNA, 25 bp, Homo sapien
ttccagaaggctggtggggtccgag

SEQ ID NO: 5253947 - DNA, 25 bp, Homo sapien
cagaaggctggtggggtccgagtcc

SEQ ID NO: 5253948 - DNA, 25 bp, Homo sapien
ggctggtggggtccgagtccaccat

SEQ ID NO: 5253949 - DNA, 25 bp, Homo sapien
aggctggtggggtccgagtccacca

SEQ ID NO: 5253950 - DNA, 25 bp, Homo sapien
caggttttctagtccctgctgtggc

SEQ ID NO: 5253951 - DNA, 25 bp, Homo sapien
tctcaggttttctagtccctgctgt

SEQ ID NO: 5253952 - DNA, 25 bp, Homo sapien
ctcaggttttctagtccctgctgtg

SEQ ID NO: 5253953 - DNA, 25 bp, Homo sapien
tcaggttttctagtccctgctgtgg

SEQ ID NO: 5253954 - DNA, 25 bp, Homo sapien
gcacccatgtggtttggcttggctt

SEQ ID NO: 5253955 - DNA, 25 bp, Homo sapien
ttgcacccatgtggtttggcttggc

SEQ ID NO: 5253956 - DNA, 25 bp, Homo sapien
ataaatgcgacatgccctgctagcc

SEQ ID NO: 5253957 - DNA, 25 bp, Homo sapien
ttgcacttctgccataaatgcgaca

SEQ ID NO: 5253958 - DNA, 25 bp, Homo sapien
cccggaaagttagcaaacaagatgc

SEQ ID NO: 5253959 - DNA, 25 bp, Homo sapien
aacaagatgctaacacagtcctcac

SEQ ID NO: 5253960 - DNA, 25 bp, Homo sapien
tagcaaacaagatgctaacacagtc

SEQ ID NO: 5253961 - DNA, 25 bp, Homo sapien
ccggaaagttagcaaacaagatgct

SEQ ID NO: 5253962 - DNA, 25 bp, Homo sapien
gaactcattgattgagtaccctggg

SEQ ID NO: 5253963 - DNA, 25 bp, Homo sapien
gtgccattaaggaactcattgattg

SEQ ID NO: 5253964 - DNA, 25 bp, Homo sapien
taaggaactcattgattgagtaccc

SEQ ID NO: 5253965 - DNA, 25 bp, Homo sapien
tgctgaggtttgcggtttctctgct

SEQ ID NO: 5253966 - DNA, 25 bp, Homo sapien
ggatggtcagctgggtctgactgga

SEQ ID NO: 5253967 - DNA, 25 bp, Homo sapien
aaacaaacaaccatgggtgcacgtc

SEQ ID NO: 5253968 - DNA, 25 bp, Homo sapien
ggtgcacgtctgcaaggctggccaa

SEQ ID NO: 5253969 - DNA, 25 bp, Homo sapien
caaatctctgttggacacaatacaa

SEQ ID NO: 5253970 - DNA, 25 bp, Homo sapien
gcttcctgttgggtcatcttcagaa

SEQ ID NO: 5253971 - DNA, 25 bp, Homo sapien
cctgttgggtcatcttcagaagacc

SEQ ID NO: 5253972 - DNA, 25 bp, Homo sapien
ttcctgttgggtcatcttcagaaga

SEQ ID NO: 5253973 - DNA, 25 bp, Homo sapien
tcagcttcctgttgggtcatcttca

SEQ ID NO: 5253974 - DNA, 25 bp, Homo sapien
accagctctgcatgtggagggctgg

SEQ ID NO: 5253975 - DNA, 25 bp, Homo sapien
caccagctctgcatgtggagggctg

SEQ ID NO: 5253976 - DNA, 25 bp, Homo sapien
ccagctctgcatgtggagggctggg

SEQ ID NO: 5253977 - DNA, 25 bp, Homo sapien
agttgcccaaagttgaccttgctgg

SEQ ID NO: 5253978 - DNA, 25 bp, Homo sapien
gttgcccaaagttgaccttgctgga

SEQ ID NO: 5253979 - DNA, 25 bp, Homo sapien
gagttgcccaaagttgaccttgctg

SEQ ID NO: 5253980 - DNA, 25 bp, Homo sapien
tgcccaaagttgaccttgctggact

SEQ ID NO: 5253981 - DNA, 25 bp, Homo sapien
cacggctgtgttgcagaggccagta

SEQ ID NO: 5253982 - DNA, 25 bp, Homo sapien
ggccagtaggagctgatggtggcct

SEQ ID NO: 5253983 - DNA, 25 bp, Homo sapien
ccttgacgttgatctgctggcacac

SEQ ID NO: 5253984 - DNA, 25 bp, Homo sapien
tgatctgctggcacacggctgtgtt

SEQ ID NO: 5253985 - DNA, 25 bp, Homo sapien
ccagcttggagggttaacacacgtt

SEQ ID NO: 5253986 - DNA, 25 bp, Homo sapien
cacgttattttagtgaaggctatgg

SEQ ID NO: 5253987 - DNA, 25 bp, Homo sapien
aattctagggtatcagtgcagcggt

SEQ ID NO: 5253988 - DNA, 25 bp, Homo sapien
gaatatggggcttgcaatttactcc

SEQ ID NO: 5253989 - DNA, 25 bp, Homo sapien
ttccaaacacccagttggttatgga

SEQ ID NO: 5253990 - DNA, 25 bp, Homo sapien
gctgagagccaccagtatggaatgt

SEQ ID NO: 5253991 - DNA, 25 bp, Homo sapien
gaatgtccaggccttccagaaggtt

SEQ ID NO: 5253992 - DNA, 25 bp, Homo sapien
tggaaattggatgtaggcattgaag

SEQ ID NO: 5253993 - DNA, 25 bp, Homo sapien
tgtgaccgtgggaacagcaagttct

SEQ ID NO: 5253994 - DNA, 25 bp, Homo sapien
gaaatgctcatatacacgtctggaa

SEQ ID NO: 5253995 - DNA, 25 bp, Homo sapien
tcacttccagtgaggattggtctct

SEQ ID NO: 5253996 - DNA, 25 bp, Homo sapien
tgttgcaaagcctcataaatactga

SEQ ID NO: 5253997 - DNA, 25 bp, Homo sapien
aatgttgtctgtatgtttttccact

SEQ ID NO: 5253998 - DNA, 25 bp, Homo sapien
atgttgtctgtatgtttttccactt

SEQ ID NO: 5253999 - DNA, 25 bp, Homo sapien
tgacgatcgtttccatcaggaccat

SEQ ID NO: 5254000 - DNA, 25 bp, Homo sapien
tgtgggcaacctgaaattaacctgg

SEQ ID NO: 5254001 - DNA, 25 bp, Homo sapien
catgccatgggcgttcctcaaggaa

SEQ ID NO: 5254002 - DNA, 25 bp, Homo sapien
gacatggtctcgttgactcctcact

SEQ ID NO: 5254003 - DNA, 25 bp, Homo sapien
gattctgtcatattgattccaccaa

SEQ ID NO: 5254004 - DNA, 25 bp, Homo sapien
gctgattctgtcatattgattccac

SEQ ID NO: 5254005 - DNA, 25 bp, Homo sapien
tccaccaatacatcaaactggacat

SEQ ID NO: 5254006 - DNA, 25 bp, Homo sapien
tgattccaccaatacatcaaactgg

SEQ ID NO: 5254007 - DNA, 25 bp, Homo sapien
gagtgtgcgcgccttagtaacctgt

SEQ ID NO: 5254008 - DNA, 25 bp, Homo sapien
cactcttgtgcaaactcaaagcggg

SEQ ID NO: 5254009 - DNA, 25 bp, Homo sapien
ttaaaaatcggaggagagtgtgcgc

SEQ ID NO: 5254010 - DNA, 25 bp, Homo sapien
catccattaggttaaaaatcggagg

SEQ ID NO: 5254011 - DNA, 25 bp, Homo sapien
aagaccctggatatttgcgtcctct

SEQ ID NO: 5254012 - DNA, 25 bp, Homo sapien
tatcacagtggtgcatgaagaccct

SEQ ID NO: 5254013 - DNA, 25 bp, Homo sapien
catcccattaggcttggtttgtgga

SEQ ID NO: 5254014 - DNA, 25 bp, Homo sapien
tgggccttcgggtttatcacagtgg

SEQ ID NO: 5254015 - DNA, 25 bp, Homo sapien
gtgcacagttttcatggtggttgtc

SEQ ID NO: 5254016 - DNA, 25 bp, Homo sapien
tgagtaagagatttggttgtctacc

SEQ ID NO: 5254017 - DNA, 25 bp, Homo sapien
cattacagaatggatctatgagtaa

SEQ ID NO: 5254018 - DNA, 25 bp, Homo sapien
gtaagagatttggttgtctaccagt

SEQ ID NO: 5254019 - DNA, 25 bp, Homo sapien
tcattgcctggcaagactgcctctt

SEQ ID NO: 5254020 - DNA, 25 bp, Homo sapien
tgatttacaaaattgcagatggagt

SEQ ID NO: 5254021 - DNA, 25 bp, Homo sapien
cagatggagtctacattggtgccta

SEQ ID NO: 5254022 - DNA, 25 bp, Homo sapien
acagatgaaccctgtagccaccggc

SEQ ID NO: 5254023 - DNA, 25 bp, Homo sapien
caggaaggctccacgggccgcagcg

SEQ ID NO: 5254024 - DNA, 25 bp, Homo sapien
gaaggctccacgggccgcagcgtct

SEQ ID NO: 5254025 - DNA, 25 bp, Homo sapien
ttcattctgatgttgatctttgcca

SEQ ID NO: 5254026 - DNA, 25 bp, Homo sapien
tccacgggccgcagcgtctcagggt

SEQ ID NO: 5254027 - DNA, 25 bp, Homo sapien
gagaaatgcgcacacatttctagat

SEQ ID NO: 5254028 - DNA, 25 bp, Homo sapien
ggcagtgaccacgtgaagaaccacc

SEQ ID NO: 5254029 - DNA, 25 bp, Homo sapien
cagtgccgtggctctcccgggcagt

SEQ ID NO: 5254030 - DNA, 25 bp, Homo sapien
cttttccagcaagactgaagacggg

SEQ ID NO: 5254031 - DNA, 25 bp, Homo sapien
acttggcagtggctcgcggtggaat

SEQ ID NO: 5254032 - DNA, 25 bp, Homo sapien
gaaactcgattctgctccccaaaat

SEQ ID NO: 5254033 - DNA, 25 bp, Homo sapien
ttttcttttgggtgtctggagcagg

SEQ ID NO: 5254034 - DNA, 25 bp, Homo sapien
gaatgcgggtagcagtgggtgcggg

SEQ ID NO: 5254035 - DNA, 25 bp, Homo sapien
tgcaaatcctgcccatgacatccac

SEQ ID NO: 5254036 - DNA, 25 bp, Homo sapien
ggacccctgcggttcagagcccagt

SEQ ID NO: 5254037 - DNA, 25 bp, Homo sapien
acatccaccgcaggaaccatcctag

SEQ ID NO: 5254038 - DNA, 25 bp, Homo sapien
ctcctggacccctgcggttcagagc

SEQ ID NO: 5254039 - DNA, 25 bp, Homo sapien
agtctccgggtctcccccactgtga

SEQ ID NO: 5254040 - DNA, 25 bp, Homo sapien
aagtctccgggtctcccccactgtg

SEQ ID NO: 5254041 - DNA, 25 bp, Homo sapien
caatcacgcaagagccagaaggagg

SEQ ID NO: 5254042 - DNA, 25 bp, Homo sapien
ctgagccagctttggacacaagcaa

SEQ ID NO: 5254043 - DNA, 25 bp, Homo sapien
tgccatgagcccacaaatgacactg

SEQ ID NO: 5254044 - DNA, 25 bp, Homo sapien
aaagaggaagccgtggacaatcacg

SEQ ID NO: 5254045 - DNA, 25 bp, Homo sapien
tcagaaaccttgccgaatggctcct

SEQ ID NO: 5254046 - DNA, 25 bp, Homo sapien
tatccccgggtaggccacagcttat

SEQ ID NO: 5254047 - DNA, 25 bp, Homo sapien
ggctcctccatatccccgggtaggc

SEQ ID NO: 5254048 - DNA, 25 bp, Homo sapien
gaaaccttgccgaatggctcctcca

SEQ ID NO: 5254049 - DNA, 25 bp, Homo sapien
ctaagcttgtcctctgtggctgggt

SEQ ID NO: 5254050 - DNA, 25 bp, Homo sapien
taagcttgtcctctgtggctgggtt

SEQ ID NO: 5254051 - DNA, 25 bp, Homo sapien
tgtcctctgtggctgggtttgtctc

SEQ ID NO: 5254052 - DNA, 25 bp, Homo sapien
gcttgtcctctgtggctgggtttgt

SEQ ID NO: 5254053 - DNA, 25 bp, Homo sapien
caaggcttttgtgatttcgtcctcc

SEQ ID NO: 5254054 - DNA, 25 bp, Homo sapien
ggcttttgtgatttcgtcctcctct

SEQ ID NO: 5254055 - DNA, 25 bp, Homo sapien
gcttttgtgatttcgtcctcctctg

SEQ ID NO: 5254056 - DNA, 25 bp, Homo sapien
aggcttttgtgatttcgtcctcctc

SEQ ID NO: 5254057 - DNA, 25 bp, Homo sapien
ctgctgctcccgctggtgctctgta

SEQ ID NO: 5254058 - DNA, 25 bp, Homo sapien
tcaactgccaggctgggttgggctt

SEQ ID NO: 5254059 - DNA, 25 bp, Homo sapien
gagacaaagaccgtcctctcctggt

SEQ ID NO: 5254060 - DNA, 25 bp, Homo sapien
cccttttccataagtggagacaaag

SEQ ID NO: 5254061 - DNA, 25 bp, Homo sapien
tgaggtcgcgatgactcatcacact

SEQ ID NO: 5254062 - DNA, 25 bp, Homo sapien
caagaacacaacttgattgggtttt

SEQ ID NO: 5254063 - DNA, 25 bp, Homo sapien
tcacagaatctggtaatgtttgagg

SEQ ID NO: 5254064 - DNA, 25 bp, Homo sapien
cactcaagaacacaacttgattggg

SEQ ID NO: 5254065 - DNA, 25 bp, Homo sapien
gtcacctgtgaccatagagtgggtc

SEQ ID NO: 5254066 - DNA, 25 bp, Homo sapien
gcctccatccatgtcacctgtgacc

SEQ ID NO: 5254067 - DNA, 25 bp, Homo sapien
cctccatccatgtcacctgtgacca

SEQ ID NO: 5254068 - DNA, 25 bp, Homo sapien
tcacctgtgaccatagagtgggtca

SEQ ID NO: 5254069 - DNA, 25 bp, Homo sapien
ctagtcttgcttccgaggagggctc

SEQ ID NO: 5254070 - DNA, 25 bp, Homo sapien
tgtgcgtgcaagaggtttgctagtc

SEQ ID NO: 5254071 - DNA, 25 bp, Homo sapien
ataagtgggagagcctgtgcgtgca

SEQ ID NO: 5254072 - DNA, 25 bp, Homo sapien
caggtccgtgataagtgggagagcc

SEQ ID NO: 5254073 - DNA, 25 bp, Homo sapien
actctctcccgaagaaattttcttg

SEQ ID NO: 5254074 - DNA, 25 bp, Homo sapien
atgctgctggcagagtattccctgc

SEQ ID NO: 5254075 - DNA, 25 bp, Homo sapien
gagtattccctgcttgctatgctca

SEQ ID NO: 5254076 - DNA, 25 bp, Homo sapien
tgtaaccacataggtgatgctgctg

SEQ ID NO: 5254077 - DNA, 25 bp, Homo sapien
ttgctaaattagtggacatattcac

SEQ ID NO: 5254078 - DNA, 25 bp, Homo sapien
aagagcagctgacggcctctaaagg

SEQ ID NO: 5254079 - DNA, 25 bp, Homo sapien
taaaggcagatagcattttgctaaa

SEQ ID NO: 5254080 - DNA, 25 bp, Homo sapien
cctgcaaaagagcagctgacggcct

SEQ ID NO: 5254081 - DNA, 25 bp, Homo sapien
agcagtcctcttgctgatcatttca

SEQ ID NO: 5254082 - DNA, 25 bp, Homo sapien
gcagtcctcttgctgatcatttcag

SEQ ID NO: 5254083 - DNA, 25 bp, Homo sapien
gatggcactccttccgtgacattgg

SEQ ID NO: 5254084 - DNA, 25 bp, Homo sapien
gaccgtctcagtgtgtccgtgggaa

SEQ ID NO: 5254085 - DNA, 25 bp, Homo sapien
tccgtgacattggagaggcctctcg

SEQ ID NO: 5254086 - DNA, 25 bp, Homo sapien
gcctctcgagtgaatcttcctagga

SEQ ID NO: 5254087 - DNA, 25 bp, Homo sapien
tggttctcaattggcaagcgaagga

SEQ ID NO: 5254088 - DNA, 25 bp, Homo sapien
ctcaattggcaagcgaaggagcagc

SEQ ID NO: 5254089 - DNA, 25 bp, Homo sapien
agaagctggttctcaattggcaagc

SEQ ID NO: 5254090 - DNA, 25 bp, Homo sapien
ttttgatggtttgagggtgagaagc

SEQ ID NO: 5254091 - DNA, 25 bp, Homo sapien
acgctggtcatgtcgagcccaggct

SEQ ID NO: 5254092 - DNA, 25 bp, Homo sapien
ggctggccacaaaaacggcctctgt

SEQ ID NO: 5254093 - DNA, 25 bp, Homo sapien
tgagatggaaaacagcaggcgaaga

SEQ ID NO: 5254094 - DNA, 25 bp, Homo sapien
gagaggtccacattgccacgctggt

SEQ ID NO: 5254095 - DNA, 25 bp, Homo sapien
tgcttggtcgctgacggatgtgcct

SEQ ID NO: 5254096 - DNA, 25 bp, Homo sapien
tgtggctgcgtctgcaatccgtctg

SEQ ID NO: 5254097 - DNA, 25 bp, Homo sapien
ggatgtgcctggtgtcctgaagtca

SEQ ID NO: 5254098 - DNA, 25 bp, Homo sapien
tcctttagtcgtagggaaggtggca

SEQ ID NO: 5254099 - DNA, 25 bp, Homo sapien
ctaggatataaaagcttcggcatcc

SEQ ID NO: 5254100 - DNA, 25 bp, Homo sapien
cagatgggtgtttttagaggttggg

SEQ ID NO: 5254101 - DNA, 25 bp, Homo sapien
gcccaggtagtacttctgtgggtga

SEQ ID NO: 5254102 - DNA, 25 bp, Homo sapien
gtagtacttctgtgggtgatggcat

SEQ ID NO: 5254103 - DNA, 25 bp, Homo sapien
tttgtcgcccacagcaatcatctct

SEQ ID NO: 5254104 - DNA, 25 bp, Homo sapien
ttctgacccaggacctcctttctta

SEQ ID NO: 5254105 - DNA, 25 bp, Homo sapien
tgggtgcttgaccagtccggcttcc

SEQ ID NO: 5254106 - DNA, 25 bp, Homo sapien
gtccttcaggcactctcccagaatc

SEQ ID NO: 5254107 - DNA, 25 bp, Homo sapien
gaatgtcgtgtgtctttccatcctg

SEQ ID NO: 5254108 - DNA, 25 bp, Homo sapien
gatctcgtttaaaattgtgggccaa

SEQ ID NO: 5254109 - DNA, 25 bp, Homo sapien
gggcttattcaatcacgtgcaggaa

SEQ ID NO: 5254110 - DNA, 25 bp, Homo sapien
tcataaatgtactctagtggcctga

SEQ ID NO: 5254111 - DNA, 25 bp, Homo sapien
agaccggcatgagtgcattctcaca

SEQ ID NO: 5254112 - DNA, 25 bp, Homo sapien
cacagttgaattttctatatttagg

SEQ ID NO: 5254113 - DNA, 25 bp, Homo sapien
gttcacatcacagaccggcatgagt

SEQ ID NO: 5254114 - DNA, 25 bp, Homo sapien
ccggcatgagtgcattctcacagtt

SEQ ID NO: 5254115 - DNA, 25 bp, Homo sapien
tccttccaacaggatggtgtgggca

SEQ ID NO: 5254116 - DNA, 25 bp, Homo sapien
cttgggctccttccaacaggatggt

SEQ ID NO: 5254117 - DNA, 25 bp, Homo sapien
tgtgggcatacggtgccaaatggcc

SEQ ID NO: 5254118 - DNA, 25 bp, Homo sapien
atggtgtgggcatacggtgccaaat

SEQ ID NO: 5254119 - DNA, 25 bp, Homo sapien
ttacagaatagtgaagtaactggca

SEQ ID NO: 5254120 - DNA, 25 bp, Homo sapien
gaatagtgaagtaactggcaaaggg

SEQ ID NO: 5254121 - DNA, 25 bp, Homo sapien
tacagaatagtgaagtaactggcaa

SEQ ID NO: 5254122 - DNA, 25 bp, Homo sapien
cagaatagtgaagtaactggcaaag

SEQ ID NO: 5254123 - DNA, 25 bp, Homo sapien
ggaacagtaagtcggcttctccagc

SEQ ID NO: 5254124 - DNA, 25 bp, Homo sapien
gcacagcgttcctttcttcaggcat

SEQ ID NO: 5254125 - DNA, 25 bp, Homo sapien
ccaaggtgctgaatagtccccgatt

SEQ ID NO: 5254126 - DNA, 25 bp, Homo sapien
attgctgctgctagcggtgcccctc

SEQ ID NO: 5254127 - DNA, 25 bp, Homo sapien
acacctgtacctactggaatgggaa

SEQ ID NO: 5254128 - DNA, 25 bp, Homo sapien
tggggcctctacatgaaggcagggt

SEQ ID NO: 5254129 - DNA, 25 bp, Homo sapien
ggccttggggcctctacatgaaggc

SEQ ID NO: 5254130 - DNA, 25 bp, Homo sapien
caggagtcgtttgcagaggcagctg

SEQ ID NO: 5254131 - DNA, 25 bp, Homo sapien
agctgtagcacgcactttcttaacc

SEQ ID NO: 5254132 - DNA, 25 bp, Homo sapien
ctgtagcacgcactttcttaaccat

SEQ ID NO: 5254133 - DNA, 25 bp, Homo sapien
gcagctgtagcacgcactttcttaa

SEQ ID NO: 5254134 - DNA, 25 bp, Homo sapien
gggcataaaccttctcgctgccaca

SEQ ID NO: 5254135 - DNA, 25 bp, Homo sapien
aaccttctcgctgccacattgtggg

SEQ ID NO: 5254136 - DNA, 25 bp, Homo sapien
tgaactgggcataaaccttctcgct

SEQ ID NO: 5254137 - DNA, 25 bp, Homo sapien
taaaccttctcgctgccacattgtg

SEQ ID NO: 5254138 - DNA, 25 bp, Homo sapien
cttagatgaactttagctttattga

SEQ ID NO: 5254139 - DNA, 25 bp, Homo sapien
actctttacgccgaattctgttagc

SEQ ID NO: 5254140 - DNA, 25 bp, Homo sapien
cttgggttaattgtatggccgtggt

SEQ ID NO: 5254141 - DNA, 25 bp, Homo sapien
gccgaattctgttagcttgggttaa

SEQ ID NO: 5254142 - DNA, 25 bp, Homo sapien
gcttggcagagctataagttctccc

SEQ ID NO: 5254143 - DNA, 25 bp, Homo sapien
agaggcggccccacgatgcttggca

SEQ ID NO: 5254144 - DNA, 25 bp, Homo sapien
tggaatccaggtatgagcagcagag

SEQ ID NO: 5254145 - DNA, 25 bp, Homo sapien
gagcacagccaacccgtggaatcca

SEQ ID NO: 5254146 - DNA, 25 bp, Homo sapien
ggcaaaagtaggcttcacgttatcc

SEQ ID NO: 5254147 - DNA, 25 bp, Homo sapien
gcttcacgttatccattccagctcg

SEQ ID NO: 5254148 - DNA, 25 bp, Homo sapien
aagtaggcttcacgttatccattcc

SEQ ID NO: 5254149 - DNA, 25 bp, Homo sapien
aaaagtaggcttcacgttatccatt

SEQ ID NO: 5254150 - DNA, 25 bp, Homo sapien
gagtagtttacagacacttttgaaa

SEQ ID NO: 5254151 - DNA, 25 bp, Homo sapien
aatttgcttatacacattctgtgag

SEQ ID NO: 5254152 - DNA, 25 bp, Homo sapien
tatacacatagttttggctgatgca

SEQ ID NO: 5254153 - DNA, 25 bp, Homo sapien
tcttccgtgcatccagtgcaaaaca

SEQ ID NO: 5254154 - DNA, 25 bp, Homo sapien
gtatattcacgttgtggtgcagcca

SEQ ID NO: 5254155 - DNA, 25 bp, Homo sapien
agttatttccaggtgcgcagttcag

SEQ ID NO: 5254156 - DNA, 25 bp, Homo sapien
tggtatagcccatgtcagagcttcc

SEQ ID NO: 5254157 - DNA, 25 bp, Homo sapien
taggtacctcatacagtgtttgccc

SEQ ID NO: 5254158 - DNA, 25 bp, Homo sapien
aaggaggcttgctcgggtgacttcc

SEQ ID NO: 5254159 - DNA, 25 bp, Homo sapien
gaccgagtcgcaggcgccttgcaag

SEQ ID NO: 5254160 - DNA, 25 bp, Homo sapien
tgctccgcggagcagccattaaagc

SEQ ID NO: 5254161 - DNA, 25 bp, Homo sapien
ctggcccgcgggctcagttcatggc

SEQ ID NO: 5254162 - DNA, 25 bp, Homo sapien
tccagcagctcgtagatggagtaga

SEQ ID NO: 5254163 - DNA, 25 bp, Homo sapien
gcgatgacgtgctcccggatctggt

SEQ ID NO: 5254164 - DNA, 25 bp, Homo sapien
tggaccgactcgaagcgctggatct

SEQ ID NO: 5254165 - DNA, 25 bp, Homo sapien
cggatctggttctgcagcaccggct

SEQ ID NO: 5254166 - DNA, 25 bp, Homo sapien
gcgtgtgtggacacccgcacgcaca

SEQ ID NO: 5254167 - DNA, 25 bp, Homo sapien
gcagtgctccctcggcggagcagcc

SEQ ID NO: 5254168 - DNA, 25 bp, Homo sapien
tcgcccggccttgcaagacaagcag

SEQ ID NO: 5254169 - DNA, 25 bp, Homo sapien
taacgctgacgatctatcttcctgg

SEQ ID NO: 5254170 - DNA, 25 bp, Homo sapien
cggccagtctgtattatggacaagc

SEQ ID NO: 5254171 - DNA, 25 bp, Homo sapien
gtctgtattatggacaagccactct

SEQ ID NO: 5254172 - DNA, 25 bp, Homo sapien
gccagtctgtattatggacaagcca

SEQ ID NO: 5254173 - DNA, 25 bp, Homo sapien
ctgtattatggacaagccactctgc

SEQ ID NO: 5254174 - DNA, 25 bp, Homo sapien
ctgatcatcagcagatgggtccagg

SEQ ID NO: 5254175 - DNA, 25 bp, Homo sapien
gccactcatcacgagtcatgcagag

SEQ ID NO: 5254176 - DNA, 25 bp, Homo sapien
gaaccttgctgcaacaccacctgat

SEQ ID NO: 5254177 - DNA, 25 bp, Homo sapien
cgtaacagacgcagagctggagctc

SEQ ID NO: 5254178 - DNA, 25 bp, Homo sapien
gtgccggcaaggtacgagagctcac

SEQ ID NO: 5254179 - DNA, 25 bp, Homo sapien
cattgtggaggtcccgggtgccggc

SEQ ID NO: 5254180 - DNA, 25 bp, Homo sapien
cgggtgccggcaaggtacgagagct

SEQ ID NO: 5254181 - DNA, 25 bp, Homo sapien
aaggaacgcccgcattgtggaggtc

SEQ ID NO: 5254182 - DNA, 25 bp, Homo sapien
ggccatggtctcttgtgaccagaaa

SEQ ID NO: 5254183 - DNA, 25 bp, Homo sapien
taacgatctcttctgcagggggtgg

SEQ ID NO: 5254184 - DNA, 25 bp, Homo sapien
ttactcaaagaatccattaacgatc

SEQ ID NO: 5254185 - DNA, 25 bp, Homo sapien
agacacaagcacgatacccacttct

SEQ ID NO: 5254186 - DNA, 25 bp, Homo sapien
tcttcccaggctgaagtgactctgt

SEQ ID NO: 5254187 - DNA, 25 bp, Homo sapien
gctcttcccaggctgaagtgactct

SEQ ID NO: 5254188 - DNA, 25 bp, Homo sapien
cccgctcttcccaggctgaagtgac

SEQ ID NO: 5254189 - DNA, 25 bp, Homo sapien
ccgctcttcccaggctgaagtgact

SEQ ID NO: 5254190 - DNA, 25 bp, Homo sapien
aaactccttagtcagtcggcacgca

SEQ ID NO: 5254191 - DNA, 25 bp, Homo sapien
caggaggtcctaagtcagggtcgcc

SEQ ID NO: 5254192 - DNA, 25 bp, Homo sapien
tccagggagaaagactcagcaagcg

SEQ ID NO: 5254193 - DNA, 25 bp, Homo sapien
caggcaacggtgtcacttacaaggc

SEQ ID NO: 5254194 - DNA, 25 bp, Homo sapien
tggacatcataacggcaaaccagtt

SEQ ID NO: 5254195 - DNA, 25 bp, Homo sapien
caaagccatagtacccaaagtgtgg

SEQ ID NO: 5254196 - DNA, 25 bp, Homo sapien
gaaatgcacccaatggaacagtcca

SEQ ID NO: 5254197 - DNA, 25 bp, Homo sapien
tccaggatttggttcacccactgct

SEQ ID NO: 5254198 - DNA, 25 bp, Homo sapien
tgtgagcctggctgacggtatcctc

SEQ ID NO: 5254199 - DNA, 25 bp, Homo sapien
ggtatcctccacagcgaaggtgcca

SEQ ID NO: 5254200 - DNA, 25 bp, Homo sapien
tcctgagctgggttgtgaaggcatc

SEQ ID NO: 5254201 - DNA, 25 bp, Homo sapien
tcaggtgggttaaaagaggcttgcc

SEQ ID NO: 5254202 - DNA, 25 bp, Homo sapien
tgagacaccggggtttggttcctga

SEQ ID NO: 5254203 - DNA, 25 bp, Homo sapien
gtccagtcctggatgagacaccggg

SEQ ID NO: 5254204 - DNA, 25 bp, Homo sapien
cacgtgtccagtcctggatgagaca

SEQ ID NO: 5254205 - DNA, 25 bp, Homo sapien
ttggttcctgagcaccttgagccca

SEQ ID NO: 5254206 - DNA, 25 bp, Homo sapien
tgagtatacaagctccccaactgac

SEQ ID NO: 5254207 - DNA, 25 bp, Homo sapien
ggccccttctctgggacatgagtca

SEQ ID NO: 5254208 - DNA, 25 bp, Homo sapien
catggcaacctcaatggcctgagta

SEQ ID NO: 5254209 - DNA, 25 bp, Homo sapien
tgaacatctgatctaaacaccaggt

SEQ ID NO: 5254210 - DNA, 25 bp, Homo sapien
tatctacgcccctgtctttcagaga

SEQ ID NO: 5254211 - DNA, 25 bp, Homo sapien
cagtgcccagcttgaagggtaaaca

SEQ ID NO: 5254212 - DNA, 25 bp, Homo sapien
ggattctcatgtttccaaccaagga

SEQ ID NO: 5254213 - DNA, 25 bp, Homo sapien
agagtcaacttaccacagtgcccag

SEQ ID NO: 5254214 - DNA, 25 bp, Homo sapien
ttaaaggctgcagaatgtctggttc

SEQ ID NO: 5254215 - DNA, 25 bp, Homo sapien
cactaagcagacttttttccgcaaa

SEQ ID NO: 5254216 - DNA, 25 bp, Homo sapien
tagcatccgtgtcaaaagtcaccaa

SEQ ID NO: 5254217 - DNA, 25 bp, Homo sapien
gaatgtctggttcaacactaagcag

SEQ ID NO: 5254218 - DNA, 25 bp, Homo sapien
ggagctgagtggacccgcatgcact

SEQ ID NO: 5254219 - DNA, 25 bp, Homo sapien
agtggacccgcatgcactcactcat

SEQ ID NO: 5254220 - DNA, 25 bp, Homo sapien
gtgcacagggccagaggcgacaaac

SEQ ID NO: 5254221 - DNA, 25 bp, Homo sapien
caggtatgatgggaagccagggtgc

SEQ ID NO: 5254222 - DNA, 25 bp, Homo sapien
tttccagctctcaggttagggtccc

SEQ ID NO: 5254223 - DNA, 25 bp, Homo sapien
aacagtcgtcttcgggcaaaggaga

SEQ ID NO: 5254224 - DNA, 25 bp, Homo sapien
gggtccctgcgctgcaccttcggag

SEQ ID NO: 5254225 - DNA, 25 bp, Homo sapien
tgggcacagcccttatgcactttct

SEQ ID NO: 5254226 - DNA, 25 bp, Homo sapien
taagtattggccctggcgagaatcc

SEQ ID NO: 5254227 - DNA, 25 bp, Homo sapien
ggtcttccgctcctgcaaacgatgg

SEQ ID NO: 5254228 - DNA, 25 bp, Homo sapien
tcgcacgcccgcattgaaagagacg

SEQ ID NO: 5254229 - DNA, 25 bp, Homo sapien
acagcgacggtgtttggaggctcca

SEQ ID NO: 5254230 - DNA, 25 bp, Homo sapien
tgcttcaccagatatcggaggtgtg

SEQ ID NO: 5254231 - DNA, 25 bp, Homo sapien
gcctacgatgcctggtgcttcacca

SEQ ID NO: 5254232 - DNA, 25 bp, Homo sapien
caaatactcagcaatgcctacgatg

SEQ ID NO: 5254233 - DNA, 25 bp, Homo sapien
catgctcagaagtcagtcacccaaa

SEQ ID NO: 5254234 - DNA, 25 bp, Homo sapien
ggtcattcatgtggttctggactcc

SEQ ID NO: 5254235 - DNA, 25 bp, Homo sapien
cggtgagaagacaagccatcgccat

SEQ ID NO: 5254236 - DNA, 25 bp, Homo sapien
ccaaaccggccggtgagaagacaag

SEQ ID NO: 5254237 - DNA, 25 bp, Homo sapien
tgtggttctggactccaaaccggcc

SEQ ID NO: 5254238 - DNA, 25 bp, Homo sapien
gaaatgtctcagttctgcgccagtg

SEQ ID NO: 5254239 - DNA, 25 bp, Homo sapien
cagaaatgtctcagttctgcgccag

SEQ ID NO: 5254240 - DNA, 25 bp, Homo sapien
aatgtctcagttctgcgccagtgca

SEQ ID NO: 5254241 - DNA, 25 bp, Homo sapien
ccagaaatgtctcagttctgcgcca

SEQ ID NO: 5254242 - DNA, 25 bp, Homo sapien
tgtgggcctcgatctgacaacctgc

SEQ ID NO: 5254243 - DNA, 25 bp, Homo sapien
atgtgggcctcgatctgacaacctg

SEQ ID NO: 5254244 - DNA, 25 bp, Homo sapien
ctcgatgagggcacctgcttcttct

SEQ ID NO: 5254245 - DNA, 25 bp, Homo sapien
tcaaaggaatgctcgatgagggcac

SEQ ID NO: 5254246 - DNA, 25 bp, Homo sapien
ccagagcaggaagactctaagggca

SEQ ID NO: 5254247 - DNA, 25 bp, Homo sapien
gggctgaagtcagtgtgatgcacac

SEQ ID NO: 5254248 - DNA, 25 bp, Homo sapien
gctgctgtggcattccaaatggagg

SEQ ID NO: 5254249 - DNA, 25 bp, Homo sapien
acagtaggtcctcctttgtggggct

SEQ ID NO: 5254250 - DNA, 25 bp, Homo sapien
cagcacacggagaggagatattccc

SEQ ID NO: 5254251 - DNA, 25 bp, Homo sapien
tcatagcacagaggcgaccaaagcc

SEQ ID NO: 5254252 - DNA, 25 bp, Homo sapien
tatcacaggctgtgcacggacagtg

SEQ ID NO: 5254253 - DNA, 25 bp, Homo sapien
ggcacagcacgaccacttgggaaca

SEQ ID NO: 5254254 - DNA, 25 bp, Homo sapien
aaggtcttaatcatgtcactgactt

SEQ ID NO: 5254255 - DNA, 25 bp, Homo sapien
aggtcttaatcatgtcactgacttc

SEQ ID NO: 5254256 - DNA, 25 bp, Homo sapien
aaaggtcttaatcatgtcactgact

SEQ ID NO: 5254257 - DNA, 25 bp, Homo sapien
tgttatgtaaattttgcctcaatat

SEQ ID NO: 5254258 - DNA, 25 bp, Homo sapien
caagtgttcacttttaaatgcttaa

SEQ ID NO: 5254259 - DNA, 25 bp, Homo sapien
cacgcctggccaagtgttcactttt

SEQ ID NO: 5254260 - DNA, 25 bp, Homo sapien
ttgcctcaatattttttaacgacaa

SEQ ID NO: 5254261 - DNA, 25 bp, Homo sapien
cacacctcacgggattactgtaagg

SEQ ID NO: 5254262 - DNA, 25 bp, Homo sapien
agttattcaccatacaaggagcagg

SEQ ID NO: 5254263 - DNA, 25 bp, Homo sapien
tgtcaagccatgtggtaaacacagc

SEQ ID NO: 5254264 - DNA, 25 bp, Homo sapien
ttacaccctaaggtcgagagcaaga

SEQ ID NO: 5254265 - DNA, 25 bp, Homo sapien
tcctgagttcaggcaattctgcctc

SEQ ID NO: 5254266 - DNA, 25 bp, Homo sapien
accaccacacccagctagtttttgt

SEQ ID NO: 5254267 - DNA, 25 bp, Homo sapien
ctcctgagttcaggcaattctgcct

SEQ ID NO: 5254268 - DNA, 25 bp, Homo sapien
caccaccacacccagctagtttttg

SEQ ID NO: 5254269 - DNA, 25 bp, Homo sapien
tccatatccctaggaggtgcagaca

SEQ ID NO: 5254270 - DNA, 25 bp, Homo sapien
agcttcaacatccagcctcgcggag

SEQ ID NO: 5254271 - DNA, 25 bp, Homo sapien
cagacactccctggtcaacttggca

SEQ ID NO: 5254272 - DNA, 25 bp, Homo sapien
ggtgcagacaccgggaatctgtgca

SEQ ID NO: 5254273 - DNA, 25 bp, Homo sapien
ctcccaagccgtctgagtcaaggct

SEQ ID NO: 5254274 - DNA, 25 bp, Homo sapien
ttccgtccacatgccgggaggtgcc

SEQ ID NO: 5254275 - DNA, 25 bp, Homo sapien
cagatcccttacaaaccttcagttt

SEQ ID NO: 5254276 - DNA, 25 bp, Homo sapien
tcacctgggtcattccgtccacatg

SEQ ID NO: 5254277 - DNA, 25 bp, Homo sapien
gctccgaggacagcagtgagctcat

SEQ ID NO: 5254278 - DNA, 25 bp, Homo sapien
ctgctccgaggacagcagtgagctc

SEQ ID NO: 5254279 - DNA, 25 bp, Homo sapien
tgctccgaggacagcagtgagctca

SEQ ID NO: 5254280 - DNA, 25 bp, Homo sapien
acaggccctcggccaccgaaatgaa

SEQ ID NO: 5254281 - DNA, 25 bp, Homo sapien
atgaacagctgtgtgggttctcgca

SEQ ID NO: 5254282 - DNA, 25 bp, Homo sapien
acagctgtgtgggttctcgcagcat

SEQ ID NO: 5254283 - DNA, 25 bp, Homo sapien
caggccctcggccaccgaaatgaac

SEQ ID NO: 5254284 - DNA, 25 bp, Homo sapien
cctggggcaggcgctctctctgaac

SEQ ID NO: 5254285 - DNA, 25 bp, Homo sapien
gggcgactgaccgtgccatcacatc

SEQ ID NO: 5254286 - DNA, 25 bp, Homo sapien
ggtaccagcattgcctccaccaggg

SEQ ID NO: 5254287 - DNA, 25 bp, Homo sapien
gctccacgtcgtgggtaccagcatt

SEQ ID NO: 5254288 - DNA, 25 bp, Homo sapien
tgcggtaagacccacctaactagcg

SEQ ID NO: 5254289 - DNA, 25 bp, Homo sapien
cagttccgcagtggtgcacagacaa

SEQ ID NO: 5254290 - DNA, 25 bp, Homo sapien
gcgaccaagaattccagtgctcaaa

SEQ ID NO: 5254291 - DNA, 25 bp, Homo sapien
aataatgtattgagcactgcgaagc

SEQ ID NO: 5254292 - DNA, 25 bp, Homo sapien
ttagctagaatcttcgcatgtggcg

SEQ ID NO: 5254293 - DNA, 25 bp, Homo sapien
tggtgggtaccagataatgccgtgc

SEQ ID NO: 5254294 - DNA, 25 bp, Homo sapien
tgtttccagccgttagggacccaca

SEQ ID NO: 5254295 - DNA, 25 bp, Homo sapien
ggccggcgtcgtctggtgaaaaaca

SEQ ID NO: 5254296 - DNA, 25 bp, Homo sapien
gaaattctagagtcattgactaatt

SEQ ID NO: 5254297 - DNA, 25 bp, Homo sapien
tcctctatactcatcggatctgcgc

SEQ ID NO: 5254298 - DNA, 25 bp, Homo sapien
caacacagggcgtacaccgcgtcct

SEQ ID NO: 5254299 - DNA, 25 bp, Homo sapien
tcggatctgcgctgaaattctagag

SEQ ID NO: 5254300 - DNA, 25 bp, Homo sapien
acagggacttctcctgctagggact

SEQ ID NO: 5254301 - DNA, 25 bp, Homo sapien
ttttaacagggacttctcctgctag

SEQ ID NO: 5254302 - DNA, 25 bp, Homo sapien
cctgctagggactcaatttcattgt

SEQ ID NO: 5254303 - DNA, 25 bp, Homo sapien
taacagggacttctcctgctaggga

SEQ ID NO: 5254304 - DNA, 25 bp, Homo sapien
gcttcccgctcattctgaagctctc

SEQ ID NO: 5254305 - DNA, 25 bp, Homo sapien
gaatctcgaatgatcgtgcccagca

SEQ ID NO: 5254306 - DNA, 25 bp, Homo sapien
tcgaatgatcgtgcccagcagccct

SEQ ID NO: 5254307 - DNA, 25 bp, Homo sapien
ctcttggaatctcgaatgatcgtgc

SEQ ID NO: 5254308 - DNA, 25 bp, Homo sapien
catgggcacagtttcaatgaggaag

SEQ ID NO: 5254309 - DNA, 25 bp, Homo sapien
aacacactagcccatccagggagct

SEQ ID NO: 5254310 - DNA, 25 bp, Homo sapien
acagtttcaatgaggaagacggtgc

SEQ ID NO: 5254311 - DNA, 25 bp, Homo sapien
gcaggcttccggaggtcatgggcac

SEQ ID NO: 5254312 - DNA, 25 bp, Homo sapien
cagtgaaccaaatttgttgtaaaat

SEQ ID NO: 5254313 - DNA, 25 bp, Homo sapien
tgactattttcaagtcggccccagt

SEQ ID NO: 5254314 - DNA, 25 bp, Homo sapien
ccaaatttgttgtaaaatatcacat

SEQ ID NO: 5254315 - DNA, 25 bp, Homo sapien
ctattttcaagtcggccccagtgaa

SEQ ID NO: 5254316 - DNA, 25 bp, Homo sapien
gaacagcctcctttatttgagcgca

SEQ ID NO: 5254317 - DNA, 25 bp, Homo sapien
tgaacagcctcctttatttgagcgc

SEQ ID NO: 5254318 - DNA, 25 bp, Homo sapien
aacagcctcctttatttgagcgcac

SEQ ID NO: 5254319 - DNA, 25 bp, Homo sapien
cttgaacagcctcctttatttgagc

SEQ ID NO: 5254320 - DNA, 25 bp, Homo sapien
taagaactctttacatatagaagac

SEQ ID NO: 5254321 - DNA, 25 bp, Homo sapien
gttactctttaatcaacaaagccaa

SEQ ID NO: 5254322 - DNA, 25 bp, Homo sapien
agtcacctgtcattttaattgttac

SEQ ID NO: 5254323 - DNA, 25 bp, Homo sapien
atcttaattgctcctttgtttcttc

SEQ ID NO: 5254324 - DNA, 25 bp, Homo sapien
agagcagcgtggccgtgaagaagct

SEQ ID NO: 5254325 - DNA, 25 bp, Homo sapien
gagatgggcggacatgcaggagagc

SEQ ID NO: 5254326 - DNA, 25 bp, Homo sapien
aggcaccaggtctagatccattcat

SEQ ID NO: 5254327 - DNA, 25 bp, Homo sapien
caccaggtctagatccattcatcac

SEQ ID NO: 5254328 - DNA, 25 bp, Homo sapien
catccaatgatcacacctgctgtgt

SEQ ID NO: 5254329 - DNA, 25 bp, Homo sapien
caacaccaagagtctagagcaggca

SEQ ID NO: 5254330 - DNA, 25 bp, Homo sapien
ggcacacggttctgcagagtgtata

SEQ ID NO: 5254331 - DNA, 25 bp, Homo sapien
gagcaggcacctggaatgattccga

SEQ ID NO: 5254332 - DNA, 25 bp, Homo sapien
ccaatttttcgctcataggatacag

SEQ ID NO: 5254333 - DNA, 25 bp, Homo sapien
gctctgctaatattctacttccccg

SEQ ID NO: 5254334 - DNA, 25 bp, Homo sapien
taatacttggtcacatgttgtcaca

SEQ ID NO: 5254335 - DNA, 25 bp, Homo sapien
ttctgtacagtatggaggcagacac

SEQ ID NO: 5254336 - DNA, 25 bp, Homo sapien
aaaccctctctaccagcagtgatgg

SEQ ID NO: 5254337 - DNA, 25 bp, Homo sapien
agtgatggcccacccggaggctgtc

SEQ ID NO: 5254338 - DNA, 25 bp, Homo sapien
tccttggctagctcgcacagcctgg

SEQ ID NO: 5254339 - DNA, 25 bp, Homo sapien
caggtataaccaggaccacgcagtc

SEQ ID NO: 5254340 - DNA, 25 bp, Homo sapien
tgactactgcaagcgtaatggacgt

SEQ ID NO: 5254341 - DNA, 25 bp, Homo sapien
cagttgctgactactgcaagcgtaa

SEQ ID NO: 5254342 - DNA, 25 bp, Homo sapien
caagcgtaatggacgtggcgaaaca

SEQ ID NO: 5254343 - DNA, 25 bp, Homo sapien
caggcagttgctgactactgcaagc

SEQ ID NO: 5254344 - DNA, 25 bp, Homo sapien
ggctgaagctgtttaccgaagagaa

SEQ ID NO: 5254345 - DNA, 25 bp, Homo sapien
tggtggtaggtaacagacagcagac

SEQ ID NO: 5254346 - DNA, 25 bp, Homo sapien
gaaatgcaactcctagctggtctct

SEQ ID NO: 5254347 - DNA, 25 bp, Homo sapien
gctggtctctaattaagctgggcct

SEQ ID NO: 5254348 - DNA, 25 bp, Homo sapien
ttccagaacgtgaaggctgctttgc

SEQ ID NO: 5254349 - DNA, 25 bp, Homo sapien
ccctgcttccagaacgtgaaggctg

SEQ ID NO: 5254350 - DNA, 25 bp, Homo sapien
agactgacccccctttgtggccagg

SEQ ID NO: 5254351 - DNA, 25 bp, Homo sapien
tgctttgcaatagactgacccccct

SEQ ID NO: 5254352 - DNA, 25 bp, Homo sapien
aaggattccatccagtacttcccaa

SEQ ID NO: 5254353 - DNA, 25 bp, Homo sapien
tcctatgacatctacaagtctgcaa

SEQ ID NO: 5254354 - DNA, 25 bp, Homo sapien
gctcaaataatcctatgacatctac

SEQ ID NO: 5254355 - DNA, 25 bp, Homo sapien
aggattccatccagtacttcccaac

SEQ ID NO: 5254356 - DNA, 25 bp, Homo sapien
gaggaggcttcacaaggctgcaagc

SEQ ID NO: 5254357 - DNA, 25 bp, Homo sapien
tctcaaggcctaagggtggcccaag

SEQ ID NO: 5254358 - DNA, 25 bp, Homo sapien
tcttgctaatatggttggtacaggc

SEQ ID NO: 5254359 - DNA, 25 bp, Homo sapien
gaagcgacacaccaacacaggaaaa

SEQ ID NO: 5254360 - DNA, 25 bp, Homo sapien
gagttcaggaaaggtgccagcccta

SEQ ID NO: 5254361 - DNA, 25 bp, Homo sapien
ttgatctggcaggaaaaaagacccc

SEQ ID NO: 5254362 - DNA, 25 bp, Homo sapien
tgcagtatcttagcagaaccgcgtc

SEQ ID NO: 5254363 - DNA, 25 bp, Homo sapien
taatgctgcgcgagagaggaagact

SEQ ID NO: 5254364 - DNA, 25 bp, Homo sapien
acggagatgcggtagacagtctttc

SEQ ID NO: 5254365 - DNA, 25 bp, Homo sapien
gcgcggcatcgcgtccgcgggtggc

SEQ ID NO: 5254366 - DNA, 25 bp, Homo sapien
tccgcgggtggcgacgcgggctcgc

SEQ ID NO: 5254367 - DNA, 25 bp, Homo sapien
gggctcgccactgccgtccaacaag

SEQ ID NO: 5254368 - DNA, 25 bp, Homo sapien
agcccggcgcggccagctgctcctt

SEQ ID NO: 5254369 - DNA, 25 bp, Homo sapien
ctcccgggcgcgtccggggagcgcg

SEQ ID NO: 5254370 - DNA, 25 bp, Homo sapien
cggagcccggcgcggccagctgctc

SEQ ID NO: 5254371 - DNA, 25 bp, Homo sapien
ctcaagcctcccgggcgcgtccggg

SEQ ID NO: 5254372 - DNA, 25 bp, Homo sapien
gggtgcggaaggtgcggaaatccca

SEQ ID NO: 5254373 - DNA, 25 bp, Homo sapien
cggaaggtgcggaaatcccaagcgc

SEQ ID NO: 5254374 - DNA, 25 bp, Homo sapien
aaggtgcggaaatcccaagcgcgcg

SEQ ID NO: 5254375 - DNA, 25 bp, Homo sapien
tgcggaaatcccaagcgcgcggccg

SEQ ID NO: 5254376 - DNA, 25 bp, Homo sapien
ccggacgcgggcgagccgcgtccct

SEQ ID NO: 5254377 - DNA, 25 bp, Homo sapien
gtccgcgggttccaggccgcgtgcg

SEQ ID NO: 5254378 - DNA, 25 bp, Homo sapien
caggtccgcgggttccaggccgcgt

SEQ ID NO: 5254379 - DNA, 25 bp, Homo sapien
cgggcgagccgcgtccctcctcctc

SEQ ID NO: 5254380 - DNA, 25 bp, Homo sapien
ttccgccgcccagtgtccggccttg

SEQ ID NO: 5254381 - DNA, 25 bp, Homo sapien
tcaggcccgctccagtgcctgaagc

SEQ ID NO: 5254382 - DNA, 25 bp, Homo sapien
agtgtccggccttgcggcgcctcag

SEQ ID NO: 5254383 - DNA, 25 bp, Homo sapien
ctgctgtggcgccttccgccgccca

SEQ ID NO: 5254384 - DNA, 25 bp, Homo sapien
tcgcgggctccagggtggtcccggc

SEQ ID NO: 5254385 - DNA, 25 bp, Homo sapien
cgtggcggtcgcgggctccagggtg

SEQ ID NO: 5254386 - DNA, 25 bp, Homo sapien
gctccagggtggtcccggccgcggc

SEQ ID NO: 5254387 - DNA, 25 bp, Homo sapien
ctgcgtggcggtcgcgggctccagg

SEQ ID NO: 5254388 - DNA, 25 bp, Homo sapien
gtccgagagcgcgtcgttcttgctg

SEQ ID NO: 5254389 - DNA, 25 bp, Homo sapien
cagggtgttgcgcttctccgaggcg

SEQ ID NO: 5254390 - DNA, 25 bp, Homo sapien
cgttcccaacgctccaggtccgaga

SEQ ID NO: 5254391 - DNA, 25 bp, Homo sapien
cacctcgcccacgtccagggtgttg

SEQ ID NO: 5254392 - DNA, 25 bp, Homo sapien
tgaagtagccgcgtggccgcgaggc

SEQ ID NO: 5254393 - DNA, 25 bp, Homo sapien
tccagcgtgcggttcttgctcttac

SEQ ID NO: 5254394 - DNA, 25 bp, Homo sapien
gcgaagatgccgctgaagaagcgca

SEQ ID NO: 5254395 - DNA, 25 bp, Homo sapien
tgcaggtcgctgttgtccagcgtgc

SEQ ID NO: 5254396 - DNA, 25 bp, Homo sapien
atgctctcggcgctggacgagtgcg

SEQ ID NO: 5254397 - DNA, 25 bp, Homo sapien
gatgctctcggcgctggacgagtgc

SEQ ID NO: 5254398 - DNA, 25 bp, Homo sapien
cggggagccgtcgatgctctcggcg

SEQ ID NO: 5254399 - DNA, 25 bp, Homo sapien
gcggggagccgtcgatgctctcggc

SEQ ID NO: 5254400 - DNA, 25 bp, Homo sapien
catagccgctgcggaaccggcaagt

SEQ ID NO: 5254401 - DNA, 25 bp, Homo sapien
cacgtgcaggctcccgacccgggag

SEQ ID NO: 5254402 - DNA, 25 bp, Homo sapien
tcccatagccgctgcggaaccggca

SEQ ID NO: 5254403 - DNA, 25 bp, Homo sapien
agttcgcatccctcgaggccacgtg

SEQ ID NO: 5254404 - DNA, 25 bp, Homo sapien
ggcgccaggatgaatgccggcttct

SEQ ID NO: 5254405 - DNA, 25 bp, Homo sapien
agctcaataccgagggccacggagt

SEQ ID NO: 5254406 - DNA, 25 bp, Homo sapien
gtagcactaacagggagacgactcg

SEQ ID NO: 5254407 - DNA, 25 bp, Homo sapien
gccacggagtcagctgagtccacat

SEQ ID NO: 5254408 - DNA, 25 bp, Homo sapien
cgaaatgctaccaaaaggttaactg

SEQ ID NO: 5254409 - DNA, 25 bp, Homo sapien
tgatgcgcagttgatggagtctgtg

SEQ ID NO: 5254410 - DNA, 25 bp, Homo sapien
atgctaccaaaaggttaactgattc

SEQ ID NO: 5254411 - DNA, 25 bp, Homo sapien
cagggtgatgcgcagttgatggagt

SEQ ID NO: 5254412 - DNA, 25 bp, Homo sapien
acagaggagagaagacaggacagta

SEQ ID NO: 5254413 - DNA, 25 bp, Homo sapien
tactgtcctgtcttctctcctctgt

SEQ ID NO: 5254414 - DNA, 25 bp, Homo sapien
agaacactctaaagacaccgaatgt

SEQ ID NO: 5254415 - DNA, 25 bp, Homo sapien
gttccagggccggcccagacggcat

SEQ ID NO: 5254416 - DNA, 25 bp, Homo sapien
aatgttctggatgggcatagccagt

SEQ ID NO: 5254417 - DNA, 25 bp, Homo sapien
actctaaagacaccgaatgttctgg

SEQ ID NO: 5254418 - DNA, 25 bp, Homo sapien
tacaccctggtactgaatgagagag

SEQ ID NO: 5254419 - DNA, 25 bp, Homo sapien
taatcacctggcgacatgagtgcag

SEQ ID NO: 5254420 - DNA, 25 bp, Homo sapien
agttctagggctatcaccaacaagg

SEQ ID NO: 5254421 - DNA, 25 bp, Homo sapien
tcaatctcaagtgcctgacggtcag

SEQ ID NO: 5254422 - DNA, 25 bp, Homo sapien
ttacaagtgtaaaactccaagagcg

SEQ ID NO: 5254423 - DNA, 25 bp, Homo sapien
gcacaggttgccatgggcagaaagt

SEQ ID NO: 5254424 - DNA, 25 bp, Homo sapien
gctgcagttactgaggctaaactcc

SEQ ID NO: 5254425 - DNA, 25 bp, Homo sapien
tccaagagcgggaatttctgagaaa

SEQ ID NO: 5254426 - DNA, 25 bp, Homo sapien
cattcctggctgttcacgaaggcat

SEQ ID NO: 5254427 - DNA, 25 bp, Homo sapien
agtggccgatcctacagggagcctc

SEQ ID NO: 5254428 - DNA, 25 bp, Homo sapien
tccaagtggccgatcctacagggag

SEQ ID NO: 5254429 - DNA, 25 bp, Homo sapien
agcctccaagtggccgatcctacag

SEQ ID NO: 5254430 - DNA, 25 bp, Homo sapien
tgcttgggagctggataccccccat

SEQ ID NO: 5254431 - DNA, 25 bp, Homo sapien
gcctcaacagctgcaacggcatcag

SEQ ID NO: 5254432 - DNA, 25 bp, Homo sapien
tgcaacggcatcagcaatgctggta

SEQ ID NO: 5254433 - DNA, 25 bp, Homo sapien
atgctggtataaacactggtttggc

SEQ ID NO: 5254434 - DNA, 25 bp, Homo sapien
gctggtataaacactggtttggcat

SEQ ID NO: 5254435 - DNA, 25 bp, Homo sapien
taccggtgcaccagggcagacttgc

SEQ ID NO: 5254436 - DNA, 25 bp, Homo sapien
tatgtgcccgtcaggtaccggtgca

SEQ ID NO: 5254437 - DNA, 25 bp, Homo sapien
gccgctggccaagttacccacaatt

SEQ ID NO: 5254438 - DNA, 25 bp, Homo sapien
tcctggacatatgtgcccgtcaggt

SEQ ID NO: 5254439 - DNA, 25 bp, Homo sapien
ttaagtttgcaactgcctgccaaac

SEQ ID NO: 5254440 - DNA, 25 bp, Homo sapien
aagtttgcaactgcctgccaaacag

SEQ ID NO: 5254441 - DNA, 25 bp, Homo sapien
ttgcaactgcctgccaaacagcata

SEQ ID NO: 5254442 - DNA, 25 bp, Homo sapien
gtttgcaactgcctgccaaacagca

SEQ ID NO: 5254443 - DNA, 25 bp, Homo sapien
cctcacctggatagagggtctttgc

SEQ ID NO: 5254444 - DNA, 25 bp, Homo sapien
ggttgaattgtatcccctagaagat

SEQ ID NO: 5254445 - DNA, 25 bp, Homo sapien
taacccctgggacctatggtgtgac

SEQ ID NO: 5254446 - DNA, 25 bp, Homo sapien
tagaagatacgttcaagccctaacc

SEQ ID NO: 5254447 - DNA, 25 bp, Homo sapien
aggtccttctggcacacaagctaac

SEQ ID NO: 5254448 - DNA, 25 bp, Homo sapien
gaacgggtctcagagcaatgactca

SEQ ID NO: 5254449 - DNA, 25 bp, Homo sapien
agatctcaggaggacgccacactct

SEQ ID NO: 5254450 - DNA, 25 bp, Homo sapien
caagctaacctgcacagctcgggag

SEQ ID NO: 5254451 - DNA, 25 bp, Homo sapien
cgggaacaaagacttgcaggtggct

SEQ ID NO: 5254452 - DNA, 25 bp, Homo sapien
gagaacacatttactaccccgatga

SEQ ID NO: 5254453 - DNA, 25 bp, Homo sapien
gaaagggtttttggagctgacagct

SEQ ID NO: 5254454 - DNA, 25 bp, Homo sapien
tatttaagatacacgtgctcctgag

SEQ ID NO: 5254455 - DNA, 25 bp, Homo sapien
gctttggggtgaattcaaacatacc

SEQ ID NO: 5254456 - DNA, 25 bp, Homo sapien
ctttagcacccaagttcaaaccgtg

SEQ ID NO: 5254457 - DNA, 25 bp, Homo sapien
accgtgcaagctgggtgtaacgtga

SEQ ID NO: 5254458 - DNA, 25 bp, Homo sapien
cacccaagttcaaaccgtgcaagct

SEQ ID NO: 5254459 - DNA, 25 bp, Homo sapien
gaaaccattgaaccctgattgctgg

SEQ ID NO: 5254460 - DNA, 25 bp, Homo sapien
gcagacacggtcttacaaggacgca

SEQ ID NO: 5254461 - DNA, 25 bp, Homo sapien
tacattgatttaagagcacgcacac

SEQ ID NO: 5254462 - DNA, 25 bp, Homo sapien
tctaatcggtgctgagtggaacgtg

SEQ ID NO: 5254463 - DNA, 25 bp, Homo sapien
gggctggcgaactgcctgtgtaaaa

SEQ ID NO: 5254464 - DNA, 25 bp, Homo sapien
gaaagtgcctaactcctcatctggg

SEQ ID NO: 5254465 - DNA, 25 bp, Homo sapien
taacagcaccatgacctgagacgga

SEQ ID NO: 5254466 - DNA, 25 bp, Homo sapien
gggacccttggcagttactcggctg

SEQ ID NO: 5254467 - DNA, 25 bp, Homo sapien
catctttttcgtctcctgactgagg

SEQ ID NO: 5254468 - DNA, 25 bp, Homo sapien
ttggaagtgaatggccggcaaaggc

SEQ ID NO: 5254469 - DNA, 25 bp, Homo sapien
ttttcgtctcctgactgaggaatgg

SEQ ID NO: 5254470 - DNA, 25 bp, Homo sapien
tgaatggccggcaaaggctctccgg

SEQ ID NO: 5254471 - DNA, 25 bp, Homo sapien
gactgctgactatttccatgggtga

SEQ ID NO: 5254472 - DNA, 25 bp, Homo sapien
tactacacaaaggtaccagcagtga

SEQ ID NO: 5254473 - DNA, 25 bp, Homo sapien
tgaggaccctgcatgtggcgactgc

SEQ ID NO: 5254474 - DNA, 25 bp, Homo sapien
aaatttagccaaatcagatttcact

SEQ ID NO: 5254475 - DNA, 25 bp, Homo sapien
tccatgtgtagagcccactgtttcc

SEQ ID NO: 5254476 - DNA, 25 bp, Homo sapien
ggccaccccggttctttcagcagat

SEQ ID NO: 5254477 - DNA, 25 bp, Homo sapien
gatgacatcgggagaaaatctgcaa

SEQ ID NO: 5254478 - DNA, 25 bp, Homo sapien
gagggacctcatggcagtgtctgat

SEQ ID NO: 5254479 - DNA, 25 bp, Homo sapien
ttgtattcataagcgagtcgaggtc

SEQ ID NO: 5254480 - DNA, 25 bp, Homo sapien
gttcagggttcccagaacatgtgga

SEQ ID NO: 5254481 - DNA, 25 bp, Homo sapien
tctggttcaccccaaggcaagtgtt

SEQ ID NO: 5254482 - DNA, 25 bp, Homo sapien
acatgtggaaactgcgctgggtgcc

SEQ ID NO: 5254483 - DNA, 25 bp, Homo sapien
ctgagtttgaagcagaatggagtgc

SEQ ID NO: 5254484 - DNA, 25 bp, Homo sapien
ttggctttctgcactgagtttgaag

SEQ ID NO: 5254485 - DNA, 25 bp, Homo sapien
gtgagaacggaacccgcatcccttc

SEQ ID NO: 5254486 - DNA, 25 bp, Homo sapien
ggaatcctcagcttagagcagaggg

SEQ ID NO: 5254487 - DNA, 25 bp, Homo sapien
ggcccatgtaatggatctgccatga

SEQ ID NO: 5254488 - DNA, 25 bp, Homo sapien
tgtaatggatctgccatgagtgatg

SEQ ID NO: 5254489 - DNA, 25 bp, Homo sapien
atggatctgccatgagtgatgtgca

SEQ ID NO: 5254490 - DNA, 25 bp, Homo sapien
catgtaatggatctgccatgagtga

SEQ ID NO: 5254491 - DNA, 25 bp, Homo sapien
ttttacatccagtttcaagctgaat

SEQ ID NO: 5254492 - DNA, 25 bp, Homo sapien
gcaggtctggttcgcccaccggtat

SEQ ID NO: 5254493 - DNA, 25 bp, Homo sapien
ccaccggtatcctcccagcacctgg

SEQ ID NO: 5254494 - DNA, 25 bp, Homo sapien
catccagtttcaagctgaatgtagc

SEQ ID NO: 5254495 - DNA, 25 bp, Homo sapien
ggcgttggcccgttcccgcgagctc

SEQ ID NO: 5254496 - DNA, 25 bp, Homo sapien
tggcccgttcccgcgagctcctgcc

SEQ ID NO: 5254497 - DNA, 25 bp, Homo sapien
gcccgttcccgcgagctcctgccat

SEQ ID NO: 5254498 - DNA, 25 bp, Homo sapien
cgttggcccgttcccgcgagctcct

SEQ ID NO: 5254499 - DNA, 25 bp, Homo sapien
tctgtccatcaacgacaatctcttt

SEQ ID NO: 5254500 - DNA, 25 bp, Homo sapien
catcaacgacaatctctttcttgaa

SEQ ID NO: 5254501 - DNA, 25 bp, Homo sapien
agcagatagctctgtccatcaacga

SEQ ID NO: 5254502 - DNA, 25 bp, Homo sapien
ccttcatctctgatcagcagcagat

SEQ ID NO: 5254503 - DNA, 25 bp, Homo sapien
gttggccattcgactgtagtagtgg

SEQ ID NO: 5254504 - DNA, 25 bp, Homo sapien
ctgtagtagtggtaaacggtctgga

SEQ ID NO: 5254505 - DNA, 25 bp, Homo sapien
taacagcgtccacccacatggcaaa

SEQ ID NO: 5254506 - DNA, 25 bp, Homo sapien
tgaagacaaatataacagcgtccac

SEQ ID NO: 5254507 - DNA, 25 bp, Homo sapien
ggtttcaccatagaatcaaatcagg

SEQ ID NO: 5254508 - DNA, 25 bp, Homo sapien
tcataaagcacctgggatatgtgtg

SEQ ID NO: 5254509 - DNA, 25 bp, Homo sapien
tcccaaaaaagtgagcgttcagtag

SEQ ID NO: 5254510 - DNA, 25 bp, Homo sapien
tcaaaacaatctgcacacgaacatc

SEQ ID NO: 5254511 - DNA, 25 bp, Homo sapien
ccacggatgcactgagtgtcttctg

SEQ ID NO: 5254512 - DNA, 25 bp, Homo sapien
agcacgggcttcacggagagcaagt

SEQ ID NO: 5254513 - DNA, 25 bp, Homo sapien
gaaatgccaggtgccttcctagaca

SEQ ID NO: 5254514 - DNA, 25 bp, Homo sapien
agccaaacccctgaaagagcagccg

SEQ ID NO: 5254515 - DNA, 25 bp, Homo sapien
tagacaacctgatccctcttttgtc

SEQ ID NO: 5254516 - DNA, 25 bp, Homo sapien
caaaacgggcttctgcactcgcatt

SEQ ID NO: 5254517 - DNA, 25 bp, Homo sapien
gcatgctcgcttggtttctgtcaaa

SEQ ID NO: 5254518 - DNA, 25 bp, Homo sapien
cttcaaaggtgcaccacgggaatct

SEQ ID NO: 5254519 - DNA, 25 bp, Homo sapien
tagcatccacccagcttccatgaga

SEQ ID NO: 5254520 - DNA, 25 bp, Homo sapien
aggtggggcgcagtaggcactgcct

SEQ ID NO: 5254521 - DNA, 25 bp, Homo sapien
tatatgagggagatgtaggggtgag

SEQ ID NO: 5254522 - DNA, 25 bp, Homo sapien
gcaggtggggcgcagtaggcactgc

SEQ ID NO: 5254523 - DNA, 25 bp, Homo sapien
aggacagctggtgtatatgagggag

SEQ ID NO: 5254524 - DNA, 25 bp, Homo sapien
tacaggagcgcttctgaaactgcaa

SEQ ID NO: 5254525 - DNA, 25 bp, Homo sapien
gtttgcctcccaactaagagactca

SEQ ID NO: 5254526 - DNA, 25 bp, Homo sapien
gaattgtagagcatcgtttgcctcc

SEQ ID NO: 5254527 - DNA, 25 bp, Homo sapien
gaccaaaaagtaacggcacagtgac

SEQ ID NO: 5254528 - DNA, 25 bp, Homo sapien
ttggagagcttcctcgccctggcgt

SEQ ID NO: 5254529 - DNA, 25 bp, Homo sapien
gcccgtatgtagcacacgtctcgta

SEQ ID NO: 5254530 - DNA, 25 bp, Homo sapien
cctcgggttagcagaacttatggca

SEQ ID NO: 5254531 - DNA, 25 bp, Homo sapien
caccgtttcaggtcgttggagagct

SEQ ID NO: 5254532 - DNA, 25 bp, Homo sapien
taaactcccagccacgcgcatttac

SEQ ID NO: 5254533 - DNA, 25 bp, Homo sapien
caggaggtgcccgagatatacgtta

SEQ ID NO: 5254534 - DNA, 25 bp, Homo sapien
tcaccagcacggcttgaaatgaggt

SEQ ID NO: 5254535 - DNA, 25 bp, Homo sapien
acaggacattctcccgacagaggca

SEQ ID NO: 5254536 - DNA, 25 bp, Homo sapien
gaaatgaggtttactccccacagga

SEQ ID NO: 5254537 - DNA, 25 bp, Homo sapien
acctgtgggcaaagctggtgtgttc

SEQ ID NO: 5254538 - DNA, 25 bp, Homo sapien
aataaactgagtcggcgagcaggca

SEQ ID NO: 5254539 - DNA, 25 bp, Homo sapien
tggttaagtcgaggctctcaggtcc

SEQ ID NO: 5254540 - DNA, 25 bp, Homo sapien
caaaatgtcccggtgctgtggttaa

SEQ ID NO: 5254541 - DNA, 25 bp, Homo sapien
tctctgcacacgtatgagcatctgt

SEQ ID NO: 5254542 - DNA, 25 bp, Homo sapien
agaaattgccagaagagatcacagg

SEQ ID NO: 5254543 - DNA, 25 bp, Homo sapien
cttgaccccatattgctaaggccag

SEQ ID NO: 5254544 - DNA, 25 bp, Homo sapien
tataggttccttgggtgtcactcta

SEQ ID NO: 5254545 - DNA, 25 bp, Homo sapien
aattctgcgtgagcacttgtgtgcc

SEQ ID NO: 5254546 - DNA, 25 bp, Homo sapien
tagggatgctccacgtgtatgtgaa

SEQ ID NO: 5254547 - DNA, 25 bp, Homo sapien
aaaacctggaatccgaaattctgcg

SEQ ID NO: 5254548 - DNA, 25 bp, Homo sapien
tataaagtctcacaatgcatgacag

SEQ ID NO: 5254549 - DNA, 25 bp, Homo sapien
aggtcttgcatgaaccgcttcatca

SEQ ID NO: 5254550 - DNA, 25 bp, Homo sapien
ctctaaggagattgtgcagtccaat

SEQ ID NO: 5254551 - DNA, 25 bp, Homo sapien
caaacactcttttaggctaacgtgg

SEQ ID NO: 5254552 - DNA, 25 bp, Homo sapien
gctaacgtggtgataccatcactcc

SEQ ID NO: 5254553 - DNA, 25 bp, Homo sapien
cagatttcaattaatgcctaggcag

SEQ ID NO: 5254554 - DNA, 25 bp, Homo sapien
tcagtataattaccccagcctcggc

SEQ ID NO: 5254555 - DNA, 25 bp, Homo sapien
cactgtaaattacttggccgagcaa

SEQ ID NO: 5254556 - DNA, 25 bp, Homo sapien
caaccagactgtcagcgggagaact

SEQ ID NO: 5254557 - DNA, 25 bp, Homo sapien
taagtgttaattagagttcagcaga

SEQ ID NO: 5254558 - DNA, 25 bp, Homo sapien
taccgcagtttctatgcattagtga

SEQ ID NO: 5254559 - DNA, 25 bp, Homo sapien
tttagaatacctgaggccatctccg

SEQ ID NO: 5254560 - DNA, 25 bp, Homo sapien
aattgccattgtaatcgctcacagc

SEQ ID NO: 5254561 - DNA, 25 bp, Homo sapien
gctcttggtcccggaatgctcatgg

SEQ ID NO: 5254562 - DNA, 25 bp, Homo sapien
tgctcttggtcccggaatgctcatg

SEQ ID NO: 5254563 - DNA, 25 bp, Homo sapien
tgtctactgccggtctgaatgcgcg

SEQ ID NO: 5254564 - DNA, 25 bp, Homo sapien
gagagatgccgaaaagcaccctaac

SEQ ID NO: 5254565 - DNA, 25 bp, Homo sapien
gaccagggatcctgtgttcagaagc

SEQ ID NO: 5254566 - DNA, 25 bp, Homo sapien
tgcaaacgttcaccccactgagaga

SEQ ID NO: 5254567 - DNA, 25 bp, Homo sapien
gcaaagtcaaggctgctgacgttaa

SEQ ID NO: 5254568 - DNA, 25 bp, Homo sapien
tcaggacagagcaaagtcaaggctg

SEQ ID NO: 5254569 - DNA, 25 bp, Homo sapien
caaggctgctgacgttaatttcaga

SEQ ID NO: 5254570 - DNA, 25 bp, Homo sapien
taatttcagaattttagaatgaggg

SEQ ID NO: 5254571 - DNA, 25 bp, Homo sapien
tgtggttaaaaagccaagcttgctt

SEQ ID NO: 5254572 - DNA, 25 bp, Homo sapien
atttcttctagtgaagcttttaagt

SEQ ID NO: 5254573 - DNA, 25 bp, Homo sapien
tcgcaattacctattagggttgtta

SEQ ID NO: 5254574 - DNA, 25 bp, Homo sapien
tcttcatttatgtcgcaattaccta

SEQ ID NO: 5254575 - DNA, 25 bp, Homo sapien
aacagagcagagatcatcagtctgt

SEQ ID NO: 5254576 - DNA, 25 bp, Homo sapien
gtggacacacagacaaaaagaaatc

SEQ ID NO: 5254577 - DNA, 25 bp, Homo sapien
tggtggacacacagacaaaaagaaa

SEQ ID NO: 5254578 - DNA, 25 bp, Homo sapien
ctggtggacacacagacaaaaagaa

SEQ ID NO: 5254579 - DNA, 25 bp, Homo sapien
gacacacagacaaaaagaaatccat

SEQ ID NO: 5254580 - DNA, 25 bp, Homo sapien
ctgggagaattaggtagcgacttgc

SEQ ID NO: 5254581 - DNA, 25 bp, Homo sapien
ttaggtagcgacttgcagggtccta

SEQ ID NO: 5254582 - DNA, 25 bp, Homo sapien
atggctgggagaattaggtagcgac

SEQ ID NO: 5254583 - DNA, 25 bp, Homo sapien
tgcgcggaacagacggaggaatggc

SEQ ID NO: 5254584 - DNA, 25 bp, Homo sapien
tgacttctcatgtcacctaacgtac

SEQ ID NO: 5254585 - DNA, 25 bp, Homo sapien
tctttggttctaagagtctgacttc

SEQ ID NO: 5254586 - DNA, 25 bp, Homo sapien
caaccttagcattggctgggaacac

SEQ ID NO: 5254587 - DNA, 25 bp, Homo sapien
tgtgaagtcaattacaacatgctgt

SEQ ID NO: 5254588 - DNA, 25 bp, Homo sapien
tgaacaggttggaccggcgcttaga

SEQ ID NO: 5254589 - DNA, 25 bp, Homo sapien
gtgaacaggttggaccggcgcttag

SEQ ID NO: 5254590 - DNA, 25 bp, Homo sapien
ggtgaacaggttggaccggcgctta

SEQ ID NO: 5254591 - DNA, 25 bp, Homo sapien
gaacaggttggaccggcgcttagac

SEQ ID NO: 5254592 - DNA, 25 bp, Homo sapien
ccttgaacatgggttgactctggca

SEQ ID NO: 5254593 - DNA, 25 bp, Homo sapien
gggtgaatccgcagcaacagggtct

SEQ ID NO: 5254594 - DNA, 25 bp, Homo sapien
cagggtctctcctcctagtgtgcag

SEQ ID NO: 5254595 - DNA, 25 bp, Homo sapien
tcctagacactgagcaaaaccaggg

SEQ ID NO: 5254596 - DNA, 25 bp, Homo sapien
acacgtccgacgagcagacagctca

SEQ ID NO: 5254597 - DNA, 25 bp, Homo sapien
gaattcctgccaatacacatttaga

SEQ ID NO: 5254598 - DNA, 25 bp, Homo sapien
tatgtgtgcgcacagacacgtccga

SEQ ID NO: 5254599 - DNA, 25 bp, Homo sapien
aaaacatgcgcgatctatgtgtgcg

SEQ ID NO: 5254600 - DNA, 25 bp, Homo sapien
cgctcccaatgctgtccgcacgact

SEQ ID NO: 5254601 - DNA, 25 bp, Homo sapien
aatgctgtccgcacgactctccagg

SEQ ID NO: 5254602 - DNA, 25 bp, Homo sapien
aattgggatggctcggccgctccca

SEQ ID NO: 5254603 - DNA, 25 bp, Homo sapien
attgggatggctcggccgctcccaa

SEQ ID NO: 5254604 - DNA, 25 bp, Homo sapien
gacctgaggtgtatctccggcgaca

SEQ ID NO: 5254605 - DNA, 25 bp, Homo sapien
gggcagcccgcacttcattaggtct

SEQ ID NO: 5254606 - DNA, 25 bp, Homo sapien
cagacagaccttggtgcgagagcca

SEQ ID NO: 5254607 - DNA, 25 bp, Homo sapien
catcaacagagcacatcagacagac

SEQ ID NO: 5254608 - DNA, 25 bp, Homo sapien
gctcttgtaggcgatctgagttacc

SEQ ID NO: 5254609 - DNA, 25 bp, Homo sapien
ggcccgcggcccaatcaaagccgtg

SEQ ID NO: 5254610 - DNA, 25 bp, Homo sapien
tgagttacccctgttgcccggcggc

SEQ ID NO: 5254611 - DNA, 25 bp, Homo sapien
tcacaaggggctcttgtaggcgatc

SEQ ID NO: 5254612 - DNA, 25 bp, Homo sapien
atagatgcctgagggccttggtgat

SEQ ID NO: 5254613 - DNA, 25 bp, Homo sapien
cttcttctctgcctggcaaaggcgt

SEQ ID NO: 5254614 - DNA, 25 bp, Homo sapien
cttggtgatgacctgcaggcctcct

SEQ ID NO: 5254615 - DNA, 25 bp, Homo sapien
cttctctgcctggcaaaggcgtgcc

SEQ ID NO: 5254616 - DNA, 25 bp, Homo sapien
catgaatctctaagagctctctgtg

SEQ ID NO: 5254617 - DNA, 25 bp, Homo sapien
tctctgtgagtcctgctagcactta

SEQ ID NO: 5254618 - DNA, 25 bp, Homo sapien
gtcgtaggcaatgtttttcccatga

SEQ ID NO: 5254619 - DNA, 25 bp, Homo sapien
gccaggtgatcaaataaacacaaaa

SEQ ID NO: 5254620 - DNA, 25 bp, Homo sapien
tctaggacagggcactcggaaaagt

SEQ ID NO: 5254621 - DNA, 25 bp, Homo sapien
caacttgtgctgtttaagccgccca

SEQ ID NO: 5254622 - DNA, 25 bp, Homo sapien
caccaggcgtgtgcacatggagtcc

SEQ ID NO: 5254623 - DNA, 25 bp, Homo sapien
tcggaaaagtggtcaataaacgctg

SEQ ID NO: 5254624 - DNA, 25 bp, Homo sapien
cttgtccaagtgaccaaggtcagtg

SEQ ID NO: 5254625 - DNA, 25 bp, Homo sapien
tttcctgccagaaatgtagatcttc

SEQ ID NO: 5254626 - DNA, 25 bp, Homo sapien
tccaataggtctcgccttgtccaag

SEQ ID NO: 5254627 - DNA, 25 bp, Homo sapien
ggagatgacatcaggcaatccaaat

SEQ ID NO: 5254628 - DNA, 25 bp, Homo sapien
agtaaccaacaagtttcaaaatcat

SEQ ID NO: 5254629 - DNA, 25 bp, Homo sapien
ctcctcctcgctcctgggcttctcc

SEQ ID NO: 5254630 - DNA, 25 bp, Homo sapien
ctcctcgctcctgggcttctccagt

SEQ ID NO: 5254631 - DNA, 25 bp, Homo sapien
agctcctcctcgctcctgggcttct

SEQ ID NO: 5254632 - DNA, 25 bp, Homo sapien
ccctcacccctgggcttctccagct

SEQ ID NO: 5254633 - DNA, 25 bp, Homo sapien
cttcaccactgagcttcttcagctt

SEQ ID NO: 5254634 - DNA, 25 bp, Homo sapien
agctcctcctcacccttgggcttct

SEQ ID NO: 5254635 - DNA, 25 bp, Homo sapien
cccattcccaagcttctccagctcc

SEQ ID NO: 5254636 - DNA, 25 bp, Homo sapien
tcttcaccactgagcttcttcagct

SEQ ID NO: 5254637 - DNA, 25 bp, Homo sapien
ccattctattttttggacctagaga

SEQ ID NO: 5254638 - DNA, 25 bp, Homo sapien
ttaatgaagactttgctggatacat

SEQ ID NO: 5254639 - DNA, 25 bp, Homo sapien
caatccaatgacactcttttaagtt

SEQ ID NO: 5254640 - DNA, 25 bp, Homo sapien
tgtatatactgaccaacatgcaaac

SEQ ID NO: 5254641 - DNA, 25 bp, Homo sapien
ggagttgactactgggcctaccgac

SEQ ID NO: 5254642 - DNA, 25 bp, Homo sapien
gagtgaagcactctggaccaatcta

SEQ ID NO: 5254643 - DNA, 25 bp, Homo sapien
tcgaatgtgattccctaacagctgt

SEQ ID NO: 5254644 - DNA, 25 bp, Homo sapien
ggcacccatcagcattctcacagga

SEQ ID NO: 5254645 - DNA, 25 bp, Homo sapien
ttctcccgctccttgagaagagtgg

SEQ ID NO: 5254646 - DNA, 25 bp, Homo sapien
tctcccgctccttgagaagagtgga

SEQ ID NO: 5254647 - DNA, 25 bp, Homo sapien
ctcccgctccttgagaagagtggat

SEQ ID NO: 5254648 - DNA, 25 bp, Homo sapien
tcccgctccttgagaagagtggatg

SEQ ID NO: 5254649 - DNA, 25 bp, Homo sapien
ccgcttctgctccatcatttccctg

SEQ ID NO: 5254650 - DNA, 25 bp, Homo sapien
tcatcgttcatagccctgccgccgc

SEQ ID NO: 5254651 - DNA, 25 bp, Homo sapien
cgttcatagccctgccgccgcttct

SEQ ID NO: 5254652 - DNA, 25 bp, Homo sapien
ctccatcccacaagccaatggacat

SEQ ID NO: 5254653 - DNA, 25 bp, Homo sapien
gatggcggtctttagtattcactgg

SEQ ID NO: 5254654 - DNA, 25 bp, Homo sapien
gccctcgttggccaatagaaggaag

SEQ ID NO: 5254655 - DNA, 25 bp, Homo sapien
tttctgagaaaacttgatggcggtc

SEQ ID NO: 5254656 - DNA, 25 bp, Homo sapien
taaatccttcacgagttggacctcg

SEQ ID NO: 5254657 - DNA, 25 bp, Homo sapien
ccctgtcctccatggaagaggaaga

SEQ ID NO: 5254658 - DNA, 25 bp, Homo sapien
ctgccctgtcctccatggaagagga

SEQ ID NO: 5254659 - DNA, 25 bp, Homo sapien
gccctgtcctccatggaagaggaag

SEQ ID NO: 5254660 - DNA, 25 bp, Homo sapien
ctgtcctccatggaagaggaagagg

SEQ ID NO: 5254661 - DNA, 25 bp, Homo sapien
cactgttaagaggtgctgtgggctg

SEQ ID NO: 5254662 - DNA, 25 bp, Homo sapien
cggaatttgtccacagcactgttaa

SEQ ID NO: 5254663 - DNA, 25 bp, Homo sapien
tgtccacagcactgttaagaggtgc

SEQ ID NO: 5254664 - DNA, 25 bp, Homo sapien
cacggtttgccggaatttgtccaca

SEQ ID NO: 5254665 - DNA, 25 bp, Homo sapien
tcctgtgggagagtcctgtgaacac

SEQ ID NO: 5254666 - DNA, 25 bp, Homo sapien
gagatggctcctttcagaactacag

SEQ ID NO: 5254667 - DNA, 25 bp, Homo sapien
tgcataatgcagaggtgctaggacc

SEQ ID NO: 5254668 - DNA, 25 bp, Homo sapien
gaaaggccacgcattagtagagcaa

SEQ ID NO: 5254669 - DNA, 25 bp, Homo sapien
acacggagataagcctagagtatgc

SEQ ID NO: 5254670 - DNA, 25 bp, Homo sapien
gcacttgtatttccgggtgttctgg

SEQ ID NO: 5254671 - DNA, 25 bp, Homo sapien
ttatggcgagcagtcaagaggcgct

SEQ ID NO: 5254672 - DNA, 25 bp, Homo sapien
cacacacggagataagcctagagta

SEQ ID NO: 5254673 - DNA, 25 bp, Homo sapien
tgtcagtgcaaggacaaagaagggc

SEQ ID NO: 5254674 - DNA, 25 bp, Homo sapien
tcagtgcaaggacaaagaagggcag

SEQ ID NO: 5254675 - DNA, 25 bp, Homo sapien
gtgcaaggacaaagaagggcaggcc

SEQ ID NO: 5254676 - DNA, 25 bp, Homo sapien
ctgtcagtgcaaggacaaagaaggg

SEQ ID NO: 5254677 - DNA, 25 bp, Homo sapien
tcatggccccggacagctgggctga

SEQ ID NO: 5254678 - DNA, 25 bp, Homo sapien
ctgggctgattgtgggccttcagca

SEQ ID NO: 5254679 - DNA, 25 bp, Homo sapien
ccttcagcacaatgcgggctggtct

SEQ ID NO: 5254680 - DNA, 25 bp, Homo sapien
aatgcgggctggtctgaccacccct

SEQ ID NO: 5254681 - DNA, 25 bp, Homo sapien
tcctcaaagaaagagcgtaaacgct

SEQ ID NO: 5254682 - DNA, 25 bp, Homo sapien
tgtcaaaggtctatcagagatgcgc

SEQ ID NO: 5254683 - DNA, 25 bp, Homo sapien
tatcggccgatctggagttcacctc

SEQ ID NO: 5254684 - DNA, 25 bp, Homo sapien
cctttgtggactgaattgcccgcta

SEQ ID NO: 5254685 - DNA, 25 bp, Homo sapien
ccgcgcagtggagcggaaacgctca

SEQ ID NO: 5254686 - DNA, 25 bp, Homo sapien
gtggagcggaaacgctcaaccacct

SEQ ID NO: 5254687 - DNA, 25 bp, Homo sapien
gggccgcgcagtggagcggaaacgc

SEQ ID NO: 5254688 - DNA, 25 bp, Homo sapien
cgcagtggagcggaaacgctcaacc

SEQ ID NO: 5254689 - DNA, 25 bp, Homo sapien
ggagaagccaatcccactgaggcct

SEQ ID NO: 5254690 - DNA, 25 bp, Homo sapien
cagggcctttacagagcaaattatg

SEQ ID NO: 5254691 - DNA, 25 bp, Homo sapien
taacgcccagcactcacgatgtgac

SEQ ID NO: 5254692 - DNA, 25 bp, Homo sapien
gacactcacggagaaagaccacgtg

SEQ ID NO: 5254693 - DNA, 25 bp, Homo sapien
caaggaaccttttctacagtggagc

SEQ ID NO: 5254694 - DNA, 25 bp, Homo sapien
gaaactggagaagcacacgggtcat

SEQ ID NO: 5254695 - DNA, 25 bp, Homo sapien
ggcggcgccatgtcaagatcagatt

SEQ ID NO: 5254696 - DNA, 25 bp, Homo sapien
cagggatcatcgttacacagaggga

SEQ ID NO: 5254697 - DNA, 25 bp, Homo sapien
ccccaagaattgctgtggcgaccaa

SEQ ID NO: 5254698 - DNA, 25 bp, Homo sapien
tggcgaccaagagccacttggctgc

SEQ ID NO: 5254699 - DNA, 25 bp, Homo sapien
caagaattgctgtggcgaccaagag

SEQ ID NO: 5254700 - DNA, 25 bp, Homo sapien
tgctgtggcgaccaagagccacttg

SEQ ID NO: 5254701 - DNA, 25 bp, Homo sapien
gcctcgccctcactcaagttctcca

SEQ ID NO: 5254702 - DNA, 25 bp, Homo sapien
tttcaacaatgccagggccacggtc

SEQ ID NO: 5254703 - DNA, 25 bp, Homo sapien
acccgcctcgccctcactcaagttc

SEQ ID NO: 5254704 - DNA, 25 bp, Homo sapien
ttttccgtcattcatttcagatgga

SEQ ID NO: 5254705 - DNA, 25 bp, Homo sapien
gatttgccacttcgcttcaacagca

SEQ ID NO: 5254706 - DNA, 25 bp, Homo sapien
aactgggatgataggtcagcacgcc

SEQ ID NO: 5254707 - DNA, 25 bp, Homo sapien
taaactgggatgataggtcagcacg

SEQ ID NO: 5254708 - DNA, 25 bp, Homo sapien
ctttattcaacgatttgccacttcg

SEQ ID NO: 5254709 - DNA, 25 bp, Homo sapien
gaaagccacagattgactggtaggg

SEQ ID NO: 5254710 - DNA, 25 bp, Homo sapien
tgagcaggagaccaaatacgacttt

SEQ ID NO: 5254711 - DNA, 25 bp, Homo sapien
tacgactttcacttcaaacagagac

SEQ ID NO: 5254712 - DNA, 25 bp, Homo sapien
tctgcagctgttaattgctccgagg

SEQ ID NO: 5254713 - DNA, 25 bp, Homo sapien
taggtggccacgctgaactgtgaag

SEQ ID NO: 5254714 - DNA, 25 bp, Homo sapien
acggccgtgcttgcgacatggaaga

SEQ ID NO: 5254715 - DNA, 25 bp, Homo sapien
tctttgtcagcagggaattgcagcc

SEQ ID NO: 5254716 - DNA, 25 bp, Homo sapien
tcatgcacgtctgccaggtatggcc

SEQ ID NO: 5254717 - DNA, 25 bp, Homo sapien
accagtgagtttttagtaggctcca

SEQ ID NO: 5254718 - DNA, 25 bp, Homo sapien
tttggaactgttgacacatgggaga

SEQ ID NO: 5254719 - DNA, 25 bp, Homo sapien
tatgaagcctgcacagttcactgtg

SEQ ID NO: 5254720 - DNA, 25 bp, Homo sapien
caggagagcccatgtgaccatgtca

SEQ ID NO: 5254721 - DNA, 25 bp, Homo sapien
ctgcccctcaacagcttgaaaaagt

SEQ ID NO: 5254722 - DNA, 25 bp, Homo sapien
tgctcggtaactgtgcctcgctgtc

SEQ ID NO: 5254723 - DNA, 25 bp, Homo sapien
gttgtccatgatcatcatgcggctt

SEQ ID NO: 5254724 - DNA, 25 bp, Homo sapien
agcaggcgccagagcaaagggacct

SEQ ID NO: 5254725 - DNA, 25 bp, Homo sapien
tgggtgcgcaggctgacgtggctcg

SEQ ID NO: 5254726 - DNA, 25 bp, Homo sapien
ggtgcgcaggctgacgtggctcggg

SEQ ID NO: 5254727 - DNA, 25 bp, Homo sapien
cttaccatgaacattctgcatgtaa

SEQ ID NO: 5254728 - DNA, 25 bp, Homo sapien
atgggtgcgcaggctgacgtggctc

SEQ ID NO: 5254729 - DNA, 25 bp, Homo sapien
tgggtgagatgtgtaaactgctcat

SEQ ID NO: 5254730 - DNA, 25 bp, Homo sapien
ctgaattgggtgagatgtgtaaact

SEQ ID NO: 5254731 - DNA, 25 bp, Homo sapien
aattgggtgagatgtgtaaactgct

SEQ ID NO: 5254732 - DNA, 25 bp, Homo sapien
gaattgggtgagatgtgtaaactgc

SEQ ID NO: 5254733 - DNA, 25 bp, Homo sapien
ttgaacttgatttgttagtgcattt

SEQ ID NO: 5254734 - DNA, 25 bp, Homo sapien
gctgttgaacttgatttgttagtgc

SEQ ID NO: 5254735 - DNA, 25 bp, Homo sapien
tgttgaacttgatttgttagtgcat

SEQ ID NO: 5254736 - DNA, 25 bp, Homo sapien
ctgttgaacttgatttgttagtgca

SEQ ID NO: 5254737 - DNA, 25 bp, Homo sapien
tctgcagtgcgcacaacttctggca

SEQ ID NO: 5254738 - DNA, 25 bp, Homo sapien
aagtggcaacgcctctgtgctaagg

SEQ ID NO: 5254739 - DNA, 25 bp, Homo sapien
gactcaggcacacgttagaaactcc

SEQ ID NO: 5254740 - DNA, 25 bp, Homo sapien
gaaaggtcagcaggtcatagaagcc

SEQ ID NO: 5254741 - DNA, 25 bp, Homo sapien
gctctccctaggcatgctgcctgtt

SEQ ID NO: 5254742 - DNA, 25 bp, Homo sapien
tccctaggcatgctgcctgttccga

SEQ ID NO: 5254743 - DNA, 25 bp, Homo sapien
gctgcctgttccgatgcatgctctc

SEQ ID NO: 5254744 - DNA, 25 bp, Homo sapien
taggcatgctgcctgttccgatgca

SEQ ID NO: 5254745 - DNA, 25 bp, Homo sapien
agctggccggtgcacttcataccac

SEQ ID NO: 5254746 - DNA, 25 bp, Homo sapien
ggtgcacttcataccacctacggtc

SEQ ID NO: 5254747 - DNA, 25 bp, Homo sapien
tcataccacctacggtcagggctgc

SEQ ID NO: 5254748 - DNA, 25 bp, Homo sapien
gtgagctggccggtgcacttcatac

SEQ ID NO: 5254749 - DNA, 25 bp, Homo sapien
cacaaacaccttcgttgtccattat

SEQ ID NO: 5254750 - DNA, 25 bp, Homo sapien
cccacaaacaccttcgttgtccatt

SEQ ID NO: 5254751 - DNA, 25 bp, Homo sapien
ttcccacaaacaccttcgttgtcca

SEQ ID NO: 5254752 - DNA, 25 bp, Homo sapien
ccacaaacaccttcgttgtccatta

SEQ ID NO: 5254753 - DNA, 25 bp, Homo sapien
cgactccgcgtctgcagtgtgagca

SEQ ID NO: 5254754 - DNA, 25 bp, Homo sapien
gataatgtatccttaagtaccgcca

SEQ ID NO: 5254755 - DNA, 25 bp, Homo sapien
aaacagcagcttcgcgactccgcgt

SEQ ID NO: 5254756 - DNA, 25 bp, Homo sapien
tgtgagcagttttgataaacagcct

SEQ ID NO: 5254757 - DNA, 25 bp, Homo sapien
tgatgcaacagcgaggatgaggggt

SEQ ID NO: 5254758 - DNA, 25 bp, Homo sapien
tgtaagcattgtgaagacggagaag

SEQ ID NO: 5254759 - DNA, 25 bp, Homo sapien
gggtgtaagcattgtgaagacggag

SEQ ID NO: 5254760 - DNA, 25 bp, Homo sapien
tcctttgccatgaataacggttcca

SEQ ID NO: 5254761 - DNA, 25 bp, Homo sapien
gctgctccagattccgacagtgttt

SEQ ID NO: 5254762 - DNA, 25 bp, Homo sapien
tttttatctgctgaaggaacacgtg

SEQ ID NO: 5254763 - DNA, 25 bp, Homo sapien
gtcttggccacaatccatctcctgg

SEQ ID NO: 5254764 - DNA, 25 bp, Homo sapien
acagtgtttatggagagcgccatcg

SEQ ID NO: 5254765 - DNA, 25 bp, Homo sapien
atcgttggaaatgttctttgcaggc

SEQ ID NO: 5254766 - DNA, 25 bp, Homo sapien
tcgttggaaatgttctttgcaggca

SEQ ID NO: 5254767 - DNA, 25 bp, Homo sapien
catcgttggaaatgttctttgcagg

SEQ ID NO: 5254768 - DNA, 25 bp, Homo sapien
cgttggaaatgttctttgcaggcat

SEQ ID NO: 5254769 - DNA, 25 bp, Homo sapien
tgaagacatctgcttaaactctgag

SEQ ID NO: 5254770 - DNA, 25 bp, Homo sapien
gaagctgccatgctgggttaacacg

SEQ ID NO: 5254771 - DNA, 25 bp, Homo sapien
gaggcaaaccagtggtccacgacct

SEQ ID NO: 5254772 - DNA, 25 bp, Homo sapien
tgcctttcaacgtaaatgcatgaag

SEQ ID NO: 5254773 - DNA, 25 bp, Homo sapien
gctttaggcacacaaggtccaaata

SEQ ID NO: 5254774 - DNA, 25 bp, Homo sapien
ctttaggcacacaaggtccaaatac

SEQ ID NO: 5254775 - DNA, 25 bp, Homo sapien
agctttaggcacacaaggtccaaat

SEQ ID NO: 5254776 - DNA, 25 bp, Homo sapien
cagctttaggcacacaaggtccaaa

SEQ ID NO: 5254777 - DNA, 25 bp, Homo sapien
gaccacagaaaccagcgcgagttag

SEQ ID NO: 5254778 - DNA, 25 bp, Homo sapien
accacagaaaccagcgcgagttagt

SEQ ID NO: 5254779 - DNA, 25 bp, Homo sapien
aataaacaagtcaggtgaacaccac

SEQ ID NO: 5254780 - DNA, 25 bp, Homo sapien
gagacccagatgcactagtgacatt

SEQ ID NO: 5254781 - DNA, 25 bp, Homo sapien
ctgagacccagatgcactagtgaca

SEQ ID NO: 5254782 - DNA, 25 bp, Homo sapien
tgagacccagatgcactagtgacat

SEQ ID NO: 5254783 - DNA, 25 bp, Homo sapien
ggtgcatgccgtcgggtcggctgtt

SEQ ID NO: 5254784 - DNA, 25 bp, Homo sapien
gcgctggtgcatgccgtcgggtcgg

SEQ ID NO: 5254785 - DNA, 25 bp, Homo sapien
gtaggagcgctggtgcatgccgtcg

SEQ ID NO: 5254786 - DNA, 25 bp, Homo sapien
ccgtcgggtcggctgttgaaggaga

SEQ ID NO: 5254787 - DNA, 25 bp, Homo sapien
ggaccttgaggtggctgcgggtccg

SEQ ID NO: 5254788 - DNA, 25 bp, Homo sapien
ttacaacgaaggaccttgaggtggc

SEQ ID NO: 5254789 - DNA, 25 bp, Homo sapien
gtccgtggggctgagccccctctta

SEQ ID NO: 5254790 - DNA, 25 bp, Homo sapien
ccttgaggtggctgcgggtccgtgg

SEQ ID NO: 5254791 - DNA, 25 bp, Homo sapien
gacagcctagcaaggacaaaacgtt

SEQ ID NO: 5254792 - DNA, 25 bp, Homo sapien
tgaccaaatgggatgactacctcct

SEQ ID NO: 5254793 - DNA, 25 bp, Homo sapien
tctgtcacgtgaccctgggtaagcc

SEQ ID NO: 5254794 - DNA, 25 bp, Homo sapien
tccagaatttagagggtacaccagg

SEQ ID NO: 5254795 - DNA, 25 bp, Homo sapien
aaggccttgtccgtgtcacctgtgc

SEQ ID NO: 5254796 - DNA, 25 bp, Homo sapien
gaagagcctactgtcctgtgttgtg

SEQ ID NO: 5254797 - DNA, 25 bp, Homo sapien
aagaacaccttcacgagatggcggc

SEQ ID NO: 5254798 - DNA, 25 bp, Homo sapien
taacagtggttcttcagtcacgaag

SEQ ID NO: 5254799 - DNA, 25 bp, Homo sapien
catctacgctggtggcagcaggact

SEQ ID NO: 5254800 - DNA, 25 bp, Homo sapien
tgttacatcacatctacgctggtgg

SEQ ID NO: 5254801 - DNA, 25 bp, Homo sapien
aggactgccgctgaaccggccgtgc

SEQ ID NO: 5254802 - DNA, 25 bp, Homo sapien
agtgagttccatgaatgttacatca

SEQ ID NO: 5254803 - DNA, 25 bp, Homo sapien
ttcctcatctgaagcgggtaaggct

SEQ ID NO: 5254804 - DNA, 25 bp, Homo sapien
tgacacaggctgtttgaatctagcc

SEQ ID NO: 5254805 - DNA, 25 bp, Homo sapien
ttgaatctagccttgaccaccgacc

SEQ ID NO: 5254806 - DNA, 25 bp, Homo sapien
gctgctgcgataggcccaactgcct

SEQ ID NO: 5254807 - DNA, 25 bp, Homo sapien
cagactccagttcccctcgtaccac

SEQ ID NO: 5254808 - DNA, 25 bp, Homo sapien
tctgattgatgaaggcctgacgtgc

SEQ ID NO: 5254809 - DNA, 25 bp, Homo sapien
cccccataaaggctctggcaaagag

SEQ ID NO: 5254810 - DNA, 25 bp, Homo sapien
cccataaaggctctggcaaagagac

SEQ ID NO: 5254811 - DNA, 25 bp, Homo sapien
ggatctgtgtctccgcctggatctg

SEQ ID NO: 5254812 - DNA, 25 bp, Homo sapien
ccctcttggtgttggtctcatgaga

SEQ ID NO: 5254813 - DNA, 25 bp, Homo sapien
aaaagtgtgcggcaagtccccccat

SEQ ID NO: 5254814 - DNA, 25 bp, Homo sapien
gtgtgcggcaagtccccccatatcg

SEQ ID NO: 5254815 - DNA, 25 bp, Homo sapien
cagagcaatactctggctcttggag

SEQ ID NO: 5254816 - DNA, 25 bp, Homo sapien
cttttgacgggagctttcagcggga

SEQ ID NO: 5254817 - DNA, 25 bp, Homo sapien
agctttcagcgggaggaggttgact

SEQ ID NO: 5254818 - DNA, 25 bp, Homo sapien
cccttcgcatagtccttttgacggg

SEQ ID NO: 5254819 - DNA, 25 bp, Homo sapien
tagtccttttgacgggagctttcag

SEQ ID NO: 5254820 - DNA, 25 bp, Homo sapien
ttgaggcagtgactttccaggccat

SEQ ID NO: 5254821 - DNA, 25 bp, Homo sapien
gtcctccagggtgggtccgcaagca

SEQ ID NO: 5254822 - DNA, 25 bp, Homo sapien
tccccgcccccatttggaggcatgg

SEQ ID NO: 5254823 - DNA, 25 bp, Homo sapien
gcatggagttgaggcagtgactttc

SEQ ID NO: 5254824 - DNA, 25 bp, Homo sapien
gagaacagaaaaatgtgagccttgt

SEQ ID NO: 5254825 - DNA, 25 bp, Homo sapien
agaacagaaaaatgtgagccttgtc

SEQ ID NO: 5254826 - DNA, 25 bp, Homo sapien
ggtgtcattgcaccgggagaaagcc

SEQ ID NO: 5254827 - DNA, 25 bp, Homo sapien
tgtcattgcaccgggagaaagccca

SEQ ID NO: 5254828 - DNA, 25 bp, Homo sapien
gtgtcattgcaccgggagaaagccc

SEQ ID NO: 5254829 - DNA, 25 bp, Homo sapien
tttccacggtggacatctggtaaac

SEQ ID NO: 5254830 - DNA, 25 bp, Homo sapien
tggttaactgtacccgaggtgtagc

SEQ ID NO: 5254831 - DNA, 25 bp, Homo sapien
tgtacccgaggtgtagccagcagtc

SEQ ID NO: 5254832 - DNA, 25 bp, Homo sapien
cccctgagcctgcactatgacagtt

SEQ ID NO: 5254833 - DNA, 25 bp, Homo sapien
gagcatacggagtcacccagccctg

SEQ ID NO: 5254834 - DNA, 25 bp, Homo sapien
tggagcatacggagtcacccagccc

SEQ ID NO: 5254835 - DNA, 25 bp, Homo sapien
catacggagtcacccagccctgtgt

SEQ ID NO: 5254836 - DNA, 25 bp, Homo sapien
ctggagcatacggagtcacccagcc

SEQ ID NO: 5254837 - DNA, 25 bp, Homo sapien
cagtgccggacaggccgtcggcttt

SEQ ID NO: 5254838 - DNA, 25 bp, Homo sapien
tttcttccttcggtgcttctttctg

SEQ ID NO: 5254839 - DNA, 25 bp, Homo sapien
caggccgtcggctttgaagttgcta

SEQ ID NO: 5254840 - DNA, 25 bp, Homo sapien
cgtcggctttgaagttgctagtgct

SEQ ID NO: 5254841 - DNA, 25 bp, Homo sapien
ggatgggccactccctctaatgtag

SEQ ID NO: 5254842 - DNA, 25 bp, Homo sapien
tctgacagctcgcaggtttgaaccc

SEQ ID NO: 5254843 - DNA, 25 bp, Homo sapien
tctaatgtagccactgtctgacagc

SEQ ID NO: 5254844 - DNA, 25 bp, Homo sapien
tccgctctggatatgtggacgggat

SEQ ID NO: 5254845 - DNA, 25 bp, Homo sapien
gaggtctgttcaggaagccgcgagg

SEQ ID NO: 5254846 - DNA, 25 bp, Homo sapien
ttcaggaagccgcgagggctccctg

SEQ ID NO: 5254847 - DNA, 25 bp, Homo sapien
tgttcaggaagccgcgagggctccc

SEQ ID NO: 5254848 - DNA, 25 bp, Homo sapien
gtctgttcaggaagccgcgagggct

SEQ ID NO: 5254849 - DNA, 25 bp, Homo sapien
gagtctaggaagaccttctcgcagg

SEQ ID NO: 5254850 - DNA, 25 bp, Homo sapien
tactttctgaataagtgcgccacag

SEQ ID NO: 5254851 - DNA, 25 bp, Homo sapien
taagaaacggccagagtgagaacct

SEQ ID NO: 5254852 - DNA, 25 bp, Homo sapien
cagcagcaggtactgatgattccta

SEQ ID NO: 5254853 - DNA, 25 bp, Homo sapien
cttccacgcacccacgtattgcttt

SEQ ID NO: 5254854 - DNA, 25 bp, Homo sapien
actgagagcttccacgcacccacgt

SEQ ID NO: 5254855 - DNA, 25 bp, Homo sapien
agagcttccacgcacccacgtattg

SEQ ID NO: 5254856 - DNA, 25 bp, Homo sapien
ttccacgcacccacgtattgctttc

SEQ ID NO: 5254857 - DNA, 25 bp, Homo sapien
gaatcgcaggcaatgagtcttggga

SEQ ID NO: 5254858 - DNA, 25 bp, Homo sapien
tcagcgccacttgattacacggagg

SEQ ID NO: 5254859 - DNA, 25 bp, Homo sapien
tacacggagggtcgtcctttcactc

SEQ ID NO: 5254860 - DNA, 25 bp, Homo sapien
tactgtcaagcggtacgaatcgcag

SEQ ID NO: 5254861 - DNA, 25 bp, Homo sapien
tttaaaaagaatggtgtacagacac

SEQ ID NO: 5254862 - DNA, 25 bp, Homo sapien
ttcacgcagcatccttcataacagc

SEQ ID NO: 5254863 - DNA, 25 bp, Homo sapien
gtgtgacaatgttcacgcagcatcc

SEQ ID NO: 5254864 - DNA, 25 bp, Homo sapien
aagaatggtgtacagacacatgcta

SEQ ID NO: 5254865 - DNA, 25 bp, Homo sapien
tattgcacagcacgaaaatgacagg

SEQ ID NO: 5254866 - DNA, 25 bp, Homo sapien
tactcagtttaaggtggccaccaca

SEQ ID NO: 5254867 - DNA, 25 bp, Homo sapien
gctgcttggagagaataaaccctac

SEQ ID NO: 5254868 - DNA, 25 bp, Homo sapien
tacagaaagagtgcctaacctgggc

SEQ ID NO: 5254869 - DNA, 25 bp, Homo sapien
ttttcactatgggagggtggtgggc

SEQ ID NO: 5254870 - DNA, 25 bp, Homo sapien
gccactgggcctagccttttctttg

SEQ ID NO: 5254871 - DNA, 25 bp, Homo sapien
ctatgggagggtggtgggcatgaca

SEQ ID NO: 5254872 - DNA, 25 bp, Homo sapien
ggtgcgcaccaccaagcttagctaa

SEQ ID NO: 5254873 - DNA, 25 bp, Homo sapien
agttctgtggttcccgagtcttctt

SEQ ID NO: 5254874 - DNA, 25 bp, Homo sapien
gtgtctcatggctgcgcctggaacc

SEQ ID NO: 5254875 - DNA, 25 bp, Homo sapien
atggctgcgcctggaacccagcgac

SEQ ID NO: 5254876 - DNA, 25 bp, Homo sapien
aacttcaccttaggagacttggtca

SEQ ID NO: 5254877 - DNA, 25 bp, Homo sapien
gagacctttgttggagactctacaa

SEQ ID NO: 5254878 - DNA, 25 bp, Homo sapien
tataacagttgcatcatggaggtag

SEQ ID NO: 5254879 - DNA, 25 bp, Homo sapien
gagaaccaagaaatggcaccccaga

SEQ ID NO: 5254880 - DNA, 25 bp, Homo sapien
tgtaagcgtaactccaacagagacc

SEQ ID NO: 5254881 - DNA, 25 bp, Homo sapien
aattacatccttggcgtgaaccgag

SEQ ID NO: 5254882 - DNA, 25 bp, Homo sapien
tccctttggcctagaaacacgcaga

SEQ ID NO: 5254883 - DNA, 25 bp, Homo sapien
gatcagtttcttgcaaggccaacag

SEQ ID NO: 5254884 - DNA, 25 bp, Homo sapien
catagtgggctaacgtaggtgcaca

SEQ ID NO: 5254885 - DNA, 25 bp, Homo sapien
agtgcagaaagcctctttcctcgcc

SEQ ID NO: 5254886 - DNA, 25 bp, Homo sapien
catataaataggcagaatggaggct

SEQ ID NO: 5254887 - DNA, 25 bp, Homo sapien
ggaggggtgcccgagtgcagaaagc

SEQ ID NO: 5254888 - DNA, 25 bp, Homo sapien
tcctcgcccgctttatgccttccat

SEQ ID NO: 5254889 - DNA, 25 bp, Homo sapien
ccagaaaatgacccagggtgatgac

SEQ ID NO: 5254890 - DNA, 25 bp, Homo sapien
gaaaatgacccagggtgatgactag

SEQ ID NO: 5254891 - DNA, 25 bp, Homo sapien
aaatgacccagggtgatgactaggc

SEQ ID NO: 5254892 - DNA, 25 bp, Homo sapien
atgacccagggtgatgactaggcgc

SEQ ID NO: 5254893 - DNA, 25 bp, Homo sapien
tgtaggttcggcgtgtgcaccaagt

SEQ ID NO: 5254894 - DNA, 25 bp, Homo sapien
atttcgaacactacagctgaggctg

SEQ ID NO: 5254895 - DNA, 25 bp, Homo sapien
gacaggttaactcttcttgcctgct

SEQ ID NO: 5254896 - DNA, 25 bp, Homo sapien
aaattctccatttcgaacactacag

SEQ ID NO: 5254897 - DNA, 25 bp, Homo sapien
gctgctgctgtatatatttcgcagg

SEQ ID NO: 5254898 - DNA, 25 bp, Homo sapien
atatatttcgcaggctaccaacacg

SEQ ID NO: 5254899 - DNA, 25 bp, Homo sapien
taccaacacggtttagtttccatgc

SEQ ID NO: 5254900 - DNA, 25 bp, Homo sapien
cgcaggctaccaacacggtttagtt

SEQ ID NO: 5254901 - DNA, 25 bp, Homo sapien
ttttagcaccatgaacctgtcgaaa

SEQ ID NO: 5254902 - DNA, 25 bp, Homo sapien
tagctgtggaaaggtccactataat

SEQ ID NO: 5254903 - DNA, 25 bp, Homo sapien
cctgcccaattattccaaacgacat

SEQ ID NO: 5254904 - DNA, 25 bp, Homo sapien
tggaaaggtccactataatagtatt

SEQ ID NO: 5254905 - DNA, 25 bp, Homo sapien
cttcttgcggacctggatttggcat

SEQ ID NO: 5254906 - DNA, 25 bp, Homo sapien
gatatcgtgcaagtactggctgagc

SEQ ID NO: 5254907 - DNA, 25 bp, Homo sapien
aatgatatcgtgcaagtactggctg

SEQ ID NO: 5254908 - DNA, 25 bp, Homo sapien
caagtactggctgagccattgcatc

SEQ ID NO: 5254909 - DNA, 25 bp, Homo sapien
tcgtgcaagtactggctgagccatt

SEQ ID NO: 5254910 - DNA, 25 bp, Homo sapien
tggatatgcagccctctttgtggct

SEQ ID NO: 5254911 - DNA, 25 bp, Homo sapien
gtggatatgcagccctctttgtggc

SEQ ID NO: 5254912 - DNA, 25 bp, Homo sapien
tttacttatctctgtcaccagcccg

SEQ ID NO: 5254913 - DNA, 25 bp, Homo sapien
acttatctctgtcaccagcccgtgg

SEQ ID NO: 5254914 - DNA, 25 bp, Homo sapien
accactttacttatctctgtcacca

SEQ ID NO: 5254915 - DNA, 25 bp, Homo sapien
accagcccgtggccattgggctggc

SEQ ID NO: 5254916 - DNA, 25 bp, Homo sapien
aaagcaacttaggagaataaccatg

SEQ ID NO: 5254917 - DNA, 25 bp, Homo sapien
tgataaactcaaaattttcttcttg

SEQ ID NO: 5254918 - DNA, 25 bp, Homo sapien
tcttgctgctctcgcacgactgcag

SEQ ID NO: 5254919 - DNA, 25 bp, Homo sapien
tgagggacacaatgataaactcaaa

SEQ ID NO: 5254920 - DNA, 25 bp, Homo sapien
ccatgtttggccagtgagggacaca

SEQ ID NO: 5254921 - DNA, 25 bp, Homo sapien
tctgagtcggccacctttggttgct

SEQ ID NO: 5254922 - DNA, 25 bp, Homo sapien
tttggttgctcaacgcgtcctcctc

SEQ ID NO: 5254923 - DNA, 25 bp, Homo sapien
cggccacctttggttgctcaacgcg

SEQ ID NO: 5254924 - DNA, 25 bp, Homo sapien
atgaccagctctgagtcggccacct

SEQ ID NO: 5254925 - DNA, 25 bp, Homo sapien
taagcaccccgggagaaacgcacat

SEQ ID NO: 5254926 - DNA, 25 bp, Homo sapien
gacacaaatacaaggcgtaagcacc

SEQ ID NO: 5254927 - DNA, 25 bp, Homo sapien
atacaaggcgtaagcaccccgggag

SEQ ID NO: 5254928 - DNA, 25 bp, Homo sapien
ggaggaagacacaaatacaaggcgt

SEQ ID NO: 5254929 - DNA, 25 bp, Homo sapien
gcctcgctctggctcgtcagccggg

SEQ ID NO: 5254930 - DNA, 25 bp, Homo sapien
ggcctcgctctggctcgtcagccgg

SEQ ID NO: 5254931 - DNA, 25 bp, Homo sapien
cctcgctctggctcgtcagccggga

SEQ ID NO: 5254932 - DNA, 25 bp, Homo sapien
tcccgcgcatgttccggatcgactg

SEQ ID NO: 5254933 - DNA, 25 bp, Homo sapien
tgggagttcccgcgcatgttccgga

SEQ ID NO: 5254934 - DNA, 25 bp, Homo sapien
agttcccgcgcatgttccggatcga

SEQ ID NO: 5254935 - DNA, 25 bp, Homo sapien
ggagttcccgcgcatgttccggatc

SEQ ID NO: 5254936 - DNA, 25 bp, Homo sapien
gaaggacgacattcatgcgtgggac

SEQ ID NO: 5254937 - DNA, 25 bp, Homo sapien
cagatctgaaggacgacattcatgc

SEQ ID NO: 5254938 - DNA, 25 bp, Homo sapien
attcctgtgccggactccgaattct

SEQ ID NO: 5254939 - DNA, 25 bp, Homo sapien
tcatgcgtgggacacattcctgtgc

SEQ ID NO: 5254940 - DNA, 25 bp, Homo sapien
gggaataggcaatgcttactctgga

SEQ ID NO: 5254941 - DNA, 25 bp, Homo sapien
ctgggaataggcaatgcttactctg

SEQ ID NO: 5254942 - DNA, 25 bp, Homo sapien
ataggcaatgcttactctggacaca

SEQ ID NO: 5254943 - DNA, 25 bp, Homo sapien
gaataggcaatgcttactctggaca

SEQ ID NO: 5254944 - DNA, 25 bp, Homo sapien
gggaaaaagcacgtgtgactcggca

SEQ ID NO: 5254945 - DNA, 25 bp, Homo sapien
gaaaaagcacgtgtgactcggcatc

SEQ ID NO: 5254946 - DNA, 25 bp, Homo sapien
aaaaagcacgtgtgactcggcatcc

SEQ ID NO: 5254947 - DNA, 25 bp, Homo sapien
aaaagcacgtgtgactcggcatcca

SEQ ID NO: 5254948 - DNA, 25 bp, Homo sapien
ggtgccaagattccggtggatccct

SEQ ID NO: 5254949 - DNA, 25 bp, Homo sapien
gagtctaccgatggtttcgtccgcc

SEQ ID NO: 5254950 - DNA, 25 bp, Homo sapien
tgttggctagctcgttcccgatgga

SEQ ID NO: 5254951 - DNA, 25 bp, Homo sapien
accttgatgagctcgactggccagt

SEQ ID NO: 5254952 - DNA, 25 bp, Homo sapien
aactgttggcaaacgtgtcgggagc

SEQ ID NO: 5254953 - DNA, 25 bp, Homo sapien
gaattcctacaggttatcagggcct

SEQ ID NO: 5254954 - DNA, 25 bp, Homo sapien
tatgccggatgaatcggaattcccg

SEQ ID NO: 5254955 - DNA, 25 bp, Homo sapien
ccaaccgtggctgtcattatgatca

SEQ ID NO: 5254956 - DNA, 25 bp, Homo sapien
tatccaagctataagaataacaaaa

SEQ ID NO: 5254957 - DNA, 25 bp, Homo sapien
aacggcacagcttatgcctattaga

SEQ ID NO: 5254958 - DNA, 25 bp, Homo sapien
aattcataattagtgttaacggcac

SEQ ID NO: 5254959 - DNA, 25 bp, Homo sapien
cataaggttagaagcttaatacatt

SEQ ID NO: 5254960 - DNA, 25 bp, Homo sapien
tgtagttaaggcttcccgcatgctc

SEQ ID NO: 5254961 - DNA, 25 bp, Homo sapien
gaatttctactctgttatcgggctg

SEQ ID NO: 5254962 - DNA, 25 bp, Homo sapien
cagggtcgcttttaaggtgccagcc

SEQ ID NO: 5254963 - DNA, 25 bp, Homo sapien
gagagccttcaccaatcaccaggga

SEQ ID NO: 5254964 - DNA, 25 bp, Homo sapien
cggcttgcggagattccagccccga

SEQ ID NO: 5254965 - DNA, 25 bp, Homo sapien
ggcaggctgaacgacgcatttctaa

SEQ ID NO: 5254966 - DNA, 25 bp, Homo sapien
aattataagccgtccgaagctgccc

SEQ ID NO: 5254967 - DNA, 25 bp, Homo sapien
cttctgcacaagatggaatggacca

SEQ ID NO: 5254968 - DNA, 25 bp, Homo sapien
taactggccgcacgaataggtgact

SEQ ID NO: 5254969 - DNA, 25 bp, Homo sapien
gaaatgcaaatagcagcgagtccct

SEQ ID NO: 5254970 - DNA, 25 bp, Homo sapien
gacaacaataaagaacaacgggcca

SEQ ID NO: 5254971 - DNA, 25 bp, Homo sapien
cggaaacactgctgtaccgcgaggg

SEQ ID NO: 5254972 - DNA, 25 bp, Homo sapien
ccaaatgctttgacaccaggacaca

SEQ ID NO: 5254973 - DNA, 25 bp, Homo sapien
tttatgccagaaatttgagcccgag

SEQ ID NO: 5254974 - DNA, 25 bp, Homo sapien
tggaactcacatcactgggcagact

SEQ ID NO: 5254975 - DNA, 25 bp, Homo sapien
gacaaaacattgacctcagcaggcc

SEQ ID NO: 5254976 - DNA, 25 bp, Homo sapien
tctcagagttagctgtagggatcca

SEQ ID NO: 5254977 - DNA, 25 bp, Homo sapien
ccaactgcagatggactctggtcat

SEQ ID NO: 5254978 - DNA, 25 bp, Homo sapien
gccacccaactgcagatggactctg

SEQ ID NO: 5254979 - DNA, 25 bp, Homo sapien
gatgccacccaactgcagatggact

SEQ ID NO: 5254980 - DNA, 25 bp, Homo sapien
gcagatgccacccaactgcagatgg

SEQ ID NO: 5254981 - DNA, 25 bp, Homo sapien
tattactcacttgagagaccacagg

SEQ ID NO: 5254982 - DNA, 25 bp, Homo sapien
caagcgggaggtcacagtaattgct

SEQ ID NO: 5254983 - DNA, 25 bp, Homo sapien
taattgaaagaagagcacagcccgg

SEQ ID NO: 5254984 - DNA, 25 bp, Homo sapien
ggatcattaaatcagccagttgcaa

SEQ ID NO: 5254985 - DNA, 25 bp, Homo sapien
tttgagttgcaattagtggtactgt

SEQ ID NO: 5254986 - DNA, 25 bp, Homo sapien
tcgggggctcctgccaattaattaa

SEQ ID NO: 5254987 - DNA, 25 bp, Homo sapien
aattagtggtactgtcattttcggg

SEQ ID NO: 5254988 - DNA, 25 bp, Homo sapien
cattttcgggggctcctgccaatta

SEQ ID NO: 5254989 - DNA, 25 bp, Homo sapien
tggtgctgctaaacatggcggttct

SEQ ID NO: 5254990 - DNA, 25 bp, Homo sapien
tgcagagcggcatctggagtcagat

SEQ ID NO: 5254991 - DNA, 25 bp, Homo sapien
cgctactgacgtggatttggcagaa

SEQ ID NO: 5254992 - DNA, 25 bp, Homo sapien
tgaccctggcacacgtctgggaatg

SEQ ID NO: 5254993 - DNA, 25 bp, Homo sapien
tgtcatctggaaatggaggtagttt

SEQ ID NO: 5254994 - DNA, 25 bp, Homo sapien
tatgtcatctggaaatggaggtagt

SEQ ID NO: 5254995 - DNA, 25 bp, Homo sapien
ctggaaagtggtggtgcgattgtgg

SEQ ID NO: 5254996 - DNA, 25 bp, Homo sapien
aaacattgggatttaaggtatgagc

SEQ ID NO: 5254997 - DNA, 25 bp, Homo sapien
tatgcattacttgcatactaaagta

SEQ ID NO: 5254998 - DNA, 25 bp, Homo sapien
gctatgctcatatgtataaataatg

SEQ ID NO: 5254999 - DNA, 25 bp, Homo sapien
cattgcattgtcacgtgtacacgac

SEQ ID NO: 5255000 - DNA, 25 bp, Homo sapien
gagggagcctctgtatcgaaagaaa

SEQ ID NO: 5255001 - DNA, 25 bp, Homo sapien
tacatacactgggttaactacatta

SEQ ID NO: 5255002 - DNA, 25 bp, Homo sapien
taaaacaacacatatggctcctggt

SEQ ID NO: 5255003 - DNA, 25 bp, Homo sapien
cagacagtggtatggcaggtaagac

SEQ ID NO: 5255004 - DNA, 25 bp, Homo sapien
tgcttgctatgctgaattgacatgt

SEQ ID NO: 5255005 - DNA, 25 bp, Homo sapien
ttaagtgccacaaagaagcctctgt

SEQ ID NO: 5255006 - DNA, 25 bp, Homo sapien
tatactgtggaaatcatggctttcc

SEQ ID NO: 5255007 - DNA, 25 bp, Homo sapien
ccctgtgctgggactatttttctac

SEQ ID NO: 5255008 - DNA, 25 bp, Homo sapien
tgttgccaggtatgctcatagcgct

SEQ ID NO: 5255009 - DNA, 25 bp, Homo sapien
tctctgtctagatgccaggcctggt

SEQ ID NO: 5255010 - DNA, 25 bp, Homo sapien
gacgtgtgtgaaacccatctggagt

SEQ ID NO: 5255011 - DNA, 25 bp, Homo sapien
tggagtcaagaaatgctagcacgct

SEQ ID NO: 5255012 - DNA, 25 bp, Homo sapien
tctggctcaagcttaggaatcctac

SEQ ID NO: 5255013 - DNA, 25 bp, Homo sapien
caattgaatttggcactgattgaag

SEQ ID NO: 5255014 - DNA, 25 bp, Homo sapien
gcgatgagatcagaagccaattgaa

SEQ ID NO: 5255015 - DNA, 25 bp, Homo sapien
tatctgcatctataacttccagcga

SEQ ID NO: 5255016 - DNA, 25 bp, Homo sapien
gctccataattaaccgcagtgcaaa

SEQ ID NO: 5255017 - DNA, 25 bp, Homo sapien
ctgcaatcaaattgctgtccaaaga

SEQ ID NO: 5255018 - DNA, 25 bp, Homo sapien
tgctgtccaaagactttaaatgggc

SEQ ID NO: 5255019 - DNA, 25 bp, Homo sapien
aagactttaaatgggcagtatttct

SEQ ID NO: 5255020 - DNA, 25 bp, Homo sapien
tgcaatcaaattgctgtccaaagac

SEQ ID NO: 5255021 - DNA, 25 bp, Homo sapien
actgttgcccagatcaattttccca

SEQ ID NO: 5255022 - DNA, 25 bp, Homo sapien
tgggccgtgattgagccatgcactc

SEQ ID NO: 5255023 - DNA, 25 bp, Homo sapien
tagatggtcgtggtagtctgtgcct

SEQ ID NO: 5255024 - DNA, 25 bp, Homo sapien
tatgcacttacatacagtccacaaa

SEQ ID NO: 5255025 - DNA, 25 bp, Homo sapien
tgatcggctttggaacatatcgcat

SEQ ID NO: 5255026 - DNA, 25 bp, Homo sapien
tgaattccgttcaccataacagcgg

SEQ ID NO: 5255027 - DNA, 25 bp, Homo sapien
taacgtggcatgaagcccacggcgg

SEQ ID NO: 5255028 - DNA, 25 bp, Homo sapien
taacagcggctgatgtgatcggctt

SEQ ID NO: 5255029 - DNA, 25 bp, Homo sapien
aagcataaatcccgataaatgtgta

SEQ ID NO: 5255030 - DNA, 25 bp, Homo sapien
aaagcataaatcccgataaatgtgt

SEQ ID NO: 5255031 - DNA, 25 bp, Homo sapien
taaagcataaatcccgataaatgtg

SEQ ID NO: 5255032 - DNA, 25 bp, Homo sapien
agcataaatcccgataaatgtgtac

SEQ ID NO: 5255033 - DNA, 25 bp, Homo sapien
agagcccacccttctcgaagctttt

SEQ ID NO: 5255034 - DNA, 25 bp, Homo sapien
cactgcctacttgggatgccacaag

SEQ ID NO: 5255035 - DNA, 25 bp, Homo sapien
gtgaattctcgggttcctggaatcc

SEQ ID NO: 5255036 - DNA, 25 bp, Homo sapien
agcttttcactgcctacttgggatg

SEQ ID NO: 5255037 - DNA, 25 bp, Homo sapien
gttcccacggctgccggtctagaac

SEQ ID NO: 5255038 - DNA, 25 bp, Homo sapien
actgctgccgactaggacattccca

SEQ ID NO: 5255039 - DNA, 25 bp, Homo sapien
atggctgccggtccagagcaccgac

SEQ ID NO: 5255040 - DNA, 25 bp, Homo sapien
cggtctagaacaccgacactgctgc

SEQ ID NO: 5255041 - DNA, 25 bp, Homo sapien
ctgccagctcggagacagacactct

SEQ ID NO: 5255042 - DNA, 25 bp, Homo sapien
cattgctgcctgacgggctttgccg

SEQ ID NO: 5255043 - DNA, 25 bp, Homo sapien
cataggaatcactgggtaggttgca

SEQ ID NO: 5255044 - DNA, 25 bp, Homo sapien
gcaggagccgtgaaccctctggatt

SEQ ID NO: 5255045 - DNA, 25 bp, Homo sapien
tcttctcgatgagactattccgtct

SEQ ID NO: 5255046 - DNA, 25 bp, Homo sapien
caagggacacgctgacaatggcttc

SEQ ID NO: 5255047 - DNA, 25 bp, Homo sapien
actattccgtctagaggcatttgcc

SEQ ID NO: 5255048 - DNA, 25 bp, Homo sapien
tagcgtctccatacgcaagtcacat

SEQ ID NO: 5255049 - DNA, 25 bp, Homo sapien
gcatcttgtgagctcccccgagggt

SEQ ID NO: 5255050 - DNA, 25 bp, Homo sapien
tgtacatacgagcttcacgcaactc

SEQ ID NO: 5255051 - DNA, 25 bp, Homo sapien
tgctgggcacgggaggcttctaaat

SEQ ID NO: 5255052 - DNA, 25 bp, Homo sapien
gaggcttctaaatcacggctgtgtg

SEQ ID NO: 5255053 - DNA, 25 bp, Homo sapien
agcacggaccgcacgatggaagcat

SEQ ID NO: 5255054 - DNA, 25 bp, Homo sapien
gaaaccaccctactgcctgggacca

SEQ ID NO: 5255055 - DNA, 25 bp, Homo sapien
ctgggaccagcacgatggaagcacg

SEQ ID NO: 5255056 - DNA, 25 bp, Homo sapien
ggaccgcacgatggaagcatggtct

SEQ ID NO: 5255057 - DNA, 25 bp, Homo sapien
tcgtacttggcacggatccaccgtt

SEQ ID NO: 5255058 - DNA, 25 bp, Homo sapien
cgtacttggcacggatccaccgttc

SEQ ID NO: 5255059 - DNA, 25 bp, Homo sapien
gtggccatgagcacgaagcgctcgt

SEQ ID NO: 5255060 - DNA, 25 bp, Homo sapien
ccatgagcacgaagcgctcgtcggg

SEQ ID NO: 5255061 - DNA, 25 bp, Homo sapien
gctgttgttccggttattgtttctc

SEQ ID NO: 5255062 - DNA, 25 bp, Homo sapien
ctcccactgctgttgttccggttat

SEQ ID NO: 5255063 - DNA, 25 bp, Homo sapien
tcttctcggcgatgactaatcacgt

SEQ ID NO: 5255064 - DNA, 25 bp, Homo sapien
gaaatgtactatgtgctcaactgcc

SEQ ID NO: 5255065 - DNA, 25 bp, Homo sapien
taatgcgggaagaactcggctgtac

SEQ ID NO: 5255066 - DNA, 25 bp, Homo sapien
caatcacatcgtggcaatcaccggc

SEQ ID NO: 5255067 - DNA, 25 bp, Homo sapien
ggctggataccgcaacgatggaaaa

SEQ ID NO: 5255068 - DNA, 25 bp, Homo sapien
aacttgggccctagaaagtggctgc

SEQ ID NO: 5255069 - DNA, 25 bp, Homo sapien
tagtggactcgaacaccaacgcgtt

SEQ ID NO: 5255070 - DNA, 25 bp, Homo sapien
gaaaatcaggcgaggtactagcgtg

SEQ ID NO: 5255071 - DNA, 25 bp, Homo sapien
tatctacactggatgacgaggccgg

SEQ ID NO: 5255072 - DNA, 25 bp, Homo sapien
cagtgtcagccacgggcaggtttcc

SEQ ID NO: 5255073 - DNA, 25 bp, Homo sapien
tgcctagagttgcagaggaatcctc

SEQ ID NO: 5255074 - DNA, 25 bp, Homo sapien
ctatgcagatatagggaatgacccc

SEQ ID NO: 5255075 - DNA, 25 bp, Homo sapien
tcagacgttagcttcctgggccagt

SEQ ID NO: 5255076 - DNA, 25 bp, Homo sapien
tggttaaatgatagagggcccgtcc

SEQ ID NO: 5255077 - DNA, 25 bp, Homo sapien
tactctaaggagatacacctgcgcc

SEQ ID NO: 5255078 - DNA, 25 bp, Homo sapien
ggaaatgcatttgcccagggacctc

SEQ ID NO: 5255079 - DNA, 25 bp, Homo sapien
tagaatactgtacagcggacacaaa

SEQ ID NO: 5255080 - DNA, 25 bp, Homo sapien
ttctttattagaaagaggtctctac

SEQ ID NO: 5255081 - DNA, 25 bp, Homo sapien
tagaaagaggtctctacaccatagc

SEQ ID NO: 5255082 - DNA, 25 bp, Homo sapien
ccatagccacctctctctgttactt

SEQ ID NO: 5255083 - DNA, 25 bp, Homo sapien
cttcttccgcatttcttagaagaca

SEQ ID NO: 5255084 - DNA, 25 bp, Homo sapien
attttgtggcactatgggctcccac

SEQ ID NO: 5255085 - DNA, 25 bp, Homo sapien
tcctgtgacggcaggtgaccaggtc

SEQ ID NO: 5255086 - DNA, 25 bp, Homo sapien
tagaagacaagtcagcccagtaccc

SEQ ID NO: 5255087 - DNA, 25 bp, Homo sapien
tctgggaaggtgattccgtttccca

SEQ ID NO: 5255088 - DNA, 25 bp, Homo sapien
tggtctgggaaggtgattccgtttc

SEQ ID NO: 5255089 - DNA, 25 bp, Homo sapien
gtctttgtgcacaattccatatggc

SEQ ID NO: 5255090 - DNA, 25 bp, Homo sapien
cgtgtttgggttcgcctcaccttgg

SEQ ID NO: 5255091 - DNA, 25 bp, Homo sapien
cctctatcgtggtgaaggtgtggtc

SEQ ID NO: 5255092 - DNA, 25 bp, Homo sapien
tgcttccaccagcagcgtgtttggg

SEQ ID NO: 5255093 - DNA, 25 bp, Homo sapien
gtgaatgatcccacaaggaaaggcc

SEQ ID NO: 5255094 - DNA, 25 bp, Homo sapien
ggcgtggactgccaggcttttgtcc

SEQ ID NO: 5255095 - DNA, 25 bp, Homo sapien
tttgtccattgtacagccgcactgt

SEQ ID NO: 5255096 - DNA, 25 bp, Homo sapien
atcttcgctgtcaccacgggcaggt

SEQ ID NO: 5255097 - DNA, 25 bp, Homo sapien
caggtccgggtgtagcgagggtggg

SEQ ID NO: 5255098 - DNA, 25 bp, Homo sapien
tggtgataaattgcgactgagtagc

SEQ ID NO: 5255099 - DNA, 25 bp, Homo sapien
ttctcggaacgtgctggagacagta

SEQ ID NO: 5255100 - DNA, 25 bp, Homo sapien
tgagtagcttctcggaacgtgctgg

SEQ ID NO: 5255101 - DNA, 25 bp, Homo sapien
cagtagggctgatcgtaactcctcc

SEQ ID NO: 5255102 - DNA, 25 bp, Homo sapien
tttccacctggcaactctgcgtggc

SEQ ID NO: 5255103 - DNA, 25 bp, Homo sapien
cacacggatggtctgtccagctgct

SEQ ID NO: 5255104 - DNA, 25 bp, Homo sapien
aattgtgagttcctcctcgcagcca

SEQ ID NO: 5255105 - DNA, 25 bp, Homo sapien
agccactcggaagtccacacggatg

SEQ ID NO: 5255106 - DNA, 25 bp, Homo sapien
ttagatcatggctttagagtggatc

SEQ ID NO: 5255107 - DNA, 25 bp, Homo sapien
ttagagtggatcatggctgtagagt

SEQ ID NO: 5255108 - DNA, 25 bp, Homo sapien
tagagtggatcatggctttagagtg

SEQ ID NO: 5255109 - DNA, 25 bp, Homo sapien
gtagagtggatcatggcgttagagg

SEQ ID NO: 5255110 - DNA, 25 bp, Homo sapien
cgatttaaaggtgctggctgcgccc

SEQ ID NO: 5255111 - DNA, 25 bp, Homo sapien
gtaacttcgacaaggcggaggcgct

SEQ ID NO: 5255112 - DNA, 25 bp, Homo sapien
tgcagttagcaaagaggaaccgcgc

SEQ ID NO: 5255113 - DNA, 25 bp, Homo sapien
cacgttatacaatctggaggcacag

SEQ ID NO: 5255114 - DNA, 25 bp, Homo sapien
tctccacgaccacccgttacctcga

SEQ ID NO: 5255115 - DNA, 25 bp, Homo sapien
cccgttacctcgactctggcggcgg

SEQ ID NO: 5255116 - DNA, 25 bp, Homo sapien
acgaccacccgttacctcgactctg

SEQ ID NO: 5255117 - DNA, 25 bp, Homo sapien
accacccgttacctcgactctggcg

SEQ ID NO: 5255118 - DNA, 25 bp, Homo sapien
tcgaggcccgcaggattccccgcgt

SEQ ID NO: 5255119 - DNA, 25 bp, Homo sapien
ctaggactgggcgactggcgggagc

SEQ ID NO: 5255120 - DNA, 25 bp, Homo sapien
cgggagcgccagaccctcgaggccc

SEQ ID NO: 5255121 - DNA, 25 bp, Homo sapien
cgcgtcctccgagaccacgggtggc

SEQ ID NO: 5255122 - DNA, 25 bp, Homo sapien
tactgaggcagctaacagccatgag

SEQ ID NO: 5255123 - DNA, 25 bp, Homo sapien
ggaagtgatgcataaattcttcaaa

SEQ ID NO: 5255124 - DNA, 25 bp, Homo sapien
tctcacgttccattccaattaaatt

SEQ ID NO: 5255125 - DNA, 25 bp, Homo sapien
cagccatgagcacaaagtacgggat

SEQ ID NO: 5255126 - DNA, 25 bp, Homo sapien
gcggacgcgcgcgacgaggacgagc

SEQ ID NO: 5255127 - DNA, 25 bp, Homo sapien
cgacgaggacgagcgcagcccgctg

SEQ ID NO: 5255128 - DNA, 25 bp, Homo sapien
gagcgcagcccgctgcacaaagcct

SEQ ID NO: 5255129 - DNA, 25 bp, Homo sapien
aaagcctgcggccacgcgagccaca

SEQ ID NO: 5255130 - DNA, 25 bp, Homo sapien
aattcaggtgcagccaatatccagt

SEQ ID NO: 5255131 - DNA, 25 bp, Homo sapien
ggatgcagatgacgaggtgaccaca

SEQ ID NO: 5255132 - DNA, 25 bp, Homo sapien
aatggactccggcttgaagattcgg

SEQ ID NO: 5255133 - DNA, 25 bp, Homo sapien
taggctgagctgtttagagtgcccc

SEQ ID NO: 5255134 - DNA, 25 bp, Homo sapien
tcgggggccacaccgcctgcgtccg

SEQ ID NO: 5255135 - DNA, 25 bp, Homo sapien
gccgcggcgcagacccagacgccag

SEQ ID NO: 5255136 - DNA, 25 bp, Homo sapien
gcggcgcagacccagacgccagccc

SEQ ID NO: 5255137 - DNA, 25 bp, Homo sapien
tgctcggccgcggcgcagacccaga

SEQ ID NO: 5255138 - DNA, 25 bp, Homo sapien
tcaaagaagccaattgtggccgcca

SEQ ID NO: 5255139 - DNA, 25 bp, Homo sapien
caaagaagccaattgtggccgccat

SEQ ID NO: 5255140 - DNA, 25 bp, Homo sapien
aaaaatcaaagaagccaattgtggc

SEQ ID NO: 5255141 - DNA, 25 bp, Homo sapien
aatcaaagaagccaattgtggccgc

SEQ ID NO: 5255142 - DNA, 25 bp, Homo sapien
tgcactgggcttggtagcagtgacg

SEQ ID NO: 5255143 - DNA, 25 bp, Homo sapien
tggataagatcacattaataatgag

SEQ ID NO: 5255144 - DNA, 25 bp, Homo sapien
cagtgacgggaaaataagttagtga

SEQ ID NO: 5255145 - DNA, 25 bp, Homo sapien
ttcctcccttattgtgttcctccac

SEQ ID NO: 5255146 - DNA, 25 bp, Homo sapien
gctgccaatgaaagcggcacttgac

SEQ ID NO: 5255147 - DNA, 25 bp, Homo sapien
ggctgccaatgaaagcggcacttga

SEQ ID NO: 5255148 - DNA, 25 bp, Homo sapien
gggctgccaatgaaagcggcacttg

SEQ ID NO: 5255149 - DNA, 25 bp, Homo sapien
tgcactcatccacagcggatacacg

SEQ ID NO: 5255150 - DNA, 25 bp, Homo sapien
gcggatacacggtgttcaagggcat

SEQ ID NO: 5255151 - DNA, 25 bp, Homo sapien
cacgctgaggattgggccgctgtgt

SEQ ID NO: 5255152 - DNA, 25 bp, Homo sapien
tgggccgctgtgttttgcactcatc

SEQ ID NO: 5255153 - DNA, 25 bp, Homo sapien
taattaaatccccacgccagttgta

SEQ ID NO: 5255154 - DNA, 25 bp, Homo sapien
gtcacctttatcagggagagcttca

SEQ ID NO: 5255155 - DNA, 25 bp, Homo sapien
gaacacgcaatttgtctcaagaggc

SEQ ID NO: 5255156 - DNA, 25 bp, Homo sapien
gagtctataaatgtccttccagggc

SEQ ID NO: 5255157 - DNA, 25 bp, Homo sapien
catcagacaaaactggcctcacttt

SEQ ID NO: 5255158 - DNA, 25 bp, Homo sapien
cttcaggataggtaaacttctcgtt

SEQ ID NO: 5255159 - DNA, 25 bp, Homo sapien
tggaatttaactccatcagacaaaa

SEQ ID NO: 5255160 - DNA, 25 bp, Homo sapien
tgaccaaattgtctcctagaccacc

SEQ ID NO: 5255161 - DNA, 25 bp, Homo sapien
ggatcacaaatatcgcctggaagca

SEQ ID NO: 5255162 - DNA, 25 bp, Homo sapien
tccgggattccatatgtgccacgct

SEQ ID NO: 5255163 - DNA, 25 bp, Homo sapien
gagacaccacgaagagacagcagtg

SEQ ID NO: 5255164 - DNA, 25 bp, Homo sapien
actggttgcctgagagatgttcgcc

SEQ ID NO: 5255165 - DNA, 25 bp, Homo sapien
ccgacagccgtgaggaggaggagcg

SEQ ID NO: 5255166 - DNA, 25 bp, Homo sapien
gtgaggaggaggagcgctggcaggg

SEQ ID NO: 5255167 - DNA, 25 bp, Homo sapien
ggaggaggagcgctggcaggggcag

SEQ ID NO: 5255168 - DNA, 25 bp, Homo sapien
gccgtgaggaggaggagcgctggca

SEQ ID NO: 5255169 - DNA, 25 bp, Homo sapien
ctgagcattgacgatccaggaattg

SEQ ID NO: 5255170 - DNA, 25 bp, Homo sapien
tgagcattgacgatccaggaattga

SEQ ID NO: 5255171 - DNA, 25 bp, Homo sapien
aaaatgtcctccctgaatctcaaaa

SEQ ID NO: 5255172 - DNA, 25 bp, Homo sapien
tccacctgaaaatgtcctccctgaa

SEQ ID NO: 5255173 - DNA, 25 bp, Homo sapien
cttcccgcgggcctctaagcctggg

SEQ ID NO: 5255174 - DNA, 25 bp, Homo sapien
ggtctgcttgagatgtgcgctctgt

SEQ ID NO: 5255175 - DNA, 25 bp, Homo sapien
gatgtgcgctctgtatgggttcttc

SEQ ID NO: 5255176 - DNA, 25 bp, Homo sapien
ttctcatgccggatgttgaagaggc

SEQ ID NO: 5255177 - DNA, 25 bp, Homo sapien
catcagccattaaccttttctcttg

SEQ ID NO: 5255178 - DNA, 25 bp, Homo sapien
gtcatcagccattaaccttttctct

SEQ ID NO: 5255179 - DNA, 25 bp, Homo sapien
cagccattaaccttttctcttggct

SEQ ID NO: 5255180 - DNA, 25 bp, Homo sapien
tcagccattaaccttttctcttggc

SEQ ID NO: 5255181 - DNA, 25 bp, Homo sapien
tagctatcgaccttgtgatgcacgg

SEQ ID NO: 5255182 - DNA, 25 bp, Homo sapien
gtcctataggaaacgcacagcgcag

SEQ ID NO: 5255183 - DNA, 25 bp, Homo sapien
gattttgtgcaaggctccagtagct

SEQ ID NO: 5255184 - DNA, 25 bp, Homo sapien
ccactgtgcggctgcttatgtccta

SEQ ID NO: 5255185 - DNA, 25 bp, Homo sapien
gaagtgcaggctgcgatgaagaagg

SEQ ID NO: 5255186 - DNA, 25 bp, Homo sapien
ggaatggaagtgcaggctgcgatga

SEQ ID NO: 5255187 - DNA, 25 bp, Homo sapien
aatggaagtgcaggctgcgatgaag

SEQ ID NO: 5255188 - DNA, 25 bp, Homo sapien
cttcctggaatggaagtgcaggctg

SEQ ID NO: 5255189 - DNA, 25 bp, Homo sapien
ctgatggggagaggaagcacagcag

SEQ ID NO: 5255190 - DNA, 25 bp, Homo sapien
tgatggggagaggaagcacagcagc

SEQ ID NO: 5255191 - DNA, 25 bp, Homo sapien
gatggggagaggaagcacagcagct

SEQ ID NO: 5255192 - DNA, 25 bp, Homo sapien
cacggagcaggtcagcaaactgagc

SEQ ID NO: 5255193 - DNA, 25 bp, Homo sapien
tcagcaaactgagcctattggccat

SEQ ID NO: 5255194 - DNA, 25 bp, Homo sapien
gcctattggccatccacgctgaaaa

SEQ ID NO: 5255195 - DNA, 25 bp, Homo sapien
tattggccatccacgctgaaaaccc

SEQ ID NO: 5255196 - DNA, 25 bp, Homo sapien
ggaccccacttatggcccaagaaga

SEQ ID NO: 5255197 - DNA, 25 bp, Homo sapien
ggatttgatgtctgttgcaaagcaa

SEQ ID NO: 5255198 - DNA, 25 bp, Homo sapien
ccaagatggttctgccaagatcctt

SEQ ID NO: 5255199 - DNA, 25 bp, Homo sapien
caagatcctttcacgtgtcatggga

SEQ ID NO: 5255200 - DNA, 25 bp, Homo sapien
tcttatagaagcagctgtagaactg

SEQ ID NO: 5255201 - DNA, 25 bp, Homo sapien
gaggatcttatagaagcagctgtag

SEQ ID NO: 5255202 - DNA, 25 bp, Homo sapien
gatcttatagaagcagctgtagaac

SEQ ID NO: 5255203 - DNA, 25 bp, Homo sapien
aggatcttatagaagcagctgtaga

SEQ ID NO: 5255204 - DNA, 25 bp, Homo sapien
ctgcattaacttgctaaggaaagga

SEQ ID NO: 5255205 - DNA, 25 bp, Homo sapien
tatccaatctgaagagatagttgtt

SEQ ID NO: 5255206 - DNA, 25 bp, Homo sapien
gatagttgttgatgcgaagatggtt

SEQ ID NO: 5255207 - DNA, 25 bp, Homo sapien
ggtttctccattggattcagttcta

SEQ ID NO: 5255208 - DNA, 25 bp, Homo sapien
taaaggtccgtcctcatgacaaatg

SEQ ID NO: 5255209 - DNA, 25 bp, Homo sapien
catcacattgtacggaatctggcca

SEQ ID NO: 5255210 - DNA, 25 bp, Homo sapien
cattaggtaaagactcggcgtgcgc

SEQ ID NO: 5255211 - DNA, 25 bp, Homo sapien
cattttgatagtgcacccaccagca

SEQ ID NO: 5255212 - DNA, 25 bp, Homo sapien
ctcctcagcgaacataaaagaacag

SEQ ID NO: 5255213 - DNA, 25 bp, Homo sapien
cctcagcgaacataaaagaacagaa

SEQ ID NO: 5255214 - DNA, 25 bp, Homo sapien
ctctcctcagcgaacataaaagaac

SEQ ID NO: 5255215 - DNA, 25 bp, Homo sapien
aaagctctcctcagcgaacataaaa

SEQ ID NO: 5255216 - DNA, 25 bp, Homo sapien
cagaatacccaaggtagagggcgga

SEQ ID NO: 5255217 - DNA, 25 bp, Homo sapien
cagccctgtcattggagccagaata

SEQ ID NO: 5255218 - DNA, 25 bp, Homo sapien
tggcagctttctccacgttccatga

SEQ ID NO: 5255219 - DNA, 25 bp, Homo sapien
tggtttaaccctgaaggcaactgaa

SEQ ID NO: 5255220 - DNA, 25 bp, Homo sapien
taaaaacttaaagctagctgtggac

SEQ ID NO: 5255221 - DNA, 25 bp, Homo sapien
gcagattcatattacccaagcccca

SEQ ID NO: 5255222 - DNA, 25 bp, Homo sapien
cggtggagcggattcagtcatgaaa

SEQ ID NO: 5255223 - DNA, 25 bp, Homo sapien
cagccccggtcagttgcagattcat

SEQ ID NO: 5255224 - DNA, 25 bp, Homo sapien
agatgagtcttggaatttctctcag

SEQ ID NO: 5255225 - DNA, 25 bp, Homo sapien
aagatgagtcttggaatttctctca

SEQ ID NO: 5255226 - DNA, 25 bp, Homo sapien
aaagatgagtcttggaatttctctc

SEQ ID NO: 5255227 - DNA, 25 bp, Homo sapien
ggtcatctgtgattgtataatccca

SEQ ID NO: 5255228 - DNA, 25 bp, Homo sapien
caagggataattcctggagagttca

SEQ ID NO: 5255229 - DNA, 25 bp, Homo sapien
tagggagaaatactgggtacttgtg

SEQ ID NO: 5255230 - DNA, 25 bp, Homo sapien
tctgttttgtaataggaggcaaggg

SEQ ID NO: 5255231 - DNA, 25 bp, Homo sapien
caaaaccctcgggacaattgtcctg

SEQ ID NO: 5255232 - DNA, 25 bp, Homo sapien
catcaccatatcagcgtgaggaagg

SEQ ID NO: 5255233 - DNA, 25 bp, Homo sapien
cagttctgagtttgcctcagagtct

SEQ ID NO: 5255234 - DNA, 25 bp, Homo sapien
aaaggctatcccctgctaaggtcac

SEQ ID NO: 5255235 - DNA, 25 bp, Homo sapien
cagagagctttgatttagtgtgcgc

SEQ ID NO: 5255236 - DNA, 25 bp, Homo sapien
ttgatttagtgtgcgctctggaagg

SEQ ID NO: 5255237 - DNA, 25 bp, Homo sapien
gaaggtgggtgagctgtgtcatagg

SEQ ID NO: 5255238 - DNA, 25 bp, Homo sapien
agctgtgtcataggctttgggcccc

SEQ ID NO: 5255239 - DNA, 25 bp, Homo sapien
aagtgggccagagtgtgcaaggcca

SEQ ID NO: 5255240 - DNA, 25 bp, Homo sapien
cagccacagtggtgggatgggatct

SEQ ID NO: 5255241 - DNA, 25 bp, Homo sapien
agccacagtggtgggatgggatctg

SEQ ID NO: 5255242 - DNA, 25 bp, Homo sapien
cattaaagtattgcaattttgctgt

SEQ ID NO: 5255243 - DNA, 25 bp, Homo sapien
gcattaaagtattgcaattttgctg

SEQ ID NO: 5255244 - DNA, 25 bp, Homo sapien
ctgcattaaagtattgcaattttgc

SEQ ID NO: 5255245 - DNA, 25 bp, Homo sapien
ctctgcattaaagtattgcaatttt

SEQ ID NO: 5255246 - DNA, 25 bp, Homo sapien
cactgatctgtacctagcattctag

SEQ ID NO: 5255247 - DNA, 25 bp, Homo sapien
gctagatttcatgtggcttccacca

SEQ ID NO: 5255248 - DNA, 25 bp, Homo sapien
tctgcttgcactgatctgtacctag

SEQ ID NO: 5255249 - DNA, 25 bp, Homo sapien
tttagacaggagcagatagtgactt

SEQ ID NO: 5255250 - DNA, 25 bp, Homo sapien
tcaaatataatgtgggcgaattctc

SEQ ID NO: 5255251 - DNA, 25 bp, Homo sapien
tcttgtcacgagtgtgccctattcc

SEQ ID NO: 5255252 - DNA, 25 bp, Homo sapien
tccagagctgagatactgcactttt

SEQ ID NO: 5255253 - DNA, 25 bp, Homo sapien
acatttaggataaggactgctccct

SEQ ID NO: 5255254 - DNA, 25 bp, Homo sapien
caatgaatttgtagtcctggagggc

SEQ ID NO: 5255255 - DNA, 25 bp, Homo sapien
caagagatagtccacatgctgtcgg

SEQ ID NO: 5255256 - DNA, 25 bp, Homo sapien
tcctggacggacctctggagactgg

SEQ ID NO: 5255257 - DNA, 25 bp, Homo sapien
cacagggcccgcatatagaatgtat

SEQ ID NO: 5255258 - DNA, 25 bp, Homo sapien
cactcgagttttgccagcagaggta

SEQ ID NO: 5255259 - DNA, 25 bp, Homo sapien
gattcgtctcccagaccagattgag

SEQ ID NO: 5255260 - DNA, 25 bp, Homo sapien
aaaagacacaaaaagcgcctctggt

SEQ ID NO: 5255261 - DNA, 25 bp, Homo sapien
ttgagaacaggccaaaactagaaaa

SEQ ID NO: 5255262 - DNA, 25 bp, Homo sapien
tgtttgtatctcctcaggaccccag

SEQ ID NO: 5255263 - DNA, 25 bp, Homo sapien
aagtgtttgtatctcctcaggaccc

SEQ ID NO: 5255264 - DNA, 25 bp, Homo sapien
gaactgagaagtgtttgtatctcct

SEQ ID NO: 5255265 - DNA, 25 bp, Homo sapien
tgagaagtgtttgtatctcctcagg

SEQ ID NO: 5255266 - DNA, 25 bp, Homo sapien
catgtatgaatttgacgtaggcctc

SEQ ID NO: 5255267 - DNA, 25 bp, Homo sapien
tccccaatttgatattcgacatgta

SEQ ID NO: 5255268 - DNA, 25 bp, Homo sapien
cgtaggcctcatatgaatacttaga

SEQ ID NO: 5255269 - DNA, 25 bp, Homo sapien
atcatactcagtggttgaacacttc

SEQ ID NO: 5255270 - DNA, 25 bp, Homo sapien
gcacggccgggcacccggcccaggc

SEQ ID NO: 5255271 - DNA, 25 bp, Homo sapien
gggcacccggcccaggcgcctgcga

SEQ ID NO: 5255272 - DNA, 25 bp, Homo sapien
ggcacccggcccaggcgcctgcgag

SEQ ID NO: 5255273 - DNA, 25 bp, Homo sapien
gccgggcacccggcccaggcgcctg

SEQ ID NO: 5255274 - DNA, 25 bp, Homo sapien
gaccccggacaggatgctaacgtag

SEQ ID NO: 5255275 - DNA, 25 bp, Homo sapien
tgtctgagcccgctggaaatgtacg

SEQ ID NO: 5255276 - DNA, 25 bp, Homo sapien
gtctcacgtggctagaaagtctccg

SEQ ID NO: 5255277 - DNA, 25 bp, Homo sapien
agagaacgcgctccgcattgcagag

SEQ ID NO: 5255278 - DNA, 25 bp, Homo sapien
cactttgcaacaactgtgagctctg

SEQ ID NO: 5255279 - DNA, 25 bp, Homo sapien
ggctgcagacttgcattatatacac

SEQ ID NO: 5255280 - DNA, 25 bp, Homo sapien
ctgagcactttgcaacaactgtgag

SEQ ID NO: 5255281 - DNA, 25 bp, Homo sapien
ctgtgcgctggctcccttagtgctg

SEQ ID NO: 5255282 - DNA, 25 bp, Homo sapien
gaagccgtgccttctttccgagcag

SEQ ID NO: 5255283 - DNA, 25 bp, Homo sapien
gaagccctccgaattagcaaaagca

SEQ ID NO: 5255284 - DNA, 25 bp, Homo sapien
tagcttccggacttacagactctgg

SEQ ID NO: 5255285 - DNA, 25 bp, Homo sapien
caaaacaggtaaacagtgggtgcca

SEQ ID NO: 5255286 - DNA, 25 bp, Homo sapien
ccactttctttgctaggcgtgccta

SEQ ID NO: 5255287 - DNA, 25 bp, Homo sapien
caagctagagctcccatgtgcaact

SEQ ID NO: 5255288 - DNA, 25 bp, Homo sapien
taaaactacgtctgcaatgtctgcc

SEQ ID NO: 5255289 - DNA, 25 bp, Homo sapien
gctgccttggcgatgctttatggaa

SEQ ID NO: 5255290 - DNA, 25 bp, Homo sapien
tagaaatcataataccttctcaacg

SEQ ID NO: 5255291 - DNA, 25 bp, Homo sapien
ttctcaacgcttcaacgacttgctg

SEQ ID NO: 5255292 - DNA, 25 bp, Homo sapien
ttcaacgacttgctgttaatacggg

SEQ ID NO: 5255293 - DNA, 25 bp, Homo sapien
taataccttctcaacgcttcaacga

SEQ ID NO: 5255294 - DNA, 25 bp, Homo sapien
cgggcgtccaggagagacttttctg

SEQ ID NO: 5255295 - DNA, 25 bp, Homo sapien
ttttctgaaatcgtcaccgagctgg

SEQ ID NO: 5255296 - DNA, 25 bp, Homo sapien
ggtgttgacggactgagcctcttgt

SEQ ID NO: 5255297 - DNA, 25 bp, Homo sapien
accagcgactgtggccagcagcgga

SEQ ID NO: 5255298 - DNA, 25 bp, Homo sapien
ttagttccttccagagaatgccacg

SEQ ID NO: 5255299 - DNA, 25 bp, Homo sapien
gaatgccacgtgttcaggcacctgg

SEQ ID NO: 5255300 - DNA, 25 bp, Homo sapien
tgagctcactctgcaagctgagggt

SEQ ID NO: 5255301 - DNA, 25 bp, Homo sapien
caggtactcaggtttagagccttca

SEQ ID NO: 5255302 - DNA, 25 bp, Homo sapien
aggactttctcggagatgcacctct

SEQ ID NO: 5255303 - DNA, 25 bp, Homo sapien
ttgacaacgaccgtgctgcagcaag

SEQ ID NO: 5255304 - DNA, 25 bp, Homo sapien
tattcatcaaccaagtatccttgac

SEQ ID NO: 5255305 - DNA, 25 bp, Homo sapien
gggctcctcttgtcaattgcaggac

SEQ ID NO: 5255306 - DNA, 25 bp, Homo sapien
cagggagagaactttcccgtggccg

SEQ ID NO: 5255307 - DNA, 25 bp, Homo sapien
gaacaaaaagcagtgaacgtcagct

SEQ ID NO: 5255308 - DNA, 25 bp, Homo sapien
atggcctgcaaagggactcctctgt

SEQ ID NO: 5255309 - DNA, 25 bp, Homo sapien
tttagcggccctgtcgcacgttgca

SEQ ID NO: 5255310 - DNA, 25 bp, Homo sapien
aggagcttgaatggaggaccgcccc

SEQ ID NO: 5255311 - DNA, 25 bp, Homo sapien
gcttgaatggaggaccgccccacag

SEQ ID NO: 5255312 - DNA, 25 bp, Homo sapien
ccagagtcccggggagcagaggagc

SEQ ID NO: 5255313 - DNA, 25 bp, Homo sapien
cagaggagcttgaatggaggaccgc

SEQ ID NO: 5255314 - DNA, 25 bp, Homo sapien
cgggaggcctggccgtcctcagagt

SEQ ID NO: 5255315 - DNA, 25 bp, Homo sapien
aaccacgctggtcctgcagcgggag

SEQ ID NO: 5255316 - DNA, 25 bp, Homo sapien
agggaaccacgctggtcctgcagcg

SEQ ID NO: 5255317 - DNA, 25 bp, Homo sapien
ggagggaaccacgctggtcctgcag

SEQ ID NO: 5255318 - DNA, 25 bp, Homo sapien
ctgactcagtgtcctccacggctga

SEQ ID NO: 5255319 - DNA, 25 bp, Homo sapien
tcctccacggctgacagaaagggct

SEQ ID NO: 5255320 - DNA, 25 bp, Homo sapien
gctgggcctcccaagacagccgcat

SEQ ID NO: 5255321 - DNA, 25 bp, Homo sapien
tgggcctcccaagacagccgcatcc

SEQ ID NO: 5255322 - DNA, 25 bp, Homo sapien
ggacaacttgaacagaatccctgaa

SEQ ID NO: 5255323 - DNA, 25 bp, Homo sapien
aagtgagaaatttcgcggcctcggc

SEQ ID NO: 5255324 - DNA, 25 bp, Homo sapien
tagccgatgctcaataaaacgtcac

SEQ ID NO: 5255325 - DNA, 25 bp, Homo sapien
gagagttaatctgtctgcatctacc

SEQ ID NO: 5255326 - DNA, 25 bp, Homo sapien
cctgttttggccgagtacttgaaga

SEQ ID NO: 5255327 - DNA, 25 bp, Homo sapien
caaggaagaccaccacgtaggagaa

SEQ ID NO: 5255328 - DNA, 25 bp, Homo sapien
cacaggtcggcaatggccaggttca

SEQ ID NO: 5255329 - DNA, 25 bp, Homo sapien
catggccagctgatgtccgagaagt

SEQ ID NO: 5255330 - DNA, 25 bp, Homo sapien
catttggtgctctgctccaaggcag

SEQ ID NO: 5255331 - DNA, 25 bp, Homo sapien
tttggtgctctgctccaaggcagag

SEQ ID NO: 5255332 - DNA, 25 bp, Homo sapien
tcatttggtgctctgctccaaggca

SEQ ID NO: 5255333 - DNA, 25 bp, Homo sapien
ggtgctctgctccaaggcagagtac

SEQ ID NO: 5255334 - DNA, 25 bp, Homo sapien
tatatgtcagcactatgcctcccaa

SEQ ID NO: 5255335 - DNA, 25 bp, Homo sapien
tccttagtcaaaactgaagtcacgc

SEQ ID NO: 5255336 - DNA, 25 bp, Homo sapien
tgacagctgcgtcatcaagagaaag

SEQ ID NO: 5255337 - DNA, 25 bp, Homo sapien
catcaagacccgaagctactttgct

SEQ ID NO: 5255338 - DNA, 25 bp, Homo sapien
acttacaaattgagagaactctctg

SEQ ID NO: 5255339 - DNA, 25 bp, Homo sapien
aatgtcacaaactgcattacaaagc

SEQ ID NO: 5255340 - DNA, 25 bp, Homo sapien
ctctctgaaatgcaactgttcgttg

SEQ ID NO: 5255341 - DNA, 25 bp, Homo sapien
caactgttcgttgtgtgtgcagatt

SEQ ID NO: 5255342 - DNA, 25 bp, Homo sapien
tatcatgtgtgctattcaagtgcca

SEQ ID NO: 5255343 - DNA, 25 bp, Homo sapien
cacacaggtggtacagatgaggaca

SEQ ID NO: 5255344 - DNA, 25 bp, Homo sapien
gcctgtgtgtgccatatatatccat

SEQ ID NO: 5255345 - DNA, 25 bp, Homo sapien
gacggagagttcagacaggttcaga

SEQ ID NO: 5255346 - DNA, 25 bp, Homo sapien
gcttctgggcgagaagcagggcctg

SEQ ID NO: 5255347 - DNA, 25 bp, Homo sapien
gtcgtggtatcagtgctgccgctgc

SEQ ID NO: 5255348 - DNA, 25 bp, Homo sapien
gcggtgtcagcttctctcaagatgt

SEQ ID NO: 5255349 - DNA, 25 bp, Homo sapien
ccaagctgaatggtggatggcttct

SEQ ID NO: 5255350 - DNA, 25 bp, Homo sapien
cctgcagtgtgggtctgttggggca

SEQ ID NO: 5255351 - DNA, 25 bp, Homo sapien
tgcagtgtgggtctgttggggcaca

SEQ ID NO: 5255352 - DNA, 25 bp, Homo sapien
cagtgtgggtctgttggggcacaga

SEQ ID NO: 5255353 - DNA, 25 bp, Homo sapien
ctcctgcagtgtgggtctgttgggg

SEQ ID NO: 5255354 - DNA, 25 bp, Homo sapien
agtggcagcctagtttcccaaacag

SEQ ID NO: 5255355 - DNA, 25 bp, Homo sapien
ttctccagtggcagcctagtttccc

SEQ ID NO: 5255356 - DNA, 25 bp, Homo sapien
ttggaatcagagttgttctccagtg

SEQ ID NO: 5255357 - DNA, 25 bp, Homo sapien
agctctggacaaggattagcggctt

SEQ ID NO: 5255358 - DNA, 25 bp, Homo sapien
ccaaatcaacctgaagcccgttcct

SEQ ID NO: 5255359 - DNA, 25 bp, Homo sapien
ttctcactcgtgtttcaccctcatg

SEQ ID NO: 5255360 - DNA, 25 bp, Homo sapien
tccttctcactcgtgtttcaccctc

SEQ ID NO: 5255361 - DNA, 25 bp, Homo sapien
aatcaacctgaagcccgttccttct

SEQ ID NO: 5255362 - DNA, 25 bp, Homo sapien
caaaggcaacatacttggctgtaac

SEQ ID NO: 5255363 - DNA, 25 bp, Homo sapien
gggcaaaggcaacatacttggctgt

SEQ ID NO: 5255364 - DNA, 25 bp, Homo sapien
tagaactccactggggcactagaat

SEQ ID NO: 5255365 - DNA, 25 bp, Homo sapien
tgttcgaaatgggactttattataa

SEQ ID NO: 5255366 - DNA, 25 bp, Homo sapien
caatgattaaactcagtccagctcc

SEQ ID NO: 5255367 - DNA, 25 bp, Homo sapien
atgtgctgcagagaacaaccccagc

SEQ ID NO: 5255368 - DNA, 25 bp, Homo sapien
tgagtgcaccctagatgcctctcca

SEQ ID NO: 5255369 - DNA, 25 bp, Homo sapien
gatcccgcatttaggtgcccagatg

SEQ ID NO: 5255370 - DNA, 25 bp, Homo sapien
gttgcagttaccgtgcaaatagtgg

SEQ ID NO: 5255371 - DNA, 25 bp, Homo sapien
tcagttcaggatccctaaaccatta

SEQ ID NO: 5255372 - DNA, 25 bp, Homo sapien
caaatagtggagatcgtcaactggg

SEQ ID NO: 5255373 - DNA, 25 bp, Homo sapien
gtttatacatgccacccacttctgg

SEQ ID NO: 5255374 - DNA, 25 bp, Homo sapien
tctacgaccctgtggaatgacctca

SEQ ID NO: 5255375 - DNA, 25 bp, Homo sapien
aatatcaagcacaaggtaactggcc

SEQ ID NO: 5255376 - DNA, 25 bp, Homo sapien
tacaaattgtgggatagagattccg

SEQ ID NO: 5255377 - DNA, 25 bp, Homo sapien
gagattcatcgggtcttgggtacaa

SEQ ID NO: 5255378 - DNA, 25 bp, Homo sapien
catttgctacaacagggtagtgcca

SEQ ID NO: 5255379 - DNA, 25 bp, Homo sapien
tctggaactaggtttcctgcagcca

SEQ ID NO: 5255380 - DNA, 25 bp, Homo sapien
catgcttgctgctacatgagggtca

SEQ ID NO: 5255381 - DNA, 25 bp, Homo sapien
tccagcgggaatgtaccagaacagt

SEQ ID NO: 5255382 - DNA, 25 bp, Homo sapien
tccccgagtagccagtttgccatca

SEQ ID NO: 5255383 - DNA, 25 bp, Homo sapien
agtttgccatcatgacccctgggtt

SEQ ID NO: 5255384 - DNA, 25 bp, Homo sapien
taactgttgaggtcctgagctgacg

SEQ ID NO: 5255385 - DNA, 25 bp, Homo sapien
gacactcctgtagtgttcccaagcc

SEQ ID NO: 5255386 - DNA, 25 bp, Homo sapien
cctcctgagccagccacttcctgct

SEQ ID NO: 5255387 - DNA, 25 bp, Homo sapien
acaccacctcctgagccagccactt

SEQ ID NO: 5255388 - DNA, 25 bp, Homo sapien
accacctcctgagccagccacttcc

SEQ ID NO: 5255389 - DNA, 25 bp, Homo sapien
cacctcctgagccagccacttcctg

SEQ ID NO: 5255390 - DNA, 25 bp, Homo sapien
ctgcagggagggagcctcagggctg

SEQ ID NO: 5255391 - DNA, 25 bp, Homo sapien
tgcagggagggagcctcagggctgt

SEQ ID NO: 5255392 - DNA, 25 bp, Homo sapien
cagggagggagcctcagggctgtcc

SEQ ID NO: 5255393 - DNA, 25 bp, Homo sapien
gcagggagggagcctcagggctgtc

SEQ ID NO: 5255394 - DNA, 25 bp, Homo sapien
aatgcctggcccactgtaggtgttc

SEQ ID NO: 5255395 - DNA, 25 bp, Homo sapien
gtgttccctgaaagtccaggcagca

SEQ ID NO: 5255396 - DNA, 25 bp, Homo sapien
ctggcccactgtaggtgttccctga

SEQ ID NO: 5255397 - DNA, 25 bp, Homo sapien
taggtgttccctgaaagtccaggca

SEQ ID NO: 5255398 - DNA, 25 bp, Homo sapien
cagccttagaaacggccaacccttg

SEQ ID NO: 5255399 - DNA, 25 bp, Homo sapien
gaacaacttctcagtgacttctgcc

SEQ ID NO: 5255400 - DNA, 25 bp, Homo sapien
cacactcagccttagaaacggccaa

SEQ ID NO: 5255401 - DNA, 25 bp, Homo sapien
aacccttgaccctggtcactgaaca

SEQ ID NO: 5255402 - DNA, 25 bp, Homo sapien
ctccagcagactgtggccttacggg

SEQ ID NO: 5255403 - DNA, 25 bp, Homo sapien
ccagcagactgtggccttacgggag

SEQ ID NO: 5255404 - DNA, 25 bp, Homo sapien
actgtggccttacgggagaataact

SEQ ID NO: 5255405 - DNA, 25 bp, Homo sapien
cagactgtggccttacgggagaata

SEQ ID NO: 5255406 - DNA, 25 bp, Homo sapien
ccaaggtggaagtagtcagtaccag

SEQ ID NO: 5255407 - DNA, 25 bp, Homo sapien
gagcccccaaatcacactccaattc

SEQ ID NO: 5255408 - DNA, 25 bp, Homo sapien
ttctgccactgatgcaaggggctgt

SEQ ID NO: 5255409 - DNA, 25 bp, Homo sapien
aattctgccactgatgcaaggggct

SEQ ID NO: 5255410 - DNA, 25 bp, Homo sapien
ccttggcattttggagtcttatgag

SEQ ID NO: 5255411 - DNA, 25 bp, Homo sapien
tatgagtgggttctctctccgtggg

SEQ ID NO: 5255412 - DNA, 25 bp, Homo sapien
tcatcaacccaaaataaacaggcct

SEQ ID NO: 5255413 - DNA, 25 bp, Homo sapien
ccaggaaaggctgtctcacagacca

SEQ ID NO: 5255414 - DNA, 25 bp, Homo sapien
taatcaaactggataaatcacggcc

SEQ ID NO: 5255415 - DNA, 25 bp, Homo sapien
tgcagtgggcacattcgtaaagaaa

SEQ ID NO: 5255416 - DNA, 25 bp, Homo sapien
tctagtcgactgtggagcatctcct

SEQ ID NO: 5255417 - DNA, 25 bp, Homo sapien
gctcagtgagccgagtaagggactc

SEQ ID NO: 5255418 - DNA, 25 bp, Homo sapien
tgtacccactaccacaatctctcca

SEQ ID NO: 5255419 - DNA, 25 bp, Homo sapien
gtacccactaccacaatctctccag

SEQ ID NO: 5255420 - DNA, 25 bp, Homo sapien
gatgtacccactaccacaatctctc

SEQ ID NO: 5255421 - DNA, 25 bp, Homo sapien
cagatgtacccactaccacaatctc

SEQ ID NO: 5255422 - DNA, 25 bp, Homo sapien
aacacccacgtgtctggatagtccc

SEQ ID NO: 5255423 - DNA, 25 bp, Homo sapien
cccaaacacccacgtgtctggatag

SEQ ID NO: 5255424 - DNA, 25 bp, Homo sapien
acccacgtgtctggatagtcccaca

SEQ ID NO: 5255425 - DNA, 25 bp, Homo sapien
tggcagccccaaacacccacgtgtc

SEQ ID NO: 5255426 - DNA, 25 bp, Homo sapien
atgggacgggcccataggtcaacct

SEQ ID NO: 5255427 - DNA, 25 bp, Homo sapien
gacgggcccataggtcaacctcaag

SEQ ID NO: 5255428 - DNA, 25 bp, Homo sapien
cataggtcaacctcaagagttggag

SEQ ID NO: 5255429 - DNA, 25 bp, Homo sapien
gggcccataggtcaacctcaagagt

SEQ ID NO: 5255430 - DNA, 25 bp, Homo sapien
aaagctgaacttcacgttggccgac

SEQ ID NO: 5255431 - DNA, 25 bp, Homo sapien
tggtgccgaaatgtggctgagtcct

SEQ ID NO: 5255432 - DNA, 25 bp, Homo sapien
tgaacttcacgttggccgacaccag

SEQ ID NO: 5255433 - DNA, 25 bp, Homo sapien
ctcagagctggtgccgaaatgtggc

SEQ ID NO: 5255434 - DNA, 25 bp, Homo sapien
agatgtggacgtccctcgcactgtg

SEQ ID NO: 5255435 - DNA, 25 bp, Homo sapien
caagtgtggtgggttctctatggac

SEQ ID NO: 5255436 - DNA, 25 bp, Homo sapien
tttggagcgagagagcactcattcc

SEQ ID NO: 5255437 - DNA, 25 bp, Homo sapien
tgaaggctgttcatccctcggagag

SEQ ID NO: 5255438 - DNA, 25 bp, Homo sapien
gatttgtcaacgatacctgtggcca

SEQ ID NO: 5255439 - DNA, 25 bp, Homo sapien
cacggatgccgaccatgtggcttaa

SEQ ID NO: 5255440 - DNA, 25 bp, Homo sapien
taagtatttctgtggcagcccgtac

SEQ ID NO: 5255441 - DNA, 25 bp, Homo sapien
tctggaaatatggatcccgttggcc

SEQ ID NO: 5255442 - DNA, 25 bp, Homo sapien
ctgggcctctcaaaggcaaggcttc

SEQ ID NO: 5255443 - DNA, 25 bp, Homo sapien
ggcctctcaaaggcaaggcttccaa

SEQ ID NO: 5255444 - DNA, 25 bp, Homo sapien
tcaaaggcaaggcttccaaggtcca

SEQ ID NO: 5255445 - DNA, 25 bp, Homo sapien
caaaggcaaggcttccaaggtccat

SEQ ID NO: 5255446 - DNA, 25 bp, Homo sapien
ccccacagatgtaggtgtcaggatt

SEQ ID NO: 5255447 - DNA, 25 bp, Homo sapien
aattccaaaaggtgcaggtgatagg

SEQ ID NO: 5255448 - DNA, 25 bp, Homo sapien
gctccacggtggagtcaaaattcca

SEQ ID NO: 5255449 - DNA, 25 bp, Homo sapien
tagggaaggttgccccacagatgta

SEQ ID NO: 5255450 - DNA, 25 bp, Homo sapien
actggcccactcatgaccattttgc

SEQ ID NO: 5255451 - DNA, 25 bp, Homo sapien
gcagcttccccggaggtacctggtc

SEQ ID NO: 5255452 - DNA, 25 bp, Homo sapien
ctgggcagcttccccggaggtacct

SEQ ID NO: 5255453 - DNA, 25 bp, Homo sapien
ggcccactcatgaccattttgcact

SEQ ID NO: 5255454 - DNA, 25 bp, Homo sapien
cccgcacgcctgtgttacacaaggg

SEQ ID NO: 5255455 - DNA, 25 bp, Homo sapien
cacacctgtgtttgccgggggcacg

SEQ ID NO: 5255456 - DNA, 25 bp, Homo sapien
agcaggagcccgcacgcctgtgtta

SEQ ID NO: 5255457 - DNA, 25 bp, Homo sapien
tcctgatgacccacgaggccggccg

SEQ ID NO: 5255458 - DNA, 25 bp, Homo sapien
cgctccgatgctgaggaatccagag

SEQ ID NO: 5255459 - DNA, 25 bp, Homo sapien
ccagactccaatacaacggaatggg

SEQ ID NO: 5255460 - DNA, 25 bp, Homo sapien
caatacaacggaatgggaacctggt

SEQ ID NO: 5255461 - DNA, 25 bp, Homo sapien
gcaggtgtatggagactccacgctc

SEQ ID NO: 5255462 - DNA, 25 bp, Homo sapien
tacccgcagaatgcaagatccagaa

SEQ ID NO: 5255463 - DNA, 25 bp, Homo sapien
cctctctacccgcagaatgcaagat

SEQ ID NO: 5255464 - DNA, 25 bp, Homo sapien
cagaatgcaagatccagaagcactc

SEQ ID NO: 5255465 - DNA, 25 bp, Homo sapien
tctacccgcagaatgcaagatccag

SEQ ID NO: 5255466 - DNA, 25 bp, Homo sapien
ggtcacccacacgtggcccactcct

SEQ ID NO: 5255467 - DNA, 25 bp, Homo sapien
agggtcacccacacgtggcccactc

SEQ ID NO: 5255468 - DNA, 25 bp, Homo sapien
tcacccacacgtggcccactcctca

SEQ ID NO: 5255469 - DNA, 25 bp, Homo sapien
ccacacgtggcccactcctcaggcc

SEQ ID NO: 5255470 - DNA, 25 bp, Homo sapien
ttctctgccattctggtgccacatt

SEQ ID NO: 5255471 - DNA, 25 bp, Homo sapien
tgagagtccccacaggtacatctgc

SEQ ID NO: 5255472 - DNA, 25 bp, Homo sapien
gagagtccccacaggtacatctgca

SEQ ID NO: 5255473 - DNA, 25 bp, Homo sapien
tgccacattgcatacctggcttctc

SEQ ID NO: 5255474 - DNA, 25 bp, Homo sapien
tcggtcagcccggacaactggccgg

SEQ ID NO: 5255475 - DNA, 25 bp, Homo sapien
agggcaggtcgtccacggcagcctc

SEQ ID NO: 5255476 - DNA, 25 bp, Homo sapien
caactggccggacacaccaggcttt

SEQ ID NO: 5255477 - DNA, 25 bp, Homo sapien
ttcctggcaggcacatcagggcagc

SEQ ID NO: 5255478 - DNA, 25 bp, Homo sapien
aagaggaaagtgatatccccagagg

SEQ ID NO: 5255479 - DNA, 25 bp, Homo sapien
ggtcttcagaccgaggcacaagctg

SEQ ID NO: 5255480 - DNA, 25 bp, Homo sapien
tcacagggaggaactctgcatggtc

SEQ ID NO: 5255481 - DNA, 25 bp, Homo sapien
catggtccttgttatgcagagctgg

SEQ ID NO: 5255482 - DNA, 25 bp, Homo sapien
acaaatggaatattcctttgaatca

SEQ ID NO: 5255483 - DNA, 25 bp, Homo sapien
gacatacataactcccatgacataa

SEQ ID NO: 5255484 - DNA, 25 bp, Homo sapien
gacataacactccttgtagagcata

SEQ ID NO: 5255485 - DNA, 25 bp, Homo sapien
tatgaagctcgaataatctagattc

SEQ ID NO: 5255486 - DNA, 25 bp, Homo sapien
caaggcccaccaggtcggctgtact

SEQ ID NO: 5255487 - DNA, 25 bp, Homo sapien
ccaccaggtcggctgtactggtctg

SEQ ID NO: 5255488 - DNA, 25 bp, Homo sapien
ttgctccattccctttgcaccaagg

SEQ ID NO: 5255489 - DNA, 25 bp, Homo sapien
agtctttgctccattccctttgcac

SEQ ID NO: 5255490 - DNA, 25 bp, Homo sapien
gtctccgtagccactcagtgaccat

SEQ ID NO: 5255491 - DNA, 25 bp, Homo sapien
gcagagattcatcggggttggccct

SEQ ID NO: 5255492 - DNA, 25 bp, Homo sapien
tcatctggcagagattcatcggggt

SEQ ID NO: 5255493 - DNA, 25 bp, Homo sapien
ctccaagtttgtgtctccgtagcca

SEQ ID NO: 5255494 - DNA, 25 bp, Homo sapien
tgcttttatattcttgcagagggaa

SEQ ID NO: 5255495 - DNA, 25 bp, Homo sapien
ttgtcgtagatctcagactagttct

SEQ ID NO: 5255496 - DNA, 25 bp, Homo sapien
ggcagagatggattctgaagttgtc

SEQ ID NO: 5255497 - DNA, 25 bp, Homo sapien
cagatgcctagttggttgtggttta

SEQ ID NO: 5255498 - DNA, 25 bp, Homo sapien
cccagagctccaagagcttgatcca

SEQ ID NO: 5255499 - DNA, 25 bp, Homo sapien
caaccccagagctccaagagcttga

SEQ ID NO: 5255500 - DNA, 25 bp, Homo sapien
accccagagctccaagagcttgatc

SEQ ID NO: 5255501 - DNA, 25 bp, Homo sapien
cagagctccaagagcttgatccaac

SEQ ID NO: 5255502 - DNA, 25 bp, Homo sapien
gtgcattgagcatggactccacctc

SEQ ID NO: 5255503 - DNA, 25 bp, Homo sapien
atcctgctgtgcattgagcatggac

SEQ ID NO: 5255504 - DNA, 25 bp, Homo sapien
gccccatcctgctgtgcattgagca

SEQ ID NO: 5255505 - DNA, 25 bp, Homo sapien
gctgtgcattgagcatggactccac

SEQ ID NO: 5255506 - DNA, 25 bp, Homo sapien
cgaggaggaactcagacagacagac

SEQ ID NO: 5255507 - DNA, 25 bp, Homo sapien
acagcgccaggggaccagcggcact

SEQ ID NO: 5255508 - DNA, 25 bp, Homo sapien
agacagacagacagcgccaggggac

SEQ ID NO: 5255509 - DNA, 25 bp, Homo sapien
gggaccagcggcactgtgtgctcat

SEQ ID NO: 5255510 - DNA, 25 bp, Homo sapien
tcctgtcggcacttcatgtaattgg

SEQ ID NO: 5255511 - DNA, 25 bp, Homo sapien
gatttcccctaatccactgcctaga

SEQ ID NO: 5255512 - DNA, 25 bp, Homo sapien
tgactatccacagctggcgttctgg

SEQ ID NO: 5255513 - DNA, 25 bp, Homo sapien
tgcctagagccctcagctttacggg

SEQ ID NO: 5255514 - DNA, 25 bp, Homo sapien
tacccttcgtgctcaaagcaggtag

SEQ ID NO: 5255515 - DNA, 25 bp, Homo sapien
ccttcgtgctcaaagcaggtagtgc

SEQ ID NO: 5255516 - DNA, 25 bp, Homo sapien
cttatacccttcgtgctcaaagcag

SEQ ID NO: 5255517 - DNA, 25 bp, Homo sapien
ctacttatacccttcgtgctcaaag

SEQ ID NO: 5255518 - DNA, 25 bp, Homo sapien
tgcccatgtgctagacagtcatcac

SEQ ID NO: 5255519 - DNA, 25 bp, Homo sapien
ttctcccagtgctgtgagaggtgcg

SEQ ID NO: 5255520 - DNA, 25 bp, Homo sapien
gcactagagtgacacccgaaaccgt

SEQ ID NO: 5255521 - DNA, 25 bp, Homo sapien
gattcgtagtagacatgcccatgtg

SEQ ID NO: 5255522 - DNA, 25 bp, Homo sapien
tattctggatgatttggatgtccct

SEQ ID NO: 5255523 - DNA, 25 bp, Homo sapien
tcccttgtccttgaccagatggcca

SEQ ID NO: 5255524 - DNA, 25 bp, Homo sapien
ccttattctggatgatttggatgtc

SEQ ID NO: 5255525 - DNA, 25 bp, Homo sapien
tggatgtcccttgtccttgaccaga

SEQ ID NO: 5255526 - DNA, 25 bp, Homo sapien
taaccgttcatggattctgcacaga

SEQ ID NO: 5255527 - DNA, 25 bp, Homo sapien
gagagagctgcatgtgtactgtgta

SEQ ID NO: 5255528 - DNA, 25 bp, Homo sapien
cacactgagtagtctacagctgggg

SEQ ID NO: 5255529 - DNA, 25 bp, Homo sapien
tgtgtactgtgtaaccgttcatgga

SEQ ID NO: 5255530 - DNA, 25 bp, Homo sapien
tgaagacccacttgtgagccctgca

SEQ ID NO: 5255531 - DNA, 25 bp, Homo sapien
ctgcactcagcggacgacgtcttgt

SEQ ID NO: 5255532 - DNA, 25 bp, Homo sapien
tgctgccagcgttcggttctccctt

SEQ ID NO: 5255533 - DNA, 25 bp, Homo sapien
gacgtcttgtccagtagggcatcct

SEQ ID NO: 5255534 - DNA, 25 bp, Homo sapien
cggacaataaagctgcctggctccc

SEQ ID NO: 5255535 - DNA, 25 bp, Homo sapien
taggttcgccttcaggagagtgcag

SEQ ID NO: 5255536 - DNA, 25 bp, Homo sapien
aaagtgtcgtctcccaccggacaat

SEQ ID NO: 5255537 - DNA, 25 bp, Homo sapien
tggcttggattctggttaggttcgc

SEQ ID NO: 5255538 - DNA, 25 bp, Homo sapien
gggccttgacctcatcccagacacc

SEQ ID NO: 5255539 - DNA, 25 bp, Homo sapien
ctcctcagccagaacacaaaggaag

SEQ ID NO: 5255540 - DNA, 25 bp, Homo sapien
gaaggctgttttccctgggccttga

SEQ ID NO: 5255541 - DNA, 25 bp, Homo sapien
ggccttgacctcatcccagacacca

SEQ ID NO: 5255542 - DNA, 25 bp, Homo sapien
gcatatgttaagatcatgatttggg

SEQ ID NO: 5255543 - DNA, 25 bp, Homo sapien
atcttctcgatgctgttgacgcata

SEQ ID NO: 5255544 - DNA, 25 bp, Homo sapien
gttgacgcatatgttaagatcatga

SEQ ID NO: 5255545 - DNA, 25 bp, Homo sapien
cgatgctgttgacgcatatgttaag

SEQ ID NO: 5255546 - DNA, 25 bp, Homo sapien
agctgaaagtgggtgggtgagtaag

SEQ ID NO: 5255547 - DNA, 25 bp, Homo sapien
tcagctgaaagtgggtgggtgagta

SEQ ID NO: 5255548 - DNA, 25 bp, Homo sapien
ctgaaagtgggtgggtgagtaagac

SEQ ID NO: 5255549 - DNA, 25 bp, Homo sapien
gctgaaagtgggtgggtgagtaaga

SEQ ID NO: 5255550 - DNA, 25 bp, Homo sapien
cacgtctctgctggctcctaatgtg

SEQ ID NO: 5255551 - DNA, 25 bp, Homo sapien
atcacgtctctgctggctcctaatg

SEQ ID NO: 5255552 - DNA, 25 bp, Homo sapien
agcatcacgtctctgctggctccta

SEQ ID NO: 5255553 - DNA, 25 bp, Homo sapien
cgtctctgctggctcctaatgtggc

SEQ ID NO: 5255554 - DNA, 25 bp, Homo sapien
gacaccgtacactctgaaactgaca

SEQ ID NO: 5255555 - DNA, 25 bp, Homo sapien
tcagatgcagcctcccttaagggag

SEQ ID NO: 5255556 - DNA, 25 bp, Homo sapien
agtgaccctattccttggctaacgg

SEQ ID NO: 5255557 - DNA, 25 bp, Homo sapien
gaaagttctggatatgtctccgtcc

SEQ ID NO: 5255558 - DNA, 25 bp, Homo sapien
ctccacagtgtctgatgcccccacc

SEQ ID NO: 5255559 - DNA, 25 bp, Homo sapien
ctcctccttctccgcaggcctgttt

SEQ ID NO: 5255560 - DNA, 25 bp, Homo sapien
acagtgtctgatgcccccaccttct

SEQ ID NO: 5255561 - DNA, 25 bp, Homo sapien
ctccttctccgcaggcctgtttttc

SEQ ID NO: 5255562 - DNA, 25 bp, Homo sapien
tgccaggtcaaaaacacggcctcag

SEQ ID NO: 5255563 - DNA, 25 bp, Homo sapien
ccaggtcaaaaacacggcctcaggt

SEQ ID NO: 5255564 - DNA, 25 bp, Homo sapien
aggtcaaaaacacggcctcaggtgc

SEQ ID NO: 5255565 - DNA, 25 bp, Homo sapien
atgccaggtcaaaaacacggcctca

SEQ ID NO: 5255566 - DNA, 25 bp, Homo sapien
ttcctcttgactgcaagcattgacc

SEQ ID NO: 5255567 - DNA, 25 bp, Homo sapien
ctcttgactgcaagcattgacctaa

SEQ ID NO: 5255568 - DNA, 25 bp, Homo sapien
tcttgactgcaagcattgacctaaa

SEQ ID NO: 5255569 - DNA, 25 bp, Homo sapien
tgactgcaagcattgacctaaaagt

SEQ ID NO: 5255570 - DNA, 25 bp, Homo sapien
acttgtcctattgctgcattgttac

SEQ ID NO: 5255571 - DNA, 25 bp, Homo sapien
agtgtttgatcaaaacttgtcctat

SEQ ID NO: 5255572 - DNA, 25 bp, Homo sapien
ttggtgacgttcagcagagcacagg

SEQ ID NO: 5255573 - DNA, 25 bp, Homo sapien
aactgatggaacacaggttctgaac

SEQ ID NO: 5255574 - DNA, 25 bp, Homo sapien
tctccttttgctaactcgggtttga

SEQ ID NO: 5255575 - DNA, 25 bp, Homo sapien
gagatttcagaacctagtgggtagt

SEQ ID NO: 5255576 - DNA, 25 bp, Homo sapien
caggtgtaaaggtgatggtatgctt

SEQ ID NO: 5255577 - DNA, 25 bp, Homo sapien
tcagaacctagtgggtagtgggtca

SEQ ID NO: 5255578 - DNA, 25 bp, Homo sapien
aagtgtaggaactttcagcagcaac

SEQ ID NO: 5255579 - DNA, 25 bp, Homo sapien
acttccagtcctgtgatagtcagcc

SEQ ID NO: 5255580 - DNA, 25 bp, Homo sapien
ccagtcctgtgatagtcagcccggg

SEQ ID NO: 5255581 - DNA, 25 bp, Homo sapien
gggcttggcagataaaaggtttgta

SEQ ID NO: 5255582 - DNA, 25 bp, Homo sapien
tccatgcagggagcgaggagatttt

SEQ ID NO: 5255583 - DNA, 25 bp, Homo sapien
cttctgccagatgtgctgatctgtc

SEQ ID NO: 5255584 - DNA, 25 bp, Homo sapien
acttcctcaaggagtagtccatgca

SEQ ID NO: 5255585 - DNA, 25 bp, Homo sapien
tacatctgcccagatgaaaacattc

SEQ ID NO: 5255586 - DNA, 25 bp, Homo sapien
gaagcctccattgttgtttggcaaa

SEQ ID NO: 5255587 - DNA, 25 bp, Homo sapien
ggaagcctccattgttgtttggcaa

SEQ ID NO: 5255588 - DNA, 25 bp, Homo sapien
ctgtaacccccagccagagtgcggt

SEQ ID NO: 5255589 - DNA, 25 bp, Homo sapien
agccagagtgcggtgccctccccag

SEQ ID NO: 5255590 - DNA, 25 bp, Homo sapien
tggtccaggcccaaggcctgtaacc

SEQ ID NO: 5255591 - DNA, 25 bp, Homo sapien
tccattcccattgaggtggtccagg

SEQ ID NO: 5255592 - DNA, 25 bp, Homo sapien
ctccactggggcgtctcattgtgac

SEQ ID NO: 5255593 - DNA, 25 bp, Homo sapien
ccactggggcgtctcattgtgacca

SEQ ID NO: 5255594 - DNA, 25 bp, Homo sapien
ctggggcgtctcattgtgaccagga

SEQ ID NO: 5255595 - DNA, 25 bp, Homo sapien
ctttctccactggggcgtctcattg

SEQ ID NO: 5255596 - DNA, 25 bp, Homo sapien
tgactgctgcctactggccactggt

SEQ ID NO: 5255597 - DNA, 25 bp, Homo sapien
caataaagcttctcgattatgatac

SEQ ID NO: 5255598 - DNA, 25 bp, Homo sapien
ggtgcttcatcatctgcgcaggtgt

SEQ ID NO: 5255599 - DNA, 25 bp, Homo sapien
gatgggttgtctccacattcactga

SEQ ID NO: 5255600 - DNA, 25 bp, Homo sapien
taatggatagataggacactctgct

SEQ ID NO: 5255601 - DNA, 25 bp, Homo sapien
gcccaggtgggtactctcttctgca

SEQ ID NO: 5255602 - DNA, 25 bp, Homo sapien
aggtgggtactctcttctgcagctg

SEQ ID NO: 5255603 - DNA, 25 bp, Homo sapien
ccaggtgggtactctcttctgcagc

SEQ ID NO: 5255604 - DNA, 25 bp, Homo sapien
ctgcccaggtgggtactctcttctg

SEQ ID NO: 5255605 - DNA, 25 bp, Homo sapien
ctaatgctgacaatggcgcccgtgg

SEQ ID NO: 5255606 - DNA, 25 bp, Homo sapien
tcagtgtaaactccctttgaagcac

SEQ ID NO: 5255607 - DNA, 25 bp, Homo sapien
tttgaagcacctcaaggaatttccc

SEQ ID NO: 5255608 - DNA, 25 bp, Homo sapien
gcgttcttcccacacctcctgaaat

SEQ ID NO: 5255609 - DNA, 25 bp, Homo sapien
cagtctgttacatgggtttccttgg

SEQ ID NO: 5255610 - DNA, 25 bp, Homo sapien
tgcaaacagcagtctgttacatggg

SEQ ID NO: 5255611 - DNA, 25 bp, Homo sapien
gcatccttccaaagggccactggct

SEQ ID NO: 5255612 - DNA, 25 bp, Homo sapien
tggcatccttccaaagggccactgg

SEQ ID NO: 5255613 - DNA, 25 bp, Homo sapien
gtgctgcacatatttgtgacctgac

SEQ ID NO: 5255614 - DNA, 25 bp, Homo sapien
gcacatatttgtgacctgaccaatg

SEQ ID NO: 5255615 - DNA, 25 bp, Homo sapien
ttgtgacctgaccaatgactggcag

SEQ ID NO: 5255616 - DNA, 25 bp, Homo sapien
catatttgtgacctgaccaatgact

SEQ ID NO: 5255617 - DNA, 25 bp, Homo sapien
agagtcacctccttcttgccctggg

SEQ ID NO: 5255618 - DNA, 25 bp, Homo sapien
caggtttccagagggaacgagggct

SEQ ID NO: 5255619 - DNA, 25 bp, Homo sapien
gctttccacatctaccccaggtttc

SEQ ID NO: 5255620 - DNA, 25 bp, Homo sapien
gctggcacttactaagagtcacctc

SEQ ID NO: 5255621 - DNA, 25 bp, Homo sapien
gaaagtcaccgagtgctgccctgtt

SEQ ID NO: 5255622 - DNA, 25 bp, Homo sapien
catcagtcatcaatctcccaaaagc

SEQ ID NO: 5255623 - DNA, 25 bp, Homo sapien
ttcatttggattctcaagaaccagc

SEQ ID NO: 5255624 - DNA, 25 bp, Homo sapien
tttgtcatcagtcatcaatctccca

SEQ ID NO: 5255625 - DNA, 25 bp, Homo sapien
tgttgaggggacatctgtggcccca

SEQ ID NO: 5255626 - DNA, 25 bp, Homo sapien
caatcttgccaagtatcgtcccttc

SEQ ID NO: 5255627 - DNA, 25 bp, Homo sapien
gcatccaatcttgccaagtatcgtc

SEQ ID NO: 5255628 - DNA, 25 bp, Homo sapien
cccagcatccaatcttgccaagtat

SEQ ID NO: 5255629 - DNA, 25 bp, Homo sapien
caggttttctttgatttgctttcct

SEQ ID NO: 5255630 - DNA, 25 bp, Homo sapien
cattcttgaaaattattcctcggca

SEQ ID NO: 5255631 - DNA, 25 bp, Homo sapien
aaacattcttgaaaattattcctcg

SEQ ID NO: 5255632 - DNA, 25 bp, Homo sapien
caaaacattcttgaaaattattcct

SEQ ID NO: 5255633 - DNA, 25 bp, Homo sapien
tgcccagttcccatgagaggtccat

SEQ ID NO: 5255634 - DNA, 25 bp, Homo sapien
tgccgcaggagctgcccagttccca

SEQ ID NO: 5255635 - DNA, 25 bp, Homo sapien
cagcaggctcttctgagctgccgca

SEQ ID NO: 5255636 - DNA, 25 bp, Homo sapien
ggagctgcccagttcccatgagagg

SEQ ID NO: 5255637 - DNA, 25 bp, Homo sapien
tttccggcggtgtgtgctggagaag

SEQ ID NO: 5255638 - DNA, 25 bp, Homo sapien
gtgtttccggcggtgtgtgctggag

SEQ ID NO: 5255639 - DNA, 25 bp, Homo sapien
tcagtagtgtttccggcggtgtgtg

SEQ ID NO: 5255640 - DNA, 25 bp, Homo sapien
ccggcggtgtgtgctggagaaggtc

SEQ ID NO: 5255641 - DNA, 25 bp, Homo sapien
ctcagccgggacgactggagcccgt

SEQ ID NO: 5255642 - DNA, 25 bp, Homo sapien
tcagccgggacgactggagcccgtt

SEQ ID NO: 5255643 - DNA, 25 bp, Homo sapien
ccgggacgactggagcccgttggct

SEQ ID NO: 5255644 - DNA, 25 bp, Homo sapien
agccgggacgactggagcccgttgg

SEQ ID NO: 5255645 - DNA, 25 bp, Homo sapien
gacaatggccctgcatgtaactttc

SEQ ID NO: 5255646 - DNA, 25 bp, Homo sapien
caatggccctgcatgtaactttcat

SEQ ID NO: 5255647 - DNA, 25 bp, Homo sapien
atggccctgcatgtaactttcattt

SEQ ID NO: 5255648 - DNA, 25 bp, Homo sapien
agacaatggccctgcatgtaacttt

SEQ ID NO: 5255649 - DNA, 25 bp, Homo sapien
cttttctcttggggcaagtgtgcat

SEQ ID NO: 5255650 - DNA, 25 bp, Homo sapien
ccgctgatcttggaaagggctggca

SEQ ID NO: 5255651 - DNA, 25 bp, Homo sapien
aaagggctggcaggcgagggaccct

SEQ ID NO: 5255652 - DNA, 25 bp, Homo sapien
gaaaacggcccgctgatcttggaaa

SEQ ID NO: 5255653 - DNA, 25 bp, Homo sapien
ttcaattacagaaaacggcccgctg

SEQ ID NO: 5255654 - DNA, 25 bp, Homo sapien
tgaaaccggaattggaacaatgtcc

SEQ ID NO: 5255655 - DNA, 25 bp, Homo sapien
agcatgctgaggtcatacaggtatc

SEQ ID NO: 5255656 - DNA, 25 bp, Homo sapien
caatgtcctgccctgcgtttgtcac

SEQ ID NO: 5255657 - DNA, 25 bp, Homo sapien
tacaggtatctggtactgaaaccgg

SEQ ID NO: 5255658 - DNA, 25 bp, Homo sapien
caacgatacgtgtttagtgggtgag

SEQ ID NO: 5255659 - DNA, 25 bp, Homo sapien
gccacggatgttcccactgttggaa

SEQ ID NO: 5255660 - DNA, 25 bp, Homo sapien
gaaaaccaaataagtgtcccagtga

SEQ ID NO: 5255661 - DNA, 25 bp, Homo sapien
tggaattactgtcaacgatacgtgt

SEQ ID NO: 5255662 - DNA, 25 bp, Homo sapien
tctctactaatatacaaagattcgc

SEQ ID NO: 5255663 - DNA, 25 bp, Homo sapien
tactaatatacaaagattcgccagg

SEQ ID NO: 5255664 - DNA, 25 bp, Homo sapien
acaaagattcgccaggcttggtgga

SEQ ID NO: 5255665 - DNA, 25 bp, Homo sapien
taatatacaaagattcgccaggctt

SEQ ID NO: 5255666 - DNA, 25 bp, Homo sapien
gtttctaatttacagagcagcctga

SEQ ID NO: 5255667 - DNA, 25 bp, Homo sapien
tggagcccacaagatatcaactacc

SEQ ID NO: 5255668 - DNA, 25 bp, Homo sapien
gatatctctatacgtgcctaaggcc

SEQ ID NO: 5255669 - DNA, 25 bp, Homo sapien
tatttacagtactgaagggcccaca

SEQ ID NO: 5255670 - DNA, 25 bp, Homo sapien
ttccttggttggcttcttaacagca

SEQ ID NO: 5255671 - DNA, 25 bp, Homo sapien
taaaggagctaaacatatcccagga

SEQ ID NO: 5255672 - DNA, 25 bp, Homo sapien
caattgtagggtgtctgatatcagg

SEQ ID NO: 5255673 - DNA, 25 bp, Homo sapien
cctggagttctcaagtcacattagc

SEQ ID NO: 5255674 - DNA, 25 bp, Homo sapien
gctgccaggtaagcaaagatgtctg

SEQ ID NO: 5255675 - DNA, 25 bp, Homo sapien
ctgctgccaggtaagcaaagatgtc

SEQ ID NO: 5255676 - DNA, 25 bp, Homo sapien
ccaggtaagcaaagatgtctgagtc

SEQ ID NO: 5255677 - DNA, 25 bp, Homo sapien
ctgccaggtaagcaaagatgtctga

SEQ ID NO: 5255678 - DNA, 25 bp, Homo sapien
gaaagagaaggttcagatacggctg

SEQ ID NO: 5255679 - DNA, 25 bp, Homo sapien
aagagaaggttcagatacggctgga

SEQ ID NO: 5255680 - DNA, 25 bp, Homo sapien
agagaaggttcagatacggctggaa

SEQ ID NO: 5255681 - DNA, 25 bp, Homo sapien
gaaggttcagatacggctggaagaa

SEQ ID NO: 5255682 - DNA, 25 bp, Homo sapien
gagtggacctcgtccttgtccgtga

SEQ ID NO: 5255683 - DNA, 25 bp, Homo sapien
ccaggtgctgtatgtttgtctaagt

SEQ ID NO: 5255684 - DNA, 25 bp, Homo sapien
cctgaatcaggttgtccaatccgag

SEQ ID NO: 5255685 - DNA, 25 bp, Homo sapien
ttgacaggcttcctcgcgctgcatc

SEQ ID NO: 5255686 - DNA, 25 bp, Homo sapien
gggtctaggaccacatgatctgtct

SEQ ID NO: 5255687 - DNA, 25 bp, Homo sapien
tggttgcccatttgcttcgggatca

SEQ ID NO: 5255688 - DNA, 25 bp, Homo sapien
tttgcttcgggatcacagtttccat

SEQ ID NO: 5255689 - DNA, 25 bp, Homo sapien
ggaccacatgatctgtctgattcat

SEQ ID NO: 5255690 - DNA, 25 bp, Homo sapien
cttgtgcaaactggcccttgtccca

SEQ ID NO: 5255691 - DNA, 25 bp, Homo sapien
ccttgtgcaaactggcccttgtccc

SEQ ID NO: 5255692 - DNA, 25 bp, Homo sapien
tccttgtgcaaactggcccttgtcc

SEQ ID NO: 5255693 - DNA, 25 bp, Homo sapien
gaatctaaggtgtgagtctccgcaa

SEQ ID NO: 5255694 - DNA, 25 bp, Homo sapien
tcctgaaacgtagagcagatctggt

SEQ ID NO: 5255695 - DNA, 25 bp, Homo sapien
accgtaggtgctcacgaaacgttcg

SEQ ID NO: 5255696 - DNA, 25 bp, Homo sapien
gaaacgttcgtgagttccctgctct

SEQ ID NO: 5255697 - DNA, 25 bp, Homo sapien
cacttttgagggttcttcacgaaga

SEQ ID NO: 5255698 - DNA, 25 bp, Homo sapien
gctgtcccggtcgtcagtgacgcta

SEQ ID NO: 5255699 - DNA, 25 bp, Homo sapien
gcagggaggagttcgttgcactttt

SEQ ID NO: 5255700 - DNA, 25 bp, Homo sapien
gggaacacgacggatcctgcagctg

SEQ ID NO: 5255701 - DNA, 25 bp, Homo sapien
tcgcgcccgcgatgacgtttaaagc

SEQ ID NO: 5255702 - DNA, 25 bp, Homo sapien
cgttctggccggctttctcggtgcc

SEQ ID NO: 5255703 - DNA, 25 bp, Homo sapien
ctgcgtaccagaccgtcagttccgg

SEQ ID NO: 5255704 - DNA, 25 bp, Homo sapien
aagctgtactcagagcgcgcggccg

SEQ ID NO: 5255705 - DNA, 25 bp, Homo sapien
ctcgagctcctggttctcgcactga

SEQ ID NO: 5255706 - DNA, 25 bp, Homo sapien
ctgatccagcaactttttgaaacta

SEQ ID NO: 5255707 - DNA, 25 bp, Homo sapien
ttgaaactaaaggcgctttccgcca

SEQ ID NO: 5255708 - DNA, 25 bp, Homo sapien
aactaaaggcgctttccgccatcac

SEQ ID NO: 5255709 - DNA, 25 bp, Homo sapien
aagacgcacagggttttcgggctca

SEQ ID NO: 5255710 - DNA, 25 bp, Homo sapien
ttctcccagcgcgacgcaaagggtt

SEQ ID NO: 5255711 - DNA, 25 bp, Homo sapien
cagggcctaagactactccgcagtt

SEQ ID NO: 5255712 - DNA, 25 bp, Homo sapien
cacataacaaaaaggtcccggcgag

SEQ ID NO: 5255713 - DNA, 25 bp, Homo sapien
ggcaagctaacttgacaacattacg

SEQ ID NO: 5255714 - DNA, 25 bp, Homo sapien
ctggatgttgtctcctttatttaat

SEQ ID NO: 5255715 - DNA, 25 bp, Homo sapien
ttatctattagtgagctgctgcttc

SEQ ID NO: 5255716 - DNA, 25 bp, Homo sapien
aagtatctattatctattagtgagc

SEQ ID NO: 5255717 - DNA, 25 bp, Homo sapien
agaaacaaattcgacagattcctga

SEQ ID NO: 5255718 - DNA, 25 bp, Homo sapien
tcctgaagcattctgattctgccca

SEQ ID NO: 5255719 - DNA, 25 bp, Homo sapien
gattctgcccattacatcaagcgtc

SEQ ID NO: 5255720 - DNA, 25 bp, Homo sapien
ataagaaacaaattcgacagattcc

SEQ ID NO: 5255721 - DNA, 25 bp, Homo sapien
gtcattatggagcaaatataaagct

SEQ ID NO: 5255722 - DNA, 25 bp, Homo sapien
tggagcaaatataaagctagaagct

SEQ ID NO: 5255723 - DNA, 25 bp, Homo sapien
actgggggtgtagcaattcctccag

SEQ ID NO: 5255724 - DNA, 25 bp, Homo sapien
tgaccatacactgggggtgtagcaa

SEQ ID NO: 5255725 - DNA, 25 bp, Homo sapien
taataaaaaaggtagctcgttgtgc

SEQ ID NO: 5255726 - DNA, 25 bp, Homo sapien
tagtggtgctacttcagtgcagaaa

SEQ ID NO: 5255727 - DNA, 25 bp, Homo sapien
tatgtaagacaatgacgacctaatc

SEQ ID NO: 5255728 - DNA, 25 bp, Homo sapien
tcgttgtgcctatgtttagtggtgc

SEQ ID NO: 5255729 - DNA, 25 bp, Homo sapien
atgtttgtaacgaattcctcttggc

SEQ ID NO: 5255730 - DNA, 25 bp, Homo sapien
gaagttaagtaaatagaggtcataa

SEQ ID NO: 5255731 - DNA, 25 bp, Homo sapien
tatatatgaagttaagtaaatagag

SEQ ID NO: 5255732 - DNA, 25 bp, Homo sapien
tgtttgtaacgaattcctcttggct

SEQ ID NO: 5255733 - DNA, 25 bp, Homo sapien
agtagttatgctttctgacttttcc

SEQ ID NO: 5255734 - DNA, 25 bp, Homo sapien
ttccatgtgaacgtgaaataggaat

SEQ ID NO: 5255735 - DNA, 25 bp, Homo sapien
ccatgtgaacgtgaaataggaataa

SEQ ID NO: 5255736 - DNA, 25 bp, Homo sapien
gtagttatgctttctgacttttcca

SEQ ID NO: 5255737 - DNA, 25 bp, Homo sapien
ggactcaagccatccacttgccttg

SEQ ID NO: 5255738 - DNA, 25 bp, Homo sapien
ttcactatattccccaggctggtat

SEQ ID NO: 5255739 - DNA, 25 bp, Homo sapien
attagaggcacacgcaaccatgccc

SEQ ID NO: 5255740 - DNA, 25 bp, Homo sapien
gctggtatcaaaactcctggactca

SEQ ID NO: 5255741 - DNA, 25 bp, Homo sapien
cagggtctcactttggttgctcagg

SEQ ID NO: 5255742 - DNA, 25 bp, Homo sapien
tttatagcaggtggtattcttttcc

SEQ ID NO: 5255743 - DNA, 25 bp, Homo sapien
tttccaaagatatcttgcattattc

SEQ ID NO: 5255744 - DNA, 25 bp, Homo sapien
agattttatagcaggtggtattctt

SEQ ID NO: 5255745 - DNA, 25 bp, Homo sapien
atagcaggtggtattcttttccaaa

SEQ ID NO: 5255746 - DNA, 25 bp, Homo sapien
taagtgcttccataattggctggac

SEQ ID NO: 5255747 - DNA, 25 bp, Homo sapien
agcgttgatggttgtatagatccca

SEQ ID NO: 5255748 - DNA, 25 bp, Homo sapien
ctctaagtgcttccataattggctg

SEQ ID NO: 5255749 - DNA, 25 bp, Homo sapien
atagatcccagggaaatctctctgc

SEQ ID NO: 5255750 - DNA, 25 bp, Homo sapien
cagactttgcaataccaagaaacgt

SEQ ID NO: 5255751 - DNA, 25 bp, Homo sapien
tcaaccagcctgtaacctaacagac

SEQ ID NO: 5255752 - DNA, 25 bp, Homo sapien
ggcacgactccaacacttaggcttt

SEQ ID NO: 5255753 - DNA, 25 bp, Homo sapien
gattccttaaaaactgccgacactc

SEQ ID NO: 5255754 - DNA, 25 bp, Homo sapien
cagaaaactgatttgcgtaatcagc

SEQ ID NO: 5255755 - DNA, 25 bp, Homo sapien
gatttgcgtaatcagctgtcctttt

SEQ ID NO: 5255756 - DNA, 25 bp, Homo sapien
aaacgtctctaatacaggaccacac

SEQ ID NO: 5255757 - DNA, 25 bp, Homo sapien
ttacaaatgctggaatcaaaggagc

SEQ ID NO: 5255758 - DNA, 25 bp, Homo sapien
agagagtgaaccagggagcagcatt

SEQ ID NO: 5255759 - DNA, 25 bp, Homo sapien
ttggcagagagtgaaccagggagca

SEQ ID NO: 5255760 - DNA, 25 bp, Homo sapien
ctattgtgggagtggtgggttggca

SEQ ID NO: 5255761 - DNA, 25 bp, Homo sapien
tggtgggttggcagagagtgaacca

SEQ ID NO: 5255762 - DNA, 25 bp, Homo sapien
ggcgatgattgaagtatacgcttga

SEQ ID NO: 5255763 - DNA, 25 bp, Homo sapien
catcggcgatgattgaagtatacgc

SEQ ID NO: 5255764 - DNA, 25 bp, Homo sapien
atcatcggcgatgattgaagtatac

SEQ ID NO: 5255765 - DNA, 25 bp, Homo sapien
tcggcgatgattgaagtatacgctt

SEQ ID NO: 5255766 - DNA, 25 bp, Homo sapien
taatatgcttgactgcagggtgcct

SEQ ID NO: 5255767 - DNA, 25 bp, Homo sapien
tgtaaccaactgtgtggatactcac

SEQ ID NO: 5255768 - DNA, 25 bp, Homo sapien
caagcaagcgcctagggtatgggtc

SEQ ID NO: 5255769 - DNA, 25 bp, Homo sapien
ccaaaagcatattctgttccaagtg

SEQ ID NO: 5255770 - DNA, 25 bp, Homo sapien
gcagaaccattcttgtggtggaatc

SEQ ID NO: 5255771 - DNA, 25 bp, Homo sapien
gggcagaaccattcttgtggtggaa

SEQ ID NO: 5255772 - DNA, 25 bp, Homo sapien
ggcagaaccattcttgtggtggaat

SEQ ID NO: 5255773 - DNA, 25 bp, Homo sapien
aaaagacactcctggtcagcaggag

SEQ ID NO: 5255774 - DNA, 25 bp, Homo sapien
agaaaagacactcctggtcagcagg

SEQ ID NO: 5255775 - DNA, 25 bp, Homo sapien
ctggcagaaaagacactcctggtca

SEQ ID NO: 5255776 - DNA, 25 bp, Homo sapien
ggcagaaaagacactcctggtcagc

SEQ ID NO: 5255777 - DNA, 25 bp, Homo sapien
ggaaatttgggctgacgtggatgaa

SEQ ID NO: 5255778 - DNA, 25 bp, Homo sapien
aacataggcattccgagtaggtgga

SEQ ID NO: 5255779 - DNA, 25 bp, Homo sapien
tatggaagtgggcattaagcttggc

SEQ ID NO: 5255780 - DNA, 25 bp, Homo sapien
tgaaggcgggtttatggaagtgggc

SEQ ID NO: 5255781 - DNA, 25 bp, Homo sapien
tttcatagaacatgctattttcagc

SEQ ID NO: 5255782 - DNA, 25 bp, Homo sapien
catgctattttcagcacaacatgca

SEQ ID NO: 5255783 - DNA, 25 bp, Homo sapien
gtacagctcaatttacagaagtcat

SEQ ID NO: 5255784 - DNA, 25 bp, Homo sapien
gcatttaacggccatttatttctca

SEQ ID NO: 5255785 - DNA, 25 bp, Homo sapien
aacacacttcatgttacataccaca

SEQ ID NO: 5255786 - DNA, 25 bp, Homo sapien
gtcagtctggctaactgctgttcat

SEQ ID NO: 5255787 - DNA, 25 bp, Homo sapien
caaggaaagccacataatccgtcag

SEQ ID NO: 5255788 - DNA, 25 bp, Homo sapien
cacataatccgtcagtctggctaac

SEQ ID NO: 5255789 - DNA, 25 bp, Homo sapien
gaaagccacataatccgtcagtctg

SEQ ID NO: 5255790 - DNA, 25 bp, Homo sapien
tacaggattctgaagatgaatcttg

SEQ ID NO: 5255791 - DNA, 25 bp, Homo sapien
tttgtcagtatacaggattctgaag

SEQ ID NO: 5255792 - DNA, 25 bp, Homo sapien
ttctgaagatgaatcttgaactcag

SEQ ID NO: 5255793 - DNA, 25 bp, Homo sapien
gatgaatcttgaactcagagtgata

SEQ ID NO: 5255794 - DNA, 25 bp, Homo sapien
ttctaaaaggcgacagcacaagtta

SEQ ID NO: 5255795 - DNA, 25 bp, Homo sapien
catataagagtacggcatgtgctgg

SEQ ID NO: 5255796 - DNA, 25 bp, Homo sapien
ctccaaagagggtgaatcataatcc

SEQ ID NO: 5255797 - DNA, 25 bp, Homo sapien
tatcttacattagtggctctcagga

SEQ ID NO: 5255798 - DNA, 25 bp, Homo sapien
tataagcaaccaatgggctgcagga

SEQ ID NO: 5255799 - DNA, 25 bp, Homo sapien
cttgagccaagcgataaatataagc

SEQ ID NO: 5255800 - DNA, 25 bp, Homo sapien
tgctcagtatttctccaaagggcag

SEQ ID NO: 5255801 - DNA, 25 bp, Homo sapien
ggctgcaggatagttgtacaaagtg

SEQ ID NO: 5255802 - DNA, 25 bp, Homo sapien
tcactacacagattcaccatacaac

SEQ ID NO: 5255803 - DNA, 25 bp, Homo sapien
caatgacaaaatagattgtgtccac

SEQ ID NO: 5255804 - DNA, 25 bp, Homo sapien
gattcaccatacaactcatttctac

SEQ ID NO: 5255805 - DNA, 25 bp, Homo sapien
aaagatcgagagtgaaatttccaga

SEQ ID NO: 5255806 - DNA, 25 bp, Homo sapien
caaacaatcccctattaatgaatat

SEQ ID NO: 5255807 - DNA, 25 bp, Homo sapien
gaatatttggattgactctaatctg

SEQ ID NO: 5255808 - DNA, 25 bp, Homo sapien
gttaaaaaaactggcactgtcattc

SEQ ID NO: 5255809 - DNA, 25 bp, Homo sapien
taaccatggatacaatttgtactta

SEQ ID NO: 5255810 - DNA, 25 bp, Homo sapien
catctgggtactagtggtgctcatt

SEQ ID NO: 5255811 - DNA, 25 bp, Homo sapien
gaacttgtacacttactgccctgga

SEQ ID NO: 5255812 - DNA, 25 bp, Homo sapien
gaatcccaagtctttaagagcctcc

SEQ ID NO: 5255813 - DNA, 25 bp, Homo sapien
tataaccctttgacagaatcccaag

SEQ ID NO: 5255814 - DNA, 25 bp, Homo sapien
gaaatagccagagcacaaagacagg

SEQ ID NO: 5255815 - DNA, 25 bp, Homo sapien
gatagtagtgccagggtaagtccca

SEQ ID NO: 5255816 - DNA, 25 bp, Homo sapien
tccaatggatctgaaacagggtgct

SEQ ID NO: 5255817 - DNA, 25 bp, Homo sapien
cacttgtacacagatggctggctca

SEQ ID NO: 5255818 - DNA, 25 bp, Homo sapien
ggtatagaacacattggaaatagtc

SEQ ID NO: 5255819 - DNA, 25 bp, Homo sapien
ctaggtatagaacacattggaaata

SEQ ID NO: 5255820 - DNA, 25 bp, Homo sapien
tagaacacattggaaatagtctgcc

SEQ ID NO: 5255821 - DNA, 25 bp, Homo sapien
tatagaacacattggaaatagtctg

SEQ ID NO: 5255822 - DNA, 25 bp, Homo sapien
caaccttgtttaatggagcgctgac

SEQ ID NO: 5255823 - DNA, 25 bp, Homo sapien
caggttgttaggttattcagcagca

SEQ ID NO: 5255824 - DNA, 25 bp, Homo sapien
aacagtgtggtttagccctctcaag

SEQ ID NO: 5255825 - DNA, 25 bp, Homo sapien
tcaaggtacttcaacccaggaacag

SEQ ID NO: 5255826 - DNA, 25 bp, Homo sapien
tcctaaagagtgttgttggcacatt

SEQ ID NO: 5255827 - DNA, 25 bp, Homo sapien
gatctttctatattcccctggtccc

SEQ ID NO: 5255828 - DNA, 25 bp, Homo sapien
tcctaagtttggaagaatattctcc

SEQ ID NO: 5255829 - DNA, 25 bp, Homo sapien
tgctccctgtattgcaatgttacct

SEQ ID NO: 5255830 - DNA, 25 bp, Homo sapien
catccatattgctgtgaataacagg

SEQ ID NO: 5255831 - DNA, 25 bp, Homo sapien
ggtgagatgataactccctgtggtt

SEQ ID NO: 5255832 - DNA, 25 bp, Homo sapien
ccttgaagattattgatggccaaca

SEQ ID NO: 5255833 - DNA, 25 bp, Homo sapien
tacctttttgatacgagccatccta

SEQ ID NO: 5255834 - DNA, 25 bp, Homo sapien
ttacttcttacttgctcccctactg

SEQ ID NO: 5255835 - DNA, 25 bp, Homo sapien
tcttctagagtggaaggatttttct

SEQ ID NO: 5255836 - DNA, 25 bp, Homo sapien
tgctcccctactgcagaatcttcta

SEQ ID NO: 5255837 - DNA, 25 bp, Homo sapien
tttctctagttcatctttccaaggc

SEQ ID NO: 5255838 - DNA, 25 bp, Homo sapien
aatacagctttttgttgtaagccat

SEQ ID NO: 5255839 - DNA, 25 bp, Homo sapien
gagcatgagaatacagctttttgtt

SEQ ID NO: 5255840 - DNA, 25 bp, Homo sapien
catgagcatgagaatacagcttttt

SEQ ID NO: 5255841 - DNA, 25 bp, Homo sapien
ccatgagcatgagaatacagctttt

SEQ ID NO: 5255842 - DNA, 25 bp, Homo sapien
acagagcatgggatgtcagcagtct

SEQ ID NO: 5255843 - DNA, 25 bp, Homo sapien
gagcatgggatgtcagcagtcttgt

SEQ ID NO: 5255844 - DNA, 25 bp, Homo sapien
cagggctgtgaggtttagcttgccc

SEQ ID NO: 5255845 - DNA, 25 bp, Homo sapien
catgggatgtcagcagtcttgtgag

SEQ ID NO: 5255846 - DNA, 25 bp, Homo sapien
tagtcctaatgtcgtgggcttcttt

SEQ ID NO: 5255847 - DNA, 25 bp, Homo sapien
taggtgaagtgtgtattttcttggg

SEQ ID NO: 5255848 - DNA, 25 bp, Homo sapien
ttttgttgattcttgatctgggatg

SEQ ID NO: 5255849 - DNA, 25 bp, Homo sapien
cagcatccttttagggatcattttt

SEQ ID NO: 5255850 - DNA, 25 bp, Homo sapien
cacagacagcaagggtacaacagga

SEQ ID NO: 5255851 - DNA, 25 bp, Homo sapien
gaaggtgcggcttcgggttgtgctt

SEQ ID NO: 5255852 - DNA, 25 bp, Homo sapien
tagtgcacagacagcaagggtacaa

SEQ ID NO: 5255853 - DNA, 25 bp, Homo sapien
tttagtgcacagacagcaagggtac

SEQ ID NO: 5255854 - DNA, 25 bp, Homo sapien
gttttggcaaatggaacgatggcaa

SEQ ID NO: 5255855 - DNA, 25 bp, Homo sapien
ttttggcaaatggaacgatggcaaa

SEQ ID NO: 5255856 - DNA, 25 bp, Homo sapien
tccctttgtaaggctaaaagaagca

SEQ ID NO: 5255857 - DNA, 25 bp, Homo sapien
gtcaagtgtactttgtactctggac

SEQ ID NO: 5255858 - DNA, 25 bp, Homo sapien
gctcccatgagctgcatgagatttg

SEQ ID NO: 5255859 - DNA, 25 bp, Homo sapien
gcggtcgacgggcaaccccagcctg

SEQ ID NO: 5255860 - DNA, 25 bp, Homo sapien
gctgcatgagatttgtcaagtgtac

SEQ ID NO: 5255861 - DNA, 25 bp, Homo sapien
gggcaggtggccgtctgctgggctc

SEQ ID NO: 5255862 - DNA, 25 bp, Homo sapien
ttccctcagcatgacgaatcctttc

SEQ ID NO: 5255863 - DNA, 25 bp, Homo sapien
cagctttccctcagcatgacgaatc

SEQ ID NO: 5255864 - DNA, 25 bp, Homo sapien
tcagcatgacgaatcctttcccttc

SEQ ID NO: 5255865 - DNA, 25 bp, Homo sapien
tccctggttttctcaggatcataag

SEQ ID NO: 5255866 - DNA, 25 bp, Homo sapien
ttctcaggatcataagtacctggcc

SEQ ID NO: 5255867 - DNA, 25 bp, Homo sapien
aggatcataagtacctggcctgggc

SEQ ID NO: 5255868 - DNA, 25 bp, Homo sapien
cagacgacccttatactcccatatc

SEQ ID NO: 5255869 - DNA, 25 bp, Homo sapien
tttgtccatctggttctcacgcaac

SEQ ID NO: 5255870 - DNA, 25 bp, Homo sapien
catttgtccatctggttctcacgca

SEQ ID NO: 5255871 - DNA, 25 bp, Homo sapien
ccatttgtccatctggttctcacgc

SEQ ID NO: 5255872 - DNA, 25 bp, Homo sapien
tgtccatctggttctcacgcaacat

SEQ ID NO: 5255873 - DNA, 25 bp, Homo sapien
tctgcctgtcgttgtaatgcaggag

SEQ ID NO: 5255874 - DNA, 25 bp, Homo sapien
tcacagcaacaagctttctgggtaa

SEQ ID NO: 5255875 - DNA, 25 bp, Homo sapien
tttctgcctgtcgttgtaatgcagg

SEQ ID NO: 5255876 - DNA, 25 bp, Homo sapien
agcaacaagctttctgggtaacttt

SEQ ID NO: 5255877 - DNA, 25 bp, Homo sapien
gatcagcttggaagtgcggaagggc

SEQ ID NO: 5255878 - DNA, 25 bp, Homo sapien
ttggaagtgcggaagggcctcctcc

SEQ ID NO: 5255879 - DNA, 25 bp, Homo sapien
gaaatggaaaccgtctggacgcggc

SEQ ID NO: 5255880 - DNA, 25 bp, Homo sapien
attcatgttttccgtggttatccgg

SEQ ID NO: 5255881 - DNA, 25 bp, Homo sapien
agcccttggacacagtctgagcaac

SEQ ID NO: 5255882 - DNA, 25 bp, Homo sapien
gcccttggacacagtctgagcaacg

SEQ ID NO: 5255883 - DNA, 25 bp, Homo sapien
ccttggacacagtctgagcaacgtc

SEQ ID NO: 5255884 - DNA, 25 bp, Homo sapien
aagctgtcatctcactgcgggcaca

SEQ ID NO: 5255885 - DNA, 25 bp, Homo sapien
catacggccgtttgggaactgcgat

SEQ ID NO: 5255886 - DNA, 25 bp, Homo sapien
gcacttagcccttctgctgcgttca

SEQ ID NO: 5255887 - DNA, 25 bp, Homo sapien
tcgccaccggaagaagctgggacgt

SEQ ID NO: 5255888 - DNA, 25 bp, Homo sapien
gggatgcgatgcctgacgcgacccc

SEQ ID NO: 5255889 - DNA, 25 bp, Homo sapien
gcagagcatggtgtgagagcacatt

SEQ ID NO: 5255890 - DNA, 25 bp, Homo sapien
aaagcagagcatggtgtgagagcac

SEQ ID NO: 5255891 - DNA, 25 bp, Homo sapien
agcatggtgtgagagcacatttatg

SEQ ID NO: 5255892 - DNA, 25 bp, Homo sapien
catggtgtgagagcacatttatgca

SEQ ID NO: 5255893 - DNA, 25 bp, Homo sapien
aatactgtaggcagctgtagctcca

SEQ ID NO: 5255894 - DNA, 25 bp, Homo sapien
cctaggtggaatagcccagggtctg

SEQ ID NO: 5255895 - DNA, 25 bp, Homo sapien
tacaatggatctgggtcgtgcactc

SEQ ID NO: 5255896 - DNA, 25 bp, Homo sapien
ggtgagcgacattacctcttgggct

SEQ ID NO: 5255897 - DNA, 25 bp, Homo sapien
tggtgcccactgcccccagccccat

SEQ ID NO: 5255898 - DNA, 25 bp, Homo sapien
gtggtgcccactgcccccagcccca

SEQ ID NO: 5255899 - DNA, 25 bp, Homo sapien
ggtggtgcccactgcccccagcccc

SEQ ID NO: 5255900 - DNA, 25 bp, Homo sapien
acttggaactttgcattgtgagccg

SEQ ID NO: 5255901 - DNA, 25 bp, Homo sapien
ttctggccgcaacaacaaaaggtcg

SEQ ID NO: 5255902 - DNA, 25 bp, Homo sapien
caaatgaatgcagcgaatcaggtgg

SEQ ID NO: 5255903 - DNA, 25 bp, Homo sapien
gaatcaggtggcttcacttggaact

SEQ ID NO: 5255904 - DNA, 25 bp, Homo sapien
ctcgacaaagcctgtgatacgcgga

SEQ ID NO: 5255905 - DNA, 25 bp, Homo sapien
tgaaaatcgtgcatggccacggtac

SEQ ID NO: 5255906 - DNA, 25 bp, Homo sapien
gatacgcggaggatcagtttgctcc

SEQ ID NO: 5255907 - DNA, 25 bp, Homo sapien
ccacggtactgagagtagagtcgat

SEQ ID NO: 5255908 - DNA, 25 bp, Homo sapien
caaagtcaaggcatttcgcttagag

SEQ ID NO: 5255909 - DNA, 25 bp, Homo sapien
gagattcttgcacaatcagtcacaa

SEQ ID NO: 5255910 - DNA, 25 bp, Homo sapien
tcttgtagcaacacagacgctgttt

SEQ ID NO: 5255911 - DNA, 25 bp, Homo sapien
tattttcaactactggcgtgaagcc

SEQ ID NO: 5255912 - DNA, 25 bp, Homo sapien
taagactctcataccaagcttggcc

SEQ ID NO: 5255913 - DNA, 25 bp, Homo sapien
gatgaacaacatgtccacggtggac

SEQ ID NO: 5255914 - DNA, 25 bp, Homo sapien
gaatcaaagtgtccctcaactggta

SEQ ID NO: 5255915 - DNA, 25 bp, Homo sapien
tccctgttgttgcatagaagactca

SEQ ID NO: 5255916 - DNA, 25 bp, Homo sapien
gtttctcgtataagcagcaccaagg

SEQ ID NO: 5255917 - DNA, 25 bp, Homo sapien
cgtataagcagcaccaaggtttggg

SEQ ID NO: 5255918 - DNA, 25 bp, Homo sapien
ctcgtataagcagcaccaaggtttg

SEQ ID NO: 5255919 - DNA, 25 bp, Homo sapien
cggggggtttctcgtataagcagca

SEQ ID NO: 5255920 - DNA, 25 bp, Homo sapien
actgtatatctcagtatacttaaga

SEQ ID NO: 5255921 - DNA, 25 bp, Homo sapien
gcggagagacgcatggtccacagca

SEQ ID NO: 5255922 - DNA, 25 bp, Homo sapien
gaatgttgaccttaacctcggcaag

SEQ ID NO: 5255923 - DNA, 25 bp, Homo sapien
tggtccacagcagcgcatctccaga

SEQ ID NO: 5255924 - DNA, 25 bp, Homo sapien
agggatccagcccaatccaggtctc

SEQ ID NO: 5255925 - DNA, 25 bp, Homo sapien
gaaaaagccagtgtcagaaattgag

SEQ ID NO: 5255926 - DNA, 25 bp, Homo sapien
actgccatggcccaaatcctggttt

SEQ ID NO: 5255927 - DNA, 25 bp, Homo sapien
gtgaggatgctacgggaaaaagcca

SEQ ID NO: 5255928 - DNA, 25 bp, Homo sapien
acctgtgctgggtgccgcaggccag

SEQ ID NO: 5255929 - DNA, 25 bp, Homo sapien
ctgggtgccgcaggccagggctcca

SEQ ID NO: 5255930 - DNA, 25 bp, Homo sapien
cagggctccaccgctccagagagat

SEQ ID NO: 5255931 - DNA, 25 bp, Homo sapien
agccgacccgcattcacagcacctg

SEQ ID NO: 5255932 - DNA, 25 bp, Homo sapien
gaaggcacccttaatgacaccagtg

SEQ ID NO: 5255933 - DNA, 25 bp, Homo sapien
caggagtaatcgaaacgaggcttca

SEQ ID NO: 5255934 - DNA, 25 bp, Homo sapien
aatttcctaacgctatccaagacag

SEQ ID NO: 5255935 - DNA, 25 bp, Homo sapien
acttttccagtgaggagctagctag

SEQ ID NO: 5255936 - DNA, 25 bp, Homo sapien
caggatagcggaagaagggacaaaa

SEQ ID NO: 5255937 - DNA, 25 bp, Homo sapien
aaaggtcagtgcagaaggctcccag

SEQ ID NO: 5255938 - DNA, 25 bp, Homo sapien
gttctccaccctccgactgaaggtg

SEQ ID NO: 5255939 - DNA, 25 bp, Homo sapien
acactgtggcaggatagcggaagaa

SEQ ID NO: 5255940 - DNA, 25 bp, Homo sapien
tgcactctgggacgttgccacgctt

SEQ ID NO: 5255941 - DNA, 25 bp, Homo sapien
acagcgagctcccaaagatgccaat

SEQ ID NO: 5255942 - DNA, 25 bp, Homo sapien
gatgttttgtgaagagatgacagcg

SEQ ID NO: 5255943 - DNA, 25 bp, Homo sapien
gttgccacgcttgctaagggaaagt

SEQ ID NO: 5255944 - DNA, 25 bp, Homo sapien
tgacttctttaggatttgaagcctg

SEQ ID NO: 5255945 - DNA, 25 bp, Homo sapien
tcatcatcttgttccgacattgcca

SEQ ID NO: 5255946 - DNA, 25 bp, Homo sapien
cactcggcggtctgtctcatcatct

SEQ ID NO: 5255947 - DNA, 25 bp, Homo sapien
aagcctggagcactcggcggtctgt

SEQ ID NO: 5255948 - DNA, 25 bp, Homo sapien
cctgtggccggcagaaagcatctgg

SEQ ID NO: 5255949 - DNA, 25 bp, Homo sapien
gcatctgggctgtcacaagactcca

SEQ ID NO: 5255950 - DNA, 25 bp, Homo sapien
gggctgtcacaagactccaagccca

SEQ ID NO: 5255951 - DNA, 25 bp, Homo sapien
cacaaccctctggcaagggaggcat

SEQ ID NO: 5255952 - DNA, 25 bp, Homo sapien
aggggtaactgagtctgtcatcagg

SEQ ID NO: 5255953 - DNA, 25 bp, Homo sapien
ttcggtcttgctatgcctgcagatt

SEQ ID NO: 5255954 - DNA, 25 bp, Homo sapien
aattccctggaacatctcttagtga

SEQ ID NO: 5255955 - DNA, 25 bp, Homo sapien
ttcacagtcaagtaaggaggggtaa

SEQ ID NO: 5255956 - DNA, 25 bp, Homo sapien
gggaacatctggcataccagaatta

SEQ ID NO: 5255957 - DNA, 25 bp, Homo sapien
acatctggcataccagaattatgca

SEQ ID NO: 5255958 - DNA, 25 bp, Homo sapien
gaacatctggcataccagaattatg

SEQ ID NO: 5255959 - DNA, 25 bp, Homo sapien
catctggcataccagaattatgcac

SEQ ID NO: 5255960 - DNA, 25 bp, Homo sapien
gttgaaagccctgagcatatcattt

SEQ ID NO: 5255961 - DNA, 25 bp, Homo sapien
tgagagttgaaagccctgagcatat

SEQ ID NO: 5255962 - DNA, 25 bp, Homo sapien
gagttgaaagccctgagcatatcat

SEQ ID NO: 5255963 - DNA, 25 bp, Homo sapien
ctgagagttgaaagccctgagcata

SEQ ID NO: 5255964 - DNA, 25 bp, Homo sapien
cagcacaccgcaaatgtgagtggcc

SEQ ID NO: 5255965 - DNA, 25 bp, Homo sapien
cacaccgcaaatgtgagtggccagc

SEQ ID NO: 5255966 - DNA, 25 bp, Homo sapien
gcacaccgcaaatgtgagtggccag

SEQ ID NO: 5255967 - DNA, 25 bp, Homo sapien
acaccgcaaatgtgagtggccagct

SEQ ID NO: 5255968 - DNA, 25 bp, Homo sapien
tgatgtccacgaagctgcaaatcca

SEQ ID NO: 5255969 - DNA, 25 bp, Homo sapien
gatgcaggatcggaaaatcacttct

SEQ ID NO: 5255970 - DNA, 25 bp, Homo sapien
gaccgggtatagctgtctgattttg

SEQ ID NO: 5255971 - DNA, 25 bp, Homo sapien
aggaagagcagagtccgcacagctg

SEQ ID NO: 5255972 - DNA, 25 bp, Homo sapien
cgcacagctgtaccggatgcaggat

SEQ ID NO: 5255973 - DNA, 25 bp, Homo sapien
gctgcttcagccgtatgccattttt

SEQ ID NO: 5255974 - DNA, 25 bp, Homo sapien
ggctcttgtgctgcaacttcatctg

SEQ ID NO: 5255975 - DNA, 25 bp, Homo sapien
cctcagctctcctagatagtaaagt

SEQ ID NO: 5255976 - DNA, 25 bp, Homo sapien
tgccgccgagggctgaacagaatct

SEQ ID NO: 5255977 - DNA, 25 bp, Homo sapien
ctcaggaccccactcaggcagctgc

SEQ ID NO: 5255978 - DNA, 25 bp, Homo sapien
tcaggaccccactcaggcagctgcc

SEQ ID NO: 5255979 - DNA, 25 bp, Homo sapien
gaccccactcaggcagctgcctcat

SEQ ID NO: 5255980 - DNA, 25 bp, Homo sapien
aggaccccactcaggcagctgcctc

SEQ ID NO: 5255981 - DNA, 25 bp, Homo sapien
agtcacgatcaggttgtggtcacca

SEQ ID NO: 5255982 - DNA, 25 bp, Homo sapien
tgtggtcaccatggcttcgtctctc

SEQ ID NO: 5255983 - DNA, 25 bp, Homo sapien
tcaggttgtggtcaccatggcttcg

SEQ ID NO: 5255984 - DNA, 25 bp, Homo sapien
ttcgtctctccccagacatcagggt

SEQ ID NO: 5255985 - DNA, 25 bp, Homo sapien
aaaattgcttgcttgaaggtaggtc

SEQ ID NO: 5255986 - DNA, 25 bp, Homo sapien
ggtaggtcataaaatgaatcactgg

SEQ ID NO: 5255987 - DNA, 25 bp, Homo sapien
catgctggggctatgctcccgggca

SEQ ID NO: 5255988 - DNA, 25 bp, Homo sapien
aatcactggtcagcattttggcagc

SEQ ID NO: 5255989 - DNA, 25 bp, Homo sapien
ttaataagtctgtctggtgggcaca

SEQ ID NO: 5255990 - DNA, 25 bp, Homo sapien
tgaactccttaataagtctgtctgg

SEQ ID NO: 5255991 - DNA, 25 bp, Homo sapien
tccttaataagtctgtctggtgggc

SEQ ID NO: 5255992 - DNA, 25 bp, Homo sapien
tctgcctgattgaatgacttctgtg

SEQ ID NO: 5255993 - DNA, 25 bp, Homo sapien
gaaaaagtgacacacgcgtccttgt

SEQ ID NO: 5255994 - DNA, 25 bp, Homo sapien
ccgcactgtacatcggtcgaaggtc

SEQ ID NO: 5255995 - DNA, 25 bp, Homo sapien
cgaaggtcccgagcacaggctgttt

SEQ ID NO: 5255996 - DNA, 25 bp, Homo sapien
gtgacacacgcgtccttgttgacat

SEQ ID NO: 5255997 - DNA, 25 bp, Homo sapien
tggtagagaaaagcaaggtggaaat

SEQ ID NO: 5255998 - DNA, 25 bp, Homo sapien
tagagaaaagcaaggtggaaatgtt

SEQ ID NO: 5255999 - DNA, 25 bp, Homo sapien
ctggtagagaaaagcaaggtggaaa

SEQ ID NO: 5256000 - DNA, 25 bp, Homo sapien
gagaaaagcaaggtggaaatgttac

SEQ ID NO: 5256001 - DNA, 25 bp, Homo sapien
ggatggtatatagtaccaaaatgta

SEQ ID NO: 5256002 - DNA, 25 bp, Homo sapien
agatgtagctccttacagcctgcaa

SEQ ID NO: 5256003 - DNA, 25 bp, Homo sapien
taactgtccatcacatctggtgtga

SEQ ID NO: 5256004 - DNA, 25 bp, Homo sapien
tctccccagacacagtcttgataca

SEQ ID NO: 5256005 - DNA, 25 bp, Homo sapien
caatcattgcatctggaggtaatat

SEQ ID NO: 5256006 - DNA, 25 bp, Homo sapien
ggagcggctgcagctgtctacgtac

SEQ ID NO: 5256007 - DNA, 25 bp, Homo sapien
ctggaggtaatatcacggagcggct

SEQ ID NO: 5256008 - DNA, 25 bp, Homo sapien
gtaatatcacggagcggctgcagct

SEQ ID NO: 5256009 - DNA, 25 bp, Homo sapien
ctctgcagcactgggggtggttctc

SEQ ID NO: 5256010 - DNA, 25 bp, Homo sapien
gatagaaaatgaggtggctctgcag

SEQ ID NO: 5256011 - DNA, 25 bp, Homo sapien
cgaaaaccaggtgggtagatgatag

SEQ ID NO: 5256012 - DNA, 25 bp, Homo sapien
agatgatagaaaatgaggtggctct

SEQ ID NO: 5256013 - DNA, 25 bp, Homo sapien
agttatttagtggtagcatgttgca

SEQ ID NO: 5256014 - DNA, 25 bp, Homo sapien
gcctgtgaagatggctgaaggaaca

SEQ ID NO: 5256015 - DNA, 25 bp, Homo sapien
gcactatgatgcacccactgagaag

SEQ ID NO: 5256016 - DNA, 25 bp, Homo sapien
ttaagggcaggtttgattcgagcac

SEQ ID NO: 5256017 - DNA, 25 bp, Homo sapien
tatccaaaggcatatgaagtggaca

SEQ ID NO: 5256018 - DNA, 25 bp, Homo sapien
cagctaaactgataaacatcatgag

SEQ ID NO: 5256019 - DNA, 25 bp, Homo sapien
gaagtggacatgttgcaggactcta

SEQ ID NO: 5256020 - DNA, 25 bp, Homo sapien
catcatgagtcagagaggcaggtag

SEQ ID NO: 5256021 - DNA, 25 bp, Homo sapien
gcactcaggtcatccttgggttcaa

SEQ ID NO: 5256022 - DNA, 25 bp, Homo sapien
gtgggccaaccgcagctctaagtgg

SEQ ID NO: 5256023 - DNA, 25 bp, Homo sapien
gggttccgctgccagggaaacctca

SEQ ID NO: 5256024 - DNA, 25 bp, Homo sapien
ctctcagcactcaggtcatccttgg

SEQ ID NO: 5256025 - DNA, 25 bp, Homo sapien
ctatgggatgtgcatccacaaggat

SEQ ID NO: 5256026 - DNA, 25 bp, Homo sapien
tgtgctatgggatgtgcatccacaa

SEQ ID NO: 5256027 - DNA, 25 bp, Homo sapien
ttagcaagcaatggtctgtgctatg

SEQ ID NO: 5256028 - DNA, 25 bp, Homo sapien
ggatgaatgcattagagtttctgtc

SEQ ID NO: 5256029 - DNA, 25 bp, Homo sapien
catatgtcctgacaagtgctgaggg

SEQ ID NO: 5256030 - DNA, 25 bp, Homo sapien
ttctggagtctcaaagcacaaggtc

SEQ ID NO: 5256031 - DNA, 25 bp, Homo sapien
aatacatattcaggtggcacttgag

SEQ ID NO: 5256032 - DNA, 25 bp, Homo sapien
gagagattcagtgttgccccacgac

SEQ ID NO: 5256033 - DNA, 25 bp, Homo sapien
aagagctttatcagccagtgtgcaa

SEQ ID NO: 5256034 - DNA, 25 bp, Homo sapien
ttgtcagaatcacccctaggctggg

SEQ ID NO: 5256035 - DNA, 25 bp, Homo sapien
aacagcctttcgtttccagtggagg

SEQ ID NO: 5256036 - DNA, 25 bp, Homo sapien
tgtttccatagcagcgattgtcaga

SEQ ID NO: 5256037 - DNA, 25 bp, Homo sapien
gaagctccgggtgtagattcccttg

SEQ ID NO: 5256038 - DNA, 25 bp, Homo sapien
gaactcgggagggaacatcctgctg

SEQ ID NO: 5256039 - DNA, 25 bp, Homo sapien
acctaagcgtgggtggccaacatca

SEQ ID NO: 5256040 - DNA, 25 bp, Homo sapien
aagaagaaggagtcagccatcgcca

SEQ ID NO: 5256041 - DNA, 25 bp, Homo sapien
cttgtgggaaggtgcatgcatcgca

SEQ ID NO: 5256042 - DNA, 25 bp, Homo sapien
cattgtcaagcattcaggaggtaca

SEQ ID NO: 5256043 - DNA, 25 bp, Homo sapien
tagtgacccgatgcatagccttcct

SEQ ID NO: 5256044 - DNA, 25 bp, Homo sapien
tttgatgaaaaccaatagtgacccg

SEQ ID NO: 5256045 - DNA, 25 bp, Homo sapien
accgcgtcattggaggcctgctcgc

SEQ ID NO: 5256046 - DNA, 25 bp, Homo sapien
agaacctcacggtcacggaccgcgt

SEQ ID NO: 5256047 - DNA, 25 bp, Homo sapien
tgatcagtccctggttctgaagcag

SEQ ID NO: 5256048 - DNA, 25 bp, Homo sapien
aacagcgccaaactccactgggaga

SEQ ID NO: 5256049 - DNA, 25 bp, Homo sapien
agaacatgccttgaaaaggtctggg

SEQ ID NO: 5256050 - DNA, 25 bp, Homo sapien
agccggactcgcctaccttagaaca

SEQ ID NO: 5256051 - DNA, 25 bp, Homo sapien
gggagccctttgcaactgcaaactt

SEQ ID NO: 5256052 - DNA, 25 bp, Homo sapien
gctgtgtgctgtggcaatactgggt

SEQ ID NO: 5256053 - DNA, 25 bp, Homo sapien
tcaggtgaaaaggacgtggtgtttc

SEQ ID NO: 5256054 - DNA, 25 bp, Homo sapien
gtgaaaaggacgtggtgtttctgct

SEQ ID NO: 5256055 - DNA, 25 bp, Homo sapien
cgtcaggagcggcttccctctgttg

SEQ ID NO: 5256056 - DNA, 25 bp, Homo sapien
tgatggctctgagggcgtcaggagc

SEQ ID NO: 5256057 - DNA, 25 bp, Homo sapien
gaacgcagaccctgctgagttagag

SEQ ID NO: 5256058 - DNA, 25 bp, Homo sapien
catctgaccgtgtggatgggccagc

SEQ ID NO: 5256059 - DNA, 25 bp, Homo sapien
gctgcagagtcgcttcccaagattg

SEQ ID NO: 5256060 - DNA, 25 bp, Homo sapien
tcttaaaatcagtgcacaacggagc

SEQ ID NO: 5256061 - DNA, 25 bp, Homo sapien
tgcagatatctcaggcactcccagg

SEQ ID NO: 5256062 - DNA, 25 bp, Homo sapien
tccagagtggtagctagtaaattcc

SEQ ID NO: 5256063 - DNA, 25 bp, Homo sapien
cctgccatggtgtcctagctgcatg

SEQ ID NO: 5256064 - DNA, 25 bp, Homo sapien
tccagttgctatcagagattacaag

SEQ ID NO: 5256065 - DNA, 25 bp, Homo sapien
cctaccctaattgcaggacttaata

SEQ ID NO: 5256066 - DNA, 25 bp, Homo sapien
ccaggattcgtgcaaaaagagagag

SEQ ID NO: 5256067 - DNA, 25 bp, Homo sapien
gggtctttcaaacaccaagagcata

SEQ ID NO: 5256068 - DNA, 25 bp, Homo sapien
agaaatggggcgctccttcttgcag

SEQ ID NO: 5256069 - DNA, 25 bp, Homo sapien
ctgagtctccacttttttggtggag

SEQ ID NO: 5256070 - DNA, 25 bp, Homo sapien
atcctgatcatcttaagcccaagga

SEQ ID NO: 5256071 - DNA, 25 bp, Homo sapien
tctgggtaccttgtgaattttagaa

SEQ ID NO: 5256072 - DNA, 25 bp, Homo sapien
ggattcattaatctatatgtctatc

SEQ ID NO: 5256073 - DNA, 25 bp, Homo sapien
tcaagttctaccaagaagttagctc

SEQ ID NO: 5256074 - DNA, 25 bp, Homo sapien
tgtcacgggcattgagctgtggcct

SEQ ID NO: 5256075 - DNA, 25 bp, Homo sapien
ctgtcacgggcattgagctgtggcc

SEQ ID NO: 5256076 - DNA, 25 bp, Homo sapien
ccacattccctccgccgctgtcacg

SEQ ID NO: 5256077 - DNA, 25 bp, Homo sapien
tccctccgccgctgtcacgggcatt

SEQ ID NO: 5256078 - DNA, 25 bp, Homo sapien
tgacagcatccgtttgctgcagctt

SEQ ID NO: 5256079 - DNA, 25 bp, Homo sapien
gaaatgcagtgctgacagcatccgt

SEQ ID NO: 5256080 - DNA, 25 bp, Homo sapien
tgcagtgctgacagcatccgtttgc

SEQ ID NO: 5256081 - DNA, 25 bp, Homo sapien
ctgtaggacgtgtaggagaaatgca

SEQ ID NO: 5256082 - DNA, 25 bp, Homo sapien
aatttcactgcctgggcatacccca

SEQ ID NO: 5256083 - DNA, 25 bp, Homo sapien
tcctctctgcacgtggatagggaac

SEQ ID NO: 5256084 - DNA, 25 bp, Homo sapien
ggcttcagagaagcaccctttaatt

SEQ ID NO: 5256085 - DNA, 25 bp, Homo sapien
tccaaggataactggtcaggcaagt

SEQ ID NO: 5256086 - DNA, 25 bp, Homo sapien
gaaaaagtcaagatccgcgggcaaa

SEQ ID NO: 5256087 - DNA, 25 bp, Homo sapien
ggccttgcccgccaagaaaaagtca

SEQ ID NO: 5256088 - DNA, 25 bp, Homo sapien
tctagggccggcctttgggtgctca

SEQ ID NO: 5256089 - DNA, 25 bp, Homo sapien
tgcgctcttctcctggactctaggg

SEQ ID NO: 5256090 - DNA, 25 bp, Homo sapien
cagggcgtcaggtcagggcgccggg

SEQ ID NO: 5256091 - DNA, 25 bp, Homo sapien
gcgcagagcggctggttagcgcctg

SEQ ID NO: 5256092 - DNA, 25 bp, Homo sapien
aaggaggcgacgaagcagggcgtca

SEQ ID NO: 5256093 - DNA, 25 bp, Homo sapien
agcggctggttagcgcctggctctc

SEQ ID NO: 5256094 - DNA, 25 bp, Homo sapien
gggacgctcagtccctggtccagca

SEQ ID NO: 5256095 - DNA, 25 bp, Homo sapien
cctctccgggggacgctcagtccct

SEQ ID NO: 5256096 - DNA, 25 bp, Homo sapien
ctccgggggacgctcagtccctggt

SEQ ID NO: 5256097 - DNA, 25 bp, Homo sapien
cgggggacgctcagtccctggtcca

SEQ ID NO: 5256098 - DNA, 25 bp, Homo sapien
ctgggggcgttttcacaccagtggg

SEQ ID NO: 5256099 - DNA, 25 bp, Homo sapien
gctgggggcgttttcacaccagtgg

SEQ ID NO: 5256100 - DNA, 25 bp, Homo sapien
cggctgggggcgttttcacaccagt

SEQ ID NO: 5256101 - DNA, 25 bp, Homo sapien
tggcggctgggggcgttttcacacc

SEQ ID NO: 5256102 - DNA, 25 bp, Homo sapien
cccaatgcactatgtgatgctgtgt

SEQ ID NO: 5256103 - DNA, 25 bp, Homo sapien
tcccaaagagccatggtgcctgtct

SEQ ID NO: 5256104 - DNA, 25 bp, Homo sapien
cctgtctgagaatctggtgtgactc

SEQ ID NO: 5256105 - DNA, 25 bp, Homo sapien
gaccaagaagtcaaacctcagatga

SEQ ID NO: 5256106 - DNA, 25 bp, Homo sapien
caaaatctcgttgaacaacttccaa

SEQ ID NO: 5256107 - DNA, 25 bp, Homo sapien
tcggaggtcaaaatctcgttgaaca

SEQ ID NO: 5256108 - DNA, 25 bp, Homo sapien
ccttcggaggtcaaaatctcgttga

SEQ ID NO: 5256109 - DNA, 25 bp, Homo sapien
ggtcaaaatctcgttgaacaacttc

SEQ ID NO: 5256110 - DNA, 25 bp, Homo sapien
acccagacagcacccatatgatggc

SEQ ID NO: 5256111 - DNA, 25 bp, Homo sapien
gcacgtggctgttgacccacccaga

SEQ ID NO: 5256112 - DNA, 25 bp, Homo sapien
ctgcacgtggctgttgacccaccca

SEQ ID NO: 5256113 - DNA, 25 bp, Homo sapien
cgtggctgttgacccacccagacag

SEQ ID NO: 5256114 - DNA, 25 bp, Homo sapien
ccagcaggttgggccctcccccgag

SEQ ID NO: 5256115 - DNA, 25 bp, Homo sapien
cagcaggttgggccctcccccgagg

SEQ ID NO: 5256116 - DNA, 25 bp, Homo sapien
gccagcaggttgggccctcccccga

SEQ ID NO: 5256117 - DNA, 25 bp, Homo sapien
acagggtgtcagccctgcggtcagc

SEQ ID NO: 5256118 - DNA, 25 bp, Homo sapien
gctgcatgctggtccgcagcctctg

SEQ ID NO: 5256119 - DNA, 25 bp, Homo sapien
tgagaaggtggtcgtggccggccat

SEQ ID NO: 5256120 - DNA, 25 bp, Homo sapien
gggcccgtgagaccgcattttcctg

SEQ ID NO: 5256121 - DNA, 25 bp, Homo sapien
caattttggtgccaagaaccagagc

SEQ ID NO: 5256122 - DNA, 25 bp, Homo sapien
gctcctctgcagaaccaattttggt

SEQ ID NO: 5256123 - DNA, 25 bp, Homo sapien
gagttatcttccgtttcatcatgga

SEQ ID NO: 5256124 - DNA, 25 bp, Homo sapien
gattagcaatgatgaaagacaggga

SEQ ID NO: 5256125 - DNA, 25 bp, Homo sapien
gagttgagctaacgccccaggtttg

SEQ ID NO: 5256126 - DNA, 25 bp, Homo sapien
tatgcagaaaacagtgacccaacgt

SEQ ID NO: 5256127 - DNA, 25 bp, Homo sapien
gggctgagctcaaacgggcaatttt

SEQ ID NO: 5256128 - DNA, 25 bp, Homo sapien
aaagccagatggtgtttcctgatca

SEQ ID NO: 5256129 - DNA, 25 bp, Homo sapien
aatatcagaaacaagaaatatattg

SEQ ID NO: 5256130 - DNA, 25 bp, Homo sapien
cagaaacaagaaatatattgggcat

SEQ ID NO: 5256131 - DNA, 25 bp, Homo sapien
tatcagaaacaagaaatatattggg

SEQ ID NO: 5256132 - DNA, 25 bp, Homo sapien
tcagaaacaagaaatatattgggca

SEQ ID NO: 5256133 - DNA, 25 bp, Homo sapien
gctttccttcttaatcttgcccttc

SEQ ID NO: 5256134 - DNA, 25 bp, Homo sapien
ggagctttccttcttaatcttgccc

SEQ ID NO: 5256135 - DNA, 25 bp, Homo sapien
tttccttcttaatcttgcccttcaa

SEQ ID NO: 5256136 - DNA, 25 bp, Homo sapien
tccttcttaatcttgcccttcaacg

SEQ ID NO: 5256137 - DNA, 25 bp, Homo sapien
ttcacaagcagctggtagggctgca

SEQ ID NO: 5256138 - DNA, 25 bp, Homo sapien
cagtgtcggaaagcagctccctctt

SEQ ID NO: 5256139 - DNA, 25 bp, Homo sapien
tctcgttcagatgggcagtgtcgga

SEQ ID NO: 5256140 - DNA, 25 bp, Homo sapien
ccgggtggacgcggccacagctttt

SEQ ID NO: 5256141 - DNA, 25 bp, Homo sapien
atggaagggacacgccagatccaga

SEQ ID NO: 5256142 - DNA, 25 bp, Homo sapien
cattttacctcaaggcctgggctca

SEQ ID NO: 5256143 - DNA, 25 bp, Homo sapien
tacacaggcctgcataaatctcaca

SEQ ID NO: 5256144 - DNA, 25 bp, Homo sapien
ggctcatggcactgcctgagtgctg

SEQ ID NO: 5256145 - DNA, 25 bp, Homo sapien
ctccagtgagccgatcttcacgact

SEQ ID NO: 5256146 - DNA, 25 bp, Homo sapien
tcacatgctcatagtaccactccag

SEQ ID NO: 5256147 - DNA, 25 bp, Homo sapien
agggaccggatgaccttggcacttc

SEQ ID NO: 5256148 - DNA, 25 bp, Homo sapien
gcacttccgaacctcttgaagcggg

SEQ ID NO: 5256149 - DNA, 25 bp, Homo sapien
ttaatattcctaaaatgcctgggaa

SEQ ID NO: 5256150 - DNA, 25 bp, Homo sapien
taatattcctaaaatgcctgggaac

SEQ ID NO: 5256151 - DNA, 25 bp, Homo sapien
atattcctaaaatgcctgggaacaa

SEQ ID NO: 5256152 - DNA, 25 bp, Homo sapien
caaaaagccgttcttactctccact

SEQ ID NO: 5256153 - DNA, 25 bp, Homo sapien
tggactccaggtaacagggacaagg

SEQ ID NO: 5256154 - DNA, 25 bp, Homo sapien
tgcagatggagtcatccaggacact

SEQ ID NO: 5256155 - DNA, 25 bp, Homo sapien
gatcttacaggcgaacacattgttt

SEQ ID NO: 5256156 - DNA, 25 bp, Homo sapien
tcgtggccctggagaaactcgcctt

SEQ ID NO: 5256157 - DNA, 25 bp, Homo sapien
gacaggcacgaataaggtgtctctc

SEQ ID NO: 5256158 - DNA, 25 bp, Homo sapien
caggcacgaataaggtgtctctcca

SEQ ID NO: 5256159 - DNA, 25 bp, Homo sapien
ctttaagagacaggcacgaataagg

SEQ ID NO: 5256160 - DNA, 25 bp, Homo sapien
taagagacaggcacgaataaggtgt

SEQ ID NO: 5256161 - DNA, 25 bp, Homo sapien
cctgcagcaggcccggcgagagctt

SEQ ID NO: 5256162 - DNA, 25 bp, Homo sapien
aatgctcaaaggtgtctatgccaac

SEQ ID NO: 5256163 - DNA, 25 bp, Homo sapien
cccggcgagagcttgaatgctcaaa

SEQ ID NO: 5256164 - DNA, 25 bp, Homo sapien
gagcttgaatgctcaaaggtgtcta

SEQ ID NO: 5256165 - DNA, 25 bp, Homo sapien
gctgctgggaatccaagttcaagga

SEQ ID NO: 5256166 - DNA, 25 bp, Homo sapien
gacagcatggcttttcccggtgtta

SEQ ID NO: 5256167 - DNA, 25 bp, Homo sapien
tctggtgggccgtgtgaactccagc

SEQ ID NO: 5256168 - DNA, 25 bp, Homo sapien
caagaatagggtgataggccctccc

SEQ ID NO: 5256169 - DNA, 25 bp, Homo sapien
tggccatcggccatcgaagctgctt

SEQ ID NO: 5256170 - DNA, 25 bp, Homo sapien
gattttctgaccactcttgatagga

SEQ ID NO: 5256171 - DNA, 25 bp, Homo sapien
ggcgaggtctgcactgtcaggcaaa

SEQ ID NO: 5256172 - DNA, 25 bp, Homo sapien
gaacctagtgttgacgtcaggcgag

SEQ ID NO: 5256173 - DNA, 25 bp, Homo sapien
tccatgtattcacctacccacccat

SEQ ID NO: 5256174 - DNA, 25 bp, Homo sapien
actcaatcagtggctcatccatcca

SEQ ID NO: 5256175 - DNA, 25 bp, Homo sapien
acacagcaatgtatccctccatcta

SEQ ID NO: 5256176 - DNA, 25 bp, Homo sapien
ttcacccacctatccacacagcaat

SEQ ID NO: 5256177 - DNA, 25 bp, Homo sapien
catttgtcagcccatccacccatcc

SEQ ID NO: 5256178 - DNA, 25 bp, Homo sapien
ccatttgtcagcccatccacccatc

SEQ ID NO: 5256179 - DNA, 25 bp, Homo sapien
gccatttgtcagcccatccacccat

SEQ ID NO: 5256180 - DNA, 25 bp, Homo sapien
tgggcctctgagccaggttctccat

SEQ ID NO: 5256181 - DNA, 25 bp, Homo sapien
tctgtctggtcgctgtctccacttc

SEQ ID NO: 5256182 - DNA, 25 bp, Homo sapien
aggttctccatcctcatctgtctgg

SEQ ID NO: 5256183 - DNA, 25 bp, Homo sapien
tcttcagatatcagttcaggcccag

SEQ ID NO: 5256184 - DNA, 25 bp, Homo sapien
gagtggagtcatctgagtctccctc

SEQ ID NO: 5256185 - DNA, 25 bp, Homo sapien
cgtggacggagaggaggcgcttttt

SEQ ID NO: 5256186 - DNA, 25 bp, Homo sapien
aagtcgtggacggagaggaggcgct

SEQ ID NO: 5256187 - DNA, 25 bp, Homo sapien
tctccctcgaagtcgaagtcgtgga

SEQ ID NO: 5256188 - DNA, 25 bp, Homo sapien
ctgtgggctgtccctggcctcaggg

SEQ ID NO: 5256189 - DNA, 25 bp, Homo sapien
gctgtccctggcctcagggactgag

SEQ ID NO: 5256190 - DNA, 25 bp, Homo sapien
tgtccctggcctcagggactgagga

SEQ ID NO: 5256191 - DNA, 25 bp, Homo sapien
ccctggcctcagggactgaggacag

SEQ ID NO: 5256192 - DNA, 25 bp, Homo sapien
gcaggggaaagacacgaggacccac

SEQ ID NO: 5256193 - DNA, 25 bp, Homo sapien
ctgggaggggcaggggaaagacacg

SEQ ID NO: 5256194 - DNA, 25 bp, Homo sapien
gaggggcaggggaaagacacgagga

SEQ ID NO: 5256195 - DNA, 25 bp, Homo sapien
ggcaggggaaagacacgaggaccca

SEQ ID NO: 5256196 - DNA, 25 bp, Homo sapien
gggcctgagcacctgccactcaggt

SEQ ID NO: 5256197 - DNA, 25 bp, Homo sapien
tggggcctgagcacctgccactcag

SEQ ID NO: 5256198 - DNA, 25 bp, Homo sapien
gcctgagcacctgccactcaggttc

SEQ ID NO: 5256199 - DNA, 25 bp, Homo sapien
ctggggcctgagcacctgccactca

SEQ ID NO: 5256200 - DNA, 25 bp, Homo sapien
actgtgtggccatcagacactgctt

SEQ ID NO: 5256201 - DNA, 25 bp, Homo sapien
caagctgcctgctcatatctccaga

SEQ ID NO: 5256202 - DNA, 25 bp, Homo sapien
aggtctctggatcctgtcttcccac

SEQ ID NO: 5256203 - DNA, 25 bp, Homo sapien
atatctccagacatgctaatcctgg

SEQ ID NO: 5256204 - DNA, 25 bp, Homo sapien
tgggccccaactcatctgtccagtc

SEQ ID NO: 5256205 - DNA, 25 bp, Homo sapien
ggttctgccttatttctgtcccaag

SEQ ID NO: 5256206 - DNA, 25 bp, Homo sapien
ctgggccccaactcatctgtccagt

SEQ ID NO: 5256207 - DNA, 25 bp, Homo sapien
ttatttctgtcccaagcaccgatcc

SEQ ID NO: 5256208 - DNA, 25 bp, Homo sapien
taccatactcacagcaatctatgct

SEQ ID NO: 5256209 - DNA, 25 bp, Homo sapien
ctttacattctgtctggcggctgtt

SEQ ID NO: 5256210 - DNA, 25 bp, Homo sapien
ggcggctgttactaccatactcaca

SEQ ID NO: 5256211 - DNA, 25 bp, Homo sapien
tgtctggcggctgttactaccatac

SEQ ID NO: 5256212 - DNA, 25 bp, Homo sapien
gtgagatgctggtcggctgctcttc

SEQ ID NO: 5256213 - DNA, 25 bp, Homo sapien
cgccgtgtctggaaggtgagatgct

SEQ ID NO: 5256214 - DNA, 25 bp, Homo sapien
agccagggcgccgtgtctggaaggt

SEQ ID NO: 5256215 - DNA, 25 bp, Homo sapien
cttccggatgggagtggcacccaga

SEQ ID NO: 5256216 - DNA, 25 bp, Homo sapien
cgagtgcagcagcagtccccagggc

SEQ ID NO: 5256217 - DNA, 25 bp, Homo sapien
gtgcagcagcagtccccagggccat

SEQ ID NO: 5256218 - DNA, 25 bp, Homo sapien
gagtgcagcagcagtccccagggcc

SEQ ID NO: 5256219 - DNA, 25 bp, Homo sapien
agtgcagcagcagtccccagggcca

SEQ ID NO: 5256220 - DNA, 25 bp, Homo sapien
gcagctgctcattcctgatgacatt

SEQ ID NO: 5256221 - DNA, 25 bp, Homo sapien
aggggcagctgctcattcctgatga

SEQ ID NO: 5256222 - DNA, 25 bp, Homo sapien
gctgctcattcctgatgacattcga

SEQ ID NO: 5256223 - DNA, 25 bp, Homo sapien
tgctcattcctgatgacattcgacc

SEQ ID NO: 5256224 - DNA, 25 bp, Homo sapien
cacgtgagcccggatgctttcctca

SEQ ID NO: 5256225 - DNA, 25 bp, Homo sapien
tcctcatcagaggtgtccacatcgg

SEQ ID NO: 5256226 - DNA, 25 bp, Homo sapien
tccgcttggaatggtgggaggccat

SEQ ID NO: 5256227 - DNA, 25 bp, Homo sapien
gaggccatcacgtgagcccggatgc

SEQ ID NO: 5256228 - DNA, 25 bp, Homo sapien
aaaatattgtgatgacgtatctcca

SEQ ID NO: 5256229 - DNA, 25 bp, Homo sapien
gactccacccaaagaaacgacaaga

SEQ ID NO: 5256230 - DNA, 25 bp, Homo sapien
tctgttatgtgaattcacttccaca

SEQ ID NO: 5256231 - DNA, 25 bp, Homo sapien
taagtaggcttgtgcaatttcatag

SEQ ID NO: 5256232 - DNA, 25 bp, Homo sapien
caggctaggagactaggagatgctc

SEQ ID NO: 5256233 - DNA, 25 bp, Homo sapien
caagaggtctctatcctggccacac

SEQ ID NO: 5256234 - DNA, 25 bp, Homo sapien
tcagccagccaaggatgtcccatgg

SEQ ID NO: 5256235 - DNA, 25 bp, Homo sapien
ggctggaaaccacgctatgtatttt

SEQ ID NO: 5256236 - DNA, 25 bp, Homo sapien
gccaagggaggcacaactgtgttct

SEQ ID NO: 5256237 - DNA, 25 bp, Homo sapien
aggtaggtcagcaggcattccacag

SEQ ID NO: 5256238 - DNA, 25 bp, Homo sapien
aaatatgcttattcagctcaaagat

SEQ ID NO: 5256239 - DNA, 25 bp, Homo sapien
tccaggtaggtcagcaggcattcca

SEQ ID NO: 5256240 - DNA, 25 bp, Homo sapien
gaggcagggattgtcttcgctttgt

SEQ ID NO: 5256241 - DNA, 25 bp, Homo sapien
cctgatatgagctgaacttcgtccc

SEQ ID NO: 5256242 - DNA, 25 bp, Homo sapien
gatccccgtgagaaatggaagccca

SEQ ID NO: 5256243 - DNA, 25 bp, Homo sapien
tgtaaacgccattgggcctgatatg

SEQ ID NO: 5256244 - DNA, 25 bp, Homo sapien
cagtatgcttttccgtgaggctcca

SEQ ID NO: 5256245 - DNA, 25 bp, Homo sapien
cctcggtggaaagatcgggaatgac

SEQ ID NO: 5256246 - DNA, 25 bp, Homo sapien
gaagcctattgagacagatcgacag

SEQ ID NO: 5256247 - DNA, 25 bp, Homo sapien
tagattgagtcgatgaagaagccgc

SEQ ID NO: 5256248 - DNA, 25 bp, Homo sapien
ctggggaactttagtgccgtccttg

SEQ ID NO: 5256249 - DNA, 25 bp, Homo sapien
gcgagggccgcgcagagatgccacc

SEQ ID NO: 5256250 - DNA, 25 bp, Homo sapien
ggccccatgaagtcgactttgaagt

SEQ ID NO: 5256251 - DNA, 25 bp, Homo sapien
tccatcccacattccgagggctctc

SEQ ID NO: 5256252 - DNA, 25 bp, Homo sapien
tggattcggctagccatctggagcc

SEQ ID NO: 5256253 - DNA, 25 bp, Homo sapien
gccagtggatttggattcggctagc

SEQ ID NO: 5256254 - DNA, 25 bp, Homo sapien
tttggattcggctagccatctggag

SEQ ID NO: 5256255 - DNA, 25 bp, Homo sapien
tggatttggattcggctagccatct

SEQ ID NO: 5256256 - DNA, 25 bp, Homo sapien
ctacatcggcctccgtgcgcactcc

SEQ ID NO: 5256257 - DNA, 25 bp, Homo sapien
acatcggcctccgtgcgcactccag

SEQ ID NO: 5256258 - DNA, 25 bp, Homo sapien
tcggcctccgtgcgcactccagcac

SEQ ID NO: 5256259 - DNA, 25 bp, Homo sapien
atcggcctccgtgcgcactccagca

SEQ ID NO: 5256260 - DNA, 25 bp, Homo sapien
tgacgttgctggtcagctcctccag

SEQ ID NO: 5256261 - DNA, 25 bp, Homo sapien
agcttcctcctcagggcctcctcct

SEQ ID NO: 5256262 - DNA, 25 bp, Homo sapien
ctcctccagcttcctcctcagggcc

SEQ ID NO: 5256263 - DNA, 25 bp, Homo sapien
ctccagcttcctcctcagggcctcc

SEQ ID NO: 5256264 - DNA, 25 bp, Homo sapien
gagaggcccaactgatttgtccctg

SEQ ID NO: 5256265 - DNA, 25 bp, Homo sapien
cctcctcctcggacgaggtctcctg

SEQ ID NO: 5256266 - DNA, 25 bp, Homo sapien
gggctctgccttttcgtccttggct

SEQ ID NO: 5256267 - DNA, 25 bp, Homo sapien
gctctgccttttcgtccttggcttc

SEQ ID NO: 5256268 - DNA, 25 bp, Homo sapien
tgtctgttggtttgatgggcagccg

SEQ ID NO: 5256269 - DNA, 25 bp, Homo sapien
ctgtctgttggtttgatgggcagcc

SEQ ID NO: 5256270 - DNA, 25 bp, Homo sapien
tctgttggtttgatgggcagccgtg

SEQ ID NO: 5256271 - DNA, 25 bp, Homo sapien
tgttggtttgatgggcagccgtgcc

SEQ ID NO: 5256272 - DNA, 25 bp, Homo sapien
tggtcctgttgtactggacggggtc

SEQ ID NO: 5256273 - DNA, 25 bp, Homo sapien
tggacttctgaggccgtcactgcca

SEQ ID NO: 5256274 - DNA, 25 bp, Homo sapien
ttctgaggccgtcactgccactctg

SEQ ID NO: 5256275 - DNA, 25 bp, Homo sapien
ctgttgtactggacggggtccccag

SEQ ID NO: 5256276 - DNA, 25 bp, Homo sapien
agggcttcaccgtgagccctgcggc

SEQ ID NO: 5256277 - DNA, 25 bp, Homo sapien
gccctgcggccctcagggctgcaat

SEQ ID NO: 5256278 - DNA, 25 bp, Homo sapien
ggctttcccgagggcttcaccgtga

SEQ ID NO: 5256279 - DNA, 25 bp, Homo sapien
tcagggctgcaatcctggattcaat

SEQ ID NO: 5256280 - DNA, 25 bp, Homo sapien
taaggatttccacatgaggcaacat

SEQ ID NO: 5256281 - DNA, 25 bp, Homo sapien
ggcaacatgattcaggcggctcctt

SEQ ID NO: 5256282 - DNA, 25 bp, Homo sapien
cacgtggcggcggactaaggatttc

SEQ ID NO: 5256283 - DNA, 25 bp, Homo sapien
gaggctcagagtcccctcataaaga

SEQ ID NO: 5256284 - DNA, 25 bp, Homo sapien
aaagaaaacaaatcttgagactcca

SEQ ID NO: 5256285 - DNA, 25 bp, Homo sapien
ccagtatgccgctccaggactctgg

SEQ ID NO: 5256286 - DNA, 25 bp, Homo sapien
gactagggcgccaaagtgtgcaaat

SEQ ID NO: 5256287 - DNA, 25 bp, Homo sapien
tgctctctatacatgctgggttggg

SEQ ID NO: 5256288 - DNA, 25 bp, Homo sapien
cttggcctcacttgaagggtctgca

SEQ ID NO: 5256289 - DNA, 25 bp, Homo sapien
tgcatttgggtcctctggtctcttg

SEQ ID NO: 5256290 - DNA, 25 bp, Homo sapien
gggtctgcatttgggtcctctggtc

SEQ ID NO: 5256291 - DNA, 25 bp, Homo sapien
tcccagccactcgagggagaaatat

SEQ ID NO: 5256292 - DNA, 25 bp, Homo sapien
gaaaacatcgcgtgtcactgtgagg

SEQ ID NO: 5256293 - DNA, 25 bp, Homo sapien
tgtggctaacacgattcctgggtcc

SEQ ID NO: 5256294 - DNA, 25 bp, Homo sapien
tacccgctgggtgctgtaaacatcc

SEQ ID NO: 5256295 - DNA, 25 bp, Homo sapien
ataaatagcactgcctacccgctgg

SEQ ID NO: 5256296 - DNA, 25 bp, Homo sapien
tgtgacgtttaggaattgtcaacta

SEQ ID NO: 5256297 - DNA, 25 bp, Homo sapien
gaaatgcctgaaataagagatgctc

SEQ ID NO: 5256298 - DNA, 25 bp, Homo sapien
gagtacaagtttctgccctgcaggt

SEQ ID NO: 5256299 - DNA, 25 bp, Homo sapien
cacatttgggtggtatggcagaaag

SEQ ID NO: 5256300 - DNA, 25 bp, Homo sapien
cttgacttttcagggaattactgaa

SEQ ID NO: 5256301 - DNA, 25 bp, Homo sapien
ttcttctcagaagatagggcacagc

SEQ ID NO: 5256302 - DNA, 25 bp, Homo sapien
cttctcagaagatagggcacagcca

SEQ ID NO: 5256303 - DNA, 25 bp, Homo sapien
cagggaattactgaactttcttctc

SEQ ID NO: 5256304 - DNA, 25 bp, Homo sapien
tacttagcccaaacaagtgccttgg

SEQ ID NO: 5256305 - DNA, 25 bp, Homo sapien
atttcagctgtcatgcaaatcaaca

SEQ ID NO: 5256306 - DNA, 25 bp, Homo sapien
tcacactgcactggtgtgtggtctt

SEQ ID NO: 5256307 - DNA, 25 bp, Homo sapien
gggatggtgctttatcaatcacata

SEQ ID NO: 5256308 - DNA, 25 bp, Homo sapien
tgtcagcgagcctcggtacactgat

SEQ ID NO: 5256309 - DNA, 25 bp, Homo sapien
gatttccgatcaaaagaatcatcat

SEQ ID NO: 5256310 - DNA, 25 bp, Homo sapien
ggtacactgatttccgatcaaaaga

SEQ ID NO: 5256311 - DNA, 25 bp, Homo sapien
gggtttctctgtgtcagcgagcctc

SEQ ID NO: 5256312 - DNA, 25 bp, Homo sapien
ggtcatcggccaagtcttcatgtgt

SEQ ID NO: 5256313 - DNA, 25 bp, Homo sapien
ctggtcatcggccaagtcttcatgt

SEQ ID NO: 5256314 - DNA, 25 bp, Homo sapien
gatcacattggttggggccactcct

SEQ ID NO: 5256315 - DNA, 25 bp, Homo sapien
ctctgattggttgcctcctgcgact

SEQ ID NO: 5256316 - DNA, 25 bp, Homo sapien
aggactggtgggccaccacaggttt

SEQ ID NO: 5256317 - DNA, 25 bp, Homo sapien
aaagcacagagccaatgagggacag

SEQ ID NO: 5256318 - DNA, 25 bp, Homo sapien
ggaaaacagtgcagggctgctctgt

SEQ ID NO: 5256319 - DNA, 25 bp, Homo sapien
gtgtatagtggaaagcacagagcca

SEQ ID NO: 5256320 - DNA, 25 bp, Homo sapien
ctgtggtggagggaaaacagtgcag

SEQ ID NO: 5256321 - DNA, 25 bp, Homo sapien
caaaggcagtgcagccattgggtcc

SEQ ID NO: 5256322 - DNA, 25 bp, Homo sapien
taaccaatgggcgagtggcaagctg

SEQ ID NO: 5256323 - DNA, 25 bp, Homo sapien
gaaacagctgctaatgtgtgctcac

SEQ ID NO: 5256324 - DNA, 25 bp, Homo sapien
gaatgtcgctgtccacttgcaggtg

SEQ ID NO: 5256325 - DNA, 25 bp, Homo sapien
tgaaagaggagccacgcttcccctt

SEQ ID NO: 5256326 - DNA, 25 bp, Homo sapien
cagccttatgaaagaggagccacgc

SEQ ID NO: 5256327 - DNA, 25 bp, Homo sapien
aggatctggtaaagataggaattcc

SEQ ID NO: 5256328 - DNA, 25 bp, Homo sapien
tctaggagacatatggggtaggact

SEQ ID NO: 5256329 - DNA, 25 bp, Homo sapien
ttcttgcaagaatgtcacagaactg

SEQ ID NO: 5256330 - DNA, 25 bp, Homo sapien
cgagtgaggtgtgggctgttcttgc

SEQ ID NO: 5256331 - DNA, 25 bp, Homo sapien
gtgatggcgagtgaggtgtgggctg

SEQ ID NO: 5256332 - DNA, 25 bp, Homo sapien
ggctgttcttgcaagaatgtcacag

SEQ ID NO: 5256333 - DNA, 25 bp, Homo sapien
ccccacgaagaaggcgatggtgtcc

SEQ ID NO: 5256334 - DNA, 25 bp, Homo sapien
tcagagacctcagaaccgctgagag

SEQ ID NO: 5256335 - DNA, 25 bp, Homo sapien
ggcgatggtgtccatcagagacctc

SEQ ID NO: 5256336 - DNA, 25 bp, Homo sapien
catcagagacctcagaaccgctgag

SEQ ID NO: 5256337 - DNA, 25 bp, Homo sapien
tgcttcccatggattggcgcagatg

SEQ ID NO: 5256338 - DNA, 25 bp, Homo sapien
tctgggcaatactttccccttcagg

SEQ ID NO: 5256339 - DNA, 25 bp, Homo sapien
gatggtcaatgtgccacttccatcc

SEQ ID NO: 5256340 - DNA, 25 bp, Homo sapien
tttccccttcagggaacaggacaca

SEQ ID NO: 5256341 - DNA, 25 bp, Homo sapien
tatatgcagttgagtacaatctttt

SEQ ID NO: 5256342 - DNA, 25 bp, Homo sapien
cacttatatgcagttgagtacaatc

SEQ ID NO: 5256343 - DNA, 25 bp, Homo sapien
tgcagttgagtacaatctttttaag

SEQ ID NO: 5256344 - DNA, 25 bp, Homo sapien
cttatatgcagttgagtacaatctt

SEQ ID NO: 5256345 - DNA, 25 bp, Homo sapien
gtctccctcacagggcggcatcagg

SEQ ID NO: 5256346 - DNA, 25 bp, Homo sapien
tctcgagtgtggtagaggagctgtc

SEQ ID NO: 5256347 - DNA, 25 bp, Homo sapien
tttatagcccccgagaggacgaagc

SEQ ID NO: 5256348 - DNA, 25 bp, Homo sapien
catcaggagcgagcctgtgtctctt

SEQ ID NO: 5256349 - DNA, 25 bp, Homo sapien
ccttggctcctccgaggaggccccg

SEQ ID NO: 5256350 - DNA, 25 bp, Homo sapien
agggccaggcccagcatcagcaggc

SEQ ID NO: 5256351 - DNA, 25 bp, Homo sapien
ggagccaggccctcagcaccttcat

SEQ ID NO: 5256352 - DNA, 25 bp, Homo sapien
agcaggcacaggagccaggccctca

SEQ ID NO: 5256353 - DNA, 25 bp, Homo sapien
ggcacaggagccaggccctcagcac

SEQ ID NO: 5256354 - DNA, 25 bp, Homo sapien
atctccatggagtgccgatgggtac

SEQ ID NO: 5256355 - DNA, 25 bp, Homo sapien
ctccatggagtgccgatgggtacga

SEQ ID NO: 5256356 - DNA, 25 bp, Homo sapien
tctccatggagtgccgatgggtacg

SEQ ID NO: 5256357 - DNA, 25 bp, Homo sapien
ctgatcccgcgactggcgtaccagg

SEQ ID NO: 5256358 - DNA, 25 bp, Homo sapien
ttgccctcctccgaccgaagcggcc

SEQ ID NO: 5256359 - DNA, 25 bp, Homo sapien
acaggcctgatcccgcgactggcgt

SEQ ID NO: 5256360 - DNA, 25 bp, Homo sapien
actggcgtaccaggcaggattgatg

SEQ ID NO: 5256361 - DNA, 25 bp, Homo sapien
tggagcctgggcccacctgcttctg

SEQ ID NO: 5256362 - DNA, 25 bp, Homo sapien
cctggagcctgggcccacctgcttc

SEQ ID NO: 5256363 - DNA, 25 bp, Homo sapien
gcctggagcctgggcccacctgctt

SEQ ID NO: 5256364 - DNA, 25 bp, Homo sapien
ctggagcctgggcccacctgcttct

SEQ ID NO: 5256365 - DNA, 25 bp, Homo sapien
aggaaagtgctgtgccctatcccca

SEQ ID NO: 5256366 - DNA, 25 bp, Homo sapien
aagatctggcgtcacatggctccca

SEQ ID NO: 5256367 - DNA, 25 bp, Homo sapien
tgtcaatgctgggttgctcccgagc

SEQ ID NO: 5256368 - DNA, 25 bp, Homo sapien
tgattccccgatgcctgtgcctgtt

SEQ ID NO: 5256369 - DNA, 25 bp, Homo sapien
gtggccatggctccttactggcggc

SEQ ID NO: 5256370 - DNA, 25 bp, Homo sapien
catggctccttactggcggcagtga

SEQ ID NO: 5256371 - DNA, 25 bp, Homo sapien
gccatggctccttactggcggcagt

SEQ ID NO: 5256372 - DNA, 25 bp, Homo sapien
atggctccttactggcggcagtgag

SEQ ID NO: 5256373 - DNA, 25 bp, Homo sapien
tctgatgggtagagagccctaaacc

SEQ ID NO: 5256374 - DNA, 25 bp, Homo sapien
ggcatgtttgggataaccacccgag

SEQ ID NO: 5256375 - DNA, 25 bp, Homo sapien
tcttcttggtatctaggactcagtc

SEQ ID NO: 5256376 - DNA, 25 bp, Homo sapien
ttttttatccgtctctgaagccagc

SEQ ID NO: 5256377 - DNA, 25 bp, Homo sapien
gtcctgcctgtggagggaagcaaac

SEQ ID NO: 5256378 - DNA, 25 bp, Homo sapien
cagtgggcattgctctggtccgagg

SEQ ID NO: 5256379 - DNA, 25 bp, Homo sapien
gcattgctctggtccgaggctgctg

SEQ ID NO: 5256380 - DNA, 25 bp, Homo sapien
tttccattggagtagaggctcctcc

SEQ ID NO: 5256381 - DNA, 25 bp, Homo sapien
gagtctcccatgtgcacggaggcca

SEQ ID NO: 5256382 - DNA, 25 bp, Homo sapien
tggactggctcacactcagttgcct

SEQ ID NO: 5256383 - DNA, 25 bp, Homo sapien
ggagactcttctgttaccaccaagc

SEQ ID NO: 5256384 - DNA, 25 bp, Homo sapien
gaagtttcatggcttgggaagacca

SEQ ID NO: 5256385 - DNA, 25 bp, Homo sapien
tcctgtgttaggactggctagtccg

SEQ ID NO: 5256386 - DNA, 25 bp, Homo sapien
gcttggacgtggtagagcaacgcta

SEQ ID NO: 5256387 - DNA, 25 bp, Homo sapien
tagagagattctcaagcctccagag

SEQ ID NO: 5256388 - DNA, 25 bp, Homo sapien
cagaggataaggacgtcattcaaaa

SEQ ID NO: 5256389 - DNA, 25 bp, Homo sapien
accgcgctggcctctttttgcattc

SEQ ID NO: 5256390 - DNA, 25 bp, Homo sapien
tcctcccattctgcgctcccccaac

SEQ ID NO: 5256391 - DNA, 25 bp, Homo sapien
caggaaggtggattcttcaagggaa

SEQ ID NO: 5256392 - DNA, 25 bp, Homo sapien
ctcccattctgcgctcccccaaccc

SEQ ID NO: 5256393 - DNA, 25 bp, Homo sapien
aggagatcttctccaggggcttgat

SEQ ID NO: 5256394 - DNA, 25 bp, Homo sapien
gaaggagatcttctccaggggcttg

SEQ ID NO: 5256395 - DNA, 25 bp, Homo sapien
atgaaggagatcttctccaggggct

SEQ ID NO: 5256396 - DNA, 25 bp, Homo sapien
ctcatgttaatgaaggagatcttct

SEQ ID NO: 5256397 - DNA, 25 bp, Homo sapien
tggtgttcagaaatccctgctggaa

SEQ ID NO: 5256398 - DNA, 25 bp, Homo sapien
tctttacagaattaggcagggcctc

SEQ ID NO: 5256399 - DNA, 25 bp, Homo sapien
cccctgaggacttcggcccattgtt

SEQ ID NO: 5256400 - DNA, 25 bp, Homo sapien
tctgcccctggcattgtgcttccgg

SEQ ID NO: 5256401 - DNA, 25 bp, Homo sapien
ctgctcatgctggggttaaacggag

SEQ ID NO: 5256402 - DNA, 25 bp, Homo sapien
gctcatgctggggttaaacggagcc

SEQ ID NO: 5256403 - DNA, 25 bp, Homo sapien
tctgctcatgctggggttaaacgga

SEQ ID NO: 5256404 - DNA, 25 bp, Homo sapien
tcatgctggggttaaacggagccac

SEQ ID NO: 5256405 - DNA, 25 bp, Homo sapien
tatttttcatggagcaaagaacagg

SEQ ID NO: 5256406 - DNA, 25 bp, Homo sapien
aggtcgtaggtggatatttttcatg

SEQ ID NO: 5256407 - DNA, 25 bp, Homo sapien
cgtaggtggatatttttcatggagc

SEQ ID NO: 5256408 - DNA, 25 bp, Homo sapien
tggatatttttcatggagcaaagaa

SEQ ID NO: 5256409 - DNA, 25 bp, Homo sapien
ctggcgggcagagtgggggatcaca

SEQ ID NO: 5256410 - DNA, 25 bp, Homo sapien
tggcgggcagagtgggggatcacaa

SEQ ID NO: 5256411 - DNA, 25 bp, Homo sapien
aactggccatctggatgtgtatgtg

SEQ ID NO: 5256412 - DNA, 25 bp, Homo sapien
aggaactggccatctggatgtgtat

SEQ ID NO: 5256413 - DNA, 25 bp, Homo sapien
caaagcccacccatgcaggtttgca

SEQ ID NO: 5256414 - DNA, 25 bp, Homo sapien
gggagtgatccccaggcaaaggccc

SEQ ID NO: 5256415 - DNA, 25 bp, Homo sapien
tgttctgagagctaccctggagccc

SEQ ID NO: 5256416 - DNA, 25 bp, Homo sapien
cccacccatgcaggtttgcagtgtc

SEQ ID NO: 5256417 - DNA, 25 bp, Homo sapien
agactggcctctactaggagcagat

SEQ ID NO: 5256418 - DNA, 25 bp, Homo sapien
ctcgctatctgcagggtggaatgcc

SEQ ID NO: 5256419 - DNA, 25 bp, Homo sapien
cagactggcctctactaggagcaga

SEQ ID NO: 5256420 - DNA, 25 bp, Homo sapien
gactggcctctactaggagcagatg

SEQ ID NO: 5256421 - DNA, 25 bp, Homo sapien
tccactatctacaaaagccagaata

SEQ ID NO: 5256422 - DNA, 25 bp, Homo sapien
tacactgtcccaatttaatccacta

SEQ ID NO: 5256423 - DNA, 25 bp, Homo sapien
tgaattcccattctacactgtccca

SEQ ID NO: 5256424 - DNA, 25 bp, Homo sapien
tccatcatgctgtgcatcagaactg

SEQ ID NO: 5256425 - DNA, 25 bp, Homo sapien
tctaaatggaaatacgggtgcccac

SEQ ID NO: 5256426 - DNA, 25 bp, Homo sapien
gacagtattctaggcaagagccctt

SEQ ID NO: 5256427 - DNA, 25 bp, Homo sapien
tgctctcagagtggaccggttctca

SEQ ID NO: 5256428 - DNA, 25 bp, Homo sapien
cagaatcagtgtctggttgaggccc

SEQ ID NO: 5256429 - DNA, 25 bp, Homo sapien
taatcgcggagcgacgcgcgccagg

SEQ ID NO: 5256430 - DNA, 25 bp, Homo sapien
gactgtttggcgggccggtaatcgc

SEQ ID NO: 5256431 - DNA, 25 bp, Homo sapien
cggagggtggactttgcggggactg

SEQ ID NO: 5256432 - DNA, 25 bp, Homo sapien
cgggcacgcgggacctgagggaccg

SEQ ID NO: 5256433 - DNA, 25 bp, Homo sapien
gctgccgcggggcccgttgctccag

SEQ ID NO: 5256434 - DNA, 25 bp, Homo sapien
cgccccgatccctgggtgcccatgt

SEQ ID NO: 5256435 - DNA, 25 bp, Homo sapien
ttggggagccgcttgcgccccgatc

SEQ ID NO: 5256436 - DNA, 25 bp, Homo sapien
tcccgcgcgatctggttgagcgcgt

SEQ ID NO: 5256437 - DNA, 25 bp, Homo sapien
tgagcgcgtcgtcctccgccgtgag

SEQ ID NO: 5256438 - DNA, 25 bp, Homo sapien
cagcggccgacggtggccggggtgg

SEQ ID NO: 5256439 - DNA, 25 bp, Homo sapien
aaggtcacaggcacattgttcacgc

SEQ ID NO: 5256440 - DNA, 25 bp, Homo sapien
cttgtagacgatctgccaagatggg

SEQ ID NO: 5256441 - DNA, 25 bp, Homo sapien
taaaaatccgtctggaacaccagtc

SEQ ID NO: 5256442 - DNA, 25 bp, Homo sapien
cagtgactccactgcggctgggttc

SEQ ID NO: 5256443 - DNA, 25 bp, Homo sapien
tcagaaacccagaagcatcttttgg

SEQ ID NO: 5256444 - DNA, 25 bp, Homo sapien
cagaagcatcttttgggaatcgcac

SEQ ID NO: 5256445 - DNA, 25 bp, Homo sapien
aacccagaagcatcttttgggaatc

SEQ ID NO: 5256446 - DNA, 25 bp, Homo sapien
cccagaagcatcttttgggaatcgc

SEQ ID NO: 5256447 - DNA, 25 bp, Homo sapien
gacagatatgggactctctctcctg

SEQ ID NO: 5256448 - DNA, 25 bp, Homo sapien
gctggccctctgacagaaatagctg

SEQ ID NO: 5256449 - DNA, 25 bp, Homo sapien
tctgtcaaacagagagactcggaac

SEQ ID NO: 5256450 - DNA, 25 bp, Homo sapien
gggtcttagaagcaacctccattcg

SEQ ID NO: 5256451 - DNA, 25 bp, Homo sapien
tcaaatcagagctgcttgcccctgc

SEQ ID NO: 5256452 - DNA, 25 bp, Homo sapien
tgtagacactagaggttagccgttc

SEQ ID NO: 5256453 - DNA, 25 bp, Homo sapien
gtcaagggcactggcctcaaaggca

SEQ ID NO: 5256454 - DNA, 25 bp, Homo sapien
taacactgacatggtggtcaagggc

SEQ ID NO: 5256455 - DNA, 25 bp, Homo sapien
tcagtaattacagagggctagtggc

SEQ ID NO: 5256456 - DNA, 25 bp, Homo sapien
tagtggctaccacagtgcactgcac

SEQ ID NO: 5256457 - DNA, 25 bp, Homo sapien
aagcaatatcttagggcagaggtcc

SEQ ID NO: 5256458 - DNA, 25 bp, Homo sapien
ctctggagctacactggtcgacacg

SEQ ID NO: 5256459 - DNA, 25 bp, Homo sapien
cagccacacctggattttgagtaat

SEQ ID NO: 5256460 - DNA, 25 bp, Homo sapien
aaggacgactgggtctccagcccca

SEQ ID NO: 5256461 - DNA, 25 bp, Homo sapien
ccacaggtgagactaaagttgaggg

SEQ ID NO: 5256462 - DNA, 25 bp, Homo sapien
ggtgagactaaagttgagggtcttc

SEQ ID NO: 5256463 - DNA, 25 bp, Homo sapien
ctgttgtccaacatccagtccccct

SEQ ID NO: 5256464 - DNA, 25 bp, Homo sapien
ttctgttgtccaacatccagtcccc

SEQ ID NO: 5256465 - DNA, 25 bp, Homo sapien
gttgtccaacatccagtcccccttc

SEQ ID NO: 5256466 - DNA, 25 bp, Homo sapien
ctttctgttgtccaacatccagtcc

SEQ ID NO: 5256467 - DNA, 25 bp, Homo sapien
cagtgagcagaccactcaaaggtgt

SEQ ID NO: 5256468 - DNA, 25 bp, Homo sapien
aaaggtgtttgtgagaccagggctc

SEQ ID NO: 5256469 - DNA, 25 bp, Homo sapien
ttttcatccatgtcagggtccggag

SEQ ID NO: 5256470 - DNA, 25 bp, Homo sapien
ggaaggtgtcggagtccatgtcccc

SEQ ID NO: 5256471 - DNA, 25 bp, Homo sapien
gaaagttatattgggtgtgccctca

SEQ ID NO: 5256472 - DNA, 25 bp, Homo sapien
tcacagtctgcatggacagcaaccg

SEQ ID NO: 5256473 - DNA, 25 bp, Homo sapien
tggtgaggcctgaacaacactggcc

SEQ ID NO: 5256474 - DNA, 25 bp, Homo sapien
ggtaaatgaactcagcccgggtggc

SEQ ID NO: 5256475 - DNA, 25 bp, Homo sapien
cagggccaaaccacataacagggtc

SEQ ID NO: 5256476 - DNA, 25 bp, Homo sapien
gatcaggcagtcctctctccttggc

SEQ ID NO: 5256477 - DNA, 25 bp, Homo sapien
taggtcttttcggtgaacactcaga

SEQ ID NO: 5256478 - DNA, 25 bp, Homo sapien
gatataaacagttacctgggactgg

SEQ ID NO: 5256479 - DNA, 25 bp, Homo sapien
ggaattgtgagtctttttcattagc

SEQ ID NO: 5256480 - DNA, 25 bp, Homo sapien
actggaaagcgatgtccaccctgtt

SEQ ID NO: 5256481 - DNA, 25 bp, Homo sapien
attgtgagtctttttcattagcagc

SEQ ID NO: 5256482 - DNA, 25 bp, Homo sapien
caaaagataagagtaaactggaaag

SEQ ID NO: 5256483 - DNA, 25 bp, Homo sapien
actcagctgggccacagaactacag

SEQ ID NO: 5256484 - DNA, 25 bp, Homo sapien
acagagaatgtgtgcccactcccgt

SEQ ID NO: 5256485 - DNA, 25 bp, Homo sapien
aatgtgtgcccactcccgtgttgca

SEQ ID NO: 5256486 - DNA, 25 bp, Homo sapien
gaactacagcggattgactcaggaa

SEQ ID NO: 5256487 - DNA, 25 bp, Homo sapien
ttgggacatttcagacgttttcctc

SEQ ID NO: 5256488 - DNA, 25 bp, Homo sapien
tcccggtgcaggacgacctcctgtt

SEQ ID NO: 5256489 - DNA, 25 bp, Homo sapien
gacgacctcctgttgatcgacactg

SEQ ID NO: 5256490 - DNA, 25 bp, Homo sapien
cctgttgatcgacactgctttctgc

SEQ ID NO: 5256491 - DNA, 25 bp, Homo sapien
actgacgtcccggtgcaggacgacc

SEQ ID NO: 5256492 - DNA, 25 bp, Homo sapien
tagtgcaggttatcacacgagggac

SEQ ID NO: 5256493 - DNA, 25 bp, Homo sapien
caaattagcatttgtgggatcacgg

SEQ ID NO: 5256494 - DNA, 25 bp, Homo sapien
gaacttctgggatcatcaacggtaa

SEQ ID NO: 5256495 - DNA, 25 bp, Homo sapien
cttagctggtttgaaggcctctggc

SEQ ID NO: 5256496 - DNA, 25 bp, Homo sapien
tgtgaccccagctcatcctaccaca

SEQ ID NO: 5256497 - DNA, 25 bp, Homo sapien
tcatcctaccacagttccctttagt

SEQ ID NO: 5256498 - DNA, 25 bp, Homo sapien
atcctaccacagttccctttagttg

SEQ ID NO: 5256499 - DNA, 25 bp, Homo sapien
ccagctcatcctaccacagttccct

SEQ ID NO: 5256500 - DNA, 25 bp, Homo sapien
catggcttcctggcgaggccctggc

SEQ ID NO: 5256501 - DNA, 25 bp, Homo sapien
cgctgtccccgcattgtcccatctc

SEQ ID NO: 5256502 - DNA, 25 bp, Homo sapien
ctggggaggactgatgtcagacaac

SEQ ID NO: 5256503 - DNA, 25 bp, Homo sapien
gactgatgtcagacaaccgcacacc

SEQ ID NO: 5256504 - DNA, 25 bp, Homo sapien
gacaaccgcacacccagcgagggta

SEQ ID NO: 5256505 - DNA, 25 bp, Homo sapien
ctacagacagaacgaccgaccgggg

SEQ ID NO: 5256506 - DNA, 25 bp, Homo sapien
ggcctccgccgtgccagataccacg

SEQ ID NO: 5256507 - DNA, 25 bp, Homo sapien
tccgccgtgccagataccacgccag

SEQ ID NO: 5256508 - DNA, 25 bp, Homo sapien
agggcctccgccgtgccagatacca

SEQ ID NO: 5256509 - DNA, 25 bp, Homo sapien
ccagggcctccgccgtgccagatac

SEQ ID NO: 5256510 - DNA, 25 bp, Homo sapien
tgtgctgtcgggctttttgggaaac

SEQ ID NO: 5256511 - DNA, 25 bp, Homo sapien
cgtcggcttgattttagttgctgag

SEQ ID NO: 5256512 - DNA, 25 bp, Homo sapien
tgtctccaccccgttggtggcatct

SEQ ID NO: 5256513 - DNA, 25 bp, Homo sapien
tctgtatcaaatgtgctgtcgggct

SEQ ID NO: 5256514 - DNA, 25 bp, Homo sapien
taaacgcactggaggctttccaaat

SEQ ID NO: 5256515 - DNA, 25 bp, Homo sapien
ctaaacgcactggaggctttccaaa

SEQ ID NO: 5256516 - DNA, 25 bp, Homo sapien
taaatcatacacctcgaagacaaaa

SEQ ID NO: 5256517 - DNA, 25 bp, Homo sapien
gatggcttggcagagtaacgttaaa

SEQ ID NO: 5256518 - DNA, 25 bp, Homo sapien
taacgttaaatcatacacctcgaag

SEQ ID NO: 5256519 - DNA, 25 bp, Homo sapien
gcagagtaacgttaaatcatacacc

SEQ ID NO: 5256520 - DNA, 25 bp, Homo sapien
tctctgggaatttattgtagaaagc

SEQ ID NO: 5256521 - DNA, 25 bp, Homo sapien
tctgggaatttattgtagaaagcag

SEQ ID NO: 5256522 - DNA, 25 bp, Homo sapien
ccagtggtcacaacttcactgatga

SEQ ID NO: 5256523 - DNA, 25 bp, Homo sapien
tagaaagcagttagacttttaccag

SEQ ID NO: 5256524 - DNA, 25 bp, Homo sapien
atgggtgctgaggagccgaaggacg

SEQ ID NO: 5256525 - DNA, 25 bp, Homo sapien
tgcagcagggaaaatgggtgctgag

SEQ ID NO: 5256526 - DNA, 25 bp, Homo sapien
ggtgtgcagcagggaaaatgggtgc

SEQ ID NO: 5256527 - DNA, 25 bp, Homo sapien
tgggtgctgaggagccgaaggacga

SEQ ID NO: 5256528 - DNA, 25 bp, Homo sapien
cgctgacccaacttggtaacgtgag

SEQ ID NO: 5256529 - DNA, 25 bp, Homo sapien
acttggtaacgtgagctcgcgcctg

SEQ ID NO: 5256530 - DNA, 25 bp, Homo sapien
tttctctgcacgctgacccaacttg

SEQ ID NO: 5256531 - DNA, 25 bp, Homo sapien
tgagctcgcgcctgtgagcactcac

SEQ ID NO: 5256532 - DNA, 25 bp, Homo sapien
gggcagaagcgacgggatgacgcgg

SEQ ID NO: 5256533 - DNA, 25 bp, Homo sapien
attgtaatcggaaggtcagcctgtc

SEQ ID NO: 5256534 - DNA, 25 bp, Homo sapien
gattgtaatcggaaggtcagcctgt

SEQ ID NO: 5256535 - DNA, 25 bp, Homo sapien
cgggatgacgcggattgtaatcgga

SEQ ID NO: 5256536 - DNA, 25 bp, Homo sapien
caatgaaagtcctgcgggaaacggt

SEQ ID NO: 5256537 - DNA, 25 bp, Homo sapien
ggcatcccgagaagggccgacttcc

SEQ ID NO: 5256538 - DNA, 25 bp, Homo sapien
ggccgatctggcgtcgcagaacccg

SEQ ID NO: 5256539 - DNA, 25 bp, Homo sapien
ggacgacgcagctgcgtgcacacag

SEQ ID NO: 5256540 - DNA, 25 bp, Homo sapien
cgcgcgctctgtccgcggagacgga

SEQ ID NO: 5256541 - DNA, 25 bp, Homo sapien
gccgctaagtgaacgctcgcgcttc

SEQ ID NO: 5256542 - DNA, 25 bp, Homo sapien
cggagacggagccactcgccgctaa

SEQ ID NO: 5256543 - DNA, 25 bp, Homo sapien
agccactcgccgctaagtgaacgct

SEQ ID NO: 5256544 - DNA, 25 bp, Homo sapien
aaacagtcgatctcccggctttgag

SEQ ID NO: 5256545 - DNA, 25 bp, Homo sapien
cagtcgatctcccggctttgagcgg

SEQ ID NO: 5256546 - DNA, 25 bp, Homo sapien
aacagtcgatctcccggctttgagc

SEQ ID NO: 5256547 - DNA, 25 bp, Homo sapien
tcgatctcccggctttgagcggccg

SEQ ID NO: 5256548 - DNA, 25 bp, Homo sapien
gtcccatgtctaacacgtagtgaga

SEQ ID NO: 5256549 - DNA, 25 bp, Homo sapien
aaagttctagtaagtccattccatg

SEQ ID NO: 5256550 - DNA, 25 bp, Homo sapien
gaatgaatgagtctcggaatacata

SEQ ID NO: 5256551 - DNA, 25 bp, Homo sapien
taacagtgaggtaataaaaatcctc

SEQ ID NO: 5256552 - DNA, 25 bp, Homo sapien
attcagtggatattccctggaacca

SEQ ID NO: 5256553 - DNA, 25 bp, Homo sapien
ctatattcagtggatattccctgga

SEQ ID NO: 5256554 - DNA, 25 bp, Homo sapien
ttcagtggatattccctggaaccag

SEQ ID NO: 5256555 - DNA, 25 bp, Homo sapien
tatattcagtggatattccctggaa

SEQ ID NO: 5256556 - DNA, 25 bp, Homo sapien
gggcctcggtccttgtgcgattctt

SEQ ID NO: 5256557 - DNA, 25 bp, Homo sapien
gtccttgtgcgattcttcccctgag

SEQ ID NO: 5256558 - DNA, 25 bp, Homo sapien
ccagtttgttcacagacaagcaggg

SEQ ID NO: 5256559 - DNA, 25 bp, Homo sapien
cctgaagtggccacaaaggccagtt

SEQ ID NO: 5256560 - DNA, 25 bp, Homo sapien
tcagggagagaagccgtttgccagc

SEQ ID NO: 5256561 - DNA, 25 bp, Homo sapien
tgtcagatggaaatgacgccccacg

SEQ ID NO: 5256562 - DNA, 25 bp, Homo sapien
ttagcgcatattagggacacccagt

SEQ ID NO: 5256563 - DNA, 25 bp, Homo sapien
gccaatggacagaggactggaccat

SEQ ID NO: 5256564 - DNA, 25 bp, Homo sapien
gcccgttttgcagcgagccgggctt

SEQ ID NO: 5256565 - DNA, 25 bp, Homo sapien
cgcccgttttgcagcgagccgggct

SEQ ID NO: 5256566 - DNA, 25 bp, Homo sapien
ggctcctcgcagctagaaacgacga

SEQ ID NO: 5256567 - DNA, 25 bp, Homo sapien
gctcctcgcagctagaaacgacgat

SEQ ID NO: 5256568 - DNA, 25 bp, Homo sapien
tggctcctcgcagctagaaacgacg

SEQ ID NO: 5256569 - DNA, 25 bp, Homo sapien
tgggaatattacaacagagacgtgg

SEQ ID NO: 5256570 - DNA, 25 bp, Homo sapien
gagacgtgggagtccagcaacagat

SEQ ID NO: 5256571 - DNA, 25 bp, Homo sapien
tcatggcccgatcattgcttcaggc

SEQ ID NO: 5256572 - DNA, 25 bp, Homo sapien
tacacacagggacaatcatggcccg

SEQ ID NO: 5256573 - DNA, 25 bp, Homo sapien
catccactgctcgatgtcaccccat

SEQ ID NO: 5256574 - DNA, 25 bp, Homo sapien
tgctcgatgtcaccccattttgtat

SEQ ID NO: 5256575 - DNA, 25 bp, Homo sapien
cactgctcgatgtcaccccattttg

SEQ ID NO: 5256576 - DNA, 25 bp, Homo sapien
tccactgctcgatgtcaccccattt

SEQ ID NO: 5256577 - DNA, 25 bp, Homo sapien
tcagcagtcagtggctaccaaacag

SEQ ID NO: 5256578 - DNA, 25 bp, Homo sapien
tgtgatgaagtccacgaggccaggc

SEQ ID NO: 5256579 - DNA, 25 bp, Homo sapien
tagaggaactaacgagaagggccag

SEQ ID NO: 5256580 - DNA, 25 bp, Homo sapien
aagaccagtggtttcggcaggcaca

SEQ ID NO: 5256581 - DNA, 25 bp, Homo sapien
tctcttcgggaatcagaagataaat

SEQ ID NO: 5256582 - DNA, 25 bp, Homo sapien
cctcactctcttcgggaatcagaag

SEQ ID NO: 5256583 - DNA, 25 bp, Homo sapien
aacctcactctcttcgggaatcaga

SEQ ID NO: 5256584 - DNA, 25 bp, Homo sapien
tcttcgggaatcagaagataaatca

SEQ ID NO: 5256585 - DNA, 25 bp, Homo sapien
tggatctacgagagtagcgctcact

SEQ ID NO: 5256586 - DNA, 25 bp, Homo sapien
tttcttctggatctacgagagtagc

SEQ ID NO: 5256587 - DNA, 25 bp, Homo sapien
tctggatctacgagagtagcgctca

SEQ ID NO: 5256588 - DNA, 25 bp, Homo sapien
tctacgagagtagcgctcactgtct

SEQ ID NO: 5256589 - DNA, 25 bp, Homo sapien
acgactacccactgacatgcgctcg

SEQ ID NO: 5256590 - DNA, 25 bp, Homo sapien
tcaggcttccacgactacccactga

SEQ ID NO: 5256591 - DNA, 25 bp, Homo sapien
tacccactgacatgcgctcgtcttc

SEQ ID NO: 5256592 - DNA, 25 bp, Homo sapien
acatgcgctcgtcttcatcagaagc

SEQ ID NO: 5256593 - DNA, 25 bp, Homo sapien
gtgccatgcaaactccatcattctg

SEQ ID NO: 5256594 - DNA, 25 bp, Homo sapien
tgtgccatgcaaactccatcattct

SEQ ID NO: 5256595 - DNA, 25 bp, Homo sapien
ctgtgccatgcaaactccatcattc

SEQ ID NO: 5256596 - DNA, 25 bp, Homo sapien
actgtgccatgcaaactccatcatt

SEQ ID NO: 5256597 - DNA, 25 bp, Homo sapien
tcatctcgggagaaagaaacaacca

SEQ ID NO: 5256598 - DNA, 25 bp, Homo sapien
agacttactaaagggcagacgcgcc

SEQ ID NO: 5256599 - DNA, 25 bp, Homo sapien
gaaacaaccaacgtgcctatgcata

SEQ ID NO: 5256600 - DNA, 25 bp, Homo sapien
gaggttccgattttaccaggagcat

SEQ ID NO: 5256601 - DNA, 25 bp, Homo sapien
tgcattttatcattgggaagggcca

SEQ ID NO: 5256602 - DNA, 25 bp, Homo sapien
tggcactgcaaggacactgacaagg

SEQ ID NO: 5256603 - DNA, 25 bp, Homo sapien
ggtaacggttacaacagcatccctg

SEQ ID NO: 5256604 - DNA, 25 bp, Homo sapien
ggaagggccaaattacatgcacact

SEQ ID NO: 5256605 - DNA, 25 bp, Homo sapien
tatctcggcaaagagtggtgtccag

SEQ ID NO: 5256606 - DNA, 25 bp, Homo sapien
gaaatagagcgagatgccagtcctc

SEQ ID NO: 5256607 - DNA, 25 bp, Homo sapien
ggagtgccctgttcggtggtacaaa

SEQ ID NO: 5256608 - DNA, 25 bp, Homo sapien
aactggccccgcatagaaatagagc

SEQ ID NO: 5256609 - DNA, 25 bp, Homo sapien
caggcgtaaggacccccatactcca

SEQ ID NO: 5256610 - DNA, 25 bp, Homo sapien
gtaaggacccccatactccaagtca

SEQ ID NO: 5256611 - DNA, 25 bp, Homo sapien
aaggacccccatactccaagtcagg

SEQ ID NO: 5256612 - DNA, 25 bp, Homo sapien
taaggacccccatactccaagtcag

SEQ ID NO: 5256613 - DNA, 25 bp, Homo sapien
gcaaattttagatctcaatcccttg

SEQ ID NO: 5256614 - DNA, 25 bp, Homo sapien
gaaaatgcatgtcaaggacttgcaa

SEQ ID NO: 5256615 - DNA, 25 bp, Homo sapien
agagttttactcagactaatttcct

SEQ ID NO: 5256616 - DNA, 25 bp, Homo sapien
tctttggagattggcaagagtttta

SEQ ID NO: 5256617 - DNA, 25 bp, Homo sapien
gtatatcctctatactagtttttta

SEQ ID NO: 5256618 - DNA, 25 bp, Homo sapien
tagtcaatctatagttaaacgcaaa

SEQ ID NO: 5256619 - DNA, 25 bp, Homo sapien
catcgcgcccggcctcagaaattat

SEQ ID NO: 5256620 - DNA, 25 bp, Homo sapien
agttaaacgcaaaagttcatcgtgg

SEQ ID NO: 5256621 - DNA, 25 bp, Homo sapien
agggactgtgatccatacaattctc

SEQ ID NO: 5256622 - DNA, 25 bp, Homo sapien
gactgtgatccatacaattctccat

SEQ ID NO: 5256623 - DNA, 25 bp, Homo sapien
tgtgatccatacaattctccatcat

SEQ ID NO: 5256624 - DNA, 25 bp, Homo sapien
ggactgtgatccatacaattctcca

SEQ ID NO: 5256625 - DNA, 25 bp, Homo sapien
ttttgagccatgcaaatttactata

SEQ ID NO: 5256626 - DNA, 25 bp, Homo sapien
tgagccatgcaaatttactatacta

SEQ ID NO: 5256627 - DNA, 25 bp, Homo sapien
tgaattttgagccatgcaaatttac

SEQ ID NO: 5256628 - DNA, 25 bp, Homo sapien
gagccatgcaaatttactatactaa

SEQ ID NO: 5256629 - DNA, 25 bp, Homo sapien
gaatacagtaatgaaagagttaatc

SEQ ID NO: 5256630 - DNA, 25 bp, Homo sapien
ttggagggctaacattctcagaatg

SEQ ID NO: 5256631 - DNA, 25 bp, Homo sapien
tgagattcttatcaatatctacccc

SEQ ID NO: 5256632 - DNA, 25 bp, Homo sapien
tatctaccccttatactaacaatca

SEQ ID NO: 5256633 - DNA, 25 bp, Homo sapien
gacctgtgggatatcgtgaagctta

SEQ ID NO: 5256634 - DNA, 25 bp, Homo sapien
tcagaaagctaaagacggctttggt

SEQ ID NO: 5256635 - DNA, 25 bp, Homo sapien
ggaaatgtatccagtgtaaccttct

SEQ ID NO: 5256636 - DNA, 25 bp, Homo sapien
catttcacacagaatggacctgtgg

SEQ ID NO: 5256637 - DNA, 25 bp, Homo sapien
tgaaggagctcatgttaactgctgc

SEQ ID NO: 5256638 - DNA, 25 bp, Homo sapien
caaaatctgcggtttctgaagagaa

SEQ ID NO: 5256639 - DNA, 25 bp, Homo sapien
aaacacgtcctttcattgcagccag

SEQ ID NO: 5256640 - DNA, 25 bp, Homo sapien
cattcgagctggtgtggtcaaacgc

SEQ ID NO: 5256641 - DNA, 25 bp, Homo sapien
accaccggcaagcccaaggctggag

SEQ ID NO: 5256642 - DNA, 25 bp, Homo sapien
ggccaccaccggcaagcccaaggct

SEQ ID NO: 5256643 - DNA, 25 bp, Homo sapien
caccaccggcaagcccaaggctgga

SEQ ID NO: 5256644 - DNA, 25 bp, Homo sapien
ccagcttccatttggggcagacagg

SEQ ID NO: 5256645 - DNA, 25 bp, Homo sapien
gccgggcagcgctgtacagacagga

SEQ ID NO: 5256646 - DNA, 25 bp, Homo sapien
ggccgggcagcgctgtacagacagg

SEQ ID NO: 5256647 - DNA, 25 bp, Homo sapien
aaggccgggcagcgctgtacagaca

SEQ ID NO: 5256648 - DNA, 25 bp, Homo sapien
ccgggcagcgctgtacagacaggag

SEQ ID NO: 5256649 - DNA, 25 bp, Homo sapien
agcacgggagccggaggtgctgccc

SEQ ID NO: 5256650 - DNA, 25 bp, Homo sapien
tttcaccacctgttagtatggttgg

SEQ ID NO: 5256651 - DNA, 25 bp, Homo sapien
accacctgttagtatggttggcgtg

SEQ ID NO: 5256652 - DNA, 25 bp, Homo sapien
caccacctgttagtatggttggcgt

SEQ ID NO: 5256653 - DNA, 25 bp, Homo sapien
tcaccacctgttagtatggttggcg

SEQ ID NO: 5256654 - DNA, 25 bp, Homo sapien
gcttgtgatctcatatagatcttca

SEQ ID NO: 5256655 - DNA, 25 bp, Homo sapien
gggacctgccgaagtgccctgcttg

SEQ ID NO: 5256656 - DNA, 25 bp, Homo sapien
cctgcttgcgaattataaggaagcc

SEQ ID NO: 5256657 - DNA, 25 bp, Homo sapien
ggaagcccatatcttcaggggtgct

SEQ ID NO: 5256658 - DNA, 25 bp, Homo sapien
gggagctggagttgaggtggccgct

SEQ ID NO: 5256659 - DNA, 25 bp, Homo sapien
cgggagctggagttgaggtggccgc

SEQ ID NO: 5256660 - DNA, 25 bp, Homo sapien
cacagggctggcccgggccgagctg

SEQ ID NO: 5256661 - DNA, 25 bp, Homo sapien
agggctggcccgggccgagctggcc

SEQ ID NO: 5256662 - DNA, 25 bp, Homo sapien
cagggctggcccgggccgagctggc

SEQ ID NO: 5256663 - DNA, 25 bp, Homo sapien
acagggctggcccgggccgagctgg

SEQ ID NO: 5256664 - DNA, 25 bp, Homo sapien
gaaattgtagggatcagcacgctga

SEQ ID NO: 5256665 - DNA, 25 bp, Homo sapien
caaaacttgggccacgctgagtgac

SEQ ID NO: 5256666 - DNA, 25 bp, Homo sapien
tttcatcagatgtaaggcacccagg

SEQ ID NO: 5256667 - DNA, 25 bp, Homo sapien
aaaaaggtacatccacgcaagcagg

SEQ ID NO: 5256668 - DNA, 25 bp, Homo sapien
actgcctgctccatatgacctcaag

SEQ ID NO: 5256669 - DNA, 25 bp, Homo sapien
tttgccaccacgcttacaccaggcc

SEQ ID NO: 5256670 - DNA, 25 bp, Homo sapien
ttatgtgcccagctagatgtcccaa

SEQ ID NO: 5256671 - DNA, 25 bp, Homo sapien
agggtatcatgacccctctttccag

SEQ ID NO: 5256672 - DNA, 25 bp, Homo sapien
tacacgagggaagatatggacccag

SEQ ID NO: 5256673 - DNA, 25 bp, Homo sapien
tgcatttgctcatacaacggccctg

SEQ ID NO: 5256674 - DNA, 25 bp, Homo sapien
gatctgttggcttcactaggtggag

SEQ ID NO: 5256675 - DNA, 25 bp, Homo sapien
tgtgatcacccaacaagcatccgtc

SEQ ID NO: 5256676 - DNA, 25 bp, Homo sapien
tttcctaagccctagcagagccagg

SEQ ID NO: 5256677 - DNA, 25 bp, Homo sapien
gcgccgaacacattgcagcctgtta

SEQ ID NO: 5256678 - DNA, 25 bp, Homo sapien
tcaggtcagggtgaaaacgtcacac

SEQ ID NO: 5256679 - DNA, 25 bp, Homo sapien
ggattctaaacactgtcacggccac

SEQ ID NO: 5256680 - DNA, 25 bp, Homo sapien
tgggggggcagggctttaacacatc

SEQ ID NO: 5256681 - DNA, 25 bp, Homo sapien
gctttaacacatctttgttctgcat

SEQ ID NO: 5256682 - DNA, 25 bp, Homo sapien
gggctttaacacatctttgttctgc

SEQ ID NO: 5256683 - DNA, 25 bp, Homo sapien
cagggctttaacacatctttgttct

SEQ ID NO: 5256684 - DNA, 25 bp, Homo sapien
tccgataagatgagtaccaaggcag

SEQ ID NO: 5256685 - DNA, 25 bp, Homo sapien
tataccgcagtgaagacggctctct

SEQ ID NO: 5256686 - DNA, 25 bp, Homo sapien
gatgggacagatacgaaggcagact

SEQ ID NO: 5256687 - DNA, 25 bp, Homo sapien
gcagactctgatcagatgggcacca

SEQ ID NO: 5256688 - DNA, 25 bp, Homo sapien
tgttcacgggcgctttccacaatcc

SEQ ID NO: 5256689 - DNA, 25 bp, Homo sapien
agctgcttacggctctctgccctga

SEQ ID NO: 5256690 - DNA, 25 bp, Homo sapien
tgaggccctgtccaagaccatgtgt

SEQ ID NO: 5256691 - DNA, 25 bp, Homo sapien
gctgcttacggctctctgccctgat

SEQ ID NO: 5256692 - DNA, 25 bp, Homo sapien
ctctcccctctttgctaaataagcc

SEQ ID NO: 5256693 - DNA, 25 bp, Homo sapien
tctcccctctttgctaaataagccc

SEQ ID NO: 5256694 - DNA, 25 bp, Homo sapien
ccctctgcccacttagccacagctg

SEQ ID NO: 5256695 - DNA, 25 bp, Homo sapien
tccctctgcccacttagccacagct

SEQ ID NO: 5256696 - DNA, 25 bp, Homo sapien
tgcagctcagcacaggggtgcaggt

SEQ ID NO: 5256697 - DNA, 25 bp, Homo sapien
ctgcagctcagcacaggggtgcagg

SEQ ID NO: 5256698 - DNA, 25 bp, Homo sapien
gcagctcagcacaggggtgcaggtg

SEQ ID NO: 5256699 - DNA, 25 bp, Homo sapien
cataatgaagcttgagaaatcctga

SEQ ID NO: 5256700 - DNA, 25 bp, Homo sapien
gctcagcaacacctgagctgcacag

SEQ ID NO: 5256701 - DNA, 25 bp, Homo sapien
gactctgcagtcaccgttgtgagct

SEQ ID NO: 5256702 - DNA, 25 bp, Homo sapien
tgagctgcacagacgctggtgccgg

SEQ ID NO: 5256703 - DNA, 25 bp, Homo sapien
taaaatctttttctggtctctcttc

SEQ ID NO: 5256704 - DNA, 25 bp, Homo sapien
cttctcagtaaaatctttttctggt

SEQ ID NO: 5256705 - DNA, 25 bp, Homo sapien
aatctttttctggtctctcttctac

SEQ ID NO: 5256706 - DNA, 25 bp, Homo sapien
agtaaaatctttttctggtctctct

SEQ ID NO: 5256707 - DNA, 25 bp, Homo sapien
agacaggcccggcatgttacgagac

SEQ ID NO: 5256708 - DNA, 25 bp, Homo sapien
tggagatggaggtgtctccgctgcc

SEQ ID NO: 5256709 - DNA, 25 bp, Homo sapien
cctgatggatgcctcggtgtcgatg

SEQ ID NO: 5256710 - DNA, 25 bp, Homo sapien
gctgcctctccgagaggaagtccca

SEQ ID NO: 5256711 - DNA, 25 bp, Homo sapien
ctacatcctgaatctggtcctttaa

SEQ ID NO: 5256712 - DNA, 25 bp, Homo sapien
tcatctctttcaatccctgcatgta

SEQ ID NO: 5256713 - DNA, 25 bp, Homo sapien
tctttcaatccctgcatgtatttgc

SEQ ID NO: 5256714 - DNA, 25 bp, Homo sapien
acatcctgaatctggtcctttaact

SEQ ID NO: 5256715 - DNA, 25 bp, Homo sapien
tcttttagggtatcaacctggtaca

SEQ ID NO: 5256716 - DNA, 25 bp, Homo sapien
acatatcttttagggtatcaacctg

SEQ ID NO: 5256717 - DNA, 25 bp, Homo sapien
caacctggtacatgaagtttgtctt

SEQ ID NO: 5256718 - DNA, 25 bp, Homo sapien
tagggtatcaacctggtacatgaag

SEQ ID NO: 5256719 - DNA, 25 bp, Homo sapien
cattctgtatcatactaatgcttac

SEQ ID NO: 5256720 - DNA, 25 bp, Homo sapien
ttaacattctgtatcatactaatgc

SEQ ID NO: 5256721 - DNA, 25 bp, Homo sapien
actgcacgcagcctattgttaacat

SEQ ID NO: 5256722 - DNA, 25 bp, Homo sapien
gcacgcagcctattgttaacattct

SEQ ID NO: 5256723 - DNA, 25 bp, Homo sapien
tttatagatgatgcctgatgactta

SEQ ID NO: 5256724 - DNA, 25 bp, Homo sapien
cagattcctctggactttatagatg

SEQ ID NO: 5256725 - DNA, 25 bp, Homo sapien
gaggagttgatgcaatcaacaagga

SEQ ID NO: 5256726 - DNA, 25 bp, Homo sapien
gacttactgtcaaattaacctgagg

SEQ ID NO: 5256727 - DNA, 25 bp, Homo sapien
tgcagtatactgtgggcgtgttttt

SEQ ID NO: 5256728 - DNA, 25 bp, Homo sapien
tccctgatagaactcgcctgtttct

SEQ ID NO: 5256729 - DNA, 25 bp, Homo sapien
gtctttccactctattgtttcctga

SEQ ID NO: 5256730 - DNA, 25 bp, Homo sapien
tcgcctgtttctgctgtagctgtcg

SEQ ID NO: 5256731 - DNA, 25 bp, Homo sapien
tttgtctttccactctattgtttcc

SEQ ID NO: 5256732 - DNA, 25 bp, Homo sapien
tgcatgcatactcagacaagcggtt

SEQ ID NO: 5256733 - DNA, 25 bp, Homo sapien
taatacgactttgtgtcacgtggga

SEQ ID NO: 5256734 - DNA, 25 bp, Homo sapien
aaactctatttgctaagcaggctgc

SEQ ID NO: 5256735 - DNA, 25 bp, Homo sapien
ggagagtccgtgtcacaatccaagt

SEQ ID NO: 5256736 - DNA, 25 bp, Homo sapien
gaaagacatgcgcatcttgaagcac

SEQ ID NO: 5256737 - DNA, 25 bp, Homo sapien
taaagagactctgcctaaagatact

SEQ ID NO: 5256738 - DNA, 25 bp, Homo sapien
gaaggaggcttctaccatctaaaac

SEQ ID NO: 5256739 - DNA, 25 bp, Homo sapien
caagttacttcagaagcaggaacca

SEQ ID NO: 5256740 - DNA, 25 bp, Homo sapien
aattcctctttcagcatgactactt

SEQ ID NO: 5256741 - DNA, 25 bp, Homo sapien
tcttctctaagatcatcccgttcac

SEQ ID NO: 5256742 - DNA, 25 bp, Homo sapien
ctccttacggaatcaaagaactctt

SEQ ID NO: 5256743 - DNA, 25 bp, Homo sapien
cctctttcagcatgactacttcttc

SEQ ID NO: 5256744 - DNA, 25 bp, Homo sapien
tctgggatatcgtcctccaaaggct

SEQ ID NO: 5256745 - DNA, 25 bp, Homo sapien
ctgggaacaaaaataggctcatcgt

SEQ ID NO: 5256746 - DNA, 25 bp, Homo sapien
gaagtacagggtaactccacagaga

SEQ ID NO: 5256747 - DNA, 25 bp, Homo sapien
gggtgcagcactcgtaaatattcgg

SEQ ID NO: 5256748 - DNA, 25 bp, Homo sapien
gtaggaccttggtatccaacattat

SEQ ID NO: 5256749 - DNA, 25 bp, Homo sapien
caacattattgagggtgtcggaagt

SEQ ID NO: 5256750 - DNA, 25 bp, Homo sapien
ccttggtatccaacattattgaggg

SEQ ID NO: 5256751 - DNA, 25 bp, Homo sapien
tatccaacattattgagggtgtcgg

SEQ ID NO: 5256752 - DNA, 25 bp, Homo sapien
aatggcatgctggtgactgttaacc

SEQ ID NO: 5256753 - DNA, 25 bp, Homo sapien
tgttaacccatcagcgacggtggct

SEQ ID NO: 5256754 - DNA, 25 bp, Homo sapien
cgtaccctcaaagcgctgaatgctg

SEQ ID NO: 5256755 - DNA, 25 bp, Homo sapien
catgccagacaacacgtgggtgacc

SEQ ID NO: 5256756 - DNA, 25 bp, Homo sapien
tgtcacacagccctaaaagcagctt

SEQ ID NO: 5256757 - DNA, 25 bp, Homo sapien
tcaggcagccaaacaatccacaatg

SEQ ID NO: 5256758 - DNA, 25 bp, Homo sapien
tatgaaaggaaatctatcttctgcc

SEQ ID NO: 5256759 - DNA, 25 bp, Homo sapien
tcaaggtcagtctcaaggaagatgc

SEQ ID NO: 5256760 - DNA, 25 bp, Homo sapien
tcaaagagtcatgagaaacaagcct

SEQ ID NO: 5256761 - DNA, 25 bp, Homo sapien
catcaaagagtcatgagaaacaagc

SEQ ID NO: 5256762 - DNA, 25 bp, Homo sapien
ctaaagacagagtcatcaaagagtc

SEQ ID NO: 5256763 - DNA, 25 bp, Homo sapien
gagtcatgagaaacaagcctttgcc

SEQ ID NO: 5256764 - DNA, 25 bp, Homo sapien
aagggaccccatgatgtggcggcca

SEQ ID NO: 5256765 - DNA, 25 bp, Homo sapien
tacattagaatgtaaacacacgttc

SEQ ID NO: 5256766 - DNA, 25 bp, Homo sapien
ggcggccacataatctacattagaa

SEQ ID NO: 5256767 - DNA, 25 bp, Homo sapien
gaatgtaaacacacgttccaaatcc

SEQ ID NO: 5256768 - DNA, 25 bp, Homo sapien
ctttctcagtattgtgcaagatttc

SEQ ID NO: 5256769 - DNA, 25 bp, Homo sapien
tctcagtattgtgcaagatttctct

SEQ ID NO: 5256770 - DNA, 25 bp, Homo sapien
gtattgtgcaagatttctcttttcc

SEQ ID NO: 5256771 - DNA, 25 bp, Homo sapien
cttttccccacattcgccacgattt

SEQ ID NO: 5256772 - DNA, 25 bp, Homo sapien
ctacttctgtactgtgcgctggaac

SEQ ID NO: 5256773 - DNA, 25 bp, Homo sapien
acttctgtactgtgcgctggaacct

SEQ ID NO: 5256774 - DNA, 25 bp, Homo sapien
tacttctgtactgtgcgctggaacc

SEQ ID NO: 5256775 - DNA, 25 bp, Homo sapien
ctggagaaccaggaacttctgtctt

SEQ ID NO: 5256776 - DNA, 25 bp, Homo sapien
ttttgagtgtctactgtacttggac

SEQ ID NO: 5256777 - DNA, 25 bp, Homo sapien
gggctctttcatatctaagggttca

SEQ ID NO: 5256778 - DNA, 25 bp, Homo sapien
tcttttcttcatcgggctctttcat

SEQ ID NO: 5256779 - DNA, 25 bp, Homo sapien
catatctaagggttcattttgagtg

SEQ ID NO: 5256780 - DNA, 25 bp, Homo sapien
tgtcttcttctgcgatgagtccaat

SEQ ID NO: 5256781 - DNA, 25 bp, Homo sapien
tttgtcttcttctgcgatgagtcca

SEQ ID NO: 5256782 - DNA, 25 bp, Homo sapien
ttgtcttcttctgcgatgagtccaa

SEQ ID NO: 5256783 - DNA, 25 bp, Homo sapien
gcaggactgctttgagtggcaccat

SEQ ID NO: 5256784 - DNA, 25 bp, Homo sapien
gctgctgtttgtacatcatcacctt

SEQ ID NO: 5256785 - DNA, 25 bp, Homo sapien
gacaagtcatcgttctctaggctat

SEQ ID NO: 5256786 - DNA, 25 bp, Homo sapien
cagggtgcagcgatctgcgtcttcg

SEQ ID NO: 5256787 - DNA, 25 bp, Homo sapien
gcagtagagcacctggtaattgtca

SEQ ID NO: 5256788 - DNA, 25 bp, Homo sapien
caatgagatccaaaagtatcggttc

SEQ ID NO: 5256789 - DNA, 25 bp, Homo sapien
tgtccctgctcaaatactgcagtag

SEQ ID NO: 5256790 - DNA, 25 bp, Homo sapien
gtatcggttcaagatcaaagactca

SEQ ID NO: 5256791 - DNA, 25 bp, Homo sapien
gatgccaggagggaagtgcattcct

SEQ ID NO: 5256792 - DNA, 25 bp, Homo sapien
tagtcagactcagacttcaagcagc

SEQ ID NO: 5256793 - DNA, 25 bp, Homo sapien
gcagcccaaagagtggaaccacagg

SEQ ID NO: 5256794 - DNA, 25 bp, Homo sapien
cacggaaccccaataggaatcagca

SEQ ID NO: 5256795 - DNA, 25 bp, Homo sapien
gaatcactgagacggctggatggct

SEQ ID NO: 5256796 - DNA, 25 bp, Homo sapien
tgtgaagtcctatagagcccttgga

SEQ ID NO: 5256797 - DNA, 25 bp, Homo sapien
gatgtgatgtgtgcccaacgtcctg

SEQ ID NO: 5256798 - DNA, 25 bp, Homo sapien
agtagtggcgcaggtaagcacagcc

SEQ ID NO: 5256799 - DNA, 25 bp, Homo sapien
tccaaagatcctaagttgttttgaa

SEQ ID NO: 5256800 - DNA, 25 bp, Homo sapien
ttccaaagatcctaagttgttttga

SEQ ID NO: 5256801 - DNA, 25 bp, Homo sapien
ttctatagatgaggctcagaggccc

SEQ ID NO: 5256802 - DNA, 25 bp, Homo sapien
tccggctgcatgcaaacaggctgct

SEQ ID NO: 5256803 - DNA, 25 bp, Homo sapien
tgacacaggtacagttctagcagct

SEQ ID NO: 5256804 - DNA, 25 bp, Homo sapien
ttagcatgcaagaacgctagggcca

SEQ ID NO: 5256805 - DNA, 25 bp, Homo sapien
tgttccaataagcattcccgttcat

SEQ ID NO: 5256806 - DNA, 25 bp, Homo sapien
ctgttccaataagcattcccgttca

SEQ ID NO: 5256807 - DNA, 25 bp, Homo sapien
caggtgccctgttcatgaaccggta

SEQ ID NO: 5256808 - DNA, 25 bp, Homo sapien
cccatatggacaagagaagtgctat

SEQ ID NO: 5256809 - DNA, 25 bp, Homo sapien
gaagaattgttgcaggtgatcacct

SEQ ID NO: 5256810 - DNA, 25 bp, Homo sapien
tcaacagaatggtaggaagtaaggc

SEQ ID NO: 5256811 - DNA, 25 bp, Homo sapien
tctaggactcaggaggagactgtac

SEQ ID NO: 5256812 - DNA, 25 bp, Homo sapien
gaattacactgtaactctgagagaa

SEQ ID NO: 5256813 - DNA, 25 bp, Homo sapien
tgtgtccatcagtactcttctcaga

SEQ ID NO: 5256814 - DNA, 25 bp, Homo sapien
ctaagaaaccagaaagggccacttg

SEQ ID NO: 5256815 - DNA, 25 bp, Homo sapien
tgaaaacacccgccagtaaaatctg

SEQ ID NO: 5256816 - DNA, 25 bp, Homo sapien
ctgaaaacacccgccagtaaaatct

SEQ ID NO: 5256817 - DNA, 25 bp, Homo sapien
acacccgccagtaaaatctgttaat

SEQ ID NO: 5256818 - DNA, 25 bp, Homo sapien
tcagatcgaagattgtctagtttgc

SEQ ID NO: 5256819 - DNA, 25 bp, Homo sapien
catcttcagatcgaagattgtctag

SEQ ID NO: 5256820 - DNA, 25 bp, Homo sapien
catcatcttcagatcgaagattgtc

SEQ ID NO: 5256821 - DNA, 25 bp, Homo sapien
tcgaagattgtctagtttgccaatc

SEQ ID NO: 5256822 - DNA, 25 bp, Homo sapien
tctccccatgaacccagggaaagtg

SEQ ID NO: 5256823 - DNA, 25 bp, Homo sapien
ggtttccatcggcacaacatgtggt

SEQ ID NO: 5256824 - DNA, 25 bp, Homo sapien
tatcttggtgcacgtttttgggtac

SEQ ID NO: 5256825 - DNA, 25 bp, Homo sapien
caagagagtgcctatgagtgaagaa

SEQ ID NO: 5256826 - DNA, 25 bp, Homo sapien
aatttgaggtcgctgatctgtctgt

SEQ ID NO: 5256827 - DNA, 25 bp, Homo sapien
taatgcagttatctcttgctcagat

SEQ ID NO: 5256828 - DNA, 25 bp, Homo sapien
tgcaagtttaaatttgaggtcgctg

SEQ ID NO: 5256829 - DNA, 25 bp, Homo sapien
gtttaaatttgaggtcgctgatctg

SEQ ID NO: 5256830 - DNA, 25 bp, Homo sapien
gcagcgaaggcctgctggacacctt

SEQ ID NO: 5256831 - DNA, 25 bp, Homo sapien
aagacggcagcagcgaaggcctgct

SEQ ID NO: 5256832 - DNA, 25 bp, Homo sapien
ttctgagatgaaagacggcagcagc

SEQ ID NO: 5256833 - DNA, 25 bp, Homo sapien
atgaaagacggcagcagcgaaggcc

SEQ ID NO: 5256834 - DNA, 25 bp, Homo sapien
ttggaacaggcagaatggtgctggt

SEQ ID NO: 5256835 - DNA, 25 bp, Homo sapien
gcgaggagtgaaaggaggcggcttc

SEQ ID NO: 5256836 - DNA, 25 bp, Homo sapien
tgctggtaagggacgtgttccgcca

SEQ ID NO: 5256837 - DNA, 25 bp, Homo sapien
agtctaatctctcctggggtggcgg

SEQ ID NO: 5256838 - DNA, 25 bp, Homo sapien
gttactatttctgggcgaccctgtg

SEQ ID NO: 5256839 - DNA, 25 bp, Homo sapien
caagcaagctattcttggttactat

SEQ ID NO: 5256840 - DNA, 25 bp, Homo sapien
ctctgaccccgtccaccagggtggt

SEQ ID NO: 5256841 - DNA, 25 bp, Homo sapien
tctgggcgaccctgtgctgacatga

SEQ ID NO: 5256842 - DNA, 25 bp, Homo sapien
gatacttgactctctaaccttatta

SEQ ID NO: 5256843 - DNA, 25 bp, Homo sapien
acgtgatacttgactctctaacctt

SEQ ID NO: 5256844 - DNA, 25 bp, Homo sapien
cagccgctgatttgtaacgtgatac

SEQ ID NO: 5256845 - DNA, 25 bp, Homo sapien
tctgcattttcagccgctgatttgt

SEQ ID NO: 5256846 - DNA, 25 bp, Homo sapien
gagtcaggcagaagacgagctgcag

SEQ ID NO: 5256847 - DNA, 25 bp, Homo sapien
gtcaggcagaagacgagctgcagaa

SEQ ID NO: 5256848 - DNA, 25 bp, Homo sapien
agggcatcatctggacccacaggca

SEQ ID NO: 5256849 - DNA, 25 bp, Homo sapien
cagggcatcatctggacccacaggc

SEQ ID NO: 5256850 - DNA, 25 bp, Homo sapien
caggccagagtataacggtgtgatc

SEQ ID NO: 5256851 - DNA, 25 bp, Homo sapien
ggccagagtataacggtgtgatctt

SEQ ID NO: 5256852 - DNA, 25 bp, Homo sapien
cacccaggccagagtataacggtgt

SEQ ID NO: 5256853 - DNA, 25 bp, Homo sapien
cccaggccagagtataacggtgtga

SEQ ID NO: 5256854 - DNA, 25 bp, Homo sapien
tgaaacaactggactccagagaggg

SEQ ID NO: 5256855 - DNA, 25 bp, Homo sapien
taaaatgataacttggcccctggtc

SEQ ID NO: 5256856 - DNA, 25 bp, Homo sapien
tgttaccgaaattccaatcctactg

SEQ ID NO: 5256857 - DNA, 25 bp, Homo sapien
cataacagggttctgtgttaccgaa

SEQ ID NO: 5256858 - DNA, 25 bp, Homo sapien
tcgagctcttctgttttatccaatg

SEQ ID NO: 5256859 - DNA, 25 bp, Homo sapien
ctgttttatccaatgcagagcggag

SEQ ID NO: 5256860 - DNA, 25 bp, Homo sapien
ttctgttttatccaatgcagagcgg

SEQ ID NO: 5256861 - DNA, 25 bp, Homo sapien
tcttctgttttatccaatgcagagc

SEQ ID NO: 5256862 - DNA, 25 bp, Homo sapien
cagacgcttcactaagtggccgttg

SEQ ID NO: 5256863 - DNA, 25 bp, Homo sapien
cgcttcactaagtggccgttgctca

SEQ ID NO: 5256864 - DNA, 25 bp, Homo sapien
gcttcactaagtggccgttgctcac

SEQ ID NO: 5256865 - DNA, 25 bp, Homo sapien
gacgcttcactaagtggccgttgct

SEQ ID NO: 5256866 - DNA, 25 bp, Homo sapien
ctgggacaagagtgcactccgattt

SEQ ID NO: 5256867 - DNA, 25 bp, Homo sapien
ggacaagagtgcactccgatttgct

SEQ ID NO: 5256868 - DNA, 25 bp, Homo sapien
tgggacaagagtgcactccgatttg

SEQ ID NO: 5256869 - DNA, 25 bp, Homo sapien
caagagtgcactccgatttgctttc

SEQ ID NO: 5256870 - DNA, 25 bp, Homo sapien
aagcagcgctcccagataggacaga

SEQ ID NO: 5256871 - DNA, 25 bp, Homo sapien
acggtcttcgtctctcggaaggcag

SEQ ID NO: 5256872 - DNA, 25 bp, Homo sapien
tcatcacttccagcggcattcagag

SEQ ID NO: 5256873 - DNA, 25 bp, Homo sapien
gattctgccatgaaaggaagtccca

SEQ ID NO: 5256874 - DNA, 25 bp, Homo sapien
tgacttcctcagagccactgatagg

SEQ ID NO: 5256875 - DNA, 25 bp, Homo sapien
aaatcgtgttctagcttcctctgga

SEQ ID NO: 5256876 - DNA, 25 bp, Homo sapien
cactgatagggaaaacgccatcttc

SEQ ID NO: 5256877 - DNA, 25 bp, Homo sapien
gacacctgggaatcgatgccttgca

SEQ ID NO: 5256878 - DNA, 25 bp, Homo sapien
atgagagttcatgccctttgtaggg

SEQ ID NO: 5256879 - DNA, 25 bp, Homo sapien
aatgagagttcatgccctttgtagg

SEQ ID NO: 5256880 - DNA, 25 bp, Homo sapien
aaatgagagttcatgccctttgtag

SEQ ID NO: 5256881 - DNA, 25 bp, Homo sapien
tcagaaggcagactcggtgggaccc

SEQ ID NO: 5256882 - DNA, 25 bp, Homo sapien
tggtgggtccagaaggctaaacaca

SEQ ID NO: 5256883 - DNA, 25 bp, Homo sapien
tagttgctacaaaattccagtgtgg

SEQ ID NO: 5256884 - DNA, 25 bp, Homo sapien
aaggcagcctaggaaaatccaagga

SEQ ID NO: 5256885 - DNA, 25 bp, Homo sapien
tttgatatggaaatattaagccaca

SEQ ID NO: 5256886 - DNA, 25 bp, Homo sapien
tgcttcatggcacagccattttaat

SEQ ID NO: 5256887 - DNA, 25 bp, Homo sapien
ggtggtcacggtagtgcctactgct

SEQ ID NO: 5256888 - DNA, 25 bp, Homo sapien
atgaaccatcatacccggccggatt

SEQ ID NO: 5256889 - DNA, 25 bp, Homo sapien
tcatacccggccggattggcagttt

SEQ ID NO: 5256890 - DNA, 25 bp, Homo sapien
tacaagttgagtttcatgggaactg

SEQ ID NO: 5256891 - DNA, 25 bp, Homo sapien
aagactgaaactgtgaagaccaggg

SEQ ID NO: 5256892 - DNA, 25 bp, Homo sapien
accagggaggacaggttgctaatga

SEQ ID NO: 5256893 - DNA, 25 bp, Homo sapien
ggcattggagatggtaatgggaaaa

SEQ ID NO: 5256894 - DNA, 25 bp, Homo sapien
tgagcacaggatttcagaggctgcc

SEQ ID NO: 5256895 - DNA, 25 bp, Homo sapien
tctagaaataccgttagcagggtcg

SEQ ID NO: 5256896 - DNA, 25 bp, Homo sapien
tgttgggtaacagtcaccagcggcc

SEQ ID NO: 5256897 - DNA, 25 bp, Homo sapien
aaagtgcggcactgtgattggccca

SEQ ID NO: 5256898 - DNA, 25 bp, Homo sapien
tggtagcctttaccagatgctgtct

SEQ ID NO: 5256899 - DNA, 25 bp, Homo sapien
tgtggtagcctttaccagatgctgt

SEQ ID NO: 5256900 - DNA, 25 bp, Homo sapien
ggtagcctttaccagatgctgtctc

SEQ ID NO: 5256901 - DNA, 25 bp, Homo sapien
gtagcctttaccagatgctgtctcc

SEQ ID NO: 5256902 - DNA, 25 bp, Homo sapien
caagttcacttgactgaaactgagt

SEQ ID NO: 5256903 - DNA, 25 bp, Homo sapien
gctctagtgtcgaagaattccagtc

SEQ ID NO: 5256904 - DNA, 25 bp, Homo sapien
gagatgatagaaccacttcccgagt

SEQ ID NO: 5256905 - DNA, 25 bp, Homo sapien
tttgagggctcaaggaaccactctt

SEQ ID NO: 5256906 - DNA, 25 bp, Homo sapien
gactgcgatctttggtagcatagca

SEQ ID NO: 5256907 - DNA, 25 bp, Homo sapien
tctcattttgccattcatcaggtcg

SEQ ID NO: 5256908 - DNA, 25 bp, Homo sapien
tattgcctgattatctctgactgcg

SEQ ID NO: 5256909 - DNA, 25 bp, Homo sapien
gctatgagcaacttttagggacgta

SEQ ID NO: 5256910 - DNA, 25 bp, Homo sapien
ttctttaggtctgtgataccacatg

SEQ ID NO: 5256911 - DNA, 25 bp, Homo sapien
ttaggtctgtgataccacatgcttt

SEQ ID NO: 5256912 - DNA, 25 bp, Homo sapien
tctttaggtctgtgataccacatgc

SEQ ID NO: 5256913 - DNA, 25 bp, Homo sapien
ctttaggtctgtgataccacatgct

SEQ ID NO: 5256914 - DNA, 25 bp, Homo sapien
ctctgcttttatggctctctgcatt

SEQ ID NO: 5256915 - DNA, 25 bp, Homo sapien
aaatatcacaacaatggcgacgaca

SEQ ID NO: 5256916 - DNA, 25 bp, Homo sapien
gcttttatggctctctgcattatct

SEQ ID NO: 5256917 - DNA, 25 bp, Homo sapien
caatggcgacgacacatctgatagt

SEQ ID NO: 5256918 - DNA, 25 bp, Homo sapien
cagagaacgtgtggtagcatgtcat

SEQ ID NO: 5256919 - DNA, 25 bp, Homo sapien
tgtggcccctccatgaaactcaagg

SEQ ID NO: 5256920 - DNA, 25 bp, Homo sapien
tcttgacacataagccagagaacgt

SEQ ID NO: 5256921 - DNA, 25 bp, Homo sapien
gattcatcatgccaaccacgcactg

SEQ ID NO: 5256922 - DNA, 25 bp, Homo sapien
tgctgatcccaattccttcttagca

SEQ ID NO: 5256923 - DNA, 25 bp, Homo sapien
gctcttccagtggtatgcctttgtg

SEQ ID NO: 5256924 - DNA, 25 bp, Homo sapien
taattttgattctagtgacagtggg

SEQ ID NO: 5256925 - DNA, 25 bp, Homo sapien
cccaaaagagacagtagtgctgatc

SEQ ID NO: 5256926 - DNA, 25 bp, Homo sapien
cctctgattatcttgttcagcatct

SEQ ID NO: 5256927 - DNA, 25 bp, Homo sapien
catcatgagccctctgattatcttg

SEQ ID NO: 5256928 - DNA, 25 bp, Homo sapien
aacatcatgagccctctgattatct

SEQ ID NO: 5256929 - DNA, 25 bp, Homo sapien
tcatgagccctctgattatcttgtt

SEQ ID NO: 5256930 - DNA, 25 bp, Homo sapien
tattcagcctttacagtaatgaggg

SEQ ID NO: 5256931 - DNA, 25 bp, Homo sapien
caacctgacctgacatgtgagagaa

SEQ ID NO: 5256932 - DNA, 25 bp, Homo sapien
tgacaggtactcttcactggcatta

SEQ ID NO: 5256933 - DNA, 25 bp, Homo sapien
gactgtgctaacactactatttggc

SEQ ID NO: 5256934 - DNA, 25 bp, Homo sapien
atcaccaagtttcagttgactaaag

SEQ ID NO: 5256935 - DNA, 25 bp, Homo sapien
gactattgtcagatgataaagacat

SEQ ID NO: 5256936 - DNA, 25 bp, Homo sapien
tgatatgttttgtgtagcatgacta

SEQ ID NO: 5256937 - DNA, 25 bp, Homo sapien
aaagtcatctttcttgggtgatatg

SEQ ID NO: 5256938 - DNA, 25 bp, Homo sapien
tccagcaactatacaagataacaca

SEQ ID NO: 5256939 - DNA, 25 bp, Homo sapien
tttagcattgtcagctatattaggc

SEQ ID NO: 5256940 - DNA, 25 bp, Homo sapien
tgtcagctatattaggcaaccttaa

SEQ ID NO: 5256941 - DNA, 25 bp, Homo sapien
gcaactatacaagataacacatttt

SEQ ID NO: 5256942 - DNA, 25 bp, Homo sapien
tcttgttctacttgatttccctgtg

SEQ ID NO: 5256943 - DNA, 25 bp, Homo sapien
cagaccagtcttcgcttgtctcttg

SEQ ID NO: 5256944 - DNA, 25 bp, Homo sapien
gtccctgagacgtcaactcctgtca

SEQ ID NO: 5256945 - DNA, 25 bp, Homo sapien
tttagcatcagaccagtcttcgctt

SEQ ID NO: 5256946 - DNA, 25 bp, Homo sapien
tgtatcaaataacctttatctcttt

SEQ ID NO: 5256947 - DNA, 25 bp, Homo sapien
tttgtgagggttcaacattcttcat

SEQ ID NO: 5256948 - DNA, 25 bp, Homo sapien
caacatgtatcaaataacctttatc

SEQ ID NO: 5256949 - DNA, 25 bp, Homo sapien
tctctttgtgagggttcaacattct

SEQ ID NO: 5256950 - DNA, 25 bp, Homo sapien
tttggaaatgagaccttaaatcggc

SEQ ID NO: 5256951 - DNA, 25 bp, Homo sapien
gtaattagtagaatcataaattgaa

SEQ ID NO: 5256952 - DNA, 25 bp, Homo sapien
tgtaattagtagaatcataaattga

SEQ ID NO: 5256953 - DNA, 25 bp, Homo sapien
aattagtagaatcataaattgaaat

SEQ ID NO: 5256954 - DNA, 25 bp, Homo sapien
ctgtaattagtagaatcataaattg

SEQ ID NO: 5256955 - DNA, 25 bp, Homo sapien
tctttcacagctatctttgcatcgc

SEQ ID NO: 5256956 - DNA, 25 bp, Homo sapien
ttatttctatcccattcatttcttt

SEQ ID NO: 5256957 - DNA, 25 bp, Homo sapien
ctttgcatcgctgttttttgtaaaa

SEQ ID NO: 5256958 - DNA, 25 bp, Homo sapien
gctatctttgcatcgctgttttttg

SEQ ID NO: 5256959 - DNA, 25 bp, Homo sapien
gaaagtggtgatgtatattctccaa

SEQ ID NO: 5256960 - DNA, 25 bp, Homo sapien
gccgtggcctagttctgggcaatct

SEQ ID NO: 5256961 - DNA, 25 bp, Homo sapien
tgggcaatctagaaatggagaattc

SEQ ID NO: 5256962 - DNA, 25 bp, Homo sapien
gggaaaacctcactgtcttgctcag

SEQ ID NO: 5256963 - DNA, 25 bp, Homo sapien
tgacttctggatgcagttcagccag

SEQ ID NO: 5256964 - DNA, 25 bp, Homo sapien
gccagtctctttatgatcttggtaa

SEQ ID NO: 5256965 - DNA, 25 bp, Homo sapien
gaggtatgaattgaacgggtgtatc

SEQ ID NO: 5256966 - DNA, 25 bp, Homo sapien
tcttggtaaagctacgaaggttcaa

SEQ ID NO: 5256967 - DNA, 25 bp, Homo sapien
cattcagaaaacctttatgtcttat

SEQ ID NO: 5256968 - DNA, 25 bp, Homo sapien
tcctgaagtgcatttataatatggt

SEQ ID NO: 5256969 - DNA, 25 bp, Homo sapien
tctccacaatagtagtaatagataa

SEQ ID NO: 5256970 - DNA, 25 bp, Homo sapien
aatagtagtaatagataagccattc

SEQ ID NO: 5256971 - DNA, 25 bp, Homo sapien
catgaaaaaccctgagctaaaacta

SEQ ID NO: 5256972 - DNA, 25 bp, Homo sapien
cagggaagcctctgaatgactacag

SEQ ID NO: 5256973 - DNA, 25 bp, Homo sapien
gagccttatggaagagcctatgtgg

SEQ ID NO: 5256974 - DNA, 25 bp, Homo sapien
cagatcctctggtctcagggaagcc

SEQ ID NO: 5256975 - DNA, 25 bp, Homo sapien
tggaagcctgaaagcatacacattc

SEQ ID NO: 5256976 - DNA, 25 bp, Homo sapien
tgaatgcaagcactatagggaacat

SEQ ID NO: 5256977 - DNA, 25 bp, Homo sapien
tatcagataaggcataaaatcagcc

SEQ ID NO: 5256978 - DNA, 25 bp, Homo sapien
agggaaggctaacacacctgaatgt

SEQ ID NO: 5256979 - DNA, 25 bp, Homo sapien
ttgagccaccctttctacttgtagc

SEQ ID NO: 5256980 - DNA, 25 bp, Homo sapien
gggactcctctttcatcaggctcag

SEQ ID NO: 5256981 - DNA, 25 bp, Homo sapien
tgcactaggcgatggccagtcatag

SEQ ID NO: 5256982 - DNA, 25 bp, Homo sapien
ttgtagcttgtggactttggctgca

SEQ ID NO: 5256983 - DNA, 25 bp, Homo sapien
ctttggggggattgagatggcctgg

SEQ ID NO: 5256984 - DNA, 25 bp, Homo sapien
ttgatgggtaggtagcgagagcctg

SEQ ID NO: 5256985 - DNA, 25 bp, Homo sapien
ctgttgatgggtaggtagcgagagc

SEQ ID NO: 5256986 - DNA, 25 bp, Homo sapien
tgggtaggtagcgagagcctggcag

SEQ ID NO: 5256987 - DNA, 25 bp, Homo sapien
aggcggggacagcacggcaggtgaa

SEQ ID NO: 5256988 - DNA, 25 bp, Homo sapien
agaggcggggacagcacggcaggtg

SEQ ID NO: 5256989 - DNA, 25 bp, Homo sapien
gcggggacagcacggcaggtgaaca

SEQ ID NO: 5256990 - DNA, 25 bp, Homo sapien
ggcggggacagcacggcaggtgaac

SEQ ID NO: 5256991 - DNA, 25 bp, Homo sapien
ccgcggcgcgggcccggaggagacg

SEQ ID NO: 5256992 - DNA, 25 bp, Homo sapien
ggcgcgggcccggaggagacgcgcc

SEQ ID NO: 5256993 - DNA, 25 bp, Homo sapien
gcggcgcgggcccggaggagacgcg

SEQ ID NO: 5256994 - DNA, 25 bp, Homo sapien
cgcgggcccggaggagacgcgccgg

SEQ ID NO: 5256995 - DNA, 25 bp, Homo sapien
ggtgccgagtcgagtccgctcgcca

SEQ ID NO: 5256996 - DNA, 25 bp, Homo sapien
ggtgcacagcggtgccgagtcgagt

SEQ ID NO: 5256997 - DNA, 25 bp, Homo sapien
cagcggtgccgagtcgagtccgctc

SEQ ID NO: 5256998 - DNA, 25 bp, Homo sapien
cacagcggtgccgagtcgagtccgc

SEQ ID NO: 5256999 - DNA, 25 bp, Homo sapien
agcagccagaggccgcgccgcggga

SEQ ID NO: 5257000 - DNA, 25 bp, Homo sapien
gagcagccagaggccgcgccgcggg

SEQ ID NO: 5257001 - DNA, 25 bp, Homo sapien
tgcccgctctccgacgtccccaaag

SEQ ID NO: 5257002 - DNA, 25 bp, Homo sapien
cccttccccggcgagaagcgcaaca

SEQ ID NO: 5257003 - DNA, 25 bp, Homo sapien
gcgagaagcgcaacaccggtccgcg

SEQ ID NO: 5257004 - DNA, 25 bp, Homo sapien
ccacgctttccagaatgcccgctct

SEQ ID NO: 5257005 - DNA, 25 bp, Homo sapien
taatttccatacaaaccggctgtgg

SEQ ID NO: 5257006 - DNA, 25 bp, Homo sapien
tgattcccgaacactgcgtcttctg

SEQ ID NO: 5257007 - DNA, 25 bp, Homo sapien
tcttctgcaaggtgcccgtctgcag

SEQ ID NO: 5257008 - DNA, 25 bp, Homo sapien
tgcaggttttgcaacgcgggacggc

SEQ ID NO: 5257009 - DNA, 25 bp, Homo sapien
ccaggtacgccattctcggagcccc

SEQ ID NO: 5257010 - DNA, 25 bp, Homo sapien
aggtacgccattctcggagccccct

SEQ ID NO: 5257011 - DNA, 25 bp, Homo sapien
ccccaggtacgccattctcggagcc

SEQ ID NO: 5257012 - DNA, 25 bp, Homo sapien
cccaggtacgccattctcggagccc

SEQ ID NO: 5257013 - DNA, 25 bp, Homo sapien
tgggagtgaagcaagcgtgcctcag

SEQ ID NO: 5257014 - DNA, 25 bp, Homo sapien
gagtgaagcaagcgtgcctcaggct

SEQ ID NO: 5257015 - DNA, 25 bp, Homo sapien
ctgggagtgaagcaagcgtgcctca

SEQ ID NO: 5257016 - DNA, 25 bp, Homo sapien
tgaagcaagcgtgcctcaggctatc

SEQ ID NO: 5257017 - DNA, 25 bp, Homo sapien
ccggatttctcagtggccattctgc

SEQ ID NO: 5257018 - DNA, 25 bp, Homo sapien
ctttctgactcacgctggcacccag

SEQ ID NO: 5257019 - DNA, 25 bp, Homo sapien
tctgactcacgctggcacccagcag

SEQ ID NO: 5257020 - DNA, 25 bp, Homo sapien
ttctcagaaccctcttggctgccct

SEQ ID NO: 5257021 - DNA, 25 bp, Homo sapien
tcctttctgactcacgctggcaccc

SEQ ID NO: 5257022 - DNA, 25 bp, Homo sapien
ttggccacctcgtagggcagctggg

SEQ ID NO: 5257023 - DNA, 25 bp, Homo sapien
ggcagctgggggcagaagctttgca

SEQ ID NO: 5257024 - DNA, 25 bp, Homo sapien
tttcttggccacctcgtagggcagc

SEQ ID NO: 5257025 - DNA, 25 bp, Homo sapien
tcaggctgagcctctctttcttggc

SEQ ID NO: 5257026 - DNA, 25 bp, Homo sapien
agagctcccggaggagggcaccgta

SEQ ID NO: 5257027 - DNA, 25 bp, Homo sapien
agtcacaccacagcgtctccccgac

SEQ ID NO: 5257028 - DNA, 25 bp, Homo sapien
accgtagttagcctcctggcaggca

SEQ ID NO: 5257029 - DNA, 25 bp, Homo sapien
gaggagggcaccgtagttagcctcc

SEQ ID NO: 5257030 - DNA, 25 bp, Homo sapien
gcctgggcctgctggggagaacccc

SEQ ID NO: 5257031 - DNA, 25 bp, Homo sapien
ggagcctgggcctgctggggagaac

SEQ ID NO: 5257032 - DNA, 25 bp, Homo sapien
ggaggcagaggagcctgggcctgct

SEQ ID NO: 5257033 - DNA, 25 bp, Homo sapien
ctggaggcagaggagcctgggcctg

SEQ ID NO: 5257034 - DNA, 25 bp, Homo sapien
gacatgccgagttctgatcgccgct

SEQ ID NO: 5257035 - DNA, 25 bp, Homo sapien
tgaaagtcgattgcggacatgccga

SEQ ID NO: 5257036 - DNA, 25 bp, Homo sapien
aacaaggacttgaaagtcgattgcg

SEQ ID NO: 5257037 - DNA, 25 bp, Homo sapien
ccagcgcctcccacggaggcagaaa

SEQ ID NO: 5257038 - DNA, 25 bp, Homo sapien
ttcagctccacgcatgcactgctga

SEQ ID NO: 5257039 - DNA, 25 bp, Homo sapien
ctgtgaacccacagacagatctctg

SEQ ID NO: 5257040 - DNA, 25 bp, Homo sapien
tctctgtgcgaagtttgcatggcag

SEQ ID NO: 5257041 - DNA, 25 bp, Homo sapien
ggcaccaggacttgcgctgcgctgt

SEQ ID NO: 5257042 - DNA, 25 bp, Homo sapien
agggcaggctgtggccagcggggct

SEQ ID NO: 5257043 - DNA, 25 bp, Homo sapien
tcagtaggactgaagagggcaggct

SEQ ID NO: 5257044 - DNA, 25 bp, Homo sapien
gactgaagagggcaggctgtggcca

SEQ ID NO: 5257045 - DNA, 25 bp, Homo sapien
aagagggcaggctgtggccagcggg

SEQ ID NO: 5257046 - DNA, 25 bp, Homo sapien
agctacagtaaacgcgtttcttgga

SEQ ID NO: 5257047 - DNA, 25 bp, Homo sapien
ttacgtgctcgacacaaagcccagc

SEQ ID NO: 5257048 - DNA, 25 bp, Homo sapien
cagcacgcggtaataaacgccagct

SEQ ID NO: 5257049 - DNA, 25 bp, Homo sapien
taaacgccagctacagtaaacgcgt

SEQ ID NO: 5257050 - DNA, 25 bp, Homo sapien
tgatgctcacgacaggcctcaggga

SEQ ID NO: 5257051 - DNA, 25 bp, Homo sapien
ggagctcctgatgctcacgacaggc

SEQ ID NO: 5257052 - DNA, 25 bp, Homo sapien
tgtactgggagctcctgatgctcac

SEQ ID NO: 5257053 - DNA, 25 bp, Homo sapien
gggcaccgaggcagccccagatgct

SEQ ID NO: 5257054 - DNA, 25 bp, Homo sapien
gctcgtgggcatgtggcaagttcca

SEQ ID NO: 5257055 - DNA, 25 bp, Homo sapien
tcccagtgctcgtgggcatgtggca

SEQ ID NO: 5257056 - DNA, 25 bp, Homo sapien
tggcaagttccagggcggacaccgc

SEQ ID NO: 5257057 - DNA, 25 bp, Homo sapien
catgtggcaagttccagggcggaca

SEQ ID NO: 5257058 - DNA, 25 bp, Homo sapien
tctgtcctgtccacgcctgagggcc

SEQ ID NO: 5257059 - DNA, 25 bp, Homo sapien
gcctgggcaatgctcgcctttggat

SEQ ID NO: 5257060 - DNA, 25 bp, Homo sapien
gtcctgtccacgcctgagggccttt

SEQ ID NO: 5257061 - DNA, 25 bp, Homo sapien
gtggagcccacgctattccaccagc

SEQ ID NO: 5257062 - DNA, 25 bp, Homo sapien
ggcgggggattcaggcgctggtgct

SEQ ID NO: 5257063 - DNA, 25 bp, Homo sapien
tgctgcctgtcagcaacattccctg

SEQ ID NO: 5257064 - DNA, 25 bp, Homo sapien
agccagcctcgccctggcctagctc

SEQ ID NO: 5257065 - DNA, 25 bp, Homo sapien
gaggacgtatggcctgcggctgccc

SEQ ID NO: 5257066 - DNA, 25 bp, Homo sapien
atactaagacctgtttccccgcgtg

SEQ ID NO: 5257067 - DNA, 25 bp, Homo sapien
tccttacagaaaagggcgcttgctg

SEQ ID NO: 5257068 - DNA, 25 bp, Homo sapien
gcttctcacatcacccgagggcagg

SEQ ID NO: 5257069 - DNA, 25 bp, Homo sapien
cattccaatctaggcggcagagtga

SEQ ID NO: 5257070 - DNA, 25 bp, Homo sapien
cagcccccggaggagaggcatcccc

SEQ ID NO: 5257071 - DNA, 25 bp, Homo sapien
ccccggaggagaggcatcccccgcg

SEQ ID NO: 5257072 - DNA, 25 bp, Homo sapien
catcccccgcgaagtgctccttctc

SEQ ID NO: 5257073 - DNA, 25 bp, Homo sapien
aggcatcccccgcgaagtgctcctt

SEQ ID NO: 5257074 - DNA, 25 bp, Homo sapien
gtcctctgaggagcggagctgtggc

SEQ ID NO: 5257075 - DNA, 25 bp, Homo sapien
tgtcctctgaggagcggagctgtgg

SEQ ID NO: 5257076 - DNA, 25 bp, Homo sapien
gtgacacatgatcctgaacactgac

SEQ ID NO: 5257077 - DNA, 25 bp, Homo sapien
tagtttttggtgttctgcagatcca

SEQ ID NO: 5257078 - DNA, 25 bp, Homo sapien
ttttggtgttctgcagatccagtga

SEQ ID NO: 5257079 - DNA, 25 bp, Homo sapien
cccgcaggcagtttagtttttggtg

SEQ ID NO: 5257080 - DNA, 25 bp, Homo sapien
tgggggttgaggccacagtgggcat

SEQ ID NO: 5257081 - DNA, 25 bp, Homo sapien
ctgggggttgaggccacagtgggca

SEQ ID NO: 5257082 - DNA, 25 bp, Homo sapien
ccacagcttggacacttccttgtct

SEQ ID NO: 5257083 - DNA, 25 bp, Homo sapien
agcttggacacttccttgtctgggt

SEQ ID NO: 5257084 - DNA, 25 bp, Homo sapien
acagcttggacacttccttgtctgg

SEQ ID NO: 5257085 - DNA, 25 bp, Homo sapien
ctcgccctcggtggccagatctggc

SEQ ID NO: 5257086 - DNA, 25 bp, Homo sapien
ctgccacggctgcaggtgcctttac

SEQ ID NO: 5257087 - DNA, 25 bp, Homo sapien
cctatcctgccacggctgcaggtgc

SEQ ID NO: 5257088 - DNA, 25 bp, Homo sapien
cctgccacggctgcaggtgccttta

SEQ ID NO: 5257089 - DNA, 25 bp, Homo sapien
atcctgccacggctgcaggtgcctt

SEQ ID NO: 5257090 - DNA, 25 bp, Homo sapien
gctgtaactgtgttattctgcatgt

SEQ ID NO: 5257091 - DNA, 25 bp, Homo sapien
gactattattcactgtgtgtgactc

SEQ ID NO: 5257092 - DNA, 25 bp, Homo sapien
gacagtgttattctctgtgtgaccg

SEQ ID NO: 5257093 - DNA, 25 bp, Homo sapien
gactgtgtgtgactatgtgtaactg

SEQ ID NO: 5257094 - DNA, 25 bp, Homo sapien
gaggaggtggtaagaccctgggcag

SEQ ID NO: 5257095 - DNA, 25 bp, Homo sapien
ggactccaaggcgacctgcatggcg

SEQ ID NO: 5257096 - DNA, 25 bp, Homo sapien
gccctgaagcttggctcggagaagc

SEQ ID NO: 5257097 - DNA, 25 bp, Homo sapien
tggccaaataaggcccgaacctctg

SEQ ID NO: 5257098 - DNA, 25 bp, Homo sapien
tcagtgcgcttgctctgccagacca

SEQ ID NO: 5257099 - DNA, 25 bp, Homo sapien
cagaccaccagtgccgtcaccagca

SEQ ID NO: 5257100 - DNA, 25 bp, Homo sapien
agctcctgaagtagcggccatgcac

SEQ ID NO: 5257101 - DNA, 25 bp, Homo sapien
ccctgcctgagatggggcagctcct

SEQ ID NO: 5257102 - DNA, 25 bp, Homo sapien
tccagaggtaagtcaaggtcacgtc

SEQ ID NO: 5257103 - DNA, 25 bp, Homo sapien
ggtaagcagtctaggctgggaccct

SEQ ID NO: 5257104 - DNA, 25 bp, Homo sapien
gcctcggctactctggactcctgtg

SEQ ID NO: 5257105 - DNA, 25 bp, Homo sapien
caggttaataccagagcctcggcta

SEQ ID NO: 5257106 - DNA, 25 bp, Homo sapien
tcccagtgatgggtacccagagata

SEQ ID NO: 5257107 - DNA, 25 bp, Homo sapien
ctcccagtgatgggtacccagagat

SEQ ID NO: 5257108 - DNA, 25 bp, Homo sapien
acggcaccggctgccgtgtttggat

SEQ ID NO: 5257109 - DNA, 25 bp, Homo sapien
ggcaccggctgccgtgtttggatgg

SEQ ID NO: 5257110 - DNA, 25 bp, Homo sapien
gcaccggctgccgtgtttggatggg

SEQ ID NO: 5257111 - DNA, 25 bp, Homo sapien
accggctgccgtgtttggatggggc

SEQ ID NO: 5257112 - DNA, 25 bp, Homo sapien
gctgtggtgggctacagctgaacct

SEQ ID NO: 5257113 - DNA, 25 bp, Homo sapien
ctgtggtgggctacagctgaaccta

SEQ ID NO: 5257114 - DNA, 25 bp, Homo sapien
tgtggtgggctacagctgaacctac

SEQ ID NO: 5257115 - DNA, 25 bp, Homo sapien
caggaaaggccagcttgtgaacaca

SEQ ID NO: 5257116 - DNA, 25 bp, Homo sapien
tcaggaaaggccagcttgtgaacac

SEQ ID NO: 5257117 - DNA, 25 bp, Homo sapien
tcggtatcgcaggtcgaaatcgtgt

SEQ ID NO: 5257118 - DNA, 25 bp, Homo sapien
gtcgaaatcgtgtgagaagctccca

SEQ ID NO: 5257119 - DNA, 25 bp, Homo sapien
agatgccgtcggtatcgcaggtcga

SEQ ID NO: 5257120 - DNA, 25 bp, Homo sapien
tatcgcaggtcgaaatcgtgtgaga

SEQ ID NO: 5257121 - DNA, 25 bp, Homo sapien
ttaggtcccagcacagccccccaac

SEQ ID NO: 5257122 - DNA, 25 bp, Homo sapien
tacgtgccggcgttcagttcttggt

SEQ ID NO: 5257123 - DNA, 25 bp, Homo sapien
gcatcctggtaagggcagagctttg

SEQ ID NO: 5257124 - DNA, 25 bp, Homo sapien
gatgtgcaaatacttgaccaggaac

SEQ ID NO: 5257125 - DNA, 25 bp, Homo sapien
accaggaacctgagcggacagggca

SEQ ID NO: 5257126 - DNA, 25 bp, Homo sapien
gccatcttttagctctgggggtttg

SEQ ID NO: 5257127 - DNA, 25 bp, Homo sapien
gtgccatcttttagctctgggggtt

SEQ ID NO: 5257128 - DNA, 25 bp, Homo sapien
ggtgccatcttttagctctgggggt

SEQ ID NO: 5257129 - DNA, 25 bp, Homo sapien
catcttttagctctgggggtttggg

SEQ ID NO: 5257130 - DNA, 25 bp, Homo sapien
tcactcctgttaaaggctggtggag

SEQ ID NO: 5257131 - DNA, 25 bp, Homo sapien
tatttttccagctaacggcaggtct

SEQ ID NO: 5257132 - DNA, 25 bp, Homo sapien
cagccatctgcagtcaggtagggcc

SEQ ID NO: 5257133 - DNA, 25 bp, Homo sapien
ttctgtaagcgcacgtagagccacg

SEQ ID NO: 5257134 - DNA, 25 bp, Homo sapien
aggaagcccgaagagctgactgcag

SEQ ID NO: 5257135 - DNA, 25 bp, Homo sapien
gggcattgggctgcgggtgaggctc

SEQ ID NO: 5257136 - DNA, 25 bp, Homo sapien
ccagccttcgaggaagcccgaagag

SEQ ID NO: 5257137 - DNA, 25 bp, Homo sapien
ccctgtcgccctttggatggtgggc

SEQ ID NO: 5257138 - DNA, 25 bp, Homo sapien
ctcttgcaggcaagtaccgtagctg

SEQ ID NO: 5257139 - DNA, 25 bp, Homo sapien
tgtctcccatagagcattcccagtg

SEQ ID NO: 5257140 - DNA, 25 bp, Homo sapien
tcacccgagggcacatcaaggtgct

SEQ ID NO: 5257141 - DNA, 25 bp, Homo sapien
cactcaggatgctggagccgctctt

SEQ ID NO: 5257142 - DNA, 25 bp, Homo sapien
tctggcaaggtagggttcgttctga

SEQ ID NO: 5257143 - DNA, 25 bp, Homo sapien
gtctggcaaggtagggttcgttctg

SEQ ID NO: 5257144 - DNA, 25 bp, Homo sapien
caaggtagggttcgttctgaggcct

SEQ ID NO: 5257145 - DNA, 25 bp, Homo sapien
tggcaaggtagggttcgttctgagg

SEQ ID NO: 5257146 - DNA, 25 bp, Homo sapien
gcgtgcgccgatcgggactgggctg

SEQ ID NO: 5257147 - DNA, 25 bp, Homo sapien
gccgagacagcagcgggcgctttaa

SEQ ID NO: 5257148 - DNA, 25 bp, Homo sapien
tatttggaaccagacacgcgaacag

SEQ ID NO: 5257149 - DNA, 25 bp, Homo sapien
tgggctgggcgacgggcctctcgga

SEQ ID NO: 5257150 - DNA, 25 bp, Homo sapien
tgggctccccgagacaggcgaggcg

SEQ ID NO: 5257151 - DNA, 25 bp, Homo sapien
tgctgcgagacgcggcccctcacag

SEQ ID NO: 5257152 - DNA, 25 bp, Homo sapien
caacaccatgcccggtccgggcggc

SEQ ID NO: 5257153 - DNA, 25 bp, Homo sapien
accatgcccggtccgggcggctgct

SEQ ID NO: 5257154 - DNA, 25 bp, Homo sapien
acaaggcaggcagccgatcccgcga

SEQ ID NO: 5257155 - DNA, 25 bp, Homo sapien
tggacgccccgcttcctccgtacaa

SEQ ID NO: 5257156 - DNA, 25 bp, Homo sapien
ttggccaggcgctggacgccccgct

SEQ ID NO: 5257157 - DNA, 25 bp, Homo sapien
cgcttcctccgtacaaggcaggcag

SEQ ID NO: 5257158 - DNA, 25 bp, Homo sapien
ccccgctcctcacggcctagcgcga

SEQ ID NO: 5257159 - DNA, 25 bp, Homo sapien
tgccccgatcgggagtccagtcccg

SEQ ID NO: 5257160 - DNA, 25 bp, Homo sapien
tcctcacggcctagcgcgactcctg

SEQ ID NO: 5257161 - DNA, 25 bp, Homo sapien
tagcgcgactcctgccccgatcggg

SEQ ID NO: 5257162 - DNA, 25 bp, Homo sapien
gaaccaagactctgctgcactaatt

SEQ ID NO: 5257163 - DNA, 25 bp, Homo sapien
gaaggccacacccaagatgacacac

SEQ ID NO: 5257164 - DNA, 25 bp, Homo sapien
gcagagtggggggacccaattctct

SEQ ID NO: 5257165 - DNA, 25 bp, Homo sapien
ccagcagaactaggtctggaaccaa

SEQ ID NO: 5257166 - DNA, 25 bp, Homo sapien
tatgttcattggtggcttccacccc

SEQ ID NO: 5257167 - DNA, 25 bp, Homo sapien
tgtgttgcaggttcccctgctgcaa

SEQ ID NO: 5257168 - DNA, 25 bp, Homo sapien
cccatctgtgttgcaggttcccctg

SEQ ID NO: 5257169 - DNA, 25 bp, Homo sapien
ccaaagtagattatgttcattggtg

SEQ ID NO: 5257170 - DNA, 25 bp, Homo sapien
gcaatgaaagcagggttaaggacca

SEQ ID NO: 5257171 - DNA, 25 bp, Homo sapien
aatgaaagcagggttaaggaccagg

SEQ ID NO: 5257172 - DNA, 25 bp, Homo sapien
agcaatgaaagcagggttaaggacc

SEQ ID NO: 5257173 - DNA, 25 bp, Homo sapien
tgaaagcagggttaaggaccaggtc

SEQ ID NO: 5257174 - DNA, 25 bp, Homo sapien
gagaccatcgtcacgcttcagttta

SEQ ID NO: 5257175 - DNA, 25 bp, Homo sapien
tttgtctctcacagaaaccctccga

SEQ ID NO: 5257176 - DNA, 25 bp, Homo sapien
cctccgagtcgagtcggacgctgtg

SEQ ID NO: 5257177 - DNA, 25 bp, Homo sapien
cttcagtttacttgctagcgttagc

SEQ ID NO: 5257178 - DNA, 25 bp, Homo sapien
cacgaaaactctagaacactatatg

SEQ ID NO: 5257179 - DNA, 25 bp, Homo sapien
caacatggatagcagaagtcacgaa

SEQ ID NO: 5257180 - DNA, 25 bp, Homo sapien
ttttcacaagattcgccgtaggctt

SEQ ID NO: 5257181 - DNA, 25 bp, Homo sapien
tatgttattaattccgtgaagagaa

SEQ ID NO: 5257182 - DNA, 25 bp, Homo sapien
cagaaaacggtggtgactagggcat

SEQ ID NO: 5257183 - DNA, 25 bp, Homo sapien
gaaatttgccaacagagtagattca

SEQ ID NO: 5257184 - DNA, 25 bp, Homo sapien
gcaacaacatgggtaaatctagaca

SEQ ID NO: 5257185 - DNA, 25 bp, Homo sapien
tacaggcatataggatgaataagtc

SEQ ID NO: 5257186 - DNA, 25 bp, Homo sapien
cccaactgctcaagatattgaagtg

SEQ ID NO: 5257187 - DNA, 25 bp, Homo sapien
ctcaagatattgaagtgggaggatc

SEQ ID NO: 5257188 - DNA, 25 bp, Homo sapien
taagccgggaccacaccactgcgct

SEQ ID NO: 5257189 - DNA, 25 bp, Homo sapien
ctacaccactcactctacgtgacag

SEQ ID NO: 5257190 - DNA, 25 bp, Homo sapien
taaattagcttcaagttctgcaacc

SEQ ID NO: 5257191 - DNA, 25 bp, Homo sapien
aaggtaaattagcttcaagttctgc

SEQ ID NO: 5257192 - DNA, 25 bp, Homo sapien
aaattagcttcaagttctgcaacct

SEQ ID NO: 5257193 - DNA, 25 bp, Homo sapien
ggtaaattagcttcaagttctgcaa

SEQ ID NO: 5257194 - DNA, 25 bp, Homo sapien
tgagccacactcatgccactgtact

SEQ ID NO: 5257195 - DNA, 25 bp, Homo sapien
tactccaacttgggcaacaaagaga

SEQ ID NO: 5257196 - DNA, 25 bp, Homo sapien
gaggtctgaggtctcagctgctcag

SEQ ID NO: 5257197 - DNA, 25 bp, Homo sapien
gactgcagtgagccacactcatgcc

SEQ ID NO: 5257198 - DNA, 25 bp, Homo sapien
ggttactgttagctgaaaacaatga

SEQ ID NO: 5257199 - DNA, 25 bp, Homo sapien
gttttgcgagatgatgtggacgctt

SEQ ID NO: 5257200 - DNA, 25 bp, Homo sapien
ccacgggatatttcaggctatcttt

SEQ ID NO: 5257201 - DNA, 25 bp, Homo sapien
cacagaagcctccacgggatatttc

SEQ ID NO: 5257202 - DNA, 25 bp, Homo sapien
tgcgagatgatgtggacgctttttt

SEQ ID NO: 5257203 - DNA, 25 bp, Homo sapien
caaagaagcatcacaccagccaaat

SEQ ID NO: 5257204 - DNA, 25 bp, Homo sapien
gatcaggtgtctctgtatcagatga

SEQ ID NO: 5257205 - DNA, 25 bp, Homo sapien
tactcagtaggcacagtaagcaaag

SEQ ID NO: 5257206 - DNA, 25 bp, Homo sapien
aagcctgagcatcccacgagagaat

SEQ ID NO: 5257207 - DNA, 25 bp, Homo sapien
gccttccgctaggattataagcttc

SEQ ID NO: 5257208 - DNA, 25 bp, Homo sapien
tactgttagttcatgcaagagttgg

SEQ ID NO: 5257209 - DNA, 25 bp, Homo sapien
tgatatgccggctccactttgcctt

SEQ ID NO: 5257210 - DNA, 25 bp, Homo sapien
aagcttcctgatgccctcactagag

SEQ ID NO: 5257211 - DNA, 25 bp, Homo sapien
gtaaaggacaaagcatggtattata

SEQ ID NO: 5257212 - DNA, 25 bp, Homo sapien
ctgtaaaggacaaagcatggtatta

SEQ ID NO: 5257213 - DNA, 25 bp, Homo sapien
ggtattataaatagtatgtcctggt

SEQ ID NO: 5257214 - DNA, 25 bp, Homo sapien
tgtaaaggacaaagcatggtattat

SEQ ID NO: 5257215 - DNA, 25 bp, Homo sapien
gtaactacacgtgcaccgtggccca

SEQ ID NO: 5257216 - DNA, 25 bp, Homo sapien
ccggcaggtagtggactcattgaga

SEQ ID NO: 5257217 - DNA, 25 bp, Homo sapien
ccaggacaggccaattctatgttac

SEQ ID NO: 5257218 - DNA, 25 bp, Homo sapien
ttgagaatgtctgtaactacacgtg

SEQ ID NO: 5257219 - DNA, 25 bp, Homo sapien
cgagacaccctggtcgtggctgtgc

SEQ ID NO: 5257220 - DNA, 25 bp, Homo sapien
ggcttaacattacaaaccacgcagt

SEQ ID NO: 5257221 - DNA, 25 bp, Homo sapien
tgattactacccatgcgagacaccc

SEQ ID NO: 5257222 - DNA, 25 bp, Homo sapien
tattgtgatattgaccactgtggca

SEQ ID NO: 5257223 - DNA, 25 bp, Homo sapien
gcatcgggaacttcagtttcaaact

SEQ ID NO: 5257224 - DNA, 25 bp, Homo sapien
tgtacgcatcgggaacttcagtttc

SEQ ID NO: 5257225 - DNA, 25 bp, Homo sapien
catgttgtacgcatcgggaacttca

SEQ ID NO: 5257226 - DNA, 25 bp, Homo sapien
caccatgttgtacgcatcgggaact

SEQ ID NO: 5257227 - DNA, 25 bp, Homo sapien
ggcatcctgcattccatggtacacc

SEQ ID NO: 5257228 - DNA, 25 bp, Homo sapien
cttttctaggccacacacatagtgt

SEQ ID NO: 5257229 - DNA, 25 bp, Homo sapien
gaaattatgtgacacctgatgtaca

SEQ ID NO: 5257230 - DNA, 25 bp, Homo sapien
tacaaaggcaatccatactcagaga

SEQ ID NO: 5257231 - DNA, 25 bp, Homo sapien
aatgagagagatcacgccgacagtc

SEQ ID NO: 5257232 - DNA, 25 bp, Homo sapien
tgagagagatcacgccgacagtctc

SEQ ID NO: 5257233 - DNA, 25 bp, Homo sapien
tcacgccgacagtctctgcaaatca

SEQ ID NO: 5257234 - DNA, 25 bp, Homo sapien
agagatcacgccgacagtctctgca

SEQ ID NO: 5257235 - DNA, 25 bp, Homo sapien
tgccagatcttggtcaggcatttca

SEQ ID NO: 5257236 - DNA, 25 bp, Homo sapien
ggtgccagatcttggtcaggcattt

SEQ ID NO: 5257237 - DNA, 25 bp, Homo sapien
cagatcttggtcaggcatttcactt

SEQ ID NO: 5257238 - DNA, 25 bp, Homo sapien
tcagacatatttcccctgtctctgt

SEQ ID NO: 5257239 - DNA, 25 bp, Homo sapien
caggtccaggtggtctgatatcaaa

SEQ ID NO: 5257240 - DNA, 25 bp, Homo sapien
cagccttaggaggagaaatcactga

SEQ ID NO: 5257241 - DNA, 25 bp, Homo sapien
tttccaaactggctgagtgtgaggc

SEQ ID NO: 5257242 - DNA, 25 bp, Homo sapien
tcactgatgcctgacgttctgccca

SEQ ID NO: 5257243 - DNA, 25 bp, Homo sapien
ctttgctgttaacagcacagccaga

SEQ ID NO: 5257244 - DNA, 25 bp, Homo sapien
tgagctttgctgttaacagcacagc

SEQ ID NO: 5257245 - DNA, 25 bp, Homo sapien
cctgagctttgctgttaacagcaca

SEQ ID NO: 5257246 - DNA, 25 bp, Homo sapien
cagccagagcaggagggctttgcat

SEQ ID NO: 5257247 - DNA, 25 bp, Homo sapien
taatgttcttgtgggagcccagcca

SEQ ID NO: 5257248 - DNA, 25 bp, Homo sapien
cccagccagtgccatcaattgaatg

SEQ ID NO: 5257249 - DNA, 25 bp, Homo sapien
cagccagtgccatcaattgaatgtt

SEQ ID NO: 5257250 - DNA, 25 bp, Homo sapien
cagtgccatcaattgaatgttctct

SEQ ID NO: 5257251 - DNA, 25 bp, Homo sapien
aggagagggccgccttccaggtaga

SEQ ID NO: 5257252 - DNA, 25 bp, Homo sapien
agggccgccttccaggtagaggcac

SEQ ID NO: 5257253 - DNA, 25 bp, Homo sapien
gagagggccgccttccaggtagagg

SEQ ID NO: 5257254 - DNA, 25 bp, Homo sapien
gagggccgccttccaggtagaggca

SEQ ID NO: 5257255 - DNA, 25 bp, Homo sapien
ggcaatgacagccatctgagcccca

SEQ ID NO: 5257256 - DNA, 25 bp, Homo sapien
agaggctccagaggcaatgacagcc

SEQ ID NO: 5257257 - DNA, 25 bp, Homo sapien
aggagaggctccagaggcaatgaca

SEQ ID NO: 5257258 - DNA, 25 bp, Homo sapien
ggaggagaggctccagaggcaatga

SEQ ID NO: 5257259 - DNA, 25 bp, Homo sapien
catgcacagccaatagggacgatgt

SEQ ID NO: 5257260 - DNA, 25 bp, Homo sapien
ggacgatgtctagaacccgagcaaa

SEQ ID NO: 5257261 - DNA, 25 bp, Homo sapien
caaaatggtgactgacaactgactg

SEQ ID NO: 5257262 - DNA, 25 bp, Homo sapien
caaactggagagctgagaatcccac

SEQ ID NO: 5257263 - DNA, 25 bp, Homo sapien
attcagtggatcatcaaaattcaaa

SEQ ID NO: 5257264 - DNA, 25 bp, Homo sapien
cttgtcccgcaaatgatgttctgca

SEQ ID NO: 5257265 - DNA, 25 bp, Homo sapien
ttgtcccgcaaatgatgttctgcag

SEQ ID NO: 5257266 - DNA, 25 bp, Homo sapien
tgttctgcagcttcaatattcagtg

SEQ ID NO: 5257267 - DNA, 25 bp, Homo sapien
acagcagacaggagtgccgccatga

SEQ ID NO: 5257268 - DNA, 25 bp, Homo sapien
cctcgccaacgacagcagacaggag

SEQ ID NO: 5257269 - DNA, 25 bp, Homo sapien
gcagacaggagtgccgccatgaatg

SEQ ID NO: 5257270 - DNA, 25 bp, Homo sapien
tagtcctcgccaacgacagcagaca

SEQ ID NO: 5257271 - DNA, 25 bp, Homo sapien
tagagcccggcgtccatgcctgcag

SEQ ID NO: 5257272 - DNA, 25 bp, Homo sapien
ctcagccagcatagagcccggcgtc

SEQ ID NO: 5257273 - DNA, 25 bp, Homo sapien
gcatagagcccggcgtccatgcctg

SEQ ID NO: 5257274 - DNA, 25 bp, Homo sapien
agccagcatagagcccggcgtccat

SEQ ID NO: 5257275 - DNA, 25 bp, Homo sapien
caaaggcggtgtggacctaggaatc

SEQ ID NO: 5257276 - DNA, 25 bp, Homo sapien
taatcccgacacctggcaatgtgca

SEQ ID NO: 5257277 - DNA, 25 bp, Homo sapien
tggatctggtctccccaaggttagg

SEQ ID NO: 5257278 - DNA, 25 bp, Homo sapien
gaacaatcttctcggatctgggcca

SEQ ID NO: 5257279 - DNA, 25 bp, Homo sapien
ctgagtgccatttcgccacgacctg

SEQ ID NO: 5257280 - DNA, 25 bp, Homo sapien
agtgccatttcgccacgacctgggt

SEQ ID NO: 5257281 - DNA, 25 bp, Homo sapien
tgagtgccatttcgccacgacctgg

SEQ ID NO: 5257282 - DNA, 25 bp, Homo sapien
tgccatttcgccacgacctgggtgc

SEQ ID NO: 5257283 - DNA, 25 bp, Homo sapien
gagtaacagcattggggacagaaag

SEQ ID NO: 5257284 - DNA, 25 bp, Homo sapien
aagcagcgcttcagggacaagtcag

SEQ ID NO: 5257285 - DNA, 25 bp, Homo sapien
tagaaggactgggaccttgcggagt

SEQ ID NO: 5257286 - DNA, 25 bp, Homo sapien
ccagcaccaaggtcccctgtggtcg

SEQ ID NO: 5257287 - DNA, 25 bp, Homo sapien
agtcatccactttattccggaagtc

SEQ ID NO: 5257288 - DNA, 25 bp, Homo sapien
catccactttattccggaagtcctc

SEQ ID NO: 5257289 - DNA, 25 bp, Homo sapien
tcatctggcataacgtttgatgtag

SEQ ID NO: 5257290 - DNA, 25 bp, Homo sapien
cataacgtttgatgtagtcatccac

SEQ ID NO: 5257291 - DNA, 25 bp, Homo sapien
tcttgctgtttcatgttagagacaa

SEQ ID NO: 5257292 - DNA, 25 bp, Homo sapien
cttgctgtttcatgttagagacaaa

SEQ ID NO: 5257293 - DNA, 25 bp, Homo sapien
ctcttgctgtttcatgttagagaca

SEQ ID NO: 5257294 - DNA, 25 bp, Homo sapien
tgcaaaagcatcaaccccagctggt

SEQ ID NO: 5257295 - DNA, 25 bp, Homo sapien
tccggacccgaaagcaagagctgat

SEQ ID NO: 5257296 - DNA, 25 bp, Homo sapien
agacattgggctgattcctgaggca

SEQ ID NO: 5257297 - DNA, 25 bp, Homo sapien
taacctggccgaggatggcatatgc

SEQ ID NO: 5257298 - DNA, 25 bp, Homo sapien
gagactggcctagctatgaacactg

SEQ ID NO: 5257299 - DNA, 25 bp, Homo sapien
gattttagtgatcaccaccgcctgg

SEQ ID NO: 5257300 - DNA, 25 bp, Homo sapien
tgaatgggctaggacactgctgaga

SEQ ID NO: 5257301 - DNA, 25 bp, Homo sapien
caatagtcataaggaccctctggag

SEQ ID NO: 5257302 - DNA, 25 bp, Homo sapien
ttatgaagaatagtgaacgtgtagc

SEQ ID NO: 5257303 - DNA, 25 bp, Homo sapien
tagtgaacgtgtagcaaacttgaat

SEQ ID NO: 5257304 - DNA, 25 bp, Homo sapien
catatggataaaagtgaaggccggg

SEQ ID NO: 5257305 - DNA, 25 bp, Homo sapien
tgaatttccaaagcgaaacatatgg

SEQ ID NO: 5257306 - DNA, 25 bp, Homo sapien
ggaactcttggagtaggcactgtca

SEQ ID NO: 5257307 - DNA, 25 bp, Homo sapien
ctgtgcatggaggccctgttcacag

SEQ ID NO: 5257308 - DNA, 25 bp, Homo sapien
agcatggggaactcttggagtaggc

SEQ ID NO: 5257309 - DNA, 25 bp, Homo sapien
atggggaactcttggagtaggcact

SEQ ID NO: 5257310 - DNA, 25 bp, Homo sapien
ccacatcccactgcccttcctacaa

SEQ ID NO: 5257311 - DNA, 25 bp, Homo sapien
ccactgcccttcctacaatgaccat

SEQ ID NO: 5257312 - DNA, 25 bp, Homo sapien
atcccactgcccttcctacaatgac

SEQ ID NO: 5257313 - DNA, 25 bp, Homo sapien
acatcccactgcccttcctacaatg

SEQ ID NO: 5257314 - DNA, 25 bp, Homo sapien
gacacaatagcacgtgcaccaaata

SEQ ID NO: 5257315 - DNA, 25 bp, Homo sapien
caatagcacgtgcaccaaatagaat

SEQ ID NO: 5257316 - DNA, 25 bp, Homo sapien
ttccggacacaatagcacgtgcacc

SEQ ID NO: 5257317 - DNA, 25 bp, Homo sapien
tagcacgtgcaccaaatagaattct

SEQ ID NO: 5257318 - DNA, 25 bp, Homo sapien
cagtgatgagcaggtccgctggacc

SEQ ID NO: 5257319 - DNA, 25 bp, Homo sapien
cggttagtcggcgtaagagcaggcg

SEQ ID NO: 5257320 - DNA, 25 bp, Homo sapien
tctagccgcatgagcgcgggaccgt

SEQ ID NO: 5257321 - DNA, 25 bp, Homo sapien
gcgtccgttagtcggagcggctcca

SEQ ID NO: 5257322 - DNA, 25 bp, Homo sapien
acgcccgggcgcgtccggattggct

SEQ ID NO: 5257323 - DNA, 25 bp, Homo sapien
ggcgcgtccggattggctgagcgaa

SEQ ID NO: 5257324 - DNA, 25 bp, Homo sapien
gattggctgagcgaagcaccccagc

SEQ ID NO: 5257325 - DNA, 25 bp, Homo sapien
cgtccggattggctgagcgaagcac

SEQ ID NO: 5257326 - DNA, 25 bp, Homo sapien
cgccccactgctgccgggcatccag

SEQ ID NO: 5257327 - DNA, 25 bp, Homo sapien
ccccgccccactgctgccgggcatc

SEQ ID NO: 5257328 - DNA, 25 bp, Homo sapien
gcatccagcctccttcccgcggagc

SEQ ID NO: 5257329 - DNA, 25 bp, Homo sapien
ccccactgctgccgggcatccagcc

SEQ ID NO: 5257330 - DNA, 25 bp, Homo sapien
cgctgggctgactcgccgcgggtgc

SEQ ID NO: 5257331 - DNA, 25 bp, Homo sapien
agccgctgggctgactcgccgcggg

SEQ ID NO: 5257332 - DNA, 25 bp, Homo sapien
tccggcgagttgtgtttcccgcagc

SEQ ID NO: 5257333 - DNA, 25 bp, Homo sapien
ctctccggcgagttgtgtttcccgc

SEQ ID NO: 5257334 - DNA, 25 bp, Homo sapien
ccttgaagctcgcatccctgactta

SEQ ID NO: 5257335 - DNA, 25 bp, Homo sapien
agctcgcacccgctcctccttgaag

SEQ ID NO: 5257336 - DNA, 25 bp, Homo sapien
tgacttaggccgacctcgcggacat

SEQ ID NO: 5257337 - DNA, 25 bp, Homo sapien
tcccgcgcgggacaatcggcgacag

SEQ ID NO: 5257338 - DNA, 25 bp, Homo sapien
tggccatcccgtttcctgcagctgg

SEQ ID NO: 5257339 - DNA, 25 bp, Homo sapien
ggtctccgcgcttctcagcggtggc

SEQ ID NO: 5257340 - DNA, 25 bp, Homo sapien
tcctgctcttctcggacttaactag

SEQ ID NO: 5257341 - DNA, 25 bp, Homo sapien
tagtatggataccacgtgcttcggg

SEQ ID NO: 5257342 - DNA, 25 bp, Homo sapien
gagtcgttgcattatagtccatata

SEQ ID NO: 5257343 - DNA, 25 bp, Homo sapien
gctgaatacgggctgctgggatttc

SEQ ID NO: 5257344 - DNA, 25 bp, Homo sapien
gctccaggggagtcgttgcattata

SEQ ID NO: 5257345 - DNA, 25 bp, Homo sapien
cttggtcatggcctggataacttct

SEQ ID NO: 5257346 - DNA, 25 bp, Homo sapien
ggtgtgcaatttctctaagagcgcc

SEQ ID NO: 5257347 - DNA, 25 bp, Homo sapien
caaaacaaagccgtcacgtgtgggt

SEQ ID NO: 5257348 - DNA, 25 bp, Homo sapien
gattacagtatcgacaaggctcagc

SEQ ID NO: 5257349 - DNA, 25 bp, Homo sapien
ggtactgactgctacttcaaggaac

SEQ ID NO: 5257350 - DNA, 25 bp, Homo sapien
atgtaactctgtcatataactgact

SEQ ID NO: 5257351 - DNA, 25 bp, Homo sapien
ggtaagactttagcttgctcatctg

SEQ ID NO: 5257352 - DNA, 25 bp, Homo sapien
aactctgtcatataactgacttgaa

SEQ ID NO: 5257353 - DNA, 25 bp, Homo sapien
tctgtcatataactgacttgaagca

SEQ ID NO: 5257354 - DNA, 25 bp, Homo sapien
tgttactaaatcgtatggcctggca

SEQ ID NO: 5257355 - DNA, 25 bp, Homo sapien
tcgatctgagtagcaacacaaagtg

SEQ ID NO: 5257356 - DNA, 25 bp, Homo sapien
tgactagtatctgagctgaagggct

SEQ ID NO: 5257357 - DNA, 25 bp, Homo sapien
tactagaggagagactggatacgag

SEQ ID NO: 5257358 - DNA, 25 bp, Homo sapien
gctgcatttataatatccttggcct

SEQ ID NO: 5257359 - DNA, 25 bp, Homo sapien
tatcatcttcgcgaggctttcccga

SEQ ID NO: 5257360 - DNA, 25 bp, Homo sapien
cagtgcccccggaagtgaagattat

SEQ ID NO: 5257361 - DNA, 25 bp, Homo sapien
gaagattatatcttgaggtttcccc

SEQ ID NO: 5257362 - DNA, 25 bp, Homo sapien
ctggtttgcgtggaaatgtttcacc

SEQ ID NO: 5257363 - DNA, 25 bp, Homo sapien
tttgcgtggaaatgtttcaccacag

SEQ ID NO: 5257364 - DNA, 25 bp, Homo sapien
cacagaatggattactaaattattt

SEQ ID NO: 5257365 - DNA, 25 bp, Homo sapien
ggaaatgtttcaccacagaatggat

SEQ ID NO: 5257366 - DNA, 25 bp, Homo sapien
gcccacctgtgtgtccctttgaggt

SEQ ID NO: 5257367 - DNA, 25 bp, Homo sapien
tgcccacctgtgtgtccctttgagg

SEQ ID NO: 5257368 - DNA, 25 bp, Homo sapien
ggtgcccacctgtgtgtccctttga

SEQ ID NO: 5257369 - DNA, 25 bp, Homo sapien
gtggtgcccacctgtgtgtcccttt

SEQ ID NO: 5257370 - DNA, 25 bp, Homo sapien
tgttccaccgaggaagtaatgaaat

SEQ ID NO: 5257371 - DNA, 25 bp, Homo sapien
gccacttgttcttccaccaggtgct

SEQ ID NO: 5257372 - DNA, 25 bp, Homo sapien
gtgttccaccgaggaagtaatgaaa

SEQ ID NO: 5257373 - DNA, 25 bp, Homo sapien
cattctcaatgaacttcctaaggga

SEQ ID NO: 5257374 - DNA, 25 bp, Homo sapien
tcatcagaaccagtgagttacagtg

SEQ ID NO: 5257375 - DNA, 25 bp, Homo sapien
aactattcaccaaggtgccagggcc

SEQ ID NO: 5257376 - DNA, 25 bp, Homo sapien
actgaatctacatctctgcagcgga

SEQ ID NO: 5257377 - DNA, 25 bp, Homo sapien
tgtcacattagtcgtaacagccaac

SEQ ID NO: 5257378 - DNA, 25 bp, Homo sapien
ggaattggaaccctgtgacactgca

SEQ ID NO: 5257379 - DNA, 25 bp, Homo sapien
gtcagatagttaccgcatgacccag

SEQ ID NO: 5257380 - DNA, 25 bp, Homo sapien
tgacactgcaaataggagtactaag

SEQ ID NO: 5257381 - DNA, 25 bp, Homo sapien
tccgcagaacaatacactcttaaat

SEQ ID NO: 5257382 - DNA, 25 bp, Homo sapien
catactaaaacatgtggaatgtagt

SEQ ID NO: 5257383 - DNA, 25 bp, Homo sapien
tgcggccttccgcagaacaatacac

SEQ ID NO: 5257384 - DNA, 25 bp, Homo sapien
ctcttaaatatctaatgggtcatag

SEQ ID NO: 5257385 - DNA, 25 bp, Homo sapien
catagaagcaatcccaggaacagga

SEQ ID NO: 5257386 - DNA, 25 bp, Homo sapien
tagccagtgcgatgggatatgcctg

SEQ ID NO: 5257387 - DNA, 25 bp, Homo sapien
gctccgtccagggaagtcacgagaa

SEQ ID NO: 5257388 - DNA, 25 bp, Homo sapien
aattagatgggcctgattgcacacg

SEQ ID NO: 5257389 - DNA, 25 bp, Homo sapien
cagaggtcagcttcccaatgtccga

SEQ ID NO: 5257390 - DNA, 25 bp, Homo sapien
agagagggcgggcacaaggtgggct

SEQ ID NO: 5257391 - DNA, 25 bp, Homo sapien
aggtgctgacctcagactgagacag

SEQ ID NO: 5257392 - DNA, 25 bp, Homo sapien
tacaccaagtcagcggcagaggtgc

SEQ ID NO: 5257393 - DNA, 25 bp, Homo sapien
catgagtaccgaactgagctgcaca

SEQ ID NO: 5257394 - DNA, 25 bp, Homo sapien
gcctttctgcttctacggagacgga

SEQ ID NO: 5257395 - DNA, 25 bp, Homo sapien
gaacgtgtctttaacgcggctgcag

SEQ ID NO: 5257396 - DNA, 25 bp, Homo sapien
ccaacaaagggtatctggccaggcg

SEQ ID NO: 5257397 - DNA, 25 bp, Homo sapien
ggactgccgcgaggatgtcgtccac

SEQ ID NO: 5257398 - DNA, 25 bp, Homo sapien
ctcaccttggacaccgggacaaagg

SEQ ID NO: 5257399 - DNA, 25 bp, Homo sapien
cgaggcgtgtggtcgggcggactgc

SEQ ID NO: 5257400 - DNA, 25 bp, Homo sapien
ccagcatgatggtcacgaggcgtgt

SEQ ID NO: 5257401 - DNA, 25 bp, Homo sapien
tccgtgtgcacgaggatgggaggta

SEQ ID NO: 5257402 - DNA, 25 bp, Homo sapien
taatgcgctgactgatttcagggac

SEQ ID NO: 5257403 - DNA, 25 bp, Homo sapien
agctgccacccgttcctggttcagg

SEQ ID NO: 5257404 - DNA, 25 bp, Homo sapien
ttgtaaggaagtccacgcccaggtc

SEQ ID NO: 5257405 - DNA, 25 bp, Homo sapien
agagacactcgctgcctggccgaac

SEQ ID NO: 5257406 - DNA, 25 bp, Homo sapien
aaagcaacgatttcctgtccctaca

SEQ ID NO: 5257407 - DNA, 25 bp, Homo sapien
gcagatgccctgtccgctgcagaga

SEQ ID NO: 5257408 - DNA, 25 bp, Homo sapien
gaaatcacattagagaaagcaacga

SEQ ID NO: 5257409 - DNA, 25 bp, Homo sapien
ctgcaaaggttttgctgaggagccg

SEQ ID NO: 5257410 - DNA, 25 bp, Homo sapien
ccagaaagatgtgcaaaattttcag

SEQ ID NO: 5257411 - DNA, 25 bp, Homo sapien
caatgcagaactctggagtgccagt

SEQ ID NO: 5257412 - DNA, 25 bp, Homo sapien
tgtttccaactgacacaatgcagaa

SEQ ID NO: 5257413 - DNA, 25 bp, Homo sapien
aattgagtactaaaaatatctcggg

SEQ ID NO: 5257414 - DNA, 25 bp, Homo sapien
gatctcaaatcatatgaatcacagg

SEQ ID NO: 5257415 - DNA, 25 bp, Homo sapien
gaggcagcgcaggtgctagactctc

SEQ ID NO: 5257416 - DNA, 25 bp, Homo sapien
gctctgcaatgcatagtcctgctgc

SEQ ID NO: 5257417 - DNA, 25 bp, Homo sapien
gagtgccaccccttttgacacgcag

SEQ ID NO: 5257418 - DNA, 25 bp, Homo sapien
acgcagagtcacaaaagccttcggg

SEQ ID NO: 5257419 - DNA, 25 bp, Homo sapien
tggcctgaaattccgttcttgtcca

SEQ ID NO: 5257420 - DNA, 25 bp, Homo sapien
tgtccacctccaaatagcatagggt

SEQ ID NO: 5257421 - DNA, 25 bp, Homo sapien
agtgcgccaatcctgggaccataaa

SEQ ID NO: 5257422 - DNA, 25 bp, Homo sapien
ttcaccaagtcctcgtatataaagt

SEQ ID NO: 5257423 - DNA, 25 bp, Homo sapien
actataggcgtgtgccaccaagccc

SEQ ID NO: 5257424 - DNA, 25 bp, Homo sapien
gggattacaggtgtgagccacagca

SEQ ID NO: 5257425 - DNA, 25 bp, Homo sapien
ctataggcgtgtgccaccaagcccg

SEQ ID NO: 5257426 - DNA, 25 bp, Homo sapien
ctcccacagtgctaggattagaaat

SEQ ID NO: 5257427 - DNA, 25 bp, Homo sapien
tcccacagtgctaggattagaaatg

SEQ ID NO: 5257428 - DNA, 25 bp, Homo sapien
acagtgctaggattagaaatgtgag

SEQ ID NO: 5257429 - DNA, 25 bp, Homo sapien
ccacagtgctaggattagaaatgtg

SEQ ID NO: 5257430 - DNA, 25 bp, Homo sapien
agctgtaagttcaatttcctaatgg

SEQ ID NO: 5257431 - DNA, 25 bp, Homo sapien
ttcctaatggttatagagctattca

SEQ ID NO: 5257432 - DNA, 25 bp, Homo sapien
gaagtggtcagtttcatctaagttg

SEQ ID NO: 5257433 - DNA, 25 bp, Homo sapien
tctctaatgaaaccaccgggcctga

SEQ ID NO: 5257434 - DNA, 25 bp, Homo sapien
cactcccggctctagatcgcatttt

SEQ ID NO: 5257435 - DNA, 25 bp, Homo sapien
tctagatcgcattttgaatattgaa

SEQ ID NO: 5257436 - DNA, 25 bp, Homo sapien
aatgccacttggtcacagtgtatca

SEQ ID NO: 5257437 - DNA, 25 bp, Homo sapien
tgccacttggtcacagtgtatcatt

SEQ ID NO: 5257438 - DNA, 25 bp, Homo sapien
ttcccaaggccagcaatcattgggg

SEQ ID NO: 5257439 - DNA, 25 bp, Homo sapien
cccaaggccagcaatcattggggtg

SEQ ID NO: 5257440 - DNA, 25 bp, Homo sapien
tcccaaggccagcaatcattggggt

SEQ ID NO: 5257441 - DNA, 25 bp, Homo sapien
atctcctcaagctcaccagggctca

SEQ ID NO: 5257442 - DNA, 25 bp, Homo sapien
tcaactcatctcctcaagctcacca

SEQ ID NO: 5257443 - DNA, 25 bp, Homo sapien
actcatctcctcaagctcaccaggg

SEQ ID NO: 5257444 - DNA, 25 bp, Homo sapien
tcatctcctcaagctcaccagggct

SEQ ID NO: 5257445 - DNA, 25 bp, Homo sapien
gagcctggttactgtcgcagaagca

SEQ ID NO: 5257446 - DNA, 25 bp, Homo sapien
ttcgcacggcaaaacctgagcctgg

SEQ ID NO: 5257447 - DNA, 25 bp, Homo sapien
gtcagtccgcttatgagatcacgaa

SEQ ID NO: 5257448 - DNA, 25 bp, Homo sapien
cagacgccgaggtgtaaccagtacc

SEQ ID NO: 5257449 - DNA, 25 bp, Homo sapien
tcatgtgggcctcataagcctcgca

SEQ ID NO: 5257450 - DNA, 25 bp, Homo sapien
aagcctcgcagttctgggtcaccag

SEQ ID NO: 5257451 - DNA, 25 bp, Homo sapien
tcttccaggtagtcgcggacgtccc

SEQ ID NO: 5257452 - DNA, 25 bp, Homo sapien
agtcgcggacgtccctcatgtgggc

SEQ ID NO: 5257453 - DNA, 25 bp, Homo sapien
tcctggtgcccaccccacgctgcgc

SEQ ID NO: 5257454 - DNA, 25 bp, Homo sapien
cctcctggtgcccaccccacgctgc

SEQ ID NO: 5257455 - DNA, 25 bp, Homo sapien
ctggtgcccaccccacgctgcgctc

SEQ ID NO: 5257456 - DNA, 25 bp, Homo sapien
ggtgcccaccccacgctgcgctcac

SEQ ID NO: 5257457 - DNA, 25 bp, Homo sapien
caggtgcatacttttcaatcagcat

SEQ ID NO: 5257458 - DNA, 25 bp, Homo sapien
tcagcaggtgcatacttttcaatca

SEQ ID NO: 5257459 - DNA, 25 bp, Homo sapien
agcaggtgcatacttttcaatcagc

SEQ ID NO: 5257460 - DNA, 25 bp, Homo sapien
gaaacacaacttcagcaggtgcata

SEQ ID NO: 5257461 - DNA, 25 bp, Homo sapien
aagttacaggtattgggaagccgct

SEQ ID NO: 5257462 - DNA, 25 bp, Homo sapien
cagatggattctcttctgaccgaat

SEQ ID NO: 5257463 - DNA, 25 bp, Homo sapien
cctggaaactggctattcagatgga

SEQ ID NO: 5257464 - DNA, 25 bp, Homo sapien
ctggctattcagatggattctcttc

SEQ ID NO: 5257465 - DNA, 25 bp, Homo sapien
acagcccgagctgtgtcatgctcag

SEQ ID NO: 5257466 - DNA, 25 bp, Homo sapien
agaatccacgcaccgagggagctgt

SEQ ID NO: 5257467 - DNA, 25 bp, Homo sapien
gccagacacgagagtttgccacagt

SEQ ID NO: 5257468 - DNA, 25 bp, Homo sapien
tcactggctcggaccagaatccacg

SEQ ID NO: 5257469 - DNA, 25 bp, Homo sapien
cacaagaacgcatttcagcccaggt

SEQ ID NO: 5257470 - DNA, 25 bp, Homo sapien
gggaacgttgacagagaactctcct

SEQ ID NO: 5257471 - DNA, 25 bp, Homo sapien
caggttctcatgaacgcagccatca

SEQ ID NO: 5257472 - DNA, 25 bp, Homo sapien
catcatgacggttacccacgggttc

SEQ ID NO: 5257473 - DNA, 25 bp, Homo sapien
tggccatcagcactcggcactgcgc

SEQ ID NO: 5257474 - DNA, 25 bp, Homo sapien
tggtccccgtggtccgagtggcacg

SEQ ID NO: 5257475 - DNA, 25 bp, Homo sapien
tccccgtggtccgagtggcacgcgg

SEQ ID NO: 5257476 - DNA, 25 bp, Homo sapien
gccatcagcactcggcactgcgcaa

SEQ ID NO: 5257477 - DNA, 25 bp, Homo sapien
ctggggagggcgagaccgagctgca

SEQ ID NO: 5257478 - DNA, 25 bp, Homo sapien
gtgctgcggcccacgctgagccgga

SEQ ID NO: 5257479 - DNA, 25 bp, Homo sapien
ggggacaccgtagctcagcagcact

SEQ ID NO: 5257480 - DNA, 25 bp, Homo sapien
tccagctgcgccacggcctgcttca

SEQ ID NO: 5257481 - DNA, 25 bp, Homo sapien
gagcgcgttcctggccacgtcgaag

SEQ ID NO: 5257482 - DNA, 25 bp, Homo sapien
ctgccacgggcttcccagaagcggg

SEQ ID NO: 5257483 - DNA, 25 bp, Homo sapien
ggaactggagggacaaccctgtgcc

SEQ ID NO: 5257484 - DNA, 25 bp, Homo sapien
tggcactccaggacaaaatgcagag

SEQ ID NO: 5257485 - DNA, 25 bp, Homo sapien
gggcatgagacagtcatcctggcac

SEQ ID NO: 5257486 - DNA, 25 bp, Homo sapien
gtgggcggtcccatgtgggcagtcc

SEQ ID NO: 5257487 - DNA, 25 bp, Homo sapien
tgggcggtcccatgtgggcagtcct

SEQ ID NO: 5257488 - DNA, 25 bp, Homo sapien
ggcggtcccatgtgggcagtcctat

SEQ ID NO: 5257489 - DNA, 25 bp, Homo sapien
gggcggtcccatgtgggcagtccta

SEQ ID NO: 5257490 - DNA, 25 bp, Homo sapien
agtgcgcagccctgattgccagtgg

SEQ ID NO: 5257491 - DNA, 25 bp, Homo sapien
gcttcaccactggaggacggttcta

SEQ ID NO: 5257492 - DNA, 25 bp, Homo sapien
gagctgcaccaactcagcgaggttg

SEQ ID NO: 5257493 - DNA, 25 bp, Homo sapien
gaagagaccactctggaaaggtgca

SEQ ID NO: 5257494 - DNA, 25 bp, Homo sapien
gcccgggctctcagtggcgactcat

SEQ ID NO: 5257495 - DNA, 25 bp, Homo sapien
ccgggctctcagtggcgactcatgc

SEQ ID NO: 5257496 - DNA, 25 bp, Homo sapien
gggctctcagtggcgactcatgcac

SEQ ID NO: 5257497 - DNA, 25 bp, Homo sapien
ggcccgggctctcagtggcgactca

SEQ ID NO: 5257498 - DNA, 25 bp, Homo sapien
aacttgacgcagtccaggtggccag

SEQ ID NO: 5257499 - DNA, 25 bp, Homo sapien
agcccgggtggcgtggtgaaccagg

SEQ ID NO: 5257500 - DNA, 25 bp, Homo sapien
tgggcccgctgcaccaagaacttga

SEQ ID NO: 5257501 - DNA, 25 bp, Homo sapien
ttgtgggcccgctggttgccgggca

SEQ ID NO: 5257502 - DNA, 25 bp, Homo sapien
ccacagggctgagcgacagctctaa

SEQ ID NO: 5257503 - DNA, 25 bp, Homo sapien
ggctgagcgacagctctaagggcct

SEQ ID NO: 5257504 - DNA, 25 bp, Homo sapien
cagggctgagcgacagctctaaggg

SEQ ID NO: 5257505 - DNA, 25 bp, Homo sapien
acagggctgagcgacagctctaagg

SEQ ID NO: 5257506 - DNA, 25 bp, Homo sapien
ccagtgccctcccgctggccacagg

SEQ ID NO: 5257507 - DNA, 25 bp, Homo sapien
ctgggtgtccaaaacgggcggccag

SEQ ID NO: 5257508 - DNA, 25 bp, Homo sapien
aggtcaggtccccactgacggcagc

SEQ ID NO: 5257509 - DNA, 25 bp, Homo sapien
tcccgggtctctagcgtggccgagt

SEQ ID NO: 5257510 - DNA, 25 bp, Homo sapien
gggagacgcccgaggcatcttggtc

SEQ ID NO: 5257511 - DNA, 25 bp, Homo sapien
gaaggtgcacgtcagcgccacagtc

SEQ ID NO: 5257512 - DNA, 25 bp, Homo sapien
cgccacagtccttcaccaggaactg

SEQ ID NO: 5257513 - DNA, 25 bp, Homo sapien
cagacgacgagggagtagtggccac

SEQ ID NO: 5257514 - DNA, 25 bp, Homo sapien
cagggcgctcatgccatcgagagca

SEQ ID NO: 5257515 - DNA, 25 bp, Homo sapien
ccatgagcaggagtcggtctagaat

SEQ ID NO: 5257516 - DNA, 25 bp, Homo sapien
tctagaatgggcgtgtggccgcctc

SEQ ID NO: 5257517 - DNA, 25 bp, Homo sapien
ttgtcccgtgccgtgagtccgatgt

SEQ ID NO: 5257518 - DNA, 25 bp, Homo sapien
cccgttctctgctgcgtcgtggagg

SEQ ID NO: 5257519 - DNA, 25 bp, Homo sapien
gacaaaaagatagagccctgctccc

SEQ ID NO: 5257520 - DNA, 25 bp, Homo sapien
tggacaaaaagatagagccctgctc

SEQ ID NO: 5257521 - DNA, 25 bp, Homo sapien
ggaaggtggacaaaaagatagagcc

SEQ ID NO: 5257522 - DNA, 25 bp, Homo sapien
ggtggacaaaaagatagagccctgc

SEQ ID NO: 5257523 - DNA, 25 bp, Homo sapien
cctcgagggcgagtgccttgtcctg

SEQ ID NO: 5257524 - DNA, 25 bp, Homo sapien
tcagcttgagacctcgagggcgagt

SEQ ID NO: 5257525 - DNA, 25 bp, Homo sapien
gctagcaggtcagcttgagacctcg

SEQ ID NO: 5257526 - DNA, 25 bp, Homo sapien
ttgagacctcgagggcgagtgcctt

SEQ ID NO: 5257527 - DNA, 25 bp, Homo sapien
taaccatcttcatcccgcagggagg

SEQ ID NO: 5257528 - DNA, 25 bp, Homo sapien
aggtctgccgccgtgtaaccatctt

SEQ ID NO: 5257529 - DNA, 25 bp, Homo sapien
tgtccatggtactccgccaggtctg

SEQ ID NO: 5257530 - DNA, 25 bp, Homo sapien
aggtactgggcgcagtcccggtgtc

SEQ ID NO: 5257531 - DNA, 25 bp, Homo sapien
cagagaagaggaggcacagcaaccc

SEQ ID NO: 5257532 - DNA, 25 bp, Homo sapien
tgaggggacacatcagagaagagga

SEQ ID NO: 5257533 - DNA, 25 bp, Homo sapien
catcagagaagaggaggcacagcaa

SEQ ID NO: 5257534 - DNA, 25 bp, Homo sapien
ctgaggggacacatcagagaagagg

SEQ ID NO: 5257535 - DNA, 25 bp, Homo sapien
actggtgtgggtttccgtcagtgcc

SEQ ID NO: 5257536 - DNA, 25 bp, Homo sapien
gtttccgtcagtgccaacagaggcc

SEQ ID NO: 5257537 - DNA, 25 bp, Homo sapien
tgtgggtttccgtcagtgccaacag

SEQ ID NO: 5257538 - DNA, 25 bp, Homo sapien
tgtgcagcacggcaggactggtgtg

SEQ ID NO: 5257539 - DNA, 25 bp, Homo sapien
ggaaaaaccagggcagagccgtgct

SEQ ID NO: 5257540 - DNA, 25 bp, Homo sapien
agggcagagccgtgctccccggagg

SEQ ID NO: 5257541 - DNA, 25 bp, Homo sapien
aaaaccagggcagagccgtgctccc

SEQ ID NO: 5257542 - DNA, 25 bp, Homo sapien
cagggcagagccgtgctccccggag

SEQ ID NO: 5257543 - DNA, 25 bp, Homo sapien
tgtgagcagcccctgcggactgcat

SEQ ID NO: 5257544 - DNA, 25 bp, Homo sapien
ggcagatacaggctgtgctgtcatg

SEQ ID NO: 5257545 - DNA, 25 bp, Homo sapien
tgctcttggaatgcacgagtcccct

SEQ ID NO: 5257546 - DNA, 25 bp, Homo sapien
catcaatattgcagcaggcacacgg

SEQ ID NO: 5257547 - DNA, 25 bp, Homo sapien
ctgtggcgtttctccggcaacggga

SEQ ID NO: 5257548 - DNA, 25 bp, Homo sapien
tctgagtttaacagggatgagaagt

SEQ ID NO: 5257549 - DNA, 25 bp, Homo sapien
aaggccctggacacgatggagcctc

SEQ ID NO: 5257550 - DNA, 25 bp, Homo sapien
caccctcggtattaggatggtctct

SEQ ID NO: 5257551 - DNA, 25 bp, Homo sapien
ggagcgcctcgtggccaacagtgga

SEQ ID NO: 5257552 - DNA, 25 bp, Homo sapien
agcgcctcgtggccaacagtggagg

SEQ ID NO: 5257553 - DNA, 25 bp, Homo sapien
agggagcgcctcgtggccaacagtg

SEQ ID NO: 5257554 - DNA, 25 bp, Homo sapien
gcgcctcgtggccaacagtggaggt

SEQ ID NO: 5257555 - DNA, 25 bp, Homo sapien
ggtcgatgggagagcctgcggcaca

SEQ ID NO: 5257556 - DNA, 25 bp, Homo sapien
ctggaccttctctggggagtcagtg

SEQ ID NO: 5257557 - DNA, 25 bp, Homo sapien
tgcggcacaccgctgggccacgccg

SEQ ID NO: 5257558 - DNA, 25 bp, Homo sapien
ccgcccccgcctggtcgatgggaga

SEQ ID NO: 5257559 - DNA, 25 bp, Homo sapien
ccaagaagaagaagggtgttgcaga

SEQ ID NO: 5257560 - DNA, 25 bp, Homo sapien
ctgccaagaagaagaagggtgttgc

SEQ ID NO: 5257561 - DNA, 25 bp, Homo sapien
gaagaagaagggtgttgcagaaagg

SEQ ID NO: 5257562 - DNA, 25 bp, Homo sapien
gaagggtgttgcagaaagggcaagg

SEQ ID NO: 5257563 - DNA, 25 bp, Homo sapien
tcggggtcagccgtggcactggtga

SEQ ID NO: 5257564 - DNA, 25 bp, Homo sapien
gccgggctggtcatctgctccctgg

SEQ ID NO: 5257565 - DNA, 25 bp, Homo sapien
aggggccgggctggtcatctgctcc

SEQ ID NO: 5257566 - DNA, 25 bp, Homo sapien
cggggtcagccgtggcactggtgat

SEQ ID NO: 5257567 - DNA, 25 bp, Homo sapien
ctgcagtaccacgcagggaaagtct

SEQ ID NO: 5257568 - DNA, 25 bp, Homo sapien
tgcagtaccacgcagggaaagtctg

SEQ ID NO: 5257569 - DNA, 25 bp, Homo sapien
agtaccacgcagggaaagtctgggc

SEQ ID NO: 5257570 - DNA, 25 bp, Homo sapien
cagtaccacgcagggaaagtctggg

SEQ ID NO: 5257571 - DNA, 25 bp, Homo sapien
gctctgggcacagctacatagacaa

SEQ ID NO: 5257572 - DNA, 25 bp, Homo sapien
gacaaagcctggcagccaatcctgt

SEQ ID NO: 5257573 - DNA, 25 bp, Homo sapien
cccaccgaacacctcaatggttgag

SEQ ID NO: 5257574 - DNA, 25 bp, Homo sapien
gagccttcaatgtgccgtgcgcgct

SEQ ID NO: 5257575 - DNA, 25 bp, Homo sapien
ctgtagtgcggccaggccatctgag

SEQ ID NO: 5257576 - DNA, 25 bp, Homo sapien
gtagtgcggccaggccatctgaggt

SEQ ID NO: 5257577 - DNA, 25 bp, Homo sapien
gtgcggccaggccatctgaggtgtc

SEQ ID NO: 5257578 - DNA, 25 bp, Homo sapien
catctgaggtgtcccccgccagcgc

SEQ ID NO: 5257579 - DNA, 25 bp, Homo sapien
tgggcctctgcggagctctctgcgc

SEQ ID NO: 5257580 - DNA, 25 bp, Homo sapien
agcccgtcgatgtcgcctgagggca

SEQ ID NO: 5257581 - DNA, 25 bp, Homo sapien
gggcaccagcccgtcgatgtcgcct

SEQ ID NO: 5257582 - DNA, 25 bp, Homo sapien
tggccgcgctcatcccgcgtgggca

SEQ ID NO: 5257583 - DNA, 25 bp, Homo sapien
ttcagttctgggcttcgggcgccct

SEQ ID NO: 5257584 - DNA, 25 bp, Homo sapien
tgtgccacaaatccgccaagtggaa

SEQ ID NO: 5257585 - DNA, 25 bp, Homo sapien
gaaggcctagaacaacgcttggcac

SEQ ID NO: 5257586 - DNA, 25 bp, Homo sapien
caagtggaaggatacgtgggaccca

SEQ ID NO: 5257587 - DNA, 25 bp, Homo sapien
cgtggggcctgagctcccaccattg

SEQ ID NO: 5257588 - DNA, 25 bp, Homo sapien
tccgtggggcctgagctcccaccat

SEQ ID NO: 5257589 - DNA, 25 bp, Homo sapien
ctgctccgtggggcctgagctccca

SEQ ID NO: 5257590 - DNA, 25 bp, Homo sapien
tggggcctgagctcccaccattgtc

SEQ ID NO: 5257591 - DNA, 25 bp, Homo sapien
gccgcagatgtcctcaccgttgaag

SEQ ID NO: 5257592 - DNA, 25 bp, Homo sapien
agaagcgggctttgatgtcctcgaa

SEQ ID NO: 5257593 - DNA, 25 bp, Homo sapien
gctgttgaccgtgatgctgaccagg

SEQ ID NO: 5257594 - DNA, 25 bp, Homo sapien
cctcgtcggtcacggccttgtggaa

SEQ ID NO: 5257595 - DNA, 25 bp, Homo sapien
gaaccatgccacaacagaacagtcc

SEQ ID NO: 5257596 - DNA, 25 bp, Homo sapien
tgagaaggagtctgagtcccagctc

SEQ ID NO: 5257597 - DNA, 25 bp, Homo sapien
ccgataactggtaggactggaggca

SEQ ID NO: 5257598 - DNA, 25 bp, Homo sapien
agtcccagctcggaggagaaccatg

SEQ ID NO: 5257599 - DNA, 25 bp, Homo sapien
acaggacgccaagggaactggtgac

SEQ ID NO: 5257600 - DNA, 25 bp, Homo sapien
gaaggggtgtgacccaaggtcagca

SEQ ID NO: 5257601 - DNA, 25 bp, Homo sapien
ctgtcctcggaatcactccagctcc

SEQ ID NO: 5257602 - DNA, 25 bp, Homo sapien
cctgcccatggaatctgtcctcgga

SEQ ID NO: 5257603 - DNA, 25 bp, Homo sapien
gagtcctgataagcctgtcgcctga

SEQ ID NO: 5257604 - DNA, 25 bp, Homo sapien
gataggcccttgtggaaaagccact

SEQ ID NO: 5257605 - DNA, 25 bp, Homo sapien
tctacagcagggtcttcagcagtgg

SEQ ID NO: 5257606 - DNA, 25 bp, Homo sapien
cttcttgagtgtccgtccccttggg

SEQ ID NO: 5257607 - DNA, 25 bp, Homo sapien
gcatcccggccggtacacgaagtac

SEQ ID NO: 5257608 - DNA, 25 bp, Homo sapien
gtgccacctcttgaccccagagcgg

SEQ ID NO: 5257609 - DNA, 25 bp, Homo sapien
aggccaagaatctggcccgggcagc

SEQ ID NO: 5257610 - DNA, 25 bp, Homo sapien
tcgcgcacagggcagctcacgtggc

SEQ ID NO: 5257611 - DNA, 25 bp, Homo sapien
caggggacctcagtagtccacccac

SEQ ID NO: 5257612 - DNA, 25 bp, Homo sapien
ggggacctcagtagtccacccactc

SEQ ID NO: 5257613 - DNA, 25 bp, Homo sapien
cctcagtagtccacccactcaaggg

SEQ ID NO: 5257614 - DNA, 25 bp, Homo sapien
acctcagtagtccacccactcaagg

SEQ ID NO: 5257615 - DNA, 25 bp, Homo sapien
gaaatccaggtcatccacgttccgc

SEQ ID NO: 5257616 - DNA, 25 bp, Homo sapien
tccaggtgcactaggctgagcagct

SEQ ID NO: 5257617 - DNA, 25 bp, Homo sapien
aagtcacccgcaaacatggcatgga

SEQ ID NO: 5257618 - DNA, 25 bp, Homo sapien
gcctcaaagttctctcgcaggaagg

SEQ ID NO: 5257619 - DNA, 25 bp, Homo sapien
tcagccggcctgtgtacacgaagtc

SEQ ID NO: 5257620 - DNA, 25 bp, Homo sapien
agcttctgctggagggcgagtggtg

SEQ ID NO: 5257621 - DNA, 25 bp, Homo sapien
ctccagcttctgctggagggcgagt

SEQ ID NO: 5257622 - DNA, 25 bp, Homo sapien
ccaccaccaggacctcctccagctt

SEQ ID NO: 5257623 - DNA, 25 bp, Homo sapien
cagcttctgctggagggcgagtggt

SEQ ID NO: 5257624 - DNA, 25 bp, Homo sapien
tgctgttgtagaaggcaaagttccc

SEQ ID NO: 5257625 - DNA, 25 bp, Homo sapien
ttgtagaaggcaaagttcccaaggc

SEQ ID NO: 5257626 - DNA, 25 bp, Homo sapien
ccttgctgttgtagaaggcaaagtt

SEQ ID NO: 5257627 - DNA, 25 bp, Homo sapien
tggccttgctgttgtagaaggcaaa

SEQ ID NO: 5257628 - DNA, 25 bp, Homo sapien
ggtcctctgcgagcctcatgcgctc

SEQ ID NO: 5257629 - DNA, 25 bp, Homo sapien
tctgcgagcctcatgcgctccacct

SEQ ID NO: 5257630 - DNA, 25 bp, Homo sapien
gcctcatgcgctccacctgcaagga

SEQ ID NO: 5257631 - DNA, 25 bp, Homo sapien
gctcccggtcctctgcgagcctcat

SEQ ID NO: 5257632 - DNA, 25 bp, Homo sapien
acccaggcacgcccctcacaggggc

SEQ ID NO: 5257633 - DNA, 25 bp, Homo sapien
cccacccaggcacgcccctcacagg

SEQ ID NO: 5257634 - DNA, 25 bp, Homo sapien
ggcccacccaggcacgcccctcaca

SEQ ID NO: 5257635 - DNA, 25 bp, Homo sapien
ccaggcacgcccctcacaggggcct

SEQ ID NO: 5257636 - DNA, 25 bp, Homo sapien
cttgtgatagtcggggaagtctgga

SEQ ID NO: 5257637 - DNA, 25 bp, Homo sapien
ttgtgatagtcggggaagtctggaa

SEQ ID NO: 5257638 - DNA, 25 bp, Homo sapien
gacatagatgttgttgttcagggcc

SEQ ID NO: 5257639 - DNA, 25 bp, Homo sapien
agatgttgttgttcagggccgccag

SEQ ID NO: 5257640 - DNA, 25 bp, Homo sapien
ctgtgacatagatgttgttgttcag

SEQ ID NO: 5257641 - DNA, 25 bp, Homo sapien
ttgttcagggccgccagggagaaac

SEQ ID NO: 5257642 - DNA, 25 bp, Homo sapien
ggcctggggcttcctgctgaaggag

SEQ ID NO: 5257643 - DNA, 25 bp, Homo sapien
ctggggcttcctgctgaaggaggcc

SEQ ID NO: 5257644 - DNA, 25 bp, Homo sapien
ctggtcaaccacccaggcctggggc

SEQ ID NO: 5257645 - DNA, 25 bp, Homo sapien
tggtcaaccacccaggcctggggct

SEQ ID NO: 5257646 - DNA, 25 bp, Homo sapien
agcaccaggcctgggtggttgacca

SEQ ID NO: 5257647 - DNA, 25 bp, Homo sapien
ggtgtctgtctttgtgccccgagag

SEQ ID NO: 5257648 - DNA, 25 bp, Homo sapien
ctgggtggttgaccaggtgtctgtc

SEQ ID NO: 5257649 - DNA, 25 bp, Homo sapien
gaggcctccttcagggggaagcacc

SEQ ID NO: 5257650 - DNA, 25 bp, Homo sapien
tagatctccccattgagggccgcgc

SEQ ID NO: 5257651 - DNA, 25 bp, Homo sapien
cgccgataacgtagatctccccatt

SEQ ID NO: 5257652 - DNA, 25 bp, Homo sapien
gagggccgcgctggcgtggttggtg

SEQ ID NO: 5257653 - DNA, 25 bp, Homo sapien
atctccccattgagggccgcgctgg

SEQ ID NO: 5257654 - DNA, 25 bp, Homo sapien
gtggggtgagggcgggggcagttca

SEQ ID NO: 5257655 - DNA, 25 bp, Homo sapien
tggggtgagggcgggggcagttcag

SEQ ID NO: 5257656 - DNA, 25 bp, Homo sapien
cgttgtacttgcaggcgctggagcc

SEQ ID NO: 5257657 - DNA, 25 bp, Homo sapien
tgacgggcgtccagctgtccgtgta

SEQ ID NO: 5257658 - DNA, 25 bp, Homo sapien
ctgtgacagggttgtagcactgcag

SEQ ID NO: 5257659 - DNA, 25 bp, Homo sapien
cagccggcagccgagaagttgctga

SEQ ID NO: 5257660 - DNA, 25 bp, Homo sapien
gtagagctccccgtgcagtgcagca

SEQ ID NO: 5257661 - DNA, 25 bp, Homo sapien
ggcaggaagggcgaggcgatcacac

SEQ ID NO: 5257662 - DNA, 25 bp, Homo sapien
ggcgaggcgatcacactccacgcat

SEQ ID NO: 5257663 - DNA, 25 bp, Homo sapien
gaggtagagctccccgtgcagtgca

SEQ ID NO: 5257664 - DNA, 25 bp, Homo sapien
gaaccgtgtcgtaggcctccatctc

SEQ ID NO: 5257665 - DNA, 25 bp, Homo sapien
gccgtggcgggtccaggtgtcccga

SEQ ID NO: 5257666 - DNA, 25 bp, Homo sapien
gtggaggccccgtggtagagccaga

SEQ ID NO: 5257667 - DNA, 25 bp, Homo sapien
tcacgtacagcgcatcacccagtgg

SEQ ID NO: 5257668 - DNA, 25 bp, Homo sapien
caaagcagatccctacctacagaag

SEQ ID NO: 5257669 - DNA, 25 bp, Homo sapien
tttccacatggaaacagagcccagg

SEQ ID NO: 5257670 - DNA, 25 bp, Homo sapien
tcagaacccaaggatgtcagaggcc

SEQ ID NO: 5257671 - DNA, 25 bp, Homo sapien
tctccttagctgcaaaggtgggtgc

SEQ ID NO: 5257672 - DNA, 25 bp, Homo sapien
agacaacacgcacctacctggagga

SEQ ID NO: 5257673 - DNA, 25 bp, Homo sapien
tagaagcccatattagcctcaagcc

SEQ ID NO: 5257674 - DNA, 25 bp, Homo sapien
tgcacatgttccaaggctacgcgct

SEQ ID NO: 5257675 - DNA, 25 bp, Homo sapien
caaagctctcaagtgggtgacgtgt

SEQ ID NO: 5257676 - DNA, 25 bp, Homo sapien
gatcagactcaacagactcaacatg

SEQ ID NO: 5257677 - DNA, 25 bp, Homo sapien
aggtgtcaggctctttaacgatcag

SEQ ID NO: 5257678 - DNA, 25 bp, Homo sapien
taacgatcagctctccgtgaacgca

SEQ ID NO: 5257679 - DNA, 25 bp, Homo sapien
gacagatctccaagctatgtcatgg

SEQ ID NO: 5257680 - DNA, 25 bp, Homo sapien
gtgccctctctccttaagccattgg

SEQ ID NO: 5257681 - DNA, 25 bp, Homo sapien
cacttcagaccgatcagctgatacc

SEQ ID NO: 5257682 - DNA, 25 bp, Homo sapien
catctttcctgtgtacgtggctgtg

SEQ ID NO: 5257683 - DNA, 25 bp, Homo sapien
cccggaggtgcagcatctttcctgt

SEQ ID NO: 5257684 - DNA, 25 bp, Homo sapien
gggatgggccaagttccgtcctcag

SEQ ID NO: 5257685 - DNA, 25 bp, Homo sapien
tcatgcgatgttccacctggctggc

SEQ ID NO: 5257686 - DNA, 25 bp, Homo sapien
gttccgtcctcagatgcaagctggc

SEQ ID NO: 5257687 - DNA, 25 bp, Homo sapien
caagctggcctttgtcgcctgcctt

SEQ ID NO: 5257688 - DNA, 25 bp, Homo sapien
cctgtcctggttcacaggatgtggc

SEQ ID NO: 5257689 - DNA, 25 bp, Homo sapien
cctggttcacaggatgtggcagcag

SEQ ID NO: 5257690 - DNA, 25 bp, Homo sapien
tgtcctggttcacaggatgtggcag

SEQ ID NO: 5257691 - DNA, 25 bp, Homo sapien
tcctggttcacaggatgtggcagca

SEQ ID NO: 5257692 - DNA, 25 bp, Homo sapien
tacactcacaccgagggctgctgtt

SEQ ID NO: 5257693 - DNA, 25 bp, Homo sapien
tgctgttcccggggaactcttttga

SEQ ID NO: 5257694 - DNA, 25 bp, Homo sapien
cttttgagaagagcccgctggggaa

SEQ ID NO: 5257695 - DNA, 25 bp, Homo sapien
cttacactcacaccgagggctgctg

SEQ ID NO: 5257696 - DNA, 25 bp, Homo sapien
tagacgagcagcaggcgggctccgg

SEQ ID NO: 5257697 - DNA, 25 bp, Homo sapien
tgcgggcgcggctcctcgagggcgc

SEQ ID NO: 5257698 - DNA, 25 bp, Homo sapien
cggcggttccctcgcggctccgagc

SEQ ID NO: 5257699 - DNA, 25 bp, Homo sapien
caggcccgcgtagacgagcagcagg

SEQ ID NO: 5257700 - DNA, 25 bp, Homo sapien
caccctctgctcagcagtccaggct

SEQ ID NO: 5257701 - DNA, 25 bp, Homo sapien
accctctgctcagcagtccaggctc

SEQ ID NO: 5257702 - DNA, 25 bp, Homo sapien
ctgaccaatgcgcaggccagggtgt

SEQ ID NO: 5257703 - DNA, 25 bp, Homo sapien
tgaccaatgcgcaggccagggtgtt

SEQ ID NO: 5257704 - DNA, 25 bp, Homo sapien
tttatcagagacaaagccggctgcc

SEQ ID NO: 5257705 - DNA, 25 bp, Homo sapien
agacaaagccggctgccaagtcact

SEQ ID NO: 5257706 - DNA, 25 bp, Homo sapien
cgctgcatcctgactgatgctgaca

SEQ ID NO: 5257707 - DNA, 25 bp, Homo sapien
gatgctgacactgagcacagttttg

SEQ ID NO: 5257708 - DNA, 25 bp, Homo sapien
gttcccattcctgtccgcgctgcat

SEQ ID NO: 5257709 - DNA, 25 bp, Homo sapien
acatggacagtgatgcttccggaag

SEQ ID NO: 5257710 - DNA, 25 bp, Homo sapien
cccagcagggcggttggcctcactg

SEQ ID NO: 5257711 - DNA, 25 bp, Homo sapien
gcagggcggttggcctcactgggct

SEQ ID NO: 5257712 - DNA, 25 bp, Homo sapien
gcccagcagggcggttggcctcact

SEQ ID NO: 5257713 - DNA, 25 bp, Homo sapien
cagcagggcggttggcctcactggg

SEQ ID NO: 5257714 - DNA, 25 bp, Homo sapien
ggtcgacgctgtgtgcacgctcagc

SEQ ID NO: 5257715 - DNA, 25 bp, Homo sapien
ctctgcctgacgaagagcatccagg

SEQ ID NO: 5257716 - DNA, 25 bp, Homo sapien
tgacgaagagcatccaggcgtcccg

SEQ ID NO: 5257717 - DNA, 25 bp, Homo sapien
acccttgtcactctgcctgacgaag

SEQ ID NO: 5257718 - DNA, 25 bp, Homo sapien
ctggcactgacgggatgccggcctc

SEQ ID NO: 5257719 - DNA, 25 bp, Homo sapien
cccacggcctggcactgacgggatg

SEQ ID NO: 5257720 - DNA, 25 bp, Homo sapien
cacggcctggcactgacgggatgcc

SEQ ID NO: 5257721 - DNA, 25 bp, Homo sapien
gcctggcactgacgggatgccggcc

SEQ ID NO: 5257722 - DNA, 25 bp, Homo sapien
ctccagccaaggatctacctcagtg

SEQ ID NO: 5257723 - DNA, 25 bp, Homo sapien
tcagtgaaagcttctcctggagtga

SEQ ID NO: 5257724 - DNA, 25 bp, Homo sapien
ctggagtgagtacaaggactgtgct

SEQ ID NO: 5257725 - DNA, 25 bp, Homo sapien
gcagagggctgaagcccgctcctgc

SEQ ID NO: 5257726 - DNA, 25 bp, Homo sapien
gaggcccagggggccctggcaagcc

SEQ ID NO: 5257727 - DNA, 25 bp, Homo sapien
ggaggcccagggggccctggcaagc

SEQ ID NO: 5257728 - DNA, 25 bp, Homo sapien
aggcccagggggccctggcaagccg

SEQ ID NO: 5257729 - DNA, 25 bp, Homo sapien
gcccagggggccctggcaagccgaa

SEQ ID NO: 5257730 - DNA, 25 bp, Homo sapien
tcagcagcgcctcgggtgggatgat

SEQ ID NO: 5257731 - DNA, 25 bp, Homo sapien
ttcagcagcgcctcgggtgggatga

SEQ ID NO: 5257732 - DNA, 25 bp, Homo sapien
ggccacacgtacagggttcgggctc

SEQ ID NO: 5257733 - DNA, 25 bp, Homo sapien
cacacgtacagggttcgggctccgc

SEQ ID NO: 5257734 - DNA, 25 bp, Homo sapien
cacgtacagggttcgggctccgcgc

SEQ ID NO: 5257735 - DNA, 25 bp, Homo sapien
cggtggccgagaccggggcgaggct

SEQ ID NO: 5257736 - DNA, 25 bp, Homo sapien
ccagcagtgccagcacgtcccccac

SEQ ID NO: 5257737 - DNA, 25 bp, Homo sapien
gggccaggggcgcggccagcagtgc

SEQ ID NO: 5257738 - DNA, 25 bp, Homo sapien
gcggccagcagtgccagcacgtccc

SEQ ID NO: 5257739 - DNA, 25 bp, Homo sapien
ctccacgcgcggcgcccgcggcccc

SEQ ID NO: 5257740 - DNA, 25 bp, Homo sapien
caggtagtagacgccaagctcgtgc

SEQ ID NO: 5257741 - DNA, 25 bp, Homo sapien
gtagacgccaagctcgtgcagcgcg

SEQ ID NO: 5257742 - DNA, 25 bp, Homo sapien
agcgcgcgccgctccaccaacgcgt

SEQ ID NO: 5257743 - DNA, 25 bp, Homo sapien
ggtagtagacgccaagctcgtgcag

SEQ ID NO: 5257744 - DNA, 25 bp, Homo sapien
cggactcacccgccctcccgcgcgc

SEQ ID NO: 5257745 - DNA, 25 bp, Homo sapien
cacggatggtcaccccggctcccgc

SEQ ID NO: 5257746 - DNA, 25 bp, Homo sapien
ggcacggatggtcaccccggctccc

SEQ ID NO: 5257747 - DNA, 25 bp, Homo sapien
ggggcacggatggtcaccccggctc

SEQ ID NO: 5257748 - DNA, 25 bp, Homo sapien
gcggcgagagcgtagaagccagcca

SEQ ID NO: 5257749 - DNA, 25 bp, Homo sapien
ggcgccctgtactggccgctggtca

SEQ ID NO: 5257750 - DNA, 25 bp, Homo sapien
ctggtcaagttcaggcccgggccgc

SEQ ID NO: 5257751 - DNA, 25 bp, Homo sapien
cagcgtggcggcgagagcgtagaag

SEQ ID NO: 5257752 - DNA, 25 bp, Homo sapien
ggcgacagagcgggcgatcctccca

SEQ ID NO: 5257753 - DNA, 25 bp, Homo sapien
agcgggcgatcctcccacgccccgg

SEQ ID NO: 5257754 - DNA, 25 bp, Homo sapien
gggcgacagagcgggcgatcctccc

SEQ ID NO: 5257755 - DNA, 25 bp, Homo sapien
acagagcgggcgatcctcccacgcc

SEQ ID NO: 5257756 - DNA, 25 bp, Homo sapien
cccctcctcggcggctccccgagcg

SEQ ID NO: 5257757 - DNA, 25 bp, Homo sapien
gcgcggcggccccctcctcggcggc

SEQ ID NO: 5257758 - DNA, 25 bp, Homo sapien
cgcaggtggtcccgggggcgcggcg

SEQ ID NO: 5257759 - DNA, 25 bp, Homo sapien
gcggcggccccctcctcggcggctc

SEQ ID NO: 5257760 - DNA, 25 bp, Homo sapien
cgagcgaatgcgggtgtggggtccg

SEQ ID NO: 5257761 - DNA, 25 bp, Homo sapien
gagcgaatgcgggtgtggggtccgg

SEQ ID NO: 5257762 - DNA, 25 bp, Homo sapien
gtggaggccgagcgaatgcgggtgt

SEQ ID NO: 5257763 - DNA, 25 bp, Homo sapien
gaggccgagcgaatgcgggtgtggg

SEQ ID NO: 5257764 - DNA, 25 bp, Homo sapien
tgtgaacgggcggaagccccgtcca

SEQ ID NO: 5257765 - DNA, 25 bp, Homo sapien
tcatttttaacagctcccagttgct

SEQ ID NO: 5257766 - DNA, 25 bp, Homo sapien
gtgtggggtcacctaggccacggtg

SEQ ID NO: 5257767 - DNA, 25 bp, Homo sapien
ggcagaagtagaccgggagacctgg

SEQ ID NO: 5257768 - DNA, 25 bp, Homo sapien
cgcagggtatctccgctgtacctgg

SEQ ID NO: 5257769 - DNA, 25 bp, Homo sapien
cagggtatctccgctgtacctgggc

SEQ ID NO: 5257770 - DNA, 25 bp, Homo sapien
ggtatctccgctgtacctgggctcc

SEQ ID NO: 5257771 - DNA, 25 bp, Homo sapien
gggtatctccgctgtacctgggctc

SEQ ID NO: 5257772 - DNA, 25 bp, Homo sapien
ctgcaggtacaggacgccattcaca

SEQ ID NO: 5257773 - DNA, 25 bp, Homo sapien
ggtacaggacgccattcacagagat

SEQ ID NO: 5257774 - DNA, 25 bp, Homo sapien
caggtacaggacgccattcacagag

SEQ ID NO: 5257775 - DNA, 25 bp, Homo sapien
tgcaggtacaggacgccattcacag

SEQ ID NO: 5257776 - DNA, 25 bp, Homo sapien
tgcgcactgtgagggagcagccgct

SEQ ID NO: 5257777 - DNA, 25 bp, Homo sapien
ctggcgttgtccaagaacacggagg

SEQ ID NO: 5257778 - DNA, 25 bp, Homo sapien
cccaggaggacagcactgaagtggg

SEQ ID NO: 5257779 - DNA, 25 bp, Homo sapien
gcagccgctggcgttgtccaagaac

SEQ ID NO: 5257780 - DNA, 25 bp, Homo sapien
tgaatcaaccctggctccgggacca

SEQ ID NO: 5257781 - DNA, 25 bp, Homo sapien
cattgtctagatctgtgctccattt

SEQ ID NO: 5257782 - DNA, 25 bp, Homo sapien
ggaccaccagcgtgcgtgtcacgtc

SEQ ID NO: 5257783 - DNA, 25 bp, Homo sapien
cgtgtcacgtccgtaggcctgcctg

SEQ ID NO: 5257784 - DNA, 25 bp, Homo sapien
gtgcccccaggcacgccgactcttt

SEQ ID NO: 5257785 - DNA, 25 bp, Homo sapien
ggcacgccgactctttctttcctgg

SEQ ID NO: 5257786 - DNA, 25 bp, Homo sapien
tgcagctggagactagcaggtgccc

SEQ ID NO: 5257787 - DNA, 25 bp, Homo sapien
agactagcaggtgcccccaggcacg

SEQ ID NO: 5257788 - DNA, 25 bp, Homo sapien
tccactggcaggtagaacacggtta

SEQ ID NO: 5257789 - DNA, 25 bp, Homo sapien
tgaccccgtcccttctaagcagtaa

SEQ ID NO: 5257790 - DNA, 25 bp, Homo sapien
gaaagacgcagaggccatctgggca

SEQ ID NO: 5257791 - DNA, 25 bp, Homo sapien
taagaacacacagcgtacgtccctg

SEQ ID NO: 5257792 - DNA, 25 bp, Homo sapien
agtgggttaactcttcctcagcagg

SEQ ID NO: 5257793 - DNA, 25 bp, Homo sapien
tgggtggctcctaccagtgagtcag

SEQ ID NO: 5257794 - DNA, 25 bp, Homo sapien
tgtgtcctcatgagagctgccgtcc

SEQ ID NO: 5257795 - DNA, 25 bp, Homo sapien
cagctattcggatgatgggtcagca

SEQ ID NO: 5257796 - DNA, 25 bp, Homo sapien
caggccagcccagtacttctaggta

SEQ ID NO: 5257797 - DNA, 25 bp, Homo sapien
aaatctagataagggcgtggccaca

SEQ ID NO: 5257798 - DNA, 25 bp, Homo sapien
gtgaaggtgactggccattgctccc

SEQ ID NO: 5257799 - DNA, 25 bp, Homo sapien
gagtcctactgagaatcgcaccagg

SEQ ID NO: 5257800 - DNA, 25 bp, Homo sapien
gattccggatcttaaggtctgcctt

SEQ ID NO: 5257801 - DNA, 25 bp, Homo sapien
tatcttcctatagcaaaccaggtgt

SEQ ID NO: 5257802 - DNA, 25 bp, Homo sapien
aaggttcactcccagccttcaaggg

SEQ ID NO: 5257803 - DNA, 25 bp, Homo sapien
actgttcccgagaggcttgacccta

SEQ ID NO: 5257804 - DNA, 25 bp, Homo sapien
gaggactcggttcagtggcttccat

SEQ ID NO: 5257805 - DNA, 25 bp, Homo sapien
attccattggtgagagctgcagtct

SEQ ID NO: 5257806 - DNA, 25 bp, Homo sapien
tctgcttcccacgtgaggtaggtgt

SEQ ID NO: 5257807 - DNA, 25 bp, Homo sapien
tgctcagcatggcccggaaattctg

SEQ ID NO: 5257808 - DNA, 25 bp, Homo sapien
gaggctaattgtttaaggaccagcc

SEQ ID NO: 5257809 - DNA, 25 bp, Homo sapien
ttgagcccagcgagtgattgcacca

SEQ ID NO: 5257810 - DNA, 25 bp, Homo sapien
gttgtgcagtaccagaagttgctgg

SEQ ID NO: 5257811 - DNA, 25 bp, Homo sapien
tttacctggacttggtgacacctgt

SEQ ID NO: 5257812 - DNA, 25 bp, Homo sapien
tgtgaatcactgtgtgccaactgac

SEQ ID NO: 5257813 - DNA, 25 bp, Homo sapien
tgttgccttgcgtcatcagcaggta

SEQ ID NO: 5257814 - DNA, 25 bp, Homo sapien
ccaatttggcaactgtggtgaaacc

SEQ ID NO: 5257815 - DNA, 25 bp, Homo sapien
tatggccagtggaaactcctgctgg

SEQ ID NO: 5257816 - DNA, 25 bp, Homo sapien
tgcatgagtccatgtgcatgagcat

SEQ ID NO: 5257817 - DNA, 25 bp, Homo sapien
tggatacagcaacctttaacctgaa

SEQ ID NO: 5257818 - DNA, 25 bp, Homo sapien
agtggagatgcttcccatgtgtggc

SEQ ID NO: 5257819 - DNA, 25 bp, Homo sapien
aattagacttgggtgtgttggcctg

SEQ ID NO: 5257820 - DNA, 25 bp, Homo sapien
tatttcatatgcaagacttccagct

SEQ ID NO: 5257821 - DNA, 25 bp, Homo sapien
ctgtgttaatccctgcgtcctgtgg

SEQ ID NO: 5257822 - DNA, 25 bp, Homo sapien
gggtccgctcatctcctaagcgctg

SEQ ID NO: 5257823 - DNA, 25 bp, Homo sapien
tgggttacagtctccgggtttcatc

SEQ ID NO: 5257824 - DNA, 25 bp, Homo sapien
ttgttcttgccagagcacggtggct

SEQ ID NO: 5257825 - DNA, 25 bp, Homo sapien
tgaactcctgattgccgagtagact

SEQ ID NO: 5257826 - DNA, 25 bp, Homo sapien
gttttctcacccgaactttgcggca

SEQ ID NO: 5257827 - DNA, 25 bp, Homo sapien
gaacttgtcctcacaccccgttgag

SEQ ID NO: 5257828 - DNA, 25 bp, Homo sapien
ccaccacaagttgaggcgggactac

SEQ ID NO: 5257829 - DNA, 25 bp, Homo sapien
aagaggccaccacaagttgaggcgg

SEQ ID NO: 5257830 - DNA, 25 bp, Homo sapien
ggccaccacaagttgaggcgggact

SEQ ID NO: 5257831 - DNA, 25 bp, Homo sapien
accacaagttgaggcgggactacaa

SEQ ID NO: 5257832 - DNA, 25 bp, Homo sapien
ttgagacaccggattcctgcagcga

SEQ ID NO: 5257833 - DNA, 25 bp, Homo sapien
attgagacaccggattcctgcagcg

SEQ ID NO: 5257834 - DNA, 25 bp, Homo sapien
tttcactgctgatgaagcttctgtc

SEQ ID NO: 5257835 - DNA, 25 bp, Homo sapien
cactgctgatgaagcttctgtctca

SEQ ID NO: 5257836 - DNA, 25 bp, Homo sapien
tcactgctgatgaagcttctgtctc

SEQ ID NO: 5257837 - DNA, 25 bp, Homo sapien
actgctgatgaagcttctgtctcac

SEQ ID NO: 5257838 - DNA, 25 bp, Homo sapien
tattaaatcggactggtcttttcac

SEQ ID NO: 5257839 - DNA, 25 bp, Homo sapien
ctattaaatcggactggtcttttca

SEQ ID NO: 5257840 - DNA, 25 bp, Homo sapien
cagttgttttccatgggagacccaa

SEQ ID NO: 5257841 - DNA, 25 bp, Homo sapien
ttcagttgttttccatgggagaccc

SEQ ID NO: 5257842 - DNA, 25 bp, Homo sapien
ctgttcagttgttttccatgggaga

SEQ ID NO: 5257843 - DNA, 25 bp, Homo sapien
gttgttttccatgggagacccaaca

SEQ ID NO: 5257844 - DNA, 25 bp, Homo sapien
gtctccaaaggtactacagtactct

SEQ ID NO: 5257845 - DNA, 25 bp, Homo sapien
tttgccgcaccataagaacgtctcc

SEQ ID NO: 5257846 - DNA, 25 bp, Homo sapien
aagaacgtctccaaaggtactacag

SEQ ID NO: 5257847 - DNA, 25 bp, Homo sapien
tgccgcaccataagaacgtctccaa

SEQ ID NO: 5257848 - DNA, 25 bp, Homo sapien
cacaaagagaccgcgcaatctgatc

SEQ ID NO: 5257849 - DNA, 25 bp, Homo sapien
agaccgcgcaatctgatcatctgca

SEQ ID NO: 5257850 - DNA, 25 bp, Homo sapien
tctattgctattgcgcttgggttcg

SEQ ID NO: 5257851 - DNA, 25 bp, Homo sapien
tgattcctttcatcgagtcctctcc

SEQ ID NO: 5257852 - DNA, 25 bp, Homo sapien
caaatccaccctgattcccaaagcc

SEQ ID NO: 5257853 - DNA, 25 bp, Homo sapien
aaatccaccctgattcccaaagcca

SEQ ID NO: 5257854 - DNA, 25 bp, Homo sapien
aatccaccctgattcccaaagccac

SEQ ID NO: 5257855 - DNA, 25 bp, Homo sapien
tattactaccttgattgtttcccaa

SEQ ID NO: 5257856 - DNA, 25 bp, Homo sapien
catattactaccttgattgtttccc

SEQ ID NO: 5257857 - DNA, 25 bp, Homo sapien
cacccatattactaccttgattgtt

SEQ ID NO: 5257858 - DNA, 25 bp, Homo sapien
cccatattactaccttgattgtttc

SEQ ID NO: 5257859 - DNA, 25 bp, Homo sapien
attaatgctgaacgcaccaaagttt

SEQ ID NO: 5257860 - DNA, 25 bp, Homo sapien
tggattaatgctgaacgcaccaaag

SEQ ID NO: 5257861 - DNA, 25 bp, Homo sapien
tcatggctggattaatgctgaacgc

SEQ ID NO: 5257862 - DNA, 25 bp, Homo sapien
gctgaacgcaccaaagtttatccca

SEQ ID NO: 5257863 - DNA, 25 bp, Homo sapien
ctggctaacacacccatcgtacacc

SEQ ID NO: 5257864 - DNA, 25 bp, Homo sapien
taacacacccatcgtacaccaactg

SEQ ID NO: 5257865 - DNA, 25 bp, Homo sapien
acacccatcgtacaccaactgctct

SEQ ID NO: 5257866 - DNA, 25 bp, Homo sapien
ccatcgtacaccaactgctctgcag

SEQ ID NO: 5257867 - DNA, 25 bp, Homo sapien
ttatcatccgatgggcctggctgct

SEQ ID NO: 5257868 - DNA, 25 bp, Homo sapien
tgtctacgttcccagccagaagact

SEQ ID NO: 5257869 - DNA, 25 bp, Homo sapien
tggttatcatccgatgggcctggct

SEQ ID NO: 5257870 - DNA, 25 bp, Homo sapien
tccgatgggcctggctgcttcgctg

SEQ ID NO: 5257871 - DNA, 25 bp, Homo sapien
cattctataccaaccaaccacaacc

SEQ ID NO: 5257872 - DNA, 25 bp, Homo sapien
ccattctataccaaccaaccacaac

SEQ ID NO: 5257873 - DNA, 25 bp, Homo sapien
accattctataccaaccaaccacaa

SEQ ID NO: 5257874 - DNA, 25 bp, Homo sapien
agtgcttcttccataaacatttgaa

SEQ ID NO: 5257875 - DNA, 25 bp, Homo sapien
aagtgcttcttccataaacatttga

SEQ ID NO: 5257876 - DNA, 25 bp, Homo sapien
atgagaaggcatgtagacagaagtg

SEQ ID NO: 5257877 - DNA, 25 bp, Homo sapien
tgaatgagaaggcatgtagacagaa

SEQ ID NO: 5257878 - DNA, 25 bp, Homo sapien
agaaggcatgtagacagaagtgttc

SEQ ID NO: 5257879 - DNA, 25 bp, Homo sapien
cttgaatgagaaggcatgtagacag

SEQ ID NO: 5257880 - DNA, 25 bp, Homo sapien
cgcggcctgtgatgcgtgatgacga

SEQ ID NO: 5257881 - DNA, 25 bp, Homo sapien
cgtcaaagacgcggcctgtgatgcg

SEQ ID NO: 5257882 - DNA, 25 bp, Homo sapien
aaagacgcggcctgtgatgcgtgat

SEQ ID NO: 5257883 - DNA, 25 bp, Homo sapien
gcggcctgtgatgcgtgatgacgaa

SEQ ID NO: 5257884 - DNA, 25 bp, Homo sapien
taaagagtagcagataaaaatggga

SEQ ID NO: 5257885 - DNA, 25 bp, Homo sapien
aagagtagcagataaaaatgggaca

SEQ ID NO: 5257886 - DNA, 25 bp, Homo sapien
gaaataaagagtagcagataaaaat

SEQ ID NO: 5257887 - DNA, 25 bp, Homo sapien
ctatgaaataaagagtagcagataa

SEQ ID NO: 5257888 - DNA, 25 bp, Homo sapien
gccttgcgttcacagcgttgatacg

SEQ ID NO: 5257889 - DNA, 25 bp, Homo sapien
ctagttccatatcacagccttgcgt

SEQ ID NO: 5257890 - DNA, 25 bp, Homo sapien
cttgcgttcacagcgttgatacgac

SEQ ID NO: 5257891 - DNA, 25 bp, Homo sapien
cagccttgcgttcacagcgttgata

SEQ ID NO: 5257892 - DNA, 25 bp, Homo sapien
tgagacaccagagttcactgctgaa

SEQ ID NO: 5257893 - DNA, 25 bp, Homo sapien
tctttgagacaccagagttcactgc

SEQ ID NO: 5257894 - DNA, 25 bp, Homo sapien
ggacggtctcgatcagccagtcgcc

SEQ ID NO: 5257895 - DNA, 25 bp, Homo sapien
gcgctggggaataccgagtcccttg

SEQ ID NO: 5257896 - DNA, 25 bp, Homo sapien
tcaggcctctgcaagtgacccgaga

SEQ ID NO: 5257897 - DNA, 25 bp, Homo sapien
ccgagagccaggacccggacggtct

SEQ ID NO: 5257898 - DNA, 25 bp, Homo sapien
tgatgtaggatgtacccaccaggac

SEQ ID NO: 5257899 - DNA, 25 bp, Homo sapien
caggacacggatggataacgggcca

SEQ ID NO: 5257900 - DNA, 25 bp, Homo sapien
atcatgaagcagtgtggcgcccgct

SEQ ID NO: 5257901 - DNA, 25 bp, Homo sapien
gttccacgggttagaagtctgtcag

SEQ ID NO: 5257902 - DNA, 25 bp, Homo sapien
tcacctcaattcaatcatagaagcc

SEQ ID NO: 5257903 - DNA, 25 bp, Homo sapien
agatgcagctttatcatctggagcc

SEQ ID NO: 5257904 - DNA, 25 bp, Homo sapien
tgcagctttatcatctggagccgag

SEQ ID NO: 5257905 - DNA, 25 bp, Homo sapien
cattgggctataaccagatgcagct

SEQ ID NO: 5257906 - DNA, 25 bp, Homo sapien
acttgagtttgtgtattccattgac

SEQ ID NO: 5257907 - DNA, 25 bp, Homo sapien
aaattgcccggagtgtctggaggcc

SEQ ID NO: 5257908 - DNA, 25 bp, Homo sapien
aagaattttgtagagctgccagcgc

SEQ ID NO: 5257909 - DNA, 25 bp, Homo sapien
aatggtgctgggcactagtgttcca

SEQ ID NO: 5257910 - DNA, 25 bp, Homo sapien
acacgttcgtgtccacgtgccaggc

SEQ ID NO: 5257911 - DNA, 25 bp, Homo sapien
tgaaccatctgctcgagtccatgcc

SEQ ID NO: 5257912 - DNA, 25 bp, Homo sapien
tacatccagtgcatgcacgaggtgc

SEQ ID NO: 5257913 - DNA, 25 bp, Homo sapien
tagagcccctggacggagtggctgg

SEQ ID NO: 5257914 - DNA, 25 bp, Homo sapien
aagcgagcgagcgcttcgctgccgg

SEQ ID NO: 5257915 - DNA, 25 bp, Homo sapien
gcaggcggaagcgagcgagcgcttc

SEQ ID NO: 5257916 - DNA, 25 bp, Homo sapien
cgcgcgggacgcggctctctccctc

SEQ ID NO: 5257917 - DNA, 25 bp, Homo sapien
cagctgcaggcggaagcgagcgagc

SEQ ID NO: 5257918 - DNA, 25 bp, Homo sapien
tcctgggtgagccgcgtccccgcgg

SEQ ID NO: 5257919 - DNA, 25 bp, Homo sapien
tgggtgagccgcgtccccgcgggcc

SEQ ID NO: 5257920 - DNA, 25 bp, Homo sapien
ctcctgggtgagccgcgtccccgcg

SEQ ID NO: 5257921 - DNA, 25 bp, Homo sapien
ctgggtgagccgcgtccccgcgggc

SEQ ID NO: 5257922 - DNA, 25 bp, Homo sapien
agaacgccgaagtgctggagctgac

SEQ ID NO: 5257923 - DNA, 25 bp, Homo sapien
gccaagctggagaacgccgaagtgc

SEQ ID NO: 5257924 - DNA, 25 bp, Homo sapien
tggagaacgccgaagtgctggagct

SEQ ID NO: 5257925 - DNA, 25 bp, Homo sapien
tggagctgacggtgcggcgggtcca

SEQ ID NO: 5257926 - DNA, 25 bp, Homo sapien
ctggtggagaagaagcggcgcgcgc

SEQ ID NO: 5257927 - DNA, 25 bp, Homo sapien
gtccccggcggagcgggcatggcgc

SEQ ID NO: 5257928 - DNA, 25 bp, Homo sapien
cggatcaacgagagcctgcaggagc

SEQ ID NO: 5257929 - DNA, 25 bp, Homo sapien
gaccgtgtgggccgtgaggatgagg

SEQ ID NO: 5257930 - DNA, 25 bp, Homo sapien
cagcgcgtgccaagcagttgactta

SEQ ID NO: 5257931 - DNA, 25 bp, Homo sapien
tgttaactgtagcttcagcgcgtgc

SEQ ID NO: 5257932 - DNA, 25 bp, Homo sapien
tatgttaccgaaacacaaaactgcc

SEQ ID NO: 5257933 - DNA, 25 bp, Homo sapien
cctatgataaggtagcagtctgcat

SEQ ID NO: 5257934 - DNA, 25 bp, Homo sapien
ggtttgtgtggccaactccatcgga

SEQ ID NO: 5257935 - DNA, 25 bp, Homo sapien
taccaaatggagatagcagcctctc

SEQ ID NO: 5257936 - DNA, 25 bp, Homo sapien
taagcgcctcttagtgtcagggaag

SEQ ID NO: 5257937 - DNA, 25 bp, Homo sapien
ggaagttgcctcagtgctcccagaa

SEQ ID NO: 5257938 - DNA, 25 bp, Homo sapien
ttttctgcattagctgcccctggac

SEQ ID NO: 5257939 - DNA, 25 bp, Homo sapien
gaaacccaggactgttgaacgaaga

SEQ ID NO: 5257940 - DNA, 25 bp, Homo sapien
tacttccggaatagattcaccttgg

SEQ ID NO: 5257941 - DNA, 25 bp, Homo sapien
tgaggatcagggaaaaccgctcggt

SEQ ID NO: 5257942 - DNA, 25 bp, Homo sapien
ccttcgggacttctagggctgctga

SEQ ID NO: 5257943 - DNA, 25 bp, Homo sapien
ggacgcaccttcactttgtggcaaa

SEQ ID NO: 5257944 - DNA, 25 bp, Homo sapien
gcaaatgattgggacccttcgggac

SEQ ID NO: 5257945 - DNA, 25 bp, Homo sapien
tgggtgaagcgtctccaggagaacc

SEQ ID NO: 5257946 - DNA, 25 bp, Homo sapien
cccaggagattgcaggagctagact

SEQ ID NO: 5257947 - DNA, 25 bp, Homo sapien
taatttttggcaacctgatgggcaa

SEQ ID NO: 5257948 - DNA, 25 bp, Homo sapien
gatgcgtagcctccctgttgatggt

SEQ ID NO: 5257949 - DNA, 25 bp, Homo sapien
tgtgttaaccatagcagggccaggt

SEQ ID NO: 5257950 - DNA, 25 bp, Homo sapien
tcgaagggttcctcgtgctcttcct

SEQ ID NO: 5257951 - DNA, 25 bp, Homo sapien
aagggttcctcgtgctcttcctggg

SEQ ID NO: 5257952 - DNA, 25 bp, Homo sapien
cggcctcgaagggttcctcgtgctc

SEQ ID NO: 5257953 - DNA, 25 bp, Homo sapien
gcctcgaagggttcctcgtgctctt

SEQ ID NO: 5257954 - DNA, 25 bp, Homo sapien
ggcgtgggggcgtgtgcccttggcc

SEQ ID NO: 5257955 - DNA, 25 bp, Homo sapien
cgccggcgtgggggcgtgtgccctt

SEQ ID NO: 5257956 - DNA, 25 bp, Homo sapien
gccggcgtgggggcgtgtgcccttg

SEQ ID NO: 5257957 - DNA, 25 bp, Homo sapien
acggcgccggcgtgggggcgtgtgc

SEQ ID NO: 5257958 - DNA, 25 bp, Homo sapien
aggtcggggtcccagcgccggctcg

SEQ ID NO: 5257959 - DNA, 25 bp, Homo sapien
gcctcgggcaggtcggggtcccagc

SEQ ID NO: 5257960 - DNA, 25 bp, Homo sapien
cgccgccggaagttccttgggctgc

SEQ ID NO: 5257961 - DNA, 25 bp, Homo sapien
gcgccgccggaagttccttgggctg

SEQ ID NO: 5257962 - DNA, 25 bp, Homo sapien
tctcaagggctttcgaaggcactgg

SEQ ID NO: 5257963 - DNA, 25 bp, Homo sapien
tccttccggcgatttgagagctctg

SEQ ID NO: 5257964 - DNA, 25 bp, Homo sapien
aaggtaacctccaagatctgtgccg

SEQ ID NO: 5257965 - DNA, 25 bp, Homo sapien
atagaaaatacgctgtcctggctgg

SEQ ID NO: 5257966 - DNA, 25 bp, Homo sapien
aggacgcgccgctccggtttccatc

SEQ ID NO: 5257967 - DNA, 25 bp, Homo sapien
ccgccgcagggcgttcggtcactag

SEQ ID NO: 5257968 - DNA, 25 bp, Homo sapien
tttccatcccacagtgcaccggagc

SEQ ID NO: 5257969 - DNA, 25 bp, Homo sapien
actagggctgcgcggccttagcaac

SEQ ID NO: 5257970 - DNA, 25 bp, Homo sapien
tcagcggcggcctccgaatcacttt

SEQ ID NO: 5257971 - DNA, 25 bp, Homo sapien
tgatgatgtcgtgcaggtagcggaa

SEQ ID NO: 5257972 - DNA, 25 bp, Homo sapien
cagcttctcggtcagcggcggcctc

SEQ ID NO: 5257973 - DNA, 25 bp, Homo sapien
gatgtcgtgcaggtagcggaacggg

SEQ ID NO: 5257974 - DNA, 25 bp, Homo sapien
catgctaataagcaagccagggtct

SEQ ID NO: 5257975 - DNA, 25 bp, Homo sapien
cagtgcagatcaccagagccatgct

SEQ ID NO: 5257976 - DNA, 25 bp, Homo sapien
cagggtctccgtcacggaggagcac

SEQ ID NO: 5257977 - DNA, 25 bp, Homo sapien
gcacaccatccgcaagtggaaaaag

SEQ ID NO: 5257978 - DNA, 25 bp, Homo sapien
cagcaggctgcatggtatgtggtaa

SEQ ID NO: 5257979 - DNA, 25 bp, Homo sapien
cctgggttgtctcagactgcagttt

SEQ ID NO: 5257980 - DNA, 25 bp, Homo sapien
gcaagggtctttctcctcaccacgt

SEQ ID NO: 5257981 - DNA, 25 bp, Homo sapien
tagctgggacccttaccagcaggct

SEQ ID NO: 5257982 - DNA, 25 bp, Homo sapien
ttcacattatcagacttcatctcgg

SEQ ID NO: 5257983 - DNA, 25 bp, Homo sapien
ggcccttcatgaaaccagtcattct

SEQ ID NO: 5257984 - DNA, 25 bp, Homo sapien
tgtagaggcccttcatgaaaccagt

SEQ ID NO: 5257985 - DNA, 25 bp, Homo sapien
tcatctcggcgtctgtgtagaggcc

SEQ ID NO: 5257986 - DNA, 25 bp, Homo sapien
tttggccaacagtggctctcccgac

SEQ ID NO: 5257987 - DNA, 25 bp, Homo sapien
gagcagctcgtttgttctttcaggc

SEQ ID NO: 5257988 - DNA, 25 bp, Homo sapien
cacgattcgggctggtttggccaac

SEQ ID NO: 5257989 - DNA, 25 bp, Homo sapien
gacaccattacaaccacgtctatgg

SEQ ID NO: 5257990 - DNA, 25 bp, Homo sapien
agacgccacattgttgctgggtgag

SEQ ID NO: 5257991 - DNA, 25 bp, Homo sapien
gggcaagaggccgacgggagacagc

SEQ ID NO: 5257992 - DNA, 25 bp, Homo sapien
cgactggaatggagggctcagatat

SEQ ID NO: 5257993 - DNA, 25 bp, Homo sapien
gacagccggccagggccgaatgcag

SEQ ID NO: 5257994 - DNA, 25 bp, Homo sapien
ggactcttcttctcgcacattctta

SEQ ID NO: 5257995 - DNA, 25 bp, Homo sapien
cttgaggtcagtgaggcccggcctt

SEQ ID NO: 5257996 - DNA, 25 bp, Homo sapien
agctaaaaccctccgcaccgcatcg

SEQ ID NO: 5257997 - DNA, 25 bp, Homo sapien
attatccaattcctgagatcttgag

SEQ ID NO: 5257998 - DNA, 25 bp, Homo sapien
tttcaaagatgtgcgacttggaatt

SEQ ID NO: 5257999 - DNA, 25 bp, Homo sapien
caaagatgtgcgacttggaattcac

SEQ ID NO: 5258000 - DNA, 25 bp, Homo sapien
tcaaagatgtgcgacttggaattca

SEQ ID NO: 5258001 - DNA, 25 bp, Homo sapien
attttcaaagatgtgcgacttggaa

SEQ ID NO: 5258002 - DNA, 25 bp, Homo sapien
tctgtctccttcttgcgctcggagt

SEQ ID NO: 5258003 - DNA, 25 bp, Homo sapien
tctttctgtcgctcgttgtctggcc

SEQ ID NO: 5258004 - DNA, 25 bp, Homo sapien
tcttggcttgcggtcttctttcaat

SEQ ID NO: 5258005 - DNA, 25 bp, Homo sapien
tcccaggagtgctccccgtttttca

SEQ ID NO: 5258006 - DNA, 25 bp, Homo sapien
tgtcagacactctatcagactgggc

SEQ ID NO: 5258007 - DNA, 25 bp, Homo sapien
catggtgggtccagaaagaattcac

SEQ ID NO: 5258008 - DNA, 25 bp, Homo sapien
tctgctgatgcctaaaagcccttga

SEQ ID NO: 5258009 - DNA, 25 bp, Homo sapien
cgcacgggagaagcaacacatctta

SEQ ID NO: 5258010 - DNA, 25 bp, Homo sapien
tctttaaaagttccatctgataact

SEQ ID NO: 5258011 - DNA, 25 bp, Homo sapien
tagacatctcccctgagcttgctga

SEQ ID NO: 5258012 - DNA, 25 bp, Homo sapien
taactttttagacatctcccctgag

SEQ ID NO: 5258013 - DNA, 25 bp, Homo sapien
tttttagacatctcccctgagcttg

SEQ ID NO: 5258014 - DNA, 25 bp, Homo sapien
cttccactgaatttttggatcgccg

SEQ ID NO: 5258015 - DNA, 25 bp, Homo sapien
cactgaatttttggatcgccgtttt

SEQ ID NO: 5258016 - DNA, 25 bp, Homo sapien
gaatttttggatcgccgttttgatg

SEQ ID NO: 5258017 - DNA, 25 bp, Homo sapien
tggatcgccgttttgatgtttttgt

SEQ ID NO: 5258018 - DNA, 25 bp, Homo sapien
tcaaaatcagcatgccttaacaaca

SEQ ID NO: 5258019 - DNA, 25 bp, Homo sapien
tttcactggtcatcaacgtttttgt

SEQ ID NO: 5258020 - DNA, 25 bp, Homo sapien
ccatttcactggtcatcaacgtttt

SEQ ID NO: 5258021 - DNA, 25 bp, Homo sapien
ttcgtccatcaaaatcagcatgcct

SEQ ID NO: 5258022 - DNA, 25 bp, Homo sapien
caggggaaagactattttcactggt

SEQ ID NO: 5258023 - DNA, 25 bp, Homo sapien
ttcaggggaaagactattttcactg

SEQ ID NO: 5258024 - DNA, 25 bp, Homo sapien
tcaggggaaagactattttcactgg

SEQ ID NO: 5258025 - DNA, 25 bp, Homo sapien
gtttcatgctatgttccttcttagc

SEQ ID NO: 5258026 - DNA, 25 bp, Homo sapien
ttcatgctatgttccttcttagctt

SEQ ID NO: 5258027 - DNA, 25 bp, Homo sapien
tttcatgctatgttccttcttagct

SEQ ID NO: 5258028 - DNA, 25 bp, Homo sapien
atttattccagacactatggagtct

SEQ ID NO: 5258029 - DNA, 25 bp, Homo sapien
tatttctgatgttgtcgtttcctga

SEQ ID NO: 5258030 - DNA, 25 bp, Homo sapien
cactatggagtctaaacttttagct

SEQ ID NO: 5258031 - DNA, 25 bp, Homo sapien
tccagacactatggagtctaaactt

SEQ ID NO: 5258032 - DNA, 25 bp, Homo sapien
tgcaactgcgaggacagagacccca

SEQ ID NO: 5258033 - DNA, 25 bp, Homo sapien
ctgcaactgcgaggacagagacccc

SEQ ID NO: 5258034 - DNA, 25 bp, Homo sapien
acagagaccccaggtccgcgctgtg

SEQ ID NO: 5258035 - DNA, 25 bp, Homo sapien
agaccccaggtccgcgctgtggcag

SEQ ID NO: 5258036 - DNA, 25 bp, Homo sapien
aggaactgtaacaactgccagcaaa

SEQ ID NO: 5258037 - DNA, 25 bp, Homo sapien
attccaaatgttaaaccatgaccag

SEQ ID NO: 5258038 - DNA, 25 bp, Homo sapien
aaaccatgaccagtgcaaggtaaca

SEQ ID NO: 5258039 - DNA, 25 bp, Homo sapien
ttaaggaactgtaacaactgccagc

SEQ ID NO: 5258040 - DNA, 25 bp, Homo sapien
acagtgcacagtcctggccatattg

SEQ ID NO: 5258041 - DNA, 25 bp, Homo sapien
aaaatattttggacacagtgcacag

SEQ ID NO: 5258042 - DNA, 25 bp, Homo sapien
gtgcacagtcctggccatattgaaa

SEQ ID NO: 5258043 - DNA, 25 bp, Homo sapien
cacagtcctggccatattgaaaact

SEQ ID NO: 5258044 - DNA, 25 bp, Homo sapien
ctccccagtagagccagacccagca

SEQ ID NO: 5258045 - DNA, 25 bp, Homo sapien
cagcagctgagaggctgcaagtagg

SEQ ID NO: 5258046 - DNA, 25 bp, Homo sapien
ccagtagagccagacccagcagctg

SEQ ID NO: 5258047 - DNA, 25 bp, Homo sapien
cagctgagaggctgcaagtaggcgg

SEQ ID NO: 5258048 - DNA, 25 bp, Homo sapien
tgaatattctcacaccgcagactag

SEQ ID NO: 5258049 - DNA, 25 bp, Homo sapien
gggttgggctgaatattctcacacc

SEQ ID NO: 5258050 - DNA, 25 bp, Homo sapien
caccgcagactagctgaattatcat

SEQ ID NO: 5258051 - DNA, 25 bp, Homo sapien
gactagctgaattatcatctgaaat

SEQ ID NO: 5258052 - DNA, 25 bp, Homo sapien
tttcttcaagtgttgtcttgaggac

SEQ ID NO: 5258053 - DNA, 25 bp, Homo sapien
ttcttcaagtgttgtcttgaggaca

SEQ ID NO: 5258054 - DNA, 25 bp, Homo sapien
gtagtcaacctcaatacattaaatg

SEQ ID NO: 5258055 - DNA, 25 bp, Homo sapien
ggtactaaatagaaacaggacacag

SEQ ID NO: 5258056 - DNA, 25 bp, Homo sapien
aaattagctttcgtgtagtcaacct

SEQ ID NO: 5258057 - DNA, 25 bp, Homo sapien
atttcctcatagccgcttttctaat

SEQ ID NO: 5258058 - DNA, 25 bp, Homo sapien
tcagacttatcttggccagcaggtc

SEQ ID NO: 5258059 - DNA, 25 bp, Homo sapien
gatgaaagctcattaggaatttctg

SEQ ID NO: 5258060 - DNA, 25 bp, Homo sapien
gatgttggatgaaagctcattagga

SEQ ID NO: 5258061 - DNA, 25 bp, Homo sapien
ttctggagtctctggcacctcagac

SEQ ID NO: 5258062 - DNA, 25 bp, Homo sapien
gtcttgcactcccaggccgaggaat

SEQ ID NO: 5258063 - DNA, 25 bp, Homo sapien
cctccatgctgtcttgccgtttgac

SEQ ID NO: 5258064 - DNA, 25 bp, Homo sapien
ctatccatttgtagcgcctccatgc

SEQ ID NO: 5258065 - DNA, 25 bp, Homo sapien
cttgcactcccaggccgaggaattc

SEQ ID NO: 5258066 - DNA, 25 bp, Homo sapien
ccaaacactctacaggctccttaat

SEQ ID NO: 5258067 - DNA, 25 bp, Homo sapien
tatcgcagtgctgcatgcgtgcaca

SEQ ID NO: 5258068 - DNA, 25 bp, Homo sapien
tcagctcactctgtacaaatgtgag

SEQ ID NO: 5258069 - DNA, 25 bp, Homo sapien
tgctttaagcaatcacctaactccc

SEQ ID NO: 5258070 - DNA, 25 bp, Homo sapien
tgtaatcacatttgaaacggtttta

SEQ ID NO: 5258071 - DNA, 25 bp, Homo sapien
cattgtcagaattgtgtgactctgt

SEQ ID NO: 5258072 - DNA, 25 bp, Homo sapien
gactctgtaatcacatttgaaacgg

SEQ ID NO: 5258073 - DNA, 25 bp, Homo sapien
ttcattgtcagaattgtgtgactct

SEQ ID NO: 5258074 - DNA, 25 bp, Homo sapien
cttcttctagttccactgctgttac

SEQ ID NO: 5258075 - DNA, 25 bp, Homo sapien
cctcttcttctagttccactgctgt

SEQ ID NO: 5258076 - DNA, 25 bp, Homo sapien
tcttcttctagttccactgctgtta

SEQ ID NO: 5258077 - DNA, 25 bp, Homo sapien
ctcctcttcttctagttccactgct

SEQ ID NO: 5258078 - DNA, 25 bp, Homo sapien
cataatctttcttcgtctccaaaat

SEQ ID NO: 5258079 - DNA, 25 bp, Homo sapien
tttctcataatctttcttcgtctcc

SEQ ID NO: 5258080 - DNA, 25 bp, Homo sapien
tcataatctttcttcgtctccaaaa

SEQ ID NO: 5258081 - DNA, 25 bp, Homo sapien
tctcataatctttcttcgtctccaa

SEQ ID NO: 5258082 - DNA, 25 bp, Homo sapien
tttgcaatcagccaggatcaggcag

SEQ ID NO: 5258083 - DNA, 25 bp, Homo sapien
cagccagcctcccagtctgcaaaca

SEQ ID NO: 5258084 - DNA, 25 bp, Homo sapien
tcagccaggatcaggcagccagcct

SEQ ID NO: 5258085 - DNA, 25 bp, Homo sapien
cagcctcccagtctgcaaacaggac

SEQ ID NO: 5258086 - DNA, 25 bp, Homo sapien
gagagtggccaacagcatcaaaacg

SEQ ID NO: 5258087 - DNA, 25 bp, Homo sapien
catcaaaacgctgtcgcaggacaca

SEQ ID NO: 5258088 - DNA, 25 bp, Homo sapien
aagctgaagctatgctggcctgtga

SEQ ID NO: 5258089 - DNA, 25 bp, Homo sapien
tggatggctacctctagactgaccc

SEQ ID NO: 5258090 - DNA, 25 bp, Homo sapien
cactgtaataaaatggttcttttga

SEQ ID NO: 5258091 - DNA, 25 bp, Homo sapien
tgtaataaaatggttcttttgatgg

SEQ ID NO: 5258092 - DNA, 25 bp, Homo sapien
tgatggtttttcaaaaacttcttca

SEQ ID NO: 5258093 - DNA, 25 bp, Homo sapien
ctaagaaacactgtaataaaatggt

SEQ ID NO: 5258094 - DNA, 25 bp, Homo sapien
caaagcctggtataatacaagccct

SEQ ID NO: 5258095 - DNA, 25 bp, Homo sapien
tactggccagaagaaaccgtacgga

SEQ ID NO: 5258096 - DNA, 25 bp, Homo sapien
caagtcctgttcctctagtgatagc

SEQ ID NO: 5258097 - DNA, 25 bp, Homo sapien
aaaacttacatagagcaaagcctgg

SEQ ID NO: 5258098 - DNA, 25 bp, Homo sapien
gctgcatggtctcagtcagtcgcat

SEQ ID NO: 5258099 - DNA, 25 bp, Homo sapien
gacagccagctgcatggtctcagtc

SEQ ID NO: 5258100 - DNA, 25 bp, Homo sapien
ccagctgcatggtctcagtcagtcg

SEQ ID NO: 5258101 - DNA, 25 bp, Homo sapien
acagccagctgcatggtctcagtca

SEQ ID NO: 5258102 - DNA, 25 bp, Homo sapien
cacaggtaactgaggctgctcaggg

SEQ ID NO: 5258103 - DNA, 25 bp, Homo sapien
cacatgctcgagaagaagatgctgt

SEQ ID NO: 5258104 - DNA, 25 bp, Homo sapien
tccatccacatgctcgagaagaaga

SEQ ID NO: 5258105 - DNA, 25 bp, Homo sapien
tgggccactgggtcgggcagcagtg

SEQ ID NO: 5258106 - DNA, 25 bp, Homo sapien
aaaacagcggtgcaagaaggccagt

SEQ ID NO: 5258107 - DNA, 25 bp, Homo sapien
tgaaatcacctgttcactgaagggt

SEQ ID NO: 5258108 - DNA, 25 bp, Homo sapien
tgaagggtgacagactatcccaccc

SEQ ID NO: 5258109 - DNA, 25 bp, Homo sapien
aacattctcatcaccagaggtgggt

SEQ ID NO: 5258110 - DNA, 25 bp, Homo sapien
acatgtagtctttaatccattttga

SEQ ID NO: 5258111 - DNA, 25 bp, Homo sapien
atgtagtctttaatccattttgaat

SEQ ID NO: 5258112 - DNA, 25 bp, Homo sapien
catgtagtctttaatccattttgaa

SEQ ID NO: 5258113 - DNA, 25 bp, Homo sapien
taacatgtagtctttaatccatttt

SEQ ID NO: 5258114 - DNA, 25 bp, Homo sapien
tccatgccgactcaaagagagatcg

SEQ ID NO: 5258115 - DNA, 25 bp, Homo sapien
gaagtgcgctcttgcacagggtctg

SEQ ID NO: 5258116 - DNA, 25 bp, Homo sapien
tctgcatggcatccacgtcttcctg

SEQ ID NO: 5258117 - DNA, 25 bp, Homo sapien
tctggatggacgtgcggagcttctc

SEQ ID NO: 5258118 - DNA, 25 bp, Homo sapien
atgttggccttcacagcacagatct

SEQ ID NO: 5258119 - DNA, 25 bp, Homo sapien
gaagtcaaattgatactatatacca

SEQ ID NO: 5258120 - DNA, 25 bp, Homo sapien
ctcagcctttaagggctccacggca

SEQ ID NO: 5258121 - DNA, 25 bp, Homo sapien
cagctccgcgagctcagcctttaag

SEQ ID NO: 5258122 - DNA, 25 bp, Homo sapien
tcacagaggtgtttggaagcgctat

SEQ ID NO: 5258123 - DNA, 25 bp, Homo sapien
gacaacgtccataaaggccatcctg

SEQ ID NO: 5258124 - DNA, 25 bp, Homo sapien
aacaaggtccattcagggtcatggc

SEQ ID NO: 5258125 - DNA, 25 bp, Homo sapien
ccaatgctttgcagagcgagaccct

SEQ ID NO: 5258126 - DNA, 25 bp, Homo sapien
gaactgcacaatccatacacttatg

SEQ ID NO: 5258127 - DNA, 25 bp, Homo sapien
tttccatgtgtgaatcgaactgcac

SEQ ID NO: 5258128 - DNA, 25 bp, Homo sapien
tccctgaactttcctcacgagaaaa

SEQ ID NO: 5258129 - DNA, 25 bp, Homo sapien
taacaatcacgtgtagagaccttct

SEQ ID NO: 5258130 - DNA, 25 bp, Homo sapien
tggagggcacagaactactgctgga

SEQ ID NO: 5258131 - DNA, 25 bp, Homo sapien
caacggtagtcattgctggagggca

SEQ ID NO: 5258132 - DNA, 25 bp, Homo sapien
tgcccctgaacggtgtcttctgtcc

SEQ ID NO: 5258133 - DNA, 25 bp, Homo sapien
gagaagtttccaacggtagtcattg

SEQ ID NO: 5258134 - DNA, 25 bp, Homo sapien
aaacacggcggaggcatttctcaat

SEQ ID NO: 5258135 - DNA, 25 bp, Homo sapien
ctatccaaacacggcggaggcattt

SEQ ID NO: 5258136 - DNA, 25 bp, Homo sapien
tccaaacacggcggaggcatttctc

SEQ ID NO: 5258137 - DNA, 25 bp, Homo sapien
caaacacggcggaggcatttctcaa

SEQ ID NO: 5258138 - DNA, 25 bp, Homo sapien
ccagatccagggaaccggctattta

SEQ ID NO: 5258139 - DNA, 25 bp, Homo sapien
tgctctggagcggaaggtttcactt

SEQ ID NO: 5258140 - DNA, 25 bp, Homo sapien
ggagaggaccgaaaccagagacagt

SEQ ID NO: 5258141 - DNA, 25 bp, Homo sapien
gagggctagagctttcaacggcacc

SEQ ID NO: 5258142 - DNA, 25 bp, Homo sapien
gcttcataaattttgtgctatcctt

SEQ ID NO: 5258143 - DNA, 25 bp, Homo sapien
cttcataaattttgtgctatccttg

SEQ ID NO: 5258144 - DNA, 25 bp, Homo sapien
agcaccggcccctgttgctaccctt

SEQ ID NO: 5258145 - DNA, 25 bp, Homo sapien
gagaagcaccggcccctgttgctac

SEQ ID NO: 5258146 - DNA, 25 bp, Homo sapien
gaagcaccggcccctgttgctaccc

SEQ ID NO: 5258147 - DNA, 25 bp, Homo sapien
gggagaagcaccggcccctgttgct

SEQ ID NO: 5258148 - DNA, 25 bp, Homo sapien
tgccggaggagctggcctatctctc

SEQ ID NO: 5258149 - DNA, 25 bp, Homo sapien
cctgaaccaatggataaaggcattc

SEQ ID NO: 5258150 - DNA, 25 bp, Homo sapien
aattgacaaactgccacaccagggc

SEQ ID NO: 5258151 - DNA, 25 bp, Homo sapien
gacagttaggttccacgaaagtggc

SEQ ID NO: 5258152 - DNA, 25 bp, Homo sapien
cgggagggtggattcggaggcgcgg

SEQ ID NO: 5258153 - DNA, 25 bp, Homo sapien
cacccacacggacggggcgtggctt

SEQ ID NO: 5258154 - DNA, 25 bp, Homo sapien
gggctggcttggtccccgcaggtgc

SEQ ID NO: 5258155 - DNA, 25 bp, Homo sapien
gcagcagtctgggaatttcggtccg

SEQ ID NO: 5258156 - DNA, 25 bp, Homo sapien
taagaagccaaggagtcggaaagcc

SEQ ID NO: 5258157 - DNA, 25 bp, Homo sapien
tgccggccgcgctgtggtttcctca

SEQ ID NO: 5258158 - DNA, 25 bp, Homo sapien
gccaaggagtcggaaagcccgttgc

SEQ ID NO: 5258159 - DNA, 25 bp, Homo sapien
tggtttcctcacataagaagccaag

SEQ ID NO: 5258160 - DNA, 25 bp, Homo sapien
cgcttccggcctcgctgtctagcag

SEQ ID NO: 5258161 - DNA, 25 bp, Homo sapien
accacttccggcgccgagggcaatg

SEQ ID NO: 5258162 - DNA, 25 bp, Homo sapien
tcgtccggcgggaacttcgcggcta

SEQ ID NO: 5258163 - DNA, 25 bp, Homo sapien
gaagcagaacgacccgcgaccactt

SEQ ID NO: 5258164 - DNA, 25 bp, Homo sapien
ccctgcccgcccgtctgggctgccg

SEQ ID NO: 5258165 - DNA, 25 bp, Homo sapien
gggacgaggacgcaggacctcggca

SEQ ID NO: 5258166 - DNA, 25 bp, Homo sapien
gacctcggcagggacgccggagcca

SEQ ID NO: 5258167 - DNA, 25 bp, Homo sapien
gcaggacctcggcagggacgccgga

SEQ ID NO: 5258168 - DNA, 25 bp, Homo sapien
aggacgcaggacctcggcagggacg

SEQ ID NO: 5258169 - DNA, 25 bp, Homo sapien
aggtggcccacgtcctacttttgcg

SEQ ID NO: 5258170 - DNA, 25 bp, Homo sapien
gcggttgggtcatatcaaatctgta

SEQ ID NO: 5258171 - DNA, 25 bp, Homo sapien
gctaacgggaaggaagttacgagca

SEQ ID NO: 5258172 - DNA, 25 bp, Homo sapien
tgatccgtgcgctcagagctggaag

SEQ ID NO: 5258173 - DNA, 25 bp, Homo sapien
cctactaggtaacagaacactcatc

SEQ ID NO: 5258174 - DNA, 25 bp, Homo sapien
gctgcccagaaagatctcagtataa

SEQ ID NO: 5258175 - DNA, 25 bp, Homo sapien
ctgtgctgagcaagtcttttggagc

SEQ ID NO: 5258176 - DNA, 25 bp, Homo sapien
ataaacaacctaataccggcagcct

SEQ ID NO: 5258177 - DNA, 25 bp, Homo sapien
ccagctacggggcaccttcaaatgc

SEQ ID NO: 5258178 - DNA, 25 bp, Homo sapien
aagggggtgccatctgcagcgagcc

SEQ ID NO: 5258179 - DNA, 25 bp, Homo sapien
gggtgccatctgcagcgagccttcc

SEQ ID NO: 5258180 - DNA, 25 bp, Homo sapien
ttccctctcccagctacggggcacc

SEQ ID NO: 5258181 - DNA, 25 bp, Homo sapien
gggctcctgttagctcatggaggcc

SEQ ID NO: 5258182 - DNA, 25 bp, Homo sapien
ctcctcttgcaataggctcctgagg

SEQ ID NO: 5258183 - DNA, 25 bp, Homo sapien
tcatggagcctcgtgtcctcacagt

SEQ ID NO: 5258184 - DNA, 25 bp, Homo sapien
ccgacgtaagctgcatcatggagcc

SEQ ID NO: 5258185 - DNA, 25 bp, Homo sapien
tgctccagcggatgatcacaaaatt

SEQ ID NO: 5258186 - DNA, 25 bp, Homo sapien
tcccatggcctgcagtggccgcgat

SEQ ID NO: 5258187 - DNA, 25 bp, Homo sapien
cagtggccgcgattcgcaacggtgt

SEQ ID NO: 5258188 - DNA, 25 bp, Homo sapien
cgtctgtccttttacgtccaccaga

SEQ ID NO: 5258189 - DNA, 25 bp, Homo sapien
ccagacagacttctcgttgatgcgg

SEQ ID NO: 5258190 - DNA, 25 bp, Homo sapien
gtactctctaggtgcccgttcacca

SEQ ID NO: 5258191 - DNA, 25 bp, Homo sapien
ggtccgcgccagcttcgagaaggat

SEQ ID NO: 5258192 - DNA, 25 bp, Homo sapien
tgctgcgatggtgccggcttccgtt

SEQ ID NO: 5258193 - DNA, 25 bp, Homo sapien
gcttcgagaaggatctgggtactct

SEQ ID NO: 5258194 - DNA, 25 bp, Homo sapien
tgatgagggccttcaggatgtctgc

SEQ ID NO: 5258195 - DNA, 25 bp, Homo sapien
cacccactctcaaagacattctagg

SEQ ID NO: 5258196 - DNA, 25 bp, Homo sapien
aacaccacccactctcaaagacatt

SEQ ID NO: 5258197 - DNA, 25 bp, Homo sapien
atgacaatgaagcttccactacaaa

SEQ ID NO: 5258198 - DNA, 25 bp, Homo sapien
atgaagcttccactacaaacacaaa

SEQ ID NO: 5258199 - DNA, 25 bp, Homo sapien
tttactatgacatatctaagcataa

SEQ ID NO: 5258200 - DNA, 25 bp, Homo sapien
ggaaagacatagcacagtactgatt

SEQ ID NO: 5258201 - DNA, 25 bp, Homo sapien
ggttgtcaaaccaataggcttcata

SEQ ID NO: 5258202 - DNA, 25 bp, Homo sapien
taacaagcaatgagagaacttattg

SEQ ID NO: 5258203 - DNA, 25 bp, Homo sapien
aattctaccagcaggctcacgaagg

SEQ ID NO: 5258204 - DNA, 25 bp, Homo sapien
cagttgaagtcagggttcgcgccag

SEQ ID NO: 5258205 - DNA, 25 bp, Homo sapien
ggttgacgtcaacatcagccccgta

SEQ ID NO: 5258206 - DNA, 25 bp, Homo sapien
gagcccctgtagaatccctgtgtgt

SEQ ID NO: 5258207 - DNA, 25 bp, Homo sapien
aatcaacccagcccacaagtcagag

SEQ ID NO: 5258208 - DNA, 25 bp, Homo sapien
tcaacccagcccacaagtcagagct

SEQ ID NO: 5258209 - DNA, 25 bp, Homo sapien
tcattcaatcaacccagcccacaag

SEQ ID NO: 5258210 - DNA, 25 bp, Homo sapien
attcaatcaacccagcccacaagtc

SEQ ID NO: 5258211 - DNA, 25 bp, Homo sapien
gcagcgaaggaatcagatgaagccg

SEQ ID NO: 5258212 - DNA, 25 bp, Homo sapien
gaatcagatgaagccggtgtttgcc

SEQ ID NO: 5258213 - DNA, 25 bp, Homo sapien
gaaacttctttatggggtctggcag

SEQ ID NO: 5258214 - DNA, 25 bp, Homo sapien
tgaagccggtgtttgccaagagctc

SEQ ID NO: 5258215 - DNA, 25 bp, Homo sapien
gcaatgacagtctacgaggacatct

SEQ ID NO: 5258216 - DNA, 25 bp, Homo sapien
caatgacccaaggactgttcagcgg

SEQ ID NO: 5258217 - DNA, 25 bp, Homo sapien
tacagggaaattagtaggcctccaa

SEQ ID NO: 5258218 - DNA, 25 bp, Homo sapien
cactggaatcaaccgcagcacttgg

SEQ ID NO: 5258219 - DNA, 25 bp, Homo sapien
gacaagcgcatgtgttaccccagga

SEQ ID NO: 5258220 - DNA, 25 bp, Homo sapien
tatgagacctccatcgcaaagagag

SEQ ID NO: 5258221 - DNA, 25 bp, Homo sapien
aaatcgtgacacctgatgagaggca

SEQ ID NO: 5258222 - DNA, 25 bp, Homo sapien
ggtgtgggcctcctaaaatcaatca

SEQ ID NO: 5258223 - DNA, 25 bp, Homo sapien
ctcactgctatcccctgcatagatt

SEQ ID NO: 5258224 - DNA, 25 bp, Homo sapien
tgaaaagctgagaccctagacacct

SEQ ID NO: 5258225 - DNA, 25 bp, Homo sapien
tactcagtagagcagacgcagagcg

SEQ ID NO: 5258226 - DNA, 25 bp, Homo sapien
tctggctgtagaacgcaataatggc

SEQ ID NO: 5258227 - DNA, 25 bp, Homo sapien
tgtgcaaaggagcatgacgcccatg

SEQ ID NO: 5258228 - DNA, 25 bp, Homo sapien
gggtcacacgttcatccagccctgt

SEQ ID NO: 5258229 - DNA, 25 bp, Homo sapien
tgcatagagcgctctgtccccagtg

SEQ ID NO: 5258230 - DNA, 25 bp, Homo sapien
gtccagcccggatctcccagggtca

SEQ ID NO: 5258231 - DNA, 25 bp, Homo sapien
cgctctgtccccagtgctatgctgt

SEQ ID NO: 5258232 - DNA, 25 bp, Homo sapien
agagccagaagacccacactagtgt

SEQ ID NO: 5258233 - DNA, 25 bp, Homo sapien
taaggtgcagtcctcaccgagaagg

SEQ ID NO: 5258234 - DNA, 25 bp, Homo sapien
tcccagtgcccaggttaaggtgcag

SEQ ID NO: 5258235 - DNA, 25 bp, Homo sapien
tgttggcacttcctaaaaccgcacg

SEQ ID NO: 5258236 - DNA, 25 bp, Homo sapien
gttcgggtttggagcgttcattcca

SEQ ID NO: 5258237 - DNA, 25 bp, Homo sapien
tggagcgttcattccacactgagag

SEQ ID NO: 5258238 - DNA, 25 bp, Homo sapien
tttggagcgttcattccacactgag

SEQ ID NO: 5258239 - DNA, 25 bp, Homo sapien
cgggtttggagcgttcattccacac

SEQ ID NO: 5258240 - DNA, 25 bp, Homo sapien
gagctggtggtgagcattctcttca

SEQ ID NO: 5258241 - DNA, 25 bp, Homo sapien
gagagactcgcctgcaatccaggca

SEQ ID NO: 5258242 - DNA, 25 bp, Homo sapien
tccaggcactgagcaacgacatgtc

SEQ ID NO: 5258243 - DNA, 25 bp, Homo sapien
caaacacgtgttgattaccaaagca

SEQ ID NO: 5258244 - DNA, 25 bp, Homo sapien
caacggtaccttgcttgaaagccac

SEQ ID NO: 5258245 - DNA, 25 bp, Homo sapien
aaaacaggtcccatgtaacaacagg

SEQ ID NO: 5258246 - DNA, 25 bp, Homo sapien
gccactacgtagaacaggctgtcag

SEQ ID NO: 5258247 - DNA, 25 bp, Homo sapien
gaataccaagatttcgcacgaccaa

SEQ ID NO: 5258248 - DNA, 25 bp, Homo sapien
ggatcaaacgtgatgctaaaccttt

SEQ ID NO: 5258249 - DNA, 25 bp, Homo sapien
taaacctttggagctgtccctgagg

SEQ ID NO: 5258250 - DNA, 25 bp, Homo sapien
tacagcgtcatcagacaccacactg

SEQ ID NO: 5258251 - DNA, 25 bp, Homo sapien
tagcctacagttacaggttttcaga

SEQ ID NO: 5258252 - DNA, 25 bp, Homo sapien
cccatcagttctcagctgattattg

SEQ ID NO: 5258253 - DNA, 25 bp, Homo sapien
agaaattgtcctcttgtgctagaat

SEQ ID NO: 5258254 - DNA, 25 bp, Homo sapien
tgcagaggctctgatgaactcccat

SEQ ID NO: 5258255 - DNA, 25 bp, Homo sapien
gaggctctgatgaactcccatcagt

SEQ ID NO: 5258256 - DNA, 25 bp, Homo sapien
gagctgagaacctcaagaaacaagg

SEQ ID NO: 5258257 - DNA, 25 bp, Homo sapien
ggaataagaatggagttcaaggtta

SEQ ID NO: 5258258 - DNA, 25 bp, Homo sapien
ggagttcaaggttatcaagtcagct

SEQ ID NO: 5258259 - DNA, 25 bp, Homo sapien
tcaagtcagctaagagctgagaacc

SEQ ID NO: 5258260 - DNA, 25 bp, Homo sapien
cagaagcacatataacgcctgaagg

SEQ ID NO: 5258261 - DNA, 25 bp, Homo sapien
tattagctatgcaaactccgccaac

SEQ ID NO: 5258262 - DNA, 25 bp, Homo sapien
cctgagtacagtttgggtcccacta

SEQ ID NO: 5258263 - DNA, 25 bp, Homo sapien
tatcattgctcaagtcgccagaagc

SEQ ID NO: 5258264 - DNA, 25 bp, Homo sapien
gaggctgctgtaccccaaaatggga

SEQ ID NO: 5258265 - DNA, 25 bp, Homo sapien
caggcagcagctagtgcagaggctg

SEQ ID NO: 5258266 - DNA, 25 bp, Homo sapien
caaagtgtgagaggctgaccggcca

SEQ ID NO: 5258267 - DNA, 25 bp, Homo sapien
aggggggccacagccgaagaggagg

SEQ ID NO: 5258268 - DNA, 25 bp, Homo sapien
gtgtctgcacatgtcactggtcaga

SEQ ID NO: 5258269 - DNA, 25 bp, Homo sapien
tcagccccgagtaattacagacatg

SEQ ID NO: 5258270 - DNA, 25 bp, Homo sapien
acgaccccgcagtagatcctcatta

SEQ ID NO: 5258271 - DNA, 25 bp, Homo sapien
atgtcactggtcagactcccacgac

SEQ ID NO: 5258272 - DNA, 25 bp, Homo sapien
ttggccaatcttgttccatgaccgg

SEQ ID NO: 5258273 - DNA, 25 bp, Homo sapien
aatcttgttccatgaccggccacat

SEQ ID NO: 5258274 - DNA, 25 bp, Homo sapien
gccaatcttgttccatgaccggcca

SEQ ID NO: 5258275 - DNA, 25 bp, Homo sapien
tttcttggccaatcttgttccatga

SEQ ID NO: 5258276 - DNA, 25 bp, Homo sapien
ctcctctacctgtcttcagtaggat

SEQ ID NO: 5258277 - DNA, 25 bp, Homo sapien
taggatagcacaaagatcacaaagg

SEQ ID NO: 5258278 - DNA, 25 bp, Homo sapien
aatctgcacatacattggtgttcac

SEQ ID NO: 5258279 - DNA, 25 bp, Homo sapien
tctacctgtcttcagtaggatagca

SEQ ID NO: 5258280 - DNA, 25 bp, Homo sapien
ctgcaccaggtgtcttgaatcagcc

SEQ ID NO: 5258281 - DNA, 25 bp, Homo sapien
gctgaagtgtaagcactgcaccagg

SEQ ID NO: 5258282 - DNA, 25 bp, Homo sapien
gaatcatcgctgaggtgtgagcact

SEQ ID NO: 5258283 - DNA, 25 bp, Homo sapien
tcatgaggtgtcttggatcgtcgct

SEQ ID NO: 5258284 - DNA, 25 bp, Homo sapien
tggacagaggaccaggtctctcccc

SEQ ID NO: 5258285 - DNA, 25 bp, Homo sapien
cttggacagaggaccaggtctctcc

SEQ ID NO: 5258286 - DNA, 25 bp, Homo sapien
gaggaccaggtctctcccctttgtc

SEQ ID NO: 5258287 - DNA, 25 bp, Homo sapien
cctttgtccagaaagaagtccccat

SEQ ID NO: 5258288 - DNA, 25 bp, Homo sapien
cactgtagttaggagatgtgacctc

SEQ ID NO: 5258289 - DNA, 25 bp, Homo sapien
gaatgtattgcggatccagggacac

SEQ ID NO: 5258290 - DNA, 25 bp, Homo sapien
tatttgcatactcgagaccctgatg

SEQ ID NO: 5258291 - DNA, 25 bp, Homo sapien
taagttcccaggaagcgagtcttct

SEQ ID NO: 5258292 - DNA, 25 bp, Homo sapien
tctcagtatagtccaagctacatct

SEQ ID NO: 5258293 - DNA, 25 bp, Homo sapien
tgttatctgtagtccttacttctgc

SEQ ID NO: 5258294 - DNA, 25 bp, Homo sapien
tcagctctcaggcttcatttatcaa

SEQ ID NO: 5258295 - DNA, 25 bp, Homo sapien
ttatccaaggctagtcttatgaggg

SEQ ID NO: 5258296 - DNA, 25 bp, Homo sapien
gcttgtctcaggatcgtggtgtgca

SEQ ID NO: 5258297 - DNA, 25 bp, Homo sapien
gctaatggacgacctgaactgtgcc

SEQ ID NO: 5258298 - DNA, 25 bp, Homo sapien
tgacaccgcccctaaagatacagag

SEQ ID NO: 5258299 - DNA, 25 bp, Homo sapien
gatacagagcttcgccagtcagcaa

SEQ ID NO: 5258300 - DNA, 25 bp, Homo sapien
gcaggggcaggacaccagccctgga

SEQ ID NO: 5258301 - DNA, 25 bp, Homo sapien
gagtggggtgcaggggcaggacacc

SEQ ID NO: 5258302 - DNA, 25 bp, Homo sapien
gtggggtgcaggggcaggacaccag

SEQ ID NO: 5258303 - DNA, 25 bp, Homo sapien
aggggcaggacaccagccctggagc

SEQ ID NO: 5258304 - DNA, 25 bp, Homo sapien
catcatccacaacactttttccgtt

SEQ ID NO: 5258305 - DNA, 25 bp, Homo sapien
cttccctggaggaccggccatggga

SEQ ID NO: 5258306 - DNA, 25 bp, Homo sapien
agaaaacgaggttggctcagccgga

SEQ ID NO: 5258307 - DNA, 25 bp, Homo sapien
ttttccgttgtgtgttaatagctct

SEQ ID NO: 5258308 - DNA, 25 bp, Homo sapien
ttagtcttggtccaggccaagcagg

SEQ ID NO: 5258309 - DNA, 25 bp, Homo sapien
agtcttggtccaggccaagcaggga

SEQ ID NO: 5258310 - DNA, 25 bp, Homo sapien
cagggactggacctgcttggtgagg

SEQ ID NO: 5258311 - DNA, 25 bp, Homo sapien
gagaggactgtgacctctccatcca

SEQ ID NO: 5258312 - DNA, 25 bp, Homo sapien
ggcagcagccgagctccgggacctt

SEQ ID NO: 5258313 - DNA, 25 bp, Homo sapien
gctccgggaccttctgcaaatgcgt

SEQ ID NO: 5258314 - DNA, 25 bp, Homo sapien
cctggaacttttagatcaaaggaca

SEQ ID NO: 5258315 - DNA, 25 bp, Homo sapien
tgcgtccctgtctggactccataac

SEQ ID NO: 5258316 - DNA, 25 bp, Homo sapien
tcatccgtggagtcatttgcagacg

SEQ ID NO: 5258317 - DNA, 25 bp, Homo sapien
tgtgagggtgcatgtcatccgtgga

SEQ ID NO: 5258318 - DNA, 25 bp, Homo sapien
catccgtggagtcatttgcagacgt

SEQ ID NO: 5258319 - DNA, 25 bp, Homo sapien
gagggtgcatgtcatccgtggagtc

SEQ ID NO: 5258320 - DNA, 25 bp, Homo sapien
aatgcagtgtgatgggccgtcctct

SEQ ID NO: 5258321 - DNA, 25 bp, Homo sapien
gggatgctgtcttcccgagaatgca

SEQ ID NO: 5258322 - DNA, 25 bp, Homo sapien
tgggcttccagcacccggaaaacca

SEQ ID NO: 5258323 - DNA, 25 bp, Homo sapien
ccggaaaaccagaccttgccagcag

SEQ ID NO: 5258324 - DNA, 25 bp, Homo sapien
ttggccaccggggtgcaagcaggca

SEQ ID NO: 5258325 - DNA, 25 bp, Homo sapien
cctgttcgtgctggactgggttgtg

SEQ ID NO: 5258326 - DNA, 25 bp, Homo sapien
ctgttcgtgctggactgggttgtgt

SEQ ID NO: 5258327 - DNA, 25 bp, Homo sapien
gttcgtgctggactgggttgtgtga

SEQ ID NO: 5258328 - DNA, 25 bp, Homo sapien
aagcaaatctaaatgcagtctgtgc

SEQ ID NO: 5258329 - DNA, 25 bp, Homo sapien
tgccatgactccactcatccgtgga

SEQ ID NO: 5258330 - DNA, 25 bp, Homo sapien
tgctgggctgtactgcttgtccacg

SEQ ID NO: 5258331 - DNA, 25 bp, Homo sapien
tcatccgtggaggagtacatcttcc

SEQ ID NO: 5258332 - DNA, 25 bp, Homo sapien
gtgtttccagactattcttgaagac

SEQ ID NO: 5258333 - DNA, 25 bp, Homo sapien
tctccctttacatgaattttattct

SEQ ID NO: 5258334 - DNA, 25 bp, Homo sapien
cttgaagactgaccactgtggacat

SEQ ID NO: 5258335 - DNA, 25 bp, Homo sapien
ctgtggacatctttgctcatgaagt

SEQ ID NO: 5258336 - DNA, 25 bp, Homo sapien
agctctagggcaggggcctggctac

SEQ ID NO: 5258337 - DNA, 25 bp, Homo sapien
cgaggttcagctctagggcaggggc

SEQ ID NO: 5258338 - DNA, 25 bp, Homo sapien
aggttcagctctagggcaggggcct

SEQ ID NO: 5258339 - DNA, 25 bp, Homo sapien
ctctagggcaggggcctggctacca

SEQ ID NO: 5258340 - DNA, 25 bp, Homo sapien
cctgctcgtcttggcggggagaccc

SEQ ID NO: 5258341 - DNA, 25 bp, Homo sapien
gggagaccctcgtggcttttcagtc

SEQ ID NO: 5258342 - DNA, 25 bp, Homo sapien
ctcgtcttggcggggagaccctcgt

SEQ ID NO: 5258343 - DNA, 25 bp, Homo sapien
cagcctgctcgtcttggcggggaga

SEQ ID NO: 5258344 - DNA, 25 bp, Homo sapien
cagaggctgccgcacttccacctgg

SEQ ID NO: 5258345 - DNA, 25 bp, Homo sapien
agaggctgccgcacttccacctgga

SEQ ID NO: 5258346 - DNA, 25 bp, Homo sapien
cacttccacctggacaccccgcgct

SEQ ID NO: 5258347 - DNA, 25 bp, Homo sapien
ttccacctggacaccccgcgctggc

SEQ ID NO: 5258348 - DNA, 25 bp, Homo sapien
gggctcggagaatcgggcttgttct

SEQ ID NO: 5258349 - DNA, 25 bp, Homo sapien
tcatgttcgaaaggattcacatgga

SEQ ID NO: 5258350 - DNA, 25 bp, Homo sapien
tcgggcttgttctgcggctgctgca

SEQ ID NO: 5258351 - DNA, 25 bp, Homo sapien
aaggattcacatggacggctgacgg

SEQ ID NO: 5258352 - DNA, 25 bp, Homo sapien
gctggatcttagagggcttccccga

SEQ ID NO: 5258353 - DNA, 25 bp, Homo sapien
tcttagagggcttccccgattgccc

SEQ ID NO: 5258354 - DNA, 25 bp, Homo sapien
gatcttagagggcttccccgattgc

SEQ ID NO: 5258355 - DNA, 25 bp, Homo sapien
taaggggggagtatagaggtagagc

SEQ ID NO: 5258356 - DNA, 25 bp, Homo sapien
aacaacttcctgtcaataaatgtga

SEQ ID NO: 5258357 - DNA, 25 bp, Homo sapien
aaagtttggacccatcttcaaagtg

SEQ ID NO: 5258358 - DNA, 25 bp, Homo sapien
caacttcctgtcaataaatgtgaac

SEQ ID NO: 5258359 - DNA, 25 bp, Homo sapien
gatgagttatgctgaaagtatgttc

SEQ ID NO: 5258360 - DNA, 25 bp, Homo sapien
atttgggggagctctgggggctgca

SEQ ID NO: 5258361 - DNA, 25 bp, Homo sapien
catttgggggagctctgggggctgc

SEQ ID NO: 5258362 - DNA, 25 bp, Homo sapien
tttgggggagctctgggggctgcat

SEQ ID NO: 5258363 - DNA, 25 bp, Homo sapien
ctggagacgcaagagaactaccctg

SEQ ID NO: 5258364 - DNA, 25 bp, Homo sapien
ggagacgcaagagaactaccctgtc

SEQ ID NO: 5258365 - DNA, 25 bp, Homo sapien
agacgcaagagaactaccctgtcct

SEQ ID NO: 5258366 - DNA, 25 bp, Homo sapien
tggagacgcaagagaactaccctgt

SEQ ID NO: 5258367 - DNA, 25 bp, Homo sapien
tcgaagactcatccacagctgtgac

SEQ ID NO: 5258368 - DNA, 25 bp, Homo sapien
gcatttcccagggtcgaagactcat

SEQ ID NO: 5258369 - DNA, 25 bp, Homo sapien
ttgcctgtccagacatctgacttct

SEQ ID NO: 5258370 - DNA, 25 bp, Homo sapien
ggactgcgggggcactcaaatgcat

SEQ ID NO: 5258371 - DNA, 25 bp, Homo sapien
gaaggagaagaacatagccagaaag

SEQ ID NO: 5258372 - DNA, 25 bp, Homo sapien
ttacccggttccactgctgcttgga

SEQ ID NO: 5258373 - DNA, 25 bp, Homo sapien
gttccactgctgcttggaatgtgat

SEQ ID NO: 5258374 - DNA, 25 bp, Homo sapien
cccggttccactgctgcttggaatg

SEQ ID NO: 5258375 - DNA, 25 bp, Homo sapien
cggttccactgctgcttggaatgtg

SEQ ID NO: 5258376 - DNA, 25 bp, Homo sapien
ctacttgaagaactgaggaaggcag

SEQ ID NO: 5258377 - DNA, 25 bp, Homo sapien
tgaagaactgaggaaggcaggtgtg

SEQ ID NO: 5258378 - DNA, 25 bp, Homo sapien
cttgaagaactgaggaaggcaggtg

SEQ ID NO: 5258379 - DNA, 25 bp, Homo sapien
tacttgaagaactgaggaaggcagg

SEQ ID NO: 5258380 - DNA, 25 bp, Homo sapien
cacagagtgtagccgttacacctgc

SEQ ID NO: 5258381 - DNA, 25 bp, Homo sapien
acagagtgtagccgttacacctgca

SEQ ID NO: 5258382 - DNA, 25 bp, Homo sapien
tcacagagtgtagccgttacacctg

SEQ ID NO: 5258383 - DNA, 25 bp, Homo sapien
cagagtgtagccgttacacctgcag

SEQ ID NO: 5258384 - DNA, 25 bp, Homo sapien
taaggccgttaaggatgtagcaggc

SEQ ID NO: 5258385 - DNA, 25 bp, Homo sapien
tggaaccctctgcatacttcaggct

SEQ ID NO: 5258386 - DNA, 25 bp, Homo sapien
aggctgtcaggcttactacctggca

SEQ ID NO: 5258387 - DNA, 25 bp, Homo sapien
tgtagcaggcatgtagtggaaccct

SEQ ID NO: 5258388 - DNA, 25 bp, Homo sapien
aattgtcgatcatggtgttgtggaa

SEQ ID NO: 5258389 - DNA, 25 bp, Homo sapien
tagataggcgatgtactcaaactgg

SEQ ID NO: 5258390 - DNA, 25 bp, Homo sapien
cattttgaaattgtcgatcatggtg

SEQ ID NO: 5258391 - DNA, 25 bp, Homo sapien
gataggcgatgtactcaaactgggc

SEQ ID NO: 5258392 - DNA, 25 bp, Homo sapien
gaccaacttgaccatttccagcagg

SEQ ID NO: 5258393 - DNA, 25 bp, Homo sapien
ggaccacaggaccaacttgaccatt

SEQ ID NO: 5258394 - DNA, 25 bp, Homo sapien
cagaggcagcccgtggcagcgtgga

SEQ ID NO: 5258395 - DNA, 25 bp, Homo sapien
cgtggcagcgtggaccacaggacca

SEQ ID NO: 5258396 - DNA, 25 bp, Homo sapien
cacagtcacagaggcagcccatggc

SEQ ID NO: 5258397 - DNA, 25 bp, Homo sapien
cagtcacagaggcagcccatggcag

SEQ ID NO: 5258398 - DNA, 25 bp, Homo sapien
cccatggcagcatgggccgggacca

SEQ ID NO: 5258399 - DNA, 25 bp, Homo sapien
gcatgggccgggaccagtgacacac

SEQ ID NO: 5258400 - DNA, 25 bp, Homo sapien
gaagagggacagtgctagaaacaag

SEQ ID NO: 5258401 - DNA, 25 bp, Homo sapien
ctgatggccataggcccctgctgcc

SEQ ID NO: 5258402 - DNA, 25 bp, Homo sapien
tagaaacaagctgctcaaacctgaa

SEQ ID NO: 5258403 - DNA, 25 bp, Homo sapien
tgggtggaaagcaatcctgatggcc

SEQ ID NO: 5258404 - DNA, 25 bp, Homo sapien
tggcccttgtatgtttctggatctg

SEQ ID NO: 5258405 - DNA, 25 bp, Homo sapien
tttgccaatccacccatgacatttc

SEQ ID NO: 5258406 - DNA, 25 bp, Homo sapien
ggaaagtctgtcctcattggccctt

SEQ ID NO: 5258407 - DNA, 25 bp, Homo sapien
ggatctgtcctgattggctcttgcg

SEQ ID NO: 5258408 - DNA, 25 bp, Homo sapien
tcacatccagtcgtgcgggaccagg

SEQ ID NO: 5258409 - DNA, 25 bp, Homo sapien
aggacagaagcccctgtcagccagc

SEQ ID NO: 5258410 - DNA, 25 bp, Homo sapien
gctggaggtagagcctccctgaggg

SEQ ID NO: 5258411 - DNA, 25 bp, Homo sapien
agaagcccctgtcagccagctgggc

SEQ ID NO: 5258412 - DNA, 25 bp, Homo sapien
actgaagtagaatctagttgccttt

SEQ ID NO: 5258413 - DNA, 25 bp, Homo sapien
gaagtagaatctagttgcctttcct

SEQ ID NO: 5258414 - DNA, 25 bp, Homo sapien
agtagaatctagttgcctttcctta

SEQ ID NO: 5258415 - DNA, 25 bp, Homo sapien
tagaatctagttgcctttccttagc

SEQ ID NO: 5258416 - DNA, 25 bp, Homo sapien
cagaaagtgttcatcaggagataga

SEQ ID NO: 5258417 - DNA, 25 bp, Homo sapien
aagtgttcatcaggagatagatggg

SEQ ID NO: 5258418 - DNA, 25 bp, Homo sapien
agtgtaacagaaagtgttcatcagg

SEQ ID NO: 5258419 - DNA, 25 bp, Homo sapien
taacagaaagtgttcatcaggagat

SEQ ID NO: 5258420 - DNA, 25 bp, Homo sapien
gctgtaactccatgggtttgggcaa

SEQ ID NO: 5258421 - DNA, 25 bp, Homo sapien
tctcctcggctactaaatggctcct

SEQ ID NO: 5258422 - DNA, 25 bp, Homo sapien
gagatacttgatacagggctgtaac

SEQ ID NO: 5258423 - DNA, 25 bp, Homo sapien
cacactcggctcttctttgagacaa

SEQ ID NO: 5258424 - DNA, 25 bp, Homo sapien
tccaggattcgttgcagaacagagc

SEQ ID NO: 5258425 - DNA, 25 bp, Homo sapien
tgccgtactgtgtgggccatctaag

SEQ ID NO: 5258426 - DNA, 25 bp, Homo sapien
gcacacacaggtcaacttaagagga

SEQ ID NO: 5258427 - DNA, 25 bp, Homo sapien
gccatctaaggcaactagtgacagt

SEQ ID NO: 5258428 - DNA, 25 bp, Homo sapien
tttatttgtctgagcgaggaaaatg

SEQ ID NO: 5258429 - DNA, 25 bp, Homo sapien
tgagactttatttgtctgagcgagg

SEQ ID NO: 5258430 - DNA, 25 bp, Homo sapien
aaagtttgagactttatttgtctga

SEQ ID NO: 5258431 - DNA, 25 bp, Homo sapien
ttatttgtctgagcgaggaaaatgc

SEQ ID NO: 5258432 - DNA, 25 bp, Homo sapien
ttttcccagtggtcaggtgatgcct

SEQ ID NO: 5258433 - DNA, 25 bp, Homo sapien
ccttaaaggccaggctcaaagtgtg

SEQ ID NO: 5258434 - DNA, 25 bp, Homo sapien
gaaccagccaattttcacagcaggt

SEQ ID NO: 5258435 - DNA, 25 bp, Homo sapien
tcctactaacagtgggaagcttcaa

SEQ ID NO: 5258436 - DNA, 25 bp, Homo sapien
acagtgactcctggccaccaccgtc

SEQ ID NO: 5258437 - DNA, 25 bp, Homo sapien
agacctagacgacgcatccgatcag

SEQ ID NO: 5258438 - DNA, 25 bp, Homo sapien
cgacgcatccgatcagacaagcttg

SEQ ID NO: 5258439 - DNA, 25 bp, Homo sapien
tctcaccacgccgtcaccacagaga

SEQ ID NO: 5258440 - DNA, 25 bp, Homo sapien
cacagagacctagacgacgcatccg

SEQ ID NO: 5258441 - DNA, 25 bp, Homo sapien
tcaacctcctcctatccattggaat

SEQ ID NO: 5258442 - DNA, 25 bp, Homo sapien
attgggatagggcagcacggctaca

SEQ ID NO: 5258443 - DNA, 25 bp, Homo sapien
ggctacattaatgactcaacctcct

SEQ ID NO: 5258444 - DNA, 25 bp, Homo sapien
ggcagcacggctacattaatgactc

SEQ ID NO: 5258445 - DNA, 25 bp, Homo sapien
tggtgaccctgtgcttgtaacccat

SEQ ID NO: 5258446 - DNA, 25 bp, Homo sapien
ttggtgaccctgtgcttgtaaccca

SEQ ID NO: 5258447 - DNA, 25 bp, Homo sapien
tttggtgaccctgtgcttgtaaccc

SEQ ID NO: 5258448 - DNA, 25 bp, Homo sapien
agaaatcgttatcctcgtctgagtg

SEQ ID NO: 5258449 - DNA, 25 bp, Homo sapien
tcgttatcctcgtctgagtgttgag

SEQ ID NO: 5258450 - DNA, 25 bp, Homo sapien
ctgggttgcacaatagaaatcgtta

SEQ ID NO: 5258451 - DNA, 25 bp, Homo sapien
tgcacaatagaaatcgttatcctcg

SEQ ID NO: 5258452 - DNA, 25 bp, Homo sapien
ctcccagtgcacctcttctgtgtaa

SEQ ID NO: 5258453 - DNA, 25 bp, Homo sapien
cccagtgcacctcttctgtgtaata

SEQ ID NO: 5258454 - DNA, 25 bp, Homo sapien
tcccagtgcacctcttctgtgtaat

SEQ ID NO: 5258455 - DNA, 25 bp, Homo sapien
catgtgtttggtcgatacagacgca

SEQ ID NO: 5258456 - DNA, 25 bp, Homo sapien
gaatagtcgtgcagtgtctgagcct

SEQ ID NO: 5258457 - DNA, 25 bp, Homo sapien
tctcttctgagttggaggagccgcc

SEQ ID NO: 5258458 - DNA, 25 bp, Homo sapien
tatttgccccttgatggtctagtgc

SEQ ID NO: 5258459 - DNA, 25 bp, Homo sapien
ctgctgccatggaactcttgctgat

SEQ ID NO: 5258460 - DNA, 25 bp, Homo sapien
caagctgctgccatggaactcttgc

SEQ ID NO: 5258461 - DNA, 25 bp, Homo sapien
ctgccatggaactcttgctgatgga

SEQ ID NO: 5258462 - DNA, 25 bp, Homo sapien
ctccaagctgctgccatggaactct

SEQ ID NO: 5258463 - DNA, 25 bp, Homo sapien
gcaggcccaggcccgggagtgcctt

SEQ ID NO: 5258464 - DNA, 25 bp, Homo sapien
aggcccgggagtgccttcctccaca

SEQ ID NO: 5258465 - DNA, 25 bp, Homo sapien
gcccaggcccgggagtgccttcctc

SEQ ID NO: 5258466 - DNA, 25 bp, Homo sapien
ggcaggcccaggcccgggagtgcct

SEQ ID NO: 5258467 - DNA, 25 bp, Homo sapien
agatggtggtatgggggtcgttgaa

SEQ ID NO: 5258468 - DNA, 25 bp, Homo sapien
gagccctcttgtgtgctaaactggg

SEQ ID NO: 5258469 - DNA, 25 bp, Homo sapien
aggagccctcttgtgtgctaaactg

SEQ ID NO: 5258470 - DNA, 25 bp, Homo sapien
ttagatggtggtatgggggtcgttg

SEQ ID NO: 5258471 - DNA, 25 bp, Homo sapien
ctggagagtgccgtctgtgcagggc

SEQ ID NO: 5258472 - DNA, 25 bp, Homo sapien
gtctgtgcagggcattccggcatac

SEQ ID NO: 5258473 - DNA, 25 bp, Homo sapien
gagtgccgtctgtgcagggcattcc

SEQ ID NO: 5258474 - DNA, 25 bp, Homo sapien
ggcattccggcatacccggtgtttg

SEQ ID NO: 5258475 - DNA, 25 bp, Homo sapien
ggaggagctctctggtgggcagtgg

SEQ ID NO: 5258476 - DNA, 25 bp, Homo sapien
gtgggcagtggtaccagcagaggct

SEQ ID NO: 5258477 - DNA, 25 bp, Homo sapien
cagtgtggccttggaggagctctct

SEQ ID NO: 5258478 - DNA, 25 bp, Homo sapien
tcacagtgtggccttggaggagctc

SEQ ID NO: 5258479 - DNA, 25 bp, Homo sapien
ttgtgggaaagcgtggggctggggc

SEQ ID NO: 5258480 - DNA, 25 bp, Homo sapien
cttgtgggaaagcgtggggctgggg

SEQ ID NO: 5258481 - DNA, 25 bp, Homo sapien
acaactcgccgagccatcgtgcaga

SEQ ID NO: 5258482 - DNA, 25 bp, Homo sapien
cagatttacggagtgatgtctgggt

SEQ ID NO: 5258483 - DNA, 25 bp, Homo sapien
ggtgcggcagatgtccacgccgtat

SEQ ID NO: 5258484 - DNA, 25 bp, Homo sapien
tgtccacgccgtatgaccagagcaa

SEQ ID NO: 5258485 - DNA, 25 bp, Homo sapien
gatacaatttgctgtagaccagaaa

SEQ ID NO: 5258486 - DNA, 25 bp, Homo sapien
cgttattctgttccccttggcaaca

SEQ ID NO: 5258487 - DNA, 25 bp, Homo sapien
cattcttaatacaacggaatgatag

SEQ ID NO: 5258488 - DNA, 25 bp, Homo sapien
tacaacggaatgatagtagatacaa

SEQ ID NO: 5258489 - DNA, 25 bp, Homo sapien
gatctgagcatgcaactggactttc

SEQ ID NO: 5258490 - DNA, 25 bp, Homo sapien
ttgactgccatctgctaagggaccc

SEQ ID NO: 5258491 - DNA, 25 bp, Homo sapien
tcagcactactctctagcggcaaga

SEQ ID NO: 5258492 - DNA, 25 bp, Homo sapien
gaggaaacgctgtcccctgatatgg

SEQ ID NO: 5258493 - DNA, 25 bp, Homo sapien
atgtggggcccacgagatgctcaga

SEQ ID NO: 5258494 - DNA, 25 bp, Homo sapien
gggcccacgagatgctcagagcact

SEQ ID NO: 5258495 - DNA, 25 bp, Homo sapien
cactcaacagaggacgggggtctga

SEQ ID NO: 5258496 - DNA, 25 bp, Homo sapien
cacgagatgctcagagcactcaaca

SEQ ID NO: 5258497 - DNA, 25 bp, Homo sapien
aaacagaggcacaatcaatgttcac

SEQ ID NO: 5258498 - DNA, 25 bp, Homo sapien
gaaacagaggcacaatcaatgttca

SEQ ID NO: 5258499 - DNA, 25 bp, Homo sapien
aaacagaggagtattcaatgtgtac

SEQ ID NO: 5258500 - DNA, 25 bp, Homo sapien
tgaaacagaggagtattcaatgtgt

SEQ ID NO: 5258501 - DNA, 25 bp, Homo sapien
gaaacagaggagtattcaatgtgta

SEQ ID NO: 5258502 - DNA, 25 bp, Homo sapien
tgaaacagaggagcaatcaatgtgc

SEQ ID NO: 5258503 - DNA, 25 bp, Homo sapien
gaaacagaggagcaatcaatgtgca

SEQ ID NO: 5258504 - DNA, 25 bp, Homo sapien
aaacagaggagcaatcaatgtgcac

SEQ ID NO: 5258505 - DNA, 25 bp, Homo sapien
aaacagaggagtaatcgatgtgtac

SEQ ID NO: 5258506 - DNA, 25 bp, Homo sapien
gaaacagaggagtaatcgatgtgta

SEQ ID NO: 5258507 - DNA, 25 bp, Homo sapien
tgaaacagaggagtaatcgatgtgt

SEQ ID NO: 5258508 - DNA, 25 bp, Homo sapien
aaacagaagagtaatcgatgtgtac

SEQ ID NO: 5258509 - DNA, 25 bp, Homo sapien
tgaaacagaagagtaatcgatgtgt

SEQ ID NO: 5258510 - DNA, 25 bp, Homo sapien
gaaacagaagagtaatcgatgtgta

SEQ ID NO: 5258511 - DNA, 25 bp, Homo sapien
aaacagaggagtaatcactgtgtac

SEQ ID NO: 5258512 - DNA, 25 bp, Homo sapien
tgaaacagaggagtaatcactgtgt

SEQ ID NO: 5258513 - DNA, 25 bp, Homo sapien
gaaacagaggagtaatcactgtgta

SEQ ID NO: 5258514 - DNA, 25 bp, Homo sapien
tgaaataggggagtaatcaatgtgc

SEQ ID NO: 5258515 - DNA, 25 bp, Homo sapien
gaaataggggagtaatcaatgtgca

SEQ ID NO: 5258516 - DNA, 25 bp, Homo sapien
aaataggggagtaatcaatgtgcac

SEQ ID NO: 5258517 - DNA, 25 bp, Homo sapien
ccaacagaggagtaatcaatgtgta

SEQ ID NO: 5258518 - DNA, 25 bp, Homo sapien
tccaacagaggagtaatcaatgtgt

SEQ ID NO: 5258519 - DNA, 25 bp, Homo sapien
caacagaggagtaatcaatgtgtac

SEQ ID NO: 5258520 - DNA, 25 bp, Homo sapien
aaacagaggcgcaatcaatgtgtac

SEQ ID NO: 5258521 - DNA, 25 bp, Homo sapien
tgaaacagaggcgcaatcaatgtgt

SEQ ID NO: 5258522 - DNA, 25 bp, Homo sapien
gaaacagaggcgcaatcaatgtgta

SEQ ID NO: 5258523 - DNA, 25 bp, Homo sapien
tgtaacagacgagtaatcaatgtgt

SEQ ID NO: 5258524 - DNA, 25 bp, Homo sapien
taaaatacgggagtaatcaatgtgc

SEQ ID NO: 5258525 - DNA, 25 bp, Homo sapien
aaaatacgggagtaatcaatgtgca

SEQ ID NO: 5258526 - DNA, 25 bp, Homo sapien
aaatacgggagtaatcaatgtgcac

SEQ ID NO: 5258527 - DNA, 25 bp, Homo sapien
catagagaggagcaatcaatgagca

SEQ ID NO: 5258528 - DNA, 25 bp, Homo sapien
atagagaggagcaatcaatgagcac

SEQ ID NO: 5258529 - DNA, 25 bp, Homo sapien
tcatagagaggagcaatcaatgagc

SEQ ID NO: 5258530 - DNA, 25 bp, Homo sapien
agcccgtgtccccacccgctctgca

SEQ ID NO: 5258531 - DNA, 25 bp, Homo sapien
ggcggcagtggaccgggcagcgagg

SEQ ID NO: 5258532 - DNA, 25 bp, Homo sapien
tggctccctcgggatggcggcagtg

SEQ ID NO: 5258533 - DNA, 25 bp, Homo sapien
tccccacccgctctgcagggagagc

SEQ ID NO: 5258534 - DNA, 25 bp, Homo sapien
agtcaccggtgagatgaaccctttc

SEQ ID NO: 5258535 - DNA, 25 bp, Homo sapien
cctcgagggcctggcgggatcttac

SEQ ID NO: 5258536 - DNA, 25 bp, Homo sapien
tctcttctgcacaaagtcaccggtg

SEQ ID NO: 5258537 - DNA, 25 bp, Homo sapien
gtcctggcaggaaaccaccttggcc

SEQ ID NO: 5258538 - DNA, 25 bp, Homo sapien
tttggacaaaggatgcggtaagacc

SEQ ID NO: 5258539 - DNA, 25 bp, Homo sapien
cattctaatgaaccgaggctatagc

SEQ ID NO: 5258540 - DNA, 25 bp, Homo sapien
aagctttaaagcttggtcgtccaga

SEQ ID NO: 5258541 - DNA, 25 bp, Homo sapien
ggcttaagcagaacaacacatagag

SEQ ID NO: 5258542 - DNA, 25 bp, Homo sapien
gagttgtgcggttttcatcttcttc

SEQ ID NO: 5258543 - DNA, 25 bp, Homo sapien
ttggcagagttgtgcggttttcatc

SEQ ID NO: 5258544 - DNA, 25 bp, Homo sapien
cgtattccatgtctgtagatgtgtt

SEQ ID NO: 5258545 - DNA, 25 bp, Homo sapien
ttaagttgcaaatgcttaaaattct

SEQ ID NO: 5258546 - DNA, 25 bp, Homo sapien
tgcgcctgggtcctacatctacaaa

SEQ ID NO: 5258547 - DNA, 25 bp, Homo sapien
ttctgagcggctgagatgagccagc

SEQ ID NO: 5258548 - DNA, 25 bp, Homo sapien
caaaaccgtgttttccagctgggag

SEQ ID NO: 5258549 - DNA, 25 bp, Homo sapien
agccttgctgcggtgttggaagcca

SEQ ID NO: 5258550 - DNA, 25 bp, Homo sapien
acctcatgggctatgatattaccac

SEQ ID NO: 5258551 - DNA, 25 bp, Homo sapien
atgggctatgatattaccactgtgc

SEQ ID NO: 5258552 - DNA, 25 bp, Homo sapien
tcatgggctatgatattaccactgt

SEQ ID NO: 5258553 - DNA, 25 bp, Homo sapien
cctcatgggctatgatattaccact

SEQ ID NO: 5258554 - DNA, 25 bp, Homo sapien
gatgggtgtgtcacctgtgatcttc

SEQ ID NO: 5258555 - DNA, 25 bp, Homo sapien
ggagaaattcatgaaccggtatcaa

SEQ ID NO: 5258556 - DNA, 25 bp, Homo sapien
gaaccggtatcaaaggatgagagtg

SEQ ID NO: 5258557 - DNA, 25 bp, Homo sapien
catgaaccggtatcaaaggatgaga

SEQ ID NO: 5258558 - DNA, 25 bp, Homo sapien
gaaattcatgaaccggtatcaaagg

SEQ ID NO: 5258559 - DNA, 25 bp, Homo sapien
tcagctccacaaacaattctatcat

SEQ ID NO: 5258560 - DNA, 25 bp, Homo sapien
ctgctcattcagctccacaaacaat

SEQ ID NO: 5258561 - DNA, 25 bp, Homo sapien
ctagagcctgctcattcagctccac

SEQ ID NO: 5258562 - DNA, 25 bp, Homo sapien
agcctgctcattcagctccacaaac

SEQ ID NO: 5258563 - DNA, 25 bp, Homo sapien
ggatgtgatgagtcagcaactccag

SEQ ID NO: 5258564 - DNA, 25 bp, Homo sapien
atgtgatgagtcagcaactccagct

SEQ ID NO: 5258565 - DNA, 25 bp, Homo sapien
gatgtgatgagtcagcaactccagc

SEQ ID NO: 5258566 - DNA, 25 bp, Homo sapien
caggagcggctccttgattccaggt

SEQ ID NO: 5258567 - DNA, 25 bp, Homo sapien
gacgtatagcaggagcgctgcagct

SEQ ID NO: 5258568 - DNA, 25 bp, Homo sapien
gcaccagatgtccagaggtgtggtc

SEQ ID NO: 5258569 - DNA, 25 bp, Homo sapien
tggtctgcacatccggttcctggag

SEQ ID NO: 5258570 - DNA, 25 bp, Homo sapien
tgaaagtaagaattccaggctgact

SEQ ID NO: 5258571 - DNA, 25 bp, Homo sapien
cactgcagtcacttagcttgtaaaa

SEQ ID NO: 5258572 - DNA, 25 bp, Homo sapien
aaggaaaagaatagcggcgtgaaag

SEQ ID NO: 5258573 - DNA, 25 bp, Homo sapien
taaatggctagccaagcaatcacgg

SEQ ID NO: 5258574 - DNA, 25 bp, Homo sapien
gcagagggctctggttgaccccaga

SEQ ID NO: 5258575 - DNA, 25 bp, Homo sapien
ttctcagggccgtgactgcagaggg

SEQ ID NO: 5258576 - DNA, 25 bp, Homo sapien
ggtctgttctcagggccgtgactgc

SEQ ID NO: 5258577 - DNA, 25 bp, Homo sapien
agggctctggttgaccccagagaag

SEQ ID NO: 5258578 - DNA, 25 bp, Homo sapien
tcatctgaccctgaaaacatgtgca

SEQ ID NO: 5258579 - DNA, 25 bp, Homo sapien
catctgaccctgaaaacatgtgcac

SEQ ID NO: 5258580 - DNA, 25 bp, Homo sapien
tctgaccctgaaaacatgtgcacac

SEQ ID NO: 5258581 - DNA, 25 bp, Homo sapien
cagtcatctgaccctgaaaacatgt

SEQ ID NO: 5258582 - DNA, 25 bp, Homo sapien
tctttgctgccgcatgactcccggc

SEQ ID NO: 5258583 - DNA, 25 bp, Homo sapien
caaagagtgagacttttccatcaag

SEQ ID NO: 5258584 - DNA, 25 bp, Homo sapien
catcaagacgtgttggtcttggcca

SEQ ID NO: 5258585 - DNA, 25 bp, Homo sapien
catcagctacaacctggaagtccca

SEQ ID NO: 5258586 - DNA, 25 bp, Homo sapien
aaggctgtgctggggttcagaccct

SEQ ID NO: 5258587 - DNA, 25 bp, Homo sapien
aggctgtgctggggttcagaccctt

SEQ ID NO: 5258588 - DNA, 25 bp, Homo sapien
tccggcggcacctctgacgtgcttc

SEQ ID NO: 5258589 - DNA, 25 bp, Homo sapien
cgccggtcgctgtatctcggaggta

SEQ ID NO: 5258590 - DNA, 25 bp, Homo sapien
tcagttctctttttcgccggtcgct

SEQ ID NO: 5258591 - DNA, 25 bp, Homo sapien
gtatgggagcttctctccggcggca

SEQ ID NO: 5258592 - DNA, 25 bp, Homo sapien
cacagccagactggtctgctccccc

SEQ ID NO: 5258593 - DNA, 25 bp, Homo sapien
gagaagtttgatccagccgctcagt

SEQ ID NO: 5258594 - DNA, 25 bp, Homo sapien
tgatgcagcagggaccgagagccct

SEQ ID NO: 5258595 - DNA, 25 bp, Homo sapien
tgatccagccgctcagtgatgcagc

SEQ ID NO: 5258596 - DNA, 25 bp, Homo sapien
cacgggttcggagaccttcaggaga

SEQ ID NO: 5258597 - DNA, 25 bp, Homo sapien
ttgaaaacctggagcacccacatag

SEQ ID NO: 5258598 - DNA, 25 bp, Homo sapien
tggacattgaaaacctggagcaccc

SEQ ID NO: 5258599 - DNA, 25 bp, Homo sapien
cattgaaaacctggagcacccacat

SEQ ID NO: 5258600 - DNA, 25 bp, Homo sapien
ctctggacattgaaaacctggagca

SEQ ID NO: 5258601 - DNA, 25 bp, Homo sapien
ggcacccacggaacaagaagggcat

SEQ ID NO: 5258602 - DNA, 25 bp, Homo sapien
agtccagccacgctgacgtgcagaa

SEQ ID NO: 5258603 - DNA, 25 bp, Homo sapien
tatctccggcgtgtccatcagaaat

SEQ ID NO: 5258604 - DNA, 25 bp, Homo sapien
ggcacaggtctcaagggccttatct

SEQ ID NO: 5258605 - DNA, 25 bp, Homo sapien
ccagggcttccgcacgctgctcatt

SEQ ID NO: 5258606 - DNA, 25 bp, Homo sapien
ttccgcacgctgctcattgggcgca

SEQ ID NO: 5258607 - DNA, 25 bp, Homo sapien
agggcttccgcacgctgctcattgg

SEQ ID NO: 5258608 - DNA, 25 bp, Homo sapien
gcttccgcacgctgctcattgggcg

SEQ ID NO: 5258609 - DNA, 25 bp, Homo sapien
gacccagcctgtgttgtgcctgcga

SEQ ID NO: 5258610 - DNA, 25 bp, Homo sapien
gcttcctggctcatggacgtccgat

SEQ ID NO: 5258611 - DNA, 25 bp, Homo sapien
ttgagttgctacaagctcctgggct

SEQ ID NO: 5258612 - DNA, 25 bp, Homo sapien
agccgggtcgtgttctaggagatcc

SEQ ID NO: 5258613 - DNA, 25 bp, Homo sapien
aggagccggctccttccaggcattg

SEQ ID NO: 5258614 - DNA, 25 bp, Homo sapien
cttccaggcattgccgcgggcaggc

SEQ ID NO: 5258615 - DNA, 25 bp, Homo sapien
ggctccttccaggcattgccgcggg

SEQ ID NO: 5258616 - DNA, 25 bp, Homo sapien
ggagccggctccttccaggcattgc

SEQ ID NO: 5258617 - DNA, 25 bp, Homo sapien
ggcagcgcgaagctcctctgcttca

SEQ ID NO: 5258618 - DNA, 25 bp, Homo sapien
cagtgctgggcagcgcgaagctcct

SEQ ID NO: 5258619 - DNA, 25 bp, Homo sapien
gctgggcagcgcgaagctcctctgc

SEQ ID NO: 5258620 - DNA, 25 bp, Homo sapien
tgggcagcgcgaagctcctctgctt

SEQ ID NO: 5258621 - DNA, 25 bp, Homo sapien
gctcgtgtgttgctgcttgggtttt

SEQ ID NO: 5258622 - DNA, 25 bp, Homo sapien
agggtttcctccaaggctcgtgtgt

SEQ ID NO: 5258623 - DNA, 25 bp, Homo sapien
ctgctggtttagcagaggccagcag

SEQ ID NO: 5258624 - DNA, 25 bp, Homo sapien
cacttagcaccagtaagtaactggc

SEQ ID NO: 5258625 - DNA, 25 bp, Homo sapien
aaccagattgggtgggcgatgagac

SEQ ID NO: 5258626 - DNA, 25 bp, Homo sapien
gggaacaggataaccagattgggtg

SEQ ID NO: 5258627 - DNA, 25 bp, Homo sapien
tcttaggggacatcgtttatgaagc

SEQ ID NO: 5258628 - DNA, 25 bp, Homo sapien
tcgtttatgaagctggtgggaacag

SEQ ID NO: 5258629 - DNA, 25 bp, Homo sapien
tacacgcaatggtgaactagcctca

SEQ ID NO: 5258630 - DNA, 25 bp, Homo sapien
cctcaaccaaagctccaggggtgag

SEQ ID NO: 5258631 - DNA, 25 bp, Homo sapien
tagcctcatctacacgcaatggtga

SEQ ID NO: 5258632 - DNA, 25 bp, Homo sapien
gggtgagctagcctcatctacacgc

SEQ ID NO: 5258633 - DNA, 25 bp, Homo sapien
ccagacagatagtgcgccccagttg

SEQ ID NO: 5258634 - DNA, 25 bp, Homo sapien
accacttccagcgaaccttccaggg

SEQ ID NO: 5258635 - DNA, 25 bp, Homo sapien
aggcgttcaactgcatcccaaaggc

SEQ ID NO: 5258636 - DNA, 25 bp, Homo sapien
tgctccagtaaagagatcttcacaa

SEQ ID NO: 5258637 - DNA, 25 bp, Homo sapien
cccgccacctgcacgatacctctgc

SEQ ID NO: 5258638 - DNA, 25 bp, Homo sapien
ggatgccctcccactggacatacat

SEQ ID NO: 5258639 - DNA, 25 bp, Homo sapien
acctgcacgatacctctgccttcag

SEQ ID NO: 5258640 - DNA, 25 bp, Homo sapien
ggcctggatggcaagcccccgccac

SEQ ID NO: 5258641 - DNA, 25 bp, Homo sapien
ggttaatctcactgatgggctatca

SEQ ID NO: 5258642 - DNA, 25 bp, Homo sapien
gatgtacgcacttaatactgtgaac

SEQ ID NO: 5258643 - DNA, 25 bp, Homo sapien
tcagacattttgatgtacgcactta

SEQ ID NO: 5258644 - DNA, 25 bp, Homo sapien
tctgtggtatcagtagtaatctccc

SEQ ID NO: 5258645 - DNA, 25 bp, Homo sapien
ttcctgggaaagctgcagatttaca

SEQ ID NO: 5258646 - DNA, 25 bp, Homo sapien
cagtagaaagcgagttcaggaggct

SEQ ID NO: 5258647 - DNA, 25 bp, Homo sapien
ggcatcctgcggctggaatggtgaa

SEQ ID NO: 5258648 - DNA, 25 bp, Homo sapien
ggcccacggcctgaaagaatgtctg

SEQ ID NO: 5258649 - DNA, 25 bp, Homo sapien
gtgttatggtccttgcaggtgctct

SEQ ID NO: 5258650 - DNA, 25 bp, Homo sapien
cgagttagtaaactcataaacttgg

SEQ ID NO: 5258651 - DNA, 25 bp, Homo sapien
gctttgtcctttctggtatgaagat

SEQ ID NO: 5258652 - DNA, 25 bp, Homo sapien
cctgtttttacgagatggctggacg

SEQ ID NO: 5258653 - DNA, 25 bp, Homo sapien
tctggtatgaagatagctggcttgc

SEQ ID NO: 5258654 - DNA, 25 bp, Homo sapien
tcccttgaacggtcgctcagtagaa

SEQ ID NO: 5258655 - DNA, 25 bp, Homo sapien
aagtactgtcccttgaacggtcgct

SEQ ID NO: 5258656 - DNA, 25 bp, Homo sapien
ggtcgctcagtagaacagggtcttc

SEQ ID NO: 5258657 - DNA, 25 bp, Homo sapien
ttgaacggtcgctcagtagaacagg

SEQ ID NO: 5258658 - DNA, 25 bp, Homo sapien
aaggcggcagcgaggacatcgctac

SEQ ID NO: 5258659 - DNA, 25 bp, Homo sapien
gcagcggggccggactgcagggagt

SEQ ID NO: 5258660 - DNA, 25 bp, Homo sapien
atctgagaggatgcgccggcgcagg

SEQ ID NO: 5258661 - DNA, 25 bp, Homo sapien
gctgtggatctgagaggatgcgccg

SEQ ID NO: 5258662 - DNA, 25 bp, Homo sapien
acaagaaggccagcaccgaggccat

SEQ ID NO: 5258663 - DNA, 25 bp, Homo sapien
ctttttcaccgagagggacaagaag

SEQ ID NO: 5258664 - DNA, 25 bp, Homo sapien
ttcaccgagagggacaagaaggcca

SEQ ID NO: 5258665 - DNA, 25 bp, Homo sapien
accgagagggacaagaaggccagca

SEQ ID NO: 5258666 - DNA, 25 bp, Homo sapien
cgggccaagggtcgtgctttcccat

SEQ ID NO: 5258667 - DNA, 25 bp, Homo sapien
atgaagtgcactgagccgggccaag

SEQ ID NO: 5258668 - DNA, 25 bp, Homo sapien
gccaagggtcgtgctttcccatcac

SEQ ID NO: 5258669 - DNA, 25 bp, Homo sapien
gagggagcatgaagtgcactgagcc

SEQ ID NO: 5258670 - DNA, 25 bp, Homo sapien
tctgttctcgggagccacagccatt

SEQ ID NO: 5258671 - DNA, 25 bp, Homo sapien
tctctggcataaaggtgcatccctt

SEQ ID NO: 5258672 - DNA, 25 bp, Homo sapien
ctttgccatctgttctcgggagcca

SEQ ID NO: 5258673 - DNA, 25 bp, Homo sapien
ctgaatgactgggagtttagggaat

SEQ ID NO: 5258674 - DNA, 25 bp, Homo sapien
cacagctaccagcagaggcaggttc

SEQ ID NO: 5258675 - DNA, 25 bp, Homo sapien
gcacagctaccagcagaggcaggtt

SEQ ID NO: 5258676 - DNA, 25 bp, Homo sapien
tacaggagcgcggaaaatcacagat

SEQ ID NO: 5258677 - DNA, 25 bp, Homo sapien
catccggcagacgattgaagactca

SEQ ID NO: 5258678 - DNA, 25 bp, Homo sapien
gaagggcagtcattacatatcggaa

SEQ ID NO: 5258679 - DNA, 25 bp, Homo sapien
ttgatgcagacgctgacccgaggaa

SEQ ID NO: 5258680 - DNA, 25 bp, Homo sapien
tagaatagcctgttttaccgaagaa

SEQ ID NO: 5258681 - DNA, 25 bp, Homo sapien
gaatagcctgttttaccgaagaatc

SEQ ID NO: 5258682 - DNA, 25 bp, Homo sapien
tagcctgttttaccgaagaatcaga

SEQ ID NO: 5258683 - DNA, 25 bp, Homo sapien
gcctgttttaccgaagaatcagaag

SEQ ID NO: 5258684 - DNA, 25 bp, Homo sapien
gggtccctctgtcttcctaatgcga

SEQ ID NO: 5258685 - DNA, 25 bp, Homo sapien
gccactcgtgtttaaagatgcccat

SEQ ID NO: 5258686 - DNA, 25 bp, Homo sapien
tgggtccacggttgtcacggtgaca

SEQ ID NO: 5258687 - DNA, 25 bp, Homo sapien
cctgcttccgactcctgttgacggg

SEQ ID NO: 5258688 - DNA, 25 bp, Homo sapien
gctgtgacgctcatccaagagagct

SEQ ID NO: 5258689 - DNA, 25 bp, Homo sapien
tgagagatgatctggacaagccttt

SEQ ID NO: 5258690 - DNA, 25 bp, Homo sapien
gatgatctggacaagccttttgctg

SEQ ID NO: 5258691 - DNA, 25 bp, Homo sapien
tttgctgtgacgctcatccaagaga

SEQ ID NO: 5258692 - DNA, 25 bp, Homo sapien
cggtttattctgattgagaactggg

SEQ ID NO: 5258693 - DNA, 25 bp, Homo sapien
cctcactggccttgtgacggtttat

SEQ ID NO: 5258694 - DNA, 25 bp, Homo sapien
agaactgggcggactcgaaagagtc

SEQ ID NO: 5258695 - DNA, 25 bp, Homo sapien
cttttccgcacagctgtgttgactt

SEQ ID NO: 5258696 - DNA, 25 bp, Homo sapien
tattgtatacagattttgcacgcca

SEQ ID NO: 5258697 - DNA, 25 bp, Homo sapien
ttgcacgccaaactcggcagctttg

SEQ ID NO: 5258698 - DNA, 25 bp, Homo sapien
tggactgtacgaccggcatgacttt

SEQ ID NO: 5258699 - DNA, 25 bp, Homo sapien
cacctggaggttgcatggactgtac

SEQ ID NO: 5258700 - DNA, 25 bp, Homo sapien
gtttcctgtggccagccgagcctgg

SEQ ID NO: 5258701 - DNA, 25 bp, Homo sapien
cgtcacatacgattgagcatctcca

SEQ ID NO: 5258702 - DNA, 25 bp, Homo sapien
tctgaagtctgaggaacaatgcctt

SEQ ID NO: 5258703 - DNA, 25 bp, Homo sapien
caaacagcaggaatcggtgggacag

SEQ ID NO: 5258704 - DNA, 25 bp, Homo sapien
agcccagaaaacagcggcagagatt

SEQ ID NO: 5258705 - DNA, 25 bp, Homo sapien
cacggccagctctgcatgttggaca

SEQ ID NO: 5258706 - DNA, 25 bp, Homo sapien
cagacttggacctggcaaagagcat

SEQ ID NO: 5258707 - DNA, 25 bp, Homo sapien
tggacaggcccgtcttgtggcagct

SEQ ID NO: 5258708 - DNA, 25 bp, Homo sapien
atggcaggggctctatcggggcctc

SEQ ID NO: 5258709 - DNA, 25 bp, Homo sapien
ctctgactgtggaatgaagaagcat

SEQ ID NO: 5258710 - DNA, 25 bp, Homo sapien
cagaccttggccctgatggcagggg

SEQ ID NO: 5258711 - DNA, 25 bp, Homo sapien
ctctatcggggcctctgactgtgga

SEQ ID NO: 5258712 - DNA, 25 bp, Homo sapien
ggccggccctgtaagaagcgaacag

SEQ ID NO: 5258713 - DNA, 25 bp, Homo sapien
agaagcgaacagtggagccggcaca

SEQ ID NO: 5258714 - DNA, 25 bp, Homo sapien
agctgagagagctcgtcctgcgcca

SEQ ID NO: 5258715 - DNA, 25 bp, Homo sapien
gcaaaagcatataagctacagcctc

SEQ ID NO: 5258716 - DNA, 25 bp, Homo sapien
actcttccgtcagggatgagcgcca

SEQ ID NO: 5258717 - DNA, 25 bp, Homo sapien
cagatgcccgtggttcgtagcttag

SEQ ID NO: 5258718 - DNA, 25 bp, Homo sapien
tcaggcccggagactcgtaggagaa

SEQ ID NO: 5258719 - DNA, 25 bp, Homo sapien
taattcaaaccagtcccggtgccag

SEQ ID NO: 5258720 - DNA, 25 bp, Homo sapien
tgtgtgtgtaatcactgatcgcagg

SEQ ID NO: 5258721 - DNA, 25 bp, Homo sapien
cgctgcagccgaaacggtgcagtgt

SEQ ID NO: 5258722 - DNA, 25 bp, Homo sapien
gatcgcagggtgaagctcaaggtct

SEQ ID NO: 5258723 - DNA, 25 bp, Homo sapien
tcaccacagacggttacaggcaggg

SEQ ID NO: 5258724 - DNA, 25 bp, Homo sapien
gagcgtccgagcagatccgggccat

SEQ ID NO: 5258725 - DNA, 25 bp, Homo sapien
aagctgaggcggagcgtccgagcag

SEQ ID NO: 5258726 - DNA, 25 bp, Homo sapien
ggtggcaatagcgagggcggccatg

SEQ ID NO: 5258727 - DNA, 25 bp, Homo sapien
gagggcggccatgagaagctgaggc

SEQ ID NO: 5258728 - DNA, 25 bp, Homo sapien
cacacaggaagggtcaggtcttgca

SEQ ID NO: 5258729 - DNA, 25 bp, Homo sapien
tggcctgggcgcataagttcacaag

SEQ ID NO: 5258730 - DNA, 25 bp, Homo sapien
caggtcttgcaatcaaacttctcaa

SEQ ID NO: 5258731 - DNA, 25 bp, Homo sapien
atctgcccatccgtccacacaggaa

SEQ ID NO: 5258732 - DNA, 25 bp, Homo sapien
actcatgggccacgtggagtctgta

SEQ ID NO: 5258733 - DNA, 25 bp, Homo sapien
tagtttccacccgaagctacaggtg

SEQ ID NO: 5258734 - DNA, 25 bp, Homo sapien
cgtgcttctgtattctgtacctagt

SEQ ID NO: 5258735 - DNA, 25 bp, Homo sapien
cccagtgcagtgaccgtgatactca

SEQ ID NO: 5258736 - DNA, 25 bp, Homo sapien
gggctgcccatgtgcggcttcaaag

SEQ ID NO: 5258737 - DNA, 25 bp, Homo sapien
tgatcgccgactcgggcacctttct

SEQ ID NO: 5258738 - DNA, 25 bp, Homo sapien
ttcaaaggccgtgtgagccgagagc

SEQ ID NO: 5258739 - DNA, 25 bp, Homo sapien
cgagagcgttttgatcgccgactcg

SEQ ID NO: 5258740 - DNA, 25 bp, Homo sapien
tcacagaaatcgcagccttgcttcc

SEQ ID NO: 5258741 - DNA, 25 bp, Homo sapien
cctcaaagtgaataattgctgccag

SEQ ID NO: 5258742 - DNA, 25 bp, Homo sapien
gccttgcttccctcaaagtgaataa

SEQ ID NO: 5258743 - DNA, 25 bp, Homo sapien
acagaaatcgcagccttgcttccct

SEQ ID NO: 5258744 - DNA, 25 bp, Homo sapien
tgtggggggcgtgggcatccgtggg

SEQ ID NO: 5258745 - DNA, 25 bp, Homo sapien
ggatgctggcatccatgggaggtgc

SEQ ID NO: 5258746 - DNA, 25 bp, Homo sapien
ctggtgtccgtgtggatgtccgtgg

SEQ ID NO: 5258747 - DNA, 25 bp, Homo sapien
catccgtggggggtactggcgtcca

SEQ ID NO: 5258748 - DNA, 25 bp, Homo sapien
ttgtgaacataaccctaatgaggtg

SEQ ID NO: 5258749 - DNA, 25 bp, Homo sapien
gctgccctaggcgtcactgaaagtc

SEQ ID NO: 5258750 - DNA, 25 bp, Homo sapien
tggtgagatgccacacataaggcgt

SEQ ID NO: 5258751 - DNA, 25 bp, Homo sapien
taatggaatccacaagccgctaagc

SEQ ID NO: 5258752 - DNA, 25 bp, Homo sapien
ctggatgccctgtaggtacagacgg

SEQ ID NO: 5258753 - DNA, 25 bp, Homo sapien
cttctgtactggatgccctgtaggt

SEQ ID NO: 5258754 - DNA, 25 bp, Homo sapien
acagaccatggagccagtagggctg

SEQ ID NO: 5258755 - DNA, 25 bp, Homo sapien
tacagacggggtcacagaccatgga

SEQ ID NO: 5258756 - DNA, 25 bp, Homo sapien
gcacagaacccagaccgagggccag

SEQ ID NO: 5258757 - DNA, 25 bp, Homo sapien
tgtccagggcacagaacccggaccc

SEQ ID NO: 5258758 - DNA, 25 bp, Homo sapien
cagaacccagaccgagggccagggg

SEQ ID NO: 5258759 - DNA, 25 bp, Homo sapien
ggtgtccagggcacagaacccggac

SEQ ID NO: 5258760 - DNA, 25 bp, Homo sapien
agggcacagaacgtggacccagggc

SEQ ID NO: 5258761 - DNA, 25 bp, Homo sapien
cccaggccacagaacccagacgtgg

SEQ ID NO: 5258762 - DNA, 25 bp, Homo sapien
ttccagggcgcagaacccagacccc

SEQ ID NO: 5258763 - DNA, 25 bp, Homo sapien
cagggcacagaacgtggaccccggg

SEQ ID NO: 5258764 - DNA, 25 bp, Homo sapien
caatattgcacgctacagcctgagc

SEQ ID NO: 5258765 - DNA, 25 bp, Homo sapien
cagtctgagccgtcacaatattgca

SEQ ID NO: 5258766 - DNA, 25 bp, Homo sapien
caccgctcccagagtggctctggaa

SEQ ID NO: 5258767 - DNA, 25 bp, Homo sapien
gccgtcgcggtgtcgcagagctttt

SEQ ID NO: 5258768 - DNA, 25 bp, Homo sapien
tgcctcacacgttctgagcagtcgg

SEQ ID NO: 5258769 - DNA, 25 bp, Homo sapien
tatagccatgtgtgtgtgcgggccc

SEQ ID NO: 5258770 - DNA, 25 bp, Homo sapien
ggccaccactgggatttgcaccctg

SEQ ID NO: 5258771 - DNA, 25 bp, Homo sapien
cagcttggtttgtcctgcctccagg

SEQ ID NO: 5258772 - DNA, 25 bp, Homo sapien
gcatggttagagtgggtacccgata

SEQ ID NO: 5258773 - DNA, 25 bp, Homo sapien
gaggccacagcaagaccgaagccca

SEQ ID NO: 5258774 - DNA, 25 bp, Homo sapien
tggcctcctgagatggccgagcaga

SEQ ID NO: 5258775 - DNA, 25 bp, Homo sapien
ccttctctgggtagacgactgcctg

SEQ ID NO: 5258776 - DNA, 25 bp, Homo sapien
ccactgtagaggctcttggcacctg

SEQ ID NO: 5258777 - DNA, 25 bp, Homo sapien
cttcagggatctggtcaggacggct

SEQ ID NO: 5258778 - DNA, 25 bp, Homo sapien
ttctctaaaagtcaggcccaggacc

SEQ ID NO: 5258779 - DNA, 25 bp, Homo sapien
ttattggtgatacataattttcagg

SEQ ID NO: 5258780 - DNA, 25 bp, Homo sapien
gcaggttcgcctgccctcctttaga

SEQ ID NO: 5258781 - DNA, 25 bp, Homo sapien
cagagatgagtgagcacgtggagct

SEQ ID NO: 5258782 - DNA, 25 bp, Homo sapien
cgtggcacggagggcctctggtctc

SEQ ID NO: 5258783 - DNA, 25 bp, Homo sapien
tcctggacacccgacagcccagggc

SEQ ID NO: 5258784 - DNA, 25 bp, Homo sapien
ggcccaccagtagagacctgctatg

SEQ ID NO: 5258785 - DNA, 25 bp, Homo sapien
tcagccgattaacacctgagggcag

SEQ ID NO: 5258786 - DNA, 25 bp, Homo sapien
gtgctcttcaccctggaggcagctg

SEQ ID NO: 5258787 - DNA, 25 bp, Homo sapien
acactgtgcagggtcgcacaaggcc

SEQ ID NO: 5258788 - DNA, 25 bp, Homo sapien
caaatttccagagtaggtatccagc

SEQ ID NO: 5258789 - DNA, 25 bp, Homo sapien
gaatgcagctcagacaagggagacc

SEQ ID NO: 5258790 - DNA, 25 bp, Homo sapien
catcacgtggcttagtgttctgcag

SEQ ID NO: 5258791 - DNA, 25 bp, Homo sapien
cagggagtcccgcttcgttggtgtc

SEQ ID NO: 5258792 - DNA, 25 bp, Homo sapien
catatgcagtctgtccctgggccta

SEQ ID NO: 5258793 - DNA, 25 bp, Homo sapien
cctagagctgcttcctttttggtgt

SEQ ID NO: 5258794 - DNA, 25 bp, Homo sapien
acgaaggagttgtcctggccaccct

SEQ ID NO: 5258795 - DNA, 25 bp, Homo sapien
agctccattgcccaaaacgaaggag

SEQ ID NO: 5258796 - DNA, 25 bp, Homo sapien
gggacagatgaatcgagcatccgga

SEQ ID NO: 5258797 - DNA, 25 bp, Homo sapien
cctcgatctgggactttgggattgt

SEQ ID NO: 5258798 - DNA, 25 bp, Homo sapien
catccggagagacccctcgatctgg

SEQ ID NO: 5258799 - DNA, 25 bp, Homo sapien
gggattgtgggacgttctttcacag

SEQ ID NO: 5258800 - DNA, 25 bp, Homo sapien
gaccggtgtcgtctgatacggctga

SEQ ID NO: 5258801 - DNA, 25 bp, Homo sapien
tgacccctgggagcaagcggacact

SEQ ID NO: 5258802 - DNA, 25 bp, Homo sapien
gtctgcgtctcagccctgctgcgtg

SEQ ID NO: 5258803 - DNA, 25 bp, Homo sapien
aacccgtgccccgtagttcaggctg

SEQ ID NO: 5258804 - DNA, 25 bp, Homo sapien
tcccacactgccgatggccggcccg

SEQ ID NO: 5258805 - DNA, 25 bp, Homo sapien
acgccgcctactggttcccacactg

SEQ ID NO: 5258806 - DNA, 25 bp, Homo sapien
cacgttcctgttcccgacgcgcggc

SEQ ID NO: 5258807 - DNA, 25 bp, Homo sapien
agctgagttccttacgtgccacgcc

SEQ ID NO: 5258808 - DNA, 25 bp, Homo sapien
aagtctaaccggaaacagtcgcatg

SEQ ID NO: 5258809 - DNA, 25 bp, Homo sapien
tgaaatgatcgccacaagggacctc

SEQ ID NO: 5258810 - DNA, 25 bp, Homo sapien
caaactgtgcatcaggtcccggaac

SEQ ID NO: 5258811 - DNA, 25 bp, Homo sapien
catgtatttacagcgtacggcgtga

SEQ ID NO: 5258812 - DNA, 25 bp, Homo sapien
agaaaccagaagcaatcacagacct

SEQ ID NO: 5258813 - DNA, 25 bp, Homo sapien
agcgacagcggtaccgccaggctcc

SEQ ID NO: 5258814 - DNA, 25 bp, Homo sapien
gaagcaatcacagacctcaaaatca

SEQ ID NO: 5258815 - DNA, 25 bp, Homo sapien
agcggtaccgccaggctccctgttc

SEQ ID NO: 5258816 - DNA, 25 bp, Homo sapien
gggcattgtcctcagcgctctgtgc

SEQ ID NO: 5258817 - DNA, 25 bp, Homo sapien
gcattgtcctcagcgctctgtgcca

SEQ ID NO: 5258818 - DNA, 25 bp, Homo sapien
cagggcattgtcctcagcgctctgt

SEQ ID NO: 5258819 - DNA, 25 bp, Homo sapien
gcttcctgaaggcccgtcctggctg

SEQ ID NO: 5258820 - DNA, 25 bp, Homo sapien
ccctcgcgctgactcattagcacct

SEQ ID NO: 5258821 - DNA, 25 bp, Homo sapien
aggcattcccctgccctcgcgctga

SEQ ID NO: 5258822 - DNA, 25 bp, Homo sapien
caggaccatgcacccctcggagaga

SEQ ID NO: 5258823 - DNA, 25 bp, Homo sapien
aggcaggaccatgcacccctcggag

SEQ ID NO: 5258824 - DNA, 25 bp, Homo sapien
gaggtctcctgatgcacagcacggt

SEQ ID NO: 5258825 - DNA, 25 bp, Homo sapien
catccaagagcccttggaacagtgg

SEQ ID NO: 5258826 - DNA, 25 bp, Homo sapien
cggtagacgcggctgccgaaagcct

SEQ ID NO: 5258827 - DNA, 25 bp, Homo sapien
tcatctgtgcataggggaaggacgt

SEQ ID NO: 5258828 - DNA, 25 bp, Homo sapien
tagaaaccgggtactctcactggag

SEQ ID NO: 5258829 - DNA, 25 bp, Homo sapien
cacatgccgtatactcttgaaggat

SEQ ID NO: 5258830 - DNA, 25 bp, Homo sapien
aagaatcttgcccagggccgcctaa

SEQ ID NO: 5258831 - DNA, 25 bp, Homo sapien
ctcttggaggatgacgtccccaggg

SEQ ID NO: 5258832 - DNA, 25 bp, Homo sapien
cagaatgtcatataacgcggccgca

SEQ ID NO: 5258833 - DNA, 25 bp, Homo sapien
catataacgtggaatgacgtgcggc

SEQ ID NO: 5258834 - DNA, 25 bp, Homo sapien
tggaatgtcatataacgcagccaca

SEQ ID NO: 5258835 - DNA, 25 bp, Homo sapien
catataacgtggaatgatgtgcggc

SEQ ID NO: 5258836 - DNA, 25 bp, Homo sapien
ggcggacccagtcggccccgctgcc

SEQ ID NO: 5258837 - DNA, 25 bp, Homo sapien
gcccctccacgcacagtccttggtt

SEQ ID NO: 5258838 - DNA, 25 bp, Homo sapien
ttggttggtgcagaccgggtgtccc

SEQ ID NO: 5258839 - DNA, 25 bp, Homo sapien
ccatccacaagctgcggcagcaccg

SEQ ID NO: 5258840 - DNA, 25 bp, Homo sapien
ggaacaattgtgtggtagccactct

SEQ ID NO: 5258841 - DNA, 25 bp, Homo sapien
ggactcctgacgtttcctgtgtcga

SEQ ID NO: 5258842 - DNA, 25 bp, Homo sapien
ggcccagttagcgagccagctctgg

SEQ ID NO: 5258843 - DNA, 25 bp, Homo sapien
tatggttcctatagtcccaaagcac

SEQ ID NO: 5258844 - DNA, 25 bp, Homo sapien
ctgcctcaggcggatgccgagttcc

SEQ ID NO: 5258845 - DNA, 25 bp, Homo sapien
ttgcagcaggcatgtagccccgcct

SEQ ID NO: 5258846 - DNA, 25 bp, Homo sapien
ggatgccgagttccaaagagtcccc

SEQ ID NO: 5258847 - DNA, 25 bp, Homo sapien
tggaggtcccgtagcccttgcagca

SEQ ID NO: 5258848 - DNA, 25 bp, Homo sapien
aggcttggactccactaaacctgat

SEQ ID NO: 5258849 - DNA, 25 bp, Homo sapien
tgggaggcttggactccactaaacc

SEQ ID NO: 5258850 - DNA, 25 bp, Homo sapien
gaggcttggactccactaaacctga

SEQ ID NO: 5258851 - DNA, 25 bp, Homo sapien
ggaggcttggactccactaaacctg

SEQ ID NO: 5258852 - DNA, 25 bp, Homo sapien
taacatgtctttccggaaagttgtg

SEQ ID NO: 5258853 - DNA, 25 bp, Homo sapien
taagataacatgtctttccggaaag

SEQ ID NO: 5258854 - DNA, 25 bp, Homo sapien
gataacatgtctttccggaaagttg

SEQ ID NO: 5258855 - DNA, 25 bp, Homo sapien
tttaagataacatgtctttccggaa

SEQ ID NO: 5258856 - DNA, 25 bp, Homo sapien
gaagctgaatcctatgaagttggcg

SEQ ID NO: 5258857 - DNA, 25 bp, Homo sapien
tccttaccgtgtgtcacaccaggaa

SEQ ID NO: 5258858 - DNA, 25 bp, Homo sapien
acaccgctggctcgagtcgcttgtt

SEQ ID NO: 5258859 - DNA, 25 bp, Homo sapien
gttggcgtgtccttctcctctgcag

SEQ ID NO: 5258860 - DNA, 25 bp, Homo sapien
acatcctcggagattagtctccgca

SEQ ID NO: 5258861 - DNA, 25 bp, Homo sapien
ggtcactgtggactcagatctttgc

SEQ ID NO: 5258862 - DNA, 25 bp, Homo sapien
ggactcagatctttgcagagtgtct

SEQ ID NO: 5258863 - DNA, 25 bp, Homo sapien
agagtgtctggtacatcctcggaga

SEQ ID NO: 5258864 - DNA, 25 bp, Homo sapien
cataggtgtataggatatcaaagct

SEQ ID NO: 5258865 - DNA, 25 bp, Homo sapien
tatcaaagctagaacagccctccag

SEQ ID NO: 5258866 - DNA, 25 bp, Homo sapien
taatcgtggtgcataggtgtatagg

SEQ ID NO: 5258867 - DNA, 25 bp, Homo sapien
cttatcgctggtaatcgtggtgcat

SEQ ID NO: 5258868 - DNA, 25 bp, Homo sapien
gagttggtctcctggacagcagtgc

SEQ ID NO: 5258869 - DNA, 25 bp, Homo sapien
ccttttccccatcaggtgtggttcg

SEQ ID NO: 5258870 - DNA, 25 bp, Homo sapien
caggccagccggctcaatgctggac

SEQ ID NO: 5258871 - DNA, 25 bp, Homo sapien
tctcttccctagtccggtacagcag

SEQ ID NO: 5258872 - DNA, 25 bp, Homo sapien
ttcttccctgtgtgcgctcatccct

SEQ ID NO: 5258873 - DNA, 25 bp, Homo sapien
ctctctgagaaacgcactgaactcg

SEQ ID NO: 5258874 - DNA, 25 bp, Homo sapien
tcccaggtgcagcttgctcgttggc

SEQ ID NO: 5258875 - DNA, 25 bp, Homo sapien
actgaactcggcgttgcttcttccc

SEQ ID NO: 5258876 - DNA, 25 bp, Homo sapien
caggcacgcggatctctctggagga

SEQ ID NO: 5258877 - DNA, 25 bp, Homo sapien
gtatctgaggttgcgtctgagtctc

SEQ ID NO: 5258878 - DNA, 25 bp, Homo sapien
gaaggacacctgagtttctcgcctg

SEQ ID NO: 5258879 - DNA, 25 bp, Homo sapien
tctagatcagctggcacgagtgtgg

SEQ ID NO: 5258880 - DNA, 25 bp, Homo sapien
tgaaactctggcagtgaacttggtg

SEQ ID NO: 5258881 - DNA, 25 bp, Homo sapien
cagaagcttgaattcgtgtccctgc

SEQ ID NO: 5258882 - DNA, 25 bp, Homo sapien
gggcctctggcttgactagtctggt

SEQ ID NO: 5258883 - DNA, 25 bp, Homo sapien
ctttgcccagaagccaaatggcgca

SEQ ID NO: 5258884 - DNA, 25 bp, Homo sapien
ccccttgccgtgcgggtcatcgttg

SEQ ID NO: 5258885 - DNA, 25 bp, Homo sapien
cttgccgtgcgggtcatcgttgtac

SEQ ID NO: 5258886 - DNA, 25 bp, Homo sapien
ttgccgtgcgggtcatcgttgtaca

SEQ ID NO: 5258887 - DNA, 25 bp, Homo sapien
ccttgccgtgcgggtcatcgttgta

SEQ ID NO: 5258888 - DNA, 25 bp, Homo sapien
accaagctgagccagcgctggaagc

SEQ ID NO: 5258889 - DNA, 25 bp, Homo sapien
tggaagcccagaaccgactcttgtg

SEQ ID NO: 5258890 - DNA, 25 bp, Homo sapien
tgcgatttgggtttctgtctggacc

SEQ ID NO: 5258891 - DNA, 25 bp, Homo sapien
gaggccaccggctcttgcgatttgg

SEQ ID NO: 5258892 - DNA, 25 bp, Homo sapien
gcacatggtcttactggagcagccg

SEQ ID NO: 5258893 - DNA, 25 bp, Homo sapien
ccgccttcgcctgcctttggaggag

SEQ ID NO: 5258894 - DNA, 25 bp, Homo sapien
tcgtcacaggtgagcacaaatgggc

SEQ ID NO: 5258895 - DNA, 25 bp, Homo sapien
agcacctcgcccttggagcgggacg

SEQ ID NO: 5258896 - DNA, 25 bp, Homo sapien
cagtgcaggtgttttcatcgttgtt

SEQ ID NO: 5258897 - DNA, 25 bp, Homo sapien
acttgtggcacgagaaggctcggcc

SEQ ID NO: 5258898 - DNA, 25 bp, Homo sapien
cgagtttggcgcacagacttgtggc

SEQ ID NO: 5258899 - DNA, 25 bp, Homo sapien
gatggtcatcgtgtgttctgtcccc

SEQ ID NO: 5258900 - DNA, 25 bp, Homo sapien
tgaccctcgtctgcctcatacatgg

SEQ ID NO: 5258901 - DNA, 25 bp, Homo sapien
ctgtgctgaccctcgtctgcctcat

SEQ ID NO: 5258902 - DNA, 25 bp, Homo sapien
ctcgtctgcctcatacatggccagt

SEQ ID NO: 5258903 - DNA, 25 bp, Homo sapien
gcttttctcactgttagttgtttga

SEQ ID NO: 5258904 - DNA, 25 bp, Homo sapien
gggaagccgcatagctctgccatgc

SEQ ID NO: 5258905 - DNA, 25 bp, Homo sapien
tccgttctgttaacaccaaggtgtc

SEQ ID NO: 5258906 - DNA, 25 bp, Homo sapien
taaacaagtgtccaagtaatcagct

SEQ ID NO: 5258907 - DNA, 25 bp, Homo sapien
cagagcatcccggtgtgcaatgccc

SEQ ID NO: 5258908 - DNA, 25 bp, Homo sapien
ggagaacggtatcgcgcccgccgtc

SEQ ID NO: 5258909 - DNA, 25 bp, Homo sapien
ccaacaacagctccgggagcgtcag

SEQ ID NO: 5258910 - DNA, 25 bp, Homo sapien
ggtatttctgcctccgcagactccg

SEQ ID NO: 5258911 - DNA, 25 bp, Homo sapien
agcgtcagcgcggagaacggtatcg

SEQ ID NO: 5258912 - DNA, 25 bp, Homo sapien
taacgagcaggtccgtggaaggcac

SEQ ID NO: 5258913 - DNA, 25 bp, Homo sapien
tctgcctgtcgcaagctaacgagca

SEQ ID NO: 5258914 - DNA, 25 bp, Homo sapien
gccatgttctttttgttgggacttc

SEQ ID NO: 5258915 - DNA, 25 bp, Homo sapien
tttgttgggacttctgcctgtcgca

SEQ ID NO: 5258916 - DNA, 25 bp, Homo sapien
ggcgaggttctgagcacccagagtc

SEQ ID NO: 5258917 - DNA, 25 bp, Homo sapien
ggcaaatgggtcacattgtgttttc

SEQ ID NO: 5258918 - DNA, 25 bp, Homo sapien
cacccagagtcgttgctgaacagca

SEQ ID NO: 5258919 - DNA, 25 bp, Homo sapien
cagcagacgcctagagttctcgagg

SEQ ID NO: 5258920 - DNA, 25 bp, Homo sapien
gggctatatttgcagagtcaccacc

SEQ ID NO: 5258921 - DNA, 25 bp, Homo sapien
tccagcaggcgtggataccacgtga

SEQ ID NO: 5258922 - DNA, 25 bp, Homo sapien
ggcagcaagcagaccgtggaggagg

SEQ ID NO: 5258923 - DNA, 25 bp, Homo sapien
tgagtgggcacctgcgtcctcgtgg

SEQ ID NO: 5258924 - DNA, 25 bp, Homo sapien
gggacccagtcctgtattcatgctc

SEQ ID NO: 5258925 - DNA, 25 bp, Homo sapien
ggacccagtcctgtattcatgctca

SEQ ID NO: 5258926 - DNA, 25 bp, Homo sapien
ggacagtgagctgaccccacactct

SEQ ID NO: 5258927 - DNA, 25 bp, Homo sapien
tgggaggcacccattacagggaaga

SEQ ID NO: 5258928 - DNA, 25 bp, Homo sapien
tatctgacgacacagctgggaggca

SEQ ID NO: 5258929 - DNA, 25 bp, Homo sapien
tggagacagcttgacatcagagagc

SEQ ID NO: 5258930 - DNA, 25 bp, Homo sapien
tccccaggcacatgcgtgagggtat

SEQ ID NO: 5258931 - DNA, 25 bp, Homo sapien
gctgagttctcaccatcttcctgcg

SEQ ID NO: 5258932 - DNA, 25 bp, Homo sapien
tcacagctgagttctcaccatcttc

SEQ ID NO: 5258933 - DNA, 25 bp, Homo sapien
caatttcagccacacgccttttgag

SEQ ID NO: 5258934 - DNA, 25 bp, Homo sapien
tccaatggtgttcccgttttgctga

SEQ ID NO: 5258935 - DNA, 25 bp, Homo sapien
cacacggaggagtggagccgatttc

SEQ ID NO: 5258936 - DNA, 25 bp, Homo sapien
gaaggtggcatttgcactgggactt

SEQ ID NO: 5258937 - DNA, 25 bp, Homo sapien
aggtattaggcagggtggtcccata

SEQ ID NO: 5258938 - DNA, 25 bp, Homo sapien
ggagatcagcacaagccactctaag

SEQ ID NO: 5258939 - DNA, 25 bp, Homo sapien
tgtgcgagcattggcatcacacagg

SEQ ID NO: 5258940 - DNA, 25 bp, Homo sapien
ccgtgtgtgcgagcattggcatcac

SEQ ID NO: 5258941 - DNA, 25 bp, Homo sapien
gtgccatgccccgtgtgtgcgagca

SEQ ID NO: 5258942 - DNA, 25 bp, Homo sapien
catgccccgtgtgtgcgagcattgg

SEQ ID NO: 5258943 - DNA, 25 bp, Homo sapien
ccaaggctcatggtaggtggtctgt

SEQ ID NO: 5258944 - DNA, 25 bp, Homo sapien
cggacatgtttgcacaacagaaagt

SEQ ID NO: 5258945 - DNA, 25 bp, Homo sapien
ggaggcagcggacatgtttgcacaa

SEQ ID NO: 5258946 - DNA, 25 bp, Homo sapien
tgttcaacttgaaggccaaggctca

SEQ ID NO: 5258947 - DNA, 25 bp, Homo sapien
cccaccactcctgaaatcacagcac

SEQ ID NO: 5258948 - DNA, 25 bp, Homo sapien
gttcccatggcgctggaagtgccag

SEQ ID NO: 5258949 - DNA, 25 bp, Homo sapien
cggcatgtctaagccgggccctgct

SEQ ID NO: 5258950 - DNA, 25 bp, Homo sapien
gggaccaggtttgatgactccggca

SEQ ID NO: 5258951 - DNA, 25 bp, Homo sapien
cctgctcctggcattagtgactcag

SEQ ID NO: 5258952 - DNA, 25 bp, Homo sapien
gatgtcacaggtatgtcggctgagc

SEQ ID NO: 5258953 - DNA, 25 bp, Homo sapien
gccataggcgatttctctcaggagc

SEQ ID NO: 5258954 - DNA, 25 bp, Homo sapien
gtatgtcggctgagcaggtacaccc

SEQ ID NO: 5258955 - DNA, 25 bp, Homo sapien
ctaaaaaagcgtccgttggatgtca

SEQ ID NO: 5258956 - DNA, 25 bp, Homo sapien
caggaaagacgggccagtggtcact

SEQ ID NO: 5258957 - DNA, 25 bp, Homo sapien
gcaggaaagacgggccagtggtcac

SEQ ID NO: 5258958 - DNA, 25 bp, Homo sapien
cgaatctgaaattacggtccaggct

SEQ ID NO: 5258959 - DNA, 25 bp, Homo sapien
tccaggctaaagcagaaagtggccg

SEQ ID NO: 5258960 - DNA, 25 bp, Homo sapien
taaccttgagccagtggtgtctgcc

SEQ ID NO: 5258961 - DNA, 25 bp, Homo sapien
aaagtggccgaaagacggagcagcc

SEQ ID NO: 5258962 - DNA, 25 bp, Homo sapien
ccacgcccagtaaatcagcttgtca

SEQ ID NO: 5258963 - DNA, 25 bp, Homo sapien
tgtgaagacagtgccagcgcttgca

SEQ ID NO: 5258964 - DNA, 25 bp, Homo sapien
agcctcctgccacgcccagtaaatc

SEQ ID NO: 5258965 - DNA, 25 bp, Homo sapien
gaagacagtgccagcgcttgcataa

SEQ ID NO: 5258966 - DNA, 25 bp, Homo sapien
tttgactccggtcgctgcctttaga

SEQ ID NO: 5258967 - DNA, 25 bp, Homo sapien
tggactctgaaagccgataacctct

SEQ ID NO: 5258968 - DNA, 25 bp, Homo sapien
tttagatccctagtgcttcccaagg

SEQ ID NO: 5258969 - DNA, 25 bp, Homo sapien
tctccgtggcggtattcttggctct

SEQ ID NO: 5258970 - DNA, 25 bp, Homo sapien
tgaagtcatgttggtccccatcgcc

SEQ ID NO: 5258971 - DNA, 25 bp, Homo sapien
aaagagtgaagtcatgttggtcccc

SEQ ID NO: 5258972 - DNA, 25 bp, Homo sapien
ggctgtctgcacgtcccaaagagtg

SEQ ID NO: 5258973 - DNA, 25 bp, Homo sapien
aaaaactgtccctgactcgaagcct

SEQ ID NO: 5258974 - DNA, 25 bp, Homo sapien
atctgtcgtcatccaggtcccccgt

SEQ ID NO: 5258975 - DNA, 25 bp, Homo sapien
ctgtcgtcatccaggtcccccgtgc

SEQ ID NO: 5258976 - DNA, 25 bp, Homo sapien
gtcgtcatccaggtcccccgtgcca

SEQ ID NO: 5258977 - DNA, 25 bp, Homo sapien
tcatctgtcgtcatccaggtccccc

SEQ ID NO: 5258978 - DNA, 25 bp, Homo sapien
ggcagaattattggagttacaggca

SEQ ID NO: 5258979 - DNA, 25 bp, Homo sapien
tttgaagggctgatattgtaggtcc

SEQ ID NO: 5258980 - DNA, 25 bp, Homo sapien
caggcattgtgcaagctttaagaca

SEQ ID NO: 5258981 - DNA, 25 bp, Homo sapien
ttccactttggctgcctttggcaga

SEQ ID NO: 5258982 - DNA, 25 bp, Homo sapien
gcccgcgagggcggtgaaggggctg

SEQ ID NO: 5258983 - DNA, 25 bp, Homo sapien
atccagtttctgcagttcctccacc

SEQ ID NO: 5258984 - DNA, 25 bp, Homo sapien
ctcttaggggtgggatccagtttct

SEQ ID NO: 5258985 - DNA, 25 bp, Homo sapien
ctgcagccctcttaggggtgggatc

SEQ ID NO: 5258986 - DNA, 25 bp, Homo sapien
gatccagtttctgcagttcctccac

SEQ ID NO: 5258987 - DNA, 25 bp, Homo sapien
aggcctccggcctgatgctttggtt

SEQ ID NO: 5258988 - DNA, 25 bp, Homo sapien
ggtgggagcaactcttccatgaggc

SEQ ID NO: 5258989 - DNA, 25 bp, Homo sapien
cacgcttggtgggagcaactcttcc

SEQ ID NO: 5258990 - DNA, 25 bp, Homo sapien
tccatgaggcctccggcctgatgct

SEQ ID NO: 5258991 - DNA, 25 bp, Homo sapien
gtacagttggcatccttcctgccct

SEQ ID NO: 5258992 - DNA, 25 bp, Homo sapien
gcagacactgcatttggaagtacag

SEQ ID NO: 5258993 - DNA, 25 bp, Homo sapien
cctgttccctaaggagcagacactg

SEQ ID NO: 5258994 - DNA, 25 bp, Homo sapien
tccctgttccctaaggagcagacac

SEQ ID NO: 5258995 - DNA, 25 bp, Homo sapien
cattctctgatgctacatcaatggg

SEQ ID NO: 5258996 - DNA, 25 bp, Homo sapien
ctgtcccacggcgatattgcgtgca

SEQ ID NO: 5258997 - DNA, 25 bp, Homo sapien
tctgatgctacatcaatgggttctt

SEQ ID NO: 5258998 - DNA, 25 bp, Homo sapien
cgatattgcgtgcattctctgatgc

SEQ ID NO: 5258999 - DNA, 25 bp, Homo sapien
acatttcagcagacctaggagaccc

SEQ ID NO: 5259000 - DNA, 25 bp, Homo sapien
aggccgcctggtgcttctggcccca

SEQ ID NO: 5259001 - DNA, 25 bp, Homo sapien
tctgcacagcaggccgcctggtgct

SEQ ID NO: 5259002 - DNA, 25 bp, Homo sapien
ctgctatcaattcaggcccacattt

SEQ ID NO: 5259003 - DNA, 25 bp, Homo sapien
tgttcatgataggagaacggccgtc

SEQ ID NO: 5259004 - DNA, 25 bp, Homo sapien
tggactgcattcacctcgtagaaat

SEQ ID NO: 5259005 - DNA, 25 bp, Homo sapien
tgtcccgcctgcgttattacagcgt

SEQ ID NO: 5259006 - DNA, 25 bp, Homo sapien
gtgtcacgttcacagcagaaccaga

SEQ ID NO: 5259007 - DNA, 25 bp, Homo sapien
gttgcttagcggcagtgcgttcacc

SEQ ID NO: 5259008 - DNA, 25 bp, Homo sapien
catctggagccacgcagggcacgtg

SEQ ID NO: 5259009 - DNA, 25 bp, Homo sapien
ccatcagtgctgaatggaggttgct

SEQ ID NO: 5259010 - DNA, 25 bp, Homo sapien
cagtgcgttcacctgttcttctgtg

SEQ ID NO: 5259011 - DNA, 25 bp, Homo sapien
cccctccacgagcaggcgggatggt

SEQ ID NO: 5259012 - DNA, 25 bp, Homo sapien
cagttcattctaggcaatgtggcca

SEQ ID NO: 5259013 - DNA, 25 bp, Homo sapien
caaaacattgagcaaatgatacccc

SEQ ID NO: 5259014 - DNA, 25 bp, Homo sapien
gagctgctggttcagagtatgtata

SEQ ID NO: 5259015 - DNA, 25 bp, Homo sapien
tacatacggaggtgcagcatggtga

SEQ ID NO: 5259016 - DNA, 25 bp, Homo sapien
tgcttgctgtcccttgttctaatgc

SEQ ID NO: 5259017 - DNA, 25 bp, Homo sapien
tggtatatacttcaggaggtgcggt

SEQ ID NO: 5259018 - DNA, 25 bp, Homo sapien
tttgcctctgaccattgcttgctgt

SEQ ID NO: 5259019 - DNA, 25 bp, Homo sapien
ccctgtgtactagtgacctgaataa

SEQ ID NO: 5259020 - DNA, 25 bp, Homo sapien
tggctttcgccctgtgtactagtga

SEQ ID NO: 5259021 - DNA, 25 bp, Homo sapien
cctgaataaagttacaagtgtttgt

SEQ ID NO: 5259022 - DNA, 25 bp, Homo sapien
ctcatcaataggctcatggctttcg

SEQ ID NO: 5259023 - DNA, 25 bp, Homo sapien
gcagactagatgacctcccgttgtg

SEQ ID NO: 5259024 - DNA, 25 bp, Homo sapien
tgtgcagatagggtgggttttcctc

SEQ ID NO: 5259025 - DNA, 25 bp, Homo sapien
cacgacaccatatcctgggcagact

SEQ ID NO: 5259026 - DNA, 25 bp, Homo sapien
tccatccattgcttagatgtgcaga

SEQ ID NO: 5259027 - DNA, 25 bp, Homo sapien
tactttcaaacacatgacatcgctc

SEQ ID NO: 5259028 - DNA, 25 bp, Homo sapien
tctaagtaagttatatctgtgcttt

SEQ ID NO: 5259029 - DNA, 25 bp, Homo sapien
gtaattggtaatatgaaacacgtca

SEQ ID NO: 5259030 - DNA, 25 bp, Homo sapien
tctgcagtaattggtaatatgaaac

SEQ ID NO: 5259031 - DNA, 25 bp, Homo sapien
gggcccgcgccatctctcgtagatt

SEQ ID NO: 5259032 - DNA, 25 bp, Homo sapien
tcttgagaacggaagagagaattct

SEQ ID NO: 5259033 - DNA, 25 bp, Homo sapien
tagattccgtggctgttggcttccc

SEQ ID NO: 5259034 - DNA, 25 bp, Homo sapien
tgttttcacactccgggaaatgtta

SEQ ID NO: 5259035 - DNA, 25 bp, Homo sapien
gaaccctgcaaacatgggcgcattt

SEQ ID NO: 5259036 - DNA, 25 bp, Homo sapien
gagtgggtcgtatcgggctggccat

SEQ ID NO: 5259037 - DNA, 25 bp, Homo sapien
gccgtatcgggctggtggagaccct

SEQ ID NO: 5259038 - DNA, 25 bp, Homo sapien
ctggagtgggccatatcagcacggc

SEQ ID NO: 5259039 - DNA, 25 bp, Homo sapien
ctagaggagtaggccatatcagcca

SEQ ID NO: 5259040 - DNA, 25 bp, Homo sapien
gggctgtattggtccagctgtgacc

SEQ ID NO: 5259041 - DNA, 25 bp, Homo sapien
cctagaggagtaggccatatcagcc

SEQ ID NO: 5259042 - DNA, 25 bp, Homo sapien
ggctttagataatgattagggtggc

SEQ ID NO: 5259043 - DNA, 25 bp, Homo sapien
gtggctttagataatgattagggtg

SEQ ID NO: 5259044 - DNA, 25 bp, Homo sapien
ttagataatgattagggtggctgtg

SEQ ID NO: 5259045 - DNA, 25 bp, Homo sapien
tgcgctggggtagcaagaagggcag

SEQ ID NO: 5259046 - DNA, 25 bp, Homo sapien
ggctcagagttatgtgccacagttc

SEQ ID NO: 5259047 - DNA, 25 bp, Homo sapien
agtgggagggaaatctttatgagaa

SEQ ID NO: 5259048 - DNA, 25 bp, Homo sapien
tcagggatggcgctgggcagtgcca

SEQ ID NO: 5259049 - DNA, 25 bp, Homo sapien
aagaaattcgctatgtcctgcaggg

SEQ ID NO: 5259050 - DNA, 25 bp, Homo sapien
tgctggtcccgcagaggaggatgtg

SEQ ID NO: 5259051 - DNA, 25 bp, Homo sapien
tgcttgcttgtttagcatcctgttt

SEQ ID NO: 5259052 - DNA, 25 bp, Homo sapien
tgtgggcatcggatgtttgcttgct

SEQ ID NO: 5259053 - DNA, 25 bp, Homo sapien
agcactgctggtcccgcagaggagg

SEQ ID NO: 5259054 - DNA, 25 bp, Homo sapien
ccaccaggaaaacggccagaggtgc

SEQ ID NO: 5259055 - DNA, 25 bp, Homo sapien
ctttgattccttatgcagcagccta

SEQ ID NO: 5259056 - DNA, 25 bp, Homo sapien
tatgcagcagcctactgttttcctc

SEQ ID NO: 5259057 - DNA, 25 bp, Homo sapien
tggtggccctggtagcgaactgact

SEQ ID NO: 5259058 - DNA, 25 bp, Homo sapien
tggagggtgtggagttgtacccagc

SEQ ID NO: 5259059 - DNA, 25 bp, Homo sapien
gaagtccctttcgtaggtcagctcc

SEQ ID NO: 5259060 - DNA, 25 bp, Homo sapien
cattctcctggcagacgattcctgt

SEQ ID NO: 5259061 - DNA, 25 bp, Homo sapien
ccagctgttcatacaggaagtccct

SEQ ID NO: 5259062 - DNA, 25 bp, Homo sapien
tgatggtcatccgggtggcagccca

SEQ ID NO: 5259063 - DNA, 25 bp, Homo sapien
cttgctgatggtcatccgggtggca

SEQ ID NO: 5259064 - DNA, 25 bp, Homo sapien
ggccttgctgatggtcatccgggtg

SEQ ID NO: 5259065 - DNA, 25 bp, Homo sapien
gatggtcatccgggtggcagcccac

SEQ ID NO: 5259066 - DNA, 25 bp, Homo sapien
tccccgggaaacagcgagaagctgc

SEQ ID NO: 5259067 - DNA, 25 bp, Homo sapien
caaggacgtggtcccacttggaggc

SEQ ID NO: 5259068 - DNA, 25 bp, Homo sapien
gactgcatggtggaattccccggga

SEQ ID NO: 5259069 - DNA, 25 bp, Homo sapien
cttttcatgagattgtgagacgagg

SEQ ID NO: 5259070 - DNA, 25 bp, Homo sapien
gtctctggatccatcgaggtggtcc

SEQ ID NO: 5259071 - DNA, 25 bp, Homo sapien
gctctgctcgttttaaggtttgaca

SEQ ID NO: 5259072 - DNA, 25 bp, Homo sapien
ctggacgcttcttcgcggagggcac

SEQ ID NO: 5259073 - DNA, 25 bp, Homo sapien
cgggtgtgacctgccctgacggtga

SEQ ID NO: 5259074 - DNA, 25 bp, Homo sapien
aagttacaagaatttgtcctcaata

SEQ ID NO: 5259075 - DNA, 25 bp, Homo sapien
actgcatttccagcgaccctcgcta

SEQ ID NO: 5259076 - DNA, 25 bp, Homo sapien
ggcgctggcccaccggaatctgaac

SEQ ID NO: 5259077 - DNA, 25 bp, Homo sapien
ggaatctgaaccactgcatttccag

SEQ ID NO: 5259078 - DNA, 25 bp, Homo sapien
taaaggtagtcagtgttacccactc

SEQ ID NO: 5259079 - DNA, 25 bp, Homo sapien
gccaagatgtcctaagcaagtaatt

SEQ ID NO: 5259080 - DNA, 25 bp, Homo sapien
ccaagatgtgccgagggttagaata

SEQ ID NO: 5259081 - DNA, 25 bp, Homo sapien
tcactgcagcgtggtttctaacaac

SEQ ID NO: 5259082 - DNA, 25 bp, Homo sapien
cagggctggcatatactaggctctc

SEQ ID NO: 5259083 - DNA, 25 bp, Homo sapien
tttgtgttctccatccacagtcggg

SEQ ID NO: 5259084 - DNA, 25 bp, Homo sapien
tgcacatcgccggaagattctaaga

SEQ ID NO: 5259085 - DNA, 25 bp, Homo sapien
tatttatagctctcatgcgaggccg

SEQ ID NO: 5259086 - DNA, 25 bp, Homo sapien
tgggtagaccctgtttccaggcgtc

SEQ ID NO: 5259087 - DNA, 25 bp, Homo sapien
cccttcccggactcatgctggtggt

SEQ ID NO: 5259088 - DNA, 25 bp, Homo sapien
tttctcagaccgacagagagccctg

SEQ ID NO: 5259089 - DNA, 25 bp, Homo sapien
gcttgactcgggcaatgacatgatt

SEQ ID NO: 5259090 - DNA, 25 bp, Homo sapien
cagggcagtcccctccaacaactgg

SEQ ID NO: 5259091 - DNA, 25 bp, Homo sapien
gggcagtcccctccaacaactggcc

SEQ ID NO: 5259092 - DNA, 25 bp, Homo sapien
ctgcagggcagtcccctccaacaac

SEQ ID NO: 5259093 - DNA, 25 bp, Homo sapien
tgcagggcagtcccctccaacaact

SEQ ID NO: 5259094 - DNA, 25 bp, Homo sapien
ctgtccctgggaactggtgttttga

SEQ ID NO: 5259095 - DNA, 25 bp, Homo sapien
gatccacagtaacagctgtccctgg

SEQ ID NO: 5259096 - DNA, 25 bp, Homo sapien
tttgagcaggtaaggctgactgcac

SEQ ID NO: 5259097 - DNA, 25 bp, Homo sapien
tctactggaaagtgttgagggcgtc

SEQ ID NO: 5259098 - DNA, 25 bp, Homo sapien
caggacccaggcttgtggccaagtc

SEQ ID NO: 5259099 - DNA, 25 bp, Homo sapien
cctttgccaccgaatggtgtttgca

SEQ ID NO: 5259100 - DNA, 25 bp, Homo sapien
acgtgggtcataaagtgggtcctgt

SEQ ID NO: 5259101 - DNA, 25 bp, Homo sapien
tgggtcctgttcctggagtgcgcac

SEQ ID NO: 5259102 - DNA, 25 bp, Homo sapien
tgggtggggtgtgaaccccagtcat

SEQ ID NO: 5259103 - DNA, 25 bp, Homo sapien
tgggcatgggtggggtgtgaacccc

SEQ ID NO: 5259104 - DNA, 25 bp, Homo sapien
catgggtggggtgtgaaccccagtc

SEQ ID NO: 5259105 - DNA, 25 bp, Homo sapien
ggcatgggtggggtgtgaaccccag

SEQ ID NO: 5259106 - DNA, 25 bp, Homo sapien
cttcctcgtgtttcctgctggccag

SEQ ID NO: 5259107 - DNA, 25 bp, Homo sapien
tcctcgtgtttcctgctggccaggc

SEQ ID NO: 5259108 - DNA, 25 bp, Homo sapien
gtgtttcctgctggccaggcctatg

SEQ ID NO: 5259109 - DNA, 25 bp, Homo sapien
tcgtgtttcctgctggccaggccta

SEQ ID NO: 5259110 - DNA, 25 bp, Homo sapien
cctttgctctgtgtaaaaatgacgt

SEQ ID NO: 5259111 - DNA, 25 bp, Homo sapien
aaagtcattaggtgtcctttccatg

SEQ ID NO: 5259112 - DNA, 25 bp, Homo sapien
taaaaatgacgtgaaaggctgatcc

SEQ ID NO: 5259113 - DNA, 25 bp, Homo sapien
tggagggaggtcactgagcaagtcc

SEQ ID NO: 5259114 - DNA, 25 bp, Homo sapien
gcccgagcagtgtggagcgaataca

SEQ ID NO: 5259115 - DNA, 25 bp, Homo sapien
gagcagtgtggagcgaatacagccc

SEQ ID NO: 5259116 - DNA, 25 bp, Homo sapien
tggagcgaatacagccccgctttct

SEQ ID NO: 5259117 - DNA, 25 bp, Homo sapien
tggactcggcccgagcagtgtggag

SEQ ID NO: 5259118 - DNA, 25 bp, Homo sapien
ttagattaacggcacttgggaatct

SEQ ID NO: 5259119 - DNA, 25 bp, Homo sapien
gatttagattaacggcacttgggaa

SEQ ID NO: 5259120 - DNA, 25 bp, Homo sapien
tttgatttagattaacggcacttgg

SEQ ID NO: 5259121 - DNA, 25 bp, Homo sapien
ttaacggcacttgggaatctaagac

SEQ ID NO: 5259122 - DNA, 25 bp, Homo sapien
ttcatttgacagaacggtggcagtt

SEQ ID NO: 5259123 - DNA, 25 bp, Homo sapien
tatttattgataccaagtaatgcaa

SEQ ID NO: 5259124 - DNA, 25 bp, Homo sapien
taatgcaattcatttgacagaacgg

SEQ ID NO: 5259125 - DNA, 25 bp, Homo sapien
catgtttagcaagaacacactgtct

SEQ ID NO: 5259126 - DNA, 25 bp, Homo sapien
catgaaggaggttcttgtctgtgca

SEQ ID NO: 5259127 - DNA, 25 bp, Homo sapien
cagagtgtggtcttgtggtgaggac

SEQ ID NO: 5259128 - DNA, 25 bp, Homo sapien
gctcttatgtaagcggggcccaagc

SEQ ID NO: 5259129 - DNA, 25 bp, Homo sapien
aggcccctgtggtggacgccactcg

SEQ ID NO: 5259130 - DNA, 25 bp, Homo sapien
tgaagctgcctagtgcgttgcctgg

SEQ ID NO: 5259131 - DNA, 25 bp, Homo sapien
gaaagctgccttccgtagacaatag

SEQ ID NO: 5259132 - DNA, 25 bp, Homo sapien
gataaggtggtgacttaatccccag

SEQ ID NO: 5259133 - DNA, 25 bp, Homo sapien
tgttctgccaaactgatcccaagtg

SEQ ID NO: 5259134 - DNA, 25 bp, Homo sapien
atatttggtgtgtttggtgatttgc

SEQ ID NO: 5259135 - DNA, 25 bp, Homo sapien
aacaccatgtgcttggagtactcca

SEQ ID NO: 5259136 - DNA, 25 bp, Homo sapien
tgtctggagtgaaaggatatgttaa

SEQ ID NO: 5259137 - DNA, 25 bp, Homo sapien
tatgttcttcgttttgtctggagtg

SEQ ID NO: 5259138 - DNA, 25 bp, Homo sapien
agagtagagggatttactcttgtag

SEQ ID NO: 5259139 - DNA, 25 bp, Homo sapien
gagagtagagggatttactcttgta

SEQ ID NO: 5259140 - DNA, 25 bp, Homo sapien
gagtagagggatttactcttgtagg

SEQ ID NO: 5259141 - DNA, 25 bp, Homo sapien
agtagagggatttactcttgtaggg

SEQ ID NO: 5259142 - DNA, 25 bp, Homo sapien
tcagttaaatttgtctgttccctgg

SEQ ID NO: 5259143 - DNA, 25 bp, Homo sapien
cccaggacttacatgctcagttaaa

SEQ ID NO: 5259144 - DNA, 25 bp, Homo sapien
agacactccgagtttctgcccagga

SEQ ID NO: 5259145 - DNA, 25 bp, Homo sapien
cagagtgaagggactttcatagaca

SEQ ID NO: 5259146 - DNA, 25 bp, Homo sapien
acggtgcccagcgtcgccagtgtgt

SEQ ID NO: 5259147 - DNA, 25 bp, Homo sapien
ccagcgtcgccagtgtgtctgagcc

SEQ ID NO: 5259148 - DNA, 25 bp, Homo sapien
ccgtgggctcctctgcacgaggacg

SEQ ID NO: 5259149 - DNA, 25 bp, Homo sapien
gtgggctgctgggacgatgacccgt

SEQ ID NO: 5259150 - DNA, 25 bp, Homo sapien
tgaggttgtagagtgacccacggcc

SEQ ID NO: 5259151 - DNA, 25 bp, Homo sapien
ctttcgggagcattttataagtgcc

SEQ ID NO: 5259152 - DNA, 25 bp, Homo sapien
taaggagagcccacacttcatacta

SEQ ID NO: 5259153 - DNA, 25 bp, Homo sapien
gccagcagcgtgctcttgctatctg

SEQ ID NO: 5259154 - DNA, 25 bp, Homo sapien
ctgctggaacaccagcggaagctgg

SEQ ID NO: 5259155 - DNA, 25 bp, Homo sapien
tgctggaacaccagcggaagctgga

SEQ ID NO: 5259156 - DNA, 25 bp, Homo sapien
gctggaacaccagcggaagctggag

SEQ ID NO: 5259157 - DNA, 25 bp, Homo sapien
ttccacttcgaaggtaagacaatgc

SEQ ID NO: 5259158 - DNA, 25 bp, Homo sapien
agagcccggaatggccctgacttct

SEQ ID NO: 5259159 - DNA, 25 bp, Homo sapien
ttttcttctagcaagccaatggctt

SEQ ID NO: 5259160 - DNA, 25 bp, Homo sapien
acaccagggcagacgtgtagggcct

SEQ ID NO: 5259161 - DNA, 25 bp, Homo sapien
gcacgttgatgtgcaggttcctccg

SEQ ID NO: 5259162 - DNA, 25 bp, Homo sapien
cacttgggtgcacaagcacgttgat

SEQ ID NO: 5259163 - DNA, 25 bp, Homo sapien
ttgtcttggagcagcgagccctgta

SEQ ID NO: 5259164 - DNA, 25 bp, Homo sapien
cctgtagcagaaggcttgtgccgcc

SEQ ID NO: 5259165 - DNA, 25 bp, Homo sapien
gaaggttggcgcccacagagaaggg

SEQ ID NO: 5259166 - DNA, 25 bp, Homo sapien
gaagggcagcgcccttgcacgctca

SEQ ID NO: 5259167 - DNA, 25 bp, Homo sapien
gagaagggcagcgcccttgcacgct

SEQ ID NO: 5259168 - DNA, 25 bp, Homo sapien
cttgccaacgccgctgaaggttggc

SEQ ID NO: 5259169 - DNA, 25 bp, Homo sapien
gtgaccatgaaagggcttgggccag

SEQ ID NO: 5259170 - DNA, 25 bp, Homo sapien
tgtgaccatgaaagggcttgggcca

SEQ ID NO: 5259171 - DNA, 25 bp, Homo sapien
tctgggtggtcgtggaaaccggctg

SEQ ID NO: 5259172 - DNA, 25 bp, Homo sapien
cagtgggaagcgaggtccaggaacg

SEQ ID NO: 5259173 - DNA, 25 bp, Homo sapien
ccaggaacgggattgatgccctggt

SEQ ID NO: 5259174 - DNA, 25 bp, Homo sapien
cgtggaaaccggctgagtcctcagc

SEQ ID NO: 5259175 - DNA, 25 bp, Homo sapien
ctggtgttcccatccatgggcggca

SEQ ID NO: 5259176 - DNA, 25 bp, Homo sapien
ttcccatccatgggcggcagcttac

SEQ ID NO: 5259177 - DNA, 25 bp, Homo sapien
gagctgtgccgaatgcctgatccag

SEQ ID NO: 5259178 - DNA, 25 bp, Homo sapien
ctgtgccgaatgcctgatccagggc

SEQ ID NO: 5259179 - DNA, 25 bp, Homo sapien
gctgtgccgaatgcctgatccaggg

SEQ ID NO: 5259180 - DNA, 25 bp, Homo sapien
ctgagctgtgccgaatgcctgatcc

SEQ ID NO: 5259181 - DNA, 25 bp, Homo sapien
gagggacccccccataggatacatc

SEQ ID NO: 5259182 - DNA, 25 bp, Homo sapien
agcctccagggtagtcaccgaggga

SEQ ID NO: 5259183 - DNA, 25 bp, Homo sapien
tccatgatagacaccaagggacccc

SEQ ID NO: 5259184 - DNA, 25 bp, Homo sapien
ggcagacactgagggatagccctcc

SEQ ID NO: 5259185 - DNA, 25 bp, Homo sapien
cacggggcacccttcatagggcaga

SEQ ID NO: 5259186 - DNA, 25 bp, Homo sapien
cgaggcacccctatagggcacaact

SEQ ID NO: 5259187 - DNA, 25 bp, Homo sapien
tccccagcagttagggtacacctct

SEQ ID NO: 5259188 - DNA, 25 bp, Homo sapien
agggcacatgtctccccacgagaca

SEQ ID NO: 5259189 - DNA, 25 bp, Homo sapien
tccttctcggatggtgcttttccac

SEQ ID NO: 5259190 - DNA, 25 bp, Homo sapien
gtggtttagacacagccttgcctct

SEQ ID NO: 5259191 - DNA, 25 bp, Homo sapien
ctttccggtttcctggctgtttgtg

SEQ ID NO: 5259192 - DNA, 25 bp, Homo sapien
ttaatgctcgtggtccccttggact

SEQ ID NO: 5259193 - DNA, 25 bp, Homo sapien
gacgacgtagatgagaagctgagaa

SEQ ID NO: 5259194 - DNA, 25 bp, Homo sapien
tccgtgctggttgaatttgtagctt

SEQ ID NO: 5259195 - DNA, 25 bp, Homo sapien
tgggattgctgatgtctcattccgt

SEQ ID NO: 5259196 - DNA, 25 bp, Homo sapien
tagcttttacaagaagacgacgtag

SEQ ID NO: 5259197 - DNA, 25 bp, Homo sapien
ttcacagtgcatgattaggacccca

SEQ ID NO: 5259198 - DNA, 25 bp, Homo sapien
tccttgccgttgatccacctggagc

SEQ ID NO: 5259199 - DNA, 25 bp, Homo sapien
tgttgtcactgcaccctggtgagcc

SEQ ID NO: 5259200 - DNA, 25 bp, Homo sapien
gcagtccttgccgttgatccacctg

SEQ ID NO: 5259201 - DNA, 25 bp, Homo sapien
tgtttgacaaaccaaggagaggaca

SEQ ID NO: 5259202 - DNA, 25 bp, Homo sapien
cctgtgcttcaaaggtgagcccgga

SEQ ID NO: 5259203 - DNA, 25 bp, Homo sapien
cataatcactgtcgagaaatggagg

SEQ ID NO: 5259204 - DNA, 25 bp, Homo sapien
tgagcccggagagctctgtactcgg

SEQ ID NO: 5259205 - DNA, 25 bp, Homo sapien
atccagaggcagatcctcatcgctg

SEQ ID NO: 5259206 - DNA, 25 bp, Homo sapien
ggcgcagctccacgagcacatcaag

SEQ ID NO: 5259207 - DNA, 25 bp, Homo sapien
agctcctggcgctcaagcagaagca

SEQ ID NO: 5259208 - DNA, 25 bp, Homo sapien
tcctcatcgctgagttccagaggca

SEQ ID NO: 5259209 - DNA, 25 bp, Homo sapien
tagccttttctcaatagcacattag

SEQ ID NO: 5259210 - DNA, 25 bp, Homo sapien
tcaatagcacattagtacagggcag

SEQ ID NO: 5259211 - DNA, 25 bp, Homo sapien
atagcacattagtacagggcagaaa

SEQ ID NO: 5259212 - DNA, 25 bp, Homo sapien
tttctcaatagcacattagtacagg

SEQ ID NO: 5259213 - DNA, 25 bp, Homo sapien
aaaggggtgcgcaggtcgggctgtt

SEQ ID NO: 5259214 - DNA, 25 bp, Homo sapien
ggacctgccgtaaaaggggtgcgca

SEQ ID NO: 5259215 - DNA, 25 bp, Homo sapien
tgctggctcagagtgagtgcctgca

SEQ ID NO: 5259216 - DNA, 25 bp, Homo sapien
ggctcagagtgagtgcctgcacaca

SEQ ID NO: 5259217 - DNA, 25 bp, Homo sapien
caggtcacatgagtgttggttatgg

SEQ ID NO: 5259218 - DNA, 25 bp, Homo sapien
tggcccaggtcacatgagtgttggt

SEQ ID NO: 5259219 - DNA, 25 bp, Homo sapien
gcccaggtcacatgagtgttggtta

SEQ ID NO: 5259220 - DNA, 25 bp, Homo sapien
ttggcccaggtcacatgagtgttgg

SEQ ID NO: 5259221 - DNA, 25 bp, Homo sapien
acgcccaaaggtgctgaccctgagg

SEQ ID NO: 5259222 - DNA, 25 bp, Homo sapien
atgcacctggacaaggtcacgccca

SEQ ID NO: 5259223 - DNA, 25 bp, Homo sapien
ggtcttaagccagtccagagacggg

SEQ ID NO: 5259224 - DNA, 25 bp, Homo sapien
taggaactgagttgctgacaaggcc

SEQ ID NO: 5259225 - DNA, 25 bp, Homo sapien
agggagcccgccagctgagtcttct

SEQ ID NO: 5259226 - DNA, 25 bp, Homo sapien
cgtgcttgtgagagccggacccgta

SEQ ID NO: 5259227 - DNA, 25 bp, Homo sapien
gagtttgcgagtttgctgacttagc

SEQ ID NO: 5259228 - DNA, 25 bp, Homo sapien
gaaagcatttagcaccgccgtgctt

SEQ ID NO: 5259229 - DNA, 25 bp, Homo sapien
ttatacaagtgtatgccttccccga

SEQ ID NO: 5259230 - DNA, 25 bp, Homo sapien
cttccccgatgggttcacccatggg

SEQ ID NO: 5259231 - DNA, 25 bp, Homo sapien
taaataacatggtcgttgttgatgc

SEQ ID NO: 5259232 - DNA, 25 bp, Homo sapien
cttcctggagataaatgcaactttg

SEQ ID NO: 5259233 - DNA, 25 bp, Homo sapien
ccttggcatccaagtgagcgcatct

SEQ ID NO: 5259234 - DNA, 25 bp, Homo sapien
gcatctcctccacgctcaatgatga

SEQ ID NO: 5259235 - DNA, 25 bp, Homo sapien
ggcatccaagtgagcgcatctcctc

SEQ ID NO: 5259236 - DNA, 25 bp, Homo sapien
aatgctggccggcatccctgtgagg

SEQ ID NO: 5259237 - DNA, 25 bp, Homo sapien
tccgtagggagacgcgcaccgagct

SEQ ID NO: 5259238 - DNA, 25 bp, Homo sapien
tctgcgaggagtaacttgcctctct

SEQ ID NO: 5259239 - DNA, 25 bp, Homo sapien
ggagacacagatctgcgaggagtaa

SEQ ID NO: 5259240 - DNA, 25 bp, Homo sapien
ccgcactcttccatgtccgtaggga

SEQ ID NO: 5259241 - DNA, 25 bp, Homo sapien
caaaatatcagtgtaagaggaaatc

SEQ ID NO: 5259242 - DNA, 25 bp, Homo sapien
catggatggcacactgcacaataaa

SEQ ID NO: 5259243 - DNA, 25 bp, Homo sapien
gtagctaagtcatgcatttctgatg

SEQ ID NO: 5259244 - DNA, 25 bp, Homo sapien
cacaataaataaagggtgaaggaca

SEQ ID NO: 5259245 - DNA, 25 bp, Homo sapien
tcccgggaaccatcgtcaactcctc

SEQ ID NO: 5259246 - DNA, 25 bp, Homo sapien
ctgtcccgggaaccatcgtcaactc

SEQ ID NO: 5259247 - DNA, 25 bp, Homo sapien
accatcgtcaactcctccttccact

SEQ ID NO: 5259248 - DNA, 25 bp, Homo sapien
gggaaccatcgtcaactcctccttc

SEQ ID NO: 5259249 - DNA, 25 bp, Homo sapien
cctgccagatgttagacggggtgta

SEQ ID NO: 5259250 - DNA, 25 bp, Homo sapien
tctggtccacatgactgccctgcca

SEQ ID NO: 5259251 - DNA, 25 bp, Homo sapien
tgacggcagactcggactcgagact

SEQ ID NO: 5259252 - DNA, 25 bp, Homo sapien
acccgtggcttcaccccagaagaag

SEQ ID NO: 5259253 - DNA, 25 bp, Homo sapien
tcgattccccgaggtcactcatttc

SEQ ID NO: 5259254 - DNA, 25 bp, Homo sapien
cactcagccgcttgtctgtgcctga

SEQ ID NO: 5259255 - DNA, 25 bp, Homo sapien
tcatttctccaagggggtcttctgc

SEQ ID NO: 5259256 - DNA, 25 bp, Homo sapien
gctgcctaaacctgaggatgcaaca

SEQ ID NO: 5259257 - DNA, 25 bp, Homo sapien
ccgttcaggcgtttgaatgtcagct

SEQ ID NO: 5259258 - DNA, 25 bp, Homo sapien
cagttatgaccgttcaggcgtttga

SEQ ID NO: 5259259 - DNA, 25 bp, Homo sapien
tatgaccgttcaggcgtttgaatgt

SEQ ID NO: 5259260 - DNA, 25 bp, Homo sapien
tcagttatgaccgttcaggcgtttg

SEQ ID NO: 5259261 - DNA, 25 bp, Homo sapien
cttttctagaaggctaaagcgcagt

SEQ ID NO: 5259262 - DNA, 25 bp, Homo sapien
tcttttctagaaggctaaagcgcag

SEQ ID NO: 5259263 - DNA, 25 bp, Homo sapien
ggctttggaagaccatcgactccgg

SEQ ID NO: 5259264 - DNA, 25 bp, Homo sapien
ctccggagcagaagttctgaggcct

SEQ ID NO: 5259265 - DNA, 25 bp, Homo sapien
ggcctggcctttggtcaggaatgaa

SEQ ID NO: 5259266 - DNA, 25 bp, Homo sapien
aagaccatcgactccggagcagaag

SEQ ID NO: 5259267 - DNA, 25 bp, Homo sapien
gggctgttgtctcggccttgagcag

SEQ ID NO: 5259268 - DNA, 25 bp, Homo sapien
tttgtgggagcagatctaggttgct

SEQ ID NO: 5259269 - DNA, 25 bp, Homo sapien
tgttgtctcggccttgagcagcttt

SEQ ID NO: 5259270 - DNA, 25 bp, Homo sapien
gagcagatctaggttgctgccacag

SEQ ID NO: 5259271 - DNA, 25 bp, Homo sapien
cttctcagtggcacagatttgggct

SEQ ID NO: 5259272 - DNA, 25 bp, Homo sapien
cagtggcacagatttgggctgagtt

SEQ ID NO: 5259273 - DNA, 25 bp, Homo sapien
tggcacagatttgggctgagttcat

SEQ ID NO: 5259274 - DNA, 25 bp, Homo sapien
tggggaaagatcctgccaactgcag

SEQ ID NO: 5259275 - DNA, 25 bp, Homo sapien
tcccctcaggctggttccaaggttc

SEQ ID NO: 5259276 - DNA, 25 bp, Homo sapien
cgctcgccttctccatcagaatgtt

SEQ ID NO: 5259277 - DNA, 25 bp, Homo sapien
gggtccagcagacccggagaagccc

SEQ ID NO: 5259278 - DNA, 25 bp, Homo sapien
tctccatcagaatgttctcgggtcc

SEQ ID NO: 5259279 - DNA, 25 bp, Homo sapien
gcttcctactataggtagtccccat

SEQ ID NO: 5259280 - DNA, 25 bp, Homo sapien
actgcagagcttcctactataggta

SEQ ID NO: 5259281 - DNA, 25 bp, Homo sapien
tctcattaggctttcctgacaaata

SEQ ID NO: 5259282 - DNA, 25 bp, Homo sapien
taccatcctgcagtctggtactgga

SEQ ID NO: 5259283 - DNA, 25 bp, Homo sapien
gaccaggtctttctatctgagtgtc

SEQ ID NO: 5259284 - DNA, 25 bp, Homo sapien
agaccaggtctttctatctgagtgt

SEQ ID NO: 5259285 - DNA, 25 bp, Homo sapien
accaggtctttctatctgagtgtcc

SEQ ID NO: 5259286 - DNA, 25 bp, Homo sapien
ctgtttcttctcgtgtcttaagtcc

SEQ ID NO: 5259287 - DNA, 25 bp, Homo sapien
gggtacagctccatcgaggaagcct

SEQ ID NO: 5259288 - DNA, 25 bp, Homo sapien
cccagaagtgtgtggagctcatgag

SEQ ID NO: 5259289 - DNA, 25 bp, Homo sapien
ggaagccttgccttgtctctcctgg

SEQ ID NO: 5259290 - DNA, 25 bp, Homo sapien
ttgtctctcctggacggtgattctc

SEQ ID NO: 5259291 - DNA, 25 bp, Homo sapien
caggcccttggccttttcgcggtag

SEQ ID NO: 5259292 - DNA, 25 bp, Homo sapien
ccttggccttttcgcggtagcttct

SEQ ID NO: 5259293 - DNA, 25 bp, Homo sapien
ttttcgcggtagcttctgcctgcca

SEQ ID NO: 5259294 - DNA, 25 bp, Homo sapien
ggccttttcgcggtagcttctgcct

SEQ ID NO: 5259295 - DNA, 25 bp, Homo sapien
ccccttggtgtttcccgctctcttg

SEQ ID NO: 5259296 - DNA, 25 bp, Homo sapien
cacttgctgggggtttggagtctcc

SEQ ID NO: 5259297 - DNA, 25 bp, Homo sapien
tccagggctaggcatccacactggg

SEQ ID NO: 5259298 - DNA, 25 bp, Homo sapien
gcacccacttgctgggggtttggag

SEQ ID NO: 5259299 - DNA, 25 bp, Homo sapien
tgtgtccaccttgtctgtgctgggt

SEQ ID NO: 5259300 - DNA, 25 bp, Homo sapien
agtgaagtctttccctactggacta

SEQ ID NO: 5259301 - DNA, 25 bp, Homo sapien
ttggcagtcaccacggcagtcacca

SEQ ID NO: 5259302 - DNA, 25 bp, Homo sapien
gatgggcaactgtctgtggtcgcct

SEQ ID NO: 5259303 - DNA, 25 bp, Homo sapien
tctttccctactggactatgggtca

SEQ ID NO: 5259304 - DNA, 25 bp, Homo sapien
acagaaggttttgcagactgaggaa

SEQ ID NO: 5259305 - DNA, 25 bp, Homo sapien
ggttttgcagactgaggaatcccca

SEQ ID NO: 5259306 - DNA, 25 bp, Homo sapien
gaaggttttgcagactgaggaatcc

SEQ ID NO: 5259307 - DNA, 25 bp, Homo sapien
ttgcagactgaggaatccccagcca

SEQ ID NO: 5259308 - DNA, 25 bp, Homo sapien
ataattccattttagtgtcgtgtct

SEQ ID NO: 5259309 - DNA, 25 bp, Homo sapien
gctgcatcgtggtcagcattgtggt

SEQ ID NO: 5259310 - DNA, 25 bp, Homo sapien
cacaggggccgctgcatcgtggtca

SEQ ID NO: 5259311 - DNA, 25 bp, Homo sapien
tcagcattgtggtcggctgtctatc

SEQ ID NO: 5259312 - DNA, 25 bp, Homo sapien
tgtggtcggctgtctatctgcagtc

SEQ ID NO: 5259313 - DNA, 25 bp, Homo sapien
tgccttttctaataaagcccaggcc

SEQ ID NO: 5259314 - DNA, 25 bp, Homo sapien
tctaataaagcccaggccgagtcac

SEQ ID NO: 5259315 - DNA, 25 bp, Homo sapien
cttttctaataaagcccaggccgag

SEQ ID NO: 5259316 - DNA, 25 bp, Homo sapien
tcagggtgccttttctaataaagcc

SEQ ID NO: 5259317 - DNA, 25 bp, Homo sapien
cgagaagcggcagactctctgtgcc

SEQ ID NO: 5259318 - DNA, 25 bp, Homo sapien
gccctgataggagctccagaggata

SEQ ID NO: 5259319 - DNA, 25 bp, Homo sapien
tggcagactgtaagggccggtttca

SEQ ID NO: 5259320 - DNA, 25 bp, Homo sapien
gatgcagggttgaaacctgacccat

SEQ ID NO: 5259321 - DNA, 25 bp, Homo sapien
agacaccttccctgtgacattgagt

SEQ ID NO: 5259322 - DNA, 25 bp, Homo sapien
gctctttgacccaggtagcaggggt

SEQ ID NO: 5259323 - DNA, 25 bp, Homo sapien
tccctgtgacattgagttagctctt

SEQ ID NO: 5259324 - DNA, 25 bp, Homo sapien
gacccaggtagcaggggttagctct

SEQ ID NO: 5259325 - DNA, 25 bp, Homo sapien
gaggcaaccagccatacccatgtgt

SEQ ID NO: 5259326 - DNA, 25 bp, Homo sapien
gattttagccctgtcatgtcattta

SEQ ID NO: 5259327 - DNA, 25 bp, Homo sapien
gattcaagcttggttatttttggta

SEQ ID NO: 5259328 - DNA, 25 bp, Homo sapien
aatggtgcacctcttttgggaggca

SEQ ID NO: 5259329 - DNA, 25 bp, Homo sapien
ggtctgatttgcctttccgccctca

SEQ ID NO: 5259330 - DNA, 25 bp, Homo sapien
gccctcactaacatggtccagcgtt

SEQ ID NO: 5259331 - DNA, 25 bp, Homo sapien
tggtccagcgtttgatcctttgttt

SEQ ID NO: 5259332 - DNA, 25 bp, Homo sapien
ctctccacccgtagttgggtcggtg

SEQ ID NO: 5259333 - DNA, 25 bp, Homo sapien
acacgtttgtagtaaagccattcac

SEQ ID NO: 5259334 - DNA, 25 bp, Homo sapien
gctggtttaagcagggccggtctcc

SEQ ID NO: 5259335 - DNA, 25 bp, Homo sapien
caagggagccccaagccgttgtgct

SEQ ID NO: 5259336 - DNA, 25 bp, Homo sapien
gccgttgtgctcacaggccgggtaa

SEQ ID NO: 5259337 - DNA, 25 bp, Homo sapien
tgtccagtaaagcaggacaggccag

SEQ ID NO: 5259338 - DNA, 25 bp, Homo sapien
tccttgtcccgtggaaggtgccgca

SEQ ID NO: 5259339 - DNA, 25 bp, Homo sapien
tttcactcgagagggttctggtctc

SEQ ID NO: 5259340 - DNA, 25 bp, Homo sapien
caggagctggttggttttcactcga

SEQ ID NO: 5259341 - DNA, 25 bp, Homo sapien
aagggcagagcccaattctttccag

SEQ ID NO: 5259342 - DNA, 25 bp, Homo sapien
tctggaagctggcttttatactgct

SEQ ID NO: 5259343 - DNA, 25 bp, Homo sapien
tgattttgtattgtgagggcaacaa

SEQ ID NO: 5259344 - DNA, 25 bp, Homo sapien
gcttttatactgcttagtgattttg

SEQ ID NO: 5259345 - DNA, 25 bp, Homo sapien
tggctggcaaccatatcattcaagt

SEQ ID NO: 5259346 - DNA, 25 bp, Homo sapien
ggtgagaaactaacggaatggcaat

SEQ ID NO: 5259347 - DNA, 25 bp, Homo sapien
caaagtcccaagaattggagtctgg

SEQ ID NO: 5259348 - DNA, 25 bp, Homo sapien
caagttaagccaagtgaggtgagaa

SEQ ID NO: 5259349 - DNA, 25 bp, Homo sapien
cctcggtggcgcgtggtgccactac

SEQ ID NO: 5259350 - DNA, 25 bp, Homo sapien
tgcagggcacgggactgctctcgag

SEQ ID NO: 5259351 - DNA, 25 bp, Homo sapien
cttcacgctgaagtctaaattcagc

SEQ ID NO: 5259352 - DNA, 25 bp, Homo sapien
tgctctcgaggaagctcctcggtgg

SEQ ID NO: 5259353 - DNA, 25 bp, Homo sapien
gtcagctaaggagaatggaaccctt

SEQ ID NO: 5259354 - DNA, 25 bp, Homo sapien
agtcagctaaggagaatggaaccct

SEQ ID NO: 5259355 - DNA, 25 bp, Homo sapien
atagtcagctaaggagaatggaacc

SEQ ID NO: 5259356 - DNA, 25 bp, Homo sapien
tagtcagctaaggagaatggaaccc

SEQ ID NO: 5259357 - DNA, 25 bp, Homo sapien
ccagttcacatcacttttatctgtt

SEQ ID NO: 5259358 - DNA, 25 bp, Homo sapien
cccatcggtcacattagagcaaagt

SEQ ID NO: 5259359 - DNA, 25 bp, Homo sapien
tatcattgggcttacagattaaaat

SEQ ID NO: 5259360 - DNA, 25 bp, Homo sapien
gaaatctaaagcatcccagttcaca

SEQ ID NO: 5259361 - DNA, 25 bp, Homo sapien
gttgctgagtgcgttctttttcagc

SEQ ID NO: 5259362 - DNA, 25 bp, Homo sapien
tttaaagaaacctcatggccgttgc

SEQ ID NO: 5259363 - DNA, 25 bp, Homo sapien
ctgttgggtttaaagaaacctcatg

SEQ ID NO: 5259364 - DNA, 25 bp, Homo sapien
tccgccacggctcacccttcagcat

SEQ ID NO: 5259365 - DNA, 25 bp, Homo sapien
cagcgagcagggaatgaggggcgcg

SEQ ID NO: 5259366 - DNA, 25 bp, Homo sapien
agcagggaatgaggggcgcgggcac

SEQ ID NO: 5259367 - DNA, 25 bp, Homo sapien
cgagcagggaatgaggggcgcgggc

SEQ ID NO: 5259368 - DNA, 25 bp, Homo sapien
cttcagcgagcagggaatgaggggc

SEQ ID NO: 5259369 - DNA, 25 bp, Homo sapien
ttcttgtggagagctcaatcctcca

SEQ ID NO: 5259370 - DNA, 25 bp, Homo sapien
cagaacccgagtgaattccagatgc

SEQ ID NO: 5259371 - DNA, 25 bp, Homo sapien
ttgtgtagggtccagaagtttcttg

SEQ ID NO: 5259372 - DNA, 25 bp, Homo sapien
gatagacaatagatgggcctccaga

SEQ ID NO: 5259373 - DNA, 25 bp, Homo sapien
tgtcctgtgcgtctccccttggttt

SEQ ID NO: 5259374 - DNA, 25 bp, Homo sapien
ggttttccagcgtaagcacatcagg

SEQ ID NO: 5259375 - DNA, 25 bp, Homo sapien
ccctgtcaggcagtgtgtgttccat

SEQ ID NO: 5259376 - DNA, 25 bp, Homo sapien
gttgggtagtggctccggccactct

SEQ ID NO: 5259377 - DNA, 25 bp, Homo sapien
tccagatgtgaggaggttggcgacg

SEQ ID NO: 5259378 - DNA, 25 bp, Homo sapien
aggtttctggggcgtcgaccctgct

SEQ ID NO: 5259379 - DNA, 25 bp, Homo sapien
gggagggcactttggcctgcaggga

SEQ ID NO: 5259380 - DNA, 25 bp, Homo sapien
aggtgggcagaactcgatctccctg

SEQ ID NO: 5259381 - DNA, 25 bp, Homo sapien
gatgtctcctagtgttgccgccatt

SEQ ID NO: 5259382 - DNA, 25 bp, Homo sapien
gtgttgccgccattcatgttgttga

SEQ ID NO: 5259383 - DNA, 25 bp, Homo sapien
ggatgtctcctagtgttgccgccat

SEQ ID NO: 5259384 - DNA, 25 bp, Homo sapien
cagaggcgctggtgcagacagcttt

SEQ ID NO: 5259385 - DNA, 25 bp, Homo sapien
gcggaactgatgaccgcgtcctcca

SEQ ID NO: 5259386 - DNA, 25 bp, Homo sapien
agtgcctgcgcggaactgatgaccg

SEQ ID NO: 5259387 - DNA, 25 bp, Homo sapien
gcagacagctttgccagtccacact

SEQ ID NO: 5259388 - DNA, 25 bp, Homo sapien
tttttatgaaccaagattcgcagac

SEQ ID NO: 5259389 - DNA, 25 bp, Homo sapien
ttttttatgaaccaagattcgcaga

SEQ ID NO: 5259390 - DNA, 25 bp, Homo sapien
cagggtgattttttatgaaccaaga

SEQ ID NO: 5259391 - DNA, 25 bp, Homo sapien
tgattttttatgaaccaagattcgc

SEQ ID NO: 5259392 - DNA, 25 bp, Homo sapien
cttcagaaggttttggttgttagtg

SEQ ID NO: 5259393 - DNA, 25 bp, Homo sapien
gcaagatcagggctggtagggcgcc

SEQ ID NO: 5259394 - DNA, 25 bp, Homo sapien
gctggtagggcgccctcctcatcgt

SEQ ID NO: 5259395 - DNA, 25 bp, Homo sapien
ttggttgttagtggtctgcagcgca

SEQ ID NO: 5259396 - DNA, 25 bp, Homo sapien
ccctttctataggagagctgtaagg

SEQ ID NO: 5259397 - DNA, 25 bp, Homo sapien
agtcgacgggcctcttgcttttgga

SEQ ID NO: 5259398 - DNA, 25 bp, Homo sapien
tgttcaggctctgccaccagcgggt

SEQ ID NO: 5259399 - DNA, 25 bp, Homo sapien
cccagggtgtgagaatgtctgccaa

SEQ ID NO: 5259400 - DNA, 25 bp, Homo sapien
tcttatgagctcatacgctttccct

SEQ ID NO: 5259401 - DNA, 25 bp, Homo sapien
gtgaactcttatgagctcatacgct

SEQ ID NO: 5259402 - DNA, 25 bp, Homo sapien
tatgagctcatacgctttccctaaa

SEQ ID NO: 5259403 - DNA, 25 bp, Homo sapien
gaactcttatgagctcatacgcttt

SEQ ID NO: 5259404 - DNA, 25 bp, Homo sapien
ggtaattttcatgtgactctgtgtt

SEQ ID NO: 5259405 - DNA, 25 bp, Homo sapien
acacagatggtcttgctccctccag

SEQ ID NO: 5259406 - DNA, 25 bp, Homo sapien
gggactctgcacacggaattccacg

SEQ ID NO: 5259407 - DNA, 25 bp, Homo sapien
gaattccacgagaataacatcacgg

SEQ ID NO: 5259408 - DNA, 25 bp, Homo sapien
taaattgtggaacagaagcacacag

SEQ ID NO: 5259409 - DNA, 25 bp, Homo sapien
ttgtgcacttcttgaaagccaactt

SEQ ID NO: 5259410 - DNA, 25 bp, Homo sapien
tgtgcacttcttgaaagccaactta

SEQ ID NO: 5259411 - DNA, 25 bp, Homo sapien
gtgcacttcttgaaagccaacttac

SEQ ID NO: 5259412 - DNA, 25 bp, Homo sapien
tccactggtccgcagttttcagtgc

SEQ ID NO: 5259413 - DNA, 25 bp, Homo sapien
cagagggtagtagtccctgggctct

SEQ ID NO: 5259414 - DNA, 25 bp, Homo sapien
tggtccgcagttttcagtgctgttc

SEQ ID NO: 5259415 - DNA, 25 bp, Homo sapien
ctctccagagggtagtagtccctgg

SEQ ID NO: 5259416 - DNA, 25 bp, Homo sapien
ggggcatgcagggtgctggccgctg

SEQ ID NO: 5259417 - DNA, 25 bp, Homo sapien
ggggctgcccggtcccacttggcat

SEQ ID NO: 5259418 - DNA, 25 bp, Homo sapien
ctgcaggggcatgcagggtgctggc

SEQ ID NO: 5259419 - DNA, 25 bp, Homo sapien
ggcatgcagggtgctggccgctggg

SEQ ID NO: 5259420 - DNA, 25 bp, Homo sapien
tatctgccatctgtagcagagggca

SEQ ID NO: 5259421 - DNA, 25 bp, Homo sapien
ccgctccttccgcttgtctttggag

SEQ ID NO: 5259422 - DNA, 25 bp, Homo sapien
tggcctttctggtgagcacggtatc

SEQ ID NO: 5259423 - DNA, 25 bp, Homo sapien
ccttccgcttgtctttggagggcct

SEQ ID NO: 5259424 - DNA, 25 bp, Homo sapien
tggtgccctctggtgtgcctggccc

SEQ ID NO: 5259425 - DNA, 25 bp, Homo sapien
ggagcaactgtctcaagtgaaaccc

SEQ ID NO: 5259426 - DNA, 25 bp, Homo sapien
caagggcaagtgtctggcgtagcgt

SEQ ID NO: 5259427 - DNA, 25 bp, Homo sapien
ttgtggcaatgtccctaggagcaac

SEQ ID NO: 5259428 - DNA, 25 bp, Homo sapien
agagcccgtggtaacaaagtccttg

SEQ ID NO: 5259429 - DNA, 25 bp, Homo sapien
tttggatagggtccagtgaaggacc

SEQ ID NO: 5259430 - DNA, 25 bp, Homo sapien
tggttgtaatattcctgcgtggtgc

SEQ ID NO: 5259431 - DNA, 25 bp, Homo sapien
tctctggtggttcctcgagtggccc

SEQ ID NO: 5259432 - DNA, 25 bp, Homo sapien
gctgcctcctagatgtgttttgtgg

SEQ ID NO: 5259433 - DNA, 25 bp, Homo sapien
gaacaggaagtatttgaggttggct

SEQ ID NO: 5259434 - DNA, 25 bp, Homo sapien
tgttttgtggcggttgttgcattgt

SEQ ID NO: 5259435 - DNA, 25 bp, Homo sapien
tgcattgtttcgtttggtgagaaga

SEQ ID NO: 5259436 - DNA, 25 bp, Homo sapien
cgtgaccgagtgccctggctcctgt

SEQ ID NO: 5259437 - DNA, 25 bp, Homo sapien
atggcgctgctctccaccgtgaccg

SEQ ID NO: 5259438 - DNA, 25 bp, Homo sapien
ggcttacggccctcatggcgctgct

SEQ ID NO: 5259439 - DNA, 25 bp, Homo sapien
tgctgagggcttacggccctcatgg

SEQ ID NO: 5259440 - DNA, 25 bp, Homo sapien
aaaaaagtcagtagcaacaggaagt

SEQ ID NO: 5259441 - DNA, 25 bp, Homo sapien
aacaggaagtgtggatgaaggactt

SEQ ID NO: 5259442 - DNA, 25 bp, Homo sapien
tccgggagcaaaccggaggcaaaca

SEQ ID NO: 5259443 - DNA, 25 bp, Homo sapien
tcaggcatccgggagcaaaccggag

SEQ ID NO: 5259444 - DNA, 25 bp, Homo sapien
gcgcttcggggaggacgcctacctc

SEQ ID NO: 5259445 - DNA, 25 bp, Homo sapien
gggaggacgcctacctcaggcatcc

SEQ ID NO: 5259446 - DNA, 25 bp, Homo sapien
ggacgcctacctcaggcatccggga

SEQ ID NO: 5259447 - DNA, 25 bp, Homo sapien
cggttgaggacaggggcgcttcggg

SEQ ID NO: 5259448 - DNA, 25 bp, Homo sapien
gaagccaggctgaacgtttccaaga

SEQ ID NO: 5259449 - DNA, 25 bp, Homo sapien
caccccgaaaggaagttgaagccag

SEQ ID NO: 5259450 - DNA, 25 bp, Homo sapien
tgtgccctccggtgccccagttaga

SEQ ID NO: 5259451 - DNA, 25 bp, Homo sapien
tgtgattcttccaagtcggccaggt

SEQ ID NO: 5259452 - DNA, 25 bp, Homo sapien
gcgcccagccccataggtaacattt

SEQ ID NO: 5259453 - DNA, 25 bp, Homo sapien
acattttaaggtactccaagtctat

SEQ ID NO: 5259454 - DNA, 25 bp, Homo sapien
tatttcattccataggtaattttta

SEQ ID NO: 5259455 - DNA, 25 bp, Homo sapien
aaaaaagtatcggtggtgatcagaa

SEQ ID NO: 5259456 - DNA, 25 bp, Homo sapien
cgcgccttttccattgccaccagct

SEQ ID NO: 5259457 - DNA, 25 bp, Homo sapien
ttgttggttaaatgagtcagtggca

SEQ ID NO: 5259458 - DNA, 25 bp, Homo sapien
catctgtcttccaagtacctttcag

SEQ ID NO: 5259459 - DNA, 25 bp, Homo sapien
cattgccaccagcttttgttggtta

SEQ ID NO: 5259460 - DNA, 25 bp, Homo sapien
ccgtgagggcctgtaggaaagacct

SEQ ID NO: 5259461 - DNA, 25 bp, Homo sapien
cactggccacgtgaccgtggacaga

SEQ ID NO: 5259462 - DNA, 25 bp, Homo sapien
agggcctgtaggaaagacctctgag

SEQ ID NO: 5259463 - DNA, 25 bp, Homo sapien
cctgatccccgtgagggcctgtagg

SEQ ID NO: 5259464 - DNA, 25 bp, Homo sapien
tcctggtggtaaaagaggccatcct

SEQ ID NO: 5259465 - DNA, 25 bp, Homo sapien
gaaatgaaatggctccgtgccatgt

SEQ ID NO: 5259466 - DNA, 25 bp, Homo sapien
ctggtggtaaaagaggccatccttt

SEQ ID NO: 5259467 - DNA, 25 bp, Homo sapien
ttggaaatgaaatggctccgtgcca

SEQ ID NO: 5259468 - DNA, 25 bp, Homo sapien
tttgtcactatctgagaagaggaag

SEQ ID NO: 5259469 - DNA, 25 bp, Homo sapien
gatcagcacgagtgggtataatgtg

SEQ ID NO: 5259470 - DNA, 25 bp, Homo sapien
tgagcgtccagaccgtttgtcacta

SEQ ID NO: 5259471 - DNA, 25 bp, Homo sapien
gaagagccgacttctgatcagcacg

SEQ ID NO: 5259472 - DNA, 25 bp, Homo sapien
gggttagcgtccggcactgagaccc

SEQ ID NO: 5259473 - DNA, 25 bp, Homo sapien
tagcgtccggcactgagacccatgt

SEQ ID NO: 5259474 - DNA, 25 bp, Homo sapien
cgtccggcactgagacccatgtctg

SEQ ID NO: 5259475 - DNA, 25 bp, Homo sapien
gggcctccacatgtggggttagcgt

SEQ ID NO: 5259476 - DNA, 25 bp, Homo sapien
gccgggatcttgtcttaaagagact

SEQ ID NO: 5259477 - DNA, 25 bp, Homo sapien
ccaaggacggctcaggccgggatct

SEQ ID NO: 5259478 - DNA, 25 bp, Homo sapien
agactgtggccgtgcttccagctgg

SEQ ID NO: 5259479 - DNA, 25 bp, Homo sapien
tccaggtggacgaccaaggacggct

SEQ ID NO: 5259480 - DNA, 25 bp, Homo sapien
agccccagcctttcataatgaggga

SEQ ID NO: 5259481 - DNA, 25 bp, Homo sapien
cataatgagggatgcggcatctgtc

SEQ ID NO: 5259482 - DNA, 25 bp, Homo sapien
tggcaaaacgcctttagtgtttggc

SEQ ID NO: 5259483 - DNA, 25 bp, Homo sapien
ggcttctcgatcatggctgctgccc

SEQ ID NO: 5259484 - DNA, 25 bp, Homo sapien
cccaggattgtgttccaccagccac

SEQ ID NO: 5259485 - DNA, 25 bp, Homo sapien
ccccaggattgtgttccaccagcca

SEQ ID NO: 5259486 - DNA, 25 bp, Homo sapien
ggatgccgtcatgcgttccagctgg

SEQ ID NO: 5259487 - DNA, 25 bp, Homo sapien
taaacgctgggttcttagcaccgct

SEQ ID NO: 5259488 - DNA, 25 bp, Homo sapien
tattctgtgcacattcacggatgcc

SEQ ID NO: 5259489 - DNA, 25 bp, Homo sapien
tgtttaggtccgttccaaagctgtc

SEQ ID NO: 5259490 - DNA, 25 bp, Homo sapien
ttgaggacactcagtacgatcgtcc

SEQ ID NO: 5259491 - DNA, 25 bp, Homo sapien
gcctccctctcagtgtgcatctggt

SEQ ID NO: 5259492 - DNA, 25 bp, Homo sapien
tgtgctggtgaggacacgaggtacc

SEQ ID NO: 5259493 - DNA, 25 bp, Homo sapien
gactgtgggtgcattgagcacactg

SEQ ID NO: 5259494 - DNA, 25 bp, Homo sapien
ggacacgaggtacccgtgctcctcg

SEQ ID NO: 5259495 - DNA, 25 bp, Homo sapien
ctcgcgcagcgctttctcacagaca

SEQ ID NO: 5259496 - DNA, 25 bp, Homo sapien
gcatgtgagtgtgcaccgcaccacg

SEQ ID NO: 5259497 - DNA, 25 bp, Homo sapien
tggtgcaggccaagaggctgttttc

SEQ ID NO: 5259498 - DNA, 25 bp, Homo sapien
caggaggtgcaggtcttggtgggcc

SEQ ID NO: 5259499 - DNA, 25 bp, Homo sapien
gcaggttctgccaaacccgtacttc

SEQ ID NO: 5259500 - DNA, 25 bp, Homo sapien
gcttgactgatcatagccaatccag

SEQ ID NO: 5259501 - DNA, 25 bp, Homo sapien
gccaatccagtgtcctttagcaggt

SEQ ID NO: 5259502 - DNA, 25 bp, Homo sapien
tgtaagccggcagctacagctagtt

SEQ ID NO: 5259503 - DNA, 25 bp, Homo sapien
cagccagtgtgggttgccggttctg

SEQ ID NO: 5259504 - DNA, 25 bp, Homo sapien
aggcagaccccatggcgggactgga

SEQ ID NO: 5259505 - DNA, 25 bp, Homo sapien
gctcgctgagctgtgaaccagacgt

SEQ ID NO: 5259506 - DNA, 25 bp, Homo sapien
tgtgtgtctgcttgaacacataggg

SEQ ID NO: 5259507 - DNA, 25 bp, Homo sapien
tggcctgcagcaaccccggtgcttc

SEQ ID NO: 5259508 - DNA, 25 bp, Homo sapien
gtgcttctccggctgccacgcctcc

SEQ ID NO: 5259509 - DNA, 25 bp, Homo sapien
gacactgctcctcgcgtcctgtggc

SEQ ID NO: 5259510 - DNA, 25 bp, Homo sapien
gctcctcgcgtcctgtggcctgcag

SEQ ID NO: 5259511 - DNA, 25 bp, Homo sapien
ctggctctatgctcggtgccaggac

SEQ ID NO: 5259512 - DNA, 25 bp, Homo sapien
tggttcgtctgtatagtggttttcg

SEQ ID NO: 5259513 - DNA, 25 bp, Homo sapien
tgctgagtcacgtttggtgagcagc

SEQ ID NO: 5259514 - DNA, 25 bp, Homo sapien
aatattctgggagaatggttcgtct

SEQ ID NO: 5259515 - DNA, 25 bp, Homo sapien
caagcacctttagcgagtttgtgat

SEQ ID NO: 5259516 - DNA, 25 bp, Homo sapien
tgcacagagaatgagcggtgctttc

SEQ ID NO: 5259517 - DNA, 25 bp, Homo sapien
tctgcacagagaatgagcggtgctt

SEQ ID NO: 5259518 - DNA, 25 bp, Homo sapien
tttctgcacagagaatgagcggtgc

SEQ ID NO: 5259519 - DNA, 25 bp, Homo sapien
cacagagaatgagcggtgctttcag

SEQ ID NO: 5259520 - DNA, 25 bp, Homo sapien
aggcccgatgcctgtgtcaccactg

SEQ ID NO: 5259521 - DNA, 25 bp, Homo sapien
ttggagaggccaagacgttcctcta

SEQ ID NO: 5259522 - DNA, 25 bp, Homo sapien
accgtcctttctgtcgaggtcccag

SEQ ID NO: 5259523 - DNA, 25 bp, Homo sapien
ctttctgtcgaggtcccagggagga

SEQ ID NO: 5259524 - DNA, 25 bp, Homo sapien
cgatggctgttgacggtgaggccca

SEQ ID NO: 5259525 - DNA, 25 bp, Homo sapien
tggctgttgacggtgaggcccacac

SEQ ID NO: 5259526 - DNA, 25 bp, Homo sapien
ccattcgatggctgttgacggtgag

SEQ ID NO: 5259527 - DNA, 25 bp, Homo sapien
gctgttgacggtgaggcccacactg

SEQ ID NO: 5259528 - DNA, 25 bp, Homo sapien
ttgcaaaaccggtggccggcgaagc

SEQ ID NO: 5259529 - DNA, 25 bp, Homo sapien
ctctccgttgcaaaaccggtggccg

SEQ ID NO: 5259530 - DNA, 25 bp, Homo sapien
gccagcgggctctccgttgcaaaac

SEQ ID NO: 5259531 - DNA, 25 bp, Homo sapien
tgctaggaagtgtgcagtgcgggcc

SEQ ID NO: 5259532 - DNA, 25 bp, Homo sapien
tgtcctgtcagagccgtgggcagcc

SEQ ID NO: 5259533 - DNA, 25 bp, Homo sapien
tgtggttggctgtcctgtcagagcc

SEQ ID NO: 5259534 - DNA, 25 bp, Homo sapien
catctccctctggtcgcatgtggtt

SEQ ID NO: 5259535 - DNA, 25 bp, Homo sapien
gataaaccgctgcatctgcccagcg

SEQ ID NO: 5259536 - DNA, 25 bp, Homo sapien
gggtgcctgtgttggtgccggcgct

SEQ ID NO: 5259537 - DNA, 25 bp, Homo sapien
acctcgtgttcctgctctgtccttt

SEQ ID NO: 5259538 - DNA, 25 bp, Homo sapien
gcattggcatcacctcgtgttcctg

SEQ ID NO: 5259539 - DNA, 25 bp, Homo sapien
cgctgtggcctggtgagcattggca

SEQ ID NO: 5259540 - DNA, 25 bp, Homo sapien
cctgagagattaccagtagccctgc

SEQ ID NO: 5259541 - DNA, 25 bp, Homo sapien
cagggtggtgtcctgagagattacc

SEQ ID NO: 5259542 - DNA, 25 bp, Homo sapien
agattaccagtagccctgccttgtc

SEQ ID NO: 5259543 - DNA, 25 bp, Homo sapien
gagagattaccagtagccctgcctt

SEQ ID NO: 5259544 - DNA, 25 bp, Homo sapien
ctccaggaggccagcagggcctcat

SEQ ID NO: 5259545 - DNA, 25 bp, Homo sapien
cctcctccaggaggccagcagggcc

SEQ ID NO: 5259546 - DNA, 25 bp, Homo sapien
gaataaggaccctcctcctccagga

SEQ ID NO: 5259547 - DNA, 25 bp, Homo sapien
tcctccaggaggccagcagggcctc

SEQ ID NO: 5259548 - DNA, 25 bp, Homo sapien
ttaggaaagcgcacgggctcgcagt

SEQ ID NO: 5259549 - DNA, 25 bp, Homo sapien
tcgcagtggccagcccactggggca

SEQ ID NO: 5259550 - DNA, 25 bp, Homo sapien
tgtctttttaggaaagcgcacgggc

SEQ ID NO: 5259551 - DNA, 25 bp, Homo sapien
ctttttaggaaagcgcacgggctcg

SEQ ID NO: 5259552 - DNA, 25 bp, Homo sapien
cccttttcgagcaacttggaagatt

SEQ ID NO: 5259553 - DNA, 25 bp, Homo sapien
catcttcccttagaaaccttctgtg

SEQ ID NO: 5259554 - DNA, 25 bp, Homo sapien
gtagaaactcagcctctgaacacac

SEQ ID NO: 5259555 - DNA, 25 bp, Homo sapien
tggaagatttgctgtgtctttaagt

SEQ ID NO: 5259556 - DNA, 25 bp, Homo sapien
ctgctgccgtgggagtcatcaggct

SEQ ID NO: 5259557 - DNA, 25 bp, Homo sapien
tgctgccgtgggagtcatcaggctc

SEQ ID NO: 5259558 - DNA, 25 bp, Homo sapien
ctctgtgtaacttccaggtggacat

SEQ ID NO: 5259559 - DNA, 25 bp, Homo sapien
tattggtcttgttgagtatggcagc

SEQ ID NO: 5259560 - DNA, 25 bp, Homo sapien
ggcagcattgtagtggcttttcccc

SEQ ID NO: 5259561 - DNA, 25 bp, Homo sapien
ttccaggaaatttcgaagctctgtg

SEQ ID NO: 5259562 - DNA, 25 bp, Homo sapien
gccgctcatcgtgggcaactctctg

SEQ ID NO: 5259563 - DNA, 25 bp, Homo sapien
cgctcatcgtgggcaactctctggc

SEQ ID NO: 5259564 - DNA, 25 bp, Homo sapien
ctcatcgtgggcaactctctggcca

SEQ ID NO: 5259565 - DNA, 25 bp, Homo sapien
tgccgctcatcgtgggcaactctct

SEQ ID NO: 5259566 - DNA, 25 bp, Homo sapien
gcagctgctctaacttgtctgccat

SEQ ID NO: 5259567 - DNA, 25 bp, Homo sapien
tcggtgtctgccgtgagtcaggtcc

SEQ ID NO: 5259568 - DNA, 25 bp, Homo sapien
tctgcgttgccaccagagtgaactt

SEQ ID NO: 5259569 - DNA, 25 bp, Homo sapien
cctctgtaagactggtgcagctgct

SEQ ID NO: 5259570 - DNA, 25 bp, Homo sapien
tgtctgcggtgtatcggtgtctcat

SEQ ID NO: 5259571 - DNA, 25 bp, Homo sapien
tggagcctgttgtcattccccctgg

SEQ ID NO: 5259572 - DNA, 25 bp, Homo sapien
gcagtgttccggcagcaggcagtgt

SEQ ID NO: 5259573 - DNA, 25 bp, Homo sapien
tttgtctgggcagcgagcagtgtcc

SEQ ID NO: 5259574 - DNA, 25 bp, Homo sapien
tagctgacgagctggaatcccaggg

SEQ ID NO: 5259575 - DNA, 25 bp, Homo sapien
cagcacatgtctcaagtggcataag

SEQ ID NO: 5259576 - DNA, 25 bp, Homo sapien
gtttttcagggttgatgccacaaga

SEQ ID NO: 5259577 - DNA, 25 bp, Homo sapien
catcagcatggccagttcttagctg

SEQ ID NO: 5259578 - DNA, 25 bp, Homo sapien
tgttcttcgtgcatgtaacgtgaag

SEQ ID NO: 5259579 - DNA, 25 bp, Homo sapien
gtctcgggagtacgaggcactcgca

SEQ ID NO: 5259580 - DNA, 25 bp, Homo sapien
cttctttaacacagcgtctcgggag

SEQ ID NO: 5259581 - DNA, 25 bp, Homo sapien
caatgtttcatacagtggagctggc

SEQ ID NO: 5259582 - DNA, 25 bp, Homo sapien
atgtggagagacgtggaaagccact

SEQ ID NO: 5259583 - DNA, 25 bp, Homo sapien
gaaagccactgggcgtggagaccgc

SEQ ID NO: 5259584 - DNA, 25 bp, Homo sapien
aagccactgggcgtggagaccgcag

SEQ ID NO: 5259585 - DNA, 25 bp, Homo sapien
ccactgggcgtggagaccgcagcat

SEQ ID NO: 5259586 - DNA, 25 bp, Homo sapien
ctgggctcaggaccggcactgtcct

SEQ ID NO: 5259587 - DNA, 25 bp, Homo sapien
gcgcagccagtcctgccatcggtgt

SEQ ID NO: 5259588 - DNA, 25 bp, Homo sapien
ctccgctgtggtcggctccctgtag

SEQ ID NO: 5259589 - DNA, 25 bp, Homo sapien
tgcttcagacaccacttgggctcct

SEQ ID NO: 5259590 - DNA, 25 bp, Homo sapien
ctgcacagccgcgaacttgggggcc

SEQ ID NO: 5259591 - DNA, 25 bp, Homo sapien
cacagccgcgaacttgggggcccag

SEQ ID NO: 5259592 - DNA, 25 bp, Homo sapien
gccgcggcgcgttctccactcccag

SEQ ID NO: 5259593 - DNA, 25 bp, Homo sapien
cagccgcggcgcgttctccactccc

SEQ ID NO: 5259594 - DNA, 25 bp, Homo sapien
tcatgatatgagtaactgaagaact

SEQ ID NO: 5259595 - DNA, 25 bp, Homo sapien
cttgtgtttgcttgggagcgtatgt

SEQ ID NO: 5259596 - DNA, 25 bp, Homo sapien
gggagcgtatgtctcgctggtctta

SEQ ID NO: 5259597 - DNA, 25 bp, Homo sapien
tgtttgcttgggagcgtatgtctcg

SEQ ID NO: 5259598 - DNA, 25 bp, Homo sapien
gattcccttagttgtaagtcagctt

SEQ ID NO: 5259599 - DNA, 25 bp, Homo sapien
cactctggctttgtggattccctta

SEQ ID NO: 5259600 - DNA, 25 bp, Homo sapien
tattaatcgttttgagtcactctgg

SEQ ID NO: 5259601 - DNA, 25 bp, Homo sapien
tcccgaggttggatgtgcagctccc

SEQ ID NO: 5259602 - DNA, 25 bp, Homo sapien
taaatgacacctcgactaagacaaa

SEQ ID NO: 5259603 - DNA, 25 bp, Homo sapien
ctttctctgggatagctgtgcggcc

SEQ ID NO: 5259604 - DNA, 25 bp, Homo sapien
gactctatggatgaatttgaaggca

SEQ ID NO: 5259605 - DNA, 25 bp, Homo sapien
caatctgttttggaccctccctgtg

SEQ ID NO: 5259606 - DNA, 25 bp, Homo sapien
gaagtgttttactcgacttccttga

SEQ ID NO: 5259607 - DNA, 25 bp, Homo sapien
aagtgttttactcgacttccttgat

SEQ ID NO: 5259608 - DNA, 25 bp, Homo sapien
agaagtgttttactcgacttccttg

SEQ ID NO: 5259609 - DNA, 25 bp, Homo sapien
caggtggcccacttctttggtctgt

SEQ ID NO: 5259610 - DNA, 25 bp, Homo sapien
tgcaaaagtcattggtagtgatttt

SEQ ID NO: 5259611 - DNA, 25 bp, Homo sapien
tggtggtggttttggtgaggatgtc

SEQ ID NO: 5259612 - DNA, 25 bp, Homo sapien
ctgtttgtgcaaaagtcattggtag

SEQ ID NO: 5259613 - DNA, 25 bp, Homo sapien
gactgccggtctcccatctgcttag

SEQ ID NO: 5259614 - DNA, 25 bp, Homo sapien
tgcagggagtcctctgatgggaccc

SEQ ID NO: 5259615 - DNA, 25 bp, Homo sapien
caggctctccgctctgttgctggtt

SEQ ID NO: 5259616 - DNA, 25 bp, Homo sapien
aattcgggagaaattcatggagcac

SEQ ID NO: 5259617 - DNA, 25 bp, Homo sapien
agtaggttcacagcgcacagcctgg

SEQ ID NO: 5259618 - DNA, 25 bp, Homo sapien
ggccagcatcagtgtgttgctgaat

SEQ ID NO: 5259619 - DNA, 25 bp, Homo sapien
tagactgagagtttgaggatcatcc

SEQ ID NO: 5259620 - DNA, 25 bp, Homo sapien
ggatcatcctttatcagtgatttga

SEQ ID NO: 5259621 - DNA, 25 bp, Homo sapien
ttggctaatgctgggttctgggctt

SEQ ID NO: 5259622 - DNA, 25 bp, Homo sapien
cctcctttggctaatgctgggttct

SEQ ID NO: 5259623 - DNA, 25 bp, Homo sapien
tttggctaatgctgggttctgggct

SEQ ID NO: 5259624 - DNA, 25 bp, Homo sapien
gatgcctcctttggctaatgctggg

SEQ ID NO: 5259625 - DNA, 25 bp, Homo sapien
ttcctgcaggggtgcgcccacgaaa

SEQ ID NO: 5259626 - DNA, 25 bp, Homo sapien
actgccttgagcagcgatggttctt

SEQ ID NO: 5259627 - DNA, 25 bp, Homo sapien
cccacgaaacgctctgcgtgaagca

SEQ ID NO: 5259628 - DNA, 25 bp, Homo sapien
gagcagcgatggttcttcctgcagg

SEQ ID NO: 5259629 - DNA, 25 bp, Homo sapien
aaagcgcgggactgtcctattgacg

SEQ ID NO: 5259630 - DNA, 25 bp, Homo sapien
cctgcaaaggctgtctaagaacaca

SEQ ID NO: 5259631 - DNA, 25 bp, Homo sapien
catttgaagaaacgtggtgagcctc

SEQ ID NO: 5259632 - DNA, 25 bp, Homo sapien
gacggctggactctgtgatgctaac

SEQ ID NO: 5259633 - DNA, 25 bp, Homo sapien
tgtcacggttcctccgtggtctcct

SEQ ID NO: 5259634 - DNA, 25 bp, Homo sapien
tctttgtcacggttcctccgtggtc

SEQ ID NO: 5259635 - DNA, 25 bp, Homo sapien
taccagctctttgtcacggttcctc

SEQ ID NO: 5259636 - DNA, 25 bp, Homo sapien
gccggtggctaccagctctttgtca

SEQ ID NO: 5259637 - DNA, 25 bp, Homo sapien
tgggccatccttggctcctcgcagc

SEQ ID NO: 5259638 - DNA, 25 bp, Homo sapien
tgggatgggccatccttggctcctc

SEQ ID NO: 5259639 - DNA, 25 bp, Homo sapien
tcctcgcagctcgttgctgtgtggc

SEQ ID NO: 5259640 - DNA, 25 bp, Homo sapien
tggctcctcgcagctcgttgctgtg

SEQ ID NO: 5259641 - DNA, 25 bp, Homo sapien
aacacttggattctacatttcccgg

SEQ ID NO: 5259642 - DNA, 25 bp, Homo sapien
tcttcaactggatggtgtaacactt

SEQ ID NO: 5259643 - DNA, 25 bp, Homo sapien
catgaaataatgacagcggcctcca

SEQ ID NO: 5259644 - DNA, 25 bp, Homo sapien
tcgcgggtgccgttttatatcgtaa

SEQ ID NO: 5259645 - DNA, 25 bp, Homo sapien
tggcggcagccaatgtccttctcat

SEQ ID NO: 5259646 - DNA, 25 bp, Homo sapien
ccagcatggatggtggtgctggcag

SEQ ID NO: 5259647 - DNA, 25 bp, Homo sapien
tgcgtgcgtgccctgcgtgtgggct

SEQ ID NO: 5259648 - DNA, 25 bp, Homo sapien
tggcagcaccaccaccgtgcagttg

SEQ ID NO: 5259649 - DNA, 25 bp, Homo sapien
tgtcaccagtgctgtacgttggctt

SEQ ID NO: 5259650 - DNA, 25 bp, Homo sapien
taaaagtgcgtgtgccatattgcca

SEQ ID NO: 5259651 - DNA, 25 bp, Homo sapien
tgtgtccttaacttccagcagagag

SEQ ID NO: 5259652 - DNA, 25 bp, Homo sapien
tcttttgaggcgcttattttcataa

SEQ ID NO: 5259653 - DNA, 25 bp, Homo sapien
cgttttttgttcgtctgagagttgc

SEQ ID NO: 5259654 - DNA, 25 bp, Homo sapien
tatcctttagaaattcctgcagaag

SEQ ID NO: 5259655 - DNA, 25 bp, Homo sapien
ctgcagaagttccgttttttgttcg

SEQ ID NO: 5259656 - DNA, 25 bp, Homo sapien
tttgttcgtctgagagttgcctcct

SEQ ID NO: 5259657 - DNA, 25 bp, Homo sapien
tgacacacgcaaacttgggtctttg

SEQ ID NO: 5259658 - DNA, 25 bp, Homo sapien
gtgtgttttctgacacacgcaaact

SEQ ID NO: 5259659 - DNA, 25 bp, Homo sapien
acttgggtctttgccaggttcctgc

SEQ ID NO: 5259660 - DNA, 25 bp, Homo sapien
cgcaaacttgggtctttgccaggtt

SEQ ID NO: 5259661 - DNA, 25 bp, Homo sapien
cgtagcgcatgtggtcccgttcaga

SEQ ID NO: 5259662 - DNA, 25 bp, Homo sapien
gcatgtggtcccgttcagatgcact

SEQ ID NO: 5259663 - DNA, 25 bp, Homo sapien
gtcccgttcagatgcactttctgtg

SEQ ID NO: 5259664 - DNA, 25 bp, Homo sapien
tgtggtcccgttcagatgcactttc

SEQ ID NO: 5259665 - DNA, 25 bp, Homo sapien
tactgtgcggtgaggacctctttct

SEQ ID NO: 5259666 - DNA, 25 bp, Homo sapien
tttctgttcaggatactgtgcggtg

SEQ ID NO: 5259667 - DNA, 25 bp, Homo sapien
ggatactgtgcggtgaggacctctt

SEQ ID NO: 5259668 - DNA, 25 bp, Homo sapien
tctgttcaggatactgtgcggtgag

SEQ ID NO: 5259669 - DNA, 25 bp, Homo sapien
tgcggtggatgtgggggtctcggac

SEQ ID NO: 5259670 - DNA, 25 bp, Homo sapien
tcaggtgcggtggatgtgggggtct

SEQ ID NO: 5259671 - DNA, 25 bp, Homo sapien
ctgctggctcgctgggatgcccatg

SEQ ID NO: 5259672 - DNA, 25 bp, Homo sapien
gccagctgctggctcgctgggatgc

SEQ ID NO: 5259673 - DNA, 25 bp, Homo sapien
tggcctgcatacggcctccggccat

SEQ ID NO: 5259674 - DNA, 25 bp, Homo sapien
ctggcctgcatacggcctccggcca

SEQ ID NO: 5259675 - DNA, 25 bp, Homo sapien
cccgtagaactcactatctgggcgg

SEQ ID NO: 5259676 - DNA, 25 bp, Homo sapien
ggcttagttcacgagtcccagcttg

SEQ ID NO: 5259677 - DNA, 25 bp, Homo sapien
tagttcacgagtcccagcttgcttt

SEQ ID NO: 5259678 - DNA, 25 bp, Homo sapien
ctatctgggcggcttagttcacgag

SEQ ID NO: 5259679 - DNA, 25 bp, Homo sapien
gcagtccccgcacggtgggtccagt

SEQ ID NO: 5259680 - DNA, 25 bp, Homo sapien
ctggcagtccccgcacggtgggtcc

SEQ ID NO: 5259681 - DNA, 25 bp, Homo sapien
gtccagtgcagccctggcgacgtgt

SEQ ID NO: 5259682 - DNA, 25 bp, Homo sapien
cagtgcagccctggcgacgtgtcat

SEQ ID NO: 5259683 - DNA, 25 bp, Homo sapien
cgagccgtccggtgctgctccgctc

SEQ ID NO: 5259684 - DNA, 25 bp, Homo sapien
cagtctggcgttcgtttcccagggt

SEQ ID NO: 5259685 - DNA, 25 bp, Homo sapien
cccacgctcagtctggcgttcgttt

SEQ ID NO: 5259686 - DNA, 25 bp, Homo sapien
gtccggtgctgctccgctcctcagc

SEQ ID NO: 5259687 - DNA, 25 bp, Homo sapien
ctgggatttccagaccagatccacc

SEQ ID NO: 5259688 - DNA, 25 bp, Homo sapien
cctgggatttccagaccagatccac

SEQ ID NO: 5259689 - DNA, 25 bp, Homo sapien
tttccagaccagatccacctctttc

SEQ ID NO: 5259690 - DNA, 25 bp, Homo sapien
ccagaccagatccacctctttctcc

SEQ ID NO: 5259691 - DNA, 25 bp, Homo sapien
gattccctggctttcggtgtgctgg

SEQ ID NO: 5259692 - DNA, 25 bp, Homo sapien
cctggctttcggtgtgctgggggat

SEQ ID NO: 5259693 - DNA, 25 bp, Homo sapien
agattccctggctttcggtgtgctg

SEQ ID NO: 5259694 - DNA, 25 bp, Homo sapien
ggctttcggtgtgctgggggatgcc

SEQ ID NO: 5259695 - DNA, 25 bp, Homo sapien
acgaaggtcggtgtgagaatctcag

SEQ ID NO: 5259696 - DNA, 25 bp, Homo sapien
ggttggacgaaggtcggtgtgagaa

SEQ ID NO: 5259697 - DNA, 25 bp, Homo sapien
gaatctcagggataactgggctgct

SEQ ID NO: 5259698 - DNA, 25 bp, Homo sapien
gtgagaatctcagggataactgggc

SEQ ID NO: 5259699 - DNA, 25 bp, Homo sapien
gcagccgttcttttagtgtgtcaat

SEQ ID NO: 5259700 - DNA, 25 bp, Homo sapien
ttaaaagctcagtgtgaataaactt

SEQ ID NO: 5259701 - DNA, 25 bp, Homo sapien
taaactttgagctcagatgcagccg

SEQ ID NO: 5259702 - DNA, 25 bp, Homo sapien
gatgcagccgttcttttagtgtgtc

SEQ ID NO: 5259703 - DNA, 25 bp, Homo sapien
ccagatcagagcatttaggcttcac

SEQ ID NO: 5259704 - DNA, 25 bp, Homo sapien
tccagatcagagcatttaggcttca

SEQ ID NO: 5259705 - DNA, 25 bp, Homo sapien
gtccagatcagagcatttaggcttc

SEQ ID NO: 5259706 - DNA, 25 bp, Homo sapien
atgtccagatcagagcatttaggct

SEQ ID NO: 5259707 - DNA, 25 bp, Homo sapien
cgtaggtctccgttgagttgctcac

SEQ ID NO: 5259708 - DNA, 25 bp, Homo sapien
ggtgtttttaatgccttagccagga

SEQ ID NO: 5259709 - DNA, 25 bp, Homo sapien
gagctctgctgagggatgttatttc

SEQ ID NO: 5259710 - DNA, 25 bp, Homo sapien
tgaacaaaagaacaacgtaggtctc

SEQ ID NO: 5259711 - DNA, 25 bp, Homo sapien
tgttcttcgccagtcctcagtagga

SEQ ID NO: 5259712 - DNA, 25 bp, Homo sapien
gacgtaatttctcgatggttcagga

SEQ ID NO: 5259713 - DNA, 25 bp, Homo sapien
catttgggtggcagactggagctca

SEQ ID NO: 5259714 - DNA, 25 bp, Homo sapien
gccttcacatctatctgtgatttgg

SEQ ID NO: 5259715 - DNA, 25 bp, Homo sapien
atacacgtgagcatccccaaaggct

SEQ ID NO: 5259716 - DNA, 25 bp, Homo sapien
accgatggagtacccagcctggaag

SEQ ID NO: 5259717 - DNA, 25 bp, Homo sapien
ctgttgtaacagaatgataaggtgc

SEQ ID NO: 5259718 - DNA, 25 bp, Homo sapien
gaatgataaggtgcagaggccatct

SEQ ID NO: 5259719 - DNA, 25 bp, Homo sapien
cacgagtactcagtcattatgaaga

SEQ ID NO: 5259720 - DNA, 25 bp, Homo sapien
tatgaagagctcagaaaattcgctg

SEQ ID NO: 5259721 - DNA, 25 bp, Homo sapien
tatttgacatagaaaacgcggtgtg

SEQ ID NO: 5259722 - DNA, 25 bp, Homo sapien
tttaagaatgaactcccggtatgta

SEQ ID NO: 5259723 - DNA, 25 bp, Homo sapien
tgtctgaatgtgcatcctcccagcc

SEQ ID NO: 5259724 - DNA, 25 bp, Homo sapien
ttgtcactagcctggattctccatg

SEQ ID NO: 5259725 - DNA, 25 bp, Homo sapien
ttttctgacgcacagcaccgcctgt

SEQ ID NO: 5259726 - DNA, 25 bp, Homo sapien
tctgcagctctcagattgtcactag

SEQ ID NO: 5259727 - DNA, 25 bp, Homo sapien
tgttttagacaggttgtatgtgtgt

SEQ ID NO: 5259728 - DNA, 25 bp, Homo sapien
tgtgttagagtgtgtgttagggtgt

SEQ ID NO: 5259729 - DNA, 25 bp, Homo sapien
catttaaataatgctctgcagtggt

SEQ ID NO: 5259730 - DNA, 25 bp, Homo sapien
tggcatttaaataatgctctgcagt

SEQ ID NO: 5259731 - DNA, 25 bp, Homo sapien
tctcgataggaagctggttgagcag

SEQ ID NO: 5259732 - DNA, 25 bp, Homo sapien
gagcaggcagtggtcggtaacttga

SEQ ID NO: 5259733 - DNA, 25 bp, Homo sapien
tgctctcgataggaagctggttgag

SEQ ID NO: 5259734 - DNA, 25 bp, Homo sapien
atgatgctctcgataggaagctggt

SEQ ID NO: 5259735 - DNA, 25 bp, Homo sapien
cgggatgatgctctcgataggaagc

SEQ ID NO: 5259736 - DNA, 25 bp, Homo sapien
tgctctcgataggaagcagtggatt

SEQ ID NO: 5259737 - DNA, 25 bp, Homo sapien
tgatgctctcgataggaagcagtgg

SEQ ID NO: 5259738 - DNA, 25 bp, Homo sapien
tctcgataggaagcagtggatttgc

SEQ ID NO: 5259739 - DNA, 25 bp, Homo sapien
atgttcgtgcctagagaaagtcttg

SEQ ID NO: 5259740 - DNA, 25 bp, Homo sapien
tccggaatgttcgtgcctagagaaa

SEQ ID NO: 5259741 - DNA, 25 bp, Homo sapien
cccttccggaatgttcgtgcctaga

SEQ ID NO: 5259742 - DNA, 25 bp, Homo sapien
ttcccttccggaatgttcgtgccta

SEQ ID NO: 5259743 - DNA, 25 bp, Homo sapien
gggtgcccgtgccgccctcactccc

SEQ ID NO: 5259744 - DNA, 25 bp, Homo sapien
gtgggtgcccgtgccgccctcactc

SEQ ID NO: 5259745 - DNA, 25 bp, Homo sapien
tgggtgcccgtgccgccctcactcc

SEQ ID NO: 5259746 - DNA, 25 bp, Homo sapien
gctcgttggagctatcgtttccgtg

SEQ ID NO: 5259747 - DNA, 25 bp, Homo sapien
tagaagttcttgtgactgcagcttg

SEQ ID NO: 5259748 - DNA, 25 bp, Homo sapien
gtaaggccgggtcatttcttctctg

SEQ ID NO: 5259749 - DNA, 25 bp, Homo sapien
gctagcaatgagctcccaaagccat

SEQ ID NO: 5259750 - DNA, 25 bp, Homo sapien
cggacgcctctgttcaacttgtggg

SEQ ID NO: 5259751 - DNA, 25 bp, Homo sapien
tcggcgcttgaacgtctgtgaccca

SEQ ID NO: 5259752 - DNA, 25 bp, Homo sapien
aacttgtgggttacctggctcatga

SEQ ID NO: 5259753 - DNA, 25 bp, Homo sapien
ctcatgagaccttgccggcgaggct

SEQ ID NO: 5259754 - DNA, 25 bp, Homo sapien
cactagaggttcgtatgggcaaaag

SEQ ID NO: 5259755 - DNA, 25 bp, Homo sapien
gatccaggctgatgcaagcgtgcag

SEQ ID NO: 5259756 - DNA, 25 bp, Homo sapien
catgtcagaatgttaccaagggctt

SEQ ID NO: 5259757 - DNA, 25 bp, Homo sapien
ggcagctgtctatccacacatggaa

SEQ ID NO: 5259758 - DNA, 25 bp, Homo sapien
cccattggtcccacattggcggcgc

SEQ ID NO: 5259759 - DNA, 25 bp, Homo sapien
cattggtcccacattggcggcgctg

SEQ ID NO: 5259760 - DNA, 25 bp, Homo sapien
tggtcccacattggcggcgctgcct

SEQ ID NO: 5259761 - DNA, 25 bp, Homo sapien
attggtcccacattggcggcgctgc

SEQ ID NO: 5259762 - DNA, 25 bp, Homo sapien
tccccttgcggctgtctgtggcgtc

SEQ ID NO: 5259763 - DNA, 25 bp, Homo sapien
catgttcccgtttgctctcagtgga

SEQ ID NO: 5259764 - DNA, 25 bp, Homo sapien
cctgtctgtggctgttggagctact

SEQ ID NO: 5259765 - DNA, 25 bp, Homo sapien
cagataagcgagcacatgagtcaca

SEQ ID NO: 5259766 - DNA, 25 bp, Homo sapien
tgcccttcacgtaccgccagggtgg

SEQ ID NO: 5259767 - DNA, 25 bp, Homo sapien
gtggccagcttggctctcgtccagg

SEQ ID NO: 5259768 - DNA, 25 bp, Homo sapien
gggtgcccgatttgcacgctgccct

SEQ ID NO: 5259769 - DNA, 25 bp, Homo sapien
tctcgtccaggtttaggtgtcttat

SEQ ID NO: 5259770 - DNA, 25 bp, Homo sapien
tctttagatcgggtctctgacttac

SEQ ID NO: 5259771 - DNA, 25 bp, Homo sapien
tgagccttagggaccgtccctctct

SEQ ID NO: 5259772 - DNA, 25 bp, Homo sapien
tgggtcttcaggccgtgagccttag

SEQ ID NO: 5259773 - DNA, 25 bp, Homo sapien
agggaccgtccctctctttagatcg

SEQ ID NO: 5259774 - DNA, 25 bp, Homo sapien
gcctggcaggtgttcagggaacatt

SEQ ID NO: 5259775 - DNA, 25 bp, Homo sapien
aacatttagggacatgcgtggatgg

SEQ ID NO: 5259776 - DNA, 25 bp, Homo sapien
caagtgagtggacggtccgtggcct

SEQ ID NO: 5259777 - DNA, 25 bp, Homo sapien
tcgctggcccggtgaggacaagtga

SEQ ID NO: 5259778 - DNA, 25 bp, Homo sapien
gacgcgacgtctcccctggaggaca

SEQ ID NO: 5259779 - DNA, 25 bp, Homo sapien
tgccgctggcattccccggatgttg

SEQ ID NO: 5259780 - DNA, 25 bp, Homo sapien
gggcaccgcgtttgctggacagagg

SEQ ID NO: 5259781 - DNA, 25 bp, Homo sapien
gggatgcctcaggacgcgacgtctc

SEQ ID NO: 5259782 - DNA, 25 bp, Homo sapien
tgccatctgggtggtgcacgttcag

SEQ ID NO: 5259783 - DNA, 25 bp, Homo sapien
tcagaacagccgtggtcacgttgag

SEQ ID NO: 5259784 - DNA, 25 bp, Homo sapien
tcttccaggccatcatcgtgtggac

SEQ ID NO: 5259785 - DNA, 25 bp, Homo sapien
gatatggccctcaacagtacgatgg

SEQ ID NO: 5259786 - DNA, 25 bp, Homo sapien
ggagagtgggaggtgaggacaggga

SEQ ID NO: 5259787 - DNA, 25 bp, Homo sapien
ctgcagaggagagtgggaggtgagg

SEQ ID NO: 5259788 - DNA, 25 bp, Homo sapien
cagaggagagtgggaggtgaggaca

SEQ ID NO: 5259789 - DNA, 25 bp, Homo sapien
agaggagagtgggaggtgaggacag

SEQ ID NO: 5259790 - DNA, 25 bp, Homo sapien
tctggctcctgagagcgaggggagc

SEQ ID NO: 5259791 - DNA, 25 bp, Homo sapien
gggccgtttcaggccacctctggct

SEQ ID NO: 5259792 - DNA, 25 bp, Homo sapien
acctctggctcctgagagcgagggg

SEQ ID NO: 5259793 - DNA, 25 bp, Homo sapien
ccggggccgtttcaggccacctctg

SEQ ID NO: 5259794 - DNA, 25 bp, Homo sapien
agaaagctcccatcacggtgggctg

SEQ ID NO: 5259795 - DNA, 25 bp, Homo sapien
gtaagctgttaaagaaagctcccat

SEQ ID NO: 5259796 - DNA, 25 bp, Homo sapien
ggcaacaagaaccaaactgcgtcta

SEQ ID NO: 5259797 - DNA, 25 bp, Homo sapien
ctcccatcacggtgggctggctttt

SEQ ID NO: 5259798 - DNA, 25 bp, Homo sapien
gattctgaactcacagacactgacg

SEQ ID NO: 5259799 - DNA, 25 bp, Homo sapien
tgtccagcctccaagcgaggatctg

SEQ ID NO: 5259800 - DNA, 25 bp, Homo sapien
cgaggatctgctcagtggttatgca

SEQ ID NO: 5259801 - DNA, 25 bp, Homo sapien
cactttacgggaaggtgcagggctc

SEQ ID NO: 5259802 - DNA, 25 bp, Homo sapien
cagactgcgcttgccgtgggtttct

SEQ ID NO: 5259803 - DNA, 25 bp, Homo sapien
gctctttgagcgtattgggtttgca

SEQ ID NO: 5259804 - DNA, 25 bp, Homo sapien
tggtaatggattgatcgggcgctct

SEQ ID NO: 5259805 - DNA, 25 bp, Homo sapien
acctgttccggctgagtgcttaaga

SEQ ID NO: 5259806 - DNA, 25 bp, Homo sapien
ctggcctcctgtcccctttgtgagt

SEQ ID NO: 5259807 - DNA, 25 bp, Homo sapien
ctgtcccctttgtgagttgtagtga

SEQ ID NO: 5259808 - DNA, 25 bp, Homo sapien
tgtcctgttgtatcacatggtcctt

SEQ ID NO: 5259809 - DNA, 25 bp, Homo sapien
aatggacgaggctgcagtcaggctc

SEQ ID NO: 5259810 - DNA, 25 bp, Homo sapien
tgcctccggggcttgtttggggctc

SEQ ID NO: 5259811 - DNA, 25 bp, Homo sapien
agactgtcttggaccgctttccggg

SEQ ID NO: 5259812 - DNA, 25 bp, Homo sapien
gagactgtcttggaccgctttccgg

SEQ ID NO: 5259813 - DNA, 25 bp, Homo sapien
gctctgctggtcatctgaggatgct

SEQ ID NO: 5259814 - DNA, 25 bp, Homo sapien
caaggctctgctggtcatctgagga

SEQ ID NO: 5259815 - DNA, 25 bp, Homo sapien
tggaggacggatcagggccatggct

SEQ ID NO: 5259816 - DNA, 25 bp, Homo sapien
ttccagccgtgcggtccagctgccc

SEQ ID NO: 5259817 - DNA, 25 bp, Homo sapien
gtagcaaagtgaggggtagtgccgc

SEQ ID NO: 5259818 - DNA, 25 bp, Homo sapien
gcatgtggcggctcctggtagcaaa

SEQ ID NO: 5259819 - DNA, 25 bp, Homo sapien
aggctgcgtggctgggtgctcaggt

SEQ ID NO: 5259820 - DNA, 25 bp, Homo sapien
gcggctcctggtagcaaagtgaggg

SEQ ID NO: 5259821 - DNA, 25 bp, Homo sapien
gaattcttctggttaagcggaggcc

SEQ ID NO: 5259822 - DNA, 25 bp, Homo sapien
ggtctgattggtggatgtgctctct

SEQ ID NO: 5259823 - DNA, 25 bp, Homo sapien
gcgggctgcgttctgacgaagttct

SEQ ID NO: 5259824 - DNA, 25 bp, Homo sapien
tgtttcacgtatccttctcctggtt

SEQ ID NO: 5259825 - DNA, 25 bp, Homo sapien
tttgcccctgagtgtgcagcacagc

SEQ ID NO: 5259826 - DNA, 25 bp, Homo sapien
ggatgcatcaaaggagatgtcactg

SEQ ID NO: 5259827 - DNA, 25 bp, Homo sapien
tgcctgtgtcttctcgcctttcgag

SEQ ID NO: 5259828 - DNA, 25 bp, Homo sapien
tgcagagccgttacgtgcatgcccg

SEQ ID NO: 5259829 - DNA, 25 bp, Homo sapien
ctttctagttcagtgtcgttagact

SEQ ID NO: 5259830 - DNA, 25 bp, Homo sapien
tgttacaggcgcgtttcataggtct

SEQ ID NO: 5259831 - DNA, 25 bp, Homo sapien
tgtcgttagactttctagtgctgtg

SEQ ID NO: 5259832 - DNA, 25 bp, Homo sapien
gttgactgttcttggcgctgttaca

SEQ ID NO: 5259833 - DNA, 25 bp, Homo sapien
ctgcaggtgggctctacctctggag

SEQ ID NO: 5259834 - DNA, 25 bp, Homo sapien
taggtgtcagcacagtcctgcaggt

SEQ ID NO: 5259835 - DNA, 25 bp, Homo sapien
catgtaggtgtcagcacagtcctgc

SEQ ID NO: 5259836 - DNA, 25 bp, Homo sapien
caggtgggctctacctctggaggaa

SEQ ID NO: 5259837 - DNA, 25 bp, Homo sapien
tgatgccacgagcagctgtcacgtg

SEQ ID NO: 5259838 - DNA, 25 bp, Homo sapien
aggagatgatgccacgagcagctgt

SEQ ID NO: 5259839 - DNA, 25 bp, Homo sapien
gtgctcccgtagctgacgccagatg

SEQ ID NO: 5259840 - DNA, 25 bp, Homo sapien
agctgtcacgtgctcccgtagctga

SEQ ID NO: 5259841 - DNA, 25 bp, Homo sapien
tcctgtatcactgtcgggggatgag

SEQ ID NO: 5259842 - DNA, 25 bp, Homo sapien
cgtgacttcctgtatcactgtcggg

SEQ ID NO: 5259843 - DNA, 25 bp, Homo sapien
gacttcctgtatcactgtcggggga

SEQ ID NO: 5259844 - DNA, 25 bp, Homo sapien
acttcctgtatcactgtcgggggat

SEQ ID NO: 5259845 - DNA, 25 bp, Homo sapien
ggggtcctgcatagattgcccccac

SEQ ID NO: 5259846 - DNA, 25 bp, Homo sapien
tcggggtcctgcatagattgccccc

SEQ ID NO: 5259847 - DNA, 25 bp, Homo sapien
cggggtcctgcatagattgccccca

SEQ ID NO: 5259848 - DNA, 25 bp, Homo sapien
gtcggggtcctgcatagattgcccc

SEQ ID NO: 5259849 - DNA, 25 bp, Homo sapien
atgtagggcgcgaaggagccgcaga

SEQ ID NO: 5259850 - DNA, 25 bp, Homo sapien
tccgaggctcagaattgatgactag

SEQ ID NO: 5259851 - DNA, 25 bp, Homo sapien
ggccgggctttcctccgaggctcag

SEQ ID NO: 5259852 - DNA, 25 bp, Homo sapien
gccgagagaactgccgttgctgaga

SEQ ID NO: 5259853 - DNA, 25 bp, Homo sapien
ctatttttaagactgatcgggcttt

SEQ ID NO: 5259854 - DNA, 25 bp, Homo sapien
tttaagactgatcgggctttcccag

SEQ ID NO: 5259855 - DNA, 25 bp, Homo sapien
gggctttcccagatattctactctc

SEQ ID NO: 5259856 - DNA, 25 bp, Homo sapien
gactgatcgggctttcccagatatt

SEQ ID NO: 5259857 - DNA, 25 bp, Homo sapien
taccgagtgcgaccggacacggccg

SEQ ID NO: 5259858 - DNA, 25 bp, Homo sapien
gcccgtgtttacggccactactggc

SEQ ID NO: 5259859 - DNA, 25 bp, Homo sapien
cgggctaccgagtgcgaccggacac

SEQ ID NO: 5259860 - DNA, 25 bp, Homo sapien
cagccatgcgggctaccgagtgcga

SEQ ID NO: 5259861 - DNA, 25 bp, Homo sapien
agggacgcggcgagcgcatcccacg

SEQ ID NO: 5259862 - DNA, 25 bp, Homo sapien
tccctccgcctgagcagggacgcgg

SEQ ID NO: 5259863 - DNA, 25 bp, Homo sapien
ccgttgcaggcctggcggacctaca

SEQ ID NO: 5259864 - DNA, 25 bp, Homo sapien
ccggactcgagaccctggcggcggg

SEQ ID NO: 5259865 - DNA, 25 bp, Homo sapien
tgtaactcaacacaagcctcccaag

SEQ ID NO: 5259866 - DNA, 25 bp, Homo sapien
caacgcccacccgggcggtgcgccg

SEQ ID NO: 5259867 - DNA, 25 bp, Homo sapien
gccgttcccgccacctccacgcctg

SEQ ID NO: 5259868 - DNA, 25 bp, Homo sapien
caagccctgcggccttaaaacaacg

SEQ ID NO: 5259869 - DNA, 25 bp, Homo sapien
gcgcttccggggatctacgggccga

SEQ ID NO: 5259870 - DNA, 25 bp, Homo sapien
agaaacggaaacatcaccaccagga

SEQ ID NO: 5259871 - DNA, 25 bp, Homo sapien
aagaccctcgccgacacctgctggc

SEQ ID NO: 5259872 - DNA, 25 bp, Homo sapien
tcgccgacacctgctggcaaccaaa

SEQ ID NO: 5259873 - DNA, 25 bp, Homo sapien
aaggaatggcctacaatcgaagcga

SEQ ID NO: 5259874 - DNA, 25 bp, Homo sapien
ccaagaatcacaggtcgagaatgct

SEQ ID NO: 5259875 - DNA, 25 bp, Homo sapien
tttctcagctcctaaaaggaatggc

SEQ ID NO: 5259876 - DNA, 25 bp, Homo sapien
gaatgctgtaaaaacggatcctttc

SEQ ID NO: 5259877 - DNA, 25 bp, Homo sapien
caaaggcctcatccggaggactttt

SEQ ID NO: 5259878 - DNA, 25 bp, Homo sapien
gcaaaggcctcatccggaggacttt

SEQ ID NO: 5259879 - DNA, 25 bp, Homo sapien
gcctcatccggaggactttttccca

SEQ ID NO: 5259880 - DNA, 25 bp, Homo sapien
tcatccggaggactttttcccagtc

SEQ ID NO: 5259881 - DNA, 25 bp, Homo sapien
tgacgtgaggtgctcaaccctttat

SEQ ID NO: 5259882 - DNA, 25 bp, Homo sapien
catgacgcttggcagtttcggtgta

SEQ ID NO: 5259883 - DNA, 25 bp, Homo sapien
caggcgaggctgagccatgacgctt

SEQ ID NO: 5259884 - DNA, 25 bp, Homo sapien
gaggagccgcacatgaaactttttg

SEQ ID NO: 5259885 - DNA, 25 bp, Homo sapien
tttctcatccaactctgcccttttg

SEQ ID NO: 5259886 - DNA, 25 bp, Homo sapien
gcggcctggacctcacagtgagtca

SEQ ID NO: 5259887 - DNA, 25 bp, Homo sapien
tccaactctgcccttttgcccttcc

SEQ ID NO: 5259888 - DNA, 25 bp, Homo sapien
ttcctgtcctctgcggcctggacct

SEQ ID NO: 5259889 - DNA, 25 bp, Homo sapien
gtacaaatgctttctcgaggatgac

SEQ ID NO: 5259890 - DNA, 25 bp, Homo sapien
caaatgctttctcgaggatgactcg

SEQ ID NO: 5259891 - DNA, 25 bp, Homo sapien
aatgctttctcgaggatgactcgca

SEQ ID NO: 5259892 - DNA, 25 bp, Homo sapien
gctttctcgaggatgactcgcaggg

SEQ ID NO: 5259893 - DNA, 25 bp, Homo sapien
cgtaatgctaagaacttctcagcca

SEQ ID NO: 5259894 - DNA, 25 bp, Homo sapien
gggctcgcaggacttcctgagcctg

SEQ ID NO: 5259895 - DNA, 25 bp, Homo sapien
tgaggatccccctccttccgtaatg

SEQ ID NO: 5259896 - DNA, 25 bp, Homo sapien
atcctcagggctcgcaggacttcct

SEQ ID NO: 5259897 - DNA, 25 bp, Homo sapien
gaataaagccatcatatcatgaatg

SEQ ID NO: 5259898 - DNA, 25 bp, Homo sapien
cagtcatcccgaggaaagaaaacac

SEQ ID NO: 5259899 - DNA, 25 bp, Homo sapien
cgaaatgatatgctttatggagata

SEQ ID NO: 5259900 - DNA, 25 bp, Homo sapien
gaaaacaccattaggattcgaaatg

SEQ ID NO: 5259901 - DNA, 25 bp, Homo sapien
cgggcaggaaggaggacaacttcca

SEQ ID NO: 5259902 - DNA, 25 bp, Homo sapien
tgcccgggcaggaaggaggacaact

SEQ ID NO: 5259903 - DNA, 25 bp, Homo sapien
gggcaggaaggaggacaacttccat

SEQ ID NO: 5259904 - DNA, 25 bp, Homo sapien
tggtccagcaaccttcgcaccaggg

SEQ ID NO: 5259905 - DNA, 25 bp, Homo sapien
tccagcaaccttcgcaccagggggg

SEQ ID NO: 5259906 - DNA, 25 bp, Homo sapien
cagcaaccttcgcaccaggggggca

SEQ ID NO: 5259907 - DNA, 25 bp, Homo sapien
caaccttcgcaccaggggggcacgg

SEQ ID NO: 5259908 - DNA, 25 bp, Homo sapien
ttagaacttatgaggctgatggctg

SEQ ID NO: 5259909 - DNA, 25 bp, Homo sapien
gtaagtcattacagaagagggctca

SEQ ID NO: 5259910 - DNA, 25 bp, Homo sapien
gcagaaggtaagtcattacagaaga

SEQ ID NO: 5259911 - DNA, 25 bp, Homo sapien
aggatcctgtggtagcgcagaaccc

SEQ ID NO: 5259912 - DNA, 25 bp, Homo sapien
atccaggatcctgtggtagcgcaga

SEQ ID NO: 5259913 - DNA, 25 bp, Homo sapien
caagggtggcagtgaaatccttgag

SEQ ID NO: 5259914 - DNA, 25 bp, Homo sapien
ctcggcaagggtggcagtgaaatcc

SEQ ID NO: 5259915 - DNA, 25 bp, Homo sapien
ctcagggtaccctcctcggcaaggg

SEQ ID NO: 5259916 - DNA, 25 bp, Homo sapien
cagggtaccctcctcggcaagggtg

SEQ ID NO: 5259917 - DNA, 25 bp, Homo sapien
cacctgctgaggaattctgaccacc

SEQ ID NO: 5259918 - DNA, 25 bp, Homo sapien
gaggaattctgaccaccagctcctt

SEQ ID NO: 5259919 - DNA, 25 bp, Homo sapien
ggctttctgttcacctgctgaggaa

SEQ ID NO: 5259920 - DNA, 25 bp, Homo sapien
tttcctggctttctgttcacctgct

SEQ ID NO: 5259921 - DNA, 25 bp, Homo sapien
gaatgcactcgcgtttagaaaaatg

SEQ ID NO: 5259922 - DNA, 25 bp, Homo sapien
gacccactggaggacgtagaaatct

SEQ ID NO: 5259923 - DNA, 25 bp, Homo sapien
tacgagggccgtgctgcaaatgtat

SEQ ID NO: 5259924 - DNA, 25 bp, Homo sapien
tcagcttctcagtgccgctacgaat

SEQ ID NO: 5259925 - DNA, 25 bp, Homo sapien
ctgcaattagggcaaaggggaatga

SEQ ID NO: 5259926 - DNA, 25 bp, Homo sapien
tgcaattagggcaaaggggaatgaa

SEQ ID NO: 5259927 - DNA, 25 bp, Homo sapien
gcaattagggcaaaggggaatgaaa

SEQ ID NO: 5259928 - DNA, 25 bp, Homo sapien
agctctgggcaggtgatactaggcc

SEQ ID NO: 5259929 - DNA, 25 bp, Homo sapien
caattgcaagtaagaggcctccaga

SEQ ID NO: 5259930 - DNA, 25 bp, Homo sapien
agctctgggtgtcccgactcgagaa

SEQ ID NO: 5259931 - DNA, 25 bp, Homo sapien
tggagcaaacaaggacagcttctga

SEQ ID NO: 5259932 - DNA, 25 bp, Homo sapien
gaaagagctccctttcgggcacagc

SEQ ID NO: 5259933 - DNA, 25 bp, Homo sapien
ctccaaggcctgatgagcagatgcc

SEQ ID NO: 5259934 - DNA, 25 bp, Homo sapien
cactccaaggcctgatgagcagatg

SEQ ID NO: 5259935 - DNA, 25 bp, Homo sapien
tcacactccaaggcctgatgagcag

SEQ ID NO: 5259936 - DNA, 25 bp, Homo sapien
tccaaggcctgatgagcagatgcca

SEQ ID NO: 5259937 - DNA, 25 bp, Homo sapien
tccagctctaggagcacagaggctg

SEQ ID NO: 5259938 - DNA, 25 bp, Homo sapien
tcagagtgaaaacacgaagccccag

SEQ ID NO: 5259939 - DNA, 25 bp, Homo sapien
gtgtagccagcactcgactgtgggc

SEQ ID NO: 5259940 - DNA, 25 bp, Homo sapien
ggcaatggagtccttccagctctag

SEQ ID NO: 5259941 - DNA, 25 bp, Homo sapien
acagcctgcgagagccactctcaga

SEQ ID NO: 5259942 - DNA, 25 bp, Homo sapien
aagtacatttcgctcctctgtgcac

SEQ ID NO: 5259943 - DNA, 25 bp, Homo sapien
ccattatgaattgcctccgtggcag

SEQ ID NO: 5259944 - DNA, 25 bp, Homo sapien
tagcagctaggattggaaaccagcc

SEQ ID NO: 5259945 - DNA, 25 bp, Homo sapien
cctgaagtctgttcatgcacctccg

SEQ ID NO: 5259946 - DNA, 25 bp, Homo sapien
aagtctgttcatgcacctccgttct

SEQ ID NO: 5259947 - DNA, 25 bp, Homo sapien
gttcatgcacctccgttcttcattg

SEQ ID NO: 5259948 - DNA, 25 bp, Homo sapien
tcatccacctgaagtctgttcatgc

SEQ ID NO: 5259949 - DNA, 25 bp, Homo sapien
agccagagggtcactgaatcaccga

SEQ ID NO: 5259950 - DNA, 25 bp, Homo sapien
cagccagagggtcactgaatcaccg

SEQ ID NO: 5259951 - DNA, 25 bp, Homo sapien
cactgaatcaccgaatgccccggag

SEQ ID NO: 5259952 - DNA, 25 bp, Homo sapien
tgaatcaccgaatgccccggagctg

SEQ ID NO: 5259953 - DNA, 25 bp, Homo sapien
tgtgccggaaatgcaacgttcccct

SEQ ID NO: 5259954 - DNA, 25 bp, Homo sapien
cgggtcacaagcaagatcacggagg

SEQ ID NO: 5259955 - DNA, 25 bp, Homo sapien
acagacttcccgtgtggaccgtcag

SEQ ID NO: 5259956 - DNA, 25 bp, Homo sapien
ctgaggcaaaaggtaatctaagtat

SEQ ID NO: 5259957 - DNA, 25 bp, Homo sapien
aagcaaaggcaaccatgaacaggtc

SEQ ID NO: 5259958 - DNA, 25 bp, Homo sapien
agcaaaggcaaccatgaacaggtca

SEQ ID NO: 5259959 - DNA, 25 bp, Homo sapien
gcaaaggcaaccatgaacaggtcat

SEQ ID NO: 5259960 - DNA, 25 bp, Homo sapien
catgaacaggtcatgtccctctggg

SEQ ID NO: 5259961 - DNA, 25 bp, Homo sapien
tcttcatagcacgtaatttcttcag

SEQ ID NO: 5259962 - DNA, 25 bp, Homo sapien
tcatagcacgtaatttcttcagcta

SEQ ID NO: 5259963 - DNA, 25 bp, Homo sapien
tgtcttcatagcacgtaatttcttc

SEQ ID NO: 5259964 - DNA, 25 bp, Homo sapien
cttgtcttcatagcacgtaatttct

SEQ ID NO: 5259965 - DNA, 25 bp, Homo sapien
ttagaaagaaattttactcatatta

SEQ ID NO: 5259966 - DNA, 25 bp, Homo sapien
tagaaagaaattttactcatattac

SEQ ID NO: 5259967 - DNA, 25 bp, Homo sapien
catcgggattcccggtgaaattctt

SEQ ID NO: 5259968 - DNA, 25 bp, Homo sapien
agcatcgggattcccggtgaaattc

SEQ ID NO: 5259969 - DNA, 25 bp, Homo sapien
gcagcatcgggattcccggtgaaat

SEQ ID NO: 5259970 - DNA, 25 bp, Homo sapien
ctgcagcatcgggattcccggtgaa

SEQ ID NO: 5259971 - DNA, 25 bp, Homo sapien
gatggtgctgaagatggttccctgc

SEQ ID NO: 5259972 - DNA, 25 bp, Homo sapien
tggtgctgaagatggttccctgcag

SEQ ID NO: 5259973 - DNA, 25 bp, Homo sapien
acatcacgacatcccccaggatggt

SEQ ID NO: 5259974 - DNA, 25 bp, Homo sapien
aaatcgatatgcaaaacatcacgac

SEQ ID NO: 5259975 - DNA, 25 bp, Homo sapien
gcgtgcttcgtgctgtcttctctgg

SEQ ID NO: 5259976 - DNA, 25 bp, Homo sapien
ttgacgcctgcgtgcttcgtgctgt

SEQ ID NO: 5259977 - DNA, 25 bp, Homo sapien
aatgccggaggtcgccttgacgcct

SEQ ID NO: 5259978 - DNA, 25 bp, Homo sapien
taggtcccagggaatgccggaggtc

SEQ ID NO: 5259979 - DNA, 25 bp, Homo sapien
tctctgttgaggaatgtctgcgggc

SEQ ID NO: 5259980 - DNA, 25 bp, Homo sapien
atctctgttgaggaatgtctgcggg

SEQ ID NO: 5259981 - DNA, 25 bp, Homo sapien
tgaggaatgtctgcgggcggacgca

SEQ ID NO: 5259982 - DNA, 25 bp, Homo sapien
tgttgaggaatgtctgcgggcggac

SEQ ID NO: 5259983 - DNA, 25 bp, Homo sapien
cttcaggtggtggatcttgccacag

SEQ ID NO: 5259984 - DNA, 25 bp, Homo sapien
acaggagggcgttcccagacaggcc

SEQ ID NO: 5259985 - DNA, 25 bp, Homo sapien
gacaggcccgattttaagtatatga

SEQ ID NO: 5259986 - DNA, 25 bp, Homo sapien
aattctgcccaaagggcagtcaaca

SEQ ID NO: 5259987 - DNA, 25 bp, Homo sapien
agaaggccccggtggaagctctcgt

SEQ ID NO: 5259988 - DNA, 25 bp, Homo sapien
ccagctggagatgtaaggggacaag

SEQ ID NO: 5259989 - DNA, 25 bp, Homo sapien
agctggagatgtaaggggacaaggg

SEQ ID NO: 5259990 - DNA, 25 bp, Homo sapien
ctggagatgtaaggggacaagggga

SEQ ID NO: 5259991 - DNA, 25 bp, Homo sapien
tggagatgtaaggggacaaggggac

SEQ ID NO: 5259992 - DNA, 25 bp, Homo sapien
ctcatcacaggcagcttgcagtccg

SEQ ID NO: 5259993 - DNA, 25 bp, Homo sapien
ggctgtagccagcaactcatcacag

SEQ ID NO: 5259994 - DNA, 25 bp, Homo sapien
tgtgggctgatcaaagactgaaacc

SEQ ID NO: 5259995 - DNA, 25 bp, Homo sapien
tgcagtccgaaacccactgtgggct

SEQ ID NO: 5259996 - DNA, 25 bp, Homo sapien
gctgttcagccttggtccttctccc

SEQ ID NO: 5259997 - DNA, 25 bp, Homo sapien
ctggagagataggcacagtggaggc

SEQ ID NO: 5259998 - DNA, 25 bp, Homo sapien
ggtttgctgagctccccatgggccg

SEQ ID NO: 5259999 - DNA, 25 bp, Homo sapien
aagggtttgctgagctccccatggg

SEQ ID NO: 5260000 - DNA, 25 bp, Homo sapien
agggtttgctgagctccccatgggc

SEQ ID NO: 5260001 - DNA, 25 bp, Homo sapien
gggtttgctgagctccccatgggcc

SEQ ID NO: 5260002 - DNA, 25 bp, Homo sapien
ttctggccgaatgctcgagttctgg

SEQ ID NO: 5260003 - DNA, 25 bp, Homo sapien
cgagttctgggaccgctgtctggat

SEQ ID NO: 5260004 - DNA, 25 bp, Homo sapien
taaaatgtcaaagatagcaggcgtc

SEQ ID NO: 5260005 - DNA, 25 bp, Homo sapien
tcaccttgctgtgaccgccaggaag

SEQ ID NO: 5260006 - DNA, 25 bp, Homo sapien
acagctgttgcgatggtaatggagc

SEQ ID NO: 5260007 - DNA, 25 bp, Homo sapien
tggtaatggagctcattgttactat

SEQ ID NO: 5260008 - DNA, 25 bp, Homo sapien
cattgttactattcagcatctggag

SEQ ID NO: 5260009 - DNA, 25 bp, Homo sapien
aaaaatgacagctgttgcgatggta

SEQ ID NO: 5260010 - DNA, 25 bp, Homo sapien
ccgcgtggggctgcccatatgtgta

SEQ ID NO: 5260011 - DNA, 25 bp, Homo sapien
tccagctcataaggacatgcgctct

SEQ ID NO: 5260012 - DNA, 25 bp, Homo sapien
tgaagggtttcctggcaccctatcc

SEQ ID NO: 5260013 - DNA, 25 bp, Homo sapien
cacacagagtgtgagcgtgcaccgt

SEQ ID NO: 5260014 - DNA, 25 bp, Homo sapien
gctgcccagtgtgtgggttccttcc

SEQ ID NO: 5260015 - DNA, 25 bp, Homo sapien
ccagtgtgtgggttccttccggcag

SEQ ID NO: 5260016 - DNA, 25 bp, Homo sapien
agtgtgtgggttccttccggcagcc

SEQ ID NO: 5260017 - DNA, 25 bp, Homo sapien
tgaagctgcccagtgtgtgggttcc

SEQ ID NO: 5260018 - DNA, 25 bp, Homo sapien
ctcctgctctgagccgacggccagg

SEQ ID NO: 5260019 - DNA, 25 bp, Homo sapien
tgagccgacggccaggcctgcaata

SEQ ID NO: 5260020 - DNA, 25 bp, Homo sapien
cgacggccaggcctgcaatatgcct

SEQ ID NO: 5260021 - DNA, 25 bp, Homo sapien
ggccaggcctgcaatatgcctctgc

SEQ ID NO: 5260022 - DNA, 25 bp, Homo sapien
caagacttggactaaggctctggaa

SEQ ID NO: 5260023 - DNA, 25 bp, Homo sapien
cagtggaggatcatcacgaaggaac

SEQ ID NO: 5260024 - DNA, 25 bp, Homo sapien
tctggaagggctgtttacactggac

SEQ ID NO: 5260025 - DNA, 25 bp, Homo sapien
gatcatcacgaaggaaccctctgct

SEQ ID NO: 5260026 - DNA, 25 bp, Homo sapien
ttcaagatacaggtctgggccagtc

SEQ ID NO: 5260027 - DNA, 25 bp, Homo sapien
cttcaagatacaggtctgggccagt

SEQ ID NO: 5260028 - DNA, 25 bp, Homo sapien
gaatcaccttcaagatacaggtctg

SEQ ID NO: 5260029 - DNA, 25 bp, Homo sapien
ctagaatcaccttcaagatacaggt

SEQ ID NO: 5260030 - DNA, 25 bp, Homo sapien
cccgctgtgcgtaagagaaaacgac

SEQ ID NO: 5260031 - DNA, 25 bp, Homo sapien
tcaatggtaagcctggaaatactcc

SEQ ID NO: 5260032 - DNA, 25 bp, Homo sapien
taactgatgtgatccaagagagtca

SEQ ID NO: 5260033 - DNA, 25 bp, Homo sapien
taggcagcaattactcacaccagtc

SEQ ID NO: 5260034 - DNA, 25 bp, Homo sapien
tctgcgcatgctggaaaaatctgct

SEQ ID NO: 5260035 - DNA, 25 bp, Homo sapien
gatctggttgagtcttaaaagcctt

SEQ ID NO: 5260036 - DNA, 25 bp, Homo sapien
taatactgaggcttaaattccagtg

SEQ ID NO: 5260037 - DNA, 25 bp, Homo sapien
acttcctgatgagccagttggagca

SEQ ID NO: 5260038 - DNA, 25 bp, Homo sapien
gagttgaaatgtatggacctgccag

SEQ ID NO: 5260039 - DNA, 25 bp, Homo sapien
tggatacataaaagagcaggcctgc

SEQ ID NO: 5260040 - DNA, 25 bp, Homo sapien
agatgcaccaatctcagcagccagg

SEQ ID NO: 5260041 - DNA, 25 bp, Homo sapien
tgcgtcctctaagcaaagacggtgg

SEQ ID NO: 5260042 - DNA, 25 bp, Homo sapien
ccacgtgacaccagacccactggca

SEQ ID NO: 5260043 - DNA, 25 bp, Homo sapien
gtgcccacgtgacaccagacccact

SEQ ID NO: 5260044 - DNA, 25 bp, Homo sapien
ctcccctgtgcccacgtgacaccag

SEQ ID NO: 5260045 - DNA, 25 bp, Homo sapien
ctgtgcccacgtgacaccagaccca

SEQ ID NO: 5260046 - DNA, 25 bp, Homo sapien
gaggtagagccgtgccgtcgccctt

SEQ ID NO: 5260047 - DNA, 25 bp, Homo sapien
cggcttgtcgttgggtaaagtgact

SEQ ID NO: 5260048 - DNA, 25 bp, Homo sapien
gcctgaaacataacccagagtgcag

SEQ ID NO: 5260049 - DNA, 25 bp, Homo sapien
gaaaacaacggcagtgtgtctctgt

SEQ ID NO: 5260050 - DNA, 25 bp, Homo sapien
tgttacctgtgtgtcgttctccaga

SEQ ID NO: 5260051 - DNA, 25 bp, Homo sapien
agtgttacctgtgtgtcgttctcca

SEQ ID NO: 5260052 - DNA, 25 bp, Homo sapien
gttacctgtgtgtcgttctccagat

SEQ ID NO: 5260053 - DNA, 25 bp, Homo sapien
gtgttacctgtgtgtcgttctccag

SEQ ID NO: 5260054 - DNA, 25 bp, Homo sapien
gaaagtcagcatatctccaggggcc

SEQ ID NO: 5260055 - DNA, 25 bp, Homo sapien
cacgccaaaaccaggtgttgtggga

SEQ ID NO: 5260056 - DNA, 25 bp, Homo sapien
aaagggatccttgccgtgggccgcg

SEQ ID NO: 5260057 - DNA, 25 bp, Homo sapien
aagagacagctgtgagtcgtcccac

SEQ ID NO: 5260058 - DNA, 25 bp, Homo sapien
acgctctgcgggaagcacacgtggc

SEQ ID NO: 5260059 - DNA, 25 bp, Homo sapien
agcaaggctccagacgtgcagcgct

SEQ ID NO: 5260060 - DNA, 25 bp, Homo sapien
aaaacagaggcggtgtcagacccaa

SEQ ID NO: 5260061 - DNA, 25 bp, Homo sapien
ccgccaacagcgtgcaaaacagagg

SEQ ID NO: 5260062 - DNA, 25 bp, Homo sapien
acacaggtacagcatagcgcccaac

SEQ ID NO: 5260063 - DNA, 25 bp, Homo sapien
aggtacagcatagcgcccaaccggg

SEQ ID NO: 5260064 - DNA, 25 bp, Homo sapien
acaggtacagcatagcgcccaaccg

SEQ ID NO: 5260065 - DNA, 25 bp, Homo sapien
ggacacaggtacagcatagcgccca

SEQ ID NO: 5260066 - DNA, 25 bp, Homo sapien
taagacgtggccgacacagtaggag

SEQ ID NO: 5260067 - DNA, 25 bp, Homo sapien
tactgcgtctaccactgactttaag

SEQ ID NO: 5260068 - DNA, 25 bp, Homo sapien
tggagtcatgaaccaccttcacctc

SEQ ID NO: 5260069 - DNA, 25 bp, Homo sapien
tcatgccgtactggagtcatgaacc

SEQ ID NO: 5260070 - DNA, 25 bp, Homo sapien
aaccttgactaatacgggagagaag

SEQ ID NO: 5260071 - DNA, 25 bp, Homo sapien
ttcttatagcaatgcatctctaact

SEQ ID NO: 5260072 - DNA, 25 bp, Homo sapien
tagcaatgcatctctaactccattt

SEQ ID NO: 5260073 - DNA, 25 bp, Homo sapien
gaggagggtctgggccttacaaggc

SEQ ID NO: 5260074 - DNA, 25 bp, Homo sapien
tctgcaatcggacggcatccaagag

SEQ ID NO: 5260075 - DNA, 25 bp, Homo sapien
tggattcagtgaagcagacgccctc

SEQ ID NO: 5260076 - DNA, 25 bp, Homo sapien
tccagcttgcagacgacagggtgta

SEQ ID NO: 5260077 - DNA, 25 bp, Homo sapien
aaccctcaagggaacagcgtctctg

SEQ ID NO: 5260078 - DNA, 25 bp, Homo sapien
aaattactgtggcatgatttccaga

SEQ ID NO: 5260079 - DNA, 25 bp, Homo sapien
gaggcttgaacatggccaaactgtc

SEQ ID NO: 5260080 - DNA, 25 bp, Homo sapien
aattcagaggcttgaacatggccaa

SEQ ID NO: 5260081 - DNA, 25 bp, Homo sapien
ccagaagacaattctatggaagaat

SEQ ID NO: 5260082 - DNA, 25 bp, Homo sapien
cccaagagggtaagaagtcctcaca

SEQ ID NO: 5260083 - DNA, 25 bp, Homo sapien
actatgactagaatggctaccaaac

SEQ ID NO: 5260084 - DNA, 25 bp, Homo sapien
gaatggctaccaaacatgctaaccc

SEQ ID NO: 5260085 - DNA, 25 bp, Homo sapien
acactcaactgtcaacctactatga

SEQ ID NO: 5260086 - DNA, 25 bp, Homo sapien
aagggcccttcggactggcgtgtcg

SEQ ID NO: 5260087 - DNA, 25 bp, Homo sapien
cactttctcaatgaacccactgcag

SEQ ID NO: 5260088 - DNA, 25 bp, Homo sapien
aagctggaggtggaaccaacgcgaa

SEQ ID NO: 5260089 - DNA, 25 bp, Homo sapien
tgaacccactgcagaactccacagt

SEQ ID NO: 5260090 - DNA, 25 bp, Homo sapien
gacacccgtgtggtttcatctgaga

SEQ ID NO: 5260091 - DNA, 25 bp, Homo sapien
gatcacacatagactcactcacggg

SEQ ID NO: 5260092 - DNA, 25 bp, Homo sapien
tacagcaacagtaaccgggatgcct

SEQ ID NO: 5260093 - DNA, 25 bp, Homo sapien
catgtgctggaaccaaggacggcga

SEQ ID NO: 5260094 - DNA, 25 bp, Homo sapien
cggccagtgacgtaggcagagtccc

SEQ ID NO: 5260095 - DNA, 25 bp, Homo sapien
ccccaggttcccatcatggttcatg

SEQ ID NO: 5260096 - DNA, 25 bp, Homo sapien
taggcagagtccctccatgagatgc

SEQ ID NO: 5260097 - DNA, 25 bp, Homo sapien
gtgcaaatgcacacggtgtccccca

SEQ ID NO: 5260098 - DNA, 25 bp, Homo sapien
cagagcctgaaacaatttacctgct

SEQ ID NO: 5260099 - DNA, 25 bp, Homo sapien
tcagtggctctgagtgaatgaagca

SEQ ID NO: 5260100 - DNA, 25 bp, Homo sapien
cagaagggacagttacagtgtcctc

SEQ ID NO: 5260101 - DNA, 25 bp, Homo sapien
gacagacaaccacaacaatgtcctg

SEQ ID NO: 5260102 - DNA, 25 bp, Homo sapien
ctgttaccctgaaagggtgggtcag

SEQ ID NO: 5260103 - DNA, 25 bp, Homo sapien
tagggcaaatcacgtctccaggaag

SEQ ID NO: 5260104 - DNA, 25 bp, Homo sapien
ctgccacttctagggcaaatcacgt

SEQ ID NO: 5260105 - DNA, 25 bp, Homo sapien
taccctgaaagggtgggtcagctgt

SEQ ID NO: 5260106 - DNA, 25 bp, Homo sapien
ctgcaaggaaggactgaagccgcgt

SEQ ID NO: 5260107 - DNA, 25 bp, Homo sapien
catttcctctgctggagcgtctcca

SEQ ID NO: 5260108 - DNA, 25 bp, Homo sapien
cagctgattcgtgggctcctggaca

SEQ ID NO: 5260109 - DNA, 25 bp, Homo sapien
tgcaggcgtcagaaaatccgtgatg

SEQ ID NO: 5260110 - DNA, 25 bp, Homo sapien
cactcaaaccgaaaccattcctggg

SEQ ID NO: 5260111 - DNA, 25 bp, Homo sapien
agacgtgcactcaaaccgaaaccat

SEQ ID NO: 5260112 - DNA, 25 bp, Homo sapien
ggcccttgggttcagacgtgcactc

SEQ ID NO: 5260113 - DNA, 25 bp, Homo sapien
gttcagacgtgcactcaaaccgaaa

SEQ ID NO: 5260114 - DNA, 25 bp, Homo sapien
gagttggagccactccgtggttagc

SEQ ID NO: 5260115 - DNA, 25 bp, Homo sapien
tcagtcttgaccgtcctctgggttc

SEQ ID NO: 5260116 - DNA, 25 bp, Homo sapien
gccttttatcgtgaagacctgagcc

SEQ ID NO: 5260117 - DNA, 25 bp, Homo sapien
cactccgtggttagcttctgggcct

SEQ ID NO: 5260118 - DNA, 25 bp, Homo sapien
ctgactccatgggttaaaagggaag

SEQ ID NO: 5260119 - DNA, 25 bp, Homo sapien
tttctccgtgaggtttccacgtgcc

SEQ ID NO: 5260120 - DNA, 25 bp, Homo sapien
ggaccagctgcctgacgttgcagca

SEQ ID NO: 5260121 - DNA, 25 bp, Homo sapien
gaggtttccacgtgccagccttgct

SEQ ID NO: 5260122 - DNA, 25 bp, Homo sapien
gtctaacttctcctccgttctagga

SEQ ID NO: 5260123 - DNA, 25 bp, Homo sapien
tcagaccaagtcatggagtcccatg

SEQ ID NO: 5260124 - DNA, 25 bp, Homo sapien
ctcgtgctcctcacggctgtgcagc

SEQ ID NO: 5260125 - DNA, 25 bp, Homo sapien
tggcctcgtgctcctcacggctgtg

SEQ ID NO: 5260126 - DNA, 25 bp, Homo sapien
gaccaagtcatggagtcccatggcc

SEQ ID NO: 5260127 - DNA, 25 bp, Homo sapien
tcgttccacggttggctggagagca

SEQ ID NO: 5260128 - DNA, 25 bp, Homo sapien
ggttaattatgcacccagtgcctcg

SEQ ID NO: 5260129 - DNA, 25 bp, Homo sapien
tgccacctgtccaaaagttagagtt

SEQ ID NO: 5260130 - DNA, 25 bp, Homo sapien
tcaggagtgttgtcgccagaggcac

SEQ ID NO: 5260131 - DNA, 25 bp, Homo sapien
tccatacttgatgtgtagtcacaaa

SEQ ID NO: 5260132 - DNA, 25 bp, Homo sapien
cacagcagtgacacacataaccggg

SEQ ID NO: 5260133 - DNA, 25 bp, Homo sapien
atggcacagcagtgacacacataac

SEQ ID NO: 5260134 - DNA, 25 bp, Homo sapien
tagtcacaaacatccagtgggctcc

SEQ ID NO: 5260135 - DNA, 25 bp, Homo sapien
cagaattcaataagacagacgatgc

SEQ ID NO: 5260136 - DNA, 25 bp, Homo sapien
agacggggccggcacttccacttgc

SEQ ID NO: 5260137 - DNA, 25 bp, Homo sapien
gacgatgctactgatgctggcacag

SEQ ID NO: 5260138 - DNA, 25 bp, Homo sapien
cctagaccatcgctgccagaattca

SEQ ID NO: 5260139 - DNA, 25 bp, Homo sapien
aggtgagggcttcccataccaaagg

SEQ ID NO: 5260140 - DNA, 25 bp, Homo sapien
gaacctttgcccaataatccagaaa

SEQ ID NO: 5260141 - DNA, 25 bp, Homo sapien
ggtctggttgacttcatgtgccact

SEQ ID NO: 5260142 - DNA, 25 bp, Homo sapien
gttgacttcatgtgccactgaagag

SEQ ID NO: 5260143 - DNA, 25 bp, Homo sapien
cataattggggccatctgtgagtac

SEQ ID NO: 5260144 - DNA, 25 bp, Homo sapien
tcattcataattggggccatctgtg

SEQ ID NO: 5260145 - DNA, 25 bp, Homo sapien
tggggccatctgtgagtaccaggaa

SEQ ID NO: 5260146 - DNA, 25 bp, Homo sapien
gccatctgtgagtaccaggaaggag

SEQ ID NO: 5260147 - DNA, 25 bp, Homo sapien
tcatacactcagtcacctcctctga

SEQ ID NO: 5260148 - DNA, 25 bp, Homo sapien
tggggccccggctgagaccaacttg

SEQ ID NO: 5260149 - DNA, 25 bp, Homo sapien
acttgcccagtgttcttcagagaca

SEQ ID NO: 5260150 - DNA, 25 bp, Homo sapien
agggcccttcatacactcagtcacc

SEQ ID NO: 5260151 - DNA, 25 bp, Homo sapien
ggtgccccatgctcggcatccttgg

SEQ ID NO: 5260152 - DNA, 25 bp, Homo sapien
aggtgggtgccccatgctcggcatc

SEQ ID NO: 5260153 - DNA, 25 bp, Homo sapien
cagccaccttctggccttgcttggg

SEQ ID NO: 5260154 - DNA, 25 bp, Homo sapien
tgggtgccccatgctcggcatcctt

SEQ ID NO: 5260155 - DNA, 25 bp, Homo sapien
ggaccccatgaaagagttccagtta

SEQ ID NO: 5260156 - DNA, 25 bp, Homo sapien
caccagggcttgagaaggagtatga

SEQ ID NO: 5260157 - DNA, 25 bp, Homo sapien
ttgagaaggagtatgaattccaggg

SEQ ID NO: 5260158 - DNA, 25 bp, Homo sapien
ttgcagaacaccagggcttgagaag

SEQ ID NO: 5260159 - DNA, 25 bp, Homo sapien
cctagaggggtggtcgacctgggca

SEQ ID NO: 5260160 - DNA, 25 bp, Homo sapien
cttcatgatgcaggaactgaggccc

SEQ ID NO: 5260161 - DNA, 25 bp, Homo sapien
tgtccccagcttcatgatgcaggaa

SEQ ID NO: 5260162 - DNA, 25 bp, Homo sapien
tcgacctgggcagatgtgtccccag

SEQ ID NO: 5260163 - DNA, 25 bp, Homo sapien
ggcccacggtgaccgcccaccagcg

SEQ ID NO: 5260164 - DNA, 25 bp, Homo sapien
cacggtgaccgcccaccagcgcagg

SEQ ID NO: 5260165 - DNA, 25 bp, Homo sapien
ggtgaccgcccaccagcgcagggca

SEQ ID NO: 5260166 - DNA, 25 bp, Homo sapien
aggcccacggtgaccgcccaccagc

SEQ ID NO: 5260167 - DNA, 25 bp, Homo sapien
gaggtgctgacccaccgaagggcat

SEQ ID NO: 5260168 - DNA, 25 bp, Homo sapien
ctgaacgggtaagaatacgcccacg

SEQ ID NO: 5260169 - DNA, 25 bp, Homo sapien
agaatacgcccacggggactgacca

SEQ ID NO: 5260170 - DNA, 25 bp, Homo sapien
tgaccagcacagcatgatgggccgg

SEQ ID NO: 5260171 - DNA, 25 bp, Homo sapien
aaggggcgtccgctgtgctcagaga

SEQ ID NO: 5260172 - DNA, 25 bp, Homo sapien
gctcgtgaagaaggggcgtccgctg

SEQ ID NO: 5260173 - DNA, 25 bp, Homo sapien
tgctcagagactcttgtgggacccg

SEQ ID NO: 5260174 - DNA, 25 bp, Homo sapien
cagaacagggtgtggagctcgtgaa

SEQ ID NO: 5260175 - DNA, 25 bp, Homo sapien
gcccgagggaagccctccgagctgt

SEQ ID NO: 5260176 - DNA, 25 bp, Homo sapien
tccaggaaggtgtcggcccgaggga

SEQ ID NO: 5260177 - DNA, 25 bp, Homo sapien
cctccgagctgtcatcagagagaga

SEQ ID NO: 5260178 - DNA, 25 bp, Homo sapien
cacgattgccggatacatccagggt

SEQ ID NO: 5260179 - DNA, 25 bp, Homo sapien
gctcttgctgagtggctcccgtgcc

SEQ ID NO: 5260180 - DNA, 25 bp, Homo sapien
ttcgtgcataattgcccagtgctct

SEQ ID NO: 5260181 - DNA, 25 bp, Homo sapien
ttgctgagtggctcccgtgccccat

SEQ ID NO: 5260182 - DNA, 25 bp, Homo sapien
aataattggatgaatatttcgtgca

SEQ ID NO: 5260183 - DNA, 25 bp, Homo sapien
tcttcccttaaaacattgagaactc

SEQ ID NO: 5260184 - DNA, 25 bp, Homo sapien
tcccttaaaacattgagaactctgg

SEQ ID NO: 5260185 - DNA, 25 bp, Homo sapien
taaaacattgagaactctgggtact

SEQ ID NO: 5260186 - DNA, 25 bp, Homo sapien
cattgagaactctgggtacttgggc

SEQ ID NO: 5260187 - DNA, 25 bp, Homo sapien
tccagttcaggcagtcacaggtgga

SEQ ID NO: 5260188 - DNA, 25 bp, Homo sapien
ctccagttcaggcagtcacaggtgg

SEQ ID NO: 5260189 - DNA, 25 bp, Homo sapien
aggtctatgggagcggtggagctgc

SEQ ID NO: 5260190 - DNA, 25 bp, Homo sapien
tctatgggagcggtggagctgcgtg

SEQ ID NO: 5260191 - DNA, 25 bp, Homo sapien
cagcaggtctatgggagcggtggag

SEQ ID NO: 5260192 - DNA, 25 bp, Homo sapien
gtgcagggtgggaagcgccgcagct

SEQ ID NO: 5260193 - DNA, 25 bp, Homo sapien
atacttggggtgctctgatggtgat

SEQ ID NO: 5260194 - DNA, 25 bp, Homo sapien
cttcggggtgcccaggggccattct

SEQ ID NO: 5260195 - DNA, 25 bp, Homo sapien
tacacttcggggtgcccaggggcca

SEQ ID NO: 5260196 - DNA, 25 bp, Homo sapien
ccagagatacttggggtgctctgat

SEQ ID NO: 5260197 - DNA, 25 bp, Homo sapien
ggatctcgcatttctgcgccacctg

SEQ ID NO: 5260198 - DNA, 25 bp, Homo sapien
cagatgaaagtagcggcccgtggat

SEQ ID NO: 5260199 - DNA, 25 bp, Homo sapien
ggatctctcccctcggatctcgcat

SEQ ID NO: 5260200 - DNA, 25 bp, Homo sapien
tgctgctgggacatgcccagatgaa

SEQ ID NO: 5260201 - DNA, 25 bp, Homo sapien
ggccttgagacctcttgacagatgt

SEQ ID NO: 5260202 - DNA, 25 bp, Homo sapien
tcacctcttctatcctgagtggcta

SEQ ID NO: 5260203 - DNA, 25 bp, Homo sapien
ttgagacctcttgacagatgtctcc

SEQ ID NO: 5260204 - DNA, 25 bp, Homo sapien
cacctcttctatcctgagtggctac

SEQ ID NO: 5260205 - DNA, 25 bp, Homo sapien
tggtcaagttcagcgtcactggagg

SEQ ID NO: 5260206 - DNA, 25 bp, Homo sapien
tcagcgtcactggaggaaccgctgg

SEQ ID NO: 5260207 - DNA, 25 bp, Homo sapien
atctggtcaagttcagcgtcactgg

SEQ ID NO: 5260208 - DNA, 25 bp, Homo sapien
caagttcagcgtcactggaggaacc

SEQ ID NO: 5260209 - DNA, 25 bp, Homo sapien
gatgtgggcttgaggatgtgggctg

SEQ ID NO: 5260210 - DNA, 25 bp, Homo sapien
atgtgggcttgaggatgtgggctgt

SEQ ID NO: 5260211 - DNA, 25 bp, Homo sapien
tctgagacggatctcctgacgggct

SEQ ID NO: 5260212 - DNA, 25 bp, Homo sapien
catcagcttcgaaggccagtagtcc

SEQ ID NO: 5260213 - DNA, 25 bp, Homo sapien
tccatccccagttgcgtgactgtgg

SEQ ID NO: 5260214 - DNA, 25 bp, Homo sapien
tggcccggtgctgccgggctctcat

SEQ ID NO: 5260215 - DNA, 25 bp, Homo sapien
ccttcaggctgtgcgtgcttctctg

SEQ ID NO: 5260216 - DNA, 25 bp, Homo sapien
ccagggccttcaggctgtgcgtgct

SEQ ID NO: 5260217 - DNA, 25 bp, Homo sapien
aggcctgacatcctcacgaaagcct

SEQ ID NO: 5260218 - DNA, 25 bp, Homo sapien
cctgacatcctcacgaaagccttgt

SEQ ID NO: 5260219 - DNA, 25 bp, Homo sapien
agctgtagccacaggacgaagaggg

SEQ ID NO: 5260220 - DNA, 25 bp, Homo sapien
gggtgctggcaccccgtagctgggg

SEQ ID NO: 5260221 - DNA, 25 bp, Homo sapien
gcagctgtagccacaggacgaagag

SEQ ID NO: 5260222 - DNA, 25 bp, Homo sapien
ggtgctggcaccccgtagctggggc

SEQ ID NO: 5260223 - DNA, 25 bp, Homo sapien
agatgagcaagtgcctccgtgttcc

SEQ ID NO: 5260224 - DNA, 25 bp, Homo sapien
ctgccaagagatgagcaagtgcctc

SEQ ID NO: 5260225 - DNA, 25 bp, Homo sapien
agagatgagcaagtgcctccgtgtt

SEQ ID NO: 5260226 - DNA, 25 bp, Homo sapien
caagagatgagcaagtgcctccgtg

SEQ ID NO: 5260227 - DNA, 25 bp, Homo sapien
tcacgggcttgtgtccgggtctgca

SEQ ID NO: 5260228 - DNA, 25 bp, Homo sapien
gtctgcacagccctgatctcagctg

SEQ ID NO: 5260229 - DNA, 25 bp, Homo sapien
cacatcgcagggagctgcattactg

SEQ ID NO: 5260230 - DNA, 25 bp, Homo sapien
tgtcttctgatgtccgcccagctga

SEQ ID NO: 5260231 - DNA, 25 bp, Homo sapien
tgagctcacccgagataaacggctg

SEQ ID NO: 5260232 - DNA, 25 bp, Homo sapien
tgttggctcccttctgcgaagcagc

SEQ ID NO: 5260233 - DNA, 25 bp, Homo sapien
tgaatggacatctgcgaggtgcccg

SEQ ID NO: 5260234 - DNA, 25 bp, Homo sapien
tgagccccagctgcctatttgtaga

SEQ ID NO: 5260235 - DNA, 25 bp, Homo sapien
gcattaggaacattaaggacccaag

SEQ ID NO: 5260236 - DNA, 25 bp, Homo sapien
aagagtttgaaaaactgatgctgag

SEQ ID NO: 5260237 - DNA, 25 bp, Homo sapien
tgacaaaatgaaaatcgcaggaagg

SEQ ID NO: 5260238 - DNA, 25 bp, Homo sapien
cataagggaacgttccatgggcagg

SEQ ID NO: 5260239 - DNA, 25 bp, Homo sapien
catagtattattccccttgtgcaga

SEQ ID NO: 5260240 - DNA, 25 bp, Homo sapien
aagaagcctccgcacagagagggca

SEQ ID NO: 5260241 - DNA, 25 bp, Homo sapien
ggtgccgaggctttacacacaatat

SEQ ID NO: 5260242 - DNA, 25 bp, Homo sapien
gttctgaactccctaacagctgttg

SEQ ID NO: 5260243 - DNA, 25 bp, Homo sapien
atgcaaagcaggcagtgtccagggc

SEQ ID NO: 5260244 - DNA, 25 bp, Homo sapien
ccagggcgggcaggacaatgactgt

SEQ ID NO: 5260245 - DNA, 25 bp, Homo sapien
ggcgggcaggacaatgactgtggac

SEQ ID NO: 5260246 - DNA, 25 bp, Homo sapien
tcatgatcgcaatgcaaagcaggca

SEQ ID NO: 5260247 - DNA, 25 bp, Homo sapien
tccactgttcctccgtcgtctccct

SEQ ID NO: 5260248 - DNA, 25 bp, Homo sapien
cttgttccactgttcctccgtcgtc

SEQ ID NO: 5260249 - DNA, 25 bp, Homo sapien
tgttcctccgtcgtctccctgcttc

SEQ ID NO: 5260250 - DNA, 25 bp, Homo sapien
gttccactgttcctccgtcgtctcc

SEQ ID NO: 5260251 - DNA, 25 bp, Homo sapien
tccaggggtctggacaccccgttca

SEQ ID NO: 5260252 - DNA, 25 bp, Homo sapien
tggacaccccgttcactattccagg

SEQ ID NO: 5260253 - DNA, 25 bp, Homo sapien
gccctggacttgagtgtccttctgc

SEQ ID NO: 5260254 - DNA, 25 bp, Homo sapien
ggttcccgagcatgaatccttcttc

SEQ ID NO: 5260255 - DNA, 25 bp, Homo sapien
ggtgtatcctagaccataagcagct

SEQ ID NO: 5260256 - DNA, 25 bp, Homo sapien
gagactcctggagagcatggcccag

SEQ ID NO: 5260257 - DNA, 25 bp, Homo sapien
cccgggtggctacaagcatctgtca

SEQ ID NO: 5260258 - DNA, 25 bp, Homo sapien
gatcctggtgcgaaagacactggcc

SEQ ID NO: 5260259 - DNA, 25 bp, Homo sapien
cttcctatctcagggtgcccgacaa

SEQ ID NO: 5260260 - DNA, 25 bp, Homo sapien
ttccaggtccgagcacacaggggcg

SEQ ID NO: 5260261 - DNA, 25 bp, Homo sapien
tgcccgacaaaggtgcagttccagg

SEQ ID NO: 5260262 - DNA, 25 bp, Homo sapien
caaacacagattggccaaccagcca

SEQ ID NO: 5260263 - DNA, 25 bp, Homo sapien
ctgggcgccacattccggaggccgg

SEQ ID NO: 5260264 - DNA, 25 bp, Homo sapien
gcgccacattccggaggccggaggg

SEQ ID NO: 5260265 - DNA, 25 bp, Homo sapien
gccacattccggaggccggagggga

SEQ ID NO: 5260266 - DNA, 25 bp, Homo sapien
tgggcgccacattccggaggccgga

SEQ ID NO: 5260267 - DNA, 25 bp, Homo sapien
aaagacccggtgcttttgaggatgg

SEQ ID NO: 5260268 - DNA, 25 bp, Homo sapien
gactccgatgacgtcagagctcctg

SEQ ID NO: 5260269 - DNA, 25 bp, Homo sapien
tgtgaaggaaccaggttcacgtgac

SEQ ID NO: 5260270 - DNA, 25 bp, Homo sapien
tcctgccttgaaagacccggtgctt

SEQ ID NO: 5260271 - DNA, 25 bp, Homo sapien
ctagttttgttgcgtccatttttca

SEQ ID NO: 5260272 - DNA, 25 bp, Homo sapien
ggcactgctggcgatgtggcctccc

SEQ ID NO: 5260273 - DNA, 25 bp, Homo sapien
gccacggtcagctgtagggcactgc

SEQ ID NO: 5260274 - DNA, 25 bp, Homo sapien
cactgctggcgatgtggcctcccag

SEQ ID NO: 5260275 - DNA, 25 bp, Homo sapien
tcagctgtagggcactgctggcgat

SEQ ID NO: 5260276 - DNA, 25 bp, Homo sapien
caggtgcagaaagcggccctctgca

SEQ ID NO: 5260277 - DNA, 25 bp, Homo sapien
ccaggtgcagaaagcggccctctgc

SEQ ID NO: 5260278 - DNA, 25 bp, Homo sapien
agaagctgcgtgcagaatgagggtc

SEQ ID NO: 5260279 - DNA, 25 bp, Homo sapien
ctgcgtgcagaatgagggtccaggt

SEQ ID NO: 5260280 - DNA, 25 bp, Homo sapien
gaggccttagcgaggccaccgggtg

SEQ ID NO: 5260281 - DNA, 25 bp, Homo sapien
agaggccttagcgaggccaccgggt

SEQ ID NO: 5260282 - DNA, 25 bp, Homo sapien
gggaccggcgttcagggagcagaga

SEQ ID NO: 5260283 - DNA, 25 bp, Homo sapien
tccgggaccggcgttcagggagcag

SEQ ID NO: 5260284 - DNA, 25 bp, Homo sapien
tttgggcttcacttgtaaaacacag

SEQ ID NO: 5260285 - DNA, 25 bp, Homo sapien
gtctttgggcttcacttgtaaaaca

SEQ ID NO: 5260286 - DNA, 25 bp, Homo sapien
gggcttcacttgtaaaacacagagc

SEQ ID NO: 5260287 - DNA, 25 bp, Homo sapien
tgggcttcacttgtaaaacacagag

SEQ ID NO: 5260288 - DNA, 25 bp, Homo sapien
ccaggacaaggccacattgtggtct

SEQ ID NO: 5260289 - DNA, 25 bp, Homo sapien
gccacggaagagctcaggaggtccc

SEQ ID NO: 5260290 - DNA, 25 bp, Homo sapien
ggtagacacggccacggaagagctc

SEQ ID NO: 5260291 - DNA, 25 bp, Homo sapien
ctctcccaggacaaggccacattgt

SEQ ID NO: 5260292 - DNA, 25 bp, Homo sapien
cagagttcccatgcggggcagatgt

SEQ ID NO: 5260293 - DNA, 25 bp, Homo sapien
caccgttcctatgcacggcagagtt

SEQ ID NO: 5260294 - DNA, 25 bp, Homo sapien
gggcagatgtccaggagtcagcctg

SEQ ID NO: 5260295 - DNA, 25 bp, Homo sapien
agatgtccaggagtcagcctgggcc

SEQ ID NO: 5260296 - DNA, 25 bp, Homo sapien
gggggctccacgtgcaaaccactgg

SEQ ID NO: 5260297 - DNA, 25 bp, Homo sapien
cccacagggccagtgtgctctcggg

SEQ ID NO: 5260298 - DNA, 25 bp, Homo sapien
gtgcaaaccactggccggcctgctg

SEQ ID NO: 5260299 - DNA, 25 bp, Homo sapien
tcccactttccagacagttggcctg

SEQ ID NO: 5260300 - DNA, 25 bp, Homo sapien
ggacagccggctcctgagtttggga

SEQ ID NO: 5260301 - DNA, 25 bp, Homo sapien
tggacagccggctcctgagtttggg

SEQ ID NO: 5260302 - DNA, 25 bp, Homo sapien
gacagccggctcctgagtttgggac

SEQ ID NO: 5260303 - DNA, 25 bp, Homo sapien
ccatggagggcggaatggagcagca

SEQ ID NO: 5260304 - DNA, 25 bp, Homo sapien
ttacaaggagcgagggtaggcgtct

SEQ ID NO: 5260305 - DNA, 25 bp, Homo sapien
agcaggtccattaggccccacaaca

SEQ ID NO: 5260306 - DNA, 25 bp, Homo sapien
cagattgatgccatggagggcggaa

SEQ ID NO: 5260307 - DNA, 25 bp, Homo sapien
ggtgattgatgcctcggttgctccc

SEQ ID NO: 5260308 - DNA, 25 bp, Homo sapien
cacagacacgttgggggctctggaa

SEQ ID NO: 5260309 - DNA, 25 bp, Homo sapien
tcccaacacagacacgttgggggct

SEQ ID NO: 5260310 - DNA, 25 bp, Homo sapien
ctggaagtcgaagccagtgccatga

SEQ ID NO: 5260311 - DNA, 25 bp, Homo sapien
ctcgtttcagaagcacacgtggtgg

SEQ ID NO: 5260312 - DNA, 25 bp, Homo sapien
agggccaagccctctgaaatgccag

SEQ ID NO: 5260313 - DNA, 25 bp, Homo sapien
tgagcagcctctcgtgtggtggcat

SEQ ID NO: 5260314 - DNA, 25 bp, Homo sapien
caagcagggtttaggcgtctgagcc

SEQ ID NO: 5260315 - DNA, 25 bp, Homo sapien
ccgggtatttgatcacatgcagcct

SEQ ID NO: 5260316 - DNA, 25 bp, Homo sapien
ttccgggtatttgatcacatgcagc

SEQ ID NO: 5260317 - DNA, 25 bp, Homo sapien
tgttttccgggtatttgatcacatg

SEQ ID NO: 5260318 - DNA, 25 bp, Homo sapien
cgccattgttttccgggtatttgat

SEQ ID NO: 5260319 - DNA, 25 bp, Homo sapien
cactctcaatttcaccgctgggcat

SEQ ID NO: 5260320 - DNA, 25 bp, Homo sapien
tcagccagcgggattgcactctcaa

SEQ ID NO: 5260321 - DNA, 25 bp, Homo sapien
ttgcactctcaatttcaccgctggg

SEQ ID NO: 5260322 - DNA, 25 bp, Homo sapien
gagcccctcagccagcgggattgca

SEQ ID NO: 5260323 - DNA, 25 bp, Homo sapien
ttgacttgtgagctggacaacaggc

SEQ ID NO: 5260324 - DNA, 25 bp, Homo sapien
gactttggcacacctaggatgacct

SEQ ID NO: 5260325 - DNA, 25 bp, Homo sapien
gcacacctaggatgaccttgctggg

SEQ ID NO: 5260326 - DNA, 25 bp, Homo sapien
aagaagctctcacccttcacaggag

SEQ ID NO: 5260327 - DNA, 25 bp, Homo sapien
gcatgctgtgaagtcccatgggcct

SEQ ID NO: 5260328 - DNA, 25 bp, Homo sapien
ggcatgctgtgaagtcccatgggcc

SEQ ID NO: 5260329 - DNA, 25 bp, Homo sapien
atgctgtgaagtcccatgggcctgt

SEQ ID NO: 5260330 - DNA, 25 bp, Homo sapien
catgctgtgaagtcccatgggcctg

SEQ ID NO: 5260331 - DNA, 25 bp, Homo sapien
ggctgtccctgggacggtcacctac

SEQ ID NO: 5260332 - DNA, 25 bp, Homo sapien
tccctgggacggtcacctacagagg

SEQ ID NO: 5260333 - DNA, 25 bp, Homo sapien
ctgggacggtcacctacagaggcca

SEQ ID NO: 5260334 - DNA, 25 bp, Homo sapien
tctgctccatatggggtgcggctgt

SEQ ID NO: 5260335 - DNA, 25 bp, Homo sapien
cagattcccgttttctctggagact

SEQ ID NO: 5260336 - DNA, 25 bp, Homo sapien
tgcacacagcgtttctcctgagtcc

SEQ ID NO: 5260337 - DNA, 25 bp, Homo sapien
gggcaccagcgtcttccattgcaca

SEQ ID NO: 5260338 - DNA, 25 bp, Homo sapien
ctttcgattgaactggctgtcccca

SEQ ID NO: 5260339 - DNA, 25 bp, Homo sapien
ccccgagagtgaaaccgtgaaactg

SEQ ID NO: 5260340 - DNA, 25 bp, Homo sapien
gagctccctcgcagacacagaggcc

SEQ ID NO: 5260341 - DNA, 25 bp, Homo sapien
gggtaggagatgctcagcgcagctc

SEQ ID NO: 5260342 - DNA, 25 bp, Homo sapien
acacagcagccagtgggtaggagat

SEQ ID NO: 5260343 - DNA, 25 bp, Homo sapien
ttcaaagatttcctggtgcgataag

SEQ ID NO: 5260344 - DNA, 25 bp, Homo sapien
ttgttcctggctgggcacgtgaagg

SEQ ID NO: 5260345 - DNA, 25 bp, Homo sapien
tcctggctgggcacgtgaaggtctc

SEQ ID NO: 5260346 - DNA, 25 bp, Homo sapien
tcctggtgcgataaggagaagatga

SEQ ID NO: 5260347 - DNA, 25 bp, Homo sapien
ttgcggtgaccagtaatcaaatgca

SEQ ID NO: 5260348 - DNA, 25 bp, Homo sapien
ccaccgttgactgggtctcttggag

SEQ ID NO: 5260349 - DNA, 25 bp, Homo sapien
tgacatggacagtgttgcggtgacc

SEQ ID NO: 5260350 - DNA, 25 bp, Homo sapien
aatgcatcttctggccggcctggcg

SEQ ID NO: 5260351 - DNA, 25 bp, Homo sapien
gggtagggatcctcttgtctgatga

SEQ ID NO: 5260352 - DNA, 25 bp, Homo sapien
gaggctacatctttgatcaatatct

SEQ ID NO: 5260353 - DNA, 25 bp, Homo sapien
aggctacatctttgatcaatatctg

SEQ ID NO: 5260354 - DNA, 25 bp, Homo sapien
cagtagggtagggatcctcttgtct

SEQ ID NO: 5260355 - DNA, 25 bp, Homo sapien
cattcacgcttagggcgaggaaaca

SEQ ID NO: 5260356 - DNA, 25 bp, Homo sapien
tcctgtcagccattcacgcttaggg

SEQ ID NO: 5260357 - DNA, 25 bp, Homo sapien
tgactttaacctgaaagcgtggatg

SEQ ID NO: 5260358 - DNA, 25 bp, Homo sapien
tgtccttgactttaacctgaaagcg

SEQ ID NO: 5260359 - DNA, 25 bp, Homo sapien
agtctgccagactcccgggtcaggg

SEQ ID NO: 5260360 - DNA, 25 bp, Homo sapien
cttggagcttcaggcatcattgttc

SEQ ID NO: 5260361 - DNA, 25 bp, Homo sapien
ggagccttcggatgcccacagcaaa

SEQ ID NO: 5260362 - DNA, 25 bp, Homo sapien
gcaaacaagcctacacttggagctt

SEQ ID NO: 5260363 - DNA, 25 bp, Homo sapien
gacttccccgttggagactctgtga

SEQ ID NO: 5260364 - DNA, 25 bp, Homo sapien
agggcagctggatgacagcattcag

SEQ ID NO: 5260365 - DNA, 25 bp, Homo sapien
tgggagcttccgaagaggggtcctc

SEQ ID NO: 5260366 - DNA, 25 bp, Homo sapien
gtgtaggaatcaaagggtaatggga

SEQ ID NO: 5260367 - DNA, 25 bp, Homo sapien
ttgtgtaggaatcaaagggtaatgg

SEQ ID NO: 5260368 - DNA, 25 bp, Homo sapien
tttgtgtaggaatcaaagggtaatg

SEQ ID NO: 5260369 - DNA, 25 bp, Homo sapien
tgtgtaggaatcaaagggtaatggg

SEQ ID NO: 5260370 - DNA, 25 bp, Homo sapien
acctctgctactgtggccaattcat

SEQ ID NO: 5260371 - DNA, 25 bp, Homo sapien
tactgtggccaattcatgtcgctga

SEQ ID NO: 5260372 - DNA, 25 bp, Homo sapien
aattcatgtcgctgagcattccagc

SEQ ID NO: 5260373 - DNA, 25 bp, Homo sapien
ggccaattcatgtcgctgagcattc

SEQ ID NO: 5260374 - DNA, 25 bp, Homo sapien
acccagtgcatgcttcccgtttgct

SEQ ID NO: 5260375 - DNA, 25 bp, Homo sapien
tgaatgagaaccaaaaacgctccct

SEQ ID NO: 5260376 - DNA, 25 bp, Homo sapien
tctcccgagtgcaggcggaagttcc

SEQ ID NO: 5260377 - DNA, 25 bp, Homo sapien
caaaaacgctccctaggacttctgg

SEQ ID NO: 5260378 - DNA, 25 bp, Homo sapien
cagtctagtcagtaggagcttgggc

SEQ ID NO: 5260379 - DNA, 25 bp, Homo sapien
cagggggcttgagtccaaatccagg

SEQ ID NO: 5260380 - DNA, 25 bp, Homo sapien
caggaccttaggagcaattcctgct

SEQ ID NO: 5260381 - DNA, 25 bp, Homo sapien
ccagatcaccgggtttggagcggaa

SEQ ID NO: 5260382 - DNA, 25 bp, Homo sapien
catgtgcttgtccagtggcggtcag

SEQ ID NO: 5260383 - DNA, 25 bp, Homo sapien
cccatgggcacgtggtgggtgtccg

SEQ ID NO: 5260384 - DNA, 25 bp, Homo sapien
tggcggtcaggtgtcctgggcttct

SEQ ID NO: 5260385 - DNA, 25 bp, Homo sapien
gggacctggaagcatcccatgggca

SEQ ID NO: 5260386 - DNA, 25 bp, Homo sapien
cactgtggtgctttctggctgcaac

SEQ ID NO: 5260387 - DNA, 25 bp, Homo sapien
ttctggctgcaaccgcagcaacctt

SEQ ID NO: 5260388 - DNA, 25 bp, Homo sapien
aagatcccatatgtcactgtggtgc

SEQ ID NO: 5260389 - DNA, 25 bp, Homo sapien
catatgtcactgtggtgctttctgg

SEQ ID NO: 5260390 - DNA, 25 bp, Homo sapien
gaattctgcctcatagctcacacgc

SEQ ID NO: 5260391 - DNA, 25 bp, Homo sapien
tcgtgggtaatagcttcggagtccc

SEQ ID NO: 5260392 - DNA, 25 bp, Homo sapien
tgggcattcaacagaacctacgagc

SEQ ID NO: 5260393 - DNA, 25 bp, Homo sapien
ggatgacctgaaacgctgcccttct

SEQ ID NO: 5260394 - DNA, 25 bp, Homo sapien
ctcctctgtttcgggtggttgggct

SEQ ID NO: 5260395 - DNA, 25 bp, Homo sapien
gtgctccccacctcgtctgcctggg

SEQ ID NO: 5260396 - DNA, 25 bp, Homo sapien
ttcctggggcccctagagccgcatg

SEQ ID NO: 5260397 - DNA, 25 bp, Homo sapien
cctagagccgcatgctttaattcca

SEQ ID NO: 5260398 - DNA, 25 bp, Homo sapien
ccaggccagacacggacaatgtgga

SEQ ID NO: 5260399 - DNA, 25 bp, Homo sapien
tgtggatgatgtggacgacgtggat

SEQ ID NO: 5260400 - DNA, 25 bp, Homo sapien
tgtggacgacgtggatgagggcacc

SEQ ID NO: 5260401 - DNA, 25 bp, Homo sapien
tagtccatacgagcccacgagggtc

SEQ ID NO: 5260402 - DNA, 25 bp, Homo sapien
ttcggtggctggcttagtatcccta

SEQ ID NO: 5260403 - DNA, 25 bp, Homo sapien
ctttggcaaaatgtatgaatcatca

SEQ ID NO: 5260404 - DNA, 25 bp, Homo sapien
ggatgttatcgtgatcatttggaga

SEQ ID NO: 5260405 - DNA, 25 bp, Homo sapien
cctaatggctgggatgttatcgtga

SEQ ID NO: 5260406 - DNA, 25 bp, Homo sapien
tctggctagtgagcatctgagctga

SEQ ID NO: 5260407 - DNA, 25 bp, Homo sapien
caatggaagagctgttcaatggatc

SEQ ID NO: 5260408 - DNA, 25 bp, Homo sapien
tgtagtcagctgaagagtttgtccc

SEQ ID NO: 5260409 - DNA, 25 bp, Homo sapien
tgaagaatctgacctgcaatggaag

SEQ ID NO: 5260410 - DNA, 25 bp, Homo sapien
gttttacagcacgattaatggccca

SEQ ID NO: 5260411 - DNA, 25 bp, Homo sapien
aaattgccttttatcccacggtgag

SEQ ID NO: 5260412 - DNA, 25 bp, Homo sapien
cacagctcttaacggtggtgcggac

SEQ ID NO: 5260413 - DNA, 25 bp, Homo sapien
ttaccagaaagggtcagtcaccagg

SEQ ID NO: 5260414 - DNA, 25 bp, Homo sapien
tcgttcttgcccgtcgtctttgcca

SEQ ID NO: 5260415 - DNA, 25 bp, Homo sapien
tctgacgctgtcttcgcggggacca

SEQ ID NO: 5260416 - DNA, 25 bp, Homo sapien
tgctgataacagactcggggcttgc

SEQ ID NO: 5260417 - DNA, 25 bp, Homo sapien
gcgcgccacgcccaatcgttcttgc

SEQ ID NO: 5260418 - DNA, 25 bp, Homo sapien
cgcacccggccagagaagttaactt

SEQ ID NO: 5260419 - DNA, 25 bp, Homo sapien
gcttcttgagagtgtgcaacgtgtg

SEQ ID NO: 5260420 - DNA, 25 bp, Homo sapien
gcagtaggctcatagtggcttttcc

SEQ ID NO: 5260421 - DNA, 25 bp, Homo sapien
gctgctcgctattatgatactcagt

SEQ ID NO: 5260422 - DNA, 25 bp, Homo sapien
tgccatctcccgcacagcagtggct

SEQ ID NO: 5260423 - DNA, 25 bp, Homo sapien
ctgctgcatgcagcgagccctgtgt

SEQ ID NO: 5260424 - DNA, 25 bp, Homo sapien
gcgagccctgtgttccctttgtcct

SEQ ID NO: 5260425 - DNA, 25 bp, Homo sapien
tatacgacaaggccgtccttgtccc

SEQ ID NO: 5260426 - DNA, 25 bp, Homo sapien
tgcacctcggtgtcgcacgcagagg

SEQ ID NO: 5260427 - DNA, 25 bp, Homo sapien
tgtcgcacgcagaggtctctggcct

SEQ ID NO: 5260428 - DNA, 25 bp, Homo sapien
actgcacctcggtgtcgcacgcaga

SEQ ID NO: 5260429 - DNA, 25 bp, Homo sapien
ctcggtgtcgcacgcagaggtctct

SEQ ID NO: 5260430 - DNA, 25 bp, Homo sapien
gtggcctgggcgtcccactgcgcat

SEQ ID NO: 5260431 - DNA, 25 bp, Homo sapien
tccgtgtgaatgtaagagtgaggtc

SEQ ID NO: 5260432 - DNA, 25 bp, Homo sapien
tccaggaggagatcctcggagacct

SEQ ID NO: 5260433 - DNA, 25 bp, Homo sapien
tgagcatcaccctgtaggagctggt

SEQ ID NO: 5260434 - DNA, 25 bp, Homo sapien
acacatgccccactctgccccatgt

SEQ ID NO: 5260435 - DNA, 25 bp, Homo sapien
tgccacacatgccccactctgcccc

SEQ ID NO: 5260436 - DNA, 25 bp, Homo sapien
catgtgcccccgctctgtccacgtg

SEQ ID NO: 5260437 - DNA, 25 bp, Homo sapien
atgtgcccccgctctgtccacgtgc

SEQ ID NO: 5260438 - DNA, 25 bp, Homo sapien
gtgatccttccatttgcgtcttgtg

SEQ ID NO: 5260439 - DNA, 25 bp, Homo sapien
ctggctttcaaagccgctctcgtcc

SEQ ID NO: 5260440 - DNA, 25 bp, Homo sapien
catttgcgtcttgtgctctggcttt

SEQ ID NO: 5260441 - DNA, 25 bp, Homo sapien
ccgctctcgtccatgatcgtctggg

SEQ ID NO: 5260442 - DNA, 25 bp, Homo sapien
gaagagtgcctagctgctgtgagct

SEQ ID NO: 5260443 - DNA, 25 bp, Homo sapien
atcaaagcacggcaggatttgagaa

SEQ ID NO: 5260444 - DNA, 25 bp, Homo sapien
ccagggcatttatcaaagcacggca

SEQ ID NO: 5260445 - DNA, 25 bp, Homo sapien
gatttgagaagagtgcctagctgct

SEQ ID NO: 5260446 - DNA, 25 bp, Homo sapien
agggcagccgcagccatttctaggt

SEQ ID NO: 5260447 - DNA, 25 bp, Homo sapien
cagcattggtgggaattggtgggaa

SEQ ID NO: 5260448 - DNA, 25 bp, Homo sapien
tgagctttagtggatttctactttc

SEQ ID NO: 5260449 - DNA, 25 bp, Homo sapien
ctcccagctccaatctgatagatgg

SEQ ID NO: 5260450 - DNA, 25 bp, Homo sapien
caggagcagggcttttcatggcagc

SEQ ID NO: 5260451 - DNA, 25 bp, Homo sapien
tgaagcacagtagattagacacagc

SEQ ID NO: 5260452 - DNA, 25 bp, Homo sapien
tctcctgaagcacagtagattagac

SEQ ID NO: 5260453 - DNA, 25 bp, Homo sapien
gtagattagacacagctcaaaggca

SEQ ID NO: 5260454 - DNA, 25 bp, Homo sapien
ctctgcgtgtgccggcggcagatct

SEQ ID NO: 5260455 - DNA, 25 bp, Homo sapien
ttcagagaggcactcggaaagcagg

SEQ ID NO: 5260456 - DNA, 25 bp, Homo sapien
agcagctgaaggcacccgtcacccg

SEQ ID NO: 5260457 - DNA, 25 bp, Homo sapien
tgcctgggaagggtgctctgcgtgt

SEQ ID NO: 5260458 - DNA, 25 bp, Homo sapien
tccaggccgggcgggcagcctcttg

SEQ ID NO: 5260459 - DNA, 25 bp, Homo sapien
gggtccaggccgggcgggcagcctc

SEQ ID NO: 5260460 - DNA, 25 bp, Homo sapien
tgagacacgggggcagggtggcggg

SEQ ID NO: 5260461 - DNA, 25 bp, Homo sapien
ctgagacacgggggcagggtggcgg

SEQ ID NO: 5260462 - DNA, 25 bp, Homo sapien
ggccttcccctgtcaccatcaactg

SEQ ID NO: 5260463 - DNA, 25 bp, Homo sapien
gggagcaaacctgactgggccttcc

SEQ ID NO: 5260464 - DNA, 25 bp, Homo sapien
catctctccccggtggccagacaag

SEQ ID NO: 5260465 - DNA, 25 bp, Homo sapien
tggaacacgtttccacacaggagct

SEQ ID NO: 5260466 - DNA, 25 bp, Homo sapien
cactgtcccgatccttgggccagga

SEQ ID NO: 5260467 - DNA, 25 bp, Homo sapien
agagggcactgtcccgatccttggg

SEQ ID NO: 5260468 - DNA, 25 bp, Homo sapien
gggcactgtcccgatccttgggcca

SEQ ID NO: 5260469 - DNA, 25 bp, Homo sapien
actgtcccgatccttgggccaggag

SEQ ID NO: 5260470 - DNA, 25 bp, Homo sapien
agaaagcggtgggtccatctgctcc

SEQ ID NO: 5260471 - DNA, 25 bp, Homo sapien
tcccattaggctgcaggttcatgag

SEQ ID NO: 5260472 - DNA, 25 bp, Homo sapien
cctgctgtttgaatatgacctggta

SEQ ID NO: 5260473 - DNA, 25 bp, Homo sapien
gagcagtgtgggatgtttcttgacc

SEQ ID NO: 5260474 - DNA, 25 bp, Homo sapien
cgtccagcagatagggtagtggcca

SEQ ID NO: 5260475 - DNA, 25 bp, Homo sapien
aaaggaacttctttgattcatccag

SEQ ID NO: 5260476 - DNA, 25 bp, Homo sapien
aacttctttgattcatccagagcca

SEQ ID NO: 5260477 - DNA, 25 bp, Homo sapien
agtggccattccctaggagaagctg

SEQ ID NO: 5260478 - DNA, 25 bp, Homo sapien
gggctgaaccccacgactgcagggc

SEQ ID NO: 5260479 - DNA, 25 bp, Homo sapien
agtgaggctgttcggactctgccat

SEQ ID NO: 5260480 - DNA, 25 bp, Homo sapien
tccgcagtgaggctgttcggactct

SEQ ID NO: 5260481 - DNA, 25 bp, Homo sapien
gccctccgcagtgaggctgttcgga

SEQ ID NO: 5260482 - DNA, 25 bp, Homo sapien
tcatggtgagtactggactgtttca

SEQ ID NO: 5260483 - DNA, 25 bp, Homo sapien
ggactgtttcatgtccagattcttg

SEQ ID NO: 5260484 - DNA, 25 bp, Homo sapien
catggtgagtactggactgtttcat

SEQ ID NO: 5260485 - DNA, 25 bp, Homo sapien
tgtccagattcttgtggcttgtggt

SEQ ID NO: 5260486 - DNA, 25 bp, Homo sapien
ttaaacaggtgtctccacctggctg

SEQ ID NO: 5260487 - DNA, 25 bp, Homo sapien
cagatcttggcattccccaggactt

SEQ ID NO: 5260488 - DNA, 25 bp, Homo sapien
ggacttttcatctctcgaatcttca

SEQ ID NO: 5260489 - DNA, 25 bp, Homo sapien
gacttttcatctctcgaatcttcat

SEQ ID NO: 5260490 - DNA, 25 bp, Homo sapien
tcccacgggagcaggaaaacacctc

SEQ ID NO: 5260491 - DNA, 25 bp, Homo sapien
ccccagtttaacaccaaggtcaatg

SEQ ID NO: 5260492 - DNA, 25 bp, Homo sapien
ccaaggtcaatgctctgatgttcct

SEQ ID NO: 5260493 - DNA, 25 bp, Homo sapien
ctctcctccccagtttaacaccaag

SEQ ID NO: 5260494 - DNA, 25 bp, Homo sapien
gtttaacaccaaggtcaatgctctg

SEQ ID NO: 5260495 - DNA, 25 bp, Homo sapien
gaagaacttcgatgaggctggtgcc

SEQ ID NO: 5260496 - DNA, 25 bp, Homo sapien
actctctcctccgtggctgtactaa

SEQ ID NO: 5260497 - DNA, 25 bp, Homo sapien
gctgtactaactcgccgtggacctg

SEQ ID NO: 5260498 - DNA, 25 bp, Homo sapien
tactcccgctttcctcggaactgga

SEQ ID NO: 5260499 - DNA, 25 bp, Homo sapien
cgcatgaccacagatcttagctgcc

SEQ ID NO: 5260500 - DNA, 25 bp, Homo sapien
tgggagcatggcctgctcattgctg

SEQ ID NO: 5260501 - DNA, 25 bp, Homo sapien
cacgcatgaccacagatcttagctg

SEQ ID NO: 5260502 - DNA, 25 bp, Homo sapien
acacgcatgaccacagatcttagct

SEQ ID NO: 5260503 - DNA, 25 bp, Homo sapien
gagtgcccacatagtggacagcggc

SEQ ID NO: 5260504 - DNA, 25 bp, Homo sapien
cggccatcggagtctgactcgggct

SEQ ID NO: 5260505 - DNA, 25 bp, Homo sapien
tggacagcggccatcggagtctgac

SEQ ID NO: 5260506 - DNA, 25 bp, Homo sapien
acatagtggacagcggccatcggag

SEQ ID NO: 5260507 - DNA, 25 bp, Homo sapien
tagaagaccattatccagatgcaac

SEQ ID NO: 5260508 - DNA, 25 bp, Homo sapien
tcacagattcgactagctcagagga

SEQ ID NO: 5260509 - DNA, 25 bp, Homo sapien
aattttggtccatgagaggcagttc

SEQ ID NO: 5260510 - DNA, 25 bp, Homo sapien
gagacgctctgaaatactctgcaga

SEQ ID NO: 5260511 - DNA, 25 bp, Homo sapien
ccctcgccctgtgagcaggctctgg

SEQ ID NO: 5260512 - DNA, 25 bp, Homo sapien
tgtcccaatatccagtccaccagca

SEQ ID NO: 5260513 - DNA, 25 bp, Homo sapien
aagacgagggggtgctggcctccat

SEQ ID NO: 5260514 - DNA, 25 bp, Homo sapien
tgagtaagacgagggggtgctggcc

SEQ ID NO: 5260515 - DNA, 25 bp, Homo sapien
ctactgagtaagacgagggggtgct

SEQ ID NO: 5260516 - DNA, 25 bp, Homo sapien
agtaagacgagggggtgctggcctc

SEQ ID NO: 5260517 - DNA, 25 bp, Homo sapien
tgatgtccctggtggtaatctcccc

SEQ ID NO: 5260518 - DNA, 25 bp, Homo sapien
gatgttccttagagggaatgtcccc

SEQ ID NO: 5260519 - DNA, 25 bp, Homo sapien
tgatgtccatggaagtgatgtccca

SEQ ID NO: 5260520 - DNA, 25 bp, Homo sapien
cactggagttgatgtccctggcggc

SEQ ID NO: 5260521 - DNA, 25 bp, Homo sapien
gacccaattgaccatctctaggagg

SEQ ID NO: 5260522 - DNA, 25 bp, Homo sapien
tgttgggaggcaaaaagtcaccggc

SEQ ID NO: 5260523 - DNA, 25 bp, Homo sapien
taagacacgatgcaaggaggcacct

SEQ ID NO: 5260524 - DNA, 25 bp, Homo sapien
agtcaccggcaccatcagcaatgca

SEQ ID NO: 5260525 - DNA, 25 bp, Homo sapien
agcttaattccaattagatgtagaa

SEQ ID NO: 5260526 - DNA, 25 bp, Homo sapien
tagtggttgccataagtcttaccat

SEQ ID NO: 5260527 - DNA, 25 bp, Homo sapien
tgccataagtcttaccatatacatc

SEQ ID NO: 5260528 - DNA, 25 bp, Homo sapien
ttaaatttacagtagcttaattcca

SEQ ID NO: 5260529 - DNA, 25 bp, Homo sapien
aggcgcatgctagttctcagtgtca

SEQ ID NO: 5260530 - DNA, 25 bp, Homo sapien
cccgggtgtcagcttatcatctttt

SEQ ID NO: 5260531 - DNA, 25 bp, Homo sapien
tctcctttttaccatgattcactga

SEQ ID NO: 5260532 - DNA, 25 bp, Homo sapien
tcactgaaatcacaaggcgcatgct

SEQ ID NO: 5260533 - DNA, 25 bp, Homo sapien
tgctggtgtctgaaccggtccagcc

SEQ ID NO: 5260534 - DNA, 25 bp, Homo sapien
gttcggaaggcattgatgcttagtg

SEQ ID NO: 5260535 - DNA, 25 bp, Homo sapien
ccggtccagccttgttcggaaggca

SEQ ID NO: 5260536 - DNA, 25 bp, Homo sapien
ctgctggtgtctgaaccggtccagc

SEQ ID NO: 5260537 - DNA, 25 bp, Homo sapien
tccagggcggccatcagtcttcagg

SEQ ID NO: 5260538 - DNA, 25 bp, Homo sapien
ggcggccatcagtcttcagggcctc

SEQ ID NO: 5260539 - DNA, 25 bp, Homo sapien
ctccagggcggccatcagtcttcag

SEQ ID NO: 5260540 - DNA, 25 bp, Homo sapien
cagggcggccatcagtcttcagggc

SEQ ID NO: 5260541 - DNA, 25 bp, Homo sapien
aatacggcatcagctcccagtcctg

SEQ ID NO: 5260542 - DNA, 25 bp, Homo sapien
gtcctgggaattcacttgcgggccg

SEQ ID NO: 5260543 - DNA, 25 bp, Homo sapien
tcctgggaattcacttgcgggccgg

SEQ ID NO: 5260544 - DNA, 25 bp, Homo sapien
caggagcaaagctcgtaaatacggc

SEQ ID NO: 5260545 - DNA, 25 bp, Homo sapien
tggggcttgtgtccaggatccaggt

SEQ ID NO: 5260546 - DNA, 25 bp, Homo sapien
tttcctcggaagctctccctctgat

SEQ ID NO: 5260547 - DNA, 25 bp, Homo sapien
gatggggcttgtgtccaggatccag

SEQ ID NO: 5260548 - DNA, 25 bp, Homo sapien
tgatggggcttgtgtccaggatcca

SEQ ID NO: 5260549 - DNA, 25 bp, Homo sapien
actgcatccggttgagctcagggac

SEQ ID NO: 5260550 - DNA, 25 bp, Homo sapien
tgtggatgacaacaggacgctcttg

SEQ ID NO: 5260551 - DNA, 25 bp, Homo sapien
acgccgaggtgatgcccctttctgg

SEQ ID NO: 5260552 - DNA, 25 bp, Homo sapien
ctttctggcatctgcacacatgtgc

SEQ ID NO: 5260553 - DNA, 25 bp, Homo sapien
caatagcaggtgtggctggggctga

SEQ ID NO: 5260554 - DNA, 25 bp, Homo sapien
aatagcaggtgtggctggggctgat

SEQ ID NO: 5260555 - DNA, 25 bp, Homo sapien
tcaatagcaggtgtggctggggctg

SEQ ID NO: 5260556 - DNA, 25 bp, Homo sapien
atagcaggtgtggctggggctgatt

SEQ ID NO: 5260557 - DNA, 25 bp, Homo sapien
ctggtgctcaccactgattggccgg

SEQ ID NO: 5260558 - DNA, 25 bp, Homo sapien
tcctggtgctcaccactgattggcc

SEQ ID NO: 5260559 - DNA, 25 bp, Homo sapien
ggccgggtgccacctgtgagtctgt

SEQ ID NO: 5260560 - DNA, 25 bp, Homo sapien
ggtgctcaccactgattggccgggt

SEQ ID NO: 5260561 - DNA, 25 bp, Homo sapien
atgaaacgcgggcagctggatcctg

SEQ ID NO: 5260562 - DNA, 25 bp, Homo sapien
gctcagggccaccagcttacgtctg

SEQ ID NO: 5260563 - DNA, 25 bp, Homo sapien
gactgtccgcgggtccgaggatcct

SEQ ID NO: 5260564 - DNA, 25 bp, Homo sapien
gctggatcctgactgtccgcgggtc

SEQ ID NO: 5260565 - DNA, 25 bp, Homo sapien
ctctccgtaagaagtggaggctcca

SEQ ID NO: 5260566 - DNA, 25 bp, Homo sapien
gtgagttgaaactctccgtaagaag

SEQ ID NO: 5260567 - DNA, 25 bp, Homo sapien
actggtacacaagcggagccccagg

SEQ ID NO: 5260568 - DNA, 25 bp, Homo sapien
gacagggagtcttgcaatgcctctg

SEQ ID NO: 5260569 - DNA, 25 bp, Homo sapien
ctgtgggcctcaggagctctgtccc

SEQ ID NO: 5260570 - DNA, 25 bp, Homo sapien
cttccttaggccgagcatttggctg

SEQ ID NO: 5260571 - DNA, 25 bp, Homo sapien
ttaggcacctgcattggtatagggc

SEQ ID NO: 5260572 - DNA, 25 bp, Homo sapien
tatagggctgtcctggtatgacttc

SEQ ID NO: 5260573 - DNA, 25 bp, Homo sapien
cttgtatttggaacgctggaggctc

SEQ ID NO: 5260574 - DNA, 25 bp, Homo sapien
cgggtcccaccgacgtgtatttgtg

SEQ ID NO: 5260575 - DNA, 25 bp, Homo sapien
tacattgggttttccagcgactcca

SEQ ID NO: 5260576 - DNA, 25 bp, Homo sapien
tgagccacctttgcaatccctagtt

SEQ ID NO: 5260577 - DNA, 25 bp, Homo sapien
tgcctcagagaaggcgtggagcagc

SEQ ID NO: 5260578 - DNA, 25 bp, Homo sapien
agccctgccttgccagcttggtcag

SEQ ID NO: 5260579 - DNA, 25 bp, Homo sapien
gcagctgtgccttgcgttttctggc

SEQ ID NO: 5260580 - DNA, 25 bp, Homo sapien
gtcagcagagcctcgcgtctgccgt

SEQ ID NO: 5260581 - DNA, 25 bp, Homo sapien
ttcgcggtgcctgttgcgttttccc

SEQ ID NO: 5260582 - DNA, 25 bp, Homo sapien
cgcggtgcctgttgcgttttcccac

SEQ ID NO: 5260583 - DNA, 25 bp, Homo sapien
tcgcggtgcctgttgcgttttccca

SEQ ID NO: 5260584 - DNA, 25 bp, Homo sapien
gttcgcggtgcctgttgcgttttcc

SEQ ID NO: 5260585 - DNA, 25 bp, Homo sapien
gccgggcaggttgagcccactttca

SEQ ID NO: 5260586 - DNA, 25 bp, Homo sapien
tccaatgggtaaatatgcagcctct

SEQ ID NO: 5260587 - DNA, 25 bp, Homo sapien
cagaaagctggttgtcagggagctt

SEQ ID NO: 5260588 - DNA, 25 bp, Homo sapien
gaaaggctcagcagtatgtgttatc

SEQ ID NO: 5260589 - DNA, 25 bp, Homo sapien
caacacgtgtgtgactcgaagcagc

SEQ ID NO: 5260590 - DNA, 25 bp, Homo sapien
ggatataaatagaagccgggagcct

SEQ ID NO: 5260591 - DNA, 25 bp, Homo sapien
caagcaggcggctactttctgggaa

SEQ ID NO: 5260592 - DNA, 25 bp, Homo sapien
gggaccttcagttacgccgcttcaa

SEQ ID NO: 5260593 - DNA, 25 bp, Homo sapien
caatccatcctgtagtataggtaat

SEQ ID NO: 5260594 - DNA, 25 bp, Homo sapien
tctggatgtttggaaccctttagct

SEQ ID NO: 5260595 - DNA, 25 bp, Homo sapien
tcggcagcccctgtggtttcagcgc

SEQ ID NO: 5260596 - DNA, 25 bp, Homo sapien
tctcactggaaaacagtggtctgct

SEQ ID NO: 5260597 - DNA, 25 bp, Homo sapien
tgaattattcagattaccttagttt

SEQ ID NO: 5260598 - DNA, 25 bp, Homo sapien
attgttaactaaagcccacactttg

SEQ ID NO: 5260599 - DNA, 25 bp, Homo sapien
gagccaccaaattcggcccttattg

SEQ ID NO: 5260600 - DNA, 25 bp, Homo sapien
taccccgtctagaatatcacatgac

SEQ ID NO: 5260601 - DNA, 25 bp, Homo sapien
tgtaagccagattcccagtgtgccc

SEQ ID NO: 5260602 - DNA, 25 bp, Homo sapien
tgaagttgaacgaacccacctccta

SEQ ID NO: 5260603 - DNA, 25 bp, Homo sapien
gccccagtgcagttgattgttgtaa

SEQ ID NO: 5260604 - DNA, 25 bp, Homo sapien
gaccttccgagtgatgtgctcacca

SEQ ID NO: 5260605 - DNA, 25 bp, Homo sapien
tgcgccggccttccttgtctttctg

SEQ ID NO: 5260606 - DNA, 25 bp, Homo sapien
ctttctgagccattactaggagatg

SEQ ID NO: 5260607 - DNA, 25 bp, Homo sapien
cttgtctttctgagccattactagg

SEQ ID NO: 5260608 - DNA, 25 bp, Homo sapien
cactgcgccggccttccttgtcttt

SEQ ID NO: 5260609 - DNA, 25 bp, Homo sapien
gctcaggaaatacctctctggatgg

SEQ ID NO: 5260610 - DNA, 25 bp, Homo sapien
tgggttcttgtcagggcaacagtaa

SEQ ID NO: 5260611 - DNA, 25 bp, Homo sapien
tcctcagtgccggaattcttgtagg

SEQ ID NO: 5260612 - DNA, 25 bp, Homo sapien
caatagtagaaacagcgagatgtct

SEQ ID NO: 5260613 - DNA, 25 bp, Homo sapien
atgctggcaggcacatttccgaaag

SEQ ID NO: 5260614 - DNA, 25 bp, Homo sapien
gctggcaggcacatttccgaaaggc

SEQ ID NO: 5260615 - DNA, 25 bp, Homo sapien
tgctggcaggcacatttccgaaagg

SEQ ID NO: 5260616 - DNA, 25 bp, Homo sapien
aagattttgcatcccctaactgcgg

SEQ ID NO: 5260617 - DNA, 25 bp, Homo sapien
cggagtacatcctcaggatagtagc

SEQ ID NO: 5260618 - DNA, 25 bp, Homo sapien
gagatgaggaccacaaacgtcacac

SEQ ID NO: 5260619 - DNA, 25 bp, Homo sapien
ctgtagtaatgtgagaaccacaggt

SEQ ID NO: 5260620 - DNA, 25 bp, Homo sapien
gtttttcgcagactgtacatgaggg

SEQ ID NO: 5260621 - DNA, 25 bp, Homo sapien
tgtagaagatggagattgccttgcc

SEQ ID NO: 5260622 - DNA, 25 bp, Homo sapien
tcagggctattttcacatcgttttt

SEQ ID NO: 5260623 - DNA, 25 bp, Homo sapien
tgacaaacacagtcccgggaaagag

SEQ ID NO: 5260624 - DNA, 25 bp, Homo sapien
gccctgtccctctccgctactctcc

SEQ ID NO: 5260625 - DNA, 25 bp, Homo sapien
gctactctccttcacatggctgtgt

SEQ ID NO: 5260626 - DNA, 25 bp, Homo sapien
tctccgctactctccttcacatggc

SEQ ID NO: 5260627 - DNA, 25 bp, Homo sapien
gtccctctccgctactctccttcac

SEQ ID NO: 5260628 - DNA, 25 bp, Homo sapien
cagactcccgcatccgcaactcctg

SEQ ID NO: 5260629 - DNA, 25 bp, Homo sapien
atccgcggcacctgcacccaaggct

SEQ ID NO: 5260630 - DNA, 25 bp, Homo sapien
gcactcgagactccagcacccgcag

SEQ ID NO: 5260631 - DNA, 25 bp, Homo sapien
agggcgcctgcacccgtggcccctg

SEQ ID NO: 5260632 - DNA, 25 bp, Homo sapien
ccctgctgggcaagagcactttcca

SEQ ID NO: 5260633 - DNA, 25 bp, Homo sapien
cccaatcttatgtaggagtaaatcc

SEQ ID NO: 5260634 - DNA, 25 bp, Homo sapien
accctgaggcagagttgtttccatt

SEQ ID NO: 5260635 - DNA, 25 bp, Homo sapien
gtcactggggtcaacgacttggcag

SEQ ID NO: 5260636 - DNA, 25 bp, Homo sapien
attcatatgggtctccctgcttatt

SEQ ID NO: 5260637 - DNA, 25 bp, Homo sapien
tcatatgggtctccctgcttattcc

SEQ ID NO: 5260638 - DNA, 25 bp, Homo sapien
tatgggtctccctgcttattcctct

SEQ ID NO: 5260639 - DNA, 25 bp, Homo sapien
tgggtctccctgcttattcctcttc

SEQ ID NO: 5260640 - DNA, 25 bp, Homo sapien
ctgagcagggacatggtggggcaaa

SEQ ID NO: 5260641 - DNA, 25 bp, Homo sapien
tggggcaaagagaaagtaagaggcc

SEQ ID NO: 5260642 - DNA, 25 bp, Homo sapien
gggcaaagagaaagtaagaggccat

SEQ ID NO: 5260643 - DNA, 25 bp, Homo sapien
gacatggtggggcaaagagaaagta

SEQ ID NO: 5260644 - DNA, 25 bp, Homo sapien
caagtcccttcagcatgctctccca

SEQ ID NO: 5260645 - DNA, 25 bp, Homo sapien
gtcccttcagcatgctctcccacaa

SEQ ID NO: 5260646 - DNA, 25 bp, Homo sapien
tcccttcagcatgctctcccacaaa

SEQ ID NO: 5260647 - DNA, 25 bp, Homo sapien
aagtcccttcagcatgctctcccac

SEQ ID NO: 5260648 - DNA, 25 bp, Homo sapien
caaaggtgacgaccttggacgagga

SEQ ID NO: 5260649 - DNA, 25 bp, Homo sapien
gaagagaagttaaccagggcattgg

SEQ ID NO: 5260650 - DNA, 25 bp, Homo sapien
caaggagaaaaagaaccgggcagca

SEQ ID NO: 5260651 - DNA, 25 bp, Homo sapien
gaggtttcccgggatggtcaccatg

SEQ ID NO: 5260652 - DNA, 25 bp, Homo sapien
caagagtggcgttcccatcatgagc

SEQ ID NO: 5260653 - DNA, 25 bp, Homo sapien
tcattgagggccaggcatgcacagg

SEQ ID NO: 5260654 - DNA, 25 bp, Homo sapien
gtcaatgtggttggtccctgcagaa

SEQ ID NO: 5260655 - DNA, 25 bp, Homo sapien
caaaggagacgaggaccacaagagt

SEQ ID NO: 5260656 - DNA, 25 bp, Homo sapien
ctgctccatggactccatagtccct

SEQ ID NO: 5260657 - DNA, 25 bp, Homo sapien
tcccatcaaacagggacacggtcat

SEQ ID NO: 5260658 - DNA, 25 bp, Homo sapien
acagggacacggtcatcacgtggga

SEQ ID NO: 5260659 - DNA, 25 bp, Homo sapien
tgtgacaaacacagtcccatcaaac

SEQ ID NO: 5260660 - DNA, 25 bp, Homo sapien
ccatccttcccatgagtgcttgtct

SEQ ID NO: 5260661 - DNA, 25 bp, Homo sapien
ctgtagatgaaggggccaagcatcg

SEQ ID NO: 5260662 - DNA, 25 bp, Homo sapien
ccttcccatgagtgcttgtctctgg

SEQ ID NO: 5260663 - DNA, 25 bp, Homo sapien
tgaaggggccaagcatcgggatgac

SEQ ID NO: 5260664 - DNA, 25 bp, Homo sapien
ggactacatgtacgagccctggttg

SEQ ID NO: 5260665 - DNA, 25 bp, Homo sapien
taaagaacacgtggaaatcccttga

SEQ ID NO: 5260666 - DNA, 25 bp, Homo sapien
ccttggtacagagccgcagtgtgag

SEQ ID NO: 5260667 - DNA, 25 bp, Homo sapien
gccctggttggctgaaactgaaagt

SEQ ID NO: 5260668 - DNA, 25 bp, Homo sapien
tgaagcccagctagagacccctctg

SEQ ID NO: 5260669 - DNA, 25 bp, Homo sapien
gactcagtgtttgactgtctgtgac

SEQ ID NO: 5260670 - DNA, 25 bp, Homo sapien
tggcagcccgggcaaaggacctttg

SEQ ID NO: 5260671 - DNA, 25 bp, Homo sapien
tctgtgacacatcacggtgagggtg

SEQ ID NO: 5260672 - DNA, 25 bp, Homo sapien
gggatggcggcagatgtctgtacag

SEQ ID NO: 5260673 - DNA, 25 bp, Homo sapien
tggcggcagatgtctgtacagctca

SEQ ID NO: 5260674 - DNA, 25 bp, Homo sapien
gggtcaggggatggcggcagatgtc

SEQ ID NO: 5260675 - DNA, 25 bp, Homo sapien
gatggcggcagatgtctgtacagct

SEQ ID NO: 5260676 - DNA, 25 bp, Homo sapien
cctggcggcatttgtcaaggcttgc

SEQ ID NO: 5260677 - DNA, 25 bp, Homo sapien
tgagagcaatttcaccctggcggca

SEQ ID NO: 5260678 - DNA, 25 bp, Homo sapien
gcagccacccagctattagcaggga

SEQ ID NO: 5260679 - DNA, 25 bp, Homo sapien
caaggcttgcggaagcttcggagac

SEQ ID NO: 5260680 - DNA, 25 bp, Homo sapien
gggagcaccaccatcgcatcctccc

SEQ ID NO: 5260681 - DNA, 25 bp, Homo sapien
ctcccacggcacttcaggggccacg

SEQ ID NO: 5260682 - DNA, 25 bp, Homo sapien
ggctccgggagcaccaccatcgcat

SEQ ID NO: 5260683 - DNA, 25 bp, Homo sapien
tccgggagcaccaccatcgcatcct

SEQ ID NO: 5260684 - DNA, 25 bp, Homo sapien
ctggagctccctgtttccaggtcac

SEQ ID NO: 5260685 - DNA, 25 bp, Homo sapien
tcaaacaagtggctcctccaaacag

SEQ ID NO: 5260686 - DNA, 25 bp, Homo sapien
agtaaaccccggcatgggcatcgtt

SEQ ID NO: 5260687 - DNA, 25 bp, Homo sapien
atcgttccagaggtgccgccacagg

SEQ ID NO: 5260688 - DNA, 25 bp, Homo sapien
acaagtggctcctccaaacagtaaa

SEQ ID NO: 5260689 - DNA, 25 bp, Homo sapien
gcaggcatgtgcggagcccaggagg

SEQ ID NO: 5260690 - DNA, 25 bp, Homo sapien
cagggcaggcatgtgcggagcccag

SEQ ID NO: 5260691 - DNA, 25 bp, Homo sapien
ggcatgtgcggagcccaggaggcac

SEQ ID NO: 5260692 - DNA, 25 bp, Homo sapien
gggcaggcatgtgcggagcccagga

SEQ ID NO: 5260693 - DNA, 25 bp, Homo sapien
tgtgccattgccacgagggctgagg

SEQ ID NO: 5260694 - DNA, 25 bp, Homo sapien
gctgtcttctgctgcggccaacaaa

SEQ ID NO: 5260695 - DNA, 25 bp, Homo sapien
tcagcaggcaatagggttccacggg

SEQ ID NO: 5260696 - DNA, 25 bp, Homo sapien
tcctcagaaggtcgctgcagactgc

SEQ ID NO: 5260697 - DNA, 25 bp, Homo sapien
tcttcagaacagtcactgctttgta

SEQ ID NO: 5260698 - DNA, 25 bp, Homo sapien
ggaacccttcgtctctcatcttcag

SEQ ID NO: 5260699 - DNA, 25 bp, Homo sapien
cactgctttgtagtggggcctgaac

SEQ ID NO: 5260700 - DNA, 25 bp, Homo sapien
agaaccaggacgagggcacctctgt

SEQ ID NO: 5260701 - DNA, 25 bp, Homo sapien
tgacagccgggcacaggcaccagct

SEQ ID NO: 5260702 - DNA, 25 bp, Homo sapien
ttgctgccccttctcgtgtcctgac

SEQ ID NO: 5260703 - DNA, 25 bp, Homo sapien
ggcagcttgcggggggacaacttgc

SEQ ID NO: 5260704 - DNA, 25 bp, Homo sapien
cttctcgtgtcctgacagccgggca

SEQ ID NO: 5260705 - DNA, 25 bp, Homo sapien
aaggtgcccgagtcagctggtggac

SEQ ID NO: 5260706 - DNA, 25 bp, Homo sapien
caaggacgtgcttgaagctccaggc

SEQ ID NO: 5260707 - DNA, 25 bp, Homo sapien
tcttgtcaggcagtgaaggtgcccg

SEQ ID NO: 5260708 - DNA, 25 bp, Homo sapien
tccaccatgggctccgcatctgtat

SEQ ID NO: 5260709 - DNA, 25 bp, Homo sapien
acccagggcccgaagcggctgcaaa

SEQ ID NO: 5260710 - DNA, 25 bp, Homo sapien
ctgtgcatgaactgggcgcccggcc

SEQ ID NO: 5260711 - DNA, 25 bp, Homo sapien
ctgcaaaccagaccagacagaggcc

SEQ ID NO: 5260712 - DNA, 25 bp, Homo sapien
tgtgcatgaactgggcgcccggccc

SEQ ID NO: 5260713 - DNA, 25 bp, Homo sapien
gttcccatcgaagctggcagggatg

SEQ ID NO: 5260714 - DNA, 25 bp, Homo sapien
gatagccatgagtggcatcactgtc

SEQ ID NO: 5260715 - DNA, 25 bp, Homo sapien
atcacactctggaacctgcactcga

SEQ ID NO: 5260716 - DNA, 25 bp, Homo sapien
cagggatggctcaaggccgtgacat

SEQ ID NO: 5260717 - DNA, 25 bp, Homo sapien
aggcaggatgggttcatgactcatg

SEQ ID NO: 5260718 - DNA, 25 bp, Homo sapien
tgactcatggcatcgacatcctccg

SEQ ID NO: 5260719 - DNA, 25 bp, Homo sapien
cccgttgccagttgccagggtgaga

SEQ ID NO: 5260720 - DNA, 25 bp, Homo sapien
tcctgcttttggaggtcccgttgcc

SEQ ID NO: 5260721 - DNA, 25 bp, Homo sapien
atctgcataggtgagcggggactgg

SEQ ID NO: 5260722 - DNA, 25 bp, Homo sapien
gctccatctgagcaagtggcacagt

SEQ ID NO: 5260723 - DNA, 25 bp, Homo sapien
tgctccatctgagcaagtggcacag

SEQ ID NO: 5260724 - DNA, 25 bp, Homo sapien
tcatctgcataggtgagcggggact

SEQ ID NO: 5260725 - DNA, 25 bp, Homo sapien
gaatccaaaagcattctgtgttcag

SEQ ID NO: 5260726 - DNA, 25 bp, Homo sapien
ttctgtgttcagtgttggtgtccag

SEQ ID NO: 5260727 - DNA, 25 bp, Homo sapien
attctgtgttcagtgttggtgtcca

SEQ ID NO: 5260728 - DNA, 25 bp, Homo sapien
cttagggaatccaaaagcattctgt

SEQ ID NO: 5260729 - DNA, 25 bp, Homo sapien
ctctagggctgcattgcgccatgtc

SEQ ID NO: 5260730 - DNA, 25 bp, Homo sapien
gagtcatccggatgcccctctgcag

SEQ ID NO: 5260731 - DNA, 25 bp, Homo sapien
tagggctgcattgcgccatgtcctc

SEQ ID NO: 5260732 - DNA, 25 bp, Homo sapien
gtgtcagagtcatccggatgcccct

SEQ ID NO: 5260733 - DNA, 25 bp, Homo sapien
cgtacagaatgtacccgtgcgcggg

SEQ ID NO: 5260734 - DNA, 25 bp, Homo sapien
attccgggatccgtggccatgggat

SEQ ID NO: 5260735 - DNA, 25 bp, Homo sapien
agtgagtcggccacaggaacacagc

SEQ ID NO: 5260736 - DNA, 25 bp, Homo sapien
ctggaggtcggctattccgggatcc

SEQ ID NO: 5260737 - DNA, 25 bp, Homo sapien
aaatatccacctgatgtgtctttgg

SEQ ID NO: 5260738 - DNA, 25 bp, Homo sapien
gccaagtgtattaatcatatcatcg

SEQ ID NO: 5260739 - DNA, 25 bp, Homo sapien
tcatcgtgttcaaacctcttctgct

SEQ ID NO: 5260740 - DNA, 25 bp, Homo sapien
tctgtgatgtctgacttaaagtgct

SEQ ID NO: 5260741 - DNA, 25 bp, Homo sapien
tgtctgaccacatgcagcgcttcat

SEQ ID NO: 5260742 - DNA, 25 bp, Homo sapien
ccaggaagacttgcttgtctgacca

SEQ ID NO: 5260743 - DNA, 25 bp, Homo sapien
cccacatccgtctttcaaggcgttg

SEQ ID NO: 5260744 - DNA, 25 bp, Homo sapien
tcaaggcgttggtcagcgccaggaa

SEQ ID NO: 5260745 - DNA, 25 bp, Homo sapien
caggccctccgttccccagcgtggg

SEQ ID NO: 5260746 - DNA, 25 bp, Homo sapien
tgttccagctattccacactgtcca

SEQ ID NO: 5260747 - DNA, 25 bp, Homo sapien
cagctgttccagctattccacactg

SEQ ID NO: 5260748 - DNA, 25 bp, Homo sapien
tccagcatccgagggcctgtagatg

SEQ ID NO: 5260749 - DNA, 25 bp, Homo sapien
tccttctcgtagtctctggctttga

SEQ ID NO: 5260750 - DNA, 25 bp, Homo sapien
ctccttctcgtagtctctggctttg

SEQ ID NO: 5260751 - DNA, 25 bp, Homo sapien
tgttggaacaagagcagtggaccta

SEQ ID NO: 5260752 - DNA, 25 bp, Homo sapien
gcacggctctgggtaacatctacat

SEQ ID NO: 5260753 - DNA, 25 bp, Homo sapien
ggaccttgtccatgcgatgctgtac

SEQ ID NO: 5260754 - DNA, 25 bp, Homo sapien
tcctgcaacaagcacagtaggcctg

SEQ ID NO: 5260755 - DNA, 25 bp, Homo sapien
ggagcaagggagaggcggagaagat

SEQ ID NO: 5260756 - DNA, 25 bp, Homo sapien
tgtgcaggccttggaggtgccgggg

SEQ ID NO: 5260757 - DNA, 25 bp, Homo sapien
ctggagcaagggagaggcggagaag

SEQ ID NO: 5260758 - DNA, 25 bp, Homo sapien
attcaggagcaccttggccgtgctc

SEQ ID NO: 5260759 - DNA, 25 bp, Homo sapien
gaggggtcgtgcttccgtgggagac

SEQ ID NO: 5260760 - DNA, 25 bp, Homo sapien
ttctgagctaagaggccagcaggcc

SEQ ID NO: 5260761 - DNA, 25 bp, Homo sapien
tcattcaacttcatgggtagctgcc

SEQ ID NO: 5260762 - DNA, 25 bp, Homo sapien
atctggcttctgagctaagaggcca

SEQ ID NO: 5260763 - DNA, 25 bp, Homo sapien
tgcttccgtcacgatgcttctggaa

SEQ ID NO: 5260764 - DNA, 25 bp, Homo sapien
tgcttccgtcacgatgcttctggag

SEQ ID NO: 5260765 - DNA, 25 bp, Homo sapien
ctgtgtcgtcttgcttccgtctggg

SEQ ID NO: 5260766 - DNA, 25 bp, Homo sapien
ttccgtcacgatgcttctggagcct

SEQ ID NO: 5260767 - DNA, 25 bp, Homo sapien
gaaatccttgagcatctttttcaaa

SEQ ID NO: 5260768 - DNA, 25 bp, Homo sapien
tccttgagcatctttttcaaaggtt

SEQ ID NO: 5260769 - DNA, 25 bp, Homo sapien
tgtggttacatgaggtctgagaatt

SEQ ID NO: 5260770 - DNA, 25 bp, Homo sapien
tgtgtgatttttaagtgcgatcaga

SEQ ID NO: 5260771 - DNA, 25 bp, Homo sapien
ggtgttcatgggtgcacggacacac

SEQ ID NO: 5260772 - DNA, 25 bp, Homo sapien
gacacacactctgaccaagacagct

SEQ ID NO: 5260773 - DNA, 25 bp, Homo sapien
ctgaagaccccggaccaggagcgtg

SEQ ID NO: 5260774 - DNA, 25 bp, Homo sapien
gagcgtgggtgccagtgaccaggcc

SEQ ID NO: 5260775 - DNA, 25 bp, Homo sapien
gcctcgggcaggaagcggcagatgt

SEQ ID NO: 5260776 - DNA, 25 bp, Homo sapien
caggaagcggcagatgtagcgctct

SEQ ID NO: 5260777 - DNA, 25 bp, Homo sapien
ctcttatcccgccactggccatggg

SEQ ID NO: 5260778 - DNA, 25 bp, Homo sapien
agatgtagcgctctcttatcccgcc

SEQ ID NO: 5260779 - DNA, 25 bp, Homo sapien
tgaatccccggtagggctggcggcg

SEQ ID NO: 5260780 - DNA, 25 bp, Homo sapien
ctgaatccccggtagggctggcggc

SEQ ID NO: 5260781 - DNA, 25 bp, Homo sapien
tgctcatgtgcaatgcggtcacccg

SEQ ID NO: 5260782 - DNA, 25 bp, Homo sapien
gcagcagggttgcacagacagtcgt

SEQ ID NO: 5260783 - DNA, 25 bp, Homo sapien
agacagtcgtctgcatggcttctgc

SEQ ID NO: 5260784 - DNA, 25 bp, Homo sapien
cgctggcactcggatgtggaagcat

SEQ ID NO: 5260785 - DNA, 25 bp, Homo sapien
atggtggcttggatgatggactcat

SEQ ID NO: 5260786 - DNA, 25 bp, Homo sapien
tggtggcttggatgatggactcatc

SEQ ID NO: 5260787 - DNA, 25 bp, Homo sapien
agcatggtggcttggatgatggact

SEQ ID NO: 5260788 - DNA, 25 bp, Homo sapien
catggtggcttggatgatggactca

SEQ ID NO: 5260789 - DNA, 25 bp, Homo sapien
aatgggtacccggatggggtgcagc

SEQ ID NO: 5260790 - DNA, 25 bp, Homo sapien
ctggagcggccagaccatgtacttt

SEQ ID NO: 5260791 - DNA, 25 bp, Homo sapien
gctgccacggccggaaatgggtacc

SEQ ID NO: 5260792 - DNA, 25 bp, Homo sapien
tgtcggctgccacggccggaaatgg

SEQ ID NO: 5260793 - DNA, 25 bp, Homo sapien
ctttcacccagtgcttgttgggcat

SEQ ID NO: 5260794 - DNA, 25 bp, Homo sapien
ctagttattgctcttcttattgatg

SEQ ID NO: 5260795 - DNA, 25 bp, Homo sapien
tattgctcttcttattgatgatgat

SEQ ID NO: 5260796 - DNA, 25 bp, Homo sapien
tgtggctgttggtgactttcaccca

SEQ ID NO: 5260797 - DNA, 25 bp, Homo sapien
ggccgcctccctcgcacctgccatg

SEQ ID NO: 5260798 - DNA, 25 bp, Homo sapien
gtgggggccgcctcccttgcacctg

SEQ ID NO: 5260799 - DNA, 25 bp, Homo sapien
gtgggggccgcctccctcgcacctg

SEQ ID NO: 5260800 - DNA, 25 bp, Homo sapien
gcctccctcgcacctgccatggtgg

SEQ ID NO: 5260801 - DNA, 25 bp, Homo sapien
tctggcctggctttggtttccaccc

SEQ ID NO: 5260802 - DNA, 25 bp, Homo sapien
tggcctggctttggtttccacccag

SEQ ID NO: 5260803 - DNA, 25 bp, Homo sapien
tgtctggcctggctttggtttccac

SEQ ID NO: 5260804 - DNA, 25 bp, Homo sapien
cacccaggcagcagctgcaagaagc

SEQ ID NO: 5260805 - DNA, 25 bp, Homo sapien
ccggagtggcattgggtacagggta

SEQ ID NO: 5260806 - DNA, 25 bp, Homo sapien
cggaaattgactctggcgcgtggca

SEQ ID NO: 5260807 - DNA, 25 bp, Homo sapien
ctgaacgcgagaggcccgagggccg

SEQ ID NO: 5260808 - DNA, 25 bp, Homo sapien
ctcaatgagcttgggctgaacgcga

SEQ ID NO: 5260809 - DNA, 25 bp, Homo sapien
tgtacccacttcgcctctgaagcag

SEQ ID NO: 5260810 - DNA, 25 bp, Homo sapien
acccacttcgcctctgaagcaggtg

SEQ ID NO: 5260811 - DNA, 25 bp, Homo sapien
cacactcaaggtcgccagtgaccgc

SEQ ID NO: 5260812 - DNA, 25 bp, Homo sapien
actcaaggtcgccagtgaccgctgc

SEQ ID NO: 5260813 - DNA, 25 bp, Homo sapien
cacaggcctgtactgtgtcagggcc

SEQ ID NO: 5260814 - DNA, 25 bp, Homo sapien
gcctgccctgtgtgccgccggcctg

SEQ ID NO: 5260815 - DNA, 25 bp, Homo sapien
tgtactgtgtcagggcctagagcag

SEQ ID NO: 5260816 - DNA, 25 bp, Homo sapien
gctgcggaggacacaggcctgtact

SEQ ID NO: 5260817 - DNA, 25 bp, Homo sapien
tcaagggcgtggactagggctggct

SEQ ID NO: 5260818 - DNA, 25 bp, Homo sapien
catagtggaggatgtagggtcccca

SEQ ID NO: 5260819 - DNA, 25 bp, Homo sapien
gagagccctgtcctactggccgtgg

SEQ ID NO: 5260820 - DNA, 25 bp, Homo sapien
ctgatctgttagagcacccaggagg

SEQ ID NO: 5260821 - DNA, 25 bp, Homo sapien
ccgccgggggcattggaagcaaaag

SEQ ID NO: 5260822 - DNA, 25 bp, Homo sapien
tggaatcattcccattccgcaggcc

SEQ ID NO: 5260823 - DNA, 25 bp, Homo sapien
tccctggagaggatgcacatgccgc

SEQ ID NO: 5260824 - DNA, 25 bp, Homo sapien
ccaggagacctgtagccagggcctt

SEQ ID NO: 5260825 - DNA, 25 bp, Homo sapien
aggtccgaacgctcgctcgggcagc

SEQ ID NO: 5260826 - DNA, 25 bp, Homo sapien
gatcctggccgggtcctgcgcagtt

SEQ ID NO: 5260827 - DNA, 25 bp, Homo sapien
agttcccgcccgcgaagggcagagc

SEQ ID NO: 5260828 - DNA, 25 bp, Homo sapien
cgaggaggcggagacaacaaaagcc

SEQ ID NO: 5260829 - DNA, 25 bp, Homo sapien
ctgcggccgcacatagcagccacca

SEQ ID NO: 5260830 - DNA, 25 bp, Homo sapien
tccggctcttgctggccgggtcccc

SEQ ID NO: 5260831 - DNA, 25 bp, Homo sapien
ctccggctcttgctggccgggtccc

SEQ ID NO: 5260832 - DNA, 25 bp, Homo sapien
gtagatctggcggacctcgccgcag

SEQ ID NO: 5260833 - DNA, 25 bp, Homo sapien
ctccgtagatctggcggacctcgcc

SEQ ID NO: 5260834 - DNA, 25 bp, Homo sapien
cgagatctccgcctggggcacgtcg

SEQ ID NO: 5260835 - DNA, 25 bp, Homo sapien
gagatctccgcctggggcacgtcgc

SEQ ID NO: 5260836 - DNA, 25 bp, Homo sapien
cagaaggggtccgcggccaccgtca

SEQ ID NO: 5260837 - DNA, 25 bp, Homo sapien
gggcaggaccggagacgcctcccag

SEQ ID NO: 5260838 - DNA, 25 bp, Homo sapien
gagcagaaggggtccgcggccaccg

SEQ ID NO: 5260839 - DNA, 25 bp, Homo sapien
tcccagagaggtctgtacagagcag

SEQ ID NO: 5260840 - DNA, 25 bp, Homo sapien
gggccggcgcgtacaagttcttcga

SEQ ID NO: 5260841 - DNA, 25 bp, Homo sapien
acctgcagctggactcgcggcacga

SEQ ID NO: 5260842 - DNA, 25 bp, Homo sapien
acgaggctgcccaagcgccaggcgg

SEQ ID NO: 5260843 - DNA, 25 bp, Homo sapien
tgggcgggatccaacgcgccgacca

SEQ ID NO: 5260844 - DNA, 25 bp, Homo sapien
tggacgcacacttgatctcaggctt

SEQ ID NO: 5260845 - DNA, 25 bp, Homo sapien
tcagcctgtggcactgttccgacag

SEQ ID NO: 5260846 - DNA, 25 bp, Homo sapien
gcagtgtggagcagacttcctcacg

SEQ ID NO: 5260847 - DNA, 25 bp, Homo sapien
ctagaaccacggacgacccatgtct

SEQ ID NO: 5260848 - DNA, 25 bp, Homo sapien
cctgggcggctggatttgggagtcc

SEQ ID NO: 5260849 - DNA, 25 bp, Homo sapien
ggatggaccagcgggtgaggacggg

SEQ ID NO: 5260850 - DNA, 25 bp, Homo sapien
tcaggatggacagtgccgcagggtc

SEQ ID NO: 5260851 - DNA, 25 bp, Homo sapien
aagtttctcagtagaacctgaactt

SEQ ID NO: 5260852 - DNA, 25 bp, Homo sapien
ggccacagctctgtgacgcactgga

SEQ ID NO: 5260853 - DNA, 25 bp, Homo sapien
actggacagctgtcgtcggtgtttg

SEQ ID NO: 5260854 - DNA, 25 bp, Homo sapien
ggctgagacgatcacccataggcca

SEQ ID NO: 5260855 - DNA, 25 bp, Homo sapien
agggagccccagtcaccaaggatgc

SEQ ID NO: 5260856 - DNA, 25 bp, Homo sapien
tagaaacgatgtctctccacagtcg

SEQ ID NO: 5260857 - DNA, 25 bp, Homo sapien
gaaaggacagatacggcaagactcg

SEQ ID NO: 5260858 - DNA, 25 bp, Homo sapien
gcattattcaccagagccggaaggt

SEQ ID NO: 5260859 - DNA, 25 bp, Homo sapien
gaaccttgaggacgacgctgagtga

SEQ ID NO: 5260860 - DNA, 25 bp, Homo sapien
tcgggcctggcttccagcgcggcgg

SEQ ID NO: 5260861 - DNA, 25 bp, Homo sapien
gtggcgctgcgggagaggtcctcgg

SEQ ID NO: 5260862 - DNA, 25 bp, Homo sapien
ggccgggcggaagggctcgcaggag

SEQ ID NO: 5260863 - DNA, 25 bp, Homo sapien
agccagcgggggacgagggcgggct

SEQ ID NO: 5260864 - DNA, 25 bp, Homo sapien
ggctgcttgcgagggcgacaggcgt

SEQ ID NO: 5260865 - DNA, 25 bp, Homo sapien
gccgcggccagggacgaagacggca

SEQ ID NO: 5260866 - DNA, 25 bp, Homo sapien
ccggcggcggaacaaaggctcggcg

SEQ ID NO: 5260867 - DNA, 25 bp, Homo sapien
gaagacggcaaaccgcgcagccgga

SEQ ID NO: 5260868 - DNA, 25 bp, Homo sapien
atgcattctcgtcccctgctgacat

SEQ ID NO: 5260869 - DNA, 25 bp, Homo sapien
ccttcaccccaaagctttaggcgag

SEQ ID NO: 5260870 - DNA, 25 bp, Homo sapien
tttaggcgagactcccatcctgaca

SEQ ID NO: 5260871 - DNA, 25 bp, Homo sapien
ttttaggtcatgcattctcgtcccc

SEQ ID NO: 5260872 - DNA, 25 bp, Homo sapien
ctcggacaagcacgggagtgaagac

SEQ ID NO: 5260873 - DNA, 25 bp, Homo sapien
tcctcggacaagcacgggagtgaag

SEQ ID NO: 5260874 - DNA, 25 bp, Homo sapien
cctcctcggacaagcacgggagtga

SEQ ID NO: 5260875 - DNA, 25 bp, Homo sapien
tccctcctcggacaagcacgggagt

SEQ ID NO: 5260876 - DNA, 25 bp, Homo sapien
ggcaagaagactgggacacaggtac

SEQ ID NO: 5260877 - DNA, 25 bp, Homo sapien
ggtacactcgccagggaccatcctt

SEQ ID NO: 5260878 - DNA, 25 bp, Homo sapien
gagagcacaggtcagccggacacat

SEQ ID NO: 5260879 - DNA, 25 bp, Homo sapien
gatttagagcaggaaccgcccctcc

SEQ ID NO: 5260880 - DNA, 25 bp, Homo sapien
gaggagcccgagacaagagaaggga

SEQ ID NO: 5260881 - DNA, 25 bp, Homo sapien
acactcagggaggagcccgagacaa

SEQ ID NO: 5260882 - DNA, 25 bp, Homo sapien
cttgggcggctgccgcttggcccct

SEQ ID NO: 5260883 - DNA, 25 bp, Homo sapien
cagagaacccgaatccgggcttggg

SEQ ID NO: 5260884 - DNA, 25 bp, Homo sapien
tgcattcttttacgccctcctgagg

SEQ ID NO: 5260885 - DNA, 25 bp, Homo sapien
gcctgtctcatcctgttctgggacc

SEQ ID NO: 5260886 - DNA, 25 bp, Homo sapien
gcgttgtcagcaggaattccagcaa

SEQ ID NO: 5260887 - DNA, 25 bp, Homo sapien
tttcctcaggactgccgcctcaggg

SEQ ID NO: 5260888 - DNA, 25 bp, Homo sapien
gcttacagggatgaggtctcgtccc

SEQ ID NO: 5260889 - DNA, 25 bp, Homo sapien
tctcgtcccagctatacagtgaggg

SEQ ID NO: 5260890 - DNA, 25 bp, Homo sapien
gaaggctgccgcaatcctcatttta

SEQ ID NO: 5260891 - DNA, 25 bp, Homo sapien
aagctcaggactccacactgacggg

SEQ ID NO: 5260892 - DNA, 25 bp, Homo sapien
tagcttcccacacgtgacacaagag

SEQ ID NO: 5260893 - DNA, 25 bp, Homo sapien
tgacagcggcactgccatcagagac

SEQ ID NO: 5260894 - DNA, 25 bp, Homo sapien
caagcaaagaactggcctcaggttc

SEQ ID NO: 5260895 - DNA, 25 bp, Homo sapien
gaaagggtcattggaccatgcccca

SEQ ID NO: 5260896 - DNA, 25 bp, Homo sapien
gagcgcggtctccagctcggcatgg

SEQ ID NO: 5260897 - DNA, 25 bp, Homo sapien
ccggagcgcggtctccagctcggca

SEQ ID NO: 5260898 - DNA, 25 bp, Homo sapien
caagcatggcctgcaggacgcggct

SEQ ID NO: 5260899 - DNA, 25 bp, Homo sapien
gcaagcatggcctgcaggacgcggc

SEQ ID NO: 5260900 - DNA, 25 bp, Homo sapien
tggcagggggtcctctcgggtctca

SEQ ID NO: 5260901 - DNA, 25 bp, Homo sapien
ctctcgggtctcagggcctctgact

SEQ ID NO: 5260902 - DNA, 25 bp, Homo sapien
gggtcctctcgggtctcagggcctc

SEQ ID NO: 5260903 - DNA, 25 bp, Homo sapien
ggctccagtggcagtttctgagctg

SEQ ID NO: 5260904 - DNA, 25 bp, Homo sapien
ctgcgtgtacagctctccgaaggcg

SEQ ID NO: 5260905 - DNA, 25 bp, Homo sapien
gtgtacagctctccgaaggcgccgg

SEQ ID NO: 5260906 - DNA, 25 bp, Homo sapien
tgcagcgtccgctccgagtcgttca

SEQ ID NO: 5260907 - DNA, 25 bp, Homo sapien
ctccgagtcgttcagcaggtgctgg

SEQ ID NO: 5260908 - DNA, 25 bp, Homo sapien
cgcggtagtacaggcgcagctctga

SEQ ID NO: 5260909 - DNA, 25 bp, Homo sapien
gctctgagtacaggtcccggaaggc

SEQ ID NO: 5260910 - DNA, 25 bp, Homo sapien
aggcgcagctctgagtacaggtccc

SEQ ID NO: 5260911 - DNA, 25 bp, Homo sapien
tgcaggttggcaccgcggtagtaca

SEQ ID NO: 5260912 - DNA, 25 bp, Homo sapien
agtccaggtagtcatcaggcagcag

SEQ ID NO: 5260913 - DNA, 25 bp, Homo sapien
ttgaagaggcgctcgagcaggcggg

SEQ ID NO: 5260914 - DNA, 25 bp, Homo sapien
cttgcccaggcagtccaggtagtca

SEQ ID NO: 5260915 - DNA, 25 bp, Homo sapien
agctgcttgaagaggcgctcgagca

SEQ ID NO: 5260916 - DNA, 25 bp, Homo sapien
agcagccacgaaggcacgggtggcc

SEQ ID NO: 5260917 - DNA, 25 bp, Homo sapien
gcgcagctctctcggggcctccccg

SEQ ID NO: 5260918 - DNA, 25 bp, Homo sapien
acgggtggcccgcaggcgcagctct

SEQ ID NO: 5260919 - DNA, 25 bp, Homo sapien
aaggagcgagcagccacgaaggcac

SEQ ID NO: 5260920 - DNA, 25 bp, Homo sapien
ggtctggaggggtttctgagagccc

SEQ ID NO: 5260921 - DNA, 25 bp, Homo sapien
gtctggaggggtttctgagagccct

SEQ ID NO: 5260922 - DNA, 25 bp, Homo sapien
ggggtctggaggggtttctgagagc

SEQ ID NO: 5260923 - DNA, 25 bp, Homo sapien
tctggaggggtttctgagagccctg

SEQ ID NO: 5260924 - DNA, 25 bp, Homo sapien
gacagctctcgagcactccgggccc

SEQ ID NO: 5260925 - DNA, 25 bp, Homo sapien
acagctctcgagcactccgggccca

SEQ ID NO: 5260926 - DNA, 25 bp, Homo sapien
ctctcgagcactccgggcccagggg

SEQ ID NO: 5260927 - DNA, 25 bp, Homo sapien
agctctcgagcactccgggcccagg

SEQ ID NO: 5260928 - DNA, 25 bp, Homo sapien
caggcagtgagcacagtagaccagc

SEQ ID NO: 5260929 - DNA, 25 bp, Homo sapien
aaggcagcccttgagcacatttcgg

SEQ ID NO: 5260930 - DNA, 25 bp, Homo sapien
cagtgagcacagtagaccagcttca

SEQ ID NO: 5260931 - DNA, 25 bp, Homo sapien
ttcggcaatagtcagggcagggcct

SEQ ID NO: 5260932 - DNA, 25 bp, Homo sapien
tcaggttggcccgtgtgacatgtgc

SEQ ID NO: 5260933 - DNA, 25 bp, Homo sapien
tgtcagcaagtgagcacgccagttc

SEQ ID NO: 5260934 - DNA, 25 bp, Homo sapien
taatgcagtcttgacagcacgggtc

SEQ ID NO: 5260935 - DNA, 25 bp, Homo sapien
tagcttaaacaagtgccggtcctcg

SEQ ID NO: 5260936 - DNA, 25 bp, Homo sapien
agccacgtgtgcacgctgccgatga

SEQ ID NO: 5260937 - DNA, 25 bp, Homo sapien
taccccagaacttgtcggtgatgag

SEQ ID NO: 5260938 - DNA, 25 bp, Homo sapien
tggagggcgttgatggcctccgcca

SEQ ID NO: 5260939 - DNA, 25 bp, Homo sapien
ccgtgagcgtgtccctgttgtcctg

SEQ ID NO: 5260940 - DNA, 25 bp, Homo sapien
ttggggttcccgcagccctggatga

SEQ ID NO: 5260941 - DNA, 25 bp, Homo sapien
tgaccttggggttcccgcagccctg

SEQ ID NO: 5260942 - DNA, 25 bp, Homo sapien
gcgtgcctgaaggtggcctctcccg

SEQ ID NO: 5260943 - DNA, 25 bp, Homo sapien
cagcttctccagcgtgcctgaaggt

SEQ ID NO: 5260944 - DNA, 25 bp, Homo sapien
tcctggacgtcgcggagctgggcct

SEQ ID NO: 5260945 - DNA, 25 bp, Homo sapien
catcccgttccagcagcggtcatca

SEQ ID NO: 5260946 - DNA, 25 bp, Homo sapien
ccgttccagcagcggtcatcactgg

SEQ ID NO: 5260947 - DNA, 25 bp, Homo sapien
gttccagcagcggtcatcactggca

SEQ ID NO: 5260948 - DNA, 25 bp, Homo sapien
agagcccaggtcactgctccagccc

SEQ ID NO: 5260949 - DNA, 25 bp, Homo sapien
gggaaaggcaggcagagcccaggtc

SEQ ID NO: 5260950 - DNA, 25 bp, Homo sapien
ggcagagcccaggtcactgctccag

SEQ ID NO: 5260951 - DNA, 25 bp, Homo sapien
caggcagagcccaggtcactgctcc

SEQ ID NO: 5260952 - DNA, 25 bp, Homo sapien
tggcgtcctggaagtccacgtcgtt

SEQ ID NO: 5260953 - DNA, 25 bp, Homo sapien
gtcatgtccggcttggtgatgtcca

SEQ ID NO: 5260954 - DNA, 25 bp, Homo sapien
tcgttgccgttgtaggcgctgcgca

SEQ ID NO: 5260955 - DNA, 25 bp, Homo sapien
cgcagccggttggtcatgatcttca

SEQ ID NO: 5260956 - DNA, 25 bp, Homo sapien
cgcagaggtgcagggctcggtgatc

SEQ ID NO: 5260957 - DNA, 25 bp, Homo sapien
tcagactcactgtggtgatgccgga

SEQ ID NO: 5260958 - DNA, 25 bp, Homo sapien
aaagccaacagacatcccggccagg

SEQ ID NO: 5260959 - DNA, 25 bp, Homo sapien
acatcctttcggtgtggaatcccag

SEQ ID NO: 5260960 - DNA, 25 bp, Homo sapien
gtcatccagacagccatcaccgctg

SEQ ID NO: 5260961 - DNA, 25 bp, Homo sapien
cttccggctgcagaggtcatccaga

SEQ ID NO: 5260962 - DNA, 25 bp, Homo sapien
gaggtcatccagacagccatcaccg

SEQ ID NO: 5260963 - DNA, 25 bp, Homo sapien
ttccggctgcagaggtcatccagac

SEQ ID NO: 5260964 - DNA, 25 bp, Homo sapien
agggcatgggtcaagggcgtccggg

SEQ ID NO: 5260965 - DNA, 25 bp, Homo sapien
ggcatgggtcaagggcgtccgggag

SEQ ID NO: 5260966 - DNA, 25 bp, Homo sapien
gggagggcatgggtcaagggcgtcc

SEQ ID NO: 5260967 - DNA, 25 bp, Homo sapien
ctgggagggcatgggtcaagggcgt

SEQ ID NO: 5260968 - DNA, 25 bp, Homo sapien
ggcctggctactgtaagggccagga

SEQ ID NO: 5260969 - DNA, 25 bp, Homo sapien
tggcagccgaggtcttctgtccttc

SEQ ID NO: 5260970 - DNA, 25 bp, Homo sapien
gccaccggggcctggctactgtaag

SEQ ID NO: 5260971 - DNA, 25 bp, Homo sapien
gctggcagccgaggtcttctgtcct

SEQ ID NO: 5260972 - DNA, 25 bp, Homo sapien
tgaaatacatggcttttgggcacac

SEQ ID NO: 5260973 - DNA, 25 bp, Homo sapien
gacctgaggacctcatacaaaatta

SEQ ID NO: 5260974 - DNA, 25 bp, Homo sapien
tgccagaccctggatggcggacacc

SEQ ID NO: 5260975 - DNA, 25 bp, Homo sapien
ctccagcgggttgctttgaggcctc

SEQ ID NO: 5260976 - DNA, 25 bp, Homo sapien
cctcagggtcagtcggttcaggaca

SEQ ID NO: 5260977 - DNA, 25 bp, Homo sapien
tccactgtgcgggacggtgatgaaa

SEQ ID NO: 5260978 - DNA, 25 bp, Homo sapien
tgccccttccagagatgagcgtagg

SEQ ID NO: 5260979 - DNA, 25 bp, Homo sapien
taggcattcccgtctgcagtgcggg

SEQ ID NO: 5260980 - DNA, 25 bp, Homo sapien
aacaagttggtgagcattattgaga

SEQ ID NO: 5260981 - DNA, 25 bp, Homo sapien
atgcagtgggtttgttatggttaac

SEQ ID NO: 5260982 - DNA, 25 bp, Homo sapien
cagtgggtttgttatggttaacaag

SEQ ID NO: 5260983 - DNA, 25 bp, Homo sapien
ctgcagcgacaacctgcttagtttc

SEQ ID NO: 5260984 - DNA, 25 bp, Homo sapien
ttagtccccggaaagctagccagtg

SEQ ID NO: 5260985 - DNA, 25 bp, Homo sapien
tgaactcaacagacaggcactggcg

SEQ ID NO: 5260986 - DNA, 25 bp, Homo sapien
tgaaatgcgctctgtagcctggaga

SEQ ID NO: 5260987 - DNA, 25 bp, Homo sapien
ggaatttagcgctttctctcccagg

SEQ ID NO: 5260988 - DNA, 25 bp, Homo sapien
catcatcaccctttacggttggagg

SEQ ID NO: 5260989 - DNA, 25 bp, Homo sapien
tgattaggttgggacactgtctccc

SEQ ID NO: 5260990 - DNA, 25 bp, Homo sapien
aaagcctgctacttgaaccatcatg

SEQ ID NO: 5260991 - DNA, 25 bp, Homo sapien
cctccgtggaggtcttatcagcatc

SEQ ID NO: 5260992 - DNA, 25 bp, Homo sapien
tctactgcggcgtctggcgcggagg

SEQ ID NO: 5260993 - DNA, 25 bp, Homo sapien
cactgggcttgcgtctgtggctctt

SEQ ID NO: 5260994 - DNA, 25 bp, Homo sapien
ggcatggcgggaggtttgggcctca

SEQ ID NO: 5260995 - DNA, 25 bp, Homo sapien
ttggaccgctctgcgtcccatgttc

SEQ ID NO: 5260996 - DNA, 25 bp, Homo sapien
gacgttgacgcacagcgtgactccc

SEQ ID NO: 5260997 - DNA, 25 bp, Homo sapien
ctcgcgcgctcccgaggaagagtga

SEQ ID NO: 5260998 - DNA, 25 bp, Homo sapien
tttgggccctgaggatctattttgg

SEQ ID NO: 5260999 - DNA, 25 bp, Homo sapien
cccaggagtctatttgtgggagccg

SEQ ID NO: 5261000 - DNA, 25 bp, Homo sapien
tcttgcagtagactaggcaggcgcc

SEQ ID NO: 5261001 - DNA, 25 bp, Homo sapien
gccgcatgaggtacgcggtgcagac

SEQ ID NO: 5261002 - DNA, 25 bp, Homo sapien
agcaggtcctcagccgggtcgtcga

SEQ ID NO: 5261003 - DNA, 25 bp, Homo sapien
cggctgcggccgttcttgcagtaga

SEQ ID NO: 5261004 - DNA, 25 bp, Homo sapien
ccagaagcccgggttcggttctgct

SEQ ID NO: 5261005 - DNA, 25 bp, Homo sapien
tcggttctgctaccgggcgagcgct

SEQ ID NO: 5261006 - DNA, 25 bp, Homo sapien
ggttcggttctgctaccgggcgagc

SEQ ID NO: 5261007 - DNA, 25 bp, Homo sapien
gctaccgggcgagcgctcttcacca

SEQ ID NO: 5261008 - DNA, 25 bp, Homo sapien
ctaaggctgggggctctccctgcag

SEQ ID NO: 5261009 - DNA, 25 bp, Homo sapien
ccctgcaggcaggactgggcctgga

SEQ ID NO: 5261010 - DNA, 25 bp, Homo sapien
gctgggggctctccctgcaggcagg

SEQ ID NO: 5261011 - DNA, 25 bp, Homo sapien
tccctgcaggcaggactgggcctgg

SEQ ID NO: 5261012 - DNA, 25 bp, Homo sapien
gccttcaagcttcaagcctcagggc

SEQ ID NO: 5261013 - DNA, 25 bp, Homo sapien
ttcaagcttcaagcctcagggccca

SEQ ID NO: 5261014 - DNA, 25 bp, Homo sapien
gcaggccttcaagcttcaagcctca

SEQ ID NO: 5261015 - DNA, 25 bp, Homo sapien
cagtgcagggacatccttcctccag

SEQ ID NO: 5261016 - DNA, 25 bp, Homo sapien
taatttgtgcatcacctcagccgga

SEQ ID NO: 5261017 - DNA, 25 bp, Homo sapien
tcaaacagaagcatccgtggtcacg

SEQ ID NO: 5261018 - DNA, 25 bp, Homo sapien
tcctccccggatgaagcagctttag

SEQ ID NO: 5261019 - DNA, 25 bp, Homo sapien
tcttgatctaaatgtcccacgtggg

SEQ ID NO: 5261020 - DNA, 25 bp, Homo sapien
ctcaagagatcagagattaagaaag

SEQ ID NO: 5261021 - DNA, 25 bp, Homo sapien
tgctgctctggtcatgtctgtagtg

SEQ ID NO: 5261022 - DNA, 25 bp, Homo sapien
tgcgtgggagccgtgctatggaata

SEQ ID NO: 5261023 - DNA, 25 bp, Homo sapien
gaaagtgacaatgggcgggtctccc

SEQ ID NO: 5261024 - DNA, 25 bp, Homo sapien
gaaaaccagctgttaggcctatctg

SEQ ID NO: 5261025 - DNA, 25 bp, Homo sapien
tagaccgtgaagcacctgatcgtca

SEQ ID NO: 5261026 - DNA, 25 bp, Homo sapien
tgagcttccgcctaggtggtaaaag

SEQ ID NO: 5261027 - DNA, 25 bp, Homo sapien
cctgttccaatagggcctgactggg

SEQ ID NO: 5261028 - DNA, 25 bp, Homo sapien
gagacaaatgtaagacacggcaggc

SEQ ID NO: 5261029 - DNA, 25 bp, Homo sapien
ctaatccggatagagagacaaatgt

SEQ ID NO: 5261030 - DNA, 25 bp, Homo sapien
atccggatagagagacaaatgtaag

SEQ ID NO: 5261031 - DNA, 25 bp, Homo sapien
taatccggatagagagacaaatgta

SEQ ID NO: 5261032 - DNA, 25 bp, Homo sapien
ttcaggcattaaagaggttatatac

SEQ ID NO: 5261033 - DNA, 25 bp, Homo sapien
tatacatcataaatgacatggcaga

SEQ ID NO: 5261034 - DNA, 25 bp, Homo sapien
tcatgggacacgtttaagtggaaag

SEQ ID NO: 5261035 - DNA, 25 bp, Homo sapien
cagtcccgatgtgttcatatagcaa

SEQ ID NO: 5261036 - DNA, 25 bp, Homo sapien
gaggcagcaccttgttggcttgaca

SEQ ID NO: 5261037 - DNA, 25 bp, Homo sapien
tgcccagatgagaccagtgagaggt

SEQ ID NO: 5261038 - DNA, 25 bp, Homo sapien
tctaggatagtctttaggccacagg

SEQ ID NO: 5261039 - DNA, 25 bp, Homo sapien
gcttcccatgttcggtgcccagatg

SEQ ID NO: 5261040 - DNA, 25 bp, Homo sapien
ccatgatgtcgctgttgtcatcaag

SEQ ID NO: 5261041 - DNA, 25 bp, Homo sapien
ccaccatgatgtcgctgttgtcatc

SEQ ID NO: 5261042 - DNA, 25 bp, Homo sapien
aaattttgaggctgtggaataacag

SEQ ID NO: 5261043 - DNA, 25 bp, Homo sapien
gccaccatgatgtcgctgttgtcat

SEQ ID NO: 5261044 - DNA, 25 bp, Homo sapien
gtggcggaggcggaagagctgcgcg

SEQ ID NO: 5261045 - DNA, 25 bp, Homo sapien
ctgcaggtggcggaggcggaagagc

SEQ ID NO: 5261046 - DNA, 25 bp, Homo sapien
aggtggcggaggcggaagagctgcg

SEQ ID NO: 5261047 - DNA, 25 bp, Homo sapien
gcaggtggcggaggcggaagagctg

SEQ ID NO: 5261048 - DNA, 25 bp, Homo sapien
gcagccggccaactcgcgcgcctcg

SEQ ID NO: 5261049 - DNA, 25 bp, Homo sapien
aggcagccggccaactcgcgcgcct

SEQ ID NO: 5261050 - DNA, 25 bp, Homo sapien
ccaggcagccggccaactcgcgcgc

SEQ ID NO: 5261051 - DNA, 25 bp, Homo sapien
agccggccaactcgcgcgcctcggg

SEQ ID NO: 5261052 - DNA, 25 bp, Homo sapien
ggcgcgacggaaggcggctgagtgc

SEQ ID NO: 5261053 - DNA, 25 bp, Homo sapien
ggcggagaaggcgaaggcgcagggc

SEQ ID NO: 5261054 - DNA, 25 bp, Homo sapien
gcgcagagccgggtgcgcgtcgagc

SEQ ID NO: 5261055 - DNA, 25 bp, Homo sapien
tgcgcgtcgagcacgagcgcgcggg

SEQ ID NO: 5261056 - DNA, 25 bp, Homo sapien
tcgggcggcagcgtgacggtgagcg

SEQ ID NO: 5261057 - DNA, 25 bp, Homo sapien
gaggtgtaccgcaggatgacctgga

SEQ ID NO: 5261058 - DNA, 25 bp, Homo sapien
gagcgaggagccgtagtcggtgaac

SEQ ID NO: 5261059 - DNA, 25 bp, Homo sapien
gcgtcggtcgaggtgtaccgcagga

SEQ ID NO: 5261060 - DNA, 25 bp, Homo sapien
cttgacgacggcagagtaggtgcac

SEQ ID NO: 5261061 - DNA, 25 bp, Homo sapien
ttcacggcaggtgtgtcgaagcacg

SEQ ID NO: 5261062 - DNA, 25 bp, Homo sapien
cgaagcacgggaagaaggagcggtt

SEQ ID NO: 5261063 - DNA, 25 bp, Homo sapien
gcgcagccataggtcagctctgggt

SEQ ID NO: 5261064 - DNA, 25 bp, Homo sapien
catgtatgcactccgggtggcactc

SEQ ID NO: 5261065 - DNA, 25 bp, Homo sapien
tccatgtatgcactccgggtggcac

SEQ ID NO: 5261066 - DNA, 25 bp, Homo sapien
tcttcctccatgtatgcactccggg

SEQ ID NO: 5261067 - DNA, 25 bp, Homo sapien
tcctccatgtatgcactccgggtgg

SEQ ID NO: 5261068 - DNA, 25 bp, Homo sapien
ctgggcccgatgtctgccggcttga

SEQ ID NO: 5261069 - DNA, 25 bp, Homo sapien
gatgtctgccggcttgaggtctccg

SEQ ID NO: 5261070 - DNA, 25 bp, Homo sapien
cggcttgaggtctccggccaccagg

SEQ ID NO: 5261071 - DNA, 25 bp, Homo sapien
aggtaggcgggcacggggtgctcca

SEQ ID NO: 5261072 - DNA, 25 bp, Homo sapien
cactgcgcccgacagcttgctggtg

SEQ ID NO: 5261073 - DNA, 25 bp, Homo sapien
tagggcccatacagccgctcagctg

SEQ ID NO: 5261074 - DNA, 25 bp, Homo sapien
tgccccacatgtagggcccatacag

SEQ ID NO: 5261075 - DNA, 25 bp, Homo sapien
aggaggcatggctcggcccacacgc

SEQ ID NO: 5261076 - DNA, 25 bp, Homo sapien
cacgtggcgttggtgacagcgttgc

SEQ ID NO: 5261077 - DNA, 25 bp, Homo sapien
gaactcatcgctctccaggatggag

SEQ ID NO: 5261078 - DNA, 25 bp, Homo sapien
gcgttgccgaaccaactgtgggcca

SEQ ID NO: 5261079 - DNA, 25 bp, Homo sapien
gaccaggaactcatcgctctccagg

SEQ ID NO: 5261080 - DNA, 25 bp, Homo sapien
tcggtggtgatacggcgctgggcat

SEQ ID NO: 5261081 - DNA, 25 bp, Homo sapien
taggtctcggtggtgatacggcgct

SEQ ID NO: 5261082 - DNA, 25 bp, Homo sapien
ggtctcggtggtgatacggcgctgg

SEQ ID NO: 5261083 - DNA, 25 bp, Homo sapien
tctcggtggtgatacggcgctgggc

SEQ ID NO: 5261084 - DNA, 25 bp, Homo sapien
aggaggtgtgggcacctgcagcatg

SEQ ID NO: 5261085 - DNA, 25 bp, Homo sapien
gccaggctaggctctctgcccctgg

SEQ ID NO: 5261086 - DNA, 25 bp, Homo sapien
ggatggggtccggagacagaggaga

SEQ ID NO: 5261087 - DNA, 25 bp, Homo sapien
cagcatggcaggggggccaggctag

SEQ ID NO: 5261088 - DNA, 25 bp, Homo sapien
gcagtttgctgaccgggctgtcctc

SEQ ID NO: 5261089 - DNA, 25 bp, Homo sapien
tgcagtttgctgaccgggctgtcct

SEQ ID NO: 5261090 - DNA, 25 bp, Homo sapien
tttgctgaccgggctgtcctctccc

SEQ ID NO: 5261091 - DNA, 25 bp, Homo sapien
agtttgctgaccgggctgtcctctc

SEQ ID NO: 5261092 - DNA, 25 bp, Homo sapien
cagccagaacacacgaagggcaggc

SEQ ID NO: 5261093 - DNA, 25 bp, Homo sapien
ttgaggggtgacatccccagttgtg

SEQ ID NO: 5261094 - DNA, 25 bp, Homo sapien
ggccttgaggggtgacatccccagt

SEQ ID NO: 5261095 - DNA, 25 bp, Homo sapien
agccagaacacacgaagggcaggca

SEQ ID NO: 5261096 - DNA, 25 bp, Homo sapien
agcagcaagggccaagcgccactgt

SEQ ID NO: 5261097 - DNA, 25 bp, Homo sapien
cactgtccctcacatgtccagatgt

SEQ ID NO: 5261098 - DNA, 25 bp, Homo sapien
ggctggcgtccgaaaccaccagtgt

SEQ ID NO: 5261099 - DNA, 25 bp, Homo sapien
tgcaaggtgaacacccacctgggct

SEQ ID NO: 5261100 - DNA, 25 bp, Homo sapien
ctcgtaggtgaacaggttcatcagg

SEQ ID NO: 5261101 - DNA, 25 bp, Homo sapien
tgaacaggttcatcaggtggctggg

SEQ ID NO: 5261102 - DNA, 25 bp, Homo sapien
aacaggttcatcaggtggctgggat

SEQ ID NO: 5261103 - DNA, 25 bp, Homo sapien
ggtgaacaggttcatcaggtggctg

SEQ ID NO: 5261104 - DNA, 25 bp, Homo sapien
gacaggtagtacacgaagcagtagc

SEQ ID NO: 5261105 - DNA, 25 bp, Homo sapien
agaaagtcatcaaagcgctgtgggt

SEQ ID NO: 5261106 - DNA, 25 bp, Homo sapien
ggtagtacacgaagcagtagccctt

SEQ ID NO: 5261107 - DNA, 25 bp, Homo sapien
gaaagtcatcaaagcgctgtgggtc

SEQ ID NO: 5261108 - DNA, 25 bp, Homo sapien
ggcagactaggtcccagccaggctc

SEQ ID NO: 5261109 - DNA, 25 bp, Homo sapien
tgcgccaaggtacgtgctgggcaca

SEQ ID NO: 5261110 - DNA, 25 bp, Homo sapien
aggcactccccacaaagaaaggcag

SEQ ID NO: 5261111 - DNA, 25 bp, Homo sapien
gcagctagtgggcactgcggagcca

SEQ ID NO: 5261112 - DNA, 25 bp, Homo sapien
gccaccacgctggtgaacttgtact

SEQ ID NO: 5261113 - DNA, 25 bp, Homo sapien
ctgcccggcagtccacgctctgctc

SEQ ID NO: 5261114 - DNA, 25 bp, Homo sapien
cgctggtgaacttgtacttctccac

SEQ ID NO: 5261115 - DNA, 25 bp, Homo sapien
aagctcaggaaggagtccagcaggt

SEQ ID NO: 5261116 - DNA, 25 bp, Homo sapien
gacagtgaactgacagggctttcct

SEQ ID NO: 5261117 - DNA, 25 bp, Homo sapien
cacgcctctcctgggtggaagacaa

SEQ ID NO: 5261118 - DNA, 25 bp, Homo sapien
ggttggtgaccaagggactcgcacc

SEQ ID NO: 5261119 - DNA, 25 bp, Homo sapien
tgttctcatagcataccagcctggg

SEQ ID NO: 5261120 - DNA, 25 bp, Homo sapien
ttgagccagcgctcgaattccagcc

SEQ ID NO: 5261121 - DNA, 25 bp, Homo sapien
attgagccagcgctcgaattccagc

SEQ ID NO: 5261122 - DNA, 25 bp, Homo sapien
ctgtggcattgagccagcgctcgaa

SEQ ID NO: 5261123 - DNA, 25 bp, Homo sapien
ggcattgagccagcgctcgaattcc

SEQ ID NO: 5261124 - DNA, 25 bp, Homo sapien
tccacttggagatgtcaatggcgct

SEQ ID NO: 5261125 - DNA, 25 bp, Homo sapien
atccctgagacaggtccggctcagc

SEQ ID NO: 5261126 - DNA, 25 bp, Homo sapien
agaggttctgcggtccacagctgga

SEQ ID NO: 5261127 - DNA, 25 bp, Homo sapien
caggagccggtccaggaagagtgct

SEQ ID NO: 5261128 - DNA, 25 bp, Homo sapien
tcatcgagtccagcagggaggagta

SEQ ID NO: 5261129 - DNA, 25 bp, Homo sapien
gaggagtagcacttggacaggctca

SEQ ID NO: 5261130 - DNA, 25 bp, Homo sapien
tcaggatagtagtcgttgcggacca

SEQ ID NO: 5261131 - DNA, 25 bp, Homo sapien
aatctgcagccagcggatgcggatc

SEQ ID NO: 5261132 - DNA, 25 bp, Homo sapien
tccagcgcgaaggacttgagggcac

SEQ ID NO: 5261133 - DNA, 25 bp, Homo sapien
gacacattgacgtccctgagagaga

SEQ ID NO: 5261134 - DNA, 25 bp, Homo sapien
aggatctgctggatggctctgcgca

SEQ ID NO: 5261135 - DNA, 25 bp, Homo sapien
gcaccggtgcagaggtcctcgtaca

SEQ ID NO: 5261136 - DNA, 25 bp, Homo sapien
cccaggaagctacaagagacaggct

SEQ ID NO: 5261137 - DNA, 25 bp, Homo sapien
gccgagacgcagtcatggcaggcct

SEQ ID NO: 5261138 - DNA, 25 bp, Homo sapien
taaggcacagtgtggcggtcaccat

SEQ ID NO: 5261139 - DNA, 25 bp, Homo sapien
cacagaaggcacaattgtggtgtct

SEQ ID NO: 5261140 - DNA, 25 bp, Homo sapien
gcagagtggaagtttaatgggacca

SEQ ID NO: 5261141 - DNA, 25 bp, Homo sapien
gtgacatccagaggctactcaggcc

SEQ ID NO: 5261142 - DNA, 25 bp, Homo sapien
tgcagaggacaagagtcgcgagaaa

SEQ ID NO: 5261143 - DNA, 25 bp, Homo sapien
gacaagagtcgcgagaaagagcgca

SEQ ID NO: 5261144 - DNA, 25 bp, Homo sapien
ttcggggagcctgctctcgggctta

SEQ ID NO: 5261145 - DNA, 25 bp, Homo sapien
tgactgctgggacttgaaaacaacc

SEQ ID NO: 5261146 - DNA, 25 bp, Homo sapien
cagaccgtgagctaagtgtgcgtat

SEQ ID NO: 5261147 - DNA, 25 bp, Homo sapien
gctaataaaacgtgcgacctgccag

SEQ ID NO: 5261148 - DNA, 25 bp, Homo sapien
taacgtggcctaatagagaagctgg

SEQ ID NO: 5261149 - DNA, 25 bp, Homo sapien
tcagctccgtcgttgtcattagtgc

SEQ ID NO: 5261150 - DNA, 25 bp, Homo sapien
ggcctcagctccgtcgttgtcatta

SEQ ID NO: 5261151 - DNA, 25 bp, Homo sapien
agctccgtcgttgtcattagtgctg

SEQ ID NO: 5261152 - DNA, 25 bp, Homo sapien
tctggcctcagctccgtcgttgtca

SEQ ID NO: 5261153 - DNA, 25 bp, Homo sapien
gaaacactctgggagacaagtctgg

SEQ ID NO: 5261154 - DNA, 25 bp, Homo sapien
cctccagggcctagaaatttgcatg

SEQ ID NO: 5261155 - DNA, 25 bp, Homo sapien
tgactaggccctaatccccaaaatg

SEQ ID NO: 5261156 - DNA, 25 bp, Homo sapien
taatgttctgtgcaaagcatctggc

SEQ ID NO: 5261157 - DNA, 25 bp, Homo sapien
gagttgcgtcgcagactacagctcc

SEQ ID NO: 5261158 - DNA, 25 bp, Homo sapien
ggcgttcagtcctccagccggtgag

SEQ ID NO: 5261159 - DNA, 25 bp, Homo sapien
tcgggaccgcctgaacacgcgggct

SEQ ID NO: 5261160 - DNA, 25 bp, Homo sapien
gaccagggagccacctcggccgagt

SEQ ID NO: 5261161 - DNA, 25 bp, Homo sapien
gcggcggaccgcactgtattttttc

SEQ ID NO: 5261162 - DNA, 25 bp, Homo sapien
tctcgggtcacgtgacaggcggccc

SEQ ID NO: 5261163 - DNA, 25 bp, Homo sapien
cgagctccgctctttcgtggtcggg

SEQ ID NO: 5261164 - DNA, 25 bp, Homo sapien
tagtctcccattggtaaccaggcgg

SEQ ID NO: 5261165 - DNA, 25 bp, Homo sapien
tggaccaggccagtacgccggcccg

SEQ ID NO: 5261166 - DNA, 25 bp, Homo sapien
ttgcctcggggtcgcagccccggag

SEQ ID NO: 5261167 - DNA, 25 bp, Homo sapien
agagaaggcgagtcagccgccgccg

SEQ ID NO: 5261168 - DNA, 25 bp, Homo sapien
ccatctgcagccggttgcctcgggg

SEQ ID NO: 5261169 - DNA, 25 bp, Homo sapien
ctcgccggcgtcgcgccccggcccg

SEQ ID NO: 5261170 - DNA, 25 bp, Homo sapien
ccagcggcgtagacaagtcgcagaa

SEQ ID NO: 5261171 - DNA, 25 bp, Homo sapien
ggaactgggccagcggcgtagacaa

SEQ ID NO: 5261172 - DNA, 25 bp, Homo sapien
acgtgatgtcctcgcggaactgggc

SEQ ID NO: 5261173 - DNA, 25 bp, Homo sapien
caagtcgcagaagagcgaggagtcc

SEQ ID NO: 5261174 - DNA, 25 bp, Homo sapien
gcgcggcgcaggcacacaggaacca

SEQ ID NO: 5261175 - DNA, 25 bp, Homo sapien
ctgcccttcccgtgggtcatctgga

SEQ ID NO: 5261176 - DNA, 25 bp, Homo sapien
ccgtgggtcatctggaaacagccgg

SEQ ID NO: 5261177 - DNA, 25 bp, Homo sapien
acagccggggtgtggcacaaatctc

SEQ ID NO: 5261178 - DNA, 25 bp, Homo sapien
ctctgctttcgcaaggcctcctggt

SEQ ID NO: 5261179 - DNA, 25 bp, Homo sapien
tgatggagccttctggcgaggccaa

SEQ ID NO: 5261180 - DNA, 25 bp, Homo sapien
acagcaggagatccggctgcggcac

SEQ ID NO: 5261181 - DNA, 25 bp, Homo sapien
tctttattctaaacgtggtgatctg

SEQ ID NO: 5261182 - DNA, 25 bp, Homo sapien
gtgactgtgacacgcttaccatggg

SEQ ID NO: 5261183 - DNA, 25 bp, Homo sapien
cagttcttgaccgagctggctgcaa

SEQ ID NO: 5261184 - DNA, 25 bp, Homo sapien
gtaagcattctgacccagcatcggg

SEQ ID NO: 5261185 - DNA, 25 bp, Homo sapien
cataaaacggtgaacactcccaggt

SEQ ID NO: 5261186 - DNA, 25 bp, Homo sapien
tctgctgccctcactaaaagcatct

SEQ ID NO: 5261187 - DNA, 25 bp, Homo sapien
tgctgccctcactaaaagcatctga

SEQ ID NO: 5261188 - DNA, 25 bp, Homo sapien
acatatcccgggacacactctgctg

SEQ ID NO: 5261189 - DNA, 25 bp, Homo sapien
cttgaggaccacaccgagggagcca

SEQ ID NO: 5261190 - DNA, 25 bp, Homo sapien
tgcacagggctgcatcacccacatg

SEQ ID NO: 5261191 - DNA, 25 bp, Homo sapien
gcacacctggatgtcggcgcctgca

SEQ ID NO: 5261192 - DNA, 25 bp, Homo sapien
gcatcacccacatgaaattaacaga

SEQ ID NO: 5261193 - DNA, 25 bp, Homo sapien
gatgtcgcagagaactcttcggcac

SEQ ID NO: 5261194 - DNA, 25 bp, Homo sapien
gccacagctgagtgctccacaggca

SEQ ID NO: 5261195 - DNA, 25 bp, Homo sapien
tactccagtgtcccggccgcggtgt

SEQ ID NO: 5261196 - DNA, 25 bp, Homo sapien
gaagcaaaaggcgagcgtgatataa

SEQ ID NO: 5261197 - DNA, 25 bp, Homo sapien
cgagcgtgatataagcaccacccgg

SEQ ID NO: 5261198 - DNA, 25 bp, Homo sapien
ccaaatgcgacaggtgaaggagccc

SEQ ID NO: 5261199 - DNA, 25 bp, Homo sapien
cagctcggctgtcccggaggaatga

SEQ ID NO: 5261200 - DNA, 25 bp, Homo sapien
cacggcaggcggtcatctgtggtca

SEQ ID NO: 5261201 - DNA, 25 bp, Homo sapien
aacagagtctccctgcaaggcacgg

SEQ ID NO: 5261202 - DNA, 25 bp, Homo sapien
gcccttcagcccccagcacacgcac

SEQ ID NO: 5261203 - DNA, 25 bp, Homo sapien
ttgccccaggccaggcccttcagcc

SEQ ID NO: 5261204 - DNA, 25 bp, Homo sapien
cccaggccaggcccttcagccccca

SEQ ID NO: 5261205 - DNA, 25 bp, Homo sapien
ggcccttcagcccccagcacacgca

SEQ ID NO: 5261206 - DNA, 25 bp, Homo sapien
tacttcacagcaagcgtgagcgccc

SEQ ID NO: 5261207 - DNA, 25 bp, Homo sapien
taaaataaggaggacggcacacatg

SEQ ID NO: 5261208 - DNA, 25 bp, Homo sapien
tcaccatgggagtgagcctctggca

SEQ ID NO: 5261209 - DNA, 25 bp, Homo sapien
aaactctctggcatccggtgtgggc

SEQ ID NO: 5261210 - DNA, 25 bp, Homo sapien
gacactggtccttcaggtggagcag

SEQ ID NO: 5261211 - DNA, 25 bp, Homo sapien
atctttctgccaggccgccggtcag

SEQ ID NO: 5261212 - DNA, 25 bp, Homo sapien
gctgagcacgcagcagctgatcaga

SEQ ID NO: 5261213 - DNA, 25 bp, Homo sapien
acaggtgctcgtaggacccatggac

SEQ ID NO: 5261214 - DNA, 25 bp, Homo sapien
ctggcagtggggggcacgctggctg

SEQ ID NO: 5261215 - DNA, 25 bp, Homo sapien
agccctcccatgctggccacgtgcc

SEQ ID NO: 5261216 - DNA, 25 bp, Homo sapien
gccctcccatgctggccacgtgcct

SEQ ID NO: 5261217 - DNA, 25 bp, Homo sapien
gcagtggggggcacgctggctgcag

SEQ ID NO: 5261218 - DNA, 25 bp, Homo sapien
agaagggccacgtccctctggaaga

SEQ ID NO: 5261219 - DNA, 25 bp, Homo sapien
ggacaccacccttgagaacaagctt

SEQ ID NO: 5261220 - DNA, 25 bp, Homo sapien
gacagtgggctttgactcggtgcca

SEQ ID NO: 5261221 - DNA, 25 bp, Homo sapien
tcgcactagtggaaaggactggtca

SEQ ID NO: 5261222 - DNA, 25 bp, Homo sapien
tgaacctctcaacgtgctcctgaac

SEQ ID NO: 5261223 - DNA, 25 bp, Homo sapien
agactgtggcaaacccgctcatggg

SEQ ID NO: 5261224 - DNA, 25 bp, Homo sapien
gaacatttgacagcgcgtgtgtggc

SEQ ID NO: 5261225 - DNA, 25 bp, Homo sapien
taaaccgtgcgtgctcatggaaaac

SEQ ID NO: 5261226 - DNA, 25 bp, Homo sapien
agcaggatgcactggcccgcctgac

SEQ ID NO: 5261227 - DNA, 25 bp, Homo sapien
acaatgaaggcatggaactccccca

SEQ ID NO: 5261228 - DNA, 25 bp, Homo sapien
cgcaggtccgagacaatgaaggcat

SEQ ID NO: 5261229 - DNA, 25 bp, Homo sapien
gctcccgcaggtccgagacaatgaa

SEQ ID NO: 5261230 - DNA, 25 bp, Homo sapien
tccgtgaccgggtagccaacggtga

SEQ ID NO: 5261231 - DNA, 25 bp, Homo sapien
caggagctcagatgctaccgctgca

SEQ ID NO: 5261232 - DNA, 25 bp, Homo sapien
gatgctaccgctgcatctacctggc

SEQ ID NO: 5261233 - DNA, 25 bp, Homo sapien
caacggtgagctcgtcaaactccct

SEQ ID NO: 5261234 - DNA, 25 bp, Homo sapien
agcagctacggccacagacagagcc

SEQ ID NO: 5261235 - DNA, 25 bp, Homo sapien
ggcatcagctgtgggacacggctcc

SEQ ID NO: 5261236 - DNA, 25 bp, Homo sapien
cagctcctgggacagaatcatcacc

SEQ ID NO: 5261237 - DNA, 25 bp, Homo sapien
ccctggcagggtctaagcagcagct

SEQ ID NO: 5261238 - DNA, 25 bp, Homo sapien
acagcctggtagtgcttgcccggga

SEQ ID NO: 5261239 - DNA, 25 bp, Homo sapien
gaagtatgactgtcacccaccagtg

SEQ ID NO: 5261240 - DNA, 25 bp, Homo sapien
gacggcaatgtacacctcactcggt

SEQ ID NO: 5261241 - DNA, 25 bp, Homo sapien
gctcgctgggctccacgaagtatga

SEQ ID NO: 5261242 - DNA, 25 bp, Homo sapien
cagagtcacatgtgtcccggcagag

SEQ ID NO: 5261243 - DNA, 25 bp, Homo sapien
gcaatcccatgagatccgtgtcagg

SEQ ID NO: 5261244 - DNA, 25 bp, Homo sapien
tttggccaatgaggcacacggcaag

SEQ ID NO: 5261245 - DNA, 25 bp, Homo sapien
tgcagtctcaggtcagagccgggtc

SEQ ID NO: 5261246 - DNA, 25 bp, Homo sapien
tgggccacatccatgaagggacagg

SEQ ID NO: 5261247 - DNA, 25 bp, Homo sapien
caatcccgggcttcacttggccctg

SEQ ID NO: 5261248 - DNA, 25 bp, Homo sapien
tatctgtcccagacacgagcctgca

SEQ ID NO: 5261249 - DNA, 25 bp, Homo sapien
cctgcaagtcctccttgtagctggg

SEQ ID NO: 5261250 - DNA, 25 bp, Homo sapien
ttggccctggcgccagtatctgtcc

SEQ ID NO: 5261251 - DNA, 25 bp, Homo sapien
ctctcagggaccagctagagatgcc

SEQ ID NO: 5261252 - DNA, 25 bp, Homo sapien
gtgagcacgtgcaggaggctcagtg

SEQ ID NO: 5261253 - DNA, 25 bp, Homo sapien
gaaagcgccaaggcctgtcagcacc

SEQ ID NO: 5261254 - DNA, 25 bp, Homo sapien
tcagggaccagctagagatgcccac

SEQ ID NO: 5261255 - DNA, 25 bp, Homo sapien
tgagagctcacaacgcaggtggacc

SEQ ID NO: 5261256 - DNA, 25 bp, Homo sapien
ggacaggaccctaggcagattgacc

SEQ ID NO: 5261257 - DNA, 25 bp, Homo sapien
actcgcccggtagagaagactcgga

SEQ ID NO: 5261258 - DNA, 25 bp, Homo sapien
ggacctcccggtcgtatgcatggca

SEQ ID NO: 5261259 - DNA, 25 bp, Homo sapien
gccagcagcactgcgcggttcctct

SEQ ID NO: 5261260 - DNA, 25 bp, Homo sapien
agggcctgtggcctcggagagccag

SEQ ID NO: 5261261 - DNA, 25 bp, Homo sapien
gagagccagcagcactgcgcggttc

SEQ ID NO: 5261262 - DNA, 25 bp, Homo sapien
cctgtggcctcggagagccagcagc

SEQ ID NO: 5261263 - DNA, 25 bp, Homo sapien
gggtggtgttcttggccactgccct

SEQ ID NO: 5261264 - DNA, 25 bp, Homo sapien
gttcttggccactgccctgatggcg

SEQ ID NO: 5261265 - DNA, 25 bp, Homo sapien
ggtgttcttggccactgccctgatg

SEQ ID NO: 5261266 - DNA, 25 bp, Homo sapien
ccgggggtggtgttcttggccactg

SEQ ID NO: 5261267 - DNA, 25 bp, Homo sapien
tggtggggtatgaggcaaagttcct

SEQ ID NO: 5261268 - DNA, 25 bp, Homo sapien
gttggtggggtatgaggcaaagttc

SEQ ID NO: 5261269 - DNA, 25 bp, Homo sapien
tggggtatgaggcaaagttcctgct

SEQ ID NO: 5261270 - DNA, 25 bp, Homo sapien
tgccccccgccgtctggccgactct

SEQ ID NO: 5261271 - DNA, 25 bp, Homo sapien
tgatgcagagtgatgcggacgcagc

SEQ ID NO: 5261272 - DNA, 25 bp, Homo sapien
tgctgatgcagagtgatgcggacgc

SEQ ID NO: 5261273 - DNA, 25 bp, Homo sapien
gggccggcagtgctgatgcagagtg

SEQ ID NO: 5261274 - DNA, 25 bp, Homo sapien
cggcagtgctgatgcagagtgatgc

SEQ ID NO: 5261275 - DNA, 25 bp, Homo sapien
tggaagatatggaagccgatggggt

SEQ ID NO: 5261276 - DNA, 25 bp, Homo sapien
gaagatatggaagccgatggggtgg

SEQ ID NO: 5261277 - DNA, 25 bp, Homo sapien
gatatggaagccgatggggtggaac

SEQ ID NO: 5261278 - DNA, 25 bp, Homo sapien
tatggaagccgatggggtggaactc

SEQ ID NO: 5261279 - DNA, 25 bp, Homo sapien
ctgtgcgggttctaggcagcgcctc

SEQ ID NO: 5261280 - DNA, 25 bp, Homo sapien
ctaggcagcgcctcgaagggcaggg

SEQ ID NO: 5261281 - DNA, 25 bp, Homo sapien
gcagggggagcccaagtgactgagc

SEQ ID NO: 5261282 - DNA, 25 bp, Homo sapien
agagggccctgtgcgggttctaggc

SEQ ID NO: 5261283 - DNA, 25 bp, Homo sapien
ctcagactgagggggccagccttgg

SEQ ID NO: 5261284 - DNA, 25 bp, Homo sapien
tgaggaaagcgcaggctcagactga

SEQ ID NO: 5261285 - DNA, 25 bp, Homo sapien
ctgaggaaagcgcaggctcagactg

SEQ ID NO: 5261286 - DNA, 25 bp, Homo sapien
cagccttggggtagggagcccagcc

SEQ ID NO: 5261287 - DNA, 25 bp, Homo sapien
gtgggggtgcgtcctggctccttcc

SEQ ID NO: 5261288 - DNA, 25 bp, Homo sapien
aatcctggttgcgatggtcactgtg

SEQ ID NO: 5261289 - DNA, 25 bp, Homo sapien
acctcctgggcgtagcgatgtggca

SEQ ID NO: 5261290 - DNA, 25 bp, Homo sapien
cccctctgtgtccggcaggtaggtg

SEQ ID NO: 5261291 - DNA, 25 bp, Homo sapien
aaccttgtaggtgcccgcaggcagg

SEQ ID NO: 5261292 - DNA, 25 bp, Homo sapien
cttggaggaactggcccagcatctc

SEQ ID NO: 5261293 - DNA, 25 bp, Homo sapien
tcttggaggaactggcccagcatct

SEQ ID NO: 5261294 - DNA, 25 bp, Homo sapien
ctcttggaggaactggcccagcatc

SEQ ID NO: 5261295 - DNA, 25 bp, Homo sapien
ggttttcatcactgccatgatggag

SEQ ID NO: 5261296 - DNA, 25 bp, Homo sapien
ttaggttttcatcactgccatgatg

SEQ ID NO: 5261297 - DNA, 25 bp, Homo sapien
taggttttcatcactgccatgatgg

SEQ ID NO: 5261298 - DNA, 25 bp, Homo sapien
ttttcatcactgccatgatggagac

SEQ ID NO: 5261299 - DNA, 25 bp, Homo sapien
gctgctgggaacctgtcaggccctc

SEQ ID NO: 5261300 - DNA, 25 bp, Homo sapien
cagggctgcgtctctcctgacggag

SEQ ID NO: 5261301 - DNA, 25 bp, Homo sapien
ccatatggagtcagcagaggatctg

SEQ ID NO: 5261302 - DNA, 25 bp, Homo sapien
gtctcagtggcgcaacagaagccag

SEQ ID NO: 5261303 - DNA, 25 bp, Homo sapien
ataaatagttataaagaagatctgc

SEQ ID NO: 5261304 - DNA, 25 bp, Homo sapien
aaatagttataaagaagatctgctg

SEQ ID NO: 5261305 - DNA, 25 bp, Homo sapien
aaagtgattcgaacaataaatagtt

SEQ ID NO: 5261306 - DNA, 25 bp, Homo sapien
tcctaaaagtgattcgaacaataaa

SEQ ID NO: 5261307 - DNA, 25 bp, Homo sapien
tggagggccattgaaccagcaagca

SEQ ID NO: 5261308 - DNA, 25 bp, Homo sapien
ttcatccgaagtcagcacagaagcc

SEQ ID NO: 5261309 - DNA, 25 bp, Homo sapien
tgctgctcaagaatccgtgtctgaa

SEQ ID NO: 5261310 - DNA, 25 bp, Homo sapien
tgaagatgccgagaacccagctgcc

SEQ ID NO: 5261311 - DNA, 25 bp, Homo sapien
aggcagtagcctgggacgcgggaag

SEQ ID NO: 5261312 - DNA, 25 bp, Homo sapien
gacgcgggaagcaggtcctggctgt

SEQ ID NO: 5261313 - DNA, 25 bp, Homo sapien
catggcctctaaagtcacggaaccc

SEQ ID NO: 5261314 - DNA, 25 bp, Homo sapien
agcaggagggtgtggccgccacctt

SEQ ID NO: 5261315 - DNA, 25 bp, Homo sapien
agctggccggacaccctgaagagca

SEQ ID NO: 5261316 - DNA, 25 bp, Homo sapien
gcagccagggacaaacaacaccagg

SEQ ID NO: 5261317 - DNA, 25 bp, Homo sapien
tgaagagcaccgcactgatccatga

SEQ ID NO: 5261318 - DNA, 25 bp, Homo sapien
gatccatgaccttggcaacaggatg

SEQ ID NO: 5261319 - DNA, 25 bp, Homo sapien
aatggacaaaggcatttgctgtttc

SEQ ID NO: 5261320 - DNA, 25 bp, Homo sapien
tggccatcaactggacgaatacgcc

SEQ ID NO: 5261321 - DNA, 25 bp, Homo sapien
caggtacccagggttggccatcaac

SEQ ID NO: 5261322 - DNA, 25 bp, Homo sapien
atacgccacggaagatcagaagctg

SEQ ID NO: 5261323 - DNA, 25 bp, Homo sapien
agggctctgaccgagtgaagtgtca

SEQ ID NO: 5261324 - DNA, 25 bp, Homo sapien
tgggtgctagggctctgaccgagtg

SEQ ID NO: 5261325 - DNA, 25 bp, Homo sapien
tgaccgagtgaagtgtcagcaacat

SEQ ID NO: 5261326 - DNA, 25 bp, Homo sapien
tgctagggctctgaccgagtgaagt

SEQ ID NO: 5261327 - DNA, 25 bp, Homo sapien
gagtcaccaactgctgtgcctggag

SEQ ID NO: 5261328 - DNA, 25 bp, Homo sapien
gaagacggcagtatcaggaccgggt

SEQ ID NO: 5261329 - DNA, 25 bp, Homo sapien
gaggactgtgaaagagaagacggca

SEQ ID NO: 5261330 - DNA, 25 bp, Homo sapien
tatcaggaccgggtgggacacggct

SEQ ID NO: 5261331 - DNA, 25 bp, Homo sapien
cacgcttttgatgtcctcagagggc

SEQ ID NO: 5261332 - DNA, 25 bp, Homo sapien
cacacatgtgcttaggaggcctcag

SEQ ID NO: 5261333 - DNA, 25 bp, Homo sapien
gcagacggtcctccctaatggatca

SEQ ID NO: 5261334 - DNA, 25 bp, Homo sapien
tgaaggatgtcacggccgcatccac

SEQ ID NO: 5261335 - DNA, 25 bp, Homo sapien
aagaagcaaaaaacactatgaacta

SEQ ID NO: 5261336 - DNA, 25 bp, Homo sapien
tactcagaaacaaacgaagtggctc

SEQ ID NO: 5261337 - DNA, 25 bp, Homo sapien
gaaactctcggcaaactagaaagag

SEQ ID NO: 5261338 - DNA, 25 bp, Homo sapien
aaacggtattggaggtcccagccag

SEQ ID NO: 5261339 - DNA, 25 bp, Homo sapien
taggaaacttcaagctgggcaatgg

SEQ ID NO: 5261340 - DNA, 25 bp, Homo sapien
ggaggaagctgccaactaagaaccc

SEQ ID NO: 5261341 - DNA, 25 bp, Homo sapien
tattcacgactgcaatagtgcaggc

SEQ ID NO: 5261342 - DNA, 25 bp, Homo sapien
aatggaaggtcaccctcaggcctgt

SEQ ID NO: 5261343 - DNA, 25 bp, Homo sapien
gggacctcgtatgcatcctgtggag

SEQ ID NO: 5261344 - DNA, 25 bp, Homo sapien
ctggactttgcaagtccagtctgca

SEQ ID NO: 5261345 - DNA, 25 bp, Homo sapien
cagtcgacaggagattggcaggcat

SEQ ID NO: 5261346 - DNA, 25 bp, Homo sapien
ctgaatctggtgaagtatcggagct

SEQ ID NO: 5261347 - DNA, 25 bp, Homo sapien
gaagtatcggagctgactcgcagtc

SEQ ID NO: 5261348 - DNA, 25 bp, Homo sapien
gtttcaggtctttcatgagtctgca

SEQ ID NO: 5261349 - DNA, 25 bp, Homo sapien
ttttatctcccagttcctgtgggtc

SEQ ID NO: 5261350 - DNA, 25 bp, Homo sapien
agttttatctcccagttcctgtggg

SEQ ID NO: 5261351 - DNA, 25 bp, Homo sapien
ttcgggctctgccaaactgggtcct

SEQ ID NO: 5261352 - DNA, 25 bp, Homo sapien
caggaattcgggctctgccaaactg

SEQ ID NO: 5261353 - DNA, 25 bp, Homo sapien
gcctttcctatgcaaactgtacctc

SEQ ID NO: 5261354 - DNA, 25 bp, Homo sapien
tgtgcattgtcagctacctattgct

SEQ ID NO: 5261355 - DNA, 25 bp, Homo sapien
actgtacctcaacatgaccaaagag

SEQ ID NO: 5261356 - DNA, 25 bp, Homo sapien
gaccaaagagttaatgaaggaacac

SEQ ID NO: 5261357 - DNA, 25 bp, Homo sapien
ccagtcatttggatgtatatccata

SEQ ID NO: 5261358 - DNA, 25 bp, Homo sapien
tccagtcatttggatgtatatccat

SEQ ID NO: 5261359 - DNA, 25 bp, Homo sapien
ctcttccaagtgattttaaaatcca

SEQ ID NO: 5261360 - DNA, 25 bp, Homo sapien
aaatccagtcatttggatgtatatc

SEQ ID NO: 5261361 - DNA, 25 bp, Homo sapien
ggatagggacggacttctgtgacca

SEQ ID NO: 5261362 - DNA, 25 bp, Homo sapien
tagatttggatttagactcatgtca

SEQ ID NO: 5261363 - DNA, 25 bp, Homo sapien
ctgacttgcattatgggttgacaat

SEQ ID NO: 5261364 - DNA, 25 bp, Homo sapien
tagatggagccatcagctgtatgtt

SEQ ID NO: 5261365 - DNA, 25 bp, Homo sapien
tcccaagggcccaggttgaatgaag

SEQ ID NO: 5261366 - DNA, 25 bp, Homo sapien
gctcttcactgccacggtgtggagt

SEQ ID NO: 5261367 - DNA, 25 bp, Homo sapien
agagagacgcaaggactatgaagca

SEQ ID NO: 5261368 - DNA, 25 bp, Homo sapien
cgtgttcacaccacaggacactgag

SEQ ID NO: 5261369 - DNA, 25 bp, Homo sapien
cctggccaccaaaggccagaagagg

SEQ ID NO: 5261370 - DNA, 25 bp, Homo sapien
tcaggggccgtctccacgccttgga

SEQ ID NO: 5261371 - DNA, 25 bp, Homo sapien
caccttcacccagcctatggggtgt

SEQ ID NO: 5261372 - DNA, 25 bp, Homo sapien
ccagcctatggggtgtcgaggcatc

SEQ ID NO: 5261373 - DNA, 25 bp, Homo sapien
cctctggcagatcagatggtgcccc

SEQ ID NO: 5261374 - DNA, 25 bp, Homo sapien
tgatcagtccaagcccggccgccgt

SEQ ID NO: 5261375 - DNA, 25 bp, Homo sapien
tggtgccccaagcaggcctacccag

SEQ ID NO: 5261376 - DNA, 25 bp, Homo sapien
ggcagatcagatggtgccccaagca

SEQ ID NO: 5261377 - DNA, 25 bp, Homo sapien
gaagtttaagaacaacctgggcatc

SEQ ID NO: 5261378 - DNA, 25 bp, Homo sapien
aatgtttaactgcaggcaggcacgg

SEQ ID NO: 5261379 - DNA, 25 bp, Homo sapien
tgtttaactgcaggcaggcacggtg

SEQ ID NO: 5261380 - DNA, 25 bp, Homo sapien
ttaagaacaacctgggcatcacagg

SEQ ID NO: 5261381 - DNA, 25 bp, Homo sapien
gcatgggtgccgtaaagaactccaa

SEQ ID NO: 5261382 - DNA, 25 bp, Homo sapien
cacacagctcttagcagggagggct

SEQ ID NO: 5261383 - DNA, 25 bp, Homo sapien
tgtcagcccaaggacgggaagacca

SEQ ID NO: 5261384 - DNA, 25 bp, Homo sapien
cttgaggtctaacccctggacagat

SEQ ID NO: 5261385 - DNA, 25 bp, Homo sapien
cacaggtgttgtaggtgccattcat

SEQ ID NO: 5261386 - DNA, 25 bp, Homo sapien
gccacaggtgttgtaggtgccattc

SEQ ID NO: 5261387 - DNA, 25 bp, Homo sapien
gagccacaggtgttgtaggtgccat

SEQ ID NO: 5261388 - DNA, 25 bp, Homo sapien
ctggagccacaggtgttgtaggtgc

SEQ ID NO: 5261389 - DNA, 25 bp, Homo sapien
cagaccacgaacaccaggaggttgg

SEQ ID NO: 5261390 - DNA, 25 bp, Homo sapien
aaattgtgccgggtgctcctgaagc

SEQ ID NO: 5261391 - DNA, 25 bp, Homo sapien
tgtagtagtagcagatggcgtccag

SEQ ID NO: 5261392 - DNA, 25 bp, Homo sapien
tttgtgggccttagcactgggagcc

SEQ ID NO: 5261393 - DNA, 25 bp, Homo sapien
gagttcagggctgatctcgggctcc

SEQ ID NO: 5261394 - DNA, 25 bp, Homo sapien
gctccaagagaatacacagtgagtt

SEQ ID NO: 5261395 - DNA, 25 bp, Homo sapien
tccaagagaatacacagtgagttca

SEQ ID NO: 5261396 - DNA, 25 bp, Homo sapien
tccttgctactggttccagcttccc

SEQ ID NO: 5261397 - DNA, 25 bp, Homo sapien
tggttctgggggtggcaagtgtgag

SEQ ID NO: 5261398 - DNA, 25 bp, Homo sapien
ttttattccagccccgaggggcagc

SEQ ID NO: 5261399 - DNA, 25 bp, Homo sapien
atcccgggggtctctgacattggcc

SEQ ID NO: 5261400 - DNA, 25 bp, Homo sapien
tcttcccaagagagcaggtacctgg

SEQ ID NO: 5261401 - DNA, 25 bp, Homo sapien
cttggtcacccccccttgcaccgct

SEQ ID NO: 5261402 - DNA, 25 bp, Homo sapien
ctgcttgaccttggtcaccccccct

SEQ ID NO: 5261403 - DNA, 25 bp, Homo sapien
ttgaccttggtcacccccccttgca

SEQ ID NO: 5261404 - DNA, 25 bp, Homo sapien
tggtcacccccccttgcaccgctgt

SEQ ID NO: 5261405 - DNA, 25 bp, Homo sapien
cagcttgggtttcgagatgccctcc

SEQ ID NO: 5261406 - DNA, 25 bp, Homo sapien
ccctccatgcaggagtacaggagag

SEQ ID NO: 5261407 - DNA, 25 bp, Homo sapien
gaggtctctggagtgccctgtcctt

SEQ ID NO: 5261408 - DNA, 25 bp, Homo sapien
gacatcgtgcctttacctgagtggg

SEQ ID NO: 5261409 - DNA, 25 bp, Homo sapien
tggaacatggaacagggtggggcgg

SEQ ID NO: 5261410 - DNA, 25 bp, Homo sapien
gaacatggaacagggtggggcggtg

SEQ ID NO: 5261411 - DNA, 25 bp, Homo sapien
aacatggaacagggtggggcggtgc

SEQ ID NO: 5261412 - DNA, 25 bp, Homo sapien
gccatcagccgcatgcttgtgccat

SEQ ID NO: 5261413 - DNA, 25 bp, Homo sapien
ctgggcatgcacccttttaggcaca

SEQ ID NO: 5261414 - DNA, 25 bp, Homo sapien
cctgtgagatgccatcagccgcatg

SEQ ID NO: 5261415 - DNA, 25 bp, Homo sapien
gcatgcttgtgccatgtccctgcca

SEQ ID NO: 5261416 - DNA, 25 bp, Homo sapien
catggacacccttgcgtatggaccc

SEQ ID NO: 5261417 - DNA, 25 bp, Homo sapien
ggcatgggaccctcctggacataga

SEQ ID NO: 5261418 - DNA, 25 bp, Homo sapien
catgggacccttttgggcatagagc

SEQ ID NO: 5261419 - DNA, 25 bp, Homo sapien
gacatgtatcctcctgagcacaggg

SEQ ID NO: 5261420 - DNA, 25 bp, Homo sapien
catatcagccctcctgggtatggac

SEQ ID NO: 5261421 - DNA, 25 bp, Homo sapien
gcccttactgggcatggaccctcat

SEQ ID NO: 5261422 - DNA, 25 bp, Homo sapien
gctctgttgtgtatgggccctccta

SEQ ID NO: 5261423 - DNA, 25 bp, Homo sapien
cctttctggacatgaaccctcctgg

SEQ ID NO: 5261424 - DNA, 25 bp, Homo sapien
ccccatgaccgacgccacctcctgg

SEQ ID NO: 5261425 - DNA, 25 bp, Homo sapien
ttccacaggaaaggcgcacagacgc

SEQ ID NO: 5261426 - DNA, 25 bp, Homo sapien
caggaaaggcgcacagacgctggca

SEQ ID NO: 5261427 - DNA, 25 bp, Homo sapien
cctcgccccatgaccgacgccacct

SEQ ID NO: 5261428 - DNA, 25 bp, Homo sapien
agcttcggtgagacgcctgcccacg

SEQ ID NO: 5261429 - DNA, 25 bp, Homo sapien
ggtgagacgcctgcccacggtcagt

SEQ ID NO: 5261430 - DNA, 25 bp, Homo sapien
agtaccgaggctccctctacccaga

SEQ ID NO: 5261431 - DNA, 25 bp, Homo sapien
cgtgtaggagcttcggtgagacgcc

SEQ ID NO: 5261432 - DNA, 25 bp, Homo sapien
acaaaacatccttccctcgtccatc

SEQ ID NO: 5261433 - DNA, 25 bp, Homo sapien
caaaacatccttccctcgtccatcc

SEQ ID NO: 5261434 - DNA, 25 bp, Homo sapien
cacaaaacatccttccctcgtccat

SEQ ID NO: 5261435 - DNA, 25 bp, Homo sapien
ccacaaaacatccttccctcgtcca

SEQ ID NO: 5261436 - DNA, 25 bp, Homo sapien
gttgtggccatggtgcctgtcgggc

SEQ ID NO: 5261437 - DNA, 25 bp, Homo sapien
gcgttgtggtcgaagcctaagtcca

SEQ ID NO: 5261438 - DNA, 25 bp, Homo sapien
gttgccaccctacaaggcggcggcg

SEQ ID NO: 5261439 - DNA, 25 bp, Homo sapien
gtggtcgaagcctaagtccaaggcc

SEQ ID NO: 5261440 - DNA, 25 bp, Homo sapien
catgacaaaaatcccgccatgacag

SEQ ID NO: 5261441 - DNA, 25 bp, Homo sapien
gcgtgacagcccctccgtctgtggt

SEQ ID NO: 5261442 - DNA, 25 bp, Homo sapien
gtctgtggttgggacaccacactca

SEQ ID NO: 5261443 - DNA, 25 bp, Homo sapien
aaacatgacaaaaatcccgccatga

SEQ ID NO: 5261444 - DNA, 25 bp, Homo sapien
cagcgggtggcgtcattcagtccaa

SEQ ID NO: 5261445 - DNA, 25 bp, Homo sapien
aaaccgctgtccctaagccagtgaa

SEQ ID NO: 5261446 - DNA, 25 bp, Homo sapien
tagttgtgaaatcttgacaccaccg

SEQ ID NO: 5261447 - DNA, 25 bp, Homo sapien
gatactacagccacttcgggaaagg

SEQ ID NO: 5261448 - DNA, 25 bp, Homo sapien
cctcgacccaccttgagccaggtgt

SEQ ID NO: 5261449 - DNA, 25 bp, Homo sapien
actcctctgggttagctctgagaag

SEQ ID NO: 5261450 - DNA, 25 bp, Homo sapien
ctcgacccaccttgagccaggtgtg

SEQ ID NO: 5261451 - DNA, 25 bp, Homo sapien
tggccttgaaggaaccccaagtaca

SEQ ID NO: 5261452 - DNA, 25 bp, Homo sapien
ggcagaagagaccagcggcttctca

SEQ ID NO: 5261453 - DNA, 25 bp, Homo sapien
ccacctcaaaatgggcccgcgatgt

SEQ ID NO: 5261454 - DNA, 25 bp, Homo sapien
ggttccagtcctcaatgtcagggag

SEQ ID NO: 5261455 - DNA, 25 bp, Homo sapien
gggtccactcttgtgggttatgtga

SEQ ID NO: 5261456 - DNA, 25 bp, Homo sapien
ggtccactcttgtgggttatgtgat

SEQ ID NO: 5261457 - DNA, 25 bp, Homo sapien
tccactcttgtgggttatgtgattc

SEQ ID NO: 5261458 - DNA, 25 bp, Homo sapien
agggtccactcttgtgggttatgtg

SEQ ID NO: 5261459 - DNA, 25 bp, Homo sapien
aaagccaggctttccctcgtgggat

SEQ ID NO: 5261460 - DNA, 25 bp, Homo sapien
ccttctggaacctgtagaggcctgg

SEQ ID NO: 5261461 - DNA, 25 bp, Homo sapien
tattctaatccgacaccactggaga

SEQ ID NO: 5261462 - DNA, 25 bp, Homo sapien
ttagggaaggtgtctggtcgcctcc

SEQ ID NO: 5261463 - DNA, 25 bp, Homo sapien
tgaggggacagagcaggagctggct

SEQ ID NO: 5261464 - DNA, 25 bp, Homo sapien
gggacagagcaggagctggctggtt

SEQ ID NO: 5261465 - DNA, 25 bp, Homo sapien
aggggacagagcaggagctggctgg

SEQ ID NO: 5261466 - DNA, 25 bp, Homo sapien
ctgaggggacagagcaggagctggc

SEQ ID NO: 5261467 - DNA, 25 bp, Homo sapien
cctgggccccccgaggagctgtgcc

SEQ ID NO: 5261468 - DNA, 25 bp, Homo sapien
tgggccccccgaggagctgtgcctg

SEQ ID NO: 5261469 - DNA, 25 bp, Homo sapien
ccgaggagctgtgcctgcaggacac

SEQ ID NO: 5261470 - DNA, 25 bp, Homo sapien
ccccgaggagctgtgcctgcaggac

SEQ ID NO: 5261471 - DNA, 25 bp, Homo sapien
aaggagagggacacgttaagacctg

SEQ ID NO: 5261472 - DNA, 25 bp, Homo sapien
cctcccgggcgaagacttcataggc

SEQ ID NO: 5261473 - DNA, 25 bp, Homo sapien
ttcataggcgcccactgggagcagg

SEQ ID NO: 5261474 - DNA, 25 bp, Homo sapien
gagagggacacgttaagacctgcca

SEQ ID NO: 5261475 - DNA, 25 bp, Homo sapien
gatggaaacaaaaggcgcaggcggc

SEQ ID NO: 5261476 - DNA, 25 bp, Homo sapien
gccgtgacggtgaccaacagagcca

SEQ ID NO: 5261477 - DNA, 25 bp, Homo sapien
aacagagccacagcgggcccgctgt

SEQ ID NO: 5261478 - DNA, 25 bp, Homo sapien
aaggtgaccccgtgcgccaggaaga

SEQ ID NO: 5261479 - DNA, 25 bp, Homo sapien
tactccagtaaggtgtgtcccgagc

SEQ ID NO: 5261480 - DNA, 25 bp, Homo sapien
ctgcacgtactccagtaaggtgtgt

SEQ ID NO: 5261481 - DNA, 25 bp, Homo sapien
aggcaaaggtcacagaggcggccag

SEQ ID NO: 5261482 - DNA, 25 bp, Homo sapien
tgaagaaggcagacgtgaagggccc

SEQ ID NO: 5261483 - DNA, 25 bp, Homo sapien
tcggcaccgggacggtgtccacagt

SEQ ID NO: 5261484 - DNA, 25 bp, Homo sapien
acagtgagacatgccgtcacagccc

SEQ ID NO: 5261485 - DNA, 25 bp, Homo sapien
ctgcagcttgctcggcaccgggacg

SEQ ID NO: 5261486 - DNA, 25 bp, Homo sapien
ggtgtccacagtgagacatgccgtc

SEQ ID NO: 5261487 - DNA, 25 bp, Homo sapien
tgcagccgggtgaagagtatttccc

SEQ ID NO: 5261488 - DNA, 25 bp, Homo sapien
gctgacaagcatgtggacgaccaaa

SEQ ID NO: 5261489 - DNA, 25 bp, Homo sapien
catgtggactcgagtatcaggcccg

SEQ ID NO: 5261490 - DNA, 25 bp, Homo sapien
ccttgttagaatacggcctgggaca

SEQ ID NO: 5261491 - DNA, 25 bp, Homo sapien
aagtttgatctcactcctctaagga

SEQ ID NO: 5261492 - DNA, 25 bp, Homo sapien
ggcccacactggtcctagctctgtt

SEQ ID NO: 5261493 - DNA, 25 bp, Homo sapien
cacagtgtgtgagctccactagggc

SEQ ID NO: 5261494 - DNA, 25 bp, Homo sapien
tctaaggatttaacccacagtgtgt

SEQ ID NO: 5261495 - DNA, 25 bp, Homo sapien
aaggcaggtcccaggtgggccgcgg

SEQ ID NO: 5261496 - DNA, 25 bp, Homo sapien
tgtgccaggacaggcgagccaggca

SEQ ID NO: 5261497 - DNA, 25 bp, Homo sapien
ggctcctgggcccaaacacagacag

SEQ ID NO: 5261498 - DNA, 25 bp, Homo sapien
ctgggcccaaacacagacaggacac

SEQ ID NO: 5261499 - DNA, 25 bp, Homo sapien
ggccgtagaacaggttcctctggaa

SEQ ID NO: 5261500 - DNA, 25 bp, Homo sapien
ctttgcaggggtctgggtgtcccct

SEQ ID NO: 5261501 - DNA, 25 bp, Homo sapien
cttccctcggggtgctcggtacttg

SEQ ID NO: 5261502 - DNA, 25 bp, Homo sapien
tgctcggtacttgttcttctggccg

SEQ ID NO: 5261503 - DNA, 25 bp, Homo sapien
cagctggaatgtggcccctcaacac

SEQ ID NO: 5261504 - DNA, 25 bp, Homo sapien
tcagctggaatgtggcccctcaaca

SEQ ID NO: 5261505 - DNA, 25 bp, Homo sapien
agggtccagctacaagcagggccct

SEQ ID NO: 5261506 - DNA, 25 bp, Homo sapien
tcgcacggggctcacacagagcaag

SEQ ID NO: 5261507 - DNA, 25 bp, Homo sapien
gccaggattccctcttagctacaga

SEQ ID NO: 5261508 - DNA, 25 bp, Homo sapien
tccctcttagctacagaaggttcca

SEQ ID NO: 5261509 - DNA, 25 bp, Homo sapien
tgggtcgtgttcagaggcgggcggg

SEQ ID NO: 5261510 - DNA, 25 bp, Homo sapien
gccagttcccggagcgggtgtggga

SEQ ID NO: 5261511 - DNA, 25 bp, Homo sapien
ccagttcccggagcgggtgtgggat

SEQ ID NO: 5261512 - DNA, 25 bp, Homo sapien
atgtgggtcgtgttcagaggcgggc

SEQ ID NO: 5261513 - DNA, 25 bp, Homo sapien
cacccatcgtccgaaggttctggaa

SEQ ID NO: 5261514 - DNA, 25 bp, Homo sapien
tctggaagacgagggagtagaacca

SEQ ID NO: 5261515 - DNA, 25 bp, Homo sapien
ttccaccagcggtgtgaccgggctc

SEQ ID NO: 5261516 - DNA, 25 bp, Homo sapien
ccagggatgacacccatcgtccgaa

SEQ ID NO: 5261517 - DNA, 25 bp, Homo sapien
aagccgtctccctcagatggtttca

SEQ ID NO: 5261518 - DNA, 25 bp, Homo sapien
ttcgctctgccagaaaccacctagg

SEQ ID NO: 5261519 - DNA, 25 bp, Homo sapien
gcttcttgaaaagttcgctctgcca

SEQ ID NO: 5261520 - DNA, 25 bp, Homo sapien
tagggaccacgttagctgccttcct

SEQ ID NO: 5261521 - DNA, 25 bp, Homo sapien
cacctgctccggcatccagcgctgc

SEQ ID NO: 5261522 - DNA, 25 bp, Homo sapien
gaggatgcagaacagcttcttgcag

SEQ ID NO: 5261523 - DNA, 25 bp, Homo sapien
gaagcacctgctccggcatccagcg

SEQ ID NO: 5261524 - DNA, 25 bp, Homo sapien
gaggcagtggaccaagatgcagcaa

SEQ ID NO: 5261525 - DNA, 25 bp, Homo sapien
tgagtcccactgagaaaatcccatg

SEQ ID NO: 5261526 - DNA, 25 bp, Homo sapien
acgggccttctacaccacatgggaa

SEQ ID NO: 5261527 - DNA, 25 bp, Homo sapien
tgtctccggaccatcagggtagggt

SEQ ID NO: 5261528 - DNA, 25 bp, Homo sapien
agttacatcgggtctggtgctccag

SEQ ID NO: 5261529 - DNA, 25 bp, Homo sapien
aatgcaaatacaccccggaggctgt

SEQ ID NO: 5261530 - DNA, 25 bp, Homo sapien
tgattccttcacacacagtgcggcg

SEQ ID NO: 5261531 - DNA, 25 bp, Homo sapien
taatgcattggtcggctgctggcca

SEQ ID NO: 5261532 - DNA, 25 bp, Homo sapien
tattttttcaatacgggagagccag

SEQ ID NO: 5261533 - DNA, 25 bp, Homo sapien
aggaggtccttccacgtcaccatgg

SEQ ID NO: 5261534 - DNA, 25 bp, Homo sapien
catggcgggcacatcgagtggcctt

SEQ ID NO: 5261535 - DNA, 25 bp, Homo sapien
ccatgaattcggtgctgatcgctcc

SEQ ID NO: 5261536 - DNA, 25 bp, Homo sapien
gtgtcatcgtctgccctgagtctgt

SEQ ID NO: 5261537 - DNA, 25 bp, Homo sapien
gtgtttcaggaagtggcccatgccg

SEQ ID NO: 5261538 - DNA, 25 bp, Homo sapien
tgtctaactgggagcaagtggatcc

SEQ ID NO: 5261539 - DNA, 25 bp, Homo sapien
ggatcttgaggtgaaggcggaccca

SEQ ID NO: 5261540 - DNA, 25 bp, Homo sapien
aggtgaaggcggatccccgagtgaa

SEQ ID NO: 5261541 - DNA, 25 bp, Homo sapien
agcaggggacgaagccctcaggcag

SEQ ID NO: 5261542 - DNA, 25 bp, Homo sapien
ccagcccctcttattctgcttagct

SEQ ID NO: 5261543 - DNA, 25 bp, Homo sapien
tgtgcttgtgctgcgggtcacggcc

SEQ ID NO: 5261544 - DNA, 25 bp, Homo sapien
tgtttcttaaagggtcggagcacag

SEQ ID NO: 5261545 - DNA, 25 bp, Homo sapien
tccgcacccaacctgccgctcggga

SEQ ID NO: 5261546 - DNA, 25 bp, Homo sapien
ggtccgcacccaacctgccgctcgg

SEQ ID NO: 5261547 - DNA, 25 bp, Homo sapien
acccaacctgccgctcgggaacctg

SEQ ID NO: 5261548 - DNA, 25 bp, Homo sapien
cgcacccaacctgccgctcgggaac

SEQ ID NO: 5261549 - DNA, 25 bp, Homo sapien
gctcatggacccgatcatctgcagc

SEQ ID NO: 5261550 - DNA, 25 bp, Homo sapien
tacatatccttgctcatggacccga

SEQ ID NO: 5261551 - DNA, 25 bp, Homo sapien
catgatgcgaggaggcaggttggaa

SEQ ID NO: 5261552 - DNA, 25 bp, Homo sapien
ccggctgccatgatgcgaggaggca

SEQ ID NO: 5261553 - DNA, 25 bp, Homo sapien
catgcgggtggtatagggtgagacc

SEQ ID NO: 5261554 - DNA, 25 bp, Homo sapien
tgcgggtggtatagggtgagaccca

SEQ ID NO: 5261555 - DNA, 25 bp, Homo sapien
cagtgacccccttccctcgtccacg

SEQ ID NO: 5261556 - DNA, 25 bp, Homo sapien
ctgcatgcgggtggtatagggtgag

SEQ ID NO: 5261557 - DNA, 25 bp, Homo sapien
aggctccagcacattgaccagggcg

SEQ ID NO: 5261558 - DNA, 25 bp, Homo sapien
tctggaacacgtactggatgccttc

SEQ ID NO: 5261559 - DNA, 25 bp, Homo sapien
cccgagccagagatgaccagtgtga

SEQ ID NO: 5261560 - DNA, 25 bp, Homo sapien
tgccattggccccaaccaggaagga

SEQ ID NO: 5261561 - DNA, 25 bp, Homo sapien
agtgggccgtgagtgtcccgcacac

SEQ ID NO: 5261562 - DNA, 25 bp, Homo sapien
gtgtcccgcacacactgtagaagcc

SEQ ID NO: 5261563 - DNA, 25 bp, Homo sapien
tgagtgtcccgcacacactgtagaa

SEQ ID NO: 5261564 - DNA, 25 bp, Homo sapien
ggccgtgagtgtcccgcacacactg

SEQ ID NO: 5261565 - DNA, 25 bp, Homo sapien
ttggtcatcgggtgcactcgggctc

SEQ ID NO: 5261566 - DNA, 25 bp, Homo sapien
cttggtcatcgggtgcactcgggct

SEQ ID NO: 5261567 - DNA, 25 bp, Homo sapien
ggtccttggtcatcgggtgcactcg

SEQ ID NO: 5261568 - DNA, 25 bp, Homo sapien
ccagggtccttggtcatcgggtgca

SEQ ID NO: 5261569 - DNA, 25 bp, Homo sapien
tggcacagctccaggtagcaggggc

SEQ ID NO: 5261570 - DNA, 25 bp, Homo sapien
caaaccccccatgggtggcacagct

SEQ ID NO: 5261571 - DNA, 25 bp, Homo sapien
ggcaggggccagaacacccccacaa

SEQ ID NO: 5261572 - DNA, 25 bp, Homo sapien
ccacaaaccccccatgggtggcaca

SEQ ID NO: 5261573 - DNA, 25 bp, Homo sapien
gcagagttccccgaagccatcaagg

SEQ ID NO: 5261574 - DNA, 25 bp, Homo sapien
cacgccggtggacgactccccgtgg

SEQ ID NO: 5261575 - DNA, 25 bp, Homo sapien
tcaaggggctgcagcacgccggtgg

SEQ ID NO: 5261576 - DNA, 25 bp, Homo sapien
cagagttccccgaagccatcaaggg

SEQ ID NO: 5261577 - DNA, 25 bp, Homo sapien
gggtcccgcccagggatgccaccga

SEQ ID NO: 5261578 - DNA, 25 bp, Homo sapien
atgccaccgaatccaccaggagcag

SEQ ID NO: 5261579 - DNA, 25 bp, Homo sapien
gggatgccaccgaatccaccaggag

SEQ ID NO: 5261580 - DNA, 25 bp, Homo sapien
gtcccgcccagggatgccaccgaat

SEQ ID NO: 5261581 - DNA, 25 bp, Homo sapien
gcctggatctgaaagctcagtggaa

SEQ ID NO: 5261582 - DNA, 25 bp, Homo sapien
tcttgccgcagtaaggagtgagtgt

SEQ ID NO: 5261583 - DNA, 25 bp, Homo sapien
tgctgggtagttcatggagccgctc

SEQ ID NO: 5261584 - DNA, 25 bp, Homo sapien
gccgaatccgcagcatcggctgctg

SEQ ID NO: 5261585 - DNA, 25 bp, Homo sapien
gatgcctgcctagctaatgggctgg

SEQ ID NO: 5261586 - DNA, 25 bp, Homo sapien
tgctcgggacgggtgagtcccacct

SEQ ID NO: 5261587 - DNA, 25 bp, Homo sapien
cacgaatccgtacacgatagcaggg

SEQ ID NO: 5261588 - DNA, 25 bp, Homo sapien
tcaggcctgagcgttttagcgcagc

SEQ ID NO: 5261589 - DNA, 25 bp, Homo sapien
actgaaggagatgagcgaggtccct

SEQ ID NO: 5261590 - DNA, 25 bp, Homo sapien
gagcccgagtacaggatgtcgatgc

SEQ ID NO: 5261591 - DNA, 25 bp, Homo sapien
gccttctgggagcccgagtacagga

SEQ ID NO: 5261592 - DNA, 25 bp, Homo sapien
cactgaaggagatgagcgaggtccc

SEQ ID NO: 5261593 - DNA, 25 bp, Homo sapien
ctggtcgtcacagccccagaagttg

SEQ ID NO: 5261594 - DNA, 25 bp, Homo sapien
aggagaagggcttcgtcttgcggga

SEQ ID NO: 5261595 - DNA, 25 bp, Homo sapien
tgggctggtcgtcacagccccagaa

SEQ ID NO: 5261596 - DNA, 25 bp, Homo sapien
cgtcttgcgggagtacatcttcttt

SEQ ID NO: 5261597 - DNA, 25 bp, Homo sapien
gatgacggggattgtgtgatggtac

SEQ ID NO: 5261598 - DNA, 25 bp, Homo sapien
ctctctcaggctgtacaggctgatg

SEQ ID NO: 5261599 - DNA, 25 bp, Homo sapien
ctcaggctgtacaggctgatgacgg

SEQ ID NO: 5261600 - DNA, 25 bp, Homo sapien
tgttccgcaatgagggccaggctct

SEQ ID NO: 5261601 - DNA, 25 bp, Homo sapien
gcgccctcgacaatccagccagtgg

SEQ ID NO: 5261602 - DNA, 25 bp, Homo sapien
gttccttctctgcaggccgcgccct

SEQ ID NO: 5261603 - DNA, 25 bp, Homo sapien
ctcctcctgtggagtgcagcccatg

SEQ ID NO: 5261604 - DNA, 25 bp, Homo sapien
cctcgacaatccagccagtggccct

SEQ ID NO: 5261605 - DNA, 25 bp, Homo sapien
gccctggcccgtcttctctgcgcat

SEQ ID NO: 5261606 - DNA, 25 bp, Homo sapien
ttctctgcgcatgtgcccctgcaat

SEQ ID NO: 5261607 - DNA, 25 bp, Homo sapien
tggcccgtcttctctgcgcatgtgc

SEQ ID NO: 5261608 - DNA, 25 bp, Homo sapien
agctctcatggccaccccaggtggg

SEQ ID NO: 5261609 - DNA, 25 bp, Homo sapien
gagaagagtggagagtgccttgcag

SEQ ID NO: 5261610 - DNA, 25 bp, Homo sapien
ccctggagcccccagtttgactttg

SEQ ID NO: 5261611 - DNA, 25 bp, Homo sapien
aagccccgccctctgtggtgcggga

SEQ ID NO: 5261612 - DNA, 25 bp, Homo sapien
tggtgcgggaggaagaacctgactc

SEQ ID NO: 5261613 - DNA, 25 bp, Homo sapien
gcctgcaggcgcccatgcagatacg

SEQ ID NO: 5261614 - DNA, 25 bp, Homo sapien
cctcgcggtgctggcgccagctgtt

SEQ ID NO: 5261615 - DNA, 25 bp, Homo sapien
aggcgcccatgcagatacgccgcgg

SEQ ID NO: 5261616 - DNA, 25 bp, Homo sapien
tgctggcgccagctgttctccaggc

SEQ ID NO: 5261617 - DNA, 25 bp, Homo sapien
gacgtagctgacgatgtctctccag

SEQ ID NO: 5261618 - DNA, 25 bp, Homo sapien
gtctctccagtcatagccagcgggt

SEQ ID NO: 5261619 - DNA, 25 bp, Homo sapien
catgatctcaatgtcgaagtggtct

SEQ ID NO: 5261620 - DNA, 25 bp, Homo sapien
tggtgactgtgggaagccggagcgc

SEQ ID NO: 5261621 - DNA, 25 bp, Homo sapien
acgcggtccacattctcgcgggtgg

SEQ ID NO: 5261622 - DNA, 25 bp, Homo sapien
gtcacgcggtccacattctcgcggg

SEQ ID NO: 5261623 - DNA, 25 bp, Homo sapien
cggtccacattctcgcgggtggcat

SEQ ID NO: 5261624 - DNA, 25 bp, Homo sapien
gggcctccgtcacgcggtccacatt

SEQ ID NO: 5261625 - DNA, 25 bp, Homo sapien
gcactgggttttgcgcccaagtgga

SEQ ID NO: 5261626 - DNA, 25 bp, Homo sapien
aaacattcccgggaggctcatggcc

SEQ ID NO: 5261627 - DNA, 25 bp, Homo sapien
ttattaaacattcccgggaggctca

SEQ ID NO: 5261628 - DNA, 25 bp, Homo sapien
aggcctggaggaccttgcagggtct

SEQ ID NO: 5261629 - DNA, 25 bp, Homo sapien
tatatggccacacgaaggcttgagt

SEQ ID NO: 5261630 - DNA, 25 bp, Homo sapien
gttaagcctattgtatgaccctgca

SEQ ID NO: 5261631 - DNA, 25 bp, Homo sapien
tacaaacggccgatagctcatgaga

SEQ ID NO: 5261632 - DNA, 25 bp, Homo sapien
gccaggctgatctatggtcacagaa

SEQ ID NO: 5261633 - DNA, 25 bp, Homo sapien
ggggcagcgacttgctcaggccaca

SEQ ID NO: 5261634 - DNA, 25 bp, Homo sapien
aggcggggcagcgacttgctcaggc

SEQ ID NO: 5261635 - DNA, 25 bp, Homo sapien
cccaggcggggcagcgacttgctca

SEQ ID NO: 5261636 - DNA, 25 bp, Homo sapien
tgtccgttgaggacctggagcccag

SEQ ID NO: 5261637 - DNA, 25 bp, Homo sapien
gggccatggctagactagaagaacc

SEQ ID NO: 5261638 - DNA, 25 bp, Homo sapien
gccatggctagactagaagaaccca

SEQ ID NO: 5261639 - DNA, 25 bp, Homo sapien
ccagggccatggctagactagaaga

SEQ ID NO: 5261640 - DNA, 25 bp, Homo sapien
ggtgtccattatggggctcccagac

SEQ ID NO: 5261641 - DNA, 25 bp, Homo sapien
gatgaagtcaggtgcctggcaggca

SEQ ID NO: 5261642 - DNA, 25 bp, Homo sapien
ctctgtggctcggagtctgggcctc

SEQ ID NO: 5261643 - DNA, 25 bp, Homo sapien
tcccaccctgtggaatcggaaagga

SEQ ID NO: 5261644 - DNA, 25 bp, Homo sapien
cggctgtccctacagacgcagagct

SEQ ID NO: 5261645 - DNA, 25 bp, Homo sapien
atcacggtgtccagccccagtaggg

SEQ ID NO: 5261646 - DNA, 25 bp, Homo sapien
ctggatcacggtgtccagccccagt

SEQ ID NO: 5261647 - DNA, 25 bp, Homo sapien
gggaggcgtccccattgccaggctc

SEQ ID NO: 5261648 - DNA, 25 bp, Homo sapien
ggatcacggtgtccagccccagtag

SEQ ID NO: 5261649 - DNA, 25 bp, Homo sapien
gggacgccggccacctgagcatcca

SEQ ID NO: 5261650 - DNA, 25 bp, Homo sapien
gacgccggccacctgagcatccaca

SEQ ID NO: 5261651 - DNA, 25 bp, Homo sapien
agggacgccggccacctgagcatcc

SEQ ID NO: 5261652 - DNA, 25 bp, Homo sapien
ccagggacgccggccacctgagcat

SEQ ID NO: 5261653 - DNA, 25 bp, Homo sapien
gggtaatggcatcaagatctcaatc

SEQ ID NO: 5261654 - DNA, 25 bp, Homo sapien
cctgcgtagcctccagatgagtttc

SEQ ID NO: 5261655 - DNA, 25 bp, Homo sapien
aagatctcaatcactacagcaaaaa

SEQ ID NO: 5261656 - DNA, 25 bp, Homo sapien
ttcactggggcctgcgtagcctcca

SEQ ID NO: 5261657 - DNA, 25 bp, Homo sapien
tggagattccgaggaagggcacacc

SEQ ID NO: 5261658 - DNA, 25 bp, Homo sapien
cccagggacagaggttgagagtttc

SEQ ID NO: 5261659 - DNA, 25 bp, Homo sapien
gggactctgcgccatgcttctccat

SEQ ID NO: 5261660 - DNA, 25 bp, Homo sapien
tgtgctgggttcctcgtccgggact

SEQ ID NO: 5261661 - DNA, 25 bp, Homo sapien
atcaaaattcaagccaaggaacggg

SEQ ID NO: 5261662 - DNA, 25 bp, Homo sapien
acaatttcctagaaaaatagcacaa

SEQ ID NO: 5261663 - DNA, 25 bp, Homo sapien
gacaatttcctagaaaaatagcaca

SEQ ID NO: 5261664 - DNA, 25 bp, Homo sapien
atagcacaaatcaaaattcaagcca

SEQ ID NO: 5261665 - DNA, 25 bp, Homo sapien
tgtaggtctgcaccgaaaaacccga

SEQ ID NO: 5261666 - DNA, 25 bp, Homo sapien
cgagtcttggctttatctggaggcc

SEQ ID NO: 5261667 - DNA, 25 bp, Homo sapien
gaggccacgctcttgcgctgattcc

SEQ ID NO: 5261668 - DNA, 25 bp, Homo sapien
gcgcctggggcatcaccttggagat

SEQ ID NO: 5261669 - DNA, 25 bp, Homo sapien
gccggccacgatctcacggatgcgg

SEQ ID NO: 5261670 - DNA, 25 bp, Homo sapien
ggtgggcgaggcctgccggccttcc

SEQ ID NO: 5261671 - DNA, 25 bp, Homo sapien
gtcagcgcccggtcttccctgctgg

SEQ ID NO: 5261672 - DNA, 25 bp, Homo sapien
cggccttccccacgcacggtcagcg

SEQ ID NO: 5261673 - DNA, 25 bp, Homo sapien
gcccaggactgtcccccacaccatc

SEQ ID NO: 5261674 - DNA, 25 bp, Homo sapien
cttggccagccccgggcccaggact

SEQ ID NO: 5261675 - DNA, 25 bp, Homo sapien
ggccagccccgggcccaggactgtc

SEQ ID NO: 5261676 - DNA, 25 bp, Homo sapien
gggcccaggactgtcccccacacca

SEQ ID NO: 5261677 - DNA, 25 bp, Homo sapien
tggccagcaccgggcccaggactgt

SEQ ID NO: 5261678 - DNA, 25 bp, Homo sapien
cagcaccgggcccaggactgtcccc

SEQ ID NO: 5261679 - DNA, 25 bp, Homo sapien
gccagcaccgggcccaggactgtcc

SEQ ID NO: 5261680 - DNA, 25 bp, Homo sapien
cttggccagcaccgggcccaggact

SEQ ID NO: 5261681 - DNA, 25 bp, Homo sapien
gcgagcccaggactgtcccccacgc

SEQ ID NO: 5261682 - DNA, 25 bp, Homo sapien
gagcccaggactgtcccccacgccg

SEQ ID NO: 5261683 - DNA, 25 bp, Homo sapien
tggccagccgcgagcccaggactgt

SEQ ID NO: 5261684 - DNA, 25 bp, Homo sapien
cttggccagccgcgagcccaggact

SEQ ID NO: 5261685 - DNA, 25 bp, Homo sapien
cacacggcacctgctggccagctca

SEQ ID NO: 5261686 - DNA, 25 bp, Homo sapien
tcatctcgctcggcgctggcctggg

SEQ ID NO: 5261687 - DNA, 25 bp, Homo sapien
ctgctcgctgaccacacggcacctg

SEQ ID NO: 5261688 - DNA, 25 bp, Homo sapien
gctggccagctcatctcgctcggcg

SEQ ID NO: 5261689 - DNA, 25 bp, Homo sapien
cctccagacggccaagggcctcctc

SEQ ID NO: 5261690 - DNA, 25 bp, Homo sapien
gggcctcctccagatccacgctgtg

SEQ ID NO: 5261691 - DNA, 25 bp, Homo sapien
agctgctcccgcaggagcgcgttca

SEQ ID NO: 5261692 - DNA, 25 bp, Homo sapien
aggagcgcgttcacctgacagaggc

SEQ ID NO: 5261693 - DNA, 25 bp, Homo sapien
ggcgctgcacgctgcccgtcatccc

SEQ ID NO: 5261694 - DNA, 25 bp, Homo sapien
gctcccggcccagcgcgtcattggc

SEQ ID NO: 5261695 - DNA, 25 bp, Homo sapien
gcagcacatcttccggggggcccgt

SEQ ID NO: 5261696 - DNA, 25 bp, Homo sapien
ctgggcgtccagtccccctttgctg

SEQ ID NO: 5261697 - DNA, 25 bp, Homo sapien
ccgtggtgcccatagcatgcagggg

SEQ ID NO: 5261698 - DNA, 25 bp, Homo sapien
ctggcgcagcacatcttccgggggg

SEQ ID NO: 5261699 - DNA, 25 bp, Homo sapien
ccagcggaaacaatagaacgagacc

SEQ ID NO: 5261700 - DNA, 25 bp, Homo sapien
tctgtgtccattccacctggctgta

SEQ ID NO: 5261701 - DNA, 25 bp, Homo sapien
gaacgagaccttgaagaacttcagg

SEQ ID NO: 5261702 - DNA, 25 bp, Homo sapien
gtagagcactcacatcctgcccgtt

SEQ ID NO: 5261703 - DNA, 25 bp, Homo sapien
ctccacaggaggaggaggtcccggg

SEQ ID NO: 5261704 - DNA, 25 bp, Homo sapien
gtctccacaggaggaggaggtcccg

SEQ ID NO: 5261705 - DNA, 25 bp, Homo sapien
ctgtctccacaggaggaggaggtcc

SEQ ID NO: 5261706 - DNA, 25 bp, Homo sapien
acaggaggaggaggtcccggggctg

SEQ ID NO: 5261707 - DNA, 25 bp, Homo sapien
ctctcagtggctacacgcagctcgg

SEQ ID NO: 5261708 - DNA, 25 bp, Homo sapien
tcagtggctacacgcagctcggcca

SEQ ID NO: 5261709 - DNA, 25 bp, Homo sapien
tctcagtggctacacgcagctcggc

SEQ ID NO: 5261710 - DNA, 25 bp, Homo sapien
gtggctacacgcagctcggccaggt

SEQ ID NO: 5261711 - DNA, 25 bp, Homo sapien
ggccgacagccgcaggttggagtcg

SEQ ID NO: 5261712 - DNA, 25 bp, Homo sapien
ttcaggcaggcggtgtgcaggcggc

SEQ ID NO: 5261713 - DNA, 25 bp, Homo sapien
tctccccagccttgtcccgaagctg

SEQ ID NO: 5261714 - DNA, 25 bp, Homo sapien
ggctgtcctggccgtgtctgcctgc

SEQ ID NO: 5261715 - DNA, 25 bp, Homo sapien
caggttctgcaggtcggttctgagg

SEQ ID NO: 5261716 - DNA, 25 bp, Homo sapien
gagggcagcgatggtcttcgccttc

SEQ ID NO: 5261717 - DNA, 25 bp, Homo sapien
ggttctgagggcagcgatggtcttc

SEQ ID NO: 5261718 - DNA, 25 bp, Homo sapien
gatggtcttcgccttctgctcattc

SEQ ID NO: 5261719 - DNA, 25 bp, Homo sapien
cacacagccacccccgtcctgccca

SEQ ID NO: 5261720 - DNA, 25 bp, Homo sapien
acacagccacccccgtcctgcccac

SEQ ID NO: 5261721 - DNA, 25 bp, Homo sapien
ccctgccacacagccacccccgtcc

SEQ ID NO: 5261722 - DNA, 25 bp, Homo sapien
tgccacacagccacccccgtcctgc

SEQ ID NO: 5261723 - DNA, 25 bp, Homo sapien
gctccaggcaccgggcgtcctcctg

SEQ ID NO: 5261724 - DNA, 25 bp, Homo sapien
gggctcctcagtgggcgccgtggct

SEQ ID NO: 5261725 - DNA, 25 bp, Homo sapien
ccgtggctcccccaattcagtgatg

SEQ ID NO: 5261726 - DNA, 25 bp, Homo sapien
tgtgtggtggggacgccccttgatg

SEQ ID NO: 5261727 - DNA, 25 bp, Homo sapien
tctctatggctgcccgcatggcctg

SEQ ID NO: 5261728 - DNA, 25 bp, Homo sapien
tctatggctgcccgcatggcctgca

SEQ ID NO: 5261729 - DNA, 25 bp, Homo sapien
atggctgcccgcatggcctgcagtg

SEQ ID NO: 5261730 - DNA, 25 bp, Homo sapien
tatggctgcccgcatggcctgcagt

SEQ ID NO: 5261731 - DNA, 25 bp, Homo sapien
taagttgtgggcctctctggcctag

SEQ ID NO: 5261732 - DNA, 25 bp, Homo sapien
gcaggctttgcccaccgaggcccac

SEQ ID NO: 5261733 - DNA, 25 bp, Homo sapien
agggcttgcgactccccagaaagga

SEQ ID NO: 5261734 - DNA, 25 bp, Homo sapien
cagaaaggacacccccgacactggg

SEQ ID NO: 5261735 - DNA, 25 bp, Homo sapien
tcccgccggctttcggacagctgct

SEQ ID NO: 5261736 - DNA, 25 bp, Homo sapien
tggagcttctgtgcggcccacagct

SEQ ID NO: 5261737 - DNA, 25 bp, Homo sapien
atgcccggcactgctgcacctcgag

SEQ ID NO: 5261738 - DNA, 25 bp, Homo sapien
ggcactgctgcacctcgagcctctg

SEQ ID NO: 5261739 - DNA, 25 bp, Homo sapien
gcagcatctgccttccctttcagct

SEQ ID NO: 5261740 - DNA, 25 bp, Homo sapien
gtctccagtgccctgcagctccgct

SEQ ID NO: 5261741 - DNA, 25 bp, Homo sapien
cgcatctgcagcatctgccttccct

SEQ ID NO: 5261742 - DNA, 25 bp, Homo sapien
agctccgctccctccgcagagccag

SEQ ID NO: 5261743 - DNA, 25 bp, Homo sapien
ccggaccgatgccagctcctctctg

SEQ ID NO: 5261744 - DNA, 25 bp, Homo sapien
gcgctgcgcagtccctccctctcac

SEQ ID NO: 5261745 - DNA, 25 bp, Homo sapien
ctctccacgacatcccgctgcagct

SEQ ID NO: 5261746 - DNA, 25 bp, Homo sapien
tctctgagcccggagaccttctcct

SEQ ID NO: 5261747 - DNA, 25 bp, Homo sapien
gggatgccagggagggaccttcagc

SEQ ID NO: 5261748 - DNA, 25 bp, Homo sapien
atgccagggagggaccttcagcttc

SEQ ID NO: 5261749 - DNA, 25 bp, Homo sapien
cagggagggaccttcagcttccagg

SEQ ID NO: 5261750 - DNA, 25 bp, Homo sapien
ggagggaccttcagcttccagggca

SEQ ID NO: 5261751 - DNA, 25 bp, Homo sapien
aagctccaggtccgcattgctgcac

SEQ ID NO: 5261752 - DNA, 25 bp, Homo sapien
tccaggtccgcattgctgcactcgg

SEQ ID NO: 5261753 - DNA, 25 bp, Homo sapien
agccgcctcacaagaagctccaggt

SEQ ID NO: 5261754 - DNA, 25 bp, Homo sapien
cttcagccgcctcacaagaagctcc

SEQ ID NO: 5261755 - DNA, 25 bp, Homo sapien
gccaacccctccatcaaggcggcca

SEQ ID NO: 5261756 - DNA, 25 bp, Homo sapien
catcaaggcggccattgcggccagg

SEQ ID NO: 5261757 - DNA, 25 bp, Homo sapien
tccatcaaggcggccattgcggcca

SEQ ID NO: 5261758 - DNA, 25 bp, Homo sapien
cccctccatcaaggcggccattgcg

SEQ ID NO: 5261759 - DNA, 25 bp, Homo sapien
tccaggcgtccgcaggcctgctgca

SEQ ID NO: 5261760 - DNA, 25 bp, Homo sapien
ctgccgctgctccaggcgtccgcag

SEQ ID NO: 5261761 - DNA, 25 bp, Homo sapien
cagagtcttccgctgttcccgcagc

SEQ ID NO: 5261762 - DNA, 25 bp, Homo sapien
gctccagagtcttccgctgttcccg

SEQ ID NO: 5261763 - DNA, 25 bp, Homo sapien
tttgaattgactaataataaaaaca

SEQ ID NO: 5261764 - DNA, 25 bp, Homo sapien
attattaggatgcagatgaagaaac

SEQ ID NO: 5261765 - DNA, 25 bp, Homo sapien
taggccatatatgtccaaataatcc

SEQ ID NO: 5261766 - DNA, 25 bp, Homo sapien
catatatgtccaaataatccacggg

SEQ ID NO: 5261767 - DNA, 25 bp, Homo sapien
tccagggcctgtttctggcatgtga

SEQ ID NO: 5261768 - DNA, 25 bp, Homo sapien
cctccagggcctgtttctggcatgt

SEQ ID NO: 5261769 - DNA, 25 bp, Homo sapien
ctcctccagggcctgtttctggcat

SEQ ID NO: 5261770 - DNA, 25 bp, Homo sapien
ccagggcctgtttctggcatgtgac

SEQ ID NO: 5261771 - DNA, 25 bp, Homo sapien
ctcttcagctgcgagccggccctgc

SEQ ID NO: 5261772 - DNA, 25 bp, Homo sapien
ctgcctcttcagctgcgagccggcc

SEQ ID NO: 5261773 - DNA, 25 bp, Homo sapien
gcctcttcagctgcgagccggccct

SEQ ID NO: 5261774 - DNA, 25 bp, Homo sapien
gctgcctcttcagctgcgagccggc

SEQ ID NO: 5261775 - DNA, 25 bp, Homo sapien
ttgcaaggcctgccgcgcgagtcct

SEQ ID NO: 5261776 - DNA, 25 bp, Homo sapien
gctcctgcagctttgtggccagctg

SEQ ID NO: 5261777 - DNA, 25 bp, Homo sapien
ctgccgcgcgagtcctgcgctccgg

SEQ ID NO: 5261778 - DNA, 25 bp, Homo sapien
ctgttgggcctcaaggaggctgctc

SEQ ID NO: 5261779 - DNA, 25 bp, Homo sapien
gtcgctggagccgcaccgtgtcctg

SEQ ID NO: 5261780 - DNA, 25 bp, Homo sapien
acctcccagtcactttgtagctgct

SEQ ID NO: 5261781 - DNA, 25 bp, Homo sapien
gccgcaccgtgtcctgccgcagctt

SEQ ID NO: 5261782 - DNA, 25 bp, Homo sapien
ccagtcactttgtagctgctccatt

SEQ ID NO: 5261783 - DNA, 25 bp, Homo sapien
tgccagggcctctcggtgggccaac

SEQ ID NO: 5261784 - DNA, 25 bp, Homo sapien
gctgtgccagggcctctcggtgggc

SEQ ID NO: 5261785 - DNA, 25 bp, Homo sapien
gccagggcctctcggtgggccaacg

SEQ ID NO: 5261786 - DNA, 25 bp, Homo sapien
tgtgccagggcctctcggtgggcca

SEQ ID NO: 5261787 - DNA, 25 bp, Homo sapien
tgcatcttgtgctccagttggagaa

SEQ ID NO: 5261788 - DNA, 25 bp, Homo sapien
ggagaaggctctcgtcccgctcctg

SEQ ID NO: 5261789 - DNA, 25 bp, Homo sapien
gttggagaaggctctcgtcccgctc

SEQ ID NO: 5261790 - DNA, 25 bp, Homo sapien
ctccagttggagaaggctctcgtcc

SEQ ID NO: 5261791 - DNA, 25 bp, Homo sapien
tgtacccgctctagcgtcctcctgg

SEQ ID NO: 5261792 - DNA, 25 bp, Homo sapien
tcctgctgtacccgctctagcgtcc

SEQ ID NO: 5261793 - DNA, 25 bp, Homo sapien
gctgtacccgctctagcgtcctcct

SEQ ID NO: 5261794 - DNA, 25 bp, Homo sapien
ctgctgtacccgctctagcgtcctc

SEQ ID NO: 5261795 - DNA, 25 bp, Homo sapien
tggtctccctctgatgggctgtgat

SEQ ID NO: 5261796 - DNA, 25 bp, Homo sapien
ttcagctcctcagtcgtggcactga

SEQ ID NO: 5261797 - DNA, 25 bp, Homo sapien
gtcctggaggctctcgcgtagggcc

SEQ ID NO: 5261798 - DNA, 25 bp, Homo sapien
ccgctcagccgctaggtcctggagg

SEQ ID NO: 5261799 - DNA, 25 bp, Homo sapien
gaaaagcaacagtacgtccttctcg

SEQ ID NO: 5261800 - DNA, 25 bp, Homo sapien
ccgcagctcgctgttgaaaagcaac

SEQ ID NO: 5261801 - DNA, 25 bp, Homo sapien
tcctgttcggccctgcagatggtgg

SEQ ID NO: 5261802 - DNA, 25 bp, Homo sapien
agtacgtccttctcgcgggcctcgt

SEQ ID NO: 5261803 - DNA, 25 bp, Homo sapien
gcctcctgctgcaacgccgcctggg

SEQ ID NO: 5261804 - DNA, 25 bp, Homo sapien
cctgacgggcgtccccccctgcctg

SEQ ID NO: 5261805 - DNA, 25 bp, Homo sapien
ctcctgctgcaacgccgcctgggcc

SEQ ID NO: 5261806 - DNA, 25 bp, Homo sapien
tgtctgtggagttcccggagctcct

SEQ ID NO: 5261807 - DNA, 25 bp, Homo sapien
ctgggacctcctcggaacctccttg

SEQ ID NO: 5261808 - DNA, 25 bp, Homo sapien
gcgagcactgcgcctgcagctcatg

SEQ ID NO: 5261809 - DNA, 25 bp, Homo sapien
cgagcactgcgcctgcagctcatgg

SEQ ID NO: 5261810 - DNA, 25 bp, Homo sapien
tccttccgggcaccctcgtgcttgg

SEQ ID NO: 5261811 - DNA, 25 bp, Homo sapien
cttccgggcaccctcgtgcttggcc

SEQ ID NO: 5261812 - DNA, 25 bp, Homo sapien
aggccacggcggagcgtggagcaca

SEQ ID NO: 5261813 - DNA, 25 bp, Homo sapien
tgacaggcctggtccaggcgagcct

SEQ ID NO: 5261814 - DNA, 25 bp, Homo sapien
ccaggctgtggattcggtgacaggc

SEQ ID NO: 5261815 - DNA, 25 bp, Homo sapien
gcgagcctggagagcatcagccaca

SEQ ID NO: 5261816 - DNA, 25 bp, Homo sapien
tgggcgagggccatcggaggggcga

SEQ ID NO: 5261817 - DNA, 25 bp, Homo sapien
atgagctctgagctgcggcctccgg

SEQ ID NO: 5261818 - DNA, 25 bp, Homo sapien
gcttctgcacaaagtcccgcaggat

SEQ ID NO: 5261819 - DNA, 25 bp, Homo sapien
gctgggcttcccggagcttctgcac

SEQ ID NO: 5261820 - DNA, 25 bp, Homo sapien
tcagggtcgccatctggatgcggga

SEQ ID NO: 5261821 - DNA, 25 bp, Homo sapien
ctgcctcgctcagccggctgctcag

SEQ ID NO: 5261822 - DNA, 25 bp, Homo sapien
tgggcccgggcacacctgcactctg

SEQ ID NO: 5261823 - DNA, 25 bp, Homo sapien
tcgccatctggatgcgggagtcatc

SEQ ID NO: 5261824 - DNA, 25 bp, Homo sapien
tggcctgccgcacgcacgctcgcca

SEQ ID NO: 5261825 - DNA, 25 bp, Homo sapien
gccgcacgcacgctcgccaggtgct

SEQ ID NO: 5261826 - DNA, 25 bp, Homo sapien
ttctcctggcctgccgcacgcacgc

SEQ ID NO: 5261827 - DNA, 25 bp, Homo sapien
cttctcctggcctgccgcacgcacg

SEQ ID NO: 5261828 - DNA, 25 bp, Homo sapien
gatacctcagccttctggcacctgt

SEQ ID NO: 5261829 - DNA, 25 bp, Homo sapien
cctggcgcagcgtttccagttgctc

SEQ ID NO: 5261830 - DNA, 25 bp, Homo sapien
gcaggggctccagcgatacctcagc

SEQ ID NO: 5261831 - DNA, 25 bp, Homo sapien
gctccaagttggtgagctgttcttc

SEQ ID NO: 5261832 - DNA, 25 bp, Homo sapien
gcccgccgctgagcctctgcggcct

SEQ ID NO: 5261833 - DNA, 25 bp, Homo sapien
cgctgagcctctgcggcctgcagag

SEQ ID NO: 5261834 - DNA, 25 bp, Homo sapien
ccgcctcctgcccgccgctgagcct

SEQ ID NO: 5261835 - DNA, 25 bp, Homo sapien
cctcctgcccgccgctgagcctctg

SEQ ID NO: 5261836 - DNA, 25 bp, Homo sapien
cgagctgagcgcgcagcgccgcgag

SEQ ID NO: 5261837 - DNA, 25 bp, Homo sapien
cgctcggtgcgcagcgccgccgtct

SEQ ID NO: 5261838 - DNA, 25 bp, Homo sapien
agctgagcgcgcagcgccgcgagct

SEQ ID NO: 5261839 - DNA, 25 bp, Homo sapien
ctgtgcgagctgagcgcgcagcgcc

SEQ ID NO: 5261840 - DNA, 25 bp, Homo sapien
cacccctggggaggggctatctcca

SEQ ID NO: 5261841 - DNA, 25 bp, Homo sapien
gggaggggctatctccaccatgagc

SEQ ID NO: 5261842 - DNA, 25 bp, Homo sapien
aggggctatctccaccatgagcagg

SEQ ID NO: 5261843 - DNA, 25 bp, Homo sapien
tggggaggggctatctccaccatga

SEQ ID NO: 5261844 - DNA, 25 bp, Homo sapien
ccttgatcttggcggccactctgag

SEQ ID NO: 5261845 - DNA, 25 bp, Homo sapien
tgattttgcctcagggctccgtcca

SEQ ID NO: 5261846 - DNA, 25 bp, Homo sapien
gctgattttgcctcagggctccgtc

SEQ ID NO: 5261847 - DNA, 25 bp, Homo sapien
ttttgcctcagggctccgtccacct

SEQ ID NO: 5261848 - DNA, 25 bp, Homo sapien
gattttgcctcagggctccgtccac

SEQ ID NO: 5261849 - DNA, 25 bp, Homo sapien
gcctggggtatgcagagctccactg

SEQ ID NO: 5261850 - DNA, 25 bp, Homo sapien
cccaggcctggggtatgcagagctc

SEQ ID NO: 5261851 - DNA, 25 bp, Homo sapien
caggcctggggtatgcagagctcca

SEQ ID NO: 5261852 - DNA, 25 bp, Homo sapien
gcagagctccactggcccagttgac

SEQ ID NO: 5261853 - DNA, 25 bp, Homo sapien
tgccctctgccggtgttgacctggc

SEQ ID NO: 5261854 - DNA, 25 bp, Homo sapien
agggccgcacagaatcccagggcag

SEQ ID NO: 5261855 - DNA, 25 bp, Homo sapien
ctgagggccgcacagaatcccaggg

SEQ ID NO: 5261856 - DNA, 25 bp, Homo sapien
gggtgtttcacctgtccttgtgggc

SEQ ID NO: 5261857 - DNA, 25 bp, Homo sapien
gggtccattcttgggactccagggc

SEQ ID NO: 5261858 - DNA, 25 bp, Homo sapien
tggtgggtccattcttgggactcca

SEQ ID NO: 5261859 - DNA, 25 bp, Homo sapien
gctggtgggtccattcttgggactc

SEQ ID NO: 5261860 - DNA, 25 bp, Homo sapien
tcttccagcacctttacctgctgct

SEQ ID NO: 5261861 - DNA, 25 bp, Homo sapien
gccgaggtgggcctgttgccgccac

SEQ ID NO: 5261862 - DNA, 25 bp, Homo sapien
cacttcctggtccagttgctccttc

SEQ ID NO: 5261863 - DNA, 25 bp, Homo sapien
ccgaggtgggcctgttgccgccact

SEQ ID NO: 5261864 - DNA, 25 bp, Homo sapien
tggccttgcaggacattatgttttt

SEQ ID NO: 5261865 - DNA, 25 bp, Homo sapien
gacattatgtttttggctccggttg

SEQ ID NO: 5261866 - DNA, 25 bp, Homo sapien
tatgtttttggctccggttggtgga

SEQ ID NO: 5261867 - DNA, 25 bp, Homo sapien
caggacattatgtttttggctccgg

SEQ ID NO: 5261868 - DNA, 25 bp, Homo sapien
cacccttaggccagagtccttgcga

SEQ ID NO: 5261869 - DNA, 25 bp, Homo sapien
gagaacaagtcactctgagcaacgg

SEQ ID NO: 5261870 - DNA, 25 bp, Homo sapien
tgaccacctataaagcatgcggccc

SEQ ID NO: 5261871 - DNA, 25 bp, Homo sapien
catgcggccctttggagaggagaac

SEQ ID NO: 5261872 - DNA, 25 bp, Homo sapien
cacaactgggaaccttgaacttctg

SEQ ID NO: 5261873 - DNA, 25 bp, Homo sapien
tggagggaccgatgctgagtctcct

SEQ ID NO: 5261874 - DNA, 25 bp, Homo sapien
cagggaagggacatgcctactaagt

SEQ ID NO: 5261875 - DNA, 25 bp, Homo sapien
agggaggcgtggacaccgcattccc

SEQ ID NO: 5261876 - DNA, 25 bp, Homo sapien
ctgtgacgctgagaaatcagctggg

SEQ ID NO: 5261877 - DNA, 25 bp, Homo sapien
cgagctgtctcatcacgggtgcctt

SEQ ID NO: 5261878 - DNA, 25 bp, Homo sapien
tgaaactgccgagagcgagctgtct

SEQ ID NO: 5261879 - DNA, 25 bp, Homo sapien
ccagggcaaggagggtcctgaaact

SEQ ID NO: 5261880 - DNA, 25 bp, Homo sapien
tctcgccgcagctccgcagaggaaa

SEQ ID NO: 5261881 - DNA, 25 bp, Homo sapien
gctgggggactaggctgcgcgcggg

SEQ ID NO: 5261882 - DNA, 25 bp, Homo sapien
cgcagctccgcagaggaaagcgccg

SEQ ID NO: 5261883 - DNA, 25 bp, Homo sapien
gagcagggcgctgggggactaggct

SEQ ID NO: 5261884 - DNA, 25 bp, Homo sapien
ctcggcgccgaacgggtagaagtcg

SEQ ID NO: 5261885 - DNA, 25 bp, Homo sapien
tcggcaccgaagaacgggaagggca

SEQ ID NO: 5261886 - DNA, 25 bp, Homo sapien
tagaagtcggcaagggccaccgcgc

SEQ ID NO: 5261887 - DNA, 25 bp, Homo sapien
gggaagggcaccgagagcggccgca

SEQ ID NO: 5261888 - DNA, 25 bp, Homo sapien
gagagtctgagcctgagcggccagc

SEQ ID NO: 5261889 - DNA, 25 bp, Homo sapien
gagtcctgtttggagagtctgagcc

SEQ ID NO: 5261890 - DNA, 25 bp, Homo sapien
tcattccctgggctgccataagggc

SEQ ID NO: 5261891 - DNA, 25 bp, Homo sapien
gccatggagacagaaccggcactcg

SEQ ID NO: 5261892 - DNA, 25 bp, Homo sapien
gtgggaggcgcactagagggcatgt

SEQ ID NO: 5261893 - DNA, 25 bp, Homo sapien
tgagcaggtgtggaaaacgcagtgg

SEQ ID NO: 5261894 - DNA, 25 bp, Homo sapien
cgctgtggatggtgttggcagttgt

SEQ ID NO: 5261895 - DNA, 25 bp, Homo sapien
ggtgggaggcgcactagagggcatg

SEQ ID NO: 5261896 - DNA, 25 bp, Homo sapien
cctggcccaaatgcttaaggagcct

SEQ ID NO: 5261897 - DNA, 25 bp, Homo sapien
gagttctgttcggatggtgccaatg

SEQ ID NO: 5261898 - DNA, 25 bp, Homo sapien
catacctcaagtggacaggcctcct

SEQ ID NO: 5261899 - DNA, 25 bp, Homo sapien
gggccaacgctgagcaccattctgt

SEQ ID NO: 5261900 - DNA, 25 bp, Homo sapien
ttcacccacggcagggtgtaactgc

SEQ ID NO: 5261901 - DNA, 25 bp, Homo sapien
cccacggcagggtgtaactgcgaat

SEQ ID NO: 5261902 - DNA, 25 bp, Homo sapien
ctgccacctccgggctgtgctcagt

SEQ ID NO: 5261903 - DNA, 25 bp, Homo sapien
tgagtcaggtggtacggccgccttc

SEQ ID NO: 5261904 - DNA, 25 bp, Homo sapien
catttccgacttggatgaaagcagg

SEQ ID NO: 5261905 - DNA, 25 bp, Homo sapien
cacagagacgtgctccagtggcatt

SEQ ID NO: 5261906 - DNA, 25 bp, Homo sapien
gtgacctcgggctgaaagtgccgat

SEQ ID NO: 5261907 - DNA, 25 bp, Homo sapien
aaagtgccgatatgcaacagcctgc

SEQ ID NO: 5261908 - DNA, 25 bp, Homo sapien
tggacctgagcactcgtagaggaac

SEQ ID NO: 5261909 - DNA, 25 bp, Homo sapien
gccactgggacacttgtagaaatgt

SEQ ID NO: 5261910 - DNA, 25 bp, Homo sapien
tagaggaacagtgcgggtttagtcc

SEQ ID NO: 5261911 - DNA, 25 bp, Homo sapien
ccctgttcatggctaggtgtggacc

SEQ ID NO: 5261912 - DNA, 25 bp, Homo sapien
cctggttcaaggatggtccggctaa

SEQ ID NO: 5261913 - DNA, 25 bp, Homo sapien
aatggtgtggtctgcccaagggcca

SEQ ID NO: 5261914 - DNA, 25 bp, Homo sapien
ggtcatacacaaacaggccttgggt

SEQ ID NO: 5261915 - DNA, 25 bp, Homo sapien
tgggaagggccagatcgcaaatatt

SEQ ID NO: 5261916 - DNA, 25 bp, Homo sapien
gctgttgacgtggtgtttcctgcct

SEQ ID NO: 5261917 - DNA, 25 bp, Homo sapien
ggtgtgtgcagctgtcacatctgaa

SEQ ID NO: 5261918 - DNA, 25 bp, Homo sapien
aaggtggaattgctgttgacgtggt

SEQ ID NO: 5261919 - DNA, 25 bp, Homo sapien
gtgtgtgcagctgtcacatctgaag

SEQ ID NO: 5261920 - DNA, 25 bp, Homo sapien
taatatggcatgattggccaggcat

SEQ ID NO: 5261921 - DNA, 25 bp, Homo sapien
gtccatattctatactgatagaggg

SEQ ID NO: 5261922 - DNA, 25 bp, Homo sapien
cctggtctagggtaatcaccaaaat

SEQ ID NO: 5261923 - DNA, 25 bp, Homo sapien
gggataatatggcatgattggccag

SEQ ID NO: 5261924 - DNA, 25 bp, Homo sapien
agctgacttctcatatacaacaatg

SEQ ID NO: 5261925 - DNA, 25 bp, Homo sapien
agcagacccacactaaaagagatgc

SEQ ID NO: 5261926 - DNA, 25 bp, Homo sapien
gcattgcaagtagactgacagctga

SEQ ID NO: 5261927 - DNA, 25 bp, Homo sapien
gagatgctaacagatcaacttcaag

SEQ ID NO: 5261928 - DNA, 25 bp, Homo sapien
aaacccaggtggcattgaagtccag

SEQ ID NO: 5261929 - DNA, 25 bp, Homo sapien
ggaagtagtgcctgacgtcctccgt

SEQ ID NO: 5261930 - DNA, 25 bp, Homo sapien
tgaggaactgcctccaaagaaggtc

SEQ ID NO: 5261931 - DNA, 25 bp, Homo sapien
cggttgtccacatctgcccagaagg

SEQ ID NO: 5261932 - DNA, 25 bp, Homo sapien
gcctgtggtccacacgatggactca

SEQ ID NO: 5261933 - DNA, 25 bp, Homo sapien
agagcttgccgtctgtgatgagcac

SEQ ID NO: 5261934 - DNA, 25 bp, Homo sapien
gagcttgccgtctgtgatgagcaca

SEQ ID NO: 5261935 - DNA, 25 bp, Homo sapien
cacacgatggactcatagttgaaga

SEQ ID NO: 5261936 - DNA, 25 bp, Homo sapien
cccttgtgtcactggctaggccaga

SEQ ID NO: 5261937 - DNA, 25 bp, Homo sapien
cagggcacaaggagcagaggacatt

SEQ ID NO: 5261938 - DNA, 25 bp, Homo sapien
cttgtgtcactggctaggccagact

SEQ ID NO: 5261939 - DNA, 25 bp, Homo sapien
gcagggcacaaggagcagaggacat

SEQ ID NO: 5261940 - DNA, 25 bp, Homo sapien
cacccacgttggtggtggtctccac

SEQ ID NO: 5261941 - DNA, 25 bp, Homo sapien
gatactgaagtaacgctgcccatcg

SEQ ID NO: 5261942 - DNA, 25 bp, Homo sapien
tgcccatcgcctgcgttgaagccag

SEQ ID NO: 5261943 - DNA, 25 bp, Homo sapien
catcatcgattctgaacgcccagcg

SEQ ID NO: 5261944 - DNA, 25 bp, Homo sapien
cgtgaagcccgagaggcaggagcag

SEQ ID NO: 5261945 - DNA, 25 bp, Homo sapien
gtcgatgcacttgccgccgttgagg

SEQ ID NO: 5261946 - DNA, 25 bp, Homo sapien
ggttgcccgtgacgcagtcgtcgat

SEQ ID NO: 5261947 - DNA, 25 bp, Homo sapien
cagtcgtcgatgcacttgccgccgt

SEQ ID NO: 5261948 - DNA, 25 bp, Homo sapien
tgccgtgagtacaggtcccaccatt

SEQ ID NO: 5261949 - DNA, 25 bp, Homo sapien
tgttgatgccgtgagtacaggtccc

SEQ ID NO: 5261950 - DNA, 25 bp, Homo sapien
gcactggcagcggaaactgttgatg

SEQ ID NO: 5261951 - DNA, 25 bp, Homo sapien
ggaaactgttgatgccgtgagtaca

SEQ ID NO: 5261952 - DNA, 25 bp, Homo sapien
gtgtagacaggacgatggactccca

SEQ ID NO: 5261953 - DNA, 25 bp, Homo sapien
gagtgatagccaaagcgtgtgtccc

SEQ ID NO: 5261954 - DNA, 25 bp, Homo sapien
ggagcatgcacaccctagcctttag

SEQ ID NO: 5261955 - DNA, 25 bp, Homo sapien
gaagctctgtctgaactgggtctaa

SEQ ID NO: 5261956 - DNA, 25 bp, Homo sapien
gttgacactctttggtgtcacaggg

SEQ ID NO: 5261957 - DNA, 25 bp, Homo sapien
caggctgctccggtgtatccggcct

SEQ ID NO: 5261958 - DNA, 25 bp, Homo sapien
gctccggtgtatccggcctggcaca

SEQ ID NO: 5261959 - DNA, 25 bp, Homo sapien
cactggccaccatgttgacactctt

SEQ ID NO: 5261960 - DNA, 25 bp, Homo sapien
cagcagaggtgcgggcttggcttga

SEQ ID NO: 5261961 - DNA, 25 bp, Homo sapien
gtgcgggcttggcttgagccaggcc

SEQ ID NO: 5261962 - DNA, 25 bp, Homo sapien
ctccaatccgaagccaggccactca

SEQ ID NO: 5261963 - DNA, 25 bp, Homo sapien
cccctctccaatccgaagccaggcc

SEQ ID NO: 5261964 - DNA, 25 bp, Homo sapien
taattccccactaggtcaacacaag

SEQ ID NO: 5261965 - DNA, 25 bp, Homo sapien
tctcacagcgaagtcccttgaaggg

SEQ ID NO: 5261966 - DNA, 25 bp, Homo sapien
ggtcaacacaagagcctccattcag

SEQ ID NO: 5261967 - DNA, 25 bp, Homo sapien
ggctcggcacacaagcaggtgtaat

SEQ ID NO: 5261968 - DNA, 25 bp, Homo sapien
gggtgttcacggcacaaagccacca

SEQ ID NO: 5261969 - DNA, 25 bp, Homo sapien
gacttgtgaactttgtcatccctcc

SEQ ID NO: 5261970 - DNA, 25 bp, Homo sapien
ctgattcccgttactttcccttgtg

SEQ ID NO: 5261971 - DNA, 25 bp, Homo sapien
cagttggtggcttaggatccaggct

SEQ ID NO: 5261972 - DNA, 25 bp, Homo sapien
taagatctgttagggcaggtcgaca

SEQ ID NO: 5261973 - DNA, 25 bp, Homo sapien
gatccatgtgtcagtccctttgcca

SEQ ID NO: 5261974 - DNA, 25 bp, Homo sapien
cggcaaagactgatggagggcccat

SEQ ID NO: 5261975 - DNA, 25 bp, Homo sapien
tcctctggcaaaaacgctgcggctt

SEQ ID NO: 5261976 - DNA, 25 bp, Homo sapien
atgttttcttctaaaaatcttatag

SEQ ID NO: 5261977 - DNA, 25 bp, Homo sapien
tcttctaaaaatcttatagtttatg

SEQ ID NO: 5261978 - DNA, 25 bp, Homo sapien
tatgttttcttctaaaaatcttata

SEQ ID NO: 5261979 - DNA, 25 bp, Homo sapien
ccccattgtggcaaggggccgagag

SEQ ID NO: 5261980 - DNA, 25 bp, Homo sapien
aagccttcggggcactcgcacacgt

SEQ ID NO: 5261981 - DNA, 25 bp, Homo sapien
gcaaggggccgagaggcaggcgtct

SEQ ID NO: 5261982 - DNA, 25 bp, Homo sapien
gccttcggggcactcgcacacgtag

SEQ ID NO: 5261983 - DNA, 25 bp, Homo sapien
aaaacggcagcccttgcagcccaga

SEQ ID NO: 5261984 - DNA, 25 bp, Homo sapien
acggcagcccttgcagcccagacgc

SEQ ID NO: 5261985 - DNA, 25 bp, Homo sapien
ggcagcccttgcagcccagacgcac

SEQ ID NO: 5261986 - DNA, 25 bp, Homo sapien
ctaaaacggcagcccttgcagccca

SEQ ID NO: 5261987 - DNA, 25 bp, Homo sapien
cgttgcggcactcacagtcatcggg

SEQ ID NO: 5261988 - DNA, 25 bp, Homo sapien
gaagcccaaagaatcccagggggca

SEQ ID NO: 5261989 - DNA, 25 bp, Homo sapien
tggtgttggcgcccaggcatctgcc

SEQ ID NO: 5261990 - DNA, 25 bp, Homo sapien
agagggtggtgttggcgcccaggca

SEQ ID NO: 5261991 - DNA, 25 bp, Homo sapien
acgcagaggtagctcccgccgtgct

SEQ ID NO: 5261992 - DNA, 25 bp, Homo sapien
tgctccatgcagtagcccccatctg

SEQ ID NO: 5261993 - DNA, 25 bp, Homo sapien
gtggtcggtgtggcagacgcagagg

SEQ ID NO: 5261994 - DNA, 25 bp, Homo sapien
ctccatgcagtagcccccatctggg

SEQ ID NO: 5261995 - DNA, 25 bp, Homo sapien
ggtccgagtcgcagggtgatggcag

SEQ ID NO: 5261996 - DNA, 25 bp, Homo sapien
ctcgcagtgcttgccgtggaacccg

SEQ ID NO: 5261997 - DNA, 25 bp, Homo sapien
actcgcaggtgtaggagtcgtcatg

SEQ ID NO: 5261998 - DNA, 25 bp, Homo sapien
tcgtcatgggcatcgcaggagcctc

SEQ ID NO: 5261999 - DNA, 25 bp, Homo sapien
gggtgctgacgccggcccggacgcc

SEQ ID NO: 5262000 - DNA, 25 bp, Homo sapien
tccagggtgctgacgccggcccgga

SEQ ID NO: 5262001 - DNA, 25 bp, Homo sapien
ctccagggtgctgacgccggcccgg

SEQ ID NO: 5262002 - DNA, 25 bp, Homo sapien
cagggtgctgacgccggcccggacg

SEQ ID NO: 5262003 - DNA, 25 bp, Homo sapien
tgcattggcattgccacattttccc

SEQ ID NO: 5262004 - DNA, 25 bp, Homo sapien
tggcattgccacattttccctgggt

SEQ ID NO: 5262005 - DNA, 25 bp, Homo sapien
cacattttccctgggtcctaacagt

SEQ ID NO: 5262006 - DNA, 25 bp, Homo sapien
gccacattttccctgggtcctaaca

SEQ ID NO: 5262007 - DNA, 25 bp, Homo sapien
tcatctgccgtgacatcagggtccc

SEQ ID NO: 5262008 - DNA, 25 bp, Homo sapien
gagaccccaactcagtcacaggtgg

SEQ ID NO: 5262009 - DNA, 25 bp, Homo sapien
caagcaggtccgcacacatggtggg

SEQ ID NO: 5262010 - DNA, 25 bp, Homo sapien
ctgggcccttcctgtggagaaccgg

SEQ ID NO: 5262011 - DNA, 25 bp, Homo sapien
ttgcacgtgcccccgttccggcagg

SEQ ID NO: 5262012 - DNA, 25 bp, Homo sapien
tgcagtggtactcgccgcccgcctc

SEQ ID NO: 5262013 - DNA, 25 bp, Homo sapien
agctgcagtggtactcgccgcccgc

SEQ ID NO: 5262014 - DNA, 25 bp, Homo sapien
ccccgttccggcagggccctgagct

SEQ ID NO: 5262015 - DNA, 25 bp, Homo sapien
ctatctcgcagtgccgcccggagaa

SEQ ID NO: 5262016 - DNA, 25 bp, Homo sapien
acttgtatttgccaatgtagtggaa

SEQ ID NO: 5262017 - DNA, 25 bp, Homo sapien
caggtgccgccgttgtgacaggggc

SEQ ID NO: 5262018 - DNA, 25 bp, Homo sapien
gtatttgccaatgtagtggaagcag

SEQ ID NO: 5262019 - DNA, 25 bp, Homo sapien
cctgcccatgggcctgttttcacat

SEQ ID NO: 5262020 - DNA, 25 bp, Homo sapien
cccatgggcctgttttcacatctgc

SEQ ID NO: 5262021 - DNA, 25 bp, Homo sapien
tgcccatgggcctgttttcacatct

SEQ ID NO: 5262022 - DNA, 25 bp, Homo sapien
catctgcagagagggttcacccctg

SEQ ID NO: 5262023 - DNA, 25 bp, Homo sapien
accggcgtcccatgtaccctgcttg

SEQ ID NO: 5262024 - DNA, 25 bp, Homo sapien
cagaagaaatccgtgtcccggtcct

SEQ ID NO: 5262025 - DNA, 25 bp, Homo sapien
atccgtgtcccggtcctcgcaggtg

SEQ ID NO: 5262026 - DNA, 25 bp, Homo sapien
cagtggcagaagaaatccgtgtccc

SEQ ID NO: 5262027 - DNA, 25 bp, Homo sapien
ccgttgaagcgcagtgtggcgtgct

SEQ ID NO: 5262028 - DNA, 25 bp, Homo sapien
tagccacggtcacatgcatacaggg

SEQ ID NO: 5262029 - DNA, 25 bp, Homo sapien
tccagacaccgtgtggctggcagac

SEQ ID NO: 5262030 - DNA, 25 bp, Homo sapien
cagccgcgtgccgttgaagcgcagt

SEQ ID NO: 5262031 - DNA, 25 bp, Homo sapien
tgccccaccccaagggcccacagaa

SEQ ID NO: 5262032 - DNA, 25 bp, Homo sapien
ccaccccaagggcccacagaatcac

SEQ ID NO: 5262033 - DNA, 25 bp, Homo sapien
ctgccccaccccaagggcccacaga

SEQ ID NO: 5262034 - DNA, 25 bp, Homo sapien
cccaccccaagggcccacagaatca

SEQ ID NO: 5262035 - DNA, 25 bp, Homo sapien
tcctccacatggccaggatgaggag

SEQ ID NO: 5262036 - DNA, 25 bp, Homo sapien
ccaggatgaggagggtgtgggcccc

SEQ ID NO: 5262037 - DNA, 25 bp, Homo sapien
ctgtgctcctccacatggccaggat

SEQ ID NO: 5262038 - DNA, 25 bp, Homo sapien
gccaggatgaggagggtgtgggccc

SEQ ID NO: 5262039 - DNA, 25 bp, Homo sapien
tatgtgccccactcaaatctgggtg

SEQ ID NO: 5262040 - DNA, 25 bp, Homo sapien
catcttctggcaacatataggtggg

SEQ ID NO: 5262041 - DNA, 25 bp, Homo sapien
gaagcctttagtgaatgccccagag

SEQ ID NO: 5262042 - DNA, 25 bp, Homo sapien
gcataatgcgatgcacctgcagggt

SEQ ID NO: 5262043 - DNA, 25 bp, Homo sapien
gtttttaatctgcttattcccactg

SEQ ID NO: 5262044 - DNA, 25 bp, Homo sapien
tagtttttaatctgcttattcccac

SEQ ID NO: 5262045 - DNA, 25 bp, Homo sapien
cctgttttggatggccaatgccatg

SEQ ID NO: 5262046 - DNA, 25 bp, Homo sapien
aataatttatcgatcctgttttgga

SEQ ID NO: 5262047 - DNA, 25 bp, Homo sapien
ttcttgggctccgattatctcagct

SEQ ID NO: 5262048 - DNA, 25 bp, Homo sapien
tccgattatctcagctttagcacac

SEQ ID NO: 5262049 - DNA, 25 bp, Homo sapien
tgggctccgattatctcagctttag

SEQ ID NO: 5262050 - DNA, 25 bp, Homo sapien
tatctcagctttagcacaccttcta

SEQ ID NO: 5262051 - DNA, 25 bp, Homo sapien
tcgtattttactataatgtgtctgg

SEQ ID NO: 5262052 - DNA, 25 bp, Homo sapien
atattctcgtattttactataatgt

SEQ ID NO: 5262053 - DNA, 25 bp, Homo sapien
ctcgtattttactataatgtgtctg

SEQ ID NO: 5262054 - DNA, 25 bp, Homo sapien
ttctcgtattttactataatgtgtc

SEQ ID NO: 5262055 - DNA, 25 bp, Homo sapien
tgtaatgatcctgtgggtgagacct

SEQ ID NO: 5262056 - DNA, 25 bp, Homo sapien
tccaacacttgggtgatccataagg

SEQ ID NO: 5262057 - DNA, 25 bp, Homo sapien
taaacgcttaaggatttggacaggc

SEQ ID NO: 5262058 - DNA, 25 bp, Homo sapien
tctctactaggtagcgaagctgagt

SEQ ID NO: 5262059 - DNA, 25 bp, Homo sapien
tatttttttatggtctcacatttga

SEQ ID NO: 5262060 - DNA, 25 bp, Homo sapien
tttttatggtctcacatttgaataa

SEQ ID NO: 5262061 - DNA, 25 bp, Homo sapien
tttatggtctcacatttgaataaca

SEQ ID NO: 5262062 - DNA, 25 bp, Homo sapien
tatggtctcacatttgaataacaat

SEQ ID NO: 5262063 - DNA, 25 bp, Homo sapien
gcttgttttataccacatctggcaa

SEQ ID NO: 5262064 - DNA, 25 bp, Homo sapien
gaaccaattatcattgagagacacc

SEQ ID NO: 5262065 - DNA, 25 bp, Homo sapien
gtatcttcttcgtgaacggaaccaa

SEQ ID NO: 5262066 - DNA, 25 bp, Homo sapien
ggatagtgacaagtcttaccatgaa

SEQ ID NO: 5262067 - DNA, 25 bp, Homo sapien
tcttgagagataccagtctgtaact

SEQ ID NO: 5262068 - DNA, 25 bp, Homo sapien
agttagaccaacctgtgtccttgag

SEQ ID NO: 5262069 - DNA, 25 bp, Homo sapien
aatggacaccttgccttgtacggat

SEQ ID NO: 5262070 - DNA, 25 bp, Homo sapien
tgggaatacgtactgaatggacacc

SEQ ID NO: 5262071 - DNA, 25 bp, Homo sapien
gatccacattctcaccggtataggc

SEQ ID NO: 5262072 - DNA, 25 bp, Homo sapien
tgaatgggctcatccgaccgtgtac

SEQ ID NO: 5262073 - DNA, 25 bp, Homo sapien
gattgctcaacaggcagagtgccac

SEQ ID NO: 5262074 - DNA, 25 bp, Homo sapien
tgacgtaaatgagcaacagtgggca

SEQ ID NO: 5262075 - DNA, 25 bp, Homo sapien
agctcacagtgggcgccctcatagc

SEQ ID NO: 5262076 - DNA, 25 bp, Homo sapien
agcaacgcggtcctgacaagagccc

SEQ ID NO: 5262077 - DNA, 25 bp, Homo sapien
acaggtacccagcaacgcggtcctg

SEQ ID NO: 5262078 - DNA, 25 bp, Homo sapien
tgcagaggcacaggtacccagcaac

SEQ ID NO: 5262079 - DNA, 25 bp, Homo sapien
tgggagcaactactcaggacatgtg

SEQ ID NO: 5262080 - DNA, 25 bp, Homo sapien
gcaactactcaggacatgtgctttt

SEQ ID NO: 5262081 - DNA, 25 bp, Homo sapien
ctcgggaggcgtgccacctccactg

SEQ ID NO: 5262082 - DNA, 25 bp, Homo sapien
ttcccagctgggagcaactactcag

SEQ ID NO: 5262083 - DNA, 25 bp, Homo sapien
gctggctcaagtctgaggcgcccac

SEQ ID NO: 5262084 - DNA, 25 bp, Homo sapien
tggctcaagtctgaggcgcccacat

SEQ ID NO: 5262085 - DNA, 25 bp, Homo sapien
tcaagggtgttgctggctcaagtct

SEQ ID NO: 5262086 - DNA, 25 bp, Homo sapien
gctcaagtctgaggcgcccacatgc

SEQ ID NO: 5262087 - DNA, 25 bp, Homo sapien
accggcagacataggcccctgggag

SEQ ID NO: 5262088 - DNA, 25 bp, Homo sapien
gggcaccggcagacataggcccctg

SEQ ID NO: 5262089 - DNA, 25 bp, Homo sapien
cctccatttctgcacgggtgagctc

SEQ ID NO: 5262090 - DNA, 25 bp, Homo sapien
gggtgagctcggcactcatccctct

SEQ ID NO: 5262091 - DNA, 25 bp, Homo sapien
gtctcacagtggactccaacgaagc

SEQ ID NO: 5262092 - DNA, 25 bp, Homo sapien
tctcgcagtggtagccgaagaagct

SEQ ID NO: 5262093 - DNA, 25 bp, Homo sapien
gggctggagtcgcaggcgtccacct

SEQ ID NO: 5262094 - DNA, 25 bp, Homo sapien
aagaagctctctgggcagacgcaca

SEQ ID NO: 5262095 - DNA, 25 bp, Homo sapien
tggtagccgaagaagctctctgggc

SEQ ID NO: 5262096 - DNA, 25 bp, Homo sapien
gcagctgtgggagccgttgctggcc

SEQ ID NO: 5262097 - DNA, 25 bp, Homo sapien
agtcctcgcccgtgtagcccacttt

SEQ ID NO: 5262098 - DNA, 25 bp, Homo sapien
ccgtgtagcccactttgcaggtgca

SEQ ID NO: 5262099 - DNA, 25 bp, Homo sapien
ccgttgctggccaggcaatagccac

SEQ ID NO: 5262100 - DNA, 25 bp, Homo sapien
tctctccatcttgagggccgtcggt

SEQ ID NO: 5262101 - DNA, 25 bp, Homo sapien
tcactgagaagacggagatgttgta

SEQ ID NO: 5262102 - DNA, 25 bp, Homo sapien
tgaccgcgtagccatcaagcatctg

SEQ ID NO: 5262103 - DNA, 25 bp, Homo sapien
tccacaaagtctgtgcggcggtagg

SEQ ID NO: 5262104 - DNA, 25 bp, Homo sapien
acacggaccccactgacggtggcat

SEQ ID NO: 5262105 - DNA, 25 bp, Homo sapien
cactgagatggtgctagccgtcaca

SEQ ID NO: 5262106 - DNA, 25 bp, Homo sapien
tggcatggcggatcctgtgcagggc

SEQ ID NO: 5262107 - DNA, 25 bp, Homo sapien
aggtgaacctgtccacactcctgtc

SEQ ID NO: 5262108 - DNA, 25 bp, Homo sapien
cccatgctctgggtgtcccttctta

SEQ ID NO: 5262109 - DNA, 25 bp, Homo sapien
cagccccatgctctgggtgtccctt

SEQ ID NO: 5262110 - DNA, 25 bp, Homo sapien
ccatgctctgggtgtcccttcttac

SEQ ID NO: 5262111 - DNA, 25 bp, Homo sapien
gccccatgctctgggtgtcccttct

SEQ ID NO: 5262112 - DNA, 25 bp, Homo sapien
tacagtccacacacggagaatgtgc

SEQ ID NO: 5262113 - DNA, 25 bp, Homo sapien
gagcggcaggtggtacagtccacac

SEQ ID NO: 5262114 - DNA, 25 bp, Homo sapien
tgtgcccgagacctgggccccgtgt

SEQ ID NO: 5262115 - DNA, 25 bp, Homo sapien
cacacggagaatgtgcccgagacct

SEQ ID NO: 5262116 - DNA, 25 bp, Homo sapien
caggcaacctccacgaggggcagac

SEQ ID NO: 5262117 - DNA, 25 bp, Homo sapien
caggaggtgactgcggggaggtcat

SEQ ID NO: 5262118 - DNA, 25 bp, Homo sapien
gcaacctccacgaggggcagactca

SEQ ID NO: 5262119 - DNA, 25 bp, Homo sapien
tgactgcggggaggtcatcctgctg

SEQ ID NO: 5262120 - DNA, 25 bp, Homo sapien
agaacagggatgtctgggacctgtg

SEQ ID NO: 5262121 - DNA, 25 bp, Homo sapien
gtgggcaggaggtgacaaagagaga

SEQ ID NO: 5262122 - DNA, 25 bp, Homo sapien
ggcaggaggtgacaaagagagaaca

SEQ ID NO: 5262123 - DNA, 25 bp, Homo sapien
agagagaacagggatgtctgggacc

SEQ ID NO: 5262124 - DNA, 25 bp, Homo sapien
gtcagctggatggtgtacctcttcc

SEQ ID NO: 5262125 - DNA, 25 bp, Homo sapien
gagcccactgagggtggtcagctgg

SEQ ID NO: 5262126 - DNA, 25 bp, Homo sapien
gtccacacgtgcgtcggcgcggtgg

SEQ ID NO: 5262127 - DNA, 25 bp, Homo sapien
tggatggtgtacctcttcccaggca

SEQ ID NO: 5262128 - DNA, 25 bp, Homo sapien
gcactgctatcacagagagctggta

SEQ ID NO: 5262129 - DNA, 25 bp, Homo sapien
cgagctccgtgctctgcactgctat

SEQ ID NO: 5262130 - DNA, 25 bp, Homo sapien
ctggctggtggtcacattgatgaca

SEQ ID NO: 5262131 - DNA, 25 bp, Homo sapien
gatgacataagcctccagcaagctg

SEQ ID NO: 5262132 - DNA, 25 bp, Homo sapien
cactcagccgtgcttggagaaggga

SEQ ID NO: 5262133 - DNA, 25 bp, Homo sapien
atgtgcgtgggccgtggtcatccaa

SEQ ID NO: 5262134 - DNA, 25 bp, Homo sapien
cccctgtggcatgggtggtgcccct

SEQ ID NO: 5262135 - DNA, 25 bp, Homo sapien
gtggtcatccaaggtgcttgtggct

SEQ ID NO: 5262136 - DNA, 25 bp, Homo sapien
gggcggtctgttcttgagcacccga

SEQ ID NO: 5262137 - DNA, 25 bp, Homo sapien
gtctgttcttgagcacccgagggtg

SEQ ID NO: 5262138 - DNA, 25 bp, Homo sapien
gctgtggtcattgagcaggcgcagc

SEQ ID NO: 5262139 - DNA, 25 bp, Homo sapien
tggtgccagcgtctgtcagcgccat

SEQ ID NO: 5262140 - DNA, 25 bp, Homo sapien
gccaccgaacctggcgctcactctt

SEQ ID NO: 5262141 - DNA, 25 bp, Homo sapien
gtgatctcacggtggctgctttgct

SEQ ID NO: 5262142 - DNA, 25 bp, Homo sapien
gtgaggacgagggtgggccaccaag

SEQ ID NO: 5262143 - DNA, 25 bp, Homo sapien
tggtgagagtggcagtgaggacgag

SEQ ID NO: 5262144 - DNA, 25 bp, Homo sapien
tgagagtggcagtgaggacgagggt

SEQ ID NO: 5262145 - DNA, 25 bp, Homo sapien
gagtggcagtgaggacgagggtggg

SEQ ID NO: 5262146 - DNA, 25 bp, Homo sapien
gcggcccacgagccccgcgccttgt

SEQ ID NO: 5262147 - DNA, 25 bp, Homo sapien
gccccgcgccttgtgcacagtcggg

SEQ ID NO: 5262148 - DNA, 25 bp, Homo sapien
tggagactgcgctggcggtgggggt

SEQ ID NO: 5262149 - DNA, 25 bp, Homo sapien
gggctcatcatgtaggggacaggac

SEQ ID NO: 5262150 - DNA, 25 bp, Homo sapien
aagatcttgccaggacagtggcgga

SEQ ID NO: 5262151 - DNA, 25 bp, Homo sapien
gttccatgaggatgaccacctggcc

SEQ ID NO: 5262152 - DNA, 25 bp, Homo sapien
aggatttgccggaccacactcggag

SEQ ID NO: 5262153 - DNA, 25 bp, Homo sapien
gccttgctgccaccgggaagatctt

SEQ ID NO: 5262154 - DNA, 25 bp, Homo sapien
tttgagtgcttctatatctcaggga

SEQ ID NO: 5262155 - DNA, 25 bp, Homo sapien
gggccacccttttgagtgcttctat

SEQ ID NO: 5262156 - DNA, 25 bp, Homo sapien
ctaggagaagccaggcggtgaccac

SEQ ID NO: 5262157 - DNA, 25 bp, Homo sapien
gcgcagctgctttgcacccgggatg

SEQ ID NO: 5262158 - DNA, 25 bp, Homo sapien
gcttcctccatgttctcgagctgcg

SEQ ID NO: 5262159 - DNA, 25 bp, Homo sapien
ccttgctgccgtgttcagggagctg

SEQ ID NO: 5262160 - DNA, 25 bp, Homo sapien
gggcttcctccatgttctcgagctg

SEQ ID NO: 5262161 - DNA, 25 bp, Homo sapien
ttgggggcttcctccatgttctcga

SEQ ID NO: 5262162 - DNA, 25 bp, Homo sapien
tgtgcctcctgattcctcaccgtgg

SEQ ID NO: 5262163 - DNA, 25 bp, Homo sapien
cctctaaggcccctgagagcagtca

SEQ ID NO: 5262164 - DNA, 25 bp, Homo sapien
cactgcttgggtggtgtagcttcac

SEQ ID NO: 5262165 - DNA, 25 bp, Homo sapien
tcaaagccagtctctctagctcaga

SEQ ID NO: 5262166 - DNA, 25 bp, Homo sapien
gcagagccccggactaggagacagt

SEQ ID NO: 5262167 - DNA, 25 bp, Homo sapien
agccccggactaggagacagttcag

SEQ ID NO: 5262168 - DNA, 25 bp, Homo sapien
agagccccggactaggagacagttc

SEQ ID NO: 5262169 - DNA, 25 bp, Homo sapien
cccggactaggagacagttcaggtc

SEQ ID NO: 5262170 - DNA, 25 bp, Homo sapien
tgtaggatctgcaaacccggcaaaa

SEQ ID NO: 5262171 - DNA, 25 bp, Homo sapien
tagtaggtgtgaataagccgcagcc

SEQ ID NO: 5262172 - DNA, 25 bp, Homo sapien
aggtctaacgatcacacatggcaag

SEQ ID NO: 5262173 - DNA, 25 bp, Homo sapien
gaagagccggtcagttcactcagtg

SEQ ID NO: 5262174 - DNA, 25 bp, Homo sapien
caaaagcaaaactttacatctttgt

SEQ ID NO: 5262175 - DNA, 25 bp, Homo sapien
tcaaaagcaaaactttacatctttg

SEQ ID NO: 5262176 - DNA, 25 bp, Homo sapien
aatgcctatccttaacccattacca

SEQ ID NO: 5262177 - DNA, 25 bp, Homo sapien
ccactgatctaaatgcctatcctta

SEQ ID NO: 5262178 - DNA, 25 bp, Homo sapien
gatctaaatgcctatccttaaccca

SEQ ID NO: 5262179 - DNA, 25 bp, Homo sapien
cttaacccattaccacaccaacagg

SEQ ID NO: 5262180 - DNA, 25 bp, Homo sapien
gcctaaggaccctcatgatcgaagg

SEQ ID NO: 5262181 - DNA, 25 bp, Homo sapien
tatatggtacgagggctccggcctc

SEQ ID NO: 5262182 - DNA, 25 bp, Homo sapien
cccttgtagaagtcagttggccatt

SEQ ID NO: 5262183 - DNA, 25 bp, Homo sapien
tgcaattactgggtcatgcggtaac

SEQ ID NO: 5262184 - DNA, 25 bp, Homo sapien
gcatattcacagatacaggcatcca

SEQ ID NO: 5262185 - DNA, 25 bp, Homo sapien
gagtatagcctaacattccttggcg

SEQ ID NO: 5262186 - DNA, 25 bp, Homo sapien
tccagtcctgagcaaccgctaatgt

SEQ ID NO: 5262187 - DNA, 25 bp, Homo sapien
gttcattcagagaagcctcgccgat

SEQ ID NO: 5262188 - DNA, 25 bp, Homo sapien
cacaagtgcctccgttctgacaggg

SEQ ID NO: 5262189 - DNA, 25 bp, Homo sapien
cagcgtctgcctttgaaccctggcc

SEQ ID NO: 5262190 - DNA, 25 bp, Homo sapien
acagctgtgggcgtctgcgcccggc

SEQ ID NO: 5262191 - DNA, 25 bp, Homo sapien
acaggggttttctgaacagttgcca

SEQ ID NO: 5262192 - DNA, 25 bp, Homo sapien
ttgtctcggagaacagccttgtgca

SEQ ID NO: 5262193 - DNA, 25 bp, Homo sapien
gaaaggcctttgtctcggagaacag

SEQ ID NO: 5262194 - DNA, 25 bp, Homo sapien
cctcccagactggaaaggcctttgt

SEQ ID NO: 5262195 - DNA, 25 bp, Homo sapien
tgcaggggcgggacacctttataca

SEQ ID NO: 5262196 - DNA, 25 bp, Homo sapien
caagttttaagcctcggttgcaggt

SEQ ID NO: 5262197 - DNA, 25 bp, Homo sapien
caatgtgaacaaccagagaactgga

SEQ ID NO: 5262198 - DNA, 25 bp, Homo sapien
cacgagactgtaatccctgagagag

SEQ ID NO: 5262199 - DNA, 25 bp, Homo sapien
taggatcgaaaacctgtggtaagac

SEQ ID NO: 5262200 - DNA, 25 bp, Homo sapien
ggtgaactcggtagactcttttata

SEQ ID NO: 5262201 - DNA, 25 bp, Homo sapien
tcttggtgaactcggtagactcttt

SEQ ID NO: 5262202 - DNA, 25 bp, Homo sapien
ctgtttggggtcttcttgaggcttg

SEQ ID NO: 5262203 - DNA, 25 bp, Homo sapien
ttgaggcttgtgctttcacagctct

SEQ ID NO: 5262204 - DNA, 25 bp, Homo sapien
tacatgcaggacacggcatgggcct

SEQ ID NO: 5262205 - DNA, 25 bp, Homo sapien
ctacatgcaggacacggcatgggcc

SEQ ID NO: 5262206 - DNA, 25 bp, Homo sapien
tgcaggacacggcatgggcctgctc

SEQ ID NO: 5262207 - DNA, 25 bp, Homo sapien
catgcaggacacggcatgggcctgc

SEQ ID NO: 5262208 - DNA, 25 bp, Homo sapien
cggccttgcccggacacttggtaat

SEQ ID NO: 5262209 - DNA, 25 bp, Homo sapien
tacgtgtggctactcattggtctat

SEQ ID NO: 5262210 - DNA, 25 bp, Homo sapien
gacgatgacaggcttcgactctgtg

SEQ ID NO: 5262211 - DNA, 25 bp, Homo sapien
tggtaatgccaaacaagtacgtgtg

SEQ ID NO: 5262212 - DNA, 25 bp, Homo sapien
cagtgtctgactcttactttgtttc

SEQ ID NO: 5262213 - DNA, 25 bp, Homo sapien
tccagtgtctgactcttactttgtt

SEQ ID NO: 5262214 - DNA, 25 bp, Homo sapien
ccagtgtctgactcttactttgttt

SEQ ID NO: 5262215 - DNA, 25 bp, Homo sapien
ctccagtgtctgactcttactttgt

SEQ ID NO: 5262216 - DNA, 25 bp, Homo sapien
ctttagcagtgctgagtaagcaggc

SEQ ID NO: 5262217 - DNA, 25 bp, Homo sapien
tagaccaggttcatgtctgtttccc

SEQ ID NO: 5262218 - DNA, 25 bp, Homo sapien
agcagcacaggaccgcgcttccttt

SEQ ID NO: 5262219 - DNA, 25 bp, Homo sapien
tgcccgggagtctgtaacacagcag

SEQ ID NO: 5262220 - DNA, 25 bp, Homo sapien
tttatgaatgcctatgagcccagtg

SEQ ID NO: 5262221 - DNA, 25 bp, Homo sapien
taaatattaagcgatcaaggcccct

SEQ ID NO: 5262222 - DNA, 25 bp, Homo sapien
tcagtgacgactttctagcggcggt

SEQ ID NO: 5262223 - DNA, 25 bp, Homo sapien
ttcacaagatctgggaggcactctc

SEQ ID NO: 5262224 - DNA, 25 bp, Homo sapien
tgtcatggccaactcagagctcaag

SEQ ID NO: 5262225 - DNA, 25 bp, Homo sapien
gactttccacatccgaagaggcaga

SEQ ID NO: 5262226 - DNA, 25 bp, Homo sapien
gaagtgattccctcgagtcaacagg

SEQ ID NO: 5262227 - DNA, 25 bp, Homo sapien
aaagctgtcctaggccaaccagaga

SEQ ID NO: 5262228 - DNA, 25 bp, Homo sapien
tgtttttatgggagtggatgtgcta

SEQ ID NO: 5262229 - DNA, 25 bp, Homo sapien
agtcagtatttgataattagttggg

SEQ ID NO: 5262230 - DNA, 25 bp, Homo sapien
tcaggtgacttaccaccgtataaat

SEQ ID NO: 5262231 - DNA, 25 bp, Homo sapien
gaataggtattctataagtcagtat

SEQ ID NO: 5262232 - DNA, 25 bp, Homo sapien
tcgtgttgttcttggatgggtgtct

SEQ ID NO: 5262233 - DNA, 25 bp, Homo sapien
ctcctccttccggtaacgactctgg

SEQ ID NO: 5262234 - DNA, 25 bp, Homo sapien
catctttaggaacatgtgggctcag

SEQ ID NO: 5262235 - DNA, 25 bp, Homo sapien
tgtgaaatcacagcctgttcctctt

SEQ ID NO: 5262236 - DNA, 25 bp, Homo sapien
ccaggattctaccatatggcagtgc

SEQ ID NO: 5262237 - DNA, 25 bp, Homo sapien
ggattctaccatatggcagtgcaca

SEQ ID NO: 5262238 - DNA, 25 bp, Homo sapien
attctaccatatggcagtgcacacg

SEQ ID NO: 5262239 - DNA, 25 bp, Homo sapien
tctaccatatggcagtgcacacggg

SEQ ID NO: 5262240 - DNA, 25 bp, Homo sapien
ctcctctttaaatgggctgcttcct

SEQ ID NO: 5262241 - DNA, 25 bp, Homo sapien
ctctttaaatgggctgcttcctgct

SEQ ID NO: 5262242 - DNA, 25 bp, Homo sapien
cctctttaaatgggctgcttcctgc

SEQ ID NO: 5262243 - DNA, 25 bp, Homo sapien
gcttctcttagtggccctcagggcc

SEQ ID NO: 5262244 - DNA, 25 bp, Homo sapien
tttgaagaaaaaacaaagtgaagca

SEQ ID NO: 5262245 - DNA, 25 bp, Homo sapien
ttaaacgcatcgcaggactcacagg

SEQ ID NO: 5262246 - DNA, 25 bp, Homo sapien
tagtccataggatggctcgtcgacc

SEQ ID NO: 5262247 - DNA, 25 bp, Homo sapien
tactgcagaagcgtggctgactgac

SEQ ID NO: 5262248 - DNA, 25 bp, Homo sapien
cagtcgcgccgttgtctaaaaaagt

SEQ ID NO: 5262249 - DNA, 25 bp, Homo sapien
gctgagctcgagacccttcattgag

SEQ ID NO: 5262250 - DNA, 25 bp, Homo sapien
tctgctctcaagtgggtctggagcc

SEQ ID NO: 5262251 - DNA, 25 bp, Homo sapien
gaagtccgcagtacgcgtttgtgaa

SEQ ID NO: 5262252 - DNA, 25 bp, Homo sapien
tacaggtgaaacttcgcgaattgcc

SEQ ID NO: 5262253 - DNA, 25 bp, Homo sapien
gaaactcatctaaggcctggtccac

SEQ ID NO: 5262254 - DNA, 25 bp, Homo sapien
cctggtaggtgtgagctgcatgcaa

SEQ ID NO: 5262255 - DNA, 25 bp, Homo sapien
tcccacaagagaggatgatccggcc

SEQ ID NO: 5262256 - DNA, 25 bp, Homo sapien
tctactggaggacagtgggcacagc

SEQ ID NO: 5262257 - DNA, 25 bp, Homo sapien
ttcataatggtattcagtgcacagc

SEQ ID NO: 5262258 - DNA, 25 bp, Homo sapien
gaaaacatgtagcagattttccaca

SEQ ID NO: 5262259 - DNA, 25 bp, Homo sapien
tctccggccctgtagtctgtagtgc

SEQ ID NO: 5262260 - DNA, 25 bp, Homo sapien
gggaagttggcttttatgtcagctc

SEQ ID NO: 5262261 - DNA, 25 bp, Homo sapien
ggcagacagatcaaaccaaacagga

SEQ ID NO: 5262262 - DNA, 25 bp, Homo sapien
tatgttgagctattcacatcaaggg

SEQ ID NO: 5262263 - DNA, 25 bp, Homo sapien
aaaaattataagtcacctgagaggc

SEQ ID NO: 5262264 - DNA, 25 bp, Homo sapien
tctgagagcagcacatctgatgaca

SEQ ID NO: 5262265 - DNA, 25 bp, Homo sapien
ggtttgataaacaccagaacagaag

SEQ ID NO: 5262266 - DNA, 25 bp, Homo sapien
aggtttgataaacaccagaacagaa

SEQ ID NO: 5262267 - DNA, 25 bp, Homo sapien
gtttgataaacaccagaacagaaga

SEQ ID NO: 5262268 - DNA, 25 bp, Homo sapien
aacaggagcctgagtgatgtggccc

SEQ ID NO: 5262269 - DNA, 25 bp, Homo sapien
tctgtccgctgcgagcctggagatg

SEQ ID NO: 5262270 - DNA, 25 bp, Homo sapien
ttcttcagaaagtggagttctgtcc

SEQ ID NO: 5262271 - DNA, 25 bp, Homo sapien
ccaggcgaggctcctaatggccaag

SEQ ID NO: 5262272 - DNA, 25 bp, Homo sapien
gagactgtctgctgacgtgcccgat

SEQ ID NO: 5262273 - DNA, 25 bp, Homo sapien
cactagagaaagtcccgaggcagag

SEQ ID NO: 5262274 - DNA, 25 bp, Homo sapien
agggcatttgctcgcagtcacgcac

SEQ ID NO: 5262275 - DNA, 25 bp, Homo sapien
catggttagagagtcggatgatcac

SEQ ID NO: 5262276 - DNA, 25 bp, Homo sapien
catcatggcctccaccgggtgcggg

SEQ ID NO: 5262277 - DNA, 25 bp, Homo sapien
ggtgtgtacaccacacagcttggtg

SEQ ID NO: 5262278 - DNA, 25 bp, Homo sapien
cagcttggtgtacacgctggcctgt

SEQ ID NO: 5262279 - DNA, 25 bp, Homo sapien
ttggtgtacacgctggcctgttcct

SEQ ID NO: 5262280 - DNA, 25 bp, Homo sapien
cttccagggtcctaggctgggtttg

SEQ ID NO: 5262281 - DNA, 25 bp, Homo sapien
taatagcttcctacacatctgcagg

SEQ ID NO: 5262282 - DNA, 25 bp, Homo sapien
tgcttgtaggaaagctgcacactcg

SEQ ID NO: 5262283 - DNA, 25 bp, Homo sapien
gaagctataattaagtgtcctgagc

SEQ ID NO: 5262284 - DNA, 25 bp, Homo sapien
tcgcggcggggttgcggccgttggc

SEQ ID NO: 5262285 - DNA, 25 bp, Homo sapien
gggaccctgcgctctcttcaccgca

SEQ ID NO: 5262286 - DNA, 25 bp, Homo sapien
cgtcttcggggtgcccttcagtgta

SEQ ID NO: 5262287 - DNA, 25 bp, Homo sapien
gagcccgcgtcctctccgtgcccaa

SEQ ID NO: 5262288 - DNA, 25 bp, Homo sapien
tttggctcctccgaagcgccgtagg

SEQ ID NO: 5262289 - DNA, 25 bp, Homo sapien
ggcggaggcgcccattattcctttg

SEQ ID NO: 5262290 - DNA, 25 bp, Homo sapien
cattttgatcgcgagtcgggaggaa

SEQ ID NO: 5262291 - DNA, 25 bp, Homo sapien
cgcgagtcgggaggaaaccgcatct

SEQ ID NO: 5262292 - DNA, 25 bp, Homo sapien
cgcgtcctccgccttcagaaagagg

SEQ ID NO: 5262293 - DNA, 25 bp, Homo sapien
ggcccatgaacgagccgccccgcgt

SEQ ID NO: 5262294 - DNA, 25 bp, Homo sapien
agccacccggcccatgaacgagccg

SEQ ID NO: 5262295 - DNA, 25 bp, Homo sapien
tccaagaggcgagctctgcgctact

SEQ ID NO: 5262296 - DNA, 25 bp, Homo sapien
cgctggctgcgtctgtacaatgggc

SEQ ID NO: 5262297 - DNA, 25 bp, Homo sapien
gattttacccatgcgaaatgccgcc

SEQ ID NO: 5262298 - DNA, 25 bp, Homo sapien
tacaatgggccgaacggcaagagca

SEQ ID NO: 5262299 - DNA, 25 bp, Homo sapien
caagagcaacaacattctcccggcg

SEQ ID NO: 5262300 - DNA, 25 bp, Homo sapien
caggcggatctttccgtggctgcaa

SEQ ID NO: 5262301 - DNA, 25 bp, Homo sapien
cccagagcaggtaatttcaggcggc

SEQ ID NO: 5262302 - DNA, 25 bp, Homo sapien
ttgtagttccgtcatgaggccgcgc

SEQ ID NO: 5262303 - DNA, 25 bp, Homo sapien
gtcactgtctcgacctcggaggcgt

SEQ ID NO: 5262304 - DNA, 25 bp, Homo sapien
tggctgctcttcccctttccggaat

SEQ ID NO: 5262305 - DNA, 25 bp, Homo sapien
ttggctgctcttcccctttccggaa

SEQ ID NO: 5262306 - DNA, 25 bp, Homo sapien
gttggctgctcttcccctttccgga

SEQ ID NO: 5262307 - DNA, 25 bp, Homo sapien
atcatctcctgcgactgttgctgcc

SEQ ID NO: 5262308 - DNA, 25 bp, Homo sapien
catcatctcctgcgactgttgctgc

SEQ ID NO: 5262309 - DNA, 25 bp, Homo sapien
ccatcatctcctgcgactgttgctg

SEQ ID NO: 5262310 - DNA, 25 bp, Homo sapien
tccatcatctcctgcgactgttgct

SEQ ID NO: 5262311 - DNA, 25 bp, Homo sapien
cagttttctccgtcttgagtgattc

SEQ ID NO: 5262312 - DNA, 25 bp, Homo sapien
ccgtcttgagtgattcttgctcttt

SEQ ID NO: 5262313 - DNA, 25 bp, Homo sapien
gcagttttctccgtcttgagtgatt

SEQ ID NO: 5262314 - DNA, 25 bp, Homo sapien
tttctccgtcttgagtgattcttgc

SEQ ID NO: 5262315 - DNA, 25 bp, Homo sapien
tctggaacatgggacagtggctctg

SEQ ID NO: 5262316 - DNA, 25 bp, Homo sapien
cttgactaacaggacatgggtggga

SEQ ID NO: 5262317 - DNA, 25 bp, Homo sapien
gcatgacaatctggcacaaaaaccc

SEQ ID NO: 5262318 - DNA, 25 bp, Homo sapien
gctaacgaaggttggccaaagtgaa

SEQ ID NO: 5262319 - DNA, 25 bp, Homo sapien
ccgcaatgacggtggctcacttact

SEQ ID NO: 5262320 - DNA, 25 bp, Homo sapien
catgaggcactaacacattacttgg

SEQ ID NO: 5262321 - DNA, 25 bp, Homo sapien
aaacccaagaaaggattgctgtaga

SEQ ID NO: 5262322 - DNA, 25 bp, Homo sapien
gcttagcctagcaaagtaaaaccca

SEQ ID NO: 5262323 - DNA, 25 bp, Homo sapien
ctctgttcactgaggtcggccacga

SEQ ID NO: 5262324 - DNA, 25 bp, Homo sapien
ttcccttcttcatcgccggattctt

SEQ ID NO: 5262325 - DNA, 25 bp, Homo sapien
gtcggccacgatgccactgctgtgt

SEQ ID NO: 5262326 - DNA, 25 bp, Homo sapien
catcgccggattcttcagactcgac

SEQ ID NO: 5262327 - DNA, 25 bp, Homo sapien
cactgaggacccctaaggagcacgg

SEQ ID NO: 5262328 - DNA, 25 bp, Homo sapien
acggcagtccttctccagaccgaca

SEQ ID NO: 5262329 - DNA, 25 bp, Homo sapien
tgggccactgaggacccctaaggag

SEQ ID NO: 5262330 - DNA, 25 bp, Homo sapien
ggacccctaaggagcacggcagtcc

SEQ ID NO: 5262331 - DNA, 25 bp, Homo sapien
tgtctcagacggcatactagtaccc

SEQ ID NO: 5262332 - DNA, 25 bp, Homo sapien
gcatctggccaacaatgtcatggtt

SEQ ID NO: 5262333 - DNA, 25 bp, Homo sapien
ggtaggacatagaaacacagcagtc

SEQ ID NO: 5262334 - DNA, 25 bp, Homo sapien
tttgcaaacgccatcaatgagtcag

SEQ ID NO: 5262335 - DNA, 25 bp, Homo sapien
taccaatcatctttgctggcacaga

SEQ ID NO: 5262336 - DNA, 25 bp, Homo sapien
taaaagtaggttgccatagttacca

SEQ ID NO: 5262337 - DNA, 25 bp, Homo sapien
gtcaggcgatgacggaagcttccat

SEQ ID NO: 5262338 - DNA, 25 bp, Homo sapien
tgatgacaacatgattagcctgtgc

SEQ ID NO: 5262339 - DNA, 25 bp, Homo sapien
aaataaatacaggtaggagcaagtc

SEQ ID NO: 5262340 - DNA, 25 bp, Homo sapien
tcataatcagctaatcatctcgaag

SEQ ID NO: 5262341 - DNA, 25 bp, Homo sapien
ggagcaagtcttggctcctctaagg

SEQ ID NO: 5262342 - DNA, 25 bp, Homo sapien
tggctcctctaagggctagaaatgc

SEQ ID NO: 5262343 - DNA, 25 bp, Homo sapien
cagatgctctaggatgggcctttta

SEQ ID NO: 5262344 - DNA, 25 bp, Homo sapien
gagaagcccattggatttcacgagg

SEQ ID NO: 5262345 - DNA, 25 bp, Homo sapien
gaggcgacagcttccctgttaagca

SEQ ID NO: 5262346 - DNA, 25 bp, Homo sapien
catgtgtgctgaaaaggactaagac

SEQ ID NO: 5262347 - DNA, 25 bp, Homo sapien
ctctgcatctctgtccaggttgatg

SEQ ID NO: 5262348 - DNA, 25 bp, Homo sapien
caggttgatggtttccatgtccaca

SEQ ID NO: 5262349 - DNA, 25 bp, Homo sapien
atgtccacaggcagctcatgttctt

SEQ ID NO: 5262350 - DNA, 25 bp, Homo sapien
gttgatggtttccatgtccacaggc

SEQ ID NO: 5262351 - DNA, 25 bp, Homo sapien
ccctatgcgatagtgattcaaatca

SEQ ID NO: 5262352 - DNA, 25 bp, Homo sapien
tgcgatagtgattcaaatcaacatc

SEQ ID NO: 5262353 - DNA, 25 bp, Homo sapien
cttcaatcttccctatgcgatagtg

SEQ ID NO: 5262354 - DNA, 25 bp, Homo sapien
tcttccctatgcgatagtgattcaa

SEQ ID NO: 5262355 - DNA, 25 bp, Homo sapien
aaagatccagctctcgaagactctg

SEQ ID NO: 5262356 - DNA, 25 bp, Homo sapien
tgttagcgcctccagattctcaatc

SEQ ID NO: 5262357 - DNA, 25 bp, Homo sapien
taattaaattttggcggaggcagag

SEQ ID NO: 5262358 - DNA, 25 bp, Homo sapien
tctcaatcttcttgatctggttgtc

SEQ ID NO: 5262359 - DNA, 25 bp, Homo sapien
gttcacacttgtgcccatgacagga

SEQ ID NO: 5262360 - DNA, 25 bp, Homo sapien
aatgagcgacaaagggcagaaatcc

SEQ ID NO: 5262361 - DNA, 25 bp, Homo sapien
cgagcataggttgcatagaactcac

SEQ ID NO: 5262362 - DNA, 25 bp, Homo sapien
ggcaagaggcaattctggattaact

SEQ ID NO: 5262363 - DNA, 25 bp, Homo sapien
caaccccttcgatgtttctcagcag

SEQ ID NO: 5262364 - DNA, 25 bp, Homo sapien
tcagtcgtgtcaacttgtcaacccc

SEQ ID NO: 5262365 - DNA, 25 bp, Homo sapien
ccggatgcggttagatcccagctct

SEQ ID NO: 5262366 - DNA, 25 bp, Homo sapien
tcccagctctagcatctgtagttga

SEQ ID NO: 5262367 - DNA, 25 bp, Homo sapien
ctctccaggttggttaaggtgtcga

SEQ ID NO: 5262368 - DNA, 25 bp, Homo sapien
ttaaggtgtcgatattttcgattgc

SEQ ID NO: 5262369 - DNA, 25 bp, Homo sapien
tcaggttggtgagcgcatccaggtt

SEQ ID NO: 5262370 - DNA, 25 bp, Homo sapien
ctgcatactgaggactgtcaggttg

SEQ ID NO: 5262371 - DNA, 25 bp, Homo sapien
tcgatgccattgtggctaaggtaca

SEQ ID NO: 5262372 - DNA, 25 bp, Homo sapien
aggccctcgatgacctcgatgccat

SEQ ID NO: 5262373 - DNA, 25 bp, Homo sapien
cctcgatcttggtcagccggttgct

SEQ ID NO: 5262374 - DNA, 25 bp, Homo sapien
aggttcaccaggttctgcagaccct

SEQ ID NO: 5262375 - DNA, 25 bp, Homo sapien
acagggccctttacgagcaggttgg

SEQ ID NO: 5262376 - DNA, 25 bp, Homo sapien
catacagggccctttacgagcaggt

SEQ ID NO: 5262377 - DNA, 25 bp, Homo sapien
agctgctcatactgtaagaagagga

SEQ ID NO: 5262378 - DNA, 25 bp, Homo sapien
cctcatacagggccctttacgagca

SEQ ID NO: 5262379 - DNA, 25 bp, Homo sapien
tatttgtcttgaacaccgcactggg

SEQ ID NO: 5262380 - DNA, 25 bp, Homo sapien
tgaacaccgcactggggcagagcag

SEQ ID NO: 5262381 - DNA, 25 bp, Homo sapien
ttttatttgtcttgaacaccgcact

SEQ ID NO: 5262382 - DNA, 25 bp, Homo sapien
ttgaacaccgcactggggcagagca

SEQ ID NO: 5262383 - DNA, 25 bp, Homo sapien
tcttgcagctctgttagatggctga

SEQ ID NO: 5262384 - DNA, 25 bp, Homo sapien
gatgcaatgtccaacatcgtgagtt

SEQ ID NO: 5262385 - DNA, 25 bp, Homo sapien
agaactcttgcagctctgttagatg

SEQ ID NO: 5262386 - DNA, 25 bp, Homo sapien
gcaatgtccaacatcgtgagtttgt

SEQ ID NO: 5262387 - DNA, 25 bp, Homo sapien
tcacttggcttaaacgagcgggcag

SEQ ID NO: 5262388 - DNA, 25 bp, Homo sapien
cttgaaacaagtcgcgtatggcagg

SEQ ID NO: 5262389 - DNA, 25 bp, Homo sapien
catctgccaacagagcatctgggag

SEQ ID NO: 5262390 - DNA, 25 bp, Homo sapien
cagggcgctgcctacaggaaagcat

SEQ ID NO: 5262391 - DNA, 25 bp, Homo sapien
taacaaaggagatgcgtgacacagg

SEQ ID NO: 5262392 - DNA, 25 bp, Homo sapien
cattattagtctagatgggcggacc

SEQ ID NO: 5262393 - DNA, 25 bp, Homo sapien
cagctctggcgtgggaggtcttcaa

SEQ ID NO: 5262394 - DNA, 25 bp, Homo sapien
caacggctgggattctgctagagaa

SEQ ID NO: 5262395 - DNA, 25 bp, Homo sapien
tcgcaccgccccgctggttgtgtgg

SEQ ID NO: 5262396 - DNA, 25 bp, Homo sapien
cagtgcagagcctgcaacactagaa

SEQ ID NO: 5262397 - DNA, 25 bp, Homo sapien
aatgctactctgttactacactcgc

SEQ ID NO: 5262398 - DNA, 25 bp, Homo sapien
gaattacaggggaagccatccacct

SEQ ID NO: 5262399 - DNA, 25 bp, Homo sapien
cagctctcaaggagattgtcgttca

SEQ ID NO: 5262400 - DNA, 25 bp, Homo sapien
tggctcccttcagctcgtcgaggtc

SEQ ID NO: 5262401 - DNA, 25 bp, Homo sapien
gggttccgctccaggtacactgtct

SEQ ID NO: 5262402 - DNA, 25 bp, Homo sapien
gaacgtggcatcgatctgccgcacg

SEQ ID NO: 5262403 - DNA, 25 bp, Homo sapien
cgtcagtgcctttattgccattggg

SEQ ID NO: 5262404 - DNA, 25 bp, Homo sapien
gttgatatagtgacgacctcaggag

SEQ ID NO: 5262405 - DNA, 25 bp, Homo sapien
gccattgggtttgtgactgttgata

SEQ ID NO: 5262406 - DNA, 25 bp, Homo sapien
ttcttccgaggagagggaccacatg

SEQ ID NO: 5262407 - DNA, 25 bp, Homo sapien
gaaaatggtgtgtgacgtcgcgcgc

SEQ ID NO: 5262408 - DNA, 25 bp, Homo sapien
tgaaaatggtgtgtgacgtcgcgcg

SEQ ID NO: 5262409 - DNA, 25 bp, Homo sapien
aaaatggtgtgtgacgtcgcgcgcg

SEQ ID NO: 5262410 - DNA, 25 bp, Homo sapien
aaatggtgtgtgacgtcgcgcgcgc

SEQ ID NO: 5262411 - DNA, 25 bp, Homo sapien
tgtaaagcactctcaggccctgtgt

SEQ ID NO: 5262412 - DNA, 25 bp, Homo sapien
cagggatttctagcgaatgaacgca

SEQ ID NO: 5262413 - DNA, 25 bp, Homo sapien
tgtgtttcacacgactcaggtaggg

SEQ ID NO: 5262414 - DNA, 25 bp, Homo sapien
aaaacctcggttgttgcaggtcaag

SEQ ID NO: 5262415 - DNA, 25 bp, Homo sapien
gcacacgtgaaaacagtcagccctg

SEQ ID NO: 5262416 - DNA, 25 bp, Homo sapien
cctgcccggcgctctttgaaggaga

SEQ ID NO: 5262417 - DNA, 25 bp, Homo sapien
accagtggccaagagttcagatcct

SEQ ID NO: 5262418 - DNA, 25 bp, Homo sapien
caatgggactcgtattctggcagca

SEQ ID NO: 5262419 - DNA, 25 bp, Homo sapien
gacaggtgccgtggctcctagtctt

SEQ ID NO: 5262420 - DNA, 25 bp, Homo sapien
cctagtcttgggctggcaaaacggg

SEQ ID NO: 5262421 - DNA, 25 bp, Homo sapien
aggacaggtgccgtggctcctagtc

SEQ ID NO: 5262422 - DNA, 25 bp, Homo sapien
ggctcctagtcttgggctggcaaaa

SEQ ID NO: 5262423 - DNA, 25 bp, Homo sapien
tacagactcgactcggagtagaatg

SEQ ID NO: 5262424 - DNA, 25 bp, Homo sapien
ggctggctcggcagactctcctggc

SEQ ID NO: 5262425 - DNA, 25 bp, Homo sapien
tgtctgtccatccagtgagtgcccg

SEQ ID NO: 5262426 - DNA, 25 bp, Homo sapien
agcacatggagaaccccctagccag

SEQ ID NO: 5262427 - DNA, 25 bp, Homo sapien
tcgatcaggacggtgctgtcctctt

SEQ ID NO: 5262428 - DNA, 25 bp, Homo sapien
gggctcacatcgatcaggacggtgc

SEQ ID NO: 5262429 - DNA, 25 bp, Homo sapien
cttcctgggcccgtcgccgcagcat

SEQ ID NO: 5262430 - DNA, 25 bp, Homo sapien
cgtgggctgtgctcccgtaagagcc

SEQ ID NO: 5262431 - DNA, 25 bp, Homo sapien
gatccggggcttggcaggactccca

SEQ ID NO: 5262432 - DNA, 25 bp, Homo sapien
aggcggccgcttgctgtccacctgg

SEQ ID NO: 5262433 - DNA, 25 bp, Homo sapien
agctctgcaggcggccgcttgctgt

SEQ ID NO: 5262434 - DNA, 25 bp, Homo sapien
tcccagctctgcaggcggccgcttg

SEQ ID NO: 5262435 - DNA, 25 bp, Homo sapien
ttatccagaaaagtctcccgccagg

SEQ ID NO: 5262436 - DNA, 25 bp, Homo sapien
ccagccgcacgaagattatccagaa

SEQ ID NO: 5262437 - DNA, 25 bp, Homo sapien
tgtcctgctgcctgtctagcttcag

SEQ ID NO: 5262438 - DNA, 25 bp, Homo sapien
ctgttctgtcccgggcggcactgtc

SEQ ID NO: 5262439 - DNA, 25 bp, Homo sapien
cctcatgcggcaaggtcatgggtca

SEQ ID NO: 5262440 - DNA, 25 bp, Homo sapien
agagttttcaggtgaccctgagggc

SEQ ID NO: 5262441 - DNA, 25 bp, Homo sapien
ccacacggaggagctcacggtggct

SEQ ID NO: 5262442 - DNA, 25 bp, Homo sapien
gagggatcaatgtttacctccgcct

SEQ ID NO: 5262443 - DNA, 25 bp, Homo sapien
aagctttaatgttggagacgggaca

SEQ ID NO: 5262444 - DNA, 25 bp, Homo sapien
tggagacgggacaggtgaatggcaa

SEQ ID NO: 5262445 - DNA, 25 bp, Homo sapien
gttggagacgggacaggtgaatggc

SEQ ID NO: 5262446 - DNA, 25 bp, Homo sapien
ctttaatgttggagacgggacaggt

SEQ ID NO: 5262447 - DNA, 25 bp, Homo sapien
ttctgtagccgtggtaacagctgac

SEQ ID NO: 5262448 - DNA, 25 bp, Homo sapien
gatacatgacacctactcccatgga

SEQ ID NO: 5262449 - DNA, 25 bp, Homo sapien
tctgaaagccaaccgggcctcgaca

SEQ ID NO: 5262450 - DNA, 25 bp, Homo sapien
ttcgcactcttaggaaaagactggc

SEQ ID NO: 5262451 - DNA, 25 bp, Homo sapien
gcttcaggcgcaggtcttcggcgta

SEQ ID NO: 5262452 - DNA, 25 bp, Homo sapien
gaggcgctgaggagggcgtagtgca

SEQ ID NO: 5262453 - DNA, 25 bp, Homo sapien
gtcttcggcgtagtagcagagcaca

SEQ ID NO: 5262454 - DNA, 25 bp, Homo sapien
tagtgcactgtggtgttcccgtcct

SEQ ID NO: 5262455 - DNA, 25 bp, Homo sapien
gggatgcccagccatgccagcaggc

SEQ ID NO: 5262456 - DNA, 25 bp, Homo sapien
tactcggggggtacgtctggcacaa

SEQ ID NO: 5262457 - DNA, 25 bp, Homo sapien
tctgaaccggcaggagtagtactcg

SEQ ID NO: 5262458 - DNA, 25 bp, Homo sapien
cagttggaggcctggttgggtaact

SEQ ID NO: 5262459 - DNA, 25 bp, Homo sapien
tgtgaagaaggtgtcctggttgtca

SEQ ID NO: 5262460 - DNA, 25 bp, Homo sapien
cttgtgaagaaggtgtcctggttgt

SEQ ID NO: 5262461 - DNA, 25 bp, Homo sapien
gtcctggttgtcactcccgaggaag

SEQ ID NO: 5262462 - DNA, 25 bp, Homo sapien
gtgaagaaggtgtcctggttgtcac

SEQ ID NO: 5262463 - DNA, 25 bp, Homo sapien
gcaggtttttcttctcgtggccata

SEQ ID NO: 5262464 - DNA, 25 bp, Homo sapien
gcactgaggacaccctctgccagca

SEQ ID NO: 5262465 - DNA, 25 bp, Homo sapien
cagctggtggatcccaagcaggttt

SEQ ID NO: 5262466 - DNA, 25 bp, Homo sapien
ccagcagctggtggatcccaagcag

SEQ ID NO: 5262467 - DNA, 25 bp, Homo sapien
tgcgggccctctgggggcgtcttga

SEQ ID NO: 5262468 - DNA, 25 bp, Homo sapien
gcgggccctctgggggcgtcttgaa

SEQ ID NO: 5262469 - DNA, 25 bp, Homo sapien
ctgcgggccctctgggggcgtcttg

SEQ ID NO: 5262470 - DNA, 25 bp, Homo sapien
cagtgctggaaaaggacttggcgct

SEQ ID NO: 5262471 - DNA, 25 bp, Homo sapien
caggcgaagtagagggccaccttct

SEQ ID NO: 5262472 - DNA, 25 bp, Homo sapien
aagtacctgcgcacgtggtccaggg

SEQ ID NO: 5262473 - DNA, 25 bp, Homo sapien
cttggcgctggttgaggcgtggagc

SEQ ID NO: 5262474 - DNA, 25 bp, Homo sapien
gggtatgtctgagaacaccaggaag

SEQ ID NO: 5262475 - DNA, 25 bp, Homo sapien
cagccagaaagggcagtcgaggcaa

SEQ ID NO: 5262476 - DNA, 25 bp, Homo sapien
acatctcgaagctgtccttgctgcc

SEQ ID NO: 5262477 - DNA, 25 bp, Homo sapien
ggcaaagtgggcacatctcgaagct

SEQ ID NO: 5262478 - DNA, 25 bp, Homo sapien
aagggcagtcgaggcaaagtgggca

SEQ ID NO: 5262479 - DNA, 25 bp, Homo sapien
aacacggtgccgccgtggtcgaaca

SEQ ID NO: 5262480 - DNA, 25 bp, Homo sapien
acggtgccgccgtggtcgaacagcc

SEQ ID NO: 5262481 - DNA, 25 bp, Homo sapien
cacggtgccgccgtggtcgaacagc

SEQ ID NO: 5262482 - DNA, 25 bp, Homo sapien
ggtgccgccgtggtcgaacagccgg

SEQ ID NO: 5262483 - DNA, 25 bp, Homo sapien
gtaggccagcgtggcgctcttccgc

SEQ ID NO: 5262484 - DNA, 25 bp, Homo sapien
tcttccgcttccagtactccagcag

SEQ ID NO: 5262485 - DNA, 25 bp, Homo sapien
gtcccagcggtaggccagcgtggcg

SEQ ID NO: 5262486 - DNA, 25 bp, Homo sapien
ctcgtagtcagagcagtcccagcgg

SEQ ID NO: 5262487 - DNA, 25 bp, Homo sapien
tcgtcctcacccgtgatggggttcg

SEQ ID NO: 5262488 - DNA, 25 bp, Homo sapien
accacgatcaccacagagccggcca

SEQ ID NO: 5262489 - DNA, 25 bp, Homo sapien
cgcgcgcggctcctctcagggaagt

SEQ ID NO: 5262490 - DNA, 25 bp, Homo sapien
gctcctctcagggaagtagggctcg

SEQ ID NO: 5262491 - DNA, 25 bp, Homo sapien
tacaggatgatagacacgaggcaca

SEQ ID NO: 5262492 - DNA, 25 bp, Homo sapien
tggccatgatggcacggtacaggat

SEQ ID NO: 5262493 - DNA, 25 bp, Homo sapien
ctgcgagaagggtgttgcccgacct

SEQ ID NO: 5262494 - DNA, 25 bp, Homo sapien
ttgcccgacctggacaccacgatgg

SEQ ID NO: 5262495 - DNA, 25 bp, Homo sapien
cgtgggccagggatacatagatctt

SEQ ID NO: 5262496 - DNA, 25 bp, Homo sapien
tacagaccccgtgaggctggcgatg

SEQ ID NO: 5262497 - DNA, 25 bp, Homo sapien
cagggatacatagatcttggagagg

SEQ ID NO: 5262498 - DNA, 25 bp, Homo sapien
tgaggatgaagacgaggttcactac

SEQ ID NO: 5262499 - DNA, 25 bp, Homo sapien
aatagaaatgagggccatgtgtgtc

SEQ ID NO: 5262500 - DNA, 25 bp, Homo sapien
tgtgtcagtgagtgagaaagtcacg

SEQ ID NO: 5262501 - DNA, 25 bp, Homo sapien
gtgagtgagaaagtcacgttctggc

SEQ ID NO: 5262502 - DNA, 25 bp, Homo sapien
tcagtgagtgagaaagtcacgttct

SEQ ID NO: 5262503 - DNA, 25 bp, Homo sapien
aggagtagaagttgacgaactggaa

SEQ ID NO: 5262504 - DNA, 25 bp, Homo sapien
ggtgaaggcgtcctcgaacttggtc

SEQ ID NO: 5262505 - DNA, 25 bp, Homo sapien
aacttggtctgggtgcggtgcattt

SEQ ID NO: 5262506 - DNA, 25 bp, Homo sapien
caatgtagacgggtgaggagtagaa

SEQ ID NO: 5262507 - DNA, 25 bp, Homo sapien
caaacaaggtgtggtagttgcctgg

SEQ ID NO: 5262508 - DNA, 25 bp, Homo sapien
ttgcggactccaaacaaggtgtggt

SEQ ID NO: 5262509 - DNA, 25 bp, Homo sapien
ctcctcattgcggactccaaacaag

SEQ ID NO: 5262510 - DNA, 25 bp, Homo sapien
ctccaaacaaggtgtggtagttgcc

SEQ ID NO: 5262511 - DNA, 25 bp, Homo sapien
ccctggctgggcgatggaaatagcc

SEQ ID NO: 5262512 - DNA, 25 bp, Homo sapien
aatagccggtggtgggaggaattgc

SEQ ID NO: 5262513 - DNA, 25 bp, Homo sapien
tgggaggaattgctgcaaatcaaag

SEQ ID NO: 5262514 - DNA, 25 bp, Homo sapien
tgcaaatcaaagctcgaatggaaga

SEQ ID NO: 5262515 - DNA, 25 bp, Homo sapien
ggatgaggacctcctgcatgttgtt

SEQ ID NO: 5262516 - DNA, 25 bp, Homo sapien
tgccagctcgatcaggcagcctcca

SEQ ID NO: 5262517 - DNA, 25 bp, Homo sapien
agctcctgtgccagctcgatcaggc

SEQ ID NO: 5262518 - DNA, 25 bp, Homo sapien
gttgttgatgacctgcttgcccacc

SEQ ID NO: 5262519 - DNA, 25 bp, Homo sapien
cttcttggagcgaagccggaacttc

SEQ ID NO: 5262520 - DNA, 25 bp, Homo sapien
agcgaagccggaacttctgccacca

SEQ ID NO: 5262521 - DNA, 25 bp, Homo sapien
gggcccctggctagcccctgcagaa

SEQ ID NO: 5262522 - DNA, 25 bp, Homo sapien
tcttggagcgaagccggaacttctg

SEQ ID NO: 5262523 - DNA, 25 bp, Homo sapien
caggtactcgtcaaacagaccctca

SEQ ID NO: 5262524 - DNA, 25 bp, Homo sapien
ggtactcgtcaaacagaccctcaca

SEQ ID NO: 5262525 - DNA, 25 bp, Homo sapien
ccatttccaggtactcgtcaaacag

SEQ ID NO: 5262526 - DNA, 25 bp, Homo sapien
tttccaggtactcgtcaaacagacc

SEQ ID NO: 5262527 - DNA, 25 bp, Homo sapien
caggcgttggggcagaaacctgctc

SEQ ID NO: 5262528 - DNA, 25 bp, Homo sapien
gccctgcgctccgtgcttctggctg

SEQ ID NO: 5262529 - DNA, 25 bp, Homo sapien
gccttctccggctcggtgagctcag

SEQ ID NO: 5262530 - DNA, 25 bp, Homo sapien
ttctggctggtcacgggccttctcc

SEQ ID NO: 5262531 - DNA, 25 bp, Homo sapien
tcacggccgggctctccgccaccgt

SEQ ID NO: 5262532 - DNA, 25 bp, Homo sapien
gggtcacggccgggctctccgccac

SEQ ID NO: 5262533 - DNA, 25 bp, Homo sapien
cggccgggctctccgccaccgtccg

SEQ ID NO: 5262534 - DNA, 25 bp, Homo sapien
ggctctccgccaccgtccgccctca

SEQ ID NO: 5262535 - DNA, 25 bp, Homo sapien
ttgctgatgaccgccaggtgcgtga

SEQ ID NO: 5262536 - DNA, 25 bp, Homo sapien
aacttgcgcgcgtccaagcggatct

SEQ ID NO: 5262537 - DNA, 25 bp, Homo sapien
ggcgccggtactcgcagacgaactt

SEQ ID NO: 5262538 - DNA, 25 bp, Homo sapien
agatggtgacgaagccgaactgcag

SEQ ID NO: 5262539 - DNA, 25 bp, Homo sapien
tgcacgtgcggttgtgcgcggcggc

SEQ ID NO: 5262540 - DNA, 25 bp, Homo sapien
gcgggtccaccggtagtaggcgcgc

SEQ ID NO: 5262541 - DNA, 25 bp, Homo sapien
cagcgtgaagttgaggaagccgcgc

SEQ ID NO: 5262542 - DNA, 25 bp, Homo sapien
gcgcggcaggaagtcggacgagaag

SEQ ID NO: 5262543 - DNA, 25 bp, Homo sapien
tttttccaccatttcgctctctcat

SEQ ID NO: 5262544 - DNA, 25 bp, Homo sapien
tctggaattagcctatctccccttt

SEQ ID NO: 5262545 - DNA, 25 bp, Homo sapien
gaattcttcccaaacaggatactct

SEQ ID NO: 5262546 - DNA, 25 bp, Homo sapien
tggctcttcatcgagggtgcctgaa

SEQ ID NO: 5262547 - DNA, 25 bp, Homo sapien
cagcagacacaggactcagtgcgcg

SEQ ID NO: 5262548 - DNA, 25 bp, Homo sapien
gcagacacaggactcagtgcgcgca

SEQ ID NO: 5262549 - DNA, 25 bp, Homo sapien
acacaggactcagtgcgcgcagcca

SEQ ID NO: 5262550 - DNA, 25 bp, Homo sapien
acaggactcagtgcgcgcagccagg

SEQ ID NO: 5262551 - DNA, 25 bp, Homo sapien
taatgtccatcgtcatcccggaaag

SEQ ID NO: 5262552 - DNA, 25 bp, Homo sapien
tccagtaggtctgggaataatgtcc

SEQ ID NO: 5262553 - DNA, 25 bp, Homo sapien
ggtctgggaataatgtccatcgtca

SEQ ID NO: 5262554 - DNA, 25 bp, Homo sapien
atcgtcatcccggaaagcccgatac

SEQ ID NO: 5262555 - DNA, 25 bp, Homo sapien
tcggggcctcatgccatggatggga

SEQ ID NO: 5262556 - DNA, 25 bp, Homo sapien
cgtgctcgaattaggcaaagcacag

SEQ ID NO: 5262557 - DNA, 25 bp, Homo sapien
gctcgaattaggcaaagcacagggt

SEQ ID NO: 5262558 - DNA, 25 bp, Homo sapien
cacgtgctcgaattaggcaaagcac

SEQ ID NO: 5262559 - DNA, 25 bp, Homo sapien
ggccaggcagggaaaacgcaggtgc

SEQ ID NO: 5262560 - DNA, 25 bp, Homo sapien
cacaatgtccacaccacaacccagg

SEQ ID NO: 5262561 - DNA, 25 bp, Homo sapien
gccaccccagctttcgtggccctgg

SEQ ID NO: 5262562 - DNA, 25 bp, Homo sapien
cagagaagagctctgatttgaccaa

SEQ ID NO: 5262563 - DNA, 25 bp, Homo sapien
aaacgcccagagtggccttcacagg

SEQ ID NO: 5262564 - DNA, 25 bp, Homo sapien
cccagagtggccttcacagggccag

SEQ ID NO: 5262565 - DNA, 25 bp, Homo sapien
aacgcccagagtggccttcacaggg

SEQ ID NO: 5262566 - DNA, 25 bp, Homo sapien
cacccaaacgcccagagtggccttc

SEQ ID NO: 5262567 - DNA, 25 bp, Homo sapien
aggcggccaacggagaaaaccacat

SEQ ID NO: 5262568 - DNA, 25 bp, Homo sapien
tccaggaggcggccaacggagaaaa

SEQ ID NO: 5262569 - DNA, 25 bp, Homo sapien
gccaggtagtactcccgcttcactt

SEQ ID NO: 5262570 - DNA, 25 bp, Homo sapien
tcagccagtgcctgcttagccaggt

SEQ ID NO: 5262571 - DNA, 25 bp, Homo sapien
ggccgagactgggctgtacagttca

SEQ ID NO: 5262572 - DNA, 25 bp, Homo sapien
cagccactgacaaggatagggagag

SEQ ID NO: 5262573 - DNA, 25 bp, Homo sapien
cggaggtagagcagccactgacaag

SEQ ID NO: 5262574 - DNA, 25 bp, Homo sapien
atgtgactcagtgtccggaggtaga

SEQ ID NO: 5262575 - DNA, 25 bp, Homo sapien
ccctcgggctgctcatcctttgttc

SEQ ID NO: 5262576 - DNA, 25 bp, Homo sapien
cctcgggctgctcatcctttgttcc

SEQ ID NO: 5262577 - DNA, 25 bp, Homo sapien
tcgggctgctcatcctttgttccgt

SEQ ID NO: 5262578 - DNA, 25 bp, Homo sapien
ctcgggctgctcatcctttgttccg

SEQ ID NO: 5262579 - DNA, 25 bp, Homo sapien
gccacgaggcacagtgggcggctgg

SEQ ID NO: 5262580 - DNA, 25 bp, Homo sapien
gccctgtgacctcagggagtgcacg

SEQ ID NO: 5262581 - DNA, 25 bp, Homo sapien
gcagggacaagtcagactagggcca

SEQ ID NO: 5262582 - DNA, 25 bp, Homo sapien
caggagcaggccatggccacgaggc

SEQ ID NO: 5262583 - DNA, 25 bp, Homo sapien
gatgtccttccaggcgtcactgctg

SEQ ID NO: 5262584 - DNA, 25 bp, Homo sapien
accgtgaagggtgtccagtgggagc

SEQ ID NO: 5262585 - DNA, 25 bp, Homo sapien
gaagaggaaaaggacgctgctcgca

SEQ ID NO: 5262586 - DNA, 25 bp, Homo sapien
actcccctaaggaccaccagatgtc

SEQ ID NO: 5262587 - DNA, 25 bp, Homo sapien
ctggggggaagcaggcaatgtgccc

SEQ ID NO: 5262588 - DNA, 25 bp, Homo sapien
acaacagcagccagcggttcacaca

SEQ ID NO: 5262589 - DNA, 25 bp, Homo sapien
gggatggagtgacaggcgctctgag

SEQ ID NO: 5262590 - DNA, 25 bp, Homo sapien
gatggagtgacaggcgctctgagga

SEQ ID NO: 5262591 - DNA, 25 bp, Homo sapien
cattttttagcaagcagacggccac

SEQ ID NO: 5262592 - DNA, 25 bp, Homo sapien
ggccctgcgctctgaaacattcgaa

SEQ ID NO: 5262593 - DNA, 25 bp, Homo sapien
gctgcagaatgcaagtaaagcggca

SEQ ID NO: 5262594 - DNA, 25 bp, Homo sapien
catgtgggtgatgtccctgcgcaaa

SEQ ID NO: 5262595 - DNA, 25 bp, Homo sapien
cccacctgggaagacgggtatggca

SEQ ID NO: 5262596 - DNA, 25 bp, Homo sapien
aggagataacgggaagagtcaagag

SEQ ID NO: 5262597 - DNA, 25 bp, Homo sapien
agagtcaagagggaataggtgttcc

SEQ ID NO: 5262598 - DNA, 25 bp, Homo sapien
gttcctcttaaagccaaacatgttg

SEQ ID NO: 5262599 - DNA, 25 bp, Homo sapien
cctcattgagggtggacaaccgtcc

SEQ ID NO: 5262600 - DNA, 25 bp, Homo sapien
cttcataggctagggtgaccacggc

SEQ ID NO: 5262601 - DNA, 25 bp, Homo sapien
ggtttgtctcaatctgacccagcgg

SEQ ID NO: 5262602 - DNA, 25 bp, Homo sapien
cagttttcacggtctagggccgaga

SEQ ID NO: 5262603 - DNA, 25 bp, Homo sapien
gaggctttgtggtgcgggacgcacc

SEQ ID NO: 5262604 - DNA, 25 bp, Homo sapien
cagaggctttgtggtgcgggacgca

SEQ ID NO: 5262605 - DNA, 25 bp, Homo sapien
agaggctttgtggtgcgggacgcac

SEQ ID NO: 5262606 - DNA, 25 bp, Homo sapien
ccagaggctttgtggtgcgggacgc

SEQ ID NO: 5262607 - DNA, 25 bp, Homo sapien
tgctatgcagtgaggacgagcatcg

SEQ ID NO: 5262608 - DNA, 25 bp, Homo sapien
ccgtgagcacgtcgagtctggtgaa

SEQ ID NO: 5262609 - DNA, 25 bp, Homo sapien
ctctagcacagggtggtcaaagggc

SEQ ID NO: 5262610 - DNA, 25 bp, Homo sapien
gagtggtacctcagacctacaagaa

SEQ ID NO: 5262611 - DNA, 25 bp, Homo sapien
gttcctgtcaccattgaagtagagg

SEQ ID NO: 5262612 - DNA, 25 bp, Homo sapien
ttgaagtagaggtgccctttgacct

SEQ ID NO: 5262613 - DNA, 25 bp, Homo sapien
tggttcctgtcaccattgaagtaga

SEQ ID NO: 5262614 - DNA, 25 bp, Homo sapien
tcctgtcaccattgaagtagaggtg

SEQ ID NO: 5262615 - DNA, 25 bp, Homo sapien
aaagccgtcatgaccccgaggatgt

SEQ ID NO: 5262616 - DNA, 25 bp, Homo sapien
tcatgggcatcggtcaaagccgtca

SEQ ID NO: 5262617 - DNA, 25 bp, Homo sapien
caaaaatagttctcacgttgccgtg

SEQ ID NO: 5262618 - DNA, 25 bp, Homo sapien
tgagcagcggtctgagagtcccttg

SEQ ID NO: 5262619 - DNA, 25 bp, Homo sapien
ttctcggctggacacagagtttggg

SEQ ID NO: 5262620 - DNA, 25 bp, Homo sapien
gtagccctcttgctcctaccgtgtg

SEQ ID NO: 5262621 - DNA, 25 bp, Homo sapien
taccgtgtgcgcacgggctgtgctt

SEQ ID NO: 5262622 - DNA, 25 bp, Homo sapien
cctggatgggatggacggttgccca

SEQ ID NO: 5262623 - DNA, 25 bp, Homo sapien
tctctggccggaaagaaaagtgtga

SEQ ID NO: 5262624 - DNA, 25 bp, Homo sapien
gcaggtgcctcacagacatatgcat

SEQ ID NO: 5262625 - DNA, 25 bp, Homo sapien
ggctaaagattgtgaccccggctct

SEQ ID NO: 5262626 - DNA, 25 bp, Homo sapien
tacagagccagttgtccaggagaat

SEQ ID NO: 5262627 - DNA, 25 bp, Homo sapien
cccttgatttcaggcaggcgtctgt

SEQ ID NO: 5262628 - DNA, 25 bp, Homo sapien
cagtagtatctaatatgttgtcggt

SEQ ID NO: 5262629 - DNA, 25 bp, Homo sapien
tctagcacatttatcggaatcggat

SEQ ID NO: 5262630 - DNA, 25 bp, Homo sapien
cgtctgtctggtctcctgctcattt

SEQ ID NO: 5262631 - DNA, 25 bp, Homo sapien
gaatccagcagattactcgggattt

SEQ ID NO: 5262632 - DNA, 25 bp, Homo sapien
tgctataccccagaaattccatcga

SEQ ID NO: 5262633 - DNA, 25 bp, Homo sapien
cagattactcgggatttcagtgttc

SEQ ID NO: 5262634 - DNA, 25 bp, Homo sapien
aattccatcgatctgtcatgggccc

SEQ ID NO: 5262635 - DNA, 25 bp, Homo sapien
cagtctttagagagtgtcccctcca

SEQ ID NO: 5262636 - DNA, 25 bp, Homo sapien
gaggtcccactcctttggctgaatt

SEQ ID NO: 5262637 - DNA, 25 bp, Homo sapien
ctcatggagtcagaggctaccccag

SEQ ID NO: 5262638 - DNA, 25 bp, Homo sapien
gaaaatcgatttgagggcatccacg

SEQ ID NO: 5262639 - DNA, 25 bp, Homo sapien
gatctgtagcactcgtgggaagaaa

SEQ ID NO: 5262640 - DNA, 25 bp, Homo sapien
tgaggaccggtctctaactgtagcc

SEQ ID NO: 5262641 - DNA, 25 bp, Homo sapien
tttcttactgccacacaagggcgtc

SEQ ID NO: 5262642 - DNA, 25 bp, Homo sapien
ccagaagcactggtgtccacaagca

SEQ ID NO: 5262643 - DNA, 25 bp, Homo sapien
tattttatatgtcacaatcacgtgg

SEQ ID NO: 5262644 - DNA, 25 bp, Homo sapien
ttttatatgtcacaatcacgtggtc

SEQ ID NO: 5262645 - DNA, 25 bp, Homo sapien
attttatatgtcacaatcacgtggt

SEQ ID NO: 5262646 - DNA, 25 bp, Homo sapien
ggtctccggatctcagaggttctcg

SEQ ID NO: 5262647 - DNA, 25 bp, Homo sapien
aaactgctgaggacggttctggacc

SEQ ID NO: 5262648 - DNA, 25 bp, Homo sapien
gagcagtatttagttcaggcccaaa

SEQ ID NO: 5262649 - DNA, 25 bp, Homo sapien
gagtactccacgtcccagaaagttg

SEQ ID NO: 5262650 - DNA, 25 bp, Homo sapien
gtatgtatttatccacacagttgcc

SEQ ID NO: 5262651 - DNA, 25 bp, Homo sapien
tcatttcttggcgtgatccttgtct

SEQ ID NO: 5262652 - DNA, 25 bp, Homo sapien
catctctcgtagtgtgtatccggta

SEQ ID NO: 5262653 - DNA, 25 bp, Homo sapien
tttctgctgcataaaggtttctagg

SEQ ID NO: 5262654 - DNA, 25 bp, Homo sapien
gctggagcttgcatctcgcatggta

SEQ ID NO: 5262655 - DNA, 25 bp, Homo sapien
agagcaatttgatccgcatcgaggg

SEQ ID NO: 5262656 - DNA, 25 bp, Homo sapien
aaatcccacgttgcactggaaccgg

SEQ ID NO: 5262657 - DNA, 25 bp, Homo sapien
ctggaaccggattggactccctggg

SEQ ID NO: 5262658 - DNA, 25 bp, Homo sapien
tccggcgacttcagtgttgatcagt

SEQ ID NO: 5262659 - DNA, 25 bp, Homo sapien
taatcgattctttggcgctccggcg

SEQ ID NO: 5262660 - DNA, 25 bp, Homo sapien
cattatgaactcaggcattgtccat

SEQ ID NO: 5262661 - DNA, 25 bp, Homo sapien
atatcaataccttctggccaggtgc

SEQ ID NO: 5262662 - DNA, 25 bp, Homo sapien
cagagtatatttagtgtaattcttc

SEQ ID NO: 5262663 - DNA, 25 bp, Homo sapien
tagatcttaacggtgagcttaaaat

SEQ ID NO: 5262664 - DNA, 25 bp, Homo sapien
cacaggcagagtatatttagtgtaa

SEQ ID NO: 5262665 - DNA, 25 bp, Homo sapien
atccaggctttgtttcattcataca

SEQ ID NO: 5262666 - DNA, 25 bp, Homo sapien
tattctgatcctacttcccctcatt

SEQ ID NO: 5262667 - DNA, 25 bp, Homo sapien
ttcctggtgtgatacttgttttcta

SEQ ID NO: 5262668 - DNA, 25 bp, Homo sapien
tccttggatgcctttggagttgcag

SEQ ID NO: 5262669 - DNA, 25 bp, Homo sapien
ccagccattctgctattctgatcct

SEQ ID NO: 5262670 - DNA, 25 bp, Homo sapien
tccattcatcccacacgtgcagtag

SEQ ID NO: 5262671 - DNA, 25 bp, Homo sapien
ttttatctaatacttgagtttccca

SEQ ID NO: 5262672 - DNA, 25 bp, Homo sapien
ccccacgttgatgcctaatgtcttc

SEQ ID NO: 5262673 - DNA, 25 bp, Homo sapien
atactcaccccacgttgatgcctaa

SEQ ID NO: 5262674 - DNA, 25 bp, Homo sapien
cttagtatgactgccttcgtgctga

SEQ ID NO: 5262675 - DNA, 25 bp, Homo sapien
ggcatgctgttgtgagcctcacctg

SEQ ID NO: 5262676 - DNA, 25 bp, Homo sapien
cacctgtcacacctatgcttctgta

SEQ ID NO: 5262677 - DNA, 25 bp, Homo sapien
tcgtgctgacgcacactcgtgttct

SEQ ID NO: 5262678 - DNA, 25 bp, Homo sapien
ctgtgtccttctgatatgtcctcat

SEQ ID NO: 5262679 - DNA, 25 bp, Homo sapien
tctgtgtccttctgatatgtcctca

SEQ ID NO: 5262680 - DNA, 25 bp, Homo sapien
gggccatttccttacagcacccttg

SEQ ID NO: 5262681 - DNA, 25 bp, Homo sapien
gattccccagagaaatatcttgtag

SEQ ID NO: 5262682 - DNA, 25 bp, Homo sapien
atgttcttgtgcctgctcgtgagtc

SEQ ID NO: 5262683 - DNA, 25 bp, Homo sapien
taagtcactattgaggctgctctgg

SEQ ID NO: 5262684 - DNA, 25 bp, Homo sapien
tccccgtgatcgctccgcactcccg

SEQ ID NO: 5262685 - DNA, 25 bp, Homo sapien
ggcggtggtgggctagacgagtttc

SEQ ID NO: 5262686 - DNA, 25 bp, Homo sapien
cgcccagtcgtactcggcgccccag

SEQ ID NO: 5262687 - DNA, 25 bp, Homo sapien
ctagacgagtttcgcgcggccgctc

SEQ ID NO: 5262688 - DNA, 25 bp, Homo sapien
aggaggagaggcgaaggctccccct

SEQ ID NO: 5262689 - DNA, 25 bp, Homo sapien
gctagacgagtttcgcgcggccgct

SEQ ID NO: 5262690 - DNA, 25 bp, Homo sapien
agctggggcgccgagtacgactggg

SEQ ID NO: 5262691 - DNA, 25 bp, Homo sapien
gagcggccgcgcgaaactcgtctag

SEQ ID NO: 5262692 - DNA, 25 bp, Homo sapien
agggggagccttcgcctctcctcct

SEQ ID NO: 5262693 - DNA, 25 bp, Homo sapien
aggtggtggcgggagtgcggagcga

SEQ ID NO: 5262694 - DNA, 25 bp, Homo sapien
agcggccgcgcgaaactcgtctagc

SEQ ID NO: 5262695 - DNA, 25 bp, Homo sapien
ggcgggagtgcggagcgatcacggg

SEQ ID NO: 5262696 - DNA, 25 bp, Homo sapien
caccgcaaggcgaagattctcatta

SEQ ID NO: 5262697 - DNA, 25 bp, Homo sapien
agttacccaccgcaaggcgaagatt

SEQ ID NO: 5262698 - DNA, 25 bp, Homo sapien
tgtctccttctaacaaacggccttc

SEQ ID NO: 5262699 - DNA, 25 bp, Homo sapien
tgttccactcttataagcataagaa

SEQ ID NO: 5262700 - DNA, 25 bp, Homo sapien
agcataagaaaaccgagctcataag

SEQ ID NO: 5262701 - DNA, 25 bp, Homo sapien
caaggcgaagattctcattacctgt

SEQ ID NO: 5262702 - DNA, 25 bp, Homo sapien
cttatgagctcggttttcttatgct

SEQ ID NO: 5262703 - DNA, 25 bp, Homo sapien
taatgagaatcttcgccttgcggtg

SEQ ID NO: 5262704 - DNA, 25 bp, Homo sapien
gaaggccgtttgttagaaggagaca

SEQ ID NO: 5262705 - DNA, 25 bp, Homo sapien
ttcttatgcttataagagtggaaca

SEQ ID NO: 5262706 - DNA, 25 bp, Homo sapien
aacaggtaatgagaatcttcgcctt

SEQ ID NO: 5262707 - DNA, 25 bp, Homo sapien
cttcgccttgcggtgggtaactgga

SEQ ID NO: 5262708 - DNA, 25 bp, Homo sapien
ggcgcctgttctcgggctgtttggc

SEQ ID NO: 5262709 - DNA, 25 bp, Homo sapien
tcggcgcctgttctcgggctgtttg

SEQ ID NO: 5262710 - DNA, 25 bp, Homo sapien
ggaccgcgagcgctgggcgggtccg

SEQ ID NO: 5262711 - DNA, 25 bp, Homo sapien
gggctgtgagcggaccgcgagcgct

SEQ ID NO: 5262712 - DNA, 25 bp, Homo sapien
gcggcgcggtcggtcggcgcctgtt

SEQ ID NO: 5262713 - DNA, 25 bp, Homo sapien
gtcggcgcctgttctcgggctgttt

SEQ ID NO: 5262714 - DNA, 25 bp, Homo sapien
agcgctcgcggtccgctcacagccc

SEQ ID NO: 5262715 - DNA, 25 bp, Homo sapien
gcggacccgcccagcgctcgcggtc

SEQ ID NO: 5262716 - DNA, 25 bp, Homo sapien
caaacagcccgagaacaggcgccga

SEQ ID NO: 5262717 - DNA, 25 bp, Homo sapien
gccaaacagcccgagaacaggcgcc

SEQ ID NO: 5262718 - DNA, 25 bp, Homo sapien
aaacagcccgagaacaggcgccgac

SEQ ID NO: 5262719 - DNA, 25 bp, Homo sapien
gaacaggcgccgaccgaccgcgccg

SEQ ID NO: 5262720 - DNA, 25 bp, Homo sapien
gctcgtcccatactctcgggcggtg

SEQ ID NO: 5262721 - DNA, 25 bp, Homo sapien
tcttcggcacttatcgtgggctccc

SEQ ID NO: 5262722 - DNA, 25 bp, Homo sapien
gtcccatactctcgggcggtggtcg

SEQ ID NO: 5262723 - DNA, 25 bp, Homo sapien
gagcccaggctcttcggcacttatc

SEQ ID NO: 5262724 - DNA, 25 bp, Homo sapien
taccccgcacaagttgtgggccggc

SEQ ID NO: 5262725 - DNA, 25 bp, Homo sapien
cggtgtaccccgcacaagttgtggg

SEQ ID NO: 5262726 - DNA, 25 bp, Homo sapien
cgaccaccgcccgagagtatgggac

SEQ ID NO: 5262727 - DNA, 25 bp, Homo sapien
gataagtgccgaagagcctgggctc

SEQ ID NO: 5262728 - DNA, 25 bp, Homo sapien
cccacgataagtgccgaagagcctg

SEQ ID NO: 5262729 - DNA, 25 bp, Homo sapien
caccgcccgagagtatgggacgagc

SEQ ID NO: 5262730 - DNA, 25 bp, Homo sapien
agggccggcccacaacttgtgcggg

SEQ ID NO: 5262731 - DNA, 25 bp, Homo sapien
gggagcccacgataagtgccgaaga

SEQ ID NO: 5262732 - DNA, 25 bp, Homo sapien
tcctctgcactgtcgtcggtgctgg

SEQ ID NO: 5262733 - DNA, 25 bp, Homo sapien
gaattcctctgcactgtcgtcggtg

SEQ ID NO: 5262734 - DNA, 25 bp, Homo sapien
tgaccccttgttgaccctgcgggaa

SEQ ID NO: 5262735 - DNA, 25 bp, Homo sapien
cggtgaccccttgttgaccctgcgg

SEQ ID NO: 5262736 - DNA, 25 bp, Homo sapien
tgccggcgacagtggctccgacacg

SEQ ID NO: 5262737 - DNA, 25 bp, Homo sapien
ctgcactgtcgtcggtgctgggcct

SEQ ID NO: 5262738 - DNA, 25 bp, Homo sapien
cgtgtcggagccactgtcgccggca

SEQ ID NO: 5262739 - DNA, 25 bp, Homo sapien
ttcccgcagggtcaacaaggggtca

SEQ ID NO: 5262740 - DNA, 25 bp, Homo sapien
aggcccagcaccgacgacagtgcag

SEQ ID NO: 5262741 - DNA, 25 bp, Homo sapien
ctcgaccgcactcgacgccccgagg

SEQ ID NO: 5262742 - DNA, 25 bp, Homo sapien
cagcaccgacgacagtgcagaggaa

SEQ ID NO: 5262743 - DNA, 25 bp, Homo sapien
caccgacgacagtgcagaggaattc

SEQ ID NO: 5262744 - DNA, 25 bp, Homo sapien
caaacacttagagcttgtgtggcca

SEQ ID NO: 5262745 - DNA, 25 bp, Homo sapien
tttggtgcttggagggaggatacag

SEQ ID NO: 5262746 - DNA, 25 bp, Homo sapien
tttaggcccgacaaacacttagagc

SEQ ID NO: 5262747 - DNA, 25 bp, Homo sapien
catcttgtctttctaacggtgccat

SEQ ID NO: 5262748 - DNA, 25 bp, Homo sapien
tctttctaacggtgccatttcctcc

SEQ ID NO: 5262749 - DNA, 25 bp, Homo sapien
gaggatacaggtttaggcccgacaa

SEQ ID NO: 5262750 - DNA, 25 bp, Homo sapien
atggcaccgttagaaagacaagatg

SEQ ID NO: 5262751 - DNA, 25 bp, Homo sapien
tggccacacaagctctaagtgtttg

SEQ ID NO: 5262752 - DNA, 25 bp, Homo sapien
gctctaagtgtttgtcgggcctaaa

SEQ ID NO: 5262753 - DNA, 25 bp, Homo sapien
gaggaaatggcaccgttagaaagac

SEQ ID NO: 5262754 - DNA, 25 bp, Homo sapien
caagctctaagtgtttgtcgggcct

SEQ ID NO: 5262755 - DNA, 25 bp, Homo sapien
tgtcgggcctaaacctgtatcctcc

SEQ ID NO: 5262756 - DNA, 25 bp, Homo sapien
agcgactaggccctgtctgcgggta

SEQ ID NO: 5262757 - DNA, 25 bp, Homo sapien
catcggctggatgccgtggataagc

SEQ ID NO: 5262758 - DNA, 25 bp, Homo sapien
cctgtctgcgggtaccttcggcgag

SEQ ID NO: 5262759 - DNA, 25 bp, Homo sapien
gactaggccctgtctgcgggtacct

SEQ ID NO: 5262760 - DNA, 25 bp, Homo sapien
caagcccatcggctggatgccgtgg

SEQ ID NO: 5262761 - DNA, 25 bp, Homo sapien
taggccctgtctgcgggtaccttcg

SEQ ID NO: 5262762 - DNA, 25 bp, Homo sapien
tatccacggcatccagccgatgggc

SEQ ID NO: 5262763 - DNA, 25 bp, Homo sapien
aaggtacccgcagacagggcctagt

SEQ ID NO: 5262764 - DNA, 25 bp, Homo sapien
tacccgcagacagggcctagtcgct

SEQ ID NO: 5262765 - DNA, 25 bp, Homo sapien
tcgccgaaggtacccgcagacaggg

SEQ ID NO: 5262766 - DNA, 25 bp, Homo sapien
ccacggcatccagccgatgggcttg

SEQ ID NO: 5262767 - DNA, 25 bp, Homo sapien
gcttatccacggcatccagccgatg

SEQ ID NO: 5262768 - DNA, 25 bp, Homo sapien
gcgaggcacggacaggcagcagggg

SEQ ID NO: 5262769 - DNA, 25 bp, Homo sapien
cccctgctgcctgtccgtgcctcgc

SEQ ID NO: 5262770 - DNA, 25 bp, Homo sapien
gtctaattcttgtcagtgccaccag

SEQ ID NO: 5262771 - DNA, 25 bp, Homo sapien
taatgggttctttgcaccacccagc

SEQ ID NO: 5262772 - DNA, 25 bp, Homo sapien
tagatttcctccagacaggcttagg

SEQ ID NO: 5262773 - DNA, 25 bp, Homo sapien
cattgcctcggttggtgtctagcac

SEQ ID NO: 5262774 - DNA, 25 bp, Homo sapien
tacctagtctgtgcttgtgggattc

SEQ ID NO: 5262775 - DNA, 25 bp, Homo sapien
ggcagggcacatgttgtcacccata

SEQ ID NO: 5262776 - DNA, 25 bp, Homo sapien
ggtaaacacctaagcctgtctggag

SEQ ID NO: 5262777 - DNA, 25 bp, Homo sapien
ggtgctagacaccaaccgaggcaat

SEQ ID NO: 5262778 - DNA, 25 bp, Homo sapien
tatgggtgacaacatgtgccctgcc

SEQ ID NO: 5262779 - DNA, 25 bp, Homo sapien
ggaatcccacaagcacagactaggt

SEQ ID NO: 5262780 - DNA, 25 bp, Homo sapien
ggacaaggtctggtggcactgacaa

SEQ ID NO: 5262781 - DNA, 25 bp, Homo sapien
cattaaatatatcggcaggcactgt

SEQ ID NO: 5262782 - DNA, 25 bp, Homo sapien
gaatggggacaccaaaactcatttg

SEQ ID NO: 5262783 - DNA, 25 bp, Homo sapien
ttttgtctggaggaatggggacacc

SEQ ID NO: 5262784 - DNA, 25 bp, Homo sapien
cagaaactgctgtaaaagaagaagt

SEQ ID NO: 5262785 - DNA, 25 bp, Homo sapien
ctgctgtaaaagaagaagttgtggg

SEQ ID NO: 5262786 - DNA, 25 bp, Homo sapien
ctgtaaaagaagaagttgtgggtat

SEQ ID NO: 5262787 - DNA, 25 bp, Homo sapien
catacagaaactgctgtaaaagaag

SEQ ID NO: 5262788 - DNA, 25 bp, Homo sapien
tacccacaacttcttcttttacagc

SEQ ID NO: 5262789 - DNA, 25 bp, Homo sapien
ggtgtccccattcctccagacaaaa

SEQ ID NO: 5262790 - DNA, 25 bp, Homo sapien
ctgccaaatgagttttggtgtcccc

SEQ ID NO: 5262791 - DNA, 25 bp, Homo sapien
cttcttttacagcagtttctgtatg

SEQ ID NO: 5262792 - DNA, 25 bp, Homo sapien
gagttttggtgtccccattcctcca

SEQ ID NO: 5262793 - DNA, 25 bp, Homo sapien
caaatgagttttggtgtccccattc

SEQ ID NO: 5262794 - DNA, 25 bp, Homo sapien
ggtccaatttgcacccagtgtttaa

SEQ ID NO: 5262795 - DNA, 25 bp, Homo sapien
taagatcatggaccttccgggttct

SEQ ID NO: 5262796 - DNA, 25 bp, Homo sapien
tatgtgggtatactgaacgtggacc

SEQ ID NO: 5262797 - DNA, 25 bp, Homo sapien
tggaataaacacgatctgaaggaac

SEQ ID NO: 5262798 - DNA, 25 bp, Homo sapien
gccccagtccctgttaggagtgtta

SEQ ID NO: 5262799 - DNA, 25 bp, Homo sapien
caacttctggcatgtggaataaaca

SEQ ID NO: 5262800 - DNA, 25 bp, Homo sapien
cataacactcctaacagggactggg

SEQ ID NO: 5262801 - DNA, 25 bp, Homo sapien
caacatctggcgatgtagaacccgg

SEQ ID NO: 5262802 - DNA, 25 bp, Homo sapien
tagaacccggaaggtccatgatctt

SEQ ID NO: 5262803 - DNA, 25 bp, Homo sapien
gatcgtgtttattccacatgccaga

SEQ ID NO: 5262804 - DNA, 25 bp, Homo sapien
taaacactgggtgcaaattggacca

SEQ ID NO: 5262805 - DNA, 25 bp, Homo sapien
ggaaggtccacgttcagtataccca

SEQ ID NO: 5262806 - DNA, 25 bp, Homo sapien
cgggagaggtgctctatggtatttc

SEQ ID NO: 5262807 - DNA, 25 bp, Homo sapien
aaatcagatacatgtaataggtgat

SEQ ID NO: 5262808 - DNA, 25 bp, Homo sapien
gggagaggtgctctatggtatttct

SEQ ID NO: 5262809 - DNA, 25 bp, Homo sapien
tcagatacatgtaataggtgataag

SEQ ID NO: 5262810 - DNA, 25 bp, Homo sapien
ttctatgttgcactgtgtgggtttg

SEQ ID NO: 5262811 - DNA, 25 bp, Homo sapien
tggaggtgcgggagaggtgctctat

SEQ ID NO: 5262812 - DNA, 25 bp, Homo sapien
ttatcacctattacatgtatctgat

SEQ ID NO: 5262813 - DNA, 25 bp, Homo sapien
cttatcacctattacatgtatctga

SEQ ID NO: 5262814 - DNA, 25 bp, Homo sapien
gaaataccatagagcacctctcccg

SEQ ID NO: 5262815 - DNA, 25 bp, Homo sapien
tatcacctattacatgtatctgatt

SEQ ID NO: 5262816 - DNA, 25 bp, Homo sapien
agaaataccatagagcacctctccc

SEQ ID NO: 5262817 - DNA, 25 bp, Homo sapien
caaacccacacagtgcaacatagaa

SEQ ID NO: 5262818 - DNA, 25 bp, Homo sapien
gatggagttcaactctaacgtcaag

SEQ ID NO: 5262819 - DNA, 25 bp, Homo sapien
ctctaacgtcaagtcttggtccttt

SEQ ID NO: 5262820 - DNA, 25 bp, Homo sapien
cgtcaagtcttggtccttttcattg

SEQ ID NO: 5262821 - DNA, 25 bp, Homo sapien
actctaacgtcaagtcttggtcctt

SEQ ID NO: 5262822 - DNA, 25 bp, Homo sapien
tagatggagttcaactctaacgtca

SEQ ID NO: 5262823 - DNA, 25 bp, Homo sapien
taacgtcaagtcttggtccttttca

SEQ ID NO: 5262824 - DNA, 25 bp, Homo sapien
gtcttgtccaaggttagatggagtt

SEQ ID NO: 5262825 - DNA, 25 bp, Homo sapien
ttgtccaaggttagatggagttcaa

SEQ ID NO: 5262826 - DNA, 25 bp, Homo sapien
tgtccaaggttagatggagttcaac

SEQ ID NO: 5262827 - DNA, 25 bp, Homo sapien
tcttgtccaaggttagatggagttc

SEQ ID NO: 5262828 - DNA, 25 bp, Homo sapien
cttgtccaaggttagatggagttca

SEQ ID NO: 5262829 - DNA, 25 bp, Homo sapien
aactccatctaaccttggacaagac

SEQ ID NO: 5262830 - DNA, 25 bp, Homo sapien
ttgaactccatctaaccttggacaa

SEQ ID NO: 5262831 - DNA, 25 bp, Homo sapien
gaactccatctaaccttggacaaga

SEQ ID NO: 5262832 - DNA, 25 bp, Homo sapien
tgaactccatctaaccttggacaag

SEQ ID NO: 5262833 - DNA, 25 bp, Homo sapien
gttgaactccatctaaccttggaca

SEQ ID NO: 5262834 - DNA, 25 bp, Homo sapien
tgaaaaggaccaagacttgacgtta

SEQ ID NO: 5262835 - DNA, 25 bp, Homo sapien
aatgaaaaggaccaagacttgacgt

SEQ ID NO: 5262836 - DNA, 25 bp, Homo sapien
caatgaaaaggaccaagacttgacg

SEQ ID NO: 5262837 - DNA, 25 bp, Homo sapien
tgacgttagagttgaactccatcta

SEQ ID NO: 5262838 - DNA, 25 bp, Homo sapien
aaaggaccaagacttgacgttagag

SEQ ID NO: 5262839 - DNA, 25 bp, Homo sapien
cttgacgttagagttgaactccatc

SEQ ID NO: 5262840 - DNA, 25 bp, Homo sapien
aaattccacatatctctggctgggc

SEQ ID NO: 5262841 - DNA, 25 bp, Homo sapien
gcccagccagagatatgtggaattt

SEQ ID NO: 5262842 - DNA, 25 bp, Homo sapien
gctttccaaagcttcagggtttcta

SEQ ID NO: 5262843 - DNA, 25 bp, Homo sapien
gctgagatcacccactgtacttcag

SEQ ID NO: 5262844 - DNA, 25 bp, Homo sapien
tccacatatctctggctgggcacag

SEQ ID NO: 5262845 - DNA, 25 bp, Homo sapien
ccgggagacaatgcgagactccgtc

SEQ ID NO: 5262846 - DNA, 25 bp, Homo sapien
aaattccacatatctctggctgggc

SEQ ID NO: 5262847 - DNA, 25 bp, Homo sapien
cactgtacttcagcccgggagacaa

SEQ ID NO: 5262848 - DNA, 25 bp, Homo sapien
gacggagtctcgcattgtctcccgg

SEQ ID NO: 5262849 - DNA, 25 bp, Homo sapien
ctgaagtacagtgggtgatctcagc

SEQ ID NO: 5262850 - DNA, 25 bp, Homo sapien
tagaaaccctgaagctttggaaagc

SEQ ID NO: 5262851 - DNA, 25 bp, Homo sapien
ctgtgcccagccagagatatgtgga

SEQ ID NO: 5262852 - DNA, 25 bp, Homo sapien
tgtctcccgggctgaagtacagtgg

SEQ ID NO: 5262853 - DNA, 25 bp, Homo sapien
gcccagccagagatatgtggaattt

SEQ ID NO: 5262854 - DNA, 25 bp, Homo sapien
tcagggaagtatgtatccgtgtgta

SEQ ID NO: 5262855 - DNA, 25 bp, Homo sapien
gctctatgtaatgaagtcccttact

SEQ ID NO: 5262856 - DNA, 25 bp, Homo sapien
tgacataattccagaggtcagggaa

SEQ ID NO: 5262857 - DNA, 25 bp, Homo sapien
tgtatccgtgtgtatcccatttgtg

SEQ ID NO: 5262858 - DNA, 25 bp, Homo sapien
cccagattggtgttgaatttttggc

SEQ ID NO: 5262859 - DNA, 25 bp, Homo sapien
tccctagtgtctaacatatagtcag

SEQ ID NO: 5262860 - DNA, 25 bp, Homo sapien
tacacacggatacatacttccctga

SEQ ID NO: 5262861 - DNA, 25 bp, Homo sapien
gactatatgttagacactagggaca

SEQ ID NO: 5262862 - DNA, 25 bp, Homo sapien
caaggagtaagggacttcattacat

SEQ ID NO: 5262863 - DNA, 25 bp, Homo sapien
cacaaatgggatacacacggataca

SEQ ID NO: 5262864 - DNA, 25 bp, Homo sapien
caaaaattcaacaccaatctgggca

SEQ ID NO: 5262865 - DNA, 25 bp, Homo sapien
ttccctgacctctggaattatgtca

SEQ ID NO: 5262866 - DNA, 25 bp, Homo sapien
tgttttcagactgttgacagtcggg

SEQ ID NO: 5262867 - DNA, 25 bp, Homo sapien
cagtcgggacttatatgattcatta

SEQ ID NO: 5262868 - DNA, 25 bp, Homo sapien
gtcgggacttatatgattcattatt

SEQ ID NO: 5262869 - DNA, 25 bp, Homo sapien
gctttatgttttcagactgttgaca

SEQ ID NO: 5262870 - DNA, 25 bp, Homo sapien
gacagtcgggacttatatgattcat

SEQ ID NO: 5262871 - DNA, 25 bp, Homo sapien
tatgttttcagactgttgacagtcg

SEQ ID NO: 5262872 - DNA, 25 bp, Homo sapien
aataatgaatcatataagtcccgac

SEQ ID NO: 5262873 - DNA, 25 bp, Homo sapien
tgtcaacagtctgaaaacataaagc

SEQ ID NO: 5262874 - DNA, 25 bp, Homo sapien
taatgaatcatataagtcccgactg

SEQ ID NO: 5262875 - DNA, 25 bp, Homo sapien
gactgtcaacagtctgaaaacataa

SEQ ID NO: 5262876 - DNA, 25 bp, Homo sapien
cccgactgtcaacagtctgaaaaca

SEQ ID NO: 5262877 - DNA, 25 bp, Homo sapien
gaatcatataagtcccgactgtcaa

SEQ ID NO: 5262878 - DNA, 25 bp, Homo sapien
ggatggccttgatctgttgacctcg

SEQ ID NO: 5262879 - DNA, 25 bp, Homo sapien
gggagtcttgttctgtcaccaggct

SEQ ID NO: 5262880 - DNA, 25 bp, Homo sapien
acgttcaagcgattcccctggctca

SEQ ID NO: 5262881 - DNA, 25 bp, Homo sapien
gggactgcagacacgtgccaccacg

SEQ ID NO: 5262882 - DNA, 25 bp, Homo sapien
acgggagtcttgttctgtcaccagg

SEQ ID NO: 5262883 - DNA, 25 bp, Homo sapien
tggccttgatctgttgacctcgtga

SEQ ID NO: 5262884 - DNA, 25 bp, Homo sapien
cgaggtcaacagatcaaggccatcc

SEQ ID NO: 5262885 - DNA, 25 bp, Homo sapien
cctggtgacagaacaagactcccgt

SEQ ID NO: 5262886 - DNA, 25 bp, Homo sapien
tcacgaggtcaacagatcaaggcca

SEQ ID NO: 5262887 - DNA, 25 bp, Homo sapien
tgagccaggggaatcgcttgaacgt

SEQ ID NO: 5262888 - DNA, 25 bp, Homo sapien
ctaaaatccaaaaaattagccagcg

SEQ ID NO: 5262889 - DNA, 25 bp, Homo sapien
cgtggtggcacgtgtctgcagtccc

SEQ ID NO: 5262890 - DNA, 25 bp, Homo sapien
tacctgggagaagctattctttagc

SEQ ID NO: 5262891 - DNA, 25 bp, Homo sapien
cagtatgccactgtctagattctgg

SEQ ID NO: 5262892 - DNA, 25 bp, Homo sapien
ttttcagtcgcatacaactaaggag

SEQ ID NO: 5262893 - DNA, 25 bp, Homo sapien
ggaactccatagtctctcaagtcga

SEQ ID NO: 5262894 - DNA, 25 bp, Homo sapien
aatgcattgcacctaatacctggga

SEQ ID NO: 5262895 - DNA, 25 bp, Homo sapien
cattcattcaaagtactgtcagctg

SEQ ID NO: 5262896 - DNA, 25 bp, Homo sapien
gagtatctagtgtcaaagaccaaga

SEQ ID NO: 5262897 - DNA, 25 bp, Homo sapien
tcccaggtattaggtgcaatgcatt

SEQ ID NO: 5262898 - DNA, 25 bp, Homo sapien
gcattggacagtaatgaacacccac

SEQ ID NO: 5262899 - DNA, 25 bp, Homo sapien
tcgacttgagagactatggagttcc

SEQ ID NO: 5262900 - DNA, 25 bp, Homo sapien
aactccttagttgtatgcgactgaa

SEQ ID NO: 5262901 - DNA, 25 bp, Homo sapien
gctaaagaatagcttctcccaggta

SEQ ID NO: 5262902 - DNA, 25 bp, Homo sapien
gctatgttggatttgcaaacctccc

SEQ ID NO: 5262903 - DNA, 25 bp, Homo sapien
ctccccaatcaagttcaccgaaaat

SEQ ID NO: 5262904 - DNA, 25 bp, Homo sapien
tccccaatcaagttcaccgaaaatc

SEQ ID NO: 5262905 - DNA, 25 bp, Homo sapien
gattttcggtgaacttgattgggga

SEQ ID NO: 5262906 - DNA, 25 bp, Homo sapien
gggaggtttgcaaatccaacatagc

SEQ ID NO: 5262907 - DNA, 25 bp, Homo sapien
attttcggtgaacttgattggggag

SEQ ID NO: 5262908 - DNA, 25 bp, Homo sapien
cgaccaccatcagtgtgaactcaaa

SEQ ID NO: 5262909 - DNA, 25 bp, Homo sapien
ccaacatagccaggtgtttctggat

SEQ ID NO: 5262910 - DNA, 25 bp, Homo sapien
cactgattttcggtgaacttgattg

SEQ ID NO: 5262911 - DNA, 25 bp, Homo sapien
agccaggtgtttctggatttataaa

SEQ ID NO: 5262912 - DNA, 25 bp, Homo sapien
tgaactcaaaaccttttttcactga

SEQ ID NO: 5262913 - DNA, 25 bp, Homo sapien
gggaggtttgcaaatccaacatagc

SEQ ID NO: 5262914 - DNA, 25 bp, Homo sapien
aagcagccttacagggaagcccacc

SEQ ID NO: 5262915 - DNA, 25 bp, Homo sapien
cagccttacagggaagcccaccaag

SEQ ID NO: 5262916 - DNA, 25 bp, Homo sapien
cactcaagcagccttacagggaagc

SEQ ID NO: 5262917 - DNA, 25 bp, Homo sapien
agcagccttacagggaagcccacca

SEQ ID NO: 5262918 - DNA, 25 bp, Homo sapien
actcaagcagccttacagggaagcc

SEQ ID NO: 5262919 - DNA, 25 bp, Homo sapien
agccttacagggaagcccaccaagt

SEQ ID NO: 5262920 - DNA, 25 bp, Homo sapien
cttctcaaattactcactctggagg

SEQ ID NO: 5262921 - DNA, 25 bp, Homo sapien
tcttctcaaattactcactctggag

SEQ ID NO: 5262922 - DNA, 25 bp, Homo sapien
gcctcttctcaaattactcactctg

SEQ ID NO: 5262923 - DNA, 25 bp, Homo sapien
cctcttctcaaattactcactctgg

SEQ ID NO: 5262924 - DNA, 25 bp, Homo sapien
ctcttctcaaattactcactctgga

SEQ ID NO: 5262925 - DNA, 25 bp, Homo sapien
ccagagtgagtaatttgagaagagg

SEQ ID NO: 5262926 - DNA, 25 bp, Homo sapien
cctccagagtgagtaatttgagaag

SEQ ID NO: 5262927 - DNA, 25 bp, Homo sapien
cagagtgagtaatttgagaagaggc

SEQ ID NO: 5262928 - DNA, 25 bp, Homo sapien
tccagagtgagtaatttgagaagag

SEQ ID NO: 5262929 - DNA, 25 bp, Homo sapien
ctccagagtgagtaatttgagaaga

SEQ ID NO: 5262930 - DNA, 25 bp, Homo sapien
cttggtgggcttccctgtaaggctg

SEQ ID NO: 5262931 - DNA, 25 bp, Homo sapien
ggtgggcttccctgtaaggctgctt

SEQ ID NO: 5262932 - DNA, 25 bp, Homo sapien
gcttccctgtaaggctgcttgagtg

SEQ ID NO: 5262933 - DNA, 25 bp, Homo sapien
tggtgggcttccctgtaaggctgct

SEQ ID NO: 5262934 - DNA, 25 bp, Homo sapien
acttggtgggcttccctgtaaggct

SEQ ID NO: 5262935 - DNA, 25 bp, Homo sapien
ggcttccctgtaaggctgcttgagt

SEQ ID NO: 5262936 - DNA, 25 bp, Homo sapien
cagtgtcctttggtacattgtgaac

SEQ ID NO: 5262937 - DNA, 25 bp, Homo sapien
tagaaatggatctcgatggcaaaga

SEQ ID NO: 5262938 - DNA, 25 bp, Homo sapien
ttttcatgataagcctgacagcaca

SEQ ID NO: 5262939 - DNA, 25 bp, Homo sapien
gtacctgtagttcctctcacctgag

SEQ ID NO: 5262940 - DNA, 25 bp, Homo sapien
gaaattgaatgtgccctcagtgtcc

SEQ ID NO: 5262941 - DNA, 25 bp, Homo sapien
taagtgacccgtttcagaaatatcc

SEQ ID NO: 5262942 - DNA, 25 bp, Homo sapien
tgtgctgtcaggcttatcatgaaaa

SEQ ID NO: 5262943 - DNA, 25 bp, Homo sapien
gatatttctgaaacgggtcacttac

SEQ ID NO: 5262944 - DNA, 25 bp, Homo sapien
tagactgttcacaatgtaccaaagg

SEQ ID NO: 5262945 - DNA, 25 bp, Homo sapien
ctcaggtgagaggaactacaggtac

SEQ ID NO: 5262946 - DNA, 25 bp, Homo sapien
gacactgagggcacattcaatttct

SEQ ID NO: 5262947 - DNA, 25 bp, Homo sapien
caatgtaccaaaggacactgagggc

SEQ ID NO: 5262948 - DNA, 25 bp, Homo sapien
aaattaagtagaaattggctgggtg

SEQ ID NO: 5262949 - DNA, 25 bp, Homo sapien
agcactttagtctggcgacagagca

SEQ ID NO: 5262950 - DNA, 25 bp, Homo sapien
ctgaggccaggagtatcacttgaac

SEQ ID NO: 5262951 - DNA, 25 bp, Homo sapien
cacagcactttagtctggcgacaga

SEQ ID NO: 5262952 - DNA, 25 bp, Homo sapien
ccaagattgcgccacagcactttag

SEQ ID NO: 5262953 - DNA, 25 bp, Homo sapien
gaggctgaggccaggagtatcactt

SEQ ID NO: 5262954 - DNA, 25 bp, Homo sapien
tctgtcgccagactaaagtgctgtg

SEQ ID NO: 5262955 - DNA, 25 bp, Homo sapien
ctaaagtgctgtggcgcaatcttgg

SEQ ID NO: 5262956 - DNA, 25 bp, Homo sapien
ccagactaaagtgctgtggcgcaat

SEQ ID NO: 5262957 - DNA, 25 bp, Homo sapien
cacccagccaatttctacttaattt

SEQ ID NO: 5262958 - DNA, 25 bp, Homo sapien
tgctctgtcgccagactaaagtgct

SEQ ID NO: 5262959 - DNA, 25 bp, Homo sapien
gttcaagtgatactcctggcctcag

SEQ ID NO: 5262960 - DNA, 25 bp, Homo sapien
gcgtctaccttactgctgtgtctgg

SEQ ID NO: 5262961 - DNA, 25 bp, Homo sapien
tagaaatgcttgtttttcggtgcca

SEQ ID NO: 5262962 - DNA, 25 bp, Homo sapien
tgatttcctcattacggccagcaga

SEQ ID NO: 5262963 - DNA, 25 bp, Homo sapien
taacctgatgcgtctaccttactgc

SEQ ID NO: 5262964 - DNA, 25 bp, Homo sapien
ccagcagttttgtcaagagggtaca

SEQ ID NO: 5262965 - DNA, 25 bp, Homo sapien
gagggtacaccgaacaaagaggatc

SEQ ID NO: 5262966 - DNA, 25 bp, Homo sapien
tggcaccgaaaaacaagcatttcta

SEQ ID NO: 5262967 - DNA, 25 bp, Homo sapien
tctgctggccgtaatgaggaaatca

SEQ ID NO: 5262968 - DNA, 25 bp, Homo sapien
tgtaccctcttgacaaaactgctgg

SEQ ID NO: 5262969 - DNA, 25 bp, Homo sapien
gcagtaaggtagacgcatcaggtta

SEQ ID NO: 5262970 - DNA, 25 bp, Homo sapien
ccagacacagcagtaaggtagacgc

SEQ ID NO: 5262971 - DNA, 25 bp, Homo sapien
tgatcctctttgttcggtgtaccct

SEQ ID NO: 5262972 - DNA, 25 bp, Homo sapien
cagtctgtaacaactagatgattat

SEQ ID NO: 5262973 - DNA, 25 bp, Homo sapien
gatttcaagacttaacagcagtaat

SEQ ID NO: 5262974 - DNA, 25 bp, Homo sapien
gcaacagccaagaagtagacccatc

SEQ ID NO: 5262975 - DNA, 25 bp, Homo sapien
gatacacagatctactaaacagagc

SEQ ID NO: 5262976 - DNA, 25 bp, Homo sapien
gcagagttggaggattacagtccct

SEQ ID NO: 5262977 - DNA, 25 bp, Homo sapien
gcttcacactgtatatcacaacctg

SEQ ID NO: 5262978 - DNA, 25 bp, Homo sapien
caggttgtgatatacagtgtgaagc

SEQ ID NO: 5262979 - DNA, 25 bp, Homo sapien
cataatcatctagttgttacagact

SEQ ID NO: 5262980 - DNA, 25 bp, Homo sapien
gatgggtctacttcttggctgttgc

SEQ ID NO: 5262981 - DNA, 25 bp, Homo sapien
ggctgttgctctgtttagtagatct

SEQ ID NO: 5262982 - DNA, 25 bp, Homo sapien
gaaatcagggactgtaatcctccaa

SEQ ID NO: 5262983 - DNA, 25 bp, Homo sapien
gaacttattatattgatgggtctac

SEQ ID NO: 5262984 - DNA, 25 bp, Homo sapien
acagttacacaaagcaactctaggg

SEQ ID NO: 5262985 - DNA, 25 bp, Homo sapien
gccagacacaaaacaggccatgttg

SEQ ID NO: 5262986 - DNA, 25 bp, Homo sapien
gagagggtagacttcacagttacac

SEQ ID NO: 5262987 - DNA, 25 bp, Homo sapien
tgtaaaaatgccacaaccagtatgg

SEQ ID NO: 5262988 - DNA, 25 bp, Homo sapien
ctagagagtggattaacaaattgtg

SEQ ID NO: 5262989 - DNA, 25 bp, Homo sapien
cgaactactcgtagatgcaacaaca

SEQ ID NO: 5262990 - DNA, 25 bp, Homo sapien
catctttggtggtcaggggaatacg

SEQ ID NO: 5262991 - DNA, 25 bp, Homo sapien
agaggcaggcactccaggtgtcagc

SEQ ID NO: 5262992 - DNA, 25 bp, Homo sapien
ctccaggtgtcagcaaggatgtgaa

SEQ ID NO: 5262993 - DNA, 25 bp, Homo sapien
tacgcattgaaaccatgagatgcca

SEQ ID NO: 5262994 - DNA, 25 bp, Homo sapien
atgagatgccactacccagccacta

SEQ ID NO: 5262995 - DNA, 25 bp, Homo sapien
gggaatacgcattgaaaccatgaga

SEQ ID NO: 5262996 - DNA, 25 bp, Homo sapien
ttcacatccttgctgacacctggag

SEQ ID NO: 5262997 - DNA, 25 bp, Homo sapien
catggtttcaatgcgtattcccctg

SEQ ID NO: 5262998 - DNA, 25 bp, Homo sapien
tattcccctgaccaccaaagatgtg

SEQ ID NO: 5262999 - DNA, 25 bp, Homo sapien
gtggcatctcatggtttcaatgcgt

SEQ ID NO: 5263000 - DNA, 25 bp, Homo sapien
ttgctgacacctggagtgcctgcct

SEQ ID NO: 5263001 - DNA, 25 bp, Homo sapien
cttagtggctgggtagtggcatctc

SEQ ID NO: 5263002 - DNA, 25 bp, Homo sapien
caacatggcctgttttgtgtctggc

SEQ ID NO: 5263003 - DNA, 25 bp, Homo sapien
tgtaactgtgaagtctaccctctcc

SEQ ID NO: 5263004 - DNA, 25 bp, Homo sapien
ccatactggttgtggcatttttaca

SEQ ID NO: 5263005 - DNA, 25 bp, Homo sapien
ccctagagttgctttgtgtaactgt

SEQ ID NO: 5263006 - DNA, 25 bp, Homo sapien
taatcaaactccactcaagataaag

SEQ ID NO: 5263007 - DNA, 25 bp, Homo sapien
tgttgttgcatctacgagtagttcg

SEQ ID NO: 5263008 - DNA, 25 bp, Homo sapien
tcatatgaataaggtcatgacaagg

SEQ ID NO: 5263009 - DNA, 25 bp, Homo sapien
tcatactgcaaacatagtagtactg

SEQ ID NO: 5263010 - DNA, 25 bp, Homo sapien
tgtaaacacttaaccgattgaatgg

SEQ ID NO: 5263011 - DNA, 25 bp, Homo sapien
tgtaggtactaaacacagaatgatg

SEQ ID NO: 5263012 - DNA, 25 bp, Homo sapien
gtacttagcccagtaccaggcctta

SEQ ID NO: 5263013 - DNA, 25 bp, Homo sapien
gatgtttgtgaggtacttagcccag

SEQ ID NO: 5263014 - DNA, 25 bp, Homo sapien
aaagtacattcctcacatttgtgaa

SEQ ID NO: 5263015 - DNA, 25 bp, Homo sapien
tggtgagtttagtgactagcagaac

SEQ ID NO: 5263016 - DNA, 25 bp, Homo sapien
tggatagtactctgaccttgggcaa

SEQ ID NO: 5263017 - DNA, 25 bp, Homo sapien
gaactgataattgaaaacctgcttt

SEQ ID NO: 5263018 - DNA, 25 bp, Homo sapien
tatgatgttcaagttctgtagtctc

SEQ ID NO: 5263019 - DNA, 25 bp, Homo sapien
tctgtagtctcatagacctggattc

SEQ ID NO: 5263020 - DNA, 25 bp, Homo sapien
caaggtcagagtactatccagagca

SEQ ID NO: 5263021 - DNA, 25 bp, Homo sapien
aaagcaggttttcaattatcagttc

SEQ ID NO: 5263022 - DNA, 25 bp, Homo sapien
gaatccaggtctatgagactacaga

SEQ ID NO: 5263023 - DNA, 25 bp, Homo sapien
caaagaaactctaatttgcccaagg

SEQ ID NO: 5263024 - DNA, 25 bp, Homo sapien
gagactacagaacttgaacatcata

SEQ ID NO: 5263025 - DNA, 25 bp, Homo sapien
cagttctgctagtcactaaactcac

SEQ ID NO: 5263026 - DNA, 25 bp, Homo sapien
taaggcctggtactgggctaagtac

SEQ ID NO: 5263027 - DNA, 25 bp, Homo sapien
catcattctgtgtttagtacctaca

SEQ ID NO: 5263028 - DNA, 25 bp, Homo sapien
gggctaagtacctcacaaacatcat

SEQ ID NO: 5263029 - DNA, 25 bp, Homo sapien
ccattcaatcggttaagtgtttaca

SEQ ID NO: 5263030 - DNA, 25 bp, Homo sapien
taagtgtttacataaggcctggtac

SEQ ID NO: 5263031 - DNA, 25 bp, Homo sapien
cagtactactatgtttgcagtatga

SEQ ID NO: 5263032 - DNA, 25 bp, Homo sapien
gaaaatcgactctcataaacagcct

SEQ ID NO: 5263033 - DNA, 25 bp, Homo sapien
gaatcaggtctaggaaaatcgactc

SEQ ID NO: 5263034 - DNA, 25 bp, Homo sapien
cagcctattcctaactgatctgtac

SEQ ID NO: 5263035 - DNA, 25 bp, Homo sapien
tcgactctcataaacagcctattcc

SEQ ID NO: 5263036 - DNA, 25 bp, Homo sapien
tgtacccagaaagagtcatacctgg

SEQ ID NO: 5263037 - DNA, 25 bp, Homo sapien
ccagaaagagtcatacctggagcag

SEQ ID NO: 5263038 - DNA, 25 bp, Homo sapien
ctgctccaggtatgactctttctgg

SEQ ID NO: 5263039 - DNA, 25 bp, Homo sapien
ggctgtttatgagagtcgattttcc

SEQ ID NO: 5263040 - DNA, 25 bp, Homo sapien
gtacagatcagttaggaataggctg

SEQ ID NO: 5263041 - DNA, 25 bp, Homo sapien
gagagtcgattttcctagacctgat

SEQ ID NO: 5263042 - DNA, 25 bp, Homo sapien
ccaggtatgactctttctgggtaca

SEQ ID NO: 5263043 - DNA, 25 bp, Homo sapien
ggaataggctgtttatgagagtcga

SEQ ID NO: 5263044 - DNA, 25 bp, Homo sapien
tactgtaagtgtaattctacatgaa

SEQ ID NO: 5263045 - DNA, 25 bp, Homo sapien
gttactgtaagtgtaattctacatg

SEQ ID NO: 5263046 - DNA, 25 bp, Homo sapien
gtaagtgtaattctacatgaaagat

SEQ ID NO: 5263047 - DNA, 25 bp, Homo sapien
tatgttactgtaagtgtaattctac

SEQ ID NO: 5263048 - DNA, 25 bp, Homo sapien
tgctgaagactgcctaattaatatt

SEQ ID NO: 5263049 - DNA, 25 bp, Homo sapien
cattcttatgttactgtaagtgtaa

SEQ ID NO: 5263050 - DNA, 25 bp, Homo sapien
catgtagaattacacttacagtaac

SEQ ID NO: 5263051 - DNA, 25 bp, Homo sapien
tacacttacagtaacataagaatgt

SEQ ID NO: 5263052 - DNA, 25 bp, Homo sapien
gaattacacttacagtaacataaga

SEQ ID NO: 5263053 - DNA, 25 bp, Homo sapien
ctttcatgtagaattacacttacag

SEQ ID NO: 5263054 - DNA, 25 bp, Homo sapien
aatattaattaggcagtcttcagca

SEQ ID NO: 5263055 - DNA, 25 bp, Homo sapien
atctttcatgtagaattacacttac

SEQ ID NO: 5263056 - DNA, 25 bp, Homo sapien
tgaacacaaggaaaacacttttatg

SEQ ID NO: 5263057 - DNA, 25 bp, Homo sapien
cataaaagtgttttccttgtgttca

SEQ ID NO: 5263058 - DNA, 25 bp, Homo sapien
ttactaggatagatgttcgaattca

SEQ ID NO: 5263059 - DNA, 25 bp, Homo sapien
tttgggttgtagactttctttgaca

SEQ ID NO: 5263060 - DNA, 25 bp, Homo sapien
gctgtgtaactagaagattactagg

SEQ ID NO: 5263061 - DNA, 25 bp, Homo sapien
tctttgacacgtatccatggatcca

SEQ ID NO: 5263062 - DNA, 25 bp, Homo sapien
tgttgaatgaaataggcacacatag

SEQ ID NO: 5263063 - DNA, 25 bp, Homo sapien
cagcatccacaaatgactgttgaat

SEQ ID NO: 5263064 - DNA, 25 bp, Homo sapien
attcaacagtcatttgtggatgctg

SEQ ID NO: 5263065 - DNA, 25 bp, Homo sapien
tgaattcgaacatctatcctagtaa

SEQ ID NO: 5263066 - DNA, 25 bp, Homo sapien
tgtcaaagaaagtctacaacccaaa

SEQ ID NO: 5263067 - DNA, 25 bp, Homo sapien
tagtaatcttctagttacacagcat

SEQ ID NO: 5263068 - DNA, 25 bp, Homo sapien
ggatccatggatacgtgtcaaagaa

SEQ ID NO: 5263069 - DNA, 25 bp, Homo sapien
tatgtgtgcctatttcattcaacag

SEQ ID NO: 5263070 - DNA, 25 bp, Homo sapien
tggagaacctacctctgtagagagg

SEQ ID NO: 5263071 - DNA, 25 bp, Homo sapien
gctgctgcaagaatatgtagccctt

SEQ ID NO: 5263072 - DNA, 25 bp, Homo sapien
cctctgtagagaggcagtagactct

SEQ ID NO: 5263073 - DNA, 25 bp, Homo sapien
tccccatggtatctttggagaacct

SEQ ID NO: 5263074 - DNA, 25 bp, Homo sapien
tgaagtcacctgtcgtaagaacgtg

SEQ ID NO: 5263075 - DNA, 25 bp, Homo sapien
ccccagtagcacaataatcttagct

SEQ ID NO: 5263076 - DNA, 25 bp, Homo sapien
aagggctacatattcttgcagcagc

SEQ ID NO: 5263077 - DNA, 25 bp, Homo sapien
cctctctacagaggtaggttctcca

SEQ ID NO: 5263078 - DNA, 25 bp, Homo sapien
aagctaagattattgtgctactggg

SEQ ID NO: 5263079 - DNA, 25 bp, Homo sapien
acgttcttacgacaggtgacttcag

SEQ ID NO: 5263080 - DNA, 25 bp, Homo sapien
tacatattcttgcagcagcccaagt

SEQ ID NO: 5263081 - DNA, 25 bp, Homo sapien
agagtctactgcctctctacagagg

SEQ ID NO: 5263082 - DNA, 25 bp, Homo sapien
gtcaagctacgcctgacagtggtag

SEQ ID NO: 5263083 - DNA, 25 bp, Homo sapien
tgtccagattgaggcttcaactgtt

SEQ ID NO: 5263084 - DNA, 25 bp, Homo sapien
gatacccctggctatggtgacgcta

SEQ ID NO: 5263085 - DNA, 25 bp, Homo sapien
tgaaagaactgtccagattgaggct

SEQ ID NO: 5263086 - DNA, 25 bp, Homo sapien
gcctgacagtggtagatacccctgg

SEQ ID NO: 5263087 - DNA, 25 bp, Homo sapien
ggtgacgctatcaactgcagagatt

SEQ ID NO: 5263088 - DNA, 25 bp, Homo sapien
gtagcttgacccctcgctcttcaat

SEQ ID NO: 5263089 - DNA, 25 bp, Homo sapien
gttgaagcctcaatctggacagttc

SEQ ID NO: 5263090 - DNA, 25 bp, Homo sapien
caatctctgcagttgatagcgtcac

SEQ ID NO: 5263091 - DNA, 25 bp, Homo sapien
gggtatctaccactgtcaggcgtag

SEQ ID NO: 5263092 - DNA, 25 bp, Homo sapien
cactgtcaggcgtagcttgacccct

SEQ ID NO: 5263093 - DNA, 25 bp, Homo sapien
gttgatagcgtcaccatagccaggg

SEQ ID NO: 5263094 - DNA, 25 bp, Homo sapien
cgtagtgtctgtaaatgactgctca

SEQ ID NO: 5263095 - DNA, 25 bp, Homo sapien
gaaacacctggatttgagccgtggt

SEQ ID NO: 5263096 - DNA, 25 bp, Homo sapien
tcacctgtaccgtgcaaagaatgcc

SEQ ID NO: 5263097 - DNA, 25 bp, Homo sapien
gatcgcaaagccagtcatccataga

SEQ ID NO: 5263098 - DNA, 25 bp, Homo sapien
tgttgtacaaactccctcctggttc

SEQ ID NO: 5263099 - DNA, 25 bp, Homo sapien
gttggtgaccgagatactgtagtac

SEQ ID NO: 5263100 - DNA, 25 bp, Homo sapien
tgtactacagtatctcggtcaccaa

SEQ ID NO: 5263101 - DNA, 25 bp, Homo sapien
tctttgcacggtacaggtgacagac

SEQ ID NO: 5263102 - DNA, 25 bp, Homo sapien
gaaccaggagggagtttgtacaaca

SEQ ID NO: 5263103 - DNA, 25 bp, Homo sapien
tctatggatgactggctttgcgatc

SEQ ID NO: 5263104 - DNA, 25 bp, Homo sapien
caaccacggctcaaatccaggtgtt

SEQ ID NO: 5263105 - DNA, 25 bp, Homo sapien
gcactttcacatgtaagaagggaga

SEQ ID NO: 5263106 - DNA, 25 bp, Homo sapien
cacttaggggcagttatgcttggca

SEQ ID NO: 5263107 - DNA, 25 bp, Homo sapien
attccattcaggcttttgactctca

SEQ ID NO: 5263108 - DNA, 25 bp, Homo sapien
cttttgactctcagcacttaggggc

SEQ ID NO: 5263109 - DNA, 25 bp, Homo sapien
tggccctctctcaggtgcatcataa

SEQ ID NO: 5263110 - DNA, 25 bp, Homo sapien
tcctgaaaagaattggcagccctgg

SEQ ID NO: 5263111 - DNA, 25 bp, Homo sapien
tgcatcataacctattccattcagg

SEQ ID NO: 5263112 - DNA, 25 bp, Homo sapien
gcccctaagtgctgagagtcaaaag

SEQ ID NO: 5263113 - DNA, 25 bp, Homo sapien
tatgatgcacctgagagagggccag

SEQ ID NO: 5263114 - DNA, 25 bp, Homo sapien
tgaatggaataggttatgatgcacc

SEQ ID NO: 5263115 - DNA, 25 bp, Homo sapien
ccagggctgccaattcttttcagga

SEQ ID NO: 5263116 - DNA, 25 bp, Homo sapien
tgagagtcaaaagcctgaatggaat

SEQ ID NO: 5263117 - DNA, 25 bp, Homo sapien
tatgccaagcataactgcccctaag

SEQ ID NO: 5263118 - DNA, 25 bp, Homo sapien
cctgttttataccctatgattattg

SEQ ID NO: 5263119 - DNA, 25 bp, Homo sapien
ccctgttttataccctatgattatt

SEQ ID NO: 5263120 - DNA, 25 bp, Homo sapien
cccctgttttataccctatgattat

SEQ ID NO: 5263121 - DNA, 25 bp, Homo sapien
ctgttttataccctatgattattgt

SEQ ID NO: 5263122 - DNA, 25 bp, Homo sapien
tgttttataccctatgattattgtt

SEQ ID NO: 5263123 - DNA, 25 bp, Homo sapien
acaataatcatagggtataaaacag

SEQ ID NO: 5263124 - DNA, 25 bp, Homo sapien
aataatcatagggtataaaacaggg

SEQ ID NO: 5263125 - DNA, 25 bp, Homo sapien
caataatcatagggtataaaacagg

SEQ ID NO: 5263126 - DNA, 25 bp, Homo sapien
aacaataatcatagggtataaaaca

SEQ ID NO: 5263127 - DNA, 25 bp, Homo sapien
aatagggtgcattgttgcttttact

SEQ ID NO: 5263128 - DNA, 25 bp, Homo sapien
ctcctatattgatgagcaatttgag

SEQ ID NO: 5263129 - DNA, 25 bp, Homo sapien
ggcacatcattgataatagggtgca

SEQ ID NO: 5263130 - DNA, 25 bp, Homo sapien
gcggcttgaacaggcggcacatcat

SEQ ID NO: 5263131 - DNA, 25 bp, Homo sapien
caatttgagaggtacctgcatgacg

SEQ ID NO: 5263132 - DNA, 25 bp, Homo sapien
cctgcatgacgagagcggcttgaac

SEQ ID NO: 5263133 - DNA, 25 bp, Homo sapien
gttcaagccgctctcgtcatgcagg

SEQ ID NO: 5263134 - DNA, 25 bp, Homo sapien
agtaaaagcaacaatgcaccctatt

SEQ ID NO: 5263135 - DNA, 25 bp, Homo sapien
tgcaccctattatcaatgatgtgcc

SEQ ID NO: 5263136 - DNA, 25 bp, Homo sapien
atgatgtgccgcctgttcaagccgc

SEQ ID NO: 5263137 - DNA, 25 bp, Homo sapien
tcatgcaggtacctctcaaattgct

SEQ ID NO: 5263138 - DNA, 25 bp, Homo sapien
ctcaaattgctcatcaatataggag

SEQ ID NO: 5263139 - DNA, 25 bp, Homo sapien
tgaaggcaatacacaacaaggtgaa

SEQ ID NO: 5263140 - DNA, 25 bp, Homo sapien
gaaggcaatacacaacaaggtgaat

SEQ ID NO: 5263141 - DNA, 25 bp, Homo sapien
atgaaggcaatacacaacaaggtga

SEQ ID NO: 5263142 - DNA, 25 bp, Homo sapien
cttagatgtggcgtttatgaaggca

SEQ ID NO: 5263143 - DNA, 25 bp, Homo sapien
tatgaaggcaatacacaacaaggtg

SEQ ID NO: 5263144 - DNA, 25 bp, Homo sapien
aaggcaatacacaacaaggtgaata

SEQ ID NO: 5263145 - DNA, 25 bp, Homo sapien
tgtgcctgtcattgcaaaagctgac

SEQ ID NO: 5263146 - DNA, 25 bp, Homo sapien
tattgtgcctgtcattgcaaaagct

SEQ ID NO: 5263147 - DNA, 25 bp, Homo sapien
attgtgcctgtcattgcaaaagctg

SEQ ID NO: 5263148 - DNA, 25 bp, Homo sapien
ttgtgcctgtcattgcaaaagctga

SEQ ID NO: 5263149 - DNA, 25 bp, Homo sapien
cagcttttgcaatgacaggcacaat

SEQ ID NO: 5263150 - DNA, 25 bp, Homo sapien
tcagcttttgcaatgacaggcacaa

SEQ ID NO: 5263151 - DNA, 25 bp, Homo sapien
gtcagcttttgcaatgacaggcaca

SEQ ID NO: 5263152 - DNA, 25 bp, Homo sapien
agcttttgcaatgacaggcacaata

SEQ ID NO: 5263153 - DNA, 25 bp, Homo sapien
ttcaccttgttgtgtattgccttca

SEQ ID NO: 5263154 - DNA, 25 bp, Homo sapien
caccttgttgtgtattgccttcata

SEQ ID NO: 5263155 - DNA, 25 bp, Homo sapien
tcaccttgttgtgtattgccttcat

SEQ ID NO: 5263156 - DNA, 25 bp, Homo sapien
tgccttcataaacgccacatctaag

SEQ ID NO: 5263157 - DNA, 25 bp, Homo sapien
attcaccttgttgtgtattgccttc

SEQ ID NO: 5263158 - DNA, 25 bp, Homo sapien
tattcaccttgttgtgtattgcctt

SEQ ID NO: 5263159 - DNA, 25 bp, Homo sapien
gtgaggctggcgtcctgccctccct

SEQ ID NO: 5263160 - DNA, 25 bp, Homo sapien
gtgagtgaggctggcgtcctgccct

SEQ ID NO: 5263161 - DNA, 25 bp, Homo sapien
ggctggcgtcctgccctccctctgg

SEQ ID NO: 5263162 - DNA, 25 bp, Homo sapien
tgaggctggcgtcctgccctccctc

SEQ ID NO: 5263163 - DNA, 25 bp, Homo sapien
tgagtgaggctggcgtcctgccctc

SEQ ID NO: 5263164 - DNA, 25 bp, Homo sapien
gagtgaggctggcgtcctgccctcc

SEQ ID NO: 5263165 - DNA, 25 bp, Homo sapien
agggcaggacgccagcctcactcac

SEQ ID NO: 5263166 - DNA, 25 bp, Homo sapien
gagggcaggacgccagcctcactca

SEQ ID NO: 5263167 - DNA, 25 bp, Homo sapien
agagggagggcaggacgccagcctc

SEQ ID NO: 5263168 - DNA, 25 bp, Homo sapien
gagggagggcaggacgccagcctca

SEQ ID NO: 5263169 - DNA, 25 bp, Homo sapien
gggagggcaggacgccagcctcact

SEQ ID NO: 5263170 - DNA, 25 bp, Homo sapien
ccagagggagggcaggacgccagcc

SEQ ID NO: 5263171 - DNA, 25 bp, Homo sapien
taaatgaacataccgatctgtgcgt

SEQ ID NO: 5263172 - DNA, 25 bp, Homo sapien
ctgcaaatgacccatacaaggatgt

SEQ ID NO: 5263173 - DNA, 25 bp, Homo sapien
catagcagttgtcagccagcgaagc

SEQ ID NO: 5263174 - DNA, 25 bp, Homo sapien
ccctaactgaacataccggtacgtg

SEQ ID NO: 5263175 - DNA, 25 bp, Homo sapien
tccgtgtatgtctgtaaagcctctt

SEQ ID NO: 5263176 - DNA, 25 bp, Homo sapien
tgtgcgtgtaatcacagttgctggg

SEQ ID NO: 5263177 - DNA, 25 bp, Homo sapien
ccatgggagttaaatgactcaaata

SEQ ID NO: 5263178 - DNA, 25 bp, Homo sapien
gcagttggttacacacaagtacctt

SEQ ID NO: 5263179 - DNA, 25 bp, Homo sapien
cacacaagtaccttccatgggagtt

SEQ ID NO: 5263180 - DNA, 25 bp, Homo sapien
taccttccatgggagttaaatgact

SEQ ID NO: 5263181 - DNA, 25 bp, Homo sapien
cacaagtaccttccatgggagttaa

SEQ ID NO: 5263182 - DNA, 25 bp, Homo sapien
ccttccatgggagttaaatgactca

SEQ ID NO: 5263183 - DNA, 25 bp, Homo sapien
aaggtacttgtgtgtaaccaactgc

SEQ ID NO: 5263184 - DNA, 25 bp, Homo sapien
tgagtcatttaactcccatggaagg

SEQ ID NO: 5263185 - DNA, 25 bp, Homo sapien
ttaactcccatggaaggtacttgtg

SEQ ID NO: 5263186 - DNA, 25 bp, Homo sapien
tcatttaactcccatggaaggtact

SEQ ID NO: 5263187 - DNA, 25 bp, Homo sapien
aactcccatggaaggtacttgtgtg

SEQ ID NO: 5263188 - DNA, 25 bp, Homo sapien
tatttgagtcatttaactcccatgg

SEQ ID NO: 5263189 - DNA, 25 bp, Homo sapien
gccccagcaactgtgattacacgca

SEQ ID NO: 5263190 - DNA, 25 bp, Homo sapien
cacgtaccggtatgttcagttaggg

SEQ ID NO: 5263191 - DNA, 25 bp, Homo sapien
tacacgcacagatcggtatgttcat

SEQ ID NO: 5263192 - DNA, 25 bp, Homo sapien
aagaggctttacagacatacacgga

SEQ ID NO: 5263193 - DNA, 25 bp, Homo sapien
gcttcgctggctgacaactgctatg

SEQ ID NO: 5263194 - DNA, 25 bp, Homo sapien
catacacggaagaggcactaaaact

SEQ ID NO: 5263195 - DNA, 25 bp, Homo sapien
ggcagaggttgtttgcagtccagcc

SEQ ID NO: 5263196 - DNA, 25 bp, Homo sapien
ggctggactgcaaacaacctctgcc

SEQ ID NO: 5263197 - DNA, 25 bp, Homo sapien
tttctaggccgagtgtggtggctca

SEQ ID NO: 5263198 - DNA, 25 bp, Homo sapien
gaaggctgaggcaggcacatcacca

SEQ ID NO: 5263199 - DNA, 25 bp, Homo sapien
ggcagaggttgtttgcagtccagcc

SEQ ID NO: 5263200 - DNA, 25 bp, Homo sapien
gcaaaagaatcgcttcaacccagga

SEQ ID NO: 5263201 - DNA, 25 bp, Homo sapien
caggaggctgaagcaaaagaatcgc

SEQ ID NO: 5263202 - DNA, 25 bp, Homo sapien
taaaagagtttctaggccgagtgtg

SEQ ID NO: 5263203 - DNA, 25 bp, Homo sapien
tcctgggttgaagcgattcttttgc

SEQ ID NO: 5263204 - DNA, 25 bp, Homo sapien
tgagccaccacactcggcctagaaa

SEQ ID NO: 5263205 - DNA, 25 bp, Homo sapien
cacactcggcctagaaactctttta

SEQ ID NO: 5263206 - DNA, 25 bp, Homo sapien
ggctggactgcaaacaacctctgcc

SEQ ID NO: 5263207 - DNA, 25 bp, Homo sapien
tggtgatgtgcctgcctcagccttc

SEQ ID NO: 5263208 - DNA, 25 bp, Homo sapien
gcgattcttttgcttcagcctcctg

SEQ ID NO: 5263209 - DNA, 25 bp, Homo sapien
caattgctctctcatgggcttggcc

SEQ ID NO: 5263210 - DNA, 25 bp, Homo sapien
agttctcagatgtgggccccacctg

SEQ ID NO: 5263211 - DNA, 25 bp, Homo sapien
tgggcttggccaacagttcagttct

SEQ ID NO: 5263212 - DNA, 25 bp, Homo sapien
tccttggctgctgaaccactgtgtt

SEQ ID NO: 5263213 - DNA, 25 bp, Homo sapien
tactggtagctgttatctgccctcc

SEQ ID NO: 5263214 - DNA, 25 bp, Homo sapien
tagtgctggattacaacatctgaga

SEQ ID NO: 5263215 - DNA, 25 bp, Homo sapien
gaagagaagtgattaatgaggccca

SEQ ID NO: 5263216 - DNA, 25 bp, Homo sapien
gaacaaactggtaggcatcaaggag

SEQ ID NO: 5263217 - DNA, 25 bp, Homo sapien
caaacacagtggttcagcagccaag

SEQ ID NO: 5263218 - DNA, 25 bp, Homo sapien
aattgcaggtggatgacaggaagcc

SEQ ID NO: 5263219 - DNA, 25 bp, Homo sapien
gaactgaactgttggccaagcccat

SEQ ID NO: 5263220 - DNA, 25 bp, Homo sapien
ggcagataacagctaccagtaagtg

SEQ ID NO: 5263221 - DNA, 25 bp, Homo sapien
aatctatcacttacctgatgcagaa

SEQ ID NO: 5263222 - DNA, 25 bp, Homo sapien
aaatctatcacttacctgatgcaga

SEQ ID NO: 5263223 - DNA, 25 bp, Homo sapien
tcaaaatctatcacttacctgatgc

SEQ ID NO: 5263224 - DNA, 25 bp, Homo sapien
caaaatctatcacttacctgatgca

SEQ ID NO: 5263225 - DNA, 25 bp, Homo sapien
atctatcacttacctgatgcagaat

SEQ ID NO: 5263226 - DNA, 25 bp, Homo sapien
aaaatctatcacttacctgatgcag

SEQ ID NO: 5263227 - DNA, 25 bp, Homo sapien
ctgcatcaggtaagtgatagatttt

SEQ ID NO: 5263228 - DNA, 25 bp, Homo sapien
tgcatcaggtaagtgatagattttg

SEQ ID NO: 5263229 - DNA, 25 bp, Homo sapien
attctgcatcaggtaagtgatagat

SEQ ID NO: 5263230 - DNA, 25 bp, Homo sapien
ttctgcatcaggtaagtgatagatt

SEQ ID NO: 5263231 - DNA, 25 bp, Homo sapien
tctgcatcaggtaagtgatagattt

SEQ ID NO: 5263232 - DNA, 25 bp, Homo sapien
gcatcaggtaagtgatagattttga

SEQ ID NO: 5263233 - DNA, 25 bp, Homo sapien
gttggatccaatcagttgattgaag

SEQ ID NO: 5263234 - DNA, 25 bp, Homo sapien
ggttggatccaatcagttgattgaa

SEQ ID NO: 5263235 - DNA, 25 bp, Homo sapien
tggttggatccaatcagttgattga

SEQ ID NO: 5263236 - DNA, 25 bp, Homo sapien
ttcaatcaactgattggatccaacc

SEQ ID NO: 5263237 - DNA, 25 bp, Homo sapien
cttcaatcaactgattggatccaac

SEQ ID NO: 5263238 - DNA, 25 bp, Homo sapien
tcaatcaactgattggatccaacca

SEQ ID NO: 5263239 - DNA, 25 bp, Homo sapien
gttgtggaagtggagaacccagagc

SEQ ID NO: 5263240 - DNA, 25 bp, Homo sapien
gtgttgtggaagtggagaacccaga

SEQ ID NO: 5263241 - DNA, 25 bp, Homo sapien
tgttgtggaagtggagaacccagag

SEQ ID NO: 5263242 - DNA, 25 bp, Homo sapien
ggtgttgtggaagtggagaacccag

SEQ ID NO: 5263243 - DNA, 25 bp, Homo sapien
gggtgttgtggaagtggagaaccca

SEQ ID NO: 5263244 - DNA, 25 bp, Homo sapien
ctctgggttctccacttccacaaca

SEQ ID NO: 5263245 - DNA, 25 bp, Homo sapien
tctgggttctccacttccacaacac

SEQ ID NO: 5263246 - DNA, 25 bp, Homo sapien
ctgggttctccacttccacaacacc

SEQ ID NO: 5263247 - DNA, 25 bp, Homo sapien
tgggttctccacttccacaacaccc

SEQ ID NO: 5263248 - DNA, 25 bp, Homo sapien
gctctgggttctccacttccacaac

SEQ ID NO: 5263249 - DNA, 25 bp, Homo sapien
ttgtggaagtggagaacccagagca

SEQ ID NO: 5263250 - DNA, 25 bp, Homo sapien
agaggccgcctctacccctggggtg

SEQ ID NO: 5263251 - DNA, 25 bp, Homo sapien
ttctgaagctgagaaccatgctcat

SEQ ID NO: 5263252 - DNA, 25 bp, Homo sapien
ggaagtggagaacccagagcacaat

SEQ ID NO: 5263253 - DNA, 25 bp, Homo sapien
caatgactttctgaagctgagaacc

SEQ ID NO: 5263254 - DNA, 25 bp, Homo sapien
ggagaacccagagcacaatgacttt

SEQ ID NO: 5263255 - DNA, 25 bp, Homo sapien
tcagcttcagaaagtcattgtgctc

SEQ ID NO: 5263256 - DNA, 25 bp, Homo sapien
aaagtcattgtgctctgggttctcc

SEQ ID NO: 5263257 - DNA, 25 bp, Homo sapien
tgctctgggttctccacttccacaa

SEQ ID NO: 5263258 - DNA, 25 bp, Homo sapien
tgagcatggttctcagcttcagaaa

SEQ ID NO: 5263259 - DNA, 25 bp, Homo sapien
catggttctcagcttcagaaagtca

SEQ ID NO: 5263260 - DNA, 25 bp, Homo sapien
caccccaggggtagaggcggcctct

SEQ ID NO: 5263261 - DNA, 25 bp, Homo sapien
gaaatcccagcagctttatgtacaa

SEQ ID NO: 5263262 - DNA, 25 bp, Homo sapien
tagacatttccacggccatactcat

SEQ ID NO: 5263263 - DNA, 25 bp, Homo sapien
tgagagactcagtcgagacctgtgt

SEQ ID NO: 5263264 - DNA, 25 bp, Homo sapien
tgtgcatgatgccaccttggtgcat

SEQ ID NO: 5263265 - DNA, 25 bp, Homo sapien
tggcagtgcctctagcagaaatccc

SEQ ID NO: 5263266 - DNA, 25 bp, Homo sapien
catcctgtggtagtgatggcctcac

SEQ ID NO: 5263267 - DNA, 25 bp, Homo sapien
gatttctgctagaggcactgccacc

SEQ ID NO: 5263268 - DNA, 25 bp, Homo sapien
tatggccgtggaaatgtctagtgag

SEQ ID NO: 5263269 - DNA, 25 bp, Homo sapien
tacaaacacaggtctcgactgagtc

SEQ ID NO: 5263270 - DNA, 25 bp, Homo sapien
gcaccaaggtggcatcatgcacatg

SEQ ID NO: 5263271 - DNA, 25 bp, Homo sapien
tgtgaggccatcactaccacaggat

SEQ ID NO: 5263272 - DNA, 25 bp, Homo sapien
taaattgtacataaagctgctggga

SEQ ID NO: 5263273 - DNA, 25 bp, Homo sapien
tcattatgaaaacttccgttctgag

SEQ ID NO: 5263274 - DNA, 25 bp, Homo sapien
aaaacttccgttctgagagactcaa

SEQ ID NO: 5263275 - DNA, 25 bp, Homo sapien
aaacttccgttctgagagactcaag

SEQ ID NO: 5263276 - DNA, 25 bp, Homo sapien
ttgagtctctcagaacggaagtttt

SEQ ID NO: 5263277 - DNA, 25 bp, Homo sapien
cttgagtctctcagaacggaagttt

SEQ ID NO: 5263278 - DNA, 25 bp, Homo sapien
ctcagaacggaagttttcataatga

SEQ ID NO: 5263279 - DNA, 25 bp, Homo sapien
tcattatgaaaacttccgttctgag

SEQ ID NO: 5263280 - DNA, 25 bp, Homo sapien
ggtgacccaggaccttcattatgaa

SEQ ID NO: 5263281 - DNA, 25 bp, Homo sapien
aaaacttccgttctgagagactcaa

SEQ ID NO: 5263282 - DNA, 25 bp, Homo sapien
gatctccaggaggtgacccaggacc

SEQ ID NO: 5263283 - DNA, 25 bp, Homo sapien
aaacttccgttctgagagactcaag

SEQ ID NO: 5263284 - DNA, 25 bp, Homo sapien
tctgagagactcaagagaggcggca

SEQ ID NO: 5263285 - DNA, 25 bp, Homo sapien
ttcataatgaaggtcctgggtcacc

SEQ ID NO: 5263286 - DNA, 25 bp, Homo sapien
tgccgcctctcttgagtctctcaga

SEQ ID NO: 5263287 - DNA, 25 bp, Homo sapien
cttgagtctctcagaacggaagttt

SEQ ID NO: 5263288 - DNA, 25 bp, Homo sapien
ggtcctgggtcacctcctggagatc

SEQ ID NO: 5263289 - DNA, 25 bp, Homo sapien
tctcttgagtctctcagaacggaag

SEQ ID NO: 5263290 - DNA, 25 bp, Homo sapien
ctcagaacggaagttttcataatga

SEQ ID NO: 5263291 - DNA, 25 bp, Homo sapien
tgatatgcacgtaaaaactttaggc

SEQ ID NO: 5263292 - DNA, 25 bp, Homo sapien
ctcctcctctatgtgttcagctcag

SEQ ID NO: 5263293 - DNA, 25 bp, Homo sapien
gccttcttgaccattaagcaacatg

SEQ ID NO: 5263294 - DNA, 25 bp, Homo sapien
tctgtattgtgtcaccctgagccac

SEQ ID NO: 5263295 - DNA, 25 bp, Homo sapien
gagttttgagaccatgagattacat

SEQ ID NO: 5263296 - DNA, 25 bp, Homo sapien
ccatgagattacatggtgaagtccc

SEQ ID NO: 5263297 - DNA, 25 bp, Homo sapien
gggacttcaccatgtaatctcatgg

SEQ ID NO: 5263298 - DNA, 25 bp, Homo sapien
catgttgcttaatggtcaagaaggc

SEQ ID NO: 5263299 - DNA, 25 bp, Homo sapien
ctgagctgaacacatagaggaggag

SEQ ID NO: 5263300 - DNA, 25 bp, Homo sapien
tggctcagggtgacacaatacagag

SEQ ID NO: 5263301 - DNA, 25 bp, Homo sapien
gcctaaagtttttacgtgcatatca

SEQ ID NO: 5263302 - DNA, 25 bp, Homo sapien
gaaaccaaaccatgttgcttaatgg

SEQ ID NO: 5263303 - DNA, 25 bp, Homo sapien
atttgttgcagtgttatgattctga

SEQ ID NO: 5263304 - DNA, 25 bp, Homo sapien
ctatttgttgcagtgttatgattct

SEQ ID NO: 5263305 - DNA, 25 bp, Homo sapien
tttgttgcagtgttatgattctgat

SEQ ID NO: 5263306 - DNA, 25 bp, Homo sapien
tatttgttgcagtgttatgattctg

SEQ ID NO: 5263307 - DNA, 25 bp, Homo sapien
gttgcagtgttatgattctgatttc

SEQ ID NO: 5263308 - DNA, 25 bp, Homo sapien
tgttgcagtgttatgattctgattt

SEQ ID NO: 5263309 - DNA, 25 bp, Homo sapien
atcagaatcataacactgcaacaaa

SEQ ID NO: 5263310 - DNA, 25 bp, Homo sapien
cagaatcataacactgcaacaaata

SEQ ID NO: 5263311 - DNA, 25 bp, Homo sapien
tcagaatcataacactgcaacaaat

SEQ ID NO: 5263312 - DNA, 25 bp, Homo sapien
aaatcagaatcataacactgcaaca

SEQ ID NO: 5263313 - DNA, 25 bp, Homo sapien
agaatcataacactgcaacaaatag

SEQ ID NO: 5263314 - DNA, 25 bp, Homo sapien
gaaatcagaatcataacactgcaac

SEQ ID NO: 5263315 - DNA, 25 bp, Homo sapien
gggtagcaaataactatttgttgca

SEQ ID NO: 5263316 - DNA, 25 bp, Homo sapien
gattctgatttctttcgattcttag

SEQ ID NO: 5263317 - DNA, 25 bp, Homo sapien
tatttgttgcagtgttatgattctg

SEQ ID NO: 5263318 - DNA, 25 bp, Homo sapien
gacaccatctcaatataaaaagaga

SEQ ID NO: 5263319 - DNA, 25 bp, Homo sapien
agcccgtgcgacagagtgagacacc

SEQ ID NO: 5263320 - DNA, 25 bp, Homo sapien
cgtgcgacagagtgagacaccatct

SEQ ID NO: 5263321 - DNA, 25 bp, Homo sapien
gcaacaaatagttatttgctacccc

SEQ ID NO: 5263322 - DNA, 25 bp, Homo sapien
gatggtgtctcactctgtcgcacgg

SEQ ID NO: 5263323 - DNA, 25 bp, Homo sapien
agaatcataacactgcaacaaatag

SEQ ID NO: 5263324 - DNA, 25 bp, Homo sapien
ctaagaatcgaaagaaatcagaatc

SEQ ID NO: 5263325 - DNA, 25 bp, Homo sapien
tctttttatattgagatggtgtctc

SEQ ID NO: 5263326 - DNA, 25 bp, Homo sapien
gaaatcagaatcataacactgcaac

SEQ ID NO: 5263327 - DNA, 25 bp, Homo sapien
ggacatgaataaagaccagatcttg

SEQ ID NO: 5263328 - DNA, 25 bp, Homo sapien
gagaatgaggacatgaataaagacc

SEQ ID NO: 5263329 - DNA, 25 bp, Homo sapien
gaaagtggagaatgaggacatgaat

SEQ ID NO: 5263330 - DNA, 25 bp, Homo sapien
catgaataaagaccagatcttgctg

SEQ ID NO: 5263331 - DNA, 25 bp, Homo sapien
tgaggacatgaataaagaccagatc

SEQ ID NO: 5263332 - DNA, 25 bp, Homo sapien
gatcttgctggaaaaagaagctgag

SEQ ID NO: 5263333 - DNA, 25 bp, Homo sapien
ctcagcttctttttccagcaagatc

SEQ ID NO: 5263334 - DNA, 25 bp, Homo sapien
cagcaagatctggtctttattcatg

SEQ ID NO: 5263335 - DNA, 25 bp, Homo sapien
ccagcaagatctggtctttattcat

SEQ ID NO: 5263336 - DNA, 25 bp, Homo sapien
caagatctggtctttattcatgtcc

SEQ ID NO: 5263337 - DNA, 25 bp, Homo sapien
tattcatgtcctcattctccacttt

SEQ ID NO: 5263338 - DNA, 25 bp, Homo sapien
gatctggtctttattcatgtcctca

SEQ ID NO: 5263339 - DNA, 25 bp, Homo sapien
tgattgcaaggatgcaggcgcagat

SEQ ID NO: 5263340 - DNA, 25 bp, Homo sapien
tgcagatgcagggcggggatggcga

SEQ ID NO: 5263341 - DNA, 25 bp, Homo sapien
cagggcggggatggcgatggcgggg

SEQ ID NO: 5263342 - DNA, 25 bp, Homo sapien
attgcaaggatgcaggcgcagatgc

SEQ ID NO: 5263343 - DNA, 25 bp, Homo sapien
atgattgcaaggatgcaggcgcaga

SEQ ID NO: 5263344 - DNA, 25 bp, Homo sapien
ttgcaaggatgcaggcgcagatgca

SEQ ID NO: 5263345 - DNA, 25 bp, Homo sapien
gcatctgcgcctgcatccttgcaat

SEQ ID NO: 5263346 - DNA, 25 bp, Homo sapien
tctgcgcctgcatccttgcaatcat

SEQ ID NO: 5263347 - DNA, 25 bp, Homo sapien
ccccgccatcgccatccccgccctg

SEQ ID NO: 5263348 - DNA, 25 bp, Homo sapien
atctgcgcctgcatccttgcaatca

SEQ ID NO: 5263349 - DNA, 25 bp, Homo sapien
cgccatccccgccctgcatctgcat

SEQ ID NO: 5263350 - DNA, 25 bp, Homo sapien
tgcatctgcgcctgcatccttgcaa

SEQ ID NO: 5263351 - DNA, 25 bp, Homo sapien
tgcatctgcgcctgcatccttgcaa

SEQ ID NO: 5263352 - DNA, 25 bp, Homo sapien
ttacacgtggtgcccgagagccccg

SEQ ID NO: 5263353 - DNA, 25 bp, Homo sapien
gcatctgcgcctgcatccttgcaat

SEQ ID NO: 5263354 - DNA, 25 bp, Homo sapien
tgcatctgcatctgcatctgcgcct

SEQ ID NO: 5263355 - DNA, 25 bp, Homo sapien
gcatccttgcaatcatctcttgcat

SEQ ID NO: 5263356 - DNA, 25 bp, Homo sapien
tctgcgcctgcatccttgcaatcat

SEQ ID NO: 5263357 - DNA, 25 bp, Homo sapien
tgatgtgcacatatcaagaagtcag

SEQ ID NO: 5263358 - DNA, 25 bp, Homo sapien
gatgtgcacatatcaagaagtcaga

SEQ ID NO: 5263359 - DNA, 25 bp, Homo sapien
ggtgatgtgcacatatcaagaagtc

SEQ ID NO: 5263360 - DNA, 25 bp, Homo sapien
atgtgcacatatcaagaagtcagag

SEQ ID NO: 5263361 - DNA, 25 bp, Homo sapien
gtgatgtgcacatatcaagaagtca

SEQ ID NO: 5263362 - DNA, 25 bp, Homo sapien
ctctgacttcttgatatgtgcacat

SEQ ID NO: 5263363 - DNA, 25 bp, Homo sapien
ctgacttcttgatatgtgcacatca

SEQ ID NO: 5263364 - DNA, 25 bp, Homo sapien
gacttcttgatatgtgcacatcacc

SEQ ID NO: 5263365 - DNA, 25 bp, Homo sapien
tgacttcttgatatgtgcacatcac

SEQ ID NO: 5263366 - DNA, 25 bp, Homo sapien
tctgacttcttgatatgtgcacatc

SEQ ID NO: 5263367 - DNA, 25 bp, Homo sapien
ttgtcccgactgatggtcattagtg

SEQ ID NO: 5263368 - DNA, 25 bp, Homo sapien
gtcccgactgatggtcattagtgaa

SEQ ID NO: 5263369 - DNA, 25 bp, Homo sapien
gctttgtcccgactgatggtcatta

SEQ ID NO: 5263370 - DNA, 25 bp, Homo sapien
ccgactgatggtcattagtgaatag

SEQ ID NO: 5263371 - DNA, 25 bp, Homo sapien
tagctttgtcccgactgatggtcat

SEQ ID NO: 5263372 - DNA, 25 bp, Homo sapien
cccgactgatggtcattagtgaata

SEQ ID NO: 5263373 - DNA, 25 bp, Homo sapien
cactaatgaccatcagtcgggacaa

SEQ ID NO: 5263374 - DNA, 25 bp, Homo sapien
ttcactaatgaccatcagtcgggac

SEQ ID NO: 5263375 - DNA, 25 bp, Homo sapien
tattcactaatgaccatcagtcggg

SEQ ID NO: 5263376 - DNA, 25 bp, Homo sapien
atgaccatcagtcgggacaaagcta

SEQ ID NO: 5263377 - DNA, 25 bp, Homo sapien
ctattcactaatgaccatcagtcgg

SEQ ID NO: 5263378 - DNA, 25 bp, Homo sapien
taatgaccatcagtcgggacaaagc

SEQ ID NO: 5263379 - DNA, 25 bp, Homo sapien
caaggatgcctcagcgatgcagctc

SEQ ID NO: 5263380 - DNA, 25 bp, Homo sapien
taattaacgcagcagacattgcctc

SEQ ID NO: 5263381 - DNA, 25 bp, Homo sapien
aactttgtggtcatgtaagccctgc

SEQ ID NO: 5263382 - DNA, 25 bp, Homo sapien
taaacgatggcctgctgactctaga

SEQ ID NO: 5263383 - DNA, 25 bp, Homo sapien
gaggaaattgttgccgctccgagag

SEQ ID NO: 5263384 - DNA, 25 bp, Homo sapien
gaggctggtcctgcataaccagtta

SEQ ID NO: 5263385 - DNA, 25 bp, Homo sapien
gacaccttagaatagtcctgagggt

SEQ ID NO: 5263386 - DNA, 25 bp, Homo sapien
tgctggagccttagtcaccaaacgc

SEQ ID NO: 5263387 - DNA, 25 bp, Homo sapien
tgtaaggaaaacatccatgtcaccc

SEQ ID NO: 5263388 - DNA, 25 bp, Homo sapien
gtccaagttggttgctttagtttca

SEQ ID NO: 5263389 - DNA, 25 bp, Homo sapien
gtcctgagggtatgtgcttagttca

SEQ ID NO: 5263390 - DNA, 25 bp, Homo sapien
caaacgctcttgcagcttagtggga

SEQ ID NO: 5263391 - DNA, 25 bp, Homo sapien
gggtgacatggatgttttccttaca

SEQ ID NO: 5263392 - DNA, 25 bp, Homo sapien
taccctcaggactattctaaggtgt

SEQ ID NO: 5263393 - DNA, 25 bp, Homo sapien
tgaactaagcacataccctcaggac

SEQ ID NO: 5263394 - DNA, 25 bp, Homo sapien
tgaaactaaagcaaccaacttggac

SEQ ID NO: 5263395 - DNA, 25 bp, Homo sapien
tcccactaagctgcaagagcgtttg

SEQ ID NO: 5263396 - DNA, 25 bp, Homo sapien
gcgtttggtgactaaggctccagca

SEQ ID NO: 5263397 - DNA, 25 bp, Homo sapien
cttaagtgggagtgaggcaatgtct

SEQ ID NO: 5263398 - DNA, 25 bp, Homo sapien
caaatgagctgcatcgctgaggcat

SEQ ID NO: 5263399 - DNA, 25 bp, Homo sapien
taactggttatgcaggaccagcctc

SEQ ID NO: 5263400 - DNA, 25 bp, Homo sapien
taaactctcggagcggcaacaattt

SEQ ID NO: 5263401 - DNA, 25 bp, Homo sapien
aaaaggcagggcttacatgaccaca

SEQ ID NO: 5263402 - DNA, 25 bp, Homo sapien
tctagagtcagcaggccatcgttta

SEQ ID NO: 5263403 - DNA, 25 bp, Homo sapien
ctgtgtgttttcaatccttgggagg

SEQ ID NO: 5263404 - DNA, 25 bp, Homo sapien
tccttgggagggtgccatccacatt

SEQ ID NO: 5263405 - DNA, 25 bp, Homo sapien
agatgcatgatccagctgtgtgttt

SEQ ID NO: 5263406 - DNA, 25 bp, Homo sapien
ttgggagggtgccatccacatttta

SEQ ID NO: 5263407 - DNA, 25 bp, Homo sapien
tcaatccttgggagggtgccatcca

SEQ ID NO: 5263408 - DNA, 25 bp, Homo sapien
acattttaacagtacctgtgcctga

SEQ ID NO: 5263409 - DNA, 25 bp, Homo sapien
tcaggcacaggtactgttaaaatgt

SEQ ID NO: 5263410 - DNA, 25 bp, Homo sapien
cctcccaaggattgaaaacacacag

SEQ ID NO: 5263411 - DNA, 25 bp, Homo sapien
cacaggtactgttaaaatgtggatg

SEQ ID NO: 5263412 - DNA, 25 bp, Homo sapien
aaacacacagctggatcatgcatct

SEQ ID NO: 5263413 - DNA, 25 bp, Homo sapien
taaaatgtggatggcaccctcccaa

SEQ ID NO: 5263414 - DNA, 25 bp, Homo sapien
tggatggcaccctcccaaggattga

SEQ ID NO: 5263415 - DNA, 25 bp, Homo sapien
gactaaccattgatgagcactcctg

SEQ ID NO: 5263416 - DNA, 25 bp, Homo sapien
tagaattgatttccaagaatcggca

SEQ ID NO: 5263417 - DNA, 25 bp, Homo sapien
tccttagtggtagaggtgtgtgcct

SEQ ID NO: 5263418 - DNA, 25 bp, Homo sapien
tgtatttcattgctgtgtcacactc

SEQ ID NO: 5263419 - DNA, 25 bp, Homo sapien
gaatcggcatgtatacttaatactg

SEQ ID NO: 5263420 - DNA, 25 bp, Homo sapien
gcttaccacatcacaccacttggag

SEQ ID NO: 5263421 - DNA, 25 bp, Homo sapien
taggcacacacctctaccactaagg

SEQ ID NO: 5263422 - DNA, 25 bp, Homo sapien
ggaagacattcacctcacaaaacac

SEQ ID NO: 5263423 - DNA, 25 bp, Homo sapien
caggagtgctcatcaatggttagtc

SEQ ID NO: 5263424 - DNA, 25 bp, Homo sapien
cacaaaacacagagtgtgacacagc

SEQ ID NO: 5263425 - DNA, 25 bp, Homo sapien
tccaagtggtgtgatgtggtaagca

SEQ ID NO: 5263426 - DNA, 25 bp, Homo sapien
gataaaatcgcagacgaatcaacag

SEQ ID NO: 5263427 - DNA, 25 bp, Homo sapien
tgttcccgccctaaggccttggtgc

SEQ ID NO: 5263428 - DNA, 25 bp, Homo sapien
tatgcaaagaactcaccacaagcca

SEQ ID NO: 5263429 - DNA, 25 bp, Homo sapien
tcactgtaggtatagaagatctgcc

SEQ ID NO: 5263430 - DNA, 25 bp, Homo sapien
gccttggtgccctgaacctctgatg

SEQ ID NO: 5263431 - DNA, 25 bp, Homo sapien
gaagtctcttaattctgatgctagg

SEQ ID NO: 5263432 - DNA, 25 bp, Homo sapien
gcagtcataagctccagttttcgta

SEQ ID NO: 5263433 - DNA, 25 bp, Homo sapien
ggcagatcttctatacctacagtga

SEQ ID NO: 5263434 - DNA, 25 bp, Homo sapien
gataaccagtattagtggagaacac

SEQ ID NO: 5263435 - DNA, 25 bp, Homo sapien
taggcatcagaggttcagggcacca

SEQ ID NO: 5263436 - DNA, 25 bp, Homo sapien
tggagaacactacaaaaggtggctt

SEQ ID NO: 5263437 - DNA, 25 bp, Homo sapien
gcaccaaggccttagggcgggaaca

SEQ ID NO: 5263438 - DNA, 25 bp, Homo sapien
tacgaaaactggagcttatgactgc

SEQ ID NO: 5263439 - DNA, 25 bp, Homo sapien
tttgtgtaatataaaccgtgtgtca

SEQ ID NO: 5263440 - DNA, 25 bp, Homo sapien
tcatcatctttttgtgtgcaggctg

SEQ ID NO: 5263441 - DNA, 25 bp, Homo sapien
ggaggaaagtagcagtcatcatctt

SEQ ID NO: 5263442 - DNA, 25 bp, Homo sapien
ctcctgatttgagtttcctttaaat

SEQ ID NO: 5263443 - DNA, 25 bp, Homo sapien
tttttagccattgtcgtttcattca

SEQ ID NO: 5263444 - DNA, 25 bp, Homo sapien
ttctgatgggaggaaagtagcagtc

SEQ ID NO: 5263445 - DNA, 25 bp, Homo sapien
cagcctgcacacaaaaagatgatga

SEQ ID NO: 5263446 - DNA, 25 bp, Homo sapien
gacacacggtttatattacacaaaa

SEQ ID NO: 5263447 - DNA, 25 bp, Homo sapien
aagatgatgactgctactttcctcc

SEQ ID NO: 5263448 - DNA, 25 bp, Homo sapien
gactgctactttcctcccatcagaa

SEQ ID NO: 5263449 - DNA, 25 bp, Homo sapien
tatttaaaggaaactcaaatcagga

SEQ ID NO: 5263450 - DNA, 25 bp, Homo sapien
aatgaatgaaacgacaatggctaaa

SEQ ID NO: 5263451 - DNA, 25 bp, Homo sapien
tgtctccttatggtacactccagcg

SEQ ID NO: 5263452 - DNA, 25 bp, Homo sapien
ctgttgcttaattgtgaacagccaa

SEQ ID NO: 5263453 - DNA, 25 bp, Homo sapien
tctccttatggtacactccagcggt

SEQ ID NO: 5263454 - DNA, 25 bp, Homo sapien
ccttatggtacactccagcggttgc

SEQ ID NO: 5263455 - DNA, 25 bp, Homo sapien
ccttcactgttgcttaattgtgaac

SEQ ID NO: 5263456 - DNA, 25 bp, Homo sapien
cactgttgcttaattgtgaacagcc

SEQ ID NO: 5263457 - DNA, 25 bp, Homo sapien
tctggtgttcttgctaactttgccc

SEQ ID NO: 5263458 - DNA, 25 bp, Homo sapien
tgttccatgacttcagagtacatcc

SEQ ID NO: 5263459 - DNA, 25 bp, Homo sapien
actccagcggttgccttttttatca

SEQ ID NO: 5263460 - DNA, 25 bp, Homo sapien
aaatctgtagcataggctagtgggc

SEQ ID NO: 5263461 - DNA, 25 bp, Homo sapien
aaatgcttaatctgaggatgagaca

SEQ ID NO: 5263462 - DNA, 25 bp, Homo sapien
tctgtgcactgtagccttagtgtca

SEQ ID NO: 5263463 - DNA, 25 bp, Homo sapien
tgacactaaggctacagtgcacaga

SEQ ID NO: 5263464 - DNA, 25 bp, Homo sapien
ggcaaagttagcaagaacaccagat

SEQ ID NO: 5263465 - DNA, 25 bp, Homo sapien
gataaaaaaggcaaccgctggagtg

SEQ ID NO: 5263466 - DNA, 25 bp, Homo sapien
tgcccactagcctatgctacagatt

SEQ ID NO: 5263467 - DNA, 25 bp, Homo sapien
ggatgtactctgaagtcatggaaca

SEQ ID NO: 5263468 - DNA, 25 bp, Homo sapien
tgtctcatcctcagattaagcattt

SEQ ID NO: 5263469 - DNA, 25 bp, Homo sapien
cgctggagtgtaccataaggagaca

SEQ ID NO: 5263470 - DNA, 25 bp, Homo sapien
gttcacaattaagcaacagtgaagg

SEQ ID NO: 5263471 - DNA, 25 bp, Homo sapien
ggctgttcacaattaagcaacagtg

SEQ ID NO: 5263472 - DNA, 25 bp, Homo sapien
ttggctgttcacaattaagcaacag

SEQ ID NO: 5263473 - DNA, 25 bp, Homo sapien
gcaaccgctggagtgtaccataagg

SEQ ID NO: 5263474 - DNA, 25 bp, Homo sapien
caaccgctggagtgtaccataagga

SEQ ID NO: 5263475 - DNA, 25 bp, Homo sapien
gagtgaaagtacttcaggcacgctg

SEQ ID NO: 5263476 - DNA, 25 bp, Homo sapien
tgagtgaaagtacttcaggcacgct

SEQ ID NO: 5263477 - DNA, 25 bp, Homo sapien
agtgaaagtacttcaggcacgctgc

SEQ ID NO: 5263478 - DNA, 25 bp, Homo sapien
agcgtgcctgaagtactttcactca

SEQ ID NO: 5263479 - DNA, 25 bp, Homo sapien
cagcgtgcctgaagtactttcactc

SEQ ID NO: 5263480 - DNA, 25 bp, Homo sapien
gcagcgtgcctgaagtactttcact

SEQ ID NO: 5263481 - DNA, 25 bp, Homo sapien
agtctctacctatagaaatgtattt

SEQ ID NO: 5263482 - DNA, 25 bp, Homo sapien
acactgctacacttctgatcccctt

SEQ ID NO: 5263483 - DNA, 25 bp, Homo sapien
tgataatagataactgctcttttac

SEQ ID NO: 5263484 - DNA, 25 bp, Homo sapien
gataatagataactgctcttttact

SEQ ID NO: 5263485 - DNA, 25 bp, Homo sapien
ggagggaggacccacactgctacac

SEQ ID NO: 5263486 - DNA, 25 bp, Homo sapien
tagtctctacctatagaaatgtatt

SEQ ID NO: 5263487 - DNA, 25 bp, Homo sapien
tagtaaaagagcagttatctattat

SEQ ID NO: 5263488 - DNA, 25 bp, Homo sapien
gtgtagcagtgtgggtcctccctcc

SEQ ID NO: 5263489 - DNA, 25 bp, Homo sapien
aaatacatttctataggtagagact

SEQ ID NO: 5263490 - DNA, 25 bp, Homo sapien
aaggggatcagaagtgtagcagtgt

SEQ ID NO: 5263491 - DNA, 25 bp, Homo sapien
gtaaaagagcagttatctattatca

SEQ ID NO: 5263492 - DNA, 25 bp, Homo sapien
aatacatttctataggtagagacta

SEQ ID NO: 5263493 - DNA, 25 bp, Homo sapien
agcagccgccagactcgcgtcggcg

SEQ ID NO: 5263494 - DNA, 25 bp, Homo sapien
tccgcagtcgcaagcagcagccgcc

SEQ ID NO: 5263495 - DNA, 25 bp, Homo sapien
ctcgcgtcggcgtcgcctgctccca

SEQ ID NO: 5263496 - DNA, 25 bp, Homo sapien
cggcctccgcagtcgcaagcagcag

SEQ ID NO: 5263497 - DNA, 25 bp, Homo sapien
cagtgtctacgggttagaagtttga

SEQ ID NO: 5263498 - DNA, 25 bp, Homo sapien
ccatctgtttcaagagtagctttac

SEQ ID NO: 5263499 - DNA, 25 bp, Homo sapien
aatgtaactcaccagaattctctgc

SEQ ID NO: 5263500 - DNA, 25 bp, Homo sapien
caaaaggtctaagtcaaggtgtcag

SEQ ID NO: 5263501 - DNA, 25 bp, Homo sapien
ccaggctcaagggtgctaactccca

SEQ ID NO: 5263502 - DNA, 25 bp, Homo sapien
cagtctgcaggactctgtatgttcc

SEQ ID NO: 5263503 - DNA, 25 bp, Homo sapien
gcccaggctcaagggtgctaactcc

SEQ ID NO: 5263504 - DNA, 25 bp, Homo sapien
ggtctgggcacccaagcgcatccct

SEQ ID NO: 5263505 - DNA, 25 bp, Homo sapien
tagtttaaattcattctcttgtcct

SEQ ID NO: 5263506 - DNA, 25 bp, Homo sapien
tcctgctagtttaaattcattctct

SEQ ID NO: 5263507 - DNA, 25 bp, Homo sapien
ttttgtgccattaagagcaagaaaa

SEQ ID NO: 5263508 - DNA, 25 bp, Homo sapien
ttgtccttacttttgtgccattaag

SEQ ID NO: 5263509 - DNA, 25 bp, Homo sapien
caatggtaaatgtgtttattggagg

SEQ ID NO: 5263510 - DNA, 25 bp, Homo sapien
tattggaggatgactacatggtgga

SEQ ID NO: 5263511 - DNA, 25 bp, Homo sapien
gaaattcctccaaacacttgattga

SEQ ID NO: 5263512 - DNA, 25 bp, Homo sapien
gatgactacatggtggaaattcctc

SEQ ID NO: 5263513 - DNA, 25 bp, Homo sapien
cttaaggtcaggagttcaaaaccag

SEQ ID NO: 5263514 - DNA, 25 bp, Homo sapien
ccaactactcagtaggctgaggcag

SEQ ID NO: 5263515 - DNA, 25 bp, Homo sapien
gaggccgagggggggaggcggatca

SEQ ID NO: 5263516 - DNA, 25 bp, Homo sapien
cctggccaacatgatgaaaccccgt

SEQ ID NO: 5263517 - DNA, 25 bp, Homo sapien
tatttaacctaaagcctctgcaatt

SEQ ID NO: 5263518 - DNA, 25 bp, Homo sapien
gagaaattagtcaccgaagaatgag

SEQ ID NO: 5263519 - DNA, 25 bp, Homo sapien
attagtcaccgaagaatgagtaaac

SEQ ID NO: 5263520 - DNA, 25 bp, Homo sapien
aaagcagagaaattagtcaccgaag

SEQ ID NO: 5263521 - DNA, 25 bp, Homo sapien
gcagagaaattagtcaccgaagaat

SEQ ID NO: 5263522 - DNA, 25 bp, Homo sapien
tcaaccaaaagagttccagcagctt

SEQ ID NO: 5263523 - DNA, 25 bp, Homo sapien
aaggaaacgtgtctgtcagcgtccc

SEQ ID NO: 5263524 - DNA, 25 bp, Homo sapien
tcactatggtcaggacgcagctcac

SEQ ID NO: 5263525 - DNA, 25 bp, Homo sapien
cagcttgcctgtccttacttgtgcg

SEQ ID NO: 5263526 - DNA, 25 bp, Homo sapien
taaggtagcacaggaaagccgctga

SEQ ID NO: 5263527 - DNA, 25 bp, Homo sapien
tatagatgccttacgacctggacag

SEQ ID NO: 5263528 - DNA, 25 bp, Homo sapien
taagccaagggtcagtcatcctctg

SEQ ID NO: 5263529 - DNA, 25 bp, Homo sapien
gacaggtcctcaagcgtgcaaaaca

SEQ ID NO: 5263530 - DNA, 25 bp, Homo sapien
caggtgaccacagggatctgggcca

SEQ ID NO: 5263531 - DNA, 25 bp, Homo sapien
ttcaacatgaccagaagtagcaggc

SEQ ID NO: 5263532 - DNA, 25 bp, Homo sapien
agaaagaattatccctgaggacaga

SEQ ID NO: 5263533 - DNA, 25 bp, Homo sapien
atgtcaagaaatctgggaagaggct

SEQ ID NO: 5263534 - DNA, 25 bp, Homo sapien
cccctcgccgcacaacagtccccag

SEQ ID NO: 5263535 - DNA, 25 bp, Homo sapien
tcccctcgccgcacaacagtcccca

SEQ ID NO: 5263536 - DNA, 25 bp, Homo sapien
cgaagtagtcacattctaccaggtt

SEQ ID NO: 5263537 - DNA, 25 bp, Homo sapien
attttgaaactccatcccgaagtag

SEQ ID NO: 5263538 - DNA, 25 bp, Homo sapien
taaacgcttccacacttgtgtcagt

SEQ ID NO: 5263539 - DNA, 25 bp, Homo sapien
tctaccaggtttaaacgcttccaca

SEQ ID NO: 5263540 - DNA, 25 bp, Homo sapien
ttcgtatttgcctaatgatgggttt

SEQ ID NO: 5263541 - DNA, 25 bp, Homo sapien
cctaatgatgggtttcataggttca

SEQ ID NO: 5263542 - DNA, 25 bp, Homo sapien
gatgggtttcataggttcaagccaa

SEQ ID NO: 5263543 - DNA, 25 bp, Homo sapien
cgtatttgcctaatgatgggtttca

SEQ ID NO: 5263544 - DNA, 25 bp, Homo sapien
gtagatgaacgaaaataattatctt

SEQ ID NO: 5263545 - DNA, 25 bp, Homo sapien
aataattatcttgagactgaggtgg

SEQ ID NO: 5263546 - DNA, 25 bp, Homo sapien
ataattatcttgagactgaggtggg

SEQ ID NO: 5263547 - DNA, 25 bp, Homo sapien
taagtagatgaacgaaaataattat

SEQ ID NO: 5263548 - DNA, 25 bp, Homo sapien
attttacagctaggcgaagcaccac

SEQ ID NO: 5263549 - DNA, 25 bp, Homo sapien
tttacagctaggcgaagcaccacat

SEQ ID NO: 5263550 - DNA, 25 bp, Homo sapien
ttttacagctaggcgaagcaccaca

SEQ ID NO: 5263551 - DNA, 25 bp, Homo sapien
gtgaatacaagattcctgctgacaa

SEQ ID NO: 5263552 - DNA, 25 bp, Homo sapien
aacaggtgaatacaagattcctgct

SEQ ID NO: 5263553 - DNA, 25 bp, Homo sapien
ctgtgggagataacaggtgaataca

SEQ ID NO: 5263554 - DNA, 25 bp, Homo sapien
ggtgaatacaagattcctgctgaca

SEQ ID NO: 5263555 - DNA, 25 bp, Homo sapien
acatgtgtttgtgcaagggtcaact

SEQ ID NO: 5263556 - DNA, 25 bp, Homo sapien
gggtcaactgccaacatgcttctgt

SEQ ID NO: 5263557 - DNA, 25 bp, Homo sapien
tttctgtgtatatcaggcttattca

SEQ ID NO: 5263558 - DNA, 25 bp, Homo sapien
ccactctacactcatggtcactttt

SEQ ID NO: 5263559 - DNA, 25 bp, Homo sapien
taagttcaacatgaccctaacatcc

SEQ ID NO: 5263560 - DNA, 25 bp, Homo sapien
ccctgagaaccttatgaacatgcat

SEQ ID NO: 5263561 - DNA, 25 bp, Homo sapien
ttggaaaatgtaagttcaacatgac

SEQ ID NO: 5263562 - DNA, 25 bp, Homo sapien
catgcataaatctatgttcatttgg

SEQ ID NO: 5263563 - DNA, 25 bp, Homo sapien
caggtctctcttaagttgcaaggca

SEQ ID NO: 5263564 - DNA, 25 bp, Homo sapien
atgggacgtgagaagggccgctgtg

SEQ ID NO: 5263565 - DNA, 25 bp, Homo sapien
tgtcagcacaggtcaaacgctcttc

SEQ ID NO: 5263566 - DNA, 25 bp, Homo sapien
caggtcaaacgctcttccagcaggt

SEQ ID NO: 5263567 - DNA, 25 bp, Homo sapien
acgtgcttctgatggaattctagta

SEQ ID NO: 5263568 - DNA, 25 bp, Homo sapien
aatactcgttcactttgaggtgctc

SEQ ID NO: 5263569 - DNA, 25 bp, Homo sapien
gctctcggtccagcgtttcatcgta

SEQ ID NO: 5263570 - DNA, 25 bp, Homo sapien
tagtatcttctcaaggcagtgctgc

SEQ ID NO: 5263571 - DNA, 25 bp, Homo sapien
aatccgactcagcaggtgtctggcc

SEQ ID NO: 5263572 - DNA, 25 bp, Homo sapien
ggaacacgagtacacccatgtggga

SEQ ID NO: 5263573 - DNA, 25 bp, Homo sapien
gaagccatgtgaaatctgatgccgt

SEQ ID NO: 5263574 - DNA, 25 bp, Homo sapien
tttcgagcacctggaaatccgactc

SEQ ID NO: 5263575 - DNA, 25 bp, Homo sapien
tgctgtggtgtaagagactgtttgt

SEQ ID NO: 5263576 - DNA, 25 bp, Homo sapien
tgtagctatctataaggtcacttta

SEQ ID NO: 5263577 - DNA, 25 bp, Homo sapien
gatcagttttagacaaagtgccatg

SEQ ID NO: 5263578 - DNA, 25 bp, Homo sapien
cagattctgatatgttatctcttag

SEQ ID NO: 5263579 - DNA, 25 bp, Homo sapien
ccagtactgctacggaatagttcca

SEQ ID NO: 5263580 - DNA, 25 bp, Homo sapien
tgatgatcgtttatatttccgtggg

SEQ ID NO: 5263581 - DNA, 25 bp, Homo sapien
tgtgtctagccctcatctagggttt

SEQ ID NO: 5263582 - DNA, 25 bp, Homo sapien
cctggctcggaaagccccgttgctt

SEQ ID NO: 5263583 - DNA, 25 bp, Homo sapien
tgagacaaccagttaaaggcagacg

SEQ ID NO: 5263584 - DNA, 25 bp, Homo sapien
ggaccttctgtagtaaacaacactg

SEQ ID NO: 5263585 - DNA, 25 bp, Homo sapien
gagagacataatgcctgggtacagc

SEQ ID NO: 5263586 - DNA, 25 bp, Homo sapien
cagacgggcatctcaggtaaaggcc

SEQ ID NO: 5263587 - DNA, 25 bp, Homo sapien
ggcaaacatcatcttgaccaagtga

SEQ ID NO: 5263588 - DNA, 25 bp, Homo sapien
tatgtgccacatgaatcaggacgca

SEQ ID NO: 5263589 - DNA, 25 bp, Homo sapien
tgaccaagtgatcaatgttaccacc

SEQ ID NO: 5263590 - DNA, 25 bp, Homo sapien
ccaccaatgggacagatggacccta

SEQ ID NO: 5263591 - DNA, 25 bp, Homo sapien
ctcaggtgattagtccaccttgcct

SEQ ID NO: 5263592 - DNA, 25 bp, Homo sapien
tgaagctagaacacagtgctagagt

SEQ ID NO: 5263593 - DNA, 25 bp, Homo sapien
aatctccattcgctgtaacctccgc

SEQ ID NO: 5263594 - DNA, 25 bp, Homo sapien
ggtgattagtccaccttgcctccca

SEQ ID NO: 5263595 - DNA, 25 bp, Homo sapien
tgaaagtgttgattttggtggtgcc

SEQ ID NO: 5263596 - DNA, 25 bp, Homo sapien
acggaccttggaccagttgaaagtg

SEQ ID NO: 5263597 - DNA, 25 bp, Homo sapien
ctggatgaagtttgataagaaatct

SEQ ID NO: 5263598 - DNA, 25 bp, Homo sapien
tgaacctctggatgaagtttgataa

SEQ ID NO: 5263599 - DNA, 25 bp, Homo sapien
tctgaattctatctttgtaaacact

SEQ ID NO: 5263600 - DNA, 25 bp, Homo sapien
ctcctactgctcagtagggactaca

SEQ ID NO: 5263601 - DNA, 25 bp, Homo sapien
cacacaactatcaacattctgaatt

SEQ ID NO: 5263602 - DNA, 25 bp, Homo sapien
attcatagtagaactagcagaaaaa

SEQ ID NO: 5263603 - DNA, 25 bp, Homo sapien
cacacgatagggaattccaaaatta

SEQ ID NO: 5263604 - DNA, 25 bp, Homo sapien
gaatgaagtattggacaagagaaag

SEQ ID NO: 5263605 - DNA, 25 bp, Homo sapien
aggaagcagatcacacgatagggaa

SEQ ID NO: 5263606 - DNA, 25 bp, Homo sapien
ttggacaagagaaagtacatttagg

SEQ ID NO: 5263607 - DNA, 25 bp, Homo sapien
gtctaaaaaaggtgtgatactccac

SEQ ID NO: 5263608 - DNA, 25 bp, Homo sapien
ccccggctgaagaagacggcttttg

SEQ ID NO: 5263609 - DNA, 25 bp, Homo sapien
aaaattctaatgtgtcctggtaagg

SEQ ID NO: 5263610 - DNA, 25 bp, Homo sapien
tttgcttttggcttaggttggtcca

SEQ ID NO: 5263611 - DNA, 25 bp, Homo sapien
cacaatacctccactttgtgtgtaa

SEQ ID NO: 5263612 - DNA, 25 bp, Homo sapien
cacttctttcttgactaggaattac

SEQ ID NO: 5263613 - DNA, 25 bp, Homo sapien
ccatgcaagccacggcatggcccct

SEQ ID NO: 5263614 - DNA, 25 bp, Homo sapien
taggaattacctattttctcagctt

SEQ ID NO: 5263615 - DNA, 25 bp, Homo sapien
ataatctactagttgtttctgagtt

SEQ ID NO: 5263616 - DNA, 25 bp, Homo sapien
ttgaaataatctactagttgtttct

SEQ ID NO: 5263617 - DNA, 25 bp, Homo sapien
tgaaataatctactagttgtttctg

SEQ ID NO: 5263618 - DNA, 25 bp, Homo sapien
ctcgaacggacgtgtgggtcttgct

SEQ ID NO: 5263619 - DNA, 25 bp, Homo sapien
gagctcgaacggacgtgtgggtctt

SEQ ID NO: 5263620 - DNA, 25 bp, Homo sapien
agtcagagctcgaacggacgtgtgg

SEQ ID NO: 5263621 - DNA, 25 bp, Homo sapien
tcagagctcgaacggacgtgtgggt

SEQ ID NO: 5263622 - DNA, 25 bp, Homo sapien
caatgggagtggcacaagagacctg

SEQ ID NO: 5263623 - DNA, 25 bp, Homo sapien
cctaggatgccctttgccaatggga

SEQ ID NO: 5263624 - DNA, 25 bp, Homo sapien
tcttgcagaacctaatgacacgtgg

SEQ ID NO: 5263625 - DNA, 25 bp, Homo sapien
tggttccacacacaaggacacggct

SEQ ID NO: 5263626 - DNA, 25 bp, Homo sapien
gaggcaggagtcctcaatccctcgg

SEQ ID NO: 5263627 - DNA, 25 bp, Homo sapien
gtaaaaggcattcgctgaagatggg

SEQ ID NO: 5263628 - DNA, 25 bp, Homo sapien
gggagagagcgagtaaaaggcattc

SEQ ID NO: 5263629 - DNA, 25 bp, Homo sapien
tggactcttgacgtaggaaacctgg

SEQ ID NO: 5263630 - DNA, 25 bp, Homo sapien
tgtggtaaagtcatccccaccattg

SEQ ID NO: 5263631 - DNA, 25 bp, Homo sapien
catttttacaagcagcgctgagctc

SEQ ID NO: 5263632 - DNA, 25 bp, Homo sapien
cctgtgtctaggtctaaggcactga

SEQ ID NO: 5263633 - DNA, 25 bp, Homo sapien
tgctcacgacatgacaaaacccgac

SEQ ID NO: 5263634 - DNA, 25 bp, Homo sapien
ctgccggtcacaccggtgctcccca

SEQ ID NO: 5263635 - DNA, 25 bp, Homo sapien
tcacaccggtgctccccaccggaag

SEQ ID NO: 5263636 - DNA, 25 bp, Homo sapien
tgctccccaccggaaggaaatgagc

SEQ ID NO: 5263637 - DNA, 25 bp, Homo sapien
cggtgctccccaccggaaggaaatg

SEQ ID NO: 5263638 - DNA, 25 bp, Homo sapien
gctgagctgctctaactggtcgatg

SEQ ID NO: 5263639 - DNA, 25 bp, Homo sapien
agattcctgtgggactacagagcca

SEQ ID NO: 5263640 - DNA, 25 bp, Homo sapien
caaatagctccgaggtgtctgaggg

SEQ ID NO: 5263641 - DNA, 25 bp, Homo sapien
gaagttgaccatggagctggcctca

SEQ ID NO: 5263642 - DNA, 25 bp, Homo sapien
aagatggcgcttccttgaactaggg

SEQ ID NO: 5263643 - DNA, 25 bp, Homo sapien
gacttcatgggtccaacaggcactg

SEQ ID NO: 5263644 - DNA, 25 bp, Homo sapien
ggaccgtcgtcaggcaacagtaatg

SEQ ID NO: 5263645 - DNA, 25 bp, Homo sapien
tggttagccacaaaacccctgctgg

SEQ ID NO: 5263646 - DNA, 25 bp, Homo sapien
catacgacaggataaagttagtgcc

SEQ ID NO: 5263647 - DNA, 25 bp, Homo sapien
gatatcataaaaggacacttggccg

SEQ ID NO: 5263648 - DNA, 25 bp, Homo sapien
tactccacagtgagaaaacaagtgt

SEQ ID NO: 5263649 - DNA, 25 bp, Homo sapien
gttaaaagcagatgttggccgggct

SEQ ID NO: 5263650 - DNA, 25 bp, Homo sapien
catcataatgtgtgctgctatgacg

SEQ ID NO: 5263651 - DNA, 25 bp, Homo sapien
gaggcccatcataatgtgtgctgct

SEQ ID NO: 5263652 - DNA, 25 bp, Homo sapien
cataatgtgtgctgctatgacgctg

SEQ ID NO: 5263653 - DNA, 25 bp, Homo sapien
aatgtgtgctgctatgacgctgctg

SEQ ID NO: 5263654 - DNA, 25 bp, Homo sapien
tgtttccgaagatgcgctgtttggg

SEQ ID NO: 5263655 - DNA, 25 bp, Homo sapien
gagaagtacagtccaacagcaagcc

SEQ ID NO: 5263656 - DNA, 25 bp, Homo sapien
tgtgctagcccctgaagcgtggatt

SEQ ID NO: 5263657 - DNA, 25 bp, Homo sapien
tgcttctggaagtcagcgtcggcct

SEQ ID NO: 5263658 - DNA, 25 bp, Homo sapien
ctgtgaggctggcttagagccgcta

SEQ ID NO: 5263659 - DNA, 25 bp, Homo sapien
gcgcttcctgtaaaatgtgtatgta

SEQ ID NO: 5263660 - DNA, 25 bp, Homo sapien
cacacagtgccaggcgcttcctgta

SEQ ID NO: 5263661 - DNA, 25 bp, Homo sapien
ttagagccgctactactctcctgac

SEQ ID NO: 5263662 - DNA, 25 bp, Homo sapien
ggctgaggactcttcgtggaaaggc

SEQ ID NO: 5263663 - DNA, 25 bp, Homo sapien
ttgtgtctgggctcctcgcagtcca

SEQ ID NO: 5263664 - DNA, 25 bp, Homo sapien
ccagcatcactgaggacagggctca

SEQ ID NO: 5263665 - DNA, 25 bp, Homo sapien
ccctgttcagctgggcccaaaggca

SEQ ID NO: 5263666 - DNA, 25 bp, Homo sapien
agtccatcccggctccgccagcatc

SEQ ID NO: 5263667 - DNA, 25 bp, Homo sapien
tttgctagggaaggcggcccagtac

SEQ ID NO: 5263668 - DNA, 25 bp, Homo sapien
acagtgaaaacaggcccaccctgca

SEQ ID NO: 5263669 - DNA, 25 bp, Homo sapien
aggaacctggagtcccagagataag

SEQ ID NO: 5263670 - DNA, 25 bp, Homo sapien
ccagggaccgtttgctaaatgaata

SEQ ID NO: 5263671 - DNA, 25 bp, Homo sapien
taaaaaggggacaaacagtgcatca

SEQ ID NO: 5263672 - DNA, 25 bp, Homo sapien
gactgtggccgatcctcacaaatct

SEQ ID NO: 5263673 - DNA, 25 bp, Homo sapien
tcgactgtggccgatcctcacaaat

SEQ ID NO: 5263674 - DNA, 25 bp, Homo sapien
tttcgactgtggccgatcctcacaa

SEQ ID NO: 5263675 - DNA, 25 bp, Homo sapien
ctttcgactgtggccgatcctcaca

SEQ ID NO: 5263676 - DNA, 25 bp, Homo sapien
tccgaataggcgcctggacactgcc

SEQ ID NO: 5263677 - DNA, 25 bp, Homo sapien
ggtaggtgggccgtgcaaatatcca

SEQ ID NO: 5263678 - DNA, 25 bp, Homo sapien
gcaaatatccatggagcaggtgtca

SEQ ID NO: 5263679 - DNA, 25 bp, Homo sapien
actgtggccagcttcagggtaggtg

SEQ ID NO: 5263680 - DNA, 25 bp, Homo sapien
tgagcgatcctatagctggcagggc

SEQ ID NO: 5263681 - DNA, 25 bp, Homo sapien
ttttccgtgccctgctagagacagc

SEQ ID NO: 5263682 - DNA, 25 bp, Homo sapien
taagtgtgcctgcatcagagcgcca

SEQ ID NO: 5263683 - DNA, 25 bp, Homo sapien
aaacagtgcgcattctaagtgtgcc

SEQ ID NO: 5263684 - DNA, 25 bp, Homo sapien
tctaaatccttgaggtatgttcgtt

SEQ ID NO: 5263685 - DNA, 25 bp, Homo sapien
tgactatgaagtaggcctcgtctgc

SEQ ID NO: 5263686 - DNA, 25 bp, Homo sapien
gcgagaatctctttgactatgaagt

SEQ ID NO: 5263687 - DNA, 25 bp, Homo sapien
tgttcgttctgtagcgagaatctct

SEQ ID NO: 5263688 - DNA, 25 bp, Homo sapien
atgttggagaagagcagcgtcatca

SEQ ID NO: 5263689 - DNA, 25 bp, Homo sapien
ctccttcaccactgcgctgcggaac

SEQ ID NO: 5263690 - DNA, 25 bp, Homo sapien
gagtcgcaggcatggcgtcctcctt

SEQ ID NO: 5263691 - DNA, 25 bp, Homo sapien
gaactcatagatgggatcgatgttg

SEQ ID NO: 5263692 - DNA, 25 bp, Homo sapien
gattcgttgatgactgccttttgtg

SEQ ID NO: 5263693 - DNA, 25 bp, Homo sapien
caggatgtccccgattcgttgatga

SEQ ID NO: 5263694 - DNA, 25 bp, Homo sapien
tcctgagcaggatgtccccgattcg

SEQ ID NO: 5263695 - DNA, 25 bp, Homo sapien
tccccgattcgttgatgactgcctt

SEQ ID NO: 5263696 - DNA, 25 bp, Homo sapien
ctgctacatgcccttcgtggagctg

SEQ ID NO: 5263697 - DNA, 25 bp, Homo sapien
tttgtgacccctgctacatgccctt

SEQ ID NO: 5263698 - DNA, 25 bp, Homo sapien
ctactccatttttgtgacccctgct

SEQ ID NO: 5263699 - DNA, 25 bp, Homo sapien
ccatttttgtgacccctgctacatg

SEQ ID NO: 5263700 - DNA, 25 bp, Homo sapien
gaacagtcaatgcacgacctgcact

SEQ ID NO: 5263701 - DNA, 25 bp, Homo sapien
gcaagagtgagacccctgaacagtc

SEQ ID NO: 5263702 - DNA, 25 bp, Homo sapien
cctgtaccgttgctcctattgaaga

SEQ ID NO: 5263703 - DNA, 25 bp, Homo sapien
tgttccaggcacgttaagcaagagt

SEQ ID NO: 5263704 - DNA, 25 bp, Homo sapien
ttcatggtgttatgcagagctccac

SEQ ID NO: 5263705 - DNA, 25 bp, Homo sapien
gagtcgtcgtcgtcactgtggctca

SEQ ID NO: 5263706 - DNA, 25 bp, Homo sapien
cagcaaaacctatagtcccttggga

SEQ ID NO: 5263707 - DNA, 25 bp, Homo sapien
gactcagcttccgtcgaggcaggaa

SEQ ID NO: 5263708 - DNA, 25 bp, Homo sapien
gcgctccaggagttgtatagtgtcg

SEQ ID NO: 5263709 - DNA, 25 bp, Homo sapien
ggcttcaatcctggcaggcgctcca

SEQ ID NO: 5263710 - DNA, 25 bp, Homo sapien
ggctcagatgtctatgcatccacac

SEQ ID NO: 5263711 - DNA, 25 bp, Homo sapien
cactcgctaggcttctagcgggagg

SEQ ID NO: 5263712 - DNA, 25 bp, Homo sapien
cattccaccaattcactgctacatg

SEQ ID NO: 5263713 - DNA, 25 bp, Homo sapien
atgcactgagtggaccagggccacc

SEQ ID NO: 5263714 - DNA, 25 bp, Homo sapien
actaaccggccccatatcacatgca

SEQ ID NO: 5263715 - DNA, 25 bp, Homo sapien
ggacagatgaagaattgaggatggg

SEQ ID NO: 5263716 - DNA, 25 bp, Homo sapien
caacttcttacagcgtttggtagcc

SEQ ID NO: 5263717 - DNA, 25 bp, Homo sapien
taatgtccgcataggcggcgcagca

SEQ ID NO: 5263718 - DNA, 25 bp, Homo sapien
gcagtcagcgtagtcatggtgcccg

SEQ ID NO: 5263719 - DNA, 25 bp, Homo sapien
tcagcaggaacgtgttgagaggcaa

SEQ ID NO: 5263720 - DNA, 25 bp, Homo sapien
tgctggaatcactcatggggaccac

SEQ ID NO: 5263721 - DNA, 25 bp, Homo sapien
cctccttgctggaatcactcatggg

SEQ ID NO: 5263722 - DNA, 25 bp, Homo sapien
cttgctggaatcactcatggggacc

SEQ ID NO: 5263723 - DNA, 25 bp, Homo sapien
atcctccttgctggaatcactcatg

SEQ ID NO: 5263724 - DNA, 25 bp, Homo sapien
aatgaggttctctatgcccaccagg

SEQ ID NO: 5263725 - DNA, 25 bp, Homo sapien
gtcacctctgtgatggctttcaggg

SEQ ID NO: 5263726 - DNA, 25 bp, Homo sapien
tgcaggttctccagccggatgagaa

SEQ ID NO: 5263727 - DNA, 25 bp, Homo sapien
gcagctccgttagcttctgcaggtt

SEQ ID NO: 5263728 - DNA, 25 bp, Homo sapien
tacaaggagtacaggaagtatttca

SEQ ID NO: 5263729 - DNA, 25 bp, Homo sapien
tgatacaaggagtacaggaagtatt

SEQ ID NO: 5263730 - DNA, 25 bp, Homo sapien
tcggggttagcctgatacaaggagt

SEQ ID NO: 5263731 - DNA, 25 bp, Homo sapien
tgtcggggttagcctgatacaagga

SEQ ID NO: 5263732 - DNA, 25 bp, Homo sapien
acgtctcaggtagttcaacacaggc

SEQ ID NO: 5263733 - DNA, 25 bp, Homo sapien
cacgtctcaggtagttcaacacagg

SEQ ID NO: 5263734 - DNA, 25 bp, Homo sapien
gggtctctgtccattaaataggcaa

SEQ ID NO: 5263735 - DNA, 25 bp, Homo sapien
tctgtccattaaataggcaacagtt

SEQ ID NO: 5263736 - DNA, 25 bp, Homo sapien
cactgaagcacgtggtacacatgct

SEQ ID NO: 5263737 - DNA, 25 bp, Homo sapien
catgggcacctgtgatgttttgctc

SEQ ID NO: 5263738 - DNA, 25 bp, Homo sapien
catagaggaacttggcctgatcttc

SEQ ID NO: 5263739 - DNA, 25 bp, Homo sapien
ccatagttgtaagaagagccattgc

SEQ ID NO: 5263740 - DNA, 25 bp, Homo sapien
acctcagaagcacaaaaggattcac

SEQ ID NO: 5263741 - DNA, 25 bp, Homo sapien
cacaaaaggattcacacccagatct

SEQ ID NO: 5263742 - DNA, 25 bp, Homo sapien
agcacaaaaggattcacacccagat

SEQ ID NO: 5263743 - DNA, 25 bp, Homo sapien
gaagcacaaaaggattcacacccag

SEQ ID NO: 5263744 - DNA, 25 bp, Homo sapien
caggtcatcccatggctaagtctgc

SEQ ID NO: 5263745 - DNA, 25 bp, Homo sapien
agtacaccctgagggcccacagtgg

SEQ ID NO: 5263746 - DNA, 25 bp, Homo sapien
aacttggttaatcaggttattggca

SEQ ID NO: 5263747 - DNA, 25 bp, Homo sapien
cacaagcctatctattgtatcaagg

SEQ ID NO: 5263748 - DNA, 25 bp, Homo sapien
cagagacagagtcccctttcagcgg

SEQ ID NO: 5263749 - DNA, 25 bp, Homo sapien
aaagacagagacagagtcccctttc

SEQ ID NO: 5263750 - DNA, 25 bp, Homo sapien
acagagacagagtcccctttcagcg

SEQ ID NO: 5263751 - DNA, 25 bp, Homo sapien
agacagagacagagtcccctttcag

SEQ ID NO: 5263752 - DNA, 25 bp, Homo sapien
gaaggcagccctcacggatgaactc

SEQ ID NO: 5263753 - DNA, 25 bp, Homo sapien
aagcagcaagctttacatccatgaa

SEQ ID NO: 5263754 - DNA, 25 bp, Homo sapien
gaagcagcaagctttacatccatga

SEQ ID NO: 5263755 - DNA, 25 bp, Homo sapien
ggtccctgcaactcctttgcttgtg

SEQ ID NO: 5263756 - DNA, 25 bp, Homo sapien
gcttgtgtacagcaacatatctgag

SEQ ID NO: 5263757 - DNA, 25 bp, Homo sapien
gcaactcctttgcttgtgtacagca

SEQ ID NO: 5263758 - DNA, 25 bp, Homo sapien
gctggtccctgcaactcctttgctt

SEQ ID NO: 5263759 - DNA, 25 bp, Homo sapien
ccttaacagtcaggaacgagggcca

SEQ ID NO: 5263760 - DNA, 25 bp, Homo sapien
ggaattgtcccacgatcaagtaagg

SEQ ID NO: 5263761 - DNA, 25 bp, Homo sapien
tgaatcaacataagcaagggcaggc

SEQ ID NO: 5263762 - DNA, 25 bp, Homo sapien
gagctgaccctgataggccctgatt

SEQ ID NO: 5263763 - DNA, 25 bp, Homo sapien
ctgacagcctaagcctgagcaggac

SEQ ID NO: 5263764 - DNA, 25 bp, Homo sapien
gaaacggtccaagtcttgtggccaa

SEQ ID NO: 5263765 - DNA, 25 bp, Homo sapien
tgggccagagggcacccaaatactc

SEQ ID NO: 5263766 - DNA, 25 bp, Homo sapien
caagtgcacacagactctacaagag

SEQ ID NO: 5263767 - DNA, 25 bp, Homo sapien
cagtgtggaacagaccactcgttat

SEQ ID NO: 5263768 - DNA, 25 bp, Homo sapien
gaccactcgttatcactttcttcca

SEQ ID NO: 5263769 - DNA, 25 bp, Homo sapien
tggctgccaccacgattgttttctg

SEQ ID NO: 5263770 - DNA, 25 bp, Homo sapien
tctgagccgcgtagatggtgaaaca

SEQ ID NO: 5263771 - DNA, 25 bp, Homo sapien
cagtgcaggggccgtgtcaccgcca

SEQ ID NO: 5263772 - DNA, 25 bp, Homo sapien
ggggccgtgtcaccgccactcttgg

SEQ ID NO: 5263773 - DNA, 25 bp, Homo sapien
gtgcaggggccgtgtcaccgccact

SEQ ID NO: 5263774 - DNA, 25 bp, Homo sapien
tggggggacgagtgcacacagtgcg

SEQ ID NO: 5263775 - DNA, 25 bp, Homo sapien
tcctgctccagagatacctcgttgg

SEQ ID NO: 5263776 - DNA, 25 bp, Homo sapien
gcattgtggtgttggcccggtgctg

SEQ ID NO: 5263777 - DNA, 25 bp, Homo sapien
tggacacgctggtgttccggtacca

SEQ ID NO: 5263778 - DNA, 25 bp, Homo sapien
ggacaccccgagcatcatcttctga

SEQ ID NO: 5263779 - DNA, 25 bp, Homo sapien
acagaagttggtaaagacgacccag

SEQ ID NO: 5263780 - DNA, 25 bp, Homo sapien
gaagttggtaaagacgacccagagc

SEQ ID NO: 5263781 - DNA, 25 bp, Homo sapien
tgaactttcttagcagatatcctga

SEQ ID NO: 5263782 - DNA, 25 bp, Homo sapien
tggtaaagacgacccagagcttctg

SEQ ID NO: 5263783 - DNA, 25 bp, Homo sapien
cattgggctccagtgaaactccagt

SEQ ID NO: 5263784 - DNA, 25 bp, Homo sapien
ctggggatgctcacgctgtagccca

SEQ ID NO: 5263785 - DNA, 25 bp, Homo sapien
tagacgtgggatttgaactggagct

SEQ ID NO: 5263786 - DNA, 25 bp, Homo sapien
gacgtgggatttgaactggagcttg

SEQ ID NO: 5263787 - DNA, 25 bp, Homo sapien
ccggaagaagtagacgtgggatttg

SEQ ID NO: 5263788 - DNA, 25 bp, Homo sapien
tgctggaagcattgctcagcccttc

SEQ ID NO: 5263789 - DNA, 25 bp, Homo sapien
aaatgggagctgagcggacatcgaa

SEQ ID NO: 5263790 - DNA, 25 bp, Homo sapien
tagccaggcggcgtggcgtgcatgc

SEQ ID NO: 5263791 - DNA, 25 bp, Homo sapien
ttccagggcccagaaaacttgcctc

SEQ ID NO: 5263792 - DNA, 25 bp, Homo sapien
atcctgcacgatgcttggggccctc

SEQ ID NO: 5263793 - DNA, 25 bp, Homo sapien
ggccatcctgcacgatgcttggggc

SEQ ID NO: 5263794 - DNA, 25 bp, Homo sapien
ggggccatcctgcacgatgcttggg

SEQ ID NO: 5263795 - DNA, 25 bp, Homo sapien
tgcacgatgcttggggccctcccgg

SEQ ID NO: 5263796 - DNA, 25 bp, Homo sapien
ctttggtccgatgccgagagcactg

SEQ ID NO: 5263797 - DNA, 25 bp, Homo sapien
tgtgccacgcttgtctgagagggtc

SEQ ID NO: 5263798 - DNA, 25 bp, Homo sapien
tgtgtgtgaacaaagcagtcgccca

SEQ ID NO: 5263799 - DNA, 25 bp, Homo sapien
tgctggcatgcactaggtcctgggt

SEQ ID NO: 5263800 - DNA, 25 bp, Homo sapien
aacagagcaggcagaggagaatgca

SEQ ID NO: 5263801 - DNA, 25 bp, Homo sapien
ccaccggaagaacagagcaggcaga

SEQ ID NO: 5263802 - DNA, 25 bp, Homo sapien
caccggaagaacagagcaggcagag

SEQ ID NO: 5263803 - DNA, 25 bp, Homo sapien
aagaacagagcaggcagaggagaat

SEQ ID NO: 5263804 - DNA, 25 bp, Homo sapien
tcatagaacattgagaggcccctgc

SEQ ID NO: 5263805 - DNA, 25 bp, Homo sapien
tatgtcgtgcctgcagggacacgtc

SEQ ID NO: 5263806 - DNA, 25 bp, Homo sapien
taaagacctgacttggagacatgca

SEQ ID NO: 5263807 - DNA, 25 bp, Homo sapien
aaggcgcagagcaactatcagggca

SEQ ID NO: 5263808 - DNA, 25 bp, Homo sapien
gacatacattgccacgatcctgcgg

SEQ ID NO: 5263809 - DNA, 25 bp, Homo sapien
atcatcatggagtacctgggcggcg

SEQ ID NO: 5263810 - DNA, 25 bp, Homo sapien
cagatatagtgttgggcagggaccc

SEQ ID NO: 5263811 - DNA, 25 bp, Homo sapien
tatagagaaccttgtggccaccctg

SEQ ID NO: 5263812 - DNA, 25 bp, Homo sapien
tattttgttatagcagcctgagcag

SEQ ID NO: 5263813 - DNA, 25 bp, Homo sapien
tttgttatagcagcctgagcagact

SEQ ID NO: 5263814 - DNA, 25 bp, Homo sapien
gtattttgttatagcagcctgagca

SEQ ID NO: 5263815 - DNA, 25 bp, Homo sapien
gtcataggctggtattttgttatag

SEQ ID NO: 5263816 - DNA, 25 bp, Homo sapien
atccaacaggatcgggccctcatga

SEQ ID NO: 5263817 - DNA, 25 bp, Homo sapien
ggatccctgatccaacaggatcggg

SEQ ID NO: 5263818 - DNA, 25 bp, Homo sapien
gccagcatcttaatctcagacttcc

SEQ ID NO: 5263819 - DNA, 25 bp, Homo sapien
agttcataagggtggatccctgatc

SEQ ID NO: 5263820 - DNA, 25 bp, Homo sapien
ggtacatatgtaaacgtcccgtaga

SEQ ID NO: 5263821 - DNA, 25 bp, Homo sapien
tgctctcggtggcttgaaactaaaa

SEQ ID NO: 5263822 - DNA, 25 bp, Homo sapien
aaaccttagcttttgtggccaggca

SEQ ID NO: 5263823 - DNA, 25 bp, Homo sapien
gacattactgctgagcctgtgacag

SEQ ID NO: 5263824 - DNA, 25 bp, Homo sapien
tgagactgtctgtaagccaccctgg

SEQ ID NO: 5263825 - DNA, 25 bp, Homo sapien
ggacccagttgctgtcataggccct

SEQ ID NO: 5263826 - DNA, 25 bp, Homo sapien
cctgcctgatctacgtgtggccaca

SEQ ID NO: 5263827 - DNA, 25 bp, Homo sapien
cacgaccttgggatgcagacaacag

SEQ ID NO: 5263828 - DNA, 25 bp, Homo sapien
ttctcagcttttccttgacaattta

SEQ ID NO: 5263829 - DNA, 25 bp, Homo sapien
acaatctgcggagtcgccttcctgg

SEQ ID NO: 5263830 - DNA, 25 bp, Homo sapien
taggtccacaatctgcggagtcgcc

SEQ ID NO: 5263831 - DNA, 25 bp, Homo sapien
cagcttttccttgacaatttatttc

SEQ ID NO: 5263832 - DNA, 25 bp, Homo sapien
ctacgacgacgacttgtggatctca

SEQ ID NO: 5263833 - DNA, 25 bp, Homo sapien
aaaggcccacggagccatggcttct

SEQ ID NO: 5263834 - DNA, 25 bp, Homo sapien
tgtcctttataagctgggcttgctg

SEQ ID NO: 5263835 - DNA, 25 bp, Homo sapien
gtcatgggtgtcagcgtttaaaagt

SEQ ID NO: 5263836 - DNA, 25 bp, Homo sapien
tcttcccagtggtgatccctgatgg

SEQ ID NO: 5263837 - DNA, 25 bp, Homo sapien
gggcagcttctgtactctgtccatt

SEQ ID NO: 5263838 - DNA, 25 bp, Homo sapien
gctctgggagatcccttggggtggg

SEQ ID NO: 5263839 - DNA, 25 bp, Homo sapien
acaagttcaggctttgccagtggaa

SEQ ID NO: 5263840 - DNA, 25 bp, Homo sapien
ggtagctctgggagatcccttgggg

SEQ ID NO: 5263841 - DNA, 25 bp, Homo sapien
tacaagtctcagcaaatctcaacgg

SEQ ID NO: 5263842 - DNA, 25 bp, Homo sapien
caacttggcctaattcacgtgtgta

SEQ ID NO: 5263843 - DNA, 25 bp, Homo sapien
tccaccgaattggaggagtccccaa

SEQ ID NO: 5263844 - DNA, 25 bp, Homo sapien
tgtgtctcggaactctatcccactg

SEQ ID NO: 5263845 - DNA, 25 bp, Homo sapien
ttcaggatctgctcgccgccgacga

SEQ ID NO: 5263846 - DNA, 25 bp, Homo sapien
ttccattcagacccgcgaggacgcg

SEQ ID NO: 5263847 - DNA, 25 bp, Homo sapien
agcgaggtgggcagcgcgcgactcc

SEQ ID NO: 5263848 - DNA, 25 bp, Homo sapien
gtggagttctggcttcaggatctgc

SEQ ID NO: 5263849 - DNA, 25 bp, Homo sapien
cgggcaccccggcacggacgccacg

SEQ ID NO: 5263850 - DNA, 25 bp, Homo sapien
gcgtcctgcgcgcgtgtccccggcc

SEQ ID NO: 5263851 - DNA, 25 bp, Homo sapien
cggcacggacgccacgcccgccgcg

SEQ ID NO: 5263852 - DNA, 25 bp, Homo sapien
ctggcgtcctgcgcgcgtgtccccg

SEQ ID NO: 5263853 - DNA, 25 bp, Homo sapien
gccaccttctttcagagcccgaatt

SEQ ID NO: 5263854 - DNA, 25 bp, Homo sapien
gcccgccctcgaagacgagtgcgtg

SEQ ID NO: 5263855 - DNA, 25 bp, Homo sapien
agctacagacattccccgaggctgc

SEQ ID NO: 5263856 - DNA, 25 bp, Homo sapien
tttcagagcccgaattcagctacag

SEQ ID NO: 5263857 - DNA, 25 bp, Homo sapien
gcgacgcgggtggggggcgccgcac

SEQ ID NO: 5263858 - DNA, 25 bp, Homo sapien
ggcgacgcgggtggggggcgccgca

SEQ ID NO: 5263859 - DNA, 25 bp, Homo sapien
cgtccatgatctcggcggcgaagac

SEQ ID NO: 5263860 - DNA, 25 bp, Homo sapien
ttgtctgtgggcgagcggtcaaagg

SEQ ID NO: 5263861 - DNA, 25 bp, Homo sapien
gcgagcggtcaaaggcgtccatgat

SEQ ID NO: 5263862 - DNA, 25 bp, Homo sapien
cggcgaagaccgaggagcgccgcag

SEQ ID NO: 5263863 - DNA, 25 bp, Homo sapien
aggtggcactgcatcagccctgccc

SEQ ID NO: 5263864 - DNA, 25 bp, Homo sapien
ttgcggtagacgctgggccggatca

SEQ ID NO: 5263865 - DNA, 25 bp, Homo sapien
aggaacgcatcggtcaccacaggct

SEQ ID NO: 5263866 - DNA, 25 bp, Homo sapien
cagccacggccaggaacgcatcggt

SEQ ID NO: 5263867 - DNA, 25 bp, Homo sapien
gctgacgcgccacgttgcggtagac

SEQ ID NO: 5263868 - DNA, 25 bp, Homo sapien
gccccgcggccaccgcatacaggga

SEQ ID NO: 5263869 - DNA, 25 bp, Homo sapien
ggcagtccacgagggcgtggaccat

SEQ ID NO: 5263870 - DNA, 25 bp, Homo sapien
cccaggcagtccacgagggcgtgga

SEQ ID NO: 5263871 - DNA, 25 bp, Homo sapien
accgcatacagggacaccaccttgc

SEQ ID NO: 5263872 - DNA, 25 bp, Homo sapien
gtctccgcagccaggttgccagggt

SEQ ID NO: 5263873 - DNA, 25 bp, Homo sapien
cgtctccgcagccaggttgccaggg

SEQ ID NO: 5263874 - DNA, 25 bp, Homo sapien
ccgcgtctccgcagccaggttgcca

SEQ ID NO: 5263875 - DNA, 25 bp, Homo sapien
tccgcagccaggttgccagggtctt

SEQ ID NO: 5263876 - DNA, 25 bp, Homo sapien
ctgaccacacacttgaggacatcag

SEQ ID NO: 5263877 - DNA, 25 bp, Homo sapien
cagcacgaagaaggcagccttcagg

SEQ ID NO: 5263878 - DNA, 25 bp, Homo sapien
aagcggccgaagctgcagagtgcag

SEQ ID NO: 5263879 - DNA, 25 bp, Homo sapien
tgaccacacacttgaggacatcagt

SEQ ID NO: 5263880 - DNA, 25 bp, Homo sapien
ctcctgcgttgggcccagagggcca

SEQ ID NO: 5263881 - DNA, 25 bp, Homo sapien
ctgagggcctcctgcgttgggccca

SEQ ID NO: 5263882 - DNA, 25 bp, Homo sapien
agatgtgttcgggtgctgagggcct

SEQ ID NO: 5263883 - DNA, 25 bp, Homo sapien
ccaggctgcggccactgccaggtgg

SEQ ID NO: 5263884 - DNA, 25 bp, Homo sapien
gtctccgagggttagagtgctccag

SEQ ID NO: 5263885 - DNA, 25 bp, Homo sapien
tccgagggttagagtgctccaggct

SEQ ID NO: 5263886 - DNA, 25 bp, Homo sapien
tctccgagggttagagtgctccagg

SEQ ID NO: 5263887 - DNA, 25 bp, Homo sapien
gggtctccgagggttagagtgctcc

SEQ ID NO: 5263888 - DNA, 25 bp, Homo sapien
gagcaggtgttccgggccccttcac

SEQ ID NO: 5263889 - DNA, 25 bp, Homo sapien
gagagcaggtgttccgggccccttc

SEQ ID NO: 5263890 - DNA, 25 bp, Homo sapien
agagcaggtgttccgggccccttca

SEQ ID NO: 5263891 - DNA, 25 bp, Homo sapien
agagcaggtgttccgggccccttca

SEQ ID NO: 5263892 - DNA, 25 bp, Homo sapien
gagagcaggtgttccgggccccttc

SEQ ID NO: 5263893 - DNA, 25 bp, Homo sapien
gagagcaggtgttccgggccccttc

SEQ ID NO: 5263894 - DNA, 25 bp, Homo sapien
aggtgagagcaagtgttccgggccc

SEQ ID NO: 5263895 - DNA, 25 bp, Homo sapien
agagcaagtgttccgggccccttca

SEQ ID NO: 5263896 - DNA, 25 bp, Homo sapien
agagcaggtgttccgggccccttca

SEQ ID NO: 5263897 - DNA, 25 bp, Homo sapien
agagcaagtgttccgggccccttca

SEQ ID NO: 5263898 - DNA, 25 bp, Homo sapien
aggtgagagcaagtgttccgggccc

SEQ ID NO: 5263899 - DNA, 25 bp, Homo sapien
gtgagagcaagtgttccgggcccct

SEQ ID NO: 5263900 - DNA, 25 bp, Homo sapien
tgagagcaagtgttccgggcccctt

SEQ ID NO: 5263901 - DNA, 25 bp, Homo sapien
catccatgggttaggtgtgctggcc

SEQ ID NO: 5263902 - DNA, 25 bp, Homo sapien
gcatctgagttcttacggagcccta

SEQ ID NO: 5263903 - DNA, 25 bp, Homo sapien
gactgggatccgactcatgcaacat

SEQ ID NO: 5263904 - DNA, 25 bp, Homo sapien
tgcaacattccttctcggccgtagg

SEQ ID NO: 5263905 - DNA, 25 bp, Homo sapien
tcaatatgcattcccacggtcctgg

SEQ ID NO: 5263906 - DNA, 25 bp, Homo sapien
ttcttctacactaaccatgggcggc

SEQ ID NO: 5263907 - DNA, 25 bp, Homo sapien
tcccggagaagcagatgcacaaagc

SEQ ID NO: 5263908 - DNA, 25 bp, Homo sapien
tcagaagcctaatgtgccctgtggc

SEQ ID NO: 5263909 - DNA, 25 bp, Homo sapien
gagagttttcttatccaggaacatg

SEQ ID NO: 5263910 - DNA, 25 bp, Homo sapien
gcaccttgagcatgggcttcctcct

SEQ ID NO: 5263911 - DNA, 25 bp, Homo sapien
tcatgtggttccattacggaggcca

SEQ ID NO: 5263912 - DNA, 25 bp, Homo sapien
tatttgatccaagaagcatctggca

SEQ ID NO: 5263913 - DNA, 25 bp, Homo sapien
tcttgtcagaactgtaaaaccaggc

SEQ ID NO: 5263914 - DNA, 25 bp, Homo sapien
cgagtgctccggtaagctcgccgtg

SEQ ID NO: 5263915 - DNA, 25 bp, Homo sapien
tcaccgtgagttagccagcagatcc

SEQ ID NO: 5263916 - DNA, 25 bp, Homo sapien
catgctgggccttgggttgtttcca

SEQ ID NO: 5263917 - DNA, 25 bp, Homo sapien
ttaataagcttggatggcgacagcc

SEQ ID NO: 5263918 - DNA, 25 bp, Homo sapien
tgaccattgctagaaccagaacctt

SEQ ID NO: 5263919 - DNA, 25 bp, Homo sapien
gaagctggtcacttgtcctcgaagg

SEQ ID NO: 5263920 - DNA, 25 bp, Homo sapien
gtgcgttacaggacccacacgggta

SEQ ID NO: 5263921 - DNA, 25 bp, Homo sapien
tgaccccgtaaacctagagcttctg

SEQ ID NO: 5263922 - DNA, 25 bp, Homo sapien
tggctactgtgcctcaacggttcgg

SEQ ID NO: 5263923 - DNA, 25 bp, Homo sapien
tcagatcacccggaagttcaggctg

SEQ ID NO: 5263924 - DNA, 25 bp, Homo sapien
tgaaggcaaacttgagcagacggtc

SEQ ID NO: 5263925 - DNA, 25 bp, Homo sapien
cgttcagggtggtatggccgtcgac

SEQ ID NO: 5263926 - DNA, 25 bp, Homo sapien
cgaggtcagacgagatcaggtgcgt

SEQ ID NO: 5263927 - DNA, 25 bp, Homo sapien
ttccgaggtcagacgagatcaggtg

SEQ ID NO: 5263928 - DNA, 25 bp, Homo sapien
gttcagggtggtatggccgtcgaca

SEQ ID NO: 5263929 - DNA, 25 bp, Homo sapien
tgctggtcctcgctgacttggtggt

SEQ ID NO: 5263930 - DNA, 25 bp, Homo sapien
tgacttccgggcagcaaaagcatcg

SEQ ID NO: 5263931 - DNA, 25 bp, Homo sapien
catgagtctgagaaggccccactta

SEQ ID NO: 5263932 - DNA, 25 bp, Homo sapien
gcctctcctcctagatggacactga

SEQ ID NO: 5263933 - DNA, 25 bp, Homo sapien
gaagaagtgccatcttaggcaaact

SEQ ID NO: 5263934 - DNA, 25 bp, Homo sapien
tccagtgccatggtaaggtgctcca

SEQ ID NO: 5263935 - DNA, 25 bp, Homo sapien
ttggctatcctaggaccctttgcat

SEQ ID NO: 5263936 - DNA, 25 bp, Homo sapien
ttcaacgtattggttttgcacacat

SEQ ID NO: 5263937 - DNA, 25 bp, Homo sapien
atataatcttgtaacgctgcgccag

SEQ ID NO: 5263938 - DNA, 25 bp, Homo sapien
ggaagcttcacagttcaacctaaaa

SEQ ID NO: 5263939 - DNA, 25 bp, Homo sapien
tgttctcagatgagggccagctacc

SEQ ID NO: 5263940 - DNA, 25 bp, Homo sapien
gaacagtcccagcaccctagaaagt

SEQ ID NO: 5263941 - DNA, 25 bp, Homo sapien
tgcttgtccacttccttaccagtaa

SEQ ID NO: 5263942 - DNA, 25 bp, Homo sapien
gcccagcctcgtttgtctttcttcg

SEQ ID NO: 5263943 - DNA, 25 bp, Homo sapien
catgttaatgtctaagggaacgttt

SEQ ID NO: 5263944 - DNA, 25 bp, Homo sapien
tctcaaggcttataaaatgtacatc

SEQ ID NO: 5263945 - DNA, 25 bp, Homo sapien
ccgtgaggtagtgcgtgtcttgcca

SEQ ID NO: 5263946 - DNA, 25 bp, Homo sapien
catttgggttgtccacgtttacaga

SEQ ID NO: 5263947 - DNA, 25 bp, Homo sapien
tttgcagcggtctgtggagtcagcc

SEQ ID NO: 5263948 - DNA, 25 bp, Homo sapien
ccttctcggaccatccagggtggat

SEQ ID NO: 5263949 - DNA, 25 bp, Homo sapien
tcagctctcagggacaagaccagtg

SEQ ID NO: 5263950 - DNA, 25 bp, Homo sapien
tgagtgtcatgcctgtacgaccagg

SEQ ID NO: 5263951 - DNA, 25 bp, Homo sapien
caagggtcctatgagttgagtgtca

SEQ ID NO: 5263952 - DNA, 25 bp, Homo sapien
ggcatctaccacctataaccagttt

SEQ ID NO: 5263953 - DNA, 25 bp, Homo sapien
tcgatttagtgtagcctctgtgcag

SEQ ID NO: 5263954 - DNA, 25 bp, Homo sapien
aaatatcagatccagccgtgtgcta

SEQ ID NO: 5263955 - DNA, 25 bp, Homo sapien
catacaccatggtagtcccgtaaga

SEQ ID NO: 5263956 - DNA, 25 bp, Homo sapien
taatggagctgagagagtcctgtca

SEQ ID NO: 5263957 - DNA, 25 bp, Homo sapien
ccgactccctggttaaagcaattct

SEQ ID NO: 5263958 - DNA, 25 bp, Homo sapien
gtgccaccatgtccagctaattttt

SEQ ID NO: 5263959 - DNA, 25 bp, Homo sapien
cctccgactccctggttaaagcaat

SEQ ID NO: 5263960 - DNA, 25 bp, Homo sapien
tagagtgcaatggcgatatctaggc

SEQ ID NO: 5263961 - DNA, 25 bp, Homo sapien
tcctctaagcacacccgagaaaggc

SEQ ID NO: 5263962 - DNA, 25 bp, Homo sapien
caggagatggactggccaccatggt

SEQ ID NO: 5263963 - DNA, 25 bp, Homo sapien
ggaaaagcagaagcgtctgccacag

SEQ ID NO: 5263964 - DNA, 25 bp, Homo sapien
tatcggctcacttcattcgtacagt

SEQ ID NO: 5263965 - DNA, 25 bp, Homo sapien
tgtccgacgggacactgtgtgccat

SEQ ID NO: 5263966 - DNA, 25 bp, Homo sapien
catcttgcggtacggacgtgctcgg

SEQ ID NO: 5263967 - DNA, 25 bp, Homo sapien
atacggcgcgcgagcggaaatacgc

SEQ ID NO: 5263968 - DNA, 25 bp, Homo sapien
gcccatgtcgcggtacggacttgcc

SEQ ID NO: 5263969 - DNA, 25 bp, Homo sapien
cttcccagtccggccgccgactgac

SEQ ID NO: 5263970 - DNA, 25 bp, Homo sapien
cagtccggccgccgactgacccgag

SEQ ID NO: 5263971 - DNA, 25 bp, Homo sapien
cggccgccgactgacccgagcggcg

SEQ ID NO: 5263972 - DNA, 25 bp, Homo sapien
gccgccgactgacccgagcggcgtc

SEQ ID NO: 5263973 - DNA, 25 bp, Homo sapien
ccctcctggacaccctcgcagctcc

SEQ ID NO: 5263974 - DNA, 25 bp, Homo sapien
cctcctggacaccctcgcagctcca

SEQ ID NO: 5263975 - DNA, 25 bp, Homo sapien
ctcctggacaccctcgcagctccag

SEQ ID NO: 5263976 - DNA, 25 bp, Homo sapien
cctcctctcggtactgtggaggacg

SEQ ID NO: 5263977 - DNA, 25 bp, Homo sapien
aacatcatgatgtccctgctacctc

SEQ ID NO: 5263978 - DNA, 25 bp, Homo sapien
attaggatgaattaaggtccatgcc

SEQ ID NO: 5263979 - DNA, 25 bp, Homo sapien
gaggtctaatcatgttgtcaagctg

SEQ ID NO: 5263980 - DNA, 25 bp, Homo sapien
catgctttcagagacattatcaacc

SEQ ID NO: 5263981 - DNA, 25 bp, Homo sapien
aaaccggagagtgtcgtaggtcaga

SEQ ID NO: 5263982 - DNA, 25 bp, Homo sapien
aatgctgtattttctacccagtatc

SEQ ID NO: 5263983 - DNA, 25 bp, Homo sapien
aaaatcttcaaactcagcaaaccgg

SEQ ID NO: 5263984 - DNA, 25 bp, Homo sapien
ccagtatccaaacgggctctgaggt

SEQ ID NO: 5263985 - DNA, 25 bp, Homo sapien
cacacacaacgccttaagtttgcaa

SEQ ID NO: 5263986 - DNA, 25 bp, Homo sapien
caggccaagcggtcagaccagggtg

SEQ ID NO: 5263987 - DNA, 25 bp, Homo sapien
agtttgcaagtcacaagttatggca

SEQ ID NO: 5263988 - DNA, 25 bp, Homo sapien
cagagttagcagagaacagtgatca

SEQ ID NO: 5263989 - DNA, 25 bp, Homo sapien
ctgtatgtaaaccaaagtctagatg

SEQ ID NO: 5263990 - DNA, 25 bp, Homo sapien
tctagatgccacatcagacaagatc

SEQ ID NO: 5263991 - DNA, 25 bp, Homo sapien
gccacatcagacaagatctcgtcct

SEQ ID NO: 5263992 - DNA, 25 bp, Homo sapien
taaaccaaagtctagatgccacatc

SEQ ID NO: 5263993 - DNA, 25 bp, Homo sapien
cagctccagggtatacaacaatgat

SEQ ID NO: 5263994 - DNA, 25 bp, Homo sapien
ggcctcagttctccgccggtgagag

SEQ ID NO: 5263995 - DNA, 25 bp, Homo sapien
cagggtatacaacaatgatgaatgg

SEQ ID NO: 5263996 - DNA, 25 bp, Homo sapien
cggcctcagttctccgccggtgaga

SEQ ID NO: 5263997 - DNA, 25 bp, Homo sapien
ttcccagggtacatctcacaaggtg

SEQ ID NO: 5263998 - DNA, 25 bp, Homo sapien
aatgagcaactattcccagggcaca

SEQ ID NO: 5263999 - DNA, 25 bp, Homo sapien
ccaagagagcaggttcagcgcagct

SEQ ID NO: 5264000 - DNA, 25 bp, Homo sapien
tcagaactgcgacagggctgcttca

SEQ ID NO: 5264001 - DNA, 25 bp, Homo sapien
aggactcagtaacgccaagggccac

SEQ ID NO: 5264002 - DNA, 25 bp, Homo sapien
ctcttaggactcagtaacgccaagg

SEQ ID NO: 5264003 - DNA, 25 bp, Homo sapien
ttaggactcagtaacgccaagggcc

SEQ ID NO: 5264004 - DNA, 25 bp, Homo sapien
actcagtaacgccaagggccacatt

SEQ ID NO: 5264005 - DNA, 25 bp, Homo sapien
acagagagagaagtgctcatggcca

SEQ ID NO: 5264006 - DNA, 25 bp, Homo sapien
agagagaagtgctcatggccagatg

SEQ ID NO: 5264007 - DNA, 25 bp, Homo sapien
aggaggcagccggtcagtcccacac

SEQ ID NO: 5264008 - DNA, 25 bp, Homo sapien
agtcccacaccacaggcaccgactc

SEQ ID NO: 5264009 - DNA, 25 bp, Homo sapien
gcctaggtgccggcacaccagggct

SEQ ID NO: 5264010 - DNA, 25 bp, Homo sapien
cctaggtgccggcacaccagggctt

SEQ ID NO: 5264011 - DNA, 25 bp, Homo sapien
ctcggcctaggtgccggcacaccag

SEQ ID NO: 5264012 - DNA, 25 bp, Homo sapien
cggcctaggtgccggcacaccaggg

SEQ ID NO: 5264013 - DNA, 25 bp, Homo sapien
tttgcttcctgagaacaccgtggcc

SEQ ID NO: 5264014 - DNA, 25 bp, Homo sapien
tacctgtggtctgctctaaagagcc

SEQ ID NO: 5264015 - DNA, 25 bp, Homo sapien
aaaaacaagtggctcattactcaag

SEQ ID NO: 5264016 - DNA, 25 bp, Homo sapien
gttgcccatgcggatttattagcat

SEQ ID NO: 5264017 - DNA, 25 bp, Homo sapien
cgttgaggacgctgaagtagctgtc

SEQ ID NO: 5264018 - DNA, 25 bp, Homo sapien
ctatctggtgaatggagtagtaact

SEQ ID NO: 5264019 - DNA, 25 bp, Homo sapien
ccttcctgtcgatgaatgcgttgag

SEQ ID NO: 5264020 - DNA, 25 bp, Homo sapien
tagtaactgtccttcctgtcgatga

SEQ ID NO: 5264021 - DNA, 25 bp, Homo sapien
ggtgatgtgacagcagcgcacagat

SEQ ID NO: 5264022 - DNA, 25 bp, Homo sapien
caggtttacagcctcctgctccaca

SEQ ID NO: 5264023 - DNA, 25 bp, Homo sapien
tcccacgacaccagaaaagctctga

SEQ ID NO: 5264024 - DNA, 25 bp, Homo sapien
agcgcacagatggtcagaggtcagt

SEQ ID NO: 5264025 - DNA, 25 bp, Homo sapien
ttgccttcgccaactcccatttgcg

SEQ ID NO: 5264026 - DNA, 25 bp, Homo sapien
ttgggcccgtaccactggcctatgg

SEQ ID NO: 5264027 - DNA, 25 bp, Homo sapien
ctatggacttgccttcgccaactcc

SEQ ID NO: 5264028 - DNA, 25 bp, Homo sapien
caggacctgggcgacagtgttgggc

SEQ ID NO: 5264029 - DNA, 25 bp, Homo sapien
agacggttcatctttgcagctatag

SEQ ID NO: 5264030 - DNA, 25 bp, Homo sapien
gagtaggagaatgaccataagcttt

SEQ ID NO: 5264031 - DNA, 25 bp, Homo sapien
tgtacaattcaaagacggttcatct

SEQ ID NO: 5264032 - DNA, 25 bp, Homo sapien
taagcttttgtacaattcaaagacg

SEQ ID NO: 5264033 - DNA, 25 bp, Homo sapien
ccattgcaatgtggaccgccaagga

SEQ ID NO: 5264034 - DNA, 25 bp, Homo sapien
tggaccgccaaggagctccacgtat

SEQ ID NO: 5264035 - DNA, 25 bp, Homo sapien
tcacaacagtgttgtccattgcaat

SEQ ID NO: 5264036 - DNA, 25 bp, Homo sapien
ccaaggagctccacgtatcgaagac

SEQ ID NO: 5264037 - DNA, 25 bp, Homo sapien
tgtccatggaaactctgagccactt

SEQ ID NO: 5264038 - DNA, 25 bp, Homo sapien
tatgttgcccgtgatttcaactttc

SEQ ID NO: 5264039 - DNA, 25 bp, Homo sapien
aggaagtgtgtatgttgcccgtgat

SEQ ID NO: 5264040 - DNA, 25 bp, Homo sapien
gcgactgacaacactcgccgaggct

SEQ ID NO: 5264041 - DNA, 25 bp, Homo sapien
gacgtgagataccaagtcgcggcct

SEQ ID NO: 5264042 - DNA, 25 bp, Homo sapien
cagcagggccttcataaacgatttg

SEQ ID NO: 5264043 - DNA, 25 bp, Homo sapien
tctcttggtatgaccgccgggatag

SEQ ID NO: 5264044 - DNA, 25 bp, Homo sapien
tgtaaatgttgccacgcccaggttc

SEQ ID NO: 5264045 - DNA, 25 bp, Homo sapien
tatgatcgaacacatgaatcggctc

SEQ ID NO: 5264046 - DNA, 25 bp, Homo sapien
tagctgggccggttgcttctgtgcc

SEQ ID NO: 5264047 - DNA, 25 bp, Homo sapien
tcccggtggtgagtttcctgctgac

SEQ ID NO: 5264048 - DNA, 25 bp, Homo sapien
gaatcggctcaagggctgatgcgta

SEQ ID NO: 5264049 - DNA, 25 bp, Homo sapien
catgcccggcgtctagatcgaggtt

SEQ ID NO: 5264050 - DNA, 25 bp, Homo sapien
ggtggaaccgtcaagcatcaaaaag

SEQ ID NO: 5264051 - DNA, 25 bp, Homo sapien
gaaaatcacagaagtacccacgcag

SEQ ID NO: 5264052 - DNA, 25 bp, Homo sapien
gaaaaggcggctcttctcagaacgc

SEQ ID NO: 5264053 - DNA, 25 bp, Homo sapien
ggaacgctggtcctgcacaaccttc

SEQ ID NO: 5264054 - DNA, 25 bp, Homo sapien
cacagggaacgctggtcctgcacaa

SEQ ID NO: 5264055 - DNA, 25 bp, Homo sapien
cgcctgcacagggaacgctggtcct

SEQ ID NO: 5264056 - DNA, 25 bp, Homo sapien
cagtggcgcctgcacagggaacgct

SEQ ID NO: 5264057 - DNA, 25 bp, Homo sapien
gaatgagaagtaccaggggtctcca

SEQ ID NO: 5264058 - DNA, 25 bp, Homo sapien
catggcgacggcctgttggtgacct

SEQ ID NO: 5264059 - DNA, 25 bp, Homo sapien
tcgttgatgtccgtgagccccaggc

SEQ ID NO: 5264060 - DNA, 25 bp, Homo sapien
ttggtgacctcagctccggcaggga

SEQ ID NO: 5264061 - DNA, 25 bp, Homo sapien
acaggcacaagaaacccaatctgca

SEQ ID NO: 5264062 - DNA, 25 bp, Homo sapien
ccaaagagcttactgtccaggaaag

SEQ ID NO: 5264063 - DNA, 25 bp, Homo sapien
tgctgaggcccaactgggtgacaca

SEQ ID NO: 5264064 - DNA, 25 bp, Homo sapien
cacaggacatcccacaggcacaaga

SEQ ID NO: 5264065 - DNA, 25 bp, Homo sapien
gggactggggcatcatgaagcagtg

SEQ ID NO: 5264066 - DNA, 25 bp, Homo sapien
gttgggcttccctccgatgacgccc

SEQ ID NO: 5264067 - DNA, 25 bp, Homo sapien
cctccgatgacgcccagggactggg

SEQ ID NO: 5264068 - DNA, 25 bp, Homo sapien
caacgtagccgatgaagtagtgggc

SEQ ID NO: 5264069 - DNA, 25 bp, Homo sapien
ttttccaccagtggcctcaagtggt

SEQ ID NO: 5264070 - DNA, 25 bp, Homo sapien
ggagccgagggcaccagaccatcag

SEQ ID NO: 5264071 - DNA, 25 bp, Homo sapien
agggcaccagaccatcagggaaagg

SEQ ID NO: 5264072 - DNA, 25 bp, Homo sapien
cagaggaggccgcatttcagaccca

SEQ ID NO: 5264073 - DNA, 25 bp, Homo sapien
tccgcgatgctcatgcggcacggcg

SEQ ID NO: 5264074 - DNA, 25 bp, Homo sapien
cgatggacgggtcaagctccgcgat

SEQ ID NO: 5264075 - DNA, 25 bp, Homo sapien
caagctccgcgatgctcatgcggca

SEQ ID NO: 5264076 - DNA, 25 bp, Homo sapien
acgggtcaagctccgcgatgctcat

SEQ ID NO: 5264077 - DNA, 25 bp, Homo sapien
tgtgccttgattcgcccacgagatg

SEQ ID NO: 5264078 - DNA, 25 bp, Homo sapien
gggtcaccggcaatcacatccttaa

SEQ ID NO: 5264079 - DNA, 25 bp, Homo sapien
taggaattctcaacgctgccagatg

SEQ ID NO: 5264080 - DNA, 25 bp, Homo sapien
gccagatgcgcagatgttaacacaa

SEQ ID NO: 5264081 - DNA, 25 bp, Homo sapien
tcatcttcagtcttacagaaaaacc

SEQ ID NO: 5264082 - DNA, 25 bp, Homo sapien
caccaatcattgaagtcatcttcag

SEQ ID NO: 5264083 - DNA, 25 bp, Homo sapien
ctttttgacttgctggcaccaatca

SEQ ID NO: 5264084 - DNA, 25 bp, Homo sapien
tggcaccaatcattgaagtcatctt

SEQ ID NO: 5264085 - DNA, 25 bp, Homo sapien
caacaggagacggatgaggacactg

SEQ ID NO: 5264086 - DNA, 25 bp, Homo sapien
gacatggccgttaggtgcagcctca

SEQ ID NO: 5264087 - DNA, 25 bp, Homo sapien
tcagctacatagctgtgccaggcgg

SEQ ID NO: 5264088 - DNA, 25 bp, Homo sapien
gctacacgagaacccagtgtggtga

SEQ ID NO: 5264089 - DNA, 25 bp, Homo sapien
aggttcaggacgtcggggcaggcca

SEQ ID NO: 5264090 - DNA, 25 bp, Homo sapien
ctcaaacatgggcagggcacctcca

SEQ ID NO: 5264091 - DNA, 25 bp, Homo sapien
agctccaccagctcaaacatgggca

SEQ ID NO: 5264092 - DNA, 25 bp, Homo sapien
caggttcaggacgtcggggcaggcc

SEQ ID NO: 5264093 - DNA, 25 bp, Homo sapien
ggctgctgggcgcaagcttggagga

SEQ ID NO: 5264094 - DNA, 25 bp, Homo sapien
cacaccttaatggtcaaaaccaagg

SEQ ID NO: 5264095 - DNA, 25 bp, Homo sapien
ctcacaggcgaaccactgccaagtg

SEQ ID NO: 5264096 - DNA, 25 bp, Homo sapien
actccatacctggtctcacaggcga

SEQ ID NO: 5264097 - DNA, 25 bp, Homo sapien
ggactccatggtagcacgcccagct

SEQ ID NO: 5264098 - DNA, 25 bp, Homo sapien
tgtctgctccagacccctgaggact

SEQ ID NO: 5264099 - DNA, 25 bp, Homo sapien
caggactgcgtcaccacagagcctg

SEQ ID NO: 5264100 - DNA, 25 bp, Homo sapien
gccatggtccgaggggtctacgcca

SEQ ID NO: 5264101 - DNA, 25 bp, Homo sapien
cattgccattgccttgtttgtagag

SEQ ID NO: 5264102 - DNA, 25 bp, Homo sapien
ccctcgtggtcatcaggagtggttc

SEQ ID NO: 5264103 - DNA, 25 bp, Homo sapien
aggaggacgcgctcacggccactca

SEQ ID NO: 5264104 - DNA, 25 bp, Homo sapien
gccggcacaatctcaggcctgaggg

SEQ ID NO: 5264105 - DNA, 25 bp, Homo sapien
cacagacagctgtccccatgcgggt

SEQ ID NO: 5264106 - DNA, 25 bp, Homo sapien
ccccatgcgggtgtgaacaggtccg

SEQ ID NO: 5264107 - DNA, 25 bp, Homo sapien
gacagctgtccccatgcgggtgtga

SEQ ID NO: 5264108 - DNA, 25 bp, Homo sapien
agctgtccccatgcgggtgtgaaca

SEQ ID NO: 5264109 - DNA, 25 bp, Homo sapien
aggaacaggacatagcgcatcaggc

SEQ ID NO: 5264110 - DNA, 25 bp, Homo sapien
caggacatagcgcatcaggcatctt

SEQ ID NO: 5264111 - DNA, 25 bp, Homo sapien
gacatagcgcatcaggcatcttggg

SEQ ID NO: 5264112 - DNA, 25 bp, Homo sapien
catagcgcatcaggcatcttgggtg

SEQ ID NO: 5264113 - DNA, 25 bp, Homo sapien
tctgagtcgaagaatctttccagtc

SEQ ID NO: 5264114 - DNA, 25 bp, Homo sapien
cttctgagtcgaagaatctttccag

SEQ ID NO: 5264115 - DNA, 25 bp, Homo sapien
tgagtcgaagaatctttccagtcgc

SEQ ID NO: 5264116 - DNA, 25 bp, Homo sapien
gagtcgaagaatctttccagtcgct

SEQ ID NO: 5264117 - DNA, 25 bp, Homo sapien
tcaaagggacaggatttcaaagtct

SEQ ID NO: 5264118 - DNA, 25 bp, Homo sapien
ggatggatgaaacgcagcggcacca

SEQ ID NO: 5264119 - DNA, 25 bp, Homo sapien
tggaagctcctaacagacggctccg

SEQ ID NO: 5264120 - DNA, 25 bp, Homo sapien
tgacaccaagcagtaaggcctcccg

SEQ ID NO: 5264121 - DNA, 25 bp, Homo sapien
tgtcgagagaacactctggaagctc

SEQ ID NO: 5264122 - DNA, 25 bp, Homo sapien
accaaccacagaaccggcgcctggg

SEQ ID NO: 5264123 - DNA, 25 bp, Homo sapien
accacagaaccggcgcctgggagca

SEQ ID NO: 5264124 - DNA, 25 bp, Homo sapien
caaaccaaccacagaaccggcgcct

SEQ ID NO: 5264125 - DNA, 25 bp, Homo sapien
cacagaaccggcgcctgggagcaag

SEQ ID NO: 5264126 - DNA, 25 bp, Homo sapien
tcagggagcgcccagaaattcatgt

SEQ ID NO: 5264127 - DNA, 25 bp, Homo sapien
tgctcatgagaaaagtgcccacgct

SEQ ID NO: 5264128 - DNA, 25 bp, Homo sapien
caaagatactttcccaggacaggca

SEQ ID NO: 5264129 - DNA, 25 bp, Homo sapien
catgggagggcaattctcagcaagg

SEQ ID NO: 5264130 - DNA, 25 bp, Homo sapien
tagcccttggtaagccaggctgggc

SEQ ID NO: 5264131 - DNA, 25 bp, Homo sapien
gaattgcaaactatactactaagaa

SEQ ID NO: 5264132 - DNA, 25 bp, Homo sapien
tttttcaaaacacacgagacaaagc

SEQ ID NO: 5264133 - DNA, 25 bp, Homo sapien
agcacagcggcgcaccatgaactcg

SEQ ID NO: 5264134 - DNA, 25 bp, Homo sapien
aactcggacgtggagcccaaggaat

SEQ ID NO: 5264135 - DNA, 25 bp, Homo sapien
gaccccacaacttcaggagctcttt

SEQ ID NO: 5264136 - DNA, 25 bp, Homo sapien
tgagcagagcgatggagcagtctcc

SEQ ID NO: 5264137 - DNA, 25 bp, Homo sapien
cctgatggcactctgttgtattttc

SEQ ID NO: 5264138 - DNA, 25 bp, Homo sapien
aatggtaatcagttggaattctcct

SEQ ID NO: 5264139 - DNA, 25 bp, Homo sapien
gactggcagccgttctatctaccta

SEQ ID NO: 5264140 - DNA, 25 bp, Homo sapien
cacataacaggctctaggagtgcct

SEQ ID NO: 5264141 - DNA, 25 bp, Homo sapien
tgtaaacagccagacgtgggccttc

SEQ ID NO: 5264142 - DNA, 25 bp, Homo sapien
gacactggagaaaccgacacgtttg

SEQ ID NO: 5264143 - DNA, 25 bp, Homo sapien
ttgaaagagggcgtctccctctgtt

SEQ ID NO: 5264144 - DNA, 25 bp, Homo sapien
agtacagtggaacaagcaaagctcg

SEQ ID NO: 5264145 - DNA, 25 bp, Homo sapien
tcgctataacaactcttgggcccaa

SEQ ID NO: 5264146 - DNA, 25 bp, Homo sapien
caaagatggttcatttgtagtactt

SEQ ID NO: 5264147 - DNA, 25 bp, Homo sapien
tgtccagctaatattttgtattagt

SEQ ID NO: 5264148 - DNA, 25 bp, Homo sapien
gtccagctaatattttgtattagta

SEQ ID NO: 5264149 - DNA, 25 bp, Homo sapien
tccagctaatattttgtattagtag

SEQ ID NO: 5264150 - DNA, 25 bp, Homo sapien
tggcatctcattgttctagtttgca

SEQ ID NO: 5264151 - DNA, 25 bp, Homo sapien
ggatctgttgagtgctttggcccac

SEQ ID NO: 5264152 - DNA, 25 bp, Homo sapien
ggttgctattgctccagaccctcac

SEQ ID NO: 5264153 - DNA, 25 bp, Homo sapien
gccatctgtgtatctggtttcgtaa

SEQ ID NO: 5264154 - DNA, 25 bp, Homo sapien
tagaaccacggtacgtgtagccagt

SEQ ID NO: 5264155 - DNA, 25 bp, Homo sapien
tgtcgtcgcattgtctctagaacca

SEQ ID NO: 5264156 - DNA, 25 bp, Homo sapien
aaagtagagtatgtagagcgctccc

SEQ ID NO: 5264157 - DNA, 25 bp, Homo sapien
ggttcctcatcatccgtgttacatg

SEQ ID NO: 5264158 - DNA, 25 bp, Homo sapien
gcagttttgcgcttcagggacaaca

SEQ ID NO: 5264159 - DNA, 25 bp, Homo sapien
cgcttcgggaagcatctcgctcgtt

SEQ ID NO: 5264160 - DNA, 25 bp, Homo sapien
tacaattgccacgtggccagcgtct

SEQ ID NO: 5264161 - DNA, 25 bp, Homo sapien
aacgcagtcgtgctgggctccaggt

SEQ ID NO: 5264162 - DNA, 25 bp, Homo sapien
ttgatgcaggagaataggttgaacc

SEQ ID NO: 5264163 - DNA, 25 bp, Homo sapien
ccactctgggccacaagacagaaac

SEQ ID NO: 5264164 - DNA, 25 bp, Homo sapien
cactccactctgggccacaagacag

SEQ ID NO: 5264165 - DNA, 25 bp, Homo sapien
tccactctgggccacaagacagaaa

SEQ ID NO: 5264166 - DNA, 25 bp, Homo sapien
tttgatcacgcaggaacaccaagag

SEQ ID NO: 5264167 - DNA, 25 bp, Homo sapien
tgtcagtggcagtacgaaggacact

SEQ ID NO: 5264168 - DNA, 25 bp, Homo sapien
caagagaactgctaggatgtggacc

SEQ ID NO: 5264169 - DNA, 25 bp, Homo sapien
tatcctaagagaggtacaccatgct

SEQ ID NO: 5264170 - DNA, 25 bp, Homo sapien
gcctccagagtctcgtggagtgact

SEQ ID NO: 5264171 - DNA, 25 bp, Homo sapien
aggcctccagagtctcgtggagtga

SEQ ID NO: 5264172 - DNA, 25 bp, Homo sapien
cctccagagtctcgtggagtgactc

SEQ ID NO: 5264173 - DNA, 25 bp, Homo sapien
ggcctccagagtctcgtggagtgac

SEQ ID NO: 5264174 - DNA, 25 bp, Homo sapien
gctgcgtgtgctgcaagctcggtta

SEQ ID NO: 5264175 - DNA, 25 bp, Homo sapien
ttctgaggcacgaggcgccagctca

SEQ ID NO: 5264176 - DNA, 25 bp, Homo sapien
tatctctggagcagttaagggtaac

SEQ ID NO: 5264177 - DNA, 25 bp, Homo sapien
tataacaagagtctacctgattctg

SEQ ID NO: 5264178 - DNA, 25 bp, Homo sapien
tgtgtgaaggtccacatgccacatc

SEQ ID NO: 5264179 - DNA, 25 bp, Homo sapien
ttgccatcgtctgcctggtcaaggc

SEQ ID NO: 5264180 - DNA, 25 bp, Homo sapien
tccttcttgtatggtgtctgtccac

SEQ ID NO: 5264181 - DNA, 25 bp, Homo sapien
caacaaggggtatgtcggagagcgt

SEQ ID NO: 5264182 - DNA, 25 bp, Homo sapien
tattattaagggttattggccctca

SEQ ID NO: 5264183 - DNA, 25 bp, Homo sapien
ggttattggccctcacatatcatat

SEQ ID NO: 5264184 - DNA, 25 bp, Homo sapien
taactctcccagagatcaatttgtc

SEQ ID NO: 5264185 - DNA, 25 bp, Homo sapien
gttttagaaactgccagagagggcc

SEQ ID NO: 5264186 - DNA, 25 bp, Homo sapien
tgtagaaactggtcttcatgtattt

SEQ ID NO: 5264187 - DNA, 25 bp, Homo sapien
tctgtgtagaaactggtcttcatgt

SEQ ID NO: 5264188 - DNA, 25 bp, Homo sapien
tctctgtgtagaaactggtcttcat

SEQ ID NO: 5264189 - DNA, 25 bp, Homo sapien
tgtgtagaaactggtcttcatgtat

SEQ ID NO: 5264190 - DNA, 25 bp, Homo sapien
ttttaacatatttgttgcctatttg

SEQ ID NO: 5264191 - DNA, 25 bp, Homo sapien
tgttgcctatttgtggttctgtcct

SEQ ID NO: 5264192 - DNA, 25 bp, Homo sapien
cctttatatcttttactgattcttt

SEQ ID NO: 5264193 - DNA, 25 bp, Homo sapien
catatttgttgcctatttgtggttc

SEQ ID NO: 5264194 - DNA, 25 bp, Homo sapien
tggcgagatcccggcttgttgcaac

SEQ ID NO: 5264195 - DNA, 25 bp, Homo sapien
cagtggcgagatcccggcttgttgc

SEQ ID NO: 5264196 - DNA, 25 bp, Homo sapien
gcagtggcgagatcccggcttgttg

SEQ ID NO: 5264197 - DNA, 25 bp, Homo sapien
gcgagatcccggcttgttgcaacct

SEQ ID NO: 5264198 - DNA, 25 bp, Homo sapien
acttaggtgatccactggcatcagc

SEQ ID NO: 5264199 - DNA, 25 bp, Homo sapien
ccagtgccttgtgcattcttatagg

SEQ ID NO: 5264200 - DNA, 25 bp, Homo sapien
ccccattacatgtcatacagcatag

SEQ ID NO: 5264201 - DNA, 25 bp, Homo sapien
aaatgtataatgtcagctacccccc

SEQ ID NO: 5264202 - DNA, 25 bp, Homo sapien
gtagctggttgtggtggtagctgcc

SEQ ID NO: 5264203 - DNA, 25 bp, Homo sapien
aaagtagctggttgtggtggtagct

SEQ ID NO: 5264204 - DNA, 25 bp, Homo sapien
agctggttgtggtggtagctgcctg

SEQ ID NO: 5264205 - DNA, 25 bp, Homo sapien
gctggttgtggtggtagctgcctgt

SEQ ID NO: 5264206 - DNA, 25 bp, Homo sapien
atctggatgccttggccgaaaaggc

SEQ ID NO: 5264207 - DNA, 25 bp, Homo sapien
caaaggtgtgccgtaagatgcatgc

SEQ ID NO: 5264208 - DNA, 25 bp, Homo sapien
tgatatagttaataagatggcgtgc

SEQ ID NO: 5264209 - DNA, 25 bp, Homo sapien
ggcacgtgcggcagtatgatatagt

SEQ ID NO: 5264210 - DNA, 25 bp, Homo sapien
ttcgtccgcggccgcgctcggggtc

SEQ ID NO: 5264211 - DNA, 25 bp, Homo sapien
tcgtccgcggccgcgctcggggtct

SEQ ID NO: 5264212 - DNA, 25 bp, Homo sapien
cttcgtccgcggccgcgctcggggt

SEQ ID NO: 5264213 - DNA, 25 bp, Homo sapien
tagtgctccaagtacatggcggtcg

SEQ ID NO: 5264214 - DNA, 25 bp, Homo sapien
gatagtgctccaagtacatggcggt

SEQ ID NO: 5264215 - DNA, 25 bp, Homo sapien
ccagatagtgctccaagtacatggc

SEQ ID NO: 5264216 - DNA, 25 bp, Homo sapien
gctccaagtacatggcggtcgccat

SEQ ID NO: 5264217 - DNA, 25 bp, Homo sapien
caaacaccgcgaccccaaagctgtg

SEQ ID NO: 5264218 - DNA, 25 bp, Homo sapien
cccaaacaccgcgaccccaaagctg

SEQ ID NO: 5264219 - DNA, 25 bp, Homo sapien
ccaaacaccgcgaccccaaagctgt

SEQ ID NO: 5264220 - DNA, 25 bp, Homo sapien
gtccctgtggctagcgcaaccattc

SEQ ID NO: 5264221 - DNA, 25 bp, Homo sapien
aggaggacccccgtgctgctttcgc

SEQ ID NO: 5264222 - DNA, 25 bp, Homo sapien
gctttcgcgtctgctttgttacccc

SEQ ID NO: 5264223 - DNA, 25 bp, Homo sapien
ggccatagggagctactgagcactg

SEQ ID NO: 5264224 - DNA, 25 bp, Homo sapien
cagaagccatgtacctctcagcagc

SEQ ID NO: 5264225 - DNA, 25 bp, Homo sapien
acagaagccatgtacctctcagcag

SEQ ID NO: 5264226 - DNA, 25 bp, Homo sapien
agaagccatgtacctctcagcagca

SEQ ID NO: 5264227 - DNA, 25 bp, Homo sapien
ctggtccagctctcgcatcagctgg

SEQ ID NO: 5264228 - DNA, 25 bp, Homo sapien
tccagctctcgcatcagctggaagt

SEQ ID NO: 5264229 - DNA, 25 bp, Homo sapien
agttcgcagggaaggttctcgatac

SEQ ID NO: 5264230 - DNA, 25 bp, Homo sapien
gctggaagttcctctgaagttcgca

SEQ ID NO: 5264231 - DNA, 25 bp, Homo sapien
aatgcacgcactacacactttgaaa

SEQ ID NO: 5264232 - DNA, 25 bp, Homo sapien
aagacactgagtgatacccacggcc

SEQ ID NO: 5264233 - DNA, 25 bp, Homo sapien
caatgtggcttcaaaagtatcaaca

SEQ ID NO: 5264234 - DNA, 25 bp, Homo sapien
gtatcaacacctactgcaagacact

SEQ ID NO: 5264235 - DNA, 25 bp, Homo sapien
gccctgcacaagacaccatgatgtg

SEQ ID NO: 5264236 - DNA, 25 bp, Homo sapien
gactggcaacaactaaagtcagcca

SEQ ID NO: 5264237 - DNA, 25 bp, Homo sapien
caccatgatgtgctcaccagactgg

SEQ ID NO: 5264238 - DNA, 25 bp, Homo sapien
aatgggggaaaagctagccctgcac

SEQ ID NO: 5264239 - DNA, 25 bp, Homo sapien
ctgtaggcgttctggatcttctgca

SEQ ID NO: 5264240 - DNA, 25 bp, Homo sapien
gccagctgcactttgtcgtcactgt

SEQ ID NO: 5264241 - DNA, 25 bp, Homo sapien
tattccttgcacttgctgtaggcgt

SEQ ID NO: 5264242 - DNA, 25 bp, Homo sapien
tccacgcgctggtctggagacagcg

SEQ ID NO: 5264243 - DNA, 25 bp, Homo sapien
tcagatctgcttcaaagcgcgccag

SEQ ID NO: 5264244 - DNA, 25 bp, Homo sapien
catcaagccttcgaatgtgtttatc

SEQ ID NO: 5264245 - DNA, 25 bp, Homo sapien
cctcgccctccggagctttcaaaat

SEQ ID NO: 5264246 - DNA, 25 bp, Homo sapien
atctgcttcaaagcgcgccaggtct

SEQ ID NO: 5264247 - DNA, 25 bp, Homo sapien
actcttcaaaactccatagttaaca

SEQ ID NO: 5264248 - DNA, 25 bp, Homo sapien
gatttaccgtgacaaaactcttcaa

SEQ ID NO: 5264249 - DNA, 25 bp, Homo sapien
caaaactccatagttaacagtaata

SEQ ID NO: 5264250 - DNA, 25 bp, Homo sapien
cctagtgatcatactttaatgattt

SEQ ID NO: 5264251 - DNA, 25 bp, Homo sapien
ctgaaaaataatcaagatgcaaatt

SEQ ID NO: 5264252 - DNA, 25 bp, Homo sapien
taatcaagatgcaaattatttttat

SEQ ID NO: 5264253 - DNA, 25 bp, Homo sapien
atcaagatgcaaattatttttatag

SEQ ID NO: 5264254 - DNA, 25 bp, Homo sapien
gaaaaataatcaagatgcaaattat

SEQ ID NO: 5264255 - DNA, 25 bp, Homo sapien
gcttctttttctttggtgtgtcttc

SEQ ID NO: 5264256 - DNA, 25 bp, Homo sapien
ttcctctgatgtcctcctgcctcgg

SEQ ID NO: 5264257 - DNA, 25 bp, Homo sapien
tctttttctttggtgtgtcttcctc

SEQ ID NO: 5264258 - DNA, 25 bp, Homo sapien
ctttggtgtgtcttcctctgatgtc

SEQ ID NO: 5264259 - DNA, 25 bp, Homo sapien
ggtgcacttcactcgggtcagcttc

SEQ ID NO: 5264260 - DNA, 25 bp, Homo sapien
cgacaggcgcgcagcgtaagaatca

SEQ ID NO: 5264261 - DNA, 25 bp, Homo sapien
gtaagaatcagaataccacccggca

SEQ ID NO: 5264262 - DNA, 25 bp, Homo sapien
tacatccgggatacaggctatgggt

SEQ ID NO: 5264263 - DNA, 25 bp, Homo sapien
cattggcctctgtcaacaacacgtt

SEQ ID NO: 5264264 - DNA, 25 bp, Homo sapien
cagcacacactgtggctaagaggac

SEQ ID NO: 5264265 - DNA, 25 bp, Homo sapien
ggtccctgcgacactgaaaatgccc

SEQ ID NO: 5264266 - DNA, 25 bp, Homo sapien
acttaaagagtggtctacattggcc

SEQ ID NO: 5264267 - DNA, 25 bp, Homo sapien
cactttcacgcagaaaaggcacggt

SEQ ID NO: 5264268 - DNA, 25 bp, Homo sapien
ggcacggtcgggacagggccttcag

SEQ ID NO: 5264269 - DNA, 25 bp, Homo sapien
gaagagaccaggaggagtcccactt

SEQ ID NO: 5264270 - DNA, 25 bp, Homo sapien
aggaagactcagaacgctgttgcca

SEQ ID NO: 5264271 - DNA, 25 bp, Homo sapien
gccatgaggccacagtggatcttcc

SEQ ID NO: 5264272 - DNA, 25 bp, Homo sapien
gtcactactgggacctgcacggcag

SEQ ID NO: 5264273 - DNA, 25 bp, Homo sapien
tgctggtcagcgcactgtcaggaca

SEQ ID NO: 5264274 - DNA, 25 bp, Homo sapien
cctgcattccttatgcctagcatac

SEQ ID NO: 5264275 - DNA, 25 bp, Homo sapien
gagctggccttaccagcctgtctcg

SEQ ID NO: 5264276 - DNA, 25 bp, Homo sapien
gacgtcttgcaatgggacaggagca

SEQ ID NO: 5264277 - DNA, 25 bp, Homo sapien
taccagcctgtctcgacgtcttgca

SEQ ID NO: 5264278 - DNA, 25 bp, Homo sapien
agcttcagagctggccttaccagcc

SEQ ID NO: 5264279 - DNA, 25 bp, Homo sapien
gattccaggtgctacaggtgacact

SEQ ID NO: 5264280 - DNA, 25 bp, Homo sapien
caggctttgggtccaaccgactggt

SEQ ID NO: 5264281 - DNA, 25 bp, Homo sapien
gagcatctgtgcagtctaggaacac

SEQ ID NO: 5264282 - DNA, 25 bp, Homo sapien
tcaggtcacgggatctcagacgaga

SEQ ID NO: 5264283 - DNA, 25 bp, Homo sapien
ctgagggaggcaaccaggaggccat

SEQ ID NO: 5264284 - DNA, 25 bp, Homo sapien
actggcctctcagtctcgcctgagg

SEQ ID NO: 5264285 - DNA, 25 bp, Homo sapien
gagggagcgccatggcgtgtggcca

SEQ ID NO: 5264286 - DNA, 25 bp, Homo sapien
gagtgctgctatcagccctgaggga

SEQ ID NO: 5264287 - DNA, 25 bp, Homo sapien
aagcccgacctgacatcttgagctg

SEQ ID NO: 5264288 - DNA, 25 bp, Homo sapien
ttcgagggcgctggccagatttgat

SEQ ID NO: 5264289 - DNA, 25 bp, Homo sapien
cttctgcgccgagtccaattctgtc

SEQ ID NO: 5264290 - DNA, 25 bp, Homo sapien
atcaccaggttcgagggcgctggcc

SEQ ID NO: 5264291 - DNA, 25 bp, Homo sapien
agtctgtcctttgcaggtaatctgc

SEQ ID NO: 5264292 - DNA, 25 bp, Homo sapien
ctaagtctgtcctttgcaggtaatc

SEQ ID NO: 5264293 - DNA, 25 bp, Homo sapien
gcaggtaatctgctcttctgctctt

SEQ ID NO: 5264294 - DNA, 25 bp, Homo sapien
cctttgcaggtaatctgctcttctg

SEQ ID NO: 5264295 - DNA, 25 bp, Homo sapien
tacaagctgcaggtactatagacag

SEQ ID NO: 5264296 - DNA, 25 bp, Homo sapien
gaacgtggccgtgagaaaaacagtc

SEQ ID NO: 5264297 - DNA, 25 bp, Homo sapien
aaacagtcacgatcagggaaagcca

SEQ ID NO: 5264298 - DNA, 25 bp, Homo sapien
tggtatgtaaacacagcaggttagc

SEQ ID NO: 5264299 - DNA, 25 bp, Homo sapien
catccttgtcactccttcatcccca

SEQ ID NO: 5264300 - DNA, 25 bp, Homo sapien
cagcagcctggcaggtgttccaccc

SEQ ID NO: 5264301 - DNA, 25 bp, Homo sapien
aagcctgccacctgtagcaccatgg

SEQ ID NO: 5264302 - DNA, 25 bp, Homo sapien
tgttccaccccgtctatgcctccct

SEQ ID NO: 5264303 - DNA, 25 bp, Homo sapien
gtccacgggcatgtccagcacatca

SEQ ID NO: 5264304 - DNA, 25 bp, Homo sapien
cgggcatgtccagcacatcagaggg

SEQ ID NO: 5264305 - DNA, 25 bp, Homo sapien
tgggtccacgggcatgtccagcaca

SEQ ID NO: 5264306 - DNA, 25 bp, Homo sapien
gttcgtttgggtccacgggcatgtc

SEQ ID NO: 5264307 - DNA, 25 bp, Homo sapien
tgggtttcgtggtaaggtccacgca

SEQ ID NO: 5264308 - DNA, 25 bp, Homo sapien
ccacgcaggcaaagtgaaaccactc

SEQ ID NO: 5264309 - DNA, 25 bp, Homo sapien
tccacgcaggcaaagtgaaaccact

SEQ ID NO: 5264310 - DNA, 25 bp, Homo sapien
aagcccggcaagattctgccatgga

SEQ ID NO: 5264311 - DNA, 25 bp, Homo sapien
ctaagcccggcaagattctgccatg

SEQ ID NO: 5264312 - DNA, 25 bp, Homo sapien
taagcccggcaagattctgccatgg

SEQ ID NO: 5264313 - DNA, 25 bp, Homo sapien
cagcaaaggggggataaagccacac

SEQ ID NO: 5264314 - DNA, 25 bp, Homo sapien
aggcacagcagcaaaggggggataa

SEQ ID NO: 5264315 - DNA, 25 bp, Homo sapien
ggcacagcagcaaaggggggataaa

SEQ ID NO: 5264316 - DNA, 25 bp, Homo sapien
gcagcaaaggggggataaagccaca

SEQ ID NO: 5264317 - DNA, 25 bp, Homo sapien
tatcacgtaacctggtaaccaccat

SEQ ID NO: 5264318 - DNA, 25 bp, Homo sapien
accaccattcctgggtgacggcatc

SEQ ID NO: 5264319 - DNA, 25 bp, Homo sapien
caggaggggccattaacgtgaatat

SEQ ID NO: 5264320 - DNA, 25 bp, Homo sapien
ctcccagagtccggaaggttgtcct

SEQ ID NO: 5264321 - DNA, 25 bp, Homo sapien
atttctgatttaagacgatccctac

SEQ ID NO: 5264322 - DNA, 25 bp, Homo sapien
catttctgatttaagacgatcccta

SEQ ID NO: 5264323 - DNA, 25 bp, Homo sapien
tcatttctgatttaagacgatccct

SEQ ID NO: 5264324 - DNA, 25 bp, Homo sapien
ccggcttcagggctcacatctcatg

SEQ ID NO: 5264325 - DNA, 25 bp, Homo sapien
gggcagagccccagatccatgcccc

SEQ ID NO: 5264326 - DNA, 25 bp, Homo sapien
caagggtcaggtagagaaaacacac

SEQ ID NO: 5264327 - DNA, 25 bp, Homo sapien
aatgcagaaagttgccattgccaag

SEQ ID NO: 5264328 - DNA, 25 bp, Homo sapien
cccgatgttgcccagactacaggtt

SEQ ID NO: 5264329 - DNA, 25 bp, Homo sapien
gaagcctcggacttccaggctcaag

SEQ ID NO: 5264330 - DNA, 25 bp, Homo sapien
ctcactgaagcctcggacttccagg

SEQ ID NO: 5264331 - DNA, 25 bp, Homo sapien
tgcccagactacaggtttttattta

SEQ ID NO: 5264332 - DNA, 25 bp, Homo sapien
cctgggcgccatttccgccagcgcg

SEQ ID NO: 5264333 - DNA, 25 bp, Homo sapien
ctgtgacaagaaaggcgcagtgagg

SEQ ID NO: 5264334 - DNA, 25 bp, Homo sapien
tgacaagaaaggcgcagtgaggccc

SEQ ID NO: 5264335 - DNA, 25 bp, Homo sapien
acaagaaaggcgcagtgaggccctg

SEQ ID NO: 5264336 - DNA, 25 bp, Homo sapien
ctcttttcctggacacaccgtggac

SEQ ID NO: 5264337 - DNA, 25 bp, Homo sapien
tcttttcctggacacaccgtggaca

SEQ ID NO: 5264338 - DNA, 25 bp, Homo sapien
ttttcctggacacaccgtggacaga

SEQ ID NO: 5264339 - DNA, 25 bp, Homo sapien
tcctcttttcctggacacaccgtgg

SEQ ID NO: 5264340 - DNA, 25 bp, Homo sapien
cagattaacttgctcctcggatccg

SEQ ID NO: 5264341 - DNA, 25 bp, Homo sapien
actggccacggagttactaagtatc

SEQ ID NO: 5264342 - DNA, 25 bp, Homo sapien
tattgcgacacgaatgaagggacag

SEQ ID NO: 5264343 - DNA, 25 bp, Homo sapien
taggaaacatccagcgcttcaactg

SEQ ID NO: 5264344 - DNA, 25 bp, Homo sapien
aaggtcgcccttctgtgcgaacagg

SEQ ID NO: 5264345 - DNA, 25 bp, Homo sapien
ccttctgtgcgaacaggctttggtg

SEQ ID NO: 5264346 - DNA, 25 bp, Homo sapien
gagtccctgcaaggtcgcccttctg

SEQ ID NO: 5264347 - DNA, 25 bp, Homo sapien
ggtcgcggcggcgagtccctgcaag

SEQ ID NO: 5264348 - DNA, 25 bp, Homo sapien
gtccaagctaaaaaggcggcgccag

SEQ ID NO: 5264349 - DNA, 25 bp, Homo sapien
gaaaaccacaggaaagctacgcgag

SEQ ID NO: 5264350 - DNA, 25 bp, Homo sapien
cgggctgtaccggacagtcctggaa

SEQ ID NO: 5264351 - DNA, 25 bp, Homo sapien
gaagagccgtttactccggaggtga

SEQ ID NO: 5264352 - DNA, 25 bp, Homo sapien
tccttcctctaaaggcacgggagag

SEQ ID NO: 5264353 - DNA, 25 bp, Homo sapien
cacgggagaggatttccgagcgcct

SEQ ID NO: 5264354 - DNA, 25 bp, Homo sapien
actaccaccgaaaggatggctccgg

SEQ ID NO: 5264355 - DNA, 25 bp, Homo sapien
gctcagcttggtgaacgctcattaa

SEQ ID NO: 5264356 - DNA, 25 bp, Homo sapien
aattgccaggcgctgtttcagcaca

SEQ ID NO: 5264357 - DNA, 25 bp, Homo sapien
caatgtatcctccacgatcaataaa

SEQ ID NO: 5264358 - DNA, 25 bp, Homo sapien
taaacatctgtgttggccgggtgcg

SEQ ID NO: 5264359 - DNA, 25 bp, Homo sapien
cctgtgctaacaaaaagttaagtca

SEQ ID NO: 5264360 - DNA, 25 bp, Homo sapien
cactcaggattcagttgggtccaaa

SEQ ID NO: 5264361 - DNA, 25 bp, Homo sapien
aggacccacaccttcggctcagatg

SEQ ID NO: 5264362 - DNA, 25 bp, Homo sapien
aggtcaatcgcacagccacagagga

SEQ ID NO: 5264363 - DNA, 25 bp, Homo sapien
tctctcccacgggtagacagcgtca

SEQ ID NO: 5264364 - DNA, 25 bp, Homo sapien
gaagacctaacctaggacagggcag

SEQ ID NO: 5264365 - DNA, 25 bp, Homo sapien
cctagggcacattcgcagatgcaga

SEQ ID NO: 5264366 - DNA, 25 bp, Homo sapien
gatgcagagggctcggtttcaccag

SEQ ID NO: 5264367 - DNA, 25 bp, Homo sapien
tctgggccagcgtcattgctcaaag

SEQ ID NO: 5264368 - DNA, 25 bp, Homo sapien
gagccggagtgggcggggcgacgcc

SEQ ID NO: 5264369 - DNA, 25 bp, Homo sapien
ccggagtgggcggggcgacgccgcg

SEQ ID NO: 5264370 - DNA, 25 bp, Homo sapien
agccggagtgggcggggcgacgccg

SEQ ID NO: 5264371 - DNA, 25 bp, Homo sapien
cgagccggagtgggcggggcgacgc

SEQ ID NO: 5264372 - DNA, 25 bp, Homo sapien
cccgagctccaacccgcagcgcccg

SEQ ID NO: 5264373 - DNA, 25 bp, Homo sapien
cacgtcccgagctccaacccgcagc

SEQ ID NO: 5264374 - DNA, 25 bp, Homo sapien
acgtcccgagctccaacccgcagcg

SEQ ID NO: 5264375 - DNA, 25 bp, Homo sapien
gtcccgagctccaacccgcagcgcc

SEQ ID NO: 5264376 - DNA, 25 bp, Homo sapien
gaagggcagggagccgctggctgcg

SEQ ID NO: 5264377 - DNA, 25 bp, Homo sapien
gggcagggagccgctggctgcgcgc

SEQ ID NO: 5264378 - DNA, 25 bp, Homo sapien
ctcagggcccggaggggaagggcag

SEQ ID NO: 5264379 - DNA, 25 bp, Homo sapien
acggagacctcgggctcctccttgg

SEQ ID NO: 5264380 - DNA, 25 bp, Homo sapien
ccaagaacccgcggctcccggagca

SEQ ID NO: 5264381 - DNA, 25 bp, Homo sapien
gcgggccacgccagaggccgacggg

SEQ ID NO: 5264382 - DNA, 25 bp, Homo sapien
gagcaccccgcaacagccacgcggg

SEQ ID NO: 5264383 - DNA, 25 bp, Homo sapien
agccacgcgggccacgccagaggcc

SEQ ID NO: 5264384 - DNA, 25 bp, Homo sapien
ggtccccggggcggagcagcagcct

SEQ ID NO: 5264385 - DNA, 25 bp, Homo sapien
gggtccccggggcggagcagcagcc

SEQ ID NO: 5264386 - DNA, 25 bp, Homo sapien
ggggtccccggggcggagcagcagc

SEQ ID NO: 5264387 - DNA, 25 bp, Homo sapien
cgcaaccagtccacgttgggagcct

SEQ ID NO: 5264388 - DNA, 25 bp, Homo sapien
acgatgcgctcaaaggcggccaggt

SEQ ID NO: 5264389 - DNA, 25 bp, Homo sapien
tagacaccgtggagaacggcaagcg

SEQ ID NO: 5264390 - DNA, 25 bp, Homo sapien
agcctgcagcgcttccgggtccgtg

SEQ ID NO: 5264391 - DNA, 25 bp, Homo sapien
cattcgtgcacagacttgtatgcca

SEQ ID NO: 5264392 - DNA, 25 bp, Homo sapien
tcattcgtgcacagacttgtatgcc

SEQ ID NO: 5264393 - DNA, 25 bp, Homo sapien
ctcctgcatgccccggggaggtccc

SEQ ID NO: 5264394 - DNA, 25 bp, Homo sapien
ggtcccttgcccatgagggcagcag

SEQ ID NO: 5264395 - DNA, 25 bp, Homo sapien
cggcatagcccagggtgctggcctc

SEQ ID NO: 5264396 - DNA, 25 bp, Homo sapien
agttacagcttcctccccgctcctg

SEQ ID NO: 5264397 - DNA, 25 bp, Homo sapien
tgttaacgatgggagccccacaaag

SEQ ID NO: 5264398 - DNA, 25 bp, Homo sapien
agggctccctcccggtggtccagtg

SEQ ID NO: 5264399 - DNA, 25 bp, Homo sapien
tcccggtggtccagtgttaacgatg

SEQ ID NO: 5264400 - DNA, 25 bp, Homo sapien
ttaacgatgggagccccacaaagac

SEQ ID NO: 5264401 - DNA, 25 bp, Homo sapien
ttgagacgactttcccaggtgatgg

SEQ ID NO: 5264402 - DNA, 25 bp, Homo sapien
tgcctttgggtttccttgagacgac

SEQ ID NO: 5264403 - DNA, 25 bp, Homo sapien
tgagcaggcgtctttctgcctttgg

SEQ ID NO: 5264404 - DNA, 25 bp, Homo sapien
tgccccaagtgagcaggcgtctttc

SEQ ID NO: 5264405 - DNA, 25 bp, Homo sapien
cctccgacgtccgtggcctcagcag

SEQ ID NO: 5264406 - DNA, 25 bp, Homo sapien
tgggacacctcctccgacgtccgtg

SEQ ID NO: 5264407 - DNA, 25 bp, Homo sapien
acacctcctccgacgtccgtggcct

SEQ ID NO: 5264408 - DNA, 25 bp, Homo sapien
tgtgggacacctcctccgacgtccg

SEQ ID NO: 5264409 - DNA, 25 bp, Homo sapien
tgtgttgcccccctgtgggttcacg

SEQ ID NO: 5264410 - DNA, 25 bp, Homo sapien
tgtggaagctgaggacccggttcat

SEQ ID NO: 5264411 - DNA, 25 bp, Homo sapien
tctcgtcaaagacggggacgctgcc

SEQ ID NO: 5264412 - DNA, 25 bp, Homo sapien
ggttcacggccaggttcctctcgtg

SEQ ID NO: 5264413 - DNA, 25 bp, Homo sapien
ggccccgacgggtggcacaggctta

SEQ ID NO: 5264414 - DNA, 25 bp, Homo sapien
gacgctggcaaggaagaactccacc

SEQ ID NO: 5264415 - DNA, 25 bp, Homo sapien
cccacagttgcagacgctggcaagg

SEQ ID NO: 5264416 - DNA, 25 bp, Homo sapien
gccccgacgggtggcacaggcttac

SEQ ID NO: 5264417 - DNA, 25 bp, Homo sapien
tccagcgttggttgccacgtttccc

SEQ ID NO: 5264418 - DNA, 25 bp, Homo sapien
gatgaagtcccgttcctccacatac

SEQ ID NO: 5264419 - DNA, 25 bp, Homo sapien
gcagtgagccatatcgaagaaaccg

SEQ ID NO: 5264420 - DNA, 25 bp, Homo sapien
taagtccagcggcatgatgaagtcc

SEQ ID NO: 5264421 - DNA, 25 bp, Homo sapien
gctgcttcaggtcatagcccgtgtt

SEQ ID NO: 5264422 - DNA, 25 bp, Homo sapien
gatggacaccgtggtgatgatcccc

SEQ ID NO: 5264423 - DNA, 25 bp, Homo sapien
gcttgggtggacacaagatggacac

SEQ ID NO: 5264424 - DNA, 25 bp, Homo sapien
tccgacccgatgaacagctgcttca

SEQ ID NO: 5264425 - DNA, 25 bp, Homo sapien
gagacacgggaaccgactgtccttg

SEQ ID NO: 5264426 - DNA, 25 bp, Homo sapien
tggattcctgattcctttggaagca

SEQ ID NO: 5264427 - DNA, 25 bp, Homo sapien
cagagatgtcaggagacacgggaac

SEQ ID NO: 5264428 - DNA, 25 bp, Homo sapien
atcagagcagacgctcgagcccaac

SEQ ID NO: 5264429 - DNA, 25 bp, Homo sapien
cagactacacagacttgaaaaaatg

SEQ ID NO: 5264430 - DNA, 25 bp, Homo sapien
acagactacacagacttgaaaaaat

SEQ ID NO: 5264431 - DNA, 25 bp, Homo sapien
ccagtgaagcgggcaaggcctgatt

SEQ ID NO: 5264432 - DNA, 25 bp, Homo sapien
aagaaaccgctgaagaggccgggca

SEQ ID NO: 5264433 - DNA, 25 bp, Homo sapien
aatgggctaggccacgtgacccagt

SEQ ID NO: 5264434 - DNA, 25 bp, Homo sapien
tgacccagtgcccagtgaaaacacc

SEQ ID NO: 5264435 - DNA, 25 bp, Homo sapien
gggaggaggcggtgtgggggcagca

SEQ ID NO: 5264436 - DNA, 25 bp, Homo sapien
ctgaaggtggagggcggggaggagg

SEQ ID NO: 5264437 - DNA, 25 bp, Homo sapien
gcggggaggaggcggtgtgggggca

SEQ ID NO: 5264438 - DNA, 25 bp, Homo sapien
tggagggcggggaggaggcggtgtg

SEQ ID NO: 5264439 - DNA, 25 bp, Homo sapien
ggcactgccgcccagagagtaagtc

SEQ ID NO: 5264440 - DNA, 25 bp, Homo sapien
agtaagtcggcagaagcagtcaagg

SEQ ID NO: 5264441 - DNA, 25 bp, Homo sapien
ggaaccaccgatccagatggcactg

SEQ ID NO: 5264442 - DNA, 25 bp, Homo sapien
tgaagaggaaccaccgatccagatg

SEQ ID NO: 5264443 - DNA, 25 bp, Homo sapien
gggatcagagcagaacacagaaaac

SEQ ID NO: 5264444 - DNA, 25 bp, Homo sapien
ctgcagttggagtgggatcagagca

SEQ ID NO: 5264445 - DNA, 25 bp, Homo sapien
agtgggatcagagcagaacacagaa

SEQ ID NO: 5264446 - DNA, 25 bp, Homo sapien
tgcagttggagtgggatcagagcag

SEQ ID NO: 5264447 - DNA, 25 bp, Homo sapien
caggaccacaggcgggcggcacaca

SEQ ID NO: 5264448 - DNA, 25 bp, Homo sapien
cccaggaccacaggcgggcggcaca

SEQ ID NO: 5264449 - DNA, 25 bp, Homo sapien
ctggagtgcgaagagcaggatgcgg

SEQ ID NO: 5264450 - DNA, 25 bp, Homo sapien
agtgcgaagagcaggatgcggcagc

SEQ ID NO: 5264451 - DNA, 25 bp, Homo sapien
cgtggcacgaagaggcgagtgactc

SEQ ID NO: 5264452 - DNA, 25 bp, Homo sapien
cgtgggcgtggcacgaagaggcgag

SEQ ID NO: 5264453 - DNA, 25 bp, Homo sapien
gcctgttccacccggcttagacgtg

SEQ ID NO: 5264454 - DNA, 25 bp, Homo sapien
tccacccggcttagacgtgggcgtg

SEQ ID NO: 5264455 - DNA, 25 bp, Homo sapien
ctggagagctggaccgagcccacga

SEQ ID NO: 5264456 - DNA, 25 bp, Homo sapien
agcacgagggacaccaggaccatcc

SEQ ID NO: 5264457 - DNA, 25 bp, Homo sapien
actgggcatcttgctcagagtgggc

SEQ ID NO: 5264458 - DNA, 25 bp, Homo sapien
gacaagagtgcctcgtcggaagtcg

SEQ ID NO: 5264459 - DNA, 25 bp, Homo sapien
gagcacctcaaggcctgtgacccga

SEQ ID NO: 5264460 - DNA, 25 bp, Homo sapien
gcacctcaaggcctgtgacccgagc

SEQ ID NO: 5264461 - DNA, 25 bp, Homo sapien
gggtgacacaggagcacctcaaggc

SEQ ID NO: 5264462 - DNA, 25 bp, Homo sapien
acctcaaggcctgtgacccgagcac

SEQ ID NO: 5264463 - DNA, 25 bp, Homo sapien
gaggcaatgcaaaggcatgtggata

SEQ ID NO: 5264464 - DNA, 25 bp, Homo sapien
cagggcgagacagggaggcaatgca

SEQ ID NO: 5264465 - DNA, 25 bp, Homo sapien
gcaatgcaaaggcatgtggatatca

SEQ ID NO: 5264466 - DNA, 25 bp, Homo sapien
atgcaaaggcatgtggatatcagag

SEQ ID NO: 5264467 - DNA, 25 bp, Homo sapien
tgcactcaggacctcatccaacagg

SEQ ID NO: 5264468 - DNA, 25 bp, Homo sapien
gggaagccgaccctcaagtgcaaag

SEQ ID NO: 5264469 - DNA, 25 bp, Homo sapien
gggctaccagtgaggccgctgccct

SEQ ID NO: 5264470 - DNA, 25 bp, Homo sapien
caacaggcgtgttagtgctccaggg

SEQ ID NO: 5264471 - DNA, 25 bp, Homo sapien
tcagagggggcgtatcttgggaatt

SEQ ID NO: 5264472 - DNA, 25 bp, Homo sapien
ctcagagggggcgtatcttgggaat

SEQ ID NO: 5264473 - DNA, 25 bp, Homo sapien
ggactcagagggggcgtatcttggg

SEQ ID NO: 5264474 - DNA, 25 bp, Homo sapien
gactcagagggggcgtatcttggga

SEQ ID NO: 5264475 - DNA, 25 bp, Homo sapien
gggaaggcgccgaagaaccacacag

SEQ ID NO: 5264476 - DNA, 25 bp, Homo sapien
cctggtgtcaccaccagcatcaaat

SEQ ID NO: 5264477 - DNA, 25 bp, Homo sapien
gtcaccagcatcagatcaggaggga

SEQ ID NO: 5264478 - DNA, 25 bp, Homo sapien
tgtcaccaccagcatcaaatcagga

SEQ ID NO: 5264479 - DNA, 25 bp, Homo sapien
aacatcagcccgactcatgtgggtg

SEQ ID NO: 5264480 - DNA, 25 bp, Homo sapien
atcagcccgactcatgtgggtgggt

SEQ ID NO: 5264481 - DNA, 25 bp, Homo sapien
agcaacatcagcccgactcatgtgg

SEQ ID NO: 5264482 - DNA, 25 bp, Homo sapien
caacatcagcccgactcatgtgggt

SEQ ID NO: 5264483 - DNA, 25 bp, Homo sapien
gaaacgggtcacagcatgtcaagca

SEQ ID NO: 5264484 - DNA, 25 bp, Homo sapien
aaacgggtcacagcatgtcaagcac

SEQ ID NO: 5264485 - DNA, 25 bp, Homo sapien
ctgaaacgggtcacagcatgtcaag

SEQ ID NO: 5264486 - DNA, 25 bp, Homo sapien
cgggtcacagcatgtcaagcaccac

SEQ ID NO: 5264487 - DNA, 25 bp, Homo sapien
cagcatccatgaactcgaatgcaga

SEQ ID NO: 5264488 - DNA, 25 bp, Homo sapien
ctgaaggtctgcagaacctcagcaa

SEQ ID NO: 5264489 - DNA, 25 bp, Homo sapien
agcatccatgaactcgaatgcagac

SEQ ID NO: 5264490 - DNA, 25 bp, Homo sapien
aggtgctgaaggtctgcagaacctc

SEQ ID NO: 5264491 - DNA, 25 bp, Homo sapien
aagaatcagggctgctcgggcagaa

SEQ ID NO: 5264492 - DNA, 25 bp, Homo sapien
gctctctggttaagctgactttcag

SEQ ID NO: 5264493 - DNA, 25 bp, Homo sapien
ctgatctttcgtggccaagaaggac

SEQ ID NO: 5264494 - DNA, 25 bp, Homo sapien
gaacagctgtaatagcaaccactga

SEQ ID NO: 5264495 - DNA, 25 bp, Homo sapien
tggcctgcgttggagcctgaagtct

SEQ ID NO: 5264496 - DNA, 25 bp, Homo sapien
tggccatggtcccatcggtcaccag

SEQ ID NO: 5264497 - DNA, 25 bp, Homo sapien
gcttctcagcgtcatggcctgcgtt

SEQ ID NO: 5264498 - DNA, 25 bp, Homo sapien
tcgatgaggacgtaaaacggactct

SEQ ID NO: 5264499 - DNA, 25 bp, Homo sapien
taggactcccgaggtccaggctaag

SEQ ID NO: 5264500 - DNA, 25 bp, Homo sapien
tgactggccgcttaaccacaggctg

SEQ ID NO: 5264501 - DNA, 25 bp, Homo sapien
acacgactctatgcggagctgccgc

SEQ ID NO: 5264502 - DNA, 25 bp, Homo sapien
ttccaggcatcccaagacaaggctg

SEQ ID NO: 5264503 - DNA, 25 bp, Homo sapien
accaatggctcccactatccaggcc

SEQ ID NO: 5264504 - DNA, 25 bp, Homo sapien
ccaggtcccggtaacagtgaccaat

SEQ ID NO: 5264505 - DNA, 25 bp, Homo sapien
aatggctcccactatccaggccccg

SEQ ID NO: 5264506 - DNA, 25 bp, Homo sapien
caggtcccggtaacagtgaccaatg

SEQ ID NO: 5264507 - DNA, 25 bp, Homo sapien
ccaggccccggtgaaggtaactgag

SEQ ID NO: 5264508 - DNA, 25 bp, Homo sapien
cggtgaaggtaactgagggctcctc

SEQ ID NO: 5264509 - DNA, 25 bp, Homo sapien
tcaggccctggtgacggtgaccaag

SEQ ID NO: 5264510 - DNA, 25 bp, Homo sapien
gtgaccaagggcgcctcccactgcc

SEQ ID NO: 5264511 - DNA, 25 bp, Homo sapien
aacacccaggctaacacgagcctga

SEQ ID NO: 5264512 - DNA, 25 bp, Homo sapien
cctgaaatcaactaagcgggagtaa

SEQ ID NO: 5264513 - DNA, 25 bp, Homo sapien
cacgagcctgaaatcaactaagcgg

SEQ ID NO: 5264514 - DNA, 25 bp, Homo sapien
taagcgggagtaaagtcctgcgccc

SEQ ID NO: 5264515 - DNA, 25 bp, Homo sapien
gggattgcttgttactgcggcagaa

SEQ ID NO: 5264516 - DNA, 25 bp, Homo sapien
tcagcccgggcccctggactggaag

SEQ ID NO: 5264517 - DNA, 25 bp, Homo sapien
atcacccacacggaacgcgagggag

SEQ ID NO: 5264518 - DNA, 25 bp, Homo sapien
gaatgtaagggagctgactgtcaca

SEQ ID NO: 5264519 - DNA, 25 bp, Homo sapien
aaaataccacctcctcgccaccact

SEQ ID NO: 5264520 - DNA, 25 bp, Homo sapien
ttattgaggcaaccacaatgccaca

SEQ ID NO: 5264521 - DNA, 25 bp, Homo sapien
gttttattgaggcaaccacaatgcc

SEQ ID NO: 5264522 - DNA, 25 bp, Homo sapien
aataccacctcctcgccaccactgg

SEQ ID NO: 5264523 - DNA, 25 bp, Homo sapien
ggctgcagtgagctgcaactgtgtc

SEQ ID NO: 5264524 - DNA, 25 bp, Homo sapien
cagtgagctgcaactgtgtcactgc

SEQ ID NO: 5264525 - DNA, 25 bp, Homo sapien
gagctgcaactgtgtcactgcactc

SEQ ID NO: 5264526 - DNA, 25 bp, Homo sapien
gctgcagtgagctgcaactgtgtca

SEQ ID NO: 5264527 - DNA, 25 bp, Homo sapien
cctgcccctccagagaccctatcat

SEQ ID NO: 5264528 - DNA, 25 bp, Homo sapien
ccagagaccctatcatttcaggaaa

SEQ ID NO: 5264529 - DNA, 25 bp, Homo sapien
cctccagagaccctatcatttcagg

SEQ ID NO: 5264530 - DNA, 25 bp, Homo sapien
tgcccctccagagaccctatcattt

SEQ ID NO: 5264531 - DNA, 25 bp, Homo sapien
gctcagacagatcggcctgtggttt

SEQ ID NO: 5264532 - DNA, 25 bp, Homo sapien
gcttgcttcgaacttccattgtgga

SEQ ID NO: 5264533 - DNA, 25 bp, Homo sapien
gaaccgggccaaatcctagggctca

SEQ ID NO: 5264534 - DNA, 25 bp, Homo sapien
tgtggtttgcgtggcttttgcttgc

SEQ ID NO: 5264535 - DNA, 25 bp, Homo sapien
aggcagggacatggcgggtgggcca

SEQ ID NO: 5264536 - DNA, 25 bp, Homo sapien
gggaggcagggacatggcgggtggg

SEQ ID NO: 5264537 - DNA, 25 bp, Homo sapien
ggtgggaggcagggacatggcgggt

SEQ ID NO: 5264538 - DNA, 25 bp, Homo sapien
gtgggccacaggggagggaaggaca

SEQ ID NO: 5264539 - DNA, 25 bp, Homo sapien
agcttcaggtcatgacacggcacag

SEQ ID NO: 5264540 - DNA, 25 bp, Homo sapien
gtcatgacacggcacagagtggcaa

SEQ ID NO: 5264541 - DNA, 25 bp, Homo sapien
ttcaggtcatgacacggcacagagt

SEQ ID NO: 5264542 - DNA, 25 bp, Homo sapien
caggtcatgacacggcacagagtgg

SEQ ID NO: 5264543 - DNA, 25 bp, Homo sapien
tcccagacagtgaatgtcccaggct

SEQ ID NO: 5264544 - DNA, 25 bp, Homo sapien
gcaatcaggcggctgggacacctca

SEQ ID NO: 5264545 - DNA, 25 bp, Homo sapien
acgacagcaccgagcaccctgggac

SEQ ID NO: 5264546 - DNA, 25 bp, Homo sapien
tcacagaagggggacagccatgacg

SEQ ID NO: 5264547 - DNA, 25 bp, Homo sapien
acaagggctggctatgggaacgaca

SEQ ID NO: 5264548 - DNA, 25 bp, Homo sapien
agacagcgaatgtcccagaccagga

SEQ ID NO: 5264549 - DNA, 25 bp, Homo sapien
tatcttcaccaggtgaggctccgac

SEQ ID NO: 5264550 - DNA, 25 bp, Homo sapien
acaccacacggggttagggcagcag

SEQ ID NO: 5264551 - DNA, 25 bp, Homo sapien
gtacttgtacacgtagccatcccgg

SEQ ID NO: 5264552 - DNA, 25 bp, Homo sapien
ggctcagcgcctctgtgatcctttc

SEQ ID NO: 5264553 - DNA, 25 bp, Homo sapien
agcccaccacgtgcttggcgtgcgg

SEQ ID NO: 5264554 - DNA, 25 bp, Homo sapien
gtcacgatgtcgtagagccgctcca

SEQ ID NO: 5264555 - DNA, 25 bp, Homo sapien
caagtgcacgatggcagtcttttcc

SEQ ID NO: 5264556 - DNA, 25 bp, Homo sapien
gccatgcgctctgccattacaagtg

SEQ ID NO: 5264557 - DNA, 25 bp, Homo sapien
actcaaaacgagtcatgacaacgat

SEQ ID NO: 5264558 - DNA, 25 bp, Homo sapien
tcatgacaacgattaggattttccc

SEQ ID NO: 5264559 - DNA, 25 bp, Homo sapien
cacactcatcatgcccttaacccct

SEQ ID NO: 5264560 - DNA, 25 bp, Homo sapien
ccttcccattcaggagtcctgcctt

SEQ ID NO: 5264561 - DNA, 25 bp, Homo sapien
acacactcatcatgcccttaacccc

SEQ ID NO: 5264562 - DNA, 25 bp, Homo sapien
ggcccattcttgcttttacaaagta

SEQ ID NO: 5264563 - DNA, 25 bp, Homo sapien
cctggcccattcttgcttttacaaa

SEQ ID NO: 5264564 - DNA, 25 bp, Homo sapien
tgcttttacaaagtaacagagggct

SEQ ID NO: 5264565 - DNA, 25 bp, Homo sapien
caaagtaacagagggctcattccat

SEQ ID NO: 5264566 - DNA, 25 bp, Homo sapien
cagacaagtggacgcagagaattca

SEQ ID NO: 5264567 - DNA, 25 bp, Homo sapien
acaagtacgcaagaaacctgtccgg

SEQ ID NO: 5264568 - DNA, 25 bp, Homo sapien
cagggcgaccaccaacagttagtaa

SEQ ID NO: 5264569 - DNA, 25 bp, Homo sapien
cattcaagacggcaaacaagtacgc

SEQ ID NO: 5264570 - DNA, 25 bp, Homo sapien
tcagcaggctggagatcccagcagg

SEQ ID NO: 5264571 - DNA, 25 bp, Homo sapien
cccacgctgtggcaaaaagccttcg

SEQ ID NO: 5264572 - DNA, 25 bp, Homo sapien
gcttgagtctccatctgggtcagaa

SEQ ID NO: 5264573 - DNA, 25 bp, Homo sapien
ccacgctgtggcaaaaagccttcaa

SEQ ID NO: 5264574 - DNA, 25 bp, Homo sapien
aagtcctcgcactgtgcagccatca

SEQ ID NO: 5264575 - DNA, 25 bp, Homo sapien
taaacgacagccaaagtgacggggc

SEQ ID NO: 5264576 - DNA, 25 bp, Homo sapien
tgcagatgtggagcccgcaaataca

SEQ ID NO: 5264577 - DNA, 25 bp, Homo sapien
atctgcagatgtggagcccgcaaat

SEQ ID NO: 5264578 - DNA, 25 bp, Homo sapien
ctggtcggatggaggggtccgcagt

SEQ ID NO: 5264579 - DNA, 25 bp, Homo sapien
ggatggaggggtccgcagtggcgcc

SEQ ID NO: 5264580 - DNA, 25 bp, Homo sapien
tcggatggaggggtccgcagtggcg

SEQ ID NO: 5264581 - DNA, 25 bp, Homo sapien
tggaggggtccgcagtggcgcccag

SEQ ID NO: 5264582 - DNA, 25 bp, Homo sapien
gaagagtccagaccgtcttccagtc

SEQ ID NO: 5264583 - DNA, 25 bp, Homo sapien
agagtccagaccgtcttccagtctg

SEQ ID NO: 5264584 - DNA, 25 bp, Homo sapien
tccagaccgtcttccagtctgtatc

SEQ ID NO: 5264585 - DNA, 25 bp, Homo sapien
accgtcttccagtctgtatccccag

SEQ ID NO: 5264586 - DNA, 25 bp, Homo sapien
tgctgtagcccaggacgtccctctt

SEQ ID NO: 5264587 - DNA, 25 bp, Homo sapien
tccgccgtcacattgaggtgcaggt

SEQ ID NO: 5264588 - DNA, 25 bp, Homo sapien
cccggccgtccactcgtacacgtgg

SEQ ID NO: 5264589 - DNA, 25 bp, Homo sapien
aagcccactccgtgctccgcgctga

SEQ ID NO: 5264590 - DNA, 25 bp, Homo sapien
ttccacgtgggcaaagctgccgcca

SEQ ID NO: 5264591 - DNA, 25 bp, Homo sapien
agcagagccgcagcgctcaggtcct

SEQ ID NO: 5264592 - DNA, 25 bp, Homo sapien
ggaaatgacacattcctgtccagac

SEQ ID NO: 5264593 - DNA, 25 bp, Homo sapien
cagctggcagccctctagaagatgt

SEQ ID NO: 5264594 - DNA, 25 bp, Homo sapien
cagaatgagatgtgcatccagctgc

SEQ ID NO: 5264595 - DNA, 25 bp, Homo sapien
tttttactggacattcatgacagaa

SEQ ID NO: 5264596 - DNA, 25 bp, Homo sapien
gcagcaccgcacgttctttgtagga

SEQ ID NO: 5264597 - DNA, 25 bp, Homo sapien
cagctgacgagcagaaacacactct

SEQ ID NO: 5264598 - DNA, 25 bp, Homo sapien
tgtggggcttcgtgtcaggcaccca

SEQ ID NO: 5264599 - DNA, 25 bp, Homo sapien
gcaacagatactgtcgggctgccca

SEQ ID NO: 5264600 - DNA, 25 bp, Homo sapien
ctgtgcaacagatactgtcgggctg

SEQ ID NO: 5264601 - DNA, 25 bp, Homo sapien
ttcgtgtcaggcacccatggggcct

SEQ ID NO: 5264602 - DNA, 25 bp, Homo sapien
aaggccaggcctctgcagccccaca

SEQ ID NO: 5264603 - DNA, 25 bp, Homo sapien
agcaggcaaggccaggcctctgcag

SEQ ID NO: 5264604 - DNA, 25 bp, Homo sapien
cagcgggtgtccctcagcaggcaag

SEQ ID NO: 5264605 - DNA, 25 bp, Homo sapien
ggccaggcctctgcagccccacagc

SEQ ID NO: 5264606 - DNA, 25 bp, Homo sapien
tcaacgccgtcacatggccgttggg

SEQ ID NO: 5264607 - DNA, 25 bp, Homo sapien
tggtggcctgcctcacgcagattcg

SEQ ID NO: 5264608 - DNA, 25 bp, Homo sapien
acggacactcaacgccgtcacatgg

SEQ ID NO: 5264609 - DNA, 25 bp, Homo sapien
tctcctgcgtcggagtcactcggag

SEQ ID NO: 5264610 - DNA, 25 bp, Homo sapien
aatgctgacgtttgctgccttccgt

SEQ ID NO: 5264611 - DNA, 25 bp, Homo sapien
caataaatatcagtgggcctagccc

SEQ ID NO: 5264612 - DNA, 25 bp, Homo sapien
agttcgtagcagatagcggtaaaac

SEQ ID NO: 5264613 - DNA, 25 bp, Homo sapien
tgttgcatttcatactcctcctgta

SEQ ID NO: 5264614 - DNA, 25 bp, Homo sapien
acaggacctaaaccccgagcgctca

SEQ ID NO: 5264615 - DNA, 25 bp, Homo sapien
cctaaaccccgagcgctcaggaaag

SEQ ID NO: 5264616 - DNA, 25 bp, Homo sapien
gacctaaaccccgagcgctcaggaa

SEQ ID NO: 5264617 - DNA, 25 bp, Homo sapien
aaaccccgagcgctcaggaaagcag

SEQ ID NO: 5264618 - DNA, 25 bp, Homo sapien
gtttgcacagccgctggcacagggc

SEQ ID NO: 5264619 - DNA, 25 bp, Homo sapien
cagccaccagccaccttcaccccct

SEQ ID NO: 5264620 - DNA, 25 bp, Homo sapien
tcagccaccagccaccttcaccccc

SEQ ID NO: 5264621 - DNA, 25 bp, Homo sapien
agccaccagccaccttcaccccctg

SEQ ID NO: 5264622 - DNA, 25 bp, Homo sapien
caggcacaggcagggtgcggctgtg

SEQ ID NO: 5264623 - DNA, 25 bp, Homo sapien
gcctctggcctccagcgaggggaca

SEQ ID NO: 5264624 - DNA, 25 bp, Homo sapien
cgaggggacagtcgaggcttgagct

SEQ ID NO: 5264625 - DNA, 25 bp, Homo sapien
agtcgaggcttgagctcccccgagg

SEQ ID NO: 5264626 - DNA, 25 bp, Homo sapien
tctgcaagccgcccagcatggacat

SEQ ID NO: 5264627 - DNA, 25 bp, Homo sapien
gcaagccgcccagcatggacatcat

SEQ ID NO: 5264628 - DNA, 25 bp, Homo sapien
tgcaagccgcccagcatggacatca

SEQ ID NO: 5264629 - DNA, 25 bp, Homo sapien
ctctgcaagccgcccagcatggaca

SEQ ID NO: 5264630 - DNA, 25 bp, Homo sapien
ccgggacggggcttcaccacattgg

SEQ ID NO: 5264631 - DNA, 25 bp, Homo sapien
catgccccgggacggggcttcacca

SEQ ID NO: 5264632 - DNA, 25 bp, Homo sapien
tcatgtgatccaccctccttggctt

SEQ ID NO: 5264633 - DNA, 25 bp, Homo sapien
caccaccatgccccgggacggggct

SEQ ID NO: 5264634 - DNA, 25 bp, Homo sapien
tctaagtccgagtgcaggaatccgg

SEQ ID NO: 5264635 - DNA, 25 bp, Homo sapien
ccgagtgcaggaatccggccagcag

SEQ ID NO: 5264636 - DNA, 25 bp, Homo sapien
agtccgagtgcaggaatccggccag

SEQ ID NO: 5264637 - DNA, 25 bp, Homo sapien
agctctaagtccgagtgcaggaatc

SEQ ID NO: 5264638 - DNA, 25 bp, Homo sapien
tgcacatgatgttgaagcgctgctg

SEQ ID NO: 5264639 - DNA, 25 bp, Homo sapien
aggttgaacctcaggtggttgcaca

SEQ ID NO: 5264640 - DNA, 25 bp, Homo sapien
ggttgtgggtctcggcgaagcggta

SEQ ID NO: 5264641 - DNA, 25 bp, Homo sapien
tagaggatgttgagcaccgtgctgc

SEQ ID NO: 5264642 - DNA, 25 bp, Homo sapien
ccttctcgtgcggcagctccgggag

SEQ ID NO: 5264643 - DNA, 25 bp, Homo sapien
gccttctcgtgcggcagctccggga

SEQ ID NO: 5264644 - DNA, 25 bp, Homo sapien
ctggcgccttctcgtgcggcagctc

SEQ ID NO: 5264645 - DNA, 25 bp, Homo sapien
gcgccttctcgtgcggcagctccgg

SEQ ID NO: 5264646 - DNA, 25 bp, Homo sapien
ccgcggggaggaggcgcgccctggc

SEQ ID NO: 5264647 - DNA, 25 bp, Homo sapien
ggggaggaggcgcgccctggccaca

SEQ ID NO: 5264648 - DNA, 25 bp, Homo sapien
gggaggaggcgcgccctggccacac

SEQ ID NO: 5264649 - DNA, 25 bp, Homo sapien
gcggggaggaggcgcgccctggcca

SEQ ID NO: 5264650 - DNA, 25 bp, Homo sapien
ccacatgttgttcttggcgtagacg

SEQ ID NO: 5264651 - DNA, 25 bp, Homo sapien
tctgcgtgtggttcttgagcgcgcc

SEQ ID NO: 5264652 - DNA, 25 bp, Homo sapien
ggttgaaatgctcgtacaggcgcca

SEQ ID NO: 5264653 - DNA, 25 bp, Homo sapien
tgtcgttgtagaacgtccgcggcga

SEQ ID NO: 5264654 - DNA, 25 bp, Homo sapien
cagaagccctgcaaggatccccggc

SEQ ID NO: 5264655 - DNA, 25 bp, Homo sapien
aggagctggtgtccgcaggaggcct

SEQ ID NO: 5264656 - DNA, 25 bp, Homo sapien
cccagaagccctgcaaggatccccg

SEQ ID NO: 5264657 - DNA, 25 bp, Homo sapien
gaagccctgcaaggatccccggcct

SEQ ID NO: 5264658 - DNA, 25 bp, Homo sapien
tcgggaatgagcaacccgaccctgg

SEQ ID NO: 5264659 - DNA, 25 bp, Homo sapien
tttagacgaatgcacactgacacgg

SEQ ID NO: 5264660 - DNA, 25 bp, Homo sapien
atctgcatctcgctatcgggcctcg

SEQ ID NO: 5264661 - DNA, 25 bp, Homo sapien
agctctggaaaaactgtaatctgga

SEQ ID NO: 5264662 - DNA, 25 bp, Homo sapien
cttgaagcatgacgagaccaggacc

SEQ ID NO: 5264663 - DNA, 25 bp, Homo sapien
tgagctctgctcagaagcggcacct

SEQ ID NO: 5264664 - DNA, 25 bp, Homo sapien
agacgacctgcgttccgctcaggga

SEQ ID NO: 5264665 - DNA, 25 bp, Homo sapien
gcctgatgctcagagggtaactgga

SEQ ID NO: 5264666 - DNA, 25 bp, Homo sapien
cagtttcagttcccgccaacctcaa

SEQ ID NO: 5264667 - DNA, 25 bp, Homo sapien
aggcagagacaaaaggacggtgtgc

SEQ ID NO: 5264668 - DNA, 25 bp, Homo sapien
ttcagttcccgccaacctcaaaggc

SEQ ID NO: 5264669 - DNA, 25 bp, Homo sapien
agagacaaaaggacggtgtgcccct

SEQ ID NO: 5264670 - DNA, 25 bp, Homo sapien
ccaggaggggcggacccagtccagg

SEQ ID NO: 5264671 - DNA, 25 bp, Homo sapien
aggggcggacccagtccaggcaact

SEQ ID NO: 5264672 - DNA, 25 bp, Homo sapien
gggcggacccagtccaggcaacttg

SEQ ID NO: 5264673 - DNA, 25 bp, Homo sapien
ggacccagtccaggcaacttggcca

SEQ ID NO: 5264674 - DNA, 25 bp, Homo sapien
cacgtctcagggctacgtcaggacc

SEQ ID NO: 5264675 - DNA, 25 bp, Homo sapien
ccgcagttgacctcccagagggaca

SEQ ID NO: 5264676 - DNA, 25 bp, Homo sapien
ggtgcgccctccaacaagggctgtg

SEQ ID NO: 5264677 - DNA, 25 bp, Homo sapien
aggagggctccgtgagtgcacactc

SEQ ID NO: 5264678 - DNA, 25 bp, Homo sapien
ttgggaaggctgcagagctcatcat

SEQ ID NO: 5264679 - DNA, 25 bp, Homo sapien
cttgggaaggctgcagagctcatca

SEQ ID NO: 5264680 - DNA, 25 bp, Homo sapien
agccccgctcagtgtagccagttca

SEQ ID NO: 5264681 - DNA, 25 bp, Homo sapien
gtagccagttcagcacattccaggg

SEQ ID NO: 5264682 - DNA, 25 bp, Homo sapien
cctcaggaggtccctctgtcttggg

SEQ ID NO: 5264683 - DNA, 25 bp, Homo sapien
accagccgtgctcagtgtggccagg

SEQ ID NO: 5264684 - DNA, 25 bp, Homo sapien
gacacctgaggcccaaacagacagc

SEQ ID NO: 5264685 - DNA, 25 bp, Homo sapien
cctgaggcccaaacagacagctcca

SEQ ID NO: 5264686 - DNA, 25 bp, Homo sapien
cccgacacctgaggcccaaacagac

SEQ ID NO: 5264687 - DNA, 25 bp, Homo sapien
ttgccccgacacctgaggcccaaac

SEQ ID NO: 5264688 - DNA, 25 bp, Homo sapien
tggtcctccaccatgcaggagcggt

SEQ ID NO: 5264689 - DNA, 25 bp, Homo sapien
acagtgggaacgctggtcctccacc

SEQ ID NO: 5264690 - DNA, 25 bp, Homo sapien
atgcaggagcggtcagatccacggc

SEQ ID NO: 5264691 - DNA, 25 bp, Homo sapien
tgcagacagtgggaacgctggtcct

SEQ ID NO: 5264692 - DNA, 25 bp, Homo sapien
gggtctctcagtctgatcgcacaaa

SEQ ID NO: 5264693 - DNA, 25 bp, Homo sapien
aaggcagacggagccgagcgtgagc

SEQ ID NO: 5264694 - DNA, 25 bp, Homo sapien
ctggggggtctctcagtctgatcgc

SEQ ID NO: 5264695 - DNA, 25 bp, Homo sapien
cagtctgatcgcacaaaggcagacg

SEQ ID NO: 5264696 - DNA, 25 bp, Homo sapien
gagaagcgcccacaggaatcagaag

SEQ ID NO: 5264697 - DNA, 25 bp, Homo sapien
ctgagaagcgcccacaggaatcaga

SEQ ID NO: 5264698 - DNA, 25 bp, Homo sapien
agaagctccaaagccgagtggggcc

SEQ ID NO: 5264699 - DNA, 25 bp, Homo sapien
tcagaagctccaaagccgagtgggg

SEQ ID NO: 5264700 - DNA, 25 bp, Homo sapien
ccacagggacctgtgggagccacgg

SEQ ID NO: 5264701 - DNA, 25 bp, Homo sapien
ggtcagtacagggccacaggtcagc

SEQ ID NO: 5264702 - DNA, 25 bp, Homo sapien
gccacaggtcagcaagacaggccca

SEQ ID NO: 5264703 - DNA, 25 bp, Homo sapien
tggtcagtacagggccacaggtcag

SEQ ID NO: 5264704 - DNA, 25 bp, Homo sapien
cacaggtcagcaagacaggcccagg

SEQ ID NO: 5264705 - DNA, 25 bp, Homo sapien
ggcccgtcctctcccgctcgaagag

SEQ ID NO: 5264706 - DNA, 25 bp, Homo sapien
tgggagtcgtcagggctgagccgct

SEQ ID NO: 5264707 - DNA, 25 bp, Homo sapien
ctcctcagcaccaggcggtgggcgt

SEQ ID NO: 5264708 - DNA, 25 bp, Homo sapien
gcacgcggtaggtcaggcccgtcct

SEQ ID NO: 5264709 - DNA, 25 bp, Homo sapien
ccagaggaggaagttccgctgacca

SEQ ID NO: 5264710 - DNA, 25 bp, Homo sapien
gcctggtttgctcatctctacctcg

SEQ ID NO: 5264711 - DNA, 25 bp, Homo sapien
agggcacccaggatcgctgagcctg

SEQ ID NO: 5264712 - DNA, 25 bp, Homo sapien
ctctacctcgggcatctgcctgccg

SEQ ID NO: 5264713 - DNA, 25 bp, Homo sapien
gtccccagcacgtgcagggcacccc

SEQ ID NO: 5264714 - DNA, 25 bp, Homo sapien
ctgctgtccccagcacgtgcagggc

SEQ ID NO: 5264715 - DNA, 25 bp, Homo sapien
tgctgtccccagcacgtgcagggca

SEQ ID NO: 5264716 - DNA, 25 bp, Homo sapien
ctgtccccagcacgtgcagggcacc

SEQ ID NO: 5264717 - DNA, 25 bp, Homo sapien
caggggttcatggaccggtgctccg

SEQ ID NO: 5264718 - DNA, 25 bp, Homo sapien
ttcatggaccggtgctccgccaggg

SEQ ID NO: 5264719 - DNA, 25 bp, Homo sapien
gggttcatggaccggtgctccgcca

SEQ ID NO: 5264720 - DNA, 25 bp, Homo sapien
cgtgcacagggcaggggttcatgga

SEQ ID NO: 5264721 - DNA, 25 bp, Homo sapien
ccacacagcagaggcgcgcggcgtt

SEQ ID NO: 5264722 - DNA, 25 bp, Homo sapien
gttccttcccgtggcgatctgcacg

SEQ ID NO: 5264723 - DNA, 25 bp, Homo sapien
accaccgatggcctcctcggtgagg

SEQ ID NO: 5264724 - DNA, 25 bp, Homo sapien
aagaagaggaagacggtgcccgtgc

SEQ ID NO: 5264725 - DNA, 25 bp, Homo sapien
ccttccatgtggaccgtggccaatc

SEQ ID NO: 5264726 - DNA, 25 bp, Homo sapien
gtggccaatcaaagggacccagacc

SEQ ID NO: 5264727 - DNA, 25 bp, Homo sapien
agaatggcaatttcccgctggaatc

SEQ ID NO: 5264728 - DNA, 25 bp, Homo sapien
tcgggtcagccatagagggcctgct

SEQ ID NO: 5264729 - DNA, 25 bp, Homo sapien
ctcttagcagccgagcccaggtgga

SEQ ID NO: 5264730 - DNA, 25 bp, Homo sapien
ggttaggaccatcgcactctgaccg

SEQ ID NO: 5264731 - DNA, 25 bp, Homo sapien
cctgagtcctcccaggctgaacaag

SEQ ID NO: 5264732 - DNA, 25 bp, Homo sapien
aggtggacggcacccagggaggctg

SEQ ID NO: 5264733 - DNA, 25 bp, Homo sapien
ggctggtccggcagatcttgccaaa

SEQ ID NO: 5264734 - DNA, 25 bp, Homo sapien
cgtggtcatcgctgtagaaggcgaa

SEQ ID NO: 5264735 - DNA, 25 bp, Homo sapien
ttgccaaaacactctcggcggtcca

SEQ ID NO: 5264736 - DNA, 25 bp, Homo sapien
aggtgtaggcgggtaccagcaggcg

SEQ ID NO: 5264737 - DNA, 25 bp, Homo sapien
gggctccgggcattgcagtagagga

SEQ ID NO: 5264738 - DNA, 25 bp, Homo sapien
cagtgggctccgggcattgcagtag

SEQ ID NO: 5264739 - DNA, 25 bp, Homo sapien
aggtgccctcgtcagtgctgagcgc

SEQ ID NO: 5264740 - DNA, 25 bp, Homo sapien
gaggtgccctcgtcagtgctgagcg

SEQ ID NO: 5264741 - DNA, 25 bp, Homo sapien
ggcagtctcgggcagggaagccacg

SEQ ID NO: 5264742 - DNA, 25 bp, Homo sapien
gtctcgggcagggaagccacgcgct

SEQ ID NO: 5264743 - DNA, 25 bp, Homo sapien
cagtctcgggcagggaagccacgcg

SEQ ID NO: 5264744 - DNA, 25 bp, Homo sapien
caggcagtctcgggcagggaagcca

SEQ ID NO: 5264745 - DNA, 25 bp, Homo sapien
aactgtcatcccgtggcctgttggg

SEQ ID NO: 5264746 - DNA, 25 bp, Homo sapien
caactgtcatcccgtggcctgttgg

SEQ ID NO: 5264747 - DNA, 25 bp, Homo sapien
gtggactccaggaccgaggagtgga

SEQ ID NO: 5264748 - DNA, 25 bp, Homo sapien
tggactccaggaccgaggagtggag

SEQ ID NO: 5264749 - DNA, 25 bp, Homo sapien
ctccaggaccgaggagtggaggctg

SEQ ID NO: 5264750 - DNA, 25 bp, Homo sapien
gctgcagacggctgaagggcccacc

SEQ ID NO: 5264751 - DNA, 25 bp, Homo sapien
ctgcagacggctgaagggcccacca

SEQ ID NO: 5264752 - DNA, 25 bp, Homo sapien
ggatacccatgtgtagccgagccct

SEQ ID NO: 5264753 - DNA, 25 bp, Homo sapien
aatctcatcataggaggtcctggcc

SEQ ID NO: 5264754 - DNA, 25 bp, Homo sapien
tctcgtacaggcaggcaaaaaccag

SEQ ID NO: 5264755 - DNA, 25 bp, Homo sapien
tcacgcagggagaatgtacaaaagg

SEQ ID NO: 5264756 - DNA, 25 bp, Homo sapien
ggagggccagcagcacccccgaggc

SEQ ID NO: 5264757 - DNA, 25 bp, Homo sapien
cgaggcttgtccccaaggttgggcg

SEQ ID NO: 5264758 - DNA, 25 bp, Homo sapien
cttgtccccaaggttgggcggcttg

SEQ ID NO: 5264759 - DNA, 25 bp, Homo sapien
cagcacccccgaggcttgtccccaa

SEQ ID NO: 5264760 - DNA, 25 bp, Homo sapien
tccccttcctaaagagcagtccctg

SEQ ID NO: 5264761 - DNA, 25 bp, Homo sapien
tatcgtggggcaccccaacgtattc

SEQ ID NO: 5264762 - DNA, 25 bp, Homo sapien
gcacgattcctttatttcgagccag

SEQ ID NO: 5264763 - DNA, 25 bp, Homo sapien
ctgaggagcaacttgtttctaatcc

SEQ ID NO: 5264764 - DNA, 25 bp, Homo sapien
cccaagtctgtctgacacaggccga

SEQ ID NO: 5264765 - DNA, 25 bp, Homo sapien
gacacaggccgaggctgcacatggc

SEQ ID NO: 5264766 - DNA, 25 bp, Homo sapien
gcagtgacggccaggatcccccggg

SEQ ID NO: 5264767 - DNA, 25 bp, Homo sapien
ctcgagcccaagtctgtctgacaca

SEQ ID NO: 5264768 - DNA, 25 bp, Homo sapien
ccaccacggcgaccggagctcctgg

SEQ ID NO: 5264769 - DNA, 25 bp, Homo sapien
agaggctccaccacggcgaccggag

SEQ ID NO: 5264770 - DNA, 25 bp, Homo sapien
ctccaccacggcgaccggagctcct

SEQ ID NO: 5264771 - DNA, 25 bp, Homo sapien
ctggcagagccttccccggtcctga

SEQ ID NO: 5264772 - DNA, 25 bp, Homo sapien
tggcagagccttccccggtcctgag

SEQ ID NO: 5264773 - DNA, 25 bp, Homo sapien
gaacggacagcacggtgattccgca

SEQ ID NO: 5264774 - DNA, 25 bp, Homo sapien
tacatacatggaggagtattcagcc

SEQ ID NO: 5264775 - DNA, 25 bp, Homo sapien
tgattccgcacagagggagtcacct

SEQ ID NO: 5264776 - DNA, 25 bp, Homo sapien
gcaattcacaatcagcggccatgtg

SEQ ID NO: 5264777 - DNA, 25 bp, Homo sapien
ctggcgatctgggtgcagcgccaag

SEQ ID NO: 5264778 - DNA, 25 bp, Homo sapien
cctcgggctacaggagaccgggctg

SEQ ID NO: 5264779 - DNA, 25 bp, Homo sapien
gctggctcggcaacggcaaagccgt

SEQ ID NO: 5264780 - DNA, 25 bp, Homo sapien
ggcaacggcaaagccgtccaaagcc

SEQ ID NO: 5264781 - DNA, 25 bp, Homo sapien
tcacggcgctggctcggcaacggca

SEQ ID NO: 5264782 - DNA, 25 bp, Homo sapien
gctcggcaacggcaaagccgtccaa

SEQ ID NO: 5264783 - DNA, 25 bp, Homo sapien
gcagaatggccagaaccgttagagg

SEQ ID NO: 5264784 - DNA, 25 bp, Homo sapien
gacatctcttctgcaggctgtgcgc

SEQ ID NO: 5264785 - DNA, 25 bp, Homo sapien
taaaccacaacgctgcatcaggtga

SEQ ID NO: 5264786 - DNA, 25 bp, Homo sapien
ggtagcctttaatggcccagcagaa

SEQ ID NO: 5264787 - DNA, 25 bp, Homo sapien
tcaacacagcagcacagcgtttcct

SEQ ID NO: 5264788 - DNA, 25 bp, Homo sapien
cagattcactaaggctctttgtcaa

SEQ ID NO: 5264789 - DNA, 25 bp, Homo sapien
gaaacaccaagatctcacgtcccat

SEQ ID NO: 5264790 - DNA, 25 bp, Homo sapien
ggtgcagtgtagcaattccacatcc

SEQ ID NO: 5264791 - DNA, 25 bp, Homo sapien
tccgtcatcaatcccacattccatc

SEQ ID NO: 5264792 - DNA, 25 bp, Homo sapien
atcatcaaccccacgccccgtcgtc

SEQ ID NO: 5264793 - DNA, 25 bp, Homo sapien
actcctctatcacccgtcatcaacc

SEQ ID NO: 5264794 - DNA, 25 bp, Homo sapien
ccacactccatcatccgtcatcaat

SEQ ID NO: 5264795 - DNA, 25 bp, Homo sapien
tcaaacatttgactatggccctggt

SEQ ID NO: 5264796 - DNA, 25 bp, Homo sapien
ccctggtggctgcacgtagctgata

SEQ ID NO: 5264797 - DNA, 25 bp, Homo sapien
cctactgataggcacgtggccgctg

SEQ ID NO: 5264798 - DNA, 25 bp, Homo sapien
cacagcagcctagggagcttcttca

SEQ ID NO: 5264799 - DNA, 25 bp, Homo sapien
ctgtgacaacattcacacccacaag

SEQ ID NO: 5264800 - DNA, 25 bp, Homo sapien
attcacacccacaaggtcaaccagg

SEQ ID NO: 5264801 - DNA, 25 bp, Homo sapien
ccacaaggtcaaccaggaagaaact

SEQ ID NO: 5264802 - DNA, 25 bp, Homo sapien
gtgacaacattcacacccacaaggt

SEQ ID NO: 5264803 - DNA, 25 bp, Homo sapien
gcaggcactcctggtcttcctttat

SEQ ID NO: 5264804 - DNA, 25 bp, Homo sapien
tcctctcctagacttcctccatagg

SEQ ID NO: 5264805 - DNA, 25 bp, Homo sapien
tccataggagttcggcaggcactcc

SEQ ID NO: 5264806 - DNA, 25 bp, Homo sapien
tcttgcagaaagatggcccggcagg

SEQ ID NO: 5264807 - DNA, 25 bp, Homo sapien
cttcagcccacagcagtgcccttgg

SEQ ID NO: 5264808 - DNA, 25 bp, Homo sapien
ttcagcccacagcagtgcccttggt

SEQ ID NO: 5264809 - DNA, 25 bp, Homo sapien
cccacagcagtgcccttggtcctac

SEQ ID NO: 5264810 - DNA, 25 bp, Homo sapien
cagcccacagcagtgcccttggtcc

SEQ ID NO: 5264811 - DNA, 25 bp, Homo sapien
ctggggtcaaggttgtggccaatcc

SEQ ID NO: 5264812 - DNA, 25 bp, Homo sapien
caaggttgtggccaatcctgtgtct

SEQ ID NO: 5264813 - DNA, 25 bp, Homo sapien
aaggttgtggccaatcctgtgtctg

SEQ ID NO: 5264814 - DNA, 25 bp, Homo sapien
gggtcaaggttgtggccaatcctgt

SEQ ID NO: 5264815 - DNA, 25 bp, Homo sapien
ccccatgccctgtgcccctagtcaa

SEQ ID NO: 5264816 - DNA, 25 bp, Homo sapien
tgccctgtgcccctagtcaatatgg

SEQ ID NO: 5264817 - DNA, 25 bp, Homo sapien
tgcccctagtcaatatggacattta

SEQ ID NO: 5264818 - DNA, 25 bp, Homo sapien
cctgtgcccctagtcaatatggaca

SEQ ID NO: 5264819 - DNA, 25 bp, Homo sapien
ggaaaagccagacacgctgaaaatg

SEQ ID NO: 5264820 - DNA, 25 bp, Homo sapien
tggaaaagccagacacgctgaaaat

SEQ ID NO: 5264821 - DNA, 25 bp, Homo sapien
tcccagacacctggggattatggga

SEQ ID NO: 5264822 - DNA, 25 bp, Homo sapien
tgggaaaacccgcccccatgtctca

SEQ ID NO: 5264823 - DNA, 25 bp, Homo sapien
gcatgggaaaacccgcccccatgtc

SEQ ID NO: 5264824 - DNA, 25 bp, Homo sapien
tcagaatctcttgggacttattcac

SEQ ID NO: 5264825 - DNA, 25 bp, Homo sapien
caagagagcctgtgcagggaaattc

SEQ ID NO: 5264826 - DNA, 25 bp, Homo sapien
gcaagagagcctgtgcagggaaatt

SEQ ID NO: 5264827 - DNA, 25 bp, Homo sapien
ggagcagaggcaggtcttacatggt

SEQ ID NO: 5264828 - DNA, 25 bp, Homo sapien
ggaggagcagaggcaggtcttacat

SEQ ID NO: 5264829 - DNA, 25 bp, Homo sapien
tttacagcgaagacacctggcggac

SEQ ID NO: 5264830 - DNA, 25 bp, Homo sapien
tattttcacacaagcgatcgggtta

SEQ ID NO: 5264831 - DNA, 25 bp, Homo sapien
tatgatcatatgtagcagcccctcc

SEQ ID NO: 5264832 - DNA, 25 bp, Homo sapien
gtattatttgcggaagcccaccacc

SEQ ID NO: 5264833 - DNA, 25 bp, Homo sapien
gaaccctgtggtactagatgagaat

SEQ ID NO: 5264834 - DNA, 25 bp, Homo sapien
aacggatggcaaaccatgggaggca

SEQ ID NO: 5264835 - DNA, 25 bp, Homo sapien
gggtattatctgcacgcacattacg

SEQ ID NO: 5264836 - DNA, 25 bp, Homo sapien
gaatcagagacatcagtgtgaactc

SEQ ID NO: 5264837 - DNA, 25 bp, Homo sapien
ccaagatgtctgctatggacggagg

SEQ ID NO: 5264838 - DNA, 25 bp, Homo sapien
gaatgaatatgcagccagcaccttg

SEQ ID NO: 5264839 - DNA, 25 bp, Homo sapien
ccagggaaatggagaacacgtgctt

SEQ ID NO: 5264840 - DNA, 25 bp, Homo sapien
gttgtgtaagcctcccagtccatgg

SEQ ID NO: 5264841 - DNA, 25 bp, Homo sapien
cacctgtgggagtcgtacatccaga

SEQ ID NO: 5264842 - DNA, 25 bp, Homo sapien
taacatgaagggcaaacgtcacatc

SEQ ID NO: 5264843 - DNA, 25 bp, Homo sapien
gttggagaccctggtatgaacccca

SEQ ID NO: 5264844 - DNA, 25 bp, Homo sapien
caccatgttaacagactcgggaagt

SEQ ID NO: 5264845 - DNA, 25 bp, Homo sapien
gcttctgtccggtgtttttgctcga

SEQ ID NO: 5264846 - DNA, 25 bp, Homo sapien
agatggcacgggatagcctggcaca

SEQ ID NO: 5264847 - DNA, 25 bp, Homo sapien
tggcctgttactgtgagtgaccccg

SEQ ID NO: 5264848 - DNA, 25 bp, Homo sapien
ttgtggacgccagaagttcatgcat

SEQ ID NO: 5264849 - DNA, 25 bp, Homo sapien
taagcagaacttcatggaaatactg

SEQ ID NO: 5264850 - DNA, 25 bp, Homo sapien
cttccagaccgcaagaacaagaaat

SEQ ID NO: 5264851 - DNA, 25 bp, Homo sapien
ggaagggagcatgtgatctctattc

SEQ ID NO: 5264852 - DNA, 25 bp, Homo sapien
ggaaatactgttcatcgcataacga

SEQ ID NO: 5264853 - DNA, 25 bp, Homo sapien
cctactggaggagggaatcccgctt

SEQ ID NO: 5264854 - DNA, 25 bp, Homo sapien
cagctgggcagctcgcgttcccttt

SEQ ID NO: 5264855 - DNA, 25 bp, Homo sapien
tggtttccacaaacgcagagcagag

SEQ ID NO: 5264856 - DNA, 25 bp, Homo sapien
catgaggcaatgctgtagcagggca

SEQ ID NO: 5264857 - DNA, 25 bp, Homo sapien
tctgaaaggacttgattggcactct

SEQ ID NO: 5264858 - DNA, 25 bp, Homo sapien
taaaaccgcacctgaccatgtggag

SEQ ID NO: 5264859 - DNA, 25 bp, Homo sapien
tggatctccgagtactctgaaagga

SEQ ID NO: 5264860 - DNA, 25 bp, Homo sapien
gagtacacccaacgcagtgactgga

SEQ ID NO: 5264861 - DNA, 25 bp, Homo sapien
tctgcaaatgggagctgtgaagcgc

SEQ ID NO: 5264862 - DNA, 25 bp, Homo sapien
tgacaaggcgtagaacaggagccac

SEQ ID NO: 5264863 - DNA, 25 bp, Homo sapien
tcattcacgggagctggtctctgca

SEQ ID NO: 5264864 - DNA, 25 bp, Homo sapien
ccgagacgtggctggatgagaaaca

SEQ ID NO: 5264865 - DNA, 25 bp, Homo sapien
cattatacacacgacgaacctggga

SEQ ID NO: 5264866 - DNA, 25 bp, Homo sapien
tcatttggccaaagagacattcaga

SEQ ID NO: 5264867 - DNA, 25 bp, Homo sapien
gggtttacggtgcagattgccacat

SEQ ID NO: 5264868 - DNA, 25 bp, Homo sapien
ttaaatgcgttacggacgcacgccg

SEQ ID NO: 5264869 - DNA, 25 bp, Homo sapien
ggttcaccaggtgggtgcagcggag

SEQ ID NO: 5264870 - DNA, 25 bp, Homo sapien
tccctctgcgccagctggtgtcagg

SEQ ID NO: 5264871 - DNA, 25 bp, Homo sapien
tgcgccagctggtgtcaggttcacc

SEQ ID NO: 5264872 - DNA, 25 bp, Homo sapien
ccagctggtgtcaggttcaccaggt

SEQ ID NO: 5264873 - DNA, 25 bp, Homo sapien
gtccgagagtcttggacacagagtg

SEQ ID NO: 5264874 - DNA, 25 bp, Homo sapien
ccgagagtcttggacacagagtgtg

SEQ ID NO: 5264875 - DNA, 25 bp, Homo sapien
agagtcttggacacagagtgtggga

SEQ ID NO: 5264876 - DNA, 25 bp, Homo sapien
agtcttggacacagagtgtgggagc

SEQ ID NO: 5264877 - DNA, 25 bp, Homo sapien
cataaatacggacagcgcgctggac

SEQ ID NO: 5264878 - DNA, 25 bp, Homo sapien
caggtgagcaatactgcctgggctc

SEQ ID NO: 5264879 - DNA, 25 bp, Homo sapien
cccaggacaacggaggtctcacagt

SEQ ID NO: 5264880 - DNA, 25 bp, Homo sapien
gaaatcatgtctgaagcggtgggca

SEQ ID NO: 5264881 - DNA, 25 bp, Homo sapien
caaagtgaagacgtactgacctggc

SEQ ID NO: 5264882 - DNA, 25 bp, Homo sapien
cgcagttgacaaccccaaatgtggc

SEQ ID NO: 5264883 - DNA, 25 bp, Homo sapien
gaggcatagacacgtgggaatcaga

SEQ ID NO: 5264884 - DNA, 25 bp, Homo sapien
tctggccgcaattgatcaaagtgaa

SEQ ID NO: 5264885 - DNA, 25 bp, Homo sapien
tgcccagcggctacaagactaggat

SEQ ID NO: 5264886 - DNA, 25 bp, Homo sapien
gggtcttcacatccagcccgagggt

SEQ ID NO: 5264887 - DNA, 25 bp, Homo sapien
gtcagagaacgttgtggccaccaca

SEQ ID NO: 5264888 - DNA, 25 bp, Homo sapien
accacggaacaaggcggcagaagac

SEQ ID NO: 5264889 - DNA, 25 bp, Homo sapien
ttaacgagaagacgatcagccgagg

SEQ ID NO: 5264890 - DNA, 25 bp, Homo sapien
taagtcaatcctaaacacgcgagag

SEQ ID NO: 5264891 - DNA, 25 bp, Homo sapien
aatatgctgtagaacagggccccgg

SEQ ID NO: 5264892 - DNA, 25 bp, Homo sapien
gattttgtgcggacacggagccaag

SEQ ID NO: 5264893 - DNA, 25 bp, Homo sapien
tgcagacgtccccacggagggcagt

SEQ ID NO: 5264894 - DNA, 25 bp, Homo sapien
acagtgtgtgtgcagacgtccccac

SEQ ID NO: 5264895 - DNA, 25 bp, Homo sapien
acgtccccacggagggcagtgccga

SEQ ID NO: 5264896 - DNA, 25 bp, Homo sapien
agacgtccccatggacgggcagtgc

SEQ ID NO: 5264897 - DNA, 25 bp, Homo sapien
acgtccccacggagggcagtgccga

SEQ ID NO: 5264898 - DNA, 25 bp, Homo sapien
tgcagacgtccccacggagggcagt

SEQ ID NO: 5264899 - DNA, 25 bp, Homo sapien
ccccatttacggagggcagtgccga

SEQ ID NO: 5264900 - DNA, 25 bp, Homo sapien
acagtgtgtgtgcagacgtccccac

SEQ ID NO: 5264901 - DNA, 25 bp, Homo sapien
gcagacgtccccacggagggcagtg

SEQ ID NO: 5264902 - DNA, 25 bp, Homo sapien
acgtccccacggagggcagtgccga

SEQ ID NO: 5264903 - DNA, 25 bp, Homo sapien
gacgtccccacggagggcagtgccg

SEQ ID NO: 5264904 - DNA, 25 bp, Homo sapien
gtgcagacgtccccacggagggcag

SEQ ID NO: 5264905 - DNA, 25 bp, Homo sapien
tgcagacgtccccacggagggcagt

SEQ ID NO: 5264906 - DNA, 25 bp, Homo sapien
cagacgtccccacggagggcagtgc

SEQ ID NO: 5264907 - DNA, 25 bp, Homo sapien
acgtccccacggagggcagtgccga

SEQ ID NO: 5264908 - DNA, 25 bp, Homo sapien
cgtccccacggagggcagtgccgag

SEQ ID NO: 5264909 - DNA, 25 bp, Homo sapien
ccccacggagggcagtgccgaggac

SEQ ID NO: 5264910 - DNA, 25 bp, Homo sapien
acgtccccacggagggcagtgccga

SEQ ID NO: 5264911 - DNA, 25 bp, Homo sapien
gcagacgtccccacggagggcagtg

SEQ ID NO: 5264912 - DNA, 25 bp, Homo sapien
tgcagacgtccccacggagggcagt

SEQ ID NO: 5264913 - DNA, 25 bp, Homo sapien
ccgagctgggccaaagacactgtgt

SEQ ID NO: 5264914 - DNA, 25 bp, Homo sapien
gccttcaacggatcggaggagaccc

SEQ ID NO: 5264915 - DNA, 25 bp, Homo sapien
tatgggtattacacacaggagctct

SEQ ID NO: 5264916 - DNA, 25 bp, Homo sapien
cagtctagtctgaagccgtcggacg

SEQ ID NO: 5264917 - DNA, 25 bp, Homo sapien
tgtagaattgtgactccctggactc

SEQ ID NO: 5264918 - DNA, 25 bp, Homo sapien
tcaggcgtcaccgggagccgactct

SEQ ID NO: 5264919 - DNA, 25 bp, Homo sapien
gccaacaacagtgcctgtccggggt

SEQ ID NO: 5264920 - DNA, 25 bp, Homo sapien
tgttggatctgctctgttccccggg

SEQ ID NO: 5264921 - DNA, 25 bp, Homo sapien
accgggagccgactctcctgggcct

SEQ ID NO: 5264922 - DNA, 25 bp, Homo sapien
ccccacggcctcttgcacaagtatt

SEQ ID NO: 5264923 - DNA, 25 bp, Homo sapien
cccacggcctcttgcacaagtattg

SEQ ID NO: 5264924 - DNA, 25 bp, Homo sapien
ccacggcctcttgcacaagtattgc

SEQ ID NO: 5264925 - DNA, 25 bp, Homo sapien
tgaaggtcacactatcatgccccat

SEQ ID NO: 5264926 - DNA, 25 bp, Homo sapien
tctgtgttccccccgtatgcacagg

SEQ ID NO: 5264927 - DNA, 25 bp, Homo sapien
cacgtggtcacactgtgtgttcctt

SEQ ID NO: 5264928 - DNA, 25 bp, Homo sapien
tgtgttccttccgtgtgccgtgcac

SEQ ID NO: 5264929 - DNA, 25 bp, Homo sapien
acactgtgtgttccccctgtacgca

SEQ ID NO: 5264930 - DNA, 25 bp, Homo sapien
agccacactgtgtgttccccctgta

SEQ ID NO: 5264931 - DNA, 25 bp, Homo sapien
ccacactgtgtgttccccctgtacg

SEQ ID NO: 5264932 - DNA, 25 bp, Homo sapien
cagccacactgtgtgttccccctgt

SEQ ID NO: 5264933 - DNA, 25 bp, Homo sapien
tgttccccccgtgtgcactggcaat

SEQ ID NO: 5264934 - DNA, 25 bp, Homo sapien
ccacactgtgtgttccccccgtgtg

SEQ ID NO: 5264935 - DNA, 25 bp, Homo sapien
ctggcaatcacgcagccacactgtg

SEQ ID NO: 5264936 - DNA, 25 bp, Homo sapien
acactgtgtgttccccccgtgtgca

SEQ ID NO: 5264937 - DNA, 25 bp, Homo sapien
tgtacgcactggcaatcacgcggtc

SEQ ID NO: 5264938 - DNA, 25 bp, Homo sapien
gtgtgcactggcaatcacgcggtca

SEQ ID NO: 5264939 - DNA, 25 bp, Homo sapien
tgtatgcactggcaatcacgcggtc

SEQ ID NO: 5264940 - DNA, 25 bp, Homo sapien
ggcaatcacgcggtcacactgtgtg

SEQ ID NO: 5264941 - DNA, 25 bp, Homo sapien
aaagcgcagttgtgtgttccccccg

SEQ ID NO: 5264942 - DNA, 25 bp, Homo sapien
cccaaagcgcagttgtgtgttcccc

SEQ ID NO: 5264943 - DNA, 25 bp, Homo sapien
tcccaaagcgcagttgtgtgttccc

SEQ ID NO: 5264944 - DNA, 25 bp, Homo sapien
caaagcgcagttgtgtgttcccccc

SEQ ID NO: 5264945 - DNA, 25 bp, Homo sapien
gacacggaaggctgctttcatttgc

SEQ ID NO: 5264946 - DNA, 25 bp, Homo sapien
tcatttgctttggttctggctgggt

SEQ ID NO: 5264947 - DNA, 25 bp, Homo sapien
tccttattcattgacttcctcagcc

SEQ ID NO: 5264948 - DNA, 25 bp, Homo sapien
ttcgctaggtggttgtccttattca

SEQ ID NO: 5264949 - DNA, 25 bp, Homo sapien
aatcctggccatcatccacgaggaa

SEQ ID NO: 5264950 - DNA, 25 bp, Homo sapien
tggccatcatccacgaggaaagacc

SEQ ID NO: 5264951 - DNA, 25 bp, Homo sapien
gagtggggcttcagtacgttgcact

SEQ ID NO: 5264952 - DNA, 25 bp, Homo sapien
atccacgaggaaagaccaatgcagc

SEQ ID NO: 5264953 - DNA, 25 bp, Homo sapien
gactttgcaatggtgtctgcaggtt

SEQ ID NO: 5264954 - DNA, 25 bp, Homo sapien
gccaatgctggtccccgtggaggac

SEQ ID NO: 5264955 - DNA, 25 bp, Homo sapien
tctgcaggtttaggccaatgctggt

SEQ ID NO: 5264956 - DNA, 25 bp, Homo sapien
gaggacagagaagcctcaatcggcc

SEQ ID NO: 5264957 - DNA, 25 bp, Homo sapien
caatctaagacatcagtggcagcac

SEQ ID NO: 5264958 - DNA, 25 bp, Homo sapien
tcacagaggaacagccacatcagct

SEQ ID NO: 5264959 - DNA, 25 bp, Homo sapien
gctcctccgtggacgtccagctcaa

SEQ ID NO: 5264960 - DNA, 25 bp, Homo sapien
gacgtccagctcaacgactctcaga

SEQ ID NO: 5264961 - DNA, 25 bp, Homo sapien
gatatcctgcacgttcatcctggtg

SEQ ID NO: 5264962 - DNA, 25 bp, Homo sapien
cagtggccatgtcaggaggtaaacc

SEQ ID NO: 5264963 - DNA, 25 bp, Homo sapien
tggagacaggagatcacgcagcaat

SEQ ID NO: 5264964 - DNA, 25 bp, Homo sapien
caggagcagccacgcaggagaattt

SEQ ID NO: 5264965 - DNA, 25 bp, Homo sapien
gggtcccgtgagcttgtccgtgtgg

SEQ ID NO: 5264966 - DNA, 25 bp, Homo sapien
agcttgtccgtgtgggaaggtcggg

SEQ ID NO: 5264967 - DNA, 25 bp, Homo sapien
tgagcttgtccgtgtgggaaggtcg

SEQ ID NO: 5264968 - DNA, 25 bp, Homo sapien
tcccgtgagcttgtccgtgtgggaa

SEQ ID NO: 5264969 - DNA, 25 bp, Homo sapien
tcagggcatgtcttagtgctcacgc

SEQ ID NO: 5264970 - DNA, 25 bp, Homo sapien
tgtcttagtgctcacgctgtcctgg

SEQ ID NO: 5264971 - DNA, 25 bp, Homo sapien
tctcagggcatgtcttagtgctcac

SEQ ID NO: 5264972 - DNA, 25 bp, Homo sapien
gggcatgtcttagtgctcacgctgt

SEQ ID NO: 5264973 - DNA, 25 bp, Homo sapien
cccgtgctgctcctgtcttcttggt

SEQ ID NO: 5264974 - DNA, 25 bp, Homo sapien
tccgtctctcacagtatcgtgggca

SEQ ID NO: 5264975 - DNA, 25 bp, Homo sapien
cgtctctcacggtatcgtgggcatt

SEQ ID NO: 5264976 - DNA, 25 bp, Homo sapien
gtctctcacagtatcatgggcgttt

SEQ ID NO: 5264977 - DNA, 25 bp, Homo sapien
aggcctgtgataaatgttgagtaac

SEQ ID NO: 5264978 - DNA, 25 bp, Homo sapien
ggcctgtgataaatgttgagtaaca

SEQ ID NO: 5264979 - DNA, 25 bp, Homo sapien
cctgtgataaatgttgagtaacatt

SEQ ID NO: 5264980 - DNA, 25 bp, Homo sapien
ttaggcctgtgataaatgttgagta

SEQ ID NO: 5264981 - DNA, 25 bp, Homo sapien
gacgttgagcctctttctcgggcaa

SEQ ID NO: 5264982 - DNA, 25 bp, Homo sapien
caggccgtacgaattttcccctgtg

SEQ ID NO: 5264983 - DNA, 25 bp, Homo sapien
cagaggttctgttgattggcatttc

SEQ ID NO: 5264984 - DNA, 25 bp, Homo sapien
cttctttgatgaggcctccgttcca

SEQ ID NO: 5264985 - DNA, 25 bp, Homo sapien
ggtgaacgagaatttggatctcttc

SEQ ID NO: 5264986 - DNA, 25 bp, Homo sapien
ctcttcccacttgggtttgtgcgaa

SEQ ID NO: 5264987 - DNA, 25 bp, Homo sapien
gggtttgtgcgaacagtgacaccag

SEQ ID NO: 5264988 - DNA, 25 bp, Homo sapien
tccatctgtggtgaacgagaatttg

SEQ ID NO: 5264989 - DNA, 25 bp, Homo sapien
cagactagactcacacttagtttta

SEQ ID NO: 5264990 - DNA, 25 bp, Homo sapien
ggcaggaaccctaatccctcatctg

SEQ ID NO: 5264991 - DNA, 25 bp, Homo sapien
ggctgatcatggttccaggatggtc

SEQ ID NO: 5264992 - DNA, 25 bp, Homo sapien
tgccacaggaatgggtgccccaggt

SEQ ID NO: 5264993 - DNA, 25 bp, Homo sapien
tgtgttatttccacctcgccgagga

SEQ ID NO: 5264994 - DNA, 25 bp, Homo sapien
gaataagctccttctcagacctcag

SEQ ID NO: 5264995 - DNA, 25 bp, Homo sapien
tgagatctttgctccctccatcggc

SEQ ID NO: 5264996 - DNA, 25 bp, Homo sapien
tcggcgcaaccgatgatggtattac

SEQ ID NO: 5264997 - DNA, 25 bp, Homo sapien
ggtcccgtgaagtacagacagctgt

SEQ ID NO: 5264998 - DNA, 25 bp, Homo sapien
ggaacaagcctcgtggacatcatgg

SEQ ID NO: 5264999 - DNA, 25 bp, Homo sapien
tgctgcctcgagagtgtggattccc

SEQ ID NO: 5265000 - DNA, 25 bp, Homo sapien
gatcgtagtaagacaggaacaagcc

SEQ ID NO: 5265001 - DNA, 25 bp, Homo sapien
tttgttcaaatacaagagcgaccat

SEQ ID NO: 5265002 - DNA, 25 bp, Homo sapien
tgcccatctgtgacgctgcaaggcg

SEQ ID NO: 5265003 - DNA, 25 bp, Homo sapien
atcagtcctacaccttggcagcagt

SEQ ID NO: 5265004 - DNA, 25 bp, Homo sapien
ttgtctcctggtcacgagagccctg

SEQ ID NO: 5265005 - DNA, 25 bp, Homo sapien
gaatatccgagtgggaagccagagt

SEQ ID NO: 5265006 - DNA, 25 bp, Homo sapien
gtttgcagagaagcttcgtgtgtgc

SEQ ID NO: 5265007 - DNA, 25 bp, Homo sapien
ctcattaacaatggccgtgtgctgc

SEQ ID NO: 5265008 - DNA, 25 bp, Homo sapien
tgctgctgaatatccgagtgggaag

SEQ ID NO: 5265009 - DNA, 25 bp, Homo sapien
cgtagaacctcgtccagctctgagt

SEQ ID NO: 5265010 - DNA, 25 bp, Homo sapien
cctggaaccgtagaacctcgtccag

SEQ ID NO: 5265011 - DNA, 25 bp, Homo sapien
aaccgtagaacctcgtccagctctg

SEQ ID NO: 5265012 - DNA, 25 bp, Homo sapien
agaacctcgtccagctctgagtcag

SEQ ID NO: 5265013 - DNA, 25 bp, Homo sapien
gatgtcaggaacacacgcgtgaaca

SEQ ID NO: 5265014 - DNA, 25 bp, Homo sapien
ggtgtcaatgtgttccccgcaaatc

SEQ ID NO: 5265015 - DNA, 25 bp, Homo sapien
acagcaatgctgtgggtgtcctcag

SEQ ID NO: 5265016 - DNA, 25 bp, Homo sapien
tgcaggaagtggctcacagcaatgc

SEQ ID NO: 5265017 - DNA, 25 bp, Homo sapien
agcgtaggccctgggttgaagcctc

SEQ ID NO: 5265018 - DNA, 25 bp, Homo sapien
gaataaacaggttcgtgtccccata

SEQ ID NO: 5265019 - DNA, 25 bp, Homo sapien
ataaacaggttcgtgtccccatagg

SEQ ID NO: 5265020 - DNA, 25 bp, Homo sapien
ctaagcgtaggccctgggttgaagc

SEQ ID NO: 5265021 - DNA, 25 bp, Homo sapien
gctggcccccagcagcccgctcagc

SEQ ID NO: 5265022 - DNA, 25 bp, Homo sapien
tggcttggcagctggcccccagcag

SEQ ID NO: 5265023 - DNA, 25 bp, Homo sapien
ctggcttggcagctggcccccagca

SEQ ID NO: 5265024 - DNA, 25 bp, Homo sapien
ggcccccagcagcccgctcagccat

SEQ ID NO: 5265025 - DNA, 25 bp, Homo sapien
tggtgttgcaaagactgaagacatt

SEQ ID NO: 5265026 - DNA, 25 bp, Homo sapien
gtcaagctgctcaagtggtgttgca

SEQ ID NO: 5265027 - DNA, 25 bp, Homo sapien
tcaagctgctcaagtggtgttgcaa

SEQ ID NO: 5265028 - DNA, 25 bp, Homo sapien
ggagactgaaagccctctgaaggct

SEQ ID NO: 5265029 - DNA, 25 bp, Homo sapien
tggagactgaaagccctctgaaggc

SEQ ID NO: 5265030 - DNA, 25 bp, Homo sapien
tcttcacctgacgcgcccgcgtccc

SEQ ID NO: 5265031 - DNA, 25 bp, Homo sapien
cgcccgcgtcccccagtgcccaacg

SEQ ID NO: 5265032 - DNA, 25 bp, Homo sapien
cgcgtcccccagtgcccaacgggcg

SEQ ID NO: 5265033 - DNA, 25 bp, Homo sapien
tcccccagtgcccaacgggcgcgcc

SEQ ID NO: 5265034 - DNA, 25 bp, Homo sapien
ccccacctgacgcgcccgcggccca

SEQ ID NO: 5265035 - DNA, 25 bp, Homo sapien
gaccccacctgacgcgcccgcggcc

SEQ ID NO: 5265036 - DNA, 25 bp, Homo sapien
cccacctgacgcgcccgcggcccat

SEQ ID NO: 5265037 - DNA, 25 bp, Homo sapien
cagaccccacctgacgcgcccgcgg

SEQ ID NO: 5265038 - DNA, 25 bp, Homo sapien
agctccctgaatgaaccctccacac

SEQ ID NO: 5265039 - DNA, 25 bp, Homo sapien
ctgactcgcccgcagctccctgaat

SEQ ID NO: 5265040 - DNA, 25 bp, Homo sapien
gcccgcagctccctgaatgaaccct

SEQ ID NO: 5265041 - DNA, 25 bp, Homo sapien
gactcgcccgcagctccctgaatga

SEQ ID NO: 5265042 - DNA, 25 bp, Homo sapien
gagcccggagggcaaacgccggcag

SEQ ID NO: 5265043 - DNA, 25 bp, Homo sapien
cagcgaggcggacacaagctcgggc

SEQ ID NO: 5265044 - DNA, 25 bp, Homo sapien
caggagtcgtccccgaaacaccttg

SEQ ID NO: 5265045 - DNA, 25 bp, Homo sapien
ggcaaacgccggcaggagtcgtccc

SEQ ID NO: 5265046 - DNA, 25 bp, Homo sapien
gccatcttctgtcttaatccaactc

SEQ ID NO: 5265047 - DNA, 25 bp, Homo sapien
agccatcttctgtcttaatccaact

SEQ ID NO: 5265048 - DNA, 25 bp, Homo sapien
catcttctgtcttaatccaactcca

SEQ ID NO: 5265049 - DNA, 25 bp, Homo sapien
ctttcaagtttctgactacaagatt

SEQ ID NO: 5265050 - DNA, 25 bp, Homo sapien
tcaagtttctgactacaagattcac

SEQ ID NO: 5265051 - DNA, 25 bp, Homo sapien
ttcaagtttctgactacaagattca

SEQ ID NO: 5265052 - DNA, 25 bp, Homo sapien
caagtttctgactacaagattcaca

SEQ ID NO: 5265053 - DNA, 25 bp, Homo sapien
gccaggtggagccactgcctatgtg

SEQ ID NO: 5265054 - DNA, 25 bp, Homo sapien
ggagccactgcctatgtgggcccat

SEQ ID NO: 5265055 - DNA, 25 bp, Homo sapien
cttcttacacgaagggagcagcaga

SEQ ID NO: 5265056 - DNA, 25 bp, Homo sapien
agcagagggcggcaagagcaccaag

SEQ ID NO: 5265057 - DNA, 25 bp, Homo sapien
tttggatgcatattcatgctcttca

SEQ ID NO: 5265058 - DNA, 25 bp, Homo sapien
ctcttcattattgagtatttctcca

SEQ ID NO: 5265059 - DNA, 25 bp, Homo sapien
tatttctccatcttcgctatttaag

SEQ ID NO: 5265060 - DNA, 25 bp, Homo sapien
tctttttttggatgcatattcatgc

SEQ ID NO: 5265061 - DNA, 25 bp, Homo sapien
ggacatagatccatttttcatgata

SEQ ID NO: 5265062 - DNA, 25 bp, Homo sapien
tttatggacatagatccatttttca

SEQ ID NO: 5265063 - DNA, 25 bp, Homo sapien
tatggacatagatccatttttcatg

SEQ ID NO: 5265064 - DNA, 25 bp, Homo sapien
ttctttatggacatagatccatttt

SEQ ID NO: 5265065 - DNA, 25 bp, Homo sapien
taatgtgactccatattcaacagaa

SEQ ID NO: 5265066 - DNA, 25 bp, Homo sapien
ttaatgtgactccatattcaacaga

SEQ ID NO: 5265067 - DNA, 25 bp, Homo sapien
aatgtgactccatattcaacagaaa

SEQ ID NO: 5265068 - DNA, 25 bp, Homo sapien
atcttgaattgcacttgagaagtct

SEQ ID NO: 5265069 - DNA, 25 bp, Homo sapien
tcttgaattgcacttgagaagtcta

SEQ ID NO: 5265070 - DNA, 25 bp, Homo sapien
ttctcccaaggtgcaatagccatgc

SEQ ID NO: 5265071 - DNA, 25 bp, Homo sapien
tatcttgaattgcacttgagaagtc

SEQ ID NO: 5265072 - DNA, 25 bp, Homo sapien
gaatcattttaagatgctcgaattt

SEQ ID NO: 5265073 - DNA, 25 bp, Homo sapien
tttaagatgctcgaatttgtcctgc

SEQ ID NO: 5265074 - DNA, 25 bp, Homo sapien
taagatgctcgaatttgtcctgcag

SEQ ID NO: 5265075 - DNA, 25 bp, Homo sapien
cattttaagatgctcgaatttgtcc

SEQ ID NO: 5265076 - DNA, 25 bp, Homo sapien
agagcaactctcacagatagggatc

SEQ ID NO: 5265077 - DNA, 25 bp, Homo sapien
agcaactctcacagatagggatcca

SEQ ID NO: 5265078 - DNA, 25 bp, Homo sapien
gaatgttgaaaactcagagagaaga

SEQ ID NO: 5265079 - DNA, 25 bp, Homo sapien
agataatgggagaatgttgaaaact

SEQ ID NO: 5265080 - DNA, 25 bp, Homo sapien
cctctctgtggcatttaatgataag

SEQ ID NO: 5265081 - DNA, 25 bp, Homo sapien
ttatctttacctctctgtggcattt

SEQ ID NO: 5265082 - DNA, 25 bp, Homo sapien
tacctctctgtggcatttaatgata

SEQ ID NO: 5265083 - DNA, 25 bp, Homo sapien
tatctttacctctctgtggcattta

SEQ ID NO: 5265084 - DNA, 25 bp, Homo sapien
tactctgacgttagaataatccttg

SEQ ID NO: 5265085 - DNA, 25 bp, Homo sapien
ggaagagtcagcatcgctgcactta

SEQ ID NO: 5265086 - DNA, 25 bp, Homo sapien
ggagcatgggtcattaatcttgtca

SEQ ID NO: 5265087 - DNA, 25 bp, Homo sapien
gttttccttgtctgcggccattgtg

SEQ ID NO: 5265088 - DNA, 25 bp, Homo sapien
atgactcagggccttatccatacct

SEQ ID NO: 5265089 - DNA, 25 bp, Homo sapien
ttatccataccttcaagtttgctct

SEQ ID NO: 5265090 - DNA, 25 bp, Homo sapien
tcagggccttatccataccttcaag

SEQ ID NO: 5265091 - DNA, 25 bp, Homo sapien
ggccttatccataccttcaagtttg

SEQ ID NO: 5265092 - DNA, 25 bp, Homo sapien
tcagttgtttagttacaagatagaa

SEQ ID NO: 5265093 - DNA, 25 bp, Homo sapien
aattaacttctaacatacaaagcct

SEQ ID NO: 5265094 - DNA, 25 bp, Homo sapien
accatctacgctaagacataaaatt

SEQ ID NO: 5265095 - DNA, 25 bp, Homo sapien
tggccttgtaagaaagcaaattaac

SEQ ID NO: 5265096 - DNA, 25 bp, Homo sapien
catactaggtatactcaatgaatat

SEQ ID NO: 5265097 - DNA, 25 bp, Homo sapien
ttaaagcatgttacatactaggtat

SEQ ID NO: 5265098 - DNA, 25 bp, Homo sapien
ttcccattagatgcccaagtgctgg

SEQ ID NO: 5265099 - DNA, 25 bp, Homo sapien
ttttcccattagatgcccaagtgct

SEQ ID NO: 5265100 - DNA, 25 bp, Homo sapien
ctggatacaggtcttgataggtctc

SEQ ID NO: 5265101 - DNA, 25 bp, Homo sapien
tacaggtcttgataggtctcttgat

SEQ ID NO: 5265102 - DNA, 25 bp, Homo sapien
ggtcttgataggtctcttgatgtca

SEQ ID NO: 5265103 - DNA, 25 bp, Homo sapien
gatacaggtcttgataggtctcttg

SEQ ID NO: 5265104 - DNA, 25 bp, Homo sapien
tgttaatattgtagaagtattccta

SEQ ID NO: 5265105 - DNA, 25 bp, Homo sapien
tgtattcctaattgtaatagctttg

SEQ ID NO: 5265106 - DNA, 25 bp, Homo sapien
tgcaagtgttaccactattgtgtgt

SEQ ID NO: 5265107 - DNA, 25 bp, Homo sapien
aacaccaccatcattttgcaagtgt

SEQ ID NO: 5265108 - DNA, 25 bp, Homo sapien
aagtccacattgagatatgagaccc

SEQ ID NO: 5265109 - DNA, 25 bp, Homo sapien
catcgggagttagtaaaagtccaca

SEQ ID NO: 5265110 - DNA, 25 bp, Homo sapien
atgagacccaccactggctggacgc

SEQ ID NO: 5265111 - DNA, 25 bp, Homo sapien
gaaactgaggcatcgggagttagta

SEQ ID NO: 5265112 - DNA, 25 bp, Homo sapien
cttcttgcacaccttcagaactgtg

SEQ ID NO: 5265113 - DNA, 25 bp, Homo sapien
accatgcttcttgcacaccttcaga

SEQ ID NO: 5265114 - DNA, 25 bp, Homo sapien
gcccacctagttctagctctcttaa

SEQ ID NO: 5265115 - DNA, 25 bp, Homo sapien
tctagctctcttaattcccacaaga

SEQ ID NO: 5265116 - DNA, 25 bp, Homo sapien
caatttgaataactccctgcgggtg

SEQ ID NO: 5265117 - DNA, 25 bp, Homo sapien
tgttcccaaagcctcgtggctagta

SEQ ID NO: 5265118 - DNA, 25 bp, Homo sapien
gagccagatgatctcaacaacctga

SEQ ID NO: 5265119 - DNA, 25 bp, Homo sapien
caaagtcggcaaattgttgaaaggg

SEQ ID NO: 5265120 - DNA, 25 bp, Homo sapien
tcctgaggtagaaagagggtcacat

SEQ ID NO: 5265121 - DNA, 25 bp, Homo sapien
catgctggataagaggtacctgggc

SEQ ID NO: 5265122 - DNA, 25 bp, Homo sapien
tgggctctccacttacaagaagaga

SEQ ID NO: 5265123 - DNA, 25 bp, Homo sapien
gaagcctaagagtatgactatcctg

SEQ ID NO: 5265124 - DNA, 25 bp, Homo sapien
gatttctggatggaagctgctgccg

SEQ ID NO: 5265125 - DNA, 25 bp, Homo sapien
tgcggagattcaccccagctgggtg

SEQ ID NO: 5265126 - DNA, 25 bp, Homo sapien
aatactttgagtgcacagctctggc

SEQ ID NO: 5265127 - DNA, 25 bp, Homo sapien
ctgtgtcccctgtcaagaagctcct

SEQ ID NO: 5265128 - DNA, 25 bp, Homo sapien
gagttccaagtttaatctctgttgt

SEQ ID NO: 5265129 - DNA, 25 bp, Homo sapien
aggaacgctggccatagtgacaacg

SEQ ID NO: 5265130 - DNA, 25 bp, Homo sapien
catatttgctagaaaatgttcttcc

SEQ ID NO: 5265131 - DNA, 25 bp, Homo sapien
tctgacagcgttcctgacactacac

SEQ ID NO: 5265132 - DNA, 25 bp, Homo sapien
ggaacacatgcaagaatctgcaagt

SEQ ID NO: 5265133 - DNA, 25 bp, Homo sapien
ataatatttgtgtagacttggaaca

SEQ ID NO: 5265134 - DNA, 25 bp, Homo sapien
tggaacacatgcaagaatctgcaag

SEQ ID NO: 5265135 - DNA, 25 bp, Homo sapien
cttggaacacatgcaagaatctgca

SEQ ID NO: 5265136 - DNA, 25 bp, Homo sapien
gtcttggccttttcttccactgttg

SEQ ID NO: 5265137 - DNA, 25 bp, Homo sapien
cagatgacaatcaaccatagagttt

SEQ ID NO: 5265138 - DNA, 25 bp, Homo sapien
tgacaatcaaccatagagtttgaag

SEQ ID NO: 5265139 - DNA, 25 bp, Homo sapien
acaacagatgacaatcaaccataga

SEQ ID NO: 5265140 - DNA, 25 bp, Homo sapien
catagagtttgaagcattgtagcag

SEQ ID NO: 5265141 - DNA, 25 bp, Homo sapien
ctgcccaagccaccacaccctcagg

SEQ ID NO: 5265142 - DNA, 25 bp, Homo sapien
ccaagccaccacaccctcagggtgc

SEQ ID NO: 5265143 - DNA, 25 bp, Homo sapien
cggctgcccaagccaccacaccctc

SEQ ID NO: 5265144 - DNA, 25 bp, Homo sapien
caagccaccacaccctcagggtgca

SEQ ID NO: 5265145 - DNA, 25 bp, Homo sapien
tcttgtgggaagcaatcgcaagctt

SEQ ID NO: 5265146 - DNA, 25 bp, Homo sapien
caaaggctccctaaatgtgtatctg

SEQ ID NO: 5265147 - DNA, 25 bp, Homo sapien
gacagagtctatattcggccagcaa

SEQ ID NO: 5265148 - DNA, 25 bp, Homo sapien
tgcctacaacccgaatggagaatga

SEQ ID NO: 5265149 - DNA, 25 bp, Homo sapien
cagcaatcatgtggtcacctaggca

SEQ ID NO: 5265150 - DNA, 25 bp, Homo sapien
tctggaagcaacactagtttcacct

SEQ ID NO: 5265151 - DNA, 25 bp, Homo sapien
gaagacacctcttggagtttcagct

SEQ ID NO: 5265152 - DNA, 25 bp, Homo sapien
cactagccaaatggtcctgggatcc

SEQ ID NO: 5265153 - DNA, 25 bp, Homo sapien
taaaatgtgctcctagtcgcatagc

SEQ ID NO: 5265154 - DNA, 25 bp, Homo sapien
tctgttccaggagctttcgatgcgc

SEQ ID NO: 5265155 - DNA, 25 bp, Homo sapien
taaacattatactggtctggtccct

SEQ ID NO: 5265156 - DNA, 25 bp, Homo sapien
taaggccagtgctaactactacaga

SEQ ID NO: 5265157 - DNA, 25 bp, Homo sapien
cattgcccagttgtgatagtctcag

SEQ ID NO: 5265158 - DNA, 25 bp, Homo sapien
aaagcaattatctttaccccatggg

SEQ ID NO: 5265159 - DNA, 25 bp, Homo sapien
gcggattatacgagtcattgcccag

SEQ ID NO: 5265160 - DNA, 25 bp, Homo sapien
ccccagaggacttgtgtgcggatta

SEQ ID NO: 5265161 - DNA, 25 bp, Homo sapien
tagttctattataattgagacactt

SEQ ID NO: 5265162 - DNA, 25 bp, Homo sapien
gttctattataattgagacactttt

SEQ ID NO: 5265163 - DNA, 25 bp, Homo sapien
tttagttctattataattgagacac

SEQ ID NO: 5265164 - DNA, 25 bp, Homo sapien
ttataagttgtaaatctctatctac

SEQ ID NO: 5265165 - DNA, 25 bp, Homo sapien
ggaagtcagaggaccgccccactga

SEQ ID NO: 5265166 - DNA, 25 bp, Homo sapien
actggtctcagaacaagggacttct

SEQ ID NO: 5265167 - DNA, 25 bp, Homo sapien
ttgttcgtctcaagttttctgaatc

SEQ ID NO: 5265168 - DNA, 25 bp, Homo sapien
tcttccagaagttgcagaactggtc

SEQ ID NO: 5265169 - DNA, 25 bp, Homo sapien
gtctcctccagtgggaacaccagtg

SEQ ID NO: 5265170 - DNA, 25 bp, Homo sapien
tttccctgctggtctcctccagtgg

SEQ ID NO: 5265171 - DNA, 25 bp, Homo sapien
tcacactctgtcgtggctttccctg

SEQ ID NO: 5265172 - DNA, 25 bp, Homo sapien
ctggtctcctccagtgggaacacca

SEQ ID NO: 5265173 - DNA, 25 bp, Homo sapien
gacactgttccggtgatctggagaa

SEQ ID NO: 5265174 - DNA, 25 bp, Homo sapien
cactgttccggtgatctggagaaag

SEQ ID NO: 5265175 - DNA, 25 bp, Homo sapien
atgagcagacactgttccggtgatc

SEQ ID NO: 5265176 - DNA, 25 bp, Homo sapien
gcagacactgttccggtgatctgga

SEQ ID NO: 5265177 - DNA, 25 bp, Homo sapien
ccagtctggaacaaacgggattcag

SEQ ID NO: 5265178 - DNA, 25 bp, Homo sapien
tatatttttcataggtccaagccta

SEQ ID NO: 5265179 - DNA, 25 bp, Homo sapien
ggactgtacccctgctctgagaaat

SEQ ID NO: 5265180 - DNA, 25 bp, Homo sapien
tctttatagtgctggtgactgccaa

SEQ ID NO: 5265181 - DNA, 25 bp, Homo sapien
ctccttggccttcttacaggtgtac

SEQ ID NO: 5265182 - DNA, 25 bp, Homo sapien
tccttggccttcttacaggtgtaca

SEQ ID NO: 5265183 - DNA, 25 bp, Homo sapien
ccttggccttcttacaggtgtacag

SEQ ID NO: 5265184 - DNA, 25 bp, Homo sapien
tgcgcaccttgagggtcacacagtc

SEQ ID NO: 5265185 - DNA, 25 bp, Homo sapien
tcctctcgatgaccgaagtggtgct

SEQ ID NO: 5265186 - DNA, 25 bp, Homo sapien
agaaggtgtcagactcggccaaggc

SEQ ID NO: 5265187 - DNA, 25 bp, Homo sapien
ccacttgatgatgcgggcgttcctc

SEQ ID NO: 5265188 - DNA, 25 bp, Homo sapien
gccgggacactggagggcgccgcgg

SEQ ID NO: 5265189 - DNA, 25 bp, Homo sapien
cgggacactggagggcgccgcggac

SEQ ID NO: 5265190 - DNA, 25 bp, Homo sapien
ccgggacactggagggcgccgcgga

SEQ ID NO: 5265191 - DNA, 25 bp, Homo sapien
cgccgcggggccaggagtggtcggg

SEQ ID NO: 5265192 - DNA, 25 bp, Homo sapien
cggccttgccctcgtctcccgtccg

SEQ ID NO: 5265193 - DNA, 25 bp, Homo sapien
caggagtggtcgggaccgtctccgg

SEQ ID NO: 5265194 - DNA, 25 bp, Homo sapien
tgccctcgtctcccgtccggggcac

SEQ ID NO: 5265195 - DNA, 25 bp, Homo sapien
ccggcccctggaagagcttcttcac

SEQ ID NO: 5265196 - DNA, 25 bp, Homo sapien
ccgatcctcgcacgaattcgcattt

SEQ ID NO: 5265197 - DNA, 25 bp, Homo sapien
ggcgcccgatcctcgcacgaattcg

SEQ ID NO: 5265198 - DNA, 25 bp, Homo sapien
ccgtcggcgcccgatcctcgcacga

SEQ ID NO: 5265199 - DNA, 25 bp, Homo sapien
cggtagatgatcagcgagtccggtc

SEQ ID NO: 5265200 - DNA, 25 bp, Homo sapien
ctgccggtagatgatcagcgagtcc

SEQ ID NO: 5265201 - DNA, 25 bp, Homo sapien
gtctcaacggcttccgcgcaatagc

SEQ ID NO: 5265202 - DNA, 25 bp, Homo sapien
tagatgatcagcgagtccggtctca

SEQ ID NO: 5265203 - DNA, 25 bp, Homo sapien
ctgcgcgccaccggggccggggcgc

SEQ ID NO: 5265204 - DNA, 25 bp, Homo sapien
tgcgcgccaccggggccggggcgcg

SEQ ID NO: 5265205 - DNA, 25 bp, Homo sapien
ccgctgccctcggaagcgacgcccc

SEQ ID NO: 5265206 - DNA, 25 bp, Homo sapien
ttgatcgcccccgggccgctgccct

SEQ ID NO: 5265207 - DNA, 25 bp, Homo sapien
gccagtccccggccgaccccgcaca

SEQ ID NO: 5265208 - DNA, 25 bp, Homo sapien
cagtccccggccgaccccgcacata

SEQ ID NO: 5265209 - DNA, 25 bp, Homo sapien
cgctcgttcgggggcgcgctcaggg

SEQ ID NO: 5265210 - DNA, 25 bp, Homo sapien
gagccgctcgttcgggggcgcgctc

SEQ ID NO: 5265211 - DNA, 25 bp, Homo sapien
aggagccgctcgttcgggggcgcgc

SEQ ID NO: 5265212 - DNA, 25 bp, Homo sapien
gaaggagccgctcgttcgggggcgc

SEQ ID NO: 5265213 - DNA, 25 bp, Homo sapien
cttccggcggcgctgccaaccgcct

SEQ ID NO: 5265214 - DNA, 25 bp, Homo sapien
cggcgctgccaaccgcctggaggac

SEQ ID NO: 5265215 - DNA, 25 bp, Homo sapien
ggcggcgctgccaaccgcctggagg

SEQ ID NO: 5265216 - DNA, 25 bp, Homo sapien
gctgccaaccgcctggaggacgctg

SEQ ID NO: 5265217 - DNA, 25 bp, Homo sapien
gatgatcatctgtatggccactcta

SEQ ID NO: 5265218 - DNA, 25 bp, Homo sapien
tttacatctctggatcgaaccaggg

SEQ ID NO: 5265219 - DNA, 25 bp, Homo sapien
gctcttgtaagggtggcaagcctct

SEQ ID NO: 5265220 - DNA, 25 bp, Homo sapien
ggtagacctatgtaggacctcaggt

SEQ ID NO: 5265221 - DNA, 25 bp, Homo sapien
tctctcgtgctgtagggttcccttg

SEQ ID NO: 5265222 - DNA, 25 bp, Homo sapien
aaactccatctctcgtgctgtaggg

SEQ ID NO: 5265223 - DNA, 25 bp, Homo sapien
tccatctctcgtgctgtagggttcc

SEQ ID NO: 5265224 - DNA, 25 bp, Homo sapien
taaaactccatctctcgtgctgtag

SEQ ID NO: 5265225 - DNA, 25 bp, Homo sapien
gacacaatttaaagcgttactccaa

SEQ ID NO: 5265226 - DNA, 25 bp, Homo sapien
cattacacttgaatattatactccc

SEQ ID NO: 5265227 - DNA, 25 bp, Homo sapien
ttatactcccacagacacaatttaa

SEQ ID NO: 5265228 - DNA, 25 bp, Homo sapien
atttaaagcgttactccaagacagt

SEQ ID NO: 5265229 - DNA, 25 bp, Homo sapien
cttttctcagggcacggatatgagc

SEQ ID NO: 5265230 - DNA, 25 bp, Homo sapien
tctgggtttactctgggagcagaag

SEQ ID NO: 5265231 - DNA, 25 bp, Homo sapien
tctggagcaataggaaccccaactc

SEQ ID NO: 5265232 - DNA, 25 bp, Homo sapien
gtcagaatggagggttattgtgacc

SEQ ID NO: 5265233 - DNA, 25 bp, Homo sapien
tcaggccctccctttcctcctcctc

SEQ ID NO: 5265234 - DNA, 25 bp, Homo sapien
ctttgcttttctcaggccctccctt

SEQ ID NO: 5265235 - DNA, 25 bp, Homo sapien
tcatgatgtggtcatcatcaacttg

SEQ ID NO: 5265236 - DNA, 25 bp, Homo sapien
tctcatgatgtggtcatcatcaact

SEQ ID NO: 5265237 - DNA, 25 bp, Homo sapien
ttttctcatgatgtggtcatcatca

SEQ ID NO: 5265238 - DNA, 25 bp, Homo sapien
gccaattggcttattcgttgtttta

SEQ ID NO: 5265239 - DNA, 25 bp, Homo sapien
tctactgtgatgttaccatttccaa

SEQ ID NO: 5265240 - DNA, 25 bp, Homo sapien
tactgtgatgttaccatttccaaaa

SEQ ID NO: 5265241 - DNA, 25 bp, Homo sapien
ctgtgatgttaccatttccaaaatt

SEQ ID NO: 5265242 - DNA, 25 bp, Homo sapien
cttctactgtgatgttaccatttcc

SEQ ID NO: 5265243 - DNA, 25 bp, Homo sapien
cgctgctggttgttatgaccaccat

SEQ ID NO: 5265244 - DNA, 25 bp, Homo sapien
ctgctggttgttatgaccaccatct

SEQ ID NO: 5265245 - DNA, 25 bp, Homo sapien
ggcgctgctggttgttatgaccacc

SEQ ID NO: 5265246 - DNA, 25 bp, Homo sapien
tcttttctccttggccagtgaccat

SEQ ID NO: 5265247 - DNA, 25 bp, Homo sapien
ttgttcgtgcccattaaacaggtaa

SEQ ID NO: 5265248 - DNA, 25 bp, Homo sapien
tgttcgtgcccattaaacaggtaat

SEQ ID NO: 5265249 - DNA, 25 bp, Homo sapien
cctggaatgctcagcatgaggggcc

SEQ ID NO: 5265250 - DNA, 25 bp, Homo sapien
tgggagaagccacagtgccacgctt

SEQ ID NO: 5265251 - DNA, 25 bp, Homo sapien
tggaatgctcagcatgaggggccac

SEQ ID NO: 5265252 - DNA, 25 bp, Homo sapien
gccacgcttcttagccacatgaggc

SEQ ID NO: 5265253 - DNA, 25 bp, Homo sapien
tccaaggcatgtctcagggggtccg

SEQ ID NO: 5265254 - DNA, 25 bp, Homo sapien
ctaagtccaaggcatgtctcagggg

SEQ ID NO: 5265255 - DNA, 25 bp, Homo sapien
agggggtccgggctcctgatcctct

SEQ ID NO: 5265256 - DNA, 25 bp, Homo sapien
agtccaaggcatgtctcagggggtc

SEQ ID NO: 5265257 - DNA, 25 bp, Homo sapien
gatggggcattgtaatcttcctggc

SEQ ID NO: 5265258 - DNA, 25 bp, Homo sapien
gctttaaggcccatgaaaagcttag

SEQ ID NO: 5265259 - DNA, 25 bp, Homo sapien
atgaaaagcttaggcaaaactctgg

SEQ ID NO: 5265260 - DNA, 25 bp, Homo sapien
taaggcccatgaaaagcttaggcaa

SEQ ID NO: 5265261 - DNA, 25 bp, Homo sapien
gatttcttcccagcggcactctctg

SEQ ID NO: 5265262 - DNA, 25 bp, Homo sapien
agcggcactctctgtttcaggagct

SEQ ID NO: 5265263 - DNA, 25 bp, Homo sapien
cccagcggcactctctgtttcagga

SEQ ID NO: 5265264 - DNA, 25 bp, Homo sapien
ttcaggagcttagcggcagcgcctg

SEQ ID NO: 5265265 - DNA, 25 bp, Homo sapien
gctttattggctttatgagttaagt

SEQ ID NO: 5265266 - DNA, 25 bp, Homo sapien
cagggactgtgtacatggaatagga

SEQ ID NO: 5265267 - DNA, 25 bp, Homo sapien
gggctttattggctttatgagttaa

SEQ ID NO: 5265268 - DNA, 25 bp, Homo sapien
gactgtgtacatggaataggaggcc

SEQ ID NO: 5265269 - DNA, 25 bp, Homo sapien
tcaggacaaagccacaaaaatggga

SEQ ID NO: 5265270 - DNA, 25 bp, Homo sapien
cactatattcatggccttccctcag

SEQ ID NO: 5265271 - DNA, 25 bp, Homo sapien
tcagtgaagttttagcaaccccgaa

SEQ ID NO: 5265272 - DNA, 25 bp, Homo sapien
aaatgggaagcttacattgtgctga

SEQ ID NO: 5265273 - DNA, 25 bp, Homo sapien
tctgagcgagtagggatgcacagcc

SEQ ID NO: 5265274 - DNA, 25 bp, Homo sapien
cacgcagtgcttcaggagaggagtc

SEQ ID NO: 5265275 - DNA, 25 bp, Homo sapien
ggcatagggtgtagagttttagatc

SEQ ID NO: 5265276 - DNA, 25 bp, Homo sapien
gggtcaccctcacgcagtgcttcag

SEQ ID NO: 5265277 - DNA, 25 bp, Homo sapien
taggttagcggaggtacaaactgcc

SEQ ID NO: 5265278 - DNA, 25 bp, Homo sapien
gaaagcctgagctgtatgctgcaaa

SEQ ID NO: 5265279 - DNA, 25 bp, Homo sapien
gctttcctgtggaagcatcacatgg

SEQ ID NO: 5265280 - DNA, 25 bp, Homo sapien
aaacctggagtcaatggatgtacgc

SEQ ID NO: 5265281 - DNA, 25 bp, Homo sapien
tttcgctctatgctgtgccacgggc

SEQ ID NO: 5265282 - DNA, 25 bp, Homo sapien
aaaggtcactggaccatttcgctct

SEQ ID NO: 5265283 - DNA, 25 bp, Homo sapien
tataccacgaattgcccaagtgtct

SEQ ID NO: 5265284 - DNA, 25 bp, Homo sapien
tgggagtgaccgcatacactatacc

SEQ ID NO: 5265285 - DNA, 25 bp, Homo sapien
gatactcctggtgtgcacataagaa

SEQ ID NO: 5265286 - DNA, 25 bp, Homo sapien
ttgatactcctggtgtgcacataag

SEQ ID NO: 5265287 - DNA, 25 bp, Homo sapien
ggacttgatactcctggtgtgcaca

SEQ ID NO: 5265288 - DNA, 25 bp, Homo sapien
gacttgatactcctggtgtgcacat

SEQ ID NO: 5265289 - DNA, 25 bp, Homo sapien
taaccaagcctagaacacctgggtg

SEQ ID NO: 5265290 - DNA, 25 bp, Homo sapien
ttaatcatcgggaacctttctgggc

SEQ ID NO: 5265291 - DNA, 25 bp, Homo sapien
gagagtctcctaaaggcctggaacg

SEQ ID NO: 5265292 - DNA, 25 bp, Homo sapien
gcagttcagctacacatctgtggga

SEQ ID NO: 5265293 - DNA, 25 bp, Homo sapien
tctctctgggtgaagataacatgtg

SEQ ID NO: 5265294 - DNA, 25 bp, Homo sapien
tgcttaaggacacaaacatacgtag

SEQ ID NO: 5265295 - DNA, 25 bp, Homo sapien
tagcaggacaaacagtgcaatgtgc

SEQ ID NO: 5265296 - DNA, 25 bp, Homo sapien
cgtaaggcagtgaggagcaaatagc

SEQ ID NO: 5265297 - DNA, 25 bp, Homo sapien
gcaaatattgggtcagcgagtgtct

SEQ ID NO: 5265298 - DNA, 25 bp, Homo sapien
tccttgtccaaacggagctgtaaag

SEQ ID NO: 5265299 - DNA, 25 bp, Homo sapien
catttactgaagaggaacactgtgg

SEQ ID NO: 5265300 - DNA, 25 bp, Homo sapien
gaaagttggctctgaagtcaccctg

SEQ ID NO: 5265301 - DNA, 25 bp, Homo sapien
gagacaagtctaccatgtcaccgta

SEQ ID NO: 5265302 - DNA, 25 bp, Homo sapien
tacatggccagatcaaatgcttagc

SEQ ID NO: 5265303 - DNA, 25 bp, Homo sapien
ccgtaagtttatgctactgctggaa

SEQ ID NO: 5265304 - DNA, 25 bp, Homo sapien
tgaacaaatgtagccccataaggaa

SEQ ID NO: 5265305 - DNA, 25 bp, Homo sapien
tagtaaatcctgtcagtgtagaaat

SEQ ID NO: 5265306 - DNA, 25 bp, Homo sapien
atcctgtcagtgtagaaataatttt

SEQ ID NO: 5265307 - DNA, 25 bp, Homo sapien
ttgtaattctcaaagaagaaaatag

SEQ ID NO: 5265308 - DNA, 25 bp, Homo sapien
gtaaatcctgtcagtgtagaaataa

SEQ ID NO: 5265309 - DNA, 25 bp, Homo sapien
tgaaaattcaaatccccaggctgct

SEQ ID NO: 5265310 - DNA, 25 bp, Homo sapien
catggttacgtagttggctggaaaa

SEQ ID NO: 5265311 - DNA, 25 bp, Homo sapien
ccttcaaatgaatacagcgctgtca

SEQ ID NO: 5265312 - DNA, 25 bp, Homo sapien
tgccagtttgacctcgaagttttcc

SEQ ID NO: 5265313 - DNA, 25 bp, Homo sapien
tctgaggcagaaaccgagaccttgc

SEQ ID NO: 5265314 - DNA, 25 bp, Homo sapien
tagcacatgcttctggttacaatcg

SEQ ID NO: 5265315 - DNA, 25 bp, Homo sapien
ggctggcagaaaccacaacagtctg

SEQ ID NO: 5265316 - DNA, 25 bp, Homo sapien
tatgagctgcccagactatggtgtt

SEQ ID NO: 5265317 - DNA, 25 bp, Homo sapien
ttgaagattgcagcccagttatatt

SEQ ID NO: 5265318 - DNA, 25 bp, Homo sapien
gcttgaagattgcagcccagttata

SEQ ID NO: 5265319 - DNA, 25 bp, Homo sapien
tgggcttgaagattgcagcccagtt

SEQ ID NO: 5265320 - DNA, 25 bp, Homo sapien
gattgcagcccagttatattttgct

SEQ ID NO: 5265321 - DNA, 25 bp, Homo sapien
tactgaggctaagatgtgtgttgac

SEQ ID NO: 5265322 - DNA, 25 bp, Homo sapien
ggttctgggtaatccctgataactg

SEQ ID NO: 5265323 - DNA, 25 bp, Homo sapien
tccctgccctcacaatcaggtgttg

SEQ ID NO: 5265324 - DNA, 25 bp, Homo sapien
gggccgggatctcacatttctcctt

SEQ ID NO: 5265325 - DNA, 25 bp, Homo sapien
agaatgctgacgctggagggtccaa

SEQ ID NO: 5265326 - DNA, 25 bp, Homo sapien
tctgcagcgatggtaagcaaacatg

SEQ ID NO: 5265327 - DNA, 25 bp, Homo sapien
cagcctaaattgtgtgtagtgccca

SEQ ID NO: 5265328 - DNA, 25 bp, Homo sapien
cagattcaggagctcgcacgtggag

SEQ ID NO: 5265329 - DNA, 25 bp, Homo sapien
cactgacggttagctcctatccggg

SEQ ID NO: 5265330 - DNA, 25 bp, Homo sapien
taagtaagacagattgaaggaccat

SEQ ID NO: 5265331 - DNA, 25 bp, Homo sapien
aaatgtggaggagatcacatgctcc

SEQ ID NO: 5265332 - DNA, 25 bp, Homo sapien
tagctttgtgactccaatgacgaaa

SEQ ID NO: 5265333 - DNA, 25 bp, Homo sapien
gctggaaagtccaggatagagctta

SEQ ID NO: 5265334 - DNA, 25 bp, Homo sapien
atagctggaaagtccaggatagagc

SEQ ID NO: 5265335 - DNA, 25 bp, Homo sapien
tccaggatagagcttatattcattt

SEQ ID NO: 5265336 - DNA, 25 bp, Homo sapien
gaaagtccaggatagagcttatatt

SEQ ID NO: 5265337 - DNA, 25 bp, Homo sapien
caactgtatttgaattgcaacaaaa

SEQ ID NO: 5265338 - DNA, 25 bp, Homo sapien
tggactggtgcagatgactgctgtg

SEQ ID NO: 5265339 - DNA, 25 bp, Homo sapien
gagttcagctggactggtgcagatg

SEQ ID NO: 5265340 - DNA, 25 bp, Homo sapien
cagagttcagctggactggtgcaga

SEQ ID NO: 5265341 - DNA, 25 bp, Homo sapien
ccagagttcagctggactggtgcag

SEQ ID NO: 5265342 - DNA, 25 bp, Homo sapien
aacaatgcacacaaatccctcggtg

SEQ ID NO: 5265343 - DNA, 25 bp, Homo sapien
gaaaggtgctgtggaacatcatgaa

SEQ ID NO: 5265344 - DNA, 25 bp, Homo sapien
accacctgtgcaaggtcttagggag

SEQ ID NO: 5265345 - DNA, 25 bp, Homo sapien
tacaaaggcgtcagtatctgcaact

SEQ ID NO: 5265346 - DNA, 25 bp, Homo sapien
tccatccttggagaaatgcaatcac

SEQ ID NO: 5265347 - DNA, 25 bp, Homo sapien
tgcaatcacagaggacaaattatgt

SEQ ID NO: 5265348 - DNA, 25 bp, Homo sapien
taggaacctgatatcagggacagaa

SEQ ID NO: 5265349 - DNA, 25 bp, Homo sapien
tcagtgaaactacgaaggaggctta

SEQ ID NO: 5265350 - DNA, 25 bp, Homo sapien
caggccgcggtgtatctccaaataa

SEQ ID NO: 5265351 - DNA, 25 bp, Homo sapien
cataagctcggatatcttgacaata

SEQ ID NO: 5265352 - DNA, 25 bp, Homo sapien
tcttgcattgattcgttgtccttca

SEQ ID NO: 5265353 - DNA, 25 bp, Homo sapien
agatcttcggcttgagcaggccgcg

SEQ ID NO: 5265354 - DNA, 25 bp, Homo sapien
gcatgtgcgcacacacggtgtgtat

SEQ ID NO: 5265355 - DNA, 25 bp, Homo sapien
catagcacttcatatacactacttt

SEQ ID NO: 5265356 - DNA, 25 bp, Homo sapien
taatcattcatacatagcacttcat

SEQ ID NO: 5265357 - DNA, 25 bp, Homo sapien
tgtgcgcacacacggtgtgtatata

SEQ ID NO: 5265358 - DNA, 25 bp, Homo sapien
tcatcacactttcaattaaaatcac

SEQ ID NO: 5265359 - DNA, 25 bp, Homo sapien
ttttgaagtactattttctcatcac

SEQ ID NO: 5265360 - DNA, 25 bp, Homo sapien
gatacacacttaaaaccacatgttg

SEQ ID NO: 5265361 - DNA, 25 bp, Homo sapien
gaatatataaatgtactctgcaaat

SEQ ID NO: 5265362 - DNA, 25 bp, Homo sapien
ctaaagacacgcctgcaaagagtcc

SEQ ID NO: 5265363 - DNA, 25 bp, Homo sapien
cttgcagtacgtgaagacggcagcg

SEQ ID NO: 5265364 - DNA, 25 bp, Homo sapien
caaagagtccccttgacttgcagta

SEQ ID NO: 5265365 - DNA, 25 bp, Homo sapien
tcaatcaaacagctcccttctaaag

SEQ ID NO: 5265366 - DNA, 25 bp, Homo sapien
tttgcaaaagcttctacagcacggt

SEQ ID NO: 5265367 - DNA, 25 bp, Homo sapien
acagcacggtcataattcagaatta

SEQ ID NO: 5265368 - DNA, 25 bp, Homo sapien
agggcccaaccgccacagtcaagtt

SEQ ID NO: 5265369 - DNA, 25 bp, Homo sapien
agtcaagttccctccgagggtcaga

SEQ ID NO: 5265370 - DNA, 25 bp, Homo sapien
tactcaaattaatcactgcaatgtg

SEQ ID NO: 5265371 - DNA, 25 bp, Homo sapien
gtggaagtccaaagttagaactgaa

SEQ ID NO: 5265372 - DNA, 25 bp, Homo sapien
tcaactgaatgctcaaggcaggtca

SEQ ID NO: 5265373 - DNA, 25 bp, Homo sapien
gacccatcaaatgagaggcagcatg

SEQ ID NO: 5265374 - DNA, 25 bp, Homo sapien
aggggaggcaacagcatgggccagg

SEQ ID NO: 5265375 - DNA, 25 bp, Homo sapien
gaggcaacagcatgggccaggggag

SEQ ID NO: 5265376 - DNA, 25 bp, Homo sapien
gcaacagcatgggccaggggaggca

SEQ ID NO: 5265377 - DNA, 25 bp, Homo sapien
acagcatgggccaggggaggcagca

SEQ ID NO: 5265378 - DNA, 25 bp, Homo sapien
gcagcacgggccaggggaggcagca

SEQ ID NO: 5265379 - DNA, 25 bp, Homo sapien
gcagcatgggccaggggaggcagca

SEQ ID NO: 5265380 - DNA, 25 bp, Homo sapien
cagcatgggccaggggaggcagcat

SEQ ID NO: 5265381 - DNA, 25 bp, Homo sapien
ggcagcatgggccaggggaggcagc

SEQ ID NO: 5265382 - DNA, 25 bp, Homo sapien
cagcatgggccaggggaggcagcat

SEQ ID NO: 5265383 - DNA, 25 bp, Homo sapien
gcagcatgggccaggggaggcagca

SEQ ID NO: 5265384 - DNA, 25 bp, Homo sapien
ccaggggaggcagcatgggtcaggg

SEQ ID NO: 5265385 - DNA, 25 bp, Homo sapien
gccaggggaggcagcatgggtcagg

SEQ ID NO: 5265386 - DNA, 25 bp, Homo sapien
actggttcttatgttccgcttctgc

SEQ ID NO: 5265387 - DNA, 25 bp, Homo sapien
catcgtggtacagttaagtaaggcc

SEQ ID NO: 5265388 - DNA, 25 bp, Homo sapien
taagtaaggccaagctatgagaggc

SEQ ID NO: 5265389 - DNA, 25 bp, Homo sapien
cgcttctgcttggtacatcgtggta

SEQ ID NO: 5265390 - DNA, 25 bp, Homo sapien
aagaaccagggaactctccaccctg

SEQ ID NO: 5265391 - DNA, 25 bp, Homo sapien
ttccaagaaccagggaactctccac

SEQ ID NO: 5265392 - DNA, 25 bp, Homo sapien
aaccagggaactctccaccctgtag

SEQ ID NO: 5265393 - DNA, 25 bp, Homo sapien
tgttccaagaaccagggaactctcc

SEQ ID NO: 5265394 - DNA, 25 bp, Homo sapien
tatatccacaggagaggcttctgcc

SEQ ID NO: 5265395 - DNA, 25 bp, Homo sapien
catttgagctataacctgtgccccg

SEQ ID NO: 5265396 - DNA, 25 bp, Homo sapien
gtttaacggtagatctgagcacgca

SEQ ID NO: 5265397 - DNA, 25 bp, Homo sapien
catgtgtaagtgaaggctccagcct

SEQ ID NO: 5265398 - DNA, 25 bp, Homo sapien
gatggcaacctaagaaagctggagt

SEQ ID NO: 5265399 - DNA, 25 bp, Homo sapien
tggagaaagatgtgtcatgcagatg

SEQ ID NO: 5265400 - DNA, 25 bp, Homo sapien
tgcagatggcaacctaagaaagctg

SEQ ID NO: 5265401 - DNA, 25 bp, Homo sapien
aagatgtgtcatgcagatggcaacc

SEQ ID NO: 5265402 - DNA, 25 bp, Homo sapien
agggaatatgtagctgtaaatgtgt

SEQ ID NO: 5265403 - DNA, 25 bp, Homo sapien
aaggcagccagggcaatgctcagag

SEQ ID NO: 5265404 - DNA, 25 bp, Homo sapien
gagggaatatgtagctgtaaatgtg

SEQ ID NO: 5265405 - DNA, 25 bp, Homo sapien
ttcaacaaatattggatagtactaa

SEQ ID NO: 5265406 - DNA, 25 bp, Homo sapien
tcaacaaatattggatagtactaac

SEQ ID NO: 5265407 - DNA, 25 bp, Homo sapien
aagaaaggcagatagttaaattatt

SEQ ID NO: 5265408 - DNA, 25 bp, Homo sapien
agaaaggcagatagttaaattattc

SEQ ID NO: 5265409 - DNA, 25 bp, Homo sapien
aaaccctgtgtggttacaggtcctg

SEQ ID NO: 5265410 - DNA, 25 bp, Homo sapien
gcattcatgggtgtctcgtcagtct

SEQ ID NO: 5265411 - DNA, 25 bp, Homo sapien
aagcattcatgggtgtctcgtcagt

SEQ ID NO: 5265412 - DNA, 25 bp, Homo sapien
cctgtgtggttacaggtcctgtcat

SEQ ID NO: 5265413 - DNA, 25 bp, Homo sapien
ctttgatttggttgcacatggtaca

SEQ ID NO: 5265414 - DNA, 25 bp, Homo sapien
ccagagggcgatatttttgaaagct

SEQ ID NO: 5265415 - DNA, 25 bp, Homo sapien
tacttcctcctaataaggctgaggg

SEQ ID NO: 5265416 - DNA, 25 bp, Homo sapien
ggctgagggaatttacaactatgtc

SEQ ID NO: 5265417 - DNA, 25 bp, Homo sapien
aggatccccgtgtaggaggcctctg

SEQ ID NO: 5265418 - DNA, 25 bp, Homo sapien
ttccaggcccttgcaaaacgacaga

SEQ ID NO: 5265419 - DNA, 25 bp, Homo sapien
aagatgagcatcagccctaagagga

SEQ ID NO: 5265420 - DNA, 25 bp, Homo sapien
ggcccttgcaaaacgacagactgaa

SEQ ID NO: 5265421 - DNA, 25 bp, Homo sapien
tccaccaaggccagctatcccaatg

SEQ ID NO: 5265422 - DNA, 25 bp, Homo sapien
caaggccagctatcccaatggctga

SEQ ID NO: 5265423 - DNA, 25 bp, Homo sapien
ttcctatttcaaatcctccaccaag

SEQ ID NO: 5265424 - DNA, 25 bp, Homo sapien
ccaatggctgagggtgcagaccatt

SEQ ID NO: 5265425 - DNA, 25 bp, Homo sapien
gaacccggctttgatcacagacaga

SEQ ID NO: 5265426 - DNA, 25 bp, Homo sapien
ttccatctggaaggcgcgccactac

SEQ ID NO: 5265427 - DNA, 25 bp, Homo sapien
tggaaggcgcgccactacaatcccg

SEQ ID NO: 5265428 - DNA, 25 bp, Homo sapien
cagtcaccaggaacccggctttgat

SEQ ID NO: 5265429 - DNA, 25 bp, Homo sapien
tggaacttccatcgttgccacaccc

SEQ ID NO: 5265430 - DNA, 25 bp, Homo sapien
ggaacttccatcgttgccacaccca

SEQ ID NO: 5265431 - DNA, 25 bp, Homo sapien
gaacttccatcgttgccacacccat

SEQ ID NO: 5265432 - DNA, 25 bp, Homo sapien
ccatttctggaagttatttctgtga

SEQ ID NO: 5265433 - DNA, 25 bp, Homo sapien
tgatttcaaattggaaggtataggg

SEQ ID NO: 5265434 - DNA, 25 bp, Homo sapien
gaatgatcttatcaggtccatttct

SEQ ID NO: 5265435 - DNA, 25 bp, Homo sapien
cttctgatttcaaattggaaggtat

SEQ ID NO: 5265436 - DNA, 25 bp, Homo sapien
tactgagactcaaattgctgcacag

SEQ ID NO: 5265437 - DNA, 25 bp, Homo sapien
gacatagcacaatttgtccttccag

SEQ ID NO: 5265438 - DNA, 25 bp, Homo sapien
tattctaatgtgtggacatagcaca

SEQ ID NO: 5265439 - DNA, 25 bp, Homo sapien
cagtcactgttgatagacaattggg

SEQ ID NO: 5265440 - DNA, 25 bp, Homo sapien
tgtaaggagccacctaagagttctc

SEQ ID NO: 5265441 - DNA, 25 bp, Homo sapien
ttagtggtacacagtggcctttcac

SEQ ID NO: 5265442 - DNA, 25 bp, Homo sapien
ttgccagcgattatgtccacaatgg

SEQ ID NO: 5265443 - DNA, 25 bp, Homo sapien
ggctgcccgacttgcatatcattca

SEQ ID NO: 5265444 - DNA, 25 bp, Homo sapien
agttcacctcaaagcttcatggcag

SEQ ID NO: 5265445 - DNA, 25 bp, Homo sapien
tccaggcagaaaacggtcactaatg

SEQ ID NO: 5265446 - DNA, 25 bp, Homo sapien
tattttatccatcaaggtgtgtccc

SEQ ID NO: 5265447 - DNA, 25 bp, Homo sapien
tgtggctgtttcgaatggctgtccc

SEQ ID NO: 5265448 - DNA, 25 bp, Homo sapien
tttcttaatgaaatcaaatctgtct

SEQ ID NO: 5265449 - DNA, 25 bp, Homo sapien
ttttcttaatgaaatcaaatctgtc

SEQ ID NO: 5265450 - DNA, 25 bp, Homo sapien
ttttttcttaatgaaatcaaatctg

SEQ ID NO: 5265451 - DNA, 25 bp, Homo sapien
tcttaatgaaatcaaatctgtcttc

SEQ ID NO: 5265452 - DNA, 25 bp, Homo sapien
ttaatacataatagcagatgcaaat

SEQ ID NO: 5265453 - DNA, 25 bp, Homo sapien
tgtaataggagaacaatgacagccc

SEQ ID NO: 5265454 - DNA, 25 bp, Homo sapien
cataatagcagatgcaaatatagga

SEQ ID NO: 5265455 - DNA, 25 bp, Homo sapien
atatgtaataggagaacaatgacag

SEQ ID NO: 5265456 - DNA, 25 bp, Homo sapien
catgatcagcaattatttgtacaac

SEQ ID NO: 5265457 - DNA, 25 bp, Homo sapien
tgtacaacgtacaaatacattgtaa

SEQ ID NO: 5265458 - DNA, 25 bp, Homo sapien
ttttacatgatcagcaattatttgt

SEQ ID NO: 5265459 - DNA, 25 bp, Homo sapien
tcagcaattatttgtacaacgtaca

SEQ ID NO: 5265460 - DNA, 25 bp, Homo sapien
caatactactgtctgcattttgatg

SEQ ID NO: 5265461 - DNA, 25 bp, Homo sapien
ctactgtctgcattttgatgtatgc

SEQ ID NO: 5265462 - DNA, 25 bp, Homo sapien
aatactactgtctgcattttgatgt

SEQ ID NO: 5265463 - DNA, 25 bp, Homo sapien
tactactgtctgcattttgatgtat

SEQ ID NO: 5265464 - DNA, 25 bp, Homo sapien
agactgaagtcacaagccgctctgg

SEQ ID NO: 5265465 - DNA, 25 bp, Homo sapien
tgatgctgcagccatagtatctgga

SEQ ID NO: 5265466 - DNA, 25 bp, Homo sapien
ccgaggctgctgtatcaggacgaca

SEQ ID NO: 5265467 - DNA, 25 bp, Homo sapien
gacgacattccttttggtgccacag

SEQ ID NO: 5265468 - DNA, 25 bp, Homo sapien
tgcagaccgcaagactcatcctaga

SEQ ID NO: 5265469 - DNA, 25 bp, Homo sapien
gagagccattggacttgggaatcag

SEQ ID NO: 5265470 - DNA, 25 bp, Homo sapien
ggacatcttcagtgtgtcagctgaa

SEQ ID NO: 5265471 - DNA, 25 bp, Homo sapien
ctgtaaacacgggaagagagccatt

SEQ ID NO: 5265472 - DNA, 25 bp, Homo sapien
agcctcaaatcccatcctcagcatc

SEQ ID NO: 5265473 - DNA, 25 bp, Homo sapien
caatctagttgtacacggagggtca

SEQ ID NO: 5265474 - DNA, 25 bp, Homo sapien
aatgaaagcaagaagacccaagggc

SEQ ID NO: 5265475 - DNA, 25 bp, Homo sapien
tgaggtgacaaagctgactacggtt

SEQ ID NO: 5265476 - DNA, 25 bp, Homo sapien
tcggagtaaattgccacctgaggtg

SEQ ID NO: 5265477 - DNA, 25 bp, Homo sapien
aaacttcatgtgcttaggtctcaga

SEQ ID NO: 5265478 - DNA, 25 bp, Homo sapien
tctggtcagatcattaactccctag

SEQ ID NO: 5265479 - DNA, 25 bp, Homo sapien
gaagaggacagcgaaagctttctct

SEQ ID NO: 5265480 - DNA, 25 bp, Homo sapien
gccacactggtctgatcttttagag

SEQ ID NO: 5265481 - DNA, 25 bp, Homo sapien
gatccttatttctgcggaatgagaa

SEQ ID NO: 5265482 - DNA, 25 bp, Homo sapien
cagggtagcagttatttccctttga

SEQ ID NO: 5265483 - DNA, 25 bp, Homo sapien
tgcctcaacttcctatgtttgtgtt

SEQ ID NO: 5265484 - DNA, 25 bp, Homo sapien
ggcaaacaagctggcgtgcacaggg

SEQ ID NO: 5265485 - DNA, 25 bp, Homo sapien
agcccacgggagtaaacagcacctt

SEQ ID NO: 5265486 - DNA, 25 bp, Homo sapien
agtcgttatgaattcagatattccc

SEQ ID NO: 5265487 - DNA, 25 bp, Homo sapien
attttaataacaggccagcccacgg

SEQ ID NO: 5265488 - DNA, 25 bp, Homo sapien
tagcctcgagacctgttctctcaac

SEQ ID NO: 5265489 - DNA, 25 bp, Homo sapien
caaaatcgctgtggtcaagaaagtc

SEQ ID NO: 5265490 - DNA, 25 bp, Homo sapien
gacacctcgccgttcaaatatcagg

SEQ ID NO: 5265491 - DNA, 25 bp, Homo sapien
gaacggaaggatggtcgctgacacc

SEQ ID NO: 5265492 - DNA, 25 bp, Homo sapien
tttgcggttaacagacgcgcgacct

SEQ ID NO: 5265493 - DNA, 25 bp, Homo sapien
gccgcggcgccccgtcccgaggctg

SEQ ID NO: 5265494 - DNA, 25 bp, Homo sapien
ccgcggcgccccgtcccgaggctgc

SEQ ID NO: 5265495 - DNA, 25 bp, Homo sapien
gctgcccgcccggccgcggcgcccc

SEQ ID NO: 5265496 - DNA, 25 bp, Homo sapien
ctgcccgcccggccgcggcgccccg

SEQ ID NO: 5265497 - DNA, 25 bp, Homo sapien
ggccttcgccctcagggacttcgga

SEQ ID NO: 5265498 - DNA, 25 bp, Homo sapien
ctctatgcgaactcgaacgacaggc

SEQ ID NO: 5265499 - DNA, 25 bp, Homo sapien
ccgtcctcaagatcgaaaagcccag

SEQ ID NO: 5265500 - DNA, 25 bp, Homo sapien
aggcggcgcaaaacacccgccgtgt

SEQ ID NO: 5265501 - DNA, 25 bp, Homo sapien
caggtgaacggcggcccagtccctg

SEQ ID NO: 5265502 - DNA, 25 bp, Homo sapien
gcaggtgaacggcggcccagtccct

SEQ ID NO: 5265503 - DNA, 25 bp, Homo sapien
aggtgaacggcggcccagtccctgc

SEQ ID NO: 5265504 - DNA, 25 bp, Homo sapien
ctccgcaggcgcactggagccgatt

SEQ ID NO: 5265505 - DNA, 25 bp, Homo sapien
caggcgcactggagccgattgcgca

SEQ ID NO: 5265506 - DNA, 25 bp, Homo sapien
agccgattgcgcaggcgtggctctc

SEQ ID NO: 5265507 - DNA, 25 bp, Homo sapien
attgcgcaggcgtggctctcacacg

SEQ ID NO: 5265508 - DNA, 25 bp, Homo sapien
tgtgcattagacttaggcctgcctg

SEQ ID NO: 5265509 - DNA, 25 bp, Homo sapien
gttcccacataaagcacgtacctga

SEQ ID NO: 5265510 - DNA, 25 bp, Homo sapien
catctgtcgcaggtgctcagtcgaa

SEQ ID NO: 5265511 - DNA, 25 bp, Homo sapien
tgtaaaacttcgtgcatgggagctc

SEQ ID NO: 5265512 - DNA, 25 bp, Homo sapien
ggtcagcccattggctcccatctga

SEQ ID NO: 5265513 - DNA, 25 bp, Homo sapien
cgttggcaccttcaatacttcatga

SEQ ID NO: 5265514 - DNA, 25 bp, Homo sapien
tttacttcatgaggaggtcagccca

SEQ ID NO: 5265515 - DNA, 25 bp, Homo sapien
tgctagtctatggtcagttgaggaa

SEQ ID NO: 5265516 - DNA, 25 bp, Homo sapien
gataacactgtcaagtacactgatt

SEQ ID NO: 5265517 - DNA, 25 bp, Homo sapien
gttggtttccaaggcacttctcatg

SEQ ID NO: 5265518 - DNA, 25 bp, Homo sapien
cgaccaacagaattagccacagatt

SEQ ID NO: 5265519 - DNA, 25 bp, Homo sapien
tagcactacacgtcaaatgtggagc

SEQ ID NO: 5265520 - DNA, 25 bp, Homo sapien
aattccagaagacctgtcacttcag

SEQ ID NO: 5265521 - DNA, 25 bp, Homo sapien
caaatacattgcgtgtgatatgact

SEQ ID NO: 5265522 - DNA, 25 bp, Homo sapien
tgatatgactatccacacttcttaa

SEQ ID NO: 5265523 - DNA, 25 bp, Homo sapien
cataggcagtctcagagtgcatctg

SEQ ID NO: 5265524 - DNA, 25 bp, Homo sapien
tggtggggacattgttctctttggc

SEQ ID NO: 5265525 - DNA, 25 bp, Homo sapien
ggaggtctattaatgagcttcagaa

SEQ ID NO: 5265526 - DNA, 25 bp, Homo sapien
ttcagaacgcggcaaatggatttgc

SEQ ID NO: 5265527 - DNA, 25 bp, Homo sapien
ctttggcctgaggaggtctattaat

SEQ ID NO: 5265528 - DNA, 25 bp, Homo sapien
taacaatttgttaacaccagtaaca

SEQ ID NO: 5265529 - DNA, 25 bp, Homo sapien
tgttaacaccagtaacaatttgctg

SEQ ID NO: 5265530 - DNA, 25 bp, Homo sapien
tttgttaacaccagtaacaatttgc

SEQ ID NO: 5265531 - DNA, 25 bp, Homo sapien
ttaacaccagtaacaatttgctgtt

SEQ ID NO: 5265532 - DNA, 25 bp, Homo sapien
cgcagagacccatacaggagcctga

SEQ ID NO: 5265533 - DNA, 25 bp, Homo sapien
tttgcaaagcaggacgtgcgcacgc

SEQ ID NO: 5265534 - DNA, 25 bp, Homo sapien
tgcatctcatcgtcagtcaggctct

SEQ ID NO: 5265535 - DNA, 25 bp, Homo sapien
cagggcatcactgtggcgtttgcaa

SEQ ID NO: 5265536 - DNA, 25 bp, Homo sapien
tctccaaagaaaaagtgcagtgaaa

SEQ ID NO: 5265537 - DNA, 25 bp, Homo sapien
tctgtgtgacacataggcagtggat

SEQ ID NO: 5265538 - DNA, 25 bp, Homo sapien
gatgagctgctcgagagaattggaa

SEQ ID NO: 5265539 - DNA, 25 bp, Homo sapien
gcatatcaccttgggtgacaggaat

SEQ ID NO: 5265540 - DNA, 25 bp, Homo sapien
caagccagtagggtggctttcagca

SEQ ID NO: 5265541 - DNA, 25 bp, Homo sapien
gaatttttcatgtcccaagcgggat

SEQ ID NO: 5265542 - DNA, 25 bp, Homo sapien
tgagcagttaacaacagctgccggg

SEQ ID NO: 5265543 - DNA, 25 bp, Homo sapien
tacttcagccaaagaatgagtgttc

SEQ ID NO: 5265544 - DNA, 25 bp, Homo sapien
acagccagccgggtaagaagcctgg

SEQ ID NO: 5265545 - DNA, 25 bp, Homo sapien
ggtaagaagcctggcgcatctttta

SEQ ID NO: 5265546 - DNA, 25 bp, Homo sapien
gactgacagccagccgggtaagaag

SEQ ID NO: 5265547 - DNA, 25 bp, Homo sapien
agaagcctggcgcatcttttatagt

SEQ ID NO: 5265548 - DNA, 25 bp, Homo sapien
cagactcttgtcagttacttaaaaa

SEQ ID NO: 5265549 - DNA, 25 bp, Homo sapien
gtatatcagctactaaagccattta

SEQ ID NO: 5265550 - DNA, 25 bp, Homo sapien
tttttgcaagtatatcagctactaa

SEQ ID NO: 5265551 - DNA, 25 bp, Homo sapien
aaaatatatcagactcttgtcagtt

SEQ ID NO: 5265552 - DNA, 25 bp, Homo sapien
cattccactattctgaccgtgctgc

SEQ ID NO: 5265553 - DNA, 25 bp, Homo sapien
gcgagcggaagcaatgtgcccgttt

SEQ ID NO: 5265554 - DNA, 25 bp, Homo sapien
tttctaagcgctggctgatactcct

SEQ ID NO: 5265555 - DNA, 25 bp, Homo sapien
gatactccttggtatcgtacacagt

SEQ ID NO: 5265556 - DNA, 25 bp, Homo sapien
tcgaatgcaggcacagcatgatgcc

SEQ ID NO: 5265557 - DNA, 25 bp, Homo sapien
catgagatctgtgctttagctttgc

SEQ ID NO: 5265558 - DNA, 25 bp, Homo sapien
aaccatgagatctgtgctttagctt

SEQ ID NO: 5265559 - DNA, 25 bp, Homo sapien
tgtgagcaaaaggaggtatcgaatg

SEQ ID NO: 5265560 - DNA, 25 bp, Homo sapien
tgcactttggactaaaataaagagg

SEQ ID NO: 5265561 - DNA, 25 bp, Homo sapien
cagtctctggtgttgtgataaagtc

SEQ ID NO: 5265562 - DNA, 25 bp, Homo sapien
tttgctgcactttggactaaaataa

SEQ ID NO: 5265563 - DNA, 25 bp, Homo sapien
taaagtctatggaagtgtttgctgc

SEQ ID NO: 5265564 - DNA, 25 bp, Homo sapien
tgttttagaaacttgtccttcatcc

SEQ ID NO: 5265565 - DNA, 25 bp, Homo sapien
tcatcctcagatctcgaggaacaat

SEQ ID NO: 5265566 - DNA, 25 bp, Homo sapien
catcctcagatctcgaggaacaatt

SEQ ID NO: 5265567 - DNA, 25 bp, Homo sapien
tttagaaacttgtccttcatcctca

SEQ ID NO: 5265568 - DNA, 25 bp, Homo sapien
ctggtttgtagggtaagaatcccag

SEQ ID NO: 5265569 - DNA, 25 bp, Homo sapien
tatcatgtttgacctgattgtgtca

SEQ ID NO: 5265570 - DNA, 25 bp, Homo sapien
tcagttgggaaagctttgctggaaa

SEQ ID NO: 5265571 - DNA, 25 bp, Homo sapien
cattagacgctttcatgctttcctg

SEQ ID NO: 5265572 - DNA, 25 bp, Homo sapien
atgaaggagcctggatgcttccttt

SEQ ID NO: 5265573 - DNA, 25 bp, Homo sapien
cttgtgctccgccgagtggtgcttc

SEQ ID NO: 5265574 - DNA, 25 bp, Homo sapien
ccttgtgctccgccgagtggtgctt

SEQ ID NO: 5265575 - DNA, 25 bp, Homo sapien
ccagggcgcagtcccgcccgaggag

SEQ ID NO: 5265576 - DNA, 25 bp, Homo sapien
agtcccgcccgaggagctgcaggcc

SEQ ID NO: 5265577 - DNA, 25 bp, Homo sapien
gttccaccaccagccgcagcagcgc

SEQ ID NO: 5265578 - DNA, 25 bp, Homo sapien
gagttccaccaccagccgcagcagc

SEQ ID NO: 5265579 - DNA, 25 bp, Homo sapien
agttccaccaccagccgcagcagcg

SEQ ID NO: 5265580 - DNA, 25 bp, Homo sapien
cagccccaggaggagggggtgcccg

SEQ ID NO: 5265581 - DNA, 25 bp, Homo sapien
gcagccccaggaggagggggtgccc

SEQ ID NO: 5265582 - DNA, 25 bp, Homo sapien
agcagcagccccaggaggagggggt

SEQ ID NO: 5265583 - DNA, 25 bp, Homo sapien
cagcagccccaggaggagggggtgc

SEQ ID NO: 5265584 - DNA, 25 bp, Homo sapien
cgacacgcgccgagagctgggctcg

SEQ ID NO: 5265585 - DNA, 25 bp, Homo sapien
gagactccgacacgcgccgagagct

SEQ ID NO: 5265586 - DNA, 25 bp, Homo sapien
tgggagactccgacacgcgccgaga

SEQ ID NO: 5265587 - DNA, 25 bp, Homo sapien
gggctgggagactccgacacgcgcc

SEQ ID NO: 5265588 - DNA, 25 bp, Homo sapien
agggagccgcggtctcctcgacgat

SEQ ID NO: 5265589 - DNA, 25 bp, Homo sapien
ctggcgcgggcgcaactttctttcc

SEQ ID NO: 5265590 - DNA, 25 bp, Homo sapien
ccccgaggaacaagccggcaggtga

SEQ ID NO: 5265591 - DNA, 25 bp, Homo sapien
gaccgccgctggtgcggaaaggagc

SEQ ID NO: 5265592 - DNA, 25 bp, Homo sapien
ccgctctccaagaaggcggcgccgc

SEQ ID NO: 5265593 - DNA, 25 bp, Homo sapien
agcgtcgcctttgcgcggtggtcgc

SEQ ID NO: 5265594 - DNA, 25 bp, Homo sapien
cctgcccggcgccacccgggagcca

SEQ ID NO: 5265595 - DNA, 25 bp, Homo sapien
cctgcgcgtcgtggccgggccggtt

SEQ ID NO: 5265596 - DNA, 25 bp, Homo sapien
acccgggagccacctgcgcgtcgtg

SEQ ID NO: 5265597 - DNA, 25 bp, Homo sapien
agccgccggagtcgtcgccgtctgt

SEQ ID NO: 5265598 - DNA, 25 bp, Homo sapien
caagggctccgagcggggctttaat

SEQ ID NO: 5265599 - DNA, 25 bp, Homo sapien
tcagacctcggggagcttcttatcc

SEQ ID NO: 5265600 - DNA, 25 bp, Homo sapien
gaagccgctgaagtgttagtacccc

SEQ ID NO: 5265601 - DNA, 25 bp, Homo sapien
tattgggatgacctggaactgagcc

SEQ ID NO: 5265602 - DNA, 25 bp, Homo sapien
gagcctgcacaatctccaaggtgag

SEQ ID NO: 5265603 - DNA, 25 bp, Homo sapien
ccaaggtgagcctggatattgcttt

SEQ ID NO: 5265604 - DNA, 25 bp, Homo sapien
ggatcattcatcagccatctacgtg

SEQ ID NO: 5265605 - DNA, 25 bp, Homo sapien
gataaagatttagctcctgcaccat

SEQ ID NO: 5265606 - DNA, 25 bp, Homo sapien
tgtacactgaaggttagcagcacga

SEQ ID NO: 5265607 - DNA, 25 bp, Homo sapien
tccccaggtgattcgtgtgtacact

SEQ ID NO: 5265608 - DNA, 25 bp, Homo sapien
taagtctatcatactcaggccatag

SEQ ID NO: 5265609 - DNA, 25 bp, Homo sapien
aggtagcgaggaggccggcgtgtta

SEQ ID NO: 5265610 - DNA, 25 bp, Homo sapien
tttgtgaggcgttgaggtctggcag

SEQ ID NO: 5265611 - DNA, 25 bp, Homo sapien
ctggcagtaggtggtctgtggaaga

SEQ ID NO: 5265612 - DNA, 25 bp, Homo sapien
gagaagcggtttgtctgctggctcc

SEQ ID NO: 5265613 - DNA, 25 bp, Homo sapien
gagctaaaagcagtaggtgggtgag

SEQ ID NO: 5265614 - DNA, 25 bp, Homo sapien
gagggggcctgtggtgctgacgaac

SEQ ID NO: 5265615 - DNA, 25 bp, Homo sapien
ctgctgccttcagctccactgagag

SEQ ID NO: 5265616 - DNA, 25 bp, Homo sapien
tcacagctgccacgcgtccctgggc

SEQ ID NO: 5265617 - DNA, 25 bp, Homo sapien
ggagaagtgtccagttcctcgacag

SEQ ID NO: 5265618 - DNA, 25 bp, Homo sapien
gtccagttcctcgacagcagagaag

SEQ ID NO: 5265619 - DNA, 25 bp, Homo sapien
gaagtgtccagttcctcgacagcag

SEQ ID NO: 5265620 - DNA, 25 bp, Homo sapien
gctgccttcatctgatagccctgaa

SEQ ID NO: 5265621 - DNA, 25 bp, Homo sapien
tgctgccttcatctgatagccctga

SEQ ID NO: 5265622 - DNA, 25 bp, Homo sapien
cttcatctgatagccctgaagaaag

SEQ ID NO: 5265623 - DNA, 25 bp, Homo sapien
gccttcatctgatagccctgaagaa

SEQ ID NO: 5265624 - DNA, 25 bp, Homo sapien
gctgcagtgagtgaaaggctgtctc

SEQ ID NO: 5265625 - DNA, 25 bp, Homo sapien
aaggtacggagaggcttggctgcag

SEQ ID NO: 5265626 - DNA, 25 bp, Homo sapien
ctgctgactgggaaggtacggagag

SEQ ID NO: 5265627 - DNA, 25 bp, Homo sapien
ctgtttcttcttcgaaatctcttga

SEQ ID NO: 5265628 - DNA, 25 bp, Homo sapien
tctcttgaggatacgcggcttttgg

SEQ ID NO: 5265629 - DNA, 25 bp, Homo sapien
atgctctctcgtgttctcttgagga

SEQ ID NO: 5265630 - DNA, 25 bp, Homo sapien
aagaatgcatccctcgcaatgctct

SEQ ID NO: 5265631 - DNA, 25 bp, Homo sapien
tcccaagaatgcatccctcgcaatg

SEQ ID NO: 5265632 - DNA, 25 bp, Homo sapien
tgagctgcccggcatgggccagtgt

SEQ ID NO: 5265633 - DNA, 25 bp, Homo sapien
ctggatggtcctgagctgcccggca

SEQ ID NO: 5265634 - DNA, 25 bp, Homo sapien
tggatggtcctgagctgcccggcat

SEQ ID NO: 5265635 - DNA, 25 bp, Homo sapien
gtcctgagctgcccggcatgggcca

SEQ ID NO: 5265636 - DNA, 25 bp, Homo sapien
acatttatatgatgggacgaacatc

SEQ ID NO: 5265637 - DNA, 25 bp, Homo sapien
cattctcccaagtaaatggtatttt

SEQ ID NO: 5265638 - DNA, 25 bp, Homo sapien
tctgaggctttagtttgatgaacac

SEQ ID NO: 5265639 - DNA, 25 bp, Homo sapien
tttctcttgtacagtcagagctgtc

SEQ ID NO: 5265640 - DNA, 25 bp, Homo sapien
tggtcctgggtgcaatgtgacatct

SEQ ID NO: 5265641 - DNA, 25 bp, Homo sapien
cagtcaaacctagcctgctggtcct

SEQ ID NO: 5265642 - DNA, 25 bp, Homo sapien
tgacatctgaattgtacctgcctgg

SEQ ID NO: 5265643 - DNA, 25 bp, Homo sapien
ggctcatgctttcgccccagtcaaa

SEQ ID NO: 5265644 - DNA, 25 bp, Homo sapien
cgagaggagccatgtgacaaggagg

SEQ ID NO: 5265645 - DNA, 25 bp, Homo sapien
tgggcccatcctgaggattggccat

SEQ ID NO: 5265646 - DNA, 25 bp, Homo sapien
gagaggagccatgtgacaaggaggg

SEQ ID NO: 5265647 - DNA, 25 bp, Homo sapien
gtgggcccatcctgaggattggcca

SEQ ID NO: 5265648 - DNA, 25 bp, Homo sapien
ccaaactctcacgatgacatccaag

SEQ ID NO: 5265649 - DNA, 25 bp, Homo sapien
ctcgcaaagaagcagtggaaccact

SEQ ID NO: 5265650 - DNA, 25 bp, Homo sapien
cacaacgtctctcttcagctgaggc

SEQ ID NO: 5265651 - DNA, 25 bp, Homo sapien
gaaccactgcatccaagaggagtga

SEQ ID NO: 5265652 - DNA, 25 bp, Homo sapien
ctgtagcatatcgagaggaaacagg

SEQ ID NO: 5265653 - DNA, 25 bp, Homo sapien
ctggacatagggagggaggtttgct

SEQ ID NO: 5265654 - DNA, 25 bp, Homo sapien
acacacgctcctgcccaaagtttgc

SEQ ID NO: 5265655 - DNA, 25 bp, Homo sapien
tgtggcctctgaatagtccaagaaa

SEQ ID NO: 5265656 - DNA, 25 bp, Homo sapien
tgtgagagctcaaaacatgacagaa

SEQ ID NO: 5265657 - DNA, 25 bp, Homo sapien
tgggtacggccagttgcactgggca

SEQ ID NO: 5265658 - DNA, 25 bp, Homo sapien
gtacggccagttgcactgggcagca

SEQ ID NO: 5265659 - DNA, 25 bp, Homo sapien
ggtacggccagttgcactgggcagc

SEQ ID NO: 5265660 - DNA, 25 bp, Homo sapien
atgggtacggccagttgcactgggc

SEQ ID NO: 5265661 - DNA, 25 bp, Homo sapien
tcacctacagtctgcaacagcaagt

SEQ ID NO: 5265662 - DNA, 25 bp, Homo sapien
gcaagtggtcttttgagcattcgtg

SEQ ID NO: 5265663 - DNA, 25 bp, Homo sapien
cacctacagtctgcaacagcaagtg

SEQ ID NO: 5265664 - DNA, 25 bp, Homo sapien
agtggtcttttgagcattcgtgtgg

SEQ ID NO: 5265665 - DNA, 25 bp, Homo sapien
ttcttttctctgaacgatttggata

SEQ ID NO: 5265666 - DNA, 25 bp, Homo sapien
cttcttcacacggattcttttctct

SEQ ID NO: 5265667 - DNA, 25 bp, Homo sapien
tcttttctctgaacgatttggataa

SEQ ID NO: 5265668 - DNA, 25 bp, Homo sapien
ttcttcacacggattcttttctctg

SEQ ID NO: 5265669 - DNA, 25 bp, Homo sapien
gagcctgcgcggctcagggacggtc

SEQ ID NO: 5265670 - DNA, 25 bp, Homo sapien
cctgcgcggctcagggacggtcact

SEQ ID NO: 5265671 - DNA, 25 bp, Homo sapien
acacgggcagaacgggctctgaaaa

SEQ ID NO: 5265672 - DNA, 25 bp, Homo sapien
tcctcacacgggcagaacgggctct

SEQ ID NO: 5265673 - DNA, 25 bp, Homo sapien
tttctgggtaaaggtcctgagtgct

SEQ ID NO: 5265674 - DNA, 25 bp, Homo sapien
tgtggctccgtgatgaagccagccc

SEQ ID NO: 5265675 - DNA, 25 bp, Homo sapien
tggcagccgcctgtgaccctgtgac

SEQ ID NO: 5265676 - DNA, 25 bp, Homo sapien
ctttttccagatgccggccaacaga

SEQ ID NO: 5265677 - DNA, 25 bp, Homo sapien
atatgtactttgattccaagtggtt

SEQ ID NO: 5265678 - DNA, 25 bp, Homo sapien
tatgtactttgattccaagtggttt

SEQ ID NO: 5265679 - DNA, 25 bp, Homo sapien
taagtggaaatgcatatagatagtc

SEQ ID NO: 5265680 - DNA, 25 bp, Homo sapien
tgcatatagatagtcaataactgta

SEQ ID NO: 5265681 - DNA, 25 bp, Homo sapien
ggggccaatgaagaaggatctagct

SEQ ID NO: 5265682 - DNA, 25 bp, Homo sapien
tgggggccaatgaagaaggatctag

SEQ ID NO: 5265683 - DNA, 25 bp, Homo sapien
gggggccaatgaagaaggatctagc

SEQ ID NO: 5265684 - DNA, 25 bp, Homo sapien
ctgggggccaatgaagaaggatcta

SEQ ID NO: 5265685 - DNA, 25 bp, Homo sapien
cttgacaagaacgaatcattagaac

SEQ ID NO: 5265686 - DNA, 25 bp, Homo sapien
tgagggctttgtgcttgaggcccca

SEQ ID NO: 5265687 - DNA, 25 bp, Homo sapien
tcatggctgacctcatgagaggaga

SEQ ID NO: 5265688 - DNA, 25 bp, Homo sapien
attagaacatgtctcctcatggctg

SEQ ID NO: 5265689 - DNA, 25 bp, Homo sapien
aacattttgggttctcagtgatgtg

SEQ ID NO: 5265690 - DNA, 25 bp, Homo sapien
ctaacattttgggttctcagtgatg

SEQ ID NO: 5265691 - DNA, 25 bp, Homo sapien
gtgttctcgatgatgtgcggcagag

SEQ ID NO: 5265692 - DNA, 25 bp, Homo sapien
taacatcctgggttctcggtgatgt

SEQ ID NO: 5265693 - DNA, 25 bp, Homo sapien
tacacactcaaacttcacggtgggc

SEQ ID NO: 5265694 - DNA, 25 bp, Homo sapien
gtgcaggcatgtgcgtaccaggtat

SEQ ID NO: 5265695 - DNA, 25 bp, Homo sapien
gcacactcaaacttcatggggggct

SEQ ID NO: 5265696 - DNA, 25 bp, Homo sapien
gctgagggtgcaggcatgtgcgtac

SEQ ID NO: 5265697 - DNA, 25 bp, Homo sapien
catgtgcgtaccaggtattcaaact

SEQ ID NO: 5265698 - DNA, 25 bp, Homo sapien
acacactcaaacttcacgacaggct

SEQ ID NO: 5265699 - DNA, 25 bp, Homo sapien
cacacactcaaacttcacgacaggc

SEQ ID NO: 5265700 - DNA, 25 bp, Homo sapien
gggtgcaggcacgagcttaccacac

SEQ ID NO: 5265701 - DNA, 25 bp, Homo sapien
cacactcaaacttcacgacaggctg

SEQ ID NO: 5265702 - DNA, 25 bp, Homo sapien
tatgaagtgccacgttttgccgtgc

SEQ ID NO: 5265703 - DNA, 25 bp, Homo sapien
ttccaaaggaaatgcgatgaggccc

SEQ ID NO: 5265704 - DNA, 25 bp, Homo sapien
aagctttggacgaaatgcagctgca

SEQ ID NO: 5265705 - DNA, 25 bp, Homo sapien
tgcagctgcatcgtaaaatgtgttg

SEQ ID NO: 5265706 - DNA, 25 bp, Homo sapien
cctgtggctagacgaggttcacgtg

SEQ ID NO: 5265707 - DNA, 25 bp, Homo sapien
cggcctgtggctagacgaggttcac

SEQ ID NO: 5265708 - DNA, 25 bp, Homo sapien
gcctgtggctagacgaggttcacgt

SEQ ID NO: 5265709 - DNA, 25 bp, Homo sapien
tagacgaggttcacgtgggtttgcc

SEQ ID NO: 5265710 - DNA, 25 bp, Homo sapien
caggcacaaagggggctccgatggc

SEQ ID NO: 5265711 - DNA, 25 bp, Homo sapien
tccgcaggcacaaagggggctccga

SEQ ID NO: 5265712 - DNA, 25 bp, Homo sapien
cgcaggcacaaagggggctccgatg

SEQ ID NO: 5265713 - DNA, 25 bp, Homo sapien
gttccctggcaggtccgcaggcacg

SEQ ID NO: 5265714 - DNA, 25 bp, Homo sapien
tttgtgggtccacaaccacatattc

SEQ ID NO: 5265715 - DNA, 25 bp, Homo sapien
tcttggactaggttcacttctctca

SEQ ID NO: 5265716 - DNA, 25 bp, Homo sapien
ttgtttgtgggtccacaaccacata

SEQ ID NO: 5265717 - DNA, 25 bp, Homo sapien
taaaggcacaaacaatcgttcttgg

SEQ ID NO: 5265718 - DNA, 25 bp, Homo sapien
gggctcgagtcgtcgtgaaatttcc

SEQ ID NO: 5265719 - DNA, 25 bp, Homo sapien
cttcaccttgggttctccctgctgg

SEQ ID NO: 5265720 - DNA, 25 bp, Homo sapien
tagatgttgtagacgctcaccagcc

SEQ ID NO: 5265721 - DNA, 25 bp, Homo sapien
tccctgctggattgaatgcatttcc

SEQ ID NO: 5265722 - DNA, 25 bp, Homo sapien
cctggcacatgggttagctggtatt

SEQ ID NO: 5265723 - DNA, 25 bp, Homo sapien
cttcagggagcggtcacgtgggatc

SEQ ID NO: 5265724 - DNA, 25 bp, Homo sapien
gtgggatcggattgctgctgacttc

SEQ ID NO: 5265725 - DNA, 25 bp, Homo sapien
tctttccagccaatacacggatacg

SEQ ID NO: 5265726 - DNA, 25 bp, Homo sapien
ttctcccgttttcttgccctgccta

SEQ ID NO: 5265727 - DNA, 25 bp, Homo sapien
tcttgccctgcctatgggctggcat

SEQ ID NO: 5265728 - DNA, 25 bp, Homo sapien
cctgcctatgggctggcatctccat

SEQ ID NO: 5265729 - DNA, 25 bp, Homo sapien
tcccgttttcttgccctgcctatgg

SEQ ID NO: 5265730 - DNA, 25 bp, Homo sapien
tcctcagatccacagaccggaacct

SEQ ID NO: 5265731 - DNA, 25 bp, Homo sapien
agggttccctgcgtctcgtcactca

SEQ ID NO: 5265732 - DNA, 25 bp, Homo sapien
cggaccgcgtctctgctcttcgcct

SEQ ID NO: 5265733 - DNA, 25 bp, Homo sapien
ctcttcgcctcccttgactcccagg

SEQ ID NO: 5265734 - DNA, 25 bp, Homo sapien
ttggccagcaactgccacatgcaga

SEQ ID NO: 5265735 - DNA, 25 bp, Homo sapien
gcttggccagcaactgccacatgca

SEQ ID NO: 5265736 - DNA, 25 bp, Homo sapien
ctgtgcttggccagcaactgccaca

SEQ ID NO: 5265737 - DNA, 25 bp, Homo sapien
tgtgcttggccagcaactgccacat

SEQ ID NO: 5265738 - DNA, 25 bp, Homo sapien
ctatcaggaatctccgtggctgccc

SEQ ID NO: 5265739 - DNA, 25 bp, Homo sapien
agctccatgggagttatctgaacag

SEQ ID NO: 5265740 - DNA, 25 bp, Homo sapien
gctgctcctcgcctatcaggaatct

SEQ ID NO: 5265741 - DNA, 25 bp, Homo sapien
ctgtaaatgtgctgcaagcccagag

SEQ ID NO: 5265742 - DNA, 25 bp, Homo sapien
acttggttcccttcgtgatgctgcg

SEQ ID NO: 5265743 - DNA, 25 bp, Homo sapien
tagattgctgtcctcgagtggccac

SEQ ID NO: 5265744 - DNA, 25 bp, Homo sapien
tgatgctgcggctctttaggaagca

SEQ ID NO: 5265745 - DNA, 25 bp, Homo sapien
ttaggaagcatttccggttctgggc

SEQ ID NO: 5265746 - DNA, 25 bp, Homo sapien
tagcctataggccaaatggtgtctg

SEQ ID NO: 5265747 - DNA, 25 bp, Homo sapien
cagcctacagctgggtgtctcggtt

SEQ ID NO: 5265748 - DNA, 25 bp, Homo sapien
tgtctggttcatagcccataggcca

SEQ ID NO: 5265749 - DNA, 25 bp, Homo sapien
gggtgtctcggttcatagcctatag

SEQ ID NO: 5265750 - DNA, 25 bp, Homo sapien
gccgtgtctgtggacgcaggtttct

SEQ ID NO: 5265751 - DNA, 25 bp, Homo sapien
ggacgcaggtttcttgcagtcacgt

SEQ ID NO: 5265752 - DNA, 25 bp, Homo sapien
ttgggagagccgtgtctgtggacgc

SEQ ID NO: 5265753 - DNA, 25 bp, Homo sapien
tgtctgtggacgcaggtttcttgca

SEQ ID NO: 5265754 - DNA, 25 bp, Homo sapien
agataagagggatccagggttagga

SEQ ID NO: 5265755 - DNA, 25 bp, Homo sapien
ctgtggcagataagagggatccagg

SEQ ID NO: 5265756 - DNA, 25 bp, Homo sapien
tggcagataagagggatccagggtt

SEQ ID NO: 5265757 - DNA, 25 bp, Homo sapien
gcagataagagggatccagggttag

SEQ ID NO: 5265758 - DNA, 25 bp, Homo sapien
ctgggagacgtgggctcagcacagc

SEQ ID NO: 5265759 - DNA, 25 bp, Homo sapien
tgggagacgtgggctcagcacagct

SEQ ID NO: 5265760 - DNA, 25 bp, Homo sapien
acgtgggctcagcacagctgctgaa

SEQ ID NO: 5265761 - DNA, 25 bp, Homo sapien
tgggctcagcacagctgctgaacat

SEQ ID NO: 5265762 - DNA, 25 bp, Homo sapien
tagctggtgcccttgtacgcgcaca

SEQ ID NO: 5265763 - DNA, 25 bp, Homo sapien
gaagagttaatgagcgcgcaagtgc

SEQ ID NO: 5265764 - DNA, 25 bp, Homo sapien
gaaggaaggtcaagaaggagctccc

SEQ ID NO: 5265765 - DNA, 25 bp, Homo sapien
aaactcccgcgctgtgcattcaggg

SEQ ID NO: 5265766 - DNA, 25 bp, Homo sapien
ctttatggacaaatctgacggggac

SEQ ID NO: 5265767 - DNA, 25 bp, Homo sapien
ggcggccgggtacacctgaagccag

SEQ ID NO: 5265768 - DNA, 25 bp, Homo sapien
ccagcggttctctgagtcggagcct

SEQ ID NO: 5265769 - DNA, 25 bp, Homo sapien
tgagtcggagcctttatggacaaat

SEQ ID NO: 5265770 - DNA, 25 bp, Homo sapien
ctgggaaatggcggagccccacgtc

SEQ ID NO: 5265771 - DNA, 25 bp, Homo sapien
aatctggtaatgagcccgacttggc

SEQ ID NO: 5265772 - DNA, 25 bp, Homo sapien
gcggcctgctctcggaatctggtaa

SEQ ID NO: 5265773 - DNA, 25 bp, Homo sapien
taggaccatacacggaagtgaaccg

SEQ ID NO: 5265774 - DNA, 25 bp, Homo sapien
ttcaatcgagccacacgtaggacca

SEQ ID NO: 5265775 - DNA, 25 bp, Homo sapien
acaggtgctgtgtgcagccggcatc

SEQ ID NO: 5265776 - DNA, 25 bp, Homo sapien
cggaaaccgacaggtgctgtgtgca

SEQ ID NO: 5265777 - DNA, 25 bp, Homo sapien
tgccggaaaccgacaggtgctgtgt

SEQ ID NO: 5265778 - DNA, 25 bp, Homo sapien
cagctgtgccggaaaccgacaggtg

SEQ ID NO: 5265779 - DNA, 25 bp, Homo sapien
cactgacaggtaatgtgtgggtggc

SEQ ID NO: 5265780 - DNA, 25 bp, Homo sapien
cacatctcatcgactgtgctgggca

SEQ ID NO: 5265781 - DNA, 25 bp, Homo sapien
ctgtgctggacacccataggtgctg

SEQ ID NO: 5265782 - DNA, 25 bp, Homo sapien
tgtgggtggcgttttgctggctgtg

SEQ ID NO: 5265783 - DNA, 25 bp, Homo sapien
caccgtgcgtttgatgttcaaaagc

SEQ ID NO: 5265784 - DNA, 25 bp, Homo sapien
cctggaagaccagtaagtgtgtctg

SEQ ID NO: 5265785 - DNA, 25 bp, Homo sapien
tatgatgacaatgaccgtggcgctc

SEQ ID NO: 5265786 - DNA, 25 bp, Homo sapien
tctgtgtgagcgcacgtggaaccgc

SEQ ID NO: 5265787 - DNA, 25 bp, Homo sapien
gggagagaggaagccggcaagagga

SEQ ID NO: 5265788 - DNA, 25 bp, Homo sapien
gaggaagccggcaagaggacgcaga

SEQ ID NO: 5265789 - DNA, 25 bp, Homo sapien
aagccggcaagaggacgcagagtgc

SEQ ID NO: 5265790 - DNA, 25 bp, Homo sapien
gcaagaggacgcagagtgcggcagg

SEQ ID NO: 5265791 - DNA, 25 bp, Homo sapien
aaatacctcttaatagtcaggtaat

SEQ ID NO: 5265792 - DNA, 25 bp, Homo sapien
tcaatagatgacattgggattcaca

SEQ ID NO: 5265793 - DNA, 25 bp, Homo sapien
atttactttgctagaaaagatacaa

SEQ ID NO: 5265794 - DNA, 25 bp, Homo sapien
tcttggaacataccccccgtgaata

SEQ ID NO: 5265795 - DNA, 25 bp, Homo sapien
gcatatcaatctgctaagtgcctga

SEQ ID NO: 5265796 - DNA, 25 bp, Homo sapien
gatgtaaaagagcttgtcacacctg

SEQ ID NO: 5265797 - DNA, 25 bp, Homo sapien
ccccgaggaaagaatgagcaggtct

SEQ ID NO: 5265798 - DNA, 25 bp, Homo sapien
tatggccagaaggaaccagcattcc

SEQ ID NO: 5265799 - DNA, 25 bp, Homo sapien
agccctgctccgaggactctcatgt

SEQ ID NO: 5265800 - DNA, 25 bp, Homo sapien
gaggctcccatatgagtgaccagtt

SEQ ID NO: 5265801 - DNA, 25 bp, Homo sapien
gtgaccagtttccagcggacgtccc

SEQ ID NO: 5265802 - DNA, 25 bp, Homo sapien
acggtgcggtcgaggcttctcagca

SEQ ID NO: 5265803 - DNA, 25 bp, Homo sapien
cacaccctggaccttctgcggtgca

SEQ ID NO: 5265804 - DNA, 25 bp, Homo sapien
acaccctggaccttctgcggtgcag

SEQ ID NO: 5265805 - DNA, 25 bp, Homo sapien
cctggaccttctgcggtgcagtcat

SEQ ID NO: 5265806 - DNA, 25 bp, Homo sapien
accctggaccttctgcggtgcagtc

SEQ ID NO: 5265807 - DNA, 25 bp, Homo sapien
gaccacgtaagttgttgctggacac

SEQ ID NO: 5265808 - DNA, 25 bp, Homo sapien
tgctcggcggccagacgcttcacct

SEQ ID NO: 5265809 - DNA, 25 bp, Homo sapien
gacacagctaaacaggctcccttca

SEQ ID NO: 5265810 - DNA, 25 bp, Homo sapien
cacaagcaggaccacgtaagttgtt

SEQ ID NO: 5265811 - DNA, 25 bp, Homo sapien
gagatgcccaattcgtggcgccagc

SEQ ID NO: 5265812 - DNA, 25 bp, Homo sapien
tttgacggaaatgaggctgcgctga

SEQ ID NO: 5265813 - DNA, 25 bp, Homo sapien
cgctgcggctgtggagatgcccaat

SEQ ID NO: 5265814 - DNA, 25 bp, Homo sapien
cagcggctgcgccacgttttttcag

SEQ ID NO: 5265815 - DNA, 25 bp, Homo sapien
agcgccgagacctgacccatcagat

SEQ ID NO: 5265816 - DNA, 25 bp, Homo sapien
gtggccacaactcgcatggagcgcc

SEQ ID NO: 5265817 - DNA, 25 bp, Homo sapien
gggtactgcggtggccacaactcgc

SEQ ID NO: 5265818 - DNA, 25 bp, Homo sapien
agcagccttccgtccagcgccgaga

SEQ ID NO: 5265819 - DNA, 25 bp, Homo sapien
ctgctcccagggccagccctgccgg

SEQ ID NO: 5265820 - DNA, 25 bp, Homo sapien
gcgggtggcactgtcagctgctccc

SEQ ID NO: 5265821 - DNA, 25 bp, Homo sapien
ggcgggtggcactgtcagctgctcc

SEQ ID NO: 5265822 - DNA, 25 bp, Homo sapien
ctcccagggccagccctgccggcat

SEQ ID NO: 5265823 - DNA, 25 bp, Homo sapien
gttgtcatgtgatccaggtggtcta

SEQ ID NO: 5265824 - DNA, 25 bp, Homo sapien
tggtctatgtggtccttgggtcctt

SEQ ID NO: 5265825 - DNA, 25 bp, Homo sapien
gtggtcttgttatctgtatgttttg

SEQ ID NO: 5265826 - DNA, 25 bp, Homo sapien
ggtccatgtattcctgtatattgtg

SEQ ID NO: 5265827 - DNA, 25 bp, Homo sapien
cagccttgtcaatgatgtccacttt

SEQ ID NO: 5265828 - DNA, 25 bp, Homo sapien
ttcactatgaagatcagccttgtca

SEQ ID NO: 5265829 - DNA, 25 bp, Homo sapien
atttcactatgaagatcagccttgt

SEQ ID NO: 5265830 - DNA, 25 bp, Homo sapien
gaggtctctgatatttcactatgaa

SEQ ID NO: 5265831 - DNA, 25 bp, Homo sapien
ggtaggtgacagggtcactggacat

SEQ ID NO: 5265832 - DNA, 25 bp, Homo sapien
cttcttgtagtctaggtggtaggtg

SEQ ID NO: 5265833 - DNA, 25 bp, Homo sapien
ttcttcttgtagtctaggtggtagg

SEQ ID NO: 5265834 - DNA, 25 bp, Homo sapien
cttgtagtctaggtggtaggtgaca

SEQ ID NO: 5265835 - DNA, 25 bp, Homo sapien
ctggctgtggttcagaagtgtatca

SEQ ID NO: 5265836 - DNA, 25 bp, Homo sapien
caggaagccccgtgtttgaatgaac

SEQ ID NO: 5265837 - DNA, 25 bp, Homo sapien
tctagtgtagtttgacaggaagccc

SEQ ID NO: 5265838 - DNA, 25 bp, Homo sapien
ctggcaaaagctccctgaagatgct

SEQ ID NO: 5265839 - DNA, 25 bp, Homo sapien
gattcgattgcactggagaagccgc

SEQ ID NO: 5265840 - DNA, 25 bp, Homo sapien
attgcactggagaagccgcagacat

SEQ ID NO: 5265841 - DNA, 25 bp, Homo sapien
gaggattcgattgcactggagaagc

SEQ ID NO: 5265842 - DNA, 25 bp, Homo sapien
ctgagaggattcgattgcactggag

SEQ ID NO: 5265843 - DNA, 25 bp, Homo sapien
gcagttgctgctccaaagcgtaaaa

SEQ ID NO: 5265844 - DNA, 25 bp, Homo sapien
tgcaaatgaagcagacagcgcccac

SEQ ID NO: 5265845 - DNA, 25 bp, Homo sapien
gaggcagttgctgctccaaagcgta

SEQ ID NO: 5265846 - DNA, 25 bp, Homo sapien
gggaggccggtgcaggggcctgagg

SEQ ID NO: 5265847 - DNA, 25 bp, Homo sapien
catttctggagatgctggcgtgacg

SEQ ID NO: 5265848 - DNA, 25 bp, Homo sapien
gtcattagctcagcaatgggagctc

SEQ ID NO: 5265849 - DNA, 25 bp, Homo sapien
tgctggcgtgacgagtcattagctc

SEQ ID NO: 5265850 - DNA, 25 bp, Homo sapien
ctgctacatttctggagatgctggc

SEQ ID NO: 5265851 - DNA, 25 bp, Homo sapien
agtaatctgagccttcatagggagt

SEQ ID NO: 5265852 - DNA, 25 bp, Homo sapien
caatgaagaagaagtaatctgagcc

SEQ ID NO: 5265853 - DNA, 25 bp, Homo sapien
aatgtacaatgaagaagaagtaatc

SEQ ID NO: 5265854 - DNA, 25 bp, Homo sapien
gaagaagaagtaatctgagccttca

SEQ ID NO: 5265855 - DNA, 25 bp, Homo sapien
agcttgggctttatggccattatgg

SEQ ID NO: 5265856 - DNA, 25 bp, Homo sapien
caggctaattgtttatggcttaaaa

SEQ ID NO: 5265857 - DNA, 25 bp, Homo sapien
gcacagatcgctcaggctaattgtt

SEQ ID NO: 5265858 - DNA, 25 bp, Homo sapien
gcttgggctttatggccattatgga

SEQ ID NO: 5265859 - DNA, 25 bp, Homo sapien
cacccttatcctcgcagtcagaaga

SEQ ID NO: 5265860 - DNA, 25 bp, Homo sapien
ccctgattgcattaaggtgatccac

SEQ ID NO: 5265861 - DNA, 25 bp, Homo sapien
aacagttgaggacttgcttagaatc

SEQ ID NO: 5265862 - DNA, 25 bp, Homo sapien
tcttcaaatggctacagctagaaat

SEQ ID NO: 5265863 - DNA, 25 bp, Homo sapien
tgccgcaggagtgtgagcctctcac

SEQ ID NO: 5265864 - DNA, 25 bp, Homo sapien
tccaaggtgggaatgccgcaggagt

SEQ ID NO: 5265865 - DNA, 25 bp, Homo sapien
gaaaggtgttccaaggtgggaatgc

SEQ ID NO: 5265866 - DNA, 25 bp, Homo sapien
gaatgccgcaggagtgtgagcctct

SEQ ID NO: 5265867 - DNA, 25 bp, Homo sapien
gggaaaggcggtgtctgcagcccgc

SEQ ID NO: 5265868 - DNA, 25 bp, Homo sapien
gaaaggcggtgtctgcagcccgcag

SEQ ID NO: 5265869 - DNA, 25 bp, Homo sapien
cagggaaaggcggtgtctgcagccc

SEQ ID NO: 5265870 - DNA, 25 bp, Homo sapien
ctggcagggaaaggcggtgtctgca

SEQ ID NO: 5265871 - DNA, 25 bp, Homo sapien
cattcaactgtgaaattacaaggaa

SEQ ID NO: 5265872 - DNA, 25 bp, Homo sapien
tcattcaactgtgaaattacaagga

SEQ ID NO: 5265873 - DNA, 25 bp, Homo sapien
gagccccgagttcttcacgtgtgga

SEQ ID NO: 5265874 - DNA, 25 bp, Homo sapien
cagaggagccccgagttcttcacgt

SEQ ID NO: 5265875 - DNA, 25 bp, Homo sapien
ttcacgtgtggaccctgcgagcagc

SEQ ID NO: 5265876 - DNA, 25 bp, Homo sapien
tccccgctgcgcgttgcggaggcca

SEQ ID NO: 5265877 - DNA, 25 bp, Homo sapien
ggactgtagaaaaacgtcttgagcg

SEQ ID NO: 5265878 - DNA, 25 bp, Homo sapien
tcaggtccctctgcgtacacgcatt

SEQ ID NO: 5265879 - DNA, 25 bp, Homo sapien
cctggcgtgttcccaggcgagcacg

SEQ ID NO: 5265880 - DNA, 25 bp, Homo sapien
gcgtacacgcatttagattcccaca

SEQ ID NO: 5265881 - DNA, 25 bp, Homo sapien
gttcccaggcgagcacggccacctt

SEQ ID NO: 5265882 - DNA, 25 bp, Homo sapien
agaggtgcacgccttcacgtccttc

SEQ ID NO: 5265883 - DNA, 25 bp, Homo sapien
gaggctctgctgtttatccagccaa

SEQ ID NO: 5265884 - DNA, 25 bp, Homo sapien
ccagggcgattgaggtcctgaggcc

SEQ ID NO: 5265885 - DNA, 25 bp, Homo sapien
actgaatggaaaagccagggcgatt

SEQ ID NO: 5265886 - DNA, 25 bp, Homo sapien
cataggcgaagctgcgatctccatc

SEQ ID NO: 5265887 - DNA, 25 bp, Homo sapien
gcgaagctgcgatctccatcatttt

SEQ ID NO: 5265888 - DNA, 25 bp, Homo sapien
gaagctgcgatctccatcattttct

SEQ ID NO: 5265889 - DNA, 25 bp, Homo sapien
aggcgaagctgcgatctccatcatt

SEQ ID NO: 5265890 - DNA, 25 bp, Homo sapien
caggaagaagcctggccgtgactgt

SEQ ID NO: 5265891 - DNA, 25 bp, Homo sapien
tgtttggcagcgtaggtttgttcct

SEQ ID NO: 5265892 - DNA, 25 bp, Homo sapien
tttgaaattaggacacaagtcccca

SEQ ID NO: 5265893 - DNA, 25 bp, Homo sapien
aagcctggccgtgactgtgtttggc

SEQ ID NO: 5265894 - DNA, 25 bp, Homo sapien
ccggggcagctcttgaaaaacacca

SEQ ID NO: 5265895 - DNA, 25 bp, Homo sapien
acagagaccttgacgcccacgttgc

SEQ ID NO: 5265896 - DNA, 25 bp, Homo sapien
gatcccacagagaccttgacgccca

SEQ ID NO: 5265897 - DNA, 25 bp, Homo sapien
cagggcacggcaggttcggtcagaa

SEQ ID NO: 5265898 - DNA, 25 bp, Homo sapien
gctttgtgttttctggaatgcgagg

SEQ ID NO: 5265899 - DNA, 25 bp, Homo sapien
atgcgaggtgacaagcccggtccca

SEQ ID NO: 5265900 - DNA, 25 bp, Homo sapien
aggcgtggccaactgtgtttttaga

SEQ ID NO: 5265901 - DNA, 25 bp, Homo sapien
tttagagaaagtcccccggcgctca

SEQ ID NO: 5265902 - DNA, 25 bp, Homo sapien
acgcggctgcgatgctcggtcatcc

SEQ ID NO: 5265903 - DNA, 25 bp, Homo sapien
tgcgatgctcggtcatcctggctcc

SEQ ID NO: 5265904 - DNA, 25 bp, Homo sapien
cgggtccgtccacgcggctgcgatg

SEQ ID NO: 5265905 - DNA, 25 bp, Homo sapien
cgtccacgcggctgcgatgctcggt

SEQ ID NO: 5265906 - DNA, 25 bp, Homo sapien
aggagcagggccaacacgccgcggg

SEQ ID NO: 5265907 - DNA, 25 bp, Homo sapien
agcagcgtggcctgatgactccatt

SEQ ID NO: 5265908 - DNA, 25 bp, Homo sapien
gcctcgggttccatcgcagcagcgt

SEQ ID NO: 5265909 - DNA, 25 bp, Homo sapien
gcagggccaacacgccgcgggctct

SEQ ID NO: 5265910 - DNA, 25 bp, Homo sapien
acagcagcctcgtgtctccacatgg

SEQ ID NO: 5265911 - DNA, 25 bp, Homo sapien
cgtgtctccacatgggacgtttcct

SEQ ID NO: 5265912 - DNA, 25 bp, Homo sapien
ggaggaggcgcgtccacagcagcct

SEQ ID NO: 5265913 - DNA, 25 bp, Homo sapien
accgagtccacagcgccagtgcggg

SEQ ID NO: 5265914 - DNA, 25 bp, Homo sapien
gtgtatccgcgtccggcccgacttg

SEQ ID NO: 5265915 - DNA, 25 bp, Homo sapien
ggaggcgggtgtatccgcgtccggc

SEQ ID NO: 5265916 - DNA, 25 bp, Homo sapien
ccggcccgacttgtgaggaaacagc

SEQ ID NO: 5265917 - DNA, 25 bp, Homo sapien
cccgacttgtgaggaaacagcacac

SEQ ID NO: 5265918 - DNA, 25 bp, Homo sapien
gcggagtcggcgcagcctggaacag

SEQ ID NO: 5265919 - DNA, 25 bp, Homo sapien
gtgaagcgagcggagtcggcgcagc

SEQ ID NO: 5265920 - DNA, 25 bp, Homo sapien
agcgagcggagtcggcgcagcctgg

SEQ ID NO: 5265921 - DNA, 25 bp, Homo sapien
ggagtcggcgcagcctggaacaggg

SEQ ID NO: 5265922 - DNA, 25 bp, Homo sapien
gagggcgtccgtgtgcccacaggcc

SEQ ID NO: 5265923 - DNA, 25 bp, Homo sapien
cccgggcccatcagcgcaatcggga

SEQ ID NO: 5265924 - DNA, 25 bp, Homo sapien
agcgcaatcgggagggcgtccgtgt

SEQ ID NO: 5265925 - DNA, 25 bp, Homo sapien
gtccccgggcccatcagcgcaatcg

SEQ ID NO: 5265926 - DNA, 25 bp, Homo sapien
gagacaccgggcttgtatctttaat

SEQ ID NO: 5265927 - DNA, 25 bp, Homo sapien
cacagtcctcaaatggatgccagga

SEQ ID NO: 5265928 - DNA, 25 bp, Homo sapien
cgtgactgtctcacccgtggagaca

SEQ ID NO: 5265929 - DNA, 25 bp, Homo sapien
atgccaggaagaacccaagagctct

SEQ ID NO: 5265930 - DNA, 25 bp, Homo sapien
aaggttatgacgaggaatgtaagga

SEQ ID NO: 5265931 - DNA, 25 bp, Homo sapien
tatgacgaggaatgtaaggaggttt

SEQ ID NO: 5265932 - DNA, 25 bp, Homo sapien
gatgaaggttatgacgaggaatgta

SEQ ID NO: 5265933 - DNA, 25 bp, Homo sapien
ctgatgaaggttatgacgaggaatg

SEQ ID NO: 5265934 - DNA, 25 bp, Homo sapien
gacgttccgcgctgcattcaggtga

SEQ ID NO: 5265935 - DNA, 25 bp, Homo sapien
tccgtgatacgcaccacgtgagcac

SEQ ID NO: 5265936 - DNA, 25 bp, Homo sapien
tggtcattcagctccgtgatacgca

SEQ ID NO: 5265937 - DNA, 25 bp, Homo sapien
taaactcagaagtctccagtttgac

SEQ ID NO: 5265938 - DNA, 25 bp, Homo sapien
caccttgagaactggcgtccacaag

SEQ ID NO: 5265939 - DNA, 25 bp, Homo sapien
tggcgtccacaagactaacagtgtc

SEQ ID NO: 5265940 - DNA, 25 bp, Homo sapien
gttaagccagcagcgagtgacgcct

SEQ ID NO: 5265941 - DNA, 25 bp, Homo sapien
tagtgcccagggtattcaccttgag

SEQ ID NO: 5265942 - DNA, 25 bp, Homo sapien
gtccctcccgcaccttagtcctctg

SEQ ID NO: 5265943 - DNA, 25 bp, Homo sapien
tgagccgctgcctacacgggtgtcc

SEQ ID NO: 5265944 - DNA, 25 bp, Homo sapien
cccgcaccttagtcctctgcatcag

SEQ ID NO: 5265945 - DNA, 25 bp, Homo sapien
tgtgagccgctgcctacacgggtgt

SEQ ID NO: 5265946 - DNA, 25 bp, Homo sapien
tacggatcttagacaagagctcagt

SEQ ID NO: 5265947 - DNA, 25 bp, Homo sapien
tcagtctcattagggccatgattag

SEQ ID NO: 5265948 - DNA, 25 bp, Homo sapien
actgcatggctgcattgtcagctgc

SEQ ID NO: 5265949 - DNA, 25 bp, Homo sapien
gtcagtcgctggcaccgaggtttct

SEQ ID NO: 5265950 - DNA, 25 bp, Homo sapien
tcagcccgggaaccatgggctgttg

SEQ ID NO: 5265951 - DNA, 25 bp, Homo sapien
ctgtggcctgtacccagctgggcca

SEQ ID NO: 5265952 - DNA, 25 bp, Homo sapien
tggtgcccggtgaaggcctggtccc

SEQ ID NO: 5265953 - DNA, 25 bp, Homo sapien
cactgtggcctgtacccagctgggc

SEQ ID NO: 5265954 - DNA, 25 bp, Homo sapien
gaggtccgaggtacattcattccag

SEQ ID NO: 5265955 - DNA, 25 bp, Homo sapien
aggaaccgtgggctgttgcggtgcc

SEQ ID NO: 5265956 - DNA, 25 bp, Homo sapien
tgtgggaattaatggctgctgagct

SEQ ID NO: 5265957 - DNA, 25 bp, Homo sapien
tgggcgtgtgggaattaatggctgc

SEQ ID NO: 5265958 - DNA, 25 bp, Homo sapien
tgtccaccttgaccaaggaacccag

SEQ ID NO: 5265959 - DNA, 25 bp, Homo sapien
gaacccagcacggccacagaaccga

SEQ ID NO: 5265960 - DNA, 25 bp, Homo sapien
tcagctgtccaccttgaccaaggaa

SEQ ID NO: 5265961 - DNA, 25 bp, Homo sapien
caaggaacccagcacggccacagaa

SEQ ID NO: 5265962 - DNA, 25 bp, Homo sapien
tcttccccgtggctgagataataca

SEQ ID NO: 5265963 - DNA, 25 bp, Homo sapien
aatcagtggctctgtcaagtcttcc

SEQ ID NO: 5265964 - DNA, 25 bp, Homo sapien
gggtacaggccacagtaagattgct

SEQ ID NO: 5265965 - DNA, 25 bp, Homo sapien
aaacggtacgttccacattgtctag

SEQ ID NO: 5265966 - DNA, 25 bp, Homo sapien
tctccgagggtcacttgtcagcttg

SEQ ID NO: 5265967 - DNA, 25 bp, Homo sapien
caatgatgctgcctgggtatttcac

SEQ ID NO: 5265968 - DNA, 25 bp, Homo sapien
cttagtgcagacaaggatttcagga

SEQ ID NO: 5265969 - DNA, 25 bp, Homo sapien
tcctaggtaaaccatggcttctggc

SEQ ID NO: 5265970 - DNA, 25 bp, Homo sapien
atgcagacgcccagctcagatggag

SEQ ID NO: 5265971 - DNA, 25 bp, Homo sapien
gaaagaccagcacatggagggccaa

SEQ ID NO: 5265972 - DNA, 25 bp, Homo sapien
tagggatccataaacccagagatgc

SEQ ID NO: 5265973 - DNA, 25 bp, Homo sapien
gagcatcactcccacatacaacaga

SEQ ID NO: 5265974 - DNA, 25 bp, Homo sapien
ggatgcccagctcactcggatggag

SEQ ID NO: 5265975 - DNA, 25 bp, Homo sapien
catgtacaacagaaccccgagatgc

SEQ ID NO: 5265976 - DNA, 25 bp, Homo sapien
cacaacaggactcatggaggcagtc

SEQ ID NO: 5265977 - DNA, 25 bp, Homo sapien
gagatgcagatgctcagctcactga

SEQ ID NO: 5265978 - DNA, 25 bp, Homo sapien
agctgctgaagggtgttttggccca

SEQ ID NO: 5265979 - DNA, 25 bp, Homo sapien
caggagctgctgaagggtgttttgg

SEQ ID NO: 5265980 - DNA, 25 bp, Homo sapien
gagcaggagctgctgaagggtgttt

SEQ ID NO: 5265981 - DNA, 25 bp, Homo sapien
ggagctgctgaagggtgttttggcc

SEQ ID NO: 5265982 - DNA, 25 bp, Homo sapien
aggcttacagagcagaccctatggc

SEQ ID NO: 5265983 - DNA, 25 bp, Homo sapien
ctttcagggcctgtgccagtcagcg

SEQ ID NO: 5265984 - DNA, 25 bp, Homo sapien
cacatgcttggacttaggcctctgc

SEQ ID NO: 5265985 - DNA, 25 bp, Homo sapien
tcccctggcataggtcttgtgcaat

SEQ ID NO: 5265986 - DNA, 25 bp, Homo sapien
cacccacagcctgcgtgggcctcgc

SEQ ID NO: 5265987 - DNA, 25 bp, Homo sapien
cagccccactcggaacaagctgcca

SEQ ID NO: 5265988 - DNA, 25 bp, Homo sapien
aacaagctgccaccaacgcatggca

SEQ ID NO: 5265989 - DNA, 25 bp, Homo sapien
gcctgcgtgggcctcgccgccccat

SEQ ID NO: 5265990 - DNA, 25 bp, Homo sapien
ccagccaaaggtggagctaagttcc

SEQ ID NO: 5265991 - DNA, 25 bp, Homo sapien
tgagattcaatcacacggccccata

SEQ ID NO: 5265992 - DNA, 25 bp, Homo sapien
gaaaatcaaagaccacacgtcatgg

SEQ ID NO: 5265993 - DNA, 25 bp, Homo sapien
tttatggagcctgaaaccagtgtgc

SEQ ID NO: 5265994 - DNA, 25 bp, Homo sapien
tgactcagttccacatggccgggga

SEQ ID NO: 5265995 - DNA, 25 bp, Homo sapien
gactcagttccacatggccggggag

SEQ ID NO: 5265996 - DNA, 25 bp, Homo sapien
caagaagtttaattgactcagttcc

SEQ ID NO: 5265997 - DNA, 25 bp, Homo sapien
taaacaagaagtttaattgactcag

SEQ ID NO: 5265998 - DNA, 25 bp, Homo sapien
cattgtctgtgatgcggctgaccca

SEQ ID NO: 5265999 - DNA, 25 bp, Homo sapien
catgtcttggaaggtgaaaacaccc

SEQ ID NO: 5266000 - DNA, 25 bp, Homo sapien
tcaaatatctacacaacggccctgg

SEQ ID NO: 5266001 - DNA, 25 bp, Homo sapien
ggattttatgcatcaccccgggctc

SEQ ID NO: 5266002 - DNA, 25 bp, Homo sapien
tatgaagctctgcagagaccgttcc

SEQ ID NO: 5266003 - DNA, 25 bp, Homo sapien
gaagacgcatgtcctgatggataca

SEQ ID NO: 5266004 - DNA, 25 bp, Homo sapien
ggaaggacgcaaactccaagcagct

SEQ ID NO: 5266005 - DNA, 25 bp, Homo sapien
agtgtgtgccctaccactgtggata

SEQ ID NO: 5266006 - DNA, 25 bp, Homo sapien
ttgtgcattcttcaggtcagtcatc

SEQ ID NO: 5266007 - DNA, 25 bp, Homo sapien
cttgtgcattcttcaggtcagtcat

SEQ ID NO: 5266008 - DNA, 25 bp, Homo sapien
tgaacatccccctggagtcgaaata

SEQ ID NO: 5266009 - DNA, 25 bp, Homo sapien
tatagaaatgaacatccccctggag

SEQ ID NO: 5266010 - DNA, 25 bp, Homo sapien
agaaatgaacatccccctggagtcg

SEQ ID NO: 5266011 - DNA, 25 bp, Homo sapien
aatactatagaaatgaacatccccc

SEQ ID NO: 5266012 - DNA, 25 bp, Homo sapien
taaaacctacagagtaacaacgtca

SEQ ID NO: 5266013 - DNA, 25 bp, Homo sapien
cacatctgaccttagctggaagaca

SEQ ID NO: 5266014 - DNA, 25 bp, Homo sapien
gcccacccttgggagcagcggtaat

SEQ ID NO: 5266015 - DNA, 25 bp, Homo sapien
ttagataagactttggagagagctg

SEQ ID NO: 5266016 - DNA, 25 bp, Homo sapien
ctgcacaaaggtacagcgccaggga

SEQ ID NO: 5266017 - DNA, 25 bp, Homo sapien
atctccacctgcacaaaggtacagc

SEQ ID NO: 5266018 - DNA, 25 bp, Homo sapien
ccagcacaggaaatgccatcaacaa

SEQ ID NO: 5266019 - DNA, 25 bp, Homo sapien
cagaggatctgcacgtgggtgttga

SEQ ID NO: 5266020 - DNA, 25 bp, Homo sapien
tggagtcgtaggcacagccatgaac

SEQ ID NO: 5266021 - DNA, 25 bp, Homo sapien
caagcatgtggcgagtgctgctaca

SEQ ID NO: 5266022 - DNA, 25 bp, Homo sapien
ggcgcttacactctataccatggga

SEQ ID NO: 5266023 - DNA, 25 bp, Homo sapien
tgggtcaacacctcatgagcatggg

SEQ ID NO: 5266024 - DNA, 25 bp, Homo sapien
atcgcagccgcctcattgatgtatt

SEQ ID NO: 5266025 - DNA, 25 bp, Homo sapien
ccataggaggggagcgaacagcttt

SEQ ID NO: 5266026 - DNA, 25 bp, Homo sapien
cactgccactgagatgaccatagga

SEQ ID NO: 5266027 - DNA, 25 bp, Homo sapien
gggacactgccactgagatgaccat

SEQ ID NO: 5266028 - DNA, 25 bp, Homo sapien
tgccactgagatgaccataggaggg

SEQ ID NO: 5266029 - DNA, 25 bp, Homo sapien
tagtctgtagcttcgggaggacaag

SEQ ID NO: 5266030 - DNA, 25 bp, Homo sapien
agcaggtgaggagcacgcagagcgc

SEQ ID NO: 5266031 - DNA, 25 bp, Homo sapien
ctagacacagaaagtgcccgatctg

SEQ ID NO: 5266032 - DNA, 25 bp, Homo sapien
aggacaagcaggtgaggagcacgca

SEQ ID NO: 5266033 - DNA, 25 bp, Homo sapien
cactgtcctgccactcaaggccggg

SEQ ID NO: 5266034 - DNA, 25 bp, Homo sapien
gatggaaacaggattctcccctcag

SEQ ID NO: 5266035 - DNA, 25 bp, Homo sapien
gaacagaatcatgtttttaaggtgg

SEQ ID NO: 5266036 - DNA, 25 bp, Homo sapien
ccctcagtgcaactataattcatgg

SEQ ID NO: 5266037 - DNA, 25 bp, Homo sapien
gctcctttcgtttgtggaacagaat

SEQ ID NO: 5266038 - DNA, 25 bp, Homo sapien
tcagggaatcttgagccatcgccac

SEQ ID NO: 5266039 - DNA, 25 bp, Homo sapien
caaggaaattaagacgattgctcaa

SEQ ID NO: 5266040 - DNA, 25 bp, Homo sapien
ggctcagccccaaaggtaaaacatg

SEQ ID NO: 5266041 - DNA, 25 bp, Homo sapien
gattgctcaaagagatgcacttggc

SEQ ID NO: 5266042 - DNA, 25 bp, Homo sapien
gaactcctgtgtcactactctctgc

SEQ ID NO: 5266043 - DNA, 25 bp, Homo sapien
agagccgcgccatgacataaggaca

SEQ ID NO: 5266044 - DNA, 25 bp, Homo sapien
gaagtagccaggctcagatccactg

SEQ ID NO: 5266045 - DNA, 25 bp, Homo sapien
ctctctgctggggaccgcagcggct

SEQ ID NO: 5266046 - DNA, 25 bp, Homo sapien
aagaccagaggcacggaggtgaggg

SEQ ID NO: 5266047 - DNA, 25 bp, Homo sapien
ttctgcccagaccccatcgagtgcc

SEQ ID NO: 5266048 - DNA, 25 bp, Homo sapien
catgtcaccccttggcggccacgtg

SEQ ID NO: 5266049 - DNA, 25 bp, Homo sapien
tgcccagaccccatcgagtgcccat

SEQ ID NO: 5266050 - DNA, 25 bp, Homo sapien
agctgacagagaaggcggacggcat

SEQ ID NO: 5266051 - DNA, 25 bp, Homo sapien
cacggctgggatgctgacggggaaa

SEQ ID NO: 5266052 - DNA, 25 bp, Homo sapien
gatgctgacggggaaagagctgaca

SEQ ID NO: 5266053 - DNA, 25 bp, Homo sapien
cgtgagcacggctgggatgctgacg

SEQ ID NO: 5266054 - DNA, 25 bp, Homo sapien
gccgaacccggcctggccagaatcc

SEQ ID NO: 5266055 - DNA, 25 bp, Homo sapien
gaatccacagaggagggcgccaaat

SEQ ID NO: 5266056 - DNA, 25 bp, Homo sapien
ttgggaagcccgctctcacagcaac

SEQ ID NO: 5266057 - DNA, 25 bp, Homo sapien
caaatcctctctcgtgagatctgcc

SEQ ID NO: 5266058 - DNA, 25 bp, Homo sapien
aacttatttttgacagttgcatttt

SEQ ID NO: 5266059 - DNA, 25 bp, Homo sapien
tataaacttatttttgacagttgca

SEQ ID NO: 5266060 - DNA, 25 bp, Homo sapien
ttataaacttatttttgacagttgc

SEQ ID NO: 5266061 - DNA, 25 bp, Homo sapien
taaacttatttttgacagttgcatt

SEQ ID NO: 5266062 - DNA, 25 bp, Homo sapien
tttaccacctgtgccggtgggcttc

SEQ ID NO: 5266063 - DNA, 25 bp, Homo sapien
gctgtccccgtggtgctctcaggct

SEQ ID NO: 5266064 - DNA, 25 bp, Homo sapien
ccacctgtgccggtgggcttctctg

SEQ ID NO: 5266065 - DNA, 25 bp, Homo sapien
tttccactttgttgatcactggcat

SEQ ID NO: 5266066 - DNA, 25 bp, Homo sapien
tagatttacccgttgaagccttgac

SEQ ID NO: 5266067 - DNA, 25 bp, Homo sapien
aggtccgtgctatggttgggatcca

SEQ ID NO: 5266068 - DNA, 25 bp, Homo sapien
catttccacctagatttacccgttg

SEQ ID NO: 5266069 - DNA, 25 bp, Homo sapien
cgtgctatggttgggatccatttcc

SEQ ID NO: 5266070 - DNA, 25 bp, Homo sapien
gatttgtggtcaagctgagtccggc

SEQ ID NO: 5266071 - DNA, 25 bp, Homo sapien
cagacaagactcaccctcactgggt

SEQ ID NO: 5266072 - DNA, 25 bp, Homo sapien
tgaacttgttggtagcctggagatt

SEQ ID NO: 5266073 - DNA, 25 bp, Homo sapien
gattcagtggcatggcggccttcac

SEQ ID NO: 5266074 - DNA, 25 bp, Homo sapien
ctggccttttccacgccccgcatct

SEQ ID NO: 5266075 - DNA, 25 bp, Homo sapien
atcaggacgcagatcaggcggcgca

SEQ ID NO: 5266076 - DNA, 25 bp, Homo sapien
gttccaagatcaggacgcagatcag

SEQ ID NO: 5266077 - DNA, 25 bp, Homo sapien
ctcagaagccagtcgggagaggacg

SEQ ID NO: 5266078 - DNA, 25 bp, Homo sapien
gaagaaacacggagactctagctgt

SEQ ID NO: 5266079 - DNA, 25 bp, Homo sapien
cctgggtcctcgttagaactttctg

SEQ ID NO: 5266080 - DNA, 25 bp, Homo sapien
cctcgttagaactttctgttgccaa

SEQ ID NO: 5266081 - DNA, 25 bp, Homo sapien
ggtcctcgttagaactttctgttgc

SEQ ID NO: 5266082 - DNA, 25 bp, Homo sapien
gttagaactttctgttgccaagggc

SEQ ID NO: 5266083 - DNA, 25 bp, Homo sapien
gcaatctggatgagatcaaagacta

SEQ ID NO: 5266084 - DNA, 25 bp, Homo sapien
ttgcaattgcaaaatcatgggacca

SEQ ID NO: 5266085 - DNA, 25 bp, Homo sapien
aaaggaaagaattaatgggatctgc

SEQ ID NO: 5266086 - DNA, 25 bp, Homo sapien
gattaggaaacacctccacactgct

SEQ ID NO: 5266087 - DNA, 25 bp, Homo sapien
acatcaggatgtcggctgatactag

SEQ ID NO: 5266088 - DNA, 25 bp, Homo sapien
aggatgtcggctgatactagccaga

SEQ ID NO: 5266089 - DNA, 25 bp, Homo sapien
cctgacatcaggatgtcggctgata

SEQ ID NO: 5266090 - DNA, 25 bp, Homo sapien
ttctcctgacatcaggatgtcggct

SEQ ID NO: 5266091 - DNA, 25 bp, Homo sapien
gctaactgcaaatcacgggtgggaa

SEQ ID NO: 5266092 - DNA, 25 bp, Homo sapien
acacgcaaaccaggccgcaaaggaa

SEQ ID NO: 5266093 - DNA, 25 bp, Homo sapien
aaacccggactgagctccgagtcct

SEQ ID NO: 5266094 - DNA, 25 bp, Homo sapien
ggagaggccagtcagcgtttgctaa

SEQ ID NO: 5266095 - DNA, 25 bp, Homo sapien
agatcttccatctcatgcaccctca

SEQ ID NO: 5266096 - DNA, 25 bp, Homo sapien
gatcttccatctcatgcaccctcac

SEQ ID NO: 5266097 - DNA, 25 bp, Homo sapien
cagatcttccatctcatgcaccctc

SEQ ID NO: 5266098 - DNA, 25 bp, Homo sapien
agctgctgtgatcacgtccacccgc

SEQ ID NO: 5266099 - DNA, 25 bp, Homo sapien
ccacccaccagatctgcttccatcc

SEQ ID NO: 5266100 - DNA, 25 bp, Homo sapien
tgtgatcacgtccacccgctagatc

SEQ ID NO: 5266101 - DNA, 25 bp, Homo sapien
ctgcttccatcccatgcaccctcgc

SEQ ID NO: 5266102 - DNA, 25 bp, Homo sapien
tagttcacagtcactggcgtcatgg

SEQ ID NO: 5266103 - DNA, 25 bp, Homo sapien
atgggtattaaagttgcttcatcag

SEQ ID NO: 5266104 - DNA, 25 bp, Homo sapien
tcatcagcaccggttctacttaagt

SEQ ID NO: 5266105 - DNA, 25 bp, Homo sapien
cggttctacttaagtccatgttttg

SEQ ID NO: 5266106 - DNA, 25 bp, Homo sapien
tttctgatgggctctcagatttcat

SEQ ID NO: 5266107 - DNA, 25 bp, Homo sapien
ttttctgatgggctctcagatttca

SEQ ID NO: 5266108 - DNA, 25 bp, Homo sapien
tctagaaagtgactgtgaggggatc

SEQ ID NO: 5266109 - DNA, 25 bp, Homo sapien
gagtgatggcaaatgtgagctttct

SEQ ID NO: 5266110 - DNA, 25 bp, Homo sapien
tttctgtccataaagatagctggca

SEQ ID NO: 5266111 - DNA, 25 bp, Homo sapien
agagggtgaagcgattcgtaaaggg

SEQ ID NO: 5266112 - DNA, 25 bp, Homo sapien
aatggccgttgatgggaaaaccgtg

SEQ ID NO: 5266113 - DNA, 25 bp, Homo sapien
tccaagcctataattacataatgtg

SEQ ID NO: 5266114 - DNA, 25 bp, Homo sapien
gaaaaccgtggatttaatgacaggc

SEQ ID NO: 5266115 - DNA, 25 bp, Homo sapien
tctttggacaatcagggaccttctg

SEQ ID NO: 5266116 - DNA, 25 bp, Homo sapien
ggcaggaaacatggagccgccgtca

SEQ ID NO: 5266117 - DNA, 25 bp, Homo sapien
ccttggcgtagctggatggcggtgt

SEQ ID NO: 5266118 - DNA, 25 bp, Homo sapien
agcccccagacagtgcaagatgtta

SEQ ID NO: 5266119 - DNA, 25 bp, Homo sapien
taatagcaccgccattggcaggaaa

SEQ ID NO: 5266120 - DNA, 25 bp, Homo sapien
gcctcacttcccctgaactgttctg

SEQ ID NO: 5266121 - DNA, 25 bp, Homo sapien
aggggcctcacttcccctgaactgt

SEQ ID NO: 5266122 - DNA, 25 bp, Homo sapien
ctcacttcccctgaactgttctggt

SEQ ID NO: 5266123 - DNA, 25 bp, Homo sapien
cacttcccctgaactgttctggttt

SEQ ID NO: 5266124 - DNA, 25 bp, Homo sapien
cagatacccatgttgcagtcggcgg

SEQ ID NO: 5266125 - DNA, 25 bp, Homo sapien
cctgaagatgggagctgactgtcct

SEQ ID NO: 5266126 - DNA, 25 bp, Homo sapien
agagatcggagtgaaccagccgcaa

SEQ ID NO: 5266127 - DNA, 25 bp, Homo sapien
actggaatcgcagagggcctcgtca

SEQ ID NO: 5266128 - DNA, 25 bp, Homo sapien
tcagacctgtgggtccatgtgccgt

SEQ ID NO: 5266129 - DNA, 25 bp, Homo sapien
agttcctgtcataactccctgtgcg

SEQ ID NO: 5266130 - DNA, 25 bp, Homo sapien
tgccgtttgctgtcataagttcctg

SEQ ID NO: 5266131 - DNA, 25 bp, Homo sapien
tcagcatgtccgcatggagagctgt

SEQ ID NO: 5266132 - DNA, 25 bp, Homo sapien
ctgtcctcatctacaacagggactt

SEQ ID NO: 5266133 - DNA, 25 bp, Homo sapien
catctacaacagggacttttaatat

SEQ ID NO: 5266134 - DNA, 25 bp, Homo sapien
tcctcatctacaacagggactttta

SEQ ID NO: 5266135 - DNA, 25 bp, Homo sapien
cctcatctacaacagggacttttaa

SEQ ID NO: 5266136 - DNA, 25 bp, Homo sapien
taaactggtggtcaacagtgcaggg

SEQ ID NO: 5266137 - DNA, 25 bp, Homo sapien
tcctcccaggcactggcctatgggt

SEQ ID NO: 5266138 - DNA, 25 bp, Homo sapien
tgattcctactgtggagtgatcccc

SEQ ID NO: 5266139 - DNA, 25 bp, Homo sapien
gcctatgggtgagcatctctccttt

SEQ ID NO: 5266140 - DNA, 25 bp, Homo sapien
gaaggaccttgggtatgcgggacat

SEQ ID NO: 5266141 - DNA, 25 bp, Homo sapien
acagccatagagaccgcatccctgg

SEQ ID NO: 5266142 - DNA, 25 bp, Homo sapien
atagagaccgcatccctgggttttc

SEQ ID NO: 5266143 - DNA, 25 bp, Homo sapien
cagaaggaccttgggtatgcgggac

SEQ ID NO: 5266144 - DNA, 25 bp, Homo sapien
tttctaacacagtgtagcaggtacc

SEQ ID NO: 5266145 - DNA, 25 bp, Homo sapien
ctggttccaccatgtgccaaagacc

SEQ ID NO: 5266146 - DNA, 25 bp, Homo sapien
catgtttgggagacttggtgctttc

SEQ ID NO: 5266147 - DNA, 25 bp, Homo sapien
aggtggtcctctaatgggctggttc

SEQ ID NO: 5266148 - DNA, 25 bp, Homo sapien
cacagtcaccctcggtcaggtgctg

SEQ ID NO: 5266149 - DNA, 25 bp, Homo sapien
tatgcaacaggatgccacagtcacc

SEQ ID NO: 5266150 - DNA, 25 bp, Homo sapien
gaaagccagaccaggtcagagacct

SEQ ID NO: 5266151 - DNA, 25 bp, Homo sapien
cctcggtcaggtgctgggaaagcca

SEQ ID NO: 5266152 - DNA, 25 bp, Homo sapien
tggaaatacacagcggcatcatcat

SEQ ID NO: 5266153 - DNA, 25 bp, Homo sapien
cacctgcttaattattaaatgcggg

SEQ ID NO: 5266154 - DNA, 25 bp, Homo sapien
taaggcatgggcgtcttcttcatcg

SEQ ID NO: 5266155 - DNA, 25 bp, Homo sapien
cacttaagtcactattctggatgag

SEQ ID NO: 5266156 - DNA, 25 bp, Homo sapien
tatggagaatcttgtgtgcacctac

SEQ ID NO: 5266157 - DNA, 25 bp, Homo sapien
ttttcgaggacaatgggagtgcttc

SEQ ID NO: 5266158 - DNA, 25 bp, Homo sapien
taccaggtcatcttaggcaggcatg

SEQ ID NO: 5266159 - DNA, 25 bp, Homo sapien
ccaagccgccatcaggtgaaggact

SEQ ID NO: 5266160 - DNA, 25 bp, Homo sapien
aattatccttgcctacaagggccca

SEQ ID NO: 5266161 - DNA, 25 bp, Homo sapien
agcagagcccttgcgaggtccttgg

SEQ ID NO: 5266162 - DNA, 25 bp, Homo sapien
tattgccaacctaaataagagacag

SEQ ID NO: 5266163 - DNA, 25 bp, Homo sapien
cattgcaatgggagtcagtgaatac

SEQ ID NO: 5266164 - DNA, 25 bp, Homo sapien
acagtaggagagttaatgttctcca

SEQ ID NO: 5266165 - DNA, 25 bp, Homo sapien
ggatctttagagtatgctgcatctc

SEQ ID NO: 5266166 - DNA, 25 bp, Homo sapien
ttgacaaaggccacttaacacattt

SEQ ID NO: 5266167 - DNA, 25 bp, Homo sapien
gcagtatagtgtaattcaagatagg

SEQ ID NO: 5266168 - DNA, 25 bp, Homo sapien
caaagcccgtaagagaatgcagaca

SEQ ID NO: 5266169 - DNA, 25 bp, Homo sapien
tatggcagatgctgaggccaggcct

SEQ ID NO: 5266170 - DNA, 25 bp, Homo sapien
cattctggtgaatcaactctctggc

SEQ ID NO: 5266171 - DNA, 25 bp, Homo sapien
taattattcgcttaccagcgagagg

SEQ ID NO: 5266172 - DNA, 25 bp, Homo sapien
ctgcggccagaaagggaggaaacaa

SEQ ID NO: 5266173 - DNA, 25 bp, Homo sapien
tcccagtgcccacgtgtggagttgt

SEQ ID NO: 5266174 - DNA, 25 bp, Homo sapien
gagttgtcaaatgatgccccatagg

SEQ ID NO: 5266175 - DNA, 25 bp, Homo sapien
tattttgcctttgtgggagacgaac

SEQ ID NO: 5266176 - DNA, 25 bp, Homo sapien
aactgtcactaaaggcacccacagg

SEQ ID NO: 5266177 - DNA, 25 bp, Homo sapien
cccacagggccaccaggacctccat

SEQ ID NO: 5266178 - DNA, 25 bp, Homo sapien
caactgtcactaaaggcacccacag

SEQ ID NO: 5266179 - DNA, 25 bp, Homo sapien
gcacccacagggccaccaggacctc

SEQ ID NO: 5266180 - DNA, 25 bp, Homo sapien
ctgatgagttggtgttgagcccaga

SEQ ID NO: 5266181 - DNA, 25 bp, Homo sapien
gagttggtgttgagcccagaccagt

SEQ ID NO: 5266182 - DNA, 25 bp, Homo sapien
gtgttgagcccagaccagttatgac

SEQ ID NO: 5266183 - DNA, 25 bp, Homo sapien
tggtgttgagcccagaccagttatg

SEQ ID NO: 5266184 - DNA, 25 bp, Homo sapien
caggaaggatattctcgctgtgggc

SEQ ID NO: 5266185 - DNA, 25 bp, Homo sapien
caaaactttctcgagaacacgcagg

SEQ ID NO: 5266186 - DNA, 25 bp, Homo sapien
catggagctggaaacttgcgatgcc

SEQ ID NO: 5266187 - DNA, 25 bp, Homo sapien
tcagtttgcaaaaatccatggagct

SEQ ID NO: 5266188 - DNA, 25 bp, Homo sapien
cacaaaggtcagaggccaagtcctg

SEQ ID NO: 5266189 - DNA, 25 bp, Homo sapien
tcagaggccaagtcctggtgattct

SEQ ID NO: 5266190 - DNA, 25 bp, Homo sapien
agtcctggtgattctctaaactgct

SEQ ID NO: 5266191 - DNA, 25 bp, Homo sapien
ctctaaactgctgtcccgtgtggtt

SEQ ID NO: 5266192 - DNA, 25 bp, Homo sapien
cactgtgaaaacgatagctgatccc

SEQ ID NO: 5266193 - DNA, 25 bp, Homo sapien
gcccgaagaccacgacactgtgaaa

SEQ ID NO: 5266194 - DNA, 25 bp, Homo sapien
gcatgcgtaaaggtgcagacgacgt

SEQ ID NO: 5266195 - DNA, 25 bp, Homo sapien
gatccctttgctacagacacggaag

SEQ ID NO: 5266196 - DNA, 25 bp, Homo sapien
caatcagattatgcaagttgaaaga

SEQ ID NO: 5266197 - DNA, 25 bp, Homo sapien
gaaattctgacttgaggtgggtgac

SEQ ID NO: 5266198 - DNA, 25 bp, Homo sapien
cagttccttcacacagatgttacca

SEQ ID NO: 5266199 - DNA, 25 bp, Homo sapien
gatgttaccagccatgctaccagtg

SEQ ID NO: 5266200 - DNA, 25 bp, Homo sapien
tgggtgactattaaggactggccag

SEQ ID NO: 5266201 - DNA, 25 bp, Homo sapien
atgaaaagcaagtcttatctccttc

SEQ ID NO: 5266202 - DNA, 25 bp, Homo sapien
tctccttccgtgagttttctagaaa

SEQ ID NO: 5266203 - DNA, 25 bp, Homo sapien
tctagaaaatcacatactgaatcat

SEQ ID NO: 5266204 - DNA, 25 bp, Homo sapien
caagtaccaattttcatgaaaagca

SEQ ID NO: 5266205 - DNA, 25 bp, Homo sapien
acagtggtcatttagggtctattct

SEQ ID NO: 5266206 - DNA, 25 bp, Homo sapien
tgacagcctggtgtttgatgagtat

SEQ ID NO: 5266207 - DNA, 25 bp, Homo sapien
tatccgcaggtgcacggaaacacgg

SEQ ID NO: 5266208 - DNA, 25 bp, Homo sapien
tgtttgatgagtatccgcaggtgca

SEQ ID NO: 5266209 - DNA, 25 bp, Homo sapien
cagcctggtgtttgatgagtatccg

SEQ ID NO: 5266210 - DNA, 25 bp, Homo sapien
tcacaccacggccagacctaagggc

SEQ ID NO: 5266211 - DNA, 25 bp, Homo sapien
acaccacggccagacctaagggctc

SEQ ID NO: 5266212 - DNA, 25 bp, Homo sapien
cacaccacggccagacctaagggct

SEQ ID NO: 5266213 - DNA, 25 bp, Homo sapien
acgctggtttacaggacaccgtggc

SEQ ID NO: 5266214 - DNA, 25 bp, Homo sapien
gattcaaccttcatcgcaggagtgg

SEQ ID NO: 5266215 - DNA, 25 bp, Homo sapien
catttggcaaatgctggaacgctgg

SEQ ID NO: 5266216 - DNA, 25 bp, Homo sapien
gctctttccaaaggacctgatcaga

SEQ ID NO: 5266217 - DNA, 25 bp, Homo sapien
caggcaatgcccgtggtctgtttct

SEQ ID NO: 5266218 - DNA, 25 bp, Homo sapien
atccaagcgtaccacccacagtgtg

SEQ ID NO: 5266219 - DNA, 25 bp, Homo sapien
cccaggcaatgcccgtggtctgttt

SEQ ID NO: 5266220 - DNA, 25 bp, Homo sapien
catccaagcgtaccacccacagtgt

SEQ ID NO: 5266221 - DNA, 25 bp, Homo sapien
acttcaacagtcctgagattccatt

SEQ ID NO: 5266222 - DNA, 25 bp, Homo sapien
caacagtcctgagattccattagaa

SEQ ID NO: 5266223 - DNA, 25 bp, Homo sapien
cccaagaaacttcaacagtcctgag

SEQ ID NO: 5266224 - DNA, 25 bp, Homo sapien
gaaacttcaacagtcctgagattcc

SEQ ID NO: 5266225 - DNA, 25 bp, Homo sapien
tcagacaatcccccgatccagcccg

SEQ ID NO: 5266226 - DNA, 25 bp, Homo sapien
gacaatcccccgatccagcccgcct

SEQ ID NO: 5266227 - DNA, 25 bp, Homo sapien
tcattcagacaatcccccgatccag

SEQ ID NO: 5266228 - DNA, 25 bp, Homo sapien
cattcagacaatcccccgatccagc

SEQ ID NO: 5266229 - DNA, 25 bp, Homo sapien
tgcctcccctgatgccgatagcagg

SEQ ID NO: 5266230 - DNA, 25 bp, Homo sapien
ggcaccctcgttctctgcagtcaca

SEQ ID NO: 5266231 - DNA, 25 bp, Homo sapien
tgatgccgatagcaggaccggcacc

SEQ ID NO: 5266232 - DNA, 25 bp, Homo sapien
gaccggcaccctcgttctctgcagt

SEQ ID NO: 5266233 - DNA, 25 bp, Homo sapien
tgtgttctttcttccaggatgccat

SEQ ID NO: 5266234 - DNA, 25 bp, Homo sapien
gtgaaagcgtctcctgtgttctttc

SEQ ID NO: 5266235 - DNA, 25 bp, Homo sapien
cctgtgttctttcttccaggatgcc

SEQ ID NO: 5266236 - DNA, 25 bp, Homo sapien
ctcctgtgttctttcttccaggatg

SEQ ID NO: 5266237 - DNA, 25 bp, Homo sapien
ccctttgtctagacggcaggagcag

SEQ ID NO: 5266238 - DNA, 25 bp, Homo sapien
tctggtgtctgagacggcaatgggt

SEQ ID NO: 5266239 - DNA, 25 bp, Homo sapien
gacggcaatgggtgcgccctttgtc

SEQ ID NO: 5266240 - DNA, 25 bp, Homo sapien
cgccctttgtctagacggcaggagc

SEQ ID NO: 5266241 - DNA, 25 bp, Homo sapien
cagtgcctcgatccaatttccatgt

SEQ ID NO: 5266242 - DNA, 25 bp, Homo sapien
tgcctcgatccaatttccatgtaaa

SEQ ID NO: 5266243 - DNA, 25 bp, Homo sapien
tcagtgcctcgatccaatttccatg

SEQ ID NO: 5266244 - DNA, 25 bp, Homo sapien
agtgcctcgatccaatttccatgta

SEQ ID NO: 5266245 - DNA, 25 bp, Homo sapien
tggactcgggagctctgacgtaaac

SEQ ID NO: 5266246 - DNA, 25 bp, Homo sapien
gactcgggagctctgatgtaaacgc

SEQ ID NO: 5266247 - DNA, 25 bp, Homo sapien
tcgggagctctcacgtaaacgcgct

SEQ ID NO: 5266248 - DNA, 25 bp, Homo sapien
gctctgatgtaaacgcgctgcctgc

SEQ ID NO: 5266249 - DNA, 25 bp, Homo sapien
cgtggactcgggagctctcacgtaa

SEQ ID NO: 5266250 - DNA, 25 bp, Homo sapien
tggactcgggcgctctgacgtaaac

SEQ ID NO: 5266251 - DNA, 25 bp, Homo sapien
acgtaaacgcgctgcctgcgaggtg

SEQ ID NO: 5266252 - DNA, 25 bp, Homo sapien
actcgggagctctcacgtaaacgcg

SEQ ID NO: 5266253 - DNA, 25 bp, Homo sapien
tggactcgggagctctgacgtaaac

SEQ ID NO: 5266254 - DNA, 25 bp, Homo sapien
ggagctctgaggtaaacgcgctgcc

SEQ ID NO: 5266255 - DNA, 25 bp, Homo sapien
gagctctgaggtaaacgcgctgcct

SEQ ID NO: 5266256 - DNA, 25 bp, Homo sapien
tcgggagctctcacgtaaacgcgct

SEQ ID NO: 5266257 - DNA, 25 bp, Homo sapien
tccacaccccgcaggatggtgcaga

SEQ ID NO: 5266258 - DNA, 25 bp, Homo sapien
ggatggtgcagacacagacgtcagc

SEQ ID NO: 5266259 - DNA, 25 bp, Homo sapien
cacttcgtgtctgcacggtgcaggc

SEQ ID NO: 5266260 - DNA, 25 bp, Homo sapien
gcaggtgtgcaaggcatccacaccc

SEQ ID NO: 5266261 - DNA, 25 bp, Homo sapien
tggcgggaagacagcaccgggatct

SEQ ID NO: 5266262 - DNA, 25 bp, Homo sapien
agacagcgggaagatggcgcctcca

SEQ ID NO: 5266263 - DNA, 25 bp, Homo sapien
agacggcgccgggatcttcctgtcc

SEQ ID NO: 5266264 - DNA, 25 bp, Homo sapien
tccaggatctttccgtcctgcagaa

SEQ ID NO: 5266265 - DNA, 25 bp, Homo sapien
ctgggcaccagaccccggatgagag

SEQ ID NO: 5266266 - DNA, 25 bp, Homo sapien
catcggccttgagaagacgacgcac

SEQ ID NO: 5266267 - DNA, 25 bp, Homo sapien
aggactgcacgcctcttcccgttga

SEQ ID NO: 5266268 - DNA, 25 bp, Homo sapien
aagatggcacgtctgggcaccagac

SEQ ID NO: 5266269 - DNA, 25 bp, Homo sapien
cagcccagtgcaatatgagcccgaa

SEQ ID NO: 5266270 - DNA, 25 bp, Homo sapien
tgtgtgagatcgcagacctcagccc

SEQ ID NO: 5266271 - DNA, 25 bp, Homo sapien
gagcccgaaataaccactgctgctg

SEQ ID NO: 5266272 - DNA, 25 bp, Homo sapien
gattctcacaagcacattcggatgg

SEQ ID NO: 5266273 - DNA, 25 bp, Homo sapien
ctgccgtgcctgacacccgccagca

SEQ ID NO: 5266274 - DNA, 25 bp, Homo sapien
ccgtgcctgacacccgccagcaaca

SEQ ID NO: 5266275 - DNA, 25 bp, Homo sapien
gtcctgctgccctgtcacccggcat

SEQ ID NO: 5266276 - DNA, 25 bp, Homo sapien
tgacacccgccagcaacacacactt

SEQ ID NO: 5266277 - DNA, 25 bp, Homo sapien
gcctcagtcttagaataagaagcag

SEQ ID NO: 5266278 - DNA, 25 bp, Homo sapien
ctctctctgtgtggcgggaacagcc

SEQ ID NO: 5266279 - DNA, 25 bp, Homo sapien
taagaagcagagagcacggactctc

SEQ ID NO: 5266280 - DNA, 25 bp, Homo sapien
gaagcagagagtttggtatgttccc

SEQ ID NO: 5266281 - DNA, 25 bp, Homo sapien
ttgtgggactgagttacacgatgca

SEQ ID NO: 5266282 - DNA, 25 bp, Homo sapien
cttgtgggactgagttacacgatgc

SEQ ID NO: 5266283 - DNA, 25 bp, Homo sapien
tgtgggactgagttacacgatgcat

SEQ ID NO: 5266284 - DNA, 25 bp, Homo sapien
catcctcctggttacagtcccggat

SEQ ID NO: 5266285 - DNA, 25 bp, Homo sapien
ccttccaggacgcagagtgcgagca

SEQ ID NO: 5266286 - DNA, 25 bp, Homo sapien
ttacagtcccggatggctttgtcct

SEQ ID NO: 5266287 - DNA, 25 bp, Homo sapien
gccagggtcaccttccaggacgcag

SEQ ID NO: 5266288 - DNA, 25 bp, Homo sapien
agaacctgctcagggcataactgtc

SEQ ID NO: 5266289 - DNA, 25 bp, Homo sapien
tgccaactcaggcagtaaattagca

SEQ ID NO: 5266290 - DNA, 25 bp, Homo sapien
aattagcactgtcagtagcagagaa

SEQ ID NO: 5266291 - DNA, 25 bp, Homo sapien
ccaactcaggcagtaaattagcact

SEQ ID NO: 5266292 - DNA, 25 bp, Homo sapien
cagtatcactgctcagtgagggctg

SEQ ID NO: 5266293 - DNA, 25 bp, Homo sapien
atctgagagccagccagccttggct

SEQ ID NO: 5266294 - DNA, 25 bp, Homo sapien
gcacccttcccactggatctgagag

SEQ ID NO: 5266295 - DNA, 25 bp, Homo sapien
aagactccttatccaagtcagcacc

SEQ ID NO: 5266296 - DNA, 25 bp, Homo sapien
tgattctctggccattgttctttcc

SEQ ID NO: 5266297 - DNA, 25 bp, Homo sapien
ctgttcttctctagaattgtgttta

SEQ ID NO: 5266298 - DNA, 25 bp, Homo sapien
tccaccgcaatcaaacatgaaagag

SEQ ID NO: 5266299 - DNA, 25 bp, Homo sapien
tgaaagagcgtttttgccttcctgt

SEQ ID NO: 5266300 - DNA, 25 bp, Homo sapien
gacagcatccgagcccacagactga

SEQ ID NO: 5266301 - DNA, 25 bp, Homo sapien
gcatccgagcccacagactgaggct

SEQ ID NO: 5266302 - DNA, 25 bp, Homo sapien
acagcatccgagcccacagactgag

SEQ ID NO: 5266303 - DNA, 25 bp, Homo sapien
agcatccgagcccacagactgaggc

SEQ ID NO: 5266304 - DNA, 25 bp, Homo sapien
gctgtgttcccacgacggcagacag

SEQ ID NO: 5266305 - DNA, 25 bp, Homo sapien
ctgtgttcccacgacggcagacagc

SEQ ID NO: 5266306 - DNA, 25 bp, Homo sapien
aggctgtgttcccacgacggcagac

SEQ ID NO: 5266307 - DNA, 25 bp, Homo sapien
gtgttcccacgacggcagacagcat

SEQ ID NO: 5266308 - DNA, 25 bp, Homo sapien
tccaagggtgtgcaaatgcaccttc

SEQ ID NO: 5266309 - DNA, 25 bp, Homo sapien
ccccagatttgacctgtgtcttgga

SEQ ID NO: 5266310 - DNA, 25 bp, Homo sapien
tgacaaagggtatagacggacagct

SEQ ID NO: 5266311 - DNA, 25 bp, Homo sapien
ttggactaaccagccatacattggg

SEQ ID NO: 5266312 - DNA, 25 bp, Homo sapien
gcaaatttgctagtacaccccagat

SEQ ID NO: 5266313 - DNA, 25 bp, Homo sapien
ggagccaagtaagtccactctggtg

SEQ ID NO: 5266314 - DNA, 25 bp, Homo sapien
tctgatcgtccatcaacccaagggc

SEQ ID NO: 5266315 - DNA, 25 bp, Homo sapien
ggtgtttgatgtctcagccagcatg

SEQ ID NO: 5266316 - DNA, 25 bp, Homo sapien
tattatcagtcagcctgtaatttag

SEQ ID NO: 5266317 - DNA, 25 bp, Homo sapien
tgtggggcggggagctttattatca

SEQ ID NO: 5266318 - DNA, 25 bp, Homo sapien
ctttattatcagtcagcctgtaatt

SEQ ID NO: 5266319 - DNA, 25 bp, Homo sapien
tcagtcagcctgtaatttagttgat

SEQ ID NO: 5266320 - DNA, 25 bp, Homo sapien
tccgccaggcatgtgatgtttggac

SEQ ID NO: 5266321 - DNA, 25 bp, Homo sapien
tgcactctccaacattcggctgcac

SEQ ID NO: 5266322 - DNA, 25 bp, Homo sapien
ccgccaggcatgtgatgtttggaca

SEQ ID NO: 5266323 - DNA, 25 bp, Homo sapien
ccaacattcggctgcacaggccagg

SEQ ID NO: 5266324 - DNA, 25 bp, Homo sapien
aggctgaagcaggagaatcgcttga

SEQ ID NO: 5266325 - DNA, 25 bp, Homo sapien
tcccaactactcaggaggctgaagc

SEQ ID NO: 5266326 - DNA, 25 bp, Homo sapien
ctgggtgcggtggcgggcatctgta

SEQ ID NO: 5266327 - DNA, 25 bp, Homo sapien
gctgaagcaggagaatcgcttgaac

SEQ ID NO: 5266328 - DNA, 25 bp, Homo sapien
catcggctaccctccgtccccagta

SEQ ID NO: 5266329 - DNA, 25 bp, Homo sapien
ctgtggtcaagtccagaagaggcac

SEQ ID NO: 5266330 - DNA, 25 bp, Homo sapien
gtccagaagaggcacgtcctgctca

SEQ ID NO: 5266331 - DNA, 25 bp, Homo sapien
tgctcagggccccatcggctaccct

SEQ ID NO: 5266332 - DNA, 25 bp, Homo sapien
atccaactgctgcaacggcacctct

SEQ ID NO: 5266333 - DNA, 25 bp, Homo sapien
agaccccctcccttagcttctgctt

SEQ ID NO: 5266334 - DNA, 25 bp, Homo sapien
ggcaggcacgggccttggcttctga

SEQ ID NO: 5266335 - DNA, 25 bp, Homo sapien
aactatgtatggcaccagccctggg

SEQ ID NO: 5266336 - DNA, 25 bp, Homo sapien
ccagaggtgatgtctgtccagtcca

SEQ ID NO: 5266337 - DNA, 25 bp, Homo sapien
gggttacgacctgtctcttctgcat

SEQ ID NO: 5266338 - DNA, 25 bp, Homo sapien
gaggtgatgtctgtccagtccacat

SEQ ID NO: 5266339 - DNA, 25 bp, Homo sapien
cggctgggggttacgacctgtctct

SEQ ID NO: 5266340 - DNA, 25 bp, Homo sapien
tcttggtcaaaaataaacaggtgcc

SEQ ID NO: 5266341 - DNA, 25 bp, Homo sapien
cagagtccccaaatgcaaggtgcag

SEQ ID NO: 5266342 - DNA, 25 bp, Homo sapien
cacagagatcaaagcttcgggacct

SEQ ID NO: 5266343 - DNA, 25 bp, Homo sapien
gagttctcccatagaagaggccctg

SEQ ID NO: 5266344 - DNA, 25 bp, Homo sapien
cctcgcctgcaatgggtctggtgtt

SEQ ID NO: 5266345 - DNA, 25 bp, Homo sapien
cgcctgcaatgggtctggtgtttca

SEQ ID NO: 5266346 - DNA, 25 bp, Homo sapien
cgtctggtgtttcagatcctcccgg

SEQ ID NO: 5266347 - DNA, 25 bp, Homo sapien
ctggtgtttcagatcctcccggcct

SEQ ID NO: 5266348 - DNA, 25 bp, Homo sapien
ctcgcctacactgggtctggtattt

SEQ ID NO: 5266349 - DNA, 25 bp, Homo sapien
tcctcgcctacactgggtctggtat

SEQ ID NO: 5266350 - DNA, 25 bp, Homo sapien
cggcctcctcgcctacactgggtct

SEQ ID NO: 5266351 - DNA, 25 bp, Homo sapien
gcctcctcgcctacactgggtctgg

SEQ ID NO: 5266352 - DNA, 25 bp, Homo sapien
gcaccacagggatgccggtgctgac

SEQ ID NO: 5266353 - DNA, 25 bp, Homo sapien
aatgactgggcaccacagggatgcc

SEQ ID NO: 5266354 - DNA, 25 bp, Homo sapien
gctctcccaatgactgggcaccaca

SEQ ID NO: 5266355 - DNA, 25 bp, Homo sapien
caccacagggatgccggtgctgacc

SEQ ID NO: 5266356 - DNA, 25 bp, Homo sapien
acagggatgccggtgctgaccgtga

SEQ ID NO: 5266357 - DNA, 25 bp, Homo sapien
caccacagggatgccggtgctgacc

SEQ ID NO: 5266358 - DNA, 25 bp, Homo sapien
cagggatgccggtgctgaccgtgat

SEQ ID NO: 5266359 - DNA, 25 bp, Homo sapien
ctgggcaccacagggatgccggtgc

SEQ ID NO: 5266360 - DNA, 25 bp, Homo sapien
cacgaggcatagaacgatgcggact

SEQ ID NO: 5266361 - DNA, 25 bp, Homo sapien
tgtaaattacacgaggcatagaacg

SEQ ID NO: 5266362 - DNA, 25 bp, Homo sapien
ttggagttgatgtgtaaattacacg

SEQ ID NO: 5266363 - DNA, 25 bp, Homo sapien
gcatagaacgatgcggactccagac

SEQ ID NO: 5266364 - DNA, 25 bp, Homo sapien
tggggctttgatcgctgtgggtcca

SEQ ID NO: 5266365 - DNA, 25 bp, Homo sapien
aatccacagcatagagcctcacgct

SEQ ID NO: 5266366 - DNA, 25 bp, Homo sapien
caaccgccaaatccacagcatagag

SEQ ID NO: 5266367 - DNA, 25 bp, Homo sapien
aaatccaaccgccaaatccacagca

SEQ ID NO: 5266368 - DNA, 25 bp, Homo sapien
aaaatgccttgcgaatatgaataat

SEQ ID NO: 5266369 - DNA, 25 bp, Homo sapien
atgccttgcgaatatgaataatgtc

SEQ ID NO: 5266370 - DNA, 25 bp, Homo sapien
aaatgccttgcgaatatgaataatg

SEQ ID NO: 5266371 - DNA, 25 bp, Homo sapien
ggaaaatgccttgcgaatatgaata

SEQ ID NO: 5266372 - DNA, 25 bp, Homo sapien
cgggggcccgtctggctgcacacac

SEQ ID NO: 5266373 - DNA, 25 bp, Homo sapien
cacacacgtgtgtgtctggcctctg

SEQ ID NO: 5266374 - DNA, 25 bp, Homo sapien
catgcctgatgccgggggcccgtct

SEQ ID NO: 5266375 - DNA, 25 bp, Homo sapien
cacacgtgtgtgtctggcctctggg

SEQ ID NO: 5266376 - DNA, 25 bp, Homo sapien
ttacaaccaatgcacagacactcac

SEQ ID NO: 5266377 - DNA, 25 bp, Homo sapien
tttacaaccaatgcacagacactca

SEQ ID NO: 5266378 - DNA, 25 bp, Homo sapien
tccatttgtgccgacccgaataagg

SEQ ID NO: 5266379 - DNA, 25 bp, Homo sapien
gttgccctgaggaatagaatcctgc

SEQ ID NO: 5266380 - DNA, 25 bp, Homo sapien
gatgctctgtttagacgttgccctg

SEQ ID NO: 5266381 - DNA, 25 bp, Homo sapien
atgtgccacccaacgcagaactgag

SEQ ID NO: 5266382 - DNA, 25 bp, Homo sapien
tgtcgatgctatctcatccaccagg

SEQ ID NO: 5266383 - DNA, 25 bp, Homo sapien
cgatctgctccggtgcactgtgctt

SEQ ID NO: 5266384 - DNA, 25 bp, Homo sapien
cactgtgcttctgatactggtgacc

SEQ ID NO: 5266385 - DNA, 25 bp, Homo sapien
tgaccaccagatagatcttgggctg

SEQ ID NO: 5266386 - DNA, 25 bp, Homo sapien
cagggaatccatggcaggtgacgcc

SEQ ID NO: 5266387 - DNA, 25 bp, Homo sapien
cttgcagggaatccatggcaggtga

SEQ ID NO: 5266388 - DNA, 25 bp, Homo sapien
atggaagatgtcatgagaagcctgg

SEQ ID NO: 5266389 - DNA, 25 bp, Homo sapien
ctgggggatggaagatgtcatgaga

SEQ ID NO: 5266390 - DNA, 25 bp, Homo sapien
ggctctatgatatgcccgatgggca

SEQ ID NO: 5266391 - DNA, 25 bp, Homo sapien
tccccggctctaggatatgcctgaa

SEQ ID NO: 5266392 - DNA, 25 bp, Homo sapien
cacggatatgcctgatgagctctgg

SEQ ID NO: 5266393 - DNA, 25 bp, Homo sapien
ggctctacgatatgcccgatgggca

SEQ ID NO: 5266394 - DNA, 25 bp, Homo sapien
caggaccccgagagtgaacgggaga

SEQ ID NO: 5266395 - DNA, 25 bp, Homo sapien
tgtaagacttatccccacgcaggac

SEQ ID NO: 5266396 - DNA, 25 bp, Homo sapien
tcgggaagtgcacacggctgaacga

SEQ ID NO: 5266397 - DNA, 25 bp, Homo sapien
ggctgaacgacaattcccctgtaag

SEQ ID NO: 5266398 - DNA, 25 bp, Homo sapien
tcatgaggccttgcggcagcgcaga

SEQ ID NO: 5266399 - DNA, 25 bp, Homo sapien
atgaggccttgcggcagcgcagacc

SEQ ID NO: 5266400 - DNA, 25 bp, Homo sapien
caagagatggagctcgtcagtgtcc

SEQ ID NO: 5266401 - DNA, 25 bp, Homo sapien
gaggccttgcggcagcgcagacccc

SEQ ID NO: 5266402 - DNA, 25 bp, Homo sapien
gccagagagggacacgcattcttct

SEQ ID NO: 5266403 - DNA, 25 bp, Homo sapien
aacagaacctaacaccagggtgagg

SEQ ID NO: 5266404 - DNA, 25 bp, Homo sapien
cacggccccagtgatacatctcaga

SEQ ID NO: 5266405 - DNA, 25 bp, Homo sapien
ggctattgtcacctagacttgggat

SEQ ID NO: 5266406 - DNA, 25 bp, Homo sapien
caatgcgtcacattctgctcctaga

SEQ ID NO: 5266407 - DNA, 25 bp, Homo sapien
gatagggttaacctctgaagacctc

SEQ ID NO: 5266408 - DNA, 25 bp, Homo sapien
tcgctgcttttccttgccgtggaga

SEQ ID NO: 5266409 - DNA, 25 bp, Homo sapien
tgaagacctcagatttcgctgcttt

SEQ ID NO: 5266410 - DNA, 25 bp, Homo sapien
atgtgggtagccttgcctgcccccg

SEQ ID NO: 5266411 - DNA, 25 bp, Homo sapien
taaaaaatgtgggtagccttgcctg

SEQ ID NO: 5266412 - DNA, 25 bp, Homo sapien
ccgccgcactggaatttatcctaaa

SEQ ID NO: 5266413 - DNA, 25 bp, Homo sapien
ctgcccccgccgcactggaatttat

SEQ ID NO: 5266414 - DNA, 25 bp, Homo sapien
aaaacaagacgatttgagtctacca

SEQ ID NO: 5266415 - DNA, 25 bp, Homo sapien
caaacccaatactgcatctgtgagg

SEQ ID NO: 5266416 - DNA, 25 bp, Homo sapien
ttttggcacaaacctgaatgaacag

SEQ ID NO: 5266417 - DNA, 25 bp, Homo sapien
cctgaatgaacagcgggaaacgccg

SEQ ID NO: 5266418 - DNA, 25 bp, Homo sapien
gagactccgcggaccggaggaggga

SEQ ID NO: 5266419 - DNA, 25 bp, Homo sapien
cgcagggttcgggagactccgcgga

SEQ ID NO: 5266420 - DNA, 25 bp, Homo sapien
gcagggttcgggagactccgcggac

SEQ ID NO: 5266421 - DNA, 25 bp, Homo sapien
tccgcggaccggaggagggatagga

SEQ ID NO: 5266422 - DNA, 25 bp, Homo sapien
tcggtatcttttctccgggccaggc

SEQ ID NO: 5266423 - DNA, 25 bp, Homo sapien
gagcttcggtatcttttctccgggc

SEQ ID NO: 5266424 - DNA, 25 bp, Homo sapien
tggggaaagttggagcttcggtatc

SEQ ID NO: 5266425 - DNA, 25 bp, Homo sapien
gcttcggtatcttttctccgggcca

SEQ ID NO: 5266426 - DNA, 25 bp, Homo sapien
gaaatgtccctgattagaagctgag

SEQ ID NO: 5266427 - DNA, 25 bp, Homo sapien
cccacctgcgccacaagggagaaga

SEQ ID NO: 5266428 - DNA, 25 bp, Homo sapien
gtcgtcaagccggtccagagcgcgc

SEQ ID NO: 5266429 - DNA, 25 bp, Homo sapien
gacccagcccgggtagaagcgcgcg

SEQ ID NO: 5266430 - DNA, 25 bp, Homo sapien
cacagcctcgagttgtgaaaacagt

SEQ ID NO: 5266431 - DNA, 25 bp, Homo sapien
tcccaggagcgaccaggaatacagt

SEQ ID NO: 5266432 - DNA, 25 bp, Homo sapien
atgcattgacaaccactcctttagg

SEQ ID NO: 5266433 - DNA, 25 bp, Homo sapien
aacagtttaagggagcacgtggcca

SEQ ID NO: 5266434 - DNA, 25 bp, Homo sapien
tcagggttcagctggatgcagacag

SEQ ID NO: 5266435 - DNA, 25 bp, Homo sapien
tcccacgcacggctgtaggttctga

SEQ ID NO: 5266436 - DNA, 25 bp, Homo sapien
gttcccgggcatggctgtaggttct

SEQ ID NO: 5266437 - DNA, 25 bp, Homo sapien
gctctgagggttcctaggttctgaa

SEQ ID NO: 5266438 - DNA, 25 bp, Homo sapien
tcttcatttgtgtccttcgctgtat

SEQ ID NO: 5266439 - DNA, 25 bp, Homo sapien
agcatgagttttgtggtgacggttc

SEQ ID NO: 5266440 - DNA, 25 bp, Homo sapien
ccttcgctgtatccagttgctggag

SEQ ID NO: 5266441 - DNA, 25 bp, Homo sapien
gagtagctgcatttgaaaccatatg

SEQ ID NO: 5266442 - DNA, 25 bp, Homo sapien
cttgtgggatttctcaaggattgga

SEQ ID NO: 5266443 - DNA, 25 bp, Homo sapien
ctgctggtgggtaaggccaagggtc

SEQ ID NO: 5266444 - DNA, 25 bp, Homo sapien
tgctggtctgctggtgggtaaggcc

SEQ ID NO: 5266445 - DNA, 25 bp, Homo sapien
ctggtgggtaaggccaagggtcttg

SEQ ID NO: 5266446 - DNA, 25 bp, Homo sapien
agacaccatcgtatatgcctgctct

SEQ ID NO: 5266447 - DNA, 25 bp, Homo sapien
tctgcacggccttcctagcttcctc

SEQ ID NO: 5266448 - DNA, 25 bp, Homo sapien
gccaccattcactgttaatgtaggt

SEQ ID NO: 5266449 - DNA, 25 bp, Homo sapien
atgtaggtgatccaggaagccgcag

SEQ ID NO: 5266450 - DNA, 25 bp, Homo sapien
tttcaaacatgttagtaaaggtgcc

SEQ ID NO: 5266451 - DNA, 25 bp, Homo sapien
ttatttgccctgcgttagaagattt

SEQ ID NO: 5266452 - DNA, 25 bp, Homo sapien
tggtaatgtctgtgaaggtggtcca

SEQ ID NO: 5266453 - DNA, 25 bp, Homo sapien
aggtgcctgcctggtaatgtctgtg

SEQ ID NO: 5266454 - DNA, 25 bp, Homo sapien
tgcgttgccaacgtcacggccatgt

SEQ ID NO: 5266455 - DNA, 25 bp, Homo sapien
tcaggacctgcctgcgttgccaacg

SEQ ID NO: 5266456 - DNA, 25 bp, Homo sapien
aacgtcacggccatgtggttcttcc

SEQ ID NO: 5266457 - DNA, 25 bp, Homo sapien
ggacctgcctgcgttgccaacgtca

SEQ ID NO: 5266458 - DNA, 25 bp, Homo sapien
ctcggtacacggaggacacgggcat

SEQ ID NO: 5266459 - DNA, 25 bp, Homo sapien
aagatgtgccctattaatctggatg

SEQ ID NO: 5266460 - DNA, 25 bp, Homo sapien
gccctattaatctggatgctccctg

SEQ ID NO: 5266461 - DNA, 25 bp, Homo sapien
aataattggtgtttcaaagatgtgc

SEQ ID NO: 5266462 - DNA, 25 bp, Homo sapien
gaaagaagcagcgtggacaggactc

SEQ ID NO: 5266463 - DNA, 25 bp, Homo sapien
cctagaatggaagtcccaaggtgca

SEQ ID NO: 5266464 - DNA, 25 bp, Homo sapien
taaagtcagcgtgcatgcagtgggt

SEQ ID NO: 5266465 - DNA, 25 bp, Homo sapien
tgtaactgagcctcgcctagaatgg

SEQ ID NO: 5266466 - DNA, 25 bp, Homo sapien
gctgcagaggtgatgtcaggatgaa

SEQ ID NO: 5266467 - DNA, 25 bp, Homo sapien
cagaggtgatgtcaggatgaagaag

SEQ ID NO: 5266468 - DNA, 25 bp, Homo sapien
aagaagctgcagaggtgatgtcagg

SEQ ID NO: 5266469 - DNA, 25 bp, Homo sapien
tgcagaggtgatgtcaggatgaaga

SEQ ID NO: 5266470 - DNA, 25 bp, Homo sapien
gttgggatgaagcagaggctctctt

SEQ ID NO: 5266471 - DNA, 25 bp, Homo sapien
agaggctctcttctgtagaagttgt

SEQ ID NO: 5266472 - DNA, 25 bp, Homo sapien
tggaagtggtggtcaggatgaagaa

SEQ ID NO: 5266473 - DNA, 25 bp, Homo sapien
gaagaagttgcagaggtggaggttg

SEQ ID NO: 5266474 - DNA, 25 bp, Homo sapien
gtcgtgatgaagcagaggcttttta

SEQ ID NO: 5266475 - DNA, 25 bp, Homo sapien
ggtcgtgatgaagcagaggcttttt

SEQ ID NO: 5266476 - DNA, 25 bp, Homo sapien
aggtcgtgatgaagcagaggctttt

SEQ ID NO: 5266477 - DNA, 25 bp, Homo sapien
ggaggtcgtgatgaagcagaggctt

SEQ ID NO: 5266478 - DNA, 25 bp, Homo sapien
atggcctctgagatgtctgtgtccc

SEQ ID NO: 5266479 - DNA, 25 bp, Homo sapien
gcatggcctctgagatgtctgtgtc

SEQ ID NO: 5266480 - DNA, 25 bp, Homo sapien
catggcctctgagatgtctgtgtcc

SEQ ID NO: 5266481 - DNA, 25 bp, Homo sapien
ccagactgtgtctgaaagagctgtg

SEQ ID NO: 5266482 - DNA, 25 bp, Homo sapien
agagaggggcggtggcaccaagctg

SEQ ID NO: 5266483 - DNA, 25 bp, Homo sapien
gggcggtggcaccaagctgccccat

SEQ ID NO: 5266484 - DNA, 25 bp, Homo sapien
gaggggcggtggcaccaagctgccc

SEQ ID NO: 5266485 - DNA, 25 bp, Homo sapien
gcggtggcaccaagctgccccattg

SEQ ID NO: 5266486 - DNA, 25 bp, Homo sapien
tctgtcctgagcgccatgaggtcag

SEQ ID NO: 5266487 - DNA, 25 bp, Homo sapien
tgtcctgagcgccatgaggtcagct

SEQ ID NO: 5266488 - DNA, 25 bp, Homo sapien
tgtctgtcctgagcgccatgaggtc

SEQ ID NO: 5266489 - DNA, 25 bp, Homo sapien
ctgtctgtcctgagcgccatgaggt

SEQ ID NO: 5266490 - DNA, 25 bp, Homo sapien
gttctaggctgcacaatttgctggg

SEQ ID NO: 5266491 - DNA, 25 bp, Homo sapien
taacactagaaaagacagttctagg

SEQ ID NO: 5266492 - DNA, 25 bp, Homo sapien
ggtcttcaagtctaatgcttatttt

SEQ ID NO: 5266493 - DNA, 25 bp, Homo sapien
ttaacaaggattgacatgaacctat

SEQ ID NO: 5266494 - DNA, 25 bp, Homo sapien
ttctgatactggtgggtcgtgtgta

SEQ ID NO: 5266495 - DNA, 25 bp, Homo sapien
tgggtcgtgtgtatggcagccacac

SEQ ID NO: 5266496 - DNA, 25 bp, Homo sapien
tctgatactggtgggtcgtgtgtat

SEQ ID NO: 5266497 - DNA, 25 bp, Homo sapien
actggtgtgggtcgtgtgtatggca

SEQ ID NO: 5266498 - DNA, 25 bp, Homo sapien
tgggtcgtgtgtatggcagccacac

SEQ ID NO: 5266499 - DNA, 25 bp, Homo sapien
tgtgggtcgtgtgtatggcagccac

SEQ ID NO: 5266500 - DNA, 25 bp, Homo sapien
ctggttctgatactggtgtgggtcg

SEQ ID NO: 5266501 - DNA, 25 bp, Homo sapien
ctggttctgatactggtgggtcgtg

SEQ ID NO: 5266502 - DNA, 25 bp, Homo sapien
tgtgtaggccctagagtcttccgac

SEQ ID NO: 5266503 - DNA, 25 bp, Homo sapien
gtgtaggccctagagtcttccgact

SEQ ID NO: 5266504 - DNA, 25 bp, Homo sapien
tttctttttggttgctggtggccat

SEQ ID NO: 5266505 - DNA, 25 bp, Homo sapien
ttttctttttggttgctggtggcca

SEQ ID NO: 5266506 - DNA, 25 bp, Homo sapien
cgtatttgcattttagttctattgt

SEQ ID NO: 5266507 - DNA, 25 bp, Homo sapien
tgcattttagttctattgttttttc

SEQ ID NO: 5266508 - DNA, 25 bp, Homo sapien
tcttgatagcgaatataaatccata

SEQ ID NO: 5266509 - DNA, 25 bp, Homo sapien
tgtagcatcttgatagcgaatataa

SEQ ID NO: 5266510 - DNA, 25 bp, Homo sapien
gctgcagttaacattgtagcatctt

SEQ ID NO: 5266511 - DNA, 25 bp, Homo sapien
tgagaagctgcagttaacattgtag

SEQ ID NO: 5266512 - DNA, 25 bp, Homo sapien
gatgctgaacttcttgagctgtgca

SEQ ID NO: 5266513 - DNA, 25 bp, Homo sapien
agctgtgcagtcatgccgccttcca

SEQ ID NO: 5266514 - DNA, 25 bp, Homo sapien
tgcgtgtgttagagacgtgcttcgt

SEQ ID NO: 5266515 - DNA, 25 bp, Homo sapien
ggtgcagtgcgtgtgttagagacgt

SEQ ID NO: 5266516 - DNA, 25 bp, Homo sapien
tctggaactttctcaagtgtaccat

SEQ ID NO: 5266517 - DNA, 25 bp, Homo sapien
ctttctcaagtgtaccataaaactg

SEQ ID NO: 5266518 - DNA, 25 bp, Homo sapien
caagtgtaccataaaactgtgcatt

SEQ ID NO: 5266519 - DNA, 25 bp, Homo sapien
gtaccataaaactgtgcatttactg

SEQ ID NO: 5266520 - DNA, 25 bp, Homo sapien
cactctgggattgagctggctgtca

SEQ ID NO: 5266521 - DNA, 25 bp, Homo sapien
caaagtattgtgtcatggacccgag

SEQ ID NO: 5266522 - DNA, 25 bp, Homo sapien
catgactggcgtttggctctctaca

SEQ ID NO: 5266523 - DNA, 25 bp, Homo sapien
tatcagacactggtatggtacggca

SEQ ID NO: 5266524 - DNA, 25 bp, Homo sapien
tttctggttggagtttctgccggcc

SEQ ID NO: 5266525 - DNA, 25 bp, Homo sapien
tggttggagtttctgccggccattg

SEQ ID NO: 5266526 - DNA, 25 bp, Homo sapien
ggccattgccgaaatccacattgat

SEQ ID NO: 5266527 - DNA, 25 bp, Homo sapien
ctttgcactgactggctccaaggct

SEQ ID NO: 5266528 - DNA, 25 bp, Homo sapien
aaaaatatgcctgtgtgatggagcc

SEQ ID NO: 5266529 - DNA, 25 bp, Homo sapien
cagacggctttttggtggaggctaa

SEQ ID NO: 5266530 - DNA, 25 bp, Homo sapien
gaagccctcagtcaagtgaatcaga

SEQ ID NO: 5266531 - DNA, 25 bp, Homo sapien
tctgtccagtggaagcagtgaagcc

SEQ ID NO: 5266532 - DNA, 25 bp, Homo sapien
cgtcctttatagacaattctgccat

SEQ ID NO: 5266533 - DNA, 25 bp, Homo sapien
gtcgtcctttatagacaattctgcc

SEQ ID NO: 5266534 - DNA, 25 bp, Homo sapien
tcgtcctttatagacaattctgcca

SEQ ID NO: 5266535 - DNA, 25 bp, Homo sapien
attcttttctgagctgatgactccc

SEQ ID NO: 5266536 - DNA, 25 bp, Homo sapien
tttctgagctgatgactccctttca

SEQ ID NO: 5266537 - DNA, 25 bp, Homo sapien
tgatgactccctttcaggtaattct

SEQ ID NO: 5266538 - DNA, 25 bp, Homo sapien
tgagctgatgactccctttcaggta

SEQ ID NO: 5266539 - DNA, 25 bp, Homo sapien
tccacaatacctgttactgcataga

SEQ ID NO: 5266540 - DNA, 25 bp, Homo sapien
gtattttaatttgctctgtattgga

SEQ ID NO: 5266541 - DNA, 25 bp, Homo sapien
tttgctctgtattggattatggaca

SEQ ID NO: 5266542 - DNA, 25 bp, Homo sapien
cttacataatgtttgttttagtggg

SEQ ID NO: 5266543 - DNA, 25 bp, Homo sapien
gttgagcagaaggtgaaccctggtt

SEQ ID NO: 5266544 - DNA, 25 bp, Homo sapien
gaaggtgaaccctggttgctatttc

SEQ ID NO: 5266545 - DNA, 25 bp, Homo sapien
ttgtctgattaaagtttggttgagc

SEQ ID NO: 5266546 - DNA, 25 bp, Homo sapien
tgcatgggagtagcatcatccttgg

SEQ ID NO: 5266547 - DNA, 25 bp, Homo sapien
tctcaagcaccatcaaaaacatctg

SEQ ID NO: 5266548 - DNA, 25 bp, Homo sapien
ggagttttcatcagaagtgaccagc

SEQ ID NO: 5266549 - DNA, 25 bp, Homo sapien
gaggctcatggttcatctcaagcac

SEQ ID NO: 5266550 - DNA, 25 bp, Homo sapien
ggttgtacctaactaatggcacctg

SEQ ID NO: 5266551 - DNA, 25 bp, Homo sapien
tgttcctggcaatggactcctggca

SEQ ID NO: 5266552 - DNA, 25 bp, Homo sapien
catttacgagactgaggaaagtgtg

SEQ ID NO: 5266553 - DNA, 25 bp, Homo sapien
tctacaaacctgtttttagatttga

SEQ ID NO: 5266554 - DNA, 25 bp, Homo sapien
agccaaatatcacaggtccttctcc

SEQ ID NO: 5266555 - DNA, 25 bp, Homo sapien
tttcccacagatcctcacatagcag

SEQ ID NO: 5266556 - DNA, 25 bp, Homo sapien
agggcgcccgtaactgtgtcagcag

SEQ ID NO: 5266557 - DNA, 25 bp, Homo sapien
caataatccaaggagggagagtcac

SEQ ID NO: 5266558 - DNA, 25 bp, Homo sapien
tatgaagtagctagtgtgtcaccca

SEQ ID NO: 5266559 - DNA, 25 bp, Homo sapien
caccaccttggagctttttgcgaaa

SEQ ID NO: 5266560 - DNA, 25 bp, Homo sapien
gaaaccatcggtgccagtgaagtga

SEQ ID NO: 5266561 - DNA, 25 bp, Homo sapien
gatgtcggcaatttctgccagtcag

SEQ ID NO: 5266562 - DNA, 25 bp, Homo sapien
cccacgtgtttctgcagtgacgtca

SEQ ID NO: 5266563 - DNA, 25 bp, Homo sapien
aatagccgcacgttgagagttacat

SEQ ID NO: 5266564 - DNA, 25 bp, Homo sapien
ctgccaacaccatatggacgtccat

SEQ ID NO: 5266565 - DNA, 25 bp, Homo sapien
tgggtgtgcagcctcaggccactcc

SEQ ID NO: 5266566 - DNA, 25 bp, Homo sapien
agcctcaggccactcctcccctgct

SEQ ID NO: 5266567 - DNA, 25 bp, Homo sapien
ctcccctgctctccagagcaagggg

SEQ ID NO: 5266568 - DNA, 25 bp, Homo sapien
ccctgctctccagagcaaggggcac

SEQ ID NO: 5266569 - DNA, 25 bp, Homo sapien
gtggggcggttagcttatgtccttg

SEQ ID NO: 5266570 - DNA, 25 bp, Homo sapien
acatgcggtccgtgtcggggggtgg

SEQ ID NO: 5266571 - DNA, 25 bp, Homo sapien
ctggacatgcggtccgtgtcggggg

SEQ ID NO: 5266572 - DNA, 25 bp, Homo sapien
ggcggttagcttatgtccttgaggc

SEQ ID NO: 5266573 - DNA, 25 bp, Homo sapien
ccactgggatccatttcatcagctg

SEQ ID NO: 5266574 - DNA, 25 bp, Homo sapien
atccatttcatcagctgtgccagaa

SEQ ID NO: 5266575 - DNA, 25 bp, Homo sapien
ccatttcatcagctgtgccagaatt

SEQ ID NO: 5266576 - DNA, 25 bp, Homo sapien
tccccactgggatccatttcatcag

SEQ ID NO: 5266577 - DNA, 25 bp, Homo sapien
agcgggtgagatgacgggcagagca

SEQ ID NO: 5266578 - DNA, 25 bp, Homo sapien
gtggagggcgaagcgggtgagatga

SEQ ID NO: 5266579 - DNA, 25 bp, Homo sapien
agatgaggtggagggcgaagcgggt

SEQ ID NO: 5266580 - DNA, 25 bp, Homo sapien
acgggcagagcagtccctgtgctga

SEQ ID NO: 5266581 - DNA, 25 bp, Homo sapien
cacagacggcagaactgaagcctag

SEQ ID NO: 5266582 - DNA, 25 bp, Homo sapien
cccacagacggcagaactgaagcct

SEQ ID NO: 5266583 - DNA, 25 bp, Homo sapien
ggcagaactgaagcctagaagccgc

SEQ ID NO: 5266584 - DNA, 25 bp, Homo sapien
ccacagacggcagaactgaagccta

SEQ ID NO: 5266585 - DNA, 25 bp, Homo sapien
agacggcagaactaacagagcgccc

SEQ ID NO: 5266586 - DNA, 25 bp, Homo sapien
taacagagcgccctggaacacactc

SEQ ID NO: 5266587 - DNA, 25 bp, Homo sapien
ttagactcatagcatgacttctgct

SEQ ID NO: 5266588 - DNA, 25 bp, Homo sapien
cccccgccagaggtttgagtagtgg

SEQ ID NO: 5266589 - DNA, 25 bp, Homo sapien
gcttttgcaaccctggaaatgctga

SEQ ID NO: 5266590 - DNA, 25 bp, Homo sapien
gcagatgcttttgcaaccctggaaa

SEQ ID NO: 5266591 - DNA, 25 bp, Homo sapien
agatgcagatgcttttgcaaccctg

SEQ ID NO: 5266592 - DNA, 25 bp, Homo sapien
gatgcttttgcaaccctggaaatgc

SEQ ID NO: 5266593 - DNA, 25 bp, Homo sapien
agaaggcctttccgggcaccctgca

SEQ ID NO: 5266594 - DNA, 25 bp, Homo sapien
caggaccagaaggcctttccgggca

SEQ ID NO: 5266595 - DNA, 25 bp, Homo sapien
atttcctccaatgtcagtgccagct

SEQ ID NO: 5266596 - DNA, 25 bp, Homo sapien
tactcttctcctaaggagaggatgc

SEQ ID NO: 5266597 - DNA, 25 bp, Homo sapien
ctgcagagagcaaagagctgggtgt

SEQ ID NO: 5266598 - DNA, 25 bp, Homo sapien
caaagagctgggtgtgctggggcag

SEQ ID NO: 5266599 - DNA, 25 bp, Homo sapien
cagagagcaaagagctgggtgtgct

SEQ ID NO: 5266600 - DNA, 25 bp, Homo sapien
agagcaaagagctgggtgtgctggg

SEQ ID NO: 5266601 - DNA, 25 bp, Homo sapien
cagaaagcccaggtctgttttctca

SEQ ID NO: 5266602 - DNA, 25 bp, Homo sapien
ggtctgttttctcacggcgcccctg

SEQ ID NO: 5266603 - DNA, 25 bp, Homo sapien
aagacacttcatgccacccttctga

SEQ ID NO: 5266604 - DNA, 25 bp, Homo sapien
cagacagatgctcggattccaggtg

SEQ ID NO: 5266605 - DNA, 25 bp, Homo sapien
ttcgttgttggactcttgcggggct

SEQ ID NO: 5266606 - DNA, 25 bp, Homo sapien
tccttcaccttcccagacgggcttc

SEQ ID NO: 5266607 - DNA, 25 bp, Homo sapien
tttcgttgttggactcttgcggggc

SEQ ID NO: 5266608 - DNA, 25 bp, Homo sapien
ccgacgaggcctcaccacttttcca

SEQ ID NO: 5266609 - DNA, 25 bp, Homo sapien
cagacccgacgaggcctcaccactt

SEQ ID NO: 5266610 - DNA, 25 bp, Homo sapien
gagagccgcagacccgacgaggcct

SEQ ID NO: 5266611 - DNA, 25 bp, Homo sapien
ctgtcgagagccgcagacccgacga

SEQ ID NO: 5266612 - DNA, 25 bp, Homo sapien
cttgagttctgtgttccaggtgcct

SEQ ID NO: 5266613 - DNA, 25 bp, Homo sapien
gcctctgtgacgcttcattctcctt

SEQ ID NO: 5266614 - DNA, 25 bp, Homo sapien
gttgaaatgtgttggacttgagttc

SEQ ID NO: 5266615 - DNA, 25 bp, Homo sapien
ctctgcctctgtgacgcttcattct

SEQ ID NO: 5266616 - DNA, 25 bp, Homo sapien
acccgaggtatgagaagcgctggct

SEQ ID NO: 5266617 - DNA, 25 bp, Homo sapien
ccatagctaaggacccgaggtatga

SEQ ID NO: 5266618 - DNA, 25 bp, Homo sapien
tggctggacaccttgtccgtgcctc

SEQ ID NO: 5266619 - DNA, 25 bp, Homo sapien
gctggacaccttgtccgtgcctctg

SEQ ID NO: 5266620 - DNA, 25 bp, Homo sapien
gaggaggtacagacagaaccctcgg

SEQ ID NO: 5266621 - DNA, 25 bp, Homo sapien
ctgatgccgcgtgcccagcgtggga

SEQ ID NO: 5266622 - DNA, 25 bp, Homo sapien
gtacagacagaaccctcggcggcat

SEQ ID NO: 5266623 - DNA, 25 bp, Homo sapien
agacagaaccctcggcggcatctgc

SEQ ID NO: 5266624 - DNA, 25 bp, Homo sapien
caggaaacattgacgggcggctctt

SEQ ID NO: 5266625 - DNA, 25 bp, Homo sapien
gaattgcgcatccttgtgtccggtc

SEQ ID NO: 5266626 - DNA, 25 bp, Homo sapien
taaagtaagccgcagaaaagcagtg

SEQ ID NO: 5266627 - DNA, 25 bp, Homo sapien
gaattctttgcacatcgttgaccgg

SEQ ID NO: 5266628 - DNA, 25 bp, Homo sapien
gctccgccacgaatccgtttcccca

SEQ ID NO: 5266629 - DNA, 25 bp, Homo sapien
tgagctcgtccgctccgccacgaat

SEQ ID NO: 5266630 - DNA, 25 bp, Homo sapien
cgtccgctccgccacgaatccgttt

SEQ ID NO: 5266631 - DNA, 25 bp, Homo sapien
acagcctttgagctcgtccgctccg

SEQ ID NO: 5266632 - DNA, 25 bp, Homo sapien
taagcgagggcactttgctgcattc

SEQ ID NO: 5266633 - DNA, 25 bp, Homo sapien
ttagggcttgaaggtagcactggcc

SEQ ID NO: 5266634 - DNA, 25 bp, Homo sapien
tctgctcatactggtgccgctatta

SEQ ID NO: 5266635 - DNA, 25 bp, Homo sapien
tgcattctgtggcaccaaacaccgc

SEQ ID NO: 5266636 - DNA, 25 bp, Homo sapien
gggccctcgtggtcatggactgtga

SEQ ID NO: 5266637 - DNA, 25 bp, Homo sapien
cctcgtggtcatggactgtgaatta

SEQ ID NO: 5266638 - DNA, 25 bp, Homo sapien
gccctcgtggtcatggactgtgaat

SEQ ID NO: 5266639 - DNA, 25 bp, Homo sapien
gcggggggccctcgtggtcatggac

SEQ ID NO: 5266640 - DNA, 25 bp, Homo sapien
ccctgatccatctggtttctggctg

SEQ ID NO: 5266641 - DNA, 25 bp, Homo sapien
tatggttctcttaggatcagagaac

SEQ ID NO: 5266642 - DNA, 25 bp, Homo sapien
aaggccggctctggccctgatccat

SEQ ID NO: 5266643 - DNA, 25 bp, Homo sapien
gagaacatggactgcaaggccggct

SEQ ID NO: 5266644 - DNA, 25 bp, Homo sapien
tcacctggatgaaaagcgaagtccc

SEQ ID NO: 5266645 - DNA, 25 bp, Homo sapien
gaagaaaaggccgatgctgaagccg

SEQ ID NO: 5266646 - DNA, 25 bp, Homo sapien
tctgtgagtgatgccttcacctgga

SEQ ID NO: 5266647 - DNA, 25 bp, Homo sapien
agaagatttcgggacagttctgtga

SEQ ID NO: 5266648 - DNA, 25 bp, Homo sapien
accaagaagaagcactgagcccctg

SEQ ID NO: 5266649 - DNA, 25 bp, Homo sapien
gcagataaccattccaccttgtggg

SEQ ID NO: 5266650 - DNA, 25 bp, Homo sapien
tgtgcatccctggagtaaacgcaga

SEQ ID NO: 5266651 - DNA, 25 bp, Homo sapien
gggtcccaccttacggatagcacag

SEQ ID NO: 5266652 - DNA, 25 bp, Homo sapien
gaacaaatgcaggacgccctctgtg

SEQ ID NO: 5266653 - DNA, 25 bp, Homo sapien
tgctggccgtggtggaatgaacaaa

SEQ ID NO: 5266654 - DNA, 25 bp, Homo sapien
tactgagtgccagggctgttagtgc

SEQ ID NO: 5266655 - DNA, 25 bp, Homo sapien
atgcaggacgccctctgtgctgagg

SEQ ID NO: 5266656 - DNA, 25 bp, Homo sapien
tcccatccatagggaggccttcagg

SEQ ID NO: 5266657 - DNA, 25 bp, Homo sapien
tgcatggacgtgcacagcattcctg

SEQ ID NO: 5266658 - DNA, 25 bp, Homo sapien
ggctcgtgatggctccacggcaaga

SEQ ID NO: 5266659 - DNA, 25 bp, Homo sapien
tcagggagtccctggacatcgtgct

SEQ ID NO: 5266660 - DNA, 25 bp, Homo sapien
aaggcggcagccagttgaacctgga

SEQ ID NO: 5266661 - DNA, 25 bp, Homo sapien
gagtctccaacgtatcacagtcaag

SEQ ID NO: 5266662 - DNA, 25 bp, Homo sapien
catttttctgggatgcgagctcggt

SEQ ID NO: 5266663 - DNA, 25 bp, Homo sapien
gtgagaaccacaagtccagcatttt

SEQ ID NO: 5266664 - DNA, 25 bp, Homo sapien
ctcttagcctcttgacttaaagtta

SEQ ID NO: 5266665 - DNA, 25 bp, Homo sapien
ttgatactccaggtcaatcgcccca

SEQ ID NO: 5266666 - DNA, 25 bp, Homo sapien
ttaatggaattgtccttgtgtttcc

SEQ ID NO: 5266667 - DNA, 25 bp, Homo sapien
tccttgtgtttcctggtggcagggt

SEQ ID NO: 5266668 - DNA, 25 bp, Homo sapien
acataatgtcgagggaactggaaac

SEQ ID NO: 5266669 - DNA, 25 bp, Homo sapien
gaacataatgtcgagggaactggaa

SEQ ID NO: 5266670 - DNA, 25 bp, Homo sapien
tgtcgagggaactggaaacagaaat

SEQ ID NO: 5266671 - DNA, 25 bp, Homo sapien
aatgtcgagggaactggaaacagaa

SEQ ID NO: 5266672 - DNA, 25 bp, Homo sapien
aagacaggtgcctcaaacgagggca

SEQ ID NO: 5266673 - DNA, 25 bp, Homo sapien
ggcgtgcaagacaggtgcctcaaac

SEQ ID NO: 5266674 - DNA, 25 bp, Homo sapien
aggtgcctcaaacgagggcactgtt

SEQ ID NO: 5266675 - DNA, 25 bp, Homo sapien
ctgaagggcgtgcaagacaggtgcc

SEQ ID NO: 5266676 - DNA, 25 bp, Homo sapien
cagctgccgtctgcacccatgccat

SEQ ID NO: 5266677 - DNA, 25 bp, Homo sapien
cccgcgccctgctgaggctcagctg

SEQ ID NO: 5266678 - DNA, 25 bp, Homo sapien
tgaggctcagctgccgtctgcaccc

SEQ ID NO: 5266679 - DNA, 25 bp, Homo sapien
gctgaggctcagctgccgtctgcac

SEQ ID NO: 5266680 - DNA, 25 bp, Homo sapien
tttctcaggaaagtgccgcttccag

SEQ ID NO: 5266681 - DNA, 25 bp, Homo sapien
tatccctgcagtactgcgctgctgc

SEQ ID NO: 5266682 - DNA, 25 bp, Homo sapien
ctgcagaccttctcgcaccgtgtga

SEQ ID NO: 5266683 - DNA, 25 bp, Homo sapien
tgggatgcgcttcagactgcagacc

SEQ ID NO: 5266684 - DNA, 25 bp, Homo sapien
agagatgctgtgtttcacggtggat

SEQ ID NO: 5266685 - DNA, 25 bp, Homo sapien
tgtttcacggtggatttcgcgttgg

SEQ ID NO: 5266686 - DNA, 25 bp, Homo sapien
ctggcaaggagagatgctgtgtttc

SEQ ID NO: 5266687 - DNA, 25 bp, Homo sapien
cacggtggatttcgcgttgggattt

SEQ ID NO: 5266688 - DNA, 25 bp, Homo sapien
tcctcctcaagggcatcaccatcct

SEQ ID NO: 5266689 - DNA, 25 bp, Homo sapien
tcaccatccttctccggagcctttt

SEQ ID NO: 5266690 - DNA, 25 bp, Homo sapien
cctcctcaagggcatcaccatcctt

SEQ ID NO: 5266691 - DNA, 25 bp, Homo sapien
tcctcaagggcatcaccatccttct

SEQ ID NO: 5266692 - DNA, 25 bp, Homo sapien
cctgggcagtgctagagtaagcatg

SEQ ID NO: 5266693 - DNA, 25 bp, Homo sapien
atgacctgggcagtgctagagtaag

SEQ ID NO: 5266694 - DNA, 25 bp, Homo sapien
ctagagtaagcatgccggcggtccg

SEQ ID NO: 5266695 - DNA, 25 bp, Homo sapien
cagtgctagagtaagcatgccggcg

SEQ ID NO: 5266696 - DNA, 25 bp, Homo sapien
ccaataggtcctgaagcacgagtcc

SEQ ID NO: 5266697 - DNA, 25 bp, Homo sapien
gagggtccgctggtaaaaatctcca

SEQ ID NO: 5266698 - DNA, 25 bp, Homo sapien
tgggaaaactcgagtaaagctgctg

SEQ ID NO: 5266699 - DNA, 25 bp, Homo sapien
cagattgagacgaaggtatgcggca

SEQ ID NO: 5266700 - DNA, 25 bp, Homo sapien
tccccatgaaaaagggccacagctg

SEQ ID NO: 5266701 - DNA, 25 bp, Homo sapien
tccagatgaccggattcacctgtga

SEQ ID NO: 5266702 - DNA, 25 bp, Homo sapien
tttctgtacacatcaggaagctcag

SEQ ID NO: 5266703 - DNA, 25 bp, Homo sapien
gcagacgaagtctcccaggtaacct

SEQ ID NO: 5266704 - DNA, 25 bp, Homo sapien
aacctctccagtgccgaattccagg

SEQ ID NO: 5266705 - DNA, 25 bp, Homo sapien
cagctgattgtggtctcagtcccca

SEQ ID NO: 5266706 - DNA, 25 bp, Homo sapien
cacagggtgcacagctgattgtggt

SEQ ID NO: 5266707 - DNA, 25 bp, Homo sapien
tggaggggcaagctccctccaacgc

SEQ ID NO: 5266708 - DNA, 25 bp, Homo sapien
ttccacgaaaatgactgacactgag

SEQ ID NO: 5266709 - DNA, 25 bp, Homo sapien
cacgaaggtcaccaacactgagtgt

SEQ ID NO: 5266710 - DNA, 25 bp, Homo sapien
tagaacttccatgagatacaccgat

SEQ ID NO: 5266711 - DNA, 25 bp, Homo sapien
tccacaaaggtcactaacgctgagc

SEQ ID NO: 5266712 - DNA, 25 bp, Homo sapien
tccttcatgactgatggcacctggc

SEQ ID NO: 5266713 - DNA, 25 bp, Homo sapien
tgattgcacccctttaaaaccgaga

SEQ ID NO: 5266714 - DNA, 25 bp, Homo sapien
tgattgattacacccagcccatggg

SEQ ID NO: 5266715 - DNA, 25 bp, Homo sapien
gatggcccgtcatgatggcacctgg

SEQ ID NO: 5266716 - DNA, 25 bp, Homo sapien
tgctatgtctgctagtggatcttca

SEQ ID NO: 5266717 - DNA, 25 bp, Homo sapien
tatgtctgctagtggatcttcaccc

SEQ ID NO: 5266718 - DNA, 25 bp, Homo sapien
ggtgctatgtctgctagtggatctt

SEQ ID NO: 5266719 - DNA, 25 bp, Homo sapien
gctatgtctgctagtggatcttcac

SEQ ID NO: 5266720 - DNA, 25 bp, Homo sapien
aggtcctcaaatgctagtaggcaag

SEQ ID NO: 5266721 - DNA, 25 bp, Homo sapien
cttggattggttccgtgtagctgct

SEQ ID NO: 5266722 - DNA, 25 bp, Homo sapien
tgctctgatccacccaggtgttggc

SEQ ID NO: 5266723 - DNA, 25 bp, Homo sapien
taggcaagccagttgtgaaaccttg

SEQ ID NO: 5266724 - DNA, 25 bp, Homo sapien
caacaggtattgtttgtggattttc

SEQ ID NO: 5266725 - DNA, 25 bp, Homo sapien
cacaggagcttgcaacaacaggtat

SEQ ID NO: 5266726 - DNA, 25 bp, Homo sapien
tgcctggcgaacaaatacaggccca

SEQ ID NO: 5266727 - DNA, 25 bp, Homo sapien
tcttaatcttctcgtgaaagttgga

SEQ ID NO: 5266728 - DNA, 25 bp, Homo sapien
cctttgggtgttggctgcaatgaca

SEQ ID NO: 5266729 - DNA, 25 bp, Homo sapien
gtttccaccgtgctgcatttcctgc

SEQ ID NO: 5266730 - DNA, 25 bp, Homo sapien
cctgcattccaaagcgacctttggg

SEQ ID NO: 5266731 - DNA, 25 bp, Homo sapien
cgtttccaccgtgctgcatttcctg

SEQ ID NO: 5266732 - DNA, 25 bp, Homo sapien
gcttaacacagtacactcggaacta

SEQ ID NO: 5266733 - DNA, 25 bp, Homo sapien
gactgttaattgtgcctacacccct

SEQ ID NO: 5266734 - DNA, 25 bp, Homo sapien
ctcggaactaagtgtgaaatcaaaa

SEQ ID NO: 5266735 - DNA, 25 bp, Homo sapien
tttgaccaatagaacaaaactgcag

SEQ ID NO: 5266736 - DNA, 25 bp, Homo sapien
gacaaggcaattgggctcacgctct

SEQ ID NO: 5266737 - DNA, 25 bp, Homo sapien
taatgtaatcgcatcagcaggctcc

SEQ ID NO: 5266738 - DNA, 25 bp, Homo sapien
ggctcagggtaagatccatccagga

SEQ ID NO: 5266739 - DNA, 25 bp, Homo sapien
taaatcatccacatcaggtagggca

SEQ ID NO: 5266740 - DNA, 25 bp, Homo sapien
tgttattgttcagggtgtctaattc

SEQ ID NO: 5266741 - DNA, 25 bp, Homo sapien
tattgttcagggtgtctaattcttc

SEQ ID NO: 5266742 - DNA, 25 bp, Homo sapien
atccatctctaggtttcccagttga

SEQ ID NO: 5266743 - DNA, 25 bp, Homo sapien
tcccagttgatgtgcataaagctgt

SEQ ID NO: 5266744 - DNA, 25 bp, Homo sapien
taagtaccaacaatgatagcgggag

SEQ ID NO: 5266745 - DNA, 25 bp, Homo sapien
tgttccattgtttcactgctcgaga

SEQ ID NO: 5266746 - DNA, 25 bp, Homo sapien
gactttggtctaactgagatagtac

SEQ ID NO: 5266747 - DNA, 25 bp, Homo sapien
agcgggagtttctgctagtccttaa

SEQ ID NO: 5266748 - DNA, 25 bp, Homo sapien
agactggacaccacagccatctgcg

SEQ ID NO: 5266749 - DNA, 25 bp, Homo sapien
tggagactggacaccacagccatct

SEQ ID NO: 5266750 - DNA, 25 bp, Homo sapien
tcactgcatgtggagactggacacc

SEQ ID NO: 5266751 - DNA, 25 bp, Homo sapien
catgtggagactggacaccacagcc

SEQ ID NO: 5266752 - DNA, 25 bp, Homo sapien
gagatgtgtggacaccacggccact

SEQ ID NO: 5266753 - DNA, 25 bp, Homo sapien
ctcctctgtcgggagcgctgctctt

SEQ ID NO: 5266754 - DNA, 25 bp, Homo sapien
tccatgcaggtcaccctggtatctg

SEQ ID NO: 5266755 - DNA, 25 bp, Homo sapien
aaactcaaggcgaagcagtcggaga

SEQ ID NO: 5266756 - DNA, 25 bp, Homo sapien
gtctccggcactgggtcgcctgagc

SEQ ID NO: 5266757 - DNA, 25 bp, Homo sapien
agctggccttcgaggcctcacgggt

SEQ ID NO: 5266758 - DNA, 25 bp, Homo sapien
gcctcacgggtctccggcactgggt

SEQ ID NO: 5266759 - DNA, 25 bp, Homo sapien
ccagctggccttcgaggcctcacgg

SEQ ID NO: 5266760 - DNA, 25 bp, Homo sapien
ctgcccaggttcgcacattctcatc

SEQ ID NO: 5266761 - DNA, 25 bp, Homo sapien
tgcccaggttcgcacattctcatcg

SEQ ID NO: 5266762 - DNA, 25 bp, Homo sapien
cccaggttcgcacattctcatcgtc

SEQ ID NO: 5266763 - DNA, 25 bp, Homo sapien
gcccaggttcgcacattctcatcgt

SEQ ID NO: 5266764 - DNA, 25 bp, Homo sapien
gccccttcctgcccccgtgtcctgc

SEQ ID NO: 5266765 - DNA, 25 bp, Homo sapien
ccccttcctgcccccgtgtcctgca

SEQ ID NO: 5266766 - DNA, 25 bp, Homo sapien
cccttcctgcccccgtgtcctgcac

SEQ ID NO: 5266767 - DNA, 25 bp, Homo sapien
ttggccaaattccacattcccaggc

SEQ ID NO: 5266768 - DNA, 25 bp, Homo sapien
ggccaaattccacattcccaggcag

SEQ ID NO: 5266769 - DNA, 25 bp, Homo sapien
gccaaattccacattcccaggcaga

SEQ ID NO: 5266770 - DNA, 25 bp, Homo sapien
ccaaattccacattcccaggcagac

SEQ ID NO: 5266771 - DNA, 25 bp, Homo sapien
tctcctgtgactcgggcctgagtga

SEQ ID NO: 5266772 - DNA, 25 bp, Homo sapien
agtgtgtggactccctgcaggctca

SEQ ID NO: 5266773 - DNA, 25 bp, Homo sapien
cgtggccagcgcacatctgtctgct

SEQ ID NO: 5266774 - DNA, 25 bp, Homo sapien
caccttttcggatgtgccgggagca

SEQ ID NO: 5266775 - DNA, 25 bp, Homo sapien
agaacgggggtcgctcgcgggagat

SEQ ID NO: 5266776 - DNA, 25 bp, Homo sapien
ccagaacgggggtcgctcgcgggag

SEQ ID NO: 5266777 - DNA, 25 bp, Homo sapien
atgggggtgcagccgcttcctctca

SEQ ID NO: 5266778 - DNA, 25 bp, Homo sapien
gatgggggtgcagccgcttcctctc

SEQ ID NO: 5266779 - DNA, 25 bp, Homo sapien
caccaaaggcggcttccagtgtctc

SEQ ID NO: 5266780 - DNA, 25 bp, Homo sapien
agaaacaccaaaggcggcttccagt

SEQ ID NO: 5266781 - DNA, 25 bp, Homo sapien
tgccacgcctctgcgaggtgcagaa

SEQ ID NO: 5266782 - DNA, 25 bp, Homo sapien
gtgtgcagacggtgcccaccccccc

SEQ ID NO: 5266783 - DNA, 25 bp, Homo sapien
ccacctccacctccggatgtccccg

SEQ ID NO: 5266784 - DNA, 25 bp, Homo sapien
acctccggatgtccccgcccggcat

SEQ ID NO: 5266785 - DNA, 25 bp, Homo sapien
cagctgcctgcctgttctcccacct

SEQ ID NO: 5266786 - DNA, 25 bp, Homo sapien
acagctgcctgcctgttctcccacc

SEQ ID NO: 5266787 - DNA, 25 bp, Homo sapien
tctctgtacagacggagcaggccag

SEQ ID NO: 5266788 - DNA, 25 bp, Homo sapien
cagaatgacagcgtgaaacccaagc

SEQ ID NO: 5266789 - DNA, 25 bp, Homo sapien
gtcagtgccctctccgtacagatgg

SEQ ID NO: 5266790 - DNA, 25 bp, Homo sapien
tacagatggcgcagccatcagtgcc

SEQ ID NO: 5266791 - DNA, 25 bp, Homo sapien
aagtcagttttcgtttcatcttgga

SEQ ID NO: 5266792 - DNA, 25 bp, Homo sapien
tcctcggccacctcgaatgggtatc

SEQ ID NO: 5266793 - DNA, 25 bp, Homo sapien
tcgaatgggtatccaaacagaaaag

SEQ ID NO: 5266794 - DNA, 25 bp, Homo sapien
cacctcgaatgggtatccaaacaga

SEQ ID NO: 5266795 - DNA, 25 bp, Homo sapien
gtttctttctggaattggctgatga

SEQ ID NO: 5266796 - DNA, 25 bp, Homo sapien
ttcaaccacggtttcacctccagga

SEQ ID NO: 5266797 - DNA, 25 bp, Homo sapien
tcaaccacggtttcacctccaggag

SEQ ID NO: 5266798 - DNA, 25 bp, Homo sapien
ttctggaattggctgatgagaccca

SEQ ID NO: 5266799 - DNA, 25 bp, Homo sapien
gtggtccactccgagggcactgaga

SEQ ID NO: 5266800 - DNA, 25 bp, Homo sapien
ctgtggtccactccgagggcactga

SEQ ID NO: 5266801 - DNA, 25 bp, Homo sapien
ggtccactccgagggcactgagagc

SEQ ID NO: 5266802 - DNA, 25 bp, Homo sapien
gtcctgtggtccactccgagggcac

SEQ ID NO: 5266803 - DNA, 25 bp, Homo sapien
ctggtttgggcagcaaggtgtgctt

SEQ ID NO: 5266804 - DNA, 25 bp, Homo sapien
tgggcagcaaggtgtgctttctgtc

SEQ ID NO: 5266805 - DNA, 25 bp, Homo sapien
ggtttgggcagcaaggtgtgctttc

SEQ ID NO: 5266806 - DNA, 25 bp, Homo sapien
tttgggcagcaaggtgtgctttctg

SEQ ID NO: 5266807 - DNA, 25 bp, Homo sapien
gatttgcaggtggtaagtccttcac

SEQ ID NO: 5266808 - DNA, 25 bp, Homo sapien
cagactccgggaggctccctcgggt

SEQ ID NO: 5266809 - DNA, 25 bp, Homo sapien
tgatcggaggcttcgcaggtctcac

SEQ ID NO: 5266810 - DNA, 25 bp, Homo sapien
tcacctcgacggtgatttgcaggtg

SEQ ID NO: 5266811 - DNA, 25 bp, Homo sapien
ctcaaatccccccactgtttgcaac

SEQ ID NO: 5266812 - DNA, 25 bp, Homo sapien
cctccccaagtctcccacactctgt

SEQ ID NO: 5266813 - DNA, 25 bp, Homo sapien
tctctgcaacctccccaagtctccc

SEQ ID NO: 5266814 - DNA, 25 bp, Homo sapien
cacactctgtgcaacctcctcaaat

SEQ ID NO: 5266815 - DNA, 25 bp, Homo sapien
cctactgcgagcaacctcctcaaat

SEQ ID NO: 5266816 - DNA, 25 bp, Homo sapien
tatgtgcaacctcgcaaaatctccc

SEQ ID NO: 5266817 - DNA, 25 bp, Homo sapien
caaaatctccctatgtgcaacctcg

SEQ ID NO: 5266818 - DNA, 25 bp, Homo sapien
tctccctatgtgcaacctcgcaaaa

SEQ ID NO: 5266819 - DNA, 25 bp, Homo sapien
tccccagatctcctttctgtgcaac

SEQ ID NO: 5266820 - DNA, 25 bp, Homo sapien
acgtccccaaatcgccccactgtgt

SEQ ID NO: 5266821 - DNA, 25 bp, Homo sapien
tctgtgcaacctccataaatccaac

SEQ ID NO: 5266822 - DNA, 25 bp, Homo sapien
aatgcccctagctttgtgaaacctc

SEQ ID NO: 5266823 - DNA, 25 bp, Homo sapien
atcccccgcaatctgtgcaacctcc

SEQ ID NO: 5266824 - DNA, 25 bp, Homo sapien
tctccccaaatcccccgcaatctgt

SEQ ID NO: 5266825 - DNA, 25 bp, Homo sapien
cccaaatcccccgcaatctgtgcaa

SEQ ID NO: 5266826 - DNA, 25 bp, Homo sapien
caaatcccccgcaatctgtgcaacc

SEQ ID NO: 5266827 - DNA, 25 bp, Homo sapien
cattgcttggcctacagactcctca

SEQ ID NO: 5266828 - DNA, 25 bp, Homo sapien
gcaacagacgttgatgttctcacag

SEQ ID NO: 5266829 - DNA, 25 bp, Homo sapien
cagaagagcaagtcacggtgttggc

SEQ ID NO: 5266830 - DNA, 25 bp, Homo sapien
gcgccttgcacatccagcctttggt

SEQ ID NO: 5266831 - DNA, 25 bp, Homo sapien
aatttgatataatctctccacaatg

SEQ ID NO: 5266832 - DNA, 25 bp, Homo sapien
caatgtaaaggtatcaaaaccatgt

SEQ ID NO: 5266833 - DNA, 25 bp, Homo sapien
tgttgagcccttaggcccaagagat

SEQ ID NO: 5266834 - DNA, 25 bp, Homo sapien
tacagagatgcagcctcgctatgct

SEQ ID NO: 5266835 - DNA, 25 bp, Homo sapien
tggaaggccgggatactcacaggct

SEQ ID NO: 5266836 - DNA, 25 bp, Homo sapien
agtcacttacttgcatacaggaggg

SEQ ID NO: 5266837 - DNA, 25 bp, Homo sapien
tcctgtcctcggagataagcagagc

SEQ ID NO: 5266838 - DNA, 25 bp, Homo sapien
gagtaggaacctttgccacgtggat

SEQ ID NO: 5266839 - DNA, 25 bp, Homo sapien
tgaggcggtctcacctctggtacca

SEQ ID NO: 5266840 - DNA, 25 bp, Homo sapien
gaaggtgcagcttcacaccatgcga

SEQ ID NO: 5266841 - DNA, 25 bp, Homo sapien
acttgattggtcacagctcgctaca

SEQ ID NO: 5266842 - DNA, 25 bp, Homo sapien
ggctcaaaatcaggtacggttccaa

SEQ ID NO: 5266843 - DNA, 25 bp, Homo sapien
tccaagaggaggcacggaggttccc

SEQ ID NO: 5266844 - DNA, 25 bp, Homo sapien
ggagccacacgatcagggcagaaaa

SEQ ID NO: 5266845 - DNA, 25 bp, Homo sapien
tgggctggctctgcgagactgcctt

SEQ ID NO: 5266846 - DNA, 25 bp, Homo sapien
tccaagtacgcagggaccagaatct

SEQ ID NO: 5266847 - DNA, 25 bp, Homo sapien
cagtgcagtgggtctggaataaatg

SEQ ID NO: 5266848 - DNA, 25 bp, Homo sapien
gtgatggccgcgatgcagggagtga

SEQ ID NO: 5266849 - DNA, 25 bp, Homo sapien
ggagtgaataatcagcgtgtgcgtc

SEQ ID NO: 5266850 - DNA, 25 bp, Homo sapien
ttggaggcagccacgatggccgcaa

SEQ ID NO: 5266851 - DNA, 25 bp, Homo sapien
acaggacatgaaatgcaggtggtga

SEQ ID NO: 5266852 - DNA, 25 bp, Homo sapien
atgcaggtggtgagaagacccaaac

SEQ ID NO: 5266853 - DNA, 25 bp, Homo sapien
aaatgcaggtggtgagaagacccaa

SEQ ID NO: 5266854 - DNA, 25 bp, Homo sapien
caacaggacatgaaatgcaggtggt

SEQ ID NO: 5266855 - DNA, 25 bp, Homo sapien
caggcgtgtccaggcagtcaatgca

SEQ ID NO: 5266856 - DNA, 25 bp, Homo sapien
ccacggtcatgacgggatctgtgtg

SEQ ID NO: 5266857 - DNA, 25 bp, Homo sapien
ccagcactgtgacacccacggtcat

SEQ ID NO: 5266858 - DNA, 25 bp, Homo sapien
cctcctgcaggcgtgtccaggcagt

SEQ ID NO: 5266859 - DNA, 25 bp, Homo sapien
gctggtttaggaactggcagtgtca

SEQ ID NO: 5266860 - DNA, 25 bp, Homo sapien
ggcagtgtcacctttgaccactgaa

SEQ ID NO: 5266861 - DNA, 25 bp, Homo sapien
gctggcgtacttctgggagatcttt

SEQ ID NO: 5266862 - DNA, 25 bp, Homo sapien
ggtactccctctccgacggtggctg

SEQ ID NO: 5266863 - DNA, 25 bp, Homo sapien
ttctcaaaactgacacttctttctg

SEQ ID NO: 5266864 - DNA, 25 bp, Homo sapien
aattagatttctcaaaactgacact

SEQ ID NO: 5266865 - DNA, 25 bp, Homo sapien
ctcaaaactgacacttctttctgaa

SEQ ID NO: 5266866 - DNA, 25 bp, Homo sapien
gcccataattagatttctcaaaact

SEQ ID NO: 5266867 - DNA, 25 bp, Homo sapien
ttctctgagtgatccaggcagcatt

SEQ ID NO: 5266868 - DNA, 25 bp, Homo sapien
gcattcattagccccaccagccaag

SEQ ID NO: 5266869 - DNA, 25 bp, Homo sapien
gtccagcagcctattctctgagtga

SEQ ID NO: 5266870 - DNA, 25 bp, Homo sapien
cagcattcattagccccaccagcca

SEQ ID NO: 5266871 - DNA, 25 bp, Homo sapien
aagcaaaggaggagaaggcggcaat

SEQ ID NO: 5266872 - DNA, 25 bp, Homo sapien
ctggaagcaaaggaggagaaggcgg

SEQ ID NO: 5266873 - DNA, 25 bp, Homo sapien
ggaagcaaaggaggagaaggcggca

SEQ ID NO: 5266874 - DNA, 25 bp, Homo sapien
gcaaaggaggagaaggcggcaattt

SEQ ID NO: 5266875 - DNA, 25 bp, Homo sapien
cagaagtggtggcagaaggatcacc

SEQ ID NO: 5266876 - DNA, 25 bp, Homo sapien
agaaggatcacctgtctgtggagac

SEQ ID NO: 5266877 - DNA, 25 bp, Homo sapien
ctagcagagcagaagtggtggcaga

SEQ ID NO: 5266878 - DNA, 25 bp, Homo sapien
gtggtggcagaaggatcacctgtct

SEQ ID NO: 5266879 - DNA, 25 bp, Homo sapien
ccagggactcttgatgtctcacttt

SEQ ID NO: 5266880 - DNA, 25 bp, Homo sapien
agccagggactcttgatgtctcact

SEQ ID NO: 5266881 - DNA, 25 bp, Homo sapien
tttccagtccttcccaggcacatgc

SEQ ID NO: 5266882 - DNA, 25 bp, Homo sapien
gcatctgagccagggactcttgatg

SEQ ID NO: 5266883 - DNA, 25 bp, Homo sapien
gccatcaggtttcccgttgctggtg

SEQ ID NO: 5266884 - DNA, 25 bp, Homo sapien
agcaagccatcaggtttcccgttgc

SEQ ID NO: 5266885 - DNA, 25 bp, Homo sapien
aagccatcaggtttcccgttgctgg

SEQ ID NO: 5266886 - DNA, 25 bp, Homo sapien
caggtttcccgttgctggtgactgg

SEQ ID NO: 5266887 - DNA, 25 bp, Homo sapien
ctgtgatttgcatgtggatgaatca

SEQ ID NO: 5266888 - DNA, 25 bp, Homo sapien
aggaggccacaggcggtgggtggtg

SEQ ID NO: 5266889 - DNA, 25 bp, Homo sapien
ccatcatcaccttgagcatgtacct

SEQ ID NO: 5266890 - DNA, 25 bp, Homo sapien
ctctgaacccgtcatcacctggagc

SEQ ID NO: 5266891 - DNA, 25 bp, Homo sapien
tgtacctctgaacccgtcatcacct

SEQ ID NO: 5266892 - DNA, 25 bp, Homo sapien
catcaccttgagcatgtacctctga

SEQ ID NO: 5266893 - DNA, 25 bp, Homo sapien
tcatcaccttgagtgtgtacccctg

SEQ ID NO: 5266894 - DNA, 25 bp, Homo sapien
gtcatcaccttgagtgtgtacccct

SEQ ID NO: 5266895 - DNA, 25 bp, Homo sapien
gagtgtgtacccctgaatccgtcgt

SEQ ID NO: 5266896 - DNA, 25 bp, Homo sapien
tgtgtacccctgaatccgtcgtcac

SEQ ID NO: 5266897 - DNA, 25 bp, Homo sapien
catttggttctactcctctgggagc

SEQ ID NO: 5266898 - DNA, 25 bp, Homo sapien
ccttcacgagatgcacatttggttc

SEQ ID NO: 5266899 - DNA, 25 bp, Homo sapien
gaaaacctctcgtgcggccagagaa

SEQ ID NO: 5266900 - DNA, 25 bp, Homo sapien
tcctctgggagcaagtcgagtggca

SEQ ID NO: 5266901 - DNA, 25 bp, Homo sapien
aagcagctctgtgggcgggaatttc

SEQ ID NO: 5266902 - DNA, 25 bp, Homo sapien
gaatttcgacatccgtgtgcaggcg

SEQ ID NO: 5266903 - DNA, 25 bp, Homo sapien
cgtggtgcaattcgtagctttggga

SEQ ID NO: 5266904 - DNA, 25 bp, Homo sapien
ggatttctggataaacgtggtgcaa

SEQ ID NO: 5266905 - DNA, 25 bp, Homo sapien
gctcaagttggaaacttaacctgtg

SEQ ID NO: 5266906 - DNA, 25 bp, Homo sapien
ggtcacacctgacatgagtaacaat

SEQ ID NO: 5266907 - DNA, 25 bp, Homo sapien
ctcatcattatcagatatctagctc

SEQ ID NO: 5266908 - DNA, 25 bp, Homo sapien
ctaccatggtcacacctgacatgag

SEQ ID NO: 5266909 - DNA, 25 bp, Homo sapien
tccccatctggtaggagactcagct

SEQ ID NO: 5266910 - DNA, 25 bp, Homo sapien
aaagaggtgcaaacatctgcttcga

SEQ ID NO: 5266911 - DNA, 25 bp, Homo sapien
ttggatcaggtaccaaagaggtgca

SEQ ID NO: 5266912 - DNA, 25 bp, Homo sapien
cttctccagtttgatccggaccttc

SEQ ID NO: 5266913 - DNA, 25 bp, Homo sapien
accggacgccctcacatgcctggcg

SEQ ID NO: 5266914 - DNA, 25 bp, Homo sapien
tcacatgcctggcgcagcacttggg

SEQ ID NO: 5266915 - DNA, 25 bp, Homo sapien
gaagggccggcctatggctcagcat

SEQ ID NO: 5266916 - DNA, 25 bp, Homo sapien
ggaagggccggcctatggctcagca

SEQ ID NO: 5266917 - DNA, 25 bp, Homo sapien
tttagcatggaaactggtagagggc

SEQ ID NO: 5266918 - DNA, 25 bp, Homo sapien
cacgcagtggtgatgcagcagatct

SEQ ID NO: 5266919 - DNA, 25 bp, Homo sapien
tcagaacgaggcttcgcacttgccc

SEQ ID NO: 5266920 - DNA, 25 bp, Homo sapien
gataggattcataattctgcactca

SEQ ID NO: 5266921 - DNA, 25 bp, Homo sapien
gccctgggtctttctgactacgaac

SEQ ID NO: 5266922 - DNA, 25 bp, Homo sapien
cactagtccattctaaggtcagagc

SEQ ID NO: 5266923 - DNA, 25 bp, Homo sapien
ttctgactacgaacctgctgccctt

SEQ ID NO: 5266924 - DNA, 25 bp, Homo sapien
gtcagagcacacgtgttccgctggg

SEQ ID NO: 5266925 - DNA, 25 bp, Homo sapien
ggctgatttcccatgggatggctgc

SEQ ID NO: 5266926 - DNA, 25 bp, Homo sapien
gctgatttcccatgggatggctgca

SEQ ID NO: 5266927 - DNA, 25 bp, Homo sapien
ctgatttcccatgggatggctgcat

SEQ ID NO: 5266928 - DNA, 25 bp, Homo sapien
ggcagccagctccctgcactctgcc

SEQ ID NO: 5266929 - DNA, 25 bp, Homo sapien
cagccagctccctgcactctgccat

SEQ ID NO: 5266930 - DNA, 25 bp, Homo sapien
tgcaggcagaggcagccagctccct

SEQ ID NO: 5266931 - DNA, 25 bp, Homo sapien
agaggcagccagctccctgcactct

SEQ ID NO: 5266932 - DNA, 25 bp, Homo sapien
tcatttggtagaagcgctataacca

SEQ ID NO: 5266933 - DNA, 25 bp, Homo sapien
tagaagcgctataaccacgcatgga

SEQ ID NO: 5266934 - DNA, 25 bp, Homo sapien
agcgctataaccacgcatggacttg

SEQ ID NO: 5266935 - DNA, 25 bp, Homo sapien
ttggtagaagcgctataaccacgca

SEQ ID NO: 5266936 - DNA, 25 bp, Homo sapien
tagggcgagggacctgtttccagtg

SEQ ID NO: 5266937 - DNA, 25 bp, Homo sapien
tgcgacttctcgagtcacgtctcct

SEQ ID NO: 5266938 - DNA, 25 bp, Homo sapien
tctgaggttctgagcgtgcgacttc

SEQ ID NO: 5266939 - DNA, 25 bp, Homo sapien
atcttgaagccactctatgacccca

SEQ ID NO: 5266940 - DNA, 25 bp, Homo sapien
cctgctccgagccacgttttcaggg

SEQ ID NO: 5266941 - DNA, 25 bp, Homo sapien
tgtccaaagcgcctcctttctgagc

SEQ ID NO: 5266942 - DNA, 25 bp, Homo sapien
gagaactgttccagtggccggctct

SEQ ID NO: 5266943 - DNA, 25 bp, Homo sapien
tcaggggttttgtccaaagcgcctc

SEQ ID NO: 5266944 - DNA, 25 bp, Homo sapien
attccaacacctctgtgatgcaggc

SEQ ID NO: 5266945 - DNA, 25 bp, Homo sapien
caggcttgggatgttgagaggatgt

SEQ ID NO: 5266946 - DNA, 25 bp, Homo sapien
gagaaatagtggcagaagagctctc

SEQ ID NO: 5266947 - DNA, 25 bp, Homo sapien
aatagtggcagaagagctctctaag

SEQ ID NO: 5266948 - DNA, 25 bp, Homo sapien
tcactgggggtggtaaagagcccat

SEQ ID NO: 5266949 - DNA, 25 bp, Homo sapien
tctgaacggcacctgcattcactgg

SEQ ID NO: 5266950 - DNA, 25 bp, Homo sapien
gcattcactgggggtggtaaagagc

SEQ ID NO: 5266951 - DNA, 25 bp, Homo sapien
ctctgaacggcacctgcattcactg

SEQ ID NO: 5266952 - DNA, 25 bp, Homo sapien
ctgtggtctggcacgggcatttctg

SEQ ID NO: 5266953 - DNA, 25 bp, Homo sapien
gggccttgcacccactgtgggactg

SEQ ID NO: 5266954 - DNA, 25 bp, Homo sapien
cattgcagcacgcatcactcctgca

SEQ ID NO: 5266955 - DNA, 25 bp, Homo sapien
gtggccacgccattgcagcacgcat

SEQ ID NO: 5266956 - DNA, 25 bp, Homo sapien
ctgaacacgacgcacaggacgatga

SEQ ID NO: 5266957 - DNA, 25 bp, Homo sapien
acacgacgcacaggacgatgactgt

SEQ ID NO: 5266958 - DNA, 25 bp, Homo sapien
tgctggcaacctcatcaatgctttg

SEQ ID NO: 5266959 - DNA, 25 bp, Homo sapien
gggttttcccctttgattgctggca

SEQ ID NO: 5266960 - DNA, 25 bp, Homo sapien
ccttggactagaagtggcacatcgc

SEQ ID NO: 5266961 - DNA, 25 bp, Homo sapien
tccagatgaggagacgatgtgttgc

SEQ ID NO: 5266962 - DNA, 25 bp, Homo sapien
tccgttggcgagaacgtcacgtgcc

SEQ ID NO: 5266963 - DNA, 25 bp, Homo sapien
catgtcacagtctgataagaggccc

SEQ ID NO: 5266964 - DNA, 25 bp, Homo sapien
cccaacagcgccaaccgcaacccac

SEQ ID NO: 5266965 - DNA, 25 bp, Homo sapien
gtctctgaggatcccattttgcaaa

SEQ ID NO: 5266966 - DNA, 25 bp, Homo sapien
ccaggtgggtgtctctgaggatccc

SEQ ID NO: 5266967 - DNA, 25 bp, Homo sapien
ggtgtctctgaggatcccattttgc

SEQ ID NO: 5266968 - DNA, 25 bp, Homo sapien
ggatcccattttgcaaacgaagaaa

SEQ ID NO: 5266969 - DNA, 25 bp, Homo sapien
caggttccaaatggcttcatgctca

SEQ ID NO: 5266970 - DNA, 25 bp, Homo sapien
tcatgctcagcagcaaagcattttc

SEQ ID NO: 5266971 - DNA, 25 bp, Homo sapien
cttcatgctcagcagcaaagcattt

SEQ ID NO: 5266972 - DNA, 25 bp, Homo sapien
atgctcagcagcaaagcattttcat

SEQ ID NO: 5266973 - DNA, 25 bp, Homo sapien
ccgggaagtgtgagctgggaagcct

SEQ ID NO: 5266974 - DNA, 25 bp, Homo sapien
tgctgcccgcatcatcggcacctct

SEQ ID NO: 5266975 - DNA, 25 bp, Homo sapien
tgtggggagcagatgagggaacagc

SEQ ID NO: 5266976 - DNA, 25 bp, Homo sapien
tgcattcacaagccgggaagtgtga

SEQ ID NO: 5266977 - DNA, 25 bp, Homo sapien
gatttaacctgtaaacttatgagca

SEQ ID NO: 5266978 - DNA, 25 bp, Homo sapien
gaattaagggctaaatcttgcctcc

SEQ ID NO: 5266979 - DNA, 25 bp, Homo sapien
cattgcagcgctgagatgttgcctt

SEQ ID NO: 5266980 - DNA, 25 bp, Homo sapien
ctccttggagggaatgatttaacct

SEQ ID NO: 5266981 - DNA, 25 bp, Homo sapien
agccctgtcggcgaggtccctgcct

SEQ ID NO: 5266982 - DNA, 25 bp, Homo sapien
tgatgattgatgcatggaccctgct

SEQ ID NO: 5266983 - DNA, 25 bp, Homo sapien
aatgacactgacatccaatacatga

SEQ ID NO: 5266984 - DNA, 25 bp, Homo sapien
acgcttccacttaggaggctctggc

SEQ ID NO: 5266985 - DNA, 25 bp, Homo sapien
acagccagccgtggtcgggtgatgc

SEQ ID NO: 5266986 - DNA, 25 bp, Homo sapien
tcgggtgatgccctccacattccaa

SEQ ID NO: 5266987 - DNA, 25 bp, Homo sapien
agccgtggtcgggtgatgccctcca

SEQ ID NO: 5266988 - DNA, 25 bp, Homo sapien
ggaagcagcaattcctgtgagcact

SEQ ID NO: 5266989 - DNA, 25 bp, Homo sapien
gactgagaggtcttgcaccccagtt

SEQ ID NO: 5266990 - DNA, 25 bp, Homo sapien
ttctgtggactgagaggtcttgcac

SEQ ID NO: 5266991 - DNA, 25 bp, Homo sapien
ggctggtatcttccgaatgctgact

SEQ ID NO: 5266992 - DNA, 25 bp, Homo sapien
ggcacctgccgctggcttgtgtgtt

SEQ ID NO: 5266993 - DNA, 25 bp, Homo sapien
aggaagcacgcattctggttggtat

SEQ ID NO: 5266994 - DNA, 25 bp, Homo sapien
tctggttggtatccccgtgccgtaa

SEQ ID NO: 5266995 - DNA, 25 bp, Homo sapien
ttctggttggtatccccgtgccgta

SEQ ID NO: 5266996 - DNA, 25 bp, Homo sapien
ctacaggaagcacgcattctggttg

SEQ ID NO: 5266997 - DNA, 25 bp, Homo sapien
gcctggctccccgttggttctggag

SEQ ID NO: 5266998 - DNA, 25 bp, Homo sapien
tggctccccgttggttctggagctc

SEQ ID NO: 5266999 - DNA, 25 bp, Homo sapien
tgggggctggctcgtgtttgggtct

SEQ ID NO: 5267000 - DNA, 25 bp, Homo sapien
ctgcctggctccccgttggttctgg

SEQ ID NO: 5267001 - DNA, 25 bp, Homo sapien
gcagctcaggcttcgctcttcacag

SEQ ID NO: 5267002 - DNA, 25 bp, Homo sapien
tcgctcttcacagtcctccttgctc

SEQ ID NO: 5267003 - DNA, 25 bp, Homo sapien
aggcttcgctcttcacagtcctcct

SEQ ID NO: 5267004 - DNA, 25 bp, Homo sapien
cacatggcagctcaggcttcgctct

SEQ ID NO: 5267005 - DNA, 25 bp, Homo sapien
gtgtcaccgagggagtttgaagagt

SEQ ID NO: 5267006 - DNA, 25 bp, Homo sapien
tagattgaggactccagtagcatct

SEQ ID NO: 5267007 - DNA, 25 bp, Homo sapien
tcctccgggattttctggggtgtca

SEQ ID NO: 5267008 - DNA, 25 bp, Homo sapien
gggtatgttgatagattgaggactc

SEQ ID NO: 5267009 - DNA, 25 bp, Homo sapien
aaggcacttctgcagatctagcttc

SEQ ID NO: 5267010 - DNA, 25 bp, Homo sapien
aggcacttctgcagatctagcttcc

SEQ ID NO: 5267011 - DNA, 25 bp, Homo sapien
gcacttctgcagatctagcttcctt

SEQ ID NO: 5267012 - DNA, 25 bp, Homo sapien
agacccgtaaccttcacaggtcctg

SEQ ID NO: 5267013 - DNA, 25 bp, Homo sapien
ggagctgatgctttggagacaccaa

SEQ ID NO: 5267014 - DNA, 25 bp, Homo sapien
tgggggcctgttgccaccatcaggc

SEQ ID NO: 5267015 - DNA, 25 bp, Homo sapien
aacaccagacccgtaaccttcacag

SEQ ID NO: 5267016 - DNA, 25 bp, Homo sapien
tctgtccttatcatgtagaacagtg

SEQ ID NO: 5267017 - DNA, 25 bp, Homo sapien
ttctctctgtccttatcatgtagaa

SEQ ID NO: 5267018 - DNA, 25 bp, Homo sapien
gggctgccagccaatatcaaccaag

SEQ ID NO: 5267019 - DNA, 25 bp, Homo sapien
cagccaatatcaaccaagctcttct

SEQ ID NO: 5267020 - DNA, 25 bp, Homo sapien
ttaagaatgttcagggactggagtt

SEQ ID NO: 5267021 - DNA, 25 bp, Homo sapien
taagaatgttcagggactggagttt

SEQ ID NO: 5267022 - DNA, 25 bp, Homo sapien
catcagaaagcattgccacgaatgc

SEQ ID NO: 5267023 - DNA, 25 bp, Homo sapien
ggttacttccagtggagttatccac

SEQ ID NO: 5267024 - DNA, 25 bp, Homo sapien
agtcacatctccattttggatctca

SEQ ID NO: 5267025 - DNA, 25 bp, Homo sapien
caatatcattcggaagttggttact

SEQ ID NO: 5267026 - DNA, 25 bp, Homo sapien
tttcgctgtagccattaagtcctcg

SEQ ID NO: 5267027 - DNA, 25 bp, Homo sapien
caggcctctgctttcgctgtagcca

SEQ ID NO: 5267028 - DNA, 25 bp, Homo sapien
cattaagtcctcgagaggaaaagag

SEQ ID NO: 5267029 - DNA, 25 bp, Homo sapien
cagcaggcctctgctttcgctgtag

SEQ ID NO: 5267030 - DNA, 25 bp, Homo sapien
aaagtgcagcgggatgactaggtcc

SEQ ID NO: 5267031 - DNA, 25 bp, Homo sapien
agcgggatgactaggtcctgctgct

SEQ ID NO: 5267032 - DNA, 25 bp, Homo sapien
tgcagcgggatgactaggtcctgct

SEQ ID NO: 5267033 - DNA, 25 bp, Homo sapien
tctgcaaagtgcagcgggatgacta

SEQ ID NO: 5267034 - DNA, 25 bp, Homo sapien
cacacggctgcgcttctgggaggtt

SEQ ID NO: 5267035 - DNA, 25 bp, Homo sapien
ttactgcaagtcagtgagccacagc

SEQ ID NO: 5267036 - DNA, 25 bp, Homo sapien
tgcccaacacggatccaaacatgag

SEQ ID NO: 5267037 - DNA, 25 bp, Homo sapien
tttactctcgccgttgcaaagatga

SEQ ID NO: 5267038 - DNA, 25 bp, Homo sapien
ggtttgtgcaggttctggcgcctct

SEQ ID NO: 5267039 - DNA, 25 bp, Homo sapien
gggtcagtcccgtgtgtgttttcca

SEQ ID NO: 5267040 - DNA, 25 bp, Homo sapien
gcccaacacggatctagcaccattt

SEQ ID NO: 5267041 - DNA, 25 bp, Homo sapien
ctctggactggggtcagtcccgtgt

SEQ ID NO: 5267042 - DNA, 25 bp, Homo sapien
ttccacttttccatttatttctgat

SEQ ID NO: 5267043 - DNA, 25 bp, Homo sapien
aagatcttccacttttccatttatt

SEQ ID NO: 5267044 - DNA, 25 bp, Homo sapien
tcttccacttttccatttatttctg

SEQ ID NO: 5267045 - DNA, 25 bp, Homo sapien
gatcttccacttttccatttatttc

SEQ ID NO: 5267046 - DNA, 25 bp, Homo sapien
cagagccgagaacccttgggagccc

SEQ ID NO: 5267047 - DNA, 25 bp, Homo sapien
gtatcccatgccctgggaacactga

SEQ ID NO: 5267048 - DNA, 25 bp, Homo sapien
gcagtggtcctccaagtgcttgtag

SEQ ID NO: 5267049 - DNA, 25 bp, Homo sapien
tgggagcccgtatcccatgccctgg

SEQ ID NO: 5267050 - DNA, 25 bp, Homo sapien
tgaggtcgccgctcgggaaatgcca

SEQ ID NO: 5267051 - DNA, 25 bp, Homo sapien
tgtcaaacgtggctgtcactcctga

SEQ ID NO: 5267052 - DNA, 25 bp, Homo sapien
ggaaatgccagtgcctgatccaagt

SEQ ID NO: 5267053 - DNA, 25 bp, Homo sapien
tgaaggtggcggcaattagaaccct

SEQ ID NO: 5267054 - DNA, 25 bp, Homo sapien
atgggcacagatgtatgagagcttg

SEQ ID NO: 5267055 - DNA, 25 bp, Homo sapien
gatgggcacagatgtatgagagctt

SEQ ID NO: 5267056 - DNA, 25 bp, Homo sapien
agatgggcacagatgtatgagagct

SEQ ID NO: 5267057 - DNA, 25 bp, Homo sapien
ggagatgggcacagatgtatgagag

SEQ ID NO: 5267058 - DNA, 25 bp, Homo sapien
gagagtgcagggtgtaaaacctggg

SEQ ID NO: 5267059 - DNA, 25 bp, Homo sapien
gattgtgaagcctgggaaggtgcag

SEQ ID NO: 5267060 - DNA, 25 bp, Homo sapien
tgttgggtatgaactctgggaaggt

SEQ ID NO: 5267061 - DNA, 25 bp, Homo sapien
cttgggagggtgcaggatgtgaact

SEQ ID NO: 5267062 - DNA, 25 bp, Homo sapien
gacacttgccgtggagaagggatac

SEQ ID NO: 5267063 - DNA, 25 bp, Homo sapien
catctggctccggtgagatggcgta

SEQ ID NO: 5267064 - DNA, 25 bp, Homo sapien
tgccgtggagaagggatacttgcca

SEQ ID NO: 5267065 - DNA, 25 bp, Homo sapien
ggactctcccatcgctgcagccttt

SEQ ID NO: 5267066 - DNA, 25 bp, Homo sapien
caggtgatgcctgcatccaggacca

SEQ ID NO: 5267067 - DNA, 25 bp, Homo sapien
gaggagtcatatgccctgcagaggt

SEQ ID NO: 5267068 - DNA, 25 bp, Homo sapien
tcagagccctcgagaggaggagtca

SEQ ID NO: 5267069 - DNA, 25 bp, Homo sapien
gagtcatatgccctgcagaggtggc

SEQ ID NO: 5267070 - DNA, 25 bp, Homo sapien
gtccaggctgcatggggatcccttg

SEQ ID NO: 5267071 - DNA, 25 bp, Homo sapien
tccaggctgcatggggatcccttgt

SEQ ID NO: 5267072 - DNA, 25 bp, Homo sapien
ctcctttctgtgacaggcgcttgtt

SEQ ID NO: 5267073 - DNA, 25 bp, Homo sapien
cagcccctctataggcccctcctgt

SEQ ID NO: 5267074 - DNA, 25 bp, Homo sapien
tcctttctgtgacaggcgcttgttc

SEQ ID NO: 5267075 - DNA, 25 bp, Homo sapien
gcccctctataggcccctcctgtat

SEQ ID NO: 5267076 - DNA, 25 bp, Homo sapien
tgtggggagaagagggcagcagtgt

SEQ ID NO: 5267077 - DNA, 25 bp, Homo sapien
gtggggagaagagggcagcagtgtc

SEQ ID NO: 5267078 - DNA, 25 bp, Homo sapien
ctgtggggagaagagggcagcagtg

SEQ ID NO: 5267079 - DNA, 25 bp, Homo sapien
ggggagaagagggcagcagtgtccc

SEQ ID NO: 5267080 - DNA, 25 bp, Homo sapien
cccacgcgtgaggaggcttgtgagt

SEQ ID NO: 5267081 - DNA, 25 bp, Homo sapien
gaggcttgtgagtcgttccagagcc

SEQ ID NO: 5267082 - DNA, 25 bp, Homo sapien
cttgtgagtcgttccagagccttct

SEQ ID NO: 5267083 - DNA, 25 bp, Homo sapien
tgaggaggcttgtgagtcgttccag

SEQ ID NO: 5267084 - DNA, 25 bp, Homo sapien
ccagctttgattgtcggaaggatga

SEQ ID NO: 5267085 - DNA, 25 bp, Homo sapien
ggatgaacggggacctctggcctca

SEQ ID NO: 5267086 - DNA, 25 bp, Homo sapien
tctgagagtgaacctccagctttga

SEQ ID NO: 5267087 - DNA, 25 bp, Homo sapien
aggagcggaagacaggaaaagcctc

SEQ ID NO: 5267088 - DNA, 25 bp, Homo sapien
cagccctggatctgggtaggaggtg

SEQ ID NO: 5267089 - DNA, 25 bp, Homo sapien
cgggagcccctctccagccctggat

SEQ ID NO: 5267090 - DNA, 25 bp, Homo sapien
cctctccagccctggatctgggtag

SEQ ID NO: 5267091 - DNA, 25 bp, Homo sapien
ctccagccctggatctgggtaggag

SEQ ID NO: 5267092 - DNA, 25 bp, Homo sapien
ggtgtgagctgcgtggccgttgtgc

SEQ ID NO: 5267093 - DNA, 25 bp, Homo sapien
gactgctggtgaccgggtgtgagct

SEQ ID NO: 5267094 - DNA, 25 bp, Homo sapien
agctgcgtggccgttgtgctttgct

SEQ ID NO: 5267095 - DNA, 25 bp, Homo sapien
cagagaggctgtaggtgactgctgg

SEQ ID NO: 5267096 - DNA, 25 bp, Homo sapien
aggggctcgctctgatcttcctgac

SEQ ID NO: 5267097 - DNA, 25 bp, Homo sapien
agctgcagttctgctcagggggccc

SEQ ID NO: 5267098 - DNA, 25 bp, Homo sapien
ggggctcgctctgatcttcctgacg

SEQ ID NO: 5267099 - DNA, 25 bp, Homo sapien
ggttaagcataagcagactcactgc

SEQ ID NO: 5267100 - DNA, 25 bp, Homo sapien
taagcataagcagactcactgccct

SEQ ID NO: 5267101 - DNA, 25 bp, Homo sapien
cataagcagactcactgcccttgag

SEQ ID NO: 5267102 - DNA, 25 bp, Homo sapien
ctggttaagcataagcagactcact

SEQ ID NO: 5267103 - DNA, 25 bp, Homo sapien
ggtatggctgcggactcatccagtt

SEQ ID NO: 5267104 - DNA, 25 bp, Homo sapien
tcaacaggacttgactgaccctctg

SEQ ID NO: 5267105 - DNA, 25 bp, Homo sapien
cattaggttgatgcagaagtatccc

SEQ ID NO: 5267106 - DNA, 25 bp, Homo sapien
tatttcagatgagaccgggtgcgtt

SEQ ID NO: 5267107 - DNA, 25 bp, Homo sapien
gtgactgcaggcctttggtgacttt

SEQ ID NO: 5267108 - DNA, 25 bp, Homo sapien
tatttcttgggtctcttgttcatct

SEQ ID NO: 5267109 - DNA, 25 bp, Homo sapien
caacacagaggctggtatttcttgg

SEQ ID NO: 5267110 - DNA, 25 bp, Homo sapien
aatgttgcagcaatgaaggctctga

SEQ ID NO: 5267111 - DNA, 25 bp, Homo sapien
tcagctgctcactttcccgctggtg

SEQ ID NO: 5267112 - DNA, 25 bp, Homo sapien
ccgtggccatctgcacgtggtagct

SEQ ID NO: 5267113 - DNA, 25 bp, Homo sapien
tgcccagtgcgatgaagaatgaagt

SEQ ID NO: 5267114 - DNA, 25 bp, Homo sapien
gatggcactagactcagtgccctgc

SEQ ID NO: 5267115 - DNA, 25 bp, Homo sapien
gcacgcgggagggacgggaggaaga

SEQ ID NO: 5267116 - DNA, 25 bp, Homo sapien
aaggtcggcatcacccggggccgtg

SEQ ID NO: 5267117 - DNA, 25 bp, Homo sapien
aggaagaaggtcggcatcacccggg

SEQ ID NO: 5267118 - DNA, 25 bp, Homo sapien
ctgcacgcgggagggacgggaggaa

SEQ ID NO: 5267119 - DNA, 25 bp, Homo sapien
gagcacgtgaggctctggcgtcact

SEQ ID NO: 5267120 - DNA, 25 bp, Homo sapien
gaggtgcaaacagtgctgacttggt

SEQ ID NO: 5267121 - DNA, 25 bp, Homo sapien
gaggctctggcgtcactttggtgca

SEQ ID NO: 5267122 - DNA, 25 bp, Homo sapien
gcgtcactttggtgcaagtggagat

SEQ ID NO: 5267123 - DNA, 25 bp, Homo sapien
tgctgtcagacccacgtagactctg

SEQ ID NO: 5267124 - DNA, 25 bp, Homo sapien
cttggtgctgtcagacccacgtaga

SEQ ID NO: 5267125 - DNA, 25 bp, Homo sapien
gttcctctcaattctcgaatgagcc

SEQ ID NO: 5267126 - DNA, 25 bp, Homo sapien
ctcaattctcgaatgagccaccttc

SEQ ID NO: 5267127 - DNA, 25 bp, Homo sapien
gtggcggctcacgctgttgactgcc

SEQ ID NO: 5267128 - DNA, 25 bp, Homo sapien
ggcggctcacgctgttgactgcctg

SEQ ID NO: 5267129 - DNA, 25 bp, Homo sapien
cctgcacgatgttctccctggctct

SEQ ID NO: 5267130 - DNA, 25 bp, Homo sapien
ctgcacgatgttctccctggctctg

SEQ ID NO: 5267131 - DNA, 25 bp, Homo sapien
agtaccattgccgtttccctatgat

SEQ ID NO: 5267132 - DNA, 25 bp, Homo sapien
gtttccctatgatcatgatgtctac

SEQ ID NO: 5267133 - DNA, 25 bp, Homo sapien
ccattgccgtttccctatgatcatg

SEQ ID NO: 5267134 - DNA, 25 bp, Homo sapien
ttgccgtttccctatgatcatgatg

SEQ ID NO: 5267135 - DNA, 25 bp, Homo sapien
ggcatttcagggctgtggactcccc

SEQ ID NO: 5267136 - DNA, 25 bp, Homo sapien
tgcccaggtcttcctggcatttcag

SEQ ID NO: 5267137 - DNA, 25 bp, Homo sapien
ggataaattccgcaggtgcccaggc

SEQ ID NO: 5267138 - DNA, 25 bp, Homo sapien
ttctgcttggccccgcagagaggca

SEQ ID NO: 5267139 - DNA, 25 bp, Homo sapien
tcccttgccttgacgtggtccttgc

SEQ ID NO: 5267140 - DNA, 25 bp, Homo sapien
ggctctggcttctcggcctctccat

SEQ ID NO: 5267141 - DNA, 25 bp, Homo sapien
ggctcctcttggccgccctttggct

SEQ ID NO: 5267142 - DNA, 25 bp, Homo sapien
tctcccttgccttgacgtggtcctt

SEQ ID NO: 5267143 - DNA, 25 bp, Homo sapien
tcttcttccccctccagtgagatct

SEQ ID NO: 5267144 - DNA, 25 bp, Homo sapien
ttccccctccagtgagatcttcccg

SEQ ID NO: 5267145 - DNA, 25 bp, Homo sapien
ctccagtgagatcttcccggattct

SEQ ID NO: 5267146 - DNA, 25 bp, Homo sapien
cagtgagatcttcccggattcttac

SEQ ID NO: 5267147 - DNA, 25 bp, Homo sapien
cagcttctgacccaagagaagcacc

SEQ ID NO: 5267148 - DNA, 25 bp, Homo sapien
gcttctgacccaagagaagcacccg

SEQ ID NO: 5267149 - DNA, 25 bp, Homo sapien
ccagcttctgacccaagagaagcac

SEQ ID NO: 5267150 - DNA, 25 bp, Homo sapien
ttctgacccaagagaagcacccggt

SEQ ID NO: 5267151 - DNA, 25 bp, Homo sapien
tgccagcatcgtgcgcttccaactt

SEQ ID NO: 5267152 - DNA, 25 bp, Homo sapien
gcgcttccaactttcccaatttcag

SEQ ID NO: 5267153 - DNA, 25 bp, Homo sapien
atcgtgcgcttccaactttcccaat

SEQ ID NO: 5267154 - DNA, 25 bp, Homo sapien
cagtgccagcatcgtgcgcttccaa

SEQ ID NO: 5267155 - DNA, 25 bp, Homo sapien
cagcaataaggagggattcatcggg

SEQ ID NO: 5267156 - DNA, 25 bp, Homo sapien
ctgcagcaataaggagggattcatc

SEQ ID NO: 5267157 - DNA, 25 bp, Homo sapien
ggattcatcgggtgaaaatatttct

SEQ ID NO: 5267158 - DNA, 25 bp, Homo sapien
taaggagggattcatcgggtgaaaa

SEQ ID NO: 5267159 - DNA, 25 bp, Homo sapien
cagcaaatcccatctgaagacgtat

SEQ ID NO: 5267160 - DNA, 25 bp, Homo sapien
tttcaaagttgggcaatgggcttgg

SEQ ID NO: 5267161 - DNA, 25 bp, Homo sapien
gatggcagtgcgaggaaatttcagc

SEQ ID NO: 5267162 - DNA, 25 bp, Homo sapien
tgcaggacagcttcttatgccgatg

SEQ ID NO: 5267163 - DNA, 25 bp, Homo sapien
tgttcctgactgagcacgtcctgga

SEQ ID NO: 5267164 - DNA, 25 bp, Homo sapien
cctcgggaggcaacgaagagacaag

SEQ ID NO: 5267165 - DNA, 25 bp, Homo sapien
tcggttcatccgagggactcagggt

SEQ ID NO: 5267166 - DNA, 25 bp, Homo sapien
gaggaagcccagatgcttgtcggtt

SEQ ID NO: 5267167 - DNA, 25 bp, Homo sapien
cagagactggcccaggtggtaaagc

SEQ ID NO: 5267168 - DNA, 25 bp, Homo sapien
gtggtaaagcggcagcgcgaacttc

SEQ ID NO: 5267169 - DNA, 25 bp, Homo sapien
ggcccaggtggtaaagcggcagcgc

SEQ ID NO: 5267170 - DNA, 25 bp, Homo sapien
ccaggtggtaaagcggcagcgcgaa

SEQ ID NO: 5267171 - DNA, 25 bp, Homo sapien
tgccacaccgggccgagtggaaaga

SEQ ID NO: 5267172 - DNA, 25 bp, Homo sapien
ctgccacaccgggccgagtggaaag

SEQ ID NO: 5267173 - DNA, 25 bp, Homo sapien
ggtctgcagggctggtggcatggat

SEQ ID NO: 5267174 - DNA, 25 bp, Homo sapien
gtctgcagggctggtggcatggatc

SEQ ID NO: 5267175 - DNA, 25 bp, Homo sapien
tccctgagatttttggcgttgccat

SEQ ID NO: 5267176 - DNA, 25 bp, Homo sapien
gcgttgccatggagcggctgactta

SEQ ID NO: 5267177 - DNA, 25 bp, Homo sapien
cagcgctggcgcagttgcttaactc

SEQ ID NO: 5267178 - DNA, 25 bp, Homo sapien
ttcttgtccaccacacggtgatggg

SEQ ID NO: 5267179 - DNA, 25 bp, Homo sapien
gtgattaccaggccacggccaggac

SEQ ID NO: 5267180 - DNA, 25 bp, Homo sapien
ccatctccgtgggacagtgcagagc

SEQ ID NO: 5267181 - DNA, 25 bp, Homo sapien
ttgcaccggccaggcactctgtggc

SEQ ID NO: 5267182 - DNA, 25 bp, Homo sapien
tcttgcaccggccaggcactctgtg

SEQ ID NO: 5267183 - DNA, 25 bp, Homo sapien
cttctccctcttgcaccggccaggc

SEQ ID NO: 5267184 - DNA, 25 bp, Homo sapien
tgggacaggacaccggcatttctca

SEQ ID NO: 5267185 - DNA, 25 bp, Homo sapien
tgcacgtgtgagatcccggaatgga

SEQ ID NO: 5267186 - DNA, 25 bp, Homo sapien
ttgtaacttatcaaatgcacgtgtg

SEQ ID NO: 5267187 - DNA, 25 bp, Homo sapien
gggccgacttcagcgtggtagccat

SEQ ID NO: 5267188 - DNA, 25 bp, Homo sapien
aggatattgatctgtcacatgtagc

SEQ ID NO: 5267189 - DNA, 25 bp, Homo sapien
ttttgtgcatagaaagcttgtggca

SEQ ID NO: 5267190 - DNA, 25 bp, Homo sapien
catttaacatgggtatagcgtttcg

SEQ ID NO: 5267191 - DNA, 25 bp, Homo sapien
ctttaggacttctggtattttgtgc

SEQ ID NO: 5267192 - DNA, 25 bp, Homo sapien
caagccaaacaagccctgccatgaa

SEQ ID NO: 5267193 - DNA, 25 bp, Homo sapien
ctctggtgtcgccagcctgtgaagg

SEQ ID NO: 5267194 - DNA, 25 bp, Homo sapien
tcaaggaccagggagctcatggact

SEQ ID NO: 5267195 - DNA, 25 bp, Homo sapien
tgactgctgtctaggtccactctgg

SEQ ID NO: 5267196 - DNA, 25 bp, Homo sapien
caggaacacagcttaggaagcatgc

SEQ ID NO: 5267197 - DNA, 25 bp, Homo sapien
tacttagagctcatatcagatttga

SEQ ID NO: 5267198 - DNA, 25 bp, Homo sapien
tgatagtttcgtaggtttgctgcac

SEQ ID NO: 5267199 - DNA, 25 bp, Homo sapien
tgcacacaaactgaaatcaacgaca

SEQ ID NO: 5267200 - DNA, 25 bp, Homo sapien
agtttcctcagcattccgaggagtg

SEQ ID NO: 5267201 - DNA, 25 bp, Homo sapien
ctgcaggcaaagaggggccccttga

SEQ ID NO: 5267202 - DNA, 25 bp, Homo sapien
tccgaggagtgtatttaaggctgca

SEQ ID NO: 5267203 - DNA, 25 bp, Homo sapien
tcagcattccgaggagtgtatttaa

SEQ ID NO: 5267204 - DNA, 25 bp, Homo sapien
tcctaataattgcataggataagtt

SEQ ID NO: 5267205 - DNA, 25 bp, Homo sapien
tttatcatccctatctatgggaaac

SEQ ID NO: 5267206 - DNA, 25 bp, Homo sapien
gacatcgattatggtaacccagaaa

SEQ ID NO: 5267207 - DNA, 25 bp, Homo sapien
catcgattatggtaacccagaaagt

SEQ ID NO: 5267208 - DNA, 25 bp, Homo sapien
aaggcttggctggaaggctccttgc

SEQ ID NO: 5267209 - DNA, 25 bp, Homo sapien
cagcgcccagggtagaaggatggat

SEQ ID NO: 5267210 - DNA, 25 bp, Homo sapien
tgaatgatttgggtaagggttcaga

SEQ ID NO: 5267211 - DNA, 25 bp, Homo sapien
ttcagagacggtcccaaggcttggc

SEQ ID NO: 5267212 - DNA, 25 bp, Homo sapien
tgccttttgagtgcacagtcagtgt

SEQ ID NO: 5267213 - DNA, 25 bp, Homo sapien
tggccagggcctttacacaacttct

SEQ ID NO: 5267214 - DNA, 25 bp, Homo sapien
tagattcacagaacgagagggctct

SEQ ID NO: 5267215 - DNA, 25 bp, Homo sapien
gatgccatgattagctcagagatgc

SEQ ID NO: 5267216 - DNA, 25 bp, Homo sapien
agtattgtgctcccttcaccccggg

SEQ ID NO: 5267217 - DNA, 25 bp, Homo sapien
gcctgcttgctggtgtcggatgctc

SEQ ID NO: 5267218 - DNA, 25 bp, Homo sapien
gaacttctgccttttacgatcgagg

SEQ ID NO: 5267219 - DNA, 25 bp, Homo sapien
ggtgtcggatgctctcatattcctc

SEQ ID NO: 5267220 - DNA, 25 bp, Homo sapien
ctctcgaaacgtggagggctgcctg

SEQ ID NO: 5267221 - DNA, 25 bp, Homo sapien
tgcgccacggaatcatctgggtctg

SEQ ID NO: 5267222 - DNA, 25 bp, Homo sapien
gcagctccgcggtgcctaatcagct

SEQ ID NO: 5267223 - DNA, 25 bp, Homo sapien
ggctgcctgccgctgtgttttgact

SEQ ID NO: 5267224 - DNA, 25 bp, Homo sapien
acagggatgagggacccgctggaca

SEQ ID NO: 5267225 - DNA, 25 bp, Homo sapien
gatgtgtcttgggtcactgctctcc

SEQ ID NO: 5267226 - DNA, 25 bp, Homo sapien
tcactgctctccagatatgtgttgt

SEQ ID NO: 5267227 - DNA, 25 bp, Homo sapien
ggacccgctggacaagatgtgtctt

SEQ ID NO: 5267228 - DNA, 25 bp, Homo sapien
cttgatgtggtagtccatgtgggca

SEQ ID NO: 5267229 - DNA, 25 bp, Homo sapien
ctcttgatgtggtagtccatgtggg

SEQ ID NO: 5267230 - DNA, 25 bp, Homo sapien
tccaggggctcttgatgtggtagtc

SEQ ID NO: 5267231 - DNA, 25 bp, Homo sapien
gggctcttgatgtggtagtccatgt

SEQ ID NO: 5267232 - DNA, 25 bp, Homo sapien
tcttggatttcaccacgtagggtct

SEQ ID NO: 5267233 - DNA, 25 bp, Homo sapien
ttggatttcaccacgtagggtctgg

SEQ ID NO: 5267234 - DNA, 25 bp, Homo sapien
gatcttggatttcaccacgtagggt

SEQ ID NO: 5267235 - DNA, 25 bp, Homo sapien
catggatcttggatttcaccacgta

SEQ ID NO: 5267236 - DNA, 25 bp, Homo sapien
tgggagagaacccgagctggaggat

SEQ ID NO: 5267237 - DNA, 25 bp, Homo sapien
gagaatgggagagaacccgagctgg

SEQ ID NO: 5267238 - DNA, 25 bp, Homo sapien
gagagaacccgagctggaggataca

SEQ ID NO: 5267239 - DNA, 25 bp, Homo sapien
ggagagaacccgagctggaggatac

SEQ ID NO: 5267240 - DNA, 25 bp, Homo sapien
cgtgcaccaagaccgcaatcctggt

SEQ ID NO: 5267241 - DNA, 25 bp, Homo sapien
tcctggttaacatgcacccctgagc

SEQ ID NO: 5267242 - DNA, 25 bp, Homo sapien
gaatgtagcccatggtcctggtgcc

SEQ ID NO: 5267243 - DNA, 25 bp, Homo sapien
cccctgagcttgagtccacagtgta

SEQ ID NO: 5267244 - DNA, 25 bp, Homo sapien
cttgagaaagacctgccatgagctt

SEQ ID NO: 5267245 - DNA, 25 bp, Homo sapien
tgtgagagggtttgctgcttggggg

SEQ ID NO: 5267246 - DNA, 25 bp, Homo sapien
tgctgcttgggggttgtcgcgagtg

SEQ ID NO: 5267247 - DNA, 25 bp, Homo sapien
gggttgtcgcgagtggtggaaggca

SEQ ID NO: 5267248 - DNA, 25 bp, Homo sapien
tgggtcgcccagtatttctttcaga

SEQ ID NO: 5267249 - DNA, 25 bp, Homo sapien
tctttcagatgagtccgtgcagaag

SEQ ID NO: 5267250 - DNA, 25 bp, Homo sapien
tttgggtcgcccagtatttctttca

SEQ ID NO: 5267251 - DNA, 25 bp, Homo sapien
gatgagtccgtgcagaagcaaacat

SEQ ID NO: 5267252 - DNA, 25 bp, Homo sapien
tgtcttcgaggctaatagtggctcc

SEQ ID NO: 5267253 - DNA, 25 bp, Homo sapien
ttcgaggctaatagtggctccatgt

SEQ ID NO: 5267254 - DNA, 25 bp, Homo sapien
cattctgtcttcgaggctaatagtg

SEQ ID NO: 5267255 - DNA, 25 bp, Homo sapien
acacacacacgcattctgtcttcga

SEQ ID NO: 5267256 - DNA, 25 bp, Homo sapien
tgtaacagccttcacaaggagttgg

SEQ ID NO: 5267257 - DNA, 25 bp, Homo sapien
tgtcaggtggaaaaggatcaacgct

SEQ ID NO: 5267258 - DNA, 25 bp, Homo sapien
gatcaacgctacctcgtcagggcgt

SEQ ID NO: 5267259 - DNA, 25 bp, Homo sapien
tcagggcgtttacaactgatacggc

SEQ ID NO: 5267260 - DNA, 25 bp, Homo sapien
tggtggtgaagatgaccagacgtac

SEQ ID NO: 5267261 - DNA, 25 bp, Homo sapien
tcctgtggaatgcatgtcatattaa

SEQ ID NO: 5267262 - DNA, 25 bp, Homo sapien
tgagcaggtgacaagatttccaacg

SEQ ID NO: 5267263 - DNA, 25 bp, Homo sapien
gaccagacgtacgtgtggaaaacca

SEQ ID NO: 5267264 - DNA, 25 bp, Homo sapien
agtgacttcggccacgtagtccaga

SEQ ID NO: 5267265 - DNA, 25 bp, Homo sapien
tagatagtgacttcggccacgtagt

SEQ ID NO: 5267266 - DNA, 25 bp, Homo sapien
tcggccacgtagtccagagacatgc

SEQ ID NO: 5267267 - DNA, 25 bp, Homo sapien
taaaaggagtccatagatagtgact

SEQ ID NO: 5267268 - DNA, 25 bp, Homo sapien
gttggtgatgtcaggcactgctgca

SEQ ID NO: 5267269 - DNA, 25 bp, Homo sapien
gacctcttgctgactagggttggtg

SEQ ID NO: 5267270 - DNA, 25 bp, Homo sapien
caggaaatgacctcttgctgactag

SEQ ID NO: 5267271 - DNA, 25 bp, Homo sapien
actagggttggtgatgtcaggcact

SEQ ID NO: 5267272 - DNA, 25 bp, Homo sapien
gatacaatgggctaagtcatacact

SEQ ID NO: 5267273 - DNA, 25 bp, Homo sapien
tacaatgggctaagtcatacacttc

SEQ ID NO: 5267274 - DNA, 25 bp, Homo sapien
aatgggctaagtcatacacttcatt

SEQ ID NO: 5267275 - DNA, 25 bp, Homo sapien
acaatgggctaagtcatacacttca

SEQ ID NO: 5267276 - DNA, 25 bp, Homo sapien
tactctgtcaaagggcatggccact

SEQ ID NO: 5267277 - DNA, 25 bp, Homo sapien
ctgtcaaagggcatggccactggga

SEQ ID NO: 5267278 - DNA, 25 bp, Homo sapien
ccatggatactctgtcaaagggcat

SEQ ID NO: 5267279 - DNA, 25 bp, Homo sapien
tctcccaaggccatggatactctgt

SEQ ID NO: 5267280 - DNA, 25 bp, Homo sapien
gcaggcaggtggtattgataaaaca

SEQ ID NO: 5267281 - DNA, 25 bp, Homo sapien
ggacatgctgtactggtgaggacaa

SEQ ID NO: 5267282 - DNA, 25 bp, Homo sapien
ctggctttacgggaagcaggcaggt

SEQ ID NO: 5267283 - DNA, 25 bp, Homo sapien
gcactgagattgagtctgtccctgg

SEQ ID NO: 5267284 - DNA, 25 bp, Homo sapien
gcgcctgccgggatgaagtgccagc

SEQ ID NO: 5267285 - DNA, 25 bp, Homo sapien
ccagcgccggcttatgcggctcagt

SEQ ID NO: 5267286 - DNA, 25 bp, Homo sapien
gctgagcgcctgccgggatgaagtg

SEQ ID NO: 5267287 - DNA, 25 bp, Homo sapien
agcgccggcttatgcggctcagtgc

SEQ ID NO: 5267288 - DNA, 25 bp, Homo sapien
cagacacctgaggtgcttgtaatat

SEQ ID NO: 5267289 - DNA, 25 bp, Homo sapien
cagggggagttgagatatttcagac

SEQ ID NO: 5267290 - DNA, 25 bp, Homo sapien
agatatttcagacacctgaggtgct

SEQ ID NO: 5267291 - DNA, 25 bp, Homo sapien
tttgcacagggggagttgagatatt

SEQ ID NO: 5267292 - DNA, 25 bp, Homo sapien
agaacggatgaacagtcacccccag

SEQ ID NO: 5267293 - DNA, 25 bp, Homo sapien
ccatttgtatctgcatttaagtttt

SEQ ID NO: 5267294 - DNA, 25 bp, Homo sapien
ttccatttgtatctgcatttaagtt

SEQ ID NO: 5267295 - DNA, 25 bp, Homo sapien
gatgaacagtcacccccagctatgt

SEQ ID NO: 5267296 - DNA, 25 bp, Homo sapien
gggaggaacatctcctgacacttcc

SEQ ID NO: 5267297 - DNA, 25 bp, Homo sapien
taaagaccaatgtttccccagtgat

SEQ ID NO: 5267298 - DNA, 25 bp, Homo sapien
taagcttgttgggttgtttaccaga

SEQ ID NO: 5267299 - DNA, 25 bp, Homo sapien
gaagtaatgcctgacgatggctcca

SEQ ID NO: 5267300 - DNA, 25 bp, Homo sapien
tattgtctaccaagaccctagaaca

SEQ ID NO: 5267301 - DNA, 25 bp, Homo sapien
tatcaagaagtatctatgacacctg

SEQ ID NO: 5267302 - DNA, 25 bp, Homo sapien
tgtcattggaatggcacaaactgta

SEQ ID NO: 5267303 - DNA, 25 bp, Homo sapien
tttagaaagcacaccttgtcattgg

SEQ ID NO: 5267304 - DNA, 25 bp, Homo sapien
ccacccggcagctgtgcttgcagag

SEQ ID NO: 5267305 - DNA, 25 bp, Homo sapien
gagctggatccagagtgcccacccg

SEQ ID NO: 5267306 - DNA, 25 bp, Homo sapien
cccggcagctgtgcttgcagagtgc

SEQ ID NO: 5267307 - DNA, 25 bp, Homo sapien
tggatccagagtgcccacccggcag

SEQ ID NO: 5267308 - DNA, 25 bp, Homo sapien
aaatgtgtaatgagtgcactaatcg

SEQ ID NO: 5267309 - DNA, 25 bp, Homo sapien
tgtaatgagtgcactaatcgagttg

SEQ ID NO: 5267310 - DNA, 25 bp, Homo sapien
tataaaaatgtgtaatgagtgcact

SEQ ID NO: 5267311 - DNA, 25 bp, Homo sapien
aatgagtgcactaatcgagttgtaa

SEQ ID NO: 5267312 - DNA, 25 bp, Homo sapien
ttctcgtaggaagtggtgtttgatc

SEQ ID NO: 5267313 - DNA, 25 bp, Homo sapien
agggagtgggttctcgtaggaagtg

SEQ ID NO: 5267314 - DNA, 25 bp, Homo sapien
aataaactgttggtggagtgctgct

SEQ ID NO: 5267315 - DNA, 25 bp, Homo sapien
tcaataaactgttggtggagtgctg

SEQ ID NO: 5267316 - DNA, 25 bp, Homo sapien
ttttatgaggcacattcttttaagc

SEQ ID NO: 5267317 - DNA, 25 bp, Homo sapien
aaatgtaggaagtggagaactcaac

SEQ ID NO: 5267318 - DNA, 25 bp, Homo sapien
taggtttatccaccctcgattcaaa

SEQ ID NO: 5267319 - DNA, 25 bp, Homo sapien
caaaactgtggtcaaattatcctta

SEQ ID NO: 5267320 - DNA, 25 bp, Homo sapien
tctggaaaacgtcaccaaggctgct

SEQ ID NO: 5267321 - DNA, 25 bp, Homo sapien
caccaaggctgctcgcactgacatt

SEQ ID NO: 5267322 - DNA, 25 bp, Homo sapien
tgttgctctggaaaacgtcaccaag

SEQ ID NO: 5267323 - DNA, 25 bp, Homo sapien
tcgcactgacattggctacggccat

SEQ ID NO: 5267324 - DNA, 25 bp, Homo sapien
gctgcatagcctgcctcaagcagaa

SEQ ID NO: 5267325 - DNA, 25 bp, Homo sapien
tgctgcatagcctgcctcaagcaga

SEQ ID NO: 5267326 - DNA, 25 bp, Homo sapien
ggtcctagggattggttcccactga

SEQ ID NO: 5267327 - DNA, 25 bp, Homo sapien
tgcagcaatcattccacgggagcct

SEQ ID NO: 5267328 - DNA, 25 bp, Homo sapien
gaggcaaaatggttgggcttttgca

SEQ ID NO: 5267329 - DNA, 25 bp, Homo sapien
gggcattctagagcgaccatgggtc

SEQ ID NO: 5267330 - DNA, 25 bp, Homo sapien
gcttcgctggaccttgcatatgaca

SEQ ID NO: 5267331 - DNA, 25 bp, Homo sapien
gacggtcactgtacgaccctcacag

SEQ ID NO: 5267332 - DNA, 25 bp, Homo sapien
cttgcatatgacaaggacggtcact

SEQ ID NO: 5267333 - DNA, 25 bp, Homo sapien
ctgagaatgcttcgctggaccttgc

SEQ ID NO: 5267334 - DNA, 25 bp, Homo sapien
tggaatagaggggcggcccaaacca

SEQ ID NO: 5267335 - DNA, 25 bp, Homo sapien
aggggcggcccaaaccaccttgctg

SEQ ID NO: 5267336 - DNA, 25 bp, Homo sapien
ggggcggcccaaaccaccttgctgc

SEQ ID NO: 5267337 - DNA, 25 bp, Homo sapien
aggctggtccgctgtctgcacaggc

SEQ ID NO: 5267338 - DNA, 25 bp, Homo sapien
ctgggtgtggcgaggacccgcaggc

SEQ ID NO: 5267339 - DNA, 25 bp, Homo sapien
aaaatgagacacacggatggctggt

SEQ ID NO: 5267340 - DNA, 25 bp, Homo sapien
ctttgacatcggaaaatgagacaca

SEQ ID NO: 5267341 - DNA, 25 bp, Homo sapien
gagcgcagctgatgctcctttggag

SEQ ID NO: 5267342 - DNA, 25 bp, Homo sapien
tgagagcgcagctgatgctcctttg

SEQ ID NO: 5267343 - DNA, 25 bp, Homo sapien
gagagcgcagctgatgctcctttgg

SEQ ID NO: 5267344 - DNA, 25 bp, Homo sapien
cagtgagagcgcagctgatgctcct

SEQ ID NO: 5267345 - DNA, 25 bp, Homo sapien
gtctagggcagggtttgtcctcatg

SEQ ID NO: 5267346 - DNA, 25 bp, Homo sapien
tctagggcagggtttgtcctcatgc

SEQ ID NO: 5267347 - DNA, 25 bp, Homo sapien
ggtctagggcagggtttgtcctcat

SEQ ID NO: 5267348 - DNA, 25 bp, Homo sapien
cagcaggtgcaaagctagcttttat

SEQ ID NO: 5267349 - DNA, 25 bp, Homo sapien
agtctcttagtcaaccacttcttgg

SEQ ID NO: 5267350 - DNA, 25 bp, Homo sapien
acttcttggcatctaaggacatagc

SEQ ID NO: 5267351 - DNA, 25 bp, Homo sapien
gctttgctttagagccaacagccag

SEQ ID NO: 5267352 - DNA, 25 bp, Homo sapien
gatctttataagtaatcttggttga

SEQ ID NO: 5267353 - DNA, 25 bp, Homo sapien
taagtaatcttggttgattctctaa

SEQ ID NO: 5267354 - DNA, 25 bp, Homo sapien
atcttggttgattctctaactcccc

SEQ ID NO: 5267355 - DNA, 25 bp, Homo sapien
tgatctttataagtaatcttggttg

SEQ ID NO: 5267356 - DNA, 25 bp, Homo sapien
ccacagcagtctagcaatgttcctc

SEQ ID NO: 5267357 - DNA, 25 bp, Homo sapien
agtctagcaatgttcctccattcag

SEQ ID NO: 5267358 - DNA, 25 bp, Homo sapien
cctcatcgaaaccacagcagtctag

SEQ ID NO: 5267359 - DNA, 25 bp, Homo sapien
tgcctcatcgaaaccacagcagtct

SEQ ID NO: 5267360 - DNA, 25 bp, Homo sapien
aatacattcctccaagttcgtctac

SEQ ID NO: 5267361 - DNA, 25 bp, Homo sapien
cattcctccaagttcgtctacaaaa

SEQ ID NO: 5267362 - DNA, 25 bp, Homo sapien
taagctgtaacgtggacagagcagc

SEQ ID NO: 5267363 - DNA, 25 bp, Homo sapien
aaatctaatttaagctgtaacgtgg

SEQ ID NO: 5267364 - DNA, 25 bp, Homo sapien
gcaggtctactacccacttcccatt

SEQ ID NO: 5267365 - DNA, 25 bp, Homo sapien
gtactgcaggtctactacccacttc

SEQ ID NO: 5267366 - DNA, 25 bp, Homo sapien
tccgtactgcaggtctactacccac

SEQ ID NO: 5267367 - DNA, 25 bp, Homo sapien
atctccgtactgcaggtctactacc

SEQ ID NO: 5267368 - DNA, 25 bp, Homo sapien
cttcatatgaacctgcttggcggct

SEQ ID NO: 5267369 - DNA, 25 bp, Homo sapien
ccttcatatgaacctgcttggcggc

SEQ ID NO: 5267370 - DNA, 25 bp, Homo sapien
tcatatgaacctgcttggcggcttg

SEQ ID NO: 5267371 - DNA, 25 bp, Homo sapien
ttcatatgaacctgcttggcggctt

SEQ ID NO: 5267372 - DNA, 25 bp, Homo sapien
aagaggtacttaatggtggtccagg

SEQ ID NO: 5267373 - DNA, 25 bp, Homo sapien
taatagctgtagtccaacccagtgc

SEQ ID NO: 5267374 - DNA, 25 bp, Homo sapien
cagggttcactgacaagctggagag

SEQ ID NO: 5267375 - DNA, 25 bp, Homo sapien
ttgccatctgtatagtaatagctgt

SEQ ID NO: 5267376 - DNA, 25 bp, Homo sapien
gcctaaataatacccaggaggtcac

SEQ ID NO: 5267377 - DNA, 25 bp, Homo sapien
gacctaaacactcgcatttgcgtgg

SEQ ID NO: 5267378 - DNA, 25 bp, Homo sapien
tggtgaccacaacacgaagaaccgt

SEQ ID NO: 5267379 - DNA, 25 bp, Homo sapien
gaggcgctctttaccccgtggtgac

SEQ ID NO: 5267380 - DNA, 25 bp, Homo sapien
gaaataggtttcttcataggctgtg

SEQ ID NO: 5267381 - DNA, 25 bp, Homo sapien
tgtgtttcagcatgtccaactgtga

SEQ ID NO: 5267382 - DNA, 25 bp, Homo sapien
tcggagttctctcgaggtctgttgc

SEQ ID NO: 5267383 - DNA, 25 bp, Homo sapien
gcaaatgctcgaaacagaaataggt

SEQ ID NO: 5267384 - DNA, 25 bp, Homo sapien
caatgcagcacatcagagcgagagc

SEQ ID NO: 5267385 - DNA, 25 bp, Homo sapien
gcaccgcatcccgatttcaatatgg

SEQ ID NO: 5267386 - DNA, 25 bp, Homo sapien
gagctatattgagcatgcttgccag

SEQ ID NO: 5267387 - DNA, 25 bp, Homo sapien
gcctgaggcgagctgctattgcatc

SEQ ID NO: 5267388 - DNA, 25 bp, Homo sapien
gtatacctgatttagctggagactt

SEQ ID NO: 5267389 - DNA, 25 bp, Homo sapien
taactagctggggtggtatacctga

SEQ ID NO: 5267390 - DNA, 25 bp, Homo sapien
ctggtaactagctggggtggtatac

SEQ ID NO: 5267391 - DNA, 25 bp, Homo sapien
cctgatttagctggagactttgatt

SEQ ID NO: 5267392 - DNA, 25 bp, Homo sapien
tggccaccttgtgagagacattcaa

SEQ ID NO: 5267393 - DNA, 25 bp, Homo sapien
caccttgtgagagacattcaatttt

SEQ ID NO: 5267394 - DNA, 25 bp, Homo sapien
cattatctatgaggccatctgttgt

SEQ ID NO: 5267395 - DNA, 25 bp, Homo sapien
tcatcattatctatgaggccatctg

SEQ ID NO: 5267396 - DNA, 25 bp, Homo sapien
tagcgattgcattcaacagtgactg

SEQ ID NO: 5267397 - DNA, 25 bp, Homo sapien
gagtgagctattgtgagcaggcttc

SEQ ID NO: 5267398 - DNA, 25 bp, Homo sapien
gactgacttcctcctagtttattgg

SEQ ID NO: 5267399 - DNA, 25 bp, Homo sapien
gctgtccgcagctgatagcgattgc

SEQ ID NO: 5267400 - DNA, 25 bp, Homo sapien
tgaggtagaagtaggagaagccttc

SEQ ID NO: 5267401 - DNA, 25 bp, Homo sapien
aggtagaagtaggagaagccttcat

SEQ ID NO: 5267402 - DNA, 25 bp, Homo sapien
ctagttgaggtagaagtaggagaag

SEQ ID NO: 5267403 - DNA, 25 bp, Homo sapien
agttgaggtagaagtaggagaagcc

SEQ ID NO: 5267404 - DNA, 25 bp, Homo sapien
taagtctggtcccaacacatcaggg

SEQ ID NO: 5267405 - DNA, 25 bp, Homo sapien
taacgtagcctttcatagcggtgag

SEQ ID NO: 5267406 - DNA, 25 bp, Homo sapien
tgtgaacgcgccaacaatggaccct

SEQ ID NO: 5267407 - DNA, 25 bp, Homo sapien
tttgatggaggctgcacttcacccg

SEQ ID NO: 5267408 - DNA, 25 bp, Homo sapien
caagtgcggctgtaggcacagataa

SEQ ID NO: 5267409 - DNA, 25 bp, Homo sapien
gcttgtcagacgctggcttagccga

SEQ ID NO: 5267410 - DNA, 25 bp, Homo sapien
tggctgccgtgggaacaactgcttg

SEQ ID NO: 5267411 - DNA, 25 bp, Homo sapien
gctctttgatatcccctccaggtaa

SEQ ID NO: 5267412 - DNA, 25 bp, Homo sapien
ccacttcccaaagtggagcaaagtt

SEQ ID NO: 5267413 - DNA, 25 bp, Homo sapien
tgatggtcagtaacaaaagaatagt

SEQ ID NO: 5267414 - DNA, 25 bp, Homo sapien
tagcggcttgatccgtcttcgtgtg

SEQ ID NO: 5267415 - DNA, 25 bp, Homo sapien
gggtagcggcttgatccgtcttcgt

SEQ ID NO: 5267416 - DNA, 25 bp, Homo sapien
ttgatccgtcttcgtgtgcatgtgc

SEQ ID NO: 5267417 - DNA, 25 bp, Homo sapien
tcaaaccgagtctgctctggagctg

SEQ ID NO: 5267418 - DNA, 25 bp, Homo sapien
caggcacaggcaaattgattctatc

SEQ ID NO: 5267419 - DNA, 25 bp, Homo sapien
ggagctgcctggtagattgtgaaca

SEQ ID NO: 5267420 - DNA, 25 bp, Homo sapien
gcatctgccggtggaccctgtgctt

SEQ ID NO: 5267421 - DNA, 25 bp, Homo sapien
gtatggtctcctggcatccatccag

SEQ ID NO: 5267422 - DNA, 25 bp, Homo sapien
gattaaaaagggcatggtagaccac

SEQ ID NO: 5267423 - DNA, 25 bp, Homo sapien
tagaccacggatgtatggtctcctg

SEQ ID NO: 5267424 - DNA, 25 bp, Homo sapien
ctgtttgttgtctgggtcgtggaaa

SEQ ID NO: 5267425 - DNA, 25 bp, Homo sapien
tggaggaaagtgttggtaactgtca

SEQ ID NO: 5267426 - DNA, 25 bp, Homo sapien
gtcaggggtctgttctgcagtttct

SEQ ID NO: 5267427 - DNA, 25 bp, Homo sapien
tggatttggcatggtgaagccctag

SEQ ID NO: 5267428 - DNA, 25 bp, Homo sapien
ttgataccagagatcaacaacagaa

SEQ ID NO: 5267429 - DNA, 25 bp, Homo sapien
gcttgctgtgaccagtagctcctgc

SEQ ID NO: 5267430 - DNA, 25 bp, Homo sapien
gaatgggccacagccaagagtgctt

SEQ ID NO: 5267431 - DNA, 25 bp, Homo sapien
catgttgtctactgaggattggaac

SEQ ID NO: 5267432 - DNA, 25 bp, Homo sapien
tcctggtagagtagaagacgagcac

SEQ ID NO: 5267433 - DNA, 25 bp, Homo sapien
agcctgaaagctgagtattagaaac

SEQ ID NO: 5267434 - DNA, 25 bp, Homo sapien
aagcctgaaagctgagtattagaaa

SEQ ID NO: 5267435 - DNA, 25 bp, Homo sapien
ttccaaatcacaagcatggcctcct

SEQ ID NO: 5267436 - DNA, 25 bp, Homo sapien
ggcttccaaatcacaagcatggcct

SEQ ID NO: 5267437 - DNA, 25 bp, Homo sapien
tcaggcttccaaatcacaagcatgg

SEQ ID NO: 5267438 - DNA, 25 bp, Homo sapien
caggcttccaaatcacaagcatggc

SEQ ID NO: 5267439 - DNA, 25 bp, Homo sapien
tgacctctgacatgggtccctgctg

SEQ ID NO: 5267440 - DNA, 25 bp, Homo sapien
cagttcgaactggattcctggcttg

SEQ ID NO: 5267441 - DNA, 25 bp, Homo sapien
ttgccagcccgcaggcatccatggg

SEQ ID NO: 5267442 - DNA, 25 bp, Homo sapien
ccctgctggcggctcacatgggccg

SEQ ID NO: 5267443 - DNA, 25 bp, Homo sapien
tggctaacttcagtgagggtgccac

SEQ ID NO: 5267444 - DNA, 25 bp, Homo sapien
aggactgttcctgagcactgcggga

SEQ ID NO: 5267445 - DNA, 25 bp, Homo sapien
agagtgagaggactgttcctgagca

SEQ ID NO: 5267446 - DNA, 25 bp, Homo sapien
tgttcctgagcactgcgggacgtgt

SEQ ID NO: 5267447 - DNA, 25 bp, Homo sapien
gaacatgccgtgtcttgtgcttctt

SEQ ID NO: 5267448 - DNA, 25 bp, Homo sapien
ttgtgcttcttgacattgggaccag

SEQ ID NO: 5267449 - DNA, 25 bp, Homo sapien
ccacgagaacatgccgtgtcttgtg

SEQ ID NO: 5267450 - DNA, 25 bp, Homo sapien
cttcttgacattgggaccaggaagc

SEQ ID NO: 5267451 - DNA, 25 bp, Homo sapien
tggtgtctccaggccgagaccatcc

SEQ ID NO: 5267452 - DNA, 25 bp, Homo sapien
gcttctctttactagagggacgcat

SEQ ID NO: 5267453 - DNA, 25 bp, Homo sapien
tccaggccgagaccatccaccagct

SEQ ID NO: 5267454 - DNA, 25 bp, Homo sapien
ccaatcagagccccattttgaggct

SEQ ID NO: 5267455 - DNA, 25 bp, Homo sapien
tccaatcagagccccattttgaggc

SEQ ID NO: 5267456 - DNA, 25 bp, Homo sapien
ttccaatcagagccccattttgagg

SEQ ID NO: 5267457 - DNA, 25 bp, Homo sapien
caatcagagccccattttgaggctg

SEQ ID NO: 5267458 - DNA, 25 bp, Homo sapien
tcaggcagccgtgtagcctgtgagt

SEQ ID NO: 5267459 - DNA, 25 bp, Homo sapien
gggttacttgtcagttccttgctag

SEQ ID NO: 5267460 - DNA, 25 bp, Homo sapien
ctttatcatatcacatcatggctga

SEQ ID NO: 5267461 - DNA, 25 bp, Homo sapien
tgaacattgttttaggaatgtaaga

SEQ ID NO: 5267462 - DNA, 25 bp, Homo sapien
gccagtatgcctgcggggagctcct

SEQ ID NO: 5267463 - DNA, 25 bp, Homo sapien
taataaactcgacaacatgaccagg

SEQ ID NO: 5267464 - DNA, 25 bp, Homo sapien
tgctcagtctcggtgacatctctgc

SEQ ID NO: 5267465 - DNA, 25 bp, Homo sapien
aatgaaacaagagtcagcgtcagcc

SEQ ID NO: 5267466 - DNA, 25 bp, Homo sapien
ttgacacgggtaaggagtttgtaca

SEQ ID NO: 5267467 - DNA, 25 bp, Homo sapien
tgctgggaccgtggcgcgtcctcag

SEQ ID NO: 5267468 - DNA, 25 bp, Homo sapien
cactgacgttcaagtcttagtttca

SEQ ID NO: 5267469 - DNA, 25 bp, Homo sapien
gaggagtgtacacactccgctgagc

SEQ ID NO: 5267470 - DNA, 25 bp, Homo sapien
ccacaggaggagtgtacacactccg

SEQ ID NO: 5267471 - DNA, 25 bp, Homo sapien
aaatgggtacagtcactggcccctc

SEQ ID NO: 5267472 - DNA, 25 bp, Homo sapien
gcaaacatcatgcttgacgtccagc

SEQ ID NO: 5267473 - DNA, 25 bp, Homo sapien
ggagcgtctgaggatcctgaaaggt

SEQ ID NO: 5267474 - DNA, 25 bp, Homo sapien
gtgaaatcacatagggaacccaaga

SEQ ID NO: 5267475 - DNA, 25 bp, Homo sapien
cactgttcataacataatctacgaa

SEQ ID NO: 5267476 - DNA, 25 bp, Homo sapien
gttcataacataatctacgaaagaa

SEQ ID NO: 5267477 - DNA, 25 bp, Homo sapien
atcactgttcataacataatctacg

SEQ ID NO: 5267478 - DNA, 25 bp, Homo sapien
taaatcactgttcataacataatct

SEQ ID NO: 5267479 - DNA, 25 bp, Homo sapien
agttgcaggtgaccgctgtcccagg

SEQ ID NO: 5267480 - DNA, 25 bp, Homo sapien
tgtggcgaggggagttgcaggtgac

SEQ ID NO: 5267481 - DNA, 25 bp, Homo sapien
cttatgcaagtaccaaggtgtggcg

SEQ ID NO: 5267482 - DNA, 25 bp, Homo sapien
ttatgcaagtaccaaggtgtggcga

SEQ ID NO: 5267483 - DNA, 25 bp, Homo sapien
tgtctgacaatggtgccgatatggc

SEQ ID NO: 5267484 - DNA, 25 bp, Homo sapien
tgccgatatggctggttccgctctc

SEQ ID NO: 5267485 - DNA, 25 bp, Homo sapien
ggctggttccgctctcttgttacaa

SEQ ID NO: 5267486 - DNA, 25 bp, Homo sapien
catttcctgtctgacaatggtgccg

SEQ ID NO: 5267487 - DNA, 25 bp, Homo sapien
caggcatgcagcttgccagtggcga

SEQ ID NO: 5267488 - DNA, 25 bp, Homo sapien
gagcccgctgacagcccagatgctg

SEQ ID NO: 5267489 - DNA, 25 bp, Homo sapien
tttccacagcgtggcgtctgggtag

SEQ ID NO: 5267490 - DNA, 25 bp, Homo sapien
gaagtggattttccacagcgtggcg

SEQ ID NO: 5267491 - DNA, 25 bp, Homo sapien
tgccgcctctagatactggctcatg

SEQ ID NO: 5267492 - DNA, 25 bp, Homo sapien
ctgcattgccgcctctagatactgg

SEQ ID NO: 5267493 - DNA, 25 bp, Homo sapien
gcattgccgcctctagatactggct

SEQ ID NO: 5267494 - DNA, 25 bp, Homo sapien
tcctgcattgccgcctctagatact

SEQ ID NO: 5267495 - DNA, 25 bp, Homo sapien
caatgtccatgtcccagactggggt

SEQ ID NO: 5267496 - DNA, 25 bp, Homo sapien
gtttttagaccactcccaaccagca

SEQ ID NO: 5267497 - DNA, 25 bp, Homo sapien
gaatttagcccgagacgagactgga

SEQ ID NO: 5267498 - DNA, 25 bp, Homo sapien
tacgtaggtaggtgctgccttggga

SEQ ID NO: 5267499 - DNA, 25 bp, Homo sapien
gccagctctccggtctttttgggga

SEQ ID NO: 5267500 - DNA, 25 bp, Homo sapien
cagctctccggtctttttggggatg

SEQ ID NO: 5267501 - DNA, 25 bp, Homo sapien
tgttagttttgagggacactgagcc

SEQ ID NO: 5267502 - DNA, 25 bp, Homo sapien
ctcgccagctctccggtctttttgg

SEQ ID NO: 5267503 - DNA, 25 bp, Homo sapien
aggtgtgagcctgagtgatgccagc

SEQ ID NO: 5267504 - DNA, 25 bp, Homo sapien
caggtgtgagcctgagtgatgccag

SEQ ID NO: 5267505 - DNA, 25 bp, Homo sapien
ctgcttcttttcatgcctggaaaat

SEQ ID NO: 5267506 - DNA, 25 bp, Homo sapien
ccttataattctaacagtggtgtca

SEQ ID NO: 5267507 - DNA, 25 bp, Homo sapien
tcatctcagatattagagctttcat

SEQ ID NO: 5267508 - DNA, 25 bp, Homo sapien
tatgtcattaatcatgtacagtgca

SEQ ID NO: 5267509 - DNA, 25 bp, Homo sapien
tataaggtttagcacctggctgacg

SEQ ID NO: 5267510 - DNA, 25 bp, Homo sapien
tattctctgctattaagttgaggcc

SEQ ID NO: 5267511 - DNA, 25 bp, Homo sapien
tcaggtggtttttcggctggcctca

SEQ ID NO: 5267512 - DNA, 25 bp, Homo sapien
tggctgacgagaacaggcttcatcc

SEQ ID NO: 5267513 - DNA, 25 bp, Homo sapien
agggcactccgttgctgtgtcaagg

SEQ ID NO: 5267514 - DNA, 25 bp, Homo sapien
ggcactccgttgctgtgtcaaggtt

SEQ ID NO: 5267515 - DNA, 25 bp, Homo sapien
gccctcagagaagatggacactggg

SEQ ID NO: 5267516 - DNA, 25 bp, Homo sapien
acagggcactccgttgctgtgtcaa

SEQ ID NO: 5267517 - DNA, 25 bp, Homo sapien
ggtgctctgcctgcgttatgtcatg

SEQ ID NO: 5267518 - DNA, 25 bp, Homo sapien
ttgcacatgagggtgggactctgac

SEQ ID NO: 5267519 - DNA, 25 bp, Homo sapien
gcaacaggtctacaaaccagacacg

SEQ ID NO: 5267520 - DNA, 25 bp, Homo sapien
tttggatgtcctgccgaactgctgg

SEQ ID NO: 5267521 - DNA, 25 bp, Homo sapien
tggctccagcgtgagagctcttcag

SEQ ID NO: 5267522 - DNA, 25 bp, Homo sapien
ccttatggctccagcgtgagagctc

SEQ ID NO: 5267523 - DNA, 25 bp, Homo sapien
ggtgattttcccttatggctccagc

SEQ ID NO: 5267524 - DNA, 25 bp, Homo sapien
gattttcccttatggctccagcgtg

SEQ ID NO: 5267525 - DNA, 25 bp, Homo sapien
cggagccgaacagccatgagcgcaa

SEQ ID NO: 5267526 - DNA, 25 bp, Homo sapien
agcgcaaccccctgggctttctcag

SEQ ID NO: 5267527 - DNA, 25 bp, Homo sapien
gagccgaacagccatgagcgcaacc

SEQ ID NO: 5267528 - DNA, 25 bp, Homo sapien
atgagcgcaaccccctgggctttct

SEQ ID NO: 5267529 - DNA, 25 bp, Homo sapien
gaataccagagctcggtcctcttgc

SEQ ID NO: 5267530 - DNA, 25 bp, Homo sapien
tactggttggccaaccactcctggg

SEQ ID NO: 5267531 - DNA, 25 bp, Homo sapien
aattgaggaagttaccatgtccatc

SEQ ID NO: 5267532 - DNA, 25 bp, Homo sapien
tcttctggctatcttgaaatacgca

SEQ ID NO: 5267533 - DNA, 25 bp, Homo sapien
gggtaataacatgcctttcagcagc

SEQ ID NO: 5267534 - DNA, 25 bp, Homo sapien
caatactgagctgatttggaactaa

SEQ ID NO: 5267535 - DNA, 25 bp, Homo sapien
cacgcgccgtgtaattaaggcctga

SEQ ID NO: 5267536 - DNA, 25 bp, Homo sapien
ccgggcttgattgtgggttctcgct

SEQ ID NO: 5267537 - DNA, 25 bp, Homo sapien
tgagagtacatattatgtgctaagg

SEQ ID NO: 5267538 - DNA, 25 bp, Homo sapien
tcttctgtactctcaaggagccatg

SEQ ID NO: 5267539 - DNA, 25 bp, Homo sapien
tgaagaattcaccaagtaataaaca

SEQ ID NO: 5267540 - DNA, 25 bp, Homo sapien
gtgctaaggactatgctaaacaaat

SEQ ID NO: 5267541 - DNA, 25 bp, Homo sapien
tgtaaatataagacatgcccctatt

SEQ ID NO: 5267542 - DNA, 25 bp, Homo sapien
tagttgtcacaaccctactcctgtc

SEQ ID NO: 5267543 - DNA, 25 bp, Homo sapien
ggcaatcaagtaaattattacagtc

SEQ ID NO: 5267544 - DNA, 25 bp, Homo sapien
tcctgtctccaaagatcatctcagc

SEQ ID NO: 5267545 - DNA, 25 bp, Homo sapien
tttgcatgtgccgttggtagtgcag

SEQ ID NO: 5267546 - DNA, 25 bp, Homo sapien
gcatgtgccgttggtagtgcagttc

SEQ ID NO: 5267547 - DNA, 25 bp, Homo sapien
aaggaacgtgattgttttgcatgtg

SEQ ID NO: 5267548 - DNA, 25 bp, Homo sapien
ggaacgtgattgttttgcatgtgcc

SEQ ID NO: 5267549 - DNA, 25 bp, Homo sapien
gcctgtgtattggatcattggatcc

SEQ ID NO: 5267550 - DNA, 25 bp, Homo sapien
gggaataccattcagagttttcatc

SEQ ID NO: 5267551 - DNA, 25 bp, Homo sapien
ggacacctgcgcctttatttctgta

SEQ ID NO: 5267552 - DNA, 25 bp, Homo sapien
tatttctgtaggagggatgcctgtg

SEQ ID NO: 5267553 - DNA, 25 bp, Homo sapien
tttggccagtgttctcggtggaact

SEQ ID NO: 5267554 - DNA, 25 bp, Homo sapien
tggttatgttaccaccagcggtgga

SEQ ID NO: 5267555 - DNA, 25 bp, Homo sapien
gatcaatctttggagttttggccag

SEQ ID NO: 5267556 - DNA, 25 bp, Homo sapien
tgcagacaatgttatagcaattggt

SEQ ID NO: 5267557 - DNA, 25 bp, Homo sapien
ggtgacaaatgccagatgtgtctgg

SEQ ID NO: 5267558 - DNA, 25 bp, Homo sapien
tggtgacaaatgccagatgtgtctg

SEQ ID NO: 5267559 - DNA, 25 bp, Homo sapien
gtgacaaatgccagatgtgtctgga

SEQ ID NO: 5267560 - DNA, 25 bp, Homo sapien
tgacaaatgccagatgtgtctggag

SEQ ID NO: 5267561 - DNA, 25 bp, Homo sapien
tgactgtccacaatcaaggtgttcc

SEQ ID NO: 5267562 - DNA, 25 bp, Homo sapien
tcccatactgatccatcattattgg

SEQ ID NO: 5267563 - DNA, 25 bp, Homo sapien
caaggtgttcccatactgatccatc

SEQ ID NO: 5267564 - DNA, 25 bp, Homo sapien
aaaaatctttatattcatgactgtc

SEQ ID NO: 5267565 - DNA, 25 bp, Homo sapien
tgcattcagtgtgagggaagatcct

SEQ ID NO: 5267566 - DNA, 25 bp, Homo sapien
agttaggccttggttaatcatgccc

SEQ ID NO: 5267567 - DNA, 25 bp, Homo sapien
ctccatagaatagagttaggccttg

SEQ ID NO: 5267568 - DNA, 25 bp, Homo sapien
agcagacaaggtgttaggatgaagc

SEQ ID NO: 5267569 - DNA, 25 bp, Homo sapien
gccaaatatgtaactggacgcagag

SEQ ID NO: 5267570 - DNA, 25 bp, Homo sapien
agaccacagaaagcacttcgtgcca

SEQ ID NO: 5267571 - DNA, 25 bp, Homo sapien
ataaaggtcagggatgcctctctgg

SEQ ID NO: 5267572 - DNA, 25 bp, Homo sapien
gatggccagtgagccggacaaagac

SEQ ID NO: 5267573 - DNA, 25 bp, Homo sapien
caagctgttgttgaatggccgcctc

SEQ ID NO: 5267574 - DNA, 25 bp, Homo sapien
tgtggcactcggtgcatcagatggc

SEQ ID NO: 5267575 - DNA, 25 bp, Homo sapien
tatgagttccccgtttaagctgacg

SEQ ID NO: 5267576 - DNA, 25 bp, Homo sapien
gggagttggctccattgatctagaa

SEQ ID NO: 5267577 - DNA, 25 bp, Homo sapien
cgtaatgcacccaagactgaaagag

SEQ ID NO: 5267578 - DNA, 25 bp, Homo sapien
cagcggcaggcggatgataaactgt

SEQ ID NO: 5267579 - DNA, 25 bp, Homo sapien
actgtgggctctgaccgtggtgtca

SEQ ID NO: 5267580 - DNA, 25 bp, Homo sapien
aatcagggggactcccgtaatgcac

SEQ ID NO: 5267581 - DNA, 25 bp, Homo sapien
tttctcctaagacaatgctgtttgg

SEQ ID NO: 5267582 - DNA, 25 bp, Homo sapien
ggcttctttttcagcataataaatt

SEQ ID NO: 5267583 - DNA, 25 bp, Homo sapien
cagagggcattggagcttgggaagt

SEQ ID NO: 5267584 - DNA, 25 bp, Homo sapien
ctcctaagacaatgctgtttggctt

SEQ ID NO: 5267585 - DNA, 25 bp, Homo sapien
caggaaatgtaactggttggcacca

SEQ ID NO: 5267586 - DNA, 25 bp, Homo sapien
tgctgccagctgtattgcatatcag

SEQ ID NO: 5267587 - DNA, 25 bp, Homo sapien
cacctgattgctacccagggcaaga

SEQ ID NO: 5267588 - DNA, 25 bp, Homo sapien
gttggcaccactcatgaaccacctg

SEQ ID NO: 5267589 - DNA, 25 bp, Homo sapien
gaagtctctccattaggatcaacat

SEQ ID NO: 5267590 - DNA, 25 bp, Homo sapien
ggagcaattaggtggcccttcttct

SEQ ID NO: 5267591 - DNA, 25 bp, Homo sapien
gaagtctcttcattaggatgaagtc

SEQ ID NO: 5267592 - DNA, 25 bp, Homo sapien
tacagtaagagatacagcaggctgg

SEQ ID NO: 5267593 - DNA, 25 bp, Homo sapien
ggcttcctgagctccgccatctggt

SEQ ID NO: 5267594 - DNA, 25 bp, Homo sapien
catctggtccagatatttcttggtc

SEQ ID NO: 5267595 - DNA, 25 bp, Homo sapien
gcaaggacaggacagcggcaacttt

SEQ ID NO: 5267596 - DNA, 25 bp, Homo sapien
caggacagcggcaacttttctcctt

SEQ ID NO: 5267597 - DNA, 25 bp, Homo sapien
ttccgggcccaagttatgcttctac

SEQ ID NO: 5267598 - DNA, 25 bp, Homo sapien
caagttatgcttctacctcagtgtc

SEQ ID NO: 5267599 - DNA, 25 bp, Homo sapien
cccaagttatgcttctacctcagtg

SEQ ID NO: 5267600 - DNA, 25 bp, Homo sapien
gggcccaagttatgcttctacctca

SEQ ID NO: 5267601 - DNA, 25 bp, Homo sapien
ccgccgggtgcttactatggtgcca

SEQ ID NO: 5267602 - DNA, 25 bp, Homo sapien
cagcactgggcaatgcacctggttc

SEQ ID NO: 5267603 - DNA, 25 bp, Homo sapien
gaaagtgagaccattgggtgcttcc

SEQ ID NO: 5267604 - DNA, 25 bp, Homo sapien
cgtcgggtgcttactgcggtgccct

SEQ ID NO: 5267605 - DNA, 25 bp, Homo sapien
tcatatctgccgttgaggcactggg

SEQ ID NO: 5267606 - DNA, 25 bp, Homo sapien
tgggactgcggctgctcccacagga

SEQ ID NO: 5267607 - DNA, 25 bp, Homo sapien
tcagtcatatctgccgttgaggcac

SEQ ID NO: 5267608 - DNA, 25 bp, Homo sapien
ttgaggcactgggactgcggctgct

SEQ ID NO: 5267609 - DNA, 25 bp, Homo sapien
gcttttactgtgaatatcagcctca

SEQ ID NO: 5267610 - DNA, 25 bp, Homo sapien
ggcctcattgcctacttgcagcaga

SEQ ID NO: 5267611 - DNA, 25 bp, Homo sapien
cagcagatgcattaaagacctgaca

SEQ ID NO: 5267612 - DNA, 25 bp, Homo sapien
tgacaatcacgtccctcaagtagag

SEQ ID NO: 5267613 - DNA, 25 bp, Homo sapien
ctgcctttttgttcttctctagagt

SEQ ID NO: 5267614 - DNA, 25 bp, Homo sapien
ttttgttcttctctagagtggccac

SEQ ID NO: 5267615 - DNA, 25 bp, Homo sapien
ttgttcttctctagagtggccacat

SEQ ID NO: 5267616 - DNA, 25 bp, Homo sapien
ctttttgttcttctctagagtggcc

SEQ ID NO: 5267617 - DNA, 25 bp, Homo sapien
tgaagatacgctggtgtccagcggt

SEQ ID NO: 5267618 - DNA, 25 bp, Homo sapien
cgctggtgtccagcggttcattgct

SEQ ID NO: 5267619 - DNA, 25 bp, Homo sapien
tgtccagcggttcattgctggacat

SEQ ID NO: 5267620 - DNA, 25 bp, Homo sapien
cagtgattgaagatacgctggtgtc

SEQ ID NO: 5267621 - DNA, 25 bp, Homo sapien
aggcctgctcctgatgtgggcagca

SEQ ID NO: 5267622 - DNA, 25 bp, Homo sapien
cattcaacagatattcctgggttcc

SEQ ID NO: 5267623 - DNA, 25 bp, Homo sapien
ttcaacagatattcctgggttcctc

SEQ ID NO: 5267624 - DNA, 25 bp, Homo sapien
cctccagggtagcaggcctgctcct

SEQ ID NO: 5267625 - DNA, 25 bp, Homo sapien
gtgccacccccggtgcagtgctgct

SEQ ID NO: 5267626 - DNA, 25 bp, Homo sapien
ccggagccagtgttgggaagaccct

SEQ ID NO: 5267627 - DNA, 25 bp, Homo sapien
ggctgccggagccagtgttgggaag

SEQ ID NO: 5267628 - DNA, 25 bp, Homo sapien
tgccggagccagtgttgggaagacc

SEQ ID NO: 5267629 - DNA, 25 bp, Homo sapien
cttttcaccttcataaattcacctt

SEQ ID NO: 5267630 - DNA, 25 bp, Homo sapien
caccttcataaattcacctttgaac

SEQ ID NO: 5267631 - DNA, 25 bp, Homo sapien
ttcataaattcacctttgaacattc

SEQ ID NO: 5267632 - DNA, 25 bp, Homo sapien
ttcaccttcataaattcacctttga

SEQ ID NO: 5267633 - DNA, 25 bp, Homo sapien
cttgatgttagatctgatggtgtca

SEQ ID NO: 5267634 - DNA, 25 bp, Homo sapien
ctggcttgatgttagatctgatggt

SEQ ID NO: 5267635 - DNA, 25 bp, Homo sapien
tgatgttagatctgatggtgtcatt

SEQ ID NO: 5267636 - DNA, 25 bp, Homo sapien
gcttgatgttagatctgatggtgtc

SEQ ID NO: 5267637 - DNA, 25 bp, Homo sapien
gaggcactggcgagcggtgtgtata

SEQ ID NO: 5267638 - DNA, 25 bp, Homo sapien
tcgttgccataggatgagaggcact

SEQ ID NO: 5267639 - DNA, 25 bp, Homo sapien
gtgtataaggccctccttctcgaat

SEQ ID NO: 5267640 - DNA, 25 bp, Homo sapien
ctgcctcgttgccataggatgagag

SEQ ID NO: 5267641 - DNA, 25 bp, Homo sapien
cactggcgaggggtatgtgtaaggc

SEQ ID NO: 5267642 - DNA, 25 bp, Homo sapien
gggtatgtgtaaggccctccttctg

SEQ ID NO: 5267643 - DNA, 25 bp, Homo sapien
tatgtgtaaggccctccttctggaa

SEQ ID NO: 5267644 - DNA, 25 bp, Homo sapien
cgaggggtatgtgtaaggccctcct

SEQ ID NO: 5267645 - DNA, 25 bp, Homo sapien
gcagcgaaccttgacctgcagaaca

SEQ ID NO: 5267646 - DNA, 25 bp, Homo sapien
cctgcagaacaacctccaccacggg

SEQ ID NO: 5267647 - DNA, 25 bp, Homo sapien
tcctgcagcgaaccttgacctgcag

SEQ ID NO: 5267648 - DNA, 25 bp, Homo sapien
cgccctcctgcagcgaaccttgacc

SEQ ID NO: 5267649 - DNA, 25 bp, Homo sapien
gcacgctgctgtgagttccaactgc

SEQ ID NO: 5267650 - DNA, 25 bp, Homo sapien
tgaggagagcaaaccgaggcggggc

SEQ ID NO: 5267651 - DNA, 25 bp, Homo sapien
gttccaactgctctgtgaagcccaa

SEQ ID NO: 5267652 - DNA, 25 bp, Homo sapien
aagcccaaggcttggaggcagtgct

SEQ ID NO: 5267653 - DNA, 25 bp, Homo sapien
gaacttccatctatattgggtttgc

SEQ ID NO: 5267654 - DNA, 25 bp, Homo sapien
agggcccctgaacttccatctatat

SEQ ID NO: 5267655 - DNA, 25 bp, Homo sapien
tccagggcccctgaacttccatcta

SEQ ID NO: 5267656 - DNA, 25 bp, Homo sapien
cagggcccctgaacttccatctata

SEQ ID NO: 5267657 - DNA, 25 bp, Homo sapien
gcaggagggaaggtcctcggtcttc

SEQ ID NO: 5267658 - DNA, 25 bp, Homo sapien
aggagggaaggtcctcggtcttctg

SEQ ID NO: 5267659 - DNA, 25 bp, Homo sapien
gagggaaggtcctcggtcttctgga

SEQ ID NO: 5267660 - DNA, 25 bp, Homo sapien
caggagggaaggtcctcggtcttct

SEQ ID NO: 5267661 - DNA, 25 bp, Homo sapien
ttggggatgaaagagttgtgtctat

SEQ ID NO: 5267662 - DNA, 25 bp, Homo sapien
agagttgtgtctattggaccctggc

SEQ ID NO: 5267663 - DNA, 25 bp, Homo sapien
gaccctggctgtatgttgtgtattt

SEQ ID NO: 5267664 - DNA, 25 bp, Homo sapien
attggaccctggctgtatgttgtgt

SEQ ID NO: 5267665 - DNA, 25 bp, Homo sapien
gcaacttagagcaggtagatccaca

SEQ ID NO: 5267666 - DNA, 25 bp, Homo sapien
ggaagcccatctctcaagctagctt

SEQ ID NO: 5267667 - DNA, 25 bp, Homo sapien
tagatccacagttgaaggcactggc

SEQ ID NO: 5267668 - DNA, 25 bp, Homo sapien
gggaacctgcaacttagagcaggta

SEQ ID NO: 5267669 - DNA, 25 bp, Homo sapien
cagaagtccctggagacatcacaga

SEQ ID NO: 5267670 - DNA, 25 bp, Homo sapien
gacatcacagaataaataagggtga

SEQ ID NO: 5267671 - DNA, 25 bp, Homo sapien
taaataagggtgacagcacgaatcc

SEQ ID NO: 5267672 - DNA, 25 bp, Homo sapien
agggtgacagcacgaatcctggtgt

SEQ ID NO: 5267673 - DNA, 25 bp, Homo sapien
gaagatcatagtactaaaataaatc

SEQ ID NO: 5267674 - DNA, 25 bp, Homo sapien
cttgaggaaagcatcccttttattg

SEQ ID NO: 5267675 - DNA, 25 bp, Homo sapien
aggaaagcatcccttttattggaag

SEQ ID NO: 5267676 - DNA, 25 bp, Homo sapien
caaagtgataccctgcccctaaata

SEQ ID NO: 5267677 - DNA, 25 bp, Homo sapien
gaggaggatcaaccagtgcttaata

SEQ ID NO: 5267678 - DNA, 25 bp, Homo sapien
ttacgggcttgtacgaaattgagaa

SEQ ID NO: 5267679 - DNA, 25 bp, Homo sapien
agaatagaggaggatcaaccagtgc

SEQ ID NO: 5267680 - DNA, 25 bp, Homo sapien
tgtacgaaattgagaatagaggagg

SEQ ID NO: 5267681 - DNA, 25 bp, Homo sapien
ggtgaatctgcccaaagtgcgtggt

SEQ ID NO: 5267682 - DNA, 25 bp, Homo sapien
gagataagtggggtgaatctgccca

SEQ ID NO: 5267683 - DNA, 25 bp, Homo sapien
tttgagcaacgctgcattggtgtgg

SEQ ID NO: 5267684 - DNA, 25 bp, Homo sapien
ccaaagtgcgtggtttgagcaacgc

SEQ ID NO: 5267685 - DNA, 25 bp, Homo sapien
gaagacagataaatcctctgaggtt

SEQ ID NO: 5267686 - DNA, 25 bp, Homo sapien
tgcatgtaaagccttgtatgtcgtc

SEQ ID NO: 5267687 - DNA, 25 bp, Homo sapien
gaggtttcatctcccgtgtgctcca

SEQ ID NO: 5267688 - DNA, 25 bp, Homo sapien
tcccaggtagattgtaccagctccc

SEQ ID NO: 5267689 - DNA, 25 bp, Homo sapien
ctgggttccatctgcagtagccacc

SEQ ID NO: 5267690 - DNA, 25 bp, Homo sapien
tgggttccatctgcagtagccacct

SEQ ID NO: 5267691 - DNA, 25 bp, Homo sapien
tctgggttccatctgcagtagccac

SEQ ID NO: 5267692 - DNA, 25 bp, Homo sapien
gacatgaaggaagcaatattgcatt

SEQ ID NO: 5267693 - DNA, 25 bp, Homo sapien
gcgcagacatgaaggaagcaatatt

SEQ ID NO: 5267694 - DNA, 25 bp, Homo sapien
catgaaggaagcaatattgcatttc

SEQ ID NO: 5267695 - DNA, 25 bp, Homo sapien
ctgcgcagacatgaaggaagcaata

SEQ ID NO: 5267696 - DNA, 25 bp, Homo sapien
ctaaagaaggggcatctttagccat

SEQ ID NO: 5267697 - DNA, 25 bp, Homo sapien
acaaagtcctctgtcctgaacatct

SEQ ID NO: 5267698 - DNA, 25 bp, Homo sapien
agtcctctgtcctgaacatctaaag

SEQ ID NO: 5267699 - DNA, 25 bp, Homo sapien
tctgtcctgaacatctaaagaaggg

SEQ ID NO: 5267700 - DNA, 25 bp, Homo sapien
gctgctgatgttgtcccggtggttg

SEQ ID NO: 5267701 - DNA, 25 bp, Homo sapien
tgctgctgatgttgtcccggtggtt

SEQ ID NO: 5267702 - DNA, 25 bp, Homo sapien
ttgctgctgatgttgtcccggtggt

SEQ ID NO: 5267703 - DNA, 25 bp, Homo sapien
tagagcactggtgtggacgtatgca

SEQ ID NO: 5267704 - DNA, 25 bp, Homo sapien
tgtgctgctgtgctgacgttcagtg

SEQ ID NO: 5267705 - DNA, 25 bp, Homo sapien
gcactaaatgcaggcccatcgtctg

SEQ ID NO: 5267706 - DNA, 25 bp, Homo sapien
ttcagtgtgtcctagcaccttcctg

SEQ ID NO: 5267707 - DNA, 25 bp, Homo sapien
gcccgagaggtacctttactctcat

SEQ ID NO: 5267708 - DNA, 25 bp, Homo sapien
tgcattgacaaatggtcaaagcccg

SEQ ID NO: 5267709 - DNA, 25 bp, Homo sapien
tccaagatgcgcgtccacatgcatt

SEQ ID NO: 5267710 - DNA, 25 bp, Homo sapien
tactctcattattgagttcaaaaga

SEQ ID NO: 5267711 - DNA, 25 bp, Homo sapien
tgttgccaccatggaagtagatacc

SEQ ID NO: 5267712 - DNA, 25 bp, Homo sapien
tgcctggtggttgaatgtgttgcca

SEQ ID NO: 5267713 - DNA, 25 bp, Homo sapien
ggcctcgagccacgtggagttgaac

SEQ ID NO: 5267714 - DNA, 25 bp, Homo sapien
tgttgatttaagcagggcctcgagc

SEQ ID NO: 5267715 - DNA, 25 bp, Homo sapien
ccgcagacgttagggctttctcgct

SEQ ID NO: 5267716 - DNA, 25 bp, Homo sapien
acgtacgatctgatggctgcggacg

SEQ ID NO: 5267717 - DNA, 25 bp, Homo sapien
cgttagggccttctcgacgtacgat

SEQ ID NO: 5267718 - DNA, 25 bp, Homo sapien
tcttgatgtgcgaaatgatggctgc

SEQ ID NO: 5267719 - DNA, 25 bp, Homo sapien
ctgcttttgttggaggagtgtgccc

SEQ ID NO: 5267720 - DNA, 25 bp, Homo sapien
ggtcaggggagtcgaacaggaagca

SEQ ID NO: 5267721 - DNA, 25 bp, Homo sapien
ggagtgtgccctgactcttcagcca

SEQ ID NO: 5267722 - DNA, 25 bp, Homo sapien
gtgccctgactcttcagccagctgt

SEQ ID NO: 5267723 - DNA, 25 bp, Homo sapien
agcagacgtgggcatcgctgagggt

SEQ ID NO: 5267724 - DNA, 25 bp, Homo sapien
cgtgggcatcgctgagggtggagga

SEQ ID NO: 5267725 - DNA, 25 bp, Homo sapien
acgtgggcatcgctgagggtggagg

SEQ ID NO: 5267726 - DNA, 25 bp, Homo sapien
cagcagacgtgggcatcgctgaggg

SEQ ID NO: 5267727 - DNA, 25 bp, Homo sapien
tgcaaggcgcagcagacgtgggcat

SEQ ID NO: 5267728 - DNA, 25 bp, Homo sapien
tggaggaagtacttgcaaggcgcag

SEQ ID NO: 5267729 - DNA, 25 bp, Homo sapien
ggaggaagtacttgcaaggcgcagc

SEQ ID NO: 5267730 - DNA, 25 bp, Homo sapien
ttgcaaggcgcagcagacgtgggca

SEQ ID NO: 5267731 - DNA, 25 bp, Homo sapien
tggaggaagtacttgcaaggcgcag

SEQ ID NO: 5267732 - DNA, 25 bp, Homo sapien
ggaggaagtacttgcaaggcgcagc

SEQ ID NO: 5267733 - DNA, 25 bp, Homo sapien
gtggaggaagtacttgcaaggcgca

SEQ ID NO: 5267734 - DNA, 25 bp, Homo sapien
gggtggaggaagtacttgcaaggcg

SEQ ID NO: 5267735 - DNA, 25 bp, Homo sapien
gctccacataaacatgcgaccactg

SEQ ID NO: 5267736 - DNA, 25 bp, Homo sapien
ctccacataaacatgcgaccactgc

SEQ ID NO: 5267737 - DNA, 25 bp, Homo sapien
ggggctccacataaacatgcgacca

SEQ ID NO: 5267738 - DNA, 25 bp, Homo sapien
ggctccacataaacatgcgaccact

SEQ ID NO: 5267739 - DNA, 25 bp, Homo sapien
ccagtgcggtaactctgtgagtcca

SEQ ID NO: 5267740 - DNA, 25 bp, Homo sapien
tctgtgagtccacccagcggtcagc

SEQ ID NO: 5267741 - DNA, 25 bp, Homo sapien
tcttctctgatttccgtgccagtgc

SEQ ID NO: 5267742 - DNA, 25 bp, Homo sapien
tggagtagttgggccagctcttctc

SEQ ID NO: 5267743 - DNA, 25 bp, Homo sapien
tgaatgactttgaattccagatgag

SEQ ID NO: 5267744 - DNA, 25 bp, Homo sapien
gctgatgcccagcagggattcagag

SEQ ID NO: 5267745 - DNA, 25 bp, Homo sapien
gcttgttgatggattgactggctgt

SEQ ID NO: 5267746 - DNA, 25 bp, Homo sapien
ttgttgatggattgactggctgttc

SEQ ID NO: 5267747 - DNA, 25 bp, Homo sapien
taacttgatgggcaactgatccagg

SEQ ID NO: 5267748 - DNA, 25 bp, Homo sapien
gattcgtgggcatgccaatggcaca

SEQ ID NO: 5267749 - DNA, 25 bp, Homo sapien
tcggtgcgacctgatttaactaggc

SEQ ID NO: 5267750 - DNA, 25 bp, Homo sapien
catctccattgtacggctcggtgcg

SEQ ID NO: 5267751 - DNA, 25 bp, Homo sapien
tatcagtcgagcaaggaagtttttc

SEQ ID NO: 5267752 - DNA, 25 bp, Homo sapien
catcatgcactcttactgaacaagg

SEQ ID NO: 5267753 - DNA, 25 bp, Homo sapien
cagagttcagcagaactgctcacag

SEQ ID NO: 5267754 - DNA, 25 bp, Homo sapien
ccttggccaagtgctgatggcgttc

SEQ ID NO: 5267755 - DNA, 25 bp, Homo sapien
gattttcaatccatcagaatcatga

SEQ ID NO: 5267756 - DNA, 25 bp, Homo sapien
tgttagcagactctggaaaccagga

SEQ ID NO: 5267757 - DNA, 25 bp, Homo sapien
ttaaaattgttcgtggatcccgtgc

SEQ ID NO: 5267758 - DNA, 25 bp, Homo sapien
gaagggccacggattagaccgactc

SEQ ID NO: 5267759 - DNA, 25 bp, Homo sapien
cattgcatccagactgccatgaggg

SEQ ID NO: 5267760 - DNA, 25 bp, Homo sapien
tatctaatcggcaaactttcattgc

SEQ ID NO: 5267761 - DNA, 25 bp, Homo sapien
tgagcatatctatatctaatcggca

SEQ ID NO: 5267762 - DNA, 25 bp, Homo sapien
tgcagacagaggcatatgcagcctc

SEQ ID NO: 5267763 - DNA, 25 bp, Homo sapien
ctcctggatgcttcgagctgctcca

SEQ ID NO: 5267764 - DNA, 25 bp, Homo sapien
ccgcctcctggatgcttcgagctgc

SEQ ID NO: 5267765 - DNA, 25 bp, Homo sapien
tcctggatgcttcgagctgctccat

SEQ ID NO: 5267766 - DNA, 25 bp, Homo sapien
gcctcctggatgcttcgagctgctc

SEQ ID NO: 5267767 - DNA, 25 bp, Homo sapien
tctctgctctgggcgctagtgagga

SEQ ID NO: 5267768 - DNA, 25 bp, Homo sapien
agcctgaactgtggcgttcacagga

SEQ ID NO: 5267769 - DNA, 25 bp, Homo sapien
tagtgaggacgttgagggcagcctg

SEQ ID NO: 5267770 - DNA, 25 bp, Homo sapien
tctgggcgctagtgaggacgttgag

SEQ ID NO: 5267771 - DNA, 25 bp, Homo sapien
tcttcatgtcgctcaagagtaacaa

SEQ ID NO: 5267772 - DNA, 25 bp, Homo sapien
ctggtggatctgaactgatttatgt

SEQ ID NO: 5267773 - DNA, 25 bp, Homo sapien
ctcaagagtaacaactattttaagg

SEQ ID NO: 5267774 - DNA, 25 bp, Homo sapien
tgatttatgttcttcatgtcgctca

SEQ ID NO: 5267775 - DNA, 25 bp, Homo sapien
ctgagtgcacagtggtcatcggaaa

SEQ ID NO: 5267776 - DNA, 25 bp, Homo sapien
tgcacagtggtcatcggaaagacag

SEQ ID NO: 5267777 - DNA, 25 bp, Homo sapien
tcggaaagacagtcggcctgcattc

SEQ ID NO: 5267778 - DNA, 25 bp, Homo sapien
tggtcatcggaaagacagtcggcct

SEQ ID NO: 5267779 - DNA, 25 bp, Homo sapien
tgccttggagagtctcaggtcccgc

SEQ ID NO: 5267780 - DNA, 25 bp, Homo sapien
cttgggaaccttgtaaggtggtgct

SEQ ID NO: 5267781 - DNA, 25 bp, Homo sapien
caggcttgatgtcatgcagaagagc

SEQ ID NO: 5267782 - DNA, 25 bp, Homo sapien
cgctgccaaaatccggagaggtggc

SEQ ID NO: 5267783 - DNA, 25 bp, Homo sapien
gtggcagccgagagaagagctggtg

SEQ ID NO: 5267784 - DNA, 25 bp, Homo sapien
gagagcagcaatggggccgtgacca

SEQ ID NO: 5267785 - DNA, 25 bp, Homo sapien
cagccgagagaagagctggtgcagg

SEQ ID NO: 5267786 - DNA, 25 bp, Homo sapien
caatggggccgtgaccagcagggcc

SEQ ID NO: 5267787 - DNA, 25 bp, Homo sapien
tcagatccttctcacaaatagtcat

SEQ ID NO: 5267788 - DNA, 25 bp, Homo sapien
ccgcgatttccacaagacccaatag

SEQ ID NO: 5267789 - DNA, 25 bp, Homo sapien
cgccgggcccgcgatttccacaaga

SEQ ID NO: 5267790 - DNA, 25 bp, Homo sapien
cgatttccacaagacccaatagcat

SEQ ID NO: 5267791 - DNA, 25 bp, Homo sapien
tggacccacccgtgtgccagcgccg

SEQ ID NO: 5267792 - DNA, 25 bp, Homo sapien
gaaagacgggtacctgaatggctcc

SEQ ID NO: 5267793 - DNA, 25 bp, Homo sapien
cgacggtggccagacaataaagtgt

SEQ ID NO: 5267794 - DNA, 25 bp, Homo sapien
tgggaagtacgcgtcccatcgcagc

SEQ ID NO: 5267795 - DNA, 25 bp, Homo sapien
gttacagaagccaccaggcgacggt

SEQ ID NO: 5267796 - DNA, 25 bp, Homo sapien
tgcgatccaggacaagactctcagg

SEQ ID NO: 5267797 - DNA, 25 bp, Homo sapien
gattagcgagaataggctgacggcc

SEQ ID NO: 5267798 - DNA, 25 bp, Homo sapien
tgcattgccagtagggagagacgct

SEQ ID NO: 5267799 - DNA, 25 bp, Homo sapien
tgctaaagtgagatcctcgccagga

SEQ ID NO: 5267800 - DNA, 25 bp, Homo sapien
tactgtatggtgagagcttgctcgc

SEQ ID NO: 5267801 - DNA, 25 bp, Homo sapien
aagaacaaattatgcatcagccggg

SEQ ID NO: 5267802 - DNA, 25 bp, Homo sapien
tgtgtcatccacaaagcgaagcctt

SEQ ID NO: 5267803 - DNA, 25 bp, Homo sapien
gcttgctcgccataactaggtcgct

SEQ ID NO: 5267804 - DNA, 25 bp, Homo sapien
gcagcagtgccaatgtctagtaaca

SEQ ID NO: 5267805 - DNA, 25 bp, Homo sapien
gatttccggtgtaaacagcagcagg

SEQ ID NO: 5267806 - DNA, 25 bp, Homo sapien
agaggagcctgttccctccggaacg

SEQ ID NO: 5267807 - DNA, 25 bp, Homo sapien
cttgagtagcacagggatttccggt

SEQ ID NO: 5267808 - DNA, 25 bp, Homo sapien
tgttttaggaggatggtgtatggtg

SEQ ID NO: 5267809 - DNA, 25 bp, Homo sapien
aggatggtgtatggtgggggcaata

SEQ ID NO: 5267810 - DNA, 25 bp, Homo sapien
gggcaataaatgaggttttttgcat

SEQ ID NO: 5267811 - DNA, 25 bp, Homo sapien
tccaaggaaatggcatatggattaa

SEQ ID NO: 5267812 - DNA, 25 bp, Homo sapien
gaggactcttaccacgacgtttctg

SEQ ID NO: 5267813 - DNA, 25 bp, Homo sapien
tctgttctacacttgggtggagacc

SEQ ID NO: 5267814 - DNA, 25 bp, Homo sapien
gagaccagttgaccatagagcattt

SEQ ID NO: 5267815 - DNA, 25 bp, Homo sapien
gagtcttctagttactggaccgagt

SEQ ID NO: 5267816 - DNA, 25 bp, Homo sapien
aatatatgtatatcccagcggcact

SEQ ID NO: 5267817 - DNA, 25 bp, Homo sapien
gactacagggatctcacgacgaata

SEQ ID NO: 5267818 - DNA, 25 bp, Homo sapien
gattatagaggagccctcacggctg

SEQ ID NO: 5267819 - DNA, 25 bp, Homo sapien
tatccgtacggaggtgtgcaattcc

SEQ ID NO: 5267820 - DNA, 25 bp, Homo sapien
aagagtgagtggttgcggattggac

SEQ ID NO: 5267821 - DNA, 25 bp, Homo sapien
ggattggacgggcttctggagtgag

SEQ ID NO: 5267822 - DNA, 25 bp, Homo sapien
tttgataccaaattgtttctcctct

SEQ ID NO: 5267823 - DNA, 25 bp, Homo sapien
cagtcaggacgctcttttgatacca

SEQ ID NO: 5267824 - DNA, 25 bp, Homo sapien
tcagtaaagatgggaccccttgtta

SEQ ID NO: 5267825 - DNA, 25 bp, Homo sapien
gggctgaatgatgtgggcaccgtgc

SEQ ID NO: 5267826 - DNA, 25 bp, Homo sapien
cgtgcgaacaggagagaaggatcca

SEQ ID NO: 5267827 - DNA, 25 bp, Homo sapien
tgtgggcaccgtgcgaacaggagag

SEQ ID NO: 5267828 - DNA, 25 bp, Homo sapien
gggggccatggggtgcatcagatgc

SEQ ID NO: 5267829 - DNA, 25 bp, Homo sapien
gccatggggtgcatcagatgcctgc

SEQ ID NO: 5267830 - DNA, 25 bp, Homo sapien
atggggtgcatcagatgcctgctcc

SEQ ID NO: 5267831 - DNA, 25 bp, Homo sapien
tggggtgcatcagatgcctgctcca

SEQ ID NO: 5267832 - DNA, 25 bp, Homo sapien
tcacatgggttcttagtgtcatgca

SEQ ID NO: 5267833 - DNA, 25 bp, Homo sapien
gaaatgattgcatactcacaggaag

SEQ ID NO: 5267834 - DNA, 25 bp, Homo sapien
gaaggaattcaagagtgagaggaca

SEQ ID NO: 5267835 - DNA, 25 bp, Homo sapien
tcaccagcttactttatcacaggtg

SEQ ID NO: 5267836 - DNA, 25 bp, Homo sapien
gtctcttgtgaaacctgccctgtga

SEQ ID NO: 5267837 - DNA, 25 bp, Homo sapien
taccgcacaggaataaaagggtggc

SEQ ID NO: 5267838 - DNA, 25 bp, Homo sapien
gctgccaggcacgtcattgagcata

SEQ ID NO: 5267839 - DNA, 25 bp, Homo sapien
tgcaagaagaatgcgccacagctca

SEQ ID NO: 5267840 - DNA, 25 bp, Homo sapien
cacagatgcggccattcacttaatg

SEQ ID NO: 5267841 - DNA, 25 bp, Homo sapien
ttcacttaatgtggtcatccaagca

SEQ ID NO: 5267842 - DNA, 25 bp, Homo sapien
ctgagaatcctggtgatggatgctc

SEQ ID NO: 5267843 - DNA, 25 bp, Homo sapien
gagaatcctggtgatggatgctctg

SEQ ID NO: 5267844 - DNA, 25 bp, Homo sapien
cgtttaaccggatgcgttgcgttgg

SEQ ID NO: 5267845 - DNA, 25 bp, Homo sapien
ctgtgttctgaagcgagtcggattc

SEQ ID NO: 5267846 - DNA, 25 bp, Homo sapien
aggtaccgagatgccgccagagttc

SEQ ID NO: 5267847 - DNA, 25 bp, Homo sapien
ttttcgggatctgtgaacgcgggct

SEQ ID NO: 5267848 - DNA, 25 bp, Homo sapien
aaatagttttcacgtttcttagctg

SEQ ID NO: 5267849 - DNA, 25 bp, Homo sapien
ttttcacgtttcttagctgagccag

SEQ ID NO: 5267850 - DNA, 25 bp, Homo sapien
ctgcatgccaaaaatagttttcacg

SEQ ID NO: 5267851 - DNA, 25 bp, Homo sapien
tcacgtttcttagctgagccagagg

SEQ ID NO: 5267852 - DNA, 25 bp, Homo sapien
gaacatacccattttctggcggtgg

SEQ ID NO: 5267853 - DNA, 25 bp, Homo sapien
gatacttcgaaatgtcgctgttgag

SEQ ID NO: 5267854 - DNA, 25 bp, Homo sapien
tagctgttaagttgatcgaatccct

SEQ ID NO: 5267855 - DNA, 25 bp, Homo sapien
tcacgttgattctgtgaggcaggta

SEQ ID NO: 5267856 - DNA, 25 bp, Homo sapien
gaacgtgagggtgtagctgtgcgga

SEQ ID NO: 5267857 - DNA, 25 bp, Homo sapien
tcccgtgtctcctgggagaacgtga

SEQ ID NO: 5267858 - DNA, 25 bp, Homo sapien
gccaagaggaggagcgtagcgctgg

SEQ ID NO: 5267859 - DNA, 25 bp, Homo sapien
cagccgcgtgatttttagcaagtcc

SEQ ID NO: 5267860 - DNA, 25 bp, Homo sapien
acaggtgtcatgagcgagcgctagt

SEQ ID NO: 5267861 - DNA, 25 bp, Homo sapien
gacaggtgtcatgagcgagcgctag

SEQ ID NO: 5267862 - DNA, 25 bp, Homo sapien
tgtcatgagcgagcgctagtgagtg

SEQ ID NO: 5267863 - DNA, 25 bp, Homo sapien
atgagcgagcgctagtgagtgcagc

SEQ ID NO: 5267864 - DNA, 25 bp, Homo sapien
gactcagtttccctagttgctgatg

SEQ ID NO: 5267865 - DNA, 25 bp, Homo sapien
ggcagctgtatagttcccttccgac

SEQ ID NO: 5267866 - DNA, 25 bp, Homo sapien
gatattctatcgttttctccccagc

SEQ ID NO: 5267867 - DNA, 25 bp, Homo sapien
ccagggtcgacatgctgtgatattc

SEQ ID NO: 5267868 - DNA, 25 bp, Homo sapien
tttaagcgaagtgggtgttgcattg

SEQ ID NO: 5267869 - DNA, 25 bp, Homo sapien
aagcgaagtgggtgttgcattgtcc

SEQ ID NO: 5267870 - DNA, 25 bp, Homo sapien
gtgttgcattgtccgggcagcagcc

SEQ ID NO: 5267871 - DNA, 25 bp, Homo sapien
ctttttaagcgaagtgggtgttgca

SEQ ID NO: 5267872 - DNA, 25 bp, Homo sapien
ccattggcttattatgagataaata

SEQ ID NO: 5267873 - DNA, 25 bp, Homo sapien
cccattggcttattatgagataaat

SEQ ID NO: 5267874 - DNA, 25 bp, Homo sapien
cattggcttattatgagataaatac

SEQ ID NO: 5267875 - DNA, 25 bp, Homo sapien
gtgtttttcctttgcgcttgacagt

SEQ ID NO: 5267876 - DNA, 25 bp, Homo sapien
ttcctttgcgcttgacagtaagaag

SEQ ID NO: 5267877 - DNA, 25 bp, Homo sapien
tgtttttcctttgcgcttgacagta

SEQ ID NO: 5267878 - DNA, 25 bp, Homo sapien
ttttcctttgcgcttgacagtaaga

SEQ ID NO: 5267879 - DNA, 25 bp, Homo sapien
gtgagctctctcgtacttcccaacg

SEQ ID NO: 5267880 - DNA, 25 bp, Homo sapien
cagggctgggaatcgagtgatctct

SEQ ID NO: 5267881 - DNA, 25 bp, Homo sapien
ggtctttagtgaccaacacgtgagc

SEQ ID NO: 5267882 - DNA, 25 bp, Homo sapien
tgatctctcaggagtacagagatct

SEQ ID NO: 5267883 - DNA, 25 bp, Homo sapien
tttggaggctttaggaggagccttc

SEQ ID NO: 5267884 - DNA, 25 bp, Homo sapien
gaggagccttcgggagcatctgtct

SEQ ID NO: 5267885 - DNA, 25 bp, Homo sapien
aggagccttcgggagcatctgtctt

SEQ ID NO: 5267886 - DNA, 25 bp, Homo sapien
tgcagagctttggaggctttaggag

SEQ ID NO: 5267887 - DNA, 25 bp, Homo sapien
gagctgatgcgctgtttctgctccc

SEQ ID NO: 5267888 - DNA, 25 bp, Homo sapien
gatgcgctgtttctgctcccagcgc

SEQ ID NO: 5267889 - DNA, 25 bp, Homo sapien
ctcggagctgatgcgctgtttctgc

SEQ ID NO: 5267890 - DNA, 25 bp, Homo sapien
ctgctcggagctgatgcgctgtttc

SEQ ID NO: 5267891 - DNA, 25 bp, Homo sapien
tggagagacagcacacgtctcaacc

SEQ ID NO: 5267892 - DNA, 25 bp, Homo sapien
gacagcacacgtctcaacccagatg

SEQ ID NO: 5267893 - DNA, 25 bp, Homo sapien
gagagacagcacacgtctcaaccca

SEQ ID NO: 5267894 - DNA, 25 bp, Homo sapien
gagacagcacacgtctcaacccaga

SEQ ID NO: 5267895 - DNA, 25 bp, Homo sapien
taatatagaatgcaccttcgttggg

SEQ ID NO: 5267896 - DNA, 25 bp, Homo sapien
ggactaatatagaatgcaccttcgt

SEQ ID NO: 5267897 - DNA, 25 bp, Homo sapien
caggactaatatagaatgcaccttc

SEQ ID NO: 5267898 - DNA, 25 bp, Homo sapien
ctaatatagaatgcaccttcgttgg

SEQ ID NO: 5267899 - DNA, 25 bp, Homo sapien
gggccccgcactgggaggagctcac

SEQ ID NO: 5267900 - DNA, 25 bp, Homo sapien
cgggccccgcactgggaggagctca

SEQ ID NO: 5267901 - DNA, 25 bp, Homo sapien
agccagcccagcgccctgcctgctg

SEQ ID NO: 5267902 - DNA, 25 bp, Homo sapien
tgcctgctgttccccggggcggagc

SEQ ID NO: 5267903 - DNA, 25 bp, Homo sapien
cccggggcggagcctggttagccat

SEQ ID NO: 5267904 - DNA, 25 bp, Homo sapien
agcccagcgccctgcctgctgttcc

SEQ ID NO: 5267905 - DNA, 25 bp, Homo sapien
ccgctccgtcgctgtttttgtggct

SEQ ID NO: 5267906 - DNA, 25 bp, Homo sapien
gctgtttctaattagacagatgacg

SEQ ID NO: 5267907 - DNA, 25 bp, Homo sapien
tgggaattggctcccgctccgtcgc

SEQ ID NO: 5267908 - DNA, 25 bp, Homo sapien
cagatgacggcctgcagtattttcc

SEQ ID NO: 5267909 - DNA, 25 bp, Homo sapien
tgtctgtgcgctcgaatggagcacg

SEQ ID NO: 5267910 - DNA, 25 bp, Homo sapien
cgctcgaatggagcacgggccacag

SEQ ID NO: 5267911 - DNA, 25 bp, Homo sapien
tttcctggcacgtctgtccacccgg

SEQ ID NO: 5267912 - DNA, 25 bp, Homo sapien
aggcccttgtctgtgcgctcgaatg

SEQ ID NO: 5267913 - DNA, 25 bp, Homo sapien
tctttggccaacgtgaagtcgtact

SEQ ID NO: 5267914 - DNA, 25 bp, Homo sapien
gattgtgcatcctgaggacccacgg

SEQ ID NO: 5267915 - DNA, 25 bp, Homo sapien
tcctgaggagctgcaatttgtcacg

SEQ ID NO: 5267916 - DNA, 25 bp, Homo sapien
gcaaactgagcccattcctgaggag

SEQ ID NO: 5267917 - DNA, 25 bp, Homo sapien
tgtgtccccggttgagaatgaggaa

SEQ ID NO: 5267918 - DNA, 25 bp, Homo sapien
gccttgggcttacatgtccttgcag

SEQ ID NO: 5267919 - DNA, 25 bp, Homo sapien
cacacagttcaagcgcctgcgagat

SEQ ID NO: 5267920 - DNA, 25 bp, Homo sapien
tcaacatcgacctgtttccggcgct

SEQ ID NO: 5267921 - DNA, 25 bp, Homo sapien
gttgcgtccacgtcctgaacaagag

SEQ ID NO: 5267922 - DNA, 25 bp, Homo sapien
tgcacagttgaatcatttaggcgcc

SEQ ID NO: 5267923 - DNA, 25 bp, Homo sapien
gtgtgtgttgacaacgccgctccca

SEQ ID NO: 5267924 - DNA, 25 bp, Homo sapien
tgtatctgatacctgccgagggcca

SEQ ID NO: 5267925 - DNA, 25 bp, Homo sapien
gatttgtgcacaacccgtgttccag

SEQ ID NO: 5267926 - DNA, 25 bp, Homo sapien
cctgcgtaatgtgcggtctgggcca

SEQ ID NO: 5267927 - DNA, 25 bp, Homo sapien
cgctgacctgagtatccaccatgtg

SEQ ID NO: 5267928 - DNA, 25 bp, Homo sapien
tgtgttctgagcaacctttccccga

SEQ ID NO: 5267929 - DNA, 25 bp, Homo sapien
gcactttgtaatgatgcctttcagt

SEQ ID NO: 5267930 - DNA, 25 bp, Homo sapien
gccttttttatgaccattgtattca

SEQ ID NO: 5267931 - DNA, 25 bp, Homo sapien
tattcagttcattaccaaagaaatg

SEQ ID NO: 5267932 - DNA, 25 bp, Homo sapien
tgctccaacagccaaatgccttttt

SEQ ID NO: 5267933 - DNA, 25 bp, Homo sapien
tcactcatgctttcgggcagcaggg

SEQ ID NO: 5267934 - DNA, 25 bp, Homo sapien
tgcttgaaatatctccgtagctccc

SEQ ID NO: 5267935 - DNA, 25 bp, Homo sapien
ggtgactaatctccgggaaggcgtc

SEQ ID NO: 5267936 - DNA, 25 bp, Homo sapien
ccagcgtgagccgtgaggcctgcac

SEQ ID NO: 5267937 - DNA, 25 bp, Homo sapien
cacagccggatccacggtgactaat

SEQ ID NO: 5267938 - DNA, 25 bp, Homo sapien
gcggcttgttgggcagagtcgccat

SEQ ID NO: 5267939 - DNA, 25 bp, Homo sapien
ggcagcggcttgttgggcagagtcg

SEQ ID NO: 5267940 - DNA, 25 bp, Homo sapien
cagcggcttgttgggcagagtcgcc

SEQ ID NO: 5267941 - DNA, 25 bp, Homo sapien
gcggcagcggcttgttgggcagagt

SEQ ID NO: 5267942 - DNA, 25 bp, Homo sapien
tatccccagacttagcacaattcca

SEQ ID NO: 5267943 - DNA, 25 bp, Homo sapien
ccaagtgacatgtcagtgcttcagg

SEQ ID NO: 5267944 - DNA, 25 bp, Homo sapien
tccttgaagactcggtcagcgtctc

SEQ ID NO: 5267945 - DNA, 25 bp, Homo sapien
gcaacggacctttgaccaagtgaca

SEQ ID NO: 5267946 - DNA, 25 bp, Homo sapien
aagtagggaacccagccgagggctg

SEQ ID NO: 5267947 - DNA, 25 bp, Homo sapien
tcaggacaatccacagagcaggaag

SEQ ID NO: 5267948 - DNA, 25 bp, Homo sapien
tgcactctctgggtcaacaacaggt

SEQ ID NO: 5267949 - DNA, 25 bp, Homo sapien
ccagccgagggctggtgcactctct

SEQ ID NO: 5267950 - DNA, 25 bp, Homo sapien
tatggtctttggtcttccctaacac

SEQ ID NO: 5267951 - DNA, 25 bp, Homo sapien
gccgtatagctgaggccgaacactg

SEQ ID NO: 5267952 - DNA, 25 bp, Homo sapien
aaataccaggttcatgtacctgccg

SEQ ID NO: 5267953 - DNA, 25 bp, Homo sapien
gagtgtttatttggaagttgtatcc

SEQ ID NO: 5267954 - DNA, 25 bp, Homo sapien
tttttatgcagctgacgagtcaggg

SEQ ID NO: 5267955 - DNA, 25 bp, Homo sapien
gaaagtccgtgtgtcttccgtgtca

SEQ ID NO: 5267956 - DNA, 25 bp, Homo sapien
agcacctggtcgcagcactttcaag

SEQ ID NO: 5267957 - DNA, 25 bp, Homo sapien
aaggcattcactccgtctgcaaaca

SEQ ID NO: 5267958 - DNA, 25 bp, Homo sapien
catttggccctgatgtgctgtagaa

SEQ ID NO: 5267959 - DNA, 25 bp, Homo sapien
gaaacatgctgagtgctgaactccc

SEQ ID NO: 5267960 - DNA, 25 bp, Homo sapien
gagggcccgatcagaacgttcatta

SEQ ID NO: 5267961 - DNA, 25 bp, Homo sapien
caaagcgagtggttcacaggtgcca

SEQ ID NO: 5267962 - DNA, 25 bp, Homo sapien
agcctggtgccaacaaacatcttgc

SEQ ID NO: 5267963 - DNA, 25 bp, Homo sapien
cctggcacagcctggtgccaacaaa

SEQ ID NO: 5267964 - DNA, 25 bp, Homo sapien
cactgactgagccccggccagaagt

SEQ ID NO: 5267965 - DNA, 25 bp, Homo sapien
gccccggccagaagtctggttctgt

SEQ ID NO: 5267966 - DNA, 25 bp, Homo sapien
caagaagggagcagagagataaaac

SEQ ID NO: 5267967 - DNA, 25 bp, Homo sapien
ctgggaaccaagaagggagcagaga

SEQ ID NO: 5267968 - DNA, 25 bp, Homo sapien
accaagaagggagcagagagataaa

SEQ ID NO: 5267969 - DNA, 25 bp, Homo sapien
gaaccaagaagggagcagagagata

SEQ ID NO: 5267970 - DNA, 25 bp, Homo sapien
tttctgcggtgtgagtcctcccact

SEQ ID NO: 5267971 - DNA, 25 bp, Homo sapien
tccaaactccctgtgtgaaggcact

SEQ ID NO: 5267972 - DNA, 25 bp, Homo sapien
caaataaaaccagcggaaagcagcc

SEQ ID NO: 5267973 - DNA, 25 bp, Homo sapien
gagagttccacagtgacaagttaca

SEQ ID NO: 5267974 - DNA, 25 bp, Homo sapien
aatgcagggtccgtgaatgacgact

SEQ ID NO: 5267975 - DNA, 25 bp, Homo sapien
cagagacaatgcagggtccgtgaat

SEQ ID NO: 5267976 - DNA, 25 bp, Homo sapien
gaatgacgactggataagcgaagcg

SEQ ID NO: 5267977 - DNA, 25 bp, Homo sapien
aagcgtggtccctctgatagtagca

SEQ ID NO: 5267978 - DNA, 25 bp, Homo sapien
gagctgttccatcatgcaatagaag

SEQ ID NO: 5267979 - DNA, 25 bp, Homo sapien
gcataaccttattcttctggatgtg

SEQ ID NO: 5267980 - DNA, 25 bp, Homo sapien
caggtagtggctgcccactctcagg

SEQ ID NO: 5267981 - DNA, 25 bp, Homo sapien
tctcaggtcccctcaacgctgggag

SEQ ID NO: 5267982 - DNA, 25 bp, Homo sapien
caggctcgggggcttgaaacaacag

SEQ ID NO: 5267983 - DNA, 25 bp, Homo sapien
ctcaggctgctgggacaaaatacca

SEQ ID NO: 5267984 - DNA, 25 bp, Homo sapien
aaataccacaggctcgggggcttga

SEQ ID NO: 5267985 - DNA, 25 bp, Homo sapien
ggctcgggggcttgaaacaacagaa

SEQ ID NO: 5267986 - DNA, 25 bp, Homo sapien
tcagctaagcatgtgtccacctggc

SEQ ID NO: 5267987 - DNA, 25 bp, Homo sapien
ttgaagacccgcctggacaacgtag

SEQ ID NO: 5267988 - DNA, 25 bp, Homo sapien
taaagcatgttgtctacctaaaagg

SEQ ID NO: 5267989 - DNA, 25 bp, Homo sapien
cttcctggctcgcagaggctggtgc

SEQ ID NO: 5267990 - DNA, 25 bp, Homo sapien
tcagcaatggggtgacaccgtgacg

SEQ ID NO: 5267991 - DNA, 25 bp, Homo sapien
accgtgacgctccagtaccggcaga

SEQ ID NO: 5267992 - DNA, 25 bp, Homo sapien
tcttcaacggcctctatttgtgcgg

SEQ ID NO: 5267993 - DNA, 25 bp, Homo sapien
ggaggggagttctgcacaaagaaca

SEQ ID NO: 5267994 - DNA, 25 bp, Homo sapien
tgttctggcgacagcttcacaggca

SEQ ID NO: 5267995 - DNA, 25 bp, Homo sapien
gcaaatgcatcggtcacttcacgta

SEQ ID NO: 5267996 - DNA, 25 bp, Homo sapien
cctgaacatggaggacacgagggac

SEQ ID NO: 5267997 - DNA, 25 bp, Homo sapien
tcgaaatatcggtcaacaggtaaat

SEQ ID NO: 5267998 - DNA, 25 bp, Homo sapien
taatgtataagcaaactgggacctg

SEQ ID NO: 5267999 - DNA, 25 bp, Homo sapien
tagaggaggctatgtaaaggcccca

SEQ ID NO: 5268000 - DNA, 25 bp, Homo sapien
tcctgagtgctacccagctgaagaa

SEQ ID NO: 5268001 - DNA, 25 bp, Homo sapien
gcagaagctctataaattgggccta

SEQ ID NO: 5268002 - DNA, 25 bp, Homo sapien
tcagctgccgtcaacatggtacttt

SEQ ID NO: 5268003 - DNA, 25 bp, Homo sapien
tgaggaaagctcctaaccgcctgtt

SEQ ID NO: 5268004 - DNA, 25 bp, Homo sapien
aggccgacgggactgcaaatggaca

SEQ ID NO: 5268005 - DNA, 25 bp, Homo sapien
tgtgcaggaaacatagaggaccatg

SEQ ID NO: 5268006 - DNA, 25 bp, Homo sapien
ctaaataaataatcatgtcaaactt

SEQ ID NO: 5268007 - DNA, 25 bp, Homo sapien
taaataatcatgtcaaacttttact

SEQ ID NO: 5268008 - DNA, 25 bp, Homo sapien
ataaataatcatgtcaaacttttac

SEQ ID NO: 5268009 - DNA, 25 bp, Homo sapien
aaataaataatcatgtcaaactttt

SEQ ID NO: 5268010 - DNA, 25 bp, Homo sapien
actgtgcccagccggtgtcttactt

SEQ ID NO: 5268011 - DNA, 25 bp, Homo sapien
tgtgcccagccggtgtcttactttt

SEQ ID NO: 5268012 - DNA, 25 bp, Homo sapien
ctgtgcccagccggtgtcttacttt

SEQ ID NO: 5268013 - DNA, 25 bp, Homo sapien
cactgtgcccagccggtgtcttact

SEQ ID NO: 5268014 - DNA, 25 bp, Homo sapien
tcgcagctgttcctagagaatggcc

SEQ ID NO: 5268015 - DNA, 25 bp, Homo sapien
gcaaggacagtattgaacccagtaa

SEQ ID NO: 5268016 - DNA, 25 bp, Homo sapien
gagactcaaacctgtcaactggacg

SEQ ID NO: 5268017 - DNA, 25 bp, Homo sapien
aatataagccacagcattttaggcc

SEQ ID NO: 5268018 - DNA, 25 bp, Homo sapien
ggtcctacctgcaggctattttcca

SEQ ID NO: 5268019 - DNA, 25 bp, Homo sapien
gctggctcaagttctcccaaggact

SEQ ID NO: 5268020 - DNA, 25 bp, Homo sapien
aggcagcaagacagccgctggctca

SEQ ID NO: 5268021 - DNA, 25 bp, Homo sapien
tgattccgtgtgaaagacgcatctg

SEQ ID NO: 5268022 - DNA, 25 bp, Homo sapien
tcagtcttccgattgtttagctcct

SEQ ID NO: 5268023 - DNA, 25 bp, Homo sapien
agtcttccgattgtttagctccttc

SEQ ID NO: 5268024 - DNA, 25 bp, Homo sapien
tcttccgattgtttagctccttctc

SEQ ID NO: 5268025 - DNA, 25 bp, Homo sapien
ccgattgtttagctccttctctggc

SEQ ID NO: 5268026 - DNA, 25 bp, Homo sapien
ataaatcccgaatgaccaggaacat

SEQ ID NO: 5268027 - DNA, 25 bp, Homo sapien
ctataaatcccgaatgaccaggaac

SEQ ID NO: 5268028 - DNA, 25 bp, Homo sapien
tataaatcccgaatgaccaggaaca

SEQ ID NO: 5268029 - DNA, 25 bp, Homo sapien
cacttgtcttccacccatttttctt

SEQ ID NO: 5268030 - DNA, 25 bp, Homo sapien
tcctctttgttgatcacctctttcc

SEQ ID NO: 5268031 - DNA, 25 bp, Homo sapien
atcccctgggtaagcctctccagtg

SEQ ID NO: 5268032 - DNA, 25 bp, Homo sapien
ccactgaatgtccatcccctgggta

SEQ ID NO: 5268033 - DNA, 25 bp, Homo sapien
tatcgtaaacatactgtctgtatac

SEQ ID NO: 5268034 - DNA, 25 bp, Homo sapien
tttatcgtaaacatactgtctgtat

SEQ ID NO: 5268035 - DNA, 25 bp, Homo sapien
tcgtaaacatactgtctgtatacag

SEQ ID NO: 5268036 - DNA, 25 bp, Homo sapien
catttatcgtaaacatactgtctgt

SEQ ID NO: 5268037 - DNA, 25 bp, Homo sapien
aatttccgctctttggtttgtctgc

SEQ ID NO: 5268038 - DNA, 25 bp, Homo sapien
atttccgctctttggtttgtctgcc

SEQ ID NO: 5268039 - DNA, 25 bp, Homo sapien
atgaatttccgctctttggtttgtc

SEQ ID NO: 5268040 - DNA, 25 bp, Homo sapien
gaatttccgctctttggtttgtctg

SEQ ID NO: 5268041 - DNA, 25 bp, Homo sapien
tgaggtacctcacgttctgaaaagc

SEQ ID NO: 5268042 - DNA, 25 bp, Homo sapien
tctgaaaagcaatgccgcttagccc

SEQ ID NO: 5268043 - DNA, 25 bp, Homo sapien
ttagccccaacacgaaccaaagctg

SEQ ID NO: 5268044 - DNA, 25 bp, Homo sapien
taatcaaacaatgagcagatcccgc

SEQ ID NO: 5268045 - DNA, 25 bp, Homo sapien
gccttctacgcccattactggagca

SEQ ID NO: 5268046 - DNA, 25 bp, Homo sapien
gcagccatcagtgtagacgacgacg

SEQ ID NO: 5268047 - DNA, 25 bp, Homo sapien
cagtaaacgccgattcctgctcgcg

SEQ ID NO: 5268048 - DNA, 25 bp, Homo sapien
gccgattcctgctcgcggccttcta

SEQ ID NO: 5268049 - DNA, 25 bp, Homo sapien
gagccatcctccagagacgagcagc

SEQ ID NO: 5268050 - DNA, 25 bp, Homo sapien
agagggtatgattgacacacaaagg

SEQ ID NO: 5268051 - DNA, 25 bp, Homo sapien
tgctgctagttaagtgtggttcccg

SEQ ID NO: 5268052 - DNA, 25 bp, Homo sapien
gagcagcgcctcagcatgacggtga

SEQ ID NO: 5268053 - DNA, 25 bp, Homo sapien
tgtaggaaaacgtgtctctgctaac

SEQ ID NO: 5268054 - DNA, 25 bp, Homo sapien
ccatgtaggaaaacgtgtctctgct

SEQ ID NO: 5268055 - DNA, 25 bp, Homo sapien
atgtaggaaaacgtgtctctgctaa

SEQ ID NO: 5268056 - DNA, 25 bp, Homo sapien
catgtaggaaaacgtgtctctgcta

SEQ ID NO: 5268057 - DNA, 25 bp, Homo sapien
ctttgcatacggctctgcgctttca

SEQ ID NO: 5268058 - DNA, 25 bp, Homo sapien
ttcatgtgctttgcatacggctctg

SEQ ID NO: 5268059 - DNA, 25 bp, Homo sapien
catgtgctttgcatacggctctgcg

SEQ ID NO: 5268060 - DNA, 25 bp, Homo sapien
gtgctttgcatacggctctgcgctt

SEQ ID NO: 5268061 - DNA, 25 bp, Homo sapien
gattcttgtccatgttgattttcat

SEQ ID NO: 5268062 - DNA, 25 bp, Homo sapien
tcttgtccatgttgattttcatgcc

SEQ ID NO: 5268063 - DNA, 25 bp, Homo sapien
cgattcttgtccatgttgattttca

SEQ ID NO: 5268064 - DNA, 25 bp, Homo sapien
ctccgattcttgtccatgttgattt

SEQ ID NO: 5268065 - DNA, 25 bp, Homo sapien
aagacaagagtccactcgtgagctg

SEQ ID NO: 5268066 - DNA, 25 bp, Homo sapien
ctcgtgagctggaaacaatgaacat

SEQ ID NO: 5268067 - DNA, 25 bp, Homo sapien
caagagtccactcgtgagctggaaa

SEQ ID NO: 5268068 - DNA, 25 bp, Homo sapien
tccactcgtgagctggaaacaatga

SEQ ID NO: 5268069 - DNA, 25 bp, Homo sapien
agcgaggaggcggctcagcattact

SEQ ID NO: 5268070 - DNA, 25 bp, Homo sapien
cagcattactgcctccattctccct

SEQ ID NO: 5268071 - DNA, 25 bp, Homo sapien
cctccattctcccttaacatcccca

SEQ ID NO: 5268072 - DNA, 25 bp, Homo sapien
aatgaacagctgtaacagcgaggag

SEQ ID NO: 5268073 - DNA, 25 bp, Homo sapien
gcagcaggaaaccggtccacctgtg

SEQ ID NO: 5268074 - DNA, 25 bp, Homo sapien
agcaggaaaccggtccacctgtgct

SEQ ID NO: 5268075 - DNA, 25 bp, Homo sapien
tggcagcaggaaaccggtccacctg

SEQ ID NO: 5268076 - DNA, 25 bp, Homo sapien
ggcagcaggaaaccggtccacctgt

SEQ ID NO: 5268077 - DNA, 25 bp, Homo sapien
ctcgaccccgatgccggcagggagg

SEQ ID NO: 5268078 - DNA, 25 bp, Homo sapien
ttcggtgcgttccagtcccaggcca

SEQ ID NO: 5268079 - DNA, 25 bp, Homo sapien
tacgcgacgtttctgatatttcaaa

SEQ ID NO: 5268080 - DNA, 25 bp, Homo sapien
tatttcaaacaagtcttcggtgcgt

SEQ ID NO: 5268081 - DNA, 25 bp, Homo sapien
gggccaggaacagaagccagctcat

SEQ ID NO: 5268082 - DNA, 25 bp, Homo sapien
aaggcgactctgtgggccaggaaca

SEQ ID NO: 5268083 - DNA, 25 bp, Homo sapien
ggcatagaacatcccgaacccgcga

SEQ ID NO: 5268084 - DNA, 25 bp, Homo sapien
aggtcagaaagaccccggtcttgcg

SEQ ID NO: 5268085 - DNA, 25 bp, Homo sapien
tcactcccggcaccgggaagcattt

SEQ ID NO: 5268086 - DNA, 25 bp, Homo sapien
gggaagcatttcgactcccggccca

SEQ ID NO: 5268087 - DNA, 25 bp, Homo sapien
agccgccggcgctcaacaccgcact

SEQ ID NO: 5268088 - DNA, 25 bp, Homo sapien
ggcaccgggaagcatttcgactccc

SEQ ID NO: 5268089 - DNA, 25 bp, Homo sapien
attatcaacaatccccacaacttca

SEQ ID NO: 5268090 - DNA, 25 bp, Homo sapien
tcgttcacattccatccattatcaa

SEQ ID NO: 5268091 - DNA, 25 bp, Homo sapien
tcctgatgcaactcgttcacattcc

SEQ ID NO: 5268092 - DNA, 25 bp, Homo sapien
aacttcattcgggtgtgggcgtcac

SEQ ID NO: 5268093 - DNA, 25 bp, Homo sapien
cctagatgggctggatggcggggaa

SEQ ID NO: 5268094 - DNA, 25 bp, Homo sapien
ttcctagatgggctggatggcgggg

SEQ ID NO: 5268095 - DNA, 25 bp, Homo sapien
cccagactgggtggctgccggacgg

SEQ ID NO: 5268096 - DNA, 25 bp, Homo sapien
agactgggtggctgccggacggagg

SEQ ID NO: 5268097 - DNA, 25 bp, Homo sapien
tgtggcactctgtatagcggcccag

SEQ ID NO: 5268098 - DNA, 25 bp, Homo sapien
tgttgtccgtaagccactctgtctg

SEQ ID NO: 5268099 - DNA, 25 bp, Homo sapien
caagtccacaactgcggaatcagcg

SEQ ID NO: 5268100 - DNA, 25 bp, Homo sapien
ggaaacagttcctcttcagacacgg

SEQ ID NO: 5268101 - DNA, 25 bp, Homo sapien
tactagcatagaatgaaggcctcgc

SEQ ID NO: 5268102 - DNA, 25 bp, Homo sapien
cattattagagaagcaccgggcggg

SEQ ID NO: 5268103 - DNA, 25 bp, Homo sapien
cctgcactgaagacgggaaccttgg

SEQ ID NO: 5268104 - DNA, 25 bp, Homo sapien
ggaccacggctgaaagtaactcttg

SEQ ID NO: 5268105 - DNA, 25 bp, Homo sapien
gctaagggtagagagaatctcatcc

SEQ ID NO: 5268106 - DNA, 25 bp, Homo sapien
aagtcatcatcaaccgtaacccagg

SEQ ID NO: 5268107 - DNA, 25 bp, Homo sapien
caaataaggtccgaaatgggcccag

SEQ ID NO: 5268108 - DNA, 25 bp, Homo sapien
catgtggacagcttaagccgcaggg

SEQ ID NO: 5268109 - DNA, 25 bp, Homo sapien
gagcctaagaagcaacgaacagcag

SEQ ID NO: 5268110 - DNA, 25 bp, Homo sapien
gagggagcgccagcttaccttagct

SEQ ID NO: 5268111 - DNA, 25 bp, Homo sapien
ccttgaggtccgagttcatctccag

SEQ ID NO: 5268112 - DNA, 25 bp, Homo sapien
aggtccgagttcatctccagctcca

SEQ ID NO: 5268113 - DNA, 25 bp, Homo sapien
tgaggtccgagttcatctccagctc

SEQ ID NO: 5268114 - DNA, 25 bp, Homo sapien
ttgaggtccgagttcatctccagct

SEQ ID NO: 5268115 - DNA, 25 bp, Homo sapien
gccttgaggtccgagttcatctcca

SEQ ID NO: 5268116 - DNA, 25 bp, Homo sapien
gaggtccgagttcatctccagctcc

SEQ ID NO: 5268117 - DNA, 25 bp, Homo sapien
ggagctggagatgaactcggacctc

SEQ ID NO: 5268118 - DNA, 25 bp, Homo sapien
gctggagatgaactcggacctcaag

SEQ ID NO: 5268119 - DNA, 25 bp, Homo sapien
gagctggagatgaactcggacctca

SEQ ID NO: 5268120 - DNA, 25 bp, Homo sapien
tggagctggagatgaactcggacct

SEQ ID NO: 5268121 - DNA, 25 bp, Homo sapien
agctggagatgaactcggacctcaa

SEQ ID NO: 5268122 - DNA, 25 bp, Homo sapien
tggagatgaactcggacctcaaggc

SEQ ID NO: 5268123 - DNA, 25 bp, Homo sapien
cgtgttgtttgggagtgataccgcc

SEQ ID NO: 5268124 - DNA, 25 bp, Homo sapien
tatagatacggcaaagagctgtggg

SEQ ID NO: 5268125 - DNA, 25 bp, Homo sapien
cagctaaggtaagctggcgctccct

SEQ ID NO: 5268126 - DNA, 25 bp, Homo sapien
cttagcccggagttgccgcaagtgg

SEQ ID NO: 5268127 - DNA, 25 bp, Homo sapien
taccctgcggcttaagctgtccaca

SEQ ID NO: 5268128 - DNA, 25 bp, Homo sapien
ggttgatgatgacttgccgcctggc

SEQ ID NO: 5268129 - DNA, 25 bp, Homo sapien
tagacttcagtttgcaccaatcccc

SEQ ID NO: 5268130 - DNA, 25 bp, Homo sapien
ccccatagacttcagtttgcaccaa

SEQ ID NO: 5268131 - DNA, 25 bp, Homo sapien
tccagatcaatcctggcacttcatt

SEQ ID NO: 5268132 - DNA, 25 bp, Homo sapien
catccgaactgtaacaggtttcttc

SEQ ID NO: 5268133 - DNA, 25 bp, Homo sapien
tcattccccatagacttcagtttgc

SEQ ID NO: 5268134 - DNA, 25 bp, Homo sapien
cccatccgaactgtaacaggtttct

SEQ ID NO: 5268135 - DNA, 25 bp, Homo sapien
gggattggtgcaaactgaagtctat

SEQ ID NO: 5268136 - DNA, 25 bp, Homo sapien
agaaacctgttacagttcggatggg

SEQ ID NO: 5268137 - DNA, 25 bp, Homo sapien
agaagaaacctgttacagttcggat

SEQ ID NO: 5268138 - DNA, 25 bp, Homo sapien
gattggtgcaaactgaagtctatgg

SEQ ID NO: 5268139 - DNA, 25 bp, Homo sapien
gaatgaagtgccaggattgatctgg

SEQ ID NO: 5268140 - DNA, 25 bp, Homo sapien
aatgaagtgccaggattgatctgga

SEQ ID NO: 5268141 - DNA, 25 bp, Homo sapien
tgactgagcaaacccttctatggag

SEQ ID NO: 5268142 - DNA, 25 bp, Homo sapien
tcgagaaggctaaacaacttagacg

SEQ ID NO: 5268143 - DNA, 25 bp, Homo sapien
cagcctctactaatacgccagtgga

SEQ ID NO: 5268144 - DNA, 25 bp, Homo sapien
gctgtaactgccatactgctttaaa

SEQ ID NO: 5268145 - DNA, 25 bp, Homo sapien
aacttagacgaacaattgactgagc

SEQ ID NO: 5268146 - DNA, 25 bp, Homo sapien
ggcagggtaagttcaaagttcgaga

SEQ ID NO: 5268147 - DNA, 25 bp, Homo sapien
tattcaagaatcaggaagtaactcc

SEQ ID NO: 5268148 - DNA, 25 bp, Homo sapien
tctcgaactttgaacttaccctgcc

SEQ ID NO: 5268149 - DNA, 25 bp, Homo sapien
tgctcagtcaattgttcgtctaagt

SEQ ID NO: 5268150 - DNA, 25 bp, Homo sapien
tccactggcgtattagtagaggctg

SEQ ID NO: 5268151 - DNA, 25 bp, Homo sapien
tttaaagcagtatggcagttacagc

SEQ ID NO: 5268152 - DNA, 25 bp, Homo sapien
taactccatagaagggtttgctcag

SEQ ID NO: 5268153 - DNA, 25 bp, Homo sapien
cggatctcatgcctgtgctcctgga

SEQ ID NO: 5268154 - DNA, 25 bp, Homo sapien
tccggatctcatgcctgtgctcctg

SEQ ID NO: 5268155 - DNA, 25 bp, Homo sapien
ggatctcatgcctgtgctcctggac

SEQ ID NO: 5268156 - DNA, 25 bp, Homo sapien
gggaagcgccggggagaagatggag

SEQ ID NO: 5268157 - DNA, 25 bp, Homo sapien
agagggaagcgccggggagaagatg

SEQ ID NO: 5268158 - DNA, 25 bp, Homo sapien
tcagagggaagcgccggggagaaga

SEQ ID NO: 5268159 - DNA, 25 bp, Homo sapien
cagagggaagcgccggggagaagat

SEQ ID NO: 5268160 - DNA, 25 bp, Homo sapien
ggctccactctgtccgggaacttaa

SEQ ID NO: 5268161 - DNA, 25 bp, Homo sapien
ggtggctgccgttaatgtcctcatg

SEQ ID NO: 5268162 - DNA, 25 bp, Homo sapien
gagaattcccatccggagacaagcg

SEQ ID NO: 5268163 - DNA, 25 bp, Homo sapien
gttcacgaggcaaaaggctgttccc

SEQ ID NO: 5268164 - DNA, 25 bp, Homo sapien
ttctcttcaccccagtttgcgtcct

SEQ ID NO: 5268165 - DNA, 25 bp, Homo sapien
ttccgttctcttcaccccagtttgc

SEQ ID NO: 5268166 - DNA, 25 bp, Homo sapien
agtttgcgtcctccacgggcagagg

SEQ ID NO: 5268167 - DNA, 25 bp, Homo sapien
ccagtttgcgtcctccacgggcaga

SEQ ID NO: 5268168 - DNA, 25 bp, Homo sapien
ctggcctgggcacactgtgctccac

SEQ ID NO: 5268169 - DNA, 25 bp, Homo sapien
gcctggcctgggcacactgtgctcc

SEQ ID NO: 5268170 - DNA, 25 bp, Homo sapien
cctgggcacactgtgctccacaccc

SEQ ID NO: 5268171 - DNA, 25 bp, Homo sapien
tgggcacactgtgctccacacccca

SEQ ID NO: 5268172 - DNA, 25 bp, Homo sapien
caagctcttgctgacttttgaagcg

SEQ ID NO: 5268173 - DNA, 25 bp, Homo sapien
aaggaaaggagatcagtcagctgcc

SEQ ID NO: 5268174 - DNA, 25 bp, Homo sapien
gaagcgaaatcccatatgaacaaag

SEQ ID NO: 5268175 - DNA, 25 bp, Homo sapien
tccacaggccgtggtcaagctcttg

SEQ ID NO: 5268176 - DNA, 25 bp, Homo sapien
tgacgattgttcctgagcctgagca

SEQ ID NO: 5268177 - DNA, 25 bp, Homo sapien
tgttcctgagcctgagcagcgtctg

SEQ ID NO: 5268178 - DNA, 25 bp, Homo sapien
ctggtctcacaacctgacgattgtt

SEQ ID NO: 5268179 - DNA, 25 bp, Homo sapien
cacaacctgacgattgttcctgagc

SEQ ID NO: 5268180 - DNA, 25 bp, Homo sapien
gtaatgtgctgaccgctgggggaag

SEQ ID NO: 5268181 - DNA, 25 bp, Homo sapien
cggtaatgtgctgaccgctggggga

SEQ ID NO: 5268182 - DNA, 25 bp, Homo sapien
taagagaggataggtgccttcttac

SEQ ID NO: 5268183 - DNA, 25 bp, Homo sapien
gggaagataagagaggataggtgcc

SEQ ID NO: 5268184 - DNA, 25 bp, Homo sapien
cttggtaagaagctaagaggagcgt

SEQ ID NO: 5268185 - DNA, 25 bp, Homo sapien
tgctcttggtaagaagctaagagga

SEQ ID NO: 5268186 - DNA, 25 bp, Homo sapien
tctgtgctcttggtaagaagctaag

SEQ ID NO: 5268187 - DNA, 25 bp, Homo sapien
taagaagctaagaggagcgtgtgct

SEQ ID NO: 5268188 - DNA, 25 bp, Homo sapien
ccctcgcaggaaagtggacagaaac

SEQ ID NO: 5268189 - DNA, 25 bp, Homo sapien
gtgcgtctgagagcgccccgctgca

SEQ ID NO: 5268190 - DNA, 25 bp, Homo sapien
ctgctgtgcgtctgagagcgccccg

SEQ ID NO: 5268191 - DNA, 25 bp, Homo sapien
tttgtgcccataggcctagctgggg

SEQ ID NO: 5268192 - DNA, 25 bp, Homo sapien
ctttgttgaagccactcctgggaca

SEQ ID NO: 5268193 - DNA, 25 bp, Homo sapien
cagtaaaagccttgctgaacacctg

SEQ ID NO: 5268194 - DNA, 25 bp, Homo sapien
agtgagggcagtaaaagccttgctg

SEQ ID NO: 5268195 - DNA, 25 bp, Homo sapien
tcttgggagacggagcctgatcttt

SEQ ID NO: 5268196 - DNA, 25 bp, Homo sapien
agaggggaaattcccatgtcagcct

SEQ ID NO: 5268197 - DNA, 25 bp, Homo sapien
tagaggggaaattcccatgtcagcc

SEQ ID NO: 5268198 - DNA, 25 bp, Homo sapien
ctagaggggaaattcccatgtcagc

SEQ ID NO: 5268199 - DNA, 25 bp, Homo sapien
gcccagagacctttacgaagctgta

SEQ ID NO: 5268200 - DNA, 25 bp, Homo sapien
attgttctaatatccgcgtgagcac

SEQ ID NO: 5268201 - DNA, 25 bp, Homo sapien
tcacttgcatgtggacccaagcctg

SEQ ID NO: 5268202 - DNA, 25 bp, Homo sapien
tcactcagtttggtgcctgctaaac

SEQ ID NO: 5268203 - DNA, 25 bp, Homo sapien
cacaccacaggacggcactgaatgg

SEQ ID NO: 5268204 - DNA, 25 bp, Homo sapien
cgggtttccctgtacccattctgcg

SEQ ID NO: 5268205 - DNA, 25 bp, Homo sapien
ttctgcgggagaattgactgacgca

SEQ ID NO: 5268206 - DNA, 25 bp, Homo sapien
caggtcctcatctggtgcgcgatga

SEQ ID NO: 5268207 - DNA, 25 bp, Homo sapien
tcaggatgccaagtcccgggaggtc

SEQ ID NO: 5268208 - DNA, 25 bp, Homo sapien
cctcaggatgccaagtcccgggagg

SEQ ID NO: 5268209 - DNA, 25 bp, Homo sapien
ctcaggatgccaagtcccgggaggt

SEQ ID NO: 5268210 - DNA, 25 bp, Homo sapien
caggatgccaagtcccgggaggtct

SEQ ID NO: 5268211 - DNA, 25 bp, Homo sapien
tgttcatggcagtaaccctagccgt

SEQ ID NO: 5268212 - DNA, 25 bp, Homo sapien
tagccgtctccacgtcatctttttg

SEQ ID NO: 5268213 - DNA, 25 bp, Homo sapien
tgggagaactcctcgtgcagcagga

SEQ ID NO: 5268214 - DNA, 25 bp, Homo sapien
tctgtgaccattggaggcgattttt

SEQ ID NO: 5268215 - DNA, 25 bp, Homo sapien
cactgcgcctggtcttgttttccaa

SEQ ID NO: 5268216 - DNA, 25 bp, Homo sapien
tgcgcctggtcttgttttccaagtt

SEQ ID NO: 5268217 - DNA, 25 bp, Homo sapien
gccactgcgcctggtcttgttttcc

SEQ ID NO: 5268218 - DNA, 25 bp, Homo sapien
actgcgcctggtcttgttttccaag

SEQ ID NO: 5268219 - DNA, 25 bp, Homo sapien
cttcacgatgaagaaacaaagaggt

SEQ ID NO: 5268220 - DNA, 25 bp, Homo sapien
tgaagaaacaaagaggtcagcacgt

SEQ ID NO: 5268221 - DNA, 25 bp, Homo sapien
gacacccctcttcctatgggctcgg

SEQ ID NO: 5268222 - DNA, 25 bp, Homo sapien
aacaaagaggtcagcacgtacccgc

SEQ ID NO: 5268223 - DNA, 25 bp, Homo sapien
cgtttgtcccagagatcagatcgaa

SEQ ID NO: 5268224 - DNA, 25 bp, Homo sapien
ccttgtctgtgaatggagccgctaa

SEQ ID NO: 5268225 - DNA, 25 bp, Homo sapien
tgggcgagccgtaggccttcaatca

SEQ ID NO: 5268226 - DNA, 25 bp, Homo sapien
cactctgtgtaggaatcgtttgtcc

SEQ ID NO: 5268227 - DNA, 25 bp, Homo sapien
ccctggtgggcgttctaatcagcct

SEQ ID NO: 5268228 - DNA, 25 bp, Homo sapien
tggacatcctcagccggctggcgat

SEQ ID NO: 5268229 - DNA, 25 bp, Homo sapien
gtcctgcctgcgctcaggatgaggg

SEQ ID NO: 5268230 - DNA, 25 bp, Homo sapien
tgctctgtgcagatcctcgtccctg

SEQ ID NO: 5268231 - DNA, 25 bp, Homo sapien
tttggctgtggaggtcacgtccctg

SEQ ID NO: 5268232 - DNA, 25 bp, Homo sapien
tcagctttaggttggaaacggtggc

SEQ ID NO: 5268233 - DNA, 25 bp, Homo sapien
tcatttcccacatgggtagggtccc

SEQ ID NO: 5268234 - DNA, 25 bp, Homo sapien
gagtccctacggttgtcttccctgc

SEQ ID NO: 5268235 - DNA, 25 bp, Homo sapien
tgctgtgggtcagccgtcctgcgtg

SEQ ID NO: 5268236 - DNA, 25 bp, Homo sapien
ggtgctgtgggtcagccgtcctgcg

SEQ ID NO: 5268237 - DNA, 25 bp, Homo sapien
gtcagccgtcctgcgtgacgggtca

SEQ ID NO: 5268238 - DNA, 25 bp, Homo sapien
tgtgggtcagccgtcctgcgtgacg

SEQ ID NO: 5268239 - DNA, 25 bp, Homo sapien
tccgtgaggttggggaggcgatgcc

SEQ ID NO: 5268240 - DNA, 25 bp, Homo sapien
gaggttggggaggcgatgccagctt

SEQ ID NO: 5268241 - DNA, 25 bp, Homo sapien
cgtgaggttggggaggcgatgccag

SEQ ID NO: 5268242 - DNA, 25 bp, Homo sapien
tgaggttggggaggcgatgccagct

SEQ ID NO: 5268243 - DNA, 25 bp, Homo sapien
acagtgaccggggacccagcccctg

SEQ ID NO: 5268244 - DNA, 25 bp, Homo sapien
gggatgcagtggtggcaccaggagt

SEQ ID NO: 5268245 - DNA, 25 bp, Homo sapien
accaggagtgggcacacagtgaccg

SEQ ID NO: 5268246 - DNA, 25 bp, Homo sapien
tggtggcaccaggagtgggcacaca

SEQ ID NO: 5268247 - DNA, 25 bp, Homo sapien
gcagcgtgcggcacagtgccagctt

SEQ ID NO: 5268248 - DNA, 25 bp, Homo sapien
caggaattgggttactcaatggaga

SEQ ID NO: 5268249 - DNA, 25 bp, Homo sapien
gtccgcaagcgagaggcgagcacca

SEQ ID NO: 5268250 - DNA, 25 bp, Homo sapien
tttagaaggattcaggatacccagc

SEQ ID NO: 5268251 - DNA, 25 bp, Homo sapien
cacgagtttgttcagcttgtaagca

SEQ ID NO: 5268252 - DNA, 25 bp, Homo sapien
aagcaggtggcgtgacagtcaagca

SEQ ID NO: 5268253 - DNA, 25 bp, Homo sapien
ttgtgtagaacaagccaggcaggct

SEQ ID NO: 5268254 - DNA, 25 bp, Homo sapien
cagggatgtgaagtcgctggcacac

SEQ ID NO: 5268255 - DNA, 25 bp, Homo sapien
agtgtgctgttgttcccggactggc

SEQ ID NO: 5268256 - DNA, 25 bp, Homo sapien
gcacagcgtctctgctcggctcttt

SEQ ID NO: 5268257 - DNA, 25 bp, Homo sapien
ggactcgcctttctgcggagtggct

SEQ ID NO: 5268258 - DNA, 25 bp, Homo sapien
tctcccatgttatgaggacctccat

SEQ ID NO: 5268259 - DNA, 25 bp, Homo sapien
tatacagtgcatattggcggcgcac

SEQ ID NO: 5268260 - DNA, 25 bp, Homo sapien
ttctagatttcactgtcatcccacc

SEQ ID NO: 5268261 - DNA, 25 bp, Homo sapien
acaggcgcggccttcgttgtccgta

SEQ ID NO: 5268262 - DNA, 25 bp, Homo sapien
ccagacagatgggagagacaggcgc

SEQ ID NO: 5268263 - DNA, 25 bp, Homo sapien
tacgatttgcctgcttgcttctcct

SEQ ID NO: 5268264 - DNA, 25 bp, Homo sapien
ttgcttctcctgttcagtcgtttct

SEQ ID NO: 5268265 - DNA, 25 bp, Homo sapien
cctgttcagtcgtttctttggaagg

SEQ ID NO: 5268266 - DNA, 25 bp, Homo sapien
tgttcagtcgtttctttggaaggca

SEQ ID NO: 5268267 - DNA, 25 bp, Homo sapien
cgaggcgtgcgagaacgagagaagt

SEQ ID NO: 5268268 - DNA, 25 bp, Homo sapien
cggagcgaggcgtgcgagaacgaga

SEQ ID NO: 5268269 - DNA, 25 bp, Homo sapien
cgtgcgagaacgagagaagtctggt

SEQ ID NO: 5268270 - DNA, 25 bp, Homo sapien
ggttgtggaggaaaagcggagcgag

SEQ ID NO: 5268271 - DNA, 25 bp, Homo sapien
tgcgcagtggccaccactgagttgt

SEQ ID NO: 5268272 - DNA, 25 bp, Homo sapien
ctgcgcagtggccaccactgagttg

SEQ ID NO: 5268273 - DNA, 25 bp, Homo sapien
cacctcgtcctttgtagaaatggga

SEQ ID NO: 5268274 - DNA, 25 bp, Homo sapien
ggatcacagggtaatggatctggaa

SEQ ID NO: 5268275 - DNA, 25 bp, Homo sapien
ggaagtgcacctcgtcctttgtaga

SEQ ID NO: 5268276 - DNA, 25 bp, Homo sapien
tcacagggtaatggatctggaaatc

SEQ ID NO: 5268277 - DNA, 25 bp, Homo sapien
agatgcagagaataggcaaccactc

SEQ ID NO: 5268278 - DNA, 25 bp, Homo sapien
tgcagagaataggcaaccactcttc

SEQ ID NO: 5268279 - DNA, 25 bp, Homo sapien
atgcagagaataggcaaccactctt

SEQ ID NO: 5268280 - DNA, 25 bp, Homo sapien
gatgcagagaataggcaaccactct

SEQ ID NO: 5268281 - DNA, 25 bp, Homo sapien
tccggcctctgcaataaccaactga

SEQ ID NO: 5268282 - DNA, 25 bp, Homo sapien
tctgataatcgtggctgtttccgtc

SEQ ID NO: 5268283 - DNA, 25 bp, Homo sapien
ttccgtcagctgtaagtgctctgtt

SEQ ID NO: 5268284 - DNA, 25 bp, Homo sapien
tagggaatgagcatgacttccggcc

SEQ ID NO: 5268285 - DNA, 25 bp, Homo sapien
cttgctagctgggtgctagtggata

SEQ ID NO: 5268286 - DNA, 25 bp, Homo sapien
cttctgcccgtgggcttgctagctg

SEQ ID NO: 5268287 - DNA, 25 bp, Homo sapien
gccctgccaactcccctggcccact

SEQ ID NO: 5268288 - DNA, 25 bp, Homo sapien
tagctgggtgctagtggatagcttt

SEQ ID NO: 5268289 - DNA, 25 bp, Homo sapien
tgatgaccggtcacgaacatctgtg

SEQ ID NO: 5268290 - DNA, 25 bp, Homo sapien
ggcagttccctgatgaccggtcacg

SEQ ID NO: 5268291 - DNA, 25 bp, Homo sapien
cacgaacatctgtggcttccatggc

SEQ ID NO: 5268292 - DNA, 25 bp, Homo sapien
catggcattatgctgtggagactca

SEQ ID NO: 5268293 - DNA, 25 bp, Homo sapien
tcaacttcgcctgggcatgatgacg

SEQ ID NO: 5268294 - DNA, 25 bp, Homo sapien
gtcctgggaaccactgcagtcctgg

SEQ ID NO: 5268295 - DNA, 25 bp, Homo sapien
ggtcacgatgctgtgcatgacgaca

SEQ ID NO: 5268296 - DNA, 25 bp, Homo sapien
catgatgacgctggtcacgatgctg

SEQ ID NO: 5268297 - DNA, 25 bp, Homo sapien
tggggggcatgatgacggggggcat

SEQ ID NO: 5268298 - DNA, 25 bp, Homo sapien
gcatgatgacggggggcatgacgat

SEQ ID NO: 5268299 - DNA, 25 bp, Homo sapien
tgatgacggggggcatgacgatggg

SEQ ID NO: 5268300 - DNA, 25 bp, Homo sapien
gggcatgatgacggggggcatgacg

SEQ ID NO: 5268301 - DNA, 25 bp, Homo sapien
tctgggcataataacggtagatcgg

SEQ ID NO: 5268302 - DNA, 25 bp, Homo sapien
gatctgggcataataacggtagatc

SEQ ID NO: 5268303 - DNA, 25 bp, Homo sapien
ctgggcataataacggtagatcggg

SEQ ID NO: 5268304 - DNA, 25 bp, Homo sapien
gtggatctgggcataataacggtag

SEQ ID NO: 5268305 - DNA, 25 bp, Homo sapien
catgacaacagcgtgaatctgggca

SEQ ID NO: 5268306 - DNA, 25 bp, Homo sapien
ctctgggcacaacgatgctgggcat

SEQ ID NO: 5268307 - DNA, 25 bp, Homo sapien
tgggcacgacgatgctgggcacaat

SEQ ID NO: 5268308 - DNA, 25 bp, Homo sapien
cataatgactctgggcacgatgacg

SEQ ID NO: 5268309 - DNA, 25 bp, Homo sapien
gctcctgaaggggaggagcatccct

SEQ ID NO: 5268310 - DNA, 25 bp, Homo sapien
agcgggacctgggtgtgacagccct

SEQ ID NO: 5268311 - DNA, 25 bp, Homo sapien
caggtgaagcggctgccccgcaggg

SEQ ID NO: 5268312 - DNA, 25 bp, Homo sapien
tgacgtttggaaggccctccatcca

SEQ ID NO: 5268313 - DNA, 25 bp, Homo sapien
tgggtgatcccagtctatggccaag

SEQ ID NO: 5268314 - DNA, 25 bp, Homo sapien
ccccgcagggttctagagagctggt

SEQ ID NO: 5268315 - DNA, 25 bp, Homo sapien
cgagagggctcggaggggcccctgc

SEQ ID NO: 5268316 - DNA, 25 bp, Homo sapien
gctgacacaggcgagagggctcgga

SEQ ID NO: 5268317 - DNA, 25 bp, Homo sapien
tcacggctgacacaggcgagagggc

SEQ ID NO: 5268318 - DNA, 25 bp, Homo sapien
gagagggctcggaggggcccctgct

SEQ ID NO: 5268319 - DNA, 25 bp, Homo sapien
tagaaatgcaggcttcccgcagttc

SEQ ID NO: 5268320 - DNA, 25 bp, Homo sapien
gctttgcacactctggtctcttggt

SEQ ID NO: 5268321 - DNA, 25 bp, Homo sapien
gtcctcccacaggaacacaatcctg

SEQ ID NO: 5268322 - DNA, 25 bp, Homo sapien
caggaacacaatcctgcgccatgtg

SEQ ID NO: 5268323 - DNA, 25 bp, Homo sapien
tggaagtctcacaggctggggccta

SEQ ID NO: 5268324 - DNA, 25 bp, Homo sapien
ctgtacccggggtggaagtctcaca

SEQ ID NO: 5268325 - DNA, 25 bp, Homo sapien
ggaagtctcacaggctggggcctac

SEQ ID NO: 5268326 - DNA, 25 bp, Homo sapien
gggtggaagtctcacaggctggggc

SEQ ID NO: 5268327 - DNA, 25 bp, Homo sapien
cagtgggggtgcagggtttggagcc

SEQ ID NO: 5268328 - DNA, 25 bp, Homo sapien
acagtgggggtgcagggtttggagc

SEQ ID NO: 5268329 - DNA, 25 bp, Homo sapien
ccacagtgggggtgcagggtttgga

SEQ ID NO: 5268330 - DNA, 25 bp, Homo sapien
cacagtgggggtgcagggtttggag

SEQ ID NO: 5268331 - DNA, 25 bp, Homo sapien
acgccatcagtgtgcgctcgcgctc

SEQ ID NO: 5268332 - DNA, 25 bp, Homo sapien
ctgagtgaaatccacgccatcagtg

SEQ ID NO: 5268333 - DNA, 25 bp, Homo sapien
ggtctgagtgaaatccacgccatca

SEQ ID NO: 5268334 - DNA, 25 bp, Homo sapien
ttggtctgagtgaaatccacgccat

SEQ ID NO: 5268335 - DNA, 25 bp, Homo sapien
tctctgaatcacacggccagatgtt

SEQ ID NO: 5268336 - DNA, 25 bp, Homo sapien
taaagcaaatccaaggtcatcgctc

SEQ ID NO: 5268337 - DNA, 25 bp, Homo sapien
agttgagagcatttggcctttagcc

SEQ ID NO: 5268338 - DNA, 25 bp, Homo sapien
cacacggccagatgttaaagcaaat

SEQ ID NO: 5268339 - DNA, 25 bp, Homo sapien
tgtctccggcgagtagagctcagct

SEQ ID NO: 5268340 - DNA, 25 bp, Homo sapien
tgtctttggacagaaggcccgagga

SEQ ID NO: 5268341 - DNA, 25 bp, Homo sapien
cagaacctctggaatagtgcggtgg

SEQ ID NO: 5268342 - DNA, 25 bp, Homo sapien
gcataaacattgaggctgtcccaac

SEQ ID NO: 5268343 - DNA, 25 bp, Homo sapien
ctgggacaacacgaaacagcagatg

SEQ ID NO: 5268344 - DNA, 25 bp, Homo sapien
gcctgggacaacacgaaacagcaga

SEQ ID NO: 5268345 - DNA, 25 bp, Homo sapien
gggacaacacgaaacagcagatgtg

SEQ ID NO: 5268346 - DNA, 25 bp, Homo sapien
ggcctgggacaacacgaaacagcag

SEQ ID NO: 5268347 - DNA, 25 bp, Homo sapien
catgactcagaacagcaggaacggg

SEQ ID NO: 5268348 - DNA, 25 bp, Homo sapien
gattgaagctgtttgttccagttgc

SEQ ID NO: 5268349 - DNA, 25 bp, Homo sapien
tgaagctgtttgttccagttgccct

SEQ ID NO: 5268350 - DNA, 25 bp, Homo sapien
gactcagaacagcaggaacgggtac

SEQ ID NO: 5268351 - DNA, 25 bp, Homo sapien
ggaagagcaggccagttggctccag

SEQ ID NO: 5268352 - DNA, 25 bp, Homo sapien
cgtggagagggattcagaggagggc

SEQ ID NO: 5268353 - DNA, 25 bp, Homo sapien
gtggagagggattcagaggagggca

SEQ ID NO: 5268354 - DNA, 25 bp, Homo sapien
ctgccgtggagagggattcagagga

SEQ ID NO: 5268355 - DNA, 25 bp, Homo sapien
gccgtggagagggattcagaggagg

SEQ ID NO: 5268356 - DNA, 25 bp, Homo sapien
ctgaacacaagtctgatctcgccgc

SEQ ID NO: 5268357 - DNA, 25 bp, Homo sapien
acaccctctccgatgctttcctggg

SEQ ID NO: 5268358 - DNA, 25 bp, Homo sapien
ctccacatctcctgcagcacggaga

SEQ ID NO: 5268359 - DNA, 25 bp, Homo sapien
gcaagtgttgccagatgcttcctga

SEQ ID NO: 5268360 - DNA, 25 bp, Homo sapien
tgtgcgaagcagagtcgcctccgtc

SEQ ID NO: 5268361 - DNA, 25 bp, Homo sapien
ctaggtgccattaggatctccctct

SEQ ID NO: 5268362 - DNA, 25 bp, Homo sapien
cagcctaggtgccattaggatctcc

SEQ ID NO: 5268363 - DNA, 25 bp, Homo sapien
acacacagcgcctggtgtgcgaagc

SEQ ID NO: 5268364 - DNA, 25 bp, Homo sapien
tcagtggtgataaccagcagacagg

SEQ ID NO: 5268365 - DNA, 25 bp, Homo sapien
gctgagggcttaacactttgcggga

SEQ ID NO: 5268366 - DNA, 25 bp, Homo sapien
gactgggtgacagcggcattcttca

SEQ ID NO: 5268367 - DNA, 25 bp, Homo sapien
tccagtgatcagagagacaatcccg

SEQ ID NO: 5268368 - DNA, 25 bp, Homo sapien
aacaagtttattccggacctgagtg

SEQ ID NO: 5268369 - DNA, 25 bp, Homo sapien
gttccagggaatgatgtacagctgg

SEQ ID NO: 5268370 - DNA, 25 bp, Homo sapien
ttggaaggacatagcaaacaagttt

SEQ ID NO: 5268371 - DNA, 25 bp, Homo sapien
gagcccgtcagagcgaccaggcttt

SEQ ID NO: 5268372 - DNA, 25 bp, Homo sapien
cagtggtccccacttctggtctcac

SEQ ID NO: 5268373 - DNA, 25 bp, Homo sapien
tcagtggtccccacttctggtctca

SEQ ID NO: 5268374 - DNA, 25 bp, Homo sapien
cctctgaactctctggttcgctgag

SEQ ID NO: 5268375 - DNA, 25 bp, Homo sapien
tctggttcgctgaggtggccttgaa

SEQ ID NO: 5268376 - DNA, 25 bp, Homo sapien
gccttgaaatatagggccccagaca

SEQ ID NO: 5268377 - DNA, 25 bp, Homo sapien
gctgtccatcatccccgtgaggacg

SEQ ID NO: 5268378 - DNA, 25 bp, Homo sapien
acctgtcttggggcaattcccatgc

SEQ ID NO: 5268379 - DNA, 25 bp, Homo sapien
gcaacctgtcttggggcaattccca

SEQ ID NO: 5268380 - DNA, 25 bp, Homo sapien
cagcaacctgtcttggggcaattcc

SEQ ID NO: 5268381 - DNA, 25 bp, Homo sapien
gtcttggggcaattcccatgctgcc

SEQ ID NO: 5268382 - DNA, 25 bp, Homo sapien
aaatttgataaccaatccaatgcca

SEQ ID NO: 5268383 - DNA, 25 bp, Homo sapien
gataaccaatccaatgccaagtctg

SEQ ID NO: 5268384 - DNA, 25 bp, Homo sapien
caggctctgctgatgatggtgcagt

SEQ ID NO: 5268385 - DNA, 25 bp, Homo sapien
cctgtgagttacaggcaggagagga

SEQ ID NO: 5268386 - DNA, 25 bp, Homo sapien
gcggcatccactgcccacaaagcct

SEQ ID NO: 5268387 - DNA, 25 bp, Homo sapien
ggcctcggggatcctgcagggtctg

SEQ ID NO: 5268388 - DNA, 25 bp, Homo sapien
ctctgcttccatgtgcggactcctg

SEQ ID NO: 5268389 - DNA, 25 bp, Homo sapien
ggtctggggtgctgcccacagagtg

SEQ ID NO: 5268390 - DNA, 25 bp, Homo sapien
gctgcctggaatctctcgggaacct

SEQ ID NO: 5268391 - DNA, 25 bp, Homo sapien
tgagaacggccccttataccgccag

SEQ ID NO: 5268392 - DNA, 25 bp, Homo sapien
ccactgtggatacttctgggatttg

SEQ ID NO: 5268393 - DNA, 25 bp, Homo sapien
ctcatggcgcaagagtcgtggagct

SEQ ID NO: 5268394 - DNA, 25 bp, Homo sapien
cacagggcggaagtgtttacgccaa

SEQ ID NO: 5268395 - DNA, 25 bp, Homo sapien
aagtgtttacgccaaggccctgcag

SEQ ID NO: 5268396 - DNA, 25 bp, Homo sapien
acagggcggaagtgtttacgccaag

SEQ ID NO: 5268397 - DNA, 25 bp, Homo sapien
cggaagtgtttacgccaaggccctg

SEQ ID NO: 5268398 - DNA, 25 bp, Homo sapien
ctaaagggaggttcctgagcccgca

SEQ ID NO: 5268399 - DNA, 25 bp, Homo sapien
taaagggaggttcctgagcccgcag

SEQ ID NO: 5268400 - DNA, 25 bp, Homo sapien
gcgtgtgtcttcagtcccccgctgc

SEQ ID NO: 5268401 - DNA, 25 bp, Homo sapien
tgagcgtgtgtcttcagtcccccgc

SEQ ID NO: 5268402 - DNA, 25 bp, Homo sapien
gagcgtgtgtcttcagtcccccgct

SEQ ID NO: 5268403 - DNA, 25 bp, Homo sapien
gtgtgtcttcagtcccccgctgcac

SEQ ID NO: 5268404 - DNA, 25 bp, Homo sapien
gaatgaatgagcacagaaccaggtg

SEQ ID NO: 5268405 - DNA, 25 bp, Homo sapien
cgtctgtgcatctgggagctctgca

SEQ ID NO: 5268406 - DNA, 25 bp, Homo sapien
ggctttccgctatcagtcacgtttg

SEQ ID NO: 5268407 - DNA, 25 bp, Homo sapien
gtgacactcatcgagctccagcgct

SEQ ID NO: 5268408 - DNA, 25 bp, Homo sapien
atcctgccaacgtttccaagaaggg

SEQ ID NO: 5268409 - DNA, 25 bp, Homo sapien
gcacccatggtcttcggagtggtag

SEQ ID NO: 5268410 - DNA, 25 bp, Homo sapien
tagtgattgcataggctgtggtcat

SEQ ID NO: 5268411 - DNA, 25 bp, Homo sapien
ggcaagtcaggtccaaaatgacaca

SEQ ID NO: 5268412 - DNA, 25 bp, Homo sapien
ggatttccattgatgtcagtcttct

SEQ ID NO: 5268413 - DNA, 25 bp, Homo sapien
tccattgatgtcagtcttctcattc

SEQ ID NO: 5268414 - DNA, 25 bp, Homo sapien
tgtcagtcttctcattctgagcctt

SEQ ID NO: 5268415 - DNA, 25 bp, Homo sapien
cttctcattctgagccttgatgata

SEQ ID NO: 5268416 - DNA, 25 bp, Homo sapien
ccaggtgcttaatgtggccaaattt

SEQ ID NO: 5268417 - DNA, 25 bp, Homo sapien
tgaccaggtgcttaatgtggccaaa

SEQ ID NO: 5268418 - DNA, 25 bp, Homo sapien
gtgaccaggtgcttaatgtggccaa

SEQ ID NO: 5268419 - DNA, 25 bp, Homo sapien
gaccaggtgcttaatgtggccaaat

SEQ ID NO: 5268420 - DNA, 25 bp, Homo sapien
gacttccagccgtaacatgtagcct

SEQ ID NO: 5268421 - DNA, 25 bp, Homo sapien
tgtaccttcggtgtggacttccagc

SEQ ID NO: 5268422 - DNA, 25 bp, Homo sapien
cgttctgaatggcacgcgcctgaca

SEQ ID NO: 5268423 - DNA, 25 bp, Homo sapien
tgactggtggtctctacggaactac

SEQ ID NO: 5268424 - DNA, 25 bp, Homo sapien
cacggagcaggtggacgtcccgttc

SEQ ID NO: 5268425 - DNA, 25 bp, Homo sapien
gcggcaagtacgtggcggcgggccg

SEQ ID NO: 5268426 - DNA, 25 bp, Homo sapien
ttcaaggagctcgagtaagtgcgcc

SEQ ID NO: 5268427 - DNA, 25 bp, Homo sapien
ccctcttgggtctgagcgtggtcag

SEQ ID NO: 5268428 - DNA, 25 bp, Homo sapien
ttttgcagttatattcatatagttc

SEQ ID NO: 5268429 - DNA, 25 bp, Homo sapien
cttttgcagttatattcatatagtt

SEQ ID NO: 5268430 - DNA, 25 bp, Homo sapien
tcttttgcagttatattcatatagt

SEQ ID NO: 5268431 - DNA, 25 bp, Homo sapien
gctccatgcaggacacgccagcagc

SEQ ID NO: 5268432 - DNA, 25 bp, Homo sapien
tctgtgtctttggagcatcacccag

SEQ ID NO: 5268433 - DNA, 25 bp, Homo sapien
tgtctttggagcatcacccagagct

SEQ ID NO: 5268434 - DNA, 25 bp, Homo sapien
gcttccagaagcgttccgctgcctt

SEQ ID NO: 5268435 - DNA, 25 bp, Homo sapien
ctgacagcgtgtgagatgcccaaca

SEQ ID NO: 5268436 - DNA, 25 bp, Homo sapien
gagctttggccgacacacatgattt

SEQ ID NO: 5268437 - DNA, 25 bp, Homo sapien
gcctggaagtgcctgatgctcatga

SEQ ID NO: 5268438 - DNA, 25 bp, Homo sapien
cagtatcatgtcagcgtgcgtggcc

SEQ ID NO: 5268439 - DNA, 25 bp, Homo sapien
tctccatgatccatgcgaggggctg

SEQ ID NO: 5268440 - DNA, 25 bp, Homo sapien
agagcaccagaatgagggccttccc

SEQ ID NO: 5268441 - DNA, 25 bp, Homo sapien
ctcccagtgtcttgagtgaaggtgc

SEQ ID NO: 5268442 - DNA, 25 bp, Homo sapien
gcttccataggaagagcaccagaat

SEQ ID NO: 5268443 - DNA, 25 bp, Homo sapien
ctctggctcttagagtcagcaattt

SEQ ID NO: 5268444 - DNA, 25 bp, Homo sapien
tggttcttctgtggattggcctaga

SEQ ID NO: 5268445 - DNA, 25 bp, Homo sapien
gattctatgggacggcttctctggc

SEQ ID NO: 5268446 - DNA, 25 bp, Homo sapien
caggctccacaaaccgtctggctgt

SEQ ID NO: 5268447 - DNA, 25 bp, Homo sapien
ctgaaggatggtgggctctgtgttg

SEQ ID NO: 5268448 - DNA, 25 bp, Homo sapien
tgaaggatggtgggctctgtgttgc

SEQ ID NO: 5268449 - DNA, 25 bp, Homo sapien
cctccctaaagagccacatttggac

SEQ ID NO: 5268450 - DNA, 25 bp, Homo sapien
tccctgcctccctaaagagccacat

SEQ ID NO: 5268451 - DNA, 25 bp, Homo sapien
tgcctccctaaagagccacatttgg

SEQ ID NO: 5268452 - DNA, 25 bp, Homo sapien
tccctaaagagccacatttggacac

SEQ ID NO: 5268453 - DNA, 25 bp, Homo sapien
gcagagccttttctgtgaattcatc

SEQ ID NO: 5268454 - DNA, 25 bp, Homo sapien
gagccttttctgtgaattcatcctg

SEQ ID NO: 5268455 - DNA, 25 bp, Homo sapien
agcagagccttttctgtgaattcat

SEQ ID NO: 5268456 - DNA, 25 bp, Homo sapien
gccttttctgtgaattcatcctgca

SEQ ID NO: 5268457 - DNA, 25 bp, Homo sapien
caatttgcttcatatgagatcctcc

SEQ ID NO: 5268458 - DNA, 25 bp, Homo sapien
tatgagagttgatcaaaacaatttg

SEQ ID NO: 5268459 - DNA, 25 bp, Homo sapien
gatcctcctgtagtgaagtcctttc

SEQ ID NO: 5268460 - DNA, 25 bp, Homo sapien
ctgatgctagattctcgcaggcttt

SEQ ID NO: 5268461 - DNA, 25 bp, Homo sapien
ggccatggcactttcgtagatgaca

SEQ ID NO: 5268462 - DNA, 25 bp, Homo sapien
actcaacgtggggtgatgtcgtcga

SEQ ID NO: 5268463 - DNA, 25 bp, Homo sapien
aaaacacagttctgttaatgaggta

SEQ ID NO: 5268464 - DNA, 25 bp, Homo sapien
tgttaatgaggtatgcagctccttc

SEQ ID NO: 5268465 - DNA, 25 bp, Homo sapien
ggaggccctattgacaggttcaggc

SEQ ID NO: 5268466 - DNA, 25 bp, Homo sapien
ggagggtgtggattagcagcgttag

SEQ ID NO: 5268467 - DNA, 25 bp, Homo sapien
gcagcgttaggtgtggaaggaggcc

SEQ ID NO: 5268468 - DNA, 25 bp, Homo sapien
tcttctgtgctaagttgggtctggg

SEQ ID NO: 5268469 - DNA, 25 bp, Homo sapien
tcaccaggccatagtggttggcccg

SEQ ID NO: 5268470 - DNA, 25 bp, Homo sapien
cctttgtgtcttatctgcagtggac

SEQ ID NO: 5268471 - DNA, 25 bp, Homo sapien
gccatagtggttggcccggcctctc

SEQ ID NO: 5268472 - DNA, 25 bp, Homo sapien
tatctgcagtggacctgagactgaa

SEQ ID NO: 5268473 - DNA, 25 bp, Homo sapien
gattcagctgttcatgtgctacctt

SEQ ID NO: 5268474 - DNA, 25 bp, Homo sapien
catgccgttgtttgcagaacagttc

SEQ ID NO: 5268475 - DNA, 25 bp, Homo sapien
tctgattcagctgttcatgtgctac

SEQ ID NO: 5268476 - DNA, 25 bp, Homo sapien
aaaagcaatccaatcaccatgccgt

SEQ ID NO: 5268477 - DNA, 25 bp, Homo sapien
ggccgctgccctgggatgccgctgg

SEQ ID NO: 5268478 - DNA, 25 bp, Homo sapien
cctgggatgccgctggcagtgccag

SEQ ID NO: 5268479 - DNA, 25 bp, Homo sapien
ctgccctgggatgccgctggcagtg

SEQ ID NO: 5268480 - DNA, 25 bp, Homo sapien
ctgggatgccgctggcagtgccagg

SEQ ID NO: 5268481 - DNA, 25 bp, Homo sapien
ctcctttgcgaagtttgtcacattt

SEQ ID NO: 5268482 - DNA, 25 bp, Homo sapien
cctttgcgaagtttgtcacatttag

SEQ ID NO: 5268483 - DNA, 25 bp, Homo sapien
tcctttgcgaagtttgtcacattta

SEQ ID NO: 5268484 - DNA, 25 bp, Homo sapien
ttagccatttgaaggtcagcactgg

SEQ ID NO: 5268485 - DNA, 25 bp, Homo sapien
cctctaggaggcgttcggaagtaag

SEQ ID NO: 5268486 - DNA, 25 bp, Homo sapien
agactctcgcctttaggacagccag

SEQ ID NO: 5268487 - DNA, 25 bp, Homo sapien
tagtctgtccgattgggacatcgtg

SEQ ID NO: 5268488 - DNA, 25 bp, Homo sapien
cgtgctggccacgatcggagaaaaa

SEQ ID NO: 5268489 - DNA, 25 bp, Homo sapien
agtgatggtcccctgatggtagacg

SEQ ID NO: 5268490 - DNA, 25 bp, Homo sapien
aaggagagttaggaggaggccgccg

SEQ ID NO: 5268491 - DNA, 25 bp, Homo sapien
ctgagaagtgggaaaacgccgtgca

SEQ ID NO: 5268492 - DNA, 25 bp, Homo sapien
gatgcttctgggcactaatgaggtg

SEQ ID NO: 5268493 - DNA, 25 bp, Homo sapien
gcgacgagcaggtggaagttagatg

SEQ ID NO: 5268494 - DNA, 25 bp, Homo sapien
gtttgtgcacaagtctgtaccggga

SEQ ID NO: 5268495 - DNA, 25 bp, Homo sapien
acgagcaggtggaagttagatgttt

SEQ ID NO: 5268496 - DNA, 25 bp, Homo sapien
cacaagtctgtaccgggaatacctc

SEQ ID NO: 5268497 - DNA, 25 bp, Homo sapien
aagtaacttgtttctgattctggcg

SEQ ID NO: 5268498 - DNA, 25 bp, Homo sapien
gacggcccgagctgtaaacagagca

SEQ ID NO: 5268499 - DNA, 25 bp, Homo sapien
gtcttctggcattaacaagggcaca

SEQ ID NO: 5268500 - DNA, 25 bp, Homo sapien
ggtgacggcccgagctgtaaacaga

SEQ ID NO: 5268501 - DNA, 25 bp, Homo sapien
gaatggtgtgagtaggagaggaagt

SEQ ID NO: 5268502 - DNA, 25 bp, Homo sapien
agatgcacttctgagaatggtgtga

SEQ ID NO: 5268503 - DNA, 25 bp, Homo sapien
tgcacttctgagaatggtgtgagta

SEQ ID NO: 5268504 - DNA, 25 bp, Homo sapien
tggtgtgagtaggagaggaagttta

SEQ ID NO: 5268505 - DNA, 25 bp, Homo sapien
cagtccttgtaactgtttacgtgat

SEQ ID NO: 5268506 - DNA, 25 bp, Homo sapien
cttgtaactgtttacgtgatcctcc

SEQ ID NO: 5268507 - DNA, 25 bp, Homo sapien
gtgatcctcctatatccctgatcat

SEQ ID NO: 5268508 - DNA, 25 bp, Homo sapien
acgtgatcctcctatatccctgatc

SEQ ID NO: 5268509 - DNA, 25 bp, Homo sapien
caaggctcctagctgttttgaaagc

SEQ ID NO: 5268510 - DNA, 25 bp, Homo sapien
gcacaaacttgacacggagactctc

SEQ ID NO: 5268511 - DNA, 25 bp, Homo sapien
cttgacacggagactctcacagagt

SEQ ID NO: 5268512 - DNA, 25 bp, Homo sapien
tgttgggaagttcacactggcgttt

SEQ ID NO: 5268513 - DNA, 25 bp, Homo sapien
agtggttgtgaataggacggaaggc

SEQ ID NO: 5268514 - DNA, 25 bp, Homo sapien
gaaactcatttgtcctgaactaagt

SEQ ID NO: 5268515 - DNA, 25 bp, Homo sapien
tcatcaaagtgggaagcttcagagt

SEQ ID NO: 5268516 - DNA, 25 bp, Homo sapien
aataggacggaaggcttagcttgtg

SEQ ID NO: 5268517 - DNA, 25 bp, Homo sapien
agctgtggctgtgagctaggcagct

SEQ ID NO: 5268518 - DNA, 25 bp, Homo sapien
cagagctcacgtttggtggtgaaag

SEQ ID NO: 5268519 - DNA, 25 bp, Homo sapien
gcgagtgcatttcgcaggcagccgt

SEQ ID NO: 5268520 - DNA, 25 bp, Homo sapien
aaaacacaagccagcgcggaatcgg

SEQ ID NO: 5268521 - DNA, 25 bp, Homo sapien
gatctgagatcacaagtcgcttcca

SEQ ID NO: 5268522 - DNA, 25 bp, Homo sapien
ttcctccatgcagggagcgtgtgtc

SEQ ID NO: 5268523 - DNA, 25 bp, Homo sapien
gagattatgcaacttatcgtccaca

SEQ ID NO: 5268524 - DNA, 25 bp, Homo sapien
cagtgtgggttcttgctcggtcttc

SEQ ID NO: 5268525 - DNA, 25 bp, Homo sapien
cagtggaagccagcgcaggacgctt

SEQ ID NO: 5268526 - DNA, 25 bp, Homo sapien
aaatgtatcatttttagctaagaag

SEQ ID NO: 5268527 - DNA, 25 bp, Homo sapien
taagaagtggactttgaggactttg

SEQ ID NO: 5268528 - DNA, 25 bp, Homo sapien
tagctaagaagtggactttgaggac

SEQ ID NO: 5268529 - DNA, 25 bp, Homo sapien
ttaaaagtttggcggcagtcaggga

SEQ ID NO: 5268530 - DNA, 25 bp, Homo sapien
gctgtgtaatgagctcccggattca

SEQ ID NO: 5268531 - DNA, 25 bp, Homo sapien
ctgtgtaatgagctcccggattcat

SEQ ID NO: 5268532 - DNA, 25 bp, Homo sapien
aggcactgcgcagccgttcccacat

SEQ ID NO: 5268533 - DNA, 25 bp, Homo sapien
gggagcaaacgaaggcatcccgagc

SEQ ID NO: 5268534 - DNA, 25 bp, Homo sapien
gaacattaatgacgggagacaggac

SEQ ID NO: 5268535 - DNA, 25 bp, Homo sapien
aaggcatcccgagcttcaccgtgca

SEQ ID NO: 5268536 - DNA, 25 bp, Homo sapien
tttgtgtacgtctactgtctcttct

SEQ ID NO: 5268537 - DNA, 25 bp, Homo sapien
gagctgtttgtgtacgtctactgtc

SEQ ID NO: 5268538 - DNA, 25 bp, Homo sapien
ttcctacgccgtccaaagcacagtt

SEQ ID NO: 5268539 - DNA, 25 bp, Homo sapien
ttgtttgtccttcctacgccgtcca

SEQ ID NO: 5268540 - DNA, 25 bp, Homo sapien
tcattttggtgtcatcgttagtgcc

SEQ ID NO: 5268541 - DNA, 25 bp, Homo sapien
gatattaggtgaccagtgtgtggca

SEQ ID NO: 5268542 - DNA, 25 bp, Homo sapien
tttcatatcaccttgcacacaggag

SEQ ID NO: 5268543 - DNA, 25 bp, Homo sapien
cacacaggagtaactgatcttgagc

SEQ ID NO: 5268544 - DNA, 25 bp, Homo sapien
aaggtgcagcttttatgattgcctg

SEQ ID NO: 5268545 - DNA, 25 bp, Homo sapien
ggtgcagcttttatgattgcctgga

SEQ ID NO: 5268546 - DNA, 25 bp, Homo sapien
gaaggtgcagcttttatgattgcct

SEQ ID NO: 5268547 - DNA, 25 bp, Homo sapien
aggtgcagcttttatgattgcctgg

SEQ ID NO: 5268548 - DNA, 25 bp, Homo sapien
ggtgcttccccctagaagcgctgct

SEQ ID NO: 5268549 - DNA, 25 bp, Homo sapien
ctgccgtcagcaatagctctgtcct

SEQ ID NO: 5268550 - DNA, 25 bp, Homo sapien
cgtcagcaatagctctgtcctcagc

SEQ ID NO: 5268551 - DNA, 25 bp, Homo sapien
gcagcggaaggtgcttccccctaga

SEQ ID NO: 5268552 - DNA, 25 bp, Homo sapien
gaggggaacacgtgtgagctgcgtc

SEQ ID NO: 5268553 - DNA, 25 bp, Homo sapien
tgtgagctgcgtcttgcctatgcac

SEQ ID NO: 5268554 - DNA, 25 bp, Homo sapien
tgcctatgcacagagcctctggtgt

SEQ ID NO: 5268555 - DNA, 25 bp, Homo sapien
cttgcctatgcacagagcctctggt

SEQ ID NO: 5268556 - DNA, 25 bp, Homo sapien
tgagcctcccatgcagatgtgtccc

SEQ ID NO: 5268557 - DNA, 25 bp, Homo sapien
cctctgatgtggatgtttcccgccc

SEQ ID NO: 5268558 - DNA, 25 bp, Homo sapien
gaacctctcgtgcagatgtgtcccg

SEQ ID NO: 5268559 - DNA, 25 bp, Homo sapien
tgtgtcccgcctgtgcacggaacct

SEQ ID NO: 5268560 - DNA, 25 bp, Homo sapien
ttgcccttttctcagcatcgggcat

SEQ ID NO: 5268561 - DNA, 25 bp, Homo sapien
tttgcccttttctcagcatcgggca

SEQ ID NO: 5268562 - DNA, 25 bp, Homo sapien
atttgcccttttctcagcatcgggc

SEQ ID NO: 5268563 - DNA, 25 bp, Homo sapien
gatctatgttgcaagtgttgcttcc

SEQ ID NO: 5268564 - DNA, 25 bp, Homo sapien
ttccagatctatgttgcaagtgttg

SEQ ID NO: 5268565 - DNA, 25 bp, Homo sapien
ccagatctatgttgcaagtgttgct

SEQ ID NO: 5268566 - DNA, 25 bp, Homo sapien
ttttccagatctatgttgcaagtgt

SEQ ID NO: 5268567 - DNA, 25 bp, Homo sapien
aacctgccaggttgatgagtccgac

SEQ ID NO: 5268568 - DNA, 25 bp, Homo sapien
attcgaatccggcagcagctcccgg

SEQ ID NO: 5268569 - DNA, 25 bp, Homo sapien
tcattgccatactgagtcgtgtgtg

SEQ ID NO: 5268570 - DNA, 25 bp, Homo sapien
ttgacagcggataggaggaaacacc

SEQ ID NO: 5268571 - DNA, 25 bp, Homo sapien
taaacagtcgactcttcctgtgttg

SEQ ID NO: 5268572 - DNA, 25 bp, Homo sapien
ggctggaggtgtatagctctgtaaa

SEQ ID NO: 5268573 - DNA, 25 bp, Homo sapien
ctgctgccttgagcagaaaggctgt

SEQ ID NO: 5268574 - DNA, 25 bp, Homo sapien
tctgtaaagtctgtaaacagtcgac

SEQ ID NO: 5268575 - DNA, 25 bp, Homo sapien
catcttctgaggttcgaaggtcccc

SEQ ID NO: 5268576 - DNA, 25 bp, Homo sapien
tgaagcgtgctagctggcactcgct

SEQ ID NO: 5268577 - DNA, 25 bp, Homo sapien
tgctgatcttgaagcgtgctagctg

SEQ ID NO: 5268578 - DNA, 25 bp, Homo sapien
cactcgctgacaggctgcatcttct

SEQ ID NO: 5268579 - DNA, 25 bp, Homo sapien
cagagctgcctgaaggctacatatg

SEQ ID NO: 5268580 - DNA, 25 bp, Homo sapien
gacaccaaaaggcaaagccacgtgg

SEQ ID NO: 5268581 - DNA, 25 bp, Homo sapien
gggccttgttggacaccaaaaggca

SEQ ID NO: 5268582 - DNA, 25 bp, Homo sapien
aaggctacatatggagtggaggaca

SEQ ID NO: 5268583 - DNA, 25 bp, Homo sapien
cttctgattttctcctcttgctggt

SEQ ID NO: 5268584 - DNA, 25 bp, Homo sapien
tctgattttctcctcttgctggtaa

SEQ ID NO: 5268585 - DNA, 25 bp, Homo sapien
ttctgattttctcctcttgctggta

SEQ ID NO: 5268586 - DNA, 25 bp, Homo sapien
tcttgccacttgcaacaccttgttt

SEQ ID NO: 5268587 - DNA, 25 bp, Homo sapien
gtagaatcaggtgcttcaaagtcct

SEQ ID NO: 5268588 - DNA, 25 bp, Homo sapien
aaattctgtagaatcaggtgcttca

SEQ ID NO: 5268589 - DNA, 25 bp, Homo sapien
tggaattcttgccacttgcaacacc

SEQ ID NO: 5268590 - DNA, 25 bp, Homo sapien
gcttcaccgcttcttctcagtttct

SEQ ID NO: 5268591 - DNA, 25 bp, Homo sapien
gcagtgtgtgtgcaacgcaaccgct

SEQ ID NO: 5268592 - DNA, 25 bp, Homo sapien
ggcctgtgatgctggctttagaaac

SEQ ID NO: 5268593 - DNA, 25 bp, Homo sapien
ggcacaggaacgcacggtcacgctg

SEQ ID NO: 5268594 - DNA, 25 bp, Homo sapien
tgatcaaagatcgtgtgctttggac

SEQ ID NO: 5268595 - DNA, 25 bp, Homo sapien
gctttggacatatgactgcaccgag

SEQ ID NO: 5268596 - DNA, 25 bp, Homo sapien
ggttttctcctatttgtagacagcc

SEQ ID NO: 5268597 - DNA, 25 bp, Homo sapien
gactgcaccgagaaggaacatttcc

SEQ ID NO: 5268598 - DNA, 25 bp, Homo sapien
aagtaggtctttcatttgcgtctga

SEQ ID NO: 5268599 - DNA, 25 bp, Homo sapien
ccactgagtcttatatgtgctaagc

SEQ ID NO: 5268600 - DNA, 25 bp, Homo sapien
tgctgtgtgccatataccatttcca

SEQ ID NO: 5268601 - DNA, 25 bp, Homo sapien
tgtcctacacgttttgtgtgctgtg

SEQ ID NO: 5268602 - DNA, 25 bp, Homo sapien
tcaaggcagaattgtcggagaagat

SEQ ID NO: 5268603 - DNA, 25 bp, Homo sapien
gcccgtggacttcgcaatacctgaa

SEQ ID NO: 5268604 - DNA, 25 bp, Homo sapien
tttcctgctaagttgctgaattggc

SEQ ID NO: 5268605 - DNA, 25 bp, Homo sapien
tacctgaaatcaaggcagaattgtc

SEQ ID NO: 5268606 - DNA, 25 bp, Homo sapien
ccattggaatgagactcagttttgt

SEQ ID NO: 5268607 - DNA, 25 bp, Homo sapien
ggccaagtgctgtccggaatgtgga

SEQ ID NO: 5268608 - DNA, 25 bp, Homo sapien
agggaatccattggaatgagactca

SEQ ID NO: 5268609 - DNA, 25 bp, Homo sapien
agtgctgtccggaatgtggagggaa

SEQ ID NO: 5268610 - DNA, 25 bp, Homo sapien
cccacgcagccgtcctcaggacagt

SEQ ID NO: 5268611 - DNA, 25 bp, Homo sapien
tcaggacagccacaccgagagcagc

SEQ ID NO: 5268612 - DNA, 25 bp, Homo sapien
cagagcggccacctgagacgccgga

SEQ ID NO: 5268613 - DNA, 25 bp, Homo sapien
acgcagccgtcctcaggacagtcat

SEQ ID NO: 5268614 - DNA, 25 bp, Homo sapien
agtccttgagtgtcattgttcatgg

SEQ ID NO: 5268615 - DNA, 25 bp, Homo sapien
aagtccttgagtgtcattgttcatg

SEQ ID NO: 5268616 - DNA, 25 bp, Homo sapien
tgcaggcctcgtcctagggtggcag

SEQ ID NO: 5268617 - DNA, 25 bp, Homo sapien
tctgtcctccaggtaaccttttctg

SEQ ID NO: 5268618 - DNA, 25 bp, Homo sapien
gtcctccaggtaaccttttctgcag

SEQ ID NO: 5268619 - DNA, 25 bp, Homo sapien
caggcctcgtcctagggtggcagag

SEQ ID NO: 5268620 - DNA, 25 bp, Homo sapien
ggctgtcctggagaatgatgatgcc

SEQ ID NO: 5268621 - DNA, 25 bp, Homo sapien
gagaatgatgatgccgttgtctgga

SEQ ID NO: 5268622 - DNA, 25 bp, Homo sapien
aatgatgatgccgttgtctggatgt

SEQ ID NO: 5268623 - DNA, 25 bp, Homo sapien
cctggagaatgatgatgccgttgtc

SEQ ID NO: 5268624 - DNA, 25 bp, Homo sapien
tggctttcaagagataaaccagcac

SEQ ID NO: 5268625 - DNA, 25 bp, Homo sapien
cttggctttcaagagataaaccagc

SEQ ID NO: 5268626 - DNA, 25 bp, Homo sapien
tttcaagagataaaccagcaccttc

SEQ ID NO: 5268627 - DNA, 25 bp, Homo sapien
gctttcaagagataaaccagcacct

SEQ ID NO: 5268628 - DNA, 25 bp, Homo sapien
cctgtgagtctgagctcctatgctt

SEQ ID NO: 5268629 - DNA, 25 bp, Homo sapien
tgtgagtctgagctcctatgcttca

SEQ ID NO: 5268630 - DNA, 25 bp, Homo sapien
ctgcctgtgagtctgagctcctatg

SEQ ID NO: 5268631 - DNA, 25 bp, Homo sapien
gtgagtctgagctcctatgcttcat

SEQ ID NO: 5268632 - DNA, 25 bp, Homo sapien
gcatttccatagcttcagtgtttgg

SEQ ID NO: 5268633 - DNA, 25 bp, Homo sapien
tttggcagccagtcttcaacactca

SEQ ID NO: 5268634 - DNA, 25 bp, Homo sapien
tgcacatgcaagcatggtatttggc

SEQ ID NO: 5268635 - DNA, 25 bp, Homo sapien
ctttggcccaaatggtgcacatgca

SEQ ID NO: 5268636 - DNA, 25 bp, Homo sapien
caccttctgaatgatctagatccat

SEQ ID NO: 5268637 - DNA, 25 bp, Homo sapien
ctctccggttcttgtgtcaacacct

SEQ ID NO: 5268638 - DNA, 25 bp, Homo sapien
aatgatctagatccatacttcttcc

SEQ ID NO: 5268639 - DNA, 25 bp, Homo sapien
ggttcttgtgtcaacaccttctgaa

SEQ ID NO: 5268640 - DNA, 25 bp, Homo sapien
aagtcacatagtctaatcagtaaac

SEQ ID NO: 5268641 - DNA, 25 bp, Homo sapien
gcatggtcgctttccggagcctcat

SEQ ID NO: 5268642 - DNA, 25 bp, Homo sapien
agtgcttgttaaggctctgacgtgc

SEQ ID NO: 5268643 - DNA, 25 bp, Homo sapien
tctgacgtgcatacgcatggtcgct

SEQ ID NO: 5268644 - DNA, 25 bp, Homo sapien
gagacaggatcagagctataggcag

SEQ ID NO: 5268645 - DNA, 25 bp, Homo sapien
tatcggaatcatcccgcacaaggcg

SEQ ID NO: 5268646 - DNA, 25 bp, Homo sapien
aacgccctgaggtgtttgcacatct

SEQ ID NO: 5268647 - DNA, 25 bp, Homo sapien
ttgcacatctgtggctgagatagca

SEQ ID NO: 5268648 - DNA, 25 bp, Homo sapien
catcaggcactacttctggctgagg

SEQ ID NO: 5268649 - DNA, 25 bp, Homo sapien
gtgctttgagctgttgtttggaaca

SEQ ID NO: 5268650 - DNA, 25 bp, Homo sapien
tgtttggaacatttggcaaaatatg

SEQ ID NO: 5268651 - DNA, 25 bp, Homo sapien
ctgataatctactggcagatgtgga

SEQ ID NO: 5268652 - DNA, 25 bp, Homo sapien
aaatatgtgattggctgatgaagtc

SEQ ID NO: 5268653 - DNA, 25 bp, Homo sapien
gggcttttctaggtttgtgatctgc

SEQ ID NO: 5268654 - DNA, 25 bp, Homo sapien
tttgggatgagatcacacattgtca

SEQ ID NO: 5268655 - DNA, 25 bp, Homo sapien
tttttgggatgagatcacacattgt

SEQ ID NO: 5268656 - DNA, 25 bp, Homo sapien
tgcttccattgagttacaatgaggc

SEQ ID NO: 5268657 - DNA, 25 bp, Homo sapien
caatgaggcaccttcggtgccggtt

SEQ ID NO: 5268658 - DNA, 25 bp, Homo sapien
cattccagggattggaaagtcgaaa

SEQ ID NO: 5268659 - DNA, 25 bp, Homo sapien
atccgttcgtggttccgtcattcca

SEQ ID NO: 5268660 - DNA, 25 bp, Homo sapien
acagtgaaatccgttcgtggttccg

SEQ ID NO: 5268661 - DNA, 25 bp, Homo sapien
cacaggcagggtgaagtgacttaac

SEQ ID NO: 5268662 - DNA, 25 bp, Homo sapien
ccacacttcagtccttcagtggtct

SEQ ID NO: 5268663 - DNA, 25 bp, Homo sapien
gggtgctgtccattcgggtgctgcc

SEQ ID NO: 5268664 - DNA, 25 bp, Homo sapien
gtgctgtccattcgggtgctgcctc

SEQ ID NO: 5268665 - DNA, 25 bp, Homo sapien
gctgccacacttcagtccttcagtg

SEQ ID NO: 5268666 - DNA, 25 bp, Homo sapien
gctcccccatgagatccgcagcgat

SEQ ID NO: 5268667 - DNA, 25 bp, Homo sapien
ttctgactcccgaacgtcctctgct

SEQ ID NO: 5268668 - DNA, 25 bp, Homo sapien
ctctcttctgactcccgaacgtcct

SEQ ID NO: 5268669 - DNA, 25 bp, Homo sapien
catgagatccgcagcgatacagcat

SEQ ID NO: 5268670 - DNA, 25 bp, Homo sapien
aaacgttgccattgcacagctgaga

SEQ ID NO: 5268671 - DNA, 25 bp, Homo sapien
ctccaggtgagagcgggttctgtag

SEQ ID NO: 5268672 - DNA, 25 bp, Homo sapien
tctgtaggttacagctgtgctgcgg

SEQ ID NO: 5268673 - DNA, 25 bp, Homo sapien
agaaaggctgcttaggaaacgttgc

SEQ ID NO: 5268674 - DNA, 25 bp, Homo sapien
agatctggttctgcgggtgagagct

SEQ ID NO: 5268675 - DNA, 25 bp, Homo sapien
tggtggttctgcgggtgagatctgg

SEQ ID NO: 5268676 - DNA, 25 bp, Homo sapien
gtggtggttctgcgggtgagatctg

SEQ ID NO: 5268677 - DNA, 25 bp, Homo sapien
acataagaactagctgtggccaagg

SEQ ID NO: 5268678 - DNA, 25 bp, Homo sapien
cagattcgtgaggtgaaaggacacc

SEQ ID NO: 5268679 - DNA, 25 bp, Homo sapien
gagaaaagctgtccatccgcaagaa

SEQ ID NO: 5268680 - DNA, 25 bp, Homo sapien
cgcaagaacggccatactgcacact

SEQ ID NO: 5268681 - DNA, 25 bp, Homo sapien
ctttgggaaggcagattcgtgaggt

SEQ ID NO: 5268682 - DNA, 25 bp, Homo sapien
ccacctcattttgttgactgctttt

SEQ ID NO: 5268683 - DNA, 25 bp, Homo sapien
gatgccaccatatttccttatctcc

SEQ ID NO: 5268684 - DNA, 25 bp, Homo sapien
tccccacctcattttgttgactgct

SEQ ID NO: 5268685 - DNA, 25 bp, Homo sapien
acctcattttgttgactgcttttcc

SEQ ID NO: 5268686 - DNA, 25 bp, Homo sapien
tgtgaccgctggctcctgccgcagg

SEQ ID NO: 5268687 - DNA, 25 bp, Homo sapien
taccatcaacaagagcgtacttggg

SEQ ID NO: 5268688 - DNA, 25 bp, Homo sapien
tctccttcaaggaggttgcctagct

SEQ ID NO: 5268689 - DNA, 25 bp, Homo sapien
ttattggcatcctcgcttgtgttca

SEQ ID NO: 5268690 - DNA, 25 bp, Homo sapien
ggctgggcgcctaactcgattccat

SEQ ID NO: 5268691 - DNA, 25 bp, Homo sapien
agggctgggcgcctaactcgattcc

SEQ ID NO: 5268692 - DNA, 25 bp, Homo sapien
ctgggcgcctaactcgattccatgt

SEQ ID NO: 5268693 - DNA, 25 bp, Homo sapien
tagagggctgggcgcctaactcgat

SEQ ID NO: 5268694 - DNA, 25 bp, Homo sapien
gcaggcagggtgaccagttgcctct

SEQ ID NO: 5268695 - DNA, 25 bp, Homo sapien
tttgaggaaggaggtgactccgtcc

SEQ ID NO: 5268696 - DNA, 25 bp, Homo sapien
gttgcctctgcagaatccgaaccat

SEQ ID NO: 5268697 - DNA, 25 bp, Homo sapien
gaggaaggaggtgactccgtccacc

SEQ ID NO: 5268698 - DNA, 25 bp, Homo sapien
taagtcctcctctaagtaaccctga

SEQ ID NO: 5268699 - DNA, 25 bp, Homo sapien
ttgtgggttgaattagaatcactag

SEQ ID NO: 5268700 - DNA, 25 bp, Homo sapien
tagaggcagcaggttccactacgag

SEQ ID NO: 5268701 - DNA, 25 bp, Homo sapien
ggttgaattagaatcactagaggca

SEQ ID NO: 5268702 - DNA, 25 bp, Homo sapien
cactacgagggtcattttaatttca

SEQ ID NO: 5268703 - DNA, 25 bp, Homo sapien
attgctaaggcagggtgagtaagcc

SEQ ID NO: 5268704 - DNA, 25 bp, Homo sapien
ctaaggcagggtgagtaagcccgat

SEQ ID NO: 5268705 - DNA, 25 bp, Homo sapien
cagggtgagtaagcccgattccagg

SEQ ID NO: 5268706 - DNA, 25 bp, Homo sapien
gagtaagcccgattccaggagccag

SEQ ID NO: 5268707 - DNA, 25 bp, Homo sapien
tcccaggggtgctcgtgacccagtc

SEQ ID NO: 5268708 - DNA, 25 bp, Homo sapien
tgcaaggccccggcggattcccagg

SEQ ID NO: 5268709 - DNA, 25 bp, Homo sapien
caggggtgctcgtgacccagtccct

SEQ ID NO: 5268710 - DNA, 25 bp, Homo sapien
aggggtgctcgtgacccagtccctc

SEQ ID NO: 5268711 - DNA, 25 bp, Homo sapien
gtgggcccagtggctgctgttgcgc

SEQ ID NO: 5268712 - DNA, 25 bp, Homo sapien
ttcctgtgggcccagtggctgctgt

SEQ ID NO: 5268713 - DNA, 25 bp, Homo sapien
gggcccagtggctgctgttgcgcac

SEQ ID NO: 5268714 - DNA, 25 bp, Homo sapien
ctgtgtttcctgtgggcccagtggc

SEQ ID NO: 5268715 - DNA, 25 bp, Homo sapien
ttgcaccatggccaatataaggggg

SEQ ID NO: 5268716 - DNA, 25 bp, Homo sapien
caccatggccaatataagggggccc

SEQ ID NO: 5268717 - DNA, 25 bp, Homo sapien
tggccaatataagggggcccttgat

SEQ ID NO: 5268718 - DNA, 25 bp, Homo sapien
ataagggggcccttgatgtatagaa

SEQ ID NO: 5268719 - DNA, 25 bp, Homo sapien
gcattctgtcgtgatttcctgcaat

SEQ ID NO: 5268720 - DNA, 25 bp, Homo sapien
tctgtcgtgatttcctgcaatctct

SEQ ID NO: 5268721 - DNA, 25 bp, Homo sapien
tctctagtcgtggattcctgcctcc

SEQ ID NO: 5268722 - DNA, 25 bp, Homo sapien
ttcctgcaatctctagtcgtggatt

SEQ ID NO: 5268723 - DNA, 25 bp, Homo sapien
cccaatggcccactctgatgtaaga

SEQ ID NO: 5268724 - DNA, 25 bp, Homo sapien
cagacgctgttctagggcctcagaa

SEQ ID NO: 5268725 - DNA, 25 bp, Homo sapien
cagagacaggcaattaccagcgccc

SEQ ID NO: 5268726 - DNA, 25 bp, Homo sapien
ccagatagtgtaggaaacgtggacc

SEQ ID NO: 5268727 - DNA, 25 bp, Homo sapien
aacaggttgaaattaatgcaaagcc

SEQ ID NO: 5268728 - DNA, 25 bp, Homo sapien
ttcagctctctagtgctttcatgtc

SEQ ID NO: 5268729 - DNA, 25 bp, Homo sapien
cctaaaatgaaacgaggagcgtgcg

SEQ ID NO: 5268730 - DNA, 25 bp, Homo sapien
tgacatttgaaaggagtcctccaaa

SEQ ID NO: 5268731 - DNA, 25 bp, Homo sapien
ttgcttccctctcacaattgtcagc

SEQ ID NO: 5268732 - DNA, 25 bp, Homo sapien
tccgcgtgccccacatcttccttgt

SEQ ID NO: 5268733 - DNA, 25 bp, Homo sapien
agggagcctccccagcttgcttccc

SEQ ID NO: 5268734 - DNA, 25 bp, Homo sapien
cttgtctccttctccgcgtgcccca

SEQ ID NO: 5268735 - DNA, 25 bp, Homo sapien
atatgaaccgttttcagggtggccg

SEQ ID NO: 5268736 - DNA, 25 bp, Homo sapien
taatttctggctaactggctaaaca

SEQ ID NO: 5268737 - DNA, 25 bp, Homo sapien
cgtaggtttaactcacaggtgttgg

SEQ ID NO: 5268738 - DNA, 25 bp, Homo sapien
gaatctttagtgcagctcatcttcg

SEQ ID NO: 5268739 - DNA, 25 bp, Homo sapien
caacaagcttgcgagtaaagtgacc

SEQ ID NO: 5268740 - DNA, 25 bp, Homo sapien
gaaagcaccgtgtcttgaccgacga

SEQ ID NO: 5268741 - DNA, 25 bp, Homo sapien
gagtctaggaattacagccctgtgg

SEQ ID NO: 5268742 - DNA, 25 bp, Homo sapien
taatctagatggtgactggaagcca

SEQ ID NO: 5268743 - DNA, 25 bp, Homo sapien
gagactcgtgcttggctgccacgtg

SEQ ID NO: 5268744 - DNA, 25 bp, Homo sapien
gccacgtggcgccttgatttggttg

SEQ ID NO: 5268745 - DNA, 25 bp, Homo sapien
tgggagcgctgagagaagcctctgg

SEQ ID NO: 5268746 - DNA, 25 bp, Homo sapien
atgcacaaaccctttcccatgggag

SEQ ID NO: 5268747 - DNA, 25 bp, Homo sapien
tctctgaaaggcacgtaactgactg

SEQ ID NO: 5268748 - DNA, 25 bp, Homo sapien
agacaggttgggcttcaaaggccac

SEQ ID NO: 5268749 - DNA, 25 bp, Homo sapien
cttcctggaaatagaggccgttctc

SEQ ID NO: 5268750 - DNA, 25 bp, Homo sapien
gcaagaggacctagaaaatggccat

SEQ ID NO: 5268751 - DNA, 25 bp, Homo sapien
aatttccccataagaccaatgatgt

SEQ ID NO: 5268752 - DNA, 25 bp, Homo sapien
atttccccataagaccaatgatgtg

SEQ ID NO: 5268753 - DNA, 25 bp, Homo sapien
ataagaccaatgatgtgagtacaac

SEQ ID NO: 5268754 - DNA, 25 bp, Homo sapien
cataagaccaatgatgtgagtacaa

SEQ ID NO: 5268755 - DNA, 25 bp, Homo sapien
cttgagctcatggtggaggcgtttg

SEQ ID NO: 5268756 - DNA, 25 bp, Homo sapien
atataaaactagacttgagtatcag

SEQ ID NO: 5268757 - DNA, 25 bp, Homo sapien
tagagagggtttttcagtcagtctc

SEQ ID NO: 5268758 - DNA, 25 bp, Homo sapien
tggaggcgtttggagccatataaaa

SEQ ID NO: 5268759 - DNA, 25 bp, Homo sapien
gcctgagggtttccatgaatattga

SEQ ID NO: 5268760 - DNA, 25 bp, Homo sapien
ggtgtttacgctgctgaatatgcat

SEQ ID NO: 5268761 - DNA, 25 bp, Homo sapien
tctgcatattgattgcctgagggtt

SEQ ID NO: 5268762 - DNA, 25 bp, Homo sapien
gaaaggccaatggtgtttacgctgc

SEQ ID NO: 5268763 - DNA, 25 bp, Homo sapien
agagtggggttccaacaccttcctg

SEQ ID NO: 5268764 - DNA, 25 bp, Homo sapien
agctggtccaggagtaccttttctc

SEQ ID NO: 5268765 - DNA, 25 bp, Homo sapien
tttctccattgagagtggggttcca

SEQ ID NO: 5268766 - DNA, 25 bp, Homo sapien
ctggtccaggagtaccttttctcca

SEQ ID NO: 5268767 - DNA, 25 bp, Homo sapien
agaattgcaggcttaacaagccaaa

SEQ ID NO: 5268768 - DNA, 25 bp, Homo sapien
gcggctgtggctcgccgcttactgc

SEQ ID NO: 5268769 - DNA, 25 bp, Homo sapien
gcaggtgtgaaggtaataggcggct

SEQ ID NO: 5268770 - DNA, 25 bp, Homo sapien
actgttccccatgtcttggcccaga

SEQ ID NO: 5268771 - DNA, 25 bp, Homo sapien
tatctcttgccacgtttggaatttg

SEQ ID NO: 5268772 - DNA, 25 bp, Homo sapien
ccccatgttctccaacaagggcacc

SEQ ID NO: 5268773 - DNA, 25 bp, Homo sapien
gccaccagacaagtcatttgttatc

SEQ ID NO: 5268774 - DNA, 25 bp, Homo sapien
gctcagggttcagccaccagacaag

SEQ ID NO: 5268775 - DNA, 25 bp, Homo sapien
gggaacgctggcctctagacagcca

SEQ ID NO: 5268776 - DNA, 25 bp, Homo sapien
tgtgatctccctgcaagggggctcc

SEQ ID NO: 5268777 - DNA, 25 bp, Homo sapien
ctggcctctagacagccatggaggg

SEQ ID NO: 5268778 - DNA, 25 bp, Homo sapien
ccatggagggctatgcagggagtaa

SEQ ID NO: 5268779 - DNA, 25 bp, Homo sapien
aaccgtgggtctggcgtatttctgc

SEQ ID NO: 5268780 - DNA, 25 bp, Homo sapien
tgtttagaaactgccgcttgcaggc

SEQ ID NO: 5268781 - DNA, 25 bp, Homo sapien
ggagggaagacgcacaccctcttct

SEQ ID NO: 5268782 - DNA, 25 bp, Homo sapien
ttctctatggccgtgcagcgggctt

SEQ ID NO: 5268783 - DNA, 25 bp, Homo sapien
cccaccctcacagggtatgagtcag

SEQ ID NO: 5268784 - DNA, 25 bp, Homo sapien
gtattcagttattgcaacagaaagc

SEQ ID NO: 5268785 - DNA, 25 bp, Homo sapien
ggtattcagttattgcaacagaaag

SEQ ID NO: 5268786 - DNA, 25 bp, Homo sapien
actgatgagggctttggagcaatgc

SEQ ID NO: 5268787 - DNA, 25 bp, Homo sapien
agacactgatgagggctttggagca

SEQ ID NO: 5268788 - DNA, 25 bp, Homo sapien
agcaggcaggagggtggtggagccc

SEQ ID NO: 5268789 - DNA, 25 bp, Homo sapien
acagcaggcaggagggtggtggagc

SEQ ID NO: 5268790 - DNA, 25 bp, Homo sapien
aggcaggagggtggtggagcccaca

SEQ ID NO: 5268791 - DNA, 25 bp, Homo sapien
cttcaccctcctgatttcccacagc

SEQ ID NO: 5268792 - DNA, 25 bp, Homo sapien
tgtggggcaggagagtctctcagac

SEQ ID NO: 5268793 - DNA, 25 bp, Homo sapien
gtggggcaggagagtctctcagact

SEQ ID NO: 5268794 - DNA, 25 bp, Homo sapien
tggggcaggagagtctctcagactc

SEQ ID NO: 5268795 - DNA, 25 bp, Homo sapien
ctgtggggcaggagagtctctcaga

SEQ ID NO: 5268796 - DNA, 25 bp, Homo sapien
tgcacatcactgaggacagccatgg

SEQ ID NO: 5268797 - DNA, 25 bp, Homo sapien
ccaacctttgtgttgaggctagggc

SEQ ID NO: 5268798 - DNA, 25 bp, Homo sapien
tttgaatcacacgttaggcagctcc

SEQ ID NO: 5268799 - DNA, 25 bp, Homo sapien
tcactccgtgctaccttggctggaa

SEQ ID NO: 5268800 - DNA, 25 bp, Homo sapien
ctccatggccgtaggtgggttgctc

SEQ ID NO: 5268801 - DNA, 25 bp, Homo sapien
catggccgtaggtgggttgctctta

SEQ ID NO: 5268802 - DNA, 25 bp, Homo sapien
gccgtaggtgggttgctcttagtca

SEQ ID NO: 5268803 - DNA, 25 bp, Homo sapien
ccaagctccatggccgtaggtgggt

SEQ ID NO: 5268804 - DNA, 25 bp, Homo sapien
cactactgggtgttttggatctact

SEQ ID NO: 5268805 - DNA, 25 bp, Homo sapien
gacagaagcatggatggtaagagct

SEQ ID NO: 5268806 - DNA, 25 bp, Homo sapien
ggtaagagctgcttgtcttaaatct

SEQ ID NO: 5268807 - DNA, 25 bp, Homo sapien
caaggatgggttgatcactactggg

SEQ ID NO: 5268808 - DNA, 25 bp, Homo sapien
aagccaccaggacgacatatggtct

SEQ ID NO: 5268809 - DNA, 25 bp, Homo sapien
gaagccaccaggacgacatatggtc

SEQ ID NO: 5268810 - DNA, 25 bp, Homo sapien
agaagccaccaggacgacatatggt

SEQ ID NO: 5268811 - DNA, 25 bp, Homo sapien
cagaagccaccaggacgacatatgg

SEQ ID NO: 5268812 - DNA, 25 bp, Homo sapien
actgctgacggccctctgagaggct

SEQ ID NO: 5268813 - DNA, 25 bp, Homo sapien
gttgactgctgacggccctctgaga

SEQ ID NO: 5268814 - DNA, 25 bp, Homo sapien
gaagttgactgctgacggccctctg

SEQ ID NO: 5268815 - DNA, 25 bp, Homo sapien
gactgctgacggccctctgagaggc

SEQ ID NO: 5268816 - DNA, 25 bp, Homo sapien
aatgagtgcgctgctcttgtgtcca

SEQ ID NO: 5268817 - DNA, 25 bp, Homo sapien
ggagacttctgatttggagccttga

SEQ ID NO: 5268818 - DNA, 25 bp, Homo sapien
taaaaggcaagcttgcgctccagga

SEQ ID NO: 5268819 - DNA, 25 bp, Homo sapien
gatgtgcttttgaactcagacgcca

SEQ ID NO: 5268820 - DNA, 25 bp, Homo sapien
ttagaagttaccattgaagttgcaa

SEQ ID NO: 5268821 - DNA, 25 bp, Homo sapien
gagtgactcttagctatgagtttca

SEQ ID NO: 5268822 - DNA, 25 bp, Homo sapien
gatgttcatcagattagaagttacc

SEQ ID NO: 5268823 - DNA, 25 bp, Homo sapien
gaagaacactctccctgagaccaag

SEQ ID NO: 5268824 - DNA, 25 bp, Homo sapien
ctggatgaatgatgttgcggagcac

SEQ ID NO: 5268825 - DNA, 25 bp, Homo sapien
aactctggatgaatgatgttgcgga

SEQ ID NO: 5268826 - DNA, 25 bp, Homo sapien
tcagctgttgacaactctggatgaa

SEQ ID NO: 5268827 - DNA, 25 bp, Homo sapien
tgttgacaactctggatgaatgatg

SEQ ID NO: 5268828 - DNA, 25 bp, Homo sapien
gggcacgttatgttgtccacgtgaa

SEQ ID NO: 5268829 - DNA, 25 bp, Homo sapien
attatgttgcccatgtgatccacgg

SEQ ID NO: 5268830 - DNA, 25 bp, Homo sapien
tgatccacggggacgtgtaggcacg

SEQ ID NO: 5268831 - DNA, 25 bp, Homo sapien
ttgtccatgtgatccgtggggacgt

SEQ ID NO: 5268832 - DNA, 25 bp, Homo sapien
tgtgggcacgttatgttgtccacgt

SEQ ID NO: 5268833 - DNA, 25 bp, Homo sapien
gggcacgttatgttgtccacgtgat

SEQ ID NO: 5268834 - DNA, 25 bp, Homo sapien
tgtccacgtgatccacggggacgtg

SEQ ID NO: 5268835 - DNA, 25 bp, Homo sapien
gacgtgtgggcacgttatgttgtcc

SEQ ID NO: 5268836 - DNA, 25 bp, Homo sapien
ggatctcctccacggaggtgcttct

SEQ ID NO: 5268837 - DNA, 25 bp, Homo sapien
ggtcgtatgcagcagggatctcctc

SEQ ID NO: 5268838 - DNA, 25 bp, Homo sapien
cccacagaacactttcattgaacga

SEQ ID NO: 5268839 - DNA, 25 bp, Homo sapien
tttcaaacattctgtccgactgccc

SEQ ID NO: 5268840 - DNA, 25 bp, Homo sapien
catcgtcatcaaaaggcagcgtgcg

SEQ ID NO: 5268841 - DNA, 25 bp, Homo sapien
ggcatcgtcatcaaaaggcagcgtg

SEQ ID NO: 5268842 - DNA, 25 bp, Homo sapien
tcgtcatcaaaaggcagcgtgcgca

SEQ ID NO: 5268843 - DNA, 25 bp, Homo sapien
ctggcatcgtcatcaaaaggcagcg

SEQ ID NO: 5268844 - DNA, 25 bp, Homo sapien
tgaaactgcgtccaaaccttggcgg

SEQ ID NO: 5268845 - DNA, 25 bp, Homo sapien
accttggcggcaagcagtcttggac

SEQ ID NO: 5268846 - DNA, 25 bp, Homo sapien
tatgttctagcttcgtccaagtgag

SEQ ID NO: 5268847 - DNA, 25 bp, Homo sapien
caagtgagtctcattggcagaaatg

SEQ ID NO: 5268848 - DNA, 25 bp, Homo sapien
catgtcaccccagtagacacataag

SEQ ID NO: 5268849 - DNA, 25 bp, Homo sapien
gaagtgaataagaggccgtgcgtac

SEQ ID NO: 5268850 - DNA, 25 bp, Homo sapien
ccagtagacacataagcggaagtga

SEQ ID NO: 5268851 - DNA, 25 bp, Homo sapien
ttcaatactgcattcaatactgtcc

SEQ ID NO: 5268852 - DNA, 25 bp, Homo sapien
tgtggctgaggatcatcggtgttca

SEQ ID NO: 5268853 - DNA, 25 bp, Homo sapien
gaattccggcagttgcagagcttcc

SEQ ID NO: 5268854 - DNA, 25 bp, Homo sapien
tcatcggtgttcactggcagctgct

SEQ ID NO: 5268855 - DNA, 25 bp, Homo sapien
gcaaatggaattccggcagttgcag

SEQ ID NO: 5268856 - DNA, 25 bp, Homo sapien
tgtctgggttcctgtgggacgttat

SEQ ID NO: 5268857 - DNA, 25 bp, Homo sapien
ctgaagagggtctatttcacattgt

SEQ ID NO: 5268858 - DNA, 25 bp, Homo sapien
ttgattgtgtctgggttcctgtggg

SEQ ID NO: 5268859 - DNA, 25 bp, Homo sapien
cctgtgggacgttatgcttcttctt

SEQ ID NO: 5268860 - DNA, 25 bp, Homo sapien
actcattaccgggatcagaaccagt

SEQ ID NO: 5268861 - DNA, 25 bp, Homo sapien
taccgggatcagaaccagtaatacg

SEQ ID NO: 5268862 - DNA, 25 bp, Homo sapien
gaaaaactcattaccgggatcagaa

SEQ ID NO: 5268863 - DNA, 25 bp, Homo sapien
cagaaccagtaatacgatttttgaa

SEQ ID NO: 5268864 - DNA, 25 bp, Homo sapien
cattgggccatcgtagttgagtcta

SEQ ID NO: 5268865 - DNA, 25 bp, Homo sapien
tctatggtgtggatggacctcctca

SEQ ID NO: 5268866 - DNA, 25 bp, Homo sapien
tatggtccctagtacagtgcttaat

SEQ ID NO: 5268867 - DNA, 25 bp, Homo sapien
tcagcacagcgagacggactctctg

SEQ ID NO: 5268868 - DNA, 25 bp, Homo sapien
tgttggcgtccacgtgagttcctga

SEQ ID NO: 5268869 - DNA, 25 bp, Homo sapien
tggtgtgaaacagagtgacttgatc

SEQ ID NO: 5268870 - DNA, 25 bp, Homo sapien
tattgctatgtaggctgcagcagag

SEQ ID NO: 5268871 - DNA, 25 bp, Homo sapien
accatgacccggaaggcatacagaa

SEQ ID NO: 5268872 - DNA, 25 bp, Homo sapien
agtcttgttattcttggcagctgtt

SEQ ID NO: 5268873 - DNA, 25 bp, Homo sapien
tgttgtcaaagagtattcacctctc

SEQ ID NO: 5268874 - DNA, 25 bp, Homo sapien
tattcttggcagctgttgtcaaaga

SEQ ID NO: 5268875 - DNA, 25 bp, Homo sapien
tcaaagagtattcacctctcccctg

SEQ ID NO: 5268876 - DNA, 25 bp, Homo sapien
ctcccgactggcctgttaagctctt

SEQ ID NO: 5268877 - DNA, 25 bp, Homo sapien
actggcctgttaagctcttcctttg

SEQ ID NO: 5268878 - DNA, 25 bp, Homo sapien
ccgactggcctgttaagctcttcct

SEQ ID NO: 5268879 - DNA, 25 bp, Homo sapien
tggcctgttaagctcttcctttgag

SEQ ID NO: 5268880 - DNA, 25 bp, Homo sapien
cttttcagggaacaggcgctttgct

SEQ ID NO: 5268881 - DNA, 25 bp, Homo sapien
tgcttttcagggaacaggcgctttg

SEQ ID NO: 5268882 - DNA, 25 bp, Homo sapien
ggaacaggcgctttgctgccgccgc

SEQ ID NO: 5268883 - DNA, 25 bp, Homo sapien
tgccgccgcccctgcttcggttctc

SEQ ID NO: 5268884 - DNA, 25 bp, Homo sapien
tacctgtagtgttactgatgccaaa

SEQ ID NO: 5268885 - DNA, 25 bp, Homo sapien
ttgagggtagtcatctcaggcctac

SEQ ID NO: 5268886 - DNA, 25 bp, Homo sapien
gacaagctaaatgctggactacaga

SEQ ID NO: 5268887 - DNA, 25 bp, Homo sapien
gtcaaagagtataagtggtgtcatc

SEQ ID NO: 5268888 - DNA, 25 bp, Homo sapien
tctaatcataacaggtgaagctgac

SEQ ID NO: 5268889 - DNA, 25 bp, Homo sapien
atttctctgttaactctaatcataa

SEQ ID NO: 5268890 - DNA, 25 bp, Homo sapien
ctgttgatatccatttctctgttaa

SEQ ID NO: 5268891 - DNA, 25 bp, Homo sapien
tgttaactctaatcataacaggtga

SEQ ID NO: 5268892 - DNA, 25 bp, Homo sapien
ctttgtcctttagatcatcgctgtt

SEQ ID NO: 5268893 - DNA, 25 bp, Homo sapien
ttctttgtcctttagatcatcgctg

SEQ ID NO: 5268894 - DNA, 25 bp, Homo sapien
tttgtcctttagatcatcgctgttt

SEQ ID NO: 5268895 - DNA, 25 bp, Homo sapien
tctttgtcctttagatcatcgctgt

SEQ ID NO: 5268896 - DNA, 25 bp, Homo sapien
taaacccgtattgagatcttaggca

SEQ ID NO: 5268897 - DNA, 25 bp, Homo sapien
tgagagaaattgtcatatgtaccat

SEQ ID NO: 5268898 - DNA, 25 bp, Homo sapien
acaataacatgtcgcattcccagag

SEQ ID NO: 5268899 - DNA, 25 bp, Homo sapien
aatggaaacagtgattgatttagta

SEQ ID NO: 5268900 - DNA, 25 bp, Homo sapien
ctatgtccgtagaaatataaaaggg

SEQ ID NO: 5268901 - DNA, 25 bp, Homo sapien
tgctgaaatcttggacatatgaaag

SEQ ID NO: 5268902 - DNA, 25 bp, Homo sapien
gggacactcctatttggaaggtgaa

SEQ ID NO: 5268903 - DNA, 25 bp, Homo sapien
caatttgtaacctaatctgagtgtc

SEQ ID NO: 5268904 - DNA, 25 bp, Homo sapien
tattttcctcccttgccgagtggga

SEQ ID NO: 5268905 - DNA, 25 bp, Homo sapien
ggagccctgacacgggtgcctgtat

SEQ ID NO: 5268906 - DNA, 25 bp, Homo sapien
gagtgggagccctgacacgggtgcc

SEQ ID NO: 5268907 - DNA, 25 bp, Homo sapien
tgcctgtatgtctgagggctgcatc

SEQ ID NO: 5268908 - DNA, 25 bp, Homo sapien
ggggaggaggggaggctcggtgaca

SEQ ID NO: 5268909 - DNA, 25 bp, Homo sapien
ctcgtcacggggaggaggggaggct

SEQ ID NO: 5268910 - DNA, 25 bp, Homo sapien
gaggaggggaggctcggtgacagtg

SEQ ID NO: 5268911 - DNA, 25 bp, Homo sapien
cgtcacggggaggaggggaggctcg

SEQ ID NO: 5268912 - DNA, 25 bp, Homo sapien
attgtccttttcaggcacggtttgg

SEQ ID NO: 5268913 - DNA, 25 bp, Homo sapien
tttgggtatttctgagtttgagggc

SEQ ID NO: 5268914 - DNA, 25 bp, Homo sapien
gtttgagggcaaacatcattttcat

SEQ ID NO: 5268915 - DNA, 25 bp, Homo sapien
tcatattgtcataaaagtgctccat

SEQ ID NO: 5268916 - DNA, 25 bp, Homo sapien
caaagctttgatgacatagctagcc

SEQ ID NO: 5268917 - DNA, 25 bp, Homo sapien
tttttggtcaaagctttgatgacat

SEQ ID NO: 5268918 - DNA, 25 bp, Homo sapien
aagctttgatgacatagctagccat

SEQ ID NO: 5268919 - DNA, 25 bp, Homo sapien
aaagctttgatgacatagctagcca

SEQ ID NO: 5268920 - DNA, 25 bp, Homo sapien
aaccacagagggacataggatggtg

SEQ ID NO: 5268921 - DNA, 25 bp, Homo sapien
ccacagagggacataggatggtgcc

SEQ ID NO: 5268922 - DNA, 25 bp, Homo sapien
tagggttcgatgaaccacagaggga

SEQ ID NO: 5268923 - DNA, 25 bp, Homo sapien
tacagcactctatagggttcgatga

SEQ ID NO: 5268924 - DNA, 25 bp, Homo sapien
gggctcatttggtaggtcatcttga

SEQ ID NO: 5268925 - DNA, 25 bp, Homo sapien
aaagctatagttggctctctgtgag

SEQ ID NO: 5268926 - DNA, 25 bp, Homo sapien
tttcttctctaaagctatagttggc

SEQ ID NO: 5268927 - DNA, 25 bp, Homo sapien
ttgggctcatttggtaggtcatctt

SEQ ID NO: 5268928 - DNA, 25 bp, Homo sapien
gaaactcgccggcactatttcgcat

SEQ ID NO: 5268929 - DNA, 25 bp, Homo sapien
cagctgcctggttcgcggtgagcct

SEQ ID NO: 5268930 - DNA, 25 bp, Homo sapien
tccactagcgggaatctgaaactcg

SEQ ID NO: 5268931 - DNA, 25 bp, Homo sapien
gaagcgtgcggctggcgattccact

SEQ ID NO: 5268932 - DNA, 25 bp, Homo sapien
agcttctcgattcatcccacagatt

SEQ ID NO: 5268933 - DNA, 25 bp, Homo sapien
ccagcttctcgattcatcccacaga

SEQ ID NO: 5268934 - DNA, 25 bp, Homo sapien
gcttctcgattcatcccacagatta

SEQ ID NO: 5268935 - DNA, 25 bp, Homo sapien
cagcttctcgattcatcccacagat

SEQ ID NO: 5268936 - DNA, 25 bp, Homo sapien
cagggtggattggagtgaggctgtg

SEQ ID NO: 5268937 - DNA, 25 bp, Homo sapien
aagtgtaagtcctttctatggaacg

SEQ ID NO: 5268938 - DNA, 25 bp, Homo sapien
ctatggaacgggtattctgaaatct

SEQ ID NO: 5268939 - DNA, 25 bp, Homo sapien
gactttgacgaggttttgctcgctg

SEQ ID NO: 5268940 - DNA, 25 bp, Homo sapien
tgagccccagggtatgcagtttctg

SEQ ID NO: 5268941 - DNA, 25 bp, Homo sapien
acaggaatctttatcacacgtagca

SEQ ID NO: 5268942 - DNA, 25 bp, Homo sapien
tagcaaaatgggcaacattgcagat

SEQ ID NO: 5268943 - DNA, 25 bp, Homo sapien
tcatcaagccgcttgttaatgactc

SEQ ID NO: 5268944 - DNA, 25 bp, Homo sapien
caggcttgacctgatcaatattgtc

SEQ ID NO: 5268945 - DNA, 25 bp, Homo sapien
cactgacctaacaataggctctgca

SEQ ID NO: 5268946 - DNA, 25 bp, Homo sapien
tattataacttcttcatgtgtggct

SEQ ID NO: 5268947 - DNA, 25 bp, Homo sapien
caagggtgtctttcaggaatattat

SEQ ID NO: 5268948 - DNA, 25 bp, Homo sapien
tccgcaaggcaaggatttatcaaat

SEQ ID NO: 5268949 - DNA, 25 bp, Homo sapien
aataggaggccacgcttgtcaccat

SEQ ID NO: 5268950 - DNA, 25 bp, Homo sapien
tctttgtgggcagcctcaaatagga

SEQ ID NO: 5268951 - DNA, 25 bp, Homo sapien
tgtgggcagcctcaaataggaggcc

SEQ ID NO: 5268952 - DNA, 25 bp, Homo sapien
cagcctcaaataggaggccacgctt

SEQ ID NO: 5268953 - DNA, 25 bp, Homo sapien
ctgggggattccagtgccatttgga

SEQ ID NO: 5268954 - DNA, 25 bp, Homo sapien
tgggggattccagtgccatttggat

SEQ ID NO: 5268955 - DNA, 25 bp, Homo sapien
gctgggggattccagtgccatttgg

SEQ ID NO: 5268956 - DNA, 25 bp, Homo sapien
catgaataggatgaattacatcctg

SEQ ID NO: 5268957 - DNA, 25 bp, Homo sapien
taagagtgggcagatctccccttca

SEQ ID NO: 5268958 - DNA, 25 bp, Homo sapien
gatgaattacatcctgtctttgtaa

SEQ ID NO: 5268959 - DNA, 25 bp, Homo sapien
tcctgtctttgtaagagtgggcaga

SEQ ID NO: 5268960 - DNA, 25 bp, Homo sapien
taaccatactccaagtgagagcctt

SEQ ID NO: 5268961 - DNA, 25 bp, Homo sapien
tgttctcaccctgactgatcctgtg

SEQ ID NO: 5268962 - DNA, 25 bp, Homo sapien
taacacctgagctttcaacatccag

SEQ ID NO: 5268963 - DNA, 25 bp, Homo sapien
gcccagctgtgaccgtgttaaatgt

SEQ ID NO: 5268964 - DNA, 25 bp, Homo sapien
caggattttagtcatgtgagcagca

SEQ ID NO: 5268965 - DNA, 25 bp, Homo sapien
tctggctatatgtgaagattctgga

SEQ ID NO: 5268966 - DNA, 25 bp, Homo sapien
ttccaactagtatgcagcgtgcctg

SEQ ID NO: 5268967 - DNA, 25 bp, Homo sapien
tggctctagtcttccaaccagcagt

SEQ ID NO: 5268968 - DNA, 25 bp, Homo sapien
ggctggtcgggatatgcttgtccaa

SEQ ID NO: 5268969 - DNA, 25 bp, Homo sapien
ggaaggaacaagtgttcttagcctc

SEQ ID NO: 5268970 - DNA, 25 bp, Homo sapien
tccagaatgccacggcagtgggacc

SEQ ID NO: 5268971 - DNA, 25 bp, Homo sapien
cccatttcctcaaggaacaaatcca

SEQ ID NO: 5268972 - DNA, 25 bp, Homo sapien
gatacgctctttccgccttgagtgc

SEQ ID NO: 5268973 - DNA, 25 bp, Homo sapien
ggccttgatacgctctttccgcctt

SEQ ID NO: 5268974 - DNA, 25 bp, Homo sapien
gctctttccgccttgagtgcctgag

SEQ ID NO: 5268975 - DNA, 25 bp, Homo sapien
cttgatacgctctttccgccttgag

SEQ ID NO: 5268976 - DNA, 25 bp, Homo sapien
catttgtggagtggccgtcctgctg

SEQ ID NO: 5268977 - DNA, 25 bp, Homo sapien
ttacagaacatgcgtgcatttgtgg

SEQ ID NO: 5268978 - DNA, 25 bp, Homo sapien
tgcatttgtggagtggccgtcctgc

SEQ ID NO: 5268979 - DNA, 25 bp, Homo sapien
tgtggagtggccgtcctgctgctgg

SEQ ID NO: 5268980 - DNA, 25 bp, Homo sapien
aacattcgatgccttctcttggcgt

SEQ ID NO: 5268981 - DNA, 25 bp, Homo sapien
tgcagatgaacattcgatgccttct

SEQ ID NO: 5268982 - DNA, 25 bp, Homo sapien
ctcttggcgtaccaaaataacatga

SEQ ID NO: 5268983 - DNA, 25 bp, Homo sapien
ttcgatgccttctcttggcgtacca

SEQ ID NO: 5268984 - DNA, 25 bp, Homo sapien
aaactgaggcaatcctagggctcat

SEQ ID NO: 5268985 - DNA, 25 bp, Homo sapien
gttgtggcctggaagcttttgatca

SEQ ID NO: 5268986 - DNA, 25 bp, Homo sapien
gtctgatgtcatatagccacaccag

SEQ ID NO: 5268987 - DNA, 25 bp, Homo sapien
gggcatctgatcacgtgaagttaaa

SEQ ID NO: 5268988 - DNA, 25 bp, Homo sapien
agagtgggtgcgctgttccaatcgt

SEQ ID NO: 5268989 - DNA, 25 bp, Homo sapien
gcactgcaggtagctgcttaacacc

SEQ ID NO: 5268990 - DNA, 25 bp, Homo sapien
ccagccagcgttgccatgtgagagt

SEQ ID NO: 5268991 - DNA, 25 bp, Homo sapien
cctcaggacctagcactgcagagct

SEQ ID NO: 5268992 - DNA, 25 bp, Homo sapien
aacaccacttaaaagcatctgctta

SEQ ID NO: 5268993 - DNA, 25 bp, Homo sapien
acaccacttaaaagcatctgcttat

SEQ ID NO: 5268994 - DNA, 25 bp, Homo sapien
caccacttaaaagcatctgcttatc

SEQ ID NO: 5268995 - DNA, 25 bp, Homo sapien
ccactcaccaacaccacttaaaagc

SEQ ID NO: 5268996 - DNA, 25 bp, Homo sapien
ttcgaagattataccgcatccaggt

SEQ ID NO: 5268997 - DNA, 25 bp, Homo sapien
ggttactatatgtgtatttccagac

SEQ ID NO: 5268998 - DNA, 25 bp, Homo sapien
gcatccaggtacctttagctctttg

SEQ ID NO: 5268999 - DNA, 25 bp, Homo sapien
tattagattacgtctatgcagaaag

SEQ ID NO: 5269000 - DNA, 25 bp, Homo sapien
tgaatgaggctccatacttgagctt

SEQ ID NO: 5269001 - DNA, 25 bp, Homo sapien
tactagcttagcaggactagcaacc

SEQ ID NO: 5269002 - DNA, 25 bp, Homo sapien
tgacaagcacggtctacagatggca

SEQ ID NO: 5269003 - DNA, 25 bp, Homo sapien
cttgcattctgctgacaagcacggt

SEQ ID NO: 5269004 - DNA, 25 bp, Homo sapien
atttaggactttcactgcttacagt

SEQ ID NO: 5269005 - DNA, 25 bp, Homo sapien
actgcttacagtaattagcattcga

SEQ ID NO: 5269006 - DNA, 25 bp, Homo sapien
ctttcactgcttacagtaattagca

SEQ ID NO: 5269007 - DNA, 25 bp, Homo sapien
cttacagtaattagcattcgaaggg

SEQ ID NO: 5269008 - DNA, 25 bp, Homo sapien
tttacttcccaacgtagctgtgcac

SEQ ID NO: 5269009 - DNA, 25 bp, Homo sapien
gacagcaccgaccttgagaaaacca

SEQ ID NO: 5269010 - DNA, 25 bp, Homo sapien
tttctcgatgctgacggaagctgtg

SEQ ID NO: 5269011 - DNA, 25 bp, Homo sapien
tagcttgttccctgagagccgaggc

SEQ ID NO: 5269012 - DNA, 25 bp, Homo sapien
tgttgtctgagaaaagcgcattgcc

SEQ ID NO: 5269013 - DNA, 25 bp, Homo sapien
gacaactttggctacagttactcca

SEQ ID NO: 5269014 - DNA, 25 bp, Homo sapien
tgagaaatcccgtaatgccctaaat

SEQ ID NO: 5269015 - DNA, 25 bp, Homo sapien
ctaaatttgtaccatagaagtgggc

SEQ ID NO: 5269016 - DNA, 25 bp, Homo sapien
tggtcagttatccagaagccattat

SEQ ID NO: 5269017 - DNA, 25 bp, Homo sapien
gtccttttgatcttggtgttgatgg

SEQ ID NO: 5269018 - DNA, 25 bp, Homo sapien
tccattctgatttgacttttgtgca

SEQ ID NO: 5269019 - DNA, 25 bp, Homo sapien
ttggtgttgatggttttgagtcttt

SEQ ID NO: 5269020 - DNA, 25 bp, Homo sapien
ctgtttttgaaagattcttgtcctt

SEQ ID NO: 5269021 - DNA, 25 bp, Homo sapien
taatatgtactggtcctgagccaca

SEQ ID NO: 5269022 - DNA, 25 bp, Homo sapien
ctaatatgtactggtcctgagccac

SEQ ID NO: 5269023 - DNA, 25 bp, Homo sapien
tccactaatatgtactggtcctgag

SEQ ID NO: 5269024 - DNA, 25 bp, Homo sapien
cactaatatgtactggtcctgagcc

SEQ ID NO: 5269025 - DNA, 25 bp, Homo sapien
ttcaaccataagacgactggtggtg

SEQ ID NO: 5269026 - DNA, 25 bp, Homo sapien
cttcaaccataagacgactggtggt

SEQ ID NO: 5269027 - DNA, 25 bp, Homo sapien
ggaaaccattgctgtacagacattt

SEQ ID NO: 5269028 - DNA, 25 bp, Homo sapien
caagggaaaccattgctgtacagac

SEQ ID NO: 5269029 - DNA, 25 bp, Homo sapien
aagcccccaagggaaaccattgctg

SEQ ID NO: 5269030 - DNA, 25 bp, Homo sapien
gcccccaagggaaaccattgctgta

SEQ ID NO: 5269031 - DNA, 25 bp, Homo sapien
caccaaccactaaactgactgtttt

SEQ ID NO: 5269032 - DNA, 25 bp, Homo sapien
aattaaaacatggaggagctgcctt

SEQ ID NO: 5269033 - DNA, 25 bp, Homo sapien
tgatgaattgcttgcggtgctgagc

SEQ ID NO: 5269034 - DNA, 25 bp, Homo sapien
agaaagcagtatatttccaccccag

SEQ ID NO: 5269035 - DNA, 25 bp, Homo sapien
tctgaaccaaaagttccatgtcagg

SEQ ID NO: 5269036 - DNA, 25 bp, Homo sapien
tagtacgcacctaaattcacatggg

SEQ ID NO: 5269037 - DNA, 25 bp, Homo sapien
tactgtccccataacggcatgcatg

SEQ ID NO: 5269038 - DNA, 25 bp, Homo sapien
gagtcagcatgggaaggacacatcc

SEQ ID NO: 5269039 - DNA, 25 bp, Homo sapien
cttttgggccgcagtaggtgagtca

SEQ ID NO: 5269040 - DNA, 25 bp, Homo sapien
gaagatgtggccaaatcttattcat

SEQ ID NO: 5269041 - DNA, 25 bp, Homo sapien
tatccatagcacagctctcattatg

SEQ ID NO: 5269042 - DNA, 25 bp, Homo sapien
agttctgtatatatttggtacgtcc

SEQ ID NO: 5269043 - DNA, 25 bp, Homo sapien
gataagcagtagagttagttctgta

SEQ ID NO: 5269044 - DNA, 25 bp, Homo sapien
ttttccatgaagaaaccctaatcta

SEQ ID NO: 5269045 - DNA, 25 bp, Homo sapien
tcaaactgaatccaattattagaag

SEQ ID NO: 5269046 - DNA, 25 bp, Homo sapien
ccttgaaggatttcataagtggcaa

SEQ ID NO: 5269047 - DNA, 25 bp, Homo sapien
tttcataagtggcaattggttcttc

SEQ ID NO: 5269048 - DNA, 25 bp, Homo sapien
gctgatggcattctcgcttagctaa

SEQ ID NO: 5269049 - DNA, 25 bp, Homo sapien
aatgtaatttctagtccctctgcca

SEQ ID NO: 5269050 - DNA, 25 bp, Homo sapien
cctggatgcagctgagatcgatgca

SEQ ID NO: 5269051 - DNA, 25 bp, Homo sapien
cattcaactgatacacctggatgca

SEQ ID NO: 5269052 - DNA, 25 bp, Homo sapien
gctcatctctgctaaggggtcttac

SEQ ID NO: 5269053 - DNA, 25 bp, Homo sapien
agccatctcccacggacaagtggaa

SEQ ID NO: 5269054 - DNA, 25 bp, Homo sapien
tcctctctcttcagcggacacgtgc

SEQ ID NO: 5269055 - DNA, 25 bp, Homo sapien
ctcccacggacaagtggaaagctgt

SEQ ID NO: 5269056 - DNA, 25 bp, Homo sapien
taggaatacagctgaatgtatagct

SEQ ID NO: 5269057 - DNA, 25 bp, Homo sapien
atacagctgaatgtatagctttctc

SEQ ID NO: 5269058 - DNA, 25 bp, Homo sapien
ggaatacagctgaatgtatagcttt

SEQ ID NO: 5269059 - DNA, 25 bp, Homo sapien
cagctgaatgtatagctttctccat

SEQ ID NO: 5269060 - DNA, 25 bp, Homo sapien
caaagctgccgaagggcaggagtcc

SEQ ID NO: 5269061 - DNA, 25 bp, Homo sapien
ggccggttgctctcggaagttcctc

SEQ ID NO: 5269062 - DNA, 25 bp, Homo sapien
caggtcaccctcgagtgctttttgg

SEQ ID NO: 5269063 - DNA, 25 bp, Homo sapien
cactctctaaatagctggtttgtcc

SEQ ID NO: 5269064 - DNA, 25 bp, Homo sapien
taaatctttccacctacagggtatg

SEQ ID NO: 5269065 - DNA, 25 bp, Homo sapien
tcagtcccatcagtctaagaagtag

SEQ ID NO: 5269066 - DNA, 25 bp, Homo sapien
ttttctgccttcgaattgcccgagg

SEQ ID NO: 5269067 - DNA, 25 bp, Homo sapien
catttattgcctcaagtctctggac

SEQ ID NO: 5269068 - DNA, 25 bp, Homo sapien
gaagtagggcacatattccacactc

SEQ ID NO: 5269069 - DNA, 25 bp, Homo sapien
ctgaatgaagtagggcacatattcc

SEQ ID NO: 5269070 - DNA, 25 bp, Homo sapien
catattccacactccatagatggaa

SEQ ID NO: 5269071 - DNA, 25 bp, Homo sapien
aatgaagtagggcacatattccaca

SEQ ID NO: 5269072 - DNA, 25 bp, Homo sapien
ccaggagctaacaccgatctccaat

SEQ ID NO: 5269073 - DNA, 25 bp, Homo sapien
cttgaggttccttgcagcgatgaaa

SEQ ID NO: 5269074 - DNA, 25 bp, Homo sapien
aaccaggagctaacaccgatctcca

SEQ ID NO: 5269075 - DNA, 25 bp, Homo sapien
ccttgcagcgatgaaaatcatctgg

SEQ ID NO: 5269076 - DNA, 25 bp, Homo sapien
gcaaacattctgcatgcccaggtga

SEQ ID NO: 5269077 - DNA, 25 bp, Homo sapien
gaaaccggacatttgtatgtactca

SEQ ID NO: 5269078 - DNA, 25 bp, Homo sapien
tgacacaaacaagcgagaaagagag

SEQ ID NO: 5269079 - DNA, 25 bp, Homo sapien
aaagatgtgtgtgtctgtccgatcc

SEQ ID NO: 5269080 - DNA, 25 bp, Homo sapien
accaggagagaaacattgccagtag

SEQ ID NO: 5269081 - DNA, 25 bp, Homo sapien
tgaagaattgttaactagtaagacc

SEQ ID NO: 5269082 - DNA, 25 bp, Homo sapien
tacatatgtatagcgcagtttaatt

SEQ ID NO: 5269083 - DNA, 25 bp, Homo sapien
gacctactcttaactactataagga

SEQ ID NO: 5269084 - DNA, 25 bp, Homo sapien
acaaggaagaaccaggctgagaccc

SEQ ID NO: 5269085 - DNA, 25 bp, Homo sapien
cgaggaacaaggaagaaccaggctg

SEQ ID NO: 5269086 - DNA, 25 bp, Homo sapien
gaggacgaggaacaaggaagaacca

SEQ ID NO: 5269087 - DNA, 25 bp, Homo sapien
cagaggacgaggaacaaggaagaac

SEQ ID NO: 5269088 - DNA, 25 bp, Homo sapien
gaagacgtgggtagagccggtccat

SEQ ID NO: 5269089 - DNA, 25 bp, Homo sapien
cttgctggaagacgtgggtagagcc

SEQ ID NO: 5269090 - DNA, 25 bp, Homo sapien
gctggaagacgtgggtagagccggt

SEQ ID NO: 5269091 - DNA, 25 bp, Homo sapien
gacttgctggaagacgtgggtagag

SEQ ID NO: 5269092 - DNA, 25 bp, Homo sapien
gcatgacccagtccaaatatactag

SEQ ID NO: 5269093 - DNA, 25 bp, Homo sapien
ggtccctggccataacaagccacag

SEQ ID NO: 5269094 - DNA, 25 bp, Homo sapien
tgattttggagtataaggactagcc

SEQ ID NO: 5269095 - DNA, 25 bp, Homo sapien
taaattacagatcccttgatacctg

SEQ ID NO: 5269096 - DNA, 25 bp, Homo sapien
aacttggagacgtgaaaagtgatgg

SEQ ID NO: 5269097 - DNA, 25 bp, Homo sapien
acaggagttgtcatccaagcctagc

SEQ ID NO: 5269098 - DNA, 25 bp, Homo sapien
gaacaggagttgtcatccaagccta

SEQ ID NO: 5269099 - DNA, 25 bp, Homo sapien
ctgaacaggagttgtcatccaagcc

SEQ ID NO: 5269100 - DNA, 25 bp, Homo sapien
aggagttgtcatccaagcctagcat

SEQ ID NO: 5269101 - DNA, 25 bp, Homo sapien
gaaagcccatccctgtcatgaattt

SEQ ID NO: 5269102 - DNA, 25 bp, Homo sapien
tcatgaatttggtgcaacttcactg

SEQ ID NO: 5269103 - DNA, 25 bp, Homo sapien
ttttgaaatgaaagtcgtcactgcc

SEQ ID NO: 5269104 - DNA, 25 bp, Homo sapien
gccagcatcaactttggtgagcgga

SEQ ID NO: 5269105 - DNA, 25 bp, Homo sapien
attttcctatagctacaaagtcaaa

SEQ ID NO: 5269106 - DNA, 25 bp, Homo sapien
ttttcctatagctacaaagtcaaaa

SEQ ID NO: 5269107 - DNA, 25 bp, Homo sapien
tttcctatagctacaaagtcaaaag

SEQ ID NO: 5269108 - DNA, 25 bp, Homo sapien
tataaatggactaaattctgcaatt

SEQ ID NO: 5269109 - DNA, 25 bp, Homo sapien
taaatataaatggactaaattctgc

SEQ ID NO: 5269110 - DNA, 25 bp, Homo sapien
ttaaatataaatggactaaattctg

SEQ ID NO: 5269111 - DNA, 25 bp, Homo sapien
aatataaatggactaaattctgcaa

SEQ ID NO: 5269112 - DNA, 25 bp, Homo sapien
acaacacaacaagcttcaccgcctt

SEQ ID NO: 5269113 - DNA, 25 bp, Homo sapien
aacacaacaagcttcaccgccttcc

SEQ ID NO: 5269114 - DNA, 25 bp, Homo sapien
caacaagcttcaccgccttcctttc

SEQ ID NO: 5269115 - DNA, 25 bp, Homo sapien
aagcttcaccgccttcctttcagtg

SEQ ID NO: 5269116 - DNA, 25 bp, Homo sapien
tctagtccgtcacagtgctcgggtc

SEQ ID NO: 5269117 - DNA, 25 bp, Homo sapien
tgctcgggtctgctcgcttttttga

SEQ ID NO: 5269118 - DNA, 25 bp, Homo sapien
ggcatcagcccagtgtcgtccatct

SEQ ID NO: 5269119 - DNA, 25 bp, Homo sapien
gctcgcttttttgacaatgtgttca

SEQ ID NO: 5269120 - DNA, 25 bp, Homo sapien
gcagctcgtatgcaaatcctcattc

SEQ ID NO: 5269121 - DNA, 25 bp, Homo sapien
gtatgcaaatcctcattccatagtt

SEQ ID NO: 5269122 - DNA, 25 bp, Homo sapien
aggaagcctctgcagctcgtatgca

SEQ ID NO: 5269123 - DNA, 25 bp, Homo sapien
gcctctgcagctcgtatgcaaatcc

SEQ ID NO: 5269124 - DNA, 25 bp, Homo sapien
ttcacgtgcagactgttggccgcgg

SEQ ID NO: 5269125 - DNA, 25 bp, Homo sapien
agactgtcccttaactcccagaagg

SEQ ID NO: 5269126 - DNA, 25 bp, Homo sapien
gggacagtcagctacgatcattatt

SEQ ID NO: 5269127 - DNA, 25 bp, Homo sapien
tggccgcggcgttcttgctgtagct

SEQ ID NO: 5269128 - DNA, 25 bp, Homo sapien
tgtcataaaatcgactgccaagccc

SEQ ID NO: 5269129 - DNA, 25 bp, Homo sapien
atcgactgccaagcccacgtgctgt

SEQ ID NO: 5269130 - DNA, 25 bp, Homo sapien
gctgtcataaaatcgactgccaagc

SEQ ID NO: 5269131 - DNA, 25 bp, Homo sapien
ataaaatcgactgccaagcccacgt

SEQ ID NO: 5269132 - DNA, 25 bp, Homo sapien
ttcatgccttgatagaatctcttct

SEQ ID NO: 5269133 - DNA, 25 bp, Homo sapien
gagaaaacttcatgccttgatagaa

SEQ ID NO: 5269134 - DNA, 25 bp, Homo sapien
aaacttcatgccttgatagaatctc

SEQ ID NO: 5269135 - DNA, 25 bp, Homo sapien
tgtgagaaaacttcatgccttgata

SEQ ID NO: 5269136 - DNA, 25 bp, Homo sapien
gatgtttttgctcctcaacgcattt

SEQ ID NO: 5269137 - DNA, 25 bp, Homo sapien
ctgatgtttttgctcctcaacgcat

SEQ ID NO: 5269138 - DNA, 25 bp, Homo sapien
gtttttgctcctcaacgcatttgca

SEQ ID NO: 5269139 - DNA, 25 bp, Homo sapien
tgctcctcaacgcatttgcaaacat

SEQ ID NO: 5269140 - DNA, 25 bp, Homo sapien
tcagtagagcctgcgctgctgcttc

SEQ ID NO: 5269141 - DNA, 25 bp, Homo sapien
gcgctgctgcttcttgagtattttc

SEQ ID NO: 5269142 - DNA, 25 bp, Homo sapien
tgagtattttcagggaattctgtgc

SEQ ID NO: 5269143 - DNA, 25 bp, Homo sapien
gtattttcagggaattctgtgcatt

SEQ ID NO: 5269144 - DNA, 25 bp, Homo sapien
gataccacatgtgtgattactctga

SEQ ID NO: 5269145 - DNA, 25 bp, Homo sapien
catgtgtgattactctgactctcag

SEQ ID NO: 5269146 - DNA, 25 bp, Homo sapien
ctgactctcagagtctttacagatt

SEQ ID NO: 5269147 - DNA, 25 bp, Homo sapien
ctttcaaacgataccacatgtgtga

SEQ ID NO: 5269148 - DNA, 25 bp, Homo sapien
ctggtgcagcaccattttcataagg

SEQ ID NO: 5269149 - DNA, 25 bp, Homo sapien
ccagaaaactagatccttggattgt

SEQ ID NO: 5269150 - DNA, 25 bp, Homo sapien
ccttggattgtacaaggagagctcc

SEQ ID NO: 5269151 - DNA, 25 bp, Homo sapien
aaggagagctccctgccgattagca

SEQ ID NO: 5269152 - DNA, 25 bp, Homo sapien
ctgatgtgcaaacacgagttgcatt

SEQ ID NO: 5269153 - DNA, 25 bp, Homo sapien
tgatgtgcaaacacgagttgcattt

SEQ ID NO: 5269154 - DNA, 25 bp, Homo sapien
gatgtgcaaacacgagttgcatttg

SEQ ID NO: 5269155 - DNA, 25 bp, Homo sapien
ctggcttttgtacagtaggagcctt

SEQ ID NO: 5269156 - DNA, 25 bp, Homo sapien
gctggcttttgtacagtaggagcct

SEQ ID NO: 5269157 - DNA, 25 bp, Homo sapien
tggcttttgtacagtaggagccttc

SEQ ID NO: 5269158 - DNA, 25 bp, Homo sapien
aggaagtgcagggatttccctcttt

SEQ ID NO: 5269159 - DNA, 25 bp, Homo sapien
attcaatcccggctgccacaaagac

SEQ ID NO: 5269160 - DNA, 25 bp, Homo sapien
gaagtgcagggatttccctcttttg

SEQ ID NO: 5269161 - DNA, 25 bp, Homo sapien
tcccggctgccacaaagacagagag

SEQ ID NO: 5269162 - DNA, 25 bp, Homo sapien
tgacatttaaatacacgacagcccg

SEQ ID NO: 5269163 - DNA, 25 bp, Homo sapien
cacgacagcccgtttctcatggatc

SEQ ID NO: 5269164 - DNA, 25 bp, Homo sapien
gcccgtttctcatggatctgtgagt

SEQ ID NO: 5269165 - DNA, 25 bp, Homo sapien
atctgtgagtaggacaaggagagat

SEQ ID NO: 5269166 - DNA, 25 bp, Homo sapien
gagcatggagagtgtgcacgttacc

SEQ ID NO: 5269167 - DNA, 25 bp, Homo sapien
gctaacctgggtgcacacctctggc

SEQ ID NO: 5269168 - DNA, 25 bp, Homo sapien
gagaagtgtctcaaacagggtctgg

SEQ ID NO: 5269169 - DNA, 25 bp, Homo sapien
taccgtcagctaacctgggtgcaca

SEQ ID NO: 5269170 - DNA, 25 bp, Homo sapien
tctgagatctggacgtggagttgag

SEQ ID NO: 5269171 - DNA, 25 bp, Homo sapien
cagagcctcattttcgggtatatct

SEQ ID NO: 5269172 - DNA, 25 bp, Homo sapien
tatcaggagacatgagatcaggaga

SEQ ID NO: 5269173 - DNA, 25 bp, Homo sapien
agttgagagggagagtatgaacact

SEQ ID NO: 5269174 - DNA, 25 bp, Homo sapien
agcatcttcaatgtgcagtcctgtc

SEQ ID NO: 5269175 - DNA, 25 bp, Homo sapien
tcttcaatgtgcagtcctgtccgta

SEQ ID NO: 5269176 - DNA, 25 bp, Homo sapien
cttcaatgtgcagtcctgtccgtac

SEQ ID NO: 5269177 - DNA, 25 bp, Homo sapien
atcttcaatgtgcagtcctgtccgt

SEQ ID NO: 5269178 - DNA, 25 bp, Homo sapien
agccctgacgatgcacggtctcttt

SEQ ID NO: 5269179 - DNA, 25 bp, Homo sapien
cagccctgacgatgcacggtctctt

SEQ ID NO: 5269180 - DNA, 25 bp, Homo sapien
tgcagccctgacgatgcacggtctc

SEQ ID NO: 5269181 - DNA, 25 bp, Homo sapien
tcctgcagccctgacgatgcacggt

SEQ ID NO: 5269182 - DNA, 25 bp, Homo sapien
aagaggcaaaatcgcacgccagcgt

SEQ ID NO: 5269183 - DNA, 25 bp, Homo sapien
gatggctctcaacaaaatgtccctg

SEQ ID NO: 5269184 - DNA, 25 bp, Homo sapien
tggaaatgacattccgctgctgtgg

SEQ ID NO: 5269185 - DNA, 25 bp, Homo sapien
gatttaatgcagacgaagctcctcc

SEQ ID NO: 5269186 - DNA, 25 bp, Homo sapien
ccacgtgcttctcctatgtgtatac

SEQ ID NO: 5269187 - DNA, 25 bp, Homo sapien
gaaagcctcagcttatttccaccag

SEQ ID NO: 5269188 - DNA, 25 bp, Homo sapien
tcgtttttgttcccacgtgcttctc

SEQ ID NO: 5269189 - DNA, 25 bp, Homo sapien
tagaaatggtctgcttggaaagaga

SEQ ID NO: 5269190 - DNA, 25 bp, Homo sapien
acagtatctgtttgacggtccattg

SEQ ID NO: 5269191 - DNA, 25 bp, Homo sapien
tttgacggtccattgtattcagcat

SEQ ID NO: 5269192 - DNA, 25 bp, Homo sapien
gcacacagtatctgtttgacggtcc

SEQ ID NO: 5269193 - DNA, 25 bp, Homo sapien
tgtttgacggtccattgtattcagc

SEQ ID NO: 5269194 - DNA, 25 bp, Homo sapien
accccggggcatcccatatctccaa

SEQ ID NO: 5269195 - DNA, 25 bp, Homo sapien
agggagtgttagtaatttgacatag

SEQ ID NO: 5269196 - DNA, 25 bp, Homo sapien
gtgaatccggaattagggagtgtta

SEQ ID NO: 5269197 - DNA, 25 bp, Homo sapien
tgttagtaatttgacataggcagca

SEQ ID NO: 5269198 - DNA, 25 bp, Homo sapien
acaaaccaacttagacaggacttct

SEQ ID NO: 5269199 - DNA, 25 bp, Homo sapien
aaaccaacttagacaggacttctga

SEQ ID NO: 5269200 - DNA, 25 bp, Homo sapien
ttctggcattctgcacaaaccaact

SEQ ID NO: 5269201 - DNA, 25 bp, Homo sapien
tggcattctgcacaaaccaacttag

SEQ ID NO: 5269202 - DNA, 25 bp, Homo sapien
gccagagctcacagggcctcctgtg

SEQ ID NO: 5269203 - DNA, 25 bp, Homo sapien
ccaaataccaagtggtgctggtggc

SEQ ID NO: 5269204 - DNA, 25 bp, Homo sapien
tttgcagaagcaggggtagccactg

SEQ ID NO: 5269205 - DNA, 25 bp, Homo sapien
tactaggaaaaggagacgtgatcca

SEQ ID NO: 5269206 - DNA, 25 bp, Homo sapien
ccaggtgtttgctagaggaggaggg

SEQ ID NO: 5269207 - DNA, 25 bp, Homo sapien
accaggtgtttgctagaggaggagg

SEQ ID NO: 5269208 - DNA, 25 bp, Homo sapien
caccaggtgtttgctagaggaggag

SEQ ID NO: 5269209 - DNA, 25 bp, Homo sapien
gcattgaatttgccaaccttgttcc

SEQ ID NO: 5269210 - DNA, 25 bp, Homo sapien
cctggtgtgatttgacagtgtcccc

SEQ ID NO: 5269211 - DNA, 25 bp, Homo sapien
ggtccaacatcatatgacaaatagc

SEQ ID NO: 5269212 - DNA, 25 bp, Homo sapien
catatgacaaatagcagaccctgag

SEQ ID NO: 5269213 - DNA, 25 bp, Homo sapien
tcacatttcaaactgacactggtcc

SEQ ID NO: 5269214 - DNA, 25 bp, Homo sapien
tcaaggggtcatcctttgcccagtt

SEQ ID NO: 5269215 - DNA, 25 bp, Homo sapien
gtttcagtgagtgaccacttttccc

SEQ ID NO: 5269216 - DNA, 25 bp, Homo sapien
tgagtgaccacttttccctaaacac

SEQ ID NO: 5269217 - DNA, 25 bp, Homo sapien
cctttgcccagtttcagtgagtgac

SEQ ID NO: 5269218 - DNA, 25 bp, Homo sapien
tatggtgcacagaagtatcaagcaa

SEQ ID NO: 5269219 - DNA, 25 bp, Homo sapien
agtatggtgcacagaagtatcaagc

SEQ ID NO: 5269220 - DNA, 25 bp, Homo sapien
gcacagaagtatcaagcaacatacc

SEQ ID NO: 5269221 - DNA, 25 bp, Homo sapien
ggtgcacagaagtatcaagcaacat

SEQ ID NO: 5269222 - DNA, 25 bp, Homo sapien
tcaagtctggtttcttatcaagatc

SEQ ID NO: 5269223 - DNA, 25 bp, Homo sapien
tccttgctttgggaaatcgggaaca

SEQ ID NO: 5269224 - DNA, 25 bp, Homo sapien
cagtgagaaccaccctggagattgt

SEQ ID NO: 5269225 - DNA, 25 bp, Homo sapien
ttgggaaatcgggaacagtgagaac

SEQ ID NO: 5269226 - DNA, 25 bp, Homo sapien
ccctggagattgtggtcagagcagc

SEQ ID NO: 5269227 - DNA, 25 bp, Homo sapien
gcaggaaggacccaggaaggggcat

SEQ ID NO: 5269228 - DNA, 25 bp, Homo sapien
ctgtttgtgcaggaaggacccagga

SEQ ID NO: 5269229 - DNA, 25 bp, Homo sapien
ttgtgcaggaaggacccaggaaggg

SEQ ID NO: 5269230 - DNA, 25 bp, Homo sapien
gtgcaggaaggacccaggaaggggc

SEQ ID NO: 5269231 - DNA, 25 bp, Homo sapien
ctggtgttagtccaggagggggcct

SEQ ID NO: 5269232 - DNA, 25 bp, Homo sapien
ctgagaggtcaaagccgatggaagt

SEQ ID NO: 5269233 - DNA, 25 bp, Homo sapien
tgggaggtggtccagcgccacctgg

SEQ ID NO: 5269234 - DNA, 25 bp, Homo sapien
gtcaaagccgatggaagtaacccca

SEQ ID NO: 5269235 - DNA, 25 bp, Homo sapien
gtcttgttactaatgtcctacctgg

SEQ ID NO: 5269236 - DNA, 25 bp, Homo sapien
aggtggcattggatctaggccgcat

SEQ ID NO: 5269237 - DNA, 25 bp, Homo sapien
ctaggccacattgctgtcttgttac

SEQ ID NO: 5269238 - DNA, 25 bp, Homo sapien
gaagcggtgttggatctaggccaca

SEQ ID NO: 5269239 - DNA, 25 bp, Homo sapien
gatgttgtaacaaggcttgagagag

SEQ ID NO: 5269240 - DNA, 25 bp, Homo sapien
tgtgatgttgtaacaaggcttgaga

SEQ ID NO: 5269241 - DNA, 25 bp, Homo sapien
tgatgttgtaacaaggcttgagaga

SEQ ID NO: 5269242 - DNA, 25 bp, Homo sapien
taatgtgatgttgtaacaaggcttg

SEQ ID NO: 5269243 - DNA, 25 bp, Homo sapien
tgaggcagcgcttggactagaaaac

SEQ ID NO: 5269244 - DNA, 25 bp, Homo sapien
ggtgcaaacctaggtacatgggctc

SEQ ID NO: 5269245 - DNA, 25 bp, Homo sapien
ttggctccaatcgtgtacaccctgg

SEQ ID NO: 5269246 - DNA, 25 bp, Homo sapien
tgtcaccacccatggacagagagaa

SEQ ID NO: 5269247 - DNA, 25 bp, Homo sapien
gggccagagtgctgccaacagccaa

SEQ ID NO: 5269248 - DNA, 25 bp, Homo sapien
agtgctgccaacagccaaaggagac

SEQ ID NO: 5269249 - DNA, 25 bp, Homo sapien
ccagagtgctgccaacagccaaagg

SEQ ID NO: 5269250 - DNA, 25 bp, Homo sapien
cggctgcccgcaccagggccagagt

SEQ ID NO: 5269251 - DNA, 25 bp, Homo sapien
taagcagaccagatagtcaggtggc

SEQ ID NO: 5269252 - DNA, 25 bp, Homo sapien
ctttccagaagacggaacgtaggcg

SEQ ID NO: 5269253 - DNA, 25 bp, Homo sapien
aaagcagcgagcatgggagccttaa

SEQ ID NO: 5269254 - DNA, 25 bp, Homo sapien
catgaggctgaaatctggctggtta

SEQ ID NO: 5269255 - DNA, 25 bp, Homo sapien
gtcactcgcagcagtagggccgccc

SEQ ID NO: 5269256 - DNA, 25 bp, Homo sapien
cagtcactcgcagcagtagggccgc

SEQ ID NO: 5269257 - DNA, 25 bp, Homo sapien
ctgcagtcactcgcagcagtagggc

SEQ ID NO: 5269258 - DNA, 25 bp, Homo sapien
tgcagtcactcgcagcagtagggcc

SEQ ID NO: 5269259 - DNA, 25 bp, Homo sapien
gacaatgaatcaatccagagtattt

SEQ ID NO: 5269260 - DNA, 25 bp, Homo sapien
agacaggaatctcccaccagggggt

SEQ ID NO: 5269261 - DNA, 25 bp, Homo sapien
gggttagcacccagagacagaggca

SEQ ID NO: 5269262 - DNA, 25 bp, Homo sapien
aataaaaccaagcacgcaggaagac

SEQ ID NO: 5269263 - DNA, 25 bp, Homo sapien
tggtcagtgccaacgtcactgctgt

SEQ ID NO: 5269264 - DNA, 25 bp, Homo sapien
tgtcctttccgtgggtggtcagtgc

SEQ ID NO: 5269265 - DNA, 25 bp, Homo sapien
tgggaattaatccagtgtgctcaga

SEQ ID NO: 5269266 - DNA, 25 bp, Homo sapien
gtgtgctcagaggtacctgccagcc

SEQ ID NO: 5269267 - DNA, 25 bp, Homo sapien
tggcagatagccctgagaatgggtc

SEQ ID NO: 5269268 - DNA, 25 bp, Homo sapien
catctgagcctgtattgccaaggtc

SEQ ID NO: 5269269 - DNA, 25 bp, Homo sapien
taacaagggcattgcatgcggctcc

SEQ ID NO: 5269270 - DNA, 25 bp, Homo sapien
aacttgctccttgccagaagtcggg

SEQ ID NO: 5269271 - DNA, 25 bp, Homo sapien
caggcctgaagtcccatggagccca

SEQ ID NO: 5269272 - DNA, 25 bp, Homo sapien
aggcctgaagtcccatggagcccat

SEQ ID NO: 5269273 - DNA, 25 bp, Homo sapien
ggcggtgaatggtctccattaggaa

SEQ ID NO: 5269274 - DNA, 25 bp, Homo sapien
cgggcggtgaatggtctccattagg

SEQ ID NO: 5269275 - DNA, 25 bp, Homo sapien
cggtgaatggtctccattaggaagc

SEQ ID NO: 5269276 - DNA, 25 bp, Homo sapien
ggtgaatggtctccattaggaagcc

SEQ ID NO: 5269277 - DNA, 25 bp, Homo sapien
ctttgtgcaggtggcgtgtgctgcg

SEQ ID NO: 5269278 - DNA, 25 bp, Homo sapien
tgtgcaggtggcgtgtgctgcgatg

SEQ ID NO: 5269279 - DNA, 25 bp, Homo sapien
gcaggtggcgtgtgctgcgatggcc

SEQ ID NO: 5269280 - DNA, 25 bp, Homo sapien
cgatggccaacgggggctggagggc

SEQ ID NO: 5269281 - DNA, 25 bp, Homo sapien
tcagaggctggcaccgtgcccttca

SEQ ID NO: 5269282 - DNA, 25 bp, Homo sapien
gcagcaaggacccagatcagaggct

SEQ ID NO: 5269283 - DNA, 25 bp, Homo sapien
tatggcagcaaggacccagatcaga

SEQ ID NO: 5269284 - DNA, 25 bp, Homo sapien
cttcatatggcagcaaggacccaga

SEQ ID NO: 5269285 - DNA, 25 bp, Homo sapien
gcgatcaccacggcactctctgagg

SEQ ID NO: 5269286 - DNA, 25 bp, Homo sapien
ctcttcctggttagatcctgctcca

SEQ ID NO: 5269287 - DNA, 25 bp, Homo sapien
tccggctgagtagttgccattcctc

SEQ ID NO: 5269288 - DNA, 25 bp, Homo sapien
tcctgcccgctgctgagtccggctg

SEQ ID NO: 5269289 - DNA, 25 bp, Homo sapien
gccctgacctgtgccctcggaggct

SEQ ID NO: 5269290 - DNA, 25 bp, Homo sapien
tcattctccatggaaccgcccttac

SEQ ID NO: 5269291 - DNA, 25 bp, Homo sapien
taaataatcatgacgtcctcattct

SEQ ID NO: 5269292 - DNA, 25 bp, Homo sapien
ttaaataatcatgacgtcctcattc

SEQ ID NO: 5269293 - DNA, 25 bp, Homo sapien
aaataatcatgacgtcctcattctc

SEQ ID NO: 5269294 - DNA, 25 bp, Homo sapien
tcctctcttcctttgcggtcactgc

SEQ ID NO: 5269295 - DNA, 25 bp, Homo sapien
ctcttcctttgcggtcactgccgct

SEQ ID NO: 5269296 - DNA, 25 bp, Homo sapien
cttcctttgcggtcactgccgctgt

SEQ ID NO: 5269297 - DNA, 25 bp, Homo sapien
ctctcttcctttgcggtcactgccg

SEQ ID NO: 5269298 - DNA, 25 bp, Homo sapien
gagaagggctcaaaagaactgcctc

SEQ ID NO: 5269299 - DNA, 25 bp, Homo sapien
tggacccccgcagggtgcacaggca

SEQ ID NO: 5269300 - DNA, 25 bp, Homo sapien
gaagggctcaaaagaactgcctctg

SEQ ID NO: 5269301 - DNA, 25 bp, Homo sapien
gctggacccccgcagggtgcacagg

SEQ ID NO: 5269302 - DNA, 25 bp, Homo sapien
ggaggctcacatcattaagtttaga

SEQ ID NO: 5269303 - DNA, 25 bp, Homo sapien
gcagctccgactcagatggattgag

SEQ ID NO: 5269304 - DNA, 25 bp, Homo sapien
attcctacgtggcaacacaaggatc

SEQ ID NO: 5269305 - DNA, 25 bp, Homo sapien
tgtgagtgccccaacagtggaaatg

SEQ ID NO: 5269306 - DNA, 25 bp, Homo sapien
taaatgatagcactagtggtgagca

SEQ ID NO: 5269307 - DNA, 25 bp, Homo sapien
tggtgagcatcacagtcacccctgg

SEQ ID NO: 5269308 - DNA, 25 bp, Homo sapien
cagcctgcagagttcgattcacttt

SEQ ID NO: 5269309 - DNA, 25 bp, Homo sapien
ccatctctttatgtggacaccagcc

SEQ ID NO: 5269310 - DNA, 25 bp, Homo sapien
cacaactctatatcagcaaggaggc

SEQ ID NO: 5269311 - DNA, 25 bp, Homo sapien
catccgcgcaccatcgtcaagaaat

SEQ ID NO: 5269312 - DNA, 25 bp, Homo sapien
cttaaagctccttctctgatgactc

SEQ ID NO: 5269313 - DNA, 25 bp, Homo sapien
gcctgtttcatcgtttcactgccat

SEQ ID NO: 5269314 - DNA, 25 bp, Homo sapien
catctgtttcacattctaatacaca

SEQ ID NO: 5269315 - DNA, 25 bp, Homo sapien
ttctaatacacaaatactccagtgg

SEQ ID NO: 5269316 - DNA, 25 bp, Homo sapien
tcacattctaatacacaaatactcc

SEQ ID NO: 5269317 - DNA, 25 bp, Homo sapien
actccagtggagagtggcagccacc

SEQ ID NO: 5269318 - DNA, 25 bp, Homo sapien
tcccattgctcccaatctcacacag

SEQ ID NO: 5269319 - DNA, 25 bp, Homo sapien
tggattctcagtttagccctgccag

SEQ ID NO: 5269320 - DNA, 25 bp, Homo sapien
tgccaggcccatgctgcagaggcgc

SEQ ID NO: 5269321 - DNA, 25 bp, Homo sapien
tcccaatctcacacagctcctggat

SEQ ID NO: 5269322 - DNA, 25 bp, Homo sapien
cagccacaggcgacaccgcacagca

SEQ ID NO: 5269323 - DNA, 25 bp, Homo sapien
agccacaggcgacaccgcacagcac

SEQ ID NO: 5269324 - DNA, 25 bp, Homo sapien
tggcactgacgctgccgtccacagc

SEQ ID NO: 5269325 - DNA, 25 bp, Homo sapien
acagccacaggcgacaccgcacagc

SEQ ID NO: 5269326 - DNA, 25 bp, Homo sapien
gcattttacaaatagaagtactgtt

SEQ ID NO: 5269327 - DNA, 25 bp, Homo sapien
gaagtactgttgatgacgcccaaac

SEQ ID NO: 5269328 - DNA, 25 bp, Homo sapien
atagaagtactgttgatgacgccca

SEQ ID NO: 5269329 - DNA, 25 bp, Homo sapien
tagaagtactgttgatgacgcccaa

SEQ ID NO: 5269330 - DNA, 25 bp, Homo sapien
ggcacactcgctttctctaacggaa

SEQ ID NO: 5269331 - DNA, 25 bp, Homo sapien
tgatgatggccgcactggcaatggc

SEQ ID NO: 5269332 - DNA, 25 bp, Homo sapien
cattgggtcccacgtggtgctgtcc

SEQ ID NO: 5269333 - DNA, 25 bp, Homo sapien
gacgatggccgcactgatgatggca

SEQ ID NO: 5269334 - DNA, 25 bp, Homo sapien
gctcctgaaagaatgagccgagcac

SEQ ID NO: 5269335 - DNA, 25 bp, Homo sapien
cagagctcctgaaagaatgagccga

SEQ ID NO: 5269336 - DNA, 25 bp, Homo sapien
gagctcctgaaagaatgagccgagc

SEQ ID NO: 5269337 - DNA, 25 bp, Homo sapien
ctcctgaaagaatgagccgagcacc

SEQ ID NO: 5269338 - DNA, 25 bp, Homo sapien
tattgcaggaacagacattttttta

SEQ ID NO: 5269339 - DNA, 25 bp, Homo sapien
aagaagagttactattgcaggaaca

SEQ ID NO: 5269340 - DNA, 25 bp, Homo sapien
tctcaagagaaagaagagttactat

SEQ ID NO: 5269341 - DNA, 25 bp, Homo sapien
gagaaagaagagttactattgcagg

SEQ ID NO: 5269342 - DNA, 25 bp, Homo sapien
attagctgtgccgtcgacaatagcc

SEQ ID NO: 5269343 - DNA, 25 bp, Homo sapien
gctctcccagagagggatccacctg

SEQ ID NO: 5269344 - DNA, 25 bp, Homo sapien
ccaaagagctgcgactgtttgagaa

SEQ ID NO: 5269345 - DNA, 25 bp, Homo sapien
ggaacacgagtcacctccaaagagc

SEQ ID NO: 5269346 - DNA, 25 bp, Homo sapien
aaaccactcaatgggacctggataa

SEQ ID NO: 5269347 - DNA, 25 bp, Homo sapien
cactcaatgggacctggataaccca

SEQ ID NO: 5269348 - DNA, 25 bp, Homo sapien
accactcaatgggacctggataacc

SEQ ID NO: 5269349 - DNA, 25 bp, Homo sapien
tcaatgggacctggataacccaggc

SEQ ID NO: 5269350 - DNA, 25 bp, Homo sapien
atgtggtacttcagggccctgggca

SEQ ID NO: 5269351 - DNA, 25 bp, Homo sapien
gcaggatgtggtacttcagggccct

SEQ ID NO: 5269352 - DNA, 25 bp, Homo sapien
tcatagcaggatgtggtacttcagg

SEQ ID NO: 5269353 - DNA, 25 bp, Homo sapien
tgtggtacttcagggccctgggcac

SEQ ID NO: 5269354 - DNA, 25 bp, Homo sapien
cagtccacggcatagacgctgtcct

SEQ ID NO: 5269355 - DNA, 25 bp, Homo sapien
tgttgatcacgagcctcccgtcata

SEQ ID NO: 5269356 - DNA, 25 bp, Homo sapien
taggtggcgatcacgttgtcctgca

SEQ ID NO: 5269357 - DNA, 25 bp, Homo sapien
tcccgtcatagctcagggaggcaaa

SEQ ID NO: 5269358 - DNA, 25 bp, Homo sapien
acatcgggagacacgggaggtactg

SEQ ID NO: 5269359 - DNA, 25 bp, Homo sapien
ggaagaattagaggagcccacaccg

SEQ ID NO: 5269360 - DNA, 25 bp, Homo sapien
tgcaatgcaacagaggcagacgtga

SEQ ID NO: 5269361 - DNA, 25 bp, Homo sapien
acgcgagcgctgacatcgggagaca

SEQ ID NO: 5269362 - DNA, 25 bp, Homo sapien
ccagaactcgcatggtctctgggaa

SEQ ID NO: 5269363 - DNA, 25 bp, Homo sapien
cataatttgtgtaccgcattctaac

SEQ ID NO: 5269364 - DNA, 25 bp, Homo sapien
ctttccggtggacacaggcttctct

SEQ ID NO: 5269365 - DNA, 25 bp, Homo sapien
aagacggaccctccagaactcgcat

SEQ ID NO: 5269366 - DNA, 25 bp, Homo sapien
tcctaagaagtctgcgtagccccga

SEQ ID NO: 5269367 - DNA, 25 bp, Homo sapien
tgttgtgggacaaatgccaggtgca

SEQ ID NO: 5269368 - DNA, 25 bp, Homo sapien
gaagacaacgccagcagtcttccga

SEQ ID NO: 5269369 - DNA, 25 bp, Homo sapien
gccaggtgcaaatccttaggaggaa

SEQ ID NO: 5269370 - DNA, 25 bp, Homo sapien
cactgggcagatgctaccgtgcgtg

SEQ ID NO: 5269371 - DNA, 25 bp, Homo sapien
cagacatggtgaggaagtgcagact

SEQ ID NO: 5269372 - DNA, 25 bp, Homo sapien
taaatactattctatggcagaccga

SEQ ID NO: 5269373 - DNA, 25 bp, Homo sapien
acaggcaccgagagaccactgggca

SEQ ID NO: 5269374 - DNA, 25 bp, Homo sapien
ggctgctaatgacggcacccctgga

SEQ ID NO: 5269375 - DNA, 25 bp, Homo sapien
gggctgctaatgacggcacccctgg

SEQ ID NO: 5269376 - DNA, 25 bp, Homo sapien
gctgctaatgacggcacccctggaa

SEQ ID NO: 5269377 - DNA, 25 bp, Homo sapien
ggtaaggagagtgtcccccaaatgc

SEQ ID NO: 5269378 - DNA, 25 bp, Homo sapien
catacacagcctggctcgggagatg

SEQ ID NO: 5269379 - DNA, 25 bp, Homo sapien
cacagctgcagtgggtaaggagagt

SEQ ID NO: 5269380 - DNA, 25 bp, Homo sapien
ctttctacatacacagcctggctcg

SEQ ID NO: 5269381 - DNA, 25 bp, Homo sapien
ggctccgacgagatggacaccatgt

SEQ ID NO: 5269382 - DNA, 25 bp, Homo sapien
agagtggttgtagcggacgttccac

SEQ ID NO: 5269383 - DNA, 25 bp, Homo sapien
tcgtctaccaagtggccgaagggct

SEQ ID NO: 5269384 - DNA, 25 bp, Homo sapien
ttctcttcagaacggtggtcctcct

SEQ ID NO: 5269385 - DNA, 25 bp, Homo sapien
gaacttcaccttacagtcgtctccg

SEQ ID NO: 5269386 - DNA, 25 bp, Homo sapien
gtctccgcagctggccaagtagtac

SEQ ID NO: 5269387 - DNA, 25 bp, Homo sapien
tccagggtcttcacgggttcggtga

SEQ ID NO: 5269388 - DNA, 25 bp, Homo sapien
gattaaagtcaaggtcccgcaccag

SEQ ID NO: 5269389 - DNA, 25 bp, Homo sapien
agggtgctctcatcccctcggcgtt

SEQ ID NO: 5269390 - DNA, 25 bp, Homo sapien
agcaaccctgtgtggtcgcaccacg

SEQ ID NO: 5269391 - DNA, 25 bp, Homo sapien
ggattaggaaaagccactgcgtgct

SEQ ID NO: 5269392 - DNA, 25 bp, Homo sapien
gcgtgctgcgggcacacactggttt

SEQ ID NO: 5269393 - DNA, 25 bp, Homo sapien
gaaatgagtcacacggctgttcaca

SEQ ID NO: 5269394 - DNA, 25 bp, Homo sapien
agtgcaacccactcgctccagggtg

SEQ ID NO: 5269395 - DNA, 25 bp, Homo sapien
tgttcacagtgcgtgcgttctcaca

SEQ ID NO: 5269396 - DNA, 25 bp, Homo sapien
tctatgcatgagagggcagacacgc

SEQ ID NO: 5269397 - DNA, 25 bp, Homo sapien
gcagcggctcatcagacacgggcac

SEQ ID NO: 5269398 - DNA, 25 bp, Homo sapien
ggctcatcagacacgggcaccctgt

SEQ ID NO: 5269399 - DNA, 25 bp, Homo sapien
atcagacacgggcaccctgtggtcc

SEQ ID NO: 5269400 - DNA, 25 bp, Homo sapien
tgcagcggctcatcagacacgggca

SEQ ID NO: 5269401 - DNA, 25 bp, Homo sapien
tgggctccaccgtcctgaggtgaac

SEQ ID NO: 5269402 - DNA, 25 bp, Homo sapien
gtggtgtcgttcgctgtggccacct

SEQ ID NO: 5269403 - DNA, 25 bp, Homo sapien
gggtgcagttatgatgtgggctcca

SEQ ID NO: 5269404 - DNA, 25 bp, Homo sapien
tcccagccacggagggtggtgtcgt

SEQ ID NO: 5269405 - DNA, 25 bp, Homo sapien
gctcgcctaggatttcatgcacaaa

SEQ ID NO: 5269406 - DNA, 25 bp, Homo sapien
tcacttggtcagatgctgtctccag

SEQ ID NO: 5269407 - DNA, 25 bp, Homo sapien
tgtgagcctgcaagaagatccccag

SEQ ID NO: 5269408 - DNA, 25 bp, Homo sapien
cacctgagcggttccggaataacaa

SEQ ID NO: 5269409 - DNA, 25 bp, Homo sapien
gcactgaacttggtgaggacagcca

SEQ ID NO: 5269410 - DNA, 25 bp, Homo sapien
agcaggacagagtgaccgaaccaga

SEQ ID NO: 5269411 - DNA, 25 bp, Homo sapien
gcagggctggaaccaagcactgaac

SEQ ID NO: 5269412 - DNA, 25 bp, Homo sapien
agagtgaccgaaccagaaaggctgg

SEQ ID NO: 5269413 - DNA, 25 bp, Homo sapien
tggcctcctggaagagtagagcctt

SEQ ID NO: 5269414 - DNA, 25 bp, Homo sapien
agagtctgcattgtggcctcctgga

SEQ ID NO: 5269415 - DNA, 25 bp, Homo sapien
ggagacgaagtctgagatgcacaga

SEQ ID NO: 5269416 - DNA, 25 bp, Homo sapien
gagctgacccgcatgagagtctgca

SEQ ID NO: 5269417 - DNA, 25 bp, Homo sapien
tcagaccacgtcaccttcagacact

SEQ ID NO: 5269418 - DNA, 25 bp, Homo sapien
ctgcttccgtcgttagctttcctct

SEQ ID NO: 5269419 - DNA, 25 bp, Homo sapien
gaccacgtcaccttcagacacttcc

SEQ ID NO: 5269420 - DNA, 25 bp, Homo sapien
cttccgtcgttagctttcctcttct

SEQ ID NO: 5269421 - DNA, 25 bp, Homo sapien
cgagtccttcttccttgagtgaggc

SEQ ID NO: 5269422 - DNA, 25 bp, Homo sapien
aggctcgtggcaggtcctccttctg

SEQ ID NO: 5269423 - DNA, 25 bp, Homo sapien
tcttccatgcgtgaggctcgtggcg

SEQ ID NO: 5269424 - DNA, 25 bp, Homo sapien
ccatggcattctggtatgcttggca

SEQ ID NO: 5269425 - DNA, 25 bp, Homo sapien
cagggtccgtgcacgctccttcaga

SEQ ID NO: 5269426 - DNA, 25 bp, Homo sapien
acagggtccgtgcacgctccttcag

SEQ ID NO: 5269427 - DNA, 25 bp, Homo sapien
cacacacagggtccgtgcacgctcc

SEQ ID NO: 5269428 - DNA, 25 bp, Homo sapien
cacacagggtccgtgcacgctcctt

SEQ ID NO: 5269429 - DNA, 25 bp, Homo sapien
aaccaaagtggaccctgacgtcact

SEQ ID NO: 5269430 - DNA, 25 bp, Homo sapien
tggaccctgacgtcactgtcaaacg

SEQ ID NO: 5269431 - DNA, 25 bp, Homo sapien
aaagtggaccctgacgtcactgtca

SEQ ID NO: 5269432 - DNA, 25 bp, Homo sapien
gaccctgacgtcactgtcaaacgca

SEQ ID NO: 5269433 - DNA, 25 bp, Homo sapien
aagcaggagacgatcttcagcatcc

SEQ ID NO: 5269434 - DNA, 25 bp, Homo sapien
gaaagcaggagacgatcttcagcat

SEQ ID NO: 5269435 - DNA, 25 bp, Homo sapien
caggagacgatcttcagcatccaag

SEQ ID NO: 5269436 - DNA, 25 bp, Homo sapien
gagaaagcaggagacgatcttcagc

SEQ ID NO: 5269437 - DNA, 25 bp, Homo sapien
tacagaaacaaacgctgtgttgttg

SEQ ID NO: 5269438 - DNA, 25 bp, Homo sapien
agaaacaaacgctgtgttgttgctt

SEQ ID NO: 5269439 - DNA, 25 bp, Homo sapien
cagaaacaaacgctgtgttgttgct

SEQ ID NO: 5269440 - DNA, 25 bp, Homo sapien
aaatacagaaacaaacgctgtgttg

SEQ ID NO: 5269441 - DNA, 25 bp, Homo sapien
aatcccacagcaggatatggttatc

SEQ ID NO: 5269442 - DNA, 25 bp, Homo sapien
cagcaggatatggttatcagccaag

SEQ ID NO: 5269443 - DNA, 25 bp, Homo sapien
tgtaaatcccacagcaggatatggt

SEQ ID NO: 5269444 - DNA, 25 bp, Homo sapien
cacagcaggatatggttatcagcca

SEQ ID NO: 5269445 - DNA, 25 bp, Homo sapien
ctaagagaaagagaagtaccaaatg

SEQ ID NO: 5269446 - DNA, 25 bp, Homo sapien
aacatttgagatacccaggctggta

SEQ ID NO: 5269447 - DNA, 25 bp, Homo sapien
gaaagagaagtaccaaatgttaaca

SEQ ID NO: 5269448 - DNA, 25 bp, Homo sapien
ccaggctggtaggtaagagctgtga

SEQ ID NO: 5269449 - DNA, 25 bp, Homo sapien
ctctgcgataaagccataaagggac

SEQ ID NO: 5269450 - DNA, 25 bp, Homo sapien
ctgcgataaagccataaagggacca

SEQ ID NO: 5269451 - DNA, 25 bp, Homo sapien
gcgataaagccataaagggaccaag

SEQ ID NO: 5269452 - DNA, 25 bp, Homo sapien
tgcgataaagccataaagggaccaa

SEQ ID NO: 5269453 - DNA, 25 bp, Homo sapien
agagatgttcgtcacatcccactgc

SEQ ID NO: 5269454 - DNA, 25 bp, Homo sapien
catcccactgcagattagtggagaa

SEQ ID NO: 5269455 - DNA, 25 bp, Homo sapien
gtagaaagagatgttcgtcacatcc

SEQ ID NO: 5269456 - DNA, 25 bp, Homo sapien
tgcagattagtggagaagccgccct

SEQ ID NO: 5269457 - DNA, 25 bp, Homo sapien
tcaacactgttaggacagcatcaca

SEQ ID NO: 5269458 - DNA, 25 bp, Homo sapien
aaaatttagtcagcagccccgtgga

SEQ ID NO: 5269459 - DNA, 25 bp, Homo sapien
tgagcacaggccagttatgacccat

SEQ ID NO: 5269460 - DNA, 25 bp, Homo sapien
aatttacgttgaggtgcatcatccg

SEQ ID NO: 5269461 - DNA, 25 bp, Homo sapien
gctacagacaatatatgaccaaagg

SEQ ID NO: 5269462 - DNA, 25 bp, Homo sapien
gagtcaaagttctcagcaccctgag

SEQ ID NO: 5269463 - DNA, 25 bp, Homo sapien
tcttcatcaaagttccatctgggta

SEQ ID NO: 5269464 - DNA, 25 bp, Homo sapien
gagcaggtgtcaggctttctctata

SEQ ID NO: 5269465 - DNA, 25 bp, Homo sapien
caaagacgcacccagggagggatta

SEQ ID NO: 5269466 - DNA, 25 bp, Homo sapien
cacccagggagggattagactgagt

SEQ ID NO: 5269467 - DNA, 25 bp, Homo sapien
tagactgagtgatccccacacaggt

SEQ ID NO: 5269468 - DNA, 25 bp, Homo sapien
aaggcacacaaagacgcacccaggg

SEQ ID NO: 5269469 - DNA, 25 bp, Homo sapien
cttgtctccctccacgggctggtga

SEQ ID NO: 5269470 - DNA, 25 bp, Homo sapien
tcttccacctacatcggccagctgg

SEQ ID NO: 5269471 - DNA, 25 bp, Homo sapien
agcagctcaggaccggagtcaccaa

SEQ ID NO: 5269472 - DNA, 25 bp, Homo sapien
ccagagccgcgggaggtcctgtcgc

SEQ ID NO: 5269473 - DNA, 25 bp, Homo sapien
ctgcacaggtgattcccatcccaga

SEQ ID NO: 5269474 - DNA, 25 bp, Homo sapien
tgcacaggtgattcccatcccagag

SEQ ID NO: 5269475 - DNA, 25 bp, Homo sapien
tccctgtggggatgctgattgttct

SEQ ID NO: 5269476 - DNA, 25 bp, Homo sapien
ctgtggggatgctgattgttctctt

SEQ ID NO: 5269477 - DNA, 25 bp, Homo sapien
gatgcacagacgcttagacacagga

SEQ ID NO: 5269478 - DNA, 25 bp, Homo sapien
tggacatcccgggtgcctgtttgct

SEQ ID NO: 5269479 - DNA, 25 bp, Homo sapien
gccatgaggtggatccgtcttctga

SEQ ID NO: 5269480 - DNA, 25 bp, Homo sapien
tctgatttggccatcgtgcgtctgc

SEQ ID NO: 5269481 - DNA, 25 bp, Homo sapien
cacacccactgacggctggaagaca

SEQ ID NO: 5269482 - DNA, 25 bp, Homo sapien
tggcagcagccaccgatggctggaa

SEQ ID NO: 5269483 - DNA, 25 bp, Homo sapien
agcagccaccgatggctggaagaca

SEQ ID NO: 5269484 - DNA, 25 bp, Homo sapien
tccacacccactgacggctggaaga

SEQ ID NO: 5269485 - DNA, 25 bp, Homo sapien
aattaacagcctaagtatatgcttc

SEQ ID NO: 5269486 - DNA, 25 bp, Homo sapien
agaaacaagcactctaacactaaga

SEQ ID NO: 5269487 - DNA, 25 bp, Homo sapien
gcttcatagaacttgggcatagctc

SEQ ID NO: 5269488 - DNA, 25 bp, Homo sapien
cactctaacactaagaattcacaag

SEQ ID NO: 5269489 - DNA, 25 bp, Homo sapien
aacatgagctgggtaggtgcaaagt

SEQ ID NO: 5269490 - DNA, 25 bp, Homo sapien
ctcccctttatcagggctccgaagg

SEQ ID NO: 5269491 - DNA, 25 bp, Homo sapien
tttatcagggctccgaagggcactg

SEQ ID NO: 5269492 - DNA, 25 bp, Homo sapien
aagggcactggtgtaaacatgagct

SEQ ID NO: 5269493 - DNA, 25 bp, Homo sapien
ctagcaggagctaaaggcgactggt

SEQ ID NO: 5269494 - DNA, 25 bp, Homo sapien
ttcccactagcaggagctaaaggcg

SEQ ID NO: 5269495 - DNA, 25 bp, Homo sapien
tggtggggtgccctgttcagcctct

SEQ ID NO: 5269496 - DNA, 25 bp, Homo sapien
ctgttcccactagcaggagctaaag

SEQ ID NO: 5269497 - DNA, 25 bp, Homo sapien
tccagggaatcaagccgagtaaaga

SEQ ID NO: 5269498 - DNA, 25 bp, Homo sapien
agcagcaactcaacctccagggaat

SEQ ID NO: 5269499 - DNA, 25 bp, Homo sapien
tgcgtcatgccatgggatatcccgc

SEQ ID NO: 5269500 - DNA, 25 bp, Homo sapien
atatcccgccgcagcaaagaggaac

SEQ ID NO: 5269501 - DNA, 25 bp, Homo sapien
ttttcataagtctatgtaggtatga

SEQ ID NO: 5269502 - DNA, 25 bp, Homo sapien
tttcataagtctatgtaggtatgat

SEQ ID NO: 5269503 - DNA, 25 bp, Homo sapien
tattttcataagtctatgtaggtat

SEQ ID NO: 5269504 - DNA, 25 bp, Homo sapien
actattttcataagtctatgtaggt

SEQ ID NO: 5269505 - DNA, 25 bp, Homo sapien
agttgagaagcagtctgacagctcc

SEQ ID NO: 5269506 - DNA, 25 bp, Homo sapien
taataatcagttccccatgacacac

SEQ ID NO: 5269507 - DNA, 25 bp, Homo sapien
acacacccatgtggcctgtctttgc

SEQ ID NO: 5269508 - DNA, 25 bp, Homo sapien
tacacatgctaacctccctaacgtg

SEQ ID NO: 5269509 - DNA, 25 bp, Homo sapien
tgaataagtgcatgctgaccaagct

SEQ ID NO: 5269510 - DNA, 25 bp, Homo sapien
cattcatgctttgtccacgggagga

SEQ ID NO: 5269511 - DNA, 25 bp, Homo sapien
caagctcatgaagcagcgactggcc

SEQ ID NO: 5269512 - DNA, 25 bp, Homo sapien
ccagggagccacgtgaatgacacac

SEQ ID NO: 5269513 - DNA, 25 bp, Homo sapien
gggcaacactcctcttagatgaaga

SEQ ID NO: 5269514 - DNA, 25 bp, Homo sapien
gatgcaggcgcgctggctacatttc

SEQ ID NO: 5269515 - DNA, 25 bp, Homo sapien
ctggcaggtccccacgggcaacact

SEQ ID NO: 5269516 - DNA, 25 bp, Homo sapien
gcgcgctggctacatttctgtcaat

SEQ ID NO: 5269517 - DNA, 25 bp, Homo sapien
tcaggggactcgtggctgcctgatt

SEQ ID NO: 5269518 - DNA, 25 bp, Homo sapien
catgggctgtgttgtcaaggtgaca

SEQ ID NO: 5269519 - DNA, 25 bp, Homo sapien
ctggatgaatcatcaggggactcgt

SEQ ID NO: 5269520 - DNA, 25 bp, Homo sapien
cttcggcatcctccacacggctgca

SEQ ID NO: 5269521 - DNA, 25 bp, Homo sapien
ggaccggaaggtaatgccattcaga

SEQ ID NO: 5269522 - DNA, 25 bp, Homo sapien
gaggcatcgcatgctgaggcctgga

SEQ ID NO: 5269523 - DNA, 25 bp, Homo sapien
ctaaagtgatgagtatctgggaccg

SEQ ID NO: 5269524 - DNA, 25 bp, Homo sapien
tgagtatctgggaccggaaggtaat

SEQ ID NO: 5269525 - DNA, 25 bp, Homo sapien
taatcgaccaagcaatatagcaacg

SEQ ID NO: 5269526 - DNA, 25 bp, Homo sapien
gaatattattaataccattgttaac

SEQ ID NO: 5269527 - DNA, 25 bp, Homo sapien
tatagcaacgaactcaatgacaaaa

SEQ ID NO: 5269528 - DNA, 25 bp, Homo sapien
gatgctcttgcgatctcaatatcaa

SEQ ID NO: 5269529 - DNA, 25 bp, Homo sapien
tcaaatgggattgacatcctgggca

SEQ ID NO: 5269530 - DNA, 25 bp, Homo sapien
ggtctgttaaggtcaaatgggattg

SEQ ID NO: 5269531 - DNA, 25 bp, Homo sapien
cagtttgtgaaatacccataccggg

SEQ ID NO: 5269532 - DNA, 25 bp, Homo sapien
cacctggtgggcaactccaaggtct

SEQ ID NO: 5269533 - DNA, 25 bp, Homo sapien
gccctggagaatgcctgtggatgac

SEQ ID NO: 5269534 - DNA, 25 bp, Homo sapien
gactctaagctcaacaaagcaggag

SEQ ID NO: 5269535 - DNA, 25 bp, Homo sapien
tacacagaccgtcaaatgcacgctg

SEQ ID NO: 5269536 - DNA, 25 bp, Homo sapien
tctgcagaaagctaatgggccctgg

SEQ ID NO: 5269537 - DNA, 25 bp, Homo sapien
caacaggatgtctgaagatctgggc

SEQ ID NO: 5269538 - DNA, 25 bp, Homo sapien
caggtacgcctcggggtgcacaaca

SEQ ID NO: 5269539 - DNA, 25 bp, Homo sapien
gtacgcctcggggtgcacaacagga

SEQ ID NO: 5269540 - DNA, 25 bp, Homo sapien
acaacaggatgtctgaagatctggg

SEQ ID NO: 5269541 - DNA, 25 bp, Homo sapien
tacagattgcatcgcctgagtgtgc

SEQ ID NO: 5269542 - DNA, 25 bp, Homo sapien
gccaatcagagcagtctagcccaga

SEQ ID NO: 5269543 - DNA, 25 bp, Homo sapien
gcggcaaggctgatgagcaagacaa

SEQ ID NO: 5269544 - DNA, 25 bp, Homo sapien
gacaaggatgacaccaactctctta

SEQ ID NO: 5269545 - DNA, 25 bp, Homo sapien
tgccacctcaggtgctgaaggcgcc

SEQ ID NO: 5269546 - DNA, 25 bp, Homo sapien
cacctcaggtgctgaaggcgccctg

SEQ ID NO: 5269547 - DNA, 25 bp, Homo sapien
ctcaggtgctgaaggcgccctgcag

SEQ ID NO: 5269548 - DNA, 25 bp, Homo sapien
ttgccacctcaggtgctgaaggcgc

SEQ ID NO: 5269549 - DNA, 25 bp, Homo sapien
gcacagactgtttggctgctgtcct

SEQ ID NO: 5269550 - DNA, 25 bp, Homo sapien
ccttggaggtgagcccccgttctca

SEQ ID NO: 5269551 - DNA, 25 bp, Homo sapien
ttctcagccgaaagccctggaagga

SEQ ID NO: 5269552 - DNA, 25 bp, Homo sapien
cgtgccctgtgtagcgcacagactg

SEQ ID NO: 5269553 - DNA, 25 bp, Homo sapien
acagaaagcacactaggacagcgcg

SEQ ID NO: 5269554 - DNA, 25 bp, Homo sapien
tacccaaacaacacaagtgcacagg

SEQ ID NO: 5269555 - DNA, 25 bp, Homo sapien
ggcatcttcaccaacacgaggccga

SEQ ID NO: 5269556 - DNA, 25 bp, Homo sapien
ccttggctcggagaggcttcaagct

SEQ ID NO: 5269557 - DNA, 25 bp, Homo sapien
tccatgcggcggtggtagctgcttc

SEQ ID NO: 5269558 - DNA, 25 bp, Homo sapien
tttgcgtctccatgcggcggtggta

SEQ ID NO: 5269559 - DNA, 25 bp, Homo sapien
ttttccttttgcgtctccatgcggc

SEQ ID NO: 5269560 - DNA, 25 bp, Homo sapien
taccttttccttttgcgtctccatg

SEQ ID NO: 5269561 - DNA, 25 bp, Homo sapien
tcccaagagcaccaaaggaatccag

SEQ ID NO: 5269562 - DNA, 25 bp, Homo sapien
ccaagagcaccaaaggaatccagag

SEQ ID NO: 5269563 - DNA, 25 bp, Homo sapien
tgaacagttgggcagctgacttccc

SEQ ID NO: 5269564 - DNA, 25 bp, Homo sapien
aggttgccagtgctatgaacagttg

SEQ ID NO: 5269565 - DNA, 25 bp, Homo sapien
tgtggggactccaggtacgaggcac

SEQ ID NO: 5269566 - DNA, 25 bp, Homo sapien
gggactccaggtacgaggcacaggc

SEQ ID NO: 5269567 - DNA, 25 bp, Homo sapien
gactccaggtacgaggcacaggccc

SEQ ID NO: 5269568 - DNA, 25 bp, Homo sapien
ctgtctgtggggactccaggtacga

SEQ ID NO: 5269569 - DNA, 25 bp, Homo sapien
aacagaagcaatctggcagacagca

SEQ ID NO: 5269570 - DNA, 25 bp, Homo sapien
tgatacgtgagttcacctgtgctct

SEQ ID NO: 5269571 - DNA, 25 bp, Homo sapien
tggcagacagcataaaccttggttg

SEQ ID NO: 5269572 - DNA, 25 bp, Homo sapien
gctctgagtacatcgaaccattttt

SEQ ID NO: 5269573 - DNA, 25 bp, Homo sapien
caggtgcctcgaggcggcatctcag

SEQ ID NO: 5269574 - DNA, 25 bp, Homo sapien
cccggcctcgttcccatcctccagg

SEQ ID NO: 5269575 - DNA, 25 bp, Homo sapien
ggcatctcaggcttcacacgagcca

SEQ ID NO: 5269576 - DNA, 25 bp, Homo sapien
cacagaggaactcggacccggtctc

SEQ ID NO: 5269577 - DNA, 25 bp, Homo sapien
tggtcctctaggagaacccaagcac

SEQ ID NO: 5269578 - DNA, 25 bp, Homo sapien
ggtcctctaggagaacccaagcacc

SEQ ID NO: 5269579 - DNA, 25 bp, Homo sapien
gtcctctaggagaacccaagcacca

SEQ ID NO: 5269580 - DNA, 25 bp, Homo sapien
ccccatccacataaagccatgttcc

SEQ ID NO: 5269581 - DNA, 25 bp, Homo sapien
taaagccatgttccctgggcacagc

SEQ ID NO: 5269582 - DNA, 25 bp, Homo sapien
cataaagccatgttccctgggcaca

SEQ ID NO: 5269583 - DNA, 25 bp, Homo sapien
ccacataaagccatgttccctgggc

SEQ ID NO: 5269584 - DNA, 25 bp, Homo sapien
cacagttgagtggacacaaacatcc

SEQ ID NO: 5269585 - DNA, 25 bp, Homo sapien
tcttggcccaaaagtgccctctggt

SEQ ID NO: 5269586 - DNA, 25 bp, Homo sapien
cactcaacaacttggaaatcaggga

SEQ ID NO: 5269587 - DNA, 25 bp, Homo sapien
tactcgaggtctggctcacacagtt

SEQ ID NO: 5269588 - DNA, 25 bp, Homo sapien
catcccgttcattccctcatgttta

SEQ ID NO: 5269589 - DNA, 25 bp, Homo sapien
tctgtctcgttagtcatcccgttca

SEQ ID NO: 5269590 - DNA, 25 bp, Homo sapien
ccagattgcggtctctgtctcgtta

SEQ ID NO: 5269591 - DNA, 25 bp, Homo sapien
ggtctctgtctcgttagtcatcccg

SEQ ID NO: 5269592 - DNA, 25 bp, Homo sapien
actgacatcggtgcctacagacggc

SEQ ID NO: 5269593 - DNA, 25 bp, Homo sapien
ttgaagtgtgcgctcccgagtctgc

SEQ ID NO: 5269594 - DNA, 25 bp, Homo sapien
tgaaacccgactgccaatgcactga

SEQ ID NO: 5269595 - DNA, 25 bp, Homo sapien
gcctgtcgcggtgctggctgaacct

SEQ ID NO: 5269596 - DNA, 25 bp, Homo sapien
tcagcaccaccacgctgggctggcc

SEQ ID NO: 5269597 - DNA, 25 bp, Homo sapien
ctctcagcaccaccacgctgggctg

SEQ ID NO: 5269598 - DNA, 25 bp, Homo sapien
agcaccaccacgctgggctggcctc

SEQ ID NO: 5269599 - DNA, 25 bp, Homo sapien
gggctggcctcctccccacaccagc

SEQ ID NO: 5269600 - DNA, 25 bp, Homo sapien
tttgccaaacgtgaagatcccgaga

SEQ ID NO: 5269601 - DNA, 25 bp, Homo sapien
tatctcccgcaattaaaatgcaggc

SEQ ID NO: 5269602 - DNA, 25 bp, Homo sapien
ttcccagttcctcgggcatcagagg

SEQ ID NO: 5269603 - DNA, 25 bp, Homo sapien
cagccattcctgcatgggatgggta

SEQ ID NO: 5269604 - DNA, 25 bp, Homo sapien
ccgtacctcacagacagccggctct

SEQ ID NO: 5269605 - DNA, 25 bp, Homo sapien
ctctgcgcacctcacaagtacctct

SEQ ID NO: 5269606 - DNA, 25 bp, Homo sapien
gatctccagataggtgctgctgtcc

SEQ ID NO: 5269607 - DNA, 25 bp, Homo sapien
tatgaggaatgagtctaagcctaag

SEQ ID NO: 5269608 - DNA, 25 bp, Homo sapien
tagaatactccctcagcgacttggg

SEQ ID NO: 5269609 - DNA, 25 bp, Homo sapien
tttaacgagggtgcctctgggccaa

SEQ ID NO: 5269610 - DNA, 25 bp, Homo sapien
gagtcaccgcctgatattctgtggt

SEQ ID NO: 5269611 - DNA, 25 bp, Homo sapien
gatttgacaggaccaccatgagggc

SEQ ID NO: 5269612 - DNA, 25 bp, Homo sapien
agtgacgtgacgtcgcggaaccaga

SEQ ID NO: 5269613 - DNA, 25 bp, Homo sapien
cgacaggccggatgaagacagcgat

SEQ ID NO: 5269614 - DNA, 25 bp, Homo sapien
tgctgggctttagcaagctgatcct

SEQ ID NO: 5269615 - DNA, 25 bp, Homo sapien
tgcagttggtggatggcgacaggcc

SEQ ID NO: 5269616 - DNA, 25 bp, Homo sapien
aagctcggagcctcaccagggccat

SEQ ID NO: 5269617 - DNA, 25 bp, Homo sapien
tgggggccaagctcggagcctcacc

SEQ ID NO: 5269618 - DNA, 25 bp, Homo sapien
cagccatgccgagggccaggctaag

SEQ ID NO: 5269619 - DNA, 25 bp, Homo sapien
gccaagctcggagcctcaccagggc

SEQ ID NO: 5269620 - DNA, 25 bp, Homo sapien
tcatttcgtcatgctagcggtggcc

SEQ ID NO: 5269621 - DNA, 25 bp, Homo sapien
gacagaggcccgaagtcatcatttc

SEQ ID NO: 5269622 - DNA, 25 bp, Homo sapien
ggtctgagcccactacaatgtaaag

SEQ ID NO: 5269623 - DNA, 25 bp, Homo sapien
gcgcagacgcattcagcctgaggga

SEQ ID NO: 5269624 - DNA, 25 bp, Homo sapien
caaactgtctttgttcccatgagaa

SEQ ID NO: 5269625 - DNA, 25 bp, Homo sapien
tcaaactgtctttgttcccatgaga

SEQ ID NO: 5269626 - DNA, 25 bp, Homo sapien
tgttcccatgagaaactcaaggccc

SEQ ID NO: 5269627 - DNA, 25 bp, Homo sapien
ccatgagaaactcaaggcccaagct

SEQ ID NO: 5269628 - DNA, 25 bp, Homo sapien
atgccaaacgattctatgatgtctc

SEQ ID NO: 5269629 - DNA, 25 bp, Homo sapien
tgagctacaggaagaatgccaaacg

SEQ ID NO: 5269630 - DNA, 25 bp, Homo sapien
gacaatcgtgggactctgagctaca

SEQ ID NO: 5269631 - DNA, 25 bp, Homo sapien
tgaagaagacctggtgcaacgtgtt

SEQ ID NO: 5269632 - DNA, 25 bp, Homo sapien
tgctctggaagtgcgctgtgtgctc

SEQ ID NO: 5269633 - DNA, 25 bp, Homo sapien
gatcattcccagaaagcgccgatcc

SEQ ID NO: 5269634 - DNA, 25 bp, Homo sapien
tgtgtgctcctaattagcgctgctg

SEQ ID NO: 5269635 - DNA, 25 bp, Homo sapien
acatgagcactcgatgggagctgtc

SEQ ID NO: 5269636 - DNA, 25 bp, Homo sapien
acagtcgaggctgttctgtccacca

SEQ ID NO: 5269637 - DNA, 25 bp, Homo sapien
ggctacagtcgaggctgttctgtcc

SEQ ID NO: 5269638 - DNA, 25 bp, Homo sapien
ctacagtcgaggctgttctgtccac

SEQ ID NO: 5269639 - DNA, 25 bp, Homo sapien
cggctacagtcgaggctgttctgtc

SEQ ID NO: 5269640 - DNA, 25 bp, Homo sapien
ctgcagacagcacgacacctgtggg

SEQ ID NO: 5269641 - DNA, 25 bp, Homo sapien
tcttgcactaaggtgggagggcaca

SEQ ID NO: 5269642 - DNA, 25 bp, Homo sapien
tccaggtcctgcatacaaagtccca

SEQ ID NO: 5269643 - DNA, 25 bp, Homo sapien
caggcaacaccgcacctatgggtga

SEQ ID NO: 5269644 - DNA, 25 bp, Homo sapien
agacatctgcattgacacaaactaa

SEQ ID NO: 5269645 - DNA, 25 bp, Homo sapien
attgacacaaactaaggtcccagag

SEQ ID NO: 5269646 - DNA, 25 bp, Homo sapien
tcagacatctgcattgacacaaact

SEQ ID NO: 5269647 - DNA, 25 bp, Homo sapien
gacacaaactaaggtcccagagctc

SEQ ID NO: 5269648 - DNA, 25 bp, Homo sapien
cgtcagcacacctctgtctgcaggg

SEQ ID NO: 5269649 - DNA, 25 bp, Homo sapien
gcagggctagcgctaatatgccaga

SEQ ID NO: 5269650 - DNA, 25 bp, Homo sapien
tatgccagatttcacccgcttgatg

SEQ ID NO: 5269651 - DNA, 25 bp, Homo sapien
tctgttgtagcaggtcgtcagcaca

SEQ ID NO: 5269652 - DNA, 25 bp, Homo sapien
cccagagccatgtgagctgaaccac

SEQ ID NO: 5269653 - DNA, 25 bp, Homo sapien
tctcccaggagtagagcgggccgcc

SEQ ID NO: 5269654 - DNA, 25 bp, Homo sapien
gagaagccagatatggccggcttgc

SEQ ID NO: 5269655 - DNA, 25 bp, Homo sapien
gtgagctgaaccacaatctcccagg

SEQ ID NO: 5269656 - DNA, 25 bp, Homo sapien
aacagggatgcgcttaaatgtacta

SEQ ID NO: 5269657 - DNA, 25 bp, Homo sapien
gaaaacagggatgcgcttaaatgta

SEQ ID NO: 5269658 - DNA, 25 bp, Homo sapien
cagggatgcgcttaaatgtactact

SEQ ID NO: 5269659 - DNA, 25 bp, Homo sapien
actgaaaacagggatgcgcttaaat

SEQ ID NO: 5269660 - DNA, 25 bp, Homo sapien
tttccttcttgtgaagacacaaggc

SEQ ID NO: 5269661 - DNA, 25 bp, Homo sapien
gatgcacgcatctcctctaggttca

SEQ ID NO: 5269662 - DNA, 25 bp, Homo sapien
ttccagccagcgagcacgcacaggg

SEQ ID NO: 5269663 - DNA, 25 bp, Homo sapien
aggcacagctttccaatgggactca

SEQ ID NO: 5269664 - DNA, 25 bp, Homo sapien
aggcagatgacaggagacaccgtcc

SEQ ID NO: 5269665 - DNA, 25 bp, Homo sapien
gacaccgtccctgccacgtcatcca

SEQ ID NO: 5269666 - DNA, 25 bp, Homo sapien
agatgacaggagacaccgtccctgc

SEQ ID NO: 5269667 - DNA, 25 bp, Homo sapien
acggccaccaggcagatgacaggag

SEQ ID NO: 5269668 - DNA, 25 bp, Homo sapien
ctgcgtcccaaccaaaaaccgaatg

SEQ ID NO: 5269669 - DNA, 25 bp, Homo sapien
ctgtttctgcagtttgaggtgttaa

SEQ ID NO: 5269670 - DNA, 25 bp, Homo sapien
cagtttgaggtgttaaggcacgtgc

SEQ ID NO: 5269671 - DNA, 25 bp, Homo sapien
tatcatatttaagagactgcgtccc

SEQ ID NO: 5269672 - DNA, 25 bp, Homo sapien
gaccaaatctgcacctgattggtgt

SEQ ID NO: 5269673 - DNA, 25 bp, Homo sapien
gaaaagaccaaatctgcacctgatt

SEQ ID NO: 5269674 - DNA, 25 bp, Homo sapien
aaaagaccaaatctgcacctgattg

SEQ ID NO: 5269675 - DNA, 25 bp, Homo sapien
aaatctgcacctgattggtgtacct

SEQ ID NO: 5269676 - DNA, 25 bp, Homo sapien
aaagtgagtgataacttccaggtca

SEQ ID NO: 5269677 - DNA, 25 bp, Homo sapien
agtcatgttcgggacaggatgtgaa

SEQ ID NO: 5269678 - DNA, 25 bp, Homo sapien
aggtgggcgtgtaaataaatgagtc

SEQ ID NO: 5269679 - DNA, 25 bp, Homo sapien
caggtcagaagtcatgttcgggaca

SEQ ID NO: 5269680 - DNA, 25 bp, Homo sapien
ctggaactccagcccgtagatcact

SEQ ID NO: 5269681 - DNA, 25 bp, Homo sapien
agatcactggtgcatcgtcctccat

SEQ ID NO: 5269682 - DNA, 25 bp, Homo sapien
gaactccagcccgtagatcactggt

SEQ ID NO: 5269683 - DNA, 25 bp, Homo sapien
agcccgtagatcactggtgcatcgt

SEQ ID NO: 5269684 - DNA, 25 bp, Homo sapien
gcagcaaacgactccaaactggaag

SEQ ID NO: 5269685 - DNA, 25 bp, Homo sapien
cgcgtccccacctcgcgggcgtgtt

SEQ ID NO: 5269686 - DNA, 25 bp, Homo sapien
tcacacgctaaggacctcgctacgg

SEQ ID NO: 5269687 - DNA, 25 bp, Homo sapien
cgcgggcgtgttcccagcgcccatt

SEQ ID NO: 5269688 - DNA, 25 bp, Homo sapien
ttatacaagtactgcaggtgcatgg

SEQ ID NO: 5269689 - DNA, 25 bp, Homo sapien
tggagtctccgttcccatttccaag

SEQ ID NO: 5269690 - DNA, 25 bp, Homo sapien
tgcctattgcctctgagtgacagaa

SEQ ID NO: 5269691 - DNA, 25 bp, Homo sapien
tcctggttgcctgtgcgcgttcaca

SEQ ID NO: 5269692 - DNA, 25 bp, Homo sapien
ggatgttacagcgtgcacacagctc

SEQ ID NO: 5269693 - DNA, 25 bp, Homo sapien
tggcaagtgactcccacagtggact

SEQ ID NO: 5269694 - DNA, 25 bp, Homo sapien
gctttggcatatcccgtggcctcgg

SEQ ID NO: 5269695 - DNA, 25 bp, Homo sapien
cgccagcataggagcaggcttcaca

SEQ ID NO: 5269696 - DNA, 25 bp, Homo sapien
gaattatacagtagcccagataggg

SEQ ID NO: 5269697 - DNA, 25 bp, Homo sapien
ctcagtagagatccaggcagagtcc

SEQ ID NO: 5269698 - DNA, 25 bp, Homo sapien
tatggaaaacatggaggtgcccgaa

SEQ ID NO: 5269699 - DNA, 25 bp, Homo sapien
ggctgttaaccgaaaactctggaga

SEQ ID NO: 5269700 - DNA, 25 bp, Homo sapien
gcagcgtgagggaatagtgccacca

SEQ ID NO: 5269701 - DNA, 25 bp, Homo sapien
tgataaccgagtgtctacaaggaga

SEQ ID NO: 5269702 - DNA, 25 bp, Homo sapien
cagcttttaggttcccattgaggga

SEQ ID NO: 5269703 - DNA, 25 bp, Homo sapien
ttttgcgtctacctgggagagccca

SEQ ID NO: 5269704 - DNA, 25 bp, Homo sapien
gagggtggttttacgcacacagcca

SEQ ID NO: 5269705 - DNA, 25 bp, Homo sapien
ccaaaggtcagagcccaaggtgatc

SEQ ID NO: 5269706 - DNA, 25 bp, Homo sapien
tcaccgctatggctgagaggacctc

SEQ ID NO: 5269707 - DNA, 25 bp, Homo sapien
taggcctcggtgtcctggaccaaag

SEQ ID NO: 5269708 - DNA, 25 bp, Homo sapien
gtaatggcttccgtgccaccaaggt

SEQ ID NO: 5269709 - DNA, 25 bp, Homo sapien
atggactgcaggacactccgccttg

SEQ ID NO: 5269710 - DNA, 25 bp, Homo sapien
caccacagagaagaatcattcttgc

SEQ ID NO: 5269711 - DNA, 25 bp, Homo sapien
gaggaatcccaaaactgtgacagag

SEQ ID NO: 5269712 - DNA, 25 bp, Homo sapien
ctcttaaggtcggagctccagggcg

SEQ ID NO: 5269713 - DNA, 25 bp, Homo sapien
tgtgcacaggtgacatctcaaaagg

SEQ ID NO: 5269714 - DNA, 25 bp, Homo sapien
cagtattaaccttgacagcgcccaa

SEQ ID NO: 5269715 - DNA, 25 bp, Homo sapien
tctgccacggaaacactgaccatgt

SEQ ID NO: 5269716 - DNA, 25 bp, Homo sapien
gtaaaagacagtgctcttaccatta

SEQ ID NO: 5269717 - DNA, 25 bp, Homo sapien
gtggattcgcacagagtaaaagaca

SEQ ID NO: 5269718 - DNA, 25 bp, Homo sapien
tggcacaggtatgattcactgcaga

SEQ ID NO: 5269719 - DNA, 25 bp, Homo sapien
tggtccctgttttctcgtggattcg

SEQ ID NO: 5269720 - DNA, 25 bp, Homo sapien
caaatttcccagaggcgttcaagcc

SEQ ID NO: 5269721 - DNA, 25 bp, Homo sapien
cacagaaattagatggactacaggg

SEQ ID NO: 5269722 - DNA, 25 bp, Homo sapien
tcaagacgttgagaaagtaacacag

SEQ ID NO: 5269723 - DNA, 25 bp, Homo sapien
cttactgagttggaaagctccctag

SEQ ID NO: 5269724 - DNA, 25 bp, Homo sapien
ggagtcctcacggagcatgcagaag

SEQ ID NO: 5269725 - DNA, 25 bp, Homo sapien
caccatgtacgagctggagtcctca

SEQ ID NO: 5269726 - DNA, 25 bp, Homo sapien
gagagcgtgctcttcaacctgacca

SEQ ID NO: 5269727 - DNA, 25 bp, Homo sapien
gggacagcttcaacacacagtgcct

SEQ ID NO: 5269728 - DNA, 25 bp, Homo sapien
ctggaaaatgggaactcgctgagtt

SEQ ID NO: 5269729 - DNA, 25 bp, Homo sapien
tataacgtctgggacaattgtagct

SEQ ID NO: 5269730 - DNA, 25 bp, Homo sapien
tgctagaagaggaaaacggtgctgt

SEQ ID NO: 5269731 - DNA, 25 bp, Homo sapien
cggtgctgtgagtgtctataacgtc

SEQ ID NO: 5269732 - DNA, 25 bp, Homo sapien
tgatcacagaggagtcaactgctgg

SEQ ID NO: 5269733 - DNA, 25 bp, Homo sapien
gagtcattccgcgtttgccacgagg

SEQ ID NO: 5269734 - DNA, 25 bp, Homo sapien
gaatgaagaagccagtaaccctgat

SEQ ID NO: 5269735 - DNA, 25 bp, Homo sapien
tcgttaccgaatggccagggtgtgc

SEQ ID NO: 5269736 - DNA, 25 bp, Homo sapien
tgcagccccgtccacactcccctta

SEQ ID NO: 5269737 - DNA, 25 bp, Homo sapien
ccaggacagtgcagccccgtccaca

SEQ ID NO: 5269738 - DNA, 25 bp, Homo sapien
tcaaccccaggacagtgcagccccg

SEQ ID NO: 5269739 - DNA, 25 bp, Homo sapien
aaccccaggacagtgcagccccgtc

SEQ ID NO: 5269740 - DNA, 25 bp, Homo sapien
cgtgtgcagacatgacgccgagaac

SEQ ID NO: 5269741 - DNA, 25 bp, Homo sapien
tcttgcacccagcaccgagggtgag

SEQ ID NO: 5269742 - DNA, 25 bp, Homo sapien
cagttcttgagacgcccacctgtgt

SEQ ID NO: 5269743 - DNA, 25 bp, Homo sapien
cacagttgcagtacttgggctggag

SEQ ID NO: 5269744 - DNA, 25 bp, Homo sapien
gggatgcgacagcacccagaatgtc

SEQ ID NO: 5269745 - DNA, 25 bp, Homo sapien
tgtcctgccttgtgtggcacgtggg

SEQ ID NO: 5269746 - DNA, 25 bp, Homo sapien
cctgccttgtgtggcacgtgggacc

SEQ ID NO: 5269747 - DNA, 25 bp, Homo sapien
tccaggccctgattccggggatgcg

SEQ ID NO: 5269748 - DNA, 25 bp, Homo sapien
gtgtgggcagacagcgtgccagtgg

SEQ ID NO: 5269749 - DNA, 25 bp, Homo sapien
gtgggcagacagcgtgccagtggcc

SEQ ID NO: 5269750 - DNA, 25 bp, Homo sapien
tgggcagacagcgtgccagtggcca

SEQ ID NO: 5269751 - DNA, 25 bp, Homo sapien
tgtgggcagacagcgtgccagtggc

SEQ ID NO: 5269752 - DNA, 25 bp, Homo sapien
aaacactccaggagcgcctcagccc

SEQ ID NO: 5269753 - DNA, 25 bp, Homo sapien
gacagcagaggcgctaaacactcca

SEQ ID NO: 5269754 - DNA, 25 bp, Homo sapien
cagcagaggcgctaaacactccagg

SEQ ID NO: 5269755 - DNA, 25 bp, Homo sapien
ctaaacactccaggagcgcctcagc

SEQ ID NO: 5269756 - DNA, 25 bp, Homo sapien
tccagcacgcacaccgaggagtgga

SEQ ID NO: 5269757 - DNA, 25 bp, Homo sapien
ccaggagtggactgcggacccgtca
